United States Patent Application Publication US 2015/0376612 A1 - sequence listing, part 4

SEQ ID NO: 7820 - DNA, 1090 bp, Homo sapiens
caaggaaataaattctcccttagagcctccagaaggagctagccctgtcaaatcttgaccttaatccagtgaaactgatttcagacttttggccttgagaactatgagataatatgtttgtgttgttttaagccactaagcttgtagtaatttgttacagcagcaataggaaactaacataattacattcaatgcaaatggtctaaacatacaaattaaaagacatagactgactttaaataataatttttaaaacctcaactatatgttgtgtacaggaacctcatttcaaatataatgatataggctgagtgtagtggctcatgcttgtaatcccagtgctttgggaggctgaggtgggaggatcgcttgaggccaggagtttgagaccactctggacaacatagtgagaacctgtcccccaaaatccacaaacaaatatagtgatatagataaattaagcataaaaggataaacaataagagcttatgaaccaataatagtaagctggagtagctgtgttaataatggacaaagaagactccagagcaaagaaaatcaattgagacaaagagaaacattaaagaacaataacagggttaattcaccaagaagacataccagttctaagtgtgtttgcactaaacaacacagctttttaagataatgaagcaaaaactaacagggccgaagggagatgcagacaaattcatacttagagttgggtgtgtctcacccctatctccgtatttgatagaaccactagacagagaattaacagaatatagaaaaattgaacagcaccattaaccagtgggatccaattgatattatagatcacccaacaacagcaaggtacacattctttcaagtgcacatggaacatcaccaagacaaactatatcctaggcaataaaactgaccttaacacacttaaatgaattgaaatcatacaatgtatgatctcagaccatgacagaaccaaactagttatcagtaatagaaagataacaggaaaatctggccaggtgtggtggctcttggctcacgcctgtaatcccagcactttgggaagccaaggctgacagct

SEQ ID NO: 7821 - DNA, 1026 bp, Homo sapiens
actcaccataatgtagaatcagtgggagccctgagcttgttttcctgcagctagacagtcctatctgggggtgatgggagacagtgacaaatcaggcattcgattcttataaggagtgcacaacctagatcctttgcatgcatcagttacaatagggttcgcactcctgtgagaatataatgctgccactgatctgacaggagagagagcttaggtggtaatgcaggtgatgcagagtggctgtaaatagagatgaagctttgcttgctcgcctgctgcttacctcctgctgtacagcccagttcctgacaggccacgggctggtactggttcatggttcggggtggggacccctgatgtagggtatgggaggtcaaggtgttcctactttgtcttgtgatactttgtgcttaatgggttagttacctgtataaacatctttagcgctaccagtgaaatcatccttgtgaccagctccctaaagcactgcctgtccaacagcaaaggttggatatggggaataaaacagtgctggactatggcatttccttaggttttccctggtattggttatgatggaatatgggtacttgtgcagctgtggtacatgaggggacaggttgattcattctgtttacagagaccaaagaaaacagagggacttttcccagttggtgatatggagcaagtgccatcagcaggcagactcgtgcagatcaccgtgacagagggatatgatttggtaaagttacttttggaaatttacaaaaatccttagtttgggagtacctgcaggaggaatggaattttgcttcattctctacctccaaacctcctggctttatgtagcagtggcattccgcctcagtgttccttattgttagtcttaatctccaagtcacattactgtgtgtctcaaatacccggcaatttgaatactaaatttaacaggatgaaagaaacagtggttttagtttccctagacagcagttcacgtataatttttttccctttctcctgagaagg

SEQ ID NO: 7822 - DNA, 1033 bp, Homo sapiens
aacataaactaattcttttaaatacattagtttcttaaattacgtagaatacaaaatttggagttacaaaccaaaattacagttatgctagtgtttagttttttttaatgtgttcatctcaaatcatgtagaaaaccaaaagtatcgtcacagactattattacaataacattagcttttataattgcccatgtatttaccctttattgagatctttatttcttcatgtggcttcaagttactgtctagtctcctttcatttcatcctgcaggactaggacttctttgagcatttcttgtagggcaggtctagtggtaatgaactttcccagcttttatctaggaatgtctaaatttcttcctcactttttaaggacagttttgccagatataggattcttgggtcgacaattttttttttagcactttaactatatcatccaattctttctgatgagaaatctgctgataatcttattaaaaatatcttgtatgtggcaaatcacttctctcttgctgatttcaggattctctctttggatttagaaagtttgattaaaggctgggcacggtggctcacgtctgtaatcccagcactttgggaggctgaggcaggcggatcacgaggtcaggagatcaagaccatcctggctaacactgtgaaaccctgtctcgactgaaaatacaaaaaattagctgggcgtggtggtgggcgcctgtagtcccagctactcgggaggctgaggcaggagaatggcatgaacccgggagacagagcttgcagtgagccgagatcgtgccactgcactccagcctgcgtgacagagcgagactccatcttaaaaaaaaaaaaaaaagaaacttcgattgattaaaatgtgtcttaatgtggctctctttaagttcatctacttggagttcattgagctgcttgggtgtttatattcatgtctcatagaacttgggaagcttttaagccattatttcttcaaatattttctcttcctatttcttgcccattagaattcccaca

SEQ ID NO: 7823 - DNA, 1060 bp, Homo sapiens
gtccttgtgcaagtatttctataaggtacattcctggaaatggaattgcattctagtcttttatataattatttttcaaaatgtaccaaaattcactttcttaaaatagctttaatttttattatatacagataatctttgccttattttcatttttgttgacataattcctccaggctcttaaaggtaagatttaagatagtagctaaagaatttagatataggtcttgtcactggaacaatttcttgaaacttagaaatttaaattgcttatgatgtctttggtactgtaactgcatattgcctttcaaattactattaatttatctcataaattattttcagatttttttttcctttattttgaccctgacccttttgcccttggtctatctacttttctttttctttctttttttttttctttttccttgtcttgtcttgtcttttctttcaactggagtgcaatgatgcaaacacgactcactgccgccttgacctcctggcctcaagcaattctcccacctcagcttcctgaatagtttggactacaggtgggcgccgctgcactgggtaatttttaaaatatttttgtagggacgaggtcttactatgttgcccagcatggtctttaactccttggctcaagcagtcctcccaccttggcctcccagagttttgggattataggtgtgagccactgcgcctggcctatctgaccattctttagagcttttgcccctcctttactctttatacaaacccaggcttagaaaagaaaaaagcaaaaaaattcagcctgtccctgtttttatatccagccctttgggatcccaaatgattattttataattgactgggtcagttttcatatcattttatgtttcttattgacttatagccttgattcaatctatgtccgtttattctcaattcagcacatttttagcttctatcctgtgttcctgtcataagggacactatattatctcattttcctatactgtgtactcaaatggctgaatacttaatctttctatcagcacctaggacagtgctc

SEQ ID NO: 7824 - DNA, 1009 bp, Homo sapiens
tttggataggatcaatgagagaatgccacctcggaaagatgctgtacagcaagatggtttcaattctctgaacaccgcacatgccactgagaaccacgggacgggcaaccatactgcccagtgacccactacttcccagggactctcacatctcgggccccaaatggacagatcacccgaggagctggaggggtcggccaagctgactgtaaatttcacagtctctctgaagaaaccattgtgcttctgagaccctagcccccttcctggatggaggcttgagggccctgggacatgtgctatctgataagattgggtcatcgctgccaaggtggagagcagtgagcaaggggcttggggcaatttccagtggagggcatccacacctccattttatgcttgtggttcacacatttaagtttacaaatcagatttcttttccccttcagtagaattagattttgtttttcaatcatgatttcaaatgcaatcctaagagctaatgtggacttttctttttccatgaaatgtctttaaaggatgaattagcatggtcttaaaatacatttctgaggttactagctgtattttgaattgtgagcaaaatgccgagaaacccagttggcatttatacaaaatgttgacctcaggtctatagttcttaaatgtggctaattctgtaacatagtcttggtattttttaattatgaatgcatatcctatttccaggcaggctctcttacttgaacacaaatccaaaaactaatttagagtcttttttgcccagatcttttaagacttacaccccagagatttaagaagaaaacctctaaatttcaaaattatgaagaattacagaattactcatttaaggtactttaaaagaagtttgtacattgtcaaagtaaattttaattcaaatcatgtctgtaaaacttgacgtattttgtgtatgcatgttttcattttgcaaatatttaatatatagacctatgatgtacaggtacga

SEQ ID NO: 7825 - DNA, 1030 bp, Homo sapiens
accaataatgtatttcttatttataatatgacctatgtgtctatatcatgaaataattagaatttatgcctgtaagacctcacttctcttccttaatgtctctttaattggtagatgagtttgaaaagatgctcagtagtctttttctgaggcaaatttgagttcatgataaactctgtcagtataaatggaattttttaaggctatagatgttagtatctgtaggtatttggaacatcagtactagaatagaaaggaagttactggtagacaggagaagtcctttcaggtcccccacaaagaacagagccacagaactgttctacttatagtaattcatcaagtttactgcccttaaatttcactgtagtcatatcagctcttgcagcttatgttttgccttataaattacaagtaacaggtaaagcattgctgaccccttctagtttatgtcttagggaaccaactggtaatgagtattgttctcactgacatgaaagaaaagacttttctgtttgcttttctgctacaattctattataattttaccctagagcattttcctgtgattgtgatggatgtgatataataaacataatggaaaattctaaggccatcaaattactgattcaagatgggtaattaatactggagtgcatttgcatgggtgctgaggtgtctgtgtttacagtaggtttatgtgttctgtgctctgagtgatgttgtcatagtgctgtgtgtaaactgtgctgtgtcaggaattgggggtttggatggggctctctaatttgggtactatttatgttaaattttaaatgatgatgtagtatgggatactgtgatattttaagtgatcattgccttttctgctgtacaatatgacccttctcatctctctcattcattttgcatgcctctgctcacttctgtacagccacagttgaggctattgaggctgaaaaaggtatgatcagagtccttgtgctgggcagagatctgtggtgtgtgggtgggcatcagagaatgtcct

SEQ ID NO: 7826 - DNA, 1031 bp, Homo sapiens
ggagcagctcatatcataatgtctgaaatatttatttattcatctgtctaattcacccttttcttttaaaagccccagtttcagaatgtgaatcagggatattcctgttactaaaatggaaatgtaattccaagtttcttttttaattttttaaatttatgtcattgtattggactatgcttatatttaaaactacttaatttagagttaactacctgcttaggccccagaacattacttatgcccttcagttaccaaaagatttgtgcaaggttttgtaccctggtaaatgatgccaaagtttgttttctgtggtgtttgtcaaatgttctatgtataattaactgtctgtaacatgctgtttccttcctctgcagatgtagctgctttcctaaatctgtctgtctttctttaggttagctgtatgtctgtaaaagtatgttcaattaaattactccatcagacacttgtctgtcttgcaatgtagaagcagctttgtagcaccttgttttgaggtttgctgcatttgttgctgcactttgtgcattctgaacatgaatgtaacattagatattaagtcattgttataaggggttgaatttaaatcctgtaagtcaaaattgaaagggtgttattaagtgtgcctttattttgcatgaaaataaaaagaattatacgtaaagcattcctgtaatctggctcattgaatattttatacttaaaaaactttttttggcgtaaatatttgtgtaaatactgggttaactttttaaaagcccattacagattaaatagaagagagtgatgtgagtattagtgaccatacacagtaattcagtctagatttcttttcctgtggttggaaagcaaaaatacatgatgtggaaaagcctgaatttcttgtagtcacttttgacagccctctaagggtcattgtctattaaaatagcaacagatctgatgttttccttagtcataattaggtttctttttggtgttgtaattagtgacttttttagagggaaaaaaat

SEQ ID NO: 7827 - DNA, 1447 bp, Homo sapiens
aaataagcatcgagaacagattatttccctgattttattacttttttcccttttgaataaaatgaaggatatgaatagttacatgtttagatataccttaatttattaacaataaagttttgttgggtgtggtggctcacacctgtaatcgcagcacaggttggccaagtcaggcagattgcttgaacctgggagttcgagaccagccagggaaacatggtgaaaccctgtctccacaaaaaaaaaaaaaaaaacttagctgggcctggtggcatgtgcctgtagtcccagctgctcaagagactgaggtaggaggatttcttgagcccagaaggtcgaggctgcagtgagcagtaattgtgccattgcactccaacctgggtgacagtgagaccttgtctctaaaaataaaaaagtttgttttttctttttgcatatgattatataaaccatgcttatttccatatcaaatatttcttccttttttaagcaaataagtaaaatgtgagtctctttcttatgttaaatctatttagagaatagcatctgctataatgtttaataatatttttatttgaaaaattacatttgcattgaattagttcagataataagcacttaccatatgtaaggcaatattcataatcaatgaaacaaacataaaacatggaccttcccttcatgggcagcatggcataatgcttaagatcagaggatcagaatcctatctccatcacttagaagttttgtggttttggacaagttacttgagatctttgcttcagtttctcatttgtaaaataaagatgatattacatacttcatagtgttgtttgaggaataaattaggggaattatatagtgcttcacatattgtaagtacttaataaatgttagctgctgttattttgacagtattatttactaatacgcatctgtagaccagtgtgctaattgtttttatattgggcagtctgtaaatccaaagtaattaaatagattgtttgactcattcattcaacaaatatttattgctcttctcctatttgctaggtactcttctgggagtggagaatcaaaagtgaataagatgacaaaatctgtgattttgtggtgcttatattttagtaagggacaaagaaagataatagaggatggtaagggtagtagaggaaaaggagcaaagatcaagcagcttcattaaacaaaagtacaagataaattcactagaaaaattttcttttgcagtgtgtcttatatttatgggttctgaagattctatacccaagcacattatttcttctgagaggcaaccatgaatgcagacaccttactgaatattttacctttaagcaggaatgtgagtactgccagaagaaatgttttcacttcctcagtattcttttggacttaagtgggtagtaagagttttgaagactttacagtg

SEQ ID NO: 7828 - DNA, 1066 bp, Homo sapiens
tttctttattctttagtcattaagaaactaccccaagtttttgagtaggttaatttactactttgttcagtcaaagaggaagaagagatttttctagtaaatgataagaacttgaactagtattgcaacagtggagatttaagaaaattgaatttgaagaatcaataggacttagagttcagaaagagaacaatgacattaagtgtgagtgatagagaatggtgataccttaacaggtgtaagccaggaaggggagccaattttgagggaaaggtatatttaaaaaccaccacaaattaaaagagacccaatggataccttgaaattttgaagacaatgctgttggatttattgaatctttccttaaagcatgtggccaatccatacttctactcctggcaagcaaatggttatatcattcttcatgatgaggcttttttttttttttttttttaaccctcaagacaggatcttgctctgtcacccaggctgtagtgcagcgccatgatcatagctcactgcaggttcaaacttctgggctcaagcgatcccccaactcagcctcccaagtagctgggactacaggcacacaccaccatgcctggctaattttgtttattttttatggagacagaggtctcactatgttgcccagattggtctcaaattcctgggctccagtgactgtcctgccttggcctcccaaagtgctgcagttacaggtgtgagccaccacgcccagccatgatcagccttttgatgtctccttttgtcaaaagaaaattgtccttgtgttggtataaagacatatgctacaggagcagcattctgaagacttcaatttcaactatggctctacttcttactagtgaaacccctggagaagcaacttaatgtctctgaacctgttatctatcatttgtgaaatgggagataaaacttgcctgaccctaaccccagcactttgggaggtggaggcgggcggatcacttgaggtcatatgttcgagaccagcctggccaacatggtgaaaccccgtctctattaaaaatatactaattagccg

SEQ ID NO: 7829 - DNA, 1090 bp, Homo sapiens
attaaattcagttctgagcctactccagctgctggctcaagtcaaattcttcccctgtttgaaagttgatctaacccacctgattaagcaagatggtatatacccttttaattatattctattaagcattctttagctatgtaggaaataagaaagtggaaaaaaattaggaaaaatatctaaccgtatctgcatgtgtgctttcttaccacatcagcaaagctggtataggtaattgaagcacaaaatcctgaatttatatatattgctttccctcctccccacaaagtttacttgacctgaattgcccagatacctccttttttccccagatacttaaaaaatgtacgttttgctttgtataccaggttctagatttgtaaagctggattgtctcttgagattatcaagactgttagtattaataaaaaattcacctttttacttagagagcattgtcagtattgggcatatgttcattttagcacctacaatgtgagtcattttcttaacattattttatttcatgggttatagtaacctcaaattatcagactttcagattgaaccaaaatgctgaatttatgtgttttaattttttttaagctaaagtatttctgattgacaacgttagaattcatttggattctgttgccagttgccctgcttataaatctgaagtcatttggctaaagtgttttctagtagctttcctttaggaggattactttttgtttatttatttatttatttatttatttatttttgagatggagtttcgctcttcttgcctagactggagtgcaatggcgcaatctcggctcactgcaacctccacctcccgggttcaaacgattctcctgcctcaacctcccaagtagctgggattacaggcatgtgccaccacgcccggctaattttgtatttttagtagagacgacatttctccatgttggtcaggctggtctcgatctcctgacctcaggtgatccacccaccctggcctcccaaaatgctgggattataggcatgagccaccgtgcctagccagattacttattttcagataacccatatagccttggtgtga

SEQ ID NO: 7830 - DNA, 1054 bp, Homo sapiens
agtggatttaaaaattatggtttattccaatagtaaaacactatatagtaatgaaaatgaattctgcagctgcatgcagcaacttgggctaatctcataaaacatcacattgattgaaaaaagcaagtcatagaagactatatgaatcatgattccatttatatataaatcaaaaccaggcaaaactgaagaacatattgttcaggggtacatgcatgtgataagtctgtagagaaaaaggaagtgcttttcacaaaattcaggatagttgtgttctgtagaaggtggagggtagatttcatgtaagtatgtaatcagttggagaggtttaaactcgtggtttatttttctatttcttaaattgggtggtgagcacatgggtgtgtgggtgtttattattctttggctatgtatgtgtatatgttatgtttattctctttttatgtgactattttaattataaaatatagaaaagcactgcaaccattctaggaagcacactaaagtgtaaagaggaaagctgaaaattgcctgaattctagcatggagattgtaatttttttctctctctctctcttttttttaatgagacagagttttgctctatcacccaggctggagtgcagtggcatgatctcggctcactgcaacctctacctcctaggttcaaacaattctcgtgcctcagcctcccgaatagctgggattacaggtgtgtgccaccacgcccagctaacagattgtcatttctttttatgcttcccgtctggtctgtatttctggtagtaagtctttttgcccactgtttttgtaaaaagattacttttttccagatccctaaattgcccctctatctgtagtatcttcctacttcatttgtttttaaacctaagaataccctggaatgctatattgaagttagtatcttctcataatcctgaagtggctcccacttgtttcttaaatcacttaaaaatgcatgattacaaacattttaaaacttaattttatatttctttcctttccttccctgggcattctgcatttcaactgt

SEQ ID NO: 7831 - DNA, 1048 bp, Homo sapiens
agtcctttgactagtcgggactgtgctatactcttcattgatctgggtgggactctggagaactggctgccacattcttgttatatttcattttcctgagggacaaattgttacttagtataaatcagtatcattatataagccagaaagatgaagaaagtcaaccgctagacttaccctctgagacacacaagtacagaagggaaattgtcaatttgttgggctgaggaaatattttgggactctttcagagagacagttgcttgtggtggatagataaatgggcttggggatgtatttatcaaaggctatattttgggtcttcataactctggggatgtgttagaattctggtactttcctcattacatcactgcctgatctaaccaagagatttattttccttcactgcttcatttgttgtgttgggagtgtattaaaatttgatttttttttcccctaagggcttttcagttcctcagtgctatatagatgttaaataattaggctctagtttgaacacacttcacgttttagatggcgttgtttctattcttttaattattgtatacttgatttgaaaattatagacttgtaatgcagatagactaatttggaagtgtggatgagctgaacttgattttaatagttaagaagtttaaattgttagaatagccagttttcaagagctattccctcatccaggatggagagcttcattttctgagagaagggaaaggatgataaacatatgaaggagtaaacttgaaatgagccatcagcacctgggtcctcctgtacgatgtctcttttgttccccactttaaaactacttttatagggctgggagcagtggctatgcctgtaatcccagtgctttgggatgctaagatgggaggatcacttgaagccagcagtgtgagaccagcctaggcaacatagcaagaccccatctctacaaagaaaaaaaaattagtgggacatggtcgcacatacctgtagactcagctactctggaggctgaagtgggaggatcacttgagcccag

SEQ ID NO: 7832 - DNA, 1029 bp, Homo sapiens
tgttgaattgggcaagttaatgtctttaagcctctctttacttttctgtaaaatggaactattaatagctatctgataggactgttgtgaatattaaataaaggacataagtatcgtgtttagcacatacctgactgtagctactatttcatttcatgtagtcatattatgacggatacgatataaaacagagagtaataaaaatagagaataatgtgacagtaggctgtataatcaaatactttaattgggacatgtagattataaatagtctgggaatttacagaagggaaagaacagtcttatgcaaccatttaatattcctgtacctcagtttttccattggacatgctgtagacaatgctaggtgatctcccagagaatgattaagatgttaaagcatttttgtgtttttagatggtgcatatgatggtgagaaggaagggagaatgaggaattgttgatgttggcaaatttaacacttaacatttaaaaatttttccttatgtagatggacatggcagccttataggaaaacttaaagctggagatgtggtgatttccttccagggaacatacttgctttggtattactctctgttgcctcactggcattttaattagttgaaaactaaagttggtcaatggattgcctctgattgtgagcccttggatataatctggagattaaatgatttgtaacccaaattatctctctgatcctctggcaaaaatgaaacaaacaaacaaacagggcaggagaagatttagttctcttggactgcatgttaaggacatgtggtttactcgccatcagtgtttctctggatggaacatctttactcagaacagatcttagactgctaacatggccttcccacctttaagcacgttttcataagcatattcatggaaaacaccttttaaaaagtgctttattcacaatgtccaaaaggaactttcagttcctagtttgtgtgtgcttacttggtgatttgttttgtgttagcctgatactggaaagtttgt

SEQ ID NO: 7833 - DNA, 1031 bp, Homo sapiens
gccgggcctggtggcgcgcgcctgcaatcccagctactcggaaagctgaggcaggagaatcgcttgaaccccggaggggaaggttgcagtaagccgagatcgcaccattgcactccagtctgggcgacagagcgagactccgtctcaaaaaaaaaaaaaaaaatacatatatatatatatatatatatatatatatatatatggcttttaaaaatccttcttcagctggtcttaatgtggttagtcactgaacccatttatttgatatatgttagagtaaaacctaatttgtaatgtcagcagctaaacattaaagtagaagtgcttttctgatgcaagataaagctttgtgtggtggttgagtccaaaagatttctgcatgaatccaataacaagctctactgaactcctgttatgtgtaaagtactgtgtaaggcattgcagtgaaaaaagattaattcatttagccacttaatatttattgagacctattttgtgtctgattgctaagccttcaggatacaaatacaggtagaactcgatctttgccttggaattgctcagaccctgtgagggcagactgatagagaaaaaaatacttacaatgtaataagcacaatatatgaacatgaaagtatgagacaaggttctgcccctgaagagtttatatagtagttgacaggacaaagaatttgtttgtttgtttgttttgcaacagggtctcactgtgttacttaggctggagtgcagtggcaagatcatggctcactgcaacttcaacctcctgggctccagccatccttgtacctctgtctcctgaacagagctgagactacaggtgagggccaccatgcccagctgatttatttttagagatggggtcttgctatgttgccaggctggtctcaaactcctgggctcaagtgatactcctgcctcagcctcccaaagtaagaattttcttttctctttttttgagacagggttttgctctgttgcccaggctggaatgcagtggtgtcatcacagct

SEQ ID NO: 7834 - DNA, 1032 bp, Homo sapiens
ctcaggagtttgaggctgcagttaactataattgcaccactgcactccagcctgggcaacaaagggagaccctgtctcggaaaaaggaaaaaagttactaattctttaaaaacatatataaaatttgtcctgcccaaaaggagagtgaaaaatataaactttagtctttgttttattttatgtttgctgagaaaaatgctgtactttatttatttatttattatttccataggtttctgggggaacaggtggcatttggtgacatgactaagttctttagtgatgatttgtgagatttaggtgcacccatcacctgagcagtatccgctgaacccaatttgtagtcttttatccctcaccctcctcccagcctttcccccaagtccccaaagtccattgtatcattcttatggctttgcatcctcatagcttagctcccacatctgaaagagaacatgatatttggttttccatgccgagttatttcacttagaataatagtcttacttccatcgaggttgctgggaatgccattaatttattccttattatggctgaggtggtattcctcatatatatatatgtatgtatatcacagtttctttatccgctcattgattgatgggcatttgggctggttccatatttttgtaattgtaatttgtttgagttcctcatagattctggataatagccctttgtcagatgtatagactgtgaagatttcctcccactctgtggttgtctgtatactctgctgattgttcctcttcctgtgcagaagctctttagttgagtctcacctatttgtttctgttgcatttgcttttgtgttcttggtcatgaagtctttgcctaagccagtgtctagacgggtttttccaatgttatcttctagaacttttatggtttcaggtcatagatttatgtccttgatccatcttgagttgatttttgtgtaagatgagagttgaggatccagtttcattctcccgcatgtggcttgccaattatcccagcaccatttgttga

SEQ ID NO: 7835 - DNA, 1026 bp, Homo sapiens
tttgggcctgtgcctctgcttccaccacagaagtcagcagctctacctttctcttttctcctctttatctaataattgtctcctcttcaaatttgggaaatgaacttaatcaaagatttgttgtgtttttttgtttgtttgttttcgaaatgtggcctcagtgtgtttgcccaggctgatcttaaactcctgggctcacatgatcctccctctcagcctcctgagtagctgggactacaggcatgtgccactacacccagctaagttaatgctaatgtgtagtttatctgcttcaattttgaagggtaggatatatatagttatgtgtgtgtgtgtgtgtgtgtgtgtgtgtggtgggggggtagtgtttgtgtgtgtgtgtatatatatttatatattcctagtccattgctgctacaacaaactaccactatgtcagggcataaaacaaatttattacactcctgtaggtcagagtatgatgtggatctcactgggctaaaatctaggtggtggaaaggctaccttcatctctagaggttctaggggatcttttttctcgccttttccacattctggagtctgcctgcattttttggctttgggctcttctccactgtcaccattagcaaccttgcatcccatggacctgtcttctatggccacatgtctctgtggctctttccttcccccttctcttccactgttaaggactcatgtgcttacttagtcctgaatggagacaccgtcatcatccacatagcccactgtcgtaatccatacaggctgctacaaggaaatgcattagaccaggtagcttataaacaatagaactttgtttctcacagtcctggaggctgagaagtgcaagatcaaggtgccggcagtcttggtgtctggtgaaggcctgctttctcatagaggcttccttcttgctgtgtcttcacatggggagaggaacaaacaagctcccttgtgcctttaataaggtgctaatcccagtcatgagggcagagtctcatgtaa

SEQ ID NO: 7836 - DNA, 1050 bp, Homo sapiens
tattatctgtagtttacataagatgaaatagagcctcccagcagttaagtaacttgtgtgaagatgggacccttgttcctaatggttctagaacctttatccttagtgataataagtaagtacatgaattgcctgaagaagtggtcagagtttatcatagaaaatctagatagtactcagtgtgtggaaaaatgtacacgctcttgcatttatggaaatgataatgttcactatttctgatattctattaactatcttttttttaaactatcttttaaattaactaaaataaaatacaaattaccaaaaaaaaaaaagaaagaaagaaaaaggccagacgcagtggctcatgcctgtaatcccagcactttaggaggctgaagtgggcagatcacctgaggttgggagtttgagaccagcctgaccaacatgcagaaaccccgtctctactaaaaatgcaaaattagctgggtgaggtggctcatgcctataacctcagctacttaggaggctgagacaggagaattgcttcaacccgggaggcggaggttgtggtgagtcgagatcccgccattgcactccagcctgggcaacaagagcgaaattccatctcaaaaaaaaaaaaaaaaaaaagcaaaaaataagccatattgattaggaagtgtgggatgacagataccttggttttttcatttttatttagttttttctagagctacagatttcatactttggcccaggaagactcctaaaatataaagtaaaaggtaatacagattttaaagtcgtgccattgtaatgtctgtaatgtcagaaaactaaataacattcaaattttgaacatgtaatgctactattagtaaaaataagtgttattaatgtaaagttgtgtaaggattactaaatcttgtatacttgaaatgattgaatagttcatagaagtcatttgtttctcttttatttaagatgtagcaagtttctaattttaaagacatattaagagatgcctttacttttttttatttttagttattatggatacataatagt

SEQ ID NO: 7837 - DNA, 1046 bp, Homo sapiens
gtggaggagcgcccagctctggtgcgccaggcgcggcagcggggcggccgacgcgcggaagtctgtgccgtagaagagcagcgcgcgcgtccgcgagtccctcagcgctcggcggttccgggacgccacgcacgcgccgcgcgcacactcgatgcgctccgagtctcccgggaagtgggggaatagccctgggctccaccacagcagtaccggcaagtcccccgcctcctccctccctggccgcggcgtcccagagctgcgcgtcacccccactgcgcccagcgccgagggcggccggaaaaccgcgccatcccacggttccgcccactccgcctccccgccggcctccctctccgctacggacccatggccgctggctgcacagacactgagcacccctagaaggaccaacaccaccctaatggggccggccgccatgtccactccggcagccggcgccccctcggccagcaccgaccccgcccagcggatagtcgtgaccggacgaggccctacgccacgggggcacgtggcgcatgcgcagctcgctcagccgacggccaggactaaaagcaaagtgagctttcgggagtaaagatgaggctaatggttacatcttaatttattttatttctttacaaattaaagatgcattgaaaaataaaccaatgaagagaaatgagaggtccagagcaggggcatcccaggtggggagcaggcaagcctggccaccatcaagcctagcccttgtcctgcccccaagccagttggggttggaagataactgtcagccactcagtcaataccaaagcccaagcggtgtcccagcaggagagaacggcgctccagctgcctctgcctctctccccaacaaccccgggcctggagaagcagtgtttctcgtgggagctcagagtgggatgtgaactggctctgtgaggtattgcaagttgatgaccaggctccctaggctccctacagaaccatccagtgttggggcctctccagctggaaaggaagctggtacctctaccagatcttaatat

SEQ ID NO: 7838 - DNA, 1054 bp, Homo sapiens
taaaagaaaagggctggagacagagagctcaggaagcttttttaatagttggaatagtctaagcaagaccaggtgaggtctcagcagagggtaaggatgggggaatgtgcagtgtgttgaaattcaagagatatttgagagaacctaaaggatttaattctctccagttggatttggggggagcaaagaagagagaggccaggtttcaagttgagcggagagttgtaccctcactgacccagaagaaaaccagaggaggagcttgtttgtgagacaagacgatggttttctctttttttttttttttttgagatggagtctcgctctgtcgcccaggctggagtgcagtggcgcggtctcactgcaagctctgcctcccgggttcatgccattctcctgcctcagcctcccgagtagctgggactacaggtgcccgccaccacgcccggctaattttttgtatttttagtagagatggggtttcaccgtgttagtcaggatggtttcgatctcctgatctcatgatccacccgcctcggcttcccaaagtgctgagattacaggcatgagccactgcgcccggccaagatgatggttttcattttgtgcctgctgagtctggcaacctccagccagacacattcagtgggtggttagaaatatggtcctagagattagaaaagaagctaaaaattggaaatccacattgtagtcatttctgtgtagttggtagtgaggctgtagaaatagcctcttcctatgctgtagatgggcctgttcctatgctggttgagttcttacggtgagcttctattggctgtagtagagaagagacggccactacacaccagcatttaatgatagggagagttagggggcccagcaaagagcactgagagtgagaccttccagaagacccagaagctaagaaacagggggtctcagtaagggagcgtcaggaatcagatgcagaagagtccctgattaagttggggaagaatcccctggctctgaccattagatgccattgtttcatcatttcactgagacagtg

SEQ ID NO: 7839 - DNA, 1050 bp, Homo sapiens
ctctcttcatctcaccagtgtcctctgacccatgggtaagagaaggagagatggctgggagccgaattctgggatgtgaggataggtgatgtggtgacttcctgcagctgcctgactggggctttcatttcctactccttccctacctgcgtaaatttccatgacctgtgtgatagcctccctttcccttcctcacctccttttaaccttgtcccatctttcccaatggatatctttccctggccaaactggatgagacttgatttctcgttgatttttttttttttcccctcaagaagaggattcttgtgtaaaagtatatgcttcagacagcaactccccctctcccaagatggatatgccaagactgggctctgttgtgtggcctcatgtgccaggttgactttgggacagaggcacagatgataggcacagatgccagccagaggggtcagaatgtgtaagtgccagccagtactgtgtggaggtgggaaagtggaaaggggctgtcttggagatggagggaacaaggtggggctggactataggtgtgggcatgggagatgtgaactcctggagagatctgggccagggtagccatgggctggttcccatggggttagggagtgagggccatggcttccctgcagactctcagtttacactatatattttataaaggtgcagccactggagctgggtttcactcatcgctgtctgcctaggtctccgcaggtgttggatttctgtgtctgggaatgtcgtgggcccaccagggtcatctgtgaaggtctgaaggggcttgctgtgttcactgggtcttcctgcctcctgtctttcttgtttgtgattctctgggctacaaactgaaaagataaaaagagggtatagagctgtttctccttggcatccctggtgaggtggctaggagtcagggagagggatcacctgttcttctgggggggtccaatcgagacaggaagccttcttttgggctgttgtgtcttgtcactgtggcctcagaggcccacattggcggctaggttgcaa

SEQ ID NO: 7840 - DNA, 1072 bp, Homo sapiens
ctgcctgtgtgggaatcttaaccaaaaccataccatcaaagtgcaataatttgtaaatgatagaagagacatttcttccaaatggtggaagggacactggttaatgtcagatttaccatatagcgctcattgctaacattatattggttgggatgatgataatttattctttttcattctttttgatacaggcttaaaagtaaaccgtttggacatgtatggggagaaatataagccatttaaaggagtcaaatacgtcacgaaagctggaaagttccaagtgaggacatgagaagaggccaaaattcctcaggaccagtttgttttccaagtgtcattacgatgtatcactattaggtaccaagtgagtgggaatacatattctagttaaagcatttgtgtctagctacacaccgctaacaaagttacttagttatcaatgtaggattcttaaggagctttaagctaaggaaaccttttagtgacttagcttattttgtatcttttcacttaggaagattttggaggtgatttttttccataggaggataccatctggcggctgcacattgtaacagtaaaggcagaaagctgtagtgataacctctctcctaaaagagttaactggtctcatccagcagaagctatcttaaatctgtgatgtgtcaggtgcagccaaatatcacaccttctgatcttagccatcccaaaccagtatctgtcccgagaggaaattccccccacccccagaagtttacagaaaactgcctcttcaagtgtttgccttattcagcttttcacttgtgccattaagcaagcactgtagcaaaagccacttccacatggccctggcagggagcactgctgctccatgctccattctcactgtacttggtattgtattttttataaataagatttttatgtaaagcttagaatttgatttacagggaccttgctgcagtaaataccatctcaattttgtgccactggttcagctgttagcacagtaaaaaaatcatttgtatcaaaggggcaaatgctttattaaggtagtaaaagggaacattac

SEQ ID NO: 7841 - DNA, 1035 bp, Homo sapiens
gccacccattagctaaggggcagcagtccccatgactagggtttttctctttgaaggaccaccagcagtggttagttgcctgcgggtctacttcacactgctggagttgctttcaggcctagcctgcatggacatcttttcatgtttctcctcttacctgactcaagctggctcaaattctaaccctctgtcacttaagtcatgtctgtctggagagggccttccagagaaccatgattcacatgggccattcaagccagtcccctaggaatagtgggaccagaggggtcttcatgcccccaaccctcctgtgtggagagcttgcttgagctctggtctctcaccagcttcttctcaacctggaagtttgtagcatgtatcatttcttgggtgataagtccttccattttcttacccatttcttatcactcaggttctaccattcttcaggtctattacagatttgttgaacaaatcttctccaacctttaatcatatccaattatcttctcccatcagaaaacgtactcttacctacttttccagccagaaccacctattaatgtctcattcatgcccagatgaaggccaatgccacgcagcctaaaggggttgtctctggtctcctacctatacccacctttcagtgtgtctgcctagaaggaaatgagtaatgacctctcacagtccctcaggttaccctcactgtctacaccttactcctcttctgtatgcttaacaccatctcaccaaaccagggcctactttatgttcctagcagtagctcacaggggtatggtgtgtttgtgtaacttttcagcaccttctctttttcctttcaatgatgcagggcaattctgcacagacttacaaactgtgcatgtaaaagtgtaaaagcatgtatcctcttattgtagtcttaaaaagctcgtggaatctagggacacagaagattctgtggcacagatttaggtacagagcaaaatactcactggaaaaatcaagtattggctagctaccacggggatttgatcc

SEQ ID NO: 7842 - DNA, 1083 bp, Homo sapiens
gagtgtggatgtgactgctctgctccacctggctgggacatagcaggacaggcagcaacccaggtctgtgaaatcaatcatgatgattctgggaggaattattggtgaattagggggatgctccaagggatggtccagatggaggtaggtgtaaagtggagttttgctggaaggagttgtttttgcacaacatattgatttccttggggtgggagaaaaaagaaacagcagctcttcgctgctctcccagagtggtgggtaggagaggacaggtgggagtctgtgggcccctttagctggttatttttttagatgtaccatcaggtagctgcaactgtattcccactgcttccccagcaatgcaaagggcagattacgaagcagagctgggctggcagcaagttttgctttgctttctcccagcggccaacagcatttgcattggtgggtggtgcacacactctgcagagagagggcgatacccaagcccagggcccacagactgagcacagaacagaaaattagggctgggaattcacccgtggctcctcagtgtctgtgttgcccatctctgatagacttccaaaatagcaggggccaggaatttggtggggacacctggggatgaggggccctgccagagctgggttcattcttgagggaatgtctcccaaatctgccatttaagaggatagagtttcggtccccaagctcaattctgcctcacctccatgctccattatctgggtatccccaggccactcacttatcccacccatgtctattctcttacctgtaaaactagaattgcaggtattttagtggatacgttgttgggagatgactcataggttttgatcccatctccatctctgcattatcttggacaagcaacctgacttaggtgcttgcttgtctttaaaatgcagaacgttagtacctatcatgctagctcattgggaagttgggaatggcaaataagagaatggccttgcaggctcttgagggaacagaaaagagaaaagtgggttcctcagagacatatgctcttacctagggtgggggagctggtttatgaatggt

SEQ ID NO: 7843 - DNA, 1049 bp, Homo sapiens
gctgcccacttgaccatcttccaagttgtactctccttcttctctttcctttccttcctttccttactgttctaaagcttttaaataaactttcactcctgctctgaaaaaaaaaaatgtttatctttgcaaaaatatagcaaaagcagaatttcctggtttcacagaaagagccttacctttcataaaagcatcatggtttataattttttaaaccatcaaatgatcatctttgggaagcagggtgcttggcaactgtgggataacaaggctgaagaagggatgcaccttccagggaggccactgtgaaacaaagggctttaaaaaaaattccatttttatttttgatttgagggtacacgtacaggtttgttacaagggtatattgtgtgatgctgaggttagtgcttctattcatcccaccatccagacagtgaacacagtgcccaataggcagcttttcagtccttgctccccttcctcactcctccttgtggagtccccagtgtgagtctattgttctcatctttacgtctgtgtgaacccgagagttgattcccacttacaagtgagaacatgggatatttggttttctatttctgtgttaattcacttaggataacagcctccagctgcaaccatgttgctgcaaagaatgtgattttttttcctggttgcatagtattccactgtgtacacatactacattttctttatccagtgcaccatcgacagacattcaggttgattccatgcctttgccattgtgaatagtgctgtgatgaacataaaagtgcatgcatttttttggtacaatgacttattttcctgaaacaaagggaccttgttttggagaacattatgacaaaagcagacaccaggaaagcaagtcagaattggaagtaaatgaaactcttagagatgttgtacttcctgacttctctccttattcccaagagggtttgtaagtgggaaggatgatctcagcattgttcttacttgcaaatattgcaaaagctaccaggaagaggcaggagtaagtccctgct

SEQ ID NO: 7844 - DNA, 1149 bp, Homo sapiens
gctcactgtagcctccaactcctgggctcaagcgatcttcccgcctcagcctcccaagtagctaggactacaggtacacgccaccaagcccagccaatttttaaattttttgtagaaatgggtctcactgtgttgtccaggctgatctcaaactcctggcctcatgattctcccatcttggcctcccaaagtgttgggattacaggcgtgagcccctggatctggccagctccctcattttttggttactccagtgtcgttttgtcattttactcttattttgtggcgattcactcaactttcatccttcagtcccttctcttgagtttttcagttttgctaacaagttcttaatttccaagaactcttttatatcttcctgtacttgtttcatgaatacaatatcttatctgaggatagtattttttttcttcatcccacataattccatttcctctaaggttgtttttttttgtttgtttgtttgtttgtttgtttgtttttgccttggtcttggttttgcacattagaggttttaacttcaggtgtcaggtaatcactgggtgtcgactgatgaagcctgggaaatgtaaaagtccagatcaaatgggtgagagtgcggtcttttgagtcttttgagtttcactgtaggatggtctggctgggctgttcactggggaagcacagcagtgctctctttaggtcttcagagatttgccagattaccccaaggggcccttcctatgtgatgggaaggatcggcctggccgcatcttggagcccagtaggggaagaaggctaggactctttgcactcagcgttcagcatgacagcatatggtcacttcatccttttgttttcagtgtggcgcccattctctggatccatgctggcatcccctagttccaaacctcacttatactctctagagaataacctcctagcttcggccatgttgaggaaaaggctgtagctctgtagtttggaaactaggaatgggtttctcacccagcttttacccattccatacttaagcctcccctccaccccaacttccatggggtaacaatgccacagttctatgtatttaaagattcttagcattttcttctgctggttttgggtgtggtattctcaggtctgctaagg

SEQ ID NO: 7845 - DNA, 1568 bp, Homo sapiens
ttagcatttgcagtcacagaggatgggacagggattctaactgcattgtggagagtgttatgatctagtccagggacctgggcttggtgcccatgtgtgtgtaggtatgtgcaggtgtgcatgcctctgtgtgtgtgtgtgtgtgggtgtgtgtgtgaactttcatttccaattcctcacagactggtatttagccaaatacactgacaattcctagagagatgaaaatttaaaactctaagtcttgcaaaaggtaagctctatttttttcttgttagattcaacagacataaaattacgacgtcctgtttccatagcagtttctagacactcactgtcaatttctgagcatgccttgttgcagtaggggcttggtttgtgtccaggtgctgttatgtggagcacactggagtacccctggcctggtgtctatagacccctttgtcaaactcctatagtacagggctggcccaagttggcgccatcatctttctgtgactctcctcttggccatgagctatctggctccttaaacttgtcgtttcctgcagaatcctgctaatgattagaccaccgccacatgtcctccaaacttccttctgatgccctgggattcccccaaccattgcaaacccaacccagggtgttaactgcagtggggtgggcagtttacatatgagtgatcaactcaagaggggcaattttctttcccagtttcttgctggtgaaggagagtcaggtggggatggagcagagtgccaaggagcacaaagcagacagccacacagtagaaagagtgcaagctgtactgccttgcctcaaacctggggtcttactctgagctgaatgacgtgtctggggggctcttttgcaggggtcatccagggaggagccctgtcaagcatttgcactcagatcttggcaatggtcaatcaagaacaaaataaagtcctgtggattccagcctgcccgctctaggagaatgctgtgctgtggatgactgcagctggccgcctgaggggacaccagactcagctcttttctagcgactgaaagtagaagtctgtccgtctatgaacatgcgggggaaggatccggaaccaggacccagaagcacctcctttgtagacagagggccacggctgcgtgcgatccaggcccaggcccacacactctgcccgtgtcacacgtgtgctttaacacaaaacagataacactaaagacgggttcagcacccacctttctttagccagctgatcagagatgctgcaaagagaacctttcggatcactcgtttacaagccttttctaagtatttggtggtttatgtttacttgaacggctccatgttgccggtgcccagcccctgtcccctctgtcaaccccctgtcgctttggtgttggtttcgttcccgtcttcagcaaaacgaccttggaacctcaatgggggctgctttgctttgggaggttcttgttggtgggaccagagctttgacaaacctcctgctccttggtggcacctctcctggaaggacgtcacaactccaggtgctcagactgcctgtggc

SEQ ID NO: 7846 - DNA, 1034 bp, Homo sapiens
ccccgtgcctgggttctcagcccctcagcggcggccccgtgcctgggttctcagcccctcagcggcggccccgtgcctgggttctcagcccctcagcggcggccctctgcctgggttctctgcccctcactctcactttagaagtctccagttgctctgaagggggaaaggcctgcagaatgtcagcttctaatactccagtttccttctctccaggatcttggcatctcaaattctgtcttgtctctgccactctacgatgccttcaaaaagatatttctcattttttacccagattttctaggtgttctccaagggatgctgcaagctgttccattatacctgggagtggtaatccctgtgtagtagtttaaaagttaccccagctaattctaatgcacagtgggttttgaattcctgctttagtttattgcttccaactgctgcatagcatccctggtaccccccaccctgctgattgtgcacccacctgcaatggtctaagtggactcaactctccaccacccagaggacactgcatgtctttatgcttgctcttttaggggcttgtgcgggagtgtctcaggaatatatggaggactggttttcctcttatgttagtctgctagggctgctgtaaccaaataccacaggccaggcacggtagctcacacctgtaatcccagcactttgggaagctgaggcaagaggatcgcttgaggccaggagtttgagaccagcctgggcaacatggcaagactcccatctctacaaaaactttaaaaaactaatcaagtgtggtggcgtgtgcctgtagtcccggctactcaggaggctgaggctggaggatcacctaagcccaggagtacagtgctgcgatgagctatgattgtgccactccacttcagcctggcaacaaagcaagagcatatctcaaaaacaaaaacaaaccaaaaaaccaataccacagactaggtgacttaaataacaagaattcattttctcacagttcttgaggttggaaatccgagatc

SEQ ID NO: 7847 - DNA, 1047 bp, Homo sapiens
gcaggtggatcactggaggtcaggagttcaagaccaacctggccaacatggtgaaaccccgtctctactaaaaatacaaaaattagccaggcacggtggcaggcacctgtagtccctgctactcaggaggctgaggcaggagaattgcttgaacccgggaggcggaggttgcagtgagctgagattgcgccactgcactccagcctgggtgacagagcgagactctgtctcaaaaaataaaaaacagaaaagtagaaagaagaaaaaagtcacagattatttcttcaacaagagattcaattgccattaccctttggatatatatatatatatatatatatatatatatatatatatatataaacatgctttattatttatgtacataatcaaatctcccttaatattatgtttttagctatttttaatagtttaagtatactttataaacctcttttgagaagcagctgttgtttagagaaaacttctatgcatattacaaacaattcaaatcattcagaagactataaagtaaagattatctctggctgggcgcggtagcctatgcctgtaatcccagcactttgggtggctgagacgggcatatcacctgaggtcaggggttcgagaccagcctggccaacatggtgaaaccctgtctctactaaaaatacaaaaattagctgggcgtgatggtgtacacctgtaatcccagctacttgagaggctgaggcaggagaatcattggaacccaggaggtggaattgcagcaagctgagatcatgccactgcactccaccctgggtgacagagcaagaatctgcctccaaaaaaaaagaaagaaaaaaaagattagctcagatcccctcaactggagacaccattgttaacacttggtaatgtcctacataagaagcctccttgtgcataaatccacacatacttttgtttgcagatgcagataaatataagtgaaatgatgccgatcgggcctccccaccccgtggtgtgtcccttacgtctttgcatgtcactggaacctgggaa

SEQ ID NO: 7848 - DNA, 1062 bp, Homo sapiens
attatactcaatggctgacatttattacaacaaaagtacacagagcaaagtcggcaaagggggaaaggcgcgtgaggcaaagtccaggggaaactgggcctgagtttccaagaatcctctcctggtggagtttcaccggaggcacttaattcctccagcatggaatcacaacaacacacaagaagtgctggcctccacggaggcccattagagactcagtgctcaagtgtcttattgggggctggtcatgtaggaacttctgcctgccatgtacccagattctggactcccagtagaaagcaggtgttcagcataagccactttatttgtacaggctcagtaccagagctgcttatatcaccagaagaaaagttttacatcagcctagagaactgtttactgttcgggttcctagacgccattcggtagggtcaaccttgcaagcaggcctttctaaggatatagaagtctcaggtcagctgtgttaactgttctgcacaatacttagtaaatagttgtgactgagtgaatctaaatgaatcagcccagtgtgactgcagggcctggagaattggacctcaagactctcaaaagctttagggtaaccccctccccccaaccgccttgtcatcagtctcaccctcagatagacaaaagtgagagtgggaggtctcctccgccacctcccacagacccttggtaagtgaaactgtctggtctccaggtgttgaagcacaacgggtcatccgagattctcaacaaactgtatgacacggccatggacaagttggaggtggtcaagaaggactatgacgcccttcggaagaggtacagtgagaaagtcgccatccacaatgcagacctgagccgcctggagcagctgggggaggagaaccagcggttgctgaagcagacagagatgctgacccagcagagggacacggccatccagctgcagcaccagtgcgccctctccctgaggaggtagggctagggccatcgggggccgggggcaaatgggtcctataaggttcccagccaccaccaggggatgagaacagc

SEQ ID NO: 7849 - DNA, 1076 bp, Homo sapiens
tacccaaagtctcatttaaaagctcactcctgctctgggtgtgacaaaggtgagcgttggatacctcagtggatgtctgcaggtaagtgtgtgcagcgtcctttctgtaaaacattggaaagagtcccagcagtttcaggaatggacttctgaagtccgccatttccaaaatgcacaccgagtactgtgaaaatgagggtgaaccctcctggacggtgttactttatcggagaggaagcatgtttggaacatctgagggcccgtcttggattggaggatcatctgctttgggcagggctgcccagagcgcctctgatagccaaactctcagactttctgtttctcggggcctcaaaagaagtcgatggaaaaaagataattgtccttttatttttccctgagcgctccttgagtcacagtcatttaaaggatgtcagagacacagattagattgcagagtttaattccaatcagtaattaattacgggaagcctgctaagtgccgaccaccatgaaccatgtctctggaggtggacaggtctgtagaaacaatgtgctccggggatgagatactcttgcccgacttgcccaaggcagacgttgctgatccactgtggggtcctttcccagtgagctgaggtatggctttaggcacagtactcaggcaggcggtgtgatgcatggctgctctttcaagatgcaccttgtgccttttctggtcttatccaagcccttcaattctcagatggagaaacagggccaatcaattgcctgcttaattgactccatgcatagcatctttgacctccaaatgaccagatcagaagtttctttgcttccgagtcctccctagcatttggtgtggcagaccaacccctccaggctccctccaccccattgccttctaggatgcatcattctcttgctcctcctacccctgctccaagtgatctttctatgtcttttccagaaactcattttttcctcctgtcttcacaggaagtatttccccagattctgaactttatatacacttagaacaatgttacttcaggccaggcgtgatggctcacgcc

SEQ ID NO: 7850 - DNA, 1048 bp, Homo sapiens
tgggtaaatggttgcaactgtattagtttgctaaggctgccatacagagtatcacagaccaggaagcttaaacaacagacatggattatctcacagttctggaggctggaagtccaaggtcagggcgtcagatgggcaggtttcttctgaagcttctttccttagcttgcagatggccatgttctccgtgcagttcttcatgcagttctccttctgtgcatgtctgtgtcctgatctcttgttataaggatgccagtcattttggattagggcccaccctcatggcctcatattaactttattacatctttaaagaccttatcttccaatacagtcatattttgaggaactgcagaaggggttagggctttaacatatggattttgggggaatacacttcagcccataagagcagcattactggcagggcgcgttggctcacgcctataatcccagcactttgggaggccaaagcaggcagatcacttgaggtcaggagttcaagaccagactgaccaacatagtgacaccccatctctactaaaaatacaaaaaattagccaggcctggtggtgtgtgcctgtaatcccagctactcgggaggttgaggcgaacctgggaggtggaggttgcagtgagctgagatctagcctgggtgacagagcgagactctgtctccaaaaaaaaaaaaagcaacattactactctcacacggttctctagtgacaacggtaccctaagggggcaagcatttctggctgagggtcagtggcagtgttcaggaagctcagagggcaggaagcccagggtgcgtgtgcagaccctggtggtattccccaactgagccactcaccagagactctgagcagcatcttaaaagcctggaatgctggaggtgctgattcctggggataggaaggggtcctgagacatttttggtttttatttttatttttttccagcatttttaaagagcagcttggatgattctgatgaacagccaggctgggagccattggccagaagctctgttgaccgactgcccctc

SEQ ID NO: 7851 - DNA, 1038 bp, Homo sapiens
aggagtgttacaggttatttgacataaaacagagaaaaaccagtagcatcttttacaaagctcagaaactttttctctcttttccccttttgatgtggggtcactggcctccttagctctgaacaccttcagaacatcagctagggtcactgcagaccaaagcacagccagaggagaagggaaatcctggggaggaaggagaaggggcgtgagtagtgaaacggcattggcggggacagggtggaggaagagatgtatgatgggccagggcagtgctgccctgcgggtgagggtctgtcagctgagtgcctgctgtgagcctcccatgggaagcagcctggggctgcagagtgagccctgatggacttggtcagactggggttaagtccagcagtgtgacctgctcatcacttttcttccctgaacccatgtccacctctcataaggttgtatcgaagttccaagaagaaaagcagagcgagtgctttgaaaggacataggaaggaaggtggccctgcccctcaagaccgctgtgctggggtcttggcaaaccccttgcccctggaacagagaccggtacaagacctctggagtggatagtgccagctaggggagggcagagtgaggaaaggccttgttccccaggaggaagagaggtgctgagctagcagcgagggcttcttggaggaggtgagatttgagtttttctggatgggcagaggtggggaaggggtacgctgggaatcagggagcagaaaaggttgggctgctttgggcagtagaactccttgcccatccagaagatcctaaaatagaccagcagagagagggctgcttccatcctctgtgtttaaaagaaagggttacttgggattctgagctgttcttcctaccccatcaaaaaaaaaaaaaaaaaaaaagctttattctttgctgacaataaagcatgcacattcatgtagaaaatttaattaatgaagaagaaaaagaaaagcacacaaaatcccagaggcaaccctattaacattgtgctgggga

SEQ ID NO: 7852 - DNA, 1181 bp, Homo sapiens
agctgcttaacgaggaaggctggtgactggttcccttgagggtgccttttggaacccctgtgtctttggtcttggggatgactgatttgtaagtgtgtgtctgggtgcaggaacggatactggcgggagtttctgacaagtggtaggcttgtcctggcctggccgtggagtgtggaagccagcctttttagacaaggcagctggaggaagaagacatggcactgagggaggaggagaactagcatttattgggcatctactgttgtggcaggcgctctgctttatcacgttcagttgtcgttgccactatgtgagctttctgttattctttgccagagagaaaactctggcttggagtggttaaaatgctcagaaagtattgggcaccaggaattttgaattataacctattgtttgatttaacttgttcagagccaggaaacaaagtgccatctttctaggtcttgtccctgttttaacagtgaatcgataggtacagtaaaaataaataaggatatatgtataaaagaaaaacaagtgaaccgagagggctgagaaactgcccttagcaacctgaaggtcaaaggctgatgggacccatttatttggctgttaaaagccccacttattaagggaatgattttataaggcattcctggtaacagctctcttacgttggccatcttaacctcaatttttgtagctgcaggaaactgacagagagactaaattgctggccacacagcaggtcatttcattggtggccctcccgtctccactttgagcttctgacttgcatctctgtccctcaaacctgcattctttccccccagttgtggtcatgtcagagttactgggcaaacctagtcctttcctgggatagtgctttgggagatgctaggaagggactgtcagatgtggccatgaggataaggacagaggggatctcaacaaagtaatttttttctttttaattgtatctatgtatctatctaatctatctctgaatgaagaagttaagatctgtttctgaaagtctttcgtaaagcacagaacttagtacagactggaagtctgcgttgggaagcatgtgaatcaacgctcgccttaatctctgaaaattgattgatggatcaattgccattaattaggtctcaccctttccgtgtctggtggagaat

SEQ ID NO: 7853 - DNA, 1023 bp, Homo sapiens
accctcccaagaggcccctgatcttcgacacaaatgaattccacatcccccttgtcacatagtccaaagaaagaggggaccatgcctgaccttgactccttgtcctgtctccagctgatgtataaagagttttgtgctccctgggacgggggtcctgaggtccccacctatgccagcaatcagagaagccctcttggcatccccaggagcagcttctcctctgatagggtgcagctcacaccagtgaccctgactgtgccacgctgctcgggagagctgagggttttattgtttgcttgcttgaaacctaatctatagacggccccacagctcgtgcacacactgcttccctggacttaaagcccagccaggtgtcatggtccatcccagctcactgcatacatccatcggctccccatggtgtcttcacacctgacgatgagccaggcctgagccccacacaggccagggcacattcttggattttccattccttggtcatgctggaatctctcaatgtgacatacttatgtaaatattgttactattatttatttgttccatttgagggatttggaatttttgttattttagttttatttttgaaaccaagcatctatagaaaccaagaaagtcagcatgtaagcgtcactggaaaaactggtttaagcaaatagagccgtctgggatttgtaactgaggtgcaactgtcatgaggcccaggcagctctgtaacatcttctatagatgcccctggctaccctgttgttttcatctacctcagacccctatcatggggctctaccctgtgacaagagccaaacccattctccatggcctatggaagcctcactggagtttggggcctgctgcaatggggatgagatggttttttgtagaattatacttacgttccttggatgatctctagttgattttttaagttctgagttgatgctgttaaggtacccggggtagccattggttcttggatctgtgttagaatgagtgctttcccttcct

SEQ ID NO: 7854 - DNA, 1051 bp, Homo sapiens
attctcccagccccgtgtgctgtaccagctggaccgcatcacccccacccaagtagaaaagtttctggagacctgtagggacaagtacatgaggtagggatgcttttgtcttggactgacggtcatccacataggtctcacgtatcccttctgtttccccatgtgtacaaaaccctgcaccagctcacttgttaactgccagtatttgatcagattctgtcacattttctgtagggggtctgatgaattgccagtctgaatgctccaagataacggaaataattgcaaggaaatttcttagtgtcttctccccatggggaaactgctaacgaatatggcagatgccactgctctgtttgccatcagtaccattggttagcagactgcttagattttctgcatccattacatgctgaccacaagcagccatgcagaattgagttgcactgctgccccctctctgacctttactttcccctgtctgtacctatttctggtctatgccaggctttttctctgtcacagacataccctttccgaccctaatagcatctatattctctgttgaaaggtgataaccagaagcctctccccagcagttttgctggacttttctttggcatgctgcaatctcatccatacctttgccttctagggcacagatggagccaggttctgcagtgggtgctctgtgtgcccagagcattggtgagccaggcacccagatgaccctgaagactttccactttgcaggtgtggcctccatgaacatcaccctgggcgtgccccggattaaagagatcatcaacgcttccaaggccatcaggtgcctgctttcatttccttcttgttccacacatgcctgtcctgtttcctgagaaacaatgatccccgtgtcacatgcatatgtgtgatatcctcataggactgtgtcttaaactctgggtggcatgcttgctgtgttaatcctattttggtttttaaaaaagccactcaagaaaaagtctaaactggatacagtcaaaatagaagcaatggttttgttatggcc

SEQ ID NO: 7855 - DNA, 1037 bp, Homo sapiens
tcacttgaggtcaggagttcaaaaccagattggccaacacgatgagaccctgtctctactaaaaatacaaaaattagccgggcgtggtggcgggcacctgtaatcccagctcgggaggctgaggcaggagaatcgcttgaacctgagaggcggaggttgcagtacaccgggatggcaccactgcacttcagcctgggcaacagagcaagactccatctcaaaaaaaaaaaaaaaaatgacaggcagtcattcaaaaatggccaaggcaaaatctcaccagccaacaagcagaatttatctcatgactttcttagtttatgtctttcactcaagccatttccctattagaagaaaaatgtttttttcccctgttagaagaaaaatgctgattttgtttgagcgctgtccctaacaccagcctactacctactctatcttgtgagccaactcttccctcaatcattctgaatcccaataattattagtactagtagtcttgttttgataccatttattttaaactgctctttcttttgctgtattgtggatcaaaaatccattgaatcagccttttctattcttccagggagctgttactttgataccctcttaaggttttttggttcgtttgttttttgttttttttttatggttctgacctgctcaggcagctccttcatgtttataatcatggttaggatcaaaagcaaagggatacagaaatcagtaaatggtttcctttgtgtactaaatagtaattcaaatgtagcacaagatcagcaggccaaagaagaatgtatctctttccgtagatcaaaaataaaaacagcgagtgaagcttaaataagaatatttgtgttaaggaagctcctcgcttcttgtgttcatgtgtcaaggtgtgaaaggtgaaaaagagactcttccagattttaaaatcaagagtgtggcaaggctgggtgcctttgtctgtttttctcctccaaaggctttcttattctttttttttaactaacaaattagagttgtaatttggtttt

SEQ ID NO: 7856 - DNA, 1045 bp, Homo sapiens
gtgggggatacatctaggggactcttttatactaagtacataatattttcatctcacactacgttaaatcactcaagaattatttattttgtttatttaccttgagaagatggtagatacgtgttcttaaaaaaataacaatagtagtaattcaaacaatacagaatagcacaaagaaaaagataaaggtaacaaagtctgcctactggctgtgagtactgctaatctagtgaacacaggcttcctctctgcatatccatagtatagagccatttgcagatctgtgtatatggtcacgtggttaagggtacaaaacagggcgatggcatttttaaaagaaaataatttttcattctcacttatgcttttatctgtcttgcttaatttgaaaaagatgatctgcaaaacctgctgccacatcatgctgtcccaagaggagaagaagcagtttctggactatctaaagaggcccggcctgacctaccttcagaagcgaggactgaaaaagaaaatctctgacaagtgccggaagaaaaacatctgccatcactgtggcgcttttaatggtgagtggaatgcacagaaggctaagcaatagcccttttcactcactgtcttctgtttagtttattaggtttacataatgttcgggagtcagcttttctccttataaattaggcttaagagcccaacaactgatgtcctattgggaaacggacctctcatctttcattgctatagtagtttcagtaatttcattaaccatactacaatctctggccaatctgagaacataattttttatttcttggtaaataaactaacccttataggtaccgtaaagaagtgtggactgctgaaaataattcatgagaaatacaagaccaacaaaaaagtggtggatcccattgtatcaaatttccttcagtcttttgaaacagccattgaacataataaagaagtggagcctctgctgggaagggcacaggtgagcctgagaatgcacgcctgccttccgcctgcctcccgcctgcctcttccgcac

SEQ ID NO: 7857 - DNA, 1031 bp, Homo sapiens
cctctgagcccctgtaaggtccatggtgccatcaggactcactgggaactgtgtgtccaacaacctcacccccaaagtctcagcctcactgggcctggagatctgctggtgagacaagagaggacagtgccatcacttcctcgtggcccagagctggaagatgcatcctgctcagcccctgcaggcccagaagtcacctggctccactaggagggcatgggcagtgtggggccgccaggttgtaccaaccttcagagcacactcaagtgctgttaatttccctgtcctgtgggagccaccagcagattggggagaggaccattgctggggcctgggcccaggtttcaggaggcagaaaatctggaggccagcaggatggtgggggtgggaggcttgaggtccctgagggaagcaaaggacttgtgtagggtgcggcgagtatggcctcctaggctgggctgggatgggggcgggtacacagtggggattcccacctgtccaggagctgccttctctgtccccactctccacctctcacttctggaacttaagggagccagggaacatctaaaattgagactagagaggtgggaagaaaatctcattcattgagtacttactgtatgccacgcactttggaaacattcgttgtattctctccacaagccaggtgtcattccctgctaagggaagaggctcagagaggttaagtgacctgctcaagatctcatagctggctgagcatggtggctcatgcctgtaatctgtgcactttaggaggccaaggcagggtagatcacttgagctcaggagttcgagaccagcctgggcaacatagcaagaccttgcctctacaaaaaatacaaaaattaaccaggcatggtggcacatacctgtagtcccagctatttgggaagctgaggtcggaggatcacttgatcctgggaggctgaggctgtagtgagccatgattgtgccactgcactccagactgggcaacagggcatgaccctgtctcataaaaacgaaac

SEQ ID NO: 7858 - DNA, 1066 bp, Homo sapiens
tgcccaggacacacagtctgtccaggacagagcaggactccagacatgttcccatcacccaaccattcctgagagtttcttgtgcaccaggcctgtgctggataaggcccttcccctgtcctcggtggtacagatagaaagagtattggccactctgggggaccagggctgtggtgaggtttactgtgcaggcccagctcagcctggagcttcgtgggaggcctcagagaggaggagcttggatttggagtggggaaggcttccaagcaagcgtgtaaataacaggaatatgctttccgggcactgtgagccctgggccacagcaggcgctcctgggggaggagtgggggtgtggctggaacaggtgatgaagggcttgtgtgacaggctgtgcaaacttggactttatctggaggccagggagaagggttttaggtgacatgctcagattggcattttgaaagatcctgctagtggcaggttggaggctgggctgaaggaggcaagaacgctaaggaagccagcccctgaacatggatagggactgatgactggacacaagacagcggtgagcagaagctgaaggggagggaatggattctggaatggaaaagtaccatctatgggccgtggtgcccagtgagagggaagagggagcaggcagcaaggagggctaccagatctttacggtggctgcctgggcaaatcagctgccaactgggatacaaatacacgtgcataaacaggtaggctcgccttccactctgcagttatttattgaacatctactgtgtgtcagacacatagcaagcattagaggacaccacaatgagcaaaacaggaaaggctccctctgtctaggagcttgtgttgcagttggtgaagtcaggcagtaagtacaaatcagtgggaactagggaactatcagatcagatgaagaacacagaagagtgctttcatagtgtgcactgggctgccttctcctggagtagcaggagttagtagttagtagcatgcatgcttaggcccatgatacttttagggtccacagatatgtttcttttct

SEQ ID NO: 7859 - DNA, 1046 bp, Homo sapiens
tccacaactcttctcaaagatgtggcccatatgttcctaataatggctttctaagaatctgttctgaaggggtaccttctctctgattttcatttgcatttcctgcttagcttacacacttcaccttgcctatccacctgtcctgaccccaataacctccatcatcagacatctcatcttacctacctactttctacttttcccagtccttcccgtgcttcataaaccatgatcatgagctagagacacaaggtcatagctaaggagttgggatcagaaaatcaccttctgtgattttccattattgtcaatacataacttcaacaaaatcaagaaaatcatgaaaggacatcctaaggggtcaggtgaggttgcagtggggttagtcggtcaatagtttctttatgccaattaggatttctgcagaaaacaatgaaatactggtttaaacagtaaaaatattttaattccttacagaagcccatggaacatacactccaggtttaattcatcagctcaatagcatcatcaatgacttaggttctttccactttctgcttgtcatctgtgttggctttattttcaagctagctcctccctggttgcaagataattgcagcaggtttagttatcatattcggacatgctaacgcccagggtagtgatcccttccttgcatttctttctcattttaagaacaaagtgtttaaaaaattatacttaaaattattggcatctctgtcaattgaaagatgtcaatctctttcatttttcctaatcactaataacatctactaaaaacaaaatgtctgtgtaaataatttatttgaataaaattaaagttgttgagtgagctcggcttttgaggagtgggaaaggaggggtgcatagattagtggaagatgagaagctagtggggctcaagtccagcaggagcaggagtttggagccaggacttcctagcctctcagggtttttttttaacttccttacctgaaatgatttgtgctatataacttgtcctggctaaactttcttaatctcaa

SEQ ID NO: 7860 - DNA, 1050 bp, Homo sapiens
ccatgatcagctctgacatatctgggcaataaaaatttttcagctccactgcaatcttaaggaactaccactgtatatgaagtttgtcattgaccaaaaggtcattatatggtgtgtgactgtaatataaaaatagttattgtgataaaattattttaagggagggagacaatggatttggaagtaaaattagtcattttgttagttttttattgctgctgtaacagattatgacaaacttaaacattaaaataacacagattggccaggaactgtgactctcacacttctaagcccagcactttgggaggctgaggcaggaggattgcttgagcccaggagttggagaccagggtgggcaatgtagtgagaccccatctctacaaaaaataaaaaaattagccaggtgtggtggcacatgtctgtagctccacctactcaggaggttgaggcaggaggatcatttgagcctgggaggttgaggctgtagtgagcccagaccatgccactgcactctagcctgagcaacagagcaagacctgtacctaacaaaataaaaataaaaaaaacaacacagatgtattattgtatagatctggagatcagaagtttcaaatgggttggcaaggctcctttccttctggaggctctaggaggagaatccatttccctgtctgtctcagcttctagaggctgcccacattccttggatctagcccccacatcactctgacctctacttcatcacatcaccttctctccctttgtctcacatttcctttttttataaagatccttgtgattacattggggacatcagataacccaggataatctcccaatttcaagatccttaatcacatttgcaaattcccttttgccatataacgtaacagtggtaggttctgaggatttgcatatggaaataatggaggccattatttagtttaacacagtcattaaaaaaaaagaaattggggcatttaaccttctagaaactgaactgaaatttctccataatcaatagaaaactttctattttctcaacac

SEQ ID NO: 7861 - DNA, 1048 bp, Homo sapiens
gaggcaaaggttgcagtgagccaagatcgcgccacttcactgcagcctgggcgacagagtgagactccatctcaaaaaataaataaataaaataaatatgtataaaacatatattaaatattccagttacaaaaataacaattaccaaaaactccaacaaataatatctgtgcctaatatacaatgtggcaatgttcattatgaagttttaatacagagaactttttttcagaatttttaagagaataaatttttcttttaagaatacctaagccttatgaacatctgatgttcaaatacccagcaatggctggtcatcttttgcttgcctaaactccatctgaacaacggcaaagctctgctgaaccaaccaacataaggaattgcacatccccacatttctttccatctttttcttttctgtcagactttcactcttttgctgatagtaagtacccttaatctattaaaagaaatacaaaaatcacttctgacttgcctattctctttcattatatgcatatttacatcaccactgtatgacaaattatttcacctcatagaccctgttttctgatctgtaaaagtggttaatggtacttacctaaaaggttgtaaaatgtttttaaataaagtatgtaaagctttcagtgcaatgccttgtatttggcaagtgcattgtaaatgggagtattatctacatcaacatcttcatcaagattacaatactgctctgactcattcctgattaaggtcatgcattacttaacaaggatatagtctgaaaaattcatcatgaggtgattccatcgttgtgcaaacatcatacagtgcacttacacaaacatagatggtatagtctacaacacatctaggctatatatggcattgtctattgttcctaggctgcaaacctggcagcctattattgtactgaatactgtaagcagttgtaacataatggtcaatatttgtgtacctaaatgtagaaaaggtacagtaaaagtaaactatagaagatataaagtggtacacttaggccaggcac

SEQ ID NO: 7862 - DNA, 1029 bp, Homo sapiens
agacataggagccaacttaaaggagctactaatgcccaaatctagacaatttgaacaacatgatcaactgtgtgaaaggcaagtacagaagtgtatctagaatatattactcttcatggcgttgttttacagttaacttttttttaataagtagaaggagtacactctagaataatgataaaaagtatagtatagtaaatacataaactagtaacatagtcacttattattatgtactgtacataattgtatgtgctatacttttacatagctgacagtgcagtaggtttgtctgcatcgcatcactataatcctgtgagcaatacgctgtgttaccaggttatgaaagctaccatgtcactacatgataggaaattttcagttcaattataatcttatgggaccacccactatcatatatgtggcctgccattgacctaaatgtaattatgaggtgcatgactgtatataaatatacatatgttggacattctgataggaaaatgcctgaatatataagaaacaatgcttttacctctgaaaatctgaataagggaggctagagagatagaaagacttttactcttcatataataatctttttaaaaaataataaacttttaaaaatactgtcaatattatcctaggaagcatagttttatttctgttttcattaattaatttggacccagcattgatgaagtaaagtttaacttttattttagtttttctctattgttgaatgaacactctttctcccagtttccaattatgttatctacattgagtcactgcttgactccatttccatatttgtagtgttagtccctggtaagacaataaacttccttataagcaaatttagaagcaattatttaattcaagcttgcacaattttctcgagtccagcacgagttgttgccacatctaacaatagcaaagtaaaggttgcaatgcttactagtgatgatttcttgaggaagaaaaataagtcttacttaacaatagaaaccttttttgtcttgctgc

SEQ ID NO: 7863 - DNA, 1050 bp, Homo sapiens
cgattaaaggcaaccctccagaacaggcgaaaatgctatgtgtgtcctagcctataatttgtgtgataacatcagggttgttttgatcttatactagggacagtaaataaagtagaaaccagaagttattcatgggactgggtctaatcagaagtcaacatggtggattagcatccaaaatggggtggtttttgtctccacaaccttaacaaggctgttgaaaaagtgatccgtaaatatacatataatcacttttcaaagtcaagaaacaatagatgctggcgaggctgtggagaaaaaggaatgcttttacactgttggtgggaatgtaaattagtacaagcattgtggaagacagtgtggtgattcctcaaggatctagaaccagaaataccatttgacccagcaatcccattactgtgtatataccaaaaggaatataaatcattctattataaagatacatgcatgtgtatgtttactgcagcactattcacaggaggaaggacatggaatcaacccaaatgtccatcaatggtagactggataaagaaaatgtggtacatatacaccatggaatattatgcaaccataaaaaggaatgagatcatgtcctttgcagggacacagatgaagctggaagccatcatcctcagcaaactaacacaggaacagaaaaccaagcacctcatgtttctcactcataagtgtgagctgaacattgagaacacatggacacagggagggaaataacacacactcgggcctgtcagcgggttgggaagagggagagcatcaggataaatagctaatgcatgcagggcttgatacctaggtgacgggttagtaggtgcagcaaaccaccgtggcacacatttacctacgtaataaacctgcatgtcctgcacatgtaccccagaacttaaaatacaattttttaaaaagaaaaatacatatatatacctgtaaagtgcaagttcataactagaaaaatgcagattaaaaaaatgctaagctattatttctcacctatcagatgggtaaaaatta

SEQ ID NO: 7864 - DNA, 1098 bp, Homo sapiens
ttatgagaaacctccaaactcttctccatagtggttgtactaatttacattctcatcaacaacatatgagggtttccttttctctacctcctctccagcatttgttactgccctggtgttattttgcttcttaagtattagaactatacttagtgttatatgttctgtgattataagtaaaactgcctttgctatatagtatgcatagaatattttaaagttattactagaagctgacacattgttgttttctattacaaacaataaaattagtttccatttattgagggcctgtttcatgttaactgctttacaaatattccttatctcatttaattctcccaacaatcctacaagaaagctaatattatcccattttatagatgaggaaattgaggcttacagagggcaagtaacttgcccaaagtcactcagtaccagcaaacggacttttccccctctccctgcccccaaataccagccccccactgcaaaaaaacaaaaacaaaaacaaaacaaaactacttctgtagagctagttgtctatttccaaatgcaaggcttaaattttaagccttggagttttcaatttaaagcctttgccatgaaatacagcatattactttataatagaaaacaaatagaaagagcctttcatgatagatacagtgaacactaaattctttcttttaggctgcatctaacaattctctccttaacccaatagatactatttcaacaaattagcccagttttgatttggatggcaagactcaaagacaacaacaacaataaaatcacaacttgatttaaaagttaaattcaataaactgtagaagcagcatattagtctgttcttacactgctaatgaagacatacctgagactaggtaatgtataaaggaaagaggtttaattgactcacagttccacatggctggggaggcctcacaatcatggtggaaggctaaaggcacgtcttacatggtggcaggcaagacgtcctgtgtaggggaactcccctttataaaaccatcagaacttgtaagacttattcactatcataagaacagcatggaaagaacacaccctcatgat

SEQ ID NO: 7865 - DNA, 1010 bp, Homo sapiens
caccagagagatgtaggtcagcaattcctcagtgcaatcaccccaggatgaagggtctgtgctgtgggctcaagccaggggttctctctggtgatgagtgggggttgggggtgtgggaaccatgggagacagactggcctcctcttcttgggttgattgcagcttgttggaggtataaataaggtacttagggtcttttcttcttcattagtctgagggtagcaagggcagttctactgcagagacagtggcagagaggctttcaggaacagtatttattaaccaattgtttcaacaaatatttattgacaattcaacatgtaccagacactgtgttaggcaaggggtcttcaatgggccacaaatagatgtggtccttgaccatgtcattggagcttaatgggagagactgatagtaagcaagtaaacaacaacaaaaaaataaggtaattcaggttgtgacaacctctctgaaggaaatatataggatgctataaaagtgactagagcaaggaacggcctaattgagctaagataatcaggtagggtctctgtaaggagttgacattaagctaacaactaaagaataagaagccagccatgtaaatagcttggataagagctttccaggctgaagggaatggaaatacacaggcctagaggtaagaaggagatgggtgtcttccggaaactgataaaaagtcagagtggctcagatatgctgatatgtcccctggtattttttaaaatttttggccgggtacagtggctcatgcctgtaatcccagcactttgggaggccgaggtgggcggatcacgaggtcaggagttcaagaccagcctgactaacataatgaaaccccatctctactaaaaatacaaaaattagctgggtgtggtggcacgtgcctgtaatctcagctactcagaaggctgaggcaggagaatctcttgaacttgggaggcggaggttacagtgagttgcgatcgcgccactgcactccagcctg

SEQ ID NO: 7866 - DNA, 1064 bp, Homo sapiens
gaatgactatcaagtggtatctggaaaattttatagaaacctagtatttttatagatgtttttgaaaagaaatactggttattgggtttacttcactcaagaaatccttttgcttaataggggtatataattaatactagttaagtgttggttattgtattgtataagtgttggttattgtattttcacagtgctataaagaactacttgagaatgggtaatttataaagaaaaagaggtttaattgactcacagttctgcagggctggggaaacttacaatcatggcagaaggtgaaggagaagcaagacacatcttacatggtggcaagagagagtaaaagagcaaggggggaattgccacaccttaaaaatatcagatcttttgagaacttactcactatcatgagaacagcaagagagaaatccaccgccatgatccaatcacctccccccatgcctttcctctaacatgtggggattacaatttgaaatgagatttgggtggggacacagagccaaacgatatcagttgtgtagattgaatattgaaatattgaaatcttgagtcatataatgaatactgaaatatatgtaattctcaaattatcaacacttagctggcaaaggttcttatatgtgaatggctcattaagctttggatttcctttccactgtgttgctgctctggatgacaacattgctgtccatacagacagcaccacctattggccagcacccagggcccgctctgagtgatttccttaccacctttcctttttctcaaggtcctcatggccctgcagtgcttgagtacttgtctttgactgctgggaatcagtttgtttggctgaagactgtcacacttatccacacattctttaaaatccctttcttcttcttacacttctcttccaaagcttgcctggttaccttagttgaatctcactctctctctctttctctcttctgtccttccgtccctcttcccttcctttttcttccttccttcctccctcccttcctccctcccttccttccttccttccttccttccttccttcc

SEQ ID NO: 7867 - DNA, 1033 bp, Homo sapiens
acttcaaaattctccagttttgcacgcccatgtttattgcagcactattcacaatagccaagatttggaagcaacctaggagtccatcaacagataaatggacaaaggaaaggttgtaaatacacagtggagtactattcagccataaaaaagaatgagatcctatcatttgcaacaacatggatggaactggagatgattatgttaagtgaactaaaccagacacagaaagacaaacgtcgcatgttctcacttatctgtgggagctaaaaattaaaacaattgaactcatagagatagagagttagaaggatggttaccagaggctaggaagagtaggagaagagtcgggggtacgtgggtgtggttgatgagtacaaacaatagttagaaaggatgaataagatatagtatttgctagcacaacagagtgactatagtcaaaaataattttattgtacatttttaaataattaaaagagtatacttgggttgtttgtaacacaaaaaataaatgcttgaggtgatggataccccttttaccctgatgagattattatgcattacatgcctgtatcaaaatattacatgtaccccataaatatatacatctactatgtacccacaaaaattaaaaattaaaaaattaatctccagctttggagtcaaaagctaaagccatttttttacattttaagatttgggggatgaaaaatacagcattatgcttttaacagccctttacagctttaccattttttaacctttgtctcagccttcttgtgtttaagtataagtgttctctttatggaaacccaaagcttcccttatttaaatttcaaggatgttgaaacattgtaatgtttcattacaattaatgaaacattacattaaaatgtagagtctacatcatgtacctgttttctttttttttcttttttttttttttttgagacagtgtctcactctgtcgcccaggctggagtgcagtggcgccatctcggctcactgcaagctccttcctcctcctggg

SEQ ID NO: 7868 - DNA, 1092 bp, Homo sapiens
tctaggactcagacgcacccttatgaggatactacgtgacccattacaaggcacaaagtaattaccataggcaaaccactgatgagagctcactccagtttggaatatattcacgtttccatataagagaaaaattcgtccctggttcagttcatcttggcatcagtacacgggtgggattcagagacatgtaggtgtggaataccagattccaccaaacttaaaaagctggcatactaagttgataaaacgatgtagagtgtgaagttgagttgagaatgcttatgccatacagtttatgtatcttataatagccttaatcacacttccagtaattttccccatcattgggtgctaaaaaataaaattaaagaattagaataaaaaatatatatacctctttgagtggaagaatgctgtcagcacattttgttattttattccattgtataaagtctccgtagtgctctcttcataaatgtattgaaggtttggctaaattgtatcaaatttgtgattaaatacaaatgtgaatagtataaaacattacaaagggcaatctgaatactatgctataccaattttacaattttacagtgacttacagatgccataaatatttactttaagggagtaaaataagttataaagtcatatttaagaacacctaaatccttgaataaatttaaaatggtattattatttacgtatgaagtcagctgactattgaaagcttatttttcaataacagaaatatatgcattatctaaaacacatattccaatattttcaagaaacaaaatactgaattaaattatctgtatttaaatgtttattttgcttataaaggtccatgaaaatgcttaaaattggtttatttgatctaaaaagttaatatgcaatttttatttttaatgtatcatttttcccatgtattgttttctaaataacactttcatcctaagtagatcactgaagaaacaaaatgctgttttctttatgaactcgtaatacatttcactaataattaggatgctgttcaaggtgttgaagtgtacaatataacaaattgcatttgcagttgaatagtag

SEQ ID NO: 7869 - DNA, 1074 bp, Homo sapiens
aggtctatactgaacacattataattagtttgtccaaagtcaaatacaaagaaaaaaaattgaaagcagcaggagaaaactgacttgtcacataaaagagaacctccaaaagactatcacgagatttctcagtggaaaccctgcagaccaggagagaatgaaatgatatattcaaagtactgaaagaaaaaaaaaaaaaacccacctgtcaatcaggaattctgtacccagcaatgtgtcttttattagtgaaggagagataaaaactatcccagacaaacatatactgagggagtttgtcaccactaggtccaccttgcaagaagtgctaaaggaagttctcgaggttgaaataaaaagaggttaaacagaaacacaaatgcacacaaaagtataagtttcactggtaaaagtaattataaagacaagtagagttttcctttccccaagatggctgtctagagacattggacaccagttctcctcagaacaaagaaccaaaattgcagttgaataatcatggtctgagtggaatactgaggaatgagtgacatgacctattggggaacccacaggaaaaagctgtggtgctgaaaaagaagacagcaagagttttgcagagattgacttccaaggaacatagagtcccatggagagggtaggaggggaagttgctcccctcactcctgtggcagactatggactgctgaacttgttggagaaaccctctgcacctgtgagcccaggcattgctgtcagtggcaatttgggaacttctttagggcagagcattgggtggccagctcatgcaggcacactcgctctcccccaaaacctgagttgaagtggcaggtgtcatactggttatgcacccattgtgggtctgttcttcccaaggaatcccagcccttgtgtttctgcatcactagatcctccatgaacattccccagaacccacttagactgcagcaaccacaggggacgggtgggaccctggggagctatggaattcctagaagtctagctcttaggagaagggagagtgtctgtgccaacgtactcctttggataaaa

SEQ ID NO: 7870 - DNA, 1028 bp, Homo sapiens
ggctccttatttctgctgtaggctctttcctgccctggccgagatggagtggaatgagacctagaaacatcaagctaaatacatgtcctcagaaagataaaggtttacattttcacccccatcaaatctgaaagctctctgcctgtgtttttctaagggatagggacatcattactcagtccacaacctggactcatgtagggtcccctgtcagtaaaggagtcagtcaagcccaccaggtataccaaggactcttaccctcagcccctactccttggaaagctgccccttggcctaatattggtgtttagcttgagcctgactccttctcaacactaagagctgatgaagtcctgaagcagaaagagctctgacctgagagtcaaacatccttattctgatctcagctcagcccctgatttgttgtgtgaccctggatatgtcacttcctgtctttttgactttttaaaatgaagggtagactagaggagagcttctaaaactttaatgtggtcaacgaaatggaataggaaattccacaagtctgtccttccacaaaagcagcaaataaggtggcaaaaactcaaatttatgggaactctggaaacgaattgaaagtttacagcaatcaggtgaatacctaagaataaaagctggatttagtaagagagctttgttgtgttttagcttaccctggccccatcccccactccccagcatggcagcagcatcaaaaacaatatccctcattccctgtataggttcctgtcactggaggtagcagattagaccttattttcaagaagtatgttgattttgatttgatttgttgctccctgaaggactggttcaaatgcctttcttttattttgcctaatttggagctctcctaaagtgaagatggcagcctggaaagacgtttcaaggtcagtgtattagtggctcatgcctaggggaaggaataacatttggagcaaacaggagacaaattgaaaagcttcaggaggaaaggctaggaaataagattc

SEQ ID NO: 7871 - DNA, 1018 bp, Homo sapiens
ctgaaccccagctccattgtctttaagatgagaaaataatcgttccttcctgggaatgttgtgagtattgagtgaggcagtgcaggtcaagtgtctattaaacactagccacagttgtatcgctgtgtggcagagccagtctgacaaaatacattctcagctgtgtggtctaacgctcaaattctgaactcacatgagccttgcaattgcaccatggggaccacgtcctcccaccttagactcagtagcatttgatgatggtgggcatgtcatcacaggaaactcactgtgtttccttggctgtatgaatgaagctgttgttagagaattagtgattctaggctgggcacagtggctcacgcctgtaatcccagcactttgggaggctgaggcaggtggatcatttgaggtcaggagttcgagaccagcctggccaacaaggtaaaaccctgtctctactaaaaatacaaaattagctgggcttgcctgtaatcccagctaattaggtaggctgcggcaggagaattgcttgaacccgggagacagaggttgcagtgagctgggatcacgccattccacttcagtcttggtgacagagtgagacttcgtctcaaaaaaaaaaagagagttaataattcattacagagtatctcctgcatgccagcaagctatggacatctggaagaagccacatgccttgccctcaagttgcttagggtggaaggaaatgattagaaatgagccaagccgagcctgcactcttagagtaagtgtagtggcctcagacagaggagagatccctgggacctgggcagtctgagccttccactggacagtcatgtgtgaggagattgcatttcctgagcaggacactgtgttgcgttacattggtaaccccaatttaaggcagcataaatgcactgggaaaacagcaatattggttagccctgggaagtggtttttaggatgattataatttttttttgtgggtattcatttgatgtggatagctggggtg

SEQ ID NO: 7872 - DNA, 1144 bp, Homo sapiens
tcctctggtctggtccttttgctggtcctccttttccggaggaggaaactgaggctcaaaaaggttgagcactgttcccaactgaaagctagaagcagagcccggacaagggcctatactcctggctcggtcttctgtgcccagtcagcacttgcctctgccctggtctcagacctgctgctcctgcagggtctgccttattcagtgtctctctggctggtaacatccattcccattctgggagtcagggctggacacgcctggggctcagggctctggcttttgctccagcgagagttttgcatgccacttttagcggggcaaaaattgtctcatgctctgccttctcagtccagagctgctttggcctcatcttgacctgtgggatctcagcccctgattgctgctttctgctctttttcagggctgctacctgaggcctagcaggcactttagaggccatctagttcagaggttgcaaattggcaaatactttaggctcaaaccttcagaagtttaccaggctctcctgggtgacctgggcctggggtctgggtgtggcctgtgccacatgtgcgtcttcctctctctccaggagctgtatgcggccggggagaaccgcctgggaacagacgagtccaagttcaatgcggttctgtgctcccggagccgggcccacctggtagcaggtaaggcaggctggggtccctcagaggccagttagatgagggcagtcaggggattgtggggaaacaaagctatgggaacacttggtcgttcctccctgcgtggggctttcgcctcctcaaaagagccccctggtgggaatttaaaagacactgtcagagggtttcctgagttctggcaaacatccagttctggaggttctaccggtgtagaaacctggtgtctttgtacgtgggaatgtggaacgtcagagttgggagggtccttcgggagcacccaatccagtgttttccaaagcctggcataagaaacagtcataacaataaaactgggtgccattcatttactcattcattcaacagatgtaaatcgcgctcccgcatgggtcagtctgtcaggtggtggagcaggtgtggggccacggtggggggcagggcactgcagagtgtgttccatg

SEQ ID NO: 7873 - DNA, 1093 bp, Homo sapiens
tgggcagcagcagccagtgccgagctacccaggatacccggggtctgggactgtcacccccgctgtgcccccaacccaggtgagtgtcagcccactgcctcccttggtccaggcctgggccccaaaggctggagacacatggctcagtagatggggagacagggaaaggcgcaggcctccagctgcacttcttgttttaacaaatagtgtcggccgggtgcagtgactcatgcctgtaatcccagcactttgggaagctgaggtgggcagatcgcttgagcccaggagttcaagaccaacctgggcgaaatggtgaaaccctatctctactaaaaatagaaaaaaaattagctgggcatggtggtgcatacctgtaggcccagctactcgggaggctgaggtgggaggatcacctcagcccaggagacagaggttgcagtgagccgggatcatgccgctgcactcactccagcctaggtgacagagtaagacccagtttttaaaacaaaaacaaaaacaaaaaaagacaaacaaagagcgtcaccttcttgcagactccccacctctgggttgtgttgcttaaggcccaagggagctgtcctgtttctcctggtgtgatgagacgctccacatccgagttgggtcagaacacccctggcgagtactccttattcctctgtgtcatttactgcctgggctgtgtgttttgtaagaactgcccaggccacctgtctcaaggctttgtgctcaacagctgtcttcggtcccttgatatgcaccacccccgccccccccggcacagacaggttttggaggattattaaaattccctttgggtagggagaatgttggcagttcctccagggttgatcttggctcattttggagaacagttcgtgtttgcagagcctagaattcgttgtcatggttctgtggcccaaccagccagcacaggggtagtggtatgtgctcaatgactatttttagacagagggtctcctttcctccttcccttccatacccacacgttcccccaccctgtgccatcctccagcctccctcccttatcttttccctgagctgccctcttaat

SEQ ID NO: 7874 - DNA, 1027 bp, Homo sapiens
catttattttctcccattctatggcttgtttttccttcctttcattttattttatttatttattttttatttttttgagacagggtttcacttccatcgcccaggctggagtgcaatggcgtgatctgggctcactgcaacctccacctcccaggctcaaatgattctcctgcctcagcctcctgagtagagtagctgggaccacagtcgcatgccatggtgctcggctaatttttttgtattttatttttgtaacgacagggtctcattatgttgcccaggctggtgtcaaacttctgagctcaaatgatctgcctgcgtcagcctcccaaagtgctgggattataggcatgggccactgtgcctggcctcatcttgtcattttaaagaatatatcagcagggattattggacctgcctggtttaaactattgtcttagttaattttgtgctgctctaacaaaatatcacagactgagtaatttataagcaatagtagcttatttggctcacagttctggaggctgagaagatcgtgaggctgcatctggcaagggccttcttgctgcttcataacatggcagaagacatcatgcgggtaagagagagcatgttatacttttgtaacaaacacactggtggtaaggagcccacttcctccataacacattaatccattcgtgagggtagagcctcttaaaagtaccgcctctcagaactgttgtattgaccattaagtttgcagcacatgaactttgggggatacatttaaacaatagcaatgatatatttaaattttatggatacaaccttatggggaaagtattttaaaaaataaattgtgtgtgtgtgtgtaaaaacaggttaaggatctaatgttaaaaaaaaaaaaaactaatatacaaatcaatattccagccaccagactggggaaggccagtggaaaatcactccatgaaagcatccactgtagtcccggtctgcttggtttgctgttaggccctgaggggcagggggtgtcactgct

SEQ ID NO: 7875 - DNA, 1026 bp, Homo sapiens
gattatatttttgtcctctatttctcatcattgtctgtttctttggttctcttctatctctgaggatattattgattatatttttgtcctctacttctcatcgttgtctgtttctttggttccttttcttctgttttggtctctccctttcttggtgtagactttctcagatgtcctgtgaccctttgctgtctatatgaagagggagaccataaaaatctgattagagtgcataggtgaaatgtacaggaggggcaggattttatcacatctcttcccccttcggtgtgtttcctggaaggcagttattccccaatattgcaaaattaatctctcctcagcgctggtcttcccactgtacctgctgttgcctcgggcaggaagcagcaacccaggcttgaactcccatgggctgcccccgtgatggaacaaaaagaatcatcctagagaactgggcctgagtccgccagcagctctgaggacaggaagcctctctacccaccctgccctggggacgatgagctctagcctgggagtgggggattcagcaccagccctcttagggtcttgctgtatcaccttggcatgccacaaccctctctctggttgtcagtgtgaccatttgtgaaatggggtgaggtggggtcggtgggagtgaactgagtcgtctctgaggtgctgagctggcctctggcatccggttgtgaggtcctggctgatggggtgtgatggccctgcctgtgcaaatccgactgggcaaatgctgactgggcatgcgtagcctggccacacggaagccactgagggcccaagtcccctggtgactcatgttgattggtaattcaagttagcacacctgtgccgagcctgttcccgacacatgggagaggcgagcacctggttcctccttgtgccgttggaaagggttttttttgtagtcttggtggtttaatatttcccttgttgaagaaagctggctgagttaggtagacatgttcacagagctcttatgcaaagagaacagag

SEQ ID NO: 7876 - DNA, 1058 bp, Homo sapiens
gagagttccaagaagagtgagcattgtggataggagatcagggtgggcttcctgaaagagatatggtatggtttggctgtgtccccacccaaatctcgaattccctcgtgttgtagaagagacttggtgggaggtaactgaatggggcaggtctttcctgtgctattctcgtgatagtgaataagtctcacaagatctgatgcttttataaagggaaatttccctgcacaaactctcttctcttgtctgctgccatgtgagacgtgcctttcaccttcagccatgattgtgaggcctccccagccacgtggaactgtgagtccattaaacctctttcttttgtaaattgcccagtcttggttatgtctttatcagcagtgtgaaaatggactaatacaaggtggaacttcatctggactcagggaaggccaggagacaggaggtcagaccagctagagggaccacctaagcagaggtgtcctgaaaagggaaagtgctgagctgggctgggctaaggacatgcattttttgtgcttctctccatcatgcatgtccctgaggtaccttctgttttcatgctgttcctcagtggcccagtgtgagtgactcttggctccagactgcttgacacagcttaggatgccagctgcagaagggtcagcccattcccaagtgaaggtgttttctcctccagagtgagctgcaggtccttgaacttccagttgcatgcggctgactggggacattgtcaccatctgaagagcagaccttgataagggatatttggaaaggtttcctgaggcttctaggtagagcaggggtgctcagccatttggagctggaatatacactctgttaagtctcccaggcttgaaggggctgggcttccagagtggtttgaacaggccccgaggactggctgatgggcatcagggcctttccgggagaggctgggggacacactgctgccatcacactcttcagtcttcttcgcctctcttcctcagcctgtggtgagagacgggtctgtgccggccattcataaggagatgagatgg

SEQ ID NO: 7877 - DNA, 1098 bp, Homo sapiens
atttttactattaatatttccacctctgtttttctttgcatttatttggtatgtctttgcccaacccttagttttaaatatttctttctcacttaaaaaagtttatcttggctgggcgcggtagctcacgcctgtaatcccagcactttaggaggccgaggcgggcagatcacgaggtcaggagatagagaccatcctggctaacacggtgaaatcccgcctctactaaaaatataaaaaattatccaggcgtggtagcgggcgcctatagtcccagctactcgggaggctgaggcaggagaatggcatgaacccgggaggcggagcttgcagtggagccgagatcgtgccactgcactccagcctggacgacagatcaagacttggtctcaaaaaaaaaaaaaaaaaaagtttatcttgaagatggaatcttcgtaaataaaatttgtttctcttataatcagaacgtggttgagggtggatggaggttgacagaaggcaatgataacagcaacaaacctaattgcatggtttctgtctttggtagaggaattctgactgttgacataccagatatacttgattttattctttgcatcttgcttattacttattatacttgcatgcattcctttcctgatttttgctgttgggttaagtttctcatcgtcatcttccccacgccacctgtattacgtttcaggtttggttgtgaatgaagagaggagccccgtctctctctctctctctctctcactcactctctcactctttcttgaaaaatcagggtcgaggttaagtgtgtgttccatgagattgtcttggcaccaggctccttatggactgttgtccctagcattctcaagggctgtggttttcaaacttgagcatgtataagaacaatctggaaggcttgttaaagcatagattcttggactgcaccctgaatcattctaatttaggaggtctgtgatgggacctgagcacgttaattgcttacaggctcccatattgtataatgccgccgggccacatgttgggtagcaccgtctaggtgcctcccttaactgcatggcccaagacagctcactttcacat

SEQ ID NO: 7878 - DNA, 1052 bp, Homo sapiens
tctgccagagcagagcagccatggcaccagccggacactctcatcagggcccagcagcaacctgccgctgccgctgagcagctcggcgaccatgccctccatgcagtgcaaacacaggtcacccaacggggggctgttccggcagagcccggtgaagacccccatccccatgtccttccagcccgtgcctggaggcgtccttccagaggctctggacacctcccacgggacctccatctgactgcgccgcctgccctcctgcccaccctcccacccacccgaccagcagagctttttaatacaagaaaacaacaacacaaaccacacacactcgcacacacacacatacacagagactctttcatttttcttgtacatatgtgtaaataatgacagaatggagtggggtaaaagtgtattttgaatattcccaattttcgaagtcagtaaaaaaacacaaaaactgtatgaatgactttgtaaattttgttctatatgaataaaaaggcaaattacttgtgatcattctgaagtgccaaaggagcccccccattcctgggcctttctgagggcaggaggggcgaccagataaggagcccctctctgctgggggagaagggaagacgaggaaccccacatgccactcgctgccttgtcccacagcttgctgccccatttctttgctcctggcacctcgtcccttttagtccctcagcttgataaagagtgagtttggagcccgcattgggctggcccactgggttgctgtgctgtagggtgatcggctgttctgggtagcctggggctgaggaggtgccctggactcagggctatcctgtcctgtcttggatcttgcgggacgagttagtcaccgctgtgtgtgttgcagtgtgcctctgccccatgggcccgagagaagctgacaattacccatagtgaggtaattgagggctttgatactgagctgttctcatatcatactgttggccttgtttttcattttcttttcaaaattagaagaatcaaaaagtgatagaatattgggggaagga

SEQ ID NO: 7879 - DNA, 1032 bp, Homo sapiens
agtttacaggctctctggattatttaattgacacaaatcacctaaccgttctgagcctcaagtctctccaccagcaaaattgaggataaaaatttctgttctgtttaactcacaaagtgttggtgacactcaaatgagatattatgtgtgacaatactttgttgaatgtaaacaagttcacctactgtatgggaggcagcattttagatgatgtgggaatacagagaggaataaaccagcccaggcttttaagatgagcataaaggcaaatgcatgagaaactgttattattgatgcattaacaaatgaccccaacatttaacagcttaagagagcaataattttattatattattttatataatattcatcatgttttattttattatatatcatagattctgcaggattggatgggtgactttaactgaggtcacttagctgtactcaggagggttcaagagggcttcacttgcatgcctggtaccttggtgggagttactgaaagactgagatcatctggaactatcttccaggacatctacatgtagcctcttcagcatgctgatctcaagctgttgaatctcttatatggtggctggcttgccccagtgcaacggtcataagtggaaattgaaggccatttagaatgtagactcagaagtcacaaaatgtcacctccacaacaattagaaattacaaataaaaccaatcaatattgaagggagaggggtgaggttaggctttgtatgtaaatgtggaagcgacaaggtcactttctagaagagcataggatgatgttattgctagacttggaacatgcaacctgctatcctgcttctgatggctataatggttcacacccctctcgaatggaaaaaatactctcaactccctctctaaaggaccccaaagactcgtaccatttaggccattgacccaaagtctaggatcttatcatctaagtcaggttgaggtacagatgaagctctttgagtacagattcttggatacatctccccaagtatggtt

SEQ ID NO: 7880 - DNA, 1035 bp, Homo sapiens
aacaatactctgtcctcatgcagcttatattccagtgaggggagatagacaagaaatctataaaagtttagaaactaaataataaaataagttggatcattttatatagttatgaatactattgaaaactacaataggaatacaggacagagaaggacttagtaggggagtctacttaggatgataaggaatccctttagggaaaatgataactgactaatgcaagaagtctattaagagtagttctagggtgaaaatgtttccagaaggagagcatgtacaaaggctctaaactgggaatagttttggactgtctgaggaacagaaagtgggccagtgtggctgttttagattactaggaggaagtgataggatattattagctaggcagtggtcagatcgtatagaatgttgtaggttatgcttgggaatttggatcttattttaaatgggtgccaagggaacattttaaatgaaggagtagtataacatgatttatgtttctggaatgtcactctgtgtcctatgtaggggatgtattatggtcaggataggctagactgttatttttagaggcttaatgcaatagaggtttatttcttgttcacagaaagcctgatgtggccaggtgtttctctagggaatgtcttctccatgcagtgactcagggatccaggcaacatctatcctgttattctaccccatcaacttgtgaactatatggctgccactaaagaagagatggaaggataagcacacaggctcttaagtgctctgagccagaagcaagagaccccattgctaacattcccatttgttagaactcaggcacatggccccaaactcactggaatgaagctgagaaatttagaagaacatattgatatttgatgaatagtaactgcctgtcaccttgaggcccgagtaaaaatagggatatctgttacaaagcagtttcagtgatccaggtgataatggtggctgggatttgggaggtagtaatagatatggtgcagtttctggatagagttctga

SEQ ID NO: 7881 - DNA, 1934 bp, Homo sapiens
caaatataaagcaatacatgagtttccatgctaactttaggtaccaatgctgccattaccaccatgctgatacacagcaagagccctcttaagttgaaagagagcaggggaatatatatatacacacatatgtgtgtgtatatatatataatatacacacagatatacacatattaatacacatacatacacatatatatgtatatatagacacacacaaatatgtagtgaaagagagagattggggggagggagagagagagagagagagagaacttctgtttgcttgtttagttttgactttcattcacaatctgcctgcattacctcacactttagagtcctcaggtaattattttctgcatttttttccagaaattatagctccaactagcagaagggctgggctgtaatggattcctaccagcctagcggaattggaattccagttatgtcttttaagtaaattaagaggtttaaaaaataataaaatgctaatcattgctatctccaagagggcttttacagccactatacatcactgccattatcacaacatatatgtcacctttgtacatacaccctgatcatcattttttgaagcacatttccacaggttatcaagttccaggtttgtaattttctttattttaatactttatgtatgtaatcttattctcatgtcatagtaaggtttgattttttttctctttctcctttgtgtatctgttctaactatgatttttgtaattttgtgtgttttcatgatggtagttatcatcttttcacttccagatgtaggactcccttaatcatttcttttaacaccagtaaagttgtgaatcattcctgtagtttttgcttatctgggaaagactttatttctccctcctttctaaataacagttttgcctagttcttgactggcagtatgtttttctttcagcactttctataaattattccattcttttctggcctgtaagatttcttctgagaaacctactgttggtctaattggaattctcttatacctgacttgctgtttttctcttgctgcttttagaatgctctctttgtctttgattgatgattagctctaatgtacgtgggagaggatgtgtttgtgtttaatctatttggggtcctttgagctttctggacctggatgtccatctctctctttctagacttgggaagttttctgctattattttatcaaaaatgttttcctcacctcttcccttctcttcaccttctgattgctcataatgcaaatagttattcacttaatggttttccataaattctgtaggctttctttatttgttctttctctttttttgtctgcttttgttatttcaaaagatctgtcttgaagtttagaaattctttcttttgcttggtctcgtctgttgttgaagctcttgattgtattttttattccattcattaagtttttcaggtctagaatttttgtttggttctttttaaaaataatatctatctcttgtttaatttttaatgcagatactaagttggcttcctaatttaattgaatcgtttatttatattatcttgtatctcactggcattttgtatatttcctttgatttggggtctattactgcaaaattattgtgttactttggaggtgtcatgtttccttgctttctcaagtttgctgtgtccttacattgatatttatgcacctgagggaatagtagcctcttccaattttatagaataggtttcataggaaaagccttattcctatagatgggtttttatatgtcgattggctgggatgtactgactttggttcttggtacataaagtagtgcagtttcttcagatgtaatccatgttagtgatgtttgatagtgcctcagtggcctaggttgtgaggatttgtggtggtgatgacacagctt

SEQ ID NO: 7882 - DNA, 1030 bp, Homo sapiens
cagagcaggcaccagaatcctcatctcttgttaccaccgtcctcactgttacctcgtcactcaggccaccattcaccctaggcgtgtccggcgaccagagtggtctttctgaggcccagatctgatctccagcttcctgtacactgacccaacaaaggcgtccttctccctacagtcacctctgttgctagtcctccttagtaagtccctaagtctttgcagggctcaatccctgcttctctcttgatcctgctccctctgtattgtacccattgacacagtcgtcttgaactgctttcagttcctttaacccaaggatccgccagcggtggccaatagagcaaatccagtatattgcctcttttggaaaataatgttttattgcacatggcagcacccatatgtttatatattgtctatggctgctttcaagttataacagtagggttgagcagttgcaaaagagactactaagcccaaaatctttatgagctggtcctttacaaaaaactctggtggactgtgctgtacctggccctgtctcttgacaccttcatgcccttgcaaatgctgtgccctccctttatcctactaatccttcaacgctgagctttctgcttatccttccctccatcctcccttacctgagtaggtaacttacctgtgtgcacatctcaatcagctacagataagggttctccttgttgatgtacacatgcacatcccactctagttcctgaggcagggcaaggtcttattccattcaggactctagaagctggctgggtttttgaaagtacacctaaaagccgaggatcttggcatagatactgggcaccacagcttaatgttggcatcctgcattcctcctcctttctgtgggtttctccaaagctctctagaaatgcacctgtggaaagggtttcactgcctctgtctttgcagatctccaacctctatctgtatgacagtgttctgatgctggccaacgcctttcacaggaagctggaggaccggaagtggcatagca

SEQ ID NO: 7883 - DNA, 1029 bp, Homo sapiens
acgtcctcaccagacacagaatctgtaggcaccttgatcttgtacttgccaggcttcagaacggtgagaagttaaatttttgttgcttataagccacccagtctgtgtttttttgttacagtgacctgagtggactaaggcagccttcgcgtctcctcaggagcctcagagcccagagccggtgttgtacgcgatggggagttgggtggggcatttgcattgtagctgctcaagcaggattcagcctttgaagcccctccccgctggggaatgtgcagtgtttctgagcactgcttccctgcccccagtgctccattatctcctcatcttgcttgcttccctgccctccctccatttcctccctctgggtcttggttccttattttctcatgaagatcaatttaaagtctcactggtggcctttgctcctgctgccacaaggtattttcctaaataaaatatagtcactgatgtaatagaaattctggtaataactttttaaaaaatctatttttccatccctggtcctcagtcaacttcttgtgactcatctctaattatccagcagccgagagtgtccatctgggtctctcaagagctgcaagcccccaacaagagctcacggctgagttctctcctgcttcccagagacgcctcctacctttcccattatctttctgaggacccacctcctgcatgggcaactgatgttggaaatttataccttgccaggatcctgctatctcagggaaatgcatagcctgggattctggtgggagatggccaattctacatttattcacacagagctcccatctctttccccagcagcctctatccaccaccacttgtcttctaagaagaggcatcttttttgcaaatgccttgacatctctttaactttatgtttctaagaacatgtttaaaactgttattcaactttcagtaattgcataaatacccatttatgcatttgttatgcatttcttcttatgttagacctttcataaatgttccttcctaattctt

SEQ ID NO: 7884 - DNA, 1029 bp, Homo sapiens
gcagtgtgatggactggccctcaagtggactctgctcaggactcaaacatccagaggcagaaaggtgctgtctcttctaggtcttcttcttaggattcagaaaaccatctaaaaaatccagcatggagaacccccttatgtctcaacaaccagaagtggggccatggctgtctcttaaaactgggacaacccaggtggtctgggaccaggcaggacacagctctgggtctgggaccaggcaggacacagctctggttctgggtatcctggaggggagagccccctggggttgccctagcatggaggaagtgggcaagagtctcaggcaggcaccagatctgctggttagcttcctcttttcccccagggacagctactgtcctgaagctgggtgtgtcctcatctaagtttttattatattatactatacatgtatctttactataaatgtatttatttatcactctgtaacttattcctcttttcctttcttttctgctttccttaactctgtcatccacatctgtgcaggtgacgaagtaacactgcagatgtattcagtcatctttctagctgcatggtagtccatcatattaattcaattacttcttctattatttctttttctgttattacatcagaggcctgaatggatgtgaggaagaaatagctgaatctgacagttagtgaaactcttgtgtctccaaattatcccattggtattatcatcatttttattgttctcataattagcaaaaaggagcactttagaaaccattactagcctccatatcagtaattcatcacatttttgttttgattaaaggcttctttgaaaatccaatatagtctatgggctttctccacaggaaaatgcacatacacactttacactttttggaatggcaagtcctcctgaagccagccatataccctggctgaatatacatgttcctctgaacaggggaaatcacatcttatccccttccttagtgcacactataaaaaggacagttttgcttcgaatca

SEQ ID NO: 7885 - DNA, 1029 bp, Homo sapiens
ccattggccaatactcattggcgcctcctggcttcacttctccaagttgatcttattaaacagatcgtgcctgtgagcaggctccatttcatttttctgctgatattaacgtttccttataaattgtccacatgtagcatattctcactttttattatagtaaattgcactccctgcacagccctggaagctgcctctatttcatctgaaggatccacaaatgatctgtaatgaatcttcattcccccggggctgtgagcgggcgcttctgccatccacatgaacagggaaggcagttcagactggctgtcgagctcagacttggtcaacaagaaggactgaggccagggaggtctaatgatttactagaaattgttcacatctatcagaattttacatgaatttagtcaattattctttctttctttcttgtttttccatagcaacataatagtttttcagagatctgagccaatgtcaaaaaagtctaatgctgaacactctctcttccagtgaactctctttcagtaatatctttttaaatgtcattgaccaaactagtccagaacttactatgttgttaggcatgatatatgggaactagcatcaggaggttcaacgctcagtacaaatgaagaaacaattgtatcctggaggaaaagctctagaatttgatcatgtttccatcacctcctaaaggtcagggcatcttgcattcctccactttaagttcactttgtttctttctcagatcctctcagatgtgtagaaagggggtgttaattgcaaatacaggcagcactaactttgcatggcacaatgttaaccaaaaatcaagtgtataatgaagttcgtgcaaagtgaggacactagttccatatgcatgggttttgtttaccagagtaccatgcaccatgcaaagcaaaggccacctgtacattcatattctttttaactgtagtaaggtttctgtttatgctcctggccttccttctactcagctctggaaatgtgaatcacccattcatt

SEQ ID NO: 7886 - DNA, 1044 bp, Homo sapiens
atttaaagcaatccattggatgagttattatggaagcagtaactgggttttggttgggagaagcctagggtctataaaattcagataaatcattccatagatatatttccagagctgtaagtcacccagacatcgatagaaacggatgtttctccaatttctttttcagaagccacatcagtgtgtgcaccctggaatctgcatttattattcatcccaatagctttggagagggttgccagcagctctgggggtctgcatatgatatcactactctcagctcagcttcctaagagcagagctgaagctaagtgagatgggccctcctttgaagattcactacacatgggttagaaactcagctgcctctgtgggccagacagagaaggtaaataagagcagagtgttggaaaaaacaagagagtcttggggactgaaccaactggagaggcatgtcccatcaaaaggcattcacattcagttaagaaactactatgataattcctctgacagtttgctactacatctaagagttgtggcaggcagaacaatgccccctgcccacagctgtctctctctctctcttttttttttttttttttttttgagagggagtctcactgtgtcgcccaggctgcagtgcagtggtgcaatctctgctcactgcaacctccgcctcccaggttcaagcgattctcctgcttcagcctcccaagtagccaggattacaggtgtgcaccaccatgcccagctaattttttgtatttttagtagagatgggatttcaccatgttggccaggctggtctcgaactcctgacctcaggtgattctcccactttggcctcccaaagtgctgggattataggcatgaaccaccacactcagcctgtctctgtcttaactcttggaaccaatgaatatgttatgttacaggacgaaagaaaattaaggttgcagatggaattactgttgctaatcagctgaccttaaacagggaacttatttgggttatccaggtgggcgcaatggaatcacaagtgac

SEQ ID NO: 7887 - DNA, 1041 bp, Homo sapiens
tcatctgcaaatatagatagttttacttcttcctccctatttccttctagatgttttaaaatttccttttcttgcctgatttgcatgactagaatctccagtacaatattgagtagaagttgcaaaagtggatatccttgtcttgttccttgtcttaggggaaaaacattgagtctttcatcattcagtatgatgttagctgcagatgtttcatagatgtcctttatcaggttgaaggagttttcttctattcctaattcgttgagtgttgttgttgtttttaatcatgaaaagctttgaattttgtcaaatgctttttctgcatctgtaaagataatcatatgttttttgtcctttattctgttaactatggcatattacattgattggttttcagatgttaaacaaatcctgcattcctaggataaatctcacttgacggtcatgtataattcttgttatatgctgctggatttattttgctagcattttgttgaaattttttgtgccgatattcataaaggttactggtctgtagtcctcttttcttgtggtgtctttgtctgattttagtatcagggtaacagtagcctcttagaatgagtttggaagtgttccctcctattctattttttggaagagtttgtgaaggcatggcattaaatcttctttaaatatttgaaagaattcgccagtgaagacatctgggctttgactttactttgtgggaagttttaaaattaccaattcaatttcttaacttgttataggtatattcaggaattctgtttctttttgagagagtttcagcagtttgtgtctttctagaaatatatctagttcgcttatttagtttgttgtcacacagctatttatttttatttttttaaggtcagtagtgaaatcccctcttttatttctgattctagtaatttgaatcttctataatttttaattgataaatctagttaaattttatcaattttgtcagtcttgaaaaaaatcaactctttgcttattgattttctctattatttttct

SEQ ID NO: 7888 - DNA, 1046 bp, Homo sapiens
atgactaatatatgttgccagtttgtagctgggctgggattcaaatccacataatctgacttcagaacccatgctctttggctctttaccatatttcattgaaagaaataagagatgaataatcaaggagacttaatatattccctgctgtagtcttttggttaaatacttaaaaagtctattctcaatttataattgtagcctaatcctcatcaaaatttccattcagtgtcttattagatttttacaaaatgattagaaaataaaactggaaaggaaaagctactttatatagaaatagttagaaaatagcaaataatgaagggggccagtattaacagattttagaacatagaagcccatgttaattaaatctgagaaacactggtacaaacagagacttccagcaacgaaagacaaatctgaaagagttccttatacataaaataagagaagataaaggaggaatcaaataccatggagaaaagaaggatttgtaatgaaggatgttggaagaatgtattagttatttggaaaaaaataactacaaatagcaaaaagtaggctacatgatttttcaggtaacactctaaattttaaagtggtaaaaatatttaaaaagtaaatagatccaatgtacaaaaagtaaaaacttctttataaagacaaaaaataaagaaaaaaaagtgaagggaaaattatttgttacaaatatacaaaatgggaatatttaccttgcctcattcaaattaataggcaaattcaaacctggttaacactggacaaaaggtatgaatgaacaagtgacatcggaatgaataaggttcagttcacctgaaaagtcacgtggtgccaccttgctctgtgcctggccctatgttaaataccaagacttcaaaacaaacatagcaaaatgaacatcttcaggaataaccagtgaatttcaaaataaaatgaaatccatgcaatcatcttatatctattatatctattatagatgattaaaagtagtaatgctatcaaggttgtgataaaactggtgactt

SEQ ID NO: 7889 - DNA, 1032 bp, Homo sapiens
caagcactcttcctgcctcagcttcccaaagcaccagaattacaaacgtgagccactgtgcctggcctctttctagttctttctagcttattctagctcttaccatttgttccccccccacctctcctcatcctcactgccagctctgtcccctctgttatcattccctgaacactctggctcactctttcctcccacctccaatctggctcatgcccagtgacctcctagtgagacctccaaccccacatgttttcacaaaacccttatcttcatgtcttcttagtgaggcttcaagatactgacccataataatctctcccttgcctactcaattttcctgttcccttttctttgtgatattcaccaggcaaaactcccacatgagctaagcctgaccatcctcttttgcatacctgtgcctgagtgctgagtgttgctgtagaaaatgacaaagccagggtgctggtcttccttggtattgctcctcacaaatctccatggcttgcactgtacttccctaaaccccttttccatgctttgtcttctcctttcaacccctcctcctcctccctccttatttagccatcagatgggagccccctcatctcccatctccaaagtcaagcccacctgcacttgcaccagctggctcattgccccatcttgtcacacccagggaagtaagtgttcttgcaacagccacttgccccctgccctgaatccatcccaatttcccctctaggattttgccttttcttttccacatttctcttctgcattactgatctcttcctatccactcctgcattgctgctctgcctagaaacttgttttagaacatttaatctaagaaagcaaccctcctcccacattttccacatcccctttcagtgattgctctgtttctcctgattttgttttctctccttttgtctgattttccacccgccacaatttgtctactgatttcaccctccttctcctgaaatgacctttgtcagggctaaccatcttcctattttccaattt

SEQ ID NO: 7890 - DNA, 1104 bp, Homo sapiens
taagagatggtgctcttaccatcctggctaacacggtgaaaccccgtctctactaaaaatacaaaaaattagccaggcgtggtggtgggcacctgtagtcccagatacttgggaggctgaggcaggagaatggcaagaacccaggaggcagagcttgcagtgaactgagatcgcgccactgcactccagcctgggcaacagagcgagactctgtttcaaaaaaaaaaaaaaaaaagatggtgctctttggggtcagtctgactatttaactcagcctcttgtttacttcctaccactcttctgagactttggtccctggataactgtcttcctcaccagcccaagtccagacataatgctcggtaacttccctgtctatgtggcaacccctcaacacatttccttgacctcctgatttccagtgacccactcctccactgtccctcagcttcctacttccacagccccatcatggtccttagcatcatctgaaatgactccagctcctgctttctggccacatctgtaataatatctgtaataatttcccctgcctcaccttctgtactgtcaggttcagattgcaacgatgaagtccgctcccactaacttaatcagctaaaatgacggattgttaagacactaggcaggtcacagagtcaatgggaagtccagagaacaagattaagaaaatgagcagcaaccaagggagtctgggccccagagcagttggatcccctcagccacagtagggctgagcagtagggctgttgctgaacgtggctgccacttccactcgccctgccacttcctccacagctggacattggcttgcactagcatggtgtcaatattctcttagagtgcttgcatttttgtatcagttttcatcatatttagaaagttgggtaagattatcctgtttccaccttttgccatagctgccagagcattgggagagaaaatatctaaccccattaagcatctttggtaggaggaatgagctttctaagaagactaaagctgtggttgagtttctaaccaactgaaagggagtttggtggctggaaagccaaaggaaagccaaatgttcacgacattatt

SEQ ID NO: 7891 - DNA, 1048 bp, Homo sapiens
ccctcacattggaacaagtttgctcataagtggatgtgcactgtctcaccttggccagggcactgccagccctctgaggggagtgtgcagaatgctaaacgtgcttgttgacattacacctgagacatgtttgtgttataaatgggtacaaattgaatttggcttaggtgatatatgacgtctgtcatggttttccccatggtaagtcagttagaggagagctaatttatttcagattgggcattccaagctttcattgtgcctagcatggccatatttccctctgcaatcactaggatgaagctggcaatgtaccagggctgccagtgagctggctgctgccatcagtgtgctcctcgaaccaccctggccctgggtatacatgctgaggatgcctcgtggccttggccaaatagatttttgccttcttttggcccatgaagacctggcttggagccagacctctgtttgaatcctgacctgccactattagctatcacactagctgtgtggctcaaagcaagtcacacaccttctctgaacctcagcttcttaatctgtgaaagacagagatgccaacttccacccagtggagttctgggaggattaaatggacaatctgcaaagggcctagcatgcatgtgaattgcttttcctcaactgtgaattgagaacacagattccacctgtgttcctggctggccagggtgtggttggaatggaggggggtcatgggcaggaaaggggaaatgccccatgccccgaagccctccagtccccaggagccctctccctgatgggggcactatggacatcctgatgagagcaggtggctgaggcattatgcggtttgtagagaggttcccaggggagcaccaccataccaagggggcacatgcctgtgcagagcacagctggggtggagggggcagctgtgtgaggacaagcattgtcagcgctggggatgcgggtgtgcaggggtccataggcccttctgtggtgcagatgccaaactggtctggttgtgtttctgagtgggctttgaggc

SEQ ID NO: 7892 - DNA, 1147 bp, Homo sapiens
ttagaaaaaattttaagtatgtttggaacaacttgattatgtgactcttctaaagatacattttataaaatataaaatcagatcaagtatttctgatgaaaatttagcgtttagattaagatatgctgtaaatgtacaatacacactggtttagaagactgtatgaatgtaaagtgtcttattaatagtttttatattgattacatgttgaaatgataatattttagacatattgggctaagtaaaatgtggtattaatcggtttctttttacccttttatagtggatgctagacaattttaaattgaatatgcagcttgcattctacttcttttagatgcggctgctctagacagcccgggacccaggctgcagctcaccctcagctgactaagagctagtaagccctttgcagacacacctgagggtgaagctctccaaatcttctggggagggtctagcgtagcctgtggtctgagaagccgatggctccagggttcacttacagaatatactacgcaggtgaatgggaaaattttgcaggtttaaaccagacatcaacctgaatataaactatggacctggggtgaaaatgatgtgtcagtgtaggctcatcagttgtaacaaacatggtactgaggcatgggatggtaataatgtggagatcatgcatgtgtgggggctgaggggatatagaaatctttgtcttttctgtttagttttgctgtggacctaatactgcttttaaaaatgaagtccttttaaaaaacaaaaagcctcaagcagaagaaaagagtaagaaaaacaattaatgaaacaaacaaacaaaaaccctaaacagacatctcagggtgtcatcaatatctttttctgggggaaagaaatctgttcaattaatccctactcatcaggggcggtgtctgctgatcagatcagatcacagcattgttgagcacattatagtattataataaaaggctcagctggagggaggagacacctgttcgccaaggagtctctcctgagattcttaccaggaaacccagagaagcccagatagggagttaatgccttttaaaaatttgcttggcttccatttgggagattaaggccttaaatcacacctgcaattgcaagtggattcctc

SEQ ID NO: 7893 - DNA, 1674 bp, Homo sapiens
gcacttattatgtgcttgccacttgctagactctggggatggagtttaacacagtgtagttcatttcctgaccttgaaaaccctgctatcttgagcagtgtttctgtgtgggggcttggtaaaatatctgacatttctttagtggactattgaaaacagatgtaaaactggtattatataataatctgtaactcactttcttactattgagcacatgtaggtaatgtttattaagtctttcaatgatcatgttaaaagagcttcattttcattttctattggcatgcattaatcatcactaaaatttgaaatctcacatgctcatatcgcttggggataattcaccttgtaggtaaagatccagttatttaaagttctagaaaatgcaagtttttgtagatttgtgagattcagtgtaagggctgacatttgggaaacaaatggaggatgtgagaagaaactgtatttgttaaagtgttcaaaaatcctgtagttggattatttatgatgcattgtacagttccggagcggttttattgaattcaattgagctgtgaatttgccagagatcagattgaagctctggctggatgcagagccaaggtaggtcacctatagcctgcagcctgcccacctgtgccctttcctgctcctccaggccccagcctgccagtaatgagggcaaggatcaccaggctgccagcaacaggcccgcaggagagctgcaggctcaggcctgcaggatgcactcccaggggaggactgccttgggctccctggcttcctccaggtgcagctccatgcccctggctgtcaggaaggtctgccttatgtcagtctaattccatcgaggtatagagggagctcttttccagtgtcttgtccccagattcttgatagccttcttctgaggggtctggcaagatggaggacaagggctggtagagaggagagttccgggagaaagtccctggctggttgcctgtgatgaggggcttggggcttgggagaatgttccccagttggggatttcaggtatatctttgtgtgtacgaaggtatgtaactccactctctgatgtctaataaaatagacactttctttttttttggaaactcagtcttgctctgtcacccaggctggattgcagtggagtgattgatctcggctcgctgctgccttgacctcactggctcaagggatccttccacctcagcctcccgagtagctgggaatacaggcacacaccaccatgcccagctaatttttacttttttgtagagatggggtcttactatgttgccctggctgatcttgaactcctgggctcaagtgatgctattgccccagcctccgaaagcacgaggattgcaagtgtaagccactgtgcccaggctagaataaacatcttgatggcttctcagaaagttttttctctgtgttggcatcttgggctttctatgatgtttagaggtaaagatgaagatgctctgagtacagcttggccattcaagcaagggcagggccaccacctcctcctggcaagtcccctagttcctgtggagttctttggtgcatcctgtaggtcttgagtttgctgttagcctacagtttgggtgttacaataccccctgctatttccaggcccccatgctccagaagcttcttggacca

SEQ ID NO: 7894 - DNA, 1048 bp, Homo sapiens
tagctgctgagggtttgctcaacctttggccttccttggcttgtggcagcatcaccctgatctctggcttcttcttcccatggccttctccctgtgtctgtctcgcaatttctccttcttatgaggatgccagccatgttggattagggcttactctaatgacctcattttaatttgattatctctgtaaaaaccctatttccagataaggccaaattcgcaggtactggagttagaactctggcatatgaattttggaaggggacacaattcaactcatactgagtcaaactggcagggtgggacagtgacaaacgaggagccttccgcggggaccatggtgggtgagttgagctggactctcctcccaggcctctcactgtggggtgtcatgcttagtgaagcttgctcgttccttttgtgcatttggtcattcattcagctgcacagtgatactcagtggctcattcccacactgatttgctcattcacacattatgcacttcatttgttcattcattcagcaactacaataatattcaatgacttcctccttccctgtatcattcatacatcgacactcatcccatcattcattcatttgaacacttctcaagggcagatggagccctgtcctgcaccatctctgtgtaaaagctgaagccaaattttaataacacattcctttccatcagagtgctcttcagggctcagaaagtgggagcactgctgagttctatccaaggaaagggaatcattatatcaaagggttacttgacccctatgtttactgtggcactgttcacaatagcaaagatgtggaatcaacctaagtgtccatcagtggctgaatggataatgaaaatgtggtatactcagtggactattaatcagccataaaaagaatgaaattatgtcatttgcaaattatgtcaatttcatcatcaatgacaatgaaattatgtcattgcataaattaggtcattatcttaagtgaaataagacgggcacaaaaaggcaaatatcacatgttctcatttatatgtgg

SEQ ID NO: 7895 - DNA, 1053 bp, Homo sapiens
ttcacattaggattcactctttggtgctgtaaatgttatgggtttggacaaatgtgtaatgacataagttcaccattattagtagtatgcagaataatatcactgccctgaaaatgctctgtgctctgcctattcataggcaaccactgattcttttactctctctatagttttgccttttctagaatgtcatatggttggaatcatatagtatgtcgccttttcagattggcttctttcacttagcaatatgcatttaagtttcctccgtgccttgtcatggcttgatagctcatttatttttagtgctgaataatattccattgtctggatgtgccacagcttattcattcacttactgaaggacattttagttactttcacattttggcaattgtggacaaagctgctataaacacaatgactttgctttttaatttactgagaaaacgggaatgatgagggcagagctgatctgtgcattcactgccatgtctatcagcttccatcgtctgtggccatgagcctcctcttctgtctgatgttgagcagaaacaccgtgtgctccttctaaaggcaaccccttggatactagaaataattccctgtcacctacataagggtggaattcttgcattgtcagtttctccttttcaaatggatcatatcagtcagctctcaggcacactgtaatacccaccatctctgcacggccctctttgcatccattttcatccccagccccatttctctgctcctctttgagcaaaactcttcaaaatagttaaccttgtcttgaactcctgggccagcctgggcgacagaatgagaccatcacaaaataataataataataatgagatagttacctttacttgctgtttccactgcagctcttcccattctctcaggaacccctctgcagcagatgctggcagtgatcaccgcccatcctcctcctctcccttgtcagtgggctctgcagcatctgcctctctgtgtctggggctttttctggaaccttaaaggccatgttttgcttgcactcagagc

SEQ ID NO: 7896 - DNA, 1023 bp, Homo sapiens
ggtcttcttgatgagcccagccccaccagctcacccactggcctgagttcatcagtagttactgagcacctcctgtgtgtcagatgccctgaagctctgcagggtgtgggggtctggcagggggtaaaccaggcgaggccaccacacctatggaacttgcattttatgtgagagagggagaggcaaaaaagcaaaataatatcatgtggtgaagagttctgtaaggaattagaacagaaccatgtaatgagacatgactggggctactttcggctatgtgaccactctgacttttcagctaacatctgattgctggagtcaggcctgagaaggcctttgcttttgtaagggagacctttaccattgcaaaagtcccaagatggaattaaagctggcctgttagaggaacagagagagaatgcctgtgtggcttgagcttaatgaaaggaggggaggcagcagcatggtggggtcagagaggtgggtgagagaatgccacctggggttatgtgggctagacgaggagttggggttctattttaagtgtgatgggaagtcattggagggtttgtatagggcaatgacatgacccatttcctctttagtgaaccctctggctgatctgtgaagagtctttaagaaggcaagcatgaaagcagaacaaatatcattgcatgcatcagatgagtaagacccttaaagcctcactttaacaagtattggacaaatcggaggctaaaggtctagtctctggcaaaggctgggtcattgagggcttctgagtcttggtactttaaatacccaacttctaggggtgtcttctactcataaactttgtgtgcatcttttcccccctaattttgggtaatcctggccaatgcaaaacatgcatccctcagccaaagcccccaggctgtgagcatggccaggctcacagggagaagaatgctgcatgacaccatctcatcagcagtccctggagttgccttggttctcatgatgtatcgttagaaaacatatcag

SEQ ID NO: 7897 - DNA, 1048 bp, Homo sapiens
ttatgttttcttagtttttgtttgtttgtttgtttttgagacagggtctcactctgtcacccaggctggagtgcagtggcctgatctcagctcactgcaacctctgcctccaaggctcaagcaatcttcccatttcagcctcccaagtagctggaactacaggtacacaccaccatgcccggataatttttgtattttttgtagagacagggtttttccatgttgccaaggttgctcttgaactcctgagctcaagtgatccactgccttagcctctgaaagtgctgggattacagcatgagccactgtgcccggcctatattttcttagtttttactgaatgtccttttgttttgttttgtttgtcttaggatcctatccaggataccacattgcattagttgtcaggtctccttaggcacctcttggatgtgatagtttctcaggcttttcttggcttttgatgaccttgatgttttgagcagtgctggtcaagtattttgtagaattcccctcaactgggatttatctaatgtttttctcatgattagatttgggttatgggtttgggaaggaagaccatggaggtagtgccattctcatcacaccatgtcaagggtacttactattaacatgacttatcactgttggtgtagaccttgaccacctggctgaggcagtgtttgtcaaggtttctccactaaaaaatgaccctttgttcccccatgctgccctctttggaaagatctcactatttgcagcccacacttaaagagtggagaactacactccatctctcaagagtggagtatctacatccgttgtttggaattcttcagcatgggatattctttttttattttaatttttaaaatttttttgttttatttcaataggttcttgggggaacaggtggtgtttggttacatgaataaattctttagtggtgatttctgagattttggtgcacccatcacctgagcagtgtacattgtacccagtgtatagtcttttattccttgccagcccccaccctttcccccgagtc

SEQ ID NO: 7898 - DNA, 1031 bp, Homo sapiens
gtggaagggctgagagaggacgtgccccttttcagtgcatctttcctctttctttcagcagggaattcggagaagcagcaaaagcaacagcaataacaaaccccaaccacacaaaccttccgctcatcacctaatgagaatcaggcagggctgctaccaagcccagtgcagggcctcgcctccccagggctgcgatttgtttgcccttgtgccaataggtaaacaaatcagggatgccagtgtgtggacatgtgtgggtgtgggggtgggtgcagagtttgcatgtgttccacctttgtctgcctgtttccacactggcctttgaaactgtgtgatgcccctacctccaccataaaggactcactgacattgtgggagatagtgatatgggacatcccacaccacatcccattctttgttgctcccaactgcttcccctccactctcagcatcaccggtaggttccaggctatggccctctgccctctgttccctaggtttggattgtagctttgcctttaggacaaggtggtcttgagtaggtcccccttctcctcctgtgacccagtagactccaatcctccccaccgttcattccagatcccccggggcactggcagtgttggggcggagtagtcaggcctggcattgcacggaaccaaaatcatgacatgacttgattcaaaactcaagcagttgcctggttcatcctcaaagctgggcacctttcagagcctttgcaatgatgcttgggtcccttggttctgctgccatggctctgaagtcctgtgtccctggactctggacttgagcactgcccaggcctgcacggcagggcactaagctgcagaaagtggggcccaacagttccaactgggctccccccttgtctccacccctccctcatgtgtgctcacacgtcaggggtggccctcagggtcagtcccatcagaggtagcagctgtggtccaggcatactgggagacttcagaggccagttaaaaggtgaggaaaaaataaatttatctgtg

SEQ ID NO: 7899 - DNA, 1054 bp, Homo sapiens
gagaaaacatacactcaggaagaacagcgactactcagttggagactgccctgtgcctagcgaagcagggtgggaagggggccgcatagctgccccttctctctgccctataatgatcaaatgggaccatcccatccaggctaccacatgaactactcttggataattctgtaacttggagcttgttaagacaatcaaagggtcagagaagaatggctaaagccaccctttggcgtgacagccaggtcataaatccaaatgcctatggcatccaggcagggatattaaggcagacagcaggtgggctgtaagaactgagagtattgcagctgcaggcacctgggggaaacatccttctctgaagaggactgtcaggctctgccaagattcccctgagaaggcctggtgtggtcactatttcttgtgtctcaagaggagccagaaatttggacttcctgtgaaatctcttagtttttaaatgtttgtagctaattacaaaaattctgaactctttgttggccaactctgcctgtggcagggctgataaggcttgcaggctgccaagtggtaatgtctgatttattgcatatatactgtcaacttaagctcattaactatgagaatagtgtgaagcgagccctgttctcctttcccagttctttcttgctgaggataggcagtcattcttagcacagtggtcctaggagttcctatttcttttctttttcttttttttgtttttgagacggagtctcactctgtcgcccaggctggagtgcagaggcacgatctcagctcgctgcaacctctgcccctccaggtttaagcaattctctgcctcagcctctggagtagctgggattacaggcgcgtgccaccacgcctggctaattttttgtatttttagtagagacggggtttcgctatcttggccaggctgatcttgaactgccgacctcatgatccacccgccttggcctcccaaagtgctgggattacaggcgtgagccaccacgcccggccgagttcctgtttctttccttggctcctcaag

SEQ ID NO: 7900 - DNA, 1108 bp, Homo sapiens
attttccctctggcctggtttgttggggaatgagctggtccctgaagggagcagagcctgagcccttgttggcatggggatggcatcagcatagctgaacgggcattctagccatgcagggactcagccttgtgctaggggaaaagtggggtttagatctatgcagcttttctgcttattttctaggcacctttgaattaacttatctttccatctgtgcaatgaagaactagtgcccaacttgctgcagtccatgtaggagccatacacgctcacgcctctattcacttcaccatgtgtgtcactcatcagtactaactgaggatctgcgctataaggggctgcagaggatggacagggcagggcagggcaaaggcctggagtcctcctggagtcttcacccagcccttccatcacccaccaatgggcttttggtgggtctcttccttcaagacttatttcccttccatcaattaggacagggctgggggtggtccctgtgactctgacatctctagttgtgtgtcttatgtagcaactgtgaagttaaagctccttaggagatgggtggtgggaacttctccttgaattattcctcccatgtagctgccttatggaaatgagccgataatggccaattccatgtgcaaatcagctctgggctcagctcagcctgagcaggcgtgatgcctcttgcactataaatacctcccctggaactagcgcagccccaagagtagccccagtgcttctcagcttgcacagatgccaagaacattacctgttcttcctggggctccccagcctctggctgctcctgggaatctcacatttcctggtctcgttcagtgctgggtcccttagggatattcgttaattctcataaaaccctgggaggatagtgtaattagcagcactggatgatgatttagcactcagactctggtgcagactgtctgagttcaaatcctgcctccagcctttctaggtagcatgaacttgggtgaggtactcaatgtctccatgtctcaggttgcctgtaggcgtctacatcatagccttcttgtaaggtatagagagctggcaccagaataacactcagtgcctg

SEQ ID NO: 7901 - DNA, 1031 bp, Homo sapiens
atggacacttaagggttgcttctacctttggtccacttggctttctgagggtgttgggagaggaatgtcgtctcttggagcctccatgtgtgtgtgtgtgcgcaggtgtctgtgggtgtgtgttgctgcaatgggattgtatgtgtttgtgtgtggtgggcatttttgtgccacactgtttggaagacatccattcatccttcattctgccaccaaagtcaccttccttaactcactgccctgcttagacccctgaatgtctccccctctccttaaggatcaagttcagatcccttctcgcagtgcacagggcctccaaggtctgtctctccctggcctttctctcatcactccctcaagacctctgtgtcccagcgacgcaggatggatcagcaggggtgccatcaggaacacatggcccactccaggtcattcagaggaggggatttaacatgaggaactactgacaagtgctggcagagttgaggacaggtggagtggaagcagcccagactaacaactgggcagggctggagtgactcccagggctcgagggatgaatgggagagatggtcctggagccatgactgtccagtgggtactgggacctcatagaggggccaccctgagggaactgggagcatgtgggagacccaaccatggccagagacactggaagcagagagagggtgaaatacctggcttcctcctcctcctgtgcctgagtctcctgaccatgcttctcagtggtcagtggtaatcagcaggatagggagtctgggaaggggaggggtgggcactctagagggaagaacaggggagggtgggggatggatgtgactgcaatctgcactccccaccacacccagggactcaccttcctgaatgtgtcccagtcacaccccaccatcccacatggctccccgacctggaccagccacctcactgcctgaaagctattcctccatcctcaagacttatttgagcgtctccttgttttggaagtttcctctcttctccttgttcccctg

SEQ ID NO: 7902 - DNA, 1048 bp, Homo sapiens
tatcctgcactgagggacatgcctctctggtggaatggagacaagctggcaggaattcagaaaggagggattctgaggtctctgacaggcctggagctgggggatgggctgatgtgagctgaggggtcccaggaatgggactaatgaggaaatggtgcagagaatagggtgcagtatgtcaaggaactttccaactgtcagagttgacctgagctggaaggggctgcctctgtcccccagggacccaccctgggtactatggcaggaaggttcttagctctggtgtgcccacaagcccctggatgattggccatcatgagatagaggttctccctagagaccctggcatggtttcctcaggcctagaggcccaccaaaggccacgtggttgagctttgctaatggatcataaagagaataacgtgccttgcgttgcttctcctaaaggaagggaatcaaacattcactgtgtagttactctgtgccaggcacacaaccacagttcctgtattggtctttatagtaactcaacaaggtaggcatctgccaccaggtcacataaggagcaggctggggggaccccagctgcaggtggcgattcagatctcaagccctcactctcctgactgcaccccaaccaccctgagctacaggtgagtgcgttctggataccatgccctgggaatgaggagagagtggagggtgcaggtagggtgagctcctgaggccccaagttaggagatgctgaggctggatggggctaagggaactgggaggcattttttcattgcctcaccttctcttctgtcttccttgcttcccatcctcccgggctctcctgagacacacgctctggcctctcacacattctgtttgcagagggacccacacacagtggagccttaggcctgggactcaggctctgggaggctgcatcctcactgtggggcctttaaggattttgttgctggagacccctgtggttctgtggaatcaccacatatatcggtgtgaacatcacctgttggccctggtcctgtgtgctgga

SEQ ID NO: 7903 - DNA, 1032 bp, Homo sapiens
aattttcctgctgaaacctccctctctatatggagggcagatattgtccacctggctaggtgtccacagctatggcctggccaggctgtgcctgccctcccctgcccctctgcgagcctagcaagcctacctctctcagcatctgtgggctgatattccttccaccctgacactgctccactttgccatgcctttgggccagtcttttccttggtggcaactgaagaaagctcatgcaaattcagtgcagcctatggcaaggtggttaggaagagcttcctggaggaggtgacatttaagcaggtgcttaaataagagtagtttttactttttattaggcaagcaaagggcactgggggctggaggtgacatttaaacaggtgcttaaataggagtagtttttattttttgttaggcaagcaaagggcactgagggctgtaggaagagtgttctaagcagagggaagaacttgcttccctctttccagaggaaaggtctgggggcaatggagaggaggaaagatcatatggctggaatatgggaattggctagggataagactggagagacagtcggaggaggccttagatgctcaggatccccagaaatctctgggagccatatcttgctacctcgggtggcactcttgggtcctgttctttataccccatccagagatttgaagacagacaaaggcaaagccttcatctctagaaggctctggtcctttcactgcgtcctgtctgaagtcattctctgcaaacaaaagggcagaaactgacacattctcaggaatgatgatccgagttaggacaaaccacagtcccagagtctaagctagaggtaggacccgaatttcccagatgacccaggcgtcatgccagcgggtaacagctccaagtccctctagcccttgcttcatgctgggtgccctgaaagagcgtggagctgcccttgctcacatcatcccaatggcaaccccacatggtgggttctgtactcagagaagtaaagggatttgctctaggcca

SEQ ID NO: 7904 - DNA, 1049 bp, Homo sapiens
gcccaagtctccaccctctctgagccagctgtgcttcatagtcttgggacctgagttgtcctgcctggggccccatggaaccaagggttctcacatctggctgcttgtctctcccttcctttgccagccccaggacagcaccgttgctttctcccaagcttctcgttgtccttttctgaccccgaaccactccctccttcttgggcagaattagataaagtgaattgcccaggactcttgactcattcatgcagggactggattctgaaccaagtctaggaggccccatattccaagatcttttctcattgtgcgctgaaggctaactctagtcttggacaagacagaattttccattgcctcattcctaacataagttccatcccattgattctctgacttactcgtttaccttgaaacactgatatttcaaatgatttccctagtatggatgtttctgtgctttcactcagctcattcaattgttccatatcttctgaatatctctgcttcaggccctgaccctgaagatacacaaagccatgagcctcagctcctcctcttgtgaccttagggattaagcatgagataatatgatatatatgcaatagaagtgtgctaggataaagtattcctggacatgcaggaaaaggaatggttaactttgcctagcaggggaaaagtcaaataatgccaaagagcaagaggcatttgaggtggattttcgggagtgagtggaagtgtgaaaggcaaagtaggggaggaagagcatttcaggaaaagggaatcagcacgtgcaaagatagagattagaatgggcatgtctacatgtagagagcatggggcacgtgaaggttggcaagtacactggtgccattgtgatgtgtggagctggggagcggtggaggatctcacaaactggactttgatcacttgcagtggggagcatggctaatatttcaagggcgtgcttgtcactgactttggtctgtagagtgggttggagaaagaagggctgggaggcagggagaccagttggctgatagggg

SEQ ID NO: 7905 - DNA, 1037 bp, Homo sapiens
cttgggactcactagcctgtgggtggccaaatgccaagccctctctgatctcccaggtctaaccccaggacataggtcctgctgccaagggaggggcatcctgggatcccccatcctctaagaaatagggagatctcagtatgggaccctctccccacctaatcgtggctttccaggcatcgtggctgtcagaaggggaaggtatttgggaacaggagggttttctgggagcccttgtggactgccctgcaccaaagttaagtgctgatctcggccccctggcagtcttggctcctccagtgagggaggcagctatcagacaggctggctccttctccctgggaaactgagggtgggggtggccctgtttcctaggtcctgcacggctcaagtgttgtgagctgatttgctttttcagctccttcaatcttgatagcaactgagaggtaagaatcgtcatgcccaggctgggcactgtattcctaacactttgggaggccaaggcaggtggatcactggagcccaggagttcaagaccaccctgagcaacatagtgagactccatgtctacaaaaaatacaaaaattagctgggtgtggtggtgcatgtttgtagtcccagctactcaggaggctgaagtaggaggatcgcttgagcccaggtggtggaggttgcagtgagttgagattgtgccgctgcagccagggcaacagagtgagaccttgtctcaaaaaaaaaaaaaaaaaaaaaaaaaaaaaaaagaattgtcatgcccgatttgcagacagggagcagaggtctagagagattgggatttatccaacgttttgtacgaccagtgcagaaagaaaactttcaagtctgctgattctgaagctcatagttattttttgttgattgataatatattattgttttaaccactccaggttgcaatccctccgccctccctctcccaatttggttctgtagatctgtctgaatatggccacctgctgaggtggggcccagcatggcagtgggtggtgctgtgcgtg

SEQ ID NO: 7906 - DNA, 1037 bp, Homo sapiens
gctgcaggggcctgagcagtgtgggggcccttctcctcaagtctcagtgactggcatgcctgggccagggaaagacatggggaggtaggcgatggctccttctccctccctggcattggagtgtgtagccccccagccatggcagccctgcatgggccacagggaaagaaagaaggagtgataacaaagctgggaaaggttggagctcgaggaagaccctgggcttcttgagaccctcccacaataacctgcaatggcacatgggttgggcagaggcagcgccggcacagctagggcacaggacacagctctgggctgggcatggtgccaggctcaggagtgagagactgggtctgcagcagggcctctgggagtctgaggtctgtgattttcgtagagtccaggcccagttggctttcttttcacaagggcccatccatctgcccccatccatctcttcacacagacaccctcactcacacccacactcacagagctacattccacactcacatctgccacactcacacactcatacatatacagtcccacacaaactcacgttaacatccacactcacacccacacttgcatacacacacccacagacaccgtcacactcacacccactcccgacactcacacctgcgcacactcgcacccacccacccacatccacactcacactcacccacacttgcacacacagccacactcctcacattcacatgcacacacggaaatgccttggccctgaagagagggaggaaggcaggggtgaagggaggtacagggggacccctccccagcctcagggcagcagattgctgtttgctccatgggaccagaggaggtgccaggggcgacgcttatctgtgagctcaactccagtttaccaacaattgctgtaggagctgctcttcctgagaactgagactttcttcccggcatggtgatgcttccctagggcatgtggctgcagggcaaaaggggaatccattttcccaacagggaaatgtcaccctgtgcatcttggc

SEQ ID NO: 7907 - DNA, 1031 bp, Homo sapiens
tgtccaagtgttgtcattgttcaattccctcctatgagtgagaacatgtggtgtttggatttttgtccttgagatagtttgctgagaatgatggtttccaggaaggggaacttcacacaccagggcctgttgtggggaggggggcgaggggggagggatagcattaggagatatacctaatgtaaatgacgagttaatgggtgcagcacaccaacatggcacatgtatacatatgtaacaaacctgcacattgtgcacatgtaccctagaagttaaagtataatgataaaaaaaaaaaagaaatagagaacaggacatggttaccagaggccaggaaagaagggagaatggggagatgctggtcaaaggatataaagtttatgttatgtaggatgaataaatgtagacatttattatacaaaaaaaaaaaaaagaaatcttattgcccacatggaaagctagttgttgtcctgcagtaccacatggaacaggcaggcaggattggttgtatgtgacgttacctctctgagcttgtgagggcatctataaagtagaggtgatgatagctccccttatagggccgggtgggggtggaatggaataggacatggaactacccccagtgcctcagatatgtgagctcctttcctctgcagctagcccgggagcttctggaagacgggatgctgtccactccttcctcacgtgccacccaggcttggcataaaattgcaggccagggatccgtgagtggtgaacaaaccattaccaatgtcagccttataccaggccagagctcagcaccgggcctccagacacaaactggatagaaccactgccctcaaggaaaccccaggctgggagcagggcacaggacactctggcaactctgtgtctgggagagttgcaggtgccgtaggggtggagtgggattgagaaacagagagggaggtgaggaagcctcgggggcatgtttagctccaggatgagtcctgaaggaggggcctttccagggaggtggggagggcgtt

SEQ ID NO: 7908 - DNA, 1009 bp, Homo sapiens
agagatcctctaaccaagtgtatttaacatacttcccattggacctaatacatttccttctgcagcatagtagatttctcttttgaacaataccaccccatgggagagtctgtggcttgtgaacagtgacccacagtcactctgaggctgggtgtttggtgtttgtatttcaccagttcctttgggcatagacttccttgcctctccaatctgtcaggatgtacagaagcaatgacctgtttcaaccaaatatccacagattctggaagtggctctggggctgggaccaggggctagggcctcatcccaatgtctggtgggccctagttcaggtctggaggtagacggacccagctggccactcagaggtgggctcagtttgcacatccatgaggataaagaggaactgcttctggaggtggggcaggctggaaagtgagtgtctagggtggcacagtcaagatgggcaggatggcagggagtgagagcagaattctggactgcagaattcacactgaggtggaagccaggagtggggatgaagaatggtggtccttgggggaggggatgtagggggctgttgttcaatgggtataaacctacagttgtatgagatgagtaagttccggggatcccctgcacagcatggtgcctgtagttaaaaacaggagattgtatatgtagaaatttgttcagagcgtagatctcatgtttagtgcacaaacatatgcacaaaaacatcaacaaaaacaaaggaacaaaggacattttgtttttacttgattttcctccagctttattagatataatggacaataaaaatatttaaggtgtacaacatggtgttttgatatgcattgtaaagtgatcaccagaatcaggctaatgaacatatcatcacctcatatagttaacatttttcttttttgtggtgaggaaacttaagaaattctctcttagtaaatttgaagtatacagtacattattattaactataatcttcgtgctg

SEQ ID NO: 7909 - DNA, 1017 bp, Homo sapiens
ttctactttgcatgtggtaggttctgtcaatctgaggacttgtgtgtttctgcattttcttttctaatttcccatattctctcaggtctctttttggaattccttttaggtggtggttggagcttatatccttcatgtcttttaatttacttttatccttccatctctgggtttttgtgccatctgggagagttcctgtttcagccccctaggtgactaatttgatcttcatctgttccatgctgctattcagcccctttttaaactttaatgatgaaatgtttggttcccagatctagttcattcgttttaaatggatgtgatagcctctcccctctctctgttttctcgttcaaagtgtcattctgcttgtcctagtacccaagtcctcaggggtgcgttcgtttagcagatgagtttggtgtgcctctttcgacgtgtaatcttcttaataaggtgggtgattctgggttgcctgcttgtctttgtgtttgaaggtttctgttgtcctatctgtgaggctgaactcacatactggatgggaagagctctgcactgttgtgccagctggagcagatcccagtctttgggtatgggctccactgacctcctgtgtgttgttgccactcgagggctgtctcccctactccctgcttctgcctgcgggcagttgcttttgcaggtcactgcttggcatcatggccctgccagccaccctcacatttgatttggggcttcttctgggtcctcacttgctgggcttcccagattggagctgccagcttcatggcagccctctcccggatatgctttgccctgtggtaccatttccaatccgaacccatcaaccttctgccttgcaagcattcttcatgattcctgccctagtaagaacctcattcttcttcttttttaaaaaatccagctcctgcaggaaagaaccccattctggtttttcagcactgctatggatttttaaaaaagtgtttatgttacttttagggttttgtattggga

SEQ ID NO: 7910 - DNA, 1062 bp, Homo sapiens
tcaggaatgcatcctcttcctctccaggggctgttcttgccctcccttcaccgtcctggggcagccccctcctccagcaggaagttggcctggattctggaggggtcaaggaggggctgttaggaagccaatccagccatgggggtggagaggccagggacggcccctctgggccccaccctgccattggccagctgcatgacctcggggaagtcacccctggcctggactcggggtttcccatctctgaaatgaatggtctcacattggcaggtgctgtggtgttgcaggcgtgccctgagccctgcagcctccgtctggtctgtcctgactgtcggtttctgctttctgtgtcattcctgtccaacaggatggccagtgtctcaggcagtaggcccgtgtctgatacatctctgcacaccatacagttcccagtctgacctggcagagacagcggctggatgctcatcactggagaataggcagtggctttgcttttactgagcgcttgttctgtgccagaccagttactagcagtaggtgtatgtttctcatggcaacttgtctgcagatgaggaaatggaaactcagacacttggtacctgccccagggaccagaactgggatagaagtgactgctgagctggggacccaggcttggtgaccccaaagtctgaactctttctgttccccctgctcctggggtcccaagtcagtgttttggggagactaggagtctctgtctctccagccctgtccagtggagggcactggtggaatgtctggcactgtgttgactccagccctccagcttccaatggggttgtgggcactttgtacaccttgtggagagggtgggggcatcacaattgctaccaagcccacatactgctctgggccacccccttggctgcacacggagctgctcaggctcagcaggtagtggcctccctgggtagttggggaaggggggctctgcaggctgggaggccctgtcaggacggctctgtgtgcctcctgccccagccagggctgtctagcatgggagtccaaggctggaat

SEQ ID NO: 7911 - DNA, 1050 bp, Homo sapiens
ttcacagatgttcactggtgtcttgtttgggccaggcaccaggcactgtgttgggtgctggggttcagggtggacatggtacgtggagcttgcctttgaattgagagaggaggtgagagatagcactttggaggcagaccagctggatctgaaccccagctctgtcaccgactagtttttgaccttgagcaacttactgaagctctctgagcttcactttcctcatctataaaatggggataaacataggccctgccacccagggtatttgtgtgaattaaatacccagggtatttgtgtgaattaaaatgggagccaggcgcggtggctcacacctgtaatcctagcactttgggaggccgaggcaggcggatcacttgaggtcaggagttcaagatcagcctgaccaacatggcgaaaccctgtctctactaaaaacacaaaaattatctgggtgtggtggtgtgcacctgtaatctcagctactcgggaggctgaggcaggagaactgtttgaacccgggaggcggaggttgcattgagccgagattgcgccactgaactccagcctgggggatagagcgagactcccccctcccctggggggctgttactgtggactcttaggtgggagggaccagcaagtttcccaaatgaattccagctgtggtttcttcggttgtacaggacaaagatccaattcaccctggcctttgccaaaaggggattcagggcaggctggattcggggctgtagagtatctctttgtggctctgcttgacttcattttgtacaggctccttccacgtcatccactattcgggcttagcaaaaatggcagagaaaagaccacattccctttccactcgaggggaaagaggtcttcagaggactctgattggcccaccctggttcatgtgcttatccatgaaccaatcagtgcaacaagggaatggatatcctgattggcccagcctgggtcatgtgcctatccatgaaccaatgagtgttaccagggatgggagtatcctgacgggcacagcctgggtca

SEQ ID NO: 7912 - DNA, 1024 bp, Homo sapiens
gagttgctgactgactttttggtggttcggggctttgcttgctatgcatctctcctcatttcatccccgcactctcagctgggcgtctgagtgtccccttgctctgatccttgctcagcaactcctgggctttccattccgctgcttggctgcttgaccttctcccctggagcctcccaactgctgcaaggggcactctccctcatctgtgaggctcactctcccctcctccagtccctgctgtctccgcctctgtgagttcttccctgggatccatgcagaatttcaccctgctccccaccccactgccgcccctcccgtcctcctggtgctgcctgtctttctccgtagttctcatctccttttaataggccacttggctggacgatgggttaaccttgttgttgctcgttcacctctatcccaagtggaagcgttaggagggcagggattgctgtcttttgggtcctcatctctagcgccgtgccttgcatacagcaggtgttccatcaatgcaggttgcatggaggactaaatacctctgagctggctgccagaccccagaccttgacacctcctcttgaggtcactttggtctgctgactcccagcctccccactctgctcgttccctcctttgctgtcgtgggttcctcagaaaggtgcagctggcctcctcactgcctgtgaggctgctcacatggccatgcctgagggccggctctaggttctcctccccagcgggaggcaaaggcctaagctttcttcctcggtgtgcatcctgcagtgtggttctgcctgcctagcccagccacagggtgcagtgggaactaccacacccctgggagctgcaagttaattagtgtaggtggagccagcactgggtaatcaccgaatccactccccatgggcaggcccgtgccaatccccaggcttcccgcatggggctttgaggtgccctggcctggcctctgccagccttggtggcttctctcaccccatacctcctcctcctcctcccctgc

SEQ ID NO: 7913 - DNA, 1098 bp, Homo sapiens
taactgatatcttcagcacatgagtactttagcagtgttttgattagatcttttctgaagctgtattcatctcatttttttgctgctttctaattttgcgagtaccctggcatgggaataggaaaaagggggtgggtagtggcaaatttctgaagagaaatatgtcatctctccttttttgcccccgctaacaaaagtcgaattgggagcttttgtgtgttttctttttgttttttggttggttttgtttaaccctttaccttgtgtccccaaacttgggacagtatactttcttttgccccttactacaggtgaaccttcctaaaagattttttctttttattctccgtaaaacatttaaagcattctttaatgaaatagttttttaagcaggttgtgtaatgttttccatgtaacagattggtttatatatagtttggctgcttcttgctaataatgaagggttttctctcctgatattgtctgagaatctatcatagatgaggttagattgcctttggaaagatgcttctagttaattcctgtcctatataattagttgaattcatctgtgaaggatgtgaatttttctttgatctttttatttcatgagcagctttgtgagtacattctcaggtctaaagtcctcaccctcttctcctattcccccagggcccccagtgaaacacacacatacattaaacagtgcagtttgttatttcaggcctttttctttgcatttatgaaagtaggtcggcatgctgcctcacacctgtaattccagcactttgggaggccaaggtgcgtggattacttgagcccaggagctcgagaccagcctggccaacatgatgaaaccacgtctctgctaaaaatacaaaaattagccaggcatggtggcacgtgcctttaatcccggctacccgggaggctgaggcatgggaatcacttgaacccaggaggtagaggttgcagtgagctgagattacaccactgcactccagcctgggtaacagagtgactgtttcatttaaaaaaaaaaaaaaaaaagtaaatgtgtacacaaatatttctttgtagcttttgccaactttacct

SEQ ID NO: 7914 - DNA, 2192 bp, Homo sapiens
caattttcaaattgctgcagtgtaggggacccaagtttcccttgtgtggtggtattctaccatttctggactattgattaagatagaaggaactagaagggaaggcaatgaaccatccctagaagccaggacccagaaggtgtacctcacttctcttcacacttcattggcaagagcttagtcacatgcccatgcaagcatcaagatgttgagaaatctatgtgagcatttgtccagctaaatgtttttaaaggaaaatgaaggggagaatggatattctctaatcacaggtggtgttgtctcaagatatttatagcttccggtttttttatttctaaatttgataatcatctttctaatacaacttgtcatcaatatttaatggtatttttagttgtgagaactgttattttagctgattttggtcatggctctcatactagtatcttttagttttaattgttgaattataggctaagttatgttctcacaaaatgccaactactgaattttatggttttttgcatggactttttagaacttatgaccaagttatgctatttcctggtgatattctgaagtgacagttacctacttttaataaaaccgtggctaccaattatgcttttgaagttctactcacagtagtggtgtgcattgttcttcatgaagataggaattgacaattttttcataaaaatggcagctgtctttaaaagtcattactacctgttgtatgcagttgattcgggcagagaagaaagactttgcagctttatttcttctcgttagatgtggattagattctctacagtgtttcatattgcatattacaatttctaattcttgatagtacagatgctgttggttttaatttaggagtttctgtagtcttccttcaaataattcaatactctggatatttaacatgtgttatgttttttatagtttaagaccatttgagattgtatgattatgcttaaaaggaagttgtaaagagctcaaagattctttgtaagacttttcttctcctgcttctgattccaattgtcttttttaaaggatttttataaatcctttaaagaaatttttgacaatccagatccaaattgtttttttctacttcccccttttgaattgccgctaaagtactgtgcacacatacacacatagttatgcattgcagtacttcttcagagttcatttagttgtacttcgtgctgattgattgaattactggtgatatccttgggtggataaagctggatgaattcttatcagcttactattttgtcttcatatagcacatagtttttaaaacgtataaataaatttgctcttcttgttcataaagtatttatggcttaaaaacattccttttttttggctgtgcgctgtggctcacgccagtagtcccagcactttgggaggccaaggcaggtggatcacctgaggtcaggagttcaagaccagcctggccaacatggcaaaaccccatctctactagaaatacaaaaattagccaggcgtgctggcgcttgtaatcccagctactcgggaggctgaggcaggagaatcgcttgaacccgggaggcgcaggttacagtgagccgaaatcacaccattgcactccagcctgggcagtaagagcgagaaactttgtctcaaaaacaaaacaaaacaagaacaaaagaaacccattcctttttttcctggcttttatgagccagcccagtgggggataacatgtcatttcctcttagattttcaggaaggaatgctttctttcctctgtttttgttgttgttgttttgttttttttgtttgtttttgtttttttgagatggagtgtcactctgtcacccaggctgtagtgcagtggtgcagtcttggctcactgcaacctccatctcccaaggctcaagtgattctccttcctcagcctcccggggtagctggaattacagatgtgtgccaccacacccggctaatttttttgtatttttagtagagatggggtttcactatgttggacagcctggtctcaaactcctgacctcaagtggtctgcccacctcggcctcccaaagtgctgggattacagacgtgagccaccacgcccggccttttcctctggtttatagttgtgattcagtaatccagtctgttaacaacaacctttgtggtgttat

SEQ ID NO: 7915 - DNA, 1030 bp, Homo sapiens
ggggtaggggttggggggtgagtggggggagatgggagggacgggggaggggagagagagagcacgagtgagcacacgcacatgcgtgtgtgcctgtgtgtgtgttagggtgtttatagtttggaatttcatttgtttttccattttgtactacagtcacgcattacttaatgacagggttacattctgagaaatgcatcattaggcgatttcattgtgcacacagaacacaaagctagatgggatagtctgccacacacctaggctatatggtatagcctgttgcttctgatatgttgccgtactgaatattgtaggcagttgtaacacagtggtaagtatttgtgtatctaaacctagaaaaggtacagtaaaaatacatataaaaatggtacacctatataggacacttaaccatgaatggagcttgcaggattgcaagtttctttgggagtcagtgagtgaatgtgaaagcttaggacactactgtagactttataaagactgtacacgtatgctgcactaaagttataatagtttcttcaatgataaattaaccttagcttactgtaatggcttgtttttttctttttgctttttgttttgagacaatctccctctgtcacctaggttgaagtgcagtggtgtgaacactgttcattgcagccttgacctcctgggctcaactgatcctcccacctcagcgtccctagtagctgggactacaggtggacatcaccacaccctggtgatcttgtattttttgtagaggtggggtttcaccatgttgtcgaggctggtcttgaactcctgggctcaagcaatcctcccagcttggcctcccaaagtgttgggattacagacgtgaggcactgtggccaaccagcttactgtaactttttaacattataaacgttttaatttgtttaaaactttttggctattgttaataacacatagcttaaaacaaacacactgtactactgtacaaaaatattttcattctttatatctttattccgtaagcttt

SEQ ID NO: 7916 - DNA, 2015 bp, Homo sapiens
tctggtttccattatcctccacatgtgttcttattttcacaatcgtcatgtatgtaactagtttcttgactatgctgaccatcttcctcaccttagttctgctgacatagtctggccaagaggtcccccttccctctacctacccctctaccctgtgttagaaagcattaactctttttttgtttgtttgtttgttttgagacagagtcttgctctgttgcccaggctggagtgcagtggtgcgatctcagctcactgcaagctccgcctcccaggttcactccattctcctgcctcagcctcccaagtagctgggactacaggcgcccaccaccatgcccggctaatttttttttggtattttttagtagaggtggggtttcaccgtgttagccaggatggtcttgctctcctgacctcgtgatccacccgcctcggcctcctaaagtggtgggattacaggcgtgagccaccacacctggcccagaaagcatgaactcttaagcatacgtgtctgtgagaatttcctttagtgtctcccaggaatatagagttgttaatatcaggattgagggctgactcagaaagaagatgagggtgaagaaaacttgtagtaagaacatagttgaaatgatgattcagaaaagttgtcacttgctggtgagaaaaagaaagataggatttgataaatagggttgaaacatacctggatttaactacctattgtttctaggtaaggttttgatcattgagcagttcttggtactttcgttcatgaaatgtcatccagtttctgatttctggctacagcttccctacatgccattatttgtagctgtcatatgtgtgctgatatacttagattatttcttctgcttgccctgcttgtggtttgacttctaccttttcattcagctgctgcctgtcatccctgcttgtaagcattcattgtctgtatagtcaggctgactgtacaggttttcagtgcttgcggggttggttgtgttttacctgggatgttggccatcttgttttgcagttaagactgctgctgggtcattgatgaaactaaccataacgtcaatctcagtttcaattctccaatatttatacctttacgttctttttttgttgttgagacagggtttcactccagttgctcaggctggagtgcaatggtgtgatcatgtctcactgcagcctcgacttcctgggctcaagtgattcctgtgcttcagcctctagggtagctgggactataggcacacgccactgcgtccagctaattttttgtattttttgtagagatggggtttcaccatttttcccaggctagtctcgggctcctgagtctagccatctgccggtctcggcctcccaaagtggtgggattacaggcataagccatcatgcccagcctatacctttactttcatcattcccctgtggtttaaagctaggcccttctagcactatcttttgtctaactctttaaggaacattctggacttaattttttcttcccatctgtccttcaatatgacactggatagggggcttctgggcaattaaaatttatcagtataaatcatggttacatatttagttgttttagaatgttgtaattacataaacctgcagttttaaagttgaatatagctttatactttgataaacttcattttttgttttataaaatgagtttatacgggttgtcaacttactagcaaaatcttacaattgaagagactttaaaggacaagtactcccacatctcacccaagaacaaatgttccttccacacagtgtcttcctttagcagttagaacccactctcatgaaatagcatatttttctgtcagaacagttttacccagtgttacctttgttatatgtatggggactcactgactatcttgagatccagtcatcatgtggtattgtgagatccactatattctcaagtactagaaacctgatatattaattgatatgaagcctgaaaaaaagaatga

SEQ ID NO: 7917 - DNA, 1050 bp, Homo sapiens
tatgcactgtttaacacttgtatttgatgattatatgttttcttaaattttttttcacagagaatatgaaactggtgtcaaaatgacatccagatttgggaaaacatacagtaggaaaggtggaaatggcagttcaaaattcgatgaagtcttttccaacaaacggactacccttagcacaaaatggggagagaccacatttatggctaaattagggcagaagaggcccaatttcaaaccagatatccaagaaattccgaagaaacctaaagtggaagaagaaagtactggagatccttttggatttgatagtgatgatgagtctctaccagtttcttcaaagaatttagcccaggttaagtgttcctcttattcagaatctagtgaagctgctcagttggaagaggtcacttcagtacttgaagctaatagcaaaattagtcatgtggtcgttgaagacactgtcgtttctgataaatgcttccctttggaggacactttacttgggaaagaaaagagcacaaaccgaattgtagaagatgatgcaagcataagtagctgtaataaattaataacttcaggtaagttttgattttctttattctccgccaagagagctttgtgcaaccaatttatttaaatgatttaaattctaaaatatatattgtgttttctttctgcacttatgatacatggggaccattgatagttttgtaaaagacatttaagaactttaaagaaaccagttggaggttgaaataaacaacttggatgttaacatttatagactgttgcgcagggtacgttttgggaacagtcataagtttataaccccaattccaataagaaatatctctttttgttgtgttaggatcacaaagtatctcatttctattactgtggaggatttggatggttattgataatgaaaatgagatgagtatttaaaatgaggattagttaccaatggtagactctctgccaaaactagttcagaaagattaagggggtattgagtggagacatttaaagaattgaacttgattccaa

SEQ ID NO: 7918 - DNA, 1592 bp, Homo sapiens
aacattccatctttgttggtgtgtatgtgtacgtacacttacagacctgcaggatctcagctttacattcttgaaggaacagagaatcgatttttattttgttgtccgtggtagttgcccagtatcctgttttgtttaggctgtacttaacaagaaagacagtaagacttgttagtgttagagctgcagtggaagatgaaatacatctccttcaggaacactgttttctcttaacgcagatatgtatgatgactaaattattaccttgtcaaattaaaattgggttctcaccaaacatgggggggggtctactactgaatttatataaaactcagacagtgactcattataaatggtaagaatttaagttaatcaagggaaaacaagtgtagatcaaaacatattcaaaagtataggtcaaatataatttcaattcttgtagctttcaaagtaatgatttttcattccttaggcccttgttcactttttaaagttatattcgatgtattcatgtttgaactgtagaaaggtcaaagtgttagacaaacggttactgattgatcatgtttaaaaagtactataactttttaataggcacagaactaatgcaagtaacttgttttaaaaaatgtttgactcttgatttactgccctaaagatttttttttttgtcctgtgaagtagataaatcaggtgaatcgatttgccatttataaattgaaaaggaaaataaaagttgtatgtttctatgtctgtattaatccatgaaacagtgtaatatgctggagctcactagccccagaaaatataactcagcaaatgagcacagcactatcgggacaaggcagataggataaggatagtttctttccctagggagatgaccatctaaggaacatttttaaagtcacagcgcaaattacattacaccaagaagcagaatcttcaagattgggttaaaagctgcaggttgtaaaacatgagaaaaagcaccattttggggaccttttttctcatgtgaattagtgccatgaaatttcaaagaactaaatttaatcaagtattggatatttctgaggccctgaaaaaaactaacattctgtgcttaagattttatataagtaattaccctatacaggttatcattatatcactgcaacctccatctcctgagttcaagcggttcttctgctccagcttctcaagtagctgggattacaggtgcgtgccaccactcccagctaatttttgtatttttagtagagatggggtttcaccgtgttgggcaggctggtctcaaactcctggcctcaagtgagctgcctgcctcggcctcccagcctctatacagataattttttaaggtaaaaatgatgtttataagaatagtaaattaattcatttggaacttaatatgcttcattttaagttagctttatggatatcgtattataagttggttaatcattaagtttttttactttgtaagtagcgtaggaatatgtactcattgtggaggaaaattgacatggaagcatgtagggtaataaatcagcctttctttataccccttcctcatatttgtttattta

SEQ ID NO: 7919 - DNA, 1041 bp, Homo sapiens
gtattctgtaagaatttacttaataaaatatttggggttttgaatagaatttgtttgtgaaaaacagcactttgttctcagctaagcaataacaattatggcattctttggttatttcaattatgttttttttttttttttgagatggagttttgctcttgttgcccaggctggagtgcaatggtgcaatctcagctcaccacaacctccgcctcccaggttcaagtgattctcctgcctcagcctcccaagtagctgggattacaggcatgcgccaccacgcccggctaattttgtattttagtagagatggggtttcactatgttggccaggctaatctcgaactcccgacctcaggtgatccaccctcctcggcctcccaaagggctggggttacaggcatgagccaccgagcccgacccaaatggttatttctatgtaaacagacagtttttaaataatgtgaaaatacaggagtgttttggaaataccgaggtgggaacaccggcccgctgtggccaggacgatggcacatcatgagaaggtagcacttgcggttgagaagtgaggctggagagacacagcggcctggcatatgggacttgtaaatgcaggttagtttgggctctgttgagggataatgagaagacatttataagttgtgcaggtccattagatggtcagatttatttttggagagatcctgaatgggaacggattcgggggtggatacggagcaaaatggagacaaggagatcagttaggaagctgctgagatgatgcagaggagagatgttttttaaaggcaggagtcctgaggatgagaggagaaaacaaattcaagacaggttcaggaagtacatgggcagcctgtggtggttatttgttgtcagagcaatatgggagaagacactaggatgatcccagatatttagtttcaatgaccgggtggtgcctacaattcactgaaagaaagaatacaagaggagaagcaggttggctaggaggatggagaactaagtcagtggcagccctggaat

SEQ ID NO: 7920 - DNA, 1043 bp, Homo sapiens
tgggcgtggtggcgcgcacctgtagtcccagctactcgcaaggctgaggcaggagaatggcgtgaacccgggaggcagagtttgcagtgagctgagatcacgcctctacactccagcctgggtgacagaccacgactctgtctgtataagtttttgggttacagttatagtttgggactacttttgattctacttttttttttttttttctgttagcaatatcttgatctcttgttatttttttgtagtgtctgttcaagagagtttagaaagaaaatttggaaagcatggtggaactattcccattgtacccacggcagagttccaagacaggatatcggtgagtgtggtgaccccacagttgtacttcacacatgctccctgctctttccttcagacagagctggttagatggatttcatctgcggcatagtctttgtaattagcttgacagtaagtgcgtgacatgtgtgttttgtacctttccttttcattacattctaaaactggagtaagaatcctactgactactaacaaatataaaataaataaatttggtatttttcacgcacgtgttttaacagtgaaggattattatgtattttaattattttaagcttcagagaaataggaagaattgaaaagcaagcattagattgaactatatgggagtccaagagtttgagaccaacctggggaacatagtgagtccccatctctacaaaaataaagaaagaaacaagaggccaggcatggtggcacacgcctgtaatcccagcactttgggaggtcaaggcgggtggatcacgaagtcaagtcatcgacaccatcctggccaacatggtgaccccgtctctactaaaaatacaaaaattagccaggcgtggtgctacacgcctatagtcccagctacttgggaggctaaggcaggagaatcacttgaacccgggaggtggaggttgcagttagccgagattgcaccactgcactctagcctgagcaacagagagatactccgttcccgccgccgccacccccctccc

SEQ ID NO: 7921 - DNA, 1033 bp, Homo sapiens
aatacggaaatgtgttgcccttatgcctttttatttcatggaagccaaatgcgtcttttctcccaaagtatactagaaaatgaagacgcttggtaatggtagtgatctgtacatcagatttcagtctttctgtcacttgcgtgtatgaatccatttagcaagtttgcttttggcagtaaagccccacgtgcaggaagacaaacagctgctcactcattatccaaagtatactttgtaagaattagggcatcaaaaattggatcctaagcaccaatatatattaaagttcagtacaacttgtagtgtttaagtacaagaaataaaaattgagcctgaacttttggcatatagtgggaagaaattaggtttaccgctgttaataattcagagtgcttaggaaaatcggtttttatttacttatgttaaaaatactaagggttctgtaaccattaaaaactaaaatactaacctgtagatgttgaaaaaatcctagacactagtctctgccacgtgactgttcttcttttctatttattttacccaataattaggcttttacaatgtaagtaataaagagaaaaatctctagtatcactttagagcacattgattcataaatagcccataaattttgtactcagcaacccataaaatacacatgcatgattcacataatcaaatagtaacgaaagttacaaaatgaaaagtgaagcagctctaccccaagtccttcccccaatataaccatgaacagtcttaaatctaatgccgctgtctaaaactgactagttattcaaatgaatcaatattttcccctttccagaggcagaaattaatacagattcaagtgttcactatcaagtcggaattgttaatatgtgaaatactactgttaaaggcaggaaaggctttattaaggacaagaagacaaactaggagaaggagctactcaagaccttccgattatctttacaaaaaggcaactacacctagaagattctgcagccacacacattctgccttcacttgaggt

SEQ ID NO: 7922 - DNA, 1097 bp, Homo sapiens
ccccgcccacttctaggacttaactttggagcttaattatcccctagctctggttgcctcagccaaaaccaatgtttgaaccactttgacctctgatttcctttctagcttcaaaattgtataaaatgtacacaccgtcagtctcctacatttgcctgccttcttcctaccactcccttattatccaaaccaggaaaacaagttcagactccaaagaaaggcaaataaggatgttggaggaagttcaggcaatgtttagcaaatattgagttgcatcgttttcttaaaacggacatcaagtttattttttactatcttgctggcagcatttgccagtcctttaaaaggtgtacagataaatcagtgtatgtggttttctgcaggatgatttggtctctgaaatcctttttcttcgattcttcagatgcccagctctctcctgtttttataagtcgcagctccgcaaactcactgaagcaactcgtttaccatagtttgtgagtcctctttctcttgttgccacagcagttttaatgccaaaatattgaacctagcaacaaattgggtcagccataccaaagcactgttactgtagcacttgcttgtactagagtgtaagatacaattttctgttccgtttatcccatttacaaaaaaacatgctattaacccccagcatataaacagggagaaactgaattgttactagtaaactgttgcaagcattgatagaacatcaaagaaaattggcctctacaaagtgacaaatttattatcttcaggaatttgaaaggctttctggattggggaagattacatagctatgaaagcccttaaatattttagtttgcttaataaacagtatactaaacagatgatcagcaaaatttgggtactatagccttccatgctttgtgttcaagacatccccagatctatctacccatttatcacccttgtttgcagagaatgtgcattgtaagagagacaggtcttctttcttaaagcttttttaacgtctaagaaattgttaacctttgtagtcccactctagtcttagaaacacagaatatattaggtgattgagatttttttaa

SEQ ID NO: 7923 - DNA, 1049 bp, Homo sapiens
aggagttcaaaaccagtcttgccaacataacaagaatctgtctctatataagaagattaaaaattagctgggcatggtggcatgtgcttgtagccctagctacttgggaggctgcggtggaaggatcacttgggcccaggcattccagcttatgatttcagtgagttatgatcacaacactgaattccaacctaatggatggagagagactatgtctctaaaaataaaaaataaagagattaggaactgtctgcactaagatgactttactattccaagaaatccttgcctaagaaagtaaagttgaaattacttttttgtcctggaaactttccgatctatgtatctgtactcatacagcctcatcgggctaaacagccttcttttcagaacagtagatcactcaactgggttttcaagtgactgtttacctttcaaggctggctttataggtcttgcctcactgtatccagcaatccaaactttaccctatcccagtcaggactgcacacctcatgttgaaagacataccttagaaccagactccccaaagcttaccaatatcccacccttgactcccttttctgaggctactaagattatgtgaagacagtcatcttccttactgcagtgagcaataaacttggtttttgttcatcagtaaaccattttggtggtttctggaggagccagcagttggcaatggttataaatctaaatctaaaagccatttataaaagactgatgaatctagtaacataaaaataaactgcatgataaatatcataaacaaagtcaaaagacaactgacaaccaggttaaaaacatgctttcaacatatattacaggaaaagggctaatattcctaatatgtaaataattgttagaaattaagagatcaagcaccaagcacccattagaaaaaatgggaaaagggcatcaatagacaattcacacacacacacagagacacacaaatggctttaacaactctatagaaacagaaagtaggtcatatctttgttctgtgaaaaggctgtgcacacaaa

SEQ ID NO: 7924 - DNA, 1092 bp, Homo sapiens
agatgagttttaatgtaatgtgaggcagctttattctctgagtcatctgtagtacttcttgttactacagccaaagacctcatcagcattttcattttcattataaattccaaaccatcaataaaaattaaaaactcaacaccagtttatgaaacaagggggagaagagaaaaatatgtatattttcttgcatattttgggatcgtgtataagagaaaatgattttttctgcaaagacaagattgaattgggcattctgaatacatgttgttgagataagccaaatatttggtcctagaagctgagaggatatgatactgaatgattatttagcactaaaggtttatcttcaaagaggtcttgaaataagaatatgtaattaggctgggcacagtggctcacaactgtagtcctagcacttttggaggccaaggcaggtggatcacttgagctcaggagttgaagaccagactgggcaatatggcaaaaccttgtatttttgtagaaaaagtataaaaattagccaggtatggtggtgtgtgcctgtagtcccagctactcagaaagctgaggtggaaaaattacctgagcctagtggggtcaaggctgcagtgagctgtgatcaggccaccgcactccagcctgggtaacagaaagagtaagacaaagaaaaggaaaaggaaaaggaaaggaaggaagaagaatatataattagtttctacttgagtcttaccggaatgcattttactgaatttcacttatgcaaacatacactggcttacaaaaatgtatgcaacatctttatgaggcagatactttgttatgaaacacaagaggcaaacaatgtagaagattcctctttctgttaagtttatagtccagaggagaagaaatacattacatatacaacctctaattcattcatttattcttttcttttcttttctagttgttgagacagagacttgctctgttacccaggctggagtacagtggtgcaatcatggctcactgcagcctccacctcctgggctcaaacagtcctcccacttcagcctcctgagtagctgggaccacagtcatgcaccacca

SEQ ID NO: 7925 - DNA, 1022 bp, Homo sapiens
gtgtcgtataccatctatttgcacataacactttttaatttaggtaaaattattaatcataaagctatatgaatttattttattccatgttattttattattccatgttattatttatgtattgttaggaacatttgcttaaaaatcatatttggacatagtatcagatactttacatccttcgaatcagttattttataacagtatatactaaacatcattactccttttcaaacataaataacgcaatacaaattggacaaaaaattcaggaaagatctgggatcaaaaaggaggtattgaaacatcacatgtactccataattatatacaaatattttgtacccataatatttaaaatacagaaaattaaaaggtacattttcctcaaagtgcatgcttcttttgctatgcaaaactgcaggatatggaaagaagtgtattaaaacactaaatcactttatgtggaagataaaagggatggtacccaatgtacaacttcatgtagtgcactgatatattcaatataaatgatgtattaacttcaagataacatgagaaagttaaattatctaacttatttcaaactaggggatagtatgttctcattattagaagccagaattctgcttatccatttctattattagaaaaaaacataatttttattcttgtcttagaaatagacaccttgatataattctctgtaaatgtagcatgatagtctgtttacagagtttatatcattccaagactgcacttctaaagtgagaaaatattaaaggatataaactcactcctctctacaaaattccttattttttatgcaatggctttaaaatgtatggaaggggagttatggaaacaatccatacctggaaagcattctatccatgcctttgaaatggttatctagtactagattcttatcggtgcctagctatgtaatgtgtgtagcttaagatttttaagaaagaaggataaaatgctcaatataaatttaaaaagcacttttattggaa

SEQ ID NO: 7926 - DNA, 1110 bp, Homo sapiens
gacaaatacatttcccattacagcttgccaatgtaacacagccttatttcatttttgttgtaaatagaatcacattctaatatgttttagctgaaaacagcaaagtatatattcaactacttcccaatagggaaaattttttaaaaaagttatttctttagcccagagctttattttccttttacataacagaaaaatacttggtgtgaaataaaaccttcttacacgtaatgagaccccatagaattttaatgaaagacaattgaagacccatttttaaataagccattgggaagaattaatataattaagaatagaaaaaaactagataaagttacaagaacaacctaggaacatttctatatttcttcctcattttctggagttctaaaagatgttgaaacattttgacagctatagaaaatgacctagggacaaatatactctctattcctgacataaaatgatatgcttattgtgtttctcataaaactcagcataaaactatatacctaatagttatttaaaaggagttcctaaaaataaatatattcattattaatatgtgacatgactgagttacttttgaaaaactacgaattattcaacatactttaacataggatttagtatcaatatggtatccatttcttgattctgtttttcatagtgcacttaaatatatatgttaatacttttgaataagtgcattatgctatgaaatgttttaatgagaaaaatgaatctatacaaagcaacttcatttatattttgttcctgtcacgttacattgctgatattttgtattatactagacatgactcatttttaaatatgtaattgtatatgaagttctcagtgttaatgtctggaggatacggaataaaaacagaagaaaagttaaaaaattaaaagtaaactatattttgcatatgaataagaatattacaaataccatatttatatactatgtttatatatctttacactatgccaaaaggtatatatggcatatatgcatatataccttttttatgcagagaaataatatctctgcataagcataaaatcaagatacataatattttaaaatgtttttcattgaagtgt

SEQ ID NO: 7927 - DNA, 1050 bp, Homo sapiens
agtgctgccaaaagaaattgctacaaaatttgtggcttaaaatagtaaaaaaagaaaaaaaattctcaattatagaggccagaagaccaaaatcaaggtggaggcagagccatacaccctctgacggctctagggaagaatccttccttgcctcttctagattctgttggctcctggcactccttggcttgtgacagcataactccaaccttagtctctatcttcacatgaccttgcttgtgtttctgtgtcccaaatacccatgactcactctaaattcaggatgatctcaccctgagatctttattatatctgtaaagctcctatttcaaaataaggtgatatttacaggtactggaatgggagagggtctaggactcagacgcacccttatgaggatactacatgacccattacaaggcacaaagtaattaccataggcaaaccgctgatgagagctcactccagtttggaatatattcatgtttccatataagagaaaaattcatccctggttcagttcatcttggcatcagtacacggatgggattcagagacatgtaggtgtggaataccagattccaccaaacttaaaaagctggcatactaagttgataaaacgatgtagagtgtgaagttgagttgagaatgcttatgccatacagtttatgtatcttataatagccttaatcacacttccagtaattttccctatcattgggtgctaaaaaataaaattaaagaattagaataaaaaatatatatatacctctttgagtggaagaatgctgtcagcacattttgttattttattccattgtataaagtctcggtagtgctctcttcataaatgtgttgaaggtttggctaaattgtatcaaatttgtgattaaatacaaatgtgaatagtataaaacattacaaaggacaatctgaatactatgctataccaattttacaattttacaatgacttacagatgccataaatatttactttaagggagtaaaataagttataaagtcatatttaagaacacctaaatccttg

SEQ ID NO: 7928 - DNA, 1253 bp, Homo sapiens
atatatgacacagatgctgtgtgcagatgatatcaaacctaaaaccacttagcaatgtgagaagaaacagaaaacatcccagttaccctggtgtaaaatttatactatttattaatggccgataagggtctcattactaaaacactgaagtgggattatatttttgtaatcgtctaatatttacagtcataaacctgcatgagaatactttcaaatactagcttttgtgcttttaaaataggtaacagtgaatgttagtattgggtgtgggatgcatcagggacacaggtttgtaaaccatgacaattcagttgtaaaactaaagccaagtgcacctgtagtcccagctgctggggaggatcacttgagcctaggaggtgaaaattgcagtgaactgatattgtgccattgcactccagactgggtgacatagtgagaccctgtctctacaaaaaaaaaaaaaaaaaaccctaaagccaaaacattgaaataagttactgacatgcaaatttggaactgaaactagaacacagtggtgtatatctcactgttctgaaaatacacagtttccagaaattcaaagaatggccaagataactcaaataggggattggctatatccagtaaaacaaaatcacttgcagtcatgtctaagggagatgagggtcatctgttaggccatagtcatagacttacaaagaataccagttaggattctgtttgtagcaaccaactctagctaacctaagcaataaagaatttatttgaaggatataagatcaaacggaagctaaagaaccagactcaggatagaaacttagctcccgaagatttttttaagcagaaattgctcaataatcttgcttttattcatcatggattaaattaactccagctgcttaaaatgcccattcaagatttaaatgcctggacgtgagtgtgcaaacctaggtcagaaatcacccctggcagtcttggagctttgagaggactctacaggaactacttcggcttaaatggtttgaggcaaagcagctgggtttactgattcatcaagactaaatgtgaaaggagaggtaatttattcaaaggaaattgtgggaaagactgttagacaaacaaaatctgacaaatgaccaggtggttacttgaagccctgacattgaaatatgttgggtgttgggtatatactaaatgaagggcaatattataacaagtggacatgctggaagtatgagcaacttacgtatgta

SEQ ID NO: 7929 - DNA, 2424 bp, Homo sapiens
accttatggtaatattgtgtacttatagatgtgaagtctttgtagctattttagcttcctacttcttagcactcagtgcttttaaaaaattccttatgatttctctatgtgtagataattcctggaagcatttacatgaagctgttcattgtggttgtctttggggtcttgaatggtaaagagatttcatttttatacccttttctacagttgaaaacaaaattttttttttaccacatgcatctcttttaaatcttggtaaaatattttagggaggcatattctaaagttatttgagtatttgatggttttgtttgcattttagccatgacgaagatgaaattcggcctgttcaacagcaggacctgcatcgggcaattgaaaagatgaagaaatcaaaggatgcagcatttcagaatgttttaacacatgtttgtttagattaagagtaaagatcatttgtacagttcagtgatctagtttggtgtgtcctcttatcagttagtggaaatagaacggaaagagtgctctttaaacaatgagggagctcagtgtttatggttttatactctgaattctaagttattgagatatagttgttacataggtggtattactgttggtcaaaaatcatgaggaggaacagttgaatccagcctgaacgtgggtgcttgtgtttgaccttttcagccatatattgtacagccttatagaatctaagctggtcttaaagtcataaatgattcattgggtcattagtgagaaacggggatgtggttaggtgctggttcctagacatgtgagtatgcgtttgtgtgtgtgcgtgtatgtatgtgtatattaaatgtatatatccacacattttatattgacattctgtagatatgtttgaatatagaaactttttttaccccaactactgaatccaggagtaccaaataatatatagtaaaactaagatttaaggttgtgtcaaaaaggtacagtgattcagccatttccatttgtcatttgtttcaaccttttttaagttgagtgtttttatttctgcagttattagttggatcctccacatcttgcatatatacatgggctcaattattatgtttgtcaggataatcaaatgaaaatactagttcagtgatcagcattgaatggttgttaggcagccatgtgctcaacactgatttcacctcttgagtataaactttttaaatttaaattggtttacatgaaagtggattaaaaggcctttcaaaagaatgggtttgaaaaacctcagtaccctttaatacatgtacatttctttccttttttcatttaatgtaacatgtctgttgtaactatgtttcttaaatattattttaaggttatgtgttctttaattatggtcaaatataatttggtcaccaaaaatgaaataatagtttaaaacaagtagctgttactaagtgtgctaaaaatactcattttataattaattttagttttcttagtatattattataaattgtgccctaagtcaggtacaaatgtacacatcaaaatgcccatattgtatctatctgtagtcgtttaatgtgaattatatgtgaatttttttcaaaattttactaaccagaattctgttataggcacctaaccacgcagcatgaggaaaacggcacaacacaatcttgaggtgccttctgaatcatcagattaaattatgcttcatatgtttttgcttttactgtatttctttaaaaactctaaatctttattcatgtgtcactggattaatttatctgataatgtgtctcacaagaatctgttagatcgtttattcttcagttgtactttgaatggtggggtggaagtttcaggtgaacaatggataacaaaaagcaagttatggaagattgtgaagaggatggaaaaactgaatacaagataccaaaaatgaaaaaaagtgtcccatttttaataactatattctattattttataaatgtgtaataaaggggtccctctttattggttgttctccacttaatctttggtctttttcagtaattttaagttttctgggattttttttggtttataaaacttgtgtttagactttatcttgctatggagttttcacacttctatagcacatatcctagtatctagtcatttctgttttaatatgaatttcagtaatttaattttaatctggtgacatattaatcgaaaataaggagtaatgtatacctccacatgtcctttctttttgtcttctcttaaattcacaatatccagtaggagtggttattcaatttcttcgtggttttaatcatcaaatgaagttagagaagtatactaatcccagcaactatgactcatctaggcatgttaagaccataaagtaattcaggaaactattttcctgatttttaa

SEQ ID NO: 7930 - DNA, 1030 bp, Homo sapiens
ctcactgtattacccaggctaaagtgctgtgatatgatcatagtgcactgcaaccttgatctcctgggctcaagtgatcctcccacctcagtctcccaagtagttaggactgcaggcatgcttcaccacgcacagctagttgttttttgttttttaaaaatcttcttgtagagaaagggtctcgctctgttatccaggcaggttttgaactcctgacctcgaggtatcctcctgccctggactcccaaagtgctaggattataggcatgaaccaccattcttgacctattgccttaaaacatatcaaaataacatatagtgtatgcaaaagcttaaagaacctagcaaattacaaagattaggatcagtggttatgaatcattttggggggagcatgtcatagagccctttaagaatgagataaaagtagtcttttctaagaaagctacgtatgtacatgaaatatgtacagtttcagagaaattcctaaaattctccatgttttttaggtaaggaactttggtcctagataagaaatcagtaaattatattttgcctttttttttttttttttttttttttgtgacagagtctcgctctgtcgcccaggctggagtgcagtggcatgatcttggctcactgcaactttcacctcctgggttcaagcgattctcctgcctcagccacctaagtagctgggattataggcgcgcgccaccacacccggcttatatatatatatatttttttttttttagtagagacggggtttcaccatgttgatcaggctggtctcggactcctgacctcatgatccgcccgcctcagcctcctaaagtgctgggattacaggcatgagccaccgtgcccggttgacttttaattgaatttttgataactgctttcaaaaaaacattgtgtaatcctggcactttgggaggccaaggcaggcagatcacctgaggtcaggagttcgaaaccagcctggccaacatggtgaaaccctgtctctactaaaaatacaaaaaaa

SEQ ID NO: 7931 - DNA, 1089 bp, Homo sapiens
ataaagagtgcctcttttcctatagtcttgccaacagaatgttatggaacttcgtgccaacatgatagatagaaaatggttatctctctgtttttttgtttttgttttttttcttttttgtgacatgatctctctctgttgcctagcctgaagtgcagtggtgtgatcagggctcactgcagccttaaactcctgggcccaagtaatcttcccgcctcaccctcccaagcagattacaggcatgtaccagcaagcctggctaattctgtttatttatttagttatttattttgttgagatggtatcttgctgtgttgcccaggctggtgttgaactcctgggttcaagcaatccccccgccttggcctcccaaggctggaattataggcatgaaccaccacagctggtcaaaaatggttatctcattaaagttttaatttgcattctttagggatggaatgaatattgtatgtttaagaagcatttgaatttttttctgtgaactgtatattcatatattttgcccatttttctattgcagtgctccttttcataataaatctgtaggaactctttgtattatggagatttgccctttgtatgatttgaaaatatttttttccaagttgtcttccgattttattggagttttcttcccccccacccaccccccctatggcttctggattttgaatataaatttaaaggcctttcctactcccaagtttataaagtaattttccacactttccaaactcttgctacctgttttcccaaaactcgataactgcatataattgaataacgtggtattcctctttatcccaaacttgatatctaaactcactgttacaactcactgtataaactaataaatcaaatagattctgatagtgaatgaaccttagtagagatactacttttatcaaaatacttgtatttttatggcttccctccttccttgaactaccagaaaccccatggctaattcttctccagccatgccctacttccacacttcctattttttcccattatatctcacccataaatgttttagttgtatctctaaaagaaaaggattctttt

SEQ ID NO: 7932 - DNA, 1034 bp, Homo sapiens
ttaagatttgtttgttttaaatttggaagaaattttttcttttttattaattttattgagttgtaaaaagtcaataaagaggctgggtgtggtgtttcacatctgtaatcccagcactttgggaggctgagtggggaggatcgcttgagcccagaggtttcagaccagcataggcaacatagtgagaccttgtctctactaaagacggaaaaatcagctaggcacagtggcatgtgcctgtagtcccagctactttctgtcttcaaaaaaaaaaagaaagaaagaaagaaaataaagaaaaataaatatgagcattaatattttgattttaggaccacttaacacaaatacaaacttgcattatgttgtgttgtggaactaacatttttcaaatttgtgtttatattttcttcctctaggtggcaaactctcacagttaattgaaagtaattgggctctgaggctcctgaatgtcattcagtgtagagtagaagtaggatataagatttggattatttcagaaatgtaaaacctcttagggagaaataaggtaatgttagagaaatgtgtttccatggaataccaataaatttcactttggatagcagatgtgtattgttactgggttatactgaagtatcaacagtaaaggtaatattgatgtccttcagaaattaacttgttttatatatctttgtttttattcatgtttatttttaaagttctttttttttttttaatctctacatcctttataaataagtgacatagactcagaggttggcagggctgccagcatttttaaaaagagttcttcccagcattttgatgtttgcttatactctgttatctttgtttaaagttggattacttgagactttatttcgcattgagaagctatcacctgcagtgctgatagtaccatgagatgatgatgtgaaatatagagaaaaagtacacagtatctattacagttaccagaatcttcagacttattaaggggaaatgattctctccataatattattatttaa

SEQ ID NO: 7933 - DNA, 1088 bp, Homo sapiens
gttagcccatgtaagagaaaatatcttaatattatgtaccctgtcagagcatagtgttcaactattttcagcaggggatatagaggcaattggatgaagtcttctccagagccacttcatctatagctccacagtatgattctggtacagcataacttaaaacagagttttcagaaccaaaattccttattgcactaatagcaattactgttttcattatgatgagttttgatttgagagagcaaatgctgctgcctttttattaaactgcggtcactttttaacctttattgtattttgggggcgggggttaaagttgatattattaattttgagtaatagttttagacatattctactttcatatgaaccagttagctcttctctagaattgtcttttctatgattatgaagagagcccagtaccctagctagctttcttgtaatatggtcaccaaggaaatagaaatagagaacggctcaatgaaaccggtcactgtttctggaaaccttggtgactgatgacatattcttcctcttgagagacatgagacataaaagatagtgtttttagggtattcattgatgaagttaaagttttgggatgtaaatttaggtctgattattttaaatgtgaaatgataaaaaaattatgttttgttttaaagagttttttttaaacttttattttaaattcaggggtatatgtgcaggtttgttacatagataaatttgtgtcttggggagttcgttgtacagattatttcatacccaggtattaagcctagtatccattagttatttttcctgatcctctccctcctccagatgaagctggaggccatgattcttggcaaatgaaggcaggaacagaaaataaagatttttttaaaagtttgaacaactaacacataaaaggagcattgattttgtttcttaagtagtaaaaaattactgtcacttcctgttttatattttagctcatttgtattgaattaatatatatgaaaaggttctctgcttttgctgcttaaaattactccttagaatttgcttctttatgtgaaactacacgtgatttcaatcac

SEQ ID NO: 7934 - DNA, 1034 bp, Homo sapiens
tagtaaaacttttatgtatttgcctttgtggtgtataaagcgtactgctttaagtcatgtggatttttgttttatagagtttaaacctaaattttcataatatggtatgataacacaggatactaaatcccaggttttccattaatggccttggcaaatgatttcctctttgagtctcagttccctcatgtataatctagagataataatacctactttacctacttcataaggattattttgaggatgagattgatgtaatgtataagatcctatatcaatattttgtaacaataagtatacatttataaattctataaatagaaaatatttgcctaatacattaatgttatattgctataaataagtagaatgaagtagtcccatctccatatctagaaaataaaagtctgcaatgtcttaatatctgtgtatacagagacatacacacaccctagaattaagcctgcatttgaatttggtttatagatttacaatggtaccttcttggaaccctgcctatattaatttctgaataaatctgtactaacagacttagttttttgttgctgttacagtgaaagttattttttttttcagatctggctgctggtttgcaccttccctttttatcatttttttttacattttgaaggaaatgaatctattgtaaagtattgcttctgattggccccaactccagctcctttcaggacaagtgccagtcctttcaggacaagttgaatcaggtttttcttgtctattttgaaaatacgtatgccctgtttttatttataaagatacttccttaagttttaacatagttgtaattttttttttttttttttgagacagagtctcactctgtcacctaggatggagtgcagtggcatgatcttggctcactgtaacctccgcctcccaggttctggcaattctcctgcctcagcctcccaagtagctgggactacaggcacacaccactacacctggttaatttttttttttttttttttttttttgtaattttagta

SEQ ID NO: 7935 - DNA, 1048 bp, Homo sapiens
tgccctaagcaattcccagcttgacttttccctttagtgatttggggtctccaagatttattttcctttcatatttcctccctttttaaaaatcttttggagaaagcatatttagaagaaaatgagtctctggtctcaagtttcgtctgatctctcatggctaggatggtttattccttgacggataggtcctgagttattaggaaagctcaattttagctggttgtgaagtctcatgtcttgtgaagagaaaacggggaggaagggagaaaaacaacaaaaaacaaaaaacaaatcctggaaaatttatataggccacattacctgaagtccatatgtcagtaggcaggtattaaagtggcttatgtatgtaactaagttgctgttcttttcttctgaagtttaagtgtctagcttcagttcttagggcattaagaaagcacagcttagttttcagtgactccaaattaggaaaaatgggggaaaaaagaagggaaataaattgaaaacattattttgaagacttgtagccaagaaaagtttgaattctgtctaaactatagaaaataataaaaattgaaaaatattaggcaggactagaatctaacaataggtatactatagtttttgaaacataatttctctgtctccagtttctcattttcactaaagacaaattatggtaggactgatttgctttcttctaattggccagattgtttgtatatagtgcagcaagaataattattttgttacataggctttttttttttttcgtgacatagtcttgctctgtcacccaggctggagtgcggtggcgggatctcgggggtgatctgcctgccctggcctcccaaagtgctgggattacaggcatgagccactgcgccctgcctacataggcttttaaattggctttgatagaactttgttccatagaaataatctcaggtaagacttttttaaagccaagcccagccatggatttgtaccatcaaatacctgtgaattgggtgaattcctctcctcttgattccaagataaactt

SEQ ID NO: 7936 - DNA, 1025 bp, Homo sapiens
gttcacaatttgaatttcactcaaaaattacctggtatatgatacagttaatagaagaaattcttaccgtcacattagtattgttgggctgcctttcttcagttggattagtgttatagttgatactttcctagactctgaaatagttctttaaagctgttttgagtaaataccttaagatatttactgtatttttcaaataaaatgattaattctactaccaaataaatcttaatttctagtctacttctagtttgcaagaggagctttaaatgtatttgtttacttaacatttaaaaatccatttctccttaaaatgaaacactttttttaaggtaggtaatattttaatttgactagaagttagtttttctttcttagtttaagctactttgttagtcttacaattttaataagtatagttattacctagtgacatttctgtttgtttttttaaggttaacattcaagatggtacatgctgaagccttttctcgtcctttgagtcggaatgaagttgttggtttaattttccgtttgacaatatttggtgcagtgacatactttactatcaaatggatggtagatgcaattgatccaaccagaaagcaaaaagtagaagctcagaaacaggtatgattgaaatgtttgaagatcatttttcttgtggctaacaagtattttcccctcaaactaaaaatttggtagagttcacaaattaatgagaaattctataagacccacatgaaaatgtattggtactcatagttttattactcttacaaagtactagtttattatgacattatttcaagtcattttttactatataaacaacttatcagaagaaaaatgaataaacaataaaatattgtgaacatcttcattagaatatttttgtcagctttggaggtaggatctagataaaagtttttaggctaacccaaaatatttatcttcagtaatgatatgccttttgctgtgtatgacatctgaaatgtggataatactgaaacgctctcagt

SEQ ID NO: 7937 - DNA, 1053 bp, Homo sapiens
gcccttagtatctagaggattaacctccaagggcgtcccgggcctcgccttggcgtccggcccggcctgggcccttagggtctgcttagctcttccccaagactcgtgccattcccgagggaatctttgtcggcatcctggtcactgtgggggtttgaggtcgtcccggaagacttcagaaccaggcgaacctagacgaaggcggctggaatgaaccaggtctgattgtcgcacaggcgcggccaccaccttgtgcaaaatcgaaggtggttcttcagggccgggcacgctttcacaaaagatggtgatgttaataataacctgccctctttgtgaagattggcaggccttcattgtcataggctgtattcgtagggcctttatgcctgcaaaactgggacttttgagtttgagaaacgatttgtgaaatactgcaatgaattaggagagaaatactacagtgaatgctatgctatgaatgctatacatgtcaataaattgctcatagatgaggtagtacgatttcacggttttccactcggaaatggagaacttaaaatgaaacgacctgataccatatttgcctaacaaataactctaggttatagtgttttaggatgtttcttagttgcatacagcactatcatcgtatatgtacatatttgtgtattcattttgttgaacctaatgtttatacaggattgaaatacgctccctgctgttgtatgcgcatgcagcttttattgtatgttcgctggtgatggtattgctgctgtaacagccttacattttaggtatatcaataccaaatgaatgatacatgagtgtacaataaagtatatatagttacagtctacaaaacaagtttcagtttcattgaaggattttgaagtaatttaaaaaggtagactactattttacaagtggccttagtagacctaagtctttattacattaaaaatttcagaattgggaaggatataaacgggttttgtgtgttgaccttttatgggattaaaagttgttactatcttgatgactgggatgtgttca

SEQ ID NO: 7938 - DNA, 1050 bp, Homo sapiens
acatccctgattatatggcagtattcctggtgggaaagccagaagtagtgaaggatggattttagcatgtcctatgtgcttatttatggtgcagcacatcatcaaacaacacttcacaggctctaagctggcaaactggagggctttgaagagaaataatgagctgagaggttcatgacatgccattaaaaagtttgtgattggatttggaaagtcagatgagtctccaagggaaagggactagttctgagctgttgcacttagaatatttttgagccccagagcagatatttatgagaagggagagttgtttttgtctcaaatccaggttctgactctgatgtgtagtgaggaagccgctttgcactgcagacctgaagtcccggaatatccatgatgtcacctttttctactgatctgcctgccactgcacagaggcacgctattagctctgtgatgttttagcttaattctcccacatgtgggttgcaattctagccaaaacaaagtcggcaggagattttatagccactgaattgctcaaggtgctacaggctcagtgaaatcaggaaattaggttgggatgcatgaacaaaaagataaacagaaagaaaaagcatcaggatggtgggattcgaggttgcctgttacgtgatttccaaatcaggaatcaagccttcggttttgcaatgggtgatttgatgctctgggttttcacctttgagattttaatgcttttctggcatatatgatagaagaaagcaccctgttccaggtggtgaaccagaagtccctctcactaaattagaaaggagacattttaggatatgagatcatgaaatagaatagtatttgaaaagaaaaaaaaatgaaaagaaaaagaaaagaaaatcacatatatgcaataacacacaactagcccagcacagggtgaatttgtggttaagccatttttttcccattgcagatgatactttaactctttgaatctcagagtcctcctgcacacatgcagcatgaaaagacgtttctgcggctgccatcataaag

SEQ ID NO: 7939 - DNA, 1068 bp, Homo sapiens
ttttaaatgctgtacaaaaatacagctgtcaacagagatgaaacatatgactacaaaagcactctcaaggacttggtgtccaataattaatttttctttttttataatgcaatccagtatgcctttgtgtcaaacttcattttctaagaaaagcatctttttgaaacaaactatccctgtagtaaagaggaaaatactaaatcagaaaaataccaactttatagatggactagaaattttagggacttctttgcagtctcaacaatgaaatatagccatgaatgcatatgccttcttaagcttgagtggcttattataatcagactaagttctcataccatgtaattccattgtagtttatgacttaattccgtaagaattataactgaaagagccttgcctaatcaaaataaaatttaattacatattcacattataatctaaagaacaaaggttttagtttaaaatcagctttatctctttgtcctgaatggaaaataaagaattataattttttcctcagttgtgactttcttgccagaactcatgaatgtttctgtattcctctaatgtccagatttagatatttccttatccaaccatttttccttctatatcttctaaccctttgtgttagtttgctagggctgccataacaaaatggcacagactggatagcttaaacaacagaaatttattttctcacggttctggagctagaagtccaagatcaaggtgatggcaggttggtttcatctgaggcttctctctgtggcttgcagatggttgccttctcgctgtgtccttacaaggtctttattttgtgttgtgcatccttggtgtatttcttagtgtccacatttcctgtcctcttaaggacaccagtcaaattggattagggcccaccctaaaggcttcactttatcctaatcacctttctaaatgctctatctcctaatacagtcacattctgagacaccaggggttagggcttcaacacatgaacttaagggagacacaattcagcccatattgccctctatgtttcactcccactctctctccatc

SEQ ID NO: 7940 - DNA, 1066 bp, Homo sapiens
cagcaaacattgatttagcctgttgtccttttttaaaaatgttagttaattgccatcattttaaatgaagggatttttgcacaaaggttacaatttctaccttctcataaaaagtggaagatctggcaactctgaactagcattacaacaacagatggggctgagtggtggccaatcccttgcaggagacctaggtcctctgtttatcagaagtaccacttggccttttcagtcatccttgccccaataggcatctgaatttgcaaaacttgtcttagattttggaatatagattactgatgcatggcaaaaatatcatataaagggtgtgcacacagagaagttaagaagttaagaagtagaaaggcaaatcaatgcagccattataatcctgtcatttatattttctaaggcaccatcagtaaacactaaggtttgtgattttcactgaataataaagcctagtaccttttcattgaaacctagcaaacaccatcagagaataaggacaaagggaagactgcatagaatgtcagaactagaagaaaactgagaggtgaattagcacaaagtcttcattttaggaaagattattgagattcagagatgtaaagatcttgtcctctttcataatagcatcttgatggcaaagtcaggactgtggatctctacactgagggtctctctcttactctgtggctattcttgcctaagttatgtcttcctctgatgtgtataaatcagccagtttaagaaaagcatcacactcttctaagtgcacattgcatatgtgtaacagctgacactgatgaagaaacagagatgagcagtgacatcccagacagttggcaaggtgtcactcatactatatcaagaggatggaaagtgaaagaattaaaggatacttaaaagtctcttcacattttctacatagtacacaaaccttttctataatagccctgaggtcatcttgcatccacttacttaattcaatggacaaaacactcactatcccataaggcaatctgtcctctgtgttgctaggttgttagaaactttaacttat

SEQ ID NO: 7941 - DNA, 1032 bp, Homo sapiens
catgtgaagagaccaccaaacaggctttgtgtgagcaataaagctttttaatcacctgggtgcaggcgagctgagtccaaaaagagagtcagtgaagggagatgggatgggctgtttttataagatttgggtagatagtggaaaattacagtcaaaggcggatgttctctggctggcaggggtggggggcacaaggtgctcagtgggggagcttttgagccaggaagagctgggagaaggaatttcacaaggtaatgtcatcagttaaggcagggacaggccattttcacttcttttgtgattcttcagttacttcaggtcatccggatttatacgtgcaggtcacagggtatatgatggcttagcttgggctcagaggcctgacatatagcgtatacaggtgtacacagaagcataatgtttaaatattttaatttcagtgggtgatataaggggcagtatgattttttttcgcttatacttgctggcatttttccaaagtttctttagtgtgcctatagtattcatatcctgagaaaaatctttcatgattctaatctttttattattattattttttaaagatcactgagaactaagagcaaaatgcaaagggagatctttttgaggtctgatcaagcccagcttcactggaggcttttaggggcctcagaggtgtagatgctggtttagtgcctgactgtggctccttagaaaagaaccagctaaatgcagcctgtcctttgctagagctgccaatgctgagctctgacacagagaaaccctgcctctatgatgaatatagcctcatgctcctgactttcaaatgaaaaacagaaacacacatgcttgttaagaacgtttcagcctggtttgcatcattaactgatgaaaatgtgcctgcaaggacagaatgaaatagatttgcccctcctcctccagcaacccctcctatgagggacgttcgtctctggctccaggctctggccacttcctggttaggattgctaaaggcttccatcagggaatgtt

SEQ ID NO: 7942 - DNA, 1050 bp, Homo sapiens
tctggggagggaagaagagctagaaagtgagttcagtcaccagtggccaatgattcaatcagtcatcaaaatcttacctatatattgtgaacctccataaaaacccctcaagcagcaatccccaacctttttggcaccagggactggttttgtggaagtcagtttttccacagactgggcagggatggtttcaggatgattcaagcacattacatttattgtgcactttatttctattattattacattgtaatataaacgaaataattatacaactcactataatgtagaatcagtgggagccctgagcttgttttcctgcaactagacggtcccatctgggggtgatgggagacagtggcagatcagcaggcattagattctcataaggaatgcgcaacctaggttcatcggatgcagagttcacaatagggttcgtgctcttttgagaatctaatgcctctgttgatctgacaggaggcggaactcagacagtaatgtgagtgatggggaatggctgttaatacagaggaagctttgattgctcgcctgctgctcacctcctgctgtatagcccagttcctaacaggcctcggactactaccagtctgtagcccagggattggggacacctgctttaaaggatggggttctgagaggttttgagttggtgaacacattgaggtgctggaagagtagcatcccaagcaaaaacatggaagctccatgcccacccttcctccccctactcaccccataccttgccctatgcaactcttccatttggttgttccttagttgtgttacaggaaaggggtcccaatacagactcaaaaagggggttcttggagctcacacaagaaagaaatcagggcaagtccacagagtaaagtgaaagcaagtttattaagaaagtaaaggaataaaagaaagcctactccataggcagagcagcagcatgggcttttcaactgtgtatacttaaagttatttcttgattatatgctacacaggggatggattattcatgagtattctgggaaaaaggca

SEQ ID NO: 7943 - DNA, 1138 bp, Homo sapiens
tggcttcatatgctggctagagcaatttccagccaagtaactattctgtacttatgagtcctatttgtagaatggagataatgatagtatttatcacactgggtttggtgaggattaataaacttatatgtgtcaagcacttagagcatattatatgctatataagagtttcttattttaatattaagataattaggacagaggtcagttagaaatgcagaaccttaggaaacattgacttcaggaccttactctgcatgtaatgcaacaaattaagaccacatgaaacagataatatttgacccgggttttttttttttcattttttttttacttggaaataattacagattcacggaaagttgcaaagacagtacagagatccagtgtatccttcacccactttctccaatgattatatcttacacaactataatacagtagctcaaaactagaaaattgacattggtacaacaatgcttttgtatagtgctatgtcatttttttcacgtaagcctatgagaccaccactttgataaagaaacgaaactcctcttcactaccacatctccctcatattacccctttatggtcacatctgtcacctcctcacctgtactcccctaacccttggtaaccactaatttgttcttcatctctgtaattttgtcatttcaagaatgtcatataggctgggtgcggtggctcacacctgtaatcccagaactttgggaggccgaggcaggtggatcatttgaggtcaggagtttgagaccagctgaccaacatggtgaaatcctgtctctactaaaaatacaaaaaaaaaattaggtgggcatggtggtgcatgcctgtagtcccagctacttcggaggctgaggcaggagaatcgcttgagtctgagaggcagaggttgcagtgagctgagatcgcgccactgcactctggcctaggtaacagagagaaactcagtctcaaaaaaaaaaaaaaagtcatctaaatggagactttcatataaaaggatagttcaatatacaaaaattaatcaatgtaatataccacattaacagaatgaagggaataaatacatgaccatctcaattgatgcaggaaaagcatttgacaaaattcaacaccc

SEQ ID NO: 7944 - DNA, 1031 bp, Homo sapiens
gtaaggcttggactaatttaagtgcctttgcaagagctactgagggaagtttagggttttctctcatgaaatatagctttaaagtcagacagatttggtattgagccctggtacaagacctgtgaccctgcaagggtaatttactttattaccttccatttctcatatgtgaaataatagtcagtgttttgccatgacaaagataaagatgaaatagttataatactaacaaccctggcacacacttagcacacatgtaccagacatagttctaagcatttacatatgtgaatgtatttaatatatataagtaggtgtccaataaattatagttgttattattctgccatgttttgtgacacacaatttaggttttaaatttctcttttatcgatattagtggcattcctagaattattaaaaacaatacatatttggctaaggttcagagatcatcgttttgtattgttttcgtagggttattttggagccgttggggcactgttggaactgttcaaaatgactgatgacaagtagagacgagcagtggaggaaacagcctcccaaaaggacagagaactaaaaaattgctgctggagaaggtgaaagtcgctttgggacggaagccaagccattatggcagatgaacctgctggatttgtaaataatttaaaatccttccagatgatcttttactcttaggttttgagctaatgattcaaaacgggggaatataaaaggttttttttctgtatactgtatttttttaaaaaaatggtgcagcgtggccaaacctaccaattgtatgcattaactttgaaaagttgtttgatgtttaagaaggacctgatatgtaagcgctggtcatttttcttctggggtttactgatcagtgtggtgattttaacttcatttagtaattactctaggagattttaccttgacttatatttttcatgacgtttcatgatttgctgttggtttcaaatgaaactacaaatctggcatgttttactgtgaacacttttgtt

SEQ ID NO: 7945 - DNA, 1085 bp, Homo sapiens
taaaatgagtaatcattaatgaaagctttcttcaaccattttattataccttaaaatgtgtaaatgtgcacttacttaccaatcttttgatgtgagaccaacgcctatttttgagcatggtttctccgattggagtcctgtagttatctttctttcataatctacaatattatgcacctcctttgatttccagtttgtttccttaaagtggattaagaagataaagatacttatgaagtaaattggttgcagaatgtttacaggtttttctctctctctttcacgttgtggcatccacctaagtagacagcaattatttctgactacctttttcaatatttctcaagaatttaactgaattttcatagaactgaccattaatttgtgctctttttattgatttaggtggtatatagttaaactagattattacattacaatcaacctgtcataaacaaatttaaggataaacacagctgactcttggcaagtaagcaattcagctggtaagaacagaagtgcttgggctactaagagtagcttattggccttgagaggtcagtgtacctgaccattagtgaacctctttacaaaggaaatggagagtgtcagtaaattcagagtcccttattggagtttcttttttttttttgagacagagtctccctctgtcacccaggctggagtgcagtggcgcaatcttggctcactgctacctccacctcccaggttcaagcaattctcgagcctcagcctcccaagtagctgggattacagacgtgcgccaccacacctggctaattttcatatttttagtagagggtttcaccatgttggccaggatggtctcgaactcctgacctcaggtaatccacccgcctcagcctcctaaagtgctgggattacaggcgtgagccaccccggcccccttacttggagtttctaccataatataaaccaaaaagtgggggcccttctctcttccacctcctctgtcacctcctttaaaatcaatgctgcagtgctgcaatgagctatcactggaggtatctaatctcttgtatacactgcagcagaaaaacatt

SEQ ID NO: 7946 - DNA, 1009 bp, Homo sapiens
accactcatagatggcccctttcgtcatttgatggagggtggaaaaagctatctggggttggggcccagcagcctgcattttaaccaaccctccaggtgattctgatgcacttaaagtttgagaaccccactgtacccctacttacttaagtaactttggtattagaaataacattgctagtttttcagagttgtagttggaaaattttctctactttacctcttcccctacttgttagtcttaggaacaggagtaggtaacttaacccactgacccacagtgatgcattttatctgcaaaataggtaatagtgatagcttccttgcttaaagtcccacagccaggatctatacagtctttgattagcttccattatttacagagtttgagtcttaggacaagctttgttttgttgtttttaagtttgaggagtggcttaaatttaacctaataatttaggaattggcagaactgatactctccaaaagtgctaaggagagttacaagcagagggatgctacagccagcacctactgggttaaaagagtccatgtatgcatctcttcccaattatgtgtttattgacatcacattggtagcttgaaattggtcatggtcgggggtgattatacgatggaaattagtaaatgctataaactagggcttttagtttcagagagctggttgttaaacatttaccagcatatcttagttacaaagtatgttcaaatgacctgaagcttcatttgcatatttgctggatctagcagttcagatttctgatcatttaaggctcattataggatcagcattaggatatatatagataaaattggtaatatgggaatcagattcagcccacagacatgttttgttggtctgcaatgtatttttttaatgttaaattacctgtcagcccttaaaaattggaagatttaacataaaaatttggatttctggctcttgaaaaatagggtcatctggtaacactgggccctcaacatcaca

SEQ ID NO: 7947 - DNA, 1048 bp, Homo sapiens
agaggccgggcgcagtggctcaggcctgtaattccagcacttcggaaggccgaggcgggcggatcacgaggtcaggagatcgagaccatcctggctaacacagtgaaactcagtctctactaaaaatacaaaaaattagccgggcgaggtgacgggtgcctgtagtctcagctactcgggaggctgaggcaggagaaaggtgtgaacccgggaggcagagcttgcagtacaccaagatcgcgccgctgcactccagcctgggtgacagagcgagactccgtctcaaaaaaaaaaacaaaaaaactgcacattagagatcacctaatgtttgagggagttctctgagcctcaattttgtaatctgtaaaatgggaataataatagtgccaacttcattgggttatgagaactgaattaaataatgcatggaaagctgctagcacagcgcctgacacatagtatgtcctaaatgttaattgatataatgttgctgctgctgctggattaactcatttttcacagtcgttggaataaacttcttctgaattcttataaataaactatttattggcaagtttgtagctctaaagtcttaacgtttggccggtatatatctgtccacatcagattgcataagataatatataccacttcagcacacgtgtaccacactcaattaaattttagtcaaggcttagacatattttcttggcaaaccctctcaccctcaccctggcttaggtcagttacataacaagtaaatgggtaacctgtcaagtcctggtaatgctgtcttagagttttagcactaatcaaaaggtttggatgttttttgtttgatttttatatgtgttgcaagcaaagtgagttgttaggtatttttagtattcagcaagaagctgaaacattttcagtaaatcttttcaaactactgaatcagttttgattcaggaaatccctgagtttgcaagggaagctgttcaaaagaacagttatgatttgcagctgctgtctctgaatcaaacttttcttcaaattgtgtaatcca

SEQ ID NO: 7948 - DNA, 1072 bp, Homo sapiens
cagaggctgttcattaggacaatggaagaatgactctgaaggcattttggaaattactggtgctgtccctcccatcacaggcacagggtgccatgacctcggagaaggaaatacagtcatgccccacatatagaccttttcaccaaggaaggagcacatatacaaaggtagtcctataagattataatggaactgaaaaattcttattgcccagtggtatcataaccattgaacatcataactcaatgtgttgctcatctgtttttgatgatgatggtataaacctactggctgctagtcatataaaaatatagcacacacaattatgtataatacataataccttctagtgggacaagatgtgggtgtggaagaccgtgatattgatgaccctgactttgtgtagacctaggttaatgtgtgtgtttgcatctttgtttttaacaaataagtttaaaaagtaaaaaaaaaaactaaaaaattttaaaaatagaaaaaagcttgtagaatgagaatataaagaaaatatttttgtacacctatacaatatgtttgtgttttaagccaagtgttattacaagagtcaaaaaatttttaaaattagaaagtttataaagtaaaactgttatagtaagctaagtataattgattactgaagaaataaatttctttttataaatttagagtagcctaagtgaacaatgtttgtaaagtctacagtgtgtacagtgatgtcctaggccttcacatttactcaccactcactcacccagagcaactgtcagtcctggaagctcttgtatgtgccctatacaggtatgccacgttttgtcttttagactgtacttttactgtaccttttctatgtttaggtatgtttagatacacaaatactaaccattgttacaattgcctatagtactaagcacagtaacatgctgtacaggtttacagcttaggaacaatagggtttaccatatagcctaggtctgtagtaggctatagcgtctagggttgtgtaagtacactctatgctgtttgcacaatgacagaattgcctaatgacacttct

SEQ ID NO: 7949 - DNA, 1021 bp, Homo sapiens
gataggggctgtcattctcttccttttacaaatgaggaaactgagggctcaggactcagggtaaaactatttaagattttgactttgctgggcagggccctagtgggttccatgaagcaagtgtgggtagggttctgtggtgtaaagagctttgttgccaccaggcctggattcaggtccgcatttcctacttactagcaatgaagccttaggtgagattcttaacttcctcaaggctcactgttgaatagagataatggtggccatcttatcagttgtagtaagaacccaatgtggaaaatgtatatcaagtatagtaccatgcctggaccctagtacatgcatagtaaaagatatcttactatttaccacggtttgaatgtgtcccccagaactcatgtgttggaaatgtaatctccaatgcaacagtgttagaaggtggggcttaatgggggatgtttaggtcatgagggcttcaccctcatgtatgggttaatgccaattgtaaaaggacttgaggctgcaagttcaatctcttgccctttctcaagcatgctcttttgcctttctgccatgggatgatgcagcaagaaggccttcaccagatgcagtccctcgatcttggacttctcagcctccagaactgtaagccaaataaatttctgttcattattaattacccagtcacaggtattctattatagcaacacaaactggacaaagacagaaaactggtactgagaaatggggctgttgctataacaaatacctgaaaatgtgaaagcggttttggaactgggtaacaggtagaggctggaagaatgtggggaagcaggctatgaaaagcctatgttgctatgaaaagcctatgttgctatgaacagagcattaaatgtggttctggtgaaggctgagaagaggaggagagctgtagtaaaagtctaaatctccttagagattacttatgtgatggtgatgagaatgttggtagaaataagagcaataaaggcaattctgatga

SEQ ID NO: 7950 - DNA, 1033 bp, Homo sapiens
atcattgtttaactgtctgctatctgtgttgacacaatctgtgtttctgggtgaattttccttaattactaacacagataaaatttgctttagttagctgtggtccctggacagtctgttttagaaggctctgcttagtgaaagagaatgacattgatatttcagagcttaacatttattgttagattctttttatcatgctcaaaaattaaaccaagttttgagcataattttaaaaatcctttaaaaatctaagacttgcttatggcattaattacaaagtcatcacttagagaccagatcgtgtcctcaattggtcaagggctgattctacaagcaacagaagtaaagatgatggcaattagctgaaaattagactcccagataaatatctgaataagaaatccctaaaatgaagtcaaagatttatataatttttaaaaaatgtttttgctcaaactgttcacatgtttatctcagaccttgcagatttagtttagacacaaccagaatgcttgtcagtagaactcaccatatttttgaaatacgaatttcttttttagctcaaaaagaaaaaactagaacaaagatcaaagcttgaaaatttagaagaccttgaaataatcattcaactgaagaaaaggaaaaaatacaggaaaactaaagttccagttgtaaaggaaccagaacctgaaatcattgtaagggctttttttttggtttccagtaatacatgtccagtgttgtgctacaggggagcaaatatctgtggagggtttgattgaatgctggcaagctcacggtaactctcatgctatatatatatatatatatatatatttatttattttggctttagacggaacctgtggatgtgcctacgtttctgaaggctgctctggagaataaactgccagtagtagaaaaattcttgtcagacaagaacaatccagatgtttgtgatgaggtaagactcatgcaaagcactgcaaaatccagctcattaattttatgtttcttatgctttactcca

SEQ ID NO: 7951 - DNA, 1026 bp, Homo sapiens
caaacaccttgaaaggattatcagaggagtttcctgcttcctgctccttatgatttatttatagcacgactacaatttctctatatcctgaaatacaacagagtgattttgctataaatttaaaaaccatattaccaaactaaagtatgcttatgtggggatccattctttacgttattgctcaggtaatgtggtcatccacttaaaacttgaaaaatgaaaatcgaaaagaatggtaagaataaggaatctggaaataaaggccaatttaattcttcagtttttaattctgtcccatgtgtctgtcattctggtgtttcctcctccccctgtttgtatatgagtgggatctgtagcacttttcattcacacctctttggttacaaaagcagtccagatccttttcccagctatttaagaccttcccaatctggcttcaattttttccaactttgcttttttctgctttccttctgaaccccatattttaaccaaacagaaatatctatgctctcatcttgattcctttcttccttccttcctttttctttttttcttttttctttctttcttttttttttttttttttttttttttgagacagagtcttgctcttttgcctaggctggagtgcagtggtgcgatctcagcacactgcaacctctgccttctgagttcaagtgattcacctgccttagtctcccaggtagctgggattacaggcatgtgtcaccacacctggctaatttttgtatttttagtagagacggggtttcaccatgttggccaggctggtctcgaactcctcacctcaggtgatccacccgccttggactcccaaagtgctaggattacaagcgtgagccaccgcacctggcctcccatctcaatttctaattcctacccttaaagactccttacaaatgccatctctttcatgaatccttccctgatcaccacatcatgtatcgtgaatgttacctattatcgtagctatctccatccctatctagagccatcttttta

SEQ ID NO: 7952 - DNA, 1085 bp, Homo sapiens
cctgccttagcctcccgagtagcggggactacaggtgcatgccaccacacccagctaatttttttgtatttttagtagagatggggtttcaccacgttggccaggatggtctttatctcttgacctcttgatccgactgcctcggcctcccaaagtgttgggattacaggcgtgagccacggtgcccagcctggagtttcttataaaatcttttgttgctcactttcatccagagacctgctgaagtcaaagaggtcaaagaattagagagaataccaagaaaggtaaaaagtgttctgcttttcaccaattagtgatactttcaatctgcaaaacactgcctaaggctcttgttttactgcatcataaggaagtttaggttggaagtaatcagcgtacgatagagaataataatttgaaaactaccaagcttcctttcagtttcatctttccaagctgaaaagttctaggagcttatggaaagggtcaaaaaggatccatgtaggtatgtttaacttctggaggacaaaaagggtacccctttacatttgggaaactaagtagttataggaacatgtaaaaactttatttgatatagtggttgtaaactacataattctttaccgtaaatggtagacacaggaaagaaaagaagtcaaataaggatcagctaaatttgggtttgcatgatttccttgataaccctttattattattctagaaatatttagggaatattgctaactttttagatagcacaccctcctctaaatattccttggttaaagtttgaaaagatcctccatatatgcgatttccttaagttctgatgggcagtgattttgaagtcttgatgggcttttaggtagactttccagtgactggctaatcattgttatatttgaataccccagaaaaggatgaaagctggtttagagtaaatcacatatagttttcatagatattaatattttttgataatgaatccaaataaggtcttgattatccaaaaacgatggtgagaacattgagatagctagttgaaatgagaatatactttctccctactgagtgaaagccttgtt

SEQ ID NO: 7953 - DNA, 1023 bp, Homo sapiens
tgcatttggaatcctcagctgaaccgggataattcatttaagtccatgtatatatactgcaaggagctgtgagagttagtaaagcagtcttcaaaaattgcttcagaaaactgcatataaaggacttctattttattacagcataatccccttcctagtataggaagtatcaccacacaggcttaggggcagctagtgaccctttgcagtctctgaggccaaatcacaagaaaaatatcttaaagtacataaatgttttgggttaaatataaggcagaaagtctcaaagttagcaatattaggacttcctgtttttacagcctgtgtaaattcaggatagatgttggtatttaattcataattacagatagttctttttatgggttataggactttttagataccttaagatatttaaaaatactgtaatgcaaattacctatggaaatatccattatacttgggttaagatctaaatttccgaaaactgtgaagaggtagccatggggatgcccatcttgtatgaaccattatgtctttcaaaattgtgagaaattcaatcccctccggttctctctaggcccatattatagtgtgaatgactgtgaacacctgatgctcatttcctcaagccacaccagaaatctctttcatcattttcttgtcacactcatgattttcttctgctttcctcattttccagtgaaaagaaagtagtcaataggttataaagaaaagaaggggtttttggggaaagtgagtttattttttttttattttttattttttttattttttatttttttgagacagtggagtgcagtggcacaatcttggctcactgaaacttcctcctcctaggttcaaatgattattctgcctcagccttccaagtagctgggattacaggtgcccgccacctcgccctgctggtttttgtatttttaatagagatgggatttcatcatgttggccaggctgttctcagactcctgacctctagtgatctgcccacctcggcct

SEQ ID NO: 7954 - DNA, 1022 bp, Homo sapiens
aactctgcctccccggttcaagagattctcctgcctcagcctcgtgagtagctgggattacaggtgcgtgctaccatgcccagctaatttttatatttttagtagagacggggtttaccatattggtcaggctggtcttgaactcttgacctcgtgatctgccacctcgccctcccaaagtgctgggattacaggcatgagccactgtgcccggcctattatccttgttatattgacaaataaattgaggttcagtgcatttacactgtttgcttaagatcacagccagtaattggcaaagttgcctccagagcccatggctcctactcccttgactattctgtctctaggacatcgcttaatagtgcagtgtagatgtaagaagctggactgaatctgtacttgaccctatgagataccctggaagctgtgtttttaaaaaattttgtatttgtagaaatgcagaaagaaaaaaatacagtgactgtaagtatgccaccatgaagattcatcggttataattttttctgttttttactttacatattttactttacatattttttaatattatgaaatcaaagtcccaaaataggaagtgacttacccaggttctggttgataatttgtcacagaagcaggctttagcagcagattgcctggattcaaatttaatttggaaaaaaaaatcaaattattccatactttctgtctgtatctctgcctttatccttctcctttttttttttttttttttgagacaaagtctcactctgttccccaagctggagtacagtggtatgatctcggcttactgcaacctccatctctgggttcaagcgattctcctgcctcagcctcccaagtagctgggactacaggcacgtgccaccatgcctggctgatttttgtatttttaatagagacggggtttcactatgttggccaggctggtcctgaactcctgactttggatctgcccgcatctgcctcccaaagtgctgggattaccggcatgagcc

SEQ ID NO: 7955 - DNA, 1049 bp, Homo sapiens
acagccagcgcagccaccacaggcgcagcccccgcagcagcgccgctcacccgccagccccagccaggcgccctacgcgcagaggagcgccgccgcggcgtacggccaccagcccatcatgaccagcaagccgtcctcgtcttcggcggttgcagccgctgctgccgcagccgccgcctcgtcggcctcgtccagctggaacacgcaccaaagcgtgaatgcagcctggagcgcaccgtccaacccctggggcggcctgcaggcgggccgggaccctcgccgggcggtcggtgtgggcgtgggtgtgggtgtcggggtgccttccccgctcaaccccatctcgccgctcaaaaagcccttctccagcaacgtgatcgcgccgcccaagttccctcgcgcggcccctctcacttccaagtcctggatggaggataacgctttccggaccgataatggtaacaatctgttgccatttcaggtaatactctgctgcacctacacactccttccctctgccccgctccttttgccacttctctgacttttaatcatccacccgcttatatttaaaaagggcagcaatgtccagctcctctttccccttccgaagcctccagttctttagggctgttccattatcagaggatgaggttgggagaacattgtgattactggaggaatcgtattcgtcccttcagggtagaagaagcctttttcttttagtttattttctccttcatggtgtttgtacctcttattttgacttcctttgacaagtaaagctgcaagtgtgtggcaaggtgccggcatagtcccaggatgagtaggctgagattcctatcattttgagtagctacacatttcaggttatgcaatcctgagctcagggtgccgcctgcaagcggtccacacccaaaccaccctgactttactcttaaagaggttaacaacccttgagtggtgctatttcagacggttgcgtatgctcagttaaactaatgtgaacacatgtgtttatgtctcgctaaggtgctagaatcattaataac

SEQ ID NO: 7956 - DNA, 1006 bp, Homo sapiens
ctggccaacatgtcaaaatcctgtctctactaaaaatacaaaaattagccaggtgtggtggcgggtgcctttaatcccagctactcaggaggctgaggcaggataattgcatgaacccgggaggtggaggttgcagtgagccgagatggtacaccattgcactccagcctgggtgacagagcgagacttggtttcagaaaaaaaaaaaggaaagaaaaaaatacatatattaggatgttaaaagggacttaatattatttggcatattgaaagagttgagaggccgggcacgataactcacgcttgtaatcccagcactttggtaggctgaggttggcgaatcatctgaggtcaggagtgtgagaccagcctggccaacatggcgaaaccccatctctatcaaaaatacaaaaattagctgggcatggtggtgggcgcctgtgatcccagctactcagggggctgaggcaggagaatcgcttgaacctaggaggcagaggttgcagtgagctgagattgtgccactgcactccatcctgggtgacaagagtgaaactccatctcaaaaaaaaaaaaaaaaaagagttgaggtccttttctacattattacattatcaggaaccggattctgtttttttatactatttatacattgtttttatgtagaagctaatttctagtggaagtatacactgctgcaagctttctaaagcaatttgttggcaaggtggttcacccctgtaatcctagcacttgggaggccaaggcaggaggattgcctgagcccaggagtttgaaaccagcctgggcaacatggcaaaactctatctatactaaaaatacaaaaaattagctgggtgtggtggcccaagcctgtaatcccagctacttgggggactgaggcaggaggatcacttgagcctgcgaggttgaggctgcagtgagctctgatggtaccactgcactccaacctgggagacagaggccctgccttaaaaaaaaaata

SEQ ID NO: 7957 - DNA, 1052 bp, Homo sapiens
tttttgtatttttagtggagatggggtttcaccatgttggcctggctgggctcgaactcctgacctcaggtgatccaccccacctcagcctcccaaagtgccgggattacaggcgtcagccaccacgcccggcctacaggtaacatttaatgataaaatattgaacactttcccccttagatctgcaccaagataccacttctcttcaagtagtaaggcataaacattggaaaggatgaagtaaaactgttcacggactacatgatcacatacgtagagaatactaaaaatcctaccactaataacaatgaacaaggtgcaggatataactcaacattaacaattcaattgtctatatactagcaacaaaattaaaatagaatttttgatcacatcaaaatataaggaatttaggggtaaatttctaaaaatgtgtgaaacctgtacactgaaaacttcaaagcattgctaagagaaaaatttaaagatctaagaggatgtttgctcacatttatggattggaaggtgatggacaggaggaaaaatatttatttctcacttgtcttgggatcgtaactgaggtcctatgatactgtaatgtaataagatatgccaggctcagtggctcatgcctttaatcctagcattttgagaggccaaggtgggaggatcacttgaagccaggaatttgagaccagcctgggcaacatagcgagacccccactgccatcactacaaaaaaataaaatttagccaggcctggtggtgcaaacctgtagtcctagctaattgggaggctgaggcaggaggatcccttgagcccaggaattcagggttaaagtgagctatgatcacaccactgcactctagcctggacgacagaccgagaccctgtctcaaaaataaaatcaactgggcacattgactcatgcctgtaatctcaacactgggaggctaaggtggttgaattgcttgagtccaggagtttcagaccagcctgggcaacatggtgaaaccccatctctacaaaaaatacaaaaattagccaggtg

SEQ ID NO: 7958 - DNA, 1972 bp, Homo sapiens
aaaccctacttatttacaatgctagaaatacagacttaccttacatcaattttgtcctaaaccgaatttctcaggattactgtggtttctttcattctgattgaattatattgacctacttcttcatagttggtttgcagtgttccatgagttttacttttcctcatcaacatattgctttaacacaacatatttatttaacacgtacaaatagggtcaacttcagatcctactgagtgtgtgacatgcttttccaacatcagctttttgtaaccacctgtataactttttattacagtgaaattgcagtcagtatgtgaaccaaaatatcttgcccctttatgaatttaaaaggcagccaatacaaagccacctttttggaaatataaaaagtaaagccttgcattcttatatagcaggtcttcataaaactctaaaatcccttgttgctaccagtctaatcttgccttaaatgttaagttattttttgaatatataaatataaacatataaacacagatgatgactggagtagacttttaaaaaaatatttttttcatgagatactattttaggtgaaattgttactgtagatttaacagctgttttgaaatatttactgttattaaaacttgcttcaagagaaattgtgaatatatttccatatacaagcactagtaacagtaagtggccctgtcatccactaactcaggcaaagtaaagaatggcatttttgaaggacattttacctccccatatgatttgattggctaggactttcttctgtaaagtcataccttttcacatcttaagtttttacatttgccattttccaaatctcaattttgggcaagaacgatatagtcacaactatggggctgctttcaaaagcggggctccatttctactgtcagatcaatgtggtgctgtaaccatctttttatccctaccttcaagaacctccttatatgaagcctgtctttatccatcagaaggtgtgtgaaatcatcacttccttctggttttatgtatttgtagactatgcagcttttcattaaactgcaagtatatacaagacagatctgaaattaggcctgagtgttccgatccaccactgtactagtaaataaaaatccacctaccttttatgtggaaaattatgtgctattgagtaacttttagctcttttttaaaaaatgggtgaaatttaagtgtcttttttatgagaatgacacatgaagagatctgagagcaatctcatgtagtcttccatgaacctgcaattgtttggtatgcgtcagcattttccaatttccaggttggatctagagctgctgttgatcactcaggcatactaatggattcatttagatgggtccaagctgcagtccatgagcaataacagactaccccagatactgcagtttacgcagtgcttagtaaatgagatttgtggaactaagttattagttacctgaggcttcttaagaaagtcttcttttttgaccagttgatgtgaaagagggagcatgtgacacagccagtatggtggagtgctagggttatcctgtttacaataaatcgcctgaatttcacctctggagtctgcatttgtattatttttccagttttagtgaaatagtacagtggccagtcctcagcctacctctcaacatcccagtttgaccagatttcttgctttcattgttcataatgcagaaagcagtgaattatattaacattttaaaagtgtttctgggtaacaatgatttttgtcaaatagaagactcaatttcacaaccttaagaatagatcacttttgtaaaacaagaatctcagtatttgatgttggactccttgctgtgagtattgtcactgactccaaacccagaaagatttgttcctgcccttacagggatgaaaataaaaaggatagaaaaaatatttctctcctctacaatgagtccttaca

SEQ ID NO: 7959 - DNA, 1049 bp, Homo sapiens
tatgcttagtaccctgatgtgatcactatacattatatgtatatataataacattatatactctatgaatatctacaattattatttgtcaattaaaaataaaatgtaaaaaaacagtggtggctttgaagtggtttttgcattcaggcaggttagccacatttactgttttcaatctggacctacaccagttaattattactacttttagatttctgcagaagggctgggttgcacatacctgtaatcctagtacttttgggaggcggagaaaggaggatcgcttgatcccaggagtttgagaccaccctgggcaatatagtgagactctgtctctacaaaaaataataaaactattagctggatatggtggcttacacctgtggtcccacttactcaagaggctgtggttgagaggattgcttgagcccgggaagttgaggctgcagtgagccatgattacgccactgtgctccagcttggatgacagagcaagactctgtctctgcctccaaaaaaaaatttttttttctgcagactaaatgctctgacccaagtactaaccttgttaatattgaaggatttttatttggtgtttttttttttaaagacggagtctgctctgttgcccaggctggagtgcagtggtgcaatctcagctcattgcaacctccacctcccaggttcaagcagttttcctgcctcagcctcccgagtagctgggattacaggtgtataccaccacacctggcaaactttttgtatttttagtagggacagggtttcaccatgttggccaggctggtcttgaactcctgacctccggtgatccgcctgccttggcctcccagcatgctgggattacaggcatgagccaccgcgaccggccaatattgaagttttaagaaaaagttagctgaacttcaaagtcttaacacacaatgttcaggtttttttttttttcctgctttagcatccttagatcagttcagttaaaaattggaaaatgtgaaagcctaaagagtcatcttttgttgtttttttcccta

SEQ ID NO: 7960 - DNA, 1031 bp, Homo sapiens
ttgttgcccaggctggagtataatggcatgatctcggctcactgtaacttccgcctcccaagttcaagtgattctcctgccttagcctcccaagtagctgggattacaggcacccgccaccacatccagctgattttttgtatttttagtagagacagggtttcaccatgttagccaggctggcctcgaactcttgacctcaggggagccacctgcctcggcctcccaaagtgctgggattagaggcatgagccaccacgccggacccgtttttctttaaaaatgacattttaaagagttttatattagcttatgcaaagagaaagttcatttacctcagctgttttttatgtattgtttatcttatcttatcttatttatttatttatttatggagacagggtctctctgttgcccaggctggagtgcagtggtgggatcatagctcactgcagcctcaaactcctgggttcaaaccatcttctggcctcagcctcctaagtagctggattacagacgcacaccacacccagctagtttgtttttaattttttgtagagatgggatcttgctatgttgcctgggctggtctagaactcctggcctcaagtgatcctcccccttcagcctctcaagtagctggaattataggtgtgagctaccatatccgacttttgctgtttgttttaaataggccttcccagagcaaactaacgagaacattaaaccatttatatctcttcccagagtttcaaggtagtttcaagtgactaaagccattcttagcatagcatgagtgaagtggagaggcaagataagtagcttatttgttcatccttggccatgttggttatccatggttgcatattaaattattccaaaatttagcagcttaaaaccacaacatttaagttaggccagatgcagtggctcacgcctgtaatcccagcactttgggaggctgaggcgagtggatcatgaggtcaggagttcgagaccagcctgaccaaaatggtgaagccccgtctcta

SEQ ID NO: 7961 - DNA, 1120 bp, Homo sapiens
aagaaccagggtgtaaaatggattcagggagtgaggacagtaaaaaaaaagcatactctgtaatgctatgtgcttgcttcaggtaggtgggtttagaatgttaaaatatcacttgctgtttagaacccagtcctgggattaggtgccaaagctgggtgtttttttttttttttaatctatgttgtatttgagattaaacacatgatttcagtaaacatttaataggcaagtaacaatggcaatagatgaatcaaacctgatccctgtcctcagaatgttcttggtttagtggaaatgacagaataagaatctaaaaaataaagtgtctcaattctctgatccatacacatcactctcccattgtgactgacttcctgtgctgaaccagagagagatgtctttacagtatagaggtatgaggaggaaactggatctcttggaggattaaaagataatccactccttcttttgacgggaggagagaggaagagtaaccatgtggaaggatctctgtcacaagggaacaaaaagtttttctgttcttgcctggagctgtctccctagttgtggaagcactaattatctgaacacttgccacataggtaatcatcaagtacagacactgaggttgccaaaccttgatgatatgaaggtgagtgggactcagttccctgatgtctggggagctcacagtttagtggggtagacagactgtgcaatagtgtttagctcccttacctttaaaaagtgacactgtgaatttatgcttttagggtagaaatacgcaagaggaaagatacacctggtagaaccttgctcagggtgttgctgtcaccagtactgcaggcccacaaacctttattgactgctcaccttgtttcaagtcatatgtcccatctgcaaaaagatgtctctgacatctcttgctacaatattccttctccattcctaaattcacttgtcatataataggcagccactgatctgccttttatttggctctggacattttggagtccttcatacatgtcaaaaaaattgaggcaaaagtaggtatattttataaataaaatgcaaatgcctacacttaaaggcacaaaagagaattttacaccatata

SEQ ID NO: 7962 - DNA, 1059 bp, Homo sapiens
tttcagagaacatataaaattataatgggttataactatcaagttgacctttccctgagaacatactattggagaaacctgtggtttctaagacgtttctaaaacttaaaactcattccttcccagtataagaaatatattgctggcttcagaattttccaggaaaataaattttattcccttgaaaatcagtattcatatacattagtgctgagtttgtaagctttatttgttctaaacagaatttaaaatagttgttaaaatgaaaatataaagtagcacttactggattttacaatttaccaacccctcttcgcatccattattacatttcttaggcttcacaaaaccccatgttaatattcagtaattattgtctgatagatgctatgctgagccttaacatggattatttatttatttatgagatggagtcttgctctgtcacccaggctggagtgcagtggcttgatttcggcttactgcaacctccacctcccaggttcaagcgattctcctgcctcggcctccccgagtagctgggactacaggtgaccaccaccatgcctggctaatttttgtatttttagtaggacggggttttgccatgttggccaggctggtctcaagctcctgacctcaggtgatccgcctgcctcagcctcctaaagtgttgtgattacaggtgtcagccaccgcgcctggcagattatttatattttaattctcacagcaatcctgtgaggttggtcctcttattatgcccatttatgaataagtaaactgaggcgtaagagaggttaagaaacctgcctgtgtctcacagctaggaaatgaaggagagtcagggattgagcctttccttgcttttagcacctggacatatatccatattatccctattttacagatgaaataaatgaccccttggagatatttggagacttttccaaggttgcttaattagcacatgatggagtcaggacaagaatccctgaattcctaaatgccaaggcagtgttctctcctagcaggcgtagagtggaagggtcacagtag

SEQ ID NO: 7963 - DNA, 1041 bp, Homo sapiens
ttataggtgatttcagagaggaaaatataatggtgaaagcaaactagattttttttcctctctcaatctctagagattttaacacagaaaaaacttatctaaaataattgtatgcctatttcttccccctcttacttacgtttaaatctagctgtcagtctttaaggaacagtcagatctgtttagttttgtcttgtaggtaagaagcagatgtgctcatagagggttatttttcctctgtagttccagatatgtttttggctttacttaattatatactggcagtatattaacctgccagtagtagcagtttcagtttttttttttttttgtctattaagcaatctccagtatagacaaaagttacatctaccctactctcaaaaaacatgcgtaccccagactctggaaagtcccttcactgcactaattgcaaccaacatccctacatgattctgtgtactgatagtcctttcccatcactgtaatctagcctttgtagagaagaaagaagactgtcagaggaagccctttgcaagagaatttttctgacatttctgttaagattgccagacttttcctgctctggcattcagctcttcagcaggttacaaaaatacttggggtccttccaactttttgtttgtttgttttatgtccttgttattgctgccgtcataggacagcaccggtctcttattttatattagaactttacaggattgttcctcattgggggttgttccctatgggagttgttccctatgttctgagcatgtgtatgtcagacctgcgagttccagatctaccctatctttcaatatcatcagtttgagcagtgtttgggctaacccagtaataattcttacacaacatctcacctcacttattctagcagatacctctgaaatagtgtgaaataaaactctattctaggtcggggcgtagtggctcacacttgtaatcctagcacattgggaggctgaggtggacagacggcttgagctcaggagttcaagaccagcatgggtaacaagttga

SEQ ID NO: 7964 - DNA, 1047 bp, Homo sapiens
tgagggtttaactctgagctttctgttctgttccattaatctgtatggttttttttgagatggagtctttctcccaggctggactgcagtggcactatcttggcttactgcaagctccgcctctcaggttcacaccattctcctgcctcagcctcctgagtagctgggactacaggcgcccgccaccaagcctggctaattttttgtatttttagtagagatggggttgcaccatgttatccaggttgttctcgatctcctgacctcgtgatccacccccctcggcctcccaaagtgctgggattacaggtgtgagccgccgtgcctggcccattaatctgtatgtttatcctgatgccagtaccacactattttgcttacaattgttttgaagtcaggcagtttgagtcttccagctttgttcttctttctcaagacttttttgaccattctgggtcctctgcatttccaaacaagttttaggatcaatttgtcaatttctgcaaaaaaggaggcttaggtgggattttaatctatttggggattactgttatcttaaaaatactgtcttcccatccatgaacatgggagtctttccatttaaagtttaagttttacatttcttttgttaaatttatgcataagttttttttttttttttttgaggcggagtctcactctgtagcccaggtggagtgcaatggcaagatcttggctcactgcaacctccacctcccaggttcaagcaattctcctgtctcagcctccctagtagctgggattacaggcgcccaccaccgtgttcagctaatttttgtttttgtttttgagacagactttcgctctgttgcccaggctggagtgcagtggcgcgatctcagctcactgcaacctccgcctcctgggtccaagcgattctcctgcctcagcctcccgagtagctgggattacaggtacccaccaccacgcccggctaatttttgtagttttagtagagacagggtttcaccatgttggccaggctggtctcgaactcctgacctcagg

SEQ ID NO: 7965 - DNA, 1065 bp, Homo sapiens
caggtgtgtgccaccacacacaactaatttttgtatttttagtagagctgggatttcaccatgatggccaggctggtcttgaactcctgacttcaggtgatctgcccaccttggcctcccaaagtgctcggattacaggcgtgagccactgcgctcggaataactttttaaagtaggactcacaatctgctttctgaagggaaggcatcacactctgcctgacacatagtaggtactcagtacatatttactgcataacttaattgattaatggtcttttttcaaaacaatttttttctgtagagtccttagttttgctatgttgttatcattttttcagtttagcttgaaaatgagagttttcagtttagcttgaaaatctttgaatctttttccctcattgcctattcccaagacccaatcctcctgagtctttcatcctaaagattcctaaagtttcttggagtgatcttgaccctcatcaccatcctagttcaggccatgatcatcttcgtaacatcttacatcagtgagattatctcacctgaacaggttttagaactgacttttccagccttctgtctccctactagttgattcttatcatcacatcagattaataaaccacttttcccaagctgttgtctcgcctaaatatcaccagtggttctgtgctatttcaagatcaagttcaaacttcttgacccagcatgtaagcattctgttggctggcttagcccaacttttcagcctaactcttctccagtcagacttaccaatttgctgtctccttttacatgacctattcattcccaattccgagatgccctttctgtcttttctttatatgactaaatcctttattctttttaggccttgttatacaggtcacacaattactcttcctttttctcaacttaataatttttaaaaacattgtgaaacatctatttgatgtttatatattgcctcttatttttttactctcttatttaatattgtacatgccagagtatataggacaaagaagaaaaaaacacctgtgtaccatctactttaggaaac

SEQ ID NO: 7966 - DNA, 2442 bp, Homo sapiens
tacagaccatatgagcacataagatatgatctctgcctaaaagaacgtaacattttaatgagggagataagactaaggaacatgaaagattagaaaacagtgaagtgcttatctgtaagactataagcaaactagaatattgctaagaattctggttatagctacaatgattgcactattacaagatgatagttaataaatcaatgatgtttccttttcaggacattcatcttcaaagaaatctgaagattctctacttagtaagtaacaagtgtttatttaataaaaatatgcatttgaggtatttgcaatttagatttcccatgaatcgtatcttgctgtgatgtgaattattttttgtttttgttaattatttttgtacatgagaaaaactgtagaaaaaaggccaaaagtgtataggatttattccccaattaagggcattaagaagtttcttattttaagtatagagagcattaaaaatttttccagtaaatacaatggatatatctttcaatttcatgttataaaatgtgaaggaagaaagataaagggatgaggttgaaatggatttaaattaggcctatggttttcactagtttggatcaaaacagattggatttcgttgagtatttgctgcaaattttattattttttccctgcaatattccaaaaagtattcacaatgacttataaaaacatacacaataagtttttttaaggttaaaaaagtcagaataatggaaaaataaggtagaatagcaatgtaaaactacaggtgaaatttatacacacaaatgtattccaaaaagtcctgcataattgcagagatagatcacagatttgtcagtgttcttcctaacaaccaaacctaagagtgaaaccagcaatagaaagattaattgtacccataagataataatgagaactcctggagtgttcagctttttgctggcagttttgagagaagagtcttctatgggtttataaaagggtacatccatttgtgtcataacaaacagtagctttgaatctaaacagtaatataatgttgaattttttaaagacttgtagtaggctcaaggcctaataataaggtgtagttcaatagcatatctaattcattttatactctctggacttatctcatagaaatttagaaacttgagatttctaggcttacttagttattttattttatttttttggagatggagtcatgctctttcacccaggttggagtgcagtggcgcgatctcagctgactgcagcccctgcttcccaggttcaagtgattctcctgcctcagcctcccaagtcgccgggactgcagacacccatcactatgcccagctaatttttgtgtatttagtagagatggggtttcaccatgttggccaggctggtcttgaactcctgaccttgtgatctgcctgcctcggcctcccaaagtgctgggattacaggcgtgagccaccacgcctggtcacttggttatttataaacctaagaattaagaaaaaattttttatgactttaaaataatatttattgtggcaaactcagggaaaaaagtttgatgattattctaaatttcaaaactcaaatataaacattatttgcatttagtataattcttaacaagaaattttaaatattcaatgatcagaaattttgcactgagaaaaatagaaatgttaagatatttgttgtttaaaaatttagcagagagggagatgttgatggaggtattcctctcttaggaatatagtatattccttataattattttgcttgtacgaactttgttttcaacatatttgaagtgtcttaaagcactgactctttctctccacgtaaattctaatttatcaggaggtcctttcctaaattaggtaaaatgtagtgacagtttcgaaaatacattcaagtataagaccagtggaccaatgttatctcaggatgaaatcatagatacatacttcaacaaaggtgtacacaggctaaagtgggagagtgtattttagttttcatccatttccaacagtgagaggtgtgaatgcttatgcaatatagaaaaaattcccctttttcagttctaattttttatccttaaaaagtcttttggggcaaattcttgaatcactgatttatattattcttttatttcttctgcctgccttctccttcccactgtctttcaccccctgccctttgaatccttccctgcttcctagaaatagcccttaatgctcttttacctctcctcagctaagtcaaatttttactagtagaagcagggtgaatactgtgaagactatatccaatctgagaaacccctagctaatttgatcttgaaaaaacaaactatccacttcaagctgacctgctgtttggcagccggtacgctatttaccatagcaagcatgaaacatatacatt

SEQ ID NO: 7967 - DNA, 1119 bp, Homo sapiens
gttgttactatttccatttttatacatgaagaggaagtagagaagttaagtaactttcccaaggttaagacctaatgagtgacaagagcttcttgagttgggtacaggtatgcatgtttctagactggagtggttttttatttgttgttattttttgttgttgtagtttttgtttgtttgttttgagacaggctcttgttcagttgcccagggtggatggaatgcagtggcatgatcatggctcactgcagcctccacctcccaggttcaagtaatcttcccaagtgtattttttgtttgcttttaatttttagagcatttttaggtttacaacaaaattgagcagaaagcacagaattcccatataccccctgctctcatacatgcataacatcccctactgtcagcatcccacaccagaggggtacatttgttacaatcagtgaacctacgttgatacatcattatttgaagtccatagcttacattagggttcactcttggtattgtacattcaactgctttgacaaatgtgtaatgacgtgtgtctaccattatagtaccatagagaatacttgcactgccctaaaaatcctctgtgctccacctgttcatcccaccctccttcctaatccctggcaactactgatcttgctacttcctccatagttttgccttttctggaatatcatacagttgaaatcatatatatgtagtcttttcagattgggttttttcactttgtaatatgtacttaagtttctccatgtcttcatggtttgatatttcttcttaccactgaataatattaattgtctggatgtaccacagttgtttatccattcacttaatgaagaacatcttggttgcttccaagtttcagcaattagaaataaagttgctgtaaacatctatatttaggttttcatgtggacattagttttcagctcatttgagtaaataccaagaagcatgattgttggagtatactagttactattctaagtgtttcatatgtattatctcatttaaacctctttaaacctctgtgagtaccaaggaagtaggtactcatatttctactttacatatatgaggaagctgaggcaaaaaagagat

SEQ ID NO: 7968 - DNA, 1350 bp, Homo sapiens
acatgaggcccatgggttgggcgagctggatctgtggtttgtgttctctataatcagccttgctttttgtgtatcattaattaccaaaaacttccttatcactatgttacagatagagaaatgaagaaacaaagagataaataattgaatcttattaagattaaggtagtaattgacagaattaggatttgaatcaggaagctaggtgatatgacactagagtccatgcttttgttagtttcatcttccccgtgttataggtattaaaataatgttaaggtattaattaagctatttaaggaaatgtaaaatatctcattaaagatcagtgagtcttcttaaagttaagacttacattctttaaagtatattccagttatgaaaatataaagaattagaaaataacctttgaaaaaagtgaactcttattttcttcttaatatatcaggacagttgaagatgacttactgctccaaaaaccatttcagaaagaaaaacatggaaaggtggcccataaacaagttgcagcagaattgctggataggtatggtatttcagtgtcaattctatttcttggtttaagttgcttcggattaggggatttgattatgttaatttgaatataaacattttgaattttcttaaaaaaatttgttttaacagggaagaagcaagaaatagaaggtttcatctcatagctatggatgctgtatcctttttttatttccagatttttataactagtagaatattttaaaatctgcttttttgttttataaaatcttgtgaagtcaaataggcttttttatttttaaagataagtatttagtgatgtaggattttgccatttatacttttgggtacaattctcttttactaatatataggaaagatttagagacaaaaataataaaacatattactagtactctataaataggtttataaagtacatgaatctgcaaatatattttccaaattgttttttcaagctttcaacatttccttttcctatacttatctttagtctcattttaatttattctcttcctacctggttctttgctatttaaggtctctataaaacttgtatttaaaattaggtctatccagtctgtccctggatctaaggaaaaaataaaaataaaatgaggcctgcctgtggactgtcctcaggcctgccatggctttaatttttaggcatgacttaaagctatctttaagataaaccctgcttcctggttatagccatttgtcaactcagttttttaataagactggctgatgacactaactgctacgctggccatccatactgctgttgagaatattggagaatttaagagatac

SEQ ID NO: 7969 - DNA, 1028 bp, Homo sapiens
ttggtttggtttttttttttttggatgacagattctggagacacctggcatctccgtttttgagtttctccccgctcttgtcagttgattcgtaggcctgaagtgagtgagagctttttagttcaaccagtgagttaagataggtatgggtcggatggagcggccagcgaataaagaaatgggagagtgggagcaagaataggaagtcgtgtcctggggcgagggaaaagatgatgatgatgatgtaacatttactgggtttcactgtacaagacaccgttaaaaccctttagatgaggcaactcttttaatctccattcgtatgaggtcagccatcttactagcctctttttataaatgaggacactgaggcttggagaggttaaggaacaggcccaaagaaagacaaatggaaagtgcagagccaagcagtgaaatctagtaggctgatcctagaatatatctctaaacacactacagctgtcccccatcaagatgtaaagaacgtgaggacataggacaaagagtgagaggacaatatggcttgaacagatgtggtaagacagctggagttgacctaaaaaagggtgtaaaatccaggtgtgtaaggcaataacagatgtaagggagggtagagttggaactcgggctttcaaaccttcatctccaaccttaactagcatcttcctatctaggattttagtggggcagagaagagaggtatatacccacacacctatgtttgaaaatggaattacagactttaaaggttatttaaagatttaaacaacttaaagattatttcatgtagctatcttatttaatagatgaagtccagggagatgaaatgacttattcaaggtagccaggactagaaacatgtcgtttaccctagatccaatgcaatgaagtttagagagttctttcctctttttccagctgcacttgctgtcgttatattagttttaacaatttgatatatcatttaacctggactgttccttccagccatgtaaattagttatgta

SEQ ID NO: 7970 - DNA, 1089 bp, Homo sapiens
acaaaacaaaacaaaacaaacaaacgaacaaaccaaaccaagctatgcaggctgcaggagtgaaagtcagcagtgatggacagtaggagcccaggacgtggagtcagaaggataggccggagtccaagagccacacagagaggccgtgtaagggttaatgtcataatgtatgtgaaaggctctgcttaagtgtaaagctgtggtgtaaatgtgcacattagttgacaaatggtttaaatttaagtatacttcaaattttttccctaagattggttgttggtttccatagctaaaaattaagaaaacatattttatacagcaacagagaacttcttaggaattattaaaggactataaatatacaggttttttattctctctacttatagggaatatttgttgcatttgtacacttgattgacccaaatagagaactatcacaaatacaagacaaattttacttttcattgaggagaatattttacaaattacaaaatgacttataacaagaccactataacatgaattatggtgctggggggtgggaggatgtgatttaagggaactgggacctcatggtagctgtgagtacctagggaagggggcaagtgggttccatggtagctgtgcgtacctagggaccagggcagtgagatggagaaaagaagagggggttgtaggggctggaaatgtcaacaaacttcttggctggatttttgtctagggccagtccggcatgttttccaccctaatgatttacatacaactttagtgtctgtctaactttcaaagtatgaggtgtgatgaaaaggaatgaaacttgtgttcgcgtgaggcttatggaatctgaatcgtgggattaagatttcaccttgtaagtccatgtgccagggcaggagggatccagactcatcacccacagcatctgtactgctttgacctgcggctgagtcctcattctttccctgctccttccctggcccttgaggaatctgtggccaagctgcttggggaggctgaggcattaaggcccagacccacctcctctactacagtttccaaaagcacactctgtaatgggtaccgagc

SEQ ID NO: 7971 - DNA, 1034 bp, Homo sapiens
taaggatgaattttcctgcacctttccacttgctttgggcttgaaacacacactcctgatccagaaggacccgctgagaggactttggtgtggtagtcttcttgttggtagtgtctttcaccacctcttccaaaagcacatagtcgcttggattggggttgctcaggatgctgtaggaatatttggctttgcataaggtctgaaaggtaagttatgatcaactgaataaagacacagaatctccaacatttgcattcattctatatgaaactttaaggtggaaaaatggcccagactagagatgaaggggatcttccagatcatttcatccaactcattttgcagttgtatagttgtagcttgtaatgtaatttcccacgttacctcatttagctttgcaacagtctatgaattaggtgttattatcctgaatttcagacgaggaagcttatacttaagacaggttaagtagattccaggatatatacagctataatagtaacaataaaggtctgaaccagattttctgcatgtaccagcgctcacagacatgaaagtcagccagtgaggaatagaatcttgctcttcaggagcgtctctgtcccactgggctatctctatcacagagtcttggatgttgaaagaattttagaagtcaactgatctctcttttcatttaatataagaatgtctttcattgatgcatttgttaattcattaaatgtttagtgagggccaattatgtcccagatactgtgctgtacttttaggggagacaaagataagttaaagaaatgtaagtctgggccctttggaattcaaagtcagttgaataagatggctaatattaactaagttatcatacagtaagaacagcaagtaacccttaagtaatgtttaccatttgctaggcattgtattaaacatcttacatatacttaaccttcaaggaaagtactatcatactatctccatattgtctatgtggtggtctatgtggtgacttaccatgtagtgttttgctggagccaacg

SEQ ID NO: 7972 - DNA, 1086 bp, Homo sapiens
ttcctaaggttaaatctctcagttcttgactctttctgcactgtgtagtcaattgcccatcgtcatagtttgagtggatcatgcagatgactcttaagtctattttaacccggctgtacatcatttctctagttctgtgtaatgtgtttctgctaagatagatcttttggtgtattcactcaacactaatggccttgtcaggatgtgagctagagtaagggttgtggttgtcatgatagcgttccacaattttttgaggtggtatcctatagaacattgctattcggtaaaaatataatgtgaacttacatatataatttaaaattttctattagccacattaaaaagataaaaagaaacaggtgaaattaatttttatatattttactggatttgatttatctgaagtattttaacacaatattaaacattaatgagttgtttggtgttttttcataacatattttcgaacacttatattttacgcttgtgtcttaatttggactagctacattttaagtgcctaacagccacatgtggctagtggctaccattgttgggcagtacaactttaggaatagagttggaaataggactgatggctagaagatatagaaaaggcaagttctgtttatcataagaaattactttctaataactggagctatttggcaatggtatgcatttccttatatggtgatacggtccttgtggttaaaaatcttcagagaggctggtcagagaagggattattcctacattgtgtaggacttgctgtttttatttttgtttttaaatagagacaagctctcaccatattgcccaggctgatcttgaactcctgagtgagtcatcctccagccttggcctcacaaagtgctaggattacaggcgtgagccaccatgctcgacccagctatttgttttttaataactaattcctttatttaaaaaagtttaaaaaataatatatggtcatttaaaaaatttaaataatgcaaaagaatatacaatttaaaattgcaagctccccctcctatatatgtatgtagtctgtctgcgtgccatctgccacctttttttttt

SEQ ID NO: 7973 - DNA, 1025 bp, Homo sapiens
ttcagccttatatatgaagctatattttttgttatgcacatagtctcctcaatcccaatttacggagtctctccgagatttttaattttaatttttatatttaaatatttaaaccatttgacatctttgtatgtgtggtatgagtacagatttaatatctgtgtttaatatatgtaatgaatatatattttatatagtttaatatatattgaatatttatattatgtatatatttgatataatctgacagccagttatttcatcaccattttttttctgctgatataaaatgctgcttaattattgtgttatatctatagtatatttgggtatgtggtacaataataatcagaaagggtataattgataaaagacatgactattcttttttctccacaatattcttatttatttcagtatattactccaggcagtttagaatccatttttcacttccttccctcaaaatagtccacacagagaatctgattagaatcgattcaatgtattgattagtttggatgaattaaaatatttacagaattgatttttttctattcaagaatatcatatcttgccatttatttaagacttcttttatgttcttaagtaaaattttatagttttcttcactgaggtcttagatattttaatttgtctttagtaatacagttttgggtgttaagctgttctaccattttatttctggatttcacagttttcctttggcatcagattcctttttattttcttaaatctgatttcagttgaattgctaaaattataaacattaaatgaaagtaacagagcatatttagcatctttacttagaattgtagagcaatcagataaggcttgaacatgaaactcagccataggaaaaccctttaactttcgtgatgctagagtaaaaactacatcatttgatttggagttatttttcgttggtaggtgatattttgagcacatacagtacctacaaaatattcagagttggtctttctgatacctagaatgacttcagg

SEQ ID NO: 7974 - DNA, 1029 bp, Homo sapiens
aggacacacgtactttaggaaaatccagcaaaaaagaatttcccaaaatagctaaataataaatgtaaactaattttttaaggtctgtatgtttctaactatatgacaaaaatatgattactgatatagtttggaggtgtgtcccctccaaatcttatgttgaaatgtgacctctgatgttggaagtgggcctggtgggaggtgtttagattataggggtggatccctcatgaatggcttggtgccatccttgtggtaacaagtgacttctcactctggtagttcatgtgagagctggttgtttaaaagagcttagaacctcccctatctttcctgtgacaccctggctccccctttgccttctgccttgatcgtaagtttcctgaggcctcaccaggagtagacgcaggcaccgagcttcctctacagcctgcagaactataagccaaaataaacctcttttctttataaattatccagcctcaggcatttctttctagcaatacaagaacggactaatacaattactttatgactttagtgacttatctcttggtaaagtgagcagggtctggagtttggtgtggcatgactagacttggagtcattgtgtgaattccgcttgttttgccggatgtggggctgttgtcttttgttcataattgtttcgtcatgatttctccagctttataagctatttctttaacagattaaaaaattgaaagaattacgttctatgttgatggaacaagatcctgatgtggctgttactgttcgaaagctggtaattgtttctctgatggagttatttaaagatattactccttcatataaaatccggcccctcacagaagcagaaaaatctactaaggtaatgctagattgctagatataattactatctaaaataactaaacattttggagagatagactttttttttttgaggcagagttttactctgtcgcccagactagagtgcagtggcgtgatcttggctcactgcaacctctgccttccgggttcaag

SEQ ID NO: 7975 - DNA, 1106 bp, Homo sapiens
atgatttcacttaatcctcattaccctgctggtaggtcttattcccatttccagagaggaaactgatggttccctgcagtcacaagtatctggaatttaaagttggaccttttaaactccaaagtctatgctatactctaaagattttgggaaagtaagagtcacacttggttttatgaactgttcttcataaagaatctgctgtaactttcacctttattttgcatctagagggaaaactggatgtagccaaagtttgagtttgtatggtaggttgtttacccatttcttttattcatttgctgtttgagtgcctgctatgtgccagacactagcctaagtgctactatccatatacctattgaaagttggctggtggtttttctgtacttttgaaatgataggtctctagataactttttagatctattaagactgaaaattgatctttttttcccctgcagtgagcctgttcatgcgaagaaacggaagcatgaacgcattatagataaatatgaaaaaataccaagaactctgcaaactgcaccagagaaggaactgattcatttacttcctatcaaagataaaagtggtataatcccacagactagggagaagccaggtgagtctaataaactggtaatattagttgaacttttacccccttactgatatcatgtttttttttcactcaaaatttaattttactttgattttacccatatctagaaaatattcaattagtcttatagcaagcttgatgatttgggccagaattatagattatctcaggtaccaatttgtactgtgaggacaactgaagctacaaggttcaggtgattttcttttcactaaattttgttgtttctaaaattagagcatattaactgttcttgattagctttcttttttaatgtatcttcttttgtatgtgaaataaaacagaaaagttcagatatcaaagatgtgaagttacatggtttataacaaagcgcatacctataaaactactattcagacaaggaaaaaaaactactgctagcttccagaatcctcccttgtgctcacctcaatcactaattgtgctcttcccataaaagtaactg

SEQ ID NO: 7976 - DNA, 1048 bp, Homo sapiens
tcaccatgttggccaggctggttttgaactccttgcctcaagcaatccacccgtctcggcctcccaaagtgctaagattacaggtgtgagccaccgcgctcagccaagatttacgagttttaatgggtcaggaagaattgtaagttctactaggaaagatgctaagattgttttattcatagttgaatcctcagcacttcaaatagtgcctggcacttagttgactttttttttttttaaataaaaagaggagatggagaaagagagcaagacgcagacagtgagcagaaagagaagttagaatgatctgttgttgggattttgttagatgtgagtgcctgaagtgttgaaagaaaaatagttgaggatattggcaagagtgtggttgaagtgataatcttgcagtctaagtgagggagtgaagacagaacacacaggtagatagaaagtggagtggtcagtggattgaaaggttacataattggttaaggaagaagtgctgtggaagtaactgaatgggagctggaaggataaaagcttgtggtcagagagaggggtgagcactagggtttggaatgtggccattagagaggctggctgaaatggaatacgaagtgaaagtaattggagatgagaaggagctgaggggctaagtcattggtttccaaacgtcctgaaaggcatttcagagtatgtggagacatttagtttttggttgttacaataacctgggaatgctattggcatttagattgcaggagtcagagatgctagcatttttccagactcagaacatcccagtacgacaaagaattgtttgcctagcatatcagtagttcttccatttagaagcactgggctcagctgtgagccatggcccactccctgtaatcccagcattttgggaggctggagtgggaggattgcttcagaaagcgtaagcttttcctgtttaaacccaaaatgcagagagttctacatctctgatacttgtttctaatttttctttgtgtgtgtgtgtgtgtggtacaggtaaaaggattgagag

SEQ ID NO: 7977 - DNA, 1017 bp, Homo sapiens
ttgtttaacttagcataatggcctttagtttcatccatgttgttgcacacaggatctcattcttttttgtggctgaataatactacattgtgtacatgtaccatattttcttttattattattattattattttttttgagatggagtctctctctgttgccaggctggagtgcagtggcacgatcccggctcactgcaacccccgactccccagttcaagtgattctcctgccttagcctcccgagtagctaggattacaggcgcacaccaccacatctggctgatttttgtgtttttagtagagccggggtttcaccatgttggctgggatggtcttgatctcctgatctcgtgatctgcccgccttggcctcccaaagtgctgggattacaggcgtgagccaccgcgcctggccccgtattttctttatccattcatctgtttatgaacacttaggttgtttccaaatcttggctcttgtggatagtgctgaatgaacatgggagtgcagatatctgttcggtatactgatttcttttttttggattcatgcctggcagtgggtgggattgatggattatatagtagttccatttttagttttagttttttgaggaacttccaaacttttctccatagtggttgtgctaatttacattcccaccaagagtgtatgagagttcccttttctctacatccttgccagcattgttactgcctgtcttttggataaaagcctttttaactaggatgagatgatatctcattgtaattttgatttacatttccctgatgatcaatgatgttgagcaccttttcatatacctgtttgccatttgtatgtcttcttttgagaaatgtctattcatatcttttgcccattttttaatgggattattaaatttagaaggctcatttaaagtagataggagtgccattctgtgcagtgtgtacatttatatagcaagatttactagggtctttttttgtttttttttttgagacggagtttcac

SEQ ID NO: 7978 - DNA, 1029 bp, Homo sapiens
cagctgaacagtcccgaagttaattttaagacttaatttaggatttttgactctggggaaacctgtcaaagattgaaaacatttgatcaaaacagaatcacaggtcactgttaaaagaatagtcatttaaccagagacttaaaagctatacagaaagttatgtggatatgaaaactcgaacccttttaaagcttagttttcctgagtaatcaaaaagggtacttgaatttaatcagacacaggaagagtatgtacggggatatgagtgtacactgtattttagaggaatgtaaacaaggaaattagtaccatgagccagggaatacatggctgttagtaacagcatgggaagtttcctggttacatggaacaacaatttagacataggaagaaaagccaaaagtacagattcaagttatgttggaggaaaacattggttttccagaccttcatgctaaccatttcagtgtcaggccataacagcagaactagaaccagagaaaaaatgttacaggagttgacaaaaatgttgaaagacagagctaccactgttaccattgtggccatgcaaaaagatacacctttttaaagggggagaaaacagaaggcagtggtttatgacctgcaatgtggtacagagaaagttgaatttcggatataaatctgagaagtttgaaaaagaaaaatgttacctctagaaatgaaatggccattctgaaagaaagacaccgcatttccaatctgaaactagggaagttagttagatctcaggaagaattagaactagtttaaatcttctattaaataagattttagaattaaaaataaaacctcttaaaattttactaagagcaaatcagtaagcaaactgtcattctaacataggggaccaacttattttgttgttttgtattaatgtattttaatgtcaaatttcaatctttagaaagacttctgttaccaaaattacatcttaatatccataactttctttacatctgtctcctacttactagttcttttctagct

SEQ ID NO: 7979 - DNA, 1076 bp, Homo sapiens
actaatatttgtttcattcaggttgagaacttactatttccttttgaccaatgttaaaaaaaggcgagataggcgtgaaagcaaaggactatcttaaaatgaataatggtaatttcataagtgctgctaatttgagtctgcttttatgtaataaaatcctagacacagcatttgccctaccatcttagtattgcttcctatgcccatactgtgaattcagctacatcatttgggaatcacattacagtatttataataatcgacacccgagcagctgactagtggcttagacttcccactttagtatatttttagttcaagtacagaatgcttattatggtgcattcaaaatagttgtctttattttgcacatatctttttaatagcaattttttttattcgatttctccatatttgaaacttgaactacattaaagggatattctgcaaaattgtcagcatctccttccctcattcctgtgtctgggctttgtattccaaaaggatattgaggtggaaataaaagcaataatgtgagattatccttggggtgaatttagagaatggtggactttcctcattgcctacctttatgtcagaaatttagataaacaactgtaagagctcacttaataatatctgtcataatcattactatgatctcctacctggacaatataaggtggcaatggcttccccagagagcttggcttcaattttattgttttggaagtggcacagagtagaccctgttcaaagaaatgcagacaagtttttctttaaaaaagcaataaattaatggatctagttattgatcataaccagacattatgtgcctcctaacagaacaacattacacagtctaacaagtaatcttgattaaaaaaaaatcaagcaggagtgtgactaaattaacctctaggtcaatttacaggaaatgcaggggaacagaagaacatgtaaaccatactgcaattagcaaaatccaggctgtgaaatattcaaaagaaccaacaactcagttttttaaaataacaaattcaaggaaaaaagaaggtaatgaggaaattcataga

SEQ ID NO: 7980 - DNA, 1027 bp, Homo sapiens
tgctccagagccatgggcgtactgctttccatcctcctcgtccttctgaccctcaccccagctgcccttttggctggagcaggtgtgagaaacacataaggtctgcaggctcagcctccaaaatcctcctctgggaggtgggctcaaggggagtttctgcttatgttctaaagaccactaggatcctcctacgcctggctgtgtcagccatcttatttggcagggatgggagtggcttggctagaataaccctggggccctcaggtcacgtcctaaaatagtgggagaaaatattaaacatttaggaaacagatacacatcagctcccagggagaaacaagaactaggaaactttgtgtaacgtattgttactccaaagtagttgaatttgcttaaactcgttattaaaactgtatagagtgggttcagaagaaagtgttcattttcactgttacgccgtcaaaactttttctcctggagactgagtggtgtgtattatattttctgaagccatatcactgtaatattctttcattgctgtttttaatataaaaacgagaaattttttgctccatttctccttcatatttttgtcatcattttttaagatattgtggtatcatgtcaataccttgtaatctagtgtctaagacttagacgttggatcttaggatgttatttttgagtcaggtgtatcaataccttaagtaaggtaatagatattgagagtcctttataaattgtccagtggtttaaagatactatcattatttgagaaaaatggtaagtttttttttttttttaaattatagaaatccctcacaaggtgatttgctggaagaatatgtgatggccttgtggtctgggttctgtcatttttttggtgtgttccattggtggcttccagacataacatacaccaaagaagaagaaaaatctttcccaagaacattccatagtctgatctcaattttaaaatagtcctaagtgtaatagaaaaaagatttatccaaaaataatgtaatat

SEQ ID NO: 7981 - DNA, 1093 bp, Homo sapiens
ggatcgcattaaaaccttctgtattcactggcttcctctcagatatgggattggggatgctgcctcattactgacaggtgggggtagaaagtccactttccccactctgcctatgtcacacctgaggtcattggggccactcattactgctggatggggtgggagttctggctccccatatggcttccactgacaccttatgggtgagtggtggcctagacactgctgagcagtggtgagagtcctgattctctcctaggttttcttcattacagctgggtaaggatgaaatatggactctctattgggctttctctgaatctaccccagtgagatagttggggaaccacatcatagcctggtgagactagaagtctggaccccccacttggccttttctggcatttggctggagaatagtgttgtttcaatgtgttgtgttttgctgggctgcccctttctggttatttggtcagatacagcaggctcctcttgagacttcttctgtctgtgcccattgccctttccaggttgctgccctccgctccatgtctgggatgtccaaggaaacaagaacaccctgggagctcaccatcgtggtcctcaggacgtggggtccctagccagtgtggcttccgttgccctgtcagagtcttctcatgttgttttatatgtaatgtccagggtttttggttttactgggtgaaacagggaaaaatatgtctacctcatcttctcagacaggaaaaatatttttatgaggagaccatcttctcctgtctggatgctttcaataattcacgtaatccccgtttctattccaatttttatctcacatacaggtagttttattaaagtatcaaaatgttcttactgtgtgagaaaatgaccctactaaggttgtatcagcaatgaggatttttttcttatggctgtcttgttttagcaacttctgcctcctaggttcaagcgattctactgcctcagccttccaagtagctgggattacaggcacacgctgcagcacctggctaattttttttggattttagtagagataggagtttcaccgtgttgcctaggctggtctcga

SEQ ID NO: 7982 - DNA, 1032 bp, Homo sapiens
taattgtagattcacttgcagttataggaaataatacagagatcccctataccctttaccaatttccctcaatggtaacatcttgaaaacacaatagtaacaaaattaggatattgacatcaatacactcaagatactgaacatttccatctctgcaagggtttctcatgtcgctcttttatagccacactcgcttccctccttttccctcatcctccttaacccctggcaacttacttatctactctttatatttttattatttcaaaaatgttatattaatggaatcatacagtatgtaacctgggattagcttttctactcagtatattgtctggagatttatttaggtttttgtatcgataggtttatgtatcaatagtttgttccttttttttctgttttatgggtttgtctttttttattgtgttaaaaaacatgaaatttatgatcttaaacgtttttaagtgtattgtaatgtttactatgtgtacattgttgtgcaacacatctctagaacttttttatcctgaaaaactgaaattctgtacccattgaaaaacaacctcaccttaaagtccccatctctcaagcccctagcaaccactataatactttctaagtttgattactttagatatctcatataattggagtcatgcatttgtcttttttcaattaccataatgtcctcaaggttttcccatgttgtaatatatgacagaatttccttcttcttttcttttttttgagacagagtctcgctctgtcccccaggctggagtgcagtggcgcgatcttggcttactacaaactctgcccctccaggtttaagcaattctctgcctcagcctcccgagtagctgggattacaggcgtgtgccaccatgcccggctaatttttttggtatttttttagtagagatggggccttctttttttaaggctgaataatatcccatttttttttcacattttctttattcatgttgatatggtttgtctgtgtccccgccgagatcccatcttgaa

SEQ ID NO: 7983 - DNA, 1033 bp, Homo sapiens
aggggacgctgctccttggctccagccacgtgcctcatgcaggtctcatttctgctaattatttccattaaaacagaagttggaaagcctctttttttcggaaatctcctgatttttaattattggtgacatttaaattttgttggaaaacactgtgtggtccaaacttgccttagctctgagaacctttctcacttggaatcatcaatttttgtattgcctctgaagcccgctttgccattcagtttctccccaattcacctttaacaagaacctgctcaactcttagggtaattaaattgcaaaccaatggcttcaaatgcaggttgagagaggttaagatactagaggttccaaactacttaaatgtttggaaagggctgttgtagcaacacctctcaagggctccttgggcattccttgcatatagtcacccctcccctccccagagagagacagatgtcattggacacccatgacatgtgcatccctgttccctgtgcctgacactgagaggacactaagatttctttctttctttttttttttttttgagacggagtttcactcttgttgcctaggctagagtgcaatggagtgatctctgctcaccacaacctccgcctcccgggttcaagcgattcttctgcatcagcctcccgagtagctgggattacaggcatgcgccaccacgcccggataattttgtgtttttagtatagatggggtttctccatgttgatcaggctggtctcaaactcccgacctcaggtgatctgcctgcctcggcctcccaaagtgctgggcttacagacgtgagccactgcgcccagctgacactaagatttcttttaacatttctttgagtctggtagggcagacttttttctgtgtgactttggctttagaagatgttaaaggttactggccatttatcatagtaaccaaggcagtctccaccaatgtttcttcttccctcaaattctggttcttgcaagggcttactggcttgagatgatgattctcttccagg

SEQ ID NO: 7984 - DNA, 1026 bp, Homo sapiens
tttgtgctttctgccttatttttactgtaacaaatcaagaattaaagacatcttaatgtcaagggaaaaatacatttttgatatctgctagatctagttcaaaccttatcttgtccatttactagcttgtatgttcttggacaggttaacccctgaaaattcagtgtcctcatttgcaatgtgggaataatagcgcttgtcttcaaaggttgtggtgaggattaagatgatatatagagagagcctagtggtactattaaactattaaatattaaaaatattaatggtagctactatatattgagtgtttattacgtgccaggcattgttctgaactctttacaaatgcagtctcatttaagccttccagcaacctgatgaggttgatgcattataaatttcatttgataaatgaagatactgagtcagagagagtaattccctcaaggtttagtgagtgtttaggctttgggttatgggtggtagctgttggagctatttaaaagcacgtagggttcataggagcttgtttggaaacttttgaggaactcgacgacttcttgacggagtctcgctctgtcgcctgggctggagtgcagtggcatgatctcggctcattgcaacctccatctcctgggttcaagtgatcctcccacctcagcctcccaagtagctgagattacaagcgtgcgccatcacacctggctaattttttgtatttttagtagagatggggtttcaccatgttggtgaacaggctggccttgaactcctgacttcaagtgatccgcccatctcggcctcccaaagtgctgggattaccggcatgagccaccacgcctggcctcgatgacttcttaagaatttagtcagagtattctatttggctacctgttttattatattcctgtctgagaaatggtggtcggtctttcagactgagagagcagcacgtctctttgaactgtcaccccttagcactaataacttctttttgcaccatgcatagtgtgaagctggattaag

SEQ ID NO: 7985 - DNA, 1063 bp, Homo sapiens
tcctagaatttttgaattaaagagaatatttagagaccatctactccagtaactgacaactttttctggatcacagaacctttgagaatctgaggtcagccaaggactctaggccagtagtttggggaggagagtgacacacagttttgcatcatttcaaaaggcccacacccaagtctacctgtgacagatcaccaggttaagagcctccagtcttttacaatgagatgaggaaaccaaggcctgaggaaagtgacagaaattttgtgatgtcagtttggttcctaaagggaaggaagctaatcaaataaaatctcaatatactggaaagctatgtgtccttaaagcatctgtctgagaagcataagaacaaactataggcttagagaaaggagaaggagggaaagtgactcaacttgagacagaaagatgtgacttcagagggaacacttctcaacacaaggaaactaaattagttcccagaaagataagaacagaggcataggcctgccttgaggatggaaatcagaaatagaaaaggaagctgtgatggaacctgcaagaaaaaaagaaattttaaatgttaagatactcaagtaaatataggaaacattttcctttgactcactcagaagggaaatctctaaatagagggcgtttaacagcttacgggatggggagagacgttggctgcggtacttacaaaaataagcagcaggtattctctcatcactaacggtagggaactggccaggcacggtgactcacacctgtaatcctaacactttcagaggccagcacaggaggatgtcttgagctcaggagtttgagaccagcctgggcagcacagggagactacgtctctacaaaaaaacattagccaagtgtggtggcgagtgcctgtggttccagctacttgggaagctgagatgggaagagcgcttgggtctgggaggtcaaggctacagtgagccatgatcacaccactgcactctagtctggacaatagaaaaaaaaaagggtaagggactaagacccaaagctaaagtgtctacccttataa

SEQ ID NO: 7986 - DNA, 1050 bp, Homo sapiens
gcatagtattccatggtgtatatgtgccacgttttcttaatccagtctatcattgatggacgtttgggttggttccaagtctttgctattgtgaatagtgccacaataaacatacgtgtgcatgtgtctttacagtagcatgatttataatcctttgggtatatacccagtaatgggatggctgggtcaaatcgtatttctagttctagatccttgaggaattgccacactgtcttccacaatggttgaactagtttacactcccaccaacagtgtaaaagtgttcctgtttctccacatcctctccagcatcttgtttcctgactttttaatgaatgccattctaacaggcatgagatggtatctcattgtggttttgatttgcatttctctgatgaccagtgacgatgaacattttttcatgtgtctgttggctgcataaatgtcttcttttgagaagtgtctgttcatatcctttgcacactttttgatggggttgtttttttctcgtaaatttgtttgagttatttgaagattctggatattagccctttgtcaaataggtagattgcaaaaattttctccattctgtaggttgcctgttcactctcatggtagtttcttttgccatgcagaagctctttagtttaattagatcccatttgtctattttggcttttgctgtcattgcttttggtgttttagtcatgaagtccttgcccatgcctatgtcctgaatgatattgcctaggttttcttctagggtttttatggttttaggtctaacatttaagtttttaatccatcttgaattaatttttgtataaggtgtaaggaagggatccagtttcagctctctacatatggctagccagttttcccagcaccatttattaaatagggaatcctttccccatttcttgtttttgtcaggtttgtcaaaaatcagatggttgtagatgtgtggtgttatttcttaggcctctgttctgttccattggtctatctctctgttttggtaccagtaccatgctgttttggttactgtag

SEQ ID NO: 7987 - DNA, 1023 bp, Homo sapiens
gtttctaagttgaggcacagtaaatcaaatgtagaagttatgagtcccatactagagagactgaagagagaacagactggaaacaaaggataggttggtttacctttaagtaacacaggccaaggttgagctggaaagtgtgtgaactgttatgtgttttcagagcttctaagcttttaaaaacattctctcatatacttaagttgttcaatatcaacttgtattttatatctttttgcaagtttaaaatgtgggtgaataggtctgaatctcatctttactggatctaacctgtctcattaggtgaaagcagccctctgggctttgcaaggtggcacttctgttgttattgccaatggaacccacccaaaggtgtctgggcacgtcatcacagacattgtggaggggaagaaagttggtaccttcttttcagaagtaaagcctgcaggtaaatagttcttcataaggtcccaaggcctgtgatgggaactagtgacacctggcttagttagagatcacaaaattgatatgctaatattatgaaatatggcattgttttgaacgctatttgcaaaatcggattttgctttgcttttgtgaaattctatctaacctgcctatctagacctattctctgcaaaatcactcggttaaaatatataagcattgattttctcaagaaacatttgctaggcctatgttagatgccaagtgctaaataagcactagagatgcaaagatgcatatgatacagtatgtgctctcgagtgttcacaaaggacagaattgcctcataatctgcattcagaagtgtaaacacattaaaaaatatcgccaaagtggaattcagaagaattctagaaaacaaagtatattgtctgccccagaaatacaggcaagttcttatgtttatacctgagtgaatctggcacattcttttgctattttattggtcatggtgatcccctgtgtgaaacaagcataccaagacatcatgtgttccttctgtgggcgtgatgagct

SEQ ID NO: 7988 - DNA, 1028 bp, Homo sapiens
tcttattgtgattatcctaattcattttctactgagtgttgattttttagaacagtatctgaattttaactatgctcttggtggggtaaggggaaaagaggagtaggcacattatcagaatgctaggaacccctcactgtctttggagaaggtttggctagaattgtccaatctttcctgtactaatatatgaaactgaaacagcttccaaatctaaatctgtgatctcatagcactgtatcttctgggaagatcctaaccctaaatcctggagagttgtggagtagtaggttgagactgacagattgtgaaaggttattttttcttttcctgtaataatttgcactgcttatagttgccactgctttgctctacaatgggcattgatttcctcacttccctgattcacttactcctgcagagaggtagtatgtagcaagattgtcttaaagatttggaataatagaggggagaggtatattatagcacaggaaaagcagtaacttgagaccagaaaaatcactgcccaaaatgtccttcagccagtccccagcctccccatctgtgtccactttaggtcttgatttaactctagtttctcagccctttcttacccccactttttcttgtccaagctcctacttactctttttcaaagtgaaattgtgagggtttttcatcttggattgtatgcatgtaacatttcaggtaactattttatgtcactccacttagttataaaagggacatacactttatggtaataaatccagactgaatgccaagagtcacgcactctcctgctgactgagcctaacctctacagtgactcactcataaaactgggagtgtaaattagtgactgtttcaaagggtactgtgagagttaatgagtacctctgttgcatttcatcctgcttggaaacagtcacattaaacagtatatggctgctatgctgtttctgcaatagccacccttctttttcagttctgtccttaaagcacagcatcataagtagcaatggcag

SEQ ID NO: 7989 - DNA, 1155 bp, Homo sapiens
gacctgcagggggtaaatgtgggtaaagtatttctaagggtttagcatgctggagacactaacaccatgctatgctgcatgcactaacaccagaagtttggcataaacaagatggaaaagttgtgagagaaacttgtcatggagcagtgactgcataagctcttctgaactcgtggttgcattcaacagggtgaggtgctatagtcactgaagatggtgcgatgagcatggcttgtatatttcagtggctagaagactgcatgtttggaaaaaggattgccagtagacagtgtgttctgcagacagaaggggcctgcaagagccgtcatctacatatttgggttcattggttttgcctgatcctagcttggttttgcctgagcttggctgtgttcttccatgaatttctttttggactgcttagctcactcacttatgactttttaatctgcattctaggttattagtgttaaagataatgatagcctggctgcccgactggctgtggaaatgaaaactgatctcttgattgttctttcagatgtagaaggtacaaagtaatgcttttttcctttatctgccctttgttttaaatgctacatatgtgagcacatgagtttccctctttctttgagtccctctgatgtttttttgctatagatcattagccatatgttctgacaaagggcttttatgactcaaaacagggtgggtgagtctaagagatgtcatttgaatcctgaaatgttacttccaggtgctttcagttgttttccttaaataacagctttatggagatgtaattcacataccatacaattcacttatttgaagtttacaattctgtcctggcgtggtggctcacacctataatcccaacactttgggaggccaaagcgggaggatcacttgagcccaggaattcaagatcaacctgggtaatatagtgagtccctgtttctacaaaaaatagaaaagtcagctggacatggtggtatgcgcctgcggttccagctactcggggctgaagcagaaggttcacttggagctgggagttccaggctgcagtgagctgttatcgtgccactgcactccagcctgggtgacagagcgagaccctatctcaaaaataaataaataaataaaagtttacaa

SEQ ID NO: 7990 - DNA, 1038 bp, Homo sapiens
taaaaaaaaaacttcattggccatttttggaggccactagagaagctactcatattgaaaatggatgagtaaaggggaagagacacacatttgtcctgcttttcatagacaaactgtacctcagggtaaccaaatagttggtaaaggagagtttcccttttggaattattccagattataaatgacgaaggaatcattgagttagagtgtcagcattttgcatctcctaatggaataatggatcttggcaatgatcatcaacagatgctaacatcacaaaaagaaagataaccaggcattatgtatccccttgatgaacatgtacaccacaacttataaagacttgttggggaaaaaaaaaaaagccttcataccaaacagcagtttatagggtatacaaagagcagtattaataccataaggacacaattgggaaaatgtaggctgggaaatcctaaagaataaacaactcagtttaacaaaaaattacaagggggaaaactgatggagaagggaacccatgaatgaaagagacttgagagacacttcaattaatttgtaatgcagggtttaatttgcatctcaatttgagcaaggtaaaaaaaaattggaaaaatatgaacactggctatttgatatgaaggaaatcattgaaatattccagataatggatttgtggagagagaaagacatataattatatattatatataatatatatgattatcttttagcagttattactgagctatttacagatgaaataacatgtctgttgcctggaatttgtattaaaacaatggtgagggtatagaggggttattggagagtgggaagttggccatgagagatagttggtgaaactgggtggtatgtacatggggatttataatactattctcagcactttggttaagtattaaattttctttttctttttctttttatttattttagagagagggtcttgctctgtcacctagactggaatgcagtggtgtaatcatagttcactgcagccctgaactccagggctca

SEQ ID NO: 7991 - DNA, 1033 bp, Homo sapiens
ctctaccctctctaccttagaaacataacagtctttaccctttgcgagccagaactgggactccccacacattaaggtgactgttcagggcagtaaatatccaaataagtgggcccaaatgacagtgagcgatgggtccagaggtgggaaactcagatgagagtatggttgttcctggggcttcctaggagagctggaactcagcctgggccttgacaactgatgggatttgcacaaacagaggggaaaagttccatgctactaagtacacagtgtgaggtgcccctgcagttgtgcaatccagtggttctggggaagggacaggctctaggagtgtattccaggtagaggacaggcaggaatgagtatggcatgctgtgggccagggaggagacaagctggaaagcagaggtggtggtctcattaggaagaatgaaaaataaagtggatcattccattaggcagagctctgaagccaactaggtgagttggagttcagtctcaaaagcaggctgaagattttgaacggaggagaaacttgatgaaaacggtaggaaaaacctggtaaaggtttgcgtaggttaccagctttctttctagggctgcgtgtggacctaatggaagagctgtctccatcagggcctgactaatagacatcttatcatgtcagatggactcaggagccaacttaaactggcttccactggccataaatgggatgatgtaaacatcaagaaagggaatcacagctgggcacagtggcttacacctgtaatcccaacaccttgggaggccaaggtgggcagatcacctgaggtcaggagttcaagactagcctggccaacatggtgaaacctcatctctactaaagatacaaaaattagccaggaatggtggcacctgcctgtaatcctagctacttggtaggctgaagcagtagaattgcttgaacctgggaggtggaggttgcagtgagacaagatcgcaccactgcacttcagcctgggcgagagtgagactcagtctcaaaaaa

SEQ ID NO: 7992 - DNA, 1024 bp, Homo sapiens
atccatctatgtgtttatacatgtatatgaaattaacatgtatttttctacattattaaaaattctaaaaatgttaatctttttccctttatccaacatttactctgcttctgatttttctgataataaataacagtgatgaatagctttctgataaatctcttttttagagaacttttttaaggctttcgataaatttgccaacctgtcttcaagagagattaatttgtttgtactcttcaccaacagcatttgagtgtgcctatgacctgcatactgggtgtaaactccatacaatactaaaataagaatacgctagatagagcttttgatacactgtgctagttttacacagttaataatgataatgctattttttggtatctaaactggttaatactgagcatgtatatttttattgaaaaactatattgagtatttctttttttcttgcatttgactttgatggctacagattgtatccagccttcagtcatcagacatgttcgttcttggagcaacatcccgtttatcactgtacccctcagtcgtacacatggcaagtccttcgcccaccgcagtgagctgaagcatgccaagagaatcgtggtgaagctcggcagtgccgtggtgacccgaggggatgaatgtggcctggccctggggcgcttggcatctattgttgagcaggtgattgccaagatagaaattatgctgtactaaaattgggtttttaagtcgctagttcagattaggtttaagttgctcatcaacttaaaaaaataattgtgatttcagtgcagtagatttaacccaatgtgaaaactgtttcccactgtagacgccagtgagagacgacatcttagggcaagaaaatgggatgttaaggagtaggggtgatttcatgcagttcatgtctcagacttcttagtgataaagagctgtttctgtcagagattcttagttctgactacgcagtagaatcatcttgggcctggagatgcttgggcttcacacctagcca

SEQ ID NO: 7993 - DNA, 1046 bp, Homo sapiens
ccgagatttgtagccatattctcttcctccacaggattaagatgttagccagttgtaggcattgccactgccttccaggggtacaagagttattttgtaatcctgtgggcatcaggaagaaagacatggcagcagcctctggcctttcctcttgcttttcatggctggctggcaaggatcaagctgacatttcaaataggtgcatttcctggttctgttgggagatgttagcagaaaggtggacatgattgctttaggatgttggatctgttacaggaattatatgaagatttagtattaacacataagcattgcacctgaaagattttttttaaatttggaagataccaaaaagagcaggtgttttttgtgtctcaaaatattcctaactctgcattattatttgcttacataaaaactaagatggttgaggcctagaaaggagccacttactttttctctcttttctataatatagaggaggtgggagtttccctaatacagaggagtttggagcaggagagtcagatttttactccgagggtaaggggaagtagagggaaataaaatgaattgtccagtatttttcattactcactttttaaaaaatgtattctgcagatactttggttagtgaccacatcgcagcatgttgagtcaagtttaccgctgtgggttccagcccttcaaccaacatcttctgccctgggtcaagtgtacaaccgtcttcagatctcgtatgtaccatagaaaacttatgagtatgtgggacgtttgatagtcaaagtatgtttcaacaaggttttcaaagagaaaaaagatgtttgtttgtttgtttggagacagggtctcattttgtcacacaggctggagtgcagtggcacaaacatagctccatgcagtccagacctcttggactcaagcaatcctcctgcctcagcccaccaagtacttgggactacaggcacacaccaccgcgctgactctaacttttttattttttgtcgagatgcgattttgccatgttgcccaggctggtcttgaac

SEQ ID NO: 7994 - DNA, 1048 bp, Homo sapiens
agaagccagacacacacacacaataataataattaatttttaatgataaaagtcagaaagtggttacttctgggaaagggacagagaatagactggaaagggacatgaaggagctctgaaatgatggacatactccagaccttgctttgcgtattggctataaagcatatataattggcaaaactcattgaactaaatatttaaaatgtatatattttattgtttataaattatacctcaacaaaaatattaaaaccaaacaaaaaaacatttaaaaaaacatgagaggccaggcacagtggctcacgcctgtaatcccagcactttgggagaccaaggcgggcggatcacctgagattgggagtttgagaccagcctgaccaacatggtgaaaccgtgtctctactaaaaaaaaatacaaaaaattagctgggcaaggtggcacacgcctgagtctgtaatatatgtgtctgataaagttcttatatatgtaaaataaggaactcttacagctcattaatgagttagacacttgtaccaaagatgaatttgttctagttgatagtctgaatgcagctacaaaaacacacctaaaagttagtatccacaattttttctttaatagtttttatttgtactgattttacgtagggtattaacatataatggtttaaaaatcgtgatcatacagatgtaatgtatagggtgtacttcttattaccaaagcctaacgtaacctaatccaagtcttcatgttgttacaaagtaaatcttattttgggacaaaggattttattgtactgtaaattgaattgaagcaaataaccccccaaactttacaaagtgttaaaacaaaattgctggtggtaatttcttaagtaaacatcatgaaatatagcttaaagtagaaataaattaagtcaaccatacataacagaactggacccacagtaaatgaagtgtgctgactgggctatgtatcttttgtctgtcttgataaaagaaatgaggtgaccagattttgagagagttatttttccccagtgct

SEQ ID NO: 7995 - DNA, 1091 bp, Homo sapiens
gtgaacaaagtttcttttatattttattcaggctggggaccccattcttacttacttccccaagtggtctgtaataagcttgctgagacaacctgcaggagttggagctgggggactctgtgctgaaagcaatcctgcaggtgaatccagagcaaaagtaccaaccttttcattcaatttaaaacaggctttctcatttaccactctcttaattatttgtgtttaaggtttcctagagagtaaaagtacaacttgcactcgttttttcaagaacctggctagtagctgtaccttggattcagccctcaatgctgcctcttactataacttcacagtcttaaaggtaggtgtcctttctctccctacactgtcactactatgaagttgaagtgaacatgcttctcactgttgtgggttgtggaaagagcattgaataaaagtcagaatccccaggagccacgtaaaagacagagggcctggaaaccacatctgaagacaaatgaaataattggggatatatatgcaggataagagatcatcacccttctcactaatgggattggcttgcgagggtggaagggggaaaacacccatctcaccaaacttcttgcttttgctattcagtagagccctgtcagagtaaataggcatcacagtctgtcaccctcctgcctggctccacttcctggcattttagtgtaaagaagagtcaggtggaatagaggaagtaaatcattctaatatattgactcccctgcccgccaaaccaaagcctattggtagtaatatgaaaccacaagctcctggtgatttttggtaaggtatatgcacattcatgtccctgctgttctcctaggttccaagaagcatgactgatccacagaatatggaggtatgatgctgttgtaccaggaaaaaagaaaaagaatatttggctcctctgcatctgaggcaattttagtctaagttgtactgttgaaagataaatgtaagcgtgatgtagcaaacaattaagtagggatctaaaacggtgcctttgcaagtacgtcctatacagttaatagcctcgtatgaaaccaggatccataagg

SEQ ID NO: 7996 - DNA, 1050 bp, Homo sapiens
aggatggaccatatctttgtttccccatggtgcttagtatctattggtacagccaggcatggtggctcatacctgtaatccagcactttgggaggtcagggcaggaggattgcatgagcccaggagttcgagaacaatcctggcaacatagcaagacccagtctttacaaaaaataggaaaattagctgggtgtggtggtgcatgcctgtagtgccagctacttgggaggctgaggtaggattgcttgagcccaggagttcgaggcatgcagtgatcatgctactatactgcagcctgggcaacagagtgagatcctatctcaaaataaaataaaattcaaaaaaatatgtatctacgataatgatcatcagtaaattacgtttttagtcaaagtctgtacagcatgatggagtggggaaaaaacaccaggaataggagatctgcaatctactcttggctctgcaagctggccctctggctttttgctacccttttacctctgaggatccaaatttcctcatgggattaggtcagatggtctgtaggcttcctttgacatctgaaattgtaatagaaatctaaatacctttaagctcttttaggtgtaatatatcatctgtgatggtagaaattttaggcaaaaattctacttagcctatgtttaccatcactaccgccaatatctttgcactgaagtgagagacaaaatgtaaactttctcttattcatttaagccatgaaaaaatagccagatagatattttgccatctcagttcaccttctttcttagcttaactttaacttttatttcatgtgtaaagatacaaataactgcattttacatgaggtaaatatctcctccatgtggttttcagggtatgagttccgaaggaaatgtttaaatagctcttggaagcgttagggtttgaagatttcagatcagaggtggaaagtggcccacagaacagcagcatcaacatcacctgtttcagagcaatgcttttcaaattctaatatgcatacacattacctggagatcttgttaacat

SEQ ID NO: 7997 - DNA, 1036 bp, Homo sapiens
atctatctttttaaaatgtctatgaagcaaaataatgttcctgcacaaaatggatttaaatgtctcttgcatcctggaagtcacctcatcctgatttcatctgactgttaataagaattgcaaaactatatttgtctcagaaaacaaccagtttttggttttgggggacttgaatttcaaagcagttatcagaagccttgtggttatttagatggtaatagggtaaagggaacaagatgaatacttcattttcagataaggttgtggcctgacgcggtggctcactcctgtaatcttagcacttgggaggctgaggtgggcagatcacttgaggtcaggagtttgagaccagcctaaccaacatggtgaaaccctgtctctactaaaaaaacaaaaaattatccaggcatggtagtgggcacctgtaatctcagctagttgggaggctgaggcaggagaatcatgtgagcctgggaggctgagattgcaccactgcactccaacctgggtaacagaacgagagtctgtctcaaaaaaagaaagttgtctcttcttttccaaacattttactgccttttaaatccagccttatgatcatgctccagggttattgcaatggcacctacctggtgctccctgcttttgatccccactcctgcccccgacaccatcctgcacactccttcgggatcagtggatctgaactttctttaaacacctgagggaggaatatggccacttccaatagtagttatggttcattacatcaatgaactttttcctgaacgagggtggggtgtacattcatgtttagtatgaaaaaggcaaaaatttccctttggttctgattatttacctaccttcctcacatatacacacatagcatctacacacagtatacacagttgtggagaatcatttcactagataaatctttccataacattgcattatgttgcttccttactgagaaacctccattacttcccactatccataaaataacatccagcttcttagccagcctgtcagatct

SEQ ID NO: 7998 - DNA, 1012 bp, Homo sapiens
acaaagcctccaagaaatgtgggactatgtgaaaagaccaaatctatgtctgattggtgtacctgaaagtgacagggagaatggaaccaagttggaaaacactcttcaggatattatccaggagaacttccccaacctagcaaggcaggccaacattcaaattcaggaaatacagagaacaccacaaagatattcctcgagaagagcaaccccaagatacataattgtcagattcaccaaggttgaaatgaaggaaaaaatgttaagggcagccagagagaaagttcgggttacccacaaagggaagcccatcagtcttacagcggatctctgggcagaaactctacaagccagaagagaatgggggccaatattcaacattcttaaagaaaagaattttcgacctagaatttcctatccagccaaactaagcttcataagtgaaggagaaataaaatcctttacagacaagcaaacactgagagattttgtcaccacaaggcttgccttacaagagctcctgaaggaagcactaaacatggaaaggaacaaccagtaccagccactgcaaaaacatgccaaattgtaaagaccatcgatacgagaaagaaactgcatcagctagcgggcaaaataaccagctaacatcataatgacaggatcaaattcacacataacaatattaaccttaaaaataaatgggctaaatgtcccaattaaaagacatagactggcaaattggataaagagtcaagacccatcagtgtgctatattcaggagacccatctcatgtgaaacgaatgcacataggctcaaaataaatggatggaggaagatctaacaagcaaatggaaagcaaaaaaaaggaggggttgcaatcctagtctcttgtaaaacagactttaaaccaacaaagatcaaaagagacaaagaaggccattacataatgataaagggatcaattcaacaagaagagctaactatcctaagtatatatgcacccaatacagg

SEQ ID NO: 7999 - DNA, 1049 bp, Homo sapiens
ccatccatctcttgcagggaccttgactgatacaacattaaaatgaagtgtaattttaaaaaattttatttacatatttcttattaagaattggatgaattgaaacttctttattttctttctctttcttgtcacacagaaagcctgattaagtagcattattcttttgtctacagaagtaaccacttctggccaggcatggtggctcactcctgtaatcccagcactttgggagcccgaggcaataggatcacctgagattgggagttggagaccagcctggccaacatggtgaaaccctgtctttactaaaaatacaaaaattagccgggtgtggtggtgggcacctgcaatcccagctactcgggaggctgaggcaggagaattgcttgaacccaggaggcggaggttgcagtgagccgagatagcaccactgcactccagcctgggcaatggagtgagactctctctcaaaaaaaaaaaaaaaaaaaaaaaaaagtaatgacttctgctgatcttttttctcccctataggttcatagaaaaaaaactcccaccttataaaggaatctttaaaaggttcctcataaaggaacagggttagcagaaccaagttttgagtcctgggtgaaaatccaggggagaatggtaatcagtgataaccaatggccaatccaatattaaaattagttaacagtgaccaatcttatttcacctaccccacccagagtggcccaaagcagattgctggatctgcctctaaaccaaccttcctgccaaaataattggggttaggttgtgtctgctgattgtctccataatttgagattttaacaagttgagtttggctcccaaataccttaaaggattttttttttggcatctctggggagggggagattggacgtaggcaaccaaacaggaatggaataagaaaagatttgtgttctctgaaggagacttgtgaagtctaattccaacttgctgagggaaagtgtttagaaaagaaaaagcaataggcttcaaccagaagacatgagttggagtat

SEQ ID NO: 8000 - DNA, 1027 bp, Homo sapiens
tcattctacctggctgtagtgtagtatagtgtagtgtagtgtaggaaacatcagaggagtggagtgggatatgagcctggagagagctggcggccatggatcattgaaagccttgaatgtctgatggggaggttgactttattttgtaggcaatggaaagccaccagtggttttagttgagcagcaatgaaattaagcctgtgctttgcaaagattaatctagcagcaacagattggaagcaacaccaccattcctggtatcagtccaggtaaaatatattacagctctttactggagcaataacagtaatattagaaggagaaataaaaaagaaaaatattgcacaggcagaatggggaggtcccagtgatggagctgatcttggttcattgaggcaggggtggcattaatcatgtaaaacacaggaggaggaactgggttaggagtaatggtagagttcagtttaggtaattgcaaatacacactattccctgactagctcccaagactttttcttccctctcttcttagaacttcattagaagaggtgatgttatttcttagatgagagtatcttacttaccattgactaatacatgttctctgatgaactttgctattcaacatacatgcaaaggggttataaaaacaagtcaactctagtgctgatgagggtgatcatcatcactgatcatggtgtcagttgattatagtgtcaatttataacttaatttatgtaaaatagagcaatgcaaaagacatagcaatcttcacttcaaatgaagagtcttgaatgccacttttctaaagagaaggctcatggaggcacctcctcactattgaaaaatccattatacctgtgataaaactgattgtgttcagttgtattagatttgtatgcaaataaaaagttgggtaattagctatacattgtcctaaacgtataaaataagaaaaatacatagatgtatggtttcctaggacatctaccagtttagaatgcgaggctaatgtgggagctgccac

SEQ ID NO: 8001 - DNA, 1171 bp, Homo sapiens
ggctgtgtccccacccaaatctcaacttgaattgtaccttccagaattcccacaggacccagggggaggtaattgaatcaagggggctggtctttcccatgctattcttgtgatagtgaataagtctcacgagatctgatggttttatcaggggtttctgcttttgctgcttcttcatttttctcttgctgctgccgtgtaagaaatgcctttcacctcctgccatgattctgaggcctccccagccaggtggaactataagtccaattaaacctctttttgttcccagtctcaggtatgtctttatcagcagcatgaaaatggactaatagtaccagtagagtggggcattgctgaaaagatacccgaaaatgtggaagcaactttggaactgggtgttgaaataatctggagggctcagaagaagataggaaaatgtaggaaagtttggaacctcctagagactgtgaatggcattgacaaaaatactgatagtgatatgaacaataaggtccaggctgaggtggtctcagatggagatgaagaccttgttgggaactgaagtaaaggtgacccttgttatgttttagcaaggagactggcagcatttcacccttgccctagagatttgtggaacttagagcttgagagagatgacttagggtatctggtggaataaatttctaagcagcaaagcattcaaaaggtgacttgggtgctgttaaaaacattctgttttaaaagggaaacaagagcataaatgtggaaaatctgcagcctgatgatgcagtagaaaagaaaaacccattttttttaaggagaaattcaagctggctgcagaaatttgcataagcagcaaggagcctaatgttaatccccaagaccatggggaaaatgtctccaggtcatgtcagagaccttcatggcagcccctcccatcacaggcccagaggcccaggaggaaaaagtggttttgtgggctgggcccagggtctctgtgctgtgtgcagcctagggacttggtgccctgtgtcccagctgctccagccatggctgaaaggagccaacatagagcttgggctgtggcttcagagggtagaggccccaagcattggcagcttccatgtgatgttgagcctgtgggtgcagagatgtcaagaattgagatttg

SEQ ID NO: 8002 - DNA, 1048 bp, Homo sapiens
ttatagatactaatatataatttttccctgagaagattgcttttataacatgcctggatgtcagttttctactttatgaaactaagcaacactggaacaattcaaaaatcttagtgtcttttagcctaaactcagtggcatattcctaaagaatactttccatttaattttatcttctctaatgaagataatggtattcatgcaacatcttttatatgctgtatggtactcaagcaacatcttttatatgctgcttagcaactctgttaagcacctctatgtgccaggcatacagctcaacactagacctacagaggtcagaaggagcccttgccttcaaggagataggtaagtaaaccagcaaatagacactttatccattccacaagtgtttatggaatacctactgtgtcctggcactctgcttagctctgaggattcagcaatgaataagacaggtgtgaaaataagtaattcaaaatctaagctgttggaactccaaactattttgatccttaaagaaatgtgattatggggcctgagtcacgttacaagcagctgtaacctgggaagctgtaatctttgtttctatgattatagattaaccttcctccttgcttacattgttgtacaaaatgttacaaatgactaaagggctccaggaaagaccccttccctgttactgttgatttttattatagattaacttcccttttagtttctcacccaaaggtttcatggctatcacaccgtgttaagatggagtgttaaatacctcttttaaatcagaaaggaaatgaaaaccaactgtaaagaaaacaagccatacagaaaagaaactcataaactagcgttctagaaaatgttataaacctactaaacttctttgttttctgcctatatatgcaataatttaactttgaactttggaacactgactctatttctctggagtctgtgtctcccaaatggctattcccagctttttacttgaataatctcgactggattttgatccttttgattatttcaggttaacccagaccag

SEQ ID NO: 8003 - DNA, 1056 bp, Homo sapiens
taagtcccatctatttatctttgttacatttgcttttgggttcttggttatgaagtcttcgcctaagccgatgtctaaaagggtttttccaatgttatcttctagaatttttatggttttaggtcttagatttaagtcttttatccatcttgaattgatttttgtataaggtaagagatgaggatccagtttcattcttctacatgtggcttgccaattatcccagcacaatttgttgaatagggtatcctttccccactttatgtttttgtttgctttgttgaagatcagttggctgtaagtgtttgactttatttctgggttctctcttctattccattggtctatgtgcctctttttataccagtgccatgctgttttggttattatggccttatagtatgaagtcgggtaatgtgatatctccagatttgttctttttgcttagtcttgctttgactatgtgggctcttttttggttccatatgcatcttaggattgttttttctagttctgtgaagaatgacagtggtattttgatgggaatgcattgaatttacagattgcttttggcggtatggtcattttcacaatattgaatctacccatccatgtacatgggatgtgtttccatttgtttgttggttaggtatttaacataccatataattcacccacttcaagcatacaatttaatgatttttattaaatttacctatttatgcatctattactgtacatcagttttaaaacacttctatctccctaataagaaccttcatgttcatgaattgttcattcctattcccccaccccaggcaacaattaatgtagtttctgtctctagagatttgtctcatgtggacatttcatataaatggaatcatacaatattggtctcttgtgtttggcttctttcgtttagcataatgtttttgaggtttgtccatgatatacagcatatatcagtagttcatttgtgtttttgctgaataatagtacattatatggatataccacattttgtctacctattcatcagtaggtggtgtgaaa

SEQ ID NO: 8004 - DNA, 1050 bp, Homo sapiens
ctatcctggattcctttcaatgtgaatctaaccatttacagcttttaaatgaactgtgtgcatactcctgcgtaattatcttcagtacactgataacatacttttactttgcaaattaggagtggcctcaaggggcagttaggattggtgatatataaaagttctctagtatcaagtcttcctctagatggaactcttctatctaggtaagagttctagtttcttatcttgctcagtaagatgccagccttattgtctaattggctttaagaaaaaatagtgactgcttaccaagtgctagatactgtgggtttgctcttcatatctgtgggcctctaatttgtatggatccattcttaagcaatataaaacaccagcacatcagattcttgtgagagagtagaatctagaattgtccttcctaactttttctcagaagtttggctgaaagaagtattattgcagaaggtcatttaaagactgtgcagtccattcatcactccctatggatcaagctggaccactcagacttatgtacttggactatattacattaattacttaaagcattagtttcagtgagtcatgccagggtgattttgtccaccaggagacatttgacaatgtctggagacatgtttgattgtcataacttggagggtctggggagggggtgctcttggcattcagtatgcagaggccaggggtgctgctaaatgtcccacgatgcacaggacagccccacaacaatgtttcaccccaaatattagtgcccagttgagaaaccctgatttagatggtcaaggagcctaaggaaaggtacaagacacagaaagaggaacgaacttaaggtatttgttggactgtaaggagagctgccggactggagagtgtttccaggtgggatctgtggtgaaaggtaagactcaatatatggataagtctgtgtgtatacggccttaaagaatcacagtagatttgaagtttatcctgtaatgacagtagcatttacagaaagtttctgttggaaatagaaaaaaaatggaaaac

SEQ ID NO: 8005 - DNA, 1036 bp, Homo sapiens
agtattctcttctcatcttcctgtttctttcatctcttcctctgccttattcttctatacttaatccctgatctcatgaagacgctgtcccttgatgactattttgtcatcatcagcctctacctacattgactttcttccttgtctagcccacactccttgttttattatttacccacatcagtatccacaatttctttgccttttgtgtttcttccacttttgtccagcatacctattctagtttagtctagccatttgctttctctcctcatatagaaaggtaattgtattagtgaaaatcatgtaaccagattattgccatgatgatatggcatggtccataatgtagctcagccattcttttcctttctcacccacagctactattctaacttttatcgttccttaaacctactctacttttgaccttgtactttcagcagctggcttggctttttcagaggaaacagagactctcagacatgaatactgtgacactgaccaccaggccaacttaacatcagcagatatcctgtctcagatgaagaggtatgtttgatttatttcttttttttttttctatctacagatgatccaatatatgtcctagatcccattcattctgtctcctctggggccttatttcatcatttaaccctccctttttatcttcagtataccctttccccacctccctcccctggctttatctgccctatccaacaaaacaaaaacaaaaagaaaaaccatcaactgggattattctcagatttcttctctctctccttttttacagccacatttagagaaaaaggtaatctttttttcccttcccttacttgttaactcttctacccacagagttctggcttccgccacctaatcatgccaccaaggactttgtgattgccaaacccaaaatatcttcttaggcttcttttctgcacttggctctgtagaccatttcccagtcttgaactttccttgtttcattgttttcgcaaacatcagtttctaccattcttctcccacc

SEQ ID NO: 8006 - DNA, 1029 bp, Homo sapiens
ttcaatgctaggcatttgggtaggtgttagcaataaattataaaacaagccaataaaacaaaacaaaaaccctgccctgcttgcagtcaagcagagaaaatactaggtaaacggaaaatatagatacagaatgagcctcaacaaaactgtaattcagtctttaaatcagttaagtccctggttggatgaagatgatcatcctcaatacgcttaacaaagcaaaggatggaacatttctggtggaagataacatcatctcgggcttctataatttttcatatataataatgtagaatacaatttttaaaatcacctgtcataataagaggcaagactaaatgagcaaaaccaagagaaaaaatagataataaaaagattcatagtgatccaaatattgtagttaccagatatgaactttaaagtagctattattactgtattaaaaatagcagcaaaaacccatgaaaagactaaatatatctcaagaaaattagaatatttacagaagaattaaatgtcgaatgaacactttcaagcaaaaaatgtattgaaaatatgtaaaattaagaagtcagcagatgggctggtctgaaaatatggtggcagtacagttttagatcttcccaaattcctatattaaaagaggcagagcaactagacagcaaaaccaaaaatccacggacaagatttataatagaagtagttctcaagaaatgcctcatgaaacccaaaacacaagtcagtgaagacaaatcatcaatattcagaaggtctgaatagcattggcgattgtgtgggagatagcagagagaagcaatggaacatctgatagacctgacaagagtccaaaagagccaacagaaatgcaccagaaagtacagcaggccaacttaaaaacagcagctaaaattggaacaggttttgtctactccaattgtggatggtcaggttaaggaccgaaggagctgcaggaatctagttcccaggaattttcagaatgagccttcacactgaatagaaactactggg

SEQ ID NO: 8007 - DNA, 1060 bp, Homo sapiens
agctgggcatggtggtgcacacctgtagtctcacctacttgggaggctgaggtgggaggattgcttgagcccaggagtttgagtccagcctgggcaacataacaagatgctgtatctaaaaaaaaccaagttgccaaataatacatatggtaagatccaatttatgttaaaaacaatcatggcatacatacatatagaaatacagggagaggagaactttaaggatgtactcaaagaactaaaggatgtccaaaccatgaggtgatgaacgaagtagggctttcacatcttgacacttctacaattaatcttttccagggagaacgtattccggtattacttgtacaattttttaaagctagagggaaaaagagcagaaatctgcatagctgagcatcctttctactctctcatactatcagcaacatccctctttgttctttaagtggaagtcatactcatataaaggagcatatttcagtttaagaattccttggatgccaatgactcttccactactctgaattggtttgaaaacactgggaacaggcaaagccatacatttcacacccagggactaaattatccatgtttaagaaattaatcttttagtgggaggccaatgaacatgctctgcaccacctggccttttcttctcttccccactgctcttctctacctcagaagagaagattatgcacacttccaagcacatttctcttttcacaatttactgggagttagagaaaatgtttacattcacataagagaataaattgaaaaaaagcaaaaatccactgagaaattacatttggttcctaatacaataataatactgaaacatattgcaaataataaccccaaaagtttttattttatgcagagagccatgcatatacatgaaaaataaacccagagtctatatatactttaatagatggtactctaataaactaaaattgatattgctaaatcagattttaaagattctataatattgtgggaaaaaattctataaagcagaaatctgtagatcaaatcactttttaaatgatctgca

SEQ ID NO: 8008 - DNA, 1052 bp, Homo sapiens
ctttgtttcttatgtaccgaagaaaagcatttatgaactcttactatgactctggccatatgctactggtttttatatataatgttctccctgttcttttttaaacagtctctaatttcagttttgattttccatttaatccagttatgtataacaattttcaaaactataatatttttaaaacataattttttagagaagttttagatttgcagcaaaattgaacaaaaggcacagagagttcccatgtaccccatccccataaacatgcacagcctccccagctgttaacatccctcgctggagtggtacctttttttacaatccatgaacctacattgacacatcattgtcactcaaagtccatagtttacattagggttcacccttggtcttgtaaattctgtaggttttgacaactgtgtaatgacatgtatccaccattataatgttatgcaaaatagtttcactactctaaaaatcccgtgtgctccaactattcattcttatctccccctagaacctctggcaaccactgatctttctactgtctccacagttttgccctttctagaatgccataagttatatgaagcttttcatttccgtttatttttaaaaatatgtgttaagatgtggaggggagaggatatctttttgttatcattgttcattattttaaatgatgaaataaactttttcctttatatttaccatttccctcaaacatagcacattatggaagccagcattatcatcattttcatagaatttactgtacttatttctagtaatcccacaaataattaatctgaaaattaaccccaacccttctgggaactcccagaatgatgataatgcataaatgattctttgctaatccagaatgactgggagatatacaggccccagaaataaagtccctgggagtcttgacctttgcctacaagtgagggactctgggaatgcctctctcatcatctgtgtggctataattccaagcactgaagggacacattctcttacatataaatacacatactgccttagta

SEQ ID NO: 8009 - DNA, 1050 bp, Homo sapiens
gagagaagagtgggaatggggaagaagtaatatttgaagaaatagtggctgagaagtttctgtaattgatgaaagatgtgaggctttaaacatgaaatttattctgctaagcaggaagaagaataatgataaatccacacatatacagtatagtaaaatttcagtactttaaggataaagcaaaatttttttcatggctcaaatggcagtttcttccttttttattaaggttaaagatacataatataaaatttaccaccattttaaagtgtatgattcagtagtattacgtatactcacggtactgtataaccatcatcattacctatttccagaatttttttcttcatcccaaactgaaactctgtacacattaaaaaataactcctcatttctcccttccccatccctggtaacctttattccactttctgtctctgaattaaagtgaaatatttcaatattatcagagagaaaagatagcctataaaagcccaacatttagaccaatagcagacttataaatagcaatgataaatcccacaagataatgcagtactgtaacagcttcaaagtgctaaagggaaataaataacatcctcaaattttctactcacctaaactattaagaatgagggcaaaataaagacacttttagatctagaaaggctaaagaattttgctatccatagaaactaactgaaagaatcattaaaggagcatgctttcagcatgaaaagtaaatcgagaatgaaggatgggaaataagaaataaggtaaacataaaagtcaatgaactatgttaaaaatttcattaactagtgtgtgtaagaaaaactgtttcatgtttaaaaatgaaaactctagacaacgatcatttaggttagagaggtgtggtgttttttttgtttgtttgtttttggttttctgatttgtttgtttattgagacagagtctcactctgtcaccaggctggagtgcaatggcatgatcttggctcactgcaatcaccgcttcccaggttcaagcgattctcctgcctcagcctcc

SEQ ID NO: 8010 - DNA, 1034 bp, Homo sapiens
tctcctcttaactaccaaactctctgaaccactcccccggcatttccacttgcaacccaggaacagtaaagtactccctactgtatgttcccatgtacctatctcatacctctattaaagcactacagcattatcacattgtactgaaatgttagttttattccacagacagtgaactcattgaggtagaaaattcatttctgaattttcacatttacagtgtctggcatggcgtcgagatgtcaagtgccttgcctatcatcacttagtgaagaagtaacagtggagtctgggctggggcttttctactttgctagtcatgtaggcattttcctgctacataataaaccaacagcagagccctctgagggtctcacagagactagtgcaaatcataggtcttaccattgtcaataaacagtgttgacaagctgaaactcctggtacccatgattacaaagaaacaccattaatcagaatgtttcatgaatctgatcttatagaactcttatatgcaaatacaaatgttgttttaagacctaagactagttttcctattctttgttagttaacactctaaagaactctccagagacagttcaaatcttcaaacacttcaaaagcccagaacattctaatacaggatcatcttaactgacctaccagcctgccaatcacagagtctgattcaaagacaacagaaagtttttctatgagccagaggtcaaaacttagaatgagcaaagaagcattttctcttacctcagattgttgcagaagagcagaaaaagggaagacaatgcatccaagccaattctttcttatatatgagtgaccactacagctcttgagacagtgatcctatgaaaataaataattttttattacttacttaatatcatgtgatgaatagttttataaactcacaggtaaatataaaaagtcattctctttcttctaaaaaagaaatcaaaagataaatagaaaagatctgtttttcttgctttttaatttctttgaaagataactattta

SEQ ID NO: 8011 - DNA, 1029 bp, Homo sapiens
ggggtctccctgtgttatccaggctgatcttgaactcctgagctcaagcaatcctccctcctcagcctcccaaagtgctgggatcataggcatgagccaccatgctcagcaattgctgcattttaaacctgtgtctgactgtcccccaaacccatattattaaaactacgctgtgcagcctgctctcctcgacttcacagcccttgctcttggtcactgtgctcatcatctttatagtaaagaggaggctttaccttaaccccatggctgaggtgaaactgtgcagggctacctcctgcagtgttggtccacaggtactaacgctaatagttgccaaaatattgttgactgtttactgccatctagtggcacttacaactacggcaggagatcatatagagggaatgaacttctattaatagttaacaagcttggcaatgaaataataaacaatgccgagaggatacagggaaataaatcatcatgacaaaaaccataaggcaagactgtaaatactgacacttagcaagatactcatggtagggctagaaacagttcagaaatgatagctttctggtggtacaaatgtagaagaagcatataaattaagctgtaaacatttcagatagggaaacattaattcctggctcacttcttataagattaaaacctcagcaatggagcatgaggagaagtgttttttttacagatcttaaaatacacttattagaaacatatgatgggctgggcacagtggctcatgcctgtaatcccagcactttgggagaccaaggcgggtggatcacctgaggtcaggagtcaagaccagcctggccaacatgatgaaaccccatctctactaaaaatacaaaaaattagccgggcgtggtgggtgcctgtaatcccagctactcgggaggttgaggcagaaaaatcactagaacgcgggaggcagaggttgtagtgaggcgagatcacgctattgccctccagcctgggcagcaagagcgaaactccatctcaaaaaac

SEQ ID NO: 8012 - DNA, 1034 bp, Homo sapiens
cagcagctactaaagaaggtgcataatttagaaaggcataatctgtggagacaccaaaaatgaacttaaggaacagaatacacgagtcacaagtgcacaagtcacttactggtattcacaacaacccaccttgcaaagatacttccaggaagtaatctgcatatttggccatgtagagtttagtcttttccaagcaaatcattggccagccgtcatgaagatctgtttcgtgtactgcttcagagagataatactcaatgaaatgggcggctgttggaaggcagaggttccactgaaaggtttctaataataatagttccatatgtagcaaattttgttttgttaatactagattcatattagtcatacaacccaggctgttgagctgctccagcttaggcacactgtcttctttttcttcaaatttaccttataagaaaaggggatgggaggggagagaaaatgtcaggcaagtgatcattattggtctagtcagtaaaatgggatttgctgtcttattgccaggatttagatccaaagacgtacttaccttacacagatacaattgtgccagaaccctgtgttttctttcccagtgccaccatccccaacctttccccaatcccctaaaaaaaaatgcttgaaatacataaacattttgatctgtgttctagtatagaatggaaatagtcatgtgccagtgaaaaaaataactcaatctcatcagctgaatattttcaggaaattttttttgcaggtgggtggtagctggtaaaataaattatttgattttagagtagaagatagttttttttttttttgagatggagtcttgctctgtcgcccaggctggagtgcagtggcgtgatctcggctcactgcaagctccacctcccgggttcacgccattctcctgcctcagcctcccgagtagctgggactacaggcgcccgccaccacgcctggctaattttttgtatttttagtagagacggggtttcaccatgttagccaggatggtcttgatctcttga

SEQ ID NO: 8013 - DNA, 1941 bp, Homo sapiens
tttttttattttttgtagagatggggttttgccatgttggccaggctggtcttgaactcctgagctcaagtgatccacccaccttggcctccagaagtgctggcattactggtgtgagccaccgtgctggccaattttttgttacctacatcccaagagcctatgatgtgctatcatacatcagatccctatcacacacaggggcgtaagatgagtaagacaaaatccctgctctcaagaaacatatgttcattctatgaaatacctaaccacggattttcagaactgtcgaggtcatcacagacaaagtctgagtaactgtcacaacccagagttgcctaagacctgagtgctaaaggtaatgtgatatcctgcataggaatctgggagagaaaaaggatattagggaaaaactaaggaaatttgaataaagcatggatttctgttagtaatagtacatcagtactggtgcattgtgacaaatgtaccatctcaatatattaataagaagagagactggctgtgggctatatggggactctgtgtactatcttagtaataattctgtacatctaagctgttctaaaattaaaaatcttaagaaaaaaaaaggacagcctgggtaacatggcaaacccccacctctacaaaaaattgtaaaaatgagccaggcatgtggtggtgtatgcctacgatcctagctactcaggaggctgaagtgggagaattttttgagcccaggaggtcgaggctgcagtgggccataatggcaacactgcgctccagcctggcagacagagggaagatatgtttgacatagtttagatatttgtccccacccaaatccatgttgaaatgtaatccccaatgttggaggtggggcctagtgggaggtgtttgtcatgggggcggatccctcatggcttggtgctgtccttgtgatagtgagttcacttcatgtgagatctggttaaagtgtgtggcaccttcgcctacccccacttgttcccaccaagtgagattcctgctcctgcttacccttctgccatgtttcttgaggcctcccagaagccaagcagatgccagctccatgctccctgtacagcctacagaagcatgagccagttaaacctctcttctttataaattacccagtcctgagtatttctttatagcaatgcgagaacggcctaacacaaggttctagtagggagaaactagcaagtaaatggatacaagacagtcactcttacatttttaattacaggtccctttgagtagacaaaactttaagaataggggaaatcatttacatataaattgcataccatgtcaaggcttcatggacttaagaactaataaattcagggtggtgatgcttacctgggaggcagagggtgttatgggaggaaacagagtggtagtcaggcaaggataggatagcaggtgtccttcccatatgatccctgagcctggtccttatgctgtcaactgactgtacttgctactttaaaatctaagggattgaaaaatgaatgttgagtgattcctaaactaacacgatattaaaccgagttccagactacaccagcctaattttatttagtggcagactctagctctgttgcccaggctggagtgcagtggtgtgatctcagcttattgcagtctccacctcctgagttcaagtgattcctgtgcctcagtctcccaagtagctgggactacaggtacgtgccaccacacccagctagtttttgtacttttagtagagacagggtttcaccatgttgcccaggctggcttcaaactcctggcctcaagtgatccactggcctcagccacccaaaatgctgggattacaggcatgagccaccgtgcgggcctctactagcctaattgctgcaagtgtgctagtcgtatttatcaaactagatgtaa

SEQ ID NO: 8014 - DNA, 1030 bp, Homo sapiens
atatattttctcaattgtaaaagtaatccataattactgtaagaaaagttagaaaacacaaatttgcaaaggcaaaaataaaaatcatccattttcactacccagcgataactatgatgaccccttgacagacatcctttcagattatcaaattaaattagttgtctttgaatcagttaaacatacccattaagctaccaggaagtgacctgtgaataagggaggctttcagcctctctgtaatcaaagactactttcacttagtaccttactagaaggcatatctgtaaaatgtgagtcttactaaatgtaccagttgctaatatggtagcacataccctaacaatccttttaatatatatttctcagtgctatttcttggagagcatggtttctaggattctagatttaacttttatttttccatgccttgatatgagacccacagaggccatagtccttaaaagacatgaacagtgtttccctcaggtatgtgaaggaagagaagtgtgaaattggaggatatggtcaccttatctcaggctttgacaggccccctccctggtgtctaaaacccatgaggtacctctgccaaaaggaaagacaaagaacctttgctgagctatttattgccttctgtgtgttgggagagggggtagtgttggtggctgagtgtgaaaactcctgggacagtcatctttttatttccactagtgcccaccacagtgcctgaaatgcagtagtttagtggtgtattgaatgaaggtattaacaattgtgttaataatcaaggtcaaagagaactcaggtcatgtgaggtcatatgttgataccagctcacttctgatgactcttaactgtgtaaaagacccagaccttagccatggctgttacccttccaggacatgtccctagcccggtaacccagtggagtggaggtcggtacaggaataatctgcagaccattacaagaacatggctgcattctgtaggcccatgccatccagtcctgcacttctgtactggggtg

SEQ ID NO: 8015 - DNA, 1050 bp, Homo sapiens
tgtttgtccttttctccttgcacagtggaaaaggtggtcctcttctggtccaagcctctggatctcttcccattcattcctactctttaggatttttctcgtttacttagctatggctccttcccactggcatttaggcattctcacatcttttctgtcttagaagaaaaaaataaaaccatcctacaccaatttgccgctctctcttctgtttcatacctctctgtccacagacaagtgttcatgaaaaagttgtctttactcactgtttatttccgtgaacttcctgtttattcttcaaccaactgcaacattttatctcaactgaaattaccagttttaaaggtcactaactaccacttcatttctaaatccactgggtatttctcagaccctatctgacttgacctctgttcagtccagtgtgacagtttatccactttcttcttgaaatcttcttttacttgggcttcactgacaccagtgtttcctagtattaaataatttacttctgtggtcattcttttgaatgtctttagagctttgccttcattcattctctcatccttttatttgtgtatttataaagcatttattacatgccaggcagcatactaagtattggagactgagaatctgaagcaatacctggactctttcttcagaaaaatatactcccaaacaaacactgaaaatttggcatacattttcaagcctctcacacagtgttaaatacatgcatatcactctagaatcttgcttcagggcctccgaattatcttagcagaaagttgttttttttttttttgagatggagtctcgctctgtcacccaggctggagtgcaatggcacagtcttggctcactgcaacctccgcctcctgggctcaaacgattctgctgtctcagcctcccaaggagctgggattacaggcatgtgtcatcacgcccaggtgatttttgtatttttagtagagacagggtttcaccatgttgcccaggttggtcttgaactcctgacctcaggtgatccacccgcctcagcctccc

SEQ ID NO: 8016 - DNA, 2275 bp, Homo sapiens
taggcagagttcacatattgggtcgtgttattgttttaaggtttaaatttagataacatgttagtacttgttgagattttaacaaaagcattaaaaaaatgagaaaatagattaatctttagaatattttaagtttgctactgcgcagtggtaacatgaagacacctcataataagtctttgattaccagaagcttctgaaagtaaaattatgggtatattaatgtgagttttcctctctgcagggtgtcctatagactttgtcatggagtgaaacagaaacaaatgtgagttaatcattaacatttcctagtggttaaaattactttttaagcgcttaactgtgtattttttagattgaagatttcaaatgaaattttgatttgactgaaatatttaatatgtgatgagttgatattaaaatacagaagattactatttttatagaaacaataatgtagaaactaatatttgaagcaggtttactccacatactgtgttataatttaaattttcacttaaactctcaaaatcagaagagctgacctagtaaggcttaaacctctaaaacttgtggttttaacaaggcttaatatacgtagttataatagtttttaaaaaaattgttatcaagttcctcaggtgattctgatatagtattttaaagaaagcaaagagaaatgatctgtttatacattttaaatattttgttccttatttatgtattgagactgtgcttataaatgcattcacacgcattgaagtacataatttgatcgtcatgccagcctggaatcttgctttttgtatggtttcttgcaggtaggtctattgggttcttggcatagtacctggacaaaacattgttaaggtggaaattttcattgtatttatcacttcaaacacttgaccagtttatttagttttcaagcgctttagacaactatatgtgggcttgacttagtgtataataaatgtaaagtttgatctcaagtagttgacatttatggagtatttaccatatgccaatctttgtgataattgctagacatattttatttaatgcttacagcagtactgtgagttaggtttgttaaatccctgttttaatagatggagaaactgaggcaaggacggattaagttacaaatccgtctttgtaacttagagccatcttcttacctacttgttttgtatgacacccttttcctccatataactgaacactggtagaagagtgaatgactgtagaaaacagacctggactctattctacctgtccagctttgtaaactagggcaagttgtgtgaccactctgaatttcattttcctcacctataataaatgaaaactttgaactattatgttttattgaatcttgaatcatcagaaatccttaaggctgggtgtggtgcttcacgcctgtaatcccaccactttgggaggcccagatgggaggattgcttgaggccaggagtttgagaccagcctggtcagtcagcatagcgatatcccatctctaccacaaaaaaaaaaaaaaaaattccttaaaatggtgcctttaccatcaaacctgggattttcttccaagcccctagtgctcattctgagttttgaagttttgatgcacggcagtgccaactccatctccattgccgtctagtctgattacattgtaagatgtgactgatttcagagatgtcaaaatgtaaaataatgtgcatcttggaactaatgagctctttttcaaccctgactctgtaacatctgtgactttttaacattttattgcaggattaagtatttttgaatgtaaatgattcaagataacacatagacttcgtttgatgacatctgcaaaataaatttttaaaaaatttgggcttcatgataatggaaaagtagaaactatgtttgtctttatcacctgtgaatcccccatattgagaacatgcctggcacatagtgagtgttcagtaatcatttactcaatgaagtaaacaagtcttcatttcttttttctttgtttgagacaatctcactctgttgctcatgctggagtgcagtgacgctatcttggctcactgcaacctctgcctccaaggctcaagtgatcctcccgcctcagcctcccaagtagctaggactacaggcacacaccaccgcaccagttaatttttgaatttttttgtagagacagggtcttaccatatttcccaggctggtcttgaacttctgggctcaagccatctgcctgcctcagcttccaaagttc

SEQ ID NO: 8017 - DNA, 1049 bp, Homo sapiens
gaggctgaggcagaagaatcgtttgaatccaggaggcggaggttgcagtgagccaagactgtgccattgcactccagcctgggcaacagagcaagactccatctcaaacaaaaaaaaaagtgtggtgtataataaaagcttttatttttagccaaacaggtgaaaatgacatctaattgttgctctgaattgtatctcagcttttcctacattgaagagacatttgtatttctgttctaaagaatacctgttcatatcctttgcccatttttctacttgatcattactctttccaacagatttaaactgtgtaaattaagtcctatgaaagtaagtcatttgtcatgtgtgttacaaacatttttgcacagtatttcattacccttttgattttgtatatgacgtttatgatccatgcagattttttgttttatttttattctattgaatttttcctttattattgaagactctgggcttcctctgaccctgtgtttttcattctgtgccaggactgtgggccctctcttggattagcggcgggcataccattgctggtggccacagccctgctggtggctttactatttactttgattcaccgaagaagaagcagcattgaggccatggaggtgattactagcttctttgggtccagatgtataggcagccaccagtatttcagtgaactggcttttggactaagggtgtcagaattcagggcccatgtctatttcctgaggacaagatgctggaagtttctgggccataatttccactgcagacatgacattaggcaccagacagagctgatttgtcataaaaccttcaggtcagttgaggaattcctgacaaagatggtatttggggtaacaaaaagtagcagtggagaaggatgtctgttgccatggcaaacacatgtctgtacagtgggtgtgctttctaaagttgagaaacaaaagcgcacaagcttcacaaagaaaggatggagataacgttaagaaagataggagatgaagaggggctgaggtgtccatgatagacaccat

SEQ ID NO: 8018 - DNA, 1047 bp, Homo sapiens
ctgttgactattttgtcattgatgtatgtgaaaccatgtggaaatccaaaaggaaagttgtccatttttctgcttgcagtttaaattgaaaaaagattctactgggcatgatgcaaaacatttctacacatacacatttgtgtgttatagttgacagggccattttacttgcataaaaagatctttgaaaagcctcacagtaataatactttttatatctctaaatcaaaatggctcagttctgagaatttttacattttaggtacaaaatagaagtgggtttcaaatagctcttgattagtgtcattatttgggcatatgtttttaattggcaaaaaaaaaacagacttcagaaattggtcatttttattccatcaagttaacggtgagtggcttatttaataaaaacatgtctgtaatttaacacaagtagcacgtacagctgttcatttgtgtctttttgactgtgtgaagcatcttagacggttttactgaaagatagggtcaccgagaggggaaatctgtggacttaaatcttttttcattacctatcgccggccactaggttaggttagttgccgccagcaagcgcccttcatggctcgactagggaatgtggagagagctgagagaatcgaaatcctcgatttttttttctttgctgagagggacctgagagacattcactcatccctgcaaagaagcagctgcccgaatgcacatagccagttggtagtgacatgaatccgtacacagggctcctggtccagcgctccgagttctaaccactctggccacgtgtgcatcggggagttgtaaagtgagttatggaaataaaacaaggcgagaagcccagtcccgatcttcaggagcagcattctcgggagccagaggccgaggtggcgccccgggcaggcgccttaggctgggtgggtgcggagctggccccggcctttggctccagcatcttcacctcgctcgcctgcctccgaagttgcgaaggtgccgggaagaggaggggcctcgcctcgggcgcccgagtgattg

SEQ ID NO: 8019 - DNA, 1021 bp, Homo sapiens
gaaatgattttcaaagtttgcacgattactttgcttgacagcgatttcaaaggaaaaaaatgtgggagatggttgcaggggaaaattgatataagtggggctggccaatgttatggttattcttagtgtctcagtctaagccactaggattgcaagacttaatattgaaggtcagtgaagaaaagggagagtctagaaagtgagacatggaaggtgattctaagttggggttggtcagagaggtctgctgcagttatagaccagaaagggcagtcctggataggtaagtgtcacagatagggtagctgcaatgctggcatgaggatgtgggatatgcgattatcagtgtgtcccaggcagagacatggagggtgtgaagcagccttgttaggatgactgcagggtgttttaatgccagaagactggaatgtgggagttgtaaggagccaagactggaaaggtgaaaggaaggcttgatgatggacggaggacctgttatgccaccctgaagaacttgaataaaggttttggagagccaggaagggttttaagcagctgctaaaaattgtagtatctttaattacattctccagaaaactgagtatcttctcagtggtgagcaatgtaaatgaaggaatgagctggcctggaacaaattatcatgtatagtcgcttggaaaggcaaaatgagaaagtggcccaggtggataaaactcagtagacttgaaggggcaagagaacccagttactctgggtgggagatggacatctaagaggagaaaaacacttgttcaggttcacagaggacccagagatatggcagaggaaaccctgaagtaattattaatgtaataatggagctaagttgagcagttttatgtcataaagcctgttactctacctccagttttttcatggtttttaaattaaagaaaaatacattataaaaatcatctaaacccagattagagtttagcttttatagttctatcttatggtgtcccttttcaattattctttt

SEQ ID NO: 8020 - DNA, 1925 bp, Homo sapiens
aatagtatatcttcaaatcaaagaaggcatgttttttgatttaacaaccttttgccattatcaaattattcttgctttataagagatgtattttaattctgtagttactgattatacaagaaataattgctacttgattagacttggcgtatgatggtcagactcagtgtattatggtatcaggtgatttgcaaagcaaatgatacagttttagtaagttcagagagaatactaacataaggatattttctttaaaaaagaataactttccagagcatagagtatttagtgtttttaaatgatggatactgctctgtatgtatttgtttcaaaacatcttattttatctttgcaggagcgattggttacatgggaacaagtgcctttgtccgaaaaatctatactaatgtgaaaattgactagagacccaagaaaacctggaactttggatcaatttctttttcataggggtggaacttgcacagcaaaaacaaacaaacgcaagaagagatttgggctttaacacactgggtactttgtgggtctctctttcgtcggtggcttaaagtaacatctatttccattgatcctaggttcttcctgactgctttctccaactgttcacagcaaatgcttggattttatgcagtaggcattactacagtacatggctaatcttcccaaaaactagctcattaaagatgaaatagaccagctctcttcagtgaagaggacaaatagtttatttaaagcatttgttccaataaaataaatagagggaaacttggatgctaaaattacatgaataggaatcttcctggcacttagtgtttctatgttattgaaaaatgatgttccagaaagattacttttttcctcttatttttactgccattgtcgacctattgtgggacatttttatatattgaatctgggttcttttttgactttttttttttcccaatccaacagcatccttttttttaaaagagagaattagaaaatattaaatcctgcatgtaatatatctgctgtcatcttagttggaccaacttcccatttatttatcttaaaactatacagttacatcttaattccatccaaagaagatacagtttgaagacagaagtgtactctctacaatgcaatttactgtacagttagaaagcaaagtgttaaatggagaagatacttgtttttattaaacattttgagatttagataaactacattttaactgaatgtctaaagtgattatcttttttccccccaagttagtcttaaatcttttgggtttgaatgaaggttttacataagaaattattaaaaacaaggggggtgggtaataaatgtatataacattaaataatgtaacgtaggtgtagattcccaaatgcatttggatgtacagatcgactacagagtacttttttcttatgatgattggtgtagaaatgtgtgatttgggtgggcttttacatcttgcctaccattgcatgaaacattggggtttcttcaaaatgtgtgtgtcatacttcttttgggaggggggttgttttcttctgtttattttctgagactcctacaggagccaaatttgtaatttagagacacttaattttgttaatcctgtctgggacacttaagtaacatctaaagcattattgctttagaatgttcaaataaaatttcctgaccaaattgttttgtggaaatagatgtgtttgcaatttgaagatatctttctgtccagaaggcaaaattaccgaatgccatttttaaaagtatgctataaactatgctactctcatacaggggacccgtattttaaaatctccagacttgcttacatctagattatccagcacaatcataaagtgaatgacaaaccctttgaatgaaattgtggcacaaaatctgttcag

SEQ ID NO: 8021 - DNA, 1022 bp, Homo sapiens
agaatgtcatcataatacaaaaattatatatatccatcaatttatgttgctaaaatgcttgtcagtaattaaaacaaaaatatttgttgattttttttaatgtaggaaaaaatgactacattaaggtgggatattatgagcatagcatttttgttttgaggaattaagtttaaaagtgcacctctattattcctaagatatttacttttctagagggcatattcagtattctctttttataaagtcatgcccttgtaagtttattcttgaggtactcataagattaggaaaaatgattctctaggttgaaactgttttgattttaagcatatttctgctcaaaggggaacaatgttttgtacgtctggaaaattggatttggttattggactagtattataccattaaaatttttgatgctaattaaaattttatacatcttttcgtgtcgtaaggattcaggtatattttcacaaaattgaatgatttttctcttatcctgtaaagaattgtattgtaactattctaaaatgcattatcaatattttaaaatgtaatattgttatttcctattataaaagaaatgtcattgcaaaaataagtggaaatagtgttgctttgtcactttggttttttgtattttaatatttaataaagggaaactttgaaatacatacaaaaatagggacaatactatatatagtgagtccccatgtactaacacccagtgtcagtaattatcaactcatggcctatcttgttttatttatattctcactttgtatcccccccttttattctgacatgaatcttagaccttatgtcatttcaagtgtaaatatttcagtatatgtctctccctgaaagataaatgtaatttcttaatatgatggaataattcagttaatgttcagatttaccacacttgcaatgacttctttttaaatatagtttgtttgctttgagatcaattaagattcatgaattgcttggctgaaatgtctcttaaggctcttttagtc

SEQ ID NO: 8022 - DNA, 1053 bp, Homo sapiens
taacatggccattaagggtctttataacgtaagaactggccctgttcacttctccaacttcatttcttagttctttccccttcatttaaagtattagccatagtgactaagaaaaagagggtgaaaggctctgttgtaatttagtgatgacttgataatggattagagtgaaagatctttttcttaattaaaaatcttaaagccttttcccttgctgtcctctgaagacagtgtgaatcttcttcaggcctgcttttcctaattttatacattattgctctaacttatttttctacttattattttattttctatttaataaaatacaaactacattgcttgaattgtgttgtatctacaaaacaatatggatacaaatacggattttttagctattttcatttgttcttttctacattatacttcttgaagcttctgttttattcagtttgtgtagaggtgaatgccctactgaagaatctgtttttcaaagattatccaagaaaatattttttgagagaattctagtggatttaattgatgaagacatggtaagagaagctgttggaagatacttgaaagaaagtcattaagtgagaaaaaaatgagaactaaaatgtgagactcacgaagagcagagtgagctttaagaataaagactggaaacctgtgtctttattgcatttacttaggtatttcatcttcacgtctttctgggcatataagatctattatgtctatggcttcatgatgctggtgctggttatcctgtgcattgtgactgtctgtgtgactattgtgtgcacatattttctactaaatgcagaagattaccggtggtaagtacctatttgtggatagaaatttggggaaccataatattttaaaataagatttcctttgaaatctatcaagtggagtaaagagctgtatagaaatgttgttacttaaaatagcatagggatttttttccagttataaaaatgatacatattttagagaaaaaatatcaaatttttaatgtattaatggagtactgtgttagaaatattt

SEQ ID NO: 8023 - DNA, 1035 bp, Homo sapiens
ctcaggtgatccacccatcttggcctcccaaagtgctgcgattacaggtacgagccaccacacccggcctgatgttgcatttatgaatagtttgttctttgtattgcccaatagtattcaattgcatggttataccataatttatccatttgcccagtaatttactagttttttgctattgtaaatcaagttactgtatttatgtgcaagtctttctatggacttatgttttcatttctcttggataaataactaggagtggaatggctgggtcatatggtagtttaagttttcaagaaactgctaaacttttccaaaatagttttgacattttacatttctatcagcattctgtgaaaattccaattgttccacatcactgccagcacttgatatagtaagtctttttaattttagctattctagtgagtatatagtgctgtctttcggttttaattagcacttcctaatgactaatcatgttgaagatctttttatttgcttttttgccatctgtatattttctttaatgaatgttcagatcttttgcctattttaatagattgtcttcttattgagtgataagagttcttatatattgtaaatacaagtcttttgtcttatatgtattttgtaagtatatactcctattttgtgggttgtcttttcataatctaaagagtattttttgaagggcaaaattactaattttaaagtctaatttactggtatattttttcttttatgctttgtgctttttctgttccatttaagaagtcttttgccaaaccagacatcactaagctttccttatatgttgtcttctagaaattttatagttttagctcttaaatttaggtctaggatccatttttggccaattttatatatagtatgagttaagggccagaggggttttgttttgttttatatatgactgttcagttgttccagcaccatttgttgaaaagattatcctttctctgttgagttgccttagcacctttgttgataaccagtttaccatgtatgtgt

SEQ ID NO: 8024 - DNA, 1138 bp, Homo sapiens
catggccaatgtggtgaaaccccgtctctactaaaaatacaaaaattagccaggtgtggtggtgggcacttgtaattccagctactcgggaggctgaggcaggagaatcgcttgaacccgggaggcagaggttgcagtgagctgagatcgtgccactgcactccagcctgggcaacaagagtgagactccatctcaaaaaaaaaaaaaaaaaaaaaaaaagaaaggtaatataaaaccaatgttagaaaagcttcatcatctaaggtgagctgttcacaaacgctaaagcaagcaaaaggattttataaagatatcaagatcaaagactcattgtgtgggatcagtgatgtaacaaagtaaaaaaaaaaaaagaatggctctatcccattcttcctctttatttttcatcaaataaaatataacccataaacaaaaaaaagtaagaggaaagattccctggtaagagggaagtgaagcctaagatacgcaaggcagttgattgtacaggagtacccagctgccttagcttgaaagtcttgttgctcataaaaatgatcttttagagataccgagagatcacattaagtaatgtttgaataactgtgtgagagcagaggtgctgtaaaactggatgggcaaatttacttttccaggagggaaaggaagaaagtgggttctaccttataagagtatcgaagtattagccatagtatgtacatgctatcctttagtagaaggtgacagatattcttgattctgacctattcaaaagatgattaataacttagagacatggtggtctgctgattcaattgaaaagggatgtgagactagggaagaaactagtaatataaaataatgaactagtaatatgaaataatgaaggcagcatctaaaaagatctcacctgactgaaatgatgtgccaaatctaagaagatgaattataataaggatcaataataatacatttgtgtagcactttgtagtttacaaagcattttcacacgcattatcttgtctggttttcagaagaacgcaaagagataggcagagctagtggtgtggttattcctattttacagaacagaaaaccaagactctcccgtagttagttttctttgttgctgtgctggtg

SEQ ID NO: 8025 - DNA, 1051 bp, Homo sapiens
agatatttggaatttaaaatgtgcagaacagccattgtaaaattctttgttatctcatttcacataatttctaccaaacctattgtgtgttctgtcttgcttttgtggaattctcgcgttttatttcctaaaattatgaataattagtagataatctcctttgtgcaccatgtaatttgccctgaggaacatgtaggagagtgcatttaagttattgatactatttgctttgaggtgcctggctctagatgtgctccatgtgatgcatccacacagaaaaaaagctttatagatgaatataaaggcatgtgtaatggtctgtgggtaaagtttctggacaatggaaagagaataggaaggaaagttatgtatttctgttgactgttagttttatcaaaggacccttcgcaaagatttctgctattctttgtcactgtcacagtctcttgctaagagcactttgtcttaaatatcctgttgctcctttactactattacctgaaattgatggaactaataacacgataatacaaggatactgctccttggtgtttttttctgcagtggcattcagaaatgccttgtattccctgcagtagtctgaggtcagaaaagtacaaaaattggtagatttgcattttagtttatgaatgaagtgttgttgaaataccttaaaattatatttccaaggatggagttgtgattttccacagcccatcttaagcagtgtcagcattaggggatcctgccttcttttagtagactgggcacacttataggttataggaaatcggagcgtaggattatatcttggtttaccattgcttttttattaatcttcctagacttaatgtgacctgtaccttcagtatagataattatttggattgactgagggagtgtcactatgggttcctgactattttaggtagatgttcagtctctaaattcgactcgcaggtgtgggaaattagtcctatcatataggactacatcctaaggaaataaggacacatgaggcaacttctactttgaatttgacctggaaatt

SEQ ID NO: 8026 - DNA, 1031 bp, Homo sapiens
tactggttttgatactcttctctttcatttctccacctagcccctgattgtatatgagctacagctatgatgtgaatagcaagaatagtgtctgaaagtggcattaagagagtcagtgcactgttctcccaatttgaccatttctttttgttactaaaccttttctttttccgttatttgagattctctgagcacaaccagaagtcaacttcctgaacctcagcattttaacattgttattaaggcagtgatcattctaagtttggaatatactttctcaatattttgtatttctttagctataaatttggagggaggaaacttacaactgtaatttttacatactatgttttagtttgattctgaatgatttgcttttctctctctatatatatatttgtatataggatagagacctaggagatgaatatggatggaaacaggtgcatggagatgtatttagaccatcaagtcacccactgatattttcctctctgattggttctggatgtcagatatttgctgtgtctctcatcgttattattgttgcaatgatagaagatttatatactgagtaagtgcctacacttaactgtattatgtctttattgttcttaaatagttttaatcactggaatcttttaagtcaatcataattaaatcgttacttatttcctttatcttacagtttatgataaatatcataaatgcagacagacaaattaaataatgaacagtaatctgtatttttctgttacatgccaaaacttagtagcattactgaacattgtggttagttataaaggttatatgttccattaaagatatgaacagaggttactttcaatccagagctgtttgacaaagtaaatagccttttttttcctaaagttgaagatccaattagagcttcatcagaagttcaagaatttcagttactaagttacttcatatttaccttcagatctggaaaacatcagagtagaagaaaacattgtaaataatagtaaaaagagtgatgaaatagtcac

SEQ ID NO: 8027 - DNA, 1044 bp, Homo sapiens
ttataggcttccctacatgggcacttgcccttatacaacttacggtgtgagaaagaacagaatgtatgcatcagaaggaggtaatgagagaacggattgagatcaggaatttctgcttgtggaaatccttccatgtagaaagaaacatcaagaatgggaagaaatggcctcccagttccccagcccccaccgacagatacttgctgaattttagttcataaagccggtagcattagtgttggttttgtacaggtagttttgattctttatagcaaaaatcacactttgttttggtggtttcctcctcaaggatggagataaaaagacaaggcataagggtatcccttcttctgaatttcttcctgaattgttgcttctttcttttgatctaatcttttggactagaattttaaagtttattaatcacctatttttgagatggcccgtaagtttttgttgtctcagatttacatattactgttaggttccattcttagactctaccggaacctatcactacttctgatcttactcaggggtcagagattttaacaattaagctatttggaatttagtctttttttttttttttgagacagagccttgctctgtcccctgggctggagtgcagtggcatgatcttggctcactgcaacctccgcctccttggttcaagcgattctcctgcctcagcctcccgagtagctgggattacaggcacacaccatcatgcccggctaatttttgtattttttttagtaggggtggggtttcaccatgttggtcaggctggtcttgagctcctgacctcaagtgatccacctgcccttagcctcccaaagtgctgagattacaggcgtgagccaccgcgccctgcctggattgtctttactgaaggatttagcatactactcttggagctaaaatttttcccctacctcaatccccacctcaaccccacctgctgtgtgttctcctcgagtataatgctcaggcaatcttcaatagggtatggacacagataatttcaagatttagataaca

SEQ ID NO: 8028 - DNA, 1042 bp, Homo sapiens
atggattgctctgtcagttggaataatatactcctgcacagtgagagcttgtcagagccttttagcaactgtcaagctatttctgttgtcttaggcttaaaaatagtaaaaatgagagagaaattcagtgtaggtagcctctgccagttattgcctcatagctggaatgagtccattgctagtagtcaattttgaaagtttttcaagccttgtgcatatgtacctgatgcaaataatccttatataactaaacttaatgaaaaaattttatagttgtaataaaagtaatgcagtctaaaaataaagatttacagatttttttttattattcattcaaatatttattgagcagctaaggagatacgaaggtgattcagaacatggtcagaggagaggcgaatgtgcaagtaatagaaagcaaagggcaaggttcactgaatcacagcaatcagaagaaactgctttagggaaccaagagtgagattgtttccagcctaaagaggcatccatggcagatcagaaaaggagattgagattaaaatagaagacttcagtctggattgttgatgatactcagtatggactatatttgtctctccttttcttttctccccatctttgggcttaatttaccagtagtgccctgaactgttcaatgcactttttgtatacttgcttgcatttttgctttaatgttttctacagaactaggtccttttggtgttttaggaattttttttcctgtttttgaaggatttttgtccttttgatcttagtgttgatagttttgagtcttttccattctgatttgacttttgtgcatttttggctggattatctcatgtagatttcttcactggtggtttttctttagtttcctcatcaaaatcgtcatcatcatcatcatcatcttcatcagcagcaagttttacttttttctgtggaaccttgctaccacctccagggacagatcactttccagatatccttaagaatttcgcctcctcctgttcatcttctgattctgcatcttcctccacag

SEQ ID NO: 8029 - DNA, 1059 bp, Homo sapiens
tttctgttcttgtgttagtttgctgagaatgatggtttccagcttcatccatgtccctgcaaagaatgttaactcatccttttctgtggctgcatagtattccatggtatatatgtgccacattttctttatccattctatcattgatggacatttgggttggttccaagtctttgctgttgtgaatagtgccacagtaaacatacatgtgtatgtatctttatagtagaatgatttataatttttggggtatatgcccagtaatgggattgctgggtcaaatggtatttctagttctagatccttgaggaattgccacactgtcttccacaatggttgaactaatttacactcccaccaacagtgtaaaagcattcctgtttctcccatcctctccagcatctgttgtttcctgattttttaatgatcgccattctaactggtataaggtagtagctcattgtagttttgattcgcatttctctagtgaccggtgatgatgagcttttttttgtatgttcgttggctgcataaatgtcttcttttgagaagcgtctgttcatattctttgcccactttttgatggggttgtttggttttttcttgtaaatttgtttaagttctttgtagattctggatattagccctttgtcagatggattgattgcaaaaattttctcccattctgtaggttgcctgttcactttgatggtagtttcttttgctatgcagaagctctttagtttaattagatcctgtttgtctattttggcttttattgccattgcttttggtgttttagacatgaagtctgcccatgcctatgtccttaatggtattgcctaggttttcttctaggatttttatggttttaggtcttacgtttaagtctttaatccatctcgagttaatttttgcttaaggtgtaaggaaggggtccagcttcagttttctgcatatggctagccagttttcccaacaccacctattaaatagggaatccttttgtcattgcttgtttttgtcaggtttgtcaaagatcacatggttgtagatgtg

SEQ ID NO: 8030 - DNA, 1065 bp, Homo sapiens
gtattatatcacggagtgatttcagaaatgttttgtttgatttactttggcaaatggaaaccttttgtctttgtctctgttgggagtataggaactcttaaaacttactgaaaacttataaagagtataagctgtttactataagtgaatttgtgagttatctaatgtagattgttaaatgccgtaattcgttgtcctattttcagctctactcaatgatagactgaaagtttatttaggtacaaagctatttttgagagagagtagttatctcaagagactattcaaaattacatttctaatttatttgtattagaattctgatgtgtgttttaataatttaaaggttttgaaattatgatttctggaacattattttgaagtaaacacatatatttttccccctttgtatgaaaatgaaggatagcatttgggtgcttgttctgaaccctcagtcctttgctcatctatgtaaattgtgatttcttattcagatttcacatgaccacgtcagcatattatcttctaaagcgtttctcctgataataattaattcattacctctgtcaaggaggaaaactttggtacccccccaacacataaacagtatttaaataagaggggcccaacattggtgacttcttgagaataaaggtcattccttttgagattagagtgcaaatagcttcttagaaggttttttttctttcaggcagattaaaggctcacatagaaaagttattcagtgttcaggactgtctttagttgctttgtacacctggcactgttttcatatttccttgatttagttttttgctctttaatgaatgaagctgactagggattagcaaaaatactaaccttttaaacttgatgctgattgatttggacaaattacttaacatctctgttctttagttttgtttttgtttttagtctgtaaaatggggaagtaataggacctattttatagaattttgagatgattatttaagtgttcatataaagaccttagaactatacctagctcatagtatgtatttattgttagctactgatgttatt

SEQ ID NO: 8031 - DNA, 1050 bp, Homo sapiens
actgcaacctcagccttgcgggctcaagcgattctcgtgccttagccaagtagctgggattacaggtgtgcgccaccacacttagctaatttttgtatttttagtagaaaggggatttcgccatgttggcccggctggtcttgaactcaaaacgactggcctcaagtgatctgcctgccttggccccacaaagtgctgggattacaggcatgagccaccacgcctggccgaatatgtattgtaaaaagcaaaacaaaaacaaaaacagttatgggaagaatagcatctaaaaataagcataaaattcaaatgtcatttatattattttttcactgttagccaaaatcttttgctttttctaaatttcttgaaaatatttctcaaaaactaggcattcctattcctcttagccagatagtagtaccgaaaaggctaatgtcaagtgagttttatttatttttttctgtcaaagaagcagaagtagctagtaaagagagaataatactaaaggaagaggagacattggtgtggggaagttgctgagtaggtgtttagtaaatacatgtagaattgaattatcaaacaataacttttagaagctgaagctggccttttaggttaattgcctgtgaagattgtttccagataatacctagtatgtcttttgtagtaaaatgggctatgcactgtttttttttgtttgttttgttttgtttttttgaggcatagttttgctcttgtcacccaggctggagtacagtggcacaatgtccactcactgcaatctctgcctcctgggttcaagcaattctcctgcctcagcctccctagtagctgtgattacaggtgcttgccaccatgcctggctaatttgtgtatttttagtagagacgaggtttcaccatgttggccaggctggtcttgaactcctgacctcaggtgatctgcctgcctcggcctcccaaagtgctgggattacaggtgtgagccaccatgccctgctggctatgcactgttctaagtattttacacttattaactcatctatta

SEQ ID NO: 8032 - DNA, 1122 bp, Homo sapiens
tcttctttcttatagctgaaaaatattccattgtgtaacttttcttaaatttaaaaagaaacttttttctgaaataatttgtgtttgtcataatgttaaagaagaaaaaaacccctgtaagttctaatttttccccttttataaataatattgcaataaatgttcatacagcttcatgcctaaatctttgtgaatctctgttaatttcctctggatcatactgctatagagtccccagagacagggttgcaagcctgctcttagcatctccccaccctcccccatgcaacctgaatctaccgccttccttactgctatttattttattttattccctttatgcttggttcagtctgtcgtttacatttgcagtttctcttgcaaggatagtcgtatggagaatgtgtaccctcctcccctcagggaaataattcataagaagatgaatggtttttatgacagttaccctgtgtaatgcatcaggtgttttacatgtatttattcctcccacaaccccaagtgcacagatggtttcagcgccattttgcagatgagaaaactaaggttcagagaggttaaatgattggggtaagcactggaactcactttggaacacagggcctttgggcctagaaagcttacacttggccttgcttctcccctaagtctttcctctccaccctcctcttccacactgagataaagaatgaagaatgctcaaggaagagaaaggatcagagaaaatgacgcttccctgagtgctccaggccataaatttccaagtcaggctgagcattggcaatttccctgcactatgtttaaaatgtggatacctgggccccaccccagacctactgaataggaatctctagaggtttgtcctgggaatatgaatttgaaaaagccttcaagttggttctgctatgcagcccagctttgagctttgctccatgcctggtgtcttgtctttcggtttttgggtcacaggagcccgcggtagctcaggccctgtggtctgttataggctattatgggctgttatgggcacagtagtcccaaggggctcagagcctggccttggcgcgtcacaggcagcagccctgagagaagagaagggagtca

SEQ ID NO: 8033 - DNA, 1103 bp, Homo sapiens
ctagtctcaggtattcctttatagaaacacaaaagcagactgatacaaattcgaccaaacaccgaacaccgatccgaacacctcccatcaggccccgcctccaacactggggattacatttcaacatgaggtttggtggggacgaacatccaaaccatatcagaattctaacattcttttttcatttctaatgcagttgtgactatgctttaaaacagaatccttatatttaactggaatgtttccacgtaaggaaaattctcatctgttgtgtggttaaacttaggcaattaaatggtccccttcatctacatctttaattctgagcctgcagttaggcaggatgtgctgacttgtgggttctgtggtgtgcatttaatgagcattaattattaatattattgtgtccattgttgtcgctgtaatccctgcccctgtctatgccaggcagtgctcttcatcagataacatctacatggggtattgggataggttccaaacaggctgagtaaaaggtacagctcgtgacccctggggactctgcacatcaccagagatgtcagccacaaagacaaactcattaaagcccacaaatttgcctgcagcccaactcctcccaattaatttacttatagccagggagacaaagaggaagccccatggggaaaccttgccaagtatgtgaaattagagggtacagggagacactggcaaggtggactattttaagcagctggcagaatgtctgagagaaacatgctaaggagatttactggccggggactcacacacaggaaaaccttggggatggggaatgggaatgagagactcatgtgagccactgttctttgcatgtattatcttaatacttacagtgatgctatgaaggtaggtgctttatcatcctgattttacctaaaacaaagactgagagaggttatgtgacacacccaatgttgcagaacatccggtaaaacaggaatttgatctcaggcatctcttcgccatcaccaagaaattacttagctgcccctttaattgtgctttttctgtaagaacagagctcattattgaaggctgtaaagcaacactgaactttcatg

SEQ ID NO: 8034 - DNA, 1056 bp, Homo sapiens
ctctggggtcccacccagctgcgtgagtctgctagaatcaggttctcagcatcatttgtgggcccctttcagctacaaatgcctgtgataatggagcgcaagtcagcattttctctgtctgtcccggcgtccttaccccagacttcaacttctggaagtgggaagggagcaggggcaagaggggccaaaggattattcagggcaggtgagcccagcagataacacccagggctgggctgacctgggcccttgggcttcccctctcttttctccccgcagacgcctggagctgaacggcatcaagtccatccctcctggagccttctcaccctacagaaagctacggaggatgtgagtgcctcccactgcttcctggggagctggtacagggctgacggagatcctgggtggtcccacagccctggggcaggccctaactcagccccccacagctgagtggccttggccagccacctgaccttcctgcccttcaggctgcttggctgtgatgcggggacctccttgcagggctatcgtgaggcctgaagggagtgctgagcctgagcctggcctgtgatgggagctgcttgtcatcctcccgtttcagcttgggtaccaataggagcaattaaggatgggagggggctaggagactgccaggatgcatgggaaagctttgtccataacttcccaagctggagtgccccctcctgcccagccctcagactgcacagggaaatagcggccatgggcttttcaaatggaggagagatctggcctctcactattctcatttcaaagcactccaccctgctcctgtgacatctaggaggtggaggggactgggcagggcttagtggctgttgagggattcagatgccccctctccttctgctcaccttgcagagacctgagcaacaatcagatcgctgagattgcacccgacgccttccagggcctccgctccctgaactcgctgtgagtagcagtgccaaggcttcctcagtggcccagggcatcccctgaggaggctggcagggcccagggtcctggtgg

SEQ ID NO: 8035 - DNA, 1052 bp, Homo sapiens
cctcttgagatggcagaagacctgcaaggaatctgaccgaggttcagggctgcccgctgggaggtgggggctcaccagccctcaggcctgatagcgccctaggaaacacacagcacctttagtggggtgtctgctagatagcccagcagcacagtcatagcaaagaaacaatccaaatccaatagcaagggtatacggctgtccagaaatgatggcaaatcagagtgacccaggggacaagacggtgagccaggggatacaggacctgggggtggtgctggagtgagtttttagcaggcctatgaaacatccagatccttccctccccaaacccttcagcacagcttctcatgaatgtgattccaagcaaatagaaggagatggatgatatgtcattatatgtaatctacttgcaaaatagtcctcgtttcacttttattttattaaaaaaatttaaattgtggtgaaatacacataacataaaatttaccatcataatgatttttcagtgtactgttcagtaatgttaagttcgcatcgttgtggacccgatctccagaacattttgacttcataaaactgaaactctattgccattaaatgacaactcccattgccccacctgccagtccctggcagccaccattctactttctgtctctataaatttgacagctccaggtacctcatagaagtggaatcatccagtgtttgtcttaaaaagaaattctttaaaaaatattagagatggggtctccctatgttgcccaggctggtttcacactcctgggctcaagccatcttcccaccttggcctcccaaaggctgggattataggtgtgagccaccgcgcctggcccagtgtgtatctttttatgactggcttatttcacttagcgtaatgtcctcaaggctcatccctgttgtagcatgtgtcaggatttcctttttttttaagctgaataatattccattgtctgtacacattttgttcatccattcaactgtggatggacgctggggtggctcccactctctggctcttgtgataa

SEQ ID NO: 8036 - DNA, 1080 bp, Homo sapiens
ccttccttatccctccccagggcacagtgtgtcagctcctgggcatttttctatggagcaggtaaaatagaatgatctcctcctatgcccaagagaagtggttttaacaggggacccactccccgacctggtctctgtcattgtccttttcggaaacgggaccatccgtggctgtttacatccccttctgcagcccctcctccacttgactgagcagccccgctggggagagacccaagtacagcatccagtcagagtgccctgagggctggggagcgcctgagctgtgggtactcactgcagccccctggggttacctctccaggcctcaggcggcccagcgggaagctgcttccaccccggcttcctcactattgctcggcctccagttcccaggacgctgagcttgccccacttccccttgtgattccaggtttttgtggatttctgcttgttgctttctacctcccaaaggaatactgttctgttgccctggctcttcaagtctgtgttctcttgaaggggcctccattctagggaggagggtagaactgcatgtcccttccctcctctttcagtgcgacgctgatggagttgcgcagtgagtggacaccgagcctaagtattttagaaccatgttaaatggccgaactgttatggacagatgaagacgcaggcacgtggtcaggcgatggggaagggagcatgcaccactggctccccagcctgcttggctgtgcctgctgggtcccgttcgtgaagcccgtgccttcgactctgcaggcacggggctttccccaggctgggcccgtaggcctctggcttttcctacgtcagatatttactttttcatttgtaacacactcaacaaatatttctgtttctgcctcattctggtctctgggggtatcatggtgagaaaaaaggctgtggtctctgcttttcagagctggtgggtcctgttggggatgtgagtcaatgtgagctgcaggagaggagacccctcatttggtgacttgcccaggttgcacagtgagtgggttagtagctgggagggaggttcatccaagggcctgcctg

SEQ ID NO: 8037 - DNA, 1027 bp, Homo sapiens
atgatgtttgcaagctgtgccttctgagagagtgcttaggccctgtctctcttttttaatattatggggaaaccactaactatccaaccagcttatacagcacactaaggtgggcttcagtgctcactcaatgtgtttaggcagattccacttttgaaaaaaaatatgaaatgtgtgctcaactgccagtaattttttaaaaagcactgtcccagtggattgatgttgtttttaatggatattttgggtttttctctgttttgatagtattgggtatttggttgtttttgtttgtttatttctttgttttaaaagccatgtttttggttgggctctaagctagatatctttccctctttttcactttgagctttgggaaaactctttatcttatgaggctgtattcctcaatacctaatttgtgtccaaagaatttatagcttttctggacattttttattatttcttgggtgtgacatcagagtatttgacctgcagtattgaaaaaggagaattcagaatgatacagtattttaacaaatcttaattattaaactcttttccttccttccatttctccctcccttgtccatctctctctctctttccctttcctcagtgatgtgaaaataattgtgttttgctgaacttgttatcttcattcaatttcctcttgactaaaacatctctggtgccaacgtaatacttctgaaccaaatcactgtgactcaaggaaagtcactgacagcataagagaagtttgctaaaatatttgtatgtgggggaagctctggagtgtgcctaggagggggctggctgcctttatgtcccaggatgactctttatgggtgggattacattgcaccctctgagggtgcaggctagaccgtctcctgagaggaagttaggatcagaaagaagaagcaagcagcaacctctgcagggctgacaggatttaaaggagagaatgttcttatttggaagcagctgtggcttgtcaccaatgttcaaggagtgttactgttcc

SEQ ID NO: 8038 - DNA, 1065 bp, Homo sapiens
ctggtttgacatgattgttttatcactgggatatgagcataattactatttgagacatcagcaataggcagagatcaaaagcctaatccttatggataaattcttttctggaaaattagatttcagtatattcttcttacttatccttgaatgaattatctaaactctcttttctttcctcgttgcttctgtcttccaggctgggctgtctaattgagacaagatgggggtttgagttttttgtgtctaaatatttctgtatgtccatgaatcaaaaccaagcataagttatttttgaaggctacattgttttgtatcagttacaacttttgttgctgtcatttttgaaagacatgcggaaataatacctttctgtattgacagctctaccttggaaagaaagaaagacgttttttaaaaaccagtctaatatttcaccaataagctttagagcagggattgttgaccttgtcatctgtggacttcctaaatggtctaataaagttcccggtattgttgatgcaatcttttgtgtaggtacatatgtgtatttttctgggggagagaatatatggttctaattagattctcaaaaatgttagtagttcagagaagtcgagataatgaatgaccctcaattggatcaggcaatggcattttcactttactctctcctggtcacttcctctatctggaaatgccttcctggtgttatgatgctacattattctcgttcttcttcctctttaattcttttccttatctgcagtggcttactgttgtttgcctattccactacatctttatttttttcaatgctctatcttaagttctgctcttaagttctgttcgtttctgcacctgcttctcctgcctctttgcagcttggtctccttccactgctcagctctgctctctgtatgataactacttccagcctggcaatgccaggtctgaactctcttcagacattggcagtctccaagcccacagatccaggtgcctgccatgtatttcttttatacaacaatgaatatacaacctcagattttttgatagtgatgt

SEQ ID NO: 8039 - DNA, 1065 bp, Homo sapiens; identical to SEQ ID NO: 8038

SEQ ID NO: 8040 - DNA, 1065 bp, Homo sapiens; identical to SEQ ID NO: 8038

SEQ ID NO: 8041 - DNA, 1025 bp, Homo sapiens
agcctccggagtagctgggactacaggcacccgccaccacacccggctaatttttttgtatttttagtagagacggggtttcactgtgttacccaggatggtcttgatcccctgaccttgtgatctgcccacctcggcctcccaaagtgctgggattacaggcatgagccaccacgcccagccatagtcatcatttttaatagctttgtataatttgcttttctaatccctttattggtaggaaattagagttgtttccgactttggcccttaaattgggttatgtgtaggactgctttggaaactaatgttactagggaaatggtgttgtaaagttctagcttctgcgggttgtaagttacctttcaatggagggatgggtgggcagagggagctttgaccttctctggacatacattagaggaaaaatggaagggaggcctgtttccagggggataattgtgccaaagtggaatgtccaggtcaggacatgagccgtgtggaagctggaaccacgtgaggtctgcctagttcatgtgctggccaccacctggaggcccccttctcatccctgctggcgctgggggtgagccatcatttggcaacaggagggggcctcctattctcagccagatgtgacccttccgttccttggccctgcaggaagaagatgaagctgcagggacagttcaaaggcctggtgaaggctgcccggcgaggttcccaggtgggacacaaaaaccgcagaaaggatcgtcgaccctgaggcccagggcccctgggctgccctgtggtccagtctgaggccctttcagcccccaggctgccttgccaccagctccaggtgctcaagattctggcagagcctggactcaggatgacttggaactagggcttggctctcagaagtcctggattttggaaactccaaatggaatcacccttcagagacatccctggtgcctggagatgggaatgtggcctcagtgcctctgagtaggtgccatgaggcacctttgctttct

SEQ ID NO: 8042 - DNA, 1050 bp, Homo sapiens
gaagatgatttagaggcagaaagagccagaggctgaaaccctcccaacttcccaatcccaatgtctcacattgcccgggagtccctccggtgtggcatctcggagctctctttagtctttcctggcccctctccacatatccagccattagctaagaaacacttaggtcttcgccaggcgtggtggctcacgcctgtaatcctagcactttgggaggccaaggcgcgcagatcaggaggtcaggagatcaagaccattctggctaacacggttaaaacccatctctactgaaaacacaaaaaattagctgggcgtggtcgcgggcgcctgtagtcccagctactcgggaggctgaggcaggagaatggcgtggacccaggaggcagagcttgcagtgagccaagattgtgccactgctctccagcctgggtgacagagcgaaactctgtctcaaaaaaaaaaaaaaaaaaacacctaggtcttcaagaacacacctgtcatccctttgtttggttcccagtgctgcgagctctgggcccttgtctcactgcacctcctaactggagcctcactgctccacatgcacccaactcaccagccacacgactgcagccgctcggtcagcctctccttagctccgtttccttgcttcagagtggatatcatacaatcctaatacccacttttccgggttggaatgaagatgaatcggtgtaatggggacagcgtatgtacttggtgtacatgtgcctgttatatttccgtgtctagtgtcttctctgctcctctctcgcccctgtatactttcccatctcctgtcccccttggtgcccaggcattcctgaggctgtcaggacccctcccctctctctctgcctttccaaacccccctgctcttcaggattcagctcaaagctccttttgtagcccttcctgggcacctcagcctttaggcctgattcccccagaactcctgccaagcccagaggaaacccagtcttcagcccttggtcatgtgctttctttggagatagagtctcgctctgtcac

SEQ ID NO: 8043 - DNA, 1031 bp, Homo sapiens
agggagcctgggcaacaccaggaaaggagccactgttgaggcttgttgggtggaggtagcattgaggggtcctgactggtagccctttgcccacagccccgtttgaagtgcctcctacacatcgtgaggaagctctcagctgaacacaaggagttcatcactgccctcatcccagaggtgagtgtgcgggtgtgttttagaggggggtccctggaatgtggctcttaagggcctcaggatccagggagggcagtgatgggagtgggaggactcgattcgcttcccgggcagatggctcagggagcagatgctgatggagttgtcttggccaggtgatcctgtgcaccaaggaggtgtcggtgggcgcacggaagaacgcttttgcactgctcgtggagatgggccatgctttcctaaggtttggctcgaaccaggaaggtgaggcccagggggctgggggtggacactctgctcatagactgggtggggggaagcacccctcaaaaaaggtggggagagctctgtgccctggccctgggcaggctgctcctctctggccctcagcccccctacctggtgggtccttcctgcttgacccacgttggtctctgtccccagaggccctgcagtgctacctcgtcctgatctaccctggcctggtgggcgcggtgaccatggtcagctgcagcatcctggccctgacccacctccttttcgagtttaaaggtaaatgcttatttcctagaaggcctgagaagccctcagattaggaagatgcccaaaaggtcaggataaagtggctcctggaactgggaaaaggtgcctggaggaagtaagaaaagccacacccagcccagtttgcctccctgtctcccttcctgcgggtcgctgcctcccgcccttgcggctatgccaaggcaccttcctcaggtctgtccccacgtgtgactgtgcagtccagtggccctgcatcccattgtcagagtggttaggaggtggttagggctgatgcctggattttagtcctagtc

SEQ ID NO: 8044 - DNA, 1095 bp, Homo sapiens
aattcgatggtcccatctgggggtgatgggagacagtgacagatcatcaggcattagattctcataaggagtgggcagcctagctccctcatatgtgcagttcacaatagggttcatacttctatgagaatctaatgcccacttcgatctgacaggaggcggagctcaggcagtaatgtatgcgattgggaagcagctgtaaatacagatgaagcttgcctgccactcacttccttctatgcagcccggttcctcacaggccaccagaagttgggggcccttgctatagtgcttctgttcaagccctgaggcaacgaaattccttatcctttcttgccaaatccgatctgcctttatctaatcagaggtattgatactgcctctccatgtggtctgaggatgcttctccaccctgctcctctgggtagcagctgtgtcccatttacaacttgttctgtctgttcttgtagctctttatttactaggaatctacagaataattctttctcacaggctgggcaaggtgactcatgcctgtaatcccagcactttgggaagctgaggcgggtggatcacctgaggtcaggagttcaagaccagcctggccaacatggtgaaaccccatctctactaaaaatacaaaaaactagctgggcatggcggacgtgcctgtaattccagctgcttgagaggctgaggcacgagaattgcttgaacccaggaggcggaggttgcagtgagcaaaattgcgccactgtactccagcctgggtgacagagggagactctgtctcaaaaaaaaaaaaaaaaaaaattctttctcacaggtaattaatctttctgttaattctttttttatagcaaggaagatgtccgagcaactgaaaaagacaaggttgttggttggttctttttttttaatggctttacgtatctcaatcccttaaaagtattatctcaggccaggcatggtcacacacacccgtaatcccagtactttgggaggctgaggcgggaggatcacttgagtccaggacttcaagaccagccctggcaacatagcgagaccctgtctctacaaaaattttaaaaattc

SEQ ID NO: 8045 - DNA, 1044 bp, Homo sapiens
actttggaggaaagagtaaattgtcggcagggcgcagtggctcacacctgtaatcccagcactttgggaagccaaggcaggtggatcacctgaggtcaggagttcgagaccagcctggccaacatggtgaaaccccatctctactaaaaatacaaaaaattacccgagcatggtgacaggcttctgtaatcccagctactcgggaggctgaggcaggagaatcacttgaacccaggaggtggaggttgcagtgaaccaagatggcacccttgcactccatcctaggcaacaagagtgaaactccatttcaaaaaaaaacaaaaaaagtaaaattgtcaatgattataggcaatatagttgtataccaagaaattctgagagaatcaccaaaaaacttattagaagtttagagatttactacaaaaaaaagtagctgggcatggtggcgggtgcctgtagtcccagctactcgggaggctgaggcaggagaatggcgtgaacccgggaagtggaccttgcagtgagccgagatcgtgccactgcactccagtctaggcgacagagcaagactccgtctccaacaacaaaaaaagaagtttagagatgtatgtcttctagcagcattctgtagcctcctggtcctcctatttcctaaaatttctaaggccttctgctctgggctataaatgaatccatactccaactctcacctttataccaagacattcctatattactctcaagccacaaatgccttgacccaagggttagtcaggacatttcagttttttgttgttccctctgtagcttccagtggtgtctgtagtgagagaaacagagtcccagttactgccagatgtgggagctattgtaacctgtaaggtaagttggtcctgacctccatgcttagaatgcccattcaatactgaaatcatgaccataccagaactgcagtgtccagtatgatagccacaagctacataaatttatttctggcagggcacagtggctcacactggtaattctagcactttaagaggccga

SEQ ID NO: 8046 - DNA, 1577 bp, Homo sapiens
agatgaccctctcttttcaaatggcagcacctctgtattatgagaataccaggctcttatgcaggtgtccaatcattttgtccacaggcaaaaatgatattttccctttctaacagcttctcagggagctctgcacttaaagtgatttgcatttcattgctaaagggaaaatgtgtagcctttatgtcagcatttcctctctcctttttagggcagcagctggatgaattcctacagctagctgtggacaaagtggaggctggcctgggctctgggccctgtcgtagtcaggccttcactcttcttctctgggtaaggagttggagtggagtctggttagccagagaggcaattatgtctggttaaataaaatgtccctgtttgaccctaaaccataaacatctatgtctcagggttctcgggtttgagtgtcattccccaattgctctctctgtctccaattacaggtaacaaaggccctagtgctcagataccatcctctcagctcctgccttacagcccgggtacgtcctttctggagacagaagaacccaggacctaaacaaactttctggttgctcctattcctcccaaggacttccatcctcccctgtgtgttttttgttttcttttcttttttctttttggagacagggtcttactctgtcacccaggctggagtacagtagtgcaatcacagctcactccagcctcaacctccgtaggctcaagtgatcctcccacttcagcctcgcaagtagctgggactacaggggcaccccaccacacccaactaatgtttgtattttttgtaagaactgggtttggccatgttgcccagactcctagactcaagcagtccacctgccttggcctcccaaagtgctaggattacaggcatgagccaccacacccggccccatccttatctttggcacttaagattcttcttccctgatgtacctcaaaggctcttttttctccagctcatgggcctcctgagtgacccagaattaggtccagcagcagctgatggcttctctctgctcatgtctgactgcactgatgtgctgactcgtgctggccatgccgaagtgcggatcatgttccgccagcggttcttcacagataatgtgcctgctttggtccagggcttccatgctgctccccaaggtgaggagtctgaaagaaggtccccacatatacacatctctcctttgcttggccacattccctaagataatttagggcccgcttgcttctttagagctatattgtggtctgtgcctagaagactaaacttctagattcttgtcccacttcttcctttcatgggcgtatcttgcttattctgagcgtgaagggctctttcacccgtttgtaggctgatgtctcagcctcaccacagattggaattgatttctcaagctatatatctaagtccaatttctcccctaagcctttccattttttacagatgtgaagccaaactacttgaagggtctttctcatgtacttaacaggctgcccaagcctgtactcttgccagagctgcccacggtaagtcccacaggcag

SEQ ID NO: 8047 - DNA, 1031 bp, Homo sapiens
aatagatacacagaaaaaataatttatgtcacacattaaaaaaaacacatcatacacctgtttttataaacttttattggaacatagctacactcatttatttccctgttgtctatgctacttttttgttaaaacagcagagttgagtagttgggatagagaccataccctgtaagcctatatttactgtctgaccctttaggaaaaaatttgtgaactctagttctgtagaaaggcagttttgggctgagaatgggttttactgtggacctgtatgagaatggatattaagaaatgttcccctattttcccgactgatcaggtgtctaccttcaaatgggaaggcacaggacatgtctcttggtgaaagagaaaatttgtagtggaacccaaacagaaacaactgttatagacttagggaaggaacaaagctcttgggcccttctcgtgcctatgtcaactaatggctgaatctggtttgtgcagtggtacacctgatactgttctatgagaaccggctgaaggaccatcatcttgtgatcccatctgtcctgcagggtttgaaggcacttgtgagttttccttcatttcattacataactttgttcaagggagcccttgtctagttctctccttgcgctttgggtgtgatggttcacatgctgaggagcaggtgcccaagtgtgggactaaattagtgttaccagctctacttccgttttccctctagagagtaaaagtgtactttgggggactggaaaccagagccatctggaaagagctgcagagaactcatcagcttgagaaagagtctcactattagtgcttcttcctcaaccaggatgctgtgattcttacagtagctaattaggcctgtcgtagggttgtgtcttggaggccatgctgcaattccttcggtattcacgtaccttctcctctcccccagagcctgtgtgtggccctgcccccagggctggctgtttctgtgcttaaagccatcttccaggaagtgcatgtacaggtgagggata

SEQ ID NO: 8048 - DNA, 1032 bp, Homo sapiens
gtgacagagcaagactctgtctcaaaaatgaataaatgaatgaatgtttgtctttctgctccaacagactatggacttccccaaaactccctgcccatatttctatcttaagccctaacatggtaccctatttataatattcagtaaatgttgaatgaaaacgaacatatggcttttttttttttttttttgggagatgaagtcttgctctgttgcccaggctggtgtgcagtggcgcgatcttggctcactgcaactttagcctcctgggttcaaatgactcttctgcctcagcctccgaaacagctaggattacaggcccatgccatcatggacagctaatttttctatttttttttttttttagtagaaacagggtttcatcatgttggccaggctggtctcaaactcctaacctcaagtaatccacctgcctcggcctcccaaagtgcaaggattacaggtgtgagccaccatgcctggccaccatcttccttacttttttttacggtcttgtaatagctttattatctcatttttctctaattttttctttcttttcttttcttttttttttgagacagagtctcactcagtcgcccaggtgggagtgcagtggctccgtctccactcactgcaagctctgcctcctgggatcacaccattctcctacctcagcctcccaagtagctgggactacaggcgcccgccaccacgcccagctaatatttttgtatttttttttagtagagacagggtttcactgtgttaaccaggatggtctcaatctcctgacctcgtgatccgcccgcctcggcctcccaaagtgctgggattacaggcgtgaaccaccgcgcccggcctcatttttctctaattttttctacttttatacttttttttttttttttttttagattgagtttcactctgtagcccaggctggagtgcaatggcatgatctcagctcattgcaaactctgcctcccaggttcaggtgattctcctgcctcagccttcggagtagctagg

SEQ ID NO: 8049 - DNA, 1034 bp, Homo sapiens
cattgttcccaaggccagtgtccgagtcagctgcatgtgattgtcggggctgggattggggcaggcaggcgagctgtaccttcgtccacagggcatgcacatccagctctcagaaattcttcctgtcagccaggtggaagcccgggacaagtggactcttggtggctggactggaaggggaccggcggggaccagcctggaccagctgaccagagggctgcacatctctgctctgcagccgggcaagcagaggacatgcagccatagtcctcactccctttctttggttgtttttcaaaccttcaagatagttactttctgaggttgactgaccaatcgcaaggtgccagaattgtgaaatgtccagtagcacagggcatgaacacagctgcccctccagacacagatggcaccctttttactccctcctgaggccgtactttgctttggtgtagaaatggctcaaacacctggcaagtgggggtggggagtgaggcagcaggggaaaagacacatggaagcaagaagatacgcactgagctgcgcaggacctgggacagtttgaaggcctctctcctttgggcctcacctttctcagggaagccatagagaaatcggcctaggacaagtcagagagaaaagggaaactgccacttatgaggcagaatccacgtcctgttacttccaccaagcagcagcggtagcacagaaaaaagtccaagaacctaatagcctgtcctcttggaagccaagactcatcccagagcccttgcagagacccactcccgaagacaaactgaactcttacatcaaaagagttggggggaaaaaatttaaaacgagaggaacaaatgagaagattgggaccaaggactcaggaagcaaggtgggatatgttcacccatagaccacttagctcccggcatacactccggctgcgtggatcacttttacatgctgggagtcaacttcctattaaaatataaatgctaagactagctcttcctgcctctgcttgagaaacagacaagctg

SEQ ID NO: 8050 - DNA, 1050 bp, Homo sapiens
ctatctttgcaatttcctgtgaatctataattattttaaaatacaacattttaaaataaatgtatggggggaattggggaaaaagtctaaagaggcttctggcagggtaaggggattacagtgatggaaaaaacattgagaaacaccagcaggagtagaggagcccagagtgtcttcactgaaatgcaatggttcagaaagcactggagtcaaacattcctaggttcaaaatcagacaccttccccaggtgttcacacctcatgagatgataccattttaatataaaaggaataggcactatggtctcaaattagtaaatacaaatgttaatattatacacacatatgtgcagaaaaaaaactgaaaggcaatgcaaaaagtgagaacagtgattctgtcagagtggctggattaatatagtaactctcacttattctagacacagtgccaagcacttcactcttattacttcatttaatcctcatgactaccttgtgagatgagcaatattatccccatgttacacatgggaaaactgaagatcagaacaattaagaaacctgccaaggtcacatgatacttaaatggcagcactgggattcaaacccaggcttccttgagcgtgtggtttttattttcttccatatgttttgtcgtgtgtgtgtgctccaatttttatagggaacacataatatttatgtgtagtctgaaaaagaagcaataaatatttaggggacccagagcctggttatatgatcattttcttgggctatttcaccctggataagtcagcctgaggttggagtgtttatcactcctaaggcagctatgtgctaagctggccctaaaggcacaagataccttttaaatacatagtcctgtcttgcaaagtagcagtagccgacacttatcaagcaattagtatgtgccaggcactgggctgagtggtttgcctaagtcacttcatttgattttcacaacttgaagaatcaggtaacataacccacattttacaggtcagaaaactgaggctgaggtcaagtaacttg

SEQ ID NO: 8051 - DNA, 1050 bp, Homo sapiens
agggacattaggggaaaactaaagaaatctgaatgaagtgtggatattagtaaataatcatatattgatactggttcagtaattgtgacccatgtaacatactaatgtaggatgttaatgataggggaaactgggcagggcatgtgtgggaactcactatactacccttgcaatttttctgtaaacttaagactatcctaaactaaaatgtgcacttaaaaaagaaaatcagactggacacagtggctcatgcctctaatcccagcactgtgggaggctgaggggggcagaccacttgaggccaggtgttcaagaccagcctggccaacatggcaaaacccggtctgtactaaaaatacaaaaattagctggtgtagtggagtggcgcatgcccgtaattagccacgtatagtggcacatgcctgtagtggctactcaggaggctgaggcatgagaattgcttgaacccaggaggtggaggttgcagtgagctgagatcatgccactgcactcaagcctgggtgatggagtgagactgtctcaaaaaagaaagaaaatcagctttccctacctatgtagtggccttggctctatccttggcctgagtcaactcagaaatgacctagaacaggccagccttatgtccctccaggctgctcccaagtggcagccatcacaatcacctctcccctgccccatctgtcatctcctttccaagtcaggtatctccacctccatcagaacctctgaatcctgctttcagcttctctcactgactagaccacccttcttcagtcacagctcagttcgacaactgcctgccccagttcactgaggagcccagaattgaacatgacactctgagcatggctgcacagcccagggaaaagcaggcctgtcacttccttcagttcattacacatgtctctattaatatagcccatagaggctaaaatgactttactttagggagcagccacctcacatgagtatctccaactcaactatccagtttaaaaaaaaaaacaacaactccattacaatcagtat

SEQ ID NO: 8052 - DNA, 1050 bp, Homo sapiens
cgagcaccctcgctgggccaggcagcgtgtgcccagcccctgtgaagctgccatttttcacatactgcccccagctgggtccctaggtcagagaaacagctcaagtgaaccttggagaccatctggtctgaccctctgactttatatctggtgaaacagagcagagaatggaactcacttgcctggggtcatctagctggttggtggccacatccaaactggatatttgagctcaggactctcagtccagtgctctttccatcctcccaacatcatcacccgtcattacaaatctggtctgagctagtcctctctggcttctcaagcttcagactctctctccagaaaaacacaaacccatgcacattcatacagtctcgtgaaggttttctcaggagacagaccttaaaacctgtctctgggcccacagtaaagaacttggggaaagagaatcatggttcagagtatacactgaggtgggagggaccccagaaaaggcttgtagttgaaatgtagacctagaaaagagaagttcgtagtatcaccaccccctgattctctaagatggattgggaagctgcggagtgtgaagctctgggactttagttttgtggcgatatgagcaactacccatattgaggcatttctcaaatgcacaaacattgtttcatgagtcattttagcccagataggtcatggtgtcagtggcaaatgctgcaggtggcagatgcctgttacatgaatcacagtggccagtgcagacgttgccagcatccgagatggctgcgaccctgagtagggccctgatgatggaccagatctttctgtgttcagtggcctctgtgtgagaagcttaagcatcaccctggctctctctagctggctttgtatgacatgtgtttgtgtgacagaggctgaggagtgaggtgatttgctcagctgcctgccttccggctccgtgcctatcccaccccactccacagttagagctcggccggaaacctggccccctttcccagctgtgtgggcaggtcatatgggctcaccaag

SEQ ID NO: 8053 - DNA, 1035 bp, Homo sapiens
tagatcttcctccatccctttattttgagcccatgtatgtctctgcacgtgagatgggtttcctgaatacagcacactgatgggtcttgactctttatccaatttgccagtctgtgtcttttaattggagcatttagcccatttacatttaaggttaatattgttatgtgtgaatttgatcctgttattatgatgttagctgcttattttgcttgttagttgatgcagtttcttcctagcctcgatggtctttacaatttggcatgtttttgcagtggctggtaccggttgttcctttccatatttagtgcttccttcaggagctcttgtagggcaggcctcgtggtgacaaaatctctcagcatttgcttgtctgtaaaggattttatttctccttcacttatgaagcttagtttggctggatatgaaattctgggttgaaaattcttttctttaagaatgttgaatattggcccccactctcttctggcttgtagagtttctgctgagagatcagctgttagtgtgacgggcttccctttgtgggtaacccgacctttctttctggctgcctttaacattttttccttcatttcaactttggtgaatctgacaattatgtgtcttggagttgctgtttttgaggagtatcttcatggcattctctgtatttcctgaatttgaatgttggcctgccttgctaggttggggaacttctcctggataatatcctgcagagtgttttccaacttggttccattctccccgtcactttcaggtacaccaatcagatgtagatttggtcttttcacatagtcgcatatttcttggaggctttgttcgtttctttttattcttttttctctaaacttctcttctcacttcatttcattcatttgatcttccatcactgataccctttcttccagttgatcgaatcggctactgaagcttgtgcattcgtcatgtagttctcgtgccatggttttcagctccatcaggtcctttaagtacttctctgcattggttattcta

SEQ ID NO: 8054 - DNA, 1120 bp, Homo sapiens
gttcctctgggacaagaggagtggtgggccttcttccactccttctccatgtttgtgttaaaggtgccaggttcatgtggaagtagcacctaggctttttctggaagtctcttggggagatgcagaaggaagaagactgctgggccaatggcctagagacctcagtgcactagtgatattgacatgacatttgcaagatgctttttactttgcagagtgcttttctatgtactttctcatgtgaccaggctctgtgatgtcccagttttatttcagcattctactttttggaggtcacatagttaagagctgtaagttccacaaggatggggaccacatctgcccttatgtttgcccagcacctagcccaatgcttggctcaaattaggtactcagtaagtgaacaaacttttctccaatttccttcactgttctgttttgaccggaaggtggtgggattctcctggttcacagttacaaactcttaacttggacacagcatgagcctccactatgtataactcttttccattctccagcatatcgcacggatgactgccatccctgggttttgccagtagtgaagaaagtggagcagaagattgctaatgacaatagcctaaatcacgagtatctgccaatcctgggcctggctgagttccggagctgtgcttctcgtcttgcccttggggatgacagcccagcactcaaggagaagcgggtaagttttgggtaaggatgtattttctctttagaaactgaaagtaaaaagatgttgagaatacagtttgtttaaaatattaggcgttatgtctattgaactgccaatgaataagtgtttctgtagcgcgagttcaggaacctgatagcgcaaataatgtggccatgtacaaagcacggctttttcacttgttcagttttgcccagtagatcatcagattttagctactgcatttgaagcagtcagtggagatgccaagtagaaagaatttaatggagtgataaagacaccagggttctagatccaactctgccactacttttgatcataggcaagtcatttagccctctgggctcacatacacatgttagaaaaagaccacatagtgcgagtctgtga

SEQ ID NO: 8055 - DNA, 1022 bp, Homo sapiens
cctgatgttctcagacaacgggccgcttcaaccctgccttttcctttggggcacctcaacaaagggttacagtatcctcccttacctaccagcttgacttgttcctctcatctccctggcatcaacttctaatgccctggtaatgtggagacacactgaactacccccagtctatgtttgacagttgggtggtgtcctgctccttagggcaggattggaggcgacccagccagccacccaaggaagatactaatgaagcccctgctttttgcctcaccttttcaggatcccaactcaccagaggcagtttgtgttgagaacatgacaaagcctcatgacaaaatgaatgggggtggggccaaggaactgcatgaagaaaccagaaggttgtgtggaagtaagagaaaggatagcagcctagggctttaggaccggctggaaaccaagttgagtgtggagaggatgaggggtagagtagttcaggacctgaacgaaagatctttgtagacaaatgttaggctctgcaaatgggttctgcggcaggactgaggtgggattctgtggtgaggttctgtgagatctgaccacctggcccccgtatctccctccactggtggcaggtgatgtgctggcatccctaggcagcagtgtatctgcttcctgtctggggtgtgagctgcatttattctcagaatgatctttattgataagacttgagctggccttcctatcatggatgtggaatacattagtgaccttacaaagttggtgggaacagatactttaccttcttaaacaggagtttaggagcagtgggtccccatcttttggactagctcttaacgttacttttccccgctgtagtgtagcacagccactccccttcactgggggacctcaatgagttggtcagctctcttggccttacatgtggcagttgttttcttgtttgcaggtgcggccgggtgtgtggcaacattacttcatgatgcagccatgaaccctgcggaaggtaatgattc

SEQ ID NO: 8056 - DNA, 1057 bp, Homo sapiens
ctctacaggtccagggttgttagatcttctgggtttttgttttgctttttgaaataaggaaaataagcttatcttaagtttatttttccttggatatacctagattccatacagtgacaatacaaatacaaaggaagaacatctggatttcatccttgacctcatttacaaagcaaaaagagatgctggattcagatataaatgtttaattttgcagtgtttaagtcagcaaatcttctgttttttaaaaataagccacatatctagatttttctgtgaaagctctcaattaagtgttgggaactaatttcaagattttaaaaaatgttatgcaggcttaacgtgtctgagagccataaatgacctaacgtttcccgttagtctctgaactaggtgatctcagttctctttcaactccagtactctgtaagtttctgtgacctgtagtgtaccattctcaggtggtgatatggtttggatgttttgtcccctccaaatctcatgttcaaagtgtgacattcagtgttagaggtgggcctagtaggaggtatttgggtcatgggggcggatcccttatgtatgactttgtgccatccccatagtaatgagtgagttctcactctggttgtttatgcaagagctggttgtttaaaagagcctggaacttcctcctctctcgcttgctctctctcaccatgtgacacactggctccccttcaccttctgccatgattgtaagcttcgtgaggccctcaccagaagcagatgccagcgccatgcttcctatacagttctatgcagaacagtgagccaaataaacctcttttctttctaaaaattgtcagtatttccttatagcaatgcaagccgactaacacaggtgattcttagcaaaacagtttgtcaatttttcataaatgctggaccctggctgggcttatgctattgcctagaagagattcccaacttctctcttatttgaatcttagaaaaatcccaaagcccaagcctcatctaagaccaattaagtcacaatccctggaggaagtaaaaggca

SEQ ID NO: 8057 - DNA, 1049 bp, Homo sapiens
tggctgggcgtggtggctcatgcctataatcccagcactctgggaggccaaggcggggtggatcacctgagatcaggagttcgagactagtctggccaacatggtgaaaccccatctctactagtaatacaaaaatgagctgggcgtggtgatgcaagcctgtaatctcagctatgcgagaggctgacgcaggagaattgcttgaatccaggaggcggaggttgcagtgagccaagatcatgccattgcactccaacctggacgacaagagcaaaactccgtctccacaaaaaaaaaaaaaaaaaagcaagctacttttgccagtaagattaaaggagtgtccagatttgctaacagcacttgtttatttttgaacagataaaagatgaagtatttgaagaaacagaaaaaaacttccgaatgcaagaaagattgattaagtcttttatccgagacctgtctctctacctccagcacatccgggtgagcatcaacatcactgtagttagattaacatacgatgtaattctgtcccctttcctgttcatcagtcatattgtttaatgaatgctgagtaatctggactcaaattactattatgccccatcatactttttgttgagatgccagtaggttatttaacagtaatagcatttagatcaatgttgtcacattcatttcaaagcagcccaactttttccaccctctttttggtcttcatcacccttcatcccacacacaccttatttttcttttacttattacagttcattttatcaaaaccagtttgaaaatcaaatattgaatgcaaaagctaggaagctgtaaacaggaaacgtaaacgagaaagaacaagcagtgaatacgagtaagagaatgttcctatgtggtatgctttctgatcacttcagctcccaatttattaatattcagttgctataataaggcctctaaaggtattagagccataaacagctttgagatctagagaagccaaggagatcaggtgagcctaggtctttccttgcctcaagcaatgcttcctccct

SEQ ID NO: 8058 - DNA, 1064 bp, Homo sapiens
aactgggtcaaggattagggcaggaatagaatctggctctcttgacacctagaatgcttttccagcattaccacatttgaaggcagaagcacagccgtagattgagtctgcaaagatgaatttagaatatcagaaaagtgttaggtatttctctgcagagtgcacagaaaaaaaaagtgttaggaaagtcagagggaggctgccaacagaggttgcaactatattatagacagcagaggtgcaaaggtgcaagagaggatatggactcgggaaagacctttgcatttggtaggttggtggagggtaggagcaggggcacagagcatatgacagggagtttaggagggcagtggtgataaggatatgaaagcagtcccttaaaagttgggacagtaattgctgtggagcaggaaaatcttctgttttgtctttctcccaagataagaaaaacctgcattgatttgaaggcacttttgcgaagtagtacacagacagctcaaagtttttaggactctggtattcaagatttcttttcattgcaaacatgtgaacatgatatctgttccaacagtctgtattcaagcttattattaatataccagcacatagatcccatatctcctttaattgcagtccaccaggtgtttattaactaatgtctgtacttggcattgtaccaagcattgaaggtatccagagaaggcaactatactcttaaacacctgccatgcaggagcttgcagatcagttgaagagacaaaatacaaaagaagtatgtatagcatagacagtaaatgctatggacagttggaaggtagaccaggttttttgttttcttttttgttttttgtttttgttatttttgagacggagtctcgctctgtcgcccgggctggagtgcagtggtgcgatctcagttcactgcaagctctgcttcctgggtccatgccattctcctgcctcagcctcccgagtagctgggactacaggtgcccgccaccacgcctggctaattttttttttttgtatttttagtagagacggggtttcaccgtgttagccag

SEQ ID NO: 8059 - DNA, 1059 bp, Homo sapiens
gcaaaatcctatgggtcattttatagtcaagcacattggaaaaccgggttatcttttatgctcttgatttttatatgctcttgatttaaaaaaaaattaggccaggtgcggtggctcacgcctgcaatcccagcacttcgggaggccgaggtgcgcaggatcacctcaggtcaggagttcaagactagcctggccaacatggtgaaaccctgtgtctactaagaatacaaaattagccgggcggcagggtgtatgcctataaccccagctactcgagaggctgaggcagaaaaatggcttgaacctgggaggcagaggttgcagtgagctgaggttgcaccattgcactccagcctgtgtgacgagagcaaaactccatctcaacaacaacaacaacaaaaaatttaagtctactcaggcaaggtggctattgcctgtagtctcagctactcgtgaggctgaggtgggaagactgcttgagcccaacagttcaaggctacagtgaactatgatcggaccactgcactccaacctgggtgacaaagagaggccctgtctctaaaaagtaaaataaagtaaataagaaaaaaaaaactaagtctgtcttatattcccaagtaggttacagttccttaatggtaggtaccaccttctctttggtatctcaagagtctggtatgatgccttttgcatggcaagcacttgatgttcatttgctaatgatgatgattcttcaactccaactcccaaataaattcattacattctgctttccaaactgacttctgctgctcatttccttttttcttctaattccttctttcaaaatatttcttccctttttcttttcttttttttttttttttttttttttttgtggagacagggtctcaccctatcaccaaggctgagtgcagtggtgcaatcatggcttactgcagccttgaccacccgggctcaactgattgtcccacctcagcctcctaagtagctgagactacaggcatgcgccaccatacctaatttttattttgacagggtctcactatgttgcccagg

SEQ ID NO: 8060 - DNA, 1029 bp, Homo sapiens
aactcctggcctcaagcaaccctcccaccttggcctcccaaagaactggaattatagggacacaccactgcatctggctaagaactaacattttaaatcagaactttaataaattaatgtgggtcaagattttccatgaaatagcattaactttactcatgaacattcccctttgctttcttgaatggataagaaagatgtatatcctctgtgacttagagagggaaaaaaggcttgaacatctaggacattgagaggccaggcaccgtggctcacacctgtaattccagcacttcaagagggcgaggcaggcggattgcttgagctcaggagtttgagaccagcctggccaacatgatgaaacccgtctctacaaaaaatataaaaaattagccaggcatagtggtgcatgcctgtggtcccagctacatgggaggctgaggcaggaggatcacttgagtgcaggaggcagaggttgcagtgagctgagattgcgtcactgcactccagacttcactttctgacacctctcatcctttcatacaaagagaagaaattattcatttagccttcgtgttgtcttgtatgagctcttgtattgtcaaggacaagagaaatgtgcagttgcttttaaggttagatattccttctcattgctgggacttgagattttttaaatggattctcattcccaaaaggtaatgttaactggagagttcagttccaagacataaggatgctcgtggaagcatattcttttgaaggaacctccacctgacagcccctacaaaaagggaacccctttcccagctcttcccaggtaggtactctcccctgggtggctgagcgagaccctgactcaaaaaaagaaggacactgagttcttttgacaccatctaaagaatcagccattcattgggtttgccgtgttgtggcatattctctggttcatcttgaaattatatatacattttattttcaagtatagtggctgtagtttctataaaaggcaagcagtactgcagtttt

SEQ ID NO: 8061 - DNA, 1034 bp, Homo sapiens
acatgggtgcccacctgaggagggcaggggctgaaacccagcttcattctgcatgtcaaaccatgcacctgcaggactgtagaaacggctggtgccgttttctaattggcacagagctgctgtatggactagctggaggtctaacagcaaaggaagtattgatatattcccttccaaatcacaggctttacacaatacaactaggagaagaaagccaaactaaaattcaaatgtactaaatttttttcctatctctgggtgactttgggcaaatcattgaatctttcaacctcagatttattataagtaaaataaagtaacacctctcttaacctaccttaatgggtccaaaagctcatgttgacaaaacggttctctgactcactgtagggtcagaattactggctgtgactgcacataggagaatcatttctaatttttataacattttgcttcacagggaggctgagaagacaaaactccttatagctgcacagaaacaaaaggttgtggaaaaagaagctgagacagagaggaaaaaggcagttataggtacttggatttctctgaaatgattgtctctaagtacatttgtttgtcctgttctttgtcagtctcattttgggtatcatgggactcagtaagattgcatcataggtagtggggaattctggaatctccactgtacattcagatgttctaaagcctttaaaagtaggtgagaccagtacttaatgatgtgctgtggctgtccatcatgttgttagatgctactgttgtctctttcaagaacagggagaatggatagggtttataggcagcttgagtctgtggatagcattttcatttgtacagattaagaatagggaagttttttgaccaaagtttcagattgtagtatgcatccttgttgttgacatgcacttagttttacctggataggtagtgccgtttatgaaagcatggcaggattgtttacagttcatttcagattacagtggcttcccttatactccaggtcactgtgtattaga

SEQ ID NO: 8062 - DNA, 1111 bp, Homo sapiens
caaggtagcaggtgaatttagtggtagtggtgatggtgacgttgggaaatagaatggtgagaggttttacccctgcttttttttgggtcactgtgttttccagattgtgggttgtaaaatcaactttagtgagtcatgaacagcattttaaataaaatggaatagaataggaaaagaaatggtatgtaataagtttaaatattctgtgacacttgtgtttcacagtgtggcggggtaggtgtttatattggacgtcagtgcaaaatgtgtttcttactgtgtccactgtcagtaacattcgaaagccactgctctggatccagatgacctaagaagttatattgaggcttctctagtgtcctttctcaggagctctaggagaccagttgattgttgattgttgtgatgaacattactgcaactaaagcttatcacatgtctctcaattctttacactcagcaccactgctactgagagtgtgcgctcactgtgattgtatgtgttcgtgcttctcaaaaacaagactgaaagataggtggggttttcctcatggcctcattcatgcaatgtcattatctcaggcgcttgagggtgagccaccagagttaaggggtcgtttgaaatgtccagaggtaactttgtaaaatcctctgagttgttcaagtcagttgtagctggagtagctttttagttttaaagatagtgaatgtgaaggtcagctcttagattctgcccagggtgttactcagagatctagctcattcaactgttgtttagaattccttgccttatattacttagccatttttctgttcccagttttttgctattaaacaatagtgtaatgaacattcatgacacatgttcttgtatgtacaaattatctttcaaactgactgtacaaatgtacattcttaacagcaatatgtgcaaataattgtgacccatgaactcaccaacattggaagcaatcagacatactgattgttaccatatggatgggtgggcaattatatctccctttgatttgcattcctttggttgttaatgaggttgaacatcttttgatacatttattggtcatttatactgtcttctgctgattgccta

SEQ ID NO: 8063 - DNA, 1032 bp, Homo sapiens
gaaatgctatgaaaaaggaagcgaactctttctgtgttttaagtgaatattagtatgtttcattatcagcttctccccaggtctatctataactgtgttttatggattgcctttagtagttcacactttttttctttgtttttagtggtggggtcatgatctatattgaccgaatagaagtggttaatatgttggctccttatgcaggtatgttacccatctacctgtggtttttatagttatagccagaggatttatagctgagagattctttgaggaatagaagggtactttgaaagttttatgacttcattgatcactgattaataaatttctggggaatagaggcaaaaataggtcagaagttctggacagagttgactttctgcaactgtatgagttactcttctctgagcttagtgtttctaagagcaaaatggtcattggttatttctagaataggaaagtagtattttatccagtcaggatgagagataatttccttgggtgttagaaatctgtaactgatcaattccttggcccacactgatttgccatcaaagagaagtattttctagttgagatttgctataatttgcaaagcagtctgaaagccttcaacgtggggaaagcattttcttgataaaagatgaaaacctacaggtatggggtgggtaggtactgttgtaatcaaaaacttaattagaagccctgaagaaagatataccgtcttatatgcatgcttgttaataaaactggcatgtctagtatgtacagaatattgtgtttggcaagaataatttgaaaagatgaaattacagcctttgccttcaggggttttaattttacttgagaagacataatacagagctaaaaaaggatatattgggatgtaaggtcataataaatttcacataaccggtacaggcacaaatagtgaaaagatttcagagtagagagcaggcgtattactgtcaagggcatttggattatatttttcagagagtaagcattttccttgtctttttttcc

SEQ ID NO: 8064 - DNA, 1093 bp, Homo sapiens
aactgaataggacatgtgagagatcactaggtattaaactaaaatgttgaccacagctttagagaagaaaggttgctgttggattcaagggcagctttgagtcttagagtacttgtatgcataaaatctcttttatcttcaacataaatagtaatattagcagtggaatcaaagttcagagtgcaagttgtagccagagtatctatgtgagcaagctgtgttgtttacaacccctggccagctccaggcaggtaagggactctggaagagttttctacttattagcagactgaacattgaacctttcccagtgaatcttaattcaaacattcgctgtaggccaggcacagtggctcacgcctgtaatcccagcactttgggaggccaaggtgggtggatcacttgaggccaggagttcaagaccagcctggccaacatggtgaaacctcatctttactaaaaatacaaaaattagctgagcgtagtggtgcatacctgtaatcccagctacttgggaggctggggcacaagaaccgcctgaacccaggaggcagaggttgcagtgagccaagattgcaccactgcattccagcctgggtgacaaagcaagactctgtctccaaaaaaaaaaaaaaattgctgtaaaatattttctgtctcaagtctttcatttctactagaatacaaaaagaaatgactgttctgagagctaatctttgggaactgaaattgtgatggatctctgctgtacttactgtcagcagctttccagagatttgcctctggtaccagtagttttttgacaatgtgtgtcttgagtgttgatgagatatcttttcctccctagacaacactacaaactgatgaagttaaaaatgtgccttgtggaacaaggtaagctttctctttgcctacgagcctccctttagctcagacagagtttctgttcctacagctatgatcacttagacatatctcaaataggcatgatagttaacccaaggggacttctgatctgagcattgtttgagcaaaggcctatctccaaataggagcttttccatcttaagaaccattattgttcttatggtat

SEQ ID NO: 8065 - DNA, 1404 bp, Homo sapiens
ctcctgaccgacctcaggcgatctgcctacctcggcctcctgaagtgttgggattacaggcgtgagccactgcacccggccactctttcagcttttaatatttaacttcaccactcagtcgtgctgaaacagttgttatttaggcctgcattagtgagacctggcctgccacactcccagttaatattccttcttggcttggtgcagtggcccatgcctgtaatcccgggactttgggaacccaaggtgggtggattgctgagttcaagagttcgagacctgcctgagcaacatgttgaagccctgtctctacaaaaactacaaaaattagcggggtttggtggtgcacccctgtagtcctagctacttgggagattgaggtgggagaatcacttgagcccagggaggttgaggctgcaatgagccatgatcacgccgctgcactccagcatgggtgacagagcaagaccctgtctcaaaaaaaaaaatttctttttgtatttgaagcccagtactctgaaactactgtgagaacagcagtctcataggtcctgccaaaggataaatgggtggtaaaatatgactgtggtcatgactttttcccccatttttctttttatgactttattgaggcatattatcatgttagttcccatttaaggtgtacaatatagtgattttttatttcttttttattaacttgtcactgacttgatgctcaattacagtgatttttttttaaagtaaatttaccaaattttgcagctgtcaccataaatcagcttaaaaacatttccattaacagtccattaactgttaatctccattctgtccaccccaggaaaccaggaatctattttttatctccacaagtttgccttttctgaacattccatataaatggaattatgtaatatatagtcttgtgtctgactttttttacttgccttgtatttttgaagcccgtgcatgttgtagcatgtatcagtacttcattcgttttgattaccgattagttttttcactgtatatatctttttgcatttgttctttgggttttggtgattgttcactttagcccatacaaaagtttgggtcttttttcctcaacaaaagtttggactctgttatctgtaagagatatggtaatacacattgattttgttcatttgcatttcaaagtaggaaatctggtgcataagtatttagaaaacctaggattttcaaagatccttgaacaggattttaactgtttgtttctttttcagagaggctgtgatagctatatggtttatttgtttgataaaagtaaaactgtatatgaagggccatttgcttccagaagtttatctgattgtgtaaattatattggtaagtccagtccatttagtggctgagctttaa

SEQ ID NO: 8066 - DNA, 1060 bp, Homo sapiens
ttttcttcatgtcatttgaaatgcatacattaggattggagttttttgctttaggcttggttatattaaaactttctcttgctgtttggagtccaggaagccctgaattaccttcttcattttagttatgctagaagctggggcacatattagttgtcttgattaagctctgaaaggggtttgctgaggagacaggatctttttttttctaacattatatatgagagagagttctgaaaagacctgttataaaatcagtttcaggcacttttcccttgtatgctgttgtgtgtttgaaggtcagttttaaagcattggtgtaatagtctcatggtttatctttttaaaaagcattgcctcaagagagctgtggataaatatatttaattagtaaagctaaaaagttttgttgtcttaagttatttctttggtagcaaataaatcttcacaagaacctaattttttttttctgttgattttctattttggcaggaacttgatctcaaaatagcaattaagtcttgtcgcctagagctaagtaccaaaaacagagaacgatggtgccatgaaatccagattatgaagaagtaagtgtattccttgacttacatttccctggttctacagcccaaccagatgtcatcatggggaaagaggccaggaatccactcttctcaggatctttttgggaacatatatttttttctctcattaaatatattctatttcaaataataatatcacattaagattaagaaggtttagttaaaatcagctaggacacttacacactgttggtgggaatgtaaaattgtgcaactgttacggaaaacagtacggtgattcctaaaaaattaaaaatagaattaccatatgatccagcaattccatttctgggtatatacaaaaatgaattgaaagcagggacttaaagagtaatttgtacactcatattcataacattattattcacaatagctgaaaggtaaaagcaacccagtatctaccagcagagacatgtataaacaaaatgtggtatattcatgaaacggaatatcat

SEQ ID NO: 8067 - DNA, 1026 bp, Homo sapiens
aattttaaatcagagtgggtatgactaggctcctgactctgcaaactcatgtctagttgaggtgacaaaactacagtttaaggcaggttgtaatcacagctaatatggcactttgactgtgttatctctgtacctcacaaaaaccctgtatggtgggtgttcttatttgcatttcataggtgaggaaatcaagactcagagatgaaatcatctgtctagatcatagatagcaagtggcaaagctggaaatgggatccagtctctgatctttctcacaccagggcctgccctttttctatgtggtgttgcttctctaagtaccaataatatagttccaagttttttaagagagggagaagcaagtggggtttgaaggatcaggaaatatatagtacctgagctggtcatttaaaacgggtatgattttgatcaatagtatggcagagatggcactcagggcaggagagcaaagtcagagaaatttgcatacctcctttgggtgatgttgaggagagctcaggctgatagtttccattttgacttctttgtgctatttctgcagggaggtcctggccagtgaagccatccttaatgttcctgataagtctgactggaggcagtgtcagatcagcaaggaagacgaggagaccctggctcgccgcttccggaaagactttgagccctatgactttactctggatgactaaaacaaagggaagaactttttatgaactccacaggaagtagtaaagcttttttttttttttaattaaaagaattttttttgagacaaagtctcgctctgtcacccaagcaggattgcagtggcataactgtggctcactgtagcctcaacctcctgggctctagagttcctcccacctcagcctcatgagtagctgggaccacaggcgcatgctaccatgcctggcaaacttttttgattttttatagagacaggagggtctccctgtgttgcccaggctggtctgtaatgcctaggctcaagggatcctctgccttggc

SEQ ID NO: 8068 - DNA, 1050 bp, Homo sapiens
gaggcagaggttgcagtgagccgagattgtgccactgcactccagcctgggcaacagagcgagactccatctttaaaaaaaaaattatataaagtttagctttaatatgtaaaatatttaatatttttatattaatatttaaataacattcatttaaaaagtttttaaagagtatctggtggtaaccccagagacttcacagggaagtgtgtggtcagtacatgtaaacagcatagatagtaagttccttgtttagaaaaggaatgggtagttgaggaagttccaaggaagatgtggggcttgctggataagaatttggaagaaagtgagtattttgtgtggaggcccagcatgagggaaagcttagtggtaggaaatagtctcaaagcctgcatggggctagcagctcagaaaatcagattgtaaatcatttgtagttgtggtggttttctttttggcacatttgttaagttttcaaatgggcctaactctgccacatatataatatcggagatggcaaaggcttgtgacggagatatctctcttaagcctttcctgcatcagagaatggctcccacatgtgtcaggctatctcataagtttaagtccttacagacaggctgacacaggcttgtctggcctgaggatattctgtgctgaggggtgtttctccacccctgtgatggatttgctacttctcagagactgtgcaggcacaacttctctgggacctgcacaaggaatttctcctgtctccccaacccccaggtcattcctgtcccaatcagctgctctactactgatgacattaaagatgccttcattacccaggcacaggagcagcagatagagctgttggaaatcccagagcactctgacatcaagcaggtgaaacaggggatggtgatattcagggaagagtaaatatctgttttttttgttgttgtttgttgtttgtttgtttgtttgagacagagtcttgctctgttgcctaggttggagtgcagtggcatgatcttggctcactgcaacctccgccttccgggttca

SEQ ID NO: 8069 - DNA, 1052 bp, Homo sapiens
agtctcgctctgtcacccaggctggagtgtagtggcgcgatctcggctcactgcaacctctgcctcccgggttcaagcaattctcctgtctcagcctcccgagtagctgggactacaggcacatgccatcacaggcctggctaatttttgtatttttagtagaaatgaggtttcaccatattggtcagcctagtctggaacttctgacctcaggcggtccacctgcctcggcctctcaaagttttgggattacaagcgtgagccactatcccagccgaaagtggtcattttgaaatcagaagttgtatctttttgtggttgagggtgataaaaactgaaaaactgttttcaagtttggagcatgggagggaaaacccagcgatttgttctggtctccctcagctcagtgtgtttgaagccaaaagcctgcttgtgtgcctctcccaattcatttgctcctagttcatttgctacttgcatagaaattttcatgccgaatctcactcttcagcggatacctgagaacattgttgctacaatctctaaaatcagattttttcaagaaagaatttttattaataacctcaagtacttttcgcctacaccctcaggctcactttttgtataggtttttctccctggagaatcctacatgctgtattgatgtctcaattctgtgtgctgcttcttcagtgctaccttgccctggccaaaggaggcttatctgatgaccatgtcctcatcctgcctattggacactaccagtcagtggtggagctttcagcagaggtggtagaagaggtggagaagtataaggccactctgagacggttctttaagagtcgagggaaatggtgtgttgtatttgagagaaattataagagccatcacctccagctacaggtaggtggtctgttcatagaaacttggaagggcgctatggggactttgatattggtaaataagtatttaaataggctgggcgaggtggctcacgcctgtaatcctagcactttgggaggccgaagcggttggattgcctgagctcagga

SEQ ID NO: 8070 - DNA, 1060 bp, Homo sapiens
agtcccagctactcgggaggctgaggcaggagtatcacttgaacctgggaggtggaggttgaagtgagcccagatcataccactgcactccagcctggcaacggagcgagactccgtctcaaaaaaaaaaaaaaaaaaatagctacagtaaaattcataaataccatgattggggtatggcaaggggctataagatcacacagatgaaagtagtttactctgtatggtgaggttgtgggggcagtccagggagtgtttcagaacaagtcggatgtttgatcagagtttcaaagattaaaaggttttaggcaaagggatgagcaagtgaagactgtttcaggcacagagaatagcatgtacaaaggcactgaagcaagagtaagccgaagccttttgagaattactattatttaattggggctgcaacacaggtgtttgtggctgtgaagttagatgaagctggaacaacaggtaggagttagatcactaaggacctagcattctgtgctaaagaacttaaacttgacagggaggagctattgaacagttttaggaagagtgacataattagctgtatgttaggaagggccaggctggagggagttaggctatagtaagggatgatgaagacatgaaataactaaagctagccagtgaggttggatttgaaatacttagtacttagtagatagaactgacagaattgctgatagtttggagaggtgtgtgtgtggttgggggtactgagggagaggaaagaggttctggccaaagtgcccggggggattggatactgttaagatgtgaggccagaagcttgctagagctgccggagaacagaatccagggagatttggatacagttaccaggcagaagctctgatggctcatcttgtcccaccttcaatccccaccctaattccttttctttttttccctccctttcctccctccctttcttccctcccttgtctccccttttccccttcccctcctctcctctctctctccctctccccgtctcttttcatttaaaaataaccatagattcacaggaggt

SEQ ID NO: 8071 - DNA, 1044 bp, Homo sapiens
gagcattcaaagtatagggaacagcatttgtaaaggctctaaggaaggaaaatgtcaggaaattaaaggctagtgtggctgaagcacaatgaatgagaaaagtattaaaagatgaagttgaagtggtaggctggagcctttgggcagggctcaaagaagtttgaattttattctgtgtgtgatagaaatcattgaaagattttaagcatggaatgccaaaatcattttttattttagaagttcactcctgctgctgtgtaaagaacgaattgggtaatggcttgagtagaaaggggatagctagttgggaggttgttggagtactccaggtgagagatgatacaatcaaaaaggctgttggcagcgaaaatagagaaaagtagacagattgagatatattttggaggttaaatcaaggagactaaatgatggattagaagagaatgagggagaaggagggatcaagagggattttcaggcttctgggttgagcaattgggtggatagtggaaccatttaccaagatgaaaaaaactggaggaagaacagaagagattgtgactttgctcctttctgaaaaaaacaaataaaaaaagaccataaaagatggtagaatagagaactccattttagacagactaaaatgggagttccctcccccattaagtatctactatatccaagtgaaatatttgattggaaattgcgtataagcagctgatcacttgaggtcaggagttcgagaccagcctggccaacacggtaaaactacgtctctactaaaaatacaaaaattagccaggcatggtggcacatgcctgttatcccagccactcgggaggctgaggcaggagaatcacttgaacccaggaggcaggggttgcagtgagctgagatcgtgtcactgcactccagcctgggtgacagagcaagacttggtctaaaaaacgaaaagaaattgcatataagaacttggagcttagaggagagatttgtgatggtgatataaatttggggatcatcagcatatgggtgctatttaaa

SEQ ID NO: 8072 - DNA, 1031 bp, Homo sapiens
gttggtaaagccagcagcccctaaagcacgtcccagccttgtctcctctgtgctttcccccaccactgctgctgcacgcctcatttgctgggccactttagtggtggaaccattagaggctgagtgacttaaaggagattgagtctgtctcgaccccgagagagagtgggatggatggatgcatcgtctcatttagaaagtgttgcctctgactctaacacactcttctctctttctttacctccctccctgtcttcctcccttcccctcctttccctaacccccttccctccccctttctccttctctctcacagtgtaggcaccacttctcttacaatttaggctttctctctgccttgggctgagtgaggaagaggagtgctgttcctgccttcctagcccagctgggtctgaccagaggctactgtgtacccatttaccatgcgtgattgttaactcagagtggggtgtagccaggtattgactgaatgtatgttcttgctgacctgtgtttttttctgtagggaccaaagcagtatccttacaataatctgtacctggaacgaggcggtgatccctccaaagaaccagagcgggtggttcactatgagatctgaggaggcttcgtgggcttttgggtcctctaactaggactccctcattcctagaaatttaaccttaatgaaatccctaataaaactcagtgctgtgttatttgtgcctcatttccccaggaatagtcactgccttgaggaacctcatccttttccctttttttctgcttgatgtctgctgtcttccctgttttctttttctgaaatttaaaggataagagggtggggtggatggggacttaggcacaaaatgttaatttgttaatttcacttgggttgtaaaggtacttaagggttttagctgtgtggaggtgttaagggtccctccttttcccatttacagggtcaaggaagaaatgttcctaactttccaagttggaacaagatttatttcacataaaaaacctttctagtc

SEQ ID NO: 8073 - DNA, 1048 bp, Homo sapiens
gcttcctccgtcacgtttggcccggctcagccgccgtgacaggcctttgcgcatgtgcagaagggaaacgtgaagaaggtgaagatggcggtggccagggccggggtcttgggagtccagtggctgcaaagggcatcccggaacgtgatgccgctgggcgcacggacaggtccgcgagaacgggcgagacctcagtgtgggaagggggtacctgaaatttggtgtatcgggaggggggatcgtagatgccgcggcggcagcctccgggtagggagtggaggtggcgttgatatatccagaaaatggggtggaggatcgcactgatcctgcgaagtcccgggctcggacctctgcagcccctgcgacttgaagccttcggagcggctggagagcgggctcgcttctgacctgttctcttctgcgttctagcctcccacatgaccaaggacatgttcccggggccctatcctaggaccccagaagaacgggccgccgccgccaagaagtataatatgcgtgtggaagactacgaaccttacccggatgatggcatggggtgagacagagagggtatgctcgcacccaagtagtgatgggagaaggccggctgggttgggtggcttgactgtgaccctttttcccgaaccttctcgtgacccctcagagtcaatggagtgggtgcttttctctgtggagggaggtgggaggggggtgggtgagcagctgcagctgagaggacttcaattttctccttggctcaggctgtttcctcaaatgaggaagccgaggttttaatggctccctcgaggacccccgaatagcaggagccttccttggctctatccagagcgtcgagtttcatttagattgagcatctgctgcgctcaggtgctgtcatccaggcatgtgaccaggctggagctggactcctgtcatgagaatcttatttgtaaacggagtactctatatttgtgtgtatgtctctttaaaaaaaatgtttttctgttagtgctgtggaaatcgtagcaactattaagcagattaaaca

SEQ ID NO: 8074 - DNA, 1123 bp, Homo sapiens
aaagaaaaagaattaaagaaaagaaatatcacccagcctgggtgacagagtgagtgagactgtctcaaaaaattaaaaaaaaaaagggccaagcgcggtggctcacgccagtaatcccagcactttggaaggctgaggcgggcagatcacctgagatccggagttcaagaccagcctggccaacatggagaaaccccatctctactaaaactgcaaaattagctgggtgtggtggtgcatgcctgtaatcccagctactcaggaagctaaggcaggagaatcacttgaacccgggaggtggaggttgcggtgagccgagatcgcgccattgtattccagcctgggcaccaagagcgaaactccatcttaaaaaaaaaataaaaataaaaaaattttaaaaagaaaaaaagaaaaagaattaaaatcacttctcggccttttggctaagatcaagtgtagtatctgttctcatcagtttagtatctgatatgtcctctatctgaggacaatatattaaatagatttttggagcagggagatggaataggagcttgctccgtccactccatgcatcgacctggtattgcagtacctccaggaacggtgcactcgctccggggatacaaaaaaaaaaaaaaaagaattaaaagaaatatcacctaaataatgcttttctgtgtatttactagtatattttcagaataccattaaatattttgaaatattacccataattcagcaactcacaaataaccacattaacagtttggtgtagtacttcctgcatacaaggatttatgaatctgtgctacaaaaatatttatccacatgctataattcctggatatctgtctctatgacttttcagtgaaagcatgaaagttttccagacatctaaatatatcagcacctgatctttgcaaccttaagtttaggtgcagcgaagagatggaaagctgttaaaactgttaacaaaggagttgttgggttattatgtatgaccttgatgtaaactctgttacagttcaaattctgttacaaatgccattccagtgacatcaagcttatcagtcccaaagatagaagaatagcaccatgatattgctgaacttttcagggcatc

SEQ ID NO: 8075 - DNA, 1044 bp, Homo sapiens
tcagggcagagggttttaatattttattttatcttttttttttatttcaccaacttctttgagaacctgatgaaaactgtggactgttttctccccaaaatgcacaaatgtgcaaaggtttatgtctttttccagatgtatggaccttctaaagcccacgcaaggctggctcaggatttggggtagagttggtgtaaaagcacagtgtcagtaggatttggtttggggctggaagaaagctccatcaagatggagttaagaccaggcacagtggcttatgcctttaatcccagcacattgggagaacagggtggacagatcatctgagctcaggagctcgagaccagcctggccaacgtggtgaaaccctgtctctataaaacatacaaaaatttccagcctggcaaacatggcgaaaccccgtctctactaaaaatacaaaaaagttaggcgggtgccgtggctcatgcctataatcccagtttcttgggaggctgaggtgggagatttgcttgaacctgggaggcggaggttgcagcgagccaagattgtgccactgcactctagcctgggcaacagagcaagactctgtctgaaaaaaaaaaaaagattgagttaaagttaggctttaattaggcgtaggattttcttaatgttggttgcttttaagttaagatttgtagttgtccaagaaataagatttgggtttggtttagagttgggttagcgattaggttcatgtaaaagctagattagagagacactggactgcatttagggctagatgtatcatttgttcaatgggcattaggattaggagctgcttgtaataggcaagttttgctcactttggtcagggattctgatagagtgggatcccatggagactggcctagtttgattgaaatcagcccccagctccattccaggccacaaggctatgaggccggtatgagatggatggacaggcctctttgtctgcccatcaccaggccttggtgctagtgatgacaccgtcactcagccatggtgtccgggcatgga

SEQ ID NO: 8076 - DNA, 1027 bp, Homo sapiens
cagggttagctggaggagactgctgaagtaatttataataggtaaatagtttcatgtagaatttatgataacaacaacaatttggatttatgatactctttctctgaggaatgcctatgtggctatataaaatcccatctatccccagagatgattttgctaaaataaagaaattttgaaggtggcctacggacctataaaaagaattatacagaacagtgaaaatacatgcaggttttattcacaattctctgccttggcaggcttgacatattcccatctgattatctgccattctggttttttttttttttttaactttctaattttgaaataattatagattcacaggaagttacaaaaataagatggaaaggtgtttgtgtaacatcttacataatatgtaataatcaaaccaggaaatagaccctggtaccatccatggacctttattcagattgcactctgtgtgtgtgtgtgtgtgtgtgtgtgtgtctgtctgtgtctatgtgtgtctagtcctttgcaattgtatcacgtgtagattcagataaccatcaccacaattgaggtacagaactgtttgttccatcagcacaaaaattcctcatttaccccttggtagtcacacccatccttctcccctcctcctcttcccattgtccctgattcctggcaacttcttatgtgttctccatctctataattttgtcattttgcaaatgttacataaatggaatcatacaatatgtcactttttgaaactggctttttaaaaacccagcataattcccttgagacccacagatgttgctgcatgtatcaatagtgcattcctctttattgctgagtagtattccatggtatggatataccaaagtttcttttccccattgaaggatgtttgggctgttttcaattttttgactattgcaactaaagctattacaacacgtacaggtttttgtgtgggcatacattttcatttctctgggataaatgccaaggagtacaaatgctgtgttgt

SEQ ID NO: 8077 - DNA, 1032 bp, Homo sapiens
ataaattacaattggaataatgatccagagagatttataacattctgtataatttaaaaatagtattcagctggccagatgcaggaggattgcttgaggccaggtgttggagaccagcctgggccaaggcaggaggattgcttgaggccaggtgttggagaccagcctgggcaacatgcatatatacttatctacagtgaatacatagttgcctctagagagggagagtcttggctaggggtttcgagaaagactcacttttcattgttaacctttcatactatctgtgtgtgtgtgtttttttatcctgtgcatttactactttattaaccaaaaataattattctatatgaataaataagtgaaataacaccaggaggcagaatattatttagctaaaagtgaattaggtatcttctttctgcctgccaaaaccattctttctaacctgtgtccattagaatcttgaaagctggacttgcttgctggcttttagtaaaatttggcaaatgtgacggtataagtagaggctcgaataaatgagtgtatctcgccgggcgcggtggctcatgcctgtaatcccagcactttgggaggctgaggtgggtggatcacgaggtcaggagatcgagaccatcctggctaacacggtgaaaccccgtctctactaaaaacagtaaaaaaaattagctgggtgtggtggtgggcacctgtaatcccagcttcttaggagactgaggcaggagagtgatgtgaacccgagaggcggagcttgcagtgagccgagatcgtgccactgcactccagcctgggtgacagagcgagactccgtctcaaaaaacaaacaaacaaaaaagaaattagtgtatctctccctggccagcaaatttccaggcagacatggcagttatcactcttgtcccaagcagtgtaccttgtatgggcagtggagcaagctaaggagacacaggagatatatgggaacctaaagtggaattttcaaattcttgctcatgatttcaaaattctctt

SEQ ID NO: 8078 - DNA, 1076 bp, Homo sapiens
cagaacctaaccaatgccaggaggaaaaggatgtgaacacagccaagttctgaatcttaagctcatgcacataaaggacccagggttatgcttagtgcttctgaaactgtttagacatttttgacatgtgggtgccatgttaagatactttatctgctcagatttcttcccttgagcctctctagaataagaatttagaggctttggttgaattcttgaagatgtggtatgttacacattttaaggaagggcctttggagctacgggtgttgttcaaagtgtgacttgccaaagggaggaccatgtttttggaaactcttgcttgagcagttcctaagcaatgtctatcaaaatacctattatgctaggaccatggttctcactttttgtgttaaagacatagttttgtataatgttagaatttttgatagtacattaaagaattaaaggtaaatgtcatttttttttaaaaaagcaagtttcagaaaattgaagaacctgttcgtgattatttacactattgttcaccctctggtgtgttactgtttgaacagtattgtttgcagccctgaccttgttctcttatatcctttgaggtaaagttcatatatgttcctctgaacatgcaatctttattttattttcagcaaattgtatcatgggcaatattttggcttagtgtctgatagaaatccctgtaaaattgtggattgttagttgaacaaaaataaattctatatattgtttaaaatttgatggtgcacttattcagggttactgctataccacttgtctgcacagtgatggttgagagccacttttagaagcacaaagttgtttaagacttgatcctgtggaatttatgactaaattagccaaaaaagatgatgtatagctgtgaaaagctagcaatgcctaggtgtatggtaggttccatctaacagttcagatggcatgtttggaagagtcacagaagtagaggctttatctagattttaaagaatggatgaatttgactagtccccagaagtagcagtcaggggcaaaggtaggctggggctggcagtataggtgaa

SEQ ID NO: 8079 - DNA, 1044 bp, Homo sapiens
agctgggatccttgtgaccttgggaaagttttttcacctctctaggactcagtctcctcatgtgtaaaatgggattcacaatagtgcctacttataggtggaaggccaacaagaaagcacacccagtagtcaaaacagtgctgggcacagcatccactcagtacttgctatgagggttgttgtttgaagaattccttttccccttttccccttttcctaggcagcccagagccctcagaggaagccctcagcaggctgagtagattatcttaagctcaaccccttccctgcctgcctccaaggatacagatgcaggttagaaggtgtctcagagggggtatggcctttgaggtttccagggatctaacagggaaacttctgctgcagagcagctccaggccctccagcgctgacccaccaaattttgctgcatcaatgtgcttcgctgagctgttatgtggccctggcgtggctctgaaggccgactgagaatcccaatccatctaggaggatccttggaattaagccaactggggatgagggcaaagagaggtggttgggatgggtcccaggggcagaggcctccctgtgctactgctgagtgggcagcagctttggattctgagaaggggtcattttgctggtgctaaggccgggagcttattctgatgctgcgggctctctgactggcctttcacctgcagcccccaagctcaggcttcccagaatgaccatcctccggggctggcaccaagaactggctctgtgccgcagttagagagagaccctgctggtccctgctcacttcctcaacatctcagcagctcaaggccaggcctctggctgccattcgtgactggggcctgggttaagaagcttaggacactatcttcaagacaaatgtgaagtaaacttgggtggtgattacacttgacctgtgtaaagtcagcgaaagtagcaactgaaaggggatagtgggcttggctggaggcagctcccagcttggggactgctccaagtagaatgtggggcttgtgaatgatt

SEQ ID NO: 8080 - DNA, 1876 bp, Homo sapiens
gaccagatgataaaagaattctggaattttacagcaagttaggatgttttgaaattgcaaaaatggaaggatttccaaaggatgtggttatacttggtcggagcctgtgacatttgttgacactgtgaactgtccaaaagtctcttaactgcaccttgtgaatggtagttgaggtcttcatacagttcagcctctagaatggtaacaaatcagccaattggattcgaaacaaagaagactatgtaaaactcacccatcacactttgagactactcactggttggaagaatatagtattgcagcaaatcctgtatgaaagagagatgtgggcttcctttttgagtcttgtgttaggtgctgagaccttttacatgggcttatacagggagagagtcttcaataaatgtagtcagcactattttctgcatccagtgtggttgcgtttctcacctgagagtaatcaagataacatctgtcatcttccttggtttattgagtgaaatgcctctcagtcttaggggacatggcagagatgaaagaaagaaagagtgggtttcagaagtgtcagggtggagtgattccaagtgggatggttgtggcattagtttaagctgaataaataatttcaatttggggcagttattctgctttttgtaaagccgtggccaattgtctcctgtaatgactgttggttcaggcatgttgtactttgtagggacaaatgtgcatttgtttgtggcaaaagcctacaattgacaaacttgtaaatttctttgtatataaactagctgtaacctgactatcctttgtgtttactgtttttgtaaatttttttcctctataaatgaaagggtgttggttcagaatggcactttgaataatgtaaaccagtgaaaagtggattttctttacttttgtctttgggtttggggttgtttttgttctttttgaagttttattatttttaaagtgcctcccacctaggcgtaggccatgaccatttggggtacgagagcctaattttgtaggacttaatctgttgaaaagtgcagttacttctggaaattaacctcaatattaggtcagcatgtgaaatgttggatttgacatgtcaggtagggttcagggactgattggtcccatttgccctcaggtcagttgtttaatctcaagacctgttactactgattttattaaatcagagtctttaattcttgcatgtttgtatctaatttctgaatgaatgagcacactttaaccagttatttacagttacctttttcctttaaccggattgtgaaagcttcatgtattttaatttagattctgtgtttttaagggttctgagcatgaagctggcagatagtcggcaggactcattttttcatcatggctggctgatttctccatagattgataacagtattttgttatcttgcttctctgtagttttgcatcagctgtttaactttgagctgagtgaggggagaggggtaaagagaaagaaacttaagttttctttcacagaactccaccattgtgggctttgagagagccctaaagcattgtacctagtggtacctagtgacttccaaccaaagcctttgagtatgcactaaataggtgagaagaaaggagagaaggtttttaggttagaaacctttaaccgatagaaggatatggtatgttgtaaagctggaaccaagtttgcatttttgagggcttgagatgaagggaagactcttaccagatagtaagacagctgagttttcctcagttttctcgtcttaacactagtggacaattctagcattttgtttggaggatttcagagttaacctcatggaattcaggattttttagcaagtttgctttt

SEQ ID NO: 8081 - DNA, 1050 bp, Homo sapiens
aaaaaaatagatttgtcataattggaataggtttgtttttgtttttgtttttgtttttactgtaaatttaaatccccattaatatgccactaaagctgtaactcagagtgggtaatttctattcagaagcactcccctcccccagcaaagaggtatttctattagtaaagcatagtacacccctcttctttaggtctgcctgcagtagccagttaatataagttggtaatctgcagtgcacacccatttaaaaaaatggataccttccccaaactaatccatctccttttttttcttcccacagcgtttgctgccaattgatggggcaaatgatctcttttttcagccacctccactgactcctacctccaaagtttatactatcagaccttattttcctaaggatgaggtaattgtctctctacctaccaacttggtgtatgggtatggtgcacacttaaaacttaaccttttaactcactggttaaaggaatccttctgtcttaaaactgcaaactttagatggagaaagttcattaaaacattcagtgtatcttgagaaatttaaggagtttagacttttaacatcttgtgccaagttctttaatttctcccttgagaaagtcagatgaaatgtattcagagttggagttacaaaatagttaatgtgtctaaatgatgtgttgtccttagactaattatctctaatatattggtgttctgtaattttctttcaattgtgaagtatctacaggctgttgacaatcagctaaagaaaaaagcaagactgtttaaagacagtaacagggccaggcgcggtggctcacgtctgtaatcccagtactttgggaggccgaggtgggcaaatcacctgaggtcaggagttcaagaccagcctaggcaacatggtgaaaccctttctctattaaaaatacaaataggccgggcttggtggctcatgcctgtaatcccagcactttgggaggccgagacaggcggatcacgaggtcaggagatcgagaccatggtgaaaccttgtctctactaaaa

SEQ ID NO: 8082 - DNA, 1050 bp, Homo sapiens
tattggatggacagcggcagatgttcacagcgcgtcatgattaattagtttaaattgcaaggttctatctgtgaggtagctcaggtagatttaagggcggtagacatgaactgaagtcacgtttgcgcagcgactgaggcattaaccatgttttcatttacacagctcttcgtacatgcagctttttattgtaatagttggaagtgctagttatgttgtagtctcaaagtagggggtaggggaaattggctgatcttaaagtttgagaggtatagtttttttcctgcagtgtaaattacactgagttacggaatgggacaggttctcgtatagtctaaattttgaccctgtttcatatttattttacaaatactacattttatgttttttaaaagtacccctacccttgaaaaatgacaaaccagatacaaactcttaatgggcctgaattgttaacaaaaaattggtttgctttgggactgtctgactagcacactatatttgtactgatgagactgttaacttgaacaggaggtagaatgctgtcttccaatggaaaagaactatattgcgctgctttatcttgtcagaagactaggcaagtgattttgatttggcctccaaacatttgcctttatgtcttactgttagctagcgttattgcctattaagttagttaactggtgaccttaaatagagacttctgtattccatgtgtatgttcagtgtattgcaaagattattataatggctggtcagaggaaccagatactgtcatacttttaagaaaagtatatttagctctgggcaaaataacatcaattggctctccttagttctcagaatctgtcagactggtattattagccaagtctgattttgaattgtttttgtccaaaaaaatttttctcattatgtttcattttgtcaacttaatttcttgtattttattctactgaccttagttttctgacaagattaatccttctcccccgcccttttcccttacctgtacccttcctcaaaatgtaaaatgtgacttcagacagg

SEQ ID NO: 8083 - DNA, 1124 bp, Homo sapiens
gcctgggcgatagagggagactccatctcaaaataaataaataaataaaggaaatactgaccgtgcgcagcggctcaaacctgtagtcccagcacttagggaggcctaggcgggcagaccacaaggtcaggagtttgagaccagcctggccaatatggtgaaaccccatttctactaaaaatacaaaaattagctgggcgtggtggcatgtgcttgtagtcccagctgcttgggaggctgaggcagaagaatcacttgaacccaggaggtggaggttgcagtgagccgagattgtgtcactgcactccagcctgggtgacagagcgagacttcatcttgtggggctggggggaggctctgtatagctcctgtacatgggagacatctacccttaggctcaagagacctcaatattggttgctggatgacaacatttgccttccaggtttctgctcaggttcttataattcattcttatagggatttaaacttaagtttctaaggcccttaggaattttgaacctgaaatctggattattgagcttgaaatgtattacagaaaacatttgatattcagtttttaatttaagaattattaaaagttaaattcttaatgatacacagtattgtttctttctcttctcagggtttatctctgcactgagcatttatggtggtagctttccaaaattatatagatacctcttacacaatctcaagctcttacagcaagcttgtccagcctgtggctcaacacaagtttgtaaactttcttaaaacattgtgagtttttttattttttattttttttaagctcatcaactatcattagtgtattttatgtgtggcccaagacagttcttccagtgtggcccagggaagccaaaagattggacaccccttgtaacatcttagaagttttaaataattatcttcatatccacatagctttacaaaagctcacgacagggagagtattttcttggttctgtagtaatttcagggggtttactgattggaacccttccttttcctcctctctccagtccagctggcattcagtcctttaaacaatgtggctatgcagtacttttgattactaatgacttctattatcttcttcc

SEQ ID NO: 8084 - DNA, 1112 bp, Homo sapiens
atgatactttaatggttaagataaattgccagtacctgacaacataagcagcttaatgtgtaactgtgtctcagattattttgttaagcttacagttttttgagtctttttattgatcttcaatagattgaagaatggcggtcacgagcagccaagtttgaagagatgtgtggactagtgatgggaatgttcactcggctctccaattgtgccaacaggacaattctttatgacatgtactcctatgtttgggatatcaagagtataatgtctatggtgaagtcttttgtacagtggttaggtaggtgcaccaggaataatctcttctcctcaaatatattgtccctttaaaaaaaattatcccacagggagaaaaacatttagggaattggcacatttccaagtctcttcaattcgttgcctaggtttctttcaaaaataggcattattgaagacttgagatgcaagtcttagtaaatacatcaagcacattaatttttctcccttgggctaattcagcataagtatcttaaaagtatgttagaaagtactgactttaacttgctctgactgaatgctttctggatggaaccctgtataccacttttatctgatttggagatgagacactatgaaatgtgactccacaagctttctgctgcttgctgtgtcttgataacattaatgctatgtttaacagaacaattgctgaaatgacctaaagggcctggcaagaggaagccatcctcccagccctgtgcgcatgcgagctttagtgtaaggctattctggtgctattcagtattatttcacgtggctttttctttatccttctaccaagtattggttttaccaggggatagaaattgtaatcccctaaacatctctgctacattaaatggacttttgtatgtctcctttgaacactgattttttttttttaaattgtcaaacttggtaaaaagcaccagcatggccaagtttctctagggacttcatttcattttcaggttttcaatccagctataaggaatatgtaatggacttatatacagcacacagcaggcagcaaggctgactgacatgtcatagttttcatagtagtcacaaat

SEQ ID NO: 8085 - DNA, 1024 bp, Homo sapiens
ttgaagtaatttaagggtttttagacacaaattttcaaaagagaatgtaatagtagatgttggcatgtttacctcccaacgcccttccattcctgcatccctagtagtatagagaaatctcatttttcttagaggtcaaattaatttggatctaaaattgaggttccacttaacaaatatgataaagcatctttctgaatctaatgtgttctatctctaattctgattatctgtgtgaccattttatttatacatttatttatttttgtaggtaggcaagttgcacacagtggagctaaagcaagtgtagttgatgggactcctttagttgcagcaccctctttaaatgccacaaccgtagtaacaacagtttatcaggagcccattatgagccagggagcagccttgagtggtgagcctactactctgaccaaggaagaagaaaagaaacagcctgatgaagaacccatggacatggtggtggaaaaacaagaagaaacggaccacaagaatgacaatcaaatactgagtgaaattgttgaagcgaaaatggcagaggaattgaaaccaatggacactgataaagagagcatagctgaatcaaaatccccagagatgtccatgcaagaagattgtattagtgacattgcccccatgcaaactgatgaacagacaaacaaggagcagtttgtgccaggtccaaatgaaaagcctttgtacactgcggaaccagtgaccctggaggatttgcagttacttgctgatctattctaccttccttacgagcatggacccaaaggagcacagatgttacgggaatttcaatggcttcgagcaaatagtagtgttgtcagtgtcaattgcaaaggaaaagactctgaaaaagtgagtatgtttaatgtacctgctgctgaagcctgggtggttccccatactggtaatgtggaaaaggttcttaaatgagtacactgtaactgacagaaaattgaccatgttttagaatatgttctttaggccggttatg

SEQ ID NO: 8086 - DNA, 1032 bp, Homo sapiens
ccaacactgtaagaggctaaggcaggcggatcacttgaggccaggagttcgagaccagcctgggcaatatggcaaaaccctcatctctactaaacaaaaattagccgggtatgcctgtaatcccacctactcaggaggtggaggttgcagtgagtcaggatcgtgccactgcactccagccttgggcaacagagcaaggctctcaaaataaaaaagcagcggctgcattttatgcctttcaaatgctgcaggaaatagaaatggcttaagttcagtaagagaattgacaattcagtgtttttgagaagtggcaatgaaagggaggaaaatgtttattgattttagcctgtttccccaaaaggataagaaactatttggaagtgaaaaagaagggcctcttattttctgttggttcagatttcaaaggtgtgaaaactattctttttcccttactgtgacattaaatcacttcaggcttgtaccattttgtatggcctgttgttaagttggacatgacaatttgtaaaatgtgaggatcttttcctttcttgtaagttagaagaaataacctcttcagttaaaccttcagtgaaggttcttttagttttctgttctgctttctaaaaacatagactctgttctttagagcaacttatgactctcatctctgctgcacgagaatatgagatagagttcatctatgcgatctcacctggattggatatcactttttctaaccccaaggaagtatccacattgaaacgtaaattggaccaggtaactccttactttttattcatttttcctgactatgtacttgaaactagaagtttactcagttgcttttacgatgttaaaaggaaatcaaattcctatttctttgttttctttttttgtttgtttgttttgttttttgagacagagtcttgctctgtcgcccagactggagtgcagtggcacaatctcggctcactgcaacctcctccgcctcccgggttcaagtgattctcctgcctcagcttcccgagtagc

SEQ ID NO: 8087 - DNA, 1937 bp, Homo sapiens
tagactgagacaagtggaaagtaaaggttagacaagatgtaaagtgtgtggtttgagctgtgatgagcacactagggagttccagataccagtttgatgcttattcaaccatttaggttatcggtctgcgagtttgttttctgcagtgtgtgcataactagtgttttgtcctcttagaggatactctggggacattcttgagttttctttgtttattcctttccgtttaaggaccagaagtaatattcttgaattttcatttgttcagatctttgctctgtaattaagattgcgtgagagtttgttgtttgggccagttaggctgttgaatttcttgggaatgtggtttcaggcattttttggtccctttgattatatcattgtatgtggaactttttttgagagagagagttttgctctgtcacctaggctggaatgcaatggcgcggatcttggctcaccgcagcctccgcctcctggattcaagcagttctcctgccctagcctcccaagtaactggaattccagtcctggccaggaactttttttaaaaaagaggagcacgatcataaaattaagtcagattctttcctaatcctatctctgatttgtttttaattgctttacctgtttatctcccctcacccttttgttgttgttgtttgagatggagtcttgctctgtagcccaggctgtagtgcagtgacgcagtctcggctcactgcaagtccgtctcccaggttcaagtgattgttgtttctcagcctcccaaatagctgggattacaggcatttgccaccatacctggctaatttttgtatttttagtagagacatggtttcaccatgttggccaggctgggtctggaactcctgacctcaagtgatctacctgcctcagcctcccaaagtgctgggattacaggcgtgggtcacctcacccggcctcccctcaccctttctaaagcagttttactatcattctaggaagtaattgttactgttggcagcttgtattacattgctgccgttccccattataagattgagatctcttaaaaaattggaattaaatatatttggactttatcaacagtggaaagatgatagatgtttgttttaaaataactatcacctaagtaactaatgtcatggtagaaaaaataaaaaaaattacctaagcaaaaatggaataaaagtcaccttgtaacgtcaccacccaaagattaaaggaaccttagtattttattaaatatccttccgatttggtgtattttatgctttttacaaaataggattgtattatatgttttgtaacttgcttttctcaataaagcttaccacattttaaaactgaatataatttcattcttactttgaatctaggattttatggaagaccttgggttatggaacagagaaaagaactctttagaaggtaaatcttcattatatgaaggagagaggagaaccttaaactcttaacattttcttttgtttgaagaaatactaacagtgaatagcccaggtgcattttgatggtttctcaattgcagaagttattttaccttggtcccttttttcttcacctaggcctttgattttcaaacttttcctggggagctgaataagttttgggcttcaccttacccagagctgttgtgttttttaagagtgttttgtatgttggcatacattgtaatacttaatttttttaaattccactgattacaaaaaggttaaaagctactgtcatagaatattagctttgtatgagatggagatgctccaagaagagggaaatggagattgacagcctatgaatgttgcctgtttatacatatgtaattttctttctccttaaggctccagaaatgggaattaaatacatacttgtatgccccaaaagatgactacaaacataggatgttttggcga

SEQ ID NO: 8088 - DNA, 1275 bp, Homo sapiens
aagtctgaccccacccgtcttgggcttggagccaggccacctcctaaggaggcggtggttaagagcctggtgttctgttagcctctgagttctacttctttgtaccttgggatcttattccctagggttgtctggttccagtgaaaaaatatgtgtagtgcttctgtcaccaccctttgtggaaaatcggcccacactgacgtgcttgtacttctggagtgaagagaagcacgtttggcctatagtatttcaagttccacttggcttagaatatttttgttgcttccccccacccccgcaaagattcatttgcaacttagaaaattgccctctttcccagctactgtactttgctctcgagggatgaaactttggctttaatcacagattctcgaagtatctgagatgcgtaattggaatttagtgaccgcagaagcggctttaaaaatgcccttctcgccttttttcccatttacagtcgaaaagaacgatggactttttggtagtgagggaaaattaccagatgcttgtttcagtttctggatgagaatggacagatagtccaccttgcagctctgtagaggcacgaatcggttacattattagtctttccgcagttacagcatgtatttgaattttctgaagtattttggccgattcagagtttcctagatgtctgttttatatctctctcgtatgtaatggcgtggataagggtaaaaaatatatatatttaaaaaaccaaaaaggtatggaaaaaggattgctctcgacgttgagaacatcagcttttctgttttttttcaccatataaattagagtattctttcgaaaaatgggtggtggttatggtacagaccataacaggctactttgctgctacagtaaggcatgaaagagttcagcgaagttaactgtcttgcagaatttgggggattacagaatggaaaactgctatatagtattcatcaaaaatgattgcattgtgtgacttatatcgttgtatttattggcttgagtgcagggagattttagaaaaagaatctggtttttgttatcaaagatcttggagtggggatgagagagtgctgggaaatttcggagctagactggaatgagtctaaggaaacttgccagtccattataccttcagttataaaaggagaaaactcatttggtttaaattcgtttgtttagaatagcattaaaaggcgattcttcctatttaaagaacagagttgtctgccattctctcgtttattcctcctccctccc

SEQ ID NO: 8089 - DNA, 1927 bp, Homo sapiens
ctgataaaagctgtgggcccactatccagaagaaagaaaaaggcaagaattcccatgcatttttgtatccctgaagctcatctatgggtcctaagttaagaacctgtgatctagagtgagtgcagcggctcacgcctgtaatcccagcactttgggaggctgaggttggtggatcacttgaggtcaggagttcaagaccagtttggccaacatagtgaaacctcatctctattaaaaatgcaaaattagctgggcatggtggcgcatacgtgtaatcccagctacttgggaggctgaggccagagaatcgcctgaacctgggaagcggaggttgcagtgagccgagatggcaccactgcactccagcctgggcaacagaatgagactctgtctcaaaaagaaaagaacatgtgatccagtctaaccctccatttcatagaagaagcaggctcagagaagggagacttgctcaaggtcactcagtgagtttgtagcaggactgaggctagactcaatccctcaagtctgtcaacagtggcctttgggcacagtcaagagttgtatgtgggccgggcgcagtggctcacacctgtaatgccagcactttgggaggctgaggtgggcagatcacgaggtcaggagattgagaccatcctggataacacagtgaaaccctgtctctactaaaaatacaaaaaattagccgggcatggtggcaggcgcctgtagtcccagctactcgggaggctgaggcaggagaatggcgtgaacccaggaggcggagcttgcagtgagccgagatcgtgccactgcactccagcctgggtgacagagcgagactccatctcagaaaaaaaaaaccaaagaattgtatgtgaagagtggatgctgtgcatgttatgcataatccaagcaaagtgacactatgacaggctctcacaatgccctctgcttttcctttatggcacttctcagtttgtaaccatatacttacttgggtaattatatacttgtcttctcctatacactgtaagttcctgagggctccctgagtgcctggactagggtttttttcttcaccatcttatccatggggcctggcacacaataatggatgtaaggacatccattattcagtaaataataatggatgaaagtacatggtgaatgtgtgtatataattacataggtatggagacagttgttttttcttttgagactgggtctcacaatctcagctcactgcagcctccacctcccaggctcaggtgatcctcccaccccagcctcccaagtagctgggaccacaggtgcacaccaccacgcctggctaattttttgtatttttggtagagacagggtttcaccacattgctcaggctggtctcgaactcctgagctcaagcagtgtgcccacctcagcctcccaaagtgctgtgattacaggtgtgagccatcacgccttgcccagtttccattttctaaggtagattcaagtttagtgggattgaagcagagaactgctagtaagctgagaagtgccccagagcccaagcctacagatgagatccagaaaaaaaacagtaggttggcattcagattgtcacccaggctggagtgcagtggagtgatctccactcactacaacctccgcctcccgggttcaagcgattcccctgcctcagcctccgagtagctgggattacaagcacatgccgccatgcctggctaatttttatatttttagtagagacggggtttcgccatattggtcaggctggtctcgaactcctgacctcaggcgatccacccgcctcagcctcccaaagtgctgtgattacaggtgtgagccactacgccagcctcagattatttcatcttggccattggttgggttctgagtgttgtcagctgctccatctcaaaa

SEQ ID NO: 8090 - DNA, 1033 bp, Homo sapiens
ggagctgctttgcggtggggatagtcgccgtcaagtggacaagatttgcccagagttaggaggtcattctcaccacttaaatgtagggttttcaaccaatcatgcgggatcccagtcgaaagagcgggactatatctctcccgtaggctttcccaggaattttaaggcgttagagagtcctggaagtgtttacttggggtctaacctgatagagatgagtccggagtccaggaaaggggcgcagcgggaccgaagtggggggggggtgcggggggggctcttctcgaagcattcggctgtagccagcgtatggtggtagtctgtgaacctgccgcaccgagacaaacacaaatagaaacagttatgagagcaaggaatttggagccaggagacagaaggcagtggggcacaactctgctgcctcttctttgccaccccaatacactggcctctttctccttcctcctggctttcttccattggcccaggaagtgtggggagttgccatgacaactctgtcctcttaccccttcggctctttatgccaaaatggtgggggcggggtgcagggtgcggggaggagtgcgacaggcggagaaaggggggctgaaagggggcaataaaagatacggttcattccccatccagctcttttctcaaaacccacatgtgcctgcctggcctccccgccagaacccagaaaaatgctccctgagaaggctgagtccgcgccgcccctccccgccaccccccccccccgtccaggaactttgggggcggctgcttcacatgatggggccagggtgagctcctctcgtgcggccaggagaacatgggaaggctccagggtttcgatcctatgcctgccgggccggccctcccgcgccgcccacgcgggcctacccgggtgagggcggagaccggaccgccccggggcctgggggtggagcttagacgccgagctcgccgccaaaccatgaaccgatgcccccgcaggtgccggagcccgctggggcaggcagcgcgatccctc

SEQ ID NO: 8091 - DNA, 1050 bp, Homo sapiens
gagccaatcccggcagcgccaaagaggggaggaggcggtgacagccgcggggagggggcgggaggagagaggcagctcggctcggctccgcgctcagctccgctctgcctccggctctgcgctcacctgctgcctagtgttccctctcctgctccaggacctccgggtagacctcagaccccgggcccattcccagactcagcctcagcccggacttccccagccccgacagcacagtaggccgccagggggcgccgtgtgagcgccctatcccggccacccggcgccccctcccacggcccgggcgggagcggggcgccgggggccatgcggggccagggccgcaaggagagtttgtccgattcccgagacctggacggctcctacgaccagctcacgggtgagtcagtgacgtgggggtcgcgggagggagggtggattccattcctccagacccttccgcctctccgaccccggcctggcccgcacccacactctgccccattcccaggcactcttatggccggtctgggcggcaggacactgggggttcaaagccttgggtcccgcaggggttggggaggaacagaagaggcaggtgtggagaggcagcaggtgtgggcgtatgtgacacagggctgagagggtgtctggagtgggaggtgttacgtgcgtgagcacctgtcattctgtgtgtgtgtgtgtgtgtgcgcgcgcacctcccacagctggttgccatgtgccctgggcttggtgacagctagggtgagtgtgattgtatgtggcagtgcaattgtatggtctcgtcagatgtttgagtttgcgtaggaccctggttgtactgatgaagttgttttgaccatgtgtctctatgtgcaacgatgtgttgtgagtgtgtaattctgtatgaagtggtgtgtaactaccagaatgtgtcagggctctactttagggtggcttgtctctttgtaagccttcatgaccataagccctctgggcaagaatttgttaaagtaggttgtgttgtgttttgtggttgtgagattagtg

SEQ ID NO: 8092 - DNA, 1024 bp, Homo sapiens
cagtctccattccctgctttccaatcacttagcttcctgcagcccccacccttgggcacttggagccatgagcatttgctctgcctcctacttaagttcccagtcagtgtctccacagagctagccctattgatggtccctttcctgccctgtactctgagctgttctcaagaaaagctcagcccccctgcagtcctgtaaccctaccagcttggtttacacaaacatcctggctggggactgagaccaggacctgcaggcctctgtacccacttcccctgtccttagacctccctctgctggggctgaacttgcgtcagctcagcttttacttaccccatgccaattgtggtgaaggcactgcgtattagatcgtttgtcttgtgctaaacacagcccaactctgatcctgacatgacattcctcaggattttggacttccacagggtcaggaagacatgctctggggtgagttagtttggaacacagaaaccattagtgtaaagtgatagcagagtggaacatttttatgggatggttggcaagtctttaagttgatgtggaggaagttctgggagcaaatggttaacagagagcaatctgtgaggagctggagagggttacgggagcggtgtctcgaggctctgagacactcaccacggccttactcagttctgctcatatttgttcccctggcacaggggagcaaagagggtctggtccagtttggagctaatgagctcaagtttcctgctgtttgccatgctgccctttcctctgcttccttcctgatgacttcattaagtttcctatagcatagcagaaattgaaggaaagctcctgagactttggggcccagggcagacacactctcctcctccttcccctttttgtttctcaggcaatctacacagctatttcctgtggggaaatctccttgaagagtctgccagattcctcttggaaccctctcagagtagggacttgggccctctgaccctttctctacaggcttttaccctgc

SEQ ID NO: 8093 - DNA, 1025 bp, Homo sapiens
tgatcagagtgaatgatcatcccctttcttggtctcccctttcttcctagctcacttctgatttgatgtgtagtgcctctcccctgattgtccttgcctttgattcatgatcttacaagctgaagtcacatctggcctggctatgaacagtcccttctttctgtaaccacagatagtcaagtttcctggagtcagtggaagtctgaatcctccccgcatagaaaatcagagagatgttgtgggagaaaaaccccacagaataaaggctctagcttagtcttgaaagcgtaccctatacccaaaggctgggatgccctaaagttcaatccaggcactggataagaagactgagttggcactgagcaatgaaaacaagtagcagatggtgctgaggaacatcccaagactgaagaaatgtggttcccagaacgggagaaggaaggagacattggcaaagtcttactcagcaactgtgacagcctggccagggaaagcttcaggataaggctgagagcacatttgtggtgtcagggatattggtgagctgagatgctcactgttctgtaacctcttctcatgctcttttgccgtactcagagtaaacagacttggtggccaggctgggctggtcaggaaaggcagggaatagaagagatgagaaagtcgcggtgggtgcagtggctcacgcctgtaatcccagcacttttggaggtcaagtctggtggatcaactgagttcaggagttagagaccagcttggccaacatggagaaatcacatctctactaaaaatacaaaaattagccgggcatgatggcacacacctgtaatcccagctactcaggaggttgaggcatgagaattgcttgaacccaggaggcagaggttgcagtgagctgagattgcaccactgcactccagcctgggcgacagagtgagactctgtctcaaaaaggaaaaaaaaaaaaagagagagagagagattagaaagttggccaggctcaatggctcacacccgtactccca

SEQ ID NO: 8094 - DNA, 1060 bp, Homo sapiens
gacctgctttggtctaagaattctcagcttctaagtatctttagtgcagtaaggcagagaagggttgccctggcttaatgttccgcagatttattttcttccatgcagaagtacagaagtatgtacgctgtgccaagccaggggctacaaaaatgcaaaaaccatacctgcccttgaggccttcatggagtatgtatcaggatcactactttcattttagacctttgcctgtgtgcacaccttagacctctcagctgatgtacatgaacggagtcttcacagcagtcccacctgaccctttgtaagcctaagaaggacagataaacctccccgttctccttgaacccccagtgaaatattgtctctttgcagatccataaactattggcccttattcagagtgagttgccacaagcagagccatgatcatgtagtatctctcattcttgcctcagtttcataaaaaaggcaaaagcagaaccctcgttaggtgtccttagtaatggcaggaccccagaagttcctcagcttagcaaatgattgagcttattagaaagcccaggtaattacacccactaaaaaaccttcctgtagctagtccccagctgagaatagttccaggcactgttgtttgctacctggagtcaatttaatttgtcagggaggattatggggttgttcaggggtggtggggaagagcacaatgggaggactcattagcattgttgaaatactaactcctagcttagagttactgatgtatcagtctgaatcattcttgtcccaacccaaaatggaatattaagaccaaaaatgacacaagcttactgcccatggccatacattttttttttgactagtcctgatttgctggacttttaaatttaactttattgaggtataattaacatataataaaatatgtttatgtaaccaccaccacaatcaagatgtagaacatttccatcacccaaaaaatgttctcttataccactttgcagtcagtcctcaccccaagtctgggccatagacaacggctgatatgattattttcactgta

SEQ ID NO: 8095 - DNA, 1021 bp, Homo sapiens
tgtttcccaaatgtgtctgtggagccccgttataaaagtctgcttcagatcttaacagacaataggaaatatagtcttaatagctcctggattaatccagtatagccaggaagtatgctttgaaattgttagagtccctttctcagtgatgaactgagttgttttttctttctttcttttttttttttttttgagatggagtctctctctgtccccaggctggagtgcagtggcgtgatcttggctcactgcaacctctgcctcccgagttcaagtgattctcctgcctcagcctcctgagtagctgggactacaggtgcacaccaccacacccagctaatttttgtatttttagtagagacagggttttaccatgttggccaggctggtctcaatctcccgacctcgtaatctgcctgcctcggcctcccaaagtgctgggattacaggcatgagccaccatgcccagccaactgagttttttttttttaatcccaacactgtagaatttactgacttccaattccctccagagtaacaggaagacggccgaaaggctttaattatccaaaatggggctttgagacaactaaagccactttgaagtaaattattgatagcattatgcattgtttttctttctttttttaagtaacaagtcaaagtaattagtgctatttttatctttgcagattcactgaattataagggattttaaggctgccttaaaaaaaactcctcactggctgagtgctgtgttgctgtcatttatgtaagctagaggccctgctgagggaatgtgtgtgtgttctggggctgtttcacatgccactggtgtaggtgtttggacgccttactgctcttggcggtaaggtgtttgctcaggctcttcgtggcattaaaggttctcttctgtgtttctcactgaggaccttcccaaatgtatattattaatcttataagccaaaagagaaccaaggacactcttataacaggcagctgcaaagccaagccatttagt

SEQ ID NO: 8096 - DNA, 1048 bp, Homo sapiens
ttaaacactgaaagaacctaagaggccatctatgtcagtctccttcccaaagcataaatctcatttgttggagatatattcagcttctgtttgaatacttagagaaacagtgcttaatactttaggttccagaccattcattcattttttatttatttatattttttttgagagggagtcttgctctgttgcccaggctggaatgcagtagcacaatctcggctcactgcaacctccgcctcctgagttcaggcaattcccctgcctcagcctccctgggtagccgggattacaggcacctgccaccatgcccagctaattttttgcatttttagtagagatgggatttcaccatgttggccaggctggtctcgaactcctgtcctcaggtgatctgcccgccttgaccttccaaagtgctgggattacaggctgagccacggcccccagcccgttcattcttttaaatgatgagtatctcatatgttgcagtctttctctttataacctgaacctgttgattccatttctgcctttagttacaacactaaaaaatttaccctgttttctaaatgttaacttcttcaaaggagtaacatgtgtactactgctgaacattctttctctctcagctattcttcatatgctatggtttcaaaatctctgacatactatgattgtcctttggacatattcttacttcttaatttatctcctaaaatatggtgttagggtctgccttataccaaataagcattcagtgaatgtttcctgcattgaatgacatctagaactggaacctagatatgtagctcagattacaaggagactatttatacgcatgatatggacatattttatttgcagcctccaattgcattatgttattcagcagctgaatcacattgttggttcatagcaaacttgagtcccactaaaaccttcaaatctgcttaaagtgacctgccttcaagctagttctctcccgtcctacacttgttcagttgatagtggtattttgttttggtttgtgtggtgctgcttttta

SEQ ID NO: 8097 - DNA, 1053 bp, Homo sapiens
cctggacaacaagagcgaaactctgcctcaaacaaaaacaaaaacaaacaacaacaacaacaaaatatcttattgtattgtattttttgtttgtttgttgtacttcgagagacaaggcctctctctcttgcccaggctggagtgcagtggcataatcatagctcattgcggcctcaaactctggggctcaagtgatcctcctgccttagccttccaagtacctgggaccataagcatgtgccactgtgcctggcttgtgccctgtcttttgtatctcgttttctcccactaaggtagggcctgccgattgtggcccgtttttattggctcaaattaggaactatttctagaatattgctcccaggagaaagggagtcaatcttgagctcagccctctgtcctgaatcaagctacctgactatgaaaaagatctctttagtggttccaggtgcattctctgagagtatcatttgaagccttgtagatatggggcctcaccctgtgtaaagtctcagattttataagaacgtgaacagccaacctgaggaaccttataagaacctttcattatatttgtgagttagttgggagagatcttgtatgtatctggtgaccttactttaactattgttttggcaaatgattaaacattcctttttgttggttaactacactgacattttctctttcttattttattttatttttgagacagtctcgctctgcccaggcgggagtgcagtgacgcagtcttggctcactgcgacctctgcctcccaggctcaagtgattctcgtgcctcagcctcctgagtagctgaggttacagggatgtgccaccacacccggctagttttttgtattgttggtagagatggggtttcactatgttggccaggctggtcttgaactcctgacctcaagtgacccacctgccctggccctccaaagtgctgggattataggcgtgagccactgcatccagctcttctttttctttttctttttgtagtgacaggatctcactatgttgcccagccaggttggtcttgaa

SEQ ID NO: 8098 - DNA, 1854 bp, Homo sapiens
cgggtatacaccactacacccagcttcctttgatccattttgagtgaatttttatatatgatataaagtaagcatccaacttcatttttgggcacgtggatatccagtttccctaatgcccactgctttttttttttgtgacagttttgttcttgttgcccaggctggagtgcaatggtgcagtcttagctcactgcaacctccacctcttgggttcaagcgattctcctgcctcagcctcccgagtagccaggattatcggtgcccaccaccacactggcctaatttttttgtatttttagtagagacagggtttcaccatgttggccaggctggtcttgaactactgaccctcagatgtgagcctcggcctcccaaagtgttgggattacaggcgtgagccatcgcacccggcccccactgcttttctgagataactacagctcagatttcttaacttgagtcaggctgaatttggaacttaactgtgattagagatagaaatggagcctctcccgttttttcctacatatttccattcctttttgtttcttaggtttgctcattcctctgctgtttaagagatagcataatgtagtggttaagagtggggactctagagtcaggttgtctgagtttgagtccttgctgtaccattactttggacaagttatttaaccattctttccttgagttttctcagctataaagtgaggataacaatggacctatgtcattattgagattactaaatgacaatatatataaagcatgtagaatagtgcctggcacatattcagtgctatatacatgtttattattattatttttaaaaatttgttgtcctgattgtgcaagtctgggaatcttatcagccccttccatacccaactttgttcagtcctttttctgtactcatctgggcttagtagggaccagagacacaaaataatatttatttacaagctgacatcaggggcaatactggaacttaggctgtcagcctgagcctttgcatcattgatgggaaaatagtttgggtgggaagagtttgtgttttctatcactttcagtcctttgaggagatgtctgaccatgcaaccttggctatatcattgtggtaaaagaatgtctccaaaatgaatacacgtatacctgagaggctattaaccaacatgttcttatctctggttggcaggattataggtggttttataggttggtgcaaaagtaatggcaaaactgctattacttttgcaccaacctaataagttttctttcttgtattttaatttattaaaacatttagctgtgaactttttttgtagatactctttatcaggttgaagaaagtcctttctgttcttagtttgttggctgtttttatcatcaaagggtgttggattttgtcaaatgctttttttgcttctattgagatgattttgtggtttctatttcttattctattgataaaacgtactacattaattgattttcagatgttaaaccttgcattcctgggataaatcctacttggtcatggtgtataatttttatattttgcaggactcagtttgctagtacaggatgagcatctcagatctgaaaatctgaaatctgaaatgctttaaaatctgaaactttttgagtaccaacatgatgtttaagggaaatgctcattggaacaatttgtgtttcagatttctggattagggatgctcaactggtaagtataatgcaaatatccaaaatttaaaaaaaaaatctgaaacctaaaactcttctggtcccaagcattttggataagggatattcagcctatgttttatgtccatatgcaatatctgcagacca

SEQ ID NO: 8099 - DNA, 1022 bp, Homo sapiens
ttttactgttgctaataaccggactcagtatacatctaaagtagcaaaaagatccagtcatggacaggttcagtggctcacgcctgtaatcctggccctttgggaggcagaggtgggaggatcacttgagcccaggagttcaagaccagcctggccaacatagtgagaccctgtctctaaaaaacaaaataaacaaagattagctgggcatggtggcacatgcctgtagtcccagctactcaggatcctgaggtgggaggatcatttgagcccaggaggtcaggttgaggctacagtgagccaagatcatgccactgcactccagcctgggtaacagtgagaccctgtctcaaaacaaacaaatcagttttcttaagagattattggaaagaagtgtttgaatgtcaccacagtaaggccagatcagggaaaaatacaggtagtactaagcctgcaaatgtttaccctttttttttctgacatctattctcacttattaaatgccagactttgtgctactctttcttatgctaccttctttaatcttcaaactctatagggtgtattatgtactttttaaaatatactttttcccagtgaggaaactgagtcttaaagatgttgtatattgtggaaggccccatatttgttccttggcaaagctgagaattaataataggtcttcttcttcttcttttttttttttttttggagacagggtctgactctgtcgcccaggctggagtgcagtggcgcgatttctgctcactgcagcctccgcttcccaggctcaagcagtcttcccacctcagcctcccaagtaggtgggactataggcacgtgccaccagacctggctaatttttgtatttttttgtagagatgtggtttcaccatgttgtccaggctggtctcaaactcctgagctcaaatgatccacctgccttggcctcccaaagtgctgggactgcaggcatgagccaccatgcccagcctaatcataggtcttctaagtccaagttc

SEQ ID NO: 8100 - DNA, 1046 bp, Homo sapiens
aggagagttaaagagagatcaaaagagatggaaatgaccaacagtagaatttcttaggtagcaacacctccttttaatataaaggactattattgctgcctatggatagttgtatgattgttaggctctaaaagcataggattaaagagaaaacacaataatgatgcagatcttcagatgttggtatagttgttggatttataataagtacacatggtttatgtctataacttgaatgaaattacacattgtagtactaaacaaggtggtagtagtagttgtttccgcctgcatcttctgattcccttctggttttactttctctttcattctattttctttcctttttgtcctagctattctatctctggcctctgtgatctctgtggcttttctctcattctcgtgatctgttgtcctcttcctcattatcctgttccattgtcttgtccacattgccttctattcttcgttctggtctgtctcctgagactcagggcttcctgttattctcctcctatccccattttgtatcctctgctctcttgatgaatcgacacttttattggtatgaagtgttctttgtgttattatagtcatgcattttactttttacatgtgtcataaactctagaatacattgccctcatttttgcttaaacaagcgattatcttttttctttttttttttttttttttgagacggagtctcgctctgtcgcccagcctggagcagtggcatgatctcggttcactgcaagctccgcctcccgggttcacaccattctcctgcctcaccctcctgagtagctgggactacaggcacccaccaccaggcctggctaattttttttggatttttagtagagacggagtttcaccgtgttaggcaggatggtctcgaactcctgaccttgtgatccgcccacctcggcctcccaaagtgctaggattacagacgtgagtcaccatgcctggctgcgattatctttgaaagagatttaaaaatgtcttttatatttatcttttctgactcagcatttttt

SEQ ID NO: 8101 - DNA, 1039 bp, Homo sapiens
attttatattaatttaatttaattttattttttgagatggtgtctcgctttgttgcccaggctggagtgcagtggcgccatcttggctcactgcaacttcgacctcccgggttcaagcaattctctgcctcagcctcctgagtagctgggattacaggcgcctgccaccacgcccagctaattttttgtatttttagtagagacgatgtttcaccatgttggccaggctggtcttgaactcctgacctcatgatccacacaccttggcctcccaaagtgctgggattacaaggcatgagctactgcgcctggcctaatttttttagtttttaatttttgtagacatgggattctgctttgttccccaggctggtctgaaatttctggcttcaagtgatcctcctgccttggcctcccaaagtgttgggattacagatgtgagccactgcacctagcctgtttgtgtttttcttttgtatacacctagtagtggaattgctgggttatgtggtagctctgtatctaacattttgagaaactccagacttttccaaagtggttgtactatttttatttttatcaatattctttgagggttctaatttctctactattaacttccctctgtgatgtgagagccagagacactagctagaggaattgatgtgtatttataattcaccatatgaattttgggggacagatgtcaatctggaacatgtgtgtaatgatttacttgctcttctcctggcatcaaatgttctttccatagttgtttccagttttcttttattatgaatgctgtttctttgtaagcatgaaatctatgttcatttgatatgcaaaagtagaatcatgttttaatatgccttttaaaaatgaagttgaacattatagaaaaatgttgactttccctgttccccttttttgggagatggaggaatttgttgactgtttccttggcctatctttgttgttagaggttgtcttagtctgtttgctgttgctataactgaatacctgagactgaaaaatttat

SEQ ID NO: 8102 - DNA, 1050 bp, Homo sapiens
tctttctaagaaaatctttaaaggagttgtttttcacaaattgtaacagttccttgtaattggagtctgtaggcttgtcagatcttcagaaaaggtattgggaaagggccaagggatgtttattactaatccatggtaagaggtttttgattttctgtcagtcttcaggaaagcccggaatagacagggtcttgcctgcttccacgctgcctgtgtagcagtttgcttctgttgggctgaacccattcccagcagagcacagatttttcttcttgctcctaaaccctcatgtggagcctgcacatgaatcctgcagcctctgtgaaaaccttaaactatcacaaacagagccagctccttgggcagatgggacggaagagggaataggaaaacagattactctcattcctctcagcatctgccttaagtccctgcgtcttaatttttattgtttttgcttggaaatttttgaccagttagagatacactgggaaattacactaaagaaaaatctcatggcttaagtagggtttgacataaggctctaggctcatcctattagctgtccagctgatccttgaaagtagttctcaaagtccaaggatttgtacgaagtgtgatagattacagtttcttaaatatagctctcgcttcttactttttctctatatttttattaggatcaatatgccaatgcatttttgcatgatgacaacatgaattttcgagtaaacttacatagaatggtaggtgtttcttttgcttcttgttttttcttagaggaaattttttgtatgtcggcagggttgggatgaaattgatcttactagaacaaatgtgggtggaaagttgtgccaaagggctttgcatgacggctgttcaacagacccatgcttgttgttgggatttttgtgtgtcatggagctgtttcttaatcaagagttttggaagattcacaagcgtggcaatgatactggatttctttttttttttttttctttttttgagggagagtctctctctctctctctcccccccaggctggagtgc

SEQ ID NO: 8103 - DNA, 1072 bp, Homo sapiens
ccttaacattttcccctctctatcatgggtacgtccagcctaaagacttgttctcaaaattcagcaagatttctccttgttagggaggaatcttcactgatttcaagcaggagacccatcaaagtaaaactcatttatattcaatacagatctttccttcaggtagaaatcgaagtttctttaagaagggccttaaactctttggggatacttggggcaggaagtggaatcaacatacccttcccaggatgttgggagaaaaagcaccgttcttggagactggccctagataggagagcaggtcactgggcttaatttggggaataggaagggggctctacaggcttaggaagagtagataaaagttttgtgatgagcacttggtcctccctctgttgtggaaaaagcttatttagtgatttttttgcctgctggcaaattggctatgtgggtagaagtgttagatggaatatgttgcaggctaagtgcattttatctgttctattccagttataagttctgtggaactcccactggatgcagatgtacagaccagtaatctactgataacctttttaaagtatagctcaattgtcatgcaggacaccaaaggtaagccatagctattttgggggctcaggaagtcaaaggtgtggcaggcagctagcatcaaagagcaacattaatattttgaagctttgacaagatgaactattggggccttgtgtacatggtcttcattgctggaaaatagtgatgtctcacctaattgctagatggcaattaggtggtgttgggaaaacctgaagctggaggggagtactcaaaaatagaacaggaaaaaaattggtctctttgaaagctagcaaatcttcttagcagatcttggtaagtagatgcagactcttatgtgtgggaagtggagggattagcacgcttcagggaattcccttttgaggacaggaactgaaagcatcagctcgtggtgagaattagaggactgtcgtacacagtacagtaggaagaggtgagattcagagggactctgttcttgaacacttaaaatagaagt

SEQ ID NO: 8104 - DNA, 1745 bp, Homo sapiens
aagacaaggaagaagaacaccaaagtggttttttctctgctttaacaaatatggtaagtcctgctttttttttttctcctgaaaaaaacagaaacagtgtggtctgcaggggtggacaaatcgggctccgaagttcagatatttgaagtgatggcatgatgacaagagagaggctgctcagagcagattttcttggggagtgtatttcctttactgagtttctttcttttttttttgaatccccacttttgatgtacctttagtgagattcaaaaccaagtgagatggggaaaggagagctttggtttctctggcacttagtttttccacattaattaattaattaattaattttttaaaggctaaagaaaaggtacacattaagccagaatttgcttcctaaagagttggctccgtttaggcactgaccttgtggaacacggtatagtagggtttggatctgagtgctctcctgaatgctcctttgctgtctgccatggctgtttgatcctcatagctggtcctagggttgagcgatcgtgcagtagatctgtgccactcttctaatagcttagggtttgggcttagaggtctgaattttagggaagttattggtccagctggcaagactccagggcaaggtttcttggcatttggtaccagataatctgggactgattttgaagagataaatctaggagattctagaatctaggcagattcagaaagtctgtctttcgggcattattatccaagtattcagctctagggcaagacaattttttggttagttgcaagaagtagttgccccctctcctcctccacttctgcaattctttttcctccactgcttacgaattgttccttctgccttctcagcctgttctcaggaaggggcctgataaactctttaactccaaaatgtaaatgagtgaagtctctcaggggctagagaagtatgagttttgtactggtgtttgatgaaatgaattagatacaattatactgctcccagatatctctgcctttcagtcaagttttcagaaagttttgtaccaaacacatgaagctctaggagcataggtttgtgtatagtttcaagcataattaaggaggtggaagaggtattttttagtgggtgtaggcatcttagtgcttctgatatcatacacattagaggcagcctactccatttacttattcacttgctctgactaggacacaaactaaagattttgttatctgaaaaatggagagtggatctcatatagacagctttggtctgaaacctgaatattgttcccaaagatagctttatgttggttgaagtcagcctgcttcctgtgaagtttttcctaagttagtttctgacttcaaataagcaacttctaggaaagatacagagtgatgaagatgtgtaggttaactgtcagagggactaaacttacacactgaaaaggagagttggacaaaagtactaggctttttctttaaagcgaggtgatttagtaggcaagatgatttactaggcaagatgatttagtaggattctcattatttcatttattacttatgagtcttttaagattttcaaagtgggctggttttggtgtgtgtgacttatggcctagagttccaagttctccccaggtggaagcagcttgttttcttcactgataaaaggcttcctaggcataaagctcctctcatatcctcctgctataagtttgcaattccccttttct

SEQ ID NO: 8105 - DNA, 1066 bp, Homo sapiens
agggtgaggcaggaggatccctttataaagcttcggagtttgaggccgggcgcagtggctcacacctgtaatcccagcactttgggaggacgaggcgggcggatcacaaggtcagaagatcgagactatcctagctaacacggtgaaaccccttctctactaaaaaatataaaaaattagccgggcacggtggcgggcgcctgtagtcccagctactcaggaggctgaggcaggagaatggcatgaacctgggaggcggagcttgcagtgagccaagattgcgccactgcactccagcctgggtgagagcgagactctatctcaaaaaaagaaaaagaaaaaaaagcttcggagtttgagcccagcctgggcagcatagcaagactctgatcctaaaaataaataaataaataatttttgtataattaatttatgcaaaataggttttgttttgttttttaaaaggcccctcaataaataaatgggagccaggcatggtgggtcatgcctgtcgtcccagccttttgaggggctgaggcaggcggatcacgtgaggtcaggagttcaagaccaacctggccaatatgatgaaaccccgtctctagtaaaaatagaaaaaaatagctgggcatggtggtacacacctgtaatcccagctactcgggaggctgaggcaggagaatcgcttgaacccaggaggcagaggttgcggtgagctgagatcacgttactgcactccagcctgggcaacagagcgagactccatctcaacaataacaacaaaaaatacaaaaattagccggacatggtggcaggcgcttgtaatcccagctacttgggggctgagactggagatcgcttgaacccgggacagaggttgcagtgagctgagattgtgccactgcacttcagcctgagcaacggtgtgagaatctgtctcaaaaacaaaacaaataaaaataaaaatgacagctgggcgcagtggctcacccctgtaatcccagcactttgggaggctgaggtgggtggattacctgaggtcaggagttcgagaccagcctggaca

SEQ ID NO: 8106 - DNA, 1033 bp, Homo sapiens
acctcaggtgatccacccgccttggcctctcaaagtactaggattataggcgtggtccactctgcccggtcagcagctgaggtctaaattagtctcccctggtgctaaggtccctgggtgggggattaagagagtagcaggattgctactctccagactgggaagatatggagaccccgctgtagattggagatggggtcttagtgcccataaagctccctatccagtgtccctctttgtcatcccaggcaggggaagctgaggcctcaaactgttcccctcctaagttctccctggacctgaaataaagcccgatagactggcacctctaccctcacctccctagctggtaggaagacaccagaggaagggactgtatgacctgtccaatctccaatctacagttatcttggccgtgccctgctgccagcccagcttctcataacccagtgcctcaggaccccaaggaatgctattgcaccccacccccaactcttcctttgtagatctggccagcctgaaggacatttaccagccaactgccaccagcaactcaccctgagagtgccaggtaacatctacagtgggtctgtgtctggcactgagtgtacatctagcccattagcctgagtgtgtgtgtatgtatgtgctgctgagctagggagggcctggatctgtttatatgtgcaggtaagggagtatatacatgtgtttgtatgtgggcatgtatatgcatatgtttatgtatgtgtctgttggttaattaattcattcaaatattattcattgagccctctttaggtactaggcccattctaggtgctggggatatgatgttgaacaaagcagagaagatgtgactgctgagtgtgagtgaaggctataaatccgtaaatgagggtgtgttgttaaatgtgtggcttagcagtgcgactgtgttgagttatggggctgctgggacagtggttgtgtgactcggttgggtatttgtaggttcacgtcttgtatgtatatgtttgtgtatggagggaga

SEQ ID NO: 8107 - DNA, 1026 bp, Homo sapiens
aagcaccccaaggaggcattccacagcaactttgtgtccctcgactgtgaccagggcagcatggtgacccagcatggcaagcccatgttcacccaggtcagcaacccagctggatgtggaacaccatggcacctgggtttgattcccatcctctctcccagtgtatactcacagctgttccccagggaggcataatgtgaactggcaaaataagaagggcgggtaggcatgttgcaaccgtcagcaaacatgtattgtgtttgtatgggatagttttctgggccccaaggctacacgagtgaacaagagtctgccctcatatagcttagagcaggtgggtgtatcactagccacatggggagaggacaaggatctgttaagcttttctactgtgtgtctgtgtgtgtaagggccaggtatatgggtggggggtactgtgacatttatgcacccagatttaatgtgcaggtgacaaaagtgtatgcaatgggagagttgtaagcaaatgggagactgtaatagacataccttcaggtatggtatgtggggagggggcagggttctgacaagcctgtccccaggtgtgtgtggagggccggttgtacctggagttcatgtttgacgacatgatgcggataaagacgtggcacttcagcatccggcagcaccgagagctcatcccccgcagcatccttgccatgcatgtgagtcgtgggcaggacccaggatgcaagagtgaaggcaggcgggggaagggtggaacaaggtctgccatttcccgactgactacttagacagagggttagggtttcttcatctgaacagcaggtttaataagagactatcctctctcaggagtgtcacaatgctcagatgatagggcaggtgagcagaggcaacccaggtgtcagtgttctttcttgtcttttctcccactctaggcccaagacccccagatgttggatcagctctccaaaaacatcactcggtgtgggctgtccaattccactctcaactacctccgag

SEQ ID NO: 8108 - DNA, 1047 bp, Homo sapiens
agtaggtaaagggcacgagaagcagaaggagatcatcaatctcagaaactctgttgtgccaagaggcccactgtccaggggagtgatgaggagagacccagttatgtcaagtggatgaaagcggaaagaggagaaactgaaaaatgtctgggagggagaaccgaagccagactccattatcaacatggaggaagtgtcactctgcgccctcgaggtcaggcccaggttgccagggcccctcctaggatgaaacattctgcactgggactctcagtcttttttttccctccttgggtgtctagaaaatagtgaacaaaggatctggcttagagccagagaaaggtatcgagaaatccatccctcctccacccacagacctgaacttgaaccccaaaccacagctctttctgctgttacagttccaggcatttgaagacattttctctctaaaatactctgagtgtgcatgtgtgtgtggtatgtgtaattaaaatgatactggctttgaatttcctctcaaagcagagatccgaagttttaacctgacctctagccatggtcaccacggagacttgcctcctcccataaccttaagccagcagatcgtgccctgggtgctgctctccaggccaccccctcatgctcaccttttcttgtgatgtctgccccacgttcctctcctcctcctggagacaggagccatgagcaggtcacataggctttcagttgccttgtgtccacaaaaggggccatgagcagtccgagcgccgagctgtgatccgtgcctgagtcagcctccagaggaacactaaatgctcactcgcccatttcttggttttgcttctttttccttgatttgggggacttgtccctaatatgccacagaattttaattttttttttttttttgagatggagtttcgctcttcttgcccaggctggaatgcgatggcacaaccttggctcactgcaacctccacctcctgggttcaagcgattctcctgcctcagcctcccgagtagctgggattacagatgcccaccacc

SEQ ID NO: 8109 - DNA, 1049 bp, Homo sapiens
aaaaaaaaaagtttgagaatcactactcttgaaagttgctagttgatcagcttaactgttatttttttttctgattagaactgcatggttgtccgggcatggtagctcacgcctgtaatcccagcactttgggaggccgaggtgggtggatcacctgaggtgtgcagttctagaccagcctgcccaacgtggcaaaaccctgtctctactaaaaatacaaaaattagctgagtgtggtggtgcatgcctgtagtcccagctactcaggaggttgaggcaggagaatcacttgaacctgggaagcgaaggttgcagtgagccgagatcacgccattgcactccagcctgggtgacagagtgagactctgtctcaaaaaaaaaaaaaaaaaagtagtgtatggttaaatatcatagatgtatagattttaaccttccctccctctcccttctcaaaatccaggaactagcggaattactggaggaagaaaaactaagttgtgtgccagtgctcatctttgctaataagcaggatttgctcacagcagcccctgcctctgaaattgcagaaggactgaacctgcataccatccgcgaccgagtctggcagatccagtcttgctcagctctcacaggagagggcgttcaggtgagattacaggaaggcttggccacctggcaacatgacagctaaccgaggtggtctgtctcattggttgggctgatcttgatgggcagatgagccattccaagatatgaagggcatggaggaatttggttcttttctgcttagcaaccaatcagatatcatgaggtgccccaacagtgccccaggtaagccaccccacatgtgcagcaagcttcccctttgggagggatgtgagaacagaagactgaggattgtctctaactctaggattctttgatgattgattggattggggttttgtgttgtgtctaatattacggatgctaaaatgcctgtacttccaaggtgatagccaccaataaccatacacgtactagtcatcctagaagtgtttttgtttctt

SEQ ID NO: 8110 - DNA, 1027 bp, Homo sapiens
tgaagttcatgtttcttaaattgttttatttaatgtcacaggaatataaatcctacatagagatcatgcccgttttgctcactgttgtacttggggcacattaagggtgtttaatgataattgcgtgaatggatattttggccaaaaaatgcactttaaaaattaatgtcattgtatttatactgcaaaactcagccctatgataaatttaacttctaatcgctgtctcccttcatttgacagttaaaataaaatatgggcatatatgtatagatgcacagaatagacttattctggtctctttcatccagcctcttaaatcagcttactttgtacctttcaggcagaaccctgatctctataaatatcctcttccctatttagcaaaccctgataatcctgtgatcccatcctcagtagttggattaatatgatgctgtattatatttgcacttgtcttccctagaccatgcttgaaatgccatttatcattttgctggaagaaaacattagctgaactttgcatttctctgtaatttcactcaaaggtgaagtatctgaagttattatttcctaataaggaaaattactcattagaaatgtagaagcactgtattctacaccattaggttaataaagtttatctatagttagaattttttttttttttgaaacagtctagctctgtggcccaggctggagtacactggtgtgatctcggctcactgcaacctccacctcgcaggttcaagcgattctcctgcctcagcctcccaagtagctgggaatataggtgcccaccaccatgcctggccaattttttgtatttttagtagaggcagggtttcaccatgttggccaggttggtctcaaactcctggcctcaaatgatccgccagcctcagcctcccgaagtgctgggattacaggcatgagccactgcactcagccttatagttagaatgatttctttttctttcttatctgtgctttgctcctctccttttaaggtgaataaacattatgt

SEQ ID NO: 8111 - DNA, 1129 bp, Homo sapiens
gagtaatgaggaaagctttaaagtaccttaaaaggcattagtggcaaacctgataaaattttttaaaaaatctgtggttaatagtattgtaccaatgttaatttcatacttttcataattatactgtggttatataagatgttaatattaagggaaactggaggaagaatatatgggaactctttattttcacagcttttctataagtctagaactgttttagaataaaaattaaacacacatagtgccccaagatgacatacttctttcttttcctacagagtaaaagtagcagaatacagtattttctcaaagtactgtggtaaagatttcttgttttcagtttttgtgcttcctattttcacccacctcccttatttcaagaaagaacactgaatggggagggtccgggagaatttgagtgaaggaatctatttgctatgcgagaaggaaaagatatttttctttccaggcacatgaggggttagaatttcctcatttaagcgcacgtgggtgtgggtatttctaggtagcatctgcacatgtcatttcattctgcaaggtgttttataaaaccatagtgtacacactgaaagccatatctaataatctctatgtagagcatgtttaaatcagcttctgctgacctttaacacacctcacatacttcaagaaatctcaaggtaatttaaactctttcctgaggcagacatcatgaggaaggtagagatatgttgttaacagccatataacccctataaatatgtgtataattttacatgtaaatctattacatacactgtgtatactacatatgttaatactttattcatttatagtgataatgtgggcttttaagtgcaaaattctgaaatcagctaacccttaaaaggttcccccattcctgttgtggacagaaatccagtatttgacaactccaaagtgtaaagataaaaatgttttcgtgtttcactcattatccaattacatttcagggaaaactgcctttgcttctgagccggatgaaggaagtagggaaagtatttcttgctaccaacagtgactataaatatacagatgtaagtgcttcatgtgtatatttatttatgcagtggaattattttggcct

SEQ ID NO: 8112 - DNA, 1080 bp, Homo sapiens
ttttctaatttggtagtcagccctctcttatatttcctaccatcctgctcccattatcacaatttcttcatttgagaatgaaggtgaagggaattttaatgtcttttccttaaatatttttgatgaatctccttaaagtgtgctttaaaatctttgctggaaagagagtctgcattatcatcagtactcctattattttatagtttttaagatagaccttcttttacatttaaacatcccagaaactgggctatatctggcaatataccacctagaattcaagttgagttcttccagagaggatttgctttcgcttctttcggtcacctggggaaaatatcaaccatcctgatagtataaattcagagcacaacctacatgactgacttgttcaaattctcagggagagattttccccctccctggacgcagtacaaaatgggaaatagatgtacagtcaaggctgagatgtacagatttctttgtgggcccttctgtgttgtagatatatttctcccttatcctcatattatgagtatatcccttttgctatcctaactttttgtggaatctcctaggctgtgacttggaatttccccccttttcttactggtatataatatgggtacattttataattgatggcattttaaatcttaatcatcttaaattttgttccatgtatgtctccatactgacttttctctggaacttttaaatactgagtatatgagtgagtaaaatgagtattataatttcatgttttattttataagtgataacacatttgttcagatttttagtgtgtgtgctgccgaagtgagcactgttcagatttttaatgcacaggaggctgttctttttttttttttttgagacggagtctcactctgttgcccaggctggagtgcagtggcacgatcttggctcactgcaagctctgcctcctgggttcacgccattctcctgccttagactcccgagtagctgggactacagcaggcacctgccaccatgcccggctaatttttttatttttagtagagacggggtttcaccatgtcagccaggatggtctca

SEQ ID NO: 8113 - DNA, 2053 bp, Homo sapiens
tgacagagcgagactgtctcaagaaaaaaaaaaaagaaaaataatatatatatgggatatatcttgtcggaataagaagagtaaggtagaacatcaaaactgtggctgggtgtggtggcttacacctataatactagcactttgagagaccgagatgggaagatggcttgaggccaggaatttgagaccagcctggggaacataatgataccctgtctctacaaaaagtaaaaagattagctgagtatggtgctgtgcacctgtcgtcctagctactggggaggctggggcaggaagatcacttgaacttgggagtttgaggttgcaatgagttttgattgcgccattgcactccagcctggtgacacaggaaaaccctgtctctagaaaaaagaaagaaagaaagaaaaaaattcaaaactctgttttttgtttgtttgtttgttttttatcattctaatgcttttattcatgtttcatcttcctaaggaatgacaggtaagaatttagggactggtaagaaatttttcagcttattattttcctcccaaaattctgtgtatggaattctattcagcagtaaaaagtgaactgttgatacgtgcaacagctttgatatatctcaagagaattatgctgagttagtaaagccaatctgaaaaggttacactctgtatggttccatttctgtaacattcttgaaattacaaaattattgagattgataaattaatggttgctaggggtagagattggggtgggtggagggagatggtgggtgtacctgtaaaagggtagcacaaggaataccttatgaggaaactcttgtgtctaactctagtggtaaatatattaatctacacatacacagagtgcatgtaaaactgatgaagtctgaataaagttgtgaattgtgtcaatgtcaatttctttgttgtgatatttttctatatggcacaagatttccccattgggggacactgtgtgaagggttcatgaaatctctgtatcatttcttactcaactgcgtgtgaatctacaattactccaaattaaaaagtttaacttaaaaaattctcttgggtaagccaggcacggtggctcacgcctgtaatcccagcactttgggaggccaagccaggcggatcacctgaggttgggagttcgagactagcctgactaacatggagaaaccctgtttctgctaaaaatacaaattagccaggcgtggtggtacatgcctgtaatcccagctactggggaggctgaggcaggagaatcgcttgaacctgggaggcggaggttacagtgagcctagattgtaccattgcactacagcctgggcaataagagtgaaactctgtctcaaaaaaaaaaaaattctcttgggaggctgaggtggggacatcacttgagtctaagagtttgagattctggcaacagagtaagaccctgtttctagaaaaaaaaaaaaaaaaaaagccacaggtggtagtgcacgcctgtaatcccagacactagggaggctgaggcaggaggatttctgtttttcttttttttttgagatggagttttgctcttgttgccccagctggagtgcaatggcgtgatgttggctcactgcaacctctgcctcctgggttcaagcgattctcctgcctcagcttcccgagtagctgggattacagggatgtgccagcacgccaggctaattttgtatttttagtagaaatggagtttcaccatgttggtcagtctggccttgaactcctgacctcaggtgatccacccgccttggcctcccaaaatgctgggattacaggcgtgagccattgcgcctggctgaggcaggtggatttcttgagcccaggagtttgaggttacagtgagctgtgatcatgctatcatactctagcttggaaaacagagcgagaccctgtctcttaagaaacaaaaacaaaataaaaattttcacagtgacaccttttcttacgtcacatgaattccttatctgttctagatacaagatgctcttaaaaatgtgcagtgatac

SEQ ID NO: 8114 - DNA, 1075 bp, Homo sapiens
tttcatcatgttggccaggctggtctcgaactcctgacctcaaatgatccacccaccttggcctcccaaagtgccaggattacaggcgtgagccaccacgccaggcctttactgctatttttatacttttatcagtttgggcgtgaagaatattactgtactacatcataattcttgaacttttcttaacattatgttaagtaatgaggtaattatgggagggacaaaatttcctttcattgtagtttaaagatagtggtcttactatatgtggctatcagcattttattggcacaccattttgaaggaaagaatattcagtgcagattgctaaccaggcttaccctacagtttcagttgctctttgcttcctgttttcagcagttgcctagagctgttggagcagctgttttcctttctttgggggagggtgatggtagtggtgaaggggactgtgcatgttttgcctgtgaattattattttttttttttttgagacagagtttcgctctgctgcccaggctggagtacagtgatgtgatctcctgacgtcaagtgatccattcgcctcggcctcccaaagttctgggattacaagtgtgagccactgccactggctgaaaaagtcttattgtggcataattggtatacaataagttgcacagagtatataataaattttaacatatatatatgtacccatgaaaccatcaccataatgaagatattgaacgtatcaccccttctccccaaaagttttcctgggctcctttgtaatacctcctcctctccgtacttgacctccttaccccagggaaccactggtctgtgttctgtcagattagtgtgcattttctaggattttatatatacggaatcatacactatgtactctttttgtcttctttcactcagtgtagttattacgaattttttaatgttttgcatgtaaatactttattcctttatattgcatagtagtattacattgtacagatgtaccataattttttttatccatttacttgtggataacatttgggttgtttgtagtttctggccattacaaagctgc

SEQ ID NO: 8115 - DNA, 1045 bp, Homo sapiens
tgctgacgtcctccagctgattccaggctgttcccggccacccctgaggccgtcttttcgcttcttgtaaaagcctccccgcccccagagctcctcggtcgcctcccgagaagccaaggggcctctggtggagcgccaggttgacagcgttttagcaggaccgcgagaaacggccagctcgtttgccacacgcccgtgtgcaacacttcctggaaaggtcacagcgaattgcaagccgccacaaaaaacatccggacagctcctggtcagggggctgagccgttcagtggcggcctattcttctccttttttcggggctcctgaaatcggagagggcgagatgccgatctgaggcctgaacccttagtttaagaaaaacgttttgggggtttgactccggcaggccacagcttctaaaagcagcaggtagaggctgctgtccgaatcgacgttttcctgggctttcacctttagggccttgatgtttgaggggggtcgtgctctgaagtacagcgccccgaaatgactagtcaccattacaggggggtgtgtgcgcgcccgtccaggggccgatgagttcttcaggattgagctgtacttggttcccagtgtctgtagactattcatttcgcctcttcaagcaacgaatgcaaactactgaccataatgtgaaagggagaatattgaaactgtgtcatttaccatgaaaacttagtgttattgcgtagagaaggctttaggtttcaaaaatatttaccacatggcttttcaacaacggttagaatttatccagatgaagacatccaggcctgaaagggtgaagttcgaaaagagaaaaaaaataggtgtgagctgagagtggaaaaaaaaaaaagaacaaaaaaggttaagttcaagaaaacatagctggttagtaattaaaataaaaactccacatgcagggttgatactagcatacacagacttatttctgaagtgcatttccattgcagtgtaaaccactacatttcaacagtataggtagctgcattactctcattgaccc

SEQ ID NO: 8116 - DNA, 1085 bp, Homo sapiens
acatctatatatatctctcagcacctatcacagtattaaacacatgtgaggtgaaaaaaggggttgaaaatgctttctcatataaccacttgggaaaagtctttggcatgacaccaagagtgagattcataaaaaaaaaaatgcttttaacttcatcaaaattaaaatcttttgctctgcaaaagatcctgttaagaagatgaaggcagtcaggcaccatggctcacgcctgtaatcccagcactttgggaggctgaggcaggcagatcacgaggtcaggagatcgagaccatcctggctaacacggtgaaactccgtctgtactaaaaatacaaaaattagccagacgtggtggcgggcgcctgtaatcccagccactcgggaggctgaggcaggagaatggcatgaacccaggaggcagagcttgcagtgagccaagatcgcgccactgcactccagcctgggcaacagagcgagactgtgtctcaaaaaaaaaaaaaaaaaaaggaagatgaaggctgggcatggtggctcagcactttgggaggccaaggcaggcagatcacgaggtcagaagttcgagacaagcctagccatctctactaaaaaattagctgagcatggtggcacgtgcctgtagtcccagctattcgggaggctgaggcaggagaattgcttgaacccggcaggcagaggttgcagtgagccgagactgtgccattgcactccagcctgggcaacaggcgacagagtgagactccatctcaaaaaaaaaaaagaagaagatgaaaagacaagccaaaaatatttacaaatgacaacaaatgtatccagaatgtgtatccagaatttgtaaagaactttctagccaggcgtggtggctcacgcctgtaatcccagcaccttgggaggccaaggtgggtggatcacttgaggtcaggagttcaagaccagcctggccagcatggtgaaaccccgtctctactaaaaatacaaaaaaattagcagggcctggtggcatgctcctgtaatcccagctactagggaggctgaggcatgagaatcgcttgaacccaggaggcgga

SEQ ID NO: 8117 - DNA, 1028 bp, Homo sapiens
cactccagcctggtgacagagccagactgtgtttcaaaaaaaaaaaagtctgggctggatgcgtgcctcacacctgtaatcccacactttgggaagccaagatgggggtattgcttgaagctcaagagtttgagaccagcctgggttacatagcaagacctcgtttatactgggaaaaaaaaaattttgaagtagccaggcatggtggcacatgcgtgtgtgtggtcccagctagttgcgaagctgaggttggaggatcacttgagcctgggagattgaggctacagtgagctatgatcgcgccattgcactccagtttgtgtttatggctacatgatagtttcagaattggctcctgagagtcattaaaaagacacattgacaagctggtctagatggctcacgcttgtaatcccagcactttgggagtctgagacaggcagattgtttgagcccagcctatgcaatacggtgaaactctgtctcctacaaaaaatacaaaaatgagtctggtggtggtgcgtgtctattttcccagctattcataaggctgaggtgggaggatcgcttgagcccaggtggtcaaggctgcagtgagtccagatttggccactgaactccagcctgggcaacacagcaagaccctgtcttcaaaaaaaaaaaaaaaagtggggctgggtgtcgggccaggtgttctggctcacgcctctaatcccagcactgtgggaggctgaggcaggaggatcatctgagattaggagttcaagaccagcctggccaacatggcaaaaccctgtctctactaaaaatacaaaatttagctgggcctggtagcacgcacgtgtaattgcagctactcggtaggctgaggcaggagaattgcttgaacctgggaggcataggctgcagtgagcagagatcgcaccactgtactccagcctgggcaacagagcaagattccgactcaaaaaataaataaatgtatacatacatacatgcatatgatacatacgtacaaaaattagctg

SEQ ID NO: 8118 - DNA, 1024 bp, Homo sapiens
gtagctggaaatatagacatgtgccaccacacctggctaatttttgtattttttgtagagacggggtctcactatgttgcccagtgtggtcttgaactcctgggctcaggtgatccacctgccttggcctcccaaagtgctaggattataggcatgagcccctgcacctggccttgagtttaaatttctttagatagacatctgctctctctggtttaccactggtcttcaacattccctattgacttcacatacctaacttatgtattcatttatgttactggcctgggccttgtgggcacttgaatttgtgaacctttttctagaattctggtgagtttttactgtaattgccaggaacacaaaccagattgcagtgagttgaggagtgaggaagtggagccatggaaaagcttagcaaagaagcgaaggagagtaatagccagagcagcactggaaatacaggatatatgagctgcaaccccttctctgtgttgctcagttcaggtctgtggcacatttcccaatgacctttccttttagctagttatccagtctgcaggaaattagaaatagtcccttaaaaaggtggattgcggccaggcgttgtggctcacacctataattccagcactttgggaggccaaggcgggcggatcacctgaggtcgcgagttcaagaccagcctgaccaacatggagaaaccccatctctactcaaaatacaaaaattagcggtgggtgttgacgcctgcctgtaatcccagctactcaggaggctgaggcaggagaatcgcttgaacccgggaggcggagattgcagtgagccgagatggcaccattgcactccaacctgggcaagagagcaaaactccatctcaaaaaaaaaaaaaggtggattgcttgcggatgcagccttggtgagagccaaagaattaagatctggtatcaagaaaggagatagaacgccacaaaaagtagataaaaagacttggacacatagcatctggaatcatatagtatgg

SEQ ID NO: 8119 - DNA, 1099 bp, Homo sapiens
cacaccagctaatttttgtatttttaatacagatgaggtttcaccgtgttggcgaggctaatctcaaactcttggcctcaagtgatctgcccacctcagcctcccaaagtgctgggattacaggcatgagccaccacacgtggctgacagtcatggcctattgggtaaatccaggtttctgctccctcttagggctgtgtggtgtgatgcactgtttctaggttatgtgattggtttgttgtattaaatgttgtgggtgattataacacaaggacaaacattttgtgtatcttaagtatagaaaacatatggtaaatatctctattaaagacaagaaatgcggctaggtgcggtggtggctcatgcctgtaatcccagcacttcgggaggcagggtgggagaatcgcttcaagcccgggaggtcgcagctgcaatgacccatgagtggctctgtactccagcttgggcaacggagcaggaccatgtctcaaaaaaaaaaaaaaagagagaggccgggcacagtggctcacacctgtaatcccagcactttggaaggcagagacgggcagatcatttgaagtcaggagttcaagaccagcctggccaacatcctgaaaccccatctctactaaaaatacaaaaattagctgggcgtggtggcaggtgcctgtaatcccagctactcgggaggctgaggcaggagaatcgcttgaacccgggaggcagagtttgcggtgagccaagatcgcactactgcacatcagcctggacggcagagcaagactcggtttcaaaaagaaaagaaaagtgattcttggccaggcatagtcgcttgctcctataatcccaacattttgtggggccaagatgggaggatcatttgaccccaggagttccaagacttgcctgggcagtatagcgagtcccgtctttacaaaggatagaaaaattagcagacatggttgtgcatacctgtggtcccagttacctggggaggctgaggcagagggattgtttgagtccaacacttcaagaccagcttagacaacgtgatgaaaccccatctctacgaaatacaaaaattaaccaggtgtggtgg

SEQ ID NO: 8120 - DNA, 1108 bp, Homo sapiens
taatttttttgtatttttggtagagacagggttttaccatcttggccaggctggtcttgaactgctgaccttgtgatccgcctgcctcagcctcccaaagtgctaggattacaggtgtgcgccaccgcacccgcacttttttctttttttttttttgagatggagtctccctctgttacccaggctagagtgcagtggcgcgatctcggttcactacaacttctgactcccaggtttgagtgatcctcctgcctcagcctcctgagtagctgggattacaggtgtctgccaccacacccagcttatttttgtattttttgtagagacagggttttgccatgttggccaagctggtctcgaactcctgacctcaggtgatctgcccgtctcggcctcccaaagtgctgggattacaggcgtgagccaccgcacccagttgatcccattttttttaaagcaaaaaatgaataacagaaaaacccacatgcacacatagtgttctaggaccatacacatcaaactcttagaaactgaccaaccccagctgggtgcggtggctcatgcctgtaatcccagcactttgggaggctgaagtgggcggattgcctgagttcgggagttcgagaccagtctgaccaagatgagaaaccccgtgtctactaaaaatacaaaattagccatgcgtggtgatgcatgcctgtaatcccagctacttgggaggctgaggcaggagaattgcttgaacccaggagaggcagagtttgcagtgagccaaggttgcgtcattgccctccagcctggacaacaagagcgaaactctgtctcaaaaaaaaaacagaaaaaagaaactgaccaccctctaggggctaggattgaagtgaggatttatcattctactttctacaattttttttaagtttgttactatatacctgtctttttatttatttatttattttgagatgaggtttcgttttgttgcccaggcttggggtggagcggtacgatcatatctcactacctcaaactcaagcagtcctcctgcctcagcttcccaagcagctaagattatagatgagagccacagtacccagcacctctgtgtttt

SEQ ID NO: 8121 - DNA, 1376 bp, Homo sapiens
tgcccacctcggcctcccaaagtgctgggattacaagtgtgagccaccgcgcccggccatcatgtgttcttaagaaagatttaagttcatttaaaatttagagatcaataattatccaaatatgtttctttctcatagagactccagtgtctcagggttactgtggttgatttagtggtatttactctttgatgtcttattgtattttgctttgtttgatattcagaccttattttgcttttatgagatgaaatttagaacatacacctcacattgatcactaaaaattcttctataagatgtgatatttgattttgttaatcctgccataactaattccatcttaaaagttaggctggccaggcatggtggctcatacctgtaatctcagcattttgggaggctgaggcgggcggatcacgaggtcaagagatggagaccatcctggcccacatggtgaaaccccatctctactaaaaatacaaaaattagctgggcatggtggtatgcacctgtatagtcccagctactcgggaagatgaggcaggagaatcacatgaatccaggaggtggaggttgcggtgagccgagatcgcaccactgcactacagcctggcgacagagcaagactccatctcaaaaaagttaggttattattattacttatttggtgtatgatattaagccttctattaaatttagtttccaaataattttttaaggactaatatatgatgtttccataccatttattatatattgttactaaattgagggtctatgtatttgaccttaggagtacaaagatgagacaaaattcatgccatcaggggactcagaattttgtaggaaagatatataagtaaacaactaactaacaataggatgtaatgaatgcaacagtggagataacacaaaagtgaatgatttaactcaggaatgggtttgaagaacaaataggaatttgccagacacagaaaaaaagaacttagtagcaaagaagagtatgtatggccaggtccggtggctcacgcttgtaatcccagcactttgggaggccgaggcgggcacatcacaaggtcaagagatcgagaccatcctggccaacatggtgaaaccccgtctctactaaaaatacaaaaaaaaaattagctgggcatggtggtacgcctgtagtctcagctactcaggaggctgaggcaggagaatcgcttgaacccaggaggcggaggtggcagtgagccgagatcccaccactgcattccagcctgggcggcagagtgagactccatctcgaaaagaagagtatgtatgatcaaaggaatgagccagtgtggcttatcaaagcacactgattgaaaaatcttaacttggaa

SEQ ID NO: 8122 - DNA, 1075 bp, Homo sapiens
ccaagacctcaccactgcactccagcctgggcgacacagcgagactctgtctcaaaaaagagagagagagatgtattaaatgacactgaaggaatataataagccagatcaagatagtggaaaactacatagcaaccaattctgtttcttcagcaaataaattaaaaaggaaagagatgaagaataaacctacagatgaaacctattgagaaaagtaacttaagggacatataaattaattacattgtgtgcacattatttggatttgatttgaaatatatatgtatttttaataatctcaaattgggctggggacattgggtcatgcctgtaatcctagcacgttgggagcccaaggcaggtggatctcctgagttcaggagttcgagactagcctggccaacatgccaaaactctatctctattaaaaatacaaaaattagccaggcgtggtggtgggcacctataatcccagctacttgggaagctgaggcaagagaatcacttgaacccggagggcagagaacttggcgaagtgagctgagatcatgccacttcactccagcctgggcaaaagagcgaacctctgtctcaaaaaacataataaccccaaactggaaacagtgtatataacctattagctgatgaatggataaacaaaatgtattttcatataatagagtattatttgacagtaaaaaggaatgaagtactgatacatggtctgacatgggtaaacattgaaaacatgatgctaaggaaaagaagccagtcacaaaaggccatccatatattatatgatttcatttatctgaaatgtgcagaacaagaaaatccacaggagcagaaagcagattagtggttgtcagaggcttggggaagaggctgaatggggagtgactaccaagaggtacaggtttctttttttcttgttggagatggagtctcgctctgtcacccaggctggagtgcagtggcgcaatctgggctcactgcaacctctgcctcccaggttcaagcagttctcctgcctcagcctcccaagtagctggtattacaggtgcgccccaccacg

SEQ ID NO: 8123 - DNA, 1027 bp, Homo sapiens
aattcgagtcagattagcaaccaaatggagattgtataaataagttatttaaatatgaagtacatttaataatattatagatttatgaataaaagttattaagtagggatttgttcattcagaacagtagtctaaggaaaattaagtgaatactttttaaaactaaaaccaaatgctatgttaatttggtgataaaaaatgtctcaaagcatttttgcatatttggcatttagaattaaatatgagcttaaaattttatttgcatgtaacattttttgctcaagttattttgccctacttgttacttcaattattcactgaagttttagaggtaagaatgaactcctttgtaacatatttaagttcagagttgatttaaagattccgaaatcacaggtaacattgtatacagtgttactactataatgtgagtcatcaggaaaaggtaactttttaaaaaggggtaaatcagaccttatagtttcttgggaggtaaatatacaaggaataggtgactttgatctgtttagattttcagtgactttgtcaagtgtctgtactgaaagttaggtgaattatacctagttggatatactgtactgttttatgaacacactagctcagagacatgaattaaagcataggaatagataggtaattctctgggtgaagcatattatacatgtgtctcagagattgatgtgatagagggaatgcagttttaagtcctcatgatttttttttttttttttttttaaatggagtcttcctctgttgcccaggctagagcacagtggcgcaatcttggctcactgcaacttccgccgtctgggttcaagcaattcttgaacccagcctcagcctcctgaatagctaggattacaggcatgcaccaccacgcccagctaattttgcatttttagtagagacggtgtttcaccatgttggccaggctattctcaaactcctgacctccggtgacccacccacctgggcctcccaaagtgctgggattacaggtgtgagc

SEQ ID NO: 8124 - DNA, 1028 bp, Homo sapiens
acacctgagtgtgaatttcagttttattacctaccatatttgtgtgtcccaaagaaagttatgacctctgtgagcttaattttttttcatctgtagaaaggggtactaatacctcatttgcagggctattgtgaggactaaatgaaaagcatgcatatgcacatgaatacctaattcaatgcctggcacatagtactttctcaacaaaaagttagatacccttgtctccctcatggcttaaaagtaattgatttaaccaagaaatctgtaggcttctaggtgaaaaggaaactgagtaaaattatgtccaggtaattattctgcaaaaaaagcaataggaagcatagcagccttcttgtaagaaattttatattgtaaatgttactatagagaggaaaatcacattgattatgattaaaagaaaaatatgaaattagactaagctgtaaaatgttaggatgctaaatgtggggtgagggggaatctaatatttaagaatatactttttcctggagatctattgtacatcatgatgactacagttaataatgtattatatacttgaaaattgctaaaagtagatcctaaatgttctcactacagtaaaataagtatgtgagctgatggatatgttgatttgcttgattttattagtttacagtatatacgtatcaaaacctatagatatacacaattttaatttgtctattatcccctaataaagctggaaaaaataagtaaattctcatattttccatcaaaaaaagagaatatacttttaacttctaaaattaagtatagaaagtagactaaaatactggataaaactgcctttgccttaaccactaggtggcagaaatgacaattacatttgtttatttcataaaacttcaggtgactgtgttctagaattacaatgaattgatgtttctcaaatatttatatatgttgttttatgattaaacatatagcttaaagtattaaatattgattaattttgctctcatttttcagtgctaatgaaggca

SEQ ID NO: 8125 - DNA, 1065 bp, Homo sapiens
tcttttgaagtcagtcaggatcttcaaacaccaatttgctggttgtgatgcccaattttccaaacagatcaggagcactttgttgaatgtatattgaattctgggtggttcttcttcaacacccaccttggcctatcctcctcttgggagagagaaatctggatttttttaagcctcccctttgctccagtctagtaaacctctttgggcaacagaagccttactggaaagctgcttagctattattagatggtgctgagggaagaaagtaccttactcttatgtaatttccttgccctgaggagtagtatatcctggtcaatgaaatcagcttgactattttttattttttatttttttgcatcccagcctaatttctttttattccatcttgaattctcacccaagcctgattcatcttgcctgcttgcttgatttttctctttctctttctttctctctctctctttcttttcttgagatggaatctcactgttgcccaagctggaatgcagtgccactatctcaggtcactgcagcctctgcctcccaggttcaagtgattctcctgcctcaacctcccgagtagctgggcttacaggcgtgcaccaccacacccagctaaatttttttgtattttagtagaaatggggatttgccacattggccaggctggtcttgaactgctggcctcaagcaatacatctgcctcggcctctctaagtgctgggattacagatgtgagccaccgcacccaggcttttcatttcctttttatttatgtttcactccatcttcatttggtctctttgcagaggtggaagtccccaatgttttttatatgatttctcatgctctcacaagccaacagcattacatgcattaacatatgtgtattcagttactcacatgtgcctatacacagtacgccaatctcatagagtaactacctcatgctcactcatctacacacattatcttatctatcaagcctcctgggctgaggtctaggctaggggctgtgaggcccaggggtctccaaacttgggtaagcatacttactaa

SEQ ID NO: 8126 - DNA, 1047 bp, Homo sapiens
cttgttggtaccagtcattctcaagtatctctgacacctgtggtggttcagtttgctgagcctgccacctggtatgaattagactgggtgtgatgaacattcatccatggatataccctaccattttgcgttgccttataaccaaggcacactccccataagagtttactgcagagaaagaacagcaaaacagccaccctccttgaatttacaactcattatctgcaacaggttttctttaaatccaagacacaggatgggaaatgggtttccccaccaggtactcagaggtctgcaggaagtgactcccgggcaaggcagacttcagtaatccctgaagcgtgagcatgtggactgcatggctgggtggggactggtggatgtctctggagctccagaaccttggagaattcctcatggaattcccctcccagctcttagtgggctctgtggggtcaggaggagcccttcctccaggttttccttctttcctcctcagcagagaaactggagaaaggacattaaactcagtgcagtcgatttgagtgctgaaatatttccagaatcaatggtggtgctaaactatctccatgtttctagcatttttaatagtggagttggtttgtttttaatctcatcacaaaaatgcagtgcccttggggaagggaccagccccttggcctgccactttccaggtgtcctttatcactttgacgggactctttggtctgcagaaaatgctctgtcttggcatgcttctagactgtaagatttgggttttgttttgtattttatgtttacatgcatcttatatttccctgaaaactaaataaagttttgggcctttttaaccgaacggaatcacctcttaattctccctgtcaccaaaaacacccatccagctgaacagccaatgtcccattatcccaaattgcaaagtggacttcaggatcccagggccctctgaaagaaaggacactggagggtgggggcaggtaggtaagctctcgcttttttttttttttttaacagggtctcaccctgtca

SEQ ID NO: 8127 - DNA, 1034 bp, Homo sapiens
taacccctatttttcctgttattgtatttaactaatatattatttctttaaggttactcacttcccctacccctccaaataccttgcattctcaatcaaaaatggaaacaatctgagagacaggaaaagtgcaatattaccaagatggatgccagggctcattggggacaatggagggaataccagtggcgctcagagagcaagaggcagggagcggggtgctgaaggaatcctagctgtggaacaggtgggtgggttggtggagtttgatcttgtggcgttctcctctcccccttctttgggaagatgataggggtccctgccagatccacccagaagaaagggattcaggcatggggcccttgacctctaggccccagtccctggagcagaggcaggccctcgggagctgttccttgttttgatttctgttgtggtgcagccagctgctcagagagacctggcctaaaaatgactcccagcagccctctctcaccccagtgtcctgatatttgggctgtgatccttctggtgtatgtttgaatctttctaaaactgggtgccctcagttcagtttctaggcaggaagcctagaagtcaccagatctttttgggggatgtgagaaccttgagccgcgcacaccctggtgagacaccaattcccacaagcctgcagcagggcctggggctgagcctgggctgcccattcatctcagcgacttcagcctgagaagtgagccctgcctgggctccacacccagagagtccatacaaattctgctccgggaagagtcggggggtctattcaagtttctctgcagacaaaacttcccacaacaggtaccaatctggcctccttcctcagcaccggtagagaaagcaacagaatgggaagtttcctctgggttggagcctcagagctctgcccctcaaggtgacagggacgtccctgtggcttgttccctccacctccagtactgtatgcttgctacttcaaccccctatttggtgaatttctgcacagacacagatct

SEQ ID NO: 8128 - DNA, 1051 bp, Homo sapiens
tggaggatccctgtgccaggagccaacctggtcttcccgagggtcagtgccccagtgaagacagaagcgagagaataaagttccctgtaggtcctctgtcacctttgggttgtgtttttcaattgttgacatttcagaggggaccctccagaagcccagccggcttcccccaaggactcccccttcgctgggagtggatttccacacgtgcctttgatttcggacagattgggcctcacagccaccgattcagctgccagggtccctggactgggggttggtgttttctatagaggaggaaaggccctccctcaccctgctccccacccaggcagggcagcatgggacccagtgtctcagtgccttcaaaacccacccccacccctaccctaccccaccacaccccatcccagaggccttgcctgggcaaccctaagcccctgtccctcgccatacactgatgcctggcagctagagcaaatggctcgtgttctttgtcgaaggcctgtggtgagattgttttgtttccttttgttttgtgagtttgtttaaaattgaaattagttattttcttctgctggacagtattaaatagagcaggatgttgagttaatctgctagattgcagtactaatggtagtggtttagtgtcttcatgttaatattatttgtacttatttgaacaataatgataaagaagtggttcattattttttaattaatgcactttaaataaggtagaatggaaaaaacccagagagcaaagtgcattacttaaagatgcagtatatacttttctcatttttaaacagcacatatttattaagagaaaaaaagtaatttatgactatttaaaataaaatttaaaagtagagtgactgtcaggtaaagaaccttcaatgtagctatcttccagggggagggccctgcagcctcgctcctcagatgtctgcactgagccagttcagtcactagtgcgccagccaggccaggagggagtgcagagcatgtctgccaagcacagagcatctcagttggactggaccacagt

SEQ ID NO: 8129 - DNA, 1037 bp, Homo sapiens
ccgacggaactcctcctttagcactgctcgctccgctgccgccgaggccaagggccgcctggccgaacgggctgccagccagggttcagactcacccctactgcccgcccagcgcaacagcatacccgtgtcccctgtgcgccccaagcccatcgagaagtctcagttcatccacaataacctcaaagatgtgtacgtctctatcgcagactacgagggggatgaggagacagcaggcttccaggagggggtgtccatggaggttctggagaggaaccctaatggctggtggtactgccagatcctggatggtgtgaagcccttcaaaggctgggtgccttccaactaccttgagaaaaagaactagcagagggcctgggctcttccagcctcagtgtgcctctctggccgcccactggatgagcggtgagacgaacaaaagggaaaggaaaaaatgggggtggggggtggggggtggacaacattcaacactgcagaatgggtgacctcaaagatgccccctgtccaagccatcccacagctggaaggtaggggatgggggtgcccacactgagtgaggaagggaatggaccagggagtcccaggcctgggacccagagccaagaaagctgagatatcctgtgcaccatagggacttcaccaatggattacatgccatctgggacaggccatgtgggagaccccagttgtgcctttgctacagatctggaaaagacaaggtcatgggggcctccagtgtcctgcccctgcttggcccagttttgattgctggcatcttgccaccccaggtatccctggtattgtcctaagctgtatttgtgaattgtgctggtttcctgggcattgccacgcctaccacaggtgggtacattagaagccaccactggctttcaggcttgggggtgtcttctgagctcaagcctgcttctgggccaggccattgtcactgttagttgaagaaaaagcagttcccaggtgccagcaaagaccatctttcataactgtcactgtcttgg

SEQ ID NO: 8130 - DNA, 1024 bp, Homo sapiens
gtgtgtggggggtgggtgtgggtgtgtgtgcgcgtgcatgcgtgcccagggcgattctcctaaaataggttcctgcgcacgcctctgacagggcctgtgtgccaattctcctggcaacttctggatagctgtggattccaccgtcacatcttgggcatttcccacccagatctacagaagggctcagggatgggtcccctgggcctaaggccccagctgctgtggtgtgtccgctagtctctctgcacctgcagccacatggccaagagattggccgacactagttccctctccagccatctctaccccagcgctatggccatcccatcataggtgccctgagccctgtagacagaaattggaagcctgcatcctatcaaagctttcctaatagctcatcttcattactttaggaagaaaagatgattggctgttctggtgtgtccttatcatgagacactttgatgtatgttcatgctgctcttgaacccaggtgtgctgtgggagttcagtatggtaggaagggtgggagttgagacttccttgtccactgacagaggtgcgggtccaagcctgacattcgcagggtgcttcagtgaaccaggagaggtgtgttacctctgtcaagccctcgggttcatttgtgatagagccaagaccagaacccaagtctctgcctttgctcctgtgtcccacatctaccagtatggacctgcttcctccagagtgggcgcatattgggacatgcggaacagaccacggtcttctgtgctgctgtaccaaaggcgtgtaccccattagtgagcagatcccccagcacccagaccctgttccctccccacatccccttcttcccagggcttggcagcccaaggggcagcagagttaggggaacagcaatagctcggggtgcagagtctgtgctaagagtctaggctttggagccagactgcctggattcacatgctgcctgacacagagtgttctttaaagccctgtgcctctgtctccccatttgtaagat

SEQ ID NO: 8131 - DNA, 1050 bp, Homo sapiens
tttgcaagcccagacctgtcatgtggggcggtggggacctagttgaagacctgggagatgagctggggttctaagtccttgaggtcttcccgcgactgtgcagtggtacctggcggttttcccctcctctccgttgttttcacagcagccatcacagagccttctctacctcccagtgctgagcccacctggaggcacccgagagcctcctcccaccaacgtgccttctagatccttgggcggccacttgccgcggtggatggtgacggggcctccagtgctgcccggggagaagccttgagctctccagacaggaaatggagaactgggccatgagcagaaaagagaatcagtaccaaatcacttttgggggcaaagaagtgtcagggaagaagggatgaggaggaagacaggaccgtgtgaagaggaccttctcggaagggaccaaaggcagttagtggagtcccaagacctggggtgctcagaggactttgcatgaatgaacaaataagatgaatgaggctttatcacgtggccatgatcgtcaagcatcagctgaggatgcagtgcccacttaccgcgactgaaacgtgaacacacttaaagggcagctgtgagtggcaccaatgcgaaggtaccgctgacccgcgatggggaaaaggcaaccgttgaccgttagagactgtctgtgaggcacttagcttgaaagctgagaaggcagccaagctccaggcaaaccagtcatcctaatgggtttcaaagaccataaatggtctctctgtatggccggagctcccttggcctttcctgcaagatgaattttcacacactggacatatcactatgtctatttcattttccatcagacatttgttagtgtggctcacagtttattggtcccacttctcgggaagtgtgctggtcgtttctgccttagaacagacgcaggctcctcgaggctggagctgggccaggcatttgctgggtccccaggccatctggctccatgctccgcttcttgtgcctctccttccatccttgtcctggccc

SEQ ID NO: 8132 - DNA, 1044 bp, Homo sapiens
tgctcatcagagcccctctgtgctctcattggtctaaagagagatgtgcatggaaggtgattctgagtcagtaaacaccaggtggcaggccacatgcttcacatacatcattcttttgggatatcatggaacaacaccatgcagtagaagggagtttaaccaatttgtggctgaagtaataggctaagaggctaagtaattgccttagagtccaagagctaagatctctcccctcaacagaggtcatgcagggaggctgagaatgggcccatcccaggtgggaagggtagaagtccaagttggcaatgctgtaggttgaggcgagatgcaggctgggtgagatggctgtagagctccctggaacatctgtggggaaggttgtctctgcatccctccttccagctaatgggaattcatgttgttcattgatccattgaacttagggacaagaaacagctgagagggtctgaggaaggtgatgtgtacctaggactgaggacaaacctgttccagagaacaggagtcaaacccaaagtgagacttgaatagctttaaggaaagcatttgtgatcaaccagtgggcctagggccagaccagaagaggactctttttctccattgatatacagggacacatagagcaggaagattcatagctttggtagctttgccacccagcaagccataccagggcatgcagccgccattgttactttgtctttggaaacccctctacccttgacataagcaaaagtgcataaggcgcctcctctttaggacattcatttgcctcaaatactgcattggcttccctctccagcaggcataatttctggcagcgtggtgacatcagggtcctggtcactctgatttgtgtgttgagcaaagctgcatccaacttcctaggattgtttcttcttaggactgcaggccaggggaagaagtggggagatgagtcaacaaaatttttcctgcctcacctttcttctctgagtctttgcttacttcctggcaccgggcatgatacattgggagttcttatac

SEQ ID NO: 8133 - DNA, 1048 bp, Homo sapiens
ctcccattttgtagtctgaggaaactagcattcgaataggttatgactcatcccctgtcacataacagtaactggcagagccagatgtaccagtcaggactctcctggtgacaagaaatagacccatctcaatctggcttaagaaaaaaggggaaacttattggttcacataactgaaaaccaagagtaatggtttcaggcatagctggatctaggggaccaaatctgtgtctcttaagccctcagctttgctgtcttttctgttgacttaattctctgataggcttcccccaggtggtaacagagatacataaagatgcttcctagcagcttggggcttggcatttatgagttagcagctgtagagagagaacacatctcttcctggtagttccagcagtagtcccaggctgattcccactggaccaatgtgggttgcatgcccatggctggactgtacttaatgatcagccccagagtttgggatgggatcaaccccactgaaatcccatggactgagaatgaaggagggattgtttcccaaaagaaaatcgggcactgtaataattaaaagctggcagacaaaacctaccaatgtctaccatgctagacttcaagccagaggcagcatcttggctctaaagagagattcatgggagccagaactcagggcatggtgtcagtatgcctcaggctgctgaccttcgctatggggattgtgtctttccggaacctgcatgtgcccactgcttccagcctcagcatctaggcctcactcctgccttcccccagcccaagtaaatggcaacaaagccagatgttgcaagtgaagaaggaaggattgggtgtcagggtgtgatctgagccaggtacaaggctgtagactctggggatgtcatctcagctgcaccagaagctggaggcagcccagcaggggaagaggtgacctgcagtccccaggctgcagagggtcagaggtgacatgtgagtttcaggggcagcacttaaaaagacaagcaggggccaggtgcggtggctcatgcctgta

SEQ ID NO: 8134 - DNA, 1077 bp, Homo sapiens
tgtgctcgtggtggctttgccgcaggacacagatgtgggatttcctttgccctccccactctgtgctgagtcagctcttcccactgcagcccaggccgcagcccaggcacagcctcacttcctgcagttctttcccggcctgtggtaacttgcaaagcagcaaggagcttgtttctaaagagcagatgacccagatggctgatctgggatgaaaggtggggatccggcctctgatcacatggcagtgtcactgtcactaccttccagactccgagctgcagaccctccaggtcttgcagggagtaacaagctttgcaggggtcagccacgcaaggggcttttttacttttgaaatgtagatcagtctcccaagcccttcccccgcgacatccccacattccaagaccaggaaaagagccaggccaccttgttacaacttggtatgtgccttcccaatcattctagaagggaatcagctcctgaacacctacccccaaccctccgtcctggatggattgtatcctaggtatcttccccaggaactttctgatctgggccgaaaagcctgtctcttctcatggtctcagtcagtctgtgtcatctaagacgcagaaaatgcacccgggcctgggtctccagagtcctggattctagtgcaccccatgctaatcaccatggcacaaaattgaagaagttaagtttgagcaatcagggatcaccttgcttgttggcaaagtcaccagaaagtgacaggcatgatttcagggctcggtgacactcctgtcctttaccctccactccctccccctggaaatacatcctttccttacctgatgcctaaatgtccttttacaaggttggatcctttccctccatgctgagagagtacagttataccctggtgtccccagggttggtgcttccagccaactcatactccagcgtagatggcagactggatggttactgagaccagggttgatagaggtgagagggcaagtgggcagctgaggctagagacagaagaaggtgctaggcctcaaaggcctgtgtggagtctggagaaggggctggcgg

SEQ ID NO: 8135 - DNA, 1022 bp, Homo sapiens
tgctctgccaagctgacttgggaccagagggtggtggcaggattggaaggaggaaggtacaaaggtccaaccgcatgctctcaggtactctggagaatgtcccagtggtgacatgcccagaactctgtgattgcaaagtgggctcttgccaggcccagcacttattggtgccccagaatcttctaggggaagagactaaaattcataagtgcaaaagactgtgctaggcactttgcaggggaagggaagtcacatttattaagcgcctacagtgtccaaggcactgtggttgttcttgcgttctcattaatcttcactgtgaggcaggtattcttaacactattttatgtgtttattttatggggtatggaggctcagagagaataataacttttcatgaaattgatccgattgattttaaactatgcaaaatagagtgctgatccccgcaaggatccctagccacctgcctcatgggcggcctcagtattgacagatagatcattgtctctgtcaccaactgacagagctaattgagccaccaaggcaaatcttgtggcagggactctgtcttgctccaggcagtctgctgtcgttattaaagaagacaaagagttcaggatatagagtgaatggctgcatttgaatctgagcttcattacttgttacaaatatgatgacctcgggtagaccagttacctctctgggccctagtctcttcacttatgaactggagacgataacaacacttttctcataggactattgtaaagagtaagtgagataattcaaacaaagtgcttagcaatgcctggaacatagtcagtactcaatacattggcatggccattagtgtttcttttactcctgatcaatcaatcccattgtgcgtgtaagaaggtttggcggagctgactctttggactgtttttcttctcgttctgggggctgtaaggacagagctgtgactgcctaacttttgaaaggtccatgtaggattgtgaatcctgggagttcctagt

SEQ ID NO: 8136 - DNA, 1118 bp, Homo sapiens
ttcctctgtttttaataaaatacggataaatatctttgtacacaaatctttttccacatatttgattatttccttaggataaattgccaaaagtagatttcggtcaatgggtatatgtctgtttccttattttgttcttttcaaaatagaaaagactttactattttgtcaattaaaagatagtgtattactggctgggtggggtggctcacacctataatcccaggctgaggtgggaggatttcttgagcccaggaatttgagaccagactgggcaacatggcgagatcacatctaccaaaaattaaaaacagaaaaattagctgggcatggtggcactcacctgtggtctcagctactggggaggctgaggcaggaggatcacttgggcccaagaggatgaggctgcagtgagccatgtttgtgccactgcacgtcagcctgggcaacagagctagaacttgtctcgaagaaaaaataaaaatgaaagatagtatatttttgttgtaaataattcaaataatacagaaattataaactaggaagctgtctatagttctgtcctccttccttcccccctactcatagttaccctcgacctaaccactgttaaaagttaagcctgtgatgatggatatgtttatgtaataggcagtggtgatgtacagttatcacccagctcatctagttatatacattaagtatgagcagcttattgtatgtcaatcataattcaataagtggtttttaaaaagtcactagcaaagcaaagataaagttctgacaccattaagaaatagaaataggctgggcacgggggctcacacctgtaatcccagcaatttgagaggctgaggtgggtggatcacctcaggtcaggagtttgagatgagcatggccaacatggcaataccccgtctctaacaaaaatacaaaaattagccgggtgtggtgtcatgcatctgtaatcccagctactcgggaggctgaggcaggagaatcgcttgaacctgggaggcggaggttgcagtgacctgagatcgtgccactgcacttcacctgggcgacagagctagaccctgtctcaaaaaaaaaaaaaaagaaatagaaatattatc

SEQ ID NO: 8137 - DNA, 1047 bp, Homo sapiens
gacacattgtagaagatgtacagtaaatgaacactgcatacaacagcaaaaaaaaaaaaatgtgaaagtagttttaaaaataatattgaactaaaatcccaaataacaataatataagttggggggggcagagcagggtatatagaataaagtgttccaaggatctcatataacccaggaggagaataaagcttaaagtaacttttgatgttgataaattaggtacacatgttacaacttctaaggtaaccactaaaagaataggaacagtagatgaaatttccaaactagagaaagtgaaatgtaaaaaaaaagtttaacccaaaacaaggtaaaaaagagaaagaaaatgaaatgcaaaacaattgagataaacaaaaagcataaattaaaatctatgtttaaacccaaatataaaaagatggaaaaagatatgtaaacattaaccaaaagaaaaccagtggaaatatattaacattagacaaattaggctttaaggtaaaaatcattactaaagataaatgggcttatttcagaataataaaatattaaatttaccaggaatatatgaatacttaaaatatgtatgtacctaatagcatagccttagagatttaaaacaaagcatgacagagtgacaaggagaaacaaagcattgatattaatggaacattttaatacacttctttcattacatgatagaataaacaatgtattctcaacatagcagccaaggtgagcaaagcatttttctctactaggcaaagccctccagtgatttcctgtcattctgagaaaaagccaaaatccttactatgtttttaaaggcccttcatgacgtggactccaatccccacctctggccttatctgctactactgtgaactcttgtccatcctgctccagccacactggccatcatgctgtttccttgaatctgccagacatgcttctccctcagagtctttgtactggcttttccctctgtctggaatgctcttcccacagaatctacatgggtagtttcctcatttcctttgggtcttt

SEQ ID NO: 8138 - DNA, 1009 bp, Homo sapiens
tatgacatgcctgggatagtccaagattcccctgtctgcttgttctcattcagaccagttgtattaaatatttcaacttctgttataaagaaaggtcaatatatactattccacctgtcatcctaaattatgcacaaaatattcaaatatcttactcatttaacttcattgcttccagccgttcaaaccagggccagatgaggtaatcaatcatagagatagaattgccaccaaagaaggtcgtcttcttattagtcagaacctgaacattaaacagcataaaagtatttcttacttgtgcatgtagtaagactcactagaaatgctgaagggaaataagtagagcaggtgagagaagcagtttttactccgatgtatccaagttgggtttttttctgatcaaaaagcttaattaagctttagaatctgttggtctgggatgaagtaaaacaatcaacaacataaactggaaaattgaaaaataaaacaagtcacagagtacaacatatttgtaatacaaaggactggtattcagaatatagaaaggattcctgggaatcagtaagaaaaatagcaaacgacccattggaaaaatgagcaagacttgatcttcaagaaagatgatgtccaaatggccaattatcatttggaaaggtgttcaactgcattagtcattagggaaatgcaaattaaaaccaaaatgcaataacactatacacccaagagaatgcctacaatgaacaaaatgaagttggcaagggtatggaaccactgtcgtagaggtgtaaattggtacaaccatgttttaagagtatgcatactcatcacccagcaattgtacttggcaatgtaacacatgttcaccaaaagatatgttatgtgaatgttcactgcagcactatttgtaatagcccaaatgtgaaaacgtttactatcaagagtagaatgggtaaagtgtaatatactatactttggaacactgtataaagaacaggaaagaactacacac

SEQ ID NO: 8139 - DNA, 1030 bp, Homo sapiens
gtgctctcaaccagcctcagaaagcttgagaagatggaccctttgcccaccagggttaattcctggtggggcagctcggctgtgatcagggcaaccaaacctataggaagccttccagtgtgagctggaattagactgaacatgtgcttgggcctgcctctccctagacgcagttgcggggcactccagggaatgaaccagctcaagtgtgtccctaacagcagcctggagctacccccaatccctcacagcctgaccctcctcattccatcagatgcatttgtagaatcggggcaaatttccttatttatttatggcccatgcctttccccctcttcatcctgatcccgttttgctttgaagagaccccagtaaccaaaaaacagcctccagaagccaaaaccatgcctggatctcccatagcttctcctttgcttccaggagaaagttcactgaaaaaaaaatatcttctggcttcttgtgtgtacagagacaacagaactcggtggggaaacgggaatcttttctgcaccaaagctgcttctaaagcagaaagcagtggggctcttggtgtttcatgctgccttatttatattaaaggaagaattaaatcttgcaaggagtagaaatggtcactgtttgtttttaacttcaggaaatctgtgaggctcccagggcagagttggggacaggggggtggatttcctattgacaaagcagaagctttcactccctttttattcttacactttcaggagactttaaaaaataacaaaacagaacatttctaccctgtctttgaggcaacttgtgtgctgcccgcagggctccagaaagggcctttgaaagctggctgtagggtggattccagcctaagaccttatttcacagagctaatgtcagcgagaaatataggagctggaactaacaggaagcttttgggttttaaagaaagagattgtattttaaatagaggattttgagtcctctaggggactttggcctttccactaaggacaaccctgccctc

SEQ ID NO: 8140 - DNA, 1058 bp, Homo sapiens
agtttaacataagaaagaattacttggtttgggtttggagttgaatgcaattgggcccttgtttgcagaggtagaaattgggaaaagcgagccccaggtttgaggatatgactcccaagagacagagactgatagagttttataatgccaggtatataaagaacagggctttatcttaatcaattcctttctctaagaactaaacctagatactgagttgtgtgtttctgtgtgtataagaaataatacatttgctgaatttataatgatggccccttgtaagtaagatttgtgttcaagaaactcattttatgaataattttttttctggggatggatctctttcataaagtggttatccactgatgatttaagaatcaacagtgctgatctcattcttttctagtctttcatcctctagtggtgtgttttttacttctttgtgtgtcctagccatgctctttgaagttttagtgataacattcaggacagggaaaggtcagtggtcaagcaattgaggatttagaaagcgggaactggatgttaaagccaatcaggaaagtctccgtgcacacggtgacaagaaagccatccagggcacgctgaaagggggacaggcataaatagggaatgaacataaactcagcttaaattgtcttgtttgaaatatatccattacctggcctattggtgacatgaacctctcctacattactgggttagggttatttactgtaaaattatagtaaagttagacacagaactctgactttctctgtctgtcttggaagaagtttgggtgagcagagaacacgttttaccattgcatttgcaaattgaattaacttatctccccatttcttgtcctcttgctttttatcacttataagtggttgagtgagaaagagaaatgttattttgctttccataagtgtttgaattagctatcgatggttatgtgctaattatatgataagagatagttttcctctgtcctcataagttgctgccttctgcaaagccaagtttctgtgcctccagaatacatgacacctcat

SEQ ID NO: 8141 - DNA, 1039 bp, Homo sapiens
gttcctctaggtcaaaaaagactgggacccagtaggatcagtacagttggcctcggaatgctctggcacctgtgtcatccagtgcctacataacacccaaggttggcttcatcctctgccattcctacttctcagcattctctagtgcctggcttccaggctggaggaatgatggctgtgtcagcaggctggtagctacattaagggatacccttatgggaaccaagagttaaagggcccatggggagccttacgaccacagagccccagattcttctgttggtgaaacatttcctttccaaaatggaacactggacaagattttatctagagtaggggctagactgtggccttacatctgtagaagatagagtgatttgaggggaatttgttcccagatagagttaggtggagctgactggtcctctcaaatttgcaaaaggaagcaggggacggaggggagttctggtggagtgcagggaggctgtcagtgtagaccgaattagctacgaatgtgaaaccggagatcacatagcgtgtgcttgaaacctggtactcctgcttactagctgggtgatcttggccatgatgtttcacctccctgtgcctccattctcatatttaacctggacttaataatcaatgtggttatgaagatcaaatgatatatgtgaggcagttaaaacagcatctgctgtacctaagcactttgcaagtgttggatattattgttaattcggcctctcacttaccagttgtgactttggacaagtcattttccctctctaagccttgttttttttctgcactgaaactctgaggtctccaagaccctttactactgcagcaaacccactgttttcaagctttgatggctatgcaatctgaacatgatgcattgtgtttttgttgtaggctatgtggaacccataacttggctcaggaaagtaaagacttattgtttgagctccgttctctcattctttttggtttttaggatttcagaaggtcacttgtatgaagaaagccaggacttttg

SEQ ID NO: 8142 - DNA, 1068 bp, Homo sapiens
cttcagggaaatgcacattaaaaccataatgagataccacttcacttcagttagaatggacgttatcaaaaagacaaaagaaaacaagtgttggtgaggatatggagaaaagctaactgcttacacaccgttggtgggaatagaaattggtacagccattgtggaaaacagtatggaggttcctcaaaaaataaaaaatagaaataccatatgatctaccatatgattccaatactgggtatatgtccaaaggaaatgaaatcagtatgttgaagcgatactagccctcccatgtttattgcagcacttttcaaaaatagccaaggtatggaatcaacctaagtgtccaacaatgaatgaatggataaagaaaatgtgttatacatacataatggaataccattcacccataaaaaagaataaaatgtgatcatttgtaacatcatggatgaacctggagaacctgaaataagccagacacagaaagacaaataccatatatctcacttatacatggaacctaaaaaaagttgctatcacagaagcagagagtagaacagtgcttactagagactggggagaagagtaaggggagaggttgtttaatgggaacaaagttacaattaggagaaataaattctggtgttctattgcatagtagggtgactataatttacagtaaaatattgtttattacaaaataggtagaagagagtgttttaaatgttcttaccacaaatgaatgatgaatacatgaggtaatgaatataccaactaccctgattggatcattatacaacatagatatgtattgaaacatcaaatcataccccacaaatgtgtacaattacagtatgtcaattaaaaatattaaaaatgaaaaaaatgactgccaaatacattcttaatatattattaaagaagtatatagtagtggaataaagtcatttgacttcaagtcaagaaattggatcctgatatataacttgtcacctactagtgggcctttttctaaaacactgtagactttaagtcttccaatctgtaaaataagtgttttatactaga

SEQ ID NO: 8143 - DNA, 1062 bp, Homo sapiens
gagttgctgcacacaccagcttcccagaaatgtccacatgtaaagctctggttgctgatgatgtgtggccctgcaggtacagccttctcagtattgcattagggctaggctctgaatctggtcacgtgattttcagtgataacttaaaaaatgtctccattgtttgcacagattaaagatgctgttgctctctgtgaactctttaactggctggagaaagaggttggttcttagtctttgtttaatatgtggatatacattattcagacctacctatatgtgattctaactctagcatctcccatgctctgctgaccatgagatctgagatcttcatcaaatttttgggctctattttaataattctctctggaaatttggtgtgtgtagatttcaaaattccttaattatgaaaatagtaacaagaatgaagaaaagttccataatagagtggatgctttttgggttagggaatcataactaagtggaatttcattataaggaaaaatgagtcttataatattattataggcaagctgattgtattaggagaaaaagatctttgtgtacattttgaacttcagtttaagccttgagcctttttatattaaattgactcttggccattaatttcttgctctagttgacaagagggtggtttctctgtggtgttattaaacaatatcatgttccctttaagtattgtataaacaactctttaattgggaaaagaaaatattgtctttattcccactagtgtaactttttccctcatgtttccttctggtgattgttcatctatgtaaattattattattattttattttattttattttttgagacggagtctcactctgtcacccaggctggagtgcagtggtgtgatctcggctcactgcaacctctgctgcccaggttcaagagattctcctgccttagcctcccaagtagctgggattataggcgcctgccactgcgcctggctaattttcgtagttgtagtagagatggggtttcaccatcttggccaggctggtcttgaactcctgaccttgtgatc

SEQ ID NO: 8144 - DNA, 1055 bp, Homo sapiens
tctaaagtatttgggcacataagtgggcaccagtctgcttgtgggacagatacaggtgttacgagaggggcctgacctagacttggagatcagagcagactcttggggaaagtaatattttgaagcagagagtaaggataaatgtgggtgagttaggtgaatggcagggtgaggaggggcggggaaccatgatccaagcagagggaacagcattttcagagactctggacagtagagagcacagtgcatgtggaggacctgaagtggttcagtgaggtcagaacatagtgaggccagaatgtgagcaggggccacagaaaagagaggccttgtgggccacattcaggagcttgggttctttttctgaacaagaatagtgggaagctattgaacgaatttttcagagggaaccacatgttagatgtacaagttgtaaagaatattatgactgaaacatcggtagatggggaaagacttagaggctgtggcactaacccaagtgagagatggtgggacctgaacctgagtggtgactgggcgaggctgtagatgagctggacagattagatggagatttaggctgtgggtcccaaggtcttaatgaaggacgggaagagggtcatcagtgaaggaggacactgcccagatttctggcttggcagattgggtggatgggggcagggaatgcaccttggagggcaggatttgggaaaggagtggggaggagagaaaaggggcttggttttggttgccaggaaacagagcctgatgtgtatgtgtgtctgtgttgccacctctcactcatgttccctcctttttctgccacccacctctcctccatctgcaggctcttcattgatggtgaccgcatagacgcccccagtgtgaaggagcacctgcttcttgacttgggtctggaagccgaatacaggatccaggtgcatccctacaagtccatcctgagcgagctcaaggccctgtgtgctgacctctccccaagggagaaggtgtgggtcagtgacaaggccagctatgctgtgagcgagaccatcccc

SEQ ID NO: 8145 - DNA, 1059 bp, Homo sapiens
agtattagtggcagcaaaggcaaagaaacagggaagcttcggatgctcttcagaaacagtgggacaggtttccctggcaagagaccagggaagtaaaaagcagtggtgggaaataaagctgttgttacaggattcttcagttgcaggtaatagaaactgccttgagataccttgagcaataaaaatgctttataaggattcaagggcagagccaccatattggcacaactccagattgtgaatggtgctctcagagttatgtgtgtcagggcctcagatagggtgtcttgtggaacatgagggcaggaatgtagcaggccctcaagaagaactgggacgggagggttttcaggtcttgctgcatatcagtttctctttttcagccaactggttgggtcatataaacctgacaacacctacatttatatcttttcctctcttactttcaagataccagattgaactagaaccttaatcccccaaattcaaagtccaggatgagaacttgattggtatatgtagcaacttggttctgcatggtcctggttactctgtgtgtgtgcacgtgtgcgtgtctgtgtctgtgtgtgtgtctgtgtgatgtcagacatgagtaatgggggtccaccagtccaccatgatggagggggtggtagataagggtatttctgtaagttgagcaaagatcacaaaacatgtccattctggctggctgacttcctgcctctccccagaggtcctggtctacatggttgcgacaaggtcaggcctgtattaacctgggaacaactcaacctcaagattggatctctgcctggagacatggatttcctggccttaggagcaaatgaagggcttgaaatgaataagcaaagggatcggatatttgaggcaacagtatgaagtttaggatactttgatgtttagaacagtgttccccaaactgtgtgtgttcttcagtattcctgttgtgtcttgtaagatgctctacaaaaaatatatttgttagttgagaaaatagtgaaatgagctgaacagtgtttttttattgtggtgaaa

SEQ ID NO: 8146 - DNA, 1131 bp, Homo sapiens
ggtgagccactgagcccggctaaccaacttccatttctttttgagacggagtcttgctctgtcacccaggctggagtgcagtggcgcgatctcggctcactgcaagctccgcctctcgggttcacgccattctcctgcctcagcctcccaagtagctggaactacaggtgcctgccaccacgcccagctaattttttttttttttttttttgcatttttagtagagacggggtttcaccgtgttagccaggatggtctcgatctcctgaccttgtgatcggcccgcctcagcctcccaaagtgctgggattacaggcgtgaagcaccgcacctggccccaacttccatttcttaaaagcattcctatttttatatttacatttcattttcctctgaaccagaaagctctttaagaacctgtcccctttgaaagactcttaatcttctaaggacattcaaacagggattgcatggagtctaggggctggaagtaaccaggggtcggggcttctcaaacttatgtgtttcaatgcctccttattcttgtgccaactctgtgattatttgctccttgtttttctcctttaattgacatgttttaataaatttagagagggaactttatatcattagtctgatactctgctttttagaccctctgcccctaggggcatagttctctcttagttttcaataattaacacgtatagggttgtcagtgtgctagctgatgaccactaaaaatactttttgtgtactaattcgtttaatcttcacaatcatcatagcaaccctttgaagcaggtaattatttttatcatcatagcttcacagaggaggaaacaaagatactgagaagttaggcagcacatccacagctagtataagtaaggactgagtttcaaaccctgcagcctagttccagagtctcaactcagaatactgctttactggattctggctgatatgtgagcctgtctgcaaagttttatacaggaagcactgattacctaaaattgcaaatttcttgaaggcagagaccatctttaatacttccatctctctcttagtgcctacttgtgtacctttgacataatacttgcttagaaatatgctcagtttgtgaaagag

SEQ ID NO: 8147 - DNA, 1685 bp, Homo sapiens
cgtttacaaaactaaaattttgacgtatcagaaggcaagtgttatgagtattagtaaatgtaatgatattttccacaacttagaagttacagtaaatggcttccagcatgggaccacttctgtacccattttttaacactaaacaaaggcaatatgtttttcttcttttaaacgttgaaaccagaatatattttaacattacttaaaatttgaaattttttattttttccaacactaatcaggaatgatttctgttttctttcccttaggtaaagaggagtatttttgcttcacctgagagtgtgactggtaaagttggagtaggaacctgtggaattgctgataaacctatgacacaatatcaagatacctctaaatacaatgtcaggcatttgatgcctcaataatcagaaaaactgttggatttcatctctgcagggctttacatttacctttttatccttatatttttctaaaggtaaattatttgttagatgagtaagcaagataccattgtcgtcattggttggcttcagtagaatgaaacgtgaagaaattgcatttgataactgctattcatttaacttttctcattatcagtaccacggttccctcaaagtttgttgaataaagcaacttttgtagatgctgtttcatacagcacttagatgaattattgatcttcctaatatcaggcgcctacttaacctatggtgtgtactttttgtaagttgtaacttgaaattttcagatgctttgaacttgacacatactctagcaattcattggaacaccaaggcaaaaacaccaacctgctaaaagagatcttttcatttttcttattttcagctttaaaacttagctgtcgttcagttaagcttaaagataggttaatttgtaaatggcaaagtttgttttgaggtttttcctcaataacttgtttcccaggcctattaggccatctctaaaattgatctagctgttttatttttatgtactcttagttttatgtaagaaaccttaggatgagctcccttttctaaggtgtttttgttttttgtatgtttgcttttttcctgttttttgttttttccatttacggcagtggtaccatgttttggatgtgtgatgtttatatgggagaacaaaaagctgatgtatagccctgtatacagtgtagatactatttttgtaaaaacacaaggctaaattaatgaacaagaatactgaatatttcatcattaaaaatttcttgtatttcttgtgcattaatctgacgataatttccctgtatattatgttcatttagctgtttgtaatttttgttaattagatcaggttgtctgcatttgttggtgtaagtgaacatcatcacagttatcctgagttgagtttaagccaaatacatgcatagaaaagggtcttcctattaatggaagaaggtaatttttaggatgtgtattatttcagttttgtatgtttaacttttattaaataaagtgtttttaaaatctccagggtgtgttaacaaaagggtaaagtctttagctgtcagcacttaaagcaattaaacctccaagtacttgcacacggcattcatgcaagagaatactgagtgtgtgagaggtttcagtaaatgcttaagtattccttccattagaagaaattggatcttaaagggcaaa

SEQ ID NO: 8148 - DNA, 1054 bp, Homo sapiens
tggagcgggaataacaaaaaccagaagaagcttcacttgattataattaatttgcagtggttggtaaaggcaggcaccaagccagattcaccactttataaataataaatctgtgggggtgatgttgtgaaagatgcatggtaaggttgcatcagcaaggtgaatcactgagtgggtgggaccgtctagaaaagcatctgtgtttggaaagggatcattctacagcttagtccagaacaccttgaacacacagcatagcagaatcttgactgtaatacttggagcaaatgtcactggcaaaaatggcatatatgctgggatgttcataacaaatagttaaatattgttggtcctttcgcatatagaatctcggtattagaggaaaatagtaaactgaaactctatttctgttctgcaagagccaatttcacctattgtattacttcgttaccaattgcagctgtgtagtcagtcatccataggattctttttgttagacacaaagtagaaaccagctgttggccgttgagacaagtaggaatcttaggaaatgttagcctgccagttcctacttttcctaactacctgcctcaccacccccatcaaatggtggtcatgttttttgtcacccaccattcaggggagatgctatcaacgaaccacgctggctacacacaaataccttttcctcagatgatattaatcatctttgccttaaaaactgaagctctaccaagttttcactatgagagaaaaaaaattacaacacctagccttgtagttaacaccacaactgactaatggaagttgacaagatctaaatgcttatacaaactatcccaaggtcacaggaaattaatggcaatattatacaaggttagggtagttcactttctataggaatttggattttacttcttaaactacaatggaaatgtctcaggcagtctgctttgggaatgtattcttgaataatactgatttctcattgaaggaaaaaacactatatccaacaactcagatatggcagaagtgaagtcaatgttccgggaag

SEQ ID NO: 8149 - DNA, 1015 bp, Homo sapiens
gggaggccaacgggggcggatcacttgaggtcagaagttcgagaccagcctggccaacatggtgaaaccctgtctctactgaaaatacaaaaattagccgggcatggtggcatgcgcctgtaatcccagctactcgggagtctcaggcaggagaattgcttgaatccaggtggcggaggttgcagtgagccgagatcgtgccactgcaccccagcctgggcaacagagcaagactccatctcaaaaaaaaggaagaagaatagaattgtagcaataagtaaatttcagccatgtatatacgtgaactaattgagaaaataaagctgtcttcttattaacagatatatggccaataacttttatgttcaacaattgctttatcaatgtgtaattcattttgaccaattttgtgccagttgtaataactgaatccaaaatattttaaagtttaaatttataaacatttttgtagcaaagaagtatgataggatgatcattaaaataccaggcatgaggccaggcacggtggctcacctctgtaatcccagcactttgggaggccgaggtgggcggatcacgaggtcaggagatcaagaccatcctggctaacacagtgaaaccccatccctactagaaatacacaaaacaaattagccgggcttggtggcgggcgcctgtagtcccagctactcgggaggctgaggcaggagaatggcatgaacccgggaggcggagcttgcagtgagccaagatcgcgccactgctctccagcctgggcgacagagcaagactccgtctcaaaaaaaaaaaaaaaggcatgaaaatacgttacactagaataaagtgggttggaaatagaggtccaggaagaaaaaaagatgatataaaacttctaacttaaaaatgatcttctttttattaatggatgatggtagctatcaaattgctgttatgtttagattatattggatatgtttttaaaagactgaggtaacagttatttttaaatatgctg

SEQ ID NO: 8150 - DNA, 1026 bp, Homo sapiens
gggttaatcataaattaacctcttatgacggccgtgatatagaaatgtatatgttaggccaggtgtggtgactcatgcctgtaatcccaggactttgggagaccaaggcagatggatcacctgaggtcaggagttcaagatcagcctggccaacatggtgaaaccctatctctactaaaaatacaaaaattagccgggcatggtggtgtgtgcctgtaatcccagctgctccagaggctgaggcaggagaattgcttgaacccgggaggcagaggttgcagtaatctgagatcgtgccactgcactacagcctaggtgacagagcaagactccatctcaaaaaaaaaaaagaaagaaatatatatgttagaaaaagtctaaaaaggaaatttacaaagactacaagaagatagttccctggaaaagacagtgtgatggtgtgccaaaaacacctttcctgatcatacacatataagtaaacacccataccgagttccccctgactctagttaggagctgtctttaaccacattagtccctattcgggatcatcaaatttgggaaatacctgttcctagcttgttatgaacatttaaaaatcttatttttttccccttcaaactgtgcttataatagatagcaaagtggggaataaaagtctaactacaagcttattaatttgaagtaataggacttactgctttcagtaatgtcactgtcatccatcagactatttcacctcaatttcattttctccctcaggtgtttcaagaataaggggttggttccctagaaaatgtgtggaaaagtgtccctgtgatgctgaaacagatcaagccccagagggggagaagaaaaatagatagctgctgttaaaacaaaattatcctttaagtctgcttaattacttgaaaattgtacatattactaaagaattatgcaatgagcctactctggttaagatgttcttttcctcaaaggtgccctagtgccatgatttaaatatttttattaccattttgaaat

SEQ ID NO: 8151 - DNA, 1050 bp, Homo sapiens
gaattccttatacattcctgtcacccaactttgcccacaattttttccatcttatatgacctccactctatctaaaattattaagactcgttccagtcttacctcttccataaagtctaacctacccccatagactcatctgaatgtgacatttaatcacatactactctatggtagctcatgaagtctcatatttttatttaattctgctatcttatatctgtaacttcataagattctaggacagagatcatgagttatctttatttctcctattatatctaatatagtgctatttaatagtagctatgtcaaattaagttatgatgacttttattcattcaacttcattattaaatgttcttcattattcatttgtagtttgtctgccatgtctctacagaatcagtgaatctcagtgttttcacctgagaagcttcatgagggcggagaatatactccctgatccctgggccacagtaagcactctaggaatatacacagatgaggacattagagagtgaatagcgagaagaaaacctcactctcagcctctggttcttagcatagggcctttttttccatgctaaaacaacctgtggcctttaaattatcagcaacttgaaatgctggaaaattggggttttgccatatcactctgacagttgatgaggaaaggcgatttttcaacattgagacaagagacttcatttttttctttttatttcttccaaacagatagaacagttgaaacaaaaagcagataagagagtcagaagtgtaagtacttcttttgcagtggtaatttttttttcttttgttaggctctgtacttccatacagtttttttaattgactgactagaaaccaattgttggcctttattaaatagtattccttaatacatttgttgaaatttgatgcagttaacttttgtttttatttaaataattgggactagaggttgggaggaatttagtccatttatattgccaacataggaaaataattatcctcaatacagctccttaatgtgaaacctatccttac

SEQ ID NO: 8152 - DNA, 1093 bp, Homo sapiens
tgtgagccactgtgcccggcccaaaaaccattcttatgacttattgcattcacgtaattcattcattcattcattgaaggcctactgtgggccaggtattatgctaggcccttggaatatgatgaggactcctgggccaaggctgtttatttttttattgttgtttgtttgtttgtttgtttgtgacagagcctggctctgttggcccaggctggagtgcaatggcacgatctcggcttattgcagcctccaccaaggctgtttctaacatactacactgtctctctgaaggcacagccagactttaagggaactcttggttttaaaataatctggttttgtttatactttattatcgtctactagcctgggaccaaattctttgaaaaattttccccaatgcctctaatttagaatcatattagaaataaactaagatcctataatataaaagcctatatatgtggaatcagtcatatctaggaaaatcaaataatagaataaagactgaatacattcattatttttaaggcaagtgaaatattgaggttgactgaaatgagtcactgttacttctcataaatagattaatcgtaaatttaaagttagttaaaaatagtgataaaagattttaatagcaaattataagtaagcactgattaaatggattatatcaatgttttattaaaccttgctctgaaaatagtacttatgacataaagtttgattaacatactagattcagatttgattatggatgggtgtaatcattgttacggagaggtaccgtggtgcagtagttaagaacaaggactttggagtcagacggatgacatggtaattgtggtacttaacctctgttatccttggtatctttgtctatggaatggagtaataaaagctatctcagagaattatgaatatgataatcttaaaggaaccaaggtcgcattattaaattttactatcatttaatttccagatgaaaataattctcagaaacaaaacttctattgagtcatggattgaagagaaggtaaattttaataattgtttcttcaatattaaaaaagtatattaataaaggactggt

SEQ ID NO: 8153 - DNA, 1054 bp, Homo sapiens
ataggttcatggtcaaaagtttaggaaacatcacatgtcatacacagtgaggtttggctgtagtaccttttttcatgtaatacattaacatcccttagaactgagaaaaacgctttagaaactgctggtttaaatcataaagttttaaaatcattgcactgaaaatataacattgggaagtatagtccaaatccatttatagcttaaaaactactgggaaatttatgcttatgaatgtccatgtttcctgctaagggaccacacctgatggcttgtcagaaaggcagaatcttgggctccacttcagacatactgaagcagaatctttattttaataaagtgcccaggtgatgcttaggtatattaaagttcgggaagcactggtgtatatcatgtgctatgtactattcaaaatgcgtacagaggagggtaagatgtaatttgaactctgaaagagcttataacctaagcaagaaacaaacgcacttgtgcaaatcactaaactataaagtagaacgtgatgggtgctgttaaagttagaagaattgagcattgttagttggggacctgagggaggagtgggaatttccaaaggagatggggaagagggcatttcaggttgaaagaatggtgggaccacgtattcagaaacagtagacagccctgtgtgactggggaaaagatcatgtagggcagagacagctgaaacaaaggcagattgtgacagtcttaaatacatgagaaattgtagaccatagaaagttgtaggggttttcaggcagagtctgacacagtcagaggtgtattataggaatattattttgacaatacacggtttgtgctgaagaaaaactacagtaaaggaaactagttaggaagtgattaaaatggcccaagaaaggggtggtgacgggtaatgtcaaggagggagcagatttcagtaggactatcaactcacgattaactcctcactctaaaatacctgctaagttgtcagctacctttttctgaactcctgaatccactaagatttggggtaagtagaaccaactag

SEQ ID NO: 8154 - DNA, 1035 bp, Homo sapiens
gaagaagagaagaaagaaagatataattatgaggaggaggtagaagtagaagaaaatgtcagtggatgtgaagaaacttctaaaatgattttttaaaaagtgattgatcaccgttccggtaaaaagctggaagatggccctaaattcttaaagtctggtgatgctgccattgttggtatggttcctggcaagcccatgtgtgtcgagagcttctcagactatccatctctgggtcccttcgtgatatgagatagacagttgctgtgggtgtcatcaaagcagtggacaagaaggctgctggagctggcaaagtcaccaagtcttcccagaaagctcagaaggctaaatgaatattatcttattcattattcaatgaataatacctgccaccctggtcttaatcagtggtggaagaatggtctcagaactgtttgtttcaattggccatttaagtttagtagtaaaagactggttaatgaatcataacaatgcatcgtaaaaccttcagaaggaaaggagaatgttgtggaccactttggttttcttttttgcgtgtggcagttttaagttattagttttaaaaatcagtactttttaatggaaacaacttgaccaaaaatctgtcacagaattttgagacccattaaaaaaatttaatgagaaaaaaaaagtgactggctttgaatttgataaaaactgcctcaacagatatttctactcaaatttctgaatgaattctatactgagttgattaaaataataaggtgagttgaaagacagtgtcaagaaccaaaagacagaaggcgataaagttgcagtactgtgcttttataccacaaaatctccatataatgagacgacttaggaaaactctattagtagttcagtcaagacttggaaacaaacaaatacattaaaaaggcacctcaaaatttaaatgcatttgttcagcttctttaaaaagttctaaacatgaagcacattttagctgatttttaaaaagagtaagcttgggtaagcatattaaaaaagaga

SEQ ID NO: 8155 - DNA, 1019 bp, Homo sapiens
tgcaataaatggagtcgcctgacttttttggtttcccagtgggtagaaaagttatgttcacactgtactccagtctgagtatacgcaacagcattatgtccaaaaaatacatatcttaattaaaacatactttattgctaaaaaatgctaacaatcatttgagccttcagtgggttgtaactgttgggctggtggaggatctggcctcagcactgatgcctgctgattaatctggtggtggctgccgaaaattagggtggctgtgacaatttcttaaaataagacagcaatgaagttcgctgcatcaaatgattcttccttttatgaacaatttctctgtagcataccattctgtttgatagcattttattcacagtacaacttcattcaaaattcaagtcaacagaaaggtgattgtcccctcgcctgtcacgcaatgcatgttcctggcgaacctggcactaaaccattcaaagatgacctgcttctgggttggggtttcgtatgtagcagagcagctccctcactgcgatctattgaaagtcagccctcaacgaaagtgttcgttaaaaaaaaaaaaaaaaaaaaaaaaggaaaaagtttaaaagaaaacaaacaaaaaaagagttaaaacacatacaaaattcatgtcaatcctctcaaactctgtggctgctttaccaactaagtttatgtaatattctaaatgtatatttcaaaaatgtatcagcacattcaccagcagtagattccatctcaagaaaccacttacttggcttattcataagaagaaactccttatctgttcaagttttatcataagattgcagcaattcagccacatcttcaggtctacttctaattctagttctcttgctatttccaccatgattggcacacctgcagttacttcctccattgaaggaagtcttgaacccatcaaagtcatccatgagggttggaatcaacttcttccaaactcctattaatgttcagacatcctcccataaatcgcaaat

SEQ ID NO: 8156 - DNA, 1058 bp, Homo sapiens
ggaggctgcagcgagctatgtttgtgtcactgcactccagcctgggtgacaaaatgagaccttatctctttaaaaacaaacaaaaaagctcaacttttgattaataaggaaagaaatagaaaagcaatgtttatatgtctttactccgaatgctacaatagaacaaaaatgagatagtttaagaaaccatctgaataaggagaattcttttctaatatagttaggttattaacctaatatttattttatgcttatctttatgattagttgacttttgcagattccattttttttaattctacaagtacacaactgatactatcattttgttttgcagaataattcaaagttatattttacgagaagaatcaggcacactttcttcagaggcatctgattttaacaaagttcatttaagtagacggggtggcatcatggcatctttatatacatcccatccagctgacaatggattaacattggagctctctttggaaatcaaccgaaaattacaggctgttttggaggatacgttactaaaaaatattactttgaaggtatttgtgtttctcattcacacaccaaccagtaaacatggcaaaatgatgcctgtttcacagtctgatctagcaatcagctgggctgtttctgtaatgcaaggcagtcattttacccaaagatgaagtttcgtgattttctctttttaaaaagtatagttttttatattaggaaagatgaaaaatagcaaaaattaattttgtatttgacagacactaagatgtcattaaatttgcattggatgggctttgacatataattagttttgattgctaaaataattttttaagattatgacatttctgatttatttttcagctttattttattttttgcagttaatattttatttttgctgtgggtgggccttgaaaattagtagttagtttaaaaataattttaaaatcagtaatagtaagtaatcattttatgcattaaaaattgctgtagcttcagtagaaagtttgagtgttactttgaaatggacaggagtactttac

SEQ ID NO: 8157 - DNA, 1049 bp, Homo sapiens
tatgaaggtggtttcctgcaagggtttaacccaaattcctcctcacctgcccctgttgctgtctaccaggacataatttagtagttctgtaaaatcaaacaggacatctccggttgcttttttttttttttttttttaatttggagacagagtcttgctctgttacccaggctggagtgcagtggctccatcttggatcactgcaacctctgcctccctggctcaagcgattctcctgcctcagcctcccgactagctgggactacaggcttgcaccaccatgcccagctaattttttgtatttttagtagagacggggtttcaccatattggccaggctggtctcaaaagtcctgacctcaggtgatctgccttccttggccgcccaaagtgctgggattacaggtgtgagccactgcacccagcctacagctgcttttttgaagctgtctgctagaattgtaatgtgtgtgtgtatttacagtctatggagagttttttctaccactcttataagaggaatgagggttttatttagcaactaacatttaatgtagtataagcactttaggaggttattttgtgatcttcacattaatcccacgaattagtccctaggtacaattattagccctattttacacaccaggaaactgaagcatagagaggctcattaagctccccaaggccacacagccagtatatggtgcagccaagagtgagccaagatgtggaactaatatttaggcaatttgaatctggagtgtggtacctgtgggaagggcggaggtggctgcttcttgcaagatcaagaacccagggcaaggggaacttgactcttagggcacttccggttcagagggcgcataagttcaagtgagaggcactgcagtttccagcagccaccaggggccaaagaggcttggggcaggggggtggcccaggaggccttcgtttctcctgcccaggttccttgaagccccaaggaagggcttttgcctggtggtccagtgggcacctaatcagcctcgcgtgcctccccccggttg

SEQ ID NO: 8158 - DNA, 1031 bp, Homo sapiens
taagtagcgctgcggctaagaaggaagagtgaggggtctgtccatggggtggcagtgatttcacacccgcctttcttgaatggcttcgtgttactcagccgtgccctggcaggaatggaactccatcagggaacagggcagctctgtttgaatggggtgaaaaacagcaaaattaattcttagcaagctccttgttctctactgttcaccgggacctggctggcaaatgacttagctattagtatatttaaaaactgttcaaaagcaaaagagaaggaacaggaatgaaaggaaaccttcccttaactctttctgcttcccatagcaggtctggttcctgctccccgcctaggacaggagctgtctggagctccacctttgcaaagaaaggaaaaacacaaattgcccccagattggcccagtggcatgccattaggtgattttgcataggggccatatcattcatggccaaaaaaaaccaaaaagcaaaaaacaaaaacaagtcccatgtcctactgactctagttcttccagtcgttatcctctgctgtctctctggcatcctatgaatcagatcaagcccatgctgttgttggtttttaaggtttctttcaataataggctaaggaaagacatgtttttctcttttaaatctctgcaactccaaagtagactccttcgaacgtatttaatttggccttttcagctttcttcttgcccagctctgtcgaattcatgggtgtgtgtgcacatgttggtttcactcacccagagtaattttgtgagcatgcatgtgctttttaatttctgcttgaatgtttgtcctgctgtgttgcagcttctaaagacattgtcaccgagtgtgtgtgactcaaagatcaagagtgaggctaaactgcgaccccaacatcacttccttcatggaaaggtgttggcgctgatgtagctcatggaaggatcagactgggaaccacagaggaaggatgaggtgggatgtggaggtcagagcatctcacgagagtccctcaggc

SEQ ID NO: 8159 - DNA, 1035 bp, Homo sapiens
aagttgtctttgctgtggaattaggacctgacatgaaacgcagatctagtggcagagaggaagatgatgaggaacttctgagacgtcggcagcttcaagaagagcaattaatgaaggtttgtccttaaactaccttgctgctgtcttcaatgctagttacataagatctatattttttgaatgactactatgtataaaccatctagataggcaagaggtggtcccagtcttcaaggggcttgaaatctggcaggcaaggcaagacaggtgtctgttaatagtaactagaatatggcagaatacctgctgggctctagaggagatggcattggtgctggaggtcagaggggtgtggaaggtttgggttgttgtgggaaggaaagagagaccacatgggggcatgtgtgcagtgcatgtgttgaaaggctgctggagggccaggcagagcaaggtggtatccacccaggtagtgccacaccttccttccctcatgcagttctgctgaaggaatgactgtgggattgaacatttctccaagtcttttcccaggatgtgggccaggagaaaaggaatgaaaggaatggccaccatgaaggggtcctcttcataccctccttcctgtagcaagggcctgcagcagcccagaaggacagtctgttatcagtcaagaggctgctgaatcctttcaaatgatgttttctaagcatataggaaatgcacgtgatattagtcaaaggatacaaagttgcatttatagtatgatctcagttttatatgtgtgtatacaaaaatactagatagatataaatcaaaagatagtgttatttctgagtgacatattatgggttactcttcttttcttctagattttccaaaatctgtaaaattagcatgtattacctttatttcttgtttttaaacaaatcaaggcaatttctttttaaaggataccagccccagtcttcccttcccacatcaaaaatccacacacactcacacatgccttctgaggtctcctggctctttagggaaagc

SEQ ID NO: 8160 - DNA, 1016 bp, Homo sapiens
ctgaggcaggagaatcccttgaacctgggagacagaggttgcagtgagccaagattgtaccactgcactccagcctgggcgacagagtgagactctgtctcaaataataataataataataataataaaagaatgatctggaccaacatatttgtggcttcttgcccaaagatgcaaagcccgccaaccctctaatgattaacaactacagtcaagtgatagcgtcatgctttcaacttagctctttaattttagattactaattactctaggagagtgttgtccactggaactttctataaggatggaaatgttctatatctgcactggccaggacagtaggcactaatcacatgtgactactgagcagttgaaatatggctagtgaaactgaggagcagaattttaattgtattaattttttttgtttaaatagcctcatctagctagtgctgggcagcactctagaatagggtttttcagatgtagaacacatgtagaatgaagctttgcttctgacgtaaagtaaggaaaatgagttgacttgtcaataggtacctctgagtgactgggccatggataatggtaataaacagaactttctggaactgaaacttttgccagagaacaagaaaactatgtaagtggggttgtaccgccattgtcttacagaccaatagctaagcaacccctgattcccatctagatgcagctgccttggcagcccagagcaagtcctcagaagatatcatcaagttttccaagttcccagcagcccaggcaccagaccccagcgagacaccaaagattgagacggaccactggcctggtcccccctcatttgctgtcgtaggtatgcaactgtcacggctaagtcaaagggacaaactgctaggagagctcaagatgacatgcttaaaaacatgaaagaaaatgtatcctattatgaagattttaaagaaaagtatgaccaagaggtagcatagtgaaaagaactaacgtggtattaacttgtt

SEQ ID NO: 8161 - DNA, 1031 bp, Homo sapiens
atttggcctgtataaattaggatttgttgaacatcccatcagcacaccaggctagccttgcacataaaaagtttctgttttttttaaaaaaacttttgatttttctacattgctttccactgttccactcattagttgaaaagtaaattgagccactggtatctactgggggctcaatttctagacaatagcaatttgggcattttccccaagctggttatgtctttctcaccataagagtacctccactgcttgcgtttcttcctgttttaatcccactttcaatgaagtgtgtatttgaaataaatggctcatgagttaatcacatctttatatatcctaagatgtattacaaaggcttccataacacttgtctatagtaagccactcatttctataatttttctttcaataaactcaatctttgtaatacagaaattaaccttctgggttgtttttgttcaagatcttcagtttgatttgccccttggttgatctgtttttcccatcgctgaactggttcccataatcacacacctttgcttttcatttccacagatcaaggaatcaacatttaccgaaagccacccatctacaaacagcatggtaaaacccgctttcctccgcgtagcttttaaatagcaaagtcagctgaacttctccttgctgtcctctgaaaggcttttcctgctgctgcttttgagagtaaaactggggcatccagcatattatgcctttctggtctactaagatgtaaatattgtaaaattgattctcctggatggagagacttagcttgattagaaagcttctaacctgttgctgagcccatcaaaccatgtatcattctgttcctagagaaggggaagtactggtcacacagcaactcacaaacatcctagcaagtcttttttctttttgccatcaaatatagtcaccctttaaaataattttgatgagactaatttaaactggtgaaaaaccagccacctagaaaaactaatttgactgagcctacatcaacttggctg

SEQ ID NO: 8162 - DNA, 1089 bp, Homo sapiens
tacaacaatttaccttcccttttgtcacatttgtaataactaccatttggagttcaggtaaatcaggtggtcttttgtctgcctagtatttgcagatttctagaccaggtgctttgaggtattcagaagcccatcatgagaagtgggagaacagaacaatggcacatcaaacaacagtgaagaccagctaaacattagcatgctgggatggaagctgtcgggaggtggggagggggtggggattgtgtgagctgggcagagcaaataagggagtgagggtctcctgggggtcttagtctagtgataagctttaagtatattcatggcatcatgaggagagagaacacaccccctaaattttggtaattacagttttcagcaacttaagaaagttagcatgtgaaagaaaaaataaagtagagcgcatggggcaacagtctagcacaggagtgtgagccagcattctggaatcaaattacctggtctcaacccagggatcaccacatgccgattgtttgactttgaccatgtgacagccattctgctgctagtttcctggaccaggtacagtgctcatacctgtaatcccaacattttgggaggctgagggccggaggattgcttcaggccaggagttgaagaccaccctggacaacatagttgagacctcatctatatatattaaaaaaataagaaaaatggtcctagtttcttcatctgtaaaacagatagggtgatgatagaatctacctcatagggtgttagtgaggattaagcaagctaatctatgtaaagcaattatcagaggccagacttgggggaaatactgagcatgtggcaatttctaccattgttgctacctgtcctcttggggctcgttaatactcggcctgcagacccatctgctgcgggaccagagcctctcagccccttggggtcctcccctccccggtcccatctcagggttgaaggttctctgtggtcgcttcctacccaagtccgtttcccctggccaatcggctcactctcatttttttctcttttattttttgaattagaatcatctgtagactgattttagtccacaaa

SEQ ID NO: 8163 - DNA, 1062 bp, Homo sapiens
actgtaagcaatctacgaagaccgaggaaaagctgcgggtaaggacacaattaaaacatgatgccagctgcatttgtaggccatacgctcgtggtcactaattcttggggctagggtttaggtgaaattactttttactgactttttcccttatagcaaactaagttcaaaggccatttggctagggaaagggttcccctcttaccttaaacgtactgtggtttttattccaaatgcttgtgttagacaaagtaagccttggccttactagtcagcttcttagaaaagcattcaagagaaaagtcaaatcatgcagatgggaaaacaacgactcatcaggttccaggtgcagcatctgctgacctcaccagactgttttggtgcttagtctataatgcactactctgaccccagctctacattggcacattttactggtctctcatttactggatccaaattcaccagaatagactctaaaagctgatggcttgtcagataaaacctttggggaaaataataaccaaccaagacaggtaaattagtcaattctcggaacacctccagatggcagtattttatgtttcagaagcaaagcgctgtacacagttgtaaaactgtgatcataatctctgtcctgttcagatgccctatttttcacacgggctaggaagtatttttcagtgcaataatcagactgaatgaatcccagtgccttgggttaacctaacttagtggtacccatggaaaaactggagtttaacttcaccctatttactgtctcagggaaaagaatggcctggatttattttggaggccagattctagtgcatagtgtaatctcttctcgatctgccattaccaggcatcagaagctatgtatgcaatccccagcagcagcacgaccagtttactgatggggtctagtcactgatgtgtgacttgtgaaggggtgacttggctttggagcaatgattatcaacgagacccattcgctctgccttttttcagatccctttgcctgccgccctgggaattacagctcttattttcctagtgtgt

SEQ ID NO: 8164 - DNA, 1015 bp, Homo sapiens
ggaatcattggttaaactccatttttctgccatcaagaatgttctttctctaccaaaattgctcttctgttagcactactatgtgagcttgtagagggtatgggatttcacaccgaaacatagaattttacagctgaagaggacttgaaattgtctagcccggccctttgcatttttgagatgtgtgtcctgaggcttggagatgttaaatagtgacatatttgaggccctatggatggtaaattgaggtatgattctcagacttcctgattccaaagcttgtagccctttccctgtacctcatgtccacaaagaattcggaactcttttctgctcttccagacaaagggtttcataaaaaatgttgtgacttacactaaattttgcattagagtagatgttatttccccagaatcctggtttgtatgctaaagttcatacttcaatttagagattaactaaatagcaataataactacagatgtctgatttaaccagcactattaaaggcaaacaattttttgcacttcaaatgtgtaggcaggtactttgtaaaactcacctaaataagcaaattgtcagttgttcatagagtttcatgctagccacagtgtagtctttttataaaagcattttgaatatgtgaaaatgcagaaatggggacgtgatttttttttttttttttttttttttgagacagaatccggctctgttgcccaggctggagtgcagtggtgcgatctcggcttactgcaagctccgcctcccgggttcgcgccattctcctgcctcagcctcccaagtagctgggactataggcgcccgccaccaagcctggctaatatttaatattttttttagtagaaacggggtttcaccgtgttgaccaggatggtctcgatctcctgacctcgtgatctgcccgcctcggcctcccaaagtgttgggattacaggcatgagccaccgcgcccggccagaaatggggacgtgattttttttaaggagcagggtac

SEQ ID NO: 8165 - DNA, 1021 bp, Homo sapiens
ctgtcgttgatgccttgaattcgttcctaaggatatcatagatcaccacaaacttggcagctcaaacatgacagaaatgtattctgtcacatttctggaggcctgaagtttgaaatcaaagtgttgtcggtgtggagtgggggttcttctgggggctctgctggagggtctgcttcatcctgtcccctggcttccagtgctgcagcatccttggtgctgcgtggcttggagctgcatcgctccagtctctgccttcatcttcatgtgggtccagcttgccctcttggtcagtttccttgtcttgtctggtcccgtcctgtcctgtattttgtaaagacttgtcattggattcagggcccacctgaatccaggatggccttctctcaacacccttaccttaattacatctgcaaagcaggttggacatatctttgggggaccacagttcaactcagcccatgccctcccatctaaaaatcggagtgcttgctcttccctctcaggtttttcctcctggaggtgaggaaaggggcaaaagccttgttcttgtcgtaatcaacagccctgctctttgaggataaaaagcaacaacaaaaaaaaacggagtcccaaggaatggcatctactattagttaatcgcaggtcccagaaaagcaccagccagaactgcaagtcttctaggaaatttcttactgaattcagcaaaataagaggctaatgagaagagtgtttgcatatctgatagtctaactgaaaggaaacagaggaagaaaaatgtgcttttgtaagccctgagagttttagctgaatggcagcctttccctgtgattaactggcattaattattgtttcaaagagtttccaaggttgactgaatccagtgtgaagctcacaaaaccaacaccatctatttgttttatttctcaggagaaagttatattaatgcaaaaataaagaattgtggctgggtttgtgatctgttttcaatagtttctttaaggaagcagctgttttttgtgtt

SEQ ID NO: 8166 - DNA, 1031 bp, Homo sapiens
aggggagaaatatgtcctgcccttctgtggaaaggccttggagaaatgtggttttggtgtcttctccagcccctggccacctcctcaggagccgaacacgtttttgtcttgcagggatggtgctccgtactgtgaaaaggactaccagggactctttggggtgaaatgtgaggcgtgtcaccagtttatcacagggaaagtcctggaggtaagtggcagaccggctccctcatagctaccgccatctttctcagcggccctcagaaacaaacaagaggggaccctttcccacctcctccatctttttttcacctgtggagaaagaaagtagtcgcaggtgactattttcaagaattaaggtgctgcactctcctcaaaggctcacgtggaaattagaatgatggagaatttgcacaggaaaaaaaaaagaatgataaaggttctggtaggagttatgtaggacaggctatattagaccattttcatttttagaagttagacaagagtaaatgaaaagggtgtgaaatcatgtgtgtatacatccatgtgtgcatgtgtgcatatgtctatgcatgcatctgtgggcgtgtgcagattcagggagcagaggctcagaatggaagctaagaaaggaagggtgggggaaaggtagaggcattggcttccccaaacttcaaaaaccacatcctgtgtgacccagagcaccctgtggccggggctgagctgaagcctgtcaagttcaggtgcaaccgcctccagctagggagctttcttcctgctttctcagcagccgccacacaggcttctgcctctgggctgagccagttcctctggggtgagacacagaattctggggccagagttcagaaggagtcgctaccctacttctcccaggcctgtggggtgtcagccaggtccaaggaagaagtaagactgcctcatctgtggcccacctgccagcgtggagagtatggcccaagcagaggtgggtcaggaagccccacaactagggggatgactacaggtgctgc

SEQ ID NO: 8167 - DNA, 1824 bp, Homo sapiens
gacccttctagaccagaattagagacagacacatatgaatataaaaattgaatcattctatgatcatttttctgtaacttatttttttctcttttattatgtcttagggaccttcaccaaatgattttataatgtaaataaccactctttaattttgctgtctagtacacttagatttattgtcacattttcttaccgtggggacattctttcctccccaaacacggacatctactctttcagggcgttcttgaaccatttcaatgacttacctgtgtttactttatcttaaagctactatagggaatagatttaagatgaaaatgctgaactcaagatgatccttgttgcttgaaactcagtttgattctattatattaatgaatggattgacatacaggatcctgagagcttaacagtgtaaaggctgcacctcaggacaaaagagaaacatgattctgctctattcactctgctcctatagatctttagtaatcacatgctgtagctttggtttttcagtgggtaaatggtaattgagtgaaatgattcggtgtgaataaaggtgcttctaataatatttccactcttttgggggtgcttccaggaaccctcagtaccaaacacagatgttgacatttactgcagttcagatctcttcatttgtagctcccacccaactatgacatggcactcctctctgttgctaatggatttgagtttgtttccctgatatgagtaatttatgagtgatgggaaagggaattacaaagccatttcttcattccattcttgcgggactcttggaagacctagccttgctatatatggtatatattatagatcagtagtcctcacatagcagctctttttctaagtcttggagacttcccaaagcttagattgcctgggttcacattgctctacaagtcactggccaccttctaactggaacactttggacaggccaccaagaggtcacatactagtattatcttaacccttagacactgattaaaggctgttctgttttattttgaggtctgtgccagtccacaccactgctttctgattgcactgacctcagccatcaacagagaaaggcaggtttgtttcgtttcgtttcatttttgtttgtttgtttgtttgtttttggtaggtacacaagggtttccataggaaaaagggaacttcttcatagcccttaaagtgagaagggcactggggatcgtttagtccaggcattcatcctagagatgagaaaactggggatcagaaagggtaagtaggttgctgaaggtcacacagcagattgtggacaaagtactcattctctgtgtctcgtcacaccatgtagtggatgagagaccacaattgccagtgtgttgacagctgctatctctgtcacaagatggtgagcctttcagaagtggcactgtgtctccatctttaactttccagtgcataggttagtgtttcccccactgtagatcttcaaacaaccaaaacaggttggcccgttgtcagagcaggaacaggaacctgtgccttcttgattcagaaacttctccaatcctctccatttattcttgttctcagaaaagcctagctccttccttccctgtggagctgtcaggaatcaactcgaggaggctcgggtcctggcaatgtccatcccgaggaacatggccggcccaaggaggagtggcatagactccctgttgtgcttgccacttagagctcacactggcttgcctcatagttttctctctaggataaaatacctggttcggggctgacatgggcaggagagaaagcacgctg

SEQ ID NO: 8168 - DNA, 1031 bp, Homo sapiens
tgtctttatttaaatgaatttaaagtcctctgtttttcttgtactgtacaaagagtggattttagtttggctttccagaaagatagggcaggttttggaagaaatcttacacgcagagagactgtaagtaaacagagtaagtgatacatctaattatatttttagtggtcaagccagaaagaacaacgttctttctcttccttgttttttaactactctcctcccttctactccgtggcatatttttaaggtatttggagtctttccacttgctaccagctggaatctacagaaaccgtatctctagaacactcagcagttgacttgaagctcagtcataattaaattggaagttggcaaattattccaagacttaaaaacaggcacaccttatgtttggaacataaggggttttgctactctgcattgttttaaatgtactctctatagggaatatgggcaatacttttaattagctttttttaaacaaaaggatattttgaaaggatatgtaataaataagtctgaccctgcttacattttatttattattctcagtagctggttcccggatgttttaaaacaacagcaaagcttgcagctgttcatccatctctctttagtaagagaagatcatcctgtcctttctctcctggcacagcttgaaagcattagctagttaggtggctgctgatttaagactttgatacagtgacttacaaccttctgctctaaaggatatacttagagctagtgtttgtttacaattaatagtaatttaggactttgagatagtcagccgttaattttatattaaaatctgactgctgacatgtatgtctccatcgttaacatagtttaaatattggggtggtagccaggatagcaattcagaatattgggattttacaagacttatcactaaatgtcattcatttccaaaaagagggaaaatgcatcgtgccgattagcactacttttaggtttcatatgagagaatggaaatgccagacaggttttcctgcttccaa

SEQ ID NO: 8169 - DNA, 1029 bp, Homo sapiens
aggttttgagaaccaagcttaaaacttgatgatatgaggaatagctggattactaaaattgaaaattagggctatctaagttaatggatttattgatgggcataggttttctttttaacagcaaatatcactcttgttctgtttctattgtgtcatgatttggatacctataaaccccaaatacctaatttgtttttagaagccattggcacacaccctgtgtgaagtgagcacctcctgacaggttcacgctgtgcaggttttcctccctcctactcgctggcatttacggtgccactgccccgggctgagtgggctggcccggaggctggctctggtccccagcccctactgctgggcagatcagctgcttcgaaaaccgcgtgccagctcctgagggctgatcaccacttgccccagggcaggagaagccttgcaggctgccagatctgagttctttagtttgtacttttgagtaactggttgtgtctctgactcagactgttttatgagtgccacttaaattctcaaaaaaccagagtggccttacttaagctgtgatgagcggagtgtgggaaggaaggtgggttgggttggtggacagtgaggctgagaattgtttttctctgatcccatggagcagaaatgagaagggaaggggcgtgttttgtgtctgacctggaattttgttctcttccttcctcccccagagtgccctgagtcatgaggccgagagattcagattactgtgaattctagttcttattgaacccagaatggaccagaaggcctcagcatagccctaggacttagtgatccattcagcatctgttatgagttgaattatgtctcctccaaatttctatgttgcagccctaactcccagtatctcaggatgtgcctatatttggagacaggctctataaagaggtaatgtagttaaaatagcctaatccagtatgaatggtatattagttcattttcacactgctgataaagacatacccgagactgggtaatttataaagg

SEQ ID NO: 8170 - DNA, 1047 bp, Homo sapiens
tgacagagggagactgtctcaaaaaaaaaaattatctgctcagggcatttagctattctcagggcctgcttggccattcaccaaggatgcccctccagactgatatgtctgggaacagcagggagcgatcacctgggcacctccttagacatacatgctcaatggggtcctgctggccaggctgagtccataagccatcacccacgagctgtgaaatcctgaggccaagatttccttgtgctgcctccactcccagaggtgaagctcacctgtcagggagttactgctaactagggaagctgcccccaaagggatcacgccagtaacgtgtttggaaaaaaaacacagttaatcctccagtgccaccaaaccagactttgtaaagctactcaatctattaatagtgtggcagccctccttatctcaactgagcacaagtgccaactagtttccaggtcaggcgtttatgtagtaatcagtgacatttgatgttagccagatttaccaggtgtgctgaccctggcttaggatctttgagagcaaagtagggactggggtctcagaccttctgggtttggttctaagccactgctgggaataacttctttatttagacaccagtagttattcttgcttgtttatttgcacagttggagtggtgaagactgaaagtaagtggcaggcaaatgtctgacattgaacataaggaccgtgtttggtggttcatgttgtgcagaaaccaggtttggttgtcttctttaagattgtttttatgcttgctttttttttttatttcaatgcatttttccctgtcttgttactcccatagttgatccaggctaaaaatcgtcaacaaggaggtttcaggattatgattcaaaggatactggaagtcattccttcccaaagatctctctctgtgttttctcattggctgaagcagcctgtggatctcctaggggtcctgtgaaaatatgtttctccaacagatgctggcgaggctgctgagaaataggaactcttttacactgttgttgggaaagtaaa

SEQ ID NO: 8171 - DNA, 1024 bp, Homo sapiens
gacatgtaaaaagacaaaaaccaagttatctgtttcctgttctcttgtatagctgaaattccagtttaggagctcagttgagaaacagttccattcaactggaacattttttttttttccttttaagaaagcttcttgtgatcctttggggcttctgtgaaaaacctgatgcagtgctccatccaaactcagaaggctttgggatatgctgtattttaaagggacagtttgtaacttgggctgtaaagcaaactggggctgtgttttcgatgatgatgatgatcatgatgatgatcatcatgatcatgatgatgatcatcatgatcatgatgatgattttaacagttttacttctggcctttcctagctagagaaggagttaatatttctaaggtaactcccatatctcctttaatgacattgatttctaatgatataaatttcagcctacattgatgccaagcttttttgccacaaagaagattcttaccaagagtgggctttgtggaaacagctggtactgatgttcacctttatatatgtactagcattttccacgctgatgtttatgtactgtaaacagttctgcactcttgtacaaaagaaaaaacacctgtcacatccaaatatagtatctgtcttttcgtcaaaatagagagtggggaatgagtgtgccgattcaatacctcaatccctgaacgacactctcctaatcctaagccttacctgagtgagaagccctttacctaacaaaagtccaatatagctgaaatgtcgctctaatactctttacacatatgaggttatatgtagaaaaaaattttactactaaatgatttcaactattggctttctatattttgaaagtaatgatattgtctcatttttttactgatggtttaatacaaaatacacagagcttctttcccctcataagtagtgttcgctctgatatgaacttcacaaatacagctcatcaaaagcagactctgagaagcctcgtgctgtagcagaaagttctgca

SEQ ID NO: 8172 - DNA, 1097 bp, Homo sapiens
gctggtcgtggacctctctgggacctcgtgtcctcaactgtaaaataaggcaaacctggctagtacggttactgctcaaaaatgacacaggtttgaaagcactgggcacagtgacaggttctatgtgaatgtagttggagcatttagagttgggctgctgctgtttctcctctgcacctgttaatgttgctgaaccttcagcaccaagtgtccgtgatgagtgttgagctgtaggtgattggagccttactctatggcagtcagattcgttcattcattaactcatttattcaacagttatttaaagaatacctgctctgtgcaaggcataattctaggtgctctccttctctgcctggtgtaggcaagaccatcagcaacgtgaagatatagaatagaaagtgacggagatgaggtgtgggcagcaaggctgaagctggcaccctgctcggggcgcagagccagtgaggggacttggtgggagggctctgggagagctttgagatcaccgtgaatgggttaaaataagccttgggatcactcggctgggaggagatgtggaggggtcagtttattagaaaatggcttatgtggaccctggaaatcagcttctttgccctaaagaaataaaaaaaggagaaacattaaatgcagcactaagagctttagttaaaatgtagaaaatggggttggggctgaggtgctgttgacaagaggatgctgagtgtgagaatgggttgctaataggagttacggaatttccccaaaaggggaaattgccatctggtgacaatggagtgatttattcatttgacgtctaatgccacaattccctgtctcctgagcaatagtgatattctcaatgccctatctaagaaggaagatattaggaactagttgtttgctaagctcaaagtctctgttgaccttactacaactttcctgaaagaaaaatgacctagtgtatatttactattgaatataattttccttaggaagtctgcaagcctattaaagattaatagggaatctcattttcatgtgtttctgtttaaagcgaacttgtgcaagtgtaggttgttagccattcagaaatc

SEQ ID NO: 8173 - DNA, 1050 bp, Homo sapiens
gcagtccacgtggataactgtggatagatcacagtttgttgagccattttcctattgatggatacatgggctgtctccagttttgattattatcaatatgctggtataatattcttgttcaagtcttttgtggacatatgttcaagttctcttggataaaaacctaaaagtagaatttctgggccatagggtaattgtatgtttagttttataaaaagctaccgaatgtttttccacagtggttgaaccattttccattcccaccaacaatgtatgagaattctaggaacatcacattttgttaaataacatttgatgtcaaattttaaccattgtggtgagtgtagagtgtatctcattgtggtttcattttgcatttctctgataactaatgatgttgaacacatttcagatgctacttggccattcatttatcttattctgtgaagtgtctgttcaaagatttggcccatgtttaattgggttgttttcttatattgagatttgggcatttttaatatattttagataccagtcctttgtcagacgtatgttttgtgaatattttctccagtctgtggtttgtctattcattttcttagcagtgtcttttgtgaccagaagtttttaattttgatgaactctaccttaccaactttttatcttttatggttattgctttctgtggtcttgtctcagaaatatttgtctagctccaagattatcttatgtttcttctaaaagctttatgattttagcttttatgtttaagtctgtgatccatattacattagtttttgtgtatggtatgaagtagggattgaggttttttgtttgtttgtatttgggtttttcttttttaaaaattattatccaattattctagtaccatatgttgaaaagactctcttcccccattggatttcttcagtgttgctttcaaaaaaatcaagtgactgtagatgtgtgggatatttatgagttctctcttcttttccattgttcaatttgtctatgcctatactgtaccacactatcttgataacttaa

SEQ ID NO: 8174 - DNA, 1050 bp, Homo sapiens
taaatggaagctagccaaaaaataatgttttaaggcagtggtggtttaatttctaaaccagcagacagcactcaacctgtcaggaactctggggtcatttaagtgggatgtagttgacaaagcctgttgctctgcaaaggcttgaccctgaccaggtaaccatgggagattgatcacttttcacatgtatcctagtcctcacgtgcacaaacctactcttgctctagaaattccagaaagatgtataaagggaggaaggatggtgaaatggtaaccctgggtgctctgggaaatgcttcattctttgtttatcagtcagagtgtagctcattctgtctctgcaacatttgagaaccttcgtgtccaacctctaaacccagtctcctggctctagaacttcatagatgactggctttgtagtgttaaacaaatcccttaactacctcagcctatttcttgatctgtaaaattgggacaataaggaggccccctcggagtttttatttgttggatggatgaatggatggatggatagatggatgcatggatggatggatggttcgttgctctaaccattaaataagatcaggtttataacacacttagtccagctctgacacacagttcagtgctcaataaaagcacttgtcatctactgtcttcctaataaacagtaattacttgctgaatactaaaatgtcatcagcttagcaaatctaatgtagcagatactaaaagaaacccaaattcttttaagaagttcacagcacatctttgccttgtgatcatggtcacaaatgtgtgtgagtttgaaacatcatcaaaacaaaagacacttccttggatatttaaatcggagcatacccaactgctgctgagggcatgtgatatggtttggatgtttgttcgtctgaatcgcatgttgaaatgtgatttccaatattggaggtggggcctggtgggaggtgattgggtcaggcgggcagatccctcgtgaatggtttaacaccatcgcattggtgatgagtgagttgtcactcagtacacatg

SEQ ID NO: 8175 - DNA, 1006 bp, Homo sapiens
atttatgaagcatgtccagcaaggacttgctgacattgcgcaagatctggtggcatcccatgtctaacatctccgtggtgctgggacagacagatcaaactcggggacacagacccttggaggttcactcaagttagaacccctcaatgagtggagcaatggggaggaaatatgtggccagcactggcggagagtgtgaccttatggctcatccagatcccctgcctccgtggctcacaaacttaccgtgtgcattccattctgaaaagggaagctgaagaccaggccgtgcgagaagggactgtgttctctgggtctgtgggcctgctgcaggccaccccatgctgggggagtgaccacagcacagcccgcggggatggtggccttgtgggaaaggcgaaggcatgcttccaatgagcaaattgtatttattcatgaatttgcatgaatttcaagatgctgcttggagtttgcacttagcaactgacagcccaagaagaaatgggccttgaaggcaccacggtgatgctggaaatctgagtctgtgaataaattgtttcccaacaacatattcaatgggttgagaacaaaaaggcttgtctgcaatgtcgagctatgctttggcttcttgtgtttctcgagtaagtgcctggcatgtgggcacttggtgtggacaggaatgaggaagaaaatgttggcctgagctcccatgagtctttttcctccccaaatcatatgtgttaatggagcacggggttatgccctacccatagatttttatggtattttctttccttagagccagagaataactagaggtgtttagtgaccttctttatgaacaggttcctcttatgggtcattacatcgattttcctcatccaggcctggggtgattaagagtgaggcaggtggcctttcccacgctatggaccaggggttgcctgccagcagcagcatgtgacattaaaatggtcaggagcacatgtgactgttacagagaatg

SEQ ID NO: 8176 - DNA, 1021 bp, Homo sapiens
tctgtctctctctttccctcatgagagagaatgtgagtttctctcttgtgagtgtgtgtgtgtgtgtgtgtgtgagagtgagagaaagagcacatgaaagagagagacagagacagagacaccaaggcagaacaactagaaacctcataagtacacagtgagggccaaggtttcttgagcttggagagtaacagcaattcaccaggttgattcctgattggaagtgatttcagggaccaaggaaaatgctgtttatggccatgattgggtagctgatctacattatcatgtgagagagcaggaagtaagtttcatgtgagttatatcctggccctgtgcttgaataagggttttttcccttgggacagcctcagttttataaggagagaaatggacccaacatttcaaacatatggaagtgacttcttattatccacaatagggggaggatagttgagagatggagacaaaatgtcgccacaccatctccatgtgtctgctattttgagcattcctgagctgtgtttggggactaggacgtgttaaaggcagaatgagacttaagatagaattgctgaagacactgaggctctgcttgattcaaaattcacctcagactcagagatttcaggacccaaagctcttaggagctccgtgtttccagagaatacaaagtctgaagaacaattctaaaattcaataacacgttattaagaactgtctgtcccttgcaaggtggaatgagaaggcacaatattggaaaggagtgctggttacatacttaaaaagaacaacagttattatgaaaaacttgttttaaaaatcgtataaatggtttcacaggtggaggacaaaatgcctgtgatactttgcagtgacctccgcaactggaaagaaaataagaaaacgagggccggcttcagggggatggcagggtctggcagggctcaaactccgctaaaggcaacactggattgctgctaaagtgaaggaaagaccttatttttcaagtgcaaatcat

SEQ ID NO: 8177 - DNA, 1033 bp, Homo sapiens
ctatacttccatgttgctcatggaggcctttgattagcaattgagacaggagagttccctttaccctctggtgggacttgcagcaggggtggctcctttgctcagctgcttccacgtgctcaaaccccttatggtgggtggtgcatgcatgtgagtgggtgcaggagctggggcgagtgcctttgggcactggcaggaacaaacccccataccagcccacagcaatgtctaggggttgccagcaacctctggagccccagagggtgtgtgttacaatcagtgctcttttagtatgtgctgtctgtggatggctaagtgttacacagctcagtggagggtcactgtgacagcttcttgcacccgcacctgggtccttgtctagtgcccaagaggaatgaggtcacatggacttgaaggatggtgaatgtggagattttattgagtggtggaagtggctttcagtgggatgtggagctggaaaggggatggagtgggaagataatcttccctggagttcagctggggactgaactcttctccaactgaccttggccaaattctgtgaccgtagtctctgacatccagctgcctcttctcctcttgatgtttggacacttcttctcttctctccttttctgccacagcgctctgctcctctgccagtggagctttggatttttatgagcacaggatatgggccatggtaggccaaaaggcaacattcgggcgggaaaacagggatgtgaagttttcgtttaggtccgcaggtccagcttgagggtggagccctcgccagggaccccaccatcttctacctagtatttccctgcctcctgtccatatcaaaatgattaggatcagcttttggggaaggtactttttagtttatgttttaacatttaagatctagcatagcctttggaaggcaaaaagtgaactctagtcatcaagtcaggggatcttgatgttctcaggggcactggatgagtttgtcagattcttgtcccataaagacagtggtccctcttgacaa

SEQ ID NO: 8178 - DNA, 1059 bp, Homo sapiens
agccatcagggatctgtccccttgacccaaacacctcccaccaggctgcacctccagcatggggtttacatctcaaaatgggatttggagtggaggtccaaactatgtcaagaagtgaaagatggaagagaggaatgagtggatgcctttgagagtccttaagtgttcatgcaggcacttttgttccatcttcccaaggtctaaacatgtcacatacttttttcagagcgccgacacgtagtaggctcttagtaaatattggcagatcgacatttttcacaaacatgtgacatttatagctttaaaatccttgggctataaaagcataggttcatactctttctgctgataaattaacaattctgtttgtcatcttttccaaataatactgcatttgctgcattgtttgtggcggaaacgatcagcctgcatcagacattagtagcccctattttttttttaattcacttaggaaaaagctgaagacagatcatttggtaaccagctgggaactccacctcacatgtgggcctgcttttcgacttcatgcttaggtcctgcaaagttgaaatgggtaggtccctttggaaaataaggcaatacacataaaaggagaataaccaagactttcatttcctcctgaatttgaaaagcagtgctgctgaatgctttgtttccttttattaccatattgacgtttacgttttgtaactatggtcatggagcagtcccttggtgaggggtgggaggtcaccctttccccatgataggacaatgccaaacaaagggaccctgacgatggtagaggtctgggctggctaccttgccgatttttctgaagctttgaatgtagcttacgaagcaaagctagcgagaaaattctggatggggttcccaggcgaggattgtaacgagcataaaatcaactaacattaatctcgccctttaatgatctatgcatggtaatctaacattgcattttttcctcctccttctgtccttggcggaaggcagcctgctgagctcctgcttgctcaggcttcctgataaatgtcaagc

SEQ ID NO: 8179 - DNA, 1101 bp, Homo sapiens
acaaactcaggggatatttagaaactactttctgcatattcagcaggtcaagagactgcaaagtattagtaactcaccagctatcctgaggctcctcatttaaggttttatcatgagccaccttttttttttttttttaaattttatttatttatttttttttattgagacggagtctccctctgtggcccaggctggagtacagtggtgcgatctcggctcactgcaagctctgcctcccgggttcacaccattctcttgcctcagtctccggagtagctgggactacaggcaccctccaccacgcccagctaatttctttttgtatttttagagagccaggatggtctccatctcctgacctcatgatccacccgcctaggcctcccaaagtgctgggattacaggcatgagccaccgcgcccggcccatgagccacctttttatagaaggttaactctccttggctcaggtccagggctggcacaggtaatctggggaggcaggttggtctggaagcaggtctaaatgcaagaatacctccttcaaggttgggttagagagggtctgcatccctctctgtctcttctcaggtaacaggacacagaatttccccaacaaaagcaggatttgtgtctcttaggagaccggttcttctctgctggctacatcagaaaatacaacacagatgtgattgatggtgagggattagtgacatttccgtgaacttgggacttgatgaaaccctttatcttttattcccaaagtgtggttttgttcacctcatctccccaaagtgtgtttggttttatttccctttgaatggtaaaggatatgttaatagatttttaagaatcaactcaaaaaaccccaaagtcttaaaaacgctttctgtttcttttccctccccaaactttaatagcccctggagtgggtgtggaggtggcaggggtcctttgtattttccaaacccgctgtttgcagaaatggctgttatgactgcagcaacataattgctcttaaaatgcctcaataataaaaaaaatctatttttattttgtaatcttgaggctccttggcttccatttttccaggccactt

SEQ ID NO: 8180 - DNA, 1077 bp, Homo sapiens
tgcaactctatgagcaaaattaacatctttctactctctctccatcccccattattatacagaataagaaagatatgtacctgtgatgattaattttatatgtcaacttgactaggccacaggatgccagatatttagtcagtcattatcctgagtgttcctgtgataaagttcaacatttaaatcaataaactgagcaaagcaatggccctccttgaggaaggtgggcctcatctaatcagttgaaggcctgaatagagcaaaacgctgaccctcccgagtaagcgggagttcctcctgcatgactgcctttgagctgggtcattgtttttttttttttttttcccctgcctttggactcaaacttaaacattgactgtcccagggtctcgagcctgccaacctgtaccgtgggttctcctgggtctccagcttgctggctgcagatcttggaacttctcagcctctataactgcataagccaaatccttataattatctatctgtctgtctgtctgtctgtctgtctgtgtgtctgtatgccctactgcttctgtttctctggagaaccctgactaatacagtgtctgagcacagaacatagttctcagcctagcagcttctgcgagtgctcaccaggcacccatgtatgtgaaaggtattaaatcaggtggtcatctgtctccttctgcaaggcggtggctgcccactgacccttctacccaaagtgcatcccatcccatgggcccaacttcaggcaggagagctggaaggatgaggtagagtggctactccagtaggacagttggagaactggtcacgtctactctgcttgtgtggggaaaatggagcccctcctttcaggcttatcaaaggcctcctgagcacaggtttctgggcagtggtgggggctgaacttgaacctcccacctgccaggtggaggagaaagcagcctggaagcagagctgggagatgatgttgtgaggagcaggtctggagttctggagcctctgctggggcaggctatggctcactgcccgtaaaggctgcagagagggtgcacagatgcagtttca

SEQ ID NO: 8181 - DNA, 1066 bp, Homo sapiens
acctcatgatccgcccgcctcggcctcccaaagtgctgggattacaggtgtgagccaccgcgcccggccaatttttgtatttttagtagagatgggatttcactatgttggccaggatggtctcgaactcctgacctcatgatccgcccaccttggccactcaaagtgctgggattacaggtgtgagccaccacacctggccgcaagccctttttatggcagcaaaaatccgttcctgagaccggagctctcatgacataaacatctcccattaggccccacctcccactcaacacagttgcactggggagtacatttccaacacatgagttttcggggacacattcagaacacagcatagagtgagagaccccagtaatcccgagagcctgcagggtggaggtcggtggtgtggaggcagttgactcagattctgcaggtttgtctgcagggagagagggaggctctgagactgagagccacagggtcatttggggagcaagaaggaggatctgacaaccaagaagaaagagggcccgtgggctgggaaggagtgggttctgggcaaacagtattccaccagtaaggggacaaggggacaggggaggcctggcagcaaggtcactgtggggtgggggttgaggcatgggagagggaagggaggggactgggtggtgttcgggaaggtgaccacagtcagagacaagcgttgtgaagcctgcttggaactggagaaggggtcagcccctttgttccaggcggcaaaagggcagaaggggaggggcacaacgaggtggacccaggtctgctggaagagcaaaggttgcagagggacaggctcagcgcctggtggcccaggaggccacgtgaggatgtgtctgtgggcaccgaggcaggtgaaggagcagagagtgcagagcgcacaggggctcctgagttaggaggaggagccgtaggggctcgggggcaaaatttaggactcagaaagcccaggatgttggtgcgtttcaaatttgccaacaggaaaggagtgagcagcccatctcagaaggggagggaggaggtg

SEQ ID NO: 8182 - DNA, 1111 bp, Homo sapiens
actttttctgcgcagggctgcagggagtgggaataggagcgactgctgaaggatatgagtttctttgaggagtgatgaaattaggtaatggggttgggcgcacaaccttgtgaatatacgaaaacccactgaactacacactttataactgggaattttatggtatggaaattatatctgagtaaaacaaaaagagaggcaggaaacatacttagcagctgtgccattttggtcaaggtacttaatctttccaagatccactttcctaactggagagtggggtgggtaactgtacctcataggccatttgatagaaaatgggactggacatgcagtgccctccttggagcttggtctatagtaagcactgggtaaatggtggctgctatttctccccctcctccccctcctcctctatccccccagaccccatggaagaagctaatagcgtgagcccccttgggtcgcccccacaaaggtctgtggtcatggtggcctgaaattccaaaagcatctaattttgaagtggaatgtggctgtccactcgtgtctcctcccacaggcatggagaccagtgggtggggatcagatgattaaagagcactgatgttttgagctttatccaaaaagatttgggaacttcagaagcatttggtattgtgtgaccactaaaggaaatttagtgaattctagaaatagggtcagagggagacaaagaagaagtgagaacatggtattactttcatctattcaagtacctgtttttttgagtaccttttatgtgtgaaatcctatacaagttatggcagtgtagaaatcaactcagtatacaggagtgtgtggtcagggtcagagtggtgagggggtaactgtgggtgctgggggaggcagagattctgtccattggggagcatcatggaaggctccctgtaggaggtggattcggggcagggtggggtgtggttcacaggcagcaactggaagggtgggtatttcaagctggtggaatggcacaggctcagctcagaaggaagaaagcagcagacaaacagctgtgggaagaaagcagttgaggtggaaggagggtaaggctgtgggataaagccaggat

SEQ ID NO: 8183 - DNA, 1026 bp, Homo sapiens
aaatagcctgattttaggcaatcgttagcaaaggcctgacatctgacagccagcagggaaaaagaaatgcaaatatatatatatatatatatatatatatatatattgcattttttaaaatcataagtaccagaccttaaaactccttttcaaattgggcatttatttgatggatacgtaaatctgaaagctaacaagaaggactgtttagagaaactagaatgtcactattgttgagaccacctgtcacatttcctcggagcctagaaccttgtagaataaagtcagccctatggttctgtcttcatctttaaacatgtatttatggagcagaattgattttatgtatctcagagagtctgtgattctgctcacggccatttgctgactaatgactttggcagaggagaacagcaagcaagttcatgaattatggctctctttgaggttctcttatcaagactattttttattttaagaacatctgctttgattaaagccattagagctgggaccacataaaattgtgtctgaattttatatgtgttgcattttacagcaggaacccagatgaagcctgcattttaatccttaaaccaataagaccagcgatgaggattaacctaacaaactaaactagttcctcctcaattgcctggtttggggttgtaagaaatcctggggcaggagacttgttggccaggatttgatacttttatttatttgtcctctacattgctgcaaaaatattttcatttctttatatacccctctttctggcaaaaattgtttaatgtgttggggtggggtgttccaggattgtgagttaatctataaccaccctcatcaccttatttttatgttcactaaagttaaaaaagattttctgctcactagctctgcaagactgaagtgatgttaaattatctaacacgtagctaatagcaaaggagacatgatgattaatttttgtttgttccccagaaagctcttctgtttgtttcccagaaaggtctgttccccaga

SEQ ID NO: 8184 - DNA, 1744 bp, Homo sapiens
cgtggactatgtctttcatttccatttttttttactaaggacactagtaggtgttcaataaatgtcttactttttgttgagtgtcagtcagcaagacatgagggaacacagcagagggcaatggcgtctacatcttgcccactccgcagtggtgctcctggaaatgtggatgctcaggagtgggccaagctggaggggagtcaggcagggcttggacaatctcagaagagaagctgctttgattccaataaggcctggagtgacgactcaatcttgtgggggcgaaatgctctcttttcatataaataggcctctttggtaagggagaaagcatctttattactgctgtgcataattagaacagcggggaggaatcaggggcttttaatgaatgagcagcgtgtggcagggaatgagtgagcgcctgccactgcgggcacccccaggcctgggcatccccaggagtgagcggggccagcgaggagacgaccaaggaagcacaggcagtgctcagaattgaaacctgccccactgaagcgggccctgctgatccttgctgcgttcctgtcattgcaaatgactcccaggctgcagctttgcagatgctgctctgagctctgccaggaccacccctcttcttccagccttgaccgtgacctggcagccgcagatgtcctgcggggctggcagctgctccatggcaccccttctgggcaatcctgagctgcagagtttttgccttgattttagtccccttatttttagggtggccatatgtcctggtttgctggaatagttctagtttatgcctcttttcctagtgaaattagtaataatgatatctttcaccttctaagtatctcagtttggaaggtgaattatgtggttgcgctccttatctttgtcttctcagccatccgggcctcaagacggatgagggaggcagtagggtgtgcaggtaaacctgggctttggtctcagatgcttgtaacatctgggtttaacgttgctgcatctgttttttctgctgtagacaaggacgattaataatctctgctctactggggtgctgtgagaatgaaatgagagagtatttgtaatgagcttaggtatgagcctggtacacagagggctctcagtaacttccagtcattttattatcattgttaggttgatttgggaagcgtagtggttaaatgtgagatctggggccagactgcctgggttcaaatctgtgctgtgtcattgacctgctctgtgaccctggcaagttacttaaccccataaagcctcagtttttctcatctgtaaagtatggattataacagtctcttcttcatatggcctttatgagaattaaatgagtttttatatgaaaagcactcagagtagagccgggcatgaagtagacattgaattaatatgagcaattattattggctgttattgttattatgaataaatgtcccaacttacattcttgtaggcaggaggaattatccagtacatttgtttcctattgctgttgtaaaacttaccacaaatttaatggctgaaaaccatacaaatttattatcttacatttctggaagtcaggaataagtccaaaatgggtctccctgggctaaaaccaaggtgttggcagaactgtattccttctggaggctctaggggataatccatttcattgccttttcaaacttctcgaggtgacctgcattccttggatcgtggccccttcctc

SEQ ID NO: 8185 - DNA, 1050 bp, Homo sapiens
ccgaagggcttctcacccacctccccgcccatccccagggactcactgggctggggaagggtgaagcggcgggggttcgatggtcccttccttgcggggggcagggggaggcacccagtgcggaggacagacgctcgcattttgcagatgtgctagggccgctttctttggggagcgtgattagggctccgaagggtgggggagccggagaggacggggaagggggttgcgggaagaggacgagcaggtttcggagcccagggctgtaaatcaaggcttctcccacggagggcccggctggccaggattccagtcttcctgtgggtcccaagtggggaaagttgggcgcatggaggcgccgcgcgtccctgacctgcagggcctcggcgagagcggccgccggggagaggagcgcggcccaggcatctttcccgggagcgacaggcaagccgcctgcgaggatgatattaaaatgccgggacgcaagggagattcagccacgaaacgagcgcttggctctgcggggccccaaaagctggagaaactgagtccagtggcagcacagccaccatctgcgctgggttccctgtcttgctgtcgggcctgcggcccccaccctctgctgcactccaagccgcacctgcccccaccccagcccattgttcctgcggatcagggaggtgcctccccacgcggcactgcagtggtgggggagtgcagggtggcgggtgggggatcctgacagggctcactccagggagaggcagcggagagcccaggccgtccccaaacacacacccagtccccgcctgtactcttcctcagctggtgaacgcaggcaatggactggcagctgtctttgtctgaacatcactcagcaactggattgactcttttttttttttttttttttttttttacttttttcctttaagtcagaaaataaaaaaatttttaggacgataagtaggggcgttgaattgctaaagcctgagaattactgagccagtttcttgcctctcatgctgggatagggtgggcgatgatacc

SEQ ID NO: 8186 - DNA, 1070 bp, Homo sapiens
tcactctccctccatgcctagattcagaaaatgcccactgcgcctagttcagtgataacaaaggggttctcaaattgtagcctataagtgacttaataatagattaatctgcagtcaagaagcttgcttcaggacagggagatcgttctttggactgagacaattccaggacaatttcagcctgacaatactaggtttatgagttttcagttcaatcaacatccatgtattgctgctgtggagcccagagagcacttcctggaaatttttagccctgagctgatgaagaaagctttttctaggatctgtgcaccaccccttcacctacagacacacacgagcatggaaacatccatggtagttctacagaagtgatgaaggttagtatgggttgatggaagttgctcacctagaatgagagaaatactacctcctttgcatgctgaaagcagtttgactggcttacataagagtgggcccaggcccaagatggtgaaaccttcgtactggtgactcaatctgcagacttggatgggactttccctggaaccttagctgggctgcagctttatttcctagaatctcctcacctgtttgttttcagtttagagttgccgacagataaatctgcatgagatttagaaggtggaagtgaagtagttgtcttaaaaaaattttttttaaccctcggaaggtccgtgtagggcaggctctgttatagcttgtgcatgacattcctgatgtgctgactcacctaactggcatgtggcagtgactggcccacagtttctccagctccccacatctcctcctccagcttttccaaatcctggggcaggtgcatgtgcagctccttggggaaggctcctgcttattctgcagattgtcttgcatcatcaagattggtgcttgtgagagagagataggtgcagctctagtttgtccccagtctctgtcactttacagccgccttccctcccaactgtcagaacagctgactgcaggcccagtgtcagacgcagaagcagcagatttacacagacggcatgactagtgcctctcattcccta

SEQ ID NO: 8187 - DNA, 1063 bp, Homo sapiens
gctttttgaactatggtgtactgcgtttagtgtcttaagagcttaaggaaggagaaagaaaagaatgaccataagattccttctataggaggtaatgattctgcagttaagttgcttcattgaccctaagatactcacatcctgttccttagaccctgcatactcataggtagtttcatgtcttccttttctcattctgtaaggctaacctaagcaatttaaagatctcttgtcaagggaggaaagtgttacccagtaaaacagagttctgaaaagggagcctatctgaattagcaaaaagtcttaaagaataattggaaagaaattatttcaatttttttcatgccaaatgtccaataaagggctgtgcttcaaaataaattttagaaattagcctgtcagaataccagccttaagctactttagtcgtcagcataagttctatttgcacattttttattttattgaacattttaaccatgctgagaaatagttttttcccagaagtcaaataccttgaaaatttctgaccgtaatcattggattagaaagatgcttttactaaatgataatatgataatacaaaggtgaatcactctctgtgaatctagttgaaaaacatacattctaaagcaccaaatacattttattattgtatccactttattctatgcctttttaagagagcttcatgtttggtcaattactggttaacacctttgagtttgtgtttatccattggtcattatgatttaggacatttttattataaagagaggcaggatatgtgggccttcagtatggagaaagaggtaagcagatcttaaaatgtgtctgcatcacagtcaggcagaggcttaagagtttcatgttttcttgccctcttgcttttctcccctgaaaccatcttatctgaaagtggcgctgcttgtctgaattgagctttttcatccatattcacactttttcaattaattactttcaggaaggtgaatatcctcctaacagttgcaattagacaaggtagtcagcctcaaagatgatttttcattttatctagtta

SEQ ID NO: 8188 - DNA, 1025 bp, Homo sapiens
aaatcaacatatgtatagattccatataattgagtaactcctctctggtaaattataaagtcaaagatatactgatttatttcctagggacttataagaaagcaagaaacacttttaatgcttaattataaggattaattaaaattaacattcctgtcaccaacatatgcaaagcaagggtgttttttttgtttgtttgtttgtttgtttttaagaaaaaagaagaaaaagaaaggaaaagataatcagggcttgggaaagcctaatttattctgtttctattttaataatagctacaaaatgtgtcctgttaattatgtctaataagtatataccatctaatcctagtatcttaaatctcacagtgaatgtgaacgttatgaattccgattggttataatttagatcagaattatgctcatcatgtccctttatgctataagaggtaaagggctgaccaggcacattaagtgcaaacctcttttttgctttcatgctcttctgttgattaagattaaatctgataatgttaaaatatagtaagatattttattcactgattcaggccaatcagtgggtgggtatcaaagagagaaaattctaaattatagaatttttttttttttttagatgtagtcttgctgtcgcccaggctggagtacaatggcacgatcttagctcactgcaacctccgccacccaagttcaagcgattctcttgcctcagcctcccgagtagctgtgattacaggtgcctgccaccatgcccagctaatttttgtagttttagtagagacgcggtttcactatgttggtcaggctggtcttgaactcctgacctcaggtgatccacccacctcagcctcccaaagtgctgggattacagggatgagccaccacgctcagcctaaattatagactttttaaaagaaactcttttactttgagacagctataatacctggcaatagaataattaagtgttgcccagggtcagaaaaacaagaatgatttgtattttaatca

SEQ ID NO: 8189 - DNA, 1886 bp, Homo sapiens
tcattctaggctcctagctaagagatctcattcagatccaaagcaagtaccatgtacaaagagaattacttcccctaaactggtttggtaatcaggttcttctacacaaataattgatctggatgatacagactctgcgtcaggagacaatcagtctttcaagattaaatacatcgatcatccctcttaatggttcatgagcagcccaagaagatactagatctttcagagactacttagaagggcacgtttttacaaccttcttttctagtcttcagttaaagatgtgcctaatattgctctatcctgaaaatgaaaacatactatgtaaagagttatctgtatagacttgcttcagagtggcactttgattgtcaaagagttaatcctgctattgaatgtgtttcagacagatctagtggaggatcaatttgttttataacaatggcagctcttttttgaaattagtctacagttttgctttagttctcttgccaggatgtcagctagtttgtcacttaaagaaaaggaagaggtgagacaaatcagatcagccgaatattgtaatcatggttaattaaacctctgatttcctgtcctatcaagagagaaagaaccccttttttgtaactctagctgtcttagcttaaaaggtgaaacctggacaaatgaagttggaattcaatttggatctatttttgccaactggtattttcttcctctcttgcattctctcattgctactattaacttttttttctcttctggaatgaatggccttctttgctgatttacagttttatctaatttcactgtgtttaaaagcacattttctcctgtagtcatgtgtttcctttcttttgactagagtcatttgaacagttctaacagaaagatgatctatattcattctccatctttcctattaaatttgtttaacacctaatttgacatcaacaatctggctacatttgaaccaatatccagacacaaaagcaatttggctgagacaagttagtttctgataaatgcttcagtgtgtgtgtatagatttttctcctttaccattttacacagataatctgaatcagaaaatactgcaactccttcctccttttgtctgccttttgttctccaaaagtaagtggaaattacatttccaagaaaggaaatgaaataattgcaggcccaaggtctgcaaaatatgtgttgaattgacagtgaaaaggatccatgtgttgacagacacagttgttagatgccataaaggcagatgtgaagctcaatttatttctcatcttgcttgttcaatgactgcttaagagacacattccagtttaatttatctacttaaagctctaatacaaatactgtggactgctgtattaacttctaaactttgaaacctaatgctcgattattcggttcttgacattctttagctaaataaaataactgatgccgtgtattttcatattgacagtaatttaccaaataagagcacctttctggaaaaatctgtttcttaagtataattagactatccagattgaatctgagaattctgtgtatgtataggtaattatttacccagactggcacacttcattcatttaatgtttaaaccttttaatgactaaaagaattttaacttaatgtagttacatgtaagctttaacagtttgtatcatttgtcagaatcccctgaaactggcctagcttccaggaatgagaagggttattttcagtgctgtgtctggctggctttgacttattagtaagtactctgttacactaaccacattctcttactttatagacttggcctgtcaaagcactttgaagtcgggtcagcaattaataagtaaagtatttcctttgctttt

SEQ ID NO: 8190 - DNA, 1086 bp, Homo sapiens
taaagcactctggtaaaagcattgagtaggctactatgtcttactattaatctttgaattactcatgcctagtacaaaacctggcatatagttagtctagaacatttactgaatgctgtggaaaaataccaagatttgttttgaaattccttaatttctaaccattgcaattcagtagaatagctgctgtattaaataattcaaaaatatttagactaattttttggacttagagcccttgtgaacatcatatacagaatttagacacagagataccgttagcctaggaagaccaacttttcagcatttttcagagcttcagagatgaatgttcattatgtactttattttgttcacttagagtgcatttttagaaagaattaaactttttaaaaatactgtcttcatctttggtgttcatactaccttcatctttggtgtctaataatacacatgaaataatactttctatattgtacctaacaatgaactgggcaacaatatatctattaaatggaaaatctttagaaacaccaggggatacttaaatcaaaagatttattcattcagttctagaaggcttaacgggaatgtgcgagttagattactatacgggcatatgtgtaagtctctgttggaaggtcggtaatttaagaagtcaggtacattccctttataatagcttcaatattcacttcagatatttttggttaattttatactagaattttgaaacctatgcagaagaaccatgtaggccttttttccttctaaaagcattcagtgctttctaatccacaatgaaaattgattataatttattttttaattgatccaaaattaagaagtatttcattctttttagtgaatatcagagtagcctgtagccaaagccatctttattatgaatagaggaggcagacactggaaatatataaggttcaaatctgaatgccttctattaatacttattatctgctgtgtgtgtacccagccctatcctaggaaacaataagaaatacagaagaaaagaaaccatgctttttgtcttcagagaactcagattccccttggagggataggtgc

SEQ ID NO: 8191 - DNA, 1035 bp, Homo sapiens
gaatggaaccaagttggaaaacacttttcaggatattatccaggagaacttccccaacccagcaagacaggccaacattcaaattcagaaaacacagaaaacaccacaaagatactcctcgagaagagcaaccccaagacacataatcatcagattgaccaaggttgaaatgaaggaaaaaatgttaagggcggccagagagaaaggttgggttacccacaaagggaagcccagcagactaacggtggatcactctgcagaaaccctacaaaccagaagagagtgggggccaatattcaacattcttaaagacaagaattttcaacctagaatttcatatccagccaaactaagcttcataagcgaaggagaaataaaatcctttacagacagacaaatgccgagagattttgtcaccgccagccctgccttttaagagttcctgaaggaagcactaaacatggaaaggaaagactggtaccagctactgcaaaaacataccaaattgtaaagactaatgacactatgaagagactgcataacctaatagcaaaatagccagctagcatcataatgacaggatcaaattcacacataacaatattaaccttaaatgtaaatgggataaatgcccccaattaaaagacacagactggcaaattggataaagagtcaagacccatcggtgtgctgtattcaggagacccatctcacgtgtaaagacacataggcttaaaataaagggatggaggcatatttactaagtaactggaaagcaaaaaaaaagcaggggttgcaatcctactctctgataaaacagacttaaaaccaacaaagatgaaaagagataaagaagggcattacataacggtaaaggtattaatgcaacaagaagagctaactatcctaaatatatatgcacccaatacaggagcactcagattcataaaacaagttcttagagacatataaagagataaagactcccacacaataatagtgggagactttaacaccccactgtcaatattagat

SEQ ID NO: 8192 - DNA, 1030 bp, Homo sapiens
tttttgtagaggcggggttttgctgtgttggccaggctggtcttgaactcctgacctcaagtgatctgcccacctcggcctaccaaagtgttgagattacaggcgtgagccaccacgcccagcctgtaaatgtaattattttcagaactatatctttacatgtacacattcacctattttatggactagttttcaaggattattttgggatgtggcttcaataaaattgtctattcttgtttaagtggtcctggtatactaataaaacttctggacattggtgatataatctcataaatattcgccaatttaaatttggattttaggactttggtgccaccatcacagtagccattctgaaccctttcgatcaccataggagaaaacaaggcatgtgctttaccatgttaattgtctgtttctggggtgttctttgccctagtggttagaatcatacatttctggaattaaggaccagattatctgggatgttcttggaaccactggtttcggattttttatttctgtttctagattattcatagaaataggaagctctgtttttttgtttttttttctttcttaaaagaaaaactgagggttttttttttttggtagataaatccataaagcaaaagttcaaattgtgaccaggctgggcaaaatagcaagaccccatctctacaagaaatttaaaaatttagctgggcatggtagtatgtgcctgtagttccagctgctcaggaggctgaggtgagaggatcattttgagccctggagttcaaaactgcagtgagctatgatggtgccactgcactccagcctaagtgacagaacaagaccctgtctcttaaaaaaagaaaatcaacctgatgattcactgacgttctggtgccagtcaagaagccagccctggggtgagcagcagttttagacttacttcagatgttctgctctgtcattgatcttaggccattctttttcttctcacttcatgtgttcaaaactttatattctcaactgtagggat

SEQ ID NO: 8193 - DNA, 1070 bp, Homo sapiens
agttaaatcacaatcttgaagcaggaggggcgaggcatctatatgatttaaaagccccgcaggtgattttaatgtgtagccaggattgacaagtacagctctcagaagtgcttttacttctttgccacctttctttactgcaacaaattgtttgcagtagatctttagccccttttctcctccctttatttggtggaggatagaagtaccctggaaatttttcctgtctgccatgcaggacacttcctttgtcataaacacagaatttgaggtactttgctgtatgagtaataataaccatagctaacatgttttaaacagttaataagcccaaatactcttttatatgttaactcatttactcttaataacaacactatgagagatgtataattattattcctattttccagatgaggaacctgagactcagagagattaactgatttgcccaaggtcccctagccagtaagtgctcggctgtcattaggatgtactttttaattactgtcctatataaccttatagtacagtgaaatatactgtacctgtaaatctgagagatgaagtcttctcgagctctcaagctgcagctatctttcatatgctgagaattggtcagattcatctgttcttttttttttttgagacagagtcttgctctgttacccaggctggagtgcagtggtatgatctcggctcactgcaacctccgcctcctgggttcaagtgatcctcccacctcaagcctccagagtagctaggattacaggcgtgtgctgccatacctggctaattttttttgtatttttagaagagatgcggtttcaccatgttggccaggcaggttttgaactcttgacctcaagtgattcccccccaccttggcctcccaacatgttgggattacaggcgtgagccactgcgcccggccagattaatctctttagcattggcaaattcaggatttggaggatgtctctgatggaatcacttgagctgtgcaagctcagtttttaaaattttcagactgcaagccagttctgaaacaaaaaggcagctttctctgc

SEQ ID NO: 8194 - DNA, 1034 bp, Homo sapiens
gtacatttgttagaattgttgagccagaattgatatattattattaactaaaatccataatttacattagggctcactttttgtcttgtacgttctatgggtttggacaaatatatagcacatgtattcaccattatagtacagaatagtaccactggtctaaaaatgtgtgctctacctgttcagcccttcctctttaactacaaatccttggcacccacggtttttttttttgtttgtttgtttttttgagacggagtctcgctgttaccagattggagtgcagtggcatgatcttggctcactgcaacctccgcctcctcggttcaagtgattctcctgcctcagcctccctggtagctgggactacaggcacatgcccccactcctggctaatttttgtttttttagtagagacggggtttcactatgttggccatgatggtctcgatctcctgaccttgtgatccgcccaccaaggcctcccaaagtgctgagattacaggtgtgagccactgcgtctgacctcccactgatctttttattgtctccatagtttcgccttttctagaatgtcatataattggaatcatatgtatgtagcctttttagattgacttttcacttagctatatacagtttttttccttgtctttttttgtgacttcatagttcacttgctacttcttagcaccaactaattcttaacaccggatactgttccgttatctggatgtaccacagtttatttatccattcacctattgaagaacgtcttgtttgttcccaagttttggcaattaggaatcaagttgtataaacattagggtggtggtaacgtatggaaggaagggaagtgttctgtagttctgtgattagatcatagttttatcattagctcttagtgaccctgtgtccctaggatgtgacctttacgagttcttctcagttttgttttatttacctcttagatgagacaagaaggctagtgggggctggcgttgggtatttgccttccaccaagtctgttaggc

SEQ ID NO: 8195 - DNA, 1052 bp, Homo sapiens
aacgggacacatgctcctatccacacttgcagttggtctaaccttcagccagaatgtattcataagtagcatttggcaaccctttatagtttacaaatagcattttacatacaccattctactattcctcatggtggctttgggaggtccagctccgttttaaagactcacacaggactgaagcaaataacttgctcaaagccacatagctgctcagaacccaagattgtaagctccccctagggccagaggcctctttctttcagtttttttctttcgtccccctttgacccctctttccttcttccctttctcccctccttcctcctttccttctttttgtgcccacagtgtctggatcatggtacctgaattctttagcctatttgcacccacatctgctaatgtccatatctagccatctattacaccagctgctgaggatttacttggtgccctcatcaagaagtttgaatttctccctccttcctttttttttcctgccactgtcccaactctttccctctacgtctctctagaatgacatctttaaaccccttacactctttggtcttacacatccttaaaaatgattatttataaattgaattataatatccatgaggtaaacactcatagggtaaagtacacaaagcttaactatacaagttgatgatttacacacacacacacacacacacacacacaccccttcttgaatggctccaaggatacccttttaacttcttcccttcagccacataagccatatgatgacacacagtgtctttctcctgtttgaaaagaaattgtgtcatattggtgtgctgttcttgcatagaaagccttttttaagaagtctttttaagatttcttgaaggattttagaaatcatatatctcttctaaccccctgaaatcctgagtttaagtggcttgattaaatggctgatcaaaacttaaaaacacactaggtcaatgtttttcaagatacaactgaggaccagctgcttcagaatcatctggggactggctaaaattccaggttcctaa

SEQ ID NO: 8196 - DNA, 1953 bp, Homo sapiens
gtgccacctcctcttgtagataaatctgctgaaaagcaagcaaaaaatgtggatgccatagacgatgcagctgcacctaagcaatttttagcaaagcaagaagtggccaaagatgtcacttcagaaacttcctgccctactaaggacagttcggacgaccgtcaaacatgggaatcatcagaaattctttatcgtaataagctaggaaaatggacaagaaccagagcatcctgtttgtttgacatagaagcctgtcacaggtacttaaacattgcattgtggtgcagggatcctttcaagttgggaggtctcatctgtttggggcatgttagtttaaaacttgaagatgtggctttaggatgcctagctacatcaaacacggaatacctttccaaattgagactggaagccccctcacctaaggctatagtcactagaaccgcactacgcaatctgagtatgcaaaagggattcaatgacaaattttgctatggtgacattactattcacttcaaatatttgaaagaaggagaatcagaccaccatgtagttactaacgtagaaaaagaaaaagaaccccatttggttgaagaagtttctgttctccctaaagaggagcaatttgttggacagatgggtttaacagaaaacaaacacagttttcaggatactcagttccagaacccaacatggtgtgactactgtaagaaaaaagtttggactaaagcagcttcccagtgtatgttttgtgcttatgtttgccataaaaaatgtcaagaaaagtgtctagctgagacttctgtttgtggagcaactgataggcgaatagacaggacactgaaaaaccttaggctggaaggacaggaaaccctcttaggcctgcctcctcgtgttgatgctgaagctagcaagtcagtcaataaaacaacaggtttgacaaggcatattatcaatactagttctcgtttattaaatttgcgtcaagtctctaaaactcgcctttctgaaccaggaaccgatctcgtagaaccttcaccaaaacacacacccaacacgtcagacaacgaaggcagtgacacggaggtctgtggtccaaacagtccttctaaacggggaaacagcacaggaataaagttagtgagaaaagagggtggtctggatgacagtgttttcattgcagttaaagaaattggtcgtgatctgtacaggggcttgcctacagaggaaaggatccagaaactagagttcatgttggataagctacagaatgaaattgatcaggagttggaacacaataattcccttgttagagaagaaaaagagacaactgatacaaggaaaaaatcacttctttctgctgccttagctaaatcaggtgaaaggctacaagctctaacacttcttatgattcactacagagcaggcattgaagatatagaaactttagaaagtctgtctttagaccagcactccaaaaaaataagcaagtacacagatgatacagaagaagaccttgataatgaaataagccaactaatagactctcagccattcagcagcatatcagatgacttatttggcccatccgagtctgtgtagcagacaggtctatttaagctttcaaatgaacagggtaaagttgcatctaaagtaccacagatacaaccatgtttaaatcctcgtatgcactctggcctgcttctccagttacttgcttgtgtaagaacaaaaatgagaaaggttgttttccagtaaaaacatgaccagcttactaattggttgttttggattgcatttatagctatgcttttttgggtttatactgggaatttatttttactaaattatttaacttttctaattatgtaattatgtaagctagcttttcatgtttatgtatgtatggtgtccccttgtgttatttttcttcctcttggtttttgaattagtgtt

SEQ ID NO: 8197 - DNA, 1047 bp, Homo sapiens
catcgttgtaatcttgagacacagggttggatagaagagcaagtggtatcaggagaccaacaggaccatgagaagaaaagaggaatgattgggccgggaagttgcctaaaagtagtgagcagacaggattgtaagaggtgaaaaataggagcttgtgatcagagactaattgaaaatgaaagatctttgatgtggacaagttccaagtgatgaccgagtctaaagcctgatcttcccagacagctgaagtaagagaggacacaggttgaggaaacctgaagtcaagttatgagaaaggggtggtgttacttagatttatttaggatggccctaagatctttggaaaacaaagagccttctcattctttctctaagttctacataaagggatagcttgggcaagtgctgttttagagagtgtgggaagagtgacaggaaacaagtagcacctttaagtgctaacacacctagaatatctatagaagcatacactagaagctactaaggtcagggaagggacagtatggctgggagacagaggtggaaagaatattttttactgtacatctttttatacctttatacctttcaaattttaaactacgtgtaacaattaaaaaataagaaaaataaaaacaacgtagatattacagatgcagatagtaaccagcttgtttaactttaaagcagtttatcccttacttgttctttctggttttgaaaaagatgaatgtgatgggtacggttgataaaaagaatctgtaaaagtacgttattcatagtatagtattttgctacattattttcaagcactgctctcttaatttgaatctttcatcatatgtcttgtaatccctggagtattttagaatttccttcagtggaatcacagctttccctcactctaagtctgatttagccattaatagaatcctttaaatagatctctctctgttcacttcttcagttcaaactgagagatgtcatctaacctaagaagagatagaaagcaattaggagttagcatcctggcactctttttgggat

SEQ ID NO: 8198 - DNA, 1049 bp, Homo sapiens
agggcagggagagtatcctcctcaatcatgagatagtggtattgttgttgttgtttaagattgtgttctcaaataatgacttgagaatatcagcaagcttattaagagctgttataaggaggatggagatcagtagctgctgcccatgtcaactgaggataaaatatggacaagcatttatatttcatcaggaatatttaagataagaaataaagaactttttaggaataaagaatattaatatcatagcatggatgttagtgcttccagatagttgtaattaataacagaaagttttaaagcatttaggaagtagttcatgatacttcactatttgacatctctagtttcacccatttgcattttgctgtaaatgtgaagttctataatatactaattgaaggtactttaaaatgaataagctaaaagtaagactagttaaaatttttgtttttgccttcaaacaggtaagtggaaaggggtagaaacagcaacacttaattcgtatgtcttattaaacccgtctttgtagtattttcattagttattgtgtatttctcaacttaaatattgaacatgagtagagtttaaagtcgatttgggaacagccgtgtttcccatttgtaagcatgttggtttacattgatattggattgtactagagaaataggtggttatatttgaaaattgtttgtgtataaacaatatgccctatgctggaagagataaggatgttttattaactactgtaaataagactacttctggataattcattatattttttaaaggttatctagtaattcttagagtatggacagatgacttttttcctaaatgaatgattgtgaattatcttttgtaagttgatcaatactgagagtgttgtcagaagtttaagtaggaggccattaagcaaaaggaagtatcatgaagcagatttttaatttttgtgatgatacactcatttgtttgcagaaacttgcatattttaacaaaatcaacctgtgtaagataagttatatatgtttagaaattggtatgggcaa

SEQ ID NO: 8199 - DNA, 1028 bp, Homo sapiens
tggtgcattatagtattttatttctggcattactaaacacatcaaaaacatttcttactctatgtgtatagtttaatgtaacctaaataaaatgactaggtataatctaaaattttacttgccttacttccctttcagttttggagagttttagaagtcttgctgaatgaaattgaatgcacctacaagcccacctctgtcatgtattgttgaatgtacatacaaagagtataaaagagcttcctaaagaactgtgatttcaagtaagaatatttgagacagacaaacttacaaatacgttaggccagatgcctcagagttggcattttggtgtgtttttttaaggccagattccttgcagatagcattttggtgctcctatttaaccatttgccatttacagtcttaatcttatcaaaaggaagagaaagattaaagcaaataaagcctttttgaaaatgtcagtttttatgaaaactcaggtttagttcaatttgataatacttgtgaatacagtagggactcaatgaaattttaaccatatataacattctatagtttggcttctttaaatgcctttgagctttaatagtaaatcctatggaacatttcttctcttaaagttcatcttgattaaaaatgagggatgtagttctctgtcttaggttttctaagtatgtttactatgattctaagatgctggggaaagaataggaagttatgttaaaatatacaaacataaactctccagatcaaatcagtggaaggcactatgagtatgagaacaggaaactgagtatgaggtgtaaggcattgtatcatctttcccttcaaggaaaattcgtagtagggaaatcagagcaacagtactgtgagtatcagtagtactgtgaggttccaatgagggagaagtaacattcttttgggaaaacaagaaaagaatatattaaggcggtgacatttgaaccaaacctcatagtatgtataggattttgagatggcagagaggccagttcaagatgaggaca

SEQ ID NO: 8200 - DNA, 1066 bp, Homo sapiens
actttgaattggtcataacttgccattgctattggcattttcaatatcctttattatatttgcaaagatatgagattagacagttctaatattttatagcaaaaattggtaagactttaatcttgtcattattttagatcttagtatatgtcataagtagtgttgaggaaagaattctaggttattaattatatctgatgttgaaaatgtcagcaaagtgtctacaggcattaaattacgaatgtctgaatttaatattcctagggaggagaattattagttccttaagacaaaacatcagggagtaggattcaataatttgtaatacattacaaatatgggtagaaaatagaacatcattaaaacaattatgctaaattatttgatgagtttaggatgctatctttgtataaatacaatctctagatttaaacagtatttaatgttgaaatttgttcagtcaagttagtcactaattataatgaatatacagaataaaagaaacttaattcctgtcatacttttaatgtgccttgagtttttaaaggagtataatactgtaatctaggaacatagcttcctccttcatcttcgttagcatggagtttttgccctgatggttgcaagatgtctaatgcatccttaggattttacctttcaagaaaaagggtgtggtctaaagctggccaaaagcacatgtcagccatgtcctttttaaaactttcctggaagttcctcccagggatttccagttatatctcattggccagaagtgagtcctatggcctcctcagcagcaagaaagtacagtatgagaagccattttaatttttctgcctttgtagaagtagaaggcaagggagaaacggagttatgaatggcttttatgtagccagtccacaagaaaacaaatctatttgatgaccttttcattttttatttttttagagacagggtctcgctctgtcacccaggctagagtgcagtggcacaatcatggcttactacagcctccaactcctgggatcaagttaaccctcccacctcagcttccacctcccgagta

SEQ ID NO: 8201 - DNA, 1030 bp, Homo sapiens
ttttattgttaagaatgttattaatatgtatggttatttttcacaattaatgatgtttttgaatttatttggttttaaggtacccttttaatgttttctgttatcaaatatctgtatcaaataaagagcagtcttacattttattggtttataatcttgtcacaatatattgatttataatcataataaaccaatcatttattattacatctttttaaaaaaatctttgaaactttaaatgtaaccttaccacagaaaaatgattcattatttattgttacgcttacttattttttctttcaattgttttattgagatataattaatataccatgcaattcacccatttaaaatatacaagtaactgatttttaataaatttacagggctgtataaccaccgtcagagtttaattttagaatattttcatccccctcaaagaaactccataaccattatcagtaatgcccattttcctctagtactcctcctgcaaccctaaataactttctatctgtataaatttgcctattcaagatattttatatgaatggaatcatacaatatgtagtcttttgtggctggcttatttcacttagaagtttttcaaggttcattcatagtgtatgtagcatgtattaatacttcatttattgccgaataatatttcattatatggatatgacacattttatttatcccactcatcatttgatggatatttggcttgtttccactttttggctattaggtatgaataatgctgctgtgaacatttgcatgcatgtatgaatgtatgctttcatttctcttgcttacacacctaggagtgaaattactgagctatgtgttaactctatgttaactttttaggtaactgtcaaattgttttccaaagtgactatatcattttacattcccatcagcgatgtatgagcattctaatttctccatatcctcagcaatacttgttattgtctcttttattatagccaatctagtgggtataaagtcattttgatttgccctt

SEQ ID NO: 8202 - DNA, 1111 bp, Homo sapiens
caaattttgctcacaaaagtgaactttaccacactgccataagctatagattaaaagaaaaaaaagtttctttaaatctggaaaacaaaacactgaagaatcagcaatatttcaaataaaaagtcataaaaaattattctcatcagtttattcagttccgtgtaatttattcttattctgccagatcttggttagcagtttcatgaagccatcagtttcttcattagagttttataaattcttatccaggccaatggtatgatcttaaagttatcagaaacttgtattccagagtacttataatgaatcttgacgaataagcaattttggactgtaactgactgcacatgcttttagggaagaaccaaaaccattgtctgtggatgaccaagagttagaaatggccatggctaaaaatctgatgagagttcattataatcagcaattgacaaagaaatttggttattgctatggcattgtaacatttaacataataaccaaaaatcatgactgataactattagatttctaggaatctcttacaaattttggaataatttggaagtcatttgtttcttattttgctctaaggtcctcttgaaatgttctgctatgattactagtttagctcagtcctgtagcctcttgtcttttttttttttttttttttttttttgagatggagtcttgctcacgctggaccatcttggctcactgcaacctcagcctcccgcgttcaagcagttctcctctctcagcctcttgagtggctgagattacaggtgtgcactaccacatctggctaatttttgtatttttagtagagacagggtttcaccatgttggccaggctggtctcaaactcctgggctcaagtgatccaccctccttggccccccaaagtgctgggattacgggcgagagctactgctccctgcctgtcttttgtcttttttatgagcctgcatcaagttgggggaagctggaatgccttaccaaaagggcttccaagtgaattttcaagtcagtaacagcttcatatttctctagcacgcaggtctggatgatagaccacatagtgcaaatggaaaaacactttaggaatgccttt

SEQ ID NO: 8203 - DNA, 1050 bp, Homo sapiens
tctttagctttaatggaggagtatgagttgtgttttaaattaaaagttttttaaaacctacagtttataactcagcacaaacttctccataaaaacaacaatattagtgatgagcatatgaatgcctggataattcataggtaactgaggtgttatatagttggactttggaattagactagcttgaattctggttttgccattcactttgtaaaattgaacaaacttgttaaccttcctaagcttcattcttttcatctggagagaggagccaataatattgccctcttcagggttgtgagcattaaataagataatgcatgtaaaaagcacttagcatactgcctggcaaatagtaaacatctctaatgaatatctctgctgtgttaattgttattgatgttgctattacagtcatctttatcatgtactaatcactgtctgtaatagtcagctctctgtattcgtgggctccacatccatgggttccacatccatggattcaaacaactgtggattgaaaatattttttaaaaatttaatctgcgctgaacatgtacagacttttttccttgtcattattctctgaacaatatagtcttaacaactatttacatagcatttacattgtattaggtattataagtaatctggagatgattcaaaacatatgggagaatgtgtataatgcagatactgggccattttatattagagacttgagcatcctgggattttggtatccttgggaagtactggaaccaatcccccatggatgccaaggggactgtatattatttccatggaacatgcattctgaattttgatcttgtaccgtaggaacactcttcccatctggttcacagtctctctcctgccccacctaaacttcatggcctacttgctgcctctaggcttttcttttctttgttctctcttgccttatcaatgggggcataccaaaaaaccaagacttatgggtgccatagcgaaggcaccatttgctgccagttatgggggagtgtggtaagctttggttttgtagagcac

SEQ ID NO: 8204 - DNA, 1052 bp, Homo sapiens
gcttgacctcctgacattggttgggaatgttaaaggcgcactgggttgctctttctgaacagggactgggcaggcttctgtgtaaacttggccagtcccttcccctctctgggcctcagctcccccatctgtcaacacggagcggtggactagatgttctctgaggtctatcaggtcaccagggcacaactcacagattcctcccctccaggggtgagggtgagcttcggagcaccgaactgggtccttgggctagtgacaacctctcttgtgtcatctgtgagttggggatgagaagagggtgaacttcagaactctgcactgagaatgaatgagatagtgcaggtaaacgtatccagcacatgcctggtacacaggaagcactcaataaatgctagctcttgtagtcactgtggtagttactaggttgatcagctggcatggattgttctgggcctgtagactcagattctcaagcaatttctgcctcagagcctcctgctaaacggacacacttaaacgctgaatttgatggaaggcaggttcaccttgcacttggcttttaaagggctccttaccactgcaactcaattccatgactggatggataacagaagcacccgggaggagggcagcttggcaggagcccacaggaagattcaaggtttcataacaaagcatcttctggtgtgtcaagagtaagactaggccgggcgtggtggctcacgcctgtaatcccaacactttgggaggccaaggcgggtggatcacctgaggtcagcagttcaagaccagcctggccaacatggtgaaaccccctctctactaaaaatacaaaaaattagctgagtgtggtggcaggcgcctataatcccagctactcaggaggctgaggcaggagaatcgcttgaacccgggaggcagaggttgcagtgagccaacatcagaccactgcactccagcctgggcagcaagagcaaaactcaaaaaagtctcaaaaaaaaaaaaagtaagactagaaacgtccacgaccccagcggtgtgttaggggc

SEQ ID NO: 8205 - DNA, 1099 bp, Homo sapiens
ctcactctgtcgcccaggctggagtgcagtggcccgatcttggctcactgcaacctgcgcctcccgggttcacgccattctcctgcctcagcctcccgagtagctgggactacaggcacccgccaccatgcccagctaatttttttgtatttttagtagagacggggtttcaccgtgttagccaggttggtctcaatctcctgacctcatgatccacccgcctcagcctcccaaagtgctgggattacaggcttgagccaccgcgtctggcccaaaaagttttattttaaacagctttattaagatataattcacatcccatacaagtcattcaaagtgtatataatggaatggttttgagtatattcacagatatgtgccaccatcgccacagtccattttcgaacatttccctcatctcaaaaagaaatcccataccctttagctgttacttccccgtcctcccacccctaccagccctaagaaatcatgattctgctttttgtctctgtagatttgcctattctagatatttcatataaatgaaatcatacaatagatggcctatgtgtctggcttctttcattcaacgtaatgtcttccacgttcgtccacatggtactgtgtatcagcgcttcatttatttttatgggtgaataatattccatctcattgatagaccacattttcttcatccattcatcagctgatggagattgtggagataatattttcttggtactttgtgccagtccctgttctaagtgctttatctcattgaatcctcacaacaaccttgtgagttaggtgctttttgttactgctattttacagagaaggaaataggagatgttatctaacttgtccaaaatcacacatctagtgaagatctggttggccactgagtgtaattcccagaggcacacagtcctcttttgagttgtgtcttcagggtaatgcatatgcacctcagcctgctcgtttatccgtaagtggaatcagaaatggcacagggaggggcgaggcatggtggctcccacctgtaatcccagcactgtgggaggccgaggtgggtggatgacccgaggtcaggagttcg

SEQ ID NO: 8206 - DNA, 1023 bp, Homo sapiens
gtgaggttgagcattttttgtatgttcatatttctttttctataaaaagctttgcttctatcttcccaatttttctattggaatgataatctttctcttatctgaaaacagcactttatatagtaaagctcttaatctattgtttatcatacaagttgcatttttttcctagtttgtcctttgctcatagtatgtttctcataccaaagatttaaatatttatgccggcaaaattgttggttttatcctttatggagtctgaggcttatctctcttcaagaaagtctttctcattctcaagattatgggattattgtttttagtcctttaaataacttttataattttttaaaatgtgtacgtctttaatacatctggactttttttctgtgaatgtaacttgaagtgaagacccacttttttttcttaatggataactaattattccaacatcatctgcagaacaatatagcccttctccattaacaggaaatacagcctttatcgcatactagattcttatattttattctatttattctattctgcattctattttgttcattaacatatttgatattcctacaaaattagcatactgcttaatgaccctgactttgtaatatcttttaaaatccagtagggcaaagctgctctcatctttcttcacctaggaaaactattctcatgcatctgttctcctagataatatttagaatcaacttgccagttattttaatcagaaccattattggaattgtatcaaatgtatgaattaatttgggaaagagttgaaatcttcacaatatttggtcattccaaccagaaacacaataatttatttagattttctttgatgtacttcattatttgcttctaaataggtcttggatgtttcttgcatgaattagtcattgcattttcagttttgtggatgatttatgctttgttttgttttgttttgctatagtgaatggaataatttctcattttatattttaacctgtttactattatatgaga

SEQ ID NO: 8207 - DNA, 1024 bp, Homo sapiens
tattctgtgttagcaccagcgttccttatttctaccctgttctctgagtctccatgatcctggtttaaagggcagctgcccgggtgtgctgaaagcgagatagactatatttcatttctcatctgctgccaggacatctcacatgagagataattcatttctatcactgatggcaccagtcccacgtactgtgctgagctcccattacgaggatttatttcatctcgtcctcccagaaatccattgaagtctattcccattttccatatgagaaaacggaggctctaagatgttaagacgttcatccaaggtcacacacacagctagtaaatgaggacgtctggattccaacccgggtctttctgactctaaaagcttttctttctccccgcttccctacatctgatttcatatcaaaatgcccacctttccccaaagaggaagccactgggtgaggaaggagacaacactttgctctttagtcctccaaaaagtcaatgaccataggataaagagtctggatcccacatcccctccagagcatttattccgactctgaaagagacaacagactactggcacatggacagcgtggatggtttacaaatagcctgaccatacctcacttcagtcacctctcctaccagccctgtgaggtggacactgtcattattaccccacttagagaggcaggaatggactcaacgaggttgcacaagttgctcactccccatccattgtgcgcagagccctggctgtcccattccaagtctcccagctttgtagattaccacatatgggaccatttaaccaatgaagttagaccttgcattgtgttgtgaaattgctaagttttctctttttcatgttttaagtattcctgcacatattatttcaggacccaactttttctgcatttattgcctctctgagactcataccttttccatgtatgtacccatttgtactgcgaagccatcaaggaaacagaacaaggagttgccccttatctgtggtcagatga

SEQ ID NO: 8208 - DNA, 1064 bp, Homo sapiens
acaaagagtttttgaagtcttctgaggttctcaagaaaaagtatgttaattctggaagtacaccttggattcttagagcaatgaaatatcactttccattgggcaggaaagaagaagaaagctggatgatgccaagtgttggtggggatataggaatataggcgccttcctacactgctggtgagatgggaaggcagcgctgtgcacagtacgcaccttatggcccagcaatcctgtatttcgaggtataccccagacagatgcttagacaggttcctaaaggactggtacaagtttttcatagtaggacctggaagcaactggggagagtgggcaggtaaaacacagtccaggcataccctgtacacatacacacacacacacacacacccctccagataaaatgacttgaaaaaagtcctagccacaaaaaaaagggaaaaagttgaatgagatttctagaatagcacagtttatgtaaattaacaatatttgcatacgaaatgacagtatgcattttacaaggacacatacaaacaaaagatcccagtcaactggaatggttgcatatggcagggcaggcacatgatgggagtagaaatgatgatagaaggaaataaataaaatgtaattaaaaagtacaaaaaagggacgccatgcagagaacgatgctaatagtgtactatgaatgtggtaggatggattcaaatctctacatttcaagtgctgtccctcccccaaatgtataatacacacacacacacacacacacacacacacacacacagaaggtgttgcaagatagtgacacatgggcaaaatcaggccctcagatatgttttgtttggtctatgcagtacataaaagtggcttgaattagttgccaatacttaaaatgcaggtcttcagctactctaagaagatccaacaagcttgggctgaagacagcaatccccatttgtgcttggcggcttgccccatccctaaagagcctgaagtctgctggtcaccatagtccttatcctttctgccctgaaaaaggaggaggataggctcacactttc

SEQ ID NO: 8209 - DNA, 1035 bp, Homo sapiens
catattttacagttgttgttttgtgcatggaataaaaaggttcttaggacactaatgctttgtgaaggttttaaaggctaatacctttaagtgctgggtaaaaattaaacttgaatagcaccgatgaaatatttactcatcagatggctttgaagtttagcgtcttttggttgcagtcccatctaatggacatgtttcaaagaagaaaatagttatagcattcagctgtgatgttttcttctctgcatgggagaaatctgtgttgttttgattcgtttcagtatttaaattttcaagactagctacttagaaatcacattaacgagagaaatgtttcccacaattctgaatttattcttattgatagggtaatgtttgaaagctgagttttctaacacttatggcatttttaaacagattgctttaactcttttattctataatctttccaacctaaatttacttaattctccctagttttatatcagagggcctaaggtgagtgactgtgtgtaaatataatgggaaatctctcacacaaattagttttgcaaaatatcttgctggataaaagtgctatgtttaaagttgtttagaaacttcctatttcattcttcagttctgataactaaaaagttttccttcaaagtttgaaattgtaatgatgctttaagaatgttggggaaatactggatttttttctacttcttggattaaatttcactcctctgaataatgtagggctttagaaatttgtattacaatgttggttaaaatttttctatttttatgtttcctcccacatgagttatgacacttttaacatttgtttgtgttttattagttttcatatgagtccaacaagcaatgaagacctcaggaaaatcccggtaagttgctgaaggggttagagggttgtcaaagagtaagctggtctttttctctggcacacatttctaaaaatgcctttgtcttcttgccttctgcctcacttacctaagaattgtagcttagcgtagtaattttaggagaaag

SEQ ID NO: 8210 - DNA, 1057 bp, Homo sapiens
gtttacattgtcttataaaagcactcttaaccagttttaatagatctttgttcttatgtagggtttttttttttaatctttgcaagcactgtacactttttactctgaatagtttctcctccttaggtattcttgttccaaaagaatatatatgtttaagaaagagaaacaaacaaaaacaaaaaaacaaaaaaaacccactttgatctctgccacatgccgtagtgattactgtggtgaacagtttttttgctctaatgattgagttattttctggccgatatatggaaggttagtccatagcacaaattaaaggacagtttcaagacctcactgatttatttcttatctctttacttattatttattttaactttgaggtaaattaacaagtgatattgtagaagagatactagtgattcctagaaatatttgaaaacatttcaaattttagaattacagtttactggggaaaattctttaatatttggaaatatctcaaagtaaaactgttgatgcttttgcataaaaacttcagaatgttaaggtaagtcattttatttaaaataacttttaaaatactaatttaaaatgtttaaattctgtagtttcattttacatagactcctttttaaatgtgagtgtatctaggtttattttgcacctgattaaaaacaccattttccttaacctgtcagcagctcggctgagcagtcagaccggattattcgatatcttgtctgacatgaggacggcagtccaaagagaaagatatcacaaattggtgccacacttcaataaatagagacattttatttttcaccaagctaattcaatccagttcagttaactcttttttccccattaaggacagatcaaaaaaggcagccatgaatgactgagttcgtcaagtgtttgacacgtcagtgtgtgaatataaagcagaccacaagggaggggttctgcctttagacttcagacaatacccagtacaagagcctctcactcagatctgcactgtggggagctggagagagtggctcagatcactcaggta

SEQ ID NO: 8211 - DNA, 1025 bp, Homo sapiens
tggagctgagaggttaaagagtgaggtgattttagtgaaaatagttttttggtgaccttcgtcaaagaagcaatgagtattggtggtgggagttgtgtttcagattaaagaatatgaatgagtcaaggtaacaaagtcagcaagggctacttggtagggtttagagattggcaaaataaaaatggtagaatgtccaagagataatggactgtcgacgagtcctagtgagtaaatacaggtggattaggagacaactgggatgatagtgggagtgcaccagcaggtctctaggagagagggagtgtcagaggtgagattgatcagatgggattctgattgtatgagattttatggtataagattttattgattactgttcctttggaaacatgttcagagaaattcagtttgtgaaaatgtcttataaattgtaaggcaaaatgtaaatatgaggtggtattattcaaatccaagtcacttgaagtaattacaccattttacatactgcaggagcaatgaatctttaaaaatgcaatcctaaatggaaaataattttgaacacaagtactccagctctgtgaattggaaaagcatattgttaaatgaaggccaggagtttgtgtgtgtgtgtatgtgtaggcagggtgggttgggggaggctagcagtgaattatcatttacaaagtaagaagaggctatgcatattttgaaaaaaaaaagttaaaataagtagttatggagcatacgccagaaattgaagggcaaaggaaagtataggtaattcatatgagtaattatttttctttggttctttctttctttctaatagagaaatagaacaaacctttgtcctaaattattttacattattaagtgaatggtttatggcatttattttatattcatgtatcagttaagaacctaataggaaacaaatgacacactcaaaacgaataattgagggaagtttagtggggaggtgtctgcagggttaaggacatcaagaaggaatagtacagcaccag

SEQ ID NO: 8212 - DNA, 1028 bp, Homo sapiens
attctttcaaaatctctgcctcaatgtcttttaatgttaaaaaaaaatgtccttaggccgtgagcaacacttaatcccatatggaaaacttctagcattgataagaatttttgatgatgagtgattttcaaattacaaaagaaaagattatctgaaaacattttcaaacttgccaaagacctattcattccttcagtatatgttacatcacagagacaatgatcagttttttaaactaaataataagtaaagcccgaaatactgtggctgacagattcttattcagagcttaggttgccttgatgtatagttactttacctaaaaggctatttgtatgtaacagaactcagtatcctctctctattatgtgttacagccaatttttttttcttctctttaaggtggtttagattagaatccaaacaaggaaaacgaatcaaaaacaggggtgagataaaggtcaatattcagtttatgaggaacaatatgaccgcaagtatgtttgacttatcaatgaaggacaaaaccagatctccttttgcaaagttaaaagataagatgaagggtagaaaaaatgatggaacattttctgatacgtcttctgcaatcattccaagtactcacatgcccgatgccaatagtgaattttcaagtggtgaaatacagatgaaatccaaaccaaaaaagccttttctcttgggtcctcagcgactctcgtcagcgcattcaatgtctgatttatctgggtcccatatgtcttctgagaaactgaaggctggcaccataggtcaaacacatcttctcggacaccagttagattcctttggaacagttccagaaagtggtaagtgtcacattcttgtgtactcattggtctgaactacccttttagtttttaaagtttaatttctaaatttagtaaatcaaaatagcagttgctttgtagtattttccaaattttgtcattcatcaaatattgagtacctactatacctcaaattggtaagttccttgaaggcagagcttg

SEQ ID NO: 8213 - DNA, 1030 bp, Homo sapiens
ttgcttccttgccagcagtgctcaaaaagagaaaaagaaaatccaaagtccatgtacataaaagttccattcccgatggtggagggcttaattaaagtcctcagatgtttctgtgcaccttggaaaacatttttatgaaattcatatattaccagaagtggctccaacaattcttgcagttaaaaaccttgtaactcatgcagctccatcaggagcaagctgcctttttcaagatttgttttgctgcttcctttacctccgtagcctgtggcagtgacggctgctcaagggccttaactgccaggatggcactagaggattttccaaggttaaggtcagataacagaatctggaagaaatggatccctcttcctgcatttccttttctcattatttcaataaatgcattgaaggcttgtgatgtgtctggcactacagcaggcactgaggatgccacgctgaacaaagcggctggatcttcatggggctcatatcctagagggaaagacataataagcagactctgcagtgtcacacaacatcacctaggaaatatagagatgcaagtgctcaggcgccaggccagacgtgaattcaactgtggtagcaagaccttgtatcttctgatgggacgttgaagtgtgagaaccactggactctcatatggtgataaactttggagaaaaaggacggaggcaggtgtgttgctgatgccagcaaatgttagaatagtgaaactgctacaccctggactatgaagcaagccagatttgaatcccagctctgctacttacaagctgtgtaacctccggcaggctacttaatctctctgtaccttgggttctcctgagaaatggagataataatagtagctatcttatagagatgtgaggattaaaggaactaatgaatatgaaagtgctgagaatagattctcacatatagcaaacaatatacttgttgggagacaattctctggacaattcttgcatttctacacgtcttggaagcaaggcactaagtacccttt

SEQ ID NO: 8214 - DNA, 1029 bp, Homo sapiens
aaagacatgtcaagcgtgccaaaccttgctctcctaagtttgcttctttccttacacgtgtgctcttaacctcctgccatgccttactattggcaagcagatccctagaacttaggctttaacctgttgactttagagtggcttctaggtcatttcttcttttttacaagtctgcctgtctactaatatgcatcaggtgagtacaagggatagaaaaggcaagaaacaccaaagaggtacttcgtttttattgtttaatctgggttcttaatgggtactcttgagctgtccgcattggtgggcattttaaaactaagagcacactaaaagtagaagataccatcacaatgcttatcctggagatgcttgctggggaacagctctgcagccagagcgccgtgcagggcagagtgtaaaactgaaagctggagggctggagaaacagggactgttttaggttgagttaaagaagacttctgggatggggggatttcacggtgaatggatcttgtaggactggcaggtgggtgtaaggggggcacacatagagggccctgcacaggggacacttaagtactgtggtcctggtgctcagccttttcaccttagcacccctgatattcttttttctctcagtgaattaaaagctgttaccgatcatacagagtgcatttatgaagtagtaattagctttcccatgttttattaatcacatctgtgactgccaatcagagcttctgatcagcatgagataactggtgtgaccatactgagttgctgtaattctagcccagagcaaagaaacttgatgtctctgtcagtgtctgcagccttatcaggggtaaattcctgttcagcctactgcaatgctgaaatagcttgaagatcctcattactacctttgtggaccctcgaggggcctcagtttgagaaggatttccatccaggagactggtataactagggtaaagggtctattgggagtcacgggagatatgggtcctgtctttgtattcattatactttgag

SEQ ID NO: 8215 - DNA, 2026 bp, Homo sapiens
ctccccttcccatcttataagttcttgtgcttgcagtttgactattactctgtttcatctctaaggtagccttattttgattcactgagtatagctttcattgtgtataacagcattttattaatctattttggaatagaaaggtacaggtatctcattttaataaagtgaatttgaaagtgtgttgaatggtgccataaactcagtaggatttcagtgttagttgttattacagtggcttcttctatatgaataaactaggagttcttctccctatgaagagctctgtgccgaaaatcatctttaaaattctattcaacaaacgtaatatcttttgtttgttagtaagtagactcttttggcacttggaacttttatttccatagaaagtcttttagaaatagtagcttcatttcttatccagcttggaagtatagttactttcaagtatagtatatactttcaagtaattgtacttgaaagtatagcaaaattataccagtagaatatctgatctccaaattttggagacttgaccatgaaaatgtcaggaaatggtagagaggggcagtacctgtgaggttgggagagactccagtgcgtagataacctttcatggctctaaggatgggggagtatagtgaggagtggctcaagatttaagggagctttcagggactgaaaagcacacaaggcagcagtaaccagtccttagggatgcagaaggtggtggcagtctggtctgaatatctacctcatttggatcagaaacagaaccttctagataactgatacttaagtgcattactagtgatgataaagcattccatgtcctgctgtatgttgaacaagtgtctcttgaatccctttaacaattctggaaatgtgttaccagttgctgttagatgctagctgctctggagtctgtgagatagttccgagtaaagcgtaagacaggcacataagaaaaaccagcagggacatagagtatggctgccctattgttcttagaaatggtatggattttttctcttcgctggtctctttaggatcacaggactcaacaagctggtgtcctattgctgttgcttgtccagtcttccttttggaagatcccagagttgcgtattttgtgatctcttccaagtagcaagtgactgaccaacagaatcccccaagtcagtcagtttcctcagattttgctttgctaaaggaagaaaaggtaagggaaagcctagtcttcagggttaaaatgtggactccatgtgatccgtgcacaactgtccatctttttatctttttctgcttattagtacccccatctgaaacaaggggaattcacagagaagcatttattttactgcaggttctatgttccttttagtagagttagtaatgctgaagttttgagttgaacacattttacttaaaaaaacaacaacaccctttatattttgcaattatttcagactttcaaaaagttgagaaatttggaaaaagatttcctatttacctttccctcagataccagaaatgctaacattttacaacatttgccttcatgttttctaatttgacatactttatttaaatttaccagttgtcccactaattccctttatagcaaaagaaacttctttttcctagtcaatgactttgcattttgtcgtcatgtttctttagtttttttaatctggaatggttcctcagtttttctttgtttctcaggaccttaatatttctgaagaggccagttactttgtagcatgtcccttataattttgatttgtctgctgtttcctcatgattagttttaggttatgcatttttggcaggaaaatcatgggagtaatgttgtgtgtttctcagtgtcagcgatccagagactcgtgctgtctctttgtccctttcctgatggtgttacttcgattaactacttcaggtagtgtctccagatttctccactgtgatgttattgtttctttctttggaataaataagtgtcttgtggggagttaggagataa

SEQ ID NO: 8216 - DNA, 1009 bp, Homo sapiens
ggccacatccctgaaccttttcttaacccttggtaaaatgctttcttactgtttgctcagcacatccccctcagccctaaagaattttgggtcttttttctttttttctatagtataaaactaatagatatattgggtattcttttgccaagtacagaaggccacaagaagattctgaattatactcctggaggtggggtgtgggcaaattcccccagttgagaattaatgtcaatatagattaaagagctcatattggcatgtgttttgttattattgttgttgctttgtaattcctttttttcctttctaggaaaaaatctccaccatagtctttttttttagtgccttgatccttccctccttcacctcagactttaactactccatagtgtttcgttacgtagagagcatcatgggttatctgggtaaattactggccacactcactattctgacttgcaggtggactttttatcctaaactgagaccagagataactgtgatttcagcaaattcttctatggaaatactgttgcactcttccatcattatatctgatgtaaaaatatctactgtggatggatgtttgttgtgatttttgcgtttttcgttttgtctttttctttttggctgcaggctttaagtatcttgtgaattttttattttggcgtagggaaaaaacaagttgagaaaggggattcagaaattatatttttttctttaaaccttttaaaatcatttgtcacattaaatacttctgtgtttaatgtgtgtgtatgtgtttgtgtgtgtgtgtgagagagaatatatattaatgactaatataaaggaaattataaagccatggacttcatttagggaaatagccaagaaataacataaatggcagttatatggcctttcagaaaataagctgacattttatataaggtttttaaattgtaaaatgtacataacataaaatttactgtcttaatcatttttagctgtgcagttcggtagaatt

SEQ ID NO: 8217 - DNA, 1056 bp, Homo sapiens
ctattttaggccattgtagaaattgttgaactaattgtttctgatagtaatcaaacatatgaactagtaattgtagtataattgtagtaaccgattaaaaacagtaaaagtaaagacagtatatattgtataaaacaaaacttactatcttcttttagtgaaccgtcctcaaatgaaacccagtggaaagagcttactcagtattttggagtcaatgatagatttgacccgcctgttaaaaggaaaaaagttgagaaggtaatatctttgttattgcatcttataccagctagtaggatatgtttgtgattagcctcgcctaaagtacttgtcctcattaattcattcagttaaaaagatgcctactgcataccaaaaagggtgctagataagtaaatatatagttacaaattattaaaaaactgttaagagaaagaacaggttgttgtgaaaatattaaaatgggggcttcactttagcatggatggtcagggaaagcctttcatagaaggtgccacgtcactgagacctgaaggatggaaaaaactgtctatataaagaatgctagcgcagaggcatggataaagatcctagggaagagtcgtcctgggacattccagtaactgtaggaaggccagcctggctggaatggggtcagcgaggaggagggtagcccactatatgattacagaggcaggcagtcagtgaccaaattgtgtaggacctcaaaaggcttagtaaagaaatgggttttattcacaatgcagttgagagtcataaaggcttttaagtcaagggaatgacatgacctatgttaaaaagattcgtatgactgttacctggtgaactgattgtgaggcagcaaaaatagatgagaacagaacagttaagagacttctaggcataagatgatgatgaattgaaccagaatggttctgctgaagaaggaaaaaagtggatggatttgaggcgtattgtagaagtaaaattgatgatacttgcctctggattgcttgcgaggtgatagggagggtttggggcgtatggaaggggaga

SEQ ID NO: 8218 - DNA, 1699 bp, Homo sapiens
tgtattcttgccagtacagtatatggtttttctaccccaattacatactgggttttgtaccacatcactaaaggcccaaatcattgaagatacaaaaccgtacatgcaggctggttgtctggttagtcaatggctgatttgcttcaactgtctagtatgtatgtgcagcctgaaactggctccttaaaaggaaagccgggtcagtcatcttgaaaaaatgacatgtaaaagtaaatcgataattgttttgagagacggtacatgttttaaaggttggccttaagcttcagtaacattgtcattttgtgaccttttgttgtcacacctgtaccctaacctgacaggaattaactactgtttttttgtggggcagaaagcaaaacctggtgttgtgacttttatcctaatggttcttaggcaaggttagtgagaagaaacacaaacccagatgcatgcattgtgcattattttgtagacaagctactttttcttctgtccctttaacaaatttgcagcaattaccctccctttggggtctagagtgaaagctaatttgtgggtagatgagattgcagaagaatggatgtccatggctgtgaacactgcacactgcacatccatctccagtgctcacactgtgcagctaccactccctggctgcgtgccatgctgtcgggttgcagatttgcacacataaattcctcaggaagagtttgcatgagcatcacctcgcaatattctgtactgaccaaacaagggatttgaacgtttttcagcacaaaaggataacttccgagtggtggtctgtacgcatactagcaaaggtaatggtgatctagcaaacaaaattggtttctgcagttagaagtgagcaggagcacttgtattatagtatttaaataatcctggttaatctctttttaagccgagtaacccctccagattttgcctttttattattgaggctggctttattttcttctactttttttcccgttttatagcagttaattatttttgtgattattatgcaagaagcattgcccttgagttaaactgttattgtttcataagcagctattaaaataactgagcattgttttatgaacatacactaatctgagatactgaaaagctttgcaactaaaaagcaaaacaacctacattagtcatctagccattgtttggatgttttgagttgattttttatggtgcctcttttagcttggaatattacgtttactttaatccaagtctaggccttttaaagggtccttaaaattaaagttcagaatgtgaatccctttgacatctattacaggtttataggacctttttggttgtgattactgttttcaatacgattgtataaatgaagttaactttgtcagaagttaaaatggaggtcataggagttcctggagaaatggctctcctgtttctttcattaccccactgaagttcaccccagtttctggccacaagaatatgagaaaggaaccctgttgttttccaagggaaatcattcctctctgtccccactgttgattaactaaagtcctggacaccttccttcctccactggccaagacccaccttgacccaccttgaacctcttttcagagccgagtggcatgaatatgtgtactgtttctgcttctgttgatggagtggctgtgggagaattaaaggaaatgct

SEQ ID NO: 8219 - DNA, 1049 bp, Homo sapiens
tgtaatcaaggtcaggatgctttgcatgctgtggcagctccagctggtagcgatggttctcagggcattggaaagaggccaccaggttctttagtttctactgggatgacatcgtagcccagtcccagttccttaggttctcagtccccttttacttccctccaccccacatggttttgaggattttttttaagccttttttggggagttgggagaggagtgagaaatgtgtgttgaataaacagattcctgctgttatcaaatgctgtctgctcttcatactttttcctattctgatgttttttcagatagctcgtcagcatgtgcaagttccagggggtacagatagtgaatgtattgaatatgctttccttcctgaaaagaggacacactggagctgcagagactgtattcagagcacagtgggggctgcacacactcaggagctctgtcacaaagctgttcatggaagaggatgttggacttcttacttggtttgtaattttaaaacaaaaactaaaaaaaaaaaaaacgttgctgctagacttgggggtgattttgaaatgggacaatcttttaatgagtttatctacagattctgtgaggaaaaagcatctcagaaagtgaccatttctaagtgaaatctgacagccaaaatcagcagcttcctccaaaaatataagagcagaagaattttttttttaagcacttgttttgttcatttgtggacttggcattttggtgtattggtttcacatgtcaggatctcttttgctttaaaaccaagcagatcattacagtacagtatttttcacccacaaccaaaacaaccccttttaaaagagttggtctttgtttagcattagaaagtcttgttaaaggaaaatgctaactctgcttttgctagaactttcccccatcagttcacaactttcttctactctgtgccttgagctttgtgcactttgcaactgtgtgaccatgttgtcaaactcctcctggagaagtgtatggtatctaaactcacccaccaagatggcaggtgtggc

SEQ ID NO: 8220 - DNA, 1090 bp, Homo sapiens
gtttcaccttgttagccaggatggtctcgatctcctgacctcaagtgatacacttggcctcccaaagtgctgggattacaggtgtaagccactgcacccggcccagtattcttaaataaatgcaaaataatctgagtatgatgttataggtttttttctaggcttaccataattctgaagtctttatactttcatacattcatgttttatttgaacatttgctcttaatttaggatgagtttatacctttaaaaagacagccttctgaaaacttttttgtgaagcagtataggaatatagctcttgtgaattttgagcatattgagtttgccttccagagcaatgcatggaattgcttaaacgtgcccatttttctaatcctaattttggtactggaataagagaacagggtgcaggactgcttggtttatagtagctcttatgtcagatttgcttgggatgagatgagtaactgcctctgtaaataacctcaggttgcattgtgtctgcacatgaaggacaaacatggcactattcagccactggccagtttggttatattcagggaaatgtcttgaatttttggtataaataggaatttttgtctctaagtggaattattttataaaacttctggctggatttaaatactaggcagtattccaagggatgataaaatgtttttacaaacttaattagaccatttttgtaattaaactttattatacatgtgctatgaggattaaactttgcctcataaaagtattctgacaggtgctttgcacagagtaagtccgccaaagtggacgttctcatatgtaattctgagcttactcatactggccaggaaggacgtgcacatgccacctttggcagctgtgatggggagcctgcctctgctcttgtgcatggaccttccacattctgtcctgtccaacttaatgccttaattaggaataatattttagaagaagtggtgtctactgatgcccccagaaaaggagaatatagtacagcctgtcttaagaattctgtttctgcctcttcttatctgagcagtcattttatggtttatgcctaaccaaccacg

SEQ ID NO: 8221 - DNA, 1050 bp, Homo sapiens
cacacatgcactgcttgtatgtggtaggacctatattttacaagtatttaattctcctaaccctataagataggtatagtcattacctccattttatagatggagaaacggagacaaagagaggttaaagtttaaaccagaatagcacagctattaatgtcgtttctacttacacatttttatattacttacccctttactgcagcaaaaaaataactacattcaatttctgtaactttctacaatctgatcagtaatttccttcccgtggcttcagatagatctggaaaactagtgttccatttattatcggtgtataacaaatcatccaaaaatacagtggcttaaaacaacagtcttttattttgctctgcagtttgggagggcttggggtggggtagcttatctctgttctgctcagcattgtctgatgtggctcagctgggggctggcactttcagtgtgactcattcacgtggctggtaggttggtgctagcttttggttcctctgtgtttccttcatgagtgagtatctcaagatacaggaaatggaaattgctggtatcttaggtcctcggctcagaaactggcacagtgccacttttgctgtattctgctgggcgagggtcacagagcccaaattccaggagaggaatgtatcccacctcttgataaaaggcatgtcggctgggcgcgatggctcacacctgtaatcccagcactttgggaggccgaggcaggcggatcacttgaggtcaggagatcgagaccagcctggtcaacatggtgaaaccctgtctctactaaaaatacaaaaattagccgggtgtggtggcacgtgcctgtaatcccagctacttgggaggctgaggcaggagaatcacttgaacccaggagtcagaggttgcagtgagccaagatcgccactgcactccagcctggctacagagtgagactccgtctcaaaaaaaaaaaaaaaagcaaaagaggtttgtcagaagaatttgggagccacgtcttaaaaacaacacaaaaatgtaaaatgaata

SEQ ID NO: 8222 - DNA, 1090 bp, Homo sapiens
tgttgccatggaaaggggcagtaacttctgggtgttgccatggcaatggtcaactgacatggcacactggtgggcatgtcttatggggaggtgcttctgccctgacctgtttttagctagtcctccgtttggtcctgatgtccaagccccacctttggagtagatttcttcctcctattactaagttgagaactttcaccttttcatttaaaggaatcatttacagcttctctttggcatatctgaattgccaacatcatctctcttgctctttggagccattattaagtaaagtaagggttgtttgaacatttgctatgataatcgtgacagttgaactgataaccgagatggctaagtgtctgacagatggatagtgtcaacagtgtgcatatgctggacaaagtgctggacaaagtgctgacagatatctcaggcaggatggagctggatggtgttatggtttcgtcacgttactcagaaaggcatgcagtttaaaatttaagaattgtggctgggtgcggtggctcacacctgtaatcccagcactttgggaggctgaggcgggcaagatcacctgaggtcgggagatcgagaccagcctgaccaacatggagaaaccccatctctactaaaaaaaaaatacaaaattagccgggcatggtggcacatgcctgtagtcccagctacttaggaggctgaggcaggagaatcacttgaacctgggaggcggaggttgcagtgagccgagatcgcaccattgcactctagcctgggtgacaagagcgaaactccgtctcaagaaaaaaaaaaaaaaaaagtttgtttctggagttttctgtttaatattttcagactgtggtaacttaaatctcagaaagggaaactggataaggtgggggactactatcatggatagatggatataaaatcttttaaaactgtcttaaatgacacttcctcatttcattttttctatgtgtatttctgaatccagaatccattgaaacaattgtgaggcattttctccccaagtaatgttgatacatttattgtatatgctaatgtgttatctaaaagagagtatatt

SEQ ID NO: 8223 - DNA, 1088 bp, Homo sapiens
tggtattagccacacatttcaatgtggtgatattgttactgcttaatttatcatttttatattacctgttgacttccaggatttaattctcttatacctctaacataccttacctttctaatttttttactatcacagttttgtttgttttttttttttttgagatggaatctcacactgtcgcccaggctggagtgcggtggcgcgatcttggctcactgcaagctccgtctcccgggttcacgctattctcctgcctcagcctcctgagtagctaggactacaggcgcctgccaccacgcccggctaattttttgtatttttagtagagacggggtttcaccgtgttagccaggatggtctcgatctcctgacctcatgatctgcccgcctcagcctcctaaagtgctgggattacaggcgtgagctgccgtgcctggccactatcacagttttaaaaaaatttttatttattttgagacagagactcactctgtctcccaggctggagtgcagtggcgtgatctcggctcactgtagtctctgcctcctgggttcaagaaattcttgtacctcagcttcctgagtagctgggattacagtcatgtgccaccatgcctggctaatttttgtatttttagtagagatggggttttgccatgttgaccaggctggtcttgaactcctggcctcaagccatctgcctgagttggcctcccaaagtgctgggattacaggtgtgagccactgcaaacggccacaatttgtggttttaatcagtaagccatatttacattatagctatgtaaatattcacggaagggcctaaagtgtactgagattacattttattttacatagaatgttgttgttagttgccttgtttgtattggcagaatttttgttgaacttactctttttgtttgtttgtttgttttctgagacagagtcccgctctgtcgcccaggctggagtgcagtggtgtgatctcagatcactacaacctccgcctcccaagttcaagcgatcctcccacctcagtctcctgagtagctgggattataggcgcatgccaccacacccagcta

SEQ ID NO: 8224 - DNA, 1031 bp, Homo sapiens
tcttattggggatcttgtcttgctattttttgacctgcatcatataaaatgttgttgatgaaactgtaagagaaaggcattttaatgtttacttaaggcccagtcccaaatctctaaagaaaatgaatactgtttatttactgtaaactctgtaaaccgtagaccatatgtattcacattgtaaactgttaagcactatataaaggttgattgttaatatccttttatggtatgtcttgacagggcaagctggctttccattttttcttcctgcttttgtggacattcggttattaacctctaaagataaagttggatagatgtgtaatatgtagttgcaggtatgctgattcatcatctgaatggcattttattaagtgtttattgtgtgccaaagtaatattttagcctctggtaatgaagagacacagttgaatgtgggaggtgatagaaaggtaattatgatacattatgattaaatgctataataaagctatgtatttggtagcattcaggaaagagagtctttataaaaatgaatagaagttggccaggaggatagggggtggggatggggaagctggactggaagagacttccttgcagaggggcagcctgtgccaaagacccagaattgaaattatttttggaatacagagtaggaggagagactggctcatgttaaacatggatagatagaaagggctagatagtgaaggaccatgttagtggaaggattttcttctgtagtaatgggaggttttaagggagacatttgtcttagtgtgttaatttagagcggatagagagtggaggtctaggggctagttagggtgttacaatttctgtaatctagacaagagatggagattgaacaaatacaattttaaaagataagaggtttcaatttggagatatttagggactagaatctacaaaattttgggggtgaggaaaggaagatgaagattaaagattgctggtttggatgacgggtagctgtcagtgcctttgacccagacgtggaaggt

SEQ ID NO: 8225 - DNA, 1045 bp, Homo sapiens
ttttttttttttgtatttttttttttagtagagatggggtttcaccgtattagccaggatggtctcgatctcctgaccttgcgatccacccacctcggcttcccaaagtgctgggattacaggcatgagccaccattcccagccaagactacttttacttgtaggcattccaggtttttttttaagggttattgtttgcataatgtatcttttaccatcattttacttttaatttattttttgtgtaaagtacatttcttgtagacaacatatggttggatcttttttaaaatccagtctgacaacctctgctaccattgtgtttaatgtagttaccaatatggtagggtttaaatcatattgtcttgcacttttgtttactctttgtccatctgttatttaaaaaatgttccttttttcctgtctccatttttttttttgagacggagtctcactctgtcgcccaggctggagtgcagtggcacgatctcggctcactgcaacctctacctcccaggttcaagcgattccctttctcagcctcccgagtagctgggattacagtcatgtgccaccacacccagctaatttttgtatttttagtagaggtgaggtttcgccgtgttggccaggctggtcttgaactcctgacctcaggtgatccacctacctacctcggcctcccaaagtgctaggattacagtcatgagccactgggcccaacccttttcctgtcttcttttttgttatttttatgattcagttttgtctccagtttggcttattagcatggttgttttgctctttgggggttactctaggatttatgattatgaaagtttaacttacaacagtctaccttcaaatagtattagactactttacttataatgtaaaaatctaatagcagtatacttccatttatccactattgtcctttatgctattgttgtacattttaactttaatatatgtcataattccccaaatacactgtcattaattttgctcaaaactgtcacgtatctttttttaaaagttggaa

SEQ ID NO: 8226 - DNA, 1039 bp, Homo sapiens
cgctggggcccgcattcgagcgccgggcctgggcttggagcaggtgaccaggcctgggtctcctcggcctggtggtgaggccccccgaggacaggggtcagggtggccacaggtttacgcccccacctcccagcctttaatggccctaggccctaatcctgagaatccccgctatccacccccttctcaccaacatcagcatgaaaagctggacgcgttggaaggatgcagctctcccatcacagccgcccaaccagccagtggcttccgtttgcaccgcgcgttggagcgctttcccctgggcgaaatccatacaaaccctgaggttcggggaggctgtggttcctgccgcggtaagagcggagggacgcaggactttccggctgcacgcagcagccttcctcccaacaggtgctcagggacttcagccaatgggtggccgatagccggttacttaggtcggggttggggctgggccggaaaatctcatggctggagagcctaggacagtgactgggatgtgtgtgtgtgtgtgtaccccctcgccccagaggcctgagtcaaaatgtgggttgtatgtgcagtttgaaaaacaacgtgtattcaatgttatattttgtcttccttccttccttccttccttccttccttccttccttccttccttccttccttccttctttccttccttctttccttccttccttccttccttctttccctccttccttttctttctttttttttcttttctttccgcatcccgggttcaagcaattctcctgcctcagccttccaagcagctgggattacagatgcccgccaccatgccgggctaattttttgtattttagtagagacggggtttcactatgttggccaggcttgtcttgaactccagacctcgcgatccgcctgccttggcctcccaaagtgttggtgttacaggcgtgagccaccgcgtctggcctctttctttctttctcactctttcttttttcttcttgatttttcttttttcttttttttttttcttgag

SEQ ID NO: 8227 - DNA, 1033 bp, Homo sapiens
acaggcgtgagccaccgcgcccggcccatcagagtactttgaatagagaagtactgttaatttaaccacccccattagacattaaataaaatgtctccacctttctttgcttcgtaggcactgtgatgtccatttcagggcatgtggcttttttcacattcttcaaaggggatttctaggttgaaggaaatctgtagaggtgtatgttcccaggttgctttccagcacagtgttatatcggtttgtaaggccacctacaatatatgagactaccagtttccctgtagcgtcagtctgatctcagattaaaaaataaatgaaattttaaaacttgcttatttaagggcttcatattgttataagtacaaaaaatatttgaatggtaataccagtagttgtaatagtaaatggttaccaatgtaatgcttctttttcactttgtcaatggaggactctcgttggggagatagagattcagaaggcacctggagaaaaggacctgaagcagattctgagtggagaagaggcccgccagagaagtaagtagagttgaggaaaataatgccgctccagttcctgttaatatcttatcagtggttttaaaatttggttcattttgtagaggcagggaaaggagagccatgaagaattgtgtgcatgtctgattgcgtgtgggtttgtattttgtttttttgggtctgctgcccaggctggggtgcagtggcgctatctcggctccctgcaacctctgcctcctgggttcaagtgcctcagcctctcgaatagctgggattacaggtgtgtgccaccacacctggctactttttgtatttttagtagagatggggttttgccatgttgcccaagctggctttgacctcttgacctcaagcgatctgactgtctcagcctctcaaattgctgggatgacaggcatgagccactgcacttggcctgtgttgttgtttttgttgttgttgttgttgttttgagatggcgtctcactctggagtgcagtggcgcgatctcggct

SEQ ID NO: 8228 - DNA, 1041 bp, Homo sapiens
ttttctaggttctttttgtgtgtgtgtgtgtgtggagacagtctcgctctgttgcccaggctggagtgcagtggtgcaatctcagctcactgcaacctccgcctcccagtttcaagcaattctcctgcctcagcctcctgagtagctgggattactggcgtgtgccaccacgcctggctaatgtttgtatttttagtagagatgggatttttcactatgttggcctggctggtcttgaactcctgacctcgtggtccactcacctcagcctctcacagtgctgggattacaggcgtgagccactatgcctggcctttaggttcacttttattttctctattccattaatttttttgccctttttgcccgggctggagtgcaatggcgagatctcggcccactgcagcctccaccttccaggttcaagtgattctcctgcctcagcctcccaagtaggtgggattacaggcatgtgccaccatgcccggctaattttgtatttttagtagagatgaatttaaccatgttggccaggctggtcttgaactcctgacctcaggtgatccacccacctcaacctcccaaagtgctgagattacaggcatgagccactgtgcctggccaccattaattttttcctaagtttttaaaaaaacttccacagtataaattacaactttcctttgcctcttcagaacaaaacaaaatcatgaccataccttaacttatattttattgcagtggactgggtatttttgcttctagatatttacacattatctttcctcttagtactcacttaacagttactttaagttttccatccatattagcgaacattatttagtctcaagtatgtttacactgcatcatgttttcccctttgtgagtactttttgtttcttgatcagtagttttcagaatgtctttgtgtgtctcataagttttttctctcaccgttgaacaataaatggttcattatttggccagttcaaaatcatcttttcagaaataatagagacctttgcttctgtttttagt

SEQ ID NO: 8229 - DNA, 1048 bp, Homo sapiens
taacaaattggtatattctttattgagttactatgtgtaacggtcattcaaataatagaaatttttggatgatatttcataagcaaaacaatcatcaaaattgttctaaaggtgaaagttgaatgcataatttaatacaagttttgtttactgtttttgttagaaatgaaaaaactagatcaaaatgtcctgggcttagattctaatttgaccattgaattattttgtataaagacaaacccactggaggtaggtaatatcaacaatttaaatgttttaaaatttggcctgctgacaagttaatggtcatttggaagttagagtttttgtgctgagaggttgctttcgatgattctgatacacttgagagtcttttgtaaacctaatagctttctgcgagtttgttgctcttgacaaagtgtgccctttttgggttgggggttacttcgattgcaggaaaaacttaaacagtttgaagagcgattagcagaagaaaggcataatcgattggaagaacggaaaaggcagcgtaaagaagaacgcaggataacatactatagagaaaaagaagaggaggagcagagaagggcagaagaacaaatgctaaaaggtacacaggtcaaacaggattggaggggtgctaatgcaaggttggtgttaagatctagtttttagtgatcttatgtagaaaatacaggaatcaaggtaattggccttttagcactgtaattaactggatctcagaacccagtttgctgtatgtgaagttgttacatcgtctgccagcatttccccacacatttgatgttcttctagaaattaatactttttttaatcaccgtattctgtgtattaacatttattgaggaatacattccagatgatggctgttaaatgatgctatatctggaatcccagattgctcagggatgggggagggattctagtatcttattacaaaactatagttgaggggtgtagtacttattttcttgactatgttctgtcctgtagctgattacaaactattttcaaattcttttacttg

SEQ ID NO: 8230 - DNA, 2293 bp, Homo sapiens
tagattttcagtgtagatgaaacgaccttctgttggaagaagatggccagctaggtctttcatacctagagggaagtcagtgcctagcttgagagcatcaaagggtatgctcactgtttaggggttaatgcagctgctaactggaagttgaagccaattctcgtcattccaaaaatcctagggtccttaagaattatgctgcatctaccctttctgtggtctgtacatgaaagaacaaagcctgaatgacagcatatctgttaatagcatggtttgctgaatattttaagccccctgttgagacctactgctcaaaaaaaaaagttttcagaatattgctgctcattgacaatgcatctgatcgtatgacagctctgacagtgatgtataagagagattaatgtttgttttcatgcctgttaacacagtatgcattctgcagcccgtagatctaggaataattttgtctttcaagtcttattatttaagaaatatatttcataaacctgtagctgccatagtgattcctttggtggatctgggcaaagtacgttgaaaacctgctggaaggaattctttattccagatgccatttgtgattcgtgggaggaggtcaaaatatcagcattagaaagagtttggaagaagttgattccaagcctcatggatgacttggaggggtacatgagtagagtggagaaaataattgcagatgtggtgaaaacagcaagagaagtagagttagatgtataggctgggtggggtggctcacacctctaatcccagctctttgggaggctgaggtgggcagattgcatgagtccaggagtttgagaccagcctgggcaacatggtgaaaccctgtctctacaaaaaaacaggaaaattagccaggcatggtggagtgtgcctgcagttccagctacttgggaggctgactgaggtgggaggatgcagaggttgcagtgagctgagatggtgccattgcactccagtgcttgggtgacagagacagaccctgtcttaaaacacacacacacacacacacacacacacacaaaaccaaaaaagactataacctgaagatgtgactgaattgctgcaatctcatgataaagcttggatgggtgaggagttgcttcttatggatgagcaaagtaagtggtttcttgaaatctcctggtgaaaatgctacgaacattgttgacctgacaacaaaggatttagaatattccataagtgtagttgataaagcagcagcagggtttgagaggattggatcaaattgaaattctactcttgagttaaaaaccgtcaaccagtgccacatgctagatgaatcttttgtaagaggttgcaatcagtgtggcaaacttcattgttacctattttaagaaattataccatagtcaccccatcctttagtatctgccatgctgatcattcagcagtcgtcaacattgaagcaagactccactagcaaaaagattatgactcattgaaggctcaggtgatcattagcattttttagcaataaagtattttttgttttgttttctttgagaacaggagtctcaccatgttgtccaggctgatcttgcactcctgggctcaagtgattctcttgcctcagcgtactactgcatctgacttacagtattttaaaattaaggtttgtacattggtgttttagacatgctattgtatacttaatagactgcaaacttctatatgcatcggataaccaaaaaatctgcgttgcttgctttattgcaatattctttattgtggtggtctagaaccaaacctgcagtgcctccaaggtgtgtccgtgtatcataatttttcctttataaagttcctggtatcatggggctaaatgaaaactgtctctcctaaatgcctcaggattactttgtctacctcttgcccgtaattgccttctggggacctattgacatggatgtagttaacgttttcatttttatggcatgacagaaggggcagtggagcagcttctaatttttcaagagtatttctcagtaatttggggttaatgagtaaaaaaaaaagtgcattgaaatttcacaatatttgtacttgcagattactacaatgcagctagaacgtgaaaaggctcttgaacataagaatcgaatgtcacgaatgcttgaagacagagatttattcgtaatgcgactcaaagctgcacggcagtctgtttatgaggtgagcttgctgatttttgggaaatgtttattcatgagctttctagtattggcctaagggttct

SEQ ID NO: 8231 - DNA, 1033 bp, Homo sapiens
cgcatgagccactgcctgtaacaagttatttcttgtatgtgagctctgttaatgaacacctaaggtaggtttggtgcagagaaaagttgtcttatctaggagagcttctttagctgcgtcattgctattaaaagactgaataggagcaacaccatagcatttaataccgaaaacaaacagcttggatagtgtcatcttccattatcaaatgcagatacatagaaaggcagtacatcaggattattttgtaatttctttgatgcctaataccagagaatgttaattttggtcatgtaaaaaaattcatttgtttttgaagcaagagaaagaagaacagcatcagttggctgtcactgcataccttaaaaattcacgaaaagagcaccagcggatcctggctcgccgccagacaattgaggagagaaaagagcgccttgagagtctgaatattcagcgtgagaaagaagaattggaacagagggaagctgaactccagaaagtgcggaaggctgaggaagagaggctgcgccaggaagcaaaggagagagagaaggagcgtatcttacaggaacatgaacaaatcaaaaagaaaactgtccgagagcgtttggagcagatcaagaaaacagaactgggtgccaaagcattcaaagatattgatattgaagtacgtagcatcttagttattaaaaaattagttttatccaggtattttgtactcttagaaccacagtcctttaccatttgttggcttactgggttatttcatgcattttggtacagctggtcatgactaaatctgtgagtaagcatatgtttattgctctgtgaagttttgtgttttttttgagacggagtattatcttgtcgcccaggctggagtgcagtgacgtgatctcagctcactgcaacctccgcctcccgggttcaagtgattctcctgcctcagcctcccaactagctgggattacaggcgcctgccaccatacctggctaatttttgtatttttagtagagacagggtttcaccatg

SEQ ID NO: 8232 - DNA, 1078 bp, Homo sapiens
atttttaaagctgaagaaacgtgccacactggaaggataatccacgtcaccttgttaaaggtgatcttggctaggcgcggtggctcacgtctaatcctagcactttgggaggccaaggcgggtggatcacttcaggtcaggagtttgaaacgagcttggccatcgtggtgaaaccccgtctctactaaaaatacaaaaaaaaaaaaattagctgggcattgtggtgcatgcgtgtaatcccagctaatcgggaggctgaggcaggagaatcgcttgaacccgggaggcataggttgcagtgagctgatatcgtgccactgcactctagcctgggtgacagagcaagactccatctcaaaaaaaaaaaaaaaaaaaaaaggtgatctcttagacttagatttaatatactgcaatatgttgtcccagaagcgaaagacatttacaattggctggaagtagaatttgagccactaaaactctgtgagcaagtcattcggtgatcactgatgggtagcattggaccaacaactagggcatctagattagagtcctcattgtgcccacagagtgtagacttctagaaggataccagttagtgtcaagtgaatggattagctgactgccaagaggcatttgtcaacttcttgagttgaccatatatccaaggtcaatacctgagcgttaggcttccataaccaaatttatgagacagagtgattccattatctcaggaaaagactcaaacattcctaagagtgacttttaaatcggaaagtaaaccaatcatgtattttagtgagaaatataatttagtagattatggcagcctttcacatttccctattcggaaggggactgcatgaagaatctaaaataacttgataggaatgaaattagagctgggaatttttttttttctcttaaaggcagattctaagttagggaattttatttgtatgcatataccacaccttattgcagtaaagatatatggatgcttataaggaggaagtgttagaatgttgtaggatttcagccttgtacccattttacattagagttaaccttagacctgagt

SEQ ID NO: 8233 - DNA, 1547 bp, Homo sapiens
ttcaccatgttgtccaggctggtctggaactcgtgacctcaggtgatccgtctgcttcggcctcccaaagtgctgggattacaggcgtgagccactgcgcctagccatttccttagtttttaaacctgccttaattttgtaaggaagtctggggtatatgaatgtgtgttttctgtcatttaatcacaatctttttctttctttttttttcttttttgagacagagtctggctctgtcgcccaggctggagtgcagtggcgcgatcttggctcactgcaagctccgcctcccgggttcatgcgattctcctgcctcagcctcctgagtagctgggactacaggcgcccaccactacgcctggctaattttttgtatttttagtagagatggggtttcaccgtgttagccaggatggtctcgatctcttgacgtcgtgatgtgccccccttggcctcccaaagtgctgggattacaggcgtgagccaccgcgcctggtcaatcacaatctttttctgaagctagaaaacactgacagtactgagtggatagatgaagtcctgattctccaagtattcgtttaaacacagcccatttctcttactcccatgctttgatggaataatatttatgagtatagtgcaccatggtgatgtacacgttctgtcactagcacgccttaccgtaagattaaagagaagtgcttttctgcttaccaagtatcatttacaaacctaacagatttaaaactttgttctccatagaatgtctactagagtccttttagccactctttccatccctattactcctgagcgtacggatattgctcgacttctggatatggatggcattatagttgaaaaacagcgtcgccttgcaacactactaggtcttcaagccccaccgacacgaattggccttattaatgatatggttagtattaatttgaggatttttgtagctttgggcagaaaactttgtggtcaggtttaataactcatgattaaatactgggaattctgattcagtgccaagggttctgatgtatggacagggaagcactggtgtcaatcactgttcacttgaggcagttccgcgccagtgggtgagcaggggttaaattggtgggagttttgatctagcaggacttgggttggctctggggaataccgtgggccagttagtaagagaagaagtaatgatgggcaagaagagtcatggcttatttcatggaggctctaggaaaactaattaagctgtgtgtggtaaatatgaagaggctaggtgtattagtatgttctcgcactgctatatatacccgaggatgggtgtggtggctcacgtctgtaatcccagcactttgggaggctgaggtaggtggatcacctgaggtcaggaattcaagaccagcctggcaaacatggcgaaacccggtctctcctaaaaataacaaaaaattagctgggcatagtggcacacacctgtaatcccagctacgcaggaggctgagtcaggagaatcgctggaacccgggaggcggaggttg

SEQ ID NO: 8234 - DNA, 1069 bp, Homo sapiens
ttctagattttttctttatattgcccgaagtgatgggataatatgcaaatattttcttgagtctgctctgtctacttcccattatttcctaaagaactttaaaacgtttaaggagttagtgtttttgtaattatggcagttttctaaaatagatatacatgagtaaagagaaccacacaaaggtattttatttgctatttttatgttttctgtgttgtaggtttcatagaaatttgaattagatttttttcgtgttatagaatgcaatgactttaatttatactcctaattttaggaagcattcaaagctgtggaagatattcacgggctattctccttgtctaaaaaaccacctaaacctcagttgatggcaaattactataacaaagtctcaactgtgttttggaaatctggaaatgctctttttcatgcatctacactccatcgtctttaccatctctctagagaaatgagaaagaatctcacacaagatgagatgcaaaggtaaaaatgttatacttggataatgttgaaattctgtaacaaatatcgtctattatatgacatggtatattttaggccatggtttctcagcctctgcactactgacattttgggttggataattcttagtcatggggctgtcttgtgtactgcaggtggtttagcagtttagcagcatcctcagcttctacccattagatgccagtagcaaccaccgccagttgtgactattaagacgtctcaagacattgcccttcctgaacagtattcttggactttagtagttggtcttgaactcctcacctcaggtgataagtaactccgctaaaagcccaattgagaaatttgaatattaggaaaaacacatttaacggatgagctttctatccacatagaggtggagtctattctcagaacaaatagaaaattaagaaaaatacttttttttccttttctttttttttttttttttttgcaagacagagtcttttgttgcccaggctggagtgcagtggcacgatattggctcactgcatcctctgcctgctgggttcaagcgattctc

SEQ ID NO: 8235 - DNA, 1576 bp, Homo sapiens
cagttaaatgacagaacaagtagttcatctgtaatcagttgaaattaggttactataagccctcaatttgtattatgtagttttaattagtacagaaccttgtttcttactatgtaagttagatatcaaagttcattatatttcatactagatttttttactcctaggatttaaagtggtgggtctttgaaaggtgacccctagatctaaattctagtttcccatttgtaaactctgccagcaccacattttagttgtaagcaaggaccagtgattatgtctttggttttgttagggctcactcaaaaaggtagtctggatgaaataagttgattctcattgcatcacaaagactaatgatgagtttggtgaatcctgttaaaacaactgatcttaatgtgtgaaataaaacctattcaaatatttaagtagatagtggaaggtacctaatatattttacaattatgcttatagctttcaaattctgcctccaatacacgcgtaaggctgaattccgtaaactgtgtgacaatttgagaatgcacttatcgcagattcagcgccaccataaccaaagtacggcaatcaatcttaataatccagagagccagtccatgcatttggaaaccagacttgttcagctggacagtgctatcagcatggaattgtggcaggtatgttggagctattagcttttcttcctagaaataatagtctgtgttacttttctccccccttaatgaatagcttcatcttggtatgcattggttaatttcaataaggtaaggaattaaagttgcctaatggactgggaaaagttctgaacaagaaatctcagaatattttgtttctagttgccttctatgaattctggaccaaaccatataatctctttcagacccagtttcttgacatataaaacaatacattgccagtgctgctcgaagtgtggtttcatgactggtgtcatctgtaaactatctggtctgtgatgaaataagtatagagtagaaaagcatatgcaaagtttcttagtagcaattttattgtacattttgtgtgtttttactctgataaaaagtgagctttttctgtttcatttttgtggtaattttgtattttatattcttcggtaagaggtcagaaatttaaaacaaaccgaatcctttactactgattgtttggagaagtgctgctgtagattattctagatttcttagtggtgctttagctgcctgtcttgcattggagatcttgatggtgttaggaagctagtcctctccctggccctttttctctaagaatcctacaaagacgttccatataattttgtagtcatgtgaccttgaagtcttttgtatatttgacggacaatatttgattgaaattatagaggaagaaactaaaaattgggagtctttgagccaagtgaaagtgtgatttgatgtcttgttcttgcccatgtttccttttctatagggacacccatcttaaaatactacctgtagaagataagtaaacatgcccattatagaaaaaaatccataagttaaaagaagagaaatattcatccatt

SEQ ID NO: 8236 - DNA, 1084 bp, Homo sapiens
ggcatcagacaagcctgggccctcatcctggctcaaacctttaatggctctgtgactctcaacagcttccatacctctctctaagcccctgttgactccttagatgaacagggagaggacctccacgttgcaggaatttgaaaaatacctgaagagcactggcagtggtctgacttgtaataggaactaggtcagggcgacctctctgctagtgagtaggttccgctgatttttcagtcccatgaaataatgatttttctctcttcttttctaggtaatccctcagtttgtccagatgaagtatggcctgactggcccttggattaaaagactcttacctgtgatcttcctcggtgagcaggaagggctggaggctgcagtctgggtggggtgtctttgtggtctgtgagccttccttcatctccagaggcacctggctcccttggcacattgtgactgatgacaggtggcctttgcagcccggcaggcccccaagcccaaatcaggtctttggtttgagaggtgacactttctgtagatacccacattaatggctaaagaatgaacacaagactggaaacacaaattacattttttttcttgagacggagtcttgctctgtcacccaggctggagtgcagtggcatgagctcggctcactgcaaccctccgcctgctggatttaggcagttctcctgcctcagtctcccaagtagctgggattacaggtgtgcgccaccatgtccagctaattgtttttttgtatttttagtagagacaggctttcaccatgttggccaagctggtcttgaacttctggcctcaagtgattcgcctgcctcagctttccaaaatgctgggattacaggcatgagccaccgcgcctggccctacattttaaagattatctgtgtaaacgttctacttacattattttacttaatcccgacaacaacttatgggtaggaaatattattcctatttacagaggaggagactgaggcacagggaggttaagtaacttgcctagagttacacagcaagcaaatggttagtatagagattccaacccagtggggtgaca

SEQ ID NO: 8237 - DNA, 1003 bp, Homo sapiens
ctgtctccgtctcttttctttcttttttccttcccttgggagccactgttctattggctattaatgctgtcattgttatatactgcccagaggaccagctttgcaaaactgggttagttttttaaatgtagttagaattctgtcccataaaccagacagcaagtttcctcctacacagtggatatttgtggggattccctgcagctgattcctggagcccagtggcaaaccccagaattcagacagggctctgacgtcagaattcattctccactgcaggcagcgttcctgccgataggctcaaacggactgttccttatctaccttgcagtatgtggggctttctggagctcacaaacaccagctcctcaagacagcctatggagagctcacatatttaactttttctaagaatgtgctggggaccctgggctgacagcttggctctgttgcaagtaacttgactgatggcatggtgtgtcatcagcacacagcctgctctgctctgagccagaggcaagccggattcggggactcatctgagggataagttaggtgttggtattctccaagggtagagacaggactttttaatgttctggtccatttctctgtgtggctcgtctctttgcttgtcattagttcatttgtttattcatatgatccatttattttgatttgttctgtcaatgtggtaaataacagctctggccttcactctctgaaaggtagaacaaatgtggtcccagaaatgagacaggcaaagaaattctttgctgttgagccacctttaaaagctttttttttttttttgtttttttttgttgttgttgttgtttttttaaggctgggtgtgatggcttaaccctgtaattccaatggtttgggaggatgacttgatgccaagactgcaagaccagcctgggccgtatagcaagaccccatctctactaaaaattaaacaactagttgggaatggtggcgtgagcctgtagtttcagct

SEQ ID NO: 8238 - DNA, 1301 bp, Homo sapiens
agtccgcgcaggtggctgctccctactgcctgagctgtggctgagcagcagattggggagaaacaggctctcgcaccttggtaagctcagccactttcggtgagacccccgaggctttgggaagccacccttgggcaggacataagcaggacttatctccctgcagcgtctagggcagcaccgtccaatagaaatatgatgtgagccttacaggtaattaaacattttctagtagccacattaaacaagataaaaacagctgaaatttttaacaatacagtacatttagcctagcaggtgcaaaatattaacatttcaacatgtaatcagtaaaaaacattgctgagatattttactcgcttttttggtacagagtgttccaaatccggcgtctgttaccttcacagcacatctgggttcagccgcatgtggcgaattggagagcagggctttagggggttctctttgaggcctctcctaaagtggggtccagccctgttttttttttaggtggggaaattgagaaggggcggtgagctcaggttgctccagcagagccaaggcttaaagccagaaccactacaaagtttagagtttgctggagcaaacctctttttccccagtgtgaccccagctgcaccattgagcccttaatggggcgtccatcctttgtcactggagtgaagccttatagcaagcagagagtgaggccacagactcttgagatattctaggccattgcttcgaggtcgtatgtgagatatgaacgtaagaccatttgaacccccaaagtctgggattttaaccctcaagggcaatttgatactgagaggttaagggcacagacttctgaatcatttcctggctgtgttgccttgagtacattcaggagtccctctaagcctcagcttcctcacctggagaacctggagaggttgggaggatcccaggagatgatgccagtaaaaggcagatcacagaccctggcaggttctcagaaaaaaaaaaaaaaagccaactgttagtatttatatctttatttttctgctgccattaacctctctgttgcttttctccctcctaagtcctttattcgacgatttcttcaatggacagaattattagatcctacaaatgtgttcatttcagttgtaagtattgttttcagagctaatgaatttcacattttattttgaaacttgaagtctgtgtgtcccttttttttttttttttttttttttgagacggagtttcgttcttcttgcccaggatggagtgcagtggcaccatctcggctcaca

SEQ ID NO: 8239 - DNA, 1058 bp, Homo sapiens
atgttagaccacacacaattccagcggatttcaggccaacaaagccttgatgtgtctagcccacttagcttattaacggactaaaactgcatttgtaattaattccatttcatacagaagccggaagtctctacctgaggctgaaataagaaagggatcctgtcacagaaatactagacacagtaatccacacaaggttaacaaaacagtgggaaatatggaaacaaatacctaatgccccgcctggattcgttcttttaaggttggggcgacagtaggaaaaccacgtgtcacttgcccaagcattcagccttaaagggaatttctccctcagggtctccaggaggcggggaggcggtggctcctccggccccgcccccccaccagcagagggcccgctcaccaccccgtaggccccgcccctgcgtctctgcccgccccgtggcgcccgagtgcactgaagatggcggctgctgtaggacggttgctccgagcgtcggtgagtggctgtcggctggggacaggcgtggagacactggtggctccgggaacgtgcttctcagacaggaccccgcgcttctgggcatgagggccattcgcccttcttggagggtttccgcgggtaacggacccagaggcctccctccgggaaggttccatgcgcctgcgcagaaccgcccttccccactccatcctcgcggtctcttccccgagtccctcctctttcggcgtccccggtccccaggcccatctccacttaaggtcctggccctgattctgccaccgaccctgtgatcttgggcaagcgccttcgcctttctcagactgtgtacttaagatggaaagaatgatgcctacatcaaggcgttgctgtgaacagccccttaaatactggataaaaacgcgcaaagtgctaaaaaactcacaaaggctttccctcccaatcccactcccgcgtgtttctgctgctgtttcctgcttaactgtgggcaatgcgtcgtgctcttttggtacacggctttctctggtggggttcaacacagcccctttcgttctcc

SEQ ID NO: 8240 - DNA, 1201 bp, Homo sapiens
aagatttaaaatattcagcctgggcgctctggctcacgcctgtaatcccagcattttgggaggcctagcagggtggatcacctaaggtcaggagttcaagaccagcctagccaatgtggtgaaaccctgtctccactaaaaatacaaaaattagctgggcgtggtaaccggcgcctgtagtcccagctactcaggaggctgaggcaggagaatctcttgaacctgggaggctgaggttgcagtgagccgagattgcaccactgcactctagcctgggtgacagtgcgagagtctgtctccaaataaataaaataaaataaaataaaatattcgatggcatgcctgtgagtttgctgtggcatctgggtgcctggatggacagtttggggaccacagtacaagtgcaatgtttggtaattccggttgtaagggttacaagctaattgaaggcaaagcaaacacacatatatttgtctcaactaaacaaacagaaaacaccacttccttctctcaagcagtgattcttaactttgctatgcttcagaaacatctgagaaacttaataaaatgagcactccaggctctgtctcagaaaaactgatagagtaggttgtcaaagttatccaaagaccattgagttggggggaggtccccaagaccactctcaggttccctgatttgctaacaggactcacagaactcagaaaagctctgagttatactcagaaaggatccagattcaaaccagcaaaggtgcatagacaggcacggcttccaattgtcctcgcccagtggagtcatgtgaacggcacttacttctcccaggagcagtgggaggcaacatacatgaagcaaccagggaagtgcaacgaagtcttggtgtccagggttttttttttttgagacagagtctctctctgtcgcccaggctggagtgcagtggtgcgatcttggctcacggcaacctccacctcctgggtttaagcaattctcctgcctcagcctcccgagtagctgggaatacagatgcctgccaccgtgcccaacgaattttttttttgtatttttagtagagacagtgtttcaccgtgttagccaggctggtttctatctcctgacctcatgatccgcccaccttggcctcccaaagtgctgcgattacagcgtgagccattgcgcccggctttttttttttttaaat

SEQ ID NO: 8241 - DNA, 1196 bp, Homo sapiens
ttgaaggagacttgcggagggcctcctggaagtggtgaatttgagccagtcggaaggacgcatgggcattgatttgcgctgggaaagggagtggaatgtatggtgaaaaggcagtttttgtgactgtagccatatgaggatatcgaccccaccctggacctcagaatcttgtcagagctccctagggcacttgaaagtgcagccagggttgcgaacctgtactgacctctgtgctctaggtattctcagtaatgacaacactaactaccatttcgcttttggttctgtgtttttgttcttttttttttttttttttaataccgagtcttactctgtctcccaggatggagtgcagtggcttgatcttggttcactgcaacctccgcctcccaggttcaagcgattctcatgcctcagcctcctgagtagctggaattacaggcgcccaccaccacacacagttaatttttgtatttttagtagagacagggtttcaccatgttgactaggctagtctcgaactcctgacctcaagtgatccaccctccttggcctcccaaagtactgtgattacaggcgtgagccactgcacctggccttttcaggtttttttctttgaaacgaagtctcactctgttgcccaggctggagtgcagtggctcgatctcggctcactgccacctctgcctcctgagttaaagcgattctcctgcctcagcctccctaccagctgggattacaggcctacaccaccacgcccggctaattttttgtatttttagtagagacggggttttaccatgttgactaggctggtcccgaactcctggcctcaactgatccgcccgcgtcggcctcccagagtgctgggattacaggcgtgagccaccacgcctggccctaactaccatttaggactgcccgtttgagcctgatgtcacacttggtgtgtattgtctcattttatctccaatgagtgttattattcccattttgctgatgagaaaagcaaggttcagagagattaagtgttttttttagcattaagtcatgcagggagcaaaagtgctggaagccagattccctcttgtccatctgccttcaaagaccatgctccccccatgaccatcatggcctgtgttgctctgccaggctcctgggcagcctcttgctgtttctcaaagctcggtgaggcc

SEQ ID NO: 8242 - DNA, 1026 bp, Homo sapiens
tgggtaaaatttgcctcaaatttctatcaaacaggaatgtaaaatagataaaatcctatgtatttgaattgtcagagctagggagtgcaaatgttttggcaatgtattcaaaatgctggcctgggcaccaaagagaaaatagccttttacagttacatagtaagatgcgattagtacccacaaattactgttttctaaacatttgaagttttacgattagctttaaaataatgattttataaattggtggtcacaataattttggtattactttcctccttttcccacttagcaatatagccaaatgtattcaacataaaaattcatagggtctgaaattcatagctgggccaaattttttatggcaccttagttttaccataatggtcatctattacactcttctgttataaaatatacccttatttcttttgtttatagtatctttgaggaatgtttttggaaaagttaatttatattttatagggagaacactcaataaattatgttaactgtgcccccgagttaaaaattttatgagtatatgtgaaacttgaacaactgaagactttttttaattgataaaaatgcttagtatgcctgttttggtctgccagtaaattaagtagcttattgagataactaacagctaaatatagctgtagtgtttcctgactgtatattctatgatttaataaaattatccagactagttatattgccacagtaaacatgtgactgaagtgtccttcatcttaatctgaaagagggcaaaatttcatgatcagttaatggaagttatttcatattaagtggtttttttttttttttttttttagatggagtcttgctctgtcgccaggctggagtacatgtagtgatgagaacttggctcaccgcaacctctgcttcccagattcaagcgattctcctgcctcagcctcctgagtagctgggattacagtcacgtgccaccatgcccagctaatttttttgtgtttttagtagagatgggggtttcaccat

SEQ ID NO: 8243 - DNA, 1034 bp, Homo sapiens
cagatttcttcctttgagactgtttccaacatgaacttgtttttaaaatttcttatgtaatagatgatgtgttgaatcattcacaatttttaaaaaattagtttgcagatactcctcagacatcagtgtgttaagttgtggttatcttaaaaatatcaaagactaatactggaatatgtattctacacatatatcatttatttctttgatctttctatttgttgtaggtgtgttgatttctggttttctattctgtgattaggctctgcttgatttttgtgtaaatacatatgtgattttttttttcttgtgtttgctgaagattttttctttttcttccaagtcaatcaccttctgctgcttggatgggtggatttggtgctcagcctccccaaggacaagctcctccccctgtaatacctcctcctaaccaagccggatatggtatggcaagttaccaaacacagtgagccgggactctaaaaaaaaattgtaattcatgataggcttcgatttcctgtgacactctgaagacatgaaagtagacatcggaaaatgaaaatatttattttaaaaattgaaatgtttggaacctttagcacagatttgctttggtgaaggacacgtgtcttctagttctgcctttttaagtttttgttcatgatggatatgaacatgatttttctttatgtacaaaaactaaaataaagtcaataaagacaattctgactacaaattttgatataataggaaaaatggctaatacattttgattcttagatactattccatttttatcttgctgttcagtattttaactcactgtgtttttaaaagagcaaaaaagggaggatcgtgaaaacctgggaatcacatataagttcatcctgaatcctgatactcccctccccttccctgaggtggaccacatttgaagtcagcagagaaaaagtgtgatattcagaagaaatgcgtgattttggagtcgctttggaggaaatattttctttctctatgcctaaagaaactgaagc

SEQ ID NO: 8244 - DNA, 1028 bp, Homo sapiens
ctactagttaagaggcaaatgtggtttgatttttaacaaatttatgctcagattttactgttgttacttggtaaaaaatatattggaaaactaaaaatggttatgaattgtagaaaatgtttatcataatttatctttctgattaaaatcagtttattttgtatatttcctgtagatttaaattaaacatcttagtactactttacaggaaagtgtttcaactaagaacaacaatattttctctatacaatttgttgttctatagatttaatttctttaaaagatgtaattcttaactttctgttttgatatttgctttgctttttaatctaaatgtggtaagtagtactattttaaaaatcaatataaaaataatacaggttgctgtttttcaatctttatttatacctgagacctgcagtttttcttaagtccaagtcacaattaaaagtaatagcattctggttattttgcagaattgctcataagaatggacaggatcttgaaggctaactgcaaggaactgtgcacactggaactcagttgtagattttttttctcatttctatttattcttattatacattatttatatatacatattttagtatttacattttaacattctatattcagtggagttctatatttccaatcatttaacttactcactaaaatttctgtgtaaatttgttgttttcgtactggtgtgcttagcattgttgttagttttttattctcctttcttaaatttctgaaaatgtcaatttttcaaaatttacagctgcccaaactccaaaatgatggtagagaattgaccaagaaaaataaagaaatctgttaacaggccatgtatgcctttttaattcctattttttcctctttttcaattttttaatatttcatatattttgtatcactaggcagaagacatttaactatttagagattgcatggtaaagtagttagtattgttacagtaatttatagaatcagtaaaccttagaggacactagtaaatagaatat

SEQ ID NO: 8245 - DNA, 1030 bp, Homo sapiens
atagcttaggtagtactactttcttcacatctttataaatgtgttttaggtaactactgtcaagcacagggttgcagaatatatttaatatagattttttatatggtgttcttatgatgtaaacttatagctttgtcttggaatattttattcagatacattttcagaacctcttttcttgatcaccactgttatttctctgatctttggaagaccaaattcaaagtatatagaatcttcagtacattagactattttggaaggtagggaattcatttcagtagctggttataaagcttaagttttcttgtttttattttcattctttccatatccagaaaagaaatcaataaaattcagtctttgtagcagcatagaattccatcatttgtagtattgatcctaattttgatcagtagtttatgaagttggttcttgctgtatttctgtatcctgggataccacttatagaggattatgatgcataagtagaacgtaatttaaaaataatattggagaaggaaagtagtggtaaggagtggtcctcatcagatctgagtttgaggttttgtttggtttaatataatcttctattttatatttaacacacttcaccagaattctttattttcatttaatactgatgctcatgattctacaactgcttttatagttccgtttgagttcagcagtattctgaggtgcaaagtcaggtttagctttaaatcttatttaaaaagtgttaggctttcataagcttatgcagtctcaccttgtatattcccagctatcagtaatgttttttcctggattttcttctcagcaacccgatagcagaagggtcaactcttctgttggattttctgttttgcagcatacaagcaatgacccatattgctttgtggaattttatgaacacagagatgcagctgctgcattagctgctatgaatgggagaaaaattttgggaaaggtaagataataggatgatggcaccttatgagtacatatatttgcatgtcaaactagt

SEQ ID NO: 8246 - DNA, 2762 bp, Homo sapiens
aatgaatgaattccatcttccaaccacttaattctggtttccttcctttccaatgaagagtgatgactcagcatttgcattcctttctgaatagtgtggcactccttttctctgcatctttttttttttttttaagtctgaatactttttaattaaatgtttaaattgggcaccctaatttcccggcctctccaggtctagcactcctaccttgagtaccaaggagtcagatcgctgctttgtttctcttgcctctcctggtattgataggatcatagtccacttggctctgctctctgatggggaaattgctttttagggaatagatgaaggtggaggggcactcgagaagtttgactagcttcacatctcttcactcctaccaaagaaaggatgctcagtaaagaagatagatgttcagtattgatagagatttttttggtgtggccttgtacaggaataaatgtgttctctaacgtctcactgaagtatccgtcccgttttgagaatctgaggcctactgaagcacatccaatgcttcaatgaaacgcctgcttaatagaacgtctttgtgttttgtgttgtcttccatttctgccttctctccctagaagaaagaattgggacacacttgaaatttgtccttcaggccgggcgcagtggctcacgcctgtaatcccagcactttgggaggccgaggtgggcggatcacgaggtcaagagatcgagaccttcctggccaacacggtgaaactccgtctctacaaaaaacacaaaaattagctgggcgtggtggcgcgcgcctgtagtccctgctacttgggaggctgaggcaggagaatcacttgaacccaggaggcagaggttgcagtgagccgagattgcaccactgcactccagactggtgacagagcgagagttcgtctaaacaattaaaaaaaaaattttatccttcaacatctgttgaagccaagacttggtgttgagttacaatgtgtactttgatataagcatctgggaaagctaggcttaaagactagctaacatgtatttaacaaagataaaagttacattgtatctaaaaatctgaagtatcatcacacactgaatgattgataaatactcatggcaggggtctcatttactgtatctgttccttaccaagaggaatctctggttttgtagtgctaaagaatgtgcttttttgatgtcttttatttatctttgcatctgccttgccttcatccctatcagagtttctccaggggaataataagctaacttctttgtcacttatttccttcctctaccttctctaatctcttgttctttctttgaaacagttaagttgtctatgtttacagttctctaaaactgtgacatgttcatatgaataaataaacatcttaactctgttgttttgtatgtcagtacgtgtttactattctgtcttcctttttccttctcccacccttttccatagggcctttttttttttttaagagaaggactactacatcttcctaggtcttacccccacagcacttagttcactgcctggaacataagaggtactcagaatttctacagtgattatacttctttcattaaattagtattaagttcttttttaaaagtcctggttgaactaagattgtaggcagacattactgtcacatgtggtgcagtctgttgacttttatatattttttaaaaccttcaaatgtaaaatcttgagataaaagcaaatgtttaacaattgggatttttattagagtttaatacaaataatgcatagtttttctaagtgtacgttttacatattctcaaagggttctattagatataagtaacatgatgaaaactgaacatgattttagacgttgatatctagtagggttttttgtttatggagatcttatattttacattgtgagctatggattaggtttttcaagtggccagtatgttttaaaagaatgtgttcttaacaaagcttatcttaaattgtttccttaagatgcctgtgtgttactagtgaggtttttttcctgcagacacacacaagctaagacatatggttctatcttcagaaaacaatatggtgtttagagcctaggtaggtctttaaatattcattacctacagtattactaatttatttgatggtatttaaagtggcaagaattgctttgatgttgagcctaaatttctatttgtcatatagttgctttaaaggtctgttttctgatgttcttcattctcatttgacatttattttggggtattatgcattgagtaacttgtgatctaaaaaaacaaacaagatcatgctgtgtaatactggtgttggaactggactgtctgacacctgccttgtgggacacacatttcaggcttgggttgtgtgtatctttgtagtgcagtgatttgatccatggtatatctgaatctacaatatgacactaaattgtaatagtgttttattgtagcttattttattttcttcatctatcggatgcaccaaaattgctaggaattcgtgtaataccatgttacacaatcccttcctttaaggctattctttcttcctggaaataagctaatgatttagagtataatctgaacatctaagaacaaagcagaagaaaattctataaactattacaaaattgactggctataccatggatttggctatactgtggctataatcaagcccctcattcaaattcaacttaatcatattctttgtttcttta

SEQ ID NO: 8247 - DNA, 1035 bp, Homo sapiens
ggaaaaggtcttatagaattaagcctccagaaagagggggcccacaaagaccctccttttctctccatttctccatctgcgctcaataccccccttcctgccaacccctctttcacgcacccagacctgatacctttctcttttcctccagatacttctctccgtagtttaccctgttaccctaaccttgttgattttttttttctgcttagtccatcattttctcagaaatgtgtcttaacatctcccactatgattgtggatttgtctatttctctttttagttctgtcaactttgttatgtattttaaagctttgttctttattaagtgctgcatatcatgtatgaaaaattacagatataatttgaggccctagatgatagtaagatttatttttgcttctggaaggcagttggggtctgggcaggcacccttaatccagtggttttcaaccacaggtgattttccccaccaggggacatttggcaatgtctggagaaagtttggttgtcagaatttggggaaggagaggtgctactggcatccagtggttaaaagccaggaatactaaacattgcataggatggtccactgataatgtcaatttatcagtgtcaatagcactgaggttgcgaaagcttgccctaatccaattatcagaggcgtttgaaccaaagtaactccatcttgagtaggggctgcgtaaaataaggctgagacctgctgggctgcattcctagaaggttaggcaatctaagtcatgggatgagataggaggtcagcagaagatacaggtcataaagaccttgctaataaaccaggttgcagtaaagaagccggctaaaacccaccaaagccaagatagtgacaacagtgacctctggttgtcatcactgccacactccacttgcaccatgacagtttacaaatgccataacaacatcaggaagttaccctatatggtctcaaaaggggaggcatgaataatccaccctttgtttagcatatcatcaagagataaccataaaaatgg

SEQ ID NO: 8248 - DNA, 1033 bp, Homo sapiens
aaaaaaaacagtctggcagttccacaaaaggttagatagagttaccatatgacccagcaattccattgctaggtacacacccaagagagattaaaacaaatataccaccaagaacttgtatgcaaaatggcttataatagcattattcataatagctaaaaggtggaaacaactcaaatgtctaccaactgatgaacaaataaataaaacatgacatacccatacaagggattatctggcaataaaaaagaataaagtactgctacacactacaactggcatgaaccttaaaagctatgctaggtgaaagaagtccatcacaaaaggccacgtggtgtattattccgtttctatgagatgtccagaatagacaaatatttacagagacagaaaggagattagtggttgcatggtgctggggagctggagtttgggaggaagtgaggagtggctgctaacgaagacagggttttttcgggggatgatgaaaggttctaaaattgattgtggtgataaccacatgactctgaatacactaaaaaccattgacttacatactttaaacgggtgaactgtaaggtatttgaattatggtatgtgaattttttttaactggcaaacaaataaggcatatatttgcgataaaaagacaacagaggcagaaaactagaaattctattaatacccgtctctgaaataagattgcttctgctccaattacagaacacagacttaggctttagcaaatctgggaacagtgaccacattaaaggatgctgctggaataaatgcagattattcaaactgatacacagacatccaaatcagaaagtcatactaaggagaaataagtagttttgtttaacaaagtcttcctatgttcttaaaaaaataataagactagagggaaatatgtaaaagtgcaaaacagagaaactattctgaaacatgtgaaagtaacactggtcctccaaagagcctaggcacaaatggaaacacccaccaaaactcagtagaatattgataacaatta

SEQ ID NO: 8249 - DNA, 1040 bp, Homo sapiens
gtcttctctcctttggtatccctcatgacagctataaataagaaagaaaagttgatgctatttgccacaaatgtctcagtgtgtgcatttgtactgttggatcatgcaagatcactgatcatgagcatactgcagaaaaattatgggttaaagtaattctttaacaaaagcctgaacaattttcttccggccaaatggctctcttcactagcagaatgtggaccacaaaacctgacagatgctcattagaaagaaaagccacactttttaaatatgaaataatctgttgataggcattctttttccaaattcaaaagcctagtgtttaaaacatactattttctctacaaagtatttagaaaaaatttcaatgtttcctctcatcagtttacttaggagttaaaaatgtatcacttgtggccacgtgagttgtgtcaaggatggcaaaatccttgcagggcccttgctctcagaccggttctcttggcaaaataccacctacgtaaatacttgtggagacagtcagtgttactctgtatcaaaacttttaaacacacctagagggatatcctaagcatattttaaatgccatatcactcaagataatgaaactctgggtcttcagagtttttcttgaaactgaggataagcaataacctttgtatggcactgttagggacaagtgaaatacccacatcttttaatccagattcacaacctgaggatgctattctaaagaaatcatcctaaacatgaaaaagtaatacatgacaaaggtatctgtcatgacttctttataaaaggaaaaaatgcttagcaaccaaaattcttggcaattgagtttaatagctgtgtgccaggtctgagtgcgttattcagttcatgcaatgcactgacatggattttctctcatcttacagataacaaaactgaagtaaaggagtatgttttccaaggttaaagagtaattgatagaaccaggagtctcagagtccatgttctgaacccacacaatacatttccaaactgatcacaggagg

SEQ ID NO: 8250 - DNA, 1527 bp, Homo sapiens
agttcaagcatgctggaagcggaggtgggggttttttgagatgcaactgaatgcgctggctcaactgacaaaaactgtgggcctgttgcagaaagagagacatctaattgcgatggccgagaaggtgtctgttctgttgattctgattgggtttcatttgaaacttgattggtcatttgatttctttcctgactagcctgctgagacacagatctggtctctgataggtgggtcactttgttctgtgcatcttgcacaaatctgtggcagtaaatatccataggcttggcaaagccagtcaatatgtgtacgtcgccagcagaaggacttttcttcaaaggagactcctggccttttccaagcccactcccatgagcaacagtaatctctgaaggagcatgaacgctactatctgtgctgctaagagactgggaccgactgcccaatcgaggcgctgaggcaataataccacaactaggaagaacgtaatctattggccctacactctctaatgagttagctagctgcctgtcttcatcagacttagaatttgtaaggaattcatcagagtggtatgagtcattatctgaagacatgtccccatcagactctgcctgaaccttatccatcactcctgtgttttccatagtttcaagactactatctgatttccaaagatttacttttaagtttggttttagaaagttaactttcatttcaggtttggtaaagtttcctagctttcggaggttgccaatatttacattggatttggtctgcttcactttttgatttagagatgaaaatttgctcattaaaaaattctttccctgggccaaagaaccttggttttgagacctgataccaatgatgtcttcgtgaggtttactgctcttcctacaaattagaagagaaaaaaagttaattccccatggaatccaatatgccagttccagttattaacataagtgaaaacagttattcaaattggtcccaacttcttgaaaacagtgcattgctaactgacagataaccctcagagttgacattaaaacagtgctatccaatagaaatatatgaaatacatgcataattacaatttttctagcagccacattagaaagcagcagtgaaattagcagcatttcatttaacccaatatatacaaaatatttcaacataaaaatattaaaagatgattaatattcctttttggactaattcaatataggcaatgtgtggtgttctataattacagcacacctgaattcagcctagtcgcattctaaaaggcttcacaaccacatgtggtgagtggctaccattgtgagcagtgcgggtctagcacagccaccatctgtacaatcagcaaagacatctctgactgtaaatgggaatctgcagcaccttaactaaggttatctatacacatcccagtgtggctcaaattcagatagtggggggagacaggagtaagacttccattttcttatatgtcctgtgggttacctgattttaaaagatttg

SEQ ID NO: 8251 - DNA, 1522 bp, Homo sapiens
cacaaagtattcctaggtcttaaaaaaaatttaaaacttactatcccagctctagacttaaatttgtttctgtgtttcaaaccaggtgtctgtctctcagtgctggtcagacaacgctgtcaagagaacgatggctgagagcaaagcagctagagtctttaagaagaacgaggcttcagcagcaaaaatgtgtgaatggaaatgaactttaaagatgtaatacctatgaagagtaatgggcaaactgtagccacataattgtaaaattcagatattcatttataccacattgttttataggtaatttctatcacaaaccagtgacatttcctgaaatcaagcctggtaacacctgatgtttatatgatattcagtaaggacttttaccttactgatttcatggagcttttgaagtttgttttataataattatataaattagtaatgatgtaaaaaaagtatttgatattaaaagtttaatattgataatgttgctgattgtaccatttccttagcttcagctgagtcataggccagactgttgaaatgctgaaatgaagaaggttgttgcagtttcaaagtcagaggaatcgtgcttcggatttcttatgttttctagttctctgtttttccagttcacagtgggttggggtgcattcagtagtccatctttggggaacggaggcgtacttgccattgattcacatgactacatgaaattctgtactgtcatttcccagatgtttggccacagaaactttttcccacttaacatttgttaacagcctgcaaaactaaacttgtacatggcagtggttcccagacttttgtattttatggaccggtagtaatatttccaaaaatctggggtactataaggttgccaatttaccttgccaagtaatccgaataaatcactgtattatcaccatttttttcataaaaggaaaggacaatctatctctgaataagaggagtcctttaaacggaatgaatgtggcttttgggggcaaaagaaaccaagacactacattgtctttattttctcctatcccagtgcatttgagaaccatgcataagggaatgctgtgctacaaagctgtgcccaaatatgaaaacaaaataggaaacttaaaaagcaataccccctttagaaagtttttattttcttaaatgtcattgagttgctttgattctattggatttttggcattttttatgggatcatcagttggttccaagtatgttagatcagctaacatctgctactccagtaacagcctcgtacaactgcaggtaggttttctccagaccaattagttttaatagagcaaactaacaacagactgtagtagcatggttatggcaaccagaatcttcagaaaggttaggacattactttttaagctgtcagtggtatcaaataacttacctagttggaggcagataaaggatcccttacgttttttcctataaggcctaaattgaaattgttaaccaaggaaacagggtcagccttgaa

SEQ ID NO: 8252 - DNA, 1273 bp, Homo sapiens
ccagcagcacttacgtacaaatattggctattacttttattgctgttattctgataaaataactggtcagaatattctggtttatttttaatgacaatattaagctaatttttctattcttcgctatttgatagaaatcaggaagtcacttcagcatcttattgattgatttctttcttttctagatatacaagaagagatgtccttccactaggaaaatttacagttaacttgagtggttgcccacggaatagtaccttcacagaacacttgtatcgaattattcaacatcttgttccagcagtaagatgaatataaatatgtattataaacctaagcacacttaaaaaatccatctaactgtctttcattcacttcaaatatttaacttagagattttaatagatcttatttaaggggaaacaaagcctgccaaattacataatttaaaatgtacgttcccctaaacatttcacttttttttgtctttttgcctaagcacaaatttctgtaagtctaacaaaacaattgtagtaactcccttaaaattacactctcttgataccaatttgtccaatttggtatcctttttgtacactaaagtcttaaatctaaataaactctaaattgtaggagcataattcttttagttgaggtaataaagttctttatctccattgcctcaattttaattcctgtttggaaagttgagctcactttatttgccagggtatctggaatgcagtatttgcgtggtggtaggatcttgggaacaggggaattgcttctgattagttgtgtgactgaaaatactgatcacttctttggaaattgaagagggtgcactagatctttattgaaccgaatgtattcagtgtctcagtgctaacactcgtccaggccctcaagaagcagaagtggactggaatataccagcagttctcagtctccttagactcactttacactctgaaaaatgtgttcatactcaaagagctgtttttcacgttatgattatatttatcattaatttaccaaactagaagataaagtaaatacacctattaaaaataaaaaattacatataaatatttttataaaaacaacttttcccaagccaaaaatgattagtgataaaggtgacattgttttacattcttgcaaatctcttcaatgtctggattaataggagacaatggatgcttgtatctgcttctgccttcagtctattgtagtctcaggttttggttgaagtatatgaaggaaagctggc

SEQ ID NO: 8253 - DNA, 1048 bp, Homo sapiens
gaaaggtgagtctgtgtgctctttttttggtctcctttatttttatataatttcaagttttcaggagagttacaggatggttttaaagaactcccttttccctttctcccagatgtaccagttgtaaacacttgcaccccatgtgttttgtcattcatttgtgctctctatgcacacatttttctgaaacacttgaaagtatgttgcagaaatcaagcccttttacccctaactgcttgtcaacatttcctaagagtactgactttctcatatataattagagtacaggtatcaaaactaggaaatttgccacaaatatacaatacactaatccacaatctatacttaatttcactaattgtcttaatcatgttctttcttacacgtctcccttctgcatcccccagtccagggttcagaagctcgctcattctctatttctactgagttcatactgtatttctgattccagttcagcaccacaggtgtcgttctgcttgttctcctttctgtattagtgtaactctcttaaacttgattcccatttttcacaatcttatcatttgcacatttttacaacatagagaagggaatttcagaattgttaactcatacctttacaaaacataaacctaaataactagagttcaatctgaaacagtcctcagcctttgtctttcatggtcttgccactttttttttttccttaaacaacagaaatatatgtcttccagtagttctggaggctgggaagtccaaaatcaagttcccagcagatctggtttctagtgagggcccgcttcctggtttacagatggctgtcttctcacgtggtagagagcagacagccttgatgcttttgaagagtgtaagccagttaccagttacttgtttcctcatggttagactcaatgttttgcatttttggcaggaatattacagaattgatgtatcctcagtatgttacagcaggaggcatgcgatgtcagtttgtccctttactggtgaggttaattttcattagttggttaaggtggtgacttccaga

SEQ ID NO: 8254 - DNA, 1021 bp, Homo sapiens
actggtttgattcctggtacatactggatattaataagtatttggtaaattaatttattgctgtatggttttattctgcttaattaatagaaaaagtatgttctaccaaggagttttgctgtcggtagaccatgtattccttaaatcaaagatgtcaaagtaaccatattgcaaatcaacttttgaaactggttatacatgagatttgatgggaggaatttgttgatatcttacagtaagggaaaaaaaagtaaaatttttagatcttcatgtttatctttgtcctcttacagatcaaacaaaagactttgttagtatgtgctgtttccttaaaaactgtaacaacttgaactttgcaagctcagaagcatcacgtatatcaaacttgaaaggcacttatggaatgttctttttctccaggaggccttagaaatgactaagtgcaatgctatcctttgaatttagggagtgttggtggtcttcaatggtgtggagagccaaaacgtttagaaactgaagcttctactgggcaacagctgaactctctgaacttgtcttctccttttgatttgaattttccattgccaggagagaagggccctgcatgccttgtgaaggtaataaaacctttcgtagatccaacactgaaatgttatgtgtctcagaaagtagcttagtgtctgagcatttgcatttgttcccttgtgctgggctagctatagcaaatcactgcaaatttaatagcctaaagcagcaaaagtttatcatcttacaggctttaggtcagaaatccaacatggtctcactggggtaaactcgaggtgccagcagggctacattcctttctcggagcccctaagggagaatttccttggccttgtggctccttcttccatattcatagccagcaacattgcatttgtctgaccatttttttcatgttgacatctcatctgaccacaaccaagaaagtttccccaattttaagaatccgtgtgattacatggggcccagccagtta

SEQ ID NO: 8255 - DNA, 1028 bp, Homo sapiens
ttaatttttgaagaacattttcattggatatagaatttttattttttattttaataatttattttaaaaaaacagaccaggcacagtggctcatgcctataatcccagcactttgggaggcagaggcaggaggatcacttgaggccaggagtttgagaccaacctggccaacatggcaatactctgtctctacaaaaaatacaaaaactagccgggcttggtggtgggcacctgtggttccagctactcccatggcttgagacgggaggatcacctgaacccagaaggctgaggctgcagtgagctgaaattgtaccactgcactccaacctaggcaacagaacgagactgtctcaaaaaaaaaaaaaaagaaaaggaaaaaagagatgagttctcactgtgttgcccaggctactctcaacttcctgggctgagtggtcctcccacctgagcctcccaaagtgttggatttacagatgttagccactgcatccacctgggatttgttaggggtggtgtagaacagcccttgttgaacagtagatcatccttattcatgaggtctgctatttctgggtcttacccaaatgcctaggatgactagtagggtccattatagtattatactacttccagagtctccatttaactctctgccaactagcagctgttctctgctagtcctcagggagtcttgacttgtatatccacaatttagtgttttgtcagagatccaaatggaaccttcagggtcttttatccgtaactacttcctttctagtacttctctgcaaattccagttgcttcactagccctgaaccatgtgctctgtcttctccacccagtaagagagggcctctactgctctttgttgcagtttggagaacgtctccaggagagagctgggagaatttggagtttacctgctgtgtttctcctcattcaaggatcataaccttatgctccctgttgtccagtgactgaaaacagttgcttcacatattttgtccagttacattgttgttta

SEQ ID NO: 8256 - DNA, 1027 bp, Homo sapiens
tttatggtatacagtaatgtaatatattagcctaatgtgttaggactccttaaacaagggatactgtaatcattaatacagttgatccattaggcttggcacagtgtttattttatggaaacactctaaaagaaaaacagacctgaagttcatcatgtgtaaggttacacaaatctatctttcaaatgagttcattactctaaataattgtcagaagttacatttttgtttaatataatctttgcagtaaccttccaaattagggcaatttttctgtccagatctgcctactgaactagaatatttaatgagcaacaacttctgttgtgaattaacggactgatattggggtttgataaatcagtttcctaaggtttggataagccaagagttagactctaagaatataaaaaggcctagataacatcataaaagtaaggttctagatccacaaagcagagaactagacccagattataagtcactccagaggtcccatttttctggatttgagggaggaagtgtttgatgacagtatttgaagtgattttatatccattttcttttaaaaagtaatagtttggaattagttacttgttaattaatctgtaaaatatttgctgtggtgttataatgtgaaaatgtggttgctaattttaaaataaattttgggttttttaaagtaaatttttaaaaacactttttatgtatatcacagcctcaacaagaacttgatttaaactctccacgaaataccactttggaaagacagactttctattgtgttccggtgcctggggaatctacgtgggtaaaagaaatatcctttatctgaactttcttactgtgttgatggtttctaaaaacttagcctttaattattcttcctttgcaaagcttggctttattttaataaagtgtgtttcatttgttctaattgagaaaacccataaaacgggctaagtatttgtcactgagtaatgctaaaataacagtacattcctatagtgaaatactgttaaaatga

SEQ ID NO: 8257 - DNA, 1029 bp, Homo sapiens
ttttaaggaaaagctgaaggaaaataatgctcctaagtgggtaagcttattgctattttcgagggagagggttggacagactatacagtttctcttagtagagtaactaagtaacccacatgtaatttaaaaatatgtaaattaatgtacttctgcttcaagtacatttgtattaaaagattttggtcttttgctaattaagtttaagcatgtaaatacttatacattatgcctctaggtggcagtaactgactgttacttcctgagacaaatctttagttgcaagagtgtcagttacctttgttttattaccttcattttaaaagaattggcatgtgctagttttaagagaagagctcaacaaagtaaatgcctttttgatcattgaaaagtgttctgaatgaaaagcattttttagcattcttttacattgtggtcaaatgttatctaaaacttgaaagaaatggaagagaacttgggttccagcaattatattgaccattgagatcatttggctctctgatgtggcatgggtgtgtgtgtgtgtgtgtgtgtgtgtgtgtaacagtttgagtctggatataaagtttgtgtatatatgcttaatgttgtatagacaggatatttagttgactgacttgattattttcctttaaggtaccatcactgaacgaagttccccttcattatttgaaacctaatagttttgtgaaatttcgttgcatgattcaggatatgtttgaccctgagttttacatgggagtttatgaaacggttaaccaaaacacaaaagcacatgtaagtattgctgttttcatgaatttgtggtattaattttgtccttttactgttggtggtagttttggttcagatatattgatataattctgtttttctatgtttggggtcataggttcttcattttggaaaatatagagatgtagcagagtgtggggtatgtatctttaatatatatgaaacatttttagtaagaattttttcctaaacagagaatttgtttagctaatc

SEQ ID NO: 8258 - DNA, 1068 bp, Homo sapiens
tgtcttgctctgttgcccagggtggagtgcagtggcgtgatctcggctcactgcaacctccgccttctgggttcaagccattctcatgcctcagcctctcgagtagctgggattaaaagtgtgcaccaccatgcctggctaatttttctatttttaatagagacagggttttgccatgttggccaggctggtcttgaactcctggcctcaagtgatctgcccccacttggcctcccagagtgctgagatctcaggtgtgagctgctgcgcccagcctctttagctgttttcccttcaactattggttagaccaagatcattattctcgttatatttaagcttctttggttgtatctaacagaactagactagctcatgcaaaaaagagcagggttgggtgaagaggggcagagcagactattttatcactagcattttagagaatttaaagcaataataaaatgaactaaaagttagttggtctgctttttattatcaccatgaatctaaacagacaatctgtgcccttattgtctgtacccagcttggacctcttctaccactctgtccttggtaggccactgaaaaaagttaatttatattaaggctataaaacccaagaacaggggaagtggttgggtattcgaagagactgagtggaatcaggaactggaaagctagcaggaatccaagcaactcagtatttcttctcttgggatacattaatctctgcacactttctctttctctactccatgtctcccaaatttacttgttctcggttccaacccacgctagctagcatctttattttcaggcatagaaaatctgattggcacaacatggagtcaggaatccattcactcagggatcagtcatctgtggccatggcacagagttaggtaggacaatcgtgactgttatccacacctcaacattgggggcgttctcaaagaagaagaatagctccggcagccatggcagatggcatacgtaggagtttttaagttataataacttacacatggttttaaaaaaaatcaacatgatggtatgaactgagtgaaa

SEQ ID NO: 8259 - DNA, 1050 bp, Homo sapiens
agccgcagacactaagggccttgtcgggggaaagcaaataactgctttggtctattccatgcatctatgttctctgggttgaccctgcagaaatctataaggctgaggtcctgccgtcaaggtaggaccagtactctgggcctggccccgctgggttttgtcatccacttctagacaactctgcagggcaaggctgttttctgccaggtaccattactggagggctctagacctcgagaaatgtgtaattaagaagctcatcctacctctcataatcatcctaccccttccttgctgctctcacccccaaagattcctgctgaggggtcagtaggtcactcagaagacaatggagagccactgacagggtttaaggcagggaaccacaagcctagacttgcattttgaaaagataattcagggaacatcatacatctatgcggtccttgggggcaaatgctagagctgagaatggattccatattagatcagcacaatgtttcctctcatcctgccaagaactgaactttgtctctccatgcatcaaactcttcgataggatgccccagtggtggacacacacagcatatttgctgttgttgagttagccacttagaggattgaatcagtaacatcattttctctttttagcaactcgttttcattgatgttaccttgcactctattcctccctaacccatgtagctctgtccaccctaattttccccaagatgtcctgaccaagtgggaacaaaagagatcaacagtagcgctttaattatatcctctcacaaaagtctgcacctgcagtcactttcaatctctcttggatgagagagagtagaaggtagtagagtggagtgggaagaactctgaacatgaagtccaaatacctgagttttcccctgttctgccccttacttttcatgtgacctggggtcatgcctccactcgcttacctgtaaaggaggaccaggtcaccttgcacatcctaaagcacggagtctatgattctgcagttggttcactgtgctacttggagggatatgg

SEQ ID NO: 8260 - DNA, 1066 bp, Homo sapiens
tatatgactaatttggggaaaatgaagttttgatttatttgtgtttaaatgctgctgtcagacgattgttcttagacctcctaaatgccccatattaaaagaactcattcataggaaggtgtttcattttggtgtgcaaccctgtcattacgtcaacgcaacgtctaactggacttcccaagataaatggtaccagcgtcctcttaaaagatgccttaatccattccttgaggacagaccttagttgaaatgatagcagaatgtgcttctctctggcagctggccttctgcttctgagttgcacattaatcagattagcctgtattctcttcagtgaattttgataatggcttccagactctttggcgttggagacgcctgttaggatcttcaagtcccatcatagaaaattgaaacacagagttgttctgctgatagttttggggatacgtccatctttttaagggattgctttcatctaattctggcaggacctcaccaaaagatccagcctcatacctacatcagacaaaatatcgccgttgttccttctgtactaaagtattgtgttttgctttggaaacacccactcactttgcaatagccgtgcaagatgaatgcagattacactgatcttatgtgttacaaaattggagaaagtatttaataaaacctgttaatttttatactgacaataaaaatgtttctacagatattaatgttaacaagacaaaataaatgtcacgcaacttatttttttaatactcgtgtcttaccaaatggtttcctgtgcttggaggtgctgactgagtgctgttgtgaatgcaggaagggcagggctgccaagggtcttatgtgctacacacgggggtgacttgccagaggggttgactgagaccagcagtacctgtgacaggttgaggttgatccagtggaaaatctgaatcagttggttggagccctggctcggttgcttactggcacctcaatggaatcatcgttcctttctgagccctaccagttccccagaggagcaaacaaagagccacatggtagagagctttgc

SEQ ID NO: 8261 - DNA, 1099 bp, Homo sapiens
ttctggaggcaacttgtaatttggcatagctaggccactgccccttaattatctcatcatctttttttctgcaactgttaaaatgcttttctttttacttaatatagaagggtaagatgcccttaaaatccccctgactcagccacagtcatcgtgttttctttccccagtgccagctggcttttcttcactgtccatctaagaatacagtttgagaaaaatagtatttggaaatatactgcttgtggatggatccttgaggactaagaagagggcagacattggaagttgacataagaatgttctaaattaagtaattatatgtatactcacatgcaataccatttatattttttctttaagagaattcagcctggccgggcgtggtggctcacgcctgtaatcccagcactttgggaggctgaggcgcgtggatcacccgaggtcaggagttcgagaccatccagcctgactaacatgttgaaacctcgtctctactaaaagtacaaaaattagctgggtgtggtggtgcatgcctgtagtcccagctgcttgggaggctgaggcaggagaatcacttgaacctgggaggtggaggttgcaatgagccaagatcacaccattgcgctccagcctgggcaacaagagtaaaactccgtctttaaaaaaaaagagagagaattcagcctaagttggtcctttttcctctcttccctgtgttaccagagggaacatcagagttccttcctctttttcttccctccttcctttatttattcatcataatttactaagtgcggggtataaatcaggttacatgtaagacacagcctgtcacattcaccagtggttccaaggttatttgatggtaaatgcctgtaatcctagctccacaggaggctgaagcgggaggatcctttgaacccaggagttcaagaccagcctgaccaacacagcgagactccaactcaaaaaacaaaacaaaacaaaacaaaacaaaaacccaaagtgggaaaaaaaagaaaatgtaattggcttgtgttcagtagggccgaggagtataacagaagcagaggaaagggggcaaataccagttccc

SEQ ID NO: 8262 - DNA, 1064 bp, Homo sapiens
tggtgaaactttttgaaggcagagagctcagagtgtcttaaacacttggggtgtaaataacacacagccctactcctgtaattcgcccaagaagacccaaattgatacccagctggtagaagccactcaaccccaagccaaataatacagcctgtaacattaattagggaaggtactaataatacagcctgtaacattaattagggaaggtactttgcctccacctgctttggtcttcccaggccctgagcccagccagcactttactctcttcttcacttcatcgagcaagcacaaaggcattagtggtgttttgcttctagcatttcacagggtgcagcctccataagtcactttgtgactttagtgctggagggaggacacttcatttttacccaaacaagtttgttccgcagacttcactctctctgcaaagagacgtgtgtgttttagaggaagtgggagccccagccgattctgcaagacttccgagagtcagatatccagacagaagatgcggacacctgggtgaccagacagcgaagaggaaagaacaaaacgagcatgtgccaagcctgtgagggagaaagggcaacaaaccagtgaccttccacagaaatgtgtttaaacaaaacaaaacaggtgattctgggtgcccagcatcccagcccactcatctattctaggaggtgacaagccaagatactggctgtgggcacctgggctctttctgaaggtggtcttcctggccgtcatagcgttccctttttctgctaatcatttttagttctgaccttcctttgtgctgatcttcagaagctggagaaagcttcgtatttctgggaaaacaaaacaaaactcagaacccaacgagatttagcctgtcaggcttgagtgcgttaggtggagtcttgacaaggcaatgaactcattctactaattgtaattagcgtggggcctttagcaagttctgggctcctcagacttcagagagctttgatcggcctcctcctcctcctaataaccatgcctcatgctaactggtttagtgcgtttttatgcaa

SEQ ID NO: 8263 - DNA, 1050 bp, Homo sapiens
tcagctggggtaagtgatttgctaagtaagggcttggagcaggcattctggagctggggcctccatctgggtgttctccacgcctatctgtatgaatgctccttgctctccaagcggacttcttcatttgatgttcactgtggtgtgtttcagtagtgactgccacagcccgactctaaggaggtgctgctgtcaccccaccctgctttcagttctttgctgcagaagacagaatgtgcgggagaaagatgggaccttaaaagactagttgctcttcctcactcatgtagacgatttggctttgaatcgtgaattattgcttcttttgggcattccagttctgcatttccagagaccctcaggtatgtcaagctttttgcctggcatttgatattttgggggcaaagtacagtggaagtggaaatggtgcctctggttttgtcaaggccagatatgtcttctctccactccttgtgttttttgagacagagtcttgctttgttgcccaggctggagtacagtggcatgatcttggctcattgaaacctctgcctcccaggttcaagtgattctcctgcctctgtctcctgaatagttgggattataggcatgtgccaccatgcccagctagtttttgtagtttttagtagagatggggtttcaccatgttggccaggctggtctcgaacacctggcctggagtgatccgcccgcctcggcctcccaaagtgccaagattacaggcatgagccaccgtgcccggtcttttatcagtttaactttccagaaatttgttccccctgcctgtccgcatcccttcaaatgaaagctgtaagcagcaggcagttgttgtttgggggcccatcagaggccgcatgtcacttctggatgggtcaggcatcactaccagccctgacttgatggcggcagatcagcatggcactgtcaactagcccttgacataaatctgttgtaactcagccccagacatgataggacacagcctgaaagcgcacaggaatccgtaccagagcgaagtcccccctcagg

SEQ ID NO: 8264 - DNA, 1029 bp, Homo sapiens
agggggttcttaaaaaccatcttttatgccacttcgaagtgcctgcatagaccaagagagatcgcaggacagagggctcattcaacgtgactgtgaaattggcacagaagccctcagcgttgggtattacaggggttcaggttcccctggagcccctcagcagagagtaaagcattattgagcatgaaccaagtatatttcagatctaagaaaagatgatttttaaaacttttgttataatcactactaaactggttgttttgaagcataggttaattagatttacattttctaggttagttacttagatgtcattttaaagactttttgatgaaatgttatgcttaatccacaagtatgtttagggggagaaatcatgactaatgtacttatcagcatgtttatactttatggagattttttttcagtgaagacatttcagctttaatcccacatcaagcagtctttgatgaggacacaggtatatgtttgtattagccaacgtttatggactgctcccctgcgtcgtgacttaccaggtgcctcccatggagcaagttgctcagtccttccacagcccaaagaggcagacactgttattttgcccttttacatttgagggcttgccctacccctacctcataggtggcacagctgccatttggacctacgtggttttgcaccagaatttatgctcttgctaaactgcttgcttcaaatgtagttccgtgttttgtaaaaacactgttgctgttgaatgagaaacataatgaaagtaatggctccccaaaagcatgcaaagatctagcccatggtatacagttgagagcaaagttggggatatgatgctgttctttcaacttccaagacctctgtgggttatttatttgtttgtttttgagacagagtccctctatattgcgcaggctggagtgcagtggtacgaacatggctcagtgcagtcttgacctcctgggttcaagtgatcctcctgcctcagcctcctgtgtagctaggaccacaggtgca

SEQ ID NO: 8265 - DNA, 1059 bp, Homo sapiens
agccaccgcgcctggcctgcagattcattttagataagattgttgagtaaacatccctgttaagcatctactatggacaaggctgatctctgcttcagtagatctttaatttggtacatgagttccttctccaaatgagagttgttaaagctgttcacgagccttggtataaaaggggcttccttaggtagaggagcccgttctaagtgcctggatggtgtttgtctccagctgttttgcagttcttgggaggccctggcatttccatgtgtgtcctttccaactgcaaaaacatacagaggacacaaggctgctgatgaaggaaacacagtagggctatcttatagtattattatttttctagatcttacagattcaaggttcacataaagctagtgtattttaggaagagctattgtaaaattataaaagagttccagccgggcgcggtagctcacgcctgtaatcccagcactttgggaggctgaggcaggtggatcatgaggtcaggagatccagaccatcctggctaaaacggtgaaaccctggctaaaacggtgaaaccctgtctctactaaaaatacaaaaaaaaaaaaaaaaaaattagccgggcatggtggcgggcacctgtagtcccagctactcgggaggctgaggcaggagaatggcgtgaacccgggaggcagagcttgcagtgagccaagatcgcgccactgcactccagcctgggcaacagagcaagacgctgtctcaaaaaaaggaaaaaaaaaaaaaagacttcctcccctcccgtatcaagttcattaaacatatttgtgagcttgatatttaaagagaggctgtgtgctggtgtgatgttagcagtcaccagggtggggctggtcacacatgggagcctgggtggagggttgtgcctggattttttatggtggcccccaaccttggatctctgagacctagatgagcagcactgcacccgtaccctgctgtatggctgtgtctgtgttttgcagaagcagattttataggtgtagctttgatgattgaaatatcacccga

SEQ ID NO: 8266 - DNA, 1060 bp, Homo sapiens
gtattacagtgcaagcacgctttggcaatcaatttaaacattttcttgtggaatattcttccatgctatggtttggtttgtttctaaagccccataggatgtggaaactaagtcaggacagattttctgggggtatcctctggttgctcttccagatacttcctgacttcctggggcttggggagaggtggatgcctgctggggccatttgcagagcaagaacagcttctcctgggaataagcaggcctccactgacctttgttggacgttctctcctctccctccttcccatctgtctccgtcttctctctcccacctttctgcagagccaccaaccaaataccaaatctctcaaccagaagtgtacgtggctgcgccaggggagtcgctagaggtgcgctgcctgttgaaagatgccgccgtgatcagttggactaaggatggggtgcacttggggcccaacaataggacagtgcttattggggagtacttgcagataaagggcgccacgcctagagactccggcctctatgcttgtactgccagtaggactgtagacagtgaaacttggtacttcatggtgaatgtcacaggtgagttggcccgccagcactatgctctctcttctctgtagccattacatttttttggccaagtgaaaaggtagtgagatctctaattgtaattggatgccaggcatacagcttcatagtttttgaaattcttctttgggacctggtgcaccagaaaggccgatcattaagaatgatagaattcttgtgcacaaagtaacatttttcttaagatagtacgcttttatttaagtaaatacatgcttttttttttttttttttgtaccactgacatctctggcatttagaatatagggttgaaatttggatactcaagatttctgattcatttattagagtttgagtttctctccatgatttccttctatgcagtgagcgggacagaacaggccccctttgtggccgagtttaaagttctgctttcagaatgttagttgacgatgagaagggccacacagggactgag

SEQ ID NO: 8267 - DNA, 1058 bp, Homo sapiens
gagagaaaaccttccctctgtgcatctttttttggagaacactgtcatgaacagccgaaaacatcagatcaaaagcaagagggatactgacaaaacagggagtgcggatttccactgtgggtggggacattgggagacacggtgactcactcctcagtaagtgcattcttaggctctttactctgtgtgcatttttattttctcatgggcaacaatataatttctttcaaacatgaagagccatccagcatgtttctcaaaggcagacttaaatgatatgaggggtgtgcctaaatatataatttttaatggttaccatattggaaacattagccatgatcccatctgatgactaggaacatgagccagtctggagtttctggagaaatccagctaccgctgcagaggcggctgttagctgttgttaccggcatccttgttagcgaccagggaggtttcagtcccgacttgtgtctaccagacaccctgacaactggttagaaagagaggactgcaccctttcatcctgcgtacttatctgttgtttgttgctttgacttctttttgttctccgtttttatgttggcagtatttctcgaggtagagaactttcacctttatattgtgcggagtatttgtcccttcctcgcccccttaaagaacacgtagtacctatgccttataaggtctctgtttgatgtgaggaatttggtcttcttgcaagtcggctcttgcagaggggaggctttgaggatgtctgggctgcagcaggctgtcttcgttgctgtgtacacagccctcatggcagggcatgcaaaggtggttggttctgacttcaatggcgggactccattgcctttattttttaatttaattattattattattattatttttgagatggagtttagttctgtcacccaggctggagtgcagtggtgcgatctgggctcactgcaacccccgcctcccggattcaagcaattctcctgcctcagcttcccgtgtagctgggactacaggcacacaccaccatgcccatctaatttttgtgtttt

SEQ ID NO: 8268 - DNA, 1046 bp, Homo sapiens
tgaaagggttttccccagaacagtgtgtcccaagaagccctgaagggctggagatgtaccagctttctctgctatgtccagcaagtgtattttcagaaggtaggaggctcgggctgggctggccaggcagccaggcacacagactcctcattgtacatccaagccggggcgtgcaggacttcaacatagcttgtaacgtaagtatctatttcctgggcgctacatgatctaatggcctgtcgctttgggaaatgctttctgaacaaaagactcgatttatttatttatttattttttgagacggagtttcgctcttgttgcccaggttggagggcagtggcgtgatctcggctcacggcaacctccaccgcccaggttcaagcgattctcctgcctcaccctccttagtagctgggattacaggcgtgtgccaccacgcccggctaattttgtatttttagtagagacggggtttctccatgttggtcaggctggtcttgaactctcctgacctcaggtgatccaccctccttggcctcccaaagtgctgggattacagatgtgagccactgcgcccggccttttatttttttaaattattattatttttatttatttatttatttttttgagatgaagtctcgctctgtcacccggctggagtgcagtggcacgatctcggctcactgcaacctctgcctccctggtttaagcgattctcctgcctcagcctcccgagtagctgggattacaggggtgcaccaccatgcctggcttaatttttgtatttttagtagagatggggtttcaccatgttggccaggctgctcttgaactcctgacctcaggtgatccacccgcctcggcctgccaaagtgctgggattacaggcatgagccaccgcactcggccaggactcaattttgaagttcttatgcaagcaaagctgcccatatctaggagtttatgcacacagtactgattcaatacctgcgtcttagtggtccatcaggaatttttcactcatgaaatatgactttaataca

SEQ ID NO: 8269 - DNA, 1027 bp, Homo sapiens
cacattacagctattatgtgtgcacaagcaactttttaatttttaaatgagaaaaaatgaactagaagggatttgggatggggaaggtgtattagagtattcttgtcactggaaggacctatgtaaattactaactagacatctcatagcattggctagagacagttctttgctgaatgacagatagatgcatccaggctgtggacctgaaaggtgaggtcaaactacagaaggtgctgacccagccaagttactgtcctgtgtggccatatttgagtgaccagttactaccctagataccgtcagtggagggacccactttcttaatgctggcggtactaataaataaaatgccaactttgtacatggcttgcaatttgtgttttattcttattatgtatacacacatattagttgtgggtaagaaacatcacttgtaaataggtgagatgacagattggctcttttcctcctctcctcttctatagtagatttaaacttagaactgtagcacagatctttgtgttctttttttgttgttgttttttaactttaagttccgggatgtgcagatgtgcacattggttacatagttatacatgtgccaccgtggtttgctgcacctatcgacccttcaactaggttttaagccccacatgcattaggtatttgccctaatgctctccctccccttgccccccactctctgacaggctttatgttctcataaagggtttactatcagtagtaattaagattttaatattttgtatattttactggggtcaaattttgtagttttattggtcaactacatccaaagattatgtcctcaactagatagttaactgaaaactatccaaaactaaacaaaattctattctgtagtattatacaatattgtttatctgttttagcaaactgcacaactgtgtaccgtatgtttaaaataactctttgcttttgttttctttgcaatgtaactgtctgtctgccaagtgtctggtttctccacatgtgtctgcct

SEQ ID NO: 8270 - DNA, 1155 bp, Homo sapiens
atggaatcctgcattctgtcatgttcttagaatcgctcaaatcttagggatattggagttaatagccagttgaattttagatattgctcatgacgttttctgattattcatttacagcttccaaaattgttctattcacattaacattatttatacctaatacttgaccattgctgtataataccaggtaactggagcatgaacgctgaatattttagtgtttaaactagaaatctaaaggcaagttttctagtcccgccagtcattagctttgtgactaggcagaacacaacttctcagcctcagtttcactgtatgtgaagtgggaaattcagactacataagttaagatcctaatatgttttatgacctctgaatctttaagattcctttgtgagaatcaaactacttaaaagctagaatgcattacattacacaaatgtatgatgtatgattccagaacacccaagttagtgtgtacccacctgttttccataactgtgctcaatttcaccacactgccctttcatgcaccttctctcttcctcactgttgtgatcagaagacagaagttgcagttttaggtgaggtcatgcgtagaatagtgttttccaaactctcaactgtagtcccctgtaagacatgcattttatgttgacatataatactcactttcatgtatctgtgcacacgcgtgcatgcgtgcacacttacacagctgaaacaaaaatgtgctaaatagtactcaccctcactcgtgtggtacactctggtagttttgaatctgttctggtttttaattttttaaagaaatgctggtcacaacccattacatgaatttcatgcccaagaccactcacaatttgacaaacactagcctgggagaacttggtggggaggattgtcactccagttctgccatgaattctattttagtgatacggcagtggtagcagtgattgctgtgattaatatgtattggtcagagcattttgctaaagggttatcatgtatcatcttatttcatcttcatgatgaccctcttgctcttctctgtaaataaatattcatgaggccaatgactgattagagataggagggatttgggcaggatggtggggagggaagatgaagagggatggaaataaaaataca

SEQ ID NO: 8271 - DNA, 1034 bp, Homo sapiens
aggtatgacaagatgtggccatggtattgggaagctaatgtaggattaaagtgaaagtcattgaagaagactgaggcagccaagacaacatccacgttttttagcaaaagctggccatggctgggtgcagtggctcacgtgaacctgtaatcccagaactttgggaggcagaggcaggcggatcacttgaggtcaggagttcaagaccagcctgcccaacgtgatgaaaccccgtctctactaaaaaatacaaaaattagccgggcgtggtggtgtgcgtctgtaatcccatctgcttaggaggctgaggcaggagagtcgcttgaacccaggagctggaggctgcagtgagccgatgtcacgccactgcagaggaagcccagagagtgagatcaactccagcctgggcgacagagcaggacaatgtctcaaaaaaaaaaaaaaaaaaaaaaaaaaaaaagctggccacatctggaggtttttgtttcttggcgccatttaggtgtaagaacggtaatgtcctgaatgacgatccttttcatttaccaaatggttctaatgctgccaacccccaatgaacataaaggagcatgaagtgcctcgtttgtatcaatacattatggagaataaatagaatacagttctttagagaaagatactttcagattcatgtgatccttagggcattaaatacgatgcactccattgtttttttgttattctgtttcaaagaaaatgactgtcttgacccagtaagatgatttcataccccactaaaagatcacagcctacaatggaaagacactggttgtctcaacttttaaagctgtgtgttaggtttcccaatttgtgggtgtgcagttattagctgttaaacgtgaggttttcagtgcccatgagcatgattttcctttgcaggaaagatgattccaaggtttcctttaattttagaaattagcattcagctcattaaagtaacaatctattaaagtaacatctgtttcttctttaaaggtttaaatgcaaattacaga

SEQ ID NO: 8272 - DNA, 1033 bp, Homo sapiens
tggtagacattaattaactgagtgtggctactttagattgtgtagtcagagggtcctctctgaggacaaatgtttaggctaagatttgaatgtcacaaagtcagccaatgggaagttttagggtcatttcagaaagacactgaggaaacagctagtgtagcactgcctagcctttagttgctgcagtcgtcagttttgactggagtttatgacctggagaacattttcataagacctgtgcttaggccatatcttcagagattttaagtaattgaactctgggatcaaccatgggcatcagatttgtttaatgctcagaagattctgatatgaagtcagactagagaatcactgtaccagattattttttcacagctgagagcctcatgaggaactagaaagataattattccccattttaaagtttgctgttttctgtttattaaattcagaattactcctattgaagaagctcctatctttgccctgtcatctgtggcctagaacatggaacactgaccaactagagaattcccatttttacccccacttgagacctttatctgtactgtactgtcgttttttttccccttccctttgcccctcccccaagcttgcaaattccccatcttatcatttttcaactccagtaatctctactggactcttaagactagatttcatcattcacccacctaccccatagcagtttacatttcttcccagaactagtctatctcctgtgcatacattccatgagaatctaattgacatttaacttcttgtgtcccaggtggcaaacaatgtgcctgctacatagtaggtatttaatgcttaatatacatttgttgaactaatgaatgaaaatactaatgcagagagctgacgagtatgtaggatagtgagaaatgccttctttttttttttttaacaaagatttgttgagcatgaatgggatggcttcccctttacaaataggttataacttagtaacagatacgcagttctaacagaatgtgataggtattgtgac

SEQ ID NO: 8273 - DNA, 1020 bp, Homo sapiens
atatgactagttataagatttggaatttcactttggcaaatagtgacaccttactgatgttccttgggttaggaaaaaaaaatgttatttatctttgtaaaaaatgccttttggtgttgagtgtttcctttttctttaaaagataggaatttaaccacggttacttattaaacaaataaggcatttcaggagcaaagtggcttgaattatctgttgaatagtttatattacaaagagaaaataattatcatttttctggtaccttttttttttttttaacttaccaaaaaggaagtcattacatccaaattgctaggatcttttgacaaaattagcagtgtattttctttggtccttattccccctacccctatacttagaaaaagaacttactgattgtaactaataggaggtctaactacaattttgtgcacttggaaaatggtttagaaaattttggtaagcattaagtgcttctttggcgggaatgagaaaggattatgttatgagtcaggctaccgatgatgaatagaacaatggtaccaggcttggtaaatgagaatactttaagaaaagcaaggtcagtaagaagctgtggagcgtgagcactgtctgtgtgtatcctttttctttttagaggcctagaggattttgaaaatggtactgatgccttttatgcctggattctaaatatagaccataattcttcagttttttaaaaaaaattcaagacttgacagaataattggcatttagaatttttataaattttatcaagtgaatcaaattgacagtgttattaatattgttacaggtaacttagctgttaagtttaaaaagccaaatatcatgcaggttattcctttattgaactatgttaaatcaagatactcctagaagtaatctttaaaagtgggtacataggaagataaagaatatggctatgttaacctacgattgttattagaatgagaaaattatatgcccatctgcagaatcagatattttgtaaaacatatt

SEQ ID NO: 8274 - DNA, 1028 bp, Homo sapiens
attatatatgccaaataattttaagtaactgcctgtatgattaaaaagcagttgattttcatctagtcagtagtagttaattataaaagtaaaacatatattacatatggttatttatccagagtataattctgcccttaagaatatgtaaaaatagggaatatatttgtataggtctctaaatatttatatatatatacatatatatgtatatatatatttgtgggcttttatgtgacatttattccagaaatagctcaaaattttgtaatggctttcatattactttttcctggactgtggaagaatgtgattcttctattcaagcagtcatataatcatttaattcggggcatgttccactcactgtggtagatactagggatgcatagatgaataagacatgtttggttcttgtatgttttagcccacaaataaaatttaaaatataagtgtcatttcatagcattgcattgatgttaaaatgttaaagatcattagtaatacatgtacctgacaagatgtgggcgtattcaaacttgctttacattagttggtctggtaaattatgcaagcagtacctgtaaccattatcaatatgtttatgttaatatagtcatttattcttaataataatcaaatagctaataacatattccatttttattactttgaccagatggcattaaaaacaaatttgtctttattgtggtttcctgctaattttgatttcttggttttgtggtattttctatttatccctaatttatgttatttggatttttggaagacacccaattttttaaggttaatttgaaagattttgcctagcctagtgtaatttcagtgatacctagttttgtcctccatatttcttggtatgtattccttgctcctcacaaatggtatgtgctggaagtttttctgcaggaagctagtgcttggaggacatggatgttcccaagaaggtctaacaagaaggggacaggtttttacttcagcattactgggtcttccttactggtgac

SEQ ID NO: 8275 - DNA, 1064 bp, Homo sapiens
tcaagtgatccacccgccttggcctcccaaagtgctgggattccagtcgtgaaccaccgcaccccagtctgcagtgctttttatactagacatgatgttgccatttgtaaaagttaaagtgggcctcagtaaaatatggagtgattgacatcagtgagtgaagtgttcattgtaagcaaattttccaagcattggaaacgttttttattgctgagatattatgtactctaataatttaaaatgacaatgttcccaaaatgtcttgtgttcttcctcagcttctcaaacagaatgccgagcaggacttgcctgttgataatggctctcatattttcctaggaatattcttctgctcttgtcgtatttcagtgtgccatgggctactgcttttatctctaaagttactctgttgtcccctttatcctttctctttcttgctgacaattcttgtgttagtttgtctagtattagcatttgttccctttctaatttgtaatttcttaatatgctcgttaaaatatggagcacctaagtactgtcgaggcatttggtaactgtttaatcagtgagtaaatcagataaagatctcttgctcttgtggaacttgcattctgggggtgtggttgggggagaatggtcagagatagtcattaaacaataagcataatacatcagtaaattatacagaaggttagcagggggtgttgtgggaaaaatagagcaggtataaaggagggttggaagtatcgattattggcttggaaactagatcaccaagtttattgttagtaaagttacagtcaagaggaaagtgggaaaaggagcttgcaggactcttctgtaagttgggaatataagcattaggaggtgcctttttgagtcctcattttcacttctattgtttttttctggggttttgtatttgatttcaatgtctgaagttctggagtagcttgataattgacctctgcttaaggtttagctttatataacaataattattacaattaatttgaacatacattgttttctgaaagttgaggattaagaccatgaaatgggat

SEQ ID NO: 8276 - DNA, 1040 bp, Homo sapiens
aactagttgaatttatgccttccattttacttccatttccatttcctcgatatgtccatgtttttttttttcctctgttccttttttttttttttttgagatggagtttcgctcttgttgcccaggctggagtgcgatggcgcaatcttggctcactgcaacctccgcctcccgggttcaagtgattctcctgcctcagcctacctagtagctgggattacaggcgtgtgccaccacgcccggctaattttgtatttttagtcaagacggggtttcttcatattggtcaggctggtctcgaactcctgacctcaggtgatccgcctgcctcggcctcccaaagtgctgggattacaggcatgagccaccgcacccagccttcctctgttcctcttttactgcttgcttttgcattaaatattttctagtgtattaaacgaatattttctagtgtaacattttaattccttgaatgatttttttcactatatatttttaagatatcagtggctgctctagtatttaagatagagatcttaatttacacaattgacttcagatttatatgaacttaattccagagagatgtaaaaaaatgttacttctgtatcattttagtccctctttcccttttttgtgccattattgttatacatattacatgtatctatgttaaaaattcaataattataattattcctttatataattgtgtcttttataaagttgagaaaaggaataagaacaattagttatttataatttcttacgttaaccagtttatttactatttctggttctcatttgttctatggattcaaattaccttctagtatagctttgctcctctctacttaatgaaattactgtcaaatacattaattttctccatgttattgtcccaatggtacaattatctacataacgtttttacaattttgtttttttttttttttttgagactaagtctcactctgtcacccaggctagagtgcagtggcgtgatcttggctcactgcaacctctgcctcccggattta

SEQ ID NO: 8277 - DNA, 1024 bp, Homo sapiens
ctaggaagcttcctttgatattctcagggggtctttttgctttctgaactttcctccttcctagtgctctggagatgatgcctttctacctccctgcttagcaggtaggaatagttggacaaaatgtttctgtggcccggtgtatttattcaagacttccccaggagcttctcctagtaggcttcaggcctctgggaagtccctttatgcagacttagagcagcactaaaggcattcatagtctgaattggggtggtagacaggtatgcaattccagtgcctttagaattagccattggattagtagggacagccagcttagtgtgaaactggaggttagagaggtttttctgagggaagtgacatttgagccaagtctggaaagatgagtaggtgtttgccaggacaaaaagggagaaaggtgttctgggcagcaggactagcaaaatgcagaggtgtggagggtaaaattgtatgccattttgaggaactactattaatacttagtttagtatggccagaacatagagtacctgttaggaggtaataggggatgaggctttttttttttttttttttttttttttgagacaaagtcttgctctgtctcccaggctggagtgcagtggcgtgatcttggctcactgagcctgggctcactgcagcctttgcctcccgggttcaagcagttcttctgcctcagacccctgcgtctctgggattacaggtgtgtgccaccatgcccagctaatttttgtatttttagtagagacagggtttcaccatgttggccaggctggtcttgaactcctgacttcaggtgatccacccaccttggcctcccaaagtgctgggattacaggtgtggactactgtgcccgaccaagggatgaggctttttggaggtttaggtaggagccagatttttaaaaaaataatattttagaaatacttaaactgcgacatacctatcagcagtcttcaactagcctcaacatgctgccattcttgtttaatctatctc

SEQ ID NO: 8278 - DNA, 1051 bp, Homo sapiens
tttcaccatgtcagccaggctggtcacgaactcctgacctcaggtgatcacccgcctcggcctcccaaagtgctgggattagaggtgtgagctaccttgcctggccagattttagcttttataactccttggctactctgatttggatacagatttttttgtccttccaaaattgtaaacagagttgaatacactacttaaaatattttacaaggtgtcttttatctttgatcataaatagtaatgtattcaggaggccaagcacgcttaacataacagttctccagtggttacttgtactttttgaatgtaatgatactcaggatgtatagagatcttttaccactgggtgtcgctctttcttcatagaattacgtctcacggcacacatgtccagtttccagctgttttcattgcattgcatttgactgttttactgttctgttttgctaatacattttaagtggctagtaaataatgttaaagtaaatgttagccattactgcgtgcaattactgttttaaacttatccttattttacaaggttacttgaccaagatggtgacattgtaagatttgaacaaaggaaatgtgacttcagagtcatggttgttaactatgctatgaagtaggaaaactttatgaggtctttttaactcaaacagtcaagttttaagttgagggttagcaatgatgaatgagtggccaaaaaatgtattcatatttttagtctttcttagaattactggtagttgtgcacaactagagggtatttatttgtgtgtgtatgtgtcgtgtgtgtacgagtgctggaaatactctgccagtttacagtagaggcaggcttacataattcagtcatgaaagctgaggcttatagtttagaggggatcgtcctcttcttaatgagtctgtaagttacaaaaataacttttttctttatttactaactggttggtttttaatattaaaatatttaggtgctttaataattgttgaaacttggtttcttggatgggagttactcttaatgcatattccacagaatgaa

SEQ ID NO: 8279 - DNA, 2033 bp, Homo sapiens
tcggctatgctttcaagtctagtcagtttcttctcccagttcccactttgctatttcatgttttctcactgcttccctctggcatcaggggtagaggcgtcttttctgtggaagactctgggctccagtgcttcctgcctcctaggggagcctgctctctcagtcatccccttcacctgtatctggagttttcccttcaaccaagcccatctctgattttaaaaacattaccatgaccctcttcaagctgctatcctatcacctctttaatgagaatcacttgtctcccctcatgtcagtccgtggcagtgtggcacctcctttcccactcattgagtctgttgtatgccagctttcctaattcctttccaaattgttaactccagtggatatatggccgtgcatttgacacttggagatctatgccttgaaactgtgtatccttgatgtctgttgctttccctggttcccctttcacagtcactgtcatcatttatgctgacatttacaccatgaacagtctgacaactttgatgcctaaacttcttgaaaatgttacagatacatgcaatcagttgctcactggacagcttgtgggttattttagacatgtacaaaacagcccttcaaatctccctagaagacctatactggcacttttacgactttattttctcagatggaaaactaggattgcccccaccctccaagcccttaccttaaccagtcactaatccccatctgatctcttctctcagtttgcccaggttactaccacagactccaatctgttatcgcctacttctgtccttcaggtctcttctgcttcttcagaaccacttgtcatattactcagatttcccattgccttcaagattaaaaaaaatctgaactctttagtgatgttcaaagcctcgaatgctcaggtcctttccctacatttccaggcccgcttcctcaggactctaaactctagcatttatttttttgttaaacagctttagtgaaatataactcacaccggatgcggtggctcacgcctgtaatcccagcacgttgggaggccgaggcaggcggatcacctgaggttgggagttcaagaccagcctgtctctactaaaaatacaaaattagccgggcatgctggtgcatgcctgtaattccagtgactcgggaggctgaggcaggagactcgcttgaaccagggagacagaggttgtggtgagctgagattgtgccattgcactccagcctgggcaacaagaatgaaactgcctcaaaaaaaaaaaaaaaaaaatatatatatatatatatacacacacacacacacacacacacacatataatatatattatatatataattaacatacctacaatttctatgtaaactgtataaatcatttttcatctattcatagggcttagcaaccattaccacaatctaatttttgaacatttttgttcccctgaccctgaacccattagctgtcactctacctcacctaccattctgacctcttacccctaagcaaccactaatctactttctgtaaatttgcctgttctagacattgcacataaatggaattatataacatgtagtcttaacaccataactttctaagttcttgtctaaagttgcccccctttttatctgtcatttttctactttctacttgtttcaaactttcctaatttgagacacttaaaagtggttacattttgcaaaccaaggccatgttgcttttcattttgtacctttttgtaactattgaacttacttttttttttttgggaaggagtctcgctctgtcgcccaggctggagtgcagtggtgtgatcttgtcttactgcaagttccgcctcccaggttcatgccattcttctgcctcagtctcctgagtagctgggactacaggcgcccgccaccatgcctggctaatttttttgtatttttagtagagaacggggtttcaccgtgttggccaggatagtcttgatctcctgacctcgtgatctgcccgcctcgg

SEQ ID NO: 8280 - DNA, 1474 bp, Homo sapiens
agtagaatttaagtattttactaaatgtaaatgaattttcaatgtagattaacttttacaatattgtatcttgctcaactacctgaagatactgaaaacatggccagcgtctaaaattttgatggattcatctatatcattgattcaacatctgctgtaaatattaacaaagaaatgatataatttccctcagatcttaatttagaaagttggtgattgcagtcatttttgtagtatccctctttctaatcacgttttgtcagatgccggcaccttcttttctctttgaggttctatgaatctttcattcttacctgaataatttcacactctccattactcatgtcctcctaaggtctcctgtggagagtgaatatttccatcgcacttacttgctactttcaatgttctcaatgtcctattggactcactagggcttagctctgtggttgacacatagatatgcagattttcaaatgtctggaatgtgttactctactacatgttttttgaaatggaaacagatggaatgactggctactgtaataatactacagcagctccataatgcatgaaatcctaaaaagtatgtaatattataagtatcttttcaatacaggtttcattgctattattcatcagtttccgtttagattacctgttccgatttaataacctttgataaatttgaaaaatttgtctttcaaacagagcctgttagtattaatgaagaaaatgagggatttgaacataacacacaagttagaaatcaaggaattatagctttgagttaccgtgactgggaggtaaagctctgcctgttgcccctgcatagttctgactctgccttcacttgcagtaagcccagtgcctaaatgttcattattgtctgccaggagattgtgaagacctttgagatttcagagcctgtgattactccaagtcagaggcagcagaagccaagtgcttgatgctagctgaaggtaaccttttcaatgggatggctacacagttctattaaagttcatttggcaatccaaagtatcccttttccccattccagtgaaatttgaatttttgcctccctgtagtgccccattcttagaactgtgtgtaacaggtgagaaagggatagtggttctgcgttcccttctctggattgattaaatttgtgctgttaagatttgcagctgaggccaggcgtggtggctcacgcctgtaatcccagcactttgggaggccaaggcaagcggatcatgaggtcaggagttcgagatcagcctgaccaacatggtaaaaccccatctctactaaaaatacaaaaattagctgggcgtggtggcatgcacctgtaatcccagctactcaggaggctgaggcaggagaattgcttgaacccgggaggtggaggttgcagtggctgagatcgtgccactgcactccagcctgggagacagagcaagactctgtctca

SEQ ID NO: 8281 - DNA, 1028 bp, Homo sapiens
gtgagccgagatcatgcaactgcactctagcctgggtggcaaagcaagaccctgtctcaaaaaaaaaaaagagttcgggtgtgcaagagagaagaaaaggagtttgggtgtgcaagagagaagaaaacgttaataggccagtaagtaggtctgtcagcttgataatgacttttttcagttaagaagaatggaagaatctcatcaagaagcaacagagaaagaagtagaaagaatcttgggattgttgcagacatattttcgagaagatcgtaagtgtaacaccattcaaagtggagcaatttgtatttatctgttcactgaggttacttgtatttaaaaggcaatttcagctgtatgtaatatttgaataaatacatatgcattttatgaggattcttctcccctttagaaatttcatgtgaaaactttgaagttaacgttttcatttttatctttaaaagatggggattttttttgttacaaaatgaaatatgccattcaagtgagaaatgtcaaaagtagctgttccacctcccctcattataaaatgtaatgtgtatattttcagattattttatcagttttatacacacctacctaaatagtttgttttggccgggcgtggtggctcacacctgtaatcccagcactttgggaggctgaggttgggagttcgatacccgcctgaccaacatggagaaacctcatctctactaaaaatacaaaattaaccgggtgtggtagtgcattcctgtaatcccagctacttgggaggctgaggcaggagaatcgcttgaacccgggagacagaggttgcggtgagccaagatcacgccattgcactctagcctgggcaacaagagcgaaactacatctgaaaaaaaaaagtttgtttttttctttttttccaagctaatcataatatgcacattcttctgctacgtgacttttccatgtggacattcttccacatcatttcatatagatctcccttgttttgttcactgattcccattatatggctgtac

SEQ ID NO: 8282 - DNA, 1025 bp, Homo sapiens
tggattggcattttgagctgggcatgtctttgttttgggggctgttactgtgcattatatgatattcaacagcctccatggcctctacccagtatatgccagcagcatatcagttgtgacacccacaaatgtctccaggtattgccagaagacccctgtgggcacgtatacccaggttgagaaccactggtctaaatcatttcactttctcacccaaaggttttaagtacattgaggaatgttttctgccaaaaagaaggtagctttggaagcaggactttaactgtaaagttatcttcacagtaagaaatttagccagcatgttaagacactgaaagctggctttgcgtctggcctcttaaaggttgagtgatgcggattattggatgtggaaaatgattgcatgtggcttaactgggttttttgttttccttcatttttgtagctcacacatatgggtgtaaatccgctagaagctgaagaactcatccgtgatgaagatagtcctgattttgaattcatagtctatgactcctggaagataacaggcagaacagcagaaaacacctttaataaaacccatacattccactttctgtaagattattttaaaaatccaacagaccagttatttgtgaaccttaaattgctttttcttgtagggacaaagattatttggtattgtagaggtgacagtcatgatgccgttgtttggagacttttgaaactttgatatgaaagttcataaacactaggccgggtgtggtggctcatgcctgtaatcccggcactttggcaggtggatgcaggtagatcatctgagctcaggaattcaagatcagcctgggcaacatggcgagaacccatctctaccaaaaatacaaaaaattagcccgctgtagtggcccatgcctgtggtcctggctacttgggaggctgaggtgggaggatcacttgagcctgggaggcagagattgcagtgagctgagattgcgccattgcactccggcctggctgacagtgag

SEQ ID NO: 8283 - DNA, 1047 bp, Homo sapiens
caaagaaaacatattcagttatttaggagttatactcttgcttttttctccttcaaaataaaaatgactttattatttaatttctttctgattattaaaggtgatacaaaaaaattaaaaagcaaaaaggtataggaaattcatactttcctaaatcctacaatatatttaaagataaactattattttttcagaaatctctattgtgtgtatacagaatatatgtagttatacatatacacatacacatatctttgtaagtatatggacacagttctctctaaatgctttcatactgcatatgttgctcaggaacatttttcacttgaaaggatatcaataaatacagctttctatggttttatgaatattatgcagttacctattcatggatatttaagtttcttcaaaatttttaatagcatgttaacagtggaggctcacataaagagaaataaaggattagctaccaggcacctgagatttcttcatttcctatagtggcatgtagacatatctgaatttcttgatatttattccaaagagaaaagatcatctaaagagctctcatctcagaaaatgtgaccttttttaaattgtggtaagaatacttaacatgagatctaccctcttaacaaatttttaaatgtacaatatggtgttgttaactatagacactgttgtacagaagatctctaaaacagattcatcttgtaaagctgtaactttatacctattgaatagcaattcatttctccttccccccatctcctagcaaccaccattctactctctgtttctgagtttaactattttagatatgtcatgttaatggaatcatccattatttattcttctgtgcctggcttatttcacttagcatgtcttccagattgatcatattgtcacatgacaaaatatccttcttctcaaaggctgaatggtatttcattgtatgatattcattcaatgatatttcatttcattttctttatcaatacatcagtcaatggacatttaggttgtttctgtatcttggcggttgtg

SEQ ID NO: 8284 - DNA, 1057 bp, Homo sapiens
gcagcagtgtgatagagtagcaagagaaacgatttgatgtcaggtaaagtgacttcaaactcttgtcctgcctcttcttagttctgcatcctatggcaagttaattaatatttttttcaatatgaattcctcatgtacaaaatctaaatgataacactgtaaggatcacagaattgatgtgaaaatttaaaataagtaatgcaagtaaagaactccttgtagatgttgtgtggttcacaaatattaatgtagtaccagtattataatatgggctgagttaagagaaccaggagagctgaagattatggaaaccacagaaagaagaatttcaaaaaagatggaaatgtatacttttcttcctcccacaccatgttctcacctggatacctcaggagattcctaactggcccacctgtcctgctacaatctgttttccacaatgtaccgagaatgacctcaaaggataattggatctcatccttctcctgtgcaaagccccctgactgcttgcctccctttgtacttagaattaatcctgattccttaccttaatctctaaaatgtaggccctgcttgccttctcaacctcatctcctgccatgtttccttgggcagcttgctccagacattctgatatgtgtattccgtaaatatctagatatgttcccacctccagacctttgcactcataactgttctctgtggccagaactccctccctgtgatacttctgtatctgcatttttcttattcagatctcattttaatgttacatctttaatgacacctttcttagccaaccagtgtaaagtagcatgtacctccaaatccgtatcagtttcatcagtgcccttttgaccactttgttgttgtttttgtattggttgcatgtttatctcactaaaagacaagcttcatgtaaacaagacttatctgtcttgtttatggctccaagtattatacacagtcatgcatcaattcacagtggggatatgttctgagaacaaaggtgattaggggatttcatggttatgaaaccatcatggtatgtacttgc

SEQ ID NO: 8285 - DNA, 1049 bp, Homo sapiens
caagcccagaacctcggccatcccatagtcaaaggaactatagtccagtggcaggtccaagcagtgagccaagtgcccacacgagcactcccagcataggaaacagccagccaagcaccccagccccagccctgccggtccaggaccctcagcttctgcaccactgccagcactgtgatatgtactttgcagacaacatcctttacactattcatatgggatgtcatgggtatgaaaatccttttcagtgtaatatatgtggatgcaaatgtaaaaacaagtatgattttgcctgtcattttgcaagagggcaacataaccaacattgattgaaaatagtcatattttacttagttttgctgtttttgtggtttggttttttttgttttttgttttggtcatccctaataaagtgtctgctaattcaaggcttatacattatatttatagaatataaatttgtcagtggaataaaatttcccctttttttcataaaaatctggtcagggtcatttatatattagaacagttagacacattggtgtctcttttttcctttcctttcgacattggagaattggagtgcagtcataatcttacaagatgttcatttgaatttctcacatttatggtccataaaaacttcaaggcttatccatacttttgatgtttcaatatgcattgaactggatgttatttctgccatatttcaaaatggtagaataaattacagaatttattactactcatttcagtgtttagtacagaaattgccttaaaaattgctattaattgaaatatcatttagttcacattccttaagttgaatcggtagtttcatttcaactgataatagtaaagctatttcagtttagtaaaaattttcttttttccacaagaggaaatgtaaaacagttaagacttgaaattgaaaattcttttaatatttaaaataacttgtttattcaatgtctaaacacatgtcagttttccactggatttttattttcacaggtaaatacactagagtgctagatgcctttttcccc

SEQ ID NO: 8286 - DNA, 1033 bp, Homo sapiens
ggacgctactggcatgacaatactttaggtataccctagccagtttctatatagatatccacctacaccccatggaattccatactatattcaacttaactttaatcagaataatcacaggaaggatttgggaattttgctatatcataaggaacaatcatcataaagtatggggatattgttctctttggttgatatgattagatatcttagttcaggttgctgtaacgaattaccatagactgagtggtttaaacaaacatttatttctcacagttctggaggctgggaaatcttaatatgaaggtgccagcagatcaggtatctggggagggcttgctttctgattgtatcctctcatggcaaagagcagagaggaagcaagatctctggatctcttcacaaggcactaatcccatttagaggacttcacctttacaacccaattatttctcaaaggccccactccagatgccatcaaattgggggttagaatttcaacatatcagcttttggggacataaacattcagtccatgacgataccagcagaaagagtacatctgagttgtaataacaccacccacatctgtaataatactggagaatacttaagtatatttcttgttcagatgacatgatatcatacattgaaattttgtgttaagtaagtaattttttggctaacaaacaccaaggtattgagttcatgtccagtataggaaagataccactaaaaaaattatagcttgtggattttctaaagtatattttgttatgtttgcaaaggttttaaaatttatcaatgccttagaggcatctctgggtatcagttaatttgtggagttcctagattaaactttgagacttgagactgatgataattacatcaaagacaggaaaatggctcagatagaaaacctttattttctttctataagaggaagtcttttgtagttccagaaattttttttttcttttaaaaattagagatgaggtctcgctctgttgcctggactggtcttgaactcctg

SEQ ID NO: 8287 - DNA, 1045 bp, Homo sapiens
aggcgggcaggtgatggcccgggacctctttagccggagggcagtggactgcggcgcctatggccgcgagaaccccgagggagcggggtctcctgctgtcattgccttcgagcaggagctcggaggctccggggcggggactgttgcttggctctgacaggtggttctgcgggaggcgtcccgaggtttgcgtcttcacggggtcccaggggctgggagtcagccgggcgcgggtctcctaggtgtttcgaatcctggcgaggatgtcgctccgaatcttggtgaggctgctgccccgacgccggtcccaggctgattgttgggagaaggacgtttaaagccttcgtattttatctaatgatcctgcccggatccgtctctactgcatgggcacccttattttaggaacatgtgagatttgagaaagacattgtagcaaataactattcaggttcattcggggtttagatctttggataaactgtgtggagcgcgagtagccaagcctagcatgctcgatgactggatctgaagctaaacaagttctagcaaacactaaccacgtggcctgcttagagtccccttgatgtgctggtcagaacccgaaagacgtgtgacaagcggaagaagacataaaggcgtcttaaattgtgtgatctgaggaaattcagttttgaaagaacagaatgtatttaaaacaacttttttttaaacgtaggaactaacaattttaaaaattcaatttaattttgatttatgtcgtgttgtcacaacagctaaaggttattattattgatgagagttcgttacagtgaattgaaatgtctggtgttattttcccctagcggtccaggatgtttcccagaaaaccgtagctgttttgtgttatgataggataagaaggatgggattcagatgtgcccttatcgggtgtgcatgttttttttgtttttgtatttaaagccctttcccatttccctacttaggactatgcgttgtttttatgcaactacagctgttcagcagtactaagcttgaccgtttt

SEQ ID NO: 8288 - DNA, 1050 bp, Homo sapiens
atgatattagcataaaaacaagacatatagactaatgtgagagaatggagaacccagaaataaatgcaagcagttatagccaactgattttttttgacaaaggtgtcaagaacacacactgggagacaggacagcctctttagtaaatggtgctgagaaaactagatattgacattcagaagaataaaactctaccactttctttcaccatattaaaaaaaatcaactcaaaatggattgaagagttaaatgtaagacctgaaactgtaaaactactagaagaaaacataggggaaatgttttaggacataggcctgggcaaggattttttgttgcctatgctcaaaagcataggcaacaaaagcaaaaatagacaaatggtattatagcaaactaaaaagcatttgtacaacaaaggaaacaatcaacagagtgaagagacaatctatagaataggagaaaatatttgcaaactatgcatctgacaagcggctgatatccagaatatataaagaactcaactcactagcaaaaaactaaataattgaattttaaaatgggcaaaagatctgaacagatatttatctaaagaatacataaacattgccaacaggagtgtaaaaaaatgctcaacatcactaatcatgagggaaatgcaaataaaaaccataatgagatattacctcaccccaagtagaatggttattaccaaaaagacaaaaaacaaaagaaatactggcaaagatgtgaagaaatgggaacccttatgtaatagtctgttctcacgtggctaataaagacatacctgagactgagtaatttatgaaggaaagaggtttaattgactcacagttccacatggctgcaggggccccacaatcacagtgaaaggtaaaagggaagcaagacatgtcttacatggcagcaggcatgaaggcttgtgcaggggaactgcccttttatacaatcatcagatctcacgagacttattcactgttatgagaatagcatgggaaaaacccactctcaagattcaattacctcccactg

SEQ ID NO: 8289 - DNA, 1084 bp, Homo sapiens
ctgagagcagcgtgtgcagaggcccagtggtcagcaccacctaccatacagaacgcagccagccgcctggtgtgggagatggggggcactgaggcagggggcttgggtgcgtggcacatggggccgcaccacctggtctagcctcagaagaagtctagacatcaccctgagagagatgggacccctcagagggttttaagcagaagatagtgtaggagtggaaaaggaatatctcactactgtgttcatggctgaggcacctataataaaagactaacgcgagaaagcacacatacttgtttaacgtaaatttcatgtaacccgggagggagccttcataaggaaacggagacccggagaaacgggaaacctgtgcgtgtttgtgcttgggtttgatgaagagagcagtcggggagagggccatgattgtcaaagggggaatgactcaatggctctgtggccaccgtcacaggggacacagggtctcggagaaactctatttgtgtgtggcttgaccagcacagcttgtcgacccggcttcgtgacccagaaccactctcagctgtgactcttggccctggacccctacggagtgagtctgagagagcaggcagggcagcccacccggtcctcaaggcagctccctgagggcggtctcagggctggggctggcaggaggaaaggggcgctggcatgacgcctcaaggtggggttgtggtttcttccagcactgatcatgatgctgagcagagaggggtgcccagtgtgctgacagacacgaatcaagttgcagctgtgactcaggccaggcccatttcgtgccacatctacactttcctggtgcaggtggctcttccatcctgcaggcctcgcatggaggaccttcagtcctggcataaacagtaatagcagcagctcagagccagggctattatgggtcaaatgccgaggttggcacacaaatcggggaacgtgctcgcggactgggtttccccatcatcctaccatgcctgattcaatccacccacgagtccttttccctctttttcccagtatttctagagagctccactgttctaccctc

SEQ ID NO: 8290 - DNA, 1032 bp, Homo sapiens
ctaggaaaggaagcaggcttttaatgaaatggattctgttataggcagtcactcatggggacacagaggaatagcagggctgaacatttgggcaggaatcctggtttcatcagtttcactctgtctgcagagtgtgtgagggggcctcagggtggtgcacagctttcacccgctgagtgtctgggaggtgtaccggggtcatggtggcaggaacacaggcattggaaccccagccctgtcacttactgctctgtaaactgggacaagaaacttaacctctctgtgccttattttctcatcggtaaaatgggggaagatagtcctacctccagggtagtgagagttaaatgacttaatatttgtagtaacgtgtttaaacagtgcttgacaaatggaaaatatgtaactattattattattaggtatcagttattactaataataacaataaactgatcactcatttactcactccccagagttgcaaaccacataaccaagttttggtcaacagtggaccccatatatgatggtggccccgtaaagttataatcccgtgttttcattgtgccttttctatgcttcaatacataaattctaactcttatgttacaactgctcacaggattcctgcggtacaggctgacagcataggagcagtaggctgtacctcgccacctaggtgtgtagggggctgtgccatctgggtttctgtgaacactctatgacattcacataatgacatcacctactgatgcatttctcagaacatatatatccctgctgttaagtgacgcctggctgtatttattgaacacccttgatgtgctagatgcaagctgtacataggagaggaaaatccatcccgtttgctctcatggagcctctgtctagttgagggagtagggccaggcttcatgtaaatgactgagctggggcagcccctcagagctatctctgggtgaggcttctcccatccacccatcattggacaggaccacctgtggaggcttaaccttggttgctgctggt

SEQ ID NO: 8291 - DNA, 1093 bp, Homo sapiens
gacttatgtgcctaagtcctgacttaactcttttttttcttttaaactcaaagaaattaagtcactgggagtcacctccagtatgatttggctgttatctagttttttgcaaacttgggagtccaaactccccaaatctcaagtctgacttacatttcattgtgactcctataccatatgcctctgggaaaatcacatgttcttatgaaagagatgaaaatatgtattctccggccaggaaacagagactaagataatgaatgaaaaaggaaagcctcagtttggtctcctaattttgcttgctccaagattttaaaaagaatgaaaaataaaatcactgtgctgatatttacttaaagcagagtttggtgagttctatggtagtcttgtggtgtgacaagtatctagccctgcttgggccagcggccagctctgtgccttgcggccgttcatttttcctgttcctggactctgtctgcacctctgcaaagtgggattgttggaccaggtcagttctagactccttccagctctgaaatgtgactcagctctgccccagcgcttcctctttgttagattcggggcagaaacagcaggatctttcatcatcttgggcccctaggtcagagaggacctttcttctgctgtctttttgacagctagagtcacacaagaggttcaggattcaagtggcctgaacgtgatggctgaacttgaggccggagctttagacatgttgaaagtctcctgcctctactcccaggtacccatcgtggtactctttgtttcttgaattgccatcgtcccccttatgtcttaaggtccgagagaggaggggccgtgctttcctcccctgatctgtccctggtgccaagcacaatgctgagcacggattagacactaagttaatgcttcctggatggacgaaggatggatggtggctggatggaaggaagacagtcaggtggatggacaaacgcctccatggctctaaaaccagttcatttttgagatctgacagaatttgtgccaatttagctagagagttcacttgtcctttatattcttattcattgtgagtagaattttcaag

SEQ ID NO: 8292 - DNA, 1052 bp, Homo sapiens
ctgcatctagaagccaacttgacaccaggcagacaaacaaaagggaagcaaacacactttgttagttttacctggacctaggaatcttcacgagagagtgaagtttgaaggagtggccaaagcaagatgtttttagaccttttagacaaagaacaatccatttcagaagagacagaacagaagggacctggtggagtaatatacatttctaggggagtctctgggagatctatgggatgtgtaacggcagtggaagagaagggttactttgtgaagtgtatttatcctgggtcattgcagccccaagttcccaggctgtgctgaggagggccattttcttggcctggcaggggaagggtactcctcccagaggagtctatggcttggagtatgcaggaagagacaggtcagctggccctttctgaaactataatttctccaatgttttcgactcaaaataatcaacatatcaatttggcatgttttgggatggctcatccttccacggtgtgcggggtactagactctgggttaagcattttgtgtatgtgacctcatttcttcctcacatccacagtaggagactgagatcattttattcccattttacagatgaggaaacctagtcacagaatggttaaattcgttgcctgagatcatagagcagttacagacttgattcgggttgaaatgcaggtctgcccaactcccaagcctggcataatgtcttattttcgactgcttggaaaccatttttcctacatcccatctttctaccaagttgagaatcagtgagctcaggacgcaggggaggcgctggctgcatattgtagagatctgatcttggggaaatgcctgtttattatggatatggcttatggactaaaacaatagcattgaatgtacgttgtatgcatgtaaggtagttgtgattaaccaaaaccaatgttgatgacgaacttaacagagagtcaagtgtgctttaaaaataagcttaaaaaactgcctgggttttgtatgcacagattttgggccagccaggaagatccctc

SEQ ID NO: 8293 - DNA, 1077 bp, Homo sapiens
attattgattgtgtcacaaagacctttagagtcttttgtgcacattgaaatcattgggggggagaactgcagcatgaacatatttgaagtctctggtccaccctgccccttcgctgagaaaacctgattattttgtgcatttcagagagactgggacatctgctgtgtttggcccatatctcgggtggttgcacaagggaggtggagctgattaccctattagagagcaagctatcacagaataggaaaaagaccccattctccctcctgcctgccacggccagaggccctggttcactgaatcactgctgttgttaccacgcttgtttggcttcctggagcagagctagttcttctgcagattctctggggctgggtgggcttcacggctgtccttgaaatgggatatacagtcccgaatgtgggcatttttctggagcctctggagtctttgttctggcgttagatgggatgttcccagaggacccaggctgttcatttatttgtctgtacgaacggacacgctgcagcccaggcctgtacgactggacacgctgcggtctttgtctttggagccccagcaaatgcaagccctgcacatagtaggtgtttaaataaagaggtgcaaaagtgcgtgggccactaatctggagaaaaccctgtgtctcttttggattaattatctggctaataaagcaagcgctgcgccggctagtcaacgctcactgcaaaatcactggcctctgagcagccctgaaagacataacagatgaagataatgagtttgtattaaggagaaattaacttcagatcatacacccatgagtgttatggccaaaaggggtagtcccaaatccatatcttatatacggagaaacagaggccctgagagatgaagtgatgctcagggtgaccagccaggttagtgatcaggacaccaagtagctccctgccttgctgggaaggtccctcctttgctgctctgaagttttaaaatgcaaattatcatggaagccaccacctgggccgcagcgtgtccggtcatacaggcaggcctgggtcaaagtgtgtccggtc

SEQ ID NO: 8294 - DNA, 1053 bp, Homo sapiens
tgaaaacctcagaaaaactaagtcaaccaaagactttccagcgatgtcatcgactgtgttgtcatccaaaggggaaaataatcccagcttatgaatatttagaaagaagataattgcaaattgctttgtgaccgtgtaaactcgtttttttttttctttcccccagccagttacataagaggaggtgtgggtcagtcccagaaatagatgcagaagcagtgacagaacacgtcttggcggtggtggagagagacagccctgggttcgagtcccagactcgcagtgtgttagctaaagaagtttgagaaacatccgtctctttctttccatttcagcctcctcccccttcccctagctggtcgacgctcaaagctctcctagcccaacactctgtaacttgaggaataatgttttaaacccccaaatctagtcctcccataaaacccagtgaatctctcaaattgattaaatggaggcactcattttattagataggtaactggtattttgccttttctgaagggtagaagaggggaaaaagtgactgaggggaccaaataagaaaaaaaagacaaaaagacagaagaattcgggtttttagttgattccgaatactcgatgcttttgaaacgtttccaagtttcctttacgggaaaggaatgcaaatgatccaaaagggaggagggatttttttcccccttcttttttgtcctgagctcagtacctgggattttgcggcatgtgctgaaaaattatatcttctgggtgcagaaatttgcctgaaagggttatacgaaactgagaatgggtcaaaacaaaacaaaacggaaaaaacaagacttctggccacaggtaagaatcatataatttactgagacatatcattttggcatgttttgttaagggtgaaagctaatttggaagaggcaggaaggggctcttgaggttggtgggaatgagctgccgtaatggggcccgcagaatcacccttgtgtctgctcccagcaggactggcgggggaggggcagggagtagctctctgtgggtgtcggg

SEQ ID NO: 8295 - DNA, 1058 bp, Homo sapiens
gtcatccaatgtactcttgcctgttttcctttcacccatctgtctgtccatccaatgtccatctgatgtccgaggcccagaacatctccccatccaccagcggccgaataagaacagcaccttgtggcgccagcatctttctagttctttctcccctgcggtgatgggcggcccggctgcttatccggggaataattaaattaggaaccaattcagagaatgaaattttatctgatttggccaagcccgtaataagcaaggggctgtaattgtgactccaggatacattaggaagttgttttttcaagggtacgctgggtgaaagcattgaaagaaatatgtggagaccaggccgggagatctccctgggccaggtttcttgcatggcctgggggtgtggtcccacagggcggctgtgtcctcaggctggtccttccagcgtttatgtttccaggcaccatttagctctgatgaggtagataaaagtgttttgtggctggagtgttctctgtgcttaggaaagttctgttaaaatccttatggatatctatctcattgttatcactgatattctaaagcacctttacaactgtaataagaagtaaacttggcagaaactctgtggctataaatcaggggtgccgctttgcaacccccacggagcttattgaaagaaatgcacatactttggtcctacatcagctgttacatcaagtctccggggatggatgctgggcatttgtgtgtgtgtgcacgcgtgtgtgtgtgcatgcgtgcatgtgtgtgcatgcgtgcatgtgtgtgcatgcatggacctggattcgttaagctctttagctaagaaacgctgagggaacttagcagtgattgtaatcattcttctaatgagaatttccagttctcctatggcaaagataagggacagataattagcacagtggtctcaggaatgagcctcatttgtcctcaatctgtgatgagactttgtgactgtctttgagtttcatgttcagattccctgattgtaactaacacacattgttcatcacttggtagca

SEQ ID NO: 8296 - DNA, 1027 bp, Homo sapiens
tctattgggaagggtgtcactgcatcagagagcagggcacaggagccacacccattgtgggcccagggactaagaactgatggctgcccatcatgcctgcggccaggtccctaggctggaggtgaggcgggcagagctccttcatgtactcgtgtgccatgtgttcattcagcagctgttgaatgaattgccatgatgtagaaagtcatctgcatgaaccttttcatataattcctttcaccaaatagatcctacagctgagcctctgggatgatttggcggggctaggacagacagggtcccagccctcatgggatggggacaagcggaattggctgtgtagacagacaaatggtccagaagctgccataagagcccagaagggtggtgatgcaaagcaaggcttgggagcaggggtcagggagtggagggtggactcgggggagtgtgaggagtctccttttcaggtgtggacattgaatttcagagcagtgggtgggaggcacccaccccctgaacaggggatgctcaggtatgatattaagttgggagtgacttgcccaaggtcacatagccagtaagtggaaagtcagggggtctctgatctccagctcttggccagctccttcatctccactgtactgggctgaggcctcttagaaactcccagaggtgtggacactccctgtaattggcagctgtcatttttcccatctacacgttcaggccctgtccccgttcctagggcctcagcaggcccaggattgcagagatgccatttggagcatatttgtatgaaagaagagtcgtctaaattctaaaagcagagactgtttttaaaagtggtagctgacttgggagtgtcattgatctgagcaatcagccagcggacttctctttagcagcttgtgatttggaagtgactcagtcactggtgagaatcacgcagcctccctccccttctggtctgtaaaggggatgctcaggtatgagattaagttacttcaaagggtcactctgttccagt

SEQ ID NO: 8297 - DNA, 1043 bp, Homo sapiens
ctgcctactttgatttgcagtagttgatactttaaaacttcagtcctggcttatctgcctgtcccagggattcctgggctcccaatagtgagccaggatggggaagagctagctccatcagcacacactacatgtggacagttggactggactgttttttaaaagcacaaactcaacatttttagatcttcgtctaggattctgacttgaaaacaattcttgttacaaacagactctttatggtggtgaacaagcagagattgtaagggcccatgaaagcaatacttgggtgtgaagagccgtcatattcctaatggattcacctccaggaatctgatacatggacatgcattttaactgctgcttttattacctcccttaaaaaattagttctgtgaaattcccttgccacttttgcttggaatacatttcctttagttttctacctaatataatcttgtagcccacgtctcagaaacccagaggtccccagttgtgtcatgtatgtttcattctcacttttgattacttgaggccagccgagatctgtgtggataccatattccttgctattttttggtagcctgtgctactaacaatcaaatttaatggtcaatggcttcaaagtaaagcaccctgtttggtattatggattacattccatgactatgatcttgaaatatctagttctgttatcaggaatgatagaaaatattccccatttctcctaaattaagtgaagacttcatggttcatgtgactctcataatatttgatagtatgtattatttaattacttaatatccactaattagactcttttccttctaaagaagaatgtcccccaaacaacacattgtaactttctaaaagacagttggtgccagatgagattaaaaatgcagttactctactagataatattcaccttacacttcggtaaacactcctttaataactatttgttggtttctcaaaagcaatatcccatattaaacagacaattcaaatgtgacaattcctctgtaacaaagaagctgaat

SEQ ID NO: 8298 - DNA, 1139 bp, Homo sapiens
ggggtgggtggtgcttttcccctaaggccatggtggttgctccctcgaggattttagaatcttatctctgagttccccgtgactctcggctcctgttttctagtgaacatgggcctcagtgatgacacatggttgtctggcagttcctttttgtggtagccacttgctgatagaaggagaggcacctccccagtgggttctgtgctttctctgaagcaccagatgttggtgccaggacagagttggctcatctcctaacttgggctgagccagtgatggtctcagccagaggctggggccctgtcctgaagctggtcttggggtagtgttctcactattccaccacagctcacacttcccatctgcactggaagggttactgggggctcagagttaaactggccccagcattattggtcactgtagaaactgcaacatgttgaagtgaatccaacatatcgaggaagaggtatgtgtgtgacgtgtgagcatttacctttaagggaaggaactggatgagagccagtcggggtccgttggaggctgcccgggactctggacagcccctgagggtgtctgctctgggcactgtgctggtttcttcctgttttgtcttactggttttgtcttctgggtgctttcagcctctcccacacacatcatttgtcacctaggcggggtatgctccagaggaaagtaaaatacccacagcctttgtcccttcctcccatctggctgagggctcttcctagtgtggggtcagcggggcgtgccctctgcggcctttgccgggctgttgcctcactctgctctgccgcagcgggggctgtctttttcctcctcctctcttcctgcgctcggggctgtattgcatggtggtcagcgcctgatcccggattcagactgctggcacctagatcctccccactcactccctgtgtggcctcaccaaacctctgatgacagtagcgccccctcccaaggttgaggtgagggtttagtggggcgatcccatggagctcagggtaaattcttagtaaacattagctctgccatcattcgaggctctgcagctgctaggacaccagaacgaacctccagaaatgccctgcctttgttcccaggacaagacaagattc

SEQ ID NO: 8299 - DNA, 1046 bp, Homo sapiens
ttcgcatggctgggcgcagcgtttcattcacaacatgcatttttctcacaatgcttcctaattatttcctttggcaaggataggagcctctttctttaggatagcacctgagttcccagagccacagtttttccaaataaggaggcatgtggctggtgtccagcagatcccttaatggctctgaatgcccctcctccctgcgtcctcagcaacctggcagacttcagcccaggaagggtgctgattggagctgcctggtcggcttccagaaggttaccaggtgggaccgggctcctggggctttctagctgagtttctgcacagcactggtcagtataaagaagctggagaatccagctggcatcaaccctgaactgggcagcaggtgttccagacctggccacacatggactcccccatctgtccagcaccttggaggtcccaaagtgcgttcttgcatcctgttcatttcttcctcacaggatccctctgagataggctctgcgtgggccatgtggacaaggaaagcgaggctgagactgggagggtcctggccaaggttaccctgagaagatagtggttaagagagggctttgacccaagtctggctcatgagtctgaccccactgtgccagcgagacccagctgggcctctttgccctacagatgagtgccgtcagctgggccagtgtcctggcaggggcccgcagcccatcttgttcttgcaagacctcttgaaagtgtaacacggagagtgaggcctggccatccgggaccctggcagtgcctgggtattttcagctctgtgagatgcccctgttgagtccatcagggtccccacgccagagcccttctggcaagcccctgctttactccaaccctcctggcataaaggaagctggttgtcccagcctcaggcacagctcttctggaaatctggaggacattacctcctggctggccttgagcttggggctgcatctgagaaacatatccaagcctatgggcttctccccattcactgagcagggataaaaatcctatca

SEQ ID NO: 8300 - DNA, 1058 bp, Homo sapiens
gaagcccctcccagcccgaggttagcatggtgcctgcgggctgttgagagcccagtgagggccagagcaggaagcacaaataggtgcatcacggagatgggtgtgggatggagacggagctgtgcccagagcccagcacggctggtgcctgaccgggccttttcccgacaccatgcaggctgctgccctttgtgggtccatcagtgtgaagcctttactttagcccacttcgcctttggcagcatgagcctctgtcgccccaggcactgcatcagtagagaatttctcctgctgacaggagcccatttatgtaccatttttgtggtatcagccatccggaattaccactctttcttgcaacttcaagccacagtcaagaaatcagaaagcaaatgccacacgaagaacaaaccctttgctgcagtccccatgctggcgggaacttggtttgactagactcagagtgggtgttaattgcctatttatggccaaaagattaacaatgcctcctttgaaagttagacatagtagagctcttggataattcctttttgggagggggaggagtggcttaaaaaaaaaaactcttggaaaacaaaagcaacagttggttgcaaaatataatgcaaccaccagaggcttagtttgtgagcagtaacgcgagctcacatcagtaatgtgtcaccagaggtcatcaggcaccccaccctctccctgaagggccacagactgcatttactcctcatggagtagtggtggcggtatggaggcccccgctgtttccctgctggagctctgtgggtggagtgggtgaggcaggcctcctggatcagccagggcctgttggggacagaaaccagcccgttagatccaggtgaattcactgtgagcaatggttagctaggtttctgaaaatctgaaaagccaagaagagaaaacgaagtattaatatcatgcagaagcagctacaggaagctgctccccaccttgggctaggggaccccagggcagagactgcacttctgaaagcttggcagcgtggagtccattggccgcac

SEQ ID NO: 8301 - DNA, 1049 bp, Homo sapiens
acgaggagacagagggctggtgggagagcagggcctcagcctggagccctgcccatggagtgagccccatcctcatcctggacaactgatggaacctcttcatggttcattttccccatcctcgaggaagggtggcgacaccctctctcactgtgttaaatgtctcattaaatgaattcatttgtatgaagcgcttggagcttagttctgtgtgcccaggacacgtgctcagtaaaagttggctgccatattgggagtcacactttaggagtaaggggagaaatttggcaaaaggaggggcctgctgctcatccagtgtgaactgtcctcccctcaggaattctttgtctctgcagcgctgaggtgctctgccgcatccctgctccccagaagaaggcctcacctgagggcgcagctgagttgttgagcggtgctgctggggtatgagtcccgggctctgtaactctgagggcagggttttgccttattgccacgtggtagaggcctctcatatcctaagggaaagagaggtgcactgtcgttggaacacagctgctgttggagtcagaagagctgggtttgagaggcactctgccacctggctgtgtggtgactgtgagcccgttgccctgcttctctgagccttgggtttctgaccatgcatgcatctgcccaggtgtagccatgggcgtcaggttatctgggaagccaacacactgcaggttcctagacgttgtccaagagagtctgaattagcaggtctggggcagagccccagtacctcggggtcccagaagctccctaggtgagtctggggcttgtgggggcagcagagatgggcacattcctagcccagtgactccacagatgcccagggactagttttgtgtcatatggagatggcattgagagttcaggtccctcagtcaggaggtaccagctcagcctggattaggaagggcctgacctggaggagggatccaggtcctagggcgagtgcccactgagctgctgtacccagcagagcaatggtgtccccgcctgccaat

SEQ ID NO: 8302 - DNA, 1370 bp, Homo sapiens
aagaaagattatttccagttggtttttaaaaagcgtttatttctatttacaagcaaatattccctttcactgtgagctcagtgctaggggtacaagggcaggtggatggtgagaggcggggtgttggtgggcagactcactggaccaaacactggtaatcccctccggcccttcactggagccgtctctcccaggaagccacccctgcagctgctgcaagagatatacacacacactggggttcagtgtcccttggattatgctgatcctgagatcagggttgtgggtaatggtttccaagagctagcgattggggggacttattcctttgattatactgttgaaacatgaggccatcaggatgttgtgatcaatatcctctgagctgcctctgcaatcatccttgcccttcactgtagaagaagtatctggccacacgcccctgtcacttggactttatcctctttgtcttggagctctgccttgtgctaacactgatcttggatattgatttgaatgagatgaacttggagttaatactctgtcatcaggagcgtctctgagcccgagagttggctgcatctggttctggctggggatgaggaagtggtgctggcccttgtgacctctgactcaaggatgggcggatgtgatgggacacaacactgttggttctgtgttcatccaggaggccatcggttgcttaatgccacggtctgaccatcatcttttctggacttatttatataaacattggtctcgctgggtttcaaggggtaaagatcttcttgttgacgaagatggtttcagaggggttggttggaggggatggccttggtcactcagcattatggccagatccacggcaggcaggcttatcacgctcgctgcgtttcaggtgggcatagctgacttccttccaagcccagtgttgttctctcagttgggtcttctttccttttacaaagaacatgcagtttctcttcatggggttttgctcttctctcctttagttcctactcccaacatagaggtctacccagaaaagaagaggtgcaggtgtcttaagtctaaagcatacctggccccagagtccaaactttctggccacctttgttcaagagcctgggcactggctggggcattatgggagggcaagatggtggtatgcttgtgcctcccctgtgtcagtgggatccgcttgggggagagcctgaaggggtgtggggcagagctcttgcctcttctcagctagtttccatttcttccattgtggctctaggcgtgtgccaatctttttgctgtgtagtggaacgtttttgactttactagctggacagggattgaacacatttattggacaccaagag

SEQ ID NO: 8303 - DNA, 1036 bp, Homo sapiens
tctgaactgagtctccttctggtcatacaggcaaagagactctccagggagccagaggctctaaagtccatttaaaaacagatgagacgattgtgggggagctcatgtcattgccctgcttgtgtcccccccacccccatgttcttttcgtaagatcagtttagcaaaaccgccttcagaaagacacctcggctctcttgattttcccattgatgggttggtgagcttctccccaaaccaagcatagaatctttgtggccctgaggccaagttagcacaacccaacctacagggcaggggagagatactcattgtcagcacaagtagataggtgtgaaatgtaagaatgagtcagctggttgtgatctgacagcaggcttgctaatcggggcatttcgtatcttggtctgtacttgaggtgcttaaccttttctggaaaccacattctgtacttatgtgaccataaggcaccatcgaaaacatagcacagagctctctagggctataaagctcctctatcttttgaaaatatgaaggtttatagtcccccaagaatctggagccctgggaattttccttcaaatttaagggtaggaatggaaataagaacatttgaggtcaaatgccattcgtattcctctgagtgtttttcttgcttcaagctctaggatctgtgcacacagcagtcttctgcccttcttagtcaaacggtggcaggaccagagccttgtgagtgcgaatttgggaatttgagtccttgtctctgcatatgtaggcaactcattctcctgttctttgtggcatagtcaaaagtcagaaactgcaagctcagtcatcaaacctcagctttggaagagaccttgcttacctagtctgtccaagactgtgagagaactgggcccagggatgcttgtgtgttcaccctcccatctgcaggcaaaggctcttgtgtgtttacgctacacacaaatgcacacgctctcgtgtgtatcatttcagacttgtgaagataatgctcagtggggacgtggagaag

SEQ ID NO: 8304 - DNA, 1028 bp, Homo sapiens
gcccagcccgtggcaggtgctcagtggatgtttgtggatggatgagcttgcaggttcctgtcacctggcctcttctcattcaccattgtcttactctctctctggctgctgctccagttcacgactgagtgggtgcgactagagtagctctgaccaaaaagaagggacctcaagggtgaggagccatctggaggtcccgagggaggagccctacccgggtccagctgtgcagttggctgcagtggccgcctctgtgcttggtcccttctcagggtgggactgcctggtgttggcttcagagttggttccaggacatgtgggcccaaggtcagctgagctgctcttccaagaggtgtggcctgagcccctgccaggaggagcacggcctcccagccctggccagggaaggaaaactcatctcagaaagggaaagcagtcaggggagagcaggcggctttgctggaagggattctaccatgtgttctcttgtggccacacagattagaatctgtgctttcttcctgaactctccttgctttgttggaaagtatccttctttctgctgctttttgttactggcctgtccgggcccagaaccacccagtgtgcagtgctttgggtccatctgtggtcttcctcctcctcttctctccccttggctccagatgagaggtctgttgtggggagcagccctgttggagatgggctttctcattgctcagtttgcttatgcgcccagaacacattgactgggcgtcagtgcctggcccggcctggctcagcgctgcctgcgctatagcgtgggccagcaggaaggtgttggaggtgcagctacactgagggtcttgggaagtgtgttagttcatatcatgttgctatgaggaatacctgaggctgggtaatttataaagaaaagagatttacttggcttatggttctgcaggctgtataagaagtatggcaccggccaggcatggtggctcacgccggtaatcccagcactttgggaggctgaagagggcggatca

SEQ ID NO: 8305 - DNA, 1018 bp, Homo sapiens
cctcagacatgatttgtttgtctcatatgatgctttacaagtttttaaatttcttgggaacataaaaaggagattgtgcaaagaagtcctgactttcagtttctcttaacaagtcaggaggtaaattttaatagtagcctggatcttctttcccaaacagcccaccacagttagctgtagccagagccgtccacggtgggccaggcatgttctctgcacatcatctcggttcctatgcagcatgcttctctcatttgtgtttcctgcttggccctggaaggcatttgagtttgagatccctggagtggataagacattgggaaggcagattcagattttctggctctccaggttattggcacagggagaacgatggtgaatggcagtgactagtagaaatgcccaggatgtttgcagtgctcaaggtcattgccatcataatcctgctacctcgtgttccacctgctagtaaacttgcaaagataagccagtactccgggcactaataaaaactctgaaagtacaaatatgtcccttaaatcttggaagctagtctcaggccaggggcccttctaccctgtgaatggccctgtgatactgggtgacctggggattcattttgtacccccgcaccccccccccccccacaatcactcaggtgcttcacctagtgtaatcttcttatctacaagtgccttcctgaggctgaggcaggcagatcgcttgagcccaggagtttgagaccagcctagtcaacgtagagaaaacccatctctactaaaaatacaaaaattagccgggtgttatggcatgcacctgtggtcccagcaactgggaggctgagacgggaggatcgcttgagcctgggaggcggacgttgcagtgagccaagatcgtgccactgcactccagcctgggtgacagagtgagaccctgtctccaaatataaataagtaactaaataaataaaaagtgccttctggattttaatagatattgcaagggaatttttacaaat

SEQ ID NO: 8306 - DNA, 1071 bp, Homo sapiens
tggatcaaagagtaattttgtcctcagcaaccaaatacctctttaaaaaggtgtgtgtgtatatatatgtatcattcatgtatgtatgtatgtatgtatatacacacatgcatgattccagccagagctataattcatttcttattttcatcagtggataaaaagaacagacaggaaagaacagagggattaatgtgtcatgtgatccctacatgctaatgtaggtagggttactagttgtagctggacaaagatgtgggaaaatttacagaacttttttttctgagtaagacgtgaaaattgcccccatgataggttcagattttttatttccatctgtaaccagaaacttcttatattttccaaagaagtatattttgctaacatatttccagtcacctatctttttgaaaatacttaaggtggacttggtgatgtctgtcttctcataatttattataagcaattttaaaaaggttctgcttttaaaaagatcttttcaaatgtagaaagaacagtgtgaaatgtgaatgactggcttttaatacaagggttgtgacaaagaggcagtggcttttggaagccaaataaaggggtgaatacacgtgcatctgcatactgctgttggatccagtgtataacgtttggcgtttgtttagttcacttgttagtctaaaaaggatagtatgttattctctcaaaccagtttataattttttagtggtaagctctttttacaaccatacctacagatagatttgatgggaaaaactgaacatttgctggtacttgttcaagcctcaaagctcagctctttgtttgaacgtcacatttatctggttctaaaggcataaaaataaaacacccactaactacctaagacactccttagtgcatatcaaaacccaacctttaccctcgtctgcacaaatgtgcttaggtgaatacttttattagcttgttgatacaagttatagtaggttacacccttaataaaacacacccttattgtcatcctgttgcttaagagctttaaacttgtaataggggagctctctaatatagaatgat

SEQ ID NO: 8307 - DNA, 1045 bp, Homo sapiens
ggtcaagtgaagcagtgataatagagaaggaaggaataaatttgtaactggttttgatcgattagttgtaaacaccactgcactcagaccagccaaggcccaagaacttttgatctaccgtgtttattttaggttacacactaggaatataagttaaaaatcttattcccatagctgagtgctgtggccacatctacttaggaaggctgagatgggaggattgcttagctcaggttttcaagtctatcccgggcaacatagcaagactcctgtcttcaagaaatcttatttccagtgaacttagttccaaataaattgtcatttttaagaatatgtcaaattttctactttttgacagaaacaggtttttcataaactaggcttgtgagctccataatgtgctggtattattagggaatatggctagctttgatttgtttccaaatttgtagagatttggaatgttcaggaaataccagtctctcttattaatcttggctttaatgatcttggactgaagctcataaaagttagctataaagttgaaaatatgtttattatatgtaaaatgccattataattaatgggtccttttattaataaccttttacaggttgtcacttacattctgtaaggattttgttttaattgttctcacatagacattgacttttaatataggtagaagactttttgaatctctccacacagctgtctggatttcatatttgtattgacaaagggacttttgatgccataagccttaatcctgacaatgcaattgagaagaggaagcaatatgtgaaatctctctccagggtgttgaaagtaaaaggcttttttctaataacgtcatgtaattggaccaaggaagagttgctaaatgaattcagtgaaggtaagtgactatatggtgtttaaatgtgtgcttacctcaggtttcatgtacttaaataggttttctccccgttttgtgttatagtgttttacttttctatttgtgggaattgcctgcttttttctctgttaattaccttgacaataa

SEQ ID NO: 8308 - DNA, 1047 bp, Homo sapiens
atcatcaatactcggtcacattggcttttcttctgttcctgaaacatgtcaagcttgttttgagtctgtatacttgctgccctctgcctagagtattcttgccccagatcttagcatgtttggttcattctcataattcagatctttgctcaaataacaccttagagaaaactttatttatttatttgtttttattttttgagatggagtttcactcttgttgcccaggctggagtgcaatggcgtgatctcggctcaccgcaacctccgtttcctgggttcaaacgattctcctgcctcagcctcccgattagctgggattactggcatgcgccaccacgcccagctaatttttgtatttttagtagaggcggggtttgtccatgttggtcaggctggtctcgaactcctgacctcaggtgatctacccgtctcggcctcccaaagtgttgggattataggtgtgagccactatgcctggccaagaaaagtttctactcttttccaaactgtttctcttccaagtcacttaatgtcttatttctctggctttattttcttcatggcactttatctgaagttacttatttagcttatttatcttttatctttctctttgtagaatataaggtatattttctttcttttcttttcttttcttttttttttttttttgaggcagtgtctcgccctgtcgcctagacagtagtgcagtggtgcgatctctgctcactgcaacctctgcttcccagttcaagcaattctcctgcctcagcctcccaagtagctgggactacaggcacatgccaccacgcccggctaattttttgtatttttagtagagacagggtttcaccgtgttagccaggatggtcttgatctcctgacctcatgatccgtctgccttggcctccctaagtgttgggattacaggcgtgagccactgcgcccggccaatataaggtatgttttcatacagggaccttttctattttgtttactgtttttttttttttttttttttttaagatggagtctagctttgtt

SEQ ID NO: 8309 - DNA, 1066 bp, Homo sapiens
ttttaatttcattgagttctgttctttttttttttcttcctgattttactttgttcctttttttactttcttaaggtggaagcttaggttattgatttgagacttttctaatgaaattatttaatgctatgaatgctatgaatttatcagtaagcactgctgcatcccacaaattttgatatgttatattttaaaaaattgttctacacctcacttgaatttttttttaaattgttgatttgttgtatttttattcagtccaaaatattttctaatttttctaattttttttaatccacgagttatttagaaatttgtttaatttccatgtttttgggatttttctgttatgtttctggtacagatttatagtctaattcagttatagtcagataacatgccttatatgatttgtatgatttcaatccttttaaatttgttaaggtttgttttaagacccaagatacagtgtgtcttggggaatttttcatgtgaacttgaaaaatgtatgtattgccaggtgtggtggcttacacctgtaatcccagcattttgggagactgaggtgggcagatcacctgaggtcaggagtttaagaccagcctgaccaacatggagaaaccttgtctctactaaaaatataaaattggttgggcgtggtggtgcatgcctgtaatcccagctactcgggaggctgaagcaggagaatcacctgaacctgggaggcggaggttgcggtgagccgagattgcaccgttgcactccagcctgggcaactagagtgaaactctgtctcaaaataaaataaaataaaataatttagccaggtttggttggtggcaagtgcacctgtagtcccagctacttgggaggctgaagtgggaggatcacctgagcctgaggaggtcgaggctgcagtgagccatgattatgccaccgcactccagcctgggtgacagagtgagaccttatctccaaaaacaaaggaaaattcatatgtaagtttttgtgtgtacatatgttttcacttctcttgggtatttacttaggagtgaaattgctgggt

SEQ ID NO: 8310 - DNA, 1543 bp, Homo sapiens
tgagacaccaacacatacaactgttaatgctgatatagagaaatgttagtaaataacatactgaccttgtctattctgttgtattcctggaggtggtttctcctaaattacagtagagacaaagctgaagcagtcacagatgttttcactttcaaataagagtttgagcatatggtataaatagcttaaatggaatatagtggtgacttttgctctgtatccctcagttatttgactgattctctctaacaggtttggagaagagagtatgaatcgactaataaggtggatgcagaaacacaagattccactggatgcttcagtgcttgatattggaactggaaatggtgttttcctggttgaacttgttggtacttttagtatttgtttgttaaagacaaattttaaaaggaaaatttttaaaggccctgcaattgaggatattaaccatctaaatataaaatagtaaagcagtcatacttggagaagtcagatagtacaaaagggaggctacatggattgtgagagaacctaggcaatctgagtcctagtcttgactcttttggctatagtcttaaccttgagtaagccacttaatttttctaggcttctgttctttcctaagggttgtgactaggtgattgctattggtttcttgtagctcaaaactctagaaatgcatatatatatatatatataaagatgaccttttgcaattccagtaggacatacgtatcttatcttataggtaagcatatggtttgaaaagtgcattttgtccatggaactgtgtttcggtaaacattccactgctagctaaaccatcactgttgtatgcctgcagtgtgctcttgctatgctgtgtgctgtggaggaattataagacttaggcttcatcctagataattttacagtcttaattagtacagaaataaacataagagtgaaatttgttaagtaaccaccacatgccaagcctcatgtttggcattggcaacaggaaaatttagactttgtgcttgaattgtttacattacaatagagtatggactgacatatggacagttgtgccatcacttgatgcatgcagtaatacactgaatatagaaaagagggtgattaattttggagtggaggggtagggaagcatcttggaggagtaaatatccaagttgggtggaaatttcagggacagtttggtgacctagtggcgtgtaaagagggagaagatttcaactaatggaaatattatctaaaggcctgaaggctgaagcagtattttatgttctgggcctgtaaataatttgataaattgaaatacaaagtatacgtggggatggacagacatgaggattaagttaaagataggaaccatattatgctttgccatgcttaagaccttcgattttgcatttaggctatggggaattgttaaaatgtttttagtagtggaatatgattagaagaacttgaaataacccttcttgaaacattgagatatagtgtgtgtacattaaagtgcacaaatcagaagtatacagct

SEQ ID NO: 8311 - DNA, 1048 bp, Homo sapiens
cctgggttttaattattagatcttggtcgcccaaacaaaaatttatatatatatatataaatttgaccccaaggaagaacaagtcaaaacaaaatgccacgctctgtttgctctagaaaaagaaccatcaagtccacagagtgcaggtatgacttactctccagagtcagtcattaatgtctgtcacctagccacgtataatcatctttgaaaaaggactatattctatcttgggacaataattatggctgttttaatagttcaagagcataatatagcattgatttaccaaaatttttggcctttaacagccagtctatgaaaaccatttagagccccattcctgtctgtagcctaggaaatggaaccatctttaattctttcccacagggaagaatgctgcacctatcacactatgtggtcagggtcactgattgataataaataaataaataatagagcgctcaggggaaacaacactcaccagaccacaacacacagtagaagctaagtgctgagcgtgtactctggacaacgctggctgcaatgcagactgcaatggctacatgcttttccctctaacaattctctttggctttttcaattgggagggcagattttgcttaacaggcaactagaacaggatctctgcccactaaaaaattatccctatacatagagaaattactacagatgctaagtagtcagaatgctaacattttctacaaacttgattacttattggccaaaatgaaagcaaacagccaatttttaacaacacattcaccacttgaaacaaacagcagcatttacattatatcaaagattcatttctacagaatcgtactaaaaaatcatttttcctgcaagatttagcatgcagcaaaaaatgatcttttcatcctgggaacacctttttactgagttttcggggggaaagaactaaagacatgacagttttgtgggtatttttctatttttagtattctggcagcaaatttgaggttgtacacatttcattatcaactaaacaaaacaagaagcaagc

SEQ ID NO: 8312 - DNA, 1087 bp, Homo sapiens
gtttttggtgatgtcccttcacggatctttcaggcccagtgagtcagcagtgtctgcattcacacaggctgggtggggttgttggatctgccccgggtggatggcacctgctccctcagggcaaaaattcaccccagaacatgagctgcacccggggttaggtgaaggtgacggagcctgaacactcaacaccagaggcagccaacaggacggtgtctgggcttccaaaaagccaccagtgcctaaaaacactttcaagcacctaacatcactcttggttttgtttttattttaaactccattacaaaccgggaaatagctgtcactttcctgtgttctgggcccgctgtgctcctccgttccgcatagcgcggacactgcagggtgcgggctgcagcttccccaggggctctgaggaacccgttgaagtgactgcacgtgcttgtctttctagggttgcagatgagcttcgttttcaggggggtttgtattttgtgttttttctgaacttgatggtgtgggtctggacatctctttccaaccctggaagataccacacatgctcttcgttattaacatgatcacccagaaagcttttgggggcctgagaacatggcccaggctctggggagcatcagactgcacctgactggctggataaagacaggggtacctggagcctcctgcctcgccagctctgtgtccagctgtcacctgagctacaagggagattacctgggagcctctcatgtgtcacatcgtgactcattcagatacatgttttatttaagaagcaaatctatttatcagggtgttcctgtggccatttcttcaccaaacctccagctgactttgcagagaatgccaaactcagaagccgaggagtagcttaaaactaggttccccatggggcacatccagccttctggggagcccacttggtgtggggcaccccaaacagcacagcccctgggtgctcagaggccttggtgaagctagatttcccaacactcgattttttccctccttacagaaaagcagggggaacttgagggataattcacatgaaacctttgccataaaccct

SEQ ID NO: 8313 - DNA, 1047 bp, Homo sapiens
cctccagtgggagggaggaactgctgaaggaacaggaaggtacactgtagttaaatttagcccaacagcagctttcagcatgtgaataaaacaacttttgccaaattgttaggagagcaaaaaatccaacctagaaacacccgtccccactgacagagtgggcggccccctgggacatgttctcctgagagccatggagaaattcatcccaggagggtttgcaaatgtcaatgggacatggggcagcctgtggctgagttagcaccctgggtgtgcttcaccagaaggggcaagagtaggaaccctgattcctggtcccccaatgcagttgtgtgggatgccagtggcgttggcggggagcgcgtcctgcaataccagctagatatgaacacggtgcctccgcagggctggtggggtgcacctaccccaggtggcccatggaatgtgcctcttgcccctttgccagggccgaggtaggggaaaccagccttgagagaatctagggccctgactgagttcagtaaatattagtaattgtcactattgtggagtttgtttgtttgtttgtttgtttgtttgtttgttggttggtttggtttggtctggtgctttttttggtttttggtttttggtttgtttttgtttttttgagacagagtcttgctctgtcacccaggctggagtgcagtggaacaatctcggctcactgcaacctctgcttcccaagaagctgagaccacaggtgcccactaccatacctggttaatttttgtattagtagagatgggatttctccatgttggccaggctggtctcaaactcctgacctcaggtgatccccccgcctcagcctcccaaagtgttgggattacaggcgtgagccactgcacctggcctattgtggagcatttgacaaggatgatcccccatctgaaatcccaggaagactctggacatttttcctctgacagactcagagaggttcaccccctaccctgagtcccacagcagggggtggcccatgccatgatgatcctcaggcacggt

SEQ ID NO: 8314 - DNA, 1032 bp, Homo sapiens
tgaaatctttaaaagctgttgatcttggccaaggtatggttcctattttcctggaaggtttgcggagccaagggcataagtacctgagcagattccacagaccaggtgagtggccccatgttcacctggccataaaaacaaccaatgggcccctacgctattttgctttaactctactttcaaatgtggcctttgctcttgagtgtccagtgtccatcctggggctccacaagtcacatttcagctctgtcaacctcagtgcttgagttgagggtcttcctgggtcatggggcccaggctttttggtgtcaggcacacagtttggaaatagttctcccccattctgtggttgttttttcaatttcttgatagtgtccttgaagcatgaaagttttaatttggagtcttacgtatttgcttatgccgttggtgtgacatctaagaaaccattgcttaatcgagggtcatgaagatatattcttatgttgtcctccaggaatgttagttttagctctgacattgaggtcttgatctgctttgagtaaagttctgcatatggtgtgaggtaggggtcccattcagccagttgtcccagtgtttgctttgtgctttgcagaagctgagctgtggagagctgggctgggtagagcaaaattagagcttcacgccagacttcttgcatttggaaactaacattctaaggaagaaagacgtggtttttttttttaagtgagaaagccaacatatattaacaggaaagcttttcaggtgtttggcacaaatttatttacccccaagaacatacgaagccagaattctaaagctttttcacagattccttgctcatacgtgggagaggtttttttggtaagtttatgaaagagaaatagtacttgtaatccataactaattagcccacgttagcgatgtagaaacgagtgtgattaaacgtgcagttgtcaggtgtgtgtttcccactctgaggctggcttcaacaaagggctttctagttgttttttacataaaggataa

SEQ ID NO: 8315 - DNA, 1040 bp, Homo sapiens
gcgcagtggctcatgcctgtaatcccagcaccttgggaggctgaggtgggtggatcacctgaggtcaggagtttgagaccagtctggccaacatggtgaagtagatagagtagagacatggtaggctctactaaaaatataaaaattagctgggtgtggtggtgcacacctgtaatcccagctacttgtgaggctgaggcaggagaattgcttgaacccaggaggcggagactgcagtgagccgagatcgcgccattgcactccagcctgagaaacgagcaaaactcggtctcaaaaaaaaaaaaaaactgtgtctcaaaaaaaaaaaatttaaagactggtatttctctttagaagattctagtagagtgctagattgagagagatgtgagtgaggaacagcactcgggtttaatgcttgcaggtatgcatgttgtctcattttaaagtgctttcaatgtatacagcctttgtagcttcctaatcaccggcttttatttttgctatgaattctttgtcatgggaatcctgcagttgcagggcaggaacctaccgtgttagtctgggatgttgcttctctggtactgttccatatgtttaaggaaatgtcttaatacttcggggcactcctttatctaaataactgctgttctttgcattattgcgcctgaagtcctttgtggactctgaaagcttaatccatgtgaatatggaaaagcatctgcaggatctaagcctgctggaattaggcttttcatcctgacatacctaaaggaagatgagatattcagatgcagccgcttcccagttctgctttgcagtgtaaggtttagtcacccatcctcctgttcctgtgacctctgttgcagtcactttaaatcccagattacacacgcccttccctggcactccccggccccccggcagcatgagcccatctgtgtttcacagtaataaggtaaagaatgcatttgggcttgagctcggaaacctgtttgattcacaaccaaagagtcgtctcaaagccagatctcagtatt

SEQ ID NO: 8316 - DNA, 1032 bp, Homo sapiens
atcaccttcagagctgccctggccctttgtgttggtggaggcaggatcagggaatggaagcccaggcaggtgcaggacccccctggggaagctgttccttaagttccttcagttgggaacttaagttgcctcctgagaatgagctattccctgagaaggccttgagacaaacctggcagcccaccaagtgggcgggtgacaacacagttaagagggacacaccattgagccaaatggccctcatgttactgcaaccttcagactcactgatcccacctgttcttctttttctataaaagtgagaattagaccccagagtcatgttttctctctcatttcaagcagtttcctgcatgattattccaatgggaacatgaaatgcttgttggcagtttgtccaaagactgctccgtcggagggtacccactgatcatccccatcctggcctctcttcccagctcttctggaactgtctggatccatctctggaattgtctggatctctgtaggtctctgttgttaattgacaccttgtgtcgcacagggacttcagaattggctttgggtggacatcgcctctctccccgacacagctatgttacacaatcatcttatttttacttgacataatttctatagtgagggttttggcagaattaaaaaattaagcccgtgagatgtattactctaatgggtcccatctcacttttagtcaacatgagaatttttaagaaaagcagtcctttctaaaagactggagtgtggtgtgtgtgtgtgtgtgtgtgtggtgtttgtgtaaccagagtgtttggaaaagtgagtccagttacaggtgtttttacctagcgcaggaaaacatctgtcataatatttgtcaaatctcagagccaaggctgtgcgagtttgggtggtttccaagcagaacaggttgaaagttgatagaaatggaagctgggcctcctggttcaatgggaggctgatgctgccccaaagcgcatctgcccacatctgccctgctcctgcgatcacccc

SEQ ID NO: 8317 - DNA, 1057 bp, Homo sapiens
gttcatcaccgtcttctagtttggttctgcagctgcggttttcagctcctgcccctaccacagtgaatcgcgctgtttcccaccgcctggttggtggtgccctgtctccatcgatgattgagttgaaacctcccacagtgtggcccggagcccctgggcccagctgcccagggctttactctcagtgcctgtcctcttggtcccggcacctttgggaaaagagcatctctagtttcaggccaagtcagtgccttgaggggagcagtgcttggggtgggcagggggaaggagtgccgcggggggaacagtgcatccgtagtctccgtgtttggaggaggccccagggtagccagacagcagcagacagcagcccgcacgaatgcggagaaccttctgcgcgcttcacacagctcaacctaattgacaggtatttggggtgactgtgaaccagaaccccaagatacattttgctgccggcttcttgccctctctccttttccagaacgtacagtgttaaagctgtgaaatgagactcctctctgattggtttctaccacttggctcgcttgctactaaagctcaggcaccttggcgtgcgcgctcgagggcgttcctctgtctctgtctcatctccatctacagagtgacctcacgtgcctttctcagcccttccacatccagcaggagcctggctgagcaccccagctgggctgtgaagatgccgagaggggagagcattctgggtgtccagcgctggggcacagtgggatcccacactccctgtccctccagcctgtttctcatcacctgagggttttgttttccgtgttccggttgaagagatgtctgtgccaggagggttcctcccttcccatttgcaacctgggatgggtgacgcagatttatccgagacttgggagtgaggctgagagtcagttctttcgtatcctaagaaaggctgaccgtcccatcaaggcccgtgtgctgaaactgtccgtgtgcaggctcaggtggagcaggtctctgtcaggcagccatttgtatttgggcggtgggt

SEQ ID NO: 8318 - DNA, 2150 bp, Homo sapiens
ataggaaattttcagccaattttttataacagaagtttgcattaccttgtctatgcatggtgttccagatacatttgcagttatatattttaaatttctcaataactatcaacgcagacaggccaaaatgcagttactccagtgtgggtcaccatctatatgtcagctccctaggcatctcattaagtactcacagttggtcccaagtgctttgttggtgctcctcctatgtataagctgacttagtccttgtggcacctgttatgggtcaggacaggtggcacccatctcacaggtgctgccagagaggcgttgagcagtaggcagtttgcacccaggaacccgggcagtctgtttttttctgtttggccttctctcataccagcttgttggattcagctctttcttccacctgaaggccttgaacatctaacacacacaaacacacacacacacacacacacacacacacacacacacacacacacaccccctctagctttgaattctcaccatgtttctattctatcaactacttgtagaatgttctgtattgatatgcagagagcctgtcaaactgtttttttctccctccccactgcctacacctgacacagggacttctgcgtcccttaggtttgttttttttttctttctaaatgattaaaagcatgaagctgccatgttctgctgtgcttacccggtctgctcccaggcttgtaggaactttgtcttcctgctcttggtgtctggatacaccagctccttaaaattcgtcccctcccgcctgctacacaatgccaacatcaagccctggtcgtgggtccctaggctggaatcaggcaggcctctccagggtcccactccaggtactccgctggaatctgagcatcacccctgcacagatacttgtacaacctttccctgttttctaaggcctgtccagccccttcctctttgaaacttttcaaagcaagaaaaagtggcatggagcttgatccttctgtgtgcccagaatctgccgtggggattcactccgccaggctgtgtctctactcggagagcaggacacagacagtctttgggactccagccaaatgagctggaataatggtctttctagccaatgtaaaagccacattttaatttttttaatgtaactctttgagtttgctatttataattgttccttttttttctgatgcctgctatcaagcaatcctataataccatgtaagaattattacgaaggagccctctcgtaacacaggctgatcagaacaagattgtggtctcctcattctcaagtataatggagatcttcctatctgtttagtctgctgacataattgacattgtgaactgcaccagctggagggttttagtacctactttatcgcattatgccagagctcctttggtttgccccaaacatctattggttggaaatgagggctagctaacaatcactcagcattgcaaagggaacccagaagagcatcttgcagagccctgggtttgtagaacttaataaaccacaatggctgttgttggtggtaactttttgttagagctgcttcttgtggattatgatagaatcagtctgtaaacactgctcccctttcctgcggctgttgcgattgcaacttgaaaaaagtatgtgtttcgttttactgcgttttgttcgaatgtgttagagacgtggaaaatggtcccccgaggatggtatcagctgagttgtgagtagtccccttgtaacatgactcagggagggtgcttctccatttcctctgcaaaaataaaagggacctcctcttaaataaacaagctcatgaaacattccgcacctctggaatgttctcacgaccacagaggataaaaggaatgagaacgttgagctggttgggtggatatgaggaaaaaggagacaagctggtttctgtgaaacacatagatagttagaaagtctgggaatctcattctgcatcacctttgtcgcaggaggatgagaagtctgagaagatgctgccggggatgaggtggaagggagtttccccagtgggtctcttctgtgtcgcgggctcttctgctcttctcagtgggttgaacttgccatggtggaagcacatgtcagtgggatgtacccccaa

SEQ ID NO: 8319 - DNA, 1046 bp, Homo sapiens
gcacactgtatgtaacaaaagatgagttttctggtggaaccacttctgtctgcctaaaatttgagatcactaattttttttatctgttcaaccagtcttctcggctacagatcaaaattttcatgccagagtaggaaagagaaaactagaaaaggaaaaattgatctgcattcctgattcctcaagtctaaacagacaggaataagaggtgtcatttagtttgtttgcttatttgcttttatccctttttttttgcttaacctttattattaaataacactattaaaactaatatacagtttatttttaaggcatatttggaagacaagttcttttaaactgtgtgaaaatcctaaacacaagaatggctcattttctttagcaacaaagaccaacacttaatttccattatgacacaaatcaaacaaccaattaggaaaatcacaaattctttctgctcaagtcttctgttcttgattatagcttttagcaagtgaaaatatttagaattttggagtcttgcatttaacacgaggaaatgtattttcgtgtgctaacaacccttaaccaaaacgggaggatttactcagctttgttggccaagggaaagcctggtttttagatttgctcacctccttctgtgtggcagcccagagcctcatagtgtgccctctcctagcactgactccatgtgctcagagacttgctgtgtacatttctttgatgtttcttactctgtgtaacttacaggggcttcacttttaattttttggtcatttcaaagcccctaagaatgttttggtgggagttagatggacagaacagaatcacagatccacattccttagcctcatatccaaattcttttttttttttttttttgagatagagtctcactctgtcactcaggctggagtgcagtggcgggatctcagctgactacaacctacacttcctgggttcaagcgattctcatgcctcagcctccccagtagctgggattacaggcgtgcaccaccatgcctggctaattttttgtattttta

SEQ ID NO: 8320 - DNA, 1333 bp, Homo sapiens
tgtctggggtggggacataaacttgggatccaggtatcctgagtcctcggaccttttttcccatttatttgtctggcttgggctctaacatgcacaatatccccataaaatgtctcagagcagatttttaaatggccattaccttgtcaagaattctccagtgggatttcatgtaaaattaggatccctgatggtagctcacgatgagctgtaattctccacataggtgactgtattcatgggcaccatccaccctcctcatccagatgtctccctctccagaggactttggtgcaggaggcctgtgaggaccccagttcattatgacaaggttgcagttctctagaagattctcatcaggagccttgtctactcctccccagcaacctctttccactaacttatattttagctatagcctggaacattctgagctatgatgagtgttaaaatggggtggtgtactcgtcagagacctggagaccgggactggaagccactgtgaaacaggtgaaatgattcaagaagacagctgaaccccagcgacaccccataacagaaacaaaagaactcttgtgagccgcacccccacccttccttttcccggcatttgataggcaaagatgaatttgtgtgacacgggagtgtcccaccctcctcctccccatcagactctgcgagacgcccgctctccctttgggtgcagtcatggataccaaacaaagccttcatccctctgggtttccgttacgtagccgtcttccacgtgaaaaccgtgttaagcaaaatgaatagctgcaagctattttatttcatgttaaataactgtggataagactaagatttttctctttatgactcaggttgaaaagataaggtctgggaagcggtgtctttgaatctagagattttctggagttagggatgtctgatttctacatatcatttccacgacctgtcgcaggagacagggtaccggtgccccatgatgctgcagagcggcttttggtgatagagacgcattatggaatgtgtatacttgtaaggacccaggcatagagtatctgccctcataaagcaaacataatcctccactcctgaggtctgagttggctctcctggatgccagcctttgcatgatgagtgatgccttagttgaaatgaaggatgggccaccccaggtgcctggagcacttttatcccagtgcatgcccaaactactggtgtcctaaacagttggccccacagacgtggggtttggggagctgagctgtgcactggggcggtggctacactggcctggtcacgtcaggctgggcagaagagttggagc

SEQ ID NO: 8321 - DNA, 1045 bp, Homo sapiens
tcccgccacccagctcgttgatggcatgaaagcaccaggcctcattcctgccacggccctgagcctggcttcccgtgagaccctcttgggggcctgtggacaggaagtgggacggccaggacccagacctgtgacctgcgtcagagtgtaacgaagtccaggccagtctgttgcccgaagcactgggatgctttttactgaaggagtgtttaaaaggtaagctggatctcagacaaagctcctccaagaggcttccagaggctggagttttgtcaacaaatgaaacaggccctattttaagccacgctgtgtaccaggacttcctgtttttccagagaaacttcttgttttggtttttgtgatgatggatttattgaaacatttgctattcaagtgaccctctttgtgttccaaggaaaaagtcaagctggagattctgtggcctggaaaagggatacgcactcacagcaaaaacgtcatccccaaaagactcagtcggggggagtctgggcctcagtggccgatcagtgaatggacaaagagctaattgccagtcaggggcccagacggatttcatagctcggggtttggcctgttgtttagagggaggcgggggctggtcacaggacaattgaaaggggtttttgttgttcctctcaggctaagttaagccatgtgtgtgtctctctttcgaggagtgctggtctggccaatcccagccacgtaaatcccactcacttcctgctgaccttttgacaccaacagatgttttttcttacaagtgtcattagggcctctctactcgctgacctcatcagattgtgttgaagtcgttttcatcggttttgtctctaacaatccgtttaacccttcctgggtgcctctctgggaataagattgcactgccttctggccttgctgtctccctcctgcccccaggacctggcatggggaacggagcccaacccagagggcagagaggcatgcttccccggctgggggctgccctgtgtaccccggggacagagggacccttgtgtcttcc

SEQ ID NO: 8322 - DNA, 1056 bp, Homo sapiens
attcctcgactgtgagaaacttctttatccatctgcaatctctcctcttggcttcccctctctcctggtcatggttctgcccacgcagaatacacccaatccctcttccgcatgactgccctgcacataatcacaggcagagatggaaactcgggaacgttccctgctggggatgagcattgccattctcttccacaacacatttgcaagtttttcacttgctcagaaccagtgttgcaggtaagccgcaacagacacacacatgtacacacacacacacacacacacacacacacacacacacgtggggggaatggaatatcatgaccagtagttaaggaaaaatgcatttctgtttaaaagccatgttttaagaaaaagtacttgaactcaaataatgacgagtgacttatttcatgacatttgtctctgagacaaggtggcaaatagtatgctatgatcatttgtcgtgtgaagagtgaagtcagagtaacccgctcagctccagagctttgttttcctctgcggattcccttggcagcatttctgtggaggataaaaatagcacacggtgccttaaaataaatggctgtggggaatgcttgtgtacatcagctgcgtggccacatatgttcacattctccatattgttcactcttcaaaagagtgactgggatagacggttcgaatctgcccgccatatgataactaaagtgacatggaagagcctttggcccccgggaaggatgactccagggatgggcagtggggcaggctcaggtgtgtcagactcgtggctaacccgcgaggtcctgcaggtgagccttttctgtcctttaccccatttcatcctaagtgtctccccacaaaagatcagcaaagccagacccaacacaagctcccaaacaggccccttcctgactcccagtgaatccagacaaacgctgacaagctgacagattccgcctcctggagctggtgggggtgggcgggcaggaaattggcggggcgagaggggcagcacactgagctgcccactgatgcagtgtcagtggc

SEQ ID NO: 8323 - DNA, 1008 bp, Homo sapiens
gacaggggacaaatgatgaagaaaacagaaatagcccataaaatgatagggatgtcccggctcccaggcaaactctggtgaaaaccgaggagactatggtgttccctgaggtattcaccatctaactgtcttccacaccatatatataagctgtttataaattctttgtcctggccaaaaatacaaaacctactggcagtgatttatttttttaatgcattttaaataactggattcctatgtggaattggagttggataattaaattacgatggcctctaaagttggggtgcggggggttgagggcttcagcagagagcacccctggaaggtggcactgcagcctgggggtgggggaaaaccgtgcctgatggagttgctgcaggggtccctacacggggtgtccacccttcttgcccagacaccctgtggctttgagaatcgctgtgacatagccacgggagagctgtgtctgcttaatgcttttgtttactttggaagtttgtcctacatgaatgaattcgcaaaacttacattccccgtaaagctgtcactgagagaaaacacagcaataactcaggtgatgtagttaaaccaccattgagtttgcgccatccatgagctgataaatcgtacagcttcatttggtaggaatcagcaattttatgtggcaattaatttttactactgtaggggagccagaggatgagcattttacttcggttttgtgtgtgttgagagaaacttaacggttttgccacagcaagaaaggatcgtgcatgaggcctttcgcacgagtcgacgtgtttgggtgttatcctggggtgtccttgccagcttttgttggttcctcacgtgggcagaagagtgaatgctcagtccccatcggggtgccacaggcctcatgacgtgtggggtaaaacacgtatgtggcttgcggagaaataaattctccgtatttcttaagtatgatgtttttccccaccagaccgattcgcccatgctgtt

SEQ ID NO: 8324 - DNA, 1032 bp, Homo sapiens
aattaatgaaccaattatcaatacattaatattaactgaagtctacattgtattctgatgatctgatatcctttttccatcccagaatcctgtccagtttttcaccttgtatgtcactgtctttctccttaggccccacatggcggtggcagtttcacagtctttccttatttttgatgaccttgacagttttgattatgatagtatattttgtggattgtccctctactgcagtttgtgtgatgtttttctcattcctgggctgggttatgggtttcacagaagactttttttgtgtaatctctaaataaaaaaattcttgaaagaaaaaagtgtaagcctttgccggccaataatgaatcgccccacatagcaggtggacgtggggggtgtctggttgtccatcagtaggagtcgcccttcccttatacctgggcctggtggtcaggcggggacttcaggaattcagcagccttgcctgcgttcagctgaccaaagacttttccatggagctgggaagactgcccaggggagataggaagaggcacgtcgcacacactgggcttccctggagacttctggattctcgagttcaccctgaggcatttactgatcgacacatgggctagttccttttttgttacattttaaaattctggtgaggtcgttccatttatggataagaaacccccaggtgtgaagggctcaggtgatgtacccagagtcacacagctcacgagtcagtggcaggactggagattacactgaaggttggtgcactgtgctccctggcttctgtgcaggtgtcaccctcctccaccaggcagactttgagtcgtgcaaacagaaaagatgctgcccacacttcagggccatgcttccagtccccgtgagctacccccagcaggctcctgtacgaaacatgacagcactttctagggtgcttggccgtgcctgcttcccccgttacatctgcgcaccctgcttgccttccgttcctgccctgcactcacctagcatggtgcatgcacc

SEQ ID NO: 8325 - DNA, 1050 bp, Homo sapiens
gcagttctcctgcctcagcctcctgagtagctgggattacaggtgtgcaccacaacgcccagctaatttttgtattttcagtagagatggggtttcaccatgttggccaggctggtcttgaactcccaacctcagttgatccacgcacctcggcctcccaaagtgctgggataacgggtgtgagccaccgcacttggccataggcagtatttttgtgtgtttgaaactcatcattgtgggcgtttacaagttggactaattccaatactgattttggaatttaaagctttataaaatcataacgcaatttgtagtgttgtcaatagaaggtcctgatttgtaggagctggctggcaggcagctattaggggaggtggtcactcagccaagacaggcagggaacaggaaacccttggtcctgagaaaggcccctggaagaggccagccccgagactgtttggctagtggtgggggtgggcaccagctctaccccagccctgtgagtgcatcgttcccttctgttcctgtagctgatctccctgccccagcctgcgatgggaggatcagcagtaaaataagttgtctaaggtcgcgtgtcaggatccaaaggagaacccggtgctccagctggctgaggggagagtggggcctcggagacagcaggggcagattcccccagcagggcaaagcaaccctgacctccaagttgcaagggaataggtgactcagggagtacctcctgcagccctgctggtctcaagactcccaccttccagggcctggtcctgtgctcagaaacccctctgcatagggtgctgatgagtcctctgcagctccctcacccaagggaccacactgggaaacccagtagttgtctcggccatggcactaagacctttgcaccctggccatcttgttccgggacagccagcatctgtggtgtggtatagagacaaagctgccacctccaggacacttgctccttcctggccttcctgctgccctgaaacctgtggcctgtgtgttagtggaaacattctcagtttcatt

SEQ ID NO: 8326 - DNA, 1030 bp, Homo sapiens
agagcagggagcctgcccctcgctgcctctgtttcccctctcagcaggcggtggttgcatgggtgagtggggcacagatacgaggtcgtggcagccctggcacacggctcgggagcatctggatgtgcctggaatatgcttccatgcaacagagagcagcatctgctcagaattggggagggaagcaatcaccgcatacggggcattttgtctttgcaggaatgcagtgtgagggaagtgggtgattttctttttttctttggttaaaaagtttttattttagaaaaattttaggccaagcatggtggctcgcacccgtaatcctggcactttgggagactgagagcagcctggccaacgtgaaatcctgcctctactaaaaatacaaaattagccgggcgtggcggcagatgcctgtaatcccagcaacttgggaggctgaggcaggagaatcacttgaactccagaagcggaggctgcagtgagctgagatcacaccactgcactccagcctgggcaacagaacgagactccctctcaaaaaatagaaaaaattttagatttacataaaaattgtgatgataatacagatttcatatacctcacacccagttttccgtattaaaattggtaatcattattattattattatcattatcattttttagaaattgagtctcactgtcacccaggctggaatgtagtggccccatcatagctcgctgaagtctgtagtttctggactcaagctatcctgccggctcagcctcccaaagctctgggattacaggcatgagccaccccacctggcctttccctataattaacatcttacattagtacgatacatttgttttttgtttgtttgtttgagacagagtctctctctgtcactcaggctggagtgcagtggcacgatctcggctcactgcaacatctgcctccccagttcaagggattctcctgcctcagcctcccaagtatctgggcctgcaggcacgtgccaccacacctggctaattttttgta

SEQ ID NO: 8327 - DNA, 1026 bp, Homo sapiens
attgggaggagttttccctctcatatgtcgccatgtccggaccctttccggggggcagcacgcagagatgctggccattttatgtgtccagtcctggtgaacttcactatgttctaagagaaatttacttgtatctttctttttggtgaaacttagctgctatagccataacaatttgtataaatgcctatatgaatcaaggcagttgactttccacctaaaaattgtttgccacgtacaaatcggtttccaattttattaacatgtttatcttactttaaaaaataaatcccatttgaaagaggtgcagaaaccagccatgcatgatggctcacgcctgtaatcccagcactttggggggccaaggcgggcggatcacttgaggtcaagagttgaccagcctggccaacatggtgaagccctgtctctactaaaaatacaaaatatagctgggtgtggtggtgcacgcttgtaattccagttactcaggagcctgaggcaggagaatcgcttgaacctggtcaattgaactcgggaggctgcggtgagccaagatggcgtcactgcactccagcctggcgacagagggagactccatctcaaaaaaaagagagatgcagaagccattgaagaaatctcatcgtgtttttgagcttctaagtggacatcatcaacattgagattaagaaagaaagatgatgtaaaatgtaagagagtggcccttgccattgcagacactgatttattgggcagggccacatctgaagacttgggcgagccggcgtggaactgctgtggctgttagctttctctgacactgtgttcttgggctctggaggtgggatctcagctgtttgccattctgtcatctctatttattgcatccaaccgttagtaatgacttaaatgatgattgccaaaactgtagtcaacagttttgttagtgatttggggccttgtaaaataattagtcctgagacatgtatcaaggggaacatactgaatatctgagactagcttttactt

SEQ ID NO: 8328 - DNA, 1044 bp, Homo sapiens
aggcaggagtgcagtggcatgatcttgactcactgcaacctttgcctcctgggttcaagcaattctcgttccttagcctcccgagtagctggcattacaggcactcgtcaccatgcccggctcgtttttttttttttgtatttttagtagagacagggtttcaccatgttggccaggctggtcttgaactcctgaccccaaaatgatctgcccgcctcagcctcccagaatgctgggattacaagcacgagccaccgtgccaggcctggttattccaaattttttgattggtctaaaatttgtaatgaatggtaggaaaacacagcaggaaaaagaaagaacattattattggtaagggtcagattaagccctgggtgagagtcatgagtccctagaggtatctgaagaagtcctcctggctttggccatctctacaggatccggtgattgctccgcctccagagctgtccccaaccatcgcagcttggcttgtctgtgacctcgtgtcaactcaaaacagcactttccccccgacactttgaagtcaaccctggtagaatttgtgaggaaatggccagtgtgtgttgggtttaaaaaaaaaaaaaggctgtggaagtagaacaatcttggggttgccacagaacaggcagtttgaggtgacgaagtggctttgtaatcaataataattgataagaccttgtttctagcaggctgtagacaaaaataatcttcttggacctatcttcgcctaggaaatatgtcctagaacctccctcctctgttgatctcaacgcccaagcccatcctcccatgagaaaggtttttttttttttttttttttgagacggagtctcgctctgtcgcccaggctggagtgcagaggcgcgatctcggctcactacaagctccgcctgccaggttcatgccattctcctgcctcagcctccagagtaactgggactacaggcgcctgccaccatgcctggctaattttttgtatttttagtagagacggggtttcaccgtgttagccaggatggtgt

SEQ ID NO: 8329 - DNA, 1022 bp, Homo sapiens
gccatcagggagggcacgccaagctttgtgactttcaggtctgttcccttgcccacgggctggttctggctggtttctggactgtactgtggccgtgtggaattctctggcacacagcagcaggtacagagcctgcccctgggcagcgctgaccatgctggcctggggtttggatacttgagcctgggtagagacagggtgggttctcggtggccacttcctctgcagcagccaacagcagagacagaaggaggcctgggaccttgccctgcctgacccgcctgtctttccatctgaagcgcccctgacatgctgtgactcttactttatttttggtagtttaccttaaagagtaatgaaatcacattgcaaaaatttgggttctctgggaaaatatcagtcaatcttgattctaaaacttgaacacaatcactgtggccattcatgtctattttttttttccctttaactttttcttttgacataattacagacttacagaagagttgtaagaatggaacaaagaatttctaattaccctttacctagcctctccaaatgacattttaccacatttgcttgtgtttctctcatatacagaaacacacgcacagagtatataatcttcagatccctctgagatatttgcaaatatataaggctaaagtatttagggatggaggagttaatttttcctaaacacagtgcccattctttcacataagacaagtatcaaggtcaggaaattaacattgataatcatatctaatattcagatcttactgattttgccagtagtcccaataagatcctttatagcaaaagaaacttcggattctgcgttgcctctggtttccttgtctctttagtcatctttaatctggaaccgtttcttgtcctcctttgtaccatgacattgatgtttttgaagagagcagatgagtcattttgtagaatggccctcagttcagtttgtcctgtgttttttcctgattggagttgggcactttgggcgggaatgc

SEQ ID NO: 8330 - DNA, 1412 bp, Homo sapiens
gcattagccaccgagccttggccaaaagagctctttcatcaggcactaatcccgttcatgagtgctccaccctcatcatctaattaccactcaaaggcctcaccctctaataccaccaccttggggatgaggctttcagcataggaatttgcagggggacacaaacattaagaccagagagatactttggactgaggggaccctttggtgagaacacagggagtggttctctgtggggaggctgagattggcgtggcaggaggaggccagccatggggcatctggggaaaggtctggaggccgaggggctgtacccagggcaggagccagtgcggttgtggccctgtgagggcagacccggatcttgaccacgaaggcactgggcgttgctggagagcttccagacactgggctaggatcacatttcagtttccagtgagaatcctcctgggtgtctctggaaaatggcttggaaggcataagagcagaaacaaggggatcatttgagtgaactcatatagtagcagagctgtgcattgagattacccacaccccagctgcgagagtccctgttaatgcaaggtggccagtttaaagctgacaggactagatttccccatggagtgatttgctgaaggctttgggctggaagttccagcgcccgcagaaaacttactgttggaggttcttcgccctcgtttctgaaggaaagctcccagctctgcctggagcctgggatggaaattgtctctggttaataggatctttaagacagctaaatcctgcactaaagacttgatgcaactgctgttgcacacggaggtggctcccctgccatatgcccgcagagctttctttcattgtcattacagagagtcaggcgtgtgtacaggaaggagacgggatcctgccgtaatgactttgtcttcaccatcttttctcagctgcttaaattgctgtcagggcagcgtaggaatcttaaaggagggagttttctctcatataattatgctgttggtaaaaatgttggcggcttttctctacttttccccttagccaccaaaataaaactctttatcttggaactcggcagctgtttgcaatccgcctcatttctcctgctgatgtattggtgtcgcagcttgggtgatgggtggtgacgtgagggttgaaggtaatttctgtcgcagtcccatggtcatgagccaagacctggagtgctggaggtgcgccaggtcgggtcatctttgggttttgcccagtgagctgttgctaaggagagggctttgtttgcctagagctgggggaaatgttcaagggcaggcacacattggcagagatctgctgacgtggcgacggcggaactcatggctgtgtgtcaagcctgggcagtaacaggtggcgaaggccaa

SEQ ID NO: 8331 - DNA, 3255 bp, Homo sapiens
ttctgtggtgagatgaggctcctcctgccctccttgctgggtggtctttctgttttgaccacatcccttggaagcgtggctgggctgcgtaactccagagcagcctggtggtagctggggctgccttctgagtttgggctggtggatgctgagtatttgcattcagagccttaggcattgaccttggctttctgggaccctacgcccctctgtttgcctttgtcagtagagaccttctcacatttagggattcattttttccaagatctgtttgctaggtgtgtgtcaaacttcctcccagagcagtgacatggatgggaattgtgagtgtgttgagagacctaccctaaaagatggggctgcagtcatcctcaggggacctcctgttctcagctccacctcagccacacttggctgtgggtcagcttcttctgaatcagcatccgcaggacagcgccacccagccctgccacacttgcttcctccgcgcttcttcagaggctggagcccacccccatgctcgtcgtctgttctgcttttttgatgcacttacttgtccctttcagcgtattgcttatgtcctatgttggttaaaaaaaaaaaaaaaattgccggtaatcagccccagccatttctcagcatttctagtttggaacttcagagacttcaacttacgattcctttaaggcaggagtttctactttggcactgttgacattttgggtctggtggttcttcattgtggggggctgtcctgtgcatcatacaatgttcaacagcatccctggcctctccccacccgatgccagtgttgcctccctccccaccccggcatgaccagagatgtcgccagatagggcccagtgtcccctgcttgagagcccctggtgaaggggtagaagttgattccatggcccttgtcacactgtacttgagccataccgtgcttggcacggaaaccaccctgtagccgttgtcagaggtggagcgtcctccctgaggtgcgtaacccccacatcatcgttgcttccttgggctgtgttctagcgattgcgtccgtccctttttctccttgattgcagatggaagggccctgctctgagccgtcgccacatgcctggtgcttggctccatgatgctcacatgggtgttcatgacagtgcatttgacagacagatttatttgtcaccttgtcagggtgacatgttgggatggctccaccacttgtgtgccattgacacttggctgtctgaaatcaggacaaagcatccctgagactgatccgaatgaggcttatcagcaccaggcgtaacttaccgcctgctttcctctgtttctttaacttttaattgaaaccatttagttaccacccctgctgctaggaatctggggacaattaggaaagtcccatctgtcctttgaaccacattatattgcgtttctcctcgcaatctcaagaagacggcacattctagcagcagtgtctttgccttgccgtctcgcctcccactggatggtttttatctcacttgaatgagttatagcaactctttaattcaattattttctccagtgcaggctttgagatgatttagttgaatcaaacacccgggttttccaatgcagagcagtgactcccagcgaggccgtgggagggtttttacattttcacttccagccacggttgcgcgcgttctgtgctgccccctgagcgtcctggcacaagcccctacttaccattccgaggagtagattggaaatggcagatgccgtgggctttgccagtctttccccaaggcaaggaattatctgtccagtgatattaggtcactgcattcccacccagctgtgtcgaaagaagggagggggtggggcagcctgggtgatgggcaggaaggccatttataaattcaagtgtggtaaacagtcgactctcctgctttggtatttgagtttgaattaaacaaagtgtcgtgggtgggaggtgtatcatacgatcattttaaccattgtgccttttaatgtggaaaatctgcccaaaataggacctgctgcagtggttttcacatatacaaagaagtggctagaatgttctctcagaacagcacacaggattagaaaggacatttggccgctggaattcttcagtgagaattcagtgattaagcctgccttctgttttccttgtgggccgcagggttcctgtggatgtccccaccctcagattgctggagtagaaaacttaactttccaaaacactgagttgttttcagcccagcattagaggttaaagatgctcatgtagaaagcacgcaggatggatctgacgaaggaaacagcttctgatacttgagcaggctttggacagtgcagatgaagggggctgagatactgaggcagtaaagagaacggtcagcttggggtctggagtcgctgggcactgagtgcgcgttctgagtgccattcaagcaccacgtaacggttggggctggtgttgggtcctgagatgggccatgggccaccgttaaactcaggaagcacgtgctgcccccccccactctagaaggcgggctgttttcctggcgctgtgtgtgccatgctttgtgtgaacatctcactgggtgtcgctctcatgtggtaactgggcatgttgtagaagtcgttgctcctaaacgtaagccagtgcccacattgggtacgttctggaagaaacagtgtggcccaacatgggcttatccagagacaggacacctgctgcctggtgacgtcaccacctcccgatggcaccactctgttctactccactgcccccggggcctgacttgctactatggaactaaccctgtaggatgaggccgccatgcccgtgtgtgtgtctgtccagatctgtccccacatacttgctggtggcgggtgggaagaaggttagataagttactgtcatagattgtgactatgaagtaatccattagaatcttcagacaaggaatgctgggagtggtggctcatgcctgtaatcccagcactttgggaggtggaggcaggatggatcacttgaggtcaggagttcgagaccaacgtggtgaaacccatctctactaaaaatacaaaaatgagctgggtgtgatggcacgtgactgcagtcccagctactagggaggctgaggcaggagaatctcttgaccccagaaggcagaggttgcagtgagcagagatcatagagatcatgccactgtactccagcctgggcaacaa

SEQ ID NO: 8332 - DNA, 1033 bp, Homo sapiens
ccctttggcaaaaagtaggaactacagagggcctgtcattgagacttcaagttgccaatgcccctcacctattcatctgaactcaggcacatgtacatgctcacacgtgtgcatgctcacacgtgtgcacacatacatctgacatggacacactgatatgcacacgtgtacaaattgtgaatggtatggaccccacgtgaggcatgcacctaaggcgcgcctgtagcagcgggacagagaacaggcttccttgtaccctgtactcatcacgggggttgcgctggcttccttgggttggctttgaggagtgcggcttgtgacttctccacggtagagaactgaggccttagacaaatagtcatccattgtaactgttccctgcagtgttgatagaaatggtgttgggataattagactgtgctgctgctttctccttttctcccaggttgatgagtaggagcagtttaatttgagactagtaaattttgtaattggatttaaaagactgaaatgagcggacctggtttccatattacctttataccccagcgaggggaaatgcttgagtcaggtgtggatcagattattttattgtgccaacattaatattgggagcacacacataatctggagtcagcaggttcatccactactatctcattaaattttcaggcaaaagctgcaaaaattaattggaggcatgtaatagtttagaatgtgtgccagcttatggtaatataaattatgtgaagagaagacagttttatatactgagagagggaaaactggtttactttaatgagaagagatagaaatgtagagctattttttcattacagatacactctaaaatgtttggacttagttgatgaatagagttaattcgctgctacagttccaataattcatgttgcacagtttaatgacttctagataaaaacaggattgaaatgttaatttctcggaagaaattggggcactcttgtatatcagacatctcccccccacccccccattaaaccactagttaatt

SEQ ID NO: 8333 - DNA, 1052 bp, Homo sapiens
catcaaataccatttttttcactgttgtctgcatttaatacagcatcttctgccatacgcacttgtcaattcaaacatgagcgttacattttggtctttatgatctgtcaagggaaaatggaagtaaattctttataatatgctaattgatgtatttgggaatttttagatgtagacaacatctgtgcatgccgttaacacagttaatagctcccgttcttcaatatgagaaggttttcagagtctatgtgtgatctagatgagaccttctgtgtccgcccccccaggacttggcagtgtcaaatttaaggctgttttttctggtgccttaggactgaatctgagcctgcgcaaagtcctgttttgaggatgcttctggccacagtgtgctgggattgtgttggttctgggaagagcctggctggccagacctggtcttatctatcacccccatccctactccgtcctagcctggaccagactggctggagtgatgggtccagagaaagagaccgtggacctgaacagtccttgggacccttctgccactcttggaggtgccacctcccctggtagcttggcaccatttgggttctcctttagccatgggtttttgacaactcaagagcttattttccatacaaacttgttgatggttttctaaggcaggaagcattgctttattgagagtgaggaattgtaccctttgaaagctgccccctgaaaagggagtggagagagatggctccagttggagttcaggatgggggtatctttcagtgaacttggggggagggctgagtggtggagcttggggctcatgtcccaggccttctctggtcaggaaagcagagttgaaaagggcccttttaatctggagggcccagaatggtccagccagttgccccggaaaggaagcctcatgtggcatgcgtgccagacgctgcacagcttgagttggtcctatgtgtgtggcacagccttacaaggttgaggtatttacctttattcctataaattgatggataaggggggttaattgatttctcttg

SEQ ID NO: 8334 - DNA, 1051 bp, Homo sapiens
ccaaccctggtggagacccccttgtgccctagacaggcctggccactgaactgagggatggcagccctgttgtgtgggacagccagagacacgggtcagcggctgatttctctgaggcttggagcgtgtgtttgttaaaggcaagaagagtgggaaggagtggatggagtgagcggcagggccagagcctcacttgttgaagggagtggtggtgcattgtgtttactgtcaagtttcaggctggggcgtagatgccgatgtgcaaatgagtaggcagggaagtgagctttctcttattaaaatgttggcttactaatcaagtgttgctgggtgtgattagtggcagaggaaaaggttatttctttctgtaaatatttttgcttaacatttatgcgttaccattgctgattgtattaatactcttagaatgcattagaccaataacttgtttttttttaaaaaaatgtcttggttttaagcagtttcagttggtctttatggaaggacacacagcatttcactgaagcttgagggatctgccaggttcaagtgtaaaggggcattagtttcaacttagagcagctcccccagctacaaatgctgataaaatagctcagaagtgcaagagcctggttactttcagtaattttaggatttagtatctggatctgaattttgaccattgttgaaggagcagataattggatgcattttctaaagtaatgatttaggccaaggagggcagatcctttgagcccaggagtttgagaccagcctgggcaacatagcaagaccccatctctataaaaaaatttttttaaaaaatcagccaggtggtggtgtgtatctgtggtcctcaggttccagagtagctgggtgggaggattgtgtgagcctgggaggtcaaggctgcagtaagccatgattgcaccactgcactcagccttgggtgacagagggagaccccatctccagaaaatgtttttaaaactcggccaggtggcggcgcctgcctatgcctgggtggccagattgtgtgagcctgggagct

SEQ ID NO: 8335 - DNA, 1049 bp, Homo sapiens
tttcacttggcttaattccctttgagattcattcaagttgttgtatgtatggctggttggtttctgtgtattgactggaagatttttgacccagccttagaccagaacactgcggaagaggaaatccatcatggaaacccgagagtgacaggacccttgcttggtgacaagtagagctggtcatgtcgacagccccctcttacctcgtcgcgtctcagcagatgtccatggggtcgtattgggagtgacttttgtaccagttggcttggctgattttggaaagagtggaagaacccccttcaccttgtgagttttgttcatctgtgttgcatgtgtttgcacagtgtacattgactgaaacatgaagaaacagcccttgggcttttgagtctcggttttctttcttggcgctcatgctctcagaataataatacgtgtggtgcaggcccggtgcaccaggcaagtgagggctgtgctggcatggtttctttaggaggaaggcctgttgcacctatgtggctttggcatgcttcagtgaaaactgtaaaattacaagtcccaagaatctaatctcacagtgaaaatgttgagttgttcattcagaaagcacgcttgccctgcattttgaacatacatacttgtgtgtatttatatgttcatcatgtgagaacagcatttgtgaattgctaccctcatgaacatccatgctgaaaggttgtccattctttccaaactgcagaaatgcggctgagcagttacatacgtgtgtaagttagttcaggattcccagtgttagtgacttgatgcgcatgaatcaatagataatatttctatgtcctttaggggctctgcagttattttttttcctgaatcaagactaaagccagccctgctgctgattgtaggcaagtgccctttgctttttggggagccaggactggaaggtctcttggttcacaggcctgggttagggtgggccgcaggttggtctggagtttggcttttctctcccatcccagattcccctggtaagaggctgcgtcacctgc

SEQ ID NO: 8336 - DNA, 1046 bp, Homo sapiens
aagttgagaagagggctgaaatataaggcttatatctgtctctctgagcattttagaagaaagatatatctaagctctgtgtttaaatatagcatggtgtttgctactcggatggcaaataagcaattgaatatgtaggtcattgacttatgagaatgagtttggaggtttttttgcatgtgattaacgctgtcttacgattgggctgttgatgctccgccaacattgggttacacagagttcagcaagccatctgggaagaaaactggaagaatcatgagaggatacctctgtccccttaaggtgttaggagtgtgacttggtgttgagccctgtggctacagccagtggcagtggcaccaaccgctcccaagttacactggggagaaacacatctgagtgccgtgcgtctgtacatatctatcaggagggagggggcagagggcgatacttcatcgagataaatgccagcggtgtattttaatacattcttgattcagaaggcactgtttggaattgcatatttaaaaggaaactgccatccccttttgaaggtatgtgacatttaaaagatctgtagcagaagattggtttgacagctttgaattataattgaaagagtttttgttttaaaaaagaaaatgattacttctattttaaatgtcatcacaaagacataaatatgtttaatcaaattatatatttaatgtatgtagaatataatttttgtttgtgtggaagagtcactggtttgtgtgtgttttaagcagctttaaagctaagcaatgttgatgatttgaaagtgattcagcttttttggtaaatgactgtttaagggtttatagaatttcaaaaaatagtattattaaaatctgcttattttttatctatacacgtgtacctagtggcacattttgggagatggaggtacttttattgttgctgacagatagtaaattgtcgaatgaactgaaaaaacgtggaaccttgaagataataaaggcggaaacagcaaagacgctcctgcagttttcttttggattctt

SEQ ID NO: 8337 - DNA, 1050 bp, Homo sapiens
ttctggtgcttcctatccatacgctaggaacggagttcagcacccaaggaagagaattctagcctgaacccaaagagagaagccccttaactcttgatgtcttttaagtcccagtgacttttgagtttggctttggtcgttaagtttcatgactgcctatttttaagtggaattagaacttaagttaccgagaatcacagcgtcttgctaggtagcattcctctcgaccctgccaggtgagcttctgagaggctaagtgacttgcctgaggtcacatagttggacaaggcaggaaagcaccagcagctgaactggcccattgcgaagtgtgtccagcgggcctctcccaggccaccgctgcactgcggtctagtggtacaggccagagccctgggctcctccttgccttcccgcaacctcagtccactcctgcttcttaggtggacggcactggctttggcttgagactgggttaggcatgtcatctatttggtttctcgaatgctcagccctgacacttcttccgatgttcttagcatcacccttgaacaaacgttggttggggatccggggaccgacttgtttacacttcttctgatttgagtgaaataccaagaggctggcagagggacagcccctgagctatggctccctttcttagcccagatctcaagagctttctgctgtttttgctgtcatctctgctggatgtcgtctctgctaccgaggtacagcagttaggaaacattcgcgtccccatcactctggtcactctgctgactggtttttggacactgagtgtcccattcactctatcactgttgactggttttgggacagtgagtatgtgacatgcatatgacccatgcttaactcactcggagccattatctgagcactatttgtcaggtgctaagaaggcaagcttcaattgacttaagttccagcggggatgtttgctttttatgaaaatgatgcttagtacctccttactaagacaatggcagaatagaccagactgttgtcttcagagattcccaaacaccggat

SEQ ID NO: 8338 - DNA, 1050 bp, Homo sapiens
gggaagtggggattggtggggaaggggcatgaggtcaaatgaaatgcatgaccttaagtgtgccatttggttagttctaacacacgcacatacctgcgtaccccccaaagccctaccaagagctacagtcactccggaaagtccccttggggccctgccaggctgtccccaccctcacctccctgatcatctcaggccaccactgttttggtttcttttccttcaacagaggtagttttgcctgttctagaatttcatgtaatactacataatacatgtatgtacattatacacagcatatacatgtatacatacaatttaatatgtatgtatattatgacacatgtacctttttgcatgaagcttttttcatgccacacacatgatgtatttgagatttttaagacattttgggccagattattctcttgttcctttttacttctgagtagtattccactgaatgactcgaccgcagtttctttacccgctcacccattaatggacacttgggctgtttccagcttttcgctattctgagcaagtagctatgaaccattctcatgcatgtctttttgtggacatatgatttcatttctcttgggtaagttcctagaaatggaattgctgggtcatggagtaggtgtatgtttagtcttacaaagtggttataacattttatgcttccactgatcatgtatggaagtcagctattttttaaaccaccctacagaacgttggctttctgcttgggtggtggagtgggatgggagggtgagtgggtagggccccctcctctcccttgacccccacctccctactagcaggatgggggcaggggtctgcaccgttggctctgctgggcgtgggctgtggagttcacatgctctggaagatgtagctgtgtcctctatattagggtggggcctgtttctcttgcttttcctggctattctgaacaattcttgttccttcattccttccccccgcctcccaatgtctctcccttcccctgcttcctcttgtccccaaaataccatgctctctgat

SEQ ID NO: 8339 - DNA, 1562 bp, Homo sapiens
atctcatctgcatctgctgtcagacttgcgtctccctctgcctccccgcctgtctgcctccccaagaagtctcttccagagctgatcgtgtcttggcttcggtttttggaagagccgagccaacacacatcgtatttgagatacagtgggtcggaggcgatacccagggattttctccagcttggacagcgagccctttgccctctctgggtggcagggtgcctccctctaaaatgagggggcgatgcttggcagtttctagaacctgttcagatcaaggcaacctgggagttagagttccgctagtcttgtctggcagtacagtcggtctctaaatatgcttttattgtaccttccccaccatctgggtgaagcatcagtaatgaaaatggagtggaggctgcattgaccttttccagtgtccacgcactatattttaactgggaagttgcatgtattttctatacttaatactttaaaagcttcttgggcctcttgagaggcttgtaagtgcagcccacgtgtgacttgagctgggaacgcaacttcagattgagaagtcccacttttataggacacagcatttaacagcagctgcgtccaagtcgtgtggcatttggcagcgtgtttccaagtggacctgtggtaatcactttgctcttggggaaccgtggccaagggctgccctgcctccaaagaggctcagcaagggaaggctagaagtcctgtgggctggccaggcatggtggctcacacctgtaatccctgcatttttgggtggcagaggtgcgtggatcacctgaggtcaggagttcgagaccagcctgaccaatatgatgaaaccccatctgtactaaaaatacaaaaattagctgggcatggtggtgtgcgtctgtaatcccacctacttgggagactgaggcaggagaatcacttgaacctgggaggcagaggttgcagtgagccgagatcatgctattacactccagcctgggcaacaagagtgaaactctgtctcaaaagaagaaaaaaaaaaaaaaagagagaaatcctgtgggctatacctgggggttctttgccctgcttccaagccctgtacagccagcatgttgcacatgtcattgtcctggggttttcttcccagagggcccttttcggtgcagggtcctctgtttcatcagcctgcgttagcacaaacaaccctgaccgtgtcctggacctccttgagctcacgggcagaggttgctgctctgtcgtgtgctgtttgcagacttggacttggagtagttattctccctgtgcctccagggccttggtcctcacaggtgtttctgtgctcctccttccagagacaggcctcctgtgaatcgctctgaataaaatgttcccagctgaggttttggagtctcctttggaaggttgtcttggtattgttttcagtctcttgttaggaaaaccggacaggtgggtctgatcatctacaatgaatgtgcacaccacccccgggttcggcaggacacactgtgcccccagccctggtcatcttctgtttgaccacattt

SEQ ID NO: 8340 - DNA, 1027 bp, Homo sapiens
agattatattttagtctcttctagaaatacaaaaattagccaggtatggtggttggcacctgtaattccagctaatcgggaggctgaggcaggagaatcacttgaacctgggaggcagaggttgcagtgagtcgagatcatcccattgcactccagcgtgggcaacaaaagcaaaactctgtctcaaattaaaaaaaaaaaaaaatctcacttggaaaagcaaaatggtccttgaaaatgcccttgggaaaccacccatgctggaatgcaagggcatctcagctggccagggaccaggggtctggggccagaatgtcatattcttcaattgcaaatcctggagagtgtgcacaatgaataagatgtgggaagtgctcccacgctagctgtttgttaccattattattattagggacggtggtgctggtggtggtggtggtgatagtagtaggattcatggcaatcccagtagttatggtggcgtgaatgtcattgagaaagacaaatcctcccgtcaactgtgccttcttcttcctagcagggagtggctgtttgtgccctgttttatcaggagggagcagataagtgctagcaaccttctctggccccctgccgtgccctgccctaccctgccccaagggacagcagatacctttaatactacgaagcttgggtgggcttggtggttttcacgagtgactcagtcagtccccagagaggccctggtacctggggttgggggtgctcaaaaggttggcttctggagcaggggcgtccccaaggcacccctggccaggagtctcctgagggccccacccttcgtcccgatggagaagccctaacatctgtatttttagccacctcctccagggggtgcctgatgcagccagcccgaaactgccaacagcagcacacagactggctttcttcaaaaacaaaccactcccccaacacacacccacacactcgagtctagttattgaacatttggcatgaaaaatggttgaaagaagattttatataactc

SEQ ID NO: 8341 - DNA, 2210 bp, Homo sapiens
aagttacagcactcctggaaagaagggaaaatgcaaggcttctcctccccacctcatcttttgaagttaattttcattcaagtctgtgtttgatggaatatgtatcaaagacttatgaaagagtttttttttttttaatcctatcttggggtttggaaaattatatttaataattgctaaaaacttaagaaccattttaaaggtgttcagtggcccttttgatcatgatttaatggagagtatccaaaagccatcagtgtgactctaatgatattcacaaattaatgtttgggcataatctggagtttgcttttagctatcattattaatgtttaaagcctaaattatggctgcacttgggcattcagaacttcgcctgtgaaaagaagggctttgcacattgtgtaaaaaaaaaaaggggggattcacaaatgaatacagaatgtacaatagggagagagccaggccattgtttgtgtggaatgttgaccatgggagccaagggctagtttcgccttcattcttctgactgctggagaacacagaaacttcaggagctgtggacgggatgggaaccaggggcacattcatccgtctttgccgggcatggagatttggcctgccccctttccagagtttttcttagaaggtggtcttttctggactgctaaggaacgtcgtgtgctttctcttctcagtaatctgcttttttgaggaacgattttaacggcagatagtaagagttcctcaaggaaagtaaacagaccttttctaccccctcgaaatgtgattttaggaaatgatattcaacttcagaaaggaggcatcttaagtcacaggaggaagttgtgtttatttttactcctctcctgactttaaagtagtttttaatctgttggtagcattagggagaatgcagctaaaataagtttttgctggatgttcatgttttgcgtagctgctgccatttcggaaaaagctcctcccccattcacaaagcccttctccttccacgtgggagccgaggtcccaaagtggaaccaactctgtagcttaagggaggtgcattcctggcccctcactttctaaccctcaccttaagtggaatatgtagataatatgtagatcattaaccattgttggtgtctgaagcctgttcagtttttttagcaacgacactcggtgagaaccagttgtagtttgcatgtgtatatgcctagtccctccctcagtgaatgttttagaaagtgatctgctttagctgtttacctaactaaatttaacagatggttgcctagagttggcttaatattcacaaaaattgtgatgaaatggttgggatcttatgaatgggacaagtgatgattttgtttctatagagaattgtgacttttgtcctaggtaataatagagacttcgtttttcccaaagatcggttggtgtttaaaggatgggaaccctgaatagctgctgttgtctgcccctgatcctggtggtggccagccttgcctttggttttgttgccttctgtgagtccagaaaagccctggaggcaggggtgaggggggagagggagggctgggcttttcatccgtggggttctaaaaatccttctcatttataaaatacaaaaatacttaccttccattgtattgctgatttgtgcttcctccaaagctctcctctgatcagcagaaatgtgcttcttgcattaaaacaaatccttaattatgactaaaagaaactgtcagctgccttaaagattgtctggaaatagtggcaatatttctgtgtctcattccagcccacgttgtggcagaagcctggaagggccacgttaaaggatgtgtcacagagacagtgtgtgtaggtcttcctgcagcacaagcaagctcagggcttgtaaagtccagcttatcgtggctgtgctccagccatgcctgaaatctggcctccagcaatctgtcccgtcccaggacaaacaaaaactttattatggagtcatggaacctgaggaagtttctctggaaggaaccgaagacctagaccgtggagggagatcaactcctctggcctaatggggcttttctttttccaagatggaatttaaaaatctcatctataaaatgaggctagcaaagaatcattttatggtgtaagtggccagaatctaacctggaagtgatagtattgtacctgccgcaggtgtg

SEQ ID NO: 8342 - DNA, 1050 bp, Homo sapiens
ttttttgagacagggtctcaccctgtcactcaggctggagtgcagtggcaatatcatggctcgttgcagcctcgacttctcaggctcaggtgatcctcccacctcagccacccacgtagttgagaccacaggtgtctaccaccacgccagactaatttttattttttaatttttttgtagagatggggtcttgccatgttgcctaggctggtctcaaattcctgggctcaagtgatttgcttgcctctgcctcccaaaatgctgggattaccagcataagccaccgcaccaggcctataattctacttatctgagatgtttaaaatagtcaaattcataaaatcaaagactggaatggaggtgacctggggcctgggggaggggaaaattgggagttattaatcaatgggtataagggttcatttaagtataatgaataagctttagaaatctactctaccacattgcacctccagtcaacagtaacgtattatacacttaacatcgaaaaggacgcatctcacgctgagtgttcttagctcacccacacacaagtacagcggcagggaactgagagtgagagagacgtgactggagaaagtgagaactggcctgagtgggttcggggaccggccactgatacgatggtgggtcacagtgtgtgggcagatttacagaactggaacacgggtttagaaagttcgtatttgtgaactcatttggaacttttatgaaggtatcaaaattgaatctcatttggttattcatgtaatgagtcaaccatataaaatagttcagcaaggctgggcgtggtggctcacgcccgtaatcctagcactttgggaggccgaggcaggtggatcacgaggtcaggagatcgagaccatcctggctaacacggtgaaaccccgcctctactaaaaatatataaaaaaaaaaaaattagccgggtgtggtagcgggcgcctgtagtcccagctactcgggaggctgaggcaggagaatggcgtgaacccgggaggcggagcttgcagtgagccaagaccacac

SEQ ID NO: 8343 - DNA, 1050 bp, Homo sapiens
gaaatggaagaacattccatgctcatgggtaggaagaatcaatatcgtgaaaatggccatactgcccaaggtaatttacagattcaatgccatccccatcaagctaccaatgactttcttcacagaattggaaaaaactactttgaagttcatatggaaccaaaaaagagcccgcattgccaagtcaatcctaagccaaaagaacaaagccggaggcatcacacttcctgacttcaaactatattacaaggttacagtaaccaaaacagcatggtggtaccaaaatagagatatagatcaatggaacagaacagagccctcagaaataacgccgcatatctacagctatctgatctttgacaaacctgagaaaaacaagcaatgggtaaaggattccctatttaataaatggtgctgggaaaactggctagccatatgtagaaagctgaaactggatccctgccttacaccttatacaaaaatcaattcaagatggattaaagacttaaaacgttagacctaaaaccataaaaaccctaggagaaaacctaggcattaccattcaggacataggcatgggcaaggacttcatgtctaaaacaccaaaagcaatggcagcaaaagccaaaattgacaaatgggatctaattaagctaaagagcttctgcacagcaaaagaaactaccatcagagggaacaggcaacctacaaaatgggagaaaattttcgcaacctactcatctgacaaaggactaatatccagaatctacaatgaactcaaacaaatttacaagaaaaaaacaaccccatcaaaaagtgggcgaaggacatgaacagacatttctcaaaagaagacatttatgcagccagaaaacacatgaaaaaatgctcaccatcactggccatcagagaaatgcaaatcaaaaccacaatgagataccatctcacaccagttagaatggcaatcattaaaaagtcaggaaacaacaggtgttggagaggatgtggagaaattggaacacttttacactgttggtgggacagtaaact

SEQ ID NO: 8344 - DNA, 1030 bp, Homo sapiens
ccctccacagtccctgtcagaatgacatttctctaaacacagtgtacaaaaggttttcatgtgtatttctctcttgatcttcacaactctgtcagcgtggcaggatggatactactgtacacatttccagtcatattagccaaagttcatctgtttgtatcctgccaaaagtcaaacccagtggtagctctgggtcctcatctccaaatcccagcccagggccctctgcacttcctctgtgtcactgtggtggtctcgggccctgcagtgagttgcaccctcttgtttgaacacacaggcctgcaacccaaatggccctgaacagaacagctttcctggttcactataattcatttagtgttctctcctaccactttacatgacagtttacttaggttctaaagaccagactaccaaaaggagactcttgaagctagctggataattttatttctccaatatcagttatatctaggataggcattatatccctttaactcttacataatatggctattaactcttaacccaaacaaaaacccaatgtcatttgtaatgatgtgaacaaaatctgaaattaactgaaatggattcagtagcctcaatgatcaggccacaaataccaaatttcttcttctaaaggaatagctaaaacacaggtacttcaggaaattttaagttaaaaacagcaagttacaaatgtattttataaggatctttattcccccctgtaggaactttcatgttattgctttgacaaaggaagataactagaatttattcttacttgcttcagaacaaattttcctcgtgactgaaaggttgtttcaaccaaggagaggggctgggaggaaagataagcatctctcatacccctaatcccagctcattcctacctaagtaggaacatccttttgaattcattaacccaaaagatactatatcatctttcattataatcaacagaagtgtctaggtttatctagcagggcaaagacagttttatgatgtgtgtacacttgctacaagg

SEQ ID NO: 8345 - DNA, 1028 bp, Homo sapiens
cgcctggcctctgaatacatttttttttttttttgagatggagttttgctctcgttgcccaggttggagtgcagtggcacgatctcagctcactgcaacctccgcctcccgggttcaagcaattctcctgcctcagcctcccaagtagctgggattactatatgcatttttagtacagagggggtttcaccatgttggccaggctggtctcgaactcctgacctcaggtgatctgcccacctcggcctcccaaagtactgggattacaggcatgagctaccatgcctggcctctaaatacaaactttttatcagacatacgatttgtaaaaattttctcccattctgcgagttgtctttttacttttttgataaagttcaatttattgtttttttcttttgtttcttgtgcttcgggtgttgtatccaagaaaccattaatttagtgttgctttaattcagtgttttgaagatttactcctatgtttccttctacgagttgtgtagttttagctctgaacttaggtatttgatctgttttgaattgatttttgtgtgttgtgtgaggtaggggtccaactttattttttcctcagggagtttcctaagcaatgggtgcttagcaaggcagtactgtgggcggggtgggagcggggcctctgcaggacagtggcctccctcccctcgttctgactcagccggaggaaggagcctcagtcccgcagcatccgaggttatgcagaggtacaggtggcttgttacctccactaccacctggcctgctgctcacttgctgggagggaggatgaagcggagtgctgggcaggggctgccaatgttggatgctcacttgctcccaaacaggtttggggtccacagtctcaatgcagaggagagtgggggatgaggaccttctctcatttaacccccacactagccctctgaggccagggtaactgtgccccttttataggtgaggatcagagaggctaagggacttgcactaataacagctagcagggggcagag

SEQ ID NO: 8346 - DNA, 2026 bp, Homo sapiens
cacatttggggaagattctggcatttgacaacttatcagcttttttggacagtattgttgcaaattggcattcaaatcctatgctgtcctcactattctgcaaagagttaagggctgaaaatgcccttaagtcttcccagagtggagatgctgggagcagaggttgtggtgaaaggagaggcaggccgttcttagcaggcttctctctctaaggcctgtgcattcgccttttggcacttggcctagtggctgttggtgtggctagaagaggagtgggcagtgagcttgtctttgttgggggtggctgcagagccactcctggctgccggttaccggctgcctcctgagcatgagccctggctcatctggagcctctttaaaggtagaaaatgtttgccccagtgccagtcagcaccaggcctgatcttcaccttcctgacttagttaaggtgcaaagtctgccttctaaatagtgactgcaggctagggagtcacttcaggatcagaaggagttaaaagaatgtggctaacttgtttgtgtggatgttcattttctgagcacctccacacacattacctcttatgatcttcatataacaacccttcaagttcggcaaggtagcaggtgctcttcctgtttacagatgctgaaactgagtcctagaagcagagccaggcctggagcccagggctgcttcccccttcccaaagctgcccctccccattcccctgtgcacaggcactggccctgagttttcacaaagcctggttatttattcacaggggagtcctcagcactgcctcttctatttccctgtggaaacctcaaaagagaaatcctgccaaaagcgctcaaggacaaaggcgagtagaatgctttgactgcatcccttaccactttgggatccaccaggagcctttgcagtgatagaagtgggtggccctgcagagagcacacaagggagagcagggctgggttggataagccaggccaggagacacagagaccatgctcatgggaagagtggacgtgcagtctgcactttcctttctttggatccactcttcccagcttgttagctcaagctaggagcacacagtgtgtctccagtccttcaccaagaggacaggagatcgagatgtggaggtggcccctgggcagataactgaggtgacaaaccatagaattggttccacatgtagaagaaagtctacaaatgtagccgatcttataatagcatgcagcaccctccagccgagccacacaagctccacctgcccctccagctccacctgccgtggctcccaagactgtcagcacctagaaaccagttcttgcctctgaagcatgctgccgtcctcgatgcagatgtcttagctgtcacctgcgcaccttttgctgtcacatagttagtctgggagcaaagtctatcagtggtttggagtaccagctttcggatgagataaaaacagatttgaattctccctcttgctgtttattagctatgtgaatgaaggtaagtgatgtaatctctctgtgcatcagtatccttatctgtgaaatatggttatctgtacataaccatggtacctgcctcatagaggtgttcagagatcatgtagcatgacaccttgttctccaaaggcaagctctccatggaactatgactgttactgtctctcccagggttttgaagctctaatagtccacatgagcagtgtgacccaggatgaccttagaccttgtaactttccccccgtattaaaatggagctagatcgtatcccttctacccatatcatctgtcttctaaagctaccaggaataaaggcagaggacattaggtaataagatcagcaaaatcattagcttttcgggaacaagaaaataccaggataaaataagagaaagcttggtctcagttacccttaaagaaataatatataaatcagaggtttgatacttcagtttatttctttagttttcagggatatgaaatggcaataggttgctgttttatgctgaa

SEQ ID NO: 8347 - DNA, 1071 bp, Homo sapiens
tggcaggggcagtgggtggcaagctggggagcactgagtagcctctgagagttgaccggagccctgaggcacggggccttacatcagcccctgcgggtcagactcaggctggattggtcctccccaggcctagacgggaacacaacactgcctgctccctcttagcgggcatcactaggtacagccaggattgggcccaaaaggcagtcactggattaggacccagttctcttgttcctgggactttttaggagtgtctctgaaatttatcccttaagtaaaaagagcattctttaaaacctacagagccatcgcagtctaagagcagggcctggggtgctgtggcaggtcttgccttgaaggagccgtcttcccacagctcagtgtgctccagggcttgctggcaggcagcttccacggggtcctggaggctctgggggcataacagaaatgctatcagggagtttgagggcccgttatgagtctgacatacattggcattttgtgcatgcctttaattgtctgacatattgtggtactgagctgtgacatgggaacgattactagacctgcttttgctcatgaagaaactgagctcagagagggaaaacttgtccataaggaacagagctaatagtggtaggctggggctcaagcctaggactggctgactccaaagctcttcctgtctcccttgctctgtgtgcttctaaaagatacttagtccaagtccaaaatatgctcatttctcttccctcaggtgaagaagtcaaaggaatcttttgaagtgaagaaagtgggtttggacgtgcccttatgctgatgaatcattggagtaatatctggggtttagccgcatccttggtggcaaggcggtggggaaagcccctgagggtgaggccagcctgagccccaagggaaaggggctgctgggacctcctgacctcaactcatctccaggagcgcacagggcctcgcacagatgcctcagtctgtaccgctgggagttcgtgccatctcagacctaccctccctacctgggctgtacctaaagagatactgctaggcttt

SEQ ID NO: 8348 - DNA, 1027 bp, Homo sapiens
acagattagaacccaggagaaatattttctctgtttacaatgggtagattgatttttctttggggtgtttgcataactaaactaagcactttgtactacagtgatactttatatttttatacctctatttttcccaaacattttcgtattcaaagtgtatgtgaggcataatatagcgtagggggttaaaagcacagactttggagccagactggttgggtgtgaatcccagctctgccacgtagcaattctgagactttggatgagtgtcatcctctgtacacctcagcttcttcctaagcctcgtaggtggacttaatgcatgtgaagctcttagaatagtgcctgggaggcagtaagttcaatagatctgttcgctgtttttatcttctttgagtcactcagcaaccctaaggcttggtagggcagaggttattcccatttaacatgggaaaaaacaagatcacaccatggttaagtcataaagctgagaccagagctcaggtccgttggcccttagtcctgtgcttattctgtgacaccatacttccttccttatattatcaccttagagaagggagaaggtaaaagggcaagcagaaatgaggaaaagagaggagaaatacatctataaggctgggtgcagtggctcactcctgtaatcccagcattttgggaggccgaggcaggtagatcacctgagctcaggagttcgagactagcctgggcaacatggtgaaaccctgcctctaaaaaaaaaaaaaaaaaaaaaaaaaatacatctataaacaagaagcttcccgttgctattaagataagagccacattccctaatatgacccaacgagacccaaaagaattctagtgtgagcatctttatgttaatctttggacacatttatcagtattgctttagtattcttagaagtgaaattacaggaagaaagaagatgaagtatataaagcttttgatgtcaacaaatcgttttccatgttgttagactctcttatgatacttgacgtttag

SEQ ID NO: 8349 - DNA, 1116 bp, Homo sapiens
ctagtttccactaaaggttagtggtagacagcacttccactgtgtggcataacactagagaggccaacttattctagaaatgcaacaggattggctgcataaaaaacagaaagtatttattttacaaagtcggactgagatactatctgagttcaaattaaataccggttctacaggtagattctccagggatgggaagtgcccagacataatgtttggtgtctctcaccaccttccccactcataatctcatctttttgtcttaaataaacagatttatgcagctggtaccacaatactatttcagtaatctgcctcctagtgaaagtaaggacattctacagcaagtagtggatcacctatcccctgtgtcaacaatgaataaggaacagcaaatgtgtgagacgtgccctgaaactgaacagagatgcactctccagtgactccccagcaaacacaaggtgcagcagggtcccaaaggtagctggatggctgaactgctggatatgggagatacatgacgcgaagacggatttcacatccacaggacggtcttgaagaaaataacactgtgtatattattttaaaataaaaaatagaagtttttattgagttctttaaattactactccatgcttttcttcttcttggaaaagtttttaaatcaaccactcataatttgaccaaaattttaaaaaactggtattttgtaaatgtgtcagagacacatgggacagaaccctactttttgtagaggaacttaatctgaataaagtctgagtttttcagtaaatctccactgagttttctggtaattttacaaaaacaagcccatcactgtccattggaaatgggttagacagatagatattctttcagtttatccatgatttcgttcatcttgtcgcctggaattaacatcacagttcgcaagggcgtcattggtacgtcatcaaaagaccatttgcctcccagacaagtgtcgctctcctcctgcactgagtagttgaacttgagaattgccttctaaaccaaataagtaaccatgaattaaaaatcgggacaacccaaagacaaaacccatttgatctacggcaaagaatattacgtttggca

SEQ ID NO: 8350 - DNA, 1050 bp, Homo sapiens
taggtcctgtgtcagcaccactgttccttctaatcttctcacatggctctttctctggcctgaggtggttccttacacacatgcgctgatcagtagggctgtgctgcctagttgagggagctccctctggcccccgacttagatctgtgtgtctctctccagtactgtgaccgcgagttccggccaccttagtctccctggatccctggcattgttttcctactgcagggaggctggcaggctccacctgggttccccccgcatgcacactgcagctgggaccctcctcggagcatgagctggacaatcacagggctcccctcctgagtttgccctctcaagaatcactatccttcactccctggtatttggtggcttgcaaaccgttgtttcacatattttgtccattgtttgcttgtttcatgcaggagggaaaagtccagtacctgtttctccatcttagccatatgagactcttaaattattatttttttcctttcctagcaccagaaagtttgatgcaggcattggaagacttagattatctggcagcactggataatgatggaaatctttctgaatttggaatcatcatgtcagagtttcctcttgatccacaactctcgaagtctatcttagcgtcctgtgaatttgactgtgtagatgaagtgctaacaatcgcagccatggtaacaggtatccttaatgactattccttttctttttttgcaaatctgcactaggtatagatttagatcggatccatttgaaattatattttgaggagcacagagcagagatagtgatcaactcatttaaccttttgaaatgatagtgaggtattttaataggttagaaaaggaaaattttcttaatatgaaaaattatcttaagaaaactaactcaaagttcagcaaatttatacatcagatgtatgaaaacatactagatttcttttgctgaaataatcagtgcagatgaagaaaatgtgtcactagaggtgtttttccccaaataatgttgtgtgcctgttttttatttcctattggc

SEQ ID NO: 8351 - DNA, 1098 bp, Homo sapiens
gacgttttctcatttaggtgcatctttacttatttaaagatacatgtaggcagcaacacagggatttctttccctgtatctgttacgtagtattgcctaaaattttttgtaattcagacatttttttaatagtgatgttgtttgcattgtattttattttcatgggtttttttttctttaggatattgagaaagtctgtgaaactgtctatcaaggatctaacctaaacccagatcttggagaactggtggttgttcctttgtatccaaaagagaaatgttcattgttcaagccactcgatgaaacagaaaaaagatgccaagtttatcaaagaagagtggtgttaactactagctctggagagtttttgatctggagcaactcagtcagatttgttatcgatgtgggtgtggaaagaagaaaggtaattattattgagtaggctaaacagactgctgatcgttgtcaagcactagtttctcagtttcctaccattttactgatcaggaagtgaggatgaactatgtgacctggggattcgttgaatttggtcatgagtgcaaagaagaattattgcagccagtaacaaaagtcttgattccattagcatgttggaggtttggaaatgaattaaattgattgagctgccaaaggagaaagttttgagggaagactcaactactagagcataaaggtgatagtcatctttaatagtattttttctttagctaaggtactagcaaagcaaattgtttgactcttaaactgatctcttcttatgaacaatttactggatttttttgatagcccctttatcagagtaattagtatcttaccccagagaacttactagaaacttgtttcaagtatactgactttaattttagcaaattttggcttataattgacgataaaattttcatcctaatcattacaaaatattctttattacttttaaattaaaaattagaaaaaatgaaaacaaggtatctcaaactctgaaagacactgagacttcagaaaatcctaacatttgagatctcaaacgaaactaacaaatattgactaatttaccattactaggtgccgagatgtttt

SEQ ID NO: 8352 - DNA, 1004 bp, Homo sapiens
atatgactgcatatttatcattttttgtatgtatatgatatacattctcttgaatagcaaatctgcctattacagtgatttattctgttatcatctcatcctgcatgattcaagatattcaagaaagtcctgaggaaaataataaaatgattacggagacataggatttatgaaaacagttggaggttctcagtgtaaacagatgaagcctaaggaagggaagaatggcaaatctaatatatttgagagtcagaattgccaggtgaaaaacaggacgtaggccgggcactgtggctcacacctgtaatgacagcactttgggaggctgaggcgggaggatcacgtgaggccaggaggttgagaccagccttgacaacatagcaggaccctatctcaacaaaaaaattaaaaaattagccaggcatggtggctcaggcctgtagtcccacctactcaggaagctgaggtgggaggattgcttgaactaaggagtttgaggctgcagtgagctatgattgcaccactgcactccagcctgggtgacagagcaagaccctgtctctagaaaaaaaaaaaaaatgaaaaattaaaaaaaaaaaaccaggatatacatttctgcaagaaaaaaatgcaattaagactgataggatgggtgtaatccttcaagtcagggtaagcaaaaattcctaaatggatttggaaatggattttggatcttggaaaataaagctcataacagaactgaggtgcagatggtcttagagtacatgattcttataagtttaatataaactataattaattgtagagtgacttttgaactgtcaactttagaacatgcatcattatccaggctggtagtagaaactgtaaatgccacaggacttggagaggtatgtaatttcccctgaaggcaggctggaaaggcattcctattaagaaaccatcagtcttgcagtcttaaagtgagagtgccatgaaagctaccagaggattttgtaatt

SEQ ID NO: 8353 - DNA, 1041 bp, Homo sapiens
cattcctttcttaacagggacagttgcttcaggtgtggtgggctgaggtacaaaggcacccatggagacaggtggagagtagcttcctgctttgacaggttttgcaggttgtttctttctgcccttgctgggctgccttattcttcattgctttcatatcttcacttcacagttactcttgcttctgaacattgtactttcttttccactgtgacatgcccccagaaccagcgcagagtcagaagatactctgatgcattgtggtaaacagtgtttgagtcacaggaaagaggccagagctattgaaaagacccctatgataaaataaagcaacacctgttttcttcctggtattccatgctctggagaggaggcaacatggctgtcaaagggtgtctccaccacttactcacttgtaaccttatagaagtcacctaacctctttgacctttaagttgcctcatctgaaaaatgtggacgattaatatacttgctctgagggttgttgtgaggactattaaatttatgtaactgatgcatggtgtatgtatgtggtagctatgtttataattatatttttataattatgattagaacaagattgattttcctgaagaggtatgctagccataattttgaataagctcagattgaatagctatttaaatcagaggatttaacattgatcattgattggccgggcacggtggctcacgcctgtaatcccagcactttgggaagccaaggcgggcagatcccaaggtcaggagatcgggaccatcctggctaacatggtgaaaccccgtctctactaaaaatacaaaaaaaattagctgggagtggtggcaggtgcctatagtcccagctgctcaggaggctgaggcaggagaatggcgtgaacccaggaggcagagcttgcagtgagccgagatcatgccactgcactccagactgggcaacagagtgagactccatctcaaaaaaaaaaaaaaattgatcattgattatagaaggcagtagtctatatttgatactgtcttt

SEQ ID NO: 8354 - DNA, 2480 bp, Homo sapiens
gcatgcttctgtctacaggggttccttggtttaggagacccaaaagacttaatcctggttggattcactttttctgagtgacattttttagtttgtgaaaatgtgtgcatcgatgaagaaattttattatgaattagcttaaaaatgcattaggaacttctgtatgaaaagatcacattatttaagtgtaaaaaaactgcataataaaagcagttcaagtcaagaaaaacaatgttaatggaatatattttaaaacttatttccaacctcaaaattaattttctgcaactaaggacctgcataatacctagtaagcctttggggttttgcagaggaggtcgattctaaaaatgggtgtttaaattacttaagagttctattttttttcttcccacacaggctgaggacaatgtgtgtgtcaagaaaataagaaccagaagtcatagggacagtgaagatatttgacagaaaaatcgaactgggaaaaatataataaagttagttttgtgataagttctagtgcagtttttgtcataaattacaagtgaattctgtaagtaaggctgtcagtctgcttaagggaagaaaactttggatttgctgggtctgaatcggcttcataaactccactgggagcactgctgggctcctggactgagaatagttgaacaccgggggctttgtgaaggagtctgggccaaggtttgccctcagctttgcagaatgaagccttgaggtctgtcaccacccacagccaccctacagcagccttaactgtgacacttgccacactgtgtcgtcgtttgtttgcctatgtcctccagggcacggtggcaggaacaactatcctcgtctgtcccaacactgagcaggcactcggtaaacacgaatgaatggatgagcgcacggatgaatggagcttacaagatctgtctttccaatggccgggggcatttggtccccaaattaaggctattggacatctgcacaggacagtcctatttttgatgtcctttcctttctgaaaataaagttttgtgctttggagaatgactcgtgagcacatctttagggaccaagagtgactttctgtaaggagtgactcgtggcttgccttggtctcttgggaatacttttctaactagggttgctctcacctgagacattctccacccgcggaatctcagggtcccaggctgtgggccatcacgacctcaaactggctcctaatctccagctttcctgtcattgaaagcttcggaagtttactggctctgctcccgcctgttttctttctgactctatctggcagcccgatgccacccagtacaggaagtgacaccagtactctgtaaagcatcatcatccttggagagactgagcactcagcaccttcagccacgatttcaggatcgcttccttgtgagccgctgcctccgaaatctcctttgaagcccagacatctttctccagcttcagacttgtagatataactcgttcatcttcatttactttccactttgccccctgtcctctctgtgttccccaaatcagagaatagcccgccatcccccaggtcacctgtctggattcctccccattcacccaccttgccaggtgcaggtgaggatggtgcaccagacagggtagctgtcccccaaaatgtgccctgtgcgggcagtgccctgtctccacgtttgtttccccagtgtctggcggggagccaggtgacatcataaatacttgctgaatgaatgcagaaatcagcggtactgacttgtactatattggctgccatgatagggttctcacagcgtcatccatgatcgtaagggagaatgacattctgcttgagggagggaatagaaaggggcagggaggggacatctgagggcttcacagggctgcaaagggtacagggattgcaccagggcagaacaggggagggtgttcaaggaagagtggctcttagcagaggcactttggaaggtgtgaggcataaatgcttccttctacgtaggccaacctcaaaactttcagtaggaatgttgctatgatcaagttgttctaacactttagacttagtagtaattatgaacctcacatagaaaaatttcatccagccatatgcctgtggagtggaatattctgtttagtagaaaaatcctttagagttcagctctaaccagaaatcttgctgaagtatgtcagcaccttttctcaccctggtaagtacagtatttcaagagcacgctaagggtggttttcattttacagggctgttgatgatgggttaaaaatgttcatttaagggctacccccgtgtttaatagatgaacaccacttctacacaaccctccttggtactgggggagggagagatctgacaaatactgcccattcccctaggctgactggatttgagaacaaatacccacccatttccaccatggtatggtaacttctctgagcttcagttt

SEQ ID NO: 8355 - DNA, 1091 bp, Homo sapiens
aatttgtctagtggctaatttctgactgcttatgatgtacctcatgatacaattgtaggtagatgtcttcagcctttctgtagttcaaaatcacctcttgaaacaggaaaattctttttccaaaaaaaactattgaaacagaaaaatttccaaggcattctttggaaaggcagaaggaacagaagttgggatgtccctgagacacatgctcactatgtgagagttcctggtcagtgggggatgcgtctgccctccaaccctcctccagccagagactatctaagctaatgaactttaagtgctactgaaatcacatcaagttgagccactcataattacaagcatgtggacaaatccataagaatgattagattccattagtgttcttctggggaatacttggtttagctaaaataaaaataggttgaattgctccctttttgtgagcaattcacaaaaatataatataaatttaattcttagcacacacaaaatttggacctaaaactaccatattctgagttcagcaaacgaaactcatgtagcaataacctcttcagatacagaattctggcaagtacagctgtccagacagaccctcttcggcacaaactaggaagcttcaactgccaagaaaaggaaagattcccaggtgtccccagtacctgctgcatagccaggcagccagtggagggggagggcttgtgtgtctggatggtgggcaggaagtcctagtggggagatgcccatagactgttccagagagggaagaggagaggctcaagaagggcactgatgcccacacaggtgtcctaagtcagagactgtacttctggggcaggctggaagcagaagacacccgacagtgccagacaaggtcctagaaaccacaggcacaccagggacgcaacagctgacgtgggtcagcacgttcacccgtcgagtcttacaataaaacgcaggctccaggcgcttaccgaattcacagtctggaaggtgctgcttcctcagaatgaaaccaaagaagggtgaaagcgaatcttttaactaggatgattcctaaacacagagcaaccaggcccaaggctgag

SEQ ID NO: 8356 - DNA, 1031 bp, Homo sapiens
cagaggataggtgggtggttcagttctatgttctggatactgtcaccaagaccaggactgggttaaaaatcctatctatgtcactattttaactatcagaacaatatcaataaggaatgtgtattcttgagaaggggaaactgtctggactgttagatagagaggctcccactgcatgcagagaagtttggggaaactccagaaatggcaatttcctgttctgccttagcagtgatggttaaaggaataggaattcatttactccctgtaaatgaatgaataacggaccttctttctataatgtaaactgtaaaaattagatttgatatatatcttattaggcattgttattgaaatttatcctgaattccttatttataatttgtcagcagagacagtcatttctccataggagcaaagtaccaaggcattaccttgactatcctagatgacaagtctcttagacaattcatcagtgtgtgattttcaaatgatttctccttttaggttactgttgattgtgctccctgttgaattttgaagtttgttttactaattattggaattttgtggatgtcttctcatttctttagggaatatccctgcgctccagacgccaaaataagactgaggcagaacagcaaataactgaggtctttgtattagcagaaagaatagaaataaacagaaatgaaaagaagcccatgaagacctccccagagatggacattcagaatccagatgatggagcccggaaacccatacctagagacaaagtcactgagaacaaaaggtgcttgaggtctgctagacagaatgagagctcccagcctaaggtggcagaggagagcggagggcagaagagtgcgaaggttctcatgcagaatcagaaagggaaaggagaagcaggaaattcagactccatgtgcctgagatcaagaaagacaaaaagccagcctgcagcaagcactttggagagcaaatctgtgcagagagtaacgcggagtgtcaagaggtgtgcagaaaatcca

SEQ ID NO: 8357 - DNA, 1033 bp, Homo sapiens
aagtattgaagcaacgtgcaaagaagaaaccaaacccagtagaagaggaacccagcaggagaaggccaagagcacctaaggaaaaggcccaacccctggaagacctggccggcttcacagagctctctgaaacatcaggtcacactcaggaatcactgactgctggcaaagccactaaaataccctgcgaatctcccccactagaagtggtagacaccacagcaagcacaaagaggcatctcaggacacgtgtgcagaaggtacaagtaaaagaagagccttcagcagtcaagttcacacaaacatcaggggaaaccacggatgcagacaaagaaccagcaggtgaagataaaggcatcaaagcattgaaggaatctgcaaaacagacaccggctccagcagcaagtgtaactggcagcaggagacggccaagagcacccagggaaagtgcccaagccatagaagacctagctggcttcaaagacccagcagcaggtcacactgaagaatcaatgactgatgacaaaaccactaaaataccctgcaaatcatcaccagaactagaagacaccgcaacaagctcaaagagacggcccaggacacgtgcccagaaagtagaagtgaaggaggagctgttagcagttggcaagctcacacaaacctcaggggagaccacgcacaccgacaaagagccggtaggtgagggcaaaggcacgaaagcatttaagcaacctgcaaagcggaagctggacgcagaagatgtaattggcagcaggagacagccaagagcacctaaggaaaaggcccaacccctggaagatctggccagcttccaagagctctctcaaacaccaggccacactgaggaactggcaaatggtgctgctgatagctttacaagcgctccaaagcaaacacctgacagtggaaaacctctaaaaatatccagaagagttcttcgggcccctaaagtagaacccgtgggagacgtggtaagcaccagagaccctgtaaaatcacaaagcaaaagcaa

SEQ ID NO: 8358 - DNA, 2443 bp, Homo sapiens
aagtctgaagtccctgaagacctggccggcttcatcgagctcttccagacaccaagtcacactaaggaatcaatgactaacgaaaaaactaccaaagtatcctacagagcttcacagccagacctagtggacaccccaacaagctccaagccacagcccaagagaagtctcaggaaagcagacactgaagaagaatttttagcatttaggaaacaaacgccatcagcaggcaaagccatgcacacacccaaaccagcagtaggtgaagagaaagacatcaacacgtttttgggaactccagtgcagaaactggaccagccaggaaatttacctggcagcaatagacggctacaaactcgtaaggaaaaggcccaggctctagaagaactgactggcttcagagagcttttccagacaccatgcactgataaccccacgactgatgagaaaactaccaaaaaaatactctgcaaatctccgcaatcagacccagcggacaccccaacaaacacaaagcaacggcccaagagaagcctcaagaaagcagacgtagaggaagaatttttagcattcaggaaactaacaccatcagcaggcaaagccatgcacacgcctaaagcagcagtaggtgaagagaaagacatcaacacatttgtggggactccagtggagaaactggacctgctaggaaatttacctggcagcaagagacggccacaaactcctaaagaaaaggccaaggctctagaagatctggctggcttcaaagagctcttccagacaccaggtcacactgaggaatcaatgaccgatgacaaaatcacagaagtatcctgcaaatctccacaaccagacccagtcaaaaccccaacaagctccaagcaacgactcaagatatccttggggaaagtaggtgtgaaagaagaggtcctaccagtcggcaagctcacacagacgtcagggaagaccacacagacacacagagagacagcaggagatggaaagagcatcaaagcgtttaaggaatctgcaaagcagatgctggacccagcaaactatggaactgggatggagaggtggccaagaacacctaaggaagaggcccaatcactagaagacctggccggcttcaaagagctcttccagacaccagaccacactgaggaatcaacaactgatgacaaaactaccaaaatagcctgcaaatctccaccaccagaatcaatggacactccaacaagcacaaggaggcggcccaaaacacctttggggaaaagggatatagtggaagagctctcagccctgaagcagctcacacagaccacacacacagacaaagtaccaggagatgaggataaaggcatcaacgtgttcagggaaactgcaaaacagaaactggacccagcagcaagtgtaactggtagcaagaggcagccaagaactcctaagggaaaagcccaacccctagaagacttggctggcttgaaagagctcttccagacaccaatatgcactgacaagcccacgactcatgagaaaactaccaaaatagcctgcagatctccacaaccagacccagtgggtaccccaacaatcttcaagccacagtccaagagaagtctcaggaaagcagacgtagaggaagaatccttagcactcaggaaacgaacaccatcagtagggaaagctatggacacacccaaaccagcaggaggtgatgagaaagacatgaaagcatttatgggaactccagtgcagaaattggacctgccaggaaatttacctggcagcaaaagatggccacaaactcctaaggaaaaggcccaggctctagaagacctggctggcttcaaagagctcttccagacaccaggcactgacaagcccacgactgatgagaaaactaccaaaatagcctgcaaatctccacaaccagacccagtggacaccccagcaagcacaaagcaacggcccaagagaaacctcaggaaagcagacgtagaggaagaatttttagcactcaggaaacgaacaccatcagcaggcaaagccatggacacaccaaaaccagcagtaagtgatgagaaaaatatcaacacatttgtggaaactccagtgcagaaactggacctgctaggaaatttacctggcagcaagagacagccacagactcctaaggaaaaggctgaggctctagaggacctggttggcttcaaagaactcttccagacaccaggtcacactgaggaatcaatgactgatgacaaaatcacagaagtatcctgtaaatctccacagccagagtcattcaaaacctcaagaagctccaagcaaaggctcaagatacccctggtgaaagtggacatgaaagaagagcccctagcagtcagcaagctcacacggacatcaggggagactacgcaaacacacacagagccaacag

SEQ ID NO: 8359 - DNA, 2194 bp, Homo sapiens
ttaccatattttatgaggctgtaatactcgattgacatgagacactaatagaatgtttttattgtgtatgtttttatttcaggaggaaatgtgttcttcagtgcacagaatgcagcaaaacagccatctgataaatgctctgcaagccctcccttaagacggcagtgtattagagaaaatggaaacgtagcaaaaacgcccaggaacacctacaaaatgacttctctggagacaaaaacttcagatactgagacagagccttcaaaaacagtatccactgcaaacaggtcaggaaggtctacagagttcaggaatatacagaagctacctgtggaaagtaagagtgaagaaacaaatacagaaattgttgagtgcatcctaaaaagaggtcagaaggcaacactactacaacaaaggagagaaggagagatgaaggaaatagaaagaccttttgagacatataaggaaaatattgaattaaaagaaaacgatgaaaagatgaaagcaatgaagagatcaagaacttgggggcagaaatgtgcaccaatgtctgacctgacagacctcaagagcttgcctgatacagaactcatgaaagacacggcacgtggccagaatctcctccaaacccaagatcatgccaaggcaccaaagagtgagaaaggcaaaatcactaaaatgccctgccagtcattacaaccagaaccaataaacaccccaacacacacaaaacaacagttgaaggcatccctggggaaagtaggtgtgaaagaagagctcctagcagtcggcaagttcacacggacgtcaggggagaccacgcacacgcacagagagccagcaggagatggcaagagcatcagaacgtttaaggagtctccaaagcagatcctggacccagcagcccgtgtaactggaatgaagaagtggccaagaacgcctaaggaagaggcccagtcactagaagacctggctggcttcaaagagctcttccagacaccaggtccctctgaggaatcaatgactgatgagaaaactaccaaaatagcctgcaaatctccaccaccagaatcagtggacactccaacaagcacaaagcaatggcctaagagaagtctcaggaaagcagatgtagaggaagaattcttagcactcaggaaactaacaccatcagcagggaaagccatgcttacgcccaaaccagcaggaggtgatgagaaagacattaaagcatttatgggaactccagtgcagaaactggacctggcaggaactttacctggcagcaaaagacagctacagactcctaaggaaaaggcccaggctctagaagacctggctggctttaaagagctcttccagactcctggtcacaccgaggaattagtggctgctggtaaaaccactaaaataccctgcgactctccacagtcagacccagtggacaccccaacaagcacaaagcaacgacccaagagaagtatcaggaaagcagatgtagagggagaactcttagcgtgcaggaatctaatgccatcagcaggcaaagccatgcacacgcctaaaccatcagtaggtgaagagaaagacatcatcatatttgtgggaactccagtgcagaaactggacctgacagagaacttaaccggcagcaagagacggccacaaactcctaaggaagaggcccaggctctggaagacctgactggctttaaagagctcttccagacccctggtcatactgaagaagcagtggctgctggcaaaactactaaaatgccctgcgaatcttctccaccagaatcagcagacaccccaacaagcacaagaaggcagcccaagacacctttggagaaaagggacgtacagaaggagctctcagccctgaagaagctcacacagacatcaggggaaaccacacacacagataaagtaccaggaggtgaggataaaagcatcaacgcgtttagggaaactgcaaaacagaaactggacccagcagcaagtgtaactggtagcaagaggcacccaaaaactaaggaaaaggcccaacccctagaagacctggctggcttgaaagagctcttccagacaccagtatgcactgacaagcccacgactcacgagaaaactaccaaaatagcctgcagatcacaaccagacccagtggacacaccaacaagctccaagccac

SEQ ID NO: 8360 - DNA, 1841 bp, Homo sapiens
ccaacttacaggagccagcacgtcgtgtctcaagatctagcttctcttctgaccctggtgagtagtggttgggttttgttccagaatcctgaaagatcaggtctttgcgaagcatattggcaaagaaggggcaacaagaatgcaagtgctaaatgtctagcctgtcagaaatggaggaggtgtcatttaacatgtcaacgacagacagatgcctaactttcccttggtgactgatggtatgctatgcttaggagagactctagatatgagaaaattgcctgttcagctgtcaactcagttctcagtagttagatagcatgtgctatttcatactggttattggagctgatatgatttatatatttgtatcataatactagtatcataagacttgcaagttttaggcattaaataatttgtaggccaagtaaaagctagcttataagacaacctgaaacaattaaaatattgaattccacaaatgttaatcattgagaaaatgctgaacttctgtttcttatttcataattcattgccaagatgagaaagctcaagattccaaggcctattcaaaaatcactgaaggaaaagtttcaggaaatcctcaggtacatatcaagaatgtcaaagaagacagtaccgcagatgactcaaaagacagtgttgctcagggaacaactaatgttcattcctcagaacatgctggacgtaatggcagaaatgcagctgatcccatttctggggattttaaagaaatttccagcgttaaattagtgagccgttatggagaattgaagtctgttcccactacacaatgtcttgacaatagcaaaaaaaatgaatctcccttttggaagctttatgagtcagtgaagaaagagttggatgtaaaatcacaaaaagaaaatgtcctacagtattgtagaaaatctggattacaaactgattacgcaacagagaaagaaagtgctgatggtttacagggggagacccaactgttggtctcgcgtaagtcaagaccaaaatctggtgggagcggccacgctgtggcagagcctgcttcacctgaacaagagcttgaccagaacaaggggaagggaagagacgtggagtctgttcagactcccagcaaggctgtgggcgccagctttcctctctatgagccggctaaaatgaagacccctgtacaatattcacagcaacaaaattctccacaaaaacataagaacaaagacctgtatactactggtagaagagaatctgtgaatctgggtaaaagtgaaggcttcaaggctggtgataaaactcttactcccaggaagctttcaactagaaatcgaacaccagctaaagttgaagatgcagctgactctgccactaagccagaaaatctctcttccaaaaccagaggaagtattcctacagatgtggaagttctgcctacggaaactgaaattcacaatgagccatttttaactctgtggctcactcaagttgagaggaagatccaaaaggattccctcagcaagcctgagaaattgggcactacagctggacagatgtgctctgggttacctggtcttagttcagttgatatcaacaactttggtgattccattagtaagtttatttaattgtaaatttatttttctaaaagatgaacaccttctatgtagctgtgagaccttcattctttcagtagtgattagctttgtggaagagaatgtaagcacataaggcacagggataagacagacacgcacgctgttttcgctaatagatgaatactgaaggcctaggtaattgtaacaaggaatgacagaagagatggaagttgtcag

SEQ ID NO: 8361 - DNA, 1050 bp, Homo sapiens
gatgtcctctgtttttagtagtgctttcttttctgcttaatgtttcctttggatgatgagtatggttaaactaatttccttttgatgagtgcttgtgtagtataacttttccacccccttaattttaacttttcataattgttatggtttaagttgtctcttggaacctgttgtcaggtgacctcttgtgtttaactggaatatcttcttgctggattgatccttatataaaatgtcctttttctctatgaataacttttgtctgagatgattttgtctcatgttagtacagtactccagttcccctctgcttgctgtttgcatggtatatcttttcccatgcttttattttaaaagattgtgtctttgaatcaaaattgcgtctcttgtagacaacgtattagttgggtcatttaaaaatccattctgctaaatgaatctctgttattgtcttcatttgtattagctgttttttaatgcaccacttaaattccctagtcatttcttttactgtgcttctgggaagtttgccttcatttttaaagagtatttttattgaatacagacttctatgtaggaagtttttctttttttctttttctttttgtttgtttgtttgtttgtttttgagacagagtcttgctctgtcacccaggctggagtgcagtggtgtgatcttggctcactgcaacctccgcctcccgggttcaagtgattctcatgcctcagcctaccaagtagctgggattacaggcacgcgccacaacacccggctaatttttgcaatttttagtagagacggcgtttcaccatgatggccaggctggtcttgaactcttggtctcaagtgatccacctgcttcagcctcccaaaatgctgagattacaggcatgagccactgcgcccggcctataggtaggaagcttttgatgtttattggagggctgaactatttttcaaaacaagatattatccaaattgagataaattcagatgattaaagacatccaacaaagatttgaaagtgaatcttagaaagagagacttga

SEQ ID NO: 8362 - DNA, 1047 bp, Homo sapiens
gcctccaaacatttttctgtactcatacttagattcacaatggttgtgtatctctataatgtgaaatatttttttgtggtgataaaaagagggccaaggaggtatgagccatcagactggaaaaaaggatgactatatgatgaggagaaactggggtggcagggagggagggagggtttatcactgcttaacttcatcttcatgaaatgaaactttgtaacttattgtagttagaaattgtaactttgatattgaattctcttgccttcaacaagcacactgacagagaaaaaatgctactgtctgttggttccaatattctcccactgctagagcttcctgttaagcaagtgtgatctgcaacattttttcaacttttgctagcactgtatactattgcattcttaggctactgtgaggtctatgtttcttgtaccagaaattgtccttttgacttctagatccttcttccctaatgtgttttgtatgtggttataaaattgtagacttttgtgattttgccaaagttgtagctaaatatttatacacttgtcttgaatttttttcagatccacttaaaatatttagaaaaacaagttttattccttatgtgtcttataaggaataaaatggtcttcatttgacacttactttcccatgaacacttgcagttgctaagggactttattttgtaacatatcaattataaatattgtatttatctttgaaattttgtacattgcttttcccaccttttcctttttcttctttcttgtctgtattggtttttgatcacggcctggtgttgtgatactgggaagagcattagccaagaacttgtctctttgatctgtttcgttaagctgaaccagtgtctttacatttcatttgtacttcaaaaaatatgctattgtttagactttccatcctttttttttttattttgaggaaaagtcaaattcattgtttatttttatattatttttaagttatctgaacaaatacttttgaaaaaaaagtttgttgtatagtcaaaacaaatcggtg

SEQ ID NO: 8363 - DNA, 1089 bp, Homo sapiens
aattaatttttttgtcggacaaaatatgaaagcaaaaacccatctaaaacgtagccctcctctcagctgccctggccgcttttcatccatgtgaggagccatcagccgcctgaaactccagctacctctcatcatcatgcccggatcagttcaaagttcatgaaatttctatgagcattgatctcgccccattgattttttttgcagcagatctttgaaattttaatttcccgagcatctgaatttcttatagatgaaatgcacttggaggagacagttgatgataaagtgaagaacttagcatcattttaaagcctaaaaaagggagaaaaagcaggcatttgcagactttgtgtaatgtttttgaggtggaatgatgaaggcgctctggtgggggcaaggtattcaggggggagctaaatatcaattttgtcttccgtggccacacatttttaatgcaactttttatacagtcatttttgaaagaaaagctatctggagaaacagcaggacagaaaaacattcttcaccgcacaatcatttgctcacagcagtctttatcacctggtcaagttcacctagttacttatcagtgggacatttaataacctcaaggtgatataattgctattggcatttttcccccttggattcagctggttaatgtgtaaactacttgtcagcaaatagcactttgtcactgaaatcactaacaccctctagaggaatgtctttgtattgagcaatttaattttactttatttaatttttacacattacaacctgtgttcattcaggcacactgacggcttgcagtctgttggggtagggtctgggtctccctgttagtaaaatatactatatcttatttaacaatccccattgccttaattgaggcgcattcttgtccctcggaaaaggaactgcagatgttcttattatgtagttatgttgctaatgtgaaaaactgcctcattacgaggatctgtttgtagctagaaaattactgcgttatgacaaatgcatgattgggaagctacaggaagatgatcattattgaaatgaaactggaactcatttaatagctgc

SEQ ID NO: 8364 - DNA, 1063 bp, Homo sapiens
aggattctgtgggctgtttccgagtggaatggggctgggaaagccgcgcctggcgtgtagcagtttatctcgagctgctgtcttcccctctgcctgggagaaacaagtaaataaagcccatatttcaagcttgatttactctggtacctactgtgaaagatgatgactctttagggaaataaagacagggtcagggaattagtgcacataatggtcattttgatgacgggccaacagatgcaacgagagacacactgtacacaattaagcataatgtactaatgacaggttagaatttttatcgcctcttcgtgatggagcagcaaatccatgttttgcagtaataaagagtttattggtgctaaagccaaagattttctgacataggaaagatttttcctttcataacaagagtattaaattctttgtgtaccagactctagaagtgagatatgtaaagtggttgtcagatatttcttaggaaaaagccaattaaagggtaattgagtaaaggatgagaattaccttttgacttcacatgttgggcattcaattttctcaccccctccccaaacactgaaatcgtgtggctcactgagcacctcctcgtgaaagcatacatttgctccgtgtgtaactctgcacaatatcagagtcacacacctgctgtacggtgccagccaccttgcaaaggcttaattgaatccccaactcagacatgaccaaaactagggtaagaggtaagcgcagagctcttctttctctctgctgaggcttcccctctgtccgtccctgtagatgccccaagaacctggcatggagccacttgactgttgagcttactttatttgtgtcactgggacctgtgtgctcagaaaggatcctggtctctagggttgtgcacgacagctctttctcaagtacttgcactgctctttaggcagtttggatagaagcagaaactatcattgccacatagaaaataaagagagggagtgagcaagcaagaatgcatgtgtgtgtgtgcatatgtatgtgtgtgtgcatatgtatgtgcgtatgt

SEQ ID NO: 8365 - DNA, 1128 bp, Homo sapiens
ctgatttcccacattacccatcattgagggccgcaaaagggggttgtccttctaggaccgaggctggaacccaggcacgggaggctgtgctaagagccagagctctttccttgcagcgtggccacttaaccctgcgtgggggtaggcgcgcacctaggagtcacagctcggtttgatgaggcgtcttttcagggggccagtcagtgtcacaccttccagtgtacagtgactcacgttttcaagcgctggagaaaccaagccctggaacagtctgaaacttgatgattaaagaaaaaatcctgtacagggttcctgagatgctgagaagtaggtaatttcaaacaagtgatagccacatgcaaaaagcaagccattagaacagttcaaagtttcctttttctcttcaatcaccagggtgcgaccgccaagcccactgcatttctaaggagacaatctatttctcctttgaccagagggaaagaaatcatcattgcatgattagtggcttcagttaggtgagaacaacagcggcagggaaggcggtgaggatgggctgtattaattacccaacacttgctggcaagataattttatcagtggtttggccagtggtaagttgcagcttttgataaaagtggatacgttcttagctacatggaaacatgagggtagggatggtgtcagatgaagtgcatctcatcagcttttctctgacaaaccaaattcattccttatgtaattgataacggccttggccaattatttcacacattacaatacacagaggccccctttacaggttttgcagggctgtaattagctatgctaatatcccctttattggccctaatattgctcaacaccttttgccatcctggaacccactagagccccatggcctgtcaggaccgctgattattgagaaggatagctttaatcaaacataattgcagttaatttttctctcctgctctctgttgccagcatctaatgccacggactccttgatattccattaaattacaattaaacagcctcctttgtttctgattgtcctgaacaacaccacaaagttctgtagccgtttaaaggagagctgtttggtcctaattgcctgctagctcacaa

SEQ ID NO: 8366 - DNA, 1026 bp, Homo sapiens
attaagcaagctggtgtggatgggggaaatgtacatccgaggaggaaaggattaacaagatctttcccacttggagatgggaagcaaaaaaaaaaaaaaaaaaaaaaaaaaaattaaaaccaaaaacaacaccccctcacccacatttattttgagaatgacctccccagccatcaggaatcaggatggcgaaagaagcattcccgtgatcttcagatccctaaaaacacacacgcgtatggtgggagaggcttgaaaccctaagttgggataagcataggcacttaatctctgcataacctgtaaaagcctcccctggagctggcaacaagtcaggggggtgcgtctgttgtgagccaagtgatgctggcatttttcttaaataaggagcttcgtgatcagagctggcaaatagaacagtgtccagagggagagaggaagctgttttaatgagcccgcagcgaaagacaaaatacagactgattgacagggcgcgtgatctgctggggaaataatgtcagtgctgcattgcccattagaaatagagaaataggtaaaggggggaaagaaagataggcacttgaaacaagaaccctagtgtaaatatagtgcacttcacatttcttttgtgttgtgcagttgacttctttgaaacagataaccttatcaaaactatcatgaaatatccggagcagttgcagaaaatactaactagaacactgacagcgggcggagtggggtggctgacgaagcttgtagctctgggatgtacttgcctttagagtgtctacctggattttacttatctgaacacattaaaaccacccggaaaagtttaatgcgagtcatacaaatttctccaaacggaggacttggcggggatctgttctggaaggggatattgaactggccggcaaagccattaaatcccatcagatctctttggcatcattttaatgagaatcattgcaaaagtacaagatcatggtatctataagtgcctcttgacagccgctgctgaaattg

SEQ ID NO: 8367 - DNA, 1073 bp, Homo sapiens
catcaatcaagaggagagagaagcatcctggctatcagcgaagaggagaatgtagatgcagggccgggttccagcataggaacttgtcacctggactttcttggcttttttttcacgcacggtgctggcgtcctttccggttctgcgagtgtggcccctggtgtgtcctcacctgtggaggagttcaaccctgctgccattccccggcctggccttccctccggctggatctggccatttcaaagagcaactgggacatgtccgtttctcctcctgggcttccctcgcacagcaagtcgggaaggctgtatttatttacattttagccacatggctggctgttgttttggcctgtttgaaatgacccaggctggtccagggcgccggcctctgcctcaccgtcctccggcacagtccatggtgaggcggggcctggaggagaacaacttccttatgttcctcaccatccgacacacataatggggctttgtggcactctgctggcatcaagaaatgccagcggattgtttagaaaatttaagacgttttcattggcagttaaccacgctgcttttgattccatggtgccgtcaccttattgatgtcgactccgatttatgaatgatgaagtggaggacattcgctatcagaagctcacaatgtagctcttaataaaagattaaacgaggaagagaaggcagcgcggatttctgacactctgctgataagcagctccgattcaaggctgcgcggaggcaggaggagacagtgacagatgctgaacgggagccggcgcacacatgttgctgccgcgctccgacgtgtagccgtgtggaaaatctgtctcgagaactttttacagatcagacaccaaaaacgtcttctccttactcgaggctgcacgttatccgaggatgcaaaattaatagccgtgcagaggggacgccggccgcgggccgggcagccttgctgcgggaggcgcagcggggcctgggcgcgggaggaggggcagcggcgagctgtcactttgagaaatgaggggtctaagaggctgggaccagcttggcagatgt

SEQ ID NO: 8368 - DNA, 1030 bp, Homo sapiens
tgtacaattaaaacaaaattccagatattcctgaagtggtgtgtgcagttagggagagcaaaataaaattaagacaaatggtaggatcgcaccctggaccagctctggaagctaatcaggatcagaattctggagatattttatgatgggcaatttcactagaaatggcaatgaagtaagtgcctgtgagttaccatcaatatttgtaataaaaataaacaatcatgcattcctctggcctgcaaataaacagggtaagtttaggcgtcataattatgacattgccagagtggtggtaagtcatgtggagatgtcagctgagcactggcagcctctggcttcttcccagctaagagggccacagccacttggatgagacactccagatgtacttgactgtctgacctggaaggacccacttagatgtcaagagcatcctacagttgagaatggttcttatcagagggcgtgccagaaaaagacttaccagcccaaagaattatgcatggaacctgcctttgaacttggctctgatgggtgttgggtaatacctggttttattggctcccaagtccctgaacttggctctatgggtgttgggtgatgtgtgctttcaatggctcccaagacctttgggtttgcactgggaccttcatgaactcagtcaccctgctctgaggtgccctcccatggaagtctacccaggttgcctgtggctgatgggtgtcaaaggctgtgacggaaaaagccaagaaatctgtatgcagaagttcaggagcacccccgctacggtgctcctcatgagtgctctcacaggcaaagcctggctacagcaccatcaatgttgggggctgtttaggaaacaagatctctcatgaaagaggttcaagttaaatttcctcaaagtgaggagaactggaggccctttggcatcaggcagtgagtccaggaggtcagggcactgggggttgcccaggaggaccttgggccggtgctggccaggcctcctctgtccctggaggctgcacca

SEQ ID NO: 8369 - DNA, 1024 bp, Homo sapiens
ccatcttggatttcaagcagcccttctcccagaactcatggcttggtctgcgttgtgtttggtcacctgcgtactcgccctccccactgtccccaagcacctcggggacagagagagtctcagtcatggctgggtccccttcccactgtgcccaggctgggcttccatgggcgggtgcctgatgtacccttgcccttggtaagcccggctggggaagtcctctctagcctcctccagagcacagctcaagtgtttattgactgctgcagggggcaaggactctgctacatgccacgtttcagggattaaaaaataacactggactggagtttgagggctaagcagatgagcagatctcactatgagtaaaccaagagtctcccctgattccacccctgccgttgtagcctcaggtcccagattccagcaaggacagacatgaaatcacacctgcatgtgcacacagatgtgtaggcgcatctgggcttcactcctgatggctctgacctgtaggcccctggggcagggagctggggaggggggtagggcagggccctgatcatcgttaaacaaccatgcgaacacacagggttccgtctggcctaaaccgcaggttggtggtgcggaggagggcaggcctggtgatgctgagggaagcagaaatggcagctccaagctccattactttctcaacgctccccgatcctctttagtctggtggtccactttgatttctgatcttcctccagatctaatttttttcttagcttttctcctaagttacattaaacatgaggccttgtgaaaacttgacttcttgacttctcccctcagtttcttcttcagtgaaatgtgtggggcatggagaatgagacagaagtggggtcttggcccctggacccagctggacacctctgcccgcttaggtcattgaggaactaagctgtgacatgagtacgcaaagaacctatgcctgagctcttctcaaaaatgccaggctgggagccctcggcctcaggaatgc

SEQ ID NO: 8370 - DNA, 1061 bp, Homo sapiens
aaagaaacacagatacctctttaaaacctggcttgcaattctcttgtgtatacacggagatgtgggattgctgaatcatagggtagttctatttttaattatttcaggagctgccatactattttccacagggcccgcactgtttctcatccacacccacagtggggtgctcaagggttccagtttctccatcctcaccagtacctattttctgttttttgttttttgtttttttttttttttgttgttgttgttgtttgagacggagtctcactctgttgcccaggctggagtgaagtggcttgagcttggctccctgcaacctccacttcccgggttcaagtgattctcctgcctcagtctcctgaatagctgggattacaggtacgtaccatcacgcctggctaatgtttgtatttttagcagagatggggtttcaccatgttggccaggctgttctcgatctcttgacctcaggtgatccacctgccttggcctcccgaagtgctgagattacaggcatgagcctctgcgcctggcctgttttctgttttctgatagcagccatcctaatgggtgaggagctctatctcagtgtggcttggatttgcatttccctctttgagaggggctgagcatcttcccaagaagacatacatcggccatttgtatgtcttctttgggcaaacggctattccaggtcctttgtccatttttgaatcatttcgttggtgttgaggtttaggagttctctctatattctggataaaatcccttatagatacttggtttgcaagtagtttattccattctgtgacttgccatttcacttggttgatggaatcttttgatgtacaaaacttttgaattttcatgaagtccaaattgtctattttttttcttttgctgactttgtctttggtgccgtagccaagaaatcaaatccaatgttgcgacatctttgccctctgttttcttttaagagttttatggttttgggtctcacttttaggtctttgatccatttggagttaatttttgtatatgttgttatatatgtg

SEQ ID NO: 8371 - DNA, 1553 bp, Homo sapiens
tatgagagggggatttgttaatatagagatagatatagacaggtatagatataggtatatgagagggggatttgttaatatagagatagatatagacagatacagatatatgagagggggatttgttaatatagagatagatatagacaggtatagatatagatatatgagagggggatttgttaatatagagatagatatagacagatatagatatagatatatgagagggggatttgttaatatagagatagatatagacaggtatagatataggtatatgagagggggatttgttaatatagagatagatatagacagatatagatatatgagagggggatttgttaatatagagatagacatagacagatatagatacagatatatgagagggggatttgttagtatagagatagatatagacaggtatagatataggtatatgagagggggatttgttaatatagagatagatatagacagatatagatatagatatatgagagggggatttgttaagggaattggctcacaggattatgaggctgagaagtcccatgacagattgcctgcaagctggagaccctgggatgctggtatcacggctcaggccaagtctgaaggcctcagaactgtagaagttgatggtgtaatcctcaatctgagggcgaaggcctgagcacctacgggactgctggtgtgaatcccagagtgcaaaggcctggagcctgaagttctgatgtccagggacaggggaggaagagtcccagctccggcagacagagggagacactcacctttcctctgtttttgttctctccgggcccctaaccaatgatggcacccacccacattgagggtggaccttccctacccagtgtgctccgactcacaccccaagctcctctggaaacaccctcacagacacacccagaaatgatgtttgaccagttctctaagtattccttaatctagtcatgttgacacctaaaacaaacatcacaccatagttctgtggtctctaatttctgtggcaacttagtaactctcagagttgggtgcagaacaatcacttgtgtgtgcattttgaggatgccaccttgatggcaccatggtgctctgtggccctctctcgtggacaaagcatggggctccacgtctgacatgggggcctccttggactgggtctagggtctgcccatccagacgcattactgatttgaatgtccttgctccaaattctatttccatcttaatatctatcagcagtgtgtcaacaaggctttccaaggcattattaagaaggccatcctcctggccgggcatggtggctcacgtctgtaattctagcactttgggaggctgaggtgggcggattgcttgagctcaggagtttgaaaccaacctgggcaacatggtgaaaccctgtatctataaaaattacaaaaattacctgggtgtgggtggcaggtgcctgtagttccagctacttgggaggctgaggttggaggatggcttgagcccgggaggtgcaggttgcagtgaactga

SEQ ID NO: 8372 - DNA, 1026 bp, Homo sapiens
gaggcttggtcacctctgaaaacatctgcacatcttgggccaggagtgtgtatggagacatttgggtaccaggaccccagggcactccagatacccagctaggccctgtagggtccctcctgcctggtctactgggttgggaagaataggacacagggtcgctcagggagcttgaggtcagcaggcattgcttcatgatagcaacagtttaagttgaaataaccagtgggctcaaattggtgctgttaccaagaccaatagagaaagaatgagaagacttcgttttataaaattcagagcatacttctgattgttggcctgtgtcaggcatcagggcagacatcaagagcaagttagaatcagaccatggccttgccctcagggcgctcacagtcgcggccccagacagggaagtcaactgttggggctacttgctatatgtcatttaagggcccagttctcagagatgacctgagtgcattcatcacttctggggcatattgtgtgtaattctggagtccactttggccatcaggatcctcagcgtgcatggcagagtcttgttgccacactcaggctctcttcttgatcttgaggggatggtaccaagatgcacttggatcccagaaaaatgttagaccccttaaagggctgtgtctacaatgcacttacaccaaaaagtatccccaagacattgggttctcaattgcttttctgcttctctttaagtgctatcctgtccagggcaaaaaaaccacaaacccataggtattagtcagagttttccagaaagacagaaccaataggagatatagagatagatatagacagatacagatataggtatatgagagggggatttgttaatatagagatagatatagacagatatagatacagatatatggggggatttgttaatatagagatagatatagacagatataggtatatgagagggggatttgttaatgtagagatatagatatatgagagggggatttgttaatataaagatagatatag

SEQ ID NO: 8373 - DNA, 1024 bp, Homo sapiens
gcacgcacagagcccaggatgcctgtgcagggaagcagctggtttgtgtgtgtgacatggcagtgcagatgtgtgcctgggcaggggcttgagtctgacccacaggtgagctcacgccattgtgccctgtttgcctgttggacaccagtgggccctcggggttgtgtactcggaaaagaggctgatacatccccgtcagaggggaagctgccaggaatggtacctctagagggggacgtgggccacaggggcatgggggaccctctagcactagaggctctcacaggtcttagcataactcctcgtaagtcctcaggacgtggtatctagaaagattttgctcctaagtgcaaccgtaaggtcggttccattttcctgggctataaataacttaagacgaagtccggtattagcttgcgtgtgacagaagtttgccattgactctgggatctctggttccacgtgggaattctaactccattgatcgctgagaagcatgggaagagtgtccagtctgacgaagtctgcatagcagaggagcagaatgatggccccggggtggcattaggaggagacgcagacgttgtggcagagtgggcagctgtcgtttgaatttcccttgaactgtttcctcaccacgcttggcaaaacaaagaaaacagaaccaaaacaaaaaacaaaaacaaaaaccccaagtctttaaatgagatctgcatagtcagaacattgcccagaggaacggtcacgtgtttcagctgatggcagtgggaacttttaatgtgattgttggttggtttgatttttgatgaagtctggagtttcttatgtagactggcatgatcatgctgttttcagatttcaccctgtccttcgtatttgtcagtcccttgagaagtggcaggatacttttgacctgggagaggggagggtggagggcaggaaggagggccagggctgccagccagcactgacaccactgcccccagagtgtgctcgaacacagtttggctgccactgctctgct

SEQ ID NO: 8374 - DNA, 1049 bp, Homo sapiens
tgggaccgtatattaaaaagtccatcctgctgggcacagtggctcatacctataatcccagcactttgggaagccaagaagggaggattgcttgaggccaggagtgtgagaccagcctggtcaacatagtgagacctcatctctaaaaaaaaaaagaagatcatatatgtatgtataaaaagtccatccttatcacagtgatttgaagccaaactttcatatatattttgatttatatctggacttttaatgctaccacactggtctgtttgtctccttgtgtgccactgtgtttaattatggagtgtctatggtttgttttcgtgtccaggagttgttttattttttccttcagggttttcctggctcttcttgcatatttgtttttcattgtgaccgttagtatcaactagtataactctataaaatagtttactgggatttttactgggattatattgaatttacaaattaatttttagggagaactgtcatctttataatgttgggttatcctatccaagagttgaatttttctctgattactgctttaaatgtatttcatggattctgatatgtagtgttttcattgtaatttttttttaaattctttcctctcagttggtgacctaagaaataataagactcttaaatttccaggtggaagtgcctttctgtttttttgtttttgttaataattgatagtttattgcattataatcagaaagtattggctacatttctaccctatagaaatcattgttttttcctttaatgccatcagttgtaactgtgctgtgagttcttgagaggaatgtgtatactctattatcagggtacagagttcaatatatatgtccataaggtcaaccttggttgattatgttgtttaaatctatctccttacttgttttctgtgtacttgctctgccttgtactgagaatggtgtatgaaacctcctgttattagtatgtttctaaccgtgtttgctcacatctcctgtagtctttgtttgataaaggttatggttgtattattcggctcatag

SEQ ID NO: 8375 - DNA, 1049 bp, Homo sapiens
cgctgtgggttctgaagagcgttcgccgcagcggtggtgaagagccagagcgggaagccaaaacggctcctcctcgggctggtcccagcctctcagcggggaggagggctctagtcctggcgtgcagacagtgttctgtggctgccgtgtgttggacagactggaaagaccggaatgccactgggggcaggtgggttaggtaggttggccagagggctcacatctggggttgaaggaaacgggataaaagccactgagtttcctgggccgggacctgagcgctgcccgtgtctccacctcgccctcccgtgtgcgtggctttctcctagctcttgggcacattctcacgtcccccccataacccgtcaccttcatttctgctggtgcttttgggagtcagacctacagactgcatcagcatcaccaggcagtttgctttctggagccttttccagaactgtcaagcagactctgggggcaaggcctcgggatcctcattttaaatacaaggtttaagcccttcgtttcaggatggatttctgcagccactacttcccagctactgtccttcgtcctgcccgggttttcagagcctgatgctgccactggcgacccacaccccctcagctgcttttcagaaccacacgataaaatctgccccgaaagctgctgcagcactgtctgcgctcacagtgcccaccacaccaccgcccacaggccaggccagccaggcttccgattctgccctttcctggagacccatcctcctccctccgggagtgatgcccgctggtcagctggagcgagcctctctattgccgaaaagccttttctgacactcctgcatctttagtttgggacatctctcccactaccaaacttaaaccacatgagggcaggggcttcatttttaagcagttggctttggtgaggctggtggtgatgaactagcaacaccatcttgccctggtaggtgacttcccccagcactgagttggaacaaagcagaagctttctgtgtggaaacagcattcggtttggtgatcctt

SEQ ID NO: 8376 - DNA, 1049 bp, Homo sapiens
cctcatgttcacagccagcggacgctgacgtcgattggaagctgggtgtgctgggggttgcttatctgtgacgtgtgttcccatggcgagtgatgcgtccctgtcctcactgtccagaccctgctcctgagatgtccaggcctggatcctgggcttgggacctggggaacccgggcctatgtgccgtgagtgacccctcacatgacagccccctagtgtccgggaagcctggctgaaagggagccatcagtggccgctaaaagttgacgatgtccagcagcgtctgctggcctgctgccgggctcccggggcaggggctgctgcagtcactgcgggcggctgggcctgggtttctcccagatggcccccactttccagcagcacaggctctggtttcctcaccagcccactgcctggccaccccgctcagggcagcaggagccctctgcggcggccaagtgcgtggcatggagcgacccccatctggcagggagtgtgcggtgcccctggggactttggagcaatggcgtttctggactccattagttgggactaagatggtttgatacaggctttgtttgggtttttgctgactttgctgtgattctgtgattgtgtgtgtgagatgggctcccccagcttggggaggaccgtttgctggtgccgggtccagagaatgtttactgggttgagctgacctgctctcctgtggggaccaaaggaatctgccggctggaccgagggccccaggacaggctgtggggaggctcagtgcacacagtgctcttgtcctgagccctcacaccatctataaaatacccaccagcatcctgagggttccagcctgtggctctcaggattgtggagtgcagtactggccactgcagaccctgtctggctttggggtttaaatggttaagtgcagtgtgatcttcctcccttggacctctgatggggagtgcttggccctgcatgtccagcctggcccagggcgagggtttcaggagcactgaggacccgacagggctggacagtcaccccggcactgc

SEQ ID NO: 8377 - DNA, 1047 bp, Homo sapiens
ccctcccaacctcacctgccctcccaacctcacctgcccccccaacctcacctgcccctgcaacctcacctgcccccccaacctcacctgccccccccaacctcacctgttccccccaacctcacctgcccccccaacctcacctgcccccccaacctcacctgccccccccaacctcacctgcccctgttctccaccttgatgccacctcctactctgcccgtttcctgcggggcttcccatggggcccggcaagccgctgcggaccctgcagacctcaggcacgggtggatgcggggcttgtggtcggcgtctgctcttcaccaccatcctcctgtggtccacgtgccctttcagttggccagctctgctcatggttggtcagaggctgtgggatgcgcttaaaagcctcagcagcaagtcctggaatttggagagtctgtgacagagaagggcacattccgtggccagacaggttttgattctgtgccatctgtgtacttgcctctgaccatcaggtgggggctgcacccgtcttctcctttggttcccctggactttggatggggcggggctggactcagggaggcctcctgggcagtctggggtggctcttcccagcagagcgtggggagaagtggagccacagccagccatgggggcggaggaggaggcagcagctgtgtttctcagtctcaggcgcagcggagtcggacgtgtatggcaccacgtgttccctcctcttagtgctggggtcatctccatgacagcccgcggcctctccctcctcctctcttcagctctgcagatgctggaccctcaggtgttccccaaaaccgggcccagacctgctgcaacttgcaggtcacaaaccacccccttcactggccttctgtgccgaggaagatgggcggcctggagggaatctgcctttctagaggctggagccctccccactgcccatctgtctgggagcctggtccccatgacaccctcctcccagtgagtgcatccaggactctgcctccgctggtcgcacggtgaggg

SEQ ID NO: 8378 - DNA, 1050 bp, Homo sapiens
cctcacaatcatggcggaaggcaaggaggagcaagttgcgtcttacccggatggcagcaggcaagaacttgtgcagggaactcccccttttttttttttaagacggactcttgctctgtcacccaggctggagtgcagtggtgcgatctcggctcactggaagctccgcctcctgggttcacgccattctcctgcctcagcctcccgagtagctgggactacaggcacccgccaccacgcctggctaattttttgtattttttagtagagatggggtttcactgtgttagccaggacggtcttgatctcctgaccttgtgatccacccgtcttggcttctcaaagtgctgggattacaggtgtgagccaccgcgcccggccggggaactcctctttctaaaaccatcagatctcgtgagacttattcactatcatgagaacaacatgggaaagacttgtccccatgattcagttacctcccaccgggtccctcccacaacatgtgggaattcaacataagatttgggtggggacacagccaaaccacatcagaaacatcagaatttaccatcaattgtttctaacagtagccaccaatgagacttcatttaccactaagaacttgatctctacaaccccttatcttaacccagacactccttcctgttgattgattccaggtctttagataataattctttcaaccaattgtcaatcagaaaatctttgagtccacctatgacctgtaaggtcactctcctgcatctctccccatcccactttcagttgtccttcctttctagaccaaaccaatgtatacctcacaggcattgattgatgtcttatgttcccctaaaatgtataaaaccatcttgcaacccaaccaccttgggcacatctcaggatctcttgagactgccttgggccatggtcactcatatttagctcagaaataaacctctttaagtatttgacagagcttgactctttttgtcaacaacatcaaaagaaaggcagtctttttttaaaatgtaaaatatactttataga

SEQ ID NO: 8379 - DNA, 1052 bp, Homo sapiens
gtaatgggacacggggccgtacggcccatgtgcggggactgagccagggttcggcaggtgtgttgcatcctcactgcccgagcttctctgggcactcgccagtggctctgggaacgcaggcggccccactctctccagcccagtgcaggggccaggctgggcctggcttgggagcccttcccgctggtcccctgagggtcctgctgggggctgctgccaggcctccctccagctcagtgcccagcagccggcggctttcacccagcacgacgaaccaggtgtcacccagactgcagcctgtggagatggtggtcgggagtggagctgctgggtcatgtctcgggtctgagacgaggagatgggcagacgcagggtgggtcgcgccctgcaagggaaggttggcgactcttggagcgggaaggggctgccgccctgtcatccaccgccctcagatgctgccgcacctgtgctttcattttgccctaatgagtttgaggagcagctgcagatccaccagtaggacccagactcacctgttttgccttcctgactcctttcactcatgggcgtgtgctgctggctgcctgggggtcaggtgcatgtccactgctggctgtggggccgagacagcacctacacccagcaggaggtgctgcggggccctgcccaggggcagtgagggcggcacgggctccaggggaggatgccgttgagtggctcctgaaggtgaacccctgtgctggccgagagggtggacaccagccaggggaggcccagcccccggggtcgcccatgcacaggaggccccccagggtgtggagctgagttccgggtgctcgtgattatttgccaggaaaaggagcggtgattcggaacatctggcgtcatgcggataaacctgctgggacttggggtgctacgcaggggctgggtgggagctcgggagtctgaggccgggtgcctctgcttggagggcagctggacagcgcagccagcagagcagcaggagggtcttggcagactctgctccaaagttcctggagcctccccca

SEQ ID NO: 8380 - DNA, 1012 bp, Homo sapiens
ggcatgagccaccgtgcccagccgttttttaaaatatatatatgttttatctgttttttactatttttaatagagacgggggtctgtgttgcccaggctggttgaacccctgggctcaagcgatccttcacctgcgcctccccaggagggtgttgattctttggctgtttggcagggtttgcctgggagctcttgggccctgggtttgtctttgttggagacttttgagggggacttggccccttgctggccacaggtctgctcagtccctttcctcttggtcggctgtctgtctcgcatcttgtctggtgcacagttcatgggtttctagtatctgctttttatttctgtaagattagtagttatatcccttctttttctgattttagtaatttgaatcttctttcgtcttagctgatgtagctagaaatttgtcgatttcattatcttttcaaagaaccaactcttgggtttgttgactgtatttttctgttttctctcttctgtcatctttgttactcctgtctgctgcttaggggttcagtgtggtcttcttttttctagtttcttaatttgaaaagttagtttacagctgtaaacatccctccgagtgcagccttcgctgatcccctagcgtcataatttctgtttgtctggaggtgtttctgattccctctgatttcttgttggagccgtgggtggtttatgtttaacttccacatgtttgtgaagtttctggttttccttctgttgcttgtttctaactttatctccttgttagagaacagactttttgtgatttcagttttgtgaaatgtattgatttgtgtagtggccccacatccatcctggagagtgttccgtgcgcgcgggaggaggatgtgccctcggttccgtgcgcgcgggaggaggacgcgccctcggtgctgttggggtggtgttctgcaggtgggttgaggccgtgtctttcctcactgatcgtctgtccggcggttctctccgtggttagaag

SEQ ID NO: 8381 - DNA, 1062 bp, Homo sapiens
ggagtgggggctgcagagccacagcgctgtctgtgcccgcaggcacgttgcccctggcctcgcaggagtcggccgtggtggaggacctgctgtacgtgctggtgggcgtggacgggaggtacgtcagtgctcagcccctggctgggaggcagagccggaccttcctcgtggaccccaacctggacctgtccatcagggagctggtgcacaggatcctcccagtggccgccagctactccgctgtgaccaggtgggcaccgggcgcggtccctgggagcctgcgctgttgtgggggaggggttaggtcccatcctgatgaccatggggacgtctgcatcgcttctaaagagagcgcccgccttggtgacaactccgtgcccaactcagttttggagggtctgtgagtcaccatccagggtcctgactcatctcctcctggggcaaaagttcccctctgggatgtggggttcaagtgagtcatttgcttcctgtttgggatgagactcagaatatcggacattgtatgtgcctgcagcttgcctttttgaggaagtctgacagcttttcttccaggttcattgaagagaagtcttccttcgagtacgggcaggtgaaccacgccctggcggccgccatgcgcaccctggtgaaggagcacctgattctggtgtcacagctggagcagctgcacaggcagggcctcctttcgctgcagaagctctggttctacatccagccagccatgcgcaccatggacatcctggcctccctcggtgcgtgcccgcccggggggcatggggcagtggtgggtggcaggtgttgaacatggcacccagtgtgaggagagactctgcaggggccgtggagcagctgcccagggcaggggcgtgtggccaaagctcatgttgctccatgtgctattaacttgcaagaggaaagccctggaagctcttactggtcagctgaaatcagcaactacaaccttacagttaatacgtatcccaaagaagcagcaccgtcccaggaagaaggttggagaagcatgaggggccccagcagtgt

SEQ ID NO: 8382 - DNA, 1026 bp, Homo sapiens
aacccccaccccacggcacctccaccccaccgtgaggcttctccccacaagggcattggccgaggcttcgtggctgtggatgaatgaggccaacatggtggaaagtaagtgatgcagagtcagaggcagttcctggaagatgcactcgctgttcccaaaacgccaagccacacccactcctttagggatggtagacattggggtctcggttttattggtcatcctgagaaggccactggagtaatagaaagaaatggaatttgaagttgaaaagtgtagatctgccagcctgggcaacacggcaagaccccacctttacaaaaaatttaaaaattagccaggaatggtggcacgtgccagtggtcccagctccgagggagactaaggatacaggatcgcttgagcctgggtgctcaaggctgcagtgagctgagattgcaccactgccctccagactgggtgacagagtgagatttgtctcaaaaataaaaaaaggaaaaaaaaaaaacaaggacagtgtggatctgcatcaggattgaggctttcgctgaagggcttgcgttggtgacggattgtagtcttgaggcctgcagtcacaggacacttcccagcagatgtgtgaggctgacagagtgattttgtaaaccgaaagcctgttgtacggagccttcctgagctgccagggcctggtttgggtatggtctggctggcacggggccctgtcaggccctcgtggggacagtttcaacatcctgctttcgtctggtgctcctcccggccccccaggcatggcccgcctgaggctgtggactgagaacttggtcctgggacctgaggggtttggtgggtggcggcccgtggccgtcctcgtgaggaagcttagctgtgtgtcctgcagccgtctcatcctctctggatagaaattatcaagagtttcttaacgtttaagtgatagctttttaaagacaaggttttttgtcccagagtaactcagacttaccaagttgtacttaccaatgttgaaag

SEQ ID NO: 8383 - DNA, 1033 bp, Homo sapiens
atgtcaggagccatcctgtcacgctggggcccttctccggcagggtaaggatgcatgtctgttgctgaagcctgtcttcacccatcaagtggtgttcagacctagtcactgccagaaagaagcaattcagcttgttcacagggcgccctcctttgaaacagcggctctgtgcctaggtgcaccctctcccgtggttcccactgctggtgctcatgttttcccaggggggcccttgcaggacctgcactcctgagaagaggggctagggctccccatctgccctgttgtccccagcccctcacgttgtggcaggcagggatgtcgaggcgcatttcatttctatgtggttgaccctttgtgggtgttgaattgagtaatcatctttgccgtagatgctagcttctatgcatgtctttagttgagtgtttgcgctaaagtgtatctttctggttttgttttttaaaatgtccttgctagtctctggaacttaaaagaaagatgcttcgagacaagcagaacaaaaaaaattcaggccagcacctccccatcttcccagcatgggtgtatgagagacctgccctgatcggggatttcctgattggtgctggcatcagcacagacaccgctttgccgataggtacgtgatgcgttgatttccgggctctgccgataggtacgtgatgcgttgatttccgggctctgccgataggtatgtcatgtgtttatttctggcctctgggcaggacactttgcaggcccagccctcccccgggcctgcctttcctcaggttgtgaggctcaatgctgactggctgccgcctccatattcccatcccaggatggcagcagagaacggctcacccgggtccttgagggttcttctcctgtcccttctgccagagctgtggggcagcctgcagcaggcccctccccagccggcatcctggtgccctggtgcagacctgcaggcatcagaattgtgtgcagcacttatttctgaacagcgattcatgactcccatagattctgttac

SEQ ID NO: 8384 - DNA, 1030 bp, Homo sapiens
caaggcaacttggaagggtgtcgtgggcagctgtccccagctcagctgaagcacttccttcctcaggtgggcgtgacaaatcccccatccagccccagcccacctgcctgtcacacctgcccctgcccaccacctgcggcagggcgggaccagctcagctccaccaccgtggaaccctcacccccaacgccaccaccttccccaccccttccaggcgctccctcctgtccttccttactgggcacaccagcctgaggagtcttgcacgctgtgtggccagggcccgctccacggggcccagtgccctcattgccttttttattttattttttttgagacagtctcactctgtcacccaggctggagtgcagtggcgcgatctcagctcactgcaacctccgcctcctgggttccagtgattctcccgcctcagcctcctgagtagatgggactacaggtgtgcaccaacacgcccagctaatttttgtatatttaatagaaacgaggtttcgccatgttgcccaggctggtctcgaactcctgacctaagtgatccgcctgcctcgggctcccaaagtgctgggattacaggcatgagccactgcgcccggccctgaccaccttctttagccgtccctggcacaccctgtaaaacaaaaacacaattccaatctccgcctgaccccacccgactgatggaccctccctaagcccagggcattccacggttaacctgaaaactagttcaggccataatgggaagtgggggtcagacaggcctcattgtacccgcctccttttggaattcaggcaaaactgaccagcattaacattaaaacagagaccttaagactaatagaacagactctgacaagaaatagtcccttttattgattctatctgcatatacttggtctccacaacaccttatcttaaccctgactttcccttctattgattctaggtctttagataataacttaactcttttgaccaattgtcaattggaaaattactgaatccaccaatg

SEQ ID NO: 8385 - DNA, 1062 bp, Homo sapiens
cggggaccgaggggagccggggccgcggccgcgagtccacgtcccgcccccgggcccggcccagcgaccgcccccgccgcccagggaccgcccccgcctcccagcgaccgcccgggccctcggggcggggaccgcggaccttcctggtggcgcggcagccgggcggctcctccttcctcccggccctggcgtggagcagagggacacaggttcccacgctggcgcccggcgaccgggtggggctgcggtgagtcccagaggcccccgccccgcagctcccggccgccccggcccgtccccccagcccccggtcgccccatcctccctcccccacccgcgcctgccccagccgcctacacccccgagacccccacccgcccggcgccccggcagccccggactccctcccccatcccgcccagcgctccccccaccctccacacacgcccgcccccacgtgccaccaacagacgcaggtcccgaccacagagggtgggggcaagaccggggttgtggggggtgcgtttggaaagcagggttaggactggaattctaaggtagcaggagggagagacacactcaggggctcagctgggttcctggagatcaacctttggggtctgagcccctctgagagtcgagctcctttcctgcgaggccccgtctaggaggggcctcaggaaaatcggggctgcccagctggttccgcaactccccccagttctgagggaggcttcaggggattacagacggtctcaagagggaggcccagccagtcccgcggcccctgacaccccatcaggccgctcaggcccagcagctccatggaggacgccggcgaggaccccaccacgtttgctgcccactctctgcccagtgacccccgtctcttggccactgtgaccaacgcatacctgggcacacgagtgtttcacgacacgctgcacgtgagcggcgtgtacaatggggctggcggggacacgcaccgggccatgctgcccagccccctcaacgtccggctggaggcccctgcagggatgggggagcagctgaccgagacct

SEQ ID NO: 8386 - DNA, 1091 bp, Homo sapiens
acctgcgatgcaacgtttcggggaacctgcagctgccggaggcggaggccgtggacgtgaccgctcagtacatggagcggctgaacgcgcgccacggcgggtatgggggcggccgaacgcgcgccagggcggttttggaggcggggacagccggggagaggaggtcctggccttggcggactcctcagaccttccccagggcccagtggtgtaccggcctgggggctgaggcaccgcgccccaccccagggaagccccagcttctctccttccttcctggcgtcctgactgcccgggcacttgtccagcctcagggacctccctggagccccacccagggctggcgccccatccttgcacctgtgtaccccacttctgtcatcctggacctgggcccagggatgagtccaagctgcagagatcagcgtcagtcgcatccagttgctgcgcagacagccccattccgggggggccaggcagagacccttagggcaaagctcaagacccctgggcccctcctcctctcccctcgcagtgcccctgggcgttcccagactgtcaggacccgactgcagaggaaggtgcagggcttctgccccattggcccctctggtctccctgaggccccaggaatctagtgctgtctgccctccctgcaggctggtgggcaggagtggggagtctaatttggccttggggaggcctgtggagttctaagaagaggcagtgtctgctgtgcccagccttgaaggcgagttaggagttgcacagtgatgacaggcagaggcaggggcagaggatggaggcagaaccgggactgtttctcctgtgcgtgatggaaggttgcgagcagagcaaagccaggggcagaggatggagacagggccaggactgtttctcatgtgtgtgatggaaggttgcgagcagagcaaaggcaggggcagaggatggaggcacagctgcatgtgactgtttcttgtgtgcatgatggaaggttgcgagcagagcaggaattccaccggtttgggtgcagacaggtatgcctctgcctggaggggaagggaaggtggtggtggtgactgacagcctgg

SEQ ID NO: 8387 - DNA, 1033 bp, Homo sapiens
cgacgtcggaccacaaggcccagcatgccccgcgcggactacaagccccacaatgcaccgcacaccctttactggccggccccgcgctgctctcctaagaccccgcgggccagcgccgcgaccccttcccagcgctcctcgcgctgtgtgcggcgcgtcctctcgccggtgacccggtgtgcgtggggtcgaggcgccgggcggagtggctccgggccgaaacgccatgcggaggggcgagcgcagggacgccggaggtccgcggcccgagtccccggtgcccgcgggcagggcctcgctggaggagccgcctgacgggccgtctgccggccaagccaccgggccgggcgagggccgccgcagcaccgagtccgaggtctacgacgacggcaccaacaccttcttctggtgagggcagtgggcggccgcggggcggcgagggtgccctcgacctgggggttccggcaccgctggcctgggggtccccggcagcgccctctcgccgtcttggagtccaggactgtggccgggggtttgagggtgtggcagcaccgccccccgggtcccggggagcggccggaccgagctcccgacgccgggtcgggcggagggcggcgctgtaggtgggggagaccctgggcagaccctccctgcggccgctttgcgtctctctcgccgccctccccacccctgcccgccttggctctgaccgcgcggttctgcgatccagaccccttccccgccacccgcctccagcgtcaccccagaaacgctttctctgtcctgctgtcgaagcttcacctgtgtcccccgtcattctgcctgtggttgctcctcagtgcttgcggctgcacgaaatcatcttgtgtgtcgcgcccgaccccacgtggcgatcgtgttgattagcagagtgttgtgcgtgcttcaggaatgtagtcggtgttcgtcgaatccaggctctgtttctctcctcagttgcccctagcggggccagcgcctcctccctgcacaactcagccctagctacaccttg

SEQ ID NO: 8388 - DNA, 1040 bp, Homo sapiens
gaagatgcctttctccatcatcctggatcggggctttcccagctttgcctacacctgggaggcgcgagtagccagatgaagtctttctggtcttgctggtcagagccagaagggccagtgcccggtccaggagcctctcgcaggccttgggctgcccatccaggcgtggcctttccttggccctttggacgacgacgccgcgttttcctcttggtctcggcctccctgcccaccatgagagtggacatgagagtgaccatctccaaggaggcagctgggtcttttccactccccatggcagggagccagctgtcttcacgccctcaccctagtgaagtggctgaattgccaggattgatcacagctctgttctgtgtctgatcacaggacatacaccgtcctgcagagtctgcaggcgggtgggaggagccattgaacagacctggcgtcctgggagggacacggaattcttcccttgagagtctcatgctatcttgagcggcactctgtcacttccaagatgtgtagacgtcgtgctgcgtgtaggacaaggactggagctcactaatacggaccttactttccaggagcgttggatttgagcagctctgagatgtgtcctcctgcagggctgctgtgcctggtgccctttctctgggtcccttaccctctgcctcccttcctgttgggtcctcttcattcccatttctgcttccccagggccaggagggtgctgggcactcggtggccacctcaatgacagtgtgcacatttacctgaaggggcgaagggttacctttatatttcaggtaatctctgtgttttggggaaatggaaagatggtgttgggttagggttgatcaatgatcagcgtttccctgggctacacaaggagtgagtgttgggttggtggccactttagaaaccacaggaaggtctctgtcgtggaaagtcgtattaaaggagtcaagttttacgcctgtaatcccagcactttgggaggccgaggcaggtggatcacgaggtcaggagtttaagac

SEQ ID NO: 8389 - DNA, 1023 bp, Homo sapiens
ccatcccttgagctttgcgtttattcctgggattctgcatgtgaatgggagcctgtgctgtatctgggagatgctgactgggttgcaggcacgtccgagggtcagggtggggccgagtgcagcctcctcctccagtgggcctgtgtgtggagtggtggcattctgggtgtccctgaggcctggtcgtttccatcttcttcctgagcccacatggagatgacgaggggtttcctgctggtctcttgcagaacagggttgagtggtgtcctcacgttgatctagcttctgggtctcccattctgcatgtgagcaggttgatgggctgttgtctcttccacggttagcctcccttaggctggggctccttcacccctcttttcttagagacattactgcccagagtgagaacccctcacgtggggtggccgtgtggttccaagacagggtcctgtggaggccctgttagcttccccactggaggcctccctcacagcaggctcctgtcccggcatctgcactccagccaggcagagtcctgctcccgtgcacaccacaccctgtctgtctgtgctgtgggcccttggcggggttctgggtgtctggagccccttgaccttgttcctcctacaaggtgacctcgtcaggaagccccaggatgagactgtccctggctcctccaaaggtcacttcagacatgtgcaccctttggagaggtccctgctgtttctcagaactgctggggatggaggctgagcccgagagtgcttgctcctcgcgctcccttcttgctatggtctccggagatgcctcccaggccacgagccctcctggcgtggttttactgggacctggctttgcaacaaaaatagttgttttaacctccctaaccactcccatccctcttttgtttttctctataacgtgtagggtttcttagctctcctgtattggtctcactccactggaaggaaggctcaggaacgcaggctgtgtcttctcccgggtgtggctggggcgggggct

SEQ ID NO: 8390 - DNA, 1023 bp, Homo sapiens
agccaagcgagtaaactcgtcttctcaggtttatctccacaggcaggcaggctagaccttgggtgtgtcctctgcctgaattccatggattctgacgccagtctcagaagtgcgtgtggaagagaagctggttttagagcctgtgaatcagtcttgagttttctgtgcctgactctcctctcgcgttgctcttccgacgcgcgcacagggtgtgtctgcccagggctgcctcctgcccagcaaggctgctgacaccatcagggcctggccccacttgctccggcgggatggtgggaggaagccggagcagggtctgagaccagcagcaggatggggacagaggtggaaggaggcattggaggcctgttggtgtcggggccacaagttggctctggttggcgggagccctggggtttgtaggacttagctgtccctacagctcttgggccagcacttcattttgtaaagcaagagtctcgctatcttcgtgactgttgggtggggtgatgggtgggcatggtgtgaacgtcatcacgcttgcacgggcgttggtggccctgtttgcccactgatttgacaccagccctgtgggctctagaacacaagcatgcccagtgccctgtctgtaggggagcggatgctttagaatcacgcacagcagacctcataactgagtccatctccctgggggcagtggggcatttctggttagaaattactgttgaggtgcctggacccaggactctgcagcctgctccccagatgagctcaccctccatcctcacctgggaggcgcaggtggcctctcctgtcctggtctccctaccctgctcctggctgcatgctctgtgggttctctcccaccttgctgtcatccctctcccagtcagctttgctggcccttccccctttttctgagcctgaggtgccagcttgctcccaggcctggcctggccagtgcctcccgtgctccaggcccagctcgctccttctccctttcttaggcagtcccagcgggggtca

SEQ ID NO: 8391 - DNA, 1029 bp, Homo sapiens
cctaacacagtgaacaaagagagcttgaaaagctgccaacgagaaaaagcagatcgtgcacacaaggtcacagtggctcacgcctgtaatcgcagcactttgggaggctgaggcaggctcatcacttgaggtcaatagttcaagaccagcctgcccaacatggtgaaaccccatctctactaaaaatacaaaaattaggccaggcgtggtggctcacgcctgtaatcccagcaatttaggaggccgaggcaggcggatcacgaggtcaggatatcaagaccatactggctaacacggtgaaaccccatctctactaaaagtacaaaaaattagcctggtgtggtgacgggcgcctgtggtcccagctactcgggaggttgagacaggagaatggcatgaacttgggaggcggagcttgcagtgagccaagatcgcaccactgcactccagcctgggcgacagagcaagactctctcaaaaaaacaaacaaaataaaattagccgggcataatggtgcatgctatacccggctaaatgatccaaggacagaacaggggcacaagaccccaaaaattacctcctgcaaaaccttttcttagaaagctgcaaaagaacgtgctttaacaaagaaaacaaatctggaaaaacatcctgacacaggcggggttcccgcaagggagaaaggtgggcggggcttccaggaagatggaccacagggtggccaggtaggctggagctccgtgaagctctcaggcttcatgaaacatgacctctgactttcagagttaaaatgagaactaagccagagtggtgccgccagcccgcctttcccagtacatgaacatgcaccctcactctcgcccatgtgctcacactcacatggacactcgtgctcactctcgcccatgtgccacactcacgtgctcactcgcccatgtgctcacactcacatggacactcatgctcactctcacccatgtgctcacacacggacactcgtgctcactctcacccatgtgctcacgtact

SEQ ID NO: 8392 - DNA, 1034 bp, Homo sapiens
tggtgaagaggttgggataccggcgggcaacgctgttccaatccacgtcctccagccgaaagccctggccaggaagcaagaggcacatggtcctcccctcccgcagggctccagataccagaccacacacgtgggaggcctagctcacctccccggtgggggcctgaatgttttcagagaggtcgcttgggtccatcagagtctctgccgtcactacctgcaagaggggaccggaagccagtgggcaggggctgggtgctcccctacagcacctctcctctttgacctcacctgtgctttgaggcctcctgattcctccctgctggagcccagagttccagaggcacctgagcagggcaggcttccaggcaggccagggcgccccagcagaggcacccgacgagatggggagggctggggagggcagcctggggcaggagggcttgggggacaggctcacctccacactgccagtctgggatcgtagcatgcggcccacccacgaggagcgggccagctgcaggaggcaggacttctgcaagttctgcagctcggcctccatctcctggagcgtgcgggtggtctgcagcagccgctcctccaggtgctccttctcctgctccgagagggcctgtggttggtggtgggggggtgtcttctgcagaaggcccccaggccagccccagcctggctccccaacaccaggaccctgcccactccctgtgcccctgcctcacccactgggctcgctccttctgttccttcaactcctggatcagcttctggacctggttctgcaggagtttctcctgactgtgggagctcctggaggaggggtgacctcagcagcccccaccctgctcaggcaggggttcctaatgtcaggtcagtggcgaaggaggggagaaggaggggctccactgccaccttggccccaagggcacacagtacagccccgctggggctggccagcctccggctggtctggacaagggtctagcacccatccacatgcgcagggttagggtggaggc

SEQ ID NO: 8393 - DNA, 1065 bp, Homo sapiens
ttctgaagacgacggggagacattgctggaggtagcgggtactcaggggaaactggaagccgctggctctttcaattctgatgatgatgcagagagctgcccaatctgtctcaacgcattcagagaccaggccgtggggacgccggagaactgtgcccattacttctgcctggactgcattgtcgaatggtccaaggtgagttcacctctggttgggtgcttcctcccttcaggatggcctccctgtttataggtgacccagcctgtgttcagcctcttgtgaggttctagttgtctgctctgcggctgaccctggggccacaggattgagtctggcttggtctttgctttgtgagcaccatggctcttgggggtgtgggtgagctcatgtgaggcgtttgtggtgtattggtcaggggcaggagagaggatggccgtgggtctcccaggaccagctgcagaaaccctggttgacataggggccatcttggcctgcaagccagaggcaggtgtgctgtggtgcgtggtcactttgctgccttgacatgtggttctctcagttgatacagaaaacaccggtacgatttggcattcattcacaataactggcatcaaaagagactgtccttaaaacaggtgaatagagtttaccgtaaacgtgcagtgtattttatatttcaaaatgaacttttagaagcagtcagctcccccctccctttctgaatattgtgaaaaatgtcagaaaaggagagcttgcagtctgaggatgactcatgagtccccgacctctgtactcagggctcagctccgacaccactacctcttgactccctcccctccctgcgattgcaccagcagcccgtgctgtccccggctctcttcaggaccgtgacctcacccagggttcctagtgactgggtcctcctgttctgtttcactgagtagctgaaaactgcctgtatgcttagtttgaagcaggacccagacattcctcatgctgctggtggtggcaggctgtgatgtcacccaaagtctggctctggtacttcctgttcctgttctgtt

SEQ ID NO: 8394 - DNA, 1059 bp, Homo sapiens
cagaggggcctgtgcacaatgccgcccccacgcctgtccttcctccctttattgttcttacttgtcactgagatgctacgcgttcatggagctgctctttcctccccgctagggctggcagctctgcagggaggcaaggctcgctgtgctccctccactgccgtgttgccagcagcttagtggagggcctggcgcatggaggcatttagcagatacttgattttcagtgtaaaagaatttttgatctctaagtgaaagtgattgacaagattctgatcctgtttttatttctcacagaatgccaattcctgtccagttgatcgaactctatttaagtgcatttgtattcgagctcaatttggtggtaaaatcttaagaaaggtgagtgtggacgctgccgtggaggccccagccgtgcttctatcccggccctgtgggacagagcatgctttccaaagtgggcttgctctcctgaaatgagggttggttaaatgcttcatagaaatcaactcaagtgccccttgtggccatgagccctgtctggggggtttggggtctgggttgggggttagaggcagagatattgccagctcctgggatatcccttcgaccccacccctgtacccatcacatctgggagcagtgctctggcccgtctgctcggagctctttatttttgagacaccatcttgctctttcacccaggctggagtgcagtagcacaatcacagcttactacagcctcaatctcctgggctcaagcaatcctcatgcctcagcctcctgagtagctgggtccacaggcatgagctaccacacccggctgtttttttttttttttttcccgagacaagagtctcgctcttttgcccaggctggagtgcagtggcacaatctcggctcactgcaagctctgcctcctgggttcacgccattgtcctgcctcagcctcccgagtagctgggactacaggcacccgccaccacgcccggctaattttttgtatttttagtagagacggggtttcactgtgttagccaggatggtctcgatctcctg

SEQ ID NO: 8395 - DNA, 1049 bp, Homo sapiens
taagatcgcaccagtgcacttcagccttcgtgacagagcaagactccgtctcagaaaaaaatttgggcaggcgtggtggctcacacctgtaatcctagctctttaggaggctgaggcaggaggatcgcttgagcccagaggccagcctgggcaacatgataagccctatctataaaaaaaattagctgggcacggtggtgcctacctgtagttccagctgcttgggaggctgaggcaggagaatcacgtgagcccaggagttggaggctgctgtgagctgagattgtgccactgcactccagcttgggtgacagggcaagatcctgtctcaaaaaaaaaaaaaaaaaattgcaagccggtgcgtgtggtcccgctgtaccggctccttgggctccgtccactgggctggactcacaggaatggggcagggagggcccagcacagagaagcacagacttcaacctcttttccttaggaagacggaagaaagtgccgggaagaaagaaaaccccgtccggaccatccgcaaaaagtaagagctcagcgacaagatctaagaaacgccaacatcgagtgaagaagagaagagggaagaaggtaaaggtgagcattgggtggcagggcctgagtctcctgctggccacagcaccctcgcgtggttacggagcagggcctaagcctcccgctggccttggcaccctcgcgcggttatggagcagggatcatcatcgtctttgcttttctgtatttactcagtgatttgctgatggaaatgaacatttctgtagcacagactgaagatggggttgaggccagctgtttcctgaggcacactgaggggttgaggggtggtcatgtgcccccaaggaaccttcctgaagccatcagctggtcggggagccaggtgtgagccaggccagtgcaagccctctggcagaggcccccaggagcagctgtgggtttcaggcaggcctggccagcctggctctgaggagtgacacaagccgtgtctgacaggccctgtccacctcttctgacccatgttcgct

SEQ ID NO: 8396 - DNA, 1051 bp, Homo sapiens
gctgcggggctctgcctgggtgcgggccctcaggccgtgggaggcagtgacggcagggccttgggtctgtgcccacaggaggcgcctccctgccgcggtgccagagccagacttggaggaggagccagtgcctgacctgctgggcagcatcctgtcgggccagagcctcctgatgctgggcagcagtgatgtcatcatccaccgcgacggctccctcagcgccaagagggcgggtgagtgccttccctgccacggccccttcctctgtgggctgctggtcctcaggctgttcgcaagcactcagcccatgtctcagtcacggaagatgtagctgaagttggggggaccattcctcagccatttttctgcattgatttcccttcttgagcagtttctcagttagctccgagttcttacccagccccacagcttcatgttcataagaacatgtcctgatggggtactgcccccgcccctggttaatatcgtgtcctgatggcctcaggcactgtactttgtcatccacagagtggctgttgaagcagctctccgggtgtggaaaggcgaggtgtccacctcaacaggcagacaggagtttaaagcgcacgacctcacagaaaaccagttgtgataaaaattaaaccactgacatttaagaagagtgggtgggaaatgattgccattgacttttttgttttttagctccagtttcttttcagcgaaactcaggcagtctgtccagaggggaagaaggattcaagggctgcctgcagccccgagcactgccctccgggagcccggcccaaggcccgtcaggaaacaggccacagagcacagggctcagctgtcaaggcaggtcccgcacccccgcccgcaccgcgggggcgcctgtgaggctggacttgccagcagcccctggggcggttcaggctcggaacttgtcaaatgggagtgtgcctggcttcagacagagccacagcccctggttcaacggcaccaacaagcacaccttgccccttgcctctgccgcgtctaagatctcaagcagaga

SEQ ID NO: 8397 - DNA, 1030 bp, Homo sapiens
tcacagacgctcccgtcctcccaaaatccgttctcagactcttccgtcctccaaaaatccattctcagactcttccgtcctcccaaaatccgttctcagactctcccgtcctctcaaaatctgttcacagacgctcccgtcctcccaaaatccgttcacagacgctcccgtcctcccaaaatccgttcacagacgctcccgtcctcccaaaatccgttctcagactctcctgtcctcccagaatgaagctctgtccccatcaaacgccccctcccctcctcagccccggcgccccgtccactttctgtctgtggattcagcgcttccagggactgcgcgcagggggagcctcacgggatttgtcctttggagaccggctggattctcagcgcagcatcctccgccttcgccgccgcggcctggcctgtgtgggaatctccttcccttttgtggggaactgtgtcccgctgtgtgcagggaccgcatcgaccgcgtccgctcatctgtgggcatcttgatggacacctgggctgcctcccctttggggcgacggcgagtaacgctgctgtgaacgtgggtgtgcaaacggcgcttcccgatcccgttttcaagcgttcttggtgtatagttatgagggaattgctgggtgacagagtaattatgtgttaaatattctgaggaaacgccaaactgtcttcccagcagcgcagcagggacacggttcttgtcctcgccaacacttgctactttgtggctttttgtttgtcgcgtactaacgatgccggtgggtgcgacgtggtgtctcgctgcggttttgattggcatctccctaatggccagcgatgtggagcatgttctcaagtgtctgtgagccatttatacatcatggagtggacggagaaatggccgtcaagccctttgatgttctgctgtggttgcgagtcatgcactgtatccgtctgttaaatcagccacaatattttccccagcgtttgcatcatttcacagccccgccagcaatgtggggctg

SEQ ID NO: 8398 - DNA, 1049 bp, Homo sapiens
ctccgcgcgcccgggcggtcgcaggtcgcgcctgctttggccccggcgggttcggcatccgagcctggcaggggccaataggtagggtcgcgagggtcctccccggccgcatgcgcagtctgagcgcgcgcggggtagggctcttggcctggggtgggggcgcgggcatcagcagagccaggcggcggtgtcggggcgcgaaggtgcccgtggtgttccggtggccacacccgaggagcaggggagaccggggggctgcggggtcagaagctccgggtgtccccggagactaggagggggacggcggggtccaggaggcggggtgggctccgccggcccaggacgggggcgtcgcggggaggcctgcagggttgtggggcgtcgggctgagctcctgggaggacggagtgtcacttcctgagatggggacacctcgggcgtgctggctttggtgaggagaattgaagcagtttttctttttttttttttttttttgagacagggcctctggagtgcagtggcgtgatctcggctcactacagcgtctgcctaccgtgttcaagcgatcctcccacctcagcctgttgagcaaccgggaccccaggtgcacactccaccacgcccagctaatttttttgtgttttgggtagagagggggtctcactgtgttgtccaagctggtctcgaactcctgatctaaagcgatctgcctgccttggcctcccaaagtgcgaggactacaggcgtgagccaccgcgcctggcctgaagcagtttttccttagactgtagttggagggggtgagaccacgtggagtggttggcagacaggcaggcaccctttgaggccaaaagggcgcttgagacagagccagcaggcgagcgggccgcccaggtccctggccccctgctgccagtatgaaggtcccaccaagcctctgctccaaccaggggaaccgtcatggttgggaacagccaaggtgaggaattctgtgggtcacaccccctgaaaaccactggcctccgccgggcgcggtggctcacgcttgt

SEQ ID NO: 8399 - DNA, 1022 bp, Homo sapiens
cctgccttcagaacttgcacgtgctggaatccaaggatgggtgggagaggggccgttcctggagatgtctgcccttcggggctggcccatgccacaggacctcccatcacccctgctgccttggttggtgaattcggggcatgctgagcctttcccttgcagcctttgcacttgctactcttccctccgcttatcaaactcctaaccatccctcgaagtccatgggcaccagaagcaccgcctcagagactcacagactcagatgtacagatgtccctcagtatccatgcggaattgattccaggacccctgcagatgctcaagtccctgctataaaatagtgtagtgtttggccaggcatggtggctcacgcctgtaatcccagcactttgggaggccaaggcgggtggatcacctgaggtcaggagtttgagaccagcctggccaacatggtgaaaccccatctctactaaaaatacaaaaattagctgggcgtggtggtgggaacctgtaatcccagctactcagtaggctgagggaggtgaattacttgaacccaggaagcggaggttgcagttatccaagattgcgccactgcactccagcctgggcgacagagcaagacttggtctcaaaaaaaaaagggcggggggctgtgcgcagtggctcacacctgtaatcccaacagtttgggaggctgaggcggggggatcacgaggtcaggagttcgaaaccagcctgaaaccccgtctctactaaaaatacaaaaaattagccgggcatggtggcgtgcctgtaatcccagctacttaggaggctgaggcaggagaatcgcttaaacccaggaggcggaggttgcagtgagcagagatcatgccattgcactctagcctgggcgacagagcaagactccatctcaaaaaaaaaaaaatggtgtagtgtttgcatataacctacacgtgtccttctgtgtactttaactcatttctagattacttataatacctaatacaatgtaactg

SEQ ID NO: 8400 - DNA, 1020 bp, Homo sapiens
tcaggagttcgagtcaacctggccaacatggtgaaaccccatctctactaaaaaatacaaaactagccggacgtggtggcgtgcgcctgtaatcccagcactttgggaggctgagacaggagaatcccttgaacccaggaggcagaggttgcagtgagccaagattgcgccacggcactccagcctgggcgacagagcgagactccgtctcaaaaaataaaataaaaaggaagggaagttgaatagactacagcatgggtggaccctgagtgaaataggccaattgaaaggacagatgttacacgataccatttatctgcaatgctagatttgggagagccattgaggcagaagataggtggtgggtgcccggggttaaggggaggggacggggagtccatgtgtaatggggacagagtctctggagggatgacgcattctggaggtggacggtggtaatggatacgcatgatgctgctgaactgtgcacttcaaaatggttaagacagtagattttgtgtttatacaataaacccagaaaagatgtatgctgcaccacaaacccagaataggttttacggagattttcttggtgtttttgttgttgtttgagacagggtctggctgtgttgcccaggctggagggcagtggcacagtcatagctcactgcagcctcaacctccttggctcagggaatcctcctgcctcagcctcctgagtagctgggaccacaggcgcacaccaccatgcctggctaatttttatttatttatttattgagatggagtctcggtctgtcacccaggctagagtgcagtggcatgatctcagctcactgcaacctccgcctcccaggttcaagcgattctcgtccctcagcttcctgagtagctgggattacaggcgcctgccaccaggcccagctaatttttgtatttttagtagagacagggtttcaccatgttggtcaggctggtctcgaactcctgacctcgtgattcgcccgccttggccttcca

SEQ ID NO: 8401 - DNA, 2666 bp, Homo sapiens
tgatccggccacatgctggagggttcggggagaggctcgtttcagtctagttggcgatttcttggatagagaagtaagccgggcggaggtcgggcgcggtggctcacgcctgtagtcccagtactttgggaggacgaggcaggcggatcacctgaggtcaggggttcgagaccagcctggtaaacatgtcgaaaccccatccctactaaaaatacaaaaattagccgggcgtggtggtgggtgcctgtagtccccctacttgggaggctgaggcaggaaaatcgctcgaacccgggagatggaggttgcacggatcgtgccactgtactccagtctgggtggcagaaggagaccctgtctcaaaaggaaaaaaaaaaaaaaaagcagggtgggtacgaggcaaaatcgtgattaacaagctttggaagtttaataccagtgagctgcgtaagattgcgttaaaaaaaaaaaaaagcagtcctggcgcatggctcacccggctttgggaggccatggcgagtggattattggagccttgaagttcgagactggtctggaaaacattgcaagacccggtctccacaaaaaaaaaaaaaaaaaaaaatggttggaggcagtggtgcacatctgtagtctcagctactcatgaggctgatgcgggagaatcatttgagccttagaggtcaaggctgcactgagtagtgattgtgccactgcagtctaacagaaccaggcctcgtctctaaaatacaataaaaaattagccaggcttggttgctcatgcctgtagtcccagactgaggtgggatagtcacttgagcccgggaggtcaaggctgcagtgagatcctaccactgcactccagcctgaagtcaaagtcaatttcattgccagtttattttgccagtgttgaagatacctatgagtagtcaacataagtagtgagatgccctgtgtccttttgtcagtcctaagtctaagaaagctagtgtccatttatttttatatcacttcccaagtgaggctggtggctccctttgggcagtgcagttctggaaacttcagggcctattcccatgtggggaacccagtcctgctgtgactctgggagggagagggccggggatacaatcgtacattcctggtaacagccctgtgattgtctgcttcaggttatcagtgagctgaatggaaaaaacattgaagacgtcattgcccagggtgagttgatgtggacgggctttcgtttgttttcatggtccatcctaatccctgccggtccatctgtggcctgccaggtttcgcttgtggaccagagcaccctagaagcctcacccgaggagtgagcagggctccagtgggctcacgtcatgggcacttctagacactctcaggagcagggcagcagggggcaccctgtgttctcagcagacgtttaggtggccctgcctcttaagcctgactgctcctagccctgaggccattccccaggatttgtctgaagcttggtgtctggagaactgagttcacgtcagcagtccttaccacatgctttctgtgagggggttgggggcagggactgagggtgccagggatgtccataggctccttgcctctttgttgggcagatggttttttgttggcttcagctgagctggtggaacttgtttggaagttgagctgttggggcagctgttcttgtcttccatgcatgtgaccacgacagggccagctcagcaaacgggccaagccatgaacacagcgttgtggccagagatgtggatactggggcagcacactcattccctacctagttatgaacatgtctgtccagtggacctctgagggtggaggtggggaaattgggcaggcaggcagtgtgggcctaattcctagaaggcaagtccctggataggaaaggtggggaagagaagtccccgttgaggagtggctcagggagggagtgttcaggaagaacgggagacactggcatatggtgggtccagatatgttgggtgccatgtgccatctctggtgccatctaacttccctgtggaacagcctcccaggctgggcagctgctctggtctcacctctctgctttctgtaggtattggcaagcttgccagtgtacctgctggtggggctgtagccgtctctgctgccccaggctctgcagcccctgctgctggttctgcccctgctgcaggtaagtggtggcctggtgagtgggcaaggggctggggctcagacggtgttgctgcagtggggtcttcatggggggactggcctggcacttgggcagtgctcaccatgcctctcctctgttccacagcagaggagaagaaagatgagaagaaggaggagtctgaagagtcagatgatgacatgggatttggcctttttgattaaattcctgctcccctgcaaataaagcctttttacacatctctcaagtattccatgagcactttgtcaagggtggcctctgcccaggttcttatccaagagggcaggtgtggagctgaagtgtgggcaacatggtattggggaagcgtttctggtgcaaaatgagcatgaggaggggagtctgggcatcacagctgcctggggtcccttcctgtggccttgagcagtatcctagctcctgagtacaccccagaaga

SEQ ID NO: 8402 - DNA, 1060 bp, Homo sapiens
cagtttgagaccagcctgggcaaatagcaagaccccatctctaaaaaacaacctaacaaggcgtggtgtgcacctgtagtcccaactatgggaagttgagatggaaggatcacttgcccaggaggttgaagttaacagtgggccgtgatagtgccactgcactccatcctgagcagcagaaaccctgtcttgaaaaaaaaggacagcagagaagctgatttcaatggagtttgggtaatcagggctctgtctttggggtggcttggtgcctggacttgcaaggacaggattggtagcccctgggctctacaaatggatgcaggaagtgagcccagcttgggggtggcagacgcccctgggtttccctgcaggggtcatggctccgccataatgccctgagcaacttgggcaatcactcctcaggcttgtttttttgccgatcacagcccacccctgccttactgggcagatgtgctcagggcttgtgggaagtgaccacagggccatgtgctcactgaactaggtcctttggggatgggcctgccctcccccgacaggctctgtcctggaatacagggctaaggacagaggccatcaccctcccctcccagcctctctgccctcctggccttactccgtacgcagtctcccaggcctcagggtctttgcccgccaacgtaggcacccagaagatggtctgccactcccaccctaggcttggggtcagcaacccacccgctggctttggtgtggggagcacctgctgtgtgaccaccttagttctgggaggataaataggctatagcacagaagacagttggggtggctgggggaggcctccctcagatgggaaggcaagacctggaggaaggcagagtccctggaggggaaggaatgtggattgttggagccagggagccacagaaagtactgagatggagggggacccaagatgctttttatttattttgttttttttctttttgagatggacttttgctcttgttacccaggctggagtgcaagtggcacactctccactcactgcaacctgcgcctc

SEQ ID NO: 8403 - DNA, 1035 bp, Homo sapiens
aaagtgctggcattataggcatgagacaccgcacctggactcctttcctctactttctttgggttaatttgctagtctctttttattatttatttatttattttgagatggagtctcactctgtcgcccaggctggagtgcagtggcaccatctcggctcactgcaagcttcgcctcccgggttcacgccattctcctgcctcagcctcccaagtagctgggactacaggcgcccgccaccacgcccggctaattttttgtatttctagtacagacggggtttcaccgtgttagccaggatggtcttgatctcctgaccttgtgatctgcctgccttggccccccaaagtgctgggattacaggcgtgagccaccgcgcctggccctgtgtcccctcctatccgtctcccagtcaggggcccggtgctgtggccccgctgacccctcccctgcctcctcagccccaggatgggtgagttcaacgagaagaagacaacatgtggcaccgtttgcctcaagtacctgctgtttacctacaattgctgcttctgggtgaggaggggtcgccttgcccccacccccacccccacccctcccgggccaccatcagacctgggcagatgcgatgacctttgtgtactgcttgtagctggctggcctggctgtcatggcagtgggcatctggacgctggccctcaagagtgactacatcagcctgctggcctcaggcacctacctggccacagcctacatcctggtggtggcgggcactgtcgtcatggtgactggggtcttgggctgctgcgccaccttcaaggagcgtcggaacctgctgcgcctggtcaggagggcgcagggccacggggtgggggtggtgcagatgggcccaaggaggttgtcgctgcaggctttgaacctgtgccttgctgtgctcacctggggggggggtcacggtccttccacacctgcctagtcctgtgggtccccacgttcctgctggaccagctgagggaagacaccagctccgcaagaaag

SEQ ID NO: 8404 - DNA, 1051 bp, Homo sapiens
cgggaggctgaggcaggagaatcgcttgaacctaggaggcagaggttgctgtgagccgagatcgtgccagtgcactacagcctgggcgacagagtgagactctgtctcagaaaaaaaaactaaaaaaaaaacaaggtaccgagttattttataccaggtctttgaagtctggtgtgtgtgtcacacttaagagtgagtctcactttgtactggctgtttcacttgctcactgaccgcatgtggcatgaggctgctgtgtgagcactgctgatttagagcaacccttctgttgaaaacagttgatcaattgattgatctattgatttactgagacaagatcttgctctgttgaccaggctgcccagtgcaatcacagctcaccgcagcctcaaccccccgggctcaagccatccttccaccttggcctcccaagtaactgggaccacaggcgcgcaccaccacgcctggctaacatttaaaaaaagttttgtagagatggggtcttgccatgttacctaggctggtttcaaacttatgggctcaagagatcggtctgccttgacctcccaaagtgctgggattataggcatgagccactgcacctggcccctaggagtgtgggtccactcgtgggtggaggtgggaggctgttaaacaaccgaagtgcatagagtggcccccacaacagaggcgtcagccaggatgtcagtggtgccagggctgaggagccttgtctagagggatgatagtcaaagactggagacccccttccactgtgaactgaaggcctcaccagagggaatacccgtagggcagagtgaactgtcagtgagccagtcctcttccagacttgccgctgggtgtcttgacatgggggtgctctacacaacctcaaaatgttgggaaggttacaaccagggaaagaatcgatatccaacaaaaatacctttcaacaatgaagctaccctgtttgagtggggcatcacgaaccatcctgcttcaagggagcctgtgggtctgactgcagcttcagctctgacctggagttctg

SEQ ID NO: 8405 - DNA, 1029 bp, Homo sapiens
gtatttttactagagatggtgtttctccatgttgaggctggtctcgaactcctgacctcaggtgatccacctgcctcggcctcccaaagttctgggattacaggcgtgagccaccgtgccgggcccagaatggccctttttttaagggttggttttatattttggaattttatattctgccaattacatgttttgaacctgccctgccatgatcccttgtgaggggctcagacaaactgcgatgaggcagagaaacagaagccctaggggccgtcgcgtgtgggccttgttttcatgaccagctgatttgccctagaatggctatgaagtggcagataatttagactgtgttcatatgcctaaattaaactgatttcaaagacaagcttgatggttgaaggcagggtttgcaagttccatcacagcagggccctctgtgggattttggctggtcggagtgaggccctgtgagggccagctgggctgcacctgcccagggttgtcgtgggagggtagaactcttgttgccagatgttctggtgcctgtttttaaaagggaaataaaaaacttggactctcatgagtaccatgagtttagaaaggttattcatgctcagcagcgtctgcactgcacctgcctgggcccggccacccctctcctggaggcttgtccgtgctgcctgctgtactgctgcactgccctctgctctcccctctcccctgcctctgcccgcctggaataaaacctcttccccaccttttctgtaggtgacaaggctcttgatggctatagtaaaaaaaagtacgtctgcaagttgctcttcatctttctccttggtcatgacattgactttggacacatggaggctgtgaacctgctgagttcaaacagatacacggaaaagcagatcgtgagtatcgctgcaggtggagacggcagaggatggcgtgggcctggcaggactgaggcccggtgcccgtgtagggccgctgcttccttctctgcccacagctgacgtgagccacgtg

SEQ ID NO: 8406 - DNA, 1041 bp, Homo sapiens
tccctgttcccatggtgtgagtgagcacccaacaccatgtgggtggaggaggggcacccagtggccccgtgtcccccactggggaagcgtggctggtgcttcgtggacccaccatctggcgtgcacgctaaagcctgccattcagcttcctgttctgagtttgatgcagatggacctgcagcacacattcttttgttttgctcaacatggtaaaatttttgttttgtgtgcagctgttatacattcatgtttgatgcttcatagaattggttgtgtgaattgtccgctgcagtttacctgctgtcctgttgaacacttagctccttgccctctgaggctgctgtgaatcctccagcatgagcagtcttggatgtcccttggtttccatgtgcacgagatggctcagctggggccgcggctcctgaacctgaggagactggcgttgccagaccagcttcccctgccgtgcacacggctctcacagcggcagcaggaggcgcgggcgcggcacgcgtagtgctagtctcttgggttttagtcatctgggtgtatagtgggagctctgtgatttattttttatttttttcttttgagacagagtctcactttgtcgcccaggctagagtgcagtggtgcagtctcagctcactgccacctctgtctcctggattcaagggattctcctgcctcagcctccagagtagctgggattacaggcacccaccaccaagcctggctaatttttgtatttttagcagagatgaggtttcaccatgttggccaggctggtcttgaactcctgacctcaagcaatcttcctgctttggcctcccaaactgctggaattataggcgtgagccaccgcacccggcctctttgagatttaaatctacattttccagattatcaatgaggttgagcaactttgcatgttgattggctgtttgggtgtcttgttttgtgaagtgcctgagtcttttacccatttttaccctgggttgtccgttttttgtgttgaatatttcaccattaagtatgatg

SEQ ID NO: 8407 - DNA, 1027 bp, Homo sapiens
gctcaccataatctctgcctcccaggttcaagcggttctcctgcctcagcctcccgagtagctgggattaacaggcgcccgccagcacgcctggctaattttgtatttttagtagagatggggtttttccatgttggtcaggctggtctcgaactcctgacctcaggtgatctgcccaccttggcctcccaaagtgctgggattacaggtgtgagcccctgcgcctggctgtgaaactttctaattatgaattcaatttattttataagttgtggaactgtgcatattttctttttctttttttttttttttttttttgagtcggagtcgcactctgttgcccaggttggagtgcaatggcacgatctcggtttaccacaacctctgcttgtgttcaagcgattctcctacctcagcctcccgagtagctgggactacaggccgtcgccaccacgcccagttaatttttgtatatttttgatggagatggggtttcaccacaatggccaggctggttgcgaactcccgacctcaagtgattgattgcacctgccttggcctcccacagtgctggcattataggcatgagacaccgcacctggactcctttcctctactttctttgggttaatttgctagtctctttttattatttatttatttatttatttatttattttgagatggagtctcactctgtcgcccaggctggagtgcagtggcacgatcttggctcactacaagctccgcctcctgggttcacgccattctcctgcctcagcctctcgagtagctgggactacaggcgcccgccaccatgcctggctaattttttgtattttttagtagagatggggtttcactgtgttagccaggatggtctcgatctcctgaccttgtgatccgcccgccttggcctctcaaagtgctgggattacaggcgggagccaccgcacctggcctagtctctttttaaacgcttgagatgaatttttgttgcttttctctttatatttgtttcaaatat

SEQ ID NO: 8408 - DNA, 1021 bp, Homo sapiens
cgaggtatggcccgcaggatggcaggaaggatggggtggagggcagttgcagaaggtgagcagtgagtggttccagcctgcctgcgtggaggtgccgagggccgttgctgacccctcttgcccctcagctcttccctgaggctctagctcctccactgttggtgccccttgctgagtcccagtttcttctcaccctaactctcaaacttctggctctctgggggccacctgagaaagccggcctctgtgtgtgtgagagcatgctggggcatgccgtggtggggcctgccctgtccgtcggagagggttaggccaccggcaaggggtgtgccatgaggacgctggcagaacctccccagccagagcctgttgtggatgctgcagctccctccagggcaggtcagcgtgtggcagccttgggttccttgctgctgacacaggtactgagggtgctgaggaaggcagggatgggcacttggactggggtctccaggaagctgaggggctggtgctggtgtagggtgcaccgcgccaggacgtgcccgcctcgccttaactctggcacctggctgccaccccggctcattgtttgtgcttcgcaggctcttcaggctcccgcgtgccacgagaacctggtcaaagtgggcggctacatcctgggggagtttggaaacttgatagctggagacccgagatccaggtgagaggccctttgcgagtcggggctgtgtgcgctccggcgggcctctcggtggtcggtggcaagaggcgaggcaccagctggccctgccgtgaggcctcgcagagccgcttctgctccccatcggcgtctttttgttttccttcagttgatagaaaaagcagggattctagtagaaaatggagacgtggggttgatggctgacttagtgaaaggggcgtctttgcggtgggatctggagctggaagagggtcccgaccagcggcctctggtgcaggccagggggtctcgccgccgtcccccccccgcgggggcgtgctg

SEQ ID NO: 8409 - DNA, 1063 bp, Homo sapiens
cctgctgcgcttggagccgaacctgcaagcccaggtcaggccctcaggaaatggtggaacacacttgagttgctttttattctggcacaatgtacgtggtgagatgtgtagctctttagtgcagttcagtcagttttgacagatgttgtttaaccaccaccctgtcaatacatggttgcctcccagcctccccgcagctggccaccgtggagcatcatccctagtgcagttcagtcagttgtgacagatgttgtgtgcctgtttaaccaccaccctgtcaatacatggttgcatcccagcctccccacagctggccaccgtggagcatcgtcccaccatggagcagcctggccctgggcggtggctctcccagctgttcctctctgtcaccgcgttgttccttctcaccacgtcccgttctggcgacggacacctgtctccgtttcacttgggtggcacccaggagtgctgctgtcgcccagggcctgtgtgtggttagtgctgcaagaacatcccacagcttctccaggtggccgtgccactttgcactcccgccagctacgtacgagacgccaggcgctcccatgccagccctcagttttcatgctgacagtgtgtgtggtgctcaggcctctgccgagttgtgggtgcctccagagagtggtccctgggcatggcccacagggttctgcatggcggatcctggacccgagggctgtgtgagcctcggcgtgcccgttgacctgctgtgctctctgtttcagatgtaccggctcacgctgcgcacaagtaaggaagccgtttctcagagattatgtgaattgctctcagcgcagttttagtcctgaggatggaagaccaggctcgtgtgtcttgtgttgtcttcgtctgtgccgtttgtcttcgtggccatcctgcagatgagcaccgtgtccagtgccacagcacaaggcgcctccccgccccgccgccccacacctctcccctttgggctggacgggaacacacgtgtgtggctcaggaggaaaagctcagcctggactgtggcagccacggcagaagg

SEQ ID NO: 8410 - DNA, 1048 bp, Homo sapiens
gtgcacggggacctttgcaatggccagggcctggggccacccgagctagggcaaggggagggggagggatgtgtttataaaatttctgttttaatttcaagtacagtaatgttggtggatagaaacacacaaaccacagcactttgattttgtcagtaactcttaagagtacggagggtcctgaggctggggggtctcgtgggcacagagtatgatgcctgtgaggacgtccttccagccacacagcccgtggactgcagcattgagtgttctatttcctgggtgtcacgtccgcaaaatccgctgttttgcagggtcagtcttcgagaaatgctcttgtaagaacaggtttttaggctcatgtgcccccttcccagtgcccgtcacctctccctgaggctgtggcctgggctcacctccctcggaccgaagggcttcccacacgtctgtgtccaacacgttcccccggctttcatttaactaccggcggttgtatttagcctcagttttggaggatacttttgctgaatgtagaattctgggtttcctttgagtgcttagcaggtgctacaccatggtcctctgctggtgagaggcagccaccactgaggccctgggtatgatgtgtgtctctggctgcttttgaggttttctttttatccttcggttttgtgtgtttcgcagtgacccaccttggtgtgttcctccaggtgtctgtcctgcttgaggttcagtgagccccgtggatccacgggctgatgtatttagtacatttggggaaattcttcattgttctctcttaaaatgtggcttcttcagccaggcgcggtggctcatgcctgtaatcccaacactttgggaggtcaaggagggcggatcacgaggtcaggcgttcgagaccagcctggccaacatggtgaaaccccatctctactaaaaatacaaaaattagccaggtgtagtggcaggcacctgtaatcccagccactcgggaggctgaggcaggagaattgcttgagcctgggaggtggagtttgcggtgagctga

SEQ ID NO: 8411 - DNA, 1045 bp, Homo sapiens
tgctgtgctagcaggcggggcttcagtgttcccagctagaatggagaggagttccctgcctcagagcacccctctcctaccagggcacagcttggcagaggggagctgcaccttcctcttccactggggcctggcctccgtcggctccatccggtggtgtctggtcaccatggagaccaggcaggccccctgggtggagggtttctgggctgtgacccacctctcagtggggagggggcggccccggctgctgggaagcctgaccctgggtgtagaggaagaggctggggctcccagctgctccgggtcccacccacagtgggacctgggctggcagcgtgcgaccctcccagcactggggccagtcgagccccctcctctcccttcctctccattcgctccttggcatgcagggctgcgggtggggcaggacccggggacgaggccagtgggagtggccaagagaggggaggcttgtggaaggtgctaagggttggggactgtgacatgttgggcaccccccagctgctggggtgtggaggaattaaccagactaaactggggaggcctggggaccctatggggaggtgggggtggggttaagggctgctgagggctgcctggatggggctggcagggtcccaccctgccttggaggagaaacagaggccctgggagtgatggggccaggacagcgcctggcagagagatccagtgcggggcgtagctggggagagtcccatgctgaatttgggaggtgcctgtgagccccgactaaaggagggcctggggatgcgggaaaggggaggtgtccctgtcacctgcaggcgctgtgcacagatgtccgcctgggagggaaggacttggggacaggctggccaactcgccagggctgggaccccatcacaagactggccctagctccaaagcctggtccacgctggctcctgagggctgggaccccaggccgtggcctcactggccccaccactgacacggccacttctttgtgctgggcggagcaccagctgcccgtggccaggct

SEQ ID NO: 8412 - DNA, 1027 bp, Homo sapiens
ggacctgcccccccggaacgagataggtatgggtccaggggtggcctccagcccggcctgcactgccccaccggggtccgggggctgtctggcctgaccttcgtctgtactcagaccctccccggaagcgtgtggactccccgatgctgaaccggcacggcaagcggcggccagaacgcaaatccatggaggtgctcagcgtgacggacggcggctccccggtgcctgcgcggcgggccattgagatggcccagcacggccagaggtgtgtgtgccccgaggctgctgggcctccctccctgggccctggctgcgcggcactgccgcctggctcatcgctacccattggcctggggtctcggctgaggccattgggtggggctgtatgggctaaactgggcttagctgggctgggctgggctgggcttggctgggctgggctgggcttagctgggctgggctgggctgggagctgagctgggctgggctgtgctggactggactgggctaggctgagctgggctggcctgggctgggctgggctagtttgggctgggctagactgcacttggttgagccgagctgggctgtactggactgcgcggctgagcagggttgagttgaattagggtgggcggggctgggctgagctgggctgagctgggctaggctgcactagaatgggctgagacggatttgactgggctgagctgggcagggctgggctgagctgggcagggctgggctgggctaaactggatttggctgagccgagccaggctgggcagggctgagctgggctgggctggcttgacccaagcttggctgggctgagctgtgatatggtcacaccatgctcagagccatcagcccagcaagcctgtccccctggtcccagcaatgctgggcccgtctctgggtggcaagtgtggtgtgtgtggccagggacatcacagaactcagcagtgatgagcagacccgtggccggaggaagggcacccagcccctctggagcctctgctgggtg

SEQ ID NO: 8413 - DNA, 1089 bp, Homo sapiens
cttgggagagcctagggttggctggaggcgagcagggggtacactgggcagagtctccccagggcctgagctcgccaagggcagagaccgggtcgctcaggtctcaaggagaaagcagcccgtgttaagaacaaaggggcagcaggcctggtgggaacacgtgtgcaggggcggagcggagcagccaagccgaggtctggccccgccgcctttctgagccgtgagaggtgccactgcagagactctacagcgcccaggtgctgagatgccctgggggccgctgtgactggtgtctggacaaagatgtccccagagagaccccttcccagcgcccaggccctctccctcctctccacgatggcctcagtcactgggcagtgtctcggagaccaggcgactggcggtgtacacatatgagcctgcagcgtgaccccaggccaggcagcggcagagagcggcggtcaggctggagtcacttcacaggagaccccgggaaatgaagatgtggccagctgtggactgagtaagacgagaaccttcgtcctgctgctggctttaaaccaggggcccctgtggaaactgctcagtgctaagccccaggagcagcatctgcagcctgtgccaggattccacccagtggcctttctgcgccgatcaggtggcccttccagctgggtgcccaggtcggaggtgtgtaggtattgtcgcaagcccagatgcacagggctcagcagacttgggaaccttccgcctaggccctgacattgccgtttctgctgctaccaaaagctttcatgaacagactcataattatcttcctcagagaaggtggaaaacatcaaagccgagaaggtggctttgatgccactgtggctgcctgcgcttctcccctcccccatcttgagatggcctggaggccctgacccctctcaagggtccggcacggatgcctcccacagccccacccaagggcccggcacagacaccccttcccaagggtccagcacagatgcctcctacagctccacccaagggcccggcacagatgcctgcgacagccgttcccgagggtccagcacagacacctcc

SEQ ID NO: 8414 - DNA, 1050 bp, Homo sapiens
agccccagctgctgccagccccatgtcaaccaggcaccccagaggaacagcaccaagggaggcagctggcttcaggaagggatgcatgcggttgtctgggacactcagggctgatgtccttgagtctgaagtgctagctggaagcccaggcagtttccaggttgcagcctcgaggggcgttctttccccaggaagaccgaacctggcggatgcacccaccctgtgaggaagggtcccccgccagactcaacaggcgactgatttaagttcgtctcatctaaaaatagcttcatagcaacacccagactagtgtccggccaggctgtgcactgcccaccacgtgggtgctggagtcacagtgcaggcccctcacccctcgtcggcctggcctccctgggccgtcaggcatctttcacacatgggactatttttgccaaatgctgcacccctgggccgcaaagcagagagtcacgtttgtaccatctgtcctgtctcttcatcgggcagaacatcgaccatgtagaaactcacctgtgcttccagaactgccaggctgctttgtgcacttcctggctccaggccctggcatggggctggggtaaggtcagggccagtggtggccctcggagttttgaacccagaacagacagccgccgagaccggcaggacactgaggaggcgtcgaggggctgagtgagggttggacctggtccccgtgcttgtccggcaggactcccaggccgcacagtggccgaggaggcagctccaggaatgggcaagggaaaggggagttgtgaggccgctgggaggggcctcagaatcagtcgggagagggcaccactgagccccagccctgctggcccctcctcccggtccctgcctctgcctctcagcacacctggttccacctccaggcagcaacggcaggggacgccagcagagcgtgccacctctgaacagccacccaggcgcgctctgcctgagtctcgggctgtgctagaggcgcctctggccatggtcctctcacggctgggcttcctggcccccgcg

SEQ ID NO: 8415 - DNA, 1082 bp, Homo sapiens
gctgctgagtggcacagtgaggatgcaggccacggccagggcagagttgtcagcccaggggaggggctaggcccacccagggcaccggccatatccaggctcaggctcaggctgctggaggtccggctgctgcccaggtggctccgccttgttccctgcctccgcagccccgcctcactccaggccctgcccctgcactgccccttataagccccgccccctctggctctggcccccccagtattccccacccatgcctctggggccctacccactcctggctccaccccctccccatcgaggctgtgggcgtccagccagaaggcccaggacagcctttcactcactccctccctcctctctccattctgtactccagacaccactaactgtatggaaatgatgacggggcggctttccaaatgtggtaagaatcccccacgctcacctggcacctccacctgccacttcaccgctcaccctcagcccgctgtggccgccacctgccgcccgggttgtcccggcctccctgtgtagatgtaggcacccagcagcccagatgtccccggccccatcctctaccaggagcagcccaggtcgctcccctaccacagcaagcccaggcggggttcctggccagactcacctctgccaggccctaggatcagggcaggcccaagaaggggctcccaaggcctgaagccagtgagggtcccgctggtcccactggtgcaggctgtggcctaggggaggggccggtgcccatccctctgtccactggaggctgtgcctggcagggagcggaggggcccacagctcagggctcaggtgggggttaggcttaggaagtgggattgaggggcctccatcgacacacctgggcagtgagcacagggccccaagaagggtgggctccccatttccgcccctcttctcaggactgcccccatcccagggacccgggacatgactctagctgcttgcccccagccccccagcctgcctcccacatccacccctccatgcttgtccacccatctgttcatctgtctgtctgctgctaaactgtgtccaagctggcc

SEQ ID NO: 8416 - DNA, 1073 bp, Homo sapiens
tgtatctagggactgtgggagtctatatctaaggaccgtggggtctatatctagggaccgtgggggtccatatctcaggaccgtggggatctgtatctcaggaccgtgggggtctgtatctcgggaccgtgggagtctatatctagggactgtgggagtctatatctaaggaccgtggcgtccatatctagggaccatgggggtccatatgtcgggaccgtggggggtctatatctcgggaccgtgggggtccatatctaaggaccatatgtcgggaccgtggggttctgtatctcaggaccgtgggggtctgtatctagggaccgtagggatctgtgtctagggaccgtgggggtctatatctagggactgtgggagtctatatctaaggactgtggcggtctgtatctcgggaccgtgggggtctatatctcaggaccgtggggctccatatctcaggaccatgggggtctgtatctaaggaccgtggaggtctatatctcgggaccgtgggggtctccatctaaggactgtgggggtctagctgctctcttccaacagtgagcacgtggcctccctctctagtgcagacagggagaggagctgaacatttcgtctacccgctcagttagggattgggccacttcagtcaatcgtccctctgtgtggctttcctggagttttggttaagagcctggccagtccgtgtcttcttatccctgacaggctgtcagagagtcacttctttccctgaggtacaggcttagctctttagttgtctgctcaggcagcttcaaaatttggaaaatgtcttaagggccagattaacctgtgcctggggcaggaccccttcctctagaaaagctctgtgtactaagctccacaaggctatgcgagacttcagcgcacctgcggaggcctcaggcctcacttcttagcctccccagaaatttgcaaatgtcccagttttctgctccagcccctgtggttgccaagagccctgctgggtatttctcccagtagaattcctcttccccagtgggaccgaggctcagctcatacccagcactggt

SEQ ID NO: 8417 - DNA, 1030 bp, Homo sapiens
cttggtctgacgtggctcatgggaaactgaggcacagggtgacttgtcagggtcacacggtgcttacgtgccagagcagggattggaattcaactgggctggcccggggtccattctgagccctgactcctgccgtcagcccccgaggtgggactgcagtggctgaggctggggagcaaagcgctgtctgttccataagcccctgtcgtgtgccctggctggtgccacgtccgctcctttgttgagaacctgctggcctctgttgggagaagggaggagcctgggagcctgctgtgctggctcgtttgattacagtgcccatttccctgagaaatcgcctttttgagtttttaaaaacatatttacatttttaagagagcagaggttcgttttagtggcattgacctctgaggatgtaattttttaaagttctgatttttttaaagttctgatttttttttcactcccttccggcaggctctaacaagagaagagatcacagaaacgtgaggatcaagaagccggactacaaggtcgcctacgtgcagctggtgcgtgtgagctggccagccccagcggggcctccgaggggctcctcgcaactgtgtccttggggatgtttgtgccggagacgctgcgctggggcccagggagcccccgtgaggccggatctcagggcctcagcgcagaggcaggctccacataaggtcatgctccgtcacggccttgggggtgttagtggtggcgctgggagcacgtgagcactggggcacatggggcacgtctcagcgtccggccgttttgtgattttgaagtttgaattctctgtgggcaaaggcagccatcacaggcctagtgggtttcaactccaacgcacaccagggtgtcagagcatgggaggccccggcctctggagagcctgtccttggctgggtttcagcctcggaggcagagtgtgaggcccctgagggcaaaggtctttggtgccaaggcaggtctggctggccgggctgttggctgaggcccatgt

SEQ ID NO: 8418 - DNA, 1031 bp, Homo sapiens
acctcctttggggagccctcccagattgtccaaggtgcttgagggagggaggaatgggttgttctcccggcaccggggctgcactcctgggcagacgctgcatgcctgtcctcaggcgcggccctgctgccacccccttgggggctcggagcgcgacagcagcttggggacgcctcccgcgcccagcacggtgcacctgggccctgaggtcctggccgaaacgcgccaagttgggggtaggtgcagcgaccccatacccctcggctgcgcgccctggcggcaggaggcggggccgggggcggggcgtgagctggccggggcggggcctatggaggggcgggaccgcggcgccctataagtactgcggagcgaggcgcgcgcccggccagagagcgagcgcgcaacggcggcgacggcggcgaccccaccgcgcatcctgccaggcctccggcgcccagcgccccacgcgcccccgcgcccccgcgcccccgcgcccctttcttcgcgcccccgcccctcggcccgccaggcccccttgccggccacccgccaggccccgcgccggcccgcccgccgcccaggaccggcccgcgccccgcaggccgcccgccgcccgcgccgccatgggagtggagggctgcaccaagtgcatcaagtacctgctcttcgtcttcaatttcgtcttctgggtaagggctgcgccgggggccggggcgggagggggcaggcacacactccacgttgggcaggtcccgcggcagcgtgctaggccccgcgggcgcagcgcgggccgcgaagttgtggggccacctgtgggctccaggagcggggtggggggtcgcccggggccaccgcgccccccgacattggggctgagggctgcgagccgagtttcggggcctctgtgctcgggggcccacctctgcggccgggccggggcttctgggggccgccgggcagttcccgctgtggtggtgatgggtgcggtggtcgcgggtcgggacccgagtacccggccgcccctcagctaa

SEQ ID NO: 8419 - DNA, 3302 bp, Homo sapiens
gaggcagatcccatggctcccccttccgtggggagcaggaacaagggggtggggaagatcagtcaggggtcatgctgctgcacacgcctccctgggggctgcagacatcctggactcaccagcctgtgaccccaaaccacacgccccgccccatccaccccgtcctgtggagcctggtgccgcgtggggacatcctgggctttgacggctcctccctgcgctgagttttagcctctgtgccccagggctccacacaagccgctcactcctggtcaggtcgtgggctggtggctcccactagcccctcacagacacgcctgctgggcacctgggtgtgtgtccttgggccccgcctacagcctgccctctttcctccctctggccactgcccggctccagttcttcacctgcctggtcatcctgtttgcctgtgaggtggccgccggcatctggggctttgtcaacaaggaccaggtgagcctgggtgtgcagggacagggtggggtgggtgacgggggcaccctcctctcctgtcgcgggtgggggttgggctgactcatggcttgtgggagctctttgggctcttcctgggtcccacttgccaggaggatctccaggggctttatggaggaggcagcattggggctgagcaccaggccagcctcccgtgtcccagcactcccggggcagctgagagtgcagagtccttgtcctctggggtctagcctcgaagccaccctgcccagggagagcctgggaaaagtgcgtccgcctggggcggggcggggtgggggcaaggagggggaggttccccctgtgcatgtgaccgcacccctcccccagatcgccaaggatgtgaagcagttctatgaccaggccctacagcaggccgtggtggatgatgacgccaacaacgccaaggctgtggtgaagaccttccacgagacggtgcggccccggggggcgagggcggggagcagggccccgggaacccggcggggtgtgtctcgtcctggatgaatcctgcctacgcccagacctcaggagcaggaggtgcccttgggacctccaggacccctggtctcaactggtcctcgggtgggaacctagtgggccagggtggcccagggtgcggaaagctctgagcagcgcagctgaggaggaagaaggctggcccctggatgcattctgcagtggggagcgctgcgtacccctggccacctccccatgggttccctagagccaccgtccccctgggcacatccagggctgaccttgcacccctgctctctgcagcttgactgctgtggctccagcacactgactgctttgaccacctcagtgctcaagaacaatttgtgtccctcgggcagcaacatcatcagcaacctcttcaaggtgcgcgaggccggtggggccgcgcctgaccccccgcatgtcccgcccctgggtggggtcctaggggtgggcaggtcacacggcagccccacagggagcgaccacactgggtggcatggcccctgtcagggctgctctgctgggagggttggggtgggaccgcatctggcccacgaggaaggcaggcgccctgtgctgcgcattccgggtgaagaaggtggaggctctggggggtgggaactcacctgcacccccagctccacgtgtgcactcgtgggtgtggacgcccctgacagcctgtagctggcagggcctgcaggccatatagtgccctgtggaagtttcctgctgaggcctcagtggaagtcgtcatcagtgatgctttaggggtctagtgacaccaatgaccgtgatctcagtggaaaagggcacagtgtgtcccaggcatttcgcgtttatgttaaaacgggtggaagatagcaagccggcagaggccgggccgctgcacccgcctgttccgaggtgggtagggggtggggggctgttcccaggattcccctctacgctttctgtggtgaccacggattactgcgtgacaacgggaagccgggagccgaggcccggtccctgaccacgcgtgcctggccacccctgcaggaggactgccaccagaagatcgatgacctcttctccgggaagctgtacctcatcggcattgctgccatcgtggtcgctgtgatcatggtgagcgggcgggggcggagggcctgctctctgggctgccccttccgcggggccttgtgctgactgcgccccccaccaccctcctgcagatcttcgagatgatcctgagcatggtgctgtgctgtggcatccggaacagctccgtgtactgaggccccgcagctctggccacagggacctctgcagtgccccctaagtgacccggacacttccgagggggccatcaccgcctgtgtatataacgtttccggtattactctgctacacgtagcctttttacttttggggttttgtttttgttctgaactttcctgttaccttttcagggctgacgtcacatgtaggtggcgtgtatgagtggagacgggcctgggtcttggggactggagggcaggggtccttctgccctggggtcccagggtgctctgcctgctcagccaggcctctcctgggagccactcgcccagagactcagcttggccaacttggggggctgtgtccacccagcccgcccgtcctgtgggctgcacagctcaccttgttccctcctgccccggttcgagagccgagtctgtgggcactctctgccttcatgcacctgtcctttctaacacgtcgccttcaactgtaatcacaacatcctgactccgtcatttaataaagaaggaacatcaggcatgctaccaggcctgtgcagtccctcagtgccagtggtgtctgagacctaggggttggccggagggcaggggaatctgacatcggtggggcttggctctgtggactctgtggggtccagggtgagggtgggtgggtcgggatccctggtgttcaccaaaggagtcactctgtaaaatttggggagttatttattctgagccaaatatgagcaccggtggcctgtgacacagccccaggtcctgagaacttgtgcccaaggcggtctggctacttaattgtatacattttagggacataggacattgatcattacatctaagatgtacgttggtttagtcggaaaggtgggacgatttgaaggggagggactttcaggtcataggcggattaaaagatgttctgattaataattggttgattttatctaaagacctgaaatcaatagaatggactatctgggttaagaggagttgtggagacca

SEQ ID NO: 8420 - DNA, 1013 bp, Homo sapiens
gacagggtctccctctgtcacttaggctaagagtgcagtggtgtgatcttggttcactgcagcctcgacctccctggctcaagagatcctcccgcctcagcctcctgagtagctgggactacagatgcacaccaccacgcctggctaatttttgtattttttgtagagatggggtcttgctatattgcccagtctagtctcaagctcctgagctcaagcgatctgcctgcctcagcctcccaaagtgctgggattacaggcatgcactttttttttctaagtagctttacggaggcgtgcttggcatacggtaaactgccccagtttaaagcagacagttccatgagtcctgacatttggaggccctgtgaagccagcatcagcagagtgggcacacccatcaccctcacagcgtccccctgtccccacgaccaggccactgctgccctaccatcaggcacgatggatgggcttgtgccttgtggaattttatttggatggactctggcagccaacgctggtttcgtctggcttcttttattcagcgtcatgattttgagctgtgtgtctgttgtgtgtgtcggcctgttgtttgggtagagcctactttgccgatccatgcacctgttgatggacatgtgggcggctgtatcccatttgggctctcacaaatgatactgctaggaatagctggagtctctgtgcgagcaaatgcttttgcttctcttgtgcaagcaagtggttgaactgctctgcagcccgctgggaagtggaacggctgtgtcatggggtgggtgagggcttcactttctaggacactgacaaaccgttttctaaagcagcaatccccttttgcagtccagcagctccgtgcgacagctctagttcctctgtctccttgtcaacacttggtgtggtcggtctttaattttagccaatctaacaggtgtgtcggggccctccctggcattcctggtgactcactgtgtggggtcatcttttcagctgcttag

SEQ ID NO: 8421 - DNA, 1064 bp, Homo sapiens
ttatctacccactgagactttcagttatatattttttccttccctataaatccttgtatgggggtttaatttgcttgattttagcatcttgtacctttctcatattttaaactacaacttttaatctttaggtcatttgaacatgcatattttgtaccctctatcctgtcatttcatcatctgcagttcttggagagtctaattctgttcactgtagttttttctgactcttgctcatgatggctcatttcattgtgggtttgcaatttagatcatgagtttgtgtggtggatgtttttgtttgtggggttcctatgtatcctgtataaggtacatgcctctggagaagctgcacttttgcttgtacagggtgacccagtgaaccaatccaggaccttcatgatccatgttttagatatgggatcttctagacaacctatgcagtgtaaacagaaaccccaatctcctgtgagagcaagtctaagtaacatatattgagaagagagttttattttataaaataaaactgtctttatttgcagaagacatggttatctatgtagaaaatctgatgaacatgcaagatgaccactatgactaatatatgagtttagtaaggtggcagatacaagattaatatgcaaaaatcaattccattcatatattcttgcagcaaataaccagaaattgagatttttaaaatacaggcgtgtctcattcttattgactgcactttgctgataatgcattttttacaaattgaaggtttgtggcaaccttgctcaagttgaagccagtactcacgtaccatttcaacaatcctagggcccttaagaattatgctaaatctactctgcttatgctctataatgaagcaacaaagcccgatgacagtacatctgttgacaacatggtttactgaatatgttgagcccattttcgagacctattgctcagacaaaaagatccctctcaaaatgttactgctcattgacagtgcacctggtcatccaagacctctgatggagatgtacaagattagtgttgttcttatggctgctaac

SEQ ID NO: 8422 - DNA, 1012 bp, Homo sapiens
gaggctttcctctttgactaatccacctcagcgcagacgctttatgggtgtcaggctgggggacagtcaggtctttctcatcccacgaggccatatttcagactatcacatagggagaaaccttggacaatacactgctttcaagggcagggctccctgcggctttccacggtgcattgtgcccctggtttattgtgactagagaatggcaatgacttttaccaagtatactgcttgtaaacatttggttaacaaggcacgtcctgcacagccctagatcccttaaaccttgattttatacaacacatgtttttgtgaactccaagttgggtcaaagtgactgaggcaaagtggctggggcaaagctacaaatgaacaacatctcagcaaagcaattgttagagtacaggtctttttcaaaatggagtctcttatgtcttccctttctacatagacacagtgacagtctgatctctcgcttttccctacatttcccccttttctttttgacaaaaccgccatcgtcatcatggccccttctcgctggtcgctgtctctccggagctgctggatatacctgtagactaacaatagagaggacagacatacaagaattaatacaaaatttgcaatagtggaatttccaatggttttaacccaagtgacagggttaagattagtgaggctgtcaacagcttttaccattgcctccgtttctgacaccagatttaactgggcttttgatgtttcaaaaatttgttctttcaatttagaaatatctaaggtaagattatcttctcttccttgtagatggcgtctaaccatgtcccagtgatgttcagattcattataggctcgaggtttaatacaaaaatctgatgtattccagtcacactgtaactgaaaaagatattctaagctcatgagcctatctctcatccaaataacagtttgtctaagatcattaatttgatttgtcaatttttgatctatttgagtctaagaattccac

SEQ ID NO: 8423 - DNA, 1044 bp, Homo sapiens
aggttgcaatgagccaagattatgccactgtactccagcctgggtgacagagcgagaccctgtctcaaataaataaataaataaagagaattcataaacaccctgcaaggtaggtggtgttatacccattttaccaatgaggaaattggagctcagagaggtgaagtgacttgctcaaggtcacccagctaataaaggcagagctgggatgcagactcagctttgtgcagttcctgagcctctatgctgccccttcacattactcagagtgcatgtctgagcctggtctcaagctatgatatctcaagctatggtatctcaagctatggctttgagaccagcatcttctctcccagagctctacatttagcttcctctgacagtgcagaagggaatccatctccttttttgtggaggctgtgaagccccatggctagtcttgccccaggcctacctgtgggctgccctatgagccgcctgcagcattgctcaccttctcagcagtctggcatctcattgaaagaaaggaatgatggtccttaagaactccacttccgaagactgtccctccatagttagagcaaattcattcccttgctgggttgctgggctctggcactgcgctggccctcgttggaggtctgcagaagtgcacagaaagtgtgggcaatggactggccatttccacagttttggaaacttttaaaaatccatattcttgctgggggtggtggctcacgcctgtaatcccagcactttgggaggccgaggcaggcagatcaccagaggtcaggagttctgagacgagcctgcccaacatggtgaaaccccatctctactaaaaatacaaaattagctgggcgtggcagcaggcgcctgtaatcccagttacttgggaggctgaggcaggagaattgcttgaccgcaggaagcggaggttgcagtgagccaaaattgcgccactgcactccaacctgagcaacacagcgagactccatctcaaaaaaaaaaaaatgcatattctggcttggcgtggtggcttat

SEQ ID NO: 8424 - DNA, 1077 bp, Homo sapiens
ggtcttagtggaggcacagctctgagctatgggtgtagagcatctgaacccatctacacattgaccaaacacaggcaggttccagtctgcgggggagatggagaaggtgccaccatgctgctgcacaaatcccaggatagctggggaatgagaatccagcactttgggcctaggacctggaaggagaggtcttttgggagaggtatggggacatctgaaggaggacttcttggaaggggaggggctggagcagaggcaagagtgattttgtcagatggagagaaggttctccacatgggcggggctggcagaggcagatgcccagacaggtcacaactctctaggtgcccaattacctgccctcggtgagctcagccatcggcggggaggtgccccagcgctacgtgtggcgtttctgcatcggcctgcactcggcgcctcgcttcttggtggccttcgcctactggaaccactacctcagctgcacctccccgtgttcctgctatcgcccgctctgccgcctcaacttcggcctcaatgtcgtggagaacctcgcgttgctagtgctcacttatgtctcctcctccgaggacttcagtgggtgcctggatgagggaggagtggggaagtgttccctgaggggacgggcctgcccctaccacattcggaccttcctacttcgtggtgtgggcactccctgcaatgtggctcccaatcctctttccctccagccatccacgaaaatgctttcattgtgttcattgcctcatccctcgggcacatgctcctcacctgcattctctggcggttgaccaagaagcacacagtaagtcaggaggtacggtctatccctagcgggggctccaaggcagcccagaagaaaatcaaggacatctgtcctcaggattcgggtaatggtgaggtgggaactgagttctaatgggaaccctggcagaggggtgctggggttggggctggggcttgggaacaaactgagggtggttggtcagaatctaggactatagcactgtgtttgggtagtgtgggagactggagaatagaagagatggaggctgc

SEQ ID NO: 8425 - DNA, 1056 bp, Homo sapiens
cagtacattggtaaaggtgagattggaggcaatgagcctagataggagactttgcaactgttcatgagcagaagacatcagggtctgcattgtggaggtaaaatcagtaggactcagagtttaaatgtaggaagggaaggaaagaaagaaaagagtcaaagatacaccagtgttttgagtgtgggtcatgaagagactggtggtgccattagcagaaaatatatggcagtcagaaggagggtcagtgctaggggatgattagtggtggggtagctgaacttatttgaagtgctgggcaaggggctacactccacaggacttcaggaaccaaataattctttctatgcttatttcacattgctacattttacaaatgagttttctggggtccaaagaaatgaaatgatttgcctaaagtcatacagtaactccatggtggaatctaagtctgagaacccaagtctctttgctttttagctattaaacttcctaacaaagctgagccttgactctaggaaaatcagagacagtcttggagacagacaaacctgacttcaattccagatcttgccagttttctgtttgtaagatcgtaacaagattgcttttcctctctgagcctcatattcccttttgtccacatttgcaaaaaagggaatattaatttttacctcatggaggcattggaagtaaatatgctttctataatactctttttacttttttttggttttgttctgagacagggtctcattctgtcgcccacactggagtgcagtggcaccatcacagcccactgcagcctccacctcccaggctcaggcgatcctcccatctcggcccaacaagtagctggtactacaggtgtgtaccaccatgcctggctagtttttatattttttgtagagatgggggtctcaccatgttgcccaggctggtctggaactcctgagctcaagcaatccacccacctcagcctcccaaagtgctgggattataggcatcagccactgtgcctggctacatctccgattttctagtgggatatggagtggc

SEQ ID NO: 8426 - DNA, 1048 bp, Homo sapiens
caaaaggaactccctgggattaagcaagcatcttggaattggtatgccttgcttctctacatttcccatggtcttcatgggagggctggctcttgtctttctagcaaggtcacatttacactgtaggtttgttcagaggttgttgttccagaagaagcagctttcagtggagactctggacttagctgatttgcatgggcttttgtagccagccgtcaatcccctatccccaccctgccaaatacctcaataattgttagttatagctttgaaaacgtgtactcagcttgacttctgttccggatcagttgtaaattctcacataaggtagagcagagtgtgtttgcttgggttaatcaggtatttataagttgacctttactagtgaatacctaatttttccctcatgcctaagtaactctagcaggccgagggccttgttctcaggcattcccagaactgttgggagttgcagcaggtttgcctgcccttgtcatatatgcacaagggccagtaggatttatctgtctcccagcaagggtgcccaggacctctccttttatcctatcattctaaagcactgggaataccagtctcctctctctgatcagcattttagacactgatgctttctcttctagttagtttcttgggagaatgagtaagcagggaggaattgtttggctttcaggtaaaaaggacttcttgcttgtgaattgaagtcactaggcgagaagtgagtaaagaacatgttcctggataggagtggtcaagcgttggtaagttagacttggtttggggttaaatgggcctggtgctctctaggagtggaatcagtaagggtcctggctgtgtcctcattgccctccttcgggagctgagcattgctgtaggggagatctcacatatggtctggggagaagggaaaggaggagggttaaggaacgaagagacagagggaagaaaagggaacttttgctgagctgtttctctaggctaggtgctttacaccaataattttctttaatcttcacaacaactttgtgag

SEQ ID NO: 8427 - DNA, 1063 bp, Homo sapiens
tgggtgatggagcaagactctattgcaaaaaaaaagaaaagcatattgtatttaagtgtattttctagtatggcttatctcattatcagctaggtcaactagaggtagtgctttcctgattttgcttctagaaggcattctttgagcagtgggataggaccccatccttaggactttcacctctccaggtattgggccagaagtctaaagctccatgaaatactgtttatgtacaataccagcttgagctctaaacttgtaaaagaatcaactttgatatgacttagggtcccatgggacctaccaggaagtcacaggaactctgagccacagcgaagtccaccactaattagacagttaataataatgctaattgttatgataagaaatgtatgttgaatacttatatgtcaggtacaattacatatttatttaattctcacagcagtcaatgacatagatattgttattattctcattttgtagatgaagaatctaaagtcatgtgtctagtaattggtgcaagtaggacttaaacctaattagaaatttcatgttctaattccaaactctattttttttattgttttaaataaaaaaaattttatttttcatgttttttttttgagacagagtctcgctgtgttgcccaggctggagtgcagtggcacgatctcggctcactgcaacctctgcctcctgggttcaagtgattctcctgcctcagcctcctcagtaactgggactactacaggcacatgccaccatatccggctaatttttagtggagacagggtttcaacatgttggccaggctggtctcaaactcctgacttcaggcgatcttctcacctcagccacccaaagtgctaggattacaggtgtgagccactgtgcaggctcactattgtattttaattatttactttgatatcctcctaccagattttaaattgccagaaggcaggggctgttactcttcatttcattaaaaaaagaagtattgagttatggcttacatacaataaaatgaattaaatgcttgatgaatttttaccaatgt

SEQ ID NO: 8428 - DNA, 1121 bp, Homo sapiens
atgtttgttgaattgtagacaaagaccttgatttcagaaatctcttcttgattttctagcagtggggcagcttgtatctccatggtagggctgtactttgtttttatttattttttatgttttatttatttatttttgttatttagtgtttatttcataatcataaacttaactctgcaatccagctagtcatggaagaaaacagagaaaacatggagcccaaagggaactgcagcaagagcacaaagattcaaggatactgcgagcaaatggggtggaggggtgctctcctgacctacagaaggaatggtctggtggctaagataaaacacaagtcaaacttattaagagttgtccacagtcagcagtggtgatcttcttgctggtcttgccattcctggacccaaagtgctctatggcctccacaatattcatgccttctttcgccttgccaaagaccacatgcttgccatccaaccactcagtcttggcagtgcagatgaaaaactgggaactgtttgtgttgggtccagcatttgccatggacaagatgccaggacctgtatgctttaggatgaagttctcatcatcaaatttctccccgtagatggacttgctgctagtgccattatggtgtgtgaagtcaccaccctgacacataaaccctggaataattctgtgaaagcaggaacccttataaccaaatcctttctctccagtgctcagagcacgaaagttttctgctgtctttggaaccttgtctgcaaatagcttgaaggagacatggcccaagggctcgctgttgacagcaatgtcgaagaacacggtggggttaaccacggctgatagtacggggctcccggcagcagcagcatctgcaaagacttttatgttttatttttaatagagatggggttttgccatgttgcccaggctggtcttgaactcctgagctcaagcaatccacccacttcgtcctcccaaaatgctagggctataatgttgagaggttctttgtggaacaggctgccttttgataagttgtttgtgttcataagggaataaaaatgtcatcccttccagtactctcccaattttgttggtgcaaggtcttcagaata

SEQ ID NO: 8429 - DNA, 1041 bp, Homo sapiens
gttgtttgtgcttttgtgttgtatctaaaaaagtttgaccagcatggtggctcacatgtgtaatcccagaactttgggaggctgaggtgggcagatcacttcaggtcaggagtttgggaccagcctggccaacatggcaaaactctgtctctactaaaaatacaaaaagaattagccaggtttcgtgctgcatgcctgtaatcccagctacttgggagctgaggcaggagagtcactttaacccaggaagcagaggttgcagtgagctgagattgtgccactgcactccagcctgggcccacagggtgatacatctcaaaataaataagtaaataaataagattaaaaaataaaaaatctgttttcaaagccaaggttatgaagatttactcctcagttttatgggtttgctcctatgttttacctcaaagagttttatggtttagcacttatatttaggtcattgatccactttgagttaacttttgggtgtagtgtgaatttcttgaactttaaacccttgaatgtgtgccaatccagtcagtaatgtttttttttttttaattgagacagagtctcgctttgttgcccaggctggagtgcagtggcgtgatcttggctcactgccaacctctgccacctgggttcaagcgattctcctgtctcagcctcctgagtagctaggactacaagcatgtgccaccacacccaatttttttttttttttttttgacgaagtctcactcttgtcccccagggtggagtgtaaatggggtgatctcggctcactgcaacctctgcctcctgggttcaagtgattctcctgcctcagcctcccgagtagctgggattacaggtgcctgccaccacacccagctaatttttgtatttttagtagagatggggtttcactgtgttgaccaggctggtctggaactcttgacctcaggtgatctgcctgcctcagcctcccaaagtgctgggattacaggtgtgagccactgcgcccggccatttttttgtatttttagtagagacggg

SEQ ID NO: 8430 - DNA, 1052 bp, Homo sapiens
cagtaatgatttttaaatctttaaatcccaatagctatggaaaggtggtttggcaatgttttagtggctgttggctgaagcttctttcaataggggcattttagaagacatttcctcctcctcggatctgatccactgatgtgcatttgataggtttaggggcaactttgagagtaaggccagtgactttcagggatgccagtcagttgagtgacacacccttatgtacgcgtagtgagatgctctgctattggcttgtctgtatctcagcctgtgaggagcagggtgaggcctaattgaaacaaggcacagctggcaggggtgaggggaacaatgtagtcaggtagcaagtctgtactgagcccaggcaggttcccagccctgggtatggcttcctgagaactgtgcaaaaacagtaatgattagtgagaagatcatatggagacagaggccttgatttcaagttggatgacttaagactcgtcacttctctctgaaccttaatgtctttgattacaaaaggtgaatgctgacttcacagggtttctgtttttttttttttttttgagacagggtctggctctgtcggccaggctggagtgcagtgacacgatcttggttcactgcaacctttacctcctgggttcaaacgatcctcccacctcagcttctcaagtagctgggactacaggcgcatgccaccatgtctggataatttttgcattttttgtagagacaggattttgccatgttgcccaggctggtgttgaactcctggactcaaacgatcacctgccttggcctctcaaagtgttgggactgcaggtgtgagccaccgtacccagccttgttttgtttttgaagatgagctgaggttatcagtggaaaagtgatttggaaaccataaaatgagatttgggaatgtaatagagaatcaaggcgaagactaagttttctgggagtttttaaaaagattctttcgtgactgtgattctcagaaaaggtttgaggcttactgactagatagttgattttcaattttttattcaaat

SEQ ID NO: 8431 - DNA, 1068 bp, Homo sapiens
tgcttgtataaataaagttttattggaacaaagccacattcatttgattaatgtaatcaataacaatgtaatgtaattgtggctacttttaaactacagtggcagagttaattagttataatagaggctgtaaaatattaactgtctggccctttacatgaaatgttttgctgacatctgatttaatatatcaggcccggtaaagatttagtttattgttaataataaatttaaatccatacagtattctaagtatcttttgataattttgaatttttttgccaacttattgtttgaaccaattagattgttttcgtcctgtaatatagctctcagagagctcatattaggtatagaagggtcagctttgttacttgctatttatttttgtttgtaattttaatattatctttaacctatgggggttgtttttcatattcatttatttatttgcaaacatcccttaagatcatttgtgtggtaaagtttgatttagttgagaaaaaaatataaaccataatttataagtaccctgaaagcaaatgagtgactgcagatactgatgttcttccttgcacactggggagctcccatctctattctcaggaaaactcatatgtggtaagcgataccgaaatacatgacatacagacccagagagggcaccattgttagtcagtacagttaacattggtaaagcataattcttatattttaagattaaaaacaattataaaataagagttttaatttttctttttgtgcttcactggaaagtcttatgcattccactttggagaccactgtcttaatacatactgtttgtgtaaattctttcaaattctgaatgtaggcataatccctgaatataaataaaagtttgtagtatcataataattgagctttaagtccagcaaatactttgtgtggatagtactgccagcagctgcaattagagaatctgtgggctaagcaaagccttactcagatgctttatctgtttttatcctgtgtggacagtcatctctcttccaatagaattttgtatctgcagctaattaaatcaag

SEQ ID NO: 8432 - DNA, 1072 bp, Homo sapiens
tgttcaaacttctggtggggtttgctccatgggcaaaagatttgttgcagtgggatggtactgttaggttgtccttaacagtatgagttgggcagacaagggcctacctaagaccattgtccccttgactggaccagactttttgagagcagtgctattttcttttctggagcctacatggcaaatcagggcatttattcagtcattaaacaaattcttatttaatacatattaaagccaggcactattcgaaggctagggattccacagtgtacaaaacagataagatccctgcttttagggagcttgcgttctagtgatctgtatgtcacaggtgattaagtgataagaaaactttgaaattaggcagaactgtgatcagattatagtagtctagtgactttgcctttggttttctcagggtaaagtggtagttaatgattcctaccattgcagcgttgttgtcaggattaagtgagaaaagtgctgtttaaagttcccaacacaaagaattctcaaaactcgacaatagaaaataagccaggccaggtgtggtagtggctcacgcctgtaatcccaacactttgggaggctgaggcaggcagatcacttgaggtcaggagtttgagaccagcttggccaacatggcaaaaccctctctgtactaaaaatacaaaaaaattagctggtgtggtgacacgtgcctgtaatcccagttactgggaaggctgaggcaggagaatcgcttgaagccgggaggcggaggttgcagtgagtggagatcgcaccactgcattccagattgggcaacaaagtgagactctgcctcaaaaaaaagaagaagaagaaggaagaaggaagaaggaagaagaaaataagccacttaataaaaaatgggaaaagatttgaacagagacttcaaagtagatatatggatggctaataagctatgaaaagatactcaatattattaaccattagggaaatgcaaattaaaaccataatgaggtatcaccacatgcctgttagaatggctaaaaataaaaaatggacaatatcaagtcctggacga

SEQ ID NO: 8433 - DNA, 1041 bp, Homo sapiens
ttgcattttacaggctctaggtgacacagtggtaagtggcagaaatgtgattcaagacattatctgtgaaattctttttcctctgtgacacttcataagctttgtgatttctctggatgttgaccaagctgcgtgatcagttaagagtggaaaactttgtgcagtctcaggcagtatggggatggaggagttggagagaaagttgcttggctctgtctttgggattgagtggtaacactttcctctgcatagaacagtggttctttccttcgaggaccaactctcttctatatatctgtctcacctagatgctttcaatatgtctgattaatctgtgtgtccttggatctcagcacaagacctgtcacatagtaactactcagtaaatattggttaggcaaatgaaagaacaaatggtgcttaacaaagccttctggaactcccaatgcctgcactattcttctgccttctcttgtgtagtacaatactcttaataggatattttgtccttaaggacacacacacacacacacacacacacacacacacacacagtgtgtatatatattttgtattgctcattgatgcataagcctaaatcccccctcttagagttgattagatgccaggagcttcttgggagaggcatgagtttgttttactctcttatattctttgtccctaagcctcttcccataccactgcccaaaggtgagtgtcatttataaggaacacgtgatgagctctaattctttttgccaagtctattgaagtgggtgttctattttggaaatggagtcctagaggttttcctgctgttgagtgtttggctgggtttgtgatcctctcagggtgtttgaaagccatgtatagggatggtagcatgagggaaaactgagcagtgaatcgaagttgccgtttgttcatggggattgtcagggagagagatttcctcagcacctgaagccagagcagagggtggatttattatatctagtccagggatcagcaaactgtttttttcgtgtagcctgcaaacta

SEQ ID NO: 8434 - DNA, 1060 bp, Homo sapiens
gcagccaggtctagaatcaaactctaaagtatcatgttacattgaatccaagctagtgtaactctctggctcctggctaaatatctttcttttagataggctgacaatttggggacctttttctttcttctattcaatagacaattatgtcttgactagctattgtaagctaagctctctgctacatgttataggacaaactcgagagacactccttcagttatttaataaccacacactctgctctgtgccgggccctcggcttggagatggatttatggagctaaattaattattcatttatgtattccagaaaatttacaagatgctggtgaagaataaatgataaataaaatatagtctctatttttgagttgcttagggagagtaagagggggataatgtataccctgagaactaagggaacaaataggatagggcaatgaactcacctgggagagatctagaaaacttcacagaaggcagtgactttttatttaatagacaaagagtgggagaaagcattttaaatggagcaccttgtgcaaaatcttgggggtataaaagatcatggtttggtcaaggagcatgaaatggcttgatgtgtctagagcaggcaactttttctgtaaaggattagatagtaattattttagactttgatagccatagagtctctgttacaaatactcaactctgtctttgtagcatgaaagcagccacagaaaatatacatcaatgcatgagcctggctatgtttcagtaaaactttatgaaaactggctgggcatggtggcttatgcctgcaatcccatcactttgggaagccaaggcaggaggattgcttgagtctatgagtttgagactagcctggacaatatggtaagaccctgtctctacaaaaaatgaagaaaaaattagcccctgtgcctgtagtccaagctactcgggaggctgaggcaggaggactgcttaagcccaggaggctgcagtgagccatcttcacgccactgcatttcagcatgggcaatagagggagactcagtctcaaaaccaacaa

SEQ ID NO: 8435 - DNA, 1102 bp, Homo sapiens
tgaatgctcagttgaatagctggacgaatggatggatggataattgattctcaaccctggtcacaacagtttaaaaatattccaaaatcaaatttattgagttataatttacataaaagaagatacacctattttaaatgtacagtttgatgcattttgacagatgttatcatttgtgtaaccaccaccacattcaagatatagaatatatccatcaccttataatgttgcatttgtgattttttcccagtcagtccccagctcccttcctggctccagctaaccattgatctgctttctatcactatagatttgtcttttctaggatttcatataaatagactcacagtgtatactcctttcatacttagtattttatgggacagatagatattaaacacacaaatgtggtaaatattaaggtcagcatgacaacaaatgaaagcagtgcttggcattctagagtcatggctttgcttgtctcttttcacagtatacaattggaccgtggatgaggtggtacagtggctgatcacatatgtggagctgcctcagtatgaggagaccttccggaagctgcagctcagtggccatgccatgccaaggtcaggaggggactgggtttttctctgttgagggtacggggaatgggctggagtgggcctgccttcagattgctctggccagttaagtgaggttctgcctttttcagggcagcgtctatagatcttgcctcttctcacatctgttgtgcacttgctataaagtatgatgggcgctttgtatccactctcttctttaatattcctgtcagtcctgggaatagtactgatagctgccatttactgagtgcttagtacatgccaggcattctactcaacactgtatacagtatctcatttaattcttacatcagtcctgtaaggtgggtattattgtatatagatgatgaaactggttaagtaacttatccaaggtcacaaacatgactagttaggggcaaaactgagatttgaatcttggtgtacatcaaaccctgttggtgtttcttttttctttttttcctgtgccctgagcagctgcctcttttatcacccgggag

SEQ ID NO: 8436 - DNA, 1032 bp, Homo sapiens
ctaccatgcctggctactttttgtatttttagcagcgggggggtttcaccacgttggttaggctggtctcgaactcctgacctcgtgatctgcccgccttggcctcccatagtgctgggattacaggagtgaagcaccgcgctggcctactttttctattttttgtagaaatggggtctcactatgttgcccaggcttatctcaacacctggcctcacatgatgctcccgccttagcctcccaaaatgctgcaattacaggctcacttacgactttccatgatttttgaaattacttcacagggagcctgggcagcttctggagggcagtgagaaaccaacgaaaaggctttagggaaaagatgccacagatgaaatttcataaagatcgctttgggtagcccaaatcagaagcttctacaccagccttacatattacggttctcatctattcttattctccactctaagtcaccaagtccatcctacctccacaaggcaaataccctgtctctgccaccatccactgaagaaccctaaaagcaaatgggtactgaccctgccctgcttaaaattctctcagggctctgatttgcgtcaggataaaatccaaacgccatcggccttgcgcggttttcttccagttccagagtgtcagtcctctggccgatctaaaagccctggggctccaagctgcccacggctgtggagcctgggctggagcccacagcggacggcagtgttagtattattataataaatgtcagagcaagaaaaacgttcccgccggttaggttttgttatttcaaaaataaattaaccgcctttcctccggcggagacgcgcaggtgagagggcggcgcctgacccagcgggctctaggtgctacgccagggccccgagggtcccgaactcggcttgcccacacaaaacatggtagcaggagagcagcatttccgccgggcatgtccatatccaatggggcccatgggagaggcgtagtcttctgggtcttgcccagactcaacatggc

SEQ ID NO: 8437 - DNA, 1038 bp, Homo sapiens
ggtcttcctagcttgcccaggctggtctcgaactcctggactcaagccattctcccacattggcttcccaaagtgctgtgattatgggtgtgagccacaacgcctggcttttttttttaatagtgtcgtgaactgctaagcttaagtgatctcctcacctcagccactgagtagctgggactataggcatgtactaccacacctggccatgatggttttcttaattactcttttaaggaagctattgtttcttgggaaagctcaagtaattcttggttttatttttgtaggctcagatcaccatgaaagtaatccaaggcttgtacagtggggtcaccacagtggaactagatactttggctgctgaaacagctgcaaccttgactactaagcaccctgactatgctatcctggcagccaggatcgctgtctctaacttgcacaaagaaacaaagaaagtgttcagtggtaagtctggggtgaaaaagtaaaaatttagtactctcagaaaagtaataagggtactagaaataaatcttgactgtttaaagaagcaaatatggctagatggggtggcttacacctcgaatcccagcaatttgggaggccaaggcaggcaaatcgcttgagtccaggagtttgagaccagcctgggcaatgtggcgaaaccccatctctacgttttaagaaaaatctaaaattataaaatagactaggtgcagtggctcacgcctgtaatcccagtgctttgggaggctgaggcaggtggatcgctgaggtcaggagtttgagaccagcctggccaacatggcgaaaccctttctctactaaaaatacaaaaaattagctgggcgtggtggtgggggcctgtaatcccagctactggggaggctgaggcaggagaattgcttgaacccgggaggcggaggttgcagtgagctgagactgtgccactgcactcctgcctgggcaacagagtgagactccgtctcataaataaataaataaataaataaatagcaaatatgtaaattagtg

SEQ ID NO: 8438 - DNA, 1030 bp, Homo sapiens
aagcctgcttcctgtcattgtttattatatatactgttatatacagtttgaagtaggctagcttttaaaataaatatatatatatattagtaaatatgtggtaccaatacttttggattaatagccaatctaaaaacatgtttaaggatgataatatagtcccatttatgctcatgttttttccctctttcaaaacatactataaacataatagtaaaagtttggaaaatcacatttaatctcacaacatatatttatgtattatcttctagtgttttcatatacatgtttttaaacctaattaggatacttaatttatatgtattgtttcttttttttagaatgttagatggacttctattctacagtaataatgcttagtgttatctcattgtatcctgtgttgattttagttctggagtcagggccgagagataagagattttgtgaaaataagtaattattttaatttaattatgggttctttttcacccctatcagcgcctgaattctgctattatctatgaccgagatttctcttacaattacttcggctttaaggtaaataatgggtttcaagtatgtgggaatttatacttaaatcatgaaataaaggattttgtttatgttttggtgacagttatcaaggccataagttgtttggagttgagatggacctggggaattagtggggttaaggtagcagtggtggtttgaattaaggcaaaggtagcttatctatttgcagtttttgaattttccacatattacttctggattacctgaggagttatgcagataaattaccataagtatttcataacattctaagtatttttgcgttgataggcagtatagtatagtgtagtgactgagaacatgaatgtcagtgtccacctgaattccagtctctgctctatttcttattagcaagttatttaatctctctgtgcttgtttcctccattttagaatggggagaatataaaatttcaacaacaaatttaattaaaaaaaaattttttttttga

SEQ ID NO: 8439 - DNA, 1032 bp, Homo sapiens
caagatcgcgccactgcactccagcctgggcaacagagcgagactccgtctccaaaaaagaaagaaaagataaaaaaaaagatacaaaatgatacatctgtataggacagttatcatgaatagagcttgtaggactgaaaattgctatgggtgagttagtgagtgagtggtgaatgaatatgaaggcctggctgggcgtggtgggtcatgcctgtaatctcagcactttgggaggctgaggcaggtggatcacgaggtcaggagttcaagaccaacagggccaacatggtgaaaccctgtctctactaaaaatacaaaaattagctgggtatggtggcaggcgcctgtaatccactacttgggaggctgaggcaggagaattgcttgaacctggaaggcggaggttgcagtgagccaacatcgcaccactacactccagcctgggcaacaggagcgaaactctatcttaaaaaaaaaaaaaaaaggaatatgaaggcctagtacattactgacgactgtagactgtacaaacattgtgcacactaaatttattttaaaaatattttcttcaataataaattaaccttcgattactggatgaccactgtcgtatgtgtagtccatcgttgactttttttgtttgtttttaagacagagtctcactcttttgcccaggctggagtgcagtggcatgatcttggcttactgcagcctgcacctcccaggtccaagtgattctcctgcctcagctttacaaatagttgggattacaggcgtgcaccaccacacccagctaatttttgtatttttaatacagacggggtttcaccatgttggccaggctgatctcaaactcctgaccttgagtgatccgtcttccttggcctcccgaagtgctgggattacaggcatgagctaccatgcccggttttttaagttttttagaaatttctctaaaacatgattaaaggacattaaataataaataaatggaatagattcaattttataaaaatgtcagtttttcccaag

SEQ ID NO: 8440 - DNA, 1092 bp, Homo sapiens
ctctatatttttctgaatgtctgaatatttatataaacacctagtcaatagatagaatccatttgcatgattgaatattcaaggcagtgaagagattattgatagagtaaggttcctgaggtggggagcaggatgagatccaaagtgaggtaaaggggttgtctttaaaaagactgtaaaggagctatgattttggtagacgtatcaaagaattggttgacaattggagagattattttcataaatgtttgtttttcttggcttactaacaacctgaaaagacggtgatgtatgtttatgaatatgcatgagaaaatgtgaaaatagcacgtttgcagtctggtgaaaatgtaagccaatattttagacttatctataagacttcctactaggcttatttacttactatctaggggaggcagcaagatgattttaaaatgatatttcgatatgttttattgtgtcatgtacagtaaagtgggttttcttctttgaaaatcatttaggaactttctaaacttcaactcttttttttttttttgccttagtgtctttgtgttgagtaatcatttttgtgactctgcttcatttccttgctctaagttgagacattttttcccccgtagctgttttcttctgagtatgaaagatgacagcattgaaggcatttatgacactctaaagcaatgtgcattgatttctaagtctgctggaggaattggtgttgctgtgagttgtattcgggctactggcagctacattgctggggtaggtttctgccatttgacttttaaagggggattcaagtctaaaagcaaacagattcatggttgagagggcatatgctattttttgggagtcctgggtctctgttaaattactaaatggctatgtgacttggagtgagtcattttacttctggcttcattttcatctatgatattagatatttagatttgactagataatctctagaatcctttttagctcaggttttagaattctggcttattttagcagtaataagagcagttatcattgattgattgcttactgtatgttaagtttgttataaatgttttacatgaggta

SEQ ID NO: 8441 - DNA, 1093 bp, Homo sapiens
actataggcctgtgccaccacacccagctaatttttatattttttgtagaggcgggggtctcactttcttgcctaggctgatctcaaactcctaggctcaagcaatctacctgccttggcctcccaaagtgttgggattatgggtgttagccactgcacctcgcctaggttgttcttaaaacaaaaacaaaaactacctggaataacaaaactctccctaattggctggatgcagtggctcctgccagtaatcccagcactttgggaggctgaggtgggctgatcgtgtaagctcacaagttcaagaccacgagttcaagctcacgagttcaacatgacgcaaccccatctccacaaaaaatacaaaaattaaccgggtgtggtggcgaacgcctgtagtttcagcttctctggaggctgaggtgggaggatggcttgagcccggtaggcaggaggttgcagtgagccgagattataccactgcactccagcctgggcggtagagctagaacttgtctcaaacaaaacagaacaaacaaacaaaaactctccctaattgatagaagaaacagtaaagttgagagaattgggttgtttaccttattttatcaacaggatggtttacaactagagtctgccttttgtgactgtaggcacactaatcgcttgttggtttatgaatttctctctgatggactttggggaccttgataagacagatcaactttttgacctacaataagagcatggcttatactgtcaaagcaacttcctttgggctttatgtacatgtcatgtggtgtaaagagagctgggctgttgctgaagaggaggctccatctgtagttcatcatgtcactttagaaaagttaatcttgtttcacattttgtttatatcattcgttcgtttttactcatagaattgtaaaatattacttttacaattatatatggaaaacttacacttttataatacttttatttatgttatttaattcattgtagtgaaaatcaaaggagatactataaaagtgctttgggagacatgatgtttctttgtttcatttttattctgaagagaattatgatttat

SEQ ID NO: 8442 - DNA, 1099 bp, Homo sapiens
ttaccacaccacaatgtttttgttgtcgatactgtttttgagaaaatgtctcactttgtcacccaggctggagtgcagtggcatgatcttggctcactgcagcctctgcctcctgggttcaagcaattctcatgcctcagcctcctgagtagctgggattacaggcatgctgcgccaccatgcctggctaattatattgtttcttgaataacagatgtcaagatcttaaaggaatatagctttcgtgtggtggcattgatgtctcgtctttataaaagatagaatttaccaagcaatctagcattaaataactcttaagtgattttagtttaagcttcaaagctgtagtcttttctaagcagtcactgttatttatttcttcatacattttctgcttttccattcagattgtaaatcctcacttattgaaagatcttaccgagcggggcctatggcatgaagagatgaaaaaccagattattgcatgcaatggctctattcaggtatagaatgaaaatgaagtgtgctctgcaggggctgagttggacattgtggtacctcctcactcatgctagacaatggagagaatgacttcattgtgttcatctaggttttgcttgtgtagctctgttcacctctgcattgttgtgctaggattgtacacatctttacataacccttaccatcttgtttttatgcaataatataaaaaagtagttctcaatttttctgcatcttagaatcaactggggagcttttaaaatcctgaagcttaggttgcattccttaccaattaaatgtctaggaacaggaaccagacatcaattttttttttttttttttttttttgagacgaagtctctgtcgcccaggctggagtgcagtggtggaatcatggctcactgcaacctctgcctcctaggttcaagcgattctcctgcctcagcctcccaagtagctgggattacaggtgcctgccaccacgcccggctgttttttgtatttttagtagagacagggtttcaccatattggccaggctcctgacctcaggtgatccgcctgccttggcctcccagggtgctaggattacatgcatg

SEQ ID NO: 8443 - DNA, 1050 bp, Homo sapiens
ctactaaaaatacaaaaaattagccgggcgtggtggcgggcgcctgtagttccagctactggggaggctgaggcaggagaatggagtgaacctggaaggcggagcttccaggtgaaccgagatggcgccattgcactccaacctgggcgacagagcgagactccgtttcaaaaaacaaacaaacaaacaaaaaactgttgagcaacagtgcacttgtaacacttctcttgatcttgctttactatctcagggacattaactgagtatctggatcttacatagtgctattttagaagctaaaggacaacacaaataaaaccccacttagagagtttataatccagtgaggcagaaagagcagaaccgtttttcaataatttcaatatctcatatacagcgatgaataataaaaatggttatgaaagtacagaggggctccatttatgtcaattaattctggctttcatgatttttagttcctacgcaatatctgagttgtaatttttgtcattgtgttgtaggacattttatgtaaccacttaaaaaaattaaattgctatttgaataatttctctttcatcctaacttcttcatatctcccattacctcatttcaacaatttattcattgcctattttcattcttcttggtagtttttttcctccttcttgccaagagatcataaacaaaacaaaagaaaaccatagtgtatatattttgacctgatctgtgttgggcctagcaaaaaaaaaatgacttctctcctttccatcactttacaagcatatcttcctgcatccttcctacgttcacgctgggctcagagacagagggtaccttattctttttcctagccaataactccactttagctcctatcaaccagaaacacttagttcagttcaaactgaactaaactatacatatatatacgtgtatatatatatatacacacacatatatatatatacacacacacatatatacgtatatatatatacacacacacatacatatatatatacacacacacacacacacacacacata

SEQ ID NO: 8444 - DNA, 1053 bp, Homo sapiens
tcctgaattattggcttcatcatatccaccctctccaccccagaatggcagaaaagaaacagttaccacaccctgcagaccttttggtgtaaaataggtgatgattaactggggtggaaacaggtcatgaagatctgtctaaaagagtccctttcaagtgagtttgcacacaccatcaagcaacaagcctctcattaattagggttaggaaaccaaggttcaattctcaggaagtcataatttcattcatttactcaatatgaatttacaaaatgcctacatattatcagcttccatgtgcagtcatttctagataaaaaagaaacctggcttctctagaggggccaccaagttcctcctccaagtctatagctgaaaggaccttttttggaattgggtttcttctctacctctgaaagagtaacactttaaagctgaattatctttagcctggaaattaacatatttagcctgtaagtctaacatttagcaatgcttgcatcccagacatacagtagaagatacactaaattctgaaggtagctgtgctgcaaaataatgtaaaagtaaacaattgtacagtatttatgctcaaaatttcagttccagacctagcgtgtaaccactggcattgttattcttgccatccaggagagctgacagtgtcattttgatacctggctttagggtctcagtgtattctaaacctgttaggctagagttgttcacttagccaagaagcaggtgtcagggttgatcagatacttgggtattccaaagtgagtgtttgtattagtctgttttcacactgctagtaaagatacaccttgggactgggtaatttataaaggaaaaggtttaatgggctcacacagttccacgtggctggagaggcctcaccattgtgggggaaggcgaaagccacatcttacatggtggcaggcgggagagaaaatgaaagccaagtgaaaggagtttccccttataaaaccatcagatcccgtgagacattcactaccatgagaacagtatggggaaactgcccccatgatt

SEQ ID NO: 8445 - DNA, 1034 bp, Homo sapiens
ctccccagagtttcagcctcctcttagttaagtttctcctggaatccactgtatgacctggactctacagttgaatcagagccattttcctgcccagcaacagcagtttctgctctaggatggatgaatcaataacaggtgtgcagaggcttgaactagacctttccctaagggttgatcttgacctaggagcagggaggagaaggaatgtatcaatgtctattttgtctgttgtttatgctgacctttgggaattagggaatttgagaacaggaatcctggtcttttatgctgctgagcttatttttgaacctatcttgaacctttggaaggccactgtagttagtggaaggatgcaatgatggagtccttcttaattatgcatatgttgcatctgtgatgcacaacccctgcctagagttctgggaggccctcctgtgtactgacctcttgcccatggtctattatcatggtttgttgtcaggtggggctggatattcacacaggactgtggctaattaccatgtgtagatagtccggttctgagagaggaggcccactcagattttgtgaaaataactaattaatgtgaaggaggcataccttgcctggcttgagccaggttttgggttctacatgttgctctaaactccatcagaggaggttaatcacaaaggacagaactctgaagtctcaaaaatggcctcaactgcaaggaatttcttttctttttctttctttttttttttttttttttttttttttgagacggagtctcgctctgtcacccaggctggagtgcagtggcgggatctcggctcactgcaagctctgccttccgggttcacgccattctcctgcctcagcctcccaagtagctgggactacaggcacccaccaccatgcccggctaattttttttgtatttttagtagagatggggtttcactgtgttagccaggatggtcttgatctcctgaccttgtgatccgcccacctcggcctcccaaagtgctgggattacaggtgtgaac

SEQ ID NO: 8446 - DNA, 1031 bp, Homo sapiens
cattttagttaaatttccattatgaaattgttttttctttcatttataattctttccatagttctgtcacataatttctgagtttttctaattctgatatgtgtcctctcatgacttctatcatttttctattgtcttttagcttgttttgaaataggctatagttttgctctggtttttgacatgctttcattgtctctggggatttattctatgcctcgctttgtttttttcttataaaagcttggtatggggtttgatgctgatacttttctactgctcatagaaaactggaaattttagcttttcttaactttcaaaagaagacttggttcaaaatagttctctaacctctaagtttcactttctattgtttttctgtattaaaaaaagatggcttactttctgaggttttctggtttccctcccctaccttcatctagacttttcctttttctctattgctgctcaatccttattctactcccagcattttctccatgacgagctctgtcccaaaagggagccctgactgtttggtttcaagagtacacagggcatagattacttaagcttctatagaccttacctcacctgttcttggagggggtaagacccccttccagttttacctgctgttctgaaatgggccctctgcctcccagtaaatgcttgatgactgtttgggggttttcttattcttaggtccatctgttgcttcattgtttccctctgcatcattcatcacaaatggtgatgccatgtgtgttttgaggttgcagatggtttgaccccacctacttgtattttaggatctgtgaggatcccttgccctcatttgttaaaaaatgctatccttgtgtttttggttttattatctaattgttctgtcatttttacgtgggcatttgggggagatttcaaaatgatgctgccattgccatcatcttctcagaatcccttctggcattttttttaaaggatgattctttttcttatatggagcagagactgtaaagtataggaggcaa

SEQ ID NO: 8447 - DNA, 1033 bp, Homo sapiens
caaaatcacatctttacaaaaaacacaaaagttagccaggcatggtgtcacatgctcataatcccagctaccagggaggctgaggtgggaggatcacctgagcccaggaggttgaggctgcagtgagccatgagcatgccattgaactccagcctgggcaacagagcgagaccccatctcaaaaaaaaaaatttaaattacttataattcatgtccctttttcctgggtaaatgttttaataaaacaaggcttgaataaaacaagctgcttctggttttccaaatgcctctctgattgttcattacattctatgatttctttgcatgggaattagtcactggccatatctttccattattatgccatgtgctgattcttcctaataaactgggtactttggtgttgaatcactggatttgattcaggtttccatttctaaatgaaatccaaaatgtgaatttattccatgtccttatgcttttaagaaagaaagaaagccctcatattgacaattagaatctcagtaacagtgactttgcttccaaggataaacttgtaagctgtgaaagaacatgtcaagcatattgtcactttaagtccattgcaatttctgtttactttcctgtatcaaattttctccaaatatacatttgagctactccttgtggaattaagaaaactcacatttttcctgattatcttaatctctgattactgaggtatgattgccaccacagagaaaaaagctctactaaaaaaaatacttttttccaaaagcaaacaagaaaattttcaacctatgtgtacaaataacttgaatgtactccattttaaattttgactttggaatcatataaatgtttaattaaacataattgcatcagtaaagtgaaaatagctaaaaaaaaaatgtagttaaaacaaatgaacccaactatatattggtagcaaaagcacagaattatctcaagatttaaaatatagtatacttattaaacatgatggattatatcctaagaaaaaaaattgcaa

SEQ ID NO: 8448 - DNA, 1033 bp, Homo sapiens
taccatgagactttaaattgaaagttggctttgaaagtattggaaaattctgacttaaaaatacaaaatatactaagtaaagagaaaaaatagaagaggcacatgaagatgctaagaagactgtagagggagctgtctgatcagcttagatactaaaggacaatctaagatgaaagaaaagaacacacaatcaaagactgccttacatgcactattctctgagaagtaacttattaaacatttgtgtgaataaagctgaaataaaagacaattatgtttaagaattgtgtctagaaaatttgtgttcaaatatgctagaattgcaaaaaatgctgtgtgggaaagaaagggtagggtgctttgtttttagccactggcaaaactaagaaagagcagaacagaccctgcttgaggatcatgctctaataaatatttttgcagatggagagaaagtagatgtctcagtcctggtttggttctgtcttctctttcaaggtataatattgggctgggaaggactctggacttttgaaagaaggaaaagagtgcagagggagagtggaacatcagagagtttcagctcataccagacctagagtttacagtccaccttctaagagtttgcaaaggggattcttaatatattcacagtttggtcattgaaataatcatttattaagcattctgtcctattcctgtcaccaggccagacactgggaatacagatgaagacaatacaatataatttccttgggagtttgaagaattccagagtataggaccacagctggagatgaggaaatgttctgatttctcctgggggaatgaagtgtgttccctgaattagtggcttcctggtttttagacaataaggcttcaaaccaggttgacacatcccatgtcaaacatttggtgggcaataaaagtgagattcagtcttctgagtctataactcatcttactttgattctgctctagcccctagtccttcttctttgctatgtcctcctagcttctagtccttagcttggtc

SEQ ID NO: 8449 - DNA, 1034 bp, Homo sapiens
accacttcattgtgtgcctgttgacctccagtgcagcctctgcattgatttcagtgtgggattttcctggccactgaagcttactttgttcatctgggctgcaggtttcaaatgatgggaatttaatgccctttgagaaatgccctctaattaataactaaagagagctaatgtgtaataccttggatcccttgccacttaggtggggtatatctgaggtgtattaagcctccatagcaggtttaacctttactccctcactgtaggaactggcttgataatgtaccttttattggcttccttttctggatcacttctcctgtgtttccttctccttctaaataatgcttttccctttaatacttgttttagggtatgctactggggaaacccaaactacaatattctatcctgcgtcctgaggacttatcactgagtgggggttgttcttgaagctgcaaaattcacagaagatttgagcttcattttgcttagaaccttaaaagttaataggaaaaatagaaccaaaaaagcactctagtttctcgtattttaaaaagttatgacttacacaattccccaattatattatacagctctctgagatgacagaataattgttaaggacatttgaaactgccctgctcaaaaaacattaatgattggtgctgcctgtaggatagagtctcatttaacttgaagggcattctagtccccatgaatatatccattttcttgccatagcaggctgtttattgtttctaaacatggcttgcatgctatggtacctcctctgtgtttctgctcactggtcctctggtttgtgtatgaattctcattgtcaccgtcccagaattaagtaacccagccatgcgccccagcatggccttccgcagtcggctcccaagggatgagtggatgagagggtcattctgcccacgctgtgcaatgggtgggcttgaggggaatgaccacactgacctttgatctttgcttctttgcagatatctcagtgagcctgctgacccttgtgg

SEQ ID NO: 8450 - DNA, 1577 bp, Homo sapiens
gtgagtattcaaacctattgcaagaaacactgctatatggctcaaagcttatttttaaaaagccattttgcttatactaactgagtagtaatctgtgtattatatatttgtctttcaattgagtagaactttagaggtccttcaatctagcagataaagctgagatgaatggccattaggacattcagctgaggttacatagctgaataatagccaaatcaaaattaagaccaagttttttaaataatcatttcagtctgtgcaggaaaaggtggctcaaaatgatcatatacactggtttacttctccttcccctctttacctggctaactcccactaagctcttaaatcccagcttatgtgccatttcctcagagaactctttttctgagccctggactagtgtaggtttttctggcatttgtttccatgacactctgtatttctatcattactcatgcttcttttgtgtatttgttcaattttctttctataagtgcaaaacccacatttggtttgcttcctgctgggtgctcaacctctagaatggtgtctgaaagttagatatttaataagcacttgctgcataaagtgaaactccttatgagggactaatttgttgagtctctagggactgcttgagttggaggctgttatgcagaactgaactcataaactaatcttttttaaaaaattctttgtttctccaaggagagtgtgagttttataaatgttggcactcaaataaaaattaatcctcatgctttcctatgaaagaacaaaacggcaattattgagtgtaaaaatgatggtgtaattaaacctctcaactactgaagccagatcaataatagtacaatacatctttgtgaggattttatcagtcagcaagagagaagacagcatcaagggggaaggtcaaaatttcggagactatgagtccagtgttctgggttaatgttgtctgtcaggacgatcctcttggcatttttagtataccccacttactagtggctttctgaaaaagtaggcattaagcacttcaggaatctctttcttggtggttggcttagaaactggttcggagactgtctctgggagctatgatcacctcagttagactctgatttggagaagatgccacagttctcatgtaatgacagtagaagtaatgaatttccctctatgccaatacagattccagttcagaagaggcaaggacacagtttacaacagcatagactttcttttaatgttaagaacttaaaactcttatttcagcaaggtttgttattttgtagtgactgatttggagactttcctgttctgtctcccaaaggcctgaggccactcgcagacctgatggaggtggacacctggaaccacccaggcagggggaatataagtattcagggaagtccagagtgcttgctcttcatagtcgaatacaaatggggcaggcaggctctgtgattgaagatatttattaatttgaatcccttttcatttcattgtaccataagtcatatgtgattattatattgatgcaacacaagtgagccccaaaactggggctt

SEQ ID NO: 8451 - DNA, 1024 bp, Homo sapiens
gggctgtaggactcctctgggaaagggtataacttgcctgtcattttcaagatggttcccatcagctgaggagaattttcccaagaaatatagagccatgaactgttcgcagccaatgctcatagccgctaaggaatggatgcactggctttgtcaaaggggatgtaggcagggaacaatagggtctattgcagtgtgacaggacaatgggaaaggggttatgggaacataggtgggaccctgactcccatgacctctgagatataggaaaaggaaggagaaagagaagagggatcctcttcccctcacctcccaccccacatactcctttcctaggtgagagttggcttgctgccttggcgttgtggctaccaaagacaggtgtctgcacagcaggctggatgctcctgagaggcaggttggctttgcagagagctgaggtggacttttgctgcatccccttcacacagttaaattattccatggctgaacacatggggagggttgagctagatgaaaaaaacaaatcttctacaaacctggaacagctgtaaaagaaatagagttgtcaaggtcagcaatttcatctctgaagaaaggtgagaccagtaagggagaacattcccctgggactacatttaatggtcttctacctatggaagtattactatccaaaatagtgatccagtttcctgacagaaagccttgtcccatggattggcatttgcttgcttggaaaatgagttttcaacctttcgagaatcgaaacagtttgtggtatttacaatacagccttactgtccagtagctaagtgtagtctaattctaacagatggctctccagggaaattttccttcagattggattatgcttccaggctgaaattcactaattaaggggagtctaaataaacatagtgggggagtgagagggaggggaaggtaggctgtttcttaggaagctgttttggaaagtggccatatttgcaatctttatctttccagctccacacactcagctatg

SEQ ID NO: 8452 - DNA, 1036 bp, Homo sapiens
tatgagtctattctggactctctattcttttccatcgctctatttgtctagctttactccaatatcacagtgtcttgattgcagatttataaatcttgaaatcaaatagtgtaagtgctgcaactttaccctactttgtcaaagttgttttagttatctaggtcttttgcatttccatatgaattttataatcagctcattattttacacacacacacacacacacacacacacacacacttgaatttttattggggttgcattaaatatagaatcactttctattatttggaaataataggaatcttaaaaatagtgagtcttcccatcacaaacagtgtatctctctccatttagtacatcgtctttaccttccctcagcaatattttctaagacaggtctctcgagctctctcattgtttatcgttctcttctctggtactctaccctgcaaattctaggggggatggcctctccagactcccaagtccgtttcctcaactgagggagcccactaggctctgcctgggttttcacctgtctgtactgtgtctctgaaactttctccaggtggtgacatgggcagttttagttcttgcctcatttgtttcctgtcactcaaggatcacatatcttcattacctgatgtccaatcattgtttcatatattttgtccagatttttagttgtttaaaatgtgagagtaaattcatttcctgcctctctgtcattgtcagaagtgattgattttatgtgagaattgaagaaagagagtggtcaaagatggatgattttctggttttcagcatgagcaaactccagatgttggtatttactgagatgggaaatattaggtgaagaataggctgtattctggtataagtaagatcatgtgttccatttttaacatattcagtttgtgctacctgtgagacattcaagtataaaaaaatcaaaaaacagttgtatagactaggctggagctcagaagcagggcctgagttggaaatatgaattaacaaattgtcaacatat

SEQ ID NO: 8453 - DNA, 1140 bp, Homo sapiens
aaaagggaagaggaggactgaaattgggaaggaatttttcaaaatgggagaaaacagattatttaaatactgacagctaagagccagtagtggggaagcctggagatgcaagaaagagaggatgagcagcagagggggttcctgtggctgagaccccatcggatggcacgaatggatgggacccagaacagagttggcggatttgcttttgataaaactcttcttcccatgttgcagtgggagggagaggccaatgcaagtgcaaatacatttatgaatccaaaggtaagaagtcaagtgtagcccttctgatgtctctgtcttctctgggagggaagaaacagggctgtgtactgagcatatggaagagcctctgccttcagggagcttgtggtcttttggcgtgtactgctctgatgatttcttttatagtaactacaaaatcagtctcacttcaacttgcgtcccttttaaattttaaaatgttttacttttcaaaaataatttgctggattttccttgattatgtaatctgtctgctcaatacagaaaacttgaatgaaaacagaagagtagataattctgatacaaagtcacctatagtccctctgccctaaagtaaccactgttaaagtttgatatatctttcctgtataatctctgtccatggttcttcacttgcaatttttatatggttgtgacactattttgcctgcttctttgctgtaatttgtttaagtaaggaaactaaacacaaagttttgtctcaaaggaccatttctgcaggtgggtggggcccctgttcctgaacagggcttcattccctttgtccatgtttgctgagatcagggcttccctgctagccaggcatccctgaacaagccaaaatgcagagcacagccttcaaaggaagcttgtctgtcttctctctttggaggctgaggggtcacagtcagcgtacccagaagagaagctgggacttatcaattaaccaatactgctttcaaaccgttttcatcaaaatattttttttttttgagatgaagtctcacgcttgtcccccaggctggagtgcgatggcacgatctcagctcactgcaacctctgcctcccaggttcaagcgactctcttgcctcagc

SEQ ID NO: 8454 - DNA, 1024 bp, Homo sapiens
gagaatcctaaagatagcaaagcagtgtgaagtaagcttccatatatgcatttgtttttctctgggcattcttttttgttccatcagtttatattccatcaattgcatcaatataatactaattatattagtaattgttgaacctgctaccatgaatcacctctcactcaactcccagcacaaatttcctactcaactttcctctcctccctcttacatggattgattattcttagcccttcattattcccttagaattttagaatcaggttatccagctctatgaaaaccaatgtaaccatttttattttaaaaactgcattgcatttatatattaattcgactagaatttacatctttataatattgactttatctatagacataatttatttctccattgatttaagtgctcattaagtcattcaaaaatatttattgagccataatatgtgccagaaattattctagaaactgttaagcagcggagaataaaagcagaaaaaacactggcttttaggactttatactctaaaaaagtataaaagtgggagaaacaaataattacaaaaaatatacatgttaagaggtgatgagtactgcgaagacgaaaatggtatagaaagggttaaagaacgacgaatactgttttatagaggggtcataataatggtcttcttaaaatcataagtttttttagatttatttatcagtacaatatagttttagatgctagcatagacattgtcttcttttaaagttatggtttttttggctggtgaataaaaatgctattggtttttgaaaattgattttatatccaggaaatttttatatttggttattaaattagtttgcagattctcataacgattgtcattttcaacgtaacacaatttttcttcctttttaatcttccagctgattattatttttcttaagtagggcactgttaggtcctcctgtacaatattctacagaaatggggcaagcaagtattcttgtcttgttcttaaagggatgg

SEQ ID NO: 8455 - DNA, 1033 bp, Homo sapiens
gcaggaagatccataagcctccttcacttaccttagtttgtgggctgaagacccatggctgccagacacaaaactgctccctcacccatgcttggttgcctcttgtgggaattagagcagccattattgcaagaaactcatttcagatgactccctctttattacatggaggccagcctagatccaggacgagaggtggcatccttagcacaaatcgtggggttctttgaacaaggttcttggaaacaagttgacccatgtcagttttaggacagccagggtatacgttagatcccaagtcctattggccgtgaagcttagcctgtagttttaagtgaggaaatgaaaaaacaaacaaacaaacaaacaaaaaaccacatccccaattccttcatcagtttaattgagtagctattgatcttacataccaaaattttaagaaaaaactattgtgggccattttcacagtgtaggtcacaatgagatcatcggcgtgtgtcaagtaggcaacgaggctgagaggctgggcagagaccactggagtgaaatgttgtcatatcctcggaagcccattgcacactggcattccctggtggaggtaagaccctaatccacatgctccactttgcataagagtaaatgctttactgttgaaatgcaggagctgccaaacatatgagtgcaccaggatctatggtcatagacgggttttcctggttgcatttcctggggctgttgggacttgcattcaatttgaggctgaatctgtgcttcccaccagtctggtaggttttgagtattgatcagagatcatccctcattttgattgtatttttaaaagatcaagattctctgcttctgtgttaaggctttgggttggtacttggagggcatctgcaaggtgtgggtgagtggggactttcaggccttcgtacagtgacttgagactgactttggaaaaaacataaggccttgattctaagaccagctctggcaccaacctgtgattctgggcaagtgggttagtatcagg

SEQ ID NO: 8456 - DNA, 2032 bp, Homo sapiens
ccatgcattgccctctgaaggagtggcttatgggctagataaatgaacatagcaaaagcctaatacgtgtgttaggggatggcgaaagagaagtgagcagtcaggacgtggagggctacatgctgctgcaatatcttgcccatatgatgaggtgctcccccccaatatagtccagcatcgtgtctcatgtctcagtgtctctgagaacaaaatttttgttatgaatgaaaacagaaaaaacaagaaacatttaaatcacattaaaatagggcaagaaaacataaatttatttattatctgaaaggatacataccatcttggtaagaaacaggaagaggtaaatgaactttatcttgctaattagtagttctcggtcttttccaggttatgtcagtctctttgggataattattttctcctcttcctaggagtctcctctctccttccttcctccctcccagctaggtatagggaagtacaaaggctacctcgtggcattggctggaactgtgcatattgttctgcttgtctttgggcatcagacttcatcatcactacctctgctgctgaggatcatggctggtgtaactgtgggctatagtctcagcatagaaacttggccaccttgaggctgatgagaccccacatcagctgttgaagtccctgtggatccctgagggcaggtagcacctcccactcaatgcttggcctgggagcttttctttgcagcccttaatacagagtcattccccacttggtggaattccctgaaattctaacaaccaatactctcacatccttcaggcatttgggcacacaagggagccacaggagactcagtgccatcacaggcatcttcttcatgcctataaagttacatggtcatttctacattgttcctctagcctgtgttggcccaggggtcatgtttgccttaagcttccccctcaatccatctaaacttggggtttcaagcctgaacggtaaagccagaacctctcctcctctcttctctgtatctcttctgccaaagggtctctgcttcctctacctgtctggtggaaacaatatatatcttagcatgatttccctctacctatgactcacgctcagacctccaaggtttcctctcagcatgtaaggaaacatttggaatttggatcccctttttctcaataaggcctggctttaagataaagttgcatggtcatttctacatgtaacatgaaataagatacttatttcataggagactagctgatcatttaccttgagttatcagccctcagcttccaagaatatatggcgtttattcaatgcatgcattttctgatttacagacaataagaacattatctctgttacgtaggtattgagttagcatttggtgaacaaatgaaaaaaaaatgaatgaatgagatatatatagaatgaattgagttcccttcgttctaaagttccagaattcccatgcagtggagtacacagtagaagtcagttcagacaaggtgtaaaaaggtattgagaatggatttgtattaggctgttcaaatagagatggcccttattaagctccaagttttaattaccttttctctatttaggagaagaacatgaaaagggaccaattcctcccttggttccaataaactgccacgtaatgacaatggctttgcatttttgaataatgagaaatattcagaactgaggccccttagtgaatcatgagggtccccctctacttgatgtaggcagccaagtcctagagcgctcaatatgtcctttcataagagagaagaaacacacagagatcccaatggtgaatggcagactgctgtgccctaagtgaaaactgatcaggaggtgacaaggactttagcccacaagttgacctttctcactaggaatatattttagcagcagttttacacaaggtaatgctttgccccatctacctgtgaagataaagaagagaaaaataataggaatggggtattttttgacaaaatgaagaaattattcttcagatttt

SEQ ID NO: 8457 - DNA, 1035 bp, Homo sapiens
ggtggtattttttgagtggaacaatgaaagatgtgagaatacaggtggtattttcattgcttcttcctactgccctttggaactctggaagactgaagaatatctaaagatgatcagtagtggacttacaagaataggttgatatttagaatgaggttctgaaacacagcttaagataccagaataaatcattctagccatgagtgcagagaatcttacaaagacatgggggactatgttgcttagcgactgatcagctgatctcatcaagaggatttaaaaactgataccaggaggaagagtaagacaacacaataaaatagacaacccacaagaccagttgctatgaatgacatccagtgggatgtggaaaaaaagggttccaggacaggaggtttccagtgattcacaggagataagattgaatcctagatgtaagtgatggccatggccttgggtgtcctaatgcatcctgcagagagaacaaacagaataacccaggacaatgatcacagccttgtagatataactggcacccaaacatgtcaacagaccacttagaagcagacagattaatgtgctatacatgcctgaagagctgtgtacctaacgttgaaagctcattgatacacatattgtgggcattagcagaaatgagcctgccagggaaatatgacaggtggagaggtgagactcctaaaacaaatcaaagcactagtacagagataaaaatccagtggtgagggagaaacccactgaggagatgtttcctggaagtcttctttggttaaagacaaagtgaaaacttctccagttgctttgctacaagtattagaatacttttgatgtaatgaacagaaatcctgacacaaactagattgaacaaagaaactgtagcatctggacaaagggtctagagataggattgtagattccatggttaaggatggggggttccgggattgtagattctgtggttaatgatggtatcaggaacaccagttcttcccaggctattgggccatccttccttcc

SEQ ID NO: 8458 - DNA, 1029 bp, Homo sapiens
agctcctgagcatttcagctaacactgaataggaattaaaaatcactctggaatgagtgagttgagagataggaaataaagttgacaggacatggtgtgatcagaagtgagggattagaagaaaatatcagggatgacttctacatctttggttaagtgtgaaagaagaaagggaaggtaggggttgactaaaggtctggagtgcaaaagagatgtgggcaagtatgtcaggttaggaattatgtcattggaatatagaaggtaattgaacccataaaattggatgagatcacctaaagcaggggttggcaaactttctataaaggtccagacggtaaatattttaggctttgtgtgcagtctctatcacaactacttaattctgcctttgtagcaagaaagcagccataaaaaaattggcgtgtaaactttattcacaaaaaacatttctagatcagggcctggcctagaaaaggaacattgaataaaaagacaagagaacagagacaaaaccctaaaaacctaaaaagtcaggaagaagtagccaacaagattagaaaggtaggaagaaaactagaaggaaagttttaagatgggaagtaagtggtcaagtctgttcaacgctgatgagaggtcaaataagataaaggatatatgtgcatttggtttagggacatagtttcagtgaagggagcagaaaccatagtgagttggaattagataaacactggtagatatagacaacactgtggtttctggtggagagggaaacttttaaatcctggggtaggaggttccaatagattagaagagaatggaaaactcaacgtagtggtcttaggtcaagaaacaaatgtagtgggaataaataaataaataaataaataaataaataaataaaagaaatacagcctgggcaccatggctcacacttgtaatcccagcactttgggaggctgaggcaggcagatcacttgaggtcagtagttcaagaccagcctggccaacatggtgaaaccccgtctctag

SEQ ID NO: 8459 - DNA, 1065 bp, Homo sapiens
agcctccttcctgaacccactgtcaaggctgcaagaaatttttgagatcccacatccaaccccttgtgtaacaggcaaaacaggcctcaggttctgaaccaaggtcacactgcaagtttgtggtagactcagaattagaacgcaggccacctgctcagggttctttctctgtactgcaggagagggaaccagcatcactgtgtgggagtcaaggggcttctcaggagtgagtagtcctttggccatgaccttgccttatgtgaatggaagttctgagcatagtgtgaactgtatgtctacagctgatggctgcctggcagggactcttggccatactgggtttctgggctggctcatttctggtgtttggtatctctctacttcacgttgaatggctcttccctgttgaaaggctctgccagtatcccttaatatcaggtaaaactgcacaattcaagatggtgccagcaagcatgatgtttcccccatggtgacacagggctgtaagtagggagatgaggagccaggcatctttggaattgagggctgacttatagggctgacttatctccgtaggtttggaatagtcataattaatggcaaagttaatggtccagccacttagggatatagcaaagcaagagaatcttggcttgttgtcttcaacttgttgaagaatatcatctccatttcatccacccattacttggcatcttgggatcatttgaaactgttccacctgtgaaaccttaatctttgtgtacctcgtatgcattctgcctcccatatctccaccatgtctgttcatagagacctcaggcccctgagccctagtttttctcctcactctgaatcaactcttgttcctattctatctgagctctgttgcttgtcacttcaactgcccaccattcaccacctggcctcttagtctcctacctcaaccttagagcagggtcactgcctgctttctctagtcctggtttaaaggtgtggggggaattccttcgtgaattgacattggtccaaattcatggcccgcagcctccagcgagcccccagcaa

SEQ ID NO: 8460 - DNA, 1020 bp, Homo sapiens
tctgctaattctgtcatctgtgtcttcctacttgtactgtttttacccacaacacttctaacactaaatgtgtggtttctttccacaccaacaaccaatttggcaactctctagatgccaactgagggtcctgcaatttaatttgattctggtactaattattataactgaagttaatgcagaccccacagtttaagggctcagtcccgcaagacttcccccatttcataagtcccaggttgtcacctatacttctggccaaccagctataaattgggggttcctaggacccctgctcaggtatgaacatttgctagaatggctaacagaactcaggaaagcactttatttactctttactgatttattataaaggatacaactcaggaacagccaaatggaagagacacctagggcaaggtatgcaatggcgtggagcttccatgacttctccaggtgtgccacctccccagcaccccgatatgtttacctgccaggaactctccaaactctgtcatttagggttttatggaggtcctgttacataggtacaactgattaaatcattgaccattggtgagtgaactcaatctctagcccttctcctttccccagtggcttaggggtgagctgcaagttctaatcctctaatcacatggttggttcctttggcagccagcctccatcattaagctatctaggagcccaccaagagtcacctcattagaataaactcaggtatggttgaaagtggcttattgagaataaaaaagatgttcctatcatgcaagaatttccaagggttttagaagctctgtgtcaagaactggggacaaagaccaaatatatatttcttcttgtgtgcactggtgattgatttttctcctagttatgcatcttctcctcctccttttttgaatgcctgggtaatttttgattagatgataaatgttttggattttacaatgttgggctttgttttatcctttaatagttaatggtgggctttgttctgacaaa

SEQ ID NO: 8461 - DNA, 1052 bp, Homo sapiens
cttccttgggcctggcatcagcgacgatgccacctgtgtgggggaggactcagtgggtagtgtcctggcttcccttcagccccacagagcttccctcaaaccttgctgacagctgggcgctctcagtaaactgaggcaagcctgggcctagaccagtgtgtgggggcgtgtgctgtgggcagggaggatgagagagctggcctcaggatgggggtggaaacaccctgcggtgcctctacagggaaaaccaggtccttcaagtctgtgtgacctcagatcccaaataagtcaatgccggcctcccctccccgtccctcagagcagggcctaggagttggggaggggcagctttgcacaccccttgccctgggatcctggggtgcaagagtaggacgaggacagtcggctcagaggggacagagatcttgctagtttgctctgtgcccctttagcccacactcatgtccctgcatacactggaccctcctattgcctggaagttgtcctgcctcctgccgctgcccctacccgctaagagatccagatccccaaataaagccacactggaccccaggatcccaggcttggagacagtgcttttggggaactccaaggtcccccagctctcttgctacttcaggaacagtttggaggggggcccagtagaagtgaccccctccctgtcacctactcaacatcccagatagggctcagaaagttgctccaaaactcctgggaagagaccccacccctggagttccttcctgctcctcctcctctgttctcgctcccccaggactatggaggcttcagcccgttctcactcggcagggtggttggtggggcagggtgacgactctcggtgtttcctgacaacaggctgggggactcaagcgccaatgtgaagctgaagagcgtcctggagacagggggcggtgagacggagtctgcccaggccacaccagtggccggggtttggacctgggcctggggagggtcgctgtttgagaggaggacgcagctttataaaatgactccgtaagtatggcctg

SEQ ID NO: 8462 - DNA, 1085 bp, Homo sapiens
gcagtgtggtcctctgccttctggagctgcactggttcccactgtgtcccagtaagctgccaggcgacagaagccacagatctggacttgccgggggtccagggttgcagccaggggcacagggttgcagccagatgccctggtggcctttcctctcctgacagcccacatctgtgatttcctgggtccagcaggggtagcttccactgtgactgaggggaaagaatgagggcaggaagaggagaaggtgaagtcaacatggaaagtgtggccagagggttgggtctgtccctagattccctgacccctgggcctctggttagcactgatggagtagctggagcatgtaaggtagagtctctgaagagagggagttcggaaacaggctagaggatgttggctgtgtgtgcttttccagggcacagaattgtccttgtgtccttgccccttgttgtcaatcgtggatgactgctctgatatctgtggggtgccttgggggaagtgagtggatgtagaggggcaggttccctgggaggtgaagctgccacctcgttggtgctggactgagcagatggattggtggacactgaagcctgggtttctctgccctcatgagccagtggctttcctgagcctccctgttcaggcccccagcaggaggtgcccgtgatgtaggagactccagggtcagctgaaagacctatccatcagcgccctgtctcttgtctgagtctcctggcggggctgcagctggcagcctgggcttggcagttattccataattggagctgaagtcattaaaaaaccattactgtctccttgtgtggttatcgtttaggtcagcctagaacagggcccatcagaaacaggcaggctggggaagcgtcggtgagaaaggaagatgccttaggaatggtgctggggtggagatgaggaggaagggccatctgggtgggggcggagaagggaactgggcctattgaggaagccaggggagcttttggtgctgctcttcctggagacagccatcgcagttgcccttggtctccacaacagctgctgttggctggggattctttgttatt

SEQ ID NO: 8463 - DNA, 1034 bp, Homo sapiens
gaaaaagctccttttgcaagaagtttcccatatgtttgctgagctactgggagcagggccaggataccaagagacggggtagatcctccgtggaaacctgctgttcagttttcccaccacaagccctgccctagggagcccctggtgcagggtggcagagggaagaagcctggcagtgccacacattgtgaggaatctaatcaaggatggcttcctgtacaaaggactttgagacaacttgaggatggggatggcattcccagggaatggcaggcgggaggacagctgagatagaagctcagggcaaagatgaggagtcagtgggtcccctccacattgggctgaggaaggagctgaggcctgtgccctggcagattccgtggtctatgccagccaaggcctctaataggcctgaggtcagaaatggagattcccagttcaaggtgagctcagtgcaggccttgatacacaagagacagtggtagggtggctgctaggtagtggggtaatgtagggactgagctgaaactgggtggtggggatatatcctgaggattgtggccagccccggctcatgtgtgtacctgagagaatatccttttatatctggacatgtgtgggaatatatgtgtgaatgggagtctatatgtgtagatatggctaagagtgtgtgcataagtttgtgggggtacaggtgagtcagtgtctgaacatgagtatgtgaccatgtgtatttcaggggcagcgtagacttctcctccttcatcccttcttcttctctccttggcccaggcatctccagcagcatgagctttgacgaggatgaggaggatgaggaggagaatagctccagctcctcccagctaaatagtaacacccgccccagctctgctactagcaggaagtccgtcagggtgagtgagtgagtctgcatccacagcagtttttggaggactgctcatccgttagaggtggactgcatgtgaagagatggactcgtatgcctttaggagcttctctgctggcctcttatg

SEQ ID NO: 8464 - DNA, 1231 bp, Homo sapiens
ggcactttgtcatctcactgaacgttcaacctaagaggtagatcctattttctttatagatgaggaaactgaagctcagctgcagatgtcacacagctcaaaaacgaccaaactggaatataaatataggggattactctacccctttgaacctttttcttcatttttaaaatcaggggtgggtatctcatcaacctgggcatgggcacttcttggaggccatcagtaagtaatccacagctactttgtatgatcctgtggtgccacctgctgaccagttttggggaggcagcctgagtcttcaagttcttactgagctccaactaagcatattgtttgaggcactaaggatatagtaatgaacagacataaatgtatacctttatgggacttaaagccctagcagggcagacaagctatgaaacagatctatcagtgaagtaagtatgttctttataaacactaagaagaaaaagtaggggaggggagataagaaatgtcaaggtatgtgtgagaatttcagaatggcagggagggcgtcactgaggtagctcttgagtaaagaccagaaggaagtgaaaaacagcagtgtacgtgtctaggggacacagtgaggacaaaagtcctgaatgcctggcatgaagaaggaatggagtggataccaggcagtaaatggtgaggagaggaaggtcatggggccacgtgcaggtgaagtcacatctccagctttaacttggagtgagctggagagccactggagagttctgagcagaggagaaagatcatctgacttaatgtgcctgagcactggctgctgtgttgagaacagatggtgggaaggaggaataggagggccaacaacagaaaccaggagtccaggcaaaggctgttagaatgatcttggtgagagaagctagtggtgaaaagtggtggaagtctgggtataattggaaggtggagctgacagaaactgctgatggattagacgtaggatgtagaagagaggactcgagtgtgaccaagtagtttgccggagcgagtggaagaacagcattgccgtgagcagaagcaaggatgacgcataagaggagctagttctggcagggtagagacccaggggctcagttctggccgtgttaggtttagagggatgtgtgttagacttcggagtggagatggtgggaactagctcttcctctttattcccgtcccccccaccttctccagtagg

SEQ ID NO: 8465 - DNA, 2217 bp, Homo sapiens
ttagaaccacaagagatcagcagtggcaggacccttaggaatctagtacaaccttgttgctttaggtgagtcacactcagaaaatggggcttgccctgggtcacctagctggttaatggcagcattcagaacttcaagttctcttgatttctttgttcccactgtcccccaagaaactagtatctctggcctcctgggggcccattctgcatgccctccccacttcccccgattcagagacttagaagcatcagagttgataaattagattgaaaccattccagtaggaaatcaggcagttccctgttgaaagttgtctggctttttgcacgtgagtatgatccaggattggcctgtgtctggcccctccgcgagggctactcagcagtaagcaggccttagtacggctgctgcacacttctcggtctaggtgggagagagtgcataaaggttctggggctgggcctgagcctaactccctccactaccgctatttctccttggatggcaccatccaccctgcaggcttgggaactgtaagctcaagcttttgctcatttgtcatttaccctggtggaggcttcttgcccagatagagatctgaaattggtgggaagcaagcaggggtcgtaccttgctttagagtagatgtttggaaaagctaagtagaaattttttaaaatagaagttgtattttaaacgtgttaggctttataggtgaaggacttgttttgacttaagtagaagtaatatgctctcatttctttgtaatctagattttcctatgttgaatgcttaaagcaaggcatacctgtcctagcaggatctgcccacacctcggccgtacatctctgtgagagaccccctccaacgattagcttttgcaacatggtccagtttctagagggcactagaactttgtgccagcgctggcgagataccatggtgccatcctcctttctatagttccagtttagcccttccctgcctttaaggagaagagatcttcatggtgacatttgagatgatggaaactagatcgtctctaatgttaggtcaagctatttctctggatctatgattttaagatagaacaggctggttctgagttctggtgagacggagaccccggtggcagtggaaaaatcagaagcacaaaggaaaactcttggcctctgctttctcctgtagcacaaagagggagttggctggatcttttggtggagtcaggaaagacaggctgagctttctagcctaagtgtggagaaggatagcctcagccacaaaactctgtcaggcattgaatgacaagcatcagtagctgagtgcactcctggtgatcctggttttccttgaccactggccctggggccatgggtgcatggactcgtaaagctgctagggcccctagaaaccacctgggttcagcctctcccacaataagagttcttgcccttcataccctctacctggatggatggtctttgggcagggaattaatgacagaatgagcagtccctaatggtattgggcagttgggagtgagtttaggcagcttctctgtaaccgcttctggggccacaccccaaaactctacaccctctgccccagaacaattctgcagagtggtgaagttcacttccccaactcttctccaagtctagctttcctttccttctggctccaaggtgctctgtgtccgtctgtgtatgtgtgtgtctgtgcgtctgtgtgtttatttggggaaaagggcaatcagcaatcaactgaggtttcttaattgtgattatattcctgagaatgaatgagtaggaaaggaataaggatgttgttatgatcgcctgtggattttgtccattcatctcatgctctctgaacagaaggtatacctgggaagataccagctttttctctcagggttctgagtcagaggacaccatccaagaatgttgttagcttttcagttcccgctctgcattgcctgaaaaaactggtatgttgcacgtatgcttttggttgaaattgaacatactctagtgaatgtgccttaaaaatcaagacactagttcagaggaagcacataatgtccagatctatggcgaacacaggtgttggaagccaggactgtgataatcagaagctataagagaactttcggagcctgcctccttcagtgacaagtagggcacaaaattctagaagcagaaggttgttttt

SEQ ID NO: 8466 - DNA, 1115 bp, Homo sapiens
ctcaagcaagcacgggcggcgtgcagtacagcacacctagccccgattcttcaacagttctcgccctccgagcctagcacaacgagcctcaccgaaaccgtacaccgccaccaggacactccgtgatgggggatcaccaccctcagaaagaggaagcgactagcaggcgcgcaatcccgcgagaccaggaggccccgcccgaagcccggcctctgtgaccggaagtgaggcgttttgccccgcccccgtggccgatacctcgcgagacttggcgaaggccttcctttttcgtctgggctgccaacatggtaggtgtttcgtttcttgcctcctcttccttgccggcggagacccctaagctgtattcccattgcccctagtcatccactccctaccatggtcggggcttccaggctgcgcatggccgcctgcggggcagggtggccggcgcgggcccggggcggggctcccggagccgtgtgttaggcccgcggttcggatctctaggacacgcgggcccctgcgctaccgtggtgagacctcacggccctgagcggatcggtaccctcagctttcccaaacgctccagaagttaggtctttgacccacaggcttacaggaccatctcggctggcgggcatcgccccctgcccctaattccttaggccttaccaccaagctttttccacacagccatccagactgaggaagacccggaaacttaggggccacgtgagccacggccacggccgcataggtaagtgccggcttcccctcggggtgggccttgggctctcttcgggtgcttagctagtctggagatcggtagcctataagtgggttagaataagacctttttgtggtcaagttgcacagctgttgatttttttctgacgatcctctagtattccagttctaaggaatttcacatcagtggggtaataggaattgagcaggcacggtattgggttagttgaagacatggagtactgtgggaatgctgtgatgtggaacctgaaaagatgtttcacccggaatcctaaagtaatcgcattgctgaaaaccggcatcggtagggtgggaacagcgtaagcgggacacagaagtctgggaaa

SEQ ID NO: 8467 - DNA, 1076 bp, Homo sapiens
gagtgcagtggcgaaatctcggctcactgcaacccctgcctgccgggctcaagcgattctcctgcctcagcctcccgagtagctgatattacaggtgtgcgccacgacgcccggctaattctttttctatttttagtagagtcgggggtttctccgtgttggccaggctggtctcgaactcctgacctcaggtgatctaccccccctcgtcctcctaaaatgctgggattacaggcatgagccatcacaccggccccacgtagctttgtattcctgcaggcaagcaccggaagcaccccggcggccgcggtaatgctggtggtctgcatcaccaccggatcaacttcgacaaatagtaagtgtccttggactgcttttattgacacagcttgggaggtaggggcagagagagggctggcttaaacaaaaagtttagaagcaagccttgcctattgctgttttttaccaagttaacacttggtgtgaactgagaacctgtcatcgaggctagagtcacgcttgggtatcggctattgcctgagtgtgctagagtcctcgaagagtaactgctgaccttattcactggctgtgggccttatggcacagtcagtcaccaggttagagacatgcttcacattcacctacccacaaactagtggatgataaattttggctattcagaagacgtttattataggagtatgtagattttccatagagtgctgttatgtgacttgaattttagtctcggccctgcctctgacattgtcggtggtttatcctggttccaggaaataagactagccttttcctcatgatagtctttggtggtttttaaaacagttgtttaagtcaacagatgtatcatatgcctgacactgctctacaccagtgaataatttacactctaatagggggtggtaactataaagatgataaacatagcatcttaattggagtgtgtatgaaggtggttgttacctcttcctagccacccaggctactttgggaaagttggtatgaagcattaccacttaaagaggaaccagagcttctgcccaactgtcaaccttgac

SEQ ID NO: 8468 - DNA, 1328 bp, Homo sapiens
aaactctggcttaatctaatccacttatataatctgtacttcccagttacctaccagacattgatattcttcctgtggtagaattatcataggtagttccctatccgtagcagtgcctactgtcactgcccaggttgtatcaggtttgcatttcgtgcttgaactatagctggttttcactgagcacagctcttggcccttcatgttctccagataatagaatcctaatatgttccattgatactcagtgccatgcattatctgaagagattttcccccaaaacagatgtattatgtctgtccttgcgggggttctggtccctgtgtcagtcttaactctcatgaatatagaggtagtgttaagaggccagaaccctagggacgctttaaattcacttcccagcctatttaatgtccattgagtagttctggtggtcaggaaggtggttgtcttcttttgcttagcagggggtatttgagcaggaggaggcttatgctttgccgagactagagtcacatcctgacacaactcttgtcctggtgtgctagagtactcgaagagaatctactggtcttgattcactggtgggggcagtcggtgcccccgttagtgcccagatcagaaacatacataccctgcctagggatttagaaagtgggttggcagtctttcctcacgcccatcacgcagttggtacctactacagtgtattgtaaacttttttctctgttcttctagggctactacaaagttctgggaaagggaaagctcccaaagcagcctgtcatcgtgaaggccaaattcttcagcagaagagctgaggagaagattaagagtgttgggggggcctgtgtcctggtggcttgaagccacatggagggagtttcattaaatgctaactactttttccttgtggtgtgagtgtaggttcttcagtggcacctctacatcctgtgtgcattgggagcccaggttctagtacttagggtatgaagacatggggtcctctcctgacttccctcaaatatatggtaaacgtaagaccaacacagacgttggccagttaaacatttctgtttataaagtcagaataatacctgttgatcactgaaaggcctgcatgtattgtactctgaattttacagtgaatgagagaatgtaccctaattgttcaacagggctcaaaaggaaagattccattttgatgggtcacattctaaagaggggcagtgtgataggaatgagatggtcctttaggacttaagttctcagcccaaggtttttccacgtggccccctcatcttttttttttttttaaacggagtct

SEQ ID NO: 8469 - DNA, 1121 bp, Homo sapiens
tgctacagttttatggttcttcctgtgattttgagctttttttgacccaaaataatacagtctaaaactatagacaaataagatggcacttagactcctgggttttagttagtggaggtttccttagtgcactgtggggtcataataagccgagaaccatggctgtctatgggacacatctgtcaggacaacctttagaggatgttggggatcaaatagaaggcacagagaagcactgaattggcttacataagaataggctagaattacaagtagtgaaacctcgattcagctggacaattttaaacaaatgtatcatttggcttgtatcttctgttgtgctggagaagttagaaataagggctctccagaccagcctgaccaacctggagaaaccttgtctctactaaatacacaaaattagccaggcgtggtggcacatgcctgtaatcccagctactttggaggctgagccaggagaatctccaggaggcggaggttgctgtgagccgagatcgtgccattgcactccagcttgggcaacaagagtgaaactctgtccaccccccccaaaaaaagtaagggctctccattagggcccatagaggacttgtaatatggaacctgaatccaaggatcccacaataagtggtcagtagttcatgatgaattaaaagactcaatatttggtcttcacccaatacctgtgtgacttttagtcctaatttcctcatctttaaaatttcagtgaaagtgcctacctgaggattgtgtagattaaaatggaaaccgtgcacttaattttttgttttgttttgagacggagtctcgctctgtcgcccaggctggagtgcagtggtgcgatctcagatcactgcaagctccgcctcctaggttcagaccattctcctgcctcagcttcccaagtagctgggactacaggcgcccgccactgcgcccggctaattttttgcatttttagtagagacagggtttcaccgtgttagccaggatggtctcgatctcctgatctgcccgcctcagcctcccaaagtgctgggattacaggcatgagccaccgcgcccggcccaggcacttaatttttgtgtttgacttagta

SEQ ID NO: 8470 - DNA, 1025 bp, Homo sapiens
gtgacaaagctgaataattgcaaaagagactatgacctgctatgccaaaaatatttatctggccctttacagaaaaagttggctgactcctgatctaggaggatgggaaggtatatagagtagggaaatatgattatcaggcagcattaaggcctgaaggttatggacatgaatttaaagtaagactaaacagcatagttgctgcacagaagtaggtacaaaggcaaagagctggctttaaagttgtgattttgcaaactgaaaatgacaaaaaggggtagactaagttaaaagtacatgcaagttgcatgattataatgagtgatcctgggatttaagttgattatgacaggaacagaaggaacttggagattagggacaatgaaaaggtggtagtgaaaggagtgttggagttaagttactagatgtctggaagacagactgtggtggtcagataatgagatagattatggaggggttacagtttttggtaataacgagagagatctaaggtatgactgagagtgaatggatgagaatagcagagaacaaggtcagtggaaaactactcttcaaagaacctatagtcagggtgttgaaagattaaaaattgctaagaattaaatcaggagtagtgctgcgggaaatgaaatgagcagtgaactaaacttactgagaaatgagaggggatgacccaggggtttgtagattttgtagatgatagcaatgaagagaagagatattatttgatggtatggaactcaaagctgagagttttaagggaagataggagacgtgtctagaagtagtaatgaggagcaagaacatcatctaccccatctccaggaccagtaataggaggactgtgggagaaaaaaatcaccttgagagggctgtagtgaaagcagtatcctaaggtagcagccaagtttcagactgctgggatccaagccagggaaaggtttctgactctttagaatgctgagctttaggctgggcacagtggctcacgcctgtaatcccag

SEQ ID NO: 8471 - DNA, 1024 bp, Homo sapiens
gtttcctaaattatattgagtgtatgtaatctattgtttaaaaggttcataatcgaatagcagaagtgtcttgggatggccctttggcaattttttccccccaggtaatttgtttaccttcagtgtttacagctaacatcaggtaccttgatatctggtggcagagtttaaaggaataatttgacatttagttgaattaaaatagaagcttcaaatagaaattgatggggtttattaaaaggttctatgtatttttagagtccttccctgatgggtgattataagactcaaacatgtttgtttatatagtcatctcttaccacctttttgcttttatcgttttaacagtttaaaaagtattatactatttttagttcctgttcaacatattgagccacttccctcagtatcaaatagtctgaaaatgtggcatactacttttctgaatattatgttagtctgtaaaaaataatgtagtgtacatttttaattttttttattttttgtaggcagtctcactctgtcctccatgctggagtgcagtggtgcgaactcggctctctgcaacctctgcctcccaggttcaagcgattcttctgccttagcctcctgagtagctgggattataggcgtgagccaccactcccagccttttcatttctttttaatttatttgcagatgtaataattttgttatgggaaatacaaagtaccaataatttcatcattctagaaaaacagattacatttttgtgttatttcttgctgttctttccccctgcacctattttgttaaaaattttgttggggctgggtgcagtggctcacgcctgtaatcccagcactttgggaggccaaggcggggttatcacaagatcaggaaatcgagaccatcctggctaacacggtgaaaccccgtctctactaaaaatacaaagaattagccgggcgtggtggcgggcgcctgtagtcccagctactcgggaggctgaggcaggagaatggcgtgaacctgggaggcgga

SEQ ID NO: 8472 - DNA, 1070 bp, Homo sapiens
ggaaataaatgaatttaaattatcactttaaattaattaattaaataacctggactctgctaggcagataggaattattattattattattatttttagacaaactggctgtattgcccaggctagaattcagtagctccatcttttttttgtttttgtttttttgagacggagtcttgctctgtcgcccagactggagtgcagtggcgcgatctcggctcactgcaagctccgcctcccaggttcacgccattctcctgcctcagcctcccgagtagctgggactataggcgcccgccaccacgcccggctaattctttgtatttttagtagagatggggtttcaccgtgttagccaggatggtctccatctcctgacctcgtgatctgccctgcctctgcctcccaaagtgctgggattacaggcgtgagccaccgcccccggccctcagtagcctcatcttgactcactgtaaactctgcctcccaggctcaagccatcctcccacctcagcctcctgagtagctgggactgtaggcacgtaccatcatgccctgataattgttgtattttttgtagagatggcgtcctgccatattgtccaggctggtctcaagcttgtgagctcaagtgatctgccttcctgggccttccaaagtgctaggattatgggcgtgagccaccatgcctggccatgacttctttaaaagcaaacaattttatgtaaatgactgaactccctggtcagcagtaaatctttttgtaaatatttctaatttaatagaaaagggtaatttttattgtctcctttccctcccttcccttcctttcttccttcccttcctcctttccctccttctcttccttcctttcctgtcttccacagggtcttgatccttgcccaggccggggtgcagtgactcagttatagctcattgaatcttcaaacttctgggctcaaataatctttctactttagcctgccaaacatctggggctgcaggcatgtgtcactacacccatctaattattttattttgtagagatggaatctcactatgttgctgag

SEQ ID NO: 8473 - DNA, 1056 bp, Homo sapiens
aagaatggatcaacagtaagaaattagtttttgtaattaacccttacatcacgttaaaatagagacctgtaaacatctttatggatgtcagataaagcatttgataaaattaaataaccatgtctgctttgaaaaaaataaacaactgttagaatcctagaacagaatctttcttaacttgatgaaaggtgttcattagaaatctacaataaatatcacaccttatggtgaaaataaaatatcccagtaaaatgggaatatggcaaggatgcccactcactgtttaccattatagataacaagcaaagaagtttgcctatgtactaaaagcaggaaatgtggattgaatgaaatacttttggtaggtattgtgaagagtaaaaagaagtaggattttctttagcaaggatttcgaaatattaattcttgacttttatttagtatacactaccactggaactgataaaccaacagaacctgacagaatggatagaaattttaaagactgttgtgaacagggatgtacctaatgtaagtttctgtatgttctcttatattactaaatgtaaatatttaatgatcttttgaagactttaactggtgtttcctgtaacattctttatgaatttttataatatggtgatgtatttttttctagattagaggtaccttttcatttgtttatatatgcattacatctgtacatttacttagtgtaaaaagttgtaaagggtgtttttttaaatatattattggtttaatttcttctgttgtccttttgtttcatcctaaatcttctgttccctctcagttcataaattaagagctcatagctggctcttagcctagttaatttgtcagatgcccacgtacagaggaagaggaagaacttgatttacagattggccaacttttgtagttatgttattttttcttaataactctattgagaaataactcacatacagtaaaatttattcttttaaagtacaacttggtagtttttagtacattcagagttgtccaattgtgttatttgtataatcaaacttttta

SEQ ID NO: 8474 - DNA, 1106 bp, Homo sapiens
tgaaaatgtgtttagtggtttttggtggtgaagttctggaatacgaaaattggttgtggattctggggttcaaagaatgagaataaatatatgtaacattaatagtcatttttaatagtgttatatctgtttggaaattgagatgattatatttggaactgtatcaaaataactgttgtttatatttacagaaaaagatctataaagatcagatggaatacatgttgcagaatcatgtattccctctcttcagcagtgaactaggctacatgagagcaagggtatgttttaaagctgcattatttatatacttttgtcttgtaatgaatgactctgtggacttttatattgaaacttttaaatgttcactttgaagcctgtgtcttattttaggtttctgtttaatgtaaatctttacatggctgctgtaatgtgtgcataggtttcatctgtgtctggtagcagtgtctgtctgtgtttttcattcagatcttgctatccacacaaacatcatgcggccaaagagtaacttgggatcatagtactggtctagtgttgtctctggacacatctaccactggccagcctccaaattcccacacacagaactcagggaatagagattagcttgggggaatttaaggtaaggtatctacagtaactcactgtgtttttacaaaaggcttgctgggtacttcactatttttgtgaagtgaagttcaaaagtgatcagaaccttcaaacagccttagagctaacaagaagatgtctgattgatgatagagaaatgcctgtgaaagtggaagctgccattgcccttcaagtattgatcagcaatcaagaaaaaggtaaaggatttttgtatgtcaagaaaagtgaatgttggccaggtgcggtaggtcacacctgtaatcttagcacttcggtaggcttaggtgggaagagcgcttgaagccaggtgttcaagaccagcctgggcaacatctctacaaaaaaaatttttaaaaattaactggacatagtggcatgtacctgtagtgccagctacttgggagtctgaggcagcaggatcactagagcccgacggttcgaggctgcagtgtgct

SEQ ID NO: 8475 - DNA, 1045 bp, Homo sapiens
taaattacatgttttctgcaagttgccttttgcagcatgaggtttttcactaaacttttttttttttttttttgagacagagtctccctttgttgcctaggcaggagtgcagtggcgccatcttggctcaccgcaacctctgcctcccaggttcaagtgattctcctgcctcagcctcctgagtaactgggagtgcaggcgcgcaccaccatgcccagctaatttttctatttttagtagagacagggtttcaccatgttggccggcaggtctggaactcctgacctcaagtgatccgcctcccttgacctcccaaagtgcagaaattacaggcgtgagccaccacgccagccacgtaaactgtttttgtattctgccttataattgaatataagcagaagccatgaccaatcctataggtgctttatgttttaacagattaattgtttattctattttaggaattgtaaatgtattaagttctgtatatttgaaatggatgtcttgcttttatatctgattagtggatattattttacccttcctccccttaacattcttatggccctcagggatttgggatctaatttaggactatctagacaattatagaggaatttgtatttcttgtcagtcttgagttgggggctgagttcacattccatggttcactatatctaataaaatttgaaaaactaaggtgacttaaggattattgagattcgtagcaataatgccttccttcggataatttctctgtgagtcattgacggtgacttttcaattacattgagctgaattaatctctatttgcacataacagatgggctatcttccaaatggttttttttttttttttgagatggagttttggtcttgttgcccaggctggactgcaatggcgctcggctcactgcaacctccacctcctgggttcaagcaattctcctgcctcagcttcccaagtagctgggattacaggcacccgccaccatgcctggctaattttttgtatttttagtagagacggggtttcaccatgctg

SEQ ID NO: 8476 - DNA, 1998 bp, Homo sapiens
cagtggcgcgatctcagctcactgcctctgcctcccaggttcacgccattctccttcctcagcctcccaagtagctgggactacaggcacccgccaccacgcctggctaattttttgtatttttagtagagacggggtttcactgtgttagccaggatggtcttgatctcctgacctcgtgatccgcctgcctcagcctcccaaagtgctgggattacaggcgtgagccaccactcccggcccgtcgtgagcttttaatagctccatgaagactactagactttctctaaaattagatttcccagtgcagtgcctcagcagtaaatattggtcatctaatgctacaatagggttaattgaggcaacaaagaagttaatatttttagaatgtttgcatgctattaattatagtcttagaatatcttgctatctttttttgtagtgcattcccttattcgtggaagcagccttagaaagactgacaagagaggttaagacaagtgaacttcgaactatgtgtctgcaagttgcaattgcagctttgtattataatccacacctactactcaataccttagaaaatcttcgcttccctaataatgttgaaccagttacaaatcattttattacacagtggcttaatgatgttgactgtttcttggggtaagtgatgtattgcaattttactacatttgctttgggaggaactctgcttatttaagaaaagaaaacagttttttttttttttttttttttttttttttttaggcttcatgacagaaagatgtgtgttctcggactctgtgctcttattgatatggaacagataccccaagttttaaatcaggtttctggacagattttgccggcttttatccttttatttaacggattgaaaagagcatatgcctgccatgcagaacatgagaatgacagtgatgatgatgatgaagctgaagatgatgatgaaaccggtaagggattttcaatggaagaagacaaaacttatctacttagaaatattaccgcactgggccgggcgcagtggctcaggcctgtaatcccagcactttgggaggctgaggcaggtggatcacacggtcaggagttcgagaccagcctggccagtatggtgaaaccccacctctactaaaaatacaaaaattagctgggtgtagtggtgggcacttgtagtcccagctacttgggaggctgaggcaggagaatcgcttgaacccatgaggcggaggttgcagtgagccaagattgcatcactgcactccagcctgggtaacagaacgagactccatctcagattaaaaaaaaatatatatatatatcactagcccttctcccaaataaatgtgggatcatacccaaatgctttcattcacagaaaagacttcctttcttctcactagagtgatgtaatcaggaacttcagctgtattaccaacatgtagaacagttcaaaccattatagtatgcaaccaacaaagatttgtttattttacacattctcagcactgtagatacaaagatgaatgagatgtcatgcagttcttcaaaagttttctatccgactgtgggaaagtattacaaagccaaataattatgtatataataatagagttgacacgaagtgctgagtccacttaagagcgagagattatagttcccttttttatatggtggcatgagcctatagtcccagctacttggaagtctgaggtatcagattcgcttgagcccaggagtttgattccagcctgggtaacatagtgaaaccccagttttttgttttttggctttttttcctttgagacggagttttgctcctgttgcccaggctggagtgcaacagcgcgatcttggctcactgcaacatctgcctcccgggttcaagcaattctcctgcctcagccccccagatagctgggattataggcacgtgccaccatgcccagcttatttttgtatttttagtagagacaggat

SEQ ID NO: 8477 - DNA, 1035 bp, Homo sapiens
ctagtagtggttccagaactggttcatgttatctattctaaactaataatcaatagatggacaaaagaaacaacaaccccaggagatgggacctgatcatgcaacctggcactggaaaagaaatcagcgggattttgggggtggggggggatgggaggtaccttagagggagtattttctttattttttgaagaaagtaagatcctgactctgaagcttcaaagtgacactgtggaaatctgaaacgaggggatgtcatgaaggcagcttttctttttctgaggaaaaaataggcatgggctacaggactatttaaaatgtctcatttacagtataaaactcaaaggtagatgtaatttttacacctatgagtatttgtccaatttctgtctcttcctcaccattgggtatctattctttatatgtaaataagataaggtcatctgatagccttattcagtcttcatcattttcatcattgttcctatgtagattattggacatttattgtagcactacataactgattataaaaatctgtaaatgaattagcactttcatattgaaacaagcctgctagcctatgtataaaatagcaaaatgtttgctgtttataaaaagatgtaatggggtggggggcaggggtaatttcaagttattaatttaaaaatgaactagcaattttgtacctggtgactttgtggtgcactcacctctgatagtgacttgaattcggtatgtaaaaaggggttagtggtatttcattgctgctaaaaatgacaactccctctgtgtcctgtttttcttaaagctgtcagtgtacaagtgggtatttgaataccagaccttactgtaaaaaataaaaaaggtggtatctagagcatgtaaattggatataaagttctgctcttaaagagttgatctaagagtatggctaaacatctatatatgcaatctattaaaagaacttaattcggctattatgtcttgatttgattgcagttttttcctaattataacaaatttttcctcatt

SEQ ID NO: 8478 - DNA, 1027 bp, Homo sapiens
ccagggtcatttatgttataacatgtgtcaatactttatttttattgccaaatgatatttcattgtatgaacatagtacattttacttatccattcatctgttgatggacatttgggttgtttccaccctttggctattacacataatgctatgaacatttgtacgaaagtttttgtgtggacataggttttcatttctcttgggagtagaatacctaggaatagaattgctgagtcatatagtaactatgttcaaccttttgaggtactctaaaactttttcagtgtggctgcaccacgtttacattcctaccagcaatgtgtaaaggttccagtttctccatatccttaccaacacttgttatcatcagtctttttgattatagtttttctagtgtggatgaaatggtgtctcttgtaggtttggtttgcctgtctctgatggttaataatgttgagcattttttctgtgcctaacgatcatttataatcattggagaaatgtctgtttgaattctttacccattttaaagttggattattcgtcttattatgatttggttgtgagagtactttatatgttctagatagaagtcccttatcagatacatggtttgcaaaatgtccatagtcctttgctgtgtgttggaatgttgctgtgaagtaaggactggttgtgttcttcacagaaacgtggcatggctgcattgaactgtgcctctactacatggttttatttttaaaataaaaaaccactccaccctcatagcatagttccatttctggaaggtaagcactgaatttttaaatgttcatacaagcatatacagataactatatacatttttaaataaatgaatgcaatcatatggtatctacttttctgcaacttgctttttcccacttaccatatatcttggacatgtttctcactgtttcagatagatagatctcattcttttaaatgcctacatgtttcatttagggatgtcgtgtgtgtgtgtttgtgtgtgtgtgtgtgtgtgtg

SEQ ID NO: 8479 - DNA, 1064 bp, Homo sapiens
atgtattaccctttatatttgcaggagaaaggccctttaagtgtcccttcgaaggctgcggtcggtcctttacaacatcaaatatcagaaaagtgcacgttaggacacacacaggagaaagaccttattactgcacagagccaggatgtgggagggcatttgccagtgcaacaaattataaaaaccatgtgaggatacacacaggtaacaatctctgatcttttggtcttttatctttcaaggctcagtttaactcctgccttttccagaaaccatttccaactaatctcttccctcctttctatcacttggcatggtggaaagagattaagcaacttgaaaaagtttcaccttaacagtcatacattcatttattcaacaaacagttattgagtatctcctgccaggcatcaaacatagagagataagacattgtcaagggcaggctacttgggaagagatagtagacatacagttgctgcagtgtctcccattatatggacaagatgctgtgggagcagagaggggagcagtcacttctgcaggaatgggagaagcattttgggaggggtttctgggagatatttggcatacagactcaatcctgaagtttgccacataagagagaagggtattcctggcaggggaaatgtcatggggaaaggcacaaaggtatgaaaaagcatgatactcagtggttccatatgacaggagcattaagtacatgtagaagatttgtacaaggtgagttctgagaggtagccagaggccttgtgtgttgtgctgtcaaagttaaggtacttcttaaactggactttgtgaagcttgtgagggggcggggtggtctatggatatattcttttttttttttttttttttttttttttgggatggagtttcgctgttgttgcccaggctggagtgcaatggcgcgatctcggctcactgcaacctccgcctcccaggtttaagcgattctcccacctcagcctccctagtaactgggattacaggcatgtgccaccatgcccgggtaattttgtatttttagtagagacggggtt

SEQ ID NO: 8480 - DNA, 1050 bp, Homo sapiens
ctataacatttatagacttgtcaagggtatggggaaacaggtatgctcatgcattgacaatgggcatatatattggtacagccttctctgtggagaagagtgtgtgtgtgtgtgtgtgtgtgtgtgtaaaacacaccatctccatatattacaaatgtgcataccctttaacccagcaatttggcttctaggtgatatactaaatgtacgtgaaattaccaatgtacaaggttatttattaggccatagtatgtaatagcaaaggcttggaaataattttaaaatgtccatcaaatgagggactgataaatgcatttctttctttctttctttttttttttttttttcgggggactgagtctcactctgccaccaggctggagtgcaatggcccgatatcggctcactgcaacctccgcctcccaggttcaagcaattctcctgccttctgagtagctgggattacaggtgcacgccaccacacccagctaatttttgtatttttagtagaaacggggtttcgccatgttggcctgcatggtctcgaactcctgacctcgtgatctacctgcctcggcctcccatagtgctgggattacaggcgtgagccactgtgcccagccaataaatgcatttctactcaattatacaatggaattctataaagacaagaagaaatgggttgtctttgtatattggtatagagtgatctttaagataatgaacatatgctgttatttatgcaaaaagttgaaaagaatacatagacctgagctgggcgtggtggcagtgcctgtagtcccagctgcttgggagtctgaagcagggaatttgaatttgggtttgggaattctaggctgtagtgccgatctatgttgagcatctatgccgatctatgccgatctaagttgagcatcagtatggtgacctctgtggagtggggcaccaccaggttgcctaaagaggggtaaactggcctaagttggaaacagcacaagtcaaaactcctatgctgataagtagtgggatcaagcctgtgaatagccactg

SEQ ID NO: 8481 - DNA, 1020 bp, Homo sapiens
tttcaattacatcttagaataatgatggcatgcaaatatctcccaatcgacaatatagtttgtgttagtttcttagaatctcttcctaggaataataccttgttttctatttttatgtcagagaactcaagaaagcacagatggcaaaagctgcagctgaggaaagagcactcttcactgaccggatggccactaggtccaccacccagagtaatagaacatctcgacttattggaaagaaaatgaaccgctctgtcagccttactatatactgagctactcctttcccacctccccctgaacactgtgacaagaggaagctaggttgaaatcactgatagaatccagtttgcaattactttctcgattggtgtcagtagttttactgattaggacttttattgtgaattacagttgaaagctgtattttgatgattgctatgtcaggctttcatctaatcttaccagtctgtcttctgtaggatgtgtcactgttggatgttacaccagcctttccagggttaaccactgtggtggtgtgctgcttatagtttgctgttgcattgtaataaaaggtgtctttccctgtagtgacctgtaaaaagtactcaagggctttattacagacataccctccctttgaaaagggacatgctaaaagactcattactactcagccttcaatgtacctgtgtgtccatcttatatttcttttttttttaattgtgaattagacttgtatatcccactgggagcactttgtaggcattgcatgaaccatgggatgatgattctgtggaggtattgccttgtgaatttgctgctattttagttttgtctttgctgtaaacttgtagcattaaacaatcattgttgttaataggtcttctttttgaaacaattatgtgaaatgtatagctgcttttgatgaaaagcagctatttgcctttttttttttttcctttgaactttgaagctagtgcattggaaaaatgcaccctttccctcctttggaatgct

SEQ ID NO: 8482 - DNA, 1074 bp, Homo sapiens
cttccttctcctgcattccctgtaatctcactgggcatcttcctggcaatctgtgcaccttctaccggggagctctgtctctctggctccagttgtaacttgactggctccccacctgagttgagagtacgtaggcctttatctctgcacccatcctgtgcacgttcatagaagtcatcagctctgttaacttgatttgcaattggattgttaaatacaactgattgtcatgttgatttggtgttacttggtttttcaggctgaactaaccaggaacactaagtgattgttttgagctttttcttaagcaaagatttacttgcttttcagcagctgaagtagatagcaataggctaatagtggggaaacagacttccagaaacacattttctacttgcttttaaacttgtattcatgaatagtcctttcttagaacaaaccgtatagtttaagactgtattatctgttttgattgcaattttagtatattctgtgttaactgatggtagactgaaaactgtattgagagagatggaaaggggttttctttataggaaggtgctaggtgcacataggtagctgagtaaatgtagttgaattcaacgttagacattttttccaccatttttcccccttggtttggttttggtgctcttcttttgtttgtacagtttgtcccttggtatccttgggggattggttccaggactccctgcagataccaaaatcgtaggatgctcaagactcttatataaaatggcataatatttgcatataacctatgtatatctttctttatactttaaattatctctagattacttataatacctaatgcaatataaatgctgtgtaaatagttgttaagttacattgtttaaggaataatgacaggaagaaaagtttgcccatgttaagtatagatgcagtttttttttttttttttttgagacggagtcttgctctgttgcccaggctggagtgcagtggcgcaatctcggcttactgcaagctccgcctcctgggtttatgccattctcctgcctcagcctcctcagtagctgggattacagg

SEQ ID NO: 8483 - DNA, 1049 bp, Homo sapiens
cagcacttgtgaggctgaggcaggtggatggcttgagctcaggagtttgagaccagcctggacaacatggtgaaacctgtttctacaaaaaatagaaaaattagctgggtgtgatggcaggtgcctgtagtcccagctgctgggggtgaggggtgggggatggtggctgaggtgggagaattgcttgagcccaggaggtcgagcctgtggtgagcccagatcgagctactgcactccagcctgagtaacagagcaagaccctgtctcaaaaaaaaagaagaaaaagaaaagaaaagaaaagaaaatggtatgtcagggaccaaaaacgtctaagaggagggggtgattcagactgccaactgccagacctttgggagagtgacttggccagaaggtatctgtcccagcatgggttctccaggaagccaatgttaagacactgttaggaatacaaaagtgttacctgtggggtgggagagaggaaatgaaattgggaaaaggaactgtcaaaccatcatatggatttggcaaaaccaggagctctgaagcaaagattgccccttatgggactcccacattgaggaaaagtgatcctaccaccccgctctgtcactgggaccctgaaagtagctggaggctatcagcttaacacagtccttgtagctgggtagcagttacctacttgagggggcatctgagtggtgcatctctgtgtctacctcagaatccatttagaaaagcaatttcaagagattgatagggatagaagtcatattttagggaccatgcggggtcaggttggtgagaaggtggggcagccgagggaaacctcacatttgtgattttttttcattcttttatttttaattttattttatatatttttgatttctgtatattttaatgacttcagatttgtgatctttcttaaattaaaaaatttttctttttgagacagggtcttacactgtcacccaggctggagtgcagtggtgctgttatggctcactgcaaccttgaactcctaggctcaagtggtcctcccacct

SEQ ID NO: 8484 - DNA, 1086 bp, Homo sapiens
ttccttttttttttttttttttttgagatagagtttcgctcttgttgcccaggctggagtgcaatggcgtgatctcagctcactgcaacctccgcctcccgggttcaggcatgcgccaccacgcccggctaatttttgtatttttactagagatggggtttctccatgtttgtcaggttggtctcaaactcctgacctcaggtgatccgcctgcctcggcctcccagagtgctgggattacaggcatgggccaccatgcccagcctcttctttgaccgtgtatgtaaagataatgtacctgtacttggctcatactgagtaattgacattctcagtttcttccatgtgctaggattggtagcctgtttattaataggaagatagtgtatgcacatgaaactgtaactatttgagaggtcagtgctaggattggtagtctgtttattaataggaagatagtgtgtacacatgaaacggtaactatttgagaggtcagtattttatgtgccaagggagtgatatggacagatgttggttcagtgtcatgctaaatgtaacatcttaattgagccactgaaagtgtaatacctaaagcaaatatgtaggatatggctgttggttaattggattgattaaaatgggagccaaaggaggctttgtctttctattttacttgccttagatactgcttatatcggactgatttgttggagtttttccttattcctttttaggtccaagacaactttgacaagattgaattcaataggatgtgttggaccctctgtgtcaaaaaaaacctcacaaagaatcccctgctcattacagaagaagatgcatttaaaatatgggttattttcaactttttatctgaggacaagtatccattaattattgtgtcagaagaggtaaggtgtggcttggggagtttttacttggtcattttagcatttaatagacctggcttggtattttttctgttaattcagcatagatatggaaggagatccttggctagtgtttttggatcagaggcaaagcagcctgagtatagaaaagctccaaatatagtaatttggggcatgt

SEQ ID NO: 8485 - DNA, 1038 bp, Homo sapiens
agctcaaggactctttcatgcacatctgtgcaaaaactttgctctgggatatgggggtggctcataatctgtgactctacatacctagtggggttctcccttggtaacccgtagaaatgccacattgtgtgctgaacttcctctgagtagagtagactcatgaagatttttaagaatgcttttataatcttaggaactgcatgggcatatatataatcttagaaaaagttattactatcacacacttactttctaaaagcagctcctcatttcttactgcctcccacccttgaaacagtcttgcatcttgcctctttctgctgcaatatattttctgtaaaaattccctttaaaggttacgctgagcacctgccgtatgtgattgctgctgcttccttccactgtgcacacatcaaaagtgggtgttatgagggaatggtggggagctagaacttggtgtccttttttataattttaaaattataaaatagctcgtacctgtagaggagaatatgaaatatgtatatacaaataatcatacagtgaatacccatgaaaatactacccaggttaagatagattattgccaatacaggttgagtatcccttatccgaaatgcttatgacccaaagtgtttcagatttgggatttttttggattttggaatgtttacattatatactgtatttaccagttgagatcctcttgccttagcctcccaaatccaaaagtctgaaattggaaatgcttcaatgagcatttcctttgagcattatgtcagagctcaaaaagttttggattttggagcattttatattctttattcaggtctttccctcatccctaacccctggaaaccactgatcaattctctgttcctgtatttttgccttttccaaattgtcatataaatggaatcatacagaatgtacattttaagaccgcattctttgacttagcattgtacatttgagattcatacattgatgccctttttaacttttaaactctgccttccaggagcatgtagtgttctg

SEQ ID NO: 8486 - DNA, 1028 bp, Homo sapiens
aggaggtggagcttgcagtgagccgagattgcaccactgcactccagcctgggtgacaaagcgagactctgtctcaaaagaaaaaaaaaaaaaaagaaaaaaggaaaaaagtcaaagagactgctagggaataagccttattgggccataatctgtggatttcactctctagtatacatggcaagaaagtggtgcttctgataccgtggctctgacctgagacttttctctgtctctcctctcaggcatggtatgagcagggctaagtggaaaaaactgtatctatctttcatgttaaagaagtccagaagactggtaagaatgcaagtgtaatttgatgtaaattatagaaaaattatgacattctcctatgttatatttagaagcttaatggaacttttttacacagtgtaggctctatgatttcagagtatagctccctaacagggcttccatttgtatatttgaacataaattatctatctatattgtcccacaaagactctgtaatcgttatgaaactccttgagcagaggaaaagctggactccaaatacagtcttcatttggaaggagtcttttagatgcaggtccaaccaaagcactgtacaggagtaacagttcaggtttttcctaacagattccattttatagataaatgcattgagaatcaaaatgtgtaagcctcagcctcaaggctgagtggtcagtcccaaggtggagttaaggcctgcagtcagaacacaggagaccatgcagctctcagtaatgcagggtgcagagttgctggaggtttgggtaggaactgctctcccttgaaatcactggagtaaagactatgatgctaaggattgcagaggctgctacaggaatagctaagaacctaacagtagtcaaaagatttcttgacatagtcagcaaggaccagtctagtacttgcccacggtgaattccaagtttgggtgggcacatccccttctgccgcttttggggcccctttactcccctgttgctgccatctttgaaggg

SEQ ID NO: 8487 - DNA, 1405 bp, Homo sapiens
tctaggttttgagagccagctcctaatttttgtggcaagaatttagggaacagtctccatttgtgtcacaacccaaacctatagtgtctcaaactttgaaatagctttttggtatgaaacctagtccaatgtttataaaaagcttaaactgcttatatatgttaaaactaaggaaaaccttaacacaaaatttcagaaagtgaaacataaatgatttcttactctacctctatttccaatggtgaatataaataattaaagaaaatgggactcctcttgtgcattctgtcaatacattcccaaatacagactccttttttggcatgcttttctcctttatcatcaaataaagttcctgtagattaaaaaaatccaacaaaacaaaattaaataaattcacactttgccaaaaaacgtatgatgcatgcagcagataaaaaagtggaatattttttatggctttaaaaacagcaacatttgtgtgaaaaccttagaaaataactgcaaagctaaagaccggaatgaatttcatcgctacagggaaacagatccagatggaggaaacatctgataaagtttgcctaagcagccagcagtctatcaatcatgactcttccaaccctcatcctgcatctatatctagattcaaagaagtccatgcaggaggcagtctacacttttcaagagaaaatggaaggacttcagagttgatttgatgaagctcagtaaaaaacataattttatgtttctcttttaagttgttggctgtttgtttattatgaagccatttaaagagttttcttgtttagcagtgtatatatactgcagatcatggttactgagactctagatgacagaagcgtgtagtctgtgtccttgggtgacttaaaaataaaagcagaacttttatacctttttcaaatagtcaatctattactaacatgagcccactttgtttttaatagggaggaaaatgtgttggggtgaggcaaaaagtagttctttaaaaggccatgaagggtgtctcagcagtggtgtcttgcttggaatgaagtgacatagtcaaaatcaacatgcattttaccagtttatcaaaaaaaaaaaaaaaaaaagactcaagcccaagatggcatgaaattctataatatgtggggcccctaagactaattaacagtttcttctctaccttttaactgcagggtccagtgcagtagttctcaaccttggacatggatttaaaaaaccaagggctttaaaaaaatcccagtgtccaggtctcacctcagaccaattaaatcagaatctctggggatggcccgagatattagttattttaaaagttcaagtaactccaatgtccaaagttgcaaatgctctaggggttgcagtaagattttgaaagcca

SEQ ID NO: 8488 - DNA, 1034 bp, Homo sapiens
taatatatgaaagctgtgataaaaatgtttcagatgtttagtcaattgtgaaatttttcttaaggcaattttcttttctatcagtttgtatattactaagccccaagagacatttcctgtgctagagtccaatatttgagtctctcgtgcaaatgagactattctttgtggtacaattccacctatcatatgtgaaaactgcagtaaaaataaacccagatgctaaatcattcctacaaaggtttgactgaaactgtggcagatgtctcatcttctttatatgttaagcagcatactcttctgatttttattgcaatcttttaccaagtggtgcacaaacttggtattgatgtctttattccattttgagtttagattgagaatatttttattttctgaaggcagagatatctactgtataattgcaccaaagtacatttgaaaggaaggttttcaatagtgtaatactgcagcgatgtagataaaatcacaaatgtataatgtgttaggttgaataaggtgtggaaaatgcttttctgttagtagaatgcaaaaacctacctaagccacataataataaaattcttttaccaacttttatgggtaacttcgtgtctttttttgttcgatatatttgtgcatggcagtgtagcataaattatgcaaatatttgaaaaatcctacattaagcctcaagacttttataattcttacagattcgtggagtgtttattttaaagatgcaagaaaactaaggtaccagcatgtatttttattttcagtaattcagtaattaacactaatatttttatgtagtggtttgtaagagctttaattattgtagtcaacaagtattattaaatgtgctatattagccattgaggtgagaatgcagagataaagttcccttcttgtcttcaaaaattgagtaaagataaatttgttgttcctgtggtgtgagaaatagggtgatgatgtttgcacaggttgtgggagcaaaaaggaggttggaagaagcagtgaagacaaggttt

SEQ ID NO: 8489 - DNA, 1034 bp, Homo sapiens
gaacgtcaggagagtgaacgggagcaaataaaacgctgtccattctgactggaagggccagagccgtgtctaagggcgggggccgggaggtggcccgcggtggtgtctctaccaggacgaggcctggggtatctgaagaggggatgacgtccaggcgctttgctaaagggaagccagaagggtatgagttgctagggtcagagatggggctttcggctcgagtctttccctgcagggcagagagtccgaagagcccgagaaggcagggaggacagtgggcctggtccttccccggccggcagagggagtcccgagatggaacgtccagctctcctctaacgaaaagcgtttgcatggctgtctcgccaattctgtacctcccggggctgaggaagagccgaggtgactagaagctagcgacaagtgccggccacctccgacgccaggcgccgggcttggagcccgacgggccgaattctcgcgagagcggccgccgccatttttccattgattgcagcgggctgggggaggggccgacgacgaaggcggctgtggtagcggcggcggcggcggcggagccctgggtcggtgtctgcgcgctggtgtctgaggcccaggctgaggcctccgctattgctggagcgcaggcggcggagaggatgactgccgctgccattctctcttgagctagcgagccgccgccaccctccaccctcccccggcagggcggagaggagcggccggagtcagcgatggtgcccggcgaggagaaccaactggtcccgaaagaggtgaggggccccagaggaggttaggccttaggcctgcggccgctcgaggcaacacaggcccgggccggggttcggctgcgggcccggccggggtgcaggctcggctgtgggggaatgaggaggcgtgaggcagtcgggggtggacggtgggtgcggcgagcagttgggagacccgctggctctaggggccggggagcggacctcccgcctcgggttttatggggctggacgaataaaggagcg

SEQ ID NO: 8490 - DNA, 1049 bp, Homo sapiens
agtgcattttaggaagtggcaaaaaatttagtgtagatgcatggggcgcctggttctggcagattgtgtctaaaaattccaaaggctttgtgtgcccagaaagtgtttagatttttattgtttagacattagggggcaaaaaatatttttttccccagaaaaagtcaacagatttgtttacaattgttataaaatttagttgctgaaacttgttcatggaaacattttttacttgctggaatgttttttgtccccaacattaataccaaaaatttgcatacaaatcaaagtgggggaaaaacttgctaataccttattctctcatccatttatttccatttgcaatcatataattaggtacctttttgttttttaagaataaaatatttcttttcataatacattttagcacattttctacatatgagtctttttggtgggatatccttaggcataattgttacatatttgatatggataaaacaaaggtgggtgtcttcaaataggctaaccaggtaggcctcacttgcctttagaaaagtgtcagtggctgcactctggaagtatagatctgttttgaagttctcacaactgatgctggaagggaaatttgcaagtgagaagttcagcatacatttgataacttctgatctgattttcactgagagccacagtacaaggcttataatgatgtggtttcttaacctttctagtacacaacatattcttgtgagtggcttttgtagctagttacttcctgtgtgctttaccactggcatttttgtgggcatttggctttgtaggaactgtagtgtagagaactccctatttacttctcttcttggctgaagctctgcaagctaaaggtgacaccgtgctaggcagtgatgactgttggtggcagtcacagtgcagtaactgagaacaccataaggaatgtctttaatttgagaattaatggaatcttcctaaggttatccacagtgctccaaataatatttatttaataaaaataaaatatttaataaagagaagctctggattataaa

SEQ ID NO: 8491 - DNA, 1023 bp, Homo sapiens
gggttggttttttaaaatttagtataattttctggaagttttttcaggttgttacatgtatcaatagttggttcctatttattgcttagtagttttccatgatatggatgtactataatttgtttgaccatttagttgatgaaagacatctgggtttgcagttttgggctgttgtaagtaaagctgctataagcattcctgtactggtttttatgtgaacataattatttcatctgtgataaatgttgaaaagtgcaatttctaagttgtatggtaattgtatatatagtttttttttttaattactggactgttttccagaatagctgtaccattttacaggaaggcatgagagattcaatttctctactttgccagtatttgatgttgctattttttttttattttaaccattctgaaaacgatgtggtaatatttcattttggtattaatttgcatttatctaatggttagtatgttgtacatctttttatgtgcttatttgcatctgtttatacgcttcattgaaatgtcttttcatgatttttgtctatgtgctaattggattgtttgcttttttttgtaggtttttagagttctttatatattctagatactaatcctttgttgattatgtggtttgaaatattttctcccagtctgtaacttttagtccttaacggaatctttgcagagtaggcattttaaattttgatgaagtccagtttatcaatttttccttttatggattatgattttggtgtcaaggctaaggactctgcctagcctgagtactgagaacattttctcctatgtgttttcctaaaggttttatagttttatgttttccatttatgtttatgatccacatttatgttaattttaatataagatggagagttaggttgagaattttttttttttgcttctggatgtctaaatgaaatattacagcatcatttttggaaagactatttttcttccattgagttgcttttgtacctagtcaaaaatcagttgtgc

SEQ ID NO: 8492 - DNA, 1064 bp, Homo sapiens
acagatacataaagaccctgaaggatgatggatgcctgatagtttagatttgcttatagattagttaccactgcacagcatcacctccttgagagcagggtgaacagtgttgggagaacagtgttgaaagatagttgcagttcaacaatttttttgtgaaaggcaccatgtattaaaaattctaaaaatgcgtacatatactttgatctagtaattctttctttgagaaattatcttaaggaaaaattatacaaacaagcaatgctgtagtgaatgtttggaggggcttaaatgcccattaatagcagattagttaaattatggtttgtctatataatggaacactgcagtttttaaactgaatgttttggcatacaaaaacaatgagtattgagggacaagaagtagatttcaaatactggtatatgaaattgtcctatttggttaaaagtactctctctgtataataaatattatatgtgcatagactggagaagatgagatgagagcaatggtggctattttagagttgcttttcagaaaactgtatgttgctattataacagaaatatatttctattgtaaaagtaaaagcgcctttcaagagaatatgttgatttctttttattaactgaagaagggagaataagacaaaatatgtacagaaaaagtgtagagtgatgtaaaatcaagatttttcaagagattatctcttgattataggttacttttatttccttttatatgtttttgtattaattgtaatttaattgttaaactcataagaaggagatatatattaaaatagttgtgagggatattgttaagcagccttgttttaagagtagctgtcgtgaaaaattcaaatttttagagactagcaaaatcaagagatctcttggtttcctttagtgcagagaactgcagaatttctttactggacacaaaatattatgtgacttacaacatttgatttacacacaattcttaagctatcattctttattaaaatggctatttccatatttatcttattctttatcacctctttatcatagattttt

SEQ ID NO: 8493 - DNA, 1079 bp, Homo sapiens
accaagtgaatggaaaacagaaaaaagcaggagtcgcaatcctagtttctgacaaaacagagtttacaccaacaaagataaaaaaagacaagggcattacataatagtaaagggttcaatccaacaagaagagctaactatcctaaatatatatgcactcaatacaggaacacccagattcataaagcaagttcttagagaccaacaaaagagacttacactcccacacaataacaatgggagactttaacaccccactgacagtattagacagatcatcgaaacagaaaattaacaaagatattcagtacctaaactcagctctggatcaagtggacctgatagatatctacagaactccccaccccacaacaacagaatatacattcttctcatcaccacacagcacttactctaaaactgatcacataatcagaagtaaaacactcctcagcaaatgcaaaagaactgaaattacaacagactctcagaccatagcacaatcaaactagaactcaagaaattcactcaaaaccacatgactacaaaattgaacaacctgctcccaaatgactcttgagtaaataatgacattaaggcagaaatcaagaagttctttgaaactgataagaacaaagagataacataccagaatttctgggatgcagctaaagcagggttaagaaagaaatttatagcaccaaatgcccatatcaaaaagctaggaagatgtcaagttaacaacctaacattacaactaaaagaactagagaaccaagagcaaacaaaccccaaagctagcagaagacaagaaataaccaaaatcagcacagaaatgaaggagatagatagagacacgaaaaacctttcaaaaatcaacaaatccaggagttggttttttgaaaaaattaataaaatagataaactgctagttagactaataagaaaagagaagaatcaaataaacacaatcagaaacgataagggggatatcaccactgaccccacagaaatacgaaaaaccatcagagaatactataaacatctctgtgcacataaaatagaaaatatggataaat

SEQ ID NO: 8494 - DNA, 1195 bp, Homo sapiens
tcttagaacttcaaaacaggtgattttaaatattacattacaaatatcagtgtaaaaagaacactatagtgttacattgcagattgcttatttttaattttattattatgttatagagattagagtcttgctttgtcacccaggctggagtgcagttgtaagatcatagctcactgcagcctcgaactcctaggctcaagcgatcctcccaccccagcctcccaagtagctaggactacaggtgtgcaccacaatgcctgtcttttaaatttttgtagagatgaggtctcactatgttgcccaggctagtcttgagtaatctttctgcctcggcctcccaagtagcggggaatacaggtgtgcatcacaacgcctggcttttaaatttttctagagatgaggtctcactgtgttgcccaggctagtctcaaagtgatcttcctgactcagcctcccaagtagctgggattacaggtagaagccatggtgcccaactccaggttttgttttaatgtcatctgtaatctttcgtttactatattttgtaattagaatttagaataatttcctcatagctagttattgtgcagctttaatggtttattttttctggaaataatagtaaaacctgattatgtttggtatttaggattcatttctatcagtagaactttttgtagcaaacaaccacaataaaaaaaatacaaaattatctttgatttcagataataggaggtaattaaactgtttcccattacactatctagagtagtgattctcagattttaatttctttaaaattaattttgggggtacttgttaaaaatgcaggttccagccgggcacagtggctcactgttataatcccatcactttgggaggccgaggtgggcagatcacctgaggtcagggtttgagaccagcctggctaacatggtgaaaccccatctctactaaaaatacaaaaattagctgaccgtggtagcaggtgcctgtaatcccagctactcgggaggctgaggcaggagaatcgcttgaacccaggaggtggttgcagtgagccgaaattgagccactgcactccagcctgggcaacagaaggagactccatctcaaaaaacaaaaaagaaaaatgtaggttccaaggcattacttcccaaaatgctgatatagctgctctgtagtaggctggaag

SEQ ID NO: 8495 - DNA, 1089 bp, Homo sapiens
tatttttggaacttttaatattgctgattgtgttactcaacattatatcaccattagattaatctgtcagcttgttatctgaacttacagaagttgatgtatttgtcattctgtatgcatgtattgccctgtagtgtttaaatgctaggcacttggtggatagagagggaattagtaataagatctttgttcttgagtaatttataagtctttctacaatagcaatatgtatatgtttgaaatagtttaaataacatttaaagacagccaaataccattagagtttaaagagaagaaaggttggtgaaacttggagaagaaagtaagcttcaggtaggtcatgaagctagatatggtttggccaggttgagaagaaagagaatacactgtgcagataggaggcctgtcaaaagtgaaagtgaataataggaagggctacctgagtgttagtcattgtttgtatcagatagtgttccgagcactttatatatagactcacttaattctcatagtaactgtatgaattttatgctattattgtccgcattttacaaagaaggtaactgaaggcacagagaaatatagctttgcctgaaagcacactgctagaagttgcacctagtagatgccaggattcactactctgttctgcctgtgcactagcggatgccaataagcacagtgtgttgcggggggcttcaggagatcagcataaccagagttttgtcagagtactggaggatgaggttaataaatagagttcagagcctgctctcaaaactagcacagaccagatcgttggacaatgtgcctgttttagggagtatgcacaggaatggggatcctgggcacttgtttaaccatctgttttaatactctgaaagtggactgtaaatttacagcactgtagaggaaattaagagcatagccagggctattcatcagcaaacatgtattggacatttactgtgtgctaggcattcttttaggtataaggattagagtgatgagtaagagaaagtacctcatttagagcttccttaggtaaacctatatataagctcatttcacagaatcatgtatgccagg

SEQ ID NO: 8496 - DNA, 1029 bp, Homo sapiens
ttaaaaattgaagggtttttcttttttttctctctctcttttaaaaaatttattaaatatttatttctttttttagagatggggtctcgctgtgttgaccaggctggtctcaaactcctggcctctagcaatcctcctgtctcagcctctcaaagtgctgggatttcaggcatgagctaccacgcccagccagggtttttcttttttaaaccttcatctaaaatgtccaatttctggagttgttttatctttatggtcaaataaattaacttgcaaataataggtaggattaaaataggactgaaagtagcactcatctaacttattataatatccacaatcaatttttatgggtttttttttagtatgataacaggttatttttataatgagtgctgggagacttctgcagtttaaaaaataagctcccgtaaagtagggaggtcaaaaaaagccttttattataataatttcttttttcaatagatttttagttattgtaactgatatttgttagatttctgatcttcattttactcatccaagtacggaatcaatattgaaaggctcttctgccattctgtatatctcagattgagttctgttcaatactagtctgtaaaaggatttagtagatattttggggaaggtgtccttgattaaatagatttgggaaactataacaataatcctctttggaaatatcacagtgcatattatattttaaatgccccagtgattcctgtagttgagaagtttgtttaaatgtgtttaacctagcattttctttctctgtgggacatctgttaatatctcaagagacattaggattctgaggaacataatatgggaagctctacattagattaaggtgatttaagaatgtcactactttgtttatatttgtgtccttgggatgttgagagggagtgagaatactaaaatatgtgttataatttcctgttgttttacatattttttattaatcctgaaaaattaatatcagctgaagaattacttgtagtaatc

SEQ ID NO: 8497 - DNA, 1684 bp, Homo sapiens
atgactgtgatactgcaatactaagaaaggcaaatcttgtgtagaatgaaataattttttttgcttaatttttatagtgataatattattttactgttgataattttccttggtacattttgagttcctaaatttctaaccattctacttataacttttagtaattacagtcttttttattcaggattttgtcattaatataatattttaagtaattataaaacaaatttttttctaactaggaagaagcattgcatgcatttattcagccagagattctggatggcccaaatcagtatttttgtgaacgttgtaagaagaagtgtgatgcacggaaggtaaatgccatgtagagattaatacttaggaatctgagataatattccatattcaatagactctccccctttttgttgtttgttttttagggccttcggtttttgcattttccttatctgctgaccttacagctgaaaagattcgattttgattatacaaccatgcataggattaaactgaatgatcgaatgacatttcccgaggaactagatatgagtacttttattgatgttgaagatgaggtaaatatttgttattttaaagtatttttcattaatccacattagtcagtcatggttttgaaagagctgtttgaggtaataacactgatgtcatttggactgtcttcttgatggaaactttttctttcttattttctaatgtggaattcaataaaatgatttacctttgtataagcttttcctgactgcataaattatattttaaatattcttgtttgatcagagtaacttatgatactctttgaaaagacaataaggaactcagctttggaattatttcttgaagttgagtgataatcttatattttataatttcgtcgttattgaaaccagcctgaaggtaagccatactcatgtttctgatctataataaatgcagacaatgcctatgatggaatgaatgaaccaactgaatagcatgggcttaatttcttgtacttacctactattttgtatttactatttgtctgttttccttttttagtttttttaatttgaaactttatttaaataatttaagcatgggatttgaagtgacacatgatgtaatgcttatcaatttcttcccacactttggcctgccaaaattctctggttcttctatccttattcaatgaaagacttacaatattccactctattattttggaaactcttctgattttattatgtggaatacttataatcacttaggctaattatttcaaagtgatttattctcagaattaccctgaagcgttttttttttgttttgttttgttttgttttactggaactgattactatagttataaaaaatgccttttcccaggagttcaaaaataattttaaacattcactaagttttatttagtactattgagtactatgaggcagtttggtgtagaagagcacatgttttaggcatagctagatgtggattcaaattcttgtcctgctacttgctagcctcttgaccttggataattcataaaaccttttgagcctcatttccagatgccatagatgaagtagctgttcattgaatggtaactatgatcaataacattttgaaaagtttaatttaaaataatgtctcagacagttgcgcttaagctaggaaa

SEQ ID NO: 8498 - DNA, 2013 bp, Homo sapiens
attctaggttggtggtaatttttctttcaacatgaaatatttcattacactcttcttgcttgcatggtttataatgataaatgtgctataattcttatccttgttcctctataggtaaggtgtttttcccctctgcctcccctgaagatttttttgtctttggttttgttcagtttgaacatgatatgcctaaacatgggagtttttgttttttgttgttgttttggtttttggtttattgggcaggatgggtatttattctatttggtgttgagcttccaggtctgttgcttagtgttaccagtttttgtaaataaagatttatcagaacacattcactctggttgtttacatattatgtatgtctggttttgtactataatgacagagttgagtagttgcgacagaaaccgtatggcccagaaagcctaaaatactcactctttgacccttgcattagtgggccaaatgatctagattttagttcttactttgctattaataaactgtatcactttggacaaatcatttaatctgtgtgcctttcatttgctacattttggaggaatttggactaggtgctttctgttctacgcagatctagaaatttgtaattctgtttgctagtaccatgtttgaagatgtatccccttttaattaggagtaatgtattgctttgttaaatagtagtaaaagagaagaaaatgttaggacacgtttttatgtaattttatttacaaattatcatgctacatttggatgaaggcactttactttccttcctactttttggcaatgtatttgtgatttgaaactaaaattattgcaattgggaacccttactctgtcatgactgtattatctttgctttaaaatagatatatacaattctaatttggaaggtgattcagtcttctgaatatatcaccattattgtcatctagaagttgctgctattagaattttccaggaagataattatgttggctttgatcattatgatgaaacttaaaaaatgtatagctgttggttggcagactttttctgtgtttattttttttctaaatggggagactgcttatgataagatattcatatcattcagtgatatcaaaattttgtctagtgtatttactacattcaaagcattttaatttaataacatggggttaccacatttcataagttgttcaatgctttaaacacattttggattgcaaataaattctgaaacttcctccctatcaccactgtaattaattttagttttaggaataaaatttgaaccacaaaacaagttttcagacattttcaaaatttgttctagaaatttcactaattaacaatatattgtggtcagtttaaagttattttaagataaattagaatttcttgaaagttatagaaggctctacaatgctttttaggaaaagaataaagaagagaaaccctagtacttgtagaaaagtaaataaaataaagcttgtctgtcataaactggaaatcttctgatgtcaaattgcctttttaacctccttctctgtttctgtcttcctacctgttctttttttgtgatagagttactggtttgcagagtctctagtatctcaaactgtcttaggagttgtgaagtacatgggcttctgaaagaaaagattgtcttaaatataaaaataagtcattataaatgacctcttttttttaaacaagttgcctcttttcttgattttcttccacaaatacttaagtttgcctaaaataatctttagttccaaactttaaagaattgtttgcagaacaggaagctaaagaaataatattaatttattgtagatatagtataattcaggattcattcttaatatgagagaacaaatcagtagatcatgatatcacagataatgcataaatacattagaagatgttccaaataattatattcctcagctcttttgtaaaggaaatagaatttgaataagaaacagtatgttacttcggattttttttatcgac

SEQ ID NO: 8499 - DNA, 1036 bp, Homo sapiens
tatttaaaaataacatttaagttgtgcctgtaactttgatgtctttgatgcaaatcataaatgtgtggattttgttagggcctattgtaatgttattccccaacagactaaaacactgtgtatttatatatgtatatatataaatatatatgtatatatattttttctttctgggggattactttcttttagatgatggatttagaagaggtaatacccctggattgctgtcgccttgttaaatatgatgagtttcatgattatctagaacggtcatatgaaggagaagaagatacaccaatggggcttctactaggtggcgtcaagtcaacatatatgtttgatctgctgttggagacgagaaagcctgatcaggttttccaatcttataaacctggaggtgagcaattttacactatttttagttgttctgtacttagaattttcatgagaaagtttttttttttattgtagaaatgaacataatttaaattttgtatatggtcttaaaatgtagaataattttgacaggttgagaagtactcagcaacagcttggaattaagttctagattacttgcaaagagttgtgtacataattttaaaaacaacaaaaaacaacaaagcttctagcttacggtcttcagtgggttttttcttctccagtgggcggtactgaatcattctggatgctgtcaatccctaaagttatcaattgctctcttaggaagatctctctttctctttctttctctttatggagaagaccttggtccaaaaaagtatattcccataaagtctcagaagtagaggctgtttttcaggtcttctttggaagggtggattcattatcccatcactgtcagcatttacaatttttcgtcatcctctctatttctacaggtcccagggacttcatcttttctttcttcattaaatctatcacattcactcagcacattgagtttgttatttttttttctttgagactgcttaggaaaaccaaaatatcatgcccctagttttcccagagacag

SEQ ID NO: 8500 - DNA, 1035 bp, Homo sapiens
agaaaatttttttctgtaaattttcctgtgtcttttttgtttgcttccttgcagtttgttacaaagccaagtcatttgcccattaaatttttccatgatctggattttggtgttatattcacaaggtgtctttacacatgttcctgtgtctgtagttcaggctaaacttggatttcctaaaggtgaaagatttctacaatctaaagaaaaaccagagtattaatttcctaaagagaaggatatataatacacaactttctgaaattggacaacccaataaacaagatgtttgtgtgtatgtgtatgtccataccgtctatcttagtgtagttttatggctagttacaaagacatttgagcctaatgttcattttattcagtctccaaaacaatagagtccttcagaaactatatcatcacacatgttataacataactgtgtattgtgttgtattgatgcaatataatgatgatgatgaatgagcatgtcactaaaattaatatataataaaactctgacttactatgtaggtgtttgttgaaagctccgagactttggattaccagatggcctttgcagactctcatttatggaaactcctggatcggcatgcaaatacaatcagattatttgttttgctacctgaacaatccccagtatcttattccaaaaggacagcataccagaaagctggaggcgattctggtaatgtggatgatgactgtgaaagagtcaaaggacctgtaggaagcctaaagtctgtggaagctattctagaagaaagcactgaaaaactcaaaagcttgtcactgcagcaacagcaggatggagataatggggacagcagcaaaagtactgagacaagtgactttgaaaacatcgaatcacctctcaatgagagggactcttcagcatcagtggataatagagaacttgaacagcatattcagacttctgatccagaaaattttcagtctgaagaacgatcagactcagatgtgaataatgacaggagtacaagttcagtggacagt

SEQ ID NO: 8501 - DNA, 1033 bp, Homo sapiens
gtattctttttttgaatgttgagaatattaattcccccttatgaggaaattacaaagttaggtttttaatacattttaagaaaactctgctaatattttcttagccacgtttgttctttagtttcttttttactattatggcttattttgtattgaagacatggtactgataatttatcagagactcaagaacaatgactatttgtgtcctaagccaggtggcttaaagaatagaagtgtattgtctcacaatctgagatcaggctgtcaacagggttggttccttctgagtgctgtgggggagaatctgttccatactctctcctagcttctgtggtttttggccatcattggcaaccttggcttgtagatacatcaccccagtctctgccttcatcttcatgtggtgttctttctgtgggcttgtctgtctgtattgttttcccctttttcataaaccactagtcctattgtattagggcccaccctgaagaccttattttactttgagtatcactggaaagaccctatttccaaataaggtcacattctgaggtactagggattaggatttcaaaatgtctttttgtggggggcacaattcaacccatagcagtgaccttgaggaggtccaagtagcagacatacttgtcacacctcccagttttcgttatcaacattggcacatttaaagtattggtgtttggagggaggcttataggaggaaagttggcttttagaagatcacatcaaggtaaacaactagttctatattctttttttgctgttgcttaggaaaattttaattttccttttcttctgtagaaagtaaaatatgaattctggatattttgttacaagattatcctagtttttagagagctcaataatactaacacctcatgtatttcaggctgcttcaggtctaattcaaccataaatttaaatggttgaaattctgattaattgacaagttaagttgggaggtaaggaacaactaggataccatctactatggtgtgtaggcaagtgc

SEQ ID NO: 8502 - DNA, 1033 bp, Homo sapiens
attgcaacaatgatgtctaccttgcaggattttatgagaattagagctgttgcatgtaaaataactggcacagtgcctattatagatgttcaataatgatagctgttactactgctaataacatggaagttattctccgccacttttagaagtaagcaatatgttcctgtgattaacaccttagaaatctgggacatctcagtatataaaataatattacttcaccagtaacagatttcattatcttgctgaggagcatcatagcattcaagcatacattaatagaggtggagggctctactggactaatatgtgattaatattttatatgtagggataaaacagaagaattaatggaattgacagatgagcaaagaaatgaactgatgaaaaaagaaagcagtcgactccagaagactggacatcgtgtaacatactcacctcgtaaagagaaagcactaaaaatatatctggatggagcaccaaataaagatctgactcaagactgactctgatagtgtagcattttccctgggggagttttggttttaattagatggttcactaccactgggtagtgccattttggccggacatggttggggtaacccagtgacaccagcactgattggactgccctacaccaatcagaagctcagtgcccaatgggccactgttttgactcggaatcatgttgtgcactatagtcaaatgtactgtaaagtgaaaagggatgtgcaaaaaaataaaaaaaaacaacaaaaaaagctaaccttctattagaaaaggggacaggggaatgagtaaacttcttttattgcggacaaatgtgcacatagccgctagtaaaactagcctcaaacaggatgctcatagcttaataataaaagctgtgcaaaggccatgaatgaatgaattttctgtttatttcactgatgcacacattacctcattgacaattcagaagtaaatccaacgtgtgttgactcttggaaagcagcaaaaacaggagctgaagaaaagaaattcttgg

SEQ ID NO: 8503 - DNA, 1064 bp, Homo sapiens
ttatgttccagccatgagtccaggagaagagatgaaatcctcatgtaaacatttgtaagcatctaaaatctccactcactgtcatggaacaaagaacaacatttgaggaaagccctacaatcatttcaaaaataaaatacttttaaaaagtatgtgtaaacacattctgttaggttttcaataggttgtgcagcctgaaatcagtaggaaatccaatgagggctttgcctgaggaccagagcaccagcacaaggagacctcctcctgcacaggccctaggcagcatcctttcttttctgttttttctgcagatgccatgagggtagccgttgtgtggtatctttggtgcctagcatactacctagtacttaaccagtgctccctaaaatgcttcttaactaactgtctgaatcatcactgggcatcttattcccatagagggagtccccaggttaccccaaactctgctttaaccttggatgactcttccagtccccagattctatccaggtctctatttttgagcgtgtgtgtgtgtgtgtgtgtatgtagcttatgaaaatgcctcatccctacccctaggaatctcttttccttttgcgggaagacattgtcagttaatcctgttatttgacaaaggcctgtgagaccagagggtcctagagtccatgggcactgatttcccagtggcagcagtgagcccggaggaggcccatcggttggggggtttggggtgggggtgggggtgcagggggtgaccagatggaatgtgaaggccggttgacttctttgttttcatccagaaaagcttgcttttctgaaatggcatggtacgtatttatatgaaggaggactaaggtaaaagagcccaatagcaagatttaggagagataagagacttacagaccaaaactctataggagagattcagagttcccttaattccccaaagtctgtctcattctccctcccctgcctattccatcccctcttgcccatctcagcttcatttcctcactaaagtgcaaagtgaaggcagctgaaaatcagccagatgcagagcc

SEQ ID NO: 8504 - DNA, 1044 bp, Homo sapiens
tgtttcatcccctctgagttcatagaatcctctcccttcctcctctgcccccatgtatacagggatcagcaagacccatttctacctctcctgaatacatcctctgccattttgacttctctgaactattgaaaaaacttccaaactcacttctttgcttcccatctcacctcctccaacctattccctacacagctagcagaggaaacttttaaaatcacaagtccagtcttgcctgtacttatttataactcttagtgcctctctcctgctggacaaagtccaaaccccttggcacaacattcaaagcattccatcatccgatgacccccagctgtctccttggtctcacccacacatgtggctcatccgtgtagtaatacgtgtaaagtgcttaggatagtgcctgacacatagtagatgctcgataaatgtctgtcatcattggttttactattttttttacataccattgctgcatttttatatatgccacacatattaacatgcctgtacctttgatcatgctagtccttctgcctctaaggcctgccttcctcctttacccaccaggggagaccattattgctcatccttctgatctctagaattaatcaaattaatcaaatgtgcctccctattatagcctttacagtactgtcacttttttttttttcttgagacagattctcgctgtcacccaggctggagtgcagtggcatgatcttggcttattgcagtctcgacctccagggttcaagtgaccctcctgccttagcctcctgagtagctgggactacagggcatgtaccatcatgcccagctaatttttgtattttttctggagacggggttttgccatgttgcccaggctggtctcaaactcctgggctcaagcaacccgcctcagcctcccaaagtactgtgattacagcagtgagccactgcgcctggccctatagtcacatttagaaaagatagtcatatacttttttttgtgttcctccccacacacacacaaatgtttctctctctgagggacta

SEQ ID NO: 8505 - DNA, 1064 bp, Homo sapiens
cactaggaaaatatagaaattttaaacttatatgtacttttgtatatcaaatatttaaaaatttaaaatgataatcattacttcaagaatttgacaaacctatcacagtgctagtttttaacatacttctcttaataacatattaagaaaaaagttcatagagaatatttgaataatacagttaatcagctctaactaatctgtatatagcatatgataccctgcaaactgtattcttttcaactgctcatggaacacttaacgaaatttgactatgcccataaagcaaatctcaacaaattagcatacagaccaaattctctgactacaatgcaagtttctctcctaatatacttggagacaaaagtattttttaaacaactcaggaactgttcatactggaaagagtattttacatattttagttcttgaagggtggttacgttaatatagtgtggtatatatgacaattgtgtttgttagaacatctcagttctcccaccattcagggtaattgagtttattctgccttgtctttatgcgtcagaacttttgactactgtttcattgttttctatatataatctctccaaaagcaaatttgggtaataccttcaaaaacaactcaaagattcacaaaataatccacctgagaaaattttctaaatcacatcctatcaatttcaaaatcatgcctaatacttatgaagagttaaactagttatgaacaatttgtgtaactatggaaacatgagagaaacagtttcctggaagaataaaacttcagcaatagaaaactttatggagctagctgaaattagcccacaaaagaacattatctttaaatccttagtaatgttgagtaaattactattaagctatagaaatattatttgagggggcctcttatattttaagggttgaataccttaaagataaaggaggtggtaggaatagcagaagaagttcgcaaattaatcttttatttaaaatgttagaaaattaaaatatgtcacataagcctgcaaaatagagataatgatgttttatttgtatacccagag

SEQ ID NO: 8506 - DNA, 1044 bp, Homo sapiens
ataaaatcctgctgcatcttatcggcagtcatgtcttagggttagtgaaatgttgaaacaacacgtttgcatctctagtcctaaggatctgggaggttatacattgtggatgggtgttgccttgagggttgctttgagggagtggggttttttacacgtttatattttttaggagcatggatttccttatgtaacatcagaataaaggggaaacacactcactggggtaagccctcatgatacatccgaagagctgtgttgccctgtggtaggaactgaggagggctttgcggaggaagtgatgttggagttgggctttgaaggaacagggggattttttccagatgccattttggggggtgagttgggagtaggttgttagaaaataaacaaaccttgtgaaatattctcctgagtaatgaacttaaccctcgcatatcgatacggtttgttgccagtaatgggctactacagatttgaaacttggctgtgaggaattaattgaaaggagtaggaggggggaactgattgacatgaacagtgggctgtttcctgattttggtttggaaaaaggataatgtgggttcaaaatcacagatttggaattggacacacgttggctcagctacttgctagtgtggccttgcacaaattacttgttctctgcaagcctcggtgtccccatctataaatttcagttgtgcccactatataccagacacatggtgtggtgaatgctcagtaaatagcaacttcaaatgtcatgttgcataatagatctttaaggattttctgccaagtcaccctggacagtgacccttgaggaacacccaaggctgaggcatttacttagaatctgagccggattcctggtctcaggcaaacagatagaaatctaggagaggctgaggcaagcccataaagcccttgaccattaatcgctttgaaccacacgtcccttattcataaagtggaggaaatccatcagtaaatacgtaatatttgaggtcattccttacccagtatgaattaaatggaaatgct

SEQ ID NO: 8507 - DNA, 1140 bp, Homo sapiens
ctccgtctcaaaaaaaaaaaaaaaaaaaaaataataagcccttaatgtcaaatatctagtcactgtttggatttccttgattgtctcataaatgttttttcatagttggctggtctagatgagggtcccaaaccagatcaacaggttatatttggttgctgtgtttcttaaaactctttaaatcacatccccacctttcttgtaattgatttgttacagaagcccctgtgtttctcttctagactgcctcgttctggattttgcagttgtatctccatggtgctgtgtattttattctcttatcctctgtatttcctataaatgggaaatttagatgttgacatttgatctaattcagggtttttaaaaacttttttgatgcaaatatttcatagctagtattctaccaggaggcacacaatgtacagtgtcactttttctgtgatgttagtgccattgattgatgatctctgcctgtatctattatttcatgtagtttttgcaaactggtggttctctgatactctagttctgtttttggagacaggtctcactcactgtgtcacccaagctagagtgcagtgatgcgatcccggcttgccgtagccttgacttcccgggctcaggtgatcctctgacctcagcctcctaaatagctgggactgtcagtgcgccaccatgcctggctagttttttagttttttgtagagacagggtttcatcactcaggctggtctgaaactcctgggctcaagcgatctgctcacctcggcttcccaaattgctgagattacaggcgtgagccatctcacccaacccattcctctttttatggagaaggtttctcttagcaactatatggttaacctagcatatagtttgtaaaggaaagatagtttttttttgttttgcatatcattaggcaatcactgattttaaattattgaatgcgtttcagtccattgcagttcctcctcttactgatgctcaaattgtttcatctttggccagtgggaatttctttagttggctcctgtggccttttgatgtgaccctattaatagtcttttatagtttccttgctgtccaacctcttgtgtattctgggagatagaatgaaccatttctgcagagtttggg

SEQ ID NO: 8508 - DNA, 1132 bp, Homo sapiens
taaaaatacaaaaattagccaggcatggtggcaggcacctataatcccagctagctgggagactgaggtgggagaatcgcttgaacccaggagtcaaaggttgcagtgagccaagatcacgccactgcactccagcctgggcaacagagcgaaactccgtctcaaaaaaaaaaaaaaaagggccctcagaacagggaccagaggggtttagacttttataagtgtgtttcttctggtcatcacagatctaataaaaaataacatgttcatatgatgctttagagttgacagagctttttcagtcgggtaactctttgatctctcacaacttggtttgtgcaagtgaggaagcggggaccgggaggtgaggagccttgccgtgaagccatggctgaaatgcttcctgccatgcctgctccttccttgctgcgctctctcttttttggtgggaggattatgtgttaggacaaggctaggggaaaggtgaagtgggggtggaggatggagggcaggtggggtctggagatggtaaaggaattgtttaaactaccagagcagatgggtctctctgcagtattcagagcacaggcagagcaggaagggactcagatgtggttttcagaccagtgaatatttttgtcacttaaagagggtttttttttttttaaatattgattcctgctgttcatcctggatcttctaaatcttaatcactcatggtgaagcttgggtgattgagtgctctgaaaccttaccagctgatccttaggagtcccatttgattctagccccgtgtctctttaactagaaaagtttgagaatttaggtctcagcatgtcctgggagcttattagaaatgcataatatgagatcccatcccagacctgctgaattagaatctgcattttaataaaattccaggtaattagggcatgcgcattaagttttgagaagcattgctataagatgcttcagggaaacttcagggagtgtagctggggtaatttcacatactctttccaggtttgttatttgccttttgacttaccttatataactttttcatgcagaaattagttgtaagttggatttatcagtacttcctttatagtttctatgttttttatttgca

SEQ ID NO: 8509 - DNA, 1048 bp, Homo sapiens
aaaattccagaagctgtttttactggagttgtattacatttgtagaatagtttacctcattctgttttttaaatagttttaccttttctaaattatatacaccaatagtacttcagagcatttttcagttagagtcatgccagcctttgcaatggaattttgaaacttatatcttctgtggggttattcatagagactttccacttattctgtatcactgcatcctgtttatttctctcaataaaactagtgtatctgatttactcactagattataagcctcacaagggaagtttccatgtctctttatttaccagtgtaattgctcagtgtctagaaaacctctggtacatagatgcccaatacatatttgttgaatgaatgaaatttcggtaaccagagactctagcattgcagttgaagatcgatgacatgtcgaattgtttggatttggatcccagtttgaattcagtgcaccttttgagattattgtgcagtcttttgggggaagtgttccttctctgccattgaattgaggatggacctgggaatgttttggtctatgagacttgacagttggtgtgaattcattgtgaaagtggagactgatgacccagcacaggcgttgtcaacccacacattatttgggaaataatgctgtgaatcaaatcccacaactttgattcaacagcatctcccttttaggtcattctggtattaatttttcttttaattaggaaaaataaaatatttctgcaaagaactttgtacctttttttctataattagagatcccttagataaattagcatcacccatttaagcccttttgttttaggcacaaatacccaacctgtgtgctacttatggacaggaatggaatcttcattcatttttataactcttaacaactttggactttttcttccataactagagatcccttagataaattagcatcatccatttaaacccttttgttttaggtacaaatacccaacctgtgtgcactttatggacaggaatagactcttcattcatttttata

SEQ ID NO: 8510 - DNA, 1079 bp, Homo sapiens
tgttttattcatagaactgggtcttggttctggtattgcttattcatttttggcatcttcagattagctggaagggtattgctacactgtcaaaaataaaatacagtgaaatttatgctaatgaaaacatacaccgtgtgtatgcccaactctgtgctttgcaaagtagacattcaatggctatctctggaatgactggattaatgaatgagtgagtggatgattgaatggaaagagactccatcctctgggaaggaaagaagaatggaatgggcttgacagccatactactcttaaagctgaacttgttgcttggctggaaggagggatgaggcaggagctaagctgacagaagcactcagggaattcgcatatcctctttcttgtgatttctgttttagggaaccaacaggtctttggtaccatctcccatttttccagaccacaagcttttatcttgttcttcagaatcctagaattttgccaccaagtttcagcctaaaggaaaatacacttgtagcatgcaagttctcacctcaaaacctgcgtgaaaatagtcggtgtcattgtagagtgatgcagtgcagaaaggggcctgggatgcttcacccggagaatgaaagtcccaaatctggatcccatttgctcttaccatccaccttgataggagtgtgggtgtggcacctgtcaccattctgcttgcatttgtgtgagtttatgccaggcaaacatgagtaaaaccaattccttccaacacttgacacatagataagtgaagaaaattttatcttacattgtgaacacaatggcaggtaagattgcaggaatgatggtttgtgtacaagctattaataaaagttgtgtgttgcatatacaaactttgctttattgtagatggccttttagttcggtgctatacatgtaatattcaaagtgtacattatattaccatgttgtctttttacttttatgagttatttgtaatgtggataataattcttagttcacatcacattttgctgaccactcaaggaaaagttgaactacaaatatttcaaatgaggtgataaattactgtt

SEQ ID NO: 8511 - DNA, 1024 bp, Homo sapiens
tggatggagaatcaagtttgcatgtgtgccctgtagcattcattcttgccgcatgctgggagatgggtggttattaggttatgtcaaagtagtgtttgccttaatacacgatcttcctgcagtaacccaataatggaagtggaagggagggaggaggggaaggtgatgacctgcttatttgaaagtgggaagcatctggaagtcaaggaagctttgtgtggtgttaacagggagctagtaggggtctgtaccccactgctcaccccaggcccctggcaggtttgaattcactaattctagtcctcaggtgaggtagcatggcttagcggtcagcaggacagcatctgggctcagactgcctggctcctggcccactgtttttcacctctgcctttgggcaaattacttcaccttgccatttactgggttgtacagtgggggtattaatagaagtaccttcctcatagggctgttgtaagagtgaaatgagttaacggatatgaagggcttagaaccatgtctggctcatagtgagcagcacgtgaatctttcttgtggttgtggtggtggtggtgaaggtagaggaggaagagtggttttcttagcctctaacctcatgctctgagggtaagcacagctctggtagtcatcattcagagtccgcttataaccctgtctcctcccaccatgtcatacagagacatgtgaacatctgtggggacgtgccccaggcattctttgtgagtagtggttcacggaggatgcttggcccagccacaacctaaggttttcatgctacacctgtcacttgctggttgtgggacctctggcaggtccctagcctctcagagcatgaaatagagataatcaggtgtcccccggcccctcacaggattgtcttgggggcatgacaagataatgaaagtcaaagtgctttgcaaactgaagttcccctgcagaggaaaggtgtgattgctgctgttggcatcatcttcctcattatgttcttgcattcccttggtct

SEQ ID NO: 8512 - DNA, 1053 bp, Homo sapiens
gtgtagaagcacctggctcagtgcaggtgcaggaagaaagcttcccttcttgcgttcttgttccctcccctgtaggaacagcatccatttactaatgagatgaccaggttcaggagcaccacattttttctggctcttgcgagtgcctactgttcatttatgcaaccactgtgtatgagggcacagtatctccagtccctgttctagcagctggggttactttgtggagtaagaaggatgatctgcacacacccctatccccagcatcctggagctgacactatagtggggaggagagaaggggcaggttaataagcaaacaaagaaaataaatgctgtatatagttggatgtagatactctctgtcagctcactcattcattcattcacccattatttcaacgaacagttctaaatacacattatgttcccagcattatgctaagcatggacatgtgaaattggataacgtctgttagcccaggaattatttcaacagaaaaaaaaagtctggaaaatatagatcactctcttgtgttcttcccttttgaacatcctaactctttagggttaaatactcatttgagcaagtacaagcttctaaatatacccactcctcaagccccccgccccactgtccagcaggttttcctgttgataggacagtggacgtatgagtttgagtgtttggcagatgtttgcatgattcttagatcagtgcttctcaaacatccctgtgcgtaagagttgcctgggaggctggttaaattcagattcaggtgcctcactcctaaatattctgattcactgggtctgggttggtgccagttgtctgagcttttagcctgcagtgcaggtgaattggttgcaggtggtctgtgaaccacacatggatgaaacagtgtcatattcacaccaggctggaagaatgtttaacctcttcagtttaaggaggaaactatttcccagggagtggaggggctctgaaattcgaagctacagtgacaagatgggccaggacttttgaacagaacagatctgggatctcatcct

SEQ ID NO: 8513 - DNA, 1087 bp, Homo sapiens
aaaacataaaaggatcagcttttagtcatgctccttcaacttataaaatgtaggttgcctaaattatgtagtacagagtgaggataaagaaaatcacagtattgtaacacattgcctgtaactgctttgcaaaagcaaacgtctcccacgaaatcttagaaaggtgtgtttgagggtgtaatcttggcttgtggtgcaagggagcccaacttgtttttcaagttggtcttgaataagtttgttctttctggaatgctcgccatcctcagtatgacagagttcgcttgatgacaaactcttttactctcctatacataccatggccactgaactggtttgtttatttgcctggggtaaatgattgaaacacattcccctttgcagtggtgctcagcatttgatagatgattcttattccccaggctccttcatggtgatgccaagcccaagtctagccttccagtggcccctgaggccacactgtcccctccgcaacaaacactgagaaagacacacactctcttgggtgtgcacgtagtttattgagctcgtgggctctccgtaatgctgccccactatgcgcatagtaggagaatccgatattggcagaataactgggtctatgtacataaagtagaatgatcgaggctcgatttcaatttaatttgttaatgaaacaagatggatcacattttcccttcccgcacacctctcgggctgtttgagatgaggcacaattaatttatttgtactgtctgtggaggcgtatgccagctaatgtagtgcaagagcttttatctttatgtttgtaatgaagaggggcaggccgctggcaaattgacaaggagtgctgatgactcatcctctgaatgcgagtgctttcttctgaaatcataaaatgcgcgtgcacacgcaagcctagttcctgtttgaaatggacagaacccctttgggaaagttcaggtgcctttgaaacactgcaggggaaagaacaggccagtgaggctgtttctccggctccctggcctgtcttgagggcagaacctcctgctcagtgggggccctactctgggatgggaattcccat

SEQ ID NO: 8514 - DNA, 1033 bp, Homo sapiens
acagaaacaaaaacaacaacaaaaaatgagtctactagaaactgtaaaatgacaactgtggttcacattatagttctgtgggtggggatgctggatggagagactgacgcaggagaggcagctccattgttggagtgagggggttttagaatgaagagctgtgaatcgggtcctgtgggccctggggcatagtctgtggtaggcgcttcgcatctctgaaccttgctgccctgtttctgacatccccttaactaacacccatcccacagtggggactgaggataaagtcagaatgcctaggaaaagcattttttaaaaatattaagtatgaagccattgtgatccatggttctctttgtaataaaaatttgggattaaggccatatataccatactctgtactgtataccgatagttcaaaagacagacaagaaacctggccagttataaaatagaaggtcgaagtgtgggaaatgcattcagcacagaatgaattacagagtgggagtggatctgtgtgagatgccgtagataagaaaattccttttctgttgcacttggcttgctctactctaggaattccctcacccttacatgcaagtttgtatccaggctttcatagtccttgttccttgttttgtttagtctccaaaggccaacaaggaatatccatatctttttttttttaaatcttcaagtatttcatattgtattcctgaaactccacactcattaaatgcttgaatgaattgccattataccactgtttcctgaaaacctgggtgtgtcaggcatctgctgggctggtaggatgatgatgggcaggacacagcccctgccctcaaggtgctctcagttgggaatgagacagaatgcagtgtgaccaagccgtagtagaggtgagcctgaggactgtgggagacctgaatagtgttcctaactgctaaacgtgatttaaaggatgactgagttaaagacagcaaaggagggagctaagggacagttgtagctgcctggagtgcactctgttgtg

SEQ ID NO: 8515 - DNA, 1043 bp, Homo sapiens
gcctggcatgtgggctctgaaaatcagagcagtattccagcccctcccttttcatcagttaattaattaattctatatttattaaaggtgatgtgtgccaagccaggtcctaaagacacactccagtaagacaaggttgctgccttcatggagtttgacactggggagatagacttgttgatgggcagttggcagaggtgctctgatataagggcatggtgctgtggaaacaggcacagggcaactcagcctgacataggtatccaggaaggctccatggaggaagtgatagctctgttgaaatgagaagatggttggaaagatacaaggggtgactctgtgtatgtgtgaagcatctgttggaatatgagtgctccagcactgagagttatgtttaggttacactgtgagtataatttgacttggtctgattgctttgctttgaggtctcattctttctatctatctatctatctatctgtctatctatctatctatctatcagtcatctatctctgtcatctatctacaatctttttaattgtgataaagtacacataaaagttaccatcttcatttttaagtgtacagtttagtggtattaagtgcattgacattgttttgctatcgtcaccaccatccatgcacagaactctttttatctgcaaaactgaaaatgtctattaaacaagaactctccattccttcctcctcctagcccttgtcaaccaccattctactttctgtgaatttgactactctaggtaccgcatatgagtggaatcctactgtatttgtccttttgtgaccggcttaattcacttagcataatctccacaagatgtattcttgtcatgggtgtcagaattgccttccttttcaaggctggataatattcaaggtcccattttattaaaacctcaagcatatgtgaaatattcactgatcaacacattaacgagctctctattccctttactgataagtcattcatgcatttgtccctctctccctctgttactgattacatgttaggtgccaga

SEQ ID NO: 8516 - DNA, 1377 bp, Homo sapiens
tattttggtaatgaaattttgttcgtggttggcagtagggcaaatgcagtcttataaaggagaaaaaaggacaactctatgatgaggtttttggccaccggaggaggtggcttcattcgctttctgctaacttggtctttggggagctgagactttatgtgtttgggctgtgtgtggataggtggcttctgctgtgggcacccttatgtgtaggcagtcgtttttatggattactagaaggggtacgagatgtcctttgacctggttcctaagggcatgtgtgctcagtccctggggctctctctttctctgtgcttgtctttttcattttttgtttttacacagctacgtgtgactcttttcctggtagatcatgggagaggagatagatagcaggaggacaagatgagagggaagttcttgatcaacaaacttatccagaattggatttcagaggagcaggctgtagtttaaaacaaaacaaaatagatagcaaaccacgggaacacctgaatttgttacttttgcaactgaaaatcccagtcagatagaccccataatcaaatagggcagggacaggaactaaccttcactggttgcttgctgtagaggcagagaagtatataacacttaacagtctggactctataaataatatgaatcctggccctgcacttctagatatcagatttttatcgagttaccttacttctctgtctcaatttcctcaactgaaaaggaggattagatagatcttactgtgtaggattattagaagaattaaatgaactaattgttatctggaacaccaccaccccctgcaatgtttgaactgtatctagcatatagtgagaggtatgtaagtgcttatgaactgaaaacaaagaagtgctctctgccaagcactatgctaaaggctccacatacaattctgtctaatgctcttaacaatgctttgaagctggtattatcatcctcactgtatagacaggaagctgagtctgagaggggtaaaatggcttgcacatggccaatataaatggtatagctagcaggtttcaaattcagggctgtctgactctacatcttggacttttctactgagcttttgttccttccttggtagagaccgttatacataaatccagtgaatcagtattgagccccagcgcagctgtattccagccctgtgctaggggttgtcagggatactgtagtgaaccagacagacatggtccctgccctcatggagctatctcaagttcatttgcaggaaactgacctgaggtcaggactgtgtgccaaagctttctgagaagtttgagagccctttgaagatggtcaccttccacttagccttttgaagcctattcttgg

SEQ ID NO: 8517 - DNA, 1027 bp, Homo sapiens
gagttaagcatccctagttcagttagagggctgtgtggttaagggagaaattgagctgagccctcctttcttagggtttctgtcaaagaacagggggacggggagctccagggcagacttttagagatcagagccacaaatgatggaagggactgttgctgggcagaggttcatcaggcctccctcacagtggccctccgcagcatcagagggaagtagagagtgggtggacatttgtgttcttagcagcacaggcctggattcaacgatgtttctctgttctcatccccaccggacccccacctctagagcttcagttcctcactcatctgctgctgtggccttccattttacgtgaaagcgtgtctctgatttattattgttgttatgtattttatcccgttccagtgatagtatgtgtttaaagtggtctttttaaaataaatgatcattattgatggtagtgttctgttggtctctcactaaaggtgctattttagagactgttcaacttgataaatctaaatatagaagtgtgttcgttgggaggatcctagaaaaaaatctggaggaatttacagtctactaatagtggttgccacagggagatgggattataggagactcggtttctattatgtttctgtattaatgggattttttcaatcgcaaacatatgttacttttggaatcagaagaaaaaagataattgtgtcaagtttattttttcctctggttctgagtaaaggatattcattaaagaaaaatgtggaaaatagcaagagttagaaagcaaaccatattgcctgggtccactgtggtgtggtgtttactggcggcggggggttcacccggggaagttacggcagggtcacagtgggcagggaggggtgcaggggtgtttggagagcatctctcccttccacttgtgggtggctgaggtatcaagctcaggggacaggtggtcagagagtggcagtgctagggcgggggaggagaacagggcattcttattataggttttagg

SEQ ID NO: 8518 - DNA, 1037 bp, Homo sapiens
caacactattaaagttcataaacaattgtagcaaggtttctggatacaagataaatacataaaaatataaaactcaattgtaaattttttttttttttttttgagatggagtttcgctcttgtcacctaggctggactgcagtggtgcgatcttggctcactacaacctccgcctcccaggttcaagcgattctcctggctcagcctcccgagtaactgggattacaggtgcctgccaccatacccagctaagttttgtatttttagtagagacatggtttcaccacattggccaggctggtctcgaactcctgacctcaggtgatgcgcctgcctcggtctcccaaagtgccaggattacaggtgtgagccactgtgcctgccactcgattgtatttctgtacttaacagcaaacaacctgaaaatgaaataaagcaattttattcatcatagtgtgaaaaagaacaacatacacaggaataaatgtgacaaaagagcaaaaaacatttacctccaaaactacaaaatattgtttaaataaattaaataaccgaataaattggaagacattctgtgttcatgggttggaagacttaacattgctaagacagcagtacctacaaattgatctacagattcagtgaaatccttatcagaatcccaggatcccatgacttctttgacaagttgattctaaaatttatatggaaattcaagacccagaatagccaaaacaatcttgaaaaagaagaacaaagttggaggactcacactttgtgatttcaaaacttactacagagctacagtctgaatcaagacagtgtggtactgggataaattagacatatcatcaatggagtagaatcacaagtccagaaataaacccttatatttattgtcaattgattttcaacagatataccaagacaattcaataggaaataatagacttttcaacaaatgatgctgagacatgcgaagagtgaagtcggatcccttcctcacatatcatatatcataattaactagaaaatga

SEQ ID NO: 8519 - DNA, 1056 bp, Homo sapiens
catgaaagaccacatattgtacgattccatttatacatggaatcatatgaatcatacgaaatgcccggaataggtcagtctacagaagcaggaagcagattagtggttacctgagactggaggatttgagagaaaatagggagtaactgcaaatgggtatggagttctttctggggtgattaagatgttctaaaactagttacggtaatgcttacacaactctgtgaatgtagtaaaaacttgaattgtacacttaaaatgggtgagctgtatgaaatatgaattatatcacaataaaggtagtatcagtgtatatgctcagcatcatgcttggccttgataaattggtaaatgttagctaccaatgtaatagtaactctctgacttcatgtgcagagcacgtttatagtagcaaagatggaaagaaaggaaaatgctgagagagtagatgaacatacaagttaactcagataccaggtgagggagaaggtgactgaatctgtggcagccgtatggtaggagctgagtgctgcttttggagaaggtgaatgaagttatgtggtgcaagagcctgataccctaaaagtgtctagtaaacctgaatgtagttacccttaaaatgtggttgaacttgggtctggggatccagatgtcactaaacagtatcttcttcacaaaagagtaatcaccgtcagtgtgataaaagccagagtttttgtgtctagaagtcactaaaccaggtaagggtttgtgtgtgtgtgtgtgtgtgtgtgtgtgtgtgtgtgcgcgcactttctttttaaatcactgtatgacaaaggccagagttttagtttttgtgccttttttttttttttttttttaaggcagtgtctgggggaacttatcttcccacagtcagcccatggctgaccagctttgatttttgcagggtgtctttgggcctgaatgtttgagcctccctacaggagatggctagagcctagccctcatgctctggaagttagttctggtaaaagctttgcagttggcgctgtggatgccctgtgctactta

SEQ ID NO: 8520 - DNA, 1025 bp, Homo sapiens
gcccattctctcactggagttaggagtaggattgccggacctggcaaatagaagtacgggaggcccagttaaattggaattgcagataaacaaaaagttattttttagtatgagtatatcccatgccgtggttatattttatatagcaactctacttagtaaggactggcctgattttgcttacctctggggcatggtttcacagtgcctctttcattcagtagatgcttattgagtgccaaggatatgtcagatgccactctaggcactggggatattgcagtgagcaacaacagacaagagttggtgaactcatggagcttacattctagtgggggcgatagacaataaggaagatatgtaagtatgttaggtggtggaagtgataaagaggaaaataaagcagggaaggaagatagggaggattcaaacctgaagaagatgagggattgaggggataagccagacagacatttgcagaagagtcttctaggcagagagcaccacagacatcaaagctcgggcatgcctcatgtgtttgaggactggtgggcctccgtggcttgagtggagtcagcagggaagaggatccagcatggaggtcagagctcagatcttgcaaagcctcatagccctctgtaaggatatgggctttcactctgagcgggagtgtgatctgattaggttttgaaaggatcaccggctgctgggtagtgaaagactgaaagcaagcctgggcccaggtctctcaccgtatcctcaggggtgggccatgggatttgagacctgcatgccatttggaataaaagggcatgccacctggacacagcatcaccttgcaggatctttgatttctttttgcctttttcttcctcatttaagggatacattcctactcaaaaaagggaaggatatgttgcagttatctacctcttttttgctaaccattgtatgatgcgcctggtttaagggacagttccctaatggttcctattaagctttggagaaagagtagtggtgtggtg

SEQ ID NO: 8521 - DNA, 1025 bp, Homo sapiens
gcaggagcacccgagtgggtgtgcatgcacataatgggcccagctgctgtggctgcagcctgtgaatgccttccaagaggccagatgcctggacacatctctcagcagctacttttcctttaagggggatgataactccctggcgcttatccctagtacctctgacaaggaaaggaaatccatcctgccctgaacagcagggtgagcaccttcacctgattcagtctcatgcatctcagcaagggagatgctagtatctaattgtcttagtttcctagggctgccataacacaatagtgtaaactaggtgacctaaaacaacaggcatttattttctcacagttctggaggtgagaagctggaggttgaggggttggcagggccatgttttctcaagtctttaggggaggatgtgttctgtgcctttctcttaaaggctactgtgttgccatcaatgcttggctttccttatctcacagctgttaatttcagtctctaactttgttgtctcatggtattctctcctagggttgtcgttgcattatcttcttgtaaggacaattgtcatattgaactaagggatcgccctactccagtatgaccttgactgatcatatcttcaatgacaccatctctgaataaggtcaaatttgaggtgtactgagggttaacacttcaacaaatctttttggggcatgcaattcaacccataactctcatgttgcatacatgggtgcaggtttaaagaggatcagtaatttgggtatggtcacaattaggcagtgttgggaccaggattggaactcaggccagcctgtccaaagccacttctctttctactaaactttggtgtgtcagaatcacttggagggctgataagaaagactggggcccaggctttatacccttgctcctccacctgtggtccatggaccaactggcaacatcagcatcacctgagagctttttttggaaatgcagagtctcaggtcccaccacatacatatttttaacaagatccccag

SEQ ID NO: 8522 - DNA, 1082 bp, Homo sapiens
ttactataggctaagggctgtagggaacactttaattcactgaataatgtcagtaactctgtgaaatagatattagtgacctattttgcagatgcacaaactgaagctcaaaggggttttcacagatagtgcaatactaagttggagccttggtttgaacctgagcgtgtctgcttccaaagcccatgctcttaggtggattttcagtgatgccagaagatggttggactttcctgaagatgtttatgtgcattgtcgccacagagtcaaaccaagaattgtatggttgtatttcattcagaatcataacatgcttaatccagatgatgcctcagatgatgaaggtgggttgcccacaggctgtattgattggtgattcttaagagtgtaaaaaaaggaaatcacttgattttgttgtggggaggcagaatgtatcacacaatagcttggttgagtttggcttaatgtagatatgtttaatataattagactgagggctgaaatgggcaccttcaggtcactgtggaatgagacagagccctcactagatttttgagtcacttgaggtggttatgccaagccctgttcacatttcacacttgagtttaagtatttgtgaagggaatatagatctttggtttgaactagatatagctcaaaggttacccattcagaacagagcatttcagcctcagggcacctacttagcctctaagatgagaccacatctgaaccagccaagtcagcctgggatgaggttggaggagaaaaattcatgtgataagtcagattacaattaacttttttgttattactttttgagtgaccacaatgtgtgtgggacttcgaaatatggaataatgatgggttttattatttctttttgagaaaaatccagtcactttttttttaacccgaggaagttgaatcctgaagaaggggagatttatctctgccctttgaacttaaagcccataaagtaaaatatatagtttaaaacaattacatgttccccccatctcaccgccgcccgacccttcacagatagtgtttgacaaaacactatttaggaaagtgcctga

SEQ ID NO: 8523 - DNA, 1032 bp, Homo sapiens
actggttttctttcctaatgagtgtggtcattattagagttaagcctttccctgcatggcaagtgtgaacatgtctgcagaccctgaggacaccagagcggcaggctttgaagggagagcagtggacactcagtgacggggccactcacagtctagctctgaccccaccagatcctgtaggttcctggttcttgttcctggtgaattcctgactatcacctttacacagtgatagagcctttatttccactctgcatggaggcatattgcatttgaaagattgaaacccattgctgtccccattgacagggagcatgttaagggtaagatgctgcatttcactcattgctgggcccccatttctgaatctggacttgtgtcttgtaggcattcaagaagtagcagttggaagaatgtcactgatggaattgatgtctctgtgtacacacccccagatcaaagaccatgcttcttggtctagccataggaactctccacccttgagactcagccaggacgtggggcccagcctttctttacctccctggtagtgccctttttagagataggcataaaatgacagtgctgcccctcaagtctaaaggagggggcaaaacgtagcgtcctgtgcttcaccactgggggctggctgggccactgttaaggtctgtggagacttctgtttgcaggagaggttgatgaaaacccttggctttagctgtggccagaggatccaggctttaccttgtatgctccgagccctgtgcctggcaagtctgccacatggttatggaaatgttcctgaggcatgaaggaggcctttctggaccagccgatggggagtgggtgaggaggtgtggaggaggaaagaaagaaaactctttccccattcttttttttttttttttttttttttgagatggagcctccctctgtcgtccaggctgtagtgcagttgtgcaatcttagctcactgcaagctccacctcctgggttcaagcagttctcctgactcagccttccgagtagttg

SEQ ID NO: 8524 - DNA, 1025 bp, Homo sapiens
tttcagcactggggtgcatgagggagcaggtgtcggccacaccaacacatataagttgttgcctgcgggtacagatcaatgaattctttcctgttacttcatggctcagaggaaagaaggaagagccagcaagttaagatcatgtatatgacgtagagctaatccttttaaattacatgttacagcacttcaggttttgatatgcccaggactgaggtccttttaggttttcagaagactgagaattcttaggaacctagacagggcctctgttaaggctgagcaagctgcggtctgccttcctgtctcttctgttgggcagtcacgggggtgctgatgccaggtggcttgtgagccttcccactttgcactgtgcctgcactcgggtggctttttatcaatccgatactgttgcactcacgtcccactttgaggctggatgaagtcaagctgcccgccttgctgccaccctctctcattccagtgtctctgaccacactctcactaggccctctggaaatcccctgtaggattttggaggagcattctgagaacggttctcttgtatacgctcttgttgtcaggacacttgagccaaagttgttggtcatttgccccaggagccccttttcttctgcacgctctttttccaggggatttcagggtaggttcaacactttaagttaccccgccccctttttggtatttgtagtggcttacacgccccaggtaactgaaaacttttgttggcttattaggggcatttccacattggagctgtaatccgtggagatcaggaagacgttttctttgggtgacttttttctcctggtgatgcagtgggccagtgcaaggaggagggtgagtttagttgctatacacaagccaggtacaagacttccagagtgagagggataatttacaccctgtggctatttatttagcacatcttttgtgtgactctccagtgctagggacagggatctcaagatgagtaagacctggttcctgctcttaagatgctc

SEQ ID NO: 8525 - DNA, 1049 bp, Homo sapiens
tctccttggcttgtagatggccgtcttctcattgtgtcctcacacggcctttcctttgtgttcacgcatctctggtctctctttctctccttcttcttccttcttccttctttctcccttctcccttctcccttctcccttctccttctccttcttcttctcctcctccttcttcttcctcctcttcctcttcttcttccttctcttcctcttcttccttctttcttccttcttcttttttttttttttgagactgagttttgcccttgttgcccaggctagagtgcaatggcgcgatctcatctcagtgaaacctctgcctccagagttcaagcgattctcctgcctcagcctcccaagcagctggtgcctgccaccacgcccgctaatttttttgtatttttttagtagagactggttttcaccatgttggccaggctggtctcgaactcctgacctcagatgatctgccctcctgggactcccaaagtgctgggattacaggtgtgagccaccgtgcccagcctaatctatgggattttgaagacaatactgtcacttaatgacttacaacacatcctcatgagacctaataacagaagttctgggttctgtgttaatacgggacttccttttgtgaaacttgtaatacactcaggagaaatgtgtgacaaataggattctactttttaggggcatttggagcactgtattgtccttgggtaataatgcttaatgtggacgatgctacatggcctccaagaatatccctaggcccttgatcctttaagggagaaaaccaacctttacttttcgattgtgtaattgtgatcagaatagcctctgagatataaattccaaatatatctgaattggttttctttaattaagaatacttttggattcaaatcatactggcagcaaattaaagacatgtttcatgtgtttactaaatgttaatgatgggattactttgaagataaattttaacattttaagtaaaacgttcatgtaaaacaaaagtttattatagattggttttaaaatga

SEQ ID NO: 8526 - DNA, 1061 bp, Homo sapiens
aggtgagctccttcattcatttattaaaaccatttattgagcgagacacggaaagaaaaaaactatttcatgatctcacttatacgtggaatcttaaaaaaaagtcatacatatacagagtagagaaaaaacaacaacagaggatactaagaaccagaggaggagagaggaaacggatatgtaggtcaaaagatacaaagtagcagatatgcgtctagaggtctaatgtacaacataaggactatagttagaattatgctagacacttttaggaggattttaactattgtcgtcacacacaaaaaattactatgcgatgatagctatgttaatctgtttcactatggtagccattttattatctatatgtatctcaatatcactttgtaaacttcaaatatatgcagtaaaatttattttttaaaaaaatggctgggcgcagtggctcacacctgtaatcccagcactttgggaggctgaggtggacagatcacctgaggtcaggagttcgagaccagcctggccaacattgtgaaacccccttgtgtctctactaaaaatacaaaaagttagccagacatggtggcgggcaactgtaatcccagctacttgggaagttgaggcaggagaatcacttgaacccaggaggcagaggtgagctgagatcattccactgcactccagactgggcaacagagcaagactccatctccaaaaaaaggaaaaaaaaaaaactatttattgagcacgtacttaatagctaccagatctggggtcacagagaaccagacaggtgctttaccatggagcagtcactattctaggaggtggatgaatagtctgtagataagtaatggcagtgcagcagtagcaggggtgcatgctcagtacttgaggttacaaagcaggaaatgactaactcagtttggatggctcccacagacattggggaggaagtgttccaggtagggtatacaggaatgaataggactttgcaggtaaaagagaagagaaagaacatgtaaggataggtggttccacaaaggcatggaggtatcttt

SEQ ID NO: 8527 - DNA, 1033 bp, Homo sapiens
aaaagttactctcctgaaaatccgttagaataaattctaaaggtcagctttatgcttctactaattggcagttgttctcaatgtgcttgtttgtggactagatcacccccaaattgtgtagacttaaattttagtaaagaaaaaaattgttctagtgaaagtctaagatttctacgtagatttgaacttgaaaagcataggaatgattactgaattcagtccagtggttttcattgagaacctaagtgtgttctaggtccttttgtagacgttgggcacatagaattgaatccagagtttctgttcttgaggaacattgaacttttctgttatttttccagtagatatccacagctagggggctctgcagtagaaattaaacaggatagtgcagaggctgcccaagtgaaaagaatgattcattctgggagtgagggaattaaagcttcatggagaagtgtcattagaactaaacatagttgaaggcagagaatttccataaagttgggactatctgggggaccatgaagagcatcatgtaattggggacatgcggtgggaggtaagactggaggagcctaagggaagggccctcgattatcccactgaggagaagggattcatctgtgggcctaggggcatacatggggttcattcaaatttaccctctggaaagacctcgccagccaggttttgcaggatagctaataagagggaggccaagctggagtcagggaggctaattcctgggctgctttaagagtggggaagagagtcacaggctgggaccaggggccaacccacaccccctggggctgctccgtggcacttagcactcatccttggctggctccctgctttggtgctctctgcctgctctgtagtctttcctactcattgtgtttaaagaataaattataagttctgtccttatgaagtctgaaaagtgttgtgtgccagaacttttcagaaagattttcaatagcagcatttaaaaatcaacttattaaaattgggttctcttaaagtaatg

SEQ ID NO: 8528 - DNA, 1025 bp, Homo sapiens
gcaaacattattctgtactttttcctctacccaccctccgtcttcaaccaaaattaatcttcctttctttcctaccacccacaatgtattttcttgccacttacttcccttagaaaatcaaatccagtgaaagctctctcttctcattttgctcctagatttttgcccattgtctttttctttttcttttttttttgagacagagtcttgctttgtcgcccgggcgggagtgcagtggcgccatctcggctcattgcaacctccgcctcccgggttcaagcgattctcctgcctcagcctcccaagtagctgggattacaggcgctcatcacgacactcagctaatttttgtatttttaatagagacggggtttcaccatgttggccaggctggtctcgaactcctgacctcaagtgatgcgcctgcctcagcctcccaaagtgctgggattacagacatgagccactgcgcccagccgatttttgcccaattatctaccatgaatttgtgcaatagccattggcaccaacatgagacttttcctctggaatttttagcagcttaagatagactcggccaacaatttggtgaccttggatacagaccctgactgcagaggagagatacgaggttcaggacatataggggatggttgaactagaaagggaataatgcgaggagacagtgaaccaggagcagagaagctgggagagtagagacaaagcgtcagtagactgaagctgagattcaagagctcggtaagatggaaaaaagaaaaaaaaaaaggcatttgtggccagagcacagtgattttggaaattaaatttatacattcagagttgtggggattttctcccccgccccccccggggttggggcattttcaaaatatctaggacaaggctgggcacggtggctcacgcctgtaatcctagcacttcgggaggccgagatgggcagattgcctgagctcaggagttagagaccagcctgggcaacacggtgaaaccccgtctctactaaa

SEQ ID NO: 8529 - DNA, 1034 bp, Homo sapiens
ctttcttgctgttttcagaagctcacggtagccacagccaaggtctgggaagcaccaccacactgtgggccatctccatcttcccatgaagatgggccaagccacctctggttcacttctcgagtgtgtttaggtgagtgtatgactcgggacaaaactaagaggaaaggaagtcttcgccgtgccctccgctcggcaggaatacatcttaggcagtagatgtattcacgtcaggctctggatgtgtattgaagaaaaacctgtacttgctgacattgcatcatcccagtagagcagaaagagacctgagcccctctgattatgtccagtcgccggtgactaatttatgagctacatgtgctcccccggggccattttcttgttctcgccctggtggcctttatgatttgatttctgaacaggccattctttccaaactgctgttccttccaataggcagagagcttaaagttcaaattgttgatttaattcttttgagttcaagaacttcactggggcattgctaaagtccacactgctgaatcatgtttgtatcatcactgattccatccaggaatgggcctgtccacagggaaggtagacgtacttcacttcactctgtgttgctccgtgaagccccctgagccactctgctccttcaggacttggctgttagcagtgcaggaggcaaggaaagcctgagcaacaacctcctttgtctgtgtccacaccaagacacttggccttgtcacgggatttgggaaatgatataatctttcctggcatttcccaatcttcagggggagttcttttgcatttatgacatatacgctttctcctcaaagatatttttattaccttgtttttaatttaactgaacgaaaactaagattggagacaatttctcaggcttcagttggaaccacttgccaacagtgtggtgatggagaaattaatgatgggagccagggcactgaatatgtagataaagataattctgtgtgaactgagccaggtctggattttctttataa

SEQ ID NO: 8530 - DNA, 1060 bp, Homo sapiens
ctctgtctgccatctctctgttcccagcgtcaagccttttgtgcagcaggcctaccccatccagccagcggtcacagcccccattccaggtgagtgtccctgaaactcctttttgggagcacagccccacacagctgacagctgggtctggcactttgttcccagagtcaagagatgctcaactttgccacagccgcacattgcccctgacttgcaggatccttgggtagcctgtagctcaggagggccacagggtcccgattcccatcagtcatctcccaagagcttttcagatggtttgtttaagaaacaggaagcctcctcactttcactgaagacgctggattatcctcagaaggcgaagttgctgcagcatcttcctcaatataaactggccaaattaggcagtctaagtctcaaggccagatagggtttcattcaccctttcttagataagtagatttcggtcctgctacctttctttaaaggagagagtacatggaagctcaaagtggaaaacatgaatctgtctagcctacctgtctccttccccacaaggcgcaccccccatccccacctgtgtgtgtagaattactcctttgcactacttgaggtgtacagtataaaagtcactgctctcccttatggattccccaaactgaaaatgctttcacgtattgccctgtgcccgagtgctacggagcattcagagagaatattctatagtgctagtgaccacagtcttaaggaagatgggcaaacacaagaagtgcatggcatgttcgggtctcacaggaagtctttggaagcattcacttctcactgtcctgtcattcttggcttggtccccaagtagaccccttggtgcaggattagatgtcctcatactgcagcccttaaccttagctgaagttggcttaatgaggaacacatgctttgtgcttatttgactgtttaccatcactggggccctctgccagcatctgtcgtctgagttatcctggccagagccggtggagagggggctgttggcatttccttctgggtcatctgtagagcc

SEQ ID NO: 8531 - DNA, 1050 bp, Homo sapiens
tttttcatcagccatgtatggccttgtagatcttctctgtgatctgtaccccagtcctaactttgcactgacagtgacatattgagcagcccttatgtagaagttttggattggttactaaggggactggtgacaaagaggctcagcactcttattcctgctggaagaaggaagtgggtaccattgctcagaccactgtatctacgctgtcccaggagagttgggacaagaagtgcattctgggttatgacatgagctaactgcacacagatttcttattgggctccaaagagtatcactttcattttcagttgggtcaggtgaaattgggtaatacaattgtttcttggtttggtagctgggtaacttaagctgttgttattaatgtgtccgcaaaaaagccttttttagatatttcggaaaatatatgcccttgtcagtaaaaagcaatgattgtctcaaccctaagctataatcgcttttctaaacatactcatcatttcaaaagcattgatcctggactggaaggcctaattccagaattttggtactactgctctttatccagttcaagatggatgagttccaggttgatcaaagagtttgtaatgggaatgtttctgttggtttcttacagtacaacaaacacctcttcgtgcacattgggcatgccaaccattcttacagtgacccattgcttgaatcagtggacattcgtcagatttatgacaaatttcctgaaaagaaaggtggcttaaaggaactgtttggaaagggccctcaaaatgccttcttcctcgtaaaattctgggtgagtaagacattgctgtgatttccgtggtttttgtctgaatggtcacatctcttacatgagcacagtgcagcacagctggctttggatttacactgagtgcaccttcatgtgcttctgcacaattgccaagggagcacggactcacacctgtgaactgtcctcatgccggccttatgcatccacatggtgcacctgggtgacattctctgtccctgccaaagggcacaagggacaag

SEQ ID NO: 8532 - DNA, 1104 bp, Homo sapiens
ctcccgggttcacgccattctcctgcctcagcctcccaagtagctgggactacaggcgcccgccactacgcccggctaattttttgtatttttagtagagacggggtttcaccgttttagccgggatggtctcgatctcctgaccttgtgatccgcccgcctcggcctcccaaagtgcggttctctttatttgtagacagaaagtaggaagttttgcctaaggagttggacattttcctaataaccaattcaaaaaggaaatttaaatgtagatacttattttaaagtatatgatgactcaggtcttagtggttagtgcctgtcaaggtataaaaattagccagtcagaatctgccaaatctggagcaatacggtgcctcacacccgtaatctcagcacttagagtggctgaggtgggcagataacttgaggccaggagtttgagaccagcctgggcaccaaggcaaaaccctgttactactagaaatacagaaattagttgggcgtggtggcacatgcctgtaatctcagctactcaggaggctgaggcgggagaatccactgaacctgggaggtggaggttgcagtgagcctcgcaccagtgattccagcctagacgacagggccagaccctgtctcaaaaaaaaaaaaaaaaaaaaaaaaaagtgccaaaccgcacaaaatataaaatctcatttgagtgtcagatccacgtacctctgcttcaacaaccaccacggcagtccacatttatcatctctcgcttggactgctataatggcctcctagtatatatatatatacatactttctgctctcttccggagtcttctccgagccatggtcagaggtgccttttggaaggcagagctggttgtgccctgtcactgttccaggcctgtctgctcactgtgtcctttggtctcaggatatttcacctctccagctctcctgccatcctctctctcttgctttctctttagcgcttctttctggctctgtgccctcttctctcttatggaatgcttctcttgcctaagcctcgtcttctttcttgggatctgagttgcatcatcattagaagtgtccctgaccctgggggcc

SEQ ID NO: 8533 - DNA, 1049 bp, Homo sapiens
gatacaagtaaaattaatctttaaatataaatgtaaattagtacacaaaactaagaatctttagacttatctttgtaactaattagggtggaagttatgaaagaatgtaattcactaaattattttttaaatgaaacctttttttttctttttgaaaccaaatgttaaactatagccttaagaaatgcttggtagaagtgtcctaatgagacaaatttgtacttttatcctcaaggttaacactaatctcctaatccattaaactcttgaacaggtattacaaaggaagaaaacttcaccccttatccttaacatatatagtatatttaaaaaatataaaattgtattgtactaatgtgatgatggattatttaatgaaaaagaaaaaatggctctttttgcaataagtagatacatactgaaaaaatctaaacttacaatgtttatagtcttgtgtgtgcagttatattttatatggacgaccaaattttttattaagatgagtaaatatttgaaccactgaattttaataacaaaattttaaaattggcatgaatacggaatactgcactgtgagatgcaaagtatacagaatctgtggctgggagaaaatttcatcaaatagacaagtaaaaggctcatcagttttagcatctctgctccccagaaaattgtaagcatcctcaccagcctgtggatacattctttatttctagtgacccaatatgcatattaacctgctataactagggctatatgtgtaggtatgtgtatacatatacacaaatgcacatatagagttaacacatttagtgaacacttgtttagtgtcactcagtttgctaggtgctgatatgtacgtatatctcaatgtgtctgtagacttagatacatcctcttgaagcacatccatttctttagcgtctctcagtaagttacagtacttgtttgacttaggtttaagaggcccagctacctatctctgaccttttcaaataggctcatttgggagattcttttgccaggagagattcaactttccaatctaa

SEQ ID NO: 8534 - DNA, 2053 bp, Homo sapiens
atccccctgtgccagagcacagcctcaccggatgctgcttcccacactgaagtgtcctgtccgaccattgctatctgaggcatccacaagcaggtaggaaagctggcgagccattttacttcctgaggacaattccccagccacaggctctgagtcaaatttctatttggtaagcatcctagcagcaaagtcctgcactcagaccagccaaaaaacagcccccattccaagtacttggtgtcaaaagtccccgaacgacttttaaacccaagtcttcttaaggtttcagtactgtggtggctttagcagttgtttttgtgcaactataaattatttaaatcatctgagatgacagtcaattttacaaaccaggtacatattaatttgtataattttgtatatgctctggtacactacctgaactaacgaagggtagaactaattctgtttgtcagtgttcacacctgtaacattaggaggatatgtctgcattgcttatttctttatgttggtgtttctgtggcaaagccctgcacatggcatttctgaaaagccttaaatctttaagatgttgcatgtagggtatgcagtgcaaaaggctgcctcagaactgtgagcccttttgtaagctggaagcatttctcttactactgttacttttgtaggaagttttcaattcagagctgccaaagtgttcccgtaagcagtgccttagtaataccttagtcatgccgccagccttttcttacaccaattcctaatgttcatttacgaattggcccaatattggaaacaaaacaagcaaaaattgtcttcatttttgttttgtaagcccattttttctccagttctataggaaactgactgcttggtgtaaaatccgaaactggacacaagtcagttctttcaccacactcaaatgtatataccaaaacaaaaggttgcaacttcatagtttactatgaaaagcaaattgtactttttaatgttgccttttaaattcatgaccaaatacttagctatttgtgaatcttctgcactctagcatgaaagtgcctttggtttgagattccagcttagaaaagtgctgccataataacgataatttgtagagagaccaaaaatattttgagatcaccgtaatgcctttggtttaccgggatgagtaaccaaccacaggcctctgttcacaagagcacgacgtggtccccgcctgctgctagtctgtctgccactgggggcctcccaacatccatagcacacttcagcggaaggaccccagaaactgttgtgtttgtgtgtgctgatgacctagtgtgtcatttcacctcgtcacccagccctgcgtccggatgaggggacttctgcacaaatgacagaatctcggctggtggacagatactacagctttctcctcctccttgtgttcgtgttcagtctctgtggagactttcttttccattcaaatgacagtgcgcacttatctggtttacacaatgataccattttgaaagttggaagcctcaaactgagacgacagtgcagaacaaaacaaaagtgagttagggtcgttaaaattgaagtgttcttcttagggcaaacatgttgactccgagtattgtgtatgaatgtgctacgagaaacttccaaagagcaccattcacaatttggcattttcaaagaatgttccagccctcaaaggggcaactctttaaagtccttgttggcttttatccaaaccttgtagaaattgggaaagctgatagaggtaaggaagacgagtgaaaaggacaagaaggccaaacaccagccaaaaagaaactaggaaaaaaagattttctttgctaatatagatgtaaaaataacatcagacatctttgaaaattagcctctaaactcttaatacatacgttctgtgtgtctctacctggcgtctttaagaatatcctctctgggctctgaaattttaggagtgattcttatccactccaagttgtaagtatttgtagaaatttgtgcaaacaaacaaaaactatcaaatgaaaagaaaatg

SEQ ID NO: 8535 - DNA, 1034 bp, Homo sapiens
tacaccttcctgaaaactcaacagtggacttcagcttattcaaaagtgtgtcacttggtcacgcctagctgcagggcagggtgcagaaacaagtgtttatagattttccagcctccctggtggagacaggcaagagagaaggggcctgggaatggtgttgggaattggcttccccaacagtgtttgccacacacactttccagagccacatgcatttgctcgattccttccagaagtgactcccacaacccaatatagtgcttcaactgtggtctgattggcctgaggttgaatgggactagtgccttccttgccaaaaaagccatctgattagtactgtatcatttggggcagctgcagtactgcctcctcccccttctctcctgaatatgaattattgttaggtcaggttttttacatcttgtataggtgcttttttgaacttaagataggacttctctttcatttctgtcaaaacctgtttgttgaatggccccacagtccagcttgtcattagtgacccttggaatctttgtgtgacttgtagatccaatacatgcctctgtgcctttcatccttgtttattcataaattcaacaaacatttttgtttacttactagatgcatggcattgttctaggaacatccaaatcaatgataaacactttagggtgggaccaggctcccgatcaagtgagtgatagtcttttggctaccactctcaggacacagttattcaaacacccaactttgcccacctctccatccttttcgtaaagatgtccgtgttctcagagaggatttgctgaggttaaaatatgaccgatgcctgtagcatctcgagagctgccgtcggtgccagcttcatgggcatgtgacctctgcagtttcacaaggccccatgcttggtttaatgccctgtcaccatcttgaaaacgtaatttttgaacaaggatccctgcattttcattttgtactgggccccacaaattatgtaactggtcctgattcccatactggtaacagatctgcag

SEQ ID NO: 8536 - DNA, 1050 bp, Homo sapiens
aacagaggccagcctggggactggtctcctgtaggattcacaattaattggtaatagacctggaccaaggacccaggtgtcccaaatttactgctgcctactgctttccctcagaatatgcacaggctaataatttttctggctactagagacagccacaacatgctggaaaaagagacagcctcagctgtcttgtggcctcagctgctgcagcttctggcatttggttgtcctgataaaaaggaggcagcaaaaactagaagccttgcactgaggtttagatttataccacattttaatctaattaatgtggttccttttttaaagacagatctcagtctgtcacccaggctagatctagtgcagtggcgagatcttggcttactgtagccttgacctcccgggctcaagcagtcctcccacctcagcctcccaggtagctgtgaccataggcatgtgccaccatacccagctcattgttctgtgtttttggtaaagacagggtttcaccatgttgcccaagctaatcttgaattcctgagctcagacaatctgcccaactcggcctcccaaagtgctgggatgacaggcatgaaccaccatgcccgactggttgcaatttttaaagccccctcagatttgatttcttgtgataatagtccctttacaaaggctttgctctgtttccctctatttttatagccttgattaaattcagatgcctgaaaaaaagagagaaagatccacacagtgagccctctgaaaatccatccagctcttttgcctgcagctttgaccttgctctcataggctgtagcagggtttatccattgcaaagttgcaattaatcatctgaatggctttttcttctttaaatattcctttattcccttttagggcaacagctattttggcatatttaccacaagaacttctaggcacatcgtgttatgaatattttcaccaagatgacataggacatcttgcagaatgtcataggcaaggtaagctaggatgtatgaaagatcttaagttgaaagtgtccccttg

SEQ ID NO: 8537 - DNA, 1035 bp, Homo sapiens
aaccaaaatagcccagcgctaaagagaattcttgagaagacttaactttcttatggctcaaggagcttctcagtgcggatagatgtacctttactttacaggaatgcaggagtagagctgtgaactatcagagtgatctggaccttaacaaaacattcactttttttcaatcaaagagctgcccaggattagtactagaaaccaagcagatcagctagttattactagctgtcttgggagagacttcctttccatatgaaagagaaggagcttagaagcagtccacctgggtctgagtcctgggcctgtctctctacctggctatgctgagacttacttaacctcttgctctctgttgatttaaaccataaaaagaaagcactatttcccaagaattgtgttaggattgtgagggcactcaggaaagttccaggaacacagcctgacatatagtgagtgcttaaaaattaattaaatctgtctttaagagcagtcgagagggaagcagttatcataagtctgtccaaatttggggaatagagaaggtggtaaccagattcttcagaacgaaacttaatgtaacataagaaaaggaagaaaacactgctgccgctggattctctcaggagaattagaggctggcctgttttccaattggccataaaggggctgttatccccctataggtaacacagctcttttccaaccccacaggattagtgggtgtgacttctgcatcaggaaggagacatgagggtagtgtgcagtgtaatcaggttcaaaccctatactttgcatttgcataccctgtattttgcttgagaccatccaagaacagtatcaaacagtccttgacctcaagaattttaaaatcttttataagtctattttctttatgataacaggaaaaagggagggtgcatgggccaaagcaagcaaaagaggaaagatttgaacttggccttagccagggtttgcaataagagtggatgttccctctagaaaagccagggctattcttgagtgggcatgtga

SEQ ID NO: 8538 - DNA, 1049 bp, Homo sapiens
tctgtttgaggataggacaaaaggtttgtgaagagttatagagtcaaggacagaagccaaagagagcatttgctgtgtaacatgtttgcttgttaaccagatcagcaaagcattttaactaatggaccattatttatgatctagaaacaattttgtgaaagcgatttcttagtgatgctgtttactgtgatcacatttgcccttagtataacaatacctaagtgctgaggcgacttgcagtagagaagtaatctgagtggcgtggagtgaatcagggaaggtttcctgaaagaggtgagttttgagccatcatgtgaactagaagttgggatgtgggttattacaagacatgaggatgacattccagtagtttgtacttggtataagcaactgtggacaagagtgacaaattaaaaatggtttttaaggatgattgaagattcgaatgaagatttaggggtttggaaatcaaccaaggctatgttgcagcttagctgataaataattttttatgttggttaggagagaaaattaacagttgataatggattggagataggtagtaaaggaaagagcataaaatatttgatagttataggagaatgaagtgaaagtaaggttattgagaggtaggtttaacagtcaaccatatatcataagttggaaacatttttgagtcctgtgctagagtatattgataataatagcaaaatttattgggtgctactttgtggcagacactgttttgaaccttccaaatattatctcatcttctgattatctgtattttatagatgagggagataagactcagagagatataacttgcccaaggtcacacagctaggaggggacaggtcaggattggcagaatcagtcagtaaatgttaattgagcatctgcttgatgccaggcactgtagtaagtgctgggtgttcaatattgacaagaaaattcaagtcagacctcatctattttctagagattgtcagtttatgtaagaagagccagtgaagaaagaaaaagattagttggagagatttctgtag

SEQ ID NO: 8539 - DNA, 1017 bp, Homo sapiens
aatgtttgtgaaatggttactatgtcttaaatgtatctcaaaattgatgaagcatggcatatgcctgtagttttcacacataagtatcttaccaatttgttgtgcactttttcttcccagccttccccatcttatcctattatttttttaaatatgatttaataaataattgaaatatatactaccaataaaataactcattctctttcattagttaacattacagtgtacagaaaagcattatgatgtagaaaattcaaattgggccgggtgcggtggctcacgcctgtaatcccagcactttgggaggccgaggtgggcggatcatgaggtcaggagttcgataccagcctggccaatatggtgaaaaccccatctagtaaaactacaaaaattagccgggcgtggtggcgcccacctgtagtcccagctactcgggaggctgaggcaaaagaattgcttgaacccgggaggcagaggttgcagtgagccaagatagcgccactgcactccagcctggacaacagagcaagactccgtctcaaaaaaaaaaaaaaaagaaaaaaagaaaattcaaattgaactgtgaatcagcagatctgagctttaattttggttttgttagctacttgatgtgtaacttgctaggcaagtcacttcccctctatgggctttagtttcctcatctgtaaaatggagggggaggagaaattttaagcccgtcttccttgaataggttgtatgccttctttctaattaaaaacatagatgccctagatgcctttcttaaaaactgtattactgcattttacaatattttcttttaatcttccttctttcccttcttaatttagtagagaggataaattatttttggtatcctacatttaccaggacagcatatcttaggaagcagggacccagaaaataatgaatgagtgaatatatgttttatttgagctaatgaaaaattttttaaataaagtaccgtcaaaaagatgttgaagtttcattgaa

SEQ ID NO: 8540 - DNA, 1018 bp, Homo sapiens
actagattattggtaaattggctaagaattccctgaaatgttataccataatgtttttactttgccatcatatactccttccatctttaacataataacccatagttacaagatttattagggtaggcgtgttttaggagcttaattccattccacagttggaaacagatattaagaatccacagttcttaaaacattttcctcatgcttttttatacctttctaggatgatctttgcctaacagcatttagttgcaagctgtgtctatgaacttggcaaagttttaaaaataaactaggaaaagatttttgagaagagagtttgttatgggatttagtcatttaaatacattcctaaaagctgttttttccccactcaaaactagacactggaaggatcattgacatccaggttcaaagaagttactgcttacatgactgatcccgattctgagttcttttgccacatttggttcatgtggaaaggctggctggggctaagacttgcccgtacattagcgacatcatagccagagtgaggacccttagaacagtgcctgtcaagcttttttagtcctagccttttggctgagtcattctttagctcaataatttctactttctaatggaataataacacttgtcaaggtataagcattttttgggaagagctatatggatggttcctaattgaatcacaaaaaatatgcttgtcataaagtctagactaattagaaaactgcaggcctcaaatcctagtgatggaattgtatcaatatattctctacagttataataaaataaccaaaaactaaattgataacgatgagccaaacctaatggtaatttaattaaaaggcaagaataatgacaattgaaaacgaagaccaactaaagacaacacagtttcactgatggcaagtgcccctcttgaaagttacggacttctacgttttgagtatgcatatgtggtaggagcttgcagcattgccagttgcagcaactggatatactagtg

SEQ ID NO: 8541 - DNA, 1047 bp, Homo sapiens
aggatcttgtctttaattatccagaagtttctaaaattaatgaaacaacatgattagccttccattaatattagggcatttattaagagaatacaatcatgttacaaaagtgcaggtttatattgagtggggtgttaccttagaagttctctgtgattctccatttgtggtcatttcaggctcttttggcccatgagacctgcgtgttcttttgcaaatgaggaaacaggttcagagtagtagctttatcttaggatctcatagctgctaaattgcagagtttggacttgaactcctagcaagtaaatatatcttaagtagctttgtattatgtttctcttagtgcatttataaatgcaaatatgtgataattttttttacagccactaggaaaacccactttgtaagtaagcctaagtgaattccttgaaaataatggtgatacatggtactcagcattttgctgatcttcagaaagattgcttctttaacttgagtcaaaagataaggtgtgttttgaacaaaatagctagctacgactgctaggtgctatttcctaaagcagctcaagaacagtgaaaataaatgtaaattacctttcacagtcctgtcgtccccttccccaagtgtgtgggaatgctaatgctgcagcttttctcatattgcagtggtgcagctacttttcaacagatgacaggcgcttgtagatatcttgctgtgtagcaggaatctgaacagcatgctctggaaggattgtcagcattcctttcatggcttttgcttttctagttgcttctggccactctggcaggactgtggaagataggacaagtctgaacttcccttaaaagaactctcatttttattggctttgccaataagtttgtagggtgaagtgtattggttgaatggggaagccaagaatacatttcttttcaaattagtgcggctttcctttgagccagaggcagagtttaaaaatatttagtgcttgtcatatacaccatggaatactatgcagccataaaaaatgatgagttcatgtcc

SEQ ID NO: 8542 - DNA, 1120 bp, Homo sapiens
atttcattttttctatatggataattgactctgcaccattctcttcttgtcccaataccacattcctgtagctttataatacatctcaatatatggtaatgtaagttctccatctttgttatttatgtttgtcttggctaatcttggccctttgtatttccataaacattttaaagtctcagtttccatattaaaaaaacagcgtagattttgattgggattatattgactttaaggatggtaaattgacatcttcagtcttccaatctaggaatatagtatatgtctccacttatttaggtgttgtttaatttctgtcagtatttagtaggttttagaatagaggtcttatatatcttttctatccttttccaattcttgatggttttttaaaaaataatttattgagatgagattcacataatataaaataaccatttgtgtctgttttgtgctgctataacaaaatatcttagactgggtaatctataaagaacagaaatttatttctcaccattctggaggctgggaagttcaagatcaaaatgtaccaattgttttggttgtctgatgagagctgctccctgcttctaagatggcacgttgttgaaccctctatgggaaaggaatgttgtgtcctcacctggcagaaggcagaaagaaaagcaagagagcaaactagcacaatgttgagtgaagccacttttatgaggcccttaatcccattgatgaggaaggagccctcctgcccttatctcctcttaaagaacccttctcttaatagtatcacattggcaaaatctgaattttggaggggacacattcaaatcatagcaccatttaagtgagcaattcagtggcatttagtacattcagtgttgtgcaactgccacctctatctagttccaaaacatttcatcattcgaaagtaaaactccttaagcagtttctctatactcaactattcccctatgccacaggcacaggcaactaccagtttgcattctgtctctgtatatgtatctgttatggatatttcatatgaaaggaatcatatagtatgtgaccttttgtgtctgacttctttcatttgatatatttttgaggttcatccatgttg

SEQ ID NO: 8543 - DNA, 1045 bp, Homo sapiens
ttctattgcttttcattttggtctttctttattttgtaggtatttttcaaatatctggtgatccgtggttatctgtttgtatttataatggaatagggtggttggttttggtagctgatagtggcttcctctagttttttgaggtctgttttctcaaaagagcttttccacagatggtatgattgagaactctgcgtgagtttcctttaaggtggggatatccaagcttttggcttccctgggccacattggaagaagaattatcttgggccacacataaaatacactgacactaacaacagctaatgagcttaaaaaaaatcacaaaaaagctaatgatgttttaagaaagtttatgaatttgtgttgggctgcattcaaagccatcctgggccatgggttggacaagcttgcattaaggccggcagcagaggctgaggacttaaaatgtattctgagcgctataaatgcttttttcttttgtttgtttttgtttgctctctcctgatccactgcctcctccaccttcgtttgtggatgtttggagcaaccatcaggctcaattccagttctcttttgtccctagtacccatgctggatgctcttctcaatcagatctagatactaagcctgggagccaaagtttatgcagaaagtaagactgtcatgagtagctctgctgttctgtgagcaatcttttaattatcttgatttccttatgatttagtccagcttttggatcctgaccttgatgttttctcccaggttccatttaggagattggtaaaaagagctcttgcctcattatagtcctttcctgtccttgttttgcttgggttgctgtttcttctggtatggctattctaccaattcagtcttatctgtttcttctagaaattcttctgtttcttttctttcttcctttttgtttgacttggtttaatggagctattttttccaggttgttatgaacatatattttttaattatgaaaaatttggacataaatcacatgtatctactccccagcttaaataaaacataa

SEQ ID NO: 8544 - DNA, 1050 bp, Homo sapiens
cctttggaaaaatattactaagaaaaaatggaaatgagctagaataaaattatttcacgatcataagtttgtgaattctctcaaaatgaatgaatttatctgacatttactaataaatagtaagttgaatcggaaggctataagctcaattttggtacacataaggaatctgactgcaggcatatctcaaaaaggaatttcaagtagagcatttattttacaattagaataacactcatttgaatatctacattcgtataggcctcttaaaaaatcctgaaactgtagcaagcctcttcatagcaaccaaccagacttttgactttgaatgaacttcatatacctttatagatagttctttggaattaattgtcatatcacatcagcatttgtttgacaccatgcaacagatattcctcattatgttggttttattttttaatgatgggatgtaagattctttcttagaagtttaaaaattattattatacttttaaattattcaaattagtctacattagtctcccttaatcattttttctctctgattctttgctgaacccttctggaatcctttgcttcccttaaaacctacaaggaaagagtcatcaatggggctgtaaaaccacaaggcttgttctaagtaaaatgtctacatgtatgttttattgctgtctctgccctttgtttactcatcttggcatttttattatgaaccacttgtaattggtatgttttaatttttctcctgatactcctctccccccagtgaggggttatttgttcttactcactttttattttttagataatatttattgtgcctgcttagtcctgggcacttgacttgttgtagggggtggaattcagggataagtaagatacgttcctggctttttagacagtttttaagagggaaggaagagggagtgatagacgtgtcaggagtagataggaacagatatttaagctgatgtgctggccagaattgagggtctgagtaaaacatgaagaagacttgggcatcttcttcggggtcttcagagcagt

SEQ ID NO: 8545 - DNA, 1040 bp, Homo sapiens
ttggaaaatgaggattagaacaagtttttcctctgagttaatttcaacaggttaactagattaataaatataccatttctgtaattcctggtactttgtcctagtttccttcaaatcatttgtgtcagtttgtagtatcaacaacagtgtattactttgccatttttgtcactaatattgagtatttaaatcttttcgtttgtttgtttttatttttttaattgacaaaggtatatatatttttcatttacaacatgttttgaaatatgtatatattgtaatggtcaaatgagctaattagcatattcattatctcacatactttttgtggtgagaatacctaaaatccactctttttgtaatttttaaaaataacaatatattgatattaactatagtctatgttgtacaatagatctcttggtcagttttttaaaagctgtaaacagaagtttaatagaaagcaaatctatccaccatctcattaccttaaggaatatttgttgactgcctgtttggtgactatgttagaaatactgctaaatgtttgcaagctatttgtttaattttataccagtcttagtaggtaggtttcattattgttcccatttccaggtaagaaaactgaggcctgagtgcttcagtttatgtcctgataagtaggccaagtcaggatttgaacacaggtctgattccagagccttgtttttaatcctgcttcaaaaaaatcgtatgtattcttttggtattattcatacaaatgtttcatatttttatagacttcaaataattattttagtagctatattctttcattgtgataaaatacttactttattgagtcattccatattccatagtgaatatttgggctctctaggtttttattaattacatgatgcttcattgataacttttctgcatatatacttttgcttttgtggaattatttacttcaagtaaattccaagaagggaatatatagattattttggggtcttgcatatgccttgtaacagatgtaccagttttattataat

SEQ ID NO: 8546 - DNA, 1027 bp, Homo sapiens
tcctaagtgaaaattaaaagctgtgacattttcttaagtcagaggagatttggtttgtttcttagtagcaaaaagaggcagaccttccaggaggtagaccccttcctctgtagatcacaaagtaaaaaaggtacagggtgttagggtatttgtgaattcctggaatgagagaaagcagaaatataaaccagttgggtcaattgatttaggcaaaacctaggtctgtgtaatggtagtaagtgatagcatctgttgttgctttgacaattattctatttttctctgttttattcataattttgaggaggatttaccattttccctaatctcaggctattgaattagtaaatagcataaaatcaaacttgaacaagcttaattttgtaaaaatattcaacaatataaaccctcttttataaatttctctttgcagagagttaatggaagagtagtaggtagccctttgaaaatgattttactcaattatttttgatcccagaggaagactgcttctgtttgggactggtagaaatagtctggcctgaatctagtctgttttttagtttttagaagacagctaccaagtatatatttggggttgtagagttcaaataataaatctctagcttcataatgtttctaagcttctctcccttttaaaatttttggtattagggatggattgataactttaatggaccaagtggtctctttattgcggtaagtaaaccttttgatttatttaatattctatacatttttctgctttttgtatatctttaaatatatatacactatggcttatatatcttaaggtgttgtttttaatttcaacaaaggcagggaaaggaattcttcgaacaatacgtgcctccaacaatgcccttgcagatcttgttcctgtagatgtagttgtcaacatgagtcttgcggcagcctggtattccggagttaataggtatatgaggtgacaatgtcgcttattaaatatatagtaactgaaaagggaagacatagcttttgagta

SEQ ID NO: 8547 - DNA, 1063 bp, Homo sapiens
gggactggaggaactttgctgtggagggagtggtaaaggggggaaggggacagagtagctggggtggctgggcatctctctctctccagtagtgtcataccctctccatgtggcctctccatatggactagtttgagcttcctcgcagtatggcagcctcagggggagttggacagcatacacagtgactgaaggcttcaagggtgagtattcagtgagcaagacagaaagctctacacctttctgacctagcctcggaagtcacatcatgtcacttccacctcattctgttggttctaagttattttcaactctcattgagaagacagtcaaggtgacattgtattgtaggtgggcatgtaggatggagataatatcataggcacctttggaaattaatatctttcctaaataggaaacgttaaggaaacagtcttcttaactgaggtttgtgctgtgtgaggctttctaagtatcaaagcaggacagatccttgacctccgggagcttataatctgaatgcaacaaggaatataaaggtttttttacttagacaattttgtaaatgttaaatacaaagtcttataatttataatatttcatttgttcagaaatttattgagcacagtaatagactttacaccttatattggggccttactatgatgcctaattctacattaaactgatgtcagtcatgtcattcatttcatccagtttacttgtttacataataattctgaatgtgagctagataagcatctgacctgacattttttaaaaaatggctccatgatcttatgttttggttaactagcataactttatctagcttaacttctctaaaccaggtatctatttttaatctgtgtacttctcagctggagacatttgacaacatttgcaggtatttttagttatcacaacagggggagggctgctaccagcacctagaggccagggatggtgacaagcatcttatagcatgcaagatagccctccacacgaaagaatgatcagacccacaatatttatagtgccaaggttgagaaaccctggacta

SEQ ID NO: 8548 - DNA, 1077 bp, Homo sapiens
actttttaagactttcacattattatccctctcatgcctcataactctgtgcgactttgcagggcagccagttctatagatgaggaaattgaggcttaggaaagttatatttgcctaagccatattgtattgagtggcaaagcaaactagaatattgatctttgactccatattcgaacctcttttctctacatcatttttcttacattgccgtcctatcttgcactgcctgctgaggtcagtataatttatgtaacattattacatctctaaaggtttgtatttctttcaaacaccatcagaaacatcaaaattttttgaaacatgagctgaaacatgagagtaacatattgttactctttgagaaaagggaggatcctcctttatcaagttaatgccatgttttatgcttggataagggcttatccacttggcctttgatcttgtgactgtcacctgtaactgaaagagtaagttacttgtctgacaacttgtaagcaactaaagatgtcaaaaaaaaagtttgctctattttgtctgtactgtgatgtatgtaatgaatgaacctttttagattagatgggaagctctagaaattcaaggtacatatctgttttacctacagtatacttaatgcctatcataagtttcaaattaatatggatttgagctttgattaaaaactcagtattaattagctgccatctaacaatatttttttctagaaaatactgtctaacatatctcttgatttgctttccaggttgcggaatatacgttatggttttaatactatccttgtgatcctcatctggcgcatttttattgcaagatcacaaatggcaagaaatatctggtactttgtggttagtctgtgttacaagtttttgtcatacttccgagcatccagcactatgagatactgaagaccaaggattcagcattagaacatctatacatatggtgatctaaatgtacaaaatgtaaaatgtataagtcatctcactttttgtcaagacattaaaccatcttagatcggagtgtgaagtaaattatggtatattttatgtaacattt

SEQ ID NO: 8549 - DNA, 1047 bp, Homo sapiens
acatggagctttacatcttaactttctttgtcaatttaaatgcaatgtataaaaagtttattttgctattgtgaaaaactaaatgtaaaggaaatcacctactttcatgcaggtgtataatcttgaaaaggaaaaatgcttccatgttgaagccagattttctgtagtaaaacttttaaatattattttaaaagaaatatgtatataaatatctctatattctttggaatgatactaaagtctctggtctaggaccataccttatataaaggtataagagaccatgacaatgtctgaaaatggaatagataatgatgccttttatttaaagtggcccacataatatacattgagtactccatctctccaaatgtatttccataatgtgttgaaaacatgctaacatttgtatgatttttatacttctgccgaatagacttagaatcagatgaattgtctgtgtgtcttgcaaaagagttggggacaacttgggcaggcctatgaagtgcatagggagtgtatgtcttctgaatggttttattgttcttgtaatctagcttaaagaaatgttaactgggagggtgctgaggccactcactgcattaattttgtgtgtttagagttctgttgtcaaaagaaaactaatgaataaattagtttgtcattctagaatttaaagttctaagattagtataaagagtatatagattgttaatccccaccagctagactttgaacttaagtcagacttaaagatttgagaaattatttgtgtcatttactagacgtgatttttagttctgtttgattatatttcctacacaaacttcttatttaacaggatagcctactaaattaaatgtttcttatttcacttaactcatttgattaaactgtattctaaaacatttggggtttttccccctattcagttttaatcttggaatatgcatttgtaaattgtgatgtcattgagactatatttatatttgacttggcaacattaacatgtcctaagacttagtgcagagaagcttggcagtacgt

SEQ ID NO: 8550 - DNA, 1043 bp, Homo sapiens
taattccagctactcgggaggctaaggcaggagaattgcttgaaccctggaggtggaggttacagtgagccaagattgcgccattgcgctccagtctgggtgacaagagcaaaactccatctcaaaaagaaaaaagaaaaaaaaagaaaatgagcaaaattaactcagcagtgaggcccagtgctcaaatgaacaatttgatccaggcaaattgctttcattgtgagttctgcaattgattactaatatctgccatgggccaggaactggggagtggtggtacccaagttatgtatttatcatccctggttagccattcctgctttcttggcatttctttctcaggcagattgtaaatgttggtccagaactttgccatggcatacgatttgtatacagaatggcgattagattttagtcctctttcaccttccccctacacattcccttctttctctcatgtgagccctccaagtaaaattcctttttcagggtgaacaatgcaatattgtacctgacaatgtcgatgatattgtagctgacctggctccagaagagaaagatgaaggtacgttgttttcttttgttgcaggtggcaacataaattgacataaccctttgagaaagcaatttgctaacctgttttaagaaccataaaccatgtgctttgacttggtaatcatatctctgaggatttctcctcaagaaataatcaaaaacaaggccaaggttaggcccaaagcataagggaattggtgaagatatgacatcagaatatatactcaacaacatcaggcctttaaaacaatcatgtaaatctcattttaatgggcttcgcaggattcagaccactctctgcttcgattctcaggccagcctatgaggcaggtgtggatacattcactttcctagcaagcaaagaaaggcccagatcctacaatcaggagggagcgacagagtcatggttcaagctcaagttttcttatgggatctggagccagacaacctggactctcagtagacatgtgatcttgggcaagaag

SEQ ID NO: 8551 - DNA, 1040 bp, Homo sapiens
ttgtgcttctaaagagggtgtaatttcttagtgcagaaaacccttattcacattctacttctaataggaacatttttgcacacttaaagtatatgtgaatagttcagggtttatacatgcctacctaatattctgtctacaaaataattctattttgacattactagaaaagggtatttttaacttagcagatactatcataacaagaatgtttatttatgcttgttccagaagtctaacagtggatttgtgctttttgtttgcatgtatattatgttaaatatattgagaggaaatcagtacttttatggaagtaaaagatcaggagattttctgattttcaaagtgttgtatatgacaatggtaaaaacacttgcttgtttcagaaggtgaaggaagatgaaaagattttagatgggacctgacataggagaaaatgtcctggattcatagacagaggattgaggagtcttggcttaactgtttaattttggaaaagtctgtgaacctttctgaatcttagtatcctgtcaaattaagggatcctagtagatgaattctgtaatatcttctaattctaaaattaaattatataataccttctaattctaaaattaaattcttttagtttacacttttggtaaggtagaaattaaaataaaataagatgtcacaaactagtagttcttgaagttttacttaaatgttgaatgttgaccttgctaacctatactttccaaggtataataattgaaaaagatgagcaaatatcctgtatattttggataggactttaaaaaagtatatgggggttcatttgtaggatggtaacaaaattattacatgttcatttccttaagaatttaaacatttttattaacctctttgaaagccacttaaacttctatcaatagaaatgtttttaattgtagaataatagatttaaagtagtttttaacttttgggatgttatattactgtgttgaaaaataatggcatgtttgtaaaacatttgattttataattagatttataatatt

SEQ ID NO: 8552 - DNA, 1048 bp, Homo sapiens
tacatacacatatatacacacacatataattatttccaaattcacctacagtagaaagcattccttttgtatattttatttatacctttaattcattcctatcacattaatatactcttcttatactgtcttaattacctttcagttattagcccccttttttgagcatctcagtgtgctaggtgctgtgggggaaatataaagatcaataagatatggttctatccctaaggagtttatatctagtagactcagatgtgcagactagctcaccatgagacacaattgtgtaactgctgtgttccagtcgagcacctcattgtggaaggcaaatagtgatcagtttttcgggggagtgtattggaagtctttatagaggaggcatttgaaggacatattatataagacttgattaagtagagacaggcgttgagactggtaaaccatgtgatggtaaaattcatgacattgttgtggaaatcagaatggaaagctagtaaagtgaggagtgtagagttagtgtgggaatgttactggaaaagactggaagattggttgagagtaatgtatggaagatattgaatgccatcctaaactttttgatttattcagtggaagatgttggaagattttcagaagagaagagacattttctttatttagtttagagagattattgacaatgggaaaagtagatcagagaatgaaaatattgggagcagggagcccgttataatcatttatatgagagactgagaacagtgggagtggaaaagccctggtgattggaaaaaaggaggtatgaagatgcttaaagtcttagtgactgaaagtttactggtgtcattagctaatgtagggaacattggaagatgagctggtttgggagaaatgctaaagagcttgactattgattaatgcatgttccagttttcacatgtgaatggttgatacctcttttacatctctaaatgggatgtaaactccctgagtgtaagaactaagcatttctgttttgtatttatcatttacattttggagttcacaa

SEQ ID NO: 8553 - DNA, 1022 bp, Homo sapiens
agagtgtagatatgattaaaacaattaaggacacagtgactttgggaaatacattatgtaggtttttaggagaaagacaaggactgtgggggaagtacctatgtttggtgattggcatgatgaagagtcagtgaagaaaagaggttcagagtgtcagggatttgggggatttatcattaagctaattaaatttaagctccaggtttgtcacttacataaaatcctttcaagtctgtaggaggaaggttttcacatgggcatatgtttctgtaggatttccaaaagtaaggcatttcaatattgccatttctttcattctgacttaccctcatgtcatatggcattagagtggctgcaggcatttttgggatccagctaaggggaagttgaataggatttacatttagtttgggaggcatgtatttatgtggtcatgtcacttctgaatatagactagctgttctggtataggaaggatatcaaggaatactggtgttactcactgtgttaacacttagtgttatgacacaaagatggaaggctagagatcacctggtgatatggacgtgtcctataatgcatcacattagaagtacgtggtaggataagagaaacaaaatttgaaatacacggggccagaagctagtctgggaaaaattcttccaaatcgaatggtttataaatgaaagaaaatatatgagtttctctaaatttgacaatactaaaagtttatgacattaccagtagtagtttgtgaacagtttgtgaagactattttgtaaaatataaataacaatttagtcttttgaaaattaaaaagatatttatagaaaaccttacatataattgccatatgaagaggtgataacaaaagttatgcaaaaaatatgtagaagtatactagaagtgtgtcagggagtttattgataacattattgttattttttctggattcttgtgatgtttatgatgctgtgacttttttttctcattctcagtaagtattcacctttgtatctaat

SEQ ID NO: 8554 - DNA, 2021 bp, Homo sapiens
agtctcagatatctttaattttaatggttagaattatgttaaaatattaaaccagcatgtctgaatcatgactacataataaagcctattgatttaattggtttgaggtgggagtccaagcctgtattttctttcagtgtgctcaaataattctaatgtgcagccagaggttaaagaacatgaagttacaaattgagctgtaaattcagagatattctaatacaaatctcaactgtctttttctttttgttttgtttttatttaaaaagttggcagcctaaattcaaaatgtatgtggaaagacagatcaatagtcaaagcaataaaaaagaagtacatcattggatttatagttcctgattttgagatttacttaaagacaatgtggtattagtgatagaatggatattatggacaatagacccacacatacatattcagttggtttttggcaaaggtggtagggcatttcaaaggaggaagtaataatatttacaacaaatgtgctggaaaaactgtataatacgtatgtaataaaatgtatactgactcttacctcacatcatgcaggaaaggtgaacttaaaatgtgtcatagacctaaatttaaaactaaaaaaagctgtaagacatctagaagaaaacatagaacacagaaaacacaaaccataaaagaaaaaaattcataaactggaccttgtcaaaattaaaaccttttgttctttaaaagttatcaataagaaaattaaaagataagggttaacataggaaaaatatttataatacatatatttgagaaacgacttatatattggatatataaagaactcttacaactcaatgaaaagaaaataattgactcaatttaaaataggcagaatatttcagcactgctactacattctagaagatttgaacatgtaccattttcattccttggaaaatagtttggcagtttagcatatgatactggaattctctcctaggtatttatccaagagaaatgaaaacagatatccacacaaaaatttcgtcatgcatgtttatagcagttaattcataatagctgtaaactgggaacacccaaatattcattgcagatgaatggttaaacaaattgtgctctatccctaccagtagaagggaatgaactatgaacacacacatggataagtcttaaaacattaacaaaaacatgacgctaaatggaggaagccacatacaatatattctgtataatatcatttatatgagattttagaaatcaaaaactaatttatggtgtcagaaagcagatcagtgacttggggtagtggtaggagagtttgactgcagaggcacatgaggtatcttttgttggtgatggaaatgttttgtattttaattttgttggttgtcacacagttgtacaacatttgttaaaaataatcaaactgcacattttaaatgggtgtatgcatattttattcaacaagtttgacgaaggaacttaggaacactaagttggacaatctcatgagctttttttgtgatttcaaatccatgttagtggttaagctacaatgtttattgttgaatgtgggtatttactatggaggaagtgtgtgtatggtcttagctcatttacaaataaaatattttaacctttaattgaatattgatatagcatgatgttaactttatgttacagttactttctgctgtgtattactgggaatgtctttcggtacttatatagaaataaggtaaaaaagctatacaattaaaaatgtggcaatagtcacttcaaatcttttatgtgtgcctactaaagcaaacaaaatactaaacttgttttatatgtgttcaataaactgctgaacaagaaaaggatgcaatggccatgttgttagactgttggagtaagtgtaatagcaataacctaccttcctttttaccttcctttctccccctctccttccctttgtttctccctccctccttcactcccttctctccctcttctacctatccttatttccc

SEQ ID NO: 8555 - DNA, 1050 bp, Homo sapiens
atctataaattaccttgggcagtatggccattttcacgatattgattcttcctacccatgagcatggaatgttcttccatttgtttgtatcctcttttatttccttgagcagtggtttgtagttctccttgaagaggtccttcacgtcccttgtaagttggattcctaggtattttattgtctttgaagcaattgtgaatggcagttcactcatgatttggctctctgtttgtgtgttattggtgtataagaatgcttgtgtcttttgcacattgattttgtatcctgagactttgctgaagttgcctatcagcttaagattttgggctgagacgatggggttttctaaatatacaatcatgttatctgcaaacagagactatttgacttcctcttttcctaattgaacaccctttatttccttctcctgcctgattgccctggccagaacttccaacgctatgttgaataggagtggtgagagagggcattgcgacactattaacagtagcaaagacttggaaccaagccaaatgtccaacaatgatagactggattaagaaaatgtggcacatagtgggaggagccaagatggccgaataggaacagctccggtctacagctcccagcgtgagcgacgcagaagacaggtgatttctgcatttccatctgaggtaccgggttcatctcactagggagtgccagacagtgggcgcaggccagtgggtgtgcgcaccgtgcgcgagccgaagcagggcgaggcattgcctcacctgggaagcgcaaggggtcagggagttccctttccgagtcaaagaaaggggtgacggacgcacctggaaaatcgggtcactcccacccgaatactgcgcttttcagaccagcttaaaaaacggcgcaccacgagactatatcccacacctggcttggagggtgctacgcccacggaatctcgctgattgctagcacagcagtctgagatcaaactgcaaggcggcagcgaggctgggggaggggagcccgccattgcccaggcttgcttaggtaaac

SEQ ID NO: 8556 - DNA, 1054 bp, Homo sapiens
agttctgtcctgggtggaactaggctagttgcagtttctcaaatttcttcaatgagatgctttgcttttgtgaaaataagtcatattgtccactgccacctttgtttacttctccattttatcccctcttggttacagaaattagctactacaaataaaatgccaagattttataattttctatgtttaaatttgcaagtaaaaagttctgttgaaacatttgtaagatcaaactaatgtgagataaatatgactgatattcagaagttgattaatctaactttcagtactgtacctattacataaagtatgattaatctctatgtgcaagtatataaacaaattttgagtataaaatcataatctaaaattttgttttatatttaatggagtgttcaaatactttgtaataaaaacaatggatgactaaaatgattgaataagttatcaaatagagctttgtaaactagggttcatagttgcaaataatagaaatcaactctggatattttaagaactaaaaaaaaaattgaaacgttactgagaagcttacagaatcactgagagggttgtagaactaggctcaataaaaggatcagaataggagaggttaggcagcaaataggaccacaaccaaaatcacagcacatcagtctggtgaatacatgcatggctaccaccaaaaatgaacactcacttgcccctcacgttagccaatgaatgctgtctcttccactgctatctaagaacctcgatgttgctaccatcagtttccagaatggattctctgatactcccctctgcatcattatctcccagtttaaagatgggtgtttctgagtagctgacctaaggtcacatactaatactgtaactacaagaatagttgggaaagtgaggattggatattttcagattgtgtggagaactaagctctgtggtctatcaacactcctcaggtaggtaatttctaagtgtaggaaagttcagatgttgggtggccaaaaatgtacagatatccactacatttccttgtgatagcatctaagttctt

SEQ ID NO: 8557 - DNA, 1077 bp, Homo sapiens
tatcacggttaccaagaaccttgatatcaagataaaataaggtgagatatttaccctttctattacctcgaaaagtttgggtaagattaaaaattggtattatttcctcctttaatgtttggaagaatgctctggtgaagctatctcaccttgaagaattattttgtggtcaaattttaagttatggattcaatttctttaatagttttagtatcatttagattttccatcttttcttctaacaattgagttacttgtgtttttctaggaattcctttttttgttgttgttccttctggcatttgtgagactgctgaaagccctattttaatttcaaaatagaaatctttttgaggatttctacttggtttatctctctcttagccactgtttataaattggcaaatacctttagaggaaaagcaggtctgaatttaagctcactactttgtttttctcatcactttgggatcttgtttggcaccccctgtcttcatagctctgaactccaatttcggtctcccagccccttgggactatagatctctactctgttttctggcctcttttgtgcttctcatcctctctgctctgtgccagttatgaatcagcagaaaattcctagagggaaaagagtagcacagaatgttggatttcttttaatcttttctcttaattctgggttcttggccttttatgccctggctgtttggttgtgttttgatgccttgaaatgtatgctatttatattttatttcagcttttctagttgttctagacagaagagttggtctgatacaaaccagtccctcttagctggaaaattaggcaagcctcttaagacactctgaacctattccctcacctacaaattgagaataataccagttccctcaaagggctaattaatatgtgcctggtacttaatacaaatgtgggccaatattatataaatttcaatagtaataaatactaatctgaacttgaagtataagacaggaatgagcatttttttctttaaaaggccagagagtaagtattttagcatttgctggaaacatatgaccattgctacct

SEQ ID NO: 8558 - DNA, 1035 bp, Homo sapiens
agcagggtgaggcatcacctcacctgggaagcgcaaggggtcggggaattctttttcctagccaagggaagccatgacagacggcacctggaaaatcgggcaactcccactgcgcttttccacctaatactgcgcttttccaacggtcttagcaaacggcacaccaggagattatgtcctgtgcctggctcggggggttccacacccacggaacctcgctcattgctagcacagcagtctaagatggaactgcaaagcagcagcgaggctgggggaggggtgcccaccattgctgaggcttgagtaggtaaacaaagcagccctgaagctcaaaatgggtggagcccaccacagctcaaggagtcctgccggcctctgtagactccacctctgggggcagggcatagctgaacgaaaggcagcaaaaacttctgcagacttaaatgtccctgtctgacagcgttgaagagaggagtggttctcccagcacggagtttgagatctaagaatggacagactgcctcctcaagagggtccctgacccccgagtagcctaactgggaggcatctcccagtaggggctgactgacgcctcatacggccgggcgcccctctgagacgaagcttccagaggaacgatcaggcagcaacatttgcctttctgcaatatttgcagttctgcagtctgcactggtgatatccaggcaaagagtgtctggagtggacctccagcaaactccaacagacctgcagctgaggttcctgactgttagaaggaaaactaacaaacagaaagaacattcacaccagaaccccgtctgacgtcaccatcatcaaagaccaaaggtagataaaaccacaaagatggggagaaaccagagcagaaaagctgaaaattctaaaaatcagagtgccccttctcctccaaaggaacgcagctcctcgccagcaatggaacaaagctggacggagaatgactttgacgagttgagagaagaaggcttcagatgattggtaataacaaacttctgtgag

SEQ ID NO: 8559 - DNA, 1034 bp, Homo sapiens
tgggttcttgatggctattggctgggggccacccacagttcgtagaggctgcccatagttttttgtcacatggtcttcctcagtatggctgcttacttcatggagctagcaagaagaatctctagagtgagtctctagcaagatggaattcataatgaaacataatcataggggtgacatcctgtcatctttcttttgataagaagctagtcacaggtgttttctacacaaagacatgaacaccagggggcaagggttaatgctaccttagagtgtgtccatcaccacaagccaatagaaaaattagcaaaagacttgaatgaggatttcagaaaaaaaactatacaaatagcatataaacatgaaatgtgcttaaccttattagtaatgaggaaattaaaaagtaaaggtacggtgctcttttatttatcatcagattggcaaaagataaagaacattatatttatacacacacacacacacacacacacacacacacgcagagaaagagagagaaagtttgttttaagggattggctcacacaactgtgtgggcttgcaaggcaagcaagtaggaagttttcaggacaggctggcaggctgaaaattccagcagggttaatgttgcagtcttgaacctgagacaaaattttttcctctttatgagacctcagtcttttctcataaggccctaagctaattggatgaggcccacccatgttatggaaattaatctgctttactcaaagtttattgatttaaatgttaatcacatctgaaaaatatcttcacaacaacatctatactagtgtttgaataaacaactgagcaccataaccaagttgacaccatcgcacacatctgtaagtgtttaccactatgcctgaaaatattgtagctccttaatgactgttacttgttttcctttctgaatgagactttacttgggtctttattttcaaataaggttataaatctgcctgcatctttccagatatacccacactgctttagtttgaggcactcagcaaagg

SEQ ID NO: 8560 - DNA, 1054 bp, Homo sapiens
agctctaaatatttgttgaatgaatgaatgagctggaaatactttcatgtaatttttaaagcgatctgacattgcattaacatatgatgttattctcaacttgcttaaatgctattaagaattttagttcttacttttacactgttggtgggactataaactagttcaaccattgtggaagatagtgtggcaattcctcaaggatctagaactagaaataccttttgacccagccatcccattactgggtatatacccaaaggattataagtcatgctgctgtaaagacacatgcacacctgtgtttattgcggcactattcacagtagcaaagacttggaaccaacccaaatgtccatcagtgatagactggattaagaaaatgtggcacatacacaccatggaatactgtgcagccataaaaaaggatgagttcatgtcctttgcagggacatggatgaagctggaaaccatcattctgagcaagctatcgcaaggacagaaaaccaaacaccatatgtcctcactcataggtgggaatgaacaatgagaacacttggacacagggtggggaacatcacacactggggcctatagtggggtggggggacgggggatggatagcattaggagatatacctaatgtaaatgatgagttaatgggtgcagcacaccaacatggcacatgtatacatatgtaacaaacctgcacattgtgcacatgtaccttagaacttaaagtataattaaaaaagaaaaaaaaagaattttagttctttggccagatgcagtggcttaagcttgtaatcccagcattttgggaggctgaggcaggaggatgacttgagcccaggtgtttgagaccagcctgggcaacatcttgaaaccctgtctctacagaaaaataggtaaattagctgggcacggtggcctgtgcctgtagtctccaaggccagaggatcaattgaacccaggaggttgagtctgcagtgagccatgattgtgccactggaatccagcctgggcaatgaaatgagaccccatctcacagaca

SEQ ID NO: 8561 - DNA, 1086 bp, Homo sapiens
cagcctcccaagtagctgggactacaagcactcgccatcacacccggctaattcagattacactctttaaagccttgagcctagttgcaaatttgtgacatcgaatacctagtttagttgggtaaattcttcttgtcttgaggtctcaggataacgtgggggctcctgggtctgtaagaaagtgacattctttacctaccttgggccatgaaccctgtacaggtatgaggccagttagcccaatgggcttttttttttttttttttttgatgggtcttgctctgtcacccaggttggagtggagtggtgcaatcttaggtcactgcaacctccgccttctgggttaaagggattcccctgcctcagcctcccaagtagctgggactacaggtgcccgccaccacatccagctaatgtttttgtattttaatagagatggggtttcactgtgttggccaggatggtctcaatctcctgatctcgtggtccacccaccttgacctcccaaagtgctgggattacaggcatgagccaccatgcctggcacccaatggggttttattggctctacaagtcaagtttgattcctaagaaaaaaaaaaaagcacaccattccagtcaaatctttggtaaaataactggcatctccaattgtgttctgttacaaaagaaaacagattcttattacacttatgaaaataactatactgccataagttgagtatactcacaaatagtttctaaattctggagaaatcaggtaagagagaaaatgatatgctctgagctttgtttacaagagtatactttactcaatcgctaaaagttgtaaatagctcaaaaggaaaaaagttctcttaattctgaaaaataaaaggattagcaatgtttaacatatcagctctccatgagagtcttagaagttttttttctctattccaatagcacaatttctaaagttatcagagacctgtattcaagagtacccatcagagttttctatcagattataaaccaccttttgaaaagaatcaaaacaagacaacaattatctgtgggtgacaaaattctcaggacgaccatagt

SEQ ID NO: 8562 - DNA, 1034 bp, Homo sapiens
caatgtgtccaaaacagaatttctgtagttcttcatcctactgaaacctggtcctcttcaggtattttagatttcgttgaatgactccttcgtctgggtagctgcacaaggcagacagacctggcagtcatcctcaacacctctctccctcaaaacccatatccaatccgtccccatatcttgttgatattagcttgtaaatatctctcaaatctttcacttctttccatctccaccagcatcatcctagttcatggtaccatcttcacatttctggggtaccacaagagccccctggtacccttatatccacactggctcccctccaatttgttctccacacagcagccagagcgcatttcaaaacacaactctgttcatatcattttcttccttaaaagtacattagttgcctcctattgatcttaagataaagaccacactccttaataagtcctacaaggtcttgcttgcctggccctgctgccctctcctacatctccctacccagcactccctccctggctctccctgccacactggcctcagctgagtctcagtctctagggcttgttaggctccctcccaccataaatctttgtatttgctgttcctctgcttagaatgctcgttcttcctgactccacctaccgaattcctgctttactctcagttctcagctgagttgtcactttcataatcttcaggaccaggtccaaccccattttataaagttttaaaacatgtgcctccttcaagcctttatcatagtttcaattttacatttatttatgtaatcattaatgcttactttctctatatgatgatgagctctgtgagtgttggaaccatgtctggttttgctcgttactttatcctagcaggtatcatggtaccatgttactgacacatgccacaaatatatgttgaacaaatgaatgaatgaagatttatcatctgagtaaccagatagatgatggaaccattcagtggaataaaaatgagaagagaagtagatttgaggaggaaaatga

SEQ ID NO: 8563 - DNA, 1074 bp, Homo sapiens
gtataacattccagatctcttgcttacattatgccaataggaattttggttaggaccctgtcttctggatttctatcccgccaaatggctgatttttcactttgcctgaattatatctttcactcctttggtcttttaagagatttatttatttatttttttccacagaccatattgcctaacaaaatccctcctattttcatggaatcatatggggatacaaagtggtgtcataatgtcatatccattattatattttagtttttacaacaaatgtgccaggtaatcaaatgtatattattatccccagtttgcaaatgagaaaagaggccaagagaagttaagtaacttgactaagcttatgcagttagttactggcagagctggggctaggctgaaggtttcttctctgctagtctgtgtttggttgtatcactttttggacttgggaaggggcatcataaggactgcatgggatagggcttgtgggattcaccaggtgacagaattatcaggatgagagaacctgccaccacatacctgtaccatgtaaggttgaaatgttcttagtctggggtagccctcacccacctggacccagaggtgagggggtaggctggcccctgcgcccagctatgcaaagattagggctgcagcaagccctctgtggcagcttttaccgacagtccagccctgctgtctgctgtgttagcagggtggtgggtatctggccagtgcctcttagttaaccttcccttcttcattttaagaagcttttttatctgcttggtcctggagctaggctggctctttctggctgcagaaaggggcttttaaagtaaccctcttagtttatttctctctgggccaatccagccagatctttgcttggggcaagagggaacctcaagggtagaagtatgtgagcaagaaggagctctcccctcacataccagtcaagaacgactggacattttctgcctccccaaccccattcactttctatttgtaatttgggatctgtgtgtgagagctctgaataggttgccccccatcttcccctcctttctcatt

SEQ ID NO: 8564 - DNA, 1090 bp, Homo sapiens
gacttcctatggtaaaccactctgaggtgctggtgggcctgttcactccagccaggcaaagccttatttggatttcccatggttggaatgaggaagcctgtgtgcatgtcccaggtgtagcttggcttgctgtgtgacctcagttggtgtcttattcttttttttgatttctttctttcttctttttttttttttttcttttagaggtagggtcttgctcaggctgaagtgcagtggcataatcatagctcactgtaaccttaaattcctgggttcaggcagtccccccacctcagcctcccctgtagctgggactacaggaatgtaccaccatgccccatctaatttttctttttctttttttgtagagatggggtcttgctatgtagcccaggctggcctcaaactcctggcttcaggtgaccctcttgcctcggtctctcaaagtgctgggattgcaggtgtgagccactgcacacagcctctgttcttcttttgaacttgtctctccattgtccatgttaacccgtctgtgcttctggctcctcatctgaaaaatggagataacaatagtgaactacctcatggggttattttgaggactaaatgtaaagcatttagaacagtgccttatacacagtaaacacctaagaagtgtttctccctgtctgcctcctcttcctcctcctcattattattattactacaagggggtaatctctaaggcccccctactagttctcatactctgagagtataatgtgagctcctccaagaaggctgcctggacattgcccaggagctgtagtcttagccctgtcaagttgatggacatatttgtgtagatgagattcctattgccttctaggtgaggcctaaaaggtagatgtatccaattaatcaggtggaggcttgggaccttgtctgagctttgttgaaactattttggctccagaattgaggggcggaacaaaggtctgggtggggcccgctctacctgatgcaagtcgttctgggctatccagccagggtctcaggtcctggagaggattcagccctgctctgtgagtcctgaggtctgttctgccta

SEQ ID NO: 8565 - DNA, 1033 bp, Homo sapiens
tctggctgtagttttttagaggaggtaatataagagtcaggtcttgcagggtgagtagaaacttgccaggtagagaagaagaaaagaggtttctaatctgagggagaacttcatgttcaaggctgcagaggattgtgaaagagagtggtatgttcgggaaatggggaggttgaatttatctgaggtgtagagtgtgtttgtggcaggggcgctaggagttggggaagatggacaagggagatgtgtgagaagggaggctggggccatatcacggaagctctctcatcttagcctcaggagttttgacttatccagggaacggtggtatggggggcgcaactgaaggatttaagcaggggagaaacatattttaatatctatgtagaaagccctaatacattcttgggggaatgtgaagcattggggtttttgaaagtcagtgtggcaacatctattgaattacaattcagaacatatgaatgagagtgttgaatgttgcattgtttatagaggtcaggagctgaacaaaaagtgaatgcccaggaatgggaaaatggcttaataagttgtggaatatacgcaatatggaatagtgttcaaacattggaaagagtgttttaggattctgctggaggacttgaaagatttcaaagttaagtaagaagatcaaaatgcagcaagatgtgtatatactatggtcatatttacaaaaaaagcaataggtcagaaaaccttataaatgtatatatacttagataaaagtctgtgtaagaatgcatgagtatggagaaaaatataaaatgatacttactaggttaaagttagttggctgagattggaaggggtgggcaaatataagggaatggtaataagatgcagaagattagaagttgtctgcaatcaaaccgtacatgagatgtgattctacttaatataaaattaaatatgatttcataaggatatatgggcagtagggtgctgtgatttttggatttaatgggtttctctctctctctgtgtgtctgtatacata

SEQ ID NO: 8566 - DNA, 1005 bp, Homo sapiens
tgtctaaaggtgtggtcactggtaaatttcagttgattgttaccatgtgggaaaggcatagacttttaaagataagacaaaaattgtaaacttcatagaaaatttctcaatttataaacattatcaaataaacaaaagtacatgtagtccaagtgacctttcactattgtcatgtattcattcctgcttcactgcccaggctgggtttctccctgagccaaggggtcttcctatttgtttcatcctgatgaagatgcattgtatagtccactctgagattcagcagatatcttctgggcaggaagccagagctctgttctttggtgggaaatagccctccaacttcttgccattccctggaaacatttataaatgagtcactggaatcctcaatttaatcttcctaacacatcccaggtgactcagactgtagttcaaataaatgtgcagcaaaattaaaaggcacttaggtggttgtgttaataattgctgtgtcggcagcaatagcaactgaatgagaatgagggggagtgttaggacctagaaggaatcttacagcaaagtgggccactgagctctgcagactcacccaaaaccatggatatagggaggtggcctggaaggggctggggactccagtgattttcccaaaatcagaggataaggcaatcattggataaagggaatcagagttcttaataccttggctaatctgtttttccagtcctgggtggttggatcaagagcttgaattatctaatggtcaaacctgggctgtggggagcaacattgcccagagggaggcattaccctcctgatagaaccaaaacccacatctgtggaagcattgctgggaataagtcagaggctgagagaccagaagcaacttgtaatgtagaaagaatgggaactttggagtcaggcagacctggatttgattctagcctcaaacagttacttactggccataagaccaggagcaaatcacttaacatttgaatcctc

SEQ ID NO: 8567 - DNA, 1028 bp, Homo sapiens
ctagatattcccccactctttttgcttccaggggtgggagaggaggggcaccttgttccctgctgtgtatatgctcaggaagagggaagaaattaatatttatcaagcacttagcatgcattgtctcagttaactggtaaacaggtctaggtaggtgcacagctcacatttagtttcaggttgctctatcagcagatctcaatattaaagcacttcgtttattcatttcttttcagccaacatttattgagccctgtgccaacctctgtgttgtctgctatagatacagagaaatagaaaacaagatccttactctcgaggagctcagagtctagtgtgggagataaatacctaaaagctagttatggccaagtgtgagaagcttgaggtcagcccaggggccctggttgcacaggggagggagggatggactgtctctgcttcaggataattggggaagccttcatgggggaggtgacaataggcaggagcaggaagtcacttcaagtcacaagtaagagtatgagcaaggaggagggggtatagctcagaggtagagcattgggctgaagattaagaatatgagcaaggacacatggacacaaaatagaaatagcatactcattgctcattgtgtggggagctggggagtgattttattctgccagcacctctctttcctgttcatcccccttgccaggtgttgaatttctcagtagcagaatccctgtctacttttacaatatgttctccctctcttttcctcttttttccatagtgctttctatagcaccttgctgaatttatggatgaatgaatagttcttgctgttctaaggttactctagggatctggaaataataaagaccattattaagattattaacagctttcagatgacatctatcttagtgatcaaggtgcaaataaagctagctgaccaagagatgtggttgctatgttgaccaggtgaccaagatggtgactgagatgccaagtggctaacatgatgatcaacccaaattgtc

SEQ ID NO: 8568 - DNA, 1048 bp, Homo sapiens
ttatttggcaaatgatcttaggaaacagtgagacactgggaaagtgaacaaggtaagcagaaaagccagtggaagttgcattattgtgtgtgcgttactgctgtgggcacttgggcctaaaccccaccaggaccgtctgggaggttgatgtatatgagaacacaggtaacctccaggatgggctgaggggataccagaggggcaataagagcttatcctaccctcataaactctacagtggcagaaatcttgggggatcaaggtaagaggaagcactgaagtgagggatgaaaatgggcaacaaaagtcaaacttagcttttggtaattttgcttgggccacccttgggatgtctgatggaatcgcagattctcagtgctggagtgggcattaccagtcatgggatttgacctcactcccattgaggagattccctttacaataacccatgtcctcagatttgtcctcagggttggtctacagccactgcttagatacactgcctgctgaggctgactgttttattgctgtacacctctaatcatgaaaaagatctttatgttgattcaaaatttgacttgttgggtcttccacccaggagagctagttcttttccttgagccctcattcttccttaagagatctactttggcttacacattgcttttagctttgcaatcccttcctgtccctgccctaaaagctgtggctctttggaaacactgtatccagctcccatggggctcctgtttataatggtctaggaagtaacttaagtggttttagaatgaaatatagctgaactgttaggggcaatttaagcatatggaacagaaagaagaacatctactcaacaaatgccaaataagcactaactttgtgtgtcagatctgtggccaagagtctgttagaagatatggacacacaatgataaactacaatgtccaggataaaggtcttgaaaggccatttctagaaggagcagaatgaggtgtgccatgcttaccaaagcctgaaggactacctgctctgagcattgcaatttcat

SEQ ID NO: 8569 - DNA, 1116 bp, Homo sapiens
agttgaatatgagtggtaaaaatgggcatctttgtcttgttccagcttttaggggtaatgctttcaacttttctttgttcagtatgatgttggctgtggatttgtcatatgtggcctttattattttcagatatgtttcttctatccctagtttgttgagggtttttatcatgaagggatgatacattttgtgaaatgagtttttctgcatctattgagatgaccatatggtttttgtccttaattctgtttctgtgatgaatcacttaacacacatttattgatttgtgcatgttgaatcatccttgcatttccgaaataaaactcacttgataatggtgtattacatttttgacatgctattgtattaggtttgctagtattttgttgtgaatttttacatttatcttcatcagcattattggtctgtagttttcttttgttgtgtcctgtctggctttgatatcagggtgatagtggcttcacaaactgagctaaggaagatttcctcctcctcaaatttttcgaactgtttgaggaggattggtaccagttcttctttgtatgtctggtagaatttggctgtggatccatctggtcttcagcttttttggatgggagattttaaattactgactcaatgcaactatttattattggtctgttcagaatttctacttcttcctggttcaatattgggagtttgtatgttttcaggaatttaaccatttctctaggttttctagtttgtgagtgtatagttgttcatagcagtctctgatgattttttgtgcttctgtggtatttgttataatgtctccttttaaattttgattatgtttatttgagtcatctgccttctttaatttttgattgtatttatttgagtcttctctcttcttttttttttttttttttggaggaagtcattttattcaaaatttttacatactcactcaggccaacaaatgtttcaagaactttttacctgccaggcactatgctgagtaattaggttaacataagtgagacaaactgacatggtgctttgccctcatggggtttacaatcttgtaaaaagacaggtttaaatcaaataatcatacaattaagtac

SEQ ID NO: 8570 - DNA, 1080 bp, Homo sapiens
aggatcagctgcttaagatcacaaatgatgttgcccttaaaagtatgtttgagacaacttcacatctccatacattctggattaaagacaaagtggaacatcctgagattgccacgaaagcactggaaagcctgcttccatttccaacctcctgtctttgtgaaacagggttttctgtagtgacagcagccaaacaagattacagagtagactggacataagcaacacacttagggtgtcactgtctcccatcacccctagatgggaccgtctagttgcagggaaaacaagctcagggctcccactgcttctacattatggtgagttgtacaattatttcattatatattacgatgtgataataataaagtacacaataaatgtaatacacttgaatcatctcaaaaccaccaccacccccctccatggaaaaattgttttccacaaaaccggtgcctggtgccaaaaaggttggaaactgctgctttaaacttttaagttgctctgataaacttgataagcaaagaaaggcataaagaagagtcagtacatgaccattttatttagccatttgctgaacagaagtgcctagcttttttcactgtttttgttcaaagatagataattctgtttgttagagagtttttattaggtgactagaaaaaaatctttcaggataacatctacttattataagtaagctaaaacatttaatacccaaagtgcttagtaataaatatttatgctatctcaacatcaggcattttattttctattaggtaaccacctatggcataaattctcaaaagtcatagtaaaattagtcacaattagataaatcagccctgagtataatagcatctgtattatgggtttttgtgtaaattattaatttgactgaaacataactaaagtatcctggacatgcaggggaagaagacaagaaaattaatgaagaactggagtctcaatatcagcaaagtatggacagtaaattatcaggaagatatcggcgacattgtggacttggcttcagtgaggtagtaattaacttattttcattgggaagataattagttt

SEQ ID NO: 8571 - DNA, 1031 bp, Homo sapiens
gcatgactataaccatttttgtaaagagtaagagttgtataaaataagaaataaatacagtactcaacttcctttcatattagcatcatcaaccctctaattcaccttatgggggaaatgcttctttttgtttgtgatagctattttatcatttccttcatatttttctcttataaaaatgtatttgatactgtgatatgttcacgaaaagtattctttaattattctttgttatagtagagctgttcattatggatatttctgctgccagtcacaatctaaattaattttggcaaaagattgggtacttagtttcctgttactgagttagctctactcttttggaccaaagcaacatgagagcaagtacttttcacacttgttaagatggagttataactgtcatacatttggaatattatgatcccaagtagtctttttataatttggattgtatcgtatgttagatttttgataaaatttggccaatttttacagaagaaattctctgatcatttagttctgtctatttagaaatatgtaaaactggatttttttttaagtaatatgtgaccaaagttaattttgtcccaaaggtctaaataaagagcagtttcccatatttggctgtgatacctttatcctcattatctacaaatgaggaacaggcttactgataagaagctgaaacaagaaattctcttcattttatcccagtgctattttattgattaattactaaaaagtattactttctaattttattgctgtttctgttggtgtgagattagaatcatctgactgctattaggtggttgatttgtatagctgattaacacaaattgcattatgagctagtaaatggatctttggataatggggtccaaattcttaatgtttataagtaacaagttcaaaggctttagtcacacctgtttgtgagctgagctattatacatctacatacttaaaggatgtatttggagtgttggattttttttttttttttttttttttgagacggagtctca

SEQ ID NO: 8572 - DNA, 1048 bp, Homo sapiens
tagtaaaatattgaatcactttatagtagacaatacatatgacatttaacaaatacttggtttgaaaaagtttggctttattcaacaattttagtttgcccactgattttcaaatgtctgtgggattgcttataactaagtagaaagtgaagactgatttttacttaagaatgggatagagatgagttttatggtttttaaaagtattttcagttcattatttaaatgttgggttgttgatatggtcttgtttctgataaggaaataggagcaacttgttttaaaataactacactaaaagactttcttcatctccgtatagagaaatccagatttcaattaattcatttattgggtgctaacaaaattcagggttagagtaaatttaggtctgttggtccatgtggcctggtttcctagcacccattaaacataatgctatcttttaagcctgaacatgtgggttttttaaatcaaattggaaaaaaattagacaactgatgtcatgctgtcttggtatccatactaaaaaagtatcaggaaaatagattatttttgtgctgtgaaacactattcagtggaaagtttagtggcaacttttccatatcattcatgacttaatacctgaaatgcacttttaaatgtttgccttatatccaagtgtttacttgtatccatgacctaaccgtctattgaaaagaatgtttgcagatgcagattgcaatgttgtttgtattcataggcaaaagtcctcttctctagtataattttttaaatctgagagaattgaaggtacagaaaaaaattctggagtgcctgaaccacagtttgagagcacaaaggtcacattctttcagtaaatttgggggaaataaatttcagctacctggttagcttcagtgactacttacacacagggctttggttccattacttgtttccaccacagccacatcctaaatacttggaatatccgaaaacaacttctaaaatcactcaataaaagtattcacttctaaccaactcctcctcctttatacctgctctg

SEQ ID NO: 8573 - DNA, 1087 bp, Homo sapiens
tcccagagattctggtatgttgtgtctttgttcttgttggcttcaaagaacatctttatttctgccttcatttcgttatgtacccagcagtcattcaggagcaggttgttcagtttccaagtagttgagcggttttgagtgagtttcttaatgctgagttctagttggattgcactgtggtctgagagacagtttgttataatttctgttgttttacatttgctgaggagtgctttacttccaactatgtggtcaattttggaataggtgtggtgtggtgctgaaaagaatgtatattctgtggatttggggtggagagttctgcagatgtctgttaggtctgcttggtgcagagctgagttcaattcctggatatccttgttaacttcctgtctcgttgatctgactaatgttgacagtggggtgttaaagtctcccattattattgtgtgggagtctcagtctctttgcaggtctctaaggacttgctttatgaatctgggtgctcctgtattggatgcatatatacttaggatagttagctcttcttgttgaattggtccctttaccattatgtaatggccttctttgtctcttctgatctttgttggtttaaagtctgttttatcagagactaggattgcaacccctgcttttttttgttttccattttcttggtagatcttcctccatccctttattttgagcctatgtgtgtctctgcacgtgagatgggtttcctcaatgcagcacactgatgggtcttgactctttatccaatttgccagtctgtgtcttttaattggagcatttagcccatttacatttaaggttagtattgttatgtgtgaatttgatcgtgtcattatgatgttagctggttattttgctcattagttgatgcagtttcttcctagcctcgatggtctttacaatttggcatgtttttgcagtggctggtaccggttgttcctttccatgtttagtgcttccttcaggagctcttttagggcaggcctggtggtgacaaaatctctcagcatttgcttgtctgtaaaggattttatttctccttcacttatgaagc

SEQ ID NO: 8574 - DNA, 1029 bp, Homo sapiens
tttttaaagctataaacaataagcgatgctaaaaacgtttaaggaaaattatttccggccaggcacggtggcttatgcctgtaatcacagcactttgggaggccgaggcgggcggatcacttgaggtcaggagtttgagatcagcctggccaacatggtgaaaccatctctactaaaaatacaaaaaattagccaggagtgatggtgggcacctgtaatcccacctactgggaggcagaggcaggagaatcacttgaacctgggaggtggaggttgcagtgagccgagatcgtgccattgcactccagcctgggcaacaagaatgaaactccgtctcaaaaaaaaaaaaaaaaaaaaaaagagtcaaaatatccggtgtttatcagcaattcaaggggggatacagaataggcagatgcacacctaagtctggagtccaaggagggtctgccctggagatatgaatttgagtgtagtagctttaaagatggcatggaaagccatagatgagatgaagttacaggagttgagatgaacagaaaaaatgaggtccaaggactgagccttttgttagggactgctagaggcggtgtttcccacatcctccaaaagggagcaaaccaagaaagaggaagacagaagataaggaaggaggaatctgacactggagacagaatattcagattggtggtgaacggggattccagaactacaggtctcagggtaagatgtctaaactggcactagaggatgaagcatcctgggagggtatcaccaaggaaaaacaaaaagagcaaccctgtttgaatatactgagattaaactatggctcaaagtttggggatgagatagaaacaggaacacagaactcttaagcacatggaaaaacaaggtaattactaacatttttttgtagatatatttacagaattgtaaatatggaatcacgtcaacactgtatataaaagtcatagaaatgtaaacacagaatattgattgaaccataaacgattacagaattatgaggat

SEQ ID NO: 8575 - DNA, 1029 bp, Homo sapiens
tttggtggagacagatctatatacccccaggttattattccctgccaccgagcctgggagcagtttctggatatacggtagtgacccggtgtatggacaagaagtagatgcagggaattgaccaggaattactgggaagagggattcagtggtgtgaactggtcaccccttcccataagcctgatgattgaaaaaggacaatgagtgaccaggcgtggtggctcacgcctgtaatcccagcactttgggaggccaaggcgggtggatcacctgaggtcaggagtttgagaccagcctgactaacatggtaaaaccctgcctctactaaaaatacaaaattagcctggcttggtggcacatgcctgtaatccagctacttaggagtctgaggcaggagaatgcagtgtgatagcccaaaaagaaggcagaggttgcagtgagctgagatcgcgcccccgcactccagcctggccaacaagagagaaactctgtctcaaaaaaaaaaaaaaaaaaggacaatgagaaaataaatgaagtaaaatttgtttctgtgatatctgagataatcttttagatgtgtttctaacatttccccaaatgaagtaaattattacacaaaattacgaagttaaagcaaatttggaaaaaaaaaaaacagttacaagtggacagaagtctattttggcattctgagtgtctgcagctttgggacaaatgagaggcaggatccctgggcaggatcagcacactcatggtagcaagcgctcctcattctgcccccagttctgcccccacagcttcaaacatggtgggctgacaacaatatggaggtcggagaagaagaacaatttcagagcatgtctgagacaacccaaggtgctgaaaaatgtactgaagctctacagtgatggaggcatggatcagcactatgcagatagaaacataaatgtgacatcatttgtaattgcagtctgaatgagttagaaaaaaattaggatattcttacgtggaagctaaatcttaatacca

SEQ ID NO: 8576 - DNA, 1032 bp, Homo sapiens
cttgtgcctaagcctcttgaatagctggaactacaggcacctgccactatgcccggctaatttttgtatttgtttagtagagatggggttttaccacattgggcaggctgatcttgaactcctgacctcaggtgatctctccacctcggcctcccaaagtgctgggattacaagcaggagccaccgtgcccggccaacatctttgtttattccggtttttgattctgtttatttcatgtatctttctcccctccttaatggaatatgatataatttagtctccttccacatcataaaaatttggcacttttcacattatgtgacaaatgcatacactatcatgtaccattaccactgtaaaaagtctaaattttgtgattttgtgtcttttatttatttatttttatttttttttacatttagaacgtgttacgagtcagtttttagtgaaaaaacattgagctaggagccaagacccatctcttcactattttggtattgtgcaagtcatcttacctctctggatctcagttgtctcatctgtaaaaaggagataaaaattatttacctgcctgaacgtaagtactcaataattgcatttggttgcaaagaaacatgactatcactaccaccaccaccaaaatacaaaaaaggaaaaaccaaaaacgaactcacagatggcttaaacatgcaatatttattttttatataaaataataattgaaatagcactctaggatgggtatagtggctttataaagtcatcagagacttaagcttctttcagttcttttatcagtgatccctaagacattcttgtagtactggttcttgtatgtccaagatagctgccagagctctaaccatcactgtcatgttccaggcagcaaagcataggcgaagaaagatgcatcctcttcctttaaggagaattcctgaaccaaggctgaggctataagaaagcagggaaatgtagctgactgcatgtctgccctctataaaattgggcttttgttactgagaaggaaggaa

SEQ ID NO: 8577 - DNA, 1059 bp, Homo sapiens
agtctcgctcactgcaacctttgcctcccaggttcaggagattctcctgcctcagcctcctgagtagctaggactacaggcgtgtgccaccatgcccggctaattttttgtatttttagtagagacagggtttcatcatgttggccaggttggtcttgaactcctaacctcaaccaatctgcctgccttggcctcccaaagtgctggcattacaggcgtgagccaccacgcccagcctcttcatacccttttgctagagattttcttccaagcaccctatattaattttacaagctttacaagcttggtgctggtgctttcttcatcttatcagaagatgatgacaggaagttttcagattcatagtctttcctcaaactctccttaaatgattcattgatgaagacctggagggctggccttcatgaatcacaccaacttgtattacttttcaggcaacctattctttattcagatacacgctctcagaatgtatcaagaactaaactaataaacacacttgtcaggttatgtagtgctcttcaacattcaaatcagatttagctactcttcctttagctcagccaccatccatcaaccccatacttcttaaaaatgcttaatataacatcttgggggaaatcattttataatttaatgtttaatatggcaacaacttttggctgtaggcatttacagcaatgttacagtgatttgttattttctgaccattctcgtatcaatctttttaccacctttagcattaatgtagattttgaggcatgtaaaagaacatcaggattttgtcagaatttcctgttgactaaactcagctttattttttccttaaactatactttgctggaagttgtgcagcttctgttcagtattttcaggaagttcctgacaaattgacatttgcatgagtccatcaattcagcctcatgttccttgagtttttttatttattggaggcatagttggtttctgctatcttcatttgcattgtttggctgctgataggtaatcctgttgtgttttactaacaaaacgtaacat

SEQ ID NO: 8578 - DNA, 1050 bp, Homo sapiens
cgtccaggctggagtgcagtggtgcaatcttggctcactgcaacctctgcctcctgggttcaagtgattcttctgccccagcctcccaggtagctaggattgacaggcgtgtgtcaccatgcccagctaatttttgtatttttagtagagacggtatttcgccaggttggccaggctggtctcgagctcctgacctcaggtgattacccacctcagcctcccaaagtgctgggattacaggcgtgagccaccacgcccggccctaaagctaatatcttttgaaagaaattctttttataatattaaatttatctaaattagtcaaaagtatttatcactaatgtattgtaaccctgtttttaagctgttgcatttgtctaaaaatggaatgtaatagataaaactaacttactaattttgttaacagagtgggaggctaagcaaagaactggatttagtaagtcaccatgtgaggacaaaacttgatgaactgaaaaggcaagaagtaggaaggttaagaatgttaattaaagctaagttggattcccttcaaggtaagtgctaaacaaaaggtaggattttttttttcttttttccttttgaaacagcgttttaccctgtggttcaggctggagtgcagtggcacaatcacagttcactacagccttgaccacctgggctcaagtgatcctcccatctcaacctcctgagtagctgagaccacaggtgtgtgccaccatgcctggctaattttttttgttagttagacagggttttgctgtgttgcccaagctggtcttgaactcctgggctcaagcaatcttcctatcttgaccaaagagctgggattacaggcatgagctggcgggcctggctagaaaattttaacatttggttgttgaggtcagtttatattagtacgtgccatctatgttcttctagtcaaaattttatgttagtattgatttggcttctcttaatttttagaatttaatgttttaaatagataatacattttatatcattcaaaaatcagtataataagccata

SEQ ID NO: 8579 - DNA, 1063 bp, Homo sapiens
attagagcttattgaataaaacaagaagccacgagtctacactgatataagtagagggagagagaaggccgaattcttttgcaaaattgcttttcaaaagacttacgccatttatatttccaccattaaaaacgtgtgcactctttaaacatatcagagctgggcacggtggtgcctacctgtaggcccagctacttaggaggcaggaggaccacttgagcccaggagtttgagaccagtctgggcaatgtaatgagaccctgtctctaaaaagaaaaaaaaaatttttttaaaatactttgagaatatgtgaatgtattattgttgatgtccattgatgattctagctagaattattactgtgatggttgacaaatggagattttctaacctgatcatcccttctacatttgttagttggctttctactgtaatgaaaaactattccttcccctcgaccttctacttatatcagtgtagactcatggcttcttttattcaataagctctaatctttaccatcattatttccatactcaaattgtcccagacttggccagtgagagtttcttcagactggcttttgtgtccttctgacatgtccgaatgattctttggggacttccttacttttagtatatcaggatgttcaaggcttaccttattctttccctgacccaacccagaatgacccatttttctgagaagccctgcagaccaagatctgggccctggatgttccccttgctactgtagtgtcattgcttccaaggtcttgtcagatgacagagcaggggaattaaaagaatatgtatataatatggatgtgtatatgtacatatgtacacacatacatgcacacatacacacatatacccacctatatacattaatattcatttctacatatctatcaatatatattaaaactcatgaatttacactgatatctccagttgcaatccaacaactcttgatttcctttttttcattttaattttttgaagttcaggggtacatgtgcaggtttattatatagtttatatatatataaacttgtgtc

SEQ ID NO: 8580 - DNA, 1026 bp, Homo sapiens
tcagggccagctggagaattgaagtttgagccacgtgtgtaattttgtttgattatttatttaggaaaataaattattttatcaattgaaatccacatttattacaaatataatttcaaatcattaagatgttatgttattttttgtgtattttttgtggtattagagcaatttagattatagaaaaatgaaaatgcctccaaaagttttatgtagcagcaaattttaagtgctgtatcatttgtataatttgataaccatatttatggtaaaatgatttatttcaactttatttgtaattctttctaattatattaatcttaccagagaatatgttttttaaaattgtgatctatgattagctaagcatattttttaaaacaagtatatttgtatatgaaggaacatttagaataaaggaagatacttttaaaataagaacttttttcttttttccaacagacatttaaagtctgaagtccaccagaacttggaagaaagctgttaactcaacatctatttcatctttttagctcccttcctttttctctgctcaataaatattttaaaagcatatttgaaataaagggagatactttttaaatgaaaacactttttttgggacacagatattaaaggattgaagtttatcagaaccaggaagaaaacaaactcactgtctgctctctgctctcacattcacacggctcttttatttatttttttgttctcctttaatgatttaattaagtggctttatgccataatttagtgaaactattaggaactatttaagtgagaaaactctgcctcttgcttttaaattagattgctctcacttactcgtaaacataggtattcttttatgggtgcttatcattccttctttcaataaatgtctgtttgatattaacaattctggaaaggccacagtatttccctgtgtttcctggtaacgtttttctagttttggcaacctcaactgctagaaattcttcacctgaatcacttttgctaccacttcag

SEQ ID NO: 8581 - DNA, 1034 bp, Homo sapiens
agaaatgggaaattaagggccaccttcaggcgtttaactgaattgtcctggggatttaatttgcctttcgacttaatgctaaatttttgttgtttttggtttttaaagtaatgtaagtttatcgcgccaacggtaagatgtcgctctggacgcgtgcacctgctctcgcaatcaccgactgcggtcagcatcttccttagagcagcgccccgggccacttggatcccggtctcaatttactaagcgaacccagaggatgccccgagtcctggaccgcagagccgctcgcgagaggcaccggggctgtaaccgcgcaacctcgtgccgcgggcggaggcgagggaggattccccggccggtgcccgcccccgggctaaagtgcggcgcgggtggggctggtcacgcgcctggcttcctgcagtgcgaacctgggaaatccaggcgacttcgcagttgccgaagggatctgaagaagtgggatgtgcaaaagcgccggctggaaatcccggctgtgtctccgtcaactctttacgcaacagaggtctccccctgcccttggtttctaccgggccgcctgctcccactcggcgaaaaaaattacacaacagcagccgcggcgatgacgtggagggctgccgcctccacgtgcgcggcgctcctgattctgctgtgggcgctgacgaccgaaggtagggggcggctggggtgggctggggcgggggctcctggcgccagagggtcctcgcgggtcggctccctagcatcccgccaggggacctcaacttcctgggggctgagagctctattttcttttctatttcttctcctttttttttttttttttttttgagacggagtctcgctctgtctcccaggctggagtgaagtggcgcgatctcggctcactgcaagctccgcctcccaggttcacgccattctcctgcctcagactcccgagtagctgggaccacaggcgcccgccaccatgcccggctaattttttgtacttttagtagagacggggtttcacagtg

SEQ ID NO: 8582 - DNA, 1023 bp, Homo sapiens
attgagggacagctaattttgaaagacaagtttattactcagacagcccctgatatcagaaggaagctagagaaacaggccatgggattagatagcaccttacaaaacctcctgaaggtagccacctcggtcttttataatagggaccaggaggaggcccaggggaaggagaggaaacacaagaaaaaggcagagactctggtggccactttgtataaaacccagtatccccaaggtacacctgctagttgctaccaatgtggcaaactagggcacttcaaaagggactgcccaggcagcaagaagaagccacctcaaccctgtccagtatacaatggggaccactggaaggcagactgtcctgggaagcataggtcactgagtccagagccagtctcacaaatggtccagcaggactgatgggtcctggggctcaactccctggctccagtggctcagactgctgttactacccgggagcaccaggtgattctggagttcgaagggaggaaggtagacttctttctggacactggagccaggcttctgttttcctctccaattcaggccttcgttcctcccatagcacaaccatgatgggcatctcaggaaagactttaacttgatatttttctcaacctattagttgcagtcagagggacctactgtttacacaggcctttttagtcatgcctgaaagtcccactcctttattagatagagatattccagcacgtatgggggccaccatccttatggctccaggacaaactccgcctccccttagtggaaaccagtattaacccagaggtttgggcaactcagggaagaagtggccggactataaccactataccagtctggatccacctcaaggatcccactttttttcctaaccagagacaataccctctgaagccagaaagtagaaaagggctagacgccagcattgataacctaaaggcacaaggcctccttaggccttgcagtagcccttgaaacaccccaatattaggggtgcaa

SEQ ID NO: 8583 - DNA, 1054 bp, Homo sapiens
ctcgggaggctgaggcaggagaattgcgtgaacccgggaagcagaagttgcagaaagccaagattgtgccactgcactctagcctgggcaacagagtaagtctccatctcaaaaaacaaacaaacaaacaaaactcaatttatcaggtggacctttctcatttagcatgtaaaattccaaatggcatcgtgagtgactatcctgagtatagatatccccatcccaaagatgttcctattacatgcaggagggggaagcttctaagatatgagaaagatctgcctgtgtctctcacaagctacaacttagaactggcccttcaggggacagggctttatttcctttgtggctcctggctacacttaatcctccctaggcactggaagggaacctgcactatcgtggcagtggttcctgacctgttatctttaaattccactgatatggcagcatcatctggggacatccctagcctagcgtcttttctagtgagtgtgctatctcagatgcgctgaacaaagaggtctatcatttccatgccctcatatggagacttaactgaaagagaagattgggtaggacctgcacatgacaatcctatctcagaaaaaccatggataggggattctatagtcagaggcctattctggtttgctggtattcctctccttgaaaaatcagtacttaatatttctattatgatgccacaagggtagaagctaacagtaggagccatagaagcacaacaacaattcataaactctttagcctcagtagttatgcaaaatagacaggccctagatatccttatggccaaagtagggggtacctgtgcacttttaaaaagaagcatgtcacttctagatcaatacctctagtcaagtagaagagaatgtacaggtgcttaaagatcaaattagaacattgacagattaagagagaatgcgggctccagtcccagttggctacaatccctcttaaatggattccagtcttctttgtggaactggttagctcctttattaggcccccttttgctcgtgtgttttgtact

SEQ ID NO: 8584 - DNA, 2243 bp, Homo sapiens
ctttatgatcagctggatcctttagttgtttgcaaagatgactccaatcctacacccttccctgaatccatgtccattgctgtgtaactttgtagtgcctctaactgtgtgacctctttcagccaacttaagaagacagcagtgaaggcgtgccagttccaagtgtaagccccaagaggtcttgtgtgtcttcatttgcttcctcgtgtgcttctaatggtgctgggagaagaacaggtcgagactagcctgctggaggatgagagatgctggctaccacatccttgttgctccagtggaggccaggctagattagatgacagccacctgactccatgtgagcaaatctgagatcagcagagctggcagagccaactctcaaatacttggaaaatacttttaatatgtaaaacattttaaatattacattaatatttaaaatgttttttaaagccactgttttatactggctttgttacacagcataagctaagtgctacaactcctcaggaagctgagctttgaccaaaagaagtgtggtagccacagagatgtgtctgagacccccttcgagagagagcctgtgtgaggagtgcagtcagctgatgggctccagctacagatctcagggatctgcatcagtgttccagctggtgccatgctctccccagactgcttctgccactgactgagcaaggcaggagctccgtgttgggagctgatgctggaatactgaactatatcccgagatctccagctgctgatctcggggatctggggtggccaagactttctcagagtgtatattaggtgctagaataacatcattttatttgatgtcattttgttatcacattgatgaaaaaaaattcagttcccaacctgagccactgtctgtgtggagtttgcatgttctgcatgggttttcatcaggtactctggtttcctcccacatcgcaaaaatgagcacttccagtaaattggggtgtctagatggtgccacagtgagtgagggtgtgggtgtgagcatgccctacagccagataccatcctctccagggttgatgcccacttagtgctctgagccactgggataggctctggccacccacaactctgaactggaatcattgggtgagtaattattatttgtttttagtaatttttttttttttgagacaaagtctcactctgtcacccaggccagagtgcagtggcacaatcttggcttactgcaacctccacctcctgggctcaagcgatactcccacctcagtttcctgagtagctgggactacaggcgcatgtcaccatgcctgtctaattttttgttgttgttgttgttgcgataaggtctcgctgtattgtccaggctggtctcaaactcctgagctcaagctatcctcctgccttgggctcccaaagtgctaggattacaggcatgagccactgtgcctggcctagtattggtcattagtattagtaatcattcctaaatgtatatgtaaacatttatttcagtgttaaatattgaagtgtttggtctttatttagaagtttgatgttgtgttttatgaccagaaatatgctgtgaacttaattctttcttatagcagttagcctatgggaaaattggttttgttctacattattttatttaaagtcataatttccaagatcctatcaactccattaagtgaggacttactgtactgtagcctgaggctcatcttagtcttccctcatcccccctgcctttccttcacagtcagcctgcatggtggtctgaggccttcccccctacagcctctcccctttatctttcacggtaatcacccctcattactcgtacttctaactccatcttgaaagctgcttcctggaagatccaaacggacacaaggagggactgaaggattagaatgagggaagtaacccatgcactgcttatttgagatggggaaccgaaggactttggcagttcctacacagagacagatggcagagatgacaaggtttctcagagaatgcgtgagtaactggaatggcttttcctgatgacccagacagcctgctcaagagcacactgttgcagctgccctccttggatggaactatggaatgatttttattcttctacttcccaggtgaatgggaaaccaaggacacagtcagcatttaacaaaaaggaatctgcatctcagtcagaactgtattgcatttgcttctctctggattacctt

SEQ ID NO: 8585 - DNA, 1054 bp, Homo sapiens
gatgccatttttcatttggtgttccttctttccttctcaatcttctggttatagtaactatcacaggctatgatctatggcctcctgaatgcattctctctattccattgctttactagatatggggaacaggggagggagtaaaaataaaaataaaaacattcttgttacataatgatgaatcctgaataaccatagtctgtctttgactgcagagctctagctgcctacttgacatctcctctcaggtatttcaaagacatctcaacttcacatgtaaaatggaatctttgattcccatcctcataaacgtatctccatgggtattccctctcttagtaaaaagcattacaatttgctcaagccaaaaacctgggagtcggcgagtctccttgattcttcctcttcttttttatgacgggctcactctgttgcccaggctggagtgcagtggcacaatcatggctcactgcaatcttgacctcttgggctcaagcaatctgccttaggctcctgagtagctgggactgtagcacaggctaccacacctggctaattttattttttgtagagacagggtctccctatatttcccaggctggtctgaactcctgggctcaagctatttttccacctcggcctcctaaagtgctgagattacaggcgtgaaccattgcagccagccatgttttcctcctgttatgtccagcattcagtgtatcaacaagcctcgtacaatacacctctcatctgtgggatctacacaaacgcttacaccctttcatgtttacggtatcatcatctttggcctgtttgcttgccttagccttctaacctttatttttgctatcttgtcttttatagtttattctcccctagcagtaataattataatataggccgggcgtggtggctcgtgcctgtgatcgagcactttgggacgccaaggtgggtggatcacctgaggtcaggagtttgagaccagcctggccaacatggtgaaaccccatctccactaaaaatacaaaaattagccgggcctggcggcacatgc

SEQ ID NO: 8586 - DNA, 1277 bp, Homo sapiens
cacaccacgcccagctaatttttgtatttttagtacagggtttcaccacgaccagactggtcttgaattcccaacctcaggtgacccacccacctcagcctcccaaagtggtgggattacaggcgtgagccaccacacccagcacatatgagtttttttttttttgagacggagtcttgctgtcacccaggctagagtgcagtagcaccatctcggctcactgcaggctctgccccctggggttcatgccattctcctgcctcagcctcctgagtagctgggactacaggcgtccgccacctcgcccggctaattttttgtatttttagtacggaaaggatttcaccgtgttagccaggatggcctcgatctcctgacctcatgatccacccgcctcagcctcccaaagtgttgggattacaggcgtaagccaccacgcctggcccatatgagtctcatgatctttctttcacctttttagcctcaccaattcctggaccaccgttattagtgtattgaaccatatacagtctcatgacacaatatgtactacattgctgctttgcttgtgttttgttttatttttaaatagagacaaggtctcactgtgttgccaggctggacttgaactcttcggctcaacagttcttctgcctcaacctcccaaataatcaggaccacagtgcctctttgcctttgtttaagcagtttcctctccctgaaatgttattgtctccgatctacttggcaagcaccagtttatcttatggttctctgtgaacctttttcgaaccctcttctccagtaggattgattagtaattctctccagcccagcttcccactaactagtatttaagctcctatggcatggggtcttaatcaattttgtatctacatggtctagcaagtagcgtgcactcaatacatgttttaaaatataatctcattttattctcttttatcctactttatagagcttggaaaagtttatcttgcctagattaacgttagaaaaagaatttgactctttatctttctgaatccatagtcagtgtttttctcactatattctattctttttatttacttttttttttttttttttttttgagacagtctcactctgtcacccaggctggagtgcagtggtgcaatctcagctcactgccacctctgcctcctgggttcaagtgattctcctgcctcactcagcctccccaacagctgggattacaggtgtgtgccaccatacctggctaatttttgtatttttga

SEQ ID NO: 8587 - DNA, 1067 bp, Homo sapiens
ttaagaatgtatttcctggggaggggcatgggatggtctctgggcacagtcatgacaatagcttctttaaaaaataaaacaactggtaccataagagtgtgtatttgtggggtacatgtgatatttcaatatatgcatataacatgtaatgatcaaatcagggtaatggggctatccatcacctcaaacatttatcatttatttgtgttgaaaacattccaaatggtctcttctggctattttttcttttcttttcttttcttttttttttttttgagatgaggtctctctatattgcccaagctgatcttgaactcctaagctcaagtgatcctcccaccttggcctcccaaagtgctgggattacaggcatgggccaccacacccagcttcttctagctgttttgaaatgtacaataaattattaataatcacactcaccctactgtgctgttgaacactagaatttattcctatctatttttgtacccattaaccaactgcttttcattctatcccccaaccgcagcctgtggtaaccaacactctactctctacctccatgagatcaactttaaaaaaaaaaaaaaaagctcccacgtgagtgagaatatgtgatatttgtctttctggcacataaatctggggtgacttggctggctgagatgataaatgacagtcagaagaaatttatggatatataaacactatttgggggttacatgagtaagaatatgtgatatttgtctttctggcacataaatctggggtgacttggctggctgagatgataaatgacagtaagaagaaatttatggatatataaacactatttgggggttaccaaaaatcacatgagggtgagaaggcaacctgatagaagtccacactttttttgtttgtttgttttcgagactgagtctcgctgtgtcacccaggctggagttgcagaggtgctcactgcaacctccgcctcccgagtagctgggattacagacatacgccactatgtctggctaatttttgtatttttagtagagaggggtttcaccatgttagccaggctg

SEQ ID NO: 8588 - DNA, 1071 bp, Homo sapiens
acttgaggtcaggagtttaagaccagtctgggcaacataacgagaccagtctgggcaacataacgagacctatctacagaagaataaaaaaatcagcagggtgtggtagtgcttgcttatagtcctacctactacggtgggtcaggtggtagaatcacttgagcccagcagatagggctgtagtgagatttgatggtgccactgcactccagcctgggtgacggagtaataccccatctcaaaaacaaaacaaaaaaggcttaatctttctaacctacaaagagaaacagatatgtgcaattcattagaaaaacaagtagactatgaaaaggcaatccacaaaagagaaaatatggagagccagtatacctaacaacaacaacaacaacaaacaaaacactcagactcattagcaactaggggagtacaggtgaaagataggatgccatttttagccatcaaagtgtcaaggttgtaaaaagattgataatattcagttctgggaaggtttgtagggagaaagaacacgtatatactttgctattgggactgtgaattggggagagtatttggtcagaatctatttatgtttaaaatgcacgttttttgactcaacagtcctactttgaggaatcaatcctatagaattagaatgcccagggtgttgattgtgtatagatatgaaaggctgaaatcaacctgtgtctctaaccaaaggggagtgttgaatgaattatactagatctatatacaatggaacaatagtgaaatattactgaactgcaggactgtacatgatatattgttacatgagaaaagcaagttgaagaataatgtatataatgtgatactattctttgttcaataagtataagaagaaaatgattaaaaatgtggatgtatgtatgtatatagcacaatattatatatgttaaaatatatatacataatgagggaagatgcacccaattgttaataatggttatctctggtggtacagtattgaagaggaaagagtccggattgttaaccctgtattcacttctgtattgctagatctttaaaattaat

SEQ ID NO: 8589 - DNA, 1051 bp, Homo sapiens
gttcatgttctttacctacattttaatggggtttgtttttgtcctgtaaatttaagttccttatagatgctggatattagaactttgtcagatgcatagtttgcaaatattgtctcccattttgtaggatgtctgtttactctgttgatagtttattttactgtgcagaagctctttagtttaattagatcccacttatcaatttttgcttttgttgccattgcttttggcatctttgttatgaaatctttgcccattcctatatccaggatggtatgtcctaggtttttttctagggtttttatagttttggattttacatttaaatctttgatctatcttgagttgattttttatatggtgtaaggaaagggtccagcttcgatttttctgcatatgactagccagtaatcccagcaccatttattgaataaggaggcttttccccattgcttgtttttatcagctttgttgaagatctgatagtcataggcgtgcagccttgtttctgggcttcctattctattccattcatctatgtgtctgtttttgtactgacatcatgctgttttggttattgtagtgctatagtatcgtttgaagtcaggtagtgtaattcctccagctttgttctttttgcttaggattgccttggctattcaggctcttttttggttccatatgaattttaaaatagttttttcctagttctgtgaagaatgtctttggtaatttgatagggataacattaaatctgtaaattgctttgggtagtatggccattttcatgatattgattcttcctatccgggagcatgggatgtcttttcatttgtttgtgtcttctctgatttctttgagcagtattttgtaattctcattgtagaggtctttcacctccctgattagctgtattcctaggtgttttattctttttgtggcagttgtgaatggggttgccttcctgatttggctcttggcttgatagttgttgtattggaatgctaacgatttttgtatgttgattttgtatcctgaaactttgctgaag

SEQ ID NO: 8590 - DNA, 1043 bp, Homo sapiens
ttttttttttctcttttgagacagagtctcactctggtgcccaggctggtgtgcagtggtgtgatcttggctcactgcaactgcctcccaggttcaagtgattctcctgcctcagtctctcgagcagctgagattacaggcatgggccaccatgcccagctaatttttgtatttttagtagagacggggtttcaccacattggtcagggtggtcttgaactcctgacctcaggtgatctgcctgcctcggcctcccaaagtgctgggattacaaggagattgacttttatccgcagatactctaacctgatcttttgtcatatcttcaatttctttgctcattttgttaatgttttcctttaaatacttatacatacttatattagctgttttaatgtctttttcagctaattttgtcatctttatagtttcaagatctggttcttttcttctggctatggatcgcatttttcttgcttcttggcatgtttagtgagttttgatttgatagtggactttgtgaatgcacgttgatgagtatctggtatttgttgcctgtctttaaagactattggatattgtttggcaggcggtaaagttaatgttgctcaatttgagtcctttgaagtctgattttaggcttctctagagtggttctggtgtagtctttattccagatatagttcatccctacttctaaggtgtggccctctgatatctccactgaataacccaagggatcatcaaagagtctccgctttggctgatcagagtttgaacatcttcctgctacgtataaactccagtaattgttcagtttacaaatctccattttttgcctatccttgtcaagtttccctgtatacattacttgtcctagtactctgcaaagactcagtgggcctcctgtacagattttttggagcccccttttttctggttggctcacttctctcttgaaatgtgcccacaactgccagctatctcagcctctctgatctcaaatttctgtctcctcaatttagcaaggctgctgggctcta

SEQ ID NO: 8591 - DNA, 1050 bp, Homo sapiens
tcagtagcaatggtcctctgcccactacaagtaacaaggtccatttgtgccttttcagatgacctttgttttatgaacaaaatatgtaatttggattttttgtaatagtaagcatcttttctactgaacagaattaagataaagaaaatcttccttaggatacactttttttttcttttttttttgagacagagtctcactctgtcacccaggctggaatgcaatggtgtgatctcagcttactacaacctccgcctcctgggttcaagtcattctcaggatacacttctaaaactccaaaaaatgtaatttattaatatagatattgttgatagtagcaaatgcttcattatgtaattgagtgtgacattaattctctcatgctttgtcaaatgactcttactcttcagtgcaggaatcacagccatggcccccaccctccaggatttggtcgatatggcatctgtgcacatgaaaacaaagaacttgccaatgcaagagaagctcttcctcttatagaggactctagtaactgtgacattgtcaaagctactcagtaagtcttccaaatgctttggtttatccttatgttctctagaattaatagtaatatatgtgtagttcatggagcttcatatgtttacctctcttaacttcataatagtagttaacaccagcaccagtatatttgtcataccaacaccacagtacttagtacagtgtacctgagctgtttatgtaccaggacgtcccattagattgtaggcaggttcttagcaaaagcatgtcttcatctttgtagctccagtgcttttgcacagttccttcttgtgtaaggtacccaataaatgttccttgaatgaatggatgattttaaatgacactaagccaaactctttatttgaaacacaaatctaagtcttttaaaatatactacaacctgaataggtagatggaatgaaaaatactgacttacacatttatagatatttttaaaaatcatttatttcttgagtactttccatgtgcttgttgtgctggactaactag

SEQ ID NO: 8592 - DNA, 1087 bp, Homo sapiens
gaccttagagaccatgcctggttgatccaaaagggaaaattagagataaagccaagggggccaatcataaagtttagaaagtaaaagtgaacattttttaaaaaaggaaaagtataataaactttttcagaagagaatgggaagtctcatctagtttagaagaagcattgaaatattttacattttaataccacgaagaatagataggtaggagatttaaccttttaaaaaaactaaatatggaatatacttttaagtgggcatgtattggattgtataaaatatttccccttcataaagcactactgcctacccattgtttcttttaaacagcttaacatgtaaaatgtacatgtgtatgtgaatgtgtatatattttgtgttataggattagatatttaaaatcctcaaagtttaagaaatttattaaggtttaaaatgttctaacacacatgaatactcacaggcaaactcctcttctgtggaaataaactggcatggtatttagataatatgatgtatgaagctcaactttgaagtaatgagactaattcctataaaccatagaagaaaatcagtcttattaccttatatgtccaccttatacagtgcctctcatctccgtaccctaaatacagggcaaaacactcaaaatgtctaacttttccaaaaggattttaaattaattctttactacttacttttaaaattcattcccacatagtaattctacttttaaactgttgaaggtgacataactttacctttctccttccagtcaagtaagaatatctgtctgatcctaaaccttttgaatataaacaatttcaagagtgctgcggtagttagactatgcagagagtagttatgatgtatttgatatgtaagttataatggaatgctaattacagcaggactaattacttacatcctaaggatgtttcatcagggatttgtctgattctgccatgtgaacctttcatatttctatagatctgggtgttttagggattattactatcataatttgttctccaacatatttattactatgaaaaaattagtattttctttctcaatatgaagc

SEQ ID NO: 8593 - DNA, 1034 bp, Homo sapiens
gcaacaagaatgaaacttcatctcaaaaaaaaaaaaaaaaaaaaagattgtttccaagatgtacaatctctcaaacctcaaatttatcaatcagcaattttagaggaaaactttgtgttagctttgttgttgtattaattgttattatatactttggaagtagttcttatattgcactattattagatacttaagaggtaaaatccataaagttctaaaattctgaatctcttaatagctcttcctgctgctgatgctttctgtgattaccatgtgggctattggatacatattggacttcaattcagattcttggcttttaaaaggatgtcttctagtaacactgttttttctgacatctttgtttccaaggtgtgtatgttaatttttgcaaggctggttattgtgtttctgattttatttcttatttctgttgttggttagctggagtcacagatttttatcatgctgtaaatattacttaccatataacagcatcctgcgggtggatgggaggaaagggctctggtagcatattatttggctgaaagcaagttgctcaacccagtaacttggttgacttgacaactggtggaaaataaatatcctgggtcacgttttaattgttatttttggtgaatgatggggagatttttgtaatcatttcataattattcaagattttgtaatcatcttgaagcatttttgctcatttttcagaaattttttcctttttctaaatttattttaagctagttatttttgctgtcagtcatttttagttgagttaaattgtgagagattataaaatagtaaatatggtatggttttatttttaggacagtatttatacatgattatatatagttaatggttaagagtcagactgcttgaattcaagtcaagctttaccacatgacagtctgacattgaacaagttgctataaaatgagggttaacttgtgataatgcctgcctcatggttaacacatataaacacatagaactatagctgacacatagtactcaataat

SEQ ID NO: 8594 - DNA, 1109 bp, Homo sapiens
agtggtgatccaatgattcccctgccatttgttttgtaagttaatcaaaataggagccgaaaattcagtcagctcagcgtgcaggatcattgcattatgaaactgaacgtatttttgagaactgaacgtatatattttgagtcgtgtgtcgatcaggatttcataaagaaattatgatgtgattctttcacaaaggatcttgccctatgtacctttaatagtgtctttctgcaaacatgtatctaatatatagggaaatacttttatttggaatctctgaatcaagagggttgtttctttgaatgattttgttaaaatgatcaaagaatatttttctagatgctcacaggagagccacaattacaccattagagataaatttatttggtcttgagtgtcacttttcaggatgttcctcataagttgcaactattcctatcaagtatttaatatgagcttcaactaataaggaaacattaattattagccaagtgggaacaaattccagtaggattagaacataggatgggaagagatttaggggcagggacatgtgtgcataaggaaggtgagattcttaggtgccaatgatgaaatttgcttacatcataattacattatttttaaaggaagtttggtgtattccttaacttggctttaacatttagcaggagcccctttctatttcagtttcattttcagcatagtagcctttctatactttttctataagacttgggcaactgatccaggcttcactaaggcttctgaagaagaaaagaaagtggtgagatttcttcgttactgatatttttaataggagggtttgtaaactttagaaagtttatatgcacatatgcagatgtgttgctttttgttacggctgcatgacatgtggggtgatatagcaaaaattagatttccactcttacagttttttcatttatgtatatgaaagttttaacacatatttttattttctgttgaaataataccccaccaagactttttcagatgtgattccttttaggaatatgatctcctacttccttgtaataacattttcataatggtcatttagcttacatttccccactaaataaatggag

SEQ ID NO: 8595 - DNA, 1065 bp, Homo sapiens
gatgcccctcctcctcctcaaatgtgaagttgtcagatgacatggcatgttttccgttgctcatgaatgtttagaagttggagaatgttgtctttgttacctaaagccagtgttcctgaaagacccagcccttggtgcttgtaactttcagttttgatgtatactggtgggtttttcttttttaatgtgtgtgtatatttgcatatttatttttctctagcagatcataactgggagatgattgccattcacagagatgaggtgataggtgggagtggtggggtggtataatttttatgcatcctaatttattagctgttggttgaaaatgcaaccttgaagagtcacatcatttcaagcacagaatgatttggtggcaagtattccaaattgcttttctaactacttcagtttggagcgagaactgtgagaatggtgtataaccatgcataatacattttccaataaaatgtggtaataggtcaaacttcatgtctttcagaatatcatcacccttgcagaaactggctctctggacttcagaacattttgtacatcatgtcttgtgagttttttcatataatttttttccgtagtgaaagcaaagtcttggtaacgttgctgatgtaagcatttgtcagatcttcatggtatatttatacacctttgtttttacccatttctaattttacattcctgtctgaacagctttctgtcttgaacatatggcagaatgatgtttataatctcttgaagttgtctctggttacatctctccgtgaattatccattgtgtgttttatttgcttttctctgtcatgaagcatatattagaactaacgtcaaatcagaggctcataatgaccttagaaaccacttagtgaaacctctcattttgcaattgaggaatcaagggaggaagtaaattctcccaaattattggtggtgctaaaaatggaacttgggtttccttcccttggttgagtgcttattttgctctgtggtactgcctcatttctgcttagccagtgtgaacaggctctggaattcagatcccacttagtg

SEQ ID NO: 8596 - DNA, 1037 bp, Homo sapiens
catgttcttatctattactagaattagtcaatgcatcataatttaaggttttgtatctagtttattggctctattagtaaatatcacctctcttgtgcttcactttcctgtctctttgctcccagcacagagatttcttaattgcttgaagtacaggcccaggcatagaattggatttggttaccacttgccaactgtcttagaatctgaagactccagctctagttcccgactctgacacctactagctctgcaactttacggaaaccacttacctctctgagcctcagtttcctcctctgtgaaatgggctggtaatatctatggcataaacacttcattgatggtatgggaccagctgaggctacaagtgtaaaaatattgtttgaaaatgttaattgctatttgattataaggacatagtcttattaatatgatcaaatctcttgctagcttattggttttcatagtaggagatgtcacttgctgtgcgatcttggacaagtcactgaactcctctgagctgcactcgtctcccctgtaacatggggagtgtagacttgattacttaaatctcccgacatcgtacaagtctatgctgatgccgagctttccttgaaaactggaaaaagcacaggctttgaagtgtgatggactggggttaatcccctgcttcacagcttgctttctttttgtctctctgtacccataaggattatctcagaatgatctgggtatttttgaaaagtaacagcagcttggctgaaagacaattttgtccataataagacatcagctgtgagcagagttctgcagtggcagaaaacggatcaggcagagattcaggttataatttccaaactccagtggcccacttggtagaaccagtttgcatttgtatgttgaatttttgttgactaaataacagtgatccaagagctgagatggtttattggtcctcttggggagggctgtattgctgtcaaggtgtggataaagcatttcaggcaggcctgccgctggcccctggcccagtg

SEQ ID NO: 8597 - DNA, 1030 bp, Homo sapiens
ctgaggcaaagaccagtttggtaactttgtgagtagcaaaggtagaattagaactcgggcagtctggcactagatcccatgtctttaaccatgatattgtacagggagaaacacagagactgtcttagaacttgcaggccctgatttataagaccattgctgtaaccattgagctagatgaggcttagcaaggtacagccacttgctctcggtcatccagggtggcagggcagggagtccagcaaggttggtctggctttgaggcctgcggtcttcccactcttcattgctttctttttccatcctgctctggcagatctacgaggcaaataggacatggcctgggccttggggattttataatctagttgggaggcataactgatatacacagggcaacagggcacaacacagggaggcctcagaggcatgcttggggctgggtatccaaggtgctcaaaggaaaggccaagatggctggagaagtccagagagcctctggaggagacagaagatgagctgaattttggagatgggaaggacagactggtggggaggagaggaagtcagaatgaatgtgatagtggagaatgaagagcaaggtcatgcagtggtaccgagcagttgatgttgcttcatgcaacaagtcattgctccagatctgacatcttccctttcaaaaggtgatgaagagaaagaacaaaggctttgcagctgaaggattggatttgcatgttggcttcctggtggatcatcattctgaatgtgcagggtagttgtgagaagatccggagagggtgtccgttaaggacctgattcagattcataacagatcattgggaaatgatggtgattattatttttagcttggggttcagaatattcaacgtggtagttacaggggaaaggaggctattctgacaccttgttttattatgcagcaactttcttcagccagtgacatcccattgcccctaagcctgctcttcatctccatcaagtgtgaaaagacctaacttagccagcaagt

SEQ ID NO: 8598 - DNA, 1025 bp, Homo sapiens
ttgtgatcagttggccattaaggtgccccaaggcatggccagctgcccaatggtgctttaccaataaccacaggccaaattcaatgactattctgtctcttggtcacatttttcaaagagatggacaatgtgttcctagaatggcttgggcagaatgggccatgtgattttgggaacaaaacttagctaggctttttgtgctttaatctacacaagacaatagtgagtgacacaaagttttttgcaggaacccccattcgcccacacagagccagagaatgactcatggcttagtgccccctttcccagggaatacagatcctctcttgtgttttgcaaacaatgggcccccagcctcagaatattttgcctcttcttccaagtgaaacctcaacaccttcagtgaattttgggttattccaatccttccgttcatcttggtgggacagaggatagggtagaaatggggtcttagtcaagataattgtgatcccactttcagcggtctttggaagactttgaacaaaattagctactcatggcaatgtggcactttaaaaataattataatactagtcacggatatcgattgagcacagcctctgtatcagcataatgcatagcaccagatatgtatcattcatttaatcctcacaacatcccatgaggtagatgctacttcctgaagagaactggaaatgaccactctaggacttagcaactttggttctaattctgtctctttagtcaccttgctacatgaccttcaacaaatcacattttctttctgagcttcagtagcctcacctataaaatggagaagatagtacctgctgtaccttctttgaagttactatgaagattaacacaggtaattattgtgaacaaggcacctgtttaagcatcttacactttaggtagcccttgaggaaaccagggctgacagaggtgaagctacttttccaaggagcacagctggtaggtagacccaaatatttgaacgcttatctgtttgacctttgaag

SEQ ID NO: 8599 - DNA, 1123 bp, Homo sapiens
gtccttccatccatctatttatccatccatccatctgatagacatttattggcacttgagttgacatgaaacttacaaggggatatggagataatgatcatagatcctgctgttagagaatttaacatgtgaaataggggataagacatgtaagaaactggatgaaaaagccaaggaaaacttgggggtgaagagtggcattctaacccagtgcttttgagaaacccgtaggatcccagtttatgaagactgtgcattcccactgcaggagtaaaggcccagaggctggaaagaggtgggtctttatgaggaatcaccagtagttgaattgggctgaagtgaaagggaggagtgggaaatcagggcacctgcttaagtggcagttcttgaaagtcaagttaaggaagtaggacttggttctgtaggtgcttgggaatggtttcgtggcaggggtggccaaaggaagactttctggccctcatttgaatctggatgcatgctgacagattctgacaggtcttccaatttttaaagattaagtgtcagctgagagatgaggcagtcttaatgatgggtgatggctgattcagcaaagccaggcatatgtagcaccacttacattttcttctctcatggcttctttcttttcagacctcttcttatttttagtttttgtcacttttattaacagtttctccactgtcacaggcattcctctaagacctactctccagcctcacgtctcagtcctctaggaatgagaattttgagatgggggtttggcgtccatggcttcttctatctttggaatctgtcccttggctataaataaggctgttgcttagtgccagtattgatggtatttgcagctgtcctctgggagatggactcagacgaataacccattttcaagaggacatggccattaggtgacagctatttatggttcctattgactagggccaaacctgaactgtcactgacattaaaatttcatgagctgtgagctgcctttccttatcaggctgtctctttccatttatttgaaatatctaaccatgtttatctaggttcttcaaaagataatcttgaggaacgcttgtgttgtggctgctgggacttt

SEQ ID NO: 8600 - DNA, 1021 bp, Homo sapiens
ttcatagggttattgtgaggagtaaattaggtgatgcaagtacaatacttagcatagtgccttttacacagtatatacttaataagttattaaactgttaatgattaaaatcatgaagagcaaatgaaaaggaaataaactaatgtttttggtatatgtaccaaaagccagtaacatccaccatttaactggaagataaattatcctattcccaaatatcttccaaggctatacctgtcattttcagtaccagatactaatgttcagcaatgcagcccaaagcatcacagggttttcagttagacccaattttactaagaaagagaaatagaataacatgcttttgaggaaaaaaaataaaatcagtatgcattaatacataaaagttgctgttgctgttaactggcttaaatagaaaatatggctaactagaacatctcttttcagtttaaaggatttccaattagtgtctttgcagtaacaactgtgttaaattgatctaatcgtgtctgtctaacccttatgcatgcattcactcactttatcaaacaacatttattctgtatcacatactggagataaagagatgaatgaaacagagccccaggctttaaggacttgatattctggagcaagggatagcagactttcttttaaatggctggacaataaatattttggacttcgagggccatggggtctctggtgcagctattcaatatgtaaatgaatgagtacggctgtgttccaatcagattttatttacaaaaataggtggggagctggatttggccttcaggcccaggcttactggccttcatcctagaggagtgagttaagtctgtagcaggctactgataagtacagagggccaaaatctgtgaaggatagagaatggggagatgagaagacaatgggttaggaaatgggttatggaactgggggtactttgagaagtaaaggagaacaactaaggccaggaggaagaaatgcatggctatcccttgatgcagaagcaggc

SEQ ID NO: 8601 - DNA, 1053 bp, Homo sapiens
tttttaaagattctacatggtttctccttcttttctatttttgtaattgttgtattttaatgtctctgatacattgtttgcttaaagttggataattcttgattctttcccataattgggaaacaggctatgggatgaataattgaaaacggtaggtatttcctactctctcctgcactggctgtattaacggtgcaggtgtctgttaagatttgttaagacctgcatgctttcacgtggcacatgccaccaaaatgtgatggggttggggggatgtgaactgtgcagtatggaaagcaggaggaagtcaagccagaaattaaaacctaaccacagataatccacaaagtgggcaatggagctatacggcatttgggttgggagtgattggttgtgtggccatggctgaccctccctggtcttcagtgcaggtcaacaagtatgattcaggcctcctctcttctgtctctgcagagcctttggcaagttcagcctcctcccaccccggaatgagtgacaatgcacctgcttccttggagagcggcagcagctccacccctactaattgcagtacctcctcggccatcccgcagcccggtgcagccaccaagccttggcgcagcaaatccctcagcgtgaagcacagtgccacggtatccatgctctcggtcaagcctcctgggcctgaggcccccaggcccacacctgaagccatgaagccggcccccaacaatcagaagtccatgctggaaaagctgaaacttttcaacagtaaagggggctcaaaggcaggtgaggggccggggtcccgggacacaagctgtgagcggctggagactctgcccagcttcgaagagagcgaggagctggaggccgccagtcgcatgctcaccaccgtgggccctgcttccagcagccccaagattgcactcaagggcattgcccagaggacttttagccgggcactgaccaacaagaagagttctctgaaaggcaatgagaaagagaaggagaaacaacagcgggagaaggataaggagaaaagcaaggacc

SEQ ID NO: 8602 - DNA, 1049 bp, Homo sapiens
gatgaaaaattattgaatgtgtagaattctttacacgctgtccttaggaatgttttttttttcctccagttttattcaggtataattgataagtgaaaattgtgtacatttcaggtatacaatgtgatgatttgatatgcatatacattgtgaaatgattaccataaccaagctgattaacatcatcacctcacattccatttttttatttttgtggtgagaacagttaagatctattgtctgcaaatttcaagtatacagtgcagcatttttaactatagtcactttacaatagacagatgcccagaacttactcatcttgtagctgaaagtgtgtaccctttgaccaacatctcctcatttccaccaccattccactctctgctgctgtgagtttttttttaattccacacaagagtgagatcacacagtatttgtctgtttgtgtctggcttattttgcttcacataatgtcctccatgttcattcatattttcatatatggcaggatttcccttaagcaatatctgaatttaatacctgctacaataaggacatgggctaggaggtggctttgtgtaatgggaagaacgtgggctgggaaggcaggtttgggtttaaatcttagttcctccataaacagatatataactttaggatagtcacttaatttctctgaaatttattttttccttgcctaaaatagggataaatacatcttaactgtgttttgagaataaaacaagatgtaatgatgtactggaaagatacctgctgatcaataaatattaggtttttttctttctacttttttctttcttcctggatttggttgagtataattaataattaatatttaaatatatgttcagtttagccaactaatgaaaaacttagactaacagcatgctctttgaattcaaattaaaatagtgtagatgataaatatttattattattattattacttttaagaccgagtctcactgtattgcccaggttggagtacagtggtgcgatcacagctcactgcaacctccgcttccgag

SEQ ID NO: 8603 - DNA, 1024 bp, Homo sapiens
aaatacagggttgaagtttttagttttaaagaatcaaaatgtaggccgggtgcggtggctcacacctgtaatctcagcactttgggaggccgaggcaggaggatcatgaggtcaggagtttgagaccagcctggccaacatggtgaaaccctgtctctactaaaaatacaaaaattagccgggttgtggtggtgcacgcctgtaatcccagctacctgggaggctgagacaggagaattgcttgaatccgggaaggggaggttgcagtgagctgagatcgcaccactgtactccagcctgggcaacagagcaagactttgtcggggtggggtcggtgggggggaatcagaatgtaattatggtgtagtatgaacccagaaaaccagatatacagtgacagttttttccagtgaataaattagcattctactggtgtagtacttttcaaagtttaatgtgcataggaatcaactgggatcgtgttaaaatataaattctgattcagaagattgagaatagggcctgagattctgcatttctgacaagtatacctcacaggccttcctgttggatttgtaagctgtttgctgttgcctgagtacccatctgatggtttgccagaatgaatgtccagcaggaaagatagtagagccaattgtagttcctcttccctgtttcagaatttttatgctaggtaaccaagtaaccaacaccagctctaccttttgcccctttgaacttctcccttttatataccttatggattcctaatatgtcatgatctgagagggatctaagttttagagctggagtgggcggtgctggtgtatgtaaataattatctatttgggtctactttctgcttacataatactcccaagaaataatatggttttaaagaatattaatagagctgaaataaacgacattgattcatttgctaaaaaaggattttaaaacaatagaaataatagaggattataaaagtaatatgcttatttgttcagttgaaagacataaggag

SEQ ID NO: 8604 - DNA, 1023 bp, Homo sapiens
ggggtttcaccatgttggtcaggatggccttgatttcttgaccttgtgatccgcccgcctcggcctcccaaagtgctgggattacagacgtgagccaccacgccggcccttcatagtttttgtatttgcaaaacaagtgctggaaagcttatttaatgtttgtctaaaaaccactctgtttccagtgaagcaaattatgttgctgttaatgatgttgctttatatttctagttggatgatgcccagatttttattttattttttccttaatatgttatatagagatgaaacatgagaatcactaatcctggctagtctggaaccagttatatacttttgggcaagtggtgaatctctttgggcctaacctgtaaggtgattgtaaaaattccttctggttctaaaattctgtgggttttattacggtgagagcattatcattgtttttcttttagccatcttctcttaatacttggtgataggaataccagaggagcttgttaagaaagtaagttagaatgttccttcagtatgcttctgaatggacttgtcttataataggtaagtaaatactgaaaaggctcaagtattagtaatcataagattaatcatcaagatattaaatatttttattaaaaatgttttctttccttttttccttcccttctctctccatcccttcccagcctccttttcttccttcttttcttaatattatttcaattcacaaagctcctgtggaggccatatggtttctcagattaatttaactttgggtggtatttaatcgtgttgtcacccactcataattaatttctgtttgtagtttattgaagaaattcccagttaggtgccttctttatgcttgtgattattatctacagttaaaattcattcagttttttaagaaaaaaaatgaatcaaatttcctcatcattttataaaataatgttcattctatttctacctctttgattctatcaaattttagctaatctgcttgatcacctaattctaagctag

SEQ ID NO: 8605 - DNA, 1073 bp, Homo sapiens
gagaaggcctttatttgaaatccagctgacacaactgaatttctttccctacgtgcttaacaaaagcaccttacatttggaacttaggagtcatttccagaatatgtgattaataggaggcttctcatagcaacttttaagtgattcttcaacttacattgctgttccactcttaagattgattaatgttggccaggcatggtggctcatgtctgtaatcccagcactttgggaggctgaggtgaaaggattgcttgagcccaggagttcaaggccagcctaggcaaaatagtgagactctgtcctctataaaaagtgttttaaaattagccaggcatggtggtgcatgcctgtaattccacctacttgggagactgaggcaggaggattgatagacctggggaagtggaggctgcagtgagccgtgatcatgccaccgcactccagcctgggtgacagagcaagacactttctccaaaaaaaattttttaaatttgattaatgttggtcttttctgattagtttaaaaatttaaatatgattatataaaatatttaaatttgtttagattttattttataactagaaggatagtgttgtggttagaagaacaagtttgaatcaagcttgggatgtagtcttcactctaccatttaaccagtacttggaacttcggttaaagtacatctaacgtgttagaaatctcagttgtttcactgtcaaatgaaacttataatggctatcttttgtggttgtaagtaagatgcgtaagttataaataatacgtatatataaatcagtttggcctgttgcccagcacatagtaaatattttgaggtgcataagttctaagtaagatatacatataaatcagattggcctattgcccaccacatgttaaatatttggagcgttagctatggttattattaacaaataccaaatcagtgttaatggaaaaattgccctgaacttgtttaggtttttcatagataatggtttgtggttgcgatttttgtattggaatacacaaacacacacacacacacacacacacacacacacacacacgt

SEQ ID NO: 8606 - DNA, 1055 bp, Homo sapiens
tttaaaatttggagtgaaatgccttctattcctctgtgaatgtacttctaaaagaatatgtaggaaacagttaattgttaatatcactgcagtttactgactcattattctaaccagttgaggaggccgcatagcatgctcatctcagcatccagacatgacttgagttctaatttttctttcactacaacccctttaagccctgatttcttcatttataaaatgaggttgatggagtcttatctcataagattgttacaggaattgtatccgttatgatgctttgcaaaatggctggccctgtaactgcttactaaatgttagcagtaatgataatcatgttaattattagtagtggtcatctgtttggcttggcatcaatgcctcaaataatattttacgtttgggtggttatgtttctaagatggacatttattgcagctatcttgtcaaactgtgactacttttttgtcttctttctatttcacaatctctattctcttataccataaaacttcaagctttagtcgtactctgtactcacttgcctctcttcaactctgttcttaacttctctgatacttgtctattcttgcatattggagttttctataacatcagtcaacaaaaacagctcttctggttaacaggctctaagttgtccttatcccttctgaggcccttttctcggtcagaagtctatatacagcagaatgtcttctgttaaactccacaagcctacatctataaaaggcactttaaattctaaaagatagatattttaaaaatacatagtcttttattccttcaaacacgtgcaacttaacaattcttggattatgtttaaaataatttttggctaggcatggtggcttaagcactttgggaggctgaggtagaaggatcccttgagaccaaggagtttaagaccaacctgggcaagatagaactgtctctaccaaaaaaataataaatacctctactaacaatttttatcttttttatttaaaaaggtgatctagcatttctaaagaaatgagtttagaattggatac

SEQ ID NO: 8607 - DNA, 1024 bp, Homo sapiens
tgacagagcgagactccatctcagaaaaaaaaaaaaaaatcagtaaggccaaaacataaatacagagaaaattctccagaacaagagagttctttttataatggcatttaaatggattgcctttctttttcaaaatgtgcccattttatcactttattttctgcaaccatttcaagatatgttcccaatctctgtcatgaacctggctagaatttttagatatattttaccctgcagcaattggctgcaactttctatgattgcagtggctttgtttttttaatgactactccaggttgaatatcccttatctaaaatggttgggacctgcagtgtttcagattttgtgttttaggggggtttcggagtacagtctttgcattatacttactggttgagcatgcttatctgaaaatcggacatctgaaatgtcgcagtgagcatttcctttgggttcatgtcagtgcttaaaaagttttagaacatggagcatttcagattttcagattagggatacataaactgtaacatttaatgacttaaaaacaacattatacatcatttgttgaccatctactggctgccaaacaatatactctaccttcatttatgttactagacataatcctcacaagagccctttgagattttacagtctcctaaaagtgtcctggatgacacatattaaatggctaaaccatgattttttttaaactcacatctgccagcctccagtattcatgttctttttactaagccttgttttcctactaaaatgtattttttaaatgtgattattgccttgacgttctagggaagatccaagtaactgtttccagacctgcctgacttgatcttattgaggaactgacagcaacttaatacatttaaattgaattctcactgaaattcattaagaacttacagcaatgtgaacaatggcagagctatttcttatcatcagagggataaagtggaggttcatatatctagctctttctatacttttatatagctaatatta

SEQ ID NO: 8608 - DNA, 1044 bp, Homo sapiens
tctttacagttgtttcagttcattttgattcagtgattattttatatccaaataagtttaacaatgtactttgatgttttgagggaatcttcttttagttgaagttggttttataattttttaaagtttaaatatccagatttaagtttaatttaaatatccagattaaagtttaaatatcacaaataaagatttgtgactttggagcactcattatttatttaattaacaaaaagcaaaatttgattcatttcccatgtattttctaattctgctttttagtaattgaaattatttttgtcaattgaaattaggctaaaggctaactcctagactttcctttttgttttgatattattaatacatgagggttgaaaaaagaccatcttgattaatgaaaattgatcaatcatctataaaggaattcctagaataaattgtcatgtcaccagtattaaatatatatttcacatatattttcagtgcctatcacatgaatcaaaatagagcagatgtaaaactctactgaagatgtcaaaagcttgtgcatatttgtgaactctagaaaagtttattgactttcattgaaatgttctttttttctagtttattggtcagggttcttagttttcgacaacagaatttaaatcggttggtttaaactgagagatttgttagagggaatacaatagtttccagacacattgggagacctaaaggaacagacagtattttcaacttctagaaacttctagaaccacacctttgaactggcctgctacagagctgcctgttttaaatagcctagcactgtaggttctatttaccttaattcccctagcccactccgtgttagccaccactgacaaccccagatgaacaaaaccctttactaccatcctggttcctggtcctctgtcctcccaacccaggtaggccatgttctccttccaaatcttcattcagcatatctgcttggtgaatctaggtcatgtggggccctagctgtcagtaagttttggaaagcagttttagctacagttt

SEQ ID NO: 8609 - DNA, 1627 bp, Homo sapiens
gtgaaggctgcaaaacagcaaagatggcagcctgctccttcctctggaagctccatccctgcagggtactgacctgttcccagcctgaactgcacccgtacgaggtggctagagaccccttttgggaggtgtcacccaggtagcaggagtgggatcagggatccgcttaaagaaggagtctggctcctttttggtagtgaagctgtgctgtgctgtgggagaccattccttgtccagaccatctggactctccagagctggcaggctggaatagtcaagttgacagaactgcagagatggcagccgcccctccccctgggaatttggtgcttctcaggcaaacctctctgactggaattccaagccagtggggcccacagaattacactacttggcttcctggattcagttcccctcctaagagtatctagggacagatctctggccttgccaggaatcctggggccagagtatgcaaaactcctgagtctctgtgtatgccccagcggctgctctgccaggactctatacaggtgctatgtattggaccgaaggccctggtggtgtggcttacaaagggatctcctaggtgcaaagatccatgggagaggtgtggtttcctgggcaggatcgcacaatcactcactgcttcccttagctgggactgagtgttcctttggcttcgtgctgttagaatgcttgttcttcagtactgcaaggaaaaatcagcatttagacaaaaagttctctcagcgaggcaatggtgctctttgcagatagaacaatggcaagagcacacttgaacaaaggagggaagcaatttatgtcttttatgcagcttgtcttttctactatgtcttgtttccattggctggagccagacctcacaatctaaactaaaacctgactggctaataattttaaacttttctaaataggtgaaagcaatggaaggacaaaggaaaagaggaagttgtttactaaaggacttagaaaagtaataacattcttaaataaggaaggggtaggctgcaagctgggacatgcctgtgagcacatctactacaagtatcttggttaaggtacaaggacatagaatgtactacttgcctgtgagcctgtgtaacagctacataggatagggcttaacaaagggttattagcacaaagcaaggaggcttgaacaaacttagtctttaaaagaaattattatttctaacatttattattatcctttaacaagaagggaaactttgaagaggaacttctactttctacagtgccgctcccagttggttcatcaccccaccctgcttttcttctttctctgtgggttgagatgtttgcccagtcagtcccaatacaagaacctggatatttcagatgaagttgctgaattcatttgccgctttcattcttctctgtgagtgctgcagactgcagctgcttctaattggccatcttggcccccttagtattataatcttatgtgaccaccattgtatatgcagtcattgactgaaacattgttatgtggcacatgactctgtttttacttaaaaacctcttaaagtcctttattttggattctgtcaaacttcataaatttgaatagtgtcatgagaga

SEQ ID NO: 8610 - DNA, 1031 bp, Homo sapiens
atgaatgatgaacattttaatatgaatgtaaagttttagagatacaccaagcgtggtgtggtactgggtttctggaggaaaaatggagttaataaattttacggccaacattccatgaggaagtgaaaaactttgcccctcccaaacccaaaataaaggaaaagcttgaagtatggtagtcacttcataagttcctttgagataatttttttcacctactttttaattcattatttcttttttacattctttctgctgttcatttttagccaataaatatttttatttcagatatcttttagttgtacaatttctattttcatttttagagtttttttatctctttaaccagtttgatccatctttttatctgaattccttgacatttataatcattcttttaagatgtaatttgctaattccccaagtgatctgcgattttgcttctcttcccttttaagggtcacatttttcagtttgttctcatattttatgctagacattgtataaaagaataatacggactagagtaggtaatattttcccttagaagaatatctcctagctagctagcgggaggggtcgatcccttttgatttcccgtgtcttaagcacaagatcaagcccttccctgtggccaagttcttgggaagaccatcaaaataaagctgagtttatggtttattacagtaaggatgaccactacattgacagtcttaatagcatctcagaggaaggacgtgagaatatttatgaaattctcagcaggtctttcagtgtgtgcattggagggaaaaggtcctgattaggatttggcatgagttgagaactggtagacacatcaaggggtgggttttaaagtgagtcttggccgggtgtagcagctcacggctgtaatcccagcacttttggaggctgaggcgggcagatcacctgaggtcaggggttcaacaccagcccagtctctactaaaaatacaaaaattagccaggcatggtggtgcatgtctatagtcctagctactcgggatg

SEQ ID NO: 8611 - DNA, 1053 bp, Homo sapiens
tcttttttatgttagagtgagggtcttttgcaaccttctacatcctaattagaagtcatccttggataaattgctttttaaagcccaaactggaaaataaatctgggcctacatatttagaattttagaaagttcagaaataaagttaggaaaggtaaatgaaagtaaacataagttagtgaagtaaaggtaaatttcatgttacctttcagttctcaattcagttctttgatgatctacttgataggagttgaaggctgcagcaagcaatgattgtaccactgcactccagcctgggtgacagagtgagaacctgtctctttaaaaaaaaaaaaaaaactacttgataaatgatagagatatttaaaaggtaccaatatttagctttggatggaatcaaaacaagtctttcagttactgagttttttaaggctaatgcaattgctattaaaagaaactttaaaatgtttacagttcaaaccagtgatctcttagtcataatactctgttttcattttactttttaattaagctttaaatttttctaatggcttaagaaaaaacttcaagattagcccatttatttgcaattgtgttctttaaatcttataatgcttctggaaaatctctgacagcagaatcctactaattctaagcttatttctaggtattaaattagctcttagtactttttgttgtaagttgacctaattttgaccttacaaagctaatcagctaacgaaactaattattaaaacaattattaaaacacatctgtgctgcttagaaatagtaagatttgtcttgaacttgcatcataggttttaatgggacatctggtgtatattttaataggcttcattaagtaaattttatgtcttgggggagaacatttctcattatgtgatcccacctctacagttggttttaggctcctccttgtgaatgaccatgtggtctaaagtatggtcttgaactttctactctgctctgaaacctgaacctttgtagctgggcttaggtggtggtgcgaacatttaaatctcttcgttt

SEQ ID NO: 8612 - DNA, 1305 bp, Homo sapiens
tacaaatgccaaaaaaaagttaaatgctatctgtttgaagttaacaaataaggaagtactactaagccaagactcagaaaagaaggtaatctgaaaaatgagactaacaattggggctgcttttgccctataggcatttaccaattcagaggaaggagctgaaagacttgtgtagcccttttgatattgctcacgtggataggaatacaaagtgggaccctaatagttttgcaggactttgcattgggactgtaaagactgtgcccaagaataaggtatgagagaagtaaatgaacacttgcatggactacagcacagcttcaagtcatctgggtggtccaggaagtctcaaaccctgatattagattaagatctcggtttgccatgcccccaggttccttgcagaaacaaaaattctttctagaagattattacaggtttcaaattattttcacaaagtttttcaaatattaatgttcaaaacatattcagaggtaatcagtcacacaaggacacaaaacaacatgaatcaagaaccagttgaagcagtagacaataaaaacagagctctaggtgctccaggaattagttatagcagacataggttttgaaaaactatgcttactaaattcaaagagaaaaaatactgcaaattttaacaaatggaaacattttttaaaatacggtttggaaaagaattgaacagacattctaagaccaaattaaatatgatttgaacagcagatcttcatgtattagtgtagagaagatctgcgaactggattttagggcagaagaaaatgtccagaaagaagcctggagacatgcaagaatgagacagagggaagggcaagaaataacgtagatacaagaaaaggtctaattacatatacatgtaaatgggcatcccagagaaaaggaggatgagaatgttacagtatttaaagagatgatggctaagaattttccaaaacagatgaaagcaacaatttaagaagtcaacataacctaaatagcataattttaagattgtatccaaatgtaggtgtatatctaagagaagtgaaaacatgtccacgcaaatgtttatagcagcattattcataatagctaagaaatggaagtaattcaaatgtctatcacctatagaatggataagtaaaatttggcatatccatgcaatggaatattattcagctacaaaaaagaatgaaacacgatacaacatggttaacccttaaaaacattacgctaagtgaaagaaaccagtcacaaaagaccatctcttatatgattccatttaga

SEQ ID NO: 8613 - DNA, 1269 bp, Homo sapiens
ttttatattactatgtttcaaattgaaggggtttttttttttcttaatctcttttaattaagagttagtagcatgcaactgttgtcccagctactcaggaggcttaggcagaaagatcccttaagcccaggagtttgatttcagtctgggcaccatagcgggactccatctctaaaattaaataaaaatttttaaaaataagaatcacacagaaaagaaaagaaaaaaaggtaacaccacaaaccctgtctctttaaggggcattctagatcatgttggtgtttgagggtagacacccattttaaaaccagaaactccctttgtttttttcagagcagcaatcttccactttctcaactgtacgaatgctgtctagtgagtagatagattatctgcacacagtttgaattttaggtgaattccttcctaacttctcctcatgcttctgctttctgtttaatgtgtgctgtggaactgagtattactgtaaaccaaacctcattagaaatgtgactgtgcttgaagactcaaagatactgtgaggcatttcacatagatgcaatttcagatatttgtcatagattctttccagtgcttacaactgaagttaactatatctgtcatttttctttgtcttaaaacttattttttggttacccagaacttcccagtatttctttcactatattattaagggctggaaatttttaactgaaattcatacacagatttggagattgattaataagcatgtgtggctggacgtggtggctcacacctgtaatcccagtgctttgggaggccccccaaaaaatgtggggaaaaataaatcctagtaagctaataagagcttttgtgaaaatttgggtttaaaagcagcttttgtgacatcttcagatacatgaagagaagcatttctaattctgattaaaaaaagactggcaataaatataacagttatagaagtataattacagaaagatgagaggctgttacatgagtttaaaacaattttaaaaggtacactaaaaattttgaaaacaaaaggatgttttagaactatgggttttctgttcttgttgttccagtttaccttctgaagaacttcttttaaaatgtttctagaggaagtctattggcaatgaatttctttacttttccttgacttgaaaatgccttcattcattctgtctagatatagaattttaaaacttttttttctccatcagtgtctttttcttttccatctggaccaccaatgacacgtta

SEQ ID NO: 8614 - DNA, 1050 bp, Homo sapiens
attaatgataaaatagaaatatttaatgtattgtaaagtttttacactgtatgtgaagcagttaagtatgtacattgtaaaccctaaagcaacagctaatgaatttaaaattaaaccacaaactatagctaataatttactggtggagacagaatggaatcctgaaaaaagtacccaattcaaaagaagataggggccaggcgtggtggttcatgcctgtaatcccagcacattgggaggccaaggcagcaggatcgctgaggccaagagtttgagaccagcctggggaacaaagcaagaccctgtctctaaagaaaaaaaattttttttaattagccaagtgtggtggcacataactgtagtctgagctacacaggaggctgaggcaggaggattgcttaagcccaggaggtccaggctgtggtgagctatgattgcattactatacttcagcctgggtgcagagcaaggtcctatttctaaaaaaaaattaaatttttttaaagaagaagatggggaaaaggacacaaacaggtgaacaaatagaaaacaaatggtgagatgatagacttaaattcacgcttaaatagactgataattacattaaacataaaggatctggaaaatgccaattaaaaggcagaaatagactgaataaaactaaatgctgcctccaggaagcacactttaaatataaaggcactgaaattccggtcccaggtaatgtgataacagcacattctatccaatttttcccgccaaatgtagctataaaaccagagtatatggagcagccatcaagatctctgaaaagtaatagcaaataattgggaggagaagaccggaattctaagtaccagcaaacttgtggtaaatttatgttttcttccaatatcccccagcctggaatccagatagcctgaaacctaggcagggatcagcacagacagcgagagctcctggaggagcaatgaatgattgaacttgtgatttaaaaaacaataccatttacagcagcatcaagaaaaattaaaaccttaggaataaatt

SEQ ID NO: 8615 - DNA, 1065 bp, Homo sapiens
catcattctgatttctgcttttatcttcacactgccttcttctgtgcctctgttccctcttcttttcttaggaggacatccatcattggatttagggcccaccttaaatccagtataacttcatctctagatcattaactaattacatctgtaaagactacatttccaaattaggtttcagtctgaggtttgagatggacatgaattttggtgtaggagagacattagtcaacccctacaataggtcaatatcaagtttccatataataaagtgtcttgttctgggctctctgttcagtttcattcgccagtttttctatcgtatttctaaaattatggtcactaacttgaacttaaagtgctaacattttatgtggttcccattgtgatattttctccaaaaaaaatatataggaagtttttgacttaaatatatcttagggctttttcaagttggaaccactagaaaataagaatttcagttctgtatttaacttttttagtgtcataaacttacttgaacatgtattttagtgcaaacgactaaatgcattaccattacggagctatctgtatgtcgggaaagtactctggcctgtgtagaaactggtagtgttctatatacaagctgtctggtttgatttcaggaaaataaggtgagagaatatgaaatctcatgtggtgagaactaaaacatatgaatggacaccctattgggtatttaactctcagtggttttgtggttataggttgataaccacattgatcagagttaagtttatttctcagtaattgagattgtattttacacatcagtattttatgcttttcctgttataggcagttttaggtaagacttcttttggagtctgttttaaacaatttagctccgaatcatcttgtatcttttcttctagtattttttctttgaattttttaattcattcaattcctattttttccttacacagacttttgaatatgttctgatcagtggctaatttaacatgtttttctctttcttatttaatttaggggaaaaagtcaataagcatatagactact

SEQ ID NO: 8616 - DNA, 1066 bp, Homo sapiens
ttgtgtctagaagtacatcaaggattctcgttttgcctaagactattcttagtaagaaatgagacaatgacatactcagcaaaatgaagaagtaatctaagttattttattttacattctgcaaagtgaagatataaccccatcttttgattggaaatcagagcaaagatttttcctaaaaggagagattgtaaaatgactagcctggttgcttttgaatatatggttttcttctatgcttctgtaagcaaaacaactaacatttctctaggataattggaaaaacttatcaggagtcaatataaatgaaactataataaatttgtttattgtcttagcagaaatgtagctgcacagcatatttttagaggctactatttcagaattgagtgatcaagatactcattcacttcatttgctatctgttgtatttagacgagctagtggaattcattcaaggtccacaagtagatataatcacatataagtggattctaattataactgtattttaggcctgtatttactcacagattctcagtcttcccacaacttttcccaccggtttcagtattactttagtacaatagattgcattatcttgtaatttatattaaatatagtggtatgaaaattgtacattttcaaaattatctttcattctcttttaaagaacacagagaaattactgcttttgtggcacattctgttactttacttttgtagcattaggtatatttccaaggtgctctttgagtatgttgtaaatatgtctgttacacattttatctgctattttgaaaactgatttgcccagcattatttgggcataatgagatactgattgtgatttttccaagaacaaggtaagtgaattacaatctggacatgaatttccgatcatttctgttggttgatgtctctccatagtattatattgtacctgtcactagagactgctgagaagtcattgggtgttatctcaggtctgtgtcctgtggtgtgtggaccatcgtgtaacctaaggaattgggaatccaccatatacagagggaggcatccctat

SEQ ID NO: 8617 - DNA, 1060 bp, Homo sapiens
tgagatcaatttatacatatattcatttcatattttggtatgtttgcagcatttttgttgtatgtgcatgtagttaacatgcttatcttcctcctgagtcattattgcttaatcttttatatggaatttcactttataaaacaaagcataatctgttgctgaaaactctggttatttgtcttgatttgactaaattataaataattccttttgtgcttttgccatttcagaataaaactataatttacaattgtgtcatttatgtctcctgcagtttcaaaaaaatcagcaaagcaaagattctatcttcttccgagatgggattaggcaaattgattttgtgctttcctacgttgatgatgtaaagaaagacgcagagttaaaggcggtaagtgcattataacagaagtgggaataataaaaagaagcacattttataatttcacatggatatctggattgaattatgttgtaaaagtgagaggccctgaagtgttactgaaaactgaaactgaatgagataactgtaaagtaggcagcctaagaatagacatgtaaagtcaatgttatctttttggatattttgcatactaacttatttttcttcttcttccaagtaactgattctttttatagctcactttagatattaaatgtaacatccaaaatttgaggtatgtgtctgaatataataattaccttttgtatgatattttcattttggaaatgtatgactaatccattgctccaggtatagcttttatattgtactctattcctgattctattttatttgtattacacatcactttatgagcttatttattcatgtttttacttgtttgctgtctccaacactataaattaagtttatgaggccaagcactttgtcttgttcaccgttatgtacccaaatcctagaacaatggttggactataatggatactcaataaatactcaatatttgaaatcataaattaatccatttttatacacatatatgtgtgtgtgcatacacacacatttacttatgtacttacaacataaatgtcatataaa

SEQ ID NO: 8618 - DNA, 1035 bp, Homo sapiens
agttcaaggccagcctgggcagataatgagacacagtctctatgaaaaaattttttaaaaattatccgagtgtggagacaccttcttgtagtcccagctactcaggaggctagggaggatcacttgagcccaggagtgtgatgctataatgggctgtgatcacaacactgtactccagcccgggtgacagagtgagaccctgtcactacaaaacgaacaaacaaacaaatgaagaactaagcacccaagtggttattttcagtaatgacctatagttaaatgtaagtttactttttgctaagtgaagccattttgtccttcaggattaaaaagtcttgatgacatactggcttaaaattccattaaatgtatagtttatttgaagagtattgatctttgtaatagtgaatcttttcaacttggagcatatgtctctctgtttataaagtttttttataatttatgttattcagtaaagttttgtacatttcttcagatagaggctctgcatatttcctggtgattattcctggatatactgcatttttgtagttgtgaattatagtacaagagaaaagcagtacctgacattcagatggagcatttttatatacaaccatgggaggggcagagagccatccagagtcacagccattgtatattgaatctgtcaatactgagcaaataaaacaaaagcattctgcataattctgttgatttttttttgtcataggaaagaagaaaagagtttgaaactaatctcagaaaaacaggtcttgagttggaaatagaagacaaaagggtaaatgtagttgataatttatacaagcctctttaatttaagtgttgttttctcctactctggcctttgcctggatagactctgtgtttgggggcaatacaatagctcttttggctacagatatgtgcaccgggatgatagggcctgtggtcttacaggtaagtagatgagtactgtgaatatgcagtaataaatggaacactttataaattgacacagtttgcattcaggat

SEQ ID NO: 8619 - DNA, 1032 bp, Homo sapiens
ttgagatgattttatgtttttcacctcaaaccagtcaatgtgatatatttattgatttgctaatttttctttcttaaaaagcctctttttaaaaaaagtggtacattatcataatatatcatctttttatatagcatggaatttagttggttaaaattttgtttaatgttattccatttattttcatattatgtaagtcatttcctattatagtcaatttcatatttgtttgaattttcttctgagcatcatgacagcatcaggattagtaagtggtcttagtggtaactctctcctccacttattccttagccaaactgtctctgagtaaatatatttctctgagcagagtaaagattgtctcattttctcaatcaccctaataaagaactcttgacttctgcatgtgtcatgaaaagaacaccagattttgacttgcgctttggctggtgtcatttctctttgctctgtgatcttaagttatttaatctctaatttctgccagtttccagatctaacactctgattctctgatcgctttctttttggtcctatttcatatattaacttttatcacttccaacagcttggctttgaattggtggagacgccgaaaagctcggacaaactctgagaagctgtatagtcgatgggagcaggatcatgaccttgaaagttttggaccccttgggcttttctatgagtacttagaaacaggtaatttttaaccactgttttgaaacatagagttggcatgaatgagtggtttttcagctccagatacttctttctgccttgcacatggtaggtgttcaataaatctttgactggttggcaaaaaagatgagtggagggatataaagaaaatttgttccctatttccctgttccatcaaatagactgcagaataaagtttagcttcaaaacaccaatctcagagacataattcctgttaattgaatgttaatattgttgaaccaaatcaagtaagagtcattttttaacacccatctcaaattcgctttgatggct

SEQ ID NO: 8620 - DNA, 1027 bp, Homo sapiens
acttgggaattaattctaatgaatttgccaagcatgtcatgattgaggaaaacaaagcacagctggctaaatcaacactctaatcagtatagtgaggaagcagcaggtgatctgccttacttcactttatcctctggttttagggccagacgccagaagccatgtgtcaattttaccctttcttttttttttttttctttttttttttaaactcaaagtttttatacacttttatagaggccaactttgtgatgttggaaatgtactacttctctgcttcattgactgggccctctccagatgttgttttctgaggtgctgtaaatgactgttgaaagtgcaggtagaatcagaatactgggaaattatggagtcttgcagtttagtaagaaacactggccttgggctgtcccatcactttccagtgcatctatttatttttgtggtcttctcttgggttatttgatacctccttccccattaagaaaaatgttggggcaaaaagaaatggatcaaagagactgactgagccctatatatcctatcattttaaaatatgcaaatgaattgccaagatcagatgacataagaaaactcacacattaaggtgttaatgtatcatagcagaggtttattcctaacacattcaactaccatcagaatcccagatagttcttcctggtaaaggcagaattccttttctcgagactgaaattttgggtttcaacataaaacaacttggttcttagagataataatttggttataatagtttcaagactgatcttatctggaaagcaacattatgaagctgttagattgcttcaggttctcaagcaaagacacaatacagaagtaaatgtgttttcttagtagttaatggatgcaggacaatgtatattgattaatttgttgattttaatttagaaaattgttaaattatttcttaaaaatcacttttcttctggaatgccaatttcacatcatgaagcctttttgtataagttagatacgagttgtttatgat

SEQ ID NO: 8621 - DNA, 1042 bp, Homo sapiens
tattcgtcactttcctgaaaccatgctaaccaaaatcagtagccaaaccaattcagatagatgtgtctcatctaattaaacccattggtttttatgggagggctgcattaagagcacccaaccaccacatgtaagttgataattaccagcatggcaggtgattttatctgctgaccaagcgcatagttttgttttgttttcagaatgttctagggaacatttgagattttatgtgaaataaaattttaagtgccaaagccaaaaaaatacttaactcttttcaaaggccctctttcatccttgccttcgtcaactttcctttgcacacaggaagcaaaatctacttcaagacatttattttagaggaatccattaagaaaggattgttttacttaaatgaaatgctgtcttatttttgctgtgtcttttgacacctcttagctttaacattcttcttttaaccaagccattatgcaaagttatcaaagaagaggagaaggaaaggaggacagatgaaagtgacgggaaatgagaaagaagaggagtgaggaaacagttatttccttatgaatcctgtgtgtttctttggaagaaagagctgttccgaggaagtttggtccagctgtggttgataagaggtatatctcttaaaaaagacacctaatgaaagtgagagaaaagctaaagaaaatttcaatgtgaccactattatgtgtcaaaataaaacttagattccaaagtggttttgtagtgttgggtgctatgagtaggtatggatctctgttgattgactccagttgaaggtgagaaatctgtaccaatcattcaaaaagggaatctattgttttgaaagaaactctctcatatttcctttaaattgttaatagttgttatgcaactaaagaatgttatgaagaaaaatagcattgcaaaaagtaccattggccagccttacaagtcagccacaatgagtcggtataactactgtgttattctttttctagacaaattttgactcttctacttttatgtgtaataattc

SEQ ID NO: 8622 - DNA, 1044 bp, Homo sapiens
gaaaaatatcaaattaacaacctaaacttctatcttaagacacttaaagcaaaacaaactaaactcaaactaagtagcagaaaggaaacaacaaaagttagggcagaactagaataaaataacgatacagaataggaaaacatagaatataaataaaaacaattgagaaagatgatgaaaccaaaatctggttccttgaaaagatcaacaaaattgacaatgctttaactagactgaccaggaaaaaaagaggaattactaaaatcaggaatgaaacgggacatttctactaaccttacaagaataaaaaagaatattaggaaatactataaaaatctctctctcttgccacacacgcagtatatactatatataactgaatgtatgtcatgtaacttatctaatttgttgaaaaatatatttgtcacacaattcacgtcagagggtcaccatgtaaattttgattcaaaaactcgagtatggcatgaacatttgtattttctgaaaatataaaggtttttgtgagtgacatgtactttttgttgagaaccattgatctaccacatggaaggcataaaaattgtggaattacaattaaatatgcatcaattagaattaggtatagctgcatataaacacaaaaatccaggctgggcatgttggctcatgcctataatcccaactttggcatgatctcagctcactgcaacctccgcctcccgggttcaagcaattctcctgcctcagcctccccattagctggcattacaggcgcctgccacgacgctcagctaattttttgtgtttttagtagagattggatttcatcatgttgaccaggctggtctcgaactcctgacctcaagtgacccacccaccttgaccttccagagtgctgggattacaggtgtgagccaccgcgcccagctattcccagtattctgggaggctaaggcaggaggatcacttgaggccaggagtttgagatcagcttgggcaacatagcaagaccctgtctctacaaaaataaaaaataaaaaaaat

SEQ ID NO: 8623 - DNA, 1072 bp, Homo sapiens
gtagcacttgaggtgggaatttgaatcccttagctcatttttttttttgtaaactactttttccagtgattcagtgtcatattccttagttttccaaaagtgttcaaagctaatatatacagagttactaagctccttgcatcttagaagtgtttgattaggaatatccatattttgtatatatctacagtttgtgccacgaactgtttgcctctttactactggaaaaggaatcattatcatctttaaactgtgtcagattagaaagccaatttcagaaactgcagaatgattttttttttaaaaaaccctcacttttgaaaatctgtttctccagagccaatctcaataccaaaatctgtattagccaacgttctccagagaaacagaaccaatatgtactatgtggtggtggtgtgtgtgtgtgtgtgtgtgtgtgtatgtatgtgtgtgtagtcatcccttggtatctgtggggtattggtttcaggaccctctagtggataccaaaatctgaagatgctcaagtcctttatgtgaaattatgtagaatctgcatataacccacataatcctcccatatactttaagtcatctctagattactgactatctaatattgtattgcttagggaataatgatgtgacaaaagtctgtatatgttcagtacagatgcaaccatccatttttttctgaatatttttggtttgcaattggttgaatctacagatttggaacccacagatacagagggctgactagagaaccaataaaagccagtggtataattcagttttaagtacagaggcctaagaaccaaagaaccgatgatgtaactcccagtctaagtccaaaggcctgagaactagggtggttggttggggtggtggctgatgttagtcagtcctagagtctgaaggcctgagaacaaggagctgtccaagggcaggagaagatggatgtcccagctaaagaaagagataatttgtcctgattctgcctttttgttttatgtgggccctcaatggaatggataatgcccacccacataggtgagtgtgatcttcttta

SEQ ID NO: 8624 - DNA, 1030 bp, Homo sapiens
attcaagtgaatatgaaatttccactgccatgaaagagtatatagtgctcttagatctccgaacaggaggatttaaagtggtaagattttcttgagtgggaagtaatcataaggacaaagaatctagacaattaaataggttaagaggagggtaaagaacatttcaaagaggaaagggaacatgtacaaaagttctgtgctgggaaggagcttggtaagaatgaaagattgtaagcaagccactgagtgagtgtgctgaaaatgcaaagagggagatggtgcaagatgaggctggagaggcaggtggaggtgagagatgattaagtctgctttttaaaaagataattctctctacactgtggaggatggattggtccagattacttatgaggcttttgtccagacaaaagataatgagtggtaatagttgagacattggagaagaatgggcagatttgagggagatttaagaggtaaaaagcataggacaaagctgacatttattaaatactgtgtgagttcaggctgctagaacgactaggttgcttaaaaaaaaatggacatttatttctcacaattctggagaagggaagtctgagatcaaggtgcccacagatccagtatctgttgaggacctaggacttgaagaaaaagattgttttctggcgccatgaagctggagtgaaaggtaaattgtttatgatactttcaatacttgggctattttcttaatatttattcttaactttttccttgctattgttaatcatatttaagttccaaaacacccacatgctgatccactgtatacacattattttatttcatttagaaacttgtatctgtaaagtgactttaatttatttgaaagaagcattttattgctattttatgtagaataagcattaccacatagaaccaattaatactgttataactattaatctatataaaattatataaatttttctgtgtaaaaattttatgtaaacttttatttacatgaaagtataccaaagaaatcaccccg

SEQ ID NO: 8625 - DNA, 1032 bp, Homo sapiens
tttcttgcatgtaaatttccattgaatgctctgtgggcattttcatatggcaaccgttttagccaagatagaaactttgtttccctatttatgtattaatggtgttttataggttgggtaaaaaataaattaaggatagaaaaaaaattaaccagaaataacagtataatctctagattaatgcatgttgctgttaggtactatatactacattcatattctataagaatgtttaaaataatcatataaataataatttagctttaatcaatataatgctagaaattgaaaatagtttgtatgagaaagacattcggggagtacagttttgtaaatgtgttgtttgctgaaaatcaacattatgtatgtatgttatatacatttattttcaagcttcttaaaaattggacatgttgtagtttctatagtttttcctcaaaataattttaatgctagtgatagaaacttaaattttttacaatggacattttatatgaatctttcgctgtggttttattttgcaatgttttgcgtaaaagttgaaaagtgagcggaaactatgcaatcactctttttccctttgtagaattcagggatatgggatttgctgtaaaagtgtgagtagggaaactaaattctataaaatgaattttatgatcattcagatttagtacttaagactttattatttaattagtcttaggtgatttgggatattctgaccatcaactaaattttttagtctaatctaaagtggtactaatggtgttttaggagagtacaaatacattaaattcactatactgtataaattagcctttgatggttttcctctttgttaggttaatttattctaatgactcagactgggggatccttttattttttatttttttaatttctaacttttttgtttacatggtccttttgttgctggatttctcaacttgtcctcataggacatgatggagaaagtcctcataggacatgatggagaaagaaacatgttctaataacatattctcaaggtta

SEQ ID NO: 8626 - DNA, 1335 bp, Homo sapiens
atgaacaaggaccctattttttttttccttaatagaagatcacatttttttggacatgtttttagatacttttcagacagccagaatagggtttcaagagtctgttttggagctcagaggtaatgtctgagcatgagacaaagatttaccagatttaattcttattaagtcataacccatgtgatacagtccttgaggagtcttatagtcaaaagaacacagtacattaaaacaacaattatttaaaaacgaagcaagttctttatgcatttctcaaaaccatgaagggactcttaattcccagcagtactctctagtattgctcttgttccctttctcatcttttgttttcatcaaatgtagctggtgttccattcttttttcaaaaactactgaagaagctacccctctactctcatccaggctagttttattctaattcatccttcttcttttgtactttgctctgtactatttacgttgatgtaacggttcctattttgacaacataggaccttccttgcagtggatgatagggaaagaagctggtagcataaagccagatgttcctttgatgccttaggaaggggaaagtcagagaacagttatgggaacaaagacgcattaatgatttttgtcatgtaactgaatgatcagcatgtaagtaaaaactaaaaccatgagtctagatgaattttgccttgagaaaagatatcttgatcgttgagtagttccatcatttaatgactcggtttaggaagatgagcatagaggagactgattaggatctcttttgacatctgactggaacttctgagctaactcttgctttaggctgcagcctaggcatttgtttctttgaaaagccttttttgacatttcatttccaggttaggttctgctccagcaggcactgattgcctattatggtccttatcattgctataattatttatttaattgcatgtggtccccaatagactctaacctctgggaggatgagagacaagttcatcattttaaccccagtaagtgtaatcttttatgtagtggattgcaataagcatttgtttaattaattcaggcaggtattctcgtttggctcattaggtttcatatgtgtatgtcaatattttctacttagcttactgccaaaatatatagatctgttctttagaaaacaacataaaatagctgtactccaggttcttatatcagattatgactttgacctctctgtcacctaatacctataaaaagtttgggggaaataaaatttatgaaggactgcagtgtacttggaccatataatattcgcagtcttagaattactca

SEQ ID NO: 8627 - DNA, 1080 bp, Homo sapiens
tttctttatccagtctatcattgatggacatttgggtgggttccagcctttgctaatgtgaatagtgctgcaataaacatacgtgtgtgcatgtgtctttatagtagaatgatttataattctttggtatatacccagtaatgggattactgggtcaaatgatatttctagttctagatccttgaggaatcatcatactgtcttccacaatggttgaactcatttacactcccaccagcagtgtaaaagtattcctatttctccacatcctctccagcatctgttgtttcctgactttttactgattgccattctaactggtgtgagatgatatcttgttgtggttttgatttgcattactctaatgaccagtgttgatgagcatgttttcgtatgtttgttggctgcataaatgtcttctcttgagaagtgtctgtttatatcctttgcccactttttgatggggttgtttgtttttttcttgtaaatttgttgaagttctttgtagattctggatattagtcatttgtcagatggatagattgtaaaaattttctcccattctgtaggctgcctgttcactctgatagtttcttttgctgtgcagaagctctttattataatttgaccccatttgccaattttggcttttgttgccattgcttttggtattttagtcatgaagtctttgcccttgcctatgtcctgaatggtattgcccaggttttcttctaagatttttatggttttaggtcttatgtttaaatctttaatccatcttgagttgatttttgtataaggtgtaaggaaggggtccagtttcagttttctgcctagggctagcctgttttccctacaccatatattaaatagggaatcttttctccatttcttgtttttgtcaggtttgtcaaagatcagatggttgtagatgtgtggtgttatttctgagggctctgttctgtttcattggtctatatatctgttttggtaacagttccatgctgttttggttactgtagccttgtggtatagtttgaagtcaggtggggtgatgcctccagctttgttctttttgct

SEQ ID NO: 8628 - DNA, 1031 bp, Homo sapiens
tatgcacgaatgagttaatctctatttttatactaaatcactgtcaaacacataccttcatttccttaatcacataatataaaataactacagtgttaatatacttataaagaaacttcttaaaaatataaaagcaatgtttttcttcatgagcttgattaaactggaataaccttaaacaaatctttcctggaaacttcttagaagtaaataatagaaagcttcaaatttctgtgagatatgatagctatttaaaattaaaaattagtaaatataaaattaactaaatttatccagtaatccagaagttgttctgaacaaaagtaggtgagtttgataattatcccagtgctatggccttctctgaccaaataaataaatcacagctgagctttgagtatctttgttgttaagttgctagagatttttagaatgtttgaaaattcatcacttatgaagtgcttaaattcaatagtaagattgtacattggtataccatataacttttaaaatggatgaggtagatctcgtaggggaggtatgtgatattaataatgtataactcagggtcattaagaaggactgaaaaggggaaagcgtattggacagtacctggtacataagaacacaataaatgtttgtgcttttttttttttttttaacacggaccgatgtccatcttatattaaaataatagaaacatagtcaccacatacttgcaacactagacatatagtataattttattttgttatctttatagggaaaaatatatgtatgcataaatgaatatgtttatgtttgctcctgtatagaacaaggtatgaaaaagaagcacttctaagtttatattgggcaggctggatggaggagatgaaaattacaatgaacttttcattgttatttattatttgaaatgttgcaaatggtaacaacaaaaagtattctgtaatttcaaaagaaaatacattttatttttaagaaaataaaaattttctaataaatttcctaaaaaataaatttttaaaatg

SEQ ID NO: 8629 - DNA, 1034 bp, Homo sapiens
tagattaagtgacagttctgttgtacgtgacttggactatgattaaatacatcctatgttacacataagagtgaaagctatttatcacaaagaatgataaatactccaattatttaatgtaattgaaggacatactttaaaagaagagaaaataaattttacttttatgacaagtaaagatttattttgtgaataggaaaggatttaagctacaagaggaaacatttgcagaattaggcagaatgagtcatcatagtaacaccaatacttctgataaaatgggaagagatataaatttattgcaatgcattaattgttttgtttgttgtaaaacttttatgtgcttctgagagttttttcccttttgtataagcccatataatagttaccaataaaacaaagtaagtgttagcagacagatacttgaccgagcttcacaagacaataataaatcaagggttttggtaggagaaatgtttgttaaaaaatgttagctaactataaggttggacttctgtgttcacagttacatgttctaatttatttcaggtctaacaactatatcaaatgtgacagatttctagttgtcgacatgttagacagaaaacatgcagagccttagagaagtcagtaatatagtcttgagtgattcagcacacaatggtagaacaatagcttgccttagcaattacaaacatttcaggggcattatgaactctttttagtgattttttttttttttaatgtccaaataaacttgtcatactagctcatccctctcttaacactgaccttactaattatgtcaaaggagcatccctctgttgtcaaatatttgccaggttgaccttgtttggaggcgcaatattcccaaaggctgaaccccatgaattgtatatacagtgaaggtaatttaatttatttttttgttttttacatgaatcaatgtttttgattaggatgatcttttaaaagtatacttagaacttagtgtttttaagcactgttacaaaccaaccttcttgatcttactg

SEQ ID NO: 8630 - DNA, 1115 bp, Homo sapiens
aaaacataattttgctagtgaggatgtgcagaaaaggatactttcatctattttgggtggacatcttttaatataaaacacataatcttcttagaatcttttccatctaagtaaaagaatatctaaggaaacatgtttttacatttcctacaaactttatatatacatcgcttgtgtatatataatcatggaaaacttgaaaaagacaggattaacaatggagggaggttcagggaaagataaaacaatgactaagaaaaacccagagattttatgtttacatctctgcatatttatgcaaaatagaaaattcagagttatatataatttattaatatccacatatgtagtaataaaatgaagtatgcatgagaaagaaaaacacaaatttgtgtttgggagtatttgtggcaataatggatcgatcaatggatagttggttgaaaggatgcatagatagattacatatcttcttaaaaatatttatgtaattgcaacctgtagtagggcacagaatgaaacagtttgtcattttagagtaaacaccttttgaagaaacatagtaatttttttcttttatttattttgctgttattctaaaagaggagttaagtttctcttaaaaaatcccatgtcctttactctgtcaaaactaagtcagaaatagaaactaacatttttacagaaaactgagcaattcatgggaaggctgagttttaggctaacccattttagctctttcagaaaagatgacatgtcagatcacctgttgtttgaagactgaaactttttgctgttgcctctgaagactgtataagaggaaacacatttaacttgcagcaatgaggtgttggttgactttttaacgtagtggaagatggatattggaagacaattttaaaaatcaaagttttttatcttctgaattttggaataatacatactatgtatactaagtttagagaatataggtatgtataaagaaaataaaaatcattccatcattttactataattttgtttctaaaaatataataaactgttattttcaacattttataaaagaagatatgcatactggggtaaatttataatatgaaagtataaactcaccc

SEQ ID NO: 8631 - DNA, 1049 bp, Homo sapiens
ttctgtcatacactgtcaaagtgaaagaattgtcacaaatataaacaagcatgaaaaaagacaacttggaaaaattatctaaaccattttgaactattgatgatgatctgttacctgttcattgtttttggtaacaaaaacattacgaaaataggatattgtattttgccccatttaatattattaaatataaccttcgctcaggagatgttagccttgtaagctgaagctgtttttttgaggaggtaaaacttgactctagtctaccaaacatagttccgaggcttgaggaatatatgtttattccataaacatgtattataccaactacttttcaggcaatctactagttttgacggttccagagggattaagacctatagtctgtgacttcatagagtttacaatgtaagcagaaattagacagaaaacagataattttacaactaattatttaattaaaattgtgatcatggctatgaatgagtagcgtatgatctcaggaatatgatatcaggatctaatctagtttagaacatctaggaagacttccagagtatttgaattcaatttagaacatgaaagatcaatgatagttagctgggtgaaggagggagggctattctggcaagagagagaattgaagtgttgaaaagagaatattcgaagatctttggcagaaatgagaatggcatattgaaagaactgtaatgtgaatggatgatagaaagggagaggaatgacagagtggtaagttagggctaggctatacaggaacttgttagggattttggacttcaccttaagaacaaagggaaagcaccaaagtttttgaaacagggaactgacatgatcatatttgcacttttaaaagaatagtcttcttgtttctgtgaagaatgagtaggaggagggcaaaattggaaaggattcagtgagatcaattagaaggctaggaattgctgctgtatctgaaagctgaggatagttgggcctagatttttgtttcctgatcattctattagaaattctactttgctttaatgatc

SEQ ID NO: 8632 - DNA, 1029 bp, Homo sapiens
atactcaatatcatatggatggatggctagatgaataaatgaatggatgatgattttttcattttctatatcaaatgtataaaatagaaattagatataatgggctgagttcatcttaatttgcattttacaatgtaaatagaacctttaaaaatatccagactactctttaaaatatgttataagtctagatctaagttctagagagaattgtggagtaaactgcagattcacttcctcagtaaatatttatgtaaaaatgttaagtgataaaccctgattagatataccatatcctatcttccagtgggctcaaaatccttattactagcttttactatggagaaaatagttttcactactatttccacttgcagtcctgtgccaagggaatctatatgggaattatatatattatcactagaaaaagatgcttagatactctatattataaataaactttatttttgaataatgctagtctgtgttcactgaatctaaaaaattcatgtttggcatgcgaactcctatgcataaaaattttttctttgaaagaaaaagtatactatataatagtaagttattaaataataattaaagatattataattcatgcaataatttaaaaagtactttttatatgaacacgtttatttattttgtgtcttctagcatttttcatatcagcaagtatattaaaaggaacatattgtgtgcaatgtgtaggcccagcataggattctctatactaaaattttgcaatgatactggttaattgctagatttcaggcacctttctaacctccgttttagtgggcgtgaaagggtttatttgtaagagatattgctgctgacagaattttatctttttctcctggaatctcaacagctactcccatgttataggcatccccagaaagctcgtcaaaggatttccacccacactctgaatatctaacagggcttgacccattttttttctcttattaatatagcagcatacacatcatgaagaaagatagaataagg

SEQ ID NO: 8633 - DNA, 1034 bp, Homo sapiens
catgctcacatctcctactaaggtatattagtgatacacatgggtaatgtctgtgagcaagggttaccatatttgagaactgcactgtccaatatagtagccactagccacatgtggcagctagttaatcacttgacatgtggctcatatgactgaggaactaaattctaaattttaatttaaatataaaaacaatacttgatttagttattggaaaacttttaagcatttttgaacaactttagcatataaattgcctctttcactgtgtattttatgaactataaatgctatacttagtatttctaaatactgtattagtatgatgtgtactagaatactgtatttctatatgctatatactaactagaatattataatatttctaaataccgtatcaagtatttctgatgaaatgttggtgtttgaattgagatgtgctgtgaatgcacactgatttcaaatacttagtataaataaagaatgtaaacaaatttgcatgtataaatatgtccatcgtggtatatctgaatataaaaattattaatgagacataaatttgttgatttctataatttttcagggggcaaaattattgaaaattgaataaatgaattgaaaagttctacatatttgaaattgtagatattgccacagttagacaatttataataacagttttaattttgttttgtgactgattttcataattccttaggacacagattttgttcatgaaaaggaatctttctgaaaaatggaggcatttatgcctttcactggtttatgaaatgaattcatactttaatgtcataaatgtcagtcaatttgcatcttttgtaatttgacccaaaaatgaagctttatgtaagttcaaaacctaagaacacttaagattgatcggtaatttaaactgagcttcttgtggggaatgaaagtaccatttacaaatacggaactaaaaactcattctctcgttattgggttgctgatgtctttgtcccataatcaacttttagtggtacagtagatgg

SEQ ID NO: 8634 - DNA, 1023 bp, Homo sapiens
catattccttaagcttggtatgtgttcttatccttgtgtctgtctagtaatttttattttatttcacacattgttttttaaaaaattattgtgataatttgagagtcttgaaggtgccttcctccagataccacttaatgttgcttttggcaggcaattcatctaagactatgttaccctaatgcaataaagcttgagttgattggaaactgaatttcagtacttgtgtaataatctattttttgttgacctttctactagtttaatcccagttttagccctttagagccccatctgaaattctggggctatttcctggtcatatccacctggatgggtcctgaactctaatatttatctcctgtatccaatgaagctgccgaaagttctcctcagtttcttcagctctcagcatccgcttgcaaataagtaggccattagtggaatacctgctccaatgttgggctcacctgttttcacttttctttgttccctcaagtcttagccgtttttatagctctctgattccttcaaatgggtaattataattgtcttatctagcttttctagttttgctctctggaagagttggtctgatcaagttaaactgctgtaaacagaaatagatgtttccaaatgtattgatttttattgtttcctgggatacaagctctacagtcattggtactttattttctttgtatctcaggtgactagaaaagtgcctgacatttagtagaagctcagtaaatatttatttgttgtttgtttttatagttgagcactggacagtcttaactcctgagatgaatatgtctgcaactcagtgatcatgggactgcctattacatattagtgagtggtaaaggtttgggacctgctagattgttattccagagtggggaaagattactccactgaataaattttaaaagggttactgagtgagagaaatataattgtgttttattatttctaaaatatattttgttaaagtcaatgtgtgagctacaaatgaatgac

SEQ ID NO: 8635 - DNA, 1056 bp, Homo sapiens
tgatcagcagtatgttttttatagatttgctaagttcaatttgtgtctccacaagtaatcagttattttacagcctcagatttagtcaagttcttgagttagactttttaaaatatcatcagcaaaccttgtatcttccatactgcaaaaaacattcaagcagtaatttaaattttgaacaacttaaatctaaccatttttcattgttttagtttgagaaaaatacacaggaaataaaaatttctttgtgaattaaagtttaaggttagtatattttgacttcctgctgccttgaccttgatgaatgttataaaccatcaccacttgccataatgatgggtagttgaaatagaaagtctatttcatttgtttaaggtttcagtttctgactttaaaacctcacttctcctagagtatgtgtgtgtgtctgactttatgtctcagtactctgaagtttcacgtcttgtcaatgagaactgatgtcagtgaactaattggctcttcttgtgcgtaggtaccctgacatgcccactgctgctgatgttgtgaatgctttagatcaacaggcacttgcatctatcctaagaacatacggggaggagaagcatgccaagaaaatcgcttcagcaattgttcaggcacgcagcatctaccccatcaccagaacccagcagcttgccagcatcgttgcaggtagcctcattaattctcaacagtgtctaagagaaaaaattatatttacatgtgtgcatgtgtttgtgtgcatgcacgcatgcacatgtgtgtgtgcattaatcccccagactccctgagggattcatttgtacttgaaatccaggatagaatcttgcctatccttctctaatgtcagctttcttttgcttttgcatgcttctcccccaaaaaacctctcccccaaatacaatttttaaaaaaatatactgtagtttgctaatttgtataatagtagatttttattttacacaggataatttatcatttgtgtctaccaaggtgaaacatggaatgatgagcaaaaggatttcttgatccatc

SEQ ID NO: 8636 - DNA, 1064 bp, Homo sapiens
tgaattgtgggggactctataaacccagtacaattcctaagcaatatctttgtttgacaaacatgtattttggcaagctataatatgcaatgactatatttaaatgtgttttctgattctgataaattcatactaaatatgttcaaaactatcaagcactctaggaaatatgcagcacagttccagacacatattaaaatccatattgatggaaatataaatcactttctttgctttccaaaaactaataattcagtaggacaaggaagaacaacacacttggaatcacacgctcagtaggatcctgtaagtcacgtgattaagctgttaattgtaaaatctaaagtttggtgcgttttgctagtataaataactacagttccagtactcttccatatcatgggaattccaaaagacaggttcaagactccaagttggaacagagcacttacaagcattgtgaattactttgcaaattatcaaagcagtaatttataagcaacttacaagagaattccaaaaacaacctgtaggatttcactgttcttactaccacacatgttcatacatatgctattcagaactactggccgtgaatcttaatataaatatttaacacatatgcagtgttatatacagtgttccctccaaaaatgattcataaataacaagtccacattttgttaaacaatgtttattctaatgttctagctaaagagttggagttgtaaaatctaagagatgaaaatggcctaagggactcatctaatctagaactagattcttcatcacctctaataaatggtcatctagctttagcctcttcatcttcatctctcctactccccattgtattccggtgaagacgagcacatttcagcctgaagttgccagttccataaatataatacaggcgtagagactttagaaaggatagatttcttagaataaaagcaaaactcctttacatggtttgcaacttcctccatgaactggctcctacctgtcttttcatcttcccctttccacataatagtctttgttccagccatattgaagttctt

SEQ ID NO: 8637 - DNA, 1028 bp, Homo sapiens
agataggtaggtaggtagatagatagatagatagatagatagatagatagatagataggcaggcaggcatggatggcaagatggatagccattctatcaatcaaccaatagatagattgatcgtaggtagatcaatagatacatagatagatggctctggctcagacttatgtttccaagctgtactccctcatttgtagtggcctgctctgtatgtctgccgaaatttcatgtcaatactttaatctcaaaatgtataatgttgaaattttcattatcttctccaccaaaatcgtcttctcttcctggcgttgttgtccttacagtaatatctggcttccatttggttgctgccaactacctggctgatcacacaaatctcgcttttgactcgtcacaaatctcacttttgacaccccaccactgttgactgacaaacctcctctttaaactgttcttggttcccagctaacttgttttttctcttggtctatacctgcccaactgtgactaactctagtcctaaccaacttctacttcatctcttactatttagtgcctaatcctattacctttcatctttactaacatgggtacctttcactttgcatttttaattattaccattgagtagtattcttttgcattgctttggggatcttggagcataccccgcaacccatggtccagatttttatcaccatcctctagccaagtccagtttccctaagtctgatttctcttttgccaataattgactgttactcaagacaaataactttttctctctggttctcgtttattttctttcttgtaaggggtaagtgtattattagaccattcaatctcctgcgttttatgatgctacaacagcattttcctagtctctgggatggaaacttcagagatatccctgggtcatttttttctgtgccccccacacacaatttttcatttgatcacttaaattctgtcctgatggtggctcttaattcagtcatctcttgtaaatatccaccattaccatt

SEQ ID NO: 8638 - DNA, 1029 bp, Homo sapiens
ttacttcctattttacatgaaaatatatgtttgttcatattcttagaatactctgaaacatatttcccagtggcccaaactctttattaggaaaatggacgaattgaatagcaaatggtaagaagctggccttccttttcagttttgatatggacatcatgttcctgagagacctggttgttggaagataaatcccctagtgtctaacattctccagacttttggcaaagtaatttttatagaggaaagaaccatcacactgatttggtttactttaaaccaccaggttctcaattctgtgattcatgtaagatattatttctttccgtctctgatctagtttccaaagaatattaatctgctatgcctgatctttactactaggtgtttagattactgaaatgtgaactaaggtgccagccttgtataattaacttttctttaagaaacatgctaaggagattaaaatgccaagattgcagttattttctgagatcttcattaagaacaaatctgtactagaaacactacttctctatgggataatactcttcaggagcatggtacaaaatcaaggaaaaaattttgtataaatctattgaacattatacattaatatcttgtttgtatgccagtggttataagcttaaggaaaattatatttattagtttatttagaaattagtaatttttgcctatctcaattattgaagtagatgggacatacctgttttgatgtgcatgttttaaaatatgatataaataatatacatgtattctgcagtttacttcttttatatattctagatacatgtcccttattagatgtatgatttgcaaattttttcccattctctgacttgtctttcatttcttgatggtgttgtttgaatgagaaaggtttttaattttgatgaagtccagtttatctaattttttcttttgttgttcacaattttggtgtcatatctaagaatcttttgcaacattcgaagtcattaagatttagccttatgttttgttctgaga

SEQ ID NO: 8639 - DNA, 1056 bp, Homo sapiens
taatcctatttatttttgatttagctgcctgtgctttttaggtcttacatgaaaaatctttgctcagaccaatgttttggagtgtttccccaatgttttcttctaatggtttcatagttgtgagtctttaatccattttgatttgatttttgagaaataggggtcttgttttattcttctgcttatggttatccagttttcatagcatcatttgttaaagagattatcctttcactattgtatgttctcggcacctttgtgaaaaataagttggccataaatgtatggatttatatctgggatacctattctattcctttggtctatgtgtctgtatttattccagtaccatgcttatttgtttaccatagctttgtagcatatttggaagtaaagtaacatgatggctccagctttgttatttttgatcagtattgctttggctatttgtgctctgttgtggttccgtatacttttttaggaatgttttcttctatttctgtgaaatgacattgatattttgaaagatattgcattgaatctgtattaattcttctaattcatgaacatggaatatttttccattttattgtgtcttcctcaatttacttcatgagtcatttatagtttactttgtatagacctttcacttctttgcttaaattaacttctaggtaatttatattatttgaagccattgtacatgggtttgcttcttaatttatttttcagattgttcactgttggtatatacaaatgctactgatttttgtatattgattttgtttactgcaactttactgaatttatcagttctaacaattttttgttagagactttaggtttttctaagtataaaactatgttattttcatataaggataattgaacttcctctttttctatttggatgcctttttttctttctctcacctaacttttctagtgagaacttacagtattatgttgaataaaaatggtgaaagtaggcattcttatcatattctggatctcagtggaaatgctttcaagagttccctgttcagtacaatgtta

SEQ ID NO: 8640 - DNA, 1037 bp, Homo sapiens
tgaactgttctatgatggtgatctactttggctgtttccccacccaaatctcatcttgaattgtagtttccataatccccacatgtcgtggggaggaactaggtggagataattgaatcatggaagcagttttttccatcctgttcttgtgatagtgagttagttctcacgagatctggtggttttataaggggcttcccccttcacttggctcttattcttctccttcctgccatcacatgaagaaggacgtgtttacttccccttccaccatgactgtaaatttcctaaggcctgcccagccatgctgaactgtgagtcaattaaacctctttcctttataaattacctagtctcagttatgtctttattagcagtgtgagaataaactaaggcagatggcataatcacatctctgaccaaggctattttcaatggttcagacactgacttgttgaattctcatattggtagtcacctctctgctattctttccatctgtttgtaaatttagagatgtccatctagctgagattttatgaatatcactaaaagatgaatctattaatgagggaatatccttcaaatttgcctccaacttctttaaaaggaactctactactgagatggtaaatggatttcatcacacatgctgtctgtatcagttcacacttgctgtgtgacataaacttagtggtcattatttcttgtgggtctactgtctggctgaaagattctgctgatctaggataggctcagctcattttgccatcttgggcatctgcagtcagctggcaagttgactagggatggtttagtctagtataggttcagctagaacaacttggctctcttctatgtgtctttcattcccttcagcaggctagcctggtaggttctcatggtagtggcaggaatcaaagagagaaggcagaaatgcatgagcaaattttcaagcttctgctggtttcaagtttttctcactcatccaaacaagtcatctgtttaagcctagagttagagtgtgacagtagtac

SEQ ID NO: 8641 - DNA, 1044 bp, Homo sapiens
cctggctcggccaggcgcggtggctcacacctgtaatcccagcactttgggagaccgaggcaggcggatcacgaagtcaggagatcgagactatcctggctagcgtggtgaaaccccgtctctactaaaaatacaaaacaagttagccgggcgtggtggcgggcgcctgtagtcccagctactcgggaggctgaggcagtagaatggcgtgaatccaggaggcggagcttgcagggagcggagatctcgccactgcacttcagcctgggcagcagggcaagactctgtctcaaaaaaaaaaaaaagaaaaaaaaagctcttccacaagggcacagaaaccatagacccccttatatccagctatcttcttggagaggagttaaatgaggcgagagaaatttgaaagattaagaattttatccaaatagagactggtaatttactaaaaaaaggtttttaatcagggaccagcaaaccttttctacaaagagctagagagcaaatattgtaggctttatgagctgtatggactgtactgcaactattcaattctacccttgtagcatggaagaagccataaacaatatgtaaatgagcaggtgaatatggtctaacaaaactttatacacacaaacccatggtgggcttttaggtcctagtttgccaccttcaggtttacattactgaatcagactaaatttcctggattcaactaaagataattttctcctactatccaaaagggtagcagctttgaagaaagaggaaataaaaagtggaaaaaactgacattttctttgcatatttttataagatatgaatacaattttggttatttgcacattgagaagggagaagaaatcttagtgtaaaaagaaataatttttttcccttttctctgaaggcttgtgaccactgggatgttgagggttgtgagaagtggatacctgcaaagtaagctcagggtacatgatggaattgggggacgtgaaaaagagcagaacttatgggtcttctgttctctttgctaggagctctggaaat

SEQ ID NO: 8642 - DNA, 1050 bp, Homo sapiens
agttagttactttaccttttgttgtgttgattttaaccattatgctttgactcatagtttttcttataaggcacattgggtaaagaaagtagcatagagttgaatcccaccctcccctgttactaaatggctttgttatcttgggttagctaactggcttttctgagtttgttagctactttgtaatatgacattaattttatctcacttgaccattcatttataatttaataaataaataggcattgagtaccccctgcatgccaggcacagtattagatgctggtgattcaatggacatcaaaaccagtcacagtcagtatccttgtggagcattaatacagtgagagcatagatatttatcaaagaactataaaaataaatgcacaattgcaactttgctgtctcctagaggaaagaggcatggtgctttgaaagcatatcatagagggatttgacttaatcaaggaggtatttgaaggcctccccaaggaagtgataattgaacgaagatctgacaaaagaagtaggtgctaactaggactgagaggattaaaaacaaggcaacagataggaaatatgctaccatttttcttactaacattactgttatttaatagagaccttcttagcgtttttatctcatcagtgaagtgacactttgtcttatgataattccaggtctggcattatttcataattccttgtctggaataaatattttcaaacttgaaggtgatatacccataaaaattctgactctcaaagtaattgccaactgtggcatgcatgggaagaatttgtaaaaaaatgactcagtgtaaatcatgattattttacatttttcttaattttgtacctatttcccattctctgcctatattatataataacttttatatcaactatatttcccatgttaaacctgagttatgaaattctttctgcatcttttctcatgtattggaaagaaagttaattcttttcagcttaatcttacccagtgcaaagcccttgtaataatgtactttatttttgaaggcttctgac

SEQ ID NO: 8643 - DNA, 1079 bp, Homo sapiens
tataattctagtttttttttagctgtttatttatttccctgttttacatactaaatggcaaattcacaactgaaattgctgctttctaactgcatttgtacttttcattcaactgtggtgtttgcttcaagcagaaaaggattatctgaagctatctcttcaagaaatttctgattttataaagcaattgattactatataatctgatgctatcactgctatactctaaaatgatgacaaaaaccaccatccatcccagctcccatggacctagaaaacaagaggagagtctgattatattttctacactatcttttccttgtatcatgcttttattagttcaaccaatgttgataaaatccttgatagctctaatttctgccaatcatcctcatatccttgaacttaaggaactcacgtgcctaggtttagtatattcaagaccactccaaaccactgagccatgtgaaaatcagaagtttaggacagtgaaaggagaacagatttgtgaatcaggaatatctttatttgaatattgcttcagatactttctgtgtgactttcagcaagtcactgaatctctccgatcctgtttccttttctgaaaataataatgcctacctcaccgtaaagttgagtacactaagttagatggtattgattaaatgcttattaaaatacatgacatattgtgaacacttgaaaaatggtagtagtaatatttcacaattaactgttattaaattaaaatttagtaataattgaaacgcttagcttccttccagtattgcataatattagtttccaggtaaacagataatcaaataacaaacagcaatagatagacacagagaatcctgcatatctttttaaccccccaaaaccaatttacatcaagagcaatctaagtggttttatattgtgcctgtgtatattaacattcacttacctatttccatggctatcttatctttctttcatagatgaaaataccacattaggtaaatgcagcactgcctccatggagatgaagctcttttagaaaaacgttaatttttctaaaactatattgttgcatg

SEQ ID NO: 8644 - DNA, 1035 bp, Homo sapiens
cccgaaacccctgtgataatgtcctagaccttgcaagcatcatggccgcgtgtgagttttctcagcttcctcaacctaatctaccttccttaccgtttggtaatgggcagcaagagaaaatgcttaagaactctttaaaactactgatgttttaaagtaaagctggataattccctgagctggcagcgttcaaattgtatgaggagcaaatacttttgtttactgcctaaggtagtaggagaggtctaatcaaagtattctacatttatttcattctcttttgattcttaggtagtgctacaaaaatattaaatgttaatcttagaatacaaaacatgctgtatttaggcactaaagtaaagtgatgtcaatcctaaggcagcagaaagtcttaattttctcctatgcagaatttttaaaagacaatgtcagataagaaatctggacttaggagagactttattcaaaagggttatcacaaaaggagaaaagggacttttgcaatgggtagaaccaaaagatctgcaagaatctccaaggagtgaactgtgctagaaagttttggtgtgaggaagtaggatataagggtggcttgatctaatagtagatctgagaatgttattccttggctctggctgagagttggccaaagctcaggaacctgggggaaggagagaaactaaagtttgattaacaagtattttgttccacttgatctgtagggccaagcagatcagcaaattattcataaattcatagttgaagcaaaaaatgagaatttggagggtctttcttttgcctggtcataggtaaacaaggggggatccttgagtcttacctaactcaagggtgggaggattttttaaattatagctaataaggagccagcacagggctcaagcaaaattcaacttgccaaaaagtgtttttattatttgacattgaaaagtattgaaaacctggattttatttataccatggtgaatctttctaaaactggggtttttgttattggtttgcttgttatcctataag

SEQ ID NO: 8645 - DNA, 1050 bp, Homo sapiens
tgtcatttgaagaaaacaaaatataaactgtaggccacattgccagaacacagaccaaaatgagcaaaaacagttgctaggaaacaggcccaaatgcagaactttagcttataggaggaagtcagaaagagctggaaatgagaacattgaggaatataacagaggaggaacaaccagagggtgtgatttttagaatgcaaacagtgaccacttaggatcagtgtctgaaatttggtgttccttgagctagctggacttggactctttgacagtatgtgaacaaactgcctaatcgtagatcagaaagctaacctatggaagactttaaaactaccttgactcaggtgtgtgcagttttactcaggtgtgtgcagttttactcaagtgagtgggattagtttgccgctgaattttaatctgtgtaaaatttagtttttatcacagttggcaatgtcttctatcagataggatattttaattttaaaatgagctgatcctgtaaagaagtaattcgttgtctgaaattcaaatctaacagggcatcctgcgttttttatttgccaagtctggtgaccccattttctgcatccagtaagtagagatctttggtgctagctcaatgtgctgcctgttactaagaaaaactgaacttcctgtaaacaacttacaggacccacctactcagaaggctgaggtgagaagatcacttgaggccaggaatttcagaaataggtattcaacttcactggcacaagttacagagtctattccattagtttcctttaatcatgatgaactctgttgaattttgtagtaatttagccatgaataaaggaaactaatggaacagagactccccaataactaaggaaaagaattttttacctaaaattaaaattaatagagtaaatgaaattaccctaaagggtaaaaatgtattattactatggacagataaggtttctaaagtaattagtttcctaaatccaagatgcttttcctatcaaatatgaccatggtagcccaagttttgaatattaggaaatagct

SEQ ID NO: 8646 - DNA, 1063 bp, Homo sapiens
agagcgagactccgtctcaaaaaatatatataaaaaataagaaaggtcaaagccagattgtgtcccttatttgctaatatacattgccacatagttcgttgccttgtaactttacctctgatttcctttttctcctccttaatttatcttaatccaattatctgtttgaagaaaaaaaaaattttttttatttttttattttttgagatgagagtctcgctttgtcgcccgggctggagtccagtgacacgatctcggctcaccgcaacttccgcctcctgggttcaagcgattctcatgcctcaacctcccatatagctgcactaccacacctgactaatatttttgtatttttagtagacacgagatttcactatgttagccagtctagtctagaactcctggcatcaagtgatcaacccacattggcctcccaaagtgctgggattacaggcaggagccacaatgcctggctagaagaaacttttctaattattactgtgatagaagccattttatctgatttgattgggacctgtattagttcattttaaaaactgactaaaacacagtaaatgaatataaatatactctgtttttaccagctttaaaacttttttcagttaaaatgttcagtaacatattttaacactttaaagtgtattttattttttaactttgtaaatacagtattttgacctaaaacacagacatttattcgccattttttgttacctgaggccagagtcttctttttatatgattttgctgattattgtttttctctgcagaaaccatatcaaaatgtgtttaagatttctctccagtttttgttttttttttaattttgcaaagcttaaaaacacttgtaaaattgctgaatcctagacttcacagtccctccctaccactcagatttcagtggttcacattttttctcaacagcagattttttcctaatgagttgcattggttgcatattttcttgagaatccaacttttttttttaatttgctttgaaaattatttatgaaaaatttcaaatagaaagtatggacagtag

SEQ ID NO: 8647 - DNA, 1100 bp, Homo sapiens
ttttcacttaagattgtctttgagatttattcatgttgattcacgtaattcatgtagtttattcattttaactgttatgtgggagtcccttgtatgagtaacgatttcacatcctttacaattaggttatttgtcatctttcactgccaaaggcagtgaatgctgaaagttttcgtatataacttgtgctcttattggagatatttttctccatctgacacccagaactgaaaagagctgagtcccaaggtgtatgcttcctcagttttacaagaaattgcagaaaatgttctaaagcagttgcagcaatttacattcctaccaaagttattataaggagcatgtgagagttggacacatcttaaccagatatcagatttttaaattgatttcaagcaaatgtttaataaatgatatttaatttgcattttcctaggaactatgggggaaacagtttgtatgcatgtattggcttttgttctctttctctgtgaattgcctgactatatttgtttagttttccagtggactctgtcattttctaattgatttttggaagtgaggagttactcgaatatttatgataataatcctaacacctttcaagtgtctttttttttctcctttagttatacagaaatgtgtaaattttacatataatcaaatatatccatctttttatttatttatttttttggtatctgcttgcttgtttgaaaaattcttccatacttccatgtcagaaaaccttctttattttctcataaacatgtttagtttttcttttcatgtttaaatctttaatccacttgttattgatttttgtttgtgcagaagagatctaattgtttttccatatggttaaagtcccttcttcattagtgtgtgatacccatcgattaatagtaccacatgtcatatactgagccctcatctactcatggatctgtttgtttatactataccaataccatagttttaattagaataggtttaaagtaaatcaatatgttactgtattttccttcaggattaccttggctttcttagacctttgctctttcatatagaccagcttgctaaattccaagggggtggca

SEQ ID NO: 8648 - DNA, 1052 bp, Homo sapiens
agaatttttagatttgtctcaacactctatagagttaggtctcctcttctcacatggagttcatttactgctgacgatagaataagccttgagcctgataaattatagatgattttggcatgacctcatctaaaaatattttatctccttttttttttttactgtattttcaattaaatcaaaaataacatatttatgaggtataattcattgtgttttattttacagacaagtgataccagcaaagagtaaggtctatgatagccagggtctcctgatttttagtgggatggacctctgtgactgcctggatgaagactgcttaggatgtttctatgcttgtcctgcctgtggttctaccaagtgtggagctgaatgccgctgtgaccgcaagtggctgtatgagcaaattgaaattgaaggaggagaaataattcataataaacatgctggataatctgcggtaccaaactatggagcctttaaaggtctttatttctaaaaatctgttactctaagatacattttaagcttgattatcatatgacaaagattttaaaaccatctcagtgtgccctaatttttcatcatgggtgctttaagattcactatttgatataaattcagataggctatttttcagtagtcagcgttaagcctgtctggatcaatataaacaagtagggtgtaggcagtcctctatttgcatgtttcccatgggcacaaatttcagtgacctagatttagtttaaataccagtttccttaccaggaaggaaagaaaactggtaaggaaactgttgttgttaaaatctaggttaaaattttagttagcacattgtaactgagtaattacatgaagtacaaacctctctgctagctcttcagtctacaaatcgctatgtaaataacagatatgcttcatgattgtgaccagtcatgttatttctttcaaattcttccagtggtttgtccctgtgcatctgttaattcagttcacgtacagcagagcatgtagttatgctgtctctctgtcatctacttgacattcta

SEQ ID NO: 8649 - DNA, 1001 bp, Homo sapiens
agatgccctatgctcctcacaggttcgtccttttatgtttgctacaaccctgtgtgttattcatctccatctttgtatttcaggtgagaaaaccaaggctcacggaagggtactaactacagtagtaacaatacaaaagaaaggtttggatctggagagttgaaaactgagaaaaaggcttgcaaaagctaccaagaaatatttgttaaggagaccatgagaagcaaagaacattttcctggggcatgctctgatgagattagacagcatgcacttatgatgagagatatttagtataatgttgtgactttttccacatcctgacaatccagaggtcagcaagaaattagacagaggggatcaaaaaatggaggggccagataattctaagatgttggcaaatgagctttggtaataaggtgtggcttttataggtactgcaaccaagaaaggccatgctgaaatggaataaggatgagatgggggactcaattgttcagtatgggaatgggggcgaaagatgcaagagatggaaaataagatggttgggaagggagatgcttcagtgggaaaatcatggattttctatatctgatagacctgggcttgagtcctgacgtggccagctgttttgtgacctaagaaagttacatcacatccctcaatctcagtatcctcatctataaaatgagagttacaataacacagactcagtgggttttgcagtttttaagagaaagagcttggtaggtataacagctcagatatatagaaggatctcaacaaatggtagattctactattagtatcattattagagagttttcagagatggaaagacttaaagatgagcgccaaaatgaggcagggcaaatacatggccaaagtttgtggagataatggttctttgacgtgagaaacttagagaattaagaagataaaatatattatatgtttgtagagtgagataagttctaagaaaaaatcaatagggtgatatc

SEQ ID NO: 8650 - DNA, 1045 bp, Homo sapiens
agaagccctcttctcatttcttcctattcagtggaggaagtctacctcccattaaggcacaactcaaagaacttcttgaactaatcattgtagttactcagaaagtctccccacttcttagatgttccattgatacatcataactctgttattccactgtccatatcctatctttactctaattgcttatgcctgtggctccctctcagctagaagtgaagttcttggaggcagggatcctgtcttagttatttttgtatccttggtagcaccaacttcatggactcaatataatagattctcagtacattctttggttgaattgtgctggattttgctgaaggagaataaaaaggttaagaaggaagttggctctgttcatttggcctctctatatgagttgcagtacggttctcccttttctattattccttacaggttcattgatgatgttacatagcccttgacccatgtgaactgatgacagaatagagccacacagcatgtgaagtgatttgacctgtagcaatctttgaaccagtgttttgtctacacctatcctcagaggctatccagctgttagatttcatttttaataattcagccaagagtgtggaacatttttctcttgagattttcaatagctagtctgaagatatgtttttgagagcttcaaatagtgttccagaagagaatgttagaatcgggaagaataagcatattagatacttaaaggaaagtatctgaaaaagaaaatagagaatataagcatataattttcagtttactaaagaatactgtttttaggaataatagtcatgaaaattataagggaaaaaaagagtttttaaaaagcctctgttacccagtttaatgcatcttttagttcagacatgattacttcacaatcacagtgacttttgcacactatcttgtaatttttaaaaagttttaaacatttatcacaaattattctagattcttcatatcgggtttttagaaagtaaatattaaaaggaacttcaggtggtgaagcattcaactg

SEQ ID NO: 8651 - DNA, 1107 bp, Homo sapiens
tattttctgtcaaagcactgtgtgcctaccctaagaggcaaagatattctcttgttgcctttatggattacttttatgtgtatgattcattctgaattaagtttggtttatggaattagaaggattgaggttattttttctcccacagggatatccagttgtttcgaaacaatttgttatatacttacctttcctcattgaattgctgtggcagccttgttgaaactcagttgaccatatatgtatggtctgtttctaggctatctttatgctagtactacagtcttgattactgctgaaattttgatagggattgtattaatatatcagtttgtccattttccctaaactgatatattaattaatgctttagattacatctgtcttttatttgataggtgaatgaatgaagtgggactagctttgggctctcaagagtaggaaggtctttggctagtggggattaaaagaaattaagggcaagaaaaaaaataagacttgacaacagaaggaaaatgactgtggtcttttaggatcataatgagtcgacctcccacaggataggtcagatttagaaatagtaggaacaaaattaacatagactttgagatcggaaagtctttaaacctaggattaggggcttgttttcccattggcaatagagaaaaataccatatttttaagaatgtgtgtaatgacaccattttatgagtagcccttgtaattgaaacttcttaaaacattctagtgtcttgcattccaattttaaatcataaatatatttggactgggttttaatttctcatagcagtaaaaacaaactgtcagaaacttgggtggtttcaaatatttattcttttatagttctggagaagtccaaaataattataactgggctgagttcaaagtgttggcagcgctgcactccctctggaggatctggtggagaatccattgcttgtcttttccagcttctggaggctgcaggcattccttggcttgtggccacttcactccagtcttcaagggcagcatttcagatctctctctctccactgtcttcacatcaccgtctcttctgtgtgtcagctctttctctgcctcttt

SEQ ID NO: 8652 - DNA, 1023 bp, Homo sapiens
caaactgaatatattatcatcaggttggttgactactgtggaatagaacaggacaagcatctttctgaacctagaaattagactgttaattcagaccaaaattacatttgctttttggcagttctgtcacatcattatcatttttacttgcccagtgttatggggattcactaaatagattaattaaatgcttattgtacaacctcaaaatttgtttcacaaaattggtaattttcagcttgatgagtttagtgtttttgctaatccctaagtaggtgatctccctattagtttttcctgcctcatatgattctttgaaaaaacagaagtgataactattatagaatatatgtgtatatgtgtataaaatggtgtgttttcaaactatagtagatgtggatgatttataagacaagatcgatttttgtttgttgttttttcctctaattaattctacaaatattaagtatatgtatactatgtgccgggcactagagatacaataataggatgcattctctgccataataatcttttagcttcatggaggaatttcaggaatgtttattaaatactactaggggttaagagggtgctccagagcacactgatatcttacccagccttgagtaaagcttcttaataatggtgccacctaatcttggtctggaaggaggtgagcaaattagttagccagagttgtgaaggaatttatacaagggtcctgaggcaaggagcaatatgggtggtgctaacaagtagtttgctatccctggaatttatgaaatatggaagggggaatgtattgggaaagaaggcaatacaacatttaaagaggcttatatggcttgctttttgggtgtttttcgactgagagcaatgaaaagccatttaagtttttgaaacgggagtgacaagattagatttgctctttagaaaaatatactcttgagtaatgtggagaatagattggagggaggagtaaggttagagatacagggaccaattgggaggctgatagtg

SEQ ID NO: 8653 - DNA, 1044 bp, Homo sapiens
cagttcatgctttcatgtcctaagaaacatttgcctactccaaggttgcaaagaaggcattttcttctaatagttttaattatttcagcttttttgtttaactctgtgatccatttcaagctaatatttagtactagtacaagaggtaagatggaggtttttgctgttttttgattgagtgtactatgaggcaagattgaagtttttatcgctttttgttgtttaaatatggatattcagttattgcaggaccatttgttacaaaaaaaattatttctccacctttgtcaaaaaccgattgtatggatttatttctggactctattcttttccactgatatatatttctgtccttttgctaattccacattaccttgattgctgtagcttatagtaagtcttgaaataaaatgataagttttccaactgtgttctttgttcagatttctttgactgttgtattagtcccttctcgcactgctctaaagaaataattgagactgggtaatttgtaaagaaaataggtttaattggctcatggttctgcaggccatacaggaagcatggctaggttagaaaacttaaaagtcatggccaaaggcaaaggggaggcaggcacatctcacatggcaggagcaggaggaagagaaagagtggggaggtgctacacacttttaaacaaccagatctcatgataactcactatcatgagaacggcaccaaaggggaaatccaccaccatgaaccaatcacctcccaccaggcccacctccaacaccggggactacaatttgacatgagatttgggcagggacacagacccaaaccatatcacctgtattctatgaccttggatttctttgtaaattttagaattaccttgtcagtttctccaaaaagcttactggaatttttattgggattccattaaatctacagatcagtttgaagatttgagtcttctatcccatgaacatgatatatctctccatttatttaggtcttctatactctcagaatgttttgtacttttcactgtagaac

SEQ ID NO: 8654 - DNA, 1035 bp, Homo sapiens
ccgaaaagctccttaaactgataaatgacttcagtaaagtttcaagatacaaaatcaatgtataaaaatcagtagcatttctatacaccaataatcaagctgagagccaaatcaagaatgcagtgtcattcacaatagccacaaaaagaataaaatacttaggaatacggctaaccaaggaggtgaaagtgaactacaaaacactgctgaaagaaatcagagatgacacaaatgaaaaagtcttccttgctcatgaattggaagaatcaatatcattaaaatggccatactgctcatagcaatttaaggattcaacactacttccatcaaactaccaatgtcatttttcacagaattagaaaacgttattctgaaatgtatatggaactacaaagagcccaaagcaatcctaagcaaaaagaacaaaacaagaggcatcacattacccgacctcaaactatactacaaggctacagtaacccaaacagcatggtactggtataaagacagatataaagaccaatggaacagaaaagagaacccagaaataaagccatacactgacaatcatctgatctttgacaaagtagacaaaagtaagcaatgaggaaaggactcccattcaataaatagtgctgggaaaactggctatccacgtgaagaggaatgaaactagacacctgcctatcgccatatacaaaattaactcaagatggattaaaaacctaaatctaggctgggttcagtggatcacacctgtaatcccaacactttgggaggctgaggcaggcagatcacctgaagtcaggagttcaagaccagcctggccaacatggtgaaaccccgtctctactgaaaatacaagaattagccaggtgtggtggcacatgtttgtaattccagctaccctggaagctgaggtgggagaatcacttgaacccaggaggcggaggttgcagtgagccgagatcgtgccactgcactccagcctgggcgacagagtgagaccccatctcaaaaaaaaaaataaaaaaa

SEQ ID NO: 8655 - DNA, 1024 bp, Homo sapiens
tttcttttgagtttacatttttaatggaagacgtaagttttttctctccatgtggcaccttttccccaaaatcagtattctaacaaccacatctgagacacaatttctattaccatacaaactaagcaagatgattcccctgtgaaagtaaatattgtacccagagaagaaagtagtacagtaatgtgaatcatgtttatgatttctctttctctgtctcattgagtcttactgggagttgagggaaagagagaaataaagaacttacgtgatgtcaagcgggacctctcctctgaataactttaggttctaatagtaactacacttcaccatcagagctgatgaaagatcttttattaaccacacagatttctgttccattttctctcttgttcccactatggtaaactaagaatcattataattggtcaacctgtggtttagaagcaatgtttgaaaacaaaacacaaatagactgttgtttcttaaaattctatatactcaaactctgcacctttttgtctaataacctaatcacttaagttttttgagtttttttgttattttaatataaatatacacattctaaataacttatttacttaagccataatactcaatttagtgattagaaaaaataaaaattaaggaatcaaacaaaccaaatggaagtacatatataggtataattagaatagaataaaatcatgtggttcacctaaaagtaaatgttttaaatgtagcattgtacattctaaaatgcatatccaaacagatagcaagtctttgtaatatattaaagaaactagaaacaggggtagaaatgccctgaaagtaactagttcaaggattcctttattgggggtaaaatcatcgagcaaatgctactgttttaatactcacaacaaataaatgttctttttaaatgtcctcatatttttttaaaaataaaatgtaaccttactagcctgtaaagtctgagactaaaataggtagtctactgaatctgagtcttactttcaga

SEQ ID NO: 8656 - DNA, 1025 bp, Homo sapiens
tacatgttggaatttactgtcagtcacatggtctcaaaagggggcaaggttggaaacaaggggcaaaagaagcagacaagcactctcatctctatttttagggcaacttttttttaatttgttaagtcattgccctttatgtgtatgaaaactgattatctttttactagcagctaccaagggcctctaacaggtagagcaactttaactcatagtctctaatttctttgagtgatttggagaaagcaaaggaatatttcttccttctcagagtatatgttggtattgtccagattcaagtgaaaatatttatctaatcagagtaaaaatttttgccgatacctgtaactacaaagctctataaattagcccctttacaaaaaccatagcagaatcatatccatactaattgcactaaaatcctgacatgcattctggataagtaaaagtcaaagtttgaactatgatttcaggttaaaagaaatagctttccaattctttgaaaactggtgactcttataagctatatatagtaacagtctggagtatttgattaaccattatatactacttattccttgatcttaaccagatcgaatttacctaaccttgcctaacctccatttaatcatagcaaacatttgttgagcctttgttaagtagcaagtactatacgagcttagttatatttttatatagtgattaaatattttaaacaaaagctttactaagatataataatagattcaatacacataaatggtgtctttttcatctttatatctatctaagaatcaaggacagggttatttacttaataggtataaagtctttgctgaaatgtatgtaatatagataaattatgaatgggcttttaaaaatagtgcaaataatacagctataaatatgacataagcttcaccagtcaagtgacccgtacacactgtgttcttagttacgtgtaagataacttgagtacatggcgtcacttccaagctaaaataactggttaaacttgcatttct

SEQ ID NO: 8657 - DNA, 1047 bp, Homo sapiens
ggcagcaaggctgatgactaaatagtctgctcttcaaccctgatatctattaggggtaggaaaacctctggataccccctgtaaagacactccctggcttttaccagcttaccatctggacccaattttaagtgatttatgacaatggagccagcataactgtactctatactgagtattattattatatgattcaataaatgtcttctctgttgcagaagtttgtaagaactgttcaaattgttttgtttattgaagttgtacgattattacttttttaaaaaatggagtggtcatttaggacttagaagtcttttgttatgaggtgattttgttataatggcatttcttagagatgatatttattccagtgctgtgaaaaacctatataactttttagatatgatttttattgagcatatgtgaattgaaagtaataattcaagccaagcacggtggttcccacctgtaatcctggcactttgggaggctaaggcgtgggcggatgacttgagcccaggaatttgagactagtctgggcaacatggcaaaaccccatctctacaaaaaatacaaaaattagctgggtgtggtggtgggcacctatagtcctagctactcacaaggctgaggtaggatcacctgagcccgggaggtcaaggctatggtgagccatgattgtgccactgcactccagcctgggtgacagagtgagaccctgtctcaaaataaaaaataaaataataaaataagtaatctttttaaaaagaaagtcataattcagtaaaacagttatcacatgcacagttcacccaaatgacttccatataagttgatgatattctaagtttaagttgatggtattctaagtttacatggaaaggtaaaacttggaaattaataaaactataaagggatgacagtagtttttgggttttggtgggtttttttgtttttgtctttgtttttttgagatggagtctccctctgtcacccaggctggagtgcagtggcacgatctcagctcactgcaacctccgccttctg

SEQ ID NO: 8658 - DNA, 1034 bp, Homo sapiens
atacagaaggaattgagttaaatataatacatcttgaaactggcaagaatcccatgttgctaaaatgatatttatgatgatatttctgcacctgcatcactagtttttgaaacaaatttaccctagagcattggtttgcaaaatgctatggccccagtggtttcacagaagatcctctgaaattgctggtttgagtttcggataggggttgtggaggggtacaagcaagaaggaagcaaagggcaaggaaaacactaagttcgatatactcacccctgcctgaatcagagcatatgtgttttatttgtttcatacatatcatttgaagtaacggtttgacaattaaaatatgtttaaattcactgcccttgagtgttagaaaatgttgtatgcaatagagaaggttgtatttaatcttctaatgttgtgttcaataggctgcacagtagatgaacctacatcatgaaaagcttctttgcagagtttagtaatgaaattgttaaggaagaactctaaggtagactcattttatttaatgcaaagcgatcatgttgaaataaaactctgttacggactgtaaaaactcaatttaaaatataattaatttatcctgaggagctcaggtattcccaaattaaatatttttgaggtatgaattagctgacgtatcaaaaaaagataaagtgtgatcatacctttattaacctgaggttaagttttcttggtgaaacttataaatgtcagtatatcctgactcattagtaacagttgaaattaaccaacttggtaacttctatttttgtaaaaatttacactcactttgactttgtatcatgaggggaattgaggataggtctgaaataagatttcaggcttttctccttctgaaatatatattcaagctgaacagagaaaagcattttaaattcatctaacagtcatgtataattaggcttggttctgcgttgtgaatggggtttctggaagggcagcaaaaacagggtttgatttgttacgtgcccaagctttgcatc

SEQ ID NO: 8659 - DNA, 1061 bp, Homo sapiens
aatcactctggcaggagtatgaaaagagattggagtgggggtggggtggggtgacaagactagaggccaagagttgagttaggaaactgttgcagaggccaggtgatcatcatcatcaccatcaccatcatcataatgattagacatgagataaaatcaactgaacttagtcatttagtaagagaaaaggaggagtctaaacttgctcccaaatatctgatttgggtgactagatgaggttggtgtctttcattaaaatagggaccataggaaaagatgcagtttgggacatgtagaataggacatataggtggatatagcctttgaacatttggatgtgtgaatttgttctaaggagatacatgatccagagatgtatatttgggaatcattgttatatagctggtagttgaagacattagaacatgtaagatcagaaaacatgtttagattcagaagagaagaaggcagaagaatcatgtggagtggtctcatggaaattaagggaagagagaattttgaaggaataatgaacaatgccaaatgcattgagcaataaatagaaacaacagttgactcatagatagagaagtctattgtatttggcaatatgaggctcataggtgaccattgaccaagaagtttcaggggcatagggctcaaaaccttaattacatgtagttggttaaagatctaatggcttttgcaatttctttgaaagtagaaaaagtgaatgggaggtaaggaaatagagacagcaagtatcgactctctgttccagattcttgagaatgaaagaaaggagaaggaaagaataatagaggtgggtgcagaatagataatttttcaattattttgctttttccacttgtaccttgattaaaatgttgcttttgattgcattttcatgagttaatattaaactttgtatttttctataattaatcattctataatactttagttaatggcataagtttaaaagaatcagggttacccccaaaccaaattaagtataaatactaaattgtgtgatttccatgaatgcacaggattaaaaa

SEQ ID NO: 8660 - DNA, 1034 bp, Homo sapiens
gttaacggacacattactgtcaagaaaatattacttgtcttaattatcagtaatgaagcagggataagctgctcacttagatataatatatctaatgaccttttcagttagaggttgtgatgaaaggtatcagtttcacaaattatgcttcattcagcttctggcctttgtgtagattaatgttttgtggatgagttttaaagtcaggcataaattgtgtttggtgtttaaaattgatttagtgtcttgcttttagtacatcattttctcatttataaagcctcagttttatcttcaagcttaaaaaaataatccatggtaaatttagaattgccttactggcagtggtttttttaaccttaccaaatagaatggtacatatgtttacacttgtttaactaaaggacatagtttatgactgaagtttctttctgatttctgaatttaaaacaataagcacaatgtttacaataacaatttttgaactaggaatgtaaatatttatcataccacttttcctaattagatatccccagatgacacaaagctggttattcatcctgagatgacacatagctggttattgtgatagaagttatgatatctcttaacattaacttcttagtgagtaataaacatgatattgaaacatcattaaagaactcatagatttggcctcattcaaaccaataggagaattgcccccatgttttaagcaactaaggatttaagcattttgtctatgcaacataacagtgagatgaaaagtggttttcaaatttttaagctgtgaaactctgagaaacttcttactcagaagtccaataaagaaatctaacaatactggagctgctctggttgaattggaaaatttctaaactaacttgaaggaatccagggctgtcaagtagcagtgttttgatactatgatcctgatagttatattattaatgtagcccaaatattagagttggggaggaaagtacagaccatggttttcagaccttcgtcttaatgggtaggaaattgaaaga

SEQ ID NO: 8661 - DNA, 1031 bp, Homo sapiens
tacgtatatgcttaggggagtgtatctatttttttaaaaaaaaagaaaaatggagcaaatgaaaaattaaaaattggggaatctgggtgatagggatatgggaattctttgttttgttctggcatacttttctgtgtttgaaaatacttcaaaatgagttattctaaaatgatcactgaaaaggtaataaatacatcataaacattaatatttatgtaataataatatgagtagtcacagtaagtcaggttaataaaaactataaatagctttatgtccatgtagacaaacgagttaagattttcagagatttttggatttttggaattgagaataaaggctgtgggtctgtataaggtatcctggcccaaataagtacgttttcccagtctcacacaggaagtaacagaaccaagatctcttgattccctccccagtagtccttggaagacagctggaaaagattacttactcaagatagggacatgtgtattcaaattctgacttttgggagttgattcaggaaagtgtcagatttacaaaaatttcccttagagctgcatcattagattcaccaagagggcatgttctgtgttgcagttttcaaatgcaacccaatgagaatataagaatgttctcattggtatgcaatgagaatgtagaaagaaatactagaaaacctttttctttctccttgcctatgtcatatatagtataaatgtgagagtgagtagatttcttcctctcctccgtggttttcatcccatgctaattctcttatcctgtaagatttccttcctctttacaaggttaaaatacccttggatttcaagcagtacctttttaaaatctgatttaccaatcacttgattagccatagtggctaatgtgtttttaatgtttcaaatagccaatgacttgaacctctgtgtaggaaaatagccttctctgcattctgtatttgctcataccattttgcatatatttaaggacttcatgctcaagcagtttcttttcctttttaaaatttc

SEQ ID NO: 8662 - DNA, 1046 bp, Homo sapiens
ttggatgatacataaatgtaaaaaacaaagtgtactttatttttagagattctttatgaaaatgcaaacaggttccataaaacctagaggtaatcaaaaacttatctgggacacttttgaaaatgaagacactgtgtgtaccatgtggtagtgttaagtgcccttataacaaatcattcacagaagagccatagacaaataaacgtttcaaaagtggtctgacggcttctgacagcagtataaagccatctttcagagccagtaattcagtcagacccatctgaatcatttcctctataaattgtctttagtagaaatacaagaaaaagcaccagtgaactaataattatctcctctttgtcatcagagtggcctaggttaagaaaatgccaccttaaaactaatttaatcttttaaaatttacctgaaattattctgttatatttttggtaaaatatagcacattcgaatattatatatttttcttttatgtgtatagatttagaaagcttatgatgataaagataaatatgtacctctgcattattttagactacaattttcaaatattttgaccaaactaaccaaattagtcatttatttaataaactattaatagtagtaggtacagccttagtctttttattattttccttcctttcactttatttaaaaaaattacctaatgaattaaatcataaacctgcaaattatcaactggcccatactacaatgccatattaatgatgcagctgatgaaaataagtatcaataacctaaagatgcatagtgctagagacaaaggtggcattttacatttttattaacacttgtaattttcttctgcttgatttcttttaggccaagcccaatttcttctaaaccatgggtcagtgagctcatgttgattctcatatgaatgatgggcttgattttgcaaagctatcaccaactaccaatacctaggtctagttaccatcattatgaacaacctagaatataacattacaaattagaatgcattatttcctttaatttcactaact

SEQ ID NO: 8663 - DNA, 1031 bp, Homo sapiens
tgaaatcactgttttaattgaaatgctgttataaaatattaactaattataatggaggcattgctggaccaacttgtctaaagccatgtctccaaaatagaagaatttaaagataataagccgtgtaattccttgactccagtgccttcaaatcaccaacaagacagatcctaataattctcattaactttatttgtggatttgcaagtgaccaggccagaggccatgacttacttcttccacagtctttctttcactccagagtgtaggatgtcaccatacaaaagcatgaaataagagccatggccaacatgttttaccagtttattgaggcatctcaactcaggaaacatacacattaaacagtttgatttgttcttattgtggctttcaagtgtgctttgtaaaatcttttcctgtcccttacatatatctttgtgttattctgcagctttggggtcacttgtttattaaaattcagtgttgtttaaaattttaatctcaaatatagtttaaaatctcctctgcttttttcccaatgcagacttcaatgaggatcctcactatttgagatgttgaaggaattagagagcaaaatctggttcaaagattgtggttctccctcctctttgcaagacctggttcctccaattcgttgggccaggggaaaaagagtgggaataggcatatgtttctttacacagctgccctctcaagagtctgctgttcattatgactgcttctctgactacctctgaggcaggaatccaaatgctggccttttcacgggctagatgtttgagtttttcagaggccctgtgatgcatccacatcatactttctgatgtcagggtacagcaattgttacatctcctctcctgcccacagtggtgtgcctcaccagcctcttgctgatggattccccttgccaggcaggtcatcatcttgggtagaacaccagcagactgaactcagcaagtgaaactcatcctgcttgtcccacaggaatttcctacatccttgccaggcca

SEQ ID NO: 8664 - DNA, 1033 bp, Homo sapiens
accttgtctcaaaaaaaaaaagaaattataacatattctgcagcatggatgaatcttgaggacattatgctaaataaaataagccagtcacagaaaggcaaatattgcatgattctacatatatgagcatttaaaacagtcaaacagtcaaaagcagaaaataaaatagtggtagccagagactgaaaggagggaaaatgaggcgttgctgttcaatgagtataaagtttcagtcatgcaattgcataagttctagagatctgtgtacaacattgtagctgtagttcacaatactatgctgcacacctaaaaagtcattaagagtgtagatctcatgttatgtgttttttaccccaatttttttaaaagagaaatctagctattttgatctcatacaccaatattctcatgacaaatggggaatgttaggatgagacagatttgtattgaaaaagacaaaaccaataaaagtgtagtgacacaattaaaattctctgagactaaacatttctggaaagtatacatgactataattaattgaaatgcagcttttactaagtctgcttatatgttcattttcaaagtgtgagactgatatttattatggatgtcagaggaattgttttcttcactgtggatctatgttgtatagcactttttatttgtgatttgttctgtcttagggctatttcaagtatgattttcccatggtagacacgctatggaatttgtttccttgacatgtacaataatttcagaatacttcttccagtgttttttgttggtgtgtaaggttattaatagtgaaaaactttaaagtacaatctagtactctttatagttaggatttttattttggtaataatgattaatttacagaatctcatgttaagattcatgctatattgccattattttaaaagtgtgaaatgcatgagttttaaaagaccaagtttaaaataccaataagtagtgatattcatataccatatgtttacctacaaatatcttaggttatgtttattacacacta

SEQ ID NO: 8665 - DNA, 1051 bp, Homo sapiens
caagctggaatgcagtggtgcaacctcagctcactgcaacctccgcctctcaggttcacgctattttcctgcctcagcttccccagtagctgggactacaggcgcacgccactatgcccagctaatttttgtatttttagtagagacggggtttcaccatgttgaccaggctggtcttgaactcctgacctcaggtgatctgcccaccccagcctcccaaagtgctgggattacaggcgtgagccaccacacctggtcgtaaaccaaggtcttatagcatagatttctacttgacatttactttactaaacactaaactatgactattattggtgtctttttcccccatatatctgactgtctcttctaccttaagtgagcttacattataatatgacagaaaaggctagtagacatgaaacaaaattgtgcagaggccaggtgcagtggctcacacctgtaaccacagcactttgggaggccaaggtgtgaggatcacttgaggccaggagttcaagaccagcctggtggacatagcaagaccccatctgtatcaaataaagtaaaattttgcagaatagtctgtgattatagctcagcaagttaaggtgtttaggtctagaatgaggacagtgctaggatgtggccaaactttgaagtatgatataattaagttcattagtataaggctaaaagaggaagatcttcctgataagaaaatcataagtcaaagcaaggaggtatgaatgccagttgcatatctagaaacagtatagaatctggcctgagagaagaaagtttgtactggggaaaataactgagatggggatgacttatggaatgccttgaaagccatagacgatgtagagaaacactttaggttctgtgtgatatgctaaaaaacagcatttagtaaacattactgtggaagaaatgcacaggacatattcatggaggcagagaaaagtcagggatgcagttatcttaagtgtgagtttatgaaagcatcagaaaactctagtaaaagtggggaaggaaagagacacgtaaa

SEQ ID NO: 8666 - DNA, 1032 bp, Homo sapiens
ggagatatcaagtaaccgatttagacaatgtggcacaatcagaggatcacaggaatagtgaccatgtgtgacttatccatcccattcctttatcccagacatgatgctgctggagagagggggctggtcagggagaaggcatctttcacagtgtttttactatccaagtacagtttaacaaatccagctgtgttatttcaactgttacctaaatgatttttttttcagttctactcatgttggagcattaatgggaataaaatttccaaaaaaaaaaaaaaaatagaaactaaaagtaaaagatactgctttcagtttgcatagaaagtaaaaccaggccaagaatagtggctcacatctgtaatctcaacactttgggaggccaaggcaagaggattacttgagcccaggagtttgagaccagcctgggcaacatagtaagacgcccatctctacaaaaaatagatgtgttagcacatgcctgtagtctcagtactcgggaggctgaggcaggacagagtgagaccctgtcaaaaaagaaaaaaaaaaaaacaagaaaggagggaggggggagggaaggattgaaggtatgaaggaaggaccattttaagctttccaggaataatctagtttgttctttgtcaatgcataaaataagggaggagaattcttaaatgtctcaaacaaaggaacattgggattgaaagatggtggtatatttattgctgtgtagccaaaagattccaagtcacattttaaaagaattaaactcagcaaaccatccccacaacagtagaaactgctagagtttctccttcatggacatttcacacaagtctcaactcctctacctggaatcttctattgggcaggcacgagattaagaaccaccactccccacagaaggagggtgagggtgagatgggagtcacttagtagctagaatgtttcttcagaatcagaagaaagcaggatctaatagccagtatataccacctttggggaaattctgtctcttgtagaatatgcatg

SEQ ID NO: 8667 - DNA, 1030 bp, Homo sapiens
atggttctcccctttttcatctgtttttcccccccatattgaagagaattttccaaatgaagggtttcagctaggttgtctccaggtcagttctcctctagaaggctgtgtgtagtcatcagtggggagccctatgctgccttatctttagcctcccacaccactttgtgtctcacacaacagataagttcctttaagtttggatttttatgaaataaattttgcgagctgggagcacggagagttaaatgaatttgatattcttttgaaaacagaaaaatgttattttgaaatatggatgtttctccctaattgcagtaacttctgtaattgtggtcagttgctggggtcagtttaaatcagcctgtatctgcagaaaaacagttgggatgggcgggggttgggagggtgttcaaagcaacactatacttttgaaaacatgacccaacattatgcatagaaacaaacttaccaagaccggtaatagatgctgtggctgacttacctgaacatatgaaaaaattgaccctccggttggtatcatttttttatgttgtcaacatttctgtgaaaattttaagttcctagagaaagtataaccttgaaaaagaatcgtcaggtcaactaatagacaaagacaaacaagtattcatgggaatctataattgctgaaaagctacatttgaccttaaaaattgcatgttggagctctggcaaaataaaacaaagccaaaaagaaaaaagacatctgccgttatttatgcgatatttccaacgttgctgttatttatgtgtttacatgtgttcacttctacctaatgagaaaagatcttaatacattttggtttggacactgaaaatgttccaataagattcctggtacggtttctgtgatggctgtaatttgtaaaatccagtaggaacaggaggtgattatactggaattcagtctgaagaattgttttagcaggaattttatatgcaagtctaaatgctgatcaacagagcataatattgtaatctgaagtat

SEQ ID NO: 8668 - DNA, 1024 bp, Homo sapiens
tgaggagcttgtaggttttaggttctatacttgaggtgcttgttttagttaggttaaggctaaatttctctaacaaatagccccagaaaaaattcagtggattaaagagaataagagtttattttcctttcatctaacagtctgaggtgtatgtttcagggtagcaggcagcttgctttatgtagttttccagccatctaggattctctatcccttaggctattgcctttatctgcatgaaccatagattcctccaggttctggttcataagtggagaaagtgcaggaggtgcgtccatggtttttaggtccatggtctaccttgaaactggcacacattccttctgctcacattcctttgttcagaacttagtcacatgtccacagcaaactacaagtagaattggtcaacccatattgacccaaatgcggtggtgacccacatgtagtgaaacaaccagcagcattcacaacaatgcataatgcagctaggagactgttacaataatccaggtagaagctgatgatggtagcagtggtatttgtgggagataactgaattctggatatattttaaagaatatcctaatagattggataaggctgtgagtcaaagaagagtcaaggatgatgtccaggttttggcctgagaaactagaagaacagatttctcatttatagaggtgaggaagactgaggaggaaatttctgtagaaaggcaaagaatttggtgttggatatattgggtgtgagatgcctattagaaatccaagtaaaaatgtcatgtaagagttgagcatatgagtctggagttttaaaactaaacactgaataaagtcaacaaggaaatcaatataggcagagaagaagcctaaggatcaagctttgggacatgttgatgtttagaggtctggaagatgaagagaaattgaggggagtccctagaaaggcaggaggataaccaggaaaggctggcacacaggagtccaattggagaaagcattttaggaagcggaacatgatc

SEQ ID NO: 8669 - DNA, 2093 bp, Homo sapiens
gacattagactagtttttacctacaaaaatggcaatttttcatttcatttgataagtagttcaactaatattaagtttattttttggtgtcttagggagaattccttagggaactgggaaagatttcacacagaaggtaggttttcaagcctgggaagcagagagataggaaggaaggttgggaacgtagacaagaacattgcaagttgtgagtatagaagacctctgggaatgagcctgcatggaaggtaaaagtgtgaatcaaaggagtgatgttctgtttctacaacttttcatgaactgaagtggatctcccagctccttgtgtgaagcagaaaactgtagttcatcaaaaataattgggtcagagaagtggtggttcacattcccaaatatgtacatctggattagggttttaacctcagaacagaaggtgatgggcattgaaattttggtatatccggggttttggtactgaaaacttcagttgaatattggggtcaaaatccaccctgttcgtatagacttagaagtggccctgaagttcattgtcttaaatggttgctaaggggatgattatagggattttcccacacttggagaagagtcatcctggagcactgggataaatatagagtgagggaaagtgtgtttccttttaaaattagaaatacaatataacaacattggagggagtttagaaatagaggggtatcttcacctataatcaccaccctaacaaaacagccctgaatgtttatgtaatccttcgacttcttggcaatttgctttcatatttttactccactgtaactacaagcttttcttattttacatttcagttttgctaattattattttaaatggctgcatattagtcccttgagtggtggcattataatttgcccacttattttcccattctcagacatttcaggttacttccaatttcttactattagagaaaaaagtatttttaatctctaggctgataaaaggcttcagtccacactttagttttttctttcttctttctttcctttctttctttctttctttctttctttctttctttctttctttctttcctttctttctttctttgacaaggtctgcctctattgcttaggcttgactgcagtggtgtgatctcagctcattgcaacctctgcgtccccggctcaagccttcctgccacctcaacctcccaagtagctgggactacaggtgtgcaccaccatgcctggctaattttctgtattttttgtgaagatgaggtttcatcatgttgcccaggctggtctcgaactcatgagctcaagcaatccttctgcctcagccttccaaagtgctgggattacaggtgtgagccactgcactcagcctagttttttcttattaaagtaaattactctgtcacatggcttccctctgtcagcagagaaacctatttctctattttactagcactaaaggcaatagtatttattgcaaagtgtgtgggatagtgtgtgacaaataatgagggctatgtcaatgtaagttattattataactaggattcctggtcaccaataccagaaaaagacctgtagataaagaacctattgagaagatactggatcacccacagagaattagtatcaacgaatatggagcagccaagcggggctggcagcagaactgtagcctaaatcgtgccataggacttgtctggtttctggacacctctgctgaaactgctaccaccaatgtccctggactggattgacagtactccatccccaccaggaagaattctaccccttgtgttttttcattatctacttaagattcaagatagctgaatctaagttatgttcctaattcttatgcatctatagtgggagatagggctctgcgtcccaccaggactctgacagtggggagaacaccctcaaaggggaaggttgttcaagttccggggggtcaagtggtaaatatcttcacttgctcagactgcctctcacctacaatatagctcagtcaataaaggagatttctactctactgattgcctgaaggtaaaagagcttttgggataagcagcaggt

SEQ ID NO: 8670 - DNA, 1034 bp, Homo sapiens
aggcatgagccaccacgcccagccaacaattaggaaatttgacccactcccgaacttgaacagtactgtactgactcagagctctagcaaatatacaaattaagaggaatagactgcaacacagttacataatttacttaaaactctctcagtggcttctcgttagtttagaacaaaatcccatatcgttcttcctgacctatcagaccctacatgttctagccctggcctttctatccagatcctgtttaataccctctaaccccagttcttggctttctttctgattcctccttccttaggtccttgtcatgttgttccttctgcctggaagggtcccctccgtgtccaggcagccctaggccccatctaacactaacttctgatctcagagaaatcatctgctgctttagggaagccttccctgatcccaggtttggtaccctggtatatactcccatagcaacctgtctgttgtatcactcattatacctgttatttctgttaggctgtaagttccatgagtgtgggcacctcagtcatgttcaacatggtctcctctgtgcctagaactgttcctggcagagcatgggcactcaataaatgtatatagaacaaactgaattaaagaatgaatgaatgttagctttgcttgtccttatattaaatgtgcccataatcatgtagattattttaaaagaatgttttaagaaataattttaagttgcaaagatagtagagggttcttgtaaagccttcttccagtttcctctgttaacatctgacataaccataatacgtttatcaaaactgagaaattaacattgacacattactagtaagtaaactacagactttgttcagatttcaccagttttgccattaatgtcttattttctgtacagtgtccaatccagagtactatgttgtgtttaattattctgtcttcttagtctctttctatttataatttttcccctttttctctttctttgtcttccatgaccttgacacttttgagaactagtggtcag

SEQ ID NO: 8671 - DNA, 1056 bp, Homo sapiens
ttaggagagatcagggtggtggcgaatggagggacaagagctttataaattgtaaaagtcctacaaaggggagagattggtattaccatttttctaattgctcaatttttaaaaaaaagcaaaaacttggcaacccaacattgccttgtttcttggagcaaaagtgggaaataactttgtctccatctgctagggacaccaaaaacaggccgactctttactgagtgtgtaatctccataggaagtgggatagaataaaatggaagccacaccagaaagaatcctgagttctacattttaacaaatggcaggggctctggaagagcttcaaaataaagagaaaaaaacagtggtatctgacaatggtatcagaacactgatgtgggatgattaaatattcagaggataaaaaacatgcacatagaaagccattcaaaggattaagagaaaggttattttgtgactaaaaagagaaaaaaattaaaatacccacccccataatgaatacttcctaacagtaccatggaaccttgactcttgactctgtgctgtaccttgcattccagatgacttgtaaagcaatgatttattggtcccagagccagtgagcttgggagcagttcaataagacagtgtggtctgtgggtcctgaatcattattctacctggcaaccttatgacacctgctgaatcttggagggggccaggaggaaatgatgttgatttatagagggagtgaaattgtttgtcaatgaaggtataaccgtgcttcttccaggctcaggcaactataggaaaccagattggcctttactgacaaattaacataggccaaaatttggaaaagagagcattgccttgcatttttattaaaaccttgtacttttgttaaagatttcactatagctctattaatatactttctataatattggtcaaagaatacaaaatgtcatttatataggagaaataagttcaagagatcgattgtaccatatggtgactatagttaacaatatactgtattcttgaaaattgctaagaaagaggatataa

SEQ ID NO: 8672 - DNA, 1025 bp, Homo sapiens
caagatctggggcgtggtcaagagtttcagagtgaggcctagggagaaggccatccatatccactccaaccttgtcagaaatggggctggtgaactcaggagggcttgttgtcagtcccacctggggaagatgaaggtggaggaaataaggcaagggttggcagtggttgtaaacagctggcccaggatggcttggttactgtcccagccagcaagtgcctccacagtggtgccctacagacacactctacaacttgggggtttgatctagatggttcgtttaagctcagtgtgttttttggggtttgtaaactacttaaattgtgacaaaattttgttcaccaggggttcttccctagaaagctgcagtctggttattctgttttgaggtctctgttgcctctgctgcaaaatcttatggcttgctctgtcttttgcctgtgctcatgcatttccggaatcggtctgttttccctggaaattatgcctgctctacaaaatgtgctgatttctctgatttgggtcatcttctctaggtcacaggtgctctcattgtctactactgctgatttgccctgtgcccatcctggctctcattgacagcttccacctgtttgcacactgtctacacttccgctgcctcatggttcattcccaactcttgactctgttctccatgggagggactatttcactgcagaaacccaattatttaggagggaatgaacaggcttcttggcatagaactgctaaaaagacccacttcccgctctttgagatgaaaaacacatgtttatttcctggtatctcaatttctggtccctgattacataaagttgtcagatttagctaataaaaatacagaataatcagttaaatctgaacattcgagacactgttacattaaaagttatttgtggtttacctaaaattaaaatgtaaccgtgtgtcttctattttatctggcaaccctatgactgaaagaaagtagctgaatttgaaagtagtcagaagggtactggaat

SEQ ID NO: 8673 - DNA, 1047 bp, Homo sapiens
ggaaggtacttgggcaaatgactgctagttgttatccaacatgtattttcttcttttagtagaacttccaaacttattctgagcacaggaaaagagaagggtgtatattgctcaatatctcttgcagctagaagttgccagaagagtatgagaagaagtgatgtgtacaacttcaggattatgcccttagagggaagggccatactctccactcccctttctcactgattggaatatagacagggtggttggatctgggacaggtatcttaggataagagacagaggttgtgtgttgagtataggagctcaacaagatagaagagtcttcaacatcacatcagccctgcctgcttgcactgatggtttggcttggtgtccccacccaaatctcatctcaaattgtaatccccatacgtacagggaggaaattggtgggaggtgatagggtcatgaacaacatcggttcccccatgctgttctcatgctagtgagagagttctcatgagatctgattgtttataagcagcagtttctgctgtgtgctctttatctcctgccgccatgtagaacatgccttgcttccccttctccttccactatgattgtaagtttcctgaggcctccccagccatgcagaactgtgagtcaattaaacctctttccttcataaattacccagtcacaagtagttctttatagcagtgtgaaaatggactaatacatgcacataaactgttactggagagagaaataatctgtctttttaagccattgttactttattgttgttggtgatttttttttgttttttgagacagggtcttctttcatccaggctggagtgcagtggtgcaatcatggctcactacagcctcaatctcccaggatcaagcaatcctaccacctcagcctcatgagtagctggactacaggtgtgcaccaccaagcccggctaatttttgtatttttttgtagagatgaagtttcggcatgtttcccaggctggtctcaaactcctggactcaagcgatccacccgcctcagc

SEQ ID NO: 8674 - DNA, 1028 bp, Homo sapiens
cttgaaatgtgaccagtgcaattgaggaactgaaaatttcattttatattaatatctttaaactacaaatttaaatcattttattttaataactttaaattttaatattttaatacttttaaatttacatagccacacatggccagtggccactatattagacagcatgggtctagggctatatccttcagtagtgcttttcctactcacctcatggtttctcaggagtttgctttgcacgtttctgtgtgtctgtggagaggagggaatcatgtacaggaatgctgcaggaattctaatggatatgccaaaggcttaccctcaacccacaaatatctcagacccaaaatgctggagcatcctactacatatctacctttcacctaaaaaaaagaaaacatacaatggaatccaggaaacaaggcagggattatgtagaatttcttcgctgtatatcttgttttaaaaaatacgtcattacatttatagttgtattatgtataatgggtcatgggatcaaactgaggtctaaggctagtcctggcttttgtgtctttcaggatttaggagatacagttaccttttgatgatctgcaagccctttgcttgctgccttttttgctttgcttgcctttgctactaagttgttgtctggcatgtgacagccctcctggatttcactttccccatggttagtaaataaaatgggataaacaacccgtcagctctctgatattatctcagatctgaacagaatatattattttttattaaaaaatatggagacagaaaactttactttagactggtctaaatctgtagcagattattcaaaatgcgtaccatgttctgcagtatgttgcaaaggagaaaagggcgctgtggtgcaaccagcttgggatacacaggttaaggttacataggtttcttgattttaggactcctcaaagcctttaatattctaatgtgcattatgacttttcaggtggggaatccagctgctgcctttctcaaaagaccctcaaatt

SEQ ID NO: 8675 - DNA, 1032 bp, Homo sapiens
gctagattcttccctttcatttgtgtagcattttctatatttgatgccaagctactttgtttatcctcatacctcccatttccaaagccctttggctacactttaaaaaccaaaaatatcttcgtggtaatctagaaacaagtgggttttgtcagagttgctctcctgccccattttctttgcctttgccatgatttgttcgtgtttccggcttaaaccagaccatatttagaataccccagtcagcccctcattcttcctttctggtagggcttggtattggtttctctctcaggcccagtatccatgtgtccaaatgctatgagctagaaagatagcaatagctgacattgctgaaagctcactatgtgctaagcatggagaaaagtgccttttacccatcatctcactaaatccttataacaacccagggaggatgtttacattattatcatttttatagctggggaagctgcggctaagagctaagtaaacgagtaaagagtggtgccgggacctgaacccagattccataacccgtattgttacctactggccttctttagcactaagcctccggacttctctattgttttttgggtcatcttttacgctaattgaaggcagagtctatgtcctgtaatgatctcctaactccgtttactccataaatgatagctctcctcacccccatgggcttatagtcccaggaatgaatttttgtttggctttcctgtccaattttgttcttatcacttcagttcacggaattgggccctttctctgagccccagtatgacaggctggccctgaagagatttcgtggttgataattggatactgtgtgacccccaaattaccctgaccctcaatccactactaatgaatccctgtggaagccaccatgttgatggttgtctactgttcatgagatgcccatgccttttctctatgggttgcaatggccaggaaagttttcctggggagattgaacctgggctggtctttgataatctgaaaggcatggggaaa

SEQ ID NO: 8676 - DNA, 1042 bp, Homo sapiens
aattattttaagagatagtatagtttaaaatattagttccatgggctcttcctccagtgctgtcagtgaacatttattgagatgtgaccatgtgtagtaatgacaacatgattgaatatgttctgtgtgccaagttatctattttaactctcaaaactcttatgaggcaacaactattgactgccccatttcacagatgaagaaactgaggcttggtgagaccaagtaacttgccaagattacaacactagagccagtggtgggtagagccaggaattacatggaggaagcctgacgccagacactgtgtgctcaatagccacattattttgcctcgcattagaccaatataatataagagagaaggatgtcaagctgaggagataaagtatggagatatgcataggtcactaattcccaaacacaggtatctattctctcttgggcttatcttgccccatggcgtaaaggaggcttcacatggctgactccctctgctccatgttggacctgacagtctcctggccttggatgctccactcttactgcaactgacccacactaactgagctctcctctaccaatgccttctccatgcccccttcagctagtggctccactactcctctcaggcctggaatctctgcttcatgcttccctttcttggcttctcttctcctctgtcatcccattgttctttctttcctttgaaaggcctcctagttctgtggttactcttcatttctcatcagttctctaggccaagccttcatgacttcatgcctagataatgacaagagcttcactcctactttttgaaaaacccagtttctctagatgcatagaaactcaaatatttggaactagaagacttttaggagaccaaccacctagatttccaaaaaatgtgtctccagaatctgcctttctcatttaagactcaactcaagaggtacttccttcatgccactgactctgactccttagggaatctgtgctttgggtaacattcgttctgcttgctcagctgggtgtagggacc

SEQ ID NO: 8677 - DNA, 1028 bp, Homo sapiens
cctgaggaacatggtgaaatcctatctctacaaaaagtttaaaaattaactgagcatagtggctcatgactgtagttacagctactttggaggctgaagtggatagatcacttaagcctgggcagttgaggctgcagtgagccatgattttgcctgtgccacagcactccagcttgggtgagagacctgtttcaaaaaggaaaggaaaggaaaggaaaggaaaggaaaggaaaggaaaggaaaggaaaggaaaggaaaggaaaggaaaggaaaggaaaggaaaggaaaggaaaggaaaggaaaggaaaggaaaggaaaggaaaggaacaatatttgattgcttgattcttaccttttaaaaataatctagtttccaaataattattacctagcatcctccaaagttaacttttaaaaaaggataactgaaaactcatgaatttaaacacatttgaagtgtcaacatccattaaggttatttttatggaacctcatattgtcctatctttggccaatgagatcttcttttaagttggcccctgagtcttcttgacatgaccccagtaacctgtgatactgtagttgctctttggtttgatgaaatatttccaagcccttttataatatgtttcctgtctttgccctggaatcagccatttctctaaggattcctggttcttttcatttggaaatagtgattcaaaaccacagctttggcactacgggagggcattggattggttattatctccagatctttttggtggaaaatgtagggataaagagaaatacaacataaattgatattgataaacatcatttcaaatttgagactaagggtttctatttaactgcatctatcttgcttctctttcttctttgtacgccagattctggttcccaaggacacaaacttactcatttcttttaatctataatacatattagaacacccgtgttagactaccaactccaccatcaatgatataatgacagaaaattgtttagggtttttttttcccttcagt

SEQ ID NO: 8678 - DNA, 1030 bp, Homo sapiens
acagaattggaaaaaacaattctaaaattcatatggaaccaaaaaaggggctgcatagccaaagcaagactaagcaaaaagaacaaatctggaggcatcacactacctgatttcaaactgtactataaggccatggtcaccaaaacagtgtggtactggtataaaaataggcacatagaccaatgaaacagaataaagaacccagaaataaacacaaatacttacagccaactgatcttcgacaaagcaaacaaaaacataaagtggggaaaggtcacccttttcaacaaatgatgctgggacaattggctagccacatgtaggagaatgaaactggattctcacttctcaccttctaaaaaatcaactcaggatggattaaggacttaaacctaagacccaaaactataaaaattctagaagataacattagaaaaacccttctagatattggcttaggcaaagatttcacgaccaagaacccaaaagcaaatacaataaaaacaaagataaacaactgggacccaactaaactaaagagcttttgcatggcaaaaggaacagtcagcagagtaaacagacaacccacagagtaggagaaaatcttcacaatctatacatctgacaaaggactaatatccagaatctacaacaaactcaaacaaatcagtaagaaaaaaaaaaaaacacaacaatctcatcaaaaagtgggccaaggacattactagacaattctcaaaagaagacatacaaatggccaacaaacatatgaaaaaatgctcaacatcactaatgatcagggaaatgcaaatcaaaaccacaaagcaataccaccttactcctgaaatggccataataaaaaaatacaaaagacagtggaggttggcatggatgtggtgatcagagaacacttctacactcctggtgggaacacaaactagtacagccgctgcaaaaaacagtgtggagctttcttagagaactaaaagtagaactaccatttgatccagcaatcccactactgggtatc

SEQ ID NO: 8679 - DNA, 1050 bp, Homo sapiens
taatacattcctgtggtgtgtcttctcattttagtggaagaaattgaacagacttgttcaaatcacagctctgctttttgccagaccttgggcaaattgctttgtgcattagtctgttctcacactgctgtaaagatattatctgaggctgggtcatttatcaaggaaagatgtttaattgactcacagttccacatggcaggggaggcctcaggaaacttacaatcatggtggaaggtgaaggggaagcaggtacttgtaagacagcaggagagagacagcatgaggtggggaagtgctgaacacttttaaaccatcagatctcatgagaactccctctctatcacaagaacagcataggggaaactgcccccatgatccaatcacctcccaccagatacctctcatggcatgtggagattacaattcgagatgagatttgggtggggacacagagctaaatcatatatcaatatcactttgcctcttcgagttttcatttcctaatagagataagcacatctatgaaagagactgttaactaatcaccaaaatcccttttgtccttcttctataggtctaagattgtagctaagatattgctacccaggtaaggaccatatttctcaaattcttgccaagtctgggatttgattctaccttactgaaagctaatatgttagcttctgactgtttcactggtgctaatggaagacacaagacccttaggtcagagacaaaggagtttagtactcatgacacatcaagcagcaggaacatcagcatatttgcattggttcttcttgccctgggtcttatgggggataatacaatggccccagatggatgttatgcatgcagagtgtttgtgttgcaactgaggagcaccaagcttggggaatccatcacttttatagtaagcaataagcaagcctattcattgtccctggtggtgtgtgtgtcatagggaaggataagtagatgtaatttcatttcctaaggtaattgtctgtataaacaaccctaagaaatagccagaataaaagagca

SEQ ID NO: 8680 - DNA, 1079 bp, Homo sapiens
gttccttgtgtgtcattggtaacagacaaggtagctctcgccacagtaattaaagtgatcttggtggcactaccctgatagaataacatatgctgacagctccctcatcagagcaagcagttgagccttcctcttgctgggtccacgtgcgagggtcacgttcggaggcgcagacctcttactgtggcactggggatgaaatgagactgacagcaaagactgcatgatcaaaacaaacaatgtagtgcttttgattgaaagtgtgcgctctgcccagccctccggaactgtgcattgaaatggtgcaaagtcagaggcagaactcttcgagtggctttgcctaaaagaagcatcccattctttacagtgaatagggagagggaggtggaggcgttgcgcttgaaaatcgaatacctagtgactcacaggcagaggaaacccaatgtattgactcgtcatttcacttctcggggaggcttctcttcaagcggcaccaagtggaaagtgtgtggtggggggtggtagtaggaagagcactggaattaggaaccctaccttcaccaattagctgtgtgaccctggggtaatcatgtaatggcttcaaacctcagcttcctcatctgtaaaatgggggaaaaaaagtgagcccatttttacaggattcgatgaagctcgaattagctaatacatattacaactctttctcaaaaacaatgtagacatgtcagttaggggtctaccttgtagtcaagggtcttgtctttttttttccttcacttactacctgcttcattcaccacctgacatttccaagctctgcttccgtgacagagaaactgcctgcagggtatctctcttttccaagagctactgacacacacacaatgcaaaaacgtttcctttttcttttccttgccattttgtacaatggggataatgacccatcttgtagaattgttataaggatgaaatataatgacaagtgaaagccctttggaaatgatataaacaatagtactaaacacagtggctaagactctgggttgaaagcagagtgaccatgttcctgtgcagcctcc

SEQ ID NO: 8681 - DNA, 1848 bp, Homo sapiens
ggttatgccaacagtcagtttaggcagcgaggctgtaagaggaaagtggcattcttgagggcctattttgggaagaccaacactgcttgtgggcacaaatggattctagcttctgaattactcggggacttccctgacacgttagcacggtttttatagcaagaggctgttccgatttggagttttgcaatgcagtcatggtagatgaaggaggtgcccagtagcttctggattactaaatatagtattttaaatgttgtacatcagtgaaatgacatgaacatcatacagaactagtacagttaccagagcttccatgacagtgctctttgatctcttctataggatgagaagctaactaaagaggaaatattggagaactggaacatgtttgtcggaagccaagctaccaattacggggaagatctcacaaaaaatcatgatgagctttgatagacactcaccagaatatggcagactgtcataggcattctgttattgtcttggattgttgctacaattgtctaatttacagcagttgtgatcccacaaaaagcaagtttatacctcagattggggtataaaaattgtttttcgctcagtatttactggaaaatggacatcactagtctttcagtaagatttctctcaaaacacgtgaaaaccttggtaaattgcaattctttctggggatatattggtacaacatgacttaaaacttttttttttctattaaaacttaaaggggaacaaaacttgaaaaagccctgttcttcagaaggtgagtgggttgagggaggcagtaatatgaagtgactgctgtgtattttaactaccagattttttatatttgccactgttaaatagttggaaaggggaaattctgattaagcgaaagtggtatcatcctaggtaagcttatttcagaacaagtctaatatttcagattctttcttttcgactttatactctgagttattacttactgtaagtggtgtatatgaaacctccatgcattttccagtatggatctgctaatatgcacagtaaatccatgtctttgtttgtttttctattaaaaagcaatcaagaaagataatgtgaaaaagaaaggaatttagaggtagggaaaagatgaatgtcagacatttgaagaactatagtaaaatgataaacactaaatatacttgagaaaactttcttaatatgccaatgaggtaggcctgatctttgaaatagtgaataggaatacaatgcatttcctcagtgatcactgattagaatgagttggtgggatccttgggaagccaaacggagcggagttctggatcatgtcccatccagtccagtgaatccacgacccgcagacctgtccccccgcaacagcttataccatggaatgaggacaaggtgatactctgagctgtggactgaactggcagacacaacctgtacagattgaaatttcaccttgtaaggaggaagtgaatgaaataaaggatccccctaaggattttctactgtgtcctgtggtgtttgacttcacagatgctatttgtgacattattcatatagcataaaacagtggggttggatcccatgaataacattataaaggttctggggttttttttcatccaattactagaatgttcagaatagactcatatttactaatttaataaatgtatgtacttaatgcctttacttttctaggtcattttaactataaaatcttcctgaaaaaggttgcacctggaaaatctggacttcttccctgggcctatgaggcgctgtaggaggaggcctatgggatctggcccctaccagcagtagcatcatctcctt

SEQ ID NO: 8682 - DNA, 2174 bp, Homo sapiens
tcctagtcctaaatcataccagtaacttccaaatgattgaatatcatgacagtgaaaattgaaactttatatacatgtaaatcagtctctgttttactagttagaaaccacatcataggccaggcatagtggctcacgcctgtaatcccagcactttgggaggccgaggcaggtggatcacatggtcaagagttcaagaccagcctggccaatatggtgaaaccccgtctctactaaaaatacaaaaattagccgggcgtggtggcgggtgcctgtagtcccagctacttgggaggctgagacgggagaatcgcttgaacctgggaggcggaggttgcagtgagccgagatcgcaccactgcaccccagcctgggcaagagagcaagacttcatctgaaaaaaaaaaaaaaaaaaaaaaagaaaccacatcttaggtatcaatttccttcctctttaataaaatatacaagttgctttctgaatgcgaaagtgtcttacatttgatggtcttcattgtattaaaacactggaaatgcatatttaactagacgcattgagtattgtagtatcactgttgattgtgttatccatacttgtgtagatgttgaaagtgtgatgaacagtgtggtatccctactcttgatcctggaaccagacaagcaagaagctttgattgaaagcctatgtgaaaagctggtcaaatttcgcgaaggtgaacgcccgtctctgagactgcagttgtaagttaagatctgaaagaaactcagtttttctaggtgcttttttcatgttactaacttttaatggtgcagagcaggaattctggaacttgactctcagctgtggctcatattagctgtgaccttgggcaagtggcttgacctttctgtgccctagtttcctcctttgtaatatgaagttgttaacggtacctgccacaggtttgtggtgagagctaacctcaacttaaaactggttgctgatttcaaacattgtttatttgtttgttaaccaaccaggttaagcaaccttttccacgggatggataagaatactcctgtaagatacacagtgtattgcagccttattaaagtggcagcatcttgtggggccatccagtacatcccaactgagctggatcaagtgagttactgtgtggaatagttgttctgcttataagaaatgtactttttttttttttgagacggagtttcactgttgttgcccaggctggagtgcaatggcgcaatctcagctcaccgcaacctccgcctccagggttcaagcagttctccttcctctgcctcctgagcagctgggattacaggcatgcgccaccacgcccggctaatgttgtatttttagtagagacggggtttctctatgttggtcaggctggtctcgaactcccgacttcagttgatcctcctgccttggcctcccaaagtgctggggattataggcgtgagccaccacgcccagccagaaatgtacttttatatgttatactttatatgtgttactcagttttctccttttgtcaatctcttgtaggttagaaaatggatttctgactggaatctcaccactgaaaaaaagcacacccttttaagactactttatgaggcacttgtggattgtaagaagaggtattcaaaagtaatgaactaacatatcacttaacagacagtataagtaggtggggatgttttttaaagagaagtagggccagtaattttgctttactctgttctccacagagttgctataaatctatttctataaatttgacctaaagttaaagataactataaagattaaaagtagttttccctcatctttgaactttttaaaaagtgaaatttggctttttttctaaaaaaagaaaggtggggcctttccaacatgggcttcaacctactgctgtagcatgagcttggtgaatgtggtgaagcatctcatcatttttggatggtgcagtggcagactacaaaaaactttgtgttaatgtaaatattccatctctccacccatgtccttcctcttgcttatcacactctagacccagcgagcctatgtcaggtataaaagcaccatgctctttgccagtctggaccaggagctggcactggttcttctatagcccgtgtactaagaatggttttaacatttt

SEQ ID NO: 8683 - DNA, 1019 bp, Homo sapiens
agttacttttccttagttgtccatctttcctactaaaaggaaggttttatgacttttcccatagacagggactttgtctctcttagtcaccgttataatgtcatcagcacagtacctgcctcttaaaaatattttaaatgaatgaatagcagtaatgctttcaagttcctaaagcaatatttctttttagtgatgctgcttcaaaagtcatggtggaattgctcggaagttacacagaggacaatgcttcccaggctcgagttgatgcccacaggtaatgttaaacgttactctgatgagggtttgacagcgatgtagaggtaagctacaatattaaattaagtaactgaaatcatgtttgcaactaccagtgatccagagccatttgatagtgtgtatttcctggtgattctaatgtagatactaaaattcaaggtttgatattggaagaactgtggattgaatatgaagtagctgcatggcgtttacctggcggggggggtattgctggtatggggatgatgatcccaacccaagaattagaacctaatcttgggccaattgaccctaattttaaggttataggtggaaagttgatggcttgccaaaaattaacccattgctaatgagtataagggcttttaacagtcttagatctaactggtaacaagaatagaatcagttttctaaatctatgtaataaggattatgaaacttctttttttggtcattgctttgtgtggacctctacatgataggagttggtaaaaagggaagttggtggtaaagatccttgactttgaggtcaggctgcctccattcacattcttactccacctcttaatgagcacttctgaactgcttcatagttgataaagggggcagagtaatactgtttgtctcctaggttgttgtgaggaataaatgagatgtaaggcaagtgaagcacttagtgtcttggcatgtggttctgctgctgcttactatttgattaccttggtgctttctctccagctatg

SEQ ID NO: 8684 - DNA, 1022 bp, Homo sapiens
cccccattgatgtgtaattgactgtttcaaaggagcactggttcataagctattgcatgcattaaaactgggttttctatattgcagcattttaagacaggggtcagtgacaatgcagaaattgctcaatgatgcactttttttattactgcattaaggttttgacatattagtaatgaataaatgtttccataaaattagattttttataactttaaaattgaaatatgacacagtacactgtgacttcctctttgatggtagtattttagttttatgaaacaaagcacagcttcctacaaagtctttaactcatacttcactgccttagtagtttgatttttcagaacaagagtcctaagggttttaagtttggttctttgttactttaaacatcaatttaaagtgtttttagatgcaagttttcacatgtaaaatagataacggttttatggaattcagcctagaaataatcttcattcctctgataagttttttcatttatggtaagattgtaactgcagaaaagataagcagtaaaatagatttaatttcaggagtatttaaaataatagaaatttcagaagtttctatcactttatattgaaagagagttgtctgtccatgccaatagaactgagaatgttaaggaatttttgaaaaaaatctttaatacttattcattgataagaaaaaattcgttaacattgctaatttattgtgccagctagaattcaaattccttcatttgccttacgtttcttgaacatctatgcaaatcagtattctattagaaatttgtttatatgcttttcagaaaacatctttatattaatgtgtatattttttattttaattctataattaaacatttattacagctgaaagcctagtgacaactatctagattccacaagttgcaatcagtttgtcagaacattttcctttattaacactgacaacttaggccaacagtagcattatcttgtgtcaactgaattgccctaacatgtccacatgta

SEQ ID NO: 8685 - DNA, 1032 bp, Homo sapiens
tgtagagacaggatctcactatgttgcccaggctgatctggaactcctggcctcaggcaatcttcctgcctctgcctctcaaagtgctaggattacaggcatgagccatggggccaagcccttgaccagagatttaagacctgtgatgaagagtagtgagtgacttgggaaatgttgtataattggaatggcagccacgaatttacatttgagttgccagacatgaggtggaccacttaagcagaggattaaaaggaaaaatagcctttggggaaggtttttgagaatgtggtaatatactaggttctaggaacacagcggtgagtaaaacaagcatagtgtctgcccccatggctcttatagtctggttttcttaagtaatgtgtactagagctgggagaaacaggaagacagaggaaaaccaacaaggatgctagcatggcaattcagatgtgaggtaatgagtttgaacctgtcttcaaggaaaaagaagtcgtagaacttgatgcctgattagaaagaacttggggccacacgcggtggctcatgcctgtaatcccagcactttaggaggccgaggcaggcggatcacgaggtcaagagattgagaccatcctggccaacacggtgaaaccccgtgtctactaaaaatacaaaaattagctggacatggtggcacacacatatagtcccagctactcgggaggctgaggcaggagaattgcttgaacctgggaggcagaggttgcagtgagccgagatcccgccactgcactccagcctggcaacagaacgagactctgtctcaaaaaaaaaaataaagaaagaacttgggaatgttggaacaatatgacttgaacctaagcttctgtgctgaagaaatatatgtatggaagctgggagcaagaaaacaaaatttggatttgacaggacaaaatggttcatattttatttatttattttttttgagacagagtttcgctcttgttgcccaggctggagtgcaatggcaaattacaggtgtgagccact

SEQ ID NO: 8686 - DNA, 1051 bp, Homo sapiens
cctgagtagctaaccacacctggctaatttttgtatttttagtagagatggggcttcaccgcattggccaggctggtaatttttgtatttttagtagagatggggtttcactacattggccaggctggtcttgaactcctgacctcaggtgatccgcccattttggcctcccaaagtgctgggattacaggtgtgagccaccgtgcctggcctgttttttgcctttctaacttgaaataacttttggcaccagtttttagaattcctaatgcatacttttttttagtatgaggtataatgagtatgataaatactcctctgaaaaaccaaagtaatgattagctcttctaaaacctgtcagtttctatatgatggacatttgtttgatacatttcaaatctagagttttcctcaaggtttttgggaaaaggccttatagatcataatttgtaaggcgtaagaacaatctcaagttaatgaaaggttatttcagacaaacttccactgttagagttcagaaagttttttcccatggaaaccgtgttgtaagtaatagtagctgtcatttacatcactagcaactaatttgtgctagctgttttaagtcacacgtacattcatttatcaaaattcatttatcatgaataaatgaatacatacattcatttatcaaaattcattataaaaatcctttgaggtaggcattctttttaccatccttttatggatgaggaaactgagggatagagacatgaagtaatttatacctacagctacatagctagtaaatagtggtgctgtgattgaaacctgggcattgcagatctggagcctatgtgataaccagtgtactgcactgctttattgtaagatagtggaatgctgtaatccacctatatgtgaaatgagtttctgtgagttggcctggaaacctaagcatcattaatatccttatttaagtgttctttgtcaccgttgaccattacctagttgaaatacattccttttcacttccatagcactgtacttgcctggttttcctcctactttt

SEQ ID NO: 8687 - DNA, 1047 bp, Homo sapiens
ggcttgggattgataaatttcttgttcattccttgctttctcctgcggactcacatccacgtccatgcttttaaatactatctcagtggagatgcccatatttgagcagactcttctcaggacctcagactcttctgaaaacctgatcacataaccaactacctctttgaccttttacttgagcttaatgatatgctttccccacccatcacacctctgcttctctagtgaggcccatctcagtagtcatacctctgtccacttagttgcccaggccagatggtgggagttgtgtgtgctcagtcactaagacctactgttttgaatctaatgtcttgaaactgtctgcttcttttgtatccactgctccagctggtccaagccaccattatttttcacttggacaactgtggtagcttcctaacttagtcatcttggaccttttctttcctctcttcaattcattcttcttataccatccagagtgatttttaaaaacacagatctacaagtttgctcttggtcctttgcttaaagcctttccatggctactcctacatattagggtcacatttttaaacatctgtaatatggtcaggcgtgatatctcacgcctgtaatcccagcactttgggaggctgaggtgggagtattgcttgagcccaagagtttgagaccagcctacgcaacgtggtgaaaccctatctctacaaaaaataaatagaaaaaattagccgtgcatggtggcgtgcgcctgtggtcccagctactctggaggctggggtgggaggatggcttgagcctgggaggtggaggttgccgtgagctgtgatggtgccactgcacttcagtgtgagcgacagagtgagaacctgtcacacacacacacacacacacacacacacacacacacacacacacacattgtaatgtgctctgtatggctctgcgtttactgaccaattttttttaatttattttcttttttattttttcttgagacagggtctaactctgctgcctagggtggagtacagtggtatgaac

SEQ ID NO: 8688 - DNA, 1004 bp, Homo sapiens
tcctgccttggcctcctgagtagctgggattaaggcatgcgccaccccattcagctgatttttgtatttttagtagagacgaggtttcaccatgctggccaggctggcctctaactcctgaccttgtgatccacccaccttggcctctcaaagtgctgggattacaggtgtgagccactgcgcccagccagtagtaagcatttcttaatgtgctagccgtgaatatgaatatgtgtatggatgctgtataatatgaagaggtaaatgagaggatgtgggcctggtttcagcatatccactcttttttttttttttttttttgcagaaccatcttctcttttacctttgagtgaaacacagttttttcactgttcctaaaatggtgttaggaatgctcttatctagggtctttgtgctttttcctgtgccaggaccacttttccctgagataatctgcgtgacttcctcatgttgatcagtggcctctgctagtaccctcaaaagaatggtatgcacccccatcaccatcaaccctgcttaaggtttcttcataacatttatcaatccttgatataaatacttctctgttcttgtttattgtagtctctgtcctttagcttgggtgttttttgacagtagaacttcagctgtgttttcccccacttgcctggcatataataactgttcaatgaatactgatttaataaagaatatgtttaatgggggatattctacttttacttgtctaatatttcagagtttaaatttggcctctgtaagttaacaactctttagggatcctgaccgtgtagcttgtcctatgttgctaggcatgtaggcatttatggggtgtaactaaacataaaataatgaaattttcatatggcctaatgccatcattctcattactgtgtgatcactgatcctgtttaagtaacttgagaccagatttgtctgacccagtgaagcaaacacaaatatgtggataagctaaaatacttttg

SEQ ID NO: 8689 - DNA, 1029 bp, Homo sapiens
atgcccagctaattttttgtatttattttagtagagacgaggtttcatcgtgttagccaggatggtctcgatctcttgacctcatgatccgcccaccttggcctcccaaagtgctgggattacaggtgcgagctaccgcacccggtctttcctcgtccttttaatactcagttgtcatgtcctagaggaagtcttcccagattgtgttatgtttatttacttatgctcttttatttctctagttcctagcataacacttggcagtcagtaaatgtcagttgtataaatgcagaacttacctttaggtgcaacaatagtagcattgattcagcattcattatgcgccagttgctggactgtgctagttgctgctgaccgtatgtgctttattgtttactctcacaacaacctgatgaaggtaggtgttactattacccatattttactgttgaggaaacggagacttggttaagtctaactaattgtctgtgtggctagcctctaagtcacagaatttatatagaactggatttgaatcctgtggcctgtttgcagagctatgcttttatacagctgttacacagttgtttcaaagttccctcgtttattttttcaaattcatgataaataatttcttaataagagctgattattcttaggctacatgtttttgcttttaaattatcaaactggattagctaaaacaaagattttaaaatatttggcatttaggtatgaatgggataggtatatgctagagttccacacagatttaattcagtggacttagtgtttatttctattcggattttataccaaagaatactgtgtgctaaataaagtaaaaatatttatcttaactgagaatattagaactacaaagaacattaggctttataagtaggaaaacaagtattctacaagattatgtactttgctcaaagtcttgtagcatttatttgcagaatcaggactggaatttggggctcctaacttccaatccagaatgtttatctttctcaactatga

SEQ ID NO: 8690 - DNA, 1047 bp, Homo sapiens
caacctcttattactttgcttttgataaccttcacagttttcagaagtactgggcaagtattttgtaggatacccctcttttggaatttgcctaatgttttttcttttcatgtttagaccggtgttactggttttgaggagggagaccacaggggcaaagtgtcactttcatcacatcctgtcagtggtacatactatcaacgtgatttatcactactgataaagcctttatcacctggtcgattcttgtcaggtttctacactgtaaagttactctttttttcctcctttcaatactatactctttggaaaggcgtcactgtgtgcagtccacacctgagtggggagttatggtctccctccttcagggtagagaatctacataaattaattgggaattcttcaaggggaatttgtctcttcctctctatttattcaatcgtttatcagtatggacccatggatatatattttatacttcgggttacaagccagtactattttgttgctcaaaatgttcctgctttggtcattgggaactcttttcaaatagcttgtgtgttcctttgacataaatgtcttttctttttttctccctccctttctgccccctttctttttagcactttcttactttctggcactacaagatactctagactcatcttgtatatttcctgccccagtactagaatcagccatttctccaaggagccttggttcctttttcttggagaatggtacgagaaaccaatctgggcactaggtatgttctttgctgctggagtgtcattgcttctgggctctgtccgccagagtaaggaaatacacatgtagcttgttttaatatagagaatgattgctatgatcattttaaaagcatataaaatcgtaagagtattttgaaaatagcagttgggcatttgggtttttgtattaagggatttctacattatactttgagtagcaaaagaatgaaactggactcctacctcacaccatataaaataattaatttgaaatggatctgtcatcctaaatgtaaaa

SEQ ID NO: 8691 - DNA, 1034 bp, Homo sapiens
gttgaatcttaagggacaggtatatggtgttcattgtatttttgatttctttctatgggtttaaaatattcaaaataaaaacataacctttcctttccaagaagagggggaaaaatcttgttttgggctactctgaaaatgtttgagcttgaagttttctcagtgagttattgggaaatagtattaattatttatttgaattatctgttattccatagaatactataattagagaggttatggaggttatttcatctggtcctttttttatacagatgaaattagtccaacaataattgagtcccttatttaaattacactgtaagccagaagtagagcctgtacaatgaattcacctctctgttgtccaggatattactttttcttctgtaccacattacctctcccagtaaaaagactcttgtttgaggtagaattgaattaaagaaaatactgtgtattatttttcttactaatgcatcttaaatatatttcctccattgtgatagtattgtcagactgtgtttgatccacgaatctataggtcaggaaattggtcaaaggtttctactacttttatagttgttcttctagaagttttttttatcagatggtttggactgtgtattttggtcactgatttttaatgtcctctagtttaagctatgaagaaggacatccctcacactctgaaacagatctccttcagagacagagttttgcagcctctcatcagcttcctggatatgctcccacacctcagcctactggtaacaattctcttgtgaattatactacgagtctgggtacatttagtgaataagaagaaaaaccaattttcatgtgttgagttctgaatgtataggacatactcatgccatgggaaatgaaatgagagtaaaagcttgttttttgtttttatttttgacatggagtctcgctctgtcggccaggctggagtgcagtggcgtgatcttggctgactgcaacctccacctcccgggttcaagtgattctcctgcttcagcctcccg

SEQ ID NO: 8692 - DNA, 1029 bp, Homo sapiens
ttagattctgcctgtgatttacaaattcttcagcagtcaatactgcaggcaggtttaggtcaagtaaaggcatctttacaagcacagcgtgttcaaagccctcaacaaatagtacatcccttccttcagatggaaggtcatgttattcaaagcaatggtgatcattctcagcagcaactccatcctcaaaattctgaagttatgaaaatggacctctctgagtcttcaaaaccattacaacaacatctaacaacaaagggccattttagtgaaacaaatcaacatgattcaaagaatcagtttgtttctcttggatcgatgtgtttcccagaggcagtgcttcttagtgatgaaagaaatattttatcaaatgtagatgatatcttagcagctacagcagcagcttgtggagttacacctactgatttttccaagtcaacttcaaatgaaaccatgcaggctgttgaagatggtgattctaaatctcattttcagcagtcattagatgtcaggcatgtgacttcagattttaactctatgacagctacagtaggaaagccacagaatataaatgatacttccttaaatggaaatcaggttactgtgaacctttcaccagtacctgcccttcagtcaaaaatgactcttgatcaacagcacattgaaacacctggtcaaaatataccaactaaagtaacttcagcagtggttggaccaagtcatgaagtccaggagcaaagttctggcccattcaagaaacagtctgctaccaatcttgaatctgaagaagacagtgaagctcctgttgatagtacattaaataataacagaaaccaagagtttgtttctagtagtagaagtataagtggagagaatgctacatcagagagtgaatttaccttagggggtgacgacagtggtgtgtcaatgaacccagctaggagtgcacttgcactgttggccatggcccaatctggggatgcagtcagtgtcaagattgaagaagaaaaccaagatttaatgcatttt

SEQ ID NO: 8693 - DNA, 1056 bp, Homo sapiens
catgtgccatgttggtgggctgcacccataactcgttatttaacattaggtatatctcctaatgctgtccctcccccctccctccagcccacaacaggccctggtgtgtgatgttccccttcctgtgcccatgtgttctcattgttcaattcccacctgagtgagaacacgtggtgtttggttttttgtccttgcaatagtttgctgagaatcatggtttccagcttcatccatgtccctacaaaggacatgaactcatccttttttatggctgcatagtattccatggtgtatatgtgccacattttcttaatccagtctatcattgttggacatttggcatattttaagaagcaatgacttatgtaaacaattggcagtaagtatggtattttctattgtaagaaacatgccaaggaaaaatttatttgtaacaataatataactaccacctctgtgccaggaactagtagcaatgttgtgagatacacattgttatctccaatatacagatgatataactgagaataaatgaattatgtgggcccatacctctagtaagtgacagagctggaatctgaacccaggtttttctggttctagagcctacattctttctcagctctttaggataaatagggtggtgctttaagacttaaaccttgttttgtaacatacttcccagcttctctctggacttgactacctttaactactaaagtgttacgagacagctggtatccaaataacctgttagcataaatatctgataatacatttctaaagaattctcatttcattacacagggaaattaacatgatagaaagtcagtctcagattcaaagacattactaccatggatgtgtctaatcctaatatggttttataacgtctcacccagttcagagtgctttgcaatcgctattatattccctcttacattcccagaatgaaccttttgaaatctctgttctaaaacatgagtctaaaactagtttcttccagagatatgttatctcatttttagttaaaatcatcatcataaacccgatcct

SEQ ID NO: 8694 - DNA, 1046 bp, Homo sapiens
tattttctggaacataggcttgctgttagttttttgtggactgctgtagccattctgagcatatgaagatgtctttagttgcacctgtttcctcctgttttttgactttaaattattcagatgcctaaagggcatattccttgctctaaaataataaagttttctagtaaagtttgtgataaaataattataaagtaagaattatttacatatttacttgcagtataggagttggattaagaaaaaaaaaactaatggaactgtatcttgtatcaacataaactaaatcctgggctcttttaggcaagatggtacacagttgtctaacactctgaattctatatttgcattaaaaagaccaatggagtataaaaacccatccctagttttgaatcctgaaactagggttaggtgctattttcaccattccttactcctttcagattgaattaaaatgtagtataaaactagtttttgcactactaaaatgtttctgaatctgtatcaagtaatttactattatcaagtcagtggaagtagaatgttagagctatatagtctagttacaatttgatttcattcaaagtgactggtatgttttttcaaaatgaaggccaaactgacgaacagcactcagcccctacttcacaggcacccagatctcaagaatgtaatgaaaccaaaagtggtgtttcccttcagttttgtttgcatctctggataaaatggacttggctgaaatgtgttgaaagcttaaaaaaatgtgtaataccaccatcagttttctgggctccttgaagatcttttaaaacttaaaatttgggttttaatttttttttaaggtttgttttagttctttgtctctgaaatttatttggcattctgggatgttctgggtctttgtatactgagtaattttggattttatcttggacattttgagtactgtattgtaaaactgtaggttctattaacatcctctgaagaatattgatttattttgttctgttttagcaggcagtcagaacataagttctgtcttactt

SEQ ID NO: 8695 - DNA, 1051 bp, Homo sapiens
tagttttcttgttttataaaatgtaaaggttgaaataatttgttatcaaacttcttgatcttagaaccattttacattcttaaaaattattgaggatcctaaaatgcatttatgtaggtatatctattgatatttactatattagaaattaaaactgagatagttgtaatacataagaatataccagcacacaaagcatggtgtacaatatatgtaagaaatttcaggtggtttagtagtgtagtacagaggttgccaaatgtcttgcagactgaatctgaccctcagcctgtttttatagttttattggaacacagccgcatagattcatttgcatatttccatacagttgctttcccactacagtggcagatttgagtagttctacagagaccatatgacaaaatctaaaatatttacctatagccctttacagaaaaaggttgctggcccctatttttctagaacataaagtagaatttaagaaaagaggaagggatgatgaaagaccttgtatgccataataaagctaaaaagcttgtgatcctgtaaacaaatgaaagtccttagagggatttataagggggaaacaatatggtgaaatttaaatttgaattacaagacataattcaggcataaattgagtctgaacctaagtagtggcagcagggatggagatgaggggacagttttgagatattcaggatgtaattttggcagaacttgaatggtgaattagttgttggggctatggttgaagttgatgtccaggatggtttctgacattacaagtatcattgcttgagagattatcttagaaattatctgattagaaatagaaccataataaaaaaaattcttcagtgctgaagtctactttaaatttaccgtttttattttttattttttgagtcaaggtctactctgttgtctaggctggactgcagtggtgcactcatgactcactgtagcctcgacctcccaggctcaagtgatcctcccacctcagcctcctgagtagctgggactacaggtgggcaccaccacaccc

SEQ ID NO: 8696 - DNA, 1054 bp, Homo sapiens
aatcagatgtcaagtagtggccttctgcaggccggccgcttccatcatggaactgtcattaccacctctgctgaaggacagtggtgcggcctttaggaacgaagttagtcctctggaaatggacctaaatcccaccacatttttaccctaatgaatgatttttctattttgtaaaccattgggtaacttgagtcatattttcagaaacattttttgacaaatgatgaagcatgcactaagtataatttttttttattgctagagaagtaacacttaaagtaacgattttttttttctgactccggctaaacaccagaatgacagagaagtggcagaaaccatatgtttgtactcacatctggccacaaaaccagaaatactgtacattatgtaaagaggtctggtgtggtgtgacatcctgtataagaatatcatcaatttaaaatataaaatttggaaactattctgctttacagactccttttactcttaacatgttcaggaaactggatgtggaattggtgcaattctctgactgctttttgtgtcaaattatattgtgataaaaaaacaatgacatactattttccctatcgcaaagaaaagtattttcgtttatactgttttttcctttggaaaattttcaattgtacattttatttcactgatagttgtatttttcacaaggaaaatgttgtggttataattacgtttgatatatctctacaacaccttttgttattttcagtaaatcttagttatatgttgaatttctaatgtgaattctatcttgaggtaaccatttttttcatacagatttgcttcagtgttatccagaatatgcattcagtactagaattagtttagctttataaatagggctgtgttagacactgcagtaattttctaattcataaaataaacttcttactaaactagcacttgattaacttgttgaggtaaaaatctaactacatttacattttgaagaataaaactgataattagactatttgcagtgttaaacacagcttccttaactcttagaactgga

SEQ ID NO: 8697 - DNA, 1050 bp, Homo sapiens
tgtgattttccttttaatatacatatttattttctttaaagcagctatatcccaacccatgactttggagatatacctataaaaccaatataacagcagggttattgaagcagctttctcaaatgttgcttcagatgtgcaagttgcaaattttattgtatttgtagaatacaatttttgttttaaactgtatttcaatctatttctccaagatgcttttcatatagagtgaaatatcccaggataactgcttctgtgtcagtcgcatttgacgcataactgcacaaatgaacagtgtatactcttggttgtgcattaacttacatgtataatttttggcatctgtgttcacaaatgcatgtgttagcaaatcacctttatttataagtgacaataattgaagttaaggatataaagaaacctgcatttgtagtccagcgttttcatttggtccataacacaatgtatggaaatgtgaaagacaattttgtacatttgtttgttactaactcagatcattaaaatgaaaacaatttttttaaacaagaaaatcagaatgtttggggtttttttgttgttgtttcttttgtttttttaagaattgaaaacaggtatcatataggcaaaatcatcatcatgttacagattcctcacacaaactaaacagttattagttacaaatggcatagggcccacccattattttctcagattattttaagttagtatttgatgaatatgcatccttagctaacaatggcagaccatatttaagagtttctgttttaagatataactcttttagtccttttccacctataaagagttataaatctgccaggtgggtgcagtggcttacacctgtaatctcagcactttgggaggccgaggtgggtggatcatgaggtcaggagatcaagactgtcctggccaacatggtgaaaccccatctttactaaaaatacaaaaattagctgggcgtggtggcgcgtgcctgtaatcccagctgcgcaggaggctgaggcaggagaatcgcttgaaccagggagt

SEQ ID NO: 8698 - DNA, 1041 bp, Homo sapiens
tgtgggaaaatctgagtttaaagcctgccaactcccctcatgtaaatatctctgcaaccttgtctccacaaggtaagctaaggatgaagcaaagtaagaagtagaagacaaacttcaaagttatttaaaattttttaatcttaatctttattagattttaaatattcaaagtacagagaaagagtgcactatgtattaaagctgtttatgttcaattttaacagaagtctattatctttaacaaatagatcagtgttagaactcttgaacactgacttttgtccgatcagctggcaaaggttcagatctgagatgttttgcatgcagatttgtattgaaaatatgctctccgatgtttcttttcctaagattttattaggtcaagtaaaatttgaaaattacattaaaacattaacagaattcttcggttcttccttgtctgtagcaatggaatatagtttaatgactttaatttccaccctttcccccattccagttgtggaaaccctgagtggaataatctgcaaccaatagtttcaaacaagtttttagcttgaatgaatcattctttcttccagagtccttattaacatgttacatgacttgatctcttatctctgacagattgctttttacagtacaaagaatgaaaagaattcctgttgtccaaagcctattctcctacactctaaacaaatcttggattgttttactttgttataagaaagcacttcgtaaggttgactttttctttctttttggccacaaatttactagcttagacctgcttagaaaaatattatggtgagcatatagtaactattaattgttacttttcaccttgtcatttttcctgtgtagttattaatgaagtgtggcaagaagaaacaattgggcgtctactacaacttgtagaccttccacttcttgactccttactgaaacagcaagaggctgtacctaaaattcctcaacctaagaggcagtccaccatggtcaacagcagtaactatctggatcgagggattctcaaggcttata

SEQ ID NO: 8699 - DNA, 1046 bp, Homo sapiens
ctatttattgcttcctccctgcctggcctagccagggctcccaagcccttttttctagaggagagttatttgtctctctctctttttttttttactttcttttttgtatttaaacattcttttaaccttcccccaaagatacagttattggactttaaaaagcttgttcttttatacaaaattactcctgcatctggttgagagcagttatgacttatgagatctagtgaaaggaaagtctttgactttcaagccttgaaagtcaaggaggaaatgtattgaaaaatagtttactgtaatgtgaacgaagagaaatgtctggaattcttactgaaaaattgaccctgagacaatacacagatgtgatgattgaattaaattctggaattagatttaactgttttcagataaaatagcttgagttcacgaatctcctagatgaggaagtcataggaaatccctggtgtttgagcattatttttcaaggaacttcagtgaccagaattcctgacatgtcctctgagcgtgagtgatttgggtctcatagacgatctgttctttttttttttttttttttttttttaaagtgtacacatgtatgtctgcattttagacagggatgttatattagaagcagagccatgaagttggaatgaccaactgccacaacagcaaggggtaagactatattactgtatgagtaatgcagtaatatcggcacctgaagccttctgtacaggaagctaagagaaacttacaagttagccgggcgtggtggctcacgcctataatcccagcactttgggaggccgaggcaggcagatcacctgaggtcaggagtttgagaccagcctgggcaacatggtgaaaccccatctctactaaaaatacaaaaattagctgggtgtggtggcacgcgcctgtaatcccagctacttgggaggctgaggcaggagaatcgcttgaacccgggaggcagaggctgcagtgagctgagatagcaccactacattccagcctgggcaacagagtgagactctgtctca

SEQ ID NO: 8700 - DNA, 1055 bp, Homo sapiens
ttctgtaatgatcagtgataacctttttttcatgtgcttgttggccacacgtatgtcttttgaagagtgtctgttcatgtgtaaaggaattattttaaatgtcctaactggttctggatccagctgcttaaaaatatatatcttgcctaatacttaagcaccttatattaagaatatatatttggagaagtactgagtcagtggaggcttttaggatagtcagtacttatgtggcctacttaaggaagaatgtcacttcttttggttggcttggtatgtagttaagagtggtttggaggaagaacaacttaatattagtgtgctgcttctgtagctttgccatagatgttctttgggaccttgtcttagtcacttgtaggacaaagatagaatagatatttggaggatgtatgttacacatttataagtttgtcaaatgaaaccttgagctttttggcagaccaggctgttctcagttgatacttggaacatatgttactaaacaaaggcagcatattgtctggattctgagacaccactgttatgccagggacctagagcctctgttcttactgtgtggaaattaaaacaactggatgaatattgtcaatatgtattgtatttttaggacagcatttgtggtttggagacagttaagttattaagcagatttattttgtcttttatatttggcagttaatgccaagttagtacttgagaaggctcttttcaacagaaagtccttgaaatggagcaaactgaggaccatatttttgaccttaaatgtattttgttactttaaactaatttctctaatttttatatttgttcttttctctttttatatttattttttctatttttgtatttatttttttcatttacagacagggttttgctccatggcctgggctggagtatagtggtatgatcatagctcactgcagcctcaacctcctgagctcaggagatccttctgcctcagtctccaaatagctgagactacaggaggtatcgccaccatgtctgctaactttttcatttctttttctgtc

SEQ ID NO: 8701 - DNA, 1030 bp, Homo sapiens
agtaatacatagatgttaaagaatactagttaggcatagggcaaaaacatttttaaaggcttggtcacaaagtgagtttatttaattctgtacactgtagctgtaaaatatgtagtaaatgtaataccatgcaaaccagtctgatctgtcatttcatatcaggttttaatgactgtatttaagaattgtttatacccattagatgtggttgtcccttgatatctgagggattggttccaggaccccccacggacatcaaaatccacagacactcaagtcccttatataaaatggcatagtatttccacgtaacctatgcactgcctcctgtatactttaatctctagattacttattataatgcctaatacaatgtaaatactttgtaaacagttattatactgtattgtttagggaatatttacaaggaaaaaaagtctgtacgtgttctgtacagatatgatcgtctgttttttaatctgtggttggttaagaccatgagtgtagaaactgcaggtacagaaggctgactgtagttactcgtaggttaaaagaagactttagtggtggttttaaaatttttggaataaaagcctttaatgtcaaaggttattagttttttttccttgtgctatatatgtagctttgttttaaaagtgcatatagcttcatgaatgtactatgtcaatagaatgtaatggtatcatggattagatgtccttcccgacctcacacacttcaaaatgtgtgtacctatttgttctgagtcttcagcattttcctgtgaatggaattcagcacgctgaatgttattaacagcatgtgtgccaccatgaaagagtgccagttcagtggccagtgaataatttaggcatcagctggtgtggcaagattgtattacttaggacagagaatctaatatgtgctaaactttgacattaaaaggaacaaacatttctttcgtgagaaaacattgcattacaaagaatgtcgtgtatatctaaaaaccaatatactaaattaaaaatta

SEQ ID NO: 8702 - DNA, 1022 bp, Homo sapiens
ggaaaaatactaatgatttttctagctgttaagtgataatttaagaaatggtgtgctccagagcaccatgagattacgtgagatcacctgatgaaccagagtgtcattttctatgtgctcatttatgcacaagtacccggtcttatggttaaataatgtgtttattttatttttatttatttatttttttaaatttttttgagagatagggtccaggctggagtgcagtggtataaagacagctcactgcaatcttgactttgtgagctcatgcaatcctcctgcctcggcttcccaagtagctgggactgaaggtgtgcatgatgttgcttgtatagatggggccttgctatgtgcccaggctggtctcgtactcctgggctcaagcagtcctcctgccatggactcccaagatgctgggattacaggtatgagccactgcacctggctgaataatgcatttaatagttcataaagtaaaaaatgatttatctacatggtggtgaggagcttggactgtcactcagactgcataggtttgtataagccccacctttcactaactgagagatcatgaaaagttacttttgcacttagttttctcctgtctaaaatgggataatgtatctacctcaaagggttttgttaggattaagtgagataatgaatgtaaaacatttagcacagaatctgactctaggctggggagggtggctcatacctgtaatcccagtactttgggaggcctaggcgggtggatcacttgaggtcaggagttcaagagcagcctggccaatgtggtaaaaacccgtctctactaaaaatacaaaaaaatttagccagccatggtggcaggtgcctgtaatcccagctacttgggaggttgaggcaggagaattgcttgaacccggcaggcagaggttgcagtgagctgagattgtgtcactgcactccagcctgggtgacagagagagactccatctcacacacacacacacaaaaacgaataaagaagctgactc

SEQ ID NO: 8703 - DNA, 1045 bp, Homo sapiens
atcagataactttatctgcccctcagccagttagtgtggggattgcacatgttgtctggcctcagcctgccactaccaagaaaaataaacagtgccagaacaggttggtattggtgctttagctttcctctgcattttgagaatcttttaaatgaattttgcatgtactctaaagggtcactctgttgtattcaaaatgacctcttttatagctttgttacaaacactaagccagctcccttctcaatttctcagaggtattttggtaaaactaatggaatgggagccaggaagagaggaaataaatgctttcagttggtaagattgtctttattgcccttttgatttattatctacctgtaatgtagcaattgtggacattcagatagcacatttaccaaaaagcaactatttaaatgtatgtaaatgcagtctacatggatatttctagagctattttatatttcacaaaaactcaagatctgttagtgtgttatattcatgaactcgaacaagtgaaggttctcattttctggtttaacaagataccttagacaattgattatacatattttgattatagaaattataaattattcctttggttgcaggagtaattcattacagaataccaatatcccacattcagcatttatttctccaaagataattaatgggaaagatgtcgaggaagtaagttgtatagaaacacaggacaatcagaactcagaaggagaggcaagaaattgctgtgaaacatctatcagacaggactctgattcatcagtttcagacaaacagcggcaaaccatcattattgccgactccccgagtcctgcagtgagtgtcatcactatcagcagtgacactgatgaggaagagacttcccagagacattcactcagagagtaagtgccaaacgctgcatcctcaaaggatatagatggcatcctttggtgtgccgaaaaacaactttctgtgacttatttcttgtttgtcaatgtactctggagtaaaacctttaaattagataacccagttctag

SEQ ID NO: 8704 - DNA, 1062 bp, Homo sapiens
catgcttggcttgtagacttccagcaatccccaggaaatagatttctgtaattccttggacaattttgagaaatctgttgtaagtattctaggtgggggtggatttttctgctaagtgtgcttcaaaacttaagctgtgcagtaagcagttgtcctggaaataataatgattactgcctgcacttggaaagggcaggcttttgtgtttctgacgaaattctgagctcttgatacactgccttatcaaggaatatatttctcacttcagataatgtgttcctgtagttttgcattttttagcaaggactaatgacttcttctttctcagagtaccccctcccccaaattagattaaaattcctaattgtaaaggggctgacattgttttagataagagagttttaggttaaaaatatttctcgtcttcagcagcttaattcagagcccattttccttcgattcacttaaagagtcactgacaggtggtgcttgtgcttgcgagttactgtcagataatgttctattgcgattatagtggttacaaagttcaggaatctttggatgtgtgcctcagacttgagaaaaacctctgacgaattttagcccccgatttttatgcctgtagcagtttttagtgatgtgtatttggcataattgttaaaagataaggcctgagaaagacccacgtaaataccttggtattcattggctcagaaacatacatcctgtttttgattaaaggatatcaagtccttggtcgtttttgtgaactgcttatgagatgtttgctttgggatgatgttcatttgttcagccatctgtaatatgtgaaactggctttcatgtgttgttcttgttcagcctgatgttgggtgatttcctcggatcagttttgaatttctgatttcccttctgacctttgtaccttgagccttctgaacctccctgactttccttggctcctctttcagaccgccagagcctgatttagaggacttctcatccacattgtttgggtttagccctggtgtcctctttctttttcctttcagtgtggtggtc

SEQ ID NO: 8705 - DNA, 1033 bp, Homo sapiens
atatatgtctgggtttatttctagtctgttctattgtacttctctccatatgccagtacaacactgtcttgatttctctagttcagggtttcttaacgtcagcactattaacattttgggttcaacggttctttgttgtggttgcctgtcctgtgcattagaagtttagcaatatttctgactgcctggtagatgtcagtaactcccctcactcttagttgtgacaaccaaaaatgtttccagacattgctaaatgtccccctagggagtaaaattgaccgtgattgagtttcactgctttagttctgtagtaagtcttgaagtcagatagtgtgagtattctttattcttttaaaaaatctttttggctattctaggtcttatgctttctatacagattttagtatcttcttgttaatttctatttaaaaagcctgctggatttttggttggaatttctttgaatctagaccatttagagatctctatcttaacagtgtttttttttttaatccgtgaacatatctctctccatttacttaggtattctttcttttctctcatcaatgttttatagttttccacatacaaatttgtacatacatttttcatgtttttcagtgctttggcatatagtaatagaaaaatttctttgttagtgtatggaaatataattttaaaaaccttatatcatatgaccctcctaaactcattttagttctagtagctttttatagaatctttgagatttttctaaataggaaataatgttatctgtgaataaagacacttttcattctttcaaatctgtaaggcttttatttatttttcttgccttattgcactggctagaacttctagtactttgctgaatagaaatagggagagtggacatccttgccttgatcctggcattggagggaaatatcagtctttctctagagtatgatgttggctatagttttgattttgtttcacagaggccctttatcaggctgaggaaattcccttctctagcaaatttgctgtgaat

SEQ ID NO: 8706 - DNA, 1059 bp, Homo sapiens
cacacctgtagtcccagctacttgggaggctgaggcaggagaattgtttgaacctgggaggcagaggttgcagtgagccgaggttgcgccattgcactccagccttggtgacaaagtgagactctgtgtccaaaaaaaaaaaaaaattccaaaaatgaattaatgtttgttttaagctctcctctgttttctaaattttatcataatttgtttaaaagtgaaaacgttttaggttgggcgcggtagctcacgcctgcaatcccagcattttgggagaccaaggtgggtggatcacaaggtcaggggttcgacaccagcctggccaatatggtgaaaccccgtctctactaaaaaaaatacaaaaattagccggacgtggtggcaggcgcctgtagtcccagctacttaggaggctgaggcaggagaatcgtttgaacctgggaggcagaggttgcagtgagctggggttgtgccattgcactccagccttggtgatgaggtgagactctgtgtcaaaaaaaaaaaaaaaattcaaaaatgaattaatgtttaagctctcctctgttttctaaattttatcataatttgtttaaaagtgaaaacattttaggctgggcgcggtggctcacgcctgtaatcccagcattttgggagaccaaggtgggcggatcacaaggtcaggagttcgacaccagcctggccaatatggtgaaaccccgtctctactaaaaaaactacaaaaattagccggacgtggtggcgggcgcctgtagtcccagctactcgggaggctgaggcaggagaatctcttgaacttgggaggcggaggttgcggtgagccaagatcgcgccactgcactccagcctgggcgacagagcgagactccatctcacacacacacacacacacacacacacacacacacacacacacacaaaagtgaaaacatttttttctatttaaaaaatttattacaaggtaatcttttaataataataaaggaaatttttgaaaggaaaaatcatatagttttttttgtttatttgttttttttaaat

SEQ ID NO: 8707 - DNA, 1050 bp, Homo sapiens
ctaggaaatcgacttttaattcctcaccagtaagttgcttatctcaagccatctttaagagagatgtttaataatatgttcaatgtttattattaattaatagaaaaataatttctagaacagtcttgttagcttctgacctttcacgtacagcacatctttaagagtcattggtacctacaaatgtgtagaaatcaacccatcacatatttacaaaacatgcatgatgtgttaagtaagaccaatgctaggtaaggtttccaaagtgataccagtagtgctttgaaggtatataagtaaggacagggttgcatgaaaatagctaattgaatatgaaagcttaagtatccaggcacaaaataagtggtacagaaactaaatgaactgggctatcaaatttagcatccactttaccctgggttacaatgggaatggactgctggtgtccctaatggtaagaacttgtctgaaataacaacttctactgagtgtctgtgacttgggacctcatggtctaggataatgctaggggtcttgtgggaacttctgagtcattgatttttaccagagcaggtcttagagaatcatgtaccagcaacagaatcttttaaagcaaagttggcattttgcttctgaaatatattcttacccacagcacatagtagaaattgtggattaaaattatcttaaaactgttcttacttgaattacctaaaactgtagaatgtctttgctgaaaaactctgtttcatccaaattatagtaatagtaatagtttccacttattctgccagcatttcccatgatccagacactgtgcagggtgcctgagatgcttatatggcatttaatcttcacagacctcttatgaggtaagaactgtcattattcacattttgcaaatggggaagccgaggcttagagaggtgatataacttgcccaggaccacatagcataatgttggatctgtccttctgaacccaaggcctgtgctcctgtccactgctaagctgaatgctctccatgactgtatctgcctttcctctgcc

SEQ ID NO: 8708 - DNA, 1049 bp, Homo sapiens
agtacctggaggtgatagtattttggctgtatcatctttcacctggtcacctgggcagagctgtggggctataatgatgattacccttagattgaaagtttgttatgtgctagaatctgggtaccaactgcttgtcaccattaatcttaataatatttttgaaaagcaggtaggtgatagttcccttattttaggatacatctcagagagattcatttgcccaagagcacttggatggagtggaaatctgactgcaagctcaggttctgacagctgtgctgatcttttctcctttgcccttggtgggtgctcccctgagggcctccagatctggcccctccattatcatttatatctgtgcttgatagaaaattaggaatcagtgttttcctaccccctattatctgtttaagcatagactagcattttatgtaggctctttggggctattaattggtttctgtggtcaaatgtgttttggggaaacttagggataaatattaaattcagtagctctccacctttacccaggcaactaaatgggcggtagaaaaccacacgaccaggctcattagtctcatcagtttataccatgaacctcaagtgggcctttggtgctgcccagcaatgccactctatttccctagcacagtcatctgcccattctctagggtgactgcttcataccttctcttcctcacaaaatctccccatctcccaagaaaaaacaggtagaagaggatttccacaagcccttaccactgccttaacctggctgcctgaatcctgccttctctccctttgaggatgaaccatctctgatccctttgtgggagacaatatcccctctcaggctgtcggggtcctcctgccagcagttccccctgctcagtatgctcctctcccatcatagatatgcatgctgatttgtcttccatttctccatgttaggaaagccctcccttggccatgcatcccccttcgctgctatactccctccgtccctatttctccttcctctttttcagcaaacccccttgaaataattt

SEQ ID NO: 8709 - DNA, 1041 bp, Homo sapiens
cctgcacttctcagcccttgggtggtcgatgggactgggcgccgtggagcagggggcggtgctcatcggggaggctcgggctgcacaggaacccagggaggccggggaaggctcagccatggtgggctgcagtcccaaggactgccccacgggaaggcagctaaggcccgacgagaaatcgagctcagcgctggtgggctggcactgctgggggacccagtacgccctccgtagccactggcccgggtgctaagtccctcattgcccggggccggcatggcaggccggctgctccgagtgcggggcctgccaagcccacgcccacccggaactccagctggcccacaagctctgcacgcagtcccggttcccgctcgcacctctccctccacacctccccgcaagctgagggagtgggctctggccttggccagcccagaaaggggctcccacagtgcagcggtgggctgaagtgctcctcaagtgccgccaaagtaggagcccaggcagaggaggcgccgagagcaaacgagggctgtgaggactgccagcacactgtcacctctcagcactagggaaatctcactttacttgaccctgactcatggtgacttacaattaggatttggttttggtaaattttatttgaatatgtgtttgagaatgcagtaccaaatgggtttcttaaatggatatgggtttttttttcttgtaaatttgtttaagttctttgtagattctggatattaattttgtgtgttctttctgggcatgatgataattttgtcctctgtaaagctgctgagattctgaagggaaataaacatatcttttcctcctatttccatgatctaaactgaagacaaaaatatgggcattcttcaagacaattctaagcaaaaagaacaaagctggaggcatcatgctacctgacttcaaactatactacaagtctacagtaaccaaaacagcatggtactggtaccaaaagagacatatagaccaatgaagcagaacagagacctcagaaataacaccaca

SEQ ID NO: 8710 - DNA, 1032 bp, Homo sapiens
ttctagaatctttctgggtcacctttctgggctcaaaaagcaagagttgtcggggtgataggcatctgatcatatcatgaatataattgaatatagctatgggaattaagttttaaccattcctaacaaatcagattaaaatagctaagaaatatcaatacctaatcattgtcaagcatctgcagtttctgctttgagtaatgtttaactgtgaaaatcattttttaattatgcctgagctctgtgaacataaaccccaaagtaaaacacatgattagttcattcaatatccagttgcacccttccaggtgaatagtgccaggcaaagtattggagggaatacaaataagaataagcatattatttcccccttcactcccccaggtttttaattcctctgttgccaaagtgtttatatgctatttggggaaacaagtaatactgagcaaaaagttaaatcacagttaagggcaagcatgcgatccctttcagcagacaactaaaatacctgacccatctgtaaacagctgttacacaagctctctgcctggaaccaagaagtaagcggaggagactctgagctgatgaatttcaagaggtcccagcattaaaaccagaatttactgataaccctttacatccttatttataccctattcctactttacaaacatttctaactccagttctagcaccccgaaattagcaaatcagaggcaacaaatgagaggggaaaagaagcatccatagacacaggcaagcaccttttgaaaacaaggtaagtagtaagtaaatataggcagacaccctgacagtaatagagcttgacattaatagctaggcaacagatgtgacagaaagctataaaattctgtgcctggggtaggtctaaatagtcccactgagctcagtgaccctgagggcttcattgcattaaggggcattatagtaattgatgcatttttttctgagtctgatagcctgtgtttataacagtgaccctgaggccttcagggaagattaaattatgct

SEQ ID NO: 8711 - DNA, 1050 bp, Homo sapiens
acccaggtgtgtttttcagtagtgattgtgctgagcaagtggcagatgtcattctgctgctgtggtcaggttgagggctcgaggtgacccctgggctgatagcttgtgtcccccctgggaagctctgtgtagagttagggaaagcatagaatgaacagtgttaaacttcagagcacaagacttagaatctgagaaacaatggtgtttgaaagtgccagctgggatggtagccgtggcaagatggggagtttcaagcttttaaataacatgtttattacttacactgctttttataatcctaaatctcccagttttgattgccattgccagctgctatgagatgggctttgttgatggattgtatttataaatttggatgtttgtatgttagtggagactttatttcaactctacagcagcttgaattgataatcgtgtggaagaattctgggctttacccatttagcccagacactgctgttttaaccttgttggatggttgtcacactgtatttattttgatctgtactctgagatcacccttcagaggtctgcttcctccatcttcaggtgtgcattttggggaggggagttctgggcaggtctttctgaagggcagttcgtgtcgctactttggaaatgattgcacatgtggatccattacttgccctatctgccatctaatgtcacactgcctttggccacttcgttgtgcattgtctcacttaagtcctgccttatgatgctcagcccaggagggttgtttggtgccacggtgtcctattagcaggataacatattacattttgtcactataaaaggagtgaggagttgaaaagccagtttcctggaggatatggaaaactaattctgattcatggcctccgtctgaaccatccatcagtcctgtcccttgtttggcttgtagaaatagccttcatcgggccgggcgcggtggctcatgcctgtaatcccagcactttgggaggccgaggcgggcggatcacgaggtcaggagatcgagaccatcccggctaaaacggtgaaacc

SEQ ID NO: 8712 - DNA, 1030 bp, Homo sapiens
ctgaatactatgaatataatgtgtcatcttgtttattcatcaggtgatgaacatgtgaattttttccactttttggcttttgtgaataatgctgtgatgaatgttcatgtacaaattcttgtgtggacatacgtttttggttctcttaggtatatacctaggaatggaattgctggatcatatgataactatgttgaatcatttgaggaactaccaaactgttttgcaaagaggctgcaccattttagaatcttgccggcaatgtatgaggattctgatttctccacatccttgtcaacacttgttattgtgtcttttttatttcaaccatcttagtagatgtgaagtgtagctcattttggttttgatttgtatttccctaatggctaatgatgtggaacatcttttcatatgcgtaatgactgtttttatgtcttctttggagaaatgtctgttcaaatcctttggccattacaaaaattggattatttgtcttttcattgcttaactgtaagagctctttatatattctagatacaagcgtcttatcagacatttggtttgcaaatattttcttccattctgtgggttttactttcttgatagtgcacttgaaggcaaaatgttttaaattttatgaagttcaatttatctatttttttttcttttgttgcttgtacttttggtgtcatatctaaggaactgttgcctaatctaaggtcatgagaatttactcctatgttttcttcaaagagttttgtagttttagctcttacatttaggttcatgatgcattttaaattgatttttgtatatggtgtgaggtagggtccaattttgttgttttacatgtgggtatcaattgtcccagcaccattcattgaaaagacccttcttttctcattgaattgtcttggtgttcttgttgaaaatcaattgaccgtaaatgtaagggtttacttttggactctcagttctattacattgatctcatatgtccatctttatgccactgccacactgtagtata

SEQ ID NO: 8713 - DNA, 1034 bp, Homo sapiens
gtctcccaggctggagtgcagtggtgcaatctcggctgactgcagcctctgcctactgggttcaagcgattctcctgtctcagccttctgagtagctgggattacaggcacatgccaccatgcccggctaatttttgtatttttttttagtagagatggggtttcgctatgttggccaggctggtcttgaactcccaacctcaggtgatctgcctacgttggcctcccaaagtgctgggattacaggtgtgagccaccgtgcccggcctctgaattccttttctaattaggttctgtcgctctgcccgtgaccagactggttttcagctctgttggctcctggtcctttcaactttcaaattccctgaaagtttgactcaggctttctctatctgagcagttgagccctccttcaatgtaacattccaatgctctattttatattttcagaatcacaaaagtaacctgagactatttagcccaggaaaagatacacataccagtgattaagaacctggagtcaaatcacctgggttcaaatcctgagtctatcctttattagctgtgtgacctcgggttggtcccttgatcattctgggcctcggtttcctcatctgtgaaagggcgtcatcactggatacatctcccagggttgtggtaaggagtaaatgagatgacgtgcccttagcaccctgcctggcacacagcaagcaatcagaaatgatgacggttactcttgtctgttccttgctgtttccctgaccccctttcattccttccctcaactcctgcttagcctccccctcccatggcctccatgaaacacaccctggtcttatttggcctgtctccctccccttttctcctgtgttgattcagattgtgagcacgtccaatgcctcccaggcagtcaccttggtgtacgtcgtgggcaatcagagcacattcctcaacggcaccgtcgccagcagcctcctcagccagctctcggctgagctggtgggattctacctcacctatccgccgctaaccat

SEQ ID NO: 8714 - DNA, 1084 bp, Homo sapiens
agtctcattctgttgcccaggctgtagtgcagtggcaagatctcagctcactgcaacctctgcctcccgggttcaagcaattcccctgcctcagcctcccgagtagctgggattacagacatgtgccaccatgcctggctaatttttgtatttttttggtagagatggagtttcaccatgtcggccaggctggtctcaaactcctgacctcaagtgatctgcccaccttggcctcccaaagtgctggcattacaggcatgagccaccatgcctggccactttcataattttagcataaaaatataattttactaagggctggttagatcatttccaaagctgtaagagaaacctcctctctgttgaagtccagctgaccatgggagtctctgatcatttgaaaagattttcaaaacatcaaagtcaagagaaaacccgttatgaatcttatgtttctggcttccccatcttgccacatcatttttctcattcctgctagataaagactgccttccctctcagaatgggtctgttagatgatccaagaagtttctcaagtgaaaaccaggagaaaccggtggtttgatggttaagatatctcaatttttatgaattattttagcactgaactctgagggttcagtcacttccagacagtcagatgggtgttctgcgtccttttcctccagtgtagggtcttggtgaggctattttgttgatatatgactgagattgttgggccaggatggagaatcaaccgtttacagctgtttgcaaagggcacttcagtgtagtgattggccgtgattcgtgccatgttcggcagttgattaatcctcaacccgagaatattcttcccagctccatgtcctcagaatggggacttttgcattcagtagcctcaaactgcagcctcgcaggtgacactttcttgctttcaaaaacacttttgttactgtcatgtgagtggacatgcatgcacaaacacacgggcacaaatctcactctatttttgaacggaagttttgacttgatgactccctgtaaatgtgtctataaacagaagcaaagagtaaagcagagt

SEQ ID NO: 8715 - DNA, 1024 bp, Homo sapiens
agttctcactccagagggcttctttggggaaatgtttgaaaccagatgcttctacagctgaaaagtacatgtaaatctataaaaaggggtatcaggcgaggtccagctgcagaaaactgaaaacatcagctgtttaaaacagacccaaaaaatgactattaggaattaggcgctcacaaaatcatcggcgggttgaaggaatgttcctggaaagattcctagaacaagaccacagggctggccctgaggaggggctgctgcctcttcctcaagcaggaagatggagaagcggcctgccctggaacaccgaggttaagaaaacacagtcatagcatgatccaggaatgagagagccccacagaaccagagttaaggactgtggtgctcagcaacccagcttccagcagcctaggcagcagaaagatgggcctgccccatttcctctgtccggagtgcacacaagtgcatctaactgacaggaccgaagtctcatccacagccacaacctcctggaacgccaggagatagaaattagccatttagcctcaacagtacaggaatgcacactacaaggaggttgcctgtccattacctccacggcaggcaccaggcaaaagcgagaggagagaaaaattaccaggcagggcaatactcaggaagcagttggggcaactagtggataaaagtatatcccaaaggcgaaaatgagcccgtttctcagagctcagtccacaacagcctgctgaggaaggcctgggcgcgttgtctgatgtcaagcctataggctgacagtgcacccagcttcctttgttacaggtgagcagtggttactggaaggagatgaaggaattgaaacggttgttttgatgagttgcacttgcagaacaatgaaatattatctggaaagtccctgactgctcacaaagcttatggcaagtctggggcctcctcagtaaatttgtaatcctattattaatagaaatctcttctgcccacccacttcccacacctgccccagcacctt

SEQ ID NO: 8716 - DNA, 1028 bp, Homo sapiens
tcctgtaccatcatggtcttcttcccacctggtgaagtgagaacttcctgaaatgtggtttccagaagcaactttctaaatatgtctctccttcctcagtaacaggcagcacttgcagtgggcagaggaggcattaaatggagagaagtggcactgttttgtgtggcccaaaagactccgattggtggaaaataaaaatggacatggagccagataaatttcatcatggccagatggcccaggaatttatcttgctgaaacccccactcggtctctgggcccttgccacgaagttgcataatttgttcagaatctgttcgtgcaggatggagctgcgattgacactgagctgaaaatctgggctttggggcagggtttggagagaggcttcaaattcctatgctccagaaatgaagtaacaaggtgaggtaaagtgatgttacacccacttgtgtgtcctggaaagtgtgggcttgtaaaacccctgttcacttcggggcgcctaactcaagaaattctagaataagtggcctcaagagccctttatccctcttcgttaagcccattctagataaaactgtttcattcattttagacaaaactgtttcattcattttagacaaatggaaatgtcttttactgttgaagacttttgagtaggaattctccagacttttaacactcatttattcagtgagtatttattaatgttctaccacatgccattctgggatacggcagaaaatatgacaatatccctgccctcatggggcttatccagtagtcaccacttatccatggtttcagctacttacggtcaactatgatctgaaaatattaaatgggaaattccaaagataatttatacgttttaaattgtgtgccattctgagtagtgtaatgaagtctgacgccatcccactccatcccacccaggacatgaatcttgcctttgtccagcttatcctggtcaacaaggataatgtctatgctacccagctgtcagtcacttagtcacacagtggtta

SEQ ID NO: 8717 - DNA, 1023 bp, Homo sapiens
gcacatctcaggaacctgccttctcaggagggatcaccggaacatccagcagggaggagagggggctgctttcctaccacacatcccccatctagagtttctgagtcatcaccccatccaattggtgatgtcccactcgattcatatgttcaaatcctaacccccaaggtgatggtattaggacatgggacctttgggaggtgattaggtcatgagggcgaaccccctaatgaatgggattagtgcccttagaaaagaggcgtgagagagacccctgacctttcctgccatgtgagaggatagtgaaaagaaagacagctgtctctgaaccagaaagtgggccctcaccagatagatacagaatctgccggcactttgatctcggactttgcagcctctagaactgtgagaaagaaatttctgttgtttataagctccccagcttatggtatttcagcatagcagccagaacagactaggacttcctgctccatcctcccttaggagccagatgagcattgctgttaagcatgggaacaggctgtatttctcagaagtgtgacattgaaaacgggtagatcaaacgggacatgcagactctgtagcctgatattcagcagcttatgaatccagtcctgtctgtcttgcctgagctcctcccacactaaacacaccctctctggtcagcctgaggtcactgatgcttcctggggacactcttctttttgtactgttatgggatctttggggtatcagttttcttcctggaaacctctgtggccggtggtgcttttgcccgagttcttgtcctgggtccaggaagaataaggtatgcagacacatgaaaggtgaagaaggtgaaaaggaggtttatttagtgttagaacagctcagaggagacccacagtgggtagcttctctctgtaggcaggtcatcccatggagtgttcagctttcagcaaagaggtggccctggggagggtggctcctctctgcccactgctcattccactgtctgctgct

SEQ ID NO: 8718 - DNA, 1029 bp, Homo sapiens
tagatgagaggaaaaccttaagttggaaagaaatcagtctgttcatgttatcccactcatggggagacagagccactctggtcagattttctgtgagtgagatgtggtcccttccctgaagaatctcctaacctcatagaggtgagagagatgactggacagctgactctaagagatggtcaaaagtgcctcaaggaattgaaataaggttcccagagagccctgaggaggcagcaatgaacaaacaccctgttcatcagaaccctctagatagtcacagaagccacaaaaggaccttggttgaccttggaggaggaagcagaagtaccacgaagtggagtgactggcccagtgattcagtcccaacctcctggttcacgaacctgcttgctttccatctcgccatgtggcctgcaggcttgtcagtaacacatttctttagctgtgcctagaggtttaaaaaaaagataagggtcatatgaagaactccataatgttcttgccaagaaaaaagatgattgagtatataacgaacttcagatacagtgtatagaggatgatgcatttgtggcataataaatagttttcagtgctggttttgatatgagttttctgcattcatgaaaaagaaatgcattttggctttttccagaaagagtaccatcaaggaaacggagacctcaactgctgttctagactgtgggggtgcattcctgtctcagcaccaaggatcccaacaggcaggcagggaggcccttgactttgtgtcactgtgaggcagcagagtccatgctctgcatcaggggaggtgcagtaaaggtccattgtgtggcttgagacctatgatctgaggcttgtgcataataagatggcagctgttacctacagagcaaggagtttcctctttcagggtagattatgtaagaatcaattccctggtcccaggagaagttttattgtgagtttgttaatttaagaactcactcagcagaaggacatgtaatgtctgagtaatcttgatggaagaaa

SEQ ID NO: 8719 - DNA, 1025 bp, Homo sapiens
tatggattttaaaatcaaatatcctggcaaaaatgactatggatatgtagtattgcttaaattaaaacagagaattgaaataattttattgtactttaaaaaacaaagttgtttatttcctaataatttgagccattaaagaaaaagctaagcatctgctcattgagaatgcatgctcttaatgttgatgaaatatgatcgtgttatgtaatgcaactaaaaggcttggtgggtttttaaattcaggcttataaagagtacatgaatgtttagcaaagagaagaaatacagctgtgataatcaagtgtaaaatccatttgcaaatcttacaggtaatattgaattgaatgattaactgcctagttttctttatcagttcattggtgctgaactgggccctaggctatgcaagatatttcaaaaccaagtcttaattttaactgaagagagacctcatttgatattattagatgtaatcagttgtgatatagaataaaggatgttttaatagatgacatttaaaattgttatattctttgtgaatataataggtttagactctagtgactttggtaggtgaaagattaactaatgatcacttgcgtaaaatgcaaaaatagcctgacagctttttaaccactaagtgaccaaaactgatagccagaagtgtagtgtttttaatactttttcctgaaggctttctgcacttcatctttgcagttagtagtattctttaaaaagaatgctgttgttgtgagggtaacatttctttctagaacgttgcagtgtgtctgtgcttagaattttcattgcagctgttgtgcagaacttatgtgttcagtgttttaaaataaaaacattcttaactattttataagtaaaatctttccttgaggctattacctgaagccttctttgacatttaagatctcttgatgtgtttgcttttccatgggttgcaagaactattcttctgcaatgcagagggcaagattattttgcattcaccttgtcatagaaaaaag

SEQ ID NO: 8720 - DNA, 1080 bp, Homo sapiens
aaacttaagcatgcatcagaatcacccagaagactcaataccaactacaaattgctgggttcccccagccaccactgagtttctgattcagtaggtctggggtagtgcctgagaatttgtgtttctaacaaggtgccagttgatgctgatgttgctggtttggggcctacagttttaaaaatcactgacgtaaaccaacatagggtctctgctctgcagagatctgattatatataatagtgaaacaaagtccttcccagctcagattccatggtgataaagttctttgtatacctcaatagctgagagatcaggaaatcctatattttactgataagggaaaaactagtgccttttaattaagtttttattgtcatcctgcagttttcttaataagttttggtatttcctcttatgagtgctgtttcttagaaactttgatcagacttaggatcctgctttcctgaagcttaggcaaggacaggggataggatatttataatagtagtgtagaaaatgttaacagccatggaagaacatgtgtaatgctatgatgaaactttctttttttattgtggttagaaaaatgttatatggatgacctgtagtttcttttgatctcactcttggtcaggctggagtgtgatagcgtgatcacacgttgaggctactcactgcagcctcaccctccccagactcagtgatcctcctacctgcacctcctgggactgcaggtgcgcgccaccaggcccggctactttttgtattttttgcagagacagggttttgccatgttgcctgggctggtcttgaactcctactcttgagctcagatggtttcctcaccttggcctgtcaaagtgctaaagtgctaggattacaggtgtgagccactgtgctcggccaagacctgtagtttctgtacctttttaatttatttttatttatttatttatttattttttttgagacagattctcactctgtcacccaggctggagtgcagtggcacgatcttggctctctgcaacctctgccacctgggttcaagcagttctcctgcctcagcttcccgagtag

SEQ ID NO: 8721 - DNA, 1072 bp, Homo sapiens
ccacaaatgattcacctgcctgggcctcccagagtgctgggattacaggtgtgagccactgcgcccagctagttttcctatttaaaattaatattaattgaataaaatttagaaatgtatacatagcattcatctgctatttactgtttggtttatttcttttttgtttctttgtatgtttaatctgtaatgtggaaatcagaacaccagcaacaaacaactaaaactgggaatatgatagtcctaacttcacatggtcttgtatgtaacttaactgtgtttgaggtggacagattaacattagattgactttccacagcttttggtaatagatagggactgtttgttttatggctgaagttttgtgaaacaattattgcatttcatacattctgctcatggttattgccttagtttttctttagtttgtcttagacatctgctaatttgaggatgttaatttttttctgtatttaaaatatgctgatacttggtctagttttctttgtgagctccttattctcaaacatgcaactgtgaactgatttttttaaaaagggacatttacgtttcactccttcagtataggaatttacgtttttagccttctgtgaaatcagggaatagattcttatctttgccatttataaggttgcattaggaaggtagatttttgaacataaaatgaaagtatctgtatttatgcatttttagctattggttgaaaagaaatcagattggattataagctttaatcaccaaaatggtatgagctttaattggcaaaatttagaagagtatatttgctttaaggaaatgggtgccagtccttgtctgtcctttcttcatttaagaaataattttcttggtttgttaacatttactctggtctgtatttctttgtacaatatgtgtttacccttttgcttttagttctgcaagttctatatgtataagcttgttaacttaaaaaagtagttttaggtcaagcttcatcagattttcatgagcattgttgaagagtaacaaaggtgttattaaacctttaagcttatagcttgttttggggtta

SEQ ID NO: 8722 - DNA, 1030 bp, Homo sapiens
caaaatgttaagacagattatcaagagtaattcctaccagtattcattatatttgtcttagtagtcatttgtcttactagtcttgatcactattataaactgatagatagttcttttgcagtagtattgatgggcaggagtatgggtgagggccagctgttacaaggattttcaaataggtttctgtctgacatgcccagatttgctatttactatgccagtgcattggaggaatagtatgagttgcttttgttttgttttaatcatggggagattatagctccataatcttgaactataaattcctccaaggcaaggggtcttttccagttaattttatcatgtagcacaacactaattatatagctagacacttaactgtgaatacttttatgataactcttatgttgatgagtaaaattctgaatacaaggaaacattggagcataagttttgttagaatcagagtgcctgaatttaaatcttcgcttcaacacttactagctctgtaactttgggcaagttaatgaaactcttgtacctcaggttccccgtttagaaaatatgtcaagtgtgtatacagtgcctgacacgtggtaagcacttagtaactggtagctagtaggttgaaactagaagtgaagattgtacattggtggagttaatagttggagattaatataaggcaatctttttccccctcttaccactttactaagtaaagtaagatttttaatctgtatgctgcttcatactactacttatgagacgggagagggcttttaatatagtagctctttatttgcattatacattatctgaaatagctactgttgaacctaaagtaattctggaataaatggtaaagaaaactttctaaaatataaaacactgttaattaactttataaataagtttgtaagtaaattcagattatgtgatggcaaactatttacttatttggaatttaagttgaattcttttttttttttttgagacagtctctgtttgtcactcaggctggagtgca

SEQ ID NO: 8723 - DNA, 1062 bp, Homo sapiens
tggtttatgtagtgtgggggacccatcatggtggtagtgagtggagcttttttgctctcctattccttctaatccttttttttctaccttaggtggtaaattcactccagcagcaacctcaggctgcatccccttcagtaccagagccccactctttgactccagtggctcaggcagatccccttgtgagaagacagcgagtacaagaccttatggcacaaatgcagggtccctataatttcatacaggtatgttcattttagtcagactctgtaacagaaagtttaagtgtttatattatttgactttattctatcctaacttaacctgtaggattcaatgctggattttgaaaatcagacacttgatcctgccattgtatctgcacagcctatgaatccaacacaaaacatggacatgccccagctggtttgccctccaggttagtagtggtacatttttatgtgagagagaaatataaggccagtactttcaggttttaaaaagattgtgaaaataaattttgtttattttaatgactgtttaattttgactcttaggtcttttaatttgatagaaagaatgttattgttcctatgatttgaattaaaaatgtagtttataactgtttatttttaaacttttcattggcatgtagatatagaaaaatatacgcaagtttaatgagtttttataaactgaaaacacctgcagctagattaagaaatgaaacattaccagtaccccagaaacctacgttgtttcctttcaatcactagttaccctcacccctagcgatagcaaccacttccgtacttgtaactgtaatagaccagttttgtctgtttttgtaactttaacaagtgaaattttgcttggcttttaaaatttcaaaattaatctaggagtaaaaataatagaggtgcctttttttgaatgcttttagctttctaggagaatttctggattttattaccttaaaaaaatacacagcaatgaagtgggtaagggaatatgtaagaggcaaagggaagagagaaaccacaagacagtttcagactc

SEQ ID NO: 8724 - DNA, 2436 bp, Homo sapiens
gaagtaattaaatggtacaaaatggtaatgtactaagagtaaatcttttgagttattttgggtctcttgtgctaaaaagtagatgcctttcagaagacgttaatatagcctttcaaataatttgtttggaaggatcaatcatgcaccctgctttcaaaggtttggaattgtggttggagaattttacccccaatagctgagtctaagggtaggagaaaggtaagagactttattcatgtgtagtttttcttatcattgtatgcaaatttaaggattaaactttaaggagactgtataagacacttcttaaactagaaagtgcgtgggagaacaaacggtaatgagctgtttatgtatatatctttttcttttttaaattatagtggttggcacttaccatggttccccagaccagtcccatcaagtgactggtaaccaccagcagcctcctcagcagaacactggatttccacgtagcaatcagccctattacaatagtcgtggtgtgtctcgtggaggctcccgtggtgctagaggcttgatgaatggataccggggccctgccaatggattcagaggtaaaaaaataaaaaaggaggttctaatgaccttttactagttcaaattattttttgatttgtaaaatatatcacacagtttttgggaaggatgtatctgcattagcctcctatgtgcaatttaaacaatgtatattttggtacaatttgtgtatttggtataatttgttatttaaataacagatcatggaatttttgttcatttggttatgtcaaattaatgtctaccactatctcctggaggataagtattttccacattaccaaaacttacggggattgtttattatatttgtacagatgtgtgtttacatgcatagatgggttaaaagtttatcttctgaggggcagttagtacttacagaaatttataaacagattggatcaagataggaaattggagattaatttgattaactagcctggcttataatttctagttcttcccgtcttcattaataaaaaagtaaaaattccttgtgaagataagaaaattatttcttttcttgtcctaaattttaggaggatatgatggttaccgcccttcattctctaacactccaaacagtggttatacacagtctcagttcagtgctccccgggattactctggctatcaacgggtaggtaaagtagttctaaagtgtaaacctgaactaaatataccaatgaaagtgacttagtgttgttgcttaatgaacctaagtaactaatttggcgttaactttgtggtgtccaagacactctgttgaaacaaaagcttttagcactcaacatcagtactcctttagtaaagcctgttaaagacagtgatttccaagagcagagaaatatatttcactgaatgttctttgagaatagtagaagtacaacaattacagaacaaggtgtagctgtgataaactgatactgaagtgtctaaaagattaaggaagaattctgtattgagtgttagactgaaagaatagatgggtaagcattttttaaaaagtaccttttcaatactaactagcttgtcttttaggatggatatcagcagaatttcaagcgaggctctgggcagagtggaccacggggagccccacgaggtaatattttgtggtggtgatcctagctcctaagtggagcttctgttctggccttggaagagctgttaatagtctgcatgttaggaatacatttatcctttccagacttgttgctagggattaaatgaaatgctctgtttctaaaacttaatcttggacccaaattttaatttttgaatgatttaattttccctgttactatataaactgtcttgaaaactagaacatattctcttctcagaaaaagtgtttttccaactgaaaattatttttcaggtcctaaaacctgctaaatgtttttaggaagtacttactgaaacatttttgtaagacatttttggaatgagattgaacatttatataaatttattattcctctttcatttttttgaaacatgcctattatattttagggccagacaccctttaatggccggataagccatagttaacatttagagaaccatttagaagtgatagaactaatggaatttgcaatgccttttggacctctattagtgatataaatatcaagttatttctgacttttaaacaaaactcccaaattcctaacttattgagctatacttaaaaaaaattacaggtttagagagttttttgtttttcttttactgttggaaaactacttcccattttggcaggaagttaacctatttaacaattagagctagcatttcatgtagtctgaaattctaaatggttctctgatttgagggaggttaaacatcaaacaggtttcctctattggc

SEQ ID NO: 8725 - DNA, 1006 bp, Homo sapiens
gacccaacagagggatgccgcaaatgaacactcagcaagtgaattaatctgattcacaggattatgtttaatcgccaaaaacacactggccagtgtaccataatatgttaccagaagagttattatctatttgttctccctttcaggaaacttattgtaaagggactgttttcatcccataaagacaggactacaattgtcagctttctattacctggatatggaaggaaactatttttactctgcatgttctgtcctaagcgtcatcttgagccttgcacatgatactcagattcctcacccttgcttaggagtaaaacaatatactttacagggtgataataatctccatagttatttgaagtggcttgaaaaaggcaagattgacttttatgacattggataaaatctacaaatcagccctcgagttattcaatgataactgacaaactaaattatttccctagaaaggaagatgaaaggagtggagtgtggtttggcagaacaactgcatttcacagcttttccagttaaattggagcactgaacgttcagatgcataccaaattatgcatgggtcctaatcacacatataaggctggctaccagctttgacacagcactgttcatctggccaaacaactgtggttaaaaacacatgtaaaatgctttttaacagctgatactgtataagacaaagccaagatgcaaaattaggctttgattggcactttttgaaaaatatgcaacaaatatgggatgtaatccggatggccgcttctgtacttaatgtgaaatatttagatacctttttgaacacttaacagtttctttgagacaatgacttttgtaaggattggtactatctatcattccttatgacatgtacattgtctgtcactaatccttggattttgctgtattgtcacctaaattggtacaggtactgatgaaaatctctagtggataatcataacactctcggtcacatgtttttccttcagct

SEQ ID NO: 8726 - DNA, 1096 bp, Homo sapiens
agcaatctgatagcctcatctaatacacttctcagcttctgctactaatatcctacttttaacaagctgttctgaagcttaatccagttacataagcagtacggctgttttgagtagaggcagtggaagatcagcagtttgttcctgatcatctagcaaaggcatttgtgtattaatgcttatttggaaataccaattttaagtactgtgtttaatagggagacacactgtattaagcaactaaactaaggctttattcagcaaattagggtatcctttgcccagcatcatgccaagcactaggcatttagtggtgacaaaaattactgtggtttctgctttcattgaactgtctaatcaaagactgatgacaccaaagtgtagcagatgccatgatggagcaatgtggttgatggcagatattaaagccatgactgagtgtataccctagttaaaatgatcaggggagacttaactgaaaggggtaattgagctagatttgaaggatgaggagtagcagactagtcaaagaaagggagagaagaacatacctaaacatctgatcaccagtgactgagaaagttatcaggatcaagtggaaagagaaaggactagcagagttacaggttagagaaacaggtaaaggctactatggacggcataatagttgcatcccatgttttgtctcttaagaacagttgcaaactattgaaggttttaaagctgtgtgttgggccgggtgtggtggcttgtgcctgtaatcccagcactttgggaggccgaggcgggtggatcacgaggtcaggagtttgagaccagcctggccaatatggtgaaatcccgtctctattaaaaataaaaaagtagccaggcgttgtggcatgcgcctgtagtctcagctatttgagaggctgaggcagaagaatcgcttgaacccgggaagtgaaggttgcagtgagcagagatcgcgccactgcattccagcctgggcgacagagcgagacttcgtctcacaaaaaaaaaaaaaaaaaaaaaaaaaaaaaaaaaaaaaaaaaggctgtattgtttggggtggggttggtggctcacttaataa

SEQ ID NO: 8727 - DNA, 1149 bp, Homo sapiens
tcactgtgttggccaggctggtgtcgaactcctgacctcaagtgatctgctcactttggcctcccaaagtgctgggattacaggcgtgagccaccgtgcccgatcatagaacactagtcttttaagagggaacatatgaggagggtttggccatatatgtctgggaaacacctataccgttttttcctttatgaagatttgccccagcctgttgtaatctctgaaaagtcttgcagcagcagggacctgtttaactgattgtttcccaaatttattttaccaaaaaaatttatttttttgaggggtgtgggaacaccagttagcaccctgtgaaacaccttaggaaattttgacctaaatcagtggttctcatctggagccatttggccccctggggacatttggcaatgtctggaaatgttttgatcgtaatgactttgggagggtggtggtgggtgccgtgggcatccggtgggtagaggccagggatgctgctgaacaactggtggtgcacaggacagctccacaccaaagaattatctggtccaaaatgtcagtagtgctgaggtgtagaaatccgagccttgatgaaccctgggggcctttctcattttaaccatctgtgatgcactaagtcagtagaatgagcagatcaggaggagcagctgtgtgctactgaatacaacagaagcctatgaaatccttttcttgcagtgggaggatgtttgaattttatagtcaaacgcatttttttccctgcttgcaagaacgtttgtattgtatttctttggggagctttcctttcaccttcttccttttttttctttttcctagtgacaaaagatgaattcatttgtattttttccctgtgtgactggtgatcatatgggggttgggtttggaattccccatttaaggatggcctgaaacacctcagtgctaaagagcaagcctgggaggatgaggagagggccacgtggtgtagggaatagtggcagtcatgcacaacaggagggcttctaattgatctcctgggatgagtccttggttttctgatttgctgtataaagtatgttcaggtgccttgtggaggaggtgctgaatcatctcacactgctctccaactaggttttagctttttctggcttt

SEQ ID NO: 8728 - DNA, 1628 bp, Homo sapiens
ttgttacctccccaagccctgataacctccatactctgtttgaatttgtatttaaaggatttgatgctctgcaatatcaggtaggaaatttggattaagaatttttattttggacctggtgtggtggctcacgcctgtaatcccagcactttgggaggccgacgcgggcggatcacctgaggtcgggagttggagaccagcctgaccaacatagagaaaccccgtctctactaaaagtacaaaattagccgggtgtggtggcgcatgcctgtaatcccagctacttgggaggctgaggcaggagaatcgcttgaacccgggaggcggaggttgcagtgagctgagatcacgccactgcactccagcctgggctcgaaactccatctcaaaaaaaaaaaggatttttattttgatacagtgctgggtttaaatccaagtgaagtctttagaatacttgcttactttcataatatttagtttctgaaacttgtttctaaagtttgtcattggtttgactccccaccaggaacatctggattatgagattatccagtctctaaatcctgaatttaacaaagcagtgatcagagtgaatgtatttcgagaacacaggcagactattcaggtgaggcttgttctcagaccctgatgtgcagggccagtgtcttgctgtatttaactggctctaagatgtttcctgttatagacatgtatgtcttgtgtaattgcatgtcttttagacaatggtggtgttgtatgctaaacctgttccagattttcagactcttctaaagaaaaacattcagcaaactaacaaatatatgtagttagattgaaaagttgtgtttttgtcctttgaatatggaataagtggggtggaaagtacgctgattaactaaaagagaatctttcttctgacatcagctctaactttgcttagttattgcagtttttgaaatgttgcatctgtaactagaacaataaccttacagcttaaatgaaaaaaagaactttgcaaaatgtgctctgaatctttgtggtttagccagtggcctattttcttttttaaacagtgttttcccaaaagttctaaaaatctctagcactctgtaagcctgaatggtctgcacttgtccaaaggctgcagttttgctaaatctctaagagaggcatgaggtgatgggcttacagacggactgagactaatgggctcttactggaggaggttcattgattatttttggaattgggttgggaagtgagccaggtgaatttggcagtttataccctagcactttatgcctgtcaaagcatatgtatatgcatgtcaagaagttatacctttttatcagaggccagattataaacaatgttaagtgtttatgcctttcaccttaattttttcttactagcctctttctagaatctcttcattctgtacatttctgctcacttttgctcgattcccccagctgggaggaggaaaggctgctgttggtgagggtcaggctgcaggcaatgagaacacggagacctgttaaaactcaagaaaaatacacaaaccaaagaaggaaaacatttccctgaaataccctgcctcgggccttgctccttcttgaatttgtaat

SEQ ID NO: 8729 - DNA, 1055 bp, Homo sapiens
attcacctgttagacattttagttattttgaacttgtgctgttctgtacagagcctcatgagcatcctgtgtcttgatggccttcacacacgcacagcatacatagagactctcttctaatgtggcttttactttttgggtcaggaggctgtcagtcttctgccctgtaacatggggcctggtaattaagctcctgttaagaatggatgtgtcaggccaggcgccatggctcacgcctgtaatcccagcactttgggaggccgaggcgggcggatcacaaggtcagaagatcaagaccatcctggctaacacggtgaaaccccttctctactaaaaaaaaaaaaaaaaatacaaaaaataagccgggtgtggtggtaggcacctgtagtcccagctactcgggaggctgaggcaggaaaatggcatgaacccaggaggcagagcttgcagtgagccgagatagcaccactgcactccagcctgggcgacagagtgagactccatctcaaaagagcggggggaatggatgtgtcagtgtcagggttaaacctgaacatgggggtggaaacaactggcctagttcgagaaacaagctatattctgtgagtgggctctgtatcagagttggcctttctgcctgcactgtcctgcttcccccacaggtgtgccttgaaggggagatttctcgccagtccatcttgaacagtctgtctcgaggcaagaaggcttcaggggacctgattccatggacagtgtcagaacaggtgacgggctttccctggtgtgtctgagggaagctggtggtgtccaaagatgtctgtgttgctaagttactggtttgtgtctcccacacagttccaagatccagactttggtggtctgtctggtggaagggtcgttcgcattgctgttcacccagattatcaaggggtaatgtgtcctcaggctcccctgaagccgtgttgctggcggtgctttagggtgggggtacttggtggctggaataagaagctggtcaagcagaagcaagtgaagtgtaggcacttccctgctct

SEQ ID NO: 8730 - DNA, 1025 bp, Homo sapiens
ggactctggcctgggtgacagagccagaccctgtctcaagcaatgaaaaaaaaagttcaagctcagaggtttgtcacttcctaaggctgtcaggtgatagaacctggacttcatgctggatcacaggagcctgcctgtccctttgtaaatctgttgggcatttttttttttttttgagatggagtcttgctctgtctcccaggctggagtgtaatggcgtgatctcagctcactgcaacctctgcctcccaggttcaagcaattttcctgcctcagccacctgagtagctgggactacaagcacacaccaccgtgcctagctaatttttgtatttccagtagcgatggggttttgccatgttggctaggctggtctcaaactcctgacctcaggtgatccacccgcctcagtctcccaaagtgctgggattacaggcatgagccaccactcccggcctctgtcagtcgtttctaaactctttggctgtcttcctgcattctagaggtctgaagcagtgtgattctatgcatgttgaggtgttttgagaatgattgcttgactccggtgttctcatagtttgaaaaccacagcaataaaccaagaaacctctcccagtttttgttgtgctaagtccagagtgcgctgcggcagggtgcttgacgatgtctctctccctctgctgaatggactgtgttctctccttggcatcttcccaggctgtcagcttgttggaagaggtcatcactccccggaaggacctgcctcctttactcctcaaattgaatgagaggcctgccgaacgcctggattacctgggtgtttcctatggcttgacccccaggctcctcaagtaagtgcctgccctccttccacggcatcactccttggcattgagaaagaagagttctgtgggctgtgtgtctctgttggtagctggtatcggtgctagcctgctatttgtggcgtgctcttcctggctcttgcccttgtgtgtctatcagccactccccagaggccacacaca

SEQ ID NO: 8731 - DNA, 1033 bp, Homo sapiens
tgttacaggccacacctggggtagtctaccccctgtccaggaagctgactctactatattatccaaagcgtacatttcatatttggtgaaaatctgtccagccattttcttgtgatgcggcaatggacatgcaacataatttctttttaaagaatatgtcatttttactttctgacattaagatattctgttagaaaattatgacagtaacagatggtattaaaaaaaaatctccccttgcttggtaaatgcttttatctaagtgggcagctttgtgctaatatgatgtcttccacttcccaattagttgtgatgctttactgatctaggagagctttatggtttgggactactataggcgaacactctgttgcctcctctctcaagaatcagagtgtcctattttggaaacacagtcaaccatgtgaaagcaatttattgggcgtatcttctgtggtcagatttggtttgctgacaggtgaattgggagttttgtaaactttaataagtgagcattgagtcagatgtgttcatgagtatgacctcgatccacttaaaaattcttatttctttttctctcttggcaggagggaggtggttgtgcaggtattcccagccactttgaagggaacttaaatgggaactttattgctcactgcttagaatgccatgggctcttcttttgagatacttacctttaacccatttcctttttttttttttaagtgcagcttgctgccagtgctcttttcttgggggtaaatgggaaatgttaataagtagcctctgatccctttaaaatgggagaatttgaacatttcaaaccttacctttttatacagttctcttattacctgggagagaggttaagtcttagactatccatttctgtcagtgagttgcctatgcattatagcctgtgagggtctatatttttttagggtaatcctggtaataactgcattgatgttacactgctaacatttgggatggagaaggggtgactgagtgacttaacccttggtccacatgt

SEQ ID NO: 8732 - DNA, 1109 bp, Homo sapiens
tcctcaggtgattttagtgcattgccaaggttgaaaaccaaggctttaggtttaaactaaaggtgaaattgctctttttctggttcattttctactttagaaagtagaaattttttttctggttcattttctactttaaattaaaaataaacctacagagggtaacacgtattagcacgtcacagagggtcacacgtattagcaacatatgtatcttcaaaagagtgatgtgactgggtggtaagtgttgattggacccttaaactgtgacagtttagaaggggctttgctagatgggtttagggacagagatggtagagtgagagagtgtggatggaggagtatgcatctgtcatgattactagaaaaataaaacttcaaatgctttgctccttctgctgcgaggtcatgttctcacagccagtgaagtgacagcatatatgtgttgaatgtgtggcttgcattttacatttaactcttttaattcatgtgttaaccttaggaggtacttattattctattttgcagatgaaaatggagactcataaataagtaacttaccagcagctacatagctggtaattggtagaactggaagttggacccaggctctagtgctggcactcatagtttctccctgctgccatgttggcctcttcctacttggatgaagatataactctagtggcaagggcatttactagtgtgtgagagggtcttgtttattagttttgcaaattgcacggtctcctttattcaatatcttttttcaaacagctcacagatcttttgtggttttgtaagtgcctactccccaccgtattgccttctagagaagaggcaggaatttattttaatgtacaggacagacatgcatggggagtaaaactacagactccactctaggtgtgtggaaatactaaaaatagtgcttttctctgtgtgtgaagttggtctgttgagttttgtcatagacagcgttgagttcctctcccaggtggaggtggcgtagctttgcgtcacttacgtgtctctcctgatttccagtgacccggggaagacactgcagaggcagttgtctgtggtcaaaagtattctctgaccatgga

SEQ ID NO: 8733 - DNA, 1082 bp, Homo sapiens
tttcccatttaggacacgtgttttagtaatatagactgcatgcattgatccctttagaaattttactgatgatttatatttatagccacagatgtctatattcaaacaaagtttatttttctatgataaaaataatacaagtgtcctaaagaaaatttggaatatataggaaaaagaagaaaaaagaaaaattcccatatagtcccaacacccaaaggtcatagctattacattttgctatatttatttatctatttatttattttttagacagagtctcactctgttgcccaggctggagtgcagtgcatgatcttggctcactgcagcctctgcctctgggttcaagagattctcatgcctcagcctcccgagtagctggaagtataggagtgtgccaccacgccagctaatttttgtatttttagtagagacagggtttcattggccaggctggtcctgaactcttgacctcaggtgacccacccactttggccccccaaagtgctgagattacaggcatgagccaccgcgcctggcttgattgtaaaagtagagcatttgggctgtgaccctgaagctcagtgaaagagcttaattgttcctgtggtcagtgctttaaagacaactaccactttgagtaaaggtcagggctcatttggaagtaggattttaaaaattaactaggcacatttcaaagagctagttcttaatgaagaaaacactgtgatggctggtttttggagcattttgcttttcatgtagatgtgactgatctgttgaatttgttgagtgaataattgggctctataatagtatggtgttcttccttcccctacacacacacttggtgtcttgatgaatgtcatacataggcacctcttgattatccactgtggataatctattacggcagtgagctggctaaaattccaaccccagattggtttgctcaaaccacttaatatgtttctgggccactcctgtttaggcagtgtgtgctcgggtaatgaaagcttctgctaatgtcagccaaagcatagttgagaaaataaatatgctaaaacgaaaaaaaagcctta

SEQ ID NO: 8734 - DNA, 1111 bp, Homo sapiens
gagtctcccctccaggtattggccactggataacctcttttagcaccctatgtagctgtctttctctgtgcttgattcattctgtatcaggttaaactattgtggaggaaagaggatgagtctacagtacctattagggattgttagacagaaaaatagagaaattagaggtgactgaatgagtcccccacagccattattatgcgtcatctggagcaatggtgaatcaagtgttaaaaagggaaagaaagaagggaagtgcaagtagagaatgaataacatggtctggggaggacttgtctaattccagagactagccctggcaaggacttccagggtatcctaatgtgatttagtaggcacagatgtcactcatacaaatgttggtattgagtggtccagtctagtgcttgtaaaatagtatcaaaagagtttaggcagtgggcaggacaccagagtctggaagagctgtgttgtgattctagaaggtctagcctttcatagcatcacttttgccactaatgacagatgtggggatcaggaagagggctaacaagtatttacttgagaacactagccaaatgagctggggagtttgggacaagcaaggcctcacttctttgagggagtctggggtgtaaggaaaggcaagaaaaattgctgtgggttgagccactatggaggttaggaggtatggtgcagtgaggttatccaaatgaacattactggtccttgatagacccaaccaagtctgtttgggcatattacttaattctgttcctcagtggggaatatgtctgagtttgttcatgtttgtgcttcccataatgactaacatcgtaattggaatagaactgcagtgctgtaagtggtcagttagtaaaggtaatggcagaggggaaagtaagccaaaagcagggtacatgacagggatccaagaaggctttgcagatgaggtagtatttgaactggtccttgtagaataaatgggctttttaaaaataatgagaaggacattccagctagaaaaacatgggtaaactcttggaagaaagatgtcactgagacatacttttgcaacagcaggtaggtctggctgcattggggacat

SEQ ID NO: 8735 - DNA, 1118 bp, Homo sapiens
atccatggaggtaccatgagctaccatggaggtagctcagagaggaaagggaacagtaacagaggcctgcttggtttttaaacagttttgcaaagagtattatttacgtatttatactaagtctacaccagttttgagtatttgcctactacagtgtaagcaaatgcttacaggaaattagcacacctctgaaagatctctgcaccaaaggaatagaaaaggttgaagaaattatcttaaattcatatagagattttaatgactttaaatggaattataatcaactgtattttatcttctgttatatattcaagttgtatggttgtatatcacttgtccttgtccattgtatttgggtttcatgcttcatggtgtcacttttttaaatagaaaaaaatgtgaatagttaaaaataaattttatttgatatttagataatggtaaaaattgaaatgatgataaatgctgtttattgcctacttgtgaaggtgtcaatgttacgttggtagagtatatatggaatcatttatatgatttacagtaaatgaaacagaaggtgaggtaccactttcagatgtagtacagttgtctgactcagattttagaaatctattgatatttttaaagcaaaactttttttaatgctttacatttgaatgatgttctttgtacttggatattgatcctatttctgattcagttttgaaaggaattaacatcaagtggacttcatgtcacttaacagtgcttttttgtatacatttttaaagaaaattagtcattttactttgatttttgagttagcaattcacaagcaggtaattaaacacttttagaagaaaaatattggtctaataataatcttaactcatctttttgacatagtaaagaaaaaggaactctgcagaagcaaaattttttagtatgtggcaaacaactaagcaactagatttttcttggctttcttagtattcttccatagcttgtaattcattaaacattcctattcagctttctatactaatttcatatatatatatatgtattttgcttcatgaaagcattgctgcttttcttcttcatcagtaattagtaaacttagcttcctaaccccttat

SEQ ID NO: 8736 - DNA, 1067 bp, Homo sapiens
gtagtggtactctttgtaggaaaatgcaaattagtgatgttgagtacttttcactcatcagccgtttgggtatctggtaattcatgagataaagtacccactgcaatctggtgtccatttaaaaaaatgatgtatagttcttatttctggatatacagacctttataggatatatattgtttcaaatagctttcacactctgtgacttgcctttgggactctctcggtgatttttttaaatgaacggaagttctgagttttaatgaattcctatttatcagtatttttctttgtagttggtactgttcattttctgttaggaatttttgcctatctcagagtcatgaagttactcttctgtgttatcttctaaaagcatttacgttacttttcacatgtagatcacaattcaactgaaattggattttgtatataatgtgaagtttcaagtgctcttttttccccatatggatactaaatttacacagcatcatgtattgaatattgatttctcctttttcatagcattgaaaaggtgattatatatgtgttggtctagttctgtgctattttttttccactggcctgtttgtctatcctttgtttactaccaccaagctataactcttgatagctggtaatgaagtcttccaattttgttcaccctcaagattgtcttctggcttttcgtatttccaaataaattgtaaaattgatttgccatttttcacacacacaccccttgctggtttcttgattgggattgcattaagtcttttgatgatttgagaattgacatccttacagtattgagtattctaacctgtgaatatggtagaaaccattgtgtattcagttatttgatttctttcagttatgttttataattttctgtgtagaggtcttgtatatgtttcattagatttattctttggtatttgttttttgatactattataaatggtattgttttaaatttttattttctaattatagcaacttgtatgtagagtcatgtgccactttatgatggggatatgagaaatgcattgttaggcagtttcatc

SEQ ID NO: 8737 - DNA, 1050 bp, Homo sapiens
cactgtgtccctaagaagctagtctttccaactttttgggagcagttcttattcaccgtttttggttgaactcttttgagaatctgatgaaagttctggactctgacctgagaaaatacacacaaaatctagtatacaatttctagaaaattgcaagtttctggtctgtggatcccaggtaaagcatttcttgggagttttgaccccacttaggccaatttccacagcatcactattgttgaaactggtgctttgtgctagggctcttgataaggcaatctttttgcctacttgaaaacatgggaaataggattttgccacatgaatccaagcaagtgatacgtctgcattgaaaagactaacaaaatagttttaatagtaacttcatatgtgccccgagttcattttagattcttcgtgtttgaaacttagtagaaaaggagggtaagaagatggaggccaaattggggtgggagtggaagttcccatgtcctctgtctggatctttgtctgtcgtggaccttactggtcccccagaacagtggacacttcggaaatatttgttgaatgaatgaatttgcagacgatgcaccttttattcatattgtggatgtttactatcattgagagaaactgctggtgttaatcggggagggagggggaaattttgagtggagtgatcagttcattaagtaatctgtattagtgaacattgtcatattatgatgacttttgcttccctgaatagggaatagctggcattgggataacaaataccttgagagtgaagatcctctgtattaggttttcccttttttagtgcctatttataattgtaaaatgcacattcagaaagtgtgtaaaaacttacagtctaacaaataattataaaacaagtactgaggtagtctccatccagattaagaaatagaacattactagcaatattgaagccttttccccataccttttccaattataaccatctctcttctgcataagtaagcataatcttgacttctgtgatcatttccttgcttacctttatgc

SEQ ID NO: 8738 - DNA, 1045 bp, Homo sapiens
acctgtaatcccagctactcgggaggctaaggcaggagaattgcctgaacctgggaggcagaggttgcagtgagccgagattgtgccattgcattccagcctgggcaacaagagcaagactccatctcataaaaacaaaaaattgaaaaataagaaaagagcctgggagactagttagactaggttatcgatgatgggagcctaaatcaatatcttctagttactggttcggtttttatcattttccacagacctttggtttagatgcactttaaactatctccttggccctcctccgccttttctctcaggattagctctagctccttaaaatccagtccagtcagagccctagacttactttcccagaaaaagagttcaaacaagaccatgataaagaaaataccttggcagaggtagtgtgcagactccacaggatagcagtggcatttctgtcttaggagagccgaattagggtgaacacactcatctttatagccacatgccagagtcacattgattagaagaatacaaggactgtatgaagagattaactccctttaaagatactgttcagtgtgagattctggctttagagtttaattgcagatacctttgtatcattttgacaagataatggaaaggcatagagtttcttgtaaccaagatgtcaggccatctcccttgagccaggctgctatggaggtcagtaaggagtccattggactaggagttgacggatccctttttggtacaataagtaccaaaaataagtgcatgttctgatttgtcagaaaggaggaggaggagtcagattttcttttttaacctttaaattcctacttgttggttcaattcactttatttgtattaaactaccatttggctcaatttattctgattaacccttcaaggcaaattgcctttgatctgaaatttttctcatttatgatacatactttaccctttcaacaagccaaatagagttttgttccaagggcttctgtattgctgacagtactaaattagagtttgatgtataagg

SEQ ID NO: 8739 - DNA, 1095 bp, Homo sapiens
ttctcccatggtgacctagtttgtcagttattgatgtatgtaataaaactaattaaacactcaaaaatgcttttggttagacaaagtctttcagattctgaagctcatggggagggtaaatgggtgttcttgatggtaaaaaatatatgaaatatagtcagatttgaagactgcaaattgatgggtcatcagccaattctggcctaaagatgcattttgtttggctaataaaatggtggtgttttttaatttataaattcctgacaaacatttaaaaattagaaaatgtcacatcaaaaagcagatgtttaagcttcttttcaaaattcaaaagttctggcattagtggatccacatttgtccatgacaataaccagctggaaccgggttgttacttagatgaaccacgtgctttttccagtttcccacagcctccacctgacccagttcattgatgtatattacctgtcaggctcagtaagcatgtgagtctgtgattcctgggctagctcagactcctcatcatcttgtttggctatggagtaaaacccattttccgtctgtgatcactcacatcttttgtactctgtacagctttgtgtcttgggacttttttcttatgttgttattttatgtctttcatgtaaataggtctgtttgacaagagccacattctcatcagttcacagttggcattgttttgggggctggaaatgcagaggagtcttatggtgctcgcaccctgagggaggtcacagtctagccttgtttctttttaatttacaaagcatccagcattctgatgtgcatgttcaggacttattagaatgtggagattaacagcatgggatttggtatcagaaagacctaggttagagtactgatgtagtttatgtaaactcttcagcttctgttttcttgtctttaaaagggggataattaatagtacttatgggatacagtgaggtttgaatgacccagtgattataaggggcttagttccaatccataacatttaataactgccaaatacctggtaactcttattactagggctggacatacagttggctctcaattgatgcttgttgaatt

SEQ ID NO: 8740 - DNA, 1044 bp, Homo sapiens
cttaatgagcagtttagtctcaaagggagattgcccagttgcagtttagatctgcttctaatcctggatttggccagaagattccttgattgactctgggggaacctttacctttatagagaggatacaggcctggtattttctgtccaggggatctaagcatggggtggagtatgccatctctccctggtgctcagccaggcctgtgggtcatcaaggacccagcccattctgcagagagtttagacagcttgcccaaagtctatctgtagttggaagaagcatgactggaagggagataatgaaagggtgccatttcttcctgatctctctaattctgcctgtacccttacccccatctgaactcccacccctgcctacactacccttccatctgggagagagaatagtaggcaggggtcatgttttggaaaggatattatttcaagggcgttgggaccccagtgaaagattttattgaggggagtgacatgacctgttggacactgtggtgggctgatttgcatccccaaaactcatatgttgagccctaaccctcagtacctcagaaggtgactgtatttggagatagggcctttaaagagataattaagttacctgttaggctgttaggataggctgtagcccagtttgacctatgtccttgtaagaggaggagttttagatacacagagaaacaccaggcatgcacatacacagaggaaggaccatgtgcagacacagtgagaaggtggtcatctgcaagccaaggagaattcttgagaagccaaacctgctgactccttgaacttggacttccagcctccagaactatgtctgtcattcaagcccctcggtcagtggcattttgtgatggcagtcccagggtacgaatatagaaccaaaaagatgaattgagcctcagggcggagaatggataggggagcaatattgtgggtattcagaacagccgggaactcacaggaaagaggaaggtggtgtggaccagggagatctacagaggtgggaggaagaggacagatt

SEQ ID NO: 8741 - DNA, 1066 bp, Homo sapiens
aaatgagtgaatcaattaaaaataaatccgggacatgccattccccccccccgccccctgcccccattgcctgtccccgtccccaccccttgtcattgcattgtgaactcttggacttgatagtgaggttgctggttgctcaggctgtagaaggaagaaaggagaggaatggtgtctataagccagctgtgctgttcaaaaacatgttttttactttttatttaagtaaactttttatagaaacttaacgcacataccgaagagcgcgcagatgttaactggggagctctatgaatttccatgaagtaaacacacctggggaaccagggcttagctcaagaagtacagcattgccaaccccagagccccggtggtgcccccactccatcctccccctgccccccgccactgttctgacttccaacatcacagattcctttcttctgtttttgaactggcaagaatgtctggctccttttactccacgttaaaaagatctagtttccacctcatcttccaggaggtgggttgtaggataaccctccacccacttgggttgcaaggacaactccaaaaccttggcgacccgacctcccacaagccttgggctccagactccagcactcttgttccaggcgcccttgaatgagctcgtctgttttccagcagaaatcgtggcctgatgccacctggaagacccagtagcatggaaataggagtccagagcaggctgtaagtgtgagctcacagggagggcaagtgagatttggagagacctgccacattccccgcagaggacgaatgacgtttacatcccttaatcagagtcagaggcatcccacccaggcaactgaggtgtgggcctcttgtggggagtggggctggccagaagggaggggagaagtgtggctgtggaaggtggctcataagagcttttatagaatacacttgtgttctaaaagggaataaaaggaaacatagcccttgggtcattttctatgctaactcattaataagcagtcacccacaggtttctccaagtgattccttgttcagtttttctttt

SEQ ID NO: 8742 - DNA, 1030 bp, Homo sapiens
gtatggaggaggttttcaggattcacttggagctctcggaatgcataaagtgcaatactttcccattgccgcaaaaagatattgcattttaaatgtctgaaatcatgattgacttagctcctcagccctgaagggtgcagcagtggcttgaagcatcagaaccttgaaggagatttctttgaggaacactttgctatctcctgttaaaattagcagcaagcattctcagggcactctccactaaatatgtctggcaggagggtacacgatacctctcccttcactccccaaatcctccctgtattgcagtccagagcttttcaaactttatatgcattcaaaaggcatgggggtcttggtaaaatgcagagtctggctcagtaggtatgtggggtaaggctgattgaatttcaaacaaccccccaggtgactgttgatgcactggtctgaggtctacactttgagccacaagggtctagagtttatgattttcagggagctaagctggctgtatcagaatgacctggagtcttcagtaagcagcttcccaggacctttctgggatattctcaatcaggaggcctaggatagactcaggaaactgccagtgtcccaggaaccacactatgagaaacgccgcctcactcagtggttcctgtgatcgtcagggtccctggtggattgaggccaacttgggaaacattgattattgggtttgggatggggccagaagcccacttgtatcctgtttcgccgggggagcctaatctacactcaagtttgtgaattcctcgcagtaattacttctttacctcctcatctttcgtctgtcccttggccccaaactcttcctcaagctagtgtcccactggctcttgttccttctcctttgttgtagccagtgtgtgactccttggccctctgcacctggcttttgcatcctccacagtaatgttttgctccaagaatctcttagttgtcagatccagcaaatgttgaaatacgctattacttggccttgaagcggtac

SEQ ID NO: 8743 - DNA, 1046 bp, Homo sapiens
aacaatgttagatctgtttttatagtcccacaagtccctgaggctctgtgagtttttatttttttatattttggggggtaggtcagggtttcactccatcacccaggctagagtgcagtggtgcgatcatggctcactgcagcctcaacttcctgagctccagtgatcctccctcctcagcctcctgagtagctgggaccacaggcatgcaccaccatgcctggctaattttttttttattgtattttttgtagaggtgggttttgatatgttgcccaggttggtctcaaactcctgagctcaagtgatccgcccgcctcagcctcccaaagtgctgggattataagcatgagccaccacaccagagctctgttcatttttaatcactcctttttctttttattgttcatattggacaatttctgttaatctgtcatcaagctcacttactctttcatctgtcatctccagtctgctttcaagcctatatagtgttttgttttgtttagttgtttaaatttcagttactgtatctttctgttctaaaatttctttttggttttctttatatctttctttgctgagactttctgtttttccatttgttttgagagtgtgtgtgattgcttactcgagcatttatgtaatagctgctataaaatcttcatcatataacttcaacatctgtgtcatcttggcatttgtctgttgattgtcttaacccaaatgaattgagattttcttggttcttaatatgacaagaaattttggattatattctggatattttgattattatgtgtgacactctgggtcttatttgaagcctagcgggagtgcttatatatgtgtttttgtaggtaaatgacctgcgcaggtcaggccacagttttctaccagccctctgtgggctatggttacaatcgttttcacgctgtttttgcaatgctatttggatgtatcctgcctatggccctaccagtagtttgtgagttcagtctttgatgtgctgattaggaccaggtccatgtgcatgcagcttgagg

SEQ ID NO: 8744 - DNA, 1036 bp, Homo sapiens
tcaaaatagtcaggactttctataatattatgaaaaggcagaaagggagattggatgggtactggggattgattagccacagtctttgccacagactcttttggactgagccgataggtcaaaggttagcttatgcagtagcatgggctgtaggttttttgcactgatcaacaccggaacttttagaagacttttagaagatttgttgctgctgtgagtgacatcagttcacacagcctgagagagaactctcagtccatgctgtccctccttgggctcactcaagtgaaatgggtcgagctgcaacactgtgcggtgccaaccgggagaaatctgcctatcggggctgagagacatcctgtagtggctgcccgtctcctttgccccaaatgtcaagtggaagaggtgcttcacatatttatttcttcctacatgggctcatttattgtaagcccattgtgacccttggaaagccaagcttttatcttgattttggagtgtgatcaaggtgacagttgttctctggatgacaggaatctgactttggttttgctttttccatagaggtcagttggcctcaaatttgggccaatttgcatctggaggagacctccaaggacagatgccttgtcctcattagctaatttgtcaggcagtctttcctgtgtggcacagaaccttttatagatttttcctcaaactcgttttggttggccagtgcctgcctgcctttctttctggaaatgtgctgtgtatttgtggggacgtgactccatggtgcgtctctcttcccaatacattccctttcccctatccacagccctgttacttctgtctttcttccactctcagtgcagcaattttaaagtacatccacagattctttggcactcctacctttgagaggtacagactgtgtccctacttctggaaactgggccagctattgtgactattttgatcagtagagtatggcagaaatgatgctatgtgatttctacgaataggatataaaaggcgacatggcctcttccgt

SEQ ID NO: 8745 - DNA, 1109 bp, Homo sapiens
aagtcagcgcatccgagtgaagccggcagctggaccttcacaactgaaagcagactaaataaaagggggaggatgaaaaaagaagagctgcaaataagatgtcagggaatgcttaattatataaaggttatgcatttgcctgcataattgtccaaagcaactgatggcaacagctggcagagaagctggtcttcagctctatttgtgtttatctggtgcctgtcaccgtaatagctacaagaagtattgatcacaaattaatttggcctcattccttctcctttttgtctctacccttatcagtctcacttcccctactaaaataggaaggctattgaatacatggagaaaacttggagtttgtggaggctgaggctaccaagtatcatggaagcaatatactatatgccaggcactagcataggtagcatttgtaactgacttttttaataaaacaaccctataaggtaggtattcttattcctgttttacatataagggtagtgagacccagagagatgaactcatttgacaaaagtcacacagcttggggtagcctggtgattcccttaaccacggctctcccaactgggctctgcaaggtgggtattttgggagttttttcactgcacctggagtgaaatctgaaccctttaccacagactacataccctgtatgttctaactggtcttcaagcacatcttctcctggtatcctccaccttgtccggcacgctagtctccttttcctttctttttttttttttttcttggagacagagtctcactctgtcgcccaggctggagtgcagtggcatgatcttggctcactgcaacctctgccacctgggttcaagcaattctcatgcctcagactcccgagtagctgggattacaggcttgtgccaccatgcccagctaattttggtatttttagtagagacggggtttcgccatgttggtcaggctggtcttgatctcctggcctcaagtgatctgcctgccttgacctcctcatttccatttcttagacatgccaagctctttcctgtttaagggtctttgcaggtgctgttacctctgcctagaactgtgttcctgcaaggtca

SEQ ID NO: 8746 - DNA, 1087 bp, Homo sapiens
attttagaaaaagtattaagatcccagccttgatcctcaggacagcgtgaggccatcaaaaggttcggaaggaagtttggagggcagaaggctggagggaatgcttccttgcccagatgaagcctgaatgactcgcagggctggggcaagctgccgccagttttatccacaaagcagcaaccacttctgctaagatagtgatgactccgagcccctccagctcccctgttctcctcaaccctggtctgagcgcctgctttgtgcgagtcattcaggcttcatcaaggcactatgttaatgttaggtccttcttacagatcagcccacgtagtcctcacagcagctggttgaggagctattatcatcatccccacttggcagtggtaggtagaggctgaggctgagagagttgcccaggttcactctactggaaggagccagctctggaatctggaattcagccccaggcctctctcagtccaagtccagtgcgcactatctctttcatggactgcctcccattctcaggatcctaatgtctttatctaaccctgctggtggccagaagcctctacctggtacccgtcacaacccaggtgagaccaggcatctcaggatgcctcacctgacttccagctggaatccaacctgagctgtgcagttggctcaaagggtggccaaccagaggagcagatttatccacattggcatcagaaaaaccactctaggccgggcacagtggctcatgcctgtaaggctcatgccttgagaggctttccctgttctcccagctctcaccccaccaccagtaatctgtgcttaaacgagctgtcttgcctttccacgcaaatgaattggagatggtgaggctccaggcagcagcagacgcatctcaaagctggtttggggcataagagctttctctctatgagaataacctgcttcggagccttctcaaggatagggaggttggtatttatataaagtgaggttttcgaaatgaacagaggtatgagctgcctggcagtgtcctggaacgagccagtttgtaaaataactacttttttgttgctttggggctagaata

SEQ ID NO: 8747 - DNA, 1047 bp, Homo sapiens
gcctgcagaactgtgagccaactaatcctcttttttttttttttgagacagagtcttagtcacccaggctggagtacagtggcgcgatcttagctcacggttacccctgtctcctgagttcaagcaattcttgtgcctcagcctcctgagtagctgggattacaggtgtgtgccaccacagctggctaatttttgtatttttagtagaggcagggttttgccatgttggccaagtgggtctcaaactcctggcctcgagtgatccacctgcctcagcctcccaaagtgctgggattacaggcatgagccaccgcacccagcctaaacctcttgtttataaattacccagactcaggtatttctttatagcaatgcaagaacagcctaacacagttacccaaagccctacaactagcaaattctggcagggccagaattcagcatagatattaggaagaggtccatggaacataacgcagccatgctaagcctcatttgtcactggccagcaacctgaactgaggttgaccaggaaatggatttgtgatgggaccattctgtcactgtttgtgtatgtaaataagggacatctctgacacctgctggggtagccagaacatttaatatcctttgcctgcctgaacaccttttcagatgtagggctcaattcacatacctacaagttcagtttttacccaaccaacttctaatgacataatctcatgagttcattttatctgtaacctctcatcagaattagcagatcctctgcaatttgggaactctggacaaaatccaggggaaagattctgaaggtgaagcattcaagtctagcagtcctaatggaaacagtgtaatagcaacatgccactcatctgcagtcagcctggatgacttaaattggtttccaggaggttgaagtttcatgagaacagctcggcacagctaagctggtattaataagcacattgtgcccgtggacaacattgtagatcaatacagtatatgctccaaattcacatgatagatgagtaccattatgaccta

SEQ ID NO: 8748 - DNA, 1035 bp, Homo sapiens
attgtaccagtgcactccagcgtgggtggtagagcgagaccttgtctctttaaaaaaaaataaaaaaggcaagaccatcctggctaacacagtgaaaccccatctctactaaaaatacaaaaaaaattagccgggcgtggtggcgggcgcctgtagtcccagctacttgggaggctgaggcaggagaatggtgtgaacccaggaggcagaggttgccgtgagccaagattgagccactgcactccagcctgggcaacagagcaagactctgtttcaaaaaaataaataaataaaaaattaaaaaggaaagaaagaaagaaagatcccttgttgaagctgaatgcccatgcccaaattctggccttctctctacctcctgcttttgcagtagctttctaatgagccttcctgacctccagtccttgtcactgaaagcccagtcctgcttgtcttgctgtctgtgttcaaacacacaatagcccctcattgccagtagcataaagctgaatctcttactggacatggaaagttctccgaggtctgatctgttcaccacatgcacccataggcacctctgaacaatccttggtttcccacctttcaggcacacttttctgtctgtctagaacgccctcaccagtctagccaggccagaggtttccagttgttcaaattgtaattcacatggtgctgtttcagtgaatcatgctcatatctgggaatgacctgaattctatcccagctctgatgtacccacatggtaacattagagacagtcataatagcagctactgtgtattgagcacttactacacaatacacagtattgtgtagtaagatgggccaggggtgcacatcgcaaaacttcagggggtgccatttacatcgaatacagaagagaggcactgctggccactgtgccaagaccttcatatagataatctcagccctaacagttggactctgttaccgccattttacgaagaaggaaactaaggctacaaatgttaagtttcttgcccagggccacatagc

SEQ ID NO: 8749 - DNA, 1046 bp, Homo sapiens
aagggagcccctactattttgcgggtctctgttttgagtgtcttaaaattctagtggagtaggagccattgggaccatcacaggaagatatagcccctgggtgggaagcagggtgtctgtcttttggagggagcggagtgtctccatttcagttgttgctgagacaggcaaggtctggtggttgaggaaacatctttttctctctgagcctctttttgagcttagattataaggaatctagatctgtcacgggtagatgcttccaggttctgggagcagaaggcactgctacaaggaggcaagttggggactcagtagaaggtaacctgttggttagtagctgttaagcaatttggaccccaacctacaataagaactacttttatatcacaaatatacagataggaagtcattctacattcagcacactgacgcaggtattttttaatacattctattcccttcttttcgttttatgctggccctgacccactatgttagtttctgtacttattatactatttggttgagacctgatgttgaaaaaacattccagtgggatagtctatgaagatagcctcagcacatgagttatgagagctgcctcagctgtgagagttccaggcacgtcactgtccgggggtaattccctttgagtttcattgaattttaaggaaaaagcccccttgctcttcctcaaatgcaccaaagactctctcaccccaggatctttgcacttgctgttctgttcacttagaacacctgtcttccatatacccaagggtccaccttcagctctttatcaggtgccaccctctcaaggagaaccccatccccatccccaccccctgtttaaaattgcaacccatcaccaaccccgctccctcttcgttccacttaccatgttctgggcttttttttttttttttttgccacagcatttattatcttctcccaaacaatataccctataactttttattatatctactctctgtctctgcccactaccatgtaaattctgtgagggcaggaatttctgttct

SEQ ID NO: 8750 - DNA, 1025 bp, Homo sapiens
taatttgccaccttgacacatggatgcagtgtctggaaggtgcaccaactaaaatgctttgtcattctcatagaagagaagttcagagtcactgtgggtgggaatgaattggtcaggaatcccctcctctttcttagactcccgagttggtctgaaaacgctcatcgatattctcctctactttctcttctggccctgccttcaggttgcagggcagcccggtgacaaatgaggaggagctgaatttgctttttatttgaacaaactatactaattgaaatggaccccactgggattgctgtctgccataagtaatgtatatttcattaacattttctttaaaaaccaacaagatcataaagctaagattgctttagcctaaatgctgtccagatttaatatgcatgatataacctcctggcatagcactaagcttgagcatgcaatttttggtgcctccctgatgcttgtttttaacaggaggagaatcaatacggggtgagggttagaccaacaacgtgaactgtcaagaaccagagaaataattaaagttataatattaacaaaacaacatggttgtagaggggatggataaatgattttattccgtttttttctttcttctttttttttttttttttttttactgcctcaggcatatttgttggcattttcagaaggagatagaatcaggagttatttttctgctaggaaatgtttaagtaaatcccagttgtgatcaatagggtagcctccacaaagcaagcaaagcagtaaatgtcactcatttcactttttagcaacagttgtgtgtgtgttagagccgaagtctgaaaccagtgacttcaacattagccagggagtatcgaccaaaatcggtggtgaggagataaaattgccctggaaaagttgggttccccttaacaatggtagcatggagaaatcagacttccagatgttgtgatttctcagctctctaattcatcaaattaagatgactttcaggactgcctggagatggactt

SEQ ID NO: 8751 - DNA, 1050 bp, Homo sapiens
aaacaggctatatcaagagaaggaaacttaaaacagaaaaacctaaaagatgactgaagatacagaatccttgaaataaaaataagatgcctcccctcttttaaaggactaaacaggaaaggactcatagaaatttaacttgaaaaagttgggattgtttaaggtcaggaaatcaagactagtgtgggcaacatagtgagaccccatcttcacaaacaatttaaaaaatatattagttgggtgtggcggcacatgcctgtagtcctagctactcagttggctgaggtgggaggattgcttgatcccaggagttaaagtctgccgtgagttatgattgcaccactgcattccagcctgggcaacagagtgagaccttgtctctaaaaaaacataataatggaaaaagttaggtcataaatttgaaggtatatcccagaaggtagaaaaacacaaggaaattgaaaataagaaaaactgaagaccgggttaggagatatatatccaaatcgtaggaattctagagagaagagagaaaaaaaatgagaaattgaagaaaatgctccctgaaccaaagaacagtggttttcagacagaaaagagcccacctaatgctcagattggtgaatgacagtaaaccacaccaaacacatcattatgaaatttcagaacattgggcaaaaagaagatcctacaagtttctagagagggcattacaaaaataaatacataaatgaaagtaagtgtttttacaaaggttcaagaatcaaaatggtgtcagtcttctcaataacattggacatgagaagacagttctgaaacaaatcgtttcaactcaagttctgtactataaagacattttcagaaatgattaaaaagttagtctcatacagtcctttcaagaagctgctaataaatacggtctaccaaaaccaagggagtaaaccaagaaaaagaaagacacaggatatgggaaattggggatccaaccttagagagtgaaaaggagcctctggaatgacactgaagggccatcacagggtggcggctgtg

SEQ ID NO: 8752 - DNA, 1105 bp, Homo sapiens
atagcaggaatacccaataataatagtaacagcacctctcacggttgagccattcctacaggccagagatgctgaccacttgacatgcatctttcatcttcctagtcaccgaagtttgagacttgaggaacttgttcagagtcacttgcgtagcaaatggcagagggagatttgaaccacagatcctgagatctgtgtgctgtgtgccactcattcactatcatttttctccaacttgagaaaaagaaggaaattattgtaagtccccacttttcatttttcttcaacttgagaaaaagaaggaaattattataagtccccagtttaggctgtagatggaattcatgcatctcccttgtttttccaaggtcaccttcatactacagatagatgtcccaggggcacctaagtcagtaaagtcagaccctgacagggagctaggaagaaggacacggcagagggggatgtgatggtggcactggcagcagcagctgcaaatatttaatgaccccttagactgtttgccaggcactgtgctacatacttatttaattatgtgtttttatttgtcttaagagacagagtcttgctctgtcgcccaggctggagtgcaatggtgccgtcatagcacactgtgacctcaaactcctgggctcaagcgatcctccctccttagcctcctgagtagctaggtttacaggagcatgccaccatgcccagcaaatttttaaattttttatagagacagtgtctcactgtgttgcccaggctggagtacggtagtgcaatcatagttcaccgtgaccttgaactcttggcctcaagcgatcctcccatctcagcctccaaaagtgctgagattacaggtgtgagcccccgcgtccagccctgtgctacatactttataacgaccatgtctgatcttcacaaacacctcatgagatgcatgctcttatccttcattttacagatgaggaaaacaggctcaggagtttaagtaacttgccacagttgcaaagccaataaatcgtagagccaggattcagacatgggtctgtcagcctccagagtctgtggtctgtgttggatgtcagtgcatcatcgt

SEQ ID NO: 8753 - DNA, 1056 bp, Homo sapiens
aatatttgctgcaggcagcaggcaaagtccatgatgaatgctaaaattagtgggtgaaagtttaagcagaaacaggatatttgcatagtttcaaagaatctcccccaaaatatttattgactacaaagacagaaatagtaactttgcagtgaagaatcctggcagataaagtgatcaaagttaacatcatcagtgaatgcatttcaggtatcccctgatgggatacactgaatatgctctgatactcttttcaataatatatattctcacaattgtgaaactacatcagaaaaacccaaattgagggacattctacaaaataacttctcgatcctcttcacagtattaaagtcatgaagaacaaggaaagactgagaaactgtcaccgattagaggagatcaatgccatgtgggatcctggcaaaatttgaatcaattctattaacttagttaatacagttgttccaaggttaactcagttttagcagttgttctgtggttaggaaagggatcatcactaggggaacctagatgaaggatttgcagaaactgtacttttttttttttttttttttttttgagactgagtctcgctctgtcacccaggctggagtgcaatggtgtgatctcggctcactgcaaccttcgcctcccgggttcaagcaattctcttgcctcagcctcctgagtagctgggattacaggcgcatgccagcatgcctggctaatttttgtatttttagtagagacagggtttcaccatgttggtcaggctggtctcgaactactgacctcgtgatccacctgcctcggcctcccaaagtgctgggattacaggtgtgaaccaccatgcctggccaaactgtactatttttgcaactcttgtgtatgtctaaacttatctccaaataaaaaattaaattttaaaaaaggagaacctagcatatagaaagtgctgtataggtatttattaaatagacaaaatggtaattggttaaaagtatgtattgatgtgcttaattaagtaaaaaaatcagggtgtaaccatgcatgtta

SEQ ID NO: 8754 - DNA, 1110 bp, Homo sapiens
cctgttgtatttcccagattgtggtgagccctgagtggggttccaagaaggagcaagcctggtctttgcccaccgagaacttaatggtaagatagccacatatgtaaaatgaaataaagctttgggctaagagtacagatgctggaactagacttcctgggttcctcttggtttctctactagctagctctgataatagctattaataattcctcaggtatagggagtatttgggcaagttccttaacctgtgttcccatttcctcacctgtgaaacggtctacttcataggagggtgtattcgtttgctagggctgccataacaaatgaccacaaacttggctttgaaacaacagaaatttattctctcacagttctggaggccagaagtgcaaattgaaggtactggcagggtttgttctttctggaggctctgagggagagtctgttccatgcctcattcctagcttctggggccgctggcaattcttggtgttccttggcttggttggggctgcatgattccagtttctgccttcaacttcgcatggcctttgcccttgtctgtttctgtgtcatctccttctctgtctctcataaagacactcatcattggatctaaagctctctctaattcagaatgagctcatcttgaaactcttaccttaattatatctgcaaagaccctttttccaaataaggtcacattctgaggttctgggtggacatacctttggagggacactactcaactcaatacagatggtgcaaggattaaaagtgttagaatgtgtaaaacacatcagatattaatgagaatagggtaagagctgccaggataattatggtgatgatattatgtttactcttgtttttgagttcaaagtaaatatgcatggtggtgatggttgttagtattattagtatcattatttagttcaaatcaggaatgaggacatgtcacaaggcaaatggtgttcctcattccaactctggacttttccccatgcccttctgggggttgatgctgggaaattaatcacagggaacagtgctgtctgtgaacgacaggccaaacagggtgatgtgagccactgaggttccttgatc

SEQ ID NO: 8755 - DNA, 1033 bp, Homo sapiens
agagacaagggaataaacagatgcagacaccttaaaaattgcaaggcaaagctggtgttaagacatagctctctaggactttcccctagagtctccctggctcagtgggtgctgttcatgcaggggaaagcttgaccaagagtgagtccatcacgctgtgagtcactgggtcagggttgcgcgccctcacagacacctggcacgcttcttggctgacttcttctgtgaccagggcctctgatagccctgttcccctccctgcatgttgtttgtatcttcttttcctagttttctttgattcagataagctcaggggctcctgagccgatcttgtcttcctttgatggatgggtggcaagggagtagggctggggccaggggcccgtctgtggagggtggaggcagatggcgtggggcaaggcagcaggcaggtaggagaaatgaaagggcttcacatcaaagaaagagaagccaatcaactggagtattctctgtcctctgagattggatctgagctctaatttgtgaatcttagttaagttttgaaaaccaaaagcaaggggctgctggacctcctgcctaacaaaagtgtttgttgaaaagattcagaaccgtgacaaagatatagctcccgcagagctctaaagagaagggaattcaagctccagaaggtggggaccccacagtgaaaatgacaaacagggttcacactctcctagagcttgtcttccagtgggagtacacagacaatgccaaacaagatcatttcagcaagtgtgatatgtaaaaaagatgctctgtgactttgggttgagtggtcaaggaagcctccctgagaaggtcacactggggctgaaccctgcgcagccacatgtggatctgggggaagtgtattctagggtgaccaaagagttggtgccaaggtcttgtgcagaagggagttcaatgtgattgaggaacagagggaggtcagcatgcctggggaaagtgcagggaggagagggggcccactgagccggggaggctgggacaa

SEQ ID NO: 8756 - DNA, 1042 bp, Homo sapiens
tatttcaatttgcttgtaaccctttcccctccctctttgcctggttaaccactctttatcctttggcttttggttggttgatctaaactcttcagcataggtcaggcctcctttttgttttacacttaccttttctatgtagcactcctcacagttcgtaattttatatttgtgtggtaatttgattacatcttcctcatacactagactgtaagctccttttgttcacctttgtattctggaatctaactcagtacttagcaaggcagaaggaactaaataaacttttgttgagtgatcaaatgaatgaatccattatatataattcatattgttaattgatctgaggttgctaaggaataattttgtacttccactgagctctgactgcaaaacacttccactgagctctgactgcaaaacactcactcacccactaattatctttgttaggtattgcttttgaaatgctgaatagtatttcatcttatcatttgatctgtaccaccaccaaaaatgtttatttaagtctccatctatgttttgagtggagattttttttttcttttaagacagagtcttactctgtggcccaggctggagtgcagtggtgcaatgatggctcattgtggcctcgacctcagcctttctcccaagtagctgaaactacaggtgcacgccattacgccaggctaatttttgtattttttgtagagacagggtttctccacattgccaaggctggtctcgagctcttgggctcaagtgatctgcctgcctcgacctcccaaagtgctggaattataggcatgagccaccatgcttggctgagtagaaacctttctataaatattgtctgcttgggtggcagtgtgtgtgtgtgtgtggtgtttggggggtaatgtgaaatgagtaaagtttgtggaaatgaaagttactgtacagttcattgatgcctgttttcctataagggaaatttgaattatttagggtagaaacaggactggtgtgcagcaggctccagggaaagcagccacacctt

SEQ ID NO: 8757 - DNA, 1032 bp, Homo sapiens
ttgaggggcagagtcctcttgctctaaggtaagaagctatgggtgatgtttatgcagggaagaaatgggtggcgtttaatctctcggctctgtgtgtggcacacacttgcattgtttaagacaggggtcaggagttcaggctctggaatcacacaggatttgcctcttggttcctcttcctagtcttctgcctttgggcaagtgaatccctatgcttcggtttcttcatctgcaaaatgagcctaatgaaacctacctccttggtttagagtagaaattaactgagggaatagatgcaaatggaggcttgacacagtcctgaccatcatggccagcctctgatgatagttaatattattctaatcagcagtcataatggtaataaaatagtcatggttgacaattgatttgaccaaatggccccaccacttttgaaaatctgcttgtgacctggtttccatccaatgggctggcgcaggggcaggcgtggggtccagatctagtctcctatgctggcttggagggttctgccttctgtgtgtttcctttagcagtaccttgggtgctgctggcttaccctgtatctgggtgtgtatataatacataggggagtatgtcatacataagacttcatagagaaatcggtgatgggctgcatgttctcattcataggtgggaattgaacaatgagaacacttggacacagggtggggaacaccacacaccggggcctgtcgtggagtgtggggaggaggaaggatagcattaggagatgtacctaatgtaaacgatgagttaatgggtgtagcacaccaacatggcacatgtatacatatgtaacaaacctgcacgttgtgcacatgtaccctagaacttaaagtataaaaaaaaagaaatcggtgatgggctgacagtgagataagacagctgccaagttaagaggctggtgaattagatgatgtggtaggtgggagttcaaacatggctgagggatggttctgagtttgtattgtgttagggtatcagcccctg

SEQ ID NO: 8758 - DNA, 1028 bp, Homo sapiens
taacattaactagcttaggtggttgttagcttcattatttgatagcagaaaacaagacttaagggaggttatatgatttttctatctctcagtgacttggcaaaaagtgaaccctattcctaaccaggcctgtggtcttcaagtgaagtgtagtagtccatggagcagtgcatgctccctgtatttccttctgggggccatgattgtgaaagtgttgcttgtgatttaccagcagatatttatacacatttacttatcacaagacgttttgagtctttcatgtggagctcaaagccttaaaacataaaaaccaaagcaaaacaaagaattctgttatctaggcaagtgtctctctctctctccccctctttttcttttagaaaaatacttcgtgataaaaacacaaaagtatgtgaatggtaattgaaaatgcattgcttccttttagaaacccactaggatttgcataaaccacttggctgtctgataagtcattatctgttctgtcagtccctggggacttttaatattaggtttatatttttatagaaaaggcaagttctaaatttgaagatgggtattgttaaactcttcaataatgacagtttgtgaaactgcatgttccaaaagtcctttaaaaagtcaataaggccacgcgcagtggcgcacgcctgtaatcccagcactttgggaggccaaggcaggcggatcacctgaggtcaggagttcgagaccagtctgcccaacatggcgaaaccccatctctactaaaaatacaaaaaaaaattagccagccatagtggcaggcgcctgtaatcccagctactcgggaggctgaggcaggagaattgcttaaacctgggaggcagaggttgcagtgagccgagatcgcatcaagagcgatactctgtctctaaataaataaataaataaatagtcaataaaaacatgtcatctctatattgggataaccacacaaataaaattaaaggcctagaaggattttgaatttgtgctggcacaatctg

SEQ ID NO: 8759 - DNA, 1030 bp, Homo sapiens
atccaggatgcgtgcaggcttatattaaactcccaaattgattactggctaaactggtagggacagccacttttcaatatgctttttgaattatagattgctttctctgagttgtaaaaagctaaaattataagactatttctagaaggactcaatttcttttttaagatttgttcatgctgttgacttcacttgtggccataaaagttattggaccagccagtagacatggcacctagtacttttatagaaatacaattttatttcagtacaatttgagaatatatataatctagtacaattatagaaattgttacaaagtggttttaattaatgggttaaaaaaactgaatgatttctggaatctatcaaatagcagtataaatcaagttgagaccccatatatggtggtatatttaagaggaatataaatttcctaccagacatgtggacattttaaaatgttggaatcaaaatgatacaagccacagatgaacaacttctgctgttttttgaatatctgaagtaacatcttggttgggaatttttatttctaattactattttttagagtaacttttcacaaccgtctagaatcacaatacaggttgaacattcctaatgggaaaatccaaaatgctccaaaatttgaaactttttgagggctgacatgatgctcaaaggcaatgctcattggagcattatggatttcagatttggggattagggatgctcaactcgtatatattctgcaacccttccaaaatctgaaatccaaaacacttcatcccaagcattttggagaagagatattcaacctgtactgtaccaacactgccttggtttgataacattcatcttaaagcacccagtgctagtaaaagaacataatcattagtttatagcaaatgggtcctgaagggcttactgaaaggccattttgggattagagatgatggtttctttctgtgatttcaatctgaaaagctgaaaatgtattctggatgtccttcctaactttctcttaatt

SEQ ID NO: 8760 - DNA, 1011 bp, Homo sapiens
tctagattccttcaggtacattcagattgaactctgcttatctttacctgcttccctttctgcattcttccttttttttacatttccatatccagtcacttatcgagtgctgccaatttcactttctacggatttttcaaatctctgctaccagtcccctgttctcatgatctcttactgaaccgctttagcaggttcctgagtactcttctggctccaggcttatcccactcaaatctaccttctgtttaaccttcatagtgacctgtctcatataatttccaacagggcagggcattttttttcttcttttttactccagcacctgtctcattgtaggtacttaataaaaatttaatggatgaaggaatttatctgaaatgcatagatgaccaaatgttttccctgctttcaaaaaattcttcagtgacttttcatcatctctaggatgatttggcaccatatttgtctcttgctactctccgacttacactttgtgctctgacaatgctcacctactttcagactcacaaatatgaaattctgcatcttatttccatggtctgctcatggaaactccccgtcagcaaagctctcctttgtcaacttgtaaactaatgtttaccctttaagagtcagctcagatatcacctgttccaagacgccttctctgattccttcccaatcccctccaacttagtctgggtcaggtattccttctgtgttcccatcaccctgttcttaccacattttactctaatgatttgtttatgtgtttatctcattgtttgtgatttcatataggtcttcatctttgtatccccagcacctaacacagtgactagaatttaataggaatatagagtttgtggaaagaatgtaaaatatctcaatgattgcaggaggctattcctctgacatttcgactcagggatgtactggccacattacagtatatctccaaaatggtttagagtgtcctgaatgtcatgttttggcattgcaaatgtg

SEQ ID NO: 8761 - DNA, 1044 bp, Homo sapiens
aagcagcagctctttctcacccagatattcctccatcctgtttatagcaccatattggtggccagagcctctgcaaaaataaccttttgatttcaatctctcctctgtattccgcctgccatgattcaggcctttatttttacttacctcttttgggagccttcttattttctaattagtttctaaatgcctctattctctcaattctagtgtttttgtttgtttgttttttgtttttgtttttgtttttttttcagatggagtcttgctctgttgcccaggctggagtgcagtggcacaatcttggctcactgcagcctccgcctcctgggctcaagcgattcttcagcctcctgagtggctgggattacaggtgcacaccaccacgcccggctaatttttgtatttttagtagagatggggtttcaccatgttggtcaggatggtttcaaactcctgacatcatgatctgcctgccttggactcccaagtgctgagattacaggcgtgaacctctgcgcccagcctatttttacttatctcctttggaagccttcttattttctaattagtctctaactgcctctattttctcaattctagcatattttatatgaatctttgtgttgctatcctttttttaaataagaaaactaccactagctgctcattctctattgaattattaaaaatgtatcaatttagcattcaaggactcattctcatgcaccccaagataccaacaaaactgactacaagtgtctcctgagtatttccttccacctaatgcctttcttcttattgttctctctttctggatggtcacccctcatttctgcccaggaaatttctgctcattctttaagatgcatcccaggggtcacttccttcatgaacctttcagattctcccaaccaggtgtcgtttcatcctctacagagccttggaatgattgtgtaacactcttggcgctcatcacattccagtttgtattgtagttatttgtgtacaggttttctctcaacctcaagggcaaaggccaaa

SEQ ID NO: 8762 - DNA, 1049 bp, Homo sapiens
aataaacttgtacttataacatgtctgaacaggatatagtttgaggaactaagaagggtcagacatcagtttgaaaagagcacctatcagagcaacatgaattctgctaaagttgaagcaagaacaaatatcgaatttatggtgaagcttggtggaagaatagtgaaatcattgatgctttatgaaaagtttatggagacaatgtccccaaagaaatcaacagtttacaaatggatcactcattttaagaagggacaagacaacgtcaaagcccattgcagcagatcaatttgcgaggaaaaatttaatcttgtttatgccctaaatgaagaagaccgatgattaatagcagaaacaatagccaacatcatcgatatctcagttggttcagcttattcaattccgactgaaaaattgaagtttaacaaacttcctactgatgagtgtcaaaaccattgcactcagattagctgcagacaagaacagagctttcagtggaaattgtaaacaagtgggatcaagatcctgaagcatgtctttgaagaatgggaacaggaggtgaaacatggctttagcagtgcaattctgaagacaaaacacagtcaaagcaatggctgccaggaagtgaaaagggcccagtccaagcaaaaagagaccagttaagaggaagggctatggcagttttttgggatgctcaagacattttgctggttgacattctggagggctaaagaataatgtctgcttattatgagcttgttttgagaaagttggccaaagattgagcaggaaaacgcctaggaaagcatcaccagagttctccaccgccacagtgctcctgctcattcctctcatcaaacagggacaattttttaagagttttgatgaggaatcattaggcatccaccttaaagtccttatttgggcccttctgatttctttttgttgcctaatcttaaaaaacatctttaaagggcacccacatttctttggttaatagtataaaaaagactgcattgacatggttaagttcccaggaccctcagttg

SEQ ID NO: 8763 - DNA, 1035 bp, Homo sapiens
aatctggcacaaaacttgattttgaatcaagcacccaatagtgattattgaattggactgaaatatggaaatgcgtgtgccatttccctcatgggtctttgggatagagaagaatctcactgtgcactgacaaggtagtttgcttcaaatgtgctgggctaggcccatcagactgggattgggaaatgcaggaatgaaccttgagaatagtggtcattaccaatattttgagtaagtatccagagactaaatttaacaggaaatgaggcccaccttaaccatgagtaattagttcttagctgttgagagttcttactaagtgtgtctttatagttaatatatttatcatttttgccttgcaattagcacaatcattaacctgtagcagaaagtgtcgtatgtattattttccatacttcttctcacagatatattggaaatcatgggatctgggttttagggtctgccctgccacttacaccctgtgactttgtcgagtcacataatctctgacctttactttccttcacagtaaaatgttgggctgcatctatctctaaggttttcttccatttcaaatgttatgattctgtgaaaacataattgaaaataaagtcttaaatcgttatctagaattactctcatttcataacccttgcttattcaaaaaaacagtaatagtgaattgtgtgttttaggtattgaaattgttggcggagatgagttcattttgtggtgacatggaaaaactagaaacaaatttaaggaaactatttgataagttattggtaagaactttttcctttccttatgggatagtcagtatatagctcaaagtctaatttattattaatttctagattacaagaaccagtttttgaaatttcaattaaacaataatcctaataagtattgttagcttcctaggccacatgttgttgtctactttgttttaatcttggtgtttcttataattagggagaaaataggccatctgataaaatcattatcagcatcactgagtgattttcttat

SEQ ID NO: 8764 - DNA, 1589 bp, Homo sapiens
acagtaaaagtaaaatttaaaaaaaattaaaagacagaaatgacttaacaaatccatggggggtaaaggactctagctcttcctacttgttttatgatcttgggcaggtaccctaacctctcttggctcccccaaatttttctcagttgttaagtgataatagtacctacctcatagagttgtaagaatttaataagacaatgaatgtacagcttttagcatggtgcctggcaaatagtaggtattagtaaactgtagctgttgttattaataataccttagtgttactggagaagcagcactggagaagtcaatgtaaatagttttcacaaagacactgcttattgaattgttccattaacaaattcacattttaaattttgaaatgcttgagccatgtgttacctgttactgtcctgtactgtgtggtaaggcagaagtttgatacttgatgaagctcttaatcagaaacaagcaacttaaaattctcttctttaatttactggtcatgtaaccatttctgcacttaggatcattttgctgtagtataagattgagtttaaaaacaaaattgaagtgatgaattgctaattaacaaatacattttcatttaggctgcagtactttgcacggggcctgcaagtttatatcagacaacttcgcttagctctccagggtaaaacgggtgaggccttaaaaacagaagaggtaagaatactggctcacatttcataaactgctagttccataccaaactatatagacttgtgttgggagtttttcattttcccttatctcacctaatttaacagtcttcatcccagtcctaatgaaatattttagatttttattatgttcctataacttaaactgatttattttaaaacaacttctatgtgcatgtgaccttactcattttttagctacattctaacctgtcaagggaacacagattatttgctttctttgctacatctagatttgtttagagtcaagcaataggaatacgcattatctatagatttaaaccaaggaattctgtaaagactgtagaggtgattctgatagaagtgtaattactctagttctatgacagaatggattatgcctcatagaagttattggcaatttgtcttaattttcctttccctttgtagaacaagattaaagtcgttgcattgaaaataacaaacaatatcaatgttttaatcaaggtaagtctgtaataccaagtgacatttctgcagttaccataaaatcatacatttatttatttaaaagttttgcataagatacttccaacaaagggaggcatgcaaacttcttctggctcaaagcattgaaacagatagatacagtctcagaaatttcagcgacttaagttctagtggtcttaattagctgttgggttcttttgaatgtccagtaaatccctgttctgcttactcttaagaatggacatgtggtatgtagcacaatgaaatgtttttctgtgtttgttttttataaacttgactatgtaataaattgagagctttctgtactgtaggctagggtatacctttccattaagccataattacttttca

SEQ ID NO: 8765 - DNA, 1024 bp, Homo sapiens
ttgccctcagagaaaccacctctgattttctgaatgtgttcactaggataataaacacaatgatttcattttcaaatggtttgcatactaatcagcttgtaaaaaaatgtgtcatggcataagaaggtgactttgaatcagacccattctattatacagataaatattagccaaactggggaaaggtccagtgagtttcctgtctcagaattgaattacttttctttctgcagaaaggggggtcaaaaaagacatcaagacatcaccctagtaagacataatggcaaaaaaattgattgcaaaattgactgaaaaggtatttttcaagcctccaagattgtggatcaaaaacagcaaaaccaagctctctctattgttgctaacaagattgctataatgaggaagtttagaagttaatgaagagatttgatctcatttacatatgattaaaagtccagccttgtgataacttcgatcagttttcttcatgggacgacacctttgaggaccatttctctgtggctataaaagtgactgaccaatggatgagagactcttgttctgtacatcacaagtgacttgatttttcagcaaaagatatgcttagtttatatcagtagctgaaacacactcagacgcacatacacacatagcacctatttggcagtattctgagaagcttatgtagctgataaagcagtgaaaaaaactcagcctttagatctacatttgtgtgagtccagttgcgtgaaatactgtgatcaaaacaaaaattgcatatttattgcattcaaagggacattttgtagtctaacctgattttcgaaattgattattgataatttaagatatttttcatagttatatgagttacctttagtaatgatagacaataaataaagaactaagaagttgtcatgaaagtcatagccagagcaggtagataagagaaagaaataaagggcatccaaactagaatggagaagtcaaattgttctctatgcagatgacatgatgttatata

SEQ ID NO: 8766 - DNA, 1110 bp, Homo sapiens
aaaaatagatacagagcaatggaacagaacagagaaccagaaattaatccacgtatctacagccaactgattttttacaaaggtggcaagaatactcattggagggacaaaaaaaaaagggacagtctcttcaataaatggtgctgagaaaactgggtatccatatgcagaagaatgaaactagatccgcacctcccaccctgtacaaaaaccaactcaaaatggatgaaagacctaaatgtaagacctaaaacaataaaactaccataagagaaaacaagaagcacttcaggacattggtctgggaaaagattttatgactgagacctaaaagcacaggcaacaaaaacatgggatcatatcaaattaaaaagcttctgtgcagcagaggaaaccatcaacagtgaaaagacagcttacagaatgggagaaaatatttgtaaactactcatgcaacagaggattaatattcagaatatagaagatattcaaacatcttaatagcaaaacaaatctagattaaaaatgggcaaatcatctgaacagacatttctcaaaagaagacgtacaaatggccaataaatgtatgaaaaaattctaaacactaagcatcagggtaatgcacatcaaaaccacaatgagtaagttggaagttcagggaagagattttatctcatttacatatgattaaaagtcagacattggcacccccatgtttattgtagcactattcattagccaagacatggaatcaacccagaatcaacaggtgcatcaacaggtgaatggctaaacaagatgtggtattatacacaatgggatactattcagccataaaaaaagaatgtcctttcatttgcagcaacatggaaggaactggaggactttatagtaggtgaaataagccagcaatggaaaattaaacaatgcatgttctcactcatgtggaagttttaaaaagttaatcttatagaagtaaaaattaggacagcgcatactagaggctgagaagatagggggaaggaagggatagggagagatttgtgggaggatgcaaaataacataggaataagccctagtgttgtgtaccactatagcatgactatagt

SEQ ID NO: 8767 - DNA, 1065 bp, Homo sapiens
aaatactgtaagtcaaaaatgcatttaatgtacctaccaaacattgtagcttagcctaacctaccttaaacgtgctcacaatacttacattagccaaatttgggcaaaatcatctaacagcatcttttacaataaagtatcaaaatacctcatgtaattcatgaatacttcactgaaagtgaaaaacagaatggttatatgggcactcagtacagttgctaccaaatgcatgtcacttttgcagcattgtaaagtcaagaaattataagttgaaccatcgaaaggtggggaccatctgtatactttgtcctgacataccaaattcttgctgcttattcttggttacaatatttgaatgagagcataagtgtgatttcagttttaaagtgacctactaccaggcaaagggctaagggctaactggattaacagcttttagaaaattagagtggtacataccttttgagaacctttaatattaaacacacccagattagatatatgggtcattgttttccacagtgatcataaagaagtacttatgacttaaaaatctgaattgtccaaccatcattataactttttttttttttttttttgagatggagttttgctcttgttgcccaggctggagtgcaatggcgctatcttggctcaccacaacctccgcctcccgggttcaagtgattctcctgcctcagcatcccgagtagctgggattacaggcatgcactaccacacccggctaatttgtgtgtgtgtgtgtgtgtgtgtgtgtgtgtgtgtgtgtgtgtgtatttttagtagagacagggttttaccatactggacaggctggtctcaaactccaaaccttgtgatccgcccaccttggcctctcaaagtgctgggattacaggcgtgagccgctgtgcccggccattataactttttaagtacatcaaggagtctttcccaggagagatgaaaattcatttgattttttatatttcaaggtttagcagacaataaagataggcacccaccagttacataccgcagacttgtcaacatgcgtatgtattg

SEQ ID NO: 8768 - DNA, 1768 bp, Homo sapiens
cggcttcccatatggggaaggaagcaagtgaggtgcttttgccacaggggggacttatggatattggatagcaaacactacaaatactcactaaacagaaccatttcaggttttacatagaggcaaaatcttggcgactttgaagattttgatttatgttttccttcatattgtcttaatatttaaataactataattctgaattaaaatattaaaattattttgtccctagtttctaacttaaggggaaaaattttaaatgagaatggcataatttaagattatattcatcagtttccaagtgctatttggagaagagtgagtttcccatattgctttcgtgtacctagatgaataccatttaaaaaaaaaaacagtgaaagtgttcagtatatatgaagaataagttgcacatgagagcttgaattaatgttacaacagaaatgttcagttttctgccataaagaataattaaaaagtgattgactcaaacttgtttttgtaggacatcaaaaatgtttatactcttagattggttaagtttaaaatgttcacccttaatctgatttggcagtgaaataattaccctcatatagtgagtgatatttccatgttaccatgtgaacttactgaatttgttgagatagggttccagattggaggtgtagatattaacaatatcttggttaattaaagcaacaaataacatgaacataatttgataggagtaaaatatttactcatgttatatataattggatacatgtacaggttgagtatccctaatctgaaaatgcagaatccaaaatgctgcagtgaactcaaaaagtatcggattttggagcatttcagatttcggattttcagattaggaatattcaacttgtacttacataatgtattcaaaggaaaatgaaattgaattgccttatatggcttgtcattttctttattataataaactgctacagtaacagtgaaattttgtttacttggaactcttagagaatgaatcattctgaataatagaattccatagagcctaatttccagatacttgatcaggttttccctgtagtttaaatttttctctaaaatacttttcataatttcttcacctccttaaagtaagtgaaaatgattataatttttctttacaattcaggttattatttgcatcatttattgttctgtgcagcaatggaagtttgtagggttgtttatcctttgtgaaaaagccataaagtgctttgagatcttgtgtgttcattatgtcctttttaacctacctctctgtaattcctgtctcctttttgcttctggacttacagcagcctcttttcaatgctaaagactttgaaggcatattaacattcttttacacgttgtatatgacacaggagtacatagactctaaacattgactcaggacatcgactcatagtgggcctggcttatagaagcttaataaacacttattggttgaatggatgttgtaacatgttcatgcattgcttaaaaatgggggtgtgttctgagaaatgtatcagatgatttcagccttgtgcaaacatcatagagtatacttaaacacacctagactgtacagcctactacacacctaggctacacacttgtacagcatgttatggttctgtaggcagttgtaacacaatggtaagtatttgtgtatctaaacatagaaaaggcacagtaaaaatacagtattaggttgggcgtggtggctcatgcctgtaatcccagcact

SEQ ID NO: 8769 - DNA, 1069 bp, Homo sapiens
gcatgaaacatcatttaaggaagttactttatcaatcattgccaaatacttctttactattatatcacctgtaaagtcagaatatgtactttgaatgcttgttcttccaagttggagttcacaggacaactgttgcacttgtcattccctttgctaacatttacatgtgatcactttgaaatactccttgagttttgctgaggaataacgctgattacaatggcgaatgaacaataatttaaagcatattaatgactttgttaatccaaaccagcattaatgaaatccgagctttatttatttattgcttgcttgcaggtggattcaccaatgaacttgaagcatcctcatgacctagtcatattaatgagacaagaagcaacagttaactacctcaaagaattagaggtgaggcaactgggcatgtgagatgcagctgatgcttgttgcatttcacaggagccattgtgttcaaagaaaagctaaagcatattattttttaagtctgagtcttctgacttttgcgggaatatactacctgcaatgtgtgtgtgtgtgtgtgtgtgttttttctttatcattttatcaaagtgatatttgagtagtagtaagaaaaacagactactctagcctgggtatatgcgtgattcttaaaactcatttatctttgaacagaatttctgtgtttttaagttttttccatcaaatatgaaaatgatataatctctgaagatattcctagaataatctggataaaatatgaaaagaaagaaaggttttaatagcctaaaaatgtaattattgtttattctcaggtagtaaaaactaatgtcttcctattatgttttcttatggttgacgtgaaaaacattaatcaccttgttccttgaaagctcgaatcttattagtgctaataaaatctgactttttttaataaacatcagttttccttttctctaacatatttccataaattgattttgcttaatagcaaacagtatttgttatttgaaaaactaggttttttttttctcatgaaatctctgctttaaagttacagtgtaaattg

SEQ ID NO: 8770 - DNA, 1049 bp, Homo sapiens
tttctcacacgactaattcggtagttctcccgacatcaactaggtgttctacaactcaatacaattctgacactaactacctggagttagcacagaccccacaggtcaaggactcagtcccacaaggctacctgcacttcagatgccagtcgcaagtcaaggccaccagacaaattagctataaagtcagggtgttcccacagctgcctccccaagttagaacagctcacggaagtcaggaaagcactttacctactattattggtttattgtaaaggatgcaattcaggaacagccaaaggcataagccagggaatagggggaaggggtgcacagagcttccatgtcctctccagaacaccaccctcctagaatctcaatgtgttcaccaacccagaagctctcaaaactctgttgtttaagggtttctacggaggtttcactatgtaagcattattgactaaagtattggccatgagtgatgaactcaatctctactctctctcccctccccgaaggacagggggaggatgggattctgaaagatctaaccctctgatcatgccttggcttttctgggaccagcatctgtcctgaagctatctgggggccacctgcctccagtcatcccattagcatatgaaagacacacattactcctgtgattcttcaagttttaggtttgtgtgtcaggaactagggacaaagaccaaatatatttgttcttaccacatactaggtggcttaaatttatttctcatagtctggaggctgggaagtctaagatcaaggtcccagtgatttggttcctggtgagggctctcttcctgccttgcatatggctgccttctctccgtgtcctcacatggcctcatctgtgtgcatgcttgaagacagagagagatctgtctcttccatttcttataaggacacttataggaagaaatcaaatttgggccccaatccttatgacttcatttagcctttatccactcctcacaggcctgataacacttgaacatatgaactttgaggagacatagactttc

SEQ ID NO: 8771 - DNA, 1026 bp, Homo sapiens
gtctatgaagtgctcaacacttaaaaaaaacagcctttttttattggaaaaaataaaagtgtcacagaatgaaactttatggaacagtaaaggttatcttctctaaaaaatggaaaataacttttaataacaatatgagcaaaatgattaaatattgaatctgtagaaaagtccagaaatacattgatgtggcattacaacatgatagtggactttccaagcatttattaccgtaaaatatttttgaaatactaatctgcaaattaaaaagttacatctagcaaagatattttctactactaaagtaatctaggctgtcttatatctttgatacattcgattttactttatttttaatggtctatatttattatttttcttatattagcataaaaccaataggttctatgtattagaattttatgccacaaacagcaacttcgctgtttacagcatataattaagcattaaacccaagatttctgagctctggtcatttcttaattaattgaggcacacgcctacttaaaaaaattggcccagatccttagaaagaatgaataaatattatgcagaagaactcagactttaatgtttaggtgttcctgtaattgtctgcaagtttctctgtctaatacatatttgatatcttttgtctctggaacaaaaagtagaattttcaaatcatatacgtgagatttaatatctattccaatgtgcagatggattatcttgtcttcacagtgtttctgtatttatagcatctatttatgtaaatcatatctccttttataacttgtttcattgcctgtagttttagtctgtgttcttcaacctaaatttttgtagatttgtaacttgcagcttaaagcaattttacagagttcagatgttgaagaaaaagaaatcctgcactttgctgccctccagtggattatccagcatatatactgcctgcaatgaaggatctttgctttatcacatccttttacattcttttataagaattagtgaaggtatctgctt

SEQ ID NO: 8772 - DNA, 1034 bp, Homo sapiens
ctgttaggatgctattgcaaaaatatcagtgagagatgatattggcctgtaccactggggtggacagggagaaagtgagaaatgatcctatttggaatatattttgaaggtagaaccaaaaagacactcctagaaagggatatgggaaatgaaagaaagagaggtcaagggtgactcttaaatttggaacctgagcaatcaggtaaatagtggtgctatttaatgagatactcaggtctgagaaaggagcagatttggggagaaaaacaagtttggttttggacatgttaaatttgagttgcctattaagtgttcaagtagagatgttgaataggtagttggatacatgagtgttataatgatggggaagagaccaggctagagataataatttatgggtcatggacgtatgtattttctaagtcattagcttggatgaaattacctcaataattactataaaaaggaaaatgggtcaaaaatcagttactagggtattctagccaacatttaaaggtcaggaagaaaaagagcaataaaggagtagccagtaagctagtagaaaaaccattgaagtattttatcccacaagccaagtgaagaaaatgttttaaggggttatcaagcatatcattattattgtaccagcatgctatatcctgagagattgagctggatgtgggcagagaatgaaccactggatttagtaacatggagattgttggtaatcttgtaaaagcttgtgtgaaatcggttttgaaaggaggtgaggaagtgaggatggcaagcaactcttaagttttgctatagtgaagagcaggaaaatgggatatagctggaggggcctgtggggttgaaggtatttgtttttgttattctaaaaatagaaagccctgcagcatgtttcagtaggaatgatccagcaaagtgggaaaaattgaagatgcagcttagggctaactgtagaagcagaattcttgagtagacaggaggggatgaaatctaaggcacaaatgtaagagtagtccttagga

SEQ ID NO: 8773 - DNA, 1030 bp, Homo sapiens
gatatttcaagtctgaactactcagataactaagtattaaatgtaataatgagtaattaacttgtatccacccaaagtttgcccagagtgctttctaggaaacccccctcaatatacataagtagatacaaatctccttttaaggtctacagttcccactgtaagagggggaagaaaaatggaattgtattgtcttactggtccagtaggagctaacatgtctgacaagtggcctgtattgtcccaccttcagtccctcctgtttttaatgaaagttataaactagtgtctctctcgaccctcattgaaaactaacacctatgagtcagtctcaggaagtctgttgaatttgtttccccagtattcttgcttaaagaaaagttccctaggctgaagtaagccagagatttaaattaaaaaaaaaatagctatgtcagttaattttctttttcaatataatttctgcatggaaaagtctcatagtaaacttataatgaattttaaatttgctttagatatgtaatctgatcatttacctttctagaagcatttataactgctgaaagcctggattcttcattaaaatagtttctaacacagcctacatgtcatggtatctgtgtctcaactggtgctgactttgctttccgtgctgtagtcatttaagagaaggccacatggcaagaccaagaggccagatttatagccagttctcctttctctactctaaaaggcagcagggcatatgggatgcaggggcatataggtctgcagaaaccaattcagctctaaattcttgggcaaagcaagtttcaggtgtgaccatgtgtgaacagagtatttcccaggacagaatttaactccagaatatgtagtaaaaggaaaacacacacacatacacattcatatttgggaatcacatacttttctttctttccttcttttttcctgtaaactcttctgacttaatcacctcaccaggagagagtgctgatttctggtctttactatggtctgttttctctttgcc

SEQ ID NO: 8774 - DNA, 1091 bp, Homo sapiens
agcattagcagtatcatctagatcctgcatcgttttcattcttctaatctactatcttccttccttccaggtattacaaaatctcggcaaagaccaatatccacaacagtcgcttgaacagattggcacccgaattgccaaagttttggaaaaggtaagtcaccccacagaaaagctggaaacaattgccctccttctaacttcttttctaagttatttgctcctaagtgtctgtaacctcttctgttagttacttagcacttggtggctaaaaggataatgtgaaataactcccctcagaatgtttcagtcgctttttctatcacttgggtaatattcttttctgtctctttgcctgctttctgtggtgaaacttacctagtcagttttctcttctttaccccagtatgtgtgtatagaggtggtagtattggaaaccatggaatctaggtatatgaaataagtcagatattcttctgatggtgaagaatatttggtattttggatgatggatgggaaacacactttgaaatgtcttttctcttgaaatcatgaaacaaaatatttaccaaattgcattttcgtagagcctacagaaaatatcattgagaggttctaagactccttttcttcctctgtgtgatatttgtgtaaagaggaggggttttttaatttaattttattactttatggctaagaatctctctactttattactgtataatattaaagagctaatttaacatagtcatttaaacaatcaacccaacttcaagtatgaatgcgacactgtgagatagcaacttccttcatcttccgagtatcgcacatggaaaaatcatcagcagactccagttataatgaaactagggcaaacacatgatccccagacttcaaaaaaagtaaggattgccaaaagtggttatgatccacacaaaaaacatacaggatgaattgtagcagaattcaggcagggttagcaatttcagaaaacgtcagcaaaattctactacctgaaggaactttctacaggtagcccaaccaggaaaatcctgagtaataaaaacagagcagacacagcactgatacaa

SEQ ID NO: 8775 - DNA, 1026 bp, Homo sapiens
tgtagtctcagctacttgagagattgaggtggaaggatcgcttgagcccagaaagttgaggttgcagtaagctatgatcatgccactgcactccagcctgggcaacagagtgagaccctgtctcaaaaagaaaaaaaaattcgcctgcataaataaagatcacaaagcaaaaatataaaaacacaggagaaagattagcaatggatataaaaacaggagatagaaaactgaaatatattaaacttgagtgccaggccaaacaggtcagtagtagaaaaattttgtcacagaactgacgacaaaattggaaggagcagcaagaggaatacatcacaaacacagaaagggacatagaggacagaagtgacaagtgacgaaaataagagagttaaagaaaaattgaagataacatgttagaaacatattttaagctctagattcaaataaataagatttgagtcttattctatttctataaaatatattttgttaaaagggtgcactgtgtgccatagaaaactgatccagaacagtcaacagcagtgcttattgaagcaaaattactccatcttggaagaaaaaaaaaagagagaaagaaagaaaatataatcagatttttcaacagcaactcttgattccagaagacaatggagtaacatatttagaatacttaaagaataaaaaaagaggagctatggattttatatgctaccaaactgaccatcaatatagagtccacagacaaattgccattaacatgtaacaaatattgtttccatgagccccttcttgagaagactgtctagagataagcttcagacagccaaaatgaccagagcagcattggtataagggactagtagcaagcattatatatttgtctatagagccaagactgaataatggctctaagagaggcaagacagtatcgtatgttatggaagctcctcagcttaccatggggttacatcctgataaaccattgttaagttgaaaataccataggtcgaaatgcatttagtacac

SEQ ID NO: 8776 - DNA, 1019 bp, Homo sapiens
ttaactattaaaagaacaatattttcaaattgtttaacaaagcatagccaaacattatgctgtattcgagaaatatccaaataaaatttaacaagatttaagataaaaataaaagaatggataaagcatacaaggcaaatgcaaataagagagcaaagtttatgatctccatacctaacaaggaaaaacttagatcaaaaagcttgacatgacaaagaaatatactttaaaatgctaaagactacagtttacaataaatttgtaataataattagtatttatgtatccagaaacaaatgtcataaagcagagactcagggagattcagagaaacagattaaaatataccacataataccagacaaaaaattaataaggatataaagacctaaatagcataatcagtaaggtagatcttattagatatatcaaactctgaactttgattatagaaaatacatctttttgtcatttgaacatagaatattcattcatgaaaattatatcagagcagtgaacaaattccaaggaagaaaataaaagtagcattttctggccagaatgcaaaaaataataataataataataataactaacaatataaaagccctcctacctggaaattctaaaacatgtcatttaaacagctgagtcaaagagaaaataagaaatttagaatttcttgaagatacatgaaaacaaaataacagtctgtagaacagactaaaacagttttcagagaaatttgcatagcattaagtactgtgtcagtaaaaatgaaaaataagaagaaaagatataaacacccaaaaccaggatgaaaaaataaactaaaagcaaaagaattaacaaagaaaaaggatgcattaattatacagaaaatcagtagaaacaatgcatccaaaagttgagtttgaggtatatatcaataaaatggatacatcattagctaacctaataaaggaaaaggagattgccaaaataaaattcgaaaggcagggggacatgaccataaaaat

SEQ ID NO: 8777 - DNA, 1212 bp, Homo sapiens
gctgggtaacagagccagccataagcatatggctttttcccctcaggactttcatcttaatactacttggatgggagactgaagtgagctggggatctctaacaggaaaaagtcttttgggctgaggagacaaacacctacctactagacacctgaggtcattcctgttcctcagttgtggcactctggggattctgattagatctagattagttccttatctagcattaggtctagattagttcctaatcagaattcctggagtgccacagcagaggaacaggaatgacccagacagattgagtcttgccaaactgtatgccccaacttaacattatcaggcaggaatgagttgatcagtcttacgacctctttgcctaatagaattaagggaaaaactgccctgatgaagtataatatctggagccgctgtgattcttttatacagaaagaccagaatacaatttttagaaaaaaatactagatatgcaaagaagcaagaatgtatggttgataataaggcaaagtgcagacaataggagtagatttacagataatagagatattatactcagtggacaaggactttaagataactacaattaatatattcacaaaaataagggaaaagatgaagaaagtagatgaaaaaagtaccttttcaccagagaactaaaaactactttaaaaatcagataagcattctagaacttaaaagtacagtaatgaaaactcattgaatgggtttaataacagattgaacagagcacagcccagaattggtgaactagaaaaatatacagacagaaccacagagaaaataagggagtgtggggattgataagagcataagaaacgtgatggaaaaactccaaagatctaacatacatataattagggtctgggagatagagaagtaacagaatcgggcagaagtgatatttgaagaaatgggctagaatgttccaaaatggatgaaaggtagcctacagattctagaagctcagcagaccccaagcagaataggtacaatgaaaagcacatctaggaaaattaaaagcttaagagccaggaggaaaaatattatttctgtatcagttacctattgttacaaacaaacaaatggctgtttactattacagaacttaacagccacttatttgtttgtaattctgctgtctgggctgggctcagccgggcacttcttctgct

SEQ ID NO: 8778 - DNA, 1048 bp, Homo sapiens
acatgtttaaagtgctagaataagaaaactgcaggcttagaattctaaaccagccaaaatgttcttaaaagattaaggcaaaacaaatatgtgttcaaacaaacaaaaacagagacaatttggcaccagtaggcctgcactgaaaaagtaaaggaagtttatcaggaaaataatccaagatagaaatatggacttggaagaaagaatgaagaacactgggaaacatatgtaaatgaatagtaactgtacaaaataataatggtacaccctgaggagtttcaattttatgtactgtatatctaaaattcatggtagcaataacttaaatgatgagagggaagcaaatagagtttaaaagtcctaaggcttaattggtatcagccaagtagtaaaagtaataatttgcattggccttaataagtaaaaaagcatgttttaaactctaggctaacaactaaaaattatttttaaatgtaacttaatagaaggaaaatggaatcatgtagaacatttgattaatccaaaggaagtcaagggaagataaaggtacataaaagtagagcacaaatagtacaatggcgaatatagacccaagcacatcagtagttacatggaggaagactgtgtaacttaagaattaaatgtaggctagattaaaaaaaaaaaaaaaacggctatataactatacccttgtcagaaaaagtaaactttataataagaagcattactggagttaaagtggaatattttataacactaaagggatctgtggcaggctgaatagtgcccccctacaaagatatccacgttctaatccctggaacctgtgaaaactatatacatacacagtatggaaagaagaggactttgcagataaaattgaggatctggagatggagcgattatcctggattatccagttgggtcctaaagccaatcacatgtattcttataaagaaggagacagagacttaatcctgaagagtagaaggctgtgtgacaatagaggcagagttatgcagccacaagccaaggaatgccagcagcc

SEQ ID NO: 8779 - DNA, 1046 bp, Homo sapiens
atagaagggaacaaatcaatttattaattgtgggaactaccctagtttagataccctaagttccaataaagaatcaatatcttttgtaatagcctcatgagcatagagtcctggagagggacatggcttggctataagaaccgtgacactcagaagctcaaagctgtggcttttcatcaggtatttgtagtttatttacaatcatctcagtccagataggtttaccaaccagtgttattttttaccatatgttacctgtaacagatattagatatttagggaaataaagctagaagtttcatccaacattgttttccattttaggctcacggacggacttccacgaccttgagttaaaactttagggtagataggaattacctggaggccttgttaaaacacaaattgttggtgccctatgacttacttcctagctcagtagctttagggtgaggcttgagaatttacatatctaataagttcccaggtgatactgggtgatactgctgacctgaggaccccacgttaaaaccaatgccttattcaatggcagtgataacaaagtaaaagtgcccctttcctgtttactaaagggtccccatgttcttttagcttcagcctttaaaatactagtcattatttattatttcttcaaaagcccatctctaattgtctccttagggagtttttgagttcacattgacattaattgtcactaactgtcagcagttggcattaaccagactctattttaggattaaatccacctgatccacctgcactatcagaacattcaggacgcgactcaggctgcagctcagagggctccaccggtggccctagacttgcatcaagctgctgccattgccactgcaccagcttgtatgccaggttaccacatagtcctatgtaaccatgtgggctgctgtagagtaattcccctacttttgtcccccacttcctcaggtagaggctcgtagacattacattggatgagcaggcagctcagcttggtcagagccagccgtctgctccacccactttgt

SEQ ID NO: 8780 - DNA, 1043 bp, Homo sapiens
acttgttgttttcttttcttttctttttttttttgagacagggtctcactttgtcacccaggctggagggcagtggtgtggtggtgtgatcatagccaactgcagcctcgaactcttgggttcaagtgatcctcccatgtgagcctcctgagtagctgggactacaggtgtgcatcaccacaccagctcattttttttgttttttgtagagacaaggcctcactctgtttcagaggctggtctggaagacctgagatcaagcaatcctcctgcttcagcctcccaaagtgctgggattacatgtgtgagccaccatgcctggatgtgtttttttttgtttttttttttttttctctttaaaattgaccatattggttgattattcaaatgataagtccaagtcatctacatatgagtgtacagtaaaaggcaagtgatgtaacaccataagtaacatttgtgttgaaaagatttggccccagaggaaggataattgataaattaagggaagtatttgtgtaagatttagatatgaaatttgaactggaacactggaacagcagaggatcatagtatcataattgaagtgaaatgctgacaggttcaatttaccctgggttttggattttttttttttaaatgcttaagcagaagaagtgatcttaaaagaaaatactccctttatcttcaaattctgggactcttcaaaaacaaaattaagagcagctcatcttaaacaggttcttcacatgagttggaggggtgaactgaaataatttgaaaaacaaactagcagagatgacacttgaataattagagttgtgattaaaaatattgttccaccaaagttatgattttagaattgttgtatgtaaatagtactagtaagttttttccctacgaaattactatcttaatctcaagagtctctgttcttatgcagcctttgaatctactttctagtactaatatttaatattttcctctttaaaaccaattatatattttaagtattttattagtatatgttgaattgatactat

SEQ ID NO: 8781 - DNA, 1048 bp, Homo sapiens
gacttccctagagttattgccggccctctttgggaaaacattgttacacagagatagatcagtctaggtattcagataaactcagttaaaattgccttttttaaaatgtcaattggctgggcgcagtggctcatgcctgtaattccaacactttgggaggctgaagtgggcggatcacttgaggccaggagtttcagaccagcctggccaacatggcaaaaccacatctctactaaaaatacaaaaattagccaagtgtggtggtatgcacctgtagtccccgctactcgggaggctgaggcaccagaatagcttgaacccaggaggcggaggttgcagtgagccgagattgcaccactgcgctccagagtgggcaactgagcaacactctgtctcaaaaaaaaaaaaaatttaatgaatacaataaaatgggaatttatgctttttgtaagggatgctacttttgtgcacttcttagttatcatctctcagagaccatttctgtctgggggaaaagtctgatcactgtggtatgggaagttcttctcttacagggactgagtgatggggttattgaaacactgaaactaggttattgcgttgtcatggtaactccataataccatggtgtggtagttgagaagcttgccacaaatctgtatcagaaagaacgctttgttttatttgtcgatttttgtctacaaaacaatgcgtttgccctatctctaactggcaattccaggaaaactatccagtttctggaaagttatctttgccaccatttagtgaagttatttccatttaaataacctagtcattgtggaagagaggaagggctagacagtttaagaacttgaacaattggtgcctctcaagagtattacattgggaaacagtatagctaacaaacagattggctttggagtcagtgggcaagctgtgctgttactaagctggttgaccttaggcaaaaatagttaacctctgagcataacttctttcattttttagggggatgatacttttcgggattattatgacaattaaa

SEQ ID NO: 8782 - DNA, 1049 bp, Homo sapiens
ggtgtgatctcagctcactgcagcctctgcctctcaggttcaagtgattctcctgcctcagccccccaagtagctgggactacaggcgagtgccaccacaccctgataatttttttgtatttttattagagacggggtttcaccatactgaccaggctggttttgaactcctgacctcaggtgatccacctgcctcagcctcccaaagtgctgggattacaggtgtgagccaccgcacccggcctgaacaaggctttaaaccacctgcttcctgcttccattgacctctgacctcatctccactactcttactccgttccacccacatacacctcttgctgttccttgaacaaccttggcattgttgctttggggcctttgctttttcctcttcacggaatgctcttcccccagatatccatgtgactgacccttcttactctccttcaagtctttgcagaaatatcaccttttcaatggaaccgcccctcctacctataaactcacagtcgtttctccctcactcccactcctatccattaccctgccccacttttcctttttgtcatagcacttgtcaccatctcccctactgtatactttgctcatttatgatgtttctgttagaatgtgagcactgtaaggcaaggatctttgtcttttaatctcaagcacctagaacaatgtctgtacacagtaagtgccaatgtacctttgttgaattaatggaaatatctgttaagtaaggtattcatacatatatatatatatatatatatatatatatatatatatatatatttttttttttttttttctgagacagggtctcactatattgcccaggctggcctcaaactcctgggctcaagcaatcctcctgccttagcctcctgagttgctgggactataggcatgtgtcccagctgtgtctggcttccagtctttttaatattaagggataatgatttttgtgaattatcttctctttttacattctcttatcagctacaaatctaacaaatattagcggtttcccaacctctaag

SEQ ID NO: 8783 - DNA, 1127 bp, Homo sapiens
tatgtgtgcatgtatcacttcatttgctcaaaagtgtatttgcactataatatttcatgagtgaatacttttttccttgaggttctggtgtatttcaattggggggtcagatgttttgctttagttttctattttttgttctactttgcaaaataatttgtgaactgttttttctccttcttctgaaacctcaagtgctatacatctaaaaatgctagattgaaaataaaccaaggctggttagacaaagctggttacagagttatgatagcagggctgtcatactagttttgaaaatgtatagtgcactgagatcaaaaagatgtccttgaatagtattggtaacaggctaacctttcttcatctgtggtatcaggaaattacagggagttacagggaactgaacactctgccatatttaataaacattaaatataaatttggtagtatatttattattctttcccaaatctttacaaaattgttgtgagtagattttcctttagtaagaaagatttctccaattaaagttttagtaacaccttgctaattggtaaggcttattggtaagactaattcgtgaaaaattaaattctagagtgtgttgaccaaaatgtagtttttaattttgaaattgtgataaaataagtccataccttctggaactaccattctttttgaattgttgaagactctggaccaaattccctggaaaatctctttgatagtaaatacattgaatagtaagcatatagaaccagaaactgctataaagttaaccatagagcattgagtatatagtttatttgcttcatggaaataaatgaatactacagttggttgacaatttttacacaagtttagtcagccattttgtgaaaaaacttgagaaaatgaaaaaaatcaggaggcagaagagaatcatgatagaatagcagaactggaagggatgttagcaacctcttcacttcaattattagggaaatacatgctggaaaaggtaatgacttgcccaagattatgcatccagttagagaatggccaggccagacagttcagtggcaaagggcagaagtggtggatgcatctgtggtagattgattaaaagcaacgataggagcgatgag

SEQ ID NO: 8784 - DNA, 1063 bp, Homo sapiens
ggtacatctatatgtggatacgttactgtcctttgtgcatatttctttctaattacgttccaaatccaataagaagtcaattgtattcatcatcctgggggtatcatcttaactctgccatttttccatattaatgtattaagtataaaggttgtgaaatccatttcagatgctcctggtttgggaagtataaggttacagattcaatggcatttaaatttctttttttcctctctcctctttttttttttttttttttttttttgagatagggtcttgctctgtcacccaggctggaatgcagtgacatgctcactgcagtcttcacctccccggctcaaataatccttcccacctcagcctctctagtagctggaactgcaggtgtatgccatctttcccggttaatttttgtattttttgtagagacagggtttcactatattgcctaggctggtagatttctttatttttaaaatagaaatggtggggaaatgtaccatccgggtcactgaaaagctggagcaaagatgtatggaactcagggacatggactctactttgcatccctggtggggtgggggtgtgtccttactgatgtagactttaagaaccatgagagcctgatgtgtgtgtataaatatggctttaaaaaagaagacagagattgtttatctttaatagcagtaatataaggccgaagtctaaaaggactctaggataataagaaatgaatcctcaggctggcatgatggctcatgcctctaatctcagcactttgggaggccgaggtgggcagatcacttgaggtcaggagttcgagaccagcctggccaagatagtgaaaccccgtctctattaaaaatacaaaaattagccgtcatgaggatgcatgcttttaatcccagctactttggaggctgaggtagaagcattgcttgaacctggaaggtggaggctgcagtgagccaagatcacatcactgcactctagcctgggcaacagagtgagactctgtatcaaaacagaaaaaagacctcagtctgtgaagactttggtcata

SEQ ID NO: 8785 - DNA, 1032 bp, Homo sapiens
ctttttctattgattggaatagtttcagaaggaatggtaccagcttctccttgtacctctcgtagaatttggctgtgaatctgtctagtcaccagctattgagagcttggaatgtggccagtgtgactgacgaactgaatttttaattttgtttcattttaattaaaaattaaattaatagcaatgtgtatctagtggctaccctgttggactgcactgattttaagtcctcctgctaggtgataggtgtatctgggattgaattatgactctgatggtgcatatgtgtatctgtttagtcctttgaacttttataatcctgcctgaggtactataacatgcaagcaccttgttttcaaatagccacatttatgtgaaaagaagaggaattgtgttctgaaaactaagttaagtttaggttaaacctgaaacttaacttaatttaaaaaatcctctgactttttaacaaacccgtagattaaattgcatttgccctttggatgtgtctcaaaccctgaaggttttcttctgtgcttttgagttaaaatgcaggtagcatataacaggtgactgcaaaatggagggactgatgaaaacaaaacaaaagcaaccacaaaccagaacttatatctactctgtaggaattttgtttgaaagttggtatgcttttctgaatgtccttaagtataacaagtcttcctactctgagggtaaacttgggtattataaagaggcaatttgtgcttacgtctggtaaataatgataaaatacttgagtaatactttataatttgccaggcagttgcgatttcatcttctccttggaatattaaccccattctaccgacaagagaaccatgatttaatcaaggttctcattcatttcgcaaacccttattgatcacttactattgatcaccttgctattcatgtagatttctatgttaggaatgaaagaatagttcctctcctggaggaattaacaatctagttgggacaattaaacaaagaaacaataaattatactgtact

SEQ ID NO: 8786 - DNA, 1159 bp, Homo sapiens
acttttagatgattcttgacgttgagaggaggctgaagagtgtaggggttgtgtaattatttctaaataaggtgtggaaaaagcagtgggtagggtcataaaaggttagttttccttttataatctccattcattcactcatccattcatacagtaaaacctcattaatcacctgctttttgccaggttctgtgctagcagttagactgtgatgatccagacagaccctgctcttacagaatcctgtgtgatgaatgtcatgatgatattgtccaaaggacgaccagcatggctagatagtaggaaagagagttttattggcaatatcagtttgcaaaacagagagtctccagcatgaaccgaaagcactctccaaaacaaaaagaaaaaaactagaggttttataaaaagaagaaatgttacctattgctctttgagaaagttcactggctttgggtaagggtttggggaactggcaagtcctgattggtgagcaactgctgtggacaaaattagttccagagttgcagcaaacatagataaaactggtgtcaggttacaacgagcagtttcagcagtcaagcttgcagagaattacattcttggagcaatgttttgtaccctaagggcttttccccctggcttcttgtctctgtttcagtcgggtgtgacaagagtgacccaactggcatgatcagctttcacaaagggggagttcggagtactatggggcagagaattctgtatgaggttctaagttagtctacaggtcaaggaaggcttaatgggagatgagacggtttaactgaaaaacctcaaggatgggagggaaacacagctagaagtgtgtcttagttcatttgtgctgctataataaaatacataaagaacagaaatgtattttctcacagttttgcatgccaggaagtccaagatcaaggtgctggtaagttcagttgtctggaaagggatactgtgtgtttccaggatggcaccctgttgctgcatccttcgaatgctgtgtcctcacagagcagaaggcagaaagttggctgaaggaacacttcatgaagattcttttataagggccttaattccactcatgagggaggagacttcatggcctaatcacctcttaatgtctccacttcttactact

SEQ ID NO: 8787 - DNA, 1044 bp, Homo sapiens
atattaaagtttcccagggaatatttttcctgaattctgtgggatcagtaggaaaaacatagaattccaagagcgttcattgcaatttgcccaagtatggctaactaccatgagggttagtgaaaaattaagaagaaaaaaaagacgttttctcaaaatattaagttttttctggttctatttagtcttgcaaaattaatttttgttccattggtcagcagcatgcttttacaaaatgtttaattttggaatatagagtcctataaatactaactcaatttcctggtacaatttgtcagattgtctgcttttgtggcaatgttgggttacactgagcaggaagcctgacttacactgagaatgagttgattctctgcagcatcagtaatagccaagagtccagatacagcccttgctgaggctaattagtcttttgatgatcttcctaaagactctattttctgacattcagtttatggccggggcccttagacaagcttgaaggaaatgtagcaaccacctgttaataagactgatggttaatttattataataattaccactgtcagaatggaatcccctagtgggatataatatggaactaattaatatgatttagtcagtgattatcctgagggtatgagccttatcatggacattaaaggaattgatacctccagagactttcataatgtgtgtttttaaattgccaactattaagagtattttgtacttgttgataacgtaatcttagcaatcaatttgttcatagttgtgccagtctttgcatagaatcatgaatatgtttctattcatcctgaaaagtagtacatgttgagccatatttattattaattacaccttgcctacacataattgaccagggtgttgagcttctcttattgatttaatagttcttcccatatcatgggcttgataaacaaagcaggtctcataagagagctgaactaattaaagatgtggaatatgctatgtatctagttacacctaatgtcctccttgctcagtagtgctgcatagcgg

SEQ ID NO: 8788 - DNA, 1018 bp, Homo sapiens
atgatattggctgtgggtttgtcgtagatagctcttattattttgaaatacgtcccacaatgagaacaaagacacaacataccagaatctctgggacacattcaaagcactgtgtagagggaaatttatagcactaaatgcccacaagagaaagcaggaaagatccaaaattgacaccctgacatcacaattaaaagaactagaaaagcaagagcaaacacattcaaaagctagcagaaggcaagaaataattaaaatcagagcagaactgaaggaaatagagacacaaaaaaacccttcaaaaaattaatgaatccaggagctggttttttgaaaggatcaacaaaattgataaaccgctagcaagactaataaagaaaaaaagagagaagaatcaaatagacacaataaaaaatgataaaggggatatcaccaccgatcccacagaaatacaaactatcatcagagaatactacaaacacctctatgcaaataaactagacaatctagaagaaatggataaattcctcgacacatacactctcccaagactaaaccaggaagaagttgaatctctgaacagaccaataacaggatctgaaattgtggcaataatcaatagcttaccaaccaaaaggagtccaggaccagatggattcacagccgaattctaccagaggtataaggaggaactggtaccattccttctgaaactattccaatcaatagaaaaagagggaatcctccctaactcattttatgaggccagcatcatcctgataccaaagccgggcagagacacaaccaaaaaagagaattttagaccaatatccttgatgaacattgatgcaaaaatcctcaataaaatactggcaaaccaaatccagcagcacatcaaaaagcttatccaccatgatcaagtgggcttcatccctgggatgcaaggctggttcaatatatgcaaatcaataaatgtaatccagcatataaacagaaccaaagacaaaaaccacatgat

SEQ ID NO: 8789 - DNA, 1029 bp, Homo sapiens
agcatgagcccattgtaattatgataagtaaatgaatgaaatgaaatttttacaaggaatgggatttaatgtagtcttaaagtatcttcctacagaatacaaaaacttgcaaattaaaaaggaaataatagtaacttttatagtggaggaaactggcagacactaccttaataagagacaaaagttatcatcatcagtactgggacaaatcaaaatgatgtgccacctgatgggatgcagtgagaaacacagcatcacttctgtgatattctggccaaaagtgcatatcctgaatctaatcatgaggaagcatacaaacctaagttgagggacattctacaaagtaattggcctgtaataatcaatgtatcaaggatatgaaggtcaaggacagggcagaaagactgttccagattgaaggaggctaaccagaatggtagctaaatgcattgggtgattctgacttggatccttttgcagtaaaggatattgttgggacaactagtaaaaattgacaggctctgaggattagaagatagtaattattcatcaatagtaattattcctcaatgttaatttcttgatttcgatggttacatcatttaggagactgcagtaagtacatactaaggcagcattctcaaactttttagtctcagagccctttttactcttaaatattattgaggactccaaagagctttttttttttttttacttttttttttaaattatactttaagttctgggatacacgtgcagaacatgcaagtttgttacataggtatacacgtgccatggtggtttgttccacccatcaactcgtaatctacattaggtatttctcctaatgctatccctctgcttgccacccacaccctgaacaggccctggtgtgtgatgcgcccttccctgtgtccatgtgttctcattctcattgttcaactcccacttatgagtgagagcatgcggtgtttggttttctgttcttgtgttagtttgctgagaatgatggtttccagcgtcatc

SEQ ID NO: 8790 - DNA, 1075 bp, Homo sapiens
gcttagcttcattctccactttttatgccagagttgcatttctgcctccatttctagttagttgactgcctcgagcagttcataccagtttttttcttcttggtgtttggtcttagccactaggctgagaggcagttggccaagaccatctgataattattttcatctgaaaataaagttgggatgggtcatgactatatgtaaccacaactgtaagtagtgggatgctagctcatacaatttcagataccgactgatttgtcaataggcatcaatagtattgagtatctgtatatatcatggaattctttaagtctttaagaatttacaaccacaagattttactgtgagatatttaaacaaaacatttgaataaatggagagcccggagggaatgccacattgtcattctttaattgaaatgtttaatgtaatcccaatcaaaactgagactaaacaggtgaggataagcaataagtttttaaaaaagaagaacaaagtagacttgcactactagaaatgttgaaacccattttagatgtagcataactaaaactagggcattgtgaaagaacagaaaaataagataataaacagactatacttctggaatcagaatcttgtaggtacaagctgtccaatcactttaaacattcaccgggatcagccattggatgaggatgctacggaaagagcgtgatcttggacaaggcaactctgcagctgaggctgacacccaaaagctgtctgctggtgatactcccacaattagggcaacatgagtttcactgaaggggtaattgtgtggctcatatcatattcattgcaacctccaaatccaattgtttgtgcatctttatcctacacacttgtgggatattgattttaacttatttcaactcctactctggaaaaaagagagaggctgtgtcatttcttagacctttgtaatgaggcaaggatcagagtcccagaagaagtactactccaaaaactttggtaaagtgcttattcttccctagcagtaggctgttgctgagttgtagactggtggttttatgaaaaaaaacaggtt

SEQ ID NO: 8791 - DNA, 1064 bp, Homo sapiens
ttggaaaggaaacgtggtgggagtctgctggattcttctggggaaattttctctctataaaagggacatatcacagagacatacaatctctgcctccgaacattgttgtctgcatgcgatgcatggaatggcaatggccctccaggaaaggagccagcctaagggaaaagagaggagggtgggaaaatcccagatcatttgtgccattgttgagcaactgaacaaaacagaaccaagtccttgtcttcttgaagcttaatttgagtcaagacatatagacaagcatgtacattattaaaatacactacctagtgtattagaaggtggtaagtacaatgggataaaataaagcagggaagggcatgaggagtgctgggggggatggttgcatttattaaagggtgggcaaggcaggcttctctgagaaggtaacatttgctcaaggacccaccagagacaagggatgtggaagagcattccaaacatagggaatggtaagtttaagtcccgagtgtacgtggacaacattctgtatctaaacaactgctaggatcccctatggctagaactgaggagcaacggggagagtagttggaggtgagttcagccaataaactcacaccgtttattaggctgttgccacagccttttggctcttactctgagtgagagggaaatctctggaggtttgtgaagaggtgggtatcatggtctgacctacgttaaataggaaaagccgggaacgatggtgtgtgcctatagtcccagctactaaggaggcttaagcccaggcttgagaccccatctcttaaaagaaaaaaaaaaatggaaaggctcacaatagaggcagtgaagaaaagttgttttttaaaaaaggcagtggtcactgtattagtacatgattctgggaaatctaggtatgagttcagaaattttaattaacctgaaaaacttgtaccagaagccatttgcttatgctaatgtgaatacaaagagcttgctttggttcattactaaataacattcttcgtgaaagtgtcattgaatctttttagcaacatatc

SEQ ID NO: 8792 - DNA, 1043 bp, Homo sapiens
ccccagtatttttgacccgtcactggttgaatccatgaatgtggagctcacagataataggactgatggtagttatattgtaataatcctttaaagtggatggtgctgactcatttacatacagttgaggaaatgaaggcttagaataatttattcagccttttgttcactattaccccccgagaagactttagagatttttcctaatctaactctcatgaaattttaataccacaaatacactgtatagatccgattatgtactatatgtatatctctgctttataaaaaaaaatacaaataagattcccaccccaccctgaccaaatttcatctactctgtggagctctgccccagttgaaaatggattgtttagaagggcacataaagattgagtggttcagctggggttcagtcttgtatttttttttctaagtcttataccccttttgttacatctcagctaccttgctcttattaccagaaacagatacttttattgggataatcagaatattgaactttgttatggaaacaattcagaaaattgtataggaaaaaaaatgggctttgttaactttcccaccgctctttgagagtcgtttctagaaagaaacagggcatctagttccaaaaaaaactaaacttcctcattaaatctgtttatcccactgccaaaattggtgggaaccaactaattgtcattgtttgtttagttgggctataaaagttggataaattaagataatttttaaaaacattttctaacatttctttagtcgtaaagaccccacttccctttctcatcctataaaagaatggtcttttacatgatttccataatagataagacagttgttaaaaatcagttaaacaagtatagccctgcatagtactgttgcacctggctttcacatgctatcctttcccagctcctgcctggtccatatcacacatcaccatgccccatataccgacaccactactccctcacttataggaagaccaataggtaaaaatgaatgcaaacacaggtctggtt

SEQ ID NO: 8793 - DNA, 1050 bp, Homo sapiens
cctttataagtgaacacttgctccactaatgttcttggtgaattattttttaattggtgtccttcctttttcagctgaatgcaaactctttgttatccttgcctgtgccaccactttcctcattaaaccttatggatttggggaagcaattgtgttgcatttttctcccgaaaacctagtgtttcccagaaggttctaggatagagaatagttgaatataaatattttatttactaaactaaaagatagtttgagcaaagatacccatcagagttaagatcagagtaactctgtctctgtgtatacttacattttcaaagtttcttaacaaaagacccaagagtattattagctacttggggaaaggactagttagcttccaaatggcaaactcctagttaattggtttgggatccagagatggcttccttataattcagtccccagagaagcaaaggaagagcaatagatgtaggcctaggagagagaaccaaggcactacaggaacagtgctgaggaaaacttttctaggattgcttggaaggaaggaaaatggagcatactaggagtttatgcagcttcctggtccctgttgattaaggaagtcacaaataaaagagtcttatttcttcagaggctttagaaatacataatgctacagattctcttcttgctgttctcaatgttataaatagttttaagttgctctcatttgaagtgtaaatacctctaaagggctaatggcacctgttatttaattcttattggaactagtatattcagtttattccttgtctacttcttgctgggtcagttggctattttagttagtgaaagacatggaaaagtcattttaaaatggagaacaatagtcttaaaaaaggaaactatgtggtaggttgataatcagtggggtgcagagatggagacacgcagaaggacaaaataaaattatgttgagagagcaccaaaggtaaacttaatgtagttagaattattatcccctactcccgctttttctctgtagcccagtatatgaggatcaggctt

SEQ ID NO: 8794 - DNA, 1090 bp, Homo sapiens
gttgttaactatagtcaccctactctgctattgaacattagaacttattccttctatctaactatatgtacccactaaccatcctctcttcatccctcacccacccacacacacctgccccaccttctggtatctattattctactctctacctccatgagaccaacttttttagctcctacatatgaatgagaacatgcaatatttgtctttctgtgcctggcttatctcacttaacacagtgacctccagttccatccatgttgctataaattacaggattttattcttttcatggccaaatagtattttattgtgtatatatactaaatttttctttatctatttatttgttgatggacacttaagtcaattccttatctttgctattgtgaatgatgctgcaataaacacgggggtgcaggtatctatttgatatactgatttattttcctttggataaatactagtagtgggattgttggatcatgtgatagttctatttttaatattttgagaaacctccatactgttttccacagtggctatactaatttacattcccaccaacagtggataagaattctgctttctctgcgtccttgccagcatctgttattttttggctttttaataacagctactctaactggggtaagatgatatctcattgtcattttgattcagatttctgtgatgattggtgatgagcattttttcatttatctgctggccatttgtatgtcttcttttgagaaatatctatccatatcctcagcccactttttaataagttttcttgttttttaaactattcagttgtttgagttctttgtatattctagatattagtctcttgtcagatggatagtttgcaaatatattcttccattcaacaggtagtctcttcactctgttgattatttcctttgctgtgcagatgctttttggttgaatatgttttcttatagagctatgttaaatagatgttcacattttcattgtgtgaataaatagctttgatagctttcctttgctcaattatcagagacacagctgaagactctctattgtttgtttttgtttttgt

SEQ ID NO: 8795 - DNA, 1054 bp, Homo sapiens
gggtacgtttttagttacttggattcagatcctatttatggtaagcaggtttctttggggtagagggagggcagatgtggacaaagtggctatttgtggtatcctaattctgggtatgaatatcctggattccaggggctttgcctggattctagggtgagttgttatactttattctctccatgtgtattatgataatacaggtgattaaagcatcttgaattttaatgtaatcttttaatttgagcttttgattgtctttttgaacattatgcaatcatgttttctttgtactgttctctctaaaaaatgaccaaatgccaaagattacatgatatgagaataatttgcttatattgtatcatttttcatactaaattaatgagtgggaaaatctacattggctcctgggtataaaataaagttccttctacaaactgttgattactgacgctacaggagtaaaacagaaaaagttttattcatattaggtttcttttagaaataagattgtggaggcttttctaattgtaaaaacaatgcaagattgttgccaaaagtatgagaaatatatacaaacactaagaagaaattaagtcacttttagtcgtaactgcagatggttacattttaatataacattttcaaggattttctaggccagccaatgcatttttgctgaataatctaatcatctaaataatcttaatctaatagtactgattttgattttgtataagcgaaataagcctcttatttatttcccagccagaatatacattgctataccagtaaatactagtaaatattttactcttgacattgaatcaaattctaaatttagctgtcatcaagacattcatttttcctcatatatttgtatactttttggctagcttgcatataaagtgataacaataccttaagtgtgatataacatatatattaaactatcccctttagattctaggcatctaggattttcttgtggtgaggattaatgatactgtcactgaaaatatatatgtatataaagaggaaacactttccctgc

SEQ ID NO: 8796 - DNA, 1070 bp, Homo sapiens
gtgacagaaggtagcattaggccttgtgaacagacaatcaatttctaaaattccgttaataagcaagactgtctcctctctcattctcacaacttgtttccctcaaagatcttttctccagattttccacctagtaatctggtgtgactagaagctactgtaaaaacacattagcatttgtcttctgaaatattttattttgataaacttttgtttttccctaataatgaagtataaactgtcatttcatctgtcattgtgttttgtcatatgaattcattcaaggtttaaactttgaatgaatttgatgaaaaaataaagactcaaatgtttgtgagggaaagcacagtcgtcattctgtgtgaatacatcagaatgttgaagtagaatagaaagagaacctcttattaattctgatcaaaggggcaaaaaaaatgtagtctaaatgaagctcagagttaaaaatgattggtttttctttggcggtgtttatgcccacaaattttttggactaggagtatttatcagctgattctgcctcgtactccagcccacacatgtttcctgggtgatcttattaaaatacaaatcagataatgttgctttccttcctagtcctccagtggctgcccataaggtttaggattaaattcgaactccacaaggccatctcctttcttgccactccattgtcctccccgacgttcaggccagagtggacatcccagtgtctagtacatgctctgccctctgaagtgcccatgactggctcctctgttggcatcctttccccaactcctctccagttcttctcactgtatctcctcccagccctatttgcacctgaaccctatggctgctgtccctctctcaaggcttgggccacagttcccctgccctggaaagccttctctcagctccttggcacatttggttaggcctttctttgggctctcgttggagctccttgtatacctctgcctgctactgtctggcccttccctgtctccccacttccatgtattctcgagaacagggctttttatcttatttgtctctgtgttgctggc

SEQ ID NO: 8797 - DNA, 1601 bp, Homo sapiens
gaggatcccttgagcccaagagctcaaggctgcagtgagctatgatcgtgccaccgcactccagcctaagcaacaagcaaaaccctgcctcaaaaaaaaaagaagaaaaagaaaaaaagaagtatcattgcagtgatacttcacacatgtgagataaacaatacattcactctttgttgaactaccatgcccaggttatttcaaactacagaaggacctcttgtatcatgactcaggacttgttacaatagggtttccttatactctgtgttgaatcacatccaaaatgcagcaagcttaagcaataaagaacctaacattattgaagttcctctaaaggtcatgtccagatttgtcaccctacacccatccagtcaggtgtcttttagttacccaaacagtttccatattgttagactgtgtttcttctaaaaaagaaaaaaagggaggtggttctatcttatcaataaaattgtttataaaactcagaagtagaatggtgagaaactagggaagaaaagtagtaacgcaagtctgagaaataagatgtctattttagaaggatcaaagctgatagaacaagcttaattagccataaattatggagaaagttggcattatcccattagaagaataaagtatcaaagatctcctacttggtggttctgtctcaatgttgagtttactaagtgtgaaaagtatcctatcctgaatctgtgctctctggattatttaatgctttcctttttaaaggttcaaaaaggtagatttctgcttatttttaatactttctctggtctcaaactctgttttattgagagattgatttgttacaatttgttttatggtatcatgtgttctatcaagttggctttagatagccacttctcttttcttctctctctgtaaagatacagatgtttctaccactaagagcagtcaagcaccactgtacattctgagtttgtggccttactaatcaatggcatgttttctggggtgggtgttccctttctagagtgtcctgccatacttcgtagctacaaaactggctaaaatccggaagccaactttggataagccctctccggagacgtttgtgaagtctgcaattaaaacagtcggcctgcaatcccgaaccaatggatacctgatccatgctcttatggtaggtagattttttgaatcacaaatcaatactttctggcttggggtttctttcccattgagttacaggatagtatgtaatagattagcacatatacattgtccagccatagtaacaagatatctatatcttgttataattataatggtcgtatacccaagaactttaaaatctacctataaataaaaacaacactataataaaacattaaatcatatgcttcaatttagcccaaattgtaggctataattacatatctctctcattctgtttccctagggctcgataatctcaaacctgccttcttggatttatttgaaaatagtcatgaatatgaacaagtctacacgggctcactatctgaagaaaaccaagaagaactaagcattgataactgcattgtaacttggccagatgctccagcatatgcacg

SEQ ID NO: 8798 - DNA, 1224 bp, Homo sapiens
ttgttctttatcaagggtagctaatgacatgaaaataattgtgaaatatggaattatttctgacacatgaagcccactaaactatgctttcttataatgcatatttcttctcagtttaaatgtatgtaaatatcgaagctatatggtatgatttataaagataaatgggccaaagtgtacattgagactggcagccatctatggtaccactgaaaccctgacccagaaaagtggcttgcttggacacccagctgcctttgtttctgcattaaaccaatattgatcacacatatgacacaggctagtcctataaaagtaatgacttcatagaaatggcattataatttttaagttgatactctacaggtagctattgatataattagttttaataaaacatgctgcaaccatggtatacaacaaaaatacatttctttggtgattgaaattaaggccgtatttacaatgacttaatataagactgacttttatcctgcttcataacttgtatggagaactcaccaagaaagaattcaatactgtgaaatatgcagcaagaagattggtctttacctaggctgtgtttcctaagctctgagttttcagcaccagtagatttgtattaaaagaaaaaaaaatggggccttagcttctggcttttaattttgccagctaaggacataaaacaaaaataaacaaacaaaaacaaatagccatctgctatcagcatcattatgtaaaagaaaatatattttagcccctaaaattaggaagaatgtaatctcagaataaaggttgtcatttaagttgaataaatatatagctttatgaaaaacacattgtttgcccttttttcctctcatttcattgtagaaatggtgacaccacaatgacctggacagtattttatctgctttcacacattggttggttagttggttggttggttggttggtgagttggttttagtgtagtggtggtagatagaggagggattctcttgcaagtatacaaaatactctctttttcttttatcccagttagaaaatagttgtaggctaagcacagtggcttacacctgtaaactcaatgctttgggaggctgagacaggaggattgcttgagcccgggagttcaagcccagcccgggcaacgtagcaagctcttgtctctacaaaaaaattaaaaaataaaaaattagccaggtgtggtggcacgcacctg

SEQ ID NO: 8799 - DNA, 1191 bp, Homo sapiens
ttctatttttagtaagtatctgagtttatttgaattacctcctttgcctcaccccatgattgagtgtatgcatgtatacaaacatgtatatatacacatttttattgcttttccattcatatctttacattatgatttatttgacctgttaattattttacagtatttttaaatgcacagacttaagagttttataaatgtatttccttttcaaaaaaattttgtaatgttaatatcactattaataagacaattttatattttgtgaatcctgataaaatgtgctgaagacacaacattaattatgtgatattcctgccaaaaatgcataacatgaacatagtagagagaaatatcagaaaaagataaaatgaggaatatcctacaaagttaccagcctatacttctcaaaaatttcaagttaaaggagactaaagtgacgtgacaagtacctgcagcacgtgtttctggactggatcttggtcaagaaagcattttttaaacttttgttctttcggacatttttgagacattcggtaaaatttgagtaaggtctgtaaattattaatagcattatatcagtgtgacttcctgattttgataataatgtcatggttccttgaaaaagtccttgttttttaggaaatagacactggagcgtttagggttaacggaatattgatatgcaactgaatcacaaaaggtttaggaaaaattatagagagagaaaatggtagagtaaatggggtcagatgttaacctttggaaaatctatgtggaggtatatggatactttgtactgttttgcagatttactgtaaatctggaatcatttcagaatagaaagtttaaaaatagcttttgttctaactaattgcatgtggtcaaagaacatgcgagtatgataaagcctgggcaaatttttatagcctttctctgcctcagctttaccatctgaaaaatggaaataatagcacctatgtcatatattgtttgagaggaagttaagacacttaaagtactgagaactcatccaggcacaagtatataaatatatgttgtagtaggctgaataatggcccccaagacatcaggtcctaatccatgaaccctatgttaccttacgtggaaatgaggtgtttgcagatgtgattaaattggagatcttgagatggggagattttcttggat

SEQ ID NO: 8800 - DNA, 1498 bp, Homo sapiens
ataatggactttggaacatcataagtctgatcaaccccttccctacttacatgctattgtaggccaatattctaacctctgattttattattattattactattattattattattattattattattattattttgagatggagtctcgctctgtcaccgaggctggagtgcagtggcgcaatctcggctcactgcaacctccacctcccgggttcaagcgattctgctgcctcagcctcccgagtagctgggattacagatgtgtgccaccatgctgggctttgttgtacttttagtagagacggggttttgccatgttggccaggctggtctcaaactcctgacctcaggtgatccgcccgcctcacctgcctgtaatcctgcctcccaagtgctgggattacaggcgtgagccaccgtgcccagcctaacctctgatttttagaaccccataagttagacatttttattatcttatacacacatttttgtataaaataaattaccacctgtttatcaagttccttgtatacctttatttcctacatttgagatattctggtgcatatcataatttgacattactttttttctttactggtgctgtataaaatagtggtgtgatttagcattgatggcatcttaaagttaatgaaatactggatcatattactgacttctggcttccattgttgtttttcagaaatcagtatggtgccttttgttgtaggtgatatatctctggcctctttggcaataccttttgacttggtgttcctcagtttcatgccaaggtgtctaagtgtggaactctttatttattctacctggtttacagtatgcttcctgtatctatgaattcatgccttttgtcatttctgaaaatttatcaggcattatctcattgtatctatctgagactcaagttacaagtgccaagtcttcattctgtttttctgtttgtttgtttgttttgagacagtgtcttactctgtcacccaggctggagtgcagtggcgcaatcttggctcactgcaacctccgcctcctgggttcaagcgattctcctgcctcagcctcccaagtgctgggacaacaagcgcccaccaccatgcctgcctaatttttgtattttttttagtagaggtggggtttcaccatgttggccaggctggtctcaaactcctgacctcaaatgatccacccacctcggcctccaaaatcatgctgggattacaggcgtcagccaccgagcctggcccattcccttttaatctcacatttatactttccacccttctctccctgagctgcatgctgcatcatttcttcacatctatattgcatttctataatttttcacaccttttctgctgttaaaaccattcactataattttaatttaaaatgtttttcattttaaaaagttctatttggggccaggcacagtggctcatgcctgtaatcccagctctttgagaggccaaggtgggaag

SEQ ID NO: 8801 - DNA, 1031 bp, Homo sapiens
attaccttgcagagattcatgctggttcctagttcaaaaaacctctctgggttgaaacattgagtctttgtgcttgtcatccttcatgtgctagaggatgagaaaaaactagaactagagtaaactgaaccagagtctagcatttcaggaaaatgaactatttcttctcctaatatccctctttcccaagcttttctagctgtattccttctgtgtacaccctggtatgcatttgctgtggggctgagtccttatgactgacgagtgaggtcaatatgcctttttctgtttctcaggctcttttgctatttgtgaaaaaaaatctgatgtttttcttgttaactttgtatttattctatggctgcagttctcagacttccgtctgattttgctttggcttgtttctgctgctgcttttgcttttaaaaaatttccatgaaagtagatgaagatattctagtatataaattaagctcatccaggggatagagttaaggtccaagaaatagctccctgtttagttcctggaatcttgcctttggcaaataatgttatgttttattgaaagagactttgaagaaaatggagttttgcttatggcattgggatacacagaaatgtgacacatttcagagcttctagaaatttgtaattgcaagctaccactttactaaaatttcagggagaaaacattgactgagggaacatggccttttcacgtaaggagatagctgcatgctttggtttcaagggctgcatttagaatgtgagccagggaagtgccgagaccctttatatctgaggttgattttgaaacgtggagataatagaattaggccagtccaacatagcctgctttccttgtttctgtcagagttaatttatcttcttgtcagtagtcatagcagagaatttgaggattaaatgggctgtggggaagttctttctcattcattctagttaatcttttaaaacaagatttctcaacctcagtagtattgccattttgggctggataattctttcttgtg

SEQ ID NO: 8802 - DNA, 1021 bp, Homo sapiens
ttccctccagatccctcctatgacgcaggggaattatgggagctataattcaagatgagatttgggtggggacacagccaaaccatatcaggggctgatctcagtggatccaagctttccaaagtgttttgggagttaagagtgcaagtatgccccaaacggtccccaaagaagttaaaggcttggagagggactggggacagtggacagagggtctggggtgttctggccagaaagtgacaggccctcgcccactcctgcccccagaggctttcctgatccccaccccttactatggcgctatcacacagcacgtgtgtctctatggcaacatccggctggcctatgtctacctggacagtgaggtaagagtcttgacttcctaggtggaacctgggcctgcctgtggtcaagagtttcctgggtctgaatttgagggtggtccatgctgagggctctggggttgtgatgagtagggaatggagccttctgttgctgcatggctgcctgtgcctgggttccccagtggctccaaagttccagtctctgagatccctggggttgatgtagaagccaagagccagacccagaaacagcaaggtaggaacagagcagggtagacctaagcatgacacccaagagtgatgagggggtctctgaagtgatgggttgggggtggatggcagtaagagggagggaccccacctgcttttccagagactcttctgaggaggctggggattacaggggaggagaggcctgagagttcatatgtattttggggggcaatggtcactgaatgtggctggtggctctgatgggtctttttccaggtcactgggctagacacacgccccttccagctcacagtggagaagctggagatggccctgagagaagctcactctgaggtctggggatcaaatcaaacctgaggctgggtgtgggtgggtctgagcagggtctggacccctcttcttgtgactgatctcctcccgggagtagggttgatacccggtga

SEQ ID NO: 8803 - DNA, 1051 bp, Homo sapiens
tgcccaggctggagtgcagtggcatgatcttggctcaccgcaacctctgcatcccaggctcaagagattctccagcctcagcctcccaagtagctgggattacaggcacgcatcaccatacctggctaatttttgtattttagtagagatgaggtttcaccatgttggctaggctagtcttgaactgttgacctcaagtgatttgcccacctcagcctcccaaactgctggaattacctcactggccttatatttttttttgatagctatcctaatagatatgagacagtatctcattgtggttttgatttgcatttctctgatagttagtgatgtttagcatcttttcatacttgttggccatttgcatatcctcattggaggtatctctattccatgtggtttgcatttcctgctgctaatgatattgaacaggttttcatgtgtgtgttgcccttttatgtgtattcttttgtgtggtgtttaagaattttgttcatttaaaaaattgtctttttctaattgaagtgtaggagttctttatatagcctggaaatgagtcctttgtcagatgcctttaaattatcaacattcatagttaacaaagtctaaattttaccttctttatcctctacctgaacatgaaatgacctcagaacattgagctcttactcctttactttggtctcatttgatattgttgactggtgtattagctacacctagtttgttttttttttttgaaatggagtcttgccctgttgcccaggctggagtgtaatggtgcgatcttggctcactgcaacttccacttccagggttcaagctattttcctgcctcagcctcctgagtagctgggattacaggcgtgcgccaccatgcctggctaatttttgtatttttagtagagacagggtttcaccatgttggctaggctggtctcaaactcctgacctcaagtgatccacctgcctcagctgcccaaagtgctgggattacataggcatgagccaccatgcccggccctagtttttaaatttctaaattatt

SEQ ID NO: 8804 - DNA, 1031 bp, Homo sapiens
ttccttacccaaatatattgcactatctcacattactcaaatcaatcaaattccataatttatttcgattgtgtctagcatttcgctatgattagaaagaatgctgtcatggaactttttgacaaacattgttgagaatatccatagggcaaactccgtacagagagcttgttggaatgaagggtaccagcattttccgtttgatggatagtaccaaattgccctccaggaatgttatacgctcaccagaactgattataataaaacgtctacatatttgttagttttataagcaacgcgtggtgtctcgtttgggtttaaggattctttaattatgaatgaggctgtctgagcatttcactgcggagcctgagcgcgcctgcctgggaaaacactgcagcggtgctcggactcctcctgtccagcaggaggcgcggcccggcagctcccgcatgcgcagtgcgctcggtgtcagacggcccggatcccggttaccggcccctcgctcgctgctcgccagcccagactcggccctggcagtggcggctggcgattcggaccgatccgacctgggcggaggtggcccgcgccccgcggcatgagccggtgaccaagctcggggccgagcgggaggcagccgtggccgaggtaagcgcggctctccagggcggcggccgggcgggcgctgaagcgagggctcgggcctccgggggccgctgctgggtcgggacaagggccgagggagcgcggccgcgcggaggctccgtggaggcccgtgggctgcgagaggccacccccagccccgccggggctgtgacaatgactgcccgcttttggagcgctccgatttccactcctgcttctccttctcctccggcggcggccgcgctttcagcatcttggtacccacctgttctcctagccaaccttcgcccccagtccgctccttcctttcctcctgcgacccgccctccgccctccgccgtgacccctcccttcctgctgccaccttcccgccagccacagggatc

SEQ ID NO: 8805 - DNA, 1098 bp, Homo sapiens
acagggtctccattgtcgcccagactggagtacagtgacgcagtcatggctcactgcagcctcaacctcccgggttcaagaaaccctcccacctcagcctcccaagtagctgggagtgtagtcgtgcaccaccacacctggctaatttttgggtttttttttgtttgtttgttcgtttttgagacggagtctcgcactttcatccaggctagactgcagtggcgcgatctcggttcactgcaagctccgcctcccaggttcatgccattctcctgcctcagcctcctgagtagctgggactacaggcacccaccaccatgcctggctaattttttgtgtttttagtagagatggggtttcactgtgttagccaggatggtctcgatctcctgatcttgtgattcgcccgcctccacctcccaaagtgctgggattacaggtgtgagccactgtgcctggcttaatttttatattttttagtagagacagggtctcgctatgttgcccaggctggtctcaaactgctgaactcaagtgattcttccgcctcagcctcccaaagtgctgggattacaggtgtgagccactgcgtctggcttaaatatatgctctggatttggtattagatgctaggaatactgagcagagatgaacaactgattacaggaaaaatcacaaccagtagaggagacagacttgcaaatacttaaccaattcataaaatgtggcaagtgctagaatgcagtgtatgaaaggtgatgtgggtgctcacagggaagatcctctctctgtaaagcactgcttagtaaggggcttttcccctttcttttctcattctttccctctcatttcttctattgtttattccacctcaagtgcttgcttttattcctcagagtttgatacagatgtgtgggagttcgcttagcttgtgtcgacacacttcacaagcatggaggagtttacgtgtctgagggcatccctcagccagtgcggggtgggctttggttgttgaatgatgtggcttccctccaaagggacagctctgaagtgtgttctccgtgcttctccagagggatcctagaaggactgggtatt

SEQ ID NO: 8806 - DNA, 1029 bp, Homo sapiens
agacggggtttctccatgtttgtcaggctggtttcaaactcctgacctcaggtgatccacccaccttggcctcccaaagtgctgggattacaggtgtgagccaccgcacccggcctcacattcttgatagtgtcctttgatgcacaaaagttcctcattttgatgaagtcaatttatctatttttcctttggttacttgcagttttggtgtcatttttaagaaaccattgcctaatccaaggccatgaagatttacccttacgttttcttctaagagttttacagttttggctcttacatttagatttatggttcattttggttaatttttgtatgtggtataaggtgggggtccaacttcattcttttgcttgtgtatgtctagttgtctgaacaccactggttgaaaaaacaagtcttcttctattgaatggtcttggtacccttgttaaaaatcaactggccatagatatatgggtttatttttggattgtcaattcgaatctgttggtctatatgtctattatgccagtactacattgtcttggttaccttagctttgtattaagttttgaaataaatgtaagttctccaactttgttcttcctttttcttgttttaagagacgaggtctcgctctgtcaccctggagtgctggatcgaatgggtgggatcataactcactgcagccttgaacccctgggctcaggtgatcctcctgcctcagcctcccaagtagctaggactataggtacatgccaccacgcttggctaattttttatagagatgggttcttgtgatactgcccaggctgtgttcttctttttcagagttttcctgactattcaggtcctttgcattttaattaactatttttgttataagtaaatataaatgaaaaacagtctaaactctttgtgcttatgcaactacaaaactgaaacaaatttacaaggttaaatataagcacatctacaaaactaataacattcagattaacataattgaatatgatagctgatgctgtt

SEQ ID NO: 8807 - DNA, 1033 bp, Homo sapiens
tatatgccagataaatgaatagatttgcatagatagctaaaggagaaaagtatttgttaacttagaaacggaataaaggaagagtgtactaggtgggtgggatttcacatgcaaaggccctctggtagggcagagcatggtgtgttcaagtgactgaaataataccagtgtggctagagcacactagtggagtggaggcagggtgaaagattaatggagtagggagtgggaggtaaaaaaatggagctgtaagagaactcctttgagaagttcagccagtgaagaagggaggggaaagagataatacttaccggaagggatgtggggctgaaggaggtttgggatgttgtttctgcttgtgaaatgaaacaagactgtgtgtagaaatgctttctgtgaagggctgtgtgtatgtaaactgttttgctgttgtctccagagcatctgtggttgtaccagaagaaaagatgtcagatgtgtacagtattttgcagagcatcccccaaagacagattgaagaaatgcagagacaggtaagaggccaagtcttggggaggtgacatgggtggtaccgaaatggtggccttgactggatacagagggacaggagctgaatgcctgagtggggtttacttcctccactagatcaactagccaaactgaaacgataggaaattaatgttaggtgagttgcatcaaataaggtttgaaataataactctcagagaactgtgcagaggtaagcctactgcaattttagggtcttaccatagcagatgcaaagctgaagctctttggagggtttgtagtcacagcaggtgatagtcgtagtgactaagacagccatggaagctggaccatttcagggcaatacttctgtgtagctattgaccatgatactattgctgcacaaactagcccagcttcccagttcagtcatcctttgtaattcgggaatccttccctctcttctggaacatttgccattttcctgcctctctttccaaatttctcttctaccttctgacacccc

SEQ ID NO: 8808 - DNA, 1024 bp, Homo sapiens
aaggcaaataaaacagcttcatgaataaggaagtgaaaaaaagccgtctcatgttttatgcggcaaggtgttttacatacaactaaattaacaaaataaatattttaagtaaagaaaatgattagtatgtggataaatcccaggtatattaacctttttgcttcaaaatccctttttatgttaaagaaagtaagttctattaattgctgtttgttggatccccaagttaaagggatatcagatatttgtgaacttcctctgctcttctggagaaactggtaacatgggcatagtaaatgtcttcaaaaacctccagtccacaagaagtgcctttaaagggttttgctgatatttttttccctcgaattttaagttagttgtcaggtaactcttatatttatgaaaatggagtatgtaaaagaataaacaaaaaaatcttgcttacagtaattctaaactaaaagtaaggatgcttgggttataatttggccttattattgagctttttgagctgtcagatgaagattattagagcctatctctgggaccttcagactgttatgaggttgtccaagaaggacaccagactccctgctcttgtgctgtcaaaaggaccagtgagcaccaaagagcctgttggacacagggctttggaaagttgggaatgctcgttgctactattttgttaaagccaacaaatgaaaaggaataattagcctttggcatatgtatttggaaaggcttagaatctctttggaagttttcaggcttatcttcagacacagctttgaaaaataaatccgtgatgcatggaaatattttccagctgttcacctgaaataaatggttctgtcaatgttagtgtgttaagagtaagtttcctgtagctcggatctcttgaatctcctcatttgctaagagggagaagatttgcctttttaacagtgcagctgtttcttaaacttcttgagggagcaagtgaatgctttatttaatctgtcttggttctcttgggttttggggt

SEQ ID NO: 8809 - DNA, 1050 bp, Homo sapiens
taccagaaaccaggcaaattgcaacttcaatgagaaaagataattaacagacgccaacaaggtgacacagatgttagaattatctggtaaagatttttaaaaggttatcacaaaaaaagcctctaataagcaattatgactactgtcaaaacaaatggaaaacagaaagtttcagtaaaaagacagaagatataaagaagagctaaatggaaatttcaaaactgattacaatacctaaaattgaaaactcactggatgggctcaataggagaatggagataacaagaaaaaactggagaacttgaagataaatcaataggaattctccagtgtgaacaacagagaagaaatagattggcgaaaaatgaacagagcttcagagacttgtgggacaatcacaaaagatataatatttgtgtcattagaattttagaagaagagaaagaatgtgggactgaagaaatatttgaagaaataatggctaaaaacgtcccaaattagcaagagacataaatgtacagactcaagaagctgaaccaaccaccaacatccaaagaataaatagtataaatttacataaattgtgtaacctgaataaattgtagcaatacttcttatttcaaatagtaattagaaaagaggaaaaataaactggtttatatatccaaatatatatacataaggaaaggagaaaatatgcataggtgccacattctttgcttctgttgcttgatctccagaccataggtgatatttgtaactttcttcttcttcttcttctttttttttgagacggagtctctctgtcgcccaggctgtagtgcagtggcgcaatctcggctcactgcaagctccgcctcccgggttcacgccattcttctgcctcagcctctccgagtagctgggactacaggcgcccaccaccacgcccggctaattttttgtatttttagtagagacggggtttaaccgtgatagccagcatggtctcgatctcctgacctcgtgatccgcccgcctcagcctcccaaagtgctgggactacaagcg

SEQ ID NO: 8810 - DNA, 1050 bp, Homo sapiens
ctttgagtggggtttcctgatgcaggaagcaccaagaagaaagacaccaaaggagaatgagcttggtgtgtgtggtagtacaggggacccatcatcatagcggtgtggcagagtaggaattttgttttggtgagcagtggaagctaggctgcttagggtaatagagggccagcggaggtgcaggctgagaggtcaactgaaaagtttaatgtgacaggcagaaaagaggtgttgtaggtttttagagaagtatatggtaaaagccatcagatcacaagatgacttagaggttgcagagactggagattgtgctagtggaaaatctatagacttagtgtttgaatggattgaagaaccaaggagaaggaaaagaccagcttactccatagctcagatttaattagtgatgagggggcctcactaattggagaattccagagctgagatgctgtataacgtttatattttaaacagaattagtaaaacttatggctatctatatgtgtattcaaggagagtaagagattatagaatctgcaattcttttttttttttttttttttttgagatggagtctcactctgttgtccaggctggaatgcagtggcacagtcttggctcactgcaacctctgcctcctgggttcaagtgattctcctgccccagcctcccgagtagctgggattacaggaacctgccaccatgcccagctgatttttttgtatttttactagagatggggttttcaccatgttggccaggctggtctcaaactcctgacctcagatgatctgcccgcctcggcctcccaaagtgctgggcctacaggtgtgagccactgcacccggcctagaatctgcaattctaaataaatgatcccactttttctcttctcactacaacaattgaaaaatagaaatgacatatcctagaattagacttcataacctcctttaaaaactagcagatgactgagcacagtgacccattcctgtaattcctacactttgggaacctgaggtgagagaatggcttgaggccaggagttca

SEQ ID NO: 8811 - DNA, 1025 bp, Homo sapiens
tcattgcctcatgaaaaatagtatttggggttaatctttcatttagctgctttttgcttgtgtttccttctctgcctcagagcctcacagattacgaggttccagtaggccctcagatgtcagatgtggagtctcactagtttgctgcacagctgactggagttctttcttttaatggtgtgagcatatggctttctttgctagatggaaaccacattcacaaagagcctgtagcttttagaaatgaagactgatgggagcaaagggttttttcgtgttccctgcctcctctccctacctggttctattctgaatctggtcattcagcaggcacctgtgaccctcttcatatctgccactggcaccacagagctgaagaacattgaccctgaatgtcgtttttgacatcataatctgacttctttgttttcaggtgaggggctgagcttggggacaataaggtgctttttagaattagcatagtaggaagtcagatgacttcatgaatagaagattggactgggagttcgggccaatttagacttgacccagcactgtaaccttgggagaaccatgtctctccaggtctcagttttctcatctgtgcaatgagggaactggaccaagtcacctctgccttctacatgatctctgaggttgcagatctctgagatagcttggacagtggtcatcagctccaactgccaaagtgtgagtcttcttattatccacagaaggctcatggttatgctgtccagtgagctggtacagatacaaggatgaggcacatgtttaaagacactttctttggcagtatcttcctagtagtggtaattattgaaagatttaatggcacagatttttttatcaactatggccaaccccagtctgtctctttgccatcttcatggcacctggccttaaaaaataacttgcaaagaatggagatcaggtgccccagtaccaaggtaccaacctctagccagactggagcaaatgggaatgctgcccaaaccccagaagcc

SEQ ID NO: 8812 - DNA, 1557 bp, Homo sapiens
aaaattatgaaggctgtcctatgtgaacttcagctttcacagaagattgtgcagattgacataattcccagaaattgccacttacaggccctctgtcaatgttggttgaatgaatgaagtgtttattgtttgaaatttggccctgtcacctttttttttttttttttttttttttgcctttcatcattttgtgagcaagatctctcctctgccttttaaacttcagtaaactgaagctcagatccaagtagttttttttctttccatcctttgccttctcttagctggcagagatggggttaagaattgttggcagctaatccaccttggtttgaggccctctcacactgagctggaggaatgactggaatttgagggggaggggaaaagatactctgacctttgcaggcccgtggcctccaagcagcatctcctgttcacgttctcccactgaactaatagtccaagtacccccagttcaccgcttttttccacacctgtcaacctttttaagaacctgggagcagactgtggctacttgagctttttttgttgatgttgaacattatgtattttgctgttatctctcaacctcttgaacatactatcttttctccctgcccccatccttctcattctgctcaaacccctcctccccacctcctctccaaatcccacaggtcagagtgcatcaacaagtttgcttcagtcttcgggaccatgcctctcaaggtggtggaacaccgagctgaccctgtcctgtacaaagatgactttcctgagaagctgaagagcttccccaacattggcagcttatgaaacgtgtcattggtggaggtctgaatgtgaggctgggacagagggagagaacaaggcctcccagcactctgatgtcagagtagtaggttaagggtggaaggttgacctacttggatcttggcatgcacccacctaacccactttctcaagaacaagaacctagaatgaatatccaagcacctcgagctatgcaacctctgttcttgtatttcttatgatctctgatgggttcttctcgaaaatgccaagtggaagactttgtggcatgctccagatttaaatccagctgaggctccctttgttttcagttccatgtaacaatctggaaggaaacttcacggacaggaagactgctggagaagagaagcgtgttagcccatttgaggtctggggaatcatgtaaagggtacccagacctcacttttagttatttacatcaatgagttctttcagggaaccaaacccagaattcggtgcaaaagccaaacatcttggtgggatttgataaatgccttgggacctggagtgctgggcttgtgcacaggaagagcaccagccgctgagtcaggatcctgtcagttccatgagctattcctctttggtttggctttttgatatgattaaaattattttttattcctttttctactgtgtcttaaacaccaattcctgatagtccaaggaaccacctttctcccttgatatatttaactccgtctttggcctgacaacagtctt

SEQ ID NO: 8813 - DNA, 1051 bp, Homo sapiens
aagattctgctgtcacatggcccagccagcttgtggagccctggggttggctgtgttgcctgtagcaagacctgggacaatgggattggtgatgagctgaaggcaagagtggtttctgctggggttggcaccaaggcaggaaaggagctgtcttcagccagtcgctgaagctggagttgagagtggagggcttaagggcatgaggattatccagggatgctggagaaagtgggctttgagcccagggacaagtcgagaagcttccagatgtgcactcttggacacaggacctcttgcgccatcttggggagctggcctggtgctgaccagtgctgtcccaaccccggcaacactaaataaacaggccaggtttactgccgtggccacagctcatcttgaatgcatgtgaaccctggaggaatggggtggatgaggttcatggtcaagcagaggctctgacactccaggaagatctctagtgggctgagtcagcttccagctgtctgtaaaacgaatccctgagtgtcctctgacctccctcctcccacccttaatcaaaacagagcatctctttattctcaccttcccattcattcactcattcgcacattacctaacattcttattctctcaggcattcggatgtgaacacagcctgtctcctctttgggatgtgaggaagtcagatggataaatagatatacggtatcatgtgccatcatggtattatgacacaaacagttttgtggaggccagaggggcagcctttgacctaggggtggaagttgaggtgagggcatgggcttaagaaagagcttcacagagggtgctatcatttggaggatacactgcagagtggctgggtgcattggaggggatctagggaggagatagaggcattctaagaagagatagcaagtccagtggtgtggccaggtgaaaaggcctagatggcttggggaacaacaagctgtgctgggtggtcagacccagtgaagggctgagccgtagtccacagtcagaggaggccctgctggccctggccttgtcg

SEQ ID NO: 8814 - DNA, 1020 bp, Homo sapiens
gtctaatatggctgcttcaactctaaccatcacatctccattctagccagtgggaattcagagaagacagggagggggggagcaaaaggcagcctcttgttctttttttttttttttcattctagctatattttcatgggttttgtgtgtgttttttttaaattttttatttccataggtttggggggaacaagtggtatttgtaacttacatgagtaagttatttagtgatgacttgtgagagtttgatgaacccatcacctgaacctcttgtccttttaagggcataacctggaaattattgaaatagagctcagataaaactttcttttaaatactgcagtcatggataaagtttatcatatggcccagtgacctgatacctaaggaccccagcaagcaaattcctcttagacccaggataaaggtgagctctcctggtgaactagaacgttttcttttttctagctctttcttcatttcttcttccttcactgccagcaaagtgcttgggctccagaaacagcctgcaggcttcctgactgggctggtgataaaagggccacactgggatctgggactggcaccatagacttggggccctaataagggataggaaagccttctagcagaatggaagggagagatcttggcagatagcaaatgttgggtctgcttcttaaaacacattcctagtgggccaatattaacatgtgatgtcactgtttgaaatactagtgctatggtttggacgtgcatcccctgtaagattcatgttgaaacttaatccccactgtggtggtagtaagaggtagtaatcacttctttttgaaaagtgactaaatcatgagggctccatcctcatgcatggattagtaccttataaaaggactggagggaaccagcttagcccttcttgcacttccatcccttctgccatgtgagggcacctaaatggcaccatctatgaggagcaggtctttgccagacactgaatccaccagggcttggttttggact

SEQ ID NO: 8815 - DNA, 1018 bp, Homo sapiens
tgatgataatgtagctaaagttgtgtgtgtgagttcgtgcgtgtctgctggtgagacatacgggattaacatgaaacgtgctgctagaaggaagttctgaaggcagctgtagagtcctcctggcatttgaatgggtgctgtgagcaagagaggtgaattctagttttggagtcccatggatctgggttcaaatcctgggtcggtccctaccagccacatgacctttggcaagttatttattccctctgaacgttagtttcctcatctagaaaaaagggacagcaaaaacaagatcaagtgcctagcctggtgctgggcatgggaacgacctgccaggttggcccctcccctcccctctgcacccttctccttcctctcctctctctgctctctccccactcccttccctttttttcctttgcctctccagaaacagcagagtttttccatatacacaccagacccatatacgttgtagctcattcaatgcccagcaatccaaccggagtgggatttttatctccattttacagaatggaaacctgctgcagctatggaatcgggtagatcacccagcaggtggagggggtatgagaaagtggaaatatttgtctgaagcatagcaagacctggccttttccgttgtatggaaatttttgcctgggaggtatgtggaatgcagaaagggtccttggtgttgcttcttgtagcctgcctcacccctcccctccccttcccttccctttttcccttccttctttcttccctccctccctccctcccttttttcctttcttcctttcttccttcctttcctccctccctccttccttccttacctctttccctcccccattttttcttttcttcgttccttccctcccttccttcctccctcccttgcattgtgtgcactagacttttgccgaaggtttgaagctgagggtcatccatccagaaggtagtggcatagtcatccagcccagcagtgcacagtggactggtctgtcttagaacc

SEQ ID NO: 8816 - DNA, 1030 bp, Homo sapiens
gcatgacagcatctgcttctgaagaggcctcaggaaacttacaatcatggtggaaggggaagcacgcatagtgacagatagggacaggagaaagagagagagaggggaaggtgctacacacttttaaacaagcagatctcacggtatctcactcactatcatgagaacagcactgaggggacagtgctaacccattcatgagaaactatctccatcatctaatcacctcccacctgcctggatggagatctgaggccccatctccgacactgggaattatgattcaatttgagatttgatggggacacattcaaaccatatcaccagtcatgggtgccccgtctggcttctgtgcttgcagtaatggaagtggggaaaggagaccttggggagtgggagccacatgtggactgaggtggtccccaaggactcctgcctttttgaaatgtgtttctctctcttctttctctagagtgtatccagaagctactgtcaggaggacactgtaagagaaccttggcacctctgggcccaaagggaaagacaccagtggaaagaggtatgatgtggcaacatggcagggtggcatcttcacttactcgaacaagagggtctactcttctctcttcttctcttcctgccctccaaaccaccacttccatgtgagagggctctcagctcttgcccaaggggtgcagggcaggagaagggtggcttcactcttgtcctcacccctagacatttactcatgggtgagggcaacggggccaccttggtgcaggaagtgagtgttgatggatggcagggagtgagcccttcaaggaagagtagagctcctgggggctccaggcagggtcatgagggctcatggaatctgtatcaaggacccctccctgacctcagcctcccccatacccaccacagtcttgggaccgtgataaggagatcgcttcctagggtgattaccttccctctgccctcgataatcttttggacaaagtctaaatccacaagtactaggatcaatcac

SEQ ID NO: 8817 - DNA, 1027 bp, Homo sapiens
gtctcctgatgtttttatctcccctgcccatagggcctgaggcaggctgagtgagagaaggcaatttctatggattccccaggcttcagtttatctatttttttgttattgttgctcaagcttttggtattctaagaatccattgccaaattcgagatcatggagatttactcctgtgctttattctaagagttttatttagctcctatatttaggtcatagattctttttgagttaattttcatatatagtgtgaggtagggattcagtgtcattctagtgtatggggacatccacttgtccttggcactatttgttgaagagactgtctattctccagtgtattgccattgctcctttgtcatatatcagttgacatatatatgcggctctatttctgggctttcaattctgtgccaataatctatttgtctgtactttcacaaataccacaccattttattactgtatctttatagtaactcttaaagttgggtagtgtcaggttttccaacattgttcttctctttcaatttttgattggctattctgggtgttttgcttctccaaataaaccttagaatcagtttgttgatatccataaaacaacttgcaggattttgattggggtcgtcttgaatctgtatatcaagttgggaagaactgacatcttgacattattgagtcttcctatttttgaacactgatcagtgttttcatttatttacttctttgatttcttcaatatagttttgtagttttcctcatacagatcttacacatattttattagatttattctcaagtattttatttctttaggtgttaatagaaatggttttatgtttttaaatttcaaattccacttgctccttgctggtagataggaaagcaatgacttttctatattaacttcctatcctacaaccttagtataattgcttatttgttccaggattttttttttgtaatttctttcaggttttctacataaatgatcatatcttctgcaaaaaaagacagtttt

SEQ ID NO: 8818 - DNA, 1025 bp, Homo sapiens
agtcctctggaagacagccagggcagaagagccaggaaccttattttgtcccagcaggtcctccaacctactgtgtgacttcaggctagtgagccgcagtttcctcatctgtaaaacatgactgctcacctcgcagggtagttgagagggtctgatgacataaagtgtataaagcactttcaggagttacctacgtgcaggtgtaataagtcctgggaggctgcctcaattggtgggaagagcagcgggcttcatgtcaggaggtcctcgttctagctgtgctgtgtgactctgggcaagagcccgtccctctctgggcctcagctcccgcagtgtgaaatgaggagttggagacaaccttcactaagatgcttccttctttgacgattctctgatggccctgtgggtgttctacatgggacagaggaaagggctggtggcagggacagggtgcccatcctggctcaactcacagactagagaggggtccttcccagagcctgcagatgctctgtgccaccttgacattcacagctccatgagccggcgggggcaggggaggctgtcatttaggatccaattgcatccacagcaggctgtgctcctggttaatccttaaggcacccgcccctcaggagcctaattagattttatcccccgctcagctgtgaccatgtccccatgttggtgccagcaccaggcacgccaggatctcaggccaattgcttgtttatgagaccgtctgtcttgggatgaggcccagcaggcacagccagtgagcaaataagtcctccccatcagccttgaacctgatggcaagaatcattgttagtcttctaggcctcgggccggcgtcctgaccaaggaaaagatgtgggtttgcagtccagcaaaacctggctacaaatcccagctccatctcttcccagctctgggacctttctagccccatgaagctttagtttcctcatccctaaaagggaatgatgataatatcgtctactttgtagagctttttggaggat

SEQ ID NO: 8819 - DNA, 1043 bp, Homo sapiens
agggtttctgactttggtgaggggatcaagaaaggctcttagaggaaataaggaattagccagttggagatttgggggtaagggtgtattctgtagaggagggactgagtgttcagatgccttgagttaagagagactttttttttttggttgttttgtttttgttttgttttgacggagttttgctcttgttgcccagactgaagtgcagtggtgtgatcttggctcaccgcaacctctgctcccagattcaagcgattctcccgcctcagcctcccaagcagctgggattacaggcatgcgcccccacaccgggctaattttgtatttttagtagagacagggtttctccatgttggtcaggctggtctcgaactcccgagctcaggtgatccgcccacctcggcctcccaaagtgctgggattgcaggcgtgagccaccgcgcccgaccaagagactgttaaacatttcagaaacccaaagaagtctgtcttggaccaagctcaggacagtgggaaggcgttttctcctctcacccccaaaacttgcatttcctgtactccttctctaggtttgtagcgcaggcatgtacactcaggatcatatttaaccatatttaaaccaccaccccctccattctcagtcaaccccccttagtcacccagttaccaagttctgtcattctcccaccaaaatctctctgcaaactgtctccttgtctccttgtctcctttcccaccaccaaagccctgatctgatgcgggctctttattactcagccgaatttgtgaaatagcttcctaacgagtcatcctccagtccctccctcagagaaagacacagatctgatcatgtcttcccaggcctaaaacccctccatggcttccagaggcctgtgggacaggctgcttccttctcatggccttcagatgcccttctttacctgatcccaacgtacccccagttctccactctgagatcacgagccacaccccataggcctccatacttttgccattctctttgtctgaaatgcccttcc

SEQ ID NO: 8820 - DNA, 1030 bp, Homo sapiens
gccgctgctgggagaggaagtgcgttcagttaccaatcgggttattttcataacggctgtctcaggctgcagggaggagggtgacaagggggagggggcagaggagcagccacggctgctagctctccaaactaggacttgctcagcagaggccgccagcccggagctggatccagagcccggccttggggaccccagctcccacctgcgccctgccttccagatcaggtcaaaaggggcccccagcccctccttgctttctgcttcctccctctgtatctggctgggtgggtgcggggagggttggatccgggcggacccgggccccaccatccctaggcaaggagcctgccctgccaggttcctgaagctgatggaaaagggtccccccgagctcctgctgagccagggcagaccctgccgactaaacactcactggcctggtcgccttcttaccatccagcctggcccacctgctccccgaggtacattttgtttgttgtttttgacaggatccctgtggtgagtctcagcctggggaagggaggaggactctgcctccccagcccctaggctgactggggagggactggcctcccttccagcttccccacctccttccctccaacccaggtctgtgggagcagagccgagggggttctggggaggcagctgcaggcccttgctctggggctgctggaggtggggtcgccatgcaccatgcccagccttcacggagcagaaggcggacgaggccctgcccagggtgtggagtgggcgctctgggtcagtcccatggggtatcctgtgagagcaactcagggggccaggcctggtaccgggtgcagagggcattcctcatggcacgagcagatacccaggtgacacctgtggccggctctgttcctcatgcggtgggtggtggccaccctgggcactcctgcttccctttctgggttcctggcctcactgtgggcagacagaccccaggaggtagcacaatcacatgctctggtgtctatggtgggtg

SEQ ID NO: 8821 - DNA, 1070 bp, Homo sapiens
ccaggagaccatccgcgtcaccaagccctgcacccccaagaccaaagcaaaggccaaaggtcagcgaaaggagaagggggtggggctgtcgcggggggctgcccccccccccccccgcctgtgaggggacaattccaagttaaaccttaagttttgagtcctggccagtggcttcctgacatcgcctcacttggcttccctgcctggaaaagtctgaagatgggcactacaagagaggccgcaggtgatgctggggacataaatcctccctggcccaaatagggaccaactcaaactactccattggagcatctggcttaggacccagggagagtgtcctggaacggcttgcctttgtcagctctccagccacgggcagcatttggtcagctctgccctttctagtgttgggaggaggtcaaggcccaccctgggcctctcagctcactcgtgactcagcccagcgaggccagcagggcaggggtgaatctgcccgcttctcaggtgaggaggctgaggatgcccagggctgctgtgaccaggactaggactggaaacttgaaggttttctgatcccaagtggaaataggaagctggggatgtcccatgtccacatcacaatggctgccccatcccctgcttccgagtcagctgattggaaaccactagggggcagaatcttctccttccctgatgcccgggtgtttgtggagccggcggtctgcaatgggtcagcctaactgctgatatggtattaatatttctttcttgttttacagccaagaaagggaagggaaaggactagacgccaagcctggatgccaaggagcccctggtgtcacatggggcctggcccacgccctccctctcccaggcccgagatgtgacccaccagtgccttctgtctgctcgttagctttaatcaatcatgccctgccttgtccctctcactccccagccccacccctaagtgcccaaagtggggagggacaagggattctgggaagcttgagcctcccccaaagcaatgtgagtcccagagcccgcttttgttcttccccacaattcca

SEQ ID NO: 8822 - DNA, 1034 bp, Homo sapiens
tgcagtggtgggatctcggctcactgcaacctcctcctctcgggttcaagctattctcctgccttagcttcccaagtagctgggattacaggcgcctgccaccatgcctggctaatttttgtatattttggtggagatggggcttcaccatgttggtcaggctggtctagaactgacctcatgatccacctgcctcaccctcccaaagtgctgggattacaagcgtgagccactgcacccagcccccaaaaattttattttattttattttttaattattgtttttttggagacggagttttgctcttgttgcctaggctggagtgcaatggcgcaatcttggctcgtgcaacctccgccccctgtattcaagtgattcttgtgcctcagcctcttgagtagctgggattacaggcgcccgccaccacgcccagctaattttgtatttttagtagagacggggtttcgccgtgttggtcaggctggtcttgaattcctgaccttaggtgatccgcctgcctctgccacccaaagtgttgggattacaggcgtgagccaccgtgcctggccaaaaattttttttaattagctgcacatggtgttgcgagtttatagtcccagctactcgagaggcttaagtgggaggattgcttgaggccaggagttccaggttacggtgagctatgattgcgccactacactccagcctgggtaacggtgtgagaccctgtttccaaaaaatatatttatatgctatataaacagtctcttttaacttgtgttgtccccaaaaccttgattgaattaataaaattagtttcttttacttcattaagaccacaaataaatgaaagcaattttttagtttcctaagcctgaatattgaaatcctggactttggtacaggatcaccttttgccactttcagtgactagactctttgctgaaagtgtcagcaggcctctgatcgcctttttgaagtcacataacctattttctcagctgagtttgcctgggattttttttttcttttt

SEQ ID NO: 8823 - DNA, 1081 bp, Homo sapiens
caagaccagactggatgatagagtgagaccctgcctctaaaatgcatagatagatagatagatagatagatagatagatagatagataggtagatgtttttagtgaaaagcctacccctttgcctccatctgcccagtttccatccatcctcagcctcccaaaagtaaccactattattgttttcctgtgtatctttccagagtttattatatacataaaggagtatacagtgcatactttttcatttaatacatcttgaagtaatttccgtttcttttgttttttcttttctttctttcttgagacagagtctcactctgtcacccaggctggagtgcagtggcaccatctcggctcactgcaacctccacttcctgggttcaagccattctcctgccccagcctctcaagtagctggaactgcaggcacgagccaccacacctggctaagtttttgtattttgggtagagatagggtttctccatgttgcccaggctgcttttgaacttcctgagctcaagcgatctgcccaccttggcttcccaaagtcctgggattataggcgtgagccactgcgcctggcctcgaagtaatttctcagtcagtagggagcttcttcgttcttcatgaaattcatttttagctatatagtatttaaataatttatttaaccagtcccgcactggtaaacaagttgtttttagccttttgctgttactaagaatgctgcaatgaataacctgcagttttgttcctttgcaagtgtatctgcaagaataagttccacaaagtggaattggtggattaagggcatatgcattgaagtacttatagatattgtcagattgcccttaataggtgttgtaccattttgccaccagcaatgaaagagaatgcctgtttccccattgtgctgacaacaaaatacatcaaacttggatttttttcaatctaagtgacagatagtctgagtagatttaatatgcatttttaaatgaagttgagtgcctttttaccaagtttaagggctgattggtctttgaaagctatatatatacacatatatacatgaacatata

SEQ ID NO: 8824 - DNA, 1032 bp, Homo sapiens
ttaactttatgttgcctgtcatttctctgtgtcacttcctgtcctttgtaaacatttccaataatcagaatagttcctctctatactctagtgagtcgttcaccttagtgagaacatgtaattttagaatttttagttctttataattggtttgttgctgggcgttggaggtaactttgctgctaaataattttatttttctattgagagttagagacccattgtagaaaccaaaatcttgtttccagagagctagttttacaataaagaaagatatttatcttcctagactggagagtgatttgtaagagatttaggaggagagtgagaaaaaggcagtgccacagacactggggacgtgggggtggagagtttcaagatggaggaagtgttcaatgataccagatgcctcagagaggtcaaagaagatacgggctgcaaggcaggttgttagtggcattaagggaggttttcatggagtagtgtggcaagatgcctgattttgctggattgaagagtaaatcggagggtgaaggcgttgagaataggctagattcgtttcaagaagtttgaccaattagggaaaggaggagagggggtgatagcaagaggaggaagagagagtttattgtttttagtttttagatgggagaaacttgagtatgtttttaggctgaagggaaaggaaccattgtacagggagagagggaagatccaagggaaggaaaggatgatgaatacttgatggaacatttttagaagtacgaggaaatttaggatcaaaggcagaggtgcaaggctattttgaagttgggagtcaggaccatatttatccagaaggcactgtttgtgtggtgcctaaccaacaaactgttatgggatctttgaaaatatttgagacctaaaaaaaaatttatcaaccctaaagtatggatatatgttttattatatatgtataaaacaatataatgtcaactttcattattacatgtaatattgacagacattttgccatatttgaaagcaattcat

SEQ ID NO: 8825 - DNA, 1069 bp, Homo sapiens
tgcagaaattttttatgcatactttctagtttgtacatagaatattaaaaaggcatgtacttatggggcaaggggtaagatttaatgaaattaatatttactgtatcttcaagaatatttgtaagtgaaactggctgtattagtcagcttgggctgtcataacaaaatatgcaaactggggtggcttaaacaactgttttctcgcagttctggaggctcagaagtccaagatcaaggtgctggccaatttggctcctggtgagggctcccttcccttccagatttttgccttctcggggtgaccttatatggctgggagagacagactctatggtgtcttttgaagagcaaacatttaaaattttgataaagtgtaacatcaaattttttctttaatagctcatatattttatgtcatatttaggaaatttttacctaacccagggtcactaagattatctcctatattttcttctggaagttttatagttttagctcttacatttaggtctatggcccattctgagttaatgagttaatttttctaatggtgtgaggaaaggttcatttttttgtatatgagttgtatatgaatatcgaagtattccagcaccatttattaaaaagattatattttctccaatgaattgccttgccaccttgttgaaaatgaattggccatgtatgtgcatatttctagattcttatattccatcattgtatatatgtatctttatgctaatatcacactgtcttaatgactgtagctttaccataaatcttaaaatcaggtagagtaagtcctccaacttagtttttctttttcaaagttgttttcgctatttcatgtttcttcatagctatgtgatcttgggcaggttacttgtcttctctgtgcttagtttccagatttgtaaaatgaagaataatattagactcttaggaggattaaatgaataaaactcttacaactgtgcccggcacataggaagaactccataaatattagctaatcttagtaattttgggtatatttaatgaggtaaatattggatttatccttaatcct

SEQ ID NO: 8826 - DNA, 1499 bp, Homo sapiens
acagttacccacagctatatggataaaccccacaaacataatgtttttttttgagacagggtctcactctgtcacccaggctagagtgcagtggcatgatctcagctgactgcaacctccgcctcctgggttcaagcgattctcatgcctcagcctcccaagtagcagggattacaggtgcacttcaccacacccgactaatttttttgtatttttagtacagacatggtttcgccatgttggccaggatgcacaaacataatgttgagtgaaagaagccagaggcaaaagactgcatactataatagactatatagatagtttatatatgtatacacacatacatatataaaacaggcacaatttaccattgaggggttagggactagacagtggctgtaggatgttttctagggtgctgattataagtataaatttacatttttctgtatattattatatttaaatagaaagttgtaaaaaatgtttggtagtaaatttctaacttaaaactaagcaaatgatacacaattgagatcccggaaatagatgccaaagaacaaatctatttaatctgtgacaaactaagtgtaacaaagtaagcatggcacatgtatacatatgtaactaacctgcacattgtgcacatgtaccctaaaactttataataataataaataaataaataaataaataaataaaattcattaattgagataactagatttcaatatggcaaaaataaatttaggttcatgcctcataccatatggtacattgaattgtagtttgaattaaaatattaataaaatattaatgtattttttataactaaagtataattatggctgagataattttacatataaaaattgatatagatctgtaagggcagattgatgcataaatagatgttggtttttaaaatttgtgtacaacaaataacacagataaaaggaaaatgacagaataaggacgattatgatgaatatgatgaataaagcttaatatgatatgtacagaaaataaatgacacaaatttatgttacagtcctgtcaagcagtcaaaggaaatgatttaagagtttgttcatgtgcaacattcttcataaaggtgaaaaattagaatcaatccacatgcccatcaataagggaacaattaataaattatggtatttctatgatagatactacgatgtagccattacaaagaattagatttgttaatatggaaagatgtacatgaagtattaagtgaaaaaatgagttgtagaataaagtacatatgtatagtgtcattacacttttctacaaaacaagttaatgcaacatttgtcaacaagtatatggtcacatgtagtgtaagttatggaaggtatagatcaaactgttagcagtgaatactctggggaattggcataagagggcgcttatcctgtttttacttcacaccctcctgtattgttctgtttcattgatgtgtgcttttacaattaaaa

SEQ ID NO: 8827 - DNA, 1084 bp, Homo sapiens
ctagagctaccagtgatataataataccttatttctgaagtggtgataagtataaatgatattgtgagatatctggtatgacagtaatgttatatgaaaatatctgaggtttctttttttttattttaaagttttttgtaaagatttggtcttgctatattgcccaggctactctcaaactccagtcctcaagtcatcctcctgcctcagcctcctaaagtgctgggattacaggtgtgaaccactgtgcctagccaatatctgagatttctattattgaaagagtcacaggtactgttaattctgctatgcttatattcataatagaaggaaatgccaaattccagttagaggttagtaaaaataaacataaaaatttccctggctcatgcctcccagcactttgggaggctgagcaagcagatcacaaggtcaggagatcgagaccatcctggctaacacggtgaaaccccgtctctactaaaaatacaaaaaaattagctgggcgtagtggcaggctcctgtagtcccagcttctcaggaggctgaggcaggagaatgccaggaacccaggaggtggaacttgcagtgagccaagatcacaccactgcactccagcctgggcaacagagcaagactccatctaaaaaaaaaaaaaaaaatttccctatccaagtgtgtggatctcttgaatttaatccatggacccttctgtttagaaaccctacacattgggaaaagtggcactaaatgctcagctcacctttctcggttttattctctcataacttggccttgtcattcttcatttgccttggtggctctctgatgacttcagacaattgtctttaataatttatccatttttttctcagccagaagagttagtctgaattacctactctacttttattggaggaagaactcttttaaaacttgcattctgatggaacatattaataattagttgaagtagaaaatatcatacactgcaagggatcataaaggaatctaatttgactcatggaggactagtacaaggtaaaaagcaacaaacagaaaatatataatgaggatagggcca

SEQ ID NO: 8828 - DNA, 1122 bp, Homo sapiens
gtgacttttactttgtagggaaaaagaggtatgattggactgttattcttatttacaggtaatatttagattttgtttgatgttaacactgtccctggtaaatttttttttcttctctcaagcttcagtgtgattccccaggaaaatcttggaaattgccaatagagaagatgtattactaagtatcagaagttttcttggaaggacatctaataagtttcccaagatgtgattctgcctgttcagtagttgcttgagtgctgatgaaattccccccaaacacttcctaatatattattgaaatatttgagataaaggaaagctgaacatattaaaactaatttttaagtggtgagagaagtggaattgaagtctatttgaggaatttgaaacatttatcacccacggtttttccaaaaatatacatttgtgtcagtctgtcaaactttttatcaaaaaaaactgtgaattatccatttaaaatacatttttattacattttcttctgtatctgagaaatatgccagatggtagaaatttcctagaagtctctgacacttacagattgaaagatgaatgacgagaagacaagaatttgggtatccagattaatagatagaactttacaactattgacttcttatttgctcttgttgagttttgaaaaggaattaggcaaggtagatgaaaatagagattcttctcccttcagtacccatgtgatttaacacagccatagaaggctccaagttttggggtgtgggcacaatttcaaagatatatttctattaagcttcttgagagtgatatgaagaagaaacgaagtatagagtctctcagatgcaaaaatcacttagaggtaggccatgtatccatccttatcacacttcactttttccaagaactacgactggcttgtcttttatggctttttaagaatctaacttcattgtgtaatcagcttatttcctctccattattaatgccctaattggcaggttttctgacccattttcttttctgtgatgctcttctagatgtctaaacttttcatatcacaacatggatttaggtagtttttcagtaataaaagttggtgtgaatatgcagtagtatgtggat

SEQ ID NO: 8829 - DNA, 1031 bp, Homo sapiens
tcattgtggccagtatttaacacataataaggaaacactaccacagtcaataggagataatgcggaatgcttttatgtgccatacactgagcaaaatgtttacatgtattcattcatttaatccacacaataaacatatgagttgatatgattactatcctgttttatatgttaagacacagagtccgctgggcgcggtgactcatgcctgtaatcccagcactttgagagcccgaggcaggtggatccttgaggtcagaagtttgcgaccagcctggccaacatggtgaaatcccttctttactaaaaatacaaaaattagctgggtgtggtggtgcatgcctgtagtcccagctactcaggaggctaaagcaggagaattgcttgagtctgggaggtggaggttgcagtgagccaagatcatgccactgcactccagcctaggcaacagagcgagactctgtctcgaaaaaaaaaaaaaagaaaagaaaaagaatcgaaactgagagtcagaggattaagtaactcacacaaggccacagcgcttataagtagcacagctcatattccaacctacgtcttcacaaagttcacattttcacattctttctcttttcttttcttttttttttttttttttttgtttgagactgagtctcactctgttgcccactcactgcaacctctgcctcccgggcccaagcaatcctcccacctcagcctccctagtagctgggaatacaagcacataccaccacacccagctaatttttgtattttttgtagagatggggtttcaccatgttgcctaggctggtctcaaactcctgggctcaagcagtccacccgcctcagcctcccaaagtgctgattacaggtgtgagccaccactctcaagcccacaaagtccacattcttaacaactctgctgtgcctgctaccccaggttatgaagggctttgtgtgcactaaaaagcataagaatgatacaatggactttggggacccggggaaaggatgggttgggggtg

SEQ ID NO: 8830 - DNA, 1025 bp, Homo sapiens
attgttgcttctgtaatgttttaaacaaacaagaactgttccatgtggtctcttcagtgatgtgggccccaccagccaattatcttcacctgctccagccagtgcatctcctcttctcattttctcccagaaaccagatgtagacaatcaacaagaatttcagtgcctgtttcctagctcccgttttgtttatttctcctgagttcctaattttccctttgtttttcatgtttatttccttcttcaaaatcttttctccagggagaaaattgacaattgatggcccctcaaatcattcacctctgtacctccaataactttaatctttccccctatttaatgttctcttttttttcaatgttggttatttggggctcttacgcaagcattcctggaatgcttttgtcactatcttctctcccacctgaagctcctcaaccctccatacataatacctgtaggttttagttttaaaggtcaggtccttaaagaagccttctctgtgactcccttccttatctgaattgggtccttccattataatttttcagattatcctctgatttttatcatatcatttattacagtttctgactcagtatttacttgaatgacttttaatgtccatctcccttattaaaattataaactttatgagtacaggaaccttgtttgttttgccagtaattatatccctagcacctaatacaggtgaatgatttttttgttatataatatgaaggcttaccttttcccagtaatgatacagaagatagattattgaatggattatattatcattcattttatcagaggataggttagtttttaaaatctgctttacactaacttttctatattgtataggaacttctgatttaaattaataatagctaccccttattgagcaaatgctatatgccaggtactaaagttcatgtttaaagtgttccactaaaaaccagcctaatcaaagctatactatactaaataacacctaattaaaataatattcagtattccaa

SEQ ID NO: 8831 - DNA, 1050 bp, Homo sapiens
tcaactgtgaggataaagttgtttttttttttttttctttttagacagagtcttgctcttgtcgcccaggctggagttcagtggcccaaactcggctcactgcaacctccgcctcctgggttcaagcgattctcctgcctcagcctcccaagcagctgagattagaggcacccgccaccacacccagctaattttttgtatttttagtagagacgggtttcaccttgttggtcgggctggtctcgaactcctgacctcaggtgatctgcccacctcggcctcccaaagtgctaggattacaggtgtgagccactacacccagccgaggataaagatttttagatgggcagggtttcataaactttaacttttatgcagcctttctcatgaaactactgaagagtatgttttatcaaaaagtgagaataagtttaggaagatgaaattatgagatctagcatcaaggggtgcaacacaggagagaaagaaagagaattcttagaatgataatggaaggtagttgcaggacaacagtttgtgcaagacagctagaaagcaattcagattgaagtagcaggacagaaggctctaggaggaatttctgcaggaaaattaaataatagaattgattatctgttgtgtaaaaaaattgtccaaccttcagttggagaattagggtttaatacttcagttgaagaagcactgattaatacttaaaaacccccacaaaccgagaaagaaataatcattctaagaaaaacaaaaggttgtataagaaagaaaatataataatataccttgtgtttttgctgtgcataatatttacatagtcataaatgagtaaatactgaatattggtaagccaaaattagtatcatgaaaagatggacagatgggaagtatatgtgtgtggtgaaaaagataatttgtcatcttcaactgaaagttaaaagatgtctaacatttaaaaatcaagaaatagcagtataaacatattatttaaagaagcaaagcaaaaaacagaggactcagtgagttttgttaagtatg

SEQ ID NO: 8832 - DNA, 1054 bp, Homo sapiens
ccaaggtaatcaaattgaaatctattataaacattatgcttcagcaaggtagatggacaaaatatactaaaatcaataatttattttaaaaaataataagggccaggtgcagtggctcacacctgcaatcctagcacgttgggaggccgaggcaggcagattgcttgagcctaggagttcgagaccagcctgggaaacatggtgaaactctgtctctacaaaaaatacaaaaattggccaggcatagtggtgtgtgcctgtagtgctagctactgggaaggctgagatgggaggatcacttgagcctgggagtttaaggatgcagtgagccaagatcagaccactgcactccagcctgggcaatagagcaagaccccatctcaaaaaaaaaaaaaaaagattacatacctaggaagaaatgtaacaagaatatgaagagagctttaaaacactactggaaacaaaaaaaagacttggacatatggaaaggcatggtatgttcttaggaagatttaaaatcataaacctgtcagtgctccttaatttaatctataagttaacatgatctccctaaaaaaaaccaataggactttttgcttatttgcttatttttttgagagaaatgattgtaaagctcatacagaaaaaatatgtagactaaaataaccagaaatatcccgagaaagaaaagaaataatgagataccagcctcgttaatatctataatagatattaaaatctgttataaagctataataattccactataattgctaacaataaacactgtgtgccaggcactgttctaagctctttaaatataacaattcatttaattctcataaaagcccgttgagattaacctactcaaactcacactgccaataagtggcagagctcagatttgaactcaggtgctagctccagaacatgtactctctccatcaccacactcttcatcaccagcacatttgttattgacatattaatagacaggcaatcaatggaccagaatcagaagcttagaaattgactcaaatatagaaataaaatt

SEQ ID NO: 8833 - DNA, 1030 bp, Homo sapiens
gaagacctccgagattgtattacgccccaggaacaagaggagcaggagtcccctggagctggagcccgaggccaagaagctctgtgcgaagggctccggtactgcctgtgcctgctgcttgaatatttccgccttttagggtgctcgcgcaggaggctgcagcgggggatgggtgctccgaggctcccgaggcccgcgcaggtcacgggtgcctccggctgtgcattctacctgcaggtcctttgacaccagagtgtttaggtttcaacacctctcccgctaggtaacaggaagcagatgagctccgtaacaacagacacacggacttgtcagattccttgttcgtatcagggttcttgcacagttaggacggcttcagagaatcctacctttcctggcgctgtgtgtgctggatttcatagtcacgcttgttagctgcacgtcctcggtggtcagttgtgagagcccccaattccttcctccttagaaagctcattctctgaggtttactggggcttgaacctggggctataaggagtttcgagacactcaaaaacgagctggggcttgttaatcaagtggtttttgtccatgagaagaaagaattggttgtcaagacgtcggacctatagtgattgggtcctcaaatacagtttggtgatcaggagttgttgctttattgctattctaatttcacttacctccccagaagtaacctagttaagagcatttccaggccttcctattccttcttttcctaaacggtgacttctgccatgctgccctaaaatctttttattgtgcattatatgtgatttataaaattgtgacccagtcccatctcgagttttgcagcccaaactgggaagagttctgcattgtactttatccttgtgtgtttctttggctggggtctcaggaaccctgcacgactgtatttactttcacttcagacttactgtttgtgggagtgttttggggaaggggccaaatcctcactcatttttttatttctggtgctcgttgagac

SEQ ID NO: 8834 - DNA, 1358 bp, Homo sapiens
tccgatcacccagactgtggtgactggcctactgggcactcagccaggtaaaaaatgtcttatgttgtaaaggtcccagctggaatgcactctgccccttttgctttccaagattattcgttcgtgtacattgcaaatattttcatgcacagggcaggcagttagctttcctttggtgggaggacttggatctagggctcatccatgaaggaggcagagattggcagtttacccagaacttgggttttaattcaacctaattcatttctctctgtggcaggggctccagcagtcctttttgcacactctggattcttaccggatattacaaaaggctgccccctttgacaggagggctacatccttggcgtggcacccaactcaccccagcactgtggctgtgggttccaaagggggagatatcatgctctggaattttggcatcaaggacaaacccaccttcatcaaaggggtgagcagttccccatgccaggtcgtgctaaagaagtgtttgttggctgggtgcagtggttcgcacctgtaatcccagcactttgggaggccaaggtgggtggatcacctgaggtatggagtttgagaccagcctggccaacatggtgaaaccccgtctctactaaaaatacaaaaattagctgggtgtggtggcaggcgcctataatcccagctactcaggaggctgaggcaggagaattgcttgaacccgggaggcagaggttgcagtgagccaagattgcaccattacactccagcctgggcaacaagagtgaaactccatctcaaaataataataataataataataaaagaaaataaaaataaggagtgtttgttgaaggcatgaaaggaatattgatgtcatccagtaatcatcaggaagaggactgggatcaaaattaactgtgggcattttcaaatacgtaaatgatgatgatatatatttttctaatgcctgtccttaaaatactagaagatatagactattgatcacccatagaattgaagccccttctgggctgggcgcagtggctcaggcctgtaatcctagcactttgggaggccaaggtgggctgaccacgaggtcaagagatggagaccatcctggccaacatggtgaaaccccgtctctactaaagatacaaaaaattagctggatgtggtggtgtgcgcctgtagtcccagctacttgggacactgaggcaggagaatcgcttgaacccgggaggcgaaggttgcagtgagccgaaatcacgccactgcactccagcctgggcaacagagcgagactccatctcaaaaaaaaagaattgaagccccttcttaccacattgacctcatct

SEQ ID NO: 8835 - DNA, 1047 bp, Homo sapiens
tctcttaagtggagggatttggagagcagaccaccagaaaaggccaggttagacaggtgtgggagactggaattcaaagtgtgagatgggtgttcaaggaacaagtgccagaagcccccagaaaggcagtcagaggagtgccgcggacagagtggggtaggtttcctgcccagctaaagaggcaggtgaccgctaataaggcagcttgaagttgaagtcagaacccagagctcagacaggaagaaatttgttttcttgttttctccaggagtctaggacatgggaatagaggaatttagcttatgcctggagatgggaagaagcagtgtagggtattctaggggaagagcttcctgactaacaggataatgacaagtgctttgaacttgtgccagactgagattgctttttttctttgttgcatcaccttatgacatgcgtgtaaccttctttacagtgtaaactttctttacactgtaatgaagattggtctaggcattgaattttgtggcttgcatttgcagggagctaggttggagcagaggaagggtatggcagtctggaagagacctgtctggttttactcccagatgctgacagcagaatgctgatttgagaccagttactggaggagcaacagtgcctcattttgtcacttctttagtcatctgaccttggctgtgacctttacattcttcaggcccttggcaagggaacatgtattacagtttcacaatgaagatagcttaattttattcctattataaaaacaatgtatggggccaggcgcagtggcccacgcctgtaatcccagcactttgggaggccgaggcgggtggatcacctgaggtcaggagttccgagaccagcctgaccaacacatagtgaaaccctgtctctactaaaaatacaaaaattagccgggagtagtggtgcacgtctgtagttccagctactcaggaatctgaggcaggagaatcacttgaacctgggaggtggaggttgcagtgagctgagatggtgccactgcactccagcctgggcgac

SEQ ID NO: 8836 - DNA, 1046 bp, Homo sapiens
gagatctcagctcactgcaacctccacctcccaggttcaagcgacccttctgcctcagcctcctgagtagctgggattacaagtgtgcaccaccacgcccagctaatttttgtatttttagtagagaccaagtttcaccatattggccaggctggtctcagactcctaacctcaagttatccacccaccttggcctcccaaagtgctgggattacaggcttgagacactgctcctggcccgatcctgtgtctttaaaaaaaaaaaaaaaaactctaacaagtaatactgctttttttaaaaaaaattgtgggccaggctcagtggctcacgcctgtaatcccagcactttgggaagctgaggtggacggatcacaaggtcaggagatcgagaccatcctggccaacatggtgaaaccccgtctctactaaaaacacaaaaaattagctgggcatggtcgtgggcgcctgtaatcccagctactggggaggctgaggcaggagaatcacttgaacccgggaggcagaagttgcagtgacccgagattatgccactgcactccagcctgggcaacagagcgagactccatctctattttaaaaaaaaaaaacaaaaaactggtagaaaacacgtaaaacaatttacaatctttactatttttaagtgtacagtttagtaatgttaactatattcacattgttgtgcaacagatcactagaacttttttcttgtaaaactgaaactctatacccactgaacaagcctccacttctccctccccttagcccctggcaaccacagtactactttctgtttctgtgagtttgactactttagatatctcatctaagtggaatcatacagtatttgtctttttgtgacaggcttatttcacttaatgcagtgttttaagattcatccatgttgtagcatgtggcagaatttccttttttaaggctgaataatgttccattgtttgcgtgtaccaccttttgtttatctgtttattaattgacagacacttgggttgatttcatcttttggcta

SEQ ID NO: 8837 - DNA, 1059 bp, Homo sapiens
gaggctgaggcaggagaatcgcttgaatccaggaggcggaggttgcagtgagccgaggtcgcgccactgcactccagcctgggtgacagagcaagactccgtcttaaaaaaacaaaaaacaaaaaacgaaaccttatttgaattggtttgtgctatctgacagtttcaggggcttttctgaatttgattttttattttttttattttctgagacagtgtcactccgtcacccaggctggatggagtgcaaggtggtgatcttggctcactgtaactgccgccatccaggctcaagtgattcacatgcttcagcctcccgtgtagttggaattataggcacataccacctcgcctggctaattgttgtatttttagtagagacggggtttcaccatgttggccaggctggtcttgaactcctgaccttgagtgatctgcccaccttggcctcccaaagtgccaggattacaggtgtgagccactgcacctggcctgatttttttgttttctctggatggtatgacgaaatatttaactgtggtaggaagtgcagtgagaaacatgtatttttttttttttttttttttttttgagacaagagtctcgctctgttgcccaggctggagtgcagtggtgcaatcttgcctcactgcaagctccgcctcccgggttcacaccattctgcctcagcctcctgagcagccgggactataggagcctgccaccacgcctgcctaattttttgtatttttagtagagacaaggtttcaccgtgttagccaggatggtctcgatctcctgaccttgtgatctacccgccttggcctcccaaagggttgggattacaggcgtgagccaccgcacctggccaacctcatgtattctttaactgacctctcattcctagtggtaaaaaatgtcaggttacttgggtgcagtagctcacacctgtcatcctagctacttgttaggcagaggcaggaggttcatttgagcccaggagtttgaggtacagtgagctataattaggccagtgcactccagcctggacgacagagt

SEQ ID NO: 8838 - DNA, 1288 bp, Homo sapiens
gattttttttctatttctgtgaagaataccgttggtattttggtagggattgcattgaatctgtagatcacttttggtagtatggtcattttcacaatattcgtccaatccatgaacatggtatatctttccattttttccctatactctttcttacatcagtgttttttatttttcctcatggagatcttttacctccttcataaaagataaatttctcctaagaatttattcttagggcattaatttgtggctatcgtaaatgagattgccttcttgatttctttttctgctattttattgttggtatatagacacactactgatttttatgttgattttgtatcctgcaagtttattgaattcacttattagttctgagttttctagtggagattttagggctttttttttttttttttttttttttttagatggaaccaggctcaagcagtccttccatctcagtctcccgagtagctgggactgtaggcatgcaccaccgtgcccagctgatttttgtattctttgtagagacaaggtgttgccatgttgcccaggctggtctagaactcctgggctcaagcagtccacccgccttggccacccaaagtgctaggattaacaggtgtgaagcacaacacccagcctaattttagggacagtttgacttccttctgtccaagttggatgccctttatttctttctctggccaattgctttgattagcatttccagttgaataaaagtggtggaagtagacatccttgtcttgctacagattgtagaggaaaaactttcatctttccccattcagtatgatgttggttgtgggtttgtcatatatgacttttattgttttgaggtatgttcgctctgtacctaacttgttgagagcttttatcatgaaggaatgttgacttttatcaaatacttttgtatttggtattcgttcttctttaaatgtttttagaattctgcattgaagctattgggtcctgaggctttcttttcttttttctttcttttttttttttttttttaagacggagtcttgctctgttgcccaggctggagtgcagttgtgcgatctcggctcactgctacccccgcctcccgggttcaagcagttctcctgcctcagtctcccaagtagctgggattacaggcgcccacgaccacgcctggctaatttttgtattttcagtagagacagggtttcaccatgttggccagggtggtctcgaactcctgacctcaagtgatctaccccccgcccgccccaaa

SEQ ID NO: 8839 - DNA, 1025 bp, Homo sapiens
cccaggctggtcttgaacttctgggcttaagtgatcctcctgtttcatcctaccaaagtgccaggactatagatgtgagctatcatgcctggccaaagtgagctgctttaataagagtatttgaaattattccagtgtgttttaattccaaatgtattaaaataggtatgatggagtatcggtcttgcaggaagccattcagcttcagtgtgctaccttttctggcatctttctgggacaaattcgtatttgttctatgctggtgagcaagggctctttatacagagctgctgagtgtagcgacctaaatttttttgctcaaacaaggctgttttaataagaaataaattatataaagtcacgtgatccatttagtaaaatattgggctgtgaaccaggagactggtatttagtcacactgattaggtcttacccaataacctttgatcagttgcctctctacttactctatttcatgtgttgtgaaatggcatgatattacctacctctgatctagttgaaaatcttttttttttttttgtgagatggagtctcattctgtcacccaagttggagtctcactctgtcacccaagctggagtgcagtggtgcaatcttggctcactgcaacctccgcctccagggttcaagcgattctcctgccttagcctcccgagtagctgggactataggtgcatgccaccacacccagctaattttttgtatttttaatagagacagggtttcaccatgttagccaggatggtctcaatctcctgacgtggtgatcccaaccaccttggcctcccaaagtgttgggattacaggcgtgagccactgcacccagctgaaaatcttttaatgaatagaaaatctactcagaagtagcagatgaagttagtgatattttttagggtcagtaagagttgataggaaagaagaaatgaacatttctcagttactggccaggtgctaggcactgttaggtgccttatatgtatcttcaaatttaattcttgtaaagt

SEQ ID NO: 8840 - DNA, 1040 bp, Homo sapiens
gggcgggcagcccaggccagcagcagggccttcgggttgggtttgaccattcaaactaacgccttcatttctctcccatgctttctcctccggccaggagcggaaggtacatgccctttctgctatcttcgcttcttagcgcttttgagttgtgtgcgtgtggattcttctgtcctctctttgggaaatagactttctttgtgtgggtggggctgtagctgggagagtgtgctgtgtggggcaggggtggagcctgtgggccttaccccggcctccctccctctcttgcaggttttcatagagctgaatcacattaaaaagtgcaatacagttcgaggcgtctttgtcctggaggaatttggtaattacactattttgctcttaggtctggactcacatggcagtaactcaaacctcggagctccagaggagggtctaggggcagggagaagaagaacctctgtagagaagtcaggaggagcaggagtgacaaggaagaaaagggacccctgagatgagagccgggatgtggaagggaaagatagataatggatcgcagaagagcaaatggggcctcaggtgggtttcgagtttagaggtggtcctgaagcagctcagtgaagtagcaccacctccccgtgctgggccagccagtggtcagaaagtttgggacacagcagactggcgacccccaagctccactatgtccatgtcacctgctgcaatctctctagcagcccagtgcgctagccagcctccctggcgccgctctggtctccacctggcctctgtgccagacaaaggggcaccgggcgtcgcaggcagactcacttgagggacagaggagtctagcgggacagctgtagccggaagctgggagccagcgctagggagtggtgtagtgggttctcaccctggggctttgagttcctgctgtgtttgtgcttcattcttttgtgcccctcatcgctgctatgaaaaccttcgttctccagcaggtaaagtgacctcggctcgtgctgcctctccccaggtctctg

SEQ ID NO: 8841 - DNA, 1063 bp, Homo sapiens
cgtgacagatgcttgcggaggggcgcgttcaaactcagaccgtgaccccgctaggaataaggggatttacacaatgacactgcctcccaattaataaacgacataggccagccgtgtgcaaagggccaaaaaggcatgccacctcagtccgcatttttacaattatttaagtacaagctggccacccggagttacgggagggaatcattaaccagctttaaagagaaatcgctgctgctcctaacgtcagagcaggcttcacggaattgtccacgtgggaagaactcaattgaccatcagcctctacgattaaaaacattatgactcgggccgggcgcggtggctcacgcctgtaatcccagcactttgggaggccgaggcgggcggatcacgaggtcaggagatcgagaccatcctggctaacacggtgaaaccccgtctctactaaatatacaaaaaattagccgggcgtggtggtgggcgcccgtagtcccagctactccgggctgagccaggagaatggcatgaacctcggaggcggagcttgcagtgagccgtgatcgcgccactgcactccagcctgggcgacagagcgagactccgtctcaaaaaaaattatgtctcgtatctgcaattgtttgttttctctgaccatggttagtaatctcagtgagcagagcgggtctccggatcatgggagactcattcgttgtacccttgtcggctattttaaatgatctctccttatcctttgaggtgagccctggagcccctttaaagggaacttcatgtaagcaacatagcttatatttcaagtcaaaccatcacaaacactctgttaacctgatgaaaatctgtgcaatcgttgccttttttttgtttgcttgtttgttttttgttttttgagacggagtctcgctctgtcgcccaggctggaatgcagtggcgcggtctctccctaccgcaacctccgcctcccgggttcaatggattctcctgcctcagcctctcaagtagctgggattacaggcacccaccaccacgcccaactaatttttgtatt

SEQ ID NO: 8842 - DNA, 1026 bp, Homo sapiens
ataatacaagcagcatgatttttaatgcctgcaaaatagagtttccaaagaaatgaaatctcagagtcctttagcacctgctcatgggtcaagggcaccttgacacctgcttctttctttctctgctgatttcccaaccctgtacttcaggtgcacaaatggagtccagaggaggctgtaagagccatcgccaagatccggtcatacatccacatcaggcctggccagctggatgttcttaaagagttccacaagcagattactgcacgggcaacaaaggatgggacttttgtcatttcaaagacatgatgtatggggattagaaagaactcaagacactcctgcttgatacagaacaaaaagagcttaacaggaccaacagggcttaagcccagacttgacgtaacagaaatgtgccaataggtaataggtaatttttctttctctgacttgttttgttttcttgaaataacactgttgtgtggctagaaaggaaaagatttagtgtggcttgtattcatgggatacaggacagggatggggctatcatcttttcttgaatagggctaaagaagtattttaacaaaaatctattatgtacctaatattgtgcctaataatatttagcaccacaactcaaaaaacatttagcacttgaaaaaaggagactcacctctggctctttgccactgtcagaatctgaatctcactggccctgtggagtagggatcctatctggagaagtgggagcatgggctgcagtcaggactgctgcagactgagccatgtgatggtacgtaatgagttcccctgagggaatgaaacaccctcaccccttcaaagtcacccctttggaattcaacacagacacacatatcccttcaaaaacttttatttgtatcaacagttcctagctcttgacttagcttagagcttttaaaagagcagacaccttatatatttgagattgaaaaagtttctgctattaatcagaaataatcatttctattttctggcttacccctt

SEQ ID NO: 8843 - DNA, 1052 bp, Homo sapiens
actgtggagtaattttgagaagaggtgaacaccccagctgctatagtaagagtctttctgaggaccgtgtagttaaggtggcactttccccaagttttcatcactgtattccctagaagggaaacctttcacatgcacctttctcaaggtgcttcagggagcctttcctggatttgacatcccttacaagcctaagagactgcatgcagggctggcttttgccttctccatttcttttttaaatatgccttttccttccagccactgtcagaccacggaatgatgtggcccacaagcagctctcagcttttggagagtatgtggctgaaatcttgcccaagtatgtccaacaagttcaggtaatacttactaatgttatttgggtctgggtcaagaaagaaccatgttcgcagggcatgtgggagtgggcagacttgtttcaaagaaactacagattcctccatcccaagcttggacttttctctcagcattaaaccaggtgactccagctgaagttagctgttccctcagtagctctttgttccctctcccctcactttcatgtgtgcaggtgtcctgcttcaatgagttagaggtctgtatccatcctgatggcgtcatcccagtgctgactttcctcagggatcacaccaatgcacagttcaaatctctggttgacttgacagcagtggacgtcccaactcggcaaaaccgttttgaggtcagttgggagatctgagaaggttttgggggtaaggatattaatttcagtttgtaacatacaatagaacacagcagttaaactggaacttcagagtcaagtagatctgaagttggatcttggttctgccactaaatggctgtgggacctcagataactcaaatattttgtttaattttttttttttttagacggaatcttgctctgtcgccaggctggagtgcagtggcatgatcttggctcactgcaacctccgtctcccaggttcaagcgattcccctgcctcagccccttgagtagctgggactacaggtgcatgccaccacgcccg

SEQ ID NO: 8844 - DNA, 1659 bp, Homo sapiens
atgcctggctaatttttttgtatttttagtagagacagggtttcattgtgttagccaggatggtctcaatctcctgacctcatgatccgcccgcctcagcctcccaaagtgctgggattacaggcatgagccaccgtgaccggcggaaagtgttgggattacaggtgtgagccaccgcgcccggccccatgaaacctcttatattgggtttgagattaaatccacaatggattgtgtgtattatatatacacacacagacacacgcaaatgtattaaaatgtataatatgaagcagtggaacttccctgatagcacaatttaaatatttcctttttgacaaacgtgcatagttaaataaattaagtgaccaccaggtgtgactgaagagtggccagtgtctattcctagccccgaaggagcacagggatattgactgtgtcccttaaaaaaaacaaaacaaaacgtagggctttctttgtattggtttgaacatttctctttatcttgtgacctggccaactctggctatggctgcctcctgtctctcggtacattttctgtggcggtcaagaggagttattttaagccaccaatgggaaagtttaaagacataatccttggctgtaattgcgggagacgggaggctgagagtctgtgctgacttgccacctgtttccacggcagcaaggtgattgtgcatttcctgctgctggctgaggggccagcaaattttcatgtcgttgtgtcatggggaagttttcctgtctcaatgagagcacaccgtgcttgtggtcttgttcctgtgaccaggacatggagaactatggggagattgttctgggtgtgaagggaaattgctggccagtgcttagtgcacgggctttggagtcagagccaacttctccacctcctacctgtgtgaccttgggcctatccttctaatgcttggagtctcttctgtcctcatctgtatgatggggataacaagaatacctactttataggattgctgtggaggattaaatggatctgcatgacaaatgcttagcatgaaaaaatccctcaacagatattggctgctattttattatcttattgtgctgagacactggcataatttacaattcaaaaattaaatttttttaatcttatactgtagtttacaaggccctttcacatatatgagcttgttcaatcctcacagcgtccttgagtttgtcattgttattgccatttaaaaaggtatgactcagagtggctgtaattgacttgtccaattcaggtttcatctgtcttttgcagaataataatcatgtacgttcatagtataggccacctctttttttttttgttttttaagacatagtctcgccctgtcacccaggctggagtgcagtggtgcgatctcagctcactgtaacctccgccttctgggttcaagcgattcttgtgcctcagcctcctgagtagctggcattacaggagcccgcccaccatgcctagctaatttttgtatttttagtagagacagggtttcaccatgttggccaggctggtctggaactcctgaccttgtgatctgcctgccttggcctcccaaagtgctggaattacaggtgtgagtcaccgcgcccaagtataggccacttttaagaatt

SEQ ID NO: 8845 - DNA, 1046 bp, Homo sapiens
tgcgccaccacgcccggctaatttttgtatttttcatagaggtggggtttcaccatgttggccaggctgatctagaactcctgatctcaggtgatccacccacctcagcttcccaaagtgctaggattacagtcgtgagccaccatgcctggccacaccccggtttattgcatttgcttctaatagagaaatcaacccagtaaacaaatgaattattgttagcaaaactggggggtgggttgggaaaggaaagtagttccttctataataaaacttgctgatatttcgttgaaagtcattgtcttactcatccttgtataagataagtcacacaatgagtggtatcagggttgcagggtttccccctgtgaggacacaatgggatgaaccgtgtgtgggatggtctgttaaagaaaaacaagaagccatgtgttggaaacaacctaagtattgagcggtggaggattgctgaaattgtggactactatgcagtcattaccaacgcactgaaaaaatgttccatgatatggcaggatgtttatgctataagaaatttaaagacgcgagcttcaaagtaaagtataaacctaatttggtcaaacaggctgggcgcagtggctcacgactgtaatcctagcactttgggaggccgaggcaggtgggtcgttggaggtcaggagttcgagaccatcctggccagtatggcgagaccccatctctactaaaaatacaaaaactagctgggtatggtggctcatgcctgtaatcccagctactcaggggtctgaggcagaaggatcacttgaacctgggaggcggagggtgtagcgagccgagattgtgccactgcactccagcctgggcaatagagcgagactctgtctcaaaaaaaaaatattggttaaagaaacaaacgttagacttgaagccgtgctttatatggatatgtggtgcactataatgtggtgcttaaaaagcaacttaggcagacctgggccaagtctgggctctgccacgtaactgctatgtgcccctgggcaagtcac

SEQ ID NO: 8846 - DNA, 1062 bp, Homo sapiens
ttcacacatatgatgctcactaagtgtctggcacccttttttctttttctttttggggcagagtcttgctctgttgcccaggctggagtgcagtagcacaaacacacctcacttactgcagcctcaaactccctggctttaagtgatcctcccacctcagccttccaagtatctgggaccacaggcacatgtcaccacacctggctaattaaaaacatttttttgtagaaatgaggtcttaccaggtcgcccaggctgatcgtgaactcctgggctcaggtgatcctcctgtcttggcctcccaaagtgctgacattataggtgtgagccactgtgccccgcctcagtttttaaaaatacttgcttaaggagagagcactgaaggaagatttagatctgctctgttgaagtgacagagtacggtggtttccatttatgcgtattttgtagttcggatggcttcttgtggggagtcctgtgagttcacacttgggggcatggtgtgggggacctgtgaagtgggtgttctggggtgagtgcgatgctagtcactgtcccagttttcttctcatttctttttttgtgagtgcttggctagtggcagccttgcagatcagctagttttgacccacatcctccctctaagtggtgctcattgaattgagccacagccccaaggtcatgttttcaaggttggcatttgggaggccttgtcagaaggtcttataccatattccagtcacccaaagtgctgcccgccatgcctgttcgttcagcaggatttccctgagcacctgctctgtgccaagccctatgctaagcaccaagggagtaaatatggagggcagtgtccccagagtccaggaactcgtgatctagtcggggaggagaggggtacctactctgtcttttacacagcaagtgtaacctctgaagaatgatgttccaggaggcaagagcaaccctggcggactggtggagctgggaagggaaagatgcttctggaggggccttgggagaagagtcctccagggtgagccccttgagagaggtttcagagct

SEQ ID NO: 8847 - DNA, 1027 bp, Homo sapiens
aagtcacacggtgcaggatgggactcaatatagggtgggatagggcggtgggtaaaagccgttacaattttgtccaaatggtatgggctgatttacttattagggaggtacaaatggcttcgtgttataaagtgtcaagatccttatttggataaggcaaccagagtgtagacgagagagtaagagtaagaaaacaaggagaaaaatgagtgtcttaaggatgtagaaatttagtttgctggaagtctctgcagcctgaacaaaacagctgttaggtttgccagaacttaaaccagagggtgcctgccagtggttcatattcttgctacctcttcctcctcttgtcttgtttttcctttccattctaataatcacgatgagtttccctgacatgcacgccccttcattcatttgtatgatcacttagagatgaggagctgccttgccaggtagaaaaaccattctcaggatgaatctttggctttctgaatcagagttttctttgggttttagaacttcattcttattaaagtgggaatttaccggccgggtgcggtggctcatgcctgtaatcccagcactttgggaggccaaggcaggccaatcgtgaggtcaggagttcgagaccaccctagccaatatggtgaaaccccgtctctactaaaaatacaaaaattagctgggtgtggtggtgcgcgcctgtagtcccagctacttgtgaggctgaggtaggagaatcacttgaacctggaaggcaaagattgcagtgagccgagatcacaccattgtactccagcctaggcgacagagtgagactcggactcaaaaataaataaataaataaataaataaataaataaataaataaattggaatttaatatctcttatcatttcttcaattccagtttttattagatccacaacttttttggtcaaaaccagaattttgattatgtgtgccatcctaggctacctcaccatccaaaaatcctcttggaaaaccccacgcttatcaggaaaaggag

SEQ ID NO: 8848 - DNA, 1056 bp, Homo sapiens
ggtgtggtggcgggtgcctgtagtcccagctacttgggaggctgaggcaggagaatcacctgaacctgggaggcagaggttgcagtgagctgagatcataccactgcactccagcctgggtgacagagcgagagtctgtctcaaaaaaaaaaaaaaaagaaaaagactattggtaacaaccctcatttttttgagcacttgctatgctgctaactgctttatgcacactatttctttaatccttaacactatttctttaatccttatatctacccatgagatagggttttgttattcaggcagtggcaaaacctgcggcttagagaggttaaaaaaaaaaaacaacaaactgcctcaaacaaagtcatatagtaaatggcagtgctggagattaaatttaggtctgtcttgttctgcagtccatataccatataactttgccaaatacaacactatggtgtgtgtgtgtgtgtgtgtgtgtgtgtgtgtgtgtgtatgcacatgtgtggcctttattgaacactgtggtgtgtgtgtatgcacgtgtgtggcctttattgacttattgaattgatcctgaatcttccctactcctttcctgtctcttttctctttctgaataacatcatttctttttctctactggacatggtctctgtgggtttcacccctcacccctcttatttttgaagttttattgaggcactggttgaggctttagggctcccactgttaagtttgacagtaataggtaagtgtccccccagtctcccttttgccctttctttttttttttttgagacagagttttgctattgtcatccaggctggggtgcagtagtgtgatcttggctcactgcagcctccgcttcccgggttcaagcgattcttctgcctcagcctccccattagctgggaatacaggcgcacaccaccatgcccagctaatttttgcatttttattagagacgtggtttcaccatgttgggcaggctggtcttgaactcctgacctcaagtgatctgcccgctgcagcttcccagagtgctgggataa

SEQ ID NO: 8849 - DNA, 1028 bp, Homo sapiens
aatagattttatttttagagtagttctaggttcacagcaaaattgagcagaaggtgcagagatatcccatatacccctggcccccacatatgcacggcctcccccgttagcaacacccccaccagagtggaacaatcaatgaacgtacattgacatatcactatcacacaaagtccatagtttctgttagaattcatgcatagcattctacattctgtgggtttggacaaggtatgatgacatgtaactgtgatttcctcaattcaatatgtatagttcctgttcacacatttcttcacacatttgttcctcagtgctcaaatgcctgctgtattccaggctgtatttgaagcccctgagcctttatttggagagttcattgaacattagagcatgcagtttgctgagatgtcttgtacttagaaaatccaatttataaaaaacctcaaatagaacagtaaatttagggaattttttttttctgatgataaaattagataactctgttgcatggattctgtaaaacacagctccctcctgttacgccatgaattgggttcaatttacaacacccctttaggcatactttttcagcaacacatgtctgagccgaggtgcactgtgcctctttctgtagcaggcagcttttagggggtgtcctagtggtcttatgttttatacatctcatgggagtggctggtttctaggaaatagctcacttgccagttttggtaaccctaacagagctgttttgccaaggcgtctggtgaatatttctgtcttccagtcaggactaatatagtacttttcagaggtgatagccagttaactgatgactttttttttttttttttttttttttttttgagatggaatctcgctctgccacccaggctggagtgcaatgatgcgatcttggcttactgcaacctctgcctcccggattcaagcgattctcctgccttgcctcctgagtagctgggattacaggtgcgcaccaccacgcctggctaatttttgtatttttg

SEQ ID NO: 8850 - DNA, 1035 bp, Homo sapiens
cttttgtttttgctcctgctggtgatctgattttaaatgtgaacgtgccattgctaagagtttttgttctatgtattattctgtgtggaaaatttcttaaatgggattattgaagtatacttcattatttatcttctggcaatttatcaacaacagcaaatatcattcattattgtttggaggacagaactatttttatattctttaattaaaaatggctttgacattttcaaattcagagggaagttgataatttagtgctgtatgataggacctttagttggtctgaatgtcacataattgtacaaattgctgttaaagtatattattacttattttctgagaggtagagggacttggttatcctgggattgcataattattggttcactagaactacagatgagtgaaaagaagggttagatactctctagttcacttttcttccagtgcagggaacattctatggggttccgaacagatataataagctcataataacagtggccattgattgaactctttctatcaaacaatgtgaaaaacattagtagaggtgatatcttagtctgcttttgctgctgtaacagaatacctgagactgagtaattttttttttttgagatggagtctcactcttctgcccaggctggagtgcagtggcgctatcttggctcactgcaccctccgcctcccgggttcacgccattctcctgtgtcagcctcccgagtagctgggactacaggctcctgccaccacgcccggctaattttttgtatttttagtagagacggggtttcaccgtgttagccaggatggtctcgacctcgtgatcctcccgcctcggcctcccaaagtgctgggattacaggtgtgagccaccgcacccagcctttttttttttttttttttgagatggagtctcgctctgttgtgcaggctggagtgcagtggcgccatcttggctcactgcaacctccacctcccgggttcaagcaattctcctgcctcagcctctccagtagctgggacta

SEQ ID NO: 8851 - DNA, 1026 bp, Homo sapiens
tttggaggccgaggtgggtggatcacctgagatcaggagttcgagaccagcctgaccaacatggtgaaaccatatctctactaaaaataaaaaattagctgagcgtggtggtgtgcgcctgtaatcccagccagctacttgggaggctgaggctggagaatcgcttgaacccgggaggcgaaggttgcagtgagctgacatcatgtcattgcactccagcctgggcaacaagagtgaaactctgtctcaaataaaaaatattatttttctaaaaagctcttattttattgtgaaacacttaaattagcaaatctcaggcttgctgaataaggcttcccaggcaaaccacatcccacatgtgcaaatgtctggtgacacagtgcttcatttttttccactagtacttactactacctgacattatagtgtaagtttacttgtctatttgtgtatggtctgcctctcctatgagaatgtgagctgcatgaggtcaggacattgttttgttcactcatgaattcccagcacccaggacagtgtctggcatgtagtgagtacccagtaaatatttgtggaatgaatgaatgaatacttaagtgggtgggaagttcttggaccttagtctagacccatggttctcaaagagtggtcctgggactcttggggattcctgagatccttttagggatctgtgaggtctgtgaggtcaaagtatttttataataatagtaaactatttgtcctttcactctcattccctcatgtatgcaaatctcagtgaactgatattttccaaataaccaatgcataaggccacaaagccatgcagggtaaaaagagctatgaacaaaagttttctagagaagaatttggaggaaagagagtttattctagtgaacagatcgcaaactgggagatgctgcgttggtgtaaaatgaaggtgcattccagagagcaaagagagaatctagttttttgttgttgttgttgttttgttttttaaattttgagatggagtcttgctct

SEQ ID NO: 8852 - DNA, 1030 bp, Homo sapiens
acttgggcacagtgatgtgtgaaaaatgcccacctttgctcttggtgtccagtgggccttctatgggccctctatagaggtcatcacctggggattcctgactctggccaggtcctgaggtctttccatgttactctccatgttacttgagtaacataagagcttcttatggctcttatgttctgcaggacggatgaactaggtacccaggacaggtctgtttgtgcacaaggctgtctccttctccccctccttggtttttctactgaggctttgttgtgcttggctcagggtgatgttagcaaatgcactctccaccctgctgtgccacattaaggaaacgcatgttgtattggcttctgccaagtcagctcacatgctttgttttagtgactctgtgaagagctcatcatctattatttattcaggtaacacacttctatctcctaatttcggtgctactcccatttttcatccccggttagcgtgctgtgcgccaggagggctgcctgttgtctttaagaaccactttgaacatttttgctttggttatttattcataccaacatgttgttgttaaatgacgtgaaataaaaccccattttaaaaagaaattgtaaaaggaagctatgtcctgtgtggaaatcatgacaagcccagaaacatgttacaaaaacattaaccaggagcggtggctcacgcctataatcccagaactttgggaggccaaggtgggcagatcacttgagaccaagagtttgagactagcccggggaacatggtgaagcccatctcaactaaaaatacgaaaactatccaggcataatggtgcaggcctgtgattccagctactcaggaggctgaggcaggaaaattgcttgaacccgggaggcagaggttacagtgagccgatattgtgccactgtactctagcctgggcaacggagcgagactccatctcaaaaaaaaaaaaaaaaacaaaaaaaacccacacacaacaaaaaataaatattgcctgtacctatcacct

SEQ ID NO: 8853 - DNA, 1047 bp, Homo sapiens
agaattgcttgaacctgggaggcgggggttgcagtgagccgacatcgcgccactgcactccagcctgggccacagagcaagatttcatctcaaaaaaaaaaaaaaaaaaaaaaagaaaaagaaaaaaagaaatgcaggtaggtgcttctagctactgctgtgggatagcaaggtagttaccaaactgataagggtagcatcttacttactgctgaaaaattcagtgtcttttttctttttttttgagacagagtcttgctctgttgcccaggctggagtgcagtggcgagatcttggctcactgcaacttctgcctcttgggctcaagatattctcttgcttcagcctcccaaggagctgggattataggcactcgctaccacacctggctaatttttgtatttttagtagagacagggtttcaccatgttggctaggctggtctcaaactcctgacctcaggtgatccacccacctcagcctcccaaagtgctgggattacaggcgtgaactactgcgccgggcttgagtttgactttttgaaaatattccacctataagtgaagttgtgcagtgtttgtctttatgtgtttagcatatttcactcagcataatgtcctccaggctctgatgggcacttggcttgtttccatgtcttggctattgtgaatagtgccgcaatgaacatgggcaaattgccgtgttgagttaaggaagctcttttccagtctgagtttgcaaatagcttttcatatatgagcgttgaatattatcaaatgcttttctgcattcactgagatgactttatgtatttaaaaaaatctgatggcctatattttctatttctaaactactcgtgtattcctggtataaatcaactcagtgtgttactctcgtttttatacatagctggattcgttttcactaatattttgtttgagatttttgcctcagtgatcatgtatgtgattgctctgtaacttttcattcacattttgtccttgtctgtcctggtatcaaagttatattggcttcatagaatgaggg

SEQ ID NO: 8854 - DNA, 1024 bp, Homo sapiens
cctcctctcatttcctgtgaatgattgtgtgcaatgtaagcacagagcttctgcactctcatgatcaagtgctctctccatggccagaaacagcagtttctgaggggctcatgttgtaggtgatgatacaaagaagacagagagagggatcaggtgtcctaagtgtacatttcatctcagtattttctgaggtggggcatccctgtctcctggagaagtatatttttaatctagttgtttactttctttgcatagcccctgttccagtttctgacttccgagtgacagtggtcagcacgacggagatcggcttagcatggagcagccatgatgcagaatcatttcagatgcatatcacacaggagggagctggcaattctcgggtagaaataaccaccaaccaaagtattatcattggtggcttgttccctggaaccaagtattgctttgaaatagttccaaaaggaccaaatgggactgaaggggcatctcggacagtttgcaatagaactggtaagcaaataggcttttctgttaaaccatcatgtttcttaaaggaaatcagtataattaataaacataatgtttccaaatattgtttttcttttaattatctaagaaaaaactttaaaaattttcataacactaatgcttatttattatatgaaatacagacaagtaagtagaaaaaacttacatggaaaccatcaagcagagataatcacttttgatgtatgacattttacaatttttaaacatatacatatagatacacaaatatatgtgtgagtatacatatatttaatacatatatatttaatatttaatacacacacacacacacacacatatatatatatatatatatttttttttttttttttttttttttttgagacagtcttaccctgtcacccaggctggagtgcagtggcatgatcttggctcactgcaacctccatctcctgggttcaagtgaagcgattcttgtgcctcagcctcctgagtaattggaattacaggt

SEQ ID NO: 8855 - DNA, 1056 bp, Homo sapiens
aatctcataattggaatatacggaatatttaaacagtagcttagcatcagaggtttgcttcctcagtaacatttctgttctcatttgatcaggggaggcctctttgccccgactccgcttcccctgccccctgtacatttgtgctccattttttcttcccttttccctcccagttttctccaaagactcttctgttggcaacattttcaacccattggttgggtgagaatggcgactcaaatatcaccttgagaatttctgtgggtgggaatgggagaagcagaggaatcctacagtggcagaaatccttttcttgtccctgtattatcctttttctcatgtctgtatttggtatgaaggattatttaaaggtgcaatatgtgaattagtgattcatgatgttctaggtttttagtaacgttttactcaggttggcattttatgtgtctgtgtctgtatgtgtgtgtgtatgttcagaagcgtggcaatctgtgaacacttcagcgtgaattcagtgtcagattaatccctccttccccaaagtccactggctttcgtctctctctgccgtgacacatatcggaatctactgtgtatatatatatatatatatatatatatatatatatatatatatatatacactaagctctcaaaaacagtcattcctatgaattgaggtgtacaaagtttgaatttgtatcaaagatgtaattattatttttaaaaccttttcactatactgctgctgtaattactttgatttttaaaatgtagattaatttttttttttttgcttcaggtgtgtatccaccaagaatttcaaatttatgtggatttattttattggtacataatctgtaaacttcttaaggcattaacatgaaaagattttttctttttattttatattgtggctcaggttatattttgaagatgttttgagtttatcctccaataggcaatgaagttgacaaggttttatgaaggaataaccaagtccctggagtcctgtggctgttgccacagtaatgtgtcctgctgtaaacaggacag

SEQ ID NO: 8856 - DNA, 1034 bp, Homo sapiens
agcatgccataagccaccttggtgccccctttcagccacaccctggcaaagctaaccactatcctggctgctaaccttttaagttggttctgtgctcaattttttgaaacttgcttcttttttaaaattaaaaatttttatttttagagacgaggtctcactctgtcatgcaggctgcagtgcagtggcactgtaatggctcaccgtagcctcagactcctggactcaagtgatcctctcacctcagcctcctgagtagctgggactacaggtgcgtgccaccacacctggctaatgaaacttgctttttttttttttgagacagagtttcgctcttgtcacccaggctggagtgcgatggtatgatcttggctcactgcaacctctgccttccgggttcaagcaattcttctgtctcagcctcccaagtacctgggactataggcatgtgccaccatgcctggctaatttttttgtatttttagcaaagacagcgtttcactgtgttggccatgctggtcttgaactcttgacctcaggtgatccgcccacctcagcctcccaaagtgttgggattacaggcctgagccaccgtgcctggctgaaacttgctttttatacttgacatattgtgaactctttctgtgttattaggtattcatcctgttcaccattttaagagctgcataatactccatagtatggacacataccactctcgagttaactactcttttattgattgccattagattatttctgattttactctcctgtgaataaggatgtggcatctatcacagtagccagatctttgcagacatcacaattaatttcttagtaaacttttctataaaattaatgaatcgaaatatataaaaaggtagggctttaggctggtcgtggtggctgatgcctgtaattccagcactttgggaggccaaggcaggtggattgcctgagctcaggagtttgagaccagcctgggcaacaaggcaaaacgtcatctctaccaaaaaatacaaaaaattagc

SEQ ID NO: 8857 - DNA, 1035 bp, Homo sapiens
taattttttttattttcagtagagatggggtttcaccatattggccaggctggtctcaaactcctgaactcaagtgatccatccaccttggcctcccaaagtgctgggattacaggtgtgagccaccatgctgggccgactaaagcctttttaaatgctaatggcttttttccaggatgtctgaaacttaggtttgagattgtggaaactgagagtattggaaaatttcagaattgatttataagatacaccaatgagagagttttggcttttagtgctacccagatggttttctttgtactcttaagaacagaagcctggagaagtgaaggccactgagaaaggaaagggtaagttgtatttgggaagagagtcctaaaagagtccctttatgttagtttctgccgagggaatgacagtaattttcccattacttggttctgttgggaaaagcagttggtatgaaaaaatttcccatttaggatctaggatctgcatcattctcactttgatcttcagactttcttcatttacttgttattggaagagactgagtgatttaaaccttccctttttcctcagttttttttttttttttattaagctcttgaccatctggaaggcatccttgctgttacctgtttataaattaacatgtaccaggcttctgagccttatactgttgagtcattgatttagtgctctagttgcagctcttggaatcatcagagcatgctggatcttctgggaagttactttgtcatggttcaggctcaaacctagttgtgaagtgttattcagagcaacatgaggttgctggaaagaggaagaagtgaattgaagtggtagggaataaaaacacttgggctcattgaagtagagattattggggtggaggcaattatacacaagttaaatctgaggtaggagggaaggaaaactccccatatttagctttagaagccaaaagatattctgaaaaatgtgggtcacattgtctaaagagtcagcaaagtaatactgatgtatttctct

SEQ ID NO: 8858 - DNA, 1045 bp, Homo sapiens
tctttttcccttctaattatcttcccaggctgtaggagtcaagtgagtcaccctttctcttcttccccaggcggaaattgaagtgacaacttagtactagggaggggctctgacctggatgactggttttcagtttctctccctccttcttaaggaacctaggaggtcaggctttggggtgaggcggtgcaggaactcttctttttgcttatattccactccaaaccctgccaatgtatggagacatcttttctgaaccaaagaactcacagaggaagaagcttccatggggggctttctttgaggatagtatagaactatgactgaaggtctgtttagtccctaaaattgatgcccttgctccagcttcgttattttgtctgctaattgtgtactgacatatcaagagaaccaaacagctaatggatatttactatctaaaaagcctggcatataataaatactaaaaacttttcaaaatgaatggctgaatggaatttgaataaatagatggtggtggtaaagatttgtgagatgctttgtgacagttttgtctcttatcttgatttgcttgtatctcgttaaggaactgagttcctccaaactgctctgagtcagtctcagggctgtgctttttgttttggtgggtgcagataccttttcttcacagaatcccagactgctgtggtttaattctctggaatcatatgctgtcttgttctcctgtcctcttcttcctttccttcagtgagttcttcctttgctttgactggttcagataaaggggacaaggacagatgctgtcctcattctggagattaagttctcagccacaaagtagattagagtatttatccactgtcttggtagtgggaacttctccctgagctgagacgagagtgtttgatactactgacaaaaaagtagcacatcaggttcttccaaaacttccagctcccaggaaatcagcagagaaaggaagagctcttgaagcattcctacgtagattcaaatcctgaaagaaactgagtttaattctggacta

SEQ ID NO: 8859 - DNA, 1046 bp, Homo sapiens
cccggctaatttttgtatttttagtagagatggggtttcaccatgttggtcaggctggtcttgaactcctgacctcgtgatctacccgcctcggcctctcaaagtgctgggattacaggcgtgagccaccgcgcccggccaatttttttttttttttttttttaagagatggggtcttgctatgttgcccagtacagtggctattcacaggcagtcatcatagttcactacagccttgaactcctgggctcaagccccagccccccaagtagctgggactacaagtgtgcaccactacgcctggttggccttggcctttgaccaacctctggaaggtctcccttgcagatttatagagcaaaataaactggatttaattttgaactaattggtgaccatgatcaaaacttagctgccatttgtttctcttcttgacagaagtaatttaatgctatggtccagggatgcctctcatctgtctctctttgtccctaggaatttgatcatcactgcccctgggtgaataactgtattggtcgccggaactaccgttattttttccttttcctcctttccctgacagcccacattatgggtgtgtttggctttggcctcctttatgtcctctaccacatagaggaactctcaggggtccgcacggctgtcacgtatccttcaaggccttttagattgtgggattggaagggggaggaatgagggctaaagggaaaatggctgcagtaggggccggggaaagtgaggtcatgttgctctgttctccttgattgtttggcatcagaatggcagtaatgtgtgtggctggcttattcttcatccctgtagctggcctcacgggatttcacgtggttctggtggccaggggacgcacaaccaatgaacaggtatggagaaaagtgacgagagacccctgaagagcaggtcatgtctctttagccttctgattagtgtgcagtgtagtgcttccacaaagagatgcttaatgaatacttttcatgattatgtagagattaatggtagggagtgag

SEQ ID NO: 8860 - DNA, 1023 bp, Homo sapiens
ccactgcactcctgggcaacagagcaagactctgtctcaaaaaaaaaaaaaaaaaaaaaaaaacccagcaaactcttattctgaaatcctggatttaaaccagctgaatgagtggttttccacccactgattcaggaacaaccttggctttcacggcaacagattttaactgtgttaaatttaaagtcagattacattaattcaggttttctcatggatgttttcagttacctaaccagctggaaaaactaaaagtgttttttgtttttgtttttcacattttgatggtttaggctacattttgttgctgttttagaaatgttttcacatcagctaaataactttattgtcttaactaaggaccgaagcaggtcaaaagttcttgtaaagagaagggaagctttacctttgcttgccagaagttcatctcaaaagatcacaggcttctgacctaaagaaccaatcttgttgaaacacatgggtgactgtccatgtgttttcagttggctattctctttcgacacaaaattgacctagaatacactgttgagccctacctggatcagctcttcagatggagcctgagatcaccgaggcgcttggttctcaacataatgggcagagtgttacgtgtctgctgtggagtattagtaagcttgggtcacttttcattttggttggttccctgcctgctagtgagatcatgtaatgacaagacccaaatcccctcaagtcttaggaatgccttgtcttaaatcctgattcacagaaaggcacatacctcttaacaggcagtcacacttcagccagtttgataaatgtaatttttttttttttaaagaaaacacagaacaagtcctaaatcagacaaattgcacaaaagagagagaagaaaattgtaagcttcctgggagaggaagagatgtccatgagaaaaccaactgggatgagcctacaaaagcatgtccctctctctcctaatttacttagtctcaactgagcccaacaggagctggcctctgt

SEQ ID NO: 8861 - DNA, 1047 bp, Homo sapiens
atatggtctttgtgcacatttgcattaagaaaaaagagtcctaaggtcaaactgaaaactatagagttctaggttctgtttttttttctgcctgctttagatcggctgttacttttcgactgagataaaaaccactgttctctgtttttttgcaagtcggtgaagttgtatttgtctcatggcaaaagtattgaattaatagctatgggaactgtgtgtgtgtgtatttaaaggcctttataatagacttatataattttacgttcaattggcaattgaaacccttttaatttccctctagcacaccagactttctcttcttaccttatgatgtaaattttgctatctgattttcacctgagttgcctttaatatgcaaatttaaggctgtttagctgacagctgcctagggtaggatttttaaaaaacggaacaaaaaggaggttgttatgagtctatgccatgtgcttctatcggcatacctaataagtctatatatttatgtgtgtgtatacaatattttcactactgaaaatatataaagagctctaattaattggcttaaaaatatataaaagcgggtagggcgcagtggctcacgcctgtaatcccagcacttttgggaggccgagacaggttggatcacaaggtcaagagtttgagaccagcctggccaacatggtgaaaccccgtctctactaaaaatacaaaaattagccaggcatggtggcatgcactgtagtcccagctactaagactgaggcaggagtatcgcttgaacccgggagatggaggttgtggtgagccaggatcacaccactgcactccagcctgggcaacagagcaagactccgtttccccccacaaaaaaaaataattatatatatatatatgcatgtggtggccatggtgcctcacgcctgtaatcccagtaactttgggaggccgaggtgggtggatcacctgatgtcaggagttcgagaccagcctggccaacatggtgaaaccccttctctactaaaaatacaaaaattagccagccatggt

SEQ ID NO: 8862 - DNA, 1047 bp, Homo sapiens; identical to SEQ ID NO: 8861

SEQ ID NO: 8863 - DNA, 1047 bp, Homo sapiens; identical to SEQ ID NO: 8861

SEQ ID NO: 8864 - DNA, 1019 bp, Homo sapiens
ctgtagttgacttgccctgggggtatggacaagttttccatttggaagtttatttcatgttacttcatttatgcttatccctaccctcttctgtttggttcttgggtgttctgttactgtcctgtgttaacactgcattacaataccattaaatttggttacaaggattttgaccttgtctttgtccctagtgcttcatacagtgctttggcatgttgttctgcacttattatgttgagtgagatttggaggaaggatgcaatccttgagcttcagggtttgtgagttcaagggttggggaacatgtcttcctcagtccttaagattgcccagatcctttctctaaccttatttcccttctcatttttgcagctttgtgtccctggtgatgttggaacattaatgatggaacatggccaaacttcagtcatgatcctgaagccatggtttcttccctgccagaaatgaaggttcagttatgaggcaaccctctagtaaggcattgtaaaagttactggatttggtttaataaaagttgaaataaagtatttgagtaatagagtaaaacttaatcttaagggatggacaaagccagccttgtggagttggtagtccttgtgtttttcatagcccaagatagccatgtgacctggaacttttaaaaaaaaatttttttttaagagccagagtctcactttgtcacccatgctggagtatagtggtgctatctcggctcactgcaaccattgtctcccaggttcaagcgatactcctgcctcagtctcctgagtagctgggatcacaggtgcacaccaccacgcctggctaatttttttatttttatttttagtaaaggcggggtttcaccatgttggccaggctggtctcaaactcctgacctcaagtgatatgcctgccttgacctcccaaagtgctggggttacaggcatgatgagccaccgcacctggcctgacctgcaacttttatgatctctggtaaaacatgagaaatacttgta

SEQ ID NO: 8865 - DNA, 1113 bp, Homo sapiens
aatctgtctgccttggcctcccaaagtgctgggattgcaactgcacccggctgtttttattttttagagacaaggtctcagtacattgcctaggctggtcttgaactccttgcctcaagtgatcctccttccttggcctcccaaagtgctgagattataggcatgagcaactgtgcccagcctctaattaagtatcaggtttttttaaagctaatatttgttgagtcattatgttccatcaggcattgttctaagtgttttaccaatattaatttatttaatcttcactgtaactctgtaaagtagctactgttattataaatgagtaaactgaggcatagttaagtaacatgcttacaactgcaaagtagcagggacaagatttgaattcaaggccgggcacagtggctcaaacctgtaatcctagcactttgggagactgaggcgggaggatcacttgagcacaagagtttgagactaacctgggcaaaacagtgagaccttgtctctaaaaagaaaaaaaagaaaaaaaaaaaagaatttgagccagaaagtctggctacagagtctatgcccttaaccacttcagcaacttttgtaaactctctttaatagctcatatttttatcttctcaatgccttaattcaggtcatcatcatcccctctctcctggattatgaaacagctgcctatctaggctcagtaaccaataatggctgaatgttgtttctaaacaacaagctgaatgttgtttctaaagcaggtattagattataacctcctgcgtaaaactgttcagtatgtctcccagtgtcctgagatacctacttcctttgtatgacacttcagacctcacatgtttactaatttctcttttcctctctggtcaatacatgttttatagtctgctctaataataacgaacaaacccgtggtcacatctctgaacctgtatacgtgctgctgtctgccaggaaaaatccctgcttcctcccacttgtttgtctttcagatctcacctaaggggttattccaagaaaagttccctaacccttgtctcccagtctcctcaagtctgtgaaggatgtttcttttttatcctcctaagtctg

SEQ ID NO: 8866 - DNA, 1032 bp, Homo sapiens
ctccaatctgcagtgtacagagggatatcctacaatgtagcaactcgggattccagagaagatggtgctggcaagtgagacagttcttccttctaggttctaagtctgcagtacaggagttaggactgtgccattccagccatccttatatttagattcatgctttcaaagagcctctaatctagactgaataatgatctgagctgtctggtgagcagtaaaactggcccaaataatgtattttataaccagtgcccttttagcaagaaagtcagtgggttgttagggataggccactacagtggttcacaacaggccataagagtctatgagggtttatttatttatttatttatttatttatttatttattttgagatggagtcttactctgttgcctaggctggagtgcagtggcgtgatcttggctcgctgcaacctccgcctcccaggttcaagtgattctcgtgccttagcctcctgagtagctgggattaaggcatgcgccaccatacctgcttaatttttgtatttttagtagaggtggggttttgccatgttggccaggctggtctcaaactcctgacctcaggtgatctgcctgcctcagcctcccaaagtgctgggattacaggtgtgagccaccatgcccagcctatgagggtttttttttttttttaagacatgaattcccagacttccctgtagaaactgatgtagaggggggatttaattttttcaaaaagctccctaggtgattctgatcattcacgtttgaggatcacaaaacctgaatatttgaattaagcttacatgtatatgttatttctcaggtggatggttatttagttaaggtgagaagtagagccaggcacggtggcctgtgcctttggtctcagctacttaggaagctaaggagagacttgagcccaggagtttgacaccagctttggcaatatagggagaccccgtctcgaaaaaaaaaaaaaacaacacacacacacacacacacaaaacaagagaagtacagaa

SEQ ID NO: 8867 - DNA, 1042 bp, Homo sapiens
caggcttctccttcctactgaccagtcaattgtattaagtgtttgatgtgagtttgaactgaggtctcaggaggggagggagcgagggagggtggtggtggaaacagctggtgccttcatcaagctatctcaattactcttcagagtgtttgggggtgggggttggtggcacaggaattagatgtgtgttagcagagtctcagcaactcttatgtagtgggtttgaattctcaggcactcttaatgctatgtgggatgttggctagttggaatgtagctaaacctttcccagtcacattcttctgcctcgcctccctgtaattctttcagcattgggcctgctttggagaaagaggggtgtgggaagttagacagcaaaacagattcatccttcctacccattgagtattcagcttaggtcttgggccctccagaggctttcttcatatccattcattattcctttagttgggctttctaaatatgtctgcaaagagtctgagatacaattagaactgggacctctggtgaagttaagttgaattgtaatcagttggctatacttgtcgtcttccctccctcacaccccaggattactgtatttctgagtcagcactccttttctatctcacctgctcaatttgatgcagagaacttgccaagcatccttttggattagcagcattgatgtgggtgtgttcagttctctgtctggggtgtgtcttttacaactttttttttggtatctcagaaaactctcccctactaaaagctactatttttatctactttagtatatctacttcacaccgtggtacttaattaactcatttatttggtctgggctatgcataaggaagaattggataagaatactaacagtcataactaattgttcagtattcttgagagataaagggagttagtctgataccatgccaagtaagagactgttaactttttttgtgtatgcttcagtgatagagtttgcaatggctgggctctgctgctgaagttccatagtgttgctaaatattctttt

SEQ ID NO: 8868 - DNA, 1042 bp, Homo sapiens; identical to SEQ ID NO: 8867

SEQ ID NO: 8869 - DNA, 1042 bp, Homo sapiens; identical to SEQ ID NO: 8867

SEQ ID NO: 8870 - DNA, 1034 bp, Homo sapiens
cataatgggatgtgtcacatgtagctgagctgaattaacagcatcagtagctttaaaatccctaatgcagtgcctccaaagtgaagaaacttgccaagtaggaatcttaaaaattccctcacccccttcaaacttttagatccacacacagtctttctgctgattcttaaaggcctgagctttgtcctacgtagtgttggcttggggcagagaggagggttgttttccctgaacatgataaggagctgagcagggcaaagtgggggctctggcccgtgattggtagacaggatgccctggaatgcagttggcctgcagcccagaatccagcactttgtatttgtttgtttctgggagactgtggtctggtgctactgtgacaggaagtgagaaagctgggagtgggggaacagagagggtcgatgtctttgtggttctcctgtgaaatctctttgtccctggagagcagctctgctacagagctctgctgagaagagagcagcctttgtgtgtctaatgggtctcggagcatctagctactccgagggattagagagtgtgaattctgactgtggccttttgcgttttagcacttaagttatataaatggtcctgatctcttagcactgggaagcttactgagttttgtgtgtgctgctattctttgtggatctctaggatttaattaagaaaggaattctagaaggaaataaatgttaagtaatgttcatttgctgtatatgttgcaggtaccttgttgggtttaaaagggacagaaggaaacaggtaatgctgaggtcctttacattttatatctcatccttccaattggcaccctactgcatacagatcaggagaaacctacccgcttagtattaagagttactagcaattctctaatgtttgatcataactagagaatggttggtagtttcctgggatttttcttccctatgtctagactgaaatagcacctgtaataccctctctcttttctgccctcttttctctcttgttttgtgttttccctgcct

SEQ ID NO: 8871 - DNA, 1034 bp, Homo sapiens; identical to SEQ ID NO: 8870

SEQ ID NO: 8872 - DNA, 1034 bp, Homo sapiens; identical to SEQ ID NO: 8870

SEQ ID NO: 8873 - DNA, 1053 bp, Homo sapiens
aattgagtaaggttttgttctttaaagtgaagataagacccaaaagtctagctggctccattccaccttctcttgcctccttcccctctccgtaaaaaaaatgtcaactttgggttaacttcttaattggaactagaatgactttttttttttttttgagacagggtcttactctgtcactgaggctggagtacagtggcacaatcttggctgactgcagcctggaaccaccaggctcaagtgatcctcccacctcagcctcccgagtagctggaactacaggcacatgccaccacccccagctaattttttgtattttttgtagagatggtgtcttgccattttgcccaggctggtctcaaactcctgagctcaagcagtctgcctgcctcagcctcccaaagtgctgggattacaggcttgaaccacctctcctggcccgaagaatgacttttaaccccaggaaacatagaaaattcatactctttccactttatcaagaaggagcatggacttggaataaaataggagttttcactacttactactagttgatgagcttgggcaagatactaaatacttctggtatataggtagtatacttatttataaaaagaggccattacctcagcaggtgttgaaaggattatatgataacttcaaggggaagagcaataatgcacaactttcttccccttcaagatgggattttcttctttcagataaggagaaacatttcctcctgctatctgtcctaaagccaagaaaggaccttaacacttctgattgatttatttatagattgacatgctctgtctccctgttgcttatctcaaaaggaagacatactccaaacttgatgaaaagaatgccttattggtcttttcagggttttgaggaattgggactgtgtaaatctggctcaattacatgcttccaccttttccaagttattttcaaatgatgggcaaagaggtgggggaatgccatagattgaaagtttggtgagaagctgctattttctttctttctttctttttcaagatggagttt

SEQ ID NO: 8874 - DNA, 1053 bp, Homo sapiens; identical to SEQ ID NO: 8873

SEQ ID NO: 8875 - DNA, 1053 bp, Homo sapiens; identical to SEQ ID NO: 8873

SEQ ID NO: 8876 - DNA, 1246 bp, Homo sapiens
tttctttatgggttggtgagagggtgggaattggggagaatatttatttcaaaacctgtctttcaacattgtatattttggactggcataaagtctttcatagctataagagagaaaaaaacccattgagtccaacagagtatcactaatgcctgtaaaacctcctgtttatataatggtatggagaactcttcatttttatataactatcttttattgtatagatagcacacatagaccctctagatacttggatatttatcctgagttggaacaaataaaagggtaaaaagatagtctatttaaaacaagagtgtccaatcttttggcttccctgggctacagtggaagaagaattgtgttgggccatacataatgtacgctaaggatagccaatgagctaaaaaagaattgcaaaaaaaaaaatctcataatgtttcaagaaagtttacaaatttgtgttgggccgcattcaaagctgtcctgggctgcatgcgtcccgcgggccaagggttggacaagcttgagttagaggtttctgcaggattacagagatgtgggaacttccagccattgacgtgtggaggttaggatatgaactactgtgaggtgcactttcagaggttgaggctaatactccttttcctacttcccaaggaggtgaagtttcctgaagacagtgcttttttacatgtagagttttttgtggttctgttactctgttgtctccattagtcaaggaacacgttttgccatcaatataatatttaacaaactatagtagtatagtttggaaagtagaaacgcccttttatgaatgtattattatatttttggaggcagagtctcactctgttgtccagcctggagtgcagcggtgccatctcggctcactacactctccgtctcctgggttcacgcaattctcatgcctcggctgggattacaggtgcctaccaccatgcctggctaatttttgtatttttagtagagataaggtttccccatgttggccaggctggtcttgaccaactgaacctgacctcaagtgatccacccacctcggcctcgtaaagtgctgggattacaggtgtgagccacctactttcatttctttctttcttttttttttttttttgagacggagtcttgcattgtcgccccagctggagtgcaatggcgcgatcttggctcactgcaacctccgctattctcctgcctcagcctcccgagttgctgggattat

SEQ ID NO: 8877 - DNA, 1246 bp, Homo sapiens; identical to SEQ ID NO: 8876

SEQ ID NO: 8878 - DNA, 1246 bp, Homo sapiens; identical to SEQ ID NO: 8876

SEQ ID NO: 8879 - DNA, 2042 bp, Homo sapiens
attgctcacttccttaattagtttttctttttcttgtttcctacttgcaggtcaagaaagtagtgaagactgtgacaacacggacagtacagccagtcgctatgggaccagacgggttgcctgtggatgcttcatcagtttctaacaactatatccagactttgggtcgtgatttccgcaagaatggcaatgggggacctggtccctatgtggggcaagctggcactgctacccttcctaggaacttccactaccctcctgatggttatagtcgccactatgaagatggttatccaggtggcagtgataactatggcagtctgtcccgggtgacccgcattgaggagcggtataggcccagcatggaaggctaccgggcacctagtagacaggatgtgtatgggccccaaccccaggttcgggtaggtgggagcagcgtggatctgcatcgctttcatccagagccttatgggctagaggatgaccagcgtagtatgggctatgatgacctggattatggtatgatgtctgattatggcactgcccgtcggactgggacaccctctgaccctcgtcggcgcctcaggtaggcaagaataggggaagagaaaagggtctttccaagaccagggacaaggggtagcttttccttcaacttctaggggctttttgggatcagagatactcgtggcctcctcccctctgcttttttttggggtgaaaagctaccctgtttttcccttttctgacttggcttagtattgacttgctatatatatataatataaatatatatataattttttaaatgaaaataatataattttattttttatttttttgagacagagtcttgctctttcacccatgctggagtacaggggtgccatcttggctcactgccacctccgcctcctgggttcaagtgattctcatgcctcagcctccctagtagttgggactacaggcaagcaccatcacgcctggctaatttttatatttttagtagagatggggtttcaccatgttggccaggctggtctcaaactcccgacctctggtgatccacccgccttggcctccaaaagtgctgggattacaggcgtgagccaccgcgcctggtccacaagttgttttctataattgaatatatgggccaggcgcggtggctcacgcctgtaatcccagcgcttttggagactgaggtgggtggatcacctgaggtccggagttcaagaccagcctgaccaacatggagaaaccccgcctctactaaaaatacaaaattagctgggcgtagtggtgcatgcctgtaatctcagctactcgggaggctgaggcaggagaatcatatgaacccgggaggcagaggttgtggtgagccaagatcatgccattgcactccagcctgggcaacaagagcgaaactccacctcaaaaaaaaaaaaaaaaaaaaacaacttgtgattgttattagtctgtgtcctgaagaatgaactttgcttctgcttctatgctgaagtttttgctgtttctggctaagatgtgacccccttttggtgtgttaggcagaggattctgatgtctggggccatggaattcttgctcacttcttcctgggaatttctttagtttctgatttggtattaagaacagagtccattgggcacggtgtctcacgcttgtaatcccagcactttgggaggccgagttgggcggatcacgaggtcaggagatcgagatcatcctggctaacacggtgaaaccctgtctctactaaaaatacaaaaattagccgggtgttgtggctcgtgcctgtagtctcagctactcaggaggctgaggcaggagaatcacttgaacccgggtggcagaggctgtagtgagccgagatcccgccactgcactccagcctgggtgacatagtgagactgtctcaaaaaaaaaaaaaaaaaagccaaaaaaaccccaaaacaaaacatagttgagggttttaggaattcagaaccaaaagagacagttgaggacgtgtataagaactt

SEQ ID NO: 8880 - DNA, 1075 bp, Homo sapiens
cgcaagctccgcctcatgggttcacgccattctcctgcctcagcctcccaagtagctgggactacaggtgcccgccaccacgcccggctaattttttgtatttttagtgttagccaggatggtcttgatctcccaaccttgtgatccgcccgccttggcctcccaaattgctgggattacaggcgtgagccaccacacccagcctgagcgttgcttatagttaaacattgtttgtttcatgatctgtatgtttattttgagctataatgtagaatatgtttcttggtgagggtcgcaaacaaagcttgaatattactataaggtatttggtcactggggaagactgagaagtgatacgatagggggattctctttgacgttcttcagacatattgtcttgaatgctcaagagccatctgatgaattgtctcttccaggaaccctgtggaatctttcatcccatgactcaatcaaaatggagattgtggaccatgcactgcatgccttgacagatgaagtgatcattcctcattctggttgggagcgggaacctaatgaagactgtaagccacgccacattgagtgggaatcggtgctcaccaacacagctggctgccttaggtaacagtagggactttgagaatatgaagatgaatttttgaggactgacttaaatttcctaaaaaaaaaaaaaaattaaaattctttagcctattctttagcctccattcctatctgtattgcatactgtaactccaacctttctatctttgttgctattctctcatgtataccacatgtacctatatcagttttcttgctgttccccacacatcctcttcacttttatgcctctttgactttgttcatctactttggtaagcttttgttcagcatctaccacatgtaaggtggtctagtcctggacttgtgtgtgtctatgtccttgccctagttatttgtatttcaagtcaggctgtgataaattcagcaaaaggggtacagagtactaggaggttagggcatgggtgaggaaggtctgttctttctgtgatgcctttctcttcttatttat

SEQ ID NO: 8881 - DNA, 1030 bp, Homo sapiens
atgcgataagcttgttgctttgaggaaaataacacagtgtttgctgcctgagctttcaagtggaaattgtagttttgaaaaacttttatttgccactgtgagcctggtaacttcccaatactgaaaagacttttctaggctgagtgtagtgtctcatgcttataatctcagtactttgggagactgaggcaggaggatcatttgagcccaggagtttgagaccagcctgagcaacataatgagaccatgtctgtacaaaaaaattagccaggcatggtggcacattcctgtagtcccaattactttgggaggctgaggcagggagatcacttgagcccaggtggtcaaggctgcagtgagctgtgattgtgctactgcattccagcctgggcaacagagcaagaccctgtctcaaaaaatacatgattaaaatgaaaaaagacttttctaatgaaataaacagtgatgttaacgaatgtgatttcaaaatattgtgtaatgctatgtgttagcattttgaatatctggataacttgaagcagtattttgcaagtgacaaatacatatgtcaaaatcgtacataggtaattgatccgttaaaagtgcaagatggaccaatggattttaactaaacagaatatgaagtgattgttaattatagattccacattactgtcaacctttaagaaactactactaattagtatactattaaagaagaataaccacaattatctgaaaagactattaaaatcatcctcttttccaactttttatctgtgtgaggctggattttcttgatatacattaactacaataacatatcacaaaagattgaatgcagaagcaggtatgagaatctaagccaaatttcaaagagatatacaaaaatgaaaaggatgttattaaagattatttatgataacatgtaagaagtttaccattaagtgaaatagatactttaaacttgtcagtatggtaacaattaatacataaaactcacaccaatgaaggttctttagatccttat

SEQ ID NO: 8882 - DNA, 1030 bp, Homo sapiens; identical to SEQ ID NO: 8881

SEQ ID NO: 8883 - DNA, 1030 bp, Homo sapiens; identical to SEQ ID NO: 8881

SEQ ID NO: 8884 - DNA, 1551 bp, Homo sapiens
cctcttgtttagctttattatgtcatattctgggtattttatacatattgtcttccatcttagattcaagttctttttttgagacagagtctcactcgttcacctgggctggagtgcagtggcgtgattctcatacctcagcctcccgagtagctgggactacaagtgtacaccatcacacctggcttattcttatatttttagtagagatggggtttcaccatgttggctaggctgatcttgaactcctggccttaagtgatctgcccgtctcagcttcccaaagtgctgggattacaggcatgagccaccacggtcagccagattcaagttctttaagtcggggaccatcagactttaatgcctttgtggagcatttgacaagctcagttcccaacagtgatgcctaattacacctatctgtttgatatacgttttacactagaggggaatgtcatatttctgtgtacttttttttttttaaccagataacaactattccacaccaaatgagagaggagaccacaatagaacactggatcgatcgggggatctaggcgacatggagccattgaagggaacaacacccttgatggtaaattctctttatatactgctatctgtctaaggctagttctattttgaagcctatgtgttttgtgaaacacaaaaaaaagtacagagaaagatcgcatccttttctggtaggggttttcaggaaaaagtaagagttctgactcatgttgggatttcttgggccgttattctgcagtggtcaaaatgggggaagcatgtctgtaaaagtgttactgatatgactaacactaactgatctactttcaaacattacctttttcctctccctccctgtttatgaatgttttgcccttctcttactattatatcttgttttgtttgagtttacaaattttcagagtttccctagctctggcacacactcatgaggttcctgtctctactcatactaacaaattgcatgtgttcacagcaggacgaggggcaggaatctctggaggaagagttggatgtgttggttttggatgatgaggggggccaagtgtcttacccctccatggtatgtccttcagtcacccccaagattgttcttgaggaaggaggctcctgagtgccagcaacttgtcaatcacgctaatctgatcaggccagagactaagtagtctcagccacatggggctcgaggggttctgcttttgtgattattacctcttacgagtctgggacatgcagctggtgatctgattctccgttatgtgctgctttcctttctccagatttgctcaacttttttggggggggtctccttaatcccaaccccattaacattctctctttctcttttttctccacagcagaagatttagcaccactatctccgttccatctgggcttatatgtacttttattttttggtggtgaaattgactgatgattttcctttttcttcgctggactattgtgccaactgccaggctgcctcctgcccttacagccctaagtggctgccttctt

SEQ ID NO: 8885 - DNA, 1035 bp, Homo sapiens
tacatcacatgccctttagggaatacacagcccgatcatagccttcaaaaatgattcccccccgccttcgcgttagctcaagagccagatgtactagtgtgtttatgtagctttttttttttttcacttttctaaatttttcgcaacccttctcattcttttgagaaatttgccacttattatggtcaggttaaaagcccactgctacgattttaagtatggagtctttcatataaaattatatgagcattctttaatgtttgtttttactaagtagcatatgttttatctttgtgtttcgtgtttttaaatgtaggaacttcatccttgaaattagaatcatctgagaggaattcctttattacctagacgtaatagaggaaacatgaacaggtggccaggagcattgtcttaaattgttcgttaaaataatactcatgttaagaatactgaagcacacaagtttgtaaattctagaaattaatcacattgactattcaattcatgactgaaaacatcattagtgacctttgatttttgagtgaaaacagattagtaaaaacagagaaaattgaagtgagggggagtcagttttaagtgttccctttcttccagtagagatagtggcaaggtttgacttacaccagacctaatagatttaaaacttgaaacagacttggtccaaaattaagagttaagcctgtgtcttggcatgcttgccttagaagcctctcagaaagagaaataaaattcagaggtaatcatattgtggtattagatatgctttcaaatttttgaatgtcagctaagttaacataatttagagaatttgttgtaagaactgcagttctgtcgacagcaaaaatctgtacttacagattcagctgcaattagacttctaattgctgtagatgcatttcatcttacaaaaattttatagttctatattgtttaatctcatgaatttgaaaagatacatgtatatcattgacctcatttggatatgaattccgtgagcaaattccttaacctacc

SEQ ID NO: 8886 - DNA, 1035 bp, Homo sapiens; identical to SEQ ID NO: 8885

SEQ ID NO: 8887 - DNA, 1035 bp, Homo sapiens; identical to SEQ ID NO: 8885

SEQ ID NO: 8888 - DNA, 1739 bp, Homo sapiens
aaccatctagaaattgtatgccttctttgagttgaagagaagaacctttgacatacacataaacaatattgcacacacagagtaggcaactttccattaatttgcaaagctgcaaattaagttgcaaagttgcaacttaaaaaaaaagttaagttgcaaagtgctacattcatttttttcaaactgaaataataaacatgagtattagttcctgtttttgctacccttttttaaccgtgattggtgtataaaacaaatggaaagctactatgctaaaatagtgttaattcattcaacaggtaattgttgagcatccactatgtgtctggcgctattctaggcactggattctactggtaatcaaataaatgaagaagtcaaaacagtgtaataatgtttgatgaagttggagctgagaaagctaagtttagatgaaatgataagggaagaccttttggtggaggtgacatttgagattacacctgaatatgcagatagttaatttggacaaggaacattccacacaaaagttaaaaaggaaaaattacttcaaacttgaaagcttagtttaccactggcagaggattatcttcatgattgtggagtttccaagagtgttagtagaaatcttaagggatggagatctagttcctttttaacttggctttatgttttcattgtttctctgttttgaaccagtgttgtactttgattataaagtaaaagaatagtctacctacacgtaatttttagttatcccagtgttcattttaacttatttcactttctaacctctgactagacatgttatgaagcctaatttttttttctcccatctgttatgtccttagtgaggaataatagttaaaactgcctctcaagataaaacataaaaatggagaccagaataccttaatgtttattaaagtatgttttaaatgtttaatggaatgataataaatactgtagaatcaagtagatgtgggcagtgcttcagttattaatgttagataggttatttattgcagaacttctcagaaactttgatttttgagtaatgtgcagtgtaaataccaaaattttgcagcgattacctaacctatttgacttataagaccccctttttaaagagcatttcgtaaaactggagtttacagaaaacatacttggaaatactgcatgcttgaaaatttgattgtataaaactctggatctcaaccttttattcaaaatcattttactcttttcagttgctcttatgaaatagtgatgtttgacagtgattactgtgagtctctaacttgtgtagtcaggaaaaaagaagtcagtcatcagataaattcataacagatctcagcatttacttagattatttggagcttaactgttaagtatttaccttacctagtttatcataatcagcatactatctgtaattattactaaagtattagtttattttgattatttttcctcctgtctggatgacatcctcagtttttttcttatattgatacagtctaatttatagcttatgcctctgtgctccatgttttaaaattagaattaatttgttattaacagttttcatagatttcaacagttttatttttcatgtattgaaatatctttgattatcgtatcctctcaaatcagtctcttgtatcccattcatcttggcctcttgtcaacttgcaacctcaatataacattgactgtttttacttcctttacagatg

SEQ ID NO: 8889 - DNA, 1739 bp, Homo sapiens; identical to SEQ ID NO: 8888

SEQ ID NO: 8890 - DNA, 1739 bp, Homo sapiens; identical to SEQ ID NO: 8888

SEQ ID NO: 8891 - DNA, 1047 bp, Homo sapiens
aggttcacattgtaacatgttaagattgcattcctttttatggctggataaaaattttcgttgtatgtatatatgacattttgtttatccattcactggttaatggatatttgggttgtttccacaatttgggtattgagaattgtgcttctatgaatattcatatgtaataagtatttctttgaatagctgttttcaatttttggtgtatgtacctagaagtggaattgctggatcatatggtaattctgtgtctaagtttttcttaacatttttcttaacactgttttcttaggttttccataacactgttttcctcattagctgcctcattttacatgtccaccagcaataaacaatggttccaatttctctgcattctcaccaacacttcttattttctttttttattatttttagttagccattgtagtatgtgggaaatggtaatctcatgtgattttgatttgcatttcgttaatgactgatgttccgtatcttttcaagtacttttttggccttttgtatatctctggagaaataatctgtttaggttctttgcccatgttttaattgggttgtttctctttttgttgttaaatccaaagactttatatattttggatattagacttttaccagatatatgacttgcaaatatattctcccattctgtagggttatcttcacttctatgcattttttagtgctagctcctgtgtttaggtctttgatccattttgagttaatttttatatatggtataaggtaggaatacaacgtcattttttgcatgtggatatccatttgtcttagcaccatttcttgaagagactgttttcacctactgaatggtcttagccaccttcttaaaaatcagttgaccacagatgtatagatttatatctggacctttaattcagttagttgattcaattattattagttttatgccggtaatacattgtattgattactgaagctttatagtaagtgttgaaattgagaagaaaaaagtgcgtctttaattctgtttgttttcaagat

SEQ ID NO: 8892 - DNA, 1047 bp, Homo sapiens; identical to SEQ ID NO: 8891

SEQ ID NO: 8893 - DNA, 1047 bp, Homo sapiens; identical to SEQ ID NO: 8891

SEQ ID NO: 8894 - DNA, 1040 bp, Homo sapiens
tatgccttattcataatggtaaactattgttatcaaattggcatcatttatccagtgagtaaaatctacagtataggaggttgtgggcataccatcctttcatcatgaagaagaaaggagctttgttgaggacaggaggttatggagtgagttcaaagtccaactcggtacagttgggttaaggaaaaaaaagatgtgtctattattaaatgttgtaatacttcataggtggtgttgaattgttctttttgatgaaattgttttaaaagtagtcatgacctatatgtaaaagtccttcattattaatctcaaaatatgatttctaaatctaggtgtccttagctaaccttgtgattttgaataagcttcttttttgggcttccagatactttatgggtaaaacgtaatggattgtgcttagactgaatggcctttgaggtattttcacctatattaatgttttattttttattttttctattaaaatagctcagataggagggtgatgcaataatgaatggaaaaagacagctgaaaggaaatgcacaactgattttgatggttgtttagaactgttcgcactgctatttatctctgtgtttcaaactaatttcattacttcagtatattgtcataaaactttcagtgtaattaaagctaaaatagcctatagtcaccacattgctccatagtaaactattttttaatgttaagcaaaaatgttgccatactgtatatatagttttgtgtcttttttatacatttaacaatatttttgctgataattccatgtcatttttaacataaacctacctctatatagtattcaatcatactaaggtatcatggtttatttaagcactttatctttgacagagggttaggttgtttctgttctttgctattataaacataatacagttaacctccatgtggtagtttatatttctagggcatatacttaaaggtgaaattactacacatatttttggacctaccttggaagtaaccagtacttaagaatttcttgtacttcttcc

SEQ ID NO: 8895 - DNA, 1040 bp, Homo sapiens; identical to SEQ ID NO: 8894

SEQ ID NO: 8896 - DNA, 1040 bp, Homo sapiens; identical to SEQ ID NO: 8894

SEQ ID NO: 8897 - DNA, 1056 bp, Homo sapiens
agatcaaagggattatatctgtgaatattgtgctcgggccttcaagagttcccacaatctggcagtgcaccggatgattcacactggcgagaagccattacagtgagtattatttactggtgaacatctgggtgagaaggatatatgccctacttgaaggtttgccgctttacaaacatattagttgccactgctgtttactttcatcaaataaatgagtggatattgattgggggcattagttagtagcctttttcttagtttccctctgtttttcaggcaaacagaagaagatcagattagttttccatctagtaacatttcccaatccttcaaaagaagtatgttactgattattgtgtgtgtgtgtgtgtgtgtgtgtgtgtatgtatatatatgctctaaactctaaccctgatcctgaataagagcactctttatttctctgttggatcagccatttccttttctcctctccttagatgtgagatctgtggatttacttgtcgacaaaaggcatctcttaattggcacatgaagaaacatgatgcagactccttctaccagttttcttgcaatatctgtggcaaaaaatttgagaagaaggacagcgtagtggcacacaaggcaaaaagccaccctgaggtgctgattgcagaagctctggctgccaatgcaggcgccctcatcaccagcacagatatcttgggcactaacccagagtccctgacgcagccttcagatggtcagggtcttcctcttcttcctgagcccttgggaaactcaacctctggagagtgcctactgttagaagctgaagggatgtcaaagtcatactgcagtgggacggaacgggtgagcctgatggctgatgggaagatctttgtgggaagcggcagcagtggaggcactgaagggctggttatgaactcagatatactcggtgctaccacagaggttctgattgaagattcagactctgccggaccttagtggacaggaagacttggggcatgggacagctcagactttgtatttaaaagttaaaaaggacaa

SEQ ID NO: 8898 - DNA, 1066 bp, Homo sapiens
tattttgtggggctgggagagagagattagattattttgacatgggatcccttccataacaggtactttgaaggcaagacatagggttgaagaagcacagccagcctctgaaatcatagctctccagtggcttttaaagaaagctggtcctcagcactaacaaaatcactacaatagcctagtgcttttttggaagcctttttagggaagaatgttaggttcatggtaactagtatgctctttgagatttttacagtgttgaaacttaagaattttgagagggtgaggagggttgttcagaatctaaattacagatagatgattgtttcttgtgaatttgtttcttttcctttttttttgtccctaccatttccttacatttcccttggggcccatctctggctccttgctttttgtttcttgctttgctttatcagttcattccagctccctgttagtgaaggacactgctgttagtgaaggaacaaagtctatgagtcctaaaattttaagtcaaagaaaactgctctgtttcccctttagtaacacttctgaagaggaaaaacttcaatagccaaagttaataatcctatataataattgctttggctttcacctaaaattctgggcatcacaatttccttgggatagaggttgtgttggggaatagattgcttattgctgttcactggagagaaaaggtagtgtttttgtacaaggtcataccgccagaagccccaaatcctattttggctcatcttcaggtaaagagtaattcctatcctgtgtgcctcagaagctagaatcgaaggcttaccctattcattgtttattgtcagaaatgcatgatggctcttggaaagaatgacgttttgctggaaaaaaaaaaaagaacagtttgtgtttcacaaacatggcttatcaattttttcaaagaattcttttttcccaaaaagaggagtaacaaaatgtcatttctgaaagaggcttactttataccaactagtgtcagcatttgggatgccagggaacagagagtgagacacctacaatcaccagtctcaaa

SEQ ID NO: 8899 - DNA, 1028 bp, Homo sapiens
atcagcacaaacttgaaagccaagcatggaataaaattagccttaagataatcaggtttaagtgaagggagagttttaataaaaatggaaaatgtaaagtcatagctctggtattgctgttatttcaagctgctatggatcaatgcccaaaggatgactcattgttgtgatcacttgtcagacagggagaggactagtaaatatttcaggaagacatatctgaaaagttatttagattgaattttgtttgtgaatcctcagctcctcatgaggtacctgagcatctctgttaaggggtgaaatagagacacgggaagcagagagacctccaccaggatgtaaaggggattggtaaagaggaagggggtaggggggagtagaattttgatttcacttcagttgattctgtgtgtgtgtgtgtgtgtgtgtgtgtgtgtgtgtgtgtgcgcgcgcgcgcgtgtgtgactaatgtactgttaatgtactgtttaggtcaggacatttcttaaaaggaatgctttggcctcctgcctcatcccacctccactgcaagcgtcagacccacccaagaatgagctctctgaatgtgggtgcattcaaaagcgaaaaatgataaaaacttcatttcttggcttctgtagccctctgagaactacagataaagacagaataagataatttgatggtttgatgaagtgtctgggtgtgagataaaatctatgtgcttatgattcttaatataaaagattatttcgatcaatctggtttgaacacatagaaaacaaaagatgcaagaatagctaacaataaagttcttttctcagcaataccataagttacttcttttctgtatctttggatgaatgaggggaatttcaagtgacttcagcattggatgaagcataatcctcctagccagggccaggcccaatcaagcgtgctgagtaaatctccatggtgccaggccactcacactgggcaaaactcccagggccagtcagcctagaaaaggtagattgcccctatat

SEQ ID NO: 8900 - DNA, 1028 bp, Homo sapiens; identical to SEQ ID NO: 8899

SEQ ID NO: 8901 - DNA, 1047 bp, Homo sapiens
cacagcagagctgttggctttgcaggctgtctgcctcctggagtcatctgtgaccgggtccattagcctctccaagcccagctgcaggagtgtgggtgacagagaggatggcgcaagacccagacccatgtgtcccatattttccaagtcagcgctgtgggagggccgcgcctttcccaggcagctgtgccatctcctctccagcctggctggagttgctggggagaaggacagaaaggggaggaggctttgcctaatatttatatatgtctcagggaaaaggagaagtgacagctgttctagcagtggttccaaatgttaggctggggattgctacatctgcagcttctcaggagctttgggaaatgcagcttctcgtgctccacaggtggatattctggtctggatctgggaccttgtccttctaaaaacatcttaggtgactcttttgtacaccctggtttgaacttgcttctttgttttttcatccttcaacaaatatcaattgaatgcctactagtgcctggctctgaacaaaacagacaaagatattttgccctttgtagagcctagattctagaagggggcataataagcaataatttcttttaaaggatcctaagtagagcaggagtcctggcgtgggatggaggggtgggtagcaatattcaatactatggtctcaggaacctcacctgataggtaggatttaagccaggactgaaggagttgtaggaggaaactaagcagttgtctggtggaagggcattttgggtacagggaacagcatatgcaaaggctctgaggcaggagtgcacctggctccttgagagctgagtgatatgagaggaagcaagatgaataagagaagctgggtggcagtgttggcagatcgtgctgggctctgtaggccttgctaggactttaactttgactctgagtgaactgaggaacatagttctgaggttctgagtggtggcatgacatggcctgacttaggttttgaagatgtcacttcctgctgtctgctgtgttaagcacttaact

SEQ ID NO: 8902 - DNA, 1048 bp, Homo sapiens
agtgtgctcccatcagtgagagagaaggaagttcttatcacagcgctagacccatggtgagtattcgttcataccattgtaaatgggtttcccaatcaccctttcttccccagggttagtgattttcagctacaattttctttggacaatttcaaaacacccttgattggcccttcaaaggtactaaagactgttgccaaagtacacctggtaatccctgccctagaatcccactgttggaagaggggaaggctgtttgggatgcttgtcttgtctattatctgacaatgcaatggtatcccctcattagagctggttctttggaatctggaagactccataggtgatcattctctccttacagtgtctgagcatttcctaagtcattgactcatgttctttcgtgtacctgagataacttttactccctatttccatgagtacttatttctccaggccaagcttagattacatcagagtctgagatctccctgatagctcccaacctctcactaagcaagaagtatgtctggattatacgtctgtctggtctggtctatacgtctcttactgtgggaaagaagtagaggtaagagaggtgggagacctgagcttgaatcctggcttattagctgaatgaccttggacaaggttttccaatctctgagagagactttccatctggaaaatggagattaaaactatacctactttatggggtcttatgctattattattcaaattgatatcgcctttgtattaaaggctgtaattttttccttcatcttcatgtagcctatttgattgaagttcccaaagtgctttcttggtgtccctgagagacatgcttatagtggtggtcagtcattgatgggggatgcaaatctggatcacttgctcactttcccaaccctgggctaaaaggattcattgggatcttgcatttcaagaagttattttgggcttaaaggggtttcttagcacatttgttccctatttgatgtctatattcaagaagaatatggtaactctacatttatttccatgg

SEQ ID NO: 8903 - DNA, 1102 bp, Homo sapiens
tgcctcccctgatgtgttcatcgcggagaggtcgcacgtgtctggctctgtggcgcaatggatagcgcattggacttctagatagttagagaaattcaaaggttgtgggttcgagtcccaccagagtcgctttttgtttgaagaagagcaaacggaaagttaggcggagggaatggatataaaatagatgaaacgagaactgtctaccatttaaaatttccggaatgatgtgaattgcagctaattgcagttcctggttatgtcccttcacttgaaggcgtaaagaatcccgttcctctatcgagccttttctccttcacttttacctggccccagtttctagtggcgagataaagaaattagggaaatataatcaaagttaccaagttttttccccatattattcttttatatcaggaaaaaaagtaattttaaattgttccgaaactttagtcgcctagtgttacccgagttgctttaaaataaaacattgttttatcagttaccagaatggccgagtggttaaggcgttggacttaagatccaatggattcatatccgcgtgggttcgaaccccacttctggtaaagaggagttgtttttcctggcaaaaaccttttttcctaatccttgacaatccattttgcaatcttaagcgtccagataacaataactatagttaatatcattttgccagataccttacatatagcgacagcttcacagtttatggtttgaaaagtagaaagaaaacgtctgaaaaaaagaaagaaaacgtctgggtccagctatatgggagtgagggagcacagagcgagaggcacattgtgctgcaaaaacgttcactccgagtcgacagttatttcttgagatcctattacgtgccaagtactgttctaaacactggggttgtggtgatgtaggtttggttttttttcttttaaagcaaaacaacaaaaaatacaagagccttaccatcaagaccactgcccaatgtcacttacatgacaaagtgacagaagaaaaatatggtttaaaaacaagcagacagccgggcacggtggctgacgcctgtaatcccagcacttcgggaggacgaggc

SEQ ID NO: 8904 - DNA, 1078 bp, Homo sapiens
agctcagctgattcttccagcccaatctgaccttttcagatatgtaaaggtggttggagatacataagttactttacgtaccagataagtaaagagaccttgtatctaatcctctcaaccctgcaaagcagagtgggtttttctattattctcattctgcaagtgagtgaattgaggcttaacaagaaaggcaaggatcctagattgtcttaatcactctcgcattggtgtataaaccatcaagcatataaacaactcaagggagcatcagcagggtcgcatgtgcatggtacctgctgaccaccatgatcagagctttgtgacctctgtgtgcctagcatcctgctgggcgtcaagtttaggcaggattgacaaagtcctagtatcaaagggtaaatgatcacatagggaagacaaagacatgtagtatatgacaagagggccaacagtaatcaaagccatatggtggtaatggagaagccagtgatgtatggaatagaggttgaaggctttggactcccttggagacggatctgtagaggactggaaatgacgtggatgtaatggcccttcaaagaccagcactaataaggacacactaatgaaatcaaccacctggggctctaaaggccagactaactttttactctctctgtgtcttgctgcttcctaaatggctgttattggcctccttccccactggaagctccaggatctttgtggaatcatagttccttaggataacattataaccccatcagcaacatggagctgtgtacttctcctttaaagcttaatttgttaataaatatttatcgagccgcttttatgtgccaggtgctttggatcataactgaaccttaacataccaatctgcgcttcactgagattctgtctttctctagtcataaaatttcattcaagtcaggattcctgcctcccctcttctctgtacctgggaggattcattctctggaagagctgtttttctgtgagcagacgggaaccagagctgagagtgatggggattgagtagggattacagccccatcagccggaggccagaaaatgcttggat

SEQ ID NO: 8905 - DNA, 1798 bp, Homo sapiens
ccaagctccgcctcccttctctttttctctaccttgtacctagctcatgctaactgctatctatacattatgtcatatctgatggagcacctgttatttctactttataaatgagacagttgagggtcaggggctcagtaactggcttcaggccacctagtaagtagaggcactgggattcaagttcagatcccaatcattctgtttctaccacaccactgtatttgcccaccctctggtgcccctgccgcttaaggacttctaggcttctgtgctcacgactgtggttatccagctctggtggcgtctgctttttagacttctctcctttgactggttctcttgggctctgatattgttgttgtttagttctttgtttttcatccaactttacctattgcttatgcagggatttaggggactgggaagttattttacatggtgaatccaggctgggtggcattttctgatatccaggcagtgtactgggtctgacaggtaggagtatgggcaaaagtaggaaattagaactctatcaaaaatgcctttacattccctcttaaaatggaaaaaatcagtcagtgactttttatcttggccaactgctccttagagaccccacgatagtggctctgattctatctgtccacatatacagaactgcagtgtgagctgagagctgagagaggccccatatttccctctgctggcattcctagcctagaagtaatttaagaaatttaaactgtcctaggctgggtgtggtggttcacacctataatcccagaactttgggaggccgaggtgagaggattgcttgagcccaggaatttgagaccagactggggaacatgggaagatcctgtctctacaaaaataaagaaaatgagctgagcatggtggtgcatgcctgtagtcctatgtactcaggaggctgaggcaggaggatcacttgagcccaggaggtcgaggctgcagtgagccatgatcatgccactgcactctagcctgagtgatagagaaaaaccctgtcttaaaaataaatgaagtatcctagaaggatgtctgtatgtagagatgtaggcctcttactcagactggtaagatattttctatgtagaggtgacaggggttaggttttggatgagttgttatttttttggttgtttgtaataatgatttgtttttgtcttattcctctctccagaaattgataattatcattgtgctagtagttgtgttgctgggcattttagcattgattattggactttccgttgggctgaattaagagtggcctaagaggctgctgcactgaaatgtaagtaaacgagtggttcttggggactctggatttggctcctcaagaggaaattagcttgggatttcaaattcctcttctttccccctatgattgtccttggacacactgagctttctaaaactttcagtagcctgtggattctttatctccttatagttctattggtttctggctgcagtacgtggatgagctctccgtttgttcttatcctgtagattctgtccccaatctctgtcttgtcgtattaccacttctcccagcatacctgagcaccccaggtgactccccttactcaggaagcatgcttctaagttgggtacatctctgtcttggatctggagtctgtcttctgaattcttactgattttcatggatgttgggctttactttctgtatccttttcaatgtaaatgaaactctgaattgggatttggatctgcagagttttctctgttgctgagtggttgggtctta

SEQ ID NO: 8906 - DNA, 1032 bp, Homo sapiens
atagttaacacacttttgagtgttgtgttgtaccagacaatgtactaaacaccttatacacatatcattgaatccttacaacatcctttgagacagatacagtgttatgcacattttacagacaaagaaactcagtcaaagagaatgttgaataacagggccaagttcacacagctaatagtggacctagcttctctttgtaaaagaaggtagccacttatcattaactataaagcctggagaaccttagaggatagcgatgctaaaatttagactattcattttcttgaaaatttgttaaaagtgatagacttaccactgaatcactggtttttttttttttttgagacggagtcttgctctatctcccagcctggggtgcagtggcatgatctcggctcactgcaacctccgcctcctggattcaagcaattctcctgcctcagcctcctgagtagctgggattacaggcacatgccacagcgcctagctaatttttgtattattagtagagatggggttttgccatgttggccagaatgccttgaactcctgacctcaggtgatttgcccgcctaagctgggattacaggcgtgagccactgcgcccggcctgaatcaaaacaaacaaaaaacgtttttgttgttgttgttttttgtttgtttctcattcttgtcccccaggctggagtgcagtggcgcgatctcagctcactgcagcctccgcctcctgggttcaagcgattctcctgcctcagcctcccgagtagctgggattataggtgcctgccaccacgcccggctaatttttgtatttttagtagagacgaggtttcaccatgttggccatgctggtctcctgacctcaggtgatccacccgcctcggcctcccaaagtgctaggattacaggcgtgagccactgcacccggcctgaatcacgtttaatagtagtgagcatatcaatctggttattgggactattaagacttttgtgactttaaaacaaacaatttttttttgttgttgagat

SEQ ID NO: 8907 - DNA, 1001 bp, Homo sapiens
attcatattcagaatatataaaagtcttttgcaaattaaccttaaaaatacagacaacgaaatagaaaatttggaaaatgatttcacaatagagggtgtccaaatggtcagtaaatgtttgagaaggggctcaacctcattagtagttcaggaaatttaaaattgaaccacaatgagagaatgatggtgagatgaaatcacaaatgtgtcacctgtgtcagtctcctgatgctttttaaatcctagggctcttgttccttacagtttaattaataagtatcacaggtaggtgtgtaggacttcactgagacacatccatatacctagagatgtataatagattgagtaactttatttacatcatgatttctaattttaaaataatttttaagaagttggtagtcaagtggcccagactaaagctatgctaagaaaaatgcctctcaaatttaatatgcaggtgaactacttggaaatctcattgaaatgcagtttgtgattgatactgtaagtctagagtgaaacctgttattttgcgtctaacaagctcccaggttgcctatggcacaggtgaagtgttgcagctactgccagctgatgggccatgttttgagaagatgctaaggggtttccctgggctgccccagcagagggtaattgcagacagctgaatgtggccaaaggtttataagcactcaaggaacccccagctccttgccatttcttgttttctatgttgtgtcttggagtctggagcaatgaagacctctgtgctcttaggtaggtccttcctcttttctttattgttttggaattcttctggattcaacccaggtatgcataagaaatatcttcagaggtggtgatttaaactgataagattactttctaaaacactgctgtgtaaaaagctgagatttttttttttccccctgattataaaccaacaggtagggctgcctgtttctattactcagttaagaaaaaattactctttctgg

SEQ ID NO: 8908 - DNA, 1050 bp, Homo sapiens
ggccgtcctctgttgcttccagggacgtggccctcttcccgacctcggtcgcctgagcgcgcagggattggggatccgtagggcactaggacccggcggggcggagggggcagcccatgtgctgcgattcgctccctcccaccccactgctcccgctccattgtctgggaattgcagccgcggggcgggcggcggcggcggcggcggcggccgggacccagcgggccaggtggggacggcgcggagcgggtgcgggagatgccgtgcgggactggggccacctgagccgcccgcctcgtccccgccttctgtgggaaggatgtgcgcgcggatggccggtcgcacaacagcggcccctcgggggccctacggcccctggctctgcctcctggtggccctcgccctggacgtcgtgagaggtcagcgggaggggagggccggggcgaggggcggccgggcccggccgagtgggagcgagtgatgcccgggagccaccaacctttgggttctcggactgaaccctgagcggggtcgccccgcagcgccctgaaggtcggagagttcttgccctcgggaacctgcccccagccactcgcccctaaggcttccttcaccttgcacgacccggcaactccttcctgacccggggcagcccggcgcaggggcttccccgtcccgcaccttctgcgagggacccctcagcccgggcatcgaacccggcggccccggtcccgggcgcactagcgtcatccccactccctcactgtggtctgtagcgctgcaccctcctagcctccttccgccgccaccaacccacccccctcgggagtggaaagcagcccctttgcctgggacctgcaacagacgcaagccctccctcccccttcccccagggctccctgaccttggcgtctccagggatggccgcatccttgccttccagaacctttgagaggattcctgtcactgcgggaaagggcagcaacttccctgtgcttcggggtgggggtcggactcccttggcctgggctagctgggctgtggctgcaa

SEQ ID NO: 8909 - DNA, 1087 bp, Homo sapiens
gggctgaaacaatggcagttattgctgttataatatgatgtaataattatacaatggtaaaaattattattattattattaccggtgattgtgaagtgaaataaaagggagggtggtagagcaacttcctctatcttgaagttctaagaggggaagcatggagtctgcatgtatgcaaatcccagccacctgaagggggaaggtgcctttccccacttgtggtcctttgctcaaatgtgtgtggttcctgctggagggccttggtgggagatctgctttgtcccacctctgcctacctggctgtagctggttgccaggtggctccaagagcaatgtcaaaggccagcatgaataaggagccaaagttttgggttcacacccctgctctgccaggaggaagactggtatgcaatggccagttcccctgactgagccccagggaacctcaaggaatggcccctacagtaaaatcttaaacaaagaacaggggcttaaccaacaatcctgctgcaacatgcattccagtgacacacagagctgaactcagtgggagcccgtcctacggcctgaggtcagggctgctctcttctggcccatgccttttttttttttttaatctatttattttgaaacagagtctcactctgtccccaggctggagtgcaatggtacagtccggctcactgcagtctcagctacccaggctcaagggatcctcccacctcagcctccccagtagctaggactacaggcatgtgccaccacacccggctgatttattgtattttttgtagagagggagttttgccatgttgcccaggctggtctcaaactcctggactcaagcgatccacccacctcggcctctcagagtgctgggactacaggcatgagccacccacccggcccagcctcacacctgtctttagtggcttagcccgcccacctgccctctgcccttccataggtgtctgaggcctgtgatgccgtgttcgtggctggcaaggagagccggggcgcccggggggtgcgagtggacttctggtggcgccggctccgcgcctcgctgcggctgaccgtgtgggcc

SEQ ID NO: 8910 - DNA, 1127 bp, Homo sapiens
tttcactgtctcagttcctccagatccagctggtgccctcgcctgacgtttgaacgaccacctgctcacctcctcccttttgcgcgttgattcttcagacttcaaagggcccaccggtctgcttgcccaacgttattagtgcccctattgctctacaaattcgaacctcaaacacaaaaccagtatttctccgtagggaaccttaatgagccaggagagccgtcagccctgcagcctccagggtaccccacatcaaacaggctccccgggaacaagaggaataccacgtggcttggcacactcgcagaatgccagagaggagccaacccccattttacagatgaggaagctgaggcttagggaggaattggtttacctaagaccctccccacaaccccaagtaggctgaggcagagctatgttgattcttcctattgtgcacccacacagaggccaacacgctgctgaaccaggctgaactgaggaaaagctagaaagtcatcgtggtttacatcttgcctttcccatagcagagactctgcctgactttggaggcactgaattatcagtagtaaaaacacactctgtagaaaaactagacattggtttagattctggctgttacctgtattaccttggacaagtccctagagctctctgagtctgtttcccagaagtaaaatgggtcacaaacctggctagctccccccattcccttcccttttggtgccaaggccagtgagggcaagcgtgtgacgagctttgttaactttttcgctgcatgtgatgcccgtgtaaaagatagttattctgaggatcactgtcctttagtgatgaagtgggtgctgttcctggacataaaggcagacctgtgcttgacatggattgatctgtcttctggcagtgaagtgcaggcatgaaccttggtcagccccacactcttctccatccgtagcccatgtactagagtttggacttggaccgaagtctggggcagctccctaattactagggtgctgaaggcgtgattgtgccagtcgactgcgagttccttccgcagcttgtatcgttacccactcctgcaggtgctgctgctgcctccactgtactcagacccaggtagcaca

SEQ ID NO: 8911 - DNA, 1091 bp, Homo sapiens
aataatattgaggatcttttcaagggcttatcagccctttatgtatatttggtgacatgtctcttcaaattccgccccccaccactcctcccttttttttttttttgagacaggatctcactctgtcacccaggctggagtgcagtggtgcagtcatggctcagtgcaggctccacctcctgggctcaagcgatcctcccacctcagcctccagaatagctgggactacaggccggcagcaccatgcccagctaatttttgttgttgttgtattttttgtggagatgaggttttgccatgttgcccagactggtctcaaactcctgagctcaagcaatccacctgcctcggcctcccaaagtgctgggattacaggtgtgagccaccatgcctggccagattttccattttggaagatactttcactggatatagaattcgagggtcacaatgttttttcttctgttaaatagaaacacttctaccgccagctcttagtgtacaagatcgggtagtcaggagttccgctgggtttggactttggttttgctctggttaccttcagtgcatcaccagcttcatattccctccggtgttaccatgtgctgttttctcatttccatagtttgtgacgaggtctgctgtatctttgttcctttttatgtgtcttctctttctgaatcttttcaatattttgtctttggtttctagccgtttcaatattatatacataggtatttatttgatatttatatatgtaggcatttgatatttatcgtgcttttgggttctctgggcatcttggatctgtgttttcatatcttttattattgttgaaaaattctcagctgttaccccttcagctatttcttctgctttgttttctccctcttttccttctaggattctagttatacttagttaaatggtttaatattgtccaacagctgttgtgggggttttgttttttgtttttttgagacagtcttgctgtgtcaccaaggctggagagcagtggcgcaatcttggctcactacaacctctgcctcctgggtccaagcgattcttgtgcctcaggctcctgagcaact

SEQ ID NO: 8912 - DNA, 1046 bp, Homo sapiens
actgcaacctctgcctcatggattcaagtgattctccggcctcagcctcctgagtagctgggattacaggcatgcacctccacgcccggctaatttttgtatttttaatagagatggggtgtcaccatgttggccaggctggtctcaaactcctgactttaccacccgcttcggcctctcaaagtgctgggattacaggcgtgggccaccgtgcccggcccttgaatttttaaaaaggcagctgcttagtatagatcagattcttgtgaacttagtatagcaatcgcctatgaacacacatgattcctactgatctatttgaacagcagcaataacatttactgagcacttattccagagcagacattaggctaacaccatacatggcttgtcctgctgaattccatagcagtctgatgaagttgcttgtattgttgtcttcattttgccaaagaggaaacaggcccagagggactgagttactcacctatggtgacagtggcttagcacttagcaaacaaactgatataggacccttggaaagttggaggtctgtgttatgcattagcaaaatgtttgataaaactacagcccactgtagcttgggagggtatcccatgtgctttccaggctgacagccaaaggcaacgcagttggaaagcagaaaacttgtcatctctcttggctactgtaggctgtatttgttgaggatttataaggaagggatgagctcaggcgaggattacctggtgtttgagcagtaatgaaaggaaataaagtacagaaacccacggtctttcagggttggaaaatctgctacaccccaaataggaagagatgagatataagactcatctgggcaagaaaagcctggtaaaacttttctcttggatgcagttactcaggacaagcatcaggttaaaggtgggcctcctatttattgttccaaatagcctcaagctagccattgagtagaaagggagagacatggaggatgaacaggcaaaacatattagacctaagaactggatctaggaaaagacttg

SEQ ID NO: 8913 - DNA, 1019 bp, Homo sapiens
agatcatgccactgcactgcagcctgggtgtcagagtgagactccgtctcaaaaaaaaaaaaaaaaaaaaaaaagagctaggcatggtggcacacacctgtggtcccagctacttgggaagctgaggtgagcagattgcttgagccccatgggttgagcctgcagtgagcaataatcacacccctgcaccccagcctgtgcaacagaatgagaccgtgtctctaaaaaaacaaaagaaaaattggtatataagtggacgcatgcagttcaaacttactgttcaagagtcacatgtatttcaatacgctggtctgaacatgtcttccacttccttaaaacccttctatggctgctcattgctgttaagaaaatgaaaattcttaacacgacctacagtggcccactgcaaccttgacttcccagactcaagggatcctcccacctcagcctcccaagtaggctaatttatttatttttttatttgtagagatagaggtctcactatgttgcccaggctggtcttgaactcctgggctcaaccgatcctcctaccttggcctcccaaaatgccaggcttataggcatgagctaccgcacccggcctaacttctccattttatttatttatttgtttgtttatttatttatttatttacttttgagatggagtctggctctgtcacccaggctggagtgcagtggtgcaatctcggctcactgcaacctccgcctcccaggctcaagcgattctcgtgcctcagcctcccaagtagctaggactacagatgccacaaccacgcccagctaattttttgtattttagtagagacaggatttcaccatgttgcctagggtggtctcacactcctgagctcaggcgatccacctgcctcggcttcccaaagtgctgggattacagatgtgagccaccacacccggcttccattttttttttttttttttttgagatggagtcttgctctgtcacccaggctggagtgcagtggcacgatctcggc

SEQ ID NO: 8914 - DNA, 1052 bp, Homo sapiens
ggaccaggaagcttcctgaccttgccccaggagctggcagcccccagtcccaccttgtccagagatcactcaggggaaaccactctggctgagggattcaggtgctggtgccaactaggagaagcagtctagggcgcctcccagtggacaccaagggaacgtctattctggctggcccttggtccagccctgtgattttagcccttggcatgcagtcaggctccagtactgaccccagcaccagcagtggcaaattgcacctcatttgaggaatctcagtttcctcttccacaaaacggaaataatgataacatcaccacacaagaccacagtgaggcttccttcggacgacctaggcgacccgccttccacactaatgttttccaggtctagagaggccagggcttgcctggggaccacagtgagatgtggtgaggagccaggggttcaggctctcaggctcctggtccactgctctttccactgctgggaggtgcctcaatgtaaccttggactctccaggcctattaactcctccgtgtagctctggaagttttcagatgttttagtgctattaacatgcctgtcccaggaacaagcttacaaatgcatccaattaaccttctgccaacaattctgggacgtgatttcttttccagcctttgcagggagatctctcttcccatctccttcctggaagacagaagccttgtgcgagccccttgtgtgatgtcaccccagctagggccaccggacgttggtcctcagcagggagactttgggtcctccaccaggacccagggctgacctgcatggccaggccccatggcctgggtagaaccttgtttctgctccaggtaaggaattgcaggggtgagggtgtgtggaggaaaggggcctccacagtggggaagggggctacagagggaatcccagccccagccccagccccagaggacccatttatttgctctctaactgtggtgaaggggccctttctgaaatgcaagcagctcccgagttcctctacggcagtgtcgggctggtgctgg

SEQ ID NO: 8915 - DNA, 1174 bp, Homo sapiens
cctccagtctcagcccctgaggggcctgagctggatgcagaccagctgctgggcccttcctctctcctccatcaggttccagaggcctcttgctgggaaatagtttccatgaagtgaacacgctctcatctaatttttgcacagtcctatgacataaatgttgtcactcccattttacagatgaggaaatggaggctcagagagattaggaaacttgcctaagatgtgtctgattccacagttcagacatgattctgagatcctgatagaatgaggaaatgggccaggcgcggtggctcatgcctgtaatcccagcactttgggaggccgaggcgggtggaccacttgaggtcaggagttcaagaccagcctggccaacatgacgaaaccccgtctctactaaaaatacaaaaattagctgggcctggtggtgggtgcgtgtaatcccatctaccctagggactgaagcaggagaatctcttgaacccaggaggcagaggttgcagtgagtcaagatcacaccattgcactccagcctggacaacaagagcaaaactccatcagggatgccccggggacttgagagcacagaagctaggagaggtggtgggcacattgcaagcggtcattcaggggccaacaggaccaaatggtgacaggacgggcttggggcctgggaggcggggggtggggggtctgctaatggcccgctgcctctgcctttgctactgagctggctgaaagcccagcgataggaaaggccaggccggggttctaggcccttccctggcatgcaagtggcagccatccttcagccaggcctgctctccttgcagccatcctggtgatcgagttcatctacgccatcgtgggcatcgtctggctcactcagtactacacctcctgcaacgacctcactgccaagaatgtcaccctcggtacgtctgggtgaggcctgctggagcctcagcagccccgggggcacaggggacgagatcagtttagagaggaagaagcttgggcattgccagagggcagtgccttctgtgggggcaccagcaggttggctgggcgagactgcttccctcacccttgaggcctgccagctacctggtctggggtgggctgcagcaggcacagagctgctcaggtcaagccgaggctcctcagcacc

SEQ ID NO: 8916 - DNA, 1708 bp, Homo sapiens
ccacttccctaccaccagaccagctctgaggcctgaatgtcgtgcagatggcacttagcattccagagaatgcttgtgctggtgggagagccatgtagtcacatgggcgtcttcatcagggagcacgtgagctgggatgacacagcatggggagatgaggaggatgtatcttctgggtataaaccccttaaatgggggtcatcaccacccatgactgtcagcccggcgctgcagctgctcccaccacctccccaaacctggctgctatacccaggaagggtcctggcttcccttctctgtgcctggcctgctgtcttccctcttttcctgagaccctgtgcaccccaacctcccgctggccacctcccagcctgaactctgaccaagcccccatggctcaggatgcgccagctcagctaccttctctctgttccccaaaaaagcctctttttttcctgcctcatggccttggccctccttctccctagaccagtggcactgggaacaggcatgctcccagctaggaagaagccggggacataaagctagcagctgtggtgaggataccagggtgagtgctgagggtgagggacctgggcttcctgtttttaatgattaagcctcagcctcaaaaagcttttgacagcctggacaacatggccagaccctatctctaccaaaatggaaaaaattagccaggtatggtggcatgtgcctgtagtcccagctactcaggaggctgaggtgggaggattgcttgaacccaggaggtcgaggctgcactgagctgagattgtgccactgcactccagacagagtgagactctgttaaaaaaaaaaaaaaaaaagctttgattatgaggttatatctattgatcgttactgtattaaaaattaaaactgaggagtttaaaagtattttaaatattaatatttttatatgaatatttagtactttaaagatttaaaaatattgtttaatattttaacattataaaatgcaagtaccaagcctatcacctgtttacattaagactttttatgaaaaaataacttttccaaaacaaaaatgtactgaagacactggcattattctacattttgcaaatctctttattgtatgactttaaataagccacattctgcgtttgatctgttgttgcattgtgttgtttgggttaaagtaactgaagaactggacgggcgaggtggctcacacctgtaatcccagcacattgggaggccgaggtgggcagatcatgaggttaagagattgagactgtcttggccaacatggtgaaaccctgtctctactgaaaatacaaaaaattatctgggcgtggtggcacgtgcctgtagtcccagctactcaggaagctgaggcaggaggattgcttgaaaccgggaggtggaggttacagtgagctgaattcacgccacttcactccagcctgggtgatacagtgagactctgtctcaaaaaaaaaaagtagctaaagaacatctggcctcacatagacgtgtagttgggaaagggaggagtatcttcatagctttttcagataattatgcatattctttgttatcaggaccagcgcaagaagtggtagttcttaaaggtttgttgtggtgtggaatctgaaaccatgttgctgattccacacgggtctaccttgcactttgttttgtttttttttgttttgttttg

SEQ ID NO: 8917 - DNA, 1571 bp, Homo sapiens
agccaaggtgagcaccagggctggaagcaattcctgggctgagtcttccccactgagccttgaccgcccaggagctgccccgttttccctgtctgaccaggcagtgagtgatgtgggtgttggccacctggtctccttgcagcacccgtcagcgttgctggttgcctggctagacctgaccctggggcgtgggctccagaggttgggggtgaggcggggctgccaggaagagctacattcaaactggctggggtaggataggagtgctccaggattacacccagtgctgcttcgggccaggacacagactccttttcctggaggccgtgtcctgccatcactaaaaccagccccctccctccttgctgcagagcagagggtttgttcttgggacggggaaacagggtgacagggcagacctgctggccttgccagccccatggtgaatagagaacagaccacaaaagagatgcagctcacctgggcccaagaggtggaggcggagctgaggacagggctcacatcctgagacagctctgtggtggggtgccagggagatgaagccacattctgaagctgacatccctcgtctgtccatggagccattgccgggagctgccatcctcctatcctacagggggctgtgggttcgtggccctggccagggcaccttgtgttgacctcttgggtccccatccctggaatggtagagggactccctagggggagggcttggactagctgggcagtcccctcagagtccctcttctgttttcagttctgagcagaaggaaccccccgaggaggctgagcctgtggcggcagctgagccagaggtaagacggctgcctggggaagggaggactcacctctggggctcccgctctgcactacggccatcctgggccttgggttccaggtcaagacccctaaagccttggttctttccacaggtccctgagaacaatggaaataactcgtggccccacaatgacacggagattgccaacagcacacccaacccgaagcctgcagccagcagcccggaaacaccctctgcagggcagcaaggtgaggcttcctgacctgccgtgtgcagtgcccggagccacagcgggccttggcggcctcggcctgaccttctctctggggataaggaagccccattttctgggccagtaggctaaagagaaattaaacctgggggtgcagagatcccttttgagtctgtagacttcacctcccaccgttgggctggagctgtcactgagtgcagcatggggggctgtggctggttgggacaggaagcagaggaaggggctgcatcggggtatggatatgaagaggccaggtcaaggccttgaccttgactccaggggccagtgggaagagctgtgggctggggattgaacaccccacctggcctcctgctttgcctcccccgccagctcctttctgacctttgtatgtccatccttgtctaaagagggctggagagcagtgggtttgggagtgtcccagggtcctgctcacatctccctgagaagggtgcctctctctggtggaaagtg

SEQ ID NO: 8918 - DNA, 1027 bp, Homo sapiens
caggaggggtggaatttagaagctgtgcaaggggcttggagctcctgcttctacaaggcgtccacacactgttcttcgtgtcagaggtgggtggggcacgtctggggctgccgcctcgacaggaccgtcccgccctgccttgcctatcatagagccaggcactcgcggggaggtgttcgtgagctgggggtagccaggccctggcatctgtagatttgtatttttagtagaggccgggtttcactatgttggccaggctggtgctgaactcctgacctcaaggatccgcccaccttggcctcccaaagtgcttgtagattcctcaaggctagtcagggttaaggctgatatgtctgcgtttggccaccccggagctgccaggaagggagccttgcccactgccaaggctgctgcccaaggaccccttccccctacacccccattcccaccctgccgccgccatcgtttctgcagccttgctgaaattgctgtcttcacagaggccaagacggaccaagcagatggacccagagagccaccgcagagtgccaggtttgcatccgggaaggggtgtgtaggtaactctgagggccctggaggatgtggccttgtgtccttgctcagggaaggtggatgtgtgctcaggggcttcagagcctctctgctggggtgtggcctggtgttgtgacttaaccaaggaggcagctccatgctgtggatgagcgcaaacctgggaatagggcgacccgattgttgaccccgtcttagtgtggtctcctggccatgtgaccttggactgttcacctcccttcctctgagtgggcagcagagggttgcttaggctctgcagcctctttcagtctagaggcctgtggcctgggcccggtattgttcaccggggtgacttttgatggggtgtggctgggctgtggcgggctgccctgtgatgccgccgcccgcgccttggcaggaggaagcgcagctacaagcaggccgtgagtgagctggacgaggagcagcacctgga

SEQ ID NO: 8919 - DNA, 1122 bp, Homo sapiens
ggtacttgtggacacctccaccactggggtgagggttgggtgacaggagaggcggtgggggtgctgctggcaggagggcaggccccacgcaggcttgctggcacagctgggcatgtggcctgcccggcaggatgctccccggcctggcattaactcttgccttttcccttgtctcctccacagtgcagcttcgtcgtaagtaaagccttttcctgtcggtaacctcgccccacctagcactcacccgctgtagccccttccctgcgtagctgacagcacctgtagatgcactaacattgtaagcgggaggggagccttaggaagagagtgggacggtgaggggtgcactggctggaggcgcccagcagttctgggccccagcgtccttctctgccctccctgcccttgactctgctcttaggaggaagcaagggggtgtggcttttcaccagggctacagcttgatgtgttctccacagccaccttccctccctcctcccctgcaccaggccccgtcagggtctgtgggtctttgaagagaacagacaggttgtctgtggtccccagagctactgagatttattggttcacagacctgagcagtagccttgaggcagtggggtgatgggggagcgcaagtgtgggtctgaactgaggtggaagtgctgggtcttgctgtgctgggtgacagtagaacagtgggtggtagcgtctagaaacaagtcgcagaagctgttctcttctcagacacctcagagctgagccgagccaggcaggccctgagcaaggaccctcagatggggacatgcttagcctgcagccccagctccctgtgccatttgccaaggccacagacacctcattcctttagttcctgcaagccttctgaagggtcctctgcagccacacagggacacctgtgacagccgggagggcttctgcctccagttgagggcctcggcaggtgagaggggcttcccagcagctggccaggtgggccctgagctggcttctccgcatggaggcctgttcccctcttgttggagagggtgactgacagtataccttccagtggccttaccacctgtgccgattagagccctgcaggtctcacagggtgat

SEQ ID NO: 8920 - DNA, 1283 bp, Homo sapiens
cagcactgcaccagggcctgtggggtctgtgagaagcagctggccaaggtggtcaaggatggcatcctatgcttaagctctggaactgggcttgtcttcaaacacaggctctgccattattagctgtatgcctttgggcaaatctgctgaatgggagaatacagaacctgcctcccaggtggtggtcgggacaggttcaaggagtgcctggctcatgcgagctctcaaggactttgtaaggttaagctgccagaggaaggttggaaggatgtgacacaagggcgttctctgggtttgatggtggtacaggcaggggcagggctgaagagggtgacagagctctctgtagggaggttggagagggtgacagggctctgtggtgggcaagggatggggaggttcatggagagccccaaggcagtgtctggtctgtggtctcctgcaggcaccccgctcagccaggctatcattcaccagtactaccacccaccgaaccttctggagctctttggaaccattctcccactggacttggaggatatcttcaagaagagcaagccccgctatcacaagcgcaccagctctgctgtctggaactcaccgcccctgcagggcgccagggtccccagcagcctggcctacagcctgaagaagcactgaggctggcctgcggccttcttggcagcctcgcctcctgtccatgtctatctgtctgtctgtcggtctctgtcttggtctgttgccctccttcttggcatgccattgtggagggcttggccaggtgtatataaacgtcctctgtgctgggtgtttctgctgcaggtggcaggtggccccaggcctgtttggaggatgggctgggtgggtgggtggggaagaaatgggcccagccccacatggcctgcagacagtgctctgtaaatagttgttttaatttagctgaatgttagcattttagtctttggcattttagcgtttgggaggtagattaataaagtatattccttcaagcctgctgttgataccatgaagactgggcgcctcagtcccagccctgtagctgtgtgtcttgggccaccagtggcctgcaggacgaaggtactgttccatcacctgcggtgtgcctcaggatcaccaggtgcaggcccccaccctcggagatgctgctgcagtgagtggttccactgcctggataacccttgaggaacacgtcagttactgtcacgatggggcaggtggagctccttcctattttttggggtgctccctgtttgtaaagggga

SEQ ID NO: 8921 - DNA, 1093 bp, Homo sapiens
gcttaaggacaaaataaagcctaaatccaagaacacttttaaaaatgaggaaatagtgaacacaatagacggaagtctggaagtttctacccatgccaagaaaagcattttatgttttgttcacatatgttgtgcaattcaaatttttttccctatattctctgactagacacttgtactgagtcaattggcgagtgtgtctgtctaaaagcacaatatcaaaatatcacttaaagcatctttacatagtgtgtttaagaaaaagttgttattcagcagaaaggtaattccaattggtctgcatatttatcagcacttggtattgtctgtttcttattttagccattctgataggtgtgtactgatatctaatcatggctttaatttgaatttccctaatggctgatggtgaacatcttttcatgtgcatttctgtcatctgtatgtctttggtgaagagtcttcaaatcttttgttcatcttaaaattggattgttatattaccattgggtttaagaatctacatattatggatacaaatatgttgtcagatatgtgttttgcagcattttctcccagtctgtagcttgtctttaaaaaaaaaatttttttttttttttttttttttttttagagatgggatcttgctacgttggccaggctggtctcgaactcctggcctgaagtgatccttctgccttggcctcccaaaatgctgagattgtaggcatgagccgccatgcctagcccagcttgtctttttgtttacttaccagtgtttttcagagaacaaaaattttaatttgatgaagtccaattaattaaatttttaaaatagagtgtgatttttttgtcatgtctaagaaactattgtctagtcctaggtcctaattctcctttgttttcttctaaatgttttattattttacatgttaacgtttagatttatgatctattttaagttttttttaagtatgaggtttatgttttttgtttgtgtttaggagcatatggatggatgtctagttgttccagcaccatttgttggaaagactatcctttctctgctgaatttcttttatatctttgtcag

SEQ ID NO: 8922 - DNA, 1026 bp, Homo sapiens
ttttttttttttttcccaggttggtccgctgaggaggcggggtcgtttctgcgggattatttttccggagcctcttctgattgggtggtgtggcgcaatgcgcgcgaccctcaagataccaaactgtacgcatctctgaccctttcctctccttgctcctgctggtaaaccgaagcccaggagacttccaggtttgggcatctgcagagggcgaggaactggtcacggcgccgggtgggcttgcagctgtgacgcttatgtggacacctcagtgtcgctggtggttcacctcggcttcccagtttatttattgacgtcaacaaataaatgttgaataaggaagaagagttagaattgcttgaagccctctggagttttagcactagtcccgcccactcccttctacttccaggtcgggggggggcgggtccaatagaaaggcggaagccagtgtcccaggcgttctcacgcccgcaacaattcctgagtagggccttgcttgagttcttcggaaagtctcatccacccccacatcgcctctttaggaagtcacttaatgttgggcttcattattcccacatccctttccttactacttgcctgcacttcttgagaaaaagactgcagaaaggagaggtggggctttcagtagaaacaagcaaaccgcaggtccctgtggggggactctccaggaagaagggtaatttcctgcctccttaaattggctgctactgtcagttattttgctcccaaccccagagcttcacttgctccttcacttcccagttccgcaagaaccgtgggcgacagttatggagaagcgtctgcaggaggctcagctgtacaaggaggaagggaaccagcgctaccgggaagggaagtaccgagatgctgtgagtaggtaccatcgagctctgcttcagctgcggggtctggatccgagtctgccctctccgttacctaatctcggacctcagggcccggccctcacgcctgaacaagaaaacatattgcataccacccaga

SEQ ID NO: 8923 - DNA, 1029 bp, Homo sapiens
tatttttagtagagacgaggtttcaccatattgtccaggctggtctagaactcctgaccttgtgatccacccgccttggcttcccaaagtgctgggattacagatgagccactgcgcccggcctacaattttttttttttttttgagacggagttttccccttgttacccagaatggagtgcactggtgcgatcttgactcactgcaacctctgtctcacgggttcaagcgattctcctgcctcagccttgcgagtagctgggattacaggcatgtgccaccacacctggctaattttgtatttgtagtagagatgggggtttttctatgttggtcaggctggtcttgaactcctgacctcaggtgattcgcccgccttggcctccgaaagtgctgggattagaggcgtgagccactgggtccagctacaaattcttacgactggtttggaggcagaatgcaaggacattggaggatctaggaagacatccctgagcaagtgacatttgaactgaaatctgaaggagtgagtagcagttcactagacaaagggattgggggtggaggacagggaggagagagttccaagtggaggaagcagtgttcaaaggtcctaaaataggtgtatttgaggaactgaaaggaggacacaggtgggaatacagaacacaagaaagtaggagataagaggtaagaggtattgcagaagtaggcagtacatgcagagcctccagagccattgttcagatttgttctttatttctttttttttttgagacggagtcttgctctgttgcccaggctggagtgcagtggcgtgatctcggctcactgcaatctccgcctcctgggttcacgccattctcctgcctcagcctcccgagtagctgggactacaggcgcccgccaccaagcccagctaattttttgtatttttagtagagatggggtttcaccgtgttaaccaggatggtctggatctcctgaccttgtgatccgcctgcctcggcctcccaaagtgctgggatt

SEQ ID NO: 8924 - DNA, 1025 bp, Homo sapiens
tgcccaggctggagtgcaatggcatgatctcagctcaccgcaccctctgcctcccaggttcaagtgattctcctgcctcagcctcctgaatagctgggattacaggcgtgtgccagcatgcccggctaattttgttttgttttgttttgtttttgaaacggagtcttgcattgtcacccaggctggagtgcagtggcgcgatctcggctcactgcaagctccgtctcctgggttcatgccattctcctgccttagcctcccgagtagctgggactacaggtgcccgccaacatacccggctaattttttgtattttttagtagagacggggtttcaccgtgttagccaggatggtcttgatctcctgaccttgtgatccacctgcctcagcctcctaaagtgctgggattacaagtgtgagccaccgtgcccagccttatatttttaatagagacgggggtttcagcatgttggtcagactggtctcgaactcccgacctcaggtgatccacccgccttggcctcccaaagtgttgggatgacaggtgtgagccactgtgcccggcctaattctatgaacatttaaatttttatttattattttaattaaaaaaacattttttttaagatggggtcttgctctgtcacctaggccggagtgcagtggtgtgatgttggctcactgcagcctctacctcttgggttcaagcaattctcccacctcagcttcccaagtagctgggattacaggggcataccaccatgcctggctaatttttgcatttttagtagagatgaggtttcaccgtgttggccaggctggtctcaaactcctgacctcaggtgatccacccgcctctgcctcccaaagtggtgggattacaggcgtgagcctatatatatatatatatatatatattttttttttttttttttttagagacagggtctcactgtattgcccaggctggtgaaactcctgccctcaagcaatccttccttggcctcccagcactttgggaggc

SEQ ID NO: 8925 - DNA, 1019 bp, Homo sapiens
atctgtaagccatgacctggagcaactgcaccggctgctgcaggtggcacggagcctatttcgtaatccgcacctgtgcttggggccctatgtccgctgtctggtgggcagtgtcctctactgtgtcctggagccactggctgcctccatcaaccccctgaatgaccactggactctgcgggatggggctgccctcctgctcagccacatcttctggtagccactgggcctaaacctgcgggtgggattgctgcagagccaagtgggttggggtaaggaaatggggcgaagcctctggctttgagagtctatgagaagatggggaaccttttccctaggagcgtcctagctggtgtgctgtgacacactgggattctgaaaatggattacaaatacgccaaggtattggttcttcagccctcaggtcctaggccagtcacccctggcagccttcttcacttaaccccagcactcccgagtgtgctgtacagatgctattctctttgtgttgtcttgtgccctgttgggtggcaccatgcctcattcccctccctaactgaatggtgctcccacaggactcatggggaccttgtaagtggcctctatcagcatatcctgctatccctgcagaagatcctggcagatcctgtgcggccgctctgctgccactatggagccgtggtggggctgcatgctcttggctggaaggtgagcaccctggcctttctcacacagccgtaagaactcccatttgtgttagaaaaatagtacttgtgcatcgttatctccaaaatagtgtgtgcctgccactgccatgtattgagttctggccttaggccaggctcagtgatacttgactttctgaatgtaaatgtcttatcctttcgaaagtcctatatggcagatactgatgtccccacattttataaattcctgcccgttctatattatcacattaagaaataccttcaattcctgttgtattgagcattttacacatgaatagatactgaattttg

SEQ ID NO: 8926 - DNA, 1291 bp, Homo sapiens
tggcatgaacccagaaggcagagcgtgcagtgagccgagatggcgccactgcactccagcaaaaaaaaaaaaaaaaagcacctcacagatagttatttgttgaaggatatacaaggcctgggtttactctaaggtttctgcacagagaccataacttgtgaggcttctctgaagctcattgcattctatattcattgcctattttctgatccttctggccactgccggtgtgattccccagcaggccctctccatcaatatccctgtcccagaaataggaattgacggtgcacaaataacttcctggaatgcaggaccattcctaagttatcactaacaccctaccaagagactgtatctagagacattaacctgaaatctaggactcagcagcttctctccacagggctccttcagtggtagatgtcccctgtatggtgtggccaccctgaatggctcctccctggccttatcccgtccctcagcaccatccctgtgctactttgtagctggggcctctggcctcttggccctctactgcctcctgcttttgctcttctggatctacagcagctgcatcgaggactcccacaggtgactgcctaaccctgagggccaggggctgaggtaggatgagcctcacctccaccacaaggcttgttctctccctttcagaggtgctatagggctgcgcattgcactggccatctcagctatagccgtcttcctggtcttggtgtctgcctgtatccttcgatttggcaccaggtctctctgcaactccatcatctccttgaacactacaattaggtaatgggagagggagggaagcctggctggggctgactaccttccctctgcagcggggtcctataatttccttttatccccatcagttgctctcaactcacagggcactgggcacaggtgtgcctcggatataaactatcacgctttctcacaactgtctctttgacctcacagctgttctgaagcccagaaaattccatggacaccccctggaactgctctgcagttttactccaacctacacaatgctgaagtgagacccaaggataggaggaaaaactgacataaatatctgtagctgtgtgggtgctcaccagtgtattgtgagcttggcctaccagtgagaggagctgaaggggttgtcagcttaaaattcagcagttcagagtggtgtgtgggtgggaaggactggatttgaaatggtcccactcctgacgatcctgtccctgtctcctacagacctcttcttgggtgaatttgg

SEQ ID NO: 8927 - DNA, 1050 bp, Homo sapiens
tgacatgggttcttcagatagtagctgcgaagtgaactgctttagttggagtctttttctctgctttaatttcagccacgctttgacttccaaatgctcaattcctcacccatctttcctttttctttttcttttttttttttttggagacagagtcttgctctgtcaccgaggctggagtgcagtgtaatctcagcttactgcaacctccgcctcccaggttgaagggattctcctgcctcagccaagtagctgggattacaggcacccgccatcgtgtgcgactaatttttgtatttttagtagagatggggatttgccatgttggccaagctggtctcgaattcctgacttcaaatgatctgcccgcctcattcttccaaaatgctgggattacaggcatgagccaccacactggcctcatttttcaaatggctaaaatcttcaagatttctggctgattggtattttagaggcagctttgatgttttgtttctgggtctttggaatagagtcttgggctttcgaagatttatggaggctgttggacagagacagtctcctgaagagtttctagctgtcctcccatcttctctctgcctttagaaatccttcttagatgtggccgggcacggtggctcacgcctgtaatcccagcactttgggaggccgaggcgagtggatcacgagatcaggagatcaagaccatcctggctaacatggtgaaaccccgtctctactaaaaatacacaaaaaaatcaaaattagctgggcgtggtggtgggcacctggagtccgcaggagaatagtgtgaaccttggaaggcagagcttgtagtgagctgagatcgcaccactgtactccagcctgggcgacagagcgagacttcatctcaaaaaaaaaagtccttcttagatgtttttagttgtttgtttatttttcgagatggagttttgctcttgttgcccaggctgaagtgcaatggcacgatctgggcccattgcaacctctgcctcccaggttcaagcgattctcctgcctcagcctcct

SEQ ID NO: 8928 - DNA, 1679 bp, Homo sapiens
tcttcagcctaaaatggatttgtccagtcgtctgggggctttctacttggctgtggaatcttgagcaggtcatttaacttctgggcttcagtgcccttatttgcaaaatatagatatttactaaaccagtggttttaaacttgtaaaacagtaggtttttttggggggggggaatcccaaatattgttttacgactcgatatagacacatgtttaaaaaggttcactttgggagtggggaacacaggggccacttctctgcactataaactttctgccttccaatatctttttttttttttgagatggagtctcactcttgtcacccaggctgcagtgcagtggaacgatctcagcttactgcagcctcctcccccagggttcaagcgattctcgtgcctcagcctcctgagtagctggtactacagccgtgtgccaccacacccagataatttttttatttttagtagagacaattttcaacatgttgaccggtctggttttgaactcgcctggcctgccttcccatatcttaaggcccttccttgctcacatctgtttcaatggaatgaattttgcccgggttcaaattcaagcttttgtaccaagtaatacataggaaacactcagtgacttgcatttgtgatttccttattttcccttaactcatagactgtctcatgattgcgtcttcctccgttgttttaggcatccgtgtcattctggaccttactcccaactaccggggtgagaactcgtggttctccactcaggttgacactgtggccaccaaggtgaaggtgagtgttggagctgatggctggtggaagtcagatgctggggctgggacagtcctttcacagcaagccctgtagacccagcctgactccagctgagggtccctttgctccttaggaccaaggaggaatgcctcctcctatagccaaaggataggccaatagcacacctgtttttcttgttccttttctgacctcttatttttcttatttccttgactctgaggatgagacagtgccaggaagggaccttctcagaagtcagtctggaagtttgatttttctttcttttgggagaggaagccctttctctgtgagaatcctgtcctgactggtttcccagttcttgtttgatgtgtttggaatagagcccagtctgaaattataagcactggggtactcctatgtgtctgggactctatgccaagtattttatagatgttttctaattctctgtataaccatacaaggtatataatttgccataggttcaaatgtgtacccagcaggctaggagtagggctttgaatgtcacctagctcctgatgtctgggtcctaggacactgacctgttcagaatgggtagaacaaaaatggaagcagatactgacactgctggtagctgtgattctaagatagaattctggactcccagcatttgggtaggaccccgggatcatccagtttaggccttgccagttactaggggaccctttaaaagttgctgatgagggaatgtttttggatggtttggcatgaggggcggtaccctcagatggaaatggagaccagaggagagagtacatggcccagagaaagggaagaaaaggagaatgggggtgaagttccacagtgtgtgcaggactgccaggattccattcag

SEQ ID NO: 8929 - DNA, 1037 bp, Homo sapiens
tagtctagagcattttctttacctttattctttctttagctttttttttttttttttttttttttttttttttttgagatggagttccgctctttttgcccaggctggggtgcgatggcgtgatcttggctcactgcaacctctgcctcctgggttcaagcgattctcctgcctcagcatcccaagtagctgggattacagacgcgggccaccacacctggctaattttgtatttttagtagagacggggtttctccatgttggtcaagccagtctcgaactcctgacctcaagtgatccacccgcctcagcctcccaaagtgttgggattacaggcgtgagccactgcgcctggccccattctttcttgtgctaaccttgaactcctccctcccctctgcaggctcttgattgcggggactaactcctccgaccttcagcagatcctgagcctactcgaatccaacaaagacttgctgttgactagctcatacctgtctgattctggttctactggggagcatacaaaatccctagtcacacagtatttgaatgccactggcaatcgctggtgcagctggagtgtgagtaccatgctggtgggaaagggggcagatgggagaagaaagggttgttgggagacagaggcagaggtgggttatggggctcactggagtgtctctccctgtagttgtctcaggcaaggctcctgacttccttcttgccggctcaacttctccgactctaccagctgatgctcttcaccctgccagggacccctgttttcagctacggggatgagattggcctggatgcagctgcccttcctggacaggtactgcttgctgtctttctgtcacagggaggttgtttatccatcttacaatgatgattctggggatggcggcacatagacgtgagccttggggtgaaaacgcgtttgattcttagtcagtagctgagtggctatgtggctttgggcaaattattttacctttctgaattttggtcatcccttgtgttactgcatttcttga

SEQ ID NO: 8930 - DNA, 1035 bp, Homo sapiens
agcgagactccgtctcaaaaaaaaaaaaaaaaaaaagttagccagacatgagttggggaggttatatattgatgaggatgtgaatgggaagagggatacgggacagtgggcccagggctttttttttgagacagggtctcactctgttgcccaggctggagtacagtggtggagtcatggctcactgcaagctcaaactcctgggttcaagtgatcctccctcctcagcctccccagtatctgggactatagggatgtaacactacacccagctaatttttaaaaattttgtagtagagatgagggctcattatgttgctgaggctggtttcaaatgcctgggctcaagcaatcctcttggccttgacctcccagactgctggaattacagatgtgagccaccatgcctgaccccaggcctttttaaagtcctattttctctgcttttcagcctatggaggctccagtcatgctgtgggatgagtccagcttccctgacatcccaggggctgtaagtgccaacatgactgtgaaggtaagagttctagatgggtagaaactgaccggtggagggtgggctgggcttgtagaagtctgtacccaggggagcccctcacacgcttctgctatgtttttatcattcttagggccagagtgaagaccctggctccctcctttccttgttccggcggctgagtgaccagcggagtaaggagcgctccctactgcatggggacttccacgcgttctccgctgggcctggactcttctcctatatccgccactgggaccagaatgagcgttttctggtagtgcttaactttggggatgtgggcctctcggctggactgcaggcctccgacctgcctgccagcgccagcctgccagccaaggctgacctcctgctcagcacccagccaggccgtgaggagggctcccctcttgagctggaacgcctgaaactggagcctcacgaagggctgctgctccgcttcccctacgcggcctgacttcagcctgacatggacccactac

SEQ ID NO: 8931 - DNA, 1035 bp, Homo sapiens
ggctaacatggtgaaaccctgtctctactaaaaatacaaaaaattagccgggcgtggtggcggggcgcctgtagtcccagctactcgggaggctgaggcaggagaatggcgtgaacccaggaggcggagcttgcagtgagcctagattgcaccactgcactccggcctgggggacagagcgagactccgtctcaaaaaaaaaaaaaaaaaaaagaacaaattctatacttgctagagactgctttttattgttgttatgaaagttggctgagtctggtggctcacacctgtaatcccagcactttgggaggctgaggtgggtggcttgcttgagctcacgagtttgagaccagcctggacaatagtggtgaaaccccatctctacaaaaagacaaaaaagcaagaattagctgagcatggtgatgtgcgcctgtggtcccagccacttaggagactgaggtaggaggatggcttgagctgggggcagaggttgcagtgagctgagattgtgccattgcactccagcctgggtgactgagccagaacttgtcttaaaaaaaagaaaagaaaaggaaaaaagaaaatcatgatgccaaaataaaactacattttatatgtttgttcatggaaattagctcaaagcaaaaacagcttgggcaattttttgaaaaaggttttgctttaaatatttctttcctcactcatgaaacttagttgttctgtgtactttttatggcttcattttcacactttgttctaccatattaatcaaatgtgaatatgtaatttgtgttttgagttaacccttaaataaaaaggaatgtggcccccgtccaacactgacatcatctgagtgttacattcgtgtcagattatcagtggcagtgtaatgtgttaaaacacagacttgagctccaggaatgcctagatttcaatcctggccctgtctcttaataattatgtgatcttgtgcaagtcctgagcctcagtttccttaacttgaaaattgggataatagtatctatcttggagttg

SEQ ID NO: 8932 - DNA, 1048 bp, Homo sapiens
tttttctgaaatggaattttgttcttgttgcccaggctggagtgcaatggcgtgatctcggctcactgcaacctccgcctcccgggttcaagcaattctcctgcctcagcctcccaagtagctgggattacaggcatgcgccaccacgtccggctaattttgtatttttagtagagacggggtttctccatgttggtcaggctgctcttgaactcctgacctcaggtgatcttcctgctttggcctcccaaagtgctgggattacaggtgtgagccactgcgcctggccttttaatttacttttaagacaaggcatggctctgtcacccagtctggagtgcagtggcatgatatcggctcactacaacgtccatgtcctgggctcaagccgtcctcccacctcagcctccggagtagctaggactgtaggcgtggctattttttgtatttttctagagacgaggtttcaccatgttgcccaggctgatcttgacctcataagctcaagtgatcctcccacctcagcctcccaacgtgctgggatcacacgagtgagccagcgcgcccaacctttaaccaatttcatatctacatagtccattttgtttctgtcaggctttctaattttcttttgcaacaagagttctgctttgttcttcctcttagattgcatatgcatttactctaataaatggtgcaaagaaagctttccagctctttttagtgatgtaacagaagagtgggcatcttggaaattagcactgttttgacttatatgagagggaactgctgtcttagtaactactacattaataagacaaatgtccagttactagttactactcagtctagttttgaaataacaagctaaatctaaaaatctcttagagtttgggtttcagcaaacatttatgaagctcctgtaatattcaaacctccatattctgtgatttctgctatatgctggtcaatctgaaagatacgaagatatgtaagagggctttaaccctcaggtgcttccaatcagtttgtaattattttccaacaa

SEQ ID NO: 8933 - DNA, 1035 bp, Homo sapiens
ttcccgaaaagccatcactccagtctaaccatgagaaaaacatctgacaaattcaaattgagggacattctgtaaaatatctgaccagagtcttattaaaactgtcaagagaagtctgagaagctgacagtccagaaaaggctaaggagacatgatgacaaaatgtgatatggtatcctggataggatcttgggaagagaaaaggggcgttagggaaaaattaaaggggatcaagaaagaaggacagagtgagaccttacttctctaaaaaataataaatagtaagtaaaaattacctttgtaatattcttttttattagaatacgatgaacatctcttagtgtcaataaattcccatctacaacccagttgttaatgacttatcctattgtttggatatatgaaacttaaacggtctaattattagacctttgttaagtttcctttaaaaaaaaaaaaaaaacctattttaaggaatattgtgatgaggccgggcctggtggctcatgcctgtaatcctagcactttgggaggcttaggcggacagatcttgaggtcaggagcaacatggtgaaaccccgtctctactaaaaatagaaaaattagccagacgtgatggtgcgtacctgtaatcccagctactcaggaggctgaggcaggagaatcacttgaacctgggaggtggaggttgcagtgagccgagatcacaccactgcactccagcctgggcaacaaaacaagactctgtctcaaaaggaaaaaaaaagaatattgtgatgaagccaggtgcggtggctcacgcctgtaatcccagcacttcgggaggctaaggtaggaggatggcttgagcccaggagttcaagaccagcttggataacatagtggggccctgtcactatttttttttttttttttttggagacggagtcttgctctgttgcccacgttggagtacagtggtgccatcttggctcactgcaacctccacctcccgggttcaagcaattctcctgcctcagcctcccgagtagctgg

SEQ ID NO: 8934 - DNA, 1159 bp, Homo sapiens
tctatcttgaaaaaaaaagtttgcagtttgaatctaaccaaatttattacatgttaaaacaaaagtaatgatactctccagaggaatagaacacagtctggaatttgtacagcataatattcacaatgtccaggatataatccaaaactacatgttttaagaaccaagaaattataactcagtctgaagaaaaagagacaatcgatagaaactaactgcatgtgttggaattaggagtcaggattttaagggttttcattttaatcactcaaagaagtaaagggaaatattcttgtattgaataaaaaagaaaatctcaacctagaaatcgaaacaaaaaagagtcaggtggggattctagaactgtaaaatataaccactgaaattaaaattcagcaggtgaccttaacagcaaaatggagatgacaggggaagaagctggtgaacttgatagcatactaaagaacagaaagaacacatattttttaaaagtgtcaccagagcttcagaaccctgtgggacaatatcaaaagacctaactttggccaggcacagtggctcacgtctgtaatcccaccacttcagcacttagggaggccgaggcaggaggatcacttgagcccaggagtgcgagacctgcaaaacctattttttataattggagtcctagcaggagaggaaagtgagagagagactggagaaggacatatttaaagataaaatggctgaaattttcttaaattttatgaaaggcacatttactgatgaaagacgctcatcaaacaccacctactaggataattacaaagaaaaccataccttggtgtatgtgtcggggtccccaagataaccatcagggccagtgatttgctagaaggacccataggactcataaactgtaaactagcagttaatggtttattacagcaaaaggacataggttagaattggccagaggaaaagacacacgggataaaatctaggagagatcagatgcaagcttccaggtattgaatggagtcatacagggatgtacttaattcttttacagtgatgcgtgataacatgtgcaaaggattcccaaccaaggaagctctttcaatctttggtgtctagcacggcatgcagtgcccatatgactgaactcagctactcagac

SEQ ID NO: 8935 - DNA, 1054 bp, Homo sapiens
aactgagcaaaacaccatctcataaaaaaactgctaaaaaaaacccccagtaccctgtttttatgtgttctgggctgttaattacaaatacaaatgtggttttccaaaatgttttttttaaaaaacaaaaacagcaaaattttagcataaacaaaatatagttttagaaactccaggatatgttaatgttaaaactgctaaaaaaaaaaaaaaaagtaccttgtttttatgtgttctgggctcttatttataaatggatttaccttcatgaatatccaatgaggtagtaaaagtgacacagaacataggtcagttctttactgtgcttgactgtcccatgctttgcagacatctggcatatttgcctctgcccactaaatgacagtgtgtctccaccccacctgatgacaacaaaaaaatgctcctacaggttctaacatgcaccctgggaaccaattttacattctcagtaactactgtgctaacaaaatcttcttccatgtcaaatgtatgactgttatttcttcttctggaagagcctacctggacgtagacattactctgtcctcagaagctttccataattacatgaatgctgccatggtgcacatcaacagggccctgaaactcattattcgtctctttctggtagaagatctggttgactccttgaaggttagttgtttctgcagctcttggtggtaaaacagaaaaagcagggactgggttataatttggaggaaaaacagtacataggattttatcagacaaaaatgaacgtatgcttagctcagtcattctataatgggataggtgtcactagagaaaggtatagccttctgctggggaacaaatatcagaagagaggtgatataattggaagcagtgcagtttcagtctttggacctcagaaaactacagacttcactcacataccttcaaatgtataacacaagtagggaaccttcatttggaaattgtccatgtcacacatcactaaatttatgcagacttaattagctggaggagaatgacatcagttaatgtgaatttt

SEQ ID NO: 8936 - DNA, 1410 bp, Homo sapiens
aaaagaactatcttagaactcagaagaagaaagaatcaaattcataggataagtcaataccttaatggtggtagagcctttacctgtagcttgaaaggggaaagattggaggtaagagagaaaatgaaagaacacctctgggtccttctgtccagttttcagcactagtcttactcagctatccattatagttttgcccttaagaagtcatgattaacttatgaaaaaattatttggggacaggagtgtgataccttccttggtttttttttgcagccctcaaatcctatcttcctgccccacaatgtgagcagctacccctgatactccttttctttaatgatttaactatcaacttgataaataacttataggtgatagtgataattcctgattccaagaatgccatctgataaaaaagaatagaaatggaaagtgggactgagagggagtcagcaggcatgctgcggtggcggtcactccctctgccactatccccagggaaggaaaggctccgccatttgggaaagtggtttctacgtcactggacaccggttctgagcattagtttgagaactcgttcccgaatgtgctttcctccctctcccctgcccacctcaagtttaataaataaggttgtacttttcttactataaaataaatgtctgtaactgctgtgcactgctgtaaacttgttagagaaaaaaataacctgcatgtgggctcctcagttattgagtttttgtgatcctatctcagtctgggggggaacattctcaagaggtgaaatacagaaagcctttttttcttgatcttttcccgagattcaaatctccgattcccatttgggggcaagtttttttcttcaccttcaatatgagaattcagcgaacttgaaagaaaaatcatctgtgagttccttcaggttctcactcatagtcatgatccttcagagggaatatgcactggcgagtttaaagtaagggctatgatatttgatggtcccaaagtacggcagctgcaaaaagtagtggaaggaaattgtctacgtgtcttggaaaaattagttaggaatttggatgggtaaaaggtacccttgccttactccatcttattttcttagccccctttgagtgttttaactggtttcatgtcctagtaggaagtgcattctccatcctcatcctctgccctcccaggaagtcagtgattgtctttttgggcttcccctccaaaggaccttctgcagtggaagtgccacatccagttcttttcttttgttgctgctgtgtttagataattgaagagatctttgtgccacacaggatttttttttttttttaagaaaaacctatagatgaaaaattactaatgaaactgtgtgtacgtgtctgtgcgtgcaacataaaa

SEQ ID NO: 8937 - DNA, 1314 bp, Homo sapiens
agggtttaagctgattctaggctgttgcctctaacccatcaggaatgccataagtatagaccctgtcttgggagagatctggagagatacttgagaattttggacactgtaatattgaatttggttctaattgtgatctagagaccctcagactctttcaggtgatgcacgaagtcaaaattctgttcatagtaacgttaacacagtgttgctttttcactctcattccctcaccagtatacagtggcattttccagaggctaaatgatgtgtggtaacatcacattcttctggctaatgaaatgtgtaattctgtattcttgtgttttctataatttttaaggtagtactttaaggtaaaaatatggaagttttcattgatggactcagtttgttcttagtacttctgtgctcttactaggtttcttcagttataactgctatcatctttttgtacacttcattactgtctaataaatccttattttgaaatcccagcattttcctggaacctttgagaaaatataagaagtaagtactacttgtaaaacttgcttgtaaaaacttttgggaaaactcctaattttaaaaattttattgacaacttattttagcactttattctaaaatagaaaaaaatttatattatttctcttatatgtaagggtggattgttggcttaaaaaagggagattagaagacttgctttttcaacccatagctgcaacttgtatgttaaaaatactgaagtggacataccaacaagtataaaggaggactttaaagaatctgggcagaactgtaaataagaactaaaaaaaaaaaaaaagaaaagaaatgaaagtgtaatgaaagctaccttctcagtttcataaatgttcataatgtaccttactgcgtcttatgcgacagaacattttcatgtagtattatggtaccagttaagttgtggcattctttcaagatcatttagagtttaaagaaaaaggaattgcatattttatgcgtacgtactatgagctctttaaaagccaaaatttcttccagtttttaaactagaaataaaaaagtcactgaagcctctatctaacaggataagttgccacattgctttggctggaaaagcccacacagaaactgagagacgaatgaagtcttgaacagctgacattcctgaatgcccactggatgaaaagtcagtaaaattcaaggcagtgccgctttaaatgttaccaggattcattaaattaaagatttagccaggcgcggtggctcatgcctgtaatcccagcagtttgggagaccgaggcaggt

SEQ ID NO: 8938 - DNA, 1094 bp, Homo sapiens
atagctaacatttattgagcccttactctgtcgcaagcacttgtttagttgttttacattcattaactcatttactcttttttttttttttttttgagacagagtctcgctcttgttgtccaggctagagtgcaacggcacgaccttggctcactgcaacctccgcctcccgggttcaagcaattctcctgcctcagcctcccaagtagctgggattataagtatctgccaccatgcctggctaatttctttctttctttcttttttttttttttttgagacggtgtttcgctcttgttgctcaggctagagtgcagtggcactgtcttggctcactgcagtctccgcctcctgggttcaagcaattctcctgcctctgcctcccgagtagctgggattgcaggtatccgccaccatgcccggctaatattttgtatttctagtagagatgcggttttaccgtgttggccaggctggtctcaaactccggacatcaggtgatccacccatctcagcttcccaaagtgctgggattacaggcatgagccaccatgcctggcttcatttattctttgtaagttagtagatctcactgttttacaggtgaggaaatagaggcccagaaatgttgaataacttgtttaaggctacaaacccaggtggtccagagtatgtcattgtcagaaccagcttttcttggttgtgaagaatcctttgtccctggcttcagttgtgtccaggcagtagaagatagtttccttaggattagctcccagtcagtgtgaggcagatgtcttgcagcggaatttagagtcacaaatggcctcctctgcctccagttgtttcttttgtccttggtggccattggtaaatgtggccgaaatggtgtggatggagtgggagcagctttctgggctcacctccctactattgagggctctacgcaagagctatgggagacctttttaagaaaccctctttaaccccagcttctgattcacatctttatcttttcccatcttccggaatttcaagaacccctttagaaaaaccaaagccccgagtcctaaaattgataaccagcaattaagtac

SEQ ID NO: 8939 - DNA, 1024 bp, Homo sapiens
cccaggttcaagcgattctcctgcctcagcctcccgagtagctgggattacaggcacccaccaccatgcccagctaatttttttgtagttttagtacagacgggatttcaccatgttggtcaggctagtctcgaactcctgacctcaggtgatccatatgccttggcatcccaaagtgctgggattacaggtgtgagccaccattcctgcctcaatctgtttgatcagctgagagtatcccccctgctcagatgaggcaggcaggactcctggggcggggtggggcgtgttgagccgtagtcttctcgaaggacctagggtcacccagtggttttgaaggcgcaattggtagataagaggaatggggtcccatgggagcctagtgaggagtcagctcagaaattacagcaacaggaaaaatgcctaagggcaggaactaaataacagaagacatgagtgtttataacaaagtacagaagagacagaaaaggtagaaaaagaataaagagagagcagagagggacaagaagtttacaaagtgccgaggcggattaggacagcttggggaggcaggaaacgggccttgtggttggggggtgggccgtgtggccacagttgttaatctcagcctgaaagactttgttcctgcaccttctctagtcatgctggggcagatacagggttggcttttctctgtgcagtaactgagactgggccttcctccctgtgattctgagggaggaacagcagtgccctggcaggagtgctgtaaccaattccgtacacgtcctgtcctcttctcaggttgaatgtctccattgaatgtaagcgagtgtctggactggagccagccaccgtggattgggccttcgacctgaccaaaacgaatatgcaaaccatgtaagcttgtcccaaccaggggagcctagttcctctcgcagctttcccgtctgactgctcccaaattccccaggtatgagcagagcgagtggggctggaaggaccgagagaaacgggaggaaat

SEQ ID NO: 8940 - DNA, 1038 bp, Homo sapiens
caggtgatcctcccacttcagcctcctgagtagctgagactgcaggcatacgccatcacacccagctaatttttgtatttttagtagagagaaggtttcaccatgttagccaggctggtctcaaactcctgagctcaggtgatccacccacctcggcctcccaaagtgctgggattacaggcgtgagctcccaagcctggccctgctgtggagtgttaattctattaaggtgaacatttaatagtccctacggactggcagggctggggctgaggtcacatcatgtggcgctggtgcttagtgcaggccaccccagtgctggagggaggaggccctgagaaatgggaccaggctgggagccccctaaggggtggaggctgtttgactcagagcagggcttggtaggccacagctgggagatcgggagcagggtgagagccagctgtggctgatttggctgttgaaagccaggccctgcacctctctggggtcatgctctgatacaggatggctctgttgcagcaggtgaggctgacgggtggcctggacactagtggctcctgtccggctccctggccctgagcccctcagtggtgacaaaggactaggcagccacgtccactgaggatcgtagtgaggtctcaagccgccaagtgcaggcactgtggatggcgtggggcagcacatgcccttgaagttggtcatgatgtggaactgcccccgtgcctagctcgatgcctggcaggtgggccacacgggtgtcacatgtgggagctgtggggggaccgctcctgtggcggcccctctcctgaatgttggatatatgggatggggaaaggtggggtatgtggctggaggggtccagggatggggcactcaggctagagccctctgagggtcctggcagtgagattggtgtccaggaacatgaaaaggagtggggacctgccctaagctgatcaggggtccagaaacaagagaggcccatgggtattggagctatgagcgcaggctaggggctcagaaggcagaggggcc

SEQ ID NO: 8941 - DNA, 1046 bp, Homo sapiens
ctggatgacagcaaggagttgcagcggtgagaagggtgggcactgggcaccgaggcaggtgggtgtctacctcctccccgggcgagtaggatgtgtctcgagtagggtgtctccctccttcccgggcgatgggctggactctggccttgccaggcggggcagtgctgtctcggccctggcgtctgggctggtcgaggagcccatgctgggcccgcctttccatcccacccccaggttcaaggctgtgtctgccaagagcaaggaagacctggtgtcccagggcttcactgaattcacaattgaggatttccacaacacggtgagccctggtgcctgtcttgggctgggccatgggggaggggttcacctggtgaggaccacccatctcctccccgtcatcttgccctttctccctccgtggctgcagttcatggacctgattgagcaggtggagaagcagacctctgtcgccgacctgctggcctccttcaatgaccagagcacctccgactaccttgtggtctacctgcggctgctcacctcgggctacctgcagcgcgagagcaagttcttcgagcacttcatcgagggtggacggactgtcaaggagttctgccagcaggtgccgtccccctcccctttactctcggccgggggagtgcagtgggcccacagggcctggggcggggtgcggagaccagggcctgaccggcacctgtgccacaggaggtggagcccatgtgcaaggagagcgaccacatccacatcattgcgctggcccaggccctcagcgtgtccatccaggtggagtacatggaccgcggcgagggcggcaccaccaatccgcacatcttccctgagggctccgagcccaaggtctaccttctctaccggcctggacactacgatatcctctacaaatagggctggctccagcccgctgctgccctgctgcccccctctgccaggcgctagacatgtacagaggtttttctgtggttgtaaatggtcctatttcacccccttcttcctgtcacatgaccccc

SEQ ID NO: 8942 - DNA, 1057 bp, Homo sapiens
attctgcaactttactcagagctggcaccaggcaatttcccagagcgtcccagggatgggtgggcagagaggttaggggaacgctgagaacggctcaggcctggatcccttccacctgctcctctcctctgcagggagaaaggcagctgtagcccagggcgaggctgagatggagcaagaaggcagggcccagagcgggcgtccaggctggagctcccagtgctgggaagtgagtgttccgaatggggtgccgtggctgggctgtggagctgggcaacgtgagttcacatcctggctctgccagccacagatgtgtgacccctcacatatcatttaacctctctgggtctcagttgctccatctggaaaatgggataatagcacccacctcagagctcattgggctgttggaaggattgagttaaactaactttgtaatgtgcttaaggcagtgcttggcaagaatggaggtcatgagtgtatcctgttattaacaacagtgtgacagtgtgggcatgttcgggtatgtgtacatcagtgtgatgggaggtgggtgcacacagggtgttcacagtgtgtgggggtgagcccagggatctgtctgagctggctctcctaggagcctcccgggtcgagcacctggcaccggctgctcgaagtctctgggggctcaccgccctgcaggcgacctcggccagctgtgggggcccgtgcggggaagtggagctcagtgtttcaggaatttaatgtttcctgcggaagtggactggcctgcagccaggcctttggggctgacctgggggcgcaagggaggtggagggagctggaatcaatgctggcagagggctcaggccagatgccccctcctcacccccagcagttccagaacagggcctgggccaggtgatggctctgcaggggccccagggaggggctcccctaaagcagagatgagggacaggtcactgtcagcccactgctaccccaacaagctagagtgcagcctggcccctcttgcctgcgtgtccctccctgtccacacaccagccttctcgct

SEQ ID NO: 8943 - DNA, 1054 bp, Homo sapiens
tgagggcaaaggggagccagaggccaggaaggaagagcccacggcccccagcattccaggaccaccagcaaggcctgcaccctctcctgaaaacatcagcaaggcacggttcaggatgtaggggtcaggctccaggtcacctcaccagttgtggcccctccagtaactcagagtaaaggaaggaccttgctgactgcaaccaggacagccaacacctacatgcacgaagtcccagctgtactgagctaagccctctatgtccattcccactacctccattagcccgttatatcctcagctctcaccccctccaggcagagagatgattggcccaaggtcaggtcaggatcccagccccgacttgggtccaggtctgtttggttcccatctgcagtctggaaaatggttatgcaggtgtcactgattggtgaaatgaggcatgtgggtgatgcagtatattacttctccattgctgctgtaccattaccgcaaattcactggcttcaacgacacatttagtatcttaaagttctgtaggacagaagtctgatgtgggcatcactgggttaaaatcaaggggaacacgaggccatgttcctttctggaagccctagcagacagcctgtatcattgccttttctgattcccagagaccactcacattccttggcttgagacctgttcctccatgttcaaagccagcgcggttgcatctgagcattctcctgtagtggcatttccctctgatactctccttctgcctctctcttccatcttcagggacacttgtgattacatggagcccacctagataatctgtgacaatttctctacttagctgatttgcagccttcattcccctttgccgtgtaatgtaacatatttacaggctctaggatttaggatgtggagtctttggagggccattattctgccctgtgcaaccttcctggcaatgtctagtgaggatgatgaggtagaggcagggtccccagccataagaaagtcttggcgttcaggccgggtgcagtggctcacgcgtgtaatcccagca

SEQ ID NO: 8944 - DNA, 1461 bp, Homo sapiens
acgaggaacttggacggatccagggagcggggacggggatacactgggagtagccgaggatcttagcagcctgggatgcagttggggcaaatgttactcttctacatctgagaaggtcagggtgggagagcgttgagcgggggtctgaggagcgacagaccgactctacctgatgcgggaaagggaagggtgccgcaaaagtccttgggacgaattccatctctgacagtgttttacaaatgtattgcggcccctccccctctttttgtatgcttgtgtgtgtgattgtcgagtgaccgaggaccaacacttccgaaaggtgggtctgaaagatgggtttctgacgacccgggggtggttgtagacaatttacagagatcaaccgctggaagttatgggcctctactgagcatttgaggggccgagtttgaagcggttgctgcttcctttcagtgacttggttatgtcctcagtagcttgcggttatgaaaggcctagaggttttgttcgatttgaagctgtcattgagctgtaatgattcatcggaagaaaaaggacaaaacaacctccaagaaacctctaccaacctccgagaaatcatcctcccgctcgggagtactactgtcttcgctccgggcccataacacttgggggtgacaattctgaaactatacctggtatctggttcttacttcagggccataaaactaagatcgcccacactctccccttaaataagacatctcgatggactagtgactaccatcctttttttggtgtgagctacagagctgagcctttggtctcttgtagcagttgctgctttaggcaaagctcgagcttccttgctgtattaaaaagagtggaaatgaagttagtaaacttttttgtgcccatataatatttcagttgtatctagggttaaatgggctgtagtataggtgaggaaaagatttctggaataagacgttgctcttttacctttaagaaaggatctggggccgggcaccgtggctcagcctgtaatcccagcactttgggaggccgaggcaggcggatcacgaggtcaggagatcgagaccatcctggctagcacagtgaaaccccgtctctactaaaaatacagaagaaaaattagccgggcgtggtggcgggagcctgtagtcccagctactcgggaggctgaggcaggagaatgacgtgaaccctgggggcagcttgcagtgagccgagattgcgccactgcactccagcctgggccatagagcgagactccgtctccctccagcctgggccacagagcgagactccgtctcaaaaaaaaaaaaaaaaaaaaggatctcggctgggcgcagtggctcacgcttataatcctagcactttgggaggccaaggtgggcgaatcacctgaggtcaggagttctacaccagcctggccaacatggtgaaaccccctctcta

SEQ ID NO: 8945 - DNA, 1069 bp, Homo sapiens
ggtgatcccatccgagctaggtaagaggcccctcctgagggtgcagagcgagtttggggtgtgtgactgggaagggtgaaagctgcttcagcttttcattggtcttcaccgtatccattcattacaatacatgcctcctccaagtttggctgtgtctagcagtgagtacagggcaagatcattgaagcactcagctgtagtggccccactctgcccttgccaggcctttggcacccccttcccatctccattacccttctccatttctggccttcttgctgagaggggcggaacactctccctttgcccacactggaagggagcttggccatcactgactgtttctttgtgcatcttcaacagggtatggagagcggggagctcccccaaagattccaggtagtaaaccttttgatacctcccatcacctgcagccagcccacctccctgtggccctggttggcattttgactccccttctcccctacaggtggtgcaaccctggtgttcgaggtggagctgctcaaaatagagcgacgaactgagctgtaaccagactggggaggggcagggggagaggcccccatcagggaccagactgttccaaaaaaaaaacaaaaaacaaaaacaaacaaaaaaacacttaaaagcccaaggagtaagcctgtgtgtgtttgtgggccctgagagactcagagacctcagctccagcataccccaccaccttctcctttcccgactgtggagccttgggggtctaggctcaatgacatggtggcccttgcccagagagaaaggagtgttcctgcctgccaacagcaatactgctccccccacccccacagctccccagccactttcaactcctggtctgggagccagcactgggctatcgtcatggctacgtggcccttaggaaggcctgtggtcacctggggagaagctgagctggcagaagtcaaagagcagtgtgcccccctaaaagagaccagccgagcctgttagctgcaccaaaggcgtatcctagctttattaaagggcccgcgccgcagagtcaatataaaaacac

SEQ ID NO: 8946 - DNA, 1050 bp, Homo sapiens
ccaggcatcacccagaggggttctcctcgcagaggtggggccgctgatgtggaggacacgaaggagggggaggacgaggcaaagcggtatcaggagttccagaacagacaggtgcagagcctgctggagctgcgggaggcccaggtggacgcagaggcccagcggaggctggaacacctgagacaggtagggggcctgcagtggccagggaaagcctgctggatagacccgtcgtcagcccggcatcacctgtcagctccctgtgtccacaggctctgcagcggctcagggaggtcgtccttgatgcaaacacaactcagttcaagaggctgaaagagatgaacgagaggtgaaagccgaggattgtctatgggaagggctggggacttctagtaccagaaggagggcagagtctgtgcttctgccgctgacccctcctcttcccctgccggcttctccagggagaagaaggagctgcagaagatcctggacagaaagcgccataacagcatctcggaggccaagatgagggacaagcataagaaggaggcgtaagggcaccgggaccgggggccatctgggtactggggaggcagggcaggtgtctgggccccgagccatcctgcgttgctcccgtgcagggaactgacggagattaaccgtcggcacatcactgagtcagtcaactccatccgtcgggtgagtcaggctcccgggccaccctaccccacctcccttccttcactcatcagacacccatctccatgcctggcctggtgccacgttgccctcaaggttcttctagggcctttctcaagtgcccaacagccccagggtacccacatcatacccaaagccaactgtctgtaccagtgtccctggctttggcgtccttgggcccagtcctctcacaaccctgatacattgccctgggagccttcgcccacctgacttctttttctttgagacagagtctcactctgtcgcccaggctggagtgcagtggcgcgatcttggctcactgcaacctcttgggttcaagcaattctc

SEQ ID NO: 8947 - DNA, 1074 bp, Homo sapiens
atagttcccttgccctcccctcttgctccctaaccattggagagcggataagtaattccaaccctgcctgcaatcttacgccccttagtgctttgatttgattcttttcatcatagtaaagcacacaagctactgcccccccccttttttttttttttttttttttttggtgttattctcaaaagaagatactgaggctcctaggcagagctgtcaccagaggctgcatgccaattggtgacgaggagcctccggcgggcctagtccagacttcccgggtcagccttagaagccacagtgtttgcctcctactcagcactgttagggatccaccccggagatgcagtttctgggttgatctagggaagggcccagggctgaggatcctgaatgaagtagttgttcagtcgtctcaatgaggctgctccaaactggcgccccggcagcattctcattgacgcgccatggttttcaaatctccccagagccctgtgtgctgggaaaacccagccctagaaaactgaaaacaacaaaatgttcctgggttatttataaacaaaacccagaccctgtcgttatgtatggccacttgactttctccaaagatcttaaaggactgaaagaagggatctctgtcaccctggtgaggcccacgtgaccagcaattagtttcccccaatttcatggagttggcacccagcttccaggcagcttccttatcttgtcatgccccacaccgaaaatgtcctaatttttttttcttttgtgttttctgagtagggcagtttgtttggtgggaaagttgtataaaatgtgaatgcaccctttcacttttggtttctccgctgtttcactttctgcctgtctgcctgagcccatggcagattgatggagggttcaagtatttttcttttatctcagaaactgtgccatcccccactcccagtgttttattcttcagttaataaatccattccctgcaaacccagggccttgaggtaccccctagctctcctcagaaacgccctcatccagcagaaaggggcctcacctcccctctaagtggtctgcttg

SEQ ID NO: 8948 - DNA, 1047 bp, Homo sapiens
actgcactccagcctgggcaacagagtgagactccgtctcaaaaaaaaaaaagaaggacacttgcaaagatagtacagaggtcagaggtcccccatataccctttaccttgcttccccatcttacctaaccgtggcctgtccaaactaataaatcaacactggtgaattactattatcttaattacagattttatttgaatttcacgtttttccactaatatactttttgtgttccaatgtttgattcaggctacaaaattgcatttagttgaaaatgaggacacttgtgagagtgaaaggggggattctgcaggcagagtggggactgtcctgggcacaccgcacacatctcctatgtgggtggagcaggtcagatgagatcagggccgtcaaatgctggtcaaggcaggtcaaggcccaagggttagacccgtccacccacatctctcccaatcacagacacatatgtggaaacaactagaatcagaggtggacagtgaggcctgtcgggagtggaacggttaaagggctgtgtgaacccagaagagggagagttcacatcctctgtgcatgtctggtcatcagattggagcagtctagaaccacggagagctcagggatcatcttatgcaacacccctccctgttcatggaagaggaagctggagcatggggacagcggtgtcccctgggtggtggttggctggaaccagaaccctggcccagggctgctccattcatgtgggccagccttgatggctacgtccacaaactcactcctgggcctctcccaccaccacggggcctcaccttgatcttccaggtcgatccttcaccccagatgctctgggccattagaggaggggtcaggctgtcctctgagtccccaccccacccctctatcttttctcccccagcgcctggccggagcaaccctcctcatctttgctaataagcaggacctgcctggagcactgtcctctaacgccatccgcgaggtgagtccaggccccgggacaggctcgctgagggaaaggggcatacatt

SEQ ID NO: 8949 - DNA, 1027 bp, Homo sapiens
cttctctccagccgcgggggccaccagggactggggcctgacctgattttcccctcatccccccaggagccgggctgggtctcggaagcggccgctgaccctgctccagcgggcggggctgctgctactcttgggactgctgggcttcctggccctccttgccctcatgtctcgcctaggccgggccgcagctgacagcgatcccaacctggacccactcatgaaccctcacatccgcgtgggcccctcctgagcccccttgcttgtggctaggccagcctaggatgtgggttctgtggaggagaggcggggtaatggggaggctgagggcacctcttcactgcccctctccctcaagcctaagacactaagaccccagacccaaagccaagtccaccagagtggctgcaggccaggcctggagtccccgtgggtcaagcatttgtcttgacttgctttcctcccgggtctccagcctccgacccctcgccccatgaaggagctggcaggtggaaataaacaacaactttattaaaacacccgaggcagccttttgcttccccctccttagccctgttccgactccccaggcctcagtggtgctcctcccggtactcgatggccagaaactccaaggacaggcggttgaagaacatggctccgttgagcactgggcgggggacagagccccccatgagccccagtacccttccctggctactccttgccacatctcagggttccaaagctccccgctccctcttgcaccctcccactcctgccactcactcaggatggtcagggcggagaagcagacgtacttgttttctgtcatctcagcatagagtgaccccatggcagcccagcagatgctgatcacctgggagaactgtaggcccatccagtgggagagtggccccctcgcacaacagtggggtttccatcagcccctcgggtctcccacagccagcccttgcgtccctgccctgagcctaccatcaggacgaccgtgtagtgaaagctcatg

SEQ ID NO: 8950 - DNA, 1041 bp, Homo sapiens
agagaagacagcccatgttccggaaagcatgtgaaaggctttgggaggtctggaaaggagatgagggtcaacaagaatgtattgcctcatccaggcagtgcgctggacacgcagatgcgcttgggagccagcggtccctgccttggctgcttgtggtctgatggagcagttgaggcacagtggtggcagctggctaagcacctgcggcctgcttcggatctggactaattctgagggccggctctcctgggcaccagggttagggggttacggggagtatgtgagtaacgcctgctttgggaacataaaccccctcccccgcccccatgtgcgctgtgacccacgccctcgcagtcctttctctggaatcatccatgcgcccctggagcaagctggggcgtctgtgaaggggtgggtgagaaggagctgaggttgcgcccgccctgcagtcacctgctctccccttttccccgcccctgccctcctagacaccatccggaagatgaagaacgatttccggaagatggaggatgagatggaccggctggccaccaacatggcagtgatcaccgacttcagcgctcgcatcagcgccacgctgcaggaccgccacgagcgcatcaccaagctggcaggtgggcgctgccgggcagggcctgcagtgggcctttcctggggctctggggctaacgtcaccctccgtcccccaggggtccacgcgctgctgcggaagctgcagttcctctttgagctgccctcgcgcctcaccaagtgcgtggaactgggcgcctatgggcaggcggtgcgctaccagggccgcgcgcaggccgtgctgcagcagtaccaacacctgccctcgttccgcgccatccaggacgactgccaggtcatcacggcccgcctggcccagcagctgcggcagcgctttaggtgtggcccctctgccctgaccccagcgctcccgccagccccgagccccatctgtgcccggctcctgggccctcctggagctgtccccctgccctgtgtgtgctttgcttt

SEQ ID NO: 8951 - DNA, 1051 bp, Homo sapiens
actctcttttctacttcttgggaggggtgagtgagagaaagtgggacaaggccacttttctgcagtgttagttactccagaaaaggtccaccatgtggaaacagatataatgagaaataatccttagtttgtgttaatcaaacccagtcagttatccaaccagtcaattcctcaatccaagcagcatgaaactgcactcctagttaggtttgtggattataaatgctcataaattccttatcccgtccctcatggaaaggtggggtttacttctccacccccttaattctggacttggcctatgacttgctttgaaccagtagaatatggtggaaatgaagctgtgcccaattctgggcttaccctttaaaacagaactggcagcttctgttttcttctcttggaattcagccaccatgctgtgaggaagcccaagcagtcctgtggggaggcccatgtagaggagaatcaaagctccattctcagccttttgggtaagatcaagtgtagtatctgttcttatcagtttaatatctgatatgtcctctattcgaggacacaatctatattaaatagatttttggaactaagagatggaataggagcttgccccacccactccacacatttacctagcattgcagtacctccaggaacagtgtacccctaaagggagataaagtttaaaaatgaaaaaaatagggaataaaaagctctagccctaccatccaattggctgggggaatttaaataaataaataaataaataaataaataaataaataaatagctctagccagcatcaacttgccagccattggagtgcaccatctttgaagggtcctccagctccaaggatggagctggaggcacaagaagagctgtctcaaccaggccttgcccaaattgcataatggtaagaaaataaatgattggtattgtcataagcctctaggtttgagagtggcttgtttcacagccctaatctaatttgactccctgttcttggccccagacccagggcctgccacagaataagaactcagggagt

SEQ ID NO: 8952 - DNA, 1049 bp, Homo sapiens
ggatccatcgcctcaaacatttatcttttctttgtgttggagacattacaattcttctagctattttgaaatatacagtaaactactgttaactataatttcccctgccttactgtcaaatactagaacttattccttctatttaactgccttttctagtttcttaaggtggaaggttaggttattgatttgatagctctctcttttaatatatgtacatttttcatggccatgctatgtaatttctcattaccattatcatctctttccgataaactagttattttagaagaatgttttttaaaacataaaaaaatttctaacttaattttctcatagtaaaaaaatgtgacctacataagatcatagctttgaagtgaacagaagctggtgctatggctcagtgtatgatgaattttcataaaggttccttcgttcttgaaaagactggctaacaaattgtgactgtaggtgaagcactcctaagtattttaaatatgataattagcttaactcacactgagcctatgaggcaggaactattattatccttatcttagggataataaagaaactgaggcacagaaagatttaagcaacttgatgaagtcactgatctatgaagtggcaaaactgggatttgaacccaggcagagggatcctgaagtctgttctctcagccagtacgctattctctgagtactagggggattgttctataattgtccattatatcaaacttattgttttgtctgcttaatctatcaattactgaaagaaagaaagaaagatgataaaaatcttataacatcctaatggctttgccaatttctctctgtatttctatcaattatttttcattatatattttgagctatgatatttggtacatcacatttagaattcttataagcgcctagtgaattaaacattttttaaaatctagtgaccaccttcatctctaataattatttttactttcaagtctatttcagccaatgtttctatagctaattcagggtttttttttgttgaatttttaaaatata

SEQ ID NO: 8953 - DNA, 1949 bp, Homo sapiens
gtgggctagtattttaattctaaagtttttttttcctgccataatttaaacatcatcatgatttgagatagcccatgttatttggattacccacaaataaaagtatttttgttcagcattctcagacctttcatctgagatcattttccatccacccgaaacatatccttttgtatttcctttgttttgttttctttttgagcaggcttgatctcctggtctcaggtgagcctcccacctcagtgtctcaagtagctaggactacaggcacatgccaccatgcccagataattttttttgggagggttggggggcagttgacggagtcgcgctctgtcgcccaggctggagtgcagtggcgcgatctccactcaccgcaacctctgcctcccaagttcaagcgattcttcttcctcagcctcccaagtagctgggattctaggtgtgcaccaccacatccagctaatttttgtatttttagtagagatggggtttcaccatgttgaccaggctagtctcgaacacctggcctcaagtgatccaccctcctcagcctcccaaagtgctgagattacaggcatgaagtaccacacctggccctttttgtatttgtatttttattttttagcaagggtctgttggttataaactttctcagtgtttgtctaaaatgcctttatagtgtgcttattcttgacagttctctggatatagaattctggcttgacattattttcagcctctcaaagacactattagtcctgttctgcttccatcattgctatgtgagccaggagtctgtctaccttgccttctggaaaaaatcttaattttttttttctttcatactatacgattcaccatgatgtgtggaggtatggatttcttttcattctgccttgaatgtattgaacttcctggctatgaattgatacctttcaacaattctagaaaatttgtagtcatgatctttgagaatatcacctccttcccactctctgtatattctaataaaatctaaactggaccttctcactcaatcctctctttctcttaaccttgcttttagatttcccatctcttagtgtctctggattgcattctgggttgttccttcagctcctttctcagttcactaattttcttttttgctctgtcaaatctgttagttatttcttccaagaacttaatttcaattttaaaaattttgtttctagaagatgtaatggatcttttcaaatctgttcatttttgctcaaattttcaaacttttcatctatttctttaaacatagtaagcatagtcttatattctgtgtctgataaggtcaatatctgaagtcttagtggtcagtttttgtccactgtggctgctgctcagttatcacgccttgtttgcttgtgagatctctgccccgtgagagagttctttgagtcctcagataaagttaaattgctccggggtgtttctgctagtcacctggaatgccaccaatccagaacacctttttcgttcttttttatttatttacttattttttgagacacagtcttgctccggctggagtgcaatggcataacctcagctcacttcagcctcgacctcccaggctcaaggaatccttccacctcagccttcccagtagctgggactacaggcacacaccaccatgcccagctaatttttgtagagatggggttttaccacctcgcccaggctagttttgagctccaggactcatgcgatctgtctgcttcagcctcccaaagtgctaggattacaggcgtgagtctgagtcaccatacccagctttgttctttttttttggagatggactctcactctgtcgcccaggctggagtgcaatggtgtgatctcggctcactgcaacctctgctccccaggtttaagcaattctctgcctcagcctcctgagtagctgggattac

SEQ ID NO: 8954 - DNA, 1043 bp, Homo sapiens
atccagctgcctcagcctcccaaagtgctgggattacaggtgtgagccactgcacctggccatatattacgatttaaatatactattaaatatacaatttaaatatactatttaaagtatattcacagagttgtgcaaccatcaccacatcaattttagaacatttcattatcccaaaaacaaatgaggtactccttagccatgactccccagccctcccagcagccctggcaaccacaaatctacttcttatctctatggatttgcctactgggatatttcatgtgaacaggatcatataatacatggtcctttgtggctggcctttttcatttagcataatgtttgcaaggttcctccatgttgtagcatggatcagaatgttgttcctctttgttgccaaataatatcccattgtttggctccatattttgtatattcactcttcagttgatggataattgggtagtttcatccactcagctgttataaataatgcagccattaacattctctctttttttttttaaatggaatcttgctctcttgcccaggctggagtgcagtggcacgatctcggctcactgctacctctgcctctgggttcaagcgattctcctacctcagcctcctgagtagctgggattacaggcatgtgccaccacgcccagctagttttgtgggttgtttgtttttgaaactgaatcttactctgtcgcccaggctggagtgctgtggcacgatctcagctcactgcaacctccgcctcccaggtttaagcgattctcctgcctcagcctcccaagtagctgggactacaggcatgggccaccatgcccagctaatttttgtatttttagtagaggtggagtttcaccatattgtccaggctggtctcaaaactcctgacctcaagtgatccgtctgcctgggcctcccaaagcgctgggattacaggtgtgagccaccgcgccctgccacactcttatgaacaaggctttgcatggacacgttttcatttctcttgggtatagagcttggag

SEQ ID NO: 8955 - DNA, 1043 bp, Homo sapiens
actttaggcacctgttttgctcccacttgttgctgggtattttatgacaattgagtagtgacctcccattacctgggtttctttgccctctgagcagtatagaaaaatggcaggtcccatcagatccagggagcaagacagaggcacatccttcccctgccctctcgctcctccccactgtcctcccatcacacacctgcaccacccccaacctggtgccctcccctttccttaccaaggtgatgcctggcgcaagaccttacttgagcttttcccctgtttttagggtgtgccacttccattttatcagcccactgaagaggatgcaggtgagtttcggttcaaatattgttttgccaacaatgaggatggtagacatgagtccaggagtgcagtttcccaagcccaagaaagctgcagaagctgctgaagagcaatgtgaccaagcagtgagggcgccaccatcatgagttcgtaggttttttgtcacaagacccctggtctgagcccagtgagcgttggtcgtgctgtcgcctgagttctgcctacatgaagcatgttgtttaaagactaatgtttaacaggtatttttgaaggttgccttggaaaggaaaagatgtacgatttcaaaaagaatttatttacatgcagcatgggcagatgcggtggctcacacctgtattcccaacactttgggaggccaaggtgggaggatcacctgaggccaggagttggaaactagcctgggcaacatagggagaccctgtctctactaaaaattaaaaaaaatattagctgggcttgtggtgcatgcctgtagtcctagctaatcagaggctgagacaggaggattgcctaagcccaggagttcaaggttgcagtgagctatggtaacaccattttactccagcctgtgtgacagagcgagactctgactcttaaaaaaaattaaaattaattaattttttgaaagtataatgtggcatcctggattggatccttgaagagaacgggaacatcagtggaacaactagcaacatctg

SEQ ID NO: 8956 - DNA, 1046 bp, Homo sapiens
aaatacaaaaattagccagatgtggtggtgggtgcttgtagtctcagctactcgggaggctgaggcagaattgcttgaacccaggaggtagaggttgcaatgagccgagatcgcaccactgcactccagcctgggcgacacagcaagactccatctcagaaaaagaaaaagagccagtgagaaagcacctcagagaaagcgagcagagcccgcggttctcgtcctgtttgcgggagcagctggaggaccctcccgctgtgacgtacgaggttgtgcaatgctgagcatagttgggatgtttttctgatccctccttctataggcgctttctaaccatgagcaggaaggctatttcctccttaactattgcccttccaaagcctacactgaaacagggcaattttgtcccttgagagcagccagctgcacctcagtcctttgtgtttatcacagatgtcaagcccttgagatgtggagcacagattgtcccattcaagttaccctgtggcctgtttaccagaccctggcacccaaatggtggactggatcaccctagtgagcttctcagtgtcaaagggacaataatgaatatgcaaacacctttggtctcaggattctgattttctgttatagacatctcagttcacactctgagaggacaccacaaacagtgataagggtgacagctgtcaccagcacctttatcacatgtgaaagtgtatgtatgcctgagaagtccacatgttttaagcaagagacagagatggaagtgagagctattggtggattttaaacatgcccgcaaagtaataccttatgcctatttgatttataaacggcccctctgccaaggtcatcttaagggaaccaaggaaacggggctttcttcctcttttgtgtggctgggaaaaataaatagttggcccccagagttacaactttcttcttcacttgtatgttgtaaccctagagattctcctgctccatcaaaggaaacatctgctgtcatctgtgcttttactgttgctgttaaatatttctttcat

SEQ ID NO: 8957 - DNA, 1088 bp, Homo sapiens
ggctcaagtgatcctcttgcatccgcctcctgagtagctgggaccacaggtgtgcgccaccacacccagctaatttttgagtttttgatagagacagtttcgccacgttgcccaggccagttcaagcaatcctcctgcctgagcctcccaaattgttgggactacaggcatgaaccaccacacccagctgtgtttgaaattttttaccatgtgtctggattactttaaaagaaggtgggggccaggcgcggtggctgacgcctgtaatcccagcactttgggaggccgaggcgggtggatcatgaggtcaggagatcaagaccatcctggctaacacggtgaaaccccgtctctactaaaaacacaaaaaattggccgggcatggtggcaggcacctgtagtcccagctactcaggaggctgagtcaggagaatggcgtgaacccgggaggtggagcttgcagtaagcggagatcgcaccactgcactccagcctgggcaacggagtgagactctgtctccaaaaaaaaaaaaaaaaaaaccgaagaaggtggggatgggcacagtggctcatgcttataatcccagcaatttgggaggctgaggcaggaagatcacttgagcccaggcagtggagattgcagtgagctgacattgtgccactgcgctccagcctgggcgatagagcaagactcagtctcaaaaaaaaagagggggtagagtggtgggaatagacatatacaaatgtttatatgtcgatccagctttctgtaagcactccacaccccacagctgttgtagcatccacctccttgggaggcaggctctcagaatccctgctccctgagggcagggagtgtcatgttcactgttgtctcactggtccctagacagtgcttggcacatagtaggcccacaaagaaactcctgcagaagcagtgccctcctatgacatgcctctccaccttccagaagcaggcagcttggaaagaaaagaggtgggaggcccacctgcagggacagcacaacacctgctaagggccctgcaggttgggggtctctcctcggcagcgggatgcagaaatgaat

SEQ ID NO: 8958 - DNA, 1047 bp, Homo sapiens
aggtgggttgaaaacagtccccagagtgcagatagcatttctagtcctggttggaaggctcagggaggaaagcaggagcttggaccaggtttgcgggctctgctgctctctatccctacccgagggacccctaatcacccaccccccacagaacttcttcaaagagctccggggttggtccccagctgtgtgtggccttgggtgagaggctttgtttctccatcttccatccctgtaactctgttttgtccccagctctgaatggagtgcctgacccttccctgaccgctaccccccaatggaggactctcagcagatgggcaggggatgagggcttggcctgagcctcattcccgcaggcttaggtggcttcatcattacagccattccgatcaagcagcacagccagctggccaggccccaaagctcttgtctaatgtgtccgtgaaacaatgccacctgaggggctgcgtattcccatgaacaaaatacatgcatgtccatcccttatctggtttgggacttgcctgacctgatgctactaccccatattataggcaaggagactctggaagggaaggtcctttgcctgtggccacagagcaaagcagcagcagagacagctcagaatctgactgatggctcagaggccggggctcaaggcactcagctgcccctcctctctgagagctgtgtcctggggatgggcaggaatgatgcctgtggggttagaagcctgagagaaggaggggccagagcccacatgccttgccacttctaggctcagcaaatcactgtcggtgccctgagctttagttcccatctgtaaaatggggatcgtgattcaggctctggccacgtcactaggcacccccaggaggatgtaaagaattcaggaacatgaagcaatgggtaaagggcacagggcggcctggcaaagtcccatggcaagaatggggagaggcacaccctttactcacccctaccacagcttggcccagggccatcattgccacttactcaatggtccaggcctgttttcctcca

SEQ ID NO: 8959 - DNA, 1024 bp, Homo sapiens
attcagatgtttggcaagaggtggctgagcactggggtgggcttggcactgtgccaagcctggggccaatccctgcccagtcagctggggtctggtgggggacacccaagaataaaagaataaccacaaagtgtgcaagggaccaacagcttctccagcttaagagcaccgagggagcatgcaggagggatgcttggagctgggagggtctaacagtgctgcttcaagattcattccatccacggctgtttactgagcatctccagtatacaaggcacggctccgggtgctggggatacaaggcagacgccatccctgctctctaagagtttaaattctagttggaagggggatattaaattggtaaacaaataagagatgatttccagcagtggtaaaggctacgaagaaaacaacgtgatcaggaatgcctagcagggaggtcagggagtgtcagggctcattaatgtgatcagatgtgattctgagccaaatcggagctaccagccagataactcatatgtaagcacaggcactgaggaaccagagtgaagacagagcagacaccacacagcaaaagagcgtggacctccgagttgcacctggcctgagactcagtttccccatctctaaaatggagcaggccaggcatggtggctcacacctgtaaccccagcactttgggaggccaaggtgggtggatcatgaggtcaggagatcgagaccatcctggccaacatggtgaaaccccgtctctactaaaaatacaaaaattagctgggcatggtggcacgtgcctgtaatcctagctactagggaggctgaggcaggagaatcacttgaacccggaagctggaggttgcggtgagccgagattgcgctactccactccagccttggtgacagagtgagactctatctcaaaaaaaaaaaaaaaaaaaaaagagccactgatagctacctcacagggttattgagaaaactagggataacatttatactagccacagggaagggttttttg

SEQ ID NO: 8960 - DNA, 1031 bp, Homo sapiens
tttcttttttttttttttttttgagacagtgtcttgttctgttgcccatgttggagtggagtggcatgatctcagctcactgcaacctctgcttccccgggctcaggtaatctggtaatcctcccacctcagcctcctgagtacctgggactacaggcatgccaccacacccggctaatttttgtatttttagtagagacggggttttgccatggtgcccaggctggtctcgaactcctgggctcaagtgatccacccacctcagcttcccaaagtgctgggattacaggtgtgaaccactgcatctagcctgaagaaaatccccttaaaaatataaaaactggctgtgcactgtggctcgcatctgtaatcccagcactttgggatctcttgagcccaggggttcaagaccagcctgggcagcatggcaaaaccccatctttactaaaaatagagaaattagctgggcgtggtgctgtgcgcttgtaatctcagctactatagaggctgaggcaagagaattgcttgaatctgggaggcagaggttagagtaagctgagatcacactgctgtactccagcctgagcaacagagcggaaactcttgtctcagaaaaaaaaaaaataaagggagttaaaaaaaaaatgcatgagactgtatgtggctcacacaccctaaaatatttaacactctggctctttacagaaaactttgccaaccgtattgacctttgggttagaaaggacttacatttttgagtcacctgtttctgaagagctgataaaagccctagaataatgtccaaatgcgcataggtataattttgcttatcatttcaaggcattaaggactaattttattcaaaaaaaattagaagaattcagccatagtcaatattaataaacaaggaatgacccaattgtttttcatataagggacaattattttgtgttttttagtgaaactacacaagtcttaaaactgaggtgcttgacaaacttctgtcttcccaggccctcttcctactccca

SEQ ID NO: 8961 - DNA, 23557 bp, Homo sapiens
cctccgccgccgcctggaattttccagatgtcctgccggcccttctttcgggcctcggctgggcgtggtgacctcaagcgaccccggcggctcccgtcgcccactcaagagggcgcccccgcccgccacgcccccagcccctctcggggaagcgcgtcccccgcccgacctcaacaacatccgggaagaaaaggggtcttcttcctcatggcattcgcctcccaaatgtcaccttgagcgctgtccgcgatcccaaaaagcactgttaaagagaagcggggatacactggggtccttgcgtgggggccgcctgggagaccatgcaccgcccgggagtctctccgggcagggtcggggagggacttttttgccggtggccgtggaggaatcgtcccgttgagcaatgaccccggtgacgcggctgagggctataaaagcaaaagttgtggcaagtccagccggagttagcgacagggagggatgcgcgcctgggtgtagttgtgggggaggaagtggctagctcagggcttcaggggacagacagggagagatgactgagttagatgagacgagggggcgggctgggggtgcgagaaggaagcttggcaaggagactaggtctagggggaccacagtggggcaggctgcatggaaaatatccgcagggtcccccaggcagaacagccacgctccaggccaggctgtccctactgcctggtggagggggaacttgacctctgggagggcgccgctcttgcatagctgagcgagcccgggtgcgctggtctgtgtggaaggaggaaggcagggagaggtagaaggggtggaggagtcaggaggaataggccgcagcagccctggaaatgatcaggaaggcaggcagtgggtgcagggctgcaggagggccgggagggctaatcttcaacttgtccatgccagcagcccctttttttccagaccaagggctgtgaacccgcctggggatgaggcctggtcttgtggaactgaacttagctcgacggggctgaccgctctggcccagggtggtatgtaattttcgctcggcctgggacggggcccaggccgggcccagcctggtggagcgtccaggtctgggtgcgaagccaggcccctgggcggaggtgaggggtggtctgaggagtgatgtggagttaaggcgccatcctcaccggtgactggtgcggcacctagcatgtttgacaggcggggactgcgaggcacgctgctcgggtgttggggacaacattgaccaacgctttattttccaggtggcagtgctccttttggacttttctctaggtttggcgctaaactcttcttgtgagctcactccaccccttcttcctccctttaacttatccattcacttaaaacattacctggtcatctggtaagcccgggacagtaagccgagtggctgttggagtcggtattgttggtaatggtggaggaagagaggccttcccgctgaggctggggtggggcggatcggtgttgcttgcctgcagagagggtggggagtgaatgtgcacccttgggtgggcctgcagccatccagctgaaagttacaaaaatgcttcatggaccgtggtttgttactatagtgttcctcatggcgagcagatggaaccgggagacatggagtccctggccagtgtgagtcctagcattgcaggaggggagaccctggaggagagagcccgcctcaattgatgcctgcagattgaatttccagaggcttaggaggaggaagttctccaatgttctgtttccaggccttgctcaggaagccctgtattcaggaggctaccatttaaagtttgcagatgagcttatggggggcaatcttaaaaagtccacagcagatgcatccggctcgaggggccatcagctttgaataaatgcttgttccagagcccatgaatgccagcaggcacccctcctttcctggggtaaaggttttcagatgctgcatcttctaaattgagcctccggtcatactagttttgtgcttggaaccttgcttcaagaagatccctaagctgtagaacattttaacgttgatgccacaacgcagattgatgccttgtagatggagcttgcagatggagccccgtgacctctcacctacccacctgtttgcctgccttcttgtgcgtttctcggagaagttcttagcctgatgaaataacttggggcgttgaagagctgtttaattttaaatgccttagactggggatatattagaggaagcagattgtcaaattaagggtgtcattgtgttgtgctaaacgctgggagggtacaagttggtcattcctaaatctgtgtgtgagaaatggcaggtctagtttgggcattgtgattgcattgcagattactaggagaagggaatggtgggtacaccggtagtgctcttttgttcttgcttcgtttttttaaacttgaactttacttcgttagatttcataatactttcttggcattctagtaagaggaccctgaggtgggagttgtgggggacggggagaaggggacagcttggcaccggtcccgtgggcgttgcagtgtgggggatgggggtatgcagcttggcactggtactgggagggatgagggtgaagaaggggagagggttggttagagatacagtgtgggtggtgggggtggtaggaaatgcaggttgaagggaattctctggggctttggggaatttagtgcgtgggtgagccaagaaaatactaattaataatagtaagttgttagtgttggttaagttgttgcttggaagtgagaagttgcttagaaactttccaaagtgcttagaactttaagtgcaaacagacaaactaacaaacaaaaattgttttgctttgctacaaggtggggaagactgaagaagtgttaactgaaaacaggtgacacagagtcaccagttttccgagaaccaaagggaggggtgtgtgatgccatctcacaggcaggggaaatgtctttaccagcttcctcctggtggccaagacagcctgtttcagagggttgttttgtttggggtgtgggtgttatcaagtgaattagtcacttgaaagatgggcgtcagacttgcatacgcagcagatcagcatccttcgctgccccttagcaacttaggtggttgatttgaaactgtgaaggtgtgattttttcaggagctggaagtcttagaaaagccttgtaaatgcctatattgtgggcttttaacgtatttaagggaccacttaagacgagattagatgggctcttctggatttgttcctcatttgtcacaggtgtcttgtgattgaaaatcatgagcgaagtgaaattgcattgaatttcaagggaatttagtatgtaaatcgtgccttagaaacacatctgttgtcttttctgtgtttggtcgatattaataatggcaaaatttttgcctatctagtatcttcaaattgtagtctttgtaacaaccaaataaccttttgtggtcactgtaaaattaatatttggtagacagaatccatgtacctttgctaaggttagaatgaataatttattgtatttttaatttgaatgtttgtgctttttaaatgagccaagactagaggggaaactatcacctaaaatcagtttggaaaacaagacctaaaaagggaaggggatggggattgtggggagagagtgggcgaggtgcctttactacatgtgtgatctgaaaaccctgcttggttctgagctgcgtctattgaattggtaaagtaataccaatggctttttatcatttccttcttccctttaagtttcacttgaaattttaaaaatcatggttatttttatcgttgggatctttctgtcttctgggttccattttttaaatgtttaaaaatatgttgacatggtagttcagttcttaaccaatgacttggggatgatgcaaacaattactgtcgttgggatttagagtgtattagtcacgcatgtatggggaagtagtctcgggtatgctgttgtgaaattgaaactgtaaaagtagatggttgaaagtactggtatgttgctctgtatggtaagaactaattctgttacgtcatgtacataattactaatcacttttcttcccctttacagcacaaataaagtttgagttctaaactcattagaattgttgtattgctatgttacatttctcgacccctatcacattgccttcataacgactttggatgtatcttcatattgtagatttaggtctagatttgctagctccaagtaattaaggccatgtaggagagcatggtaaccacagatagaactggtattatcccaagtggtctgcagactgctgagtggggatgggatctgctctctgttgagagttggtaatcattggtttgaaatgtgatgaaaccactcaagccaatgaaggtgggtgtgtaggtggggagtactttgccataatattttaaaacattacctggttagagttctaagtggtacttatttttgtttggttaggggaaagcctgaataaaaacagaaatggacacataatatgcatattccatagtctttgggaggctggaatgtgcctgggatttgggtctaagtgtatgcgtaattcttacctcactaaagaatttgccttgtttttttccttttggtgagtgactaaaacgtctgggcttccctgtgtgcgtgctacagtaagcaagcagaggctgtgcaaaggtgtgagcaggatcacgtggaatctggaggatacatcttggcttgcaaactgcctctgtctcctgggtgggactgttctgtccttgcactgctgttctgtgttacctcttggggtgtaaggttttgcttacaggagacaaactttgggcgtagaatggaagccactgccagcctctgtgctgagaaggaaggtgcttgtttcaaagggagcagcaagggaggcttgttctactcacctgggcctgtttgcctgagaaggggagataagggctgaactgggactagccagggggaccaacacaaatggtgggggatcatgacctgaaggattctttccttcccatgagctgcagggctggttgccgtccttgcaactgtgtcttatttgcctgtgccgttatatcttggtgacccctccacgtgtacactactgacaaacgggtggagtgctggggagaagtcactgtgccgcccacctagtaaaccttctgtctgtgctcatggcatctccaagatggggcactgctgtgtgcagaatccagggtcctctttctgcttgcaactcctttccctggatgccccagaaacaatccaggcctcctttcctatcttacccctttgctttgctttttaccccagcacctctataaccgccttctcttcttttcagaactccttgtttctcgtcctgttttttatgattacaaaactcttgcttccaccctggaagataactgctatagatgcctgtatgtaaatggtgctgtctccagcaactggcatgctgaagaagaattgattcacggggtataaatgttggggattggaagtggggatgaaatggcacttgttgatacaggagcagagaggtgaggccgactgctgaagacagctcgccaccctccttgcctccactccaatccaggggctggggccacattctttgccttcatttatcctcagatcaggtgagatcgacaggaggtgttgatggcagtgccagcaattattgctaatccgtttgcatccttatgcatagatctgaattcagactttgtgaatttccagaggtgtgggtaatataatagaattcagtgagtgggcatggctgatcttgtgcaaattaaaagttatggggcataagaatagcaaaagttgaacttcttttaaaaaggaaagtaccctgagagccagtattggttgaggctcttcagtatgcccaggttggcagcactgagaaccgcaggaacggcctgttgttacaaaaaggagattgactcagctgcccttggtgcatctgactgactatgactgctgagagattccaaggacccttaatgccagggctaacctctccatgtgcagtgagacctctggaggaagtgtcatcctctggctttgtgtggtactcattatggtgcagtgcgggcatgaaatgaagacacccaaataggcttacagatacgatatgttttaaatgttcgtatttaacaaaaacatactgacactgtttggaaatggcaacaggaagatagcaaaatgaatactaacattacgaaaagatgaacaggtacatgttccaaggcaggtggctgtgaacttcctctgagtgaaggcatcccctccagcacctttcagcctgctagttaggacgacccgccgccaccctccaggacctccagccctgcactgcctttcctctcttttaaataattcttcattgagttctaatatgtaaaaaaaaaaagtttactgtaaagtttgcaaataaggaaattttttttaaaagtcctcagtaatcttaccagtaacaattgttatgggcacatttgcttttggaagatttcttttgtatgcatgggataagtacatttttaaacaaaaatgggattatgccataaattctattttgtgactttaatatatagtgaacaccttttttaatgatgacaggatgttcccttgcatggctgtatcaatttaaacaatcttgtttcaatgggcatacagggtattttctagtttttttttcctcttagaaaataatacttgcgatgactttccttgtagctcagactttttcacgtctgttgttatctctttgggaatgctgaatacatacatttcgagaaggaaatgactgttaaactcttaagacttcaggttcatattgctaaactgcccagcagggagggattttttcaattagtgttctcactggtgaggcaaacctgatgccttcccctcttcctcagaaccggctttatcacattgaaaacctttgctcctccgacggatcgagtctgctttccctctggatgtgagcattgctttgtctgctggtgactgaacatctctaccttgtgtcaattggccatttgtggtgtgtgtgtgtgtgcgtgtgtgtgtgtgtgtgtgtgtatgattttctaattcctagtcatttttctattgattgttttgcaaaagccatttacatcttaaggatattgataatcttttgttatatttgatgcaaatatttttttccagtttataggttgccttttaattttgtgtttcaggtagataaaagttaaacgattttcttaggttagtttatcactgtggtttctgaacttgttatgtgtagatcttttccaccccaagagtacataaatattaatccatactttcttatggaacttgtatggtttcgttttttacatttaaaccttcttccccgtggtgtgtgttgtggaatctgtgtttgtgtgaggaggggcatggtgctctcagaacccacctcctgtggccagagagccctgtcctgtgagggtggttgtcacagtggcagggttcaattcagaagaccttgagggcaggctgatgtttcctgaatgggcccctggttgttgcttgtccctgactctccatttccccatctgagtggatttggacctaatagggcactggagctggttcgaatcctgactggactacttggcaactttatgtctgggagcaagttacttaacctccccaagcctgtgtctgtgaaatgcgggtaaatgaatgtagatgtttggcagcagctactccttgttgagctctcacagtgaactctcctgcctctgccctccttccccgcctcccctggtgcctagcgtcaggtctagccacttcctcctgggcccctctcccttttctgtggctggctgcctgcccgcctggcgctggacctttcatgtaacgggaatcagcatgtatattctggtctggtctgtttctacacttaattttgtttccagtagtatttccctgtaccggcagagttcacaaacacatttgaagaggctttttctcaggattcttaaccttcccaaaggaagtcccatggatgggtttctagaagtctataaatgctctgaaattgtatttttctgtggaaagcataactttcatctgcttgttcgtgctcaaaaaagatcatgaatgaatgattgcatgattttatgccattgtgcttatactaaaggatatgtagcccatctcttgagctgttaaactgttttgactactttaaatcgtgcagctgtgagcatctctgtaaatttagtgtacacatgtatcccctggagtggcattgcctcggcagtgagcacttatggttttataactctcttcacagactcaaatgactccagaaagctacacttcctgttgtgagtatatgatatccatttccctacatagccactaacatcaggtttttacaattttatttatttcttgctactttaagaaatttttgtggtgaaatacatataatagaagttgactatctgaatcatttttaagtatacattcagtagtgttaagtatgtcgccattgttgtacaaccaatctccagaactttttcatcttgcaaaacaaactctgtacccattaaataacattaaacattccattccctccagcctcagcaaccccattctactttctgtttctgtgagtttgactattccaagcacttcatatcagttaaatcatgaagtatttgtctgtctgtgactggcttatttctctgagcacagtgtcctcgagatgcgtctatgttgtagcatatgtcagaatttccttcctttttaaaagatccaaataatattcttattttatatcttttttttatccattcatccattagtggacacttgggttgcttttggctattgtaaataatggtgctatgtacaaatatctatattattgtatttacaagtataatgctgtaatgtacacacatctttttgagatcctaccttcagttcttttgagtatatagccagaagtggtattactaaatcttacgatatttctatttttaatttattgaggaaccactgtagtttttcatagcaactgcaccattttacgttctcaccaagagtgcacaagggttccgaggttcccacatcctccccaacacttgttattttctgctttttttagattgcagccatcatagtgggtgtgaggtgacatttcattgtggttttgatttgcatttccctaatgaggagtgatgctgagcatcttttcatatgcttactggtcatttgtatgttgtctttggaaaaatgtctattcaagtcctttgactattttaaaaattgggttattagagttatcgttgttgttgacttgtaggagtttctttctatattctggatattaatcccctatcagatatatgatttgcaaatatcttctcttattccataaggttactttttcactttgttgattgtgttctttgatgtatagaagtttttagttttgaaatagtctaatttatctgtttttacttttgtggtctgtgcttttggtgtcatatccaagaaatccttgccaaatccaacgttataaggtacttttaaggtattttagttgtcttagtctatatttctgtactcacctttctttatccactcatcagttgatgggcatgtaggttggttccatatctttgcaattctgaattgtgctatgatcaggtgtctttttagtataatgatttactctcctttgggtagatacccagtagtgggattgctggatcgaatggtttttataattttctattttaccacagtttctctctgcatttttcctctttgaccactaaccatgtgaaattctcatattgacctttataatgatcatgaactcttagtatcattgggaaggccacatttgccacttatgattgtaaaccttatcctccatttttcctgttattgttggtgcaaaaagcacctattataccaggactttaaaaatcagtctgataagtctttgataagtctaataataataactgataagtccattgaatttgcttctgattactttttctttagtagctaaacatgtatgtactcctatgattacaatgaacactcctctccatttaaattaattatttacattgatgaaatagcaaaatgttaatgactaaatactgtcttggttttttcgttccaggtcagtcaatattaacttcttataattttcttttttttctttatgtgtgtgtgtgtgtgtatttttttttttttaatttcaatggcttttggggtacaaatggcttttggtcatatagatgaattctacagtagtgaagtctgagattttactgcaccggtcacctgagtagtgtacattgtacccaatatgtggttttttataccttgcccccctcttaccctccccactttgagtctctagtgtccattatgtcactctgtatacctttttgtacccataagttagctctcacttataagtgagaacacacagtatttggttttccattcctgagttgcttcacttagaataatatcctccagctccatccaaaattgctgcaaaaaaaaaaaaaaccacaaacattattttgttcttttttattgctaagtcatattccatggtgtagagataccacattttatttatccactcactggttgatgggttggttccacatctttgcaattgtgacttgtactgccatcaagtgtctttctggtataatgacttcttttcctttgggtagatacccaggagtgggattgctagatcaaatggttcttaacattttctctctggatctatttctggaaattttaggctccagtttttgttgttgttgttaataaaatgcaatggaatgtaatgatcatcacttttcattatgctttaaaatctggtaaatggaggctagaacactcctgtaaggcaagaatattctctctgttggaactcaaatacacagaactgggtaaatctcaatcttaatctttgattcaggacacaacatggctctcttttacttgctttctttaattgttttttaataatgtggtaagcatttctgaatctcctatccaatacaaaaactaggacaatacagacagtaactcctatggttacaatgaacactcctctccacttaaattaattatttacactgatgaaattgaaatagcaaaattttaatgactaaatactgtctttgattttttgttccaggtctgtcaatattaacttcttataattttctttttttttctttatgtgtgtgtgtgtgtgtgtatatatatatatttaatttcaatggcttttggggtacaaatggcttttggtcatatatatgagttctacagtagtgaagtctgagattttactacaccttccacttatgtggtcccacaccacccgcctcccctgccgcctcctgccaccccctaggccaaggtaataatcatcctgaatcctgggtttatctctcacttgctttcttttcatataattttgcaaaagaatctgatctaaatgtgtttttcagagtatatatttatattttagctgttcttagagaaaatttattattttgcatgtaatcttatggaacattctcatttaataccatggtaagattcagcccttgcccaggggatagttcatttagtttgtttactggatagagctcatcatgtgactatacctcagttagtttatcagttctcccatccatggtgactaggttgcctctcagcctctcaacaacactgtttctcagtgtccttgtagaagtgatatgtgggtgttttctccttacacagagttgaaaggtgacgacaacaacgttggcactaccaatcccccaccctccagaggggtaaccagtgttaccagtttgctgtgtttcctgctacacctcgccttattcacttccatttgtatctgaaaaacgtgttgcatggtttcttttctatagaagtggtaaaatgctattgtgtcctgtacattattgattactttttttcatttaacagtagggagatgcctgggagtacacagagaactgccctcattgttttcaacttctgcactgtatgtctgtgagtttagccattctgctgttaatggaaatttacagtattctaatcttttgatattacaaacagttctgtgcgatcatcgtcatacacaaccccttgtgcacaatgcatgagtgtttctcagggtaggtaccaagaagtgaaattcctgggtcatagggcgtgagtccgacatttttctccattctgccctgttgccctccagagtgggtgtccagctttgcatacctaagtatgagagtatctgttgttcatatcctctacgacgctccatatatgaaacttaagtttctgctagttgccatctttgatctatcatgtatgcagtgacctactaagactgtaattggtacagtagattcttgtcatctgtgtgtgaatttagcattcatgggcttaatgctgacaaggcccccagggtccaagacatataatcatgtataattttgtcaaggtataattttttaaattgcttttgtcatgtgtctgctggtgatgcccaacccagtgctctgcacccaggtcacactgtggctttgtcctctgcttatgcctgcattgcagcaactgtcctgaagagaccaaaattatgcagatttaggtaagtccatggctaatgttattatattatgtgctattgtaatggatggggctgtggagtgtatgaatttataaatcactggtcttgtaattaaaattcaaacactatagaaaaaggccatgtagaagataaaagttcctctataatcccggacccctaagataactactaatgacaacttcatttatattccttcagacattttctggctgtggatgtactaaaatgtatcctattattctctgccctaaaatggaatcatacaaggtgtactgttatttttatggctctataacatgtcatattgtacgtgttggtatggtcattttaaccatttttctagtgatggctttgaggttatttgcagtttcctagccatctcaaagtgtgctgcggggatctcttttgcatccctctgggtgcagagctgaggcacccagaggcagtgtccagaggaggcagcatctgtaggtgtcttcacctgctctggctcttggcacatctggttggtgacactgttttgtgagatgggttgaaagcacgtgctgccaaaatagaataatgttggtcctctcctcatgtgccgtggaactggggtaaaactgcgtagtggctgcagctgcctgtccataccggaatcgagtataacacggtgcctggcttagcacaaaacagtagtgggtcctgcaggccccagagtctaattcctggtattctttcccctacacagattaaataaaccaaaaacaaactattctaggaaagcgtctgtgacatttgtaaaaagtggtatttaatgatcttttattcacttgtctgtttagtttgttgaaatcttaagtggcatcctggtctgggaaggagtgctgtctgcgcctgccctccgctgggcacagcgtggctgcttcaggggctaagcacacactttctgtcttctaaagggccgccacatgccaggagctcaggtgtgagcccggctctggctcttacctcatagggtcactcataggggcacagggagcagaacattgtacacagcgaggcaccacccggcttggcatctgcctcggtggacttactacctctagaaggaaatacctgagttcctctggcctcagctcctagagtgactggtgtgctgtccctgttactcttctgtcaaggtgacaactgtgtgacccatcatctgtgtgtcaaagcaaggccctgcctgggcctctgctcctgtgctgaccccaaaggcaaatgctttgctagtttccttccagttaatttcacctatgaatagatgtgtgaaaactgttcaaagccatacctgcacatgtttgaacttcaaaccctgtgggtgattcagtggcatctttctctaacccccagcctcccttcccacagaggccaccgtcatggccagttgctgcagtttctttccagagaacctgtgtatgtgtaaagctgtacaggcgtgggtacaccacacagcctgtcttgcactgtggactgttgagttactagtacatctaggtaagcaccgcatatctgtattcatgtctgccttggtcttttcaacatctgtgtggtagccgtgtttgaattacccattccctttttggggaaccattaagttgtttcagcaatttttactgtagataaggctataccgcatatctgtgtacatgggtttttatgtacatgggcaagtatatctgtgagagaaaagtttcctcaggaggaattctgggcacagcatgtgtaaatttctaaatatgatggacacccccagcttccacctcaaggaggttggtcccattgacatttccccacaccttcacccaggctgtgcccttaaacttggttatttgtcaatgtgagaagtggaaaatagtatttaattgtagtttggatttgtatttctattgggttgtatacttactgattaataataagagctctttacatattaaggaaattaacccttttcaaatacattcctatttctcactaatctttaagttttattgtaatattttgctctttagtttatatatatatgtatatatatatatatgtatatatatatatatacatatatatatacatatatatatactaattttcttttatggttcctggattttgtgagtagtttgaaaaggctaatccagctgaagattttgttgttgttgttaaaccccatgttttctcctaactctttttatttttattttggaggactctatctagacttaattttagcataacaagtgacagggttagttagcctgttgtccttacaccattttctggctaatacagctattaactattgatctgtctattcacgtgccagttcctaatggttttacatagtgtaatctgcacttcaaaatagcgaagggaagccctacctcattattctacttttccagaattctcctggctattccaggctgcatgtttaccttaaccttccctgtgatgtcttcatgccgttgtcttcttatgcaagaataaggtacgtctttccatccactcacgtctatttaatttgactttgcattacacagaaagctggtcttggtctgtctacctcggcatctagttgtcctcactgccccctagccgaccccaccccatctgactgactaccccatcacagagtacttttatttacgttttgctctgcctaatggttacttgatactgtcacgccgacagtgtccagttcagtggtctttgcagttgaaatgctcccgtacacactgtcttgttaaaaatgccagtaagttcatacaaacccagcttgcacccaaggtcacattcagagagcgtagggctgggatgggttgttttccaagcttctgccactgtgtggctagctcttcccactgggaagttctgtgtacccggaatgtcggagtggagtcctgttctagtgtccagcacctgaccctgtgcccaacccctcaacagcctattcctgctgtccacagcctgctggaactttttacaaaatatgttgccatgctggaccctgggcactggacataagccccctggcagcctttttcatgtcacccaaaggggtaattgtcctactggtggtctgtaagatgagttagggtgacttgctaatagacattgtaaatcttaatatttatgtatgtattttattattaccggttttccatttatgatggtaatattgtttcttctaagaatatttatttttccttctaaatattgagataaaattcatgcttttgaaatgttctattcagtggcttttagtatatttgctatgttgtgcaaccatcgacactatccatttctagaactttttcgtcatcccaaacagacgctctgtattcataaaaaaataacttcctacctgtctctccccctagtctttggtaacctttgttatactggtaaactttgttgtgctctctgtctgtgtgaatttgcctattctaggggcctcatataagtgtaatcatacagtatttgtctttttgggtctgtctgatttcacttagcgggttttcagggttcattcatgttgcagcatataacagtactgcgttcctttttctggctgaataatattccactgtatggatagaccccattttgtttattcacacatcatttggacatttggattatttctggtttttggctattatgaacaatggtgctatgaacagttgcgtacaagtttttgtgtgaacatatgttttcaattctctcattatatacctaggagtagaattactgggtcatatggtaactgtatatttttgaggaactgccaaactattttcccacgtccatgcaccatttcacattcccaccagtaagtaagagggttccaatttctgcgcattcttgccaacactagttattatctgactttctggttataatcattctaatgagtgtgaagtagcctctggtgtcatttggatttgcatttctctgatgagtgatgctatcaagcacctttgctggtgctgttggccatatgtgtatgttccctggagaagtgtctgtgctgagccttggcccactttttaattaggcgtttgtctttttattactgagttgtaagagttctttatatattctggattctagacccttatcagatacatggtttgcaaatattttctcccattctgtgggttgtgttttcactttatcgataatgtccttagacatataataaatttgtattttaaaagtgacttgatttggctgtgcaaggtggctcacgcttgtaatcccagcactttgggagactgaggtgggtggatcatatgaggaggctaggagttcgaggtcagcctggccagcatagcgaaaacttgtctctactaaaaatacaaaaattagtcaggcatggtggtgcacgtctgtaataccagcttctcaggaggctgaggcacgaggatcacttgaacccaggaggaggaggttgcagtgagctgagatcatgccagggcaacagaatgagactttgtttaaaaaaaaaaaaaagtgacttgatttaagggaaaaaatgactggctatattcagtcagatatggcaaaaagtctcaaggtgttaatgtgaatgattaaggtcttggggggggtgtcccctatcagactacaggtgtttagaggcacagaaaaaggtgcagttgggttcttaatgtgaaatgatgagaagcacaactccagtgtgtctctttgtgtagaatgtcagcagacaccccctgctagatgtgctggatcatgggaaagcatttccatttgttactagattgttcagaagttttaatttatgatgggtgtggtggctcatgcctgtagtcccagcactgtgggaggctgaggcaggaggatcatctgaggccaagagttcaagatcagcctgggcaacatagtgataccctatctcttaaaaaagaagaagtttttaaatttgaaataataataggtactggatttatgcaaatgtcttttctgcgtcttttgagatgagtatcaggtttttttttttccttttatcatctgatgatgaacttaatgtttccatttgtattaatggaatactaagtccctctgtgatttctgaaccaagctattcctaggcctgagttttattttgttgacacagaaataaattagaaggccaagcgtggtggcatgtgcctgtagtcctagttgctgaggtaagaggattgcttgagcccaggagttcaaggctgcagcaagctttgattgcgccactgcactccagccttggcgacagactaagacgctgtctcaaaaaaaaacaaaaacgacaaaaaaaaaacaaaacagaaaaaataaactaaggcaatgacagtccctggcaaatgctgggagggaggcagcagtggtcagggaaggtaaccctgaagcaggacttgtaaagcaaataagattgggaggccaaggtgggtggatcacgaggtcaggagttcgagaccagcctggccaacatagtgaaaccccgtctttactaaaaatacaaaaaaattagccaggtgtggtggtgggtgcctgtagtcccagctacttgggaggctgaggcaggagaatctcgaacccaggaggcggaggttacagtcagctgagaccgcaccattgcactccagcctgggtgacagagcaagattccgtctcaaaaaaaaaaaaaaaaaaaaaaccaagaagaaaaggaatgaattagaacttcttctgcttggacttaagggcatcatcaggcaggttttgggtaggatagcaggggaggcagagacatagtcggggtcagtggtcatgagtgtggctttgagcccaaaaacttggtttctgttccctactttgccactcagtagtgcatgactttggccaaatttcttaaattcatgaagcaagtttccgggtgaatgaaatggggataaaaatagtgttcaaacctatccgttggtttgtgtgaaactgaaatgaatagtatcgtgcaggtacttgtgagcaaggggagctgctgtttcctgtccctttatgatgggaaatatctagacaagttcccaaccctctgcactgcaggctgcatggcacggagggtcttgtaacaccagctggggctggccttcttttaggagcttcagtggttctgaaaacttttatttgtttgtttgttttagtagatgtggggtctttctgtgttgcccggactggtctcaaacttctggactcaagtgatcctcccccgctcaacctcccaaagtgttgggattacaggtgtgagccactgtgcccagccttgaaaactttttcaggttcttccagggttactgggctattaaatatttctatttcattataagtcagtttttcaaagttatattatcttaattaccttttttatatgtattagtgtagagtagcattttatattttgatatcctccttatgcatagtttttcactttttattcctagtttttcgtttttaataagactttcaagaaatttattttattggccttttgaaaaaagcagctttagataaagtaagcagttctgctttcattttataatttatttctacttttgtttcattaatcttttcctccggcatgccttggattttgttgtgttactctttttctagaggctcgcattgtgtgtctggttcacttatgatcacgcttgcctacttttaagaatggaagaggggaggtggagggtggctgcacagtcgagggtgtgaggcagtcttgctctagccccaccatgccctcagcccgctgtggccacgctggttcctcaattgctggggcgtgcagtgtctgtaagggaggctactgatgccatccgaggaagatgtaaggtttcgtgtgggcagcgagagcctagcaggcatgtggggtgcccagcaaagggtaacagtggacagttgttgcctcattccacagagttttgattttttttttttttttaatggtcactccatcaacatcccccatggccagagcctgagctggtccccagagacacaggcattcagctgacagcctcgccttcacgctgctgctgttctcatgggggacaggcctcaggtggcaatgcacaaatcattagttaagggcagttgtgacagttaccaaggagtgtagtcccccgccccccgcccagtgaaaacagccctaaccaggggtggggacctttgggctctgacccgaagggtaggagaagctggaaggacagcattcctgtctgcgaaggcaggagcaaagctgccaggctatgaaggaaatggctggagcctgaagtcatgcaagctggggctggcagggacagggccaacttccaggcctgggggccaccatgaggattcaggacgtgacccccagggcacatgaaggccttccatctgtatttaagaaaagactttatcagacgagtatggtggctcacgcctgaatcttagcactttgggaggctgaggcaggtggatcacgaggtcaggagttcaataccagcctggccaatatggtaaaaccccatctctactaaaactacaaaaattagccaggcatggtggcgcacgcctgtagtcccagctactcgggaggctgaggcagaagaatcacttgaacccgggaggtggaggttacagtgagccaagatcgcgccactacactccagcctgggtgacagagtgagactccgtctcaaaaaaaccaaaagactttatcttatttcctatatgtttgtggtttcagtcctgatgtataatttgaccctagttagaatggttatctgaggaagtggcctgtacgatttctgcttttttaaatgtgtggctccctttcttcattgattaacgtatgattatttttataaatgttccatggcagtgggaagggattctctgtcacattccacatctggatcagttcctccccattttgttggtcaaatccgatctgccatatcctgtgtaatgacaagtgagttgcattctcaccgtcactcctggggtctctccgcttcccctgagctggctcagcagtctgctccatgtgttttgatgcagggtgacccattggtattcccgacactaacgcccccgtctgtggactgcttgctgcttgggcttcactgtgtctggtgttgacagtgcagacctaaaggtgtgcacacatgtgcacacacactccgctgtcttcttgtttgcactggacttaaatatctatgagggttattttcaactgctgaatttggaatgatttttatatcttttctgctttctgcccatgtacatgtgtttattttacactgttgtgattggtagttactatgtggggacacaattacttgggctgaaataatccacctgttgtggttggggtcctctggggcattccagggtgagaggttgtcactgccacctgggccatgtgggccggcaccagcattttgtggttacgaattctacagtcacaaatatctttgggcaaatccccttctatacctcaaggcagcttttggtttgcaaccccactggccagagggaagggccagtcacttggctctctcactgccctgcgccccagatggttctagggctgctgttttcccttggccctgccaacaccactgtttttacttctgctcattggctgagtgcagtggttcctggaagccagtggcacgtttccccgcgtagctcgcttatcccacagcacacacccaagggttctgttgctaacacgctgaattaattctttgctcatcttacagagtgtgttttgactgcccccatttctgaggccttgtaaggccagagctttgttgcttcatcggcaggttgggacttagatggccgtgaatgtttcctctctgctgctgcagtaagtaagtgcccgcaccatagtgtgtttggaggctgaagttgaagcgaggctgtgaggggagatggacgtgtgaggagggatgatggggcttgagcaaagtgggggagggggcaaaggcagttggcccaacacattccccacccctttgagaggtctgaggcctgcagacctggctcggagcccacctggtagtcctcagactgtgtgtgtgtgtgtgtgtgtgtgtgtgtgtgtgtgtgtgtgtgtgtgtgtgtgtgtgtaaaagagagaagttgtggagaaatggggggctgattctgctcagattcatcaggatgagtagaaggcacccagctctcaccctggcctgacatgtgtgtccctgagcaggttacagtcctctctgagcctctgcttcccatctggaccctgctgggcagggcttctgagctccttagcactagcaggaggggctccaggggccctccctccatggcagccaggacaggactctcaaatgaggacagcagagctcgtggggggctcccacggacccgccgtgggcccaggggaggcagagcctgagccaacagcagtggtgctgtggaccgtggatcctgagggtggcctggggcaagtaccggctgagggtccaggtgggctttgtgtacctttgggtcctggggccctggtgacttggactccaggttagagtcaagtgacaggagaaaggctggtggggccctgtgcttccgacttcatttcgagtgatggcagttcccaggaaggaatccacagctgacggtggctgacagatcagagaatggaaggcgaggcaggcgggcgtctgcgtgacctcaggtgcttggggcccagcagacccagagaaccatttccactaggccagggtgccggaagtgtccacaggtcttagattccctgttcagatgaaaagatttgtgcctttaatgataaaagtgatctgcatagagtcaaaaattcaagccatgggtataaaatgcaagtaaaatccctgccctcacctatcccaccctactacacagagatgtcctctcgagtttcctagactcactctggaaatttctgtatacacacagaagcttgtgcctctgctcgtgaaggcagagggagggagagctgaagggccagcaccttctcacctgtgggccccctcagtgctcggtcccagagcatgcaggactgtgcctcgtgttcagtttgctggtctgacttcatgctccttgggcaggatatgcatgtgccatgctaggagacatgtggatgtgaagctgggggacaatgtcccctggctatgcctttacaagggaagtaaggaaggtaggaggtgagcctgggagggagggagggaggcgcggagccgccgcaggtgtttcttttactgagtgcagcccatggccgcactcaggttttgcttttcaccttcccatctgtgaaagagtgagcaggaaaaagcaaaaggcgctggtggtggcacgtccagcacggctgggccggggttcgagtccccgcagtgttgctgcttccttccagctccctcctccaggcctctcctcccaccccaccagggatatcttgtctcctagaggggtagcattgggtggggcaccccaggcctctcccagaagccctcctgccctgctatcccctccctcatcctctggggccctgggaatacagcaggggacgtggggccacaggcagctgataacttagccccctcagccactcctgtgggagcgggagggggacagcttggcggctctgcacccaaagctgtggggcctacctggagtgtccccacccctcagggc

SEQ ID NO: 8962 - DNA, 7846 bp, Homo sapiens
agaacacaagaagtgctttaagaggtattttaaaagttccgggggttttgtgaggtgtttgatgacccgtttaaaatatgatttccatgtttcttttgtctaaagtttgcagctcaaatctttccacacgctagtaatttaagtatttctgcatgtgtagtttgcattcaagttccataagctgttaagaaaaatctagaaaagtaaaactagaacctatttttaaccgaagaactactttttgcctccctcacaaaggcggcggaaggtgatcgaattccggtgatgcgagttgttctccgtctataaatacgcctcgcccgagctgtgcggtaggcattgaggcagccagcgcaggggcttctgctgagggggcaggcggagcttgaggaaaccgcagataagtttttttctctttgaaagatagagattaatacaactacttaaaaaatatagtcaataggttactaagatattgcttagcgttaagtttttaacgtaattttaatagcttaagattttaagagaaaatatgaagacttagaagagtagcatgaggaaggaaaagataaaaggtttctaaaacatgacggaggttgagatgaagcttcttcatggagtaaaaaatgtatttaaaagaaaattgagagaaaggactacagagccccgaattaataccaatagaagggcaatgcttttagattaaaatgaaggtgacttaaacagcttaaagtttagtttaaaagttgtaggtgattaaaataatttgaaggcgatcttttaaaaagagattaaaccgaaggtgattaaaagaccttgaaatccatgacgcagggagaattgcgtcatttaaagcctagttaacgcatttactaaacgcagacgaaaatggaaagattaattgggagtggtaggatgaaacaatttggagaagatagaagtttgaagtggaaaactggaagacagaagtacgggaaggcgaagaaaagaatagagaagatagggaaattagaagataaaaacatacttttagaagaaaaaagataaatttaaacctgaaaagtaggaagcagaagaaaaaagacaagctaggaaacaaaaagctaagggcaaaatgtacaaacttagaagaaaattggaagatagaaacaagatagaaaatgaaaatattgtcaagagtttcagatagaaaatgaaaaacaagctaagacaagtattggagaagtatagaagatagaaaaatataaagccaaaaattggataaaatagcactgaaaaaatgaggaaattattggtaaccaatttattttaaaagcccatcaatttaatttctggtggtgcagaagttagaaggtaaagcttgagaagatgagggtgtttacgtagaccagaaccaatttagaagaatacttgaagctagaaggggaagttggttaaaaatcacatcaaaaagctactaaaaggactggtgtaatttaaaaaaaactaaggcagaaggcttttggaagagttagaagaatttggaaggccttaaatatagtagcttagtttgaaaaatgtgaaggactttcgtaacggaagtaattcaagatcaagagtaattaccaacttaatgtttttgcattggactttgagttaagattattttttaaatcctgaggactagcattaattgacagctgacccaggtgctacacagaagtggattcagtgaatctaggaagacagcagcagacaggattccaggaaccagtgtttgatgaagctaggactgaggagcaagcgagcaagcagcagttcgtggtgaagataggaaaagagtccaggagccagtgcgatttggtgaaggaagctaggaagaaggaaggagcgctaacgatttggtggtgaagctaggaaaaaggattccaggaaggagcgagtgcaatttggtgatgaaggtagcaggcggcttggcttggcaaccacacggaggaggcgagcaggcgttgtgcgtagaggatcctagaccagcatgccagtgtgccaaggccacagggaaagcgagtggttggtaaaaatccgtgaggtcggcaatatgttgtttttctggaacttacttatggtaaccttttatttattttctaatataatgggggagtttcgtactgaggtgtaaagggatttatatggggacgtaggccgatttccgggtgttgtaggtttctctttttcaggcttatactcatgaatcttgtctgaagcttttgagggcagactgccaagtcctggagaaatagtagatggcaagtttgtgggttttttttttttacacgaatttgaggaaaaccaaatgaatttgatagccaaattgagacaatttcagcaaatctgtaagcagtttgtatgtttagttggggtaatgaagtatttcagttttgtgaatagatgacctgtttttacttcctcaccctgaattcgttttgtaaatgtagagtttggatgtgtaactgaggcgggggggagttttcagtatttttttttgtgggggtgggggcaaaatatgttttcagttctttttcccttaggtctgtctagaatcctaaaggcaaatgactcaaggtgtaacagaaaacaagaaaatccaatatcaggataatcagaccaccacaggtttacagtttatagaaactagagcagttctcacgttgaggtctgtggaagagatgtccattggagaaatggctggtagttactcttttttccccccacccccttaatcagactttaaaagtgcttaaccccttaaacttgttattttttacttgaagcattttgggatggtcttaacagggaagagagagggtgggggagaaaatgtttttttctaagattttccacagatgctatagtactattgacaaactgggttagagaaggagtgtaccgctgtgctgttggcacgaacaccttcagggactggagctgcttttatccttggaagagtattcccagttgaagctgaaaagtacagcacagtgcagctttggttcatattcagtcatctcaggagaacttcagaagagcttgagtaggccaaatgttgaagttaagttttccaataatgtgacttcttaaaagttttattaaaggggaggggcaaatattggcaattagttggcagtggcctgttacggttgggattggtggggtgggtttaggtaattgtttagtttatgattgcagataaactcatgccagagaacttaaagtcttagaatggaaaaagtaaagaaatatcaacttccaagttggcaagtaactcccaatgatttagtttttttccccccagtttgaattgggaagctgggggaagttaaatatgagccactgggtgtaccagtgcattaatttgggcaaggaaagtgtcataatttgatactgtatctgttttccttcaaagtatagagcttttggggaaggaaagtattgaactgggggttggtctggcctactgggctgacattaactacaattatgggaaatgcaaaagttgtttggatatggtagtgtgtggttctcttttggaatttttttcaggtgatttaataataatttaaaactactatagaaactgcagagcaaaggaagtggcttaatgatcctgaagggatttcttctgatggtagcttttgtattatcaagtaagattctattttcagttgtgtgtaagcaagtttttttttagtgtaggagaaatacttttccattgtttaactgcaaaacaagatgttaaggtatgcttcaaaaattttgtaaattgtttattttaaacttatctgtttgtaaattgtaactgattaagaattgtgatagttcagcttgaatgtctcttagagggtgggcttttgttgatgagggaggggaaactttttttttttctatagacttttttcagataacatcttctgagtcataaccagcctggcagtatgatggcctagatgcagagaaaacagctccttggtgaattgataagtaaaggcagaaaagattatatgtcatacctccattggggaataagcataaccctgagattcttactactgatgagaacattatctgcatatgccaaaaaattttaagcaaatgaaagctaccaatttaaagttacggaatctaccattttaaagttaattgcttgtcaagctataaccacaaaaataatgaattgatgagaaatacaatgaagaggcaatgtccatctcaaaatactgcttttacaaaagcagaataaaagcgaaaagaaatgaaaatgttacactacattaatcctggaataaaagaagccgaaataaatgagagatgagttgggatcaagtggattgaggaggctgtgctgtgtgccaatgtttcgtttgcctcagacaggtatctcttcgttatcagaagagttgcttcatttcatctgggagcagaaaacagcaggcagctgttaacagataagtttaacttgcatctgcagtattgcatgttagggataagtgcttatttttaagagctgtggagttcttaaatatcaaccatggcactttctcctgaccccttccctaggggatttcaggattgagaaatttttccatcgagcctttttaaaattgtaggacttgttcctgtgggcttcagtgatgggatagtacacttcactcagaggcatttgcatctttaaataatttcttaaaagcctctaaagtgatcagtgccttgatgccaactaaggaaatttgtttagcattgaatctctgaaggctctatgaaaggaatagcatgatgtgctgttagaatcagatgttactgctaaaatttacatgttgtgatgtaaattgtgtagaaaaccattaaatcattcaaaataataaactatttttattagagaatgtatacttttagaaagctgtctccttatttaaataaaatagtgtttgtctgtagttcagtgttggggcaatcttgggggggattcttctctaatctttcagaaactttgtctgcgaacactctttaatggaccagatcaggatttgagcggaagaacgaatgtaactttaaggcaggaaagacaaattttattcttcataaagtgatgagcatataataattccaggcacatggcaatagaggccctctaaataaggaataaataacctcttagacaggtgggagattatgatcagagtaaaaggtaattacacattttatttccagaaagtcaggggtctataaattgacagtgattagagtaatactttttcacatttccaaagtttgcatgttaactttaaatgcttacaatcttagagtggtaggcaatgttttacactattgaccttatatagggaagggagggggtgcctgtggggttttaaagaattttcctttgcagaggcatttcatccttcatgaagccattcaggattttgaattgcatatgagtgcttggctcttccttctgttctagtgagtgtatgagaccttgcagtgagtttatcagcatactcaaaatttttttcctggaatttggagggatgggaggagggggtggggcttacttgttgtagctttttttttttttacagacttcacagagaatgcagttgtcttgacttcaggtctgtctgttctgttggcaagtaaatgcagtactgttctgatcccgctgctattagaatgcattgtgaaacgactggagtatgattaaaagttgtgttccccaatgcttggagtagtgattgttgaaggaaaaaatccagctgagtgataaaggctgagtgttgaggaaatttctgcagttttaagcagtcgtatttgtgattgaagctgagtacattttgctggtgtatttttaggtaaaatgctttttgttcatttctggtggtgggaggggactgaagcctttagtcttttccagatgcaaccttaaaatcagtgacaagaaacattccaaacaagcaacagtcttcaagaaattaaactggcaagtggaaatgtttaaacagttcagtgatctttagtgcattgtttatgtgtgggtttctctctcccctcccttggtcttaattcttacatgcaggaacactcagcagacacacgtatgcgaagggccagagaagccagacccagtaagaaaaaatagcctatttactttaaataaaccaaacattccattttaaatgtggggattgggaaccactagttctttcagatggtattcttcagactatagaaggagcttccagttgaattcaccagtggacaaaatgaggaaaacaggtgaacaagctttttctgtatttacatacaaagtcagatcagttatgggacaatagtattgaatagatttcagctttatgctggagtaactggcatgtgagcaaactgtgttggcgtgggggtggaggggtgaggtgggcgctaagcctttttttaagatttttcaggtacccctcactaaaggcaccgaaggcttaaagtaggacaaccatggagccttcctgtggcaggagagacaacaaagcgctattatcctaaggtcaagagaagtgtcagcctcacctgatttttattagtaatgaggacttgcctcaactccctctttctggagtgaagcatccgaaggaatgcttgaagtacccctgggcttctcttaacatttaagcaagctgtttttatagcagctcttaataataaagcccaaatctcaagcggtgcttgaaggggagggaaagggggaaagcgggcaaccacttttccctagcttttccagaagcctgttaaaagcaaggtctccccacaagcaacttctctgccacatcgccaccccgtgccttttgatctagcacagacccttcacccctcacctcgatgcagccagtagcttggatccttgtgggcatgatccataatcggtttcaaggtaacgatggtgtcgaggtctttggtgggttgaactatgttagaaaaggccattaatttgcctgcaaattgttaacagaagggtattaaaaccacagctaagtagctctattataatacttatccagtgactaaaaccaacttaaaccagtaagtggagaaataacatgttcaagaactgtaatgctgggtgggaacatgtaacttgtagactggagaagataggcatttgagtggctgagagggcttttgggtgggaatgcaaaaattctctgctaagactttttcaggtgaacataacagacttggccaagctagcatcttagcggaagctgatctccaatgctcttcagtagggtcatgaaggtttttcttttcctgagaaaacaacacgtattgttttctcaggttttgctttttggcctttttctagcttaaaaaaaaaaaaagcaaaagatgctggtggttggcactcctggtttccaggacggggttcaaatccctgcggcgtctttgctttgactactaatctgtcttcaggactctttctgtatttctccttttctctgcaggtgctagttcttggagttttggggaggtgggaggtaacagcacaatatctttgaactatatacatccttgatgtataatttgtcaggagcttgacttgattgtatattcatatttacacgagaacctaatataactgccttgtctttttcaggtaatagcctgcagctggtgttttgagaagccctactgctgaaaacttaacaattttgtgtaataaaaatggagaagctctaaattgttgtggttcttttgtgaataaaaaaatcttgattggggaaaaaagatgggtgttctgtgggcttgttctgttaaatctgtggtc

SEQ ID NO: 8963 - DNA, 1052 bp, Homo sapiens
gtagcagcatctggctgttggaaggactggctgggatctcaggtgaaataccctccctggccctccttacccttaagatctccctgaaaagtcagaccttgcttattggagtttgagatgcattctagtaaacccagacctaccagagagagggacccacgtctgaagaatcttccagcctggggaacctgtgactggccacacccttagcctaatggaggggcctcagaagcagaactacctttttttttttttttaatggtattacattttgcaaatggagaggtagactctgattgggccccttttgacaacgcagcagagctgaggtttgaatcctagtcagtcaacacttcaacccctatgttgctgtttcttcaatgtctagaatgttctgatagatgaagcaatggcccggcaggtcagcagcacaccaacccccaacctacccagcctgtataggccttggccacaggagctttctcttcccttgaagtgatctaatgggggatggggtatctgtctcgctggttatgaaagaagctgagctaggtgctctcctaagttgcttaagtgtcttctgaattgatgcccagtcagtttcgtatggagaaaggtctctgtttttccaaagcagaaggttctgtggaagcacaaatactttactggagagcaaaggagtacgagtaggaattgggggccacgcacagtggctcacgcctataatcccaggactttgggaggccgaggtgggcagatcacctgaggtcaggagttcgagaccagcctgaccaacatggagaaaccccatctctactaaaaatacaaaattagccgggcgtggtggcgtatgtctgtaaccccagctattcgagaggctgaggtaggagaatcgcttggacccgggaggcggaggttgcagtgagctgagattgcgccactgcactccagcctgggcaacaagagcgaaactgtctcaaaaaaaaaaaaaaaagaagaagaaaggctgggcacggtggctcaagcctgtaatcccagcactttgggaggcc

SEQ ID NO: 8964 - DNA, 1031 bp, Homo sapiens
gtctttctacctctccccctttttgcctcggtttccccatccctctgtcccttcttaagctctcatccttacagtacgctagaaggcaggctctattatcctttaggatttaggcctctttagataaaagggctcacaggcttggagggttttaagtgacttacccggcggcggagtactgatcttagtaccgcccgccgccccggactgccccgcccctccctagcccccccatccccgcccctccctagcccccccatccccgcccctccctagcccccccatccccgcccctctcccgcccctcccttgtccccgccccttcccgccccaactcaggttctgccccaccccgccccaattcacgtcctgctccgccccgacgtaggccccgccctggcccccgggccccgcccccgtctgacgcaggccccgccccctctccgccccgccccggctcgggcggccggaggacccggagctaaggcgcccgaacccgcggcggcggtggggacgatgtggttctttgcccgggacccggtccgggactttccgttcgagctcatcccggagcccccagagggcggcctgcccgggccctgggccctgcaccgcggccgcaagaaggtgagtgcggccgagctccgtaggccgcggtcgacctgggccttgcctattccgcgccgccgaccccgtcgcgttgcgcccggcctgacgtggcggcggaaccaaggggtagcaggccggggagggggcgggcagtgcctacgtggcgggcggagggaccgagggaccgacaggcggacagggccggggtcacgtgggcccggcgaagtgtccctaaggctgacctggggagagacctggctgcgggcccttgtcttccggccacacaacagctctgggaccatctcaggccccgctgccctcccctaggccacaggcagccccgtgtccatcttcgtctatgatgtgaagcctggcgcggaagagcagacccaggtggccaaagctgccttcaagcgcttcaa

SEQ ID NO: 8965 - DNA, 1059 bp, Homo sapiens
ctcacgcctgtaatcccagcactttgggaggctgaggcgggtggatcacctgaggtcgggagttcgataccagctgacgacatggagaaaccccatctctactaaaagtacaaaaattagccgggagtggtggcacatgcctgtaatcccggctactcaggaaggctggggcaggaaaatcgcttgaacctgggaggtggaggttgcagtgagccaagattgtgccattgcattctagcctgggcaacaagagcaaatctccgtctcaaaacaaacaaaagaacaccataaataagaaaaccagccagtgcggtggctcccgcctgtaaacccagcactttgggaggccggggctggcggattatttgaggtcaggagtttgagaccagcctgaccaacatggagaaaccccgtctctactaaaaatacaaaaaactagccaggcatggtggcgcatacctgtaatcccagctactccagaggctgaggcgggagaatagcttgaacctgggaggcaggaggttgcagtgagccgagatcgcaccattgcactccagcctgggcaacaagagcaaaactcagtcttaaaaaaaaagaaaagaaaaatccagtgcaggaaggaaagtactggagtgggtattcagggatgggctctctgaagtgtgacattggagctggggcctgaaggacatgactgtgggagccagagggatggtacctggagtaagagttccaggcagaggcgacagcacgtggagagatactgaggagggagccctctgctttgcctctgaaccttggtttccacatgtgtatagtgaggagcatctgggtgcactggcctgcagggttgctgtagggaggagggaggaaggctctgctctatgcaatgcccggccccagccgtgtgtggggaagacagcgggggctgagaatcagaatcaggagcaggggaggagagtggcagacactccacagaccctgacccagcagaggtcatggaatcttgactcagatgctgtggggcggggagggcctttggagggtggaaacctggaa

SEQ ID NO: 8966 - DNA, 1050 bp, Homo sapiens
ctgaacgaggccaacctcaatgtggagctgatgaagcactttgcacggctacaggccaaggatgaacagggccccatccgctgcaacaccacagtctgcctgggcaaaatcggctcctacctcagtgctagcgtgagtgtcctgcacaactgctggagcccggtccctgtcgcaggaccacagcctcctccagggccaggagtcttgtgtgtgggggccttcattctcccagagacttagaccctgcacgctgttggccccatatctgggttcccagaggaggagtgagttggccgaagtcacacagtcaggagggatctgggatctgaatccaggcgtgcttggccccatggcctgtgtgcatcccttcagccagggtttgtaagttcagttgcttgccgtgcccagacagttaacaggaatgaacggtcagctgggcagggaggaagggagcctgtgtccgagccctggggacagctgctgttgtggtcccatgccctgaggcagtgtggaacccagtgatttgggaagagaagcccaggtccagagttttaggtcaactctccccatttaagtgattcattcatatttttcagattctggggacctatgggtggtcccattctgggaagtaagggctggtggttctgggtcccaacattgaccctacactcaggagccctctttcctgccccatcgtagaccagacacagggtccttacctctgccttcagccgagccactagggacccgtttgcaccgtcccgggttgcgggtgtcctgggctttgctgccacccacaacctctactcaatgaacgactgtgcccagaagatcctgcctgtgctctgcggtctcactgtagatcctgagaaatccgtgcgagaccaggtgaggcacagctgggcctgggccctgggctggggctgtaggggatgtcagcccctagctggcctggtaggttcttgggaaccccagagaccccagctctgcctcgttaccccacaggccttcaaggccattcggagcttcctgtccaaattggagtct

SEQ ID NO: 8967 - DNA, 1063 bp, Homo sapiens
ctggtgactgtccctgtccaatgcaggtgccaacaagctgcaggaggaggtgctgatccaggagtggttcaccctggtcaacaagaagaacgctctcatccggaggcaggaccagctgcagctgctgtgagtgctggccccgggccaggagagcagagggactcttagctactttggttagagttcttcactactttcttattcctacagagatctttttgacaaacgattcctcttccatcttactgtttttgtcctaaacaaattgctgtttaaagtgtaaaactggccaggcacggtgtctcatgcctgtaatcccagcacctggggaggccgaggcaggcggatcatctgaggtcaggagttcaagaccagccaacatggtgaaaccccatctctactaaaaatacaaaaattagccaagtatggtggcacgcgcctgtaatcccagcaacttggaaggctgaggcaggagaatcgcttgaacctgggaggcagaggttgcagtgagccaagatcagaccattacactctagtctgggcaaaagagtgagactctgtctcaaaaaataaaaattaaaacaaaaattaagggtaaaactcttaaattagaactatttttactaataagaaaaccggccgggcgcggtggctcacgcctgtaatcccagcactttgggaggccgaggcgggcagatcacaaggtcaggagattgagaccatctggctaacacagtgaaaccccgtctctactaaaaatacaaaacattagccaggcctggtggcgggcgcctgtagttccagcttctgggaaggctgaggcaggagaatcgcttgaaccctcctggggttgagagattgcagtgagccgagatcgtgccactgcactccagcctttacagtaaggaaaacagaagcccagagagatctgatctggttcccatgtggggtccgaagccactctgcggccattgcctttgtcatcctgcagggtggagacagctttgcctcccttttgcgtttgggatttttcagaataactgtagccagtgcttcctgttta

SEQ ID NO: 8968 - DNA, 1011 bp, Homo sapiens
tgtcttggcgggagcctgctcaatctgagtgccgtgggcagcccctccccggcctgtgccaggtggccctctgtggtcccttggcctgctcccatcagctgagtctctggcctctccctcctgcagtcggtgctgggtttcgtgttgtacgcactggctggggccgtgggcttcttcacacattacctgctgccacaactccgcaaacagctgccctggttctgcctgtcacagcccgtgctgaagccgctggagtacagccagtatgaagtgcgcggtgagtgcccacccctgatggccaggcctgggcagtggctcgggctgcagcctggctggtgggagctgtggtcctctcggctcaggagtgccagcagggggcactcgctgcccacactaccctttctgctccctccctgccctctgtgtccgtgttgcccggctgcgctctccaccgactcttctcctcgtgccctgctgtgcccttcccttgcctgtgttgccctggtcctgccctccttcctgtctgtgagaagacggaagaattagaaccccagggccctgaagggatctcttgtccagaattaaacactgatcaccagtggaccagagctgcctggagcacatcttcactgggctgcataatggtttttaaaaaatcctggagcctctattttagcatctcgatttgagatatgaagatccatgtttcttgagtttttcttaaacgacagaagattttgcttcccagactagcatccctctgtggctacaaccagcctgaaccgaggggtctgccctttagaagggcccagctcacgggctcactgtgcactcaggccctagccagcctgctgtacgtaggtgtttgcgatttcatcattggccttgttttaacagacagcagagcagagcacctgccataaagcaagcctcgatgtgctaagtgccatgtggagcccttgccctgctggggctcgctgctcccatttgagctgccacagatcagcccct

SEQ ID NO: 8969 - DNA, 1030 bp, Homo sapiens
gcgtttcccagtctgagcaatgaggtggcagggtctcttggccaagccctgtgcctgccccaactttaggtcccagtgactctacaggtcactgcagtgagggcctgggcctggaggtctgagttctcacacccagcctgctctgtggtctcaggcttggcccatgggttgggcgccatgagtgagccagctccttcctctcaggaagacgtgtgtgttggatgcccgagagtgcagaggggccagaccgtgtccctgctccctcccgccctgcccttggatgctgggagttgggaggagaaaggcaggcgctctttcgtgaatcttggcatccaataaggttgactcccctggcgtccaagggggtgaatggcagcaggcctctgatgccatgttggtcactctcccaggacagggcaggtagggattgttctagcagcccctgactgcacacccctcctccacaggcacttactgccagcagcgcgaggtggaggctatcaccgagggtgtggaggaggacgagggctgttgctgctgtgaacctggccacctgccacgggtcctgtccttcaatgctgcctttgggcagcgctggctggcttgggaggtaacagccagcaagtacgtgctggagggctatagcattagtgacaataatgctgcctccatgctgcaggttttcgacctccgcaagatcctcatcacctactatgtcaaggtacggtgggcaggtgtggccgggcagcagggcccttgcgggtgagcgctcgctgaccagaggccccagtaccccctttctgggttgttgggagcctgttttgtccaagggaagctgaggcctcagagagtttaagtgtcccctgaggtgccactgccagacctcaggttgcaggggcctctgtgcccatatggctctgataggtgcccaggcaaggaaggcttgctttgggcagtgagtatggggcaggtgggcagttgcagaggccagcctttgaaaccaccagcccctgcccccagctcacccagc

SEQ ID NO: 8970 - DNA, 1099 bp, Homo sapiens
aagaaaatggccaagccaggccttgaacccaggctggccctgagccacagagctttcctgccttagcctgggggctctgagccaggcctgaggatcttgagacctcttgggggtgggagggggttggtgaggcaatgtggggtacataaggagccctggaatgggggttctgatcagcctggaatgtttcttccctgtgtccctcagcttaccccttgagaagtgggggttattgcagttctctgagatggcagaaatgttgaggcttggccaagcgtggtggctcatgcctgtaatcccagcactttgggaggccaaggcaggtggatcacttgaggtcaagagtttgagactagcctggccaatgtggcgaaaccccatctctactaaaaatacaaaataattagccgggtgtgatggcgggcacctgtagtcccagctacttgggacgctgagacaggagaatcacttgaacctgggaggcagaggttgcagccagccgagatcgtgctactgcactccagcctgggcaacagagcaagactgtctcaaaaaaaaaaaaggaattttgaggcttgtggtgctcagaataagcgtactgggagtggggtggcctgctgatcacagtgcaggctcccacgtgccttcttaggatctaccctggtgctccctatgttgggctcggtgggtggcctactggggcccaggtgagcctgccacctaggttctctctggagtagtttcacgaggccctggctgtccttctccaaaggaaatcctgtccacaccacatatcagaggagctgtcatttgtcattccttctgccctcccagccactcctaggcaaggatttgtgagaccacccccctttcatcaagaaggaggctgtgtctagagagggacattcccagtcccaggtcaccgagaggtcatggcctggtccaccttccggtcccatcttgagagaggtgcccttgcccaggttgccctgctgtgcctgctaggctagggccagcaggttgagatgcacctggccaggtctcttgtcccatggggaagctgactggccacatctaaggctgcctcaaaggctgggca

SEQ ID NO: 8971 - DNA, 1031 bp, Homo sapiens
gtaaatgttgagtgtgatgatcttgttctcgttgggggctgccatttgtttgagcctcaatttctcatacaaacggggcatattctagggcagaggcaggcagatgctgcttgtgagtgctagccccagcacaggacttcctgctctgtaagtgggtgcttcctggcggctttgtcactcctccctggtctaggggaaggagccaacttgcttggttgctcttgagagctgagatggctctaggagcggggcatcccagaaagcggacttcagctcagtcttggggaggagcctctgaacctccatgctttctcctccagtggccagggccgggaccccggcctgacgcctgcccctcctctcccagagcatcatctactacgtgagccgctcaccaaagctggaggtgtggctcagccatgagggcatcacggcagccctgaggcctgtgcgggtgcccggctatgccgactcggatcccaccttctcgctgagtgtggatgaggactatgacctccgcctgtctggcctctcgctgccctccttttgtgctgtgcacctcgagtggatccagtactgcgcctcccggcgcagccaggtcaggctccactacctgaggctgccacctggggctgtgggacctgggcttccctgctccccttctccccatttggtttcctctcactctgagcctcccttagcctgagccccagcccccactccaaggtccctgtcccaggtctgagctgggctctgggatgggggtccttatgccacagcccgtggaccaggattggaactccccgctggtcacgctgtgttttggcctgtgtgtgctgggccgccgggccctggggacagcctctcacagcatgtctgcaaggtgagtgctcgggtgtcccgcggggcctactgccgtccccaccccacctcttccacgaagagcactgtggtctctggccacagtggccacagaaactgcagtggcccttcctgttggggtacctcttctcccacgggcagggcacttc

SEQ ID NO: 8972 - DNA, 1078 bp, Homo sapiens
accccgagcgtggcagcatccagaacgccaagcaggcgcttcgcaacatgatcaactcctcctgtgaccagccgctgggctaccccatctacgtgtcgcctctcaccacctcgctggctggcagccacccccagctacgggcactgtggggtggccccatcagcctgggtgccattgcccactggctcctgcgcacctgggagaggtgaggcctcgggaaggggtgacgtgtggcgcgggaggaagctgaggtgcagtacgtccctcctgggtctcagagggaggacgtgctggagccagggcttgaatcccgagagatgaccccctcccagagctgacctgcccctcctagatgtcaccttacccccagagctgacagtggcctttagtcatcaagcactgttgacaacgcaccctcaaaagactctgcaaagtaggtggcagcttcttagaggggaggatcctggggctcagaggtgttagatgacttgtcctggggctgaggactcatgcttgtgaggcctctggcctcagccgtgtccctcctgatcccttttctacctctccacccccaggcttcacaagggctgtggcgccggctgcaatagtggcgggaacgtggatgattcagactgtagtgggggcggtggcctgacctccctcagcaataacccccccgtggcacaccccacacctgagaacacggcaggtgagcaggcgaggctgggctgaacccgtgggtgaggagtgcagcccagctgaggcctctgctgtcttatctgtctcctacaggcaatggtgaccaacccctcccaccaggccctggctgggggccgcggtcctccctgagtggctctggtgatgggcggcccccacctctgctgcagtggcctccccctcggctccctggaccaccccctgcatcgcctatccccacagagggtccccggacctcacggccccctggcccgggtctcctcagttctgagggccccagtggaaagtggagcctggggggccggaaggggctgggaggatctgacggggagccagcctcagggagccccaaaggaggtac

SEQ ID NO: 8973 - DNA, 1065 bp, Homo sapiens
ccctgcacagctaccgcgtcatcgtgcggaccacgcaggtgggccgggatcgcgggatcaggacgtgggttgcctccccgacaccttgtatgcatcctgagtgcccttacaccccttcctcagctccggacactccgtggcaccatctcggaggacgcgctgccgccggggcccccacggggtctgtccccaaggaaacttctggagcacgtggcgccgcagctgagccccagctgcctgcgcctgggctcagcttcacccaaggtaccacggacgctgctcacactggatgagcaagtggtgagtggcgggccgcggagcccccagccatacagctggccccagtctgaacccagcctgcccagctcccaaacccctagccttgaccctgatcctgggctgggtggtgaccccagaagagctggcttttcagagacagggcatcagagttcatctggagccttgcgtctcaaagtgagctctgtagaccagcagtatccacatcatgtagaaatgcagattctggggccccaccccagaccatctgaatcagagtttgcactttatttatttatttatttatttatttattttgagatggagtctcgctctgtcacccaggctggagtgcaatggtggaatctcagctcactgcaacctctgccttccgggttcaagagattctcctgcctcagcctcctgagtagctgggattacaggtgcatgccaccacgcccagctaatttttgtatttgtagtagagatgggggttttaccatgttggccacgctggttttgaactcctgaccttgtgatctgcccacctcggcctcccaaagtgctgggattacaggcatgagccactgcccttggcccagagtctgcattttaaaaagatatttgcagccctagatgccctggtctgactcaccccactggtcctgcagttcccgcatcattcctggccaatttcccccacagcccctgctgggtttcctctaacatgtggtgctcacagcttcctggagcggctccttccatcccccactccatgctgaaagctgc

SEQ ID NO: 8974 - DNA, 1035 bp, Homo sapiens
cccctcccacctaacagatccactagcaaggagtggactttctgaccccagggccctgcacacgccattcccttggtttgtgggtgaagaaactgagatcaatatggaaaaccagtaccaggactcaaactcccgtgtccgagtgcttcgttagaattgcatttaaccgttagaattgcatttagagtacccccgtcttcctgcagaaaccccgcctccgggggcggggctttgggggaggggtggggcatagcagcctggccgagttcccccttaaggcgtcctggagttcagttttagattgtgcatgtcagttgagggttgcagaaaccttaccctaatgtaaaagtccccctgcgagtttccagcacggatctgaaaggcattgtaggcaccggggtagacggaggtcgcctggatctggaacacgtcagcgggcacgctccgctccgaggtgatggtcatgtagcggtgcacaatggatgaaggctgctctcgacatagagggttggaggccgggcagagacagcggctagagaccccgaggtgggggacacaaatgagctccttgcccgtccccccaatttctcctaccctacaaagggagggaatcccaaaaggacccttctacccctgtgactggttttcatgaaggactatgattcccatcatccctcaggggcactcgctggtctgaatagatgccagtcagccccaaagccccctgggagacgtagtttctgtgggggcctggcatcgaattgactcacttctcagagacctggatgtagggctccacgcagcggttggtgtccacgcagcggtagcccccatggaagttgacacaggtttgggcctcggagcactggtgcgcaccagactcacactcatcaatgtctgtgccaggggagaggggctggaatcgggggcgtcaggctgccagctcctgacaccgtcctgcccatcccacccgggcaacctgtaccttggcagaggcgtgtggccagcagctggtaaccctgtgggcagtggcag

SEQ ID NO: 8975 - DNA, 1077 bp, Homo sapiens
tacaggctagctctgggaacagaaagagcacagcttggcagtcagagactgacctggtggcaaatccctgctcataagctgtgtggctttggggcaggtcacataacctctctgtgcccccatttccccattagaactaacatttataaagcacaaactgccaggaactgttctaaccactttacaaatactgactcatatcattggcacagtaatatcttcattttcttttctttcttttttttcttttttttttttcagatggagtctcactctgttgcccaggctggagtgtagtggcacgatctcagctcactgcaacctgcgcctcccaggttcgagtgatcctcctgccccagcctcctgagtagctgggattataggcgtgcaccaccatgcccggctaatttttgtatttgtggtagagacagggtttcaccatgtttgccaggctggtctccagctcccaacctcaggtgatccacccgcctcggcctcccaaagtgctgggattacaggcgtgaaccacagcgcccagcctagtatcttcattttcagacgggagaacagttgtccgcagacacagagccaatgagcccagcagctgggctcttacccactcctgcacccgtttgcacgaagaggataattacagctcccagctcaaggggaggctgtgagaatcaggtgagagaatgtgtgcgacagtctggtaagtggcaggtgcccagtgcagaggggctgaggcaggaaagagtcactgctctgggttcaggccattccattgcttttttttttttttttcttgagacagggtctcactctttcacccaggttggagtgcagtgacctgcgggctcaagcaatcctcccacctcagcctcccaagtagctgggactaccgacgtgcaccaccacatttggctaattttttttttcttttctgtttttttttttttgagacacagtcttgctttgtcacccaggttggagtgcagtagcccgatctcgcctcactgcaacctccacctcctggattcaagcaattctcctgcctcagcctcccgagtagctggg

SEQ ID NO: 8976 - DNA, 1068 bp, Homo sapiens
ccctttttgcactccgcttggtagagccctgagtgttttctggtgatgctgagtggcctgaagtcctaggtcacccctccctgtcccgtaggccaagttactggaggagatggaccaagagtttggtgtcagcactctggtggaggaggagttcgggcagaggcggcaggtgaggctgcagcaggggtggtacaggggacactggtggccttgctaccggaatcccgaggttgggtgcgtggagggaggttcctgactcgccgattcttcccttaggacctgtacagtgcccgggacctgcagggcctcaccgtggagcatgccattgattccttccgagaaggggagacaatgattcttaccctcaaggacaaaggtaatgcgagctgggtgccctgggtgggggcacagcctctgctgagttgcggacaagtgtgaatggccactgctctgtgctgcccccaggcgtgctgcaggaggaggaggacgtgctggtgaacgtgaacctggtggataaggagcgggcagagaaaaatgtggagctgcggaagaagaagcctgactacctgccctatgccgaggacgagagcgtggacgacctggcgcaggcacggcctgggcaggctgggtggcgggggctgaggtggagaatgtcgggaatgggggctctgaggaggtggtggctcagtggcttttcaggagccagcctgggtcccaacctgtacctcttgccttgcagcaaaaacctcgctctatcctgtccaagtatgacgaagagcttgaaggggagcggccacattccttccgcttggagcagggcggcacggctgatggcctgcgggagcgggagctggaggagatccgggccaagctgcggctgcaggctcagtccctgagcacagtggggccccggctggcctccgaatacctcacgcctgaggagatggtgagccctcccgtgccttatactcggggtcaagattctccctccctctggggctcctgccctgcccgcaggcactgagaagacagggcgagtatttgtgttcacaaagcgcttggcctcgc

SEQ ID NO: 8977 - DNA, 1048 bp, Homo sapiens
tccggaactcaagcagtccacccgcctcagaagatttttttaaaaaaatgaatgtaatataaaatgaaagaggggtgcagaagtggacatagtgactcgaaccttcactgaggagtgaggactttgctgtctgggctgcagggttgagggagaagttttttaaagaggggagatggtaatcattgtgtgtggctgggcatctgcgacaggagggaaagcagagggtgctggtgcccgtgtgggggtcgctggattcagtgctggcagcatgagtgagttctcttcccatgtcacggaacctgctttcttggtgaagcaggaagcgagaagctgggctgtgggaagtcaaaagcgtgggccacctcaccaccctgcgggttctagaagtgctgtctagagtcctgaaaccggagtttgtcgggggaggggcaggtggcaggagggagcctggaggaaggagtttgaggctgaggtagtgtgtgaggggctttggagggggattggcacaggcctggtcaggaaggccctgtaggatgttgggtattcattcaaagggcatccaaacccattgatgggtttggagcagaagagtgaccccagtgaaagaggtgcagagtggagttaggcggcagatagcagctgggcctgcatgggctgtgggcgtggcctgtctggctgctgccagggaggacccttaggttcctgggtctcaatggcatcaccccagaaactgctgggtttgcccacagccgctccctcccccaggtggtggagattgtgaagaagctggagtctcgccagcggggctgggaggaggatgaggatcccgagcggaagggggccatcgtgttcaacgccacgtccgagttctgccgcaccttgggggagatccccacctacgggctggctggcaatcgcgaggagcaggaggagctcatggtgcgtctggggcggccccgccctctgcttccctcggctgggtgggctggctggggcctgggccgaccctggtcttttgtgccccaggactttgaacgggatgaggagc

SEQ ID NO: 8978 - DNA, 1055 bp, Homo sapiens
tggaaacagatgctcgctcgtccctgggccagtcagcgtcagagactgaggaggacacagtgtccgtatctaaaaaggaggtagggattggagctgagtgtggaaggaaagccaggagatgggacttgggtacggaaataacacaatttgtaagtgttcagtaagtaatagcttctattttgtgccaatttccgccctcagcatcttatagatatttttcatttaattgctttgagttccaagtactatacgtgcctacattttacagctgaaaaagcagaggttctgagacgcacagtaatttacccaaaggcatacagcttgtgagtggcagaactttggagtctgactccaaggccccttcgcagctacttcatgagatggcctccttgggaaaagcctgactgttgaactgtgggggagaatgggggaggagtttaggggttggggtgctggcacagtgcttggattccctgacccagctggttttcctcctcttgacagaaaaaccggaagcgtaggaaccgaaagaagaagaaaaagccccagcgggtgcgaggggtgtcctctgagagctctggggaccgggagaaagactcaacccggtcccgtggctctgattccccagcagctgatgttgagattgagtatgtgactgaagaacctgaaatttacgagcccaactttatcttctttaagaggatctttgaggcttttaaggtacaaggagagcacactaggaaggggcagtgccaaacagggaaggggctcagaggtgggtgagaggcagcggtgaacaggcatcttttagtgctggccttaggaactgggaaggggctcagagggcaggggtttcaccttgtctgcctccttagctcactgatgatgtgaagaaggagaaagagaaggagccagagaaacttgacaaactggagaactctgcagcccccaagaagaagggatttgaagaggagcacaaggacagtgatgatgacagcagtgatgacgagcaggtcaggcccagccctcctggtgggaagcagggactctgggca

SEQ ID NO: 8979 - DNA, 1126 bp, Homo sapiens
acctacttgttacttgtctaattatccttttgttttcctcctctgctcttcctcccctctgccttcactttgccagctcacctggtgactcctttctcagatgtactttgtggctagagattcgtggtggttgtgtaacttcttaattttaaagcttttagttaaatgctttgaattcaggaggtagaaaagaacatggggaagtctctgctttccagagaactgttgagattcatctcttgatgagatggtttaaaaactagttattgatatacacggctgaggctgatattgtatagtctgttttgttcagtatggattatgtaattttgaaaggttttagcaggaaggattttgatgactttcagggtgagataattgaggcttcccatgatctcatttggagttgggagctggattctctacatgaatttggtgagtacttgttaaggcttgtttgctgccattctccacaggaagaacagaagaccatgaagtcaaaaatgcgagagaaagttcggcctaagatgggcaaaattgacatcgactaccagaaactgcatgatgccttcttcaagtggcagaccaagccaaagctgaccatccatggggacctgtactatgaggttcgggagggggctgggagaggtcaggctgggccttggggttgagactgtctagggcttttttttgtttgtttgtttgtttaaaaaagatggagtctcaccctgttatccaggctggagtgcagtggtgggatctcggctcactgtaacctctgccttgggggctcaagcagtcctcccatctcagcctcctgagtagctgggaccacaggcacaccacacctggctaattttttgtatctttggtagagacagggtttcgctatgttgcccaggctagtgtggaactcctgagctcaagtgatccacccgcctcagcctcccaaagtgctgggtttataggcatgaaccaccgcacctggccaaggagggcttttgaagcaactacgatagttcctcagccttagaattgcccatcgactaccctcggatgagatggaatttaaaaatgaggctctatttggaggagagatgcagatctggtggcttctttccctgat

SEQ ID NO: 8980 - DNA, 1428 bp, Homo sapiens
acttcagtctctcagaaataattttatctcaagaatgtcttcaaatttcttattttaaaataagcattaaaaaaattgatgagtcattaaagtaaaacagtagtattgttaaattttagatagaaatttctgccccttaagataaatagattctgaacaagctagctttccaaagttaggaaaactcaataagaaattgaagtcatgttttcaatgtacgtattttggtttcagacagtaaagactctgccatgacagaagttattagcatactttctgcctcctgtctccttatcctgttgcctccagattttagttgtttattaattttggtttctaatgcttcataacatttgatttaattctgcagtcataatttccggagttcccaagtatcagctctgtacttttgagtgtgccttttctctagggcttcagaatttcttttgcagctaaggagtgaactgattgtgctcactgtcttgcagagctgttcctttgggtaccatgctggtggctggggcaaacctccagtggatgagactgggaaaccgctctatggggacgtgtttggaaccaatgctgctgaatttcaggtatgggccatgtactagcgatcttggttttacttaatgtcatgaaggttagattgttggtttatagcttcattatcagggagttgtgtgttctgacacagcagagcctggaaaagggcatacattttcctgagatgttaatgtaagctcctcactagaatttgagctctaggtaggtagggattattgtgttttgactcttacaccccttcagcttaaaacagcctggcacataataggtacttagaaaacatttgttgaatgataaagtgatctctttcagaccaagactgaggaagaagagattgatcggaccccttggggggaactggaaccatctgatgaagaatcctcagaagaagaggaagaggaagaaagtgatgaagacaaaccagatgagacaggctttattacccctgcagacaggtgggggaagcagagaatgcctcttggaagtgggctatctttggggtccttctctttactccagagcttgttcctctctttacagtggccttatcactcctggaggcttttcatcagtgcctgctggaatggagacccctgaactcattgagctgaggaagaagaagattgaggaggcgatggacgggtaagggtaccagacagggctgagaggggaggaccttcacttccctttggctggctggctgactgttgttcctttctccctcatccttttttaaacaattattgaaccaactctctgccaggcactactgtaggcagtgaggagtcagcagttgaggtaaactggtaatcagagaacaagatactttcagatgtagataaggatgttgaagcagaggaa

SEQ ID NO: 8981 - DNA, 1044 bp, Homo sapiens
ctgtgtttccacatcacttaacagatttacacattgttttttttttctctgtcctttctctagggaaatcaggagccacattaatttagtttgctgtggccagatccatagcacaacaccaagctcaagcgagagttgagtatgtgatggtgttcctctcttgatcctaagcaggcctctctctttctatacaggcccatctatcgctgaagtatcctaacccacctctttcacacatagaaacactgtgttccttcctacgtgggtccagtctttcccatttctccttcactttcatgcctgtgtttggtgacgtttgggcagctgccttctccatctcgttaggttgaaaaggcgcgagcctactggcaaggagctgcagcagaggggcgtgaatgaaatcattgactgctgttgatgtttggtctgcccctaggtcttttggtcactgcaaagtccacgtaataaattattagcctaagaaacagccaggcatcctgatcaaatgtataattattatgctaacttgctgtgagaggcttaggcggacttatttttacattccgggagtgtgcagttacgtcacgtttactgaccagtccttgagcttgtccactgtcctgctccgacattgtttttcatccatcacccttgtacctcctcactccttgtggaacacatgtgctctttgagcattttgcaggccagaataacactctgtggggagaaaatggcctgccattggtctttccaattattagagtcatctggttaatttgaggtctcctgggtgtccttgttcatgttgtttagaatatataggcaacatgcagcactctgtggagggattaacattcttgtctcatgtaactcaaacgggacacaaatatatgagatacatgccccttagaaatgtaaacatgattgtggatctaaggttaggtgtgcataagaatgtcatgggatttggtctcttagggcagagaagaggggctcgaacagtacagtgttaggaaggtcctgctgcttttcttgatgcctgtc

SEQ ID NO: 8982 - DNA, 1061 bp, Homo sapiens
gataattttgtatttttagtagagacggggtttcaccatgttggccaggctggtctcgaactcctgacctcaggtgattcacctacctcagcctcccaaggtgctgggattacagttgtaagcaaccatgcctggccaactgtaaggtttttaaggtacaacaaaggttggaatatttgagtttagtgctagcttcaacaatttttctgaatctcaaatatcgttcttcctcttttctccttgtgagtaatgatctgtgtccactctcagatcaacctgggctcccttcatcctttcaacactttcagtacttttagttttgtaaatacagtggtatccacaggtcattttggcaaaaacactttttagaactgtatgcgtcttagaaattgtgatgtgggtaatttgctgtgtatgttttttagtgacctcgtataaatataggtagatgtgaaaggagtgacgccttaaatttgctccctactgtaacacctgttcccttctttgtagtctgtgtaactcctccaaatgacagatcttttggacacattagtggttatgtgatttctttctaaactagttttccaaactacctctcaaaactttattatgagtaggatttcccccagctaacattttgggtatgactggcatgttaattgtctctgaaggattttagactggttattttgtttttgattttgagataggctctcactctgttgcccaaactggaatgcagtggcatgaacacagctcactctgttcagcctcaacctcctgggttcaagtgatcctccctccttagactcccaagtagctggaaccacaggcacatgccaacatgccctgctaactttttaattttttgcagagacaaggtcccactatgctgcccaggctgatctcaaactcctgggctcaagcaatcctcccgcctcagcctaccatagtgttgggattataggcgtaagccaccgcacccaggctaggctggttattgtgctgagatataggaaggcgttttttcttttcagctgttttcttttctttttcttttt

SEQ ID NO: 8983 - DNA, 1091 bp, Homo sapiens
acccttcatgctaaaaactctcaataaattaggtattgatgggacgtatctcaaaataataagagctatctatgacaaacccacagccaatatcatactgaatgggcaaaaactggaagcattccctttgaaaactggcataagacagggatgccctctctcaccactcctattcaacatagtgttggaagttctggccagggcaattaggcaggagaaggaaataaagggtattcagttaggaaaagaggaagtcaaattgtccctgtttgcagatgacatgattgtatatctagaaaaccccattgtctcagcccaaaatctccttaagctgataagcaacttcagcaaagtctcaggatacaaaatcaatgtacaaaaatcacaagcattcttacacaccaataacagacaaacagagagccaaatcatgagtgaactcccattcacaattgcttcaaagagaattgttgttgttttgagacggagacttactctgttgcccagtctggagtgcagtgatgtgatctccactcactacgaactcaatctcctggattcaagtgattctcctgcctcagcctcctgaacagcaggggttacaggcacatgctaccatgcctggctaatttttgtatttttagtagagacggagtttcaccatgttggccaggatggtctcgaactcctgacctcaagtgatccacccgccttggcctcccaaagtgctgggattacaggcgtgagccaccacgcccggcctcattattgcttttatttttaatcaaagttatacatatattttagagagtcacgtagttttacagacttatttagaaaacaatctttaggtattatctggtgaattccagctgtcgaaaactgtttggctttttcatcagcacccacattttcccaataagtttgtaatttcttcttttttttttttaaatttttgagatagagtctcactctgttgcccaggctgaaatgcaatggcgtgatctgagttcactgcaacctccacctcccaggttgaaggaattcttctgcctcagccttctaagcaactgggattacaggcatgcact

SEQ ID NO: 8984 - DNA, 1151 bp, Homo sapiens
gaggtttttgtcttttcctcactactctattggcagggcctggatcagtgccagacatttagtaggcattcagtaagtaattgttgaataagtaagcaaatattttagtctttttgcttctcttctgtattacacacatttggagtttcttgggggaacaaggatgatatatttgtaggtggcaattatgttactatgtaaatctgttataatttttcccaaaagttcagaaaattgtttcattagtacaatggagtattaagcagcagttaaaactagtaattatgggctgggcacggtggctcactcctgtaatcccaacactttgggaggccgaggcgggcagatcacctgaggtagggagtttgagatcagccttaccaacatggagaaaccccatctctactaaaaatacaaaattagccaggcgaggtggtgcatgcccataatcccagctactccagaggctgaggagggaaaatcgcttgaaccggggaggcagaggttgcagtgagctgagactgcgccattgcactccatcctgggcaacaagagtgaaactctgtttcaaaacaaacaaacaaactggtaattatgataactatagaaatgaggagaaatgtttatggtaggtcaaaatcgtaggcacactgcctccctaaaatatgaatgaatatggacaaagactggaagataatgtgaaaatgaaatcattttaagacagtggaatttttggtggtttttctctccaaaattttctttaatactattgcttactcatcttttcagaaatgattttaaatatgtataaactttccatgcccttccctgcactatgtacagaaatagaatctttaatgtggatcacaaataacacaataatcagaaattagagatggtgttgaatctcagcattggtaatgagaataggctttatggatagatattccactttatcctgagatacacagctacagtatactttctgggaggagtatgcctataagcatccttggctggaacctgaattgggtttacaagcttacatttagataaaagcctttttatttgagatgaaacccatacaggcagggtagaaaggagtggcctgggtgagaatgtctaatgtttgggttttctcaaagcgtcat

SEQ ID NO: 8985 - DNA, 1126 bp, Homo sapiens
gcctttatcttccacattttctgctgtgttgtttcaacagccagtgacttttctgttcatactctattgatgatgaagtaaaaattgattttgatttgtttctgatttcttttccttagtaagtttgagttgaacctttagttctctctcctcatctcctcgctttctacaaaggcaattcctggtgttaagtgaaagctgttcctgttagagcctactgtttgccattaataagtgataagggaggttgtcagccagcattaatactctgtttatgaaattacagttactgatgcagtattttgtgaagttcttaagatataaacggcacaagtgatttgataagttatagctccagagacttccttacatagtatgccagtatttctttttcccctctcaacgggacacacataacattaaattaagtttgtcttggttgccatttactttaaacggatctggtgcctgtgctcagatatgtttatgagagtataattgacttctctgaaagcattgagattgagggagtagttatatcttaccttagtctcattgatgattcatggaattgaaataattaaaaagtacttattacatgcctgattgcttcatgaccctttgataaactaccaacactcatatcaaatgtctcctgatttaaaaaaaaaaattttttttatacatatatagacaagttctcactgtgtcaccgaggctggagtatggtggctttcacaggcatgatcatagctcactgcagcctcgccctcctgggctcaagggatcctcctgcctcagcttctcgagtagctgggaccacaggcacctgcgtctagctaaatgcctcttgattttaatggcatgtcttgtcttcatagcatattccacaaaaaactctaaagtctgatagaaatgatccttctctttcctgtagtttttttttgtttgttttgttttgagaaagggtctcactctggttgcccaggccggagtgcagtgatgcgatctcggctcactactacagcctctgcctcctgggttcaagtgatcctcccacctcctgagtacctgagactccaggtgtgcaccaccatgcccagctaatttttgtattttagtagag

SEQ ID NO: 8986 - DNA, 1026 bp, Homo sapiens
ctcactgcaacctccacctcccgggttcaagtgattctcctgcctcagcctccctaggtgctgggatcacaggcatgcgccaccacgcccagctaatttttgtattatagagatggggtttcaccatgttggccaggctggtcttgaactcctggcctcaagtgatccgcctgccttggcctctcaaagtgctggaattacaggtgtgagccactgcacccagctcagattcttctttataatgcctgcctcatgtagtccctcagcaggagctattgattctgaacccttcccatcccccgtggttcccttgctctcctgtcgttcacaccaccctgtctcacctgcatcacgcagtagccaccagactgatctgtttcactgcctgtgcagttcttctctacactgccggcagagtggtctctttgaaatgcagatctgattgttgcactcacctgcctaatcccctccagtaaaacccagacttcttctcctggcctacaagatcctgtttggcttggcctctgcctgctctccagcctgtttcttaccctcttcgcctagtttgctgcatgcctgccacatggcctgccttctgctgctgcttggataggagaggctcagtctctccttagggcctttgtgcttgcagttcttggaaatgcttggatgtcagaaggttacatggctgtcccgttggtgtcattcaggtctcactcagcgcagacaggccttccctcgctgcgcagttagtcacatgcctctcgttgctttcttaatattttactttaaactttttttctattacataccttatccgacatgattttgtttgtgtgttttacaggagaggggttatatctgtctcgttcatgactgagttctcagtgcctgaacagttcctgacatccagtagaccctttatatctatttgttgaataagtgactgcttttcccgttgtgcatgggccagtgccaggggtcgagttgtagtgaactgagagtacatggacagtgctgaatggg

SEQ ID NO: 8987 - DNA, 1109 bp, Homo sapiens
tttctaatagcatgtgcttactttgtatctctgtgtcacattttggtaattcttgcagtatttaaaatttttttattattgtgttggttacggtgatcagtggtctttgatgctgctgtcgtgattgttttggggtgccatgaaccgcatccgtgcgagacgttagacgtaattgataatgttggcatgtgctctgactgccccactgactggccattcccccatctctcttcctctcctcaggcctccctatttcatgagatacagtattgaaattaggtcaattaataaccctacaatggcttttaaatgttcaagtgaaaggaagagttacgtgtctctcactttaaatcaaaagctaggaatgattaagcttagtaaggaaggaatattgaaagccaagacaggctaaaaaccaggcatattgaaagccaagacaggctaaaaaccaggcgtcttgcagcagttaactaagttgtgaatgtaaaagaaaagttcctgaaggaaattaaaagtgctactccagtgaactccggaatgctaagaaagcaaaacaaccttattgctgatgtggagaaagtttcagtgatctggacagaagatcaaaccagccacaacattcccttaagcctaagcttgattcagtgcaagatcctgactctcttcaattttatgaaggctcagagaggtgaggaagctgcaggagaaaagtttgaagctagcagaggttggttcatgagttttaagtaaaaaagcaacataaaaatgcagggtgaagcagcaagtgctgatgcagaagctgtagcaagtaatccagaagatatagctaaggtggctagatgatgaaatgaaggtggctacactaaacaacagattttcagtggagatgaaagagtgttctgttggaagaagatgccatctaggactttcatagctagagaggagaagttagtgtctggcttcaacatttcagaggacaggctgactctcttgttaggggtgaatgcagctggtgactttaagttgaagccaatgctcattgactattctgaaaattctagagcccttaaaaattatgctcaatctactctgcctgtgctctataaatg

SEQ ID NO: 8988 - DNA, 1054 bp, Homo sapiens
gttcattttgccctcctgctttgtcatcctcagtacaggcttgcccgctggctccccatggtctcaggtggcctgtcgcagttccaggtgccacagggagacaccagaacatcccattgaggaggaggaactgtttctttccatgtctgtctctttattgatgaacatttgggtggcttccaccttttgtccattgtgaataatgctgctatgaacattggtgaacaataaattctttttaaaaatacagcatctaggggctaagctatgaggatgcagaggcataagaatgatacaatggactttggggactcgggtgaaagggcaggaggcaggtgagggataaaatactgcaaattgggtacagtgtatactgcttgggtgttgggtgcaccaaaatctcaaaaacctacggaaataaaaaattaaagtaccacatcaattaatgcgtagaccaaatcttattgcaattaaatttctacttttagcatcatttgctacaatgaagttctagtatttgaaatattttgagccactgacttgctgtttaatgggatttgatcccatagtaaagaagatataaaccaagtaagtcaaaaggatcttagaagcaattttattccatcctctattttgaagatgttctggattcagagtgattttccagggtcagagagctaagtcatgttaaataattcaaagtgtatgaaaatacacattactcacagattcaagtagagtaaccaggggtgtcttttgcctctagtcttactctaaccagtgtctaactatgcctgtgtagataaaataaaatagaaaactgggataattcaggtattcaagtaattgaagaaaatcagtcctgtttaaaatatctgggcaggccgggcatggtggctcatgcctgtaatcccagcactttgggaggccgaggcaggcagattacttgaggtcgggagttcaagaccagcctggccaacatggtgaaacctcgtctctactaaaaatacaaaaattagtcatgcatggcggcgcatgcctgtaatcccagcta

SEQ ID NO: 8989 - DNA, 1046 bp, Homo sapiens
cttctctcaaagactcagtgttgagactcacatgtctccccgaagggaaggaggaggcattcaagtagaaacacatttacgtcaacaggttttctgaacccccggtgaattttgagttcttagtgcaaccttcccctgcttcaccgttcctgtttcttctctgtgcctctgttttccggttggggaagtggaaaggatcctgactctggaggaaagtggagaagaaccagtgggcccgactgcatcaagagcctccccttagcagagaaccgcctggtcctcctcactcatacgtgctgtctgtgtgcagggtgctcatgggagatgttgaagaggtgtaagaaggcttcttctctgtgtaactggggagcaagacatgcacacaaagacaagtgcatcagggtacgttcagtgtgtaacttaaaataagcgacagacatagtgtggtgggcagaactgtgtgtatttcagacagcggctcaaggactgcttgtctctttgtaggaacactgtaggccagaatcagtctgttaaatgggagttgatgtcctgtgacacttttctagattaaatcgtcctaatactctacaataaatgcttttgtttttagttacttgagggaaaagatggtatttttcaaaaagtgagacagaaaaaggcatatgggacattgtatgtatgtcctggtatgtgtgcacaccaccacctgtgaagcagccttgctgctaaagtagaccccgagtttgataaaacgcctagatcttactgtgtatttataggaaatacgagggatggagaaacattgtaaatggctttttggggatagaatcagcaaattccaaactgcattataggataaacagaacagttttttcaacaaataaatcataaggggaaaaggtgagaaaaaagcctctatagataaaaagagattgaagagatgaatgaaccaatagtcatatatgattgattcagacaaaatgaagaaaatgtgaggcaatctgggaaatgtggacactgactgattatttgatggtattaatggt

SEQ ID NO: 8990 - DNA, 1050 bp, Homo sapiens
gtttgcctcttactgataatggactatatttagccttttcttgggttgggtccttatcaaagaatgagaagactaactaatagtaacaataatatgtgtttgctgtatgacaagagctagccaggtgatttgcagttttagtagggtaaggtacagcactatgaaccatttctataacaaaaaggaaatgtatcatgtcaaaagagtaaacaaagttttttagagaagaggaaaacaaatcttgaatttgttatttgtacaaatatacatagaaggctatcagggctgtctgagttttctttcatgtgtgagaatgaaggtaaaacttgctccaggtgcttagataagacttgaaggaaacacaggcatttatttggtttattgttagatcaatatagagttgtacggcaatcttttacattttccactctcaagacctagaaatgcatggtataatagcttagaaagacaactggtgtgaagtatgttcattattcttttttttctttgagatggatctcgctctgtggccgagggtggagtgcagtggcacaatctcggctcgctgcaacctctgcctcccgggttcaagcaattctcttgccttggcctcccaagtagctgagattacaggcatgcaccacgacgcccagctaattttttgtatttttagtagagatagggtttcaccatgttggccaggctggtctcgaactcctgacctcaggtgatccacccactttggcctcccaaagtgctgggatcacagatgtgagccatcacgccaggcctgttcattattcttgatgatctcacatttgacttacagtgcacttttatgtcatgtgatgaggtgatacgtttgaagatgaaagagggcatttaaaagtagctgaggacagaatcagaactttagtagttacagtgaggaagtcaaaatctctccccacaaaacaacaataataccagacaaaattgttaaaagcaactgtttcagggctctagaaatggaataaatgcaagaaagaaatggagaagcatttatccaag

SEQ ID NO: 8991 - DNA, 1006 bp, Homo sapiens
acatgcaacatttggaatatttgatctaataaatttctaaagacaattaggactttgccactgaagtgttattgttcattacttgaaaacgtgttacttttaaatgttttgtttatagcactatgcctttaaaagtaaggtgttatatttaaaaatccaaaaagtaaattactttctgttggattagaggaaatttccattaagggagattgaagtggttgcataaaccctcctacagataacaattgaaagatctgggtaaaatataagaaacaactaaaagcatccaaaagctgtccctagaacctgaggagaattgactcctgaaacactataatagaaggagcaagaattgcaagtttgtgacttttttgccagaggttatgcatcagtacccatggtggtttcagtagaaagaaatgatagtggaaagctgcagccttacagatgagaggtgccaaagaagagaagtcagggatggaagacaagctggaaagttcaggggggaatcctggaaacaagagaggactacagaaagggggaggccccacatctgagtgaaaactgcccaaattcctggttgactattaaactctaaatgtatagtgaaatcccagggagcccagcaagacaaaaacaaaaataaaaaccagccaaccaatgaaacaaagcaagcaggcagaggctagagaggaatctacccttaaaagacagacctatactagatgagatctgtgaggttcatgctttttaaaacagtatatccctaaactgtgagcagcgaagcagtggaaagctgaagccttactggcttggggttcagaggaaagaccctaatattgcccaagcagctgaaaacttaggaggaaatcacaagaacacaaaagtcacagagtgtgagcccctaaatctgagtatgatcagcctaaatccctggctgtctgccagattacacagaagcatgggagaccccagggagctaggctagacgttgtaagagctgagc

SEQ ID NO: 8992 - DNA, 1107 bp, Homo sapiens
caaaatttctgcgtatttttgttgtagaaattgaaaagctggttctagaatgtgtatggaatgcaaagtacttaaaactggcaaagccagcaaaaattgaggactgacttctacagcaccgcaaggctgtgatactggcaaaataatagacatgtacataaatgagaagatggaatccagaaagagatccacacgtaaatagacaattgatttgcagcaaaggtcctgaggcaattcaatggggaaaggaacatcttttcaacacatggtacagcagcaactaaatatctgtgtggaagaaaacaaacattaacccataccttatacactgcccagaaagctcaaaacggaccaaagtcctaaacgagttaaaactataaagcttctggaaaaattataggggaaaacgttcatgtgacttctgggtgtgaaaagattttctaagtaggatacaaaaagcacataccataaaataaatgaatgctaaattggactttatcaaaattgaaatgtgctttttcagaaaggaatgaagaaaatgtacaatatgggataaaatgtttacaatagataaatctgacaaaggattgtaaagaactcttacagttcagtaatagtaaccccattttttaaatgcacaaaagatttcaaagtatacttcacaaggtaagataaaacagtggccaggagctacataaaatacttcatattattaattatcagagaaaagcaatttccagccataatgaactaccgctctttaccctctacgtatggctaaaatttaagagactgatagctccaggtgttggcaaggatgtggcacaagcagaactttcatatcctctgttgagaatgtaaagtagtactagtttagagaacagtagtttgttttaaagttaaacaacagttactcaaggatacagtaattccatgcctagatatttatctgagaggaatgaaaacgcagaggcttctccatgagtgtttgtagcagcgtattcatgacggccaaaggctggaaacaatccgggggctcatcaggtgaatggatgaacaaactgtgctgtcccagtccaatgagagctctgagcaggaaaaaggagc

SEQ ID NO: 8993 - DNA, 1047 bp, Homo sapiens
actgcactccagcctggttgacagaaaaaaaccctgtctcaaaaaaaaaaaaaaaaggaaatttgttggtaacttactttatacctaaatacaagatcagtttttgaaaacattctatgtatgtttgaaaagattgtgtattctcttgttgtggggttccggatttcatgtgttcgtttgaatattggtaatgttagcatttttttctgtttaattatcaattactaagagaggtatgttaaaatatgcccctctgataagtaagcttgtcactgtcttatacttttgtcagtttttgtggtatttatttttaagacattttattaagtttatataggtctagaattttcttcctgatgattctctctctagtaattctattttgtctaatattatctattccagctttcttttgattattatatatctggtataactttctagtcttattctaggtgaatcttatgaagaacatataagtaggttttgttttataaatctaatctatatcttttaccttaggagtttaatatatttatacttactgtggctattgatatccataggtgtttttttctgccatcttaacttatgctttctatttgttctttttttgggggggcggtgtctctatttctggatgactctttagccttctttgtctccttttgaattcgttggtggtttttctctcattccatttttcttttcttttcttttctttttttgaaacggagtctcgctctgtcgcccaggctggagtgcagtggcgcaatctcggctcactgcaagctccgcctcccaggttcacgctattctcctgcctcagcctcccgagtagctgggactataggcgcccaccaccacgccccgctaattttttgtatttttagtagagacggggtttcaccatgttagccaggatggtctcgatctcctgaccttgtgatccgcccgcctcggcctcccaaagtgctgggattacaggcttgagccaccgcgcccggcctcattccatttttctaaactatgcattcgaaagataga

SEQ ID NO: 8994 - DNA, 1042 bp, Homo sapiens
catgggggtctgcattgtctccctgatacaataatttcctttcctttgaaccgattcccagtagtgggattgctggatcatgtggtagttttatttgtagttttttgaaggaacctccatgctgttctccatagtggctgcactagttcacattcactagttacaacagtgtagaagagttcgcttttctctgcatcctctccagcatttgttattttttgtctttttgatagtagccagcccaactggggaatatgatacctcattgtggtttcgatttgcgtttccctgatgattagggatgttgaattttttttttatatgttcgttggctatttgtatgttttcttttgagaaatgtctgttcagatcgtttggcgatttttttaatcggattttttttttttttttttggccgttgagatatttcagttctttgtatattctgggtattaatccccccatcagatgagtagtttacaaatattttgtcttattcttttcactctgtagattgtttcctttgctgtgcagaagctttgaacgttcttgtacctgtcttgttgtggtgtgccttcctttctcttgggttcccttgggagctggttataggagtagacacacacaaacacacacacatatatgtaaaatctaatcaactaccaaatggttttctcgagtaactgtaccattttccactgtccccagccatgagtgtaagttctggttaccctacatcttcaccagcacttggaattatcagcctttataattttgctgtaaaattattttctgctgtagaaaaaccaattaaagcaggagtgtcatcagggaaagactcttctcttcaggccttgtatcctacattttcactgcatgagaagcgcccaccagtgaaacacagggtagcaggaaacctggggtgggcagctaactaacccagcttcctaatcactgagactacttcgttacaatgtcttgccagacacagtcagcatgagtcatcctcacaactatatctaggagtctttccatcaaatgt

SEQ ID NO: 8995 - DNA, 1033 bp, Homo sapiens
cttcatgataaaaatcctcaaaaaatgggtataaaagaaacatacctcaacacaataaaagccatatatgacagacctatcacttgtatcagactgaacggagaaaaactgaaagcctttcctttaagatctggaacaagacaaggatcatcactttcaccactgttattcagtatagtactggaagtcctaactagagcagtcaggcaagagaaagaaataaaggcatccagattggaaaggaagaaatcaaattatccttgtttgcaaatgatatgctcttctatgtggaaaaacctacacttcacaaaataactattagaactgataaaatcagtgaagttgcaggatacaaaatcaacatacagaaaataggtagcatttctatatgtcaacagtgaacaatctgaaaaagaaatcaagaaagtaatcccatttacaagagctacaaataagatacctaggaataaacttaaccaaagaagtgaaatatctctatattaaaaactgtaaaacattgatgcaagaaatctaaatagacacacaaaaaatggaaagatattccatattcatggattggaagaatcaatattgttaaaatgtccataccacccaaagcaatctacagattcaatgcaatccctatcaaaataccaatgacattcttcacagaaatagaaaaaaaaaatcctaaaatgtatatggaaccacagaagacccagaatagccaaagccatcctgagcacaaagaacaaaattagagaaatcacattatctgacttcaaattatactacagaactatagtaaccaaaacagcatggtgctggcataaaaacaaacacctacaccaatggaagagaatagataatctagcaataaatccatacatctacagtgaactaattttcaacaaaggtgccaagaacatacactggggaaaggacaatctcttcaataaatgatgctgggaaaactggatatctatatgcagaggaattaaactagactgttgtctctcactatatacaaaaa

SEQ ID NO: 8996 - DNA, 1033 bp, Homo sapiens
ggaacccatgaaagctaaacccctggggaagggtagtaaagatgaggacagtagtgcaccatgcttgaaagggctgggctgggctgggcctggctgcgatcccgtgacacactgcactccgcatcctgctacctgcacacgcagattacttctagcgaatttgaaattcagatagtgaatttgggatacaaagttttacaggtatttagagcacatacttgggtggtgagagttcatataatcatataatgaggctactgctgttggaaggtgatgtcctatagtgacaataactaagataaaggggaccgagagggctggggtggaggaagttaacggattccctacggtggtcacggtagacctggttgagaagatgacatttacccaaagactttgagggaggtgagggccatgcaggtatctggaggaagagccttccaggcagagggaagacccaggaccaggccctcaggccttcatattctgtgaatatatgctctgagctgagaaatcttaaaagaaccctaagcactgattacttttttcaacttttattttggaaaaatctcaaacgtgcaaaagtagacgaagtagtttacaattccctcgaaccccttactaagctgcagttgttatcaacttatggccagtctcgtttcgtctgtgtccccactgtttcccttcaccagtgttattttgaggcaatccgtacatcataacatttcacccacaaatatgtcgatatgtatttcaaaaatgtaggcagtatatttaaacaaaacctcgataccattatcacaccttggccagacgcggtggctcatgcctgtaataccagcactttgggaggccaaggggagcggataacttgagatcaggagttcaaggccagcctggccaacatgataaaacctcatctctactaaaaatacaaaaattagctgggcgtgatggcactcacctgtaatcccagctactcaagaggctaaggcaagagagtcgcttgaacctgggaggcggagattgcagt

SEQ ID NO: 8997 - DNA, 1048 bp, Homo sapiens
gcaggatccggctgcaccgcattgcgtctcccaggcctagacaagctaggcgcgccctctgtaggccaagcgcgggcacggtgcgggctgccggctgggggacctgggcacacgggagactcaggcgtccggggaccgcctgtttacctaatccggggcggacggcggtgtggccccaggcccggcgcccgcctgcccgcaccctcgtcctcacagacgccacagccatggccatgatggtgtttccgcgggaggagaagctgagccaggatgagatcgtgctgggcaccaaggctgtcatccagggactggagactctgcgtggggagcatcgtgccctgctggctcctctggttgcacctgaggccggcgaagccgagcctggctcgcaggagcgctgcatcctcctgcgtcgctccctggaagccattgagcttgggctgggggaggcccaggtaggtcagtctggggcactgaggtgggaggtcactggagggatcgagccttcaagaggaatccggtaatgtaggagaagaatctgagcagggaaccgtctgtttcctggagccccatgttaggaccccagtaaataccttttgaagaaataaatgcactttggcgaccccagccctgccctaagagaccatgatcacccttgcccccacgcagagccccatttccggctcccctctacctaagggagactggatggcatatgagaacagaaagaaaatccttaaggaaacatagcctcccaccaattaattcttctattcactcgttaacagatgagttattgagggccagccagggtgttaggtggatacagggcccaacaaaatagacaagattcctgccctattagagacaaaaacacacatacagaaataattggttgttacaaattgtgatgagttctgcagagaaaagaacaagattttatgatagctcgcagcagcgagtcttgtctactggtcaggcaggacttctgtgaggaaatgacaaactgaaacctgagggaagaaatgaaccagcctccaggaaaggg

SEQ ID NO: 8998 - DNA, 1117 bp, Homo sapiens
aggggggcaccccccaggagccccctaaccccaggtgagccccccaccaaggtgagcctcaagaaccacccagcaaccccggatgagctcctgacccagagtgtgccccactgaccccaggcaacctccccatccctctcaggctccaccacccaccagtctgttccctccccagccccacccttctccctgcccccatctcccgtgagttcctccttgggcaaatcccaggctgtccttttccctcaggatgaagcgggccagttccctcaacttcctcaacaagagcgtggaagagccgacccaggtaggggcaggcgggtgtctgggcactgggcagctgcggccggggctgcatgcgtgctgccaagcttccctccagcatgcctcttcatccagcaacagttcctggctctgtctcaggcctactttgggctggacaacggggagacacgaggggaacccagcctctcctgggggtggacgtgtaaacggccagtgctaacaccgtcactgtggagatggacgggagtgtcagggcaccagggtgtggccttgggtcagaactgccattgcctctgcccagctcagggattccggctgcctctgccaggtcagaccccttcaggccagggaggcacagactggcagcagcacagggctgagccacctgccccctctgcccacagcctggaggcacaggtctctctgacagccgcactctcagctccagctccatggacctctcccgacgaagctccctggtgggctaatgctgaaggggcagccagtcaccagagcgcccacctggcacacccccctcaccccagccctgcgcatgggcctgctgcttgtcccgcctgtctctcccacagcccctgtcttttctgttcaatctcagggtaaccttctcccttgtcatctcagcctgagccctggaggctgggcctgcccactccagctccatcccttatttattccttccagcagggccctcttccctaggttcgggccagcaggaggtgccggctggagtctccaccatagactcagtggcctggcctccccagaccccagagccaagaacactaagcactcgccggcccttcggcaccct

SEQ ID NO: 8999 - DNA, 1044 bp, Homo sapiens
ccagggcccacctgactgccatatatccagtgatcttatttcagcacattgacctctcgtggctttggacactgctctcttctctctccttgaaaagtggaccatcccccgctcctcagtctcctgcagcactcgattctctattgtcagtgtctatttgctggtctgtccagtgctgcctcccatcaccctgtgtttggtgcttccccactgccctggactctcctccttactcttgtgcatggctgcggccactctgtggtttgcttctgccttgtgttctgtgattcctgcatctaacagccgtggctgtggcttccctcctctgtccatgtctacactggcactttgtgtctgtattaatcctgatcttcatgatcttctctagtaaactaaatggtgaggtttgtgttttctagatgaggaaacttgcttggagaggtgttaagtaacttgccaccggtctcacgggaagggcaaagccagttttggagggctcttggcttttgagcacaccctttcccaccctcaagcagcctctgcagaactcagatgtccagcgctggcctcactgtctctccccaaaccagcgcctctatccccatttttaatatttttatttattttaagacatggggtctcactctgtcacccagactgcagtgcagtggtgtgatcatagctcattgtaacctcaacctcctgggcttaagggatcctcctgcttcagtctcctaagtcactgggactatagacacacaccaccatgccccagctgcatccccatctttgtgacacaatccttgtcagcctgaccagaaaactcttccctcccccatccagtcagtctcgagtcccctctattctctccccatcatctttctgaaatctgtcccctcataataatagcagtgatgaggataatagcagctcttgccaattaagcacttgttatgagacaagcctgtgttcattctcttcatgctcacaatcagcccttctaggaggtactgtttatagaaatgaggaaactgaggctcagag

SEQ ID NO: 9000 - DNA, 1092 bp, Homo sapiens
gctattgtgtgttaatcttgaattctgcaactttgctgactttattagctctaaaagtttgtgtatgtgtgtacgtgtctgtgtgtgtgtgtgtgtgtgtctctgtgtgtatgcatgtattccttaggattttctatatatgtatatattatgtcatctgtgactatgaatagttttacctctttttcagtttggttaacttttgtttctttttcttgccattttttttcccaccccagtgcagaagttcatttcttgccaaattgctctagctagaacttctagtacaatgttgaggagatgaaacggtgaaaccacgtatccttctcttgttcctgatctttgggggaaggctttaggtctttcgccattaagtatgatgttatttgtggatttttcataaatgccctttatcaggtgaaggaagtttccacctattccttgtttattcagcatttttatcttgaacgagtgttggactttgtcacatgctttttatcttgaacgagtgttggactttgtcacatgctttttatcttgaaagcgtgttggattttgtcacttgctttttgttcataaattgaggtgatcacttggtgtttcctcttcattctattaatgtggtgtattacattgattgattttctttttctttttttgagacgttcttgctctgtttcccaggctggagtgcagtggagcgatcttggctcacggcaacctctgcgtcctgggttcaagttattctcatgcctcagcctccggagtagctgggattacaggcatgcgccatcatgcctggctaatttttgtattttttagtagagatgccgtttcaccatgttcgccaggctggtcttgaaatcctgacctcaagtgatctgcccgcctcggtctcccaaagtgctgatattacaggcatgagccaccacacccagcctttcttttttttttttttttttgagatggagtctcgctctgtcacccaggttggagtgagtggcgcgatcttggctcatggcaacctctacctcccaggttcaagtgattctcctgcctcagcttcctgactagctgggattacaggtgtgc

SEQ ID NO: 9001 - DNA, 1088 bp, Homo sapiens
taggcatttatagctataaatttccctctaagcactgctcttactgcatcctgcaagttttgctatgttgtattttcgtttgcatttatctcaaagtatttcctaatttcccttttgatgtctttgactcattaatttttaagaatatgttgtttaatttttacgtatctgtgaattttccagcttttcttctgttgttgatttccagtttcattccactgtgatcagaaaagaccctttatatgatttcagtcttttaaaatttattgagactgtttcgtgacctaacataggatctgtcctggagaatatttcacaagcacttgaggttatatattcttttgtttataggtagagtattctatatatgtctgttgtggttttggatctaaagtgagtctcttatagacagtttatagttgaatcactttttgtttaattaattaattttgagacagggtcttgctctgtcacctaggctggagtgcaatggcacaattacggcttactgtagcctctactgcctaggctcaatcaatccttccacttcagcctcctgagtagctgggactaaaggcgcacgccaccatgtgtgcctaatttttaaattttttgtgtagacatgaggtcttgccatgttacctgggttggtctcaagctcctgggctaaagtaatctgccctccttgacctcccaaagtgctgggattacaggcgtgagccactgtaatcccagttgaatcattttttttttttttgagacggagtttcgctcttgttgcccaggctggagtgcgatggtgccatcttggctcactgaaacctccaccccccgagtttaagcgattctcttacctcagcctcccaagtagctgggattacaggcatgcgccaccatgcctggctaattttgtatttttagtggagatggggtttccccatgttggttaggctggtctcgaactcccaacctcaggtgatccgcccgcctcagccttctaaagtgctgggattggcggggcgcagtggctcatgcctgtaatcccagcactttgggaggctgaggcgggtggatcatgaggtcaggag

SEQ ID NO: 9002 - DNA, 1062 bp, Homo sapiens
gaccagcctggacaacatggtgaaaccctgtctgtactaaaaatacaaaaatcagccgggcgtggtggcaggcgcctgtaatcccagctactcgggaggctgaggcaggagaatggcttgaaaccagaaggcggaggttgcagtgagccgaaatcacgccatcgcacttcagcctgggtgacagagcgagactccatctcaaaaaaaaaaagaaatgttaaatatcttcacataatagaatgtttaatggctagtttattcaccattgagtcccagcatctagtccagtacctgacataaagtaggtacttgataaatatttgtggggaagtgagtagatgctaaaattgaacatgtagaaagtattacgggagcgccaacgagaacaatggattctgtctggaggcaccaggaggtagtaatgtgtgaactgggcattgaaggatgaatgaagtctatcaagaagtcaaggatgagaggatggggaaggcatttcaggtagaagaaacagcacaagcagaaggacagagacttagaagttcatagcatatttggaaagaataaatgtgaagttagaaagttgagacccatataaaataactaccacataaaatagtagttaagactatggctttggattcagacagaactagctctaccacttaatagctgtatgacttttacttaacttctctaagacacagcttcctcatttgagaaatgaggctaataatggtgcctacttcataaggttgttgaaagccaggtgtagtggcacacacctgtagtcctagctgcttgggaggctaaggtgggaagactgcttaagcccaggagtttgaggctgcagcgagccatgatcgcaccactgcactccagcctaggtgacagagcaagacccagtcgcttaaaaataataagactgttgagagggttaaatgaaacgatgcatgcagtttctgatgtggtccctggcatatactgcatgctcagtatccaggagttcttgggtaccccctttctggccggagcacagcaatgggaagggtgataggaaacaag

SEQ ID NO: 9003 - DNA, 1051 bp, Homo sapiens
gagttaagggtggctttagaggctcagtccccgcgacgccgcgctggttggtgctcctgcgccggaggagttctgcgtctcggggtggtgactgggtccagaatggcttcggattcggggaaccaggggaccctctgcacggtgagggtcgaggcttcgtgtggagcctcgccgggcagagagcctcggcccctgggatgatcgttaccttgggaagaggagaaggagtgggcacttgggttggggcctggggccatgggatgaaactagggtgcgagggtagcaggggccctgcgtgagtgttggggggtgactcccatggtcctggaatggtcatgagagatcatgaagaaggtgcttgaagaggggttaagtggggcttgttcccagacccttgcggtggtcatagggtaggtggtgaaacaaagtcataccaaggcacttccccagcgatcatcggttggtccctgccgcccttgcagttggagttcgcggtgcagatgacctgtcagagctgtgtggacgcggtgcgcaaatccctgcaaggggtggcaggtaagaacagggtaaacttttctgcagacagtccagaagcctctgggagggaccaggcgaatctattaggcgaaccctactcccattttacagatgcagaaagtgaaccccagagagtgaaaggcatgttctcagagttacacacagacctggaggcagagcctagagtacagctgtccagcttgccctgacagattctaactgcctgtcttgttgtcctgaacctcaggtgccccagagactgaggagctaggctgagggagttcctgggaaaacaggcagtttttgcttgggaaacaacataatcttgacaaagcaaacagcagctcaggccctataccatcctgggtagctttctataccactgggtgtggtggctcatgcctgtaatcccagcactttgggaggccgaggtgggtggatcaccaggtcaggagatcgagaccatcctggctaacacagttaaatcctgtctctactaaaaaatacaaaaaat

SEQ ID NO: 9004 - DNA, 1048 bp, Homo sapiens
cacctcccgggttcaagcaattcttgtgcctcagcctctcaggtagctaggattatagacacgcgccagcactcccggctaattttttgtatttttagtagagatggggtttcaccatgttgatcaggctggtcttgaactcctgacctcaagtgatacacccacctcggcctcccaaaatgctgggattacaggtgtgagccactgcgctgggactaatttttatattttttgagacatggggtctccctgggttgcccaggtttgtctcaaactcctgggctcaagtgatcctcctgccttggcctcccaaagtgctgggattataggcattgagtcactgcgtctggccaaacttcttactatgtgtcttacattgtgttcaacacttgttattgctcaaaatggccttatccttcatacatacctgccaagagaaatttttattagagacaaggcctccctgtgttgctcaggctggagtgcagtggtgcgatcacagctcactgcagccttagcctcctgggctcaagtgatcctcccatctcagcctccagagtagctgggactacaggcacacaccaccacacctggttaatttttaaaattcttttcatgtagatgggggtctatgtttctcaggctggtcttgaactcctgagctcaagtgatcctcctgcctcagcctcccaaagtgctaggattacagggatgagccaccacacccatccccaaatttacaattaaaaaactcttaaacctaaaaacaaaaatgtggtaaagccagttattttataggtaagatgatactcatatgtgtaaagaatctagctgggtgtggtgggtcatgcctgtaatcctagcacattgggaggctgattctggaggatcacttgaggctaggagtttgagagcagccagggcaacaaattgacccccgtctctacaaagtaaaaattaaaaaattatctgggggtggttgggcatggtggttcatgcctgtaatcctagcattttgggaggctgagctgggcagaccacgaggtca

SEQ ID NO: 9005 - DNA, 1048 bp, Homo sapiens; identical to SEQ ID NO: 9004

SEQ ID NO: 9006 - DNA, 1048 bp, Homo sapiens; identical to SEQ ID NO: 9004

SEQ ID NO: 9007 - DNA, 1048 bp, Homo sapiens; identical to SEQ ID NO: 9004

SEQ ID NO: 9008 - DNA, 1034 bp, Homo sapiens
gtacactcacgcggcaacccccaggcgcgggtttggacagggcttccagaatgggaggagccctgacttccaattgtacaaagttttcctgggagcccgccggtcccagccccacccgggccagagaccgccttacagactaggcctctctgccgccggcgccgctcgcgcgcgttctcctctcttcagccctccctcttcttcccaaccccctctcccgccacgggctgtggcggttggtcgtccctttcccaccccctcagctaacgagcgggctctaggccctctgggattggctgtgcctgagcacatcttccctcagcgtttctgattggtcgctggacgcgcgggatgcgagtccccattggctaggccagggcgcctgcgcggcggggttctcggtcgccagccattcctgaggaggactgccggtcgttcggacgtcttgcctgtcgctggaggagaggtccgggctctccaggaaggtggctgcggcgacaaaatgaagatattcgtgggcaacgtcgacggggcggatacgactccggaggagctggcagccctctttgcgccctacggcacggtcatgagctgcgccgtcatgaaacagttcgccttcgtgcacatgcgcgagaacgcgggcgcgctgcgcgccatcgaagccctgcacggccacgagctgcggccggggcgcgcgctcgtggtggagatgtcgcgcccaaggcctcttaatacttggaagattttcgtgggcaatgtgtcggctgcatgcacgagccaggaactgcgcagcctcttcgagcgccgcggacgcgtcatcgagtgtgacgtggtgaaaggtaacgcggaggcgcgctcgggggcgggggcgcgctcggggcactctgcctgttagccacgccccttacccgggggtcggtcactgcgcggttgggaggggtggggaagtgcgcgggagcaggtcggaggtgttgggggcgcgttgggtagagccaccctcctcccctgcggtccaggaaccgtccaccaagtag

SEQ ID NO: 9009 - DNA, 1663 bp, Homo sapiens
ttttcttcgagaaaaatgtgtcaccataatttaagcctgactagggacccagttgactttttcatagcttgagtttttatcccttaagctctttatcttttacattggcaagatttggtgggacagccgttgtgtatgtggccagtctctgctccacttgggaacagatcagagttaactttgccctgtcattttggaagatgcagcctgggagtatctgatgccctactcctggtgggttcatacctgctcataccctgtgtgagaagtttcagggataggaaataaatgtgggtgcaagtgcttatttatcccaccaagatatttcatttgctgtcctggaaaggcacatgtttggggccattcctagtcctttaagtgggggaaatataaagggtcatagtgtccactactaggaacaagtccttgttctgcattaatactgcattctattttcctcaactcaggttatacaagtccacgactatccggaatcgggctttcctgctgggtgctctgaggcaggctgtatggtgcatggatttttgcttttgtttagagtaaaagagtggtgggggagggtctcagattgggtacttgtccagcaaaagggtggggtatatgagtctcatttgtgagagttttgtgtttaattgacttaccaagtttcttttgtggttgttaggtagagtggctactaggttgagagtctagagtcaaacatctgaagggacagtctccctggaactcaggcttcttgctggctttcaggtggtagagaaagtcaaaaatttgcctgaaatttgcttgggacccaacaccaagtgacgatgcgggtgaagtgcataactgcacatgaatttttagaactcctggctgactccttgtgagagttagacggagttttgtgcatcttgttcctttgtaaacatttgattagcaaaaatgcattgacttactccgggagtggtggtcaactatttgcagttacattgttgtgtaacagagctcctgacatacttcgatgtaagagactgggaaagatttgaacatcatatcctccactgatgtctttttatctgtttgtgatgacggaaagtgagggttgaaagttgggagtgtagtagaagcgactggctctctaaagagcgtactcatttcttatgctgggaatggtcatttgattgagtctccttgtgttggctgacagggctttgaaaagcacagaagcttggtgttgcaccagacaaccagctctgttttatttcacaggaaaaaaaaacaacatagttgcttggttactccaggagcttagataggatttgtagaacagaaatctcaatagcaacagtggattgtaaccactccacagcttcctcctattgggtgttcaaagatgaacagcttccggaaacatgtacagacttgtggggagatctgaaagacaaaagaggaaaatatcttctcttcatttttgtgagtgactgtttcttcttcctatacagagctctgtagtttcaagtttaagattttttctttttctttttttttttttttagacggagtctggctctgtcgcccaggctggagtgcactggcgccatctcggctcactgcaagctccgcctcctgggttcacgccattctcctgcctcagcctccc

SEQ ID NO: 9010 - DNA, 1663 bp, Homo sapiens; identical to SEQ ID NO: 9009

SEQ ID NO: 9011 - DNA, 1663 bp, Homo sapiens; identical to SEQ ID NO: 9009

SEQ ID NO: 9012 - DNA, 1663 bp, Homo sapiens; identical to SEQ ID NO: 9009

SEQ ID NO: 9013 - DNA, 1663 bp, Homo sapiens; identical to SEQ ID NO: 9009

SEQ ID NO: 9014 - DNA, 1663 bp, Homo sapiens; identical to SEQ ID NO: 9009

SEQ ID NO: 9015 - DNA, 1663 bp, Homo sapiens; identical to SEQ ID NO: 9009

SEQ ID NO: 9016 - DNA, 1663 bp, Homo sapiens; identical to SEQ ID NO: 9009

SEQ ID NO: 9017 - DNA, 1049 bp, Homo sapiens
ctgcctgtgctttgtgagtgtggacatgagaatttctttccattccttcattccctgaagttttctccttctgtgtagtagataagtatagctttgagaccggcatcctgtcttctcctaccacagcttattcaggtcataatgagagctgcaggggtaacctggttagcagagcctgttagctgcagtaattgcagcttcataccttataggtgagaaaccagatctttctggtaagcagtctgctctgtgaacagaagcccaaggtgtaaggtatacctctgtcccttaaagaggaaacagtggaggatgcagtgtggtctgggacagggggattgggcatgaactcagccagtgggcttagtttctattcccatacctcattggcttacacagggtccatcttctctgcttctaagcctaaatttttagtcatattacacagtcctgccttataccttgacttctcagggatagattatgtagcaaaggggcattggaagagctgtgattctggtcctgactctaacacactttgagtggggcaagccatataaaaactcttgagcatgtatgtccacctgttaaatggaggtaatgattctttgccctgcctacctcacaggattgtgaggcccaaatgaggtcctcctgtacctaagagtgctttgaaaacttgggaagtactgtgaaaaagcggagagatcatattggaatgttgtgaactgcttgcttgttgcagtctatctctcttgccttaattggacatgggctgagagatgggtcataccaaaacgtgagtggtcatttccagtgtttgagagttaggcctcaaaagtgagctaggcctcaaaggtgtttggtgagtttgggttgagaacactgaagaactgagtgatctaggaacgctttctgcattttgttctgctggtttgtacttacaggagatgtgaagatttttatcctgtgttgcagttcatctttgctccttcttctctcaccaggaagttgggtgagatggcagggtttgtaaaggggagaatgggaag

SEQ ID NO: 9018 - DNA, 1076 bp, Homo sapiens
gagaccactgtgatcacaccctccctgtccccattggcatctccccaatgcccacctggagtcctcccctcaattgtctcattcaccaactgtcttcttctctcgactaggtatggttccgaccggcgtttagccgagctctctgattaccgccgtttatcagagtcgcagctttcgttccgccgctcgccgacaaagtcctcgctggattaccgtcgcctgcccgatgcccattccgattacgcacgctattcgggctcctataatgattacctgcgggcggctcagatgcactctggctaccagcgccgcatgtagggccatcctgggatggggcaccacagggagggagggagaaaagaggtgggtagggttacagatccaggttataactactctggcccatacctttcctggttgtggtttttcatgccctctaccatgtgggccttccccaggagatgatcctgttaagtgttcggcagtaacctactttgttccttcgcctcagcagcaaatcttgctactggctctagatctgcggtttcccctctaccctgcctcccgtctccccagaatgggaatttcttttatgtttttatttttttcctggctcccttttatttttgtgcgcgatatttaaggtcgtctggatggggaagcaacctgcagctgaggtcgccggcgcctttttctttttagatgggaaggaggccaggaaagggtcagcttaaccatttcctatgtgccaagctgtgccagcagtccagggtaccctgactgtccctctgtagactgttgagactgagttcctgttgggacagtcagttggtatgtatccaagtccctgctgaccactaatgttctagctgatggtgagcggcacagtcccacttccccatctccccaagtaggtggtgttagaaaaccttaattttttttcccttttgtatggactacaaataaaacttggggcaatttgcagtttggaaacctggttgtcattgtcttgattgcattcagtgtcaaaggagccaatttgacatccaggaagacatgatagctaaagggaaggc

SEQ ID NO: 9019 - DNA, 2511 bp, Homo sapiens
accattttcactgacttttctccagttcaggaataacctgtgttccaatgggatggttctggggtttggcctcttaggaagtggggaatgggctgctgtggtatttacaggctagtagatcctttaggcagtaggctggaatgagtgctggggctgggacccagaaaggaaccagtagtggagtgggggtaatggcgttgcctgatactgccctatggttggaataaggaagggcagagaaaacttgaagcaggtatggggcattctggccatagagctcgtattttgcctgttgagctgtaccatggagcatcctcctgtgtcctgccaacccctgccattatagtcaccggagactcctttacctatccctatctgttagggttttcagatgtcctctcgctgggtttatatttgaaggtatagaatctgggaaagggtggggtgcaagctaaccaaatagggatgctagggttgggtggggaattgaggactcttctgtgcttttattgtagggctggggatcgaggatctgggcaaaaaatatgacatttccaaccagggacaaaatggaggcttgggcttagtgatgggtaaatggaagactggttgagtgggatgataatgggagaacttactgatgctcttttgggaaaaggtgctttaaagactcgatttgggagcctactggggcaaggcgactggggaggtgtacgtgttagtcaagtggaggtcaggtgggttatcttctgcctccttcactggcttcatgtgaacttgcctgtgacagaatatcttgccctagatgtcctcttccctcttgccatcgtgcaaaagcattcgatcttatgaccgtgagttcttatttgtggatgctaactggggtaatctcagggagtactggggccatggctctttcccttgcttctctttctgctcactgctttgctttcaggtgcttagctgctcctttttatttctttgcaggactgggaaagcatgggaggaggattttgataagtttcttgttctctgcgtggtgatggggtggtctgagggccaagttaataagcctacctttggttattaccctggaaaattgagggttgatggtagggttatgattgtggcctgtgtatttgcaatttttctttgtcagtgtggctttctgtcatcttcctttttctccagtgagggttctgccactgtctcaatcccttggttcctgcaaaaaacagctaaatgtgctctcagggccagtggtgatgttctgtgttgcagccccagctcttgaaagtgacctggcccagatgagctctgcctgcttgtcatctttaggtcctgctgcccctgctgcctcagccctcaggctcctaactgctcaagccagaaggagctacaaagccaaatcatttgtcatttttctctggcagattgttttaaaatctccctcccctcttttattttaattatgccacctgtgttaatcctatagcctgcttctttgctttgtggattactgatttcaagttctataacttggggaaagttaggttgagtgaatgggaggacagacactgaatgtgtgttttggaaaaatggactctctatcttcagattattcagcttctccacctatcacctctacaacttggccttcattggagaagttttagttggcttattcctggaacaagaccacctagaggcttttagccttgtcagcctgccctcttctgaggtttggaccttgttttaaattgtgtgcatggtgggcttgagactctcttgtaatggaggtaatgggactatcactgaggggttcagcctatccaggtaggctaccgttctagtcatacccatcacttaaattctgccacagtctgcacagacggttggtcctccaggcatattgtcctattaagccaaataggtggacatcatgggatggatgaggtcatcatgaaaacagatttactggatttatggacctagtatatactatgtaacagatggaaaactgaattttacaatctataggtacctttgaaaggtcataaagggtaaaagtctatagttttccagaaaataattcttaaaactgggttttatgtctagatttaaatcatgtatctgtctgtagtgcttcaaatgtggccaggtgtggtagctcacacctgtaattcccagcgctttgggaatttgaggcaagaggattgctagaggccaggattttgagaccagcttcggcaatacggtgagaccttgtctctaccaaaagaaaagaaaaaaaaaagccagctgtggtggcatgcacctgtagttctagccacttgggaggctgaagcaagaggattgcttgaactcaggagttggaggttatagtgaactatgatcatgcgactgcacttcagcctgtatgacacagcaagaccctgtctcaaataaacaaacaaacaaatgccttgctcagctagctgaggcaggctttgggctgaccttgagggattt

SEQ ID NO: 9020 - DNA, 2802 bp, Homo sapiens
gcacaggatcagaattctgcattttacgtgaagaacctctcaaaaacatgtcaagcgacacttataggaccagaatccttgttaagctgtcctaccttacacaaactctttaaagggttacagctcttgttgcttttatattatacctgtaccaagggattgtattttgagtttaaggccactctagaattacaaggctgattttaggacttcctggggaggaggcactggggttttaggggcggtaatgactgtcttttcattggtttggggggctggactttataagattttggtgaatagagcacttagatttgtgttatcttggagtcttaaccaaatgaatcttttgtgcctggagggcagcatgggtgatatgtggattgtcacttcatttggaagcatctcaaatccccagcattttgaatgcctacatgttgctcaaaggaaatgcttgttagagcattttggattttgaattttcagatttgggatgctaaaatggtacgtagaacgcaaatattccaaaatctgaggtctgaagcaacagtggcagttcaggggtggtgatcatggtgagttgctatctgaactcttctttcacctcctttgggttcccagtgtcaaaaagagtggtgtccttttttagcttaattaagcaggactgaacaaaaataataaaaaataaaaaaagccttattcaaattatggagtatttccgtgactccttgctatatttcaaacctgtgttctgacagtgtagtttgccgattctttttctgggtactacctttgttaagagtcattgctgcctttggcgtccatttcccttaaattgggcttttttagagctgagagtctgatcattatttcccctagtaatgggtgccctgtgtcatgggcattgctgtgcgttagtaaagaaaagtgacacaggtctctcaggtctagtttgctttcttttttttaattggcaagttgagaattattttgtcaacaacttaattgagagcaaaggttgctcttgtggagggtttatggtgtgatacctaatttttggactgtttcccacacttcagcccagtcagaagaggtggtgtctgcttgtagcagttaggtttaaggagaggacagtgtggtcttgattcaggacaaattatccttatataaaactctgggtgtctgaaccctaggtcccctgacactaacctatgcttagttatttttaccttattttatgtaatattggcgtttctcatttcttaatactgttctggtagaattatagatgtatattgatgagcagtagttattagggtggtcttttttcctttccgtttctcagtgttgggtatcttctctattgcttgcccacttaaaatctcttttagatattttttaaaatttaacttctttttctggcgttagaaccaacagatccttagattaaggcgtttattaatgatctttatgtctggaatgtgcatagttgcttgcttagttgcacttgttttctctggttttgttaggtgccaaagtggccccctgggcaaatgccagagacaagctagcactttaaggcacttaagtgcataattgcatatctactctcttttaataacctgcaacctaaacttccagctgtgtagacctccttgatattttgttccttccacccccgtttccctattgtgttttctggtctcccagaatctaacattaattttgcaaggaaaattgtgtgtttaccactttctctaatgttagaggatccatttgttgactctcccttgcttttgaccatttactcctttgacaggtgtatgtttaggtgcatcataaccaattgcattgggaagtttttgcaggatttggatctcttctgaattttgcttaccagtaagctggtagatcatgttaggtagaaattgcttctgtagagacttactaaaacttagttttaacttttctagaaaagtttctgcttttattacattttcagaagtaatacttttcatttccagaatgcaaattttaattttcaggaaaaatattaggtgtatgttcttagttacgctctcagatatgtagttgcaggagaagtactttaattctgcttaaactgagcagtttggtccactgactagtataactagttattctccactttcctcaggcacgttttcttccatgttttttacagtattctaaaatttcaggcatttgagaacaatctgtcctgtttttgccctgtttgcctttgaccctagtagagggtcactaaaattaactgtcagattgtaaagaatcctcgttaaagcaatgatcagaaccagcagtttaaagggcccagttaagggagaagtctgtccttcaacttgttgtgcccctctgtctccccagttcatgagggtttttccagagatgtaccttgagatttgcttgccacattcagctgtggattgagtctagatcattctttaatagtggtaatcattggagtcttttattcggttcttttaaattttttgaggagggtggagaactggcctttacttatattcctttgcttaatgaaaatccatcttgctagtaaggattggaggtgtcagaaaagacttgggcactgtttcttactttgacttcttttgactttgagccgctgtttggagatgatttttacctgtttggagatgattggagcaagagtagtttatttcttaagcatttaaactgttgttatagctgaaatatttcttcatctaagtggtcttttcctgaaatcaggtcattatactgaat

SEQ ID NO: 9021 - DNA, 2802 bp, Homo sapiens; identical to SEQ ID NO: 9020

SEQ ID NO: 9022 - DNA, 2802 bp, Homo sapiens; identical to SEQ ID NO: 9020

SEQ ID NO: 9023 - DNA, 2802 bp, Homo sapiens; identical to SEQ ID NO: 9020

SEQ ID NO: 9024 - DNA, 1047 bp, Homo sapiens
aattccgagctgcggttgtgcatgagaatacacccttcgtggtaccccatctccgggacgttctcggctctgtgcgttcagtccctcaggaaccgtggaccttaatttaccttgctaagttcagaccttctcttcctttcctttcctttcctctcctgcccattttcctgttcttctgtccttcaatacttctgtagcttcccattcatgttctcttctcccagcaggcctcattgtgtgcagaaactgtggtgggggctgtgctgtctcctccctgcctcctgcctcctgcggctgttggatttgggaatgaccttggtgagagtctcactgctccagggtctctttttggtccaaaggctagacctatagagttggatcactttttttctttccggtgaaataaatggtttttcaacttagggtatgtgtgctttgcgagacttcttgcttgggcttgtttgggggttcatttgtaccttgaaggggagggtataaagttttaagacactcagctttgggtgaacgtcactgtagttattttgtttattgtaagtaggacttgtaggtgccagaggaaggaggttatacagaagcccaggcaggcagccttattccaatgaagacttttcccactggtccacctttgttataaaaccaactacttttagtttacagatgtaggtcttctcttctagagaaacagtcaccaccttcccttaagactaccattccaatcacccagtcagtgtatctagcttaacttaatttccagggaaaaggaggggtttaggggaagaggaagtcagttttcgctcttcgtgccatgtgaaaaaatgaagctgtggctccaagagtactttgctaactaggccagtgacatgtgttgatgcctttcaccatctatttgtttagctctgccaaaatccaaagaatgcctgaatggtcccactagcacctcattacttgggtttacagcctttaaatcataggcatggagaaatgacccaacatatgaggctttagataccttgttgaatgatgggg

SEQ ID NO: 9025 - DNA, 1047 bp, Homo sapiens; identical to SEQ ID NO: 9024

SEQ ID NO: 9026 - DNA, 2171 bp, Homo sapiens
tgggaggatcacttgaacccagaaagtcaaggctgcagtgagctaagatcaggccactgcactacagcctgggtgtctcaaaaaagaatttgtctcaaaaactttttgccaggcgcggtggctcacacctgtaatcccagcactttgggaggctgaggcaggtggagcatctgagatcaggagttcgagaccagcctggccaacttggtgaaaccccatctctactgaaaaatataagttagccgggcatggtggcaggcgccttaattgtggctatttgggaggcagaggcaggagaatccttggaacccgggaggtggaggttgcagtaagctgagatggagccattgcactcaagcctgggggacaagggcaagacttctctcaaaaaaaaaattttttttttaatttcttgattctattagagcaagtcatttttgctttctgctttgagatcctgatctccctgtaacagacaatgtaagagtagttttttcatgactcagaatctggcctggtttaatgctatattcatactagatgcttttgcattttctcttttttaaaccatttattgcttttgtttttgtttttgttttttgagacagagtctctctgttgcccagactggagtgcagtggcatgatctggctcaccgcagcctctgcctcccgtgttcaagtgattctcctgcctcagcctcctgcgtagctgggattacaggcgcctgccaccacacctggctaatttttgtatttttagtagagatggagtttcaccatggccaagctggtctcaaactcctggactcaagtgatccgcctgcctcctaaattgctggaattacaggcatgagccatcacacccagccttaagctatttattgacttgttgagaggaaaaactctatcaagaacaatggcagcctaggcaacatagtaggatcccatttctaagacaattttaaagttagctctttgtggtgatacgcagctgaagttccagctactaagaggctgaagcgggaggatagtttgagcccaagagtttcaagctgtggtgagctgattgtgtcactgtactccagcctaggtgacagagcaagacgaattatttttaagaggtgatttgaaaagattgactataactcactgattttcaacatcaatgtattatgaagttgtttttatgcttccaatcaagtgtatctttgagtggaagccacatagttggctctgtgtaattgacaaggttatgctgccactccttaggaataataaagtactttttcttgctttttgttttttagacatccagctctgtcacccaagctgcagtgtggtggcatgattgtagctcactgtaactttgaactcctgagctcaagggatcctcccgccttggcctcccagagtttttgcagggactatatgtgagccactgcgtctggtcaaaatgtagtttttcaagagtaatgctttaataaactgatttttttcccccatagcatttcactgttcattctgtctagtaaatgtctagctggctttgtatttcgctaggtactccctgattacctgcaattaggttaccatgtggcgaatacaaagatgaatagggcattgtgcctgtcctcactgtgcctccacaagctgctgcttgtctgggccttgggtgtacaaataactggtatgtccttggaagtcagttcggggtgggaatggtcatactattttgtattgatgacatgtgcctcggcctgattctgcatgggtcaaaggacctgtgagggcagttttcagggtgatcttggaatttaacttgatgttaaccctgttaactttgcctttaaagttttccagccaggcgtggtggctcaacgcctgtaatcccagcactttgggaggccaaggcaggcagatcacctgaggtcgggagttcaagaccagcctgtcaaacatggggaaaccccatctctactaaaaacacaaaaaattagccgggcatggtggtgggcacctgtaatcccatctgcttgggaggctgaggcagaagaattgcttgaagctgggaggaggaggttgcagtgagctgagattgcgccattgaactccagcctgggcaacgagagtgaaagtctgtcttaataataataggccaggcgcggtggc

SEQ ID NO: 9027 - DNA, 2171 bp, Homo sapiens; identical to SEQ ID NO: 9026

SEQ ID NO: 9028 - DNA, 2171 bp, Homo sapiens; identical to SEQ ID NO: 9026

SEQ ID NO: 9029 - DNA, 2171 bp, Homo sapiens; identical to SEQ ID NO: 9026

SEQ ID NO: 9030 - DNA, 1050 bp, Homo sapiens
ttacacatgatctcattctgaggtaaaggaaattcccaggatgatggtgatgggaagtcccaggactccctttctgcagtggatttggagaacagtagtccaggttgtagcaagagaaagtacttttttttttttttttgaggcggagtcttgctctgtcacccaggttggagtgcagtggcactatctcggctcactgcatgctccacctcccgggttcacgccattctcctgcctcaccatccagagtaactgggactacaggcgcccgccaccacacctggctaatttttttgtatttttagtagagacagggtttcaccgtgttagccaggatggtctcgatctcctgacctcttgatccgcctgcctcggcctcccaaagtgctgggattacaggcgtgagccaccatgccccgccaacaggaggatttttttagtccgtttgaggtgctgtaacaaaagaccgtaagactggatggcttatacacaacagaattttatttctcacagtttcggaggctgggaaagctgagatcaaggccgtggcagacgtggtgtctggattctgtcttgagtttgcaaggcaggaagggtgagggatttctctggagtttcttttatataagggcacaaatcccattgatgagggctctgttctatggcataatcacctctcaaaagtgtacctaatactttcactatggggattcagattttaacatgaattttggggggacataaacactcaaaactatagcaagattcaactgtgtgtgatatttacctagttatgatcgtagcagctctgaatattaaaataataatctgatgaagtggcgatgggtgggtaatacgtataagagcaaaactcatagaaatgaaaaaattttttttttttggtcacccaggctggagcgcagtggtgcagtctcggctcactgcaacctctgcctcccgggttcacaccattctcctgcctcagcctcccaagtagctgggactacaggcaccctccaccacgcccggctaatttttttgtatttttag

SEQ ID NO: 9031 - DNA, 1050 bp, Homo sapiens; identical to SEQ ID NO: 9030

SEQ ID NO: 9032 - DNA, 1050 bp, Homo sapiens; identical to SEQ ID NO: 9030

SEQ ID NO: 9033 - DNA, 1050 bp, Homo sapiens; identical to SEQ ID NO: 9030

SEQ ID NO: 9034 - DNA, 1098 bp, Homo sapiens
cgggcgtggtggctcacacctgtaatcccagcactttgggaggctgaggcgggcggatcatgaggtcaggaaatcgagaccatcctggctaacatggtgaaaccctgtctctactaaaaatacaaaaaaaaaaattagctgggcgtggtggcgggcgcctgtagtcccagctattcgggaggctgagacaggagaatggcgtgaacccgggaggcagagcttgcagcgagtcgagatagtgccactgcagtccggcctgggtgacagagtgagactccatctcaaaaaaaaaattttttttatttttgagacaaggtctcactttgtcctctaggctggagtgctgtggtgcaaacatgtctgactgcaatcttgatctcccaggctgaagctatcctctcgcctcagcctcctgggtagctgggactacaggcacgcaccaccacgcccagctcagttttgattaattttgttttttttttttttttagaggcaaggttttcccattttgcccagcctagtcttgaactcctgcgcttaagtgatcatcctgcctcagcctaccaaagtggtgggattacaggtgtgagccactgtgcccagcctacagataatttctttttattttttgagatggagtctccctacgtcgcccaggctggagtccagtggcgccatttcggctcactacaacgtccgcctcccaggttcaagtgattcttctccctcagcctcctgagtagctaggattacaggcgcataccaccacgcccagctaaattttttttttgagatggagttttgctcttgttgcccaggctggagtgcagtggcatgatctcggctcactgcaacctctgcctcctaggttcaagcgattctcctgcctcagcatcctcagtagctgggattacaggcatgcaccaccacgcctggctaatttttgtatttttagtagggatggtgtttcaccatgttggccctgctggtttcgaactcctgacttcaggtgatccacccgctttggcctcccaaagtgttgagattacaggcatgagccactgcactcggcacttcttttctttttttttttttgag

SEQ ID NO: 9035 - DNA, 1098 bp, Homo sapiens; identical to SEQ ID NO: 9034

SEQ ID NO: 9036 - DNA, 1098 bp, Homo sapiens; identical to SEQ ID NO: 9034

SEQ ID NO: 9037 - DNA, 1098 bp, Homo sapiens; identical to SEQ ID NO: 9034

SEQ ID NO: 9038 - DNA, 2011 bp, Homo sapiens
ttgtgccaatgacatagaaatcaagatacttttatttatttatttatttttttgagacagagtctcactctgttgcccaggctggagtgcattggcgtgatcttggctcactgtaacctctgcctcctgggttcaagcgattcttgtgcctcagcctccctagtagctgggattacaggtgcacaccaccatgcccggctaattttttgtatttttagtagagatggggtttcaccatgttgcccaggctggtctcaaactcttgagctcgggcaatccacctgcctcagcctcccaaaatgctaggattacaggcgtgagtcacgcacctggtatatgttaaacttcctatgttaaattggttgaaacctagcacagaaccaccagagattttgctgaggccagcaaaacctgcaaattttttttcttggctctgcatagtgccttgcagatcataagaaaatcccagcatctttgccttattttcccttttgtaaaacagagacagtcttgcttccttggggaatactgacgctaacatgagccttatgtacatcaccactggttggaatgtgtgcatggatggacaggttaacttctgtagattgtcagaccattcccctaagaaataagggaaaatttttgcttcacctgtcaagattaagtataaaatatgtgaggtaaatgctttattattgtaggtaaaatttcacatgtagtcagaatttacacatcaacatttccatataaagtacaataaagcttaagtagagttgagtccatcattaaatgtgttctatggggatctaaacaaagataaataagatgtccataatctagaagacatactttactgcaaaatgtcactgctaatcattaatatgtgatttgcttttctgctcaaagtactatgtatgaatattttagccaaagcctaatcctagcagaatattagcaccttgggaagacagacctcttttaatagctcataagtgaatttaattttttatttttttgagatggagtctcgctctgtcacccaggctggagtgcagtggcgtgatctcggctcagtgcaacctctgcctccttggttcacgccattctcctgcctcagcctcccgagtagctgggactacaggcgcccgccaccacatccagctaattttttgtattttagtcttgatctcctgacctcgtgattcgtgtgccttggcctcccaaagtgctgggattacaggcatgagccactgtgcctggcctaattgttttttaaaaattaaaaaaggagaaacactggagaggggtggtaactaggcaaaaatgtgtgtgtatatgtgtgtgtgtgtgtgtgtgtgtgtgtatatatgttttctttttgttttgtaaatatgagccagaaaactatgaagtcaaatttagttaatgtgataggtccttggagagaatctggctcagcctttttctgatgcagggcttactcctagcactactaatctgagtctgttagcctttaaactggtttaagagcagctctggttagagaaaagtagcctcaccaccagctgtagcaaatttagcagtgtctcaagaatctggctaacttcctaccacctattactgaagccacagcactaacctaaatccttttttgttgttttggagacagggcctcctgttgcccagaatggagtgcagtggcatgatcacagctcactgcagcctcaacctcctgggctcaagagtctcccacttcagcctcttgagtagctgagattacaggcatgcaccaccatgcccagctgtttttttttttttttttttttgagatgggagtacagtggtgccatctcggctccctgcaacctctgcctcctgggatcaagcaattctcctgcctcagcctcccaagtgctgggactacaggcactcgccaccacgcctggctaatttttgtatttttagtagggacagggtttcgccatgttggccaggctagtctcaaactcct

SEQ ID NO: 9039 - DNA, 1024 bp, Homo sapiens
aagcaagataagaggggttccactgcacaggaaaaaggggatgccagcataatccttacctagggctgctcagaggctgagaatataaggaacagagtgaaaggctacagagactagtttcaggaggaaagaaaagtcaacttagaagaattaagaaagaaaacatagttggtcacaaactccttttgtttactgaaacatgaagcaatggaaacatcccggcaaaggggaccgcgcggagcaagttctcatatatgaccgcagcccgagggttcagtccgcaattatcctacctgaaagagagcacaacacaagaggcttacacaatgcctggagagcagcctggctccgcgtacaagcgccctgggtcctgtcctgtattccggggggaaaaaaaagaacaaaacaaaaccaagtcagactggatctaactcatatcccatgtaattacctaggagtctatcaatagctatatataggaatccacttatggctatatatataggacaagatgcaatctagctgaagaatgtgttggtgataaatacatctttcttatccatcttttaggcaagataacccctgtgacagaaggctactgttgctgtaacaaagggcatacatacattttcaagaactgcaatttaattttggagtccaggaaaagcagaagatgctgagatgtcatatatggcgaattgcactattctaaatgtgttttgttttaatctttcacagtaaacaagctttcagaaatgatggtcacaaggggtaggatatcaaggagcagccagtcattcacccaattccaacacacctacatgtcacactgtcacagagtgagagccacagttccagtagttcccctaattgaccaaatctcccttgccaaatcaaaagaaatcattcctagaattctctaatccttctattgatgatgggaactccagacaccaatggctgggggaaaaaaaaagttaactcacaccaagttcctctacttattacagacaaagggccaaat

SEQ ID NO: 9040 - DNA, 1072 bp, Homo sapiens
cattatgttgaatttcactgactcttttcttatgtcactctcctagctatttattttgtttagacacaatactctgaacaaacctaaatctgacattttagaagcaagaatacaatttttggggggaaattagagttactaatttaactgggtcatagagatgtattattactgtgatttctaaagaagattatgttttctttgaattgtgctcttttcagattttgagatttttaataattcactggaagtgtgacatagatgtatcaaagggagcattgctagaagggcagctagtgatttccatagaaggattaaattctaagcaccaggcaaatgctcttcattgtgtaacaactagtaagtagagaaagaaaaaatattttctatctcttttgtcatggtttatgtcgtagcttatttaaaaatttcaattagaatcttttatcatgttattccaggattgttccataattataaaatgaaatgattatgtaataagtgtctggtggtagatttacaaatgtatcatacaggaaaggtgagtagttgaatgactcttaccatagattatttattttactggtttaagttaaaattgctcagaaacaatcttatttttctcttgattttaatctactttgtcacagctaaattatattacattgagctttacctactttttttttcccaagtctaaattttggcagtagcaaaaaaaaaaaaaaaaaaggaaaaatgatgaatggtgcatactgtgattagtttgaaaatatctcttccatttggctttcatgcttttatcatttttgcctgttgtctttgagggaaacctgatgcagtgagtggctctgaagcatgaattttcttaaacttgaagtgttagctttttgtgtgtgtgtgtgtggtgtgtgtgtgtgtaggtttattgaagggtactttggattgaagttgccccttcaggcttagagaagtcacttgggcaccaagttgagattggatagtgaactaggctttacaagacatttgcttacctgaacaggaatgacctgtcttgtctttgtgtattaat

SEQ ID NO: 9041 - DNA, 1003 bp, Homo sapiens
gctacgtgtctagggtgatggttggtctgtgtgtggttgtaatagtctaatccaataaactctggccagggtagcaaggttgatttaattcaaagcaaaggactttagccacagtagtttttggcaagaaactcgattctgcattttgagcctgatgaacttctttagcccacctagaatagggggcatttctcttctctttattgtctctgagctttaagtaattatggttataattatttatttatttatttagagatggagtctcactctgtcgcccaggctggagtggcgcaatctgggctcactgcaacctctgcctcctgggttcaagcaattctgcctcagcctcctgagtagctgagattacaggcagctgccaccatgcctggctaattttgtgtgtgtgtgtatttttaatagagatggaggtttcaccatattggccaggctggtctcaaactcctgacctcaagtgatagtgatccacctgcctctgcctcccaaagggctgggattacaaacgtgagctaccgcacccagcctatgtttatatattttttttgggtaggaaacgtggtgatacatgcttgataaaaaacattacagaaacatatattgtggagagtgagactttctacacatctcacgcctttgagatgattattaacattgagtatatattctagattttcctttttccccctacttgccaaggataatctgtcttctagatttttctatgcctacgttcttagttatcaatatccattttttagaactagaactatactatacatatgactgtgctatgtaccagtactttgtgggcagcatttcatgttagcataagggatctatttcattttttttgtaaaaaaatgtacacttatttagttttagtttttgtcagttacacacacatatggttttggctgggtgtagtggctcatgcctgtaacaccagcactttgggagtctgaggtgggcagatcacatgagg

SEQ ID NO: 9042 - DNA, 1048 bp, Homo sapiens
aaagagtgtttggaaggtaaatttcttgagaccttacatctctgaaaacatctccacgtatacctaattgatagtttggccatataggattctaagccagaattcatttttccttcagaattttgatgacattgcagcattattttctaacttaaggtgttgctattgaaaaatctaaaaatctttctgattactctgtatgtgacctgttttttcttttttcttcccctctgtgtaagctttcatttttatttttttgagatggagtttcactctgtcacccagggtggagtgtagtggcatgatctcgacttactgcaacctccgcctcccgggttcaagtgattctcctgcctcagcctcctgagtagctgggattacaggcgttacaccaccatgcctggctaatttttgtatttttcatagagatagggtttcatcatgttggctcggctggtctcgaactcctgacctcaagcgatccacccacctcagcctcccaaagtgctgcgattacaagcatgagccaccgttcccggcctctctgtaagcttttagaatcttctctttatccttgtattaattacagtaaataagggtaggtgctataacaaaccctaaaatctcagtggcttggccaggcgcggtggctcacgcctataatgctagcactttgggagggtgaggccagcggattgcctgagctcaggagtttgagaccagcctgggcgacacggtgaaaccccatctctactaaaatacaaaaaattagccaggtgtggcagtatgcggctgtagtcctagctactccagaggctgaggcaggagaattgcttgaacctgggaggcggaggttgcagtgagccaagatcacaccactgcattccagcctgggtgacagagtgagactccgtctccaaaaaaaaatatatatatatcagtggcttaacacataaaatgtttagttttcttgtatttcacagtcagatgaatgtgtgtgtatgcaggcaagcaggcaagtattttgttttatgctatctctgtcttg

SEQ ID NO: 9043 - DNA, 1051 bp, Homo sapiens
ggtatatacccaaaggattataaatcatgctgctataaagacacacgcacatgtatgtttactgcggcactattcacaatagcaaagacttggaaccaacccaaatgtccaacaatgatagactggattaagaaaatgtggcacatataccatggaatactatgcagccataaaaaatgatgagttcatgtcgtttgtagggacatggatgaagctggaaaccatcattctcagcatacttttacaaggacaaaaaaccaaacaccgcatgttctcactcataggtgggaattgaacaatgagaacacatggacacaggaaggggaacatcacacaccagggcctgttgtggggtggggggagggggagggatagcattaggagatatacctaatgttaaatggcgagttactgggtgcaacacaccaacatggcacatgtatacatatgtaacaaacctgcacgttgtgcacatgtaccctaaaactttcataaaaaaaaaagaaactgtggtattggcaaaagaataggtaaatagtgtttttttgctcaattttgagtatttttaaatactcaaatacttataattccctgccttatgagattatttttgctctgaaaagctagctgtcaagaaaaattcaaggaaaaaaatagtcttttatattcacttatttatgatttctggtgctcttcatttcttcctttatagctgggtttccatcttcagcctgaagaaaatcctttagcaaatcttctagcagcagattatttcatcttctatcttaaaatgcctttaccttaacctcatttttaaaggatattgcactggaatatctggcttgatagttttctccttttcaacattttgaaagatgttgtcaattgtcttctgcgctttattgtttttatttatttattttattttatttttttggagacagagtctcactctctcacccaggccggagtgcagtggcgtgatcttggctcactgcaacctctgcctcctgggttcaagtgattcttgtgcttcagcctcctgagtagc

SEQ ID NO: 9044 - DNA, 1024 bp, Homo sapiens
gtatgtcaggctggggtactgggtctctaacacccaacacccaactgtaaaaggctttgtcatctctctcttcctctttctaataatttttttttttttttttgggagggagtcttgctctgtggcccaggctggagtgtagtggcgcgatctcagctcactgcaagctccgcctcccaggttcatgccattctcctgcctcagcctcctgagtagctgggactacaggcactcgccaccatgcctggctaattttttatatttttagtagagatgggctgtgttagccagatggtctcgatcttctgacctcatgatccgcctgcctcggcttcctaaagtgctgggattacaggcgtgagccgccgcacccagcttcctctctctaataattctatgagtagatcttaaaagggtcctctaaccccttttaaggggttagttgtgttgtattaattatcctctctgacctgacattagtcactttatcctaactctgggataggtgtcggtccttctgctgtattcctttagcacctcatttatctaaatttcacattgtcatataaattagtctgtctcatctactgaactgtgaactcttctaattctgagattgtcttatttatttttataagcccaggtacataataagccacattaatattttatgagtgagtaaatgcatatattgagtagccatacataagcattgcttgtcaggctccataaaaaataatgatggattatatattaccccattcagatagctacctgtatacacagaaaatgaacatttttggagaggcagcattggatagtagaatgtggactttggagttagtcagctctaggtttgaatcccagtgctgccacttaactagctgtgtatgaccttggacaaattaattagcttattgagtctcattatcctcttctataaaatggagttatttcttacttgcatagaaactgcttgacatgtagcaagtagtcagtaaatatcatcattattcattgtagt

SEQ ID NO: 9045 - DNA, 1037 bp, Homo sapiens
cttgtcatttgtaagtgccaggtgtcagcttctctataagaaaagcagaagtaaaacttttttttatgttgaaaactgctattttaagttatttatgtatttgaatctattctaaatgacctgaagacatgtgccttcttctcttcaggccttattttacacagaccctgctagttccaatcccatttaggcatgagaagagaagactatgaatttaaaactttacttgaattcttggctagagagatagtatgaatacaaaggaattcagtgtacattattttctgtgcatcagcattttgcataggtttggaaatcatctctctgcccatctccatcttcttcagactccaagaaagtaaatctggccaggcgcagtggctcatgcctataatcccagcactttgggaggctgaagttgatggatcacttgaggttaagagtttgagaccagcctggccaacatggcaaaaccctgtctctgctaaaaatacaaaaattagctgggcatggtagcacatgcctgtaatcccagctacttgggaggccaaagcatgagaatcacttgaacccaggaggtggaggttgcagtgagccgagatcacgccactgcactccagcgacagagcaagactctgtctcaaaaaaaataaataaataaaaaatgtaaaaaatccatggaggaggtggtaaacaatatggaacacacagagcccttctgtcttgccttcctgtgccatttaactaccacagaatccaaagtgaaaatgaattatgtcaagaaaagacctaacatatgcttaagtccaattaatttattttttctttttttgagacagggtctcagtctgttcaacccagatgccatcatagctcactgcagccttggtctcctgggctcaagtcattttcccacctcagcctctcgagtagctagtagctaggaccacagaaatatgctaccatacgctgctaattttttttttttttgagacggagtctcgctctttcgcccaggctggagtgcagatctcacc

SEQ ID NO: 9046 - DNA, 1048 bp, Homo sapiens
tgacagtagaccaaattttggtacaattgaatcacactgcagcagaattcaccctgtgctaggacatccagtaatgcttttcatccctgaagacgtggctggcatggacttgttgggagaactgatactgactccagcagctgcactgtgccccagcccaaaggtttcttccaaccagcttaacaggatttcttcagtttccatatccttttgatgaaaagttccatccaattatctttgaaatgggtttttatatcccagttttaggaaagcctttagtatgtgaattctgcatctacaaatatatatgatttgtataaaaacatataatctaatgtgaaagccaagcttgaaaattttgccagggaactgaaaactgtaaaatgtgacacatgccatgcgtttttcatacaatccaatatgactgaagcatgaaatgaatggtgcacgaggaagagatgggactagaaaagtagtctggagttgaatatggtagatcttgagtgccatactaaggattgtgaattttattctctgtatagtaagaaaccattgaatgttttgggagaagtctttagcagcattatagagtacggatgggagacagaagttagtaatactaagtaaataagtaagtgaactggattaaaaataatgagtgcttgacggctgggtgcagtggcttacacctgtaatcccagcactttggcaggccgaggtgggcggatcacttgaggtcaggggtttgagaccagcctggccaatatggtgaaaccctgtctactaaaaatacaaaaattaggccgggcgtggtggctcacacctgtaatcccagcactttgggaggctgaggcggatggatcacaaggtcaggacttggagaccagcctggccaacatggtgaaaccccatcttagtaaatacaaaaattagctgggcatggtggcaggcgcctgtaatcccagctactcaggaggctgaggcaggataatcacttgaacctgggaggcaaaggttgcagtgagccgagatcgcagccactgcactc

SEQ ID NO: 9047 - DNA, 1035 bp, Homo sapiens
tagctcactgcaacctcgaacttctggggttaagcagtcctcctacctcagcctctcctgagtagctgggactacaagcatgcaccatcatgcctggctaatttttttatttttattttttgtagagacagggtctcacccccgagtttccaaatttaatgaaaactataaacctgcagattcatgatcaatgaaccctaagtgtaagaaatatgaagaaaattataccaagtcacatcataatcaaagtatttgaagccagtaataaaaaaatcttaaaagcagctggagataagacacattatgtatagaggaacaaaataattatggcagatttctcactggaaacagtgttagctagaagaaagtggggtaacatctttataaagtactgagagaaaaaaggcaaaatgaagaatttttcagacatagaaaaggtgaaagaatttatcaccagaagacctgtattataagaaatgttaacagaaatcttttaggtagaagaaaaatgttgccagacggaattctgaatctacccaaaaaaggaagagcactggaagtggtggctatgcgggtagatacaaaatacttttgtccttttaaaaacacaaaatatccttcttgagtatataaaccaaaaagcatccaagacaggtttcaatcagtttagaagtttattttgccaaggttaaggatgttcctgggagacaggtctgtgcctttctctaaagatggttttgaggtcttcagtatttaaaggggaaacgcaggctggagaggaaagatggaggggatgatcacattattgaatccatatgttacaagagaaaaggagcaagtaggggaacagtcaattatgtatttgtcttgtgctcagtaaagtggccctttatataatagaaggtgaacattacagtagctacctgtagaggtatttaaccctttatctgtagctatctgcttaggaacaaaaggagagacagcttcttgcatgactcagctttcagctaaattatttccttttggcatagtgat

SEQ ID NO: 9048 - DNA, 1016 bp, Homo sapiens
agtcccagctactcgggaggctgaggcaggagaatggcgtgaacccgggaagcgaagcttgcagtgagccaagattgcgccactgcagtccgcagtccggcctgggcgacagagcgagactccgtctcaaaaaaaaaaaaaaaaaaaaaagaaatctgtgtgttgtctgttactttatgtactctaagagaatatggtctgtttagaataacaaatcagtcttgagattccaattaaaacatgtaactgaggccaggcgtggtgactcacatctgtaaccacatgattttgggaggctgaggcaggtggatcgcatgatagcagtttgagaccagccctggcaacacagtgaaatcccacctctacaaagaaaattttttaaaaggccaggtgcagtggctcatgcctgtaatcccagcactttgggagaccaaggcgggcagatcacaaggtcgggagttcgagatcagcctggccaatatggtgaaaccccgtctctactaaaaatacaaaaattagctgggccacgcctgtaatcccagctactcgggaggctgaggcagaagaattgcttgaacccagcaggcggaggttgcaagtaggccaagatcatgaaaccgcattccagcctgggcaacagagtgagactccatctcaaaaaaaaaattttttttaaatcagccaggcatgacgtgcatgccatggtcccagctactcaagaggctgagatgggaggatcgcttgagcatgggaggtcgaggctgcagtgagccacgatcgcatcagtgcaagccagcctggggcacagagcaagaccctgtctcaaaacaaaaaacatgtaactgagtagttagtttagacgtgtgattttacatagaaattttactaagtttaaaatcagtactggcagatgacaaacacatgacaagatgctcaacatcattatcattaggaaaattcaaattgaaaccatgagataccaccatatacctttttaaatggctaaaatttaaaag

SEQ ID NO: 9049 - DNA, 1029 bp, Homo sapiens
gttctgaggtaacaatgatttatttctgtatttctttttctttttggagacagggtctcactccgttgcccaggctagagtgcagtggtgtgatcattcctctttgtagcctcaaccgcctggctcaagtggtcctcccatctcagcatgtagctgggactacaggcatgcatgtgccaccatgcctggctaatttttaattttttctgtaaaggcaggctatccctgttcgggctgctcaggctggtctggttttttttgctcagtctggtcttgaactcccagactcaagcgatccaccttggcttcccaaagtgctgggagtacaggtgtgagccactatgcctggtgtgcttgtcaatcttgatgaaattgagagtttttagcactttcacctagcaaaaaaaaataaaaaataagaaattgagagcttttctaaaagatgttattatcgcatgttcaatcctgttaacctgtcttacatataattatgaaatagctaaatcatttatctgttacaaggaactgcggccactgaaactctggcaatagtcccacctttccttggtttacctttgaaagtgcctccccaaattcagcagcgattaccagattatcttttttaaattaattaatttatttatttatttattttgagatggagttttgctcttgttgccgaggctggagtgctatgacgcaatctgggctcaccgcaacctccctctcctgggttcaagcgattctcctgcttcagcctctgagtagctgggattacaggcatgcaccaccatgcccggctaattttgtatttttggtagagacggggtttcaccatgttagccaggctggtttcaaactcccgacctcaggcaggcgatctgcctgcctcggcttcccaaagtgctgggattacagttgtgagccagcacacccggccttttttttttttttttttttttttaggcggggtcttgctctgttgcccaggccggagtgcaatggcactaccactgcagcatcagcctc

SEQ ID NO: 9050 - DNA, 1040 bp, Homo sapiens
ataataataacactcttactccacggtgtgtaggctgagtactttctctcttttgaggctactttagtgttttcttttcttttttttttttttttgagatggaatttcgctcttgtcgcccaggttggagtgtagtggtgcgatattggctcactgaaacctctgcctcccaggttcaggcaattctcctgcctcagcctccttagtagctgggattacaggcgtgtgccaccacgcctggctaatttttgtatttttagtagagatggggttttaccatattggccaggctggtctggaactcctgacctcgggtgatccacttgccttggcctcccagaatgctgagattacaggcatgagccacgactttccgcctactttaacattttcttgctaacgtctgtctgcttaacatcctgaattagatagctataaatatttgatagccagtgtttgattatgtttcaaacaaagatggcacattctttcttttcatgaactttgaacttattgcacttgatctgttaaaacggcagtattgtgcagtttgtgtgtatgtcaaggcttttatttatgtatgtcactcatatccttgttttctgttttaaattttaggttcttggggtttttctctgtctgtgagtacttggtaaaaagttaaaccctaaagataaaaggcagcaaatagtgaccaaacgaatgtttttggcaaatacattggtgaaggcctccttcaggtaggtagagaggaggagggaagagggtggcctttcaggtggtaaagacagcataagctttatactactactataaggcctattctgtggatctctgatagatgagcagactgaagtaggtggtgtcttttgaggggcactgctgataacgttgggtagaaattttaaacaactttgaaagccaagtatggacatagccattagaagttttgttttttttgttttttggatatggagtctcactgcgatgtccaggctagagtgcaatggcacgatctcggctcactgtaacctacgctt

SEQ ID NO: 9051 - DNA, 1054 bp, Homo sapiens
cgcatacctataatctcaactactcaggaggctgaggcaggagaatcacttgaacctggaaggcagaggttgcagtgagccaagatagtgccattgcacgccagcctgggcaaaaagagtgaaactccatctcaaaaaaaacaacaaaaaaaaaatgagatagaccttctcattaataacaagagctagcggggcactgaggcatgtgcctgtagacccagctacttgggaagctgaggcaggagaattgcttgagcccaggagttcaagtccaatgtgagaaacagccagagcctgtctctaaaaataaataaataattaatgaacaaaaaatagcaaattagatggaaggaaagaacgcctttatttgtggctgacggagcttggacttctctttcctttcctttttgcctgagttaactgtggacaaggtggactagtggccaggcacagtaattcacacctgtattccccacactttgggaggccaagttgggaggattgcttgaggctaggagtttgagactaacttgagaacgcagtgtgatcctgtctctattaaaaatttttttaaattgaaaccaaaaacaaaagaaaaacaagactttagtgatggctgtgatgacagcatgatcatggtaaactgtgactttttcaatctatagaaattgtatccacgtgaaacctttgaattgtcttcactttggagagtatctagtgtatcacaaatgtttagttttcagtctacagatcataggttatgtgcaagcttttgcttagacagtagattaggaaaattagtatgttgtagtacagtgttttgcacagtttttaactgacctgtagcaggaaatacattttatattactacgtattactattatatgcatggatatatgtaactaacatgtttcaggaagtggtatttactcatagtgtgttttctgatttactcaaatttcatttaaaaaatacacactgttgtgacctaaattgatttttgtgactcatgctttaagatgatctggaaaagtggttctcaacatgtggtctg

SEQ ID NO: 9052 - DNA, 1040 bp, Homo sapiens
cagtactatctcctggccacttgtgggtccttgttagactaccgactcttctgttcatctaaaacgtgaaagtcacagatatcccaggtagaggaaagttcccaaatctctgttttattcatccccttactgtttctgttttaaaccctggccatctgcctgttgccatgtattccttagtacctagcacagtccctggaatatagtaggtgctcagtaaatccgttgaataatgaaaatgctcccctactcgtcacaagacagaacactcaggggacctcagaaaacctacctgaatatgtaatagtctgtaatttgacctcttttattaaagagcctccaggacagtaattccctgtttaaagcttccctcttgatgagacattcttacagattgtggtccacagatgacctgcatcagaattgcttgtgatattgttaaaaatatagactctcagagaggattgtaggaagatggcagagtagcaagcaccaggaacttttctccttacctagacaataattgcacgggcagaatctgtctgatacaactattttggagttcaggagtctattgaaggcttgcaaatttcagggacagcttggacaataaagtacagttaatttcagtcagtttcaggccttagcacagtaacagctgctccattcttccctgccaaccaagcccatgacaagcagctgtgcatatgtttccccgaaaaacttgcacacagcttataggagccagggtgagcaaagaggaacctttcctccaaataatgggatccatgctgtggtcactgagtgctgcttctgatcacagaagtacagacaaagaggcaggtggggccaggcacagtgggtcatgcctgtaatcttagcactctgggaggctgaggcaggtggattgcttgagtccaggagtttgagatcagcctgggcaacatagcaagaccctgtctctacaaaaaatacaaaaattagctgggtgtggtggcatgcaccaatagtcccagctacgtggggggcaattccttgag

SEQ ID NO: 9053 - DNA, 1023 bp, Homo sapiens
ttgctgtcgccaggctggaatgcagtggcgcgatctcggctcactgcaatctccacctcctgggttcaagcgattccctgcctcagcctcccaagtagctgggattatgcccggctaattttttgtattttagtagagatggggtttcaccatgttggccaggatggtctcgatctcctgacctcgtgatctgctcgcctcggcctcccaaagtgctgagataacaggcgtgagccactgcgcccgaccaagggaacacttcttaagtctttctgtgaggccagcattaccctgataccaaagcgagacaaagacagtacaagaaaactacaaatcaatatcctttttgaacaatgatgtaaaactcctcaacaaaatacttgcatactaaattcagcagcatattaaaaggattatacaccatgaccaagtgggatttattcctggaatagatgatttgacatgtgaaaatcaatcaatataaatttcattaacagtgaaggaggaaaaaagttacatgatcatctcaattgacacagagaaggtatttgacaaaattcaacaccttttcatgataaaaacacttaacaaactagaaataaaaggaaactaccttaacataataaaagctttatatgaaaaaccctcagtaaatatcatactcagtggtgaaacaccaaaagcatttaagatcaggaacagcgtaaaggcgcctgcttttactgcctctattcaatgtagcactggaagtcctaacagagcaattaggcaaaaaaaggaaagaaaaggcatacaaattgtaaaggaagaagtaaagtcacctctgttggcagatgatatgacttttttatttgttattagtatttttctttggttccttctatcatgtgcatctttacacttagttttgctgtttgtcaaatatttcaaatatacataaaattacggagaatatcattaacaaaatgaacacccatctataaacccaaaatgaagatccacttgtgtacaacttagtaagaa

SEQ ID NO: 9054 - DNA, 1288 bp, Homo sapiens
gtggcaggcgcctctactcccaactacttgggaggctgaggcagaagaactgcttgaacccaggagcgggaggttgcggtaagctgagaccatgtcgttgtattccagcctgggcaacagagtgagaccccatctcaatacatacatacatacatacgtatttattgagacaggggtctcgctgtgttgaagaagctggtctctagccccaggcctcaagctgtcctcctgtcttggcctcccaaattgctgagattataggcgtaatctcactgcacctgtccaccattttagatactaatcttgccaaagttatttttaaaatttaatctcatttctttgagtgtttctacttatattttctaatcttttatgataaattatttcagcaattttagcattcatgactttaatccttttgtttcttttctagtattagtttaaaatgttccatttctgttctctttgtgtatctcagttcttgcttcaatgacagcaaataaaaatcctggtcttgtggaacagctgagtagtacatcctttcccaaactgggggagggtggttgctttacccccagctgtcccagcagctgctcagccagattcccagatctagcatctttcaaaacatctcaaccttggtaactcagataaaagtctttctgaggcgtaggtcctcctgtgtcaatggcacatctgaattactaacaacgtgttcttttcttaagttatgttatctagtcagttgatcaggagttatatatactgtggaccctgaaaacattatccctgcattattgagtaaatcatgtaaatactgcgagaaggtaaaaaacaccacaaaagcaatgtggcataacactttgtgcattacataggcacccaatacatattggtgattgcctagtaaaaaatagagggctctcagtgctgcttacctgcctctaataaaaatgtaggtggtattaaaccacaagctagaccatcaggaaggaggtacaaggatagatccacaacctgctcttggcctttatctcagcaagctacctggcttctgtactcctactttgattcacctgctgttgcagcagggttttaggaggatcctatttgtgtatctaagattcaacattcatgaaggagcagaaatacttggatttgcctcttagctcttggagctggagagtggatgacttcctgcaaggcacgatttttggattggcttctcaattattacaggaatcctcaacttttagaattgccagcctattcatctgatcttgaaagt

SEQ ID NO: 9055 - DNA, 1033 bp, Homo sapiens
gtatttggttgagaatatggactctgtagcaaaactgtcctgagctacactaattactagctgtgtaatcttggacaagttacttaaatgtgaagtgcttagaacagtgtctggcatatacagttgacccttgaacaatgcaacggctagaggcaccaacccccagcaagtcagaaatctacatataaattggaattcctcagaaacttaactaccaataacctactgtttactggatgccttatggataatgtaaacagttgattaacatattttatgttatacatattatatactgtattcttacaataaagtaagataaaaattccttaaatcataaaagaacatttgtttactattaagattgaaaatatatttactatcttttcatcttcatgatgagtaggctaaggaggaagaggtgggattgcttttgctgtctcaggagtggcagggatggaagaaaattcatgtataagtgaacccatgtagttcaaaccagtgttgttcaaggatcaactgtgctgagttctcagtaaatgttagctattactttgaccatcacaattttatctaagtgctctggtccatacccagagtatgagcgcacctcattttattgcactttgcagatagtgtatttttttttttttttaacaaattgaaggtttctggcaaaccttcattgagcaagtctgtagccgccatttttccaatagcatatgctcacttcatgtctgtcacattttaaaaccttttcattatgccgggcgcaatggctcatgcctgtaatcccagcactttgggaggccgaggcgggcggatctcgaggtcaggagatcgagaccacggtgaaatcccatctctactaaaaacacaaaaaattagctgggcgcagtggcgggcgcctgtagtcccagctatttgggaggctgagtcaggagaatggcgtgaacccggaaggcggaggttgcagtgagctgagatcccgccactgcactccagcctgggtgacagagtgagactctgtctc

SEQ ID NO: 9056 - DNA, 1046 bp, Homo sapiens
aaaataacaaggtatttaggatattacataaagtgagtttataaagcagcagtagggtttgagaggattgactccaattttgaaagacgttctaccatgggtaaaatgatatcaaacagcattgcatgctacagagaagtctctttgtgaaaggaagtatcaatccatgttgcaaactttattgttgtcttattttaagaaatgtcagctgggcatggtggctcacgtctgtaatcctagcactttgggaggctgaggcgggtggatcacaaggtcaggagattgagaccatcctggctaacatggtgaaaccccgtctctactaaaaatacaaaaaaaaaactagccaggcatggtggcaggcacctgtagtcccagctactcaggaggctgaggcaggagaatggcgtgaacccaggaggcggagcttgcagtgagccgagatcgcgccactacgctccagcctgggcgacagagcgagacttcgtctcaaaaaaaaaaaagaaaagaaattgtcgacccgagaaacagcgagatcttgtatcggcaaaaattaaaggattagccagccattgtggcacgtgcctgtagtcccagctactccggaggctaaggtggaaggattaccagagtccaggagtttgtggctgtggtgagctgtgattgcaccagtgcactccagcctgggcaacagagcaagaccctgtccgtccgccgccaaaaaaaaaaaaaaagaaaaacggtttacacttcagcgaaagaaaaagaagttgctatatccaccccaaccttcagcaaccaccaccactctgatcagtcagcagccctcaacaatgaggcaagttcctccacaggccaagattatgactcactgaaggctcagatgattgttagcatttttagcaataaagtatttttaaataaaagtatgtaccttgttttttagatacagtgctgttgtacacttaatagcctacagtataatgtaaatatatgcactgtgaaaccaaaaagttttgtatgacttgcttactggaatagttgct

SEQ ID NO: 9057 - DNA, 1076 bp, Homo sapiens
tgtgtcgcccaggtccggagtgcagtggtgcgatcttggctcactgcaacctctgcctcttgaattcaagcaaatctcttgcctcagcctcctaagtagctgggactatggccgcgtaccaccacgcccagctaatttttgtatttttagtagagatggggtttcaccatgttggccaggctggtctcaaactcctgacctcaagtgatctgcccgcctcggcctcccaaagtgctgagattacaggcgtgagtcaccacacctggcctcccctacattcttgaaggaaagcatttacttgttatttcttaaattatggttaaatacaggtaatataaagtttaccatcataaccattacgtttttttctttttgcatagaacatttcattgtcatgtacccattttaaagcataccagtgtcatcaagttttttcacagtgtgcaaccatcaccactatctagttctagaatttcatcaccccaaacaaactccatacctttgagcagtcattctccgttttctcctccacttaactcctggcaacaacaaatctattctgtcttggtgaatttgtctaatctgtatatttcatataaatggaactatataatatgtagccttttgtgtaggcttctttgatacagtgtgttttcttttttcttttttttttttttgagacagagtctcactgtgttgcccaggctggagtgcagtggtgtgatctctgcttactgcaagctccgcctcctgggttcatgccattctcctgcctcagtctcccgagtacctgggactacaggtgcctgccaccacacctggctaattttttgtatttttagtagagatggggtttcaccgtgatagccaggatggtcttgatctcctgacctcgtgatccacccacctcgacctcccaaagtgctgggattacaggcgtgagccaccaaacccagctgatacagtgtgttttcttggtatatccatgttgtagcatgtattagtacttcattcctttttatggtcgactatttccttgtatggatcaaccacattttgtttattcatatcatggt

SEQ ID NO: 9058 - DNA, 1034 bp, Homo sapiens
gtggcacgatcttggctcactgcagcctccgcctcccaggttcaagcaattctcccacctcagcctctcaaatagctgggattacagggacacaccaccacacccggctaatttttgtatttttagtagagatggggtttcaccatgttggccaggcttgtctcgaacccctgacctcaggtgatccacctgtctcagcctcccaaagtgctggaattacaggtgtgagccactgtacccggccaatttccagaattttaatttaaaaataacaggattggccacacacgttggctcatgcctgtaattccagcactttgggaggctgaggtgggagtatcccttgagcctaggagttcaagaccagcctggttaacatagcaagacctcatctctacaaaatttggaaacttagccaggcatggtggcatgcacctgtagtcctggttactcaagagaccgaggtgggaggattgcttgagcctgggaggttgaggctgcagtgagctgtgatcactgtagcctagccaacattgcaagaatctgtctcaaaaaaataataaaatgataaaaaatgtaaatagaagccgagcatggtggctcatgcctgtaatcctagcacttggggaggccgaaggcagacagattgcttgagctcaggagtttgataccagcctgggcaacatggtgaaaccctgtctctatagaaaaattagccaggcatgatggcgtcccccatgtagtcccagctactcagggggttgaggcaggaggattgcttgagcctagtaatttgagaccagtctgggcaacataataagaccttgtttctacttttgaaaaaaaaaacaaaaaacaaaaactaagcagcaacaagaaaaataacatgattgtagctataaatgtaaaacttgacctggtcaatactttaccattattaaggttgtgaaatgtctcactattccacatgaagccttttttgtggcatcctgaatttattcactctgtccctagttttaatgataaaaatgtga

SEQ ID NO: 9059 - DNA, 1035 bp, Homo sapiens
tgctgtcagggaaacagggagacatctttctgggtgaccgggtatcagattgtcagcgcattgagctcaagcagggctataccttcgtcattccctcaggtaagcaaaatgggaagagtgggttatttagccatttttttccttaatgaaaaagaaattgatggattaccaccaagaatagttatgatgctgggcgtctgcagaaaacaacagtgtttcttcctgtcattatggaatagatgctgaggttttgtttgttttgttttcagtttgaaaaggcagtggttttccaataaagtatatgagaattgccagcagaggcttttcaggtatacacgtttgggctctgcattagccctagtaatttagaatctctatagataggacctgttctgcaggtgatacacaatctatgttgaagaactgcctactattctagggaatggctgtgaaggctggagtgctcagtcagggatgtttttgatcaagtcattaaatcaaagtaagtgcttataaagatcacagattttggagtcacagacctctattaggattctgactatgcatttacctgctagatactacgcttagagcaaatatttaaatctgtgtctcattttgttataaggaatataaatgagaacacatgtaaaccaagcttatccaacctgcaggccacaggcctcatgcagcccaggatggctttgaatgtggcctaacacaaattcataagccttcttaaaacattatgagatttttttttttgcaattatttaagcttgtcagctgtcattagtattagtatattttattttatttatttatttatttattttgagatggagtcttgctctgtagcctcaggctggagtgcagtagcgtgatcttggctcactgcaacctccacctcccaggtcccagttcaagcaattctcctgtctcagcctcccgagtagctgggattacaggtgtgcaccaccatgcccagctaatttttgtatttttactagagacggggtttcaccatgttggcca

SEQ ID NO: 9060 - DNA, 1161 bp, Homo sapiens
tggctcactgcagcctcaacctccctgggctcagttgatcctcccacctcagcctcccaggtagctgggactacaggcacacgccaccacatgcagctaatttttttgtattttttggagatgggtttttgctgtgttgcccaggcttgtcttgaactcctgggctcaagtgatctgcccgctttggcctcctaaagtgctgggattacaagtgtgagctactgcatcccacagtatcttggatttttataaggccagacatttacctctggtaatctcttgagccatgtgtttcatttttatgctcacagaataatttggtgtaatggggcttatcaacccaaatttcagaactttaaattcatgtatctttttctacactgatgactatactcaaagcatcttactttaattatataaatgtatatactgtctttctcaactggggtttcaagagagaattaagcccaaaataaaataatttgtgtatcttattttctcatttttctctaggatgatacacagctaatacccttctagatgcatagaaaaaagttaatttattatatacaatggataccttaaggcaagagttgacaaacttttcctgcaaaggaccagatagtaaatattttaggcttcgtgggtcataaagtgtctattgtaactgtttaaccctaccttgtagcatgaaatacttaaacaaatgagtgtggctcaaataatataaaattttattcatagacactgaaagttgaatttcagataactttaacatgtcacagaatactcttaaatttttttcaaccattaaaaaatgtaaaaaacgatccttttatatagttcatgatcatgattaggtgttcatgcacgtatgtgaaagatgccacccttgaaccttgttactattaatacgtcagcacattacctgtctgacccgaaaaaaaaaaaaaaaggtaaaaaacactcctagttcacaggaatcataaaaagaggcagcaggccaaatccactaagtgttgtttgctggctagcctccaccttagagaatgagagcttattttttagcagaattctaattggtaagggctgaatcatatatgaaagtatagatgatactgggattaaacagcaattagaatatttgggggttgtgatgtt

SEQ ID NO: 9061 - DNA, 1051 bp, Homo sapiens
aaataaataaatagctgggcacggtggctcatgcctgtaatcccagcactttgggaggctgaggcaggtggatcacctgaggtcaggagttcgagaccagcctggccaagatggtgaaaccccgtctctactaaaaacataaaaattagctggtcatggtggtgcacacctgtaatcccagctacttgggaggctgaggcaggagaatcgcttgaacccaggaggtggaggttgcagtgagccaagattgcaccattgcagtccagcctgggcaacaagaacaaaactgtgtcaaaaaagagtaaaaataaataaataaataaatttaaaataacaattagccaggtgtaggggcacacacctataatcccagctgctcaggaggctgaggcaggagaattgcttgaacccaggaggtggaggttgcagtgagccgagatcccaccactgcacactagccttggtgacagagcgagattccatctcaaaaaaaaaataataatatatcattcatgaacagttgttggccagagattcatttgatggatctgatttttctgaaatagacaatcctgatgattcagaccatcctgctgttagttttgtttagaaataactccaaagacagtttttatattttatgttcaccttgaaaatcaatcagatttccagccaggcgcagtggctcacgcctgtaatcccagaactttgggaggccaaggcgggcagatcacgaggtcaggagatcgagaccatcctggctaacatggtgaaaccccgtctctactaaaaatacaaaaaattagccgggcgtggtggcgggcgcttgtagtaccagctactcaggaggctgaggcaggagaatggtgtgaacccgggaggtggagcttgcagtgagccgagatcgcgccactgcactccagcctgggcaacagagcaagactccgtctcaaaaaacaaacgaaaatcaatcagatttccttcagcatcaaagagcatgtttatgtaaaattaaatgagcactggccgcgagctgctcttttattttcta

SEQ ID NO: 9062 - DNA, 1201 bp, Homo sapiens
gcaaatcattgctttctttcccctcttcaggtagattagaaaggaccggggaggccaagtataggccaactgaaaataaactagtctctggtgcccaggtggttgagtcctcctcttccccagtcatttttcctacccaaaacctccgttctctccaccctgcctccatgcttccaggtgtttagtagagaattataggacccaaatctcccatcttcagtttaagggaaactgaaatgataaagatctgagtcagttctcttggattctatctttgtcctcttgtagcccagactgcctcactcagtcacatgttccctctgtggagaggtggatcagaatgaagagacacaagactttgagaagaaactcatggaatgctgtatctgcaatgagattgttcatcctggctgcctccaggtgaggagagctatgaggggttcctgaagtctcagctaatggagtgagtgacacaacagaatgggacacttgtgatgggagtgccagcatccctactgtaggccatcagctctgtggtcacataatgcagtggtctaacatcagcccttgattcatatatgtacaatgtgtcaggcactgcgttagaccctgaggatagaacagtacacaaaatagacccagttcctgtcctcatggagcttagaatctggactctggattgggtatgtagagttcccaggccataatggaactgcatggtgtgttttgggatgcctcaagcctttaggcatctctgatacatacttcagtgtacctctggatattagttcctaagggagagtgaggataataatatcagataacatttaatgagtgctgagtctgtatcagactcagtgcagagctaaatagctttaaaaaaaaaaagtaataaaaagtaataaattcagatctcagcctcagagattgagtccagcatgggccttgtgttccaaaagctcccctactgatccgaattgtgcagcctttgtggagaaccactgtttccttggccttcttagaaagtatcagctaaaatcatgactgtcgcctgacagtgataataagacactgtcattcatgagaagcagcccaatttcagaaaggttaaaatgtgaaaagtataccttttatagatttttggtttttttgaatactatatagtagcaaatctataacagaaacaatagtaggtcagtat

SEQ ID NO: 9063 - DNA, 1029 bp, Homo sapiens
agcatgcgtttcacttatttgccattaagtcgcccgcctgccgttacctgggtaaatggatttgaagggagtgtgagcaatgcaggttggaatctgtgcaggggaacctgggctgttaacccagaatgaggtgtcctattaatgcacaatcaattcctagtagtaagttcccggtgacgtcaggtacaggagcgctccgcagccagtgtttcctccccgtgcctaggttgcacccaggtgggcttggcagagggactgagtgctcaggctggtgggtttgggctccacgcgcttggctgttgctttcagggtatgctcttgcctcggaacacacagtgggaaccaaaagcacagtgtagcccttgaggatgcacagcctccctcacacctgccccttcttcctgggccccttccctactccccgccggctccccatgggtcagtttccactgctggatggagctatattcacgttatttctactctgctgcaactgagatactaaaaatgaggtgtttgactgcagcttttttctaaaacagtaatatcccttctctgctttgctgtttactgcaaaaggacgcgtctatgctggcagaagtgggttttctggtattaacatgttggcagctctgttcccaggtgggggcaattttctgactctagagccatttcgtgtttgggatgggggataaccccctcctggaaaccacagggcatggaattctggaagtttgttcttggtgcattctagcgtaatgcagattacggtctccatgtcagcagtaaattgcagggtgtgggtgctcatgtcatatttgtgaagaagccgtgacatttgacaaggccgccagagtgcctcttcctgagcatccccgcaagggagctgctttgtggccgacacgacgttccggagcccaggctgctgcagaccctggctgtgtgtgcggggccagctggctttttctctcccctgctcagggcttaccttggacctgccggtttgggctggcctttcctatttgatct

SEQ ID NO: 9064 - DNA, 1032 bp, Homo sapiens
attcttccagaccctcgggcccaaagcctggaagccctcacggggctggcctcataacccttctcccggtccccgacagcctgagccttctcccacccacccccttccccttcttcctgcccaagtgttgcctctgcctgggcttcctccgcgtggcgcctccagtggagtcgggccacccaccgccctggaccaagcctcctgagtcctgctctcctgcccactccttggctgtgaagccccctggtttgcaaggccctgccctccgcctcaccatggcctttgtgtgccctctctcctgccccattggccccttgctcatccctggacatactgtcccctgcctgttcccacgtctaccgacccccctggcttcgccagctgccgagatcccacttgcactccaggaacccagtggagttccaccttctccacacaggctttccagacccagaggcctcctctccttcccaaggcttctgcacacgctgtctggtatcacaggctcagaaccatgccctgggcagggctgtttggagcagggggtggctttggcatgaggtacacagtgcctcaggggtagatgtgcagcgggtcctcgtgaccacagcctgggtggccagtccgaccagccctgggctgggctcctaggggcaggcagggccggggtgcagaaaggcaggggccatggcaagcacagagaacctggacttgcggatccaaatctccaccagctgcagtcatttcacgggaggcctgctggtggccccatagacctgcagggccatgtgagcgtgacatgggctcaggtgtgttgtcccttcaggcccccagccttgcaatgccctcagcatggcagctacacgttaccccaggagcccagactagtgaggaccagatgcaggcctcagctggctgttgggacagaccggcagggctgggcttgaggtgggccaggagagggcaggaggggacagtaaggtggtatttgaggccgggagtgtagcctggtgtggcgctcccagacagcac

SEQ ID NO: 9065 - DNA, 1027 bp, Homo sapiens
ggatgtggggagggaggtgaaggacaggaggcagggagacaaacctccgcagtgggagaggaagagatgaaaagaggccagacgggaagaacgtggtccagcagaaacaggctggacttggggctgagtgaggcgggagtctggggaagagggtaggtgtggttgggttggcttcggacatactgatgggatagcatgggatccctgggcacagagatgtcctggagtaagctgaaatgtggacctgggggtggcatcagggtgacaatgggaacggacagtctctctcccagggatgtgggggtcagggagagagaggaggccgtggaagagggttgagaaggcactgtcatggaattaagtgccagtggggagctgtgttcaagatggcagaaatcaggagaggctggaaccaagaaagtcctgtcggggttgagtttggagagggctcagggaagggaccgcctctgagaaaaggggtggccagggagggctgcagtagtggtgagcaggtgagctctgggcattcagaagccttcgggctgctaccaaccccaggacctcacagattgacaccatagcgtggggtggcaaagtgaccccagatggcacaggcgccatgtgactacagggagaaggcagggtaaaaatggcaatcaggccttccagcccagagtctcagaactgaggacgccctacagcaggaagtgatgctcaagctagctggccctcctcaatcatgttccacgtagggaaagggagaatagagggtcagccttggccacctagcaaaaccagggccccagaccccaggctgggcctccagtaatcaagggccggaactgagctgacggaggcctgcaccctagttccggtgtgggtggaggggccggccctgatttcgaaactcgccttcctctcctgacgctggcagccaaccgcagcctctgcaaaagggactcgtgcggcgggcgaaggcagccgttcgccgcgggcggtcctccgccgggacggctctgccgctgcc

SEQ ID NO: 9066 - DNA, 1072 bp, Homo sapiens
gctaggttactgataactcattgtttaattgactgtttaccaaacgagctgtactggtttacattcccaccagcagcatgtgagggttccagtttctccacatcctcatcaacacgtcattattcactcatttgtttttggaatctagccagcctagtgggtgagaagtgatagctcactgtgattttgatttgcctttctttgatgactaatgatgttgagcatcttttcatgtgcttattggtcaattgtatatcttctttgcagaaatgtctattcagatcctttactcattttttatttaacttaattaacttatttattttgagatggggtctggcctttcacccaggatggagtgcagtgacatgatcatggctcattgcaccctccacctcccaggctcaagtgatctaagtagctgggactacaggtgcatgctgccatgcccagctaatttttaaattatttgtaattattttattatatcatttaattgttttgtttagttatttgtagagatagagtctacagactggtcttaaactcttaggctgaagcgacctgcctacctgggcctcccacagtgctgggattacaggcatgagccaccacacctatcccttcacccatttaaaaaattgggtcatcttttgattattgagtcataggagttttataattttagctgttacacttaggtctttgagccattttaagttaatttttgtgtatagtggaaggttcttttgcatgtgactatccagttgtcctagccccctttgttgaaaagactatgtttttcccactgaatggtcttgtcacccttgtcgaaaatcagttgaccatagataaattggttactttctgactcccacattagttccattggtctacatgtctgtctttatgccaatattatactgtcttaatcactgttgctttgcaataagttttgaaattggaaagtgtgagtcttcctactttgtttttctttttcagggttatttcagtattttgggaccctcgcattttatatgaattctattttcttttttctcacaacccagtg

SEQ ID NO: 9067 - DNA, 1199 bp, Homo sapiens
gccacccggcctatagacagaatctttacagaggtgtttttttttttttttttttggatgcagtcctgctctaacacccaggctggagtgcaatggcgcaatctcggcttgctgcaccctccggctcccaggttcaagcgattctcctgcctcagcctcccaagtagctgggactacaggcacacaccaccacacctggagatattttgtatttttagtagagacggagttttgctgtgttggccaggctggtctcgaactcctgacttcagataatccacctgcctcggcctcccaaagtactgggattacaggcatgagccactgcacctggcctacagaggttttaagttaaaatgaggtcttagggtggatgctaatcctctatgactggtgtcctcataagagaaaattcagatatagacacatacagaggaaagatgatgtggagacagccatctataggccaaggggagagaacagaacctagaacagatccttttctcatggctcccaaaaggaatcagccctctcaacaccttgatctcagacttctagcccccagaactgtgagaaaataaatttctgttgtttcagctacccaatctgtggttctttgttatggcaacctgtcttagtctgttgtgtgatgctgtaacagaacatctgagactggataatgtataaagaacggaaatttattctctcatagttccaaaagtgttcaagtcttctgattgcgtcctcacatggcagaaggtagaagaacaagagagaatgaactctgtgtcttcacatggcagaaaagcagaagggcaagagagagtgaacccactcccacaagccctcttcatagtgatattaatccattcatgagggcggagtcttcatgatctaaaaaatcttagaagaccccaccttctaggctgggtgcggtggctcacacctgtaatcctaacgctttgggaggctgaggcgggcggattacctgaggtcaggagttcaagaccagcctggtcaacttagtgaaaccctgtctctactaaaaatacaaaaattagccaagcttggtggcacatacctgtaatcccagctactcaggaggctgaggcaggagaatcgcttgaacctgggagatggaggttgtaaggagctgagattgtgccactgcattccagcctgggcagcagagcaagact

SEQ ID NO: 9068 - DNA, 1107 bp, Homo sapiens
taaaaaattagctggccatggtggtacacacctgtagtccctgttacttgggagattgaggtgagagaatcgcttgagcccaggttaaggttgcagtgacccatgatcatgccactgcactccagcctgagtgacagagggagaccctgtctcaaaaaaaaagaaaaattttgatgccgtattaaatcataactgcataaaattagtacatactgtactactgtaataatttcataaccacctcctgttgctgttgcattgagttcagttgtttcgagtatccacttaaaatgctgtgacactaatcatctctgcatgagcagtttgtctatctagtaacttgcctattgcagtaaaaaggtgatctcttgcagttctcatggagttttcattgtctcgtgcaatgccatcgaccttgaatttcagcataggacccatatgaagtgccactgttaatgctgggagcactccaggaagcagagaaaagttatgacatttcaagaaaaatctgaattgcttgatatgttccacagattgaggtctgtacctatggttgcccactatttcaatagtcagtgtaaggactattgtaaaaaaaaaaaaaaaaaaaaataaaggaaattggtgaagctataccaggaggtgtgaaaatcttgcactttttgcaaaataactttttatctcatattgaaaattcaccttttatgtgcagggttgctataagaaaggagtacatgtagactctaatatgatgtgagaaaaagtgaagtcattatatgacaacttaaagcaaaaggaaggtgaggatctaacgctagagagcttaatgccatcaaaagatggtttggtagttttagaaagaggtttggctttaaaaatgtcaagagaggctgggtgcggtgactcatgcatataatcctagcactttgggaggccaagatgggaggactgcttgagcccagaagtttgagactagtctgggaaacatggcaaaaccctatttctactaaaaatcctaaaaattagccaggcatggtggcatgcacctattgttccagctacttgggaggctgaggtaggagaatcacctgagtccgagaggtcgag

SEQ ID NO: 9069 - DNA, 1120 bp, Homo sapiens
ttttgttgttttttgagatggagtcctgctctgtcatccaggctggaatgcagtagcatgatctcagctcactgcagcctccacctcctgggttaaagcaattctcctgccttggccttctaagtaagtgggattacaggcacgcaccactatgcccagagaatttttgtatttttagtagagacagggtttcaccatgttggccaggctggtctcagacccctgacctcaagtgatccgcccgcctcggcctcccaaagtgctgggattacaggcgagagctaccacacctggcctgggattgccttttaaaattctcttgttattggacaatgcccttggcattgaaccccatcagttcaataccgaaggtgtcaaagtggtctgcttgtctccaaacacatcgtctctaattcagtctctagatcaaggggttcgtaaggaccttaaaggctcattacacatatacatggtactctatggaaaggactgtcaactctatggaagcgaaccctgatagaacatcgtgaaagtctggaaggattataccactgaagatgccatcattgttatggaaaaagccatgaaaaccatcaagcctgaaacaataaattcctcctggagaatactgtgtccagatgttatgcatgatttcacaggattgatgataaagccaagcaaggaaatcatgaaaaagattgtggatatggcaaaaaagatggggtgaagggtttgatatggatctcagaaaaattgaagagcttaatagacaccacccaagacgaattaacagaagatgactcgatagagatgagtgcttctgaacctgtgccagatgaagaagaagatgtagaagcagcagtggcagaaaataattaacattagtctagaagaagggttctgattattcaggaccacttttgacattttttatgacatggacccttctgtgatgcaggcactgaaactcaatcaaacagtggaagaaggattaataccatatagcaggggtccccaacccccaggccaccggaaccaggccatatagcaggaggtgagcaacgggtgagcaagcgaacacaagcttcatctgcatctacatctgctccccatcacttgc

SEQ ID NO: 9070 - DNA, 1029 bp, Homo sapiens
gatggtggatcacaaggtcaggatttcaagaccagcctggccaacatggtgaaaccctgtctctactaaaaatacaaaaattagctgggcatggtggcgggcacctgtaatcctggctactcagaaggatgaggcagagaattgcttgaacccaggaggcagaggttgcagtgagccacgattgcgctactgcactccagcctgggcaacagagcaagactctgtctccaaaaataaaataaaataaaataaaataaaataaaataaaatgaaattgttaagtccctagtaagactaagaaaatagagaaaatataaatccccaattatcaggaatgaaacagtgaaattaaaaatagatcctaaacctaaatgtaaaagctaaaacaatgaaatatctagaaaaaaatagaaaatatttgttactttggggtaggtaaacatttcttaggacataaaaagcagtaacaaaaaaaatgataaattggatttcatcaaaatttaaaactttgggccgggtgtggtgactgatgcctgtaatcctagcactttgggaggccgacacaggtggattatgcgaggtcaggagtttgagaccagcctggccaacatggtgaaatcctgtctctactaaaaatacaaaaattagctgggcatggtggcacatgcctgtaatcccagctacgtgggaggctgaggtaggagaatcgcctaaacccaggaggcggaggttccaggtgagccaagatcacgccattgcactccagcctaggcaacaagagcaaaactccatcacacacacagacacacacgcacacacacacacattttaaaactttcgttcttctaaagatactattatgaaaaaaattctggccgggtgcagtggctcacgcctatgatcccagcacgttgggaggccgaggaaggcaggtggattgcttgaggtcaagaattttgagaccagcctggccaacgtggtgaaaccccatctctactaaaaatacaaaaattagccaggtgtggtggc

SEQ ID NO: 9071 - DNA, 1025 bp, Homo sapiens
ctctcagccttggtttccttatctgtaaaacatggatagtacttccctaatgagattgttctcaggattcaactagataacatgtgtgcagcatttcacatagcagatggcatggataggcacttagtaaacatcagagccctcccagcagtgtcaggctcttagtaaatatctgattcttgaatattcccatccccaaatatatccccctacctgaggctcctctcatattctctgcctcccttcctgtcacagtgcatgtgtctactgaaggccaccctcttcctgtatcctggttcctggccctcctcaccctcacaaagatctcactcacacaactgcctcctcatctccggtaacctcaggttccctcgctactggatctctcagatcacttctctctctacactcactctggggatctcatccactgttggagctttcaaggccatctaaaagattcccaagtttatattttaaacctagaatgcctcagaatccgagacttacatatccactgcctataccccatgtccctttggaagtggcacagatacttcagcatgtctaagatggagctccagattcctgccccacccttcccacaagtcttcccatcttagtaatgagaactctgtccttccagtcgcccaaaccaaaacctttggagttatccttggctcctccctcttaaatcccacagtcgaccaataggcaagtcctgccagtcagctcttccttaaaaatacagagcgtacctggccacttctgagcagtccacctccccacgctggtccagatcaccctcagctctcatgaggccaacttcagtagcctcctgagtggttttgctacctctgttttccccagctccacaatcttgttttccaccaacagagtaatgttttcgaaacataagcttgactctgtcatttattggcttcaagccctccagtatcctcccctctcactcagaatcaaatccagtttcttatcatggccctagggaccagcccgctgcctgt

SEQ ID NO: 9072 - DNA, 1027 bp, Homo sapiens
tattctaccattcagggaagggtttctattcccttttctagattgttttgtccaacacactcattgagcaccttcttttggatggagtctaagctgggtgctggtatagtgagtagaagaagactcaaaagctgtccccaagaaactcaacaggatagtactgtgtaagctctctgatgataagacctcctcctttacctctgtattccttatagcccctacttaatgctttgcatatcacaggccacagcttattttgactatgtgtggagacagccctgataccctctcctttctatcttgttatgcagggggcagggtctgcaggtgcccttggccatgcctaggccatgcctaggcagatgaggagcccggacccctcagggtggggcatgtgccctctaacttgggccagatgactcagggccattcagcagagctggcttgcctcacccacaagcaagttagtagctcctgcacctacactctgacctctcccttttctagtgattcttgcacttgctggcagttctgtgtctgcatcgcacagatatgcctgtggcccttattatttcaggtacattgatcttttcttcccaagtagattagaagctccataagggcaggagccaaattaggttttaggcttcttttggcttttctacaccacaggcaggtaattagatcttgaaaatatttgtcaactgattgacattgccatcatttcttactttcttcacttaaggcattatctccaggaggcccttataaaatatccatgtaggatgtgaggatgatctggctgtgacatctgtcaccccattgatcaccagggttgattcggctgatctggctgtctaggcgggtgtccctgtcctccctcacagctcctcgtgcatccctcccgaagctgtgtgctctgttgaggacgaccatccctgatagaggaggatcagtcttccgtcaagggtatatgagtagcctcgctcccatgctagaacttccaaacaagctctcaagatccata

SEQ ID NO: 9073 - DNA, 1025 bp, Homo sapiens
gctggcaggctgagcacagtcagccctaagggaggaagcaggagagaggcggccgccaagaacagactcacccataggaagcaaggtatagggttagaccactagggtcgggctgccttatggggcttagttttgggtatattctaggatgtgattcctgagtgtgggaagtgtagggtggggttagattgaaggagatttagtgctcactctcagggaacggtggcagtgtggaggttcaccccgttcttggtgttaggtggggaaaagttggacttcaatgaggcctttccatcagcctgcaagggtggggacaggaagggagagaggtgcatttgacgagtcgggcttgttggctgatggcactgcagagtttggacatcccaggataccaggagtccagaggccagggttgggtgctgtaaggagggatgtgggcagtggggaaatatgcttttctgggattttaagtgaggaccaaggtgaggattcagtggacactttggactggcaaaggcagttagggtttggctagggtagatataattggcattgggctaggttaggtttaaggactgggttactttaaaagtttcagattagtttagacttgggatttggttgatttagtgcggttgaggtttgagtccagcaaggatgtggtgaggtctgggcaggcagagggtgagttggagggctgtgacttggtcggtttaggtatcagatggggcgctgcttgtcatgttatgaagagcagggctagtttgggttttcagcttgaataggtgtgaggtcatgagtggtttctttcctatagttctttttttttccttttttttttttttttttgctgccaccttctctttccaccacccctatagttcatattttatactctcagatttttctataatgacataggttgctttgataggcagaaataacttagataggtataacgctttgcccatggttaggatgggatttggattcaagaaagaatgaagactaggttaggtctaatc

SEQ ID NO: 9074 - DNA, 1045 bp, Homo sapiens
tcacgggcggcaacgtgaagggtgagtgcaggtcggcctggcagcggcggtgcagcagccgcggagccgccagcctaacccccttccgctcttctccccgcagtgctcggcaaggccgtccactccctgtcccgcatcggggacgagctctacctggaacccttggaggacggggtgaggggctagggtgtggggggcgggtgggactccagccgggagcgggtaacccggactagagtctcgcccccactaggcgggatgaccgctggcagatttgtcggcaaagtttcagtttcttagtctggcggctgtcatcttcccaggccggtgtgtgaattgaggaaagctgtcctgcgagctcccagggggtgacgtgcacttagagaaactcggggaaggcctgggtgtgcgacccctcctctgcggcagcagcgccggggccgactctgaaggcttccatggggaaaggagggtttttcagcaggtggtggcggagcgggaggacgatagggcaagtgtgtgagcagaagcagccagagggctgggtctgtggctgccccctgaccacgtccctctccctgctcttcgtggcccagctctccctccggacggtgaactcctcccgctctgcctatgcctgctttctctttgccccgctcttcttccagcaataccaggcagccacccctggtcaggacctgctgcgctgtaagatcctgatgaaggtgaggcccttccctcagcagtggcactactccaccccaggaatctccaccagctgtgcctctgccctggggtactcagtagatgctaagtggggagagagacacgtgcaagcccaatccatgcaaaacacagggagggccatggtaaaagcatcacagcggggacctgagagggtggtgacgctcaagttcgtcaagaaaggtaagcacgtcttttggccgggcgcggtggctcacgcctgtaatcccagcactttgggaggccgaggcaggcggatcacgaggtcaggagttcgagaccagcctggccaacatggcga

SEQ ID NO: 9075 - DNA, 1021 bp, Homo sapiens
cccaggttcaagcaattctcctgcctcagcctcccaagtagctgagattacatgtgcctgacaccaggcccggctaatttttaaaaatgtttttagtagagatgggcttttaccatgttggccaagctggtttcaaacgcctttttttttttttttttttttgagacggagtcttgctctattgcccaagctggagtgcagtggcatgatctcggttcactgcaacctccaccttctgggttcaagtgattctcctgcctcagcctcccaagtagctgggattacaggcacccgccatcatggccagctaatttttgtatttttagtagagacggggttttgccacattggccaggctggtcttgaactcctgacctcaggtgatccacccgccttggagatggtcttcccctggggttgggccacttggtggccccacctctcctctgactgccccagccaaactccgcctcttcctgccagttgatgacctgccagcgtgcaggtgcctgtcagtgtgatcttctgcttcttgctcccctgacatcctctcaatgaccaggagctcgtcttctgctgatgggctcctctgacatctggctgcctgtgggtctaccccctaggggtgttgggtttttataggcacaggataggggtgtggcaggccagggtggtcttgggaaatgcaacatttgggcaggaaatgcctgttctcacctaggtctgtgggggtggaaccctacccagggaccacgccctcctctacccagcacttcccttctccccttccaaattatttaacaggaccatgctcctcccttcccagcacttccatatcacattgtcccactgcaaggcttttttacacatgctgttcttttggcctagaaagttcctatcccagggtccacttggcttgctttcttccttactccccaaccccccactctgtttaatccagccccaaccctcttgccctgctgtttcccaagcacgtggcttcacctgccatgacatattg

SEQ ID NO: 9076 - DNA, 1083 bp, Homo sapiens
atataaaaggcccctggcctacccaagttttggtccagcaggggagccaggccgggaaagggccaagctgccacactcggcttgtggggctgtgtggtgccgtgatgcagctgtgggtttggccaccgacagacctgggctcaaattggacctgctgcttttgactgtgagaccttccataagctccttttgctccaagcctcagttttctcctctgtgaaacagagaaaatcgttcctatcagagttcttatgaggatgaaatgggattttggatgtaaaatgcttccatccagtacctgctaaacaaaatgcttactaatggccgggcgcggtggctcacgcctgtaatcccagcactttgggaggctgaggcgggcggatcgcttgaggtcaggagttcgagaccagcctggccaatatggtgaaaccctgtctctactaaaagtgcaaaaattacccgggcgtggtggtgagtgcctgtaatcccagctatccagaggctgaggcacaagaattatttgaacctgggaggtggagtttgcagtgagctgagattacgccactgcactccagcctaggcaaaagagcaagagtctgtctcaaaaaaaaaaaaatgcttactaagtggcagtggtatctatgatgctatagatgcttccctagccctagcccagcccctcctaaatagggagacccaagattctgtagcttctggcccaatccctcatggccccagagcactctgggcctcctgaccctttgtctccctagacagcacccaagaaaacctcatttggctcgctgaaggatgaagaccggattttcaccaacctgtacggccgccatgactggaggtgagacagtgcccttagtgtgttgggtcccggagcaaggtgtccccttcattgccttccctattctgtccaggctgaaaggttccctgagtcgaggtgactggtacaagacaaaggagatcctgctgaaggggcccgactggatcctgggcgagatcaagacatcgggtttgaggggccgtggaggcgctggcttccccactggcctcaagtggagcttcatgaat

SEQ ID NO: 9077 - DNA, 1049 bp, Homo sapiens
ttgaagacccagtcctgatggccctgtagcctgtctgacctgtgggcccctgcaggcccaagtatctggtggtgaacgcagacgagggggagccgggcacctgcaaggaccgggagatcttacgccatgatcctcacaagctgctggaaggctgcctggtggggggccgggccatgggcgcccgcgctgcctatatctacatccgaggggaattctacaatgaggcctccaatctgcaggtgggtagggagagatgtagacagatgagaaggtgttcagtgtgcactcacacacccctcacccagcacagttgttctgaggtgttagtacctggtctgtcagtggttgaactgggggagtggtggccagtcctgcatgcatcccaaatgggacttggctcccaaagcctccttccagggctcctaatgctgctggtgtaaattttttttttttgcttcaaaaatatagtattttttataaaacaagtagcaagaagaaaaaacctaagtggaactatgtgtttagcaagagagcggaataattatgaatataaacaattcctatttggagaaaatacattatgttcattgcttggaactatgaataatacttatatctgtaggaaatatagaaaaataaaataggttaaggcaataaggatataggcaattacatttttattttaattttataaggacttttatttttcctttacagactagggtagttaggagacctgatagtagctacttcgtttttattttcctggcagcaaagcagcttacttatgtgttccttcttgcttatctgttccagatcatagtcaagttttccaattcgttttactaagctagcaaaattttttataccaggagcattaggagcttcaccgtgggaggccttcaagggcttcatgactcctgaagttataggctgactcctgggctgggggtgggctgggaaactcacacctttgtcctgcaggtggccatccgagaggcctatgaggcaggtctgattggcaagaatgcttgtggctctggctatga

SEQ ID NO: 9078 - DNA, 1045 bp, Homo sapiens
cctcgggcccctttgtctgggcctccttaaggcaaacagctgtctccctgaatatttccagtgtgaatggtgcagcggggtggccctgtagtcagatcccccaggctgcagcctctgcttggaggtgtgggggacagcggggaacaggaggagcttggagtttgtttcacgtcctcctgcctctgacccaagcctagagattctatggacagtttcaccccaaatctgcctctttcaggagcgtgtttacattgtggggccttgtctggagctagcaaaacaaggtgaagacaaaacagcgacagtatctggggagtacaggccagcgccgctcctttttccggaaatgcctgggtcaaggaggcaaaaggggttttggggaaactgtttgttttaaagggggggtttctaggccgaccgcgttgcctttcacctcattgcagttttgggttttgtgcacgttttggggtgatgttgctggagtcaaatgcctgtcgtccatgtggttcgagcccctgaggagaaagaattatagctgtagagttcagttgtgtgtgaggcaaaaatagagttgattattttaacattaggcagcaaggcctgggagccccagtgaatgtggtgatccaggcctaaaatggaaggaaagggaggaatctttctgcagaacggttttgatgttatatccctggttttactgtgtgaaatacatgcctcggacctcagcgaagccagtaagtgggccgctaattatttttcctgattgcttcctgttgcaattggaagctgtgaacgcacggaaatggctttgttctagtggtcccagtgctgagaacttccccagctcccaagccctagtcctctctcctcggggcccaagtgcttgttccagggccggcctgtccaggcaccccctctccccctggaggttcctcctgtagatgcccaaggccaaggccgggccctctgggagagcccagaagggctgagtggggttaaccaagtgctgtgtggagcaccctgagagagtcccctccaaagcagg

SEQ ID NO: 9079 - DNA, 1027 bp, Homo sapiens
cagcactttcctggggagattcacctcgtgcttcctgtcgtttttggaacccgtttaatttcagccgtgctgtgtcactgctcaggcatttagtagaactcacacacacgggtgggggatgtaggcaggtgaggcctctgagttgctttctcccttgcagcgacgggttgcagggctgatgggggtggaggggtttggggtcagacccacctgggtttacatgctcagtggctgtttgacttcgggcaccatacctagtttctgttatctcaccccgttcctctcccaggctatggggagccctaactgccctgtgtgagacctttagccccatccctggcagagctgcagtgagcgcagttgtgtgtcagcgtcctcgatctttctggccccagccggtctagaggctgttattacaatagtctggatttttcctgtatgaccttggacatccagtccactgacaaactcactcactcaccgctgcagccctcgggggcaggagtagttagttagcactgtggacagagcccctgcgcccagggtctgattccagcctggccgcttcctgtgctgggaggcttaggaagctgatgctacctttgtgtgcctcagttttctcacctgtaaaatgggaatagaatccttcctaccatgaattcagtgagttaacgtgcacctggcccggtataatgctgttgctgttttgctttggtgtctgctaccgagtgaagtgctagggttgagtgcgatagaatggcagataaggccccgcccctgcgggcagagcttcccatgtagaggggaggacagggaaagaagctttgcagctatgcagaggtgggcccacgggtgctccttcaccctcggggtgtcctgcgagaggcccttagaggccagatcatgctgtggagtctggttgtgatccacaaggcagcggaagcttctggaaggctttaggcaggagttacaggaaatgcaagctaaagccagatctttcctaggtgaaaggtgtcgagttgttttt

SEQ ID NO: 9080 - DNA, 1046 bp, Homo sapiens
tggtcgctgctcagggggcccagggagtttgctgcagtgccggaggactcctgggtcccggctgtgcctccccgcagccgcctgctcccttgggacactcattcatttgctgtggccactgccacccacagtccttgcctcgtagactccactgcagctctggttacaaagagcgagtggtcagggactcctgacctgccatgcagggccccgtgggcttgtggtggctttggtgccgtccgctgcgtctgcctcttagagcatggagttctccttctcaggagggctgagctgctggagctctagtcctgccgcagagcagcccccaagtgcggcgttgcctgtccctgtggagcaggtgactacctggctgcgggcggaacagcaggccatggctctggtagtggtctgtgacagcatatcaccctgtgggacagatccccgggacctagtggggtgggatagtgagagctgcgtccacaggggaggctcagagacttgtgtgcccagtgtggccctgtgtgctgacccagctgggctctgccctgtgtggcccccagggtgcccggcgtgtgccctgatggcctggggcagagctccagagagccatggctggccgagggctcacggattctcacccgcccccagtgcctcaggagacacctgggcagcgaacagcttgaggtgtgcagaggatgggtcacgatgggagggaggcacaaggggtgctttccatctctttggccaccagttttaattaaaaaaaaatttccatctgttttgaaaggttttatcctcttaaggaaatgacgtttattaagcaacagccccttctgctcatcgtccagctgtgcccactggcagagcagaggctggtgggattccgcctgctccacaccaggaggtgccacttggcttcccagtgtcgaaggccttcttggactcagcacaccttcacggccccgtgggctgtgggtccctgggttgggcatgactgacttggagggtgatgagagatctccaggatccaggcaggtctggcacgc

SEQ ID NO: 9081 - DNA, 1064 bp, Homo sapiens
gtgcctgccttttaattggtacttgaattatacgagtgttttcttccatcaataaaagaaatcggcgaacagcctcccatgggtttcagtaagtgcaagccctccttgtcatcccagacctcagcctgcccatttaatggatgaagacactgaggcctggagggaacagtgacttcggagccactctcctggactctgccactcctctcgcctcccatatgaacctgagtggccacatgaccctgggggagagctactcaactgtcccaaggagagggtgatgactgctggcctcccaccggccatcagcgccccactgactgacacccctgagtcagtctccaccctggaactgtttctctcactatttgccatggccttgggccgcttccgggggcttggcaaggcaggaggcgtggaaccaagatggtatgtaatcagaatgctatattttgttgaaaataagaatgttagtaatgggctggtttctggcaggtcaaactgggactctgaaatacatatttttctctgctctgccctaaaccttctaattagtgaaaacgcacatttgcagacatcaatcaaatgtcatattccctagcagcttgtcctgggatcactgagctggtcacattccacagttgctaactcagggcttgcagagtatgtgtgcacgtgtgtgtgcatgcgtgtgtttgtgagagagatacatgccttctggggagccctggtggcctgtttccttccctcccaggcccctgagcttctgctccccaccccgcccccagccccttgtcagcacatgcgcggccactgcaatgagatacagacgttcgcccaattaaaacacagttagtggaggacacatggctttcagggaaaactgctttctctcaggaagatctctgctgtgcagtattccatagctagaccccagctccactcaacagtggactccattaatagcctgggttttggaagaggcgatttgcttctggtaactggctccggtgcatggatgttccctcctcttgctggaatctctgcccgacccagacagtgct

SEQ ID NO: 9082 - DNA, 1114 bp, Homo sapiens
atgttgggggaattggtgggatatagatggttcagccaaggtggaaatgggggagtagagctattcctggggtgcttgaagatgtcagcaagtatcccactccagcttgagtttgcagagctttctctaaaaggcagaacatgtgcttggttaaaggaaacccaagattttattattgttgtaaatgtcaagtccctcattttgaatctttagacaactgcagaattgtgtcactgacttgggtaaaagcccaaggaaaaacatgaaattatgttgccaaaattgcggtcatcgtagctgcatgagggtttgagtggccaccgccaccccagtaggagagacgcgtagatgttgaatacactgtgagctgcgtgcaggtaattgaaacgtggatgtggggaaggtccctggcttcatggaactgtctacataaaagcgagcctgggtgtttcctgtttcttctaccttaagaaatttccacgagaagctaaggtatggttttgccaagaatgttgttaatggcccagcaatgaatattttcagccacttgtagacacctgaacttcattcttggcaaacaggtgtatgattcttggacttggagagactgaactttgctgtgctcagaatggaggagaccagctcacttgtactttgatttctccctggtccctgtcattttagcctgatcagtgctttttcaagcatttccccttgaaggggagataggactttctggctcagggatggggaggcttccaggcagccttaaacattgtccctgccccaccctaagtatctttgaagtttcatgttttatcataaagtctgtgagaatgttgcagactccgttatagtcatgctagttttatttttttaaatgtggtttgaattttatataaagtatatggattatatctgagaactaatatgcaaggcctgtatgcaaaacataatacaactttacagaaggacattggagaggactgcagtagatgttcacggataggaagacaggagatggagatggcagttgcccccagattgatcagtggattcagtgcaggggccggcagtgcgctctcctccctgttctttcctcccaccccattgc

SEQ ID NO: 9083 - DNA, 1814 bp, Homo sapiens
agacaatctatgtcattgttgtccaaggaagctaatttagagtagaaagttccgtgtccagtcccactctgtgcgtgtgttagcaggggactctcgggccggagctgggtccaccctggtagggggacttcatggggcctgggcgacagcactgtgtatttgtgtgtgtgtgtgtttgtgtgtgtgtgtgtctgaggaggtggaccagtttctcaaaaggcctgtgaccccaagaaccaaggaatttcagcctgggtggatcacaccttcactggtgagtgggacaagctgggggccctcgccacaggagcagccagggcatggggcacagttggcctcattcacaaaatgggagtataagtgatccctgctctggcggccaggacgatgagtgggaacacaccgtgtgggggctgcctggcctgggtgtgccgcgggtgtccttgttggtgatggttccacctgcttgtgccaccagtgccctctgggtctcacacacaactctcttcccagcgaaggcccctcctgccctcaggcctcagtgctgcttccgtctcggaaggccccaggagctcctgcatcctgggcgtgattcctgtgtgcctgcagaccccctcgcggctgccatctcatcctttggtgcacctgttggccagacctcctggtagcgggtgctgcactcccctgaatgtgccggggcctgggggcagggacctgggctcctccctcactgagtggagggaactcagtgtcttggagttggggtgcctgcaggctgggtggtgcaggtgaaatgcagacctctcagctggtgttccagagcagctgccttcccccgcccgagggacttcacccgcagcccagtcaggggtggcgcctgggtgcatcgcccgcaggctgggtaggggtggagcctgggtggccctgcctgtgagctgcatagttgtcgcctttgaccctgagttttcttcgttatctgtttggacctgtttggggcaggcaggggatgagatctgaagataaatgccttagctgtgaccatctccttttgtgagaggtcaatgtccagttccgctgcagttataacatcccattttttgatttctttttattttttcctttttctttttgagatggagtctcgctctgtcacccaggctggagtgcaatggggtgacctcagctcactgcaacctccacttctcgggttcaagtgattctcctgcctcagcctcctgactagcaggggttacaggcgtgagccaccacgccccagctaatttttgtatttttagtagaggcaaggtttcgtcatgttggccaggctggtctcaaactcctggccttaagtgatctgcccgcctcggcctcccaaagtgctgagatgacaggtgtgagccaccgtgcccggcccagaactctttaattcccacctgaaacttgccgccttaagcaggtccccagtctccctcccctagtccctggtcccaccattctgctttctgtctcaatgaatttgcctaccgtaagtacctcatataaattgaatcataaagtatttgtctttttatatctggcttatttcacttagcataacattcttaagtttcatccatgttgtagcatgtgtcagaatctctctcttttttttttttttttttttttttttttttgcagacagagtctcgctctgtcatctagactggagttcagtggcacgatctcggttcactgcaacatctgcctcctgggtccaagcaattctcctgcctcagcctccttagcagctggaactacaggcgcgtgccaccatg

SEQ ID NO: 9084 - DNA, 1095 bp, Homo sapiens
ttgggatctgttctgaagagaaaagacagctggatttgctggcactctgcatgtaggttcgataaaaagatgagacaaggttggcacggtgccactctgtgcctcagtatccttgtctgtacagaggcgtgaccatgctgcatgtcatgaggaaaacaccaagaacagtttgtgagttcaacaaatgttagctgtcgttataataaaaatgccctttcctcgccaccagaagtccagtctccatgcctacgtggttttgtctttttacttctttatggcttttgctatgttggttgggaagtgctcagtgctaggttgggaggtgatcagtcgggaggtgctaggtgatttgttgggaggtgcatgatgctcagttgggaggtgctaggtgctcggttggaaggtgattggtactttgttaggaggtgcttggcgcttggttgggagttgttggtgtccagttgagaggtgctaggtgcttggttgggaggtatttgattgggaggtgcttggcacttggttgggaggtgctctgcacttggttgggaggtgctcggtgctaggttgggaggtgatcagttgggaggtgctagatgctctgttgggaggtgcatgatgctcagttgggaggtgctaggcgcttggttgggaggtaattggtacttggttgggaggtgcttggcacttggttgggaggtacttggtgcctggttgggagtagttggtgtccagttgagaggtgctaggtgcttggttgggaggtatttgattgggaggtgcttggcatttggttgggaggtacttggtgcttggttgggagatgctgggcccttggttgggagtagtctttcccatgctcagatctgagctggctttgcctgcatcatctctgcgagccaactgtccctgtttggctctggcttttcttaactatttgaaatggttcctttacatgcttgcctctgaattctctcccagaagccctccccaggatcacacctgtggctgttcactcccacccctgcccctggggcaaagttgaccttagtgttgattcctgggcctctccccacaccttccctttgctccagtcat

SEQ ID NO: 9085 - DNA, 1034 bp, Homo sapiens
ccatcacctctggggcccttcgctgttgaccgttcacctcggcctcaaaggcaatgttgagagagaaactggacccagggaaggagtccagatgagctgcctcctgagtgacctggcgacaccaggggtttggaccaagcaggttaagggaggattatagacccttgaaggggaggagtggtttgaccaggttggatgagccctttgtttacagaggaggccagggcaagtcaccagcctggggttgcccacagcaggtggcatagtaggttctagcaggtggggtctggctcccagagccatgagtttgctgctgccccatacctgggccctggtggagcaaggccctggtctccctcgcagactgccccaggacgctgcctgctccctggaggagggggtgcctcggctgcacaagcctcagcggagaaggatgcttggcttgctggctgcccgggaaccttggccttctcagagtttgttttctttcctgcctgtctgttggtgagaagaggctgaactcagtgctggagctggaccctgcgctctgcagtgttggttgaagtcctggcggaaagggaaagagtgaggacatacgggctcatgacggcagggagtggccaccacagtcagggccgggggacggaggggagagagaatcaccggaatatggcaaaggtgtaaaacaggcagctcgggccgggcgcagtggctcacgcctgtaatcccaacaatttgggagtccaaggcaggtggatcatttgaggtcaggagttcaagaccagcctggccaacatggtgaaactccatctctactaaaaatataaaaattagctgggcagtagtggcacgggcctgtaatcccagctacttgggagactgaggcaggagaattgcttgagcctaggaggcggaggttgcactgagccaagatcatgccgctatactccagcctgggcaacagagtgagaccctgtctcaaaaaaaaaaaaaaaaaaatgcagctcgtcctggctagtctgaaaaaggtggag

SEQ ID NO: 9086 - DNA, 1050 bp, Homo sapiens
gccgctgtggtcgggtttcagtggcctcgtcccatgggcgtgctttggcagctttttgctcacctgtggagcctctcttgagcttttttgtttgttgtttgtttttgtttgattttgtttgattgtttgtttttgttgtcgttgttgttgcccaggctggagtgcagtggcgcgatctcagctcactgaaacctctgcctccttgggttcatgccattctcctgcctcagcctcccacatagctgggattacaagtgcccgccaccacgcctggctaaattttgtatttttagtagacagggggtttcaccatgttggtcaggctggtctggaactcctggtctcacatgatccacctgcctcggcctcccaaagtgttgggattacaggcgtgagccaccgcgcccagcctctgttgagcatattttgaggttctcttggtgccagtgatatgttacatgtgtccccatcgcaccatcgtcacccattgaggtgacattggtgcctctcctcggggtggatgcctccctctgtttccagcaacttctgaaggattttcctgagctgcatcagtccttgttgacgtcaccatcggggtcacctttgctctcctcagggctcccaggggaggcccgaatcaggcagcttgcagggcagggcaggatggagaacacgagtgtgtgtctgtgttgcaggatttcagaccctgcttctgagcgggaggagtctcagcaccttcagggtggggaacccagggatgggggaggctgagtggacgcccttcccacgaaaaccctaggagctgcaggtgtggccatttcctgctggagctccttgtaaatgttttgtttttggcaaggcccatgtttgcgggccgctgaggatgatttgccttcacgcatccccgctacccgtgggagcaggtcagggactcgcgtgtctgtggcacaccaggcctgtgacaggcgttgttccatgtactgtctcagcagtggttttcttgagacagggtctcgctcgctcacccaggcgagagtgcagtggcgcaat

SEQ ID NO: 9087 - DNA, 1031 bp, Homo sapiens
cacacagaagggacggaggtcaggaggtagaagggcggagagagggaacaggcggaggtcacatccttggctttcaaaatgggccagggagagacaccctctgagcatggtaggacaggaaagcaagattggaacacattgagagcaaccgaggtggctgggcgtggtggcttacgcctgtaatcccaacactttggaaagctgaggtgggtggattgcttgaggccaggagttcaagaccagcctggccaacatggtgagaccccgtctctactaaatatacaaaaattagccaggcgtgatggtgcatacctgtaatcccagctgcttgggaggctgaggcaggagaattgcttaaacctgggaggcggaggttgcagtgagccgagatcccgccactgcactccagcctgggccacagagtgagactccatctcaaaaaaaaaaaaaaaaaagataaaaagaccaaccgaggaattgaagtgggggggcgtcacagtagcagaagggggatcgtggagcaggccaccctgtggtcatgcactggaagctcattacctgacgatttggagctcatcactgggggcctaaggagaatagatactgaaggatgaggagtgatggcgcagggcacgggtgtctttggtggccagaacttggggactgctggggtgcctcactgcaggccttctcagcgccctttatatgcttacacaggctgtttctaagagggggatacattgcataagcgttttcagactacctcatcatgggtccctttctttaccctctgtggccctggtggcgcactctctgggaaggtgcaggtggatgcccagacccgccctgccatccacctgcacgtccagagctgacttagcctcgagattgctgctggcacctcctgccccgggacacctcggatgtgcccgtggagatgctggctctgtgttttctgctggagtttggtgcgtcttttcctcctgcaagtggccaccgctcttgggtatgtcctcaggcttctgcgagtc

SEQ ID NO: 9088 - DNA, 1102 bp, Homo sapiens
gtgtggtggcgggtacctgtaatccgagctactcgggaggctgaggcaggagaatcgcttgaacctgggaggtggagcttgcagtgagccgagatcttgccactgcactccagcctgggcaacagagtgagacgctgtctcaaaatctcaaacaaacaaacaaacaaaaaacaaacaaacaaagcgtcatttatccagcacccctggggaaccatgctacctggtgttttatggtacctggcaaggtgcaggtaaagttgcggctcttgggcattgaacccgtcttgtttggggcagctcaggccccaggcagggtccgggttggctctcgttggtgtggccctggcccatccagacctatatttctgccgtcctgcaggtgatcaatgttgatgggacgaagaggcggaccctcctggaggacaagctcccgcacatttttgggttcacgctgctgggggacttcatctactggactgactggcagcgccgcagcatcgagcgggtgcacaaggtcaaggccagccgggacgtcatcattgaccagctgcccgacctgatggggctcaaagctgtgaatgtggccaaggtcgtcggtgagtccggggggtcccaagccatggctcagccatgcagacttgcatgaggaggaagtgacgggtccatgcctgggcataagtgttgagctcaggtgccccgacctggggaagggcaggacaggaaaggtgacagtatctggccaaggacagatgggaagggaccaagggagctgattagggagtggttatggactaggaatgtcggtaacaatggttagaaagtgactaacatttgttgagcacctgctgtgtgcccggccctggccgggagccttcgtgcccacagtgaccccgtctgcaaatgtagttccttgccctactcgcactggggagcaggacgcagagccgtgcaactcacaggtgccaagctcaggactccctcctgggtctgcctgggctgggctgtgcttgttgcccctgtggcccacgcatgtgcaccttccacctgaaagccaggatcttcaggacgctccccgaggaggtcgttgtctggcacaatgatt

SEQ ID NO: 9089 - DNA, 1072 bp, Homo sapiens
ctgtgtaagactcagttgggctgaaaaagtaaaactataagttattttaattttttcaggacagggtttttgaccattccttaaattaggaacatttaccggagtaattaatgagtagtagcgcctcataatgtttaaagagatggttaaatacagaaaagcccatcacaagcttaagtcgggctttgttcctcatgtgcttttggatactagtttctgggtgactgccacccgaatcagtaactagggtttcttagtgtaagtcctccttgttactgaaaactgtaagggtgccgtggattgcagtattcttcagcaaagatagtttgggaaatagcttttgtcctggagggatactttggaaggtattctccacttcagcatgtctggtcagggagtctagaacattgaacaaaatgcctgcactcagtcagaaataaactcacaatcctttaccgcttgcccgatactctcctccatggtgctcgaaaccttgcgtgcaccttcccctggtattgttgtgtttacttgggacttggtttgctgtattggagatgtgtgttttgatggactcagtcttaagtagagatgagtatcttgctggtggaacttaaggacaggaagaagattgttttcggtttagaactctagcctttgtgtaaagtatagcaaagcaaagtcaacaagcaaaaagttgttagtttcaatgaactaattgagaatttgagaatcagaccatagctgagcagaaaatgaatagaagtaacattgacaggatgaggttgcctagctttttaagataaagctttggccgggcgcagtggctcacgcctgtaatcccagcactttgggaggccgaggctggcggatcacttaaggtcaggagttcgagaccaggccaacatgtgaaaccttgtctctattaaaaatacaaaaattagtcggtcatggtggcgtgtgactgtaatcccagttatttgggaggctgaggcaggagaatcgcttaaacctgggaggcggaggttgcagtgagccaagtccagcctaggagacagagcgagactcagtctca

SEQ ID NO: 9090 - DNA, 1035 bp, Homo sapiens
tcttttgccctccttttgtcagtcagtggtcaggtctggttttagatgccagcttcaacttttttttttttttttcggagacagtctcactatgtcacccaggctggagtgcagtggcatgatcttggctcactgcaacctccgcctcctgggttcaagtgattctcctgccttagcctcctgagtagctaggattacaggtgcgtgccaccacacctggctcatttttgtatttttagtagagatggggtttcaccatgtgggccaggctggtcccgatctcctgacctcaagtgatccgcccgcctcggcctcccaaagtgctgggattacaggcgtgagccaccatgcctgttttttgtttttgtttttgttttaataaagacctattcccagagaattagccctggatcagtttaccagttctgcccattgagggcacagataggcatacagtatgctcagcctttaacacagtgatcctgcccactggtaagttggactcttctgtgccctagactctgatcccagcagagaagtgttcttttctcctggggagatgagatgcagtggtagagagaagggtagatcttttttgctcatattaaaatttagattatctagtttatggaatggaagaatattaggaaaactataaatttttagcagctaaatgttaatatctgaagttacaaaaggtcatggaggcattttcttattcttcatcctgaaattcggcctgtgcctatgttgagaactaccagtgaccaccatctacttctaatatccatttatttcatcagcaaatacattaattgagtccttactctgctaggaactgtattagggattcactgatgaacaggcccttaaggacctgcagtctagaggaagaggcaaacaagagacgacaaagctgttaagaattgtacatggtgtcaatggggcctgggaggaaagagcttctgtttgctggtcagttggttgatttgtttaaactttgggtggttgagattgccagaagttttgcaaaag

SEQ ID NO: 9091 - DNA, 1035 bp, Homo sapiens
aggctctgattttgtacttcacagtaactctggggaaaaccacgggattattagttccagaatttcttacagtggaaatacatagtgacttgaagtgatttgaattccccagagattgactaccgtgaaatctgatggcccaagaaaagatgaatgaaagattgtttttaggaacattagagagcaggactaaaacggctgcagactgatgttgagtcagacagacttggagaaagctgtgtgggactgttagttggagccttgggtttcctatacctacatgtaaatctgaacaaaaattctggtggcagagacacactttgagaaaaaagagcttgcctgagaacacatgtcacactgagaccctaatcagggcagttcacactgcctgctccatggttggctggtcagattggttgggctttggtcctcagatgggcgtagcgggaggaacactgactagtcttgacaattgactgaggcttccattcgtgagaatcatggttttgggctgcaacaacacttagacgtcatttattttctatttatttatttttttgagatggactctcagtctgtcgcccaggctggagtgtagtggcgcgatctcggctcactgcaacctccgccttacaggttgaagcgattctcctgcctcagcctcccgagtagctgggactacaggcgtgtgccatcacacccagctaattttttatttttagtagagatggagtttcaccatgttggccaggctggtctcaaactcctgacctctagtgatccgcccgtcttggcctcccaaagtgttgaaattacaggcatgagccaccacgcccagcgcatttattcttacagaaaaatggaggccatgcagaagaatggaaccagaaggagcagagaaatctcagccccggtgattccataggattgtgatgttccagaccacagttttaagtgctatttgtttcaagagtgacatcacagctggattttacttagaattcagaataagtggttaacgtctggaattttatt

SEQ ID NO: 9092 - DNA, 1022 bp, Homo sapiens
ctgccccttctgagtaaacaacactctgtgaatgactgtcccttttcactgtggacttcttgttattacacccttagatggactcagcagctatgagatcctcccatcataggtatggtattttgtaacaaaagtacagaaacacctccaaggtgcagtgaatgatctcaaggagagaaatggagtattataggatcatagagaggcctcgaggtctaaccagctgctctgcggaagtcagggtgatggtggtttcagtgttggggaggttacagagttagtgttgatatgcaaattttcttcctccaaatttggagtatgttatatatgttttaatgtatataactgtgaatatgaatataacattagaacatatataacataatttctgctggtggagtagagatcataaatttgaggtttgcagtttgctttctaaaacatcttttaagtttattcttttctggcacacaggacgttgtagggtaactttgctgtggagtctcacattttatatagaatcattttttcaacatagtgtggataatcacatacgccttgaaggatcaatatatgttaacagatgattggatctttttgattttgcacttaatttctttacaaattctgcattataaccagacagctctattgagggtttgcagattttttctgtaaaggaccagttagtaaatattttaggcattggaggctaaatggtctctgcaaggactcatctctgcttttgtagtgtgaaagcagccatagccaatctgtaaacaaatgaaggtggctgtcttccaataggactttacttataaaagcagacagagagttggatttggcctgtgggttgtagtttgtcaatgcctgctctaatctgttttgtctttgtttatctttttgagatagagtcccaggctagagtgcagtggtgtaatctggagtgcagtggtgtaatcccaggctagagtgcagtggtttttgtttatttttttgagatagagtcccaggctggagtg

SEQ ID NO: 9093 - DNA, 1047 bp, Homo sapiens
acaatctggaaaaaggggtgtggatcaaaatagattatgagccaaatctgtctcgaggaaggaagagagtagagtttagcatttataatacatggcctatcccaagagaggggagggactattttatacataaaaaaatattaaaagccttactttgaccaataaattaaaaagaggccatcagaaacaagagccgtggagggacataatgacacataggctggggctagtactggagttcattttgtgacactctggtggcaaatcctgtcagttctggtcctgtctctgcctctgccatggccttcattgaggagggttaggggatttggtggcagcaggagcacactgctgatcccagaagcatagggttaagaactaactgccttgaatacgatcttagtgattttcagtggagccaaggagtttgaaatgcataggcaatgtaacttcatcaaacttcaaagagccaagcttgataatctttcagggttgtgagaaaaggatgagaaaggattgtagaggacatgggttagagagagcgagctggtttagcagaattgttgtgaggattaaagataaatattggtgggcatgtttgtatctatctctagaagaaactagagtccattctctgtttaccatattgtcaggcctaactaacatttttcactttttggtatcagttactagtaaagtgcctcatggttagtgtaaaccttcagcagcctgccgtgcttactcacctccacttgcaggaggcaggtgtgtctttattttgcttgctgagtccctgctattaaattgtcacttgcgcttggttctttatatgtgttacttttaactctttattccttctagatgagtgtgaggtagtcatcttgagatgaagcagctgggaagcagggaggcagtctggccatagcggttaggaagagggtcattaaggtggtcagaagtgggatagaaccttggtttgaccactgactacctgtctgaccttgggcaaattatctcacctttctaagctccagtttcttcacatgt

SEQ ID NO: 9094 - DNA, 1075 bp, Homo sapiens
tgttttcaaatgcttacttgctgtctgtaatgtttgctcaggtcttttgtccattttttaatcaggttgttcatttttttgagttttaagtgtctatatatatttttatatatatataatataagatacatattttgagacggagtttcgctcttgttgcccagggtggagtgtaatggcacagtcttggctcactgcaacctctgcctcctgagttcaagtgattttcctgcctcagcctccggagtagctgagattacaggtgcccgccaccacgcccagctaatttttgtgttttagtagagatggggtttcaccatgttggtcaggctggtcccaaactcctgacctcaggtggtccacccacctcggcctcccaatgtgctgagattacaggcatgagccacagcgcccagccttctttatatatttttggataatagttgattatcaaatgtgttgtcagattttgatcaggattgcattgaatctgtagatcaagttaggcagaactgatatcatgacaatattgaaccttcttatccatgaacatggaatatctcttcatttgtttagttcttctttggggtctgtcatcagagttttatagttttccttatatagatcttgtacatattttgttttatacctaagtatttcattttttggatatgttaatataaataattttttttttattttcaaattccacttgttccttgcaggtatataggaaagcagttgatgtttgtatattaaccttgtagcctgtaaccttggtataatggcttataagttctgggactttttttttttttttttttcaattccttcacattttctccatcatgttgtctgtcaacaaagacagttttattttatgctttccaatctgtatactttttatttccttttcttattgaattagctaggacttccagtatgatatgatggaaaaggatgatgagagggaacatctttgcccgcttcctgatcttagtgggaaagctttaatttctgaccatcaattatgatgatagttgtaggtttttgatatatgttgtttatcaagttg

SEQ ID NO: 9095 - DNA, 1059 bp, Homo sapiens
acattggatagatggtagttttgggctgttacagatattgctgctctgaacattcagtttgtatcttttggtcaacaacatacgtatgcatttctgttgttcagtatacctaagggtgaaattgctagggcatagaggtatatgtatagtagtggcatctactaaagctattgtaccaaattaggcttccatcagcagtgtgtgaaagttccacttactctggatcctctccagtatttcatccttttcattttagccatgctggtagctgtgtagagatgtcttacttagggcaattttaatttacagtagtgaggtcatacgtttattggtcatttggatatccttttttatgaaacatatgtttaagcctttttttttctattatcttttttctgtttttattacctttctattttttgctgcataataaattatccccaaacgtagtggattaaaacagcaataaacattatcttgcagtttctgggagtcagaaacttgggagtggcatggttgtctgcttctggcttgggtgtgattagccctctgaagccttcatggatccgctggaggatctgttctaaggtggctcatttacatgcctggcaagtaggttctggttctggctgttggtgggagacctcaggtcgttttcacatcggcttttgccagggatgtctgagtttcctgttctcaggacatggtgataacttcccactgagagagtgattcaagagaaagagcccctaagtggaagctatcatttttgtgacctagtcttggaagtcacgtagcatctagctttgccatgttctgtttgttagaagagaggcacattgtggacttctaaaaaagtgacagggtcttattctgtcacccaggctggagtgcagtggtgcgatcatagctcactgcagccttgaccttcctggctcaagggatccccccacttcagcctcctgagtagctagctgggcccacagttgcgcgcaccaccacacccggctcagttttgtatattttgtagttggagttttgccatgtttcccaggctgg

SEQ ID NO: 9096 - DNA, 1026 bp, Homo sapiens
ctttttttttttgtatatgggttcctcattttttgctcttctcccaccatgccttccatttgtgggaggactgggctcttttgttttgtggtattccccacagtgttgtgtagcctctgttttatgtgcactggtagttggatcttgaggaagtttctcttggagaatacactttgttggactttcactttaaaacttttttatttttttgagacgaagtctcagtctgttgcccaagccggagtgcagtggtgtgatcttagctcactgcaacctccaccacctgggttcaagcaattctcctacctcaccctcccaagtagctgggactgcaggtacgtgccaccacgcccggctaatttttgtatttttagtagagacagggtttcaccatcttggccaggctggtcttgaactcctgacctcgtgatctgcctgccttggccacccaaagtgctgggattacaggcgtgagccactgtgctcagcctaaaacttttatctgaaaatggtgctgtttctttggttgtgatctgtctctggaggttgaatgtggagctaaactgaaatttttaagggcttctaacctaaatcacattgaaattcatttagaccagagctgttcaatacttgaagggtgagggttcattttggaaggcacttccgccgccttccttttctgtgtgtacgggaggccagtggcagtctggtcatcttgagtgcatcacgccctcactggcagttcagaatgttgcagggcatcgttagcatggattttgctgttgttagttttttcatgtttattgtctacttgttttctcctcgtgctgtctgctggctttccttctcttgttgccagttttggagttgtgatgaacaatatgttaagggttgataactcaaaattcttaagttctttgtgggttaacattgaatttgtagtgttctccagtctctttcttttctaacagaaactttcatgatgaaaagttagaagaataaattacaatgtgattaaccctgcac

SEQ ID NO: 9097 - DNA, 1049 bp, Homo sapiens
ctatggattatggaagtttcagcttttacatcaaattaagcttgattgtataccttggctgagcccactaaatgtagctcggtgattgggatcatgtagtcatttgtacctttgctgtgcgtccctgcccactgttgttacaacaggcagaggtagttctttgggccttattctagatgttgatgtactaatttatgacttggctctgttttaatagcagcttagattgtgttggcttcatatatgcctgcagtgatttgagtgtccattagggtgcatagccaaacaatgatgtagtccaattaggtgccaaagtctttacttcaagtactttacatacatgattttgcttttaggaggtgatagtatggatttactttgggtgttttgtacttttcacagtagtctttttgcatttttttttttttttttttggtatagtgattattgattaacggcttagaagtcttggtgttcctacctcgggctgtactaaaatggttggtgtttctgaaattggctgattgagttgcctgtctatagttatttttgttggaagatgcctctgaagacatgggaattaggttatttatcaacagtcatggaagttggttgttgcctgattatgggcatttatgcagttatttttgatgatttttgtattcaaaattttgtggatgatttttaaatttacggtgtgctaggcattgaaggtaaaaatggtgaacaagtccttgtagagatgaattatcttcccatctcattaccttcatctcttcaaacttgggtgctttagaaaacgtgtgagggtacttgcagcaatgggatttttgagatttgcattaggagggcattctgaggtggcctgtcctgggacttcctgatgccagttaaaaactagtgtttcttgcttttgtgtatccaagctttgtgatataccacctgtctgtctaatggagagtgcatctttagttgtgtatgatatgtgctctcaggagaaaatgctttcttgcatgttatgcaatagctatgatttcctcttatgagtt

SEQ ID NO: 9098 - DNA, 1094 bp, Homo sapiens
gtactgaaaagaagagaaatcttttgacagggttaggttgtgtgacagggttaggttgtgtgacagggttaggttgtgtgacagggttaggttgtgtgacagggttaggttgtatgactgttgagaaaaatgcagtgtattgaaggaatgattggctgcaaataaaagtatactattttcttttcctgtcttgatttcttttttggagagagggctttggattcatttcctctaagagaatagtctaatgctgtcaactactgaaccacatctgatattattgatgattaaaaccatagtcttcctcgttagcttccatgatgctgtgcagcagctcccagtgtttcagagtagtcttactctaaccgtgtccttttctcaccctgtcctttgattatgatgtaaatagaaattaaatacttggagaattcccccgttttcacctttagtgttctttagggagaacctttcatcatccttatggattccaccctcatctgtttgtgtttaactttcaaagcatctctttgtggcttagctttttttagtggtgttgtgctgtagtatgtctggatactgtcagttaaattctttccctgtgaggataggaaaccttggatcttgatttcttcaaccgtgcttgtctgacttctccttcaccatcagtacgttctcagtccctctgggcttaaagcagattttatttttttattttacttctctatttttttttttttttttttaccaagtcctgcttaattttttctgtagccactggtaccatgtttaaagctttgattatttttatattagattcataaattgttgaagcaacaagaaaatttagagttaatttaccccacctctcttatttttatttttgagacagggtgtcactcctatcacccaggttggagtgctatggcacaatcttggctcattgaaacatccgccccttgagtagctgggactagacataagccactgcatgtggctaattttttttttttttttttttttgagacggagcttcgctctcgttgcccagtttggagtgcaatggcacaatctcggcccactgcaacccttgccac

SEQ ID NO: 9099 - DNA, 1028 bp, Homo sapiens
gtagctgggattacaggtgtgtgccaccacacctggctaatttttgtatttttagcagagacggggtttcgccatgtttgccaggctggtcttaaactcctgacttcagatgatccacccgcctcggcctcccaaagtgctgggattacaggcatgagccactgcgcccagccgtgtgtgtgtgtgtgtgtgtgtgtgttttttaaatgtacttatcactaatttagcctcagacttttagccagttacatattcagatcttccctcatctttatccttttgaaggaatctttctagtttggactgctggctctcccattctgtgaccttgggggttctttttacctctttctccccattggatctcctattcctgtgttctgtgttaccttgttgctctccttagttttagtggagcatagttgccagtagttttcagtgagaaaggtgtataggagctagacctgttgagactgtgtgtctttctgtgtactcgtggttgataaagtttgactgtgtatatgcttttggattggaaatagttttccttctatattagtctgctcagggttgccataacaaaatatcataggctgggtggcttaaacaacagaaatttattttctcacattctgtaagctagaagttcaagatcaagcttcttgacaatttggtttctagagagtggcctctttctggtttagagacaccatctcttctcacatgtggtgccaatcatcataccagatgacacagtctggagcaccataatcccaaatgttggaatacctaaagatcagaatccctgaagatcaaaatccttaaagatcataatctctaaaatcctgaaaatcacaaaagattaaaatcctgagtgttgaagccctgaaagccaattaccggggaagggacagtatgtttttggttgtgcgtaggatagttgcatcacgttagacggaactattaccttgttattgtctttattcgtaaattaagtatggtttaaggagatgcgtgtgggtgccagg

SEQ ID NO: 9100 - DNA, 1094 bp, Homo sapiens
catttactaggaagtggtagaagtggcgcagtaggtccttttgggggacatgcaaacatagttaatcaaatttcacttgtccccattgtatctctagaaggtagacaaaaatcatttaatcatctaccttcctgaactggtgctagctctaagacttgaaattttagtcactttttacttggctttctttttatcctgatgagcagtgatttaccagggcctattggttctactgttgactcttgcaactgtctttttctttttgttaccacggctgcaaagctaggtcagactttgttgcctggagagatactatggtggttttgctgtgaggggtctctgcttctaactggcaggtggatgtttcctaggcatctgaaatactactttgcatatgatgtctcctcagccccagctcctgaagaacagtcctactcaacccttgcaggttccccttgagcttaaacagtgatgtccaattcttgcccccgatattcagattctcgtacacgacttaggatttcctcagctttacctcaatattcttccggatgaatcccatgtggagaattctctgcaagtattcattccccttgtggccccttgtctcatagagtttttttgtttgtttgtttgttttctgagatagggtcttgctctgttgcccaggccagagtgtagtggtgcgatctcggctgactgcaatctccacctcccgggttcaagcgattatccggtcttggcctcctgagtagctgggattacaggcgtgcaccaccacgcccggctaatttttgtattttttgtagagacggtgtctcactatgtcggccaggctggtcttgaactcctggcctcaagtgatccacctgcctaggcctcccaaagtgctggtattacaggcgtgagccaccgcgtccggcctcacagagttttattattgttctttgtatttgaattcacgtcttctggggctcagctttcttcctgccttttttgtcaaaccaccttggattgttccagttcccttgtgatcactcctttgtgaactctcagagcatctcattaagttattttaggattatttttttctc

SEQ ID NO: 9101 - DNA, 2454 bp, Homo sapiens
ctttaaaaaaacgggcttttgaaagatttttttgtgactaagttgccaatctgtctttcattatagaatttgatagctcttaatctgaagactgcttctttttgaccatttgccaaaagcatctcagtgtgctcctgaatttctacttgattaggaaaggccattttctttgggtaccttgtctgtaagatatttgaataataaatgaccattgtcacttacctcaagttgggtgagttataaatggcacataactgggtttcacttaatacaaaccacactgacttggattttccaagctttgccttcaccacgttagtatagaattccctttctagccaagcagtttcaccatttttcatttgctgaggaccacctcgtatctcttcagttttggagacttagaaactttttgtgttgttgcaaatagccatgccagtcataaccatgtttcctactctcctccagttacctgttgcttcctttctgatgtttgactcatttgttcgctcttggaatcctgcccagtttcagaaattccaagaatcttggatgcttcagatgggaaacctttctagggcctatgagaatttactgattttactttgacttacatttttttttttttaaattttgagacagggtcttactctgtcagccaggctggagtgcagtggcgtgatctctgcttcccaggctcaagtgatcctcccacctcagcctcctgagtagctaggactacaggtgtgcaccaccatgcccgactgattttttgtactttctgtggtggagacaagatctccctttgttgcctaggctgatcttgaactcctggactaaagtgatccacctaccactgtcccctccaaagtgctgagattacagatgtgagccactgggcctggctaacgttggcttttatcataccatcttacctctattcacacaccctcacctccagcatgcacacgtgcatctggaaccagctgggtgttccttgcctctcctcggtttccttcatctcttaagaagacaactggcaaaaactcgactaccattgtgccatccttattacttgcctttccccacacaacccctcagtctcacttcaatgaaacttgttcgtagtagaaataacccatgctttgcatatacttggactgaagtttttgaaattgtggaaaataggcacagaaattcctgtacattcaaggtttcataatgagaatttgtagaggaacacgttactgtagttgctttaatttgaactagttgacaaaagtaaggctggattttttggttggtggttgactttaaaaaagtgaagtgaatgataaggttgtacatcttgtcttgctgttagcatcttagcagtgtatttggagttagtacagggtgtatatatagacatttgccttctgagggttgtgtatttcccagacagcttagaattctaaaggcaagtataaatttgtatcatttgacaccaaagtacagctccagaatgaagaaaaagtggaaattagacttggaggaggcagaatgctggtgacattggagaagtaatggtcatttagtgtgaaatcttgtagcggataccttggctttgaacgtagaggccattgcaaggcatcattttctgctccggtgggcccctcttcattaggctcacccctctccaatctgtctttcacattgttgacagttaacgcattcacactccagatctgctcttgcagactccagtgtctgtcttagcaccgtgaccagtctctacagtgccccacctcaggcgtcttaccttcatccccttctttcctgtcccatatttaagtcatattcacacctggccagacccaaaagaggtttgtcctcttccctctgtccttcacctttgtaggaaatacgaactctgttgagagtgtactaaccacagcatcagtgtcatctccacgtcacttccaatgtctgcttttgttcagaattgttctatgttattaaaatactttgttgaatctctgctgtagatattttaatgcatactttcctcagttaaaactcactggatctgtctgcttctgcagcaagcctgcacagtgccgtgcattcacacacagccctttgtggtctggccttgtgttgccaacctaatcctaccacctacccaaaggctcctccttcctgttgtcctcagggccttctcactgctgtgactcctgaagctactgggtcttcctgtccactgctttcagggaggcgtcgcctggcctggaatatgttatgcagctccattcatcacctcctaaatgctccctgtattttgaggctcaacttaggcttgatatataatgaggcatttttggccaggttgtcctcccttgagctacctttctgtggaacaaggttgaaatgtatgcctgcctgtctctgttttctctgttctcaattttattg

SEQ ID NO: 9102 - DNA, 1034 bp, Homo sapiens
gtagttctagtagttttaatagtggtgagagaagggagtgctgaagggagacttggggtgtataggaattagaacttgggcagcgtgtgcttgcatgtctttgtataagattgtgtgaaatttgtgtgtcaaatattttctttgtagtgttctgttaaatatatagtattaaaagtcaataacacattttgttgtcttaagtctttcttgtgtgttttcttgggtggaagcagctgcttctcctattttgttctgtttgtgctccgtatgtttaggtagcggcaacttctactagaaatatcttatgtgtgtttattgccagtctggcatatgatatcagatattcacttcggtgttgctatcttgaggattccaatggggccagttattaaaaggtatagacagagctggtttgatgggtgtgtgacctgtgcagtctcgcatgctcagaaacacttggattaatgctctcctgtttgggttctgtcttgaaagccatcataatctttgaatcttctttgaaatctctgaacattttgctctgggcccagctagtcctgggtacagttatttcgcagttgatagtatacagtttattgtacttagatataaagttgccaaatttaagcatagtgagttcatatgaataggagattttgaatttgaaattcattgacgatcttgtcatccccacagttgactgcttgtttgtgggtaggatcaccagtagtttctttcttcagggttctaatagtttatcttttgtcatgtttatggtatggtatgttctgcctctgtcttgttgaatgaaaacccactgatatcaactttttcagaggtagtttctgaaataacacagtactgtttgcactagtatgcttttcctatgtttttcatggctgtatagttattttgaatatatgtatttaaatttgtgaagatgtagattaaaatgatcctccatttatgaattacaagctgtcagcagtggtttaaaatcaggcatcagcagcatctgggaactagagatgcag

SEQ ID NO: 9103 - DNA, 1020 bp, Homo sapiens
agtctcagctactctggaggctgaggtgggaggatcacctgagtcctggaggcagaggttgtagtgagccagggtcatgccactgcacaccagcctgggtgacagagcaagaccttgtctcaaaaaaaaaaaaaaaaaaaaaaaaaggaattaatcactttacaacagataattgctaaagaattccttttcttgtgtttaaatctcaagtttaaaatcagcgtagtaaacccacaaagtgatggctggggaattggaggacctcattcatcagttaggccacgctgctggagcacacgggctctgctacaggaatgttgcttctggctcactggaacagcatgggcaggaacttacagcagtaggtggctttcttccatatagtgatttggggaccacggcacgttccatgttttggttctgccatccctcaggttcttttggtcctcagcatttagctagatacaggtgaaggaccatgggaggtttgatggttcctggcacaatggaggaaactctgtcatgtggccacacctacacggtgagtgccccaggaaggggagagtagagacgggtgactgtcagcacctcactgggcagggcgcaagggctgtggggtagacgttgggtggattcaggagactgcagaaagcaaagtgggtgttaatgggacttttatttcctgtggaacaaaggacactacacttttctgcaaaagaccaagtagtaaatattttaggctttgtgggccgcagatggcctctgtcatatattccttttttttcttaaaacaacccttaaaaaatgtcaaaatcattcataactggcaggctgtgagctggatttggtttgccaacaccttcttatttcatcacaactaattaccactcttctttagaaatccagtgtttaatgagtttcctttataataaggttgagatttgggaagtcagtttttacttgaggcaaaaaagttgtatcttgattcataattcagaagtgtcattttatctaggtttt

SEQ ID NO: 9104 - DNA, 1035 bp, Homo sapiens
cccaggtgtgtcgtatacgtgtccctcctgccccagtcttccctggtttcttttgtcatgcagccacgtttggctattttgccatctctctgtcttgctcagcttttgagcttgccactcctgatgacttgttggggcgctgggtcctggctgtccagcagggaggagtgtaagagcagagtaattctgggtcagctagagtatcgtctggataggctcaacgtctctgttgttgctagtgaaaacagacacgagattgtcatagtaggagtaagtggaggaaatggacctgctgcctgtttgcagagggtcagtggtctggttgtcagaggcaagcatttctaaagccatggggtctgtagaagagcctgtgtgggtccatatagagcaggtgtcatgttcttagccgtgggccttctacaggagagacagcatggtgaagactcatggtgggctgactttgtgtctgtgctgatatccagatactggaaggctgatgtggagagcactagttttgttttgttttggttttgacacaaggtctcactcttgcccaggctggagtgcaacagtcatagctctttgtagcctcaaacttgtgggctcaagtgatcctctaatctcagcctcctaaatagctaggacaacattttttttgtatactgcttcctgccttggtagcccaggctgatgtcctgttccccccttcattatagtaggatgcttactctcttaagatgtaatatagacttagtaccatttacaacccatctaaagataaaggctggtccaggtccctacagagtgccttaagtcattacaaggtgctgcatgcagtgcagtttcctggaaaccagtgtcctccacagttgtccgcaagctttgctgcttcccatgccagaggaggctgtagcctgatggctcgtacgtccagccgctttcctcgctgatcgtggagaaggcccgggccctgcagcatgacctctctgggcttctgagtactaggtgcgctctagtttcttcagggaaaatgta

SEQ ID NO: 9105 - DNA, 1575 bp, Homo sapiens
atccttccgcctcagcctcttaagtcattgggactaggtgaaccacctcgcccagctttctctgaatatttttgatttccagttaattgagtcagtggacatagaacctgtggatacagagggccgactgcaagtaacaaaatgccacaagagctgaaatgtaaaattcctcaagaaaatatgagtgaatcaagtctaacagtatattgtaaggataatatatatcataacaaagtatggtttgtcttgggaatgcaaggctcattcatccttcaaaatcttcacatcaacagacagcagatctgatcacatcagatcaatgaagaaaaaacatatcatcattttgttaaattcctttatgataaaacatctcagcagattagtattagaagggaacttggatgaaaactgataaagccctctttcattttatttatattttttgagataaggcctgccattcagactggagtgcagtggcacaatcatagcttactattgacttgatctcctgggcctaagtgatcttcccactttagcctcctgaagtagctaggactacaggcacaagccatcatgtccagccaaattttttttatgttttgtagcgatggagtctgtgttgctacattcagaggggagggggcgatgtgagactgcatctgtttacagatgacaggattgtctttgtagaatatcctaaagaacattaaagaaaaaaaaaaacgcatactcctagaactaacaaatacatttagcaagattgcaagtatgaagtcagcactcaaaagttaattgcatttctatgtactaggaatgagcaattggaatttgaaattttttcgaagtattattttttatagcatagagaaaagaaaatactaagatacaaacctaacaaaatgtgtgcaaggcttaatgccccaaaactatagaatattgatgaaatcaaagatgacctacataaatggagagaaatactctgttcatggattagaagactcagtattgttaagatgtcacttctccccaaatggacctgcagattcaatgcaattccgaacaaaatctaagcaggattttttagaaatcaagtgaattctaaaacttgcacaagaatcaaagtacagtagccaaaacaattttgcaagagaaaaggactcacactctgattttgagacttaatacaaagcgacagcaatcaggacagtgtggtgaaagaatagacatacagatcactgggacagagcagagtccagaagtagacccatccccatgatcaggcggtttttaacagaggcatgggggcagttcagcggagaaaggacagcgttttcagtaaatcgtcctgaatggttaggtattctatgcagaacgttggactttgatatatattttgcagattatgcaaaaattaactcaaaatggatgatagaactagacataaaactagtagttctagaagcaaacaggagaaaatctttgtctcagagtcatgtacagattgtttagatacattgccaaaacccaattcataaaacagaagttgataactcagactacactaaaatttta

SEQ ID NO: 9106 - DNA, 1060 bp, Homo sapiens
gtttcagctttgggttaaatcagtatagagcacagaaaacaggagcaatttggaaaaagagatgaagatttaaagaattacagtttctttgatagctagcatggtcattgccttctggggacgtagtttttgtcctaccttctagtgtataaaactccgggaatataacgttcctaagtcattgatcactggtctttaattttactaataacaatatacagttattgttaatttattctgttaatctttaggactacttctgatgagactaaatttgatgagactactggaggagttactcattacttcttcattttgagattagataaccagacccaaccatttcctaaatatgacatactaaattgacttccaaaatatggcattttgtacttttagaaattctttcccttttgtaatgctattaccttttcaagtaatttgaaaacccttgtacttccaggagattcacgttactgcctctcgtatcctcatttgtttttgctgatagctctagtttttgtatgctggagttgagtcatgagcacctcaagactgtggaccgtatttttgtgtatctctgtctgccatgttgcatctcatacaataccctgcacaaaaaccatcagtaaatatttgttgcatcaaaatgaaattcttacaatttttttttttttttgagatggagtctggctcagtcgcccaggctggagtgcagtgatcttggctcactgcaagctccgcctcctgggttcacgccattctcctgcctcagcctcctgagtagctggggccacaggcgcccgccaccacacccagcgatttttttgtatttttagtagagacggggtttcaccgtgttaggatggtcttgatctcctgacctcgtgatccgcccgcctcggcctcccagagtgcagagattacaggcatgagccaccacgcctggcctcttataaatttttttgaaaattatagaaaatttaccacgctaactatttgtgttagttgctttgaagagaaaaaagatactccctttctcttggagaaacgtactctt

SEQ ID NO: 9107 - DNA, 1063 bp, Homo sapiens
gctgggactacaggcacccgccaccgtgcccggctaattttttgtatttttagtagagacggggtttcaccatgttagccaggatggtctcgatctcctgacctcgtgatccgcccgcctcggcctcccaaagtgctgggattgcaggcgtgagccactgcgcccagcctaggtagatcatctttttagctcattttgttaatgatttcagactcagatggtgtaggtagaatcagactcacatcttccattaatgtaattatgaagatgtgtgtgcattgtgttactaataagttgctaaaactagtttcattttggagaaagcttttttaaatatcttctagtattgctttgaggatccagtttaagtagaacatgcgaaggggaggtcacaatgtctggcacatagtagttcaataaaagttagtttctttctcatctttaattaaagagtgttaaaatcttattttgtaggaaaaagcgaaagtgtgaatgaggatacatcgaatcctattttaacttagacagcaagacttggctaagagtcgccaactctgttttgtcctattttgctcagttctttgcatggccttctatttctgtgccccaccatggggttacacccctaaaacacactggcccagcatgatatgtgtgctggcttgccagccaagtggcccgaagctcctcttgagtgcactgcagtacaaccacttgacttgctctttaacatagtcctgtgagatgccagctgccatgaccaagcagtattcccactcctcctctacactctggcaaggctttcctggaacatccccatgcccacatctttacccagtaactcactaaagccactcttgactcaagcaggtgccgttccttgatcacggaatctacctttgatttcatcaggccagattcacaaacagaatgggagtgctttatctatacctttgagaggatggagagtgaaataactggaaacactgggttatcacagcttaatttcatccaggcttggtgtctttaccaaagatggttggggaaaggaagggagattcat

SEQ ID NO: 9108 - DNA, 1045 bp, Homo sapiens
cacttgaggttaggggttcgagaccagcccggccaacgtggcaaaaccctgtctctactaaaaatacaaaaacaatagccaggctgggtggtgtgtgcctgtagtccgaacttctgaggaggctgaggtgggagaatcacttgaacttgggaggcagaggttgcagtgagccaggattgcaccactgcactccaccctgggcaacacagggagaccctgtctcaataataacaataacaataataataataataaaattattaatccctgtgttgttgactggggcatcacgttccagcagatgaccaggttggcaggaaaagctctgccctacatgtattctcatctctaggtgactcatcagaaggtagatttgggttttttgcaagagccagacacactaaccactcattttgcagtcagggtaagaagcagagaaatgagaattattgatactgtacagaattaacgagtagaaaatgtgtaggtagttaatagaaatgaaaacaggtggtctagcatctgacattgggatagaagagatttataaacaaaatattttgaggtagatattatagctcattgacacagagtttaagaaaaaaaatgaaggcagctggtatttgaatattggatgatgattctcacaggagacacggttatgccacagacacccagtatctgctgtggtctttggaagcagtaaattctcaataatttgttgaaccacagccagtggagcctgttgtttgtcacaggttgcagtttgcagtatgtgagaagctaaaatatttttacagcacgctcttaattgtgctataaacatgccgtatgggcacagtggaatggaggtgccgctgtaaacagcaagagttgaaggctgttacgtgccttgagaattggctcattttaactcaaaaagagcaagaacacaagatattctgtccataccccaggagcattctactcaggctaggatccaccacctcacaccagaccctgcaggtccctgtttggtgtctcgacattcacgtgcctggactct

SEQ ID NO: 9109 - DNA, 1309 bp, Homo sapiens
caaatgcagcattccaaataaataaatagtcgctgttgataggctatgatttatacataaaaattccaatggaatctgtagataaggattaatagaaaagtttagcaggtttactggagacatacaaaatcacttgcatcctataaatcaatataagatattccaaatgtgcctgtttttaataaaaatgtaaaaccttatctataactaggaatatgacctttatgggaaaacagtttaaaatctcatggaatatattgaagacctgaatataaataccaagatttgccatgtttatcaatgtgaagatatttttagcatttctgaacaagttagtctatgaaattaatgaaatttccatcaaaatcccaatagagattttcatggaaattgagaaactgattgtaatagtcataagaccaaagagagccaggaatagccaaaaacattttaaagaaaaaagtgaggggcttcaccatattagatatcaagacttagtaaagctggccgagtgtggtggcttgcacctgtaatcccagcactttgggaggattaggcagacagattgcttgagcccaggagtttgagaccagcctaggcaacgtggcaaaatcctgtctctgcaaaaaatacaaaaattagctgagtgtggtggtgtgtgcctgtggtcccagctacttgggggtgctgaagtcgaggctgcagtgagctgtgtcccccactgcactccagcctgggggacaaaatgagaccctgtctcaaacaaaagcgaaaacaaaacttagtaaagctactgagatggtgtggctttggcaaagaattatacaaagagaccccctccactacatgaacttgttacatgttagaatgccattataattcaatgaggaaagagtggactagtaaatagtgattatccacatagtagaaaaataaaattagatattttgtctcaacataaatatgaaaagcatgaactgtacagcttttagaagacaacaaaagagagtatctttacagtttgggtgtaaggcatttttttaaccataaaaagccaaaccataaaggaaaatcttggtaagtttgactttaatttctaatatcccagaagacataaaatgaaaagacaagccacaaccagtaaagaaccagtagccaggatattagaaataaccttatatcaatgagagatagtctaatttttttaaatggacaaaggatgcaaacaagcaactgtctgtggaggaaaacaaggagcaaaccaaatccagagtaaatgggacctgtcagttacagtagtaagtaaatg

SEQ ID NO: 9110 - DNA, 1138 bp, Homo sapiens
ccctctgttggagcccagtggagcctctgggagaaaagctggggtgacttttcctacaaggggcagagggactctgctagatttttgtttttcatttgtttttaattttgtaacatggaaactctttccttaggatataccagctctcattactcagctaggaattatacctctttaaagcctgaatttaaaagtctgacagttttaaatgcttactaactgtgggagttaaatcattacgaagtgaggaatacagagtgttgtccctgattctgggtttaatctggtaagaatctttacagaggacgaccacacgccgcttcctgtagcatgtgtcgtggttgtaattctctcatgtgcatattaagaagttgctgctcagatgtggctcttccctttgcagaggccggtgccctcgaccgcctcctggatctccccgccgcagcctcctcagaagacatcgagcggtcctgagagcctcctgggcatgtttgtctgtgtgctgtaacctgaagtcaaaccttaagataatggataatcttcggccaatttatgcagagtcagccattcctgttctctttgccttgatgttgtgttgttatcatttaagattttttttttttggtaattattttgagtggcaaaataaagaatagcaattacttgcaattgtctttttcttccacacctctgtctcatcaccagcgccacccatgggttttaaaagataaagcttgatcataatcgtggattagacatgaattttaaacccaaattctaccgtcaagagcatctgagacaccacctgttattgcatgtccaggggacataaatttatctccatattaagctgagtcaaatgtaattatgaaggtaagtctgttactgagatgaacaaaaacacaaaacagacaaaacccctgccctcgtggagctgatattttagggagatgggaatgaaaaagactacaacaaccttaaacagatgggtgagttgcgtggtactcatggaggtggtcagtgctgagaacagacgtgttggccaggtgggagggccaggagcaaggcaggagaggagagatgggcgggcaggtagaaaggcaagggcaggaggtgtgtgcagggatggtgctgtgtg

SEQ ID NO: 9111 - DNA, 1030 bp, Homo sapiens
ttttattacaagatacaaatttatcccacacagttgcaatgcaagccttgatgaaaccccagcttgatggtgtctcctctggtgtggctgcgctgttgggaagcagctgtgcccctggagactcccggctccctgtttccaccaggtgcgtctgccgatggccccctgaagttgctgcccgagagctacttcgacgtggtggtcattgacgagtgtgcccaggccctcgaggcgagctgctggatccccctgctgaaggccagaaagtgcatcctggcgggcgatcacaagcagctgccccccaccacagtctctcacaagtaagacccctttgcctcacatgcccttctctgcccccgccctcctgcggtccttccacgctcagccaggagccccaggctcaccaggagcccctgcggtgcctcctcggtttctcggcacagctcctaccccgtcttacagcattcattcatctcaacgtcgcatctgtgagatcatgtactccccgagggtggggtcgcatcaccttcatctttgtagcttcagaactggacacagggcctggcacgtttctggtgttccgtccctgcttgttgagttgaatatcccctcatgaaccaggcaggtttgatggtagagtgccgtgagagccttgggctgggctaactggcctctgggtggatgtgggttctttagtcttcaatctgtagacacatccctggatggagggcactgggcagagactcagcaaaccatggttctgccgtgcggagacaccggagccctgatgcagtggcctggcccaggctgtcctggtggagacactggagtcctgatgcggtggcctggcccaggctgtcctggtggagacactggagccctgatgcagtggcctggcccaggctgtcttggtggagaaagtgctgcccgcccccccagcccccctctcacctctccccatactacccagcactcactgcttcagccacacaggcctcgctggcccctctgcctggaccactcctgcctg

SEQ ID NO: 9112 - DNA, 1531 bp, Homo sapiens
caggcgtgtaccccttccactctgctgacgcatgttagggacaggcctggggttggcgggcagcctgtcccctaactgtggctgccagggtacctgggggcagggccctaattcccttaggagctccatgaccacgcctgcctgagccccactgtgtctgtggacccgccagccctgggggaggccagctgcgtgtgttttgaagtagcagccaggctggaatcccagccctgggcagagggtcctggcctcacagtcatcctctggctttgcggttctgtctggggagggtggtggtgggtgcacccatgggtggggctgatcagtccccggctcctggcccgccaggtggtctactacgtatttgccatcattgggatcaacttgtttagaggcgtcattgtggctcttcctggaaacagcaggtgaggtggggtccgaggtgccacagggagtgtctcaggggtgctggggtgggcgggaagccttggcggtggcctcagtgggctcagcatctcaggatgggagggtgttctcccagttccttcgtctcctccctccacccccttttcccgacccccaatttccacctccgctccgcacctctcctaggagcccttgcctggagtctgctaaacacatttctcgtggcctgctcagagcagcactttccctgccctctgagcctctgtatcccaatttgtaccttcaggccaggctgagcacgccagcagaggaaaggggtgtaaggtatcaggcctcagaacctggagcccccgcccctgacccaggtgtgttgtgttccccagcctggcccctgccaatggctcggcgccctgtgggagcttcgagcagctggagtactgggccaacaacttcgatgactttgcggtgagccctgcgccctgtcccagcaccctgctccccgggctcctcccctccctacctcctgggccctcctggaccgctggtctctgcccccgcaggctgccctggtcactctgtggaacttgatggtggtgaacaactggcaggtgtttctggatgcatatcggcgctactcaggcccgtgagtcctcgtctccctgacggcagtgattctccgtgcagcctgggggttccctcacctccgggcacgctgcatctgcactggacgcccggagcgtggctgggacggggactcgggccttgacagggaagtcggccagcgtggcatcctggcttgccttgtccctgccccctgcatagccacatcgtgactctcaggatggtggccagtgactctgggtttacacctcctggaggtcgttggtgtgtttggggcttctgaggaattccatgggggtgggggagccccgggaaggctgagtgaacgagatagttcagctctgagcttgaagagctcagactggccccagctgatggtcctgggttttaatcccagcaccgcctcctgctggcttagctacctcggcagcttgttgcacgtttctaggcctcagttgggttgtttctgagatggaaatagtaa

SEQ ID NO: 9113 - DNA, 1085 bp, Homo sapiens
ttccacagggatattctggaggagcccggggaggatgagctcacagagaggctgagccagcacccgcacctgtggctgtgcaggtgacgtccgggctgccgtcccagcaggggcggcaggagagagaggctggcctacacaggtgcccgtcatggaagaggcggccatgctgtggccagccaggcaggaagagacctttcctctgacggaccactaagctggggacaggaaccaagtcctttgcgtgtggcccaacaaccatctacagaacagctgctggtgcttcagggaggcgccgtgccctccgctttcttttatagctgcttcagtgagaattccctcgtcgactccacagggacctttcagacaaaaatgcaagaagcagcggcctcccctgtcccctgcagcttccgtggtgcctttgctgccggcagcccttggggaccacaggcctgaccagggcctgcacaggttaaccgtcagacttccggggcattcaggtggggatgctggtggtttgacatggagagaaccttgactgtgttttattatttcatggcttgtatgagtgtgactgggtgtgtttctttagggttctgattgccagttattttcatcaataagtcttgcaaagaatgggattgtcattcttcacttcagcacagttctagtcctgcttctctggagtagggttgttgagtaaggttgcttgggttgtgcattgcacaagggcacatggctgtgaggtgtatcctggcggggggctgtctacctgcagtgaggggcaccttttctgttttgctcaaaggcatgtataagccaatgggtgaccttatttcctgtgtcttcaggtgtgtggcagggggcctggggtggggaggtggggcgagcgagcagtgtgtggaaagccttgttgtcacctgaagcacgccaggtccagattgaccaatggttttctcacttcaggggccaacccacgccccctttctgctgaggtttgggtgccatctagtggtgggatgggacttggttgactacatttaaggtaaggtggacccagcaactcccagaaacaactccgggga

SEQ ID NO: 9114 - DNA, 1050 bp, Homo sapiens
tggcgttccagatttcacggctgctctttcccactgacagtgtggtgtggacgctgccaagggagtctggagccccagagggtggaggtgcaggacttccaggagcgtccgtcgcactccacccgagggcgagcacctcagtggccgcagtgggtggatgcatgctgtgccaggctgatggctggccccggggcacaggcctgagcgggagaggatggaggggagggatcaatggtccaggtccccctggccacccagcattcatcctcagtcatgcacggcccaaggcttcgacagccattgatcatggaaggccaggttcacctcaagggctgccacatggagaggttaagtctgaaaaggctgaaaaggcagggttcaaagggcctcctgtccagatcagatggcactgaattccccagggagctggcacggccagtgggaacaggcggtgaaggcgctgttggacatggggacgggcagggggtgtgcagggtgggcgggcaagcatctggtgtcttgtggctccagagaccaggtgggaggtggaggcatttggtcctgagtgtcctgacaggtgatggcagctcccacatctcgctcaggttcagaggaggcagcatgggccgagggacagtttttggcttagtcttgctcttataaaggcttccgggtcatggcacctgggaaggggccctcgctgcaggccccttctaaggaccccctcttcccacctctccccaccctctctctctcaggactgcctccgggcctgccaggagcagatcgaagccctgctggagtcaagcctgcgccaggcccagcagaacatggaccccaaggccgccgaggaggaggaagaggaggaggaggaggtggacctggcttgcacacccaccgacgtgcgggacgtggacatctgagggcgccaggcaggcgggcgccaccgccacccgcagcgagggcggagccggccccaggtgctcccctgacagtccctcctctccggagcattttgataccagaagggaaagcttcattctccttgtt

SEQ ID NO: 9115 - DNA, 1029 bp, Homo sapiens
cacattgtttgctgctattggaggatcagttttttgttttacaatgtcatatactgccatgtactagttttagttttctcttagaacattgtattacagatgccttttttgtagttttttttttttttatgtgatcaattttgacttaatgtgattactgctctattccaaaaaggttgctgtttcacaatacctcatgcttcacttagccatggtggacccagcgggcaggttctgcctgctttggcgggcagacacgcgggcgcgatcccacacaggctggcgggggccggccccgaggccgcgtgcgtgagaaccgcgccggtgtccccagagaccaggctgtgtccctcttctcttccctgcgcctgtgatgctgggcacttcatctgatcgggggcgtagcatcatagtagtttttacagctgtgttattctttgcgtgtagctatggaagttgcataattattattattattattataacaagtgtgtcttacgtgccaccacggcgttgtacctgtaggactctcattcgggatgattggaatagcttctggaatttgttcaagttttgggtatgtttaatctgttatgtactagtgttctgtttgttattgttttgttaattacaccataatgctaatttaaagagactccaaatctcaatgaagccagctcacagtgctgtgtgccccggtcacctagcaagctgccgaaccaaaagaatttgcaccccgctgcgggcccacgtggttggggccctgccctggcagggtcatcctgtgctcggaggccatctcgggcacaggcccaccccgccccacccctccagaacacggctcacgcttacctcaaccatcctggctgcggcgtctgtctgaaccacgcgggggccttgagggacgctttgtctgtcgtgatggggcaagggcacaagtcctggatgttgtgtgtatcgagaggccaaaggctggtggcaagtgcacggggcacagcggagtctgtcctgtgacgcgcaagtctgagg

SEQ ID NO: 9116 - DNA, 1031 bp, Homo sapiens
cttgttttcagcaaaaacaagtacagctttgcaaacagactaccccagggcttgcccttttttgtgagggtagtcctttgggatcttgaccccttccctggatttttgtctgtgttaatgtcttcatgttgtgtatttttgcacttaatatttgccctgtgtatgttttcccagcttatttacacacaaagcataacagatctgagcataatgagactgcccatctttttagctacagatacctgtaaagttgcatatttgtgggaacctgtattctgagcttaattactgtagcctgggtctttcatttcaagatgatgtgcgaggtgatgccgaccatcagcgaagcagaaggcccccctggaggaggtggaggccatggttccggctccccttcacagccagatgcagattcacattttgaacagttgatggtctccatgctagaagaaagggaccgccttcttgatacactgagagagactcaagaaacgctggccttaacccaggggaagttacacgaggttggtcatgaaagagattccttgcagagacagctcaacacggcacttccacaggtatgagtgcttttaacctgaaactatagatttttctccactaaatgtttttttattagtgtcatcttttgttaatgtttcagatgagtattttccgtaacgatttgtgaaatgatagtttctggtgtttgtaagtcaaatacaaagttcctagggattaaacttcttagggagaacaaatcgttgtactctaaagtcatgtgaaaatacctcattattttcattcctatctttgggaactgcctaggttcaggaagttctccagagtttttgaaaaagggctctgaagcaaccaatctatttggtgcctccattctgttgtcttaagccttttctggctaaacttgtacttcccatggattatctcatgtatttctaatttcctaatgtaatttaatagacaaataggattgatttcacggaaaaaaaaaattattttgatagcccaccttt

SEQ ID NO: 9117 - DNA, 1050 bp, Homo sapiens
cagaattgctttacacccccgacatctggtgtcagcagtggtggtgtgtgtggaagtagggaaaacactttgatttttcctatcctcattagccagggaggtcagcaccccctcattttactagagaagtggggatgttaatcaagtgccctgcccttctcaagttcaaggtgcctgagacactggcacccctcctgtcacctgcatatatttacttcatgttttgattgtcccatcactgccagcatcaccaggcatgaccaccgtgttccagagcatggtggcagtttgtgagtgacagagtggcagccagtggcctagtgtcccgcaggcagagcagactctttgtttctccaaggcaaggatgtggcagtgccaccaaatggtcgtgtcaattgatgcccaaatggctcaccaaaagctgagtgacagttgccacagcaaaaaaaggggagaaaacataggttcagaatttcttggaaatgtttgaaatgcatgtgatagaactctaggtgggaaattggcttgttagatacagtaacttagcatgcaactagagtaaacagtttgacctaccaacccaccgactcatctgtttattttacttctttttttttgagacaaggtctcactctggccaagctggagtgcaatggcatgatcacggctcctgcagcctcgacctcctgggcttaagcgatcctctcaccacagcctcctaagtaactgggactgcagaggcacaccaccacgcctggctatttttttaatttttgtagagatgggttttcaccctgctgcctgggctggtctcgaactcctgaggtcaagcagtctgcctgcctcagctcccaaagtgttgggattgcagacgtgagcccctgaggctggccccatttgtttgttctaataaaaatgtaggactgaatttgactcacagttgactaatttacattctaaagtggccagaaaacttctattggtagtttccttcataggaaaattgggaggttctcactcaaaattggcttatatttgggcatatgttag

SEQ ID NO: 9118 - DNA, 1029 bp, Homo sapiens
catatgctttctcttttatactatgttaagcagtttttagttgtgtttttccaaaaggagttttgctatctttacttatttctcttatgtaaggtattttacactcatattcaattttttgctttcagctaatgattcttaaagaacagaataatcagaaaaaaactctaacagatggagtgctggacataaaccatgaacaagaaaatacaccaagcacgagtggaaaggcaagtctgtaggctttgtctttattctgtttgatttcatttgttcacagtatgtgtcgggttatgtggaaaacagttgctaaagtaccggcttagagctgaagtggtcatgaaagttgtgtaatccaacagattgcataagtcagttttgattttagctatttcctggaagtatttttattttatagctcaccaaacaagggtatttaaggatttttttttccccctatcagagatcttctgatggttctttaagccacgaggaagaccttgctaaagtaattgagctccaagaaatcataagtaagcagtcaagggaacagagccaaatgaaagaacgcctggcttccctttccagtcatgtgacagaactggaagaggatctggacacggctagaaaagatctcatcaaatctgaagaaatgaacacaaaattgcaacgagatgtccgtgaagtgagcaataacaaaaactacagtcttgtcatgaagttgtatgtttgggacgttttagttaaatgattttttttctctgtttgtctcttactctcccaattactttcaacctttggattattgtataagttatattgaaaaagagagagtgctgtgaaactgccataagctacctccccatttttgttgtgaaatctcctgtccctgagctcttcaaagtagagaactagtcccactgactgacatggccatgaagtggacgccacactggcctctcctacctgtgctgctttaatattctttaatgtccttgtttgtagattcttcatctgtgcaatttctag

SEQ ID NO: 9119 - DNA, 1053 bp, Homo sapiens
gaagtaagaagttggtgtgctgcctgtgtttttgactttataactcccatttcatgtgccaccttgaaaactggcgaagagacctctgcagcatctgttgccaggcatgggggccctttgaaggaggaggtgcaaaataattagtgtgatgaagcgttcagaaagatcgtctttcctcatcattatgggagctgggaaaggattatataccttttgtttttatttcttatgatgtatagctagataaaagtgtttcctctttatgcagaaagttgacctgatgtaagtgttctgtccactgacttgtggattttcttctattaataatgatcaaaaagcacttttcttagaaatgtaagtagaactttaattggaagggttattgcaaggtttctatattttaatactagaataattattattggcacagtcaaatattaaaactgctgtctagtgatccatgacactctaggagagaggagcgttaatcttgaattccaaattaatgtagcatggttggcatgaatccagaaatttacatgaggatggtagagaatcccatcagataacgctctggttcaaatttaaactaaaaaaaagaaccaactcaatattttcgtttagtctaaacagttaagtgttgggaaactcctaattgttttgtgcatctgttctttatattagagttcctgatttccagttgaagaaatctgtagatttcttcagctttgctctaagaataggggagataagggtcataaaattttaaaatatcacttagtaaggaaattattaattgcaaccataggaaaaattgccatccagccttctccagaatttttgtgtaaataagtaaaatcaaatgttaatgatatccagaaccaacaagactcaatggaaggtttactttttgttgttgtaagatgtagtatattaaaaaagattgaggccagtgtggtggctcatgccagtaatcccaccactttgggaggaggctgaggttggaggatgtcttgaagtcaggagtttgagaccagccttggcaacatagga

SEQ ID NO: 9120 - DNA, 1542 bp, Homo sapiens
aaggaagcagatgggcttcttcccttcacagcttagggtcacctctcacctggaaatgcaatgaccttctggtgtttggtgtttgcaaagtgtgcagatctgaggaatgtttaaaactttcctttgggcctggcatggtatttcacgcctgtaatcccagcactttggagaggccaaggtgggaggattgcttgagctaggagttaagagaccaacctgggcaacatagtgagaaccccatctttatctaaaaaaaaaccaaactatcttgtatatttagaatttgtcagtgtgttgtcaatgaaatatttcatatttacaccatttgctttttaactgtgcttctatcatattttttcccgttaccatctattttcgtttttagttgtgttgttagccagcatgcaattaaatcgacggtgaatcattttagtggcatatgaggtggtaactagtctattttgcagtgttttgaaatactgtttttataatttacatcatctactaattaggtaacattttaaactctttgactgttttatttgtgggcttgtgcttatttctgtccagagaattcgtaaaaacagttgtgtatgtatatatattttttctggttttgtaattctgtatgctggctgacagtctctatgcttccgtcattggttttgatttcctgtcatccttttgttttattattttagccatctccagattcatttttaatccagacctcaggtccccatcagtcagtagtttactcatccacctcccctcccagttccaccccatgctatagcgattcttcacagcatgctcaggtaaccacgcaactgtgtgtgttcgatcatgtttgtgagtttgtgctgtgatgactttattaatgggttgtttttttctcagttaaaagtatctttttctcaatggtaatttaaattagtgtattactatatagtaagtatggatacaggcaagacataggtgtttaagagtttttttactcaaattatgtaggatttgtgtaattcataagtgtttcctacataactaatctaagcgtagaattaatggaagctgtttacacaaacagtatgctttctggttctgatgattgtgttcaagactgtaaatctcatcagcctgttgagtctcatcaactatctctaataggttatttttaaattaaaatatcttatgtgaatcataggatggatgtaaagattctacctaatattatgctagcttttgttcttatatattttcacaggataccttgctttaagcaataaatttatttttgaaaagtggtaaatcaaattctaggtaaggattttacattaatgtccaacaggtgattaactaaaagtaggtttgttcagttttataattggtattgcagtaacttcctcatccgttggaatatttttaattataacatggattttattaaagaaaactaagttatagagaggtttggcttagaatagatgattgttagggccttttattatatagaatgccatattttaataaaacacatgaaat

SEQ ID NO: 9121 - DNA, 1118 bp, Homo sapiens
ttcatcagttgctatgagaaagaagtgttgaattttttcaactataattgtgaatttgcctgtttccccatttagtcctgttggttgttgctttatctcttctctaaaactatattttaactgacttttactgattttgaaatggattttttctttaggaaaacaaagtgttaaaatgtaaaccaaccagagataattttagtgagcagtgttgaattgagccttcaaacttgttcatgagtcgtgatcaatctttgtcacattattatactaaaaactatctcagagaggaaatttatagccagttacagtttttttgtagtttgatttaaaagttaaatttatcacaacgaatcatatatttttcatgttactattcctgttgtataaaaattttactaacaaatttaaaaggtgagaagagatcaaattattttgcaattataaaattatcattagtttagcctttgagaatataggtaatagattaaaaattcattttaaaaatgatataaactacttttgagacttcctctgtaactgaccttttccatttatgaaaagcagacactcgcctatggggacatgaaccacgagtggatcggcaacgagtggctccccagcctgggcctcccccagtaccgcagctacttcatggagtgccttgtagacgccaggatgctggaccacttgaccaagaaagaccttcgagggcagctgaaaatggtcgacagttttcacaggtaacttaatggagatagttcttaataattggctaagatttttcactgttaccatctctaaatcatctctcttttcttccaaatagaaacagtttccagtgtggaattatgtgcctgagaaggttaaattatgaccggaaagaactggaaagaaaaagagaagaaagtcagagtgaaataaaaggttagtacatgacatttaattgattcggtttactcctacttgctggtgtgtttggagcctcagtgacttcctatttttcaaaaaatcaagaaaggctaaatttaagtggagaaaactaactagtctagtgtcattgcagaggagggctggatgaagttgagtgcttttgagattctcttccacagctagag

SEQ ID NO: 9122 - DNA, 1668 bp, Homo sapiens
cccatgaacatgggtggggcccccaggcacaggattgtgaagctcgcaagtgcccaccccgctcgctggtgaagctgtgtccgggaagatgagcagagactgtgctctgctaatctctccccgatgagcctgaaaaagtaccaggcaaagacacctgccgcctttctcctttgccttgggggtgaaggtggcctcgccagccctgcagggactcccatcctttcttgcagccaccttctcagtggtgggaaccatgggcagctgaagtcctgcaggcgggcagccccctcgccagggcagcatggtgccatggggcggccggagaccaagcatcccgtttctctttcctgcagccgttgcttcatttataaatgggcgcgttgggacaagatggactggttgtgcctttccgttctgagattctagttcatctgttttctaaaatcctggcaaaagcagatcactctggaaattcttgccatgctttgggcattgacagaaggttccaggggcactgttagtcctgctacaccccttggcagacggttcttccccaagagacaaagtcgcacctagaaatttgagagcacgctgccctgattggtccctcactgtcacattggatttggacttgagacccagccaggctggagggagaggagccagatgggacattctcaagctgcgaaggggttttgtccagtcctgattcagggcgctagagtcccaacatggcacctgagaaaaagtgaattgggtgtcctcagttcagacccctgggcacagcttatggttgtttgatttaaaataatctctcagttgctctgtggcctatgtgtaattgtattactatttctgtggaaaaggaatcacttctttttatacatagtttgaaaaaaaaaaaaaaaccttaaaattttatattttaccactgcagttacaagaattgtcttgttagggtttacagatgtgccattgttctgtataacagagaaaaccttccagtcttcaagggctgagggagaaggtggctgcccacttgcagagctgcctgatagaggaaaaggtggcattttatattcctgttttcttccaagtagagagtaaagcaattctccaataaactacttgaaacatttattaaattgtaagtctgaattaggaaaattattgttatggtttcagtaagcacttgaaatcaaaatgggtgcactttttaaaaatgtgtgataaaatacacataccatgagatttaccattagtaacatttagtatatttataatacataatccaaaatggtgcttttatttttggttggaaactatcatcatatgattgaacagaacaggaatatgttcttaatgaataaataagtgcacacacgacttttttattttccagaaaattttctcactcaaggtgaagccaaatagtatttccagtatatttctgacgtcaggtgacggcagtgttagaaccccgaggtgaaatttcttttactcctgtggttgtcagtcaggcttatggatcatgaaggattggctggtcctgcagcctcgtcctcctgggttgcctagaatctcggtagttttggccaaagggctcatctgctggcctctgtggatggcgccctgaggcctccgtaaccctccccggctgctctttca

SEQ ID NO: 9123 - DNA, 1031 bp, Homo sapiens
aaaatacaaaaaattagccaggcatggtggcgggtgcctatagtcccagctactcgggaggctgaggcaggagaatggcgtgaacctgggaggcggagcttgcagtgagccgagaccccgccactgcactccagcctgggcaacagagcaagactctgtctcaaaaaaaaaaaagcctgcaccaaggacccgggcctcccaggagtcgtgtcgccttccttggctccccagatgggtgtgttaatgtaaggtttccctgcactgaccaggatgtggcctcccccagccctgctctgggaggaagtgaagcgccgcagtgttgttggtgtctaatgctttgtgtttgaaccctgttccagtcagctgtcggccacgaatatcagtcgaaactttccaagcactgctcgcaggtggactcggtccgtggcttcggaggcaagtttggtgtccagatggacagagttgatcaggtgagtgatgtggcactgggactggggcaggttggggcaaggggggcgttccccgtagatctgagccctgttgggccacttgtagtagcaggcaggtgccctccagctctgggggactgcagagaggggcatctgcctcccaggatgctctgagagcctgggctctcagagagaggaagcaggatgcggcgggcttgctgtagcagtccctgcggtcgctcttcactacgtgcctcagtactggatggccctgtgtctgtcccaatgtgccagcagggaccgtttccacccgtgtttctcacatgtgtgttactgtgacagagtgacatcagagcctataccgggggggcaggatgcgctcgtgtccaggacccaggctttgcgtccaggtgttgttgcagtcatcctaggcccgagcctctttgattctcttcggctcgggtctgttggctcttttgtttaatagaggagcgatcaggagcctggagggagcagggagctgatgctggtcgcagattgtggctttgtgacatattagccacggttctgaatttatgtgtc

SEQ ID NO: 9124 - DNA, 1033 bp, Homo sapiens
gcagttatgttgttaccttcaaaatttggacttggttattagaacctgaacacataattggaaaaacagtaattccctaaccttgcagggaagactctaggctttccacctgcagcgttagaaacacacagcagtgttcaggtgtgggcaggtagacacacctggggtggtcccgcagactgcatggagatggcagtggctctccgtggcatcactgctgcatgacagtgtgactttcatgtggatctgtgttgctgcaacggaagtctttggctggtagaatttccacatggattttttttttctcttaaaaagcaagagaacaaactgcgattgagcctctttttagcgctcagtagagcaggcgcacaggaagcagatgagaataagcccgtgctggtgcggaagactgtgctattgaagtggcgcgttgcaaaggcctgtccgtgccctctttcctcgcttagctcctgcctgctgcccgccgcccctcctgcccctcctgcccctcagggaatgctgaagcctctgcccctggcctgtgctctgcttctcactgcctgtgtctcacgaccatgggtggaagcaaaacttgccttgcaagtgaagcctcgcttggccattctcgtttcttcccgctgtggtgcaccttcttgggctgtttctggatctgtctgcatgcacccacggccacccccatgctcgcctccacctcagagtaagtgttgtgttttgccacgtttcagactactccaaaggattcggcgggaagtatggggtgcagaaggatcggatggataaggtaaatattccagccccggagcttagtgtcttctgcctgcaggggctcttggtgggcgtggctcaccgtgctggccaacatccacgcgctggggtggggcacaagtgatttccgtcgtggtggtggtggtggtggcgatgactgactcggacagtcttgtgctcctcatggccgtgctgtgggataggcgctggcaccggcccacctcctaactgggggccccaggccagg

SEQ ID NO: 9125 - DNA, 1603 bp, Homo sapiens
atttcagggaaaaacgctattccatgagaaaacagtcaacttgcagctctcatggttctattcatggtccttgagacacagacagccaccgccacagtcccggacacagcagggaaggctcatgtgtcttcccactttttttttttttttttttttttttttttttgagacagagtctcgctctgtcgcgagactggagtgcagtggcacaatctcggctcactgcaacccctgcctcccaggttcaagcgattctcctgcctcagcctcccgagtagctgggattacaggtgcctgccaccaagcccagctaatttttctatttttagtagagacagggtttcaccatgttggccaggatggtcttgatctcttgacctcgtgatccgcccaccttagcctcccaaagtgctggaattacaggtgtgagccaccatgcccggccatattccccacttttgacttaaatttttatcattttttcttaatagacacggggtctcactgtctttcccaggctggtctcaaactcctgatctcagtcttcccgtctcaacctcccaaagtgctgggattacaggcatgagccactgccctcttttccatttttgtcacacacaatataaaaaaatgtatactctggttgagatttactatactcagtatacgtcaattacagtatacatcagtaccttaactgctttatcaaggacagatgtctttaagggaaattggctgtttttatttaaaaaggtgagtgtggtggtgaagataccgtcttatttagagatcttcctgatgccaggcttagggggattgccagtcccaccaggtacgcagtgccctgcggcaggtgcccagtgctggctccggaccagtgggctgagctggcagctgcaagaacctttccctccttgggggttagggggatgaccggttcctggggaggtcactctgtgtgggtggggctgttgtccaggagcagtgtttttgctgtgctcaaggcacacgtcctccctccttcctctatagtgaccagcaaaacaagtaacatcagagctaactttgaaaacctcgctaaggagaaagagcaggaggacaggcggaaggcggaggcggagagagcccagcggatggccaaggagcggcaggagcaggaagaggccaggaggaagctggaggtgagtggcaaggagtgggccgcagcgcaccctccctgggacctgtgccgaggggattgggagctctggggcctgggcggggcttattctctcctggccaggttttccttggaaggcatgtttaactctcctttaaggctctccattaaggcacttgtcacttgcagccacacataggctgagtctctggccacaatgctccaggcagccggctagcgctatcctggtcttgccggtccagccccaggacccgccaacctgccctgccctctgtccctgagctgacggcagagtcttgtcggcttccacctccacggggctcctgtccaaatgtcagcctgagtctcttctcacccctccccctctggaagcccctcctttcccaggtggaagtttggggtttggaggggactctgtgcaga

SEQ ID NO: 9126 - DNA, 1194 bp, Homo sapiens
cgtggattctcatcaccgtggcttttgccctccattcccatttcagccatcacctcgggcttctctccgggtgtcccctggctgtccttccactgcggcctccgcagcccatctccccaccccctccacagacacgtctgccagagagaggggaagggagggcaggcggggctggagttatgtggtggaaacctgctcctgaggaaggggtccgggtggggttggtgcttgtgtgaagggctctgtgcctctttgtactctctcggttcatgttcacaaatcctggccttggtggcatgggagaggcagcaggagcctccgcggtggtccgcatctctgcagggggcatctctgagcaggctgcctgggagcttgctctgggttgtgctttttttctggcagaccaggaaacgcttgcacttcagcatctttctctgtgttctcttccccagcgggcgatgatgagatctcatttgaccctgatgacatcatcaccaacatcgagatgattgacgacggctggtggcgcggggtgtgcaagggccggtacgggctcttcccagccaactatgtggagctgcggcagtagggcccccagcccccccccggagctgcgccctggatcctcacactacagatcaggccttctttggttcttgggtggttttgggttttttctgtttttttttttttttttttttttttgaaggtggggaggggaatatacacattgcttttatatttaatacttttgctgatgcttttgaaaatgtttatgccacagaatttgctaatatattgtaatcacattccttaggaggactttggtaattggttttatgcattgatggttttttttttcttttttgccaaattgactgtcacgcggcagcttcagggagctcgcattctcttgtgttcgtgttgccctcgtgcccatcaagtgcagtcgggacctcccaggacaagcacgaggcctcaggtcggccctgtggcgggtaggcaggaaggactgtcccagacgaggggcttcctctagagtctcactgctggggaggagaggactgggcctgatggaagttaacccggagctaagtcacccagagcacaggagctgccatgtcagatgggaaatctgcctatgtcataccgtgacagcccgcaggatcaggtgacttctagcagagaccctgg

SEQ ID NO: 9127 - DNA, 1062 bp, Homo sapiens
ttagctaacgggagccccttcaaattggcttcttttttcatatgacatgtatctaccatcctttgagtacttacttattttctgggacaaccagatgttcaaggatcctccccttctctgcccaggcctggcatcagccattgttggcaggagataatttgagcagatcgtgtggatttcagaagcatgaaaactactgtgaggattaaataagttagcatgtataacattctggtgcttttgtggagtttccaaattgtcatgaacaagcactactttatagacaggaaaaaaagtgattcaaaatgtgaaaacgggtatatgtacataaggtaaaaataaaatcctaagccccccattgaccaaagggaccttctcctgaccaaggggacaccagaaaaacctcaacactgaattcccagacatgatgggatgggaggtcagatgcgcctggtaatagccccctgtttcagagtttggacaccacaactggccggcattcatgttaaaacagagatcgtaagactgacagaacggactctgtggcaataagataccaaattataaacaggacccaaagccatgctaggcgagggtaagtcaggcaacccacacttagagaataaactatattctaagagccacaaggctttctgtttctctattagccaaacacacactagccttgggatagggaatattaaaacaattgcagctccactaggtgccaactaactgactctgtttcaccagccatagcagctgtgattggacaagagactgatttcagtgactttctcctaataagagaccaccgaccagctgaccatgccgaccagctgacccgttaatagagagagatgatgcacctgcatgcctttgtgtcctgaaaagacgttttgccataaaggccctaattgtaagatgtgtaaatgttaagtctccaccccaaagtgaacatgggtcatatattacatgctttgctcaataagagggcatgtgtcaggaccaccttcatgaatattcatagctcctcctgttacctgttgaatatgtatgttt

SEQ ID NO: 9128 - DNA, 1004 bp, Homo sapiens
gcaaggaaggagcagggacagtcctgagagctgtggacacgccacacccactgttgggcctggttaatgccattgaacacctgagcaagggcaggcccagggaggctgaataagtctagattcccatgttgagtaattaaaagaactgacttttaccagatgaaggccagtttcaaagttgggctgcttctgtgttaccactgcccttttgctgtggtctgaatgtttgcgtccccacaaaattcatatgttgaaacctaacccccagatgatggaattaagagatgaggcctttggcaggtgattgggtcatgagggcatgagagtggagcctgcatgaatgggattagtgctcttacaagagaggcccaaaggagcttgttggccccttctaccatgtgaggacacagagaaggagacaaccagtccttaccagataccaaatctgccagcaccttgatcgtgggcttcccagcctccagaactgtgagcaatacatttctgctgtttattaattacccagtccaaggtgttttgttatagcaggctgaaggaccaagacatattcccaggttttcattccgtgatctcagaatctttccacaagcaagcataggttatcgtttcttatatgcctttttgtaaaaatcaggaaaactgattgcttatttcccttcttgtcccttcaaaaacaaaaacaaaaatgaaaacaaaacaatgagtagccacgttgtaagtctcttgtaagcgatagtcctttctcattttggatgtcagctgccatctgtgctctgctagtttcccgttggtctttaggcctctgacccgttgtgggatctggaagttcctcttcagtctttgtcccctgccttagtgtgtgttcttgcttctggacttagagtaagcaggaactgtcttctcttaggaggttttgtgtgagtccagaggcatctttctctaagtccttccaagtttctttccttcattagattgatttctctcct

SEQ ID NO: 9129 - DNA, 1068 bp, Homo sapiens
aatggtgcaggcagtaaaggaatttaccaagacagttgtaggtaaagagaggcagatttattagagaaggtatgaaagtatgttacaatatcgcaacaggcagcacagcagagaaggggctgtctgcagagaggcaggggctggagggaagttttatagcattgtgctggagggggctacattggggatgaggtagaactgcgggggccactgcggaaggaggtcattgtgcctgtgtaggacattgtgccctcagaacaactgttcattgttctccacatctggggccccatactcattgcttccttatctgatcaggcctctgcaagtagaagatgcacagaaacatggactagggtctccatcccctggtgccagtcccttatatgcctgatttgatgctgctgattaaattgtagccatgttcagcgcagatcacatggaactctcagtcatcaatcagggatatcagtcatgttaggtgaagtgccacttccatcttgaatgatactgaatttccatcttcacccggttgacatttgggtcattctttgtcatggggcgtcggccatgtgcatcctcaggcatttactggcatagctggtctccccacagatgctcccagttgtgacaaccaaaaatgtccccagacattaccagatgtcccctggggggtaaaatgccccggttgagaaattctactctccatttttattacagttatttctgttttttattgttgttattgtaaatggactctttaatattatatttttaagtggttaattttttatataggaaaacttgatttttatgttgcttttgtaattgactacctcattaaattctcctattgtgtctgttggttagtctgttgatttttgtagtttttcttttaagttgaacttatataatatacaatgaattttccttttcctttccagtatttgcacctcttggttcattttcttaacttttgttggccagcatttctagaacaatgttctagatcatttctggagcaaaattctttgctaatgggcaatttcgtctttttcctgactttcc

SEQ ID NO: 9130 - DNA, 1049 bp, Homo sapiens
tggcctctgtagtgggaggtgggggcttggctcccaccaagatgtactcaggggcgggctcccccagatcaggaagggggttcagacactatgcagccaaaagagtgacgcatgtgggagcatcagagacagctgcaggtaaaggtggagacgctgctgtcatctgcagtgacagctatgcgtgatctggacccgcccctccaggcttttccagcacacacgcccagcatctggtggggactctggtaatttactttttcacctctgggacttgtgacccgcttttggtgcgtgccagtgtttcaacagccccacagtccgtctttgcggggctgtggtgtcacaggcctctctttccaggtgctacagctcgagagggcagagccacagtccctggacggcgtggactgaggccggttccttcctggaggcctcctgtcctcggggaccccagcacctcatcatcagcattgctggagccaagggtaggagccctacactaggagcccaggatgggacggcgcatcagccgagagggagggaacttttcagtcaaattcctcaaaaagaggctggaataaagcctgggcttaaaaagaggctggaatccaatgcacatgattttgacctcccgccagcgtgcgcttccccgcgaagtctggcattctccgaaggaagccgcctgggtaggagggttccaaccgccgccccgtgtggcatctttgctgcaggaacaagaacagtagctcccgggaagggaggggtgtcatgagcagaaaatgaaggagagaagaccttctctcccacccacacacaccttcctgtcctgggttccagaaggttctggggagatggtccctgcagagctttcttcctgggagtctggggaccagtcggccttactcctgtcctgtgggagaaccaccccatctaggcatggggccaggtgtggggcaggggcgtggcactgtgggtcccccttcctgctgatcttcatgccattctgggcacctttgtctctttatggaatggggtgaggagcggctttt

SEQ ID NO: 9131 - DNA, 1033 bp, Homo sapiens
aatttattgtaaggacaaattcaaaagttggaaatcagagatgaaccaatgtggatcttccagtgttgactcaatatggggcaaacattttcccaagaaagagatagaggggagaaagccagagtggaaggattaccccgagggctctaggcacaggggtgtcctggggattgtgagaattaaaatgtaaactcctcacctaggtgacaacggcacgtgggtgcgaaatttcaggcatgattttttttcccatccagctcccagactgagagagactcattttaatgccctctgctgttaccaacatacggaacctctcgaggcaactctttcatggagtgggaagccgttcgatgtctcagctttatgctgagattcaattgatttagtcttcaccatgaagttcttaaatccaaggccccgaagttcctagaactaccagatccctcagagtattcaccctggcttcatgcttcctaatctcgtggaatttctctaatgctacaggaaacacagccatgcacttaaacagatgtctgtttttaccaagaattttcaatcatagccagaaacataccgggttcactgtttttccagaagtggatgtctaccttagagttttcaggaggcttcaaaacatggcaacctgaagtccctagcctccagtagaaaaattctttccttacatttatgacagttttgccttatgtgttgtgaggagcagtcaagttccggagacagaaatccggaagcacacactgtcagggtccctgttccttcccctaggtcgtatccatgaaccatcccttcactgctgccttgggagaggggaaggtgttcgggctgaggatgagatcaaaccaaagtttaaccacacctcagcattctatgacttcacatcgctgagtccataagagaaccaggaccctccagacccagaaaatacttgggtggatccaagatggcctggttcagccaagatggctgaataggaacagctccggtctacagctcccagcatgagtgatgcaga

SEQ ID NO: 9132 - DNA, 1031 bp, Homo sapiens
gatgtatcacatgcattgattttgtgtatgttgagccatctttgcattcctggtataaatcccacttgatcatggtatattatctttttcattcatcattagatttggcttggtagtattatgctgagaatttttccatctgtgttcattaggaatattggcctgtagttttctctttctgttgtgtccttgtcttgattggatatcagggtaatgctggccttatacaatgagttaggaagaattccctcctcttcaatttttgggaatagtttgagaagaattggtgtttgtttttctttataaactgggtagaaatcagcataaaaccctagtctagggcttttctctttggggagacattttgttactgattcaaacctgctattcattttgagtcagttcaggttttctgtttcttcctagttcaatcttggtaggctgtgtatgtctgggaatttatccctttcctctaagttttccaatttgttaggatatggttgttcatagtagcctctaatcatcctttttatttctttggtaacagttgtaatgtctcctttttcatttctgcttgtatttatttgggtctcctttctttctttcttttttttttttttttggttagcctcactagtggtttatcaattttgtttaacttttcaaaaaaacaacttttgtcttgttgattctttgcatttcttttttgtctctgttgcatttggttctgctgttattttttttttctttctactaattgtgtgtttggtttgttcttgctttttgagttccttgaggtgcatcattagattgtttatttgagatctttctacttttttggtgtaggcatttattgctataaaccttcctcctagtactgcttttgctgtatcccataggttttgcatgatgtgtttccattttctgtttaaaaattttttttgatttccatcttaatttcttcattgacccaatgatcattcaatagcacatttaatgtccatgtatttgtacagtttccaaatttcttc

SEQ ID NO: 9133 - DNA, 1088 bp, Homo sapiens
tgctcaccataacctccgcctcctgggttcaagcgattcttctgcctcagcctcctgagtagctgggattataggcatgtgcccccacgcctggctaattttgcatttttagtagagacgtggtttctccatgttggtcaggctggtctcgaactcccgatctcaggtgatccgcctgcttcggcctcccaaagtgctgggattacaggcgtaagtcactgctcccggccttaattcttctaagaaaccttttatttgaatttattttatcctaaatttattctcctaccataagcttttgtttcatccatttcttctgggatctttttcttctgtgcaaccacctcttctggttaaggaacaattttttcctttttggtaggatcatctcagtgtggcaggggagctcatgtataggttaatttggttttgagctctgtaaatatggcagtgcatcttgggtgcttcatgcacctggatatgtttgatgaccagataatctattaatacatctaaactcttttttttttctttgagacggagtctcgctctgtcgcccaggctggagtgcaatggtgtgatctcggctcactgcaacctttgcctcccgagttcaagcgattctcccacctcagcctccccagtagctgggattacaggcacccgccatcatgcccggctaattgttgtatttttgtagagatggagtttcaccatattagccaggctgatctcgaactcctgatctcaggtgatctgcccaccttggactcccaaagtgctgggattacaggtgtgagccactgtccctggctcatctaaactgttaagttcagcattactctgcatttttaagcatgtgcagcaaaaattcagtctttttggtccactaaccctgtgcccagcctcactgtttggcttaggcacacttactgactccacagttggaacaatggaatggcttacatggcttctataaagtgacatctttcagatactttgtggctttttggatttgcaccgccccccgcaacttccctccacccctatggcctgggcagtttcttgactcttaaagtgaatatgaa

SEQ ID NO: 9134 - DNA, 1641 bp, Homo sapiens
taaacttccttgagcctttgaggaggctgtttacctgtggatactgagggtaaagtcactgttggattagtataaagttgaagcagtccagactttttaggctttaactagtcttaaggatttctgactctggcagagagggtggaatgaataaagcaagactttaatcctggaatcagcacacatttgcagcgttactcctttactgctgtcataaatattggtgactaagcgtatgagactttatgtctataacctctttgggttactttctcgttccagcatcaggttgaaatagacttgaaatgggcaatgatgcaggtttctcctgggacctccttcatgctacaggaaaggtgtcagctgtttcttccatgggggcaggcagcaggccacttagctctaattccaatatctaggcttggttgctggggggtccgtagagcctgtattctatctcgacatgcctgtctgttagggtgtgtgtcctagcccctaatttgtgtggtaccctgcagctatgaagcagggaatgtgttctgagctatgtactggtgggatatccctggaaagcactgtccctttatcactacagcatccctgacttgattcaccccatgtgtttggctttcagggtcgagcacgcacgcatgcatgccaagcaccgtggccatgaagctatgcatgctgaaatggtcctcatcctcatcgcaaccttggtggtggcccagctgctcctggtgcagtggaagcagaggcacccacgctcctacaatgtaagccactttgcctcttacttctttgtctgtcagtcatcaagagacccttcctaagtattctaggtcccagcctaacccaggccacatggaggtggagaaagacaataacaatgaactttatgtatgaatgatgaatagtgtattggcgagtgtgtgtctaagggtcaggtgattcagagggtgaaaaggatagaacataagactatgttcataggcagaaaagataggttttcccttcgaaacattgtgggacaggttcatgaaggagataatcatcaggaactattcaattggagagagcaaagatgaattgactgggaaaactaagcatctcatgaatcttacaggatctagattacactaatctaaatttttttaaagaaggatcgggtgtggtggctcatgtttgtaatcctagtactttgggagattgaggtgggcagatggcttcagctcaggagttcaagactagcctgggcaacatggcaaaaccctatatctacaaaaaatagagaaattagccaggcgtggtggcatgcgcctatagtctcagctactggggaggctgagaggtgggaagattccttgagcctgggaggtcaaggctgcagtgagtcgtgatcgtgccattgcactccagcctggagacagagcaagactctgtctcaaaaaaaagaaaaagaaaaaacagtaatggttgaaattaggtggggaaaatgacacacagaaaacaaatagcaaaatggcagaagttaattcttccttaccagtaatcactttaaatataaatggattaaattcttccattagaagacagaaattggcagattggttttaaaaatcccctcatttatcgatatgc

SEQ ID NO: 9135 - DNA, 1098 bp, Homo sapiens
gctcaagcctgtaattccagcactttgggaggctgaggtgggcggatcacaaggtcaggagtttgagaccagcctggccaacatggtgaaaccccgtctctaataaaaatacaaaaatagctgggcgtggtggcacgtgcctgtaatcccagctactcggaaggctgaggcaggagaatcgcttgaatcagggagttggaggttgcaatgagccaagatcgcaccactgcaccccagcctgataacagagcaagactccttcccaaaaaaaaaagagttttatagtcttagctcttacatttggagttttggtccattttgagtttttgtaaatggtgtgagataagaatctaagttcattcttttgcatgtggatagccagttgtcccagcatcatttattgaagagacttctttctccattggatggtcgtggcatgtcacgaccttgtcagaaatcaattgatcaaagatatgttggcttatttttgtactctcagttttattccgttgatctatatgtctgttcttttgcaggtaccacattgttatgattactgtagcactgtagtaagttctgaaattggaaagtatgttcctcaactttgttattatttttcaagattgtttcagctattctgagtcctttgcaattccttattaattttaatatcaacgtttccattttacaaacaaaatcagttggaattttgataaagattggtttgattctctagattgtttggggaaatgtttccatcttaacaatattaatcttccagtacctgaacacaggatatcttttcatttatttgggtctttaatctctttcatcaatgttttgtagttttcaatgtacaagtcttgcacctcctttgttaaacttattcctaagtatgttattctttttgatgccattgttaatggaatttttaaaaatttcctttttgaattattcattgctaatatatagaatttcaactgatcgttttgtgttagtcttccaactttgctgaatttattagctctaatagtttttaaagttttttttaggattttttatatataagattggtcatctgagagtagagtttcactt

SEQ ID NO: 9136 - DNA, 1022 bp, Homo sapiens
accattaaattggagagttggacctaaaatgaaaatctgattcttggttaagtgttctttctgtaggttcctctcaaaggcttcaggaaatttttgtcaatttctgccatagtcagaagtttttaatcctcttgagtttccttatttaacgacttttgcccaagtcctttccttggatctcaggtactttctcaacctcctcttaagtctcttcatcatcttgcctccccagcctctccagatttccccacaaactcagtgaatgatgattggtaggcagcttaagagacagaaaatctggattggaaacctagcccaaaccagacttgccttttggcttctgcgtagctcagttttcatcatctattcagagtctaacattactctttagctccttcagggatgttaggggaagggataagtttatgcctggaaaagtatccatcctatttttgaagttctccagggagaagctttcatcatctgtgtctactaccaaatatagtatctcttcacatctctacctcctgaactgctttccctcctggaaccggtgagtggcaaaatctcctacctggaaatctttaaagtactgtagatttttcttagaccaagatattaggattactagaatgtggaattagagaattctgactaaggtggtaaggggttgtaattcactttctatgagaaggaaaaacttctatcttcagaatataacaaaaacttgtagctgtggtatctttatcagcctcctttgagtctcatctacctctttaggctcatttctcacaccttcctcaaatactagttgtcttttctcaagtataccatgtcccctcatcctggaacacccatcatgatgcctttttctatctggacctattggccatcaagacagagatcaaaggatgcttccttcaggcagccttccttggaggggggtgggttctccactttgagtggagtgcctctcctctgtattttcttggtcaccagcccttactccattaaagcactta

SEQ ID NO: 9137 - DNA, 1110 bp, Homo sapiens
agaagggagcaggggagaggatgtgcattccacgttgtgtgcagtcccgtttggatagggactgagtggtgagcaggagagggagtcggggcagagggactgacggggtgtgtggggatgcctggcagcttccttagggcccctttcggtgctttggggttctgcctggccgtgtatgggtggtgggggcggtgatgggtggtgtagagaggaaggcttggggaagcagaggctgaggctgtatgggaccttgccattatttctgaaccaatgagtgagtgtttgagccctggctctgggcttgagccctggttacctggctgccctagccctgagctatgagtgctgagtgagagcagagccagacttggtgcttctctgagtgggccaggtcctgtggctgtgcctttcagcccagtgtggttggtagtggtgctggggtgagttagcactcttggttttgcagccttctagcggctttgtacctcctgccctgcagtctgacattgagttggcttctgtgggcccagtgagtgggaatctgtgggggctgctttatttagatcagttatttagatctttatttagatctttcttagctctgtgaaccccctcccaaactcctgtcccactgtaccttccttacccctttgttctcctgacatctttggtcggggcgcacattagcctagaccaggggagacctttttttttttttttttttttgagaaagagtctcgctctgttgcccaggctggagtgcagtagtgcaatctcggctcactgcaacctccgcctcctggattcaagtgattcttctgcctctgcctcgccagtagctgggattacaggcgctcgccaccaagcccagctaatttttgtatttttagtagagatggggtttcaccatattggccaggctggtcttgaactcctgacctcaagtgatccacctgccccggcctctcaaagtgctaggattacaggtggagccacctcgcccagctggggagacatttttaattgtcacaactgggatggtgctattgacatctagtgggtagaagccggggatactgctaaacattctacagtgcacaagagagtccc

SEQ ID NO: 9138 - DNA, 1055 bp, Homo sapiens
agctgcatcgtgcctcctactccactgagtgtgggaggcccaaacggctgcccactgacccctgcccacagatggggaggatgagaagcccccgctgcccccgcgctctggctccaccagcatttctgcccccactgggcccagcagtcccctgccagctcctgagactcccacagctccagctgctgagaggtgagacccccatcccatccactgaacaggagaccctttctcctctgagaactatttccctaccaaaggtggggaggccttctaagaccccaccagggacccccaccccacctcagcccagaggcagataacctgatccatcccgccctggttgccacaggtactatctcctctagggatggggcagaggtgctgggacaggtcagcaggacctccactgacttcttaacccctccccaaagtgctcccaatgggctgagcaccgtctcgcacgactacctgaaaggcagctatgggctggacctggaagctgtgaggggtggagccagccacctgccccacctcacccgtaccctcgctacctcatgccggaggctgcacaggtatctgggacatccagccccatgtattacacccttacctctgacctgtcctcacctgcttcccggctgcacaggtgccctgatctctgatcctgaacagtgaactagccattgcctcttgactttcctcactggtagcctttatccttgtggtgaggttgaggctacacccagcgcccccttccctatacttaggtcggggtgggagttcttttgatctgatgtcttccctagtgaggtggacaaggtcctgtcaggcctggagatcctgtccaaggtgtttgaccagcagagctcgcccatggtgacccgccttttgcagcagcaggtagattgtagggagacctctgggaggtgcgttcgtgttctggagctgggtgggaggctctgcttaggtgactcatgtacaagcctggttcttcctccccccagaacctgccacagacaggggagcaggaactagagagcctggtgctgaag

SEQ ID NO: 9139 - DNA, 1046 bp, Homo sapiens
tcctttcccaggacagggcactggaggttaaggagcagatgtggaagggaaggggtggatagatggggagggacgccttcccccaataaaggtcccgatagctccatctttcttagctgcctgaatcactgaggtctcactctgggtttcttggtatcccccgcctttccctgtctccctgggatggggcctggtgatgagatgtccaacttctgggcaggccagaagggcaggaggaggaagaaaagggccagggcctttaatgccagaactgtctacctggaaagactcttagaaaccagccatgttttctagccttcctcacccctgcatcattcagatggggaagctgaggcccagcaaggggccttgcccaaggccacacagtagtggactagagccagaaatcccccccatgcatctcaccattgctccagcctcacactgtaaggggtcactgagagttcttgagaagtgcagtgacgtggttcacctggcattttagggaacttgtctgagccagggcaggaaagggaagcccctgtatgtgtctgaggccaagaggggcagggaggtctcagtttgaccagagcacctggggagaggctctgtgtgggcaggaaccaggttgaaagcctcaagtgccgagttaaatggcctgagcagaggggctcccctctgccagctcccctctccctttctgggagaggaagggctgggagcactgccagctttgcacatcacagtatcctctggttgtgaggtgatgatctgacatgagggtgcgggaacatgagtagcctgagcttaggtagcagaggatgtggagctggcgaggggagaactgactgggaagacaatttggaggcagaatctgggaattcgaatttaggttcaggggttatatcagaaacagggttgggggagcgggactcacttcttgtctcggcagaaatttcctctgcattctgaaagagtgaggtggctgtgagccctgcctctgtgcccagcaagcctcctgtctgacctcaaaccctctgctccag

SEQ ID NO: 9140 - DNA, 1025 bp, Homo sapiens
ctccctagtctaggagagggtggcacttgctgtagaatctggaagttctgtcttctgctgtcgtcctctgaaaatgctgattacattctaggggtgggggacagggtgggggacagtgtcaggcactgttctgaacacttcatggtgttctgtcttgttgaatcttcgcagtgattctgagatgtagtgactgtgtttcagagaaaggaactgaggatcagagaagcaaagtgacttggccaaggtcatacagagtcaggacagtgccaggactggaattcaggtcttctgaccccagagaccagtgagatgctgggagagaggatcacccaccttcctaataactgctcatggctttcctggacttctgtctctcaaacttgggctagtaggcgtggcctagccagggcattacattgtgagttctaagtatgatgtgtgtgtgtgcacacatgtctggaacactggggatgggtgggttacatggtcttcctgttcctccccagacttcactcccaaccagacatcaccagaaagtcctgtcccctgccttctagagcctggacctggctttgggggtgtccccatggctttgaagagtgtatggagttagcagcacagcctaggggtagcagggaaaattgagagtcccaggtgaccttcatcatacttgagaggccccctcccctttgcagttgctctagaggcatttccccaaatccacctgcatgttatggtggggagcagacagggagtgaccttgagctggtccctactctctctgggcctcggtctccctgttcttcccagagaccccttttggctctgaccactgttgccacttggccaagaactggaactggggatcagggtgtccctcggtcctctctgcaatgactggagctgtgcttcttggggctgatgaaaatagctgtcgtggtctctaggggctgagccggagttatttccatcctcaacaaagaggtggaaatagcttagggcctgggagggggagcaagaggaga

SEQ ID NO: 9141 - DNA, 1127 bp, Homo sapiens
gagatttgcacccaggtctctggtgctcaccatgacctgaggcagaatgtgtgctggcgggtgggggcaaagactcacggccactcctgtgggtagggggcaagtgtagtgcttgtcatggtcctcgacatcttgagccagtagaggcaactgtccctgctcaggccctgtagtgtgccaggctctgggcccagcatttcctcacaacagcactcacccgggccctctcctttccaagttggtatgggggaacctcgactcagagagcagccctaggctgagtcacgcagccacttgtgttgtagtcaggtactccagatcctacccagcccccagcctggtctccaggcaggaggtgagggtcgaggggtttgtctgacaattctaacattagtttctcaagaagggccaggctggtcagcacccagtctggctgggcgggacctgactacttctgttatggggccagcccttctgccaggtcagcaggagagaggaccagagaggaaggggttttgcctgaggttactcagcagggtgtgtttggcgccattccccactcaggatcgatgggggagcagggatgtggtctctggacagggagaatacccactgtgtgctgaacccgtgtctttctgggcctaggcttggtgctgctgagtggggctggagtggcagagaggacaagagccaatgctgcatccctactctgcccatccgtgggattatggcccgggaggctgtcacatcctcagccttatactcctgggggtcatcattccctccaagcacaggcagggaaaccaaggcctagagagaggaggcacttgccaggccccagtgtcactgggatccaaacccaggtctgctggccttgaagaccagagttctttcctaggccactctgggaaagatgagagctctataaataagctgcccatgtggctgtgagcaagtgccctggctagttgtcacagacagagggggacagcgggacctctacagccagttagagtcagggtctgagtgtgcaggtagagagaggagtgggggcttccagaggggggacctgcgcttagcccagtgcatgcactgtgaggaggagcagtgagaggggaggaccttgg

SEQ ID NO: 9142 - DNA, 1111 bp, Homo sapiens
tctggaggccagagggaggtccacaggctcaggagccactatctgggaagcagagtagctgcctccctacctgccctcctccaggtgggcaccagcccccacctccatctcccccagtgcggcctctcttagcaggcagcctggggagcctgctgagaccgaactgttcattcttctccatcccttgcttaacccttcctggctcccataggccctagggggaagtgcaggctttttggcaggcagctgagccttggtgtgacctgagcactgcccaccaaccttcccagactcctccagactcctcccgtcttctccgccctcccaccctccagattcccaccagggcgaacccagcaccgcctgtataccagactctgtgccaggcactgaacgtaaataaaaggtttgtgcccttctcctccacattccacacgtagggaaactgagtcacagtgaagtgtggggaatgcttactctgtgccaggcctgtgctgagtacttaatgtgattctcttctttcagccttaccacagccctctgcaggcaggccacagagccagtgcaagacagagcagagcaggactgcaccccatactttgtatccccaggttagcccaggggttcagatctgggttctgacccaccccagcctctgggctccttccccctcagcctgctcactggctcttctagctcggcatagctgggctctctaccaagagtgccttttctgccttctcccccaaatcagcccatacccgcccaggtcggcactgggcatggagcaggcagctcgtggtggggaaagggctgggtaataggatctgcatggcaccatgaatgctgagggggaggtgggggagagggtacttccaggaggaagtgacttcgagctgagctctaaggaagagtgggtgctggccaagcgatgaggggagagcagaaagcaggtgcagcgtgtgtgagggtggaaagcactcagcgtggcaggcgtgtgggtgggggaggttggtgggggcgcgtcacgacgccatcctgagggtggtgggagctggcccagggccagggccagaactgggtgtcagggcacctaggctgcagggcggga

SEQ ID NO: 9143 - DNA, 1029 bp, Homo sapiens
gctgtagccagaagaagtggcccgaggtgctgctgtcccctgaggctgtagccgccactactcctgttcccagccttctgcctaacccgaccagggttcccaaggccggggccaaggcagggcgtcagggcgagatcaccatcttgtctgtgggcaggtgagatgggcacagatgcagcaggggcaggtaaagacgtgacagcctgggggccgggagggggaggcagggccccagcttgggccctgagcaccctgctcaatgggagccctgcccttattgggcctctctgggcagtggaggcggccagagagatcaggactttccggttatgttgtgtctcacatggagcccttgcatccctagggcagcatcttggcccccatggcacccgggcctctcaggctaaggctctggtccatgaacttgctgtgtgaccccgggcacgtgctgccttctctgtgccccgggatccccgctaacggggatgattgccccactctcctcacaggttccgcgtggctcgaattcctgagcagcggacaagttcaatggtgtctgaggtgaagaccatcacggaggctgggccctcgtggggtgatctccctgactccccacagcctggcctcccccctgagcagcaggccctgctaggaagtggcggaagccgtacaaagtggctgaagcccccagcagagaacaaggccgaggtgagagtcaaggagaaaggcatctgttggcacctgggccaaccctgaccgaagacggggcaggggtggaagtgcagcgggccctaggcaggggccactttcctggagccagaagccagcccctgactcagctctgacccctcacccctgcccaccaggagaaccgctatgtggtccggctaagtgagagcaacctggtcatctgaggggcggtctagtctaaggacactgcggccctgccctgggaggttccgaaggcttcctggaggaggtggagctgcagctgggactgtgaggaccgagaagcaatggcccagcaga

SEQ ID NO: 9144 - DNA, 1052 bp, Homo sapiens
tcctatcagctttacttgataaaaacaaatattgacagagaaactcagttatgtttttgtttttttaattattatttttttcagagacagggtcttgctctgttgcccaggttggagtgcagtggtgcaatcatagcacactgtaccctcaacctctcaggctcaagtgatcttctcaccccagcctccagagtagctggaactacaggtgtgtacgactacgccttgctaatatttttattttttaaattgattaattaattttttgagatgggctcactctgtcatctaggctggagtgctgtggcatgattatggctcactgcagccttgacctctctggctcaggtaatcctcccacctcagcctcctaagtaattgggattataggtgcgccccaccacacctggctaattttttgtaaagatggggtttcaccatgttgctcaggctggtctcgaactcctggactcaagtgatatgcctgccttgggctcctaaagtgttgggattacaggtgtgagccaccacagctggcctagaattcatttcagttcaactcaacatttaataatttggggctctaggaatagaaagattaatgagacatagtaccttcctacatgaattgtggtagtagtttagctaccataatagagagacctacaataccaggggcttaagtaaaatagaaatttctttctttctgacataaaagtataagtagatattccagctttttgttttgccatacttatcatattacttctatctcatggtttgagatggctgctccctctttagccactatgttcacatttcaggcagcaggaagcggaaaggggaagcagtggtcatcatgtttcttttctctttgttttttgtttttgttgttcttgttttattttgtttttgctggtttttttttttgtttttttttttgagacggagtctcgctctgtcacccaggctggagtgcagcggcgcgatctcggctcactgcaacctccgcctcccgggttcaagtgattctcctgcctcagcctcccgag

SEQ ID NO: 9145 - DNA, 1028 bp, Homo sapiens
ttcttgatatgctcctccttgacttggagttttcttttccctattttcttcctagccagctcctatctttctttgaggctcctatactctctagaaagccctcccggcctggtcgtggtggctcacacctgtaatcccagcacttcgggaggttgaggtgggtggatcacctgaggggaggagctcaagaccagcctggccaatatggtgaaaccccgtctctactaaaaatacaaaaattagccaggtgtggtggcacgtgcctttaatcccaggtacttgggaggctgagtcatgagaactgcttgaacccaggaggtggaggttgcagtgagctgagatcacgccattgtactccagcctgggcgacaagagtgaaactccatctcaaaaaaaaaaaaaaaaaaatccctcccactcttgtgtgaatccatgatgatttctgcttctctcctgtaacttcagtttggctcaacatttatttactgaataataaatgaatgtagcaccctgctagacttaaggacttcacagtctgttgggcaagtcagacatgtaaacagtgtgttatgggctgttatagacatgaatatataaggtgtagaagaagaatggaaacagtttttaacttcattctatcatctgcgtgtgtttatgtgtaggatagtatcttacttagcccatatctctgcaaaatcagtattctacttaggcaaattttacaggttactgaagcttaattctttactatgtattatgtgtatatactgtagataaatacatgtatgcatactgatcttcacctttcatcctggaagaattacatttcacagccagttacatcaggttgagatcactctaaaagccctctctacaaatgctgtatcaaatctctaaatctttgttcttagcttttagtcttgaaaatgtattttagtcaggccaggcgcggtggctcacgcctgtaatcccagcactgtgggaggctgaggcgagtggatcacgaggtcaggagatcgagtccattc

SEQ ID NO: 9146 - DNA, 1046 bp, Homo sapiens
ctagcactttgggaggccaaggcagaaggatagcttgagcccaggagttcaagaccaccctgggcaacatagggggaccccatctctccaaaaaaaagttaaaaaattagctggacatgccagcccatgtttgtaatctcagctattgggaagctcaggcaggaggatcacttgttcctgagaggctaaggctgtagtgagttgtaatcatgcccctgcacttcagcctgagcaacagagtgagaccctgtctttaaaaaaaacacaaaaactataaaagtgagtttggaaaacaaaaagtgaatctgaaatttctctattctttattctgaaagatctatatctgtatattttctatagctatacctatatataggtatatgtggaaatatctgaactctttttttttttttttacgatgtttctttttttctttttttcttttttatttatttttttttttattgatcattcttgggtgtttctcgcagagggggatttggcagggtcacaggacaatagtggagagaaggtcagcagataaacaagtgaacaaaggtctctggttttcctaggcagaggaccctgcggccttccgcagtgtttgtgtccctgggtacttgagattagggagtggtgatgactcttaaggagcatgctgccttcaagcatctgtttaacaaagcacatcttgcaccgcccttaatccattcaaccctgagtggatacagcacatgtttcagagagcacagggttgggggtaaggtcaccgatcaacaggatcccaaggcagaagaatttttcttagtacggaacaaaatgaaaagtctcccatgtctacctctttctacacagacacggcaaccatccgattctcaatcttttccccacctttcccccctttctattctacaaaaccgccattgtcctcatggcccgttctcaatgagctgttgggtacacctcccagacggggtggtggccgggcagaggggctcctcacttcccagtaggcgcggccaggcagaggcgcccctcacctcccg

SEQ ID NO: 9147 - DNA, 1055 bp, Homo sapiens
aaaggaaaactatctagattgcagctctttggtgagtattacttgaaatttatacacaattaataatatagtcagctttctagccacagctatagcatccctgccttgaatacatacttttcagaattttttttttccaaaagcatgtatcacttccgtggaactcagtagcattttgaaatagtggttggaacttccagtagagacataaggagatctttgattgcttaataagagctgaaagaccttccttatggtgattccttaggattcttaaaagctctaagatactttctaattagatttttgctgaatgtattatggagttgaaatagaaatgtagattttccaaactcaaaatactttagtgaccaattgcaaaataagaaacaagatggcagcaaaccatatgggcttgatagatctgtttttgaaaggaagactgaaaaatcttttctctagtggcctatatccagtgggtatatagctgtgagaattacatttacctaacaaccgttgccagctgtataaattgaatttcgtttagttttgtttgtttgtttgtttttttgagattccctctgttacccaggctggagtgtagtggtgcaatctccgctcacttcaacctctgcctctcgggttcaagtgattcttgtgcctcagcctcccaagtagctgggattacaggcacctgccaccacacctggctaatttttgtattttagtagagacgggtttcgctacgttggccaggctggtcttgaactcctggcctcgagtgatctgcccgcctcagactcccaaagtgctgggattacagttgtgaggcactgtacctggcctggatttagtttttattttaaattggatctatttgaaaagttacactatagtgattaggtcccacctgagttgcttttaatgatattttctcacacagaccctaaattggctactttttaaagctgtggcattttcttaaactcatctttttctaaacaaagtgaaatttccagtaagacttgagagacatgtggttaatcacattggat

SEQ ID NO: 9148 - DNA, 1026 bp, Homo sapiens
aaataaaaagaagcgggggccaaagtcctttcctagctaagcttgtcttttaattttttcccagaaatgcaagctccccaacagatttttcccttaagtcttattgtccagaactgttcacatacccatcctaaaaccaatcactggcagtagggaatgggattaactatgactggtttagaccaattttgattcattcccttggactggaggagagacaacaagagatctccactagctgctcaaacaaaagtattacaattctgttagggaagagagagtgggaagtgggcaggtaatgtctggaatagagaataaacagcatctggcccaaatcctgaggttaacaagtggagaagcctaatcttctgatttcaacttccctactgttttcattgcagtgtaagtataggaagtaataatcccacccccaactcccctgccccttattgccagatttcagccccttgacattcatttcagaacttctgagtaaaagtccgtttttccattgttgcttattgccagcaaatctatttcttcttagtatctccaaaattgggtaatttgctcttttgttttattttaaacctaatgagccttccatgttatgctacttgatgtcagatttcagaaaacatctctagttgtttgggaaagactgtttccttcaaactacaaaatagtttttttttttttaagagaagaaacttttaattaatagttctattaagagggtggccacacttagatattcttcaaatacaatattgattacaagttacaggtatattctaccaatatattttgaagattgaataagagattatattgaaaattccaatcatttcaaaccacaccggaagaccgaagttgtttacttatcagtccttttcctatatgcttctgtgtgtgtttttggccatagactttttccaggtttaagtagacatcctctctctgccactaacaagttgtatgactctggtcagtttctcttcctgggcctcgttatcatggaaagaa

SEQ ID NO: 9149 - DNA, 1105 bp, Homo sapiens
aattgaccataaatgtatgtgtttgtttttgaaccctcaattctatatcattgatttatatatcgatcagtatactggtactacactgtcttttgattactgtagctttttgtagtaagtttcgaaatcaggaagtataatgtttccaactttgttcttttttaaaaaacttattttgggtcccttgaatttccatatgaattttagggtgagtttgtcaacgtctgcaaagaaaccaggtgtaattttgataggcattgctttgaatctatagatcaatttgagaagtattgccaacttaataatactcagtgttctaatccatgaacactggatgtctttctttttatgtcttttttaatttcttcaacagtattacatagttttcagtgtttaaatcttgcatttatttggctatatttattcctgcatattttattcttatcagtggtattgtaaatagaattgtcctcttgattttatttttggattgttaattgcaaattacagaaatacaattgatttttatatattggtcttattttctgaaaccctactgaaattgttcctgtggtttttttagtggattccttaggattttgccctacacattttaacatgtataggtaatatacaagtccaagtttaatcaatatctctgctgttcttctgaaataatacaatgactttagcaacctgtggcaggtggaataacaacatccccaggatgctgaggtctgaatccctggaacctgtgaatatgttattttacatggcagagaggaattaaggttgcaaatggaattaaggttgctaatcagctgaccttaaaataaagagaatatcatggattatttgggtaagcccagtgtaatcactggtgtcttttaaagagaaggaaacagaagaccaagtcagagcctgagagatttgaagatgctgtgttgcttgccggctttaaagtggaggaagaacctgtaagccaagaaatacaggctgcctccagaagctggaaatggtatttagacctctcaatctgggcactagactaactcattgctactattctggttattgcttataggcctttgtagtagacatatct

SEQ ID NO: 9150 - DNA, 1019 bp, Homo sapiens
attccatgacttctgctactttcagcaaatttcatgatttgattgtcatgtttctgtgatgtcctgagccaagatataaactgactcaccgtccttatctaagggattctctctccagagtaaggaaaagatatccaaggaatatagatgaaaaccagagctcagagggtcattgtctaaaggctcttaactgtgtgtgtcaagaaaggataggaagaattaagattgaaagagggatttaggtagagaaagccatattttgaagttgggacagaaccacaatatatggcaaaactagtagaaaatcatcattctttcattttgcttaaaactagaaagtcttttgattctcttgggtcctttgaattttgatggcagttcattttacaaagttatcattgggaattgggtgaaatttgttatcctagatgtgtcttaactacttttcctttttctcctaggcagcgattattagtagagttcagtgtaggattgtagctttggatctgcgaagtcatggtgagtaaagttcttaattagccattaactggattatagtcatcaagcccctttgaatagttgtaactattagaaatttcaacgtggccataaaataacctggtctattccatttgagctttttgttgttgtcgttggagatggagtctcattctgtcgcccaggctggggtgcagtggcacaatctcagctcactgcaacctctgcctcctgggttcaagcaattatcctgcctcagtctccccagtagctgggattacaggtatgcgccaccatgcccagctaatttttgtatttttagtagagaccgggtttcaccatgttggccaggctgatatcaaactcttgacctcaagtgatccatccacctcagcctcccagagtgctagcatcacaggtgtgagccactgcgcccagctcgatttgggcattttgaaggaagtcctagcttctagtctttacaaatgtatgtgtgtgtatatatattaaagttttatgta

SEQ ID NO: 9151 - DNA, 1044 bp, Homo sapiens
tttggaacctgacagaattctgccctctagggtatagggaaagctattcgtggggaggatctcaccagaggcacttggctacaaaaacactgggttggggagggctagagtactggagaagccacttgtgctggaggaattgtgcaggaattggcaggagttggatactgggggaagttctgtgtttctctagcaccctccattaacatagcttaatatcatgcctactggcaagggtaaaatatttacaggcctcacatctatttttgtagagtaggcaatgaaggatgaattggagttgaggtagtaagttgataactggcaccaaaaaaattttttaatggtaaaaatcatccacagtagatgatgaccaagaatcaaaagggcgaacaaattggattcttgctgaaattatccaagcagtaaaacatttgtgtgatttctgaattcagttactgtggaaaaaaaaaaacctcaaaatgggcatacttattatcaactgcagaacctaaatactacctaagaaagtatgtgaaaaagccagaatttgagcttgggtcattctgatattccaatttctgtgatacacagtaatgcttctcagaaaattaacctagcattaaaatatgacagaatccctttaaaaagcatccaccaaaattgtaatacatccagttacagtctagatttgtaggtaacccttgctacttcatctttattgtatttctctggattttcaggacttatctcaagtaaggtacttgttgactgaatgctctgcttgattttaataacaataaatttctcttggtggtagatgatcaagtgattgatcgtaactaccttctacctgggtaaatatgcctttcttaagctcagacacgatgttcagttggtgtgtttcagacctctctacctttgtgcatgaggcagatactgcagaaccccttcaattcagttaatgtgtattttaaggtgacttggacttagataatcgtccatagcatccttttattttactcattatttgtctgttaccaaccg

SEQ ID NO: 9152 - DNA, 1068 bp, Homo sapiens
ttcaaagctttaaaattagactttgttaaataggtccattaataattgaagattagaaccaaagccaataaaatgagctctgaacacctttctagtttctcagagcactgtacttacatttatgttcatccttcaaacaaatgagaaattgtaaataataattaacatttgtgaagcattttactctttcgaggtgttttcttgttcccttctcagttaatcctcaaagcaatccagagcagtcagtgatatttttatctttttttatagatgtcgaaactcagtttctgagagattaagtaactaacccaagatcacatagtgaaaaataaactgaggctagggctcatcttgtgattctgaggtttactacattataatgcttaataaatttttgttcttgttttatagatgggaaaattgaaacagagcagttaaatgatttttccagtttcaatcttaggttcaaaataaaggtatatgtttatgtaattgtactacatatgtggaacagtgaaagtgtgatgtaaaggaaaattcagtaatttgggttcttagtcctttacctgccatttatcaggagagctaggtgtgtggctacacatattgatgctggggacatgttagaaggtttacataggtatgtttgtaagatggcccaatagacttttacagtttcccagcactgttacacaccaaagaaaggaactgggaaagaaaaccatttttacagtgttgtcagaaagcattcttagatctttttctcttctctttgcagagacgttggcaatgtggttgaagccatgtatggggaccttcctcctccaattatgctgattggacatagcatgggtggtgctattgcagtccacacagcatcatccaacctggtaccaagcctcttgggtctgtgcatgattgatgttgtagaaggtgagttttcttagcactgaccaaatcaggatttcacttataagagacatccttggtagattattaccttgtcttagtttattgttgatttcattcatcttgaaatatgtccctctgtctttatatcttttttaa

SEQ ID NO: 9153 - DNA, 1050 bp, Homo sapiens
ttggggaaactctccagaacattgaagtgggcaaagatttcttgagtaataccccacaagcacaggcaaccaaagcaaaaatgaacaaatgggatcacatcaagttaaaaagcttctccacaacaaaggaaacaatcaacaaagagacaatcccattgaatgaaccccattctgtgggttgtctctttgcaaactatctgtctgacaaaggactaataactagaatatataagaagctcaaataactctataggaaaaagtctaataatctgatttaaaatgggcaaaagatctggatagatatttataaaggaaagacatataaatggcaaacaggtttatgaagaggtgctcaacataattgatcatcagataaatgcagatcaaaactacaatgagatattatctcaccccagttaaagtggattttatccaaaagacaggcaataacaaatgcttttgaggatgtgaagaaaagggaacccttgtacactgttggtaggaatgtaaattagtacaactactatggagaacagtttggcgtttcctcagaaaactaaaaatagagctattatacaatccagcaatcacgctcctaagtatgttatctaaaagaaaggaaatatataatgaagcgatatctgcactctcatgtttatcgaagcactacccactatagccaagatttggaagcaacccaggtgtccgtcaacacataaatggataaagaaaacgtggtacatatacacaatggagtactattcagccataaaaaagaatgagatcctgtcatttgcaacaacatggatggaacttaaggtcattatgttaggtgaaataagccaggcacagaaagacaaatatcacatgttctcacttatatgtggaatctaaaaattcaaacaattgaacttacggagatagcaaatagaagggtggttactagaggctaggaagggtagttgggggtagaggggagggaactggggatggttaatgggtataaaaaacagaaagaatgagtaaggcctagtatttgctagcacaaca

SEQ ID NO: 9154 - DNA, 1025 bp, Homo sapiens
ttcagatcagttccccagacatacattgagcacctactactttgacaggtactgagcaaaatcatttgaattcattcagcaaataactcatgagtacctatgacataccatacagtatagagtgaatgtgcccgcgtaccttttcatgtaactgatgggagacaggcagttatggtacagtgtaagagtactgtaataggaggaatattgggggaagatgttggcaggggcacttatctcccacttttggatggatagagtgaggggacaagactgttatgacttatgacacagaaggttatgatatctcagttgaggcctgaaggcccagtagaaatagccaggcaaaggaaaaatgagagactaaggacagagctaagagagaaaacatgcttgtgcagaaccatgatcgttttctatgggtgcaacttagagtgaaaggtaggaaataattagatagaagactaaagaggccaagcaggaattacattatgctttgactactaggataaaaatttagactctattctgagagcgctggggagccactgaaaatatttaagcagatggagtgaaattatcaaaattgcattttagaaagattgctctggttgcagtattgaagataaatcagaagagaataatctggaggcaaggccatcagggaggagaaatgtggcagtaatccaggtggatatgacagttttctaatgtgaagttgtgctgttggggatggagaagtatgaaggttaatgagtcatgaccatcaaaaaacctcagtttggccgggcacagtggctcacgcctgtaatcccagcactttgggaggccgaggcaggtggatcacgaggtcaggagattgagaccatcctggctaacacggtgaaaccccgtctctactaaaaatacaaaaaattagctgggcacggtggcaggcacctatagtcccagctgctcaggaggctgaagcaggagaatggcgtgaacacggaaggcagagcttgcagcgagcagagatcgctcca

SEQ ID NO: 9155 - DNA, 1058 bp, Homo sapiens
aatgtctttatcaagttgctgtgtcaaaattgtgctaacttcataagattactcatgcgctgcataacgatgtttgggtcaacaatgggctgcatatatgacagtggtctcgtaagattataatggagctgaaaaattcccattgcctagtgacatcatagctgtcatgacatggtagcgcaacacattcctcacgtgtttgtgatgatgctggtataaatatacctactgtgctgccagtcatgtgaaagtatatcatatatattaatagttatatatacataatacttgataataaaaatgactatgctactataattactgcactatactttttatcattttagagggtagtctttctacttataaaaaaagttgactgtaaaatagcctcaggcagcccttaggagatatttcaaaagaaggcattgttatcataagagatgacagcttcatgtgtgttactgcccctgaagaagaccttccagtgggacaaaatgtggaggtggaagacaatgatcattgatgatcctgaccctgtgtaggccgaggctaatgtgtgtttgggtcttagctttcaacaaaaaaagtttaaaaagtaaataaaaaatttttaaaatagaaaaaggcctatagaatagggatataaagaagaaaatatttttgtacagctgtacaattttttgtgttttaagctgtgttattacaaaagagccaaaaagttataaaattgaaaatacagttaaagtaagctgtttattattgaagaaagaaaaacattttaaaataaatttagtgttgcctgagtatccagtgttgataaagtctacagtagtgtacagtaacatcctagggccttcacatttcactcaccgctcactcactgactcagccagagcaactttcagtactgaaagccccattcgtggtaagtgccctatacatgtgtaccatttttaatcttttttatacagtatttttactgtatcttttctctttttagatgtttaaatacacaaataccgttgtgttacagttgcctacagtattgagtacag

SEQ ID NO: 9156 - DNA, 1122 bp, Homo sapiens
acccaaaaccaagtggtcaactgaagaagttaaaaaaagtaacagcagattaaccccaaaagaagtagaagataggaaagaataaagagcagaaattaatggaatagaaaacaaaagaattagcaaggccaaaatctaattcattgaaaagattaagatctataaccctaacctctggcaagattgatcaaagaaaaggcataaatattaggaatgaaaaaatacaactatagatataatgaagatttaaaaaaacctataaatatagaatatggaaaactttctgcccatgaatttgaaaaattggataaaatagttttgtggaaaagtgtaacatggcagctgactcaagaataaatagaaagtatgactagaaatgtaactaattagcaaagagtaaaatctccccacaaagcaataccaccgcgtggacacaatgagcaaaatgcagaatatgggaaaactgtgggacaaatggcctactttcttccacaaataaattaggaaaaaagcaacagaggggtgattcatggattaaaagatacaatcagtttaagtgtatgaacttacttggatcctgatttgaaaaaactgtatgaaaacatttgatgagaatttgaatgccggctggatatttgttggtattaaagacttatatttttagtgtgacaatagttttctggttatatattttaaaataatccttctcttagatgttaaaaatatttatagctaagatgatatgatgcctgggatttgcttcaaaataacttcaaatttgttccaggagatagggagcaggtattgattaggggaggatagaaaataagattgctaatgattgattgctgaagctggatgatctgtggtagttcattatactggtttctctaataatatatttgaaacttttccataaaaaaagcaagaagaaattctgtccattgaagaagtaccaggcacagatggttttatgggttacccaaatattgaaggatggatggttccagggaataaataaaacgtttccagacttgttttgggggcttttacaacttgataacaaaatcacacaagttaacaaaatcacacaagaactgtatgagaaaggaaaagtacagg

SEQ ID NO: 9157 - DNA, 1022 bp, Homo sapiens
tctggtaaacatctagaatgatacgcaacagcattagcaatcagggaaatgcaaattaaaccagtgatatgccatcagactgctataatttgtaattgattaattataaataatgagcacctatatactgctggaggagtataagttgccatacaaccacgttggagagcagtttggccatatctagtaaggttgaagagatagattccttgctatgcagagattccattaataggtgtgtgccatagtgaaactcttgtgtacatatgcacacacacaatgatgctcacattacagcactgtagtactagaaaatgtagtaacagttgtctttgataggagaagggataaattagtttctacagctgttagaatgaatgaactgggtatatatcaacatggataaatctggaaaaaatacttgcaaaaggaaaagttgcaaaagaatatgtatcctttgatgccatttatataagtaaaagtacggaagataggagtcatttcaatagcttgagtgagaaatgaagaaacaatcagccaatgtagactctactctccttgtaccccccaacaaggtctccctctgacatccaggctggagttcagtgatgaaatcatggcacattacagcctctacttttcaggctgaagcgatcctcccacctccaaagtaactgggactacaggcatgtgccaccgtgcccaactaattttttgtatttttagtactatacagggtctcaccatgttgcccaggttggtcttgaactcctgggttcaagcaatcctcctgcctcagtctctcaaagtgctgggattacaggtgtgagccaccatacctggctttagactactgtttcacagtttgataatgaaaggaaggaaatagagtgcatgaaaaagggaaagtacaattgtaagaaccaagagcagaacagattttactcagaatttgagttcagggtactcttggagagcccattcctgggccttgggcagaacttgagagtctaagcgatagc

SEQ ID NO: 9158 - DNA, 1083 bp, Homo sapiens
accatttgtttcagttttacatgtgtttgatcatgaactggggagtgatgtaaaatgtatttcttactgtggattgtactaaaagttccaaagctattggctaggtactaatagtccatagtatgtcatcaataaatgttagtgacaatagaaatatttaatccgtaatggagatgtactgtcaaaatagatatatattggtttaggaatccagtcatacaaatattttatcacatttgctagtgaaaaagtacttgtattttgtactttctaagaacttaaactgagcttttggtgactaggagatttgtcctgaaatgccgagacctggggtagcatttggggaggattacgatttgctgagacctggggtaggattggcctggatttccatggtgctgcaatatctggcatatagtaggttcataaatatttgtgcgataaatgactttattgtagcctcaattcagaatttctcaactagtcaatctttaacaccaatctgatcaattcatggactgagatttactgttctgttgcatttctttctctaatacctctttaaagcctcttatatgtgtttatcagcttagatgacttgattatagcatttaggataatataaaataagatgataattgtataagctaaatacgaatgaaaggagggagaaagatggtcatttgtgcaaatgtaccaccaggccagttttctttttgagcttgcctggatgtttcacctactgaatcccaggcacaacaatattcttacatgtttatttttctgatgaggtcagaagggttgtaaaatgcctgcaggatagatgaaatttttcactaaatacttcagtgtgaaaacattttgcatcataaatagtattctggaaaggagacaggattggaagttagtggatctgagtttgcatactggtattctactacttagtagctgtgtggctttgggcaagcatcttaaactctgtgcctaaatttcttcttttttagtatgaggataataggagctattttgcagagttgtgaggattaaatgaaatgatatgtgtaaactgcttatagaaagtaa

SEQ ID NO: 9159 - DNA, 1038 bp, Homo sapiens
cctttctagccagaggcttttgagttggtatgcttactgaggtcactatgagtttctaaattttatcattctgtgaataagcttatatttctaaatatatttagatttttttctttctgcatgtgttgtagttagttgtctttttttaacataagaaaaataacgcaaaaatgattagagcaaaatatgaaagtccctttttacctttcttcccactgtccttcccagaagtacctagaatcaatagtttagtgtttatcttagaccccttatatgcttacttatgcatgcagacacatacataaacactttagtcttctgtataaatgagatcatgatatatatatattcattggttaatgaaatatttattgtgcccctagtatgtgctaggcactggggatatcacagactcctctagctactagggaggctggaaagcatagtgttttagctaggaacattaactttctaagtaaaatcagggttctcttagtaaggaaggagaaaatggatattggattggcaactagctgcctctgtctcctgggacaacaatggcaataagactagttaggacactttgagagtaagcaatatgttgggtttaattgggcttgggattttgtcagaagtgtgatggagagatgcagtagatgcacttggaggtgtatacaaggaagttgttacagttttggatgatggatctaggttaaggggaaaattgaggacatgaaggatgtgatagtgaaagagttagttgtagggtcaatggatcggaaactttgatggtgaaaattgtaaaagtaggattgctagcatatataaataaagctggaaagctaggaagtggtggtctcaatataaaaggcttaaatgtgagccttgggagatagtttagttatggatatcacaaagtttagggtatgaccatggagtagatagctgaaataggatggagaaaaagatgtatttaaggaggaggtgaaggaactgagagagtatgccaatattgagaccttcaggaatgatcactgg

SEQ ID NO: 9160 - DNA, 1090 bp, Homo sapiens
ggaaacgagtgaataaatgagtacaaatttttgtaaaataacaatttgtgaagtgtatgatactcatacaaatggagaacgataaactatgcagtacgaaagtgcttggtgagcctgtcatatctgtcatgtttttgcactgcatggtggtaggaggtgctctttagagtttttctttgcaaacatgtattctttgatttaacccaccgccactgcaaccactatcactcactgattcaccaaaaattgggtaattaccttgcttgtttttatctttcttaaatgtatgtgtagctctcatttatctcagtgtttaatattagaagtagttgggtctttatttagaagtttggtgtttttttgtgaatagaaatatgctgtaggaacttaactcttttataccagttagcctgtggtaaaactgttttattatacgttgtttgcttgaagtttcagtttctgagaacctatggacgacgttaagaaatgtgtatctaacaatggacttatatccagaatatataaagaactcttgctaatctaactagtaaggtttaaaaaaaaggacaaaaggtttgaacaaattccacaaaataagatacactttcatgcagtagtagtaggagtataaaatataaccaccattggaaaccttttggctgttgttctataaatttaaacatacacttaactgtgtgatgcagcaattccacttgtagctatttagccaaccaaaacaaaaacacctgtccacaaaatgacatgaatgtccatagtagatttattcaaaatagcccagaactaaataacaacccaaatgtcccacacttgtggataagcaaattgtggtttattcatagaatgggttatatcttatccgtataaaggagtgtcttattagtaaactcagtagcatggatgaattagtctcaaaagtatcatgcagagtgaatgaaacttgacacaaagaaatacatcctgtatatttttataataggcaaaactaatatagtaatcagattagtggtagcctggggctaagtggtttgagagattgattgctaataggttcaaaaggactttctgggga

SEQ ID NO: 9161 - DNA, 1023 bp, Homo sapiens
actcttactttgataatcatttgatcattagataattggttaatcatcagctgagcagacagttcttatttatctactatgtaacagtattggaaattttttaaaaagatggtcacttgctctcacagggctcattgcataaagcagaacagatccctaaataagaagctacagttcagtgtgattagttgctatccattaaaagaaaaagactctcatgtttaataatgaggcaaaacttcattacattatatgttaaagacatacctctaagatgtttctaatgtaattggaaagactctaaaaagggactccaaagtaaaacaacgataaatgaatggatataaacaagatggaaaaactaactctaggataatttggaagcctttgcagaaaaagtgatattttagatgactctgaaaggccaattagtattttataggcagagagcagagacggaattttaggcaaagggtgtagcatatccaaatgggtagatagaggttttgaaagactgtggtacgtgtggagagtaaaaagtagtttggttgtactagagctcagggagttccatgtgtgggaactggtaggggaaaagctgtgaaacaaggttaagtctagtttgtgaaggttgtagtatcaggctgaggcatttagaccttaccctgaagtcaccagccgttaagcaggggagtgattgctggaaagataattcttgatggtgtggagggtattattagagagaagaaagcctgaagagaatgagaccagtaagtagattgttgcagtagtccaggcaaaagatgataagaatctaaggtaaggcaatgaccatgaatataaatgggaagagttagatctgagagactttctagaagtagaatagaatagagtggaaatagcatggagacaatttggagactaatgctcttaatttaagaactagttttatccatgtattaaccctgtaattctaggaaaattaactactctgagcctcagtttgctatctgtaaaagacag

SEQ ID NO: 9162 - DNA, 1033 bp, Homo sapiens
cttgagcccaggagatagaggcttcagttagccatgatcacttcattgcactccagcctaggcgatagagtgagaccctgtctcagaaaaaaaaaaaaaaaaaaaagaggaaaagaacactggaatcttggcatctaaggaactctgtcagatcactaactgaccactaagctaacagaacagagaattcattggccacatatgacaaaaaatagactttataaaatcagttcaaaaaagtcactgaacaaataacagctataacagacagcaacaacaaacccaggggtggggagagaatctgattttcatagttgccaccttataatattcaaaatgcaaaaaatatgaggcataagaaacaagaaacaatgacccatacacaggaaaaaagaaactgatagaaactgtcccaaaggaagccaagacatttgacatttttaatggggactttaaatcatatcctcaagagctaaaggaactatgggcaaagaactaaaggaaaccatgaaaaacagtgtcctaagtagacagtatcagtaaagagataaaattataaaaaaggaatcaaatagaaattctggagctgaaaagtacagtgacagaacagatttgaacaggcagaataattagctaatttgaatataggtcaattgagattatccaatctgagaaacagaaaaaagaataaagaaaaataaacagagcctaagaaatctgtgaaacaccattaagtgtaccaatatacacaaaatggtagtcccagaatgagagagaaaggggcagaaagaatatttgaagtaataatgagcaaacactaatcaaatttaatgaaagacataagtctacacatccaagaagttctgtgactccaaagtaggataaagacatctacaccaagacatgttataatcaaactgttgaaagccaaacagaatactggaaatagcaaagatcacaaatcactataccagatataataatcatgaaaaagtttgaaatattgtgagaattaccaaaacgtgacacaaga

SEQ ID NO: 9163 - DNA, 1087 bp, Homo sapiens
aaaagagcttgacgttactgatcattagagaaatgcaaatcaaaaccataatgagataccatctcacaccagtcagaatggctattattaaaaagtcaaaaaacaacagatgctggcaaggttgtggagaaaaaggaacacttctacattgttggtgggagtgcaaattagttcaaccattgtggaagacagtgtggtgattcctcaaaaacctagaagcagaaataccatttgacccagcaatctcattactaggtatatacacaaaggaatatatatcattcccttataaaaatacacgcacatgtgtgttcattgcagcactgttcacaatagcaaagacatggaaccaatctaaatgccattcagtgatagaccgaataaagaaaatgtggtacgtatacccccatggaatactatgcagtcattaaaaggaacaagattatgtcctttgcaggggcatggatggagctggaagccatcattctcagcaaactaatgcaggaacagaaaaccaaacatcacatattctcatttataaagtgggagccgaatgatgagaactcatggacacatgtggggaaactggggaaacaacacacactggggcctgcaggagaatgggggtgggaggagggagaccatcaggaaaaatagctaatggatgctgggcttaatacctaggtgatgggatgatctgtgcagcaaaccaccatgacacaggtttagctatgtaacctgcacatcctgcgcatgtacccctgaacttaaaagttagaaaaaggtaaaaattaaagaaaacctgtacatcaaaacttactgaatgtaatgaaagcagcgctcagagggaaatttatagctgtaaaagcctacattataaaagatctaagactaaacacacagagtagactaaacacagaaaacaaaaggaaagaaataataaagattacatttaagattaacagagaataggaaaacagtagaatgaatgaaacccaaaagttgggtcctttggtaagatcaacaaaattgacaaatttttaacgactggtcaagaaaaaaagagaagactcaaattaccaaaatt

SEQ ID NO: 9164 - DNA, 1023 bp, Homo sapiens
ctaaaggtttcccaaatagatcacaacctaagggtgtgccaggggagcctaggggaagctaggctgggcattgaacactgatagtgcagaatccacatgcaaacaagatcgacagggtggataaacatatatgtgcattatccccatcccccacagtttagagccttctgcttttctgggggtttcagcctatgagacaaactataatcaggcttcattattacttttcaaatggccaagggttatctgcaatgttgatctaaaatcctaaaaaatcaccctgaagtcaggcaaggaacaatacttaaactccatactatggaaacaaggtatctagctggatgcagctggtaaattcagtcccatggacctttgggggtttattttccttagcagctgacaccatgtgtcttttgcatccctggtggtgcttggtgcttctgcccatctgggctcattgagaatagggatgaagatatgattttagggaatttctgatgggctggcatgccccatgtagtatgagttactatataaagtcatgtgactggcattttaacagaccttccagagcttatatatcccaatatatgttgtttcctttgagtagccccagcaggatactgcttagtttttccagtgccattggtgaaagcatttctggaactgtcttcaaagactagaaacactgactcccaaaatgctagaactggaagggaccttaatggttatctattccagcctcctcctaaggtcctcctcagcttctagacctagaagccaaagtccagaacagtgacccattgatcaaggcagatagtataactccttttaagtgttctcagatttgccttttctcagggcaaatcttcagtgttttgtggttatttgtggttgagagagagagagaatgtaatgtctgagactagccagcagctatttgaagcctctgggaaagaaggtggcttatcaagtgggtttgtagtaatgagtgctgctgtaaagcagagccattttcttgtg

SEQ ID NO: 9165 - DNA, 1030 bp, Homo sapiens
tgaataaataatcattaaagtttgacacacgcagacacacgcaccaatgatggggatacccccaaatgatttaggaggttattttattttaatagttttttcttcctgatttttttcagttagttagagttaaatgtacctatagcccctgaatacatgctcaggtagagaaagtctccatagtataagtaagtaatatgaatgtggaatcttggaaagtgatatattttgattggaataattttaattaaatttaatgattttaattaagaattaaaagccagctagccaaattttctttaaaaattggaaactcattatggtcttaaattgtcctcaggcagccttttcctcatcaacccatagagtggtcttttgaactggtatctaaacatacctggttatgaattctcaaaagagaaagcaggtctggggcggggtggtcaggagacagattctagggaaagtgctgaagagattttcttctgaagatgatctaggaaatgcatctttatacatgattgttagctgctgtagctttctgaagaagattgtagaaaagagactaagatatatgcaagggtcaccagtttagagatcagtcaaattggaaaaagtgccaagactggatgtgcagattgttctatgtattatcagtatttttttcctcttaagaaaaaaatttactctctctcctttgtgagtaaatgcctccttaatgccttttaagtaaggtggcaacttttaactgtcatcttgtgagaggcaacctcaaactctaagcagactccctctctccctttctggtgtcttaaatcaagaactagtttgaagccaaggcaaagcaaggtttgttcatcttcctttcctgtcatttaaggtaaaacaggcaatgaactcgctcttcaaataccatagttcaagagtagctgttggccctggttccagattaatatagcagcaggcagattgccccttcttggggccaccaccctccaaagctgtgccaccaatgagagcattgggttca

SEQ ID NO: 9166 - DNA, 1049 bp, Homo sapiens
tgttcttgcctcagggcctttgcacttgctgttcctttttcctggaacattctttttccagatagcttattctcttacctttcttgtctctgctcagacatctgcttagtgaaggcttttctgcccatctatttaagagaacatcttctttttttatactgtctgttccctcacacacactaaaatgaaagtcccaaaaggcagacatttatattatgttcactgccgtatatccttaccatctaaaactgcctgtcacatataggtaggctcagtaaatatctgaattaatgaacatttctaaaatgtatcaggtcacaactcatcagatcatggactgccaccaaagccatgtaactgccaataaaactgggcacagaagtctaaaaattactgtgatatcaattagcagttggtcagaacttgagaaaatattttgaggtgttgaaaatagttaaaggaacttcactactagctctccaagttgggagttactgcctagaccaacaattattgaggagctgtgaccttttgagcactagttaatgatagacactgttttagtcatgacagtaatcctgaaagcaggtggaagttctcccattttaaacatgcagaaatagagcctcaagaaactgcttcatttaaagataatactagcttgacaatccactgaatatgtcctaataaatggaaacagggtgggggatgtcagcctaccagtaattggtgtcattaaaccctcttgaatgaatggacatagtaatggccttcagggtaccttgaagtatagctaaaggaatctctggagttcatttagtaaagcagttggcatccctggcctgggatcagagtaaaacctggagctagattgattacagagtgcaaggactaggcaccccgggattggagagcatccttgaaagcaagggttcttcatttatttataaaaatttgattgcctactagaagcccagctaagagtatgaagcaattaagacaacaatctttgctcaagaatctcctagacaatcctgattcaagcacca

SEQ ID NO: 9167 - DNA, 1109 bp, Homo sapiens
ttcgataaaataaggacacatctggatcataagggaaaaggacactggcagagtctggaggaatccatttgcaggcttccttatgctcttcctcccatgagggattgcaaagagcccactttgccccaacaacaaaaatgcagcaacacgtgtgtaatgtttctgtccagggagcccattagagagtacccacagtttattgaggtttggtcatgtgggcaccatctgcctagcacataataaagactcctagaaagcaagcaggtatccaccataaatcatactgcaatcaaacagtctacatagtcaactacccttttcagttaactggtgactgggaacactttgagagccaagtttccagacacctgtcaaaaaacaccaaccttgcaagcaggccttcctaaggataacctgttaggcctgctatggtaaatctgcacaagtaccattctctctgtattgtgcaacttgcttttttgttcaatattttgtttgtgaagataatttagattgatacctgtagctacaatttattctatttcactgctgtatactgttaaacatgacagtttatttaccctattaatggacatttaggtcttttataatttttcactattaaacatttgctgctatgagcattcttgtatggacacatctaatacaggtagtgggattccttggtgggagaggatatacatttttacttttctaggtattgctaaattttcctctaaagcgactgtaccaatttacattccttctattaatgaaggaaatacaagattggaataattgggatagttgtgttatctttgtgaatagattttaaaatactgatttagatttttaaatagttgtaagacttcacattttccatatcttagtttggtaactttttctaaaactgtattaactttatctagattttcaaacttaaggaataaagtttgtttaatatttatttctcatctctgttgtatccctgcatatagtctccttttcattaatatcatttataacttttaaaaatgagtcttgccagagggtttgtccggtttattagatatgtcaagactaatatttgcttttgtcagtcccctcta

SEQ ID NO: 9168 - DNA, 1019 bp, Homo sapiens
cctgggtgacaaagggagactctgtttcaaaaaaaaaaaagaactttttctttgcatttacagcttggctgtttggcacaagaggcctagctatcggcctgtcttggctttcaacatgccttcctcgtaagtttaatcatttctagctttgatttaaagtgaaagatgggggactcttcctttcacttgaacacttagaggccattgtagggttactaattggcctaatttcaatgttgttgcatttcagggaataggctgaaggaaaggaagagagatgagggaacagttggttggtgaagcagtcaggacacatatagcatttatcaagttcaccatgtaatatgggcacagttgtcatactccaaaacaattacagtaataacatcaaagatcactgatgaaagatcaccataacagatttaataataatgacaatgtttgagatattgtgagaattaaccgaaacatgacaaagacatgaagtgagcacatgctcagttcagggttgccacaaaccttcagttttgtggcaatatctgacaaatgcagtagagcaaagtgcaataaaatcacataggcctatatttcttattgttgctttcctctctcccagggctagcttaagtgagacaaatgagacaatggttttgagagtcttttgtaaaaaaaatatatagttgtgtcatctctctatatctacatagtaggcactttaatactcctaacctaccctgcttttttacctacagatgtctcaaatctgaccattaaatcttcatatccacagcagataaccttcttctgctgttaaagtacacagtgcaaatgctattctgctgaacatgggccttgccatcaatccctgtctttgcttttgataacattggctcacatttctcttggtgaagttttttactttgtgggattttcagttcctgctctttcaccttatcttctcatgagtctttctcatggcctcccaggaccagacttctgcatgtataactagcctccac

SEQ ID NO: 9169 - DNA, 1103 bp, Homo sapiens
tttttatcaagagtaaaaaacgagcaaagataaatactgaatactttggtataacttaattagtgatgacacctcagttgagccttctctatgcagctggagttttgcttttctgctcaaatgccctctaatattatatccagccaaggtatcattcaagtataaagacaacagctaaagtgtccttaaaggcaacagaccaatacctgcgctgttctgttttgcttcgtccacacagtttttattcttcttcactcatttaacatttcagccatggtgggctatgaattctttcttggtaactaaaattgtttgtaaacggtattaaaataagtctcctttttaccttcttggtggtttctcagttgtcatacccccatctctcctctgtttccctttctaatactggtacttcccttacttggctaaggatttctgggagaggttggataggagttactagtgtcccagtaatgctggtcaaaactttccccatgcccagagcccagagataattcaggaccacaggtagagtgtgtataggtcccactgtttgttaacactgtgtccatgaagactaccttgccaaggtttccaatgactgctgcatggagctcttctgccccactgctgcttgctgatctctaaacccaggtgaagtttttcgctttcaccttacggactactgggcagcatcagggaccatttactccttgaccttcctgaagcaatttcatattgcaccactctactttctcatctgccctcttaagctcatcctctaaggtctggagttctccaagatcccagccttgattttccattcaccatacacactctctttaatgacctaaaccactcacacaactgtgagtactcatttgtcagcaatttccaaatctctatttccaggcaggtcctggctccacacccaaatattcaattgccctccagttcaactggccaaaaccaaatgcatctgtttctcccaagcctgctcctccttttgtgctctctctctctctgtccacccagtctccctgcccagaagcttgcacatcatttttaaacactcttttgctttccatttccaaagattcaca

SEQ ID NO: 9170 - DNA, 1319 bp, Homo sapiens
ggtacagtccgctggccccaggacctcaacttgaagggttgctgacggttgcttgctccgtctggggaccccgggaggaagctgcctcggatttaacgccttgtcattacatgggatagaactgtgtaaaaatcattagctttaaaaatagacagtttgtcatttcgtatatacacttcgatgtcaaaattaaatccacaacttctcgagagttaggatttgccagctctgttggtaccgtaaagccaaataacatggctgggattctttagacggtgcaggttgtgtctacaagtgagagagcttatatgttaagtctactatctattccttaacagtgacaagtacagtgtctttgctgtgctgaatgaagtgtaaataggccattagagcagtttcttgttttgcatgtggaactgttttaaacccttcgatgaagagatgatgacgagtctgacttggggatgttctctttgcccaggtggcctactctgtgctgcgttctgtggcacagtttaaagagccctggttgaagtaatttcctaaagatgacttagaggcatttgtctgagaagggttgctgcactcctgttggaacaagggtttggaaccattggttggaggtatttagttttggtgagggatgcattgactaataagactagactggctcaggcgaaagtgagcctacaccgatctcctaattttgaactttgctttgtttggattagtttgtcgctgatggcatcttcaaagctgaactgaatgagtttcttactcgggagctggctgaagatggctactctggagttgaggtgcgagttacaccaaccaggacagaaatcattatcttagccaccaggtaaaactcatttgactggccatcacctataattgttataaatgctaagttggtttatttatttatttatttttttgagacggagtcttgctctgtccccaaagctggagtgcagtggcgcgatctcggctcactgcaagctccgcctcccgggttcacgccattctcctgcgtcagcctcccgagtagctgggactataggcgcccgccaccataccttgctaattttttgtgtttttagtagagttggggtttcaccgtgttagccaggacggtctggatctcctgacctcgtgatccgcctgcctcagcctcccaaagtgctgggattacaggcgtgagccaccgcgcccggcaggtttatcctttatgaacttaaggggacagacggaacagtgaatctgggcttagtgaatgtaattgcttcttaaaagctagattttaaggccaggcgtag

SEQ ID NO: 9171 - DNA, 2590 bp, Homo sapiens
cagagtatttcaagggaccacaaagtgggtaattgtggagtgtaaatgtggttctcagttttggttatacatgagaatcacccagggagcatttttaaatagatattcctggactttgcacatttaattggcctagagtagggcctagatgtcagggtttcttttgttttttattttagccttctgaggtgattccagtatgcagccagggttggaaagtacatatttaggagcttgacatacttgatgaatattaccctaaggttcggaatgataggtgtggaagagaattggtattcttggggccggactctggtcaaattattctccattaaaggaacattgaaaaccaagtctttgttttgttttttaaacttggtggaggtccttggcaataacacagtggctctcttctgttcttttaaagggcctgctatggtgtgctgcggttcatcatggagagtggggccaaaggctgcgaggttgtggtgtctgggaaactccgaggacagagggctaaatccatgaagtttgtggatggcctgatgatccacagcggagaccctgttaactactacgttgacactgctgtgcgccacgtgttgctcagacagggtgagcagctgagagtgcttggcaaagggcatttgtggacagatttggttttccacagacatcttaagtatttgggggagtttatcatggaagtagctgggcatgttcatattccttggtgtatcgattgccacgttgatctgtaagaatcgatttgctgagatctgtcagatccaagagttggtttgtccttgttttagccatctgtgtacccttcagtgatgacacgatgacgagtcagaaaggtcacgtcctgctcttggtccttgtcagtgccatgttctgtggtgctgtgcacgagttcctttggcagaagtgtcctatttattgatcgatttagaggcatttgtctgagaagggtccagacccaggggtgcttgagtaaactgcttgctctctttggtcttgtgtgatgggggcctttgagaccccagctgtgtgctaacaactgtggtgtcctctaggtgtgctgggcatcaaggtgaagatcatgctgccctgggacccaactggtaagattggccctaagaagcccctgcctgaccacgtgagcattgtggaacccaaagatgagatactgcccaccacccccatctcagaacagaagggtgggaagccagagccgcctgccatgccccagccagtccccacagcataacaggtatgtctgcaagggcaggggcctcttggggcataatagggtccttccgagtctttctgttaatacttgtatcccacattctggtaagcgtttggtgaataaaaatttcatttatttgctttatgtgggagaatacaagttgaaacctggggtctatttaacccttggttccaatgggacaggtgttgcctttattctttccagaaagaagttcctgcttttactcgtgtatatgaaatagttttcccttatcctcccttatttgctcaaaatttttggctcagtgcaacctctgcctcccatgttcaagcaattctcctgtctcagcctcccgagtagctgggattataggcacctgccaccaagcccagctaatttttgtgtttttagtagagacggggtttcaccttgttggccaggctggtctcagactcctgacctcaggtgagccactgtgcttggctgctcaagattttctaggcacttttgctattctgtcctttagcagcccctgtaaaacactaacaagcctcctgtggtcaacacttggggtttttttgtttataggtgttgtctctccaggtgccttgtattttttttttttatatgaaaaaggacaaacccttatgtatgcattttattaatgttgctgcaaaccctaagtgggagtgtgtatccatttggtaaatcaggaacttaataactctggtaaagtttcttacttttgtgctttatttggtttcagggtctccttggcagctgtattctggagtctggatgttgctctctaaagacctttaataaaattttgtacaaagacacaaggtctgactagactgttcagtattcagactgaggggcatgttggcctctggagcattacatatcttcttggttttaaccatacttgtggtatttgcaagggccagaacagtaagacccaagcagagccaaccagagaaataatatttgtgtgatagagaaggctgatagcaagcaaggcagcaccttgattcgttgtcctgtagttcaggattgtaggtttagaagagggatatgtttgagtttttcctatgcataaggcgatccacgttgcacatagaaagtgaatataaatggccattatattttgtgtcatgctgtgctctaagtgttctttacatatgtactcgttaatcaacctctctaaagtgtaaaggaaatttgcttgcaccactgaaggcacataaggctcagaagtaaatttgcctaagcagtataaagctatcattagaatccacattcctaagttgtgttctcttaggggatcatgga

SEQ ID NO: 9172 - DNA, 1021 bp, Homo sapiens
ccaattagtgctagctgttactattaccactacttaagcatatcctcttggattttaatacctaaattcatgatattggattctccccatcccaactgtacgtgcactgactacaggtgccatgctttctgtttctgttcaaaaggtgggcatagctgggcagataatcaatattcccattttacaatggtgaatttggccttttactgtgccttgttccattttccatcttgattatttctattttttttttttttttttgagacaaagtctcactgtcacttaggctggagtacagtggcatgatctcagctcactgcaacctccgcctcctgggttcaagtgattctcatgcctcagcctcctgagtagctgggattacaggcatgcactagcacacctggctaatttttaatttttagtagagacggggtttcaccatgttggccaggctggtcttgaactcccaacgtgtggtgatccgcccacctcagcctcccaaagtgctgggattacaggcatccatctagtgattatttctgagatctgatgttgctatgtataaatgcagctgttgtatttcaaagtagggcctgccagcatcagagctggaaaacattgaagtatcatagagagtgaatattttcaacctcagagattgtttttcttactgttctcctcagggacattagattttgatattattttatcaaccaaaccattctctttttttccttataacacccagactggtatgactctctgttattagccaaagctacatttatagcgtaagcatgaccatggtgagaagataattgttatatgccctgagcttgctgtaaacatttaatcttcctgacatcccttataatggacagatttcattactaacctcattttacaagtttaatccatacagtacatcttaggcagaactggtgatttttcttaggctttaagaaatattggcagggtatggtggctcacatctgttatcccagcactttgggaggccgaa

SEQ ID NO: 9173 - DNA, 1067 bp, Homo sapiens
ttccaatttgagaacacgtaacgtgagtctctggattgggaatgacttatgtgatcccaaaccctcattttcacaaagaaggtggagccctagtagctctgaaattcaaatgaagccatgcctctgctgcctggtccagtgctgtgctaacccctcagcctgcccaggtacagctgggtctttgtccaccgagcagggagttccactgtgatatatgcatcccaccctcactggcaggccattgactacacctgcaaccagcctattctcacagccctttttgtggtgagcaggagagctggactctgagccccccagttgcctagagagagggtagagctggcctttaattaaggacttttttgctttttagagcgagcttccggggaagcatagcacagcaatagggccactttcctgccagagggggtgggtgccaaaggatgtgggtcttttgctcactggtttaccctcagcataccaggaaaaatagtcatcctgattcactgtttggtccaagtttttatcacacagtattgtgtgatgaaatcctttctgtagaatgatttaactggatgaaaataaccatgtttcttttttgtctttagaaatatgttactctggctgggcttggtggctcatgcctgtaatcccagcactttgggaggctgaggcgggtggatcacctgaggtcaggagtttgagactagcctgaccaacatggtgaaaccctgtctctactaaaaatacaaaaattagctgggcatggtggcacacacctgtaatcccagctacgagggaggccgaggcagaagaatctcttgaacccaagaggcggaggttgcagtgagctgaaattgtgccactgcactccagcctgggcaacagagtgagactccttctcaaacaaaaaaaaaaagaaagaaaaaaagaaaatctaatatatccatatggtaatgaatgtttcattttattttgtttttatttttattttttatttttgagatggagtctccctctctagcccaggttggagtatagtgacacaacctaggctcactgcaact

SEQ ID NO: 9174 - DNA, 1050 bp, Homo sapiens
cggccctggccgccgaggtgaagaaacctgcagccgcagcagctcctggcactgcggagaagttgagccccaaggcggccacgcttgccgagcgcagcgccggcctggccttcagcttgtaccaggccatggccaaggaccaggcagtggagaacatcctggtgtcacccgtggtggtggcctcgtcgctagggctcgtgtcgctgggcggcaaggcgaccacggcgtcgcaggccaaggcagtgctgagcgccgagcagctgcgcgacgaggaggtgcacgccggcctgggcgagctgctgcgctcactcagcaactccacggcgcgcaacgtgacctggaagctgggcagccgactgtacggacccagctcagtgagcttcgctgatgacttcgtgcgcagcagcaagcagcactacaactgcgagcactccaagatcaacttccgcgacaagcgcagcgcgctgcagtccatcaacgagtgggccgcgcagaccaccgacggcaagctgcccgaggtcaccaaggacgtggagcgcacggacggcgccctgctagtcaacgccatgttcttcaagcgtgagtcgggggcgcgttcaggggtcctcctcctcctcccaggaccccctgcaagagttaggacgacattccgtgcgctccattcttcactgcctctcatttatgctgtgacaacccagggaggcaggactgtcactcagctttttgtacagactggaaactagattcagagacaggtagcagcgtgtaaaggaatggttcagggagcggaggccccagagggactccatggaatgtattccgaccgaatttcgtcaaagtgctcgtccttgtgtatcttggaatgaataacatttaataatccattctgcctcagtagtgagctagagaaagaactcaaatcctttttttaaaattatttttattttgagatggagtctcactctgtcacccaggctggagtgcaatggcacgatctcagctcactgcagccttggcctccgggcttcaagcaattctcctgcctcagcc

SEQ ID NO: 9175 - DNA, 1044 bp, Homo sapiens
gggtgaatgggagccatttccttgtctttggttatcagcctctctgaatcactctctaatgcttgatgcagaacaagattaagggcacatcagttctctttggtcattaatatacctcagaagccagagaattttagatgcatgcaagggaaaggtaaaatatttcactactgaaaatggctttgagttctgtcagttctggtgtgtgatctgaccgggttttttaagacttgctttccgctgtattaaggttcaaaactgtatcaacaaatatagattgaccctacagaaatgatcattttctaaaatacgggtatgtttaataaagtgaaacatttcttttatcttgccactaagttagaatgttactcttcatctactaacctgccatgggataaatccttaataaaccttacagtataagttctttccctagttgtaatctttgacagttttaaagggatgggctgatgtttgtcatcatagtactcattttaagtatagtttgatccaggcttggactgtgtcagcaggatctgaatcccacatctcttgactctgctctcttccttgttggtttcattccctggtttcactgtgatagaaagatggctgacaggatctctagccctatgtccttctaggttcagggccagtaggggcaaaaaagaactcatggccggctcagtggctcatgcctgtaatcccagcactttgggaggccgaggtgggtggatcatttgaggtcaggagtacgagaccagcctggccaaaatggcaaaaccccgtctatacaaaagatacaaaaattacctgggtgtggtggcaggcgcctgtagttccagcaactcaggaggctgaggcaggagaatctcttgagcccaggaggcagaggttgcagtgagctgagattgcgccactgcactccagcctgggtgacagagcaagacgccatctaaaaaaaaaaaaaaaaaaagaactctcaacagtttaatttctgggtctttcgttagccctaattggatcatatgttatgatcgggag

SEQ ID NO: 9176 - DNA, 1047 bp, Homo sapiens
tctgtcacccaggctggagtgcagtggcgcgatctcggctcactgcaagctccgcctcctgggttcaagcaattctctctctcagcctcccgagtggctgggattacaggggcctgccaccacgcccggctaatttttttgtgtttttagtagagatggggtttcagcatcttgtccaggctggtcttgaactcctgacctcgtgatccacccgcctcggcctcccaaagtgctgggattacaggcgtgagccactgcgcctggcccatagctctttaatctttagagttttgtctgtaattcatttattccagccttataacaaccttagaggaaggtagggccaatttatcattatttgcttaaaagaaattgagtcacagaggggcaaagtgacttcctttcattccgtgacttaatcatttctgtacaatgaattgcccctttctctttgctcctgaagcccttttgacatacctctgttagtagctcttgagtttattgtagttttttgaattgtctatctctctctctttctagaaggtacaaactgtattttaactttgtaataccaggctcagtagcaggcatctaataggtatatagtaagtacttatggaataaaaatgaatggccaagatgttaggatgagttgtggcagaacctggatcagaacacatctctccctctttatagacgtgcactttcttcgttatactacgtcacctgtgaagaggtgatgtgatagaagattttcatcatttaatttttgtttgaggtttcttccatcatttaatttcactgtgattatatactgttagcgacatctcctttaacttatagcgtcttaggggggcaagtagtagtattttcattttcaggatgaagatgctgaaacccagagaagttaagagatttccatgtagttaactttgtagaactgagaaattaaataggtggttatttcctcttgctagtcatactaatggatactaacttgtttccaaagcacgtcccaaacagtacgcaagcagaacatcattcaga

SEQ ID NO: 9177 - DNA, 1032 bp, Homo sapiens
gtagtcccagctacttgggaggctgaggcaggagaatgacgtgaacccgggaagcagagcttgcagtgagctgagatcatgccactgcactccagcctgggcgacagagcgagactgtctcaaaaaaaaaaaaaaaaaaaaaaaaagaattgaaagctgaatttagcaacttggagctcactggtgacatatataagagcagttttgatgtgtggtgaaagtggtacaaagaagaatggaagtgttttccaacattttaaatgattgaacaattataattatgtgactgtgagaatgtgtataaaaatagtaacaataaagaattttaccatatagtatccatatgaatcgtggagattgctgtgtgataaactttgcagttgagaattttatgacaaattaggtgcagagtttagtgatccagtaatcaagaaaaagaatgcttgttaattatttgaaataaaatgtcattagtgagaaatctttattgagaatctgttgttagtagaccttgtgttactctgtcagtcacccccctccattctgtcagtttgaatggggagctatgcacagaataaacagtagcggaatgaaaatcagagagttgttttatgagtaggtgcccaaaggaagggtgcagtcgctgaaactccctggaaaaggactgggttaaaatagggggatttaggcccaagggaacctcctacattacccctaaatctaaatcttggcctcagcgtgctcagtcatatttttattttggggtgtatgttggtgagggagagaaatgaagcccgttgtcatcttctattataaaattttacatggcgatataattctgtgtttaattattctgtatccctccatagatttgtgggggacagggactctagtttatcttgctcacggtaacagccactggtgcttagcttgttccctgtcatggggcaggtgttaaatttataaggaataattgagagtttatcaggcagtataaggaacagaagataacacctgggtaccagcatgtgg

SEQ ID NO: 9178 - DNA, 1067 bp, Homo sapiens
attgcaacccctgcttttttgtgttttccatttgcttggtagatgttcctccatccctttattttgagcctatgtgtgtctctgcacgtgagatgggtttcctgaatacagcacacttatgggtcttgactccatcctatttgccagtctgtgtcttttaattggagcatttagcccatttacacttaaggttaatattgttacgtgtgaatttgatcctgtcattatgatgttagctgattattttgctcgttagttgatgcagtttcttcctagcatcgatgatctttacaatttggcatgtttttgcagtggctggtaccggttgttctttccatgtttagcgcttccttcaggagctcttgtagggcaggcctggtggtgacaaaatctctcagcatttgcttgtctgtaaaggattttatttctccttcacttatgaagcttagtttggctggatatgaaattccgggtcgaaaattcttttctttcagaatgttgaatattgcctccactcttttgtggcttgtagagtttctgccaagagatccgctgttagtctgatgggcttccctttgtgggtaacctgacctttctctctggctgcccttaacattttttccttcatttcaactttggtgaatctgacaattatgtgtcttggagttgctcttctcgaggagtatctttgtggtgttctctgtatttcctgaatttgaatgctggcctgccttgctaggttagggaagttctcctggataatatcctgcagagtgttttccaacttggttccatcctccccatcactttcaggtacaccaatcagacatagatttggtcttttcacatagtcccatatttgttggaggctttgttcatttctttttactcttttttctctaaacttctcttctagcttcatttcattcatttgatcttctatcactgataccctttcttccagttgatcgaatcggctactgaagcttgtgcatgcatcacatagttcttatgtcatggtttacagctccatcaggtcatttaaggtcttctctacgctgtttatt

SEQ ID NO: 9179 - DNA, 1039 bp, Homo sapiens
tgatgctcccttttatatcacatttggaagcatattatgtctagttatcttttttgtgtgtgtaatgttaaaattgattagtacccctggccactcttagtctaatctgccctcagtaatctttctgaggaaggattttagattgagtgacctgcagtggtctctctaagggtgattctgatcaaaggctagaatgacaggaaagtgtcagctctgggaagatttaaggagcaaacacttaaaaaacagagaatagcaagttcaaaagtcccaaagtaggaaacaatcttggcatgttcagggaacagaaggaaaaccagcatgacttgagcatagtgagtgccaaggagaatgacatgaggtagcagtggctttagccacgtaaggccctgtgggctaccctgtgtggtttaaattttatttcaagtgcagtggaaaatcttttgatggttctaagtaggagactgggtgccacaatcagatttgattttttaggatcagttggctatgggaaagagggggaaaatgtccattgttaatcatgcttttcatagattataactttagcccgaaccaatggatatctgttactttctgtgttactttaaattgattatgatgtttaaaatgagatatcacttatgggggaaggttaaatggcccttagtgtaaagttattaatccaaagaagaatggaaacttaaaaaatagatttgaatacagttaaaatattaaatgataaatggaaacagaaatattattttaaaatggcttattttttaaagagtacattttggactggttaataaatgtaactttttaacatggaaacagatgctgaaatattttcagtccccagtgtaaccccccacagccagccatttccatctcacgtgcctatggcctgccttatgctttcacagcattaccatcaacagttaaaacttcagtgacactatacaatgtagcagaaaaatgcaagatgtttttttttttccccctctttagtcttggcagggtaaaacatggtcctttttac

SEQ ID NO: 9180 - DNA, 1049 bp, Homo sapiens
ctcaggagttcgagaccagcctgggcagcacaacaagacctcatctctacaaaaaattaaaaaaattatccggacatagtggcttgtgcctgtagtcccaactactcaggaggctgaggcaggaggattgtttgagcctaggtgttaaaggctttagtgagctatgattgtgccactgcactccagccagggcgacagtgaaaccctgtctcaaaaaaaagaaaaaaaaaaagattaagatgaaatgtacaaatagtatgcttatatattggtgattttgtttttagaaaatattcagagatttatggagtaccatactaggcttatgtaagtccaatacaatatggacttataaaactaatgataatactatcttacatttatgtagtgccttacagttttcaaagcattctcataagaagctcatatacttaccctcacaattttttctctgaagtagaattagtaagaatttctgcctttgatttagtagttcatcttgggaactctagcataaggaaataattctaacttcctgaaaacagttaaatatgtttatcataactgaaaatagttatctgggaataggttaaataaatgaaggagcattgccttcattcgttttctgctgctataacagaatatcatggactaggtaattaataaagaaaagagatttgtttggctcatggttcgggaagctgggacgtctgagagcatggcaccaacatcaagcaagcatcaacccatggcagatgtgagatggagagaggaaaattggactgaattcacccctttattaggagcccactcttgtagtaatggcattaatccattcatgagggtggagccttcatgacctaatcacctcttaaaggttccaccccttaatactgtgacagtggcaaccaaatttcaacatgaggtttggaggggacatttaaaacatagcaagcattcactgtgattaaaatttttgtgaagattaggtagcatagaaatacctttgttattagtgtagaaaagagagcatggggttgaaggcacac

SEQ ID NO: 9181 - DNA, 1015 bp, Homo sapiens
gggttgaggctccctgtaagtttttcatcacaatataaataatgtactaattgcatatgatgagtaaattgtcaacagcctttaaaaattggtcatataattagtaaatctatgagtttcaacctcttcatctagatgaaatagtcatgaagccagactgtaatcaaagaatcttgaaacctcctgaatattctgttttgaactattatttgccttttcaattcctccctttctctctttaggcaagagtagagataaaaatactcttttatttctttaccttatactaaaatatgaatgaagggtctttctgaaaaccttccattaaatataaaatcaaaattattttattaaaaatctatgcattatgtttttatacgagatgctcacagcagtttgttttttaatagcaaaggttcagaaacatcctaaatctacaaaagtaagggaataattaagtaaattatgatagtccattcagtgaagcaaccatttagaattctgcttaccaggaggttttaatagcatccaacagcaggatgtagcattctgtatataccagaaacacagctttagtgtttctttcttgtttcctttttttttttttttttgagacagggtcttgctctgtcgtccaggctaaagtgcagtggtatgatcacagctcactgcaacccaggctcacgcaatcctcccacctcagcccacagttgctgggactacaagcgctcaccaccatacccagctaattttttaattttttatagagacagggtctccctatgtggcccaggctggtcccaaactcctgggttcaagcagtcctcccaccttggcctcccaaagtgctgggatcacaggtgttagccgccacacctggcccatagggtttctttaaaaattaaacacatatatttaaaatcaaagtctgaaaggaaaatacccaaaattaatagcagttatttgatgggtaatagacttgtgagtttttatttttttatatagttaacatagt

SEQ ID NO: 9182 - DNA, 1075 bp, Homo sapiens
ttctatacacattgagaatgtgtactagggctgaaactagtcttttgaaaacctgagctctgcaggtgcagtggcttatgcctgtaatcccagcactttgggaggcaaaggcgggtggatcacttgaggtcaggagttcgagaccggcctggccaacatggtgaaaccccgtctccactaaaaatacaaaaatcagccaggcgtggtggtgcgcacctgtaatcccagctactccagaggctgaagcaggagaatcacttgaacttgggagggggaggttgcagtgagccgagatcacgcttctgcactccagcctgggcgacagagcgagactctgtctcaaaaaaaagaaaaaaagaagaaaatccaggctctaaacaaatgggaagtatttcaaagtgctttagtggtagatggcaccaacgaggtgtagagacatggcctctcagccttaatttccagtttctagcccctggcagatgagctgccttaggcccactctcgctcgtgaatgttctctaacacggcttctggcggcctcagtgaatgagttggtgcccagagctcttgattctgcttgaagtagatagctctctttttctttttttccccccttagcacatctaattatagttttgtaggtagacagctcagccttgtggattttaaatgaataaaaaaagacaagtctttaaaacaattccacactttttaaaggccagcactgtcagcaatccagaacaagaacgagtatgagtctagatatgaaagagacagccagttggtgaaatagctgtagccaagcccaggcacagaactacaagggggagagtggcaggcgcaggtcattttggctgtgtgtacaaaacacagttctagggcgcctcagatgagaaagtctcggagggtgagggggcaggactaatggaccgcctgaagctaaggagaggacaggagcacttgggaaggaagcggtctggggggcctaactgagcagcaccctgcctcacaggagagcaagtcacagacgtttcagccccaacgctgccgctcactggctatgtgaccccggcga

SEQ ID NO: 9183 - DNA, 1110 bp, Homo sapiens
tagttattgctttctaagctggccctatattaggtggcatcagtctgctgtgccctgaatttttaagtctacttactataacgcttttaactgcctttgttgctggatcttattttctcagtaattcttctctcttccctgcttcttgtctagtcttttaatttagtatttgagaaatagtaaagcaaagctgtagctaaaagcgtacctacctcccatccatatccttctattcctgtactctgttttattgttattcattatacttacaactagttgatattatattgcaaagttgtttatcttctatttctcccagggactataagctgctaagggtagagactttgtcttattcttcaatgtattccctagtatttagaatagtacctggcatgtagtaagtgctaattaatatttgttgaatgagtaaattaattaatgaatgaatagaagtatctggttccaatactggcttagctacctcccttgagcctgtttctttgtaaaataaagatgatcataggccgggtgtggtggctcacacctgtaatcccaacactttgggaggctgaggcaggcggatcacctgagggtaggagttctgagaccagcctgatcaacatggagaaacgctgtccctactaaaaatacaaaattagccgggcgtggtggcacatgctactcggtaggctgaggcaggagaatcgcttgaacccgggagacagaggttgcagtgagccaagattgtgccattgcactccagcctgggcagcaggagctaaactccatctcaaaaaaaaaaaacaaaaaaaaaaacttaacgtagtacatacagtgagtgctcagtaaatgtcacctaacactattaacttttcagtcttcttcggtggacttagctaaaaatacgtgtagtagatgaggactcagtgaagtttgtgaactttttttaagttcattgactttaccatatatttatttttattttttttcttctgaattttcaattgagaatggatagttgaggttttcagacttgggatgtttgaaagagggcatatttatctcccaagttatatatgagccataccatgagagttcaggttcaga

SEQ ID NO: 9184 - DNA, 1050 bp, Homo sapiens
actcgactaaaaatacaaaaattagccatgcatggtggtgcgtgcctctaatcccagctgatcgggagtctgaggcaggagaatcgcttgaaccgggaggcagaggttgcagtgagttgagatcacgccactgcactccagcctgggccacagagcgagactccatctcataaataaataaataaatacaattctctgattacaaaaataaatacaagcatcctgaatgctttcacatcagatacttttcctgtacaaaagtatgtggaaatcacagtgatggcagcggtggcccatctggtagctgctgcagagatgctgcagtgggggaggcatcgccagggctgcccattccacagagcccgcagggagccaggaacagataggaaccctactctcttctgagttggcagggcaggagccccgccctcctgggtgcagctccagtgggtgcagtggactccaggtgaagtcctcagacttagaacctaagtgtgggataaagtgggcttccatgagtgtgagctacctagcacacactcaggtggagtgagaagttaacagggctttttctggcccgcctgtggccacccatgaaccaatcagcatgcacttcctccctgctgagcccatgaaaaccctggacttagccagactccaacagactggggaaaacctgcctgtggaaaggagctacccgctgtgggtctcctccccacgcagacctgggcatccgtgtgctctcaggggccagggaagcccccccttcccttgcagtctccgaagtgcctgctcctgctgcctggcctctccccgctcctgctgtctgctccggtttcagagcaaagttgaggcctagcctgggtgctgttgccacccagctgggtgcacaccacttggggtggcactgacgtgccagccccctgccgcctgaaccgcccccacccccagactttgggtgccaatgagcacgggaaggaggccaaagggggtcgagggtgggttgataagggcctgcaggcgccccttccccgaacagcctgggctctg

SEQ ID NO: 9185 - DNA, 1023 bp, Homo sapiens
gttgttccccttgccccaacatttttcaacaactttgtggctttaaaaaatataaggttcatagagggttaaacgtttattatgtttattcttgttttgggggctacttgaattcttttcattcttctgtgatgctttcactgaccatcccaattcaaagcagcctcttactttctgtttgtcttgtttgccctaatcatttgatatttgccctaagctacaaagccatatatctttatttgatgtttcccccattataatctgaatatagaggaaggaatcatgcctttatgtcctccacaatttcctctatggtgtcttggacaaaggagtttaggaagtttgtaatagtctagtccaacttgcttattttataggtggaaaactaaaagaataacttgttgcttgatttgatgcacatttagtatttatatgtgtacctgtatagcatgaatataataagccttggattagggctgtaatttattttgaaactaacaaagggtcttagaattcagaacttccaagctacaatagcaacaataataacatttctattggccttcatagtttataaagctcatttccatgtatcatttcattgcatactcagaaattctatgaggaagagagataattttattcccattttagaggtagtgaaactaagacccaaagaatcaacttgctaataattgatgtagttggggctataatccaagactttgagctccagatgttacacttgtcctgttatatcatgctggttctagatcatctgtcttttcttgctggcagtgaacaggatttccttcagtaattcagccatccaataagtgttgacagaatgctcaggctgtaatacaacacatattttcaggtgcattggagaaaataagactcctacagcattttgttcttactatacacaaacatgcactcacctacacatatgcgtatctatttataatagcaattatcacattgagttgtgatttgtctttttacatgtccgtctcccca

SEQ ID NO: 9186 - DNA, 1033 bp, Homo sapiens
actgttattatttattattactattatttattattattattgctattatttgagcacatttcccccctctggacttgtctataatcattggtacagtctggtttacttgttagttcagtaagatgtgcacaggaatattgaagtacagatggactatctgtagaaaagagaaaaaaaattgacagctctgtcttgtctcttgcttaaaatggacagtcctattgttccttagcactagaaaggagtagttctatcacttctaagcacaaggctagatacagtacagttgccagttgcattgaagaatagcaggaggcagattgaagggccttgccatcctccttgatattggtggagcacaaaacacctttagtggcccttgctaacattctgatttgttttaattttatcttcagacttatttctttgaatagtataggttagccacttgagctgtcatgcaaagttgtcctcatataactagatcctataagtatttctaattactaaatatctttgataaactctagaacaaacctgtggaagttatactgacttttcctttataataggtcaaagattttcagagtatttaaatgaccttagcaattatgtcatccaaacctttcattttatggataagtaaactgagatctagagaggttatccagttgattagtggcagagtgagactcatcttttggttcctagttcaatgtcctctctacttgtagggtgacttttgtatttttgttgttgttgttgttttacttattttgtttaattgttttgatttttgtcaggttatgtactcagtgggtatgaacattcagtggacttagttactggttaccgtttattgtaacttccaccttgtttgatccaaagattactagcatttaatgtaagtctttggttaatccttctgtcggtgttatttttgaccttagggatttcttcggttctttgtcgttgacatgctgagccatttctcttaatgccttatagaggtggggactttgaacgcatagat

SEQ ID NO: 9187 - DNA, 1017 bp, Homo sapiens
tagagtcccttgaatggcagtagcgtcagcattcttatggttagctatttcttctataattctgtttatgtttgattggaatttcacttccaacattatacatttttgtttctctgctacccttacatcattcttggccaattctctccttctgttactcaattttgtaacatggcacataagtttatcaccaggagacaaggaggcaactcaactacatgctttgctttctgtacatgaactgaataactggtaccaggttcactgtgactgatcatcaacagacagtgaaagaagtgacctggttggtcactgatggtgatgtacttctgttatttgtatactgatttgtggacttaagatgtagcagtgaagtttgtactatattcagctactcacaattagtatacagtggtaactgaaatttgaattgtgtcattgggtaattggtgttatttaactaaactatgataactgaaatttgaggatattggaaccctgcaaagtgaagactgtatttctaatcctcagaacattcctatcaaggaacgttagatgttgttaccccattgtaaagagaaggacactgagtcttggagaagttagttaaataagcagctcagcatcatacagctattaagaggcagaaatggtattcaaatttaggtctcacaactctttctaccaagacatactatctatacgaagtggagtttcaggtgctgttggtttaatggaagaaatactacataaagggaaatggaggggaataagatttacctacagcttcatgatgtgagccatcatgcccaggccatattttctttattcatttttctgacagcgtaaacttgggttacttctacctcttggctattgtgaataatgctgctgtgaatatgggtgttcagaaaagaattacccggttaaaagtcattcaaaatgttttatttattcagcagatatttactgagtacctattttgtcactgactaaggctataaaaccatttgaaga

SEQ ID NO: 9188 - DNA, 1048 bp, Homo sapiens
tctttattttgttaattcagccttatttctttttccttctaaatttacttttttgtatgtttaattattctatttttcatttctaggggtattgtttctttttttcaaatctgcctggccatttttgttattttttctttcttggttattttttcttgctatcttatatttctttaaatattttaaaaacacttaacaatatttcgtattcaataatttcagtatatttcatttttgcttgtctaattctgttgcttattgttttgctgattttcttttatggctgcatgtttcctcatgtattcttgtgattttttaccattaattcattgttttggagatttgagaaatctttgagaccatcttggattgtaaagtctatgaggggagggcccctgtggttttgttcattgctgtatcccagggcttattacagtgtctagtacatgagactctcaataaatatttattggatgaataaattacatgcccacaccttacagacataactataattatttatatatatgttcattttctctactgtattgataatacctcaagttagagaactttttggctttaacgctgtatccccagcatttagcgcagagtctaatatagattaagttctcagtaaatatttgttgaatgaatgaggaattgcttggcatattctgcccaatgaaatcttcagaataagtaagacttattttgcctgtttttcattataaagtcattttaatgaaatggaggatactagagaaatgatgaatcagctcacataactagtgcgcatattgttcatgatagattaaagcagaaccattttccagactgaactccaaaatcttcagtgtcactgaaggctaatcacattaactattcctgtacttacagatttcaaggcatagtgagtatacaaaatgttaatccagtaaatatgtaccaaacatctactatatgtatattagtttgcaagttatgtgatatatttttttcccagtatgttatatgctaactaaggtataagcttaaaaatgtgaaa

SEQ ID NO: 9189 - DNA, 1022 bp, Homo sapiens
tcttgtaagaattcactcagtctcaagaacagcatgggggaaccacccacataatccaatcacctcccaccagatccctcaacacctggggattacaattcaagatgagatttgggtggggacccaaaacctaaccatatcaaatatagaaggtatcttttgtgagattttaacagtaataaatcatctgcatttttaataattaaggttaatttagtctaaatttaaaatgcattttaaaggtcttatgcattcatgatttttgactgatgcattttaattctaagtaaatgaagagtgaatgaaaaattatactgaaattagtttggggtgaaggatgaatctgttaaattaattttggggaaaagaataactttattacatcataactgaaccacatctgaaataatatctattaggttttaaatacctgtactcttgaaaatttggaactagtttaatttgcatgagggcagtctgtctggttttcttttgtattcctttatagagccttttgtagtagatgatcagtgggtatttgctattgaatgaatataaggccactgccctcaagaaatgtaactgaggagataagtcataaatatcagttgatcagatttagtgaaaagagatctgtctatgcaaggcaatctatgctaagtgccaggtgagaggttaaaacggttaagtgctgtaacaagagtggtcattttgagtaggatgattaacaaaaattcaccaaatgtaggtaggatttgatttgggcccttaaagaagtttcggtaaaagtggagaggaagaagggattatcaaaataaccattttcagattatgtcatttcaataatgcctcttcattactgaacatagtttggaaactttccctttttgacctttgaataaatcaaaaatgttcatttcaccaactatttctctagggatttcaagaccctgttacttaccttgttcttctctggctcatgacttcatcatggttatctgttttaaatctttctcagtgtg

SEQ ID NO: 9190 - DNA, 1090 bp, Homo sapiens
gccacgcccatatgacctcatccaaacctaattaactcccaaaggtctcacctccagataccatcacattaggggctagagcttcaacatatgaactggggagttggggaggcaggcatagaaacattcagtacatagcaatgtccatcacctgatgaatggataagtaaaatatggtatgttcatataatggaatattattattcgtccataaaaaggatgaatcactgatgcatgtgatgacataaatgaaccttggaaacattatgcttaaggaagagaagctagacataaaagactacatgatgtatgattccacttagatgtaatgtccccagcaggcaaatctgtacagacaaagtagactaatgattgcccagggctggaggggttgagagaaaatggaaaatgactgctaatgggtataggctttcttttaggggtgatgaaaatgttctaaaattaggttgaggtgatgtttgcacacctctgaatatactgaaaacaattgaattgtatactttggattgattttatgtgaattatatctcaagaaacctgataaacagcaaaacttggtggtttgctttaaaggggcaaaatacaaaatattgcatagagaatgctgttctattacatgtttttggactctaaatgtctagaaatgtcagttgcaggagagcactttttaaaagaaaggaaaataacaaagaaaaaagaggagtaaacctagtgctaccctctcctgaaaggaatttgaaacctctgagtagccaccagaatagattttcatcagaatacttttttatgtgttacccagattgttgaaaggaaataaactgtagagatctctaaaaagtcagatgtttaatggctctgtgagcaaaagcagggaaaaaaatcagacttttaatgctatataatttaacagtatcaagagaacactttgaaaaggttttgataaaaacagtccttgagtaaggcatgataaagtggccattctaccaagatgaacaatcatcccatctcactttttttttttttttacttcatagtatattgttattgtgtgactttaaataacttaaag

SEQ ID NO: 9191 - DNA, 1050 bp, Homo sapiens
aggggcttaaggggctgggcagccctgggaagtggggtctgctctgggttggctgacatcactgacttttcttctagagtctgtgggggtggattttgtcttccagagtagaactgccacccatcctggtattagacatctctctcttttaaaatgaaacaaacacaatctttatagtctatggccacctatctaccttatggcttacttaaaagatcaaagtttcagctttgattcagtgaaaataagctttgattctggcttatcgtatgtcctcaagtcagtttcttttctctgagcgtcaggttcagtgggaggagattggagctgatctccaagtctttctaaggtgctgctggtgcacgttcttctcaaaacgcctagtgaaggactagttttgtttttcttttctaattccagtctgctgcagaatattacttttgtaaaatataacaaaacgacttactagaaaaacggtcacgtgcttgtatggtggttgtgatgttaaaatgctgtgtatgtttctaagtgctcgctcagcttctgaacttaccttgttctgagacccagagctgcttgtgagaacaggagataagctggggcctgggaattggcttgctccagagaatgttcgtgtagggaggggagctatctcctataggatcagacccttcccactaggagccagtctacccatccctaaagggtcctcttcgtttagcgtattcctcacattgacctctgcctccctcattggaaggcaggggaacagcttgagattgctctaggggcaggggccagggccctgacaggggctgtaggagtcgattggagggcccaggtcagagcagagtctgctgctctggaggtggatgaatgcctttccccagggaagcagctaataagggtgtgcgaggggctgctgcggctgggatgatattggcatggatcctgtggcatgtcctaaccctagaatcctgggaccacaggaccttaggacgtttgaatctttaagtcctgaacgtaggtctcagagctggaaggggctac

SEQ ID NO: 9192 - DNA, 1098 bp, Homo sapiens
cccaggagtttgaggctgcagtgagctatgtactccagcctaggtgccagactgagaccctgtctcttaaaaaaaaaaaaaagtcgaagaaatattggtagaaagtttgctaaactagattaaaaaaaaaaaagcaacacatagaactggaaaactaagtcaacccacaagaacaaagttcttggacctttaccttaaaacagataaaaaaactaactcaaaatggatcaaagacctaaatgtaagagctacaactataaacctcttagaagaaaacatagaagaaaagcttcataacattggatttgacagtgatttcctgaatatgacaccaaaagcacaggcaacaaaagtaaaaatgcagaaattgaacatcagaattaaaatatctgtgtttcaaagaacatatcagcagagtaaaaaaccaatctatgggagaaacatttgcaagtcatgtatctgctaagggtttaatataggtaaactccaacagctcaacaacaacaacaaaaatcaaacaacctgactgaaaaatggacaaaagacttgaaatagatatttctccaaagaagatatacaaatggccaacgcacgcatgaaaagttgctcaacaccactaatcattagggaaatacaaatcaaaagcacaatgagataccacattgcacccatttctattaagaaaaaaaaaaaaggaagtaatgctagcaaaatggccaagaagaaacccctactgcttgtccccctcacaaagacaggcagaacaatgaataaacaactacattttaaattttaatttaatttaattttatgtatttttttgagatagagtcttgctctgttgcccaggctggagtacaatggcgtgatctaagttcactgcaacctccacctcctgggttcaagcgattctcctgcctcagcctcccgagtagctgggattacaggcgcatgtcaccacaccctgctaatttttgtatttttagtagagacagggttttaccatgttggtcaggctggtcttgaactcctgacctcgtgatccacctgcctcggcctcccaaattactgggattacaggcgtgagccaccacacct

SEQ ID NO: 9193 - DNA, 1048 bp, Homo sapiens
gtttgggtccagaagtcttgtgaattttggatttttgaatatttgcacataattaatgagatgcaggaatgggacccaagtctaaacataaaatttgtttatgttttatatacatcttatacacatagtctgaaggtaattttatacaatacttttttttttcttttttagatggagttttgctcttgttgcccaggctgaagtgccatggtgcaatctcggctcactgcaacctccgcatcctaggttcaagcaattctcctgccgcagcctcctgagtagctgggattacaggcaccccccaccatgctcagctactttttgtatttagtggagatggggtttcaccatgttggccaggctggtctcaaactccctacctcaggtgatccgcctgcctcggcctcccaaagtgctgggattacaggcatgagccaccacgcccggccacaatacttttaataatttagtgcatgaaacaaagtttgtgttaagtacttatgtgtggaattttgatttgtgccatcatggtggcactcaaaacatttcagattttgggttttggactttcagattcaagatgctcaaccggtagtttcctttgtattgatggcagacacaagttgtgtatcttcttgtaaaggtgtgaagaagctaaatgacatctttcctgaattactgggatagagcatttattaagaaacaggatacaagaattttcttaaactactctgttttaaatgtgattttcttcctattaatattttaaggagaaaaagaattaattttccaatacattgataccaccttcactttgaaagtgaaacaaatgacatctattagctttgcagtagaggttaagtggttttcctaagaaaagaatatgcactgcaatgaaagatttgccagtcatcccaatggctattttgttttgcagaccacggtgtgaacacatgaacagaagacgaaaatttcttctagcctcagtacttgctctccagaattcaagttttatatatccatcatgtcagaagtgcttctctaggat

SEQ ID NO: 9194 - DNA, 1035 bp, Homo sapiens
gactaccgaaaagcaagtcctacccagagtgtgcaggaaaataaataataatccattttttggtcctatttaccatttgtactaaatattgcttcccaaccatgcagtcttttgaacattttaggctgcaattactgcactcctatactgtgatctctttcaatgttggctgcaccctggaaggataggcaagagcctatccttgctctgtggttggagcaacaagagcggttccatttgtgcaaagaatatctattcctccatcagcatggcttaacgcctaatctggaaatcacagtgtcactatcaactggaaatgagaggacattgattggaagtgcccactggcattgtggaccaacagtcttaaaaggcctcagagaagataggcatggcctgcagaagggggaagggtgaccttcctggtgtcagtggctggaggcagacagggtaaataacagctgccactaccctcacagaccagggagagccaatgcacaggcctacacacagaactcaatcccaaggaccagtggtgacctttggtagccacaaccctgaacttgtgagagtcacctaaatgaatttgagagtcacctaaaaatatgtcagcaccattctggcagcccaatcttgtactattttatgaaagcactattgcctcagccaatgggaatgacccaggtttgatttcataggcgcaagtcccaagctcctcaggacatttggtacacaccaaacatgatgtagagggttggagaatacctcaaatgggataaatggcactgtcacaagcacaaaagtgagacttagaaaatttcgagggaggcacttctggcaactagctcccacgtgggaccaggtccaggctcagggtggacttctaccaggcgctagaggagaatttagaaggaaacttgaggaaggcattccaaagccttagtctccctgaagcgtagagggctgtgacaggatcccctctcacccaggcctcagaggtactttcttatcatccctccttattgtccttttgtg

SEQ ID NO: 9195 - DNA, 1460 bp, Homo sapiens
ggggtgcgcaggagtcaagtggtggttcagtggggacggtgaggtggaggacgatctggtcggatagccgcgggcacgaacctgggaaccagagggtggaggccatgctggggactgatgtagggcgggaccgactggaagcggcatccagaggcccagtgagcctcggtctcagctcctgaaggggttgcatggggccctacgcttccttctccattttttagctaagagattgagagagtcggtttacttttgggcttggagtatcatttagatctgttaacagtacagttgagagagttggtgtcttttgttgaggtgcgaggacccgaggcggcgaccctcgcctttattcggagaagcccacttccacccacagagttggggtagtcctccgaaatgcatttttgttttgccgtttgttttccaaccccctttcactctccccaaagcttcagattcactgatttttcatacaggaatgattaacaaaggcgtccgaagaaatcgttgttggaaggtgaccaaggtggaaagagacgttgctttggccctgcaagtaagaagagagagggaatagcctgaaggagtaacactaaatttaaaatgacacttttttaccaaccagcgaaagcagatgttcaaaggggatattggccaggtgcggtcgctcacgcctttaatcccagcactttgggggcagacgcggggagatagcgtgattctaggagttcaaccccagcctgggcaacatgcggagaccccgtaccgtctctacaaaaacattaaacaaaaaaattagctgggcatggtggtgtacccctgtagttgcagctacactagaggctgaggtgggaggatcgcttgagcccgggatgttgaggctgcagtgagcctcgatcctaccactgtgctccagcctgggcgacagcaagcccgtgtctcagaaaaggcgggaggggtgggatattattgatgataggccttctgacgtctggcaatagattccagagtaacatcggtcatggataaattttttttttaactaagtgactgaaaccaaagttaattgtcttttgagtgattttgcacagtatctcaaaatgaactgtactttttttcttgtgtcactgaaacagtgctgtgtgttctttttcagagtctgtcacactaagatgagaaatgtcctttcttcctgaaggtgtctgatgtgtaaaaatatgatatactttgtgctgtttcctcccttcccttttgcatattattctgaaacaacattaactagttactttgcgtcattgaaggtatgcacttcccctctatgttaggagtgaataaaattaaaaatagatccttataacaaagaaaggcagatagaatgattaaaaatgaccaaaacatgttagaaacagtctctcaggtgtatgcagatggtaattacaaaaatactttttcaaaaa

SEQ ID NO: 9196 - DNA, 1034 bp, Homo sapiens
tttttttgagacagagccttgctctgtcgcccaggctggagtgcagtggcgcgatctctactcactgtaacctccgcctcccaggttcaagcaattcttctgcctcggcctcccaagtagctgggactacaggcaggcactaccacacccggctaatttttgtatgtttagtagagacggggtttcaccatgttggccaggctggtctggaactcttgacctcaagtgatccgtctgcctctgcctcccaaagtgctgggattataggagtgagccactatgcctgtcctctagggaaaatctttaattcattctggacaatgagaaaacttttatttttacttttagttaacaatactcaggaaaataaaaagtgtgctttttaatcttagtaacccaatttgagtttgaaacaaatttacataattttagctgcttaatatgctgctgaagataaatgcagtaaatatcccaaggtcaagatttgaaatccaaatgtccatagtaatgattaacaggaaaagagagtcctctgttaactttatttctcaattttttacaggtttggataattaagggagcactagaaaacttttttttttttttttgagatggagtctgttgcccaggctggagtacagtggtacggtctcgactcactgcaatctccgctcctgggttcaagtgatttctcttgcctcagtctcctgactagctgggatttacaggcgcatgccaccatgcccagctaatttttgtatttttattagagacgggtttcatcatgttggtcaggctggtctcaaactcctgacctcgtgatccacccgcctcggcctcccaaagtgctgggattacaggtgtgagccaccgtgcccagccgaaaatgtttctttgcaaggataaatatatgaagataaacttgccgagcgtaaatatgttcatgaatatagccacttaaggaaattcaaacatgcagagatgttcagctgtatgcagttatgtattcatgaagtattcatgtattcatgaag

SEQ ID NO: 9197 - DNA, 1051 bp, Homo sapiens
gtctccatttcagctctttactctgcatatctttaatgttgggcattatgcctctttcttgagtttcagtcctatgactgttccattttcagtattcatgtttatgtgtctttctaaaattgttttgcttctgtttcttgctgctcttgagacaatttatgggcaaattttgttacttttcaactggccgtgtatttccctgtgaagagttgctggattgtctcattttccagataaactgaattaatgtagtagtgaggagaagccagatttcagaggtttgacaagtgaacaaatgggaatgagaaaagaagtaggtacttaaacttttaagaagtttggctctgaaaaaggcaagaaataatgggttagagagggcaggattgtaaggatttaagataggagaagaggcataagcatatttaaatttccctacttaagggccaaaatcatactgtacctcagtctgaactttttaaaggaattcaaggacacaaaattctgccctgccctgaaatccagtcaggaggaagggagaagagctctgaagtacttttgtaattttcttctacataataattgatttttgtttgattatttttctttcctatagctcctgtttgccaggtttttcatagctgcctatttaaccaaacttgtactcccaagaatagtgcatatttatgattcttaattccaaaaacacatggcaatgataatgtctctgcttcttttgagaaattaacttggttctgaaagatggtgtttgcttttcacacctgtatcattaatacttccttgccaaacctaactaggatcctcaccaccactgttagagaaaactgatgctcagttgaaccagaatgttaaatgtgaacaggatttgtctgtgttgttgcccagctatgtttatccatacacattacctggaggaagagaaatctgagataattgagttgattagattacttacatgaagatggtttaattgtatcaatacagaaaaatgcacaaggaaagaaactgacaccttaaggcaacaaagccctcc

SEQ ID NO: 9198 - DNA, 1039 bp, Homo sapiens
caaaatacctgtcttagtaaatgatactatatataccaaatattgcatatgtgtatataaacttcaactgtctacttctatcactgacagtttaaaaattgagataaagtaagtattatctgagtaatataaccattttctatttatttatttatttagaaacagtctcactctgtcacccaggctggagtgcaatggctcggtctcagctcactgcaacctccgcctcctggattcaggcagttcccccaccccaccctcccgagtagcagagacggggtttcactgtgttggccaggctggtctcgaactcctgaccttgtggtctgcccgcctcggccccccaaagtgctgggattacaggcgtgagccaccgcacccagccaatctaaccattttcaagatttgatctgcaaatacctgaagtaagtacaagcactgtggcccagttaaagagtgttagaactgtaagaagtccaaaggcatagctaagaattgctttagagtcagttgtgggttctgaattcttgctctgatagttagcaactatgtctactttggcaaatttaggttttgaagccttccatatctttaaaaggaggtaacatttaacagagcaccaaatacaaggttttctgtaatattagttccatagcatggtctgcaaacttccaacatcagaatctcctgggatatatgctaaatgcagattctggtttcccaaccagaatatactgcttaaaaatctgagggttagttctaggaatctgcatttttttctatacaatgtatgtattagggttccctggagggacagaactaataggagatacatatatatacacacatatatttattaagtttattgagaacttacacgatcacaaggtcccacagtaggctggctgcaagcttgaggaaaagagagagccagagtctgagtctgaaaactgaagaacttgggggtccagtgtctgagggcaggaagcatccagcgtgggagaaggatggaagctgggaggctaggccagtctctcct

SEQ ID NO: 9199 - DNA, 1032 bp, Homo sapiens
aagtattgttaatttttaaatttacatattttggtatacaattctatgagttttgacaaatgcaaagaatcatataaccaccgccataattgagatactaaacaattctatcacctcaaaaaaaatcctcttgagctgtctcatttataatttttgtgattaaaaatggttatttttcaaaaagtaacgtttgggccagtgcgcctggagtgcaccagtagtcccagctactagggaggctgaggcaggagaattgcttgaacccgggaggtggcgattgcaatcagctgagatcacaccactgcactccaccctgtgagtgggctacagagtgacactctgtctaaaaacaaaaacaaaaaaacactttaaatgtttcatatagttattccttattcaaaaagtatgcctttttgggttaagacagtgccatttcaaatagccttgtagaaatataagcaaggaaatgctaaattataccattattgatcattagtaccttagcttgtagtttaaactgttgaagagaattaggactccacctggcattgtggcataagccagtagtcccagctacccaggaggctgaggcctgagctcaggagttcaagactagactgagcacatagcgagatcttgtctcaaaaaatgaaagaaaaagaattaggactcagaaaaggtaaagggtgtgtgtgtttgattagatagaggatgggattgaaggcttaaggaggagattagggcctgagatggaacaatgcgcatggaaggatagatatgggtagtgtgttctgagtaatataagagacctagattctcaaagatagagggcaccaaagagatgagtcctgtagaggggtgaccttcatgtaaaaaatgatctatcttaattgggagctacagacctgggattctgtactgaacttatacagaataagtaatttactcttcaaaagtcgcttccccagctgggcgcagtggctcatggctgtaatcccaacactttggaaggctgaggcaggtggatcacct

SEQ ID NO: 9200 - DNA, 1056 bp, Homo sapiens
cctcttgaccattaacaaatggtcatgttcagtcttcctttttatgagtggaaattccatccaatttgcttttaggttcattaatatgtactacaaccaaaagatcagcagcattatatactttatcttttttagtcttttgaagtacaaattatgcgattttacagataaattatctcatgggtagcatatgtctggctttctaggtggaatgattcctatttctttttgtacctctccccattcagaactcactttgaggccaagcgtggttgctcaggcctgtaatcccagcactttgggaggccgaggcaggtggatcacctgaggtcaggagttggagaccagcctggccaacacgacaaaccccgtctctactaaaaatacaaaaattagcctggcatggtggcacacacctgtaattccagctgctcgggaggctgaagcatgagaatcacttgaacctgggaggcagaggttgcagtgagccaaggttgcagtggatcaagatcacaccactgcactccagcctgggcaatagagtgagactctgtctcaagaagaagaaaaagaaaaaaaactcactttaaactctgctagaccattgcccttgtatgtgaaattttatctggatagaagaagatgaggaaaaaaattttcttgtcttttagtggaggagaatgacatgtaaaacaagtattctttaaaaattccaaatatgatatgagaactaccccataaagttgtgaaggtcacattggtgaaaggaaaactaagtgctgtgtaaattacaaagttgtctaagtatccacctggtccttaccttgctatagaatcttttttttttttagacggagtctagctctgtcgcccaggctggagtgcagtggcgcaagctccgcttactgcaagctccgcctcctgggttcatgccattctcctgcctcaaccgcccgagtagctgggattacaggtgcccaccaccacgcccagctaattttttttttttttttgtatttttagtagagacggggttttcccatgttagccaggatg

SEQ ID NO: 9201 - DNA, 1035 bp, Homo sapiens
aatacaaattttaaaatatagtataacaactacttacatagcttttacattgtattaggtattataagtaatgtagagatggtttaaagtatacaagagagtctggacacagtggcttatgcctgtaatcccagctttttgggaggccaaggtgggtggatcccttgagcccaggagtttgagaccagcctgagcaacaagatgaaaccctgtctctacaaaaaatacaaaaattagccagatgtgttggtgcatgcctgtggtcccagctactcgggagagtgaggtgggagaatcacttgagcctcagagatcgaggctgcagtaagctgtaatcacgccactgcactccagcctgggtgacagagtaagaccctgtctcaaaagtaataataataataaagtatacaagaggatgtcatatgttatatgcaaatattatacctttttttttttttttttttgagacagtctcttgctctgttgcccaggctggagtagagtggtgctatcatagctgactgtaacctcgaactctttcctgaacttgagtgatcttcctgcttcagcctcccaagtagctgagactacaggcatgtgccatcacatccagctaatttttaatttttaattttttttgtagagatggggtctcactgtggtgcccaggctgttatgccattttatataagggacttgaacatctgcagatttcaaggggaaagagtttgaggttacagtcagctatgatagcaccactctactccagcctgggcaacagagccagagactgtctcaaaaaaaaaaaaaaaaagaggagagtcctggaaccaactccccacagttatggaggaaggactgtacctacagtcaaagtgctgtcgttgagttttacactaggtgcttgggagaacagaatggaataggtgaactctgggcatgaagtgaaggtagtccccttcacaggaataaatgctaataatggggcttcaggtgagaatgaggaaggaagcctttgctggtggaggagttaag

SEQ ID NO: 9202 - DNA, 1050 bp, Homo sapiens
gaagggaggcggggtatccagagcggcttcagcttcagctgcagcggacctcggaggggggccgcggcgcaatgtcagagcagacgccggccgaggccggtgctgcgggggcccgggaggacgcctgtcgggattatcagtcatcgctcgaagacctgaccttcaatagcaagccgcacatcaatatgctgaccattctagccgaggagaacctgcccttcgccaaggagatcgtctctctcatcgaggcccaaaccgccaaggtttttatacaccccgcagcctcctattacttctaatactccctgattttagtgtcagcctcatcccaggtctcgcttccatcccaagggggacagtgttccttctctccaacccccccacccccctccaactcaggctcggtctttggcccaggcttcgagcatgggcctctgggggggagggagtggggaggataaagggtggagtcccacttccgctttccaactccctttttaggccaccgcattgtatatcccgacacacacacgctttgaatagagccctttggggtgggggagacttaaaggcagtttgtggtttggggaagtaagagttaacataagccattttaattccctgggaagtgggagagtgggtctcccattttccccaagcaccctttttggtaattgtgttctgtgggttggaaggaggtgaagggggacctgggagcgagctgttggtgggtgggaatagggatttggccccgagtggagcagccgcctgttaggagcccaacatggcgcctgaaaagcacatgatgcgaaagggaagagaggagaatccattccctgccagccaggcagctgctcactcccgtcagccccattttggggtgggggcggctagataaaacttttattctcctattggagggtctaatttgtcccaaaataggggcaagtggggttgagggtggggtttgggtggggggaggagatcttatccaacctgtaggtggagaactggcccagagggtaacaagtacttgcagtttctctgaaa

SEQ ID NO: 9203 - DNA, 1011 bp, Homo sapiens
tcagagttaaaactattatggtgtgtcttaatgctcctcaacaagtctgtgaacctgctgatgctttctggaagcttgctgtgccttctaaaagccagtggtgggtaggcattgcagttgaactggggcaacatttctttactttggaaagggccacctgtatcagcatcaccacactggctctgcacaaatttataacccctggtttgtgcatgtcagaggaaaatatctcggcggagagtccaggctgtgaagaaaatcttcaggacaaatcctggtttccagagtcaagttcaacctgatttacatgattcagcggctgctccatccagtttttcttgtctgagtaacaaacttgcaacttcctgcatgttcgtgtgcaagtttcagtgttttgccattgacttcctaggtgaagtgtttttaatttttgttcatttggattatagagaagtaatcctaatgattttacaggtaacaaaagcttcatagacttgaacatataaaatatgcccatggaaattagtttctacaagaggtctaaaaactgctttgagtgtaggcacaccgttgtaagttaatatgggtcacaaaactgacacttggattatataaagtaattttccctcgcctcctccttatttttgtcacttaaaacacaggtctttttaccacatgaacttgaaatttcattgagtgttaaatgagtatattagggattacagctgttgttcatcctggtaattctgagcttttttgtgctcaactaaggattgtgagagttgagagcttgattgaacacttaagtttcataaagattacttcaaaaatatttagtatcaacaaaaatagaggtctgtattgtaggtttaaaaactcatttttaaataattatttggtggtaattcattatactaaacttctcagtttctttttattcaggctccttcctcagagaagcttcctgttatgtaccttatggattctattgtgaaaaacgttggaagagag

SEQ ID NO: 9204 - DNA, 1025 bp, Homo sapiens
caggatctagggaaatatctcaatcaaacccccacctccagctctgttttttctttttcctttttttttgctttaaagcttttgagatattatacaattgtgtgtcatagacctctacattgcagaactgttgagccctgacgtgctttaaggtagccatagaattgattgaactgttctttgaccaagaatttccttaacctgagttaaataagaagatcaaattgtgtccctgctttcacagtctacaattctttttttttggtccttttttcctactttttaccacctttccagtcacttcagttaaacacaattgtttgatattaatgacaacatagcgaatagccttccaaatacactctggttacgaaacatgcactgttacctgttggtattctttcacacttgttctgtatacattttaaaatgcatactgagacaactttaaggcagtatgtttacaatttgtgattaattcggttggttttgaatgactacttttgcttgcgtgctgaaattctcctaggctgagttttacttcttttccaggtgcagacattttcttactatgacagatttattttatagtagtaagattgcatggaagaaaatacaaaataagaaagattttaaaagtacattaggaacattattgatagaaagtagtccttctgttcatctctaatggtacgaaaaaacagttggcttgcctagatttactctactgtatatccttgaaagaaatgatactcttattgacagatactctagaatggtacttacttagtcttgtttctacattacacagaatcggtggggtttttattatgtgtactcactaccaaaagtccacatgtatactgaacaaggattataaatggatatttattcacataccagcaatatgtagaagtcctgcctccctctggactgcaaatgctgtatttgtatgccagtatagttcttgctccatgactattctgttttttaacattccctttgacatcttttacaagaccttt

SEQ ID NO: 9205 - DNA, 1050 bp, Homo sapiens
tcttactacgtgcagggatttctgctaggatacgcaaggattgcaaagatttctgctctccagtaatttgtaatatattaataactgagagaatagaacaagcattttaatagccttcaacacagagctttaataggttagtgtcatgtaaatgttaagaaaataataaatcctataattcagttgaaggttaaatgctttttgataatggttatcaagaagagataggatttgaaccttaggggttttagttagtagaggttgtaaggcaaggggtccaggagagaggattggagtgagcaagtacaatttactcatcgctttgctccttcctactcagggactttgcatatggtaaagcatcactactcaacttggagctctttctcctctttatctggccaattcctttatatctttcagattccagtttaaatggtgactttttagagtaactctttaagaagtcattcccactcaaacaacatgcagatttggtacttttgttatggactcatacagcaacccagccttcccatgtctctgcacttaatatttgttttctccattatggtagagaccatatgtgtcatggtgtctccagtgcttatcatgcctgggccataacaagcttttggtaagtgtgtgttgaatgaatgagtgaatgttcaaaatatggtcatagtttggtgaggaaacttcgtagactggggcataggaattatatgaagactgggtggaattggggtgaacaaaatgaaaaaggtagaataaaaaagactaaggaaattgaatttcatacagtggacttgcaggagattttgaaattttttgagctaaaatagataaaaatcagtttgaatttctttctagaaaataactatttgccatttgctagtgtaggcaaatgaatcctttcctcttccaatgtctgatgagatggcctggacatgagaaatgctcccctgctgaaagcagcctagtttatctaaatctcaaaggccaacagggtagcagggaagtgggtcctggtttttttcattgcaaata

SEQ ID NO: 9206 - DNA, 1026 bp, Homo sapiens
agaaaattcatagaaaaactggccaactgcagttacttttgattcacaaagccatggatggtctttgttgaagggaagctacgggttggaagccgttctataaataagcatacgacttccaaaaacctgaggggctgaggagtcacagtgtggtgcctacaaagtcagcctcagccaccttcacccagggagtatgagtgaatgtgacaagttggtggcctggatgttggcggaaatgacatggctacttccagaaagaaaactaccttaaccaccaagagtcacggggagtccagctttcagaattctactcatggctcattgctggaacagaactgacagcactagctagcagctgctaaaacccatcattgtcttctttggccctgaaatcaacctacaaaacagcctttcacagggagtacattaagtactgatgttcatagtccttgcatgctgggattccaagtcttataattgcttagatagtatgattctgggagcaatagctcccacaaagatagaattcatgactatctaaatccagtaccaccaatagatctgagcacccaaaggtccggtctgggctgcatgatttagagggccccactctagttctccagtgtccaagctcctccccacagggtaaacagccttctagatcctgtttgagaaacctcagactcctgcattccctgtcttactgccttcagggtctgcacaggcctgttcccaggcccattctctggaggactgcacaatcagtgtgtgctgccctagtcctgaggagtggctaagggatggctgttttcagggaggagagaatggtagagcttggacgtgcagtagggatgtccatactcatgtgtgagaagcccctcaaagtgctgaatggagccaagggtgagaaagacaaggaggactggcttggtgagggaatggggggaagaggaatggatagatatccattgcttatccattcatcagttgatggatttttggctgtttctacctttggctattata

SEQ ID NO: 9207 - DNA, 1001 bp, Homo sapiens
attaataagtaacgcaaaaacaactaaaagcataaaactcaatggtaaaagaaagcagacaatcaaatccagaatactctaactgcaatggtgatatgtaaatcacttataactttagtatgaaggttaaaagacaatctattaagaataataggccaggcgtggtggctcacacctataatcccagaactttgggatgccaaggcaggtagatcacttgaggtcaggagttcaagaccagcctggccaacatggtgaaaccctgtctctactaaaaatacaaaaattagccaggcatggtggagggcacctgtaatcccagctactcaggaggctgaggcaggagaatcacttgaacccaggatgcagaggttgcagtgagccaaaaaaaaaaaaaaaagaataataatagctacaatactttattaaggtatatacaatataaaaagatgcaaattggcccgggtcttccaggagtcgggttgcttgggaatgcagcccaaagcgggtggtaaactccatttaaggctaaataccggcacgagaccgatagtcaacaagtaccgtaagggaaagttgaaaagaactttgaagagagagtacaagagggcgtgaaaccgttaagaggtaaatgggtcaggtccgcgcagtccgcccggaggattcaacccggtggcggatctttcccgccccccgttcctcccgacccctccacccgccctccctctcccaccgcccctcctcctcctccctaggcattaccattcaggacataggcatgggcaaagacttcatgtctaaaacaccaaaagcaatggcaacaaaagccaaaattgacaaatgggatctaattaaactaaagagcttctgcacagcaaaagaaactaccatcagagtgaacaggcaacctacaaaatgggagaaaatattcgcaacctactcatctgacaaagggctaatatccagaatctacaatgaactcaaacaaatttacaagaaaa

SEQ ID NO: 9208 - DNA, 1036 bp, Homo sapiens
cacatatagtaagtgctcaagaaatatttgatattgatatgcaataacaacttttcaggagaggctgtatccattaagttcaatggtatagtgaactgaatttttctttttttctattaggacacaaaatatatatcaaatggcgacatttggaacaacagctggtttctctggaatattctcaaacttcctgttcagacgctgcttcaaggttaaacatgatgctttgaagacatatgcatcattggctacacttccatttttgtctactgttgttactgacaagctttttgtaattgatgctttgtattcaggtgaatttaaattcactaatgtataacgtagttatgtctaagtaaagttacttattaacatatactgttgctactgctaataataattctttacatttatatattgctatacagtttacaaagtccatataccttgtcatatttaatccctgcaacaatcctcctaatcaggtaaactgtatttttttatttctgtagataagcaacccaaactgaggcatgttcaagtacgctaataagcaacatactgggaaaagaattggctgtggcatacaacgcacatcatttcagtatgctacctcctgccacttaagttttgtgacattcagtaaggcatttcatctctgagcctccgttgtcttatctataagttaggactaatagtacttacctcacaggattgttgtgagaattaaaagatactgtaggttaaatgactaccacaatatctgtcatattatgggcttttaatgttatttcctgcccctcaccttaccttgagtttcacaactagtaattgatagagcatctatcccttgttcattcttcaggttcctgcttaagtatcttttccccagggagacctctgattgcctcattgtacactaggtgtctggatacattctctatatagtttatcttcaaagtattgtgtacactgataattatctatttaaatatttatctcgtgtctttcatctctgtaaactggccagaaggtc

SEQ ID NO: 9209 - DNA, 1035 bp, Homo sapiens
tcattttctggtttgtaagatacattaatcttttcttatttcatgattattttataggaagatcataaccaaccattgtttggagttcagtttaactggcacagtaaagaaggagatccattagtgtttgcaactgtaggaagcaacagagtgagtgttaaggggtctatttagtatttggcttgatttccagatctggtgttaatgtaatattgaaatagaataatttcaaagtgcattttgtgaagctggtttagcaatatgattctttcatgtaagagtgaaggtttctagaaattaattaaaactagtatgcatggctgaaaatacatctatatttaatatattacccctaattatttatgaaacaggttttatacttgtatttgtcttcataaatacttggttgaaagaattggcgtcctttttttttttttttaattggcgttctttttaaagtgattttggtatttatcattcaaatagcgtaagaactggctgtgatttttttaaaattaaggtaatgaatggctctataaatgaagcataaatccagtggatttaaataagttattgagatgttttaattacttgcagtaaacatttgagtttgctgggtttttttgttttgagacaggtagtgtttggtggtgattgttgttgttgttgttgttgtttgtttttgagagagagagagtcttactccttcctccaggatggagtgcagtggttaatcaaggcttactgcagcctcaacttctggggctcaggtgatcctcccatgtcagccttctgagtagctacaggcatgcactaccatccctggctaattttttttgtagggataggttttcaccgtgttgcccatgctggtcttgaactcttgggctcaagcaatctacctgccttggcctcccaaagagctggggttgcagtcatgagccaccatgtccagccttttaaggaaattttataatgacatgtaaggctctaggccttttactatttgacaaggtcaattcattgaaactctaa

SEQ ID NO: 9210 - DNA, 1057 bp, Homo sapiens
aaacaaaattgagtggagagactgtaattttgtttgatcatttgttatggattttagacctcaaatcaccattgtatatatttggttgtataaggaaaattgagaactttggtgtcaaaaactttagcagttctttataagtttctattataattattgacatgtttctttttcaaaaacattatgtttcttaactgtggaatttcttaggctgatgaaaacttttacacttgtgcatggacctatgatagcaatacgagccatcctctgctggctgtagctggatctagaggcataattaggataataaatcctataacaatgcagtgtataaaggtgggtttttctggttaaattgtagatctgcttcttttgaatccacaactgtaaaaacttgtaatgttaaatttaaaactaatggtatgaatgtaacatttctcatttgatttgtacttttcttactgctctctttggatgagtcttttgagacgtttgtcacatttgggtaatgtaaattaaggaataagtgggaaaatgttaatatttgtagtgctttctttttaaatcatttccctctttcacccttgtcatggtttactttgagaggctctaaatgaacaataagagggagtccattttccaagacacctaaactggaggggtgttatcaaagggaccttgtaacgaacataaaggtgaagcctaggaagttgataagaagacgggtttttcaaatcactttcatcacctgtttttaactgttgggctacatcacactctcctgaggatgcttaaaaccctacgcatattggagcctccgctaatccgatcagaatatctgcaggtggagttttgagcatctttttttttttttgttctgagacagattctgactcctttgcccgggctggaatgtagtagcatgattatagctcactgcagcccgtctcctgggctcaagcgatcctcctgcctcagcctctcaagtagctggggccaatttttaatttgtgtgtgtgtgtgtgtgtgtgtgtgtgtgtgtatgaagatagggtct

SEQ ID NO: 9211 - DNA, 1047 bp, Homo sapiens
ctttttggtgatgtcttttcatatcttttgctcattttctaattggattggttttttgttgtgttttttttttttttttaactgttgagttttgagagtttgaatatattctaaatatgaatcctgtatcagatacatagtttgcaaatattttctttcagtctgtagcttgtcatttcatcctctttaatagggtctttcacagagcaaatgtttgtagtttttattaaatccagtatattgattttttaaaattattttatggattatgcttttgatgttttgcctgagaactccttaccaagctatagaccttaaagattttctcctgtgttctcttgtaaaagttttatactgctatgttttacattaaatgtgtaatccattttgagttgatttccttatgaaggtgcgaggtttaggtggaagttcatttttctcttatagatactcagttgttccatcagcatttgttggaagactattcttccgccattgaattgcttttgcacctctctcagaaattgtttggctgtacttacgtggggctgtttttgattttcctgttctgtttcatctgtatatctgtccctccaccagtactacatacacagtcctcattattgtagctctataattattcttggaatctgatagatttttcccgcttttatttttttcataattgttttgagctattctaattcctttgtctttctgtgtgtaaattttagaataatcttttctacatttctaaaaatcttgctgggagttgttttgaggagaaggagtttttaactggatttgtattaaacctgtatatataatttcaaggagaattaatattgtgctgagtcttctaatccatgattgtggtatgtctcttcatttatttacaacttctttgacttttgtcatcagcattttatagtttttagcatataagtcccatttttgctctgttagatttatacctaagtattttttaagcaattataaactgttttatatttttattttccatttttatgtgttcataactaatat

SEQ ID NO: 9212 - DNA, 1013 bp, Homo sapiens
tctttgatgagagacttggtgtattaacagttgtaatatttcctctttcatttctgatttgagtcctttttttcttattaagtgttgctataagggtttgtcaattttgtttagctttttgttttttcatttttttattttctatttcatttatttctgctctgatctttgttatttccttccactaacttgaggtttagtttgttctttttctagttccttgaggtgttgaggtttaggttgttggtttgcgatcttttttaatgcaggcatttaatgctataaacttccctcttaaaactgtttttgctgcatcccataagttttgacatgtgtttccattttcatttgtctcaaggtatctttatatatgtttctagagtcggggtcttgctatgttgttcaggcttagagttcagtggctattcgcaggtgcagttatagctgtcactgcaccctcgaactcctgggtccaagtgatccattcctgccccagcttcccaagtagctacgactgtaggcatgcatcactgtgccaggctttcaagacatctttcattttctcttgtagtttcttttttgacccaataattgtccagtatatttcttacacagtgtcttaggaaagataaaaccagctttgatatgttgagtattatgtttccgaaaagacaagacagggttgtttttcttaactttatacttgaaagtttcaaacatatagaagagtgaagagagtagtgaatactatgaaccaagtcaagcttcaacaattatcaatacatagccaatcttgatttatctatacatctacaccagattgtttcgaagcacatcccagactttattttaactgtaaaaatttactctatatttccaagaaagactttaaacaaaatatcaataccatgctcaccctttaaaaagtaatttctaaattatatatgcagtttatttagaagtataaagaaaaaagtaaaaactacctttaatttttgtacacagaaataatt

SEQ ID NO: 9213 - DNA, 1046 bp, Homo sapiens
agactcataaataataatttcccatgctttttaggttatatgcatgccaaagactggtgaaattgaatttaatactaatacaggccatttggtttgtgttattcctttgttttattctttatactaaagctggaggattttaaagtgggtcagaatacttctgaagagggaatcagaatttgactttaggaacactgcctttgtatcttgagacttaatttagggcagccagttgatactactttataactaatagatagttgaaattacatagcagtatatttttcctaagtttatttgtatcggtagataggatattatagagggaaaacttacctaacacacatattttctctgtaaggcatgtcatagccttcttgcacttaggaagactagccagcacttgaacttggtcattttaaacagcacgatcaccaacaaaaatcacaaaaatgctttaaatagatgagactgtgaaaaggacactttttcatattacgaggactgaaacaagatggcatgttctacctcagctgccagtgtgtgagttgcacaactcacttttttttttttttttttttttgagacggagtcttactctgtcagccaggctggagtgcaatggtgtgatctctgctcatcgcaacctccgcctccaggttcaagcaattctcatgcctcagcctcctgagtagctgagactacaggcatgtgcccccatgcccagctaatttttatatttttagtagatactacgtttcgccatgttggccaggctgatctggaactcctgacctcaggtgatcaacccgccttggcctcccaaagtgctgggattacaggcatgagccactgtgccaggcctacaactcacattttttactactgttcatatgagtatgtccatgaatgactgcagaaatgcagcaagcattgatttgggattacaagtgagttttagtgagtaggtgaattcagatacaggatttgtgaataaggaggattgcctaattacttctggattgcttacctgttttaattacctg

SEQ ID NO: 9214 - DNA, 1024 bp, Homo sapiens
ttgttgatttttctgtctggtcaactttttagttgttaggatggagtggtgacttccttacatacagcaccaagaaatggaagtcaaatgagaacatttaatagagagtaaggatgggggtgtgtgccaagaatggctaaagaagggataatttgagctgagttgtgaagaatgagttggaattaagtagatgaaatggatcagagaggtagagagtggaagtgagttgaaaatgattttggcaaagggaatgacaggggcaaaaacttatggtgagagtatgatgtgatggagcaactgaaagacagttgactggctgctctgtagatgtggggaggcagtgtattctaaagtaggctagagagaaaggaaggggtcaagtaatacagggccttgtaagtcatattaaggatgttgacctttatgttaagcctgatgggaagccattaagtgttttgagctggaggtcaaggagaagttgaattatatgatcagtttatatttggaaaagattactctggttgccatgtggggaatgaataggagggtcaagaatacctatagcaatagtcttggtgagaacaaatggtagcttggtctaaaactggtaatagtagaaatgcagaggaatgcaatgaatgaggggcaacttggaggtaaaatctacagattatggtgatggactggatgttaggggtgagggataagagaagtctcaaggatgacttctgagttcctggctcatataactgaatagatagtggtgccattcactgagaccgaaatcctggataaaagacaagatttaagagaagaaagattgcggttttgggcaagttgaagggcctttttgtgatatataagcaggcagttggataaacgggtccagaatctcaaagagggggtggcaaggagtctgggtctgtaaataaacatttgggaatcatcctgagtgtgggtgtgactgctgaagtggagagtatagagtgaaaagagaagcaacctaggactgtaccttgaaaaa

SEQ ID NO: 9215 - DNA, 1045 bp, Homo sapiens
gacgtcaaagacgagacctatgacttgctctaccagcaatgcgatgcccagccaggggccagcgggtctggggtctatgtgaggatgtggaagagacagcagcagaagtgggagcgaaaaattattggcattttttcagggcaccagtgggtggacatgaatggttccccacaggatttcaacgtggctgtcagaatcactcctctcaaatatgcccagatttgctattggattaaaggaaactacctggattgtagggaggggtgacacagtgttccctcctggcagcaattaagggtcttcatgttcttattttaggagaggccaaattgttttttgtcattggcgtgcacacgtgtgtgtgtgtgtgtgtgtgtgtgtaaggtgtcttataatcttttacctatttcttacaattgcaagatgactggctttactatttgaaaactggtttgtgtatcatatcatatatcatttaagcagtttgaaggcatacttttgcatagaaataaaaaaaatactgatttggggcaatgaggaatatttgacaattaagttaatcttcacgtttttgcaaactttgatttttatttcatctgaacttgtttcaaagatttatattaaatatttggcatacaagagatatgaattcttatatgtgtgcatgtgtgttttcttctgagattcatcttggtggtgggtttttttgtttttttaattcagtgcctgatctttaatgcttccataaggcagtgttcccatttaggaactttgacagcatttgttaggcagaatattttggatttggaggcatttgcatggtagtctttgaacagtaaaatgatgtgttgactatactgatacacatattaaactataccttatagtaaaccagtatcccaagctgcttttagttccaaaaatagtttcttttccaaaggttgttgctctactttgtaggaagtctttgcatatggccctcccaactttaaagtcataccagagtggccaagagtgtttatcccaacccttccatttaacagga

SEQ ID NO: 9216 - DNA, 1026 bp, Homo sapiens
tgagtaggggctgggtaaaataaggctgagacctactgggctgcattcccagacggttaggcattctaagtcacaggatgagataggaggtcagccaagatacaggtcatcaagaccttgctgataaaataggttgcagtaaagaagccagctgaagcccaccaaaaccaagatggccatgagagtgacctctggttgtcctcactgctacactcccaccagcaccatgacagtttacagatgccatggcaatgtcaggaagttaccctatatggtctaaaaggggaggcatgaataatccaccccttgtttagcatataatcaagaaataaccataaaaataggcaaccagaagccttctgtcagtggagtagccattcttttattcctttactttcttaataaacttgctttcactttatggactcgcctttaattctttcttgcgtgagatccagtaaccctcttttggggtctggatccggacccctttctggtaacagaatcttccagtgttagaactagacacaaacttagagatgatttttgtgaaagcaccttattcctagtggtgtgaaagctgaggtcatttgggataataaatggttctgcacattttcaaagagctaaccctcattgtcaacactaccttgaactagttgccccactcctaatttgctcctgtcaaaacactgcagccaaatgcaacaatccagtgccacaaatggctgctgccaggatgtcagtgaacatttgtcgagcacccgaaccagcattgggcgcaagaacagctcttgcccttgagaagctcaaacacatctagaggagaaacaaacaagaacaatataatgtaatataacacatgcaattacagatgtttgaactaggttcagaggtgccctaaaggaaggtgctacaggctctgcttgattggatcatgcgaggctcccagaagaggaaacgtgtatgcagggacttgaagaagaagaggaaacacttactcagggacttgaagaatgagcagaa

SEQ ID NO: 9217 - DNA, 1058 bp, Homo sapiens
ttagctccaagttttattttactttattatttatttatttgtttattttttgaggtggagtcttgctctgtctcacactcactggagtgcagtggcatgatctttgctcactgcaacctccacctgcctggttcaagcaattcttctgcctcagcctcccaggtagctggaactacaggtgcatgccaccacacccagccaatttttgtatttctagtattgatggggtttcaccatgctggccaggctggtcttgaactcccgacctcaggtgatccacctgcctcggccccgcaaagtgctggaattacagatgtgagccactgcgcctggccatgttttcttttaaaagttgtatagttttagttcttacatttaagtctttcatccattttgaattaattttcgtcggtagtgtgaagtagagagtattaagttttaaatttcattttccacatttgttaatatgacatataaatatagtagatttttttgtgttttatcttgacttctgtgaccttgctgaatttattagttttaagagtttttggtacattccttgagattttctatacagacaattatgttacctgcaaatagggatggttttctttcttttccaatctgtatgtccttttttctgcttgtatcttgtatctgctcttagcgggaggcattcagtttttcatcattaagtgtattgttagctgtggggtggtttttcagatgctctttgttagggttaggacgtttacattcatttctagtttgctgtgaacctttatcatgaatggatgtaatattttgttatatggcttttctgcatctattgataagatcatatgatcttttttctttttttcttttcttttcttttttttttttttttgagacggagcctcactctgtcgcccaggctggagtgcagtggcgtgatctcggctcactgcaacctctgcctcgtgggttcaagcgattctcctgcctcagcctctcaagtagctgggactacaggtgcgtgccacctcgcctggctaatttttgtatttttagtggag

SEQ ID NO: 9218 - DNA, 1060 bp, Homo sapiens
atgaatatatcatgctaaacccaaactcaatatatcttgctaaactcaactctactagcaagctggattccaaaacctagtgctgttcatcacaaggtgaagtgtgacagagaaatcagaatgtaaaatgatagtaatcttaactatctatggttaaaataccttacttttgccaatgttaccaaagtgactatgtgaacagattttgtagggctcttttcgaggtttgcaagaagcctgtggttatgggggggtctttatgtttctctggcttccttttaccaccactgtctgcttcctcattctccacttcagccacactgccctctctggtgttgagtgagcatgacaagcatgctttctcttcaggactttgatacttgctgttcgctctgttttgagctcttatcgctagatatctgcatggcttgctgtttcatttcactgagactgctgaaatgtcactgttgtgaggccttccacatctatctcacatagtaacagtcacccttcatgtaacttatacccctgcagtcccaaacctctgtatctttttttcatggagttgatcaacatctaacatgtatcttttttgcttattattttattgtctgtcttcccaccttggaatttaagcttcatgaatgtagagtttttgtgtgttttatacattgctgtattaagcctagaacagtacctaaaatgtactttgtgccataatttgttaaatgaatcatagatgaatgtgtttattaacccatctatgctggaggttgcaaattttttttttttttgtgaaaaatcagaccttggcgatgaccttgagcagtaggaaaataataactcctgtaagcttagcgttccaataatggaacactaggcataaatgggttaaagagaaggatttataggagacataccagattaaacctagatgtttattttaaagcttgttttaaatattttaggttggtgcaaaagtaatggtggttttgctgtaatattatttacaagtaaaaccttgctttatttgactgcattaatgttgtattttagatta

SEQ ID NO: 9219 - DNA, 1025 bp, Homo sapiens
gtgtttgcttttaagatttttttctctatctttggttttcagaaatttgagtatgatgtgtccatgtgcgaattgctttgtgtttttcctttttggagttcttttagcttccagatttcctcctcctcctcctccttcctcccttctccctccttcaccccttcctctcctctccctcttgtcctctttttttcccatttccctttctttttcctctttctcctccttttacttttccttctgctccttttttctcttccttctcctttcttcttcttttcttcctctttttttcttcaacattcagaaggtttttgacaatcatttcattttttttttcttcctccttttctatctcctttcctgttgggacctcaattacatgcattgaactatttgatatttcttggtctctgagtctttcatttctcttcagtctttttttcctcgatcttcttcaaattagaaatttctggtatctatcttcaagatcactgattatttttctctgccatctcaactattctgttgagctcatctagcaaatttttatttcagtgattgtacttttttagctcagttatttccatttagttctttgttatactttcctttttctgttgaaattccttatttatccatctattaaataacatattgccaagaattttttgaacatgttttcttataacttttgagcatatttataaaagctattttgacatctttgtttttgaaatgcaatacctggacccatttggattcagtcttcattgacttcttttctttctttctttctttttttttttttaagctgaccatggagcacactttcctgttttgtttgtttgtttgtgtgtctagttgtttttgattggaaattggacattttattctatatatttccaattggtcctccaaccttaagttctgccctctgaaacttcaagccagtaggcttttgctttctttcacctgagctgtgtgcagttgcagaacataacttagtgaaaggtgcagcaaac

SEQ ID NO: 9220 - DNA, 1065 bp, Homo sapiens
agtggcaaatactactttaattcaatcagctttcatttaagataagtatatctttatggatttgtatggataattataaatattggtgttattttaaaatcatgatatttataatacagtgataattatttttgacattaaattttttcatgaagaatattcgtgaattaaataattaaataatatttaaagaatacaatttacatatttgatatttcttatgcacaaagatacttgattattcagatattaagatatatttccaacattactaaaattattacacttaattttaatattatatttaaagaaaccaagcattttcttactgttgaatgtgaattctttatacaaggaaacctagaagtaaactctcaaatatatatttttaatgttgcatctattttttcttatatatttttgttattatttttgtctttactgcttcccttctagcactacctcaggaaaaaatgtaagtctttaataagcaaagtattagttcaagtagttcaagtagtgaaatctctgagactgatgcctagtagaatgccaggaactggtggcttgtaaaatctaatcaaataaacaaatattcattgatagcgtcctaaaggcaaatgtgatgcgtggcactggaatcagatctagtgttccttcttttttctttgttcccctgaataattattatgaggtagattagtagatactgggttttaattgtaaactaaaccaaaatggtttcagctttcaaaaagttttatagtctagtggctgagtcataacctgctacttaggaccttgccagtgttgtcttctgtaaacagaccagcagcaagctcatgcattgcttttgtgagaaataaattagataatgtctgtaaggcagctagcacaatgtctgccacatgtctgccacaaaataagcctattagaattagcctgttctaaatcttaacttatttttattttattacatatgttgtattattttctatattggggtgagtaaatggagatcttatgtttatttataacagtgtgtgaactggtagttgataataa

SEQ ID NO: 9221 - DNA, 1059 bp, Homo sapiens
ctttgttgactgaagtgctgggaaagctgctgtttcttgcacgtattcttaaaatcaacaaaatacctccacaagacaactggcagctgtggttgaacttaaaaagcactcttacttatgctaaagtttgcagtattttagtccagctaactgtatactattctgcaaatgaaaaaatctcaaatcgtttagtgggcaaagacttttgaaattctcttgtactatcctgtgtcagatctttactactatttacttgtacagtatagtttattctacattttatagttccaccttcttaaagaataataatacctgtgtatgtgtgtgtgtgttgtgtatttgtatgtatgtgtatatacagtggaaaacttggttatcataaaatatacaaattaaagcacccataaaaactctggttaaaatttttgccttcttgttcctaatttattatattgaacaagattcctgttgctcttcatattctctgttcatcttccataattctctttgaagtcagtagttgctgtaagtatggaaatagagaagggaaaacctaactaaatccagtgtacttagagctctcgtgaaagtcaatgttgtggcatttttttaaaggaaattataggtatcttgctaatttcttgatactgtgtcatgaggttatcttttacataaactcataaatggatgaattatattttcttactaaaatgatgcatatatgttacttaatgaatgcttgtttctaactttttaaattttaaaaccatatcagcattatacattttactttttagaaacaaagcatgccttttatttaaagtgtgaaacatacattaaaaatttagtcttctttatgtgttatctgaaggaagcttattaaaatctgaattatgtttgttttaccaagaaacatgagtattctttgcaagacatcgaatgcaaatccaaccatccaaatttaggtaatttatttactgtcaaatgtctttctttccttctcccctgtcttctttttctttttttaaaatatgattctgacaagaatgatgaatttta

SEQ ID NO: 9222 - DNA, 1074 bp, Homo sapiens
agtgttttccaagatattcttcatgtattcccagagttttgcagagcctaccaggaactactatgtaacacagtatgagaggcaaatcaggactttagggtaccttatcctacctcaggcagagcatttctgcattcatttgttttactaaaagttttgcaggtctggttttgtttgagcaaagagtttctttgcttaaaaaacaaaactttaaaactactatttagataattggacttgttggctgagttttggatatgtgatgttaattatacagttaaaccataagcactttaaggttttataaaaatatatttgccttaagccatttctaaaatatattttccaattgagggatttaaatgctttgatttgatcaattactttaaaatgatgctttaaaaacacattttagaacacagcaatccaaaatttagagcatcaattacacaagaagtaaaattgtacaaaattaagggcttatttacatctaagtaagtagtgtatgtaataaaatagcataataaaaaggctctgagtatattgatggaggcatatcatttggtccaacaatgagggaataggtctttttaaaaactaacaacttaatctttatcagaaattgcctgtttaaatgaaaggtaaataatttgaaaagaaaaatgtaataaataagagggtatgtttttgagaatataaaagtttaaatattaaagtgtttataaatattgctataaatgcatgtgtgatccagggctgagctcatctggaatcgggaggtagaccaatttctctatatcccatgaatggcttgggcaactccttgaccattgggtatacagaatgttaattgatgttgtttgtgtgtctcttgtagttctcttgacctacaaagaatcaaggtgtagaagttatatatttgaagggctgggtttgtggaaaaatgatcagtgttttataaatctaggaattatgaatataatttagagaaaggcaaatttcagtacaataatgagaactgaccaaaaatggatttcaaatagaactgttctaaaaagggatttggggccgggt

SEQ ID NO: 9223 - DNA, 1036 bp, Homo sapiens
tttgcttttatgagtcactcaaatggtgatgtcagtgttcttttgcaagtaatatattttctctttgttacaggtccttttgttttgcatcacagctgccatgtacatgttctttttcaggtatgttctgttatacttatttactttaataccccaaacagtatctctttgtaatttcatcaaccacgaaactaaagtattctccaaataattatcccttacaagcagcatactccccccgcacccccgcccagagtggacagaggtaaatcattgctcctttgtgagttaagaaaagagaaagagagggaaggaagacttattctccccaccccccattctatttataagttcatcctagaaagttgaatatgtcaattaataggactcaaatcctgataagtgaatttttatcttttatggacctgattgtatgtaaatacctaagtgtttttcactctgcttgtaaaacaatcaacattttacatttggataagaaaaaatgacagtagatctctatctaagccttctgcaaggataacctagcacattaatgatagtctgtaaaatattgtttgttataatgtcaaagttgtacttttcattgacactggtctcaggtttgttgggggctaaggggaagagtgttaggatggcccaagatttaaatgccagtaagagggatttctgccatcttcgtataatcccagcagtgtgcgaatgatttttgattagggagagtcccctcctttataatctttatttctttatttttagtgataccaattaatttccatttattttactcttattgccctcatttggatagatctttttatatatttatggatctagcaaaattcagtcttagcagacaggaccaggcttttcaaattaaaatctgtgcttaattagcaaagacagttgcggatttttagtaggatatatttggtagatatatttctttaagaataaaacaatccaaccataccagaatttttaaaaaaatttttatttttaatttttgtggggacat

SEQ ID NO: 9224 - DNA, 1067 bp, Homo sapiens
tgattgatttatcttttcaaaaaaaccaactttttgtcttgttgatcttttgtattttttgtgtgtatttcatttatttctacattgatgttattttcttctgctaattttgggcttgctttgctcttttctagttctctaagatgcattgttaggttgtttaaaggttttctgtttttttgatgtgcttattgttataacttttctcttagtactgctttcacttagtactgatttgcttatgttgaaacatccttgtatccctgggataaatcccagtttttcatgatgaattatctttttactgtgctgtggaatttggtttgctagtattttgttgaggatttttgtatcagtgttcatcagatatattgacctgtagttttcttttattgctatgtgtttggttttgatatcagggtactattgtcctcatagaatgagtttggaagtattcttttctcctttatttttagaatagtttgagtaggattggtattagttcttatagtaaaattctgcagtgaaactatcaggttctggacttttctttgctgggaggctttttattacagcttcaatctcatcctttgtctttgatctattcaggttttggaattcttcatggttcaattttggtagattgtatgtgtctaggaatgtattcatttcttgaaggtattccaatttattggcatatagttgatcattatagtctcttaggagcatttgcatttctgctgtaattcagttgaattacatgaatcgcactgtctcctttttcatctctgatgtatttgtgcattttgtttagttattctggctaaagttttgtcgatctatttatcttttcaaaaaaccaacttttcatttttttgatcttttgtatttttgtatgtattttattctattttgatattattttcttctgctaattttgggcttggtttgctcttgcttttctagttctttaagatgcattgttatgttgtttgcttaaagtttttctgctttttgatgtaggtgcttattataaacttttctcttagtattgctttcactgtatt

SEQ ID NO: 9225 - DNA, 1052 bp, Homo sapiens
taaaagttgtatttcagagttaggagatgtgccttaaataattagattttattgtaaagggattacttgcagcaatgcagagagtgaatttgggatttggagggagtatatcacaggtaataggggatgctcttgcagttatccagcagagaaatggtgaggacttgaccaaaacttatggcaatgatacggtggagagtaggtttatctgagatatgaggattgctgcttggatgaggaagatgaaaaacgctggaaggtaagcaaattataaaataggaaaaatgtgtgaaaattgaatacaagctttgcaaatactgaggctgaggttcttttatgacattcagctagagaaataatgggtaacagttgggtattcagagctcaggtgataaatctgggtcagggatagaaatttaggagttatcagcatgtagatattagtttaaaccatgcaggttgatagtgttctgtagtgagaatatggagagtaagaaaaagtgttccaagtatggactggagaatcttgatgtttgaagcataggcagtaggaaaggagtcagtaaagcagaggccagagtagtggcaagaggcattataaataccttgttaaatttaggtgctactgttagctgtcacactagctgtctgactttagacgaattacataactttgctacacctcattttcttcattatgaaaagtgtaaattaacatgtgggcctcataggtagggctttgaggattgaatacgacacattgtctttcaaatgtttttgatgtgacaacccaaaataagaacgatattttatatattatgattatgttaccatatatacatgtatatatatgtatataaatttcccagaaaaatactgaaccttcctacatgtgatatatttggatatttcctattctaatttatgtaattaaaaagctgctgtgactcactgatggctaacagccagtagtgagaaaaaacactgaactaaaacgcgtgagcacctagaacagtgactgatcacttagcaaacgcagagttaagagtagt

SEQ ID NO: 9226 - DNA, 1024 bp, Homo sapiens
gttatttttgttttctattcaggtaatgatgatcatttttcaccagaaactgtgcatagaattttataaaaggcacacaatggcaagtgaatattatttattatttctggcaggactgtagaccagcatatgcctttaaaagaggtttgcataaaattggaatacttttgtatttcaaaccaggcagaattacaggaggctatgatggagaacttcaggaaactgattactatgtgttgatttaatatgccaagtatggaaagaaggaagcaaaattcctgagagagattgaagaagattaaggaataataagggataacccttaagtaaaggatattttgtaagagtgaaaatttttggggttctcaaactgaaatgtttttatttgtatattataaaaagaagctatcatgtttcatacaaattttcatttatatttctaggatagatacttaagaaaataaatttaatagtttgaaattagattatcaaccaataaaatcttggtagtgatattttagagagggtggaatgagtaggcaataaagaaagttaggggatcaattatagcaagggtcctgaacctctgggccatggaccagtactggtccgaggcctgttaggaacctggccacacagcaggaggtgagcagcaggccagtgagcattaccgtttgaactctgcctcctgtcacatcagcagtggcattagattctcataggagcacaaaccccattgtgaactgcgcgtacaagggatctaagttgcgtgcttcttatgagcatctaatgcctgatgatgtggggtggaacagtttcatcctaaaccacccccctctccagccacccagtcagtggaaaaattctcttccgtgaaaccggtccctggtgccaaaaaggttggggaccattgaattataggaagctgaggtcctttaataaattagaaaacctatgtttcactcttattttccctctgccagcattgtaactttggacgagagatttaaccattatgcatttc

SEQ ID NO: 9227 - DNA, 1031 bp, Homo sapiens
atcagtcttctctgtaatggctcctagtttgttttagtgggaaatggtatttaaagatttcaatccaggtgctagaggttatttgctcccaggctagttactgattcttggctttcgcagtgaatggagctagagaatctccctccccttgctttttagaaacagaaaatacatttggaacatagtgatatttctaattcaaagttaagagtgtagattttatttaacttaattacttgctttacccaaatatatgtgtgtgtgtgtgtgtgtgagagagagagagagagagacagagaaagagagagagattgagagaatatatacatcatgaaatcaggaggacaggcaggagccagaccatcatgtaggattttaaaagctggggtaaagaatttgtttttttctcagtgcactggaaaccactgaagagttttaagcatggaaatgacagtatttaattcacattttaagaagaacattttggccactattttagagggaggcaggatcaaagctgagagaacagttagtctgtgtcaggaaatggtggcttgcaccaggatgatagcagtagagatggagagaactatacagatttggtgtatgtttaagagtagaattggcaagacttgctaatggagaggaaaagggaactgagagaaagaaaataatccttaggtggcaaaaatatattctttaacacaagaggaaaccaatattgagatctagtttattaaaggtattttacagctaagtggccagagttttttaaggcaaggaatggtatctctctgtttcttgtgtcatcaggccatatctgatcctggcaaaagaaactggcatataaactatggtgatgcagacttttttttttttttaaataggatattagaaatttaagcttgctatgtccttttgtggaattcattgctctggtaatagacaatcatttttctgtgattgaagttaattttatattaaaatgttctattactgtacagtgaaaatgatataaaaatcaactgtat

SEQ ID NO: 9228 - DNA, 1026 bp, Homo sapiens
atgatgtagaagataattgcacagatatggaaggagatgtttctctgtatgtgaagcctttaaatccagaacaattaatttcttctcttcttaaaaccccgtaacatcacttgactctggaatttcctattttcttttactttctccattttttttccatctgtccctcctacgaatatgttttacatgaaataatgtattgggttttatcttttgtcccagcagacctgaaaatcccagtatattaccacagacacacataccatctggtcaccaacagggacatcagggccaagagcagtttatacttctttctttagctcacaaactactatagcttgcctgttcagttttttttttttttaatattcagttttgtgccatactctcccccacccccagcctgctgcctctgcagagcataacattctaatcttgtcagaccgtggataataggatgttccctggtcttggcatagaggccataggcatacaacatgctttatctgccttgcttagactcagcatccctttctgtcttgagagattcaggcttccataaagtagacctgtagacctatgttggctgaggtcaccctgcattactactttcctccatccctgaactaggaccagttaattttcgaagtctagttcttcagtgtctattaaactttttccagtagttaatcgatctcttaaattaattttcttttcagattatttttggtcacctaagaggaccctgaagctatagtgccaaaggtttaaagcatgaagtacattctgtggttggtcattatgggattggatgccaaaaggaatgggagagaagagactataaacatattttaagccttatctcttttctcctattcttttctttacctttcctggcccatgctttcctgccatatctttgctatgtatttcttcatcttgagctctcaagggaaaaaacaggagtccttatttttctatttatttcagggaaaattgaaggtaaataatatctgcaaagcttca

SEQ ID NO: 9229 - DNA, 1059 bp, Homo sapiens
aagtctcctcctccttctccgtctcctcgttcttgtggttaaattaactcttttaagcttcaagcagagtttcctaggtgtaatagattaaaatttccaaattatgttcacccataaacacaatccaattttgtgagcatccttcaccagtttggctgtcaatcatcaccagtctattgccaaatatttcattcctgtcctttccatcacacagaaaaaattggactcccactcactttgatgttaggcatactcatgtgcttcacttttcttcatgaaatctgaatgaaattggcatatggctgctactgagcagaaattttaagagccatgattaatttgctcccatctctttctctgccaaagtaattgttgaagattaaacccttatcagagtgggtgcctgcgttactagtatgagctgtgctgacctgaaatttacaatgaaaaagagaaataaatcaattattttttggatgctgagatttggacgttgtttttaaatgtagtacaacctagcctattgtgataaaatacaattgcattatagatttgcaacttttctctcctcagactaacaatattggtttctaatcatatctttaagtcaaggcaaacatgtgccatctgttgattctaaggtcttcttatactttttactttctttttttttattttggctgagcacaggggactttattgatggttcgtgacaaggaggggctccctaggcatctccctcttcagggggtctgcatggaaactgtgaggaggggagattctcagtgtggtggggaactgagtgcagcaaggactccccagcagtgaaggcctctctcttcctctcatgctctcgctcgggttggcagtccaggggtcttactccttggaggccatgtgtgccatgaggtctaccaccctattgctgtagccaattcattgtcatgccaggaaatgagcttgataaagtggttgttgagggcaatgccagccccagcatcaaaggcggaagagtgggtgtcactgttgaagttggaggagactaccaagtgctcagtg

SEQ ID NO: 9230 - DNA, 1034 bp, Homo sapiens
attgatatgacatattgcatatgcacactttttccaataactgctaagataaatgtagctataatagcaattccagctacccagaatttctcatttgtcttaaagaatttatttcaaaattattttttcctcatccagcaatgtatatcaggttaaaaatgatcttgtaaatcttataaaacctctaagagtaaaaactttcagtacgtataatggatcaatgacatttttaagatctgctattttatgaacctcaagaatggagagattaccaaatctgtagtgtaataaaattgttctaccatgtagaattgatagactaagaaaattagactaatctgatgtatgtatgtatagccattatatatatatgtacattacatatgtatgtattgttaaaacaaaaacattagccaaattatatttaacagactttaattgagcaaagaatgatagactcagagagactccagtgcagccacgtgatggatgaagagttacagacagaaaaaggaaagtgacatacagaaaacggaaatgagtaacagaaacagccagactggttacagcacagaatttaccttatttgaacagtttgaactgacccctttaattggccaaaacttggtgatcggcacaagagtagactcagtctgttgacaactccatttaggttatagttcactatgtacagagaaacctttaggctgaacttaaaatatttaaggaggcagctttaagttaaacttgatttaacagttgagattcagtaatgaataaatcagaaaacattgtacatattttaaaataaaatgttaatgtggaacatataaaacattcttcttaaaattcagaagtataactaaatgtttattgtgaataaaaaacgtgtcttagtccattcctgctgctatatcaaaatacctgagactgggtaatttataaaaaacagaaatttattcctcacagttctaggggctgggaagtacaagatcagtgtcaaccaattcaatgttttatgagcacctgtccca

SEQ ID NO: 9231 - DNA, 1028 bp, Homo sapiens
caatcctctcaaactctgctgctgctttatcaactaagtttatggaacattcccagtgtgttacttacctcaactcttagcttgttggggacggtaaccgggacccagtgtctgctcctgtcaccttcgcctcctaatccctagccactatgcgtgaatgcgtctccatccacgttggccaggctggtgtccagattggcaatgtctgctgggagctctactgcctggaacatggcatccagcccgatggccagatgccaagtgacaagaccattgggggaggagatgactccttcaacaccttcagtgagacgggtgctggcaagcatgtgccccgggctgtgtttgtagacttggaacccatggtcattgatgaagtttgcactggcacctaccgccagctcttccaccctgagcagctcatcacaggcaaggaagatgctgccaataactatgcccgagggcactacaccattggcaaggagatcattgaccttgtgttggaccgaattcgcaagctggctaaccagtgcactggttttcagggcttcttggttttccacagctttggtgggggaactggttctgggttcacctccctgctcatagaacgtctcttagttgattatggcaagaagtccaagctggagttctccaattacccagcgccccaggtttccacagctgtagttgagccctacaactccatcctcaccacccacaccaccctggagcactctgattgtgccttcatggtagacaatgaggccatctgtgacatctgttgtagaaacctcaatatcgagcgcccaacctacactaaccttaaccaccttattagccagattgtgtcctctatcactgcttccctgagatttgatggagccctgaatgttgacctgacagaattccagaccaacctggtaccctactcccacatccacttccctctggcgacatatgcccctgtcatttctgctgagaaagcctaccatgaacagctttctgtagcagagatcaccaatgct

SEQ ID NO: 9232 - DNA, 1034 bp, Homo sapiens
cttttagttggagcatttagcccattaactttaaagttaatattgttatgtgtgaatttgatcctgtctttatgatgttagctggttattttgctcgttagttgatgcagtttcttcctagcctggttggtctttgaaatttggcaattttttgcagtggctggtagcggttgttcctttccatatttagtgcttccttcaggatctcttttagggcaggcctggtggtgacaaaatctctcagcatttccttgtctataaagtattttatttctccttcacttatgaagcttagtttggctggatatgaaattctgggttgaaaattattttctttgagaatgttgaatacggcccccagtctcttgtgtcttgtagagtttctgctgagagatcaactgttagtctgatgggcttccctttgtgggtaacccgacctttcactctggctgcctttaacattttttccttcgtttcaactttggtgaatctgactattatgtgtcttggagttgctcttctcgaggagtatttttgtggtattctctgtatttcctgaatctgaatgttggcctaccttgttagattggggaagttctcctggataatatcctgcagagtgttttccaacttggttccattatccctgtcactttcaggtacaccaatcacatgtagatttggtcttttcacatagtcccatatttcttggaggctttgttcgtttctttttattcttttttctctaaacttctcttctcacttcatttctttcatttgatcttccatcactgataccctttcttccagttgatcaaattgtctactgaggcttgtgcattcatcacgtagttcttgtgctgtggttttcagctccatcaggtcctttaaggacttctctgcattgattattctagttagccattcatctaattttttttcaaggtttttaacttctttgccgtgggttcagacttcctcctttggctcggagtagtttgaccgtctgaagccttcttctctgaactcgtcaa

SEQ ID NO: 9233 - DNA, 1027 bp, Homo sapiens
gccctaaattatttaaataataatagtaatgagaacaaatactatgcatgtgtttaattatgaagggctgtttctgttatcttatttttaccatagagatgataaagtttatgtgggaaacttgagaaaaaaagaatgtggataaagaatcctgaaaaaaacagagtacttctaaacttcctgctggtcagttggtattgaattgatagtagactatcaaaaaagagttcttgacaatattaataacagtaacgtgcattcgtttgtaactttgccatttgcaacttttcattcatttttgcgtttgttaataacaactaacattgctgagagctttacatgtattatctcatttatcccccaacaactctatgaggcaaatactattattatctctaccaaaagaaattggtatttctctactaaagaaattgaggcatagagcttctaagtgacttgcccaaggtaacattgttcaggaggtgtcagaataggatcctaactctacaacctgtgctctttacccctctgcctaaaagagccccctgggccaactgctatttattttcttactggattctgggtttctggcctgtcttcagccttactcatagtgatcctatagtgatcctggagaatcatccagcttctccaggttgtagtaccccttcaaacatctgcacgtgcatggcaaatatggtttgagtttctaaaacttgagtgtgcacctaggaagcagaaagcaaatggagcatctcctgagtcaacagtgcagatgctccctcttgaaaatgacttttcctttccaggctctctgactccacaaaaggaagtggaaaagttaaccagtgcccaataaatgtgggttattgccccctgcctgagtaatttatcacttgctggaactaacttcagaattgctttgagtccatgtcatgttactcctgggaatgggctattataagattctgaatgactgttatgcagttccctatggctgtgcttgcacaggagaggttgaattagg

SEQ ID NO: 9234 - DNA, 1080 bp, Homo sapiens
taccaggtttagggtaaatttgaaagtagctgtgggggagatgactttaacatttccccagggaagtagactggaaaattgctggagagtgaactatagggaacaatcttgaattggtctcttgggtcggacataattacctaatggattttccatctttcaaaattttaggcaggaaaaaattgcctaaaaaaatatcgacaaaatgtgaagcgtacaacctgttccagttctcttcaagactgtaaactcctggccttctctggaacctttgaaaaatggcagtgtagtggagtaaagacaggcaaggggaagacatgtggaagagaagaaatcagactgatgcatgattggaaactcagaattacataactcgatttgtcccttttaagtcattactgactgctgattcatctccattcatgaatgttttgggtgcagttagaactacattttaatgaacaatataacctaattatgattgagcattttacttttccatggactgtaaagatatttgttgagtggcttagaggtttgcataccagagtttcctggtcaaaagcgtgcattatgcaatcagtttttacctcaaacattcacatatggattcccctatcttgcttggttactttattggtaccaagaacatgaaacctctttctttcttgcacccccaggtatatcccaatacatgttctgttttaatgtaatttactattattcacattgcttaagggatgacaaagtatctacttgttctcaagttttattactggctgatgtgtgtcagactagacttggctctgtatataaatatactccagtagagagacccagcctctgtgatcccaaatacattcattggaacaataagtgtgagtgcttgctatgtgcctagcatgttacagctgagatggacccacaagtgaaacagacactgctgtgtttctttcttgagtaggagaagtaagtcatggacaggagaaactaaagcactaggtatacaaaggcaagagctccaagggatcaaagtgctgtcatattcaaacaaggggtctgccttgagggatcgtggga

SEQ ID NO: 9235 - DNA, 1042 bp, Homo sapiens
aatgctttagttttctcttgctctttttgtcttttaacttggctattttcttatatatagaatttctgtccaaaaatctaactgtgtgattttttagctcagctcagagtagcacaacaaaattacagccaccggttggacccagttcagtacagcattcaatctaagggccttgtagcttccaaacgtttgtattattccaatccctgggtggcattgtaacatatatttattcttgattgctccagaggtttattttaaaaatcagaataataacacaactaggttaagtgcaatgtactttgaaattccaaaccagtagttctttaacctattcatgctggttggatgacaaggcattttaccattcttttttatttaaaattacccatatttgtggcttttaattaattatctaattaaatgtattttattttattttgcctgcattccaggttttcttatttctatgttgtttctcctttatacatatttactctctcttttttttttaaattctgaggtctctcgaacaataaatggactctagcattgttcccatgtgacctaaagaaactaccatattagaagaggctaccatattagattagctttcacttaacacagagggatctgaaaagatggaatagtggtaagaacctcctaagaagtgacatttcattggaaattggaaattctattgactaaatcaggaaatagaaggagacctcctcaactgcccttgattggtaattacagctcatgggtagttttaatagccttcagaattcctcatctttccttctcatatgttttcctgtaagtagtgtctttttccagaagttgcttcaatggttcttttgaggactgaatagaaagagcaaatgtgtagtcacctttactgagttcaaaggagttatttgacatatcaagctttcccattggctgaagaaaccttagctcagagttggtagacccaatccctgagccattatgagataccagtgatccttggcctggtccctcaggtcagaactcagaa

SEQ ID NO: 9236 - DNA, 1049 bp, Homo sapiens
tatctcatttatttcgttttcttcacagcatattttagtacttgaaatggactgtttatatgttgtattctctgtcttctactgcacaagcttaaggtccttaagggtaggaaatctgtctgtttcactgttatccctccagtgcccagaacagtgcttgcaacatagttgttgcaataaatactgattgactgagtgacatttaatattcttcatttgtctcttcccttctgtagctattttgatttatgttttaaagagagaggtaacaatttgctttgatatgctgggcttagtaaattgggtttgccccattcatctgaagaagctatgctgccagatcccatcaatcttttaaatgtgacttttctttttctgccttcttctacgtgctggaagtggatttactttatgttgcaaaactgttgtcccattttttaaccagtatgtgacaactcttggaataagtctatactgattcccttcacttctttcttagtttgggggtagtttgtgtgagactgtactcttttcattatatggccctataagaactgagaccaactctgtcaagcagtcgttgtcctccatctcccttctctgggattgcagaaggaaaaatccctagcttatgcatcaagaaactctctattattgatgttgtaaagttctgcacacatcagatggagaggtgatggaaggagcagcaaagctgctgtaaaatcttgaaggggaaattgaggagggggttaccagtgttcattttgccctgctccttgggagtcacacctgcatggaaagctccaagcagagtagaaatcaagcacataaggccgagtgggctatgccaatttctggttaaggattctctgttccagcataaactttgcattctcatgacagaattaaactactgtctgagttcctagtaaatgcatgacatattgtgaattactaagtagtggtcttgataggttagaggacaggatggtcagggagataaatgagacatggatcctattgctcaaggagcttctaatgaataatat

SEQ ID NO: 9237 - DNA, 1066 bp, Homo sapiens
ccctcatcccagtccctcactgtccagtgtctttgtcattcagtctcccctggtttaatgtgtcagcaggagggctttatcttcttttcaaaatcaaaaggagatggcccagtgtggctcctacatacccatgaaaaccttaaacatttccccttccacattttatcccaatcatctacattgagtaaaaataaacaaggaaaaaaaaaacaaatacttcgccttcataatcaatttttcttctcttccaagttttcgaactttgttacttaaaatgtcaactgtatatatcccttacataaagcataacagtcttaggataccttttcaggtacaaaatcagtgactctcaacctgggcgtattcaaaggactcccttgtggagtgtttgaataatgcaggctccagctactgcctacaggaattcgtgattctgtagtcttcattagtgcttggtatatgggagttgtttagtaatagtcacagaatgttacacagtgaaatgttttcgcagtagtctgacaggacagtggataagtgcattgcaaaatcttttctgcttcctctttagttgaatttggagaagggaaattccctccctctattcttcctacatgtatattaaggaaaatggggcttcttttgcagaggtttccaagcctctgaaagtagatgaatcacccttaaaaggctaataggtcccgctaatcattttgcaccacacaaaacaaatagtgacttctgtatcagtaatactagtaaacagctgtcctagaaatgactgtgaacattagtcctagggctctcacaaacctcaaagtgatatatggagagaacccagcaaattgaaaacattctctttttgtgagtatattttaggtgtatcttgtcacttgagccagtaggagcgtgcttcttggataataatatgggtttcccaaacaactcttgaagcacctagatccatacatgtcggatgcaaaaccatatccatggacctggaactgggctgtgacctaagtgcttgtttttcccatcaaagcgtctttcctttggtaccttcgct

SEQ ID NO: 9238 - DNA, 1031 bp, Homo sapiens
atgatcatgccactacaatccagcttggatgacagagtgagaccttgcctccaaaaaaacaacaacaaaaaaaaactgatagtagagacagaaaagcatgtaatctaattgtacaccatgtggtacaacataaatgagtgtcttctactgatcattcatcatgttccctgtggccttaggcccatccttcggcattgtgggatgagttttacaaattccaattggagacataacagtatgaaggataactagagcactgaggtgagttgataatgctatctaagcaagggttaattgtcaaggaatgcctaatcccagaaatgaatcccagttttgtggggcttgaagttcatactattgcgaatgcctgctttgagaaaaagaataagttagaagaacaaaattgtgtttgtttagaacaaggaaaacaatcacagcaacttaaaagtttgaaagtcaacaaatatgacagataccacaaaactcagaagaataacatagtatttttttaaatgtctgacacacctctctaatgttttttttcttacatttttgggttgaaattttgcttgattgcctttccctaggataacaattttgtaatcattgccatagaaaataagaaagattatttaatttttctccagtgtggttgactgaaatttgtgttttttattattgagagtttagaaccatttctccaaagtcacaacttgttatttttaatgacatgccaatttttaacattgtgtaaaatttggaaaaacttctatcaagtttctttttcatataaacttttacagatactcttgctattaataatactgctgcaagtctgtgttccataaagaacaacaacaaaaaaactagtaatttctgtgtctgtgagttttgtcaacaaaagaaaaaacttacagtgcatttttaacttgtatgctgcatcatccaggagagaactttcattttgtctctgtatgcaagaaccacatcttctagtgacaagtttacatgtctaatcatttggtagtttt

SEQ ID NO: 9239 - DNA, 1033 bp, Homo sapiens
aatgttcagctgattaaactgctcccattacagcttgagtgacactgggtaacagatctgggaccggatcctacatcatcccaccacgtaagtggactatatcatgccttcattcattcatcttttcccattccttttcaacaatgcttactgagtggcaggagctgtgtgggattctagacagccaaagacgtttgctgttgccaccgtcttgttaggagatctgtggctcagaggggattcataatgtactgtgataaatgctatgagccagcaatgcccaaggattatgggagctagtgtgtgtgtgtgtgtgtgtgtgtgtgtgtgtgtgtgtgtgtgtgtgtaacagagggaaggaacgtcagagcgtcctttccacaaggaggtccagttggaaccaggtccaaatagagaaataggtattattctaaaccaggaacacaagagtagcatttgcaaagattaggcagagtgagagaactgggaggtgcatacagcatggctagagctctgagctgcagagaggcacgaaggttctttcttttagtggtgagtgggagtggttacattaaatggttttaaagctgggagtgacaagatcaaatctgcattttggaaaactagccaaaatctgtgtgtgttgcagggtgaaggaaaaggtggtgggatagactggggccaggaacactagttgttggaaaccagaaagaagggactgaagtaagggtaggggagaagggatgaattgaagcacccaactcaagatattagggagggacagttcacagaatttgttaaccagtggttgtgtctgtgtctgtgtggctggatgtaggggtaagtgactaagaaggaattaatgatgcttctcaagtttctggcttgttgtggtgtgcatggaatggtgagaccttttatctagattaaaaatataggagacagagaaaggttaaggcgagaagatcctgtataagtggattttgatgagccattgacacatcaggcagagcttctgaatgggagtggtgct

SEQ ID NO: 9240 - DNA, 1030 bp, Homo sapiens
ctcctttttctataaggagaatgaggaacaggattgccctgcaaggaaaaccagttcttgtctgagtgagaatgactattcaaaaggagaagtgaagaatactctaatatggcctcctggagcaggaatgaccaaaacaggacctccaggaatgggtagaagctgggaggactgagggtgagaggagcctgagaggtctgggagcagggtgagcaaaaatgtagtcctggagaagcacagttagagttgaacaagtgcttcttcaatcttgtggttctggattggggccacattctggcaaaagagcctttgaatggcagattagggtttagacatcagcttgtgtgcagggggaagccatcaaagctgtcttttgtttgcctgttgatttgtgtgacttgataaaattctctactgagcatttctcatagtacccacttaatttttaaaaacaactccagagcagttaacaactccaagtagcctaaggctgtgtaactgagaagaggtagaagtcagcagatttgattttatatccatgtgagacaaaattgtgtgcttgttcaaacctttcactctgtcttctgttccctccccgatgtttgataatgccagagcccagagtggacagactctaagtggtatctaggggacagaccgtcgaagacccagatgtgttcctgcaaccttgccaataagtataagtccctgacagccccacctccccaagtgtttctagcttgtttattcccaggttaggtgtccccttgttctcctaatttctacctctctgggaagcaaaatgagtgtcaatcacccctaagccttggccccaatgctgcaggcaaatagttctttatctcaacctcttagttcctaggtctgtactttacacaggatcagtgtgtgtaatcttttgttcttttgtcttcacagtaacttaattcctgtggtaagggaggatcatgtgtattcttaagtgtgggtccttattatttgtatgtagtttgcatctgtattctgtcagctc

SEQ ID NO: 9241 - DNA, 1026 bp, Homo sapiens
ctgaacagcacaaagttgaaaatttaagacacttttctatataatcatttgagctttcaccaagaatattatttccatatatgttgacaggcgggagaggaaagtttcttagcagaactgagatgaaggcatggctggtctcagtgagtcctctcacgaaacagacacagttttattggtccaattctgcccctaattctgggatctgtgcatgcatgttggtgatgctggcacaggttatccttccaggagttgctatagaaacaggtaacagccacacccactttctctgtctgttttgcattttgcgtgtggaggtctggcggtgctgccttatgcgcccttctttggtgggttgctgcttggttaatgatgctcagtccttaggattttctcttgtttggcatactgagatataatttcctatccttgtcacttttggcttcactccttaggctttgctttgagttatcttgctaacaaaattcacatgtctaaaaacaagctgagagagatcacggacacctgccccttatccccacccaattcatgattgaggaactagaacctttcatgaaaccacaactgctccagaaactagagaacaattgacagtttgatgcttaaaaagagaactagaaaaataccccacggatttggtgatctggtcaatacagagtactttaagtcaattagaaagttatacttcctaggtcattcttcttttgccaagctcagtcattggtggctttccattgcaaaataaaatgtagttacttttgtaaaattttaaatgtagtctgtcatttcttattttacttttttaaagcattgcattagttttgtatttctccactacctctgcctaggagaaatacaacacatgggcttggatgattttctttcttggaaacatggttgacaaagctatacaataaaaggataattttctcagcagaacaaaacacactaccctcttgtcgctgggcttttaaaaatctgaagaataggccgggcgtggtggct

SEQ ID NO: 9242 - DNA, 1031 bp, Homo sapiens
gatgtaaaataaatccatcacattagaaacagactattaaaggcagaaaacgctcagcctctgccaatgaccatttttaaatgtgtggcctttgcagatacatcagttaaccaagacaaatccaattttacctcccaccacttaagtaaatttctcttctttgtaaaatttcctattttataaagacatgcttcatcttgactatgtacatactaaattgttcattttttactgagttaaattgttttctgtcatagtgagaaatgcattcttctgaagaaatgatattcatgcccgggaaatggggatatttattaaaatgttttattaggaaactagatttagacatatttctataattttcatatttaagtatttttattgcccaatgaaatgactttcagtttaaaatggactcagataatcagtctccaaattctcacttttatacttaatcaaatatagttggtggatttatatttgcctgcatatgtttagaaatattagagatgttttcagtagaactctatcaatcttttgctgggttgtaatagctagtaaatgacttaaattattttgtgctttcatccaactctgatttaataagcctttacggatttgggattgtgtacataggtgtgggaggaacacaaaaaacaggaaacttctcaggcctaaagaacgaacaggctgtttacaagacaaaagcacctcacagtaaaagaaaaacctgtgtgtaaatgtgaatttttggacttgttatttaagttgcctcttggaattttagtcatatctattatttccaaagtcagaagaattatctgtgcccagggttattccagataactgatgtttaacattttgagtggcatataacacacacaaaaaagattatatttctggaccactttttaaagtgtattaatgtgtctttcagttttcaaacataatcttttgaacaaagtgataaaagcagggctggcttcatgggcctgccatctatgtcatcgcatagggccctgtgcttagaa

SEQ ID NO: 9243 - DNA, 1030 bp, Homo sapiens
tcatgagggcatggaagcagagagacagccaggcacatccttttctctactgtcctggtttgcttgggaatttgccttgccaagcatctatttaagacagcgttatcccatatccagtcatgggtgttttatgctatacagcaaagccctttcagagccacctctggacatgtagttgcctagcaaataacctttccatcttgagttcataactgatatttgaatgtgactgggcatttctaaaattaagcttttgatcctggaaacattcacagctctactagagaaattgtcattctttctctactcctctctccacgtgcttgttagatttttccatacgttgtttataataacttttccttgtggttgaagataacagatttttgcttttaattcaagaaatgtcgtctgctgtaatgttttgcaacatgatactttccaagtttcaaagcgagcttgtgttgtgggattgtgtttttgcatctgaaactgtaggggtggtgataatatcccgatctacagagtgcagatcctctgcccttccatccctgtcagtgtgtttaagggaacgtaaaggatttttctgtcattgtaatttaaattcagaaggagtctatttgtatggtaatcatgagctaaggaaaacagtgtttcatttctctctgggatttgttttctgacatcttcacattctctactactttaacctggcaacagcatattaacagcaattcatactctgtattttaacatgtagaacagtacccagaagattaatacatgatgaggagaaagaagtaagaagggaggttgaggccataattaattttgctttcatgcaccatatgctggtgttttctgatcttaactgaaattagggtcaccactgagttttcaatatttaaaaaaatgaccgtacatagtgaagcacaaataaaattgcccttcttttgaatattaagcttccaacttggggatgcaaattatattcttgttgtttggattcattatttttcaatgaggctct

SEQ ID NO: 9244 - DNA, 2127 bp, Homo sapiens
ttcctggtcccaccttggcctctcaaagtgtttggattacaggtatgagccttcatgcccagcttccacagagttttgaaggtatcatttgagcctcacagaattttatgagtgagagagtatggatgcatttatcctcattttataaatgtgaataccaaggctcagaaaggttatgtaacttgtaagatattcagctagaaagtggcaggaacaatggaagcctgatctttagaggctttagaggattatacacagtgtaattggcaagttggactttggagttagtctgtagttgaggcctggctcttttatttactaactggatatcattggtcaggtagaagctttctgtccctcagtttctcctatgtgatgatgacaatgataatgattaagacctgctataactgttcttaagattaagtgaggtagtggccaaaagtgctcagcacagatcctagtgcaaaaataaatactcaatgaatgtcagctcctctcataatcgttttgactcccagcttgtgccctttgctccatgctaccctgctctgctggtcatagaagaagcttctgagaatacagcctgtctggactgcatcagatctggggataagaacagctctctgctatttctcagcctctctaatgagtgttactattcaggggagtacacttcttgctcaagggaattgtattagtccatttcatgctgctgataaagacatacccaagactgagtaatttatgaagaaagaggtttaattgactcacagttttgcatggctggggaggcctcaggaaacttacaatcattgtggaaggaagcaaacacgtccttcttcacatggtggcagcaaggagaagtacagaatgaagtggggggtgggggaaccccttataaaaccaccagatcttgggagaactatcatgagaacaacatggaggtaactgccctcatgattcaatgacctcctactaggttcctcccacgacatgagaggattatgggaactacagttcaagacgacatttaggcagagacacagccaaaccatatcagacacagccaagccatatcagaaattgtctcacatcctaggaagaaagatgagtgggaggatcagacattccaagcaccaacccccatcattatcccagccaaatatccaatcaaactgttgtttgtaacatgaattaatgattgcagagattaaagttcacattctagactggtttcctaagaaaatagtttcatcagtaaaaattatatcttaattatacagccagaatatcttatttacttgacctcaccagagaggaggtactccatacataggggagttgtctagacaaccaaaatgtacaccttttaggagcttagacttcaaagtacttcttttgattataagcttataatactccctatgccttttaaaactgatcacaattaaattgaaaggtttagtgatgactgcaggttatcatataaaagatctatgatcacacagtgctgtaatgaagtgtcttttgtgacactttaggcacagttgagggagataggttgttggctgtcaccattaaatgctctctatatgtctatacatgctctctttgcatcccctctatgatctgtgccttttgatttcttgtatctgtttttttctttgtatagctgtcctctttatctcttattcttagttatcacttactgtagtcagaacctgcttctggcactcccatgcaatccactgttgtgaatggagaagctgtaaaatcatagttgctaaaattatgccttaaaaaagtgtatagagacccctagtgaggcccagtcagcctttcctctgagttaagtgcataaacttctaattactcctgatttacagctacatttgagatggttgctgccctcaaggaagttaaaaatcagttggggagagaagacttacgtttctacaaatgaaaaaggacaagtatgtttataataaagtgcttagtcctgatagtaagtgcaataggaatttagattaagtgaagtcattagagaagcttcatagaataagagcaacttacactagaactcaaagaaatgcttagaattgtacattaactcatttattcatt

SEQ ID NO: 9245 - DNA, 1050 bp, Homo sapiens
gaagttccgtgtgctgcaggttcaatggcaggaggcagagaggcattgatggaattccaccttctggctagtaaatttgcttgtccagatgtcacctgagatgtatcatcagaggttaattcctgttgcagccttaggtcagaagggaagtgcctctcttcactcctcagtctttggagaaacacatcttagagtgtgagttacagtcactgcccctaacaaagtggctcatgtgctatggaacattgcccctgatccttgttctcatcacagttctccttattttgtacctgctacctttgtggataataattaactacaatcatggtgttataatttactgtgtttatttgataagtggtatgttcctggttcttgatttttcttttattctctaatgctctatgacataggtgtgggttgactgtcaccaactctgtttatttatgcataaatggctttgcaaacaaaaggaacttttcacttacaagaggacttcaactgaggaactttgaatctcttgtgagtcagtaattttttaaatagaaaagacagctttcacagccttgatataagggagtcctagtttcacttgggctcagtcttttttttttatctgatggatgtccccagataacagaaaatgtgatggttatgtcttccaggccagcatcagccaaatgtgttgtcagagagtgactttaagaacattattttgtttgccaacatcctaaaaattaggacgatgatgtgaactttacaaatgtcaataagtgggggtcagcataatctagtagactgttgactagttccacagtgtgtccttcattctctgtgtcctcaaattcagaggactgacacggggattgggataaaaaagcaaattttttagcatatggatgacaaacagtcaacacctctttttaaacagtacattgatcaacaaaccgtgtctaccaggctcttgctcatcctgccacttatgggtcaattggaggcaaaggatagaaggagaaatgtatcacttcataaatatgaatctgatcattg

SEQ ID NO: 9246 - DNA, 1060 bp, Homo sapiens
gcctgtaatcccagcagtttgggaagccgaggcgggtagatcacctgaggtcaggagttcgagaccagactggccaacatggtgaaaccccgtctctactatacacaaattagctgggcatggtggcacatgcctgtaacctcagctacttgatagcctgaggcaggagactctcttgaacccaggaggcagaggttgcagtgagctgagattgtgccattgcactccagcttaggcaacagagcaaaactctgtctaaaaaataaataaataaaattaaatccccttctctgcttgacaaaagtgtatgtgtgtgtgctcgcatgcgtgtgcacacgtgtgcatgtccttcggtatccaattaaaatgttcctcctccataagacctatttgaatgcccgagccagaattcgtggaacctacttctgtgtcctggtggcactttctgtcatgccagtggcccacatctgctgccttgtggtattagcaattatggctgtgcctggtttcagaatattgctcgaagctgatagataagctccttgagatggggcctgaatcatccatgcaggttaccttcctaccaagatgctctgtatactgcagtgttcagtaaaggctaccaaatcatatctgctttccaaaaatttactaaaatataaatattctggggacacccagaactccctttactaaagcaattggttgctctagcagtattaagagacaatggggtttgtttcacaatagagcttaaatcattacattaattgtttccatatgttgcagttggaaagtccagttccttgttattcttcctactgtgatcctaataaattacattgtctcttcttggctgctggagcctaattagcattaattcttcagtgaattttaaatatattcactatcctttcctatttttcactagaatagattatttgtgctgtcactaaagcagggtctctcgtggttctagaaaagccatttctacacacattacctgccacttctcacagctctccataaatcccatagcaataccaaaatatttctaagc

SEQ ID NO: 9247 - DNA, 1031 bp, Homo sapiens
cacttcttcataattatccctattttgcagatgaaaaattcaggaagtctctgagaggaaaagtaggtgtttcaggtaaaaacattggtttcttgtgaaataatatctcaggagggatgctacctaggttcagaccctctagagcataaaagaaaaagggtgagaagctgatggtagaagatggccttgtttctgtatcgtgagttatgagtgctgattgtcagtgatgaagacacattgcaggaagtagccaagtgggagaggtggaggtgggttgccaagagcatctcaggaaactcagactggaactcctgcaattgtggacaccaaccctgtgaatgtgttgtttttacacagtaactctctgagggaagttgaaaaggtactaggaaaaaatggctgaagcatcagccaagatttagagccctttcttgtggttttcgcttagccaaatgttgagaatatggctgtacattccaggcagcatagaggagaaactcgagagtaaaaccacggcagacttagtgcagcaatgatacacaccacttagtattcttttttttttcttaagctagtgaactagcaagagttctacataataacaatccaaataactcattgaatttctagcaacatttgtttattatttattattattattggcaaactgaacatctaacctgagagtaaaatgctgatacgaaacacatgaccatttgtgctgctgggacaaggtgggggtggggagtttataaaggtgcctttaaatgcatgaaatagatgcttttcctacattgacactagcgtcccaacagaaggatgacaccaagagagtctcagtgtcttttataatgtcctagaaagtgatgaaggctggggtaggggtgccagggatcagcaggggctgggcaatgagataaaaaggtcttttaaggcttagagcagaggtgtgtctgctgagatgtccaagagcaataaccaaacagtcatcctaggtccagattgcatcctgctcttgccagtggaatctt

SEQ ID NO: 9248 - DNA, 1050 bp, Homo sapiens
agaaagctgctggttgagtcactgccagagatgactattgctgaaaccataaaatggactcctttaattcattaagacagaaactacagcaaaatcaactctaaaagtgttatttctggagagagaataaaaagctatgagatgagaaaataaatatgaaagagctttgcagcacattctttctttaagcatcgagtgtctttattgggaagcttgaagcctgggtagtttgtatgacaccgtgatttaattgtgactgtgtgatatgaaacagatgacgatgcttagaactcaaggctctgttaaggttttataatgtgtctacgcttctaaaataatcttttagttcctaagaatcactttctggaatccactacccctcctaacacatacacaaacacacatacacacacacacacgtgcacatgcacacaaacacacctttcaaatctgatgatagaatctcttctggtctactcctttaaattagctcaccagtcatgatttatttaaagaacaccggactaggaatcaggctacctgggtcttgaagctgccctgctgtgaatagcttgaagctatttaattgccttgaaccttagtttcccctactatgaaatttggcaaacaattacaatcctttatacctcaaaagatcactcttaggatcaaaccttctgttttgtatcaacgtatttttaaaactcttaaagcattggatataataaaggattattattattattatcatcatcatacaatactatgataatccttttaaaacattactatcatctcataaagataaaaggctccaggctgccaaaaaaaataattatagtaattcttttttcaaaatccttttaacaggatgcagtacctacctggtccagaacttaaatacatttgccagaaaaataagaccttatattatattcatgggcttctttcctttccagaagacagtccaggacacctggaaaggctgtgttcttagatagttgaacccattacttcccagaaggaagcaggaagggtgtctcattatct

SEQ ID NO: 9249 - DNA, 1033 bp, Homo sapiens
gagcctaaaagcagttcctaaatcacattacctccgatcatccttgggagatcataaatacataattcagaagaaagatcttagatttttcatgatgtacccattataattcctggcatgccactctagagttttaaagatgctgataagtcttgaaattagatgtagggctaagctccaggctaacgtataccttgctgttatgtaattgaaataaaatctacttttaggtgactactttcaaataaaatagaaaaatgtcaatattttaaaaaatgcataagtactcattagtagccctcttaagaagcttcacaaagacaaagcactttaaactaagcaaccagtactacaaagtagactgagcgatccagtgttctgactttccccatattgagagaggcttaatttgttcttgctttgtttttgaattgaaggctatgaaagcaaattttgatcccataggataccaaatgactgagattttctcttcatggtatatggcattcttcttgtcactgcaaataactttggcaaagtctcaactttgcatgtcccatctttgccctccaaggcctaagaacctcttctcattaggtgagaaagtcagaaaggctgcagtcaaatttaaagcaatattacagccttgttggcagggagacataaccgcagcagacagactcttgaggtatgcaggaattagagatgcgcttgtttggtatcagccagaacagaatgggattttttatttagcattttttacaacagaaggtgttgttctgtctctatcagcagtagccagggcatgcttgcttcatctctgaatgaagaattacaaatatctctgcgcaaggccgtgacagacccatgatgtgtgctttgatacatgcacaaaaccatttacccgtcttcaaaaatgatgcttccagaagcaattcatttaaaagttcctgtcatgccacaagggcatcaacatgtaaggaagagtgaactcagtttctcatggtgtaaagcaagtacacacctaggtgaa

SEQ ID NO: 9250 - DNA, 1036 bp, Homo sapiens
gaggctgaggcaggagaatggtgtgaacccgggaggcagagcttgcagtgaaccaagatcgcaccactgcactgcagcctgggtgacagtgcaagactctgtctcaaaaaaataaaaaaataaataaaaataaaaaattaattaattaatgttaaattgatataaattatcactcatgagaatacacagatatttggtgtgagatttaattgacagtccacaattgataattaaccataaacacactcatgtatgtgcatgcacacacacatacacacacacgtacttccagcatataaaacataattatacccaaagttaccctaacacagttgaggataccagaataacacaggtgaagtacttatgaactgtaggacagcacatgataaaattttatacccaactttgagaaacaacttgtatgtgctataaagttaatggctgcacttatcagggaggacttcacagaagaggggagacttgacctgggccttggataagaagaagatcaacgtaaaagaagagaacactgatgattcaagcagaagatataaagagggatgcatatggcacccttgggagactatgacaggagtagcctacctgccagtggaagtaggaattggagagcagtagaggagggaaattgaagtagtttcgactagatacttgatgaaatacagaaccataaaaggtttttgagcaggatggtggcatgatcaacgtcatatacaaagacagtttatctgggaaaagaggactttggagttagaaggagtctgggatcagaccagctggttaagaggaggcagatcgaggtgtgaggggattgctatccaactgcaggtagtggtagcagtaagataaaagatacctggataaatgggcaaaactcagtgattgaataggaaggagtgaaggaaggaacaaggatagttcttcctcatggatgtcagaagctggtgttcagtagcaggcatgtatagacatcataagtttggttggcttcatttgtgtttcttccctttaaatg

SEQ ID NO: 9251 - DNA, 1041 bp, Homo sapiens
gaagcagaggctgaccttgtccagggcagtaggattttttaaaatcgcagtataatggcatgttaactgaacgctaaagtctaagtaacatttactctggaagttaaatgagataatgtcggttggttatcataataataatgcactagaaaataaagtcaattaatttgttttaaaaaagcaatgctcttatttgcttggaacactataagtactcaaaaatgaagaaaaagaaaagtagacatttgccaggtagtcagggagaaaaaggaacaatgtatatattccagagagaaggaacaaggtgtgtgtaacaaaaccagacagacaggaagagtaggcacagcgtgtatgtttgttgggagagcatactgaaaatattggtaaacaaattatcatatttgctttacaaaatgatccctgagcctgcaaaaaggagcatggcttgtggatagaggaagatcggataaaaggagaccagtcaggaggctatagaccaggtctagataagaatgaatggggatctgaactaaggtaggggatggagaagagaggatagattttagatagttctaggtggtagaattaatagaacttggtggctaattaaatgtgataataaacaggcaaagaggattctagaacacctccctgcaggaactcccggtaaagtttgagcatgtcatgtctgacttagggcatgcatatctgaaaccacctgtgctgaatgacaagcctgatttttccagcaccaatgctcttcttgattgtttgcttgacactttgggaagtagcattaacactctcaggtcactagggggctaatcatagccattttcatgattgcaattctgaattggagttttcagagaataatcatggcagttcacataagggtctttcctggaagaggctctcactgtctttggacaatgtcatttgcattaagaccattccatgaggctagtgtcataaaaatcattacttatatagcttttgctctcaaatctttagtcattccagaggtctactgaatactaa

SEQ ID NO: 9252 - DNA, 1027 bp, Homo sapiens
gctattcccatgtaacaaatatggatattgagacataatttatatttgctcaaggttgtacagctcagaagcagtggaaaaaccagcattcttatggcaaacctgtctgatccagaagcaatgtttttctcttactctctactgttgtgaagatggctctttgaaggcactgtctgatccttcttgagcttctgcacagttcctagttgggagctgagttactctttcagatcatagagaagtctcattcttggcaaccaaactgttgtgctgacccagacattttatatctggagctgccatttgagagtcgccagcagagggttcaagttcaggtaagccacagcctaccagttttgggaaatgataaggataatgacattcctgaccccagccttccaagatgctcaccaagcccaaatgtgcacctgttcagagcaagccataattcctcacctcagaccacgaaccatgttcaggtaatcatgaagatgattcccattgattcagtaggacccaattacactgcaaaagagtgaaattgagtagaagaatggcatttggggacagaattgttaagtaacgaaaaagaagtaatggcaattgacccttgaggtgtctgatcagacccacacaagactgctaggaaaataaattagttgtaagggatctataccttctctgtgaaccccaggccattagcattgtcctttcaatttctccagaaagttctcaggcttcatttagctactgatactgtagaaatttcatttttaggaagaaagtcataaatatagcaacacctatactcttttgaaaaggaaagattcctagtatctgggcaataaagtgagaatttgattcatttatttaaaagatctctcaggtacaaattcagtcacttctagggtggtcttttatttttttccttttatgtctgtaaaaagagatatgatcctcccactcctgcccatctcactgatgtctttagaaagctggaaccagagtctgattacagacatttgtt

SEQ ID NO: 9253 - DNA, 1117 bp, Homo sapiens
tcccaacactttgggaggccaaggtggaaggatcacttgaggctaggagtttgagaccagcctgggtaacatagcgaggactcatctctacaaaacaaaaaattagccgggcctggtggtgcagtccaattgtcccagctacttgggaggctgaggtgtgagtctgaaactgcagtgagccatgattgtgccactgcgctccagcctaggagacaaaggaaaaccctgtctcataaaataataaaaatgaaattttactgtatgtatagatctgggcttaacaacttatgaggagatcaatttttgaaaatagattctaattttaaagggaccagggatctttatatttaaaataacctcataatgaatgttcatgaaaagagaatggaatcagttatctattttgtaaattaggatttctctatagcaaagtacataatatctgtacacattgtatgtataaatgttaacatgcatttacttttaatgtgtgtgtaacttaatgcacacggaaatgataggatggggtgaatacagaattagctctgtaatacctggggttgagtctggccttgacataggactttaggcatatcttttaacttctctaattctcattttccccactggtaaaccagaaataataaagtctaggaaatgaatgtgatacagatttataaactgtaaaacaagtacaagctgatgtgatttttctacttatacattcaaaaagaaaacttacaagcttgaggagaatacaaggggcttcacccttgaaatcacaactatagaatgttttaaatacggttttgaaatgccagcagaggcagaagagaatttcagtaattcaggacttaattggttctaataaaagacagtgccttcaccctactgctcgccccatggacactttataccatgagcctttgtgaagcagagcttggcatctacccagacttagcttagaagagcctgcaaaacccgaagtgtttgtggtgggcagcattgaaaccagctctgaagagatttcctatattcgggtttcctcctgctttgatttcattgtacttctttaggcatttcaattaccattttgaacacaacatctttgagagtt

SEQ ID NO: 9254 - DNA, 1235 bp, Homo sapiens
gatcccgatgatggagcaaattcaaggattacttattccctctatagcgaggcctctgtttcagtggccgacctcctggaaatcgatcctgacaatggctggatggtcacaaagggtaattttaaccagctgaaaaatacagtgctttcgttctttgtcaaagcagtagatgggggcatcccagtaaagcactccctcattcctgtctatatccacgtcttgccccctgaaacgttcttgccatcattcacccagtctcagtattcctttaccattgcagaagatacagccattgggagtacagtggacaccctgaggattttgcccagtcagaatgtctggttcagcacagttaatggggaacggccagaaaataacaaagggggcatattcgtcatagaacaggaaacaggcactattaagcttgacaaacgccttgaccgtgaaaccagcccagctttccactttaaagtagcagccactatacccctggacaaagtagacattgtgtttactgtggatgtagatatcaaggtattggatttgaatgacaacaagccagtctttgaaacttcaagctatgacaccattataatggaagggatgcctgttggcaccaaactcacacaagtgagagctattgatatggactggggagccaatggacaagtcacttactccctccactcggattcccagcccgaaaaggtaatggaagcattcaatattgacagcaacacgggctggatcagtaccttgaaggacctagatcacgagacagaccccacattcaccttctctgtggtggcctctgaccttggagaggcattctctctttcctccacggccttggtctctgtcagagtgacagatataaatgacaatgcaccagtcttcgcgcaggaagtgtaccgagggaatgtgaaggagagcgacccaccgggcgaggtggtagccgtcctcagcacctgggacagagacacatccgacgttaatcgccaagtgagctaccatattacaggtgagtaaatacccccagttttcattatgtgcactgctttataaagaaagatggaagatggcggggagaagagtaagagagaaggaagatgggataaggagtccagtgtaatgaagcctctctggagctgagtaaaggatctctgagcagactgcgttttttgcttgttggctgttgctaactcagccttagtttggagttcacaggtttgctg

SEQ ID NO: 9255 - DNA, 1025 bp, Homo sapiens
ctgccattttacaaagcatttttgtcacatataaactgacattgtttgacagagtgggggtgggggagataaggaattagaattgaaagttgctaataaagtttatgctcagatccactttacataatgagatggtgagttagaaaagactggagttaattgctaggtagaccttctgagaatgcataagttattgaggtgactgcatgatggaatataaatacaaaagggcatatagacagcttctcggttgtgcattttaagagctgtaaatcagagtactaggaaatgatgaggtgtgtctgctatgctaaacagacctttatataattcagtgtcatattgcttaattctgaattgaaagaaaaattattggactaatggaaaagtaaatacatgataattagttgaaaacaaacgtagagcctggggcctctgcatattttcccttagagaaattagtggctacaatttgaattattgctgttacctcattagcataattttcaaggctgagaaccaaccctttaaaagtctacatattaaagagctttgtgaaaaatggtaaacaagaaagacctcttattgatatatatttatgtaatacctacaaatagtctcttttttaaaggaggattagaaaacattctctggactcttattagcagatgactttggggaaagagaacagaattaatggaaatgaatcacttaatcattttaaatttgattttgagaatgtataattaggccatagatgatattttaaaagctgaaagattggaatttttctccacactccatgaaggaattgagtgtacccaggctactagactggacatggacgtctgattagtgcacatggtgttttttgaaacatgagggggtggagtggggtgttactgactcacagacggtgtgcttggagctgttttgcaagttgtgaagaacatactatgtcctcctttcacttattttgagtcagatggccaggttgggagttggggaggaaggaatgtctagat

SEQ ID NO: 9256 - DNA, 1026 bp, Homo sapiens
cacgtgcttatgttgctgtaggaggctgctgactggtctccctccttcctctctggctgcccttccatctgttcaggagcagaagccagagggatcctgttaaaatctacatcacatctcatgactcccatctcacagctcaccagtggcttccccctcaccaccactacagccccactataatgtaaaatctcttcaagaaatgttggacttgcccattgctagaccctcaagcccctagaaagtgcctggtagattctaaatacatctgtgttgaagtaattaattaattaattggttttggttggtttctatttctctttctgtgccacatctttacccctgcatctattagcctcacagtttttcttaaagatttgtggggggcgagttgtatattaagaatatccaactatttctgatatttgttgccagtattttcccagtttctttgccttttaattccattgtcttttttttcccataaactgaaatttacatttttgtagagccacagctgtctgtttctgtaataactatttttcttgttgtggcccttcaaaagtctgcaaagctgtaacattctagtgcagatcatctggccatgttcttgcccactcattttcctgtgtctctcccacaggcatcaataggaaggtcgtgtactccctggcagactcagctggtggggtcttctccattgacagctcatctggcatcatcatcctggagcagccactggaccgtgagcagcagtcttcgtacaacatcagcgtgcgggccactgaccagagtcctggacagtccctgtcctctctcactactgtcaccatcaccgttctggacattaatgacaacccccctgtgtttgagaggagggactacctggtgacggtgcctgaggacacctcccctggcacccaagtccttgctgtttttgccaccagcaaagatattggcacaaatgctgagatcacttatctcatccggtctgggaacgaacaagggaaatttaagatcaacccc

SEQ ID NO: 9257 - DNA, 1050 bp, Homo sapiens
tcaagtcttccaggctccaaaacccatcctcttctcacaatagcgggccactggtcaaagtgcaaaagaaaagaagaaagtatactagttattgtgtataaattataatagtgtgtgtgtgtctgggcctatgtacaaagtgcaaaaagccacttgagtgatgtccagaagtgtgctctggaaggctggaagaagagagtatttccagtcttagaatgaagacttgagagaagcagagggacacttcaattggaccatgatgagttaaagagtctggggaaaggaggatattccaccgtagggggacccatgtgatcagaagaaaagcaagtcatttcttcttggctggaatgtagagaccatgaaacaagagggggatccacaaggcagaaaggtggtctgggccagatggaggtgtttgcctcttcacttggcctcacacagcaacattctaggcacagggaagagccacaggtgcaaaagtcctggggtgggaaggagcttggtgtgtagaagaacacagaggaggtcggtgcagttggagcttgctgagcaccagagaacggatacattttaacagcagcactattgcaggtttttaagtaagtgactggcatgataatttacattttttaaagctggctctggctgatcctaggagaagaaattgaacaggctttcttcccaaaaagggaagaaagcagagggccagtaaggtactctctgtgaacatctctgtgagagattgttttccctgctgtagtgtccatcacaaggagactaaaggaagctttgctgtaacctataacttcatcaggacaaatggctttgtatcgcagtagcagctgtgtcctaggtagcctagaaggctatggttatagcactgtggcatatgctgagggagaaggaggaaacaggaagttttcagatggagctagagaccatgggcagccagggagataaaggttttcttcatggaggaaggggatattcctactgatatctttaagcatgagtaagatttcagtaggacactttggagatgccctc

SEQ ID NO: 9258 - DNA, 1050 bp, Homo sapiens
attaaaatgtcctattaccataactagcatccgggagaaacagagaatgtgaaatcaggagctcttgcttccaggtaccacaatgccaccactggtggcatgacgcttacaccaccctgagctgagccatggtccttgagggtttggttccctcatcttctatagttgctatggacccaccactcttaacatctacgatctcagcaataagaatcaagaagccaaataaccagttctcactgctaggggcttaagcagagggagtcgagccagagtcgccgcgatggtgttgttggagagcgagcagctcctgacggagctgaccagacttttccagaagtgctggacatcaggcagcatcatatcaccttgaagaagtatgacagtcgaaccaaatccattccaaagaaaggtactgtggagggctttgagcctgcagacaacaagtgtctgttaagagctaccgatgggaaaaagaagatcagcacagtggtgagctccgaggaagtgaataagtttcagatggcttattcaaacctcctgagagctaacatggatgggctgaagaagagagacaaaaagaacaaaactaagaagaccaaagcagcagcagcagcagcaacagcagcacagtaaaggacatacatttcctgctttcaccaattaaccactgaattgctattttttccttttggccacatagctaggtttctggttcccccacagtaggtgttttcacataagattagggtctttttggaaagaatagttgcagtgtttataggatagttgtggtaagaatctagtttattttgcatttggctaattggtctgtgctgcatggttatatactcctggattatagataaaaagtctccgtagacatctctgtgaagagcaagctatcattaaacatgtctgtttatcaagaaaaaaaaaagaagccaaatgatgaggtttgcaacctcaccaataataaatgaaatgcctactgaacaatgatccatttctttcacccaggggaatggcagcccattaccactgacaaca

SEQ ID NO: 9259 - DNA, 1032 bp, Homo sapiens
tgtaactcacatatcttaatctcctgcattctgaaatctccatttgcactgaggccatgcttcccatgggctgctcctagccactgacagtggcaggcctgttcctgagaatctccccacgggttcttgctgaacatttcttatactgcatggctgtctaagaggggtctacccattgttacttccctccattcagtgttagacttacactgaagtctgaggcgcttgtaacttttatcagctccctcccattttccctcacacacgcatttctcctaataaaatatttgcaggtttactcccatcttagcgtctgctttttagatgacacacagttacacagcaacaaatgcaatgtgttatatccttggattggcttctggtccagaaaatagacattagtgtgataattgacaaaaattgaatactgcctgtagattagtaaaaaatattgtgtcagtgttaatattcagattttgatcattgtaccatggttatgtacaagacgttgacatttggagaagctggggaaagggcaaatgggaattctaagcctgaaatttccaaataaaaagtttaaaaaatttaaaaattatacacaagaagaaacagttattctatcgcattttaggagcttaaaaataataaatgtttatatgtttttcaataatcctctgagatgaagtaatggatacctaaaatttgaaatattaggatttttttcctcttaaagtataagaataaaacacaaatctaggtataccatttgaggaatttttacatatgtatacacttgtctaaaccatcatacagatcaaaatatataaattttcagtaccccagcaagcttctttgtgccatctccgagtcagtaacttccagtaaggtaactttatttttacctctcatggattagttctgcttgttcttgaactttatataaatcaattttgttgtacttttttgtgtctggctttttaaaaattcagcaatattatgtctatgagattcatcaggaattagtcttaatta

SEQ ID NO: 9260 - DNA, 1035 bp, Homo sapiens
cagtttcgatattatgatgtaggaacaataacttcaatttgttgctaactgctttactgtttactgcatttttgtgatttgaaaagatgctaccttttaactaagattgatgatgaatttttttttacctaactctgtcagcatagggtgctgctgatggtattaaattaatatccataagctttcttttttgatagtaaccagaaggcctacctccttttcaatttttggacttaaaaattagatcagtagttataatgataaagggttagaaaaaagttcgggaccacaaacaaattttgtttctaacagttttatgaaagtattcccacaaactaaagctttgtgtactgaatgaagatatgatttctgaatattttcagaaatgggtttattactgaacacatttttattcgaatattttcttttatttgctgctttactgtatcacttaggaaaagtctgtccttaaactttggatttaaaatgtgatgaccaatgtgcttggctttcaagataaaattacctctgaattttcatctgcactcaacttatatcacatgcacaataattttagcatcttccctggaggagtacgatatgatctttacagcaggtatcatataaaaaatatttgcacgcttggcatatatgtttgggtatttttctttagcagctttctgcaaataaactttcatttgttcagtcagcctttttagcacataagagctgctattgtgtgtgtgtgtgtttttaatatcctgataaagtaattccaaaatcttttatatgtcataatatatatctttggctgaagaagatttatgaaagtggcctgctgtagtcctacttacagccagtaattctctacattttgttttgctacattcgctacctctacacacaactgaacaaaacatcatacgcttaaaagtcctacattacatattcatgggcttcatcatgtctattctttgtcagtgacagttacgtagcatttttttcaaatgaactttgcattctgaaaatattcag

SEQ ID NO: 9261 - DNA, 1023 bp, Homo sapiens
atcacctgaggtcaggagtttgagaccagcctggccaacatggtgaaatcccatctctactaaaaatacaaaaagtatctgggcgtggtggtacgcacccacaattccagctactcagaaggctgagacaggagaatcgcttgaacccaagaggtggaggttgcagtcagccaagattgtgccactgcattcgcctgggcgacaagagcgaaactatctcaaaaaaaaagaaaaaaagaaaaaaagaaaaatttctcatcaatagtctagaacagtattgttcagtagcactttctgtgatgatggaaatgttttatatctatgtacagtatgtacctgttagccacatgggctgttgaataaaatagtgtaactgaggaactaaattttaagttttatttaattttaattaaatttaagtagtcacataaagctagtaaccactctatggacagtacagttgtagatgtactacagaactgtaaacagtctaaattcaggggctcctatgagtaagggaaagtaaggaagaggaactgtctgggaactcagttgaagccactgttgcctaactaggaataggtaaagaatcaggtcaaaacattttttattttgaaaacaagatcattgttcattatctctagtagaagtgctgctctttatataagaaaacaacgtgcattcctttttttacttattcagtaaatacttgtctgtttatcagggactgtagagtagtccctgcttatccacagtgtatatgttccaggacccctagtggatgcttaatagtaccaaactgtggataatattgattcctgtatatactatgggtgaatttatttttccttctttataattccactgatagaagatttacttttaccatagatcttagcaatcagcgtataattttttttctttccttattgagaactttcagcttttcactaaaaggaagcactttacagcctctctttgacatatcaaaattgccagcattactactcttatgctgtggag

SEQ ID NO: 9262 - DNA, 1050 bp, Homo sapiens
tgttccatgcctgacaaaaaagacacagaatgttgttcattgcttctagataactatccctcttaatgagcatggttaagaagtcaaagtattttaggaggccttgatatttaatttctttagtcattatttatactattaaatgtgtgaacatagaatttggctgtacatcatttgctacttcaaggtagttcttcagtggtgatcagggtttcactgtgctctcagaaagtagaaatagttaatgtatttattctttcttttccttctgcctttttttacttctatccctttttctctttttcccatttcccatcttttactcccatcctcagtctgtcagtgataacaacagagataaagcatcaacacttacttctttgaaaattggtacccttggtgaagaaacctaatttcttttaaatggaacgtgtgttatctttgcctttgtatgagtttgttgttaatagatcaatagtattttgttacctagataatggaaatagaagagcagaagcaaaagcaattggaattacttgaacaaattgaacagcagaaattaagattagaaactgactgcttcagggctcagctggaagaagaaaaaagaaaaaaaactcaaccgactggggtaggatgcagaaaatctcatcactacataaatcatttggtaaggggggcaagaaaatatgagcacttgtagcgtttagaaaagtaaaatggatggctgggcgcggtggctcatgcctgtaatctcagcactttgggtggccgagacaggcagatcacttcaggtcaggagttcgagaccagcctggccaatgtggtgaaaccccatctctactaaaaatacaaaaattagctgggcatggtggcacgtgcctgtaatcccagctactccagaggttgaggcaggagaatcgcttgaacctgggaggtggaggttgcagagtgagattccatctcaaaaaaataataataataaaagtaaaatgcctttgtaattcttatttggtctttttttgatataatgtatgtatatatgaataa

SEQ ID NO: 9263 - DNA, 1341 bp, Homo sapiens
gataatcccaacatttcaggataagtctcttagttttccacagcatagcctggcacagcaagaaaatttgacaatactccaagaacagtcacaaatacaaagggtaatacttggtgctaaagaaggaactcaggaatttgtacacacagaaagtgaattggagaaaagaatttcttctgaacagactggcacctcctcatccctttcccaggtggatgaatctgagagattccaggaatgtatatcaatcaagagtgacagtaccattcccttaagccatcctaagatcccaagatgtcaggaaagacttttgagagtttcacaacatatgctacctctacaagataatttggaggaacaccaagcatggctagacactgagaaagaagcctttcatttcagccagaaaacccaagaaaatacatcttctgaacaaactggttcatcttcattcataccccagttggtacagctttcatttacttcgttagcttcagctgagtctggcacaatcctggaacctctttttacagagagtgaaagtaaaattttttcaagccaccttcagatcccacaattgcaggataggcttttgaggatatcgcaacttatccagcctcaacaagataatttgaaggcacttcaagaacagttagctacacagagagaagccatcattctagctagacaagaagctcgggaagaattacttttacatcagagtgaatgggagggaagaatatctcccgagcaggttgacacctcttccttacccctagtaccacagcattcattcgcctcattacctcttaatgaatctgaaagaaaccaagaaccatgttcaattaacagtgataatatagtatcctcaggtcactcagagataccaacattgcctgatgggctgttgggtttatcacatcttgttttacctcaacaagataatttgattgcacttgaagaacacttgcatgcacagacagatttccttccttctattgagaaaacccagaaagaattggttttgtcaaaaccatgtaaatttgaggaaaaggtatcttctgagcattttatccagtctcaccatggtgatttgcaggcacttcaacagcagttagatacacagaagaaagccattcgatctatacaggaagtccaagaagaattgcttttgcaaagattaagtgaattggagaaaagggtatcatctgaacaagtttgctcctcttcatttgtatcccaggtgcctgttgctgactctgaaagaacccagaagtctttcccaaccaaaagtaatgatactcttccctcaagtcatcgtgagattccaagattacagga

SEQ ID NO: 9264 - DNA, 1058 bp, Homo sapiens
acccagaagatggggcagctcagagactggtttcctaatacacaagacctagcaggaaatgatcaagaaaatattaggcatgcagataggaacaactctgatgataatcatttggcttcagaagatactagtgccaagcaaagtggtaagataattgtgtttgattgtaattatttcactgattattccttgttttcgtcccctgtagcttgctagttgaagaaaagttagaagtatgttaatagattttgtattgtatccaactttgtcattgacttaataggtgagcatctggagaaagatctggggagaagatcctcaaagccacctgtagcaaaagtcaaatgtggtttggacttaaaccagcatgaacttagtgctatacaagaagtagagtcaccagcaattggcagaacttctatactaggtaaatagatgctttgataaaacaagatttttaaataatttgccagttttctactttttttttagatggagccttgctctgttgcccaggctggaatgcaatggtgtgatctcagctcactgaaacctctgccttctgggttcaagcaaatctcctgcctcagcctcccgagtagctgggattacaggcgcccgccaccacacccagctaatttttgtatttttagtagagacagggtttcaccatattggccaggccggtcttgaactgctgacctcaggtgatctgcctgcttcagcctcccgacgtgctaggattacaggcgtgagctaccgcacctggtctacattttttcagagtgctaaatgttttttgttaaacttatagcagaaaaaggagatggaaaaaaaaaaaagaaacctagactgactttcatgaaaaggaaaaaatggcttatttaaacagtatttaaaatttggacttaaggaaatgtggcattggtaataactatgactatgtagtttctttatcttgtatatggggaaaacaacttattgtaggcaaaaattttttggttttccatcttctgacagtcttgctccccgtttcctttcatgtctgccttctaaat

SEQ ID NO: 9265 - DNA, 1003 bp, Homo sapiens
tagctgggactacaggcgcgtgccaccacgcccagctaatttttgtatttttagtaaagacggggtttcaccatgttggccaggatggtctcaatctcttgaccacatgttccacccgcctcggcctcccaaaatgctgggattacaggcgtgagccaccatgccctgccaagagttaggtattccttacagtctttgcattctgggcttgcttgtacccatccttcttgggacagctttctgagtattcaaagggacttcagtgttgtgatctaagtttttggtcactgcagccatgtcttcattaggggataccccaagctcagtaacactgtagttcttgcagactcatagaggtactgccttggtggtcttggataagatccagaagaattctctggactatccagcagagactcttattctttaccttcctgtctcccaaacaaatagagtcagtcagcctctctctctctctctctctgtgctgagctgcctggagctggggggaggggtgacacaagcacccctgtggccatcatctctgagactgtgctgtgtcagacctgagccagcacagtactgggtcttgcccaaggcccactgtaaccactacctgcctaccatctttgttcattcaaggccctagggctctacagtcagcaggtggtgaagccagctggtcttatgtccttgccttcagggtggcaagtggccccgggcaaatccagagatgttgtccaggagtcagtgcctggaatcgggatctttagaactctactgggtactctactgtggctaagcaggcaccaaaatcacaaacaaagtcctttccactgttccctccccttccttaggcaaaggactctctccccttgtccaccaccaccacaggcctatggagagtactatcatggtaccactgatgatcacttaaggcccagtggctcttcagttagcttgttgtgaatgctgccaggcatgggacttccttcagggcagt

SEQ ID NO: 9266 - DNA, 1024 bp, Homo sapiens
acctaaggcccatggcatatactacttggctaccactgctaggacccaagggctctttaatcagcaggtgatgaatcctgccaggactgggtccttcccttgaaggcagcaggttctcttctagcccaggatgtgtccataaatgtcatccaacagctaggtcctagtatggggacctcataagtcctcccagtgccttattcttctgtgactgagtgggtattcaatttgcaaaacaaagtcctctttattcttccccttctctccgcaagcagaaggagggggtctcttttggagctgtgagctgtgctgcctgggattaggggaggggtagcacaagcactcccttcgccaccctagctggttttcactaggtcatgtgacccctccaagtctacaagctctgagcccagcacagcactaggacttgcctagtgctgcagttgcagtctttgtggcctaaacagcctttcaagtttgtttaggactccagagcactaaatttagcccgtagtgacaagacttgccaaaactcaacttccaactgctagagtggatacttcccctctggctagggctggtctaaatgctccctccaagggcactggcagagttctacttggtgctggccacactgagttccaatgcaaagtcccagaatggctgagctctccttcccccaagcatacagattctctctccgcaccatgtggccactgcctggagatgagggaagggtggtgttggcatttcaagactgtctttgctatcctcttcagtgcctctgtcagcgatatgaagttaaaaccaggtactgtgattgctcaccggatttttggttcgtatgaaggtacttttttatatggttgctgttgtgtaatcaggaggaccagggagagaccttggggtgtatacaggagggtatctttattattgagtgcactcagacccagcagactcaacgtctaaagactgggcgcagaacaaagacagtacttggcttttatacacacttcacaaaagg

SEQ ID NO: 9267 - DNA, 1156 bp, Homo sapiens
gtaggaaagcagggaatggtgtcctgtggtgctaagaatttgatttgtcttatcccaactatatttttctcccatcttgaactccaaaatccatttttcagttaagctgaaggaatctgttgttgaaaatcatgcagtgttaagttatgctgtggaggaagaacatgcatatttgggtccaactgtgaagccagatgataaggttagtaatgtcttaatgttcactcgatttttagagctgtttggcttcgtattctcttttgtttagtttacagaagctatgttataacattaaagtcagtgctttctgagatctgcttttagtgaagtggatcaatgatgaaactagccaaatctgagcatcagaagtctttccagtctacctgatgcatgatctctacagttctgagaagcaaaactataaaacaatgtaaaacaataagggcatatgtctggtgtgtgtgtgtgtgtgtgtgtgtgtgtgtgtgtgtacgcacatgtgtttataaagataacagctgtaggaatgaatgagattgagggtgggggggtgcgtatgtatgtctatgaaagcctaatcatttctgggcaatgatgaaaaggttttactactgatctttgtaactatgatggtttctacacttgacctgagctcagaagtgacaactgctggggttggtgatttggggttttcttacatactacttgctacattgtggtatgatattccccttaatttctaggctaaaacactgtcttatgaaccattatcttcagcaactgtttccactgggagccttttaagttatgaaaacacagatttgagccttacagatccaggtaataaggtcaaaatgtttataaataagttgaaagaccggcaccagttgagttgcaatacagtgatggaaggaagcattgggttttcatgatacaccatggggaactatttctctaaatctcacaagtaaagtatggccaggcgtggtgcctcacgcctgtaatcccagcaccttgaggtgggaggatcgcttgagcccaaaagtttgagaccatcctgggcaacgtggtagaaccctatctctacaaaaaaatacaaaagttagccaggtgtggtggtaagtgcctgtagtcccagctactcaggaggctgagg

SEQ ID NO: 9268 - DNA, 1034 bp, Homo sapiens
gcattttcttttaatccccactccaatttatgcctgtctccaagactggcagaactaatcttatacacctagtgttatagtgccaagttggaagttttacctaaacttattcccagatattgaaaaatgacttcagaacaactggtaattttactaggggagtagggaggcaataagaataaagctatctaaacagaggcctagaggtgtgagggcagtggagcctaagcccagttcaagaccagcctgggcaacaaggcaaaacccaatccctacaaaaaatacaaaaatcaggcatggtggcgggtctctgtagacccagctaagattgaggctgcagtgaggtgtgatcatgccgctgcactctaatctgacagcagagcaagacccgcttaaagcgtttaaaaagagtaaaacatgcaactttcttgccattaggtgagtgagtttctgcctcttgtatcagcaacagaagcctcagattatccagctgtatcagaactttccatagaaaaaccaaggacagcatctacaggtaagccttggacggcctccacacttctaatggaaagtagatactttgcctatttctgtcataaatttcttttcccccagcagaaacccctcgcaggcttacacctgtaccagggagcttacaagaagcatttataaagaggaaaaaatcatttatggagagatcccaccagaggcagaaagaaataaggaataaaattcatgtctctgaaaattctcaaatcaaaacagttaaagagaaaccatctataagtatgttgaatttttaaaatcttcaaccaactccctgaaatgtttaaagccttgtgtttacaacttgatttcacttttctttcctcaggttcatctgtgagtcgtctaaagggcgtgaataaagtcagagcatcttttcctgaagacagaaagactacacaggctctaaggcaccaaaggggtctaaggtagggttaattttttttttttttttagtgattcactttttgcagtgtttgtctctaatt

SEQ ID NO: 9269 - DNA, 1062 bp, Homo sapiens
atgcccgcgacccctgaagacccacagcctgtcttacaacctgtcatggttgtgaaaagttttgagagaacgtctgcacagtgtctaacggtgtctggtatatagtgtgcactcaaatggtaaccagtttagttgcgatagttggtctacccctccaggtgttaacctctgcagctccgtttcccttctagaccctatttctgggccatcgactcccaccaattaggcaggaaaatactgtttgcctccatctggcccaaggctgtattcctggagtttatgtgagaacctaactcctttctcagctccaactgtaaccctctccccacctccaacacacacataaacactcacatacacatgctaccacactgcctgctgtgccatcagcctgcctgaagttcacatcattttagaattggacgggccttcataatttaaattttattatgaaaaagtgatagtctaaggaactcatttgatttttttgtctaaatgtcaaatatagagtagaacgcacaagtgtctgttatagaaatacttgagagtcctatatgcactgttatccacaaccatttaagcacttatccactaatccctaataagtacccctaataagtacatttctaaaccagttattcaagctacatcctcccaagattggactttgtttctactttggtagggacataaataaacggaaacaactgacctaactttttactaaagagataataaagggaataaaattaagattacatttggattttaacttgtgttcttattcctactgccagcaaaaatatgtaaagtgtttttatcattataaatgaatatactattcattgtgcagattttgacatgttcataaataagttagtacccaatgtttgcttgataaagaatgtgataaaatgttaacatttgggaaatctgggtgaagaatgtataggaattatttgtatgtaatatttgtcaatctgaaattatttaaaagaaaaagttaaactgtctcattcctgaacaattataaattattcaacccaaaactgaagggggcct

SEQ ID NO: 9270 - DNA, 1034 bp, Homo sapiens
cctggcctcactcgatgctcctgcctcggccacccaaagtgttgggattacaggcatgagccaccatgcttggccagattttttctttgattgcttttctagaatctgttttcacttttgtgtttgtttctattttccttctatatgtgcaggatatattcagaaaaagtagaaattttatggcctggcacagtggctcatgcctgtaatctcaatactttaggaggccaaggtggacagatcacttgaggtcaggagttcaagaccagcctggccaacatggcaaaaccccatctctactaaaaatacaaaaattagctgagtgtggtggtgtgtgccagtaattcccgctattcaggagtctgagctacaagaatcacttgaacctgggaggcagaagttacgttgagccaagatcgcgccactgtacttcgacctgggcaacaacacgagactcagtctcaaaaaaaaaaaaaagaaagaaagaaattggcaaggtgcggtggctcatgcctgtaatcccggcactttgggaggctgaggcaggcagatcacgaggtcaggagttcaagaccagcctggccaacatggtgaaaccctgtctctactaaaaatagaaaaaatagctgggtgtggtggcgggcgcctgtaaccccagctactcgggaggctgaggcaggagaatggcgtgaacctgggaagcagaggttgcagtaagccgagattgcgccattgtactccagcctgggtgacagggtgagactccatctcaaaaaaaaaaaaaaaaaaagacattttgtaagaacttttgatccttaaaagtacataggctgatgcagtggctcatgcctataattccagcattttgggaggccaaggtgagcagatctcttaagcccaggagtttgagagccacctgggcaacaagccaaaaccccatttttacagaaaatacaaaaattagccaatcatggtggcatccacctgtagtcccagctactggggagtttgaggtgggaggattacttgagcct

SEQ ID NO: 9271 - DNA, 1123 bp, Homo sapiens
gcgtggtggtgggcacctgtagtcccagctactcagaaggctgaggcaggagaattgcttgagcctgggaggcgggggttgcagtgagctgagatcgcgccactgcactccagcctgggcgacagagcgagattccatcccaaaaaaaaaaaaaaaaagaatgtaatactttaaaggttaccaaatcttaacaaattcttatagcctgggtccttggtctgtgatatattacacaaaaatgtgatgatataatggctttggaatcaggtagacctggattcgaatcctgcctctgccttcattaactgtgtgaccttaaattaagcaagttattttctcttaagtccctgtttttccatctaatccttccttccctttttttttaagggatggattagaaaagttaggcgaaattatggagcatattgagagctgggtagaattgctgctatttcataaacagtgtattcaatttttgaacatttgaagatgaaagagaagtagcaggaagatgagttggtgaatagtctgaaatcattgaggctacttgggtccttaaggaaaacaagtgtcaagaccataaccaaattagtcatggagaagaagtaatgactgttagaacccatttgtaaataaaattaattgaatagaattactcacatagtaatagtttcagaatctagaaacattgtgctgggggactaatagagttccctaaatctgcattcttcattttatagagagaaaactaaagcttaaagagatttgtaatatgttcaagttgctgtcaagccagtagttagggagccaagactagaactccagcacctaactcatagccccactgccttttctactattctgtgcttttcccagaagggagtctccaggaatttcttaatatctccaggaactcttttatttacgttccctaatacaatcaaaagattattttgatatgtttatgaagctttttatgtgatttttgactctcatacagccagaaaactgtattaaactggttagtaaaatacacaaattatggtgattgtggatatttatatatgcatatgtgatacatagatagtgacttctgatcagttttccaaaaaattaggattca

SEQ ID NO: 9272 - DNA, 1050 bp, Homo sapiens
ggttttgccatgttggccaggctggtctcaaactcctaacctcagatgatctgcctgcctcggctaacctcagatgatccgcctgcctcggcctcccaaagcgctgggattacaggcgtgagccaccgcacccggccgaggagaagtattttattaagcaccttctacgagtgggcactttaataggcacttgtatgagtattacatagcttaaatttacatttgaagcgcttatggttttagtgtgatctttgtttctgatatctgctctgactactttaaaaatacagtcatgtgttgcataatgacagggacaggttctgagaaatgtgttgttaagaggatttcatcgtatgataatagagtgcacttacacagccctagatggtacagcctactacatgcacatctaggcttcatggcatagcctgttgctcctaggctacaaacctgtacagcatgttactgtactgaatactataggcagttgtaacacaacaaaagcagttgactgaaatgttacgcagctcatgactgtatttgaaagagtgggtagttagaaatatttcctcacaggatcacagcttgtgaatctgcaagcttggtcattgctggatcttgattgctaggaatttcaaaatacccttttcctctttcccaaataatagttaaaacctcattaaaacctgaaattcttaattcagaataatctttccttcatccctttcagtcctgattttaagtggttgaggtttctttacatattaggcatgtattaacaattcattgaatgattgccttatcaaatgaatgtattgaaaaaaataggtgagtgtactaggcgtggtggctcacgcctgtaatcccagcactttgggaggctgaggtgggaggattgcttgagcccaggagtttgagaccagccctggcaacatagagagaccttgtctttaaccgcctcccaaaaaaagctttgtgtttttcagtgctgcatgtggaaacaaacaaaaagatgatttcctgaaattatagaggacatttgacattcct

SEQ ID NO: 9273 - DNA, 1057 bp, Homo sapiens
ctgaaagattttttatccagatgtattttacatttaagggtaagggaactttgagggatctagcctaaaggttataggaccagttactgaccaacacatcagagctcagatcttcagacttctagcccattgctcttctagtcaaggaaggggaaatctggaaacagtataggtagccaaaccttaagttacctggtattaatgagagattaagaaaccctctttctggcagtggaagactgcttgtttgaatggaggtttatctaagtttctcagcagagctcttgccagattcacaaggctggggacagaaattgaagtcaggacctgccacgttggaaggacccttattaacactccttggcatttggttgggactctgaaaggctgttccttgagaataaggggcgatccagaattaatctagctcccatagggacaagagtcctgatttaaatcattgcaatagcagttgaatgacagagatcggggattacgagtgtctggtctacttgcctgccagaagtaaaaataaatcctttctggaggattttctgggtgtgattatcattcatctttttttaaaaaaaattatttttctcgtttttttttttccttttttttaattatactttaagttttagggtacatgtgcacaacatgcaggtttgttacatatgtatacttgtgccatgttggtgtgctgcacccattaactcgtcatttaacattaggtatacctcctaatgctatccctccccactccccccacccaaaaacaagccccagtgtgtgatgttccccttcctgtgtccatgtgttgtcgttgttcaattcccaactatgagcaagaacatgcggtgtttggtttttttgtccttgcgatactttgctgagaatgatggtttccagcttcatccatgtccctacaaaggacatgaactcatccttttttatggctgcatagtattccatggtgtatatgtgccacattttcttaatccagtctatcattgttggacatttgggttggttccaagtctttgctattgtgaat

SEQ ID NO: 9274 - DNA, 1048 bp, Homo sapiens
ttcaggagcatattaatttccatgtgtttagtttccaaagtttctcttgtcattgatttctgaccttgtggtcagaaaagatacttttatgatttcaattattttgaatttttcgagacttgttttgtggcctaacatgtggtctatctgtgagaatgttccatttgctaaagagcagaatgttctgcagctattgcatgaaatgttctgtaaatgtctgttaggtatatttggcctacagtgtagcttgagcctgatatttctttattttttgtctagatgatctgctcaatactgaaagtcgggcgtgaagttcccgactattattatattgggctttatccctctttagctctaataatattttctttatatatctgagtgctccagcattgggtgcttatatatttacaattgttacaccctcttagtgaattgatcccgttatcattatataatgacttactttttatctttttacagtttctgtattgagatttattttatctgatacatgtatagctattcccgctcttttttggtttctgtttgcatggaatatatttttcagcccttcattttcagcctatatgtgtcttataggtgaagtgagtttctggtcagcagcgtttggttgggtcttggttttttatccagtgagccattctttctcttgattgaagaatttagttcatttacattcaatgtgattattgataggtaaggacttactactgcaattttgttatttgttttctggttgttttgttagtttctctttttttcctttttctctgtcttcctttgtgtataaatgatttttttggtagtatgttttaatttcttgctttttatttttatttattttttttaattttttaattttattattattatactttaagttttagggtacatgtgcacaacgtgcaggtttgttactaatgagcaaaataaccagctaacatcataatgacaggatcaaattcacacataacaatattaactttaaatgtaaatgggctaaatgctccaattaaaaattctc

SEQ ID NO: 9275 - DNA, 1050 bp, Homo sapiens
caagtaacatattagtgacttgaatcttcataagttaaagtaaaaaacagcaaaaaacctagatctttgtcttttagaacacagaccattttcaggaaagcagttagctaagtgtttaattcatgaatattgtatactgcatcccctaccacaatttacacaatcctgtggatagtcctacctcaccctggtcaacctacatgatccttaagctaatggcgaatcacgatgaccttgtagacatgcacacaactatacctttgtccaacagatcataatatatctgctatccaactggttttacctgcctaatcctactgatttgggcactgcttgtatagtctctcaagttcacaggaaatgttgattttctaaggtcctcatttttacagagtatacaggcaaagtgacaggggaaaaggaattagtctaagagtaaggggatgattattatattgaggctaaaaccacaaagtggctcaggctttaaaaaaaaaacactgtggataatgacaaaaagcataagtaaaaatatttgagaaaaataaagtacaagttttgaacaacacaaaaggcatgaattcattttttacctgtgtatgtctttcttggatccagaacattattcatccagcacgcacttagttatttaacatctactcactcagtctctccagcagcaattttgcattgtctatctagcccccctgtgattgttcccaaagttttgtcttctcaacaccacaacactccaggggaagggaactaaaccagttgctctttacttcagttaaatttttaagatgtccaccaaggcttatctctttcaagccatcctacgtaacccagtcaccctagactaagtaataatgttatttaatcaaagattaaatatttatttttgcttagaacttattagatcatctcagaaaagtcagagataatatatgaactgaatcatcgtgacaacaggatcttgagagttagtgctttagtttatgttgtgatctcttcctagggagatgctttgtggcagaggttgctttctgt

SEQ ID NO: 9276 - DNA, 1097 bp, Homo sapiens
gtgtccccaagggttattctctccatgacagggcagctctctggatcagactgccttgttttcatgctattcaggtcaaagacggagctgtcatttctcccttggaaagagtcatggtggttttttggtgcttttcttagacacacagcaggaaaaatgccttttacagcagttgatgagcttgtcaagcagccattctttcgggagcacagatgagcacaggttcactcctggccggaatataagaagaagcagagcaaagttaaaagaaaattatttctctactcacaatacttctttttttttttttttttttttttttgtgacggtgtctcgctctgtcgcccagatgggagtgcaatggcatgatctcggcttactgcaacctctgtctcctgggttcaacctattctcctgcctcagcctcccaactagctgggattacaggtgcccgccaccatgcccagctaatttttggaaatttagtagagacagggttttgccatgttagccaggctggtctcgaactcctgacctctggtgatctgccctcttctgtcggcctcccaaagtgctaggattacaggcgtgagccactgtgcctggcctgtactcacaatacttctgacacccaatgtgtgggttttccacaccaagtaattcttaaatattttgcagccaccaaccagatgtcctagaatttaattaaattttaccactacccagagttagcacaggccctataggttaagagctcagtcctgcaagactatctaccacttcagatatcaacggcaagtggtgggtccacatattacccacacttatgtctaacttggctacaaatcagggcttcctacaaccttcttttggtttctataatttactttaatagcttagagaactcagggaagcactatgcttatgtttaccaggttattttaaaggatataaatgaacagctggatgaggagatgcaaaaggtgaagtctggaagggtccaaagcacaggagcttctgtccttttagagttggggtgcaccaccctcctggcacatggataggttcactaagtcagaaactctccatacctcctc

SEQ ID NO: 9277 - DNA, 1051 bp, Homo sapiens
gtctgaaatcctcagaaccatggaacatgatgatgtaactctcagcccaaggccaaaggcctgagaacctgggtaaccactggtgcgagtactggagttcaaaacccaaacaacctggagttctgatgtccaagggcagaagaagagcgtcccagctcttgaagagacagcaaggatttgcctttcctcagcccttttggttccatccaggcccccggccaattggatggtgcctatccacattgaaggcagatcttccccactcagtctacctactcaaatgccagcctcttctggaaacaccctcacagacacacccagaaataatgcattgtcatctctctaggtatccctgaattcagtcatgtcgacacctaaaactaaccatcacagggatggtagcagctcctcatagtgactagccccagggtgcttcatcatcatttgctgttttcctttaacccttttgtaaatagttgcttcattagactgtcttcagtcactccttttgcacataccatctatttcctgataggacgctgactgatacaatggggataataatagtactgaccgcagcccatggtggtgaggattaaatgcattatgtgagaaatgcctgattgtagtaaccaccattaaatgtctttctgtctgatacctccaagtatggtcaaagctttctgaaagatttggcatataagttaaataatactgtcacttatctcctcttccctatcctgtttcagaaggatgggttgagattcaagacttttgaacaaatctgttctaagacaaatgtaaagtttcctccctctcatttttatggggatgaaaaaggagacaggaaccaggctagattcacctactgtgtcaggcactttgtactttatacatataaccattgtactcagcttatggcttgggtcatgttacccacagtggtacccccaaatataacaatttccaagcatttgcctgcccatcttactaagaaatggagtctttttaaaggccaccctgcagttttatggtccaggaatccttaggt

SEQ ID NO: 9278 - DNA, 1056 bp, Homo sapiens
tgtgccaggaactgggctaggtgtgggatatatatcctttgctccccatggaattcatattctataaaaggaatgtaatgtattaagatgttagaaaacaaaagacaaatgaactgggttcgttctgctctaagaagagaagaaaggattcataactgtctttcaagtatttattttattttcactttgaaatgagcttaaatcacagatatcatgacttctacaagcttagaagagttctctcctggggagggtggataaatacagattaggaggatatggagggcaaagaggcaaccaaagaattaatagaagtgtgggggtatcttactagaaatctgcttaaattgagaaaatatgatgtaatgtcctgcctgatggtgggaagaggaccctaataggctaactgtggtgtgccctttggatatctttttttgatttcagtaattatctatggagcttaatggttaagactccagaactggaaacctgtattcacacccaaactgtgccactcactagctttataatcttggctaaattacttaacctctctgtcaagtagaatttcctcatgtgatatatagggatcttaattacacctacctcaaaaaattgttaggagaaatacatgctgggtataagagcaatatctgacacattggaagagttaagtgttagttatcatggttgttgcagttactattgcaacattttattatgcttatagattctatgggtctggacttcaggcaaggcactgtaggatgccctgtctctgctccatcattcctgggacttctggggcaagaagactgagagcgcatgagtggtttgtgactggattcacatgtctggcacctgggctgggatgacttgaaggctaggtctgcagaccagagtgtcaacaagttgcctttccacatggcttggcttccttataggatcgggctagttagaatcttatatggtggcttagggttccaggtgtgagtattcccagaaattggatggaaactgcattgccttttatgatttaattttggaagtcacgta

SEQ ID NO: 9279 - DNA, 1190 bp, Homo sapiens
ttttttatggtgaccagcaccccgggatgctccacgagatggtcaagccctaccctgctcctcagcctgtgagaacagatgtggccgtcctgcggtaccagccaccccctgagtatggggtaacgaggtgattatcaactgcagacgtttcgtgcggcttttcaaaattcaatagtcatgttattagcatttattattttcagagcagattaggtttttgtcatcaggcttttttccttatgcatgatatttaataaaccactttgtggccagaatatatagggtgaaatagagtagagggcaactgagggattttctccaaacatagcagcaggcagttggggatttatgagtttaggggagggacctcacttgttagctgtccttgggagctctgcctagtggcctggcaaagtagcaattttccaatggctttgtggagaccgtccaaactcctggaacatattattaccagagggttttatagtcttttttcattgtagattttaaaggaaaatgtagtctgaatgctagaatggaggagttaaagggactgtagaaatcacatagtcccatccctcactcaacagatgagaaactaaagcctggagagattaatgaatttcatagacacaactctgaggcagctgggggctacactcaagtatcctgactgccaaaatctattcactcccttgccctaattcttcctacagccttcacttgtattcttccagttgattgatggattcagcagcacctactgagtgtatgctgtactctgaagccctgttcctggttcagagatggggtccctgcccttcaggaccctatagcattgtcttggaggaaaccagcatctgaacagatcattgccattcaatgtgctgttctaggagagaaatgggccgaggatgctagggtaacaggtaggatagtataactcacaactggaggggctggagagagcttcccagaggaggtgacatttgagttggaacttgaaggataaatcagagttgtagggtagagatgaagtagcagtatgtgctgtgtgagggagtgccgtgtcttcagacaaagaggtcatgaggatttttgtctggaatgagtggcaataatgcagagcactggtgggcaagggtgtggtaagaagtgacaggagatatgtttggacagggaagttggga

SEQ ID NO: 9280 - DNA, 1022 bp, Homo sapiens
aaagcgtaggagtgtaaaccccatctgactacaagaatgttgtcactttggctctatgtgacaattaatgctccggctggccgatttagtgttagtgttcatgagttagtggtgatttcacaggtcaagctggtcattttgctggccaagggttttagagtagtaggctctacttgcttcctgagggttgtcagggagcagtggatttgatggtgcatgtgtttacagacaatttgtcccagcacgtttgtgcagagcttccactgaaaaggtctggagctccctggagtcaagaccagacttggctgagggagctctggctgcctttattggaggggaaaaatgagagccagaaacagacaggggccgcctaaagattgtggcctcactcccaccccctcttgcacccttagaagttgggaaataggcatgttgtctcacagccctcagcctataagatgctgcacaggcccaagcttgcctctgtcatttttgggcagcttcttttaggtatggtctgaaaattgggaagtgcagactcagcacttcttgggaaacaaggacctctttcttctctcctaatgaagcttcaaggcagacatgtccagaagctatacagacccacttgaaggcagagtttggtgctggggtttttcccatggctgtttctgaagagttacacaaatggtgcagaaattggaggccttgttatttttcattgcctttttattaacatgtactttttttttttttttaagatggagtctcactccattgccaggttggagtgcagtggcgcgatctcggctcactgcaatctccgcttcccaggttcaagcgattctcctgcctcagcctcctgagtagctgagactacagttgcgcaccaccacacctggctaatttttttttttgtattttagtagagacggggtttcaccatgttggccaggatggttttgatctcctgacctcgtgatccgcccacctcggcctcccaaagtgctaggattaaacatgta

SEQ ID NO: 9281 - DNA, 1050 bp, Homo sapiens
tagatctttagagtcctacgaagatagaagggtttcgacgcaccgtgaagagagcttagtcactatgaagaggtccagtaggaaaaatgagacagacacacatcagccactggacctagagtgcaaggcagaatgtggcaaggacctgttagagaaccacactcaaaagaacccccacctcaaaaaaaaagtgggttgggggagaagcctatagcctttagggtgggccttgaaaagtcattaacagtttagaagaattttgctgcacagcactgtgtcaacagggacattcctattcttttacatttaggcaacagagtttgaataaatgcattgcactttaggctttacctcattttcccatattatccatctctccagaagatttcttccccacattttaacagcagccatttccacaaatcttggtctctttggtaatgactaaactagtagctttcaaactcagaactcttgttcagatagtgtggaagcataatatgtaaaatgaaggacagctgaagaaatttctggctgagatgggttcatcttcagaactcctctccttcccacttggccccaatgtcccttctctcccttccctcccttccctgtccctctcccagggttctgcagaacagtttggtttgaattccccttcttaattttccttattacataactcatttaaaaacactccactctctctgccatttaaaaccagccctcgctggagtgttcctgtttgtgaatagacccaccttaaccacccacttgcagcctatgtatccagctgcctggcagaaccctggtaatctgcaccagagctcagggacagcagaaagctgaagaccctttccccaaataacaagcctccttacccaagaaaccatcagcaaattttaaaaagacaacaaaaaatcaaaccagcatcttctaaggtcagcgttgtatcatattgcttttctgtttgtgaattaatgtgtggctttaaaaagtagatcgtgtttcatgttgttttgcatcaaataagcctcatgtgaatagatc

SEQ ID NO: 9282 - DNA, 1034 bp, Homo sapiens
aagctttggttgtggcttctattcttgagctcagactatcattttattacttctggtcaacattagtgtatacttggtggccctcaacaaagagaagaacttttatgcttaggttgataaccaggcagaagctctgagatcctgtggttcatctccaggatgcctgcttagtaatacctgagtgccctccagagcttggagaaggccagcagccactatgcccattgagatgttgtccaaacctagggttaggtggtcaaatatcagtgactttgcacagaaagagtgaggtgctttgatcccttcagggctgtggatggggacgggcagcgctagtgggctgctactgaccccttagtttaggtctctcacatgcctgttgttgctgaggtctcacatgcccgtggattgggaaggaagtttcagaggcaccatttcaaatgctgcagaaaggaagaaggggcagtgcagtgggtcactgcagtggggcataaagagcccagaagtagtgctgtgctctgagtcaggatcttggtggcctcatcttgttttcagggatgccattgtttctaggaagcacagccaccacttagctttacaagtcagctccttcagtctatcgattcagaagctgttccattgccctctgatcccatcgacataattcgacaatgcaagggttgtgcagtcaagaaggaaggacattgtactgggacatcaggaagaccagattctggccctgtctctgtccccactggctgggagaccctggacaagtgcctttgttcctcagggctttcctcttctcagcaatgaagcaaaagagggagaactggatgttgatgtttcctgtgatcctttctggctctaaagttgtgagtttatctgatatttgcagccttacagtgtcattttaatttccatgccctgtatttaaaaccacatttttctgccctgttagtgtgctgcattctttctattacttcagaacacatagtgctggtcctaaataattattcgttaaattaacgaat

SEQ ID NO: 9283 - DNA, 1035 bp, Homo sapiens
atagcaggattatttatcataggcaaatgtgagaacaacccaaatgtctctcaacagacgataaacaaaatgtggtatattcatgcagtggaatacgattcagcagctaaaatgaatgaagtagtgacacacggattgatgaaccttgaaaacagtcttctaagtgaaagaaactggtcataaagtgctgcatattatatgatttaacttatataaaatgtctaggataggcaaatctacaaggagagaaaataaagtagtggttgcctgaggctgagggaagtgaggtgttactgctagtgactacagggtttctttggggagtgacagaaatgctctaaaattaaattctagtgagttttgcacaactctgtgaatatactaaaaacttgatgccttctctgatgaattctacccaacatttaaaaaagagttaataccaatccttcacaaactcttccaaaaaatgaataaggtgggaacatttcccaactcatcccatgaggctagtattaccctgatgccaaaaccagaccaagacatcacaagaaaaaaaaaaaacggcagaacaatatcgctttggaatatggaggcaaaaatcctcaacaaaatactaggaaactaaattcagcaacctttaagaaggattatataccatgactaactgaggtttattctaggaatgcgaggttgttcaaaattcaaaagcaatcaatgtaataaaccatatcagtagaacaaaagacaaaaacagcatgatcatctaaatacatgtagaaaaagcatttgacaaaatctagcaccctttcatgaaaaatacactaaacaaaatcagaatagaagggaaacttcctcaacctgtaagaactacgaaaaaaaaaaaagtccacagctaacattgtacttatgatgaaagaataaatgctttttccctaagattatggacaagacaagaatgatagatcttgccacatctcttcaatattgtattctagccagggcaatcaggcaagaatgagaaataaaagacatcca

SEQ ID NO: 9284 - DNA, 1023 bp, Homo sapiens
gatagtaaaatccatggatgctcaagtctcctataaaatggtgtggtatttgcgtataacctacacccaatctcatatactataaattatctctagattacttataacacctaatgcaatgtaaatgttatgtaaatagttgctgtactatattgtttggagaataatgtcaagagtaagaatctgtgtatgtttagtacagattcaaccatccttttttgttttttctcgtatattttcaatccacagttgatcaaatccatggatgcaaaacacacagatacagagggcttaccgtgtatgctttctaccctcagtcagctttcagttctcattggagagaattagacttaaatatttgagcaatcatacaacagtatttgagaagatgtctcagtaattaattcttgtgtgtgataggtctcttatttcagtggttataatttttcattttcatttgggtctttttccatccacttagttttgttctttgaatgtactgttactctgtggtttttataccttccttctatctctttgaacgctataaacaattctcaattttttttaattatttgatgttttcaaagtgttaatcctcgtttgtttggctttatttattgattctcccttatggtatctttttttttatgggaacttaataaagaaaagttatatggtggtctcattttttcatttattgtgttaattccacaataaattcctcagttgtgtgggcagccttgtgagccagttgtgaatttgcctttggttaggcttgatggttttcactggttctggctgggcagggtggcttacacctgtaatgccagcacttaggaggccaagccagacagatcacttgagtgcaggagttcgagaccagccggggcaatagagcgagacccagtttctacaaacaataaataaataaaatcactggttctgttccagatttatgttactatattggcttgatattgttgatcattgtggattatacattgcctaaagttttatatt

SEQ ID NO: 9285 - DNA, 1055 bp, Homo sapiens
gggggacttctggaaacttaacacttatggtggaaggggaagcatacatattcttcttcacatggtggcaagagagggaagtgcagagcaaggtggggaaaagcccctattaaaaccatcagatctcatgagaattcactatgatgagaacagcatggggaaccaccacgatgatctaatcaccttccatgagatccctcccccaaaatgtggggattacaatttggattacaattcaagatgagatttggttggagacacagaggtagaccacatcaataatcatatattattattatgtctgctgtgtttatctaacatttctgtgatttttgggctggagaaaggggtcagtttaataagacaactttaagatgttttgactaatatatgtcttggagacaactattaggcatatgtaatagatgtcaagagctgttaatatccactaggatgtggctagaagggaattagttcacacaaattcctaaattattgctttatattaatttgtcatattcaaatttctattaatatggtacctattgctgtagccttattttgaagacacagtttacaagttcaggcactttttaccaataatagtccttgagttagtatatttgaaattatcctagtataatggtttacgggtggattacttgaggtcgggtttgagagcagcctggccaacatggtgaaaccccatctctactaaaaatacaaaaattagctgggcgtggtggcaggcgcctataatcccagctactcaggaggctcaggcaggagaattacttgaacccaggaggcagaggttgcagtgagctgagatgatgccaccgcactccagcctgggtgacagagcaagaccccatctcaaaaaaaaaacaaagtctatataggaggcaatctttataaatctttgactctaaacttcaaaaaaaaaagtttagggccaggtacggtggctcacgcctgtaatctcagcactttgggaggctgaggcgggtggcttacggggtcaggagagcgagaccatcctggctaacacgatg

SEQ ID NO: 9286 - DNA, 1050 bp, Homo sapiens
acactttaattcaaatattaaatgatgacactaagtgtatcatagataaatatctacaggagatacttctttactgaagacatttgttcattgagaattggtaagtggattaagaaagaagacacttttagtcacttagcatattcatctaagaaacatctttcaaatactgaatatatttaatattctttatgaataagctttaacttctttgatgaatttaaattggagtttatccaagtaagtttttttaaaagcacctgcgaaattctgtttccaaaggaataagtcatacattaaatatgtgaaatatatttatgttgctaatcattttatatcagccaacaatgtagtactaccagatgcagtggtgacatcacactcaagggttttcaaccagagagaaacatgattcatatatttaagagattactgtagtgactaggggtagggtaatgggatcaaggcagagaggctgagagatcagctatagatgtatcagaggtggtcagcaagacagtagttgggtttgggcagaggtaaacagatttgaggtatgttttggaagtaaaaaaaatattggggttacttgctgctgggtatcatgtagaaggagagggagttaggatggtgattccactgactaaaatggagaaagctgagaagttcagagagcagaacagttttgttgactgttgattggtagccatatgatagacacacagtgccaagtgctctgagtatatcttctcatttaattttcacaaaaggcttctgaggtgggtatattctcatattatagatgaggtagatgctaagccacattttctgggaagtatgcatatatcctcagtgaaattaaataacttgcccaagtaccagcttactgggaaatggcagagctgggatgaaactagccttttcaactctaaaactttggctgttttttcaaagttcatgtatgaaaaagaaatacaagcaaattattcctgtaggagtaaggagtaatggtctaatttgttgcttatactaattagacttattctattg

SEQ ID NO: 9287 - DNA, 1054 bp, Homo sapiens
tattttttgtagagtcgaggttttcaccttgaggttgtccaggctggtctcatcaaacccctgggttcaagcgatctgcctgcctccacctcccaaagtgctgagattacaggtgtgagccaccatatccagtgccacaagattttaagtgttctaaccacacacacaaaagtgataagtttatggggtaatgatcatattagcatgatttagccattccacaatgtatcaaatatatataacatcatgttatgtctatcaaaacattatattatacaccataaatacatacaacttttatttgtcaataaaaaataaaaaaagaaataaatagcaagagttatactcactgaattgaattgtttgggtggggacagcattatcagcattccttctccaccctagcctgcagcatcttggctatcctttcttccttatttcagtcttctagttcccttaagctgcaaatggactgctgtttggtttgctttttggaaaatgtttctaaacttgtatgtttagtattgatcaaaggaaaaaaaagataatggactcttgtatacatttaattatttattgtgataattaaatatacacaagcatggaactataattctatgcttataacattcatgcaatcttaaaagcaaatcagtttacaaagtaaataaaaacaatattgtgaaaccagtacaaaacttgtcagcaacatttagttaatctaatggatgatgttattgtgctgaagctcattttcttctcagagattgctgataatatctagtgtgttgttgatgattcattttctcacacttttcccagttgcaacctgcagttcttgagaatcttcttgccctgatgaaggccttccttccatcagaagctttatttgtttattactcggtcatgttgcctttgttctggtagcagttgttcctggcactagtgatccatgacccaaatgaagatggcaccgattatgttgatgatgtggacaatgcagtcagttaaggcattagccagaggagagcacagtttcttaaaggtgtctacc

SEQ ID NO: 9288 - DNA, 1032 bp, Homo sapiens
ttctgtggaatagttaagtaactttttttttttttttttttttgagatggagtcttgctctgtcaccatgctggagtgtagtggtgcgatctcggctcactgcaacctctgcatcccgggttcaggcaattctcctgcctcagcctcccacgtagctgggactacaggcgcgtgccaccacgcccagagttagctgactttttaaggacctttccttatctgagattttgtgattttgtaaataaaatggttttcattgtatcttgtctggatgatttgattacttccctgtttctctccctagcaagttagctccataagagtaggcaccaaatctttgggactcaggagatggacacatgatatatttttagtaagtgctcattacatgactgagcttacaggaagttgtgtcagactagtgtttggagaggctgaagtctacaggtggtcattaaccacttcatattggaaccacttctgaaactttgtatgtgaagacaaatatcattgtgacaactcttttagaatgttatgtagacttaccagaaagaggttgattagagtaggcttattcagggaattgatatttgtattaaataattaattttctcttcagcaatgacaattatatatagtaactcagattcaagggatattgctaaaatgtacaaatgatttatatttcctgtttgtaacaaagctttgcattttcaagatgtcatttcaaagggttgattttaattttatgggaatgccttctttaaagatgccatttatattttttaacagctttcttaagatataattcactgccataaaatttacccttttaagaatccactggtttttaatatattcagagttgtacaaccattactgctatctaatcttagaatatttctatcacccccaaagaaactctatccccattagctgtcactcctcattccccatcttccctagcccctggaaactgttaccaatatactttctgtttctacataattgcctgttctggatttttcatat

SEQ ID NO: 9289 - DNA, 1127 bp, Homo sapiens
tgatatgtaggtttagtaactgagagcaaataagtaacatgtctttccagtcattgtttacctctttaaaaattaatagtaattataattatgatagtttatcaagctcttactatgtgctgtgatgaactctacatgcatgatttcatttgctcagcacaatgatcttatgaaataagtatattaatattattcccattttatagataggtaaattgaaacttgcagagcttaagtaacctaacttggccacctagcaaaacagaatttaactagtagtgagtctgacaccaatatcctcactcttaatatttttttaattagatctatttgtgttagaaggttatgcaaagaaatagaagcccatgacagccttttctttaatgatttatatttgtgaaaaattttagtgtttttttgtttgtttgtttgttttttaactgaatgctcactccatcaagcttgaatagaccaccaggatcatttttatagtggatgttttataaggcaatgttgagattgtaggttagcaggtaaaaatgtccggactgcttttgtcagcagccaggtgtcccccactcacccccatcaccctgcagcttgctaacagatcttaaatgaaagaaccttctggccattctctctggctcctcacatctcatcggcttgatttgatgtccatatcttaagtctgtgtgtttgctggggctctggttttcctctcttcctcatagcaccttttatagctaggggcaagcctgtgtctaggcacctggcttcttatctctaattgctctctgccaatcttaaaaaggccttaatttacctctcctaaatactctgaattcccacattcagttctgtttattgacagcttcctattttcaaggtcctgtgttgggtgcagtaaaggctggaggggttctctgccctccacaccttgctgttcagggagagttataagatttagacacaaagaagtataataataaaagggatcattgtctagggtatttcagtagacatacaaaaaaggaggtagagtacaataatgcaatatttctcaaagatttctcctgaagtacatctaatacgagaggaggggaaaagtaccctctcggtagtct

SEQ ID NO: 9290 - DNA, 1081 bp, Homo sapiens
ggtgaggataagagaaatgagagtattcagtgagaccagaagagagcgaaagattaaagacttggtcacaagttctgaatctcagcccaaatgtggtttggcaggcaatgttgggatccacattgatagacaagattaaagtatagcacagattggtgcctgggtacctgtgcaatatcaagaacccaggcgtggagggaggcactgggaacaggggctgagtgagaatttaaaaggaggctagactatgggtcataacccctgccaagagtctgggtagtatggttaaaggataaacaggaacaagggaaagcataaagaaatccctcaatggtaagccaatggattccaaagtaggaattctttacatgtgccttgtgaagagtctggattggtgtttgattgctggaaggaccaaattcatcataggtgcttgtaatatagacaagatagataagtgctgaggcagagatgcccctaaccctatgcagagtatcttctcaacttgataaaagtctagttttattatcattttcttttgtggactgtgcatttcttatttcctaatacttaattaggaactatgctatgatattaaacaactttgtaattactcaaataatgtctagtaagctcctccaacttggtatgtctcatatttgcctaaacttaactcatctgattgcatggcttcattgggattccttggcgataggatataattaaataatttaaatgcaagatttcagagcgtgttctcaagatgactctgtttttgatttgtgtttggcaattaaaaagcaaaatctgaccacaaggaggacattgtggagaaccagacttagatacctcaatgataactaaatttccatgtgtttttcatgtgagcctttagattacaaggggctgtgaagtatcagaaggatgtatgcctccaagtactaggtcgtatttacagtgacatgccagtattcgtcagtagggctgtgacttttttttctgttgatttatttaataggaagcaatttattgactttgcaagtgagcatccgtggagcttgaagccagaaatggagtggaa

SEQ ID NO: 9291 - DNA, 1031 bp, Homo sapiens
tctacttgtacatatccatcagggtgatcaggtaaattggcaatgagtagtactatattttaaggaaccttttttccttagcaaaagatctcaagagggcacttaaaatattcagtaaactacaatgtaaaaagatgtgctatcattcaggctttgttgtaacctttctagagcacaggcagagtagattccacatacatcttaaggggtctaagatttctggaatggtaaattagcattggcttcaacttaaagtcaccagctgcattagcccctaacaagagactcaacctgtcctttgacgctttgaagccaaacattgacttctcttctctagctatgaaagtcctggatggcatcttcttctaagagaaggctgttttgtctacattgacaatctgttgtttggtgtagccaccttcatctatgattttagctatatcttctggataacttgcagcagcctctacatcagcatttgctgcttcacctgagacgtatatgttaggatgtggctacttttcttccccatgaaccaacctctgctagcttcaaacatttcttctgcaatttccttatttctctcagccttcatggaattgaagcgagttaggaccgtgctctggataaggctttggcttaagggaatattgtggttgatcttctatctagacccctaaaactttcttcatatttgcaataaagtctgttttgatttcttaccatttgtgtgttcactggagtagcacttttgatttccctcaagaacttttgtattcacagcttggttgactggcacaagaggattagctcttagcctctgtcagctttcaacataccttcctcactaagcttaatgatttctagcttttgatttgaaatggtagacatatgacttttcctttcagttgaatacttggaagccattgtacggttactaattggcctaattgtgtgtcggggaagagggaagctggaagagagagagagagaaagacagagaatggccagttagcaaagcaggcagaaca

SEQ ID NO: 9292 - DNA, 1030 bp, Homo sapiens
ccataattcaggcagcccaaatctagtggttgataggggcaggagcagaaaggcccagccatttaagctcactaggaggcaattctcacaggcagtgctagctccagagatccccactgagtgagcctgggcttttcctccctgcatcacagtcccatctctacctctatccaatcccgcttctggagaacccatctggcagcaaggaggtttctaagaatgctctttgttacctgctcaagccctgtactttatttaaaaattgtttcattatttaaaaggctgttttcagagtagcagaaacttcttcatggtggaaggctacatacaggcagatatgtaagtatttcacataagaaggtacagttgattgtggagcagaacgccccaaacatcaatgacagcttaatgtctttgactattatgaaaaacagcctttccttttaaaaaaaaaaagcttttccataatttagcttgacgtgtatccccaggccctgtaaaaacttccactacttgtcaatgagtgatagtttcatttcttgtaaagtgccaaaatgagaattcagagtttcattttggagaaaaatgggatttgtaaagtgttgcatggggaagaatggattagttgacctaaaacaaagtgggggatatggggatgtgtatgtgggctgggggttatatatgtttatgtgtatattcctaatattctttggccagttaactaaaattttctaagtacatatggaaaaaagtaaattgccattcattttatgacgtgtcaaacgatgttgttattcaaaggaaaccaatttcccatttttattattaaaaaaggcttaaaataataacttgttccagataatttaccttttaagataataaaataattgattctaatactctttttagaggaagagggatttaatatggttcttgaagaacatgtaatgctgtagaaggaacaagagcaacttctccaggacaggtggaagggccctggtaaagtaatggtggtgatgggcacagtggc

SEQ ID NO: 9293 - DNA, 1061 bp, Homo sapiens
ctctgatgattagtgatgttgagcatctttttatatacttgtttgccatttgtatgtcttcttttgggaaatgtctattcatatcttttgcccgttttaaaatcactttattagatttttttcctattgagttgtttgagctccttacataatctgattgttaatcctttgttggatagatagtctgcaaatattttctcccattctgtgggttgtctcttcacttgttgattgtttcctttgctgtgcaggagtttttggcttgatgtaatcttatttgtctattcttactttggttatctgtgcttttgaggtcttacaaaatctttgcctagaccaatgtcctggagtatttttccaatgttttcttctaatagtttcatagtctgaggttttagatttaaatctttaatccattttgatcagatttttgtatatggtgagaggtaggggtctagctttcttcttcttcatatagctatccagtttttctagtatcatttatgttagagactgtcctttccccattgtatgttcttggtagctttgtccaagatgaattgactgtaagtgcatagatttatatctgggttgtctattctgttccatttgtctatgtgtctgtttttatgccagtaccatgctgatttggttactacagctttgcaataaattttgaagtcaggtaatgtggtgcatccagctttgttcttttttgggattgcttcaagtattctgggccttttgtggttccatataaattttaggattattttttccatttctgtgaataatgtcattggtgttttgataggggttgcattgaatctgtaaattgccttgggtagtagtgacattttaaccatattaattattttaatccatgagcatggaatatttttccatgttttcatgtgtttacaatttattccatgaatgttttatagcttttcttgtatttatcgttcacttttttggttaaattgataccaaggtattttaattatttgtagctattgtaaataagattgcttactttattgtttttcagattgtttgct

SEQ ID NO: 9294 - DNA, 1055 bp, Homo sapiens
tgaggacttccgacttaaggtgtaaaactttgagtaggtaatgtcaatttctataacttagaacagcgatttttaaactttgagaaataaaaccccctttttgcccacagataaatgctaaatataattatatttttctaaggtcaaatttgttaatataattcaaaatcgtatttagtttactatagagcaagtcaatacaagtaagaatttctataatgaatacaaatatttggagttgggaattataatactagttttacaattttacatcagtctcagcaacctgtttatttctgtatttcatggggcttaaagctgggaaagattctgatccttacagataagtaatttcaagtggtactggttatgcaatctgtgattgcataaccttgtatgccttttgcaatcatagatactctgcaaatagttaaaaagctggagaagcaagtctaagatctgcgtaagaaccaattaatctggtctcataaactaacatattggtggcattgtataactttcgaggaaatgtttactgtagtttcataatatagtttcataaacgtaatttagtttagaattgatatcaaatattgaaaataattttcctgcaacatctttggagtcaagttatacctagagtcacttcaaaaccaattgcataaaatattcaatgttacttgtttcatgttattaaattaaaaacagtcttttgtaaaaaaggcagttccaattgtctttggtaggtctatgttatgaccataaagataccatgctgttgtcatgataaataataactacctctgtcataactcttttatatttatattctcaattgaccctcataaaaacacagcaagatagttgtagttattattcccaatctacataggaagagaagattatataaattgcttcaaattaaactcctaacttcaagctagagattcaaacatgggtctctgtgtccctgaaactcacagtcatgcagagccctgggactgctgtgttggtacagcacatgccctggcagaatgggagcctgtgttcactgg

SEQ ID NO: 9295 - DNA, 1025 bp, Homo sapiens
gaacagaactgtctcctccttgcttctcacttaagccaaagcatcttcctcccctcaacctcatgttggccctgtgcaccctgaaaggaagttgcacttttctttactgccgagttgtcacttttaatacctagacatcttgttgaagtctggctcttgttaaaatattctatcagagaaaaacagtttttctgtgctagcaaagaaccaaattttcttcccttttggtttgatttttataaatcctttaaaagaaatctttaagtaaaaatatgtttgtgagtgtgtttgggtctttgtcttgaagtagtgtaaaattttatttaaaatgaaggtaaaatgaattatggcctatggtataaagatggttaaatagcaacacaaaagaaaacaaataagcccccatcagcaaaggtctaaacaacaaaatgttcaaataaacctgttattctgaaatatgtaataatagagtttctttataatattgatgctgaagcactataggatcctgaaattaacatgttgaattaacaaattatgtaccgcatagtttattattgagtgtatttctagtattctgttttaccattaataatcaatttatgagatttttacaatcttgattaaatgcagcctttaaagagaattttggacctccatcttagcgtaaaaagtttttaaacaagctgtttgttctaaaaaagacaaatagatatgccctacaatctataacttcagtataatctcatatatttctacatctaatgatgaggtactaaatgtgattacacggtaattcaatgaacttttttttttttttttgagacagagtctcgctgtgttgcccaggctggagtatagtggcgtgttcttagctcactgcagactcaaccccctccaagctcaagcgatcttcccacatcagcctcccaagtagctggggctgcaggcatacaccaccacacctggctgatttttgcattttttgtagagccggggtttcaccatattgcccaggctcatct

SEQ ID NO: 9296 - DNA, 1031 bp, Homo sapiens
gataactgtacctggttatgtaggatgttaacattagaaaaagctgggtaataggtacacagaaaccctttgtgtcattatggcaactcttctgtaaatctaaagttatttcaaaataacaagttaaaatgttttaaattctcaaaatgtttaaaatcttttgttatactaaatgtcccaatttggagtttggaacaattatcactgtaattatagaaaacattaaaacatacattgaatagtttttaatgtattaagcacttacatatatatatatatatatatatatatatatatatatatatatatatgtcacttgatatggatcatacagagcaatgttcttgcccacagaagttaataatttagacagtctgtttcaaagccacattccaagcccaatatcaatgatactgaagaagagaaatttccatctcatcaaagtagtaaaagatcctcaaggtgcttgatactgcagcaatatttcctattgcctctgcagtggctgtaaagattacgaactctgtggctagatgggtggattcgtttgttcttgcactgctataaggaaatacctgaaactgggtaatttataaagaaaaaaggtttaactggctcgtgtttccacaggctgcacaggaagcatgatgctcccatctgctcagcttctggggaggcctcagggaactttcaatcatggcagaaggcaaaggggaagcaggcacatctttcgtggtaggagcaggagcaggagagagaggacaaaggtgccacacacttttaaacaaccagatgtcatgacaactcactatcgtgaagacagcgccaatggagggtggtgttaaaccatgagaaactgcctccgtgatccaatcacctccccctaggccccacctccagcactggggattacaattcaacatgagatgtgggtggggacacagagccaaaccctatcaatggggaaacagtgtgggagactttttgaggtccatacagttgtccctgggctgcagcatcccacaggggag

SEQ ID NO: 9297 - DNA, 1077 bp, Homo sapiens
tggtggcgtgtacctgtagtctcagctacttggaaggcggaggtgggaggattgcctgaactcaggaagttgaagctgcagtgagccaagatggcaccatcgcactccagcctgagtaacagagtgggaccctgtctcctccaccccccaaaaattgcacagcctaatcagttcaatatatgagagtattcatgtaagaaatgtgttaactattcattcctaagtactttattcacctttctcttaagccagatcttcagatagttgcaaacatgggcctcaataacacatcatcattttcttacagagggagggaaagagggaggaaggaaggaagtggagatatgcaagtgttacatgtggcacacccagagagcaattaagtatggactgctttcccttacctatattttcctagacatacctaaccttggttttcatcaaggcattataaataaactgtgtatggacaacaccatagagttgagttttttaaatacttcttatatgcaaagacctgttggtaagttttctgtagagactgtgaatgagcttaatcaattttcataattaagtgcacttgctactagacagtgattgttgtataattcattgtattttccttttacccttgtatggtagtgttaagtgtaatgtacaattttgatagcctttctccatctggagttcctgtttgtttgtttatttatttatttttgtctctattttgtttatttgtgctctggtatttatttccttatactaacttaggtttgttcttgcttttttagtttcttgaggtgcatcattagattatttgaagtcttagtacttttttgatgtaggcattttttgctgtaaacttctcttttagcactaattttgctatattccataggcatgggtatattatatttccatttttatttgttcaagaaagtttaaattgttcttctgaatttgttcatttactcactggtcattcaggaatacgtgttgttggttctcatgtatttgtatagtttccaaaatttcttttgttattgatttctagttttattccattgcagtatgaga

SEQ ID NO: 9298 - DNA, 1030 bp, Homo sapiens
aactgaaccaaacccttccttttcctaagaatagaagtgctctgcctaatgattggagttcagctcagtgtttttggtgttctccagtaattggttagaatctcaccaattgtgttttgagtggccaagcaagtatttctttgtagggataaagagaggtacaatgtgaataatttctttaaagagttcatgaaggaattctggtatatcagaaataccactgatatgtatgacctgcctctgctcctgccccatagaagttgctatcaaatgtggaaagacactgtggaaagaagtgtccatttttaatgttaaatgtaaccaatttgataagaaacctataataattgtatcatctaggtctctaatacttgaaaacttaagttctataaattataaatattgaactgagaaaaaaattgaaggtaaaagacgttattaggacaaagaattaggttatttgtgaggcagtaaatgtaaaatgttgactgtattttataacctattagtttgaactgttcaaaatcagaacatagtgagcttcacaagttttcatcttatggacaggattaataatacttcataaattcactattcccattctcagatccaagatgccttatatatatttctactttccttactcctttgctcactcattttgctcattggactttccagtatttgcagtgttttgattcctgactgtcttgaagtctttcaggacaaaagtggctatgaagctgctgtctgccagagagactaaaagagaagccctcttctttgacccagatagtaaagatagatcatttgatcaaaattcagttaggtcaagttagttaagtcagaatgtcaaggaatcagtttagttagttaagttagttaaattacatataagtaatgtacttggacaagtcatagaacgatgacctacagattaaggtccatagcctggccccatatcacctttctagcctcatctctccctccctcttttttaattaataaaagacaaatagagacagggtct

SEQ ID NO: 9299 - DNA, 1051 bp, Homo sapiens
aatgtctgttgcagagggaggctggtgggagcagtgagatgctgtgacttaatgcttttacagagctcgcttggcaccctttgattatgagcccacaagataagaattgtttttggaacctggtatttgtttcctaatgcagtggtttgttttgtcttagtcacatcgatcagacaacaacatggcaggaccccaggaaggccatgctgtcccagatgaacgtcacagcccccaccagtccaccagtgcagcagaatatgatgaactcggcttcaggtgagtgagacactgtaattacagcacatggagtaatgcttacgcattggtaaaagttgatgtggaaaatagtcattactcgtttacagaaactgggacatggtgatgtttattgtctctccagtttcatacagaagacatagtctattttaaaataacgtaagctatattattgccttgtatagttgttaacgcataagggggccgataactgaaagccagtggttctttaagatttggttctgaagcgggtatctcaaatttgtagttctgttaattttgacgtatttggttttattctgctgctttcttgtgtctcaggtatttgagttgaatttaccctcttccctttgtggtttggatggaaagccaagctatagtgttcttattttttattattattattttttttttcattttttttttttgctatggtgttcttaacccaacttttaatgtggtgttattcattctactctgaaaatatctggaaggcagtaacttttgtaaacccaaaagaatatttcttattcccagggcaagcatggattattaaacgcatcttcaccttttttactagaagataaacctgagtataaatctttttctacctcttatttggcaatttacttgaatatgcagtttttctcatctacataatggggagtaacagtgccccttatgatagaagggaagatatgaaaggaaataatacaatttatatgaagcctctagtaattacagagtaggtactaagtgaaagtttagccccttc

SEQ ID NO: 9300 - DNA, 1074 bp, Homo sapiens
atcccagctactcaggaggctgaggcaggagaatcgcttgaacccagcaggtggaggttgcagtgaaccaagattgcgccatggcactctagcctggcgacagagtgagactcggtctcaaaaaaaaaaaaaaaaaaaagtttatgtgaaagttttgagggacaaatggaaatggcattttgaagaaaccccactcaaaatatgggaacatatcttgtgaagtgtcaaatgtccagttggaggagaaagactagtattgaccctgtgagaggcattaaagatatgggagtcatttatgtgaatatggcaagccatgggatttcatgaaagttccaagaaaagaggattaaaaaaatatgattactgtttgtcataattgtggtgtagtattcaagagcatgatttctggagagctcaactgtcaaggtttgaatctcactctgccacttactaggttgggctgaatgatcctggacaagctaacttttctttgccttagattcctcatctgtaaagtgggtataataatagtacctccatcgtagggttgttaagtgacttaacatttgcttgcaaagaacttaggaaaagtgccgtgtacatagtaagaacagtttgtgaatcatcataaatacacgagaccagaatttcaaaacaagcagcaggcagaatgttcctttaaaaggtcattgaatgtacttttccagctactcttgttactttctaaggaaactacttgataatcctgtactttgtaggactcatcagggtgtgtttagtaaacttcagtgtcctaggtgacttctttattcccaaattgtggggcaggtgacaaggggaggttggtcctctaactcgtggtgtagttaatcaggattttcctgtttgaatagacatggcaaatggttttagttagtcattactaatgcaagagggtccttaggcaagagcaggaagttaatggtgagtcaccttcagtgttatgacatggagtatttctttttaaaatatcacagggagttggtttttgctatagtagctaagttgtcaatcaagtaatactagtagtaaatc

SEQ ID NO: 9301 - DNA, 1974 bp, Homo sapiens
ccttgtgtcctgccctaaactgcttgatgaggtgatgaggagaaaatgttctgctggatttctttttgttttcttttagctccattcatgattgtattgtttgaaaaataacattataatgaatttttatggttggaggagggggaagttgaattgactaaagtattgatatttgttaccagtatttttgaacagctaaagatgtgaaaactttaatccagtttggggaggctgggagttggtgctggggaaaaggtttggctgtgtccccacccaaatctcatcttgaattgtagctcccattatccccacatgttgtgggagggaccaggtgggaataattgaatcatgggggcaatttctcccatcctgttctcagatagtgagtgctcgcaagatcttatggttttataaggggcttcccccttccctgagcactgattcttctctctcctgctgccatgtgaaggagtacatgtttgcttccccttttgcaatgattgtaagttttctgagacctccccagccatgctgaactgtaaatctgttaaacctcttttctttataaattacccagtcttgggtatgtctttattaacagcgcaagaacaaactaatacagtaaattggtaccagaagtggggaaagaagtgcagagtgtgggatggagaggttacttagcctgtgacaaaacctagagtaggatgttagagcaggtgaactgtccccacatattgatcattagagaaatgcaaaccaaaaccacaatgagataacacttaactcccattaggatggctaaagttttttttgaaaagataacaaatgttgtccagaatgtggagaaattggaatcctcatacattgctgttgggattgaaaaatgatgtaaccactttggaaaatagaatgacagttcctcaaaacattaaccataacattcccatatgaccgagcaattccattcctcggtatagaggctaaagaattgggaacgtatgtctccacgttgtgggaacgtatgtctccacaaaaacctgtacccaggtttacagcagtattattttataataaatagccaaaaagtgaaaataacccaaatgtccattagttgatgaatgggctaacaaaatgtggtatattcatataatggaatattatttggcaattaaagggaatgcagtgcttgatacatattaaaacatgaataaatctggaaaacattataaatgagaatagccaggcacaaaaggccatatattgcttaattccatttttagaaatgtccagaatgggaaaattcatagagacagaagtagattagtggttgccagggactgggaggaagggcagtaggtagtgaactgctaatggatacagggcttttttgtttgtttttgtttttgtgactttttttttttttttttgaagtgatgaaaatgttctgaaattagatcgtggcaatgggtgtacaattctgtgaatttgtaagaactaccagacagtacatgtaacaagggtgaattatcccagtaaagagaaaaaattatttctaggcatgatgtcatttaggtatatagtgtattgagaaataccttttgtatattgatcataaaaagatgtattcagtcattaggttaggacactcgtcttttccttttcttttgtaaaagatagcttttcagtgtgaattaaaataagcaatttttactgaaaaactacattttatgtttaagtagataaattattatgccactttatagcgactctctattgatgattcagtccccttaggtcatgcagtaaacacttagagccaggagtgagtgttttgtgttttgtttttactgctttaagacccacagatggcctattagtttgtgtttttagaagaacattaatttcttttaaaaagtctactgttttgtagttttgagtacactcgtaggtatgaggaaaacccaaatatttctt

SEQ ID NO: 9302 - DNA, 1050 bp, Homo sapiens
taaagcaaatctctgaaattcaaagacagaatgtcataagtacacctgtatttcaggtggttggctaattatagaagaataatttcaggtgactttaaagcacagtgattttactttatgtacttaatggaatatcttaaggagataaaattgcaaagaaatctgaaacttgaatcattttagtgatcataatgttatttttagatgattgcgtatgtatagaggacaatacatattaatgttgttagaacccagtttttcagcatgagaaaaaacagttgttacaaaatcaaagtaaaaaccatgcatcctaaatctgaattggaaatatgcattttctgaaggagagtaccacctagaaacagttacaaaaaagcaacagaataataataggtaccccctagtacgcagagtaatgtctctaaataccatttcccactcaaagaaatcagggcttcttcaaaaaaggctgagtaaaatttggggcagggaatatactagatgaccttggaacatctttttgtgcctaaaagcaaacaaggaagtagaacaagcccattgtagccatagcaaaaagatccagcttgacctggtcaaatatggcacactttgaacattgatcagaataactgtgctggattaaaacacatcataaacatattttcaaatctgtgatttcataatgattttttttcccttcgctccaggtagcagagtatcagaattattattattttttttttttgagatggagtctcattctttcgcccaggctggagtgcagtggcgcggtcttggctcagtgcaacctctgtctgcctcctgggttcaagccattctcctgcctcagcctcctgagtagctggtaggtactacagtcacccgccaccacacctggctaatttttttttttttttttggtatttttagtagagatggggtttcaccatgttagcccggatggtcgtgatcttctgacctcgtgatccgcctgtctcggcctccccaagtgctgggattacaggcgtgagccactgcacctggccgatt

SEQ ID NO: 9303 - DNA, 1031 bp, Homo sapiens
caagaaatctggtggtatttgtatcaagaaagcatgtgtatatttttctcatcctattattttctaaataaccttaaggtagatgtcaggaaatagatcacaaagaagagtcatgtcttttcttctttttttttttgagatggagtcttgctctgtcacccaggctggagtgcagtggcgcaatctcagctcactgcaacctccacctcccaggttcaagcaattctcctgcctcagcctcctgagtggctgtgattacaggtgcctgccactacgcccagctaattttttgtgtttttagtagagacggggtttcaccatgttatccaggatggtctccacctcctgacctcatgattcgcctgcctcggcctcccaaagcactggtattacaggcgtgagccaccgcgcccagccagaagagtcatatcttaagtgaagatggctttaaatagtgtttctcagaataatcaagaaagctagaaaggacttttcagccccaaagaacagagggtataaagacatcactcagtatctgaacactagacgctgttgtaaagttactgggtttttaacttatactttgtaatagatattaatgcagctgagttagcaagcaatagtgagatcagtgtcattttctaatcgtatacctcatatgctgtgggatgtggaaagccactaaacttcaaaatgcttatgaattactacagaagctgtctttaagtacttcctataggatttaacatatcatgtggctgttgtagggtgctgtgctcgtgtacactaacgtcagtatgggtgaggttaatgaaaaattccaagatccatggcccaagtgatattgaaatgtaaaattttgaaaaaactttaaaggcatttatatatcttcttagttaaatatggaaattatcaccttaatttattatactatgttggcaggattttggaaaaattcatccttacagagcttaactttttatttttatttttatttttatttttatttttattttgagacggagttttgc

SEQ ID NO: 9304 - DNA, 2089 bp, Homo sapiens
attagtgaatctgttaatagttgtagcttgggatggttattgtagttgttttggtaaaatcttcatttcctggttttttttaccaccttatttaaatctcgattatctgctctctcttttatatacatacacacacccaaacataacatttataatagtgtggtagtggaatgtatccttttttaggtttccctgctttccagttaatttttaaaatggtagcgctttgtatgcatttagaatacatgactagtagtttatatttcactggtagtttaaatctggttggggcagtctgcagatgtttgaagtagtttagtgttctagaaagagctattactgtggatagtgcctaggggagtgctccacgccctctgggcatacggtagatattatctgatgaattggaaaggagcaaaccagaaatggctttattttctcccttggactaatttttaagtctcgattggaattcagtgagtaggttcataatgtgcatgacagaaataagctttatagtggtttaccttcatttagctttggaagttttctttgccttagttttggaagtaaattctagtttgtagttctcatttgtaatgaacacattaacgactagattaaaatattgccttcaagattgttcttacttacaagacttgctcctacttctatgctgaaaattgaccctggatagaatactataaggttttgagttagctggaaaagtgatcagattaataaatgtatattggtagttgaatttagcaaagaaatagagataatcatgattatacctttatttttacaggaagagatgatgtaactagagtatgtgtctacaggagtaataatggtttccaaagagtattttttaaaggaacaaaacgagcatgaattaactcttcaatataagctatgaagtaatagttggttgtgaattaaagtggcaccagctagcacctctgtgttttaagggtctttcaatgtttctagaataagcccttattttcaagggttcataacaggcataaaatctcttctcctggcaaaagctgctatgaaaagcctcagcttgggaagatagatttttttccccccaattacaaaatctaagtattttggcccttcaatttggaggagggcaaaagttggaagtaagaagttttattttaagtactttcagtgctcaaaaaaatgcaatcactgtgttgtatataatagttcataggttgatcactcataataattgactctaaggcttttattaagaaaacagcagaaagattaaatcttgaattaagtctggggggaaatggccactgcagatggagttttagagtagtaatgaaattctacctagaatgcaaaattgggtatatgaattacatagcatgttgttgggattttttttaatgtgcagaagatcaaagctacttggaaggagtgcctataatttgccagtagccacagattaagattatatcttatatatcagcagattagctttagcttagggggagggtgggaaagtttggggggggggttgtgaagatttagggggaccttgatagagaactttataaacttctttctctttaataaagacttgtcttacaccgtgctgccattaaaggcagctgttctagagtttcagtcacctaagtacacccacaaaacaatatgaatatggagatcttcctttacccctcaactttaatttgcccagttatacctcagtgttgtagcagtactgtgatacctggcacagtgctttgatcttacgatgccctctgtactgacctgaaggagacctaagagtcctttccctttttgagtttgaatcatagccttgatgtggtctcttgttttatgtccttgttcctaatgtaaaagtgcttaactgcttcttggttgtattgggtagcattgggataagattttaactgggtattcttgaattgcttttacaataaaccaattttataatctttaaatttatcaactttttacatttgtgttattttcagtcagggcttcttagatctacttatggttgatggagcacattgatttggagtttcagatc

SEQ ID NO: 9305 - DNA, 1029 bp, Homo sapiens
tgaattttctagaattccttttaggtttctatttatataacattgtggtttgaaaggtacttgatgttatttcagtcttttaaatttataaagacttgttttgtggtcaaatatatgatctctcctgcagtatgttctgtgtgtgcttgagaagaatttgtatcctgctgctgttagttggaatgttctgtatatgtcttttagcgccatttggtttgatgtacgtagttcaagtttaatatatccttactgatactctgtctggatggtaagtccattgttgaaagtggggtattaacgtcctcttcagctgtgttgctatttcttccttcagatcagaaaggaacgcgttttttctttctttacatacagtttgacccttgaacgatacgggttcgaactgcgtgggtctgcttatatacagatttttgcagtaaatacaattcgccccctgtatcagcaggtttcacatctgcaaccaaacctatataaagaatatggtattcgtgggatgtaaaatctgtatctgcagagttctgcagggccaattatgggacttgaatatgtatgtcttctggtatctgccaggggcctggaacccgtccttcaagatactgaggtacgactgtatttaggaggtctgacattgggagcatatatatttacaattgttacatcctcttgcaaattcacccctttgtcatttacttaccttgtctctttttgcagtttttgaattaaagtctattctatttgataaaactatagtgtcttctgcactcttggtttctgttttcatggaatatcttttttccatcccttctctttcaaaccatgtgtgtccttgtaggcagcatttagttgggtcttgttttcctttacccattcagctgctctgtcttttcatgtgagaatgtgtgcatctattttgtgttgctatgaaggaatacctaagactgagtaatttatacaggaaagagatttaattggctcacagttctgcaggctgtacaggaagcatggtgctgg

SEQ ID NO: 9306 - DNA, 1049 bp, Homo sapiens
attctccttttatttgcagatttttttttctttttttttgagatggagtctcactttgttacttaggctggagtgcagtggcacgatctcggctcactgcaagctccgcctcctgggttcacgccattctcctgcctcagcctcctgagtagctgggactacaggtgcgcgccaccacgcccagctaatttttttgtgtgtttagtaaagacgaggtttcaccatgttggccaggatggtctccatctcctgacctcgtgatccacccaccttggcctcccaaagtgctgggattacaggcgtgagccaccgtgcctggcctatttgcagcttttaaaatctgctttggactggcaagccaaacaattctcccctgagtgaacaattcttccttctagagaaaatgaattttagcagagatagcattaacaatggagggaggttactttatctacttccagatttagggctgtctaactggttcaggttagaagtcagacctatgggaaagtagaaaaatacagggcgacatacaccaacgttacctgtaggtgatataatgtttcctccatacgggcccccctggcatttccctgaaatgatggacatcggggactccacatcgaggtgcgtgcatcatctccagggtagatgtgtccagttgcccggtcactttcagacccaagaagtgctgcatttcttggattttttccttcattaagtttccactatatttcatttttgtcactggaagtttgtttatctcaaggccataaaatttttctaagtatctctggaaaaaaaaatacattcagcaatgtgtaagtacacacagaaaatttctgttgggagctccacatatatgactcaattgcacactgatgcttttggaccaggaattttgcacatcttactcacaggttagattattgttttttggacaattaattataatcaggaaaaaaaaccttaattttttgtgctatcaaagacatgtcagccaggagcagtagctcaggcctgtaatcccagcatttcgggaggctgag

SEQ ID NO: 9307 - DNA, 1026 bp, Homo sapiens
ttttcaaatattaaattttatgaagataacattaaaaatcatttatcactttagattgagtttggtgacacaaaagataaagtgctggtgtttttcaagctgcgacctgaagtaattactgatgagaatctacatgataacattcttgtttcatctatgttagagtcacctattagttctctttaccaagcagtacggcaagtattcgcaccaatgttgttaaaggtgagaaaagaagctgtcattttttttaactgaggtatttggataaatgttttcatataaacataaatatctattttttactgttaatgttagtagtgttttaattttaattaaaatatcttttcttaactttttttaacttaaattttaatgtaagttgtggtaaaaaatagagaaattggagaaaggtataaaatgcaatccacatcaactcaacatttctacattaaatgcttttcatagttttaactgttgagaggactttttattcttcttatgaagtggaggtagtggcaggctttaagaaaaatggggttttggacagtgttttgggaagccaatttgattagcaaaattttgatcaatcttggttgctcttgtctgtttttatttaggatcaggaatggagcagaaactttgatcccaaacttcagaatcttttgagtgaactagaagctgggttgggtatagttctacgaagatcagacactaacttaacaaaattgaaatttaaggaagatgacacacgaggtatataaccatagcttaataaaagagagtacaaaatgattgtctcattaatacattagtaaatgaacatatttcttcatagatttcttcaaatacttttggaatttctctgagcataggttttaaaaaatgagtagatttatgtggatgtagagaagaggaaaatataattgttaataatgtgcaatctagcttgagcctccagagtagctagaactacaggtgcataccactatccgctggctaatttattttagttcttgtagagat

SEQ ID NO: 9308 - DNA, 2309 bp, Homo sapiens
tttactgagttgatccgttgggatgaacatgtacttattttattttatattagcttcttcaagcattcctgaaatataaagagttggtaaagcgtccaactataagcaaagaattgatgttagaaagagaaactttactggcaagacttgtggactcaattaaaggtaaaagtttatgagattatagtgtttgcttgagagaatatttttgtatattacttttttcttcgttgcataccatttaggattaaagatacatttttctgacattttcatgctgaagattaatttacttattctgttataaatgacagatttttttgcattaacaagttattataattcgctgtttcatttgatacatggtacagtccttggggataaggaccaactcattatttttctttctacagcatctgacatagtgcttggtacgtggaagttatttaggaaatctttgctaattctttgtaatcatttatttgatttaaattttatagattttcgattagactttgagaatcggtgccgaggaattcctggtgatgcatctggaccactttctggcaaaaatctttcagaagttgtcaacagtatagtttgggttcgccagttggaattgaaggtatttattttaataaaagatgaagagtactaattataaaatctgctaaattaaggcatgtagaaggtactctagagctgtagtaaatatattctctgttttccttggcatgtctgtctaattttcatacaaaatgcagaacactgaaaaagtatgcagaggagtcgtaatggttctattccttctttctgtagagataatgcatcatttattccaattgcagttgttccaaagaaatacctgtattcaggaggaaaacatcctttatgctgagtaaaaaaaagaaaaattattgtttacaaaaatgagctggacatggtgctgcacatctgtagtcccagctactcaggaggctgaggtgggaggatcacctgaacctgggatattgaggctgcagtgagccataattgtgccacagtgctccatggtggacgacagaaagagatgctatctcaaaaaaaaaatattgtaaaattttagtagttgcaaagtcttacctgcaagtatgtttatgtaactaaatcactttaggttggaaggaagttaaaggaaaggtaaaaggtaattatggcatggtctaaggtagtgagaacaatttatagatgtaaacgactattattttaatattattaaaattgacctaagactcttatggacttactaactggtatgtggttcagtgtcttgcattagacttgtacaataaatgttaattgattatagtctgtgagtaagagcaagacctcatggaatattacaaaagccagcatgttcgacatttctgcttattcaggtttgtatttttgatgttttattttctgatatattctgcctaatgtttctgtcagtcagttttccagggtgctctaatgttctctgtacagttgtggaggaaaggcatttatgtctcttaattgacattccctttggcctaattactatttgtgcttttaatcggagcatgttgctaagggccgaaattattactgaacatgtttagcagtaatgctgaagttctcagagtttcctctgaaaatcactggggcacagatattttgagggctgactttccctttaccctccattttattcttggagttatgccttgtatgggttatcctcttgcgtttgctcttctgcggctgtataattcagaagcaaagtaggggttgatatttttatattctttggtgaatcttccgtttcactgtttatagatgaaaggtaaaataatttctgaatcacagatcagagaaggggactccttactttatgctaatttttttggaatttaaataatgcacatgtctgtaatttggctttttaaggtagatgatactatcaagattgcagaggctcttttatctgacttgccaggatttcgatgtttccatcaaagtgccaaagatctcttagaccagcttaaactatatgaacaggaacaatttgatgattggtccagggatattcaatcaggtttatctgattccagatctggtttgtggtaagtatagatatattaaactgtaaaatccaaaaccatatgttattaatccaaatacccagagggaattaattatctttttcctttctccaaacttgctactcctcctgtaatttttttttgttgtttgtttttgatcatcaacttttaattcattaaggctggaaactttgatgattt

SEQ ID NO: 9309 - DNA, 1037 bp, Homo sapiens
tcaggacatgacttggcaaattgtaggaactcaacacttacttgttgattgtgtgtattaatacatgaacaaatgccctattggagatgaaaaaccaattttctgtttaaattttaggattgagaaaagttaacattttcattcaaacaattaaaaataaaaaattaaaaatgaagttattaattattactaattggacttttactttgtaggtggcacatttttataattctattgatcaacaaatgattcaaagtcagaggccaatgatgttacaatctgccttagcatttgaacagataattaaggtaaatgggcttttaattttattataattagattttacatgtgaagtgtttaattcttaattttccggtgttcccttcagcttaatatatcaaatgatctagattttgttttgcttccagggacttccttcaatcttagcaagtaaaattattttttctaactgtaggtttaagtggttagaatatttcatatattttggtactgatttcgatcaattgcattgatatagatagaaaatgatttgtatgatgttatgttcatttatcctctgaagtttgaggtccttatacacaagcttccttagacctttcccaccacctcccaattttgtaatgtaatatttttttcctttttatttgtggttatttaaatgtctgtatataagaaattaggaggctgggtgcagtggcttacgcctgtcatcccagcactttcgaggccgaggcgggtggatcacctgacatcaggggtttgagaccagcctggccaacatggtgaaaccccatctcaactaaaaatacaaaaaaattagccaggcatggtggtgggtgcctgtaatcccagctactcgggaggctgatgcaggagaatcacttgaacccaggaggtggaggttgcagtgggtcgagatcgtgccactgcactctagcctgggagacagagcgactccatctcaaaaaaaaagaaaaaaaagaaagaaaaagaaattaggaaaacccataatagcg

SEQ ID NO: 9310 - DNA, 1030 bp, Homo sapiens
cagtagtgtgatctcggcttactgcaacccctgccttctgggttcaagcaattctcctacctcagcctcctgagtagctgggattacaggcgtgcgccaccatgcctggctaatttttatatttttagtagagacaggggtctcaccatgtgggccaggctggttttgaactcctgacctcaggcgatccacctgcttctgcctcccaaagtgctaggattacaggccactgtgcctggcctattctgctatttttatggaatactatttcatcggtatttttccatgttatcatctgcacatcaaaaatgtgatttttaattataggtatatataaaaatttattttgccatttctatatttatcttgtttcaaacttttcactattatagttagtgctttcatgaaaatgcttgtgtataaatcttggagcctgccttgaaatttgtcttaggataaattctaaaggtagagttgttaagacaaaggatatgccagtttaaaattatttgacgtgtacattgctctttacaaagattgcattgttttatattctaacagttctgggaattctgtttgcccacaaaattgaagattcaaagtaaccattcattacattttttttcaatttgataagtgtaaaatggtgtcttatcgttttattgttttagtgctttaataatctaaattcactttctatctacatttaattttgccttatttttattgtttgtattttggctacaggatagtaaatttattttataaatatttaaataggtgtgttacatgctgtgacaagagaagctcattaatatttaaatatattcttttgacactttactaattcataacataccacctttttttgaagctgatatgctggatgattaaacttctagtattgtaacaaaattattgctcaatgaaaaacttcaaaatagtatgtataaggcatttttgctaaattaaatctaaatgtgcttaaagatcaccatattactgctgacatacatttttaagtgtatta

SEQ ID NO: 9311 - DNA, 1028 bp, Homo sapiens
tatatgagtaggtaaagtaaaattctcatagtaaataggtagtttcttaatgttcttattgtagtttcttattgtttcttattgtatatctattaaacatacacaagtgtgtgtgtacacacatacaaggattgcagttaagtaacttaatgatacttaacagtatcaatatttctgtttttaaaatttaatatttcaatatttgtttctatagtgatgattgccatcattttagactggaagagcctaatttctccctggcaagtagtatctctaaagatatcgagagctgtgcccaaatttgggccttttatgaagagtttcaacaaggatttcaggaaatggccaatgaagactggatcacttttcggtttgattcaaaaacaatatttagactaataatttggttgttttatttttggatgtaatctttgcaatgtgtttttggtattttataggactaagacatacctgtttgaggaatttttgatgaactggcatgacagattaaggaaggttgaagaacattcagtgatgacagtgaaattacaatcagaggttgacaaatataaagtaagattgttttattattttgccaattaaaaacaatgtttggagctttcatcttatgtagtgactgaactatataattttactttatatgtttttcaattaaattattccgtttgatgaagaaaataggaaatacagagtaaaccatagaaattattgatatttctactaccaatgagaaagaagttataagaaatttatgttaaagttaaaaaacagagtgcttatacattccagtccatcatgggtcctatcctataataataaaaatagaaatagtctatgccatgttttaaaatatattaaactacaaagggtaatttgtgtgtgtccatggcaacatttaatcaaaagctttatacaattctgtttaagaatatgattttaagattattaaacaagaaaatggaataattaaaattttggtaactaataagcataaaagtaaatactaa

SEQ ID NO: 9312 - DNA, 1044 bp, Homo sapiens
gaattttgctatcgtagacttcagtactatactaagaaattattttgaaatgctaaagattgcccttttattaattagaatgcatcatactttgatatctttgtagtttactggttgaaaagaagccatttctgaagagaggggaagaaaatacaaaggctttgaggttacaataaacatagtgggttataggaccagaaaaataggtttgtagtagagtatagtatgaaatgagttctgtgaagtaggcttggctgcatcacacaatactttttctactactatattactctattaatatttaaggttccagtatgacattaagatggagagatccaatatacaattggctatttgaaaaaaggtgcctttctttaaatttataaaatatttctaagtaaattcaccttttaaaaataatttttctctttattcaatagattttatgcttggcggagcagattaaattcactgaagatgtagaaaatgctattaaagatcatagtcttcatcagattgaaacacaactggtgaataagttagagcaatatactaacattgatacaagttctgaggatccagggaatactggtatggaaaagacattcccttttctgcctggttttgggttattttttggtattctatcctaatttacctattgtgtttttgactgtatatctgtgttggtgattactcgaggaattacaacatatatacttaaatttttataatgtactttgaatcagtaatttactaatttaaatagaatatagaaaccttactaccatataggcttctttatcctctccttttaatattgtagttgtcttaatattttacatttacatacactgaaaactccatgagattatgttataaattttgcttttaaccatcaaagttatttgaaaaaactcgaggagaacaatcttttatatatacctagatgtttaccatttgttgcccttcctttattcctgatgttccaggtttccttctggtgtcattttccttctgtctaaagaacttcttttagtgttt

SEQ ID NO: 9313 - DNA, 1035 bp, Homo sapiens
gttgtgttcaaatggtggattctgaatttcagtatacttatgaatatcaggtatgagttgtggcagtgttttatatttccaattagaaattatttactgtaaagaaaatttgttattggtagaaatacttttttatttaagtagtaatttttccataatatttttagtattattgtcttgtttaatcagaattagaaaggtgtcacataagaaaaaagtgaaacttcattctatatacaaaaaagttaaaatattgctagtattgtactgaattctcaaaaatgtaccttttcttggagttgcatttatatacaatttgaaatatatcttcatccaaggagaactgaatatagacaacctcagtcaaagcaatttggtttgtgtctccttatacaaggcaaaaattagtgttattttaaatatgctaaaatgtttgctaaatattttttagtttgtaagatgaaaaaattttcagacaaataacctagttaatgtaaacatgttctcaaaaattccacctgttgcctctgcctttttctatcataatgaatgaatcatcaaaatatatttgaaaatattgttaataaacctatgttaggagagctgccaaatggctttttcaaaagggaaatgtatttgggacccaaatctatctacctcaattgaggaaaaacacactgtaaattgtagctggaatgggagtctgttttccctacagtttagtagaaactttgagaattatttgataaattacatgattaatttcttaaggaatttttcaaattcattacactttgtgatctccaaaatagttctgatttgtggatatcataagagtcaaggaaatagtttatataaattttaaaatatgaaatgggatgattactgtataataattttggatttcttttccttagaagtatatctttgtgccattaacaagaacttgagaaacaattttgaaacctaacaatgtattgagtatagtatgaaatactttcttgaaaaataagtttgatttcagcttgtgtttag

SEQ ID NO: 9314 - DNA, 1044 bp, Homo sapiens
gtgtgagccccacacccagcccattattcatttttaaactttccattttggataattcagttataataatatttatattgttgtattatatattattctattgtctgtgctgacattgttcacagtgccttaatgtattgtctcatttaataattaccacaaccctttgaagtaggtgctattatttttttccctgctttgtggctgaagaaactaggacttgataagtaagagtaagaagtggagctaggaattgaacccaggtctgtctaattctgaagcacatttttttttgtttaaccttcaagcataggagcagaatgaagcacatgtttttgatcattattctatatgaatgttaaaacaacaaacacttagctattttgttcctcacttctccaaataggagatatacattaatgtcactagaatataaattcgtttgtacagaaaacgtaaacttttttatataatgtggattgctgaatacaggaagttgtaagaactaagaaattatcatgttatataaaataacattttaacagtacatagttttctaggtagcccaagaatgtaagaccagttctaaattgttaacatgttgtttatgtgatgtttaaactcttcacaaagaaaaagagaagaaactattaagtgagaattacctgccttcaagatttagtttcttctacattcacttttttttcttctcttacaaagaaagagttgtcttttctcccaaccagtactaatcttttcacctgtactttggaatcctcttccctgggaccttattatcccttgtgctatagcttcagtcttccctcctctaccaattcctcattaggttttaaacataatcacatctttttcatcttaataataactaaaacataaacaaaccttccctgatttatatttcttctttctcttttctttcctttgtagctagatttcttggtttttctactctagatgcttctacttactaattgcccattcattatttacacattctaatttagcttctattcttagggtttt

SEQ ID NO: 9315 - DNA, 1050 bp, Homo sapiens
gttttcgttttctcaaactttttcttttctgactttgtaagaatgaaaaatggaggaatagggatttgtgaggatagcgatgcaagtgaggtgggttttcctggaggcctaggaaagggaacactcccattagctcctagtctgactgagctgtctcctcctttgtgcttctgtagcaacatacagcatctaccaactatgttataattgtctgtttacattaaactataagcaccttgaaggcaaggaccaagcttatcacactcttcattgtgtcctcagaaccaagtatgatattaagtgatagcaaatgaatgatagtattgtgcttaattatatacctgatgcctacattgtgacaccttttcagtagatatgttatttcattagtacaaaacattcagagcctaacaaggctttccaatgcagatactttgaggtaatctgctcatagatgtgtgaatgttataataggagtatcgtattagatggaatatatttatgtatatataggggtttatgactgtagaaatgacgacaggataagattgttaaacaatagagtgaataccaaagattcagttaggaaaaaaaatggtttatgttttgaggtcacaccgctgtttgtttgtttgttttatttaatgtgttaagggttcttttctttttatcctgtattttgttcaccatgcacaggttctgaggtataccacaatgaattctctagtcaaatgctgaaattgtatttataactagaactttgctttcttcttttttctcttcctcagcctatgggataaatctttgctttcttgtatgaattcagcaaataagaaaatatagaagaaaatatgtacatttcctttatctcacctttaaaatctggaactctcagtatgagtctgtctagatttctttctttcttctcctttcttcctgctcttcctcctatttcttctttctcacaaaaatattaatttttttaagcacagcgatgtttttaaaatgtaaactgggtaattttactctattataaaaaacatgttaaag

SEQ ID NO: 9316 - DNA, 1035 bp, Homo sapiens
aaattcagtggttatttcttttcttcgctggttggcatttatggatttttgatagcttatggtactctctttaagagtctctttcacatgaaaacatttttagaaattaagaaaactctgttattcagcataagatgatacagtggactttggggacttgggggtaagagtagggtggggagggataaaaggcaacaaatatggtgcagtgtatactgccctggtgatgggtgcaccagtatctcacaattcaccactaaagaacttatgtaagcaaataccacctgtacccaataactaatggcaaaataaaataaaataataataaagaaaaaagaaaaccctgttattaactgaaacataatatccaagattatattttataataacctttaaaattaagattatattttataaagtaatgttttcatccatgtcacctcacttagtacattctgaacagttttctttccgtatttctttaactataaagctttaacttaaatgtgacattagaatgtcagcctctgaagttgttagagaacatttcctctctaaagttttagtttccctttgttagggtagtaaagtaggctccatcttaattgacataattatcttaatcatttctaatgattcactttcatttatattaaggtactaactatacgggctttggggagggttaatttcctgatttagttctctatggtactttggataaatcactttaacttactgttttgcagcttaattgggtcaatggtagttgtatgtgagtgtattagataaaattcatatggaaaaaacttagcttaatacctgtactttatgatgggtgctcaatagttattaattacattccttttttgccattactctttccccaaatcttctgatttgttaggtgacaaaaacatgatagaaggtaaagaatttttttcatgtacatccctgggttcattattctgctgtttgcacagtaggatggggtaccataatggccaggccagggtgaaatgtctactcaaaatg

SEQ ID NO: 9317 - DNA, 1047 bp, Homo sapiens
ctgttttcaaattcatcttttttattctttatcctaactcctcttattagcttcagacttgctcaattactggcagggcatggtcactcatgctgtaatcctagctctttgggaagccgagtgggaagattgcttgagcccatgagtttaaggaccagcctgggcaatatagtgagaccttatctctacaaaaaaagtaaaaattagttgagtgtggtggcacgtgcctatagtcccagctactcaggaggctgaggtaggaggattgcttgagtttgagaggcagaggttgcacaacgagctgaaatcatgccactgctctccagcctgagtgacagagcaagactctcaaaaaaaaaaaattcaattttatctgttaaacatgtcttcttggaagtctctcgggcattacaatttgaaacaggttcaaaactgaacttatgagttttctttcctgtatttctttcctcagattatggtactataatatacactaattatttaagacagaacttataaattatattatactgagacttttgttaccttatcccttaatgtaatgagtcattaaattctgtcaattttatttccctgactatgcctcaaatatgtttccccatctccctcttggtaactgttaccttgtcaactaggcactaatctaatgcctcttttatgaaaattaactttaatattcatcagactaatgtatatatctcaattaaaaagtaagtggcatgaaaaatcaacaaagttatgggagttaggatttctttttttttttttgagacggagtctcgctctgtcgcccaggccggactgcggactgcagtggcgcaatctcggctcactgcaagctccgcttcccgggttcacgccattctcctgcctcagcctcccgagtagctgggactgggacttaggatttcaagagtcacttttcagtaatcataaggcaatctgatattactgtaatattaggcatagagatcactggaatgtggtcggttgattttacacaaaaatgccaaataaatggggaaa

SEQ ID NO: 9318 - DNA, 1026 bp, Homo sapiens
cagaacttgaaagactgaagcacagaatagcagaagaagttgttaaaattgaagaaagaaaaaataaaattgatgatgaattaaaagaagtacaagtaagttaaaaaacattctaagatccatttacatttttgcttaccagttatatgtaggaatttaaacattatttgtaactcaagttgttttctcatagtattataaaatgtggttttcaaccaaaatgttacttgtaaaagagaacaagaaggaaagccttccaggaaaagtataaattaatggatgataattaaaaataatctttgttttccaagagccatatggttttgattgcagagggaaaaaatgtgttagataaattaagatatactgttaagctctttttctccagttgattaaattagtcagctagtcctaggatataaagagcctcttgaaaatgacaaattgtctcaaaacaagttagattttccaaattaggttattgcagttgtggtggcaagacgtcttactgtctcaagttgaacattttttacaccttgtatgattgaaagcattttgatattttaagagagagaacattagtaactatagtcattttgcataaatgacaataaaacataatttttcaagagttaatgatttaaagaaatatataatttgaagataaaaatggcctttttctcttttagcctttagtcaatgaagctaaactagcagttggaaacattaagcccgaatcactttcagaaattcgctcactacgcatgccacctgatgtaattagagatattcttgaaggagttttaaggttgatgggtatctttgatacatcttgggtgagcatgaaaaggtacatttttcaatttgtgaaaaatattatttcggcaatgaatgacacattctttcgtagttttaaatatttcttatattgtttttcaaaatgcacttcatctaaatacatgggtgtacattttggcttgaaatttcaaggtattctatgtaatcatatatcaagatctatatatt

SEQ ID NO: 9319 - DNA, 1050 bp, Homo sapiens
tttttttttttttgagacagagtcttgctctgtcgccaggctggagtgcagtggcgcgatctcagcttacttcaacctccgcctcccgggttcaagtgattcccctgcttcagcctcccaagtagctgggattacaggcatgtgccaccacacctggctaattttctgtattttagtagagaaggggtttcaccatgttggcgaagatgatctcgatctcctgacctagtgatccgcccacctccgcctcccaaagtgctgggattacaggcataagccaccgtgccttgctggaaatttaaggcttttgtatttgtttttaccttctaagttctaggaaatgcttagcatgtattttccaaaacagtgtgtgggcaggtaggaggaagatttaaccacttactattagagctgtggttctaatttgctatcgttactaagtcagaaatatattttatctcttttgttctaaatgcagacccaaaggtttatgttcttttaaaaaaaaaaatttcaataggtttttggggaacaagtggtgtttggttacatgaatgaaatctttagtggtgatttcagagattttggtgcagccatcatctgagcagtgttacactatacccaatgtgtagtcttttatctcttgccaccccctgccctttcccgagtctccaaagtccaatgcctcattcttacgcctttgcgtccttatagcttagctcctacgtgagtgagaacgtacaatgtttggttttccattcctgagatactttacttagaatattagtctccaattccatccagattgttgcaaatgccattattttgtttctttttgtggctgagcagtattccgtggggtatatatataccacattctctttatccactggctgaatgatgggcattgggttggttccatatttttgccattgcaatttgtgctgctacaaacatgcgtgtgcaagtgtcttttccatataatgccttcttttcctctgggtagatacctagtagtagaattactggatcaaagagtagatctacttt

SEQ ID NO: 9320 - DNA, 1024 bp, Homo sapiens
atttagaagtaaagaaaaaatataattgaggatttctatttttgtcatctataatcagccatttcagagcaatctggaatatgaaacatattaatgttaaaaccatactgaatgagaatagatattccttgggtgcttcagtatcccaggatcttcttagtgaatattatttatcattgcttgcataagtgctgataaatagaacattctgctaatagtatctcaggtaacccaacttttgccgtcttagactctgtcgaaaagcctatatttagaagtacttaaaaattatattttcaaatattgtatagtgaaatacagaagattcagaccaaccaattgtgtgttttttttaaataggaccacgttatgtggtacaaataggtgacaaaattattgactacaatgaagaattccgcctctttttgtcaacaagaaacccaaatccttttattccaccggatgcagcttccattgttactgaggttaactttactacaacaagaagtggattacgagggcaggtatacatagataataataatttaccttggaatcttttcgagctttatatacctattagacattgtgagtgagaagctattttgttagactaattagtatttacatttatgattttgaaaataatacttgtatgttggagtgaagcattctggcttatttcatttatcatatgtattagacctgtacatttgatgctaatgtcaaattgctgctccttttaatataactctaattttaaagtttatttctgttatatgtggtagaatttgagagattgatggatcgtaaagatcatctgcattatatttttggtttgaaaactgaaatttaattgtgaaaagtgtagctaattgacttgttcagctagttaagagtctttgattcctgagccagcatttttttttaaccattagaacacatggcatctttgaagtcaatttatcttcatatggctcattacagttcagaattattacataaatttcaaaatgatttttca

SEQ ID NO: 9321 - DNA, 1034 bp, Homo sapiens
gcgcccaccaccacgcctggctaattttttgtatttttagtagagatggagtttcactatgttagccaggctggtctcgaactccttacctcgtgatccacccacctcagcctcccaaagtgctgggattacaggcgtgagctaccatgcctggccctttttatttgttaatgtgaatacttactattaaaaaaatagtaatctcataatttagtatatttaatttaaaactaaatattacacattgatatgttaagtaatgcactttcttacagcttttctacagtagttaatattttactgatcagcttaactgttttgtctctttttcatcagatgtaattgttgaaggtgtcttatgtttaattagaaagaatgaaatgagataacatagtatcatatttgtaatagtctgtcaaacacaaggcctgtttgcaggaagtttttgttttgttttaagccttattgctagaattaccttgtctttttgttatcccaagcttttagctttaaccattcagcatgagaaacctgatttagaagaacagaaaacaaaactattacaacaggaagaagataagaaaatacagctagccaagctcgaagaatctcttctagaggtaaaagtctagctatttaggttacttttttcgtattactttttttttaatgaatacaaataacagtgtttggaaaattaatagtatcttcagatttttttttccaaagacatattagtgtatatcttacagtcaaaattctaacaagaaggggagctatgttttggaatacaagatcttaatgagcaatgtttaagacaagcaatttttaactaatttgtattgttttattatttaattatatgctaataatttcaagaagcattgaaagcaagaaattataacaatctgtaactttaagtagtttttattttttattaaattgacaaaattaataccttgctatgtttgataatgatataatttcttaaaataatttatgaattcatttgatataagaagactataataaaa

SEQ ID NO: 9322 - DNA, 1047 bp, Homo sapiens
taatttttttattcttaattttaattcagtttaactggaaataatgcagccatgcacttgtgcgcatgttctttttctctttttctgtaaattgtgtttttagtattattcttgaatcattattgttctgctttataatgttattgttaaatacttatggctgaagggatttattggtacaggtaggcaaccagatatagggccaaaagagctttctttgccatttccagcttagaaaattaaggaagaagatcctggttggcctgtctgaggtcacatggaaacccttgtatcaatgtctatggagtgctgcgatgtgattgagcaacaccgtaattatatgctcattcttaaggtcaggatatcttctgtaaccagataacaggagaagggtaaccaccattacccacttattgtctacatattatgtgcctattttttgacaacattttggagttttgggctcagtaataattagcaattagtttactgactccagtggataatctgaggaccatagactgacaggggctttgcttctgttcttgaacctagagactacattgttcttcctcagtacaagtgaagaaatggctaaaataaatgtagtagtactgtgtgtacatttgtttgtgtgtgtgtgtatatatatatatacacacacatatatatatatctgtgtgtgtcacagatatatatatctgtcataaagaattaactaggccaggcatggtgactcatacatgtaatctcagcactttgcatggtcaaggtggaaggatcacttgagtccaggagtttgaggctgtagtaagctatgatcacactactgcaccccagcctgggcaacagagtgagaccatgtctgtaaaaacaaacatcaaaacaaatgaaaagaatttgctatatcattaaattataagtattgaacaatatcattaaatgataacgtttttgaattaatacatttattgtcttatttatctttatcgataattatgtatttctttaccttaaactatatgttattataatcattttaaagat

SEQ ID NO: 9323 - DNA, 1029 bp, Homo sapiens
actgtactgaatgctataggcaattgtaacacagtggtaggtatttgtgtctctaaacatagaaaagatacagtaaaaatacagcattataatcttatggaacaaccatggtatacatggtccatcgttgattgaaaagtcattatgcagctcatgtaattctttcctctcttttctttctttctatactcaatctaccatcaaattcttttggtttcaaccctaaaacttactctgaattcattttatttgctttattagtaccaacctaatacaagctatcatcagctctcaattactgccataccttttatttgttgtctctatgtttagagtatatccagaatccagtcacttctcagacctttaggactttctaccactttgtttaagccacttttatataagcgagattattaccattcaggcttctatccttccccactttaagtctatcctcaacatagctgctaagtgccttttgaaatataaattagatcatatcacttctctgctccaagtcttctgatggaatgtgacatctcatcttcttcagaatccttataatgtcctacaaggtcttaccctcagatcttatctcctaaccactcttgacccttgctcagttctttaccaacgtaatagtctttttcttgttttttttactgctctaagtatgtttctggaatatcagaacctttgcacttgctgttcctattgctcaaacgcatgttaaaataaaacaggacacttttcagagaggttcttaagagaggtttttttttcctacccatttagtctttaatatacgttttttgtgccacatggcacataacctttcttactgattttatagtttaactccccatcaactctttgaaatacttatggtactatttcatctccaggtcaaatgacattcaaggtttaatggcattaattaaaaacctcatattatttatatattcagatgctttgaaagtttaatacacttttaaaatcatactatttctaagcaaaaattatgtt

SEQ ID NO: 9324 - DNA, 1013 bp, Homo sapiens
gcaagttgtttcttttttgttatctcagtattgtatttgcataaaataaaaaacaataaaggtttcagttattcgtttgtcttattcttatttttttgaaggaagtgctgtatttattttttaaattatggtcagaatataaagttccagtgatttccaaatagttttacatgataattcacagtgcaattattatttttggctctctaactatattaaatagttttgaatgattcatattgatgattctgatggtatcatgaatcagaattatttggattgataaaaccagtatactcagttcacttaaagtgcaacagaaattttgctggagttttgtgggcaggatggctaacatataattccaagtaacatgaatgtcacctgtgttatattaaatggcaaggtatttttcatgatttttttctccaactcaaaatgttttattgctttgaaatattgtgtaaaatgaattaatggacatatatttatatcctgtgggattttaaaattaaaagttataattgaatttactaggctctggataataaagtagtgaaagattcagtatgattcttgccctcatgaagtttacagtgtacattggttaaataaacaagtggtatggtaatctgcattttagcttttttagacagtttttgtactggcatgtattttccaaataaaatacacttaagtcagtaagtagttattttaaatgtaaatattttatatatattttgacatttttattgtataatacatggtaattacaggagtatcagaaaatgcatagacatgaaaagaaaatgagaaacacctggtattccatcattaacactaatcattgttaacgtttctatgtatgcctttgctttctttttatgcacatagaagtgtatacattacaatatggaattattgccaaatctcttgaatggtctgatttttctgtaaattatcttttacctcaacatgtttgtaacttcagttttaatgtatggctatcagaa

SEQ ID NO: 9325 - DNA, 1050 bp, Homo sapiens
ctgcataaggttatccagttttcccagcaccatttgtagacgacactgttctttcctcaatgtttgttcttggcacttattgaagctgagttggttgtaaatgtgtggatttatagtcgggttccttgttctctttcattgctctatgtgtctgtttttatgcccctaccatggtattttggttactataggtttctagtatactttggagtcaggaagtatgatttgctctagttttgttctttttgctcatgattgctttaggtattctggatcttttgtggttccatataaatgttaggagttttttttctatttctgtgaagaatgtcattgatattttggtagggattgcactgaatgtgggtgatgtggtcatttttacaataattaattctttcaagccatgaacataggatatctttccatgtttttgtgtactcttcaatttctctgtgtatgttcatatagcctcttttcaagctcaccaattcttcttctgcctgatcagttctgctgttgagacactgatgtatttttcagtttgtcaattgaattttttagccaggaattctgtttcatttattttaaaaattatatgaatctctttcttaaagttgtctgatagaattccttctctgtgttatcttgaagtttgttgagcttcatgaagacagctgttttgaatttcctgtctgaggtcacatgtcttcatcactccaggattggtcactggtgccctatttagtctgtttggtgaggtcatgttttcctagttgttcttgatgcttatggacattcatcattgtctgggcatttaagtgttagatatttatttctgtctttgtgttatggccttgtttgtacctgtccttcttgagtggactttgaagacttcaaatataattgagtgttgttaccatagctgtagctactacagccattttagcattaccaggtgccctaacccaggtatgctgtgacccctacagacccttagatatatagccttggtggagttgggcaaggtaagacagaattccctgagtt

SEQ ID NO: 9326 - DNA, 1998 bp, Homo sapiens
gtaattatcattgctttaccattttatagggtttattatgctattctttttccagtcatttcatatttttaaggaaactatctttgtcagcattttgagattatgaaatttaaatcaaaacaattccagatttcagaaatgaacaaatagagacactgagcggttattaattatgagtaattagagctttctggataaagaggcagctttatgccaggactggtggctcacgcctataatcccagcattttgggaggccgaagtgggaggatcgcttgagcccaggagttcaagactagcctggacaacatactgagacatggtctctaccaaaaataaaattagctgggcatggtgggacacacctgtaatcccagctagtagggaggctgagatgggaggatcgcttgagcccagggatttgaagctgcagtgagctatcattgcgctattgcactctagcctgggtgtctgagcaagaccctgtctcaaaaaaatccaaataacaacaacaaatgaagcatctttcaaatacaagccattatagtatacaatttaaaaatcggttttccccaactttgagttcttttgttttttaaactgcttaaataaaacagtaaaatattaagccaattgaagagagataataagattataaactgttgacaacatttttggtctctatttttataaaacaaaatgtctgtttttgtacctatgttctttcttcctgttcggctgaagttctttttatttgttgatacttattatttttttattcaggttatttcacagttgaggattttgggcagatccataacagctggttccaaatttgatagagaaatctggtctaatgaactttctcctgtcctcaatctctggaagaaactaaaccaggttagtagtggaatattcttctgattcttttgctttttctcccgcatcgtaaccatgtgctccccatttctgcctgagtcatacaagtaatcacattgcagaggttcctaactgtgaagtcatggcccatgacctcctttcttcataccagtgcacatcaaagttagtattttttactctctcttttatgaaatagatctttccttatctttaaataagtaatcatattcacataatttcagttcttccctttagcagttcattccttgtcttgatgtttgataattttcttcctctcagggctatgcttcttgtaacagtttctgagcccagtttccaacttttttttaagtgacattggcagttttgtattttctaatgattttcccaattcatgcagttcttaaaatgtatatacatagtacaaccatgtaggtattcatatgtatatatattattatgtaatatagctatttattctgagaataatgtgtgattgttttcagtttttacttagtaataatatgaaaatggaataatttgcataattgactaagttcacctcttactaaacagaaaaccaatggcaaaagtaaccttaattattgcaaagatctcatcttacattttggagacataatccaggtatttgttggaaagtttccttctctgtgaaatacaggttaacttgtttgactcaatttccagagtttgggggaagattagagtctactctgtagttttggcaccttagtcccctataattttctctgcctacttctgaatttgcaaagtccatgttgtttttgctccacatttgatttaaccttaaagcacaacttatatctctgttttttataagaaatccgttgatgtgattttgtagttttagtgatcattaatgaagttgcgaggacagctcatattgctaagtgtgcagtcttctactaagccacttttttttaaactacattctttgaagttttgcacttcaaagttcccacagttgactcttccatctgtgcaaagtttacttggatgtgtcatttagacttccttgcactaactgcttctcttcatcaggcacatctgatttta

SEQ ID NO: 9327 - DNA, 1054 bp, Homo sapiens
gttttgttatagcaaccagaacagactaagacagggataaggaattttattccaagtgcaatgggaaaccatggaagttataggtagagtgggtatgatctagtttacaatttcaaaaagtttttgaagaaagctgttgtgtagaagatggtgagaaagtaaggagagcattcaggaagctcctgcagtagtccaggtaagagcagatggcagcttacattacggtggcagagcagatgaagagcagtgggtgcccttgagtaatgtcaaaatgtagagttattatgagaaaaaaatttagagttattatagggaaacaaacaaacaaaaacaaaaaacgaaaaaagaactgaagactgtgttaccatagaaaccttgaggaatctttagttaggaatgaaattgttaactaggccgaatagcttctgagaggttaaacaaaacgaggacagaattgaccactggatattcagaataaaagtggtcactggtgaccttgacaagtaaagtttaggtggaataaggagactggaagttagatttaaaggctgactagagataggagatgaggagctggagtcaatgtatctagacaattcttttttaaaatgtgcttataaaggagagtagtgaaataaggtgatcaagatacagggcccattgtgtttttttcttagagagggaaagtaagtattaggttggttttaggctaatgagaaagatcccgttgaggaagtagttgaagatgctgaaaaatcgaagctcttaaaccatttaggaaaacaaaaacaatgatttttgctaaatgagggatcaataataaatatagacattcctgcttcttaaatatattaatttttttcttttttttttttcttttttttttttttttagctataggatcttgatgtaaccacttctctcaatgtgaaaccactgaagtttaatcttgccttgcttttctgtccttacttctggtcatatagaattccattgtttcagtatttacaagactatttggtttgtgtatttgtttttaattattagctcaatc

SEQ ID NO: 9328 - DNA, 1034 bp, Homo sapiens
atgatgaaaaggaaatgaccaaagaaaaccaaagatatagttaagttttactaaaatattaacattttacataatgtgaatactattaacaatatgtgtaaagaatctaatgcagtacctacatttgacttttaaaatatcaaaatattaacttcagtagattctaagaatttaagaatcttaataaattatgagcaaaagggctaaataaaacagaagggttctactgacaaaggagataggaggctttcgtgagaagcagtttccttttgatgatttttttttttttaagggctggtatttgatttgattactgagtttgttagaatagtttcgtaattggtccttgaaacatttttatgatggctgctttacagtccttgttcaagaatcccaacttctgtgtcatgttggtgtttgcatctgataatctttctttttaaatttaaattgaagttttactggttcttggtataatgaataactttgtactatatcctgaacattttaaatatttgtaagactctggttcgtatttaaatcttgttgtttttttttttttttaagcaggtagtcaacctatttaagttcagaatgcatgtcttgattcacttctataggttgtggttccaacatcaatttggtttataaaatatctgcagtgctattctggtctgcctcacttgtgtcttatatgacaggactttaccaccaccactgccatcactacctcctccccacagtctccacagagccagctgtgagagggagggcatgccctctcgttacttcagtagtgaagtggagcccagaattccacccacaggcactgcaggggaggagcaatatgcttcttacttcagggagcaggcagaagtcagagtactgcccagcatctccacctggcatctctccttctactgcaggccaaggatgactcatgacttttaataaaataattattgatttcttcttcttttttaatttgtagaatattttacattggtaagttagaaatgtgcattggtgcccag

SEQ ID NO: 9329 - DNA, 1050 bp, Homo sapiens
cttgatcttaacattcagtatgatgttatctgtgcatttgtcaagtgtggcctttaattgtgttgaggtagataacttctgtttcaatttgttgatagtttttttgtcaggaagagatgttgaattttgtcaaatgccttttttgtgtctgttgaaatgatcatgtggcttttgtccttctgttaatgtgtgtcatttttattcatttgtatatgttgaaccatccttgcatccctggggtgaatcccactttagtatactgaatgatctttttaatgtatttttgaatttggttcgctagtatctttttgagagttttcacatctatgtttcagggatattggcctgtagtttgctttttctttgctgtgttttttctttgctgtgtccttctctggttttggaatcacaatcatgctggctttgtaaaatgagtttagaattgtttcttcctctttatttttttggaatagtttgaagaacattggtattagttctttaaatgtttatggtagagtgcagcagtgaagtcatcaggtcctgagctgttctttgaagacttctattacacattcagtttccacacttgttattggtttgttcaattgtgtgtgtgtgtgtatgtgtgtttggagatagggtcttgctctgtcactcaggctggagtgcagtggtgtgatcttgactcactgcagccccgacttcctgggctcaggcaatccccatgcctcagccccccaagtagctgggactacagtcgtgcaccaccatattaggctaatttttgtagagatagggtttttccatgttgtccaggctgatctcaaactcctgagctcaggcagtctgcccattttggcctcccaaagtgctgggtttacaggcatgagtgaccatgcctgaccccattttttaattgataatttatcttggtagattgtatgtgtctaggaatttatccacttttttctgctatcagtgtgttggcatatagttgctcataaaagtctcttatgatactttgtatttctgtgatatcagtagtaatgt

SEQ ID NO: 9330 - DNA, 1012 bp, Homo sapiens
tatatttgtcaggaatcatatagttaatagcagaagacccgagtcacactggcttaagccatataaaaattaattgactgatgtaactgaagaatccaatggtatctagcattatgccagcttgatgtaggaacttaaattgtcattagcatgtcagtttatgttagctatctagtgttacatatataatgaaatttatgttgatttcactttggggcaggtcccctatacatgagcttgagttttatattccaagctccaagtccaacagaaagaacacgtgttttctagtaacacacacaaaaatcttaggatttgctttgattaaaaccagttggctcatgcgttatgcctattcccatactagttcagtgggcagtgtgtgcaaagctctcactgaccagagcttcagccaaatgcctcttcctggagctggggatggatttatctttgcctttaacacatatactgagagtaaggaaatgatgattaccagtgaaaagtctagatagttttagaagaaggggaaatcaacacttcttgtgctgaaaaattggaccattttaaatgataataaaatccatgtattttatatctatttgatagaaacaaaaatatgggatgttctgcacagatttattttagctgtttggagaatagaaactttgcagaagttggtatctggaaaatatttcagtggagtgctataggaattaagttttctttttttttttcacgcccccttgctgtttgtactcaatatagggaaacctctgatagtcaacctaacagtcctctctgtttgaatataaaataatagccttcctagaacttcctacattcacatatactagcattaaaatatccagtgcttttctacatatacagaaaggtctactctggcatccttgtcttcttttttattttaccttgaaaaagaatctgttttgcattgttttttctttgtacatacattgccgtctctgttaatcaaccatgattatcaaaatac

SEQ ID NO: 9331 - DNA, 1092 bp, Homo sapiens
gctggaattacaggtgtgagccaccgtgcgcggcccttgatttcaaagttttgtcctaagcagttggttaagtggtttagtgagttgaaggatactgacaatatggtaatagagcagagttttgttgttgttgttgttgttgttgttgttgtttagggaggaggggagtggtcttgcaaattaaaagttctaatttgaacatgataagtttagatgtcttttagacatcttggtggaaatgtcagagaagtaattgatgagaaagctactggaattggaaatagaaaattagcaattatcagcatatcaacatagtgtttaaaaccataggaatggccaagtatctggcactggtgcacttcaatattgagatgtttagaaaaggaaaagttgtccatcattaaaaccaagaaatagtagttaggtatatagaagaaagcctgggaggctgtagtgatcaagaagccaagagaataaagtgttcttaaaggtcagaattatcaactatgtcaaatgctgtaagtgaggttagagaaaaatcatgtttggcaacatggaagacgttggtgatcttgaggagatgttttgtgaagttctaaagaatgaaagcctggtcatatgagtttaaaaaagaataaggggtgaagttgagacagcaaatatagacagttttttcagggagttgtgttatgaagtaacacagatgaatagagtgagactgacagggagaagagccaaaggaatttttttggtttggttttgttttttaatataggggatttttgaccatatctgtgttcactataaatttttaaattgatggtacaagaaaaaggaaatgattttaggagtaaagttcttaaaaaggcaagaggaaatagggcccaatgcacatgtggaaagataggccttaaataggagcttgaactattcacaaaataagttatagttataaattattattaataattaagaggagacctataagtaggtggacattataaattcctgttttgccacactaaaaattaaatactgtgccaaaaagtaatttttaataatcttgtttcccatagtggttcaggttctgca

SEQ ID NO: 9332 - DNA, 1030 bp, Homo sapiens
caagttacgtaacacttctgagtctcgatttcctagtctgttaacacagataaatcacatatatcacacataaattttatgaatattagaaaataatttggaaaatattccacatgtagttaaaaatcagttattatatctgcatttcattttctgtgtcatatggaaattgtatgtctgagccaattttaatatttcaagttatttatattttaaatttatatttttaaaaggcattttaaatagattttttgatatttcgtagaaaattttttgacttctcactgaattgttaattttaaatcacgtacagaagtctaaagccatatttgtcaaaattatttttaagtcttaagagagggtaaatttatctaagatctttgggccattcagagagaggattgtttcactgatagattaaaggaggtcaatgaattctcctaattttatgcaaaattgtgtgtacttgtgcacagtgtgtgtgtgtttacagagacacaatcaaacttttgaacagcttctcaatgagttccagtcacaaaaaaggcccagtacttcagccctaaaggagccacacataaattagatgaacaaacagctcttcattccctatcttcatcattttagaagcagaatagattttagccttgaaactaaccaggaattttttttaatgaaatccatctctactaccttcttccttaacatagaaaataatcagtgtgtctaagctggaaaaccccttggctttgtcctctgcctctcgcattgtcatcctataatttttatttattctcttactatccaaagtgttacatattctacatcagctctttctattttcatcaccatttacttttccctaccatcaccactcctggaacactgtgttcttgaaggtcatcagtgacttacaaattagtaaatccaattgttatttcttatgcctcgttttctcagaatagtttgcaggatttgacattgctgacaactccttgttctttgaaactcattcctcctcttgtaataa

SEQ ID NO: 9333 - DNA, 1089 bp, Homo sapiens
atgaaaatgagtttattccttcatggtttctggattgcctggctttaagcaagatattctggaaaacctaatctctcttaaaaactatgaaataatgcatctattcaactgaagtagtgtttgcataaagtaaactcttagtaaatgattattatatttattgctttaatataattgaataattaaattactaaatataattccttaatatttggtgatgtgttgttttaatcttttttgaagtatttataaaagaatagctaaatacacgttgtggttaacttaagtaaatcatacatactggctttctttctttttttcaactttttaacctgatcattgttgtgccttgcatgaaacattatttaattctctcctttgtttgcttttgcttctgagcatctcctttgccatttttttaatgcttgttttggtcacgtttaaattatgaagttcttaagtatcttcctaaattaactaccttttatctctgtggggttttgcagcacacggtctgtgcatactctcaagatcactcagtatcttcatttgttcttgtggaagtgtgaatgggaggcatgaagtggttcctacaatggatttcctaattatatgtttaaatctgttcaaaatcacaacataactacacatattcagagccagttaaaatacacattctgtggacaagataattcaactcagaaaaatttttaattaagaaaaacaattatgtaccctgtgttggattttgtatgcacctagcaaggaaaaaaatatagcaaattaccatttacgaagataccctatatttaatctcctctggatttaatgtttattagaggttattatataacttactatggtgataaacacagtaagagatgataactaaaaaagttactggatgcctagaaattaaaaggcccaaagggagatgaagatatcaaagacgggcctaatccatttcatttgagaaaatggttttgaaaaatagctcaaaaagaaatgaactcgtttcttttcagtgtttttagttatacaagttattcttataaaatttcaaaatattaaaagaaaactaatatctcc

SEQ ID NO: 9334 - DNA, 1046 bp, Homo sapiens
tggcttttgcagtgcagagctttgtgaggttgtaactagcagatactgggaagcacgattatttcttactttgaagcttagtccatctccattgaaaaaccatcaagttcctgctggcagcttctgggccacaagtttttaattagtgcttatccttataccttagctaactcccttatctaggaccaccttctgctggtcctggcaggatccaagaatcatttgatttcattttcccttagtgtctatacttacatcttttttttcttcaacgtcatagacagaaagattgagagagtgagaagaaatgcaatgccttcccccttcttgatgctgtaacttttctgccttattggaaagggagaattccttgatttccatggcaactctcactgcttctgcctttagcaagtttactcttacctttcccttatgtttaataatttccattatttccttaacccggctcaaattcacttgctcacacaagctactcatttttgttttctttaaggaattgatagtgtttggacaaacttaatatttgaacagtcttcaaggtgtatgtgtttaaatttgctgtgtatggcttaacattttaattagtaatcagtcacttatatcctagtagaaattagccaactctgataggggtgcagtactcttaaaaagagggggagagagggtctgaatggggctgttgacatagaaaagatattcctgaagcaaacattccaaatgaagaattaggaatgtgcataaagctttcttaacaatatgcttacatccgtgatgaagatgttcaaataacagaaatatgtaaatatctgaaataaaaagatatgtgcatgctctcagaactttttaagagaacattcacccacccatgctgggtagtcattttcctgccaaggatggagaatgatctatgtgaccttttccagagattttttttttaaattcacatttcagattctgctcacttttaataaaggcaaagttattaaggaatcataatcaacttcaagaataaatatttaaactcc

SEQ ID NO: 9335 - DNA, 1058 bp, Homo sapiens
gagactgtggcaataatctagatgagaagatggttgaactggcactaggagtggtgagaagtggttgaactcagaatatgttttgaaggtacagacaacaggattctgaatgtgacagaaaggaaggagccaaaaaccgtgctaagctttttgactctagcaaccagaaaacagaattgtcattactgaaatgagaacagaggaaagaatattggtgggaagtcaggtagtgctcaggttttaacatattaattttgaagtgcttatcattaaacctcctactgaacatatgaagtaggcagttagatatgttggtatggaattcagaggaaagttattagtattaagatggtatttaactcatccccagagagtgttagttcatagataatgagagaacaacaagagaaatccaagttctaaactctgccctatggcactctgatccttagagatggttgagatgaaaaggaaccaacaaagaaaccgagaacaagagtagctagagtagctagcaaggtagaaggagaactaggtgagtatgtttagatgccaagtatcaaatggttttaagggaagagtgatcagtgtggtcaaatgctaaggaatggccactggatttaacagcatggtgatcactggtgaccttctcaagagcagtttcattgaatagagtaaaaacctaatctgaaggtgtgcaagaaagagcaaaaagaaagaaactgaggatggcaggaatagaggactctttcaagtagtttcgatgtcaagaggatgggaatgagtcagttgctggagggaaaatgggattaagatgggagaaattacaacgggtatagggtgatgcaataatcaacaaagaagatgatgatgctggagacagaggagagactatctggaaatgttctttagtagataatagcagatggaacccagggtagacataaaggatttggccttaggattcactcatagtaactgaatattattatattactattttattactatttagttactgtgtggaatatttgcatgaacagatatagtggtaggaa

SEQ ID NO: 9336 - DNA, 1040 bp, Homo sapiens
tcccctgaaatttaaaataactgcttttctaaaagtctgctaactaataaaaataaaacattaataacaaagcaggaacagaaagatctacagctaaattcctaacatgacggcaagtgtagaatttaatgaattccaaggaaaaacaaatagcttcacacatatttaaatttttttattcaggtaaccaaataaaaatgcagttaggtcagttagtcatcatttctaagtttttatttatttttgaatatagtatgaattttatttgataattatttgttaatagtggttcattaattgtgacaaatatacctcactgaggtaagatgttaaaatagggaaaactgggtgcagggtatttaggaactctctgtactgtctttgcaattttatgtaaatctaaaattttaaaataaaaaaatttaaagttaacctatattttattctaactcactttctaatctgtttttattttcatagctacataatagttttacatatttatggggtacatgtgatactttgatacaagcatacaaagtgtaatgatcaaatctaggtaactgggatatccatcacctcaaacacttatcatttatttgtgttggcaatattccagatttacccttctagttattttaaaatatgtaataaattactgttaactagaatctccctattgtgctactaatatggtttggctctgtgtccccactcaaatctcatctcgaattgtaattctcacatgtcaaaggagggacttgtaatccccacgtgttgagggagggagatgattggatcatggaggcagtttcccctatgctgtcgcgtgatagtgagtgagttctcacaatatctgatggttttataagggctcttcccctttacttcactctcctctctcttggtgaagaaggccttgcttcccctttgccttctgtcatgattttacgtgtcctgaggcctcccaaaccatgcagaactgtgagtcaattaaacctctttcctttataaattacccagtctcaggtaatatcttt

SEQ ID NO: 9337 - DNA, 1050 bp, Homo sapiens
taaacttttagctcatggcatattttgttgactgattgtctgatataacctaattttgactttctctctcactgacttctttaatgaaaagtacaggatatatttgaatcacattatttattcttaatttatttatcctgaattttaagatgccaggcatacggactctccactgaagcagtcatacaaaagaaggaaattgtcacaacattgttagtgagctctttatgtgttagaatttgatgtttacatggacatttgttatatcaggaagatttgttgtactttgaattcttataaaatacttcatagaaatctcactcagggaaacaattggtgggagttctacagtgacttagctcttttggataacagagcattgaaatgacagcaccacttctctgttttgttgcttagtaaagtgaaaagcattgatttatatacttgcattcaatttattaagtatatttaaaatagttcatgaaagtgtccaaactaatagcttaagatacccaacttctgacaagtagcaaataactgaatgactatgtaatatgtgtaatatgttccagtattaacaccaatagaagcaaatgtaggtgagactattttaagaatttaaattttttgtcactttttaaaatttgaattgtttaaacagtgggtgttagaatatatttctattttgaaatatgactataagccctgttgctttcaaaataagcagctttgtatcttcacttagaatctcataaacttaaaatatttacagactcatggattcagaattcttaggcttcaactattttcagagagtaacagaaaagctacaaattctcacagatgtgagcccccatgtatctgaactttgaataaaaagctcagcttcctttcattagcttgtaatctctgtttctataagaagcactcttagtttgtaatccctatttctataagcagcactgtttttactcaagtgtcttctctactttgtgttgctcatcagcctaaacaaaattcaggccaaaagctctggtaggttaagcaaga

SEQ ID NO: 9338 - DNA, 1063 bp, Homo sapiens
gattgttgtgaggattcaatgagaatcctctgtctggctaaataaaatataatacagttatactttaaaagagtatgtaagctgaattgttgagaaagcttgaatgtcagaaaagttagaataatatcttggaggcaatcatgaatttgtgaagatttttgacaaggcattctaaaaagcagtgaagcaaagttattctgactctgggtagcagagaatggattgagaaagccagtggatctggtcttgggtgataaaggcttcaactaaagtgatgccagtttaatagaaatgaaaatataaatatgagagtcacttgtcataaaaacagttcttaatggataattggctagaggaaaggaagggaaatgaaaattcaaagatgagactgagtttttgtggttgggccttgttattttggtattcatttttacagtcctatttcttctgtgtaaaatctcctaattcattatactgaagcttctatatggtactgttcttgggacccaagattacatgtctcaaaagattagaacttaaatcaataagaactttgtatgtatgaaaaaaaagacattttaactttggaagaaaatcttaccatctagttaaatcaagtcatttcatatagatattggtaatgcttttcaaagaaaattatctactacccttccttcttgggtatttaggctgtatctgttcagttgacaagaccacctgcctttcaagttttttctcagctcaaggagtatttagcctgagagaactgaaattgccatcttacaatggcttccaaaacttaatcaggcatagaccctaccaagcctgacaaacttcccaggaaaaagaaaatttcccacagagagccatagaaggatgaatatatagtttagctatacagggaagagtcatgataggaaaccaaaggtatcctggtactgtaggaagaacactggaccagaaggcagaagacctgtgccccagctggactttgatggacaagtcacctaactttcattaggccccagggactgcatcctagggcctaataagaaggatgggc

SEQ ID NO: 9339 - DNA, 1031 bp, Homo sapiens
actgagtttttcctttgagtataattttgatgctcaaaaagctttgagttttatagcattttggatttcaggttttcagattagggatcctcaatctctagctaagaagtgatggaccagcatttgaacatttgactgcagggacatagaattaaaactccgaagggtacgcgaatgtgtgtgcttatgtataatttaaattgtatccatgtgtatattagtttcttcaggctgcttaacaaagtacctcaaacatggtgtcttaaagtgaccgaaagctcttctgtaagttctggaaggctggaagttaaggtgtcagcagggccatggtctctctgaaggttctaagaaagaatccttccttgcttcttcctagtttctgctcattcctagcagtccttggcttgcagttgcatcactccaatttttgccttcaccttcaaatgaccttttctgtctcctctctgtgtgtctgtctctccttgtaaggaaaccaggcattggattcagggctcactttaattaggtatgacctgatcttaacttgattacatctataaagactctatttccaaataaggtcacattctaaggttctgggtggacatgaatttcaggagacacccttcaacccagtagagtccattctctggccccctgcaaaatttatatccatctaacatacaaagtaaattcaccccatcccagcattagcaattctcagcccattccagcattaactctaaatctcatgtaagtgttaatatcatcaacccaaaaagtggcagatctcatctcaatcatctaaatcagctatgtgtgaaactggagtatgatccttcttggggcaaaattcctctcatctgtggacttgtgaaagcagaaaacaagtcttctaaaaatcagtggtaggagaggcataggatagacattcccattccaaaaagaagttcgaagtaaaaaggggtcattgttctcaaacatgttccaaacccagcagagtaaattcattaggtttcaaagcctgaaaa

SEQ ID NO: 9340 - DNA, 1087 bp, Homo sapiens
cattgcttaactcccttccacttccctcaaaaatgaccagcccattttcctaaaggctgaggtagttatatgtatatatttgtgtatacatattggtgaccttgttttggagagggattaatgtcgtaggccctgaggttctggatttttttccgtaggcctgaaatagttgctcaaggcattggatctaaatgattttgttgtatgttactactgtgtttaaaataaaacattagttgctgggtggtcttgattagttaatcattccagaatacaatatctaacactgctctccctaatgatcaagctataagatggaagatcaggtttttctaaatttgactgatgattctctgtgtatgtaatggtattattagaacttgccaacgtatgtgcagtaattgtgctgtcttcaaatagtttaagggacaaattcactgttcttcctaccgatttttctttattccagtttcctaggtaaactgcacttaatacttaacacaatatttgcccactgtatatccaccataatgccacagtgtggcgctgctgtgctttggccgaatatttacgaaatcaccttttcctattgctgtcaaattttttattttgtggactaaataagatgctctaaagtatatgaaaacgcactcgtatcggatattttttggctgtacataatgagttatgtgattgctttctagtgattgtgccagattgattgccttttatgttaatcagttttttaatagcatgcttatttaaatttttttccttgattgccccatcttatttagttaaaaatcagaaggcttcttggaggttataaaaataaaatttgaagaaagcagcaagcagaatgacactatagatgacaaaatgcgtatctttttaaatgcagattttttggacattaatctgttaaaactacagtttcactcaaaatatataatgcaggcttccaaaccaaaaatagtttattcctcccattattgttacatatgctgtttgtgccaaaatccattcaacaagaaacagtttttgatttttgtagatatagtgttcccaatgtttaaaatttccagat

SEQ ID NO: 9341 - DNA, 1067 bp, Homo sapiens
ggtaactgcttcaatatatattacattttaaagtccccttcccctttgtctcatatgtagaggaaagtagaaaattgcatattggttatgttttacctataaatttccaccatgatttttcatacgtgatagtatgtagtttactaaatgcttacataccaatgttgcaacttgattttttttttttaaccttgtactttattatacatactaacatcaccagtgaaggacagatagctgtcaagtacctctagatagggcacatcacctgtgtagtattctggttgagaatgcataacctaatccactcattaaatatcaaacaaaccccaaatgagcaatattttattaataaaaagcagatttagggaatttgtactttaaaacgttaatgtcataaaaaacaaaagaaaggctaacaagacatgacaactgaatgcaatacttgtccctacttgcccattactgggctcctgttctggaggagggatatgccacaaaggatgctattggattaattcacagaatttggaatacagctaataaagtattgtttcaatgttaaacttactgacgttattaactgctgtggttatgtaagagaatgtgcctactaggaaatacatgttgaagtatttaagagtaaagggccagcacatatgtaacttctaaagtagtttagcggaggtggggaaatatatatatgcacgcgtgtgagtgtacgtatatgtatatatatatagagagagagagaatgagatttagaaaatgtaaacaaagttacatctaggtttacatattttataatctatatttatttaccttttatctttcaggaaagcaaaatagatgagcaccattttgttgcagttgctcttaggaaacccgatggatctagacatcaggatgtaagattttaggatttctcttttttctaaatagcatgaatcaatgttaagtttgctctttattgatggaaatagtcatttgccttatatcagtttagagagatttttttaagattatagatatagtagtactctttattagcaaatattaagatcact

SEQ ID NO: 9342 - DNA, 1092 bp, Homo sapiens
gtacagacagacacatgataagccaaactgttcctgcaaacatagctatgcttcatgaggcttacaagaagtaactttaggtaggagctgtttttgtttgaagtactgcaaaattatattgtaacttcccctcaccccagttgcaattgtgtcatagtcatctgtatatcaaactattttattcccataacttcattggcttggatgcctaagtgtatgatgcttgaagcctcagaaaagaaataagcatatttcaaaagctgcaaaaggtttttcactgcctgcctcttgcggaactgggttacaccctggcactgttctgatccaagcatatttgcttggggaactaagtgctgactagtttgttttctatgtcaaggggcaatattaaaaaacaatttgcaagaaaatgtgtttcaagagagcaacctaagctaagtcactctgcgatatttcttgaaaataacgaccttgtcttgtatcagtggaagaagtaagttgcttagaaagggaaaagtcaaattgttccagaactgctaaaaatcattttaaaaaccatgatttagtttggaattatgattgtagtctgttgaatagtatttaccatggcatttcatacccatggtattttataccttctgactatcaattttagtattattagatgtttgtgtaaccacttgcttatttaaatgaattttgagtactgcctaattgtcagttatatgaataaattacatgtcattctactgtaacgtatattggatttcatattaatatttttgtgctcgtacagcttctgaatatgcaaatatgtgagtgaatggaatgtcaaagacagacaacctggagctgactataaatcacaccatcattcagagtcagcaggttcacaacttcctaggaaacctggcttggctgttgctagataaagcagaaacattaactacccattgttttcttggcctttctctcccttctgcgtttgtattatcctttccttctgcgtttgtattatcctttccctttcagccatgtaccaggtggcagcattttgcattgcctttcttatggtcctgtgtcccttcttag

SEQ ID NO: 9343 - DNA, 1024 bp, Homo sapiens
tcagtttcccttttttctcctatgcctataagaaagttcatatgtcgcgtcatataaacttttcttttttttggagatggagtttcgctcttgttgcccaggctggagtgcagtggtgtggatctccactcactgcaacctccgcctcccaggttcaagcaattctcctgcctcaacctcctgagtagctgggattacaggcacacgccaccacacccagcttatttttgtatttttagtagagacgggattttaccatattggccaggatggtctcaaactcctgacctcaagcgatccgcctacctcggccacccaaagtgttgggattacaggcgtgagccactgcactctgcctcctcatacaaacttgtactctgcctctgcctcaaacttctgtttctcactgtcacagttcttggaaaagcagcccccatttgctgcctttataattctttgccctttaacttaatgatatggcttactcttctctcccacccaattgtatagaacctgtcagtcataaaagtattagcaacctcctgattatcaaatgagattcttctctgataatatttatcctcttttctggtattattgctcatttcctctgcttctcttttggtttttatgacattccctccttggtcttctctctctcaaatcacgtttgtttttcactgacttccctcccctgtccccaatagaattatttctcaggattttatcttcagcccttttctatctttgtatatttttttctgggacagtcttaactcccatgatttcactatttttatctcttagctctgatctgagctctagatcaaaatgcagttctcaccatatcactttcctgttcagatacctttgatgattcaaattatttgagatctttccagctgggtcttctcctgataactagtattctctctctctgtctcttgtctctctctctcatacatgtgtgcgtacacactcctacttagctggttacttgttggctcactagcatgccagaggt

SEQ ID NO: 9344 - DNA, 1996 bp, Homo sapiens
aaaaacaaatcacatggtcacatttaacttgaaaaggagtactaatgactaacacatatggggtctctctctctctctctctctgtttttggcaatgtaattgatcattatttttcctaatattgcactacttttacattccagagataaactgtatgattatgaggtctgattgttttgatatgacacttgtttgatttgataatatttatttagatttttgcatctttgttctctggtaagattggcctggagtttccatttcttacgcttttctcagcagttcagtgtcagggttttttgttagcattataaaaggagatgagtatttttctgttttttttttctcctcagttttcagagtttacatagatttccaatatactttttgtgagtttaggacaactacaaaattagatgatacagtctccatataagactattctcacttctgacaccaactgtaagcttgggggattcccaaaaccactctcaggtttgataattcattagaaaggctcatagcatttagtgaaagctgttgtacccatagttatgatttgttatagggaaaggattcagataaaatcagccaaaggaagagactcatagggctaagtttaggagagttccaaatgcgagcttatcttgccctctccccatgtggtcaggacacatttctctcccggcatcaatgtatgacagtatgcacgagtaccatcaaatagggaagctcacccaacctttactgttgagttttgatggagcttattcacataggtgtgattgattacttgctcacagggatttcagtctccgtgttgagtgaccccctgtgaccccaaacccgtatctcaagttgtattgttcgtcttcccagttggtgagcctctacataggattatataggtgtggacagtcccctccctgaattgcattattagccaatccagtatgacccaaggcctcccaaagacatactttttagacgtaactttctaagtgtccagagattatctactagaagccaagaagaaagaccagactgtctccttggacaaggccaaattcttcactaaacacatttgtacaatttttctcttttatgattgtcttcctgtgattcctcaataacggattaagcctgtagggattccattatggaaaactggttcatttaaatttgagcccttcatttctctagctgtctcataaaaattacaggatactttttatttaactgcatttaaattaaactcccttttatctttttttttttcaagaataaaggttctcttcagtttgaagacaaatgggattttatgcgcccgattgttttgaagcttttacgccaggaatctgttacaaaacagcagtggtttgatctgttttcgtaagtaccccactaattctgtttgctagcataaaggaaattttagtgatgtctttccatacccaaatggaatgtgtaactctaagtttatctgtttacctattaaaaagtattactagttacattgagggtctccaagacctctcccaggtatgatgatttgctagggggctcacaggactgaacatacaatcatactcacagctttgagtcattacagtgaagggatccaaagcaaaatcagcaaagggaaaaggtacatggggtgaagtgcaggaaaaaacaagcacatgcttccaagaagagtcctttcccaggggagtcacacaggacacacttaatttttccagcaatgattgacagcgtgtgatatgttgtctaccagagaagcttattggagactcagtactcaggatttttatgggggctggtcacataggcagtctctctcaacatgtaccaaaatcagtgtaaaccatattgtttatataaacagtttaggtacagtgagccactgttatttcaggaaagtgtaggaaactgttgaccattcaagttctcagatgccagccaaaggctaatcttacaagcaggcatttctag

SEQ ID NO: 9345 - DNA, 1005 bp, Homo sapiens
aacttttttgtaaactatgtcagctttataagttctgagtttttgtatatcaatttatgatagcttttgtttttgtttttttgtttaaaggagaaacagtaattgatgtgtaaatgggtaatatatggggaagctaggagatatgctttattgtgatttaagtgactaatttttttaaaaagacaaaataggctggcccacaatcccaccattttgggaggctgaggcaggagaattgcttgaggatttgagttcaagcccagactgggcaacatagcaaaaccccatctctaccaaaaatttaaaaaactagacaggtgcatgcttgtagtcccagctactcaggaggctgaggcagggggatcccttgagcacaggagtttgagactgcagtgagctatggttgtggcactgcactccagcctgggtgacagagtatataacaaagctgggcatggtggctaacacttttaattccagcactttggagactgaggcaggaggatcccttgaaacaaggagttcaagaccagcctggacaacatagcaagactgtttctacaacaaaatttaaaaaaaaattaggcgtggtggcatgctcctatagtaccagctcttagaaggctgaggagggaggatcgcctcaacccaggaggtcaaggctgcagtgagccgtgattgtgccagtgcacactagcctgggcaacatagtgagaccctgtctctaaaaaataaaaataaaaaaatttttaaaaataattaaaaaggacaaaatagtatacatctattgtgttaaagaattaaaaggatttgtagttgtttttgcacaggaaaatattaatagcagttaactttgggcagtgacattgggagatggagacatgctttcataactaaattttatgtggtaagtagcagagaattaaagaggaaaacaatggctaaagaaaataaaaatagaaacaaatgtgtatgtgaggcaattacaagcgtacttggtttata

SEQ ID NO: 9346 - DNA, 1077 bp, Homo sapiens
tttgggattagaccacacgcagtcgacccttctttaccattatgctaaatatactgcttccccgaagtattcaagtgaatgcaacctaagttattttgagacagggtcttactctgtcacccaggctggagggcagtggcgtggtctcggctcactgggactacaggcgtgcaccaccacactgggctattttttttgtatttttttgtagagacaggattttgccctgctgcccaggctggtcttgaactcatagactccagcgatccacctgcctcggcctcccaaattgttgggactacaggcgtgagccactgcacctggcccaggcctacaaatttgatttccttttttggtgtttgtacatgatactttgtatattaataattgaaaattatgttacaatttgttcttgttttcctagcttatgcttgatacatggaatgagtcaatcttttcaaacataaaaaacagactccaagatagtgcaatgaagctggtacatgctgagagattgggagaagcttttgattctcagctggttattggagtaagagaatcctatggtatgttctgaacttttatgatcataatttctgtttcatggaaattgtagaacaattatggaatagcacaatcaaagttaagtttattggcatacaaagttacatctactttttgtactagatactttttttgagagtaagcaaatgataattctgcttaaaagaatgtataaaaattcatattaatgtggttaatattttcttcatgccattaatttcttggcaagtcgttttagtgaactaaattagatatataaatttgaatgtgtagctcataaaaggtaactagttcattaaaaggttaggtatttatgttttcaggaagtaagttacttccatgaaaaggagagcatgtaggagtacattctctcttacttctaatttgtttcctgtgacttagagtatgcttcttccccacgcttcatcctcctcctggaggcctttcttaattcccagagtaagttaacttctctcatttagtgcttcacagtacctgtgcctccttggcata

SEQ ID NO: 9347 - DNA, 1034 bp, Homo sapiens
aaaaaccagagtatcattatttcatacccctgatttttaagacccttcataatttgaccctaacctatttttctaacttaatattgtccagcaagagtcactctactccaataagaaatatttttttattcatacaactcactctgttacttttttttttggattcattttagcagtgttttcttctgcctacccaaaatcttgcaaggattcttttaactcaccttgtaataaaattgtaataaagtagctcagatcatctagccttcatcagtttcttcctatttgaattcccgtggtaactattgtttctaccactaggtttaggagcaaattatagactgccttgtatttcttatcaagcaccagctgtgtgccaggacacagcacagtctttatagctgtggacagagcacaatctttgtccttaagtttatagtatagtaatgatgcattttccagttatttgcttattagtgaagatcttcttttcatacacatctgtacatatgaaccatacacatgtttttaggtatatagtttatgggtttccaactggattgtaagatcattgagggcatgaaccatgtttatacttctctattccttaaaacacgtaactcagttctgagcatgtagccatcactaagtatgtacatgctctacttctgtagtaagaaaagttggaggctatggagatacatacctggcctcaaattataactcaagaccttatgaaccaactgtgcaacatttggaagttatgtggctactctcagtctatgtcctcataaagtaagtatctgcctcatgaggttgccatgtgggttaaatgagatctatatgtaaagcatttagcataatgcctggtacaaagtaagtgcccattaaaggatacctgttataataatttgtttaacctctcaagctagaaatggattcaacatccttttatttccctaatccctttcatttaagcatttaccaaattcttctcagtttactttaattatgttgtcaatttagctctcctt

SEQ ID NO: 9348 - DNA, 1035 bp, Homo sapiens
gcctgggtaacagagtgggactccatttcaaaaaaaaaagaatataccatcaattatataaaataaagtgatatctaataaatgttcttaatactttcagtaaagtatctttgttcttgagttgtttctactgtttcactcccatttgtacctcaactctcatttaaactgaccttattaataaatagactacaggggctgggcacggtggctcacacctataatcccagcactttgggaggccaaggcaggtggatcacaaggtcaggagatcgagaccatcctggctaacacagtgaaacccagtctctattaaaaatacaaaaaaattaacgaggcgtggtggtggggggcctgtagtcccagctacttgggaggctgaggcaggagaatggcatgaaccctggggggcggagcttgcagtgagctgaaatcgagccactgaactccagcctgggtgacagagcaagactccatctcaagaaaaataaaataaataaatagactgcaggacaaattattatatctttaaggtattttcagtactaaatgcttaactttagagatgtttataaatgataacaataaatacttctgtatagcaaaaagaacctttaaatgatggcctatttagggtaatcaatgctgattataactaaattcccatataaagtattttgagttctttttttgttttaattattaaagtaaatatctttaatttctgtgtatgtatataactctctccacatatatatggagagagagagagtgcgagcaagcacacacgagagagacctacagatattttaacttatagctagcccttcgcatggaactttaggatagtaaaaattactgtgctaactgaaactgcttagtaggaaaaagaatgattattctgtgactttttaaaactattgtcaaaagactcaaaactcttactgtcacttataagtatataggaaaaaggggaaaatagcaaaactaatacatatttactacgagaaacctttagaattaaattttctttct

SEQ ID NO: 9349 - DNA, 1028 bp, Homo sapiens
aagtgaatttgatttgtacccaccaggagaaatacagttgggaagggtgagggtggggttcttgttgcttttttctcttttttcctctcttaaaaaatgtacttgcacaaggaaggatcttcagatattcatgcactgaaaaatgctgttatcttttgtttttaaaaaatgcaattaaaactagaaatagcactcttggtttcttttgatgaaaagagtgagctggtcaatgcaacattgggaaacggcagatgtaggtgagaagttaagtatttaatagtatcaaattgttcaaacattgctcagtataataactggattttaatggtgacctaaaaatggtattaaatattttcaactttcaaatgttggttttctttaagcaggagactgctattttagttgttgttaaatgatgaggagtttttttttttttaaatatggctggaaagcttgttttgaaaaatgaagcttatattaattgttgcttcaatagtttaaaaaatttatggagataggtaggtcattatgattgcagagccaaaatagcaaaacaaacatattaagtgtgtttactaaacatattgtgtgtttactaacacacttaatgtttatatacctaatatttattatgccatatctgaatttattaaaaacaacacagaaatctcctgctctgatatagttatgtaactgatctcttaatctgtagcatagaagtattttggtattttaaggtctcatgattagggatttgtagcctcaggtttgaatcagtcacctaggggtaagagaaaaaccacaacataagacctgaaaaacagaagcaaaattgttgcactcttaatacgagcagtaaacttgccaaatatatgtacatatatatttatatattttaaaaataaacattttttaaatcgtcagaaggcaacatttaccatgttcctttcagtctatccaaagtagcaacttaactagttgctggcaactgaatacccagagtagtggaaattttaggacttgaggac

SEQ ID NO: 9350 - DNA, 1029 bp, Homo sapiens
aaaaaaaattgtgaagctactttgtaagtttctctttttaagatggtaacataatagaggttatagttaacagattctagatgagtgtttacttgggatggtttaagtgaagcagggatacaaagggaggcacagactactaggcatcttgtacaacagttgcttgctgaatgactacttgttttgagcgattttacttaaaatatttttattttaggtcaaccagatgtagtggtgaaagaagatgaagaatataaacgtgttgattttagcaaagttccaaagctgaagacagttttccagaaagaaaatggttagtgttaagaaatgaagcataagaaaaaattgagccagtataccatatctagttcttagaattgcctaaggattttgaaaaattctagaaaacatctagatgttatttaacattttcagtatatcaggctcatgtaaaattgttttggtagtttataccttcaatatataaatcccagggaagatatgtataacatgactatagaattcagtttttcatatgtagcagtctatgatagggtcttcattggcattgaaaaaaacagatttattgatataatttatataccataataacattcttctatttaaagtggtttggtagtttttaacattcatttatatttatctccaggtgattctagataagaataaatatctgatttgaaaaatatgtagtgagtacctgctatatattgaataaggaaagttagaccctggagacaaaaatattaactggtccctatgtttcaagagttgtagacgagcatttatccagtgccatcatgcatgtttgtgatgtttgagaaaactgttttatgtacacaaaaaggcattcttacattgtcttgcagttagctgtgtacatgtttcctgagggcaggaattgtctccacccatatttgtaatttctttaaacatttagcagcccaggcaataggtatttgttgaattgaaccaaatacatttattgtgaaggaatgttttgacttc

SEQ ID NO: 9351 - DNA, 1031 bp, Homo sapiens
tcatttccttatttacctggctgttttctattcatctttcatgtctcaatttaaatgtcatgtttctttggtctcagagtaataaaaagtaaatatacttcccccatctcccgccccgcagagccttcctctgttgcccaggctggagtacagtggctcgatcttggctcactgaaagctctgcctcccagattcaagcgattctcctgcctcagcctcctgagtagctgggattacaggcgcgcgccaccaagcccggctaatttttgtatttttagtagagacagggtttcaccatgttggtcaggctggtcgaactcctgaccttgtgatcctcccaccttggcctcccaaagtgctgggattacaggcgtgagccactgcgtccagtgtaaattatacttttattttaatcctgctactactgcaagcaaggcaaacatttttgtgttacagcattacttgtatagattttaagaaaatctcattttaaatacggaaatgttaagaaaaattattgtgcctttgaccagaatgtgcctctaattgtacagttaaatctaactataaatactgcagtataaaataattatatacacattttttcacacctctttctctctatatatgcatatatacatatacatatatatacctatatgtattttttttacagacagtgatgtgtgttctgaaattgtgaaccatgagtctagtacttaatgatctgcttatctgctgccgtcaactagaacatgatagagctacagaacgaaaggtagtaaattacttaaattcaatttttccttgaaataagtgtgattagtaacccattattatttcctttttattttcagaaagaagttgagaaatttaagcgcctgattcgagatcctgaaacaattaaacatctagatcggcattcagattccaaacaaggaaaatatttgaattgggatgctgtttttaggtattctattcaaatttattttactgtctttatttttctctttcatatttatttctgttgt

SEQ ID NO: 9352 - DNA, 1073 bp, Homo sapiens
ttagtagagacgagggttttgccatgttggccaggctggtctcaaactcctggcctcaagtgatctgcctgcctctgccttccaatatgctgggattataggtgtgagccaccacactcacacacccagcctactgttcatttcttttctttttttttttttgagacagagttttgctcttgttgctcaggctagagtgcaatggcgccatcttggctcactgcaacctccgcctcccgggctcaagcgattctcccgcctcagcttcccaagtaactgggattacaggcatgccccaccatgcccagctaattttgtatttttagtagagacggggtttcaccacattggtcaggcttgtctcgaactcctgacctcaagtgatccacctgccttgtcatcccaaactgctgggtttataggcgtgagccactgtgcccaccctgttcatttctttatgttagcatttgtctgcttttgtacaaagcttaaatagagtctagatagtgcaaaactcagctgcgaaaaatgttaagttccataagattcctgaaagtctctgtaagtaggctgggcacagtggctcatgcctctctaatcctagtactttgtgaggccaaggcaggcagattgcttgagcacaggattttgagaccagcctgggtaacatggtgagacctcatctctacaaaaacacaaaaattagccaggtgtggtggtgaccacctgtagtcccagctacttaggaggcttagggaggaagattgcttgagcccagggggcagtggttgcagtgagccacgatcatgctattgcactccagtctgggtgacagagtgagatcctgtgtccaaaaaaaaaaaaaaaaaaaaagtctctgcaggcaacttagttgtacttttaagaaagatttgatcccagaagtttgagaccaacctgggcaacatagggagaccccatctttaaaaaaactaaaaaaattagctgagtgtagtggtgcttgcctgtagtcctagctacctgggaggctgacatgggtagatcccttaagtccaggaggtcaaggctgcagt

SEQ ID NO: 9353 - DNA, 1031 bp, Homo sapiens
aggaaacactatgaacatctattaatttaaatgggccagttcctcaaaaccatacattatcaaaagtcatccaatataaaatagataatttgactagtcccataactattaggagaataaattgaatccataatttaaagcctttcataagacaaattgggaacaagataaggatgtgcactctcaccactccttttcaacattatgttggaggttctagccagggtagttagacaagaaaaataaaaggcatacagattggaaaggaagaaataacactcccctttgtagatgacatgattgtctatatataaagtcccaatatacacaagtataacattgtgaataatgttatttggggactgggcacagtggcttacacctgtcatctcagcactttcggaggctgaggcaggtggatcatctaaggtcagatgatggcttcctctaaaacaggacagatttacttgtagcctattgattataaaaagcttgaggtttctctgttataactcagtccactgttttcgcagtgtcaagtgtcccatttcaccttgcctttggtactggggaactgatgcaaaaatgaaggtagtctggctaccatcattactgggagaaataaactgtcctttttctcttatcaggaatctcaggtttcctgctagcacccaggaaactgtcatgctaatttgttaggttacaagtagataaaatctcagccaggcacagtggcttatgcgtgtaatcctagcactttgggaggccaaagcaggtggatcacttgagcccaggagttcaagaccagcctgggcaacatggtgaaatcctgtctctacctaaaataccaatcagttgggtgtggtggtgtgggcctctagacccagctacttgggaggctaaggtgggaggattacctgagtctgctgagattgaagctacagtgagccgtgatcttaccaccacacaccagtttgggtgacagagtaagactctacctcaaataaataagaaacaaaccaagcagagta

SEQ ID NO: 9354 - DNA, 1049 bp, Homo sapiens
gacagctgaataattttgtgggagctagcagtgtaaacagagtacatacataaaaattacattttaattttttggattacaggtgcttatgaatcaacaaaatggagaagtattttatacaacttatatgatctgctagtgaatgagataagtcatataggaagtagaggaaagtattcttcaggatttcgtaatattgccgtcaaagaaaatttgattgaattgatggcagatatctgtcaccaggtacagtaagtaggtcatgtcacatttagaaatttcctgttaattttttttttaaactgggcattttgggcttttaaaacctgtgttctcacaaaaagcctataaaatgactctgtacatgcaactattcctttcaaactatcagaaatatttggaattacccttttaacttaaaagttaatgcttttgcagatatttgaaaactaacaatgaactttttcattcttaaatgattgtctctaggaaataaggtgaccctaaccctaatgattcgattcgactcgactgtattctacaaagtgctgggattacaggcatgagccaccaagcccagtctgtttcttttttgcaattaagctagagttcacatagcataaaattcacgattttgagttgtacatttcagtggtttttagtatttttactatgttgtacaaccatcatcactaattctggaaactttttttattttatttttatttttttgagatggagtcttgctctgtcacccaggctggagtgcagtggcacaatctccgctcactgcaacctccctttcccgggttcaagtgattctcctgcatcagcctcccgagtagctgggactacaggtgcctgccaccacgcccagctaatttttgtttttttagtagagactgggtttcaccatattggccagcctagtctcagactcctgaccttgtgatcctcctgcatcggcctcccatagtgctgggattacaggcgtgagccaccgtgcccagcccagaacttttttatcatcccaaaagaaacctcatccc

SEQ ID NO: 9355 - DNA, 1027 bp, Homo sapiens
atgtagggtgatgggatatcagcaccctacgtatcttttcttcatgctaggaacgtttgaattattctcttcttgctgtttggaaatgtacaatagattaatgttaaccgtagtcaccctactgatgtatcggacaccaggtcttattccttctaattgtatacgtgtatccaaaagactttctttaaagaattatgaagagtttaaatttcttttatgtgcaatttatcattatttattaaatagccatgtttaaattgtagtactatgcactgttaataaacgagctattttttaatcaagaatcttcccaaatgtaatcagacttttaacagtttttatgttcatttagtcaccttaactaaatgtatgtgccaggcactgtcctgatagataaagtctttgcccctccaatagcttgcttttcacaattgtcctttgttttgttatagtcctgcagtatgctgtttgactttggcactgaccaccagtatagttccaggaacggtaaaaatgggaatagagcaaaatatgtgtgaagtaaatagaagcttttctttaaaggaatcaataatgaaatggctcttattctatcagttagagggtgacttagaaaatagcacagaagtgcctccaattcttcacaggtaatttaagttcattagcatgctgctgttttttttgtttgttttatcaggctctctccacttatttgatgccagatggctttattttataataataatgcagaatttcccagatctaaccttaattattaaatattatgtttgtttttacagttatctgtgtctttatgcctgattgcttctgaaataaagggttgtctcactgtgagaatatgggggatgtgcatgaaaaatgcacatataattctttgagcatttatgtgttcctttctgattttttaaataagtaagtccatatatttgagtcatgtagatcctggatcctttctcataatgggagtgtcttttgggtaaaagatgttttatgaatgaggtgagga

SEQ ID NO: 9356 - DNA, 1035 bp, Homo sapiens
atatttcttggttttgtaatgtgtttttcctcctttttggtgtaagtggggaaggagaaaagtagaataaactctaacctataattatagctcacttatctttagggtcaatagctgttactttaatgttgttaaagcacaatgaaagatgtacagtatagttattataactctaagaaaagatgtgtttttgaagcagcatatatattggccctaatagtaaactatttatctacattccattcaagatagagaaaacactgtctgccaagaataattgtttttatttctttgttgcttggttctttgtttgtcttaattgcagaagagtccaaataagattgcatctggctttttcctgcgattgttaacatcaaagctaatgaatgacattgcagatatttgtaaaagtttagtaagtatgcttcctgttttgctatcatattttgattctaataggcataatttttttgttgaaatatctttgtaaataaggatgcatctcacaacatatagctcttaacatttttacaaatgtggaaattaaggccaggtgcggtggctcatgcctgtaaccccagcactttgggaggccgaggtgggtggatcacaaggtcaggagattgagaccatcctggctaacacggtgaaaccccgtctctactaaaaatactaaaaattagccaggcgtggtgacatgtgcctgtagtcccagctactcgggaggctgaggcagaattgcttgaacctgggaggtggaggttgcagtgagcgaagatcgtgccactgcactccagcctaggcgacagagcgagactccatctcaaaaataaaaaaatttaaaaaattaaataaaatgtggaaattaaataatttgtcttgtggggaaatatacctgattgcttcttaatatcaatacctagcatagtagtgcctgcctttagtttctcaataaataatacatttaaaaattgggaacgaatcatccaggctcacagctatatctgcgcaacattgtaccaaaatttaaaataa

SEQ ID NO: 9357 - DNA, 1050 bp, Homo sapiens
attgtagtatttatttttcttccatacaaatgggcttatgccacatacattcttttttctggaacactgccgggcatacaaagtagttattgaaatatctattgagtgaaaacatattctgtaacttatttccattttatgacacatcttaatcattttccatgtcactgtacttattttataagctatctgctgttatactttatttatttagcagtgcatggtattctattgtgtggtgatagtgaatagtatatatgtatatgaaagcttatctgctcttttttttttttttttttttttgagacaaagtcttgctctgttgcccgggctggagttcagtggcacaatctcggctcactgcagcccccacctcctaggttcaagagattctcctgcctcagcctcccaagaagctgggattacagatgtgtgccaccacaaccggctaatttttgtatttttagtagagaccaggtttcaccatgttggccaggctggtctagaattcctgacctcaaatgatctgtccaccttggcctcccaaagtgcttggattacaggtgtgagccaccacactgagccaaaaagcccatctgctcttaattaacattttaagtggtttctagttttttgggttacaaagacttctgtggtacagattattgtacttttgtctatttgtatttgtgtgtatgatggatgtaggataatttctagcagtagacttgcttgttcaaaaggaatgtgaattttactttttgatggatattgtcattgtcctccaaaatagtcataccaatttaggcattttcctacaccctctttgggtaacactttaggtgttacaaaacttcttaatataagaaataattttgagggaggagccaagatggccgaataggaacagctccggtctacagctcccagcgtgaacgacgcagaagacgggtgatttctgcatttccatctgaggtaccgggttcatctcactagggagtgccagacagtgggcgcaggtcagtgggtgtgcgcaccgtgcgcgagccg

SEQ ID NO: 9358 - DNA, 1031 bp, Homo sapiens
cacacacctggctaatttattatacagacgggctcttgctatgttgcccaagctggtcttgaactcttgggcttaagcaaccctccctcctcagactcccaaagcgttgggattacaggtgtgaaccaccactggccagtaattttacattaaatcttcctttaagtataaccaaatgttggaaactcttagcatatttttatatttttatttacttaacatttattaagggtttgctatgtgtcagatactgtgccagttgagtacattttcttaattattattcccatctcatagatgaggaaatcaagaaaagttgaatgaatgttgtttctaggtcctactctaaataatattaacaagcatttaaatgatttatttttttcatttttcttaacacattgactttttggttcgtgcaggttttagagaaagtttctgaaacttttggatatagacgtttagaagactttatggcatctcatttagattatctggttttggaatggctaaatcttcaagatactgaatacaacttatcttcttttccttttattttattaaactacacaaatattgaggatttctataggtaagtttatacatgacatatgtgaaatttgtttaatttaaaattagttaacaatacttagcaagtcccctcaccagcaacacacataccatacccatacacatgtgtgtgtgggagcctacatagtatgagaagcaggacagcttcttttaataagaatgtattgaagggagtcactggacttcagatctggtcctagctgtgccaacaaccagctatctgactttggtcaaaccacataaagaccctctatgccttggttttttaatatgtaaagtaagcaagttacacaaggagatctttcaggtccttttcagctttaatatttgatcatctttcctttggaaaaaattgaagataaattactagtagctggttatttctgccttgtttttcttttctgttgcttgactataggcctcttagttattacttctat

SEQ ID NO: 9359 - DNA, 1050 bp, Homo sapiens
ggctaaggcgggcagatcatctgaggtcaggagttcgagaccagcctggccaacatggcaaaaccccatctctactaaaaatacaaaattagctgggcgtggtggcacattcctgtaaatgccaccttttcaggaggctgagacattagaatcacttgaaccggggaggcggaggtagcagtgagccttgatagcgccactgcactctagccttggtgacagagcgagactctgtctaaaaaagagtattaaaacattgtagggtttgcagtggaagaaatcatttatttcttccttgattagtagtaatagagacatgagtcagtgtctataaatggcacttaactaatttttttcttttattaagttttatttcacaggcttaaccaatacgtgttaaaagcaagttacattttctcttttaggaaattaaccattttctctcagtaagtgtttatgatgcacttccattgacaagacttgaaggactaaaggatcttcgaagacaactggaactacataaagatcagatggtggacattatgagagcttctcagggtgctaattttaaatgacatgggctatttctacctgtttctttttgaaagaatattttgcaaagtcttgctcttggtttcattgtcacagacttagttcagactctcatcatttagttcagaccctcatttctcatctaactgtaaaactggtcctaactggtcttctcaccctgaactcttcctgttttattcatcctctgccagatgatttctctaaacccaaatatgatcatgtttttctactgcctaaattttttttttaagagacagagtttttttttttttttaagagtctcactctgtcacctaggctggagtgtagtggcaccatcataacttactatgaccttgaattcctgggtacaaggaattctcctgtctcagccttctgaatagctggaacaacaggcacacaccactacacctagctactttatttattttttttattttttgtagggacaggggtcccactatgttgcctaggttg

SEQ ID NO: 9360 - DNA, 1030 bp, Homo sapiens
gatatattttataaatacattataactgacaggtactcagtgtcttttgttatgtagcagacataagaatgaagacttggagggctagattaaacttaaataattaaaaaccattcaagtcctttcctacagccatttgaggggaaacctaatgtaaaataagaagccaacatcatctctagtttaggtgtttagatttagtgaccacgggatggagaaatcacctggttaaagtcagcttgaagctctcgtgatggtttttgtttctaattagaaaaataggaataagtagtgtttcacagattctactatctttcttcaacagccttaacttctcattaggagcctaatatctacagtacttccttttttgtagattttaaaaaattgagatatatcctaatatagaaaagtatacagatcaaaaatatctagcttgaagaatgtttgcagagtacgcttgtacatgtagcacccagactaaaaaacagaatcttaccagaactgtagaagttttctttaaccaacatacttacctccttgtccatagtggcactgcttttatggacagacctgatttacaacagaagccctaagtggctttcctgtgtagcataaaattaatgtggtttgttctcacagctttccccctaagatcaggaatgagacaaggctgtccactttcactactgctgttcaacagtgtactggaagttctagccagagcaattaaacaagaaaaagaaattaaaagcatgccaattagaaaggaagtaaaactatctgtatttacagacgacatgatcttatgtatggaaaatcccagagaatccacaagaaagctactgtagtgctaataaatgaatttagcaaagttgcagggtacaagatcaacacataattagtggtgtttgtatatactagcagtgcacaatccagaaagaattagaaaagcaattccatttacgatagcatctaaaagaaataaatagccaggaataaatttaatcaaagaggtgaaaaacttata

SEQ ID NO: 9361 - DNA, 1032 bp, Homo sapiens
aaattactggtaatataaactgttaatgaaactaataatataacctggaaggcattataattctaacattttaaaatctcatttcattttgaaatcaagtctctgtggtagatgtggtctagttttgttcaagagacagatgagtcagagtttgtgatttgtgtaatatgctactaatgagtgacagagctgagagtagaacctaatttttctgctgcctaaagcagcagtttttgccataccactctgcctcttgtataaacataaatgttttcatcttaaaaggtaaacattgcctccagatttagttttaactgtatttagctttattcagaaagatttgttatactcattttgtgtaggaaaggtacaatgatttccacttctcttatttacattttctaatccctttctttctagtttttagaagtacccagatttgacaaagaaaacccttttgaaggcctggatgatataaatctgtggattcctctaagtgaaaatcatgacatttggataaagacactgacttgtgcttttttggacagtggaggcacaaaatgtgaaattcttcaattattaaagccaatgtgtgaagtaagaagattaattagtctgatataattccttgtttatgacctgtttatctaaagagtgctgtgatactgcacatcatcttcacataatatcacccccactcaaactgttgtaaatttattaaagtgagcatccgtatttagtcataactttatgcattaggtttcagcttcgggatagcaacatactagaggagttctaaggggtgccttgaataatttgttactaatgatagttaaaatactgctgattataaattatttgcattaaccaagagcctgttctaactttgtttacgtcttctgataagagcacctttattttccctgatatgctttcttgaataagaaaaaggagtggggcagcaatcagcatagcttttttatttttgaggatatagtacaatttatctcaacgaagagtaaaggtacatac

SEQ ID NO: 9362 - DNA, 1035 bp, Homo sapiens
attaaaggcagaagtttaaggaagatcctgagtctcgtaataactaaaaggtgtaggtgtcaattgaaaatcattaggcatacctggaaccaggaaaatctcaactttaatgaaaaatggccacctgtaggtgccaacactgagatgacaatgatgttggaattatctaagattttaaagcagccatcataaaaacactgaaggaacaattacaaacatgcttgaaacaaattaaaatatagtaagtctcagcacagaaataagtagtctcagtatagaagtagatataaaggagaaccagatggaaattttagaacagaaaaatatagtaaataaaataaaaaatttcaactgcagaatgaggagacagaagaaattatcagtgaatagaagacagagccgtagaaattacccaagctgagcaacagaggaagaaaattaagaggaaaccttcagcatctagggctaaacagagttcctagacttgataccaaaagaacaatctttaagaactctcaaaacttaacaacaaaatctacttataaaatggccatgtactacaaatgtgtatagcagctttattcataatagccaagaaccggaaaaatccagatgttctacagtgggcaaatgcttaaacaaactgtgttacatccatgccctgaaatactactcagcaatgaaaagaaacagaactattgatatacataacaatttggatgaatctccagagaattaggctgagtgtaaaaagctattcccaaaaggttacatactgtatgattattccacttccatttatataacatacttgaaatgacaaaattataaaaatggagaacagattagtggctgctagaaaaatagggggtcagagggctgggtgataggctatgggagggaaataggtgcagccgtaaagggcagtatgaaggatccttatgataggaatattatatatcttgactgcatcgatgtcagtagtagtatagttttgcaggacattacagttggggtgaaatggggaaaaggcat

SEQ ID NO: 9363 - DNA, 1617 bp, Homo sapiens
ggatgtcacccctaaccatggaggaagaatgaattcagaatgaaatgagaagcttggagcattatgctaggatagtttcctcaaggaaacatgaagtgtgcatgatgtttgttcccctcccccatcaactaccatgtgactggcttatttgtatgatactggttctactgtttctaagtatgtgattaaaatgtacattgttcttttaatacatatgttctctctgtttaggtccttctatatgatccactctttgactggaccatgaatcctttgaaagctttgtatttacagcagaggccggaagatgaaactgagcttcaccctactctgaatgcagatgaccaagaatgcaaacgaaatctcaggtgagcagtattttaagaaggtcctgttgtcagtttttcagattttcttattcccaaggcctttaaactgttcacctcactgaaacctttgtgtttttgtccttagtgatattgaccagagtttcaacaaagtagctgaacgtgtcttaatgagactacaagagaaactgaaaggagtggaagaaggcactgtgctcagtgttggtggacaagtgaatttgctcatacagcaggccatagaccccaaaaatctcagccgacttttcccaggatggaaagcttgggtgtgatcttcagtatatgaattaccctttcattcagcctttagaaattatattttagcctttatttttaacctgccaacatactttaagtagggattaatatttaagtgaactattgtgggtttttttgaatgttggttttaatacttgatttaatcaccactcaaaaatgttttgatggtcttaaggaacatctctgctttcactctttagaaataatggtcattcgggctgggcgcagcggctcacgcctgtaatcccagcactttgggaggccgaggtgagcggatcacaaggtcaggagttcgagaccagcctggccaagagaccagcctggccagtatggtgaaaccctgtctctactaaaaatacaaaaattagccgagcatggtggcgggcacctgtaatcccagctactcgagaggctgaggcaggagaatctcttgaacctgggaggtgaaggttgctgtgggccaaaatcatgccattgcactccagcctgggtgacaagagcgaaactccatctcaaaaaaaaaaaaaaaaaaacagaaacgtatttggatttttcctagtaagatcactcagtgttactaaataatgaagttgttatggagaacaaatttcaaagacacagttagtgtagttactatttttttaagtgtgtattaaaacttctcattctattctctttatcttttaagcccttctgtactgtccatgtatgttatctttctgtgataacttcatagattgccttctagttcatgaattctcttgtcagatgtatataatctcttttaccctatccattgggcttcttctttcagaaattgtttttcatttctaattatgcatcatttttcagatctctgtttcttgatgtcatttttaatgtttttttaatgttttttatgtcactaattattttaaatgtctgtacttgatagacactgtaatagttctat

SEQ ID NO: 9364 - DNA, 1033 bp, Homo sapiens
ctgactcgtgtattagtgagtataatctcttctccatccttaggaaaatgttcatcccagctgcggagattaacaaatgggtgattgagctttctcctcgtatttggaccttgaaggttatataaatttttttcttatgaagagttggcatttctttttattgccaatggcaggcactcattcatatttgatctcctcaccttcccctcccctaaaaccaatctccagaactttttggactataaatttcttggtttgacttctggagaactgttcagaatattactttgcatttcaaattacaaacttaccttggtgtatctttttcttacaagctgcctaaatgaatatttggtatatattggtagttttattactatagtaaatcaaggaaatgcagtaaacttaaaatgtctttaagaaagccctgaaatcttcatgggtgaaattagaaattatcaactagataatagtatagataaatgaatttgtagctaattcttgctagttgttgcatccagagagctttgaataacatcattaatctactctttagccttgcatggtatgctatgaggctcctgttctgttcaagtattctaatcaatggctttgaaaagtttatcaaatttacatacagatcacaagcctaggagaaataactaattcacagatgacagaattaagattataaaagattttttttttgtaattttagtagagacagggttgccattgtattccagccttggcgacagagcaagactctgcctcaaaaaaaaaaaaaaaaaggttttggcaagctggaactctttctgcaaatgactaagatagaaaactgccaaggacaaatgaggagtagttagattttgaaaatattaatcatagaatagttgttgtatgctaagtcactgacccatattatgtacagcatttctgatctttactttgcaagattagtgatactatcccaatacactgctggagaaatcagaatttggagaaataagttgtccaaggcaagaagatagta

SEQ ID NO: 9365 - DNA, 1034 bp, Homo sapiens
aacagattttaacccccatattagagaaaataaaataatgctgaactcttttcagtctagtaatccatagtatccatttatgggtacaaaaagagaaccagaacaattagctctatatagtcccacacattgagatatatttacaatgtttttatttatgtctaacagttttttaaatcaaatcccaacatatttcttggtttgatcagttctgtattactaattattttaataattgctgagtctgagaggaaagttcagtcagcctatggccacaggaaattaaaataagttttttcttttgtagaaaatgagttatgataacatcaataaaaggctttcaagcttcaaacttaagatgcaattctgtgacgttaggaaatagaaatgtgaattaaaggagggaaggaaattaaattgcttgtgattaaataagagtttctttactttttttacttggttggaattgggtatcacattgctctgctgttgagactctgtgggatacgttgataagagaaaagctttattgctgccatctgccataagcaaacttattcttctgttgatgccccaggtccagtatctgtaccgagtgttttgccggctacgtcctggtgtttctatccttgcactccatggtcgacagcagcaaatgagaagaatggaagtctataatgagtttgtccgtaagagagctgcagtactctttgctactgatattgcagccaggggtctgggtaagaaaacttcctatcatgaaatttctgtgattgtgtgaaatgtaatttgcttataaagtatattttgggaaatctgatagactcaaacacttgggtttcttttcttattttgtaagagaaaagtaagtagtaaattggtagcagttgactaacattaaggatgtatcagtgaaaatttccacagtatttgcatcttttttactatttcatgataatcacaccatagaatcctgaggaacctacaaaatcaaagggggttaaaagtttaaagatatgaaaacaattcccatt

SEQ ID NO: 9366 - DNA, 1047 bp, Homo sapiens
ggcaggagaatcacgtgaacccgggaggcggaggttgcagtgagccgagatcgcaccactgcattccagcctgggcgacagagtgatgctctgtctcaaaaacaacaaaacaaaacaaataaaaaaaaaccatagtaaagtcagtcatttggaattaagtggcatagaaaggtatatgaatgaatcaaaaaggattacacaatctgtcattgctgttaagctgtagcagcaaagctgggaggtatacattcttggtggaattgtaaatggttaacatttttctggatagcatatggtaatacttattaacaaccttacagttcttgtttttgtcttagtaattccacatccagaaatggatcttaagaaaatagagagctgaataaagtttcaatgtacatttgtcttgctgatgtttgtagtgtttaagaattggaatttattatgatctttagattatgattatggttagccacagatggactatttattcagttttacatttttgctctgttttctttctcatcaaaactggatgattgggtatttatcatatggattccaggattggtctaactggaccaatggttgcttccaatttcatgccacaaactcttctcaaaactttcccagggatgtgaggatctttaggcccgagcacagactgtcctgtttggcaggcttgctttaccacctgccctgtgtccacttcagcaagtggccccaagtatgaaagtgtacgctatcccttgcttacctaggaagtccccttggcgtttagttcttttagatttctatacatttatattttttgggtagctttgaagaaaatttttttgtttttgtttttatgtggtcactttttgtttcagctgaagtgaaggtttttatgtctttttatagcctagcaagaaatagatcttcttaaaattctatttaattttcataagatgtttgaatgtatgagtgtttaagtgttttttttttttgttttttttgattgattcatgtttatcctgtgggccatctttaaacgtggtttataat

SEQ ID NO: 9367 - DNA, 1028 bp, Homo sapiens
ctttgatgcagggagcagcctctgcttgtgacagtgcagctcgactgagcaaatatccttttctcagagtgaaaaaaacaaaacaaggaagaacaaaagaaattgttgcaggcctttttttttttcctccattaaacatatgatgcctgactggattttctactttgtacttaataactcacttgttaatactatacatcaggccaggcatagtggcccacacctgtaatccctctgaggtgggaggaccacttgagcccagaagtccagggctacagcaagccacgacactccagcctgagcaacagagagagaccctgtctctaaaacaaacaacacaatgcacgtcgttaatgtacaccagagaggagatttggtctgcaaattctttaatgatatctcttgtgaccattagaataccttcccaactactagtaagctgatgaatcattttgaacatctggaaacattcttctaaagtttgtttttttcccttgtcaatcacagttttgtctgatcgtggattctggatccattagttctaatggatcaattcaagtgggcatgaagttccactttggcaattcagagtaaaagcttaccttccatggctgatgctcttctgcctccattataattttaccaggaaaacaatagtccctctccactcttattcttggtatgaacaataggatgtatttcagtcagtaaattctgtggttctgaatttccttcagattgctttacttctaaacatttcgaaaagattagctgtatgtgtagctctgggttcagcttcacctcttagagatttctcaaccactaggacctagacaggttttcccttatgactgaaagtctcgtagaaaagtgacaactcgggctcccctaacacacatctcagtggtagggagctgtcttcctgggaaaacataatccagggctatcaaacaaaaggaaaatattgtcttactgatcagtgtgttttcagggcctggtacaatgactagtgcaaatttcacaaatat

SEQ ID NO: 9368 - DNA, 1022 bp, Homo sapiens
gtgcacaaacagtagagttgaatttcgtggttctccagttgaaatagaaaggctaattgccgtttcttttttttttttttgagacggagtctcgctgtgtcacccaggctggagtgcagtggccgatcttggctcactgaaacctctgcctcccaggctcaagtgattatcctgcctcagcctcccgagtagctgagattacaggcacgtgccaccacacccagctaatttttgtatttttagtagagacggggtttcaccatgttggccaggctggtctcaaactcctgacctcaggtcatccacctgcctcagcctctcaaagtgctaggattacaggtgtcagccaccatgcccagcccttttttgaactacctcacctagtcttaacttcacctgttacctactttcgaattttaaaaattaatacttattttcactcgtgttaatatcttttgattcttctccatgtttttaagcaattggttttgaatgtgaccctgcaaccgtgatctcaattgggtttcttttttttttttttgagacagagtctctctctgtcacccagattggagtgcaatggtgtcatcatggctcgctgcagcctcgaccttatgggctgaagtgatcttgaattgctggactcaaaccatcctcctgcctcagcctcccaaagttctgggattataggtataaatcactgcacccatcctggctttccattttatcctttacttttgcatttcatattttagtgttgtatgcatccatcagtcactggaggctgcttttttcctttattacctatttttaaggatagacgagatatagaaaaatcaaatcatacataaaatgggaataatactatcatttgcacatataaatgagtatattccctgtgggaagactaagcacttttccagacactgctgactttgttgaaatttttgttgctcatgttttagaattgtctttgtagacaccataccagacacagaagggaactggctttgttacttata

SEQ ID NO: 9369 - DNA, 1064 bp, Homo sapiens
ctggtctaacagccagattgccacatgccatgtggtagtaatttattgtggaataatcacagtggtatttatttgaggtggtttgtatttgtcatattcatattacatatactttgaaagttggatttttccaataccaaaccataaacgtagcctaatatttttgccattgtgaacaccttagattttaacaccttaggagataaaggaatataaagtgatttgattttatattcctcggagattaaattcctaggagatttgatgctagatttcgagccactgctatacagtgaatgtcatttgagcttcatttttctcctttggagcctgacatgtaatatgtgctaaataaatatttgctgaattgaattctgctagccaagctataatgttggaaaatgtaccactctttgtcataaattggaaatgtgctttgtatatatgaccagtgactattaggagtctttatttcagaagggagaactctataatgcataaaatttctgcaaaccaaatgtgtgtttaattgttttctacagatgaactaacagcaagactgagtgctcattaaaaatttatgtcttaatcctaaggcacaaaccttacataattacttgaatgcttatccttggttggataaaaactacttaaaaataaccactgttttgtgatttcacatttgcttagttttagattaaaataaataacagtccttttaaaataaagattgtttataaacatacagacaaatctacagaatgcagtcatccattccaatgtagataaatgtttaccaaaggaagcaacagcatggtacatattatgtacgtatgttgcttacaaggattaatgaaacaaaaaattttgataagcattaaagatactctcaaatggccgttctccctctgtccatcgtgttttcatgggttacacattttatatatcatgaatggaaaagattctctgttcacgaattcctggttcagaacaaaataggaaactaaagtaagcatttacgacatacagttcttgtggtgtatttttgtttgataattgaaaag

SEQ ID NO: 9370 - DNA, 1045 bp, Homo sapiens
gggtgtttgacaaatgcttatattatttatttttagaatctataccatctcagtctataagagatctgaagtagctcacaggaaatacataccaaatagtgaaataaacttagcagtaaaacttctggctttggtaaaacattaggacaggaggatctgtatcatggagaaaatggaataatacagggattgtattagttttctgtgtttgctgtaatacattgctatacacttagtggcttaaagcaacacaaagttatcttagagttctgtaggttagtagtcttaaatgaatctcactggagtaaaagcaacgggtcaataatgctgtttccctttctgggaggctctagaggtgttaccctttccttgtctttttccagaaaccacccacattggcctctttctgtatcttcaaagccaacaacagtgggtcaagtgccaaattcttgcatcacatcactctgatctccccttctgcctcctgtttccacttttaaggatccttttgacttttgattacattggactcatctggatgatccaggacagtctccttactttaaagttagctgattaactgccttaattcgtttttgccatgtaactatattcacaggatgccaggattagcatgtggacattttttggggtcgtttttctggctaccacagtaactgatgataaagctccattcagttgctctagttaagtcataattgtgcctctaagctgcctttatggtggccgaaaggaaaatgggaagtagtccttgttagcttttgtatctatgctaatgaaaataccacctatagtagtgctattatagtacaatccatatgatcacttcaattgttctgggttctgcactagtagaggttggcactagtatggctaataaaataaattggaaatggataatttaataattaacccatttatctcagatgctatttaaattatttttaattatttgattataacaacataaaactttgcttaagtttcttttacttatagctgtcatatacctatatgaccaaaa

SEQ ID NO: 9371 - DNA, 1050 bp, Homo sapiens
acttttaatttctattgtgatctaatagctgacaggaggaggttgaactagatctcttaactcccttccttgctctaaaattctgatgccttggggtatttttattctttatggtttgatatgattcccttgttattgaatgcagtgctcaaatacagcattgacaaaacaggcatctactagtgaggcagaaatagataagcggcccctatgtaggtaacatatttgaggaaattggcagttattcctcttggagttactttcccacttaggaccagtgtactgtcaggtaaatggtgtggctcatttatgtttggcttatgaaaacaaagcacacaccagggactacaggataataaataaatccttttccattgttgatatcactgaaatgatggtaattgggcattatcagtacagatcagcaacccaggtttaaaaactaggcaatagagaccaaaaaacctaagaaggagttcctgaaagcagaacataagttactagtcaactagaaattatcttctagatgaagggggaacttgatattgaaggtcctatgagacagaggttctccaaacatcttaattgtgtaggcaaggtggatcacattggggctaagtaaatgatcctgattaaagttaggggaatgcaaaagttaagtctagatcatggtctcaaagttttttcatttatgtaaaaattatatacatttttaccctcacatttataatatttttcttccacatccccatggagagtgcttgtctgtttggctgacagtgaatactcctttccttctttcctttctcggacaataatattgttttaagcatttcttaaaatgttgcccataggctgtgctggctttccttcgctgtatgtagaactctttgattccctttagtcagagtgtctttgaatttccctattatgcctcaaagaaattgcagccacaaagtgatggtagaacatatagatcctcttctcttgtaacttgttgctactccctgttctcattgatccttgagcaggcttcactacagtgcatac

SEQ ID NO: 9372 - DNA, 1058 bp, Homo sapiens
agacacatgaaaaaatgctcatcatcactggccatcagagaaatgcaaatcaaaaccacaatgggataccatctcacaccagttagaatggcaatcattaaaaagtcaggaaacaacaggtgctggagagaatgtggagaaataggaacccttttacactgttggtgggactgtaaactagttcaaccattgtggaagacagtgtggtgattcctcagggatctagaactagaaataccatttgacccagccatcccactactgggcatatacccaaaggattataaatcatgctgctataaagacacatgcacacgtatgtttattgcagcactattcacaatagcaaagacttggacccaacccaaatgtctatcaatgataaactggattaagaaaatgtggcacatataccctatggaatactatgcagccataaaaaaggatgagttcatgtcctttgcagggacatggatgaagccggaaaccataattctgagcagatatcacgaggacagaaaaccaaacaccacatgttctcactcataggtgggaattgaacaatgagaacacatggacacagggtggggaacatcacacactggggcctgccgggggtggtgggagggggaaggatagcattaggagatatacctaatgtaaatgcagcacaccaacgtggcacatgtatacatatgtaacaaacctgcacgttgtgcacatgtaccctagaacttaaagtaaaataaaaaaataaaaaataataaaaataaataaaattatttacatgggcttcatgttagttgcataacatttcattgttttggagtaccattttcctaatcttagctgttgggttgtttctgaatttcgctgcaaaaaagttgcagagagatccttgagagtctgttttttggctctgttgttttatttacttggaggtaaactggagcaaaattcctgggttaaagggattagaggaaataacaaaacctttggagtgagatgagttagtattttaccttccgttatgctacttaactgtccgtgagactgtg

SEQ ID NO: 9373 - DNA, 1047 bp, Homo sapiens
aaactcttgtgttctagttgattgtatacttctgttttatcctttcatcttccagcaaacatatgcttttggggacagatttattatttttcttccactgagtcttgaattaaattgtactcagtaatggtggatgaaggtcttggaaactgccataagttgatttattcttatgtctatcacaaatagaattcgatagctaaaatgacatagaaagatttttattatctgggatgacagacttgcctttttaatctaaaaactgtctttataatgttgtataaatatttgaactttattcacattcttaatatacttgaaattaattctggtctcatttcctttggtatgtaaagagagaatagcctttttaatgcatgctattgtttgaatgtgtcctccaaagttattgtgttggaaacttgatccctgatgtggagggaggggttggaggtgggacctttaagaggtgtttcagcgatgggggcactgccgtcatgaatggattaatgctactgttgtgtgagtgggtttcctaaaaaaggacaagtttggcctcttcttgctctctgtttcgtatgtgtgatgcctttcacggtgttataatgcagcaagaaggccctcatcagatgttggcaccttgatcttgtacttcccagtctctggaagtgtgaggaaataaacttctgttgttgttgttgttcttattcttctccctcttctaattttttttttttttagacaagatcttgctctgtcgccaggctggagtgcagtggcacgatcttggctcactgcagcctctgcctcctgggttgaagcaattctcctgcctcagcctcctgagtagctgagactacaggtgcatgccagcatgcccagctaatttttgtatttttagtagagacgaggtttcaccatgttggccaggatggtcttcatctcttgacctcatgatccgtctgcctcggcctcccaaagtgttgggattacaggcgtgagccaccgcgcccagcctaaacttttgttctttatacattagtctgt

SEQ ID NO: 9374 - DNA, 1030 bp, Homo sapiens
ttttgcatcttgttagtatctgtttaagaaattctcaaagtttaccattgttggtgtaattattctattttcctaacttaacgttgatggtttggggttctgttggtgggaaaagtggcttggcagtatggtgcaatgtttttgcaacacttgagaggagattgttttcatagagtttttgctcttccttgttccttcccttcttgtgactttgttttcaaattgcctttttttcatcactgtaactgtcttagctctgtacagctgcccttttccatgtctgttttgttatatacatgctatcttttggcccagagttatcactgaagcttgtcacagaactcttattacctttcctgttttttctccccagctttattttacctctacttgtaattactattgtctttttcctagagtaacagaagaaaatgcaatttgtctttactttcagtaccagcatagccctcttgagggtaatattagaacttgaagaaaacatttagattagcattttgaccaatataaattgcctatttcatttggaaatgacacattttttcgaaaaagtaaaaacagttttccgttgatataattatttttaaaatatacaagaaaaacaggaataggtgtcccagtacaacatgttttatttagtgaattttctgtcaaagggtttgttcaagtagaaaccatatgcctatttctttttttctttttttttgagacggagtctttctctgtcacccaggctggagtgcaatggtgcaatctcagctcactataacctccgcctcccaggttcaagcgattctcctgcctcagcctcccaagtagctgggattacaggtgcctgccaccacgcccagctgatctttgtatttttagtagagacgaggtttcaccatgttggtcaggctggtctcgaactcctgacctcaggtgatccacccgcctcggcctcccaaagtgctggagattacaggcatgagccaccgcgcccagccccatacgcctatttctgagggag

SEQ ID NO: 9375 - DNA, 1028 bp, Homo sapiens
atagaagagattgatgactaattgtattcaaagtcaattttacataattaattttccattaagtcgttatttgcattgaatatcctttaagatcattgtgttctatcttcctgtctataaaacaagcattttctttactatgtttggctatttcagagaaaagcaaattgatacaagcataaaatacttaagaaaacagccctcattcccttgaaattagcacttatgtaagtttgtgtaggggggtggaaggatgcgggtgtagtttataaaaagtattttaagttccacaaaatcagggatactttgagataatattctccccaggtttagacagctttggtttgcaaaacaaacttgttttaacagcaaaaataggagtccattttggttcagtgtgctagcttctcaactgacttttattatttctggcactagtatcatttgtttcttttagaagagtttgtaagtgaattgtggcacccagtgggatgtgtgtttgtgtttgaatttgtgaaaatatttgataatatttctctatagcagtgttttttggtgcagatacaaatatgttttcttaaaaatatggatgctaatttccgttccccccccctcccatttccctttctctcacggtcattctctttcccttccattctttcactttcccactcctcccacctcttctgctctcatcttataaagacttctgaaaactaggaattaccctcgttaaatatgggctgtgttgtgacttgagatcaggagccactgctcaggaggaggcctggaataaaatctgtgagtgtttatagaataaacatcatgggcataattcatatttaaatcatcctgagtgctcacacaattgtgtatgactgtcacatgaatcagtgcaagatcagcaaattttgcattgtcatcttgtgttagggtaatatggtatttaaatttggactaagtggcccttttattagagtaaaaaattgagtcatggtatattgtttttccaggtgggtagacaagga

SEQ ID NO: 9376 - DNA, 1047 bp, Homo sapiens
ttaaaaaaaaaaaaaaggcctctaccctgcataggggtaggttcagaaacccgtggagagctcctcattcattaaactacttttttcaacgtaatatgatcttaccctacaatcctgccagaaatttacttgtttattacactgagttctattccacagagaattgggggagcatgtgagaacatttataataaaataatgggtaaatatatttagaaatgagggaggaaccgtggaaatactgacataaagagctgaaggttgagactaaggaagaaatcccacctgtacatgccatgcctgtagcagctgaggttaaggtttagctctgaactgctagatgtgacctgattttctgcttcccctcccagcaggcttctgctctagtgcatgcagcctttctccctgctctccctctgtgttcgagaccatttttgtgtgtgtctactgactatctttccatctaccacttagtttttaaattttgtctcaaatccacgtcctgcctcttatgaagcccttgtggaactcctttgaccgctatagcagttacactgactgtgcagcaatgtggggtcttcattaagcattttggtgacaggaattatgttttaggccagcattctcaaaaagattttaagcattttgaggaatttttacatttttaaaaaactaatcttttggtttttccttcattctcatcatcctgcagtggttcctgtgctcccaactttcttccagacccttgaaagatcatgtttcactctcctcctgagcccttcacaggcgctgtgcagggctgaggttataacctagccaatgaaatcatgattggctggcagataattaagtctgtctatccagttgactcttacatgtgcagaaagcatttatgaatgaacaacacattctttcaataattagaactttccatcgtggaccttctcaaattatatatgactctgtggataacttagccaatatgcaaagaaaaagaagacttctcaaaaaagtgttccaattctgcactttcttgcctcaaagtat

SEQ ID NO: 9377 - DNA, 1031 bp, Homo sapiens
ctcgggcaacgccgtccccgccgggatttcgggcgaggtgaggccgggcttcccggccccgcggcctaaggcaccggtccccgcccgcccgggggcatagatcgcgaacatggaggcgggctcgggcgccgcggatggaaacggacacactgcgctgccccagcggctcagactcgcgcgcgctcgtggggcgagacatctcttggcatctcggatccagccctggccattcgcttaactatccatccctccatccagatcgccagcaaccccaggccgagcgtcacgaaagcccctcactcccccctcgtccctccttcacccccaggctccagtccagatcccttttacacgctgcgttcattttagctcggctgttcacatttttaactccgtattaagaagtgttacaaatataacttggagaaatgaatcccgcatttcttccctaagctgtctcatttcaagtccttaaaaacagccctaacatccaagtactgattactctgtctggggttcttgccatttggttatccgttaacaatctcggtttgtgttcggtgttttgtgataaagagatgaaagacgaatccagatttaggaaaagttttcctattggttgacaagactgtattggagtatcccaggcccatcaggcgcttattgattcagactttttttaaaccattttagaatagatgcagagataattggagctaagtattgtatgtttaggaatttggcaacgttgttcagtttttcacttgttacgtgcttgagtttttccacttttaaaatgcatattataaacggaaaacgagataaacctcaaacacaatttttgacttttcaagaaccacaagaagtcataaatacagtgtgttataaatgtttttgtcttaatggacttaggatttagagggtatgacttccattcatttaatcacatgtacaattaattttagtagcagtttcttaagtttagggttctctgtgtttgactacatgatagcttcatcaaacattggtaa

SEQ ID NO: 9378 - DNA, 1032 bp, Homo sapiens
tgtgattctcctcatcatatgctatattttatacttggtagtggctgatataaaagaaagttatttgtttttatgtaatcatctggctaccttactgaataaccctttaatgtactgttagatcaattgcaggacctagttccaacacttttcagttgagtctcgtgattttcaggttctataataatgacccaatactatcagggttttttcagtatttcaattcataccttttttcttcttgtcttattgcattggctgaaatcagagaacagtgctggttagtagtaggcattcagccttttcttttccaattttaataggacttcttgttttctaacacaggtatctcctgcttatatacacatgttctgaaaatacctgtaatggtcaaatgtgataaacttaaaaatagacttacatgccctagagggattcccttaaattattaaatccctaagtatcttttgtgaaacatcttcaacaatatattttcagtatttaagacgtggtctgtttttgaattgaacatattgttaatcagtttaaatccaggaaggctgaaattttaatgattctatccttgtgtcagtggtataaattttgagacctatttttatcactgttgttcgttttttatgtcatatctataaaatatgagtaaaggtaaatgatacagtgtgtacaaaaccatttattcaaatgaagtcttttttttgtttgtttttttctgagacaggatctcactctgtcactcaggctggagtacaatggcatgatctcagctcacggaagctctgtctcccaaatagctgggaccacaggcacacaccactatacccagctaatttttcctttttttttgtttttttttaagacggagttttgctcttgttgcctaggctggagtgcaatggtgcaatcttggctcactgcaacctccacctcccgggtttaagcaaatctcctgcctcagcctcctgagtagctgggattacaggcgcccgccaccatacctggctaatttttgta

SEQ ID NO: 9379 - DNA, 1026 bp, Homo sapiens
ccaggaacatactaggactgctgtccttataatatccattgtatttacatcccctcctcaaaaatccttcacatatgtagatgtttaattaccttagtcatgtaagcatcggaacaccttcactgatcttccttttggaacatatacatatatttttgagacagggtctggctttgttgcccaggatggagtgccgtggcactatcttggctcactgcagccttgacttcccgggctcaagcaatcttcccacctcagcctctcaaataactggaattacagatgtgcaccatcacacctggctaattttttgtagagatgggattttgccttgttgcccaggctggtctggaactcctgggctcaagcagtcttcctgcctccgcctcccaaagtgctgggattataggtgtgagccaccacacccgatcccttttggaattttgatttttggtggaagagataatggaaggagcaactaggaataaagtatttagattgccaaatggcagcactaagcgctgagaagggttaaagaaggactagaaaaggaggtagaagagccacagaagttaacctcctgcttccttctgataactgtcagttgcctgccagaggcccttttccttgcctttcactctccactcccagtcagtcctggctcactgggtgttgtagaggccaagaaggactgcagagttgagagtggttggttttggcagagaattatgggatggaaagccaatggttgcctgactgaaccaagtctgttgtttttccccatttcactgctattccttcttttttctgtaagttattctttctgttgttctaattgattcattaattcattcatacacagatgtgcatgcatatacccgtcatctctcctgccccactgaatccagtctcctggtttaaagttcttatcgcccccccctaccaaaaaaaaagatttaaaaaaaagtcttcttttgaaaccgttcctatccctccctgccatccccaaaataatccttctatatc

SEQ ID NO: 9380 - DNA, 1046 bp, Homo sapiens
agagacaagtttcagaataccagtaagccagatctctggaaatagtagtccctttataggaacaagtggtccagtctagcctagcttcctttggcactggccagttggtttgccattgagagcaagttctgaatggaataccataccacttttaaatcaacaaaatagtggtggctaattggtggcaaagcaaataggtttaaagaaagtgacaagccattcttatgattattgatgtaaaaattcttagtgaaatatcagcatatgtaatcctcctcaaagtaatcatatttctctattggctaatctattagtataattcacaatataagttaaaaatttgtgattgtctaatagatcattttaatgtaatccacatttctaaattttttctctaaatcttttatgtaggagaaaaatgtatttctgtaaatgatttttcaaaggctgtatgtagtgtggtatgtatatgtatagatgtatataaagttataattacatatagctaacatatgaatgcttgctatatgccttgcactgttctgagagttttatatttattagctcattaaatttcaaacaaccatattttatccttttttcaacaattgaggaaactaaggcatggggaggttaatttgtcccacatgagatatatatatatatacacacacacacacatatatatatattatatatatacacacacacatatatattatatatatacacacacacatatatatatacacacacatatatatattatatatacacacacacatatatatacacacacacatatatatattatatatacacacatatatatacacacacacatataatatatatatacacacacacatatatataatatatatacacacacatatatatattatatatatacacacacacatatatattatatatatacacacacacatatatatattatatatacacacacatatatacacacacatatatattatatatatacacacatatatattatatatatacacacacacatatatatt

SEQ ID NO: 9381 - DNA, 1045 bp, Homo sapiens
aaaactgaggtgatgggttgataggtgcagcacaccaccatggcacatgtatacctatgtaacaaacctgcacatttcagcccatgtatcccagaatttaaagtaaaattaaaaaaaaaaaagaaaagaaaagaaacaataagttggtttgtatgacactgtagtgtcagtctcattttgctgtttggtatccttactccttttgcctcccctttcatctaagttaccaacgcaaccatttgccaacctaataccttaattctaggacagtctgttatccaggttctcagactccttgttccttcttcttcatcatttctgcctccgtagctgtgttttgcatgttctgtttagggaagttttggagaatggaatccacattagaatattctaataaggctagcaattttcccccttccaaagggaagttatctccagaacctgtagccattgggaatcatccatccatccagaaggtcattgccccactcttctaggacctagatagaggcaaagaagggcaacaagaagcagaaaaagcagaaggagcaacagcagaaagaggtcaagaacctggaagaagagaaaggagctttcagttactttatctcttcctccagtttcttaattcattctttgtggctgcccacttcattccttcttttatttcctgagatccagagataccaataatccctttgagtggggtttttctgagaattcctgtaaatacatcaatttgtctacttcaaatgagccttcttttgaccgttgcaaagcaggatttttataagtatgcttatgccaaatgtgagagaataaaagaagccttttatttttaaaagagagacctactgacaatattctaggcatctcgtatttttctactgctaaagccagtgatgaatcagatgggaccttcaatgagttacccattttgctcagttgtaacttggaatttacagagaggctttggaattttccctgggaaccaaatcccactcagccaaagtagtcagagggagactttttggcaaacattcag

SEQ ID NO: 9382 - DNA, 1041 bp, Homo sapiens
aagtaggaacgtggaagaagctgtgtccatagtggtcgtgtgatgactccagctcttaagcaaaagcttcacataatgacagtcagaatttgcccagtcatggttcaattttatactgttcgtatttttttaactagttttaaagtctttattattaaaattcctgaaggaaaaatactattgagagttggaaatgatgctgtatctacaaattaaatcataatccctaattaaaggatttcatatatacagcttatgttttagagtttcacattgtatgaaagttgccatgtgtgttatctatgtatttactttctgccatcctaccgtcattattcttgcagatcaggaaattttacgtaaattagagaaggagaaaatcctggtgttcacgccatcccggcgagtccaggggaggagagtggtgtgctatgacgacaggttcatcgtgaagctggcttttgagtcggacggtatcattgtgtccaatgataactacagggacttggctaatgagaagccagaatggaagaagttcatagatgaacgattattaatgtattcatttgtcaatgacaagtaagtaaaaccatttacttgccaatgatactgcttctgtaaaaatataactatccctggcagctgctacagaattctctttttgccactgtccagacttcacacaggtttctaacaactgatctccccactgatcctcagtgggagtcaggaaaactgcagaatcattgccagaggaggcccggtgtgagtggcaggccccacctttccctgtaagtcactcatagaacacctaaggtagaggaagtcttctaagactatgtctggagaacctgaggaaacagacactggggaaattcccatcttcaccctcaaaggactgccttttaaaatcaatttagagcactgatagcttactaaataagccatgcttggcttaacaacagggatacgttctgagaaattcatcttcaggcgatttcattgtgggtatgaacatcatagagtgtacttacacaaacc

SEQ ID NO: 9383 - DNA, 1041 bp, Homo sapiens
gtggtctcagatggagacgaggaacttgttgggaattggagtaaaggtgactcttgctatgttttagcaaagagactagcgcattttgcccctgccctagagatttgtggaactttgaacttaagagatgatacttagggtatctggcagaagaaatttctaagcagcaaatcattcaagaggtgacttgggtgctgttaaaggcattcagttttaaaaggaaacagcataaaaaagtttggaaaatttgcagcctgacaatgtgatagaaaagaaaaccccattttctggggaaaaattcaagctggctgcagaaatttgggtaaggaatgaggagctgaaagttaatccctgagatactggggaaaatgtctccagggcatgtcagagatcttcatggcagcccctcccatcacaggcctggaagcctaggaggaaaaagtggttttgtgggctgggcccagggcccccttgctgtgtacagcctagggacttggtgctctgtgtcccagctgtcccagctgtggctgaaaggggccaatgtagagctagggccgtggcttcagagtgtgcaaacctcaagccttggcagcttccatgtggtattgagcctgctagtgtacagaagtcaagaactggggcttgggaacctccgcctagatttcagaggatgtatggaaatgcctagatgttccaggcagtagttttttgcagggcagggctctcatggagaacttctgctagggcagtgcagaagggaaatgtggggttggagcccccacacagagtccctattggggcaccgcctagtggagctgtgcgaagagggccactgccctccaaacctcagaatggtagatccactgacagcttgcatgatatgcctggaaaagccacagacactcaatgccagcccatgaaagcagccaggagggaggctgtatcctgcaaagccacaggggtggagctgcccaagaccatgggaacccagctcttgcatcagtgtgacctggatgtgagacatgtagtcaaaggagatca

SEQ ID NO: 9384 - DNA, 1077 bp, Homo sapiens
cctctgcttttggctctacacgggtggctttggtccttaccatgatgctcaaaacatgaaagttggccctttgcaatattatcttatagaatttttatagttttgggtccaagatttaagtccctgatccatcttgagttgatttttgtataaggtgagagatgaggatccagttttattctcctgcatgtggtttgccaattatcctagcaccatttgttatatagggtgtcctttccccactttatgttttttgtttgctttgtcaaagatcagttgactgtaagtatttgggtttatttctgggttctctattctgtttcattgctctatgtgcctatttttataccagtaccatgctgttttggtgactatggccttatagtatagtttgaaatcaggtaatgtgatgcctccagattggttatttttgcttagccttgctttggctacgtggggtcttttttggtttcatgtgaattttaggggttttttttcttttttagttctgtgaagaattcaattcatgggaattgaattgtatttgtagattgcttttggcagtatggtcatcttcacaatattgattctacacatccacgggtgtgggatgtgtttccatttttttatgttgtctatgatttctttcagcagtgttttgtagttttcgttgtagttttcacctccttggttaggtattttcttaagtattttatttatttatttatttattttttgcagctgttgcaaaagaggttgagttcttgatttgattctcagcttggttgctgttggtgtataggagaactacttatttgtgtacattaattttgtatctggaaacattgctgaattattttatcagttctaggagctttttggaggagtcttgaggactttttagttatacaatcatatcatcagcaaacagcaaccctttcaatagtatttaaacagacacacaactaaaaaacgtttacaagcacacatttattactttataactttgcagatgactgctactgaaatcagcacatgccagataacattaaaaaatcccttttatggaaagatata

SEQ ID NO: 9385 - DNA, 1029 bp, Homo sapiens
tggctttccatcacttttgttaattatattctattattaatagctccatggtttaaatttttgcacttcctttaacagtttttgaaatgtgaggttttgaaatttgctttaatatccttttattttggacttggcaccttcttagaaaaaatcatattcttcattacttttgttattgcctatattagtcacactaagtcctggcaagaaaaagatggcacacacaaagggtttaatgaggaaagtgtaataaaagggacatttgctgaggtgtaggccaagagcaagagatggtaaaatatccagggactagctacaatggggaactgttatgtccaggcctgaaggaataaaaggagggaatggttttagcagaacccgggaaaagcttggggtcatgaaagaggacccgcccaacaggagctattaccacaaaatgcagctactatcaaaccatgctgacgtgggatgggggcatggggaataaatactgagacttctctttccttctatcctctgaccttctgcctttgcctctcattggctaagtccaatcagagaccaaagaacaagggaacaaggaagccccattgaaacagtttatagacctcaacctcccaaggcacagaggacagagaatggatccaacagagggaggtgggcacatggagaaaaactaacacactgcctgtttttggccacccatgcccagaatagtttacacaccttagcatgccagaagaggatcggcacaaccagacccttgccgacctgtccagctcaattctcaccactttaactcctctcctcatcctattccaacacctttgtaccaaatggaatttcccaagagctcttaatttctgtttcctgtgcttgaaacacccctttcccagccaactcattctcaccctttggcttcagattagacaacaccttctctcctaacagctaagtgcaaccagtgatcctgggttggatcctgaacatgatgtgatgatttcctataaatggcattattaggaaaat

SEQ ID NO: 9386 - DNA, 1047 bp, Homo sapiens
acttcagccttccaagtagctggaactacaggtgcacaccaccatgcctggctaatttttaaattttttgtaaagacaaggttttgccatgttgcccaagctgttcttgaactccttggctcaaacagccctcccaccttggcctcccaaagtgctgggattacaggcataagccaccatacccagccttcaaattaaatcctaatgagaatttattatttgaataattttaaaagccaaatttacattggaaaaaagtctcctttttatttattctgagagggtaactagagaattctctattttactactgacttttactgctttcagaaagtctttcattatagaccactcaatcacacttgcttttcaatcaaatgataggctagtaggttgtaattccaccaatgatttgttgtataagctgaaagttgtatttattttttaatttcaaaggtctaatgtatggtatgatagagctaatgttacttggtacttcagaaggacagtgtagaattagtatattagtaataggactggagtaaatattatctaagacaagaaacacatgttaatcccttgtaatttgttattagaagaatagctcttatttgtaacttctttataaaatctccaaaagctactttttttggctttaatctgtggatttatagaacccaaaagcaacttttgtatatgtggtttctttaaatgagattagtatttcttttatgagaagttaatttgtttttctaaaatcaaagagacaggataggccaggcatggtagctcacgcctgtaatcccagcactttggggggccgaggcgggtggattgcttgaggtgacgagtttgagaccagcctggccaacatggtgaaaccccatctctactaaaaatacagaaattagcctggcgtggtggtgcatgcctgtaatcccagctacttgggaggctgaggcaggagaatcactttgaaccctggaggcagaggttgcactgagctgagatcgcaccactgcactccagcagtgacagagcaagact

SEQ ID NO: 9387 - DNA, 1059 bp, Homo sapiens
tccttaaaaggaactattggaacacaacccttttgcaaattaaggactttcagtgcacctttggggaaatccccaaatacttttttttttgttggtaaaatgtgttcatcttcttcttacatacctattaaattgttgagggtaggaatcaaatctcattcatttttatatcccaggcataattcctggcacacaacagatgctgtgtaatgtattactacaagaccctttgaaatagtgaaaagattaaagttggagttagaaggcctagggtttttcttccttaattcattagagctttaagacctttgttgattatgtgacattatttgaacctcagtttcaactcatgagtgtactgcttgtttcatttacttcacagaattgggaaataaatgagataaaatatgctgaagtatctttaaaaatgctgtgcagttgtgaaagtcatcaccattgttagtattatacatatttctgggaagtacttgatagagagctccattgttaagaaattacttggatgagtttggcagactgctagctgatcattgaaaactctgctgtttcctcttctttctgggcctacagctggactgtttctatgccacccttgcatttaggtgtggtcatatgcggagttctaactaatggaatgaacagaagtaataggcaccacttccagccctggcccataaaatcacccatgaagatccctcagagttcttttttccttctgtctagctggaatggagaccgccttcaggttaaccttggaagccacacattaaagatattaaagcctctttgaatttcaaaagtctgcattcatctagttctgctacgtgagcaagaaataaacttctgttgagtttgaatcataagttttggggtgtatttggtaaagcagttagagttcccatgttacaaggaacatgttaactcatgctctgctttttctttagagaagcataatcctctcctgtaatagccttagaaacaagggatagcaatgggatatatatatatatatatatatatatatatatttatgatcat

SEQ ID NO: 9388 - DNA, 1052 bp, Homo sapiens
agtgctgggattacaggcgtgagccaccgcacccggcgtctgaaggattttctttagtgtttcttgtagcacagatctgctggtgatgaaatatttcagcttttatatgtctaaagtagtctttatttttgtctttgtttttgaaagatatttgtactaggtatagaattctaaatggactttttttctttcagtactttaaatatgttgcttcactgtcttcccatttgcactgtttctgacaaaaaaaccactgttatctttttctttattcctgtgtatataatgtgccttttttctctggctgcttttaaggctttctatttaccactggtttcaacaatttcattatgatgagcctttgtgtggttttcttcatgattcttatgtttggtgttcattgagctttttggatctgtgactatactcttttcatcaaatttggatatttttcagccattattttctaactaatttttctcttccaccccctctcttctccttcagatattccagtcaaatgtatattaaactgtttgaaattgccccacagctcactgatgctcttttccatttttaaaaaattcctttttttctatttcatgttgagtagttgctatttctgtctttaaattcacgaatcttttcttctgccattaatcccatccagtgtatttgtcatctcagacattgtagtattcttttctataaacttgactaggactgttttttaatgccttccatgtctttactgatctttctgaacatctagaatccagttatgataatttttaatgtccatgtctgctgatttccagcatctctgtcagttctaggttggttttgattggttgatgtttctcctcagttttggttacattttcctatttcattacatgtctggtagtctttgattggatgctagacattgccaattttaccttgagcaccacatatttttgtgttactttaggttttcttgaactttgttctgggatgcagttaagcctacttggaaacagtttgatccatttgggtcttgccttcataat

SEQ ID NO: 9389 - DNA, 1050 bp, Homo sapiens
attttaggctgtgaagcaactagaactctcatacattgctggtaggaatgtaaaatggtacaaccagttgggagaactgtttggcagtttcttatgaagttaaacatgcatataccccatcacgcaacaattcaattcctaggtatttgcccaagaaaaatgaaaacaagtgtccataaaacgattttgagaagaatgcaaatttttatagcagccttttttcacagtcacgcaaagtcggatcaacccaaatgtccatcagtgggaaaatgtatccagaacaaatcgtagtatagtaatacaaaggcagatgattcaaaaaggaaatgaactatttatgcatgcaacaacatgcatacatcttacagacatgtgctaagtaaaagaagctggacacaaaagagtacagattatatatggttctatttacgtgaaattctataacagtcaacactaatggatagtaatgaaagctggaaagttgcctccagggagaggggagaactgactggagagggacaagagagaactatcttgggtgatggaaatggaaatgttttatttttgttttgaatggtggttatacagaatatacaattacctcatatagttaaccatctaagagtttgcatcttattgtatataaatcatacttcagtaaatccttgtctctctcaaaaaaaaaaggagagtttagtaatagaagtatagatttgaggattacctgaatagaagtgatcaatgaagctgtaataatgagatttcagaattaagaaggctaagaagtgagttggttatgccttttattagaagcaggtggaagaaaggaattgatggagtagaagagtggcttgggaaatatggacagtttctttcctgattagccaaaggagcttggaatgaagtgggggtatttggtcattaagagatcaccagtcacttcaaagaaagtacttttcagtaaactggaagctacaaccagatttcaagaggttaaggatgcatgggtgataaagggagaaagatattataaaactaccttttgaagtt

SEQ ID NO: 9390 - DNA, 1066 bp, Homo sapiens
taaagaccagaatatgaaacatcttgaatgccatgtcaaagattttatagtttattctgtaggtaatggggagtctagcctactgaaaattatagggcatgggtaggggtaaagtggaattgggataacatgattagatttgcatgtcagaaatatgtctctggcagcagagttaagataggtgggagatgtgggtgaggtggaagacaggaagactaataaggaatctagtgcaatagtccatttaagaaaacatgagtctgaactagagcagcagcagtagaggttgaaggtatgtaagggagattttgtttgacttgggttttgaagagaaagagtgtgggttaaaagcttagcaaagttacacatggtggtgttttgttctaagattgttaaagaagagcagggagacatccagatgacagggactgaccaagaaattattaattgacctgttaggttggatactcattgaacttagtaagtttagggacaaagtagcttcctcggtttgctgtatatggtgtaaaatataaggtaaaaccctcatgtttgtacattgaactgatttgtttctgtgccatttcccattagtttttgtcttaggcaattaggggaaggcaaattatttttactcattttaaatgtcaatattacatatgttacaggatatgtaatggattttccattctatagtctgtgattttttttttctaatgggattgcctgaataagacaaaatgtttttaagttaatttgttatattcatttgtgtgtgtgtgtatgtgtatatatatatatatatcacacatatacacgtatatataaagatttatatcaatttgtcatttttgttgtgaaaatgtgatgcacaaaattagaatactttcatagtttatgtctgttcacttccatttgtttttttcccttcctctgcttttggcccttccatttggtgtcatttatttcactcttttttgccaaccttctgtgaggaacttcactgggatattttgtttaatgctccttgaaagcatcggctgccctaaaattgtctttttcagag

SEQ ID NO: 9391 - DNA, 1051 bp, Homo sapiens
atagagaaggagcagtctaataaagttgggaagtagaaatcaattcttcagttttatcctttgattgaaaagctattgatgggggtaagaagaatgtagcaaatatactttagtgggaagtgtaaattttacatattgactagataaaaattttacatagtagctagataatttaaaagcctgatatttgaaaagaaaaagttgtttaacatcagaagtggcacagaatataagcttgaggaatgacaacacaaggaaagctatttctttatcacactctgaatggtatgcagttgtttacttgtttgtttatttgttttggggcatccataccattctgacactttgctaatgctactttatcttatacagtatagccagtgatattaatattggaatataccaaatataaagtatgttgaaaatatattcagagtatattcaaatataaaatatatttctaacatatccccccatccttgaaaatcatcaatccaagattctaactaggaaccgttagtatttgagaacgagactgcattcattttgcaaactaattcttacattcttgtgatcatttgaaggctttaggaagaaggggaaaggaggaattaatgttactgagttaaggacattgcatgttaccttttacagtcctgacttcactgtgaagttggcattgtgctctcacagttgaagaagataagtttcagagaggttaggaaacctgattaaggtcacacaatttgtacgtgatggagccaggaatcaaactcaggtcttggtagaggagaagctagaatctcataccattttgtccctttgatttgtttgagtttaaaattcaccatcctgtatcccttgaaataactatagccggaaaaatacaggctgtccttctgcctttcatagtctagtatgatgattgttttctcagatgtggtgcagtgcctgttgtattcaaaacacatctaataaattattctggtagttttgaagggatggtgatgaaaggatcattcagcagcttcatctttaaaatcaatttttg

SEQ ID NO: 9392 - DNA, 1041 bp, Homo sapiens
aaagatgtgaggcacttgctatccaaaattaagaattagtgggcaaaccataggcctgcttctgtgggggaaaaatcttctggaaacttctctcctatatccttttaagcccagtggttgggaagtggcaccgtgccatgccagcaacaccttatttttgcccacagaccagcgacctgcagcttgttcgagatgctctccgcagcctgcgcaacagcttcagtggccacgatcctcagcaccacactattgacagcttggagcagggcatttctagcctcatggagcgcctgcatgttatggagacgcagaagaaacaagaaagaaaggtaaccctcttgctgtggtatctctcttaggcaagctcctgagaaagctgggttttaagaattttaattgagatgaaggcagtgtgaagagatacaagaccctgttaaaggttagagttgtttttctctattgttttttctctcagtggaactgactattcatcatggtatgacaatccagagaagaagttcatggtcatacttgctcccagcaactgtagctgtgtaaagattgtggctcttgaccccacagggtctccctttacgcttcttcccctcccacctacccctgattgagcttggccttggatgagaaaatatacggaaaatgcactggaaaccagaaagcctttcatatatattattattgttaggataaatatattagattttatatgttgtggaagagatggtagaaaagtatgtagtattttaagcacacttttatgatttaaatttcttggttaagttctctcattgatcataactcttgtgatttttgtgtggctccccaggttcgggtcaagtcacccagaactcaagtaggtagtgaataccgggagtcctggccccctaactcaagtaagtacccatttttgctcagtagggactcctagcatattagaccagaaatttagtatttttcacactacattttggggatgtaatttttcttgtagtacttcacttttatactattttgtttctgtag

SEQ ID NO: 9393 - DNA, 1032 bp, Homo sapiens
attcacaatattcgaaaggtagaaacaccccagatgtccatcaactgatgaatggatagacaaattctggtatatgcatacagtggaatattattcacctataaagaggaatgaagcactgatccatgctacaacgtggatgaacttggaaaacattatgctaagtggaagatgccagacacaaaagggcacatattgtgtaagtccatttatataaaatgtccagaataggcaaatccatagagaccaaaagtagagtgggttagccagatgccagggtcaggagcgagggaggaatagggaataaccactcagtgcatacaggttttcttttgggatgatgacagtgttctggaactggataatggtggttgtttgcacatcattttaaatgtactaaatgccattgaattgcacaccttaaaatggttaaaatggtgaattttactacaatttttaaaaagtgagattttgtaaaaaatagcagttctgccttctgcctaggatgtagaaagccagaaagagccttgcttctacccaaaaaacaagaaaaagttggataatctaaaaaatcgtaactttcttgaacccatcagagagatgaaatcatagtgcagtcaactagcctgaaaaagaaacaggcacctacaaggagagataggatacaagtactggctcacttgtggtagaccctgggaggaagatggggccactatacaacagataagaattcagctgagatttttttttttttttttttgagacggagtcttggttttgttgcccaggctggagtgcaatgacacgatctcagctcactgcagcctctgcctcccaggttcaagcaattctcctgcctcagcctcccaagtagctgggattatacatgcccaccaccacacctggctaatttttgtatttttggtagagacgggttttcaccatgttggccagactggtctcgaactcctgaccttaggtgatctgcccgcctcggcctcccaaagtgttgggattacaggggtgagccac

SEQ ID NO: 9394 - DNA, 1078 bp, Homo sapiens
cccaccaccaggggagcaagcactgttcaattaggagcagtggactgcttctgaggcaggaaacagcatacagagactgactgaggcacaggcatatgaggaaagcctacagctgagggaggggaaggaacattgaggaacgaccctccaacaagcagctgtccctaaacctaactctagaagacttggaaaatggtggtgcactgaaggtaaccttaacaaaaatctcaatcccagctcagcttctgaccaaattaactcaactgtccctaccgatggcctggaagaacaaacagtgtgcccatttctaaacagatacttttacctctgtctctcctgtcttaacatatgtctggcattcaataagaaattatgaggcatccacaagagcaagagaaaaacgaagccactgtgaagagcgaaagcagtcaacagaatcaaactcatatatgacaaggatgtcgaaaccatcagacaaggaatttaaagtaactgattcatatgttaaaggctgtagtgaaaatgttgataacatgcacatacaggtgaggaagactcaactactgtttataggaaacccactataaatataatgatataaatggatttaaaagtaaaaagatggataaagatataccatggaaacactaatcaaaaggaagtgtggttatattagtatctgataaagtatacttgagaacaaggaatcattccaggtataaagatgatacataataataaaaaggtcaattcaccgagaagacataataatcctaaatgtgtgtatacccaataacagctttgaaatacctgaagcagcccaggcactgtggctcatgcctgtaatcccagcattttgggaggctgagacaggaggatcacttgtgcccagaagtttgagacaagcctgggcaacatggtgagaccctgactcaacaaaaaaataaaaaaaattagccaggtgtggtggcatatgcctgaagtcctagctacttgggaggctgaggcaggaggatcacttgagtctgggagttggaggctgcagtgagctgtgatcacaccactgcactccagtctg

SEQ ID NO: 9395 - DNA, 1060 bp, Homo sapiens
atttccacatatttgagatttactggattggactgttcagccactttctagagaaaccaatttgttttccaggttcctgatcatagcccagtctgtagcccaataattagtcagattgtattttcagttagttgcttttttttttttttctttttttgttgatacagagtctcactccatcgcccaggctggagtgcagtggtgcaatctcggctcactgcaacctctgcctccagggttcaagcgattctcctgcctcagcctcctgagtagctgggattacaggtgcatgctaccacgcccggctaatttttgtatttttattagagacggggtttcaccatgttggtcaggctggtgtcaaactcttgacctcatgatctgcctgctttggcctcccaaagtgctgggattacaggtgtgagccactgtgcccggccagttagttacttttctgtaatgtaaagttatttttagtaacttatttttatttcctttttaaaaattctagattcaggaggaatcagatatgtggaaaataagagaactggaaaaacagatggaagatgcttaccgggggaccaaaaggaaaatgctacccagcagttcaaggtgaagttgcagctctgagaactaaaataattctcatctttttcagaatcatcaacttttgtttaaaaatactttggtatattaaggataaattcagttctgtgagtccttaagccttccttctttcgtaaatctagacccaggcataaagataatggctgtgacgcatatggccctgctctttgtacttatttacaatggagagttaaaaaattctacctgaacaattatgaatgtgtagggttctgtggattctaaccttacctgatagcttttaactgaagattttatactggaatcttgtggtcactaagctgatcagtcattctattctctattaatctttcattctttcaggcttttctttttgtagctggaactgcaggtgcatgccactatgcctagctactttttttttgtagaggtggtgtcttgctgtgttccccag

SEQ ID NO: 9396 - DNA, 1043 bp, Homo sapiens
tgggattacagacttgaaccaccgtgccccgctggaattttcttagaactagagaaaaggacattgggaaagacattcagggtgaaagagaattttatttgaaaaatcagtaaagaattaggtttgactcatttgttacatgtcatataggggagtagaatgtctcgtgtgcttcaagctgaatttttgaaagatttgaaagaaatgggatagtaacaacttgctaaaagaatgcaaatctcacttcttcagagtaatagtgtccctatatgttagctcatttttctagcctagatttctgaatcactcttaaacttttatgagataaagaattctattttatagcacttaattatttatttgaccacccctctatgttaggcagtactgccttgtgaacactcagtaatgttaaaataatagggagaagtttcagttccttattatacaactatgatttttacttcttgtgccttttgcactttaggtaatttcagactggatatcactgcataatttaatttttgacacccttctactggaaaatgccttgtattttcatgtatatgccattaaaataaaaggaattaaatttaagatcttattaaattcacaggaatcgctatgaagtctttggaatcacattctggtatatctaaattactggggtcaatataattggataatattgaatggtggtcatttttataacaacgaggttgctcttagcacatctggggttggcatgtagatttattcttgtaaaaagacaggtattgttcaactatgagaaatgataaaaatagtaattgaagtcctaagttagttcttaggcagattagtagtcctaagttagttcttaggcagattagtactacaaaaaatagaagaattgttgtgggttgaaaatggagaaccaaagcgttgatagtctgggaatgaggaaggagagagaagaaatttggagcctgtatttggtgttaggtttatgtttccctcaagctgccagttgataagattattgtctgtgggaaacaggcaag

SEQ ID NO: 9397 - DNA, 1071 bp, Homo sapiens
aagcagggtgggaaggaggactggctgagccctgggtgtgggacagagtgcatgtgtgtggtgtgtccccaagggcagaaaggtggcgaagggaggcgaatccaagtgggtggagggggggaagggcgggaggagaaaaaggtgggaggaggaccaggtgggagggtggtggcccactcaggacccagtgggggcagcgtgatgaggcggatgaccctgttcctgaacggcagccccaagaacggaaaggtagttgttgtatatggaactttatctgatttgctttctgtggccagcagtaaactcggcataaaagccaccagtgtgtataatgggaaaggtggactgattgatgatattgctttgaacagggatgatgatgttttgtttgtttgtgaaggagagccatttattgatcctcagacagattctaagcctcctgaaggattgttaggattccacacagagtggctgacattaaatgttggagggcggtactttacaactacacggagcactttagtgaataaagaacctgacagtatgctggcccacatgtttaaggacaaaggtgtctggggaagtaagcaagatgatagaggagctttctttttttttttttttttttgagacggagtctcgctctgtcgcccaggctggagtgcagtggcgggatctcggctcactgcaagctccgcctcccgggttcacgccattctcctgcctcagcctcccaagtagctgggactacaggcgcccgccactacgcccggctaattttttgtatttttagtagagacggggtttcaccgttttagctgggatggtctcgatctcctgacctcgtgatccgcccgcctcggcctcccaaagtgctgggattacaggcgtgagccaccgcgcccggccgagctttcttaattgaccgaagtcctgagtactttgaacccattttgaactacttgcatcgtggacagctcattgtaaatgatagcattaatttattaggtgtgttagaagaagcaagattttttggtattgactcattgaacacctaaaagtggcaataaa

SEQ ID NO: 9398 - DNA, 1026 bp, Homo sapiens
ggtggacaaaggaaagtgaggaagctatttgcaaagctgttgcaggaatctagacgtgaagtgatgggtgcctggaccatgggggtggcagtggaaatagatggaagaaggagaatcgagctaattgtgcagtgcccattgtggtgtcaggcattttgctaaatacttcttatatgacctcatttcatccccataaccaccctgctgggtaaatgtattagttatctactgctgcataacaaattactcccaaacatagtggcttaaaacagcacacatttattatctcagttctgtgcaccagaaggccacctctggctcagagtcactcataagactgcagtcacctcagggcttgaccaggaaggattcgcctcccagctcattcccatacttggtggttggactgaggcctcagttcctccctctgtttcttgctgtgtaggcctcttcacagagcatctcccaacatgacggcctgcttcagcagagtgagcaggtaagagggcaagggagagtgccaccaagatcgaaggcacagtcatttgtaagtgaaacactttttctgtattttgctccttcgaagcaagtcactccatccagtccatactcacggagaggggattatacatatattgctgatgtgcacattttgatgtggagatatcaggtgataagactggagaggtaggcaaggagtgtatataatgccctttttgatgccagggaagtaaagcacatttcatttcacaggagtgaaatatcagagcagcagctgttgtttacagtgggaattgtggagtttgtgggtggtagaggaatatagaaatcttggaaacacaactcttgaaattaaaaccaattctaaggtgagaagttaaaaaatatcaccatatctctgtgaacataatgaccagagccgaacgatcatttgtattacctcaattgaggtaggaactaccagcgagttataaaaatagccagggtgctttgatcaattgcgtacacgtggccactaatacatta

SEQ ID NO: 9399 - DNA, 1051 bp, Homo sapiens
taattttttcaatagatgtcaaaaagtatttgataaaattcatccctttatcataaaaaccctcatcaaaatggatatagaaggaacatacctcaaattattaaaggccatctatgtcaaactcatggctaacatcagaccgaaaggggaaaatttgaaggccttttctctaaagactggtacaagataagaattgcccacttttaccacttttattcaacatgatactggaagtcctggtcagagcaactaggcaaagaaagaataaaagggcatccaaattgtaaaggaagaagtcaagttaaccttgtttgaagaggacatgatcttattacttagaaagacctaaaaactccaccaaaaaactgatagaacataaaacaaattcagtaaagttgcaggttacaaaatcaacatacaaaaatcagtagcatttatatgtgccaacagtgaacaatctgaaaaatcaagaaagtaatcccatttacaatagctgcaaaaaatataaaatacctaggaatcaatctaaccaaagaaataaaagttctgtacaaggaaataaaattctgatgaaagaaacagaagaggacaccaaaaagtggaaatatattccatgctcatggattggaagaataatattgttaaaatgacaatactactacaaactacttacagattcaatgcaatccctatcaaaataccgatgacattcttcacaaaaagagaaaaaaaaaaaacaaacctaacatttatatagaaccacaaaagaccctgaataggcaaagcaatcctgagcataaagaacaaagctgggttgggcatagtggcttatacctgtaatctcagcactttgggaggccaaaatgggagaactgcatgaggccaggagttcgagcctgcagtgagctatgagtgcaccactgcactccagcctgggcaacagagtgagacccttcacacacacacacacacacacacacacacacacacacaaaacagagtgagacccttcacacacacacacacaccacacacacaaacataccctgaa

SEQ ID NO: 9400 - DNA, 1022 bp, Homo sapiens
catcttgaattacaagattatcctccctgccctgtcaggacaatatccactgcctgagggagtgggacatagctggccccatcacaactgaagcacttagtgtcagtcctcatttaaaagtaagacaaaagataagcaaggtgagcgcgtgaaggcatgccatgattgttcacctgctgaagtctgagacctagactatgagtgtggagatcaccctggtggtctttgcaaaagttagacttttaagaaaggcagaataacacagtagataagaagaaaggttctgaagctggacagctggctggataaaaagctgtacgagttttggttgtgctatttagattcaaatcttagctaagttacttattagtgtaaatttttaacttctctgtgcctcagttcttgtctgtaaaatgataacaacatctacttctaaaacatgcccagcacatcgtaagaagggttagctctcactactataaggaagagtatatagtggttaaaggcagggtctctgaagctggaatgctggttcatatcttaccttcaccatttaagtagctccgggacctgagcaagagtcacttagcatctctgtctctgtttctcatctacaaaatgggaatgataatgatatctccctaataggtcactattacatgttaaacaccataggaagtgttattattatgaaatgaattagaaagcatattccttgacttttaggtttggctgattcaaaaagggctatataaaaaatatctactggacacctctaagaaaagcattggattaagaatgaacagactaagattcaagagccagttctatgacttactagaagggagactctgggcaggtcatttaatttcccttggtctcaggcttttcatacataaagtgggttagtaatacttcccctgtgttgtttattagatttttttcacccacggactaaatgcagtacacaattatccccagaggcatcatattgtcaaatagatatgaaaagattacacact

SEQ ID NO: 9401 - DNA, 1030 bp, Homo sapiens
ctcataggtatatacccaggagaattaaaaatgtatgtccacacaaaaacttgtacatgaatgtttataggagcattattcataatagctaaaaagtgggaacaatccaagtgtccatcaacttatgaatggataaacaaaatgtggtatgttcttacaatggactattgtttagctataaaaataaatcaagtaccgatacatgcgacaacatggatgaaccttgaaatgactgtgctcagtgaaaaaagccagacacaaaagaccacatattgtatgctttcatttctatgaaatgaaatgaaatatccagaagaagcaaatccacagagacagaaatatgaaaatccacagagacagaaatgtgaaatattgaaaaaatgaaatatccagaagaagcgaatccacagagacagaaagtgattgccagggactagggatggtgcggggaatgggaaatgactatgactgctcattgatttggggtttcttttggagatgatggaaatgttctggaagtagatagtggtgatggtttcacaaccttgtgaatatactaaaaactaccaaattgaatttgatggtatgtgaattatatctcaataaaatttttatttacataatatgctgtgtaggcaagttggggtagcagaaagaatgtgacagaactttagtattgggtcctgttcagagtccttgctttgggagagtttttaaactatctgagctttagtctccacttctaaaattaaggcagtaatatcagtcttacatacttttatgtatattaaatgaaaagtgtatgtaagctgttttgaactgggtctggtggtgtgcccctatagtctcagctacttgagaggctgggataggagaattacttgagcttaggagtttgagtctagcctgagcaacatattgagacccccatctcaaaaaagaaaacaaaacaaaccccaaaaccattttagggaacagggtgggcctgacatatagtataaatttttaacaaatgttaattagtttccta

SEQ ID NO: 9402 - DNA, 1016 bp, Homo sapiens
ctaacctcaggaagcctacactccaatgggaaaccaagggtgaccccagaccaatttatgcgactgctttatttccttatccacaaagtggggagaatgacagtgcccatctcataaggctgttgggaacttttaacgacataatacttgtggagcgtgatggctggcatagagaaagcactggataactgcttgttttccttcttcttgttatgattggagagattccgcggaggtggtgcctgggagctggccacacctcccccagagggaatttccgagtttcacaggtttctctcccttctgagcaacggcaggtgagtcagggtcgcttgtgctcccctccagctctgggatgtatgctgtccagctggttacgagtctccatggcatccgaggaaaagtggagctggctgaagggaggtggaaaagaagggcaacaaattccagtttcttgtgaaactttgtaaacgtaaggctcttatctcagtctgcagagcagaaacagggtgagggccatggatctgaatgtctccacctgtgcataaaacatatgattagagctgaagacctagaagtcccttccccaggcagggcatgaactcttctgtttctagaaccatttagggaggtgacaacttggcttcgtcccagagattcaggtgaggacagaacagagggcagggtgttcttgccctgagttccccgctaatgagctaatcctggcccttcacctttgtttggcatgaagtttaccagaaaagggcatcctgcctttatccttggttctctataccctcgctacttttcctgtgttttgtaaacacgggatggtgtatttagctttcttttgctggaattattttcaccccatgtcctgtgtcttccttgtccagaagaaatcatcttctagcctaagagctccagagaagggtgtgcaggggacggccatgttctgatgcatgcattcagctgtgtcgaacagtcttcctgttttgctactgtctgagaatatt

SEQ ID NO: 9403 - DNA, 1073 bp, Homo sapiens
tgggtgcatttattctctgatttctaacccattcattgaggttgccttctggggttgccgtcagactgccctgcatgctaagatcctggaatttcggataaaaagccctgagggaaacaaatagaccagcaggatgctggaggtggcccctgcaccattcatggggactgactcttgcagctgcagcagaaatcctggtggcctaaggggaagtggtgtgggggcacaaaacacatcccagtcactcctggagccaggaagtggggaggagagggttactgcatggttatcaagagtgacggtgcatgagtttggttgggatagggggcaccaatctcagtccccaaactcagatgggtaagaaatctccaattctgtccttgcccataagtaaacctaattttcactccatattcccatcatactgtgctagtcggaaatttaatctcatatgagactctcctccctgtgtgccaattttcttcccagctccatagttggttctaggtttctgtgagccactggaagactctgggcagatatctatagagaacagactattatgcttacattgtgcatgacttttttgtgtgtgtgaggtggtaattcttctggttaactagtcaggtcgaacaaactgagtattttctttttctcttttgccggtgtctttattttgcacactttgggggtcttctgtgaattactgtgcacagagaatgtccctttgtaagaagatggaatggtttttgtggctggttactgtcccactgtccttccaccagtggcttggtcccctgtcatctgggagctcatccttgtagccatctctaagtgacacagtggcctcagtgtgtgaatactgatatctagatgctggcagtgcctggaagaagttgctgtacgttccttgttagtttcatataaacagaactatgggtctgtttattttttgactactcagaaagaccttttaaaatttaattaaaattattctgtaaacttgaatttgtttgatgtctagttctataagttttaacacatatatacctttgtggaaccacaccaacaca

SEQ ID NO: 9404 - DNA, 1051 bp, Homo sapiens
ggaggtaaaatcagcaagacatggggggatggattgaattaggggttgtaggaggcataatctacataaactgggatgggcaagcacatttgataccctggtttaggaacctgtgctttagaggtaatgtcccttcttaatgcttcccaaggtgtctaggtatatcagtgatgatgacttcacttgcgtggtaagaaatcccccaactcaatggttgtaaataattagaaatcatctcacatggcaggaagtccacgggtgatagcacttgccctggtggtagaatcagctctgtgatgtcaccaagaacccaggctccctccctctcttcactctgctgactcccactggggccagcttgcctggtggtagcaaggtgaccttggcatttccaggcaccagacacccagtcacaaccacatccttctcaggctcacctggctagacagtcaagttatgtgctctgccaggaaaatgggatgactgtgaaggtgtagactgctaagaatttcaccatggactgcaaatggggccatcttctctgaaaagtggacaaatgaactaacccagggtcctgttaggggaactagacatgggggctcattgggtttgtcacactgtcctggacgaacacatctcagattttgaatttcttagatcaataaacacaatacaaagagtgggtgggggaactgacataggattgctgacttttcattttcacctagtaaatatttaaaaaattatcatctgttgtctctatcatttcattagaagcacatcttttgtttttttgagagaaaagtaattttattttttaaatttatttttatttttatttatatatatatatttttattatactttaagttctagggtacatgtgcacaacgtgcaggtttgttacatatgtatacatgtgccacgttggtgtgtattttacattaggtatatctcctaatgctctccctcccccatccctccaccccacaacaggccccggggtgtgatgttccccttcctgtgtccaagtgttctcattgttcaattc

SEQ ID NO: 9405 - DNA, 1053 bp, Homo sapiens
attgcctgggaaccagagggtggttacagctgtacattctattagtagacatgtagctgaaaattatataaaaatcaaattttgtgtactgccagaggtccttgttagattaaagaaacccaactgtggtatattttttaaagcagataattttggaaagacacacttgtaatgactttggataaggataaaaggggcatagctgagatgttagaaataacaaagcaaccagcaagggtggatgatggatcccaaatggtagacgacggagagagagaaagctctttaaagttataagcttgagggaatgaaataaatatgcagacactggagaattcacacaactttaggtgagagttgaaggagactttgaaggaagaatttatctccgctgagaggaagggttgatgaggtaagtatgtgtgttccctgtttgggaggtgaatggaggaatcccagttaaagagactaggaagactcaaagatggtagtaatctatatttttatatgttcagtggagagaaaaacaccatgagttatggtcagtactttgcggggtttttatcacgcccacaagtatttatgtggcagtgtttatgtagcacacagaatgatatcttgcctataattcagaaggtaatagtgaacaaatgaagagaaccagagcttagtggcacaaaagcctaggttagaaaagtataataaagtgaagtgaaagaaagttggaaacaaataatatatataggtataatcccaatcttgttaaaaaacgtctttcactcaccctgtaatcaagactggaagacggtaaatcactatttatgttgtctgagtttttgataatgagcacatattgctttgcaaaacaaatagtgcagtaaaaacaagggcagcagtactaagggtggttaaaagtataaagtaggtgagaattaagtagaaacttgggatttgtgtcagaggagagtagtgatgtcagagggatttcagttgaatggtgaaattcaagttctttatttagagtcaaagactgaggaagagctgatgtccagg

SEQ ID NO: 9406 - DNA, 1041 bp, Homo sapiens
ttaaatgaccagatcttgtgagaactcactatcatgaagatggcaccaagccatgagggatctgctccatgatccaagcatcttccactagaccccacctccagcattggggaatataattcaacataagatttgggcagggacaaatatccaaagtatatcagttgtcaactgtagatgatgtctcttgattcctcattttgtgagatgaggattaatagcatccctgtactcccttcagctctcctttttgtcattcttcttccaattgttaacatttgtttttaaaatttttatattattgatgtcaataacatctacattttgttctttatccataattaagttatcagtgattatagtttaaaaagttgaaaactgtactttttacattatgatgaacaagtaaatattgttcactgaggagccaagtggtatacgattattgtatttcctttcctatgaagaattattacagtttctactagtcttttttgccctttcattgtctgcctatgtgaccttctgaagtttttttagtgtctgcactctctgatacccaaagagagtatcaaatcttgaaatcccttattaaagaggaatccatgattcttctgcctgtctgctactctcttctgggttgattgaccctggatcagctgcacagctgtcaccctgggatgacctttcattgatcttcttgcctgaatccagttttggcaatataatgcctttttctttctgctttgccatctagctttgagcaaaatttcaagttattcccaaaggaagagtgaatgaaaggtaaactttatgcattattagtcaatacatttataataatgtctattcttcccatagatatctgatagtatctttattctgtcctgctgattacagggttaacaaggtgtgacttctagactgagaagaatttccacattgtaactggaaggcattactcatgatcttttagcctctatgattctgatgagaagtctgatgccaatctgatttttcattttttgtagatgactattt

SEQ ID NO: 9407 - DNA, 1031 bp, Homo sapiens
tgaatgaataagatgtttcaaatagtaagaattcctatgaagaaaataaaatgctgtatgctccagagagtaagtgagcagagaagggggtgggtgaacaaagaaagtgccctctgattcagcccaggaggcagaggctgcagtgagccaagatcgcaccactgcactccagcctgggtgatagagtgagaccacatctcacaaaaaaaaaaaaaagctctctctgatattggaaatgagattggaacgacacagggagccgagagagagagagagagagagagagagagagagagagagagagagggagagagagaactgtaaacatgtaagcataaagtaagaaaaatcagcgtgggttggctgctttatggaaactttttttgagttattttgtggttgtgcccaccacactatacatcttgatgtagtttgcatatatttttaaagtgggttagcatcatcagctaatgcttattgaactgtcagcaaatatttatggagagcctcctgtgctcaagaacccttattaagtgcagagccctgaattatgagttacaaggattttcagaaggtagaattctagggtttaagggaaatatttcaaaggaattacaaattaatttgaaaaaactccagggccttcttagagaagcactgtacattccagacatagcatctaaagccaaaagattaaaccagatgggcaatcattttctttctcattacccaactaatggggactgtgaagatgggcagggactcatgtctagagcccacctgaagtcacagtggacctagaatgaagttaacgtcgcagttaagattttcaccggctactttgcttccccaggattttatattttttgaggaaacggaatgtctctgtcatacacagagaggtgctgacttccctgcatgccgtgtagacacaggaggagtggtcacagaggggacatgtgccatcagccttcttcttgagctagtggcacccttaaggatgcaggcggggaatatcaatatattatttt

SEQ ID NO: 9408 - DNA, 1021 bp, Homo sapiens
taaaaattgcccattaaactaccacctaaaaaaaataagattaacattttggtgtctatccttcacgtcttttgtttatgtacaaacatatatactttataaactatatttttcatattgtagtataaactattttgtaacattttgctcactatagcatcatttctctgtgtcatcatatattttctactgtattatttttaatgcctgaagatacctataaaatatttaattgtataatttaaccaatagctaacactgagcagtagtttgcttcagtttttctctcataagcaacattacaatgaccatcctttcagctttttacattaatttgattttcatagtctaaattaattcatataaatggaatagctgggcctaaagttgtaaatgtttttgagactttgatacctgttacagtttgcccacctaaaaggtgtgcttagcgtaagttctaggtaccgcactggtcttccagatgcaatgctcctgtggccgcatgaactctgagtactgtgtagcatccaggtgcaactttaggcaagagagtcttttaagtttcccttcatagggaagtgttcaataacatgaggatttcatttggaactgaatctgtgtgggtagtaagttgtttacctgacagtaatcgaatccaatccttagctgaattggatgtgctggtgatacctacctaagggaattgctgcaagtcgagtcaataaagcaatttcaaatgggagaaaacttgaacttcctttttaataataaatagacaaaggacttttcttttgaaacattgttaattacaatggagtttgaagaacccttgagctgtgagaagcagatttggtatttctcagaaatcatcttttatgaaatgtgacttgaatttctattttctgcctaatctgaacagaagcctagcagcagtccctccccacccccgcacctccacccctctagagaagtgggtttcacatgggactcaaggtaaatggggaaaccatgagtacataag

SEQ ID NO: 9409 - DNA, 1033 bp, Homo sapiens
ggaaaaaactgttggttgtttgtttcaggtaacattcatgatgactttgtcttgcatgaattattacttagagtattactgacccatattaatgggatcaagacaaatacatcttctgtaagggagaagttttgcatcactgaacaataaagcaggacagcatagtttatggaaaagaagatttagaactacatagcgcattatttcactttctgcgacataatttgtagtgaaatgcaatgaatgaactcttgaacttgtaggggatatatgcaacattaaggccaaagaagtaatgatattttcctccatagatgcaatgcctaatgtcacaatgccaccgcatcaccacatcagctgaaaaaacatttggggaaagtcaggtctgcatgtctgacttgtgaattacattaactaagcctaaacctaatagcccaagtatgctagagggaaaggataaaagggagacttaaaattgctttgaattaaaattgggaaaaaatgagaacgtttgtagaaacttaaattatcccaaaaacatgtctaccaaaaagtagcacttctaggcatagtttgatatctatttcatcatgactgtcatttgtttgttcagcaaatgcttactagcacctactgtgagtcagctattgtgttaggcacttgggatatggcagtaaaaggtatgggaaagagtcattctcttgagctcacatcctagtagaagttttgaacaatagacagtaaacataataaatgagcaaatgctatagtatgttagaaagtggtaatagggaaaagaaagtatagaacagaataatagtgacttggagtatgtgtgggatgagctagtgtgtgggcagttgtcacaagtttgatttcctagaagatccaatccatatcatggcatctctcccccgccacacacactttgtagaataaatctattttaagatataagccaactgcttctcaaaaaggttaagtaacttgccctagatcaagcatctggtaagagagaaatctgtttacccta

SEQ ID NO: 9410 - DNA, 1133 bp, Homo sapiens
cattggcagcaagcacccagcatgacaatggaaacgtgtctgtggggagaacagaagttagaaaaaggtggctgtgaagtagcctgtggcattgtggaacccacctttccattattcaggaccctccacaaggtagaaagtgacttagaaagtcacttagaaagaaaaggaaatttaagtaaaaccaccccatccacttagatgaatttggaaaaggccaatcgctttctgatgcacctgttcaaaaagataatttctaagtcctctttagagctaagatccagaatctccactgtggtctctgggctccgagtagactcacttagtctgttttgattcagcctcaggccttctgcttgtcttacaagcagagaatgggaagtactaagaatctccacttctcagactaagtcagggcctgtagttcattttaaaagcaggttcaagacttgcagtttaaacctttgagacatctggtcgtagctgggatctatatagcctttgcttcccccacccccgatgggaccattatgagagtagaatgttttcctgcacccttacgaccctattgtccatgcctgagtgaagaaacctctggtttctctggttggggaaggctctggctgtctgtactcctctgtggtagctcagccccagtgtagagaagaccaccactggctctctcctggcttctcgcctggtccggtttctcttgctcctaaatagcaaaaccgactgatttttttttttttgaaatggagtctcgctctgtcacccaggctggagtgcagtggcgtgatctcggctcactgcaagctctgcctcccgggttcatgccattctcctttctcctgcctcagcctcccaagtagctgggactacaggcgcctaccaccatgcccggctaattttttttttatttttacttatttttagtagagacggggtttcaccgtgttagccagggtggtcccgatctcctgacctcgtgatctgcctgcctcggcctcccaaagtgctgggattacaggcgtgagccaccgcgcccgggcaaaattgactgatttctttccacgcctgtttatatttcccgccttctccctgggaaatgtgataatgatcagaaaaatagc

SEQ ID NO: 9411 - DNA, 1022 bp, Homo sapiens
ttctgcctgcctaaaggaaatctctagagagagtaaactcaaataaagcccgaaaggatagtgtgaaattccagagttaaatttgggatttgcatttgaggagctgatttctgtcccactaatagaaaacaaaactgcatcaaatggaacagaaattgctcttccaaataacctattattttttgcaacttttacctgcagagttaaattcaccttaacaaaaagtcaactgaggaactgctaaatatttttgaaacccacatatgctgtttgaaactgtgaaaaccagctagattaagagatgtggtgtttacttggatactttctttatcaacattagaattaaacccttagctaagatttcagccccactcatgtgtgttatgtggatttaatgtacatttcagggcttaaaccacaaggctgctgcttggcagatctttctacatcagcttaaaagtagatttttgtccagagtgacccagtgtatatctttgacctacagtgaaggacagaaataatatctatctcagatgaatgatgcttttgaattctatatcttttctaggaatagctcaacagccaagctagaccagaaaggttattaagatttgtgcctactgaggttctttaataggttggcacttctggcttgtagctatgatttcattttttttttttttttttttttgagacggagtctcgctgtcgcccaggctggagtgcagtggcgcgatctcggctcactgcaggctccgccccctggggttcccgccattctcctgcctcagcctcccgagtagctgggactacaggcgcccgccacctcgcccggctaatttttttttgtatttttagtagagacggggtttcaccgtgttagccaggatggtctcgatctcctgacctcgtgatccgcccgcctcggcctcccaaagtgctgggattacaggcgtgagccaccgcgcccggccgatttcatttttatagaatgagaataatagccaggaactaaaacacat

SEQ ID NO: 9412 - DNA, 1033 bp, Homo sapiens
cctgcctgtgctgcaaagccttttgccctggtccaggggaaacacagcagcgccctccaactgcctcattatccggtgttctcagacaggcggggctcagtctgctcccaggactcacgggaggccagctgaccaggctcacccctgttccccaatctgtgagatgatgttgtcatccctccctctggaaggtatagaaagaccctgttttctcaattctggggcatagaaggtccccaggaaggtgtcactctgggcatgaatgccatgactctgtcctctgggccctccccacccgcaggggcttttgctggcagggtctggaggtctcgcatctcagtctgttaaccaccagccatctctctcccactcaagccaacggcagccccacctcaggcctgagcaccggggccatcgtgggcatcctcatcgtcatcttcgtcctgctcctggtggttgtggacatcacctgctacttcctgaacaagtgtggcctgttcatgtgcattgcggtcaacctgtgtggaaaagccgggcccggggccaagggcaaggacatggaggagggcaaggccgccttctcgtgagtgcagacctgtccaccttgctgaggtttgggctctgctccagcccagggacccagcagctgcaccaccctgcgccatcagctggtgcctttcctttcattgcacgttctccatttggaaccctgatgggggaaaaacattagagaaaagtttctcaaagcatggtctttgggggttacctgtttgaaatgtagactcttgagcccaatcccagatctcttgtattagaatctccccagagtgtgaaaatccctgtgtaggtcaaaatgagggaaattgtcagaactaaacctggggaggagctgccatggggtagggcagcattagagggacacacttaccttgctttcgtacattgtttattcattcattcatccatcactcaacaaatatttatcaagcagctgctgcaggcaaggcactgttcccaggcacataggtacaac

SEQ ID NO: 9413 - DNA, 1025 bp, Homo sapiens
tttgagctgcctgtacttacatgtttgtctcccacacaagttcataaactcttcaaaaaaggatctttttttattcatcattgttatctatagcatcagcataatatctaactcataatgagctctccataaattattgttgaattgaataatggcttaaaactctgttccttaaagctaatagctatactcacctgcaactttttctaggcaaaaaaaaaaaaaaaaaaacctgttgttaattttttctcattggttctgcttgctctattttgctttctattgctctatttttttctttaagatctttcccatgcattttatgcaccatcctttctagtgaatagagtcttttgaatatcttgtttgattaagtcacacctgatttcttctctagccaatttaattcaggagatgaattctgatgacccagttgtgcaacagaaagctgtcctggagacagaaaagagactactgcttatggaggaagaccaggaggaggatgaatgcaggaccaccttgaacaagactatgatcagtcctccacaaactgctatgaaggtttctttttctattgagaagttatataagtacttacagtgagaagacctacacctaggcagtagtttaatctcaaactgtccagcaaggctgaaatggtcttttgtttcttagatttattttttataagaaagtataaaatttgattttttttttcctttgatctttctgggttatctttaaacaaccctttggatctattttaatggaaatttcccctctccaccccctgagcttgtgtgatatatttaagctgtacctttaaggtaatgtattctaactcatttccaactcataagccacagctgaggtcccttgacctgggcagccttgttttgcagactcggtcccatagcaattgtgcccatactcagatctcctgatttaaagcaagccccatgaattctgagcccttcagttttgatggttaaaagaaatgacctcttgtttgtaattgatttgcc

SEQ ID NO: 9414 - DNA, 1066 bp, Homo sapiens
atttaattatcctctttctgctgtactcagagagctgctggtgttctgagccggaccctttcttcctctctgaaaattgttgaggaggccttgcgagcaggagtggtaaagaaaatgatgaaattcctgaaggtaagatcactttattggttacaacccctgaaatgtacagaagtctcctattttattcggggaacagaattaaggtgggctttgtttggttaatgtgctgccatttcttccttgctagattttaaacttcttggatagggatttgcttctgcctgtctacccagaccatactctgaacatcaacaacagattgttgaataaataagaaaattgttcattagatacatctataaaacctgcttacccctcaagcctgacttaaaaatatatggccactgttcttgataaaaatgatctgagtggctttctgtaacgtttctcaggcacattgttctgctcaggttttgctactcatgatgctttatacagttatctggagagtgttggatggaactccatctatgagacatgtagcctgcagaattaccatgtgaccaaaggatgttgggatttccctgtgagatgagtgtggtgaatctaagcaagccagtagagcagttatctggattcacctgcaagggcgaaggggattaatacactaggctgccatctcagaatcccacctatgatgtgtgtgcccatgaggtccatacacccatgttagtgtggtgacacatggcttttattcataaagcatcaggctgagtggcgcagggaagcatgctctgcgggctgctgctagggcaggggtgacactgagggggcagcacagggggtctgagtttagattgccacttgaacaatgactgtcattcattataacttttgcaaacccaccaaaagctcctgatggcatgcatacccatgcatcacacgtgcatacgtgcacacatgccttttaaagaccccacatgggtgattgcaagggctgtgtttgacagttgtcatctcttaaaatgatgtaggttcctgaagttcctcatgcaggactgtc

SEQ ID NO: 9415 - DNA, 1112 bp, Homo sapiens
aaggtgtacacagtggtgcaagccagctccagggcaccgtggcttctgaacgcaagtgtggaagcgctaggagtcctagttgctaggctctagagtggaagttgaatccttggtggggctgccagtaaggtggggaggtcattttctcaccaaatcaaaacacaaaaccctggctgtgtcgtctttcttattctcatgcctggttcttgattgtggctagcaccatggctatttcaggatcccactcatactgctgccattggttgaatgcttacatccattatctcatttagtcatgacagtaatcccatgacatagggactggtattatctccattttgcaggtgaggaaactgaggcacagagtgggtcagtaatttgcacagggttctacagcctttgagtggtagaactggaatttgaaatcatgactgtctgatcccagatcccaaatccttgcccagtatattatactcgcagttttgtagcttttcacagacatttccaaattctgagtctactctcaatgcagggtcttctagcataacctttgttcctgttggcaacacttcattttggactgtcaagatgcatttcctgagatgtgagatgtcatgaccctgtgtttggtaagtttggctgcaaggtactggctgtcctctaagacacttcctgagtcccaagtccacagattttactgaggactgaaatggctgcattcttcatagacactgagtttgcctgttccaaaaatggtgatttctatagcaaccatttattctagcagatgtgtgcctggtatggttggcagagagggtgggaccaaaaatggaaacggccttttattcttcacttcctgaatgcacgccctgtatgtgaggcatataggaggaaaaacatggcatccttagaatctgtaatagatctatggctcaggaaagaaatacgtgttgcttcagactgctttttatctggagcttgagttgggctgtgtttggtttgtggcgtgttctttggcagatgtacctgttggtttcaattcaatggatgtttgtcatttggtctctgcagaatatgcacatttactgtgggggtaggtggctaataaacag

SEQ ID NO: 9416 - DNA, 1025 bp, Homo sapiens
ccttagtcacatgtcctatactcacacttcctatcccattttcctgcctcaccaagatcaccacaatgatcccaggttctatatagcatttcttttctggaggtctttaaaaatattctgggagatctgtctggaatgcttgagtacattcatttattcctgtatgcatagagggcccagggacctcccaggctctctgagccctctgattcttagagggttaaactattatggaaacagacattgcatctgtgtcttctcttgtttcctgcatgcagcagtgacctttggagtacattgttcaggagaccgacccttttctaccatttgaagtctgctattctcatctctctaccaaaagagaaactaaacttcattgtcgtgattaaggtcacagccaacagcagttaaagaagccgttggtcttcccactcataccgctgccctctccctagctctcaggaggaagagctctccaaaatggaagtgtcttgggaaagaaatggaagtggaaagagaaagatgaaaaggccaccaatggcacttcccgtgtctcagcctcaccagagaaggaacttggccacacactggttgggtataccaaagtgacacaatgtggatgttccagtggcaattaagtatttatatgactagacttgaggagttccaggccatgacacttccaaatccttccagcccgcttgtggagagaggcccggaggcttccagcgagacaattagagtgtgaattagattgtgtcttctggaagggagatgaagttacctgcctactctattacagtttatttcattaaggttgaccatgcccttttttttgggcagagggaataggatggattctctggagaaaacagtgtagcaaggcaatggagaaatgtccacactggagtaaggggctttctgggacctggatggagtctccttcctcccctagggaataggacagaggtgggaaaggtgctgcctgactgctctgtgcacatctgcatgttggtgatgagtgt

SEQ ID NO: 9417 - DNA, 1028 bp, Homo sapiens
ggggctccaggggcttgtccagagaagatttcagagccaggttggtgaatagctgctgatactgacatattggttcgatggcagatttttctgctcccctcaacaaaacaatcactcatctttaaattagaggaacaaggtggggtgtgcatgtgtgcgttcatgtatgtgcacgtgtggtactgtgtgtctttatgaatgtgagactcactttacacaagataaatggcccccaaataactgtacatccaattccagtaaaatcagtcatactttaattgcatgaagggagctctttctttaaaggaaaagtgactggagaagatggtagctgcgacttactggttctgtatatctacccaccagctgtaggatggagcactttccccaccttgtcgcaactctccaagggacctccccttactgcttccattttacagctgaggcaacaggctccctgagactggcagcttgctgagggtcacagctggcgactagcttgcctgggatttgacctctgatctgtctgacccaaatgttgagttcttaaccacactgcactgcctcctgaggtataaatggcaccaaggacctctgctatccacagaatgttttgtgattgacaaggagttttgtattcacttatgtctattatcctgtttgctcctcacagcagcctcagggaggcagacagataggcttatgcccattttacagattgggaaatcagttcatcaaggtgtgatgactagtgtgatgcccacagctgtgagtggccaagttaggcgtgggatctcgtgcctgcacctctagatcctgctatttttctcggtttgcttggatctgtgattgctgtggttagcaagggtctagcgcactttatcttctgctattctccctctgctatttaatttctttcccgcaatctatcccttaacttcccccagccccgcatctcccacctccatgtcactccatcccgtgcagctggcctccttgctcctcttgccttgcctggcgagggtgtt

SEQ ID NO: 9418 - DNA, 1050 bp, Homo sapiens
ctggaaaaggataaggagtagagaataatagggagaaaagaaatattgtggatatttagggagaaatgttgtggataaaatggttagggaaggcctctccaagaaggtggtatctgggcagagtcttaaaaagtgaaggagtgagccactcaaaaatttctgggaagaatgtctaagcaaagggagtgagcatttgcagaagccctgaggctggatcaagcctgacaagtttaaggacccacacgcagagcagtggtggccagagagctgggagtgacgtgtagagagtggtgagggatgaggacaggatctgtcaagtctctcagccctggtaaaagatttgggttttactctgcatgtgctgagtcctttggagggtgacaaaatatttgcaaatcatatatttgatgaggaacttatagctagaaatagaaagaggtcttataattcaaaaaacataaacaaataatcaaattaaataatgggcaaaggttctgaacagacatgtctccaaagatagacaaatagccaatgagcacatgaaaaagatgctcaactgcattcaccatcagagagatgcaaatcaaaaccacagtgagatactgcttcacacccactacaatgtggctacaataaaaaatacagatagttacaagtgttatcaaagatgtggaaaaaccagaactctcatgggagtgtaaaatggtgtagccactttggaaaacattctggcaattcctcaagaggttagctgaggcaggcagatcatgaggtcaggagatcgagaccatcctggccaacatggtgaaaccccgtctctactaaaaaaatagaaaaattagctgggcgtggtggcatgtgcttgtaatctcagctacttgggaggctgaggcaggagaatcacttgaaccagggagtcggaagttgcagtgagctgagattgagccactgcactccagcctggcgtcagagtgagaccccgtctcaaaaaaaaaaaaaaaaggttaaacacagaattatcatacgatgcagcagttcttcttttaggta

SEQ ID NO: 9419 - DNA, 1031 bp, Homo sapiens
attctgcttgaaagacttcctgtggtatttcccatagggcagctttgcaggtgatgaaatcttttagcttttgtatatctaaaaaagtctctttcagcattttgaaatatattttgaagaatattttgaaatatatatttaaataaattctaggtatagaattctaaattgatgaggttcttttctttcaattcataaaaatagttggtccattgttctcttgattatttcccataaggaaatcttacacataatgtgtcatttttctctagctggttttgagcaattgattactatgtgccttgacatagttttcttcatgtttcttgtgcttggggtgcattgagctgcatgaatctggagttttcacctgatttgaaaacaactttagacatttgaattttttaataccaattttcctctcctttggaaactccaatgcatttatatgaggctgcgtgattttgttatatagctctctggtaagtataaaatgttattttatttatcttttgaaatttcatttatttatagacaacgtctcactctgtcacccaggctgagtgcagtggtgcgatcacagctcactgcagcttcaacttcctgggctcaagtgatcctcccacctcagcctccccagtagctgggactacaggcacataccaccacgcctggctaattttttatttttagtagtgtagagatggggtcttgctatgtcacccaggctggttttgaactcctggactcgcataagcaatgtgatccacctcagcctcccagtgttgggattacaagcgtgagccaccacaactggcctatttatctttttcttagagacaggatctccctctgttgctaggctgaagtgcagtggcacaatcatagctcactgcggcctcaaacacctgggcttaagtgatcctgctgcctcagcctccccggtcgctaggactacaggaacacaccatcattcctggctaattttttctaaaaaaaatttgttgcctggctggtcactaactcctggc

SEQ ID NO: 9420 - DNA, 1049 bp, Homo sapiens
tacacagtgagtctcactgtgaatttttccattgtctgtggtttaggcatgaaaaggaggggattggagctggtttgggttaccttcagatgccactaacctcctgcaaaatgattctgatctaatatggtgcctcccttacttacctgcatttaacaagatcacttcgataccccatcaccttccagaagctgctaccagaagtcccagttagaaaagttgggtgactatcactttggtgatacaggggaaaacttcggtgatatcaaaccagtcataagggccaggaggatgtctgtgtctacacttagagaacctctggagttaattcagatctttccactgccatgaagcttttctgaacaactcacagtgaacggatctctctcttctctgatgagtgacagaagtactttcttaacctgtatttgtccctacaatttcaaataaccacagcaggccaggtggctcatgcctgtaatcctagcactttgggagaccgaagcaggtagaccgcttgaacccaggagtttgggaccagcctggacaacatgacaaaatgctctctgtacaaaaaatacaagaattagcagggcatggtgacatatacctgtggccccagctcttgggaggctgaggttgggcaattgcttgagatgggcaggaggaggctgcagtgaactgagattttgccactgcactccagcctaggtgacggagccagacgctatctcaaaaataaaataaaatgaaataaccatatcaaatacttctatggtgcttactatgtgccatgcatggcaatacgcactttatagatattattaacccatttaatcctacaacaaccctttgaagtagggtctattaatattatccttatttttttagaaaaagaaactgggcacagagaggtgaattaacttacctagagaaacagcactagtaaggggtggtgcctgaatttgaagctggaagtctggctctaaaactcaggtctcataagccccagaatcaaattatttctgtgacaacctgccttagtccat

SEQ ID NO: 9421 - DNA, 1049 bp, Homo sapiens
tcaactttcttcatctgttttcctggttcagactaaaacatctaactcagctggagaagttataacgctttgttgttggacgtggtttctcattaaatacattgcactatgctggtataagcacttggaaattctagtgctgtattgtcatagtaagtagagaatatagaaaaggcaggaaaatcgtgcaagtcggttactcctcgtcttcccagagaactcactttaatggacaacaaagcttcccctggagtacagtctgttgtggcaaattaacaaaacttgttcttcagaccttttatttgcattctgcttggtctttctttctttttttttttttttttttgtgtgtgtgacggagtctcagtctgtcgcccaggctggagtgcagtggcgcgatctctactcactacaacctctgcctcccggttcaagcttataggcatgtgccaccacacccagctaattttgtattttttttttttagtagagacggggtttcgccacgttggccaggcaggtcttgaactcccgacctcaagtgatccacccgcctcggcctcccaaagtgctgggataacaggcgcaggaaacccaaagtcactcagaagtttgcgtcttaccactgggtagctcttagttcgttcttattttatgtgtccataagagcagataattcttcgtttcaattggaaagaatacaacagctggagcctgagcaacatggcaagacctcgtctctacgaaatttaaaaattagccatgtgtggtggcgtgggcctgcagtaccagttactctggaaggaagaaatgggaggatcacttgagcccaggagatcaaggctgcagtgagctgtgttacgccacttcactccagctaacgactgactgagaccctgtcggggtaaaaaacaaaaaacaaaacacagccggctgggtgctgtgactcattcctgtaattccagcactttgggaggccaaggcagcaggatcacttgagcctaggagttcaagatcagcctgaacaatatggtgagatccccatctat

SEQ ID NO: 9422 - DNA, 1037 bp, Homo sapiens
gaaggaaaaaaaaccaaatccaatttcattcctctgaaaataaactccagatagattaaagaatttaacattaaaataaaactacaggaaaaatagaatattttcatgatcttatattgaagaagacctccctaacaaaccctagaaggtaaacaaacccaaaaactggatggatttgatgacttaaatatttaaaacttctgtagaatcagaagtattccaataccaccagtgttctaattctggttcaattagtaactgggagagcccactctggttacttactttttgagtccttttttttttttttgaaacagtctcactttatcacccaggctggagtgcagtggcttcatctcagctcactgcaacctcctcctcctgggttcaagcgattcttgtgcctcagcctcctgagtagctgggattacaagcgcacaccaccatgcctggctaattttttttttttttgagacggagtctccctctgtcacccaggctggaatgcagtggcatgatctcagctcactgaaacctctgcctcctcaagcgattctcctgcctcagcctcccaagtagctgggactacgggcacgcgccagcacgcccagctaatttttgtatttttagtggagacgggaattcaccatgttagccaggctggtctctaactccttacctcaagttatctgcctgcctcagcctcccaaagtgatgagattacaggcgtgagccaacttgcctggcccctttttgagacttgattttatcatttgtaaaatggagataatgatattaatagttcaaacctcaaaaggtaagaattcgatgagacaatccatgtaaagcatttagaatggtgtccagcatattgtaagtgctcaataaaggtcagctattaggattattactgttgcaactactgagaaaactgacatttacaaagttaaaagatcagtcacagattaagaaacaacatttatcacacaatagagacaaagggctaatgtttataatgtgcaaagagcttctacaaa

SEQ ID NO: 9423 - DNA, 1034 bp, Homo sapiens
gcagaaggcagacttgagataccagggaacatttttttagaacctgattattggcttactattagaccttctaatagttaagaattatctaactatggaattgaaaatagaatctgtaatactagctaaatttgtgtaacttttctgtatacagggactgtgctaggcactttataagtgttgtttcattttactttcaggctttttgatttttgttaagattgttttaattatacacatgcagttattgaggctgagagaggtgaagcaccttgcctaaggtcatacagctgctaagtgagagagctgggatttgaatccaggtcttctgtctccaaagctggtactttgaccactatgccgcctgtcactggaagcacagagaggaaaattttggcatgggaaggaaggtggaccaaaactactgcgggtcttcctagcttctgagattgctggtgtattttttttttttttcagatagggtctcactctgttgcccaggctggagtatggtggtacaatcatagctcactgcagcctcgaactcctggtctcaagtgatcctcccacctctgcctccccactttacactctttatgtaactctgtcttcctttccatctgatcacatagctcctgcctcagccttccgagtagctgggaccacaggtgcacgccaccatgcctggctaatatatatatatatatatatatttgtggagacagggtcttactatattgctcaggctggtcttgagcttctaggctcaagtgatcctaggccttggtcccccatagtattgggattaccggtgtgagccacaacacccggcctattccttggttttatattagcagttacagcagtaactgagctccgacagcttacataggcttattttaggctttgttggaaaattccagaggaggagacatggccctcagaagtttgtggtttaacaggagaggtaagaagacacattttcataaaaaaagtaatattggccaggcacggtggctcacgcctgtaatccc

SEQ ID NO: 9424 - DNA, 1032 bp, Homo sapiens
tctggcctccgctttagggtgtactcctagtagcttctggagtagtttttcaaaatgtgtatctggaaaaactatttcctggcttccattcctctctcttttttgagacagggtcttgctctgtcactgagcctggagtgtggtggcacaatcaaggctcactgcagccttgaccacctgggctcaagtgatcctcccgcctcagtctcccctgtagctgggactacaggtatacaccaccatacctggctaatttttaattttttttgtacagggtaagacagggtcgtcttatgttgctcacggtggtcttgaactcctgggctcaagcgatcctcctgctttggcctcccaaagtgctgagattgcaggtgtgagccactgtgcccagccctagttctgttatgataaagggcaagtctgcatggcctggctcccactggcctccccagcatcctatccaactgtgctgcttcttgcctcgtgttgccttctgctgaaggacttttgcatgcatctgttagaacacgctttcctttttttctttgtctagtgaatacctactcatcattcagttctcagtgtaggcatcatctaaatcaggcttatttccttcagagcacttccctcggttctaattatacatttctctgtgactgattggtttgtctccctcccttcccagacgagctcaagagtagcagcagctgaatctgtttttaatcacgattgcatctctagcgcctagaaataaatgcacgtggtaggtgcccaataaatattcctcgagtgagtagatgatctttagtagccatcctgctactacatacagacaaatagatatgacttctgttcccacgttccttttttctttaactcattggccttttggacctgtccttgcccacatcttttctagagcctgataaggtaaggaaagaaggtagaatacaacccacccatattttaatttttttctggcagaacatttatttgaatttggatgatccatgaattcagatttcccagagt

SEQ ID NO: 9425 - DNA, 1058 bp, Homo sapiens
tttttttaaatgtctctaggacatatttaccctgtagaaaaatgtaatctgcaaataaggacaattttttattcaattttctgtactgaagttggtttgttgttgttgttgttgttgttgttgtttttgagatagagtcttgctctgtcgcccaggctggagtacagtggtatgatcatgactcacggcaccctctacctcccgggttcaagcgatcctcccacctcagcttcccgagtagctgggactacaggtgtatgtcaccatgcctggctaatttttgtattttttttgtagagatggggttatgccatgttgctcagggtggtcttgaactcctaagctcaagcaatttgcctgccttgatctcctagagtgttggggttacaggcatgagccacagcgcccagcctagaaatattatcaattaaaaaattgtcaattaaaaaaaatcgtcaatccaagggcaaaaaataacaacggatcattttaaattgcatttcccaagttgtttgtagagttgaattggccatctgttgatcttttgtgatttacctgtttatatctcttgcctttttgtctagtagactgcttatcttttatttttgttaaggtggcagaactctttgattattctgggtattctgggtaatagtagtggtatcttaccactatttccactattttatcccagtcacatgtcttttaatttggtttatactttcttttgtcatactgaagtcaataaatttgtatttttcttaattgtggtaaaatatatataacatgaaatttaccattttaagcatttttgagtggacatttcagcagcattaagtacattcacaatgttgcatggctatcactaccatccatctccagaatgttttcatccccaaactgaaactctatagccattaaatattaattccccattttcccctctccttaatctctggcagtcaccattcagctttctggctcaatgaatttgcctattctaggtacttcatataagtggaattatgcaatatttgtccttttgtgtctgacttctt

SEQ ID NO: 9426 - DNA, 1031 bp, Homo sapiens
ttggattattacttcttttttttgtttgtttttttgagatggagtttcgctcttattgcccaggctggagtgcaatggcacaatcttggctcactgcaacctccgactcccaggttcaagcgattctcctgcctcagcctcctgagtagctgggattacaggcatgcaccaccaccccggctaattttgtatttttagtagagacagggtttctccatgttggtcaggctggccttgaactcccgacctcggcctcccaaagtgctgggattacaggtgtgagccactgctcccggcaggattattacttcttatgagtttagagtcttctgtaaaaccagagctctcacaatgcattattcttccttagactgtttattaaaatattaagatttatcctagcacttacgttcaacataccatagtttttatacttctccatctaaataaaaccaagtttgttcctacactagtccagcctgcattctcaagaactccagtgattatacatcaacatctagagattaggtatcccaatcctttcttcctatatctaagctaactccttcttagccaaatggtaccctttgattttgtgttaatcctttccttccctccactcttaacccctctcattccatcttctccctcccttttccaccccactctcttcctcctctttcacctcctctccctttttctttttttcccctcttttttttttcttcttttgtatctgagcagggactaacttctgaactctgcccatccccagccaggacatcacaggtgacatttactatttcaacttcgccaacgggcagtctatgtgggaccatccatgtgacgaacactatcggagcttggtgatccaagagcgggcaaagctgtcaacttctggggccattaagaagaagaaaaaaaaaaaggaaaagaaagacaagaaggacagagacccccccaaaagttcgctggtgagtcagtggatgcctcctcccagagaggccagggctgaaatctggagggatgtt

SEQ ID NO: 9427 - DNA, 1031 bp, Homo sapiens
gctggattttccaatgtcatgtgtttgaatggcaaaaggtggccacagggcttttcatggacccaggattatttgaagtggtagtcaggcatctgggcaggctgtggcttgacgaaaggcaggagacggaatgaagtgagggttctggggtggagagctgggtaaaggaccgagatgtagatgtgtgattggattcttagagccctctgttaaaaagagttccctccgtggtttcaggaaatgaagaaaatgggacagccctgggctgtcagtctggttcttagggctcaggacaggtgcctcaaatgtgagtttgtccaggggacagctctgagccaggcaggcagcctggatgcaagtggtttggactgtctggaggtgtgcactcacagtcaggtggggttcagtgtgaatgtttgtagaggagtggttgattttttagaagtttttctagctcagagggtctgtgaccatgtggcggtctctcaagcaataccaactggttcctttggtagacaatgctagactgagttttcaagtctcgggtcatttgttatgcttctcttcgcgccctgttaaaaaatttccgggtgtccttggtaaggttggtggacttttcttcttctccttcttcttcttcttcttcttttttttttttgagacagcatcttgctttgttgcccaggctggagtgcagtggcacgatcttggatcactgcaacctccgccccctgggttcaagcaattctcgtccctcagccttccgaggagcagggactacaggcgcccaccaccgtgcccggctaattttttgtatttttagtagacatggggtttcaccatgatggccaggctggtctcgaactcctgacctcaagtgatccgcccgccgcagcctcctaaagtgctgggattacaggtgtgagccaccacacacggctcaaggttggtgcattttataaaactaatcaatcacagaatctgagagctggatagtatcttagggataatctggttggcgagtttcagac

SEQ ID NO: 9428 - DNA, 1034 bp, Homo sapiens
tagacagaatcggtggagtcctcagagttcgtaatccagttgggaaaatgtaattcgcacctgtatgaatgtggactctgggctgtggaggatagacccatgctgtagggacatcagtgctgatttccaagtctctgcagccaaggcagtaggagtaggcaaagggagtcattgatgtgagctgcagtcgccaggtcagcttcatggacatggtggcacttgatctgggagacattgacatagagagtggggaggagcattctaaaggtcattccaaaggtcttccaagtgagtcctttgactgtccttctctattttgaagccttcacagggtctcaagacctctgcttatacaaagggtctcttgggctccatatatgaggacaagactgctctcagcctcttgggtttaggagaagaaaccaatgaggaggatgaggaggaaagtgacaaccaggtaatgatgaagtcctctccctggcctggaaaccctctgtgccatattttttccttttgaaaatgtttttgctgtgatagaaaaaatatgtaacataaaatttgcccttttaaccattttaaagttaaaattcagtggtattaattaccttcacaatgtgtgcacccaacaccactatccatttctttttttttctgcactcccccgccgccactattcatttctagaacttgttcatcatcccaaatagaaactgtgtacctattgaatgataacttcctattccctctccctccatccctggaaacctaatctgcttactgtgtctatgaatttacctattctaggtacttcatataagtggaattatacaatgtttgtccttttgtgtctggcttatttcacttagcataatgtttcaagcttcatctatgttgtagcatgtattagaactttggtcctttttaaggctgaataatattccatggtatggatatgccacattttgtttatctactcatctgtcgatgaatatatatgggttgtttccacctttggctgatctctgtgctacttt

SEQ ID NO: 9429 - DNA, 1050 bp, Homo sapiens
gacaaacatataaaccacagcactttaaaaatcaaaacagtgcgttgtaccttgcaggtgcctgagtaacattaaaagaataaaagtttggtaggaaagacagttgacagcttgcagtttaacttcacatttggagtatctttatataagtctgaatgagatcagcaatcacacagaatagtagatttcacatctaagtttaatcactgatctcagcaccattcaacaaatagtcttttaatgcctactctatgctggggctatactagacacttgaggcttgatttaggataactttatatatgccataattttctaaaattttctaaagtaaaaatatacagggccctttttttctccttcactctacattcaaatctgtgattcttgctaataacctgtgtcagaattaccttttacatcttaatgttctcagattaattttgcaatagtttagtatttttgtttggttttctttataggccctcttcgctcgcttattacttcaagatccaggcaaccacttaattaacatgacttcttctacaacgctaaatctctctgctgatcgagatgcaggagagaggcacattttttgttacctttactcctgcttccagagagccaaggaagaggtaaaggaataatccccattgaatactgtattgtcctcttgggtatgacttcagcatgtgggccagagttggatcagtctttatttcaatttatatatgtcatagtatgtctagaagtgaatatcagggacactaaagcttttatatcaatttatatatgtcatagtatgtttagaacactggatatcagatgcactaaagctttagtctcctttccgtatcttggggtccacccttctccccagttaaccaatgcctcctattctctctaaaacctctttagaaatcacatccttaaaaaaatctcatgaggctgggcacagtggctcactcctgtaatcccagcactttgggaggccgatgcaggcggatcacatgaggccaggagttcgagaccagcctggccaacatggca

SEQ ID NO: 9430 - DNA, 1082 bp, Homo sapiens
tcaaaaatcagaaaagggctcatgaattcatttccactgagatgtaaatattagagtaggctaagccggatatttccaggtttggaattttaaataggcagatagatgattccttaagccaaggaaggaatctctaattaattttcaagcatccacaggagaccagtatgtctcttctattgtattcactatgtctactttcgttccagattacagagttagactattccctcttttcttcatgctgtttgcagattaccaaagttccagagaacctgctaccctttgcagtgcagtgcagaaacctcactgtgtccaatacccgaacagttcttctcaccccagagatctatgttgaccaaaacatccatgagcaactggtagatttgatgttagaagccatccagggagcccgtgagtacatgaacaagatctgtaagcttctacattttgattttcagatttaaaatttcactaattgcattagaaagtctcagagccattatggttctggtataaattaaggaggagggctcacatcttgatctttgaggttgagtaccaatagaataaagctgggcatggtagcacacccctgtagtcccatctactctggaggctgaggcagaaggatcccttgagcccaggagtttgaggctgtagtgtgctataatcacacctgtgaatagccactacactccaggctgagcaaaaaaacaagacccccagctctaaaaaaaaaaaaaaaagaattattgaaagtaaagagctagtgtgtaaaggcatataaaaattcttgtgccctcctttctctctcatttgtcttctgttagattttgaagatgtaactgagtttctggaagaggtcattgaagccttgatattggatgaggaagttagaacatttccagaagtcatgattccagtgtttgatattttattgggccgaataaaagatctagagctctgtcagatccttttgtatgcatatctggatattcttctctatttcactaggcaaaaagatatggcaaaggtaggtctgaaagatgatatgtattcagttgagctagatgtgtaat

SEQ ID NO: 9431 - DNA, 1050 bp, Homo sapiens
taaaaacaagaccctaaaatagcccagagaagtcaggtaatgttaccatagtttaagtatcaaaatggctttgcacttccaacagtgtcatttgaagctgagacacatttctgagggaaagtaaacctaggaggaggaaggtggaattcaacacaagggagacgcaaaggagattcccaggatgacggtgaaaggagcttgtgtggccactacatagcaggcctgtagagcaagcagtccaggttggagcaaaggatggaaacatccagaaagaatgtttccaaaaattaatcagcagctggaaatgaccatgttgagagttttaaattccaatggagagtttggaaaggatttagtgataagaggctctgaaaataagcaaataagcaaaaagttatactaaaaaggaactatatactcattaggacagcacatggctctgctgtgaataatatttacataatcttaataacaaactaaattatttaagcaaaaatttgactatatattgagggcatctgtgataatgactaaaactgaaaaatcaagaactatcagtaccaaccaaacatagcattatgatactgtctgacttgttaaatttggcatgtataaattttttttaatttttggaattcatgccctataacatagcagttccttacagatttgttaagaagaagcgataggccaggcacggtggctcacgcctgtaatcccagcactttgggaggtcgaggcaagcagatcacaaggtcaggagttcgagaccagcctggccaacatagtgaaaccccgtctatactaaaattacagaaattagccaggtgtggtggcatgtgcctgtagtcccagctgcttgagagactgaggtaggagaatcacttgaacttaggaggcggaggttgcagtgagcagagatcacgccactgcgctccagcctaggcaacagaatgagactctatctcaaaaaaaaaaaaaagaagcgatgagtctacaagatgtatccacaatgaagttcattgataagtgtaggaaaaaactgaaaat

SEQ ID NO: 9432 - DNA, 1034 bp, Homo sapiens
gtgttacagagtaacttcacataaaagcagatacctttaagtttgtgtagacttctgaataagatgatagacgagaattttttttaaaaaaggaatttaaaggaatcttgtgcaacttctgttgatagctcttaattttgttatacagtctttttaatgaggattggtagggcaatcctaccaattgatgggggtgaggagactgttgggcccttattctcttatgaaaatctgtttctacaaggactaggcctaagtagatttaggcaacgggtatcatatccatgaaaaatgtcattttaagacactaatatcaacagtatatctcagtgtgtgagatatataaatacacatacaccccatgtgcttttttgttggtttagtgtaaactgagtaccactttatattttctcttccatagtgagatgtatgcagtatgtggccatgtttactaacatactcattcttcacaaaattctgagattataaaatgtatatagttaatatttgtttgagcttgtgacctgacttctaagagctacttctaacacagccttaggtcttcaattaacaaagtaggaagttgagcacaaccttgtccacagccattttaaatatccacttagccctgtgtagttggtaggtggacaccactttcataagtgaacttgagctcactactcaattgtgcagcttaatatgctgactagggacattcccctatggattatctttatatcactgtctttctaagcccagagatgtcataagtgacaagaaaagtgataggatcaagaaatgggtgtcactgcttcatttggaacatgttattaactatggtctctttcaaataaatagtagttttatatttcaacacaagttgctataagcagtccttgatgggtttttgattgcatcagctggaaagcctcaaatctaagagggcttcccatcctagatataaaataggtgttgcctattgctgtgcttataaaatgaaaaaggaaattgaggacacttttgcaaatgccaga

SEQ ID NO: 9433 - DNA, 1016 bp, Homo sapiens
taggagagctaagaaaaggaagggcagaaacgtgaaagtaaatcaattcggcctcattacatgtggtgttgttctcagtggagtatttggaagtcaacagaaatgtttaaggatgggtgagcttttttgaacgttgactttgctttctgtcctagacggattctaagatacttccgctttaatccgagggaaattttaggtggaaatggacttcatggatgagtatccatgccccgagaagcataggacgggatccgtataaacaataatctttgttacgaagcttagcattcgtggaattttttcagcttgaagagcctcactggtagaccgctgtatttcacaacaaccctgaataatcacagcctctgagtactagtttatttggccagtaaatatttcagttgtcttctcagtggcaagctattcattttattcctgaagtgagataagctaaattgacgtaagtttttcctagatgtgctgtattccagtaagtgactgaaggtcggatctcttaacttttgcctacgtttatgaaatgtgaatagaaagcagaacttcaaaaaaaatgtaatactttctagcctattttgctgtgtttgagtttggtttgggtattttctttttctttctttcttttttttttttttttttcctagaagacagggactcactctgtcgcccaggctggagtgcagtgcagatcacagctcactgcagcctccacctcctaggctcaagcgatcctcccacctcagcctcctgagtagctgggatcacaggcacgcaccaccacacccagctaatttttgtatgttttaagagacgggatttcaccatgttgcccaggctagtctcttaactcctgggctcaagggatcctcccgcctcggtctcctaaagtgccagagttacaggtgtgagccacagcgccagccgggtaatttatccattctctcctcccttccctccatcaccagccaaactatgagttattgaaggctgtcctgcag

SEQ ID NO: 9434 - DNA, 1028 bp, Homo sapiens
atagccatcctatctaaatgcgccagctatatccaggatgtggattgttttagggctcataaagtgtctcataaacttataatgaaagggttaagtcagttcaggtctttaaagaatgctttgaaagaatttatataagctttgactacttaccttacaaaattgaaagttcaagggttctcagcagttgaagagaagtaatgttagtaattctcaactttgactaaaactgccttctagtttgaatagcatcttttatgttctttgtctccttaattctggaaaagaatagtttcaaatatatatatatatatataattatatatatatataaaaggtaccttaaaatgtatgcttcttttttcaggaagctgtgctgaatggtttggtggccactgaggtgttgatgtggttttatgtcggagagattataggcaagcggggcatcattggctatgatgtttgaagaccaatctttaacatctgattatatttgatttattatttgagtgttgttggaccatgtgtgatcagactgctatctgaataaaataagatttgtcaaaactcagtgttttctccatcagatactccatgaaaggtcacaatttctcttgatattaagctgggttgtctttaaacaaccctaaatacacgtctgtttagcccgcaattggaaaggatatatgtggcaatattaacctggtacatgaatatatggggataacattttaatttgaaggtttggaatatatatatttaagctttatttccagaacagtgagggttaggtcttgggaaaactataacttgccaaagtagaagaaatagtagtaccatatgccaaagtgatagagatgaatcatgtcagtagttagaataacatttcaactgttttctttgctaaaatcacagaaagaccctattgacaacatctatgtctgtaaaaatgttagagtacttgtcatcttgaatatagcctccccaagagagaacagggtggtattctaagtatgtttctttgtaac

SEQ ID NO: 9435 - DNA, 1083 bp, Homo sapiens
atagagtgagactgtgtctcaaaagaaagaaaagaaaagaaaagaaaagatttgctaacatactcagtacaccatcagaaaccatcaatacacctcagaaactgaggcacagacaagttaaacagttttccttaagttatatggctagtaagtggcagggctagaatttaaatctgaacctacatctgtttgaaagttgattcttgctctctacactgtgctgtctttaagtcctttctcttcccactcacatccaatcaatttctgagtcttgtccattatattattgtagtgtttctttcatttgtccctgctgttctgttcctgctgtcctagtttaaatttccattacttttggatagtttattgtggtaatcttctcattggtcttcccacctatcttttcaccctacacagtgcttcacaatatgatagttttcttaaatacagatcagagtatgtcactttattcctaaaattctttggcttctcactgaatatgaaataaaatttcagattctcagcgctgcatgatcttgctagcctgtatttctaaattttgaaccgtgtctcctgaatgtacatcgttactgcttcaaccacattggactactgaactattaggtgttctccacagtctttgtttatctgcctttgtacctttgctaaagcctctcctttgccttaaagtctttcccattttgacctgtcttgggcttattattcgtctcccatggttcaactcagatccccagatcctaactcttccatgaagttttcacagattgtactgctagttgaaactgaacttctttcctgttttctttttgtgttttgtatgttatccttaaaaaatttaaccccgtataccttatgtcgtggtacttttgaaatgtgtctgtctttgtcccattagatagtgactcccttaagacacgggccatttctaagtcatcatttatgttttatgttttttataatggtgactttttatatagtatttgttgaattgaaaatttgatgtccatacaacttttaggaatactttgctgggacacattacataaactaggagaacttaag

SEQ ID NO: 9436 - DNA, 1050 bp, Homo sapiens
ccactgcacccggcctgactacttattttttatttccttattccaagtacaagaccagaaggaaaacgaattaatgcttcctgtcattttggaaagtacttagaaactttaaatattggcagttaaactgcctgacagctcagtggaactcttgttttggaatacattgcagttaggattatatagttacattttgtaaaagtttgaaatatataaaaatgactcattaggttgttaataatgaacctaacagtgtgtatctcttacatttatctttattttttttttttaaataaagatggggtcttgctatgttgcccaggctggtcttgcactcctggggtcaagcaatcctcctaccttgtcctcccaaagtgctgggattacaggcatgagccactgcacccagcccatttcttttaaagattaataactttttattacctgttgaatactttacctattgattattatatgtatagttgcttgagctgtcaatcattgtagcatttggaacataaaatgcgtgtatttagcaatgtagtcccctagtaagtgttgggaaatccccagatgtctttgtgaaatgcatagattagcaggttgttccacgagtataattcaggaaaagaatgaattaatcagaaatttgaaggatctgaaaatggccatcatgtgacttttacagtagctaaaagaatagcaatttttgtactttagacaacttattcaattcctttaaatatttattgttttatattgtatctattatggtaggaaaactattctacagccagtttagacacttaggttctttgtagctaactgtgtgatcttgggcaagtcatttggccttttagagcttcattttcttcaaacacaacaataagaactactatgtgaggggacttcaaagaaaactcatggaaaaatacatattatgaaaaaactgcagaatttcaaaattttgtatgcaccaaaataaacttgcactaacttgtcataacatatctgaacaggatgtagtttgaggcactaagaaggataaga

SEQ ID NO: 9437 - DNA, 1047 bp, Homo sapiens
aggaaaaaattcatcttgttcatgccgtaattgaagaggaatgatgattaacagcacaaataatagccaacaccatagacatctcaattggttcagcttacacaattctgactgaaaaactaaagttggctgggcgtggtggctcacgcctgttatcccagcactttcagaggccaaggtgggtggatcacctgaggtgaggagttcgagaccagcctggccaacatgacgaaaccccatctccactaaaaatacaaaaataaccaggtgtagtagtgcatgcctgtagtcccagctacttgggaggttgagacaggagaatcacttgaacccaagaggcagaggttgcagtgagtgagccaagattgtgccattgcactccagcatgggtggcaagagggaaactctgtctcaaaaaaaaaaaaaaaaaacctaaagttgagcaactttctaccaaatgggtgccaaaaccattgcacccaaatcagctgcagacaagtgtagagcattcaatggaaattttaaacaagtggcagcaagatcctgaagcatgtctttgaagaattgtaacaggagatgaaacatggctttaccaatacgatcctgaaaacaaagcacaatcaaagtaatggctaccaggaggtagaagtggtccagtcaaagcaaaagcagactgtttaagagcaaaggtcatggcaacagttttttggggatgctcaaggcattttgcttgttgactttctggaggaccaaagaatgatagcatcagcttatttgaaagtgttttgagaaagttaaccaaagctttagtagaaaaatgcccaggaaagcttcaccagagtcctgctccatcatggcaatgtccctgctcattcctctcatcaaacaagggcaactttgtgagaattttcatgagaagtcattcagtatcattaagtatgctgatttgtctcctttgccttttttgtttcccaatcttaaaaatctatgaaggaggcggagcatctaggctgaggcaggagaatcgcttgaacccaggagacggag

SEQ ID NO: 9438 - DNA, 1235 bp, Homo sapiens
aaggcctccatcaacagaaaggataaagaccccttcgggtctcctcattaattctgaactggaaaagccccagaaagtccggaaagacaaggaaggaacacctccacttacaaaagaagataagacagttgtcagacaaagccctcgaaggattaagccagttaggattattccttcttcaaaaaggacagatgcaaccattgctaagcaactcttacagagggcaaaaaagggggctcaaaagaaaattgaaaaagaagcagctcagctgcagggaagaaaggtgaagacacaggtcaaaaatattcgacagttcatcatgcctgttgtcagtgctatctcctcgcggatcattaagacccctcggcggtttatagaggatgaggattatgaccctccaattaaaattgcccgattagagtctacaccgaatagtagattcagtgccccgtcctgtggatcttctgaaaaatcaagtgcagcttctcagcactcctctcaaatgtcttcagactcctctcgatctagtagccccagtgttgatacctccacagactctcaggcttctgaggagattcaggtacttcctgaggagcggagcgatacccctgaagttcatcctccactgcccatttcccagtccccagaaaatgagagtaatgataggagaagcagaaggtattcagtgtcggagagaagttttggatctagaacgacgaaaaaattatcaactctacaaagtgccccccagcagcagacctcctcgtctccacctccacctctgctgactccaccgccaccactgcagccagcctccagtatctctgaccacacaccttggcttatgcctccaacaatccccttagcatcaccatttttgcctgcttccactgctcctatgcaagggaagcgaaaatctattttgcgagaaccgacatttaggtggacttctttaaagcattctaggtcagagccacaatacttttcctcagcaaagtatgccaaagaaggtcttattcgcaaaccaatatttgataatttccgaccccctccactaactcccgaggacgttggctttgcatctggtttttctgcatctggtaccgctgcttcagcccgattgttttcgccactccattctggaacaaggtttgatatgcacaaaaggagccctcttctgagagctccaagatttactccaagtgaggctcactctagaatatttgagtctgtaa

SEQ ID NO: 9439 - DNA, 1033 bp, Homo sapiens
tgggtttcaccattttggccaggatggtcttgatctcttgacctggtgatccgcctgcctcaccctcccaaaagtgctgggattacaggcatgagccaccatgcccggcctcttttgagtttttgatagggttatcatttgtttcagcaagtttaaccaagagtcatatgttgagatattttttaaaatattgagttctgtgtacttcagcaattttcaaacgctgtgacttgttcttatattctgtgaatggctcctacatggggcaacaggtgatatcaagaatttattttatacagttctaggtatactgtaggagttcaataaatgcttgttgaatcaattattttcagcagtgggatgttaccaaacgcagtgcttccaccttcacttgaccataattatgctcagtggcaggagcgagaggaaaacagccacactgagcagcctcctttaatgaagaaaatcattccagctcccaaacccaaaggtcctggagaaccagactcaccaactcctctgcatcctcctacaccaccaattttgagtaagccaccaaaaggagagtcgtcacccatttccctctagatgcagatgattgacttcgtgaatccaattcactaaaattagatatacttggatatcagaaaggaattttcaggtcatccttaaatgtaataccatcattaattttgcttcacttgaggtgttaatgaggacttgatataaatactctggagtattgtaacatagatgatgaggtagcgtaactctgaacactttttgaaaagtggttattttataggctgtgggctatgtaagctgaattatttcttttttccttgaaatcagacatagtattgccaattttaactggatctcaaggtattgatgggagtcttttggatttcaaggtactgataggagtcgagaagacagtccagagctgaacccacccccaggcatagaagacaatagacagtgtgcgttatgtttgacttatggtgatgacagtgctaatgtaagtactttg

SEQ ID NO: 9440 - DNA, 1054 bp, Homo sapiens
tccagtggcccaaccaagccccaataatacctcatgccaggattctcaaagtaacaactatcagaatcttccagtacaggacagaaacctaatgcttccagatggccccaaacctcaggaggatggctcttttaaaaggaggtatccccgtcgcagtgcccgtgcacgttctaacatgttttttgggcttaccccactctatggagtaagatcctatggtgaagaagacattccattctacagcagctcaactgggaagaagcgaggcaagagatcagctgaaggacaggtggatggggccgatgacttaagcacttcagatgaagacgacttatactattacaacttcactagaacagtgatttcttcaggtggagaggaacgactggcatcccataatttatttcgggaggaggaacagtgtgatcttccaaaaatctcacagttggatggtgttgatgatgggacagagagtgatactagtgtcacagccacaacaaggaaaagcagccagattccaaaaagaaatggtaaagaaaatggaacagagaacttaaagattgatagacctgaagatgctggggagaaagaacatgtcactaagagttctgttggccacaaaaatgagccaaagatggataactgccattctgtaagcagagttaaaacacagggacaagattccttggaagctcagctcagctcattggagtcaagccgcagagtccacacaagtaccccctccgacaaaaatttactggacacctataatactgagctcctgaaatcagattcagacaataacaacagtgatgactgtgggaatatcctgccttcagacattatggactttgtactaaagaatactccatccatgcaggctttgggtgagagcccagagtcatcttcatcagaactcctgaatcttggtgaaggattgggtcttgacagtaatcgtgaaaaagacatgggtctttttgaagtattttctcagcagctgcctacaacagaacctgtggatagtagtgtctcttcctctatctcagcagaggaa

SEQ ID NO: 9441 - DNA, 1033 bp, Homo sapiens
ggcccagtaaaaatacagaatccactctgaggattagtacagaaagttgctcttagaaggtttgtctgagtggctcctagtatcagaagcaaatagctatacaagttttaggtttctctctcctgcagagacattagaaacctctagactagtggcctgtaatctaggaaatcctcgtggaagcatcttgaaagatagtactgggagaaatctggaaattttactagaagaaactttctcagccgctataggtaacatcaagagaagattgggacatgttcttaaagctgagtttataagaaatgacaagttcttctcccttcttctgcatgtgcagggcattggttgctatatgttccgaattgatgactcagaggtagtggatgccaccatgcatggaaatgctgcacgcttcatcaatcactcgtgtgagcctaactgctattctcgggtcatcaatattgatgggcagaagcacattgtcatctttgccatgcgtaagatctaccgaggagaggaactcacttacgactataagttccccattgaggatgccagcaacaagctgccctgcaactgtggcgccaagaaatgccggaagttcctaaactaaagctgctcttctcccccagtgttggagtgcaaggaggcggggccatccaaagcaacgctgaaggccttttccagcagctgggagctcccggattgcgtggcacagctgaggggcctctgtgatggctgagctctcttatgtcctatactcacatcagacatgtgatcatagtcccagagacagagttgaggtctcgaagaaaagatccatgatcggctttctcctggggcccctccaattgtttactgttagaaagtgggaatggggtccctagcagacttgcctggaaggagcctattatagagggttggttatgttgggagattgggcctgaatttctccacagaaataagttgccatcctcaggttggccctttcccaagcactgtaagtgagtgggtcaggcaaagccccaaatgg

SEQ ID NO: 9442 - DNA, 1029 bp, Homo sapiens
ttttttattttcataggatgaagttagagaaaatattcagctgtacacacaaagtctggtttttcctgcccaacttccccctggaaggtgtactttttgttgtttaatgtgtagcttgtttgtgccctgttgacataaatgtttcctgggtttgctctttgacaataaatggagaaggaaggtcacccaactccattgggccactcccctccttcccctattgaagctcctcaaaaggctacagtaatatcttgatacaacagattctcttctttcccgcctctctcctttccggcgcaacttccagagtggtgggagacggcaatctttacatttccctcatctttcttacttcagagttagcaaacaacaagttgaatggcaacttgacatttttgcatcaccatctgcctcataggccactctttcctttccctctgcccaccaagtcctcatatctgcagagaacccattgatcaccttgtgccctcttttggggcagcctgttgaaactgaagcacagtctgaccactcacgataaagcagatttttctctgcctctgccacaaggtttcagagtagtgtagtccaagtagagggtggggcacccttttctcgccgcaagaagcccattcctatggaagtctagcaaagcaatacgactcagcccagcactctctgccccaggactcatggctctgctgtgccttccatcctgggctcccttctctcctgtgaccttaagaactttgtctggtggctttgctggaacattgtcactgttttcactgtcatgcagggagcccagcactgtggccaggatggcagagacttccttgtcatcatggagaagtgccagcaggggactgggaaaagcactctacccagacctcacctcccttcctccttttgcccatgaacaagatgcagtggccctaggggttccactagtgtctgctttcctttattattgcactgtgtgaggtttttttgtaaatccttgtattcctattttttttaaagaaaaaa

SEQ ID NO: 9443 - DNA, 2052 bp, Homo sapiens
ggcagggagataggttctttgcccagggacccccagcacccaccaggcaggtggtccgcaggacatttagcagacacttaagcactttgcaaatatgaactcatttgatcctctgagtaaccccatgaggtcattactattgtcgtcaccattttacaaataagaaaactgaggcagaaagaggtaagcaatctgcccagggtgatgatcccgctggtaagaagcagagccaggattcacatctgggcatttggctctagtatttacactcataatcactccgaaatgctgcctctctggcagacccagccatcctgttcctcagcatcccctctgaggagaggcccaggcccctggctcccatctgggtttgggaagaaagggctagaagtatgaggggctgtggtgagagcatattggcctctgctttgtaccagtcaagccagagattgcccaagtcggcgccaagtaccaggaagctcagggcccaggcctcctggttgtcctgtttgccctggtgcgtgccaacccgccggccaatgtcacctggatcgaccaggatgggccagtgactgtcaacacctctgacttcctggtgctggatgcgcagaactacccctggctcaccaaccacacggtgcagctgcagctccgcagcctggcacacaacctctcggtggtggccaccaatgacgtgggtgtcaccagtgcgtcgcttccagccccaggtgagcatggccagcaagcggccctgcaaagcttcaggtgggctcaggggtcccgtccccatacagaaatgggaatacttgttgccctgtggttgggtcttgtggatgaactgtccccagccaccctgggcaaggagggcagagtagtacctatggcatgttggggctggggcactacccacttgggacctgacacagaggacatcctccagggcttctggctacccgggtggaagtgccactgctgggcattgttgtggctgctgggcttgcactgggcaccctcgtggggttcagcaccttggtggcctgcctggtctgcagaaaagagaagaaaaccaaaggtaggccagggacactgggggcagtgtggatgaggtcaggctgagcagcagccaagacagcaagtgcagctgggcagaaccagtcatctctgacggtggcagagcacttccagggggtggccatgggtacggtgacatgcatcccaggtagcagggtcaagcactgggaacccagtctctggccccagggccaggcctgggcatttgagagaccccttgcctgagggtcctgggtctgaaagggtaggacagcccagcgtgggagggcacactgagaattagggacatggtttctttctccacaggcccctcccggcacccatctctgatatcaaggtaactcttccttgggctgggtggacaagcctaaccgaaatgcaggatggggacaggagggagcctggggtttctggtagaggcagccatgagtgcctgtgccgggactcatatccatcccgaactttgtcctccctgtagtgactccaacaacctaaaactcaacaacgtgcgcctgccacgggagaacatgtccctcccgtccaaccttcagctcaatgacctcactccagattccagaggtatatctagggccctgctctttgcccctgcttaatctccagaagtgcttctgagaaaaagaacttggtgcttgggaggggcgaggcctcatcaggcacactcctcgtcctgaacactgccctctttgtcaaccagcagtgaaaccagcagaccggcagatggctcagaacaacagccggccagagcttctggacccggagcccggcggcctcctcaccagccaaggtactggggaaggggcctgccaccctcctcctctgccccccagccctgtgcttatgccagaggcctccaagtgcccaggaggcagagagagctctccaaattccaaggaacaagcgttactgagtccccgcgggcttctttgatcccgcaggtttcatccgcctcccagtgctggg

SEQ ID NO: 9444 - DNA, 1050 bp, Homo sapiens
caacatacgtttgttgaaacagagagtgtaagatatgtctaccagcctatggagaaactgtatatggtactgatcactaccaaaaacagcaacattttagaagatttggagaccctaaggctcttctcaagagtggtaagagtactgctataatactgggttccactttttgttttacattttatgtgaaactagtttttcctccaaagcagctgatgctaaccagtttgcaggttcctactccgcaccccagcgacttattgctgcagcaccttgtttattcagcagacatttattgggtgtcctcttagactatagatgtctcaaaagaatatgggaactactgtttcatttcccagttcttaagcagttgttctaatctgccgttctagttctgacacttgtttggctatgctttttaggtaatgttttttaggtaagacttactgatccagagacagacacacacacacacacccctcttctaagactttatgccaaagtcttgcttaaaatgaagacttaggtaagacttactgatccagagacagacagacagacagacacacacacacacacacacacacacacaccttttaagactttatgccaaagtcttgcttaaaatgaaggctaaggccaggtgcggtagcatgtgcctgtagtccaagctactcaggaggctgaggcagaaggattgcttgaggccaggagttcaagtgcacaggcattatactttagtgtgggcaacacagcaagaccctgattcttttttttttaaagacggagtctcgctcttgccctggctggagtgcagtggtgcaatggtgcaatctcggctcactgcaacctccacctcccaggttcaagcaattttctggcctcagcctcccgagtagttgagattacagatgtgcatcgccatgcctggctaatttttgtacggggtttcaccatgttggccaggctggtctcgaactcctgacctcaggtgatctgcctatcttggcgtcccgaagtgctgggattacaggcatgagccgctgcacc

SEQ ID NO: 9445 - DNA, 1076 bp, Homo sapiens
ttatttatttttttgagatggggtttcactctgtcacccaggctggagtacagtggtgcaatctcagcttgttgcaacctctgcctcccaggttcaagtgattctcccacctcagcctcccaagtagctgggactacaggcatgcaccaccacgctgggctaatttctgtattttggtagagatggggttttgccttgttgcccaggctggtctcgaactcctggactcaagcaatctgcctgcctcggcctcacaaagtactgggattacaggcgtcagccaccatgcccagccatcttttgcagtttaaatatttgaagccagtatggaatattttgattcatctcttatctcagggctgtggtactggttggtgacatttttaagtggtagttatcaagttcacatattcgtgactcagatttctcgtcttgaagccagaccttctactgttgctgatggttttgaggtcaagtgaaagataataccaggaggatacctttatcaggtgtgcataaaagaggagtatttactctttttctttcttctttcctttctttcttcctttctttctttcttgacagagtcttgctctgtctcccagactggagtgcaatggcacgatcttgcaacctccacctcccggggtcaagcaattctcctgcctcagcctcccaagtggctgggattacaggtgcacgccatcacacccggctaattttcttatttttagtagagacagagttttgccgtgttggccaggtgggtctcgaactcctgacctcaagtgatctgcctgcctctgcctcccaaaagtgcttggattataggcgtgagccaccgtgcccagccaagtatttactctttatatgccctgttctgtatgaaatgaacagggttacattgggataaatttcttgattcactaaagccgctgtgctcttcctagtggttgctttgagtgagacagaggcttcacacttttaaaaagatattcctgagtgcagtggcccacacctgtaatcttagcactttgggaggctgaggtgggcggattgcctgagctcaggagttc

SEQ ID NO: 9446 - DNA, 1033 bp, Homo sapiens
caaaaagctaaaaaaactatcagtgtaaatttgtgaagttaataatggtactgtgattgattatgtaagagaatatccctaatcttataaaataagcactgaagtatttaggggtaaagtgccgtgttgtatataatctgcttcttaatggttcagggaaaaaaaatcaaatgtataacatacatatataatgtttagagagagagaaacacaagtgcaaattataaaacaaatgaggtaaatattaacaataggtgaatctggaaaagggtatatatgtcttccttgtataattttaatttttttaagcttgaaaatacttacaaatagaaagttttttcagttgtttgttttctcaccattgcctactattcattcgggtggatatgcctttattttttattttttatttttttgagacagagtctcactctgttgcccaggctggagtgcagtggcaccatctcggctcactgcaagctccgcctcctgagttcacgtcattctcccacctcagcctcctgagtaggcgcccgtcaccacacccggctaattttgtttttgtatttttagtagaggtggggtttcaccatgttagccaggatggtctcgatcttctgacctcgtgatctacccgccttggcctcccaaagtgctgggattacaggcgtgagccaccacgcccgtgaatatgcctttatttgagcagccccctattggcagacatgtttctaaacttttgccattacaaacaattcttcagtgaataacttagcagattgttttgcacaggtgagaatttatctgtaggatagagtctgttgaagaattgctgtatcaaagggtatcgccttttaaatgttgatagctatagcagtagcacctttaaaaaaacgttgttgatggctaatcattagaccttggagaaagggagttctgatttctacctttcttttttcttttcttttcttttttattttttgagacagagtttcactcttgttgcccaggctggagtgcagtgggacaatct

SEQ ID NO: 9447 - DNA, 1049 bp, Homo sapiens
aagagggaggggagctgcaaagggttcgggagccccgaatgcctggtaaggagtttgtgctttatcctgtgtgtaatgaggagccactgaaagattttgaggagaggcatgatctgaccttacttgtggatttttaaaaaattattcaagtaatattcctttttagaaagtaatttttctttttagaaagattagaaaattcagataagcaaacaaacctcaaagtcatcttaggaagatatttgtgacagtgtggagtggatcaggaagttgagagagtggaagcaaaggctggtgagaaggtccagaccagggaagcagagggcctggatttgggtggtggcaagtggggttgggacagggagaatgaggcagatggagtgtctctaggctttgggacccattggttgtagggtaagggaagggagatttgaggatctgagtggtgtgcctaatggcacaggggtcattggtcaagggagggagggaggcccgagggaaggagcccacatggcagcctgttttcttagggtgagttgaggccaagcagaagagctggttgatccccttcacctgagccttgagtgtctgggcaggagagccagctagttctcaccttgggctcagccctgtctccccagggcctgatcaaccaccccatctcctttaggagcgcctggccatcctggacagtcaggctgggcagatccgggctcaggccgtgcaggaatcagaacgcctggcccgggacaagaatgcctccttacagctgctgcaaaaggtagggtccctgaggttgggccgggagatttggagtagggtaagtgggaggggagtgcagaaggactggggtgtaaatgtgctggggtggagcacagggcccccctcacacagtctcctggctcccactcctctttgactctgccattctgggctcgcaggagaaggagaagctgactgtgctggaaaggagataccactcactcacagggggcaggcctttcccgaagaccacatcgaccctcaaagaggtatcatgattggattag

SEQ ID NO: 9448 - DNA, 1440 bp, Homo sapiens
acaggcatgcgccaccatgccttgataattttttttttaatggtgaaaagatatacatatatttagaattagccaactggactcagttgagatgatccctattttgttggcaacatccaaagcattgtaatcaggagccagtcgaacatgttccttctctccatcaggccgaatcagggtgttgaccttggccacatcagtgtcatagagcttctctggtgctgtggcttaacattcacagtgaacacaagtgcgtgtgtcttctgtcttcttcatggagactcagtggtcagaggaaacttgatgatgcatagtggtcaagcttgtttctcctgggggtgctcttaagatatttgcactgcctccggagtcgcaatgtcttgggccgccagaaggctagtgatacgcggatcttcttttttttgtggctgtggacacctttcaacactgccttcttggccttcagagccttgctttggctttaggaggggcaggagcttccttcttagcttttggtgccatcttgtgaaaaggggctgatttttgtatttttcgtagagatagggtgtcaccatgttggccaaactggtctcgaactcctgacctcaaatgatctacccaccttggcttcccaaagtgctgggattacaggcgtgagccactgcacccggccaataattagaaatatttctctctcttttttttttttttttttgggagacagagtcttgttctgttgcccaggctggagtggcatgatcttggctcactgcaacctccacctcctgagttcaagcgattctcctgcctcagccttccgagtagctggaactacaggtgcatgccaccacacctggctaatttttgtaattgtagtagagatggggttttaccatattggtcaggctggtctcgaactcccgacctcaggtgatccgcctgccttggcctcccaaagtgctgggattataggcgtgagccaccgagcccggcccaaattagaaatatttctaatcagatatttccatggttatagatatttggttgcttggttcatatgcatagaaacagttgtcataactgtaaaaagcagtacttagcaagtatttctaagtgattggaatagctttcctttaatgttacaatactgcctattgatttggaaattagatcacgctctatgatgtttcgattttactcaaaggcatcatgagtactctgctcattctttcattctttatagttttctagttgagttaggaactattttatcagaaatcattttagcattataataagggtagatgacataccataatgattttcagattttttttttttgagacagagtcttgctctgttgcccaggctggagtgcagtggcacgatctcagcttactgcaacctccgcctcctgggttcaagtgattcttctgcctc

SEQ ID NO: 9449 - DNA, 1116 bp, Homo sapiens
accttgtcctcccaaagtgctgcaattacaggtgtgagccactggtcccagcctgattttcagatttttaataaaaagggtatctggattagctgggcatatagtcctacctactctggaggctagcctatagtcctacttactctggaggctaaggcagggggatcacctgagcctgagggatcacttgagcccaggaggttgaacctgcagtgagctgtgatcccaccactacactccagctgggcagcatagcaagaatgtctctttaaaaaaaaaaaggcaattcagttgcagtggctcatgactgtaattccagcacttttggaggctgagacagaggatcatttgagcccaggagtttaagaccagcctgaacaacatagtgaaaccccatctctaaaaaaaaaaaattatattagccaagcatggtgacatttgcctgtagtgctagctactggggaggctgaggcaggaggattgcttaagctcacaaggttgaggcaggagtgagctgtgatcacaccactgcactctagcctgggcaacagagcaaaataccctgtctcaaaaacagcaagaaaaaaaaagccaatacctggaaactttgaacagggtgaaaagaagaaaacacggaggagtctgctaaagcacaaaacttctctctggtcctcaaataaataaaaatttttggccgggcacgatggctcatgcctgtaatcccagcactttgggaggccaaggccagcagatcacgaggtcaggagatcgagaccatcctggctaacacggtgaaaccccgtctctactaaatatacaaaaaattacccagacgaggtggtgggtgtgtgtagtcccagctacttgggaggctgaggcaggagaatggcgtgaacccaggaggtggagcttgcagtgagccgagatcatgccactgcactccagcctggcgacatagagtgagaccccgtctcaaaaaaaaaaaaaattttttttttttacaattccacattgtcattttcttttcctctggtctcaaactcctggtctcaggcaatcctcccacctcagcctcccaaagtgctgggactacagacaagccactgtgcccagcca

SEQ ID NO: 9450 - DNA, 1052 bp, Homo sapiens
tagaaatttctggacttcaaccacactgtaattttttttttttaatcagtttcttctatttccttgaactcagtttccaggaacttctggtttggaaattagagacctgccttccaggttagtctacagaaagtctagttgtgttccactgtgtcttcattgtcctgcacactcatgtgatacactcaggtgttgtggattatgagacccagagagaaacttcctggtgataatcgcacaaagtataggaaagaaacctggcagtctgtacagtccattattattatgtgcttagtccatttggttaaataatttgagatgcttttttttttttttttttgagatggggtcttgctctgtcacccagactggagtgcagcggtacaatcatggctcactgcagcctcaaactcctgagggctcaagcaatcctcctgccttggccttcagagtaggcaggattttttttttttttttttttttttttttttgagatggaatcttgctctgtcgccaggctggagtacagtggcgtgatctcagttgactgcaacctctgcctcccaggttcaagcgattctcttgagtagctgggactacaggcacaggccaccacacccaacctttttttttttttttgagatggagtcttgttctgtcacccaagctggagtgcagtggtacgatctcggctcactgcaagctccgcctcctgggttcacgccattctcctgcctcagcctccctgagtagctgggactacaggcgcccgccaccatgcctggctaattttttgtatttttagtagagacggggtttcaccttgttagccaggatggtcttgatctcctgacctcgtgatccgcctgcctcggcctcccaaagtctgggattacaggcgtaagccaccatgcccggcctaatttttgtatttttagtagagatggggtttcaccgtgttggccaggatggtctcgatctcttgacctcgtgatccacccgcctcggcctcccaaagtactgggattacaggcgtgagccactgcgcctgg

SEQ ID NO: 9451 - DNA, 1025 bp, Homo sapiens
tattttgagatggagtcttgctctgttgtccaagctggagtgccatgatacaatgacagctcactacagcctcaacctcccaggctcaagcaatcctcccaccccagccttccaagtatctagggctataagtgtgcaccatcacacctggctatttctgtattttttgtagagacagggtcactatgttgcctgagctggtctcaaactcctgggctcaagcagtccttccactttggcatcccaaagtgttgagattacaggcatgagccactgtgcccagcctaatttttacttttgaaccttgtaaattgtcaaacatacacacacaaggcaattccaaggtttggttgatttgactggtaaagataggaggaggcacttttagatttagatggtttcttacatagacagtgaaaagaaaaggaagaccaaagagccagcttctcaggtccttgtttcatacaccaaaaaggacaacactgaaacaaaaaggactggatgaccccagtgtgagttgtgggatattctgttgctggggaatcaaatctagactgtagtagctaagtggcttttttgttgtttttaaattttacttattgaaggggtggcctgcccctccacacctgtgggtatttctagtcgggtgggatgagagacggagaaaagaaataagacacagagacaaagtataaagaaacaacggtgggtccaggggactggtgctcagcacaccaaggacctgcaccggcaccggcctctgagttccctcagtttttattgattattatttttcattatttcagcaaaaaggaatgtagtaggacagcagggtgataataaggagaaggtcaacaaattacatgtgagcaaaagaatgtatatcacgattaagttcaagggaaagtactatgcctggacgtgcacgtaggccagacttatgtttctctccacccaaacatctcagtggagtaaagactacaaggcagtatcactgtaaacatgtctcgcctcccgccacaggg

SEQ ID NO: 9452 - DNA, 1047 bp, Homo sapiens
gggtattccccagaagcatttgcctcctgctgagcctggtccctgagcggagtcccagggtgctcagctcttcagctgacccttcttcccttatttattctcttttctatttatatgtgtggcttaggaccctccgtgaacagatgatagagggcatctctcccaggtgacccttcttttctgtcccaggagggtgggtaattccctttgggatggggctcccacacctccctcaggtccccactcagaccagcaccagtgtctgcctctgagaatgttggcagctcacagagagcagggccggcccgggatggggggcaggtactccccaccttcctgcctcccctcctgctcctcatccctccctccccctttattaccgttttttgtacttgatgccttctctgtgagcagtggctctgtgggaaggagggagccgggagcctggtgggaagccttccccagagagatggctttaggggctttatttaaagactgtgatgatggagccacgcaaggctgcacctctgtgtgttgggagacgatgatgatgtccattgctgtgtgatggcttggaatttaatttattaaagtcaaattggagtttataaactggacaactggttatcctttgaaaggcagtaggcagccaggctgtgacatggatggtgtgggaggatgagacaggggcccggataatgaggttgggtagatgacacacattgtggatctgctaagaagttcctgcagggaagaaggggtgtgcagagaaaggatggaagagacaggaggctctggagtatgaaattgtagcaaaaaactcaatcaactagtacaggttagtcttcattcccctttctggaacaggctgctccttctaggatgtaatggagatcaaagcttggaccctgtaactagactgcctgcctgggtttgagtcccagctcttctaattacttgtgtgaccttgggcaagttatgtaacctctaagtgcctcagttttctcatctgtaaaatgggaacttcaatcatcatggctatcattt

SEQ ID NO: 9453 - DNA, 1039 bp, Homo sapiens
tagatcacctgaggtcaggagtttgagaccaacctggccaacatggttaaccaagtgtggtgccgggtgcctgtaatcccagctacttgggaggctgagacgggagaattgcttgagcctgggaggcagaggttgcagtgagccaagattgcgccactgcactccagcctgagcaacagagactccctctcaaaaataaaaaaataataataacaaaattaaattaaattaaaaaataaaaaatttttaattttgtagagatggggtctcactagtgatcctctcactttggcctcccaaagtgctgggctacaggtgtgaaccactgtgcccagccaactttttatttttataggcaccaaagcataagggctaagaacagggatttggtaactcagctatttgagttcaaatccaggctctgctacttattagctgtgagactttggacaggttacttagttctgtgcctcagattccttatctgtgaaatggagataatactagaacttatatcactggcctaatatgaagatgaaatgaactcatcctcagggtctaggacatggtaagtgctatttaattgttttttgtttgtttgtttttttgagatggagtctcgctctgtcgcccaggctggagtgcagtggcaccgtctctgctcactgcaacctccacctcccggatttaagtgattctcccagctcagcctcccaagtagctgggactacaggcacctgccaccatgcccggcttatttttgtatttttagtagagacagggtttctccatgttggccagactggtcttgaactcctgacctcaggtgatccacccacctcagcctcccacagtgctgggattacaggagtgagccaccacgcccggcctatgctgtttaattgtttgtcacacatagaaacagacttagttccagaccagcctggccaacatggtgaaaccccatctctactaaaaatacaaaaattagccgggtgtggtggcacgtgtctgtaatcccagctactcgggaggctga

SEQ ID NO: 9454 - DNA, 1029 bp, Homo sapiens
gaattctcagcctaggtaatggagaaatactacacaaataattatgcaggtctgtgactgcctgaatgggtaacacatagaagtagttgagttggttttaattttatgttagtaggaatggaaagttgacatttgatttaaaggtatagtttatataaaaggttgccatggatgacgttgtactatccctaactctgattgatttgcttacctctgaaaaatcatttactgatagtaatgaaaatgagttggaggcagtaggtcctttggagaacctgaagatcatgaaagtttgtgggcaggtgggagtttggaagaaagaagactggggttaagtggagtttgggagtaaataagaggccgatcttgccaaaagctgtagcatattaggtaaatttatatgtgggataataggggaaaaagccactagtttaactttttaaaacatgaagcaaagtgaaatgacattttctttataggtaaaagtaacttttcaaataaaataggtagaggtgaatgcagttaattcaataaatatttgaaggatcactatgtattcttttatattaattttattattatttttttgagacagagtctggctctgtcgcccaggctggagtgcagtggtgcgatctcagcctccaggttcaagtgattctcctgtctcagcctcctgactagctgggattatagatgtgcaccaccatgcctgattaatttttgtgtttttagtagagatggggtttcaccatcttggccaggctggtctcgaactcctgacttcaggtgatctgcccgctttggcctcacaaggtgctgggattacagatgtgagccatcacgcctggccctcttttgtgttaattaaataccagaaactataggctatcctgcatattgttagcttagctgtcgtaaattacatactgggagagaaataagttaactgtatgtgtggatgtaattgtgttttattttgttcaatttgaactaaatattaactcatctagaatgagtaataaaata

SEQ ID NO: 9455 - DNA, 1040 bp, Homo sapiens
agtctcgtcctgtcgcccaggctggaatgcagtggtgccatcttggctcacggcagcctccgcctcccaggttcaagcaattctcctgcctcagactcctgagtagctgggattacaggtgtgcaccaccacgcccagctaatttttgtatttttagtagagacggggttttgccatgttggccaggctggtctgaaactcctgacctcaggtgatcctcccacctcagcctcccaaagtgctgggattacaggtgtgagccaccacgtctggctgcgagtattttttgagaacttgttctcagtagattcatggtgagcatcagtgacatcatttagactggaattcatgggtagaagtaggagcaggtacacagttctcctattctcttggtgtcctgtggagtggcgtgcttggattggggcataggtggatgtaccatgagactgggctccatgaaagaattctgcctgccttcccctaaccttctttatgggattgagcgtgataagtgaagttaaaaagcgtgagtttgggtactgactttacaggagttgctgacaactagtgccctggtacctagagactgtgtggagcttcgggaaggtgctttggagaaactcctggccagagggagggaggagccaggagccccagatcctcattagctctttgctaagcaatccagaaagaacaaaaagatcagttggccaaatttggtaatccaggtgagatcatgatggcttggactaaggtaacaactcgactaagatggagataaaaagctgttggcactgtgagatgattatatgttttttccctgtattatgttactgcagtgaattgttcataaatttgcaaagttaaaccatccttgcataaattctagtctgtaattatatatttataattatataaaaatacatattttactatttctctggattctagtaatcatttaggactttttccatctatattggtaagtcaagctagtacatataaattttttcatggtctttgtctcattacggaagtaa

SEQ ID NO: 9456 - DNA, 1100 bp, Homo sapiens
tgtgcaatttttattcacagctcttccatgtagacttacctttcctcatagagctatcctggttaataacaggccaagattctcccattatcccctgttgtctcctgtagctttgataatgcctgggagattccttggtgtaagtgtcatggataccgactgtttttatgttggaatttgttccaacataattagaatctgtttggtgagttgaaaggtaagttggctcagagttgcacagtagggcattaaatgtttaagcaaagcatctgcccacactcccctttccaatctagtgccttccttgaactttttcctgagctgctacgtccctaatcccccttgttgggaggattttcgtatcacccttatgggacctgtcaccatgtcctgtactatttggaattggttttccagtctttcaacaaccgttgtggctaactatgttttagaagggctggaggtgtgggccctgtcttcgggtctcaggacccaaagatcctttagtcagttgttgggtcttccaagagccagacattaatacagattgaactccatcagtcccctaattgtcagcctttacctccctcccagagcaaggagtttagggattctaaagcttagtgtccacacatcattctaccagaccttagagctttagaagctcaatctaaaatactgtaactcagcataaactattactatcactcctttgaactcagtctccatgagcagtgttttgttggaaatacatagaacggcttaatgcctagagggtggtggatagtgaaggacggtcaaggttatatttttgactgcttagggattctttggatccaagaaacagaaatgttcaagcggaataaaggagggagtggagttgtggtaaggatgcagggtatttcgcagaacccaggacgggaagtgcctttggttcttgggtggagctggaactgcagagctttgcacctagtcctttctcccgcttcacagtctgcttatggtatatgtggcccccaaataggcactctagtcctcaagtctacaccaccttccaactctggggatcaccatgaacaaattctcaatttcccatactt

SEQ ID NO: 9457 - DNA, 1063 bp, Homo sapiens
ctgttgacagacagactaagctgtgtggtgctcttgccgccccttcctgggtacagagcttgagaaaaatgcagccgaccactccctgtgtttgtacagagcaaagcccaaaagccaacctcagatctcctgatttggcagctgaagaaatcagcagagtcctgattgcctgattcagtcccaaaaatgaatgtcaggccccgccccctccccaccaacattgcctctcctacattctccttctgcccctaaatcagacaggaggccagagaggagtattgctcaatgcgtgctatgtgcaactcctcaggccttgtgccacctccatgctgagccctgaagcagggtgtcctgggtgcctgtgtgtcagctccctcctctctacctacctctgaccttcttgtgggtgagggtggccatgcttatggccatcttaaaactggagaggcagagaactacttatgagtctgtagaccacgtgttgtcttccatggcctgtttctcctgctgtctgggtgagtgagcctgcaacgcaatgcccatgagagtaaatgcctcctgacctaccctgctcagcactgttctagtgtcttggccttgaaagaaaagcctgacttcctgctgacacatgtggtaggggcatggcagctatgaggcacctcctacgtctgttttctggctgtggtgacttgggatttttaaccttatatatctttttcctttactcaaaacaaaacaatttttagcacactgaaaaaaaaaaaaagccaaatgttttgtgcctttctaaggcagcactgtatcccaggctgcattttaggacttaatatggaaataccagagtctgagctcctctaccttgagtttcattagtccttagtgtctaggagacaggaaagaatgctctctgtgactggagaggtgacatgcaggtgcagtgtgtctggagtccctttcccctgctgtgagacttcagtggaggagagaagcattgtaccctgggatcatttggttggttccaatcacaagcttagttatcaggttgcatgccttgtctcctgca

SEQ ID NO: 9458 - DNA, 1038 bp, Homo sapiens
attcactccgacacctgtgcaacgtggctctcaagggcctggtgctgtgtaggggattgggggaaccatagggatgaaaaagactttgcccctgcattccagaagctgagaactaatgggagagacaggaataatcctacgtgaaacaaagttaaataacaaagatgagacaaagcacaagaggtgtgggcaggctgccggtgataaatgcccagcgagcaggacagataggaagtgcttccagccccgccagagaagcagtgggctgtgtggtccagggaggtcactgccaggcttggggccaggaggcaggcagaggtcatggccgtggctgtggaggtaaccagcctgcaatgaggcccgctgcgcctctttcccccactgatgtcctctccccatggcctggtcttgggctggtttccagaggctgctcctgactgtgatccagggttcaggcttttgaaaggaagggtgggctggagggtgtctgccgcctgcctgggactgggactggggctggcaccagccgaggccccctggaatctgacctggcccttgaccagagaaggttccagggatggtgctgtgcatggacatcgcagagcgggaaggtgccctgagccaagggcacctggacccactgagcattggttggggtggggatgggggagctcgtaccactgggatgggaggtcctcccctgggaacaggggtcagttaggacacttctgctggactctgaagatggggagcatgatgacggacgtcaccaccctgcccggcaaagtcctagtgtaacttctgggaaacaaaactgccaagagcctgtgaaagccgctacatctaggggatgagaaaaaatgcagaggtcgtgggcacagtttcctggtgagacctccagcaccatgtccaatcaacctgtggcccactttcctccaatgcattttccaggttatgcccaggcaggaagctgtcaggatcttgggttagcatgggatgagtcttggggagggtggaatggctccaacaccctccaac

SEQ ID NO: 9459 - DNA, 1052 bp, Homo sapiens
cagacgaggcaccccagggccaggcgtcgggggagatgggaggtgtgggtgtgcagggaagcatatgagagagaagggaaccatggagtggtcaggcggatggggggagagagagacgcagaacaccaattactcagtgacaacagaggaaacaggtttagaaaaggtgtttacaaaaattagtcacaaaacatttacctgctgtgctaagctgtgtcctcttaggccatgggcatgggtggacagaggcagggtgggtcctactcctgaaccccctgtatttgcctccgagacgttatttgtgctaaccctttcattttgcagagggaagagagatgcctggagaggggacatgctgtgcaggggggcatggggaggctcctggggcataaaacagaacttggagtcaaagggcctggctttaaagttttgccggacccccctgctgtggcttgacaggcagatggctcaacccatctgagctgagtttttcttttgtgaaatgggaaaatagaacttataagcatatcactatggttagaacccagggctccaactcccacctctagctattcagcggcactgcagttctttgactcttagtgtgatttgcaaattattagaataagagtgctccaaggacaggggctgacatgaagttgagtagcagaggctctccctccctctgctgggagttgcagatgtgcgaatggggacccaggagacagggagctgggagagggaatgggagtggctggtgggaagaactggggtagagaaaatgctgtggtccagaagcaagggtgggtagctactgacaactcaccctgtggctgtgccaagctcctttccctcccagggcctcagtttccccttcagcaaaataggagggtggcttgatgatccctgaggtccttccagctcttctctctagatctatcctcacaagctcctcctcctcagctcaatgctcagtgccagtgtgcaggcagatagatcatctgtccacagagcaggggctgagggagaggagggctcccgcacgccgggag

SEQ ID NO: 9460 - DNA, 1035 bp, Homo sapiens
tgaccagcactggacagtggtggctggaagcagggtgtggagggaaggggcagtctgctgccctggccccctttgctttccattctcctgcaggcgggcctccccccaaaccccagggctttctggggaggggctgaggaagagcgcctggagagtggggccagctagggaccgtgatgggaaggcagggtgccagaggagaccgggcaggctggagcaaggtgatgacatgcggtaagagtgtgtgcctgcacatgcacgcatgtacacgtgtgtgtgtgtgtgtacacacgttatgagaagtggcatcgggaggaggcgtgtgaggagaatcgagcaagtgaggagggtgatgcggggtgtgccctgacgctgggcatgagatggggaattcacagggggggtgggcgtggggactgcggagaggggtgtgatgagacggtggggagccgcctctgccggcaacagggagactgagggaggagacaggcccagatgcacccctgtggagggaatgggaatgtggaacaggagccactgggagaccttgcgggaaggagactgagacccagcttgtctgtgaaagaggacggtgtgcgcgaatggggaagccgtgtgagcctgtgcatcagttgagattaggctcagccgtgagcaacataaacccccaggaacagcggctgaggccgtggcaaaacagcctgtttcattcttcccagtgttatctgagtctggaagccagtcagggctggtgtgacagccccgctatcccctgggatccaggggctccctccccaccctcagtgctgagcacaggatgtctgcccaggggtgctctgccgtctctcagcgcattcccccagtgcagctgaaccagagcagccttccctctggagacacaggtggatcccagtcagacagcatggctgggatgggcacagggaggaattgagtatctggacaagggctacggaggggagccaggacaagcatgaagatcactggactcagagtcaggaggtctaggcttctggc

SEQ ID NO: 9461 - DNA, 1258 bp, Homo sapiens
atttcagatgaaagctgtacagaacttgaccttcatgaagccctctctggatagcattcttgggaagtggcttgtgtattgacgtccacagataactatttcactggtcagaataaggttaagcaataagcatagccatgcagaaaatgtctgctgagatgaagtagatatctgatatgtttttgactttttatttgtacgtttcaatggaggagctaatgaatactaactaataacaacatcttgctcatttagattttagtcctgtgtgactaaattgactcagttatagttgttcttgtcctaacgtatttgtcaccagtaaaagttccaaggtacagctttctggcttcatttcatttttaactgaataattgccttaaggatatttttagatctcaacaaaaactcccctcctcttgaaccttagaatccttctgcttcactcttggcaaatctttgggtcggatttcagaactgaataaagccaggatttccccccaacctccaagatgtctggactctttgtttagttctgtatttaagtttatcccaagttttgtttttgactgatgaacctgtgacccaaatccaaacctcagctgaatttagtatcagcttaaaaccacattaaactgccatgtgtcatgtgacctctagcagaaaccaacgtggcagtgttctgttttttcatgagtgcgtttcattggggtttttgaactgtgaagacattatttaatacatgtgctttattttctgtgtattattgcccaaggtcagtcatcgctagagggttattattgacatttactcatcataaaatgtgatgtcagcctaccagctcggagtgcagttcctggtttccagtttacaacattgaccagttgctaacatgttatctctgaggaacttggaatgataaatacagccatacttaaatagaagattcttggccgtgtagataaggaaaataagataaggcaatatttttgaactattctataatagaaatgaggatatatacacaaaatgacccagtgctgttttcttagggtgcatcctttgtttttctggttttggtcttttcatcacaggatggcattagctctgtgtctgcaggtgctgtgcagcctgtgtggctggctctcgctctatatttctttctgccacctgaataagcaccgaagctatgagtggagctgccgcctggtcaccttcacccatggagtcctctctataggcctctccgcttatattg

SEQ ID NO: 9462 - DNA, 1997 bp, Homo sapiens
cccgggtccctgtcacctcgggccgcgggacctctccgccggcgccagcggctcgtcccagcaccgggagcctggtgagggcggcgagcacagaaggagccccgggcccgggacatggaatcgcgcgagcccggcgcgggacggccggagacgcggccaacgctgcggccacgagcagccggcagccccagatagagagccgggagggagggccccggcccttgccgcggcggggagttcgaggccccgagactccggaggaggagccgacacccgtccgtgagctgatcccgccccagccccggcgggagtcccgggtccccttcccactgcgcgcggatttccctctctgaggaagtttatccttgtgccttctggaggatttctctctagctcgactcactctggactgactcgctccctggctttctcagttcgttttgggagataacttgttttgctccaagccgcatccgttgaccccttacagtcggatggtctagatgactgaatggagttttgagttggacttttgtgtccctgacggagttgggcctgatcccagagcactgggggtggggaggaggtgttactgtaaaatgcaagttggataaaaggaggacctctcgccaagggccccaatgagtggcacacagtctactatcaccgacaggttggtatgaattcctccttcgttcggcctcccggaatcgggcccgacctagcaggggagtcggtgattgcagattgcctttggccagcgaagttgacaggcagaggaaagagggttgtttcggagctgtgcagttagcctggggttgctgccgagttatccagttgattggcttttggaaatgtaatttttccggagagaaacttcccttccgattctcagagaagggggaggcaaaaccatgattgtggttttccgcctgtagtgtgcattaggattgtgtactcgtctggaaatcagaggagaaggtcattttaggtgaaggtcggtgcctgaagtcggctcggtattggtgtattatttatcagctttagccgtgtcctgcagtagattctcaagacaattacattttaggaatttctacctgtgaacttaatgttgagcctactgcatggtgatctgggaacttgatctctttcagatgttgacctgcacggtgtttaattattatctaataactttccagaatgttgacattaccagtaaatcacaggttcttgctggaagcaatgtccaggagctgaagaaatgagggtaaatcatggggtttgcttttaattcttgtatttaaatatttcgtcttccagaaacacttggcgtttaagagatataagccgtaagcatagtgtaagcgcgcagctgaatttgttgagttctgtgtctgtcctttatagcacctaccagtgttgcatggtggtgggtggcgaattgagctagaccatgtgtggttgaagtgcagtttgcttatcctaagttactcttgtttatagggtaagggataaaaagcatattgattccttgaccacatttcattctcaatttaattatgacactgcatgctagtcccaaatttgtcagcttgctttatttttaagtcagtcttcgaattattacaccgtgaaaaaatagatcaagtaactgaattagagggccaaagctctttgatgaaaagtgcaacaatagtgcttctgcacaaagtagtcttaatttcctaataagagttttacccaattgtaagactcatttgttgattttaaaagggccaaattccattatcataccataacagctactccagaaacagaacttcctcttcctgttgatgctttccagcatcacatgaatgttcacttaaaagagtctgttaaatatttaaagtatttatatttactctttgtgtatttttcaaagtgggttttcattttcaatgaaataatttttaacttttccaagaatacacttaagataagtattgacaatgctt

SEQ ID NO: 9463 - DNA, 1033 bp, Homo sapiens
gacgtgctggggctgggatggaattcagctatgtttaggctctgattggtcactttggatactcagaactctgttacatcctgttattattttgcagttaaatcaacacattaacttgctctcttctctttcccttcatcttttactccccagtccgcaccccttaaaacctaaaactcaaactttttaaaagactttaaactcaaactatgttcatggtagctattacttctatgtagtatatccaaacagctttaaaaaaaatggtaagcaatttatgagccctggagtctgtagttttcatcgtttagaatgagcacttgacaagtgtagaaatgtctgattgctgctttttagtctgcattgattgctgcattcagtcttaaaatacatcctaatcgtttccaatcctcctacatgtctttcttgtatccctgagaatttaggggtcctatagcaattggaatttcttctgagaggtagacaggagagaatgcccttttagtagactcagtaaatgatttcaggccagtgtctataacattgaattttcagggacagtacaggtaggaaagttatagggttcttccttgaaataaatggacttttgttttggctagggcttatgaattttgtagtttttgatttatagataaagacaggtttttgatacaatttttttaaagcactgaattcagctttgagctgtttaacttaagcagatttttaaagtgagtgtggaaacctgtgactttatatgcctgtacccagtaattaatgatacttttcattagtgatactttttctgtcaaaattgctgtataatggttttgattaaaaaaaaaagagctactcatgtttatatgttattttcaacgttgcatgagtcatctctcggcaaggtgaaattatttgtaaccttttcttgtaaagtcagccagtccataaatacaaaattgaaatgggggccaaagatcacagtgttagttttgtattcagttttatctttgcctttttagttcagtataaaatc

SEQ ID NO: 9464 - DNA, 1034 bp, Homo sapiens
aaacaaatttatacaaacagcatgattaccaaatcaactaattaagcaattactcatgttctaaaaggcttttttacaaagcgattctttcaaatatgagtaccctcaatgtaacaaatgttatcaattctatgacaaaagggtagggtatagaaataatgttagccacctttgatggaaaatcatcttgttgcaatatgatgaaatacatcaggaagttgtttcttattttttccagtggtttttcagttcgttatcttaaattgtaggtcaaaacattcctcgatgtttggtttatttttaccttattgttttgtctcctcttatttccacatgttagtgaaataacaatgcttagcagtattttttttttcagtaaaatggatattgtgaaaattgaaatattttactttcttgctgttgtatttacaagaattgttaatgacaagacagtgtaacagaaaaagtgcatatttagattattataaaatctgtaagactgtagaccttttgaatactttattagcatattttctttagtactattttagtttcaaattattgagatagatgtccttgttttgtattttgctaatattaatattttgtattttggtaatactaaaatttgcaaacatgccaaatttagagcattttactttttcaacttagaatatctggaatcatcaagatagtcatatagggaagaccgctataagacagcttctaactccaatagaagcctatgaagctagtgcctggtcagaggctgtgcctaaattgcatgagtatatagtgtcgacttttagtaaaagaaaaaatacactaactttacctcttgaattagcatgcaccaatgcagtttagattcataccgaaacaggatcttttactaattcaaatgctgagtcctggtttttgagatcacagtcacatgacaggcctgggtggcttctcagtgtctagagacaagcaaatctactggccaatgaaaagtaggtttcctgtcttggactgcaagtaacaattcatgc

SEQ ID NO: 9465 - DNA, 1049 bp, Homo sapiens
aatgaatgtttgtgaagtgctttgagatcttaggatgaaaagtacagacatgttcttagtcatttgcaggttactgctatgttcagatattgctctcttgaagttaaaacttgttcatgtagtaaagtgttactctattaaacttgatttctgtaaccattcaagtgttgttttatcaccacaagagtcatgattagaatttttcccctttttttcctttctttcaatgctcctttatgattttaccctagaagagtttccttaatagattccttgctctagtactggttaaggcatatttaccaaacttaacacctagcaagcttgtccaacctgccttattttgctgttgttcttctgttttgttttgttttaggctttcagcagcctgaagccatggtttttagtttctgtctctagtgataaaacggaaagagggatgaggaaggggctttactggcccatccagaaacagaaactaagaacccatgactgtattctctcccttgaacaactgtaactagagcaaacctctttgccaatttaactggcatactaaaataatgaaattgtgagaatttcctttgagattagtaactgtaccatccatatacaaaacactatattgctttgctgaaacctgaaagtgagcaaactgatagaaatgcatataacaggccgggcgtagtggctcacgcctgtaatcccagcactttgggagaccgaggtgggcggttcaggaggtcaggagatcaagaccattctggctaacacggtgaaaccccgtctctgctaaaaatagaaaaaattagccgagtgtggtggcgggtgcctgtagtcccagctgctggggaggctgaggcaggagaatggcatgaacccaggaggtggagcttgcagtgagccgagatcgcgccactgcactccagcctgggcacagagcgagactccgtctcaaaaaaaaaaaaaaaaaaaacgaaatggcgtatgtcatactcctaaatatatatatatatacagtatttagccttggacgttaaaaaaattaa

SEQ ID NO: 9466 - DNA, 2038 bp, Homo sapiens
tccaaaaatagaaagtaagtcaaatattatatggatatgtaatagtaattatattaattttgactccctggccgactttttttttgaagctatcattttttgtcagagataaaaagtagcttttaaaggaaaagatatctcagcccttaattatgtgtgtgtgtatgtgtgtgtatgtatttatttatatattttagcccttgtaagagaggagcagtggaagggaactgaaggagcatgatatagagaaaagagcctgggttttggtgtgttgcatttgttctgttactagctgggagaccttgggcaaatttacctctctgatcagcagtttaattttttcatctgtaaaaatgggaagaatacctactttgcagaattgtcgtgacgattaaatgagagtgtgtgtgagtacctagcacatcgtaagagagagctcagtaagttatagtagctgttattgtttaaacttcaggaattagctaggttttgctagaactttcatctgtgcttgtaagatctttttgaatccatatgtatttttagcagctgtggctaagatagtttttttcccttgctgtgataatattccttatcttttatatttcaggctattgttagaattaaatgcgtttgcgagtgaggaatagatttaagagttatttcaattcagaccgtggaacatctcttcacaaaatgggttagtttggattggcagtatacttttaaatctgccttcgatcactcagaatttgtccagttctgtatttattaacatcagtttgtttatttattcagtaaatattgaatgcctgttctgtgtaggtcattgtcttggcagttattttgagctcttgctacctgctgaattatatcttaaaatgaagaaatttacatgatagagtgatatttattcatctgtgctgaagattaaagtgagaagtatgtggcaggcgcggtggctcacgcttgtaatcccagcactttgggaggccgaggtgggcggatcatgaggtcaggagatcgagaccatcctggctaacacggtgaaaccccatttctactaaaaatacgaaaaattagccgagtatggtggtgggcacctgtagtcccagctgctggggaggctgaggcaggagaatggcttgaacctgggaggcagtgcttgcagtgagctgagatcacgccactgcactccagcctgggtgacagagcaagactccgtctcaaaaaaaaaaaaaaagtgagaagtatgtgtatttgggggaagttgtagaatgaaataataatgattaaattgatcttatttccaaattttaaaaatgtggttactttctatcacatactgtctttttatgttttcctttttattttatttttcagtttagttatatttcagtgaactatttagaccaaaatggaaaagacattggtgtaagttggaatctaagaagttttagatgttcattgcttttgaacagaggaagtaacattttatggattgggcattgttttagtcactacttgaaggagaacctcttactcattatcagtctcttggaaatagcaactgattaagcctatatatactttgtgcatccagtgaaaatgtgataaatatgatgatcttttggtcagagaaggattctggaaactgcagtagtttgattagtaagacagtgtttaaatcatgattacttgttgctctaatattttagactttgaaagatgacaagatgtgatgtaggtgacaaagagcatttttaaaaatgggtgaaattggccgggtgcggtgactcacgcctataatcccagcactttgggaggctgaggcgggcggatcacaaggtcaggaaatcgagaccattctggctaacacggtgaaaccccgtctctactaaaaatacaaaaaaaattacctgggtgtggtagcaggcgcctgtagtcccagctactcgggagactgaggagaatggcatgaacccgggaggcggagcttgcagtgagccgagatcaccctactgcagcctgggcaaca

SEQ ID NO: 9467 - DNA, 1919 bp, Homo sapiens
gttttttttgagacagtcaccctctgttgcccaggctggagtgcagtggcgtgatctcagctcactgcaacctcagcctcctgagtagctgggactgcaggcatgtgccaccgtgcccttctaatttttgtatttttagtagagacggggtttcaccatgttggccgtggctggttttgaattcctgacctcaagtgatccgcctgcctcaacctcccaaagtactgggattacaggtgtgagccaccatgcctggccccagcctgcatgcactcttaaacactatcctatactgccagatatggtcagagttgaatcagatactgtttctgccttttaggaacttcgagtctaatagaggaagatagagaactaagtgcacagggcacagtggagactgaaaggagaaaaatcattactttttggacagatcacagacagcttcatagaggagatgaatatatttgctgaatcctggaatgtgggatgtagttactggacaggtaagggatagaggaacaattcaggtaaaagaaacaatcaggtttttttgagacagagtctcactccatcacccaggctggattgcagtggcatgatcttgcctcattgcaacctccacctcctgggttcaagggattcttgtgcctcggcctcccaaaatactggaattacaagcacgtgccaccgcagctggctaatttctgtatttttagtagagacaaggttttgctgtgttggccaggctgtccttgaactcctgacctcaagtgatccgcccacctcagcctcccaaagtgctgggattacaggcgtaagccaccgtgccaccaaaataaggaatattaataaggacatagaggtgaaatagctcacattttcaggaactgcatatagttcagcatggctagagcatggaggttgatgatggatgggcacagcagttggtaaagttggagtgataggtggtaccagattatggaaggccttttaagtcattctaaggagtttggattttaacctctggattgtagggagccactgaaggccttcagtcagagaggcagtaagcgttatgttataaaagattctttcggtggtagcgtgaagaaaggattagtcttgagcaacagtttcaggggcagagaaaccaatagtgagacatttttcagtaatccatatgaaaaatgatactaataaattcctaaactgaagttgtaacatatacttaaaagcgaagagacaaagttattaagaagatactaagaataccagcagggtgaaaggtgtgtggtcaaagtgtggggctttctgggttgtgtccttgggtaggggttggtaatacttagcaagatagggaatgtaaaagggagaaggcagggttttgttttgttatttttgtttggctgactgataagatggaagatggagaagagaacagacatagtaagggatagatttagtttaagttactaaatctttagtttaagtattcactatctgttgtatgatagattatcccaaaacaataaacttgcactatccactatggtaaccacaagacaaatgtggctatttacatttaaattaattgaaattaaataaaattgaaaattcagttcctcagtgacactagccacatttcaaatattcactagccacatgaagccagtggctacagtactgttggttgatcatagaacgttttaaattattgcaaaaagctcttttggacagtgctgccaaacatttatcaacgcatagtttactaagatcagaaatcggtgagcaactttgctgggtggttctgcttcaaggtttctcatgaggttgcagtccaggtgtctgcaactagaagcaagggcttcaggaatctgaaggctcaactgcacctggtgggtccatttccaaggtgactt

SEQ ID NO: 9468 - DNA, 1042 bp, Homo sapiens
gactctttaaagggtaaggaggtgagttgggtattttaggggtgtggtggtagagatatggatactaaagtggacatttcaggctatgttagatgtggaacactgctaggatatgaagttttgtgatgagggaaagtggtgagaaaagaggctggaaggccaattagagtagtcttgaatacatgcatgttaaggaacttgcctttatcctgctgactgtttcccatacttaaatttggatactactttagtgatttgccataggcttataacccctaaactgtaagttactaaacatttttctttaatattactctttattattttatttatttattttgagacaaggtctcactctgtcactcaggctggagtgcagtgatgcggtcatggctcgctgcagccttgacctcccaggctctagtgatcctcccacctcagcctcccaagtagctgggaccataagtgcataccaccacattggataatttttgtattttttgtagagatgaggtttcaccatgttgccccaggctggtcttgaactcctaggctcaagcgatccgcctacctcggcttcccaaagtgctgggaattcaggcgtgagccaccatgcctggccagtaatattactttttaaacttagaaaccatttccagagggaacttcattgtattgttataaatagaaaaccagtattgtttgctacatataaaagagaatagaaaaaatatgaatgattattacgttaaaaaaattaaaagtggaatgtagcaatgcatcctttgatatagaaaaatgcccacttggaaataagttcctcagtgagaatactatttttggtcagttagcaataaaagggcctttgcttgaatagtgtttggtttctacctaagatgagattttaaggtcattaagacaattccatttttaaattttgatgttaataagcaccaagaatcacaactctcaagtctgcgtacttggaaagatcataatacagttaatggtcaactttgtccaactttattgttaattcaag

SEQ ID NO: 9469 - DNA, 1053 bp, Homo sapiens
gcatatgcctgtggggccagctgtttgggaggctgaggtggaaggattgcttgagcccaggagtatcaggctgcagtaagccatgattgtgctattgcactccagcttggtgacagagtgagaccctgtctcaaaaaaataaaaccttgaggacccaaatttgatttaaatttagatgtactatctgctttgggagagttactttattattatttagtagagacagggtctcactatgttgcccaggctggtctccaacttctggccccaagcagtcctcccaccttgggctcccaaagtgctggggttacaggcgtgagccaccaaccctgcccttaagttatttttttgatcttttcatgacatgctgtgggcaataaaataatacagtgggtgatctgttgttgcaattcaaatatggagttcctttttcttccacaaaagtattggctgatttctttctttttctggctgtgagcaacaggtaaattaacatgaccatggtctgtccccagcgtcttgactcagatttcttaatttgaacttttccatcttctccactccaagatcacatgacaacatccaacatcagtggatagaaataattagaggctggatgaggtggctcacgcctgtaatctcagcactttgagaggccgaggtgggcggatcatttgaggtctggagttcaagaccagcctggctaacatggcgaaaccccatctctaccaaaaatataaaaaattagctgggcgtggtggcacacgcctgcaatcccagctacttgggaggctgaggcaggagaattgcttgaacctgagaggcggaggttgcagtgagccgagattgtgtcactgcactccagcctgggtgacagagtgagactccatctaaaaaaaaaaaagaaatttaataagtcactgctacactggcaaagaagggttgagtagttttaagaagcttagttgctgtccaacagtcttattgcatctgattcttttggtgcttgcttactcaagtagggatcacatagcatgggaaggaaagagcaga

SEQ ID NO: 9470 - DNA, 1032 bp, Homo sapiens
ttattaacaaaatatcaataaaaattactaattataactgttactattaataatgaatattaataaaatattatgaatatgatatgaggtagggattgagttttattctttcatgtggagaatcagtcgtctagccccattcactgtgcagtctgtcttttccctactgatgggtagcactatccttgtcatacataatgtttccattatttgtaggtttgtttctgagctttctaatcttttcccttggtttgactatttctgtaccgacaccaaactgttcagattactttagcttcataagcaaagtaaatctccttaccttgtttttcttcttcaaaattttcatcgctattcttagctttttctttttccatatgaattttgggatcagcttgtcaggttcccttaaaagttttatttttttttaacattgtaattgcattgaatatttagtttagtttggagaaaataggcatatttatgatattgtcttcctatacatgaacgtggtttttccttagaaattccagatattcccttatggtcttcaatagtaatttataattgtatccaaaagtcttaaaacttttttggctaagcttatttctaggtactttatgattttctctgcttttagaatggttggtcagtctctttctttccctctcctcctccctcacttattcttttccttcctgtttcttccttcccatcccccattccaacctcctttcattttttttttctctctccttccctcccttatcaccttttaattttatattgttttggctgacagttctatttaaggtagtgtgttatagagaaaagtatatggaacttagagtcaaaattgctggaaatgagtccccgcttcgtccttcaagaattatatgataattaagtcaacttttctgagcctaattctcttaatctgtaaaaggagaatatttacttttatactgtctacctcacagaatcaagtgagatatgtgcatgaggttttttcctaattaaaaattcagtgct

SEQ ID NO: 9471 - DNA, 1513 bp, Homo sapiens
tgatgaagttcagtctatcaactttttattttgtattcatgcttcttggtccctatcgtaaatatcttgacttaacccaaggttgcagaaaatgtcctcttaattttttctagaagttgtatagtttagctcttatgtttaggcctatgattcatatcaagttaacatttgtatatggtgtgaggtaaggattaaagtttgtgcgtgttttggcatgttttccagcaccatttgcagaaaagactgtccttttcccgttgaactgctttggcatctgtgttaaaaacttaatagactgtctgtgcatagttgtatttatggtttctttattatgttctgttgatcaatatgcctgaacatattgattgatttattaccttagctttaagtctttaaataaggtaatataagtcttccaattttgttgttttcctaaaaattgttttggctcttctagatctttgcatttccatatgaatgttagagtcagcatgtcaatttctatttacagaaaacaggctgagattttgtggttgtgttgaatctggatcagaatgtggagaattgacatcttaaattaggtctcccaatccattggcataatctttctctccattaatttagtagtcttctttaatttctctataaacattacatagttttcagcatacagggtttgcacatggtttgttaagtttatgtgttttgaggttataaatagcatttaaaattaatttttaattctttattaataatatatagaaatacaattgatttttctatgttcatcttacatactgttactaaacttgctttttggtgctttttttatatagatctctggagttttccataatgtcatgttattaaaaagttttactttcatttaaaagatgtaagccttttatatatttattttcactgtcttactcatttggctgaaatgttaaaagaagtggtgaaagcagacatgtagacatcttttcattgttctcaatcttatggaaagcattcagtattttaccattaagtacgattttttttttttccatactctatcagtttggggaagttaccttctattcctagcttgtaagaaattttataattaacagatattgaatttagtcatatgctgtttctgtatctgtttagatgatcatatggcttttctgttttctttcttttttttgacttgccaggaggtattttcatctgaggcttttctttcttagactggtgatacagtgaattacattgatttttgagtgttaaacctacctggcattcttaggataaaccccatttggtttatcctaatggtctctttattatgtattatgtattattctttttatttattgatagatttggtttactaatattttgatgattgttcttgttcctttgttcctaagggatatttgtgtttagttttcttgtaatgtcattgccttgttttgatactgagacagtgttggcctcagaaaattttttgggaagtgtcatgtgt

SEQ ID NO: 9472 - DNA, 1053 bp, Homo sapiens
ggtgaaaccccatttctactaaaaatacaaaaaattagccaggcgtggtggcgggcgcctgtggtcccagctgcttgggaggctgaggcaggggaatggcgcgaacccaggaggcggagcttgcagtgagcggagatcgcaccactgcactccagcctgggcgacagagccagactccgtctcaaaaaaaaaagagaaacagtgtctttgggggagagccaggtgttggtgaaggcagcgtttggagtgcattctgtgaagaagttaagagtgtagtggtgtttggtttcttgtagcaagagtcctagagcagtggtccccaacttttttggcaccagggaccggttttgttgtagacagtttttcaatgggactgggagggtgttcgggggagggcagtagtgggatggtttcagggtgattcaagcacattacatttattgtctaccttattttcattattattacattgtaatgtataatgaaataattatatactcaccataatgtagaatcagtgggaaccctgagtttgttttcttgcaacttgacggtcccatctgtgggtgatgggaaacaatgacagatcatcaagcattagattttcataaggagtgtgcaacctagatccctctcatgtgcagttcgctatagggttcctgctcctctgagcatctaatgctgccactgatctgacagaagtggggctcaggtggtaatgcgagtgatggggagcagctgtaaatacagctgaagcttcacttgctcacctcctgctgtgtggcctggttcctaacagatcatggaccagtattgtctgtggcccaggagttggagacccctgtcctagagtacacagtgaaaaagtttgatagagaggggaacagtggaagattttgttagatatgtcacatgattaatggatgactaaagttttgtttggtgatctaggatgatagagatgttgagacatgaaattagttggcttcaagttctaagctgtcctgtgtgagaaattgcctcatcagccaacacaggctttgacatatgggt

SEQ ID NO: 9473 - DNA, 1011 bp, Homo sapiens
ttgagaacccttgaaataccttttttggaaggaactgagtccacaagtcctcaaaaagcactcatcggagggatgagttgattagaacagaattagcatgctaacgtaaatctctttgacattacaaatattttatcacctgtgtgaatagacgtctttagattacgtacagttagcatagatgaaaaagtctctctggggattcagaaaagcttgaaactactgagtagaatcatagcaactggtgacattctgctttagtgtagggtcttattataagcccacttcaaactttagagattatacattgctttctcggggtaaaattcattagctgagtacttaacaaaaatgctagttactcacatattatttattttaaactttcttggcttttttttttttttttttttttttttgagacaagatctcgctgtgtggcccaggatggagtataatggcgggatcatgactcactgcagcctcaacctcctgggctcaagtgatcctcctacctaagactccaaagtagctgggactacaggtgcacaccactgcacccagctgttttgtttgtttgtttgtttttttaatagagatgaggttgttgaaggaatgatttgccaggggaaaaaaaaaaaagaaagaaatagtagagacaaagtctcgccatgttgcccaggctgatctctgtctcctgagctcaagcagtcctcccaaaatgctgggattaaaggcataagccaccgcacctggcttcttagccatttttagagctactttgtgaactagatttactttgtgcatcttaaaaggaaaccaagtgtttgctttgtattgactttttttgttacatttctgcccagtgcggtcagttggttatttattccatttccccttatttgtccctttctacctgttagagtctattaaacgtgtatggatgcgttttctgatctacaattttaataatacttaattttattaatacttttgtgggttactgtagga

SEQ ID NO: 9474 - DNA, 1044 bp, Homo sapiens
tccctctgtcaccagactggagtgcagtggcacaatctaggctcactgcaacctctgcctcctgggttaaagcgactctcctgcctcagcctgccgagcagctgggactacaggcacgtgccaccacacccagtgaatttttgtatttttagtagagacggggttttaccatgttggccaggatggtctcgatctcttgacctcgtgatccgcccgcctcggcctcccaaaggacagcccatgtttttaaccagtttgttatactgtctctctgtcaggaagatgatcagtaaatgcaaatgaatcacattttaagcaattaatttctcatacagatggagcagccatgcgggctggagtacagacaggtgatcgaatcatcaaggtaaggaataggctattatagaatttacggtaggattaaaaaacaacatatattggtcatattctgatttttttcacttggatttttataaaaagcatcatacttctatgtatgatagatctgttgactatacaaacttatttcatttgttttaaaattaatactaccctttactgaaggacgtaataaaaggattgaaaataatggaggaatatatgttcttgagtaggagagtaattcagggttggaaagatcatttctgtctagattagtctgttattaagcaattctcatcaaagtacaagttgaacatttctaatctgacacctgaaatgctcccaactctgcaagtttttgagtaccaacatgacaccatgaatggaaaatttcacacctgacctcatgtgatgggtcacagtcaaaagttggtttcaccaggtacagtagcttgagcctgtattaccagctactcaggaggctgaggtgggaggattgcttgagtgcaggagctgagactgcagtgcactttgatcatacctgagaatagccacagcacttcaacctgggcaatatagtgagaccctgtctttacaaaacaaataaaaccaaaccaaaacaaaaaacttggttccatgcacaaaagtatttaaaatgtataa

SEQ ID NO: 9475 - DNA, 1065 bp, Homo sapiens
tagtagagactgggtttcaccatgttagcaaggctggtcttgatctcctgaacttgtgatctgcctgcctcagcctcccaaagtgctgagattacaggcatgagccaccatgcctggcctgattatggtgatttttgctgtctagattcccgccccccgcaatatgtctactgaattcctgtccattcctccaaatattttctactaaaatttactacttattattgattgtgtttttccctgttattgtggaatattttttggtcatactcattttgtaaagttaatttaaaattgcattttatgttctagcatattcactaaaccctgcctagttagtgtcatcttaaaatatgaagatctaggccaggtgctgtgtctcacacctctaatcctagcaccttgggaggccaaggcgggtggatcgcttgagctcaggagtttaagaccagcctgggcaacatggcgaaaccctatctttaaaaaaaaaaaacattgcagctacttgtgggggctgaggagggaggattgcttgaacccaggaagtcgaggctgcagtgagctgagatcgtgccgcggcactccagcctgggtgacaaagtgagaccctaattaaaaaaaaaaaagaagatttaaaaaatttacatttaagaaattaattaaacatagccactaatagatggttgattttaacactcctctaaataaagaaaatatataatatattcttggagttataaattttatttgcttttaagtaatatctgatcttactagtagtaacttgctatctgaaaacggcatcattcttttggatttttagggcagtcataaaagagaaatgacaaattagtttttttttctgtggagacatgatgtagcagatgatgggactgtcttacataactggatcttttagaactatcgaagattaagtagtaaaatggtataaaaagtttcttgacaatgttattttcccttcccttccctttttccgtctccccaccccaagctggttcctatgtagctctcactgttcagggacgcccacctgggtcgccccag

SEQ ID NO: 9476 - DNA, 1051 bp, Homo sapiens
gtgttattaaaaaattttgtttaacaagttcactggacataattatgtaggctatgcactgtgaaattctgaggggagaagggatttccatttatattatttacaaagtaaatgagacctgcccttctggagtgtatagtatagtggtcctggtacttcacgtaaagcatctcttcttggatttcgggttctgtactgtgatttctttttaaagattagaatttatgttttaaagtcctgttataagaagttttacctgtccaaagactgcttgaattgagactctgacagaggctttaagctggtacaaaaatcttcaaggtcttaatatgctcttaaaagtattgaaatgaaatgaaatctcatttacatatattttatggttttttgctcagttcttttacattttggatttctttcccatatttagaatggccaacagaaagggagaaggtgaagaaagctgcagatcactgtcgtcagatcttaaattatgtaaatcaggctgtcaaggaggcagaaaacaagcaggtaaaaaaggaaaacaagaaggtacaggatgacattgggagaacattaaattaatattacctggaatctgtgaaatagttgttaaaactatcattacctaatggacagggagaacatttgtttactgttcgcatagtaggcaggtcaagatcaatctgtgatagaatatcggagttgtatttgactttttgaaacacctcaagctgcttgtttgctctttcatttatctcttcattcagcagatatttatagaacatctactgtatgctgggcatagggtacagagtagttgagaaaatgagtgcaatatctgcccacactgagcttgtttgctaggaggatagaaaggcatttaacaggattatagtgcaaatattttgtatcagttgtgatagctactatcaaggataatttcaagatgctacgatatataactatggggcctagcttagtttggggatgttaggtggtgcctattagagaaaattttcttgaggaattgacacttgagccaagctct

SEQ ID NO: 9477 - DNA, 1050 bp, Homo sapiens
accaacatgacaaaaccctgtctctactaaaaaatacaaaaattagccgggcatggtggtaggtgcctgtaatcccagctacttgggaggctgaggcagggagaattgcttgaacccaggaggcggaggttacggtgagccgagatcgtgccattgcactccagcctgggcaacaagaccgaaacaccaaaaaaaaaaaagaaaaaaagaaaaaaaagaaaataaaataaaatgcaaagaaactttaatactgtttggtttatgcaggttccagcatcagagattcagtttaacaaactttgcctttgagccttctgtgtgtcagtataacactgttctaagtgatgtgtatttttcttaacagatgatctctgtagtttatggattgttttttttttttctgattcttccctgaatgcttcatgttaaaagttaaaagctttgtttagatatagtctaccttttctattccattggacagacagagatttgggattagaatctaccttaatatcgtcaaaacctcagtctcattcactgagtacctctgggaaatcagaggtacgtgatctgtttgtggctgagagacagtttgcaaaggaacaacatacagatgggacactaaaggaagttggagaagattatcaaatcgcaatcccagattcacacctgcctgtctcagaagaacggtgggcattggatgcactaagaaattgtaagttttattcataacttattacagatacttactaagtatgacactcatgtgccatccctaaagtatgtggatttatcaaactccacttattcttctagttctattgtggagattatagtattctctacagtggcccatgccacaggcacacacacacatgccactctgttagctccccacccccctgcctggttcagaatcactgttaaaatgggaggatagcatatctctcagttgtattgaggtgggaaaaaggctgagaacaatttctttggctggggagaaccacttgaaatttttaaaccagcgtatgactaaaggtatgaaaaaag

SEQ ID NO: 9478 - DNA, 1048 bp, Homo sapiens
tatgtatctcataaaattagaggaaataatatgcatatagtgtctggatctggaaaaagcagaacttttttttagctttttctgtctagcttaacacagcctttcaacattcttaagaagtacctttagggtattattctagttatatagaagaaaaaatagaggcatgatattggttattgaggagttctaaatagtagtatctccctattcagaatgcttagatcttttcaagtttagtttaacgttaaatcttctctaaaagatggtgctttatttcatcttcaaaacaaaatggaaaatgattgtatgaagtaagatgattgtatgaaattaataattaacattttaatatgtcattaaaagatactttttaaagatagatcattggtaagtcagctaatttaattcttgcagcctgaggttatagttgtgaatatgttttttttccccctccttcctaaatcgtttagtgggtttgttgaagcagttgctggtgcaacagctaggtttgactgagaagagcgttcaggaagactggcaacatttcccaagatacagaacagcctctcaggggccgcagacagacagtgtcatccagaactctgaaaatattaaggcctatcattctggtgaaggacatatgccctttagaactggaactggtgacattgcaacttgttacagtccacggacttcaactgaatcttttgctccacgggattcagtgggactggcaccccaggatagccaggcaagtaacattttagtaatggaccacatgattatgaccccagagatgcctaccatggagccagaagggggtcttgatgacagtggagagcacttttttgatgcccgtgaagcacatagtgatgagaatccatcagaaggtgatggagcagttaacaaggaagagaaggatgttaatttacgcatctcaggcaagtatctttcacacttaaactttgattttgattttgatcattgttaactgtcctgtattttgaaatggatgttgtattggtatccaggtgtgtgtgtgtgt

SEQ ID NO: 9479 - DNA, 1044 bp, Homo sapiens
tctaggatgaatagtagcgttagcagcaccctacagagggtaagtttcagaattgtaatttgagaactccttcaattatattgactttctttggttttccttgtgcattaggtatatattttttgaagtatttttgccaactaaaatgaagtctgtaaattctgttaataaacaaggagttcatccgttgctcacatctttcattggtgccctctgaactctgtgggttgctaggatgtaattttaatgcttccctgcagtccaaagatgattttttcaccacaaatggtaagggatgcccacctacttttataaacaccactgcaacttaacaagtttatttatctatgtccagatttctgtttctgtcctaaattgatctgtgtttttaggtggatcaacttggatctttagacctcatctataaattgaaattatatttttagtcataagccaagtacaatctaactcagaatgggattaaaaattttagaagcagaagctaatatataaatgaagtttgggatttggaactttctgtatctcttaggaggaacaagtaaaaaccaaatggttacattgtgctgctagaaataatgtcattctcaattaaaagggttacacctgtagccacttgacactaacaccatcgagggcaattaatcaggagaaaagtaaatataaaaactttgctcttaacgtcacacactacagggtaattatgtaattctctagcactcaattaagaagcttgtaggttagcaaaatttcagtttctctagttcagccagtgtcttgtccttagtaattatttgctttccctgcagttcaatttctccttggaactctaacaggactaactggaaaaatactttgaccatagctctagtacttccaaataaattcatatctagattttcaaacaaagccccaagatgaagtctaattctgaaaatatctcacaatttttgaatgttctttttatcttaccgacctaacttctcttttccctcccaacttggcctcccacacgttccatttcat

SEQ ID NO: 9480 - DNA, 1052 bp, Homo sapiens
cccactttggtgacaccggcagcacggaggatggattgcacttggacagaagaggactcccaggccatgagtacctgtgtgccaggcacttctcatggattacctgtgcaaggtagatgctcttacccgcactttacaggtgaacacatcgaaagttcagagatccgcctgaaatcagccagccagtatgtggccaaatgagggtttgaaaccaggactgtcttatttcaaaacttgtgctctttctaatacatgctactgtttcctgatgagattgccacattgcacaatgtggcaccaaggggcaccattcacatggtcatcagtataaatggcacctgggaattgaacagcatagtggctaggtatcctaagatcagaggcacgatctccattaaatagcagctattgcagaggagaaatgacgaggacctaacctggaggggttggaaaggaagggacaacttcgagagacatttaagagatagatttgacagaattggcagttgactgggtgtggagttaagaaataagggagttgaggctgtctctgaagtttctagcttaggtgcctgggagaatagtaatgcccttattggttaggaaggcaaaggggaaggggctgttgggcagaaaacatcacggaatgccacttcccctgcttacccatttgacctgggttaggagatgaacttgatttaagggtaccacctggacctgtgctttggtttcttgcttttctacttaaggtcaaactcagaaacaatctgggccattaaaagttcttgtgcttttagctgtagttgactaacctggtcctgtcctcaggattgactaaatcccacccccagtgatgggacttgcctgcttagcccagctgaacatgtccccggggccctgcttcccctagacctcccttgcagaagctgcccacaaggtctgcccaacctttcccttatccctccatgttcccagacaccagacactaaagctctacatttcttggcactggaccctgtgtggtataaggcatggtcggccccttgcagcca

SEQ ID NO: 9481 - DNA, 1049 bp, Homo sapiens
ccttgtcctgcggctcggcccagatctggcagcacggcaccagcctcatgaactacctgcgcatggtgaggagcggctgaggccctgcagggctgtgcccaggctagtggggtgggacacttggttcaaggtacaagagtccctcaactccaggcttgctcgaaatgtgtctgttattacagccccagataaatcagtgatctctggtgaccccagttgaatggatcatgagccacatttgttccctaaaccccaataaccactgagaattcatggaagtttgttcagaaggcaacagccctcgagccttacactattagtgggcccctgaattccagacttagcacctggcctctctgctcagcggtgttctcagcaaagctccacacagctgggaaagggtggtgctgctggagactggcatccctctgggagttgcaggctcaagacttctagcttggctgggtttcccattgttgtcctccccagccatgcttcctctggtgggtgaatgaggatctctaccctacacagaagacttctgtcagagaagcctgctgcagcacagtgtcttggactttgcatttagagttaggtggagagtcatcctgacttcctgtggacctgggggtgggtgagtgcctgcccggagaggatgaatgctgtggacagccaagggcctggaggaggggctgaggggaatctgagctcaagttagcaccatgactgggttggtttttgcagttggtatggggttattgggggagcattcttctcctactccaggccaagccaagtctgaattgtctccacagacatcacatttgtcatctcaagatgccttggctgtgtgtgggcaggagaaggatcttaactgctttgcctcttctgggcatccttaaatagcccctgtgtagaaatcttgcttgggggcaagtgtaacctggggcctgtttggtgctgtaactcactctctcttggacaggtagaattggaaggtcttaccggccacattgaattcaacagcaaaggccagaggtccaactacg

SEQ ID NO: 9482 - DNA, 1045 bp, Homo sapiens
gtggtaaactactgtgtaccaggcactgtgcgaggctctgaaattaccaaaaggattacaacctggccttgcccttaagaggtttagaagctagagagagacacagatagttgctgtaatggttgcagtatgggagagttttaatagcggtataaagagaatgtctggaagcccggaagaggaagtgatgaattctgtggaatggtcagggaaggctttaagggcacatggcctggacctggaagcatcccttaggaatcgctgctttaggactgttgtgaggcacaggtgttacactgagaactcggtttgaataggtaggatgaggttggacttaagggactgttgaaaaccgggtaaaggtacttggactgcaaccaatctgtctcacgctttttcacaggaggaaccaaaagcagaggagactaaatgggagctgctggggatctaggacattgtgtagagcagcctacttgttcagaatttcctggaagtcttctgttctgtcctaaaaatacatgtgaattttgcatcttactctgtaatacaggcatatttatttaatgtaagaatttttttcccacccaagccctaagtaaaatcagtgtcccaggaagatgccccatcatcatgccacagctttgtcagactcctcggcacaccaacagtgccctggactgggtttgggagcattggcaatagccgtcaaaggttctggggtgagatgtggcacacggaaagctggtgtggtgggatggaattctgagctcttggcggcattcatggtcccaggggatagttattgcctcaggagaaatcaagtcaaattattggctttaagttccaaaataagttcttaaagctcacagcagagataatgtccttggagagcgaggtttttgatttgccagagaagtattttggaatacagaaggttaattcctaataggatctggtcaaaaagttaatgctagaagttagagtgaaaaaaaagagaaagaaatagaagaaccaggccaccaagtctgcaaatcagataaaagga

SEQ ID NO: 9483 - DNA, 1050 bp, Homo sapiens
gatgattttcagaggcacaaaagataaagatacacatcagatagagagaaaagagccatccagaatactttggaactaaatttcaaaaagaaagaattgaggcctataagaaagtactggtagtccacacatgaatttcatggatctcttgttcagatgataagatgatagcgtggatgagggctctgttgttggtaattgagataaacaatcctgctatgagttaaagcctagaggactttttttggtggtacgggtgcagtacttctgaactcctcctgggcaataactggctgtctcctcttaggattcagtaccctttggtcccattatatcctgtattttctagatccttatgtaatttcacacagtttgatttttgtttcttgacacttcctgggggctgaacatatgtagacaagaatttggctgatatagaaaacattttgtgtctctcatcattcagatcgcctcaacctcccaagtgtactagtgttgaacagctgtggaataacctgtgcaggagatgaaaaagaaattgctgctttctgcgctcatgtgtcggaactagatctttctgacaacaaactcgaagactggcatgaggtgaagtttttatattgctacattttagtgaaaagcagcaataaccattgtgtcattgtttatgttattatatgttctgctaaattctgttctcacttgatgtctgtatgacttcttgttgtctgtatatcttattgtctgtatgtctttatatcaagataaataaggcctataatcccagtgctaaggaggctgaggcaggaggatcacttgagcccaggaattcaagaccagtctgggcaacatagcaagaacccatctttaatttaaaaaaaaaaaaaaaaaaaaaaggcaaataactgactctatctatggtgatttttcgttagctttgttattgttattgttgctttgttattgttaatttatttttcattgttcatttgttttcatcaatcactaaggaaatttaggcatcaagaggttgattagtctttgtcagct

SEQ ID NO: 9484 - DNA, 1050 bp, Homo sapiens
catatcatgtatctttgggaactcaatgatttctttttgtttttgagggcagtggtaggaagtaaatgcattgatttagggtgccttttcagactttaaaattttgcttatcataaggaggagtcttaaaatagctccagtgaacaattatttgatggaaagaggaagtaccattgtcagagacggtggcaatgccagaaacaggttttcttagaggcttttctttgccttttcttttctttggtaccttattttctgtttgtcccaagtaatccctaaactatgtcctgggaaatcctttatgatggcaaggattacattaggaattcctcaaatgctgatttgattgtcattagtggtatgctttttaaaatatggagagtatgtttttccctgcttaagactaatggcttttctaaatagagctgattgtatctccatgttattgtgagagcaggcagcagcctgtatttggacaccacctcaatgaaggcttattttgtcttggatgctggagaaatcttagtgtgctgtgtccgttacctcatattccttccagacagaggacctgctgttgtgaaggaacatttctatactggacatgagtctcctggggttctccatattgccatgctccatcatcctctgacaagggccgtgacacagcactcctagcactcctcacattcagccgtgagtctgaggagaaacaaaaggggcattctccttcgtgcaccatggagagcctctgaaatgttagctttccctgttgcttacagcctttgtcattccagttaccttggactttattttgacttcttgccactttcccagcccagcagaaggcaaactaccttcctaatcttgattggagtcatatacaagtatttggatatacttggaaaggaaagagagagtgagagccagtcctcccaaatcatgggcttggaggaaattttctttgctgtctgaacttttgttttggccagggcaaggggccagttttatctttttcgtttttgtttgctttttgtcagtaaaacaatacta

SEQ ID NO: 9485 - DNA, 1030 bp, Homo sapiens
aagtcagtgaacagagtagactggccctgaatctggtcaatacttcaaaatgatggatcggctccattctatggagaaggtgatggcagactctaaattctcctagctgtagaacacattgtgttttaaccaacttttgtttgattctgatggaaagctgtagtgaaaattaggaaatccaggtctcactggggtgtggtttctgctgcagagacacaacccgggacctgcatgcatctttagcgttgggtcctagttttcagcgctttatttgatgcagaggggatacctttcctttacgcataccactctcactgatcctaaataattacttgacagtttgaatgatctcattacacttccagactggcttcttctgggcatctaatttgttcatgaagtgttgaacttcggaggacctgccagcattcaggggatttcagcccgactcagcactgttgatgttgttatgtgaatttgttctatgacggttttgatggtcttgggattagccactaaacacacctggtgttctgtttactctggcaagctggggatttttttttcattttctttttaaaattccaggatgaattattcatcattccttagaatttgggtctctttcatcttcgcacttgtacagcaccaaggtgagtactacagaattccataaagctctcagttagcatgctcttgaattgataaagagacacttttattggaaccacaattgtaagggcaggtgcatgtgtgtctacagatacaagagaaaaatgtaattaaattctattatcaagggtaaaattcattaactttaaatgaggtttacttatattcccacttttttcttatttaacttcaaatactatttgtatgtaccagcttgccctgtgctagtggagtagatctttaaaattacgcaaaattatttccattaaaagtagataagataggggtatgtgcacttcatgtctgatcactgatttccattaaggcatttaatttgtggtggagactttaaagaatc

SEQ ID NO: 9486 - DNA, 1032 bp, Homo sapiens
ttgcccagattaacctattaataacatttgttcatttgttttatcattccctccctttccctgtctcttccttcctccctccctgcccttcatgtgagagtgagttgcagacttcatgcctcattacccgtaaaacttcagtatgtatttccttagagtaggggcatttatatacataaccacagtacagttttcaaccttaggaaatttaacattgatatagtaatttaacatccatattccaattttgtcagttgactgagcaatgttctttacggttcttttggggtgccaggatggggaactcagtacagacctaatttagaatcacacgttgcatttcattgtcgtgtctctttagtctcctttaatctggaacaatgacttagttttctttgtcttttctgatatgggcatttttgaagaacacagcctccctgccttttgaaacagaatgatcctccataaacagaatgaccctccattggggttgatgttccatcctgaggatcttcagctgtgcatctccactcagcctcccgggcaggtgccatgtggtttttctcatggaatcacagcacacacggaagcacgatcttgtccagcctcccctcattggtgatgtgcatgttgattccctggtcaaggtgttagcaaatgtctctgctgcagagtcactgtgagctttcccttgcaactaataagcaacccatggggaaatactttaagagtgtgcaaatatcctgtctgtcagtctatctgtctgtctatcggtcatcttatcaatctggacatggatgcctgttttttccagtggtctatatttcatctatatttcatcttccatgtattaattatttttggtgttaaaattgctctggattggcctgtaggatctccttcaagctggctcctgtgtcccttcagcatgcctctgtcattttttttgagcactttcttccttttggcataacagggtgcttcgcgctcatcttttaatcttccctgccccatgctggaatcagcttgact

SEQ ID NO: 9487 - DNA, 1082 bp, Homo sapiens
ctaagcagatttttatcaaagatagagaaaatgatcttaattctgagatatttggaaaatactatcagaaagaaaacaatgaatctctcagatttaattcagtgagtaaaaatctactggaatcaagaactaagaaataaaatataaacacaggattgccctgaggaaaaaagtttgaatttaacaaagtaattccttgtagacactaaaccaatgtaaagcaagcaaccaagggctttgatgccactgcctttaaataaacacatgatttcataaatggaaaaaaagctaaactgattaccttgaaaaatgagtaaataaatattagagcaaatccatagatgtattagctcgttcttgcactgctgtaaagaactacctgagactgggtaatttataaagagaaggtgtctaattggctcacagtttagcaggctgtacaggaagtatggttgggaggccgcaggaaacttacaattgtggcagaaggcaaagcaggcatttcttcacatggccagagcaagaggaagagagagagcgggaggtgctactcacttttaaacaactagatctcatgagaacttactatcatgagaacagcaagggggaaatctgcccctatgatccaatcccctcccaccaggtccctcctccaacactggggattacaattccacatgagatttgggcggggacacagacccaaaccacatcaataggatactaagaaacaccagtaatttcccccgaggatgctgcgaaacaagttccttggccattcctttagctataaagtcccagttattaaggacattaaggttccattttatttttgcatttttgtgtgtatgcgtgtgtgtgtaacttaaagcttcagggtaaaagttgatgaatcttaaaatttttagtatttagctctaaaattttattctccaaaacacatcaatatttagcaaaggttctattttattttcccaaagttagatggcactagagttttgttattcaaaatccattcatctccatttattaggctttcagattctgagaacttcttcggcttcctctgccagcttgtctac

SEQ ID NO: 9488 - DNA, 1188 bp, Homo sapiens
aagtttgcagtgctaattgtgtccttttctcctgcagcgcctacataaacctcaccatatttggaagattcctactccatttgcaagtcatgcttttcaccctattgatggctttcttcagagtctaccttaccatatatacccttttatctttccattacacaaggtggtttatttaagtctgtacatcttggttaatatctggacaatttccattcatgacggtgattttcgtgtcccccaaatcttacagccatttattaatggctcagctcatcatacagaccaccatatgttctttgactataattatggacaatatttcactttgtgggataggattggcggctcattcaaaaatccttcatcctttgaggggaagggaccgctcagttatgtgaaggagatgacagagggaaagcgcagcagccattcaggaaatggctgtaagaatgaaaaattattcaatggagagtttacaaagactgaatagattattgcccagttattcttaagtaaggacaaagaaggaaatatcatcgtatttcttttttttaataaggaaaaaataatatccatacagtcaagatacatagtaaatggtatcatttggaaatcagcatcgtgggcactgctgaggaatgatcctagtggtaggtcagaagaagatgctgtgaacaccaggactttaatcttatgcttaaaatgccagatgttgttcgggggacaacttgtatctttctagcagcagatctgtagtttgtatagcctcaacaacaattttaaataagatggagaataaattattgaggggactaggctatatgcatttgccttcatccacccatgtttattaagaatcattgtgcttaataataccaagactaagcaccataaccaagaaatactaatgtaaagattgtttcttgtttcaggaatggttaattcttcaacgttggtatgataatgataacttgttttgacttgaataaagtactacatcagtgtggaaaaaaattctgatacattagcagctatgtaaatgacctaattgatagcaggtgtaataagactatcgtcttcctacacataggaggctcattctctggacacactatcacctattacattttactgattaacaaataaattggaatttaaaaatatcgatatcaccatgatttaatc

SEQ ID NO: 9489 - DNA, 1047 bp, Homo sapiens
tttcttaaacatttgataagagatttaatattttgatccaactaccaaaaaagcagacttgtgtacttgacagatttttctaaacacttcacaactcacgattcaaacaaagacaaaatagcatatcaaaagttaatcactcagttggaaagcactcataccataggcttttattcatttcttgaataattttgttatatcttcctcttttaggctgcaatgagctataattgcactactgcactccacgctgggtgacagagcaagaccctatctctaaaaataaaaaagtatatatatataaaaatatcttcctctattataatttaactcattaagccatttatttagatgtaaacttgcccccctgacatgtggtatgaaacaaatagaaacctagaaatttagtgcatattcaaatattaagacagacactggtgtggtgacttttgtctgtcgcttcattgggacgttttttctttctgatcaacttaatgaaattataatttactataattaagtgtagccatttttactgtagagttcaatgatctttgatgaacgtgtacacccatgtaaccaccacccccaatcaaagtaaagaacattttcttaccagaataaatttcctctccgtttgcagtcattctccccagccctaggtcaccactgatccaccttctgttactggaaggttagttttcttccctgatttagaatttcatataaattaaatcagatagtatatactcttgtgtttagtttctttagcttaacatgtttagagatatttgctgttgcctgtgtctgtagctttttgttttcattgctgaatagtatttcattgtaatataccacagttggtttatgtatttgctgatgaatatttgtgttatttccagcgtgggattattatgaataaagttgctacaaacatttgtatacaagtctttgtgtggctatatgttgttatttctcgttggtaaatatctattagatttgctgggtcatagggaagagatatatatgtatacgtttaattttata

SEQ ID NO: 9490 - DNA, 1022 bp, Homo sapiens
tagtccaagttctaccatcataccatttccttatctaatatccatggagtgtctagtgtctgttgcaaaccgggtatctaagatgaagcagtacaacccaaactgcccagtgatggcagacattgcaaaaacatgaatttgcaatcacagtctctattttgtgtttccagtagaactggaagaatctgactcttctatttttatttttgctgcttttgaatgactgtaatgtggcaccattaatttttttttctcctcttccttggcagcatctcttgggcagtgaacagcagtcttctgtccagctctgggtctcctttggccggaagcccatgagagcagcccagtttgtcacaagacatcctattaatgtgagtggggtctgcttgaggatgggaagaagtatcattgtctttatgcagaggtcagaggaaggttgttgcagggatggcctgctggagtggatattttatggcgcctccctgaagtcaggtctctagagagtgcagctatgctttgggcatcgtggtctgtggttcccacttcactgaagcagagctgaacgagagacttagtttgctttaagtggagcagcactggcagagagaggttcgagccagagtcagtgccatctgagcaacgtgccagtactgaagcaatgggaagtttgtgcatgataggatctttttttattaagtaactgctggattgcttgcaggggatgaattccagcagaggataggatttgggtcccaccttttagaaacaggctggagagactaaaaactgagtagcagaagaaaccagacataagcaaatgcttaaatatgcagctttataacatgaagatggataggaaaagtctgcatgggatgggtcattagaggagctgccacagggagacggtcacagtgaaacgtcttgacattggcaggtggtttggtgaaaggtaagtagctcacttacttaccttccaccaaatgagtgggatcatacggagaacagtcatgccagtcctttgc

SEQ ID NO: 9491 - DNA, 1050 bp, Homo sapiens
agtccgcatcaggcttggagaagcaagagatgaccagcctggctgacgggaaggagcaagaatatgagtcccacctgtggactcttcattgcaaggctgtgacattgagaatttgttttatgggagtgtggagtcatcgattgccttggaacgtggagtgacacgggatggtgaaataagtaaatgctcatttgcttatttacttatttgagtaatttacttattgatactgctttgtccagatcatcatgccctggaaactggggcttacatggttctagctcctctttcagaccacttgaaaattgtcccatgagtcagaggaaggaacagcgcattgtgactagaagttggggcaggtttcgcagatgggtcaggtcagggaaataggcaggcatggagggggcatgtctgtagcagaagctgagtagccatctttggcaatgggggtctttaaggagctccgatccatctcagcctcttttccccctgtttttgtcaggtagctaatccagatggcgacttccgactcacaatcgtcaattcctctgtgcttgatcgtcccagggctctggtcctcgtgccccaagaggggtaagtgttgccccaaaaggaaatcagtcttgcgtccaatgctacactaatagattctcatggaaacacagactgcgggacaaaaactctgtttctcatgatggtggttgaaatggtctattaactgagaagtttgagaccacagcttagtcatcgtggtcaggtaactccgttcgctttttgttagccagtgtcagagtctctttaggcatccagatgtcttgcatctgtgggttgtttctctagaaaagttgatgttaaaagagagcttctgtagacatagacaggcctgcttggatattgtgagaactttctcttgagtttcatgcatggtacaaacatttaattcattccatctttcccctgccttcccagcatgtgtaggttttcttacgtacaatcagtgtgcacttggggaaggcaaaggtgctttttattaactcattaactgaagga

SEQ ID NO: 9492 - DNA, 1060 bp, Homo sapiens
gtctctctctgtcactcaggctggagtgcaatgacacgatcttggctcactgcaacctccgcctcccaagttcaagtgattctcctgcctcagccccctgagtagctgggattacaggcacccaccaccacagccggctaatttttgtatttttagtagagatggggtttcaccatgttggccaggctggtctcgaactcctgacctcaagtgatccatccgcctcggcctcccaaagtgctgggattacaggcgtgagccaccatgcccaaccaattattttaaccatttaaaaatgtgaaaaccatcttagctcacaggctgtacaaaagcaggaggtgggctggtttggcccctgggctgtagtttgctggctcttgatctgtgggtttctgtatcttcagcttcaaataaaacctcctgaactatatgcttcagagagtgattgtgaaaatcaaaggcacggggaaggacacctacactaagtccttattttcagatcaggaaatagagactcagagtgggacagtgacttgctgagagtagcacagcttgttactggttaggacttcaatgcaggtctgctgccttcctatcaagtgctctccctttatttttgtttttgaaacggagtttcgctcttgttgcccaggctggagtgcaatggcgcgatcttggctcaccgcaacctctgacacctgggttcaagcgattctcctgcctcagccttctgagtagctgggattacaggcatgtgccaccatgcctggctaattttgtatttttagtagagacggagtttctccatgttggtcaggctggtcttgaactcccgacctcaagtgatccacccgcctcagcctcccaaagtgctgggattacaggcgtgagccaccgtgcctgtctgtgctcttcctttattctatgcataactgatttgaaaggagaaccagagtcctgtcttttctcctctacaacagagcagagtaaaggatgcgtaaaaggcaaattaaccttttttctgatatgttgcaaatggttagttaagggctttttaatg

SEQ ID NO: 9493 - DNA, 1027 bp, Homo sapiens
ctcccgataggtgacccacctgcatgctttaaatgactgggggagcacgtatatcacagcattacgattatttgctctgtgtttgttttctgtctcagctgagctccttgaggccagagactttgttttgtctatcactgaagttcccagagcctggcacgggacctcgtccttcttagatgttcaacatgtgtgggatggatgaacggatgggtgggtgggcagacggataattagatgaaggctccgtgcccgcccttgtgtcatgaaagatatacactacaaagatggcaacctaggactgagctaaggcccagggaccatgcaaaggatagtgtttcaacagtggctggcattgagtagggcagcttttacgtttttataaataacctgaaaaaggaagttcagactgaaactcacacgtctatgggtgacacagagctctttcggtagggaggttccatgccaaaagggtagaggaggggaggatcccctaagatatgagtgggcggacaagtggaaggttgcttcagcgtgaacaaactcaaaccactgtattgacgcggaagttatctgaggtataagatggtgcctccgggtgattaagtttgacaagaaagcgtcacttcattcaatcaataaattaaacacctactatgtgctgggctttgtgctcaggcctttacctcctacccttgaagatctcagagtctaatggagaagaatgcttccaatgtagtgggaaaaatagacatagaaggaaataattagagataagactggaagggctaatagaagaatggtagagagtgctatgagacttccgaagagagctgctctgctatctgtggtggggaagtcgggaggatttattcattctgtacttatttcatgaatagttcagggcatttaccgtgtgctcagttttgaaggcaccaagttaaacagatatggagtcttatctccaaagagcttacagtccactgggagtgatggataggtaaagtgtgggaggggccgtgagggg

SEQ ID NO: 9494 - DNA, 1044 bp, Homo sapiens
ttctttttcttttttttttttatggatatatagtctctctctgtcactcaggctggagtgcagtggcgtgatcttggctcactgcaacctctgcttcccgggttcaagtgattctcctgcctcagcctcccaagtagctgggattataggcgtccgccaccatgtctggctaatttttgtatttttagtagagatggggtttcactatgttggtcaggctggtctcaaactccagtcctcaagtgatctgcccgcctcagcctcccaaagtgctgggattacaggcatgagccactgcgcccagcctgatttttttctaattgataaaaattatatacatttatggcgtataacatgatggttgaatatatgtatgcattgtggagtgcctaaatcaagctaattgtacatgcattacctcgcatgcttatcaggcatttgtggtgagaacacttaaactctactctcttagtaattttcaagcatataatatgttatgatgaactatagtcactgtgctgtacaataggtctcttgaacttatttctcctaagtgaagttttacgtcctttgaccaatatctccccaatctcgctcccctttcttgctttcggctcaaccagtcctgcagcattttggctgggttcacgggggccacttcacagcaaggaaaggagggaagaggtcatgtgttccccacattaatccaccagttgggtaatctgtgtctgaataattggaagtctgcagttcctctctccccacagacaggggtagtggttaagtaattgcattatcagcctcctccagtctctggggagaggatgccaatgttaagtagcagcagacttccatctccccttgtctctgagtgaagactgcctgttttccctgccagtgcgaggacagcaaggtggatgccctgggggaagccctgcagaccacggtcagtcgctggaaatgtaagttctcggccccgctgcccctggagctctatacgtcgtccaacttcatcggcctctttgtaaaggaagacagtgcgga

SEQ ID NO: 9495 - DNA, 1050 bp, Homo sapiens
ctttttacatgctgttccctcagcctggcatagacttcctgcccttctcagccttagttctgagtcacgccagcacttcctccagaaggctttccctgacctcccaagataggactggatgtccctctgtgtccctatggcccggtgctcctcatcagagcacagatcactccaaagtgtcaattactgtttcctggtctgtatcccctactaggctgtgtgtccgctgcttcaccatctaccactattcctgtagcttcgtaagggctcgataaataaatacctgctgaatcaatgaatgagcaaattgaattaagaaagttaaattcagtttttttctttcatcacagcataaatatgggaaaatagcacctttctttacaaaaaaaaatctgtatttacttgaagacaataattgagctttcttccccacctgaacaaccacagttgaaacttatgtttaattcagcacaagataagccctaaaaatcattccctaatttggtctaatgcaagaagcctttacatgtttagattcgaatttattactattgatttttaaaaataaatatttatgctgtatttgtgttgactagaatatttttagaaaaggagttatttattcaagaagtatttattgactcttctgtccatagcacagtgcagcatactagggcagaagttaggaaacgaaagatcacttgcagtccccgctgcctgggaatttgtctagtgaggagacaagattatcacagtgaaaaattaagtaagcacaaacatagagcactttaagacacattctctcatgttgatcctcattcagtcctgagaaataaaacaaatagaatttatcccgatttatagatgagaaaaactgaatcagagatgactgatttgccaaccaatgcagaacaggtagtgacagatggagaacgtgagcccaggtctgtgccctgccggacactgctggaccccatgtcccatatccctgccccatgatgcttaagggtcaagtgaaaggcagggacaggaaacactgtgagttcctag

SEQ ID NO: 9496 - DNA, 1035 bp, Homo sapiens
gctatgaacctttcagtgagccgtgatctggtctgatttgaagcctcggggatctttctgtagtacattagatacacgctacaaagacaaaatgaagtgaaaagcaaaatcactgaaaagaagaatgaatctacgtaggtatgcagtcaagataaaaccgtgctttcccccaaaaaggagcagtctgaagcaaatgttgtctaggcaacaattcacagttctctttctaaacagcagatgtctatacagtcatgcattgcctgatgacaggggtacgttctgagaaatttttggttaggtgatttcatcattgtgggaacatcatagagtgcacttacacaaacctagatagtacagcctactacacacaatttgtgcaatgtgttactatactaaacactgtagggaattataataccttggtaagtatttgtgcatctaaacatagaaaaggtacagtaaaaataaagcataaaagttttttaaatggtacacctatataggcactcaccatgaatggaggttgtaggactgtacatttctctgggtgaggcagtgcgtgagcaggagtgaatttcaaggcctaggacattactgtaagctactgtggacttcagaaacactgtacacttagactcctctaaatttatttttaaaaatatttcttcattaataaattgaccttagctactgtaacttttttattttatatacttttaatttttttttttactttttaactcttttgtaataacacagcttaaaacacaaatacattgtacagctgtataaaaattctttatatccttattctgtaagtaagcttttttctattaaaaaattttttttggctgggcgcggtggctcacgcctgtaatcccagcacttttggaggctgaggcaggcagatcacgaggtcaggagatcgagaccatcctggctaacacggtgaaaccctgtctctactaaaaatacaaaaaattagccaggcgcggtggcaggtgcctgtagtcccagctactcgggaggctgagg

SEQ ID NO: 9497 - DNA, 1001 bp, Homo sapiens
caggcattactctgagttgtccaatgagcagatccatggatagaggcagaagagctgggttttggtcctcaagccattgctgccttcccaggtgacctcctgcagctcagtttccctctgtgtggaatgaacttagcctcccaggcctgctaatgagctgcaatgattgccagatcaaagggtgtttgggaacatttccagccttaccagtgaggtggagaaaaagcaggcaaagcaaggtgatttagaaaatgccactttacctgttgaaccaaagagccagaagtggaactcacagaaatacaactgagattaccccgaggtgcacagtaaatagtacaattcatttctcacctaggccaccaactcttgtccctaggagaatccagattgcatccaaattttgttctgatttccttccatctgtgataacttcgttgttctgaaatacaacgatggtttttcatatcattggtcgtggttgtagcccgtgcgagaataatgatgtatgctttccctggaaatcagctagatccagagttcccaaatggtggtctatggaccaatgctgacacatgacaaggtttttattaattaaatgagaacaataaggacactgtaaagaatctctcgagtttaatttatttcatttaaagggcttttcttctgagatgatagtgttggaatgtaagctccaagagggtaaggactttgatgatattcttgttctctgttttccaatacccagaagaatacctgtatgtaagaggcactcaatcaatatttgttgaatgaatgaaggaaaaattatttcctttctattttcctggattaaaatatcctttttttaatgaaatggtattgaaagtaaatggtaggaggttttgaaaactttttttctatggaaaaataaaagtatataattatttttaaaaggttattgatctttaatgtctaagtttgagaatttctagaccagatgatccattaaggaccatttc

SEQ ID NO: 9498 - DNA, 1045 bp, Homo sapiens
taaaaccacaagtcaatctagaaaagttggtggtgtgtagtttggtaaataagttcagcctttgacatgaagattaacctggtttgacattgattgattgatttgacatgcagatgacctgagattggtgctcctgtcagtcttaaaaacaaacaaacaaaaatccctaagctttgaacttgacctagttgtttaccacatgtgtgattccaggctagcttcctgtctgtaaaataagggtaattgtaatgcttccctttcctattgcacagaaatgtgacgataacgtaagccattctacattctaactatgtgtgtgttggggagggaggggggagggatcatgtctgttttgcttcctttatttccatattgtttggaagatgctcattaatacttgacttaatgaactgtcaggtgggataacccttccctgttcctccgtttggagggcagatagaacatgatgactggagatgcatgaaatgtgactaatgtctctgtgtaatcaggacttgcaacaccctgattgctcctatctgattctttctgaacaaaacaaaacaaaagaaaaacttgacttaatgaataaatggtggagttgggtgatttccacatcattgatgtccaagctttagcgtgcatcaggatcacccgagggtcttgttcagactcgactgccaagacccacctagagagtttttggttcaggaagcctggggtgaggcccaagaacctgcatctaacgacttcccggtgtgctgtggcgcagcgggcagggacggaggcgcccaggggcaggcggcagcacgggaagaggccagcaggtggcgcggtcgcccaacccggccgccccccgggcgccgagggaagcgggtcaggggcgtccccacctgcccaagcgccggctctcccaggcagcaggggcggcggcggcctggctggctgcgctgcagagcggagagcaggagcggcgtgggaggaattcggagcactttcgccgcctgcctccttttactgctggttgccctcaaaggagccctct

SEQ ID NO: 9499 - DNA, 1766 bp, Homo sapiens
gggaggctgaggcaagagaatcgcttgaacctgggtacaggggctgcagtgagccaagactgtgccactgcactccagcctgggccacagagtgagactctgtctcaaaaaaaaaaaaaaaaattgaagacctgtgggagccattggaaaacatactgtgctgtgtggtactgattgtactagaaaagagagagttctggagaagtagaggaagacttcttgaaggaagaggctgacaccatgacaaatacagatgggtagtagaaaacagcaggaaaagaatgaggttgggtgcataagactggctgaagggaacaatatgaagaatggcaggagaaacaggatgagccatgtgtctttgcggggtggggactgaggagtaggatccgttatgcagaagatgggcattttgggccttccagagtttatcttttctgtttgcaacaactgagcatggttctctcagcaggtgcagatacagagctttgttccgtggatttttgtggacgctggggatagaagttctttctgtttggtacttcatcctgctacccttttcacagagtagagggaaatggggcaagcttggtgggagctaaccttgaactaaagtagtttgtcaggccaggggcggtggctaatgcctgtaatcccagcactttgggaggctgaggcgggagggtcacctgaggtgaggcgggagggtcacctgaggtcaggagttcgagaccagcttggccaacatggtgaaaccctgtctctactaaaaatacaaaaaattagccaggtgtagtagcgggtgcctgtaatcccagctactcgggaggccaaggcgggagaattgcttgaacccgggaggtggaggttgcagtgagccaagatcgcgccattgcactccagcctgggcaacaagagcgaaacttcatcttaaatgaataaataaataaagtagtttgtcatggcttgtcggcttttccctccaatgtaaaagaaactaaaagagaccttcttttgatcttgagattctgccatatatactgaggacaaaatatggtaaaaagagccgggtgcaatggcatggcctgtattcccagctacttgggttgtggtgtgaggatcacatgagcccaagagttcaaggctttagtaggctataatggtgcctgtgaataaccactgcatttcagccatggtgagacccccacccccaacgcttaaaatgttacgtgcgtgtgtgtgtgtgtgtgtgtgtgtgtgtgtgtgtctttgtgtgtatgaagaaaaaaatcttgcattgctggctaggatggggatgacagtagatttggttagatttaggaaggtattcctggtttcgagagttgtctatgtgtgtagtggaaccttcattttgttggatttggggacatatccttaaaatttggcaggattttcatctagatgtagttcaggcagttattttaagtggtgacttttggattagaagaacctatgtatcagccgggcgcagtggctcacgcctgtaatcctagcactttgggaggatgaggcaggcagattgcctgagctcaggagttagccaccaacttgggcaacacggagaaacaccgtctctactaaaaatacaaaaattagccaggtgtggtggtggacacctgtagtcccagctactcgggaggctgaggcaggagaattgcttgaacctaggaggtggaggttgcagtgagccgagatctcgccactgcactccagcctgggcaacagag

SEQ ID NO: 9500 - DNA, 1071 bp, Homo sapiens
aaaaagagaaaaaaattagccaggcatggtggcatatacctgcagtcccagctacttcagaggcagaagtgggaagattacttgagcctgggaggttgaggcttcagtgagccatgaccacgccactgcactccagcctgggcaacagagtgagaccctatctgaaaagagagagagaaaaaaaagtcaacatgctatttggaggggagaaatatcccgactatatcaagggcatgtttggtgtattatctcctggtgttttttctcattcagattttccttttatttgagagacttttttcttctgtgccttgcacttctagaaggtaagggagagtgttagtccatgcgttgaggatagagaatttgaaaggaaagatcaaactgttttttctttctcacagtcaacacagaacatttctgtgaccagatatgtggggttttctccccacacaccaagaagttctccagtggacacaaactgggtgtcttataattcaatttaattctggcaccttctgcctggagatggtgtcagattccacaggttcagggctcagtcctctaagattgcccccacttcagatgccaatcacaagttagagctacctgtactttttctttttttattttttctctatctgcatgttgcatctgagatctatacttctgaccaaccaactataaaccagagttcccgactcccttttagggttcgattaatttactagagctgttaccagaaaggggtcccattccagacccaaagagagtgttcttggatcttgcacaggaaagaattcagggcgagtacacaatgcaaagtgaaagcaagtttattaagaaagtaaaggaaggctgggcgcggtggctcatgcctataatcccagcactttgggaggccaaggtgggaggatcacttgaggtccagagttcaagaccagtctggccaacatggcaaaaccccgtctctactaaaaatacaaaaattagccaagtgtggtggcaggcacctgtagtctcagctactcaggaagttgaggtgggagaattgcttgaacctgggaggtg

SEQ ID NO: 9501 - DNA, 1052 bp, Homo sapiens
atccacctgcctctgtctcccaaagtgttgggattacaggcgtgagccactgcacccagcctgattgtgcatttgtaaagtcaatttacttagtgttactcaaccctcaaccttagtttcctcctttgtaaaaatttgatgtccattggattttcttgtaaagaatacatgagaaaacattcgtaaagagccattaagtggatgcttaataaatggtagctgcttgcactctgattctggctatcataacattttactctcagtttcctaccagatcttacacccttctgttcttgacaaagcagagacaaagccgggcaccgtggctcacccctgcaatcccagcacttggggaggccgacgtgggtggattgcctgagctcaggagtttgagaccagcctgagaaacatggcaaaagcccgtctttatcaaaactacaaaaaattagccgggcatggtggcatgcgcctgtggtcccagctacttgggaggctgaggtacaagatcccttgagcatgggaggcgaaggttgtaatgagcctagactgtgctactgcagtccagcctgggtgacagagtgagaccctgtctcaaaaaagaaaaaaaaaaaaaaacaaaaagaaaaagcaaaggcagaaagaaagtgtagaatattgagcatctgcaaatgtcacatatttagactccagataaatagattaagttgtggtatttcccctcaagaagctgattctcttatggtgtgatatacttacaaataaacaagtataatataatgtaataaatgacttaagaaattatgcgtaaggtaataaaactgaagaattttacaagctgggtgtggtggctcatgcctgtaatcccagcaatcggggaagccgatgggggtggatccctttgaggcccggagtctgagaccagccgccaacatggcaaaaccctgtctctactaaaaatacaaagattagctgggtgtggtggtgtgcgcctgtagtcccagctactcaggaggctaaggctggagaatcacttgagtccaggaggcagagag

SEQ ID NO: 9502 - DNA, 1008 bp, Homo sapiens
actgagaagtttgctgccagatgtattggagttcaattgtatgttgtttcttttctctcgctgcttttaggatccttttttaaaatccttggcctttgggaatttgactactaaatgcctaagctagtcttctttgggttaactctgcttggtgctctataaccttcttgtacttcaatattgatatctttctctaggtttgagaagttctgatatcatccctttgaataagctttctacccctatctctttctgtaaggccaataactcttagatttacccttttgaggctgttttctagatctcgtaggcatgcttcattgttttttattcttttgtcgcctctaactgtattttcatatttcatatagtctgtcttctagttcaccaattcttccttctgcttgaccagttctgctattaagagagtctgatgcattcttcagcatgctagttgcattttccacctctagaatttctgcttaattcattttaataatttcaatctctttgttaaatttatctcatagaattctgaattccttctctgtgctatgttaaatttctgaatttcttcaaaacagctattttgaattctccgtctgaaaagtcacatatctctgtttctccaggactggtccttggtgccttatttagtttgtttgacgaggtcatgttttcctagatgtggtgttgatgcttgtagatgttctttggtgtctgtgcattgaagagttaggcatttattgtagtcttcacagtcttggcttgtttgtgcttattctttttgtgaaggcttttcaggtatttgaaggcatttggcccccaaaccaaataatgttgtggttcttgtctactcatggaggtgccactttggtggtcttggagaacatcaagaagaattctcttgattgccatgcagagactcttgttctcttcccttactttctcccaaacaaatgcagtttctcactgtggttagcctcctggaactgagagtagggaaac

SEQ ID NO: 9503 - DNA, 1028 bp, Homo sapiens
gttaatttttgtatttttaatagagacaagatttcaccatgttgaccaggctggtcttgaactcctgacctcaaataatccacccgcctgagcctcctggagtgctgggtttactggcgtgagccactgtgcctggcctcagcctatgttttaaatcttataaactcatagcaatttttttaaatctaggtacagattattcagattttacaagtgaataaactaaagcacagaggagccaagtactccaagcaaggtcacacagctcaaaagtgtttgagctggtagtctgactttagagtccatgctcttaactaccacaattacaaagcaactggaagacaggtctttgtctatgagaagacatgagactaatacgaaaagtttgaggaatagtaatttatgaagacagcatttaatggtttgaattacagatgacccttgaccaacttggtgcttaggggcaccaacgcccatgcagtcaaatctgtgtgtagcttttgacttcacaacatcttaactactaattgcctactgttgaccagaagccttactgataacacagtcaattaacacatttttggtattatgcattatatactgtattcttgcaataaagtaagtagagaaaagaaaatgttaagaaagtcataagagaatatatttactactcattaagtggaagcagattgtcataaaggccttcatccttattgtgttcacattgagtaggctgagaaggagaaagaggaggggttggtcttgctgtctcagaggcgacagaggtgaaagaagatttgcacgtatttggacttgcacagttcaaatccatgttgttcaggggtcacttgtacaattgccaaagatgtgcaagaacagagatggagaggtagtaatgggcaaaagaaattgagaagggctgaatgaaggagatgggatgtgggttgatccttggagaatggagtccactgagatttcaagagagacgagcaggcctggcgcagtggctcatgcttgtaatcccagca

SEQ ID NO: 9504 - DNA, 1050 bp, Homo sapiens
ctcaacctgtccttgaaacatatcacggcaagtgcagtagaagatatgaacctgtttgaggcatagatccttcctggaggtgtccttcagacagagtgagacatgctacaccatgaatggagagctgcgtctgcatccgtggggtgtccatctagagagggttgtaggagtttgttaggggagggtttgcaggaggagtcagactcttctactttctccaacactgtttacctgggagaatccaggttcctttaaattagcgtctttggaatctactttttttgagagtctctctctgccgcccaggctggagtgcagtggtgcgatctccgctcactgcaacctccacctctgaggttcgagcaattctcctgcctcagcctcctgagtagctgggattacagacacctgccaccatgtgtggctaatttttatatatatatatatatatatatttgtagtagagacggggtttcactatgttggccaggctggtctcacactcctgacctaaagtgatccgtccgaattggcttcccaaagtgctgggattacaagcacgagccactgtgcccagcctggaatctacgtttttacatgtgttcactgggccattttgaagtacagtaaagtttgggggctgctgtattaaattaccaagactcctaagacaaaagcaccattcctaatcctatgcgggccaagaccctcctggcaaggtggcagagctggggagagtgagggagcagccccatttgttttaagggtctgacttttcctgggaatccacatcttccccaccccactgctgtctcatccctgtccctagcttcttggtctggaggctttcttgccccattggcctggctttcatttccctggattttgctgctttgaggaccaaaatctgtgcttttagtattgctactttgacctgaagatctgacggtctttttgggcttggtccccctcttgctaatgctgaaggttgtatagggtccatgggaaggaagagggtgcctcagacagatcccgaagctgttgatctca

SEQ ID NO: 9505 - DNA, 1048 bp, Homo sapiens
aaatgagaacactgaagcccagagagatgatttgcccaagggtactgtgtcagagccctgactccaacttagataaacctgattccgttttatgacttccagtacacagactattttctgagcacctcaaatccccataactgaccctttgcccaaagaggtacatgaaactgtcagtaatttcccccctctaacctttgagtgttccaagtgtttcttcctttcttttattgtagaagcactggatttattgagtgaataaacttaatatagcttgccagccataactttatattagaatagtttggcttgcctcagtgcttggaaataggggtggagtcctcaaatgtccccccacatccaagtcaacagttcatctcttctctctaccaaaagcttgaacgtctctcagcatttttggaagcataaggaaaggttcagaaattagaatacacattccaaaagcacttattcagcacttgctatgtgtattgcttgctatttgcactggagagaaacaagaaaagtaaaactaagagaacttagcatctgattgactgttccctttcttttatcccctatacgtcaaaggtacctaaagcttggaatttatgttatttcaaggatattggttccatcaaatacataatgaagattttgtgaagaaaaagcgatgttgttttgaacattgagagtttgaagttccacctatgggggcattcagattcagcattcccttcaggattggtgcttgggagatagattgagtcatcatttacaaaaaaaaaaaaaaaaaaaagaaaaaagataatacttgaattcgtataagtagattgtgaagtttaagaattttacacactaaatttgattttgttctgtccagtttttctctatttgggttagactggctttgtaagtttttcaagagttgaggcacttgggaatagacagttttcatatttatagtatttaatttaagcatataaggatttaagcagtatgcctttttctttgccaaaggctatactaattagggtgaccattaatc

SEQ ID NO: 9506 - DNA, 1066 bp, Homo sapiens
tctaccttttgtctgtataggtttacctatactggacatttcatatgaaaggaattatatgatatatcgtcttttgtgactgttttttctctttgcataatgttttaaagttcatccacattgtagtggatgtatcagtacttcattctttttattgctgaataatttattgtatagatgtaccacatttggtttatccatttatcagttagtagactttggcgttcttttcacttcttggtgtttatgaattatgaacgattgtgtatgagcagttgtgtacacatttttgtgtggacattcatttcttttaggacattcatttctaggagtgaacctgctggatcatatagtaattctatgtttaacatttcaaagaactgctaaacagttttccaccagcaatatgtgagggttccaatttctctgtatcctccaacacttattattgtccttctcttctgttatagctatcctagtagatgtgaattggtatctcactgtccttttgatttgtagtatattttcctgatgactaatgatcttcagtatcttttcatgtgcttgttgcccagttgtgtaactcttgtggataaaatgtcatgcatgtgctttacccattttttaattgggttgtctttttattatcaaattgttaagtgtttatatatatataaatttatacataaaatgtatatatataatatgtatatattctggatacaagttccttatcagatagttgatttgcaagtattttctcccattctgtagactgttatcttacttgattaatagtattgtttatggcataagatttttaaattagtcacttctttttttcttatgttgcttgtgcttttgatgaattatctaataataattgtttatcttgagatcatgaagatttattcctatgtgttcttttaagattttatagtttttagctcttaattttaggtctgtgatccatttcgagttaatttttatgtatgctgtaaataagtggttcatcttcattcttttgaatataggtgtctagttgtctcagcatcacctgttgaaa

SEQ ID NO: 9507 - DNA, 1038 bp, Homo sapiens
attatgctgaaagcccagagtattgagctagaagaagggagtattgtgttgaaaacccaggattttctacccacaaatcaggctcttctaacgaaaaaccaggatgttttactcaaagaccactgtgttctccctaaagaccagagtattctactcaaatatcaggaccaggacttcctacccagagaccagcatgttctccacaaagaccaagatattctgccaaaatatcaggaccagaattttctacctaaggaccagaattttttatctagagaccagcatgttctccccaaagaccaagatattctgccaaaatatcaggaccagaattttctacctaaggaccagaattttttgtctagagaccagcatgttctccccaaagaccagaatattctacctaaatatcaaggccaggattttctacctaaagaccaggactttttatctagagaccagcatgttctccccaaagactggaatattctacccaaatgtcaggaccaggattttctacccagagaccaaggtgttcttcccaaagaccaaaatattctacccatatgtcaggaccaggattttctacccagagaccaaggttatcttcctaaagaccaaaatattctacccatatgtcaggaccgggattttctacccagagacctgcatgttctctccaacgaccagaatattctacccaaatgtcaggaccaagattttctaccaaaatatcaggtaaaatagagcagaaaggagatacaaaaagaagaaataagctacttagggtttgaggagggatttgtaaggactgcaagtataccttggagatactgtgggttcagttccaggccattgcaataaagcaaatattggaataaagtaagtcacacaaatttcttggcttcccagtacatataaaagttatgtttatattgtactgtagtttattagtgtgcaatagcataatgcctaaaaaaagtacataccttaatttaaaaatactttattgctaaaaaatgcttacgattatctgag

SEQ ID NO: 9508 - DNA, 1041 bp, Homo sapiens
aatttggccttttgagttattgcctaagagaggttttctatgtccctaggttatgatgacattaacatttgatttacatttggctatttgatcttattcagtgctccatcctacactgagcctacttatgactaaaaccagatttttgttttgtaggtggaggagcaaaggaagagtttgccagatggatgggtgtgccatttagattgcaaattagcatgccttctttattgctaaacctgaggattaggtgatgcctgtgtttaaatccttcctggttcaaagctgtaggtacccacatccaacaagttacacccatcttatcacattgccagaattgagttatggttcagctggaggaagaggacatgtctgtccttttttgccaggtgggcacagtgttttctctaatgagttcaaagcatttggcatacacatgatcaataccactttttctttcacacattaggacattacatcctacacataaaacgtgactgtgatacagctctgtcttttagggcttagagtgttttctcacatggctgtaactccttgttcttaccttataagtaacttgggtcagggatggtagataaggggggatctgaaacagagctaagactaagaggaggatgacaaagatacaaggcaaggaccaggactgagctaagattaacaatggaaaacagagcttgaagtggagcaagattggaacttgagccaacacaataggaatcagtagttaactagacatgggtctctgaaaactgtggagaggtgattttaactagtctaatagacttacatacagtggctcacattggaaaaatccattcatcaaggaatgtaatctgacacaggtaaaccataatagctggagactgagttaatgctctgtgaatatgtatttttatatgtattacattttctgaacccctgacctacctcttccttttcactattagcaaaatagaaatgtagagatgaatagctgttaatacagcttagtttgactccagaagtaggatataattggat

SEQ ID NO: 9509 - DNA, 1071 bp, Homo sapiens
tcaactgcaacaaccatgaaatagagttgatactaaagtttctgttaaataacagaacaaaaaatggattgctttatgttagaataaaaacatttaaaaataaattggatgccctccttccaggaagcagtgaggaagacagtctagacaccttacagcctagttcttccatgggcttactccaccaggactagtgctttacaccctacgggcacacaatatatgctgaatgaatggcaggattcgagaatgaatggctatgtactccctagtccctggacattggtatggtaattctgatgcagttttacattaaatttacattgtacacaaagaatggtagctttacttccatttttatcagtgaaaaatttaaggaacttaacaaattacccattgtgatctccattgtggggatagggtggtatcctcctaattcagcttttgtcaggatacaattttaagacgccacgaaataacctattttcttatatagaaacccagatttactctccctctccaccttctaaacagtggggatcaccagtctgccacaggatcccctctgggtagggaacagtagagggaacatgttctaaggccactgatcacagaatggttctgaacactaagatgacttctgtctgtatttaaggaatgacctctgagccctgtctccaagaaggccatgagcatacagggtaccataacagacattgactatagggttatcccatgccaaactctcagtgaaatccattttgagccctctcagccttctacgtcttatcccaaccctgcggggctttttttgcataactgcattgagtatgcaggtagaaagaaatctatcattcatttcaccacagctggtaattatagactccaggtctgtagactgtaggtcaagtcaagctgaaataaactttgcacagggtatttttttttttttcctaaagccaatctttaacatatatgcctttcatttacatcaggcaaaaaaacaaaaattagaaaacagtagtattaaggatagaatttagtttccaaccttaatacactttcctccat

SEQ ID NO: 9510 - DNA, 1050 bp, Homo sapiens
cctagctgtggggtgtggggtgggaaggggtcccgaccagggaggtaggttattctctgggcatctagagaaagagtgtgtgtggggggtgggagcgggggggaggagggcattgaggggaggaagatttgagatttcctcctcttaatattaaacccaccatcccagccccctgcacccctggcagggagagccagacagcccttacaggacacggaagacgcacgacccacgacccacgagtggcctcggcggcccggggcgcggcgactgccgccgcggagctccaaggctgttgttttgtaggcttggaattcgtgagagctctctcccgctgagagcccgaggggggagggagccgtgaccccacggagactccctggtcaccgcctcccctttgtgagcgggaaaggcttgaaagccaagagaaagagaggctgctcagaataaggggcagggggttaccggagggagatgggcccgaccaccgctcacagtaaaatgcctcgtgcgaattgcactgaagtatacccaacttgagactggctgttttatgatcctctctgggagtttactgctctctgcttttaagtctatagattgctttaagttaatgaaagtgctgctttcaaaaggggcttttattgtgtggcagtggcaaatccagtacctcccctttactcttccaaaatgggcctgtttaaaaagagggagcttgctggatcccacatggcagagcttgggggagggtgccatgtgacaatgagaattaataaaagttaatgtccaagtgattctgaaagacgagtttgcttcttttccagtccggtttcatctgttcattctcgtgttgcctttgggctttcactgagtctgcctttaaatgttgcttggtgcctccccagcagcctctcccagcattgctttaggtaggcctgacccctgttcagttaaacccaaactggatttcaggatttcagcccagctgccaattcaaactgcaactaaaatatttacttgggactgggggaggggctttgcctcgcgttt

SEQ ID NO: 9511 - DNA, 1033 bp, Homo sapiens
gccaggctgatctcaaactcctagcctcaagttatctgccctcctcggcctcccaaagtgctgggattcctggcttgagcccccacgcccagccttcttccctttttttctcctctttggtagttgatctcacctgttgccccagcccagccccaggtggcatgttatttcccttgtgctctgctgaccagccccagtccctctgagagctccccaagctcctagactgctctgaggaggtcaaagagcttcagtgagggggagaacggctgctcccaccattgcccaggtacccccttcttgtggcaaaacattcctcggttctcaccttcactgaggtccaggtgctcctgccagccccgcacatgcattcagtgctaattaaatatattatccatctgagaaaaaccaactcaggaagttaaatcagttattgcaaaagaaaacagtgtggcatatttcactctcccaggtcagcaatgtgggctcctgggttgcttaagatttcctgggttggccaggtgctgtggctcacacctgtaatcccagtactttgggaggccaaggccggtggatcacttgaggtcaggggttcaagaccagcctggccaacatggtaaaactccatctctactaaaaatacaaggaaattagccagatgtggtggcaggtgcctgtaataccagctactcaggaggctgaggcaggagaaatcacttgaacccaggcggtggaggttgcggtgagccgagattgcaccacttcactccagcctgagtgacaaagcagaactctgtctcaaaaatacaaaacaaacaaacaaaacaaaacaaaacttactgggtctctcgttgctatgtgtatggactggacgagacaggagcaacatccactcattgaatgaaccctggtcttgcagccagatcacctcagtccatcacccatggctcagaagcttgggcaggtgtctcctgtcctctgtgattccactttcccatctatagacagtgacaccagtggcctcttagggctg

SEQ ID NO: 9512 - DNA, 1076 bp, Homo sapiens
aaatgtcaaaagatcatctattgtttcattaaaaataaaaaataaaaaagaacagtttgggtttggtggactcagcttgggcacaaggcaggtggtgccaggccagtggagaggagacagaagtgattttctaggacaaccttccagaggcaaagccatctttctaattctccctttctgggtgttgattttgcagatgtaatttaagccagggaaagcgtgctcttatacatttgcccagactcagtcattttggccaacatttactaggcacctactgtgtgcaaagttcggggcatggtccctctggagatcccagtgtgtgttagcgagagcatcgctgcaaggagttcagggccagtgcttgtctgactggggctaagagtggccatggcatctcagacgcagttcgccagctgcctggagaatcctgagtccatggaggggctatgctgcctggaggaggtccagagaggcctcacagagaaggggacatctgggtggggcctggaaggatgagtggactcccacagaggatgggagctgcagcatcgcaggcaaagagaacagagcaggtgatgtaaattgaaaggccacattcagcctggacctagaagttgggcctggagaggtggagaggacaggagcttcctctccagccatgcactgaccagccatgatctgaccagcccctgacaatcaagtgagtgactgaggccacgtctagtccacgatctgctatgcacactctcctctgatgctgatgggtgcaatttcccaccttcgggctgcacactacccctcacagcctttagccggctggcccagctcacctgctgctggactcacaggcttctagagaggaagccagcctctggctgtcaggaagctctcggccacccccatgtactggtggggccatgcagccaaggggattgagtcaggccctccagagtattgggggtgtttaaaacaaggctgtccccaatcccaccctgttgccaggagtcatcagccccacgtgcatcccatacctaacgggaaagcagagagcaggccctgccgccagccctgag

SEQ ID NO: 9513 - DNA, 1036 bp, Homo sapiens
tgtggcccaggagcagcactgagagggggtccaaagaggggaggccggtggagtgagggaccacaggtttggacccagctcagttctctcctcccccagcccccacctcaaccctggggttttctcccaaagaagttcaagcttagcttgaaccacaagccccacccgcccatgctggtgaggagtccgatgttaggggctgcctaaatcaggggattaggttgccagcggcgcagaggcagggccaagagggtgaggttaatccagctttccctccccctcctcccctccagtctccttcgttcccctttgaagtgagtgggttcccatggaaaccatggtgtcctgaggagcggaagaggggcaggagctaggcctggccaggtgcgggtgggggaggaggttggctttgcgaagactgctctgctaaggtgttggctcacttccctaaggctgaaagattctctccgagaaccagggacgcggaggtgctaaagttgttgcccattactgataaggaaaagctgggctggaggcatgagcagtgagaagacagtgagggcagtggtgctttgcctttccattaagaacccagagagtggagctgcaggtcagggatagagggtgaggtggcttccggactctgcctgtctcctttgtggcattactcacaattgaattaactgtgttagcatttgtgtcaaccttatttctgtttcccctgctatactgttaactccagaggacagggtctgcgtctgtcttgctcattgctttatccccagcaccttacatgataccttagagtcagcagcttagacgaagtagctactgcatcaaagcttgttggacggcttcattaaatggttagggagcaccccataaatataccatagttctaggttgatgtgccggcaaacgtctctcgaggcggggaaggggagcagctccgattcgtagcatttgctgatccccgtgatgtaaatactcataccatggcccatcccaaaccgcccacctgagggcaccgagcagt

SEQ ID NO: 9514 - DNA, 1114 bp, Homo sapiens
tgccctcgcagagcagttttaactttcactgtgttgagatttcacatagatgcgtttaatgtgccgggaggagtgtgtgcgtgcatgtgtctgaagggaggagggctgagtagactgcgacctgccctgggccccacacttgccgggaatggacctgtccacccacctgggggaggagagctgggctggagcccaggagctctgacagatgcagctccaatttagcaactcgaagaagtcctctccaaggcaacccaggcgaacacaccgcccactgggcaggactaaaaatacacccgcatggtttcaacgtcacacctgaagtaaaaatacatccaaccaggggccgctggctcgctcccacccccctctgttctctccatctggtgctttcaaggggaggagaagcagagggctggacaagcaccttcctccctactccctcccctccctctaagacctcaccaccctctctgcaggcagcccccagcagagccccaaagaaggcaggtcctttcgtagcaactgtgactagaagctgccagatggcaaaatctgttccaagtccccctagtatggatggattctgagcctgaaagaacttgaggattgtgtctcaaaaccttcattccaatagtcattgcttactccactcattcattcactgattcccattcactgattcgtcaaaaatgtattgatcctctgctgtgtgccatatactgtgcctaacccttgggagttcagagagagagaaaatgtggtcaccgactggaggagcccaccatgccatgaggaagacagtcctgtgcacaaacgactgtgcttagtagagtttaagaagtgtcataaaataaataaaaataaatttctattggcagtcctttttcggttaaaagaaaacgaggttcgaagttctgataaattgtaagatgcctctccctcctctttctgggcctctatttgaattggcatgtgggtttgttttcccagccaaatgagtcagtggagatgggaatataaatttattggagtagatggtgtcagtgttgccctgaatttaaaaagtgcccacgcaccgttccagggaaatggagcaggcattaattgatag

SEQ ID NO: 9515 - DNA, 1047 bp, Homo sapiens
ctggtggagcttgctgagccatcgatatggcaaaagtcactgtgactttatattatagatccctgtgttcatctcattttcctatcctagataacactttttgagcagagacagtattttacatgtttgaaatcaccaaatcaccttattataggccaaaaacagccatttccagcctctgcctgctgatagtctcttgaaatagactcatcccttcagagtcctagtgtactctccctgtgaccccagcagtggctaccacaaggtcttgtgcaagaaagatggccgggaagtatttattgaaagaaataatggaatgagagaaagaaagttgggtggggggcaggggcaaggggaagccaaaggaggaaaggagaaataggaagaaaaataaagggaaagaaagccaaatatgcagggtcaacattcaggagggaagcagagacaggctgaagaattggaggaaaagagcaagagagagagacagggaggcacacaaacccaggaaaagggagacgatactgagaacgacggggcagaaggacagacggagagaggaacggcagcaagagtgacagcaagtgaaaggacaatgcatgtggctcagtgcgcagccagggtacgaggaggcgggaaagtcaggaggatgtgctatgtgctgctcctgttgtattactcaaacttgcccctgcattttctctgactgccactgcctgctttgctcaggcttcaggggtaaatacggtaattacacataggctatggcaggagcttcctaacctgctctcctgccttctctggccatccctcggcccacttgcacactcacacgtctcttaagccttcccaggacaggcccctgtcattattgcactaaggtaggggccgggcttgcatgggctctcccaggaaggagaggcccagggctgctaagaatcggggaccgagactttcagtgcaggaggcaggtcttgggttcaagacacaggagcctgtatgagagagagaaaaggagcttgtgagtgtgtgtgtgtgtgtgtgtgtgta

SEQ ID NO: 9516 - DNA, 1950 bp, Homo sapiens
attcatggcagcagcagggcccaatgcattctttttttttttgagacggagtctcgctctgtcacccaagctggagtgcagtggcgtgatctcggctcactgcaacctccgcctaccaggttcaagcgattctcctgcctcagcctcctgggtagctgggattgcaggcgcatgctaccatgccctgctaatttttttctcaagtgatccacctgcttcagcctcccaaagtgctgggattacaggtatgaggcaccacgcccggctccaatgtattctttagttgcctgttccatccatgtatctaatatctgtatttccttgatcaagtttcatttgtcttgtctttccctgtgtagttttaaatttaatgtcaagttgtcaaacaacggaaataattttgagtaactggggagctaacaagttgggtttcttgccttttagtctcttccagttgcgcctcttctccttggtggtcttcttaagcaacagactcttccacaagacagtctacctgcagtcggccctgagcagctctacttctgcagagaagttcccttcaccgcatccgtcgcctgccaaactgaaggctactgcaggtcactgagttgcctgccatccaaaggggatgggcgggattggaagaagctgtggcagctcttttccctgttcacctcccgcctgccagggaaggcaggacccgctctgccaagggccctctgcgtattcccttctctctgaggaattgaaatttttgtctctggtgcacgtaaggcagaatgttccctgacaccagtgtgtggatttttaacatcaccgtgagtctgaaaggaccacaggtttttctgcagctattttctagcatttgccagtccctgtgcctggactgattggaacactttgtttttctccctgtgccatttacccttccacctttccatcctgccttctaccacccttggatgaatggattttgtaattctagctgttgtattttgtgaatttgttaattttgttgtttttctgtgaaacacatacattggatatgggaggtaaaggagtgtcccagttgctcctggtcactccctttatagccattactgtcttgtttcttgtaactcaggttaggttttggtctctcttgctccactgcaaaaaaaaaaaaaaaaaaaaaaaaaaaaaaaaagcctgaagagatgagataggaggaaagacctcacagccagatctgctgggttttgaggagtgattttctttcttccccttgaaggggaaaaagctattttcattggtacatttaaagtcccccaactatggggaggtaccaattctggacaagtgccactacaacaacactaaacctgaacttttcaactccgttggtggtgggaggcagcgggcagaaatttactgttggccactgccaggtctatttcatatttcaaaggaatattgggtgctgcatataggaactgaaggggtcaatgtattaaacctgtgattggttgttttcctgtcattttgagagactaaatgtggggggcagatgtcaaaatacctgtacaattttaaaatgtcacaattaaacatgagctggtttcccacaaagtgtctaatggttgaatttgcaaatcttgatttcgagaaatgtattcatggaatataagactttgtcttggataatttagttacagttttgagaaattagccctgaaaaatgttccctgagaaagcctggattatatgattataatcacatttatatttggtagaagagtcagattattactttttctaaagtctatatgtatatcgctactgtatattcatgaagggagaaagaccctcctagatattggtgtattgagtattaatcgagggaagccgttaaacatctggttaacagagacctttactatgtgcaagataaaatatggaattaaaaattgt

SEQ ID NO: 9517 - DNA, 1041 bp, Homo sapiens
gttaggcctttatttttagttgcaaagtaagctttccctttgggactatacttaaacacatttctaaactgctcttctgggacagttaattatggagaacatgcttgacttctcagtgttggggctagcattctatatgccttccacctagtccagtgttgttgttgttttgtttttctcctttattccaataatagtgggaaaaaagattcatggaggaggatagacaaacgtttgttaagggatacacaagtacaactagataggaataaattctagtgttctataggataactattattaggagtataattaacaacaaaaatacacaatttgttgtatattttcagatagctagaagagtggattttgaatattcctaagacaaaaaaaataaggtgatgaatctactaattatttcccgacttgatcattacacattatatacatgtaccaaaatgtcacactgtactccataaatatgtacaattatgtgtcagtcaaaaagaataaaagcaaaacatcttgaatggtgttgcatatcctttgttatagtcgttataacttagctcttgatcaccttgtaatttaaaaaagtaggtctgggcgtggtagctcacgcctgtaatcccagcactttgggaggctgaggtgggcagatcatgaggtcaagagatccagaccaccctggccaacatggtgaaaccccgtctctactaaaaatacaaaaattagctgggcgtggtggcgcacacctgtagtcccagcttctcatgaggctgaggcagaagaatcgcttgaacccaggaggtggatggaggttgcagtgagccgagatggcaccactgcactctagcctggcgacagagcaagactccgtctcaaaaaaaaaaaaaaaaaaaagatagtagtactgtcttatacaagaataactaacctatggtagattagtgctatattgctatataaataattcatatctgtcatgtgatttccattttgaactgcctacagatagtgtccctcaacattttaatctac

SEQ ID NO: 9518 - DNA, 1027 bp, Homo sapiens
tccaagcactaatttacagattatctctaaatcctttcagcaaccctttgagatgtaggtactattattcccttcttagaaatgaggagactccactgggcacggtggctcacgcctgtaatcccagcactgggggaggccaaggcgggcagatcacaaggtcaggagttcgagaccagcctggccaacatagtaaaaccccatctctactaaaaatacaaaaattagctgggcatggtggcatgtgcccgtaatcccagctactctagagactgaggcaggagaatcgcttgaacgcaggaggtggaggttgcagtgagccaagatcatgccactgcactcctgcctgggctacagagcaaggctccatctcaaaaaaaaaagaaaaagaaaaaagaaatgaggagactcaggctgggagtggttatctaaggttgattattcagtacgtggaggaaccgtgatttgaatgttggtttgtctgactccagagactgtagtcactgtgttatattgcctaaagttaaggcttataacaaatttggagggccaaaatcataggttcttgaaatattattggtatcttaaaaatagtatattcaatcttgtggagtattgattgaaaatgcctgcatctatttgcaaatttataattttgttttgtgtagatatttgaaagcattttggaggcattacaaataattctgtttggggcctcccaaattcagtttatattttttctcatgaatgaggagacatgtccttttgttttttctttttttgtttgagattgggtctgactgtcacccaagctgaagtgcagtggagtgatcacggcttactgcagccttgacttgtggggcctaagtgatccccccacctcagtttcccaagtagctgggaccacaggcatgtgccaccatacctagctaattttttaaaaattttttgtagagatggagtctcactatgttgcccaggctggtctcaaactcctgggctcaagcaatcctccctcctcagcctc

SEQ ID NO: 9519 - DNA, 1033 bp, Homo sapiens
tgtagacttccttaattgcttccacttgctcacatatccctaaatcctctgtgtgaccttacagtagattgcatttagattaattctgaggcttgagtccctctcgttatgtgatcatgacatcagcaaccacaagggagcaggggattgagttacagtgatgggtttgaacttgattttatattttcttttttaaaatttattttattttgtgtgacctgtacatgtaaggacttgattttcctgtttaaaaaaaaaaatcagttatttgaactctttaagccatttggcataaataaagttatagttactataagtgttctttaaagagtcacaggtgatatcctacaatatagtggtggtggtctgaggaggcatactcagaggaactgtttttttctattccatcataggtctcgtcatggggaggttatgtgttcctgatcaacttaattcctctccacgtcctcgtgctgatgctcacaggccgtttctctcaccggatctatgtggcctactgtactgtttactgcctgggcactatactttctatgcagatctcctttgtgggtttccaggtgagcccttgactgagtagggttttcagcttctactttttctatgcagccccaactagactgatttatcttagattctgttaagaagagtacgacttattcacagcctttatattgaactacttgtgttagttgaagcaacagaattactggtcattaaagtttgcatccaggagtctgctaatatttgctccgtggagtttgaattccatggctcttactttggctttaagtttgtgggaaggggagggatatttagttgagttgagtttagatgagtgatcagagttaaaatttccagtcttcttaatgcagatgaccccatgtagtagcagagattcctgatcttaatggcatctaattgtaagtgcttcaggaagtaaagcacaaacctttaaccacattgctccacagggttaacagacaactgttaaatcaaagaataatgtggtatg

SEQ ID NO: 9520 - DNA, 1030 bp, Homo sapiens
atttgattttgctcaagtctatctattgactaattcagagcaggacttgaggatatagttgatttaatctctacagttggccttggtttgaccaaatttggcctaaaaccctttcaggtagcatttctgcctctgttcttctctccaagtttatatacagcctggctttattctgctggcagtgctgacaaaagtactctcaggtttgaaagaaaggaaggagtgaaactctctaagtattggtggcaattaagcaaaaacctaatccttctctgtcactgagaatcttattaaaatgggaagttgtgattcatttggatcagatgtttgtttgaagagtgtgtgtggaatatttattgcctctttgctgctaggaaaaatatctccctggacggggcgtttctactcgctgctggatccctcttatgctaagaacaacatccccatcattgcttctgtgtctgagcatcagcccacaacctggtcctcatactattttgacctgcagctcctcgtcttcatgtttccaggtatgtggcctcgtgttctgaaatggccttgttcataagaatcacaatttgattccaaatttgcaagctaccctcattcgtgttttgtttttctttgcctgtttatgttgtgtaatacagaggacggctaagcaaattttctcatgtatgaagctgagcagaagtcagaagttcaacagttgtagatattggcaagttcagcctcacagttttctgttcatttgtcatttgtgttataagttaaaatttaacggtaatttttactccggttttgttttgttttgtttgagtacttctgtcgtactccttcccctttacccttgtttttcctcttggaagtattgaagtcccataatgagtactgctgattgtaaagcctcatcaatctcttatcttctggccaatccagatgtgttttagaatttaccggtgttagtggtctttttctcttaaaaaataacttttacctttttttttttttttttttttttgagatagag

SEQ ID NO: 9521 - DNA, 1012 bp, Homo sapiens
ttctcactacccatctctagccactgttaacattttgatgtatatttatcaaataagaatgagatcatagttttttccctgatttttttcacttcataaagaatcaaatttctctgttacttagtattattttatagaaatacttaaaatgtatcatttattagttttttaaagtacagagatgtgtcaagatgtgtaagaaggcaagtagtacataatctcatgcagcaatattttaatatattccattttataaatatagtataattagctccttgtttttggacatttgggttgtttctgatttttttgctactttaaagtgtgctgtagtaaacatctttgcatgtttctatgattgtttttttaggataaattcctggaagtggaattgctgggttaaatgtgtggaatcatccagtcatataatgaagatactttaccttgtaggtttcaacctacaggactcagctgcttatttctccttccctcttttgtagttggcctctattactgctttagcaacctgtctgatgcccggatttttatcatcatgtatggtgtgaccagcatgtacttttcagctgtaatggtgaggatgccctcagtctggtagactttttcactctaactctgaggtgcttttttatctgtctggcagaattcagaaagtactgatgattgtgcacatgcttccctctgagcatttgagggaatgagttgtaagttgttgatcctttccaggaacgtatgggacactcatacattctggttgtggggtccaactttcttggattcgtaactttgtattatagaagcatttttgcactttgttggataatatgaccctgggtgtcttaaaacgggagatgatatttttttcttgaaggcttgggagtattacccagtgctagattgttagaggagggatttgaatttttttttttttttttttttttttttttttgagacagagtttcactcttgttgcccaggctggagagcagtggcg

SEQ ID NO: 9522 - DNA, 1026 bp, Homo sapiens
gccaggcgtagtggcacatgcctgtagtcttagctactcaggaggctgaggcaggagaatcgcttgaactcgggagggagaggttgcagtgggctgacattgcgccattggactccagtctgggcagcagagtgaaactgtttcaaaaaaaaaagttaaacagttctgaaggtttataataaaaagtgatagttcactgcccaaaaatctaagcccccttaacatcagtccccagaagcaatgattcctgcagctatttcttctagtacttacatgcatatttctaaatactgtgtatacagtttcccctccatatccgtgggttctgcatctgtgggttcaaccaaccacaaatggaaaatatttgtgaaaaaaaatcataatacaacaataaaaatcatacaaataaaaaatacagtataacaactatttacatagcatctacactgtattaagtattataggtaatctagacatgatttaaagtatatagacagatgtgcataggttatatacaaatactataccattttatataagggacttgagcatttgtgaattttgatattctggtgggaggggatatataagttagactttttattttttaaagaagataatacgataaccattaaaaaacaatgcagaggccgggtgcgatggctcatgcctgtaatctgagcactttgggaagactcttgaggtcaggagtttgagaccagcctgcccaacatgatgaaaccccgtctctactaaaaaaatacaaaaattagccacatgtggtggcacatacttgtaatctcagctacttgggaggctgaggccagataatcacttgaacccaggcagcagaggttgcagtgagttgagattgcgccactgcaccccagcctgggtgacagagcgagactccatctcaaaaaaaaagaaaaaagaaaaatgcaaaacactgttactgtctagatccatgaaaacatgtatgtgaagatcataaaagaagatagtgtagttgtccctctgtatcca

SEQ ID NO: 9523 - DNA, 1159 bp, Homo sapiens
tggggcttgactaaaccagtttctgtgattatcaggctcacgggtggggagagtgcaggaaatagagaaaaagttcacatgtttatatttagctacattttcttctctctctgaagaacttaaggtatatagagtcatatagaaccacataggagtatatctctcatataagaaaagattgagaacccttgatctatgtggagggtagatcagtaatattggtcctcacagaggtattccaaaaggctaagcagagagaatctagtctctagtcagtgcttgtgtattcacagccctaaaccaggctgcagaacccaacataatcctgcccactctgggtgaatccattttagtagaaaatttctccaaagttgatctgattgtaaatattaaactgacatctttatgttgcaggtaaaggacctggataatcgaggcttgtcaaggacataaatgtcacgtccagctctgatatgcttcgcactgagcacatcacatttaggacgttgaagatttttttttttttttttttttaatatgcagtttgtaagaacaaaactggatggcatcagaattgtctggaagttttgtcttgggcagtatgggctgggccaaatgaaatgatttttataattctaaacaggttaccaaatgaaatgtcatggctttactttggtcaattaaaggggggaatttttttaaaaaatgtgccttatttgttttgacttataactgatttgagggaggcaaaagctatgctaggctgccagaaggacataagcagaccttgtccattctcttagctccctaaattagccaaatagagacttctttctcaaatcaggaaaactatcaaagaccaattcagatcctacatttacagacagttttgtcataaccctttgcattgcagcacctagtacaattccttggaaacagcgtggctcaataaatttttattgaatgaataaatgtgggaccagaagagtgctagaagagtgcctttctgggctactatgtctctgttctcaatgtcttttatccttagacgctctttgactttataaatcagcagttttgaagactcaagacaaacagtgaaattattggtttatcaatggagaggaagaaactcttccagcattacatatagagcttg

SEQ ID NO: 9524 - DNA, 1017 bp, Homo sapiens
atcctgattcatctatctttgaagtgcctctaaagtttccaagttgggattcttagtgtgaaaaccatattgaattaattcaaaggaaacttttcatggatttatattattatttttccttgaaatctttataataagaacatttaaaaaaactgggacttgctttgtttttagaattgccatgggaccaacccagtgacagctgtcaggagtattctgactggaaagaaaaaaaaacatacctcaacccttggaaaaaaatcgattctgctcctctaggtaactgaattatcttgagtgaaagagtaccgatttcttggatatgaagtcttgtgctatttgaattttttcttacttttttttttgttttaaacttacaaataattcatgttcgttgtagataaaatagtaactataagtaaaaaattaaggaaaaaataactctttagtcccagaactctgcaatagatttttaaaaatattttggggagtgtatattcagagcaacttgaatctgctcttagatggctttttacttaaagttttcatatgtgctatactttgttgcaaatacactcgtttgttgcttaattatagggatgcactctaacaaatgtttcattaggtggtttcatcattgtgtgaacatcatagagtatatttacataaatctagatagtatagcttactataaatctaggctatttggtataccctattgatctcaggctgcaaacctgtacagcatgttactatactgagcactgtaaggaattgtaacataatggtatttgtgtatctaagtatagaaaaagtatagtaaaaatacagtattataatctaatgggactgtctgttatacgtgtggtccattcctgactgaaacatcattaatgtggcccataagtatgtaaaatgaatatatgtatattatttatatgtgtttttatacaaaatgagatcacactaataatattttgtaactgtttttggttttagtgcgcagcgaacattctt

SEQ ID NO: 9525 - DNA, 1033 bp, Homo sapiens
tggagaaatgagatgattccaaagaaatttaagaactagtattgataggactgttaggctgtgaatggaaggagagaggacaatgactagagatgatgaatgaaaaacattcagagagttattaatgtttaactctgtcctcatggatagaaaagagttaatgtttaaacattcactcttctttaatacctctctgcatgtttcttcctccttgtcctaacttaaagtccaattctcccctgaggacactgcttcctctgaagcggtaggtgttttctttcccataccctcatgtcctttgatctggacatggtacaggtgtcctccttattcttcattgtcactttctcccatcttcctttatgtctctcccctctaacttttgaaccccaaattaaaatttctgccgtactatcacagtctgcaaaatgactcttgatgttattttcgtcatgattcttggtgatttaaatatttatttggatcatcctcctgatatcctgacttcactgtttcttgaccctctctcctatagtgatgttgtctttgaacacgctgcactgatcaccagtataattttttctgacttcctcccttaatattctaacttaaacagtcctttgtatctggacttgcaattaattaattctatctcttcagtctcttacctgctccctctctaggtccttgatttcatctttacctatcttaaatctttaggttagtcattataaatgactgctttgcgttcatcatcttcaatttccttgtccccttctctcttcatcatacttagtgggtaaaacccagtaagtagtttctgggtttaatctagtagttttctacgtactgcacacttgtacctgcacaacagattgcagcaggagaaaaatacccaaaaatgttcactttaaattcaggattactaatctcaagtgggcccttaatgcttcctggcatttggccttcgtttccccacatctttctctgtcctgttctcctaaatcacgtttttataatacttttctctttt

SEQ ID NO: 9526 - DNA, 1087 bp, Homo sapiens
tgagacggagctttgctcttgttgcccaggctggagtgcagtggcgtgatcttggctcactgcagcctccacctcctggcttcaagtgagtctcctgcctcagccttccaagtatctgggactacaggcacctgccactgtgcctggctttttgtatttttattagagatggggtttcatcatgttggccaggctggtctcgaactcctgacctcaggtggctgggattacaggtgtgaggcaccatgcccggccctagtgatttttcttatataattttttaaagttggtattgtttgtcatgcatggctgtacaatttctgtcccattagttttagtggtcagctaatgattggacagagatttccttaaattctgtataccaaaaacaaaaaatctgcagagtgttctgtatttgtgttggggcacacctgcaatactcaaccaagaagtttacaacgttgcttcagccttcgctatctgcttgtgcaaaatgcaaagttagggcacatgtagagcttaggggccttctcagctctttcctaagcatatgtactgccctggtcatgggtgtgtctttttagattcccaggtatatgttggaccttttcagagtcctattccccagaaacatctcactccctaacctcttcttccaaacttcttgggtagtctgtttgcaccagttgctttcattgcttcaggcaacagagactaaagcattttcctgtaagtgttttcagcaaacgctactcaggagtagctttagcacaaggtgagttagagttacaaaggtgaaataaagacaagcctctttttttttttttttttttgagatggagtctcgcactgttgcccagtctggagtgcaatggtgtgatctcagcccactgcaacctctgcatcccgggttcaagcgattctcctgcctcagcctcccaagtagctgggattacaggcgcctgccaccacaccctactaatttttgtatttttagtacagacagggtttcaccatgttggtcaggctggtcttgaactcctgacctcaggtgatccacccacctcggcctccccaagtgttggga

SEQ ID NO: 9527 - DNA, 1029 bp, Homo sapiens
ttggagttcaagagacacttcctgaagattaaagggaagctgattgatattgtgagcagccagaagatttggcttcctgccacatgatcggaccatcggctctggggaatcctggtgaatatagtgctgctatgttgacattattcttcctagagaagattatcctgtcctgcaaactgcaaatagtagttcctgaagtgttcacttccctgtttatccaaacatcttccaatttattttgtttgttcggcatacaaataatacctatatcttaattgtaagcaaaactttggggaaaggatgaatagaattcatttgattatttcttcatgtgtgtttagtatctgaatttgaaactcatctggtggaaaccaagtttcaggggacatgagttttccagcttttatacacacgtatctcatttttatcaaaacattttgtttaattcaaaaagtacatattccatgttgatttaattctaagatgaaccaataaagacataattcttgtgacttttggacagtagatttatcagtctgtgaagcgaagccagcttcaaaacatatccccaagatttgtacttatattttcaaaagggcctggccagttatataaacctgtttttgaattataatgattaattaaaattgcaagtaggtgttttttccagtgtagttagtaaaatacttgtattttacagtgttgcataaactctagtgcttaactaactttactctaaaaattactgttgaacatcttaaatatttttctatattttctactttcatagccatattttaaccttttcaacttactggtgaccaagcttttaggtgataaagaataaaagagggaagggaagagtaaggaagctataagaaaaatagatctgattctttgttcctttacctgttagacttacaaaaagtttgtttttctaataaaatttgtatcaactttggggcatattaggttgaggccttggctcctgcctgtagtcccagctacttaggaggctgagagaggagg

SEQ ID NO: 9528 - DNA, 1050 bp, Homo sapiens
gcagtggccagatcatagctcagtgcagcctcaaactccagggttcaagcggtcctcttgcttcagcccccatagtactgagactacaggtttatgccaccacgcctagctaatcttttttctttttttttgagagatgggggtcttgctgtgttgcacaggctggtcttgaactccttcacagcctcaagcgatcctcccacctcagcctccaaagtgctggaattacaggcatgagccactgcgcccagctgtttgttagttattattcgtttggtacggcatctgtcttttctcccctatcttactgataatgtgtaccctttaatagctttctaagaggaattcaaattactgatttttaaacgtgttacaagtatttctcccagtttgttgtctcttttgccttcattatggtattgtttgcctttgtggtaggatgttttgttttgttttaatactgtgattctttaagctgcttgcttacctccccagaggtggagaaatttgttataactctgcaatagcctccctatagcagtctactgacccagtccctttatctcattttgaagtctttgccccttctacccttgaaatccttttgattgtaactagctaaccctaggatgctgagtcactaagacttttgaagagaagatatggttaggtatttcggtcaatgttgtctgtgtttacagaatacaagttgctctagcttttatgtgaaagtttccctctaaagagaaaggattgttcgatcttttatattagaaagagaaggaactgacagttacctatggaccttattaaagtttctattttatttattgtttgcaaacatcatcttcatatgttcaaggaaaaaaataggagtgtgacacagttgaaatgcagaggaaataacacattaatcactgtatagtaggacacatgccattaaaaaaaaaaactaactcttggctttactgccaaaaatcctcctagcccagagtctcacaaatcgttatttatgtataaatatataaaaagtgtcatttaaatttcaca

SEQ ID NO: 9529 - DNA, 1573 bp, Homo sapiens
tttaggatacctttttttatggcatctattggaaatgtatgaaaactactttatactgattggaagaacaacttccaggccaagcgatggctgaattgaggttaatgtttagtggaaacctcagcagactttgttttagcatagtctatactgtacctaccataattattgaattatagatgttgatctgtgtcagctaatgagatgagttcttaaagtctcattggtcctactctgtgatttttgtaatgttttttcctacactttgttttcctcaggaatctgcctttatgtccaatttagagcccaactaagtagagttgaatagacaagtgatttgcctgctggcattcagtactacagtattgcccctgccagagtggtagctgaaataccactcttgtggttttgctgaccttgatggcaggatttaaagggaattgaatttagagaaaagctgccccatgaagactagttttctctggtccaagtgtcttccgcctacgccctcatattctgtatggtcagctccttcttcatttataactctcaacctagggatcccctcctgagagaccttctctgaccatcctatttaaattggatacttattttttttatccagtctcttgtccgtttcctttgtagcacttagtattaacttgcagctttttttttttttttttgagagacagtttcgctcttgttgccctgggttcaagtgattctcctgcctcaccctcctgagtagctgggattacaggcatgtgccacaacgcccggctaattttgtatttttggtagagacggggtttctccatgttggtcaggctagtctcaaactcctgacctcaggtgatctgctaacctcagcctcccaaagtactgggattacaggcatgtgcctggccgttttgttttgttttgttttgttttgttttgagatggagttttgctcttgtcgcccaggctgaagtgcaatggcatgatctcagctcactgcaacctcctcctcctgggttcaagcgattctcctgcctcagcgtcccgaatagctgggattacaggcacccgccatcacgtctggctaatttttgtattttcagtagagacagggtttcaccatgttggccaggctggtctcgaactcctgacctcaggtgatctgcccaccttagcctcccaaagtgctgggattacaggcatgagccaccacacccagcacagtttttatcttggctgtttatctgttttctgactgtttaccccataggaatagtaacttcacttggataggtatcatgttagtctttcttaccctcataactcaaatacaaccctcatgtctcaaatatgacagttaggtgcttggtaaatatttttttgattaataaatgattgggctgggcacagcagctcaggcctgtaaccccagcactttgggaagctgaggcgggaggatcacttgagcctagttcaagaccaacctgggcatcatagcaagaccccatctctacaaaaagtttaaaaattagccgggcatggtggtgtttgcctgtggtcccagctactt

SEQ ID NO: 9530 - DNA, 1022 bp, Homo sapiens
cgcttgaacccggaaggcgaaggttgcaatgagccgagatcatgccattgcactccagcctgggcgacttagcgaaactccgtctcaaaaaaaaaaaaaaaaaaaaaaagattagctagaactcaacttaatgctttgcactgctagctagtataacggtagaagtacatggagcaggtgggaactgagatcagccttggaggatgtttactggcttaagaaaggtgtgtgttccagtctctaaataactgagtgcagactaggagaaaaatattgttcttatgcaaggaactggcaaaagccatctagatagacggtgtgagtagtagcatgaaatgtagtgtggacaggtaagctaaggccagaccaaagaaagattccagtgctgctgagaagagtttgagtgaggtatgaaatggcaaaaggattcatttatttaagatacttactgagcacttagaatatgccgggtgttgcgataggctggagattcagtggtgaaggtaaacacagcctcccccctcatggattttagagtatgtaacaatacaaactgcagttgtgtccaagagatcatgtagagtttgacctggtctgggggtcaggaaaggctttcccaagcaaggaattaactaggcaaggaagtggacacagtttaaaagcagagagcatatgtaggttccctgtggtgggaggaaataaggtgccatcaaggaactaaagggcctggagtgtaggggaggataagatgaacagaagccagattgtgcagtatcttacaggctgtgtttaagtctttggactttggttcttagagtaatggaaaactcattggagggttttaagcaagagggtttgtgattaaatttgtgttttgaaaagatatttctagctatattgtaaacatgttcacagcagggggtaggatggaagcggggaatcagtgggaacagttaggatgcttttgcatttgtccagttgagagatgatagtggcttggcctaggatgatggtggcagagg

SEQ ID NO: 9531 - DNA, 1063 bp, Homo sapiens
aactgaggcataaggcgctagtaagtggtggcggtaggatcttatttgaagccagcagtctggcttgtgagtgttctgttggtgtgtccgctatgctgcctttgagggacagtgtcccagaggagatacctgtgctcaggaacaggattgtacaaggagtggagaggaggtggatccaggcaggagtggagggaacaaggttaccaccttgttgtgaaagttcatggaataggctgggtgcagtgtctcatgcctgtaatcccagcattttgggaggccacggcagatggaacacctgaggtcaggagttcgagaccagcctggccaactggtgaaacctcatctctactaaaaatacaaaaattagctgggtgtggtggcgtgtgcctgtagtcccagctactccagaggctgaagcaggagaatcgcttgaacccgggaggaggaggttgcagtgagccaagatcgcgccactgcactccagcctgggtgacagagccagactcattgaaaaaaaaaaaaagaagtcatggaatagactgggatagcagggagctctgtgtgctgaagggagacaagggagtagggaaggaaaggcagtcaaggctgaagagcctgactaggaggcttggtcttcagccgctcagcaatgaggaaaaataggggcatttggggcagagaagtgacatgactgagctggactccccacttgtggagttggggtccatacatcatccccctgcacactcccctctctgacacacatacaccgacccacacgtttatctcaggcaggagggagccaaagtttctctgatgtctcctgatcagcttcggaacaagtttccctggataaacacagagggagtggctttggcgtcttatggtgaggcttgcttgcagaggggacagcttttttcctgaagatggagactaaggggtgctacacgttgggagtctcggtactccacagccaagctgaaggaggaacacttccctcctgtgtcacgggaactgccctgggccgtggtagttctctgtccttcatcaggctttgtctctg

SEQ ID NO: 9532 - DNA, 1024 bp, Homo sapiens
gctcagggttacacaggcaagtgagcataattcgtctcttgacaagaggcttgtgggaattcccaaatgtgacccaaggggtgggaaagaatttgaagggattttccgaagttgcagcattgatcgatgattccctagagccaagtaagttcaaagaagagggctctccttgtgtggggcgctgcagtgagaggctaaggggacgcctgcatccactctgcccttccctgcagcttctctctgcctgtgccaccttcaggccttgaaggagggagccaggactggctctgtaggcatttgaagaggtaggacctgatggtcccttgtctcaaactgagtggtggctctgcaaacccccatctgtcttgtggggctgccctgcacctagagatccggggtcagagcctgggtcacaggaggcggggcccaccgttaatgagaatcccagcagggccatagaggtgtggggtaggaggaggaccttctgccgcaccagactcttgaagactgaagagcttgccaggggatcgcagtcttaaggtcatggagggacaacaatagacttgtccgtctgtattccagaagccctgaatgcatttgagcccacggcagagaagagaaatctgccgtccttctgaccccagtgcctccaggctctgcttcagctgccagtggaacctccctttttctgtcccctttaagacaggaaagactttaggagctgcactctggctgccagccacagggctggaattacttgtcctcaagggtcatgaaagggccagcttaaacgtcacactttgcttcatagcgatgcaggtgtggtccttcttaacatttgcttaattctttttttttttttgagacagagtctcactctgttgcccaggctggagtgtagtggtgtgatctcagctcactgcaacctccacctcctggattcaagcaattctcgtgcctcagcaacccaagtagctgggactacaggcgtgagccaccgcgcccgaccttaattcttacttga

SEQ ID NO: 9533 - DNA, 1030 bp, Homo sapiens
ttgctctgctaaggaccagagatccacagattaacgtacattaagatacagctctgctcatcagggagatggacttgtagataaataatttcagaatgtcagtcactgggcatggcaaggctccttagggcagtttcttttccagcgtgcaggcctagtgcaggccttagggagtcacaaggaataaccatctgtgagatgctggcgacatgggccacacctgttattctcatgaaaagttaacttccttagagatgccaaacagcctgagggcaaggatcacttcctgcttgtctctgggtcctcccacacctggttcagtgctttgcatgttgtggtcactgaccttgcctgcttttgggatggaatctcttaattatttgatttgccaatgcctagcacagtgcctgatatacaatagagctgcttcaaatggtatgtatatgttgaatgaataggcaaagtggcttagctctaaattactgaaaattaacaaaattattagacataagatgaaaaagcatactccacacacagtgggcatatgaattaatctgaataaccacagtgatgcttaacctgtgacacacgagaggcttgccatgtgtctctgctagttgcacggtataggtagtaggttccctcctactctctgggccgggatgtttcttctcccttgcaacctgctttcctcgtttctttttggagccctgtagaatcagccaaagtgcggccacccggctgcctcctcactaaggagaccatgcggttcatttttccagtaaatgctctggcactgtctggactggagaccttctttcccatcagattcaacttctaagtctgccccttcttgcagatggggctgtcttggggccaggaggtgaagggaatgcgagaatgacgatatcctcaaggggtggcttagcccagagccctcagcaagtcccttctgctcccacctgacactgagctgcccccactcttgcctgtggatttggactaagggatgtggagacagtctgaggca

SEQ ID NO: 9534 - DNA, 1030 bp, Homo sapiens
gaggagccctgatggcacaccaggaagttgggctttgtccagcagatgtggggagccaccgagggattttaagtgggcaagtaacaggaccagatttgcattttagaaaggctgctttctcaaggctctcgagggtggattgagaaaagagacaaaagactacaaggctgagaccaactgggaggctgctgtaatcatccaggggagcaatgatgaggcctgaagtaaagaagtgatggtggaggacaggtggggcacacatttgagacactttttgaagtggaattgacaggacctgaaaatcaattggagagagaaagcgtagccgagggaaaagtcagtttgattcagtaaacgtctgtgagcctctaccagggcctgtgtaaggctccgaagaccccgggatgaacacagcagcagctgctcaccctctagcaacataaaccgctaatatttcttgagcacttattgtgttccatgggcttcaagcccttctgagttttgtccacttcaccctcaccacagccctgtatactgtggctttcagacccatctcatggatgaggacatggaggcaccagaaagcccatctactatattccttgctctgctgcctccactccaacatgttacgaccgaggcaaccagaaacttctagcatggttgtccaggtttctgcttggacaactaggtagatgatggcccataaatggggattcggaagaggaggagcaggcttgatgtgcctggagaagtgatgagttgactggcaatccagtccccaaggaggaacctgtgtttcttgcagactgttttggtggggtgcgggggatgagggagagggacatgtattgaatatctataatagctatgtgtgtgtgtgcgggggaggggaggggattatatgttatataacaacatattgtggcaatttatgcatatgtcttttctccttactgaagagccaggctctctgaagggtagactgcatttttgttgttgttgttgttttgagatggagtctcgctct

SEQ ID NO: 9535 - DNA, 1031 bp, Homo sapiens
gacctaacctagtctcagaggtcaaaggcttccttaaggaagtgacatttaggccgaaccctgaaagataagcctcggagtcagtatgaaagagaacaggccttccaataagtctttactggatgagtgaatgaatgaaatggccacccggggcattgctaaattaagtaccttgagcttagtcatcctaaccatagtccccccaggcattatctgtgtggccataagccattttcttagccactctcttcttcagtaaaggcaagtagagtgtaatgaagaatactgtgagaggacaattaccttagaaggcattatcagactaatgttttactgagtgcatagagtacatatctataggttaatatgcctttactatgcaatgcatccagaaatttcaaagtcaagaagattctaggaggctgaattccacctttagaaatctcagctatgaaagctctgggtttcaacttgatataactcttcactggccagaaaaaaaaaaaaaaaaaaaaacggcaactctttggcaaatagagctctggaagatgcgctggctggcgccgacataaactgctatcctgatctccatcaaagatgtgggccttctcatgctgcagtttcctcaactgcagaacagggagattcttccaatgataattttacctcgaagtgatgttgtaataaagatggtggtaaaagcattttgcaagaccaaaaaaagaaacacctactaaacaggcatgctgtctatatctggtgtttgttagaatttctgaggaaaccctctggtctaagattctagagagtctacagaggttgataactgggattggcttttaagatcttttctggaatggctgttccctttacctcattattactttaaacaactttggcaggagatatcagtaatgccaataacaataatgatgatgatgatgatggttactgagtagttactgatgagcccagcactgtgctaaacacttgaaggacctttttttttttttttttttgacagagtcttg

SEQ ID NO: 9536 - DNA, 1050 bp, Homo sapiens
ccttgtggtcagggagttcctacatgaacccaaacctttgggggctgggatgtttactcttggcactctgggatttcctgtttctaagaaaatgggcctagatgctcagctacattaaccaaacaacatgttgacacaaatgaatctgaagcttgcccgctccaggctctctagaaggtcaggtttgggaatgaaggcatttgggtgactttccaaactctgaatcccaagcccagtgactcaggccaggtattaatttgagggatctgcttccctcctcttcctgcctaagaaggccccactaagtggctagagtcagaggctccctggtcatcttgagtagtgggaatgcttctcctgtctgtctgcagctggtcttagagggaggcagcccaggtagtatggtaggatgctccaaaagacccaccccgcagaaacctccatcacgtttctgtctgcctgaaatccttgccatgggttcactcctttgaacgtccaggaggttcatgtaaaaatgtaaaagttaccccctgacgtgacttaaccatatgacatttgacacacgactatatgacatttactatatggctgagcctagcaaggtcctgggaatatggaaaacctgaaacattttgacagggtatggaggagaggaaggggagaaagcagaggaaaagctgacaaggtcaagggatgcttctcggagaagggagaagggcaggaggaggatgttcaggcaaggagcagagcagcctggagatgccagtttggtgattatggacaccttggctgcttagccagaggtggccctcacaatgccattcctgctgtgcccactgcccagagtgccagcaaacactgcaggatttgcttgctcagacttcaggcaatgcagctttgtctgctggggagaatcttaccatttttaacctgtatttgaaccaagagatttgcgtgacctccacaggaaagtgcaactatcttccaaaaatgtataaattatcaaagatgtattctataacaaaaatgacagtccttgagatgtggtgg

SEQ ID NO: 9537 - DNA, 1090 bp, Homo sapiens
acaatgccttgaaatacaagacaaccaaggcctcacctttctctcattactcaaatgatgcaaagcccgaagccctctccacctgacttcatccactaccgcctgagctctccaaatgcttccaggtgggacacccaagttcaaggcccctttgattcctggttatcttctagctgctgagcctctgcattgtatagcgtgaacagagcccagctttgcagccagaaagatctggcttttactcctggcaccccacttcaagctgtgtgacattggacaaatcacatatcctagctcaggcgcagtttctttacctgtgaaccgtctgtcccacctaccttaaagagttgccatgagggccagacaatgcaatgactaagagcgctttggaaaggagaatgctggatgcaggtgtcgtcgttattagtgtccagcccatcctttttatgtgcagctctgtgaagacatcttcccttgatgtcagaaccaaaaaacccaagcaaagcaaagacccagggctacatttctgctctggagtctcttgtatgacagtatctatgttgggcttttcagtgtgtaaaccgaaacaaaacaaaacaaaaaagaagaaaaatcagcagcaaatactgcttggttttgcattttcccttctgttttctgattagagtctctatggcttatgagtgcagagagaacctcaaaagatcatgtttgctgcggataagcaccaaactcgatgtttatcagcacttatctcctgcaaactcactctctggaggcttcaaaggctgagggagatctcttagccttgctctgaggagacaggcaggcactcctccccggggcttcagctgcaggtgtggcccaatagcacttgctccattcttaggaacgtggttctcttgctcttccccatgcaaaaaaaggaagcagcaggtttactgaaggtatggggatgagctgtggggtagagggagcaggagaagaaaacaagtattttaaaacaagcccggaaaggctgagaaagtaggtagagagggaaagggaaaggcacactccttacgctcctgctgcccccacccctcaaccc

SEQ ID NO: 9538 - DNA, 1033 bp, Homo sapiens
agctgggcacatgccaccatatctagctaattttttctttctttctttctttctttctttctttctttctttctttctttctttctttctttctttctttctctctttctgtttttgtagaaacacagttttgccacattgcccaggctagtttagaactcctggactcaatagattctcccacctcaggctcccaaaatgctgggattacaggcatgagccaccatgcctggccaaggcttcttttcttaatccatgatctcccaaagtcacacccaagtcagtgatgggataatatgagtgggaggacccaacaacctcttttggagggtcttgccctgactggcacttcacgtgtctgaggttcctctttcgtcctttggctggctgagtcatcaacattgagatctacaggatgcaccagcacctcctagagggccctcagcaaaccactgagcatttcttacaagctacacccccacaccagatcttctcatttaatccacctatcgactctgtgctaaaactatttttatccctgttacaaataaggaaactgaaattggcctggccacagccatgggcaccacccttcccttgtgtgaccttgagcagcacacctagcctctctgggtggatctcactggccttgcctggaaaataaatgctggatctcatctccccttcattgctgatgactccactcagctcgtaagaggcatttctgcttatgcctggaaaaatctagcattcacacaccaccacaatactatattccatgccaagtcaccactattcttggcctccctatccccaccctcctttttgggggtcccagactacagaaccaataaacaaacccactttcatgattcctccatccccactccactgcccaaagtccctcctcacccaggtaacctgcaaacacccatctggtttgcataagggcaaacctgccccctggagtgtgagtcaaacaggaacttccagacaagctgtcctggggcagccctgggccaccttgccagct

SEQ ID NO: 9539 - DNA, 1099 bp, Homo sapiens
aggactgggatattcacttccttatggtccttactctagcgttactctgatgcctcagggaaaggacctgggatggtgcctgagacgcgttaggaaagtgctctatagtgacagtgattgttatgagcaaagacttgaaagacagagaacatcagtcttattcacaaaatatcagataatctactgggccaaaggcacaaagagatgaaaataaaaagcaacagagggccctgaatggcaggctgaaaacatgtgccatttattccacagccagaggctgactttgagcaccgatgtgacatttaacccagaggctgactttgagcacagacgtgacatttaacctcatcagagcagtgacttaagactagcgagctgacagtccttgcgcacagacggtaggatgggagagtcagaaagacaagtgaagaagttagtaaaatatcccagataggaaataatgaagttcggaactaagtgatgatagtgattttggaaagtgaaaaggacagatacataagggcgatagcaaagagatgattaacagggcttaggtgagtaaagtgtgaatgaagggggtgcatgacaggaaagaatcaaaggcgactaaagcctgcacattttaaaggctggtgctgtgagcagccgcagaaaggtggcacaggaaatgctttaggatgggatgtcagtgttctctttgagattccttgtgagcaatgggtagaacatccagataaaaacgtctactaggctttgggaactgaagctcagataatctttcaggcctggaatttacgtttgggcatcatctctaaggagtctgaactgtgaaagtggatgaggtcaccgaggaaactagtctagattgaagagagagaagggaatgagcatggttgggagggagaactcctccagagcagctcatggcctcagacctgcctgtgggaactgccaggcctaccacatttcaaccctactaaccaaaaccagtgactgggatctcagccacctttccagatcccaggatttcaggaaggctcagaggttctgagcctgcagcccctcagatgaatctctctccagatgtaattctgatggt

SEQ ID NO: 9540 - DNA, 1029 bp, Homo sapiens
aaccagtagcaatgttcacagaacacacacaaacagaactcgaggagtcaagagctatgtccagtggtggaaatgaaggacaagggctaccctaccctcggcagctctgctgtggcctctgtcgccctgagatggagatgtgctgagttattacacccttggggccaccgccacctccctgctctattgtggcagccccaggctctcttgtcacctgtcccagtgctatcagctgccagtgggccccagccccatgctagctgtaagtgcaggtcttaatacaaattagcagcagtgcaggcaagctgaatggcaaaacctcgtcccgcactccccctccctcttgttttcatcaagccttcttcacaggcgccagctgcctcattaaagagcagccttttatgctgggcttcacctgtacccaccctgagcggcagccgtggagccccatggccgcacgcagggcttgcgctggctggaggaggcacggtgcttgggagctgcaagaatggagggaggactggcaggcgagcgggcgaggtatggctttccttctttctctccctgagcagtgggaggagggccagctgggcaagtgtggggaaccaggatggtgccagcccttctccctaaggacacccgcctgcaggtcctagtgcagaagcctgggaccgaggacagggccattttccagaggagaaacaccctggcgggcgagcggccaaaccgatcacctgtccagctggagagcaggtgtgtgcacagggccgggggagggagagaggaggagggaagcggaactgggagaacttctatgggtcagtgaatgaggaggttctgctcagggaatgagtggcagcggccaccccagcaagagagccccctcctcctctgcgtccactttcccttcgtctaggtgcccatggctcctctccttacaaggtcacgtgttaggcaggtttggggaaatgtttctttcagcttttcacatttattttcctccaaccctggcacctgggaccagccctg

SEQ ID NO: 9541 - DNA, 1030 bp, Homo sapiens
ctgtaatcccagcgctttggggggccgaagtgggtggatcacttggggtcaggagttcgaagcccagcctggccagcatggcaaaaccaccatctcagctaaaaaatacaaaaattagccaggtgtggtggcaggtacctgtaattccagctactcaggaggctgagacatgagaatcgcttggacccaggaggcagaggctgcaatgagccgagttcgcgccactgcactccagcctgggcgacagagcaagactctgtctcaaaaaaaattttagcgatgtcaattcatttttaaagtggtggcttaagggtttggtctggtttggtttggttttgctgagaaagaaaacttcctcggcaaatgatttttgccagtgaagattttagtacacgtcacaatagaattcctcagcgtctttatgaaacatcgtgaggagtggttcagatactgttagatttcaggcattgaaacaagtgaataattcatagtacctggtttaaaggaggaaaagatgtgaacaaataattattaggaaccagagagagactggaaaaaatatttgcgcggcatagcaaaaattccacagaggaggggacttttgaataggagcttgaagaataataagagtgtggcaggcactctgtcctccttggctcgctgtctgtccccagtttttctttaactcaccctccccaaaatatataagaaaggcagaagttctcaggatcagttacatatagcacagcactgcaaaacctttcagagaaacaaaggctcttctaagggaaggaccatttggcttaaaatccgcatggggtgtgaaggaaacagagagccaaaggcactagctggctgtcttgcccaaggttacaactttgatcacacagcactttgtgtttcctgttaacaatttataatttaataatgaccagaacatttagtggaagaattatacaacataatgaatccgcttttaaacatttgtgtttttcatttgtttccttctctcctatcccaccctgagcca

SEQ ID NO: 9542 - DNA, 1076 bp, Homo sapiens
ttcagggaaaattcatctttttccacccagtcattgagagcaaggttttatgacacagaggatgaagagagaggcttttgtgggctgatgtcgctgtgttgctggcctctggtcaggtcacaaggtggagcgctgcatgccggcagggacgtttgggctttcagacagcagaggcatcagagcagaagcaaatatcttcccaaagatgtttggccatatttctaggaccaggttaaaagcttcacacagaagctaagttaacattggtatgtctatgagagggtcatgtccagaaacagctttcgccttccaacagagactttgcggaaaaaaatctccatgctcatatttctctacctcaggaggctctcctggaatctaagaggccatttagtgtcaaattcagccccactaagcatcacataatggtgatactgttaaggacatcatatatgtgaggctgaattatccacaatggctggcaatgtcttcattctccagactgaggctccggcctctttgctttggcaagagttgatctcaggactgcctgaaaccagaaactccaggcaaagctctttgggtcactcttctgaaaaggaatcacaataataagatctgttatcttggtactctgtaaagccaaggtgtcagccttcacgacagtgaaaagttagtttgtcagaaccagggtgtgattgtctgctgattaagccatctgccaccacagaaacagaccaagatcatcaactggtacactggtgccgacggccacatttttacacactgggcctttggctgccacctcaagtttgtcagttctcaggaggcagactccaggcaccacattcgagagggcctccatgcacgctcaggcttcttctcatagcaggcacaccctgcctgagccccactccatgcgctgacggagagtcggggcaggagctctcatgcagccaggtgttgggctctgcaagggggtttgtgtggggatgtgagccactgggtcagctccctggttcaggcttctgcattcaggttatagacatatctctgtgtgtatgttggggactaga

SEQ ID NO: 9543 - DNA, 1076 bp, Homo sapiens
tcttctctggctctgatttttctcaaagcaaatgaaaaaacgattagaaatttcgttcacgggttgaaatgcccctccaaatgtccactgttcactatcatttaattcagtaatttcatgcaacaaatatttatatttgcttggtgatggcattgtcattgagtctattattttgaaacttaatctaactgttgactagcagttagggtgtttaaaaaatccctctcaactacttgtagaaccattgctaagcccttctttgtttgttttgttttgttttgtttgtttgtttgttgttgttttttcctagtgtatgtgagaggcagctcggaattgggataggggaacatctaatacttttgcttactatgtggaattttctctttgaactctacctacagggtgttatcaccagcaaaactgtcaaatcaactttgctacatacaactcaaatgaaactctattatgaggctgatttcctacagatatgtttgttttttgctggttgtatttctggatccaagactgaatttgtgatagaaacatggatagtataaagttgttagttttagcatatcctagaaatcagagtggaaagattaaatgtaacatatcccaaaaatctatatgaaaaggagttaggattgcaaaggattattttatttataaagagagattgaaaggaaaaaaaagaagggaagaaggaaagtaagagtgggtttctttgaaattcttgaggctgcacagattcagcctcatagcacagcattcctccgaagggctgtacaggcaaaacaaagctggcttgtgaaattctgtcgctccatgggtactaaatggctaaagttgattctacttagacgcgtgctggggcctcttcaaggttgagatccagagcttaagctctgcacagcatttagccttcgctctggaagactgagtaaatgttaaaccagaagcaattttaggtgttatttgcactttgttttgaggtcaggtaggaggagcagcagagatgcaaaggtaggtacgtcacatgggctgaggcctcttcatttgtttttgtttttgtttta

SEQ ID NO: 9544 - DNA, 1059 bp, Homo sapiens
agaccgcacatgtccacagaactcttaatcttgtggaacttttgatctttttcttaatagcttttctatcctgaaacagtagcatttaaatacagagcttgttgtacatagtctcacagtgggaaactgagaacactttataactaaacatatgtacaactcacactgaaacaaccactgtggcttctgaaagtggcttttggatcttactaaccttgcctggctgattgagggtattatttatcaccaagataactgctgtttctccagtaatgctttggcatagaataaatagtctctgagttgggtacatgctcttgaaggatgactagtgaagtatttggtcccccagtcgtgcaagagagagttgtcagggtttttctgcttcttcttactgatgtttaaaatcattataaactgcctctgattgcaccttgcttttatgagtatttgttgatatgacaatatactacccttagcatttcaccagtggtcctttgctattgacagtttcatttacagaaattatctaaggacagctgtgattgaaccaaataatctaaaaatgttaacgtgtagcttcttagcaggaaagaataatgttgatattggcatgttattatctgtccaagttctctttatagtccataatcatgatctgattttaaaagtttgttcaatatatggtattggggactgttagaagggatgaatgttaccatggtgatctcacagagatgtctgttaccagcaatcagtgggcatcctattgtttggaggagtaaacctggaccacattttactccctaatgacaaccatagtggcagaaactttattcagcccaacaccaaagacgtttttcttttctcagcaaagtagtcccaatttagaaatgttgctattagacattttggcaaaaacgtggccttttgggagctctatctttctgtgtccttccaaagggaaagtattagtgtggaggaaacagtttgtacaatcaagagtttgccaaagcatttcccttcctgccaccactcctgtctgcctaaacaaataca

SEQ ID NO: 9545 - DNA, 1073 bp, Homo sapiens
gcctggaagacagaatgtcagaaaggaaagtctctggtaagttgtacagaaagtcctcaaacaacatcgtttcattcaatgttgtttcattataacgttgatgaaaaacattaatcttggcctggccactgtccgtgtggagtttgcacgttctctccatgtctgcgtgggttttctctgggtccttcagtttcctcccatgtcccaaagctgcgcacatgaggtgaacaggcgtgcctacatggtccctgtgtgagtgagtgtgggtgtacatgtgagtgcgccctgtgttggggggtgtcctgtccagggccggcccccgcctggcaccctgagctgctgagaagcttctggccacctgcacccctgaactggaaaaactgggtaaatacttaccctacttcattttattaatcattcttcaatgtttatgtagttcatatttatttcagtgtttcatattagaaatctcttggcctttgtttggaagtttgatgtttttgtcgctagaaacgtgctgtaggaacttcactcttgtttatatcaattggcctgtgggaaaattggtttcttatattggtttcacttaaagccgaagtttccaagaacctttctataatattaagtgaggactttattttagaattgtgggaggtagcgtgatatatacttaaaggaggatggccatgaatccaacagacttctgctcaaatctcagacatgtgacctcatcatgggatagtttctgtgtggagtgaaggatgtatgtgcaaagtccagcccctagtggtgcccagtgagtgttccttccttttgtccctctgtccttggccttgagacttgtgggggaatctaaaagacaccaggctgatttaggtcttgtggagcctctctgcttgtgggcggttgactcttcctgaggccctcaccacaggtgcagcattactggcaatattattattattattcttgtttttgagatggagtctcactctgtcgtccaggctggagtgcagtggcacaatctcggctcactgcagcctccgcctcccgggttcaagcgattctcatgc

SEQ ID NO: 9546 - DNA, 1112 bp, Homo sapiens
ggtgcttagctgcctcttcctgttgctttaacctctggtattttaagattctctttagggaagatagtactgaccatctcagcacagagccgaaatgcacttagcgctgatgtgttgaccttagtggttgacccataaactgaacatttatacagttggaactcttgcggtcttttagccaacaaccataatgagtaacatgtggaacataatctttggtgctgataaatggctttttacgatgaaattgaccattccacgctgtggcttgggtgacctcatgtaactaattactgtttcttagctatattcacttttggaatttaaggggtaaatggtttctccttctgcaggctgaactgctgacagattaaataccacctgaaatctgatttgtttagtagctgtctttaatgtaaaaatatagaaggccagagggaatctaggaaacactgctcagaagctttcagacttaactataggagttcattcgtagcaggtttaggaagcacattccttccgacctgtagattgggcttttcatatacgtatttatcatgtcttcttggattttcttcatttaattctatctgaactttcgaagtgggaagcaaaggattcgggggagagcactggtttcagtacacgaaaatatccctggggtttccttacctttatctttggatatccccatttttctcgacacacaatccaagtttctagccataatccttagattacaaaagaacaggacttttggtacacatctttttttttttttttttttttttttttgagacagattctctgtctctgttgcccagtctggagtgcagtggcgcaatctcggcttcactgcaacctctgcctcctgggttcaagcgattctagtgtctcagcctcccaagtagctaggaccataggcacgcgcccccatgcctggctaatttttgtatttttagtagagacagggtttcaccatgttggccaggctggtctcgagctcctgacctcagatatccacctgcctcagcctcccaaagtgctgggattacaggtgtgagccaccgtgccgggcttggtatgcatcttgaactaagtgtgaagattaa

SEQ ID NO: 9547 - DNA, 1061 bp, Homo sapiens
tgggaattgaacaatgagaacacttggacacagggtggggaacatcacacactggggcctgtcgtggggtggggagaggggggagggatagcattaggagatatacctaatgtaaatgacaagttaatgggtgcagcacaccaacatggcacatgtctacctgtgtaacaaacctgcacgttgtgcacatgttccctagaacttaaaatataataaataaaataaataaaaaagttttttcctttgcctttcactttgatcatacacatccagaagtcactttttattctgttctagctcctgggaaaaggatttgtttgtgaagatacaaatagtaaataattaaggtttttaaaagatgcattctgtcacatagacctgaatgactgttgcctctgtgctagccttcttggagtaaacctgcaatttttttccctttggtaggctcttgcagccaatgccggaacaggatttgctgttgctgagcctcaaatcgcaatgttttgtgggaagttaaatatgcatgtgaacattcagactgggaaatgggaacctgatccaacaggcaccaagagctgctttgaaacaaaagaagaagttcttcagtactgtcaggaggtaagagtgttgccagtaagttgaaagtgttatttttctggggcagggttgaatctgtttaccttagaaatagatattctgtcattctcttttgacctaagaccaagatgctaatgactggagccccaagccttttgtttctaaatgtgtggcatgactgagacctctcaaaggctttgcctgcgtgttctgtgagctctcagttctttaaggaagggatactgcagaagcctggcaagtgccatgggagtgcagcctgcttctcatcctcccacttgtcttggaagatggaaaacaaaacatgtctccttactgacagaaagccaccagtattgtaaaggatcatctcaggtctgattcaactctgtgttaaagagaaaatgataggagatgttataacttgtatttattttttctgatagagacagggtcttgctacattg

SEQ ID NO: 9548 - DNA, 1058 bp, Homo sapiens
cttgcatttcattctagccattgccaatcacaggagtacctgtgatttttgtgtttacatcattctgagctgttattttctgcaggttactatgatattttttaagagtccgtgtcatttgtttaacataatatccctgaatttggatttgtcttattgttgtatcatgattagattcaaatgttcacaaatacttcccgtttgctgatgtagctgggccccagggcttagtggcacggtgaaatgtgcgttgagcttatttcctgcctctgtttttgtgtttcagaatagagaagggacccattgttgtgctttgcacataggagctattaaccttcctttttttctattttggccttcagtgaatttcctactgaagcagatctggaagacttcacagaagcagctgtggatgaggatgatgaggatgaggaagaaggggaggaagtggtggaggaccgagattactactatgacaccttcaaaggagatgactacaatgaggagaatcctactgaacccggcagcgacggcaccatgtcagacaaggaaattactcatgatgtcaaaggtaaccccatgtagagccatggctttgaaatccatgtggtaattattcacttagacttttgcattgcgtctgtcacaggtaagtcagtcacagaaggaaaggtgtggtacctctgcactgaaggtgagttcagctctccagtgcagtgatgggatggtgccgtcttaacaaagtgggcaggcaggcacatccagggagagatgtaggattgaattagagaacggggactagagagtaagagagacaacgtagtccgcccttcagcaggattcttccacattcatcctaaaatgttccctccccaaggggagctcccctcttcgataccactcaagttctggcctcctagaatagaaatggttttcttggtttttcttttcctgcttgtcttctaatctgtaggctgccctatttgtccagatgttttagttgggagggtgaaatttattgacctgctggtaacagattggggcctgcagtttttttt

SEQ ID NO: 9549 - DNA, 1179 bp, Homo sapiens
agggctttgcaggttgagaagcatcaagtttacttccagtgggagcgtttttgttcttctttgaaggggctgaggctggcggatgtgccggcttcatgagtgggtgattccacagggaccgagggtgtcttcagaaaaaagcatttcggcccgctgtcctctccactctggtcccagggaggctggaagcagcctgtgtttgctgttccctttttccagtccagcaatgtgaaccaaaggctccgtctccagcgctcaggcctttatagcacaggcatgtgtcactgatccgcatgatggactgcagtgcttgaaattctcctccactgaacttgcgagtgtcttggggaatggcatttaccaagttatcgattctaatttagttaatctgaaagtgggatattgacacccttttaaaacttatgtagggctcatattcttcatgactttagttgtcgtttttaggtctgttaaatgggcaaataaaagatgcttccgacagaaaaaagttgaactggctggctaatttgtagctgtattcatcaattatatggttgttttaatgtattaaaatgatacaattctagaaattaggtgaatttgcttctgaattaaaaatcagttgaaccttggcattcactctccacttagctctgaaattgtgtcataatctatcaagcaagtccacaccagcttgggaaatcttgcatgaattaggctagtaagtgttaccttaggtatgtcttgagaggctgactgagtaaacttgtcatctcagtcctttcccttatcaggctaaattccatcgtgcagagacttgcttgggccccatgagagattatgcccatccagcagtcgggggtgctccaatgggcctgtgctctggggaacgcttgggaagccctattggtcagtgtcatggatcaaaaagccctatcttcatatcggtgaaaggtgtccttgtcaaatagagcaactcagttttatccttgttggttctgtcactgatggtggggctaagagtccttcactgatactgaaaactcaaaattatagctggagtgatggggactttctctacccagcgtatatgcaaagaacattcacttgagcctgttttctgttgtaaattaagactcaaagatagccagaagagcagaggtacctgagtaataaatt

SEQ ID NO: 9550 - DNA, 1075 bp, Homo sapiens
agaaaggggtaaagtaatttcttctgaaactcttgtgtgagtggtctcaaatgattttgtcccttaacactaacctgccttgctttgggggatggaaagtattgggaggatatttgtgtccttaagtaagccggttaaagtcttctctctttgggtgacacaggagactatctagcttataggtgtcagaggctgagccaggaaaaaggacagatcagaagagaacgggagtgggcaggagattctggaaaatactgtatgttaaggagccagtataactttggaacttagttttgctattttacctagacagtttttttgttacttggtaagctaaaaaagccttccagttacagctttcattcttgtgcctagctgagctttacattcttaagtgaactttttaagcttttgttttcctgcctattttcaattctctagtctctggatattaaaacaactgttctctcttgcagcctcatcgcattctccaggccttacggcgttatgtccgtgctgagaacaaagatcgcttacataccatccgtcattaccagcatgtgttggctgttgacccagaaaaggcggcccagatgaaatcccaggtacagtagatgtagtagaaattgctgccgtgagggcatttccagtggggaacataatgccttgactaatggttgaccagcactgctagttgcatttgctactagtccttagaaaatgagttttgatttccgaagacattcggtacgtgaactggtttttgcaaggtcactgtttttaaaacatctttttaaatacttttttatattaactgctttatacttaaacaatttctgaattttttatatcatttatttctgatttagggtattgccagaaccaatattcaagatccttttctaggtatatttatcaagcagatcttaaaaattggtctcttgttttgtgcagtatagtttttgtttagacagacacttttacattcctaggttttgtccagctttactttcatctacagaggtttgtttctggttcctacttctaatattggtgttgttcatatattaacttg

SEQ ID NO: 9551 - DNA, 1087 bp, Homo sapiens
caggatcttgctctgttgcctaggttggagtgcagtagcacagtcatagctcactgtagcctaaacctcctgggctccagtgatcctccagccttagcctcccaggtagccgtgactgcaggcacacagtactatgcctggctaatttttgtatttttggtggagacagggtttcatcatgttgaccaggctggtctcaaactccttcgctcaagtgatcctgctgtctcaccctcccaaagtgctggaattacaggtgtgagccaccacgcccaggctgaacacgttcttatactttagcagtcagtaaatatggcgtgaggattaatacatttcccctgaccagttgctttgctagactctgtagagaatatgctttgtaaagtggtttttccagaagttgtgtcgatgttccagctgcaagttccctcctggcctagttgttttcagtcacaacacctctccaccataactctgcttccaggtgatgacacatctccacgtgattgaagaaaggaggaaccaaagcctctctctgctctacaaagtaccttatgtagcccaagaaattcaagaggaaattggtgggtaccagctctttgtgtcaaggtcatacgggacttcttgcagaggctcaggagtgaaagctgggcaagagtagagagagatgagcaagcaaggccggtgaagtggggcattagcacatcctggcttcagaagcctggagtccactggagctttcatggcaaggtgaaggaggaaccaaggacaggtgcactggctgtgagccatggagcctcgggcttcactgaccttcactctgttagcggaagaatatctggggtgtgaaattgcaagagactacgagtttcctgttcccgttttcctccttcgttctgattatttcaagcacctgattttatataaattctcacctcctcctctcccggtctttatcttcttcatttattcaacaagttttattatggctgctgcgtgcgtgtcacagagtaaaatggtccacgagcagatggtacctgctggagttgatgtgttgataagagaaaaacagatagtaaaacaagaa

SEQ ID NO: 9552 - DNA, 1693 bp, Homo sapiens
agcatctaggatctcggcacagagggattcagcgtggtgggagatgcgggaagaaatccgtaatgacagactgttgtcattactgttggaacctccccaggaccaactgaaacttgaagggaaaataagagtttaggttggggagggtatttgaggcagaatgaattccctgtgggctaacctactatgtccaaggcaaacgtgcaggttattgtgaggatgggtgctgtggcagccgggtgtgggtagtaggtgctcagtaatttctcctacgatggtgtgtatttcccatgctaggatgcccctcggctccgcttctatgtgtcttacaataaacattttctctgaaggcttgcatttcattttcccaagttggagacaagtaagcactccctcctcctccattatacccattggtctctgcaaatgcctgtctcattcatctttagagagcacagggcaccctcagacttgtgaacatggtggcagatgagtcgcgtggggaggtgcgtgttgaggggctcactggccctcaggagggagtttgctgcttctgtgcaatgggtgtgagatgggccatccttgggaactcagccatgatctctctccacacaggatctggagtgggagagcaggatgggggactgatcggtgccgaagagaaagtgattaacagtaagaataaagtggatgaaaacatggtgagcctgttctttcttctgcccaacacgctttacttttgagactcattagagcgagtgacctgatgtcagatgcttccaggtgcacgtctctgtgttcgttttccgcacagtagaaggttggagggctccaacggctcccacagactggctgtggtgtttagcatctgggtatgaaaaggattaaaaagcccttttcagcagtagctcatctcttgctatagagtaggaaaatatatttacaactaaagatatgaataacctgttagaggccattttcaagtgagtagagagttaataacttggattagagttgggttttgttcttatactgccttaggtttatacccccttttattcacctagtattttctgtcatttatagttctggattatcttcaactgagtttgatatttcaatgtggctttttttttttttttgaaatggagtcttgctttgtcaccgaggctggagtgcagtggcatgatctctgctcactgcaagctccacctcccgggttcacgccattctcctgcctcagcctcccaagtagctgggactacaggcgtccgccaccacgcctggctaattttttgtatttttagtagagacgaggtttcactgtgttagccaggatggtctcgatctcctgaccttgtgatccacctgcctcggcctcccaaagtgctgggattacaggcgtgagccaccgcgcctggtgtaaacggggctttttggcagtctgttctgagatacgtctccacaacggttacttgaaggaaaatgcatacgggaccagctgccataatatagtcttccctccatacctgccccttcattaggggtttggggagtggatttggaaggctgtgacagaactggttggttaatgggggtcccacaggtacctgcttccttccatcaagcagcaggtagcagaggaaggaggcagtaaataccaaactccccgttcacccagttgcttgctgcc

SEQ ID NO: 9553 - DNA, 1373 bp, Homo sapiens
ttaaattaatcagaaaccccacttccattgtattgtctgacacatgctctcaatatataataaatgggaaatgtcgattttcaataatagacttatatgcaggctgtcgttccggttatgttgtgtaagtcaactcttcagcctcattcactgtcctggcttttatttaaagaaaaaaaaggcagtattccctttttaaatgagctttcaggaagttgctgagaaatggggtggaatagggaactgtaatggccactgaagcacgtgagagaccctcgcaaaatgatgtgaaaggaccagtttcttgaagtccagtgtttccacggctggatacctgtgtgtctccataaaagtcctgtcaccaaggacgttaaaggcattttattccagcgtcttctagagagcttagtgtatacagatgagggtgtccgctgctgctttccttcggaatccagtgcttccacagagattagcctgtagcttatatttgacattcttcactgtctgttgtttacctaccgtagctttttaccgttcacttccccttccaactatgtccagatgtgcaggctcctcctctctggactttctccaaaggcactgaccctcggcctctactttgtcccctcacctccaccccctcctgtcaccggccttgtgacattcactcagagaagaccacaccaaggaggcggccgctggcccaggagagaacacggggaggtttgtttgtgtgaaaggaaagtagtccaggctgtccctgaaactgagtctgtggacactgtggaaagctttgaacaattgtgttttcgtcacaggagtctttgtaatgcttgtacagttgatgtcgatgctcactgcttctgctttttctttctttttattttaaatctgaaggttctggtaacctgtggtgtatttttattttcctgtgactgtttttgttttgtttttttcctttttcctcccctttgaccctattcatgtctctacccactatgcacagattaaacttcacctacaaactccttaatatgatctgtggagaatgtacacagtttaaacacatcaataaatactttaacttccaccgagactgctcgtttcactgactgcggcattgatctgcgtgatggtcctacccccttcctccaggagggtgataacttcgttccacgaaggaccccagctgcacctcacaggcggaaatacgtctgctcaagctgtgactcaaggcttccagcgccgtttcgcatttagaaagcaaagtaagagggaacatctgcacagagcatttgtctggcaaaatttaggctactgatatttattaatatgagacttcttaatgctactgggaacaatgagtagggctt

SEQ ID NO: 9554 - DNA, 1104 bp, Homo sapiens
atccacatttctttccctttcttattatataacccaccttagatatatgagttttagatccaaaggagtgactttgtaggcatataatttgtaactgattaattgaattagttcatatttgttaattataattgcatttgaaggttttgaaaatgtagtcaacagaaatatcttcctcttctgaaaatttaggtgtgttttgtagccaggtaaacttggtttgaagccttcctctatcgagagaggttggaaaaatttattcagaaccctcgtttttgtttgtttgttttgttttgttcttttttttgttttttaaatctacagctttacttactagatctagtgttttaagaattcctgtgtttgtttaccatgaagaaaaaatgaataaccaattggttgggttgttatttttaattcaatctgatttctaagcatcagatatgaagttttcactctgaccatacttggtctagctgataagtccactggtgataaagaatgagcttagaacctttgctgtgaatcactaaagcagtagctgagtaaagaaaaattctcaatcttttatttgccagacactgttttagaccttggggtaacgtcagtgaaatagcttaggttttgactacttcataggaaaagatgaaatctatggactcctccaaaaagtgcttttatgcatgatatggtttggctctgtgtccccacccaaatcttgtagctcccataatttcctcatgttgtgggagggacccagtgggagataattgaatcatggggtgggtctttcccatgctgttcttgtgatcgttagtaagtctcttgagatctgatcggtttaaaaaggggagttttcctgcacaagctctcttctcttgtctgtcgccatatgagacatgccttttaccttctgccgtgattgtgaggcctccccaaccacgtggaactgtttaagtctaataaacctctttcttttgtaaattgcccagtctcgggtatgtctttatcagcagcatgaaaatagattaaaagagtaaactggtaccagtagagtggggcgctactgaaaatacctgaaaatgtggaagagactttggaact

SEQ ID NO: 9555 - DNA, 1037 bp, Homo sapiens
ttagtgaaatgaagcaacagaaatgtaatgtcctgagattattgtgccatgaagtattacaatgaaggagatacacacacacgcacacacacacactttttttgcatattaggaaaaagtagggaagagtatggaagaaaaggaaaacactgtaaatcaacaaataaagtatttctgtttaagaatcagagagtatatatttttcaagaaatgctgaaagaaaccatatgcttaggcattaaaacaaagcattatggacataaaatcatgacctcccacctctctcttgtggattatattcatattcatttgaaagtgttagttgaagtccttagaatctggaagaatttattattgcttgaaagttagtggcactcattggagagcaaaatcttggactctgccttgttacacacctagctatataaggtactttttaaaaacctttctcttcttacgtatacaggttgttggtgttagacttctctggaagaaagaactgtcttagaggccaaatctagtcactcagtaactgggctgatgatcaggggacccaggttttgccatggatttacactatgctctcagcaagttacttaatccctttatgttaagttttctacccataaagcaaatacctaaccctcttaattcgcatggacatataggttctagaatcttagagcttaaaggtattctgtaaaccagtgtttatcaactttggtactgttgatatttggagtggataattttttgttatggaggctgtcttgtgcattgtaggatgtttagtaacatctctggcctctaaatacaagtggcaatatcccagttatggcagccaaagatgactgcaggcatttccagatgccccatgggtggcagtatcccagttgggaaccactgctgtaagacaggattcagcaagaggtagctgatgcccagggatgttcaatgcctgctttagaatacatcactgttaagtgctgggaccaggactagaactcaactttattaatatactgccaacccattta

SEQ ID NO: 9556 - DNA, 1035 bp, Homo sapiens
cttagcaaaatccatcaaaatgagccaggctctatggaatcaggaaatttgtgggctgagactaacattacctcaatatctgttatggcttaaatgtattgttttaataatattttatgttagttctttttgcctgaagctgtagaagcattttatagccagtaactcttcagaatagtacaggaaagcaggcgtcatcctcatgctcaacaatagagctgtgtttctgtgcaccaaccgcagatgctgggtctggcccccacagaaggagtgcctcagtagggcatcccaaatggggctgtgcatagcgtcactccagaggctggggacagtgcagatccagacctttcccagcctgttgagttagaactgggggactgtgctccagggcgtgaggaggtgggttgggaaatggtattttaaacaagcgaagtgattgtcatataacttgtctggcatcagatccgcagactctggcagagtttccggaaggtctctcaaaactgaaataagaaactgcagttgttgtccacagctgctaaaattgttccaaattaggaaagggaaggggaaacagaacacagtagttccagagaagaatctgaggagccgtgtgagctaggaaggccattgtgagcagaagcgagtcagtatttcctcatttcctctcctgccttatcattcccatctgccagctccctcctttttttttttgagcatgtaaaacatgttttgttgttctttaaaagggttcagggtttggttttaaatcaggctgcacacctttcaaatcattctgacatctctctatgtcaaactggcttcagctagcaatacttcattaaatccaaaagaaaaagattcctttaattttaaggaaaaaaatccagttttgagaacaattaacattagtctttaatttaaaagaaaatgagggctaatgtttcatgttgctttatacatccttctcctcaatacagaaccaggaatgtaattttcctaacttgggcaggcactgatactgatggacactgc

SEQ ID NO: 9557 - DNA, 1036 bp, Homo sapiens
ggaactgtcttgcatcattacggattcgcagacaagtgaccccaggatcgagtggaagaaaattcaagatgaacaaaccacatatgtgttttttgacaacaaaattcagggtatgatcctgtagtcctcttgcctgctgacctttcctctgtccatagacctgggtatacactcttggccagaaacttacctcagactggtaacctgcatctgtagctaggaccgtttttttttttttaaagatttataattatggaaaatttcaaatatatgcaaaagtaatgcaaatggtatatcaagcctccctgtccctgtcccccagcatcaacaagtgcagttcattagctaggatcttaatctgctcacagccccatttctttggggaatcaaagtgaacattttcctaggccatcttctcatgatcctgatgtgagtgatgtaggtgagtgaatgagaaggaccatatgtttcagcaagggcacagcacaaatggactgagccacccactgtgtttctggcttggtgctggggttgccgatggggagaaaacacggtgtaccctgaagtgacatcctcccgggtgggaggatggtggtcagggaaggctccccaaagtggcctctctgggtgcggtgtgaagggtggctggttagcaggcaagatggtatggagggaggtggtgatcaggagagaatgctgtgtatgaagacgcagaagcaacagacggactggctgatgggaaagactggaagttccccactgttgccggtacatggacagggagagagggaggagaggggggagaggggctggagaggttgcctggccaggcagactgcactgaatgccaggcgagcatgggcggtatctgagggcccgctgtgaggctctcaggggaggtgccgtggctgcatctatgtttcagaagactgaagtggctgctgtagagaagagattggaggcggcacaactcagagcagaggcccaagtcagaggccttctgcagagtccgggagagggctggtggggggcccca

SEQ ID NO: 9558 - DNA, 1962 bp, Homo sapiens
aatacactaggataaaggagatttttttaaaacttccaagttacttggctcttgttgataaattccctgcatagttttccatgtgtcgcttgcttgaaggaacggctgccagagccccatatgaaagtgacccagtgcctttgcccagtgtatagacatgagaaaagggttccagggggtttcctctcagagggcttatagatcggaggtcaggcagccggcagagacaaagctctagttcttacctaggattctttacttgtttgttttttgagacagattctttaaggcttgaagctacctttcttccccgcagcaatctgcaacaaagggaggccctggaaattagggattcttttcttcttgggatcctggctcctaatcttgtcctcataaccatttcctccataagtaatctcaggcattcagccagaggatttttaagcctacagtgccaagcccactttaatacacttttcagtgcgactgcatttcaactgtagaagtctcagtacttttcacgtgtgaagttaggagttatggtgtcctatatgttctaggctagaaggattgtaagtgttctctcttctagctggggtaggcctgagggggcagggggcaagtgggtttggggtgaaggaaggaggcacagcagggccagggcctttttaaataacagatagtgtgtatcatggcttccaccaaacctccttttcttcagatgacctgaacattggcggaattattgggggggttctggttgtccttgctgtactggccctgatcacgttgggcatctgctgtgcatacagacgtggctacttcatcaacaataaacaggatggagaaaggtgagcctgccttatgtgaaaaaagggaagttcaagctggcaataatataacaaccctgttgctaaactgctctcttctcctcatagttacaagaacccagggaaaccagatggagttaactacatccgcactgacgaggaggtaatcatttagtaaacctggaaacctaggtgtacccagcagggaaaacaacattcccccttggaaaccacacgggtctcctgggaagatttctgagtgattgtgcagctcctgagctcctcagccccttcacagtaacacacacacacacacacacacacacacacacacacacactaatgggatttgtgctttgcaagcgctagtgatggtactttttaagaatgattattccatctgtatttagcccatgttagacttactccgtgtttttccctgcttgccaccaggccccttgatggctctaactgtgtgttggctttgcagggcgacttcagacacaagtcatcgtttgtgatctgagacccgcggtgtggctgagagcgcacagagcgcacgtgcacatacctctgctagaaactcctgtcaaggcagcgagagctgatgcactcggacagagctagacactcattcagaagcttttcgttttggccaaagttgaccactactcttcttactctaacaagccacatgaatagaagaattttcctcaagatggacccggtaaatataaccacaaggaagcgaaactgggtgcgttcactgagttgggttcctaatctgtttctggcctgattcccgcatgagtattagggtgatcttaaagagtttgctcacgtaaacgcccgtgctgggccctgtgaagccagcatgttcaccactggtcgttcagcagccacgacagcaccatgtgagatggcgaggtggctggacagcaccagcagcgcatcccggcgggaacccagaaaaggcttcttacacagcagccttacttcatcggcccacagacaccaccgcagtttcttcttaaaggctctgctgatcggtgttgcagtgtccattgtggagaagctttttggatcagcattttgtaaaaacaaccaaaatcaggaaggtaaattggttgct

SEQ ID NO: 9559 - DNA, 1028 bp, Homo sapiens
ggagttagctgatgaaataaaacctgtacacaaatacatggtcagtagtggtaagggccgtgaaaggcccaagaataacatgtgattggggtacaaggcagagaaatcactttcccttacagcaggattcttgacccgggggcatgggctccctagagggatttgggggaagggtctttgaactccctagaattgtggttgaaaaggtctctgtataggtacatatgtgcatctttccctggaagagggtctgtaacttcttaaaaggatacaaagccctcaagggttaagaacctttgtacaggcttctctcaagtgggccaatttggtacctatatctaggtagcatctggagactgggagtgtttattcatgacagttccgtctcctacagctatttccttcgtgctaccatcagccgccgcctcaatgatgttgtcaaagagatggacattgtagttcacacactcagcacatacccagagctgaactcttccatcaagatggaggttgggattgaggactgtctgcacattgaatttgagtacaataaatccaagtaagtgtctcagtgccaaggttgtgaaatgattatttaaggaggttaagatgggacttgatgcagatgcaaactgatgaccctctgtgactcgactgctttgtggtggcatgcggtgggggaagaccgtgggagcaatccagtgagtgtctatggcaggccagctgcagctggaccgaccacgacgtaaacacttcatttacctaaactaaaccatattcaactaaggtggtgtctttaagttaaacatcctatgatgcctctcagtcaagctaaactaacttgaggttatttgttttggaattccagcttcagctgtttcccgctactgctaagaacaatctcagaataccattccattatcatgtgctccctccatctgtgtcttcagaaatcaaagcgacgaaaccaaatattggccatgatttgctgcttcctccctgaactaaaatgaattatagcaaagaat

SEQ ID NO: 9560 - DNA, 1094 bp, Homo sapiens
tgtaaggcattatgcattttagcatccccttctctttggtaacacagcaaccatttcctaggcttctactgtgtgtgaagcccatgctaactcctgggcaggaagaccttcagtaaaaggcttagaaatggagtttatcctatcaacaaaagagagcaaggaaatgatgtaaaggcagtctattttcagagccagagaggaactgggagattgtagatagtttgtggttttcaattagaggcactgaaattgggggcagttggtgtcacaatcctaaaagaagttgtgagaagtgtttgtaggttagtcaggtagagtagacattagtagattctcttaataagttagaaaatgtttagctgaaacaggtatctttctgagtgctgacaggcctttaaacctgaactttttctttttcctcattttaagttcttgtgggtctaagtcttgggtgctgaaacccatacctcacaggctcccgtccccagggaaggccgccctacctgctggattgttgggcaaccacgcagtccctgatttttgccaggtggggtggaactcccagccaacacgagctgtgatcttcgaagactgtgctgtccctgtggccaacagaattgggagcgaggggcagggcttcctcattgccgtgagaggactgaacggagggaggatcaatattggtgagatacgcaggggtgtggcagggaggtagcggtccgggacaggcactgctgttttccagcttggttggaacgtcggcgctcttcccctctagcttcctgctccctgggggctgcccacgcctctgtcatcctcacccgagaccacctcaatgtccggaagcagtttggagagcctctggccagtaaccaggtaacctctgccttgcctccacatggctttgcactatttgcagcccgggacctgctctagggcccacatttccaggagagaagccaggaaattcctctgtcagtcccaccactgtcctagccagagcttgtgctttatttctgtccatcttttcttgggatatctttaacgatattaaagtgtcgggtgagtgaagtggacttagcacttaaaagcaa

SEQ ID NO: 9561 - DNA, 1032 bp, Homo sapiens
tgattagtatgtcttcttggtgggccatacagtcagttctacgatgtattgtcaaaaatctctgcactgcacaaaattgtgtaataaaaaccacagggcttataggaaacatgatgttaaggggcataacactcaaacatgttgccagtggcacaaaaaaacacagttgcctagtgaactatgcctggtatacctaataaaatttttactcatagccctatgggggagggtcccctgggggcccttcttgctaaggtctaaaggtagtacccttactagatttactgtaactccactatcttcacagaaactcctcatttattcttattttgactaactcatagcaaaaatttataaggaagatgtagacatttttgtttttgttctcttttttaatttatacttttaatgagtgttacaatagggcagtgagtggaagaatttatatataaatcccaagaaacccagcatcataggataattggcagcttgaaccacaattggataatagagcaaggaactattaaagatggtcatggttagtgtaacagaggtttaatttccactggtaacttcaacttatttcaaaatagagctatgcatggttttggcttggatttggggcagacctaacaatttggaggaagaaataagaagatactcatcatacttccctctcacctcttctagctatgttccgtggaacctgcatgagccagaaagaggcaaatttgacttctctgggaacctggacctggagtatgtggtgttgctgcttctgtgccctggtcaggggcagggcacagaggtggctactgggggtggattagcaaccaaagagaaccagggagggacgtgggtctggagtcctgttctaggactgtgagaggccctgcacccaggacccagacgctccccaaccgtgacctgtcacccagagggactgggcctgcagcctccgggccccacctctccactgcagcccagaggggcagaagaccctgggagccgcccgactctgcatggggtctg

SEQ ID NO: 9562 - DNA, 1045 bp, Homo sapiens
cataccgttttccacagaagttgcaccaaattacattcccaccagcaatacacaagctttgcaatttccccacatccttgccaacacttgttatttcctgtttatctggggagagccatcagtgggtgtgaagtggtatctcatggtggttttgatttgcatttccctggtgatgttgagcatctttcatgtgctgattggtcttttgcatatcttggaagaaatgtttattcaagtcttctgctcatttttgaatctagttgtttgtttttatgttgttgattataggaattctttttactttctggagatcaattccttaacaggacctgccaggactgggtccttcgcttcaaggcagcaggttcccttttggctcagggtatgtctagaagtgtctggaagctagggcctggaacgagggcctcttgactctgccggcgccctttcctactgtggttgagctggatccaagatgcaagacaaagtcctctttactctttgctctcctctccttaagcagaaggaaggagccactttcgttgctgtgagctgcgctacctgggcttgggggagggatgtgcaagaactcccttagccatgccagctggtggctccttaggccatgcgctgtgctagtacactggctgtaagctcatcctagctccaggagttgcataggaattgcggtctttgtgtcctagactgcctttcatgtttacctaggactccagagcacttcagcccatggtggtgaggcttcccaagaaactcaagttccaatcactagggtgggcagttcctctctggctagggctggtccaaatgctccgtctacgtggatgctggctgagctcagcatggctttatcctgtgctgtgacaaggcagcactgagttcaatgtaaagttccccagtcactgtgctctcccttccccaaatgcacagatcctctctcctcaccacttggctgccgctgggagatgggagagggtggcatcggtggtgtaaggctgtctctcttgcctgccttaatgcgtctttt

SEQ ID NO: 9563 - DNA, 1078 bp, Homo sapiens
tcagggagacccaggtgtgcagtcccgctctgccgctacctgaggccaattattgtgacctagaggcaagttatttcacttccccggagccccagctgtcgcttgcgttccttcactggcaatcagaggctttcgtcctgcagcagagcatcagggtggcctggcttgccaggctggctcagcctctctggtgtgtgcctaggctgtgcctgtgaactgactgttaggcagatagcaggcaggtgaggggccccaggataaggctgtgccactggggtgggcgtgggcatgcccgggtgtcagccaaacagagcgcacctttcttgagcatatgtttcactgatagaaagccactgaaaatagcattttaaattttaaacggaacatgttatggggtagaatacagaattagcccttatcaagaaatcagagaggaatctttgtttacatcattaccttggaccggatgcttggggtgccaaggaaggatcaggctctggttcgtacaaaagaacaaggaacagagtgcatgctcggcttgtagaagtcacagttgattgagatcaggtgcacagcgagtgactgcctctcagctctgtgctgctgtggcggagtctccaagacaacaagataagtctcctggcgtcctggctgacttatttatttatttatttttgtgagacacagtctcactctgtcacccaggctagggtgcaatggcacaatctcagttcactgcaacttctgcctcttgggttcaagtgatcctcccacctcagcctcccaagtagttgggattacaggcatgcaccaccaaccctggctaatttttttgtgtattttagtagagagggggtttcaccatgctggccaggctggtctcgaactcctggcctcaagtgatccacctgccttagcctcccaaagtgttggggttacaggtgtgagccaccgcgcctgactgtggctgacttctaactggaggtgggaaacggtgtcagggccgcttactttattgtgctggtggattgagaagggtctggggtcacctagaaggtccctggctttgagacagtgc

SEQ ID NO: 9564 - DNA, 1067 bp, Homo sapiens
gcctggcctttgatagatatttcaagttcatcttttttttttgcttccttaatttttttttttgctataccccatgcctccaagataacagttttttctttttaatttaaatataatacagttttactgtgtatccaagaatatctgaaatctttcgtgggtctctttcttttgtcttttgtatctgttgctttttgctgggctgagcctgcttaaaacaagccccgttagctgtaaaggtttaccttagaaagtcaggtgtcttcctctgtaactctctcccttttccatctgctccaaggcatttatttatattaatcttgacgcaaagggaagttgtgtccacttcaccttggccagtaaggaagcagtgtttggcagatgttgttactcctaataatgccagccagtgagtgaagctgacctgaatgcctcccagggctgaggcaatggcatgatcaccgaagctcaaaccagagacagtttcacctttctgactgaatagtgttcggtgtaggccaaatgcctgcagactactgtttgaggactggtgtggtctaccaggtgtttccttagcgcctggatgtctctggctgccatcccagggatagagcatggtgttagatacgctagatgcctgccgaagtaattatgggtgaaacatatgatgtccaagatttgcttttaaaggctccaatacctcctcccagattccggagggctgtgaaacaattagctatgaaaactggtaattcctgaagctgggtacatgggggttcatgatccctctctcaccttttttgggggagaatgtttgagactttaataagaacttgttgccttttccttttacagggtgttgcaggcatcttcctcaggcctgttttctctgttttccaggctgacgtgatggcagacagggttccccgctgcccggtctgcaccggcgttgtgaagcccgacattgtgttctttggggagccgctgccccagaggttcttgctgcatgtggttgatttccccatggcagatctgctgctcatccttgggacctccctggaggtttg

SEQ ID NO: 9565 - DNA, 1050 bp, Homo sapiens
ctaatgaatggttattttaaaaaataaacgtatttcgggataattttaggtttacagaaaagttgcaaagtgagcgcagagggtcccttctgccactccgcagcctcccctctgtaacttcaaagcccacagggcatggctgttgtagctgagaaaccgtcgctgggtgtccctgtgaactccggactttgaatttcactatcaatgtcctgtttctgctctaggaccttgtccccgctgccacctgtgggagacagcctcccgtgcaccatttgcccagcaccctcaggcctgtgacggtctctcagtctttccttgtcttccatgccctgcagttctgagagggcctggccaggcagtttgtccaggtgccccgatccaggcttgtcttgtgctttctcgtgggggtggacgacaggtttcagggaggggtgctgccgcctgtctcaccccactgtggcgtccctgacatccaagtgacattacagacagctctgaccttcctcaccagagtcaggtgtctgtaggtgtctccttggtgacaggactgcttctccctttgcacatttagtcaggcagcaagtccacggccgtgggggggcttctcctagacgggaggatctggaatagcttggacttgtatttatttatttgatcatttgtttgtatccggatgggctcattttatatgtgttttaaactctgagctagaaggcaacactactttcttgtgaagcacaccatctgtccttggccctagggagctcctgccgtcggctcctgggtcccctgatgcacccctttcaacagacttttcattttggggtacgtcctgacttcctggcactgcagggtgctccagcctcctcttgcattccctgccctggcccgggaatcagccccttctccaaggagccccgggtccttttattggcaagtcttaagagagtgaggcctgggtgccaggcagggagccccaggtccttttattgggaagtcttagagagtgaggcctgggtgccaggtgggtgccaggtgggtccggtgctg

SEQ ID NO: 9566 - DNA, 1050 bp, Homo sapiens
cacctgacgatggtggcctgacccctgcggtggaggagaggcaggaatggagctacaagagtgggtccaggaggtgtcctcacctgcggggaggccgagagctcctcgtaggcatagggcacacctgaccagcagaacccacagctgtgccgcagaaggagatagaagccccgtggtggtttgatagagctggggctggctggggtggcgggtttgttgtatgcattttttactgcacgtaaaaggctttactggggaagaatagatttcctctctttttcctggaagagccgaatgacttagacaatggaatagaaatgtaggtcgagcgtgttcatggaagtgttaagatcttcctggttacaagggcacacacctgagggggagtcactttgtttgaagcacctgagcgaggctgttcgctttgtccattctggcttttgttgcttgttaaatgaggctccttctgttgcagaggtgaccacagtgacagtggccaacgtgggggctgctgcagacaatgtcttcaccacgtctgtggcgaacgcggcatccatctcaggacatgttctggtaagctgctccgaggggcacagcccagggcgggtggtgccacgctgggggcctccggcttccccgaggctctcccggggttcagcccgctgtgtgaacgtctgctctgtgagctggggagggacgcactggctcgctctgctctcagaggccttcgggctgtgctggaggtgggagaaattacagctgaggtagaagctgcctcggaaggccaggtgaagagccacacctgtcagatgggcttgtggcctgcgttgggcagggactcccagcaggctgctgtccggccacagttcagcctctgcccgaggcccggccctgcctgtgctccttatcctatagctgcagggccagctgaaagaagcaaggcgtttccctcccccatatcctgttctcgtagcatttatggtgcagtctcccacgcctgactgctgtctacttagaaaactgctgaaagccagttgcatttcaaatagt

SEQ ID NO: 9567 - DNA, 1035 bp, Homo sapiens
ggacttagcttgttgaccggctcggaggcagaggcctggcctcctgtgggaagccttgaagggtgggagggactcctcagcagtgggggttggtgtggggagggctctgcccactcagctctccaccccaggaggagccctgcactggtcttgatcaagggcactggcagcccagctgcctccctggcctgctgctctgcccgagttgtcccctcttgcaccctggatgggcgggcatgcccaacccagactggagttgaggggcagtggccagatggctggtgtaaggtagggtagcttgttttaggttcagggtgagaagctgcagctccatcctacagcccagtgctgtaggatccgtaaaggtggccgggtgcagtggctcaggcctgtaatccctgcactttaggaggccgcagaaggaggatcgcatgagcctaggagttcgagaccagcctaggcagtgtggtgagaccccccatctctacaaaaaatagaaaattagccatgcatggtggtgcgcgcctgtagtctcaactacaggcgggaggatcacttgagcctgggaggtggaggctacagtgagccaagattgcatcactgcactccagcctgggcaacagagtgaggccgtgtattgaaaaacagggagaggccgggcatggtggctcacacctgtaatcccaacactttgggaggccggggtgggtggatcacaaggtcaggagttcaagaccagcttggctgaaatggtgaaaccctgtctctactaaaatacaaaaaattagccgggcatgatggcaggcgcctgtaatcccagctacttgtgggggctgaggtaaagagaatcgcttgaaactgggaggcggaggttgcagggagccgagatcgcaccactgcccggggcgcactccagcctgggcgacagagtgagattccgtctcaaacaacaaaaaaaatgggggtggcgacttcaaggccagtggctggtgcatgtcgtgctgcccccacaaggtggcaccatgaccccatgca

SEQ ID NO: 9568 - DNA, 1020 bp, Homo sapiens
gcctgtaatcccagcactttgggaggctgaggcaggtggatcacctgaggtcaggagttcgagaccagcctggccaagatggtgaaaccccgtctctactaaaaatacagaaattagccgggcgcggtggtgggcgcctgtaatcccatttacttgggaggctgaggcaggagaatcgcttgaacccaggaggcggaggttgcagtgagctgacatcgtgccactgcactctagtctgggtgacagagcaagactccatctcaaaaaaaaaaaaaaagaaaatattgtaaacctagtggcttataaacaacagaaatcagtttcagttttggaggctggaagcccaagatgaaagcaccagtagatgcaacctcttttgtgagggtgatggtcccatgatgaggctgtgcccctgccctgtgaccggatgacctcccaaatgccccacctaataccatccccttgcaggtgaggacttaagcaggtgggttttggggggacgtgctcaggccacagcagggtgcatgaagagccagtgagcctcattgagcccctctggtcagccagatctgacattgagcccagcattgaagatcaaagcaggtggggctttgggatgtgaagtgggttctgacgcggggccccacagacctgtctccgcgtgagctgcctgcaggcccctgcgtcattcctcagctgcgtgcgaggcctctggcttggagagcctccccgctgtgcacagttctctctttgccagggcagggcttggggcagcaccaggctggggcagaggaggaaagcaagaggacagacctccagaagagcagcggagggcgggtgaggatttccccatataccagtgtgtgttcatctacccatgaggaataaaaccatgcagcagcatgcaaatggtgtcctggtgttcgcagcagaactgctcatggtaatggataagttgttttcatacagtgggttgtcaatatgtttaataattgttggtatctattaataagggcaata

SEQ ID NO: 9569 - DNA, 1092 bp, Homo sapiens
ccacagccgttcccaagcaccagcgtggctcctggtgccagtgacctgccaggaggccccttgtgattataaaaccgttcagttgggccgggcgcagtggctcacacctgtaaccccagcactttgggaggccgaggcgggcggatcacgaggtcaggagatcgagaccatcctggctaacatggtgaaaccccatctctactaaaaaacaaaaatacaaaaagttagcctggcatggtggtgggtgtgtgtagtcccagctacttgggaggctgaggcaggagaatggcgtgaacctgggaggcagagcttgcagtgagctgagatcgtgccactgcactccagcctgggcaatagagtgagactccatctcaaaaaaaaaacgttcagttggctgggcgcggtggctcacgcctgtaatcccagcactttgggaggccaaggtgggtggatcatctgaagtcaggagtttgggaaaagcctggccaacatggtgaaactaaaatacaaaaatgagccgggtgtggtgtcaggcgcctgtattcccagctacttgggaggctgagacgtgagaattgcttgaacctgggaggcggaagttgcagtgagccaagattgcgccattgcactccaacctgggcaatgagtgaaactccgtctcaaaaataaaaaataataaaataaagccgttcaataaggagaatttggaaaaaagtggaagaaggaagcgctgcagccacatccccgccctgaaggctgcgtccctccagtgcctcgcagattagtcaggatgcccacttagcactggccacggggccttgctctgtcccgggtccactctcatccccgtgtggtgatggacctctgtggacaaatgctttttattttatttattttttgagatggagtttgtctctcgtcacccaggctggagtgcagtggcacaatcttggctcactgcaacctctgtctcccgggttcaagcgattctcctgcctcagcctccggagtagctgggattacaggtgtgcgccaccacgcctggctaatttttgtatttttcgtagagaccgagtttcaccatgttggcca

SEQ ID NO: 9570 - DNA, 1837 bp, Homo sapiens
tcctcagtgggtactcagtggtgccctccgaggggtgacaccaacccagtctcaggttacaagtgggcgtgaccccttgagtgagtggttagattcactcctgcccagagggtgccccgccccagcactctgcccaaggggctcaccccaccaagcccttctcattctagtcacctgtgtgctccggtgctgggggagctggcccgtcctcctgtagtggccgtgtcgctctcagggacaccccatgggaagatggctagactttgtcatctctccgccctccagccttagcagctgtccctgttatgagcagtgacacccccggtcccacttggttgggtgaggctccctgccctgacttgaccttcctgacccctggggtgggccgcagggcctgggcctgtctcaggagcccccaccccgctcccgcagccctctgtgtgtgagctcgtcagggcccccggcttcgcccgcctgccgctcgtggtggaggacttcgtgaaggattcgggcgcctgcttcagtggtgagcctcgagggtgccccctgcacttacagaagatggggtggggggcttccctgctgcagcctgggggagaagcctcctgggccctgggttctatagacccccatggcactgactcagacccagacaggctgacctactgctgaccctgggagcccgcctggagttcgaggctctcagtgggtgaggtggacattgcctgaggttggtgccctcggtcctccccagcaagcgagcctgacgctgtccacgtcgtgctggaccgccacctggtcacaggccagaatgccagctccactgtcccggccgtgcagaacctgctcttcctctgtggcagccggtgagggcaccagggtgggcacattcctgccacatcagagctgcacccggtgcttttgcccaagctttgaccacacgtctgtcctgcaggaaatgaacctgctgggtagatgcaccccctgagacagcccaggtgtctccagaggcagccccgtctcaggcttcagggaccccgcctcttccctcctgacaagggccctggatggcagcctggtctggccctgatgggattgttggaggcctcctggaatcagctctgagggggtgtcggctctcctggagggtccaaacccccatcctcctgcatgttctctggtaggaggcagagaaaagaccccacgtgcctggagagctgtgctagctgctaggtggtcctcgggaattccaggctgggttttctagggaggactggttgtcacgtgtggtcactgttgactagacagagtcggctcgggggtcctctgtgtgggtttgccctgctgtggcctgtctgccacccaccacctctttcactgttggtgggggccttgaggggagggcccagccggcgggagctggctcagaactttggccaaaggtgaacggaattttttaggagcagcagcctcctgccccaaggccgaccggcactggcagcactttcctgttgaagaaatcttcctggcgtgtggtttcaaagtgtaagcacctcagtgatgcaccctgtcctaagcattgagaggcacgtttacttgtgaatatgagaccatgagattctcaatgataggaaagtgctgtcccccacggccttgcacagtggcctcgggtagagcggctatcaagagcagacagtggtccagcctgctgggcacctggcctgggctgtggccctccagcgggctgccccctggccccaggttagggcgtccaggagaggcttaggccctctacttcctcacagttccccagtttgagccatcgaaggccttcttc

SEQ ID NO: 9571 - DNA, 1033 bp, Homo sapiens
gcacccttgaatctgggagatgccgagaccggctttctgacgcagagcaacctgctgagtgtggctgggcgtctgggtctggactggccagccgtggccctgcacctgggggtgtcctaccgggaggtgcagcgcatccggcacgagttccggtgaggctcccactgcccgctggctgccagccccagggctgagccctggctgcctggagggcccacctgattctgacagaagtttcttccaggggaggtgggggaagggcaaacaccaggctggaaaggaaaggtctggccgcacctggccccaggagccgggaactcccccacactccgaggcagagtgtggtggggggtcctgggcaggtggacaggacccctctgtcgcccatcctctgcctgcagggatgatctggatgagcagatccgtcacatgctcttctcctgggctgagcgccaggctgggcagccaggggctgtggggctcctggtgcaggccctggagcagagtgaccggcaggacgtggctgaagaggtgcgcgcagtcttggagctcggccgccgcaagtaccaggacagcatccgacgcatgggcttggcccccaaggaccccgctctgcctggctcctcggctccacagcccccagagcctgcccaggcctaggccccacagacttttaggctggcccagatattccccagtggatgggcagagcccccaccttcaagtctctccagtgtgtggggacgggtccctgtgagcaacaaaactgcactgtttctttcacctcagagcttgatttatttgttggatggagaagccgttggagggcggagggtggtggggtagaggcctggcccctgcggggagggaggcctgtgtgcacaggtgccccacatcctggtcctgtcctctcccactgtgcctggggcctcctgtgggtcctcatcttcctgggagggaggagctgtgctacaaagtaacccacatgggctactttttttttttttttaaatggagtttctgtcacccaggc

SEQ ID NO: 9572 - DNA, 1031 bp, Homo sapiens
gcgctgcctttcctgggcggcaaccggctgagcttggacctgtaccccgggggctgccagcagctgctgcacctgtgtgtccagcagcctctgcagctgctgcaggtggaattcttgcgtctgagcactcacgaggaccctcagctgctggaggccaccctggcccagctgcctcagagcctgtcctgcctccgctccctggtcctcaaaggtgagttccacctgttctgggccctgtctccatctctcgctctgccctgcctctgctgcatgttctcaaaggcaaaccccagtcccagccccagctccaggccgcccctcccggctccccaggtgtgaactgttctgctcttggtcctgtccagccccatcgccatcctcggtgatcaccacccccagtgtggggctggctgggccctggctcctggaccctgacgctgcccagtgggggtctctccagaccacagtgcagatgttgttcctggggaaggttgtgggtgatggttgtcagctgagatgagccggtggtctccacccctgcctccttccatttgcgggcacctctccagtgtttctgtctgtctgtccctgtctggctggggtgggggtggggtgggaggtctgtgcctctcgagcagctgtttctctggctggcagggtcgatctgggacctcggaccctggctctgagggccacatccgcctccccccttcccaggagggcaacgccgggacacactgggtgcctgtctccggggtgccctgaccaacctgcccgctggtctgagtggcctggcccatctggcccacctggacctgagcttcaacagcctggagacactgccggcctgtgtcctgcagatgcgaggtctgggtgcgctcttgctgtctcacaactgcctctctgagctgcctgaggctctgggggccctccccgccctcaccttcctcacagtgacacacaaccgcctgcagacgctgcccccagcactgggggccctatccaccctgcagcgcctcgatctctctcag

SEQ ID NO: 9573 - DNA, 1035 bp, Homo sapiens
tgccaggaccgtcaccagggtgacaatgaagtgcggcagaggcagagagagcttctggatcccctggacacctgcctgaccccatgtgcccctgcagagacctagaccccatctccagggcccagtggcacattggttagctctgggaccatgggggtgggggttggggctagccacgcgtgtgcatgtgtgtgtgtccgccccgcctgtgcatgtctgtgtctctgaatggcctgcccaggcccctcacctgctggtagtaggcgtaggcgaggataccagcgatgatctccagcagaaagatgatgaggagcaggatgaagtactggggggggcagcacaagggcacccttgttctgaggcctagtgcctagacctagtgcacctcagagcagagtccccaccccggctccccaggctccaggtgggggctgaggggcggccaccctccctgaagctttcttgcggagctggtgtcttccctcagctggtccagcaggaacgtggggacccacaggactaggcaggtgtggaaggaccgtgaccccccccccaggtgagcacagcaaggcacaggttcaaagcctgcagcgacaacctccttgggcccatctgcaccacccccaccccgtggccctgcgccctcctgaccaggcgcagcaggttccgacgctccttgaaggtggcgcagcagcccaagaccccagtcaccatgacgacagtgcccgccaccaccaggatgtaggctgtggccaggtaggtgcctgaggccagcaggctgatgtagtcactcttgagggccagcgtccagatgcccactgccatgacagccaggccagccagctacaagcagtacacaaaggtcatcgcatctgcccaggtctgatggtggcccgggaggggtgggggtgggggtgggggcaaggcgacccctcctcacccagaagcagcaattgtaggtaaacagcaggtacttgaggcaaacggtgccacatgttgtcttcttctcgttgaactcacccatcctggggctga

SEQ ID NO: 9574 - DNA, 1073 bp, Homo sapiens
tctctctgatggaaggaagcagaggtgaggaaagaccccacagcggcagagcagggcttgctctggctggggtgggggtgaaccagctaagggcaggcccctggagagctaccctgccgtggccagtgctggatgaggtggctgcacatcagcaccttggtggtcttggttttctaagctccccgcaattacttcgttttcatttcatttacatttcttacatacgttatacacacacacgtacagccagagtaggtgggagaggaggctcctcacgctccacccagggttctgggcatttccaggttactccagccaggatcatactgctagatctcagcttctgagccgggtgaatctgttcgccttgccggtggcggggggggtgaggccagcaggcagtgagaggcaggttggatgtgggctccaggcctttgcagaccgtagagaactcagttggcctctgctcctcccctcgacacagggatgcgctggatgccctgggcctgaagcgctactgctgccgccggatgctgctggcccacgtggacctgatcgagaagctgctcaattatgcacccctggagaagtgaccacgctggaacccacccacccgctgtgctgaccatgggccctgagcgtcctgccccgaattcacgaggctgaggcatccgggagctggcgtaatgcctggccgcagtgtgtgtgtatccgataccccactctggaaggaaccatccagtaaaggtctttcagaaccactaaggtcccagccctcactaggatgtcaggagccaggtctaggcccagctttcacactgtggcagcccagtgaagcagactgggccatgaactctcctagccctggggccagcctgttccacaggcacccctgcaggaggcgctgccaggagagccttccatctcggggctctttgaggttccctccttctgggtgttcttcaggctgagcagagaggctcctgtaccctctctctcggaatctgaagagccagatttaggccgggcaaaggggctcacccctataatcccaggactttgggaggccaagg

SEQ ID NO: 9575 - DNA, 1063 bp, Homo sapiens
tgattcacaaaacaaagtagtgttgtgttctagctcggagtgcagcctcaatagccaggacttcatcccaatataaacaaatggctgaatatataaatgagtgaccaagaagaggccgctctctggtgccgaacttccagtaattcccgtagctactcctccgtcagggtggtaaggggtggtccccaccccttcagtgtggtctgcgtgcagcagcttcgttcgagagcgcggtgcggggcggggaagacgagagcgtctttgcgtggggaggcctggcagtcacagcctcagccaggagatcgggagcacctcccgcgatgagccgtgctgacaggacgggccgtgggcacggggcgacgagggggacatttccctctgtgctcttcctacccacacccacagcccagcctcgtcgtgaggagagcaatggatggatccagacgtctgagtcaagtttggaccttgctgcatcaatgtggatttgttcattgttaacaaacagaccatcctagtgtaagggttagcaataggaagagtgagtggggggccatggggattctgtgtttgcagttctttgtaaatctaacacttttctaaaactaaaagcttattaaaggtaaaataacctctgacacagacacatggcccgtgccccctgccccgtcccgccttggttgcgaccgttcccccctgcgtggtgcctctgccccgctcctgtgctctctgttcctggccagctcctggccctggctgtgcccagaaggtgcttttgctcttccttttctggggtggcggggccaggccacactggcacccgtcactggcctgcgggcctctgtggcagctcctcgtggagtctgcagagcctgctccaggtctgctcctcttcccagtgcagtgtctgtcgctcagtgtctgtgggttccagctgcccctcaccctaccccactcctgccccactacctaagttttgatcaataggaatacctgctccctgcacgtgtcccccagtgaacaaacacagatgaatgtggacgttcctctggcgccagcccagccc

SEQ ID NO: 9576 - DNA, 1043 bp, Homo sapiens
ggactgccaggcaggccgcatggtcagccaccagggtcaggtgtcaggcgctgctccagacgcgtgcgtctctgatcttgggcatggctcagcagcctccggcttggccgtgggtggttcctgctcacctgtttctgagtgaccaaccctgaaacttctgggcctaacatgaggcctcatcacctttcccgcatctgtgggctggtgggtggggctctggccccacaggttattcctgcactgccacccgtggtggctgggctggcagccctcaggggccttgctgtcatgggtgtctgctggggtgccacagtttcccccacatggatctctccaggcagagttttatatcctcaccctagagcagagtttttggacttcttgctctcaggaccccttaaagtccttgttgaggctgggcatggtggcttctgcctgtaatcccagcactttgggaggccaaggtgggaggatcacttgagactgggagttcaggaccagcctgagcaacatagggaaaccccatctgtacaaaaaagtaaaaagaattagccagatgtgatggtgtatgcctctagttccagttgtttgggaggctgaggcgggaggattgcttgaacccaagaggctgaggctgcggtgagctctgcaccgctgcactccagtctcagtgatagtgagaccctgcctctaaaattaaaaaaaaagtccttattgagtttacatgatggagctatgaatattcatctttcagaaattaaaattgagaatgtaaaacaactttaattcatttagaaataattaaaaacccagtatatcttaacataagtaatatttttaaaattaaaaaaaaaacctattatcttctagagtcaaataaatagagtggctttactttttgcaaatctcgagagctggatctgtcaggttctgtgtttatcctgctgtaattttacaggccaggtggcttccacaaggctttggcacatggcacctttgtggtactgtaaagacagtgctaacctcatggtcccagaccacac

SEQ ID NO: 9577 - DNA, 1050 bp, Homo sapiens
tgggccctatcagcccatgaaggagcctcctagaccccaggctccgctaggggagaggcactgtgtgggtgcaacacgcccctgcaggagctgggcactcacccccagcaggcacgtggcgcacactaaacctcagcctgcaggtcaggagggcagcagtggcaaaggagccgtgcctctgtgcctgagcccctcccgcacccgcctgctatccggctgcccccgggagcccactctccagtggaggcagccccaaggccaccatccaccaggggctggattatcggcttacggagctgccctggagtcaagtctccagggattggactccctggggctgtgctagggagagaggggcaggtgtgaggacagcaagcccggaggagggcagagagcttgaccatgtgggagggtgaggtgcagtccagaccccgacttgctgggggtcctgtggtggaaaagatgcagaagtcacagcagggagatgcctgtgtcccagggatgagatggaatgttctggaatgcctaagggtccgtgaaccccagggcccacaggaaggacccctggcctcttccagccctcagacccttctctgtggggcccatttgcccccctctgccttgttgcatcctgctgagagctggccttgtgacctggacggggtctctccagagggagaagggttcccacgggcacatgttggtgtgtcctggtgggcgcagctcccagctctgatctgtcctggggagcttctgggtgccacccaggggcccgcagcactgctgaccatccccctgtccctgcaggtccagcaccatgtgctaggtcactcccagcgcgaggccacacctgggccgtcggagcagcccctcctcacttcaggggtcaccctccccagcacccattgccccaccatggctggggaccggctcccgaggaaggtgatggatgccaagaagctggccagcctgctgcggggcgggcctggggggccgctggtcatcgacagccgctccttcgtggagtacaacagctggcatgtgctcagc

SEQ ID NO: 9578 - DNA, 1043 bp, Homo sapiens
gcgtccgcgcgccagcacagaaacagaggagagtcccagagcaggaggcccctggcccagcggcccctcccacacacacccacacactcgcccgcccactgtcctgggcgccctggaagccggcggcccaagcccgacttgctgttttgttctgtggttttcccctccctgggttcagaaatgctgcctgcctgtctgtctctccatctgtttggtgggggtagagctgatccagagcacagatctgtttcgtgcattggaagaccccacccaagcttggcagccgagctcgtgtatcctggggctcccttcatctccagggagtcccctccccggccctaccagcgcccgctgggctgagcccctaccccacaccaggccgtcctcccgggccctcccttggaaacctgccctgcctgagggcccctctgcccagcttgggcccagctgggctctgccaccctacctgttcagtgtcccgggcccgttgaggatgaggccgctagaggcctgaggatgagctggaaggagtgagaggggacaaaacccaccttgttggagcctgcagggtggtgctgggactgagccagtcccaggggcatgtattggcctggaggtggggttgggattgggggctggtgccagccttcctctgcagctgacctctgttgtcctccccttgggcggctgagagccccagctgacatggaaatacagttgttggcctccggcctcccctctgtgctggtgtgctcttgtgcctggtcaggggtggctccaacttgggatggggaaggagggtgggtagtgcgaagccagcacggcagctgactcggcagcaccgggacaagcatttggggtgccccgggcctatggccccctgccctgccctgcccagcccatgggctccagcctggtcggccagcggggactgacttgttcccaggtctggagcagtagccggcaggatgtggccttggctggggtttcagggtgtctagtgtgagtgccagccttgaggagtgatttcagggaggtggccc

SEQ ID NO: 9579 - DNA, 1859 bp, Homo sapiens
gtgcagaggccctgcggccagaaccagccatcccaacttcccagattgtgccatcactccctcctggaagccttctttggttttttcttccagacagacagacagggtcctccccagtggagctcctggcactcacttccttgtctgccgctagccttgaccctgatgtctggctgaaccttggctcctgagcagaccaggagaacctgagggttgaggaaaacctcttctgggccaggctgggcccacgcagagcagccctaccccgggaagaagggagtctgtccctcctcctgccttctgggcctttccatccctgcagtttcagaaaggcccctccttcaggaagctctccctgattgccacattcaccctcttactcctgacctggcactcttgtgcttggggggtggcgtggcagctgactcctcccttttcctcctagggacccagatgcgcagcctgggggtgagctgatgctgggtggcacagactccaagtattacaagggttctctgtcctacctgaatgtcacccgcaaggcctactggcaggtccacctggaccagtgagtagtggctgcagtcggctcccctgggttctgtgggcgggggcggtgtgcggagaccctggaggaccccggttctgcaggtgggggttgcatgtggggagtagtgggagctgggcaagaaagagatggggtcagaccagccctccatgcccctccttgcccctccatgctccccatcacctccatcccctctattccctctatccctccatccctccatttcctccatgcctctgtgactctccatgacccaccatcccttctgtccatccctccatgccctccatcccctccatcccctcatccctctgtgactcttcatgaccctccatctcctccatccctccatcccctccatccctccatccctccatcccctccatccctccatccctccatccccacatccctctgtgactctccatgaccctccatcccctccatctgtctatccctccatccctccatccctccatgcccctccatcccttcatcccctccatcccctccatccctctatgcccctccatcccctccatccctccatgcccctcaccaccacctgagggtctcccaccccctctaccactctgtgtctcctctcccaccctcttccctggagggcttacagccggctgtgcttccaggagccctgaggggaggagagtgcagcccagccaggggaggggctcccagggaggggcactgggcccccagggcacactccagtcccggcaggggcttcacgccctgactccccgcagggtggaggtggccagcgggctgaccctgtgcaaggagggctgtgaggccattgtggacacaggcacttccctcatggtgggcccggtggatgaggtgcgcgagctgcagaaggccatcggggccgtgccgctgattcagggcgaggtgagcgccgggggctggggctggggctggggctggcagggggagccccaaggccaccactaccaccctgacactgctgtgacccctcttagtacatgatcccctgtgagaaggtgtccaccctgcccgcgatcacactgaagctgggaggcaaaggctacaagctgtccccagaggactacacgctcaaggtgagcgggcaatggggtgccgcacgccccaggtgagcgggcggtgagggggcgcacgctccaggtgagcgggcaacaggtgggggggcgggtggtgctaggcctgggtactgaccaccagggccgtcccaggtgtcgcaggccgggaagaccctctgcctgagcggcttcatgggcatggacatccc

SEQ ID NO: 9580 - DNA, 1051 bp, Homo sapiens
cacaaaaagtatttgatgaagttgaacatcctttgttgataaattctaacagttcaggtatagaaggaacactcctcaatataacgaatgccatttatgaaaagcccacagctaacgttataatcaatgagggaaaacagaagcccttctactatgaaccagtacaaggcaaggatgcccactctagctactactactcaacatagtactggaagtactagtacaaccaaacagacaagaaaaagaaatgaaagacattcaaatcaggaagtaagaagtaatattatctttatatgaagatgacatgatcctacatatagaaaaccccgaagactctgacaaagcaacctgttagaactaataaatgagttcagtaaagttgtaggatataaaatcaatataaaacagtagttgcatttctatacacaaataatgacctggccaaaaaagaaatcaagaaaacaatcccatttatgatagcatcaaaaaaattgcttaggaataaatttagccaaaaagatgaaagacctgtacactgaaaactatgaatcattgatgaaagaaattaaacaagatacaaataaatggaaagatatcccatgctcatgaatctgaataatattgttaaaatgtcaataatatccaaatcaatatacagattgaataaaatccctatcaaaatcccatggaaaatttttttaaattctaaagttcatttggaatagcaagaaccttaagtagccaacgaaattctgaaaattctgttctgaaaaacaaagggagacttcatactttctggtttattttacaaaactattgatcaaacagtatggtcctggcataaaaaacaaacatgtagaccagtggaacagaatagagagcccagaaagaaattcaaagatatatgatcaaccaattttccacaagaacacgaagaaaacaatgcagaaagatagtctctctcataaatgacgttaggaaacccagttctgtggcttgtccaacccatggcccacagaccacatgtaagcccaggatggctttaatgagg

SEQ ID NO: 9581 - DNA, 1050 bp, Homo sapiens
acaatcattttgataagtgcaaataatgcagttcacataattcaacatccttccatgataaaaactatgaacaaattaggtatagaaggaatgtactgcaacacaataaaggccatatatgaatagcccacagctaacatcatactcaatgctgaaaagctgaatgcctctcctctaagatgaggaacaagaaaaagatattctcaccacttctattcaacacagtactggaagtcctagccagaggaattgggcaagaaaaataaataaatacactcaaatcagaaagaaggaagtaaaattgtctctgtttgcagatgacatcatatatgtagaaaatgctacagactccacaaaaaaaacctgttagaagtaataatctaactcagtaaagtggcaggatacaaaatcagcattcagaagtcatttgcgtatctatacactaataataaacaacctgaaaaacaaattaagaaaacaatttcatttaaaatagcatcaaaaagaatagagagctcccaaataaatcctttcatatatgaacgcatgatttctgacaagcatgccatgtccattcaatggcaaatggattctcttttcaacaaatggtgccaggaaaactggatatcctcacgtgagagaatgaagtcgagacctttacctaactccatatacaaaaattaactcaaagtggaccacagacctaaatgtaagacctaaaactataaaactcttagaagaaaacatggggcaaaaactgcatgacattggatttggtattgacttcatttggatataatatgaaaggcacagataaaataaaaaatagagaaattggactgcataacatttaggcatacatttaaccaaggagataaaagacctagacactgaaaactatgaaacattgaacaaattctaagatgatacaaataaatggaaagatatctggtgttcatagatcaatagaataaatattgccgaaatagctatactactcaaagtgatctacagattcaaggcaatgcctatcaaatttccagtgacttt

SEQ ID NO: 9582 - DNA, 1078 bp, Homo sapiens
caaaaaattaacaaagaaacattggatttaaactgcactttataccaaatggacctaacagacatttacagaccagttcataaaacagctgcagaatatacactcttctcatcagtacatggaacactctccaggatacattatatgttaggacactaagtatgattttaaatatatatatattttaaattggattcatatcacatatcttctcagaccacaatagcataaaactataaataaataagaggagcattcaaaactgtataaataaatggaaattaacatgttcctgaatgaccaatgggtcaaagaagaaattaaggcagaaataaaaaatttactgaaacaagtgaaaatagaagcacaacattctgaaacttaagggatactgcaaaagcaatgctaagaggaaagtttattgtaataaatgcctccattaaaaaaggtagaaaagatcttaaataatctaatgatacacctgaaggaaccagaaaagcaagaacaaaccatactaaacataaaattagtagaaggaaagaaataacgaagatcagagcagaactaaacaagaaactaaataaatataaaggatcaatgaaatgcaaaatcggtttttgaaaagaaacaaaataaccagtggctaaactatccaagaagaaaagagagaagacctacatgaataaaatcaaaaatgaaaaaggggatattacaactcataccatgaaatacaaaaatcaaaactcttcagtctgatcaataaattgattacagttacaggatttaaaaatcaggcttatttctatataccaataaagaaccagctgagaaagaaatcaagaaggcattatcttttacaaccactacaaaaaatctaggaatgagtttaaccaaagaggtgagaaacctctaacaaggaaaactacaaaagtctgatgaaagaaattgaaaagaacacacaaaaaacatcccattctcatggattgggagaattaacaaaattaaaatgaccatactacccaaagcaatctacagattcaatgcagtctctctcaaaataccaatgccatttttcatg

SEQ ID NO: 9583 - DNA, 1077 bp, Homo sapiens
catgatcatctcaatagatgcagaaaaagcatctgataaaattcaaaatctcttcatgataaaaaaaaaagctcatcacataatgtctagaaggaacataactcaatgaaggtcatatatgacaaacccacagccacctggggaaaagctaaacaccttctctcttagaactagaacaagacaaggatgcccactttcactattcttattcagcagagtaagaaaagtcctcaccagaacaattaggcaagtaaaagaaaaagggtatccaaattggaaaagagaatgtcatattgtcctttgcagatggcataatcttatacatagaaaaacctaaagattccaccaaaatcttttagaactggtaaaggaattcaataaagttgcaggataaaaaaatcaacaaacaaaaattagtaggtgtggacatgatggctcatgcttgtaatttcagcactttgaaaggatgaggcgggtggattgcttgagcccaggagtttgagactgtcctgggcaacatggcaaaacctcatcagtacaaaaatgagctgggcgtggtggcctgcacctgaagttcagctactcaggaggctgagatgggaggatcacttgaacctcggaggtgaaggttgcagtgagcagaaattgcaccattgcaccccagcctgggcaacagagtgagaccctgtctgcactcccctgcctcccccaaaaaatcagtagcatttctgtgaaacagcaaattagccaaaagagaaatgaagaaagcaatcccatttgcaatagctacaaaaaaaagcaaagcttaaccaaggaggtgaaagatttccacaatgaaaactataaaatactgataacagtaattgaagaggctacaaaattttttgagacatcccatgctcatggattgaaagaaaaatgttaaaatgatcatatttacctatagcaatatacagatgctatgaaatccctatccagatatcagcaggggcttcaagatggctgactagaggcatctggcactcacctcctccacaaaatatagcaagtaggtaaccacagtttatatagatcgcc

SEQ ID NO: 9584 - DNA, 1937 bp, Homo sapiens
aataaaatgacaggagtaagtcctcacctattgataacaatcttgaatgtaggtaatttaaatttcccaaatgaaagatagatactggctaaatgaattaaaaaaataaaacccaattacatgctgcctataagaaactgacttcacctgtaaagacacccatagactgtaagggaatggatagaaaaagatattccacacaaacagacaccaaaagcatgcaggagtagacagacaaaaaatactgagtcaaaaaaaaaaaaaaaaaaaaaaagaaaaagaaaaaagagacaaaggaggtcattatataattataaatggatcaattcagcaagaagatataacaattatatatgcaaccaacaacactggagtacccaggtatattaaacaaatattattagtgctaaagagatagaccccaatacaataatagttagggatggcaacatttcatactcagcattggacaattcatttggatggaaaaatatcaacaaggaaatattagatttgaactgctgcttcgttagcacacagcacattctccaggatataccatatgttaggacacaaaacgggtctcaataaatttttaaaagtcaaaatcttatcaagtatcttctcagaccacaatggaataaaactggaaatcaataacaagaggaacttctgaaattgaacagatacacggaaatcaaactacatgttcctgaatgaccactgtgtctatgaagaaattgattttaaaaatttaaaaattctttgaaacaaatgaaaatagaaacacagcatacaaaaatgtatagggtacaacaaaagaagtgctatgagggacatttatttcaataaacacccacatcaataaggtagaaagtttttaaacaaataacctaataaacgcatctcaaggaactagaaaagcaagaacaaatcaaacctaaaattagaaggaaataaatagtaaagatcagagcagatctaaatgaaatagagataaaaggtaaaaaagacaaaagatcaatgaaatgaggcctcccccccaccccccgagacacggtctcactctgtcacccaggctagagcgcagtggtgtgatcttggctcactgtaacctctgcttcctgggctcaagcaatcctcctgcctcagcttctgagtagatgtgcagcaccacacctcgctaatttttttttttttttttggtagagatgggggtttgccatgttgctcaggctggtctcaaactcctggactcaagcgatcggcctgccttggccttccaaagtactgggtttacaggtgtgagccaacaaacccagccaaaaaactgattttttgaaaagagaaaatcaataaaccattagctagactaaccaagaagacccaataaataaaatcagaaatgaaaaaggagacttacaatggacaccacagaaatacaaaagattattagagaccattatgaacaactatatgtcaacaattagaaaacctagaggaaagagataaattcctggacatatataacctcccaagattgaaccaggaagaaaaaaaatctgaacagagcaataacaaggaatgagattgtatcagtaataaagtctcccagtaaagaaaacctcaggattgcacgggttttctactgaattctaccaaacctttaaagaactaacatgaattcttctcagacaattccaaaagactgaagagaaaggaattctccctaactcattctgtgaggcaagcagtatcttgataccaaaaccagataaggacacaataacagcaaaaaagaaaactacaggccaatctccctgatgaacatagatgcagaatcctcagaaacaaaacacacacacagacacacaaactagcaatctgaatccaatcgcacatcaaaaagataatacaccataatcaagtgggattta

SEQ ID NO: 9585 - DNA, 1050 bp, Homo sapiens
aggaatggagtgaaaatgtatattcacagctggcacccagttccgcttaggaaaataccttgcttgagtggacacctgttgtttttgcctgccagcagccaggcctggcttctgggaacagcttctcaaatcttccttagggggctcttcctttcccactcctagtgtgcagtgtttaggtaccctctggccatccccaaaggggtccctgtggaccttgcctcagccatcggaggtacagctgcaggtccaaggatggcttgtaccccagctgaggccaataagaacctggccttagattctggcaggaatcctggaagagatgacctcgttctgctgggcttcctgagctgttgaatgcaagctggtggccattttgccccttttagaaagtagctgcctaaggatacagccatcccatggggccaatggatagagagcaagggaaagggagaacaaaagagggaacgggaagggagaaggggagtgcaagaggggagagtgagagcaagtgagcaagatcatctcagctctggggtccagctgtgtctgaaacagctgggtccagctgtgtgagccaaaaaatgtcccttttgtgcttaagcttgtttgagttggggttccatcatttgttaccaagagagtcttcaggaatgtgcatgacaaagttgggggtgaggtgtgagcctacggacatgggcctgggggcagtcaaggttacaaaatagctaaactggtctgcactgcccccactagttttcagggcagagggcagggagaaggcttgtgggaaagaagctggcctgaggccaaggccctggccctagccctgcaacagcacagggaactcttggaaagggatttcctaaggtgggacattggctttctactgctgtgatgcaagtcctcatctccccaaaccttcagtgagcctctctccacaccctgctgtatgaggatgtttgatgcaaattatggaacatgttggatctcacattggatcaaaggtgtgcagaatagatttgcctcaagcatgacagtgatgtgaca

SEQ ID NO: 9586 - DNA, 1023 bp, Homo sapiens
gtgtgagaactttggcaagctgattctaactgcgacttggaagtgcaaaaagccaagaattggcaatattcttgaagaagaacaaggtgggagaacttgctgtaccaaacatcagtacttcttccaaggcagtggtcattagggcaatgtggtattgacacagggagagacaaataggccaatgggacaggattgagcattgggaaacagcccacacaaatatggaagcttgctgtgtatcagaggtggcctgcacatcctgggaagagcatggacttttcaatcaaatgttcaggagcagttggatacccacactggaaaaacattaagttggacccttaattacctcacatcatataccaaaaattcattcttgtcattctaggggattgaagacctaactatgaaaagcataactataaaggtcacatgactgaatatagaagaatatcttaatgacatcagcattaggatggttttttttaaaagaagcaataaccatgagagagaagactgagtaatttgacattagagttaagacccaatcatcaaaatacaccttaaagagtgaaaagacagtgcccacaaaatgcaaaggactcctacaaatcaataggaaaaatataaatgacttaatagaaaatgggcaatagacaaagtagcacatcacaaaagaggaatccaaaaggctgatgagcatgtggaaaggtgttgcgcctgactagcaatcagggaaatgtaaataaactcaggagctcatggcccgtgggggcgagtggcagacttccagcaggaaaccacacagacattacttagtcacagccaggagaagggctcagagtgaaagggctctgtgcccatgacatccttagagagaccagggaaggacctgtaaggcttgaagaatgtgcagatttggagacccacaggtctgggacctggcagaagcatgttactgcccccattttagagatttggggctgagattcaagtaccctaggttatataatgcagttgtcaagt

SEQ ID NO: 9587 - DNA, 1028 bp, Homo sapiens
agatacagatatgtaaagatgtatgtgtactcaggttacatacatacatatatttcctagctctgtccactgagaggagactgaagcaatgataccctagtagccacgagcataccccgtgcctagatccaggttttctattcattctccagggagccagggctctctggatgaatggatgattctagggctagggtagggaaaataaaagatgagcctgaagtattgtcaagtgctagaaaagaaatgcttaaaaataaatgaaaaggatggcggggggcacatcaaaaggacacatgaacccaccagtggccacagcttgaacaatttgagcaacaaaataaataatattggactataactcaaaaaataaatactcccaaatccacactgataaaattaaataaacaattggaggagagggacaaatcttccttataaaggaattccaaataaaaaatgtagaaggaatgaggaaaatagaagtacatcacggtaatatttgctgcaggaaaacgatccatgaatgaatgctgaaattagttagtgaaactcagaaacttcacagtttcttccttgaaatgtattttaattgctgtggtagttttaacatatttgcagattttttttgatactctcctgcaggaggtagagttgaacccctcccttccccaccttgagtgtgggctatacttagtgactcgcttctaaagactaagctatggaaagggaaaaacagctattcacttacagtggaggagcctggccgacaccactttaaacgagtggctcaaggttaatattaccagtgataaaccatgttgatgtcatgttccacaatgaggaaagcatctcacctcactggcctccttcccctaaacctataaccctggtctagtcctgagaaaacaccagacaaatccaaactgagggacaatgacacctgactggtattcttcaaaagtgtcaagttaatgaagaacaagactgagaagcccgtcaccgatcagagatgacaataaatgtaa

SEQ ID NO: 9588 - DNA, 1028 bp, Homo sapiens
ggcctggctgcccagctagatggactgtgggtgatggccctctcctcccagtaggactttttgcatgtctggatgctggtccgtgaccaagagaaccaaggtgagcgagagctccaacaggagaagcaagcagccagaaggatgagaagggacagtcccctctctgaggggacagccaagaggcaatacaggcactgccacctgtattgcacacaacatgagccactaaactaacactgatcactttggaggtccatcatatccaggacttggtacaggccttggccacagtgtaagccatcattctgccttctggtgctgacctgtacctgggcagcccatctggctaccagcctgctcacacctctgctcctgcctttttacccagccaggaggggcccagaagctcagagccctattctcagggtgtccatgactagtcacccctgctttccagtgatctgctggctcccttggagcctcttcacaccctacccaccatgaggtactgccaacctctctgtgaactgggggggcctggaaagacagtgggcaggtcctgtctgatcataattaccccttaagatagccactccttccctggaggtggcctcattctggctacccaaccctgccagttctctggttacacctgcagcccccagcaccatgggtcccgatttcctcagtgatttgcaaggccaggccttgcacctggctggctgcaaaggcaggaggcccagggcctcactacgacaaagacacacatggctcaggacaacctcctgacccccagagagtccaaagaacaaaacaccctttagaaaaatgttggtagagagaaggagagtttccacaagtgaccctcagaagggccgcgagtgtcactcacagatcttgacacaaagacatttatcaaggggaatccccaacgggttagcagccagaatgggactgtggccagaatggacttgggtgccccactgaccccgctgcacggctgtcaccgctgggcaccccagcgggga

SEQ ID NO: 9589 - DNA, 1046 bp, Homo sapiens
ctttgacctccttggctggtggcaccaggtttatgatgcacatagaggctgaacttgaagaattcttattgcagagggcagccacaagagccactggccagtgcccagataatatctgcagactgttccctcctgctccatgggccacagaatccctttgtcttgttactgctacactgccttcctaccaatcttcagggttcatcctggcctctgccatgcatatccaggctcccccagagattgtgtgtctgggaatgagccctggcttctgctcctatctcccagtgatactggcaagtccctatccttcttgaggcttcaatttccccttctgtgagctgggaggacaggcccactagatgctctctgagggacctaccaaggatgtgggctgtgtgtctcagccaacagcagtatctcctaaccccaacacaagaaatacacatagtaggtgtctggttaatgctcttggaatttcagcctatactaaccatctgaaagccactgagtctgaactctgctaccatatttgagattatctctccattgggcacctatgggttgcctagagacaagctaccatggtcctcttccctcgcccgtcatgtgcagggtcaaaggcaggtgagctacacagctcgccctgctcttcactctgctttaatgtgggtgcttgccttggcagatgggcccgacagtgataagaacaaatgacagatgcatactggggcacctgtgactgccatgagacacagtccactgattctgcctccaaccccctccccagagcagaatagtgagtgctaggtttccgcctgtacctccacgggaccccaacagctcctgaaccccattccgagatttgaggttgtgacttggggacctctagacttcccttccctccacctgactccagactgtcctggagcttgggactctcaggcctctaggcacatcttattaaggacagcagctgacagccatatgttgtgaccccatttgtatcccatggtaactcatgacctggcagtctcaaaagctct

SEQ ID NO: 9590 - DNA, 1041 bp, Homo sapiens
ggagctggtttggccctggctattctggggaaatgacacaatattgacctagaggggccctaatctttccccgctagagcactacctctaatagggtgaaggatgggagaaagaggctagtgaacccaccttcaggtctgtccactcaggacatgcccacactagcctctccaggggctctgcccttggcatccccgtcccccacctgggctctggcagagaagtcaggcgggaagaagccggctgagtgcccgccactgtaagaggaaacgaagagaaacagctccagtcagccccagaagcgaggcctggaaaaactctgcagctggagctaacacaaaggacttttcagaccctgcagccaaggtgcccagtgagcttttttttttttttttttttttttttttaaaaaacagctattagggtgacaagcctttccaaaggccagcagttggcgagagtttccaggaagctggtctggcactgggctgggattggagcaactttaacgagttaagttcagaaggaaggagtcatcaggaaaggtttaaggttcaacaaacttttcaaattattttgcaaaaagttctggctttccaattcaaaggcatgtttcgctgtgactgttttaagccagagcctatttaaaaggcaacacaactagcatgcttcagattcactcactcgaggtatttgtctaaatcctccgaatgggctttgcaagtgccatctagtgcctagtaacactggggccatcttacacatctcgacaggcagccctcctccccacgtgcctccccccagcctctgtggtcgtgtgcgcgcgggcgcgcacacacacacgcacgcatgcaccttccctaagcaggaagctgctctttgccaagagcgaatggaattcagatttccagagggtgtccttggcctccagctctacggctgcatgatgaagaaaggtcctagtgtgtgtgccgggggctgggagagaggggcctccagctctgctcacatctatctgggccccaagaaaaacccacaact

SEQ ID NO: 9591 - DNA, 1069 bp, Homo sapiens
ggccccttccctggaatctgtaattctcacaggctgtcccatacattttaaatccaggaaatgtgctcacccatgagacagggatggcaagaagatatgaatgaaaagcaaccagtccgtaaaattggaagccatttcactccttaccaggtacaaagataacatgctgcatggatcagggacacaaacttacctaccttatgatgtagtgaaagaatctaaaacttttgtctcagcagactccctggaggaagccaataacaggaggccttgactaggagacctcaagccttggaatgtgcccagaccagtggggagggaaggctgggaggcagtcctcccttaccccttttctcccaggcagacctaccctgggttctctccaggcccctccgcctgagcaagtgctcagttggccactagctccctgcacatccaacaagcctttctttcctgttccttcttcaaggaaggcttagcctcaaatccagggccacagacaaaggacagtcactctcctctgccagaaagtcatttatgggacatggagaaagcatcaaatatattgcttttccaacacctaacagtggaataggaggaatagaaggagaactcagccagaaagttctggagcatagtctttttgccaaaagaacacgttttcaaatgaaagaggtggtgctggggcactgaggaatcagggggatggaccccactggagcttgtctcatgctggcagcaagtcccaggcctcaaacacatacctgggccacctcaggagagagactgcagggaagaaatgagttgcaatgctccagcctaaccaactccccttttgttaatccaatcccagaaggtactgggtagggtcagttaacagacagctgcctgtctcctggcagagtctgaccaagccccagtgggcgcttctcttcctaagtcctctggtgtaccccattcttcaagggaaacggtccccttaagaatctatgtgaaagggttctgaaattgctgtaccagttaatgaattatttactctaaacaatgtcttgataaagggggaggatga

SEQ ID NO: 9592 - DNA, 1029 bp, Homo sapiens
agttggagctggtcactgtggttaggagcaggggactagatgtacacttcacaagatagagacgcgtggaaacacagtgctgagtgacacaaatgccaaacagaaagagggcctcagtacatgactgtgtatttaaattaaaattacacaccacccagacacgcagtactagggagtgctcgtgagtgcacacacacacacacaatgatataaataaattaccctggagaagctgtttgtgtagggaggagagcaaggatagaggctagagatgaagtggaaaagcatggagaggaagagagcggtgactttatgcagacccttacagggtgacagtgtttcataggctgagggctgtgatcaactctgtgcagagtcccaaaagccaagaaccaacgaatgaatgtgcctccatgactctcctgccagataccctctagtggcttctatttctaggaaataaaattcaaattccatcaggtttttacaagatctgccctgcttacctctctgaccactgtcctccctcactgagctttggctctgccagccttcttcttctttgttaaatctgccaagtatccctcctgccccaaggccttcaccacctctgcctggcttgtcttttctggtgatcttcccttgacaattccttcttcttatttaaatctcacaggaaattttgctctgacctgccatatctgtcatccccttcagtcactcactagctgacgactacctttcgagtctctgcaaagcacaggctacgcttttctagttccttagacatctacttatttgttggctgcctatctcttccaccggaagagaggccccaagagagcatatctgtcttccgtatagggtccgcacatggtgggtgtgtcacagatttctgttgaatggtttcattcatttattgaacgaaggaagaggccaggccaggaaagtgtgcctccattttcacaactcagtgagaaagcaaatagcatgtcaaaatctgaccccttgcaaccagggtttcttagc

SEQ ID NO: 9593 - DNA, 2302 bp, Homo sapiens
ttctggttatgaaagagaataattcatccaggtagaatagttctgtcttagattatcacaaagtataaaaactttcctgataatatccacatttgatgtgcatttaccagttctttctttactgtggtgccccttttgctagaccaaaagctcccaacgaggaactctgttttgttttctgctgcctgctctgtacccagccaagagcctgatacacagccttactcagtcagtacttgaaggaaagcaggcaggcaggattaaccagatttctatggtgtctcaaatgatccatttctgcacctgttttccagatactcagtaggagaaaaatttaaggattgagttgcttgattatgggtgtattttaatgtgtttcctaacatgctgaggagaaaagtgggtctgtttcaggatttatgctccagctagagggattttttaaaattgcgaatcagagcatgtccaaattcagatagaaagcacaagaaaactataaagaatttcccttatgaatgtagatgcagaagttccttgtacaatgctagctaactgaatccaataatatgtattaaacaacaattcttaaacaagtgggattgctcttaggaatgcaaagatgatccaatatcagaaactttatccatgtaattcacattaagaggctacaggagaaaaaccatatggttccctcaatagaggcagaaaaaaatgatgtgataaagtttaacgcctatgtgtgattttggggtagtggagtacaccacttagcaagccaggactagagaggaacttcttcaacttgatacaagttataaaccaaaacttaacttttcagtaaacttgatagagaaattaaaagtgtatcattctctttaagataaggagtaggccaaggatgtcatcctggccataccctaatacaagaaaaagaaatggggatgtgaggatcaggtaggaagtgataaaacttagtgtagctcatagggttgatggtctccataaagattctcaaacattttggtgttacgacttgttgtattcttaaaagttattgaaacccccaaagggcttttcttgatagagattctatctgttgatagttaccatcttagaagttaaaactaagaaatgtttaaagcagaactatacaagcacatattccactggggtcatggtgtgctgcctctggaaaactctttatctttgtgagaatgaaagaaaaggcaaataatgtcgagtattattatgaaaatgtttttgacctttcctgaaagggtctggggggctctctggaatccccagactacactttgaaaattactgggctacatggaaaaaaaaaattaaggaacttaacaactaaagagagatttcagatttcagagaggttttggatataagatcagtgtactcaaaacaaaaaacaaaaacaaaccacatttctttatgccaatagcaactgactaaaaaaaagcataatagagattaggacagcaatcagaatagcagcaaaatttataccagtctaggaattaacaaagacgacgacttttatggaaaaaattttaaaactctattggaggatatagagggagatctttccatatgcagagacattttattttcttgaacagggcaacttggcattagaatgacgtcaggattttccaaatctgttaagttcaacaggactccactcaaacttccagttggagggcttgagtaatttaacaaacatattctaaaatgtatgtggaagaaaaatatttgtaaatgccaactgaacttttgaaaaggagagcagaggacttctgctggcagataccagggcacacgccaacttcagcaatcagagcggtgtggtgacagaggcccagaagagagctcagaggtaactccaagtctagaggaaggggacatgtgataaaggtggcaccacatatcagtggggactgttcagaagatgatgttggaaagccagccctaaaatggaggaataggaatatggattcctaactgagcccctaggaaaagtagactccaaatggactaaatatttgaaagcaaaaggtagttgccatttgtttaataggagaaaaaatgaataatctccagggccagggtggccgtggggttcttaaacaggatccagaaagcacaaacctcaagactaaaatgtatgaacttgaatgcattaatgattatggattaaggatttctgttaaataaatccatcatggcaagggtcaagactgttttcataataatactaaggaaacaatttgcgtttttcactttt

SEQ ID NO: 9594 - DNA, 1046 bp, Homo sapiens
gcgagggtttttggtcagcctcgttttgtcttggccaggctctttgggcagcctctggggtggctgagattgggagcttagacaccagggttcaaggttattgattttgttttttgcatattttacacatattttttcggccatcccttaaatgtgatttccaaaagaatgaactgtagcctcagcttatactgtggaagatatcatttatggtaacccagggatctttttgccccatacagtacaagttcttaggttccataggcacgctggattaagggcaatttgtaatcttagccagaaatcataggttacaggttcgtaaagttactagcgcagaagcattagcaagatcgtgatgtatttcttaggctattgttggcctccacacaaattcatggagttgctggatgtggtttaaagggtacaagatctctgtgttagataatattggagttaatccattcctctgggaggggaattttgtgtcccggatgccgttactggaaggatagcattgccccttggtgagactgttaggagagtgaaggagagtgagtgacagatggagctcttgggagtggcagctcatcatttgttggtgcagtacaggccaccagaagaggatggatctgccggggcgctccctggtagtacaaagagcaggaacccgctagaggagagatgtgctttccatgagcgccaagggcccagcctacccccagacagatgtgcccttgagaagtggggactgttggcaccaagaggggttgcctccgcggtggccttcctggatggagctgcccgtgttgagcgcactgtgctctgtgtgggcaggggttccagctgcttcccagccctttcatgggcaggcccctggagctccaccaccccaaggagccccaaaaccctcctgctgaacatgccatgaatttgaatgcttgaaggcatagctttaaaaacaaaaaaaaaccctgctttgactgcagggtggtagggggagttagctttgtttttgtcactatttttaaaagtatatttgcagt

SEQ ID NO: 9595 - DNA, 1052 bp, Homo sapiens
ttctgagcccagtgtttcttgctaaccaagtagcaaagatgtaacttgggtgtaattttcattgctgatggtactgctttccagtaagagggccctggatggtcagcagtctgcacggtggcacacacgggccaccataagcaagcagtccttgcagagagcataacacactgggctgtcccagctgtgctcagaacacacactggcagttgaaattggcccactgtcattaccaacacgtgtctgttgaatatctatactttttgaattcatgttttgtgcagaccaataggtacacagaggggtaacagcttttactgtgccagcattttttatctgaaacatgaactggcatctgttttggtgtcagcagtaaaaagtactgttgtgaggttggtgctagttgaatgaagcaagaaccagttgtagatgaaagtgagtgtcagtaagcctggaagctgtttcccactccactttcttcagtccctgtagctctgccctgtcctggaatgctgacaggaggccgtaagtagacagaggctcttgcccgtgacgagacctgttcactcgtggcactcgggatgtagtgggagaaagcagagaggtggggacaagaggtgccatgaggaaccccacaaccatagcagggcctctgcatgccaggataagtaggcactccgtttttaagggtctcgtcacagaacatcagcatgatcctggcagcccatagaccagacgtccttgaggtcttagcgccaccgcctccctgtcttcctcatgtaggctgctttcatgggaaactgatggtacatagggcggatgcagctcttggaacgattttgttttccagggccaggtttcagaatatggctgtatgtttaaaattatgtctagctgccattaattcctgttgtccccgcatgtctgaagaacttagccactcttattccacctgtaccctcacccactctcccacgccacccctcccatgccaccagctcttttgaagagaatcctcgatgcgtgccacctatccgtatttcagtatgcct

SEQ ID NO: 9596 - DNA, 1018 bp, Homo sapiens
tcagataatttaaaataaattggaaaggtttactaaagaaaactgagttgaaaatgagtgggcaaccccattaattttacctgcaaatttagatttttatttgtggtctcagagtaacttaaatcaaggtactttgaccatttggcacattttaaaatcagaagtgcttaaatgtcatcctacagcatcataagagtttcttcttgtaaaacatgaaatgtgtagttcacttgcctcttaaaattaagtatattatgggctgtcagaatactaacgttacctggtgtttttgtaatgtgtctctgtccgactagacgttttttgcttgtttttacccttgttttttggagtgtgcactaaaagctgtcagtgtgatattctggctctgtcatcagttggtttaaactggctgtttccatgaatgcatgttcacagttgtggttccttcaaggaagggatgggagaagagcttttaaaacttttttgagaatgtgtcttataaagactactctgggaataatctgctcatggaaatgttcatcttctaaagtttggcctgttgatgtgggaggactctgctgaaagcgtacctgtgcgcagcaccgtggtggtgggcggtgagggctgtaggagaccaaggcctgggtctgccttgcgtgcatcacagtgtgcggacagggaaggtgagggctgtcagtcagccagtgaacaacgttgggtgaataaatgctgcccatcactgctgtgcggggtgtctgatggacccaagggccacgtgtgtttattgggctgtgtttccgccttgtgggcgctgaatggacacttttaaggttgcagttgtaaagcaaggactggggtcaattggcagggccacctcctcagactccgcgcacagctgcctctgtccttgttgcacttgtatctccccctccctgtattctgtgcctcagcttctcttttcctcccctctgttgtttgttctgctttctctgtcaccttggagaaccttgagtctcct

SEQ ID NO: 9597 - DNA, 1046 bp, Homo sapiens
tggatcttctaccagttgaacgttgcacagcttcattgagtgtggttagaagtccctatctgtcttggtgggcttagctcgtctgagcatcagctttcgctgaggaattgcgccactctacaggggcccctggtgggcattccagcactctccaaacaaacagaaatgcagtttctgtctcgctgatttgcagtgccttagtaacactcacagcttataaggcttaaggactttctctttcctgcaccatcatgtatagttctgcgggacatgagttaagtttccccataaagcacaaatgcactgaatggccacagcctgggggctgtttgccattcctcctgttaatatattaactctctcaaaatgatcttctcaagcttgagtgccagcccatggcacatgatggaggaggagaagggaggggggcatagaggcactcaggccagcttcagaagtggtggatggagcttgcaaagatgtctgtgaggagatgcaaggctttggggatttctgttaaacctcgaggtgagaaatgttacattttatctaccagcacagcttcctcctgtgtgggctttaaaattctgggagttgtcactgtaatttaaatatgttttgtcttttctttttctagcatccggggatggagaatcactggtaagatttgttgttaatagtcttattttcctgttgaagtctctcctgagtgaatgtctacttgtctacttgttaaaaaaagtccagtcctggctgtgtgtggactgggtatgccagtgatcttaatgctttgggaggctgaggtgggaggactgcacgagtccaggagtttgagaccagcctgggcaacatagcacaaccccatctccacaaaaaattaaaaccaaataaattagccagccgaacatggtggttcacgcccgtaataccagcactgtgggaggccaaggtgggtggatcaccagaggtcaggagttcaagaccagtctggtcaacatggtgaaaccccgtttctgcttaaaataccaaaaaaaaaaaaaattagt

SEQ ID NO: 9598 - DNA, 1499 bp, Homo sapiens
agttatttccagtgtagagatgaggaaactaaagcacggagacattgagtagcttccgcgagttgcctagcagtgtaggcagagatgggatttgaatccaggctgtctgagcgtagaactggtcttgtaaactgtctataaattactcaaccaagcgcatcttccatgtttttcttctataaatagggatgaggtcaatgtctttgcacatatcgatgcatccatccaggtatttttctcaaatagaacaaattcctcaaaatagaattactgagtcagggaatatgccttttaatttaattttttttgatattgccaaattgtccttcataaaatctgtcgacagtacatgagtgtgctcagtaccccaaaatcctggccgggtctacatatttttgtacattttgccccaaagaaaggcatctcattttggtgttcatgtgttttgttactcgtgagcatgaatgccttgttgctgctgttggttgttctatgcctgcgttcatgtttgcatcctttttcccggtgtgctcacgtctcttccaggtctgtagcgtgctttgtaagtgagggatgagctttctgtccttgtagagatttgtccttttctcccacccacctcccgggagaaaagctgtgggtcactgctttcactgcacagcacagagtagagaccctggcttcccccagcagggtgggggctggggcttaggctgagcggaaaaggacaggaggaggatggactgctggtccccttactttcccctagtcaccttccctccttccaggaagcaagggctgggagcagctaagagaagctaggatttcttaggagagcttgacgcctattggtgaggaggcattggagggggaacatgccccttactcatgaactgaacagatatttcccgccagtccatcgttggtttttttaacctcacgctagtcttttttgcggtggagaagtttttcttgttcatggccctatctgttgagctttcccaaaatagcttctagtaagtgttgtgtactccaagcaatctgtcctcgttatttttctattttaactggtgcttactctgaatttctacttttagtcttttgtgttagagttccactttgaacccaacgactactttaccaactcagtcctgacaaaaacctacaagatgaaatcagaaccagataaggctgatcccttttcctttgaaggtcctgagattgtggactgtgacgggtaagaaaatgtcattctaccttgtttttctgaaacaaaatcaaaagataattttgtaacttgatgggtaagatagaagtaaggaataaagtacagtcttgagtctgcttaaaagcctaaaagcctggtagatgtatatttcaatagtctttcagtttgggaatgctcatagtgcagaacttggagatggcggctgaacctgggaaatgagtcacgtggttgcacatgcaagcctttgggatagtgccctgtttcttcattt

SEQ ID NO: 9599 - DNA, 1049 bp, Homo sapiens
ttctccttttcttttcttccttttttttcttttttctttttttttttttttttgagaccgagtctcactgtgtcaccaggctggagtgcagtgatatgatctcggctcactgcaacctctgcctcctggattcaagcgattctcctgcctcagcctcccgagtagctgggactacaggcacgcaccaccacgcccagctaatttttgtatttttagtagagacgtggtttcaccatgttggccaggatggtctcaatctcttgacctcgtgatccacccgcctcagccttccaaagtgctgggattacaggcatgagccaccacacccggcctctttttttcttattggacacctgtttgatgatttcctaggtcaattttctttctttcttagcctgtcatcttatttttctccatctcattgtgactcatagactagagctctggttatggtagactgtggaccagtaatttttttttttctttttacttccctattataaaagtcatatgtagaaaatacaggcaagtgtaaagaacactatacaaatctgtcttctaaaagtaaatctcagcagcttagtgaatttccccatactctttttcctttgtaaaattattatgaagcgtctaatgcattttaagttataaagataaatgaaacttcaaaatgagtcttgactggtgtttttgcagcatgcctcattcccttcccttgagcgcttgcctacctggatacacagtgcacacgtgtgccacacggctcctgccacaccacatggtgtgtgcacagtgtcaccctgctgccacatcacacaggcttggctgggggaatagttgttactgcagccattggctataaaacagtttaacattcccctacatgccccacctcccccattgtaaattgttgcattatgatcagcatacttgaacccaaatttgtgttaaattaaatgtttgatggtttccttagtttaggttcctttcagtgtacttaccagtcaaagaagatgaagctttagaaggcccaaaggtcgttcagttgg

SEQ ID NO: 9600 - DNA, 1042 bp, Homo sapiens
cctgcagccaggtgggcaccaatgcaggagtcaggctgcaactcctgggctgtagtggtgctgtccactgtgccaggccttggtcttgtagtttgtttgtttactctgttgggtggagatgataccattcttttcccaagtgtctctgaagtttgcatgcatctaatgtatatgtttaacgtttaaaaagatgggagctatgtacacataatgatcagcacttattcagaaatctgaacctactaggttttaccctaaaaaaaaaagcgcaaataagactgaaaaatgttttcctgctctttgatttgtcctgaaacacgtctttacaatatgcttgccatggcatatcattgcattagtaatgttagtggcatggatcagcctaccagttggtaagataagcttgactaggtcagcccttacttttatctgaggaaccatatgctcatcttcaaatggccttgccagactgtctcatcccagcctggttctcccagggagcactgttcgtaacccgttagcctggctgtagctaatgggttccattccggtgcaatagcatttccagcgacacatgactgactgactggtggctttcagtttcaggtcttggagacaaatgctgcatgacgggctgtgggttagggatcttgggtgtgggtgatggtggtaggggcctggggccagtcaccagtatcttccttcctccccatctcagcactggggcctgggctaatggatgagggccactaggagtgggatttcttcactgcaagtgctgcaagtaatgcctggggcagcagcaggggtgggcagtggatgtacctgtatctgtctcttctactttttcctgtctgttttccactatggaaggtgacattcaggtgtccctctctaggtggggccctgggagctgggagtgatgcctgctcaccagctgggggctgccctccagaggggataccccatcttccttgccccatgtgggttatagcaggtccttcttcctgggcttgcatcacttctgtttagactttatcac

SEQ ID NO: 9601 - DNA, 1956 bp, Homo sapiens
agttaataggagtaagatgtagtgccacctcagttatctgtggacaggagcatattgaaataagggatcagaccaacaaagattaaaacatcagagaaagcaaagatgaagaagagatgcccctgtgttctcagtcactggaagattgggggagttgtgaggggagtgccttcctgctcagtggcatggactagcttgccccctgagaggtgctccgccagtggattggttgcagatggtggttgtggtgtggccatcagtcacctgctcacagcctttttctagtgactggtcccattccagtgctgtgaaaactcccagtgtaccatggattaactttgtcagcctgattttatgtttgggagacaagtaacttttatcctataactaactttttgcagttttttttttggggggggggtggtatatgatgattttggtagccatatgtgtttttgatgctttaaaaatatatagaacctggcctaattgaagccatggctgtggattaatacagttgtgaatcagtttctaacagctcaagggaaatctgcctttgctgatttaaaaggcctttcatttcaagatcatttcatcataacaatcccgtttggcaaggcattcagaatttcccatagttgcatctggtgttgcgtttcacctcccttggtctaccttttccctggggcctgactccccttccttttgccatgtggcctttctggtcactttctgatgcttgcgtggtgtctgagctggcatttatagccacttccttacaagctggataagttgctgagcactttcttgctgcagatactgctgcggcaattttttttttttttatttcaacttagcaccccacaaattttaacaagaggtcagattattagtccaagtgaacttctttatccttgcactggactttttttgcccagtgctagatgttctgcatatttgcattgcatctccttaaggttgatgtacagtctttgcatctgcatttgtgatgatgattgtctcaggatggcacctcacagagctagcactggatggcctttcccagcgtcggtggcactttgtcatctctttagtttcttcgcctttgatgtgaaatggtacggaattccgtgtggatgtaatgacttgaatgctttttcctcagaagcatctgaaaagtgtcgcgtggcccagtgagtggtttggaggtgcagacttagaaagcaaggtgtttgatgggagatagtagaggattcggcaacgatattctacgtgaagccgctgcattgtttgtaaacttttattttcgttacctatgttgcatcttttttttagggagacatgaaaagtaaagtagtcgtcacagaaaaagcagcggcaacggctgaagagccagatcccaaaggaattccagagttctggtttaccatcttcagaaatgtggacatgctgagtgaattagtccaggtaagcacacttctgtcttgtagagagattatgtgctagtcttctaacattacttatctatggcattttttaagcactacactgggcattgaaagattgttcatagtgggcggaagggcactttctctgaccaggacctcagatgagcagtcctgatctcacagtgaatggtttattcacagtggggcttccatgctgtcttttgcagttcttggtggaaagctgggcgcttcagcctgatccaaaactttcaaatcagttccttttacctcttgtaaagctctgttgtcttgcctgtgggaaagcctatgaatagattccagagcccatctctgtcttcctgtggtgtgagtgtgcaggaaagggtgagggcaggagaccagagcagaatgaattttgaagggatgagctgtgtgtttgtttgtgtgtgtgtgtgtacacacacatctcagtgaatttttgaacaagttgctaatattttctgatcat

SEQ ID NO: 9602 - DNA, 1026 bp, Homo sapiens
taggataaatttttttttttccttttggtaagatagggtcttgctctgtttcccaggctggagtgcagtagcgcaatcatagctccctgctgccttgacctcacagactcaagtgatcctcccacctcagcctcctgagtagctgggactacaggcgcacaccatcatgccttgctaattttttaaaatttttttgtagagagaggtcttgctgtattgctcaggctggtcttggagtcctgccctcaagcaatcctaccttggcctcccagagtggtgggattacaggcatgagccactgcgcccagccttaaggataaattcttagaaatagaattactgggtccaaagaacattttcaatatttctgcccttcagaaagatgagtcagttagagggcttcttggcccttagcctcgtaaaacctgggtgttttgttttggtttttaattgccaatttggtaaggaaaagctgagtgttcttaaatgtttgcattcttttggatattttatgaaattgaatctttcttcatgtttgacaatttgtgttttttcttttgtgaattattttttctgcttcctcctgtatcctttttttcctgttggggtattgtccttttcttaatttttaagaggtcttgttcatagtaaggatgttgattccatgttaacctaaatttattttaataaaattgaaaagcatgctgctttattttgcaggcatgaggatgttgtatttcttactcccttttttagtttacctaaagcagtaaaaagaagaattaatgcattgaaacaacttcaggtgagatgtgctcacatagaagccaagttctatgaagaggtacatgacttggaaagaaagtatgcagcgctataccagcctctctttgacaaggtagggagctctgttaatttaatatacagatagttttcagcttacgaaggtgttaggttccgataaacccattataagttgacaacatctagggtaagaacgcatctaacctgccaaacatagcttag

SEQ ID NO: 9603 - DNA, 1090 bp, Homo sapiens
gctcaagtgacccacccacctcggcctcccaaagtgcttggattacaggcgtgaaccaccgcgccaggccgagaaatttttttatgagtaaagtttgtgtgtgatgaaatgcacagatctgaagtgtatagtttaataagctttaacaagtgtatatactcaggtaacctcagtcaagatctagaacattttcatcactctagaaagttccctcctgtcccttctagtggactccatcccacagataaccgttgtttaaaaagtatattgaacaaacatttttgcttatgaatataattattacaactctttttaatttataggggataaaaacattcagatggcagatcacaggtaagccaaagtggactttgtttattggagtttaaaattcagttggtgagcaacagccaagccatttttcaataaataattagaatcaaagttaaatgcatttcagcgtctagctgatggctcatttcttgtgtatgtatttgagcacgtaaagaaattacttccgacatgaacagtgcctcagacattgacactacagatcttttatggaaagcaatcgttttgctctccatgctttaacacccctggggtgaagttaggtaattttgacactctcctaacagtctgtagttgtcagtgatcaagtggaagattttgttttgtggattgagggttacttttagttgtgtatattatttgatgtttattttttgtgagggaggtgtgtccaggcatctttaaaaactgtttcatggctcattttacacttgttgtggctaattttacaaagccactttgggcactgtcttaacttggtaagactgccttgctctgatcacatgagcagctgaccaaacagtaacatgttcgttggttgatgggtttggtttgagggctgggagcagattttttgaggaaagaagctgtagaaatgagagctaagaagctttggctaaggttggaaataagaactttgtagggctttatgtttgggagaggagaggggatgttacgtagtagaatatttttatagcagagaggacagcctctgagataacatgcacattggtagttt

SEQ ID NO: 9604 - DNA, 1055 bp, Homo sapiens
cttgttctaggcattgagttctgggttggttggttctttagtcaaaattattttcttttttattgtgtaaattcattattttttttctatccttgatttagcacttttttttttttccagaataccgtgttgggtttaacttaactgccttgtcatcttgttaacaaaaattgtattaaacagcacatgccgggctgggcatggtgcctctgtcctataatcccagcactttgagaggctaaggtgggaggatcacttgaggctaggagtttgagactgcagtgagctatgatcctgccactgcactctagcctgggtaacagagtgagactgtgtgtctctttaaaaaagcacagccttcacttaaatgaaaattgagtgaatcattttatcaatggactctgttaagttggaacaggtaccattccatgggaaggtgaacctctttggctcatgtcctaacacaggtggtttatgctttcaacagatatttattatgccaggaactgttaggggctctggggctgcatagtgaacagcatcaaaagggagtattgtcacactccatttgtagacaaaatggatttcttggagatgctgctgaacagtaggatttcaaccctgactaagctgttgcttgtcacttgttccaatagcagcaacaggttttttgttttttgtttttttttgagatggagtcttgctgtgttgcccaggctggagtgcagtggtgcaatctttgctcactgcaaactccgcctcctgggttcaagcagttctcctgcttcagcctcccagttgctgggattacaggcgagtgccaccatgcccagctaatttttgtatttttagtagagacggggttttaccatgttggccaggctggtcttgaactcctcacgtcgtgatctgcccgccttggcctcccaaagtgctgggattacaggtgttagcccccaggcccagcctagcagcaacagaatctttaatgagcaagtagaaacagccagaagtgaagtggtgttggtactagggaaaggttagaaggagtcaga

SEQ ID NO: 9605 - DNA, 1890 bp, Homo sapiens
taagaaaacagttgtttggggtacaaagaaattaatccataaataggattgttacagtgactaatataaataaaagaacatttgtgtaatcatgggaattattttattttatttttcctcgacccaattaactgggtgaaaatttgcttgccagttcagatttagaattgtagacacagttaaagtttttgaccttgggagggaacctgaactttagaaaacttacaacattcttttgcctggtatccctttcataatttaacttgattgtcttttatttatttttagttattatttattaacacaaaattatatttatgatgtataatgcgatgttttgaagtactatacattgtggaatggctaagtcaagttaattcacattaggtggtatactgattctgacaagaacacttaacatctactctcagcaatttttcaattatgtgatacattgttgttaactatagtcaccaggttgtatagatcccttgattgccttttaaaagtgagagaaccttctggatgagtcttcgggctgtggttttataagactagtattaaactgaacataacatttaaaacaaacagatatttattttcctcaaacctgtatatttgatagttccttataactttctgttttaagggtgatagggattgataaacaaaaataatttgtggtgctgaaacttgactgaactctagcttgtttataataccacctctctacattgtctttccttattcaggttgagcactcctgatcccaaaatcaaaaatccaaatgctccaaattctgaaactccgttagtgttgacattaatgttacaagtggaaaatttcacacctgacttcacgtgatggatcacagttaaaactttgtttcatgcacaaaattatttaaaatattgtataaaattaccttcagtctatgtgaataagatgtgtgggaaacgtgaatgaatttcatgtttagatttgggtcccatccccaagatacctgatcatgtttatacaaatattctaaaatctgaaacacttctggtcccaagcatttcagataagagatactcaacctgtataaagggtgcagtgtttaaagtaacttgatttgttggtttcatatcaaggaatagatgtagtctatatgcatggcagttacaaaagtgaaaagagacctggcctgctgttatgtactaggaaatttgtctccattaacagtttctcaggtagccactgtcttctagtttgtggatgatgaaactgaggtccagaggaaggttatgcagaagagcatgagtgggaatgagtatggggaagtagacagggcctgaattggtaggaatgtgtattctgcagaaggtgacgggggaccattgaagtgtgtttgttagttttttgtttgtttgttttttgagacagagtttcgctcttgttgcccaggctggagtgcaatggcgagatctcggctcactgcaacttccgcctcctgggttcaagagattctcctgcctcagcctcctgagtagctgagattacaggcatgcgccaccatgcccggctaattttgtattcttagtagagacgggtttctccgtgttggtcaggctggtctcgaactcctgacctcagatgatccgctcgcctcggcctcccaaagtactgggattacaggtgggagccaccacacctggcctttgttaaagggtttttaaatcttcactgactagggctgggtttgggttgctgctgtggtcgtggtggtgagcatagccagccattgtagggtttgttgcctttttttttttttttttttttttgaggcagggtcttgctctgttgtccaggctggagttcagtggcgcagtgatagctcactgcagccgc

SEQ ID NO: 9606 - DNA, 1031 bp, Homo sapiens
tgttatggatgggaaagtgccatgcttttctttcagttcagagatggtggaagaggtcacatttgtattttttgacctgaccagagtctttgttgttttcaattttccccttctgaatgctttccgttcaccccagcgaaggatggcctggtcatgataagactttccaccgtccacagttctctaagtctgattgcggggcaggaggcagacatgtttagggtccagtaaaggggactccagccttgggacctttagaccctaacgtgtgtgtcacatcacctgcctgggtgactgtgcgctcctctggcaggaaggtccgccatttcattatgttctcggaggaatcgtcggggcacattcgtctgtgctttggttcgcatcccccagtctgcattactttttcctgtagtaacccgtgccttatcctcctgcattaggtttacggggtgaaaatagacttttaaaaattctcttaccttagaaatatacaaatatgtagattaggttgttggaccttaaaggtaagtctttctaagttactaccttcctgtaatagtaactatacctctaaatgactaatacctgcactgcgcaccagggactctttcagcctgtttgcgtgtgttaactcatttcataatctaataacctgagatagatgctattgtttttccatttaactactctggaagctgaggccctgggaggttaggtataatgacttgtccgaggtgacaaagcttaaagacccaggcagttttaactgtacccagggttactgcttctgtagagggaatgaaagaagttttaatgagaaattgttttcatcattgtgctaagcttaactgaactctagcttacgaggttttgagctggttgatcatttccatctcaaaattctcttattccacagaatgccaaatgcctcctatagtagaattttgagattcagactgggatgagcaattgctaatggaataaataatatgcaaatgtaaaatgaagttcagagaaagcaacgtggtgat

SEQ ID NO: 9607 - DNA, 1035 bp, Homo sapiens
ccatcctgccctggcgctcttgctccttcccaggtaccccaagacccactcaggataaccctcacagtgctgtcctggtcattgccttacagatcctctctccttgggccaggctcaccatgctggtccatttcttcatgttagtggtgcctggatcttttagcattggttctgtttgtctgcctgctgcatacctttgcatctagggcagggccaggcacccaggggtgccgctgaggatccccaaagggaatggaagagggtcggtgtgctgcccggcacatgggcttgtctccccacagtggggagggcctggtcagagttcagccctccatgccaggccctaggagaggggcttgtttggctagacctctcactccgagagacccagcagcctgaggcagccctgtctcatctggctctgtattgaccctccaggttgaagaggagaagaggaagaagaaagaggaggcggcccggaggaaacaggaacaagaagtaatgcattttgtttgggggtgagggctctactgggcaggagtgcaccctgaccccatgccctgtggctctctgtgcctccgtggaccttagccaggcccctgcagaccctcacagaaggagctccgctttctgcctccaccacccaaggcctgccaggcccttctcacatggggtgcagggaaggcctggccaaggggaaggctgtgccatgtggtcacaagctccaagacagcgtttatagacttactactattaggttttctagtaagctttccactattcctgtagaaataacatctggtttaattttaaattccttgtatgttccctccaccttggctttccccttcccatctttcatagcactctgaatctgagggcttggaagcaagttgagggctggaggtatgagcagatgtcgttcacagtgcggagccccaggtgctgctcgggggcagtgactgtgccgtgttgcgtgttctaggcagcaaagctggccaagatgaagattccccccagtgagatgttcttgtc

SEQ ID NO: 9608 - DNA, 1064 bp, Homo sapiens
aggaactgaggaaggagaatcgacagggtggttgattgatagatgggatgtacaaggtcagggaaggcatctatgcctagccctgcactggcccaaggcacgaggggagagctcatgccagatccaagtgtgggtggctggagtttgcagtgctttggaggaataacgaactggaactctggggaaagctctagacagtggtgagtggtctgcaggtccatcctggttggcaggttgggaagagctgggcttgccctgtgaggttggctggtgtgactgcctcatcagggcccctccccattccatcacagtcactcacctagccttgggtctcgcctgccgtgctgtgctgtgaggtggcctggtgctggctgtgcagacgccctggcttgctgcactccctggcagagtgctcagaagcaggaaacagacaagaggagcgccagggtggcccggccagagcctcacaggccttgcactctttgtgctggcctttccactggccaccttggctgtggcctgtgacttctagtagctcctgtttcccaaccaagggactcttacctcaccaagctgctgcaagaaggcatccccaggcccgaggcaccatgggggaggggtcctgcctctccctgtaccattcccaccagcacataaacacatactaacttttaaagggaaaaagcagaaatcctgagcactgtgtctctggttcctccaagctcagtgcccagctcctcccccacctcagcccctttccctcggccagccctgctctccctccatctatctcgaaagagctcgatcctgttggccccagccccatcctgagtctctgagacctttgtgccttcctggtttcttttccctagctctgtgtgtggcgcctccccaggagaccttatctggtcctgcggcttctccaccatctatcttgtagccggtggcccaaaaacagtttgcccagctgcctacctgatagctccactgggccaggaagcctctgatatctaggctgtccaaagtaaatgtgattttcaactccccaaacttgttcctccttc

SEQ ID NO: 9609 - DNA, 1050 bp, Homo sapiens
ggggcttgagtgtaaatggtccttctgtaagaaagctgattctggcaccaacagagaggctgcctcagatgaagagtgttagcacccgaagggacccccaggcctgtcctgaccctcccacccctgctgtcggcccaacttgtgtccctttcctggaagaactgcttccggcggccagtgtgctatgcttcctcctggctctgccctgcacccccagaacagcccctgggcttacgggagacactagtctctgggcttctgcagccaatcaagctgctgggccctccctcccaagcactggaggaggtactcgttctgtgggccggggcccctccctcctgagcactggaggaggcacttgttctgtgggccacggcccctccttccccagcactggaggaggcactggttgtgtgggccctggctcctccatgtctgagggaactgctctgcttctcctacagtccctgagattctgcagctcagcgatgccctgcgggacaacatcctgcccgagcttggggtgcggtttgaagaccacgaaggtgggtgagcccttgctgtttgctacaaagttaccaggagcttggagaggtgtcacaaggagagctcccggggctgggctgaggctcatgcttcatgattgctgatgcagaatcccaaagtggcagccccatgggtcccccggcgccattcccacgctggccagcctggcaggggcaggggagcaccccgtagctccttcccactgctgcgtgtggtggtgtcacctcccctgcgcatcatctcccctaggggcctggctgcccgctgcccctgttgctaccgcctttgaagctctcagctgaggaaccagcctgtatcctgtacactgtcaacagattgcatgcttgttctcccacttcgtggaggtctttttgttccacagaaagttaatttttttgttttttattttcaatttttatttatttgtttattgagacagagtttcgctctgtcgcccaggccggagtacagtggcgcgatctcggctcattgcaacctctgcct

SEQ ID NO: 9610 - DNA, 1139 bp, Homo sapiens
gttcttatcacttgtcctagacactggtgggctaatgctgtgagaaggcagcaggaaggtgaatgtcttacggagaccccagatgtggcctcaagtcagccaggtatataagctggtgactttggggattatgtaccgttttgtaaatctagacactgggtcaacaccagaatctggtaatacatagttaacttgaagaaatgcttgagccaagttaataaacagaagttagtcagaaggactgcccattaggcaccgtggatggccttgaagtgagacatgtgggtctgtgggtgctgctgagtgaccttgcctggcgtccctcgtgtttgcaggtgacctgagcatctctgcagaccgcctgagtgagaagcgctctcccaacgactttgccttatggaaggcctctaagcccggagaaccgtcctggccgtgcccttggggaaaggtgagcgagtggcctagaaggtgtggggcttggacaggggcactggcgccagccacactctcaggcccccagcagagggccgctctgtgtgtgaaggatgttgtcactgggccagagcctggtgctggtgcagcacaggctgcctggccccggggacctggacatcatggagactccctgagtctctggacaaatcacttccctcctgggatttctgttttctggtctgtaagtggagatgtgatcagagtagacgtccatggaggcttcttggttcttgtgttctgtgactctgagtattccaggccccagggtgtaggatgcgttctgatcttcccggtgacaggagttgttgactgcagggtaccctaggaaggggcgtgaccatctgcagctgtcaagggctcagaggtctggatgtaattcagtaacttcacctaaacctcggcccacataggaccggtttatgaacttcaccaaagaaggctatccttagtcttttttttttttttgagacagagtgtcactctgtcaccaggctggagtgcagtggcgcgatctcagctcactgcaacctctgcctcctagtcccggttcaagcaattctcctgcctcagcctcctgagtagctgggattacaggcatacgtcaccatgctcagctaatttttgtatttttttgtatttttagt

SEQ ID NO: 9611 - DNA, 1028 bp, Homo sapiens
cttgggtccttgagtgacacacctgagtggtggaggtgcacgcttactgctttgaaggctctaaggagggaggctggggcctggggccaggggccaggggccaggtgaggctggctggagcagccacattttcctggcagccctgtgctttcttgggctggtcctttgagggggcccagtcctcctgaggctgtggccttgacctgcagaagccatgctagagtccagctgtctcttggtgcaggggtgtaaatggcacacattgtcaatgtggggttctcctacccctcatcccccagcacccagagggagagggtgccgctgcggcaaagaggcttgaagttggtttggtttgggggatttctgttgtgagtttttaaaaattgaggttaaattctcgtaacatacttagctgacaggagggataccatgatcatgtaggtagctttcccaaggcgaggcttatccgttatactccagatgtgctgacccctatgatttccccaaatgtcagaaactgaactgtgtaatttgtgatggtgtggaactgtgttcctgctttccctgatagaaaacataaattaaaaatgtaaaaactaagtaatttatatgacataaagtgaaaagtacacaattctgtggtatttggcgcatgatgttgtcatgcagccttcatttctgtctagttccaaagcattttcatcacccaagagggaacccatccatacctgtcaggcagtcactccctcgcccccagtcgaagcgctgcccctgtgcctttgcctgttctggatgtttggcgtccagggaagggcttgaacacctttttccttggttctgtgccatcccctagtccctgtctttctggcggcctctgggctgcccgcctgcctgcctgacaccatgtgccctctgtctttgcagctcctgactacaggtccattctgagcattagtgacgaggcagccagggcacaagccctgaacgagcacctcagcacgcgtagctatgtccaggggtactcactg

SEQ ID NO: 9612 - DNA, 1024 bp, Homo sapiens
gagtgtgcgaagaacaacttccaggcccagctggaattcaaactcaaggtagcgctggctgcagcctgggggagacgaggccagggaaggaacgaagccttggggatccccctcacactctccccaggccccaaggaaggttccccaaggcagtgcacataaggggagcagctgttgacatcccggaacacagacagggcccagagaagggaggctgctgcctgcagccacacagcagagccagcctaggccctgtctctgtggcagggacactacatccttgagcggaggcgtgggggtcccgaaggcctcgttggcgagggttgggtccatccctcctgggctcccaggcaccccaagagaataactgttccgtgcccccatgaggatgtgattctggaggccccagcccccgctcactgggctctgttctgggtgtggccccgcagcccttcttcgggggtagcaccagcatcaaccagatctcgggaaagatcacgtcgggagaggaagtcctggcgagcctcagtggccactgggtaaggggccgtccctcagggcaggcacggccgggcggtcaacgccaggccagcctctgaccccgctggccatctggggcaggacagggacgtgtttatcaaggaggaagggagcggaagcagtgcgcttttctggaccccgagcggggaggtccgcagacagaggctgaggcagcacacggtgccgctggaggagcagacggagctggagtccgagaggtgaggcctgtcagcgcccagggaccctgctgaccacagcctgacatggccaagcaggcaggtcagcagggctacagtgctgtgagcatggccccaggatgtccctggcagggagggcaggcctggtgcacccctggtggcagatcacgtgtcctggaaaggacagatggagggaaggggtgtggcctggagaggagccggctgccgtgacctctcactgcatcactgccggcgagtgaccaacaggtgcacagggaggtccctgc

SEQ ID NO: 9613 - DNA, 1043 bp, Homo sapiens
gctgcgggtgctccaggggtggggtggagacgcattgggaagagttcacatctgatggggctgagtcagcctcatgaggccatggaggccaggtcaggggtttacaccctaaggggtggcaggtacagcctcctccagccagagctgccactgtcccgccaccccttcctcccggctcttccgggcagggcctgactgcagcctgtctgctgcagctgggcgaggcgtcccaggtggagacagtgtcagaggagaacaagagtctgatgtggaccctgctgaagcagctacggccaggcatggacctgtcccgcgtggtgctacccacgttcgtactggagccgcgctccttcctgaacaagctctccgactactactaccacgcagacctgctctccaggtgcgcgccatgccgggaggggcaccccacacctcgtcctgcatctgcatgagaccctgcagcacccccagcccctacctgccctgtgggggcttccagagaatcccatggctgatctcagcccactgtttctgcagctgtagcctcccagggggccctgtctccaagatgggcctgggaggagccagccatccgtggtgagaggggggtcagtcccaagcacttgccatgcaccctgagccctgcaccctcgagctggatgggatgggctgcagaggcaggaagggggctgcagaggcaggaatggggctacagaggcaggaagggggctgcgcagactggaaaggggctgcagaggctggaagggggctgcgcaggcaggaagagggctgcagaggcaggaagggactgcagaggctggaagggggctgcagagctggaagagggttgcagaggcaggaaggggcagcagagcctggaagggggtacgcaggctggaagggggctgcagagactggaagggggcaacagaggcaggaagggggctgcaggctcaggagccaggcagagggagcaggtgggaacaagagcatgggcagggaggcttcctggagacaggggcaccctggcagcccaggtcagc

SEQ ID NO: 9614 - DNA, 1058 bp, Homo sapiens
aggagacttagttttccaaacaataagccctaataacatcatgaagccaattaaattgttttccaaaattccaatctataaaattttcatcttgatcataagatataacttccataagcctttataacctttattaaggagtcagttattgtttcaagaaaaccttgttaatctgacacaggggcccatatgctagtcttgcatcagtgtgcctttgacattaatgattaatttatagaggaactgaacttactttatctctcaaagtcagcccttacaatctcacatgtctatctcttctgggatagtctctgggccttgaggagttgaacagctttaatttctgtgtctcaggaatgtggtttattttgattggcatcttctaccgggcctgaagatgaagctttaattgctgtcagtgtttaaaatttagcaggacttggtgttctttttagacccatgagtcaaatccctgtaactcaatgtcgcaaggactttaaaagcacatacaagaagatataaggacggaataaccttgatttaaaaaaaattttaatatctgtttttcctaagcaaaccaaacttaataataatggcataggaattattttgataaaacataaaatctgttaggccacttaccaaaaggcaaaagcaaataccttctgcagtgtatagaatattatgttagaagaaaacattttctttaagaaaacattgttagcatcaggccacacacacacaaaaaaacagaacctgaggaggaaaacaaaacttatatgagctgaaaatgagttgaagggaagtgttactattttgttccttttaagagggaagagaaaactgaaactggcaagatgcaatgaaagttgaactttgggttaaaattaaaaaattaaaatatcttataattgattaagagtaaatcaacctcttaagaaaatgtcggccaggtgcggtggctcatgcctgtaatcccagcacttttgggaggccgaggcaggaggatcacgaagtcaggagatcaagaccatcctggctaacatggtgaaacccca

SEQ ID NO: 9615 - DNA, 1029 bp, Homo sapiens
gcaaggaggtggcatcaaggtcaccccagcccctcacccagctgctgtccaggagggacaacagtggctgctccccaggggtggccgaggaacagcgcccagccctcacccctcctaacccggggctgccctgccagctctaacgggtgggaaaccagagaaaccctgaacacctggttacatttggatttcagagaaacatcagagttctttcatgctagtatgaccccagtcatgtatgggaaatacttacaccaaaaagctactcatggtttctctgggattcgaacatcattgggcatcctggatgtgcctttgctgattctggacagcccaagtcaggaggctcagagctggaaagctgagggcagagctgccagctaagaaaggggacagagctcccccacctacccgcctctctgcagccaagtgtctacctggccaggtgcctggccccacctggtggccctgtggccctgggggtgtccaggtggtcccaggtgtggatccgcatggttctgcctgacctatctgtgcagctggccctgggtgttgcctcgggtgacacccagatctctctctctccagggccccaaaggtgagagcgtgggctccatcacacagcccctgcccagcagctacctgatcttcagggccgcctccgagtcagatggtgagtccctgccagcttgcgcatctccccagtgcccccacctgaagtgggcccccttttgaggttgtagcccaggtacaggtggccccagttcagtcccttctactgtctgggggcagcctgaagtctggccaggatgagcccggctcggagtcaggcctacactcacagagcccccatgcctagcctcagttttcccatgagtaaaatgtgacattaaaataccacctgtcaaaggccaggcgtggtggctcacacctgtaatcccagcactttggcaagccaaggcgggtagattacttgaggtcaggagttcaggaccagcctggccaacatggtgaaaccccgactctact

SEQ ID NO: 9616 - DNA, 1067 bp, Homo sapiens
ccggaagtgctggtgggggggatggagggtgccaggcgggaaacgagtggagcgcccttctctgacttctgccctcatatccttggcatcaggccaacctgggctcctagccctgggccggcccctgtgccctgtcccgcatacccacctctctctttcaggcagagtacaggctgtgcaacgggtcagacaaggaatgtgtgtcccccaccgccagggtcaccaagaaggagactctcaaggtgagcccgggcccggggagggtgcagcagtgtcactgtcagaccgacggccacctgagccagggaggtcaccctccccacctgtcaaaaggaggggacaaaccgcacctggtcgcctccacaccccctacttcctcctacttcctctcctgcccctgcccctggacccatccctgggctggacggtgggaggagctggggcagctcggtgccttctcccatgacccaccgcgggtgccccgggcccaggcgcagaaggagaactaccggcaggagaagaagcgcgccacacggcagctgctcagcgctctgacagaccccagcgtggtcatcatggctgacagcctgaaggtaggtgatgcccggcctccggccacccaggacacgggtcagcgtgctgctgccataacaaaggaccataaaccaggtggcctgaaacgatggaaattcacttccctgcatctagccgttatcactgcagcctctgctccttcctcatgaggcctttccttatccacctgtctctccccctttttataaggacaccagtggtaggaattagggccaccttactccagtgtagccccatcttcacctgattatgtctgcaaagaccccatttccgaataaggtggggcctggccagtgggcggagggcgctggggagggagacattgctctggcttctgggagaggaccccacatcagggccgggtgtcctgtgttcagacctcacggagaccgtggccattcactcgcctctgagcctccatttccccttgtgtacagtggaggtaaaactgcccaactccgaggctgctgggc

SEQ ID NO: 9617 - DNA, 1049 bp, Homo sapiens
aagggtcctgcccagttggggagcaggggttgcaagtgctccatcccatgccatgcggtcttgcctctctcttcccctgttgcctcaaatacacacagccccattcagctgcatctagtgggaagctgggcagaggggaattggcagcaggttcatgcgtccatccatccatccatccatccatccattcatccattcattcattcgagatgcttgctaagcccccagctgccggtgtgaatgggcagtagggtagaaccctcccctggtggaagccacagacaatcatcagttcaccacagaaacggctgcgtggttgtattgcaaaagtcctgggcgggccaagggtggtgtgtgtcaccaggacctgtgccagcagggatatgagctgtcctgcttctggggaagcagctcagggagcctgagaaagaaaggagcaggggctacccagccacagggaaaagcattccaggctgggaacaccatgtgccaaggtaactaagggcatcatgaacaagatcctggctcaggggactcccaggagggcaacttaggacaccttctctgccagcctgggtccctggaggcctgtcaactggccagggtccagcatatgcctcgtcactcagatctgcctcctccttatcactcatcgtcagcccaaagactgcttccaagtcagagccccccaggcaccccatcttgtgccgttttcttcttgtgatcctgaatgctcttacttggctaagaaagtgccacaatggagcaacactgcctgggttcagtcccagctcagctccttattagctgtgtgaccttgggcaggtttctgaacctctctgtgcgtaggctcttcctctgtacaatgctgagaataacaacgatgacctgagctgtgggatctaacgtgcttacatccatgcacagaacgcagaaccgcagcgctcacctgacccctggctcctcccgcctctgcgtgctggtggctggtctgcctctccctgaaagagcaggacactggcatctttactttctaacctcagtgccta

SEQ ID NO: 9618 - DNA, 1044 bp, Homo sapiens
gtgcactggctctgggtggggcccccattgggcctgggccccatgctgccaaacagctggccttggcgtggggtcagagagcatggcccctccccaggtgtccagaggcaagcatcctcagggacacagggctggccaggcagaggcagaacctgacctgtccctccccatctgctctgggctggcaccacatgggacctcttgtctcccagtggtggaaggggtctttcatgccccacatgagaaatggaaggaagagcctgctccagcctatgcagtgggggttggggaggggtggtcagcccagagtcagagctcactcccttcctgtgccctcgcctctgtcccctccgcaactcctaggtggcccaggaaactcagcagggcaggaggaagtgggagccatgaggaggggaccaggaggtgcctgtggttaacaggaaggggggtcaagcagtggctctgggtgtgggtgggaccctgccgcaggcaaggcggcccccaggcgctgccaccacggggcggtgtcttagctgtggtctcaggagtgcagcagctgcacgacaccatcacggccacctgcagtccccgagagccccacatgtccatctggcctgggcattctgcagctttgggcacaggcaggggtgggagtctggggctagcctggaggagggtgctggggtctcaggagaggacctggaaggggcacccatccctgcctgcctgggcatccacctccttgcccagaggagggcctcaggagtggcctctgcctggctgccacggttctggctctctgtcccccttactctctggccctccagaacgttccccggcccttagcagctccagcgtctctcaagcccccttccagccatgagcgaattcattctagagatgcagagttggcccctgtgtgtgccccgcccaactgggtccagaggtgcttgagtagtcaaggaagtcagctgggccagtgtccccttggcggaagcacggccctgcccagcccagcacagctcagttcaggggaacccaccc

SEQ ID NO: 9619 - DNA, 1031 bp, Homo sapiens
gacacgtgagcacttggcgcctcgattcgagttcacaaacggcactccggagaggtcagtgcagctctgcctgcgttgctccgtcccagctgggcctgcacggggctatgtgcccatagcagggctgactgggctgacccacagcctggggcacgagggagaggctggaagcaggccttgtcaccatgggctggcctcggctgcggctgtcccgacccaggccgcttgaggtcaagccaggtcggccagcagaggcaggagccgtgcccaggcccatggcaagccctgtgggacacaggctgtcagacacatccagtcctggagctggcgcccactccccctcctcccagggcctctgccagcatcctcctgggtgggcccggcccagccctagcccctgactctggagcaggagtcccaagtccagcactcaggcctcacagaggccttgcagccctcccacccgcccggtcctcttgagacggggtgagtcacacggctgtggttctgccttggggaaaagtgaagcccaggacgtgagggtgactgggaaggatcccaggacagagctggggcctcggcccacccagagctaacaaggtgcgggctgtgcgtttagctcaggagggtcgtgacagctgccaaggcccccgtgccctcagctgagccacctctaaaatcccagcccctcgtgaagaccagagctgggtgtgctgggaaggggcgtgagaggcgaatcataaatagaaacgccagctccagccacggcgaaggggatctggctgccagggaccctgcagtctgctgccctgtgccaggccgcttcgggacaggctgtacaaaggccaactcagtcatctcccaaaccccagaggggccccaggattgtccccctccccagagagaagcctgcagcctggagctggcctctccccctgcactcaggcacagctgtgtgcccagcggcttagcagctctgcagaaggcaagcgacggagtgcccgaaaccgggtgcgatggaaaccgggtgc

SEQ ID NO: 9620 - DNA, 1026 bp, Homo sapiens
tcgggagtcgtgccaacttggggctgtgcttcccggcagcttgagcctgtggtcagttttgaaattgaggtttaacgaatgacctcaggaataactgtcctcccgccctgttcattatttttaaactgtgtctgctttgaatgtgcaaggaacatgctgtttgtctctggtgggcgcctgttcctggctgtggccattcattattcctgggcctcagccctagcgacggtgctggcgtcatcagcccccgcagcttgccagagcaggaatagccccaggaatttgtgacctcaggcagccacatcttcaggctagagggggctttcccacacaagagcagcttattcccatggaggctcagatctttaaacacatttgccctgttccgtgcatatcccaaaatgcattacatgcaaccttgaggtctacatgagaaacactggaaccctcttcctgctgacttgtgtcattataacagctaattttgataatgattaacatgtattttatggaggcttttggaatgacttatctcctttaacccttgaaacaaccctatgccataagttctattattgtccccattttacaggtggggacactggggctcggagaggtgaggaaacctgcccagagtcacccaccgctacatgacaggactgggattggaagcagctcacctcgtagccgggaccccctggcgcctgggggatgttgcactctgtgggctgtttctccctgtactcaatggccccagactcctcctcttctccttgttggaggggctgtcaatgctcattcccgcccactgctgtctaggaaaccagatgagtaagattgttagaaaagtgagcaaaccgggagcggacggacgcggcaggaggacccgggaagtaccagcgaggcatgaatgagacctggcacgtggtattccatgatgcttgattgggctgtttagagggctctttacttttctgtgttcttcattcttctgtttctcgctcaacatccagtgtggatcacacg

SEQ ID NO: 9621 - DNA, 1084 bp, Homo sapiens
aatatgtacattcttagggattttaagtggaaaacagggaggagatttgagggataccccacctcggcaggcagctggtcaggctgcctgttgtgaccagcctggggtcgccttcccttcatccaaggccaggggagatggcaaaccttcagtaagcgctgccgtacctggcagagcagaagcaccaccccagcttggagacagcatgcccctgactgctggtcacggatggccccttggtaagtgccctgtgcttctgagcaaggcgggaacgggcctccagacgctgggggacagcacagagggagctctgtcgcccgtgcctttgtcccttctctcgctggcccattctcagctgcttcctcgcggggaagggccttcctcggccaggggagggagagctcagtatcccggcgttgcggagggattgatgtgctattggggtgaatacggcgctcggtgtgggggcggggtggggggggggagggttgtcatttaaaggggactttggggatggtcagcagaggaaggcgtggtgttggggcggagcatccgcatctccgcgcccctttcctggcagccagcgggatttctcctgatcagctattgcggcgaataagacagagtcaactaaagggcgcgccgctgtgggtcccattcgctgggctgcggctccaggcaacggcatttgtatgcccgcctattagggtgaatgcgacgcggggagtgtgggtcgcttaaagggccgggactctggaagcagtgcgtcccgctcctgcccgcctattgcggtgaatacggcgcagcagtcgggttgtttaaagggtccaggcgtcctgcttgctggactgtgctgctttggggcagctcctggtcctgggcgggaggggagcactttagggaggctccccacattggccagagggagaggagccccgacgctggcccgtggggcaggaacgctagatgccctccttacaggatgaacctcacccccaccccaccccctgctgccttaggaagtcacccaaatttagcaaaattcaagccagagccagcaggcaccagggtggggcatgtgacc

SEQ ID NO: 9622 - DNA, 1247 bp, Homo sapiens
tgtgatcgtggctcactgcggcctccacttcccaggttcaggtgattctcccactccagccttctgagtagttgggactacaagtgtgcaacagcatacacagctaatttttttgtattttctgtagagatgggatttcaccatgctactcaggcttgtcttgaactcctgggctcaagcgatctgcctgcctcagcctcccaaagtgctgggattacaggtgtgaaccaccgtgcccagccaggcctcaatgtttctgtggacaaattcactggtaatctcctaagagcatgtaccttgcttttcacttgctgctttcaggattcttttctcctttgactttggaaactgtggttataatgtgtcttatgtccctttttgtttatactagttgatgtgttgagcttcttgatttttttgtatttttttcttacttttgagaatttctcagtaattatttcctttcatacctcagtttctcagtctgtttttcatacttcatgtctttttattggtatccttattttcctaattttacttagtttgctgttttgccatttttactcattgagcattattcaaatggtaattttattttcttcagttaatttatgcatctccatcattttagggttgatttctgaactttttttatttctttgattatgccatgtgaccctaatactttgtacatgtcatctttgactgagattcaggcattaacaacaagcctcctgccacaacctttataatgtgcctttctcctggggtcatctaaaacaaataggcccagattctagaggcctcttaagcctgttctgggatgtgtcttgtgtggaattgtgtgtgtatttttcatttaaagagggtttctcagctttctttgtagtgccctggaatcacacaatacacttgtcgcctggtgctgctgctgcagccttcctaccgctgtcatgggtatttcctttcggtctcagcagacccagcctgtcactcagagtaccaccatttctctcagcactccgtgtcacagggggcagaaaccaatctttgccaaagcttcaaaaggccaaaagtaaaaacacttgtgccagtatttgctttctcttttgaaggagaagccaagagctgagggtgtactcttaaaggcatgatgctatactgcggaggagcgggggctgcagtgggtaaacgtaacagactgtttttcttcttatctggctcctagcactgtgctcacctggggt

SEQ ID NO: 9623 - DNA, 1053 bp, Homo sapiens
cagcgtgaacatctttgcaatattaagtatttcaacctttgaacaagagcatgctcaaatgtgttgtttaatttccatatatttgtgattttttttgtttttctttgttatttccaggttcatttcattttggtcatatatagtaatgcagaagacttcaattttttgaaatttgttaagacttatttatttgtttaacaggtggcctatcctagagaatgttttctgagctcttgggaagagtgtgtctcctgctgtgttgtgtggagtgttctctctatatctgtgaggtggaattgttttgtagtgctttcaagtcctctctacaattattaagtcttgctttatcatttattactgaaagtgggttgtagaagtatgccaatattatattgctgtctgtttcttgctttgatgctgtaattgtttataaagaacttgcaaaattgaagcaaaaaatagcagtataataggaagttacttcaatacctaaatatatatacgaatatgcacccacgcttgtcataggttcccagttcattctcccttctgttactgttttatgttcttgttttttgtgagctctgacttaaagtatgttttaggaagtatgacattttttgacttaagatgtattttgcataatacaattgtaacctcttctgctctcatttcattaacatttgcatgaaatgtctatttccatcttgccactttcagtctctttttgtcattagatctcaagtgaatctcttgtaggtcagctgtagtttgatcttagtttggttttaaattatttagcatatgccttttgattgagtagtttagttcctaaataagcaatttactgaaatgaaaagatgtactttagccattgtattttttttacttgattcttgtagctttttctttctctctttcctttttgtgtcttgtactttgtataataagctttgactctttttaaattttcttttgtgtgtcttataggtattttctttgtggttaccatggaaattatataaaacatcttaaagttacaacaaggtattt

SEQ ID NO: 9624 - DNA, 1028 bp, Homo sapiens
atcagaaagtgtaatgcctctttgttctttttaaagaattttgactagttattgttcttaaactaattttagcattaaaaaatcaaaaagtagctttgggaatttgatagagattacattgaatgtgtacattagtgtgggcagtattgacatctttaaaaaactaaattatctgaccattgagcaagaatgtgtatgttcaagggttttaatttccatacatttttggcattgccagttttacttttgcttttgatttctagttttattacattttggttagaaaacatgtcatgagactttcatctttaagagttgttatttgttgtaacacaatgcactatgtgtatttgagaatattgtatattctgcttctttggactggagagttctatgcatgtctgttaaattgatttggtctgtaatgttgcccaagctttcttattgatcttctgtgtaattttctattctgtattgcaaatggggtcttagagttgataattattgtattgctgtgtacatcttgcttcacttctctccatatttgctttatatatctgggagccctgatgttagatataaatatagacagataaacagttacaggttcctggttaatgtacgcattttgccattacatgctattaatctttatctcctgtgacagttctgacttacagtgtattgtgtctaatataaggataaccaccccacctgattgtggttactaattgcatggaatttttttttattttcactttcagcctattttactatttaaggctagagtcttttgtagctagcatattgttcttaatccattcagctattttatttctgttcaataagtaggttaatttatatttaaaataatttctgaaggaaatgaagttactatcaccatcttgattgttactgttttctgtgtttcttgtagatatgttatccctcatttcctctttgactgtcttcatcgtttgttttgttgattttgtgtggacaagctttcattcttttctcattgtgtt

SEQ ID NO: 9625 - DNA, 1050 bp, Homo sapiens
caacctctgcttcctgggctcgagccttcttcccacttcagcctcctgaggacctggaactacaggggcacaccgccacacccagctaacttttgtgtttttaatagagacagggttttgccatgttgcccaggctggtctcggactcctgggctcaagtgatccacccgcctcggtctcccgaagtgctggggttccaggtgtgagctggtgtgaaccagtgtgcccggcctatgctatctttcatcgtggctgcatcctttctttcctaccagcaggttacgtggttttcaatgtcttcacatccttgacaggtctggattttttttttttactgtggccattctaataggtgtgaggaaatatcttaattgtgattttgttttgcatttctctatagataagtaatttgagcattcattcaaggcttgttgggcgtttccatatcttttttggagagatttcagttagtccttcatctatttttaaatcaaattatttaatttttgttgtttagttgtaaaagttccttatatactctgaatataaggatacactcctatcaaatgtgtgatttttacccatttcttaggtggtattttcacttcactcattgttttctttgatttgcagaaagtttgaagtttgatgtagttcagtttttctgttcttttgttgcttatgcatttgctgtcctatattttcttctaagagttttattctttttttttttttttttttgagatggagtcttgctctgtcgcccaggctggagtgcagtggtgcgatctctgctcactgcaagctctgcctcctgggttcacgccattctcctgcctcagcctcctgagtagctgggactacaggcgcccgccaccacgcccggctcattttttgtattttttttttttagtagagatggggtttcaccgtgttggccaggatggtctcgatctcctgacctcgtgatccacccgcctcggcctcccaaagtgctgggattataggcgtgagccaccacacccagcctattctatttttatgtttttc

SEQ ID NO: 9626 - DNA, 1115 bp, Homo sapiens
tctttacatccttatcaacattgttagtagattggcgcaaaagtaagagtatttcttactatttagaaggcaaaaaccacaattacttttgcacagccctaatatgttacttatttttgatattagccatcctagtatccaaaagtttgattgtaaattgtctttggtgtcacaagctttttagcttaatgtactccattttgtttatatttacttttgttgctgtacttttggtgtcgtgtctaaaaaatgattgccaagaccaatatcagaggttttctctcagagtttttaaggatacatgttttacattttaggcttgatttcaagttaatttttgagtatggtgtaagaaaaatgggctatttcattattttgattgcgggtattctgtttctccaggaccaagtgttgaagagactatactgtctgtattgtatcttcttcgtgaacttgtgaaagattagttaagtggatatgcatgagtttaattctgggctctctgttctgtcccattggtctctgcggcagttttcctctctgttcgcataccatcctgttcttactactgtagtcctaaaatgtcacttgaaaacagaaaatattatgcctcttgccttgttctttttcctatagattgctttggctatgccaagtctattgtaattccatataaattttagaattctattttcattactgtgaaaaaggccactggaatttgataagaagtttattgaatctatagtcttggtctttagcagaattttacaaccccctccctggattactaagctctattaaaggcatttttgtgagatgagatctctctgtgtcacccaggctggttctgaacttctggcctgaagtgagcctctcaccccgaggtcctgaatagttgggattataggcatgagccgtggtgcctgattctcttggaaaggcatttctgtacaagaagactgacacatttttgttgctgtcggggaatatataacccagggtccacctatgtcaccatttttctatgtcactgtcctgtacattttcactttctcttttgttccatttcaaatttatctctaatttcaaattctaatatgcagaacaatatg

SEQ ID NO: 9627 - DNA, 1015 bp, Homo sapiens
tgtataatgccactcagtgcaaggtatgtagcccgagaaatgaccgacctgatgcgtgttataacccatctgagccctccgcaaccaccgtttttgaaataagaataagaactggccttttcctaggtgatacaagtaaaataataactagaacagaagaaaaagaaattcccaagcaaataactttaagatttgatgcttgtgcagccattaatagtaaaaagctagaaataggatgtggttctcttaactgagaaaggagctaaagagtagaaaataaatatgtttgtcatgagtcaggggtttgtaaaaattgtgcctattggccatgtgttatttaggctacttaaaaaaagaacaaaaaggaaccggtttatcttcagaagggggaagccaacccctcctgtgctgccagtcactgtaacccactagaactaataattaccaatcccctagatccccgttggaaaaagggagaacgtgtaaccctggggatcaataggacagggttaaaccctcaagttgccattgtaattagaggggaggtccacaagtgctctcccaaaccagtatttcaaaccttttatgaggagctgaatgtgccagcaccagaacttctgaaaaagacaaaaaatttgtttctccaattagcagaaaatgtaattttcttacttacataactgttacttcttgttatgtacgcggaggaaccactatcggagacagatggccttgggaagcccaagagttggtgcctactgatccagctcctgatataattccagttcagaaggccgaagctagcaacttctaggtcctaaaaacctcaattattagacaatactgtagagctagagaagggaaagactttatcatccctgtaggaaagcttaattgtataggacagaagttgtataacagcacaatacagacaattacttagtagggcctaaaccacactgaaaagaatccatttagtaaattttctaaattaaaaactgcttaggctcatcca

SEQ ID NO: 9628 - DNA, 1050 bp, Homo sapiens
agcccggttcctgatgattcctgggtcctcacaatcccaggccctgtcagctctggggtctcagggatgggaggccccaggttctggaagctgttgtgcacttgagtgatgtagtgactgaggacgctggcaccgtcgggaggccggggcgtccctccctctgccagagttcaccgcacaccggctacctcgctttgcagtcgagatatggtcttggtcagctctgtgagtctgttgcccagatctggaggaggtggagtaccaaggggcctttcagaggatgagcctgccctataccccttttaccctttacagtaccccaggggttgccctatccaggattcctgagggagaactggaagaagtgaggaacgggtttgtgggctaggggtcaggtgggtgggtgaagctggggcaggtgaatctgatcgggggtgggagggagtagctgaggagctggaaagaaggaaagtctgggggccagagaaagatgacaagccacggggaaagcttactggactgcgtagacatttgtgcgttcacctgcctgccctctcccgagtctacggccagccagctcaccccatccttcagggcccagttcagatcccaccccctttgtcccttctgctactctatccttctgccttctcatgagcctctcaaaatgacgtgctccttctcccttcaggcgcccatggcaattcgcgtctctcttagctgcacttcatgcccgctgtgatggtttctcttcctcaccagactgaaagcttcccgtgtgtccctgccctacagtgccccgtctctccctccaagacagggcctggaacaaaggaggccatagtgatgaatgttggtggaacgagtcaataagcgagtgaatgaaaaaggtgaatgagtgactgggtaagggagtgaatgggagaataactgaacacacctgaaggcaggaatgagcacttacatgaaatgagtgggacaaatgcccggatgggtcagagggtaatggagtgcaaggggcatgctgtgcaggttacccttccaagggca

SEQ ID NO: 9629 - DNA, 1116 bp, Homo sapiens
aaaaggttatgctcaccaggacaccaacatgtagtaggagaggatcttaaggcatgccagagtcagattcttagggctgttgattcataaactccactttcttcctgtttattttgactgtaaggctaaacctctggtaaaggtactgccttttaggttactaaaagcttttgctttactactccccccctttttttttgttttttgttttgtttttgtttttgttttcgagacagtctcgctctgtaccccaggatggagtgcagtggcataatcttggctcactacaacgtttgcctcctgggttcaagcgattctcctgcctcagcctcctgagtagctgggattacaggtaacgtgccaccacactcggctaacttttgtatatttagtagagatgccgtttcgtcatgttggccaggctggtctcgaactcctgacctcaggtgatccgcctgcctcagccttccaaagtgctgggattacaggcgtgaaccactgcctccggcctttttttttccctcccccctgcaccaagacagagtcttggtctgtcacccaggctggagtgcagtagtgcaatctctgtttactgcaacttctgccttctgggttcaagtggttctcgtgtctcagcctcttgagtagctgggactccagtcacgtgccaccacgccaggctaatttttgtatttttagtagagacaaagtttcatcatgttggcgaggttggtctcgaactcctgaccccaagtgatttgcccgccttggcttcccagagcactgggattacaggtgtgagccaccgtgcccagtgttttcctccatttttcctttttatgtttaagatagagtctcgctcttgttgcccaggctggagtgcaatggtgcgatcttggctcactgcaacctccaactcatgggttcaagtgattttcctgccttagccttccaagtagctggaattacaggtgtgcaccagcacgcccggtgatttttgtatttttagtagggacggggtttcaccatgttggtcaggctggtctcgaactcgtgacttcaagtaatccacctcccttggcctgccagagtgctgggattacaggcattagccac

SEQ ID NO: 9630 - DNA, 1052 bp, Homo sapiens
ttattagcaccaaagaccctacattttactttgcatggggaaactacttgtgccgtttgagtatactggaaatagcagtcttctcatctctgtgtcaagatgactgcataccatcacctcaccccttaaagaggttgattgcaaaacttcagcttctttttttcttgggggagagaggcctgtttctttaggtatttaggaagatgtgtatttttctttaatggtcacatttgttccattaccttttatataatatcgtcagtcccctgtttccagttggttcttaagcctcgcttttgctcttaaaaaaagcaagtaaatctaagcaaccagaaaacataaaggtaactaaattttcatgtgatcttctctcctgtaccttttaggttagagaaaatgttggttggcagataaaccttagtcacagagatgaattaaggtagttgcagagtattttgttctgtggttagaacattagtttcaaaatcctggtctgggatccaatttccagctggctgcatcaatgccctggtaagcttgacttagattccacagatttggcatggggctcaggcatatttatattttaatgcttctccccaggtggttgaaatgtgcaatcaggtttcaaaactatgttgaaagacctcaggcctttggcactcaggtagagatacgtgtaggtttttacctcagcctttttttttttttttgtaaactttttttttttaaattattattgtactttaagttttagggtacatgtgcacagtgtgcaggttagttacatatgtatacatgtgccatgctgctgtgctgcacccattaactcgtcatttagcattaggtatatctcctaaagctataccctcccccctcccccctccccccaccccacaacagtccccagagtgtacctcagccttataactgaagtgtaacttgtgttcagtaacatcaaggcaggctaattggcttgctcagaaacttagcattgttcactaagtgaatttaagttaatgactttttttttttttctgaggcaaagtttt

SEQ ID NO: 9631 - DNA, 1031 bp, Homo sapiens
ttgtttttagtaaatgggtagtagctgttttttattattatttagtacggtagccctttaagacctgcataagacttggttcgtaccactggactgtaacttaaataagttagtgattcctagcttaagtgtgaaaatgagattggaaataattgatgtaccatggtaatttaaataaatgcagtctgactctagaaccagatattgagttgtcaatgtaggagtgactccttgctcttaagcttatggggcaaaactcaagtttatgacacatgcagaataattccaaggcagcatagttaccattattcactatttatgtgttaggtggctttctggtcttatatatgaagcgcttttactttaattggttactttaattggttatgttttacaggaaggctgaagttacattggatggagtttggccaacagataaaacatctcgttgtttaataaagagcccagatcgccttgctgatatcaactatgaaggaagattggaagcagtttcaaggaaacagggagctcaattcaaagaataccggcctgaaactggttcttgggtgtttaaggtatagtcatttaacccagttcagacttttataaactatatttggagtcacataacgtttatgttggaagggatcctttgctaaattctattgattgattgatggggttcttgctctgttgctcaggctggagtacaatggtgggatcatagctccctgcagcctcaaattcctgggctcaagcaatccttctgcctccgcctcccaagtagctgggattataggcatgcactaccatgcctggctactttttaaaatgtttgtaaagatcgagtttctcagtgttgaccaggctggtctccaactcctgggatcaagcagtcttccctccttggcctcccaaaagtactgtgattacaggtgtaagccactatacccagccaaattctctttatttttagaaatttggagagagatgtacagatacattatgattcactccaaactacaaaccta

SEQ ID NO: 9632 - DNA, 1081 bp, Homo sapiens
ttgtctagataaaccagttttcatgagatggtataattgaaagtgttgtgttagtgaaagacgatatgttggatttagttttcctatagttgtctgtaagaaagatgacatgattgtgttagttgagtattttgatttgcaagtattgaattttaagaataattaatttttaaaaattctttggaaacctgttttattataggtggcaggcagttaagagccctggttgtcaaatacacctaggtttgaaccccatttctatcatttataacattgtgacatcgtgctaattactaaaccctaagttttctcctctgttaaaagggaataatagtttctacaccagacattttgatgagcatgtagtatgttcccgatgtcttctaaatgctttatgaatgtttatccattttaattttaggattactatctaagctatgtgttacttcatgttataattgaggaaactgaagcacagagagatttaagtattttacctatgatgtgtataatgtactgagcgcagtacttgacctgcagtaacacttaccgtattcacccctttgttgaaatgagtggtcactatgaagtttccaaatgtattatatttttaagtaactgacctctggcacaacattgaaaggatcttctgtggtgcttttttctttcctcttgtctccgtagctcttggtgctggacaggcatctttgtttgggaacaaccaacctaagattggagggcctcttggtacaggagcctttggggcccctggatttaatactacgacagccactttgggctttggagccccccaggccccagtaggtaagtgtcagtcactttagaaggcttttcttaattttttgctaatacttgctgacctgattttccatcctacacctgtcccattcctaccaaggcattgcatacatgcatgtcattaaacaattgggtagtaaagaagggcttattaatagatcctggcctactctgctttcccagctcctaggcctcctctgtcaaagaaaccacttttgttactatttttaattcatctgatatataatttagttcatatcgc

SEQ ID NO: 9633 - DNA, 1049 bp, Homo sapiens
ctgcaacctccgcctcccgggctcaagcgattctcctgcttcagccttcccgagtagctgggattacaggcatgtgccaccacgaccagctaattttgtatttttagtggagacagggtttctccatgtttgtcaggctggtctcgaactcctgacctcaggtgatctgccctcctcggcttcccacagtgctaggattacaggcgtgagccaccgcgcccagcccacagtacctttttttaattcttctgtggattactgaaatacagtacagtgattttagaatgattcatgggtcatcgtccagggatgctgtaaaggtgagggcaatacacatttagagtagaatttttcatctattttatatatttgagtttcacctaagtttttgtttggaggcaaggaggtattagactaccagaaaataaacaattctgtagtttgtgctgtaaactatttcctttgatgaagtaatataattttagtatttcttggagcttgcgttaattactaatggtttagaactttaaaagaagtcttattctttgtcccaaagctgtctttttttttttttttttttttttttgagataaagttttgctcttgttgcccaggctggagtgcaatggcgtgatcttggctcaccgcaacctccacctcccgggttcaagcgattctcctgcctcagcctcccgagtagctgggttacaggcatgtgccaccacacccagctaatttttgtatttttagtagagacagggtttctccatgttggtcaggctggtcttgaactcctaactttaggtgatccacccgcctcgacctcccaaagtgctgggattacaggcgtgaggcaccgtgcccggccctgttgtcttatttttaatgaggttggacagtcagtaatttgttcagtagtcatccttactgatttatattgtgtgggttgtcttggtataaactttctgttcttttttgattgtgatctcaaagcagttcccatacaatatttttgacctgcaagtattatatctttgaagtgattttcc

SEQ ID NO: 9634 - DNA, 1461 bp, Homo sapiens
caaagtgttgggattacaggcgtaagccaccacacctggccagttgtttcattttttttagtacaagttagggggaattaatttctcttctaaataaacttgaaacttgcattgaaagctttgggccttacaaaggcaatgttcccaaagctcaagtgtgttcactttgcttgaatattgatattatcctatattgaattgatatttctttattttattttatttatttatttatttttatttgttttcgagacagagtcctgctctgttgcccaggctggagtgcagtggcgcaatctaggctcactgcaacctttgcctcctgggttgaaacgattttcccaccttagcctcccgagtagctgggattacaggcacgcaccgtcatacctggccttttttttttttttttttttttttttttttttttttgtatttttatagagacggggtttcaccatcttggccaggcttgttttgaactcctgacttcaggtgatctgtcagcctcggcctcccaaagtgctgggattacaggcgtgagccaccgcgcatggcctttgaattgatatttcaaggctgaaatgtaattaagtaaatatgaagacttgtttgcatatgtgaaattttttttttaagttatcctacaagttaggagtcctaaatattaactgaaaggttcacaacttaaagtcagactgctttgtgttaaactcccttatagaggaaattgagagttatattaaaagtacaatccactcattcttttgtcttcctaggttttggcacaaataccagtgggaatagtatttttggaagtaaaccagcacctgggactcttggaactgggcttggtgcaggatttggaacaggtaagaaactgctaccatgagatctaggaagtgacacagcttgactttctagtttctggaacttgagagatctgtttgattatgttactggaattaagaagtctaccttttcgtttttccagttgcgtttataagacattcccagcagttatgctttaccaggctttaaaatattggcatgtttgtgttagaagctgtatgctcccttttctacaaaatgtcctctgatagtcctggtctttttgggatttttagtatttaatgtgagaattgtcatgaggacattaactttcagtttccccatgttacttttgtaacagggatttgagaccttaaactgttcatcaaagtaagccctaatagaaaggcagagcaataagagcacatgctgatgtaattctcctttgcaaggagaatttcatttagttccattgtcatatagaccagtgtcaccccttttccctgattcctactgttaacaactatttttcagtgcctttgaagatactgacccttctacctgcccagctgtttttaaacagctggagcgtgatgatggtcataaaatatataagtgttttagcatgta

SEQ ID NO: 9635 - DNA, 1020 bp, Homo sapiens
tcccaaattgctgggattccaagcgtgcaccaccacagccagctaattttttttttttttttcgtggtagtagagaagaggtttcacatgttggccaggctagtcttaaactcctttcctcaagtgatccacctgcctctgcctcccaatgtgttgggattacaggcgtgagccatcatgcccagtgctttatgacttttaaatgacttcatatgttctgcaaacagggttttctggctaatgatttcttttctctcatgagaaattaatgacatattcattaattgttttgttgatatttatttacaaaaagaataatgaaactgtgggcatagatgaagaaaagaaaagtaatggcagcagtacagaataggatctttgtttgatacctatggatttttttttttttttttttttttgagatagtgtctcgctatgtcgtctaggctggagtgcagtggtgcgatctcgacttactgcagcctctgcctcccgggtttaagcaattctcctgcttcagcctcccaagtggttgggattctgggtgtgcaccaccacacccagctaatttgtgtatttttagtagaggtggggtttctccatgttggccagactggcgttgaacttgtgaactccagtgacctgcccaccttggcctcccagagtgctgggattacagttgtgagccaccgtgcctggctgatacctgtggattttaaagggaaattataggattttgtttaaatggtgggtcatagtgaagaagacttctcacgtgtaatcagctacacgttactatcctggctaggttcatctattcaaaataaaagctactgtggaaagttttgtaagtaatttttttcttagcaaggacctttaggttcagttaaagtgtctttgttgattgttttatttttattttattttgtattttttttgaaacagagtctcactctatccatgctagagtgcagtggcacgatcttggctcactgcaacccccgtctcccgggttcaagt

SEQ ID NO: 9636 - DNA, 1025 bp, Homo sapiens
gagattacaggtgtgagccattgcacctggcctggttattcttagtgaaagtcaaaatatgccaggcatcatggtgagcacctgtagtcccagccattatggaggctgagtcaggagtatcacttaggagttcaaggctgcagtgtgctatgatcacacttgtgaattgccactgcattccagcctaggcaacatagtgaaagtaggtctctaaaaaaaataataaaataagaaaaataatagaagaaagttgaaacctttctgatttgggggattattcagtagtttattttttacggtttcaaaaattttgaatgcatgttcatagtatgtatattcattgttgaaaatctggaaaatacagaaaagattgaacaataattttcaaaaccttaacctactgggaaaaatgtaaaccagttttatggaacatgatgatattattttatttatttatttatttatttttgaggtgtagtctctgtcacccaggctggagtgcagtggcatgatctcgatcttggctcactgcaaactctgcctcccgggttcaagcgattctcctgcctcagcctcccgagtcgctgggaatacaggcacgcaccactgtgcctggctaatttttgtgtttttagtagagacaaggtttcaccatgtaggccaggctcgtcttgaactcctgagctcaaatgatctgcctgcctcggcctcccaaagtgctgggattataggcatgagccaccacacccagtcaatattttcaatatatcttataactacctaattatgttttcaaaattcagcatctgtcagatcagatatgggaagtttattctgtttgtcgagggaaatagtggttcaagtatttcttgaggattttgtgtgccagatacatcactaggcactgatagattctttttaggagttgagtacaaagacatggttatttggtgtaggtcagcagttaacagttttttaatgagcttttgaacgatcctgtactggagaaagagatcatattaaac

SEQ ID NO: 9637 - DNA, 1032 bp, Homo sapiens
aaaaattaaaaaagagccaggcgcggtggctcacgcctgtaatcccagcactctgggaggccgaggtgggtggatcacctgaggtcaggaattcgagaccaatctggccaacatggtgaaaccccgtctctcctaaaaatacaaaaaaaaaaaaaaccactagctgggtgtggtggtgggtgcctgtaataccagctacttgagatgctgaggcaagagaatcacttgaacccaggaagtggaggttgcagtgacccgagatcgcgctattgcactctagcctgggcaacaagagcaaaactctgtcttaaaaaataaaaaaggaacacaaagtccctaaaacatatggtcctgttttcatggagattgaaatttctcttttctttttttaaactttggacagataattgaggtaagaaattgagaaaattatataatgcttcaagacattctagtacttctgttgttgttgttgttgttgttgttgtttttgaaaccgagtctcgttctgttgtccaggctgtactgcagtggcatgatctcggctcactgcaacctctccctcccaggctcaagcgattctcgtgcctcagcctcccaagtagctgggattacaggcgtgtgacaccatgccaggcttttgttttgttttttgttttgttttgttttgtttttttgagacggagtctcgcctgttgcccaggctggagtacagtggcgtgcgatctcggctcactgcaacctctgcctcccgggttcaagcagttctctgcctcagcctcccgagtagctgggattacaggcgcccgccactgcgcccagctgatttttgtatttttagtagagaatggggtttcaccatggtggccaggctggtctcgaactcctgacctcgtgatccacctgccttggactccgaaagtgctgggattacagacgtgagccaccactcctggccttaatttttgtattttttagtagaggtgggattttgccacgttggctaggctggtaactcctggcctcaaggat

SEQ ID NO: 9638 - DNA, 1046 bp, Homo sapiens
agattgtgccactgtacttcagcctgggcaacagaacgaaactccgtatcaaaaaaaggaattaaggctctttaacataacactcgtacctcggtccgtgttgatttattttcgctgattatttttggttacttgattctaagttcactccccagcttgatactgattagttcttttcacctaaatcgttgaaaatgaaggacctagacatactattttgcttctcagtgttgcaaccctgacatctcttagagcacaagagttaaagtcttattatttaatagacgcctaagaccttggagttcatcatcctgggaagaacaggggcttaaatataggtttgaacttctgttcctaccattcaggagctgtggcaccttgggcaagttttaaaatgctctgagctttttgaaaaatatactccctgcttttcagggttgttttgaaggaaataatctatataagttatttagcctaatatctgtcatataagcttgaaaaaatggtaactttttttttattactctgagattcgttacggaaactattacaggatatcttttaatctatataaacttctttgcagggattatttggagtaacccaagcctcacagcctggaggtctttttgggacagctacaaacaccagcactgggacagcatttggaacaggaacaggtctctttgggcagaccaatactggatttggtgctgttggttcggtaggtttctgcagttgactgtaatttgaagatgtgtgtaaatttgttaaaaggaattttcttctaaggatttgactgttttgcaggtatttttattgggtgtattattgcaccagcctaatatgatttgattctgagaacaaaaaattatttgatataaaatgaaatttcaggttaacttcaggtttgttttcaattagtaaattctttcccttttaaaatttctttgcctcagtgcttatgtgcatcatacttctgatagcattggttaaattgttgagtctaaattgaaattcttttgctttatttgaatcagataatt

SEQ ID NO: 9639 - DNA, 1023 bp, Homo sapiens
taattcagtagtaagacaataactcatttaaaaagggccaaggatttgaattgacatttctccagagaagatatgtaagtggtgtgataatatgcttaacatcataagtcatcagggaaaggcaaatgaaaaccaaaatgagataaccactttatacctatttgaaagatacaataaaaaaagactaacaggctgggcgcggtggctcacgcctttaatcccagcactttgggaagccgaggcaggcagatcacgaggtcaggagttcgagattagcctggacaacatggtgaaaccccgtctctactaaaaatacaaaaaattagccgggcatggtggtgcccacctgtagttccagctactcagggggctgaggcaggagaatctcttgaacccgggaggcggaggttgtggtgagccgagattgtgctactgcactccagcctgggtgacagtgtgagactcaacaaaaacaacaaaaaaatacagtagtaagtattgaacctggagaagttggaaccctcatacattgctggtacagcccctttagaaaacagtttggtggttcctcaaaatgttaaacagagttacgatatgacccagcaattgcacatcttgggatttaccgaagaaaaataagacatagacttgtacacaagtgaacataacagcattattcataatgactaaaatgtagaaataacctaaagatctattaacaatgaatgggtaaccaattgtggtatatgcatacaatggaatattgttcaaccataaattggaatgaagtactaatatatgctacaacacagatgaaccttgaaaatgtgctaactgaaagaagcccgtcaccaaagaccacattttttatgactccattcacattaaatgttcagaataaaaaaaaaatccatagaaaaagatgaatggttccctagggatggggagtaatcactgatgggtctgggatttctttggggggtgtaagaatttagatagtagggatggttgcagaacatcacg

SEQ ID NO: 9640 - DNA, 1047 bp, Homo sapiens
agaagttttctttccatgtctcctcatcatgttacaataacggaagagattaaaacaacaaatacatttagacagcaatgtttatcctggttagatgttttaatctaaatctatcttggagtgttaaaatgcatttgctcacctactttaaaatataaatgaaggtaggaacctgtagatacaaaaagttggagaaaaaaagacaataaagatgacaaaaatctattaatccttgatagaaaatgagaagagataaaacactggtttacataaagaaaataagatggatagatagcagatccttataaaagtgataatttgagaaaaaaaatactccatattctgagtttcttcacataaaataatacaaatctgctgtggtaagttacaaagagatagattttttatcattatataaaagatattttaaacagagttatacaacaaaggaacagactatgtcatatattctcacttatcactataaacatctcagaaaaatctgcaaaatcatttcatagcattttaaatagttaggaataatgtagaaaactgaaacagttctaagtttcccacaaacttagagtctcaaatgttgcattacctaacttacctgcaaatattttatacaaatttgcacatgctactctagtcaaaaatatatgtacattatgggtattttctgtgtgtaacttggttctagttgcttctttcagaaatagcctctatttttgatttacctgataaaatcacattcctctccaaagccttctaaatacttccagactaactactttttagtacatctaagaagaaaagagttttgtctcttatccacctctgagtcaaaaagcagcatgtccatcaattggtacatagttcccacagccccacttagctctggattggagttctacttggcattgtttgcaactacatggacgtaaaatgcatggattctcttgaaaaaatgtttctgccatgatgttctctgaaagagactaaccttccctcgctttgcagagaaagactcgtgtaatccttgac

SEQ ID NO: 9641 - DNA, 1188 bp, Homo sapiens
cttgattgcaagacacatttttacagtgaggagagggaatgagggtgggaaaactacaataaagtaacacatccatggaaaaacgcatccaaattttgtaagcattggaactgagaaaatactatatgttgagatcaaagaaggaaattagaagcataatcataaactgttattaaatgtagagttgatctatcccagtggtttccgaggtaatcctaaagagctggactctgagaggttgctttaaggtgcatctcaaggcttatgtgaaggaagtttcttgtcttatttttccacaatcacagcagatctgatattatctagttttgcttgtgtatcaagcacttaggtaagattctacttgaacaataaagtttctccaataaatcctgttttgaaaatcatccattctttggctgttattaaaatgtgaaaagaaaaacaggtgctggtgaggttatggagaaaaaggaacacttatacactgagagtgggagtgtaaattagttcaaccattgtagaagacagtgtggcaatttctcaaagacctaaagacagaaatatcatttgacccaacaatcccattactgggtatatacaaaggaatataaatggttctattataaagacacatgcatgcatatgttcattgcatcaatatttacaatagcaaagacatggaatcaacccaaatgcccatcaatgttacactggataaaaaaacgtggtacatatacaccatggaacactatgcagccataaaaaacaatgagatcatgtcctttgcaggaacatggatggagctggaggccattatccttagcaaactaacacaggaacagaaaaccaaatactgtatgttcttacttataagtaggaactaaataatgagaacacatggacacatagaggggaacaacacatactggggcctatcagagggtagaggatgagagaagggagaggattaggaaaaataactaatgggtactaggcttaatatctggatgatgaaataatctgtacaacaaacccccatgacacaagtttacctacgtaacaaacctgcacatgcatcctagaacttaaaagcaaaagtaaaattataaaaaagaaaatcatccattcatttggaaactatttattgaggaccttctgtattttagatagtgttctaagcatttggga

SEQ ID NO: 9642 - DNA, 1031 bp, Homo sapiens
atttttctttctacagtctttagccccttaaacatattcaaatttcttttatttaaaaaaaatcaacacaatcctctttttaacataggcacttctacctgtgcattcagttttcccttcgtgtgaagctgtttgctgaagtaaagaatctctgacaaggtgatcagtcctccctgtgtttgttcactccaggcctgctgtctcattgtcctcccgcatctgtttctctcttcacatgaaactgtttgctaggatcaccaatgattacctaattgccaaatgcaatggataatctctttctcacattgctgaaattctttatgtgagcatgtctgtccactccattggattttcaattatgtctctgttcattccttttcagtttccttgcaatctctttacctcttctggtcctaagattaagggtaggtgtttcatagaatttcattatcatgttttattttaaatttacatttttcccttaagtaatttattcagttctatagtttgaattatacatgatgtgctgatgatttccaattctctatctttgagctttcacatgaaatcaaactactttctacaacattaaatgtcatatatattgtgatagtttatacacccaataagctgaacatatcaaaattggttctataatttctacctctgcaacatacatcaaatcttttcaaagcctatttttttgtcttgtgaaatttacttagtcatttaagtcagattggacagtgcagttttagaatcctaccctcttttcttctatacaagtagtctaatcgctgtctgtcatatttatacctctaagatatgcccctttccctcatcttcagagccatctcagagccatttattcactcactgatcacttctcagttggactactgaagccaacagtcacttgtccccttttagatgtcctttgcctcttttggacccttaagtttgggtgtgaaagaagaagaaagagatttagtatatttccccccaaaataaaatcatggtttttatactaa

SEQ ID NO: 9643 - DNA, 1027 bp, Homo sapiens
tgttccaccgtcttggttcccagcttctgaaagacaaaactgatgtcttctctggtcctccaaatatttttttccctaactttaaattggctcacatagttactttgtctttgcaacaccatcttctagctttctttctgagcaggtttagtgttatcctccgttttttgtggaacctaattctttttggacctaattactttctcaacctatttgttcttctgttgtgcctcttgggtgaatcttttataaaaacaatatgtaattgtagcttatggttataactgaacacttaaaatttgccagatctgaggctaaatgctttatattgataactctttgatcctcttcatcaccttatgaggtaggtatattttcctattttacgaactaggaaactaaggcttggacaattttgacctgtccaaactagtaaagggcaaagccagtgaaaccagatctttcagagtccagagcctaagatctggcttgtcagcttgaatgtgtgtaaagctggcatctggaatcttgtgggtccatatggtgtctgccatcttatttcctccagaataggtggccacgggatatttaaacatacccagaggctgacatacaaatacttttcatctggtgggggtctcttgttttggggaggaatgcgtgcgatgtgcattgtgttcaggctttgtatccttgtgcccacctcccccccaacccaggccccttcatggctgtgctctttgccaaactcgagaacatgctgcagaactccgtctatgtcaacttcctgctgacggggctggtggcccagctggcctgtcacccccagcccctgctccgctctttcctgctcaacaccaacatggtcttccagcccagtgtcaagtccctgctgcaggtgtgcgatgcatgcatgcatgggtgcgtccaggctccgtggtgggccaggcccgcagctggagtgaccctgggtgggctgggaacaggcccagtgggactagaaaggactgtatcagtctagagctgc

SEQ ID NO: 9644 - DNA, 1046 bp, Homo sapiens
atagaaatactactgatttttgtatattaattttgtatcctgcaacatcactgaatttgattatcagttctaatagttttcttgtggagtatttaggtttttcccaatatcagatcatatcatctgcaaatgaggataatttgacttcttcctttccaagttggatgttctttttttctttctcttgtctgattgctgtaggacttccaggactgttgaataatagtggtgcaagtggatatccttgtcatgttccagagcttagaggaaagactttcagtttttccccattcagtatgatactagctatggatctattatatatgacttttattatgttgaggtatgttctttctatccccagttttttgaaggttttatcatgaagggaggttgaactttgtcaaatgtttcttcagcatcaattgaaataatcatatggtttttgtccttcattttgttgatatgatgtatcacattgattgatttgcctcccagggaaaaattttatttggtaatgatgaatgatctttttaatgtatggctgaatttggtctgctaatattttgtggaggatttttgcgtcaatattcatcattgatattggcctatagttttcttttatgatgtatctttgtctggttttggtattggggtaatacttgcctcacagaatgagtttggaagtattccctcctcctctattttttggaatagtttgagtagaattggtattagttctttaaatgtttggtagaattcagctgtgaagatactgggtctcgtgcttttcttttctgggagactttttattatggcttcaatataattacttgtttttagtctgttcgggttttggatttctttctttctttctttcttcttctttttttttgagacagagtttcgctcttgttgcccaggctgcagtggaatggcatgatctcggctcaccgcaacctctgcctgctgggttcaagcaattctcctgtctcagcctcacaagtagctaggattacaggcatgtgccaccacgcctggctaac

SEQ ID NO: 9645 - DNA, 1058 bp, Homo sapiens
gcctcgaaacgacttagttctcacttacgtttcgcagttgctgttgctgctgctgctgccgctccatcacgccaccggcgcatgccgtacgccacttccgtttcagcttctcggtgccgccccggaagtaacctctcgctgatctcgagagctagctcgagtatcgccctgccctggctgcgacgtcagctccgcccttataatctgcgacgtggccggcttcttctgcccggagaggacgtcatttccgccgagtccctgacctgctgctaggatcgcgacgggaactggagcccgaggtccccgcgcggcccgggcctggcgccctgaggggaagagcggcccggcccgaggtgagaggaacatgcttgggcgacgggaagttgaacgcacaaacctgtccagagggcaagatgccccgagccccggggaaggatgaggacacacctgatgtccaggtgtatgggggtgggggcggggactcacacacctgggagacataactgactgtggaagggtcaccgatatcctgggagagagaggcttttaccagagactgggaacatacacccactgatctaactaaggcctggtggggagggcccgaggaagacgaggtgtatgagacggaggaggggagaccccctgaaggaagggggaagaaacgctaaaggaatgtgaaaggccaagcaatggagaacaaacctgaataggggggtgaagacctgagccctggaaagggttcatctcctcagcataaacacgcctgcatggagataagttctaagagagcagactttccctcttcactgttgtattttcattgtcacaaatagtgcctgacacatagtaggcactcactaaatgtctgctgaatgagtgtagaaataatcaccagagtcctggtgaggttgggggcttgtgagaagacaccgtgctttggtgtgcctgtttcaaatgtgcgttttggaggggagaaatacatatatctgaagaaaggaatgatggccaaacgctgggacactcaaaccctgggacagcctttaaagaaatgacag

SEQ ID NO: 9646 - DNA, 1106 bp, Homo sapiens
ttggttttcgtttttttttttttgtagatatggggtctcactatgttccccaggctggtctcgaactcctgggctcaagcaatcctcccgccttggcctcccaaagcgctgggattataggtgtgagtcaccatgccaggcctgtctggttaattttaattcatcctttgggtctcagcttcaaaatcacttccagtgaagctctccttcatccctcaaacagaaaaagtttgcacttctgtatgtttccattacaagatgcatttcttctttataacattcatcacagttgtgattactggtcctatattaaccttcacgtaactacgttaagtttcaagagaacacggattgaacgttctcgttcagctctgtatctgcagggcttaagctaaaattggtaaaagcagtcactcaaatatctgtggaatatgtgaatatatagatgaatgtggggcatacccagaaaaggaaaaacagaatctctattacatgtaactaagctaattcctaactaatcaaaaggggtctagactcaagacaaaaagctattaggaagcactctgttgagcccctgtgtctccgtgctggagctgcagggactccttttttaaaaattaaattaaaaaaattttttaagtgtaacaacaacaaaagctgttaggagactgctgctgtaatctgtgtaagagctgataaaattttaaggggccgggcgcagtggctcacacctgcaatcccagcactttgggaagctgaggcggttggataacctgaggtcaggagtttgagaccagcccgaccaacaaggtgaaaccccatctctactaaaaatacaaaaattagctaggtgtggtgatgggcacctgtaatcccagctgcttgggaggcatcaggcaggagactcgccgaggagaggtggaggttgcagtgagcagagattgcatcattgcacaccagcctgggcagagcgagactccatcttaaaaaaaaaaaataaagctgataaaagtttggttaaggtaataacaatgaagatggagagaaggaaaatggtttaagagatatttaagcagaactataggacttagaaattaggtggaaac

SEQ ID NO: 9647 - DNA, 1030 bp, Homo sapiens
caagctaaaagacaatagaaaaatgatagaagtcatgagaggacacatatcagaattagaaaaactcagaaattatgtgacagaactatggaaagaattataaatgaaagaaaaaacaatttcataatggaaatttaactaaaatgggacataagagcaaacaaactcgacagataatttctcaagaaaaatagaaggcaaaataagggtaattatacaactaaaaaggaaataaacaattttaaagatttcaagagaaagggaaaaatattggggatgggtgataaggatctaatgtatcagtaacaagattcccccaagaaaaaaacaaagcaagggaagagaacaaatattaaaaaccgtaattcagaaaaattgttctgaaatttaaaaaaagatataaagccacattttgaaagaacatacctgacaatccttccccagaatgttcaataccaacacatattctaacaaaaataactagatttcaataaaaaagaaaaaaaatctaggcaaaaagaacaagtgattttgtaaagcaaataaaattagactatcgaaggctttttgatagcaactcataatgtcctaagaaaacatagtaacatatttaagatacacaaaggaaaaaagtataaaccaacaactttatatccagcaacactaactttcaaaaggtacaaattgttatcaacatagaagaacttcagaattttgtccctacaagcccttcctgaggaatttagtaaaaagtgaccttcagacaaacaaaattactagaaagacatcaacacaagggctgctagtgggcttaaagatattgttacttacagaactaagattaagtgagggatagaagggaaagagtatagtatgaaatgacgatgtagagaatgctggtgattatcttgcttgccaggtggacagagcctacctgaagaatggaactctgaaggtacattggttgattactcaatagctattcccttctcccttcctctattgttgtagaaccatctcccatgagaca

SEQ ID NO: 9648 - DNA, 1026 bp, Homo sapiens
cagtttactttcttgagtgggacaaaaagtgatagagtcacacccaaatgctgggcctcatgcatcttacacatgtgcacatcatccattttggagatctcagagtattaaaaagctggaatcactaggctatcaaagctctgatctgacaaaaagtaaaatgacagtaaatctaaactcttccagtctttgtctaaactcaaagatatggctagagtcccatacaatctttgacagcagttgtttcaacatcaaatattagacaaataaacaacttcatctgtaagaaagagcagagatatcatctccaaacacatgaaaagataaagacaaactggggattaagagcaaatgtcctttgacagacattttgtgatatctacttgataatttccatgcattttaaaactttttatctgaaaatgagttccaatcttcaaagttgtaggaaaaagtagtaaaaaaaaattgtgtaccttctatcttccataggtatagatatatatctatactgtttatctttgccttttgttgacattttacccatttgctttatcatttgcattcacatgctctgtgcatgggcatgtgtatgcacatatacacacacacaatttttttttctgaactatttaagggcaagttacataaatactcaagtatgcatttcctaagagtagggatattcttttatataaccacagtgcaattccaaatttcatatattatattgatacaatattttaatctactgtccatatttcagttttgtcagttgacctaataatgtcctagattgcattttttgcctcaattatagcatctggtccagggtcaagcactgcatttgtcatgtctcttagtttcttttaatctggaacatttccatagcctttctttcttttgtaacagacatctttgaagtatacagtccccttttgccattttttttgttcatagaaagttcctcatgttgtgtttttatggtttttaaaaatgatactcattctcagctggactactaca

SEQ ID NO: 9649 - DNA, 1049 bp, Homo sapiens
tagggaaaataatcttatagggggatttactaggtcaagggcaatgtacaatttaaaagttttttttatatgtgttgctaaattgccttccagacttattgaacagatttaaattctcatcagcagtgtctgagattgtcatgggaaaacttttcaatgaagtaaccccaattgatctatagcactttcggttgctgagaatgtctaataaaagcaaaagaacaaatgaaacaaactatttcccaatgcagtgcttcataacctggatgcacccatttcctattccttatgttattccttacttcttccaatgtctactttctttttaatttttatgagtatgtagtacgtgaatatatttatggggtacatgagatattttattacagacatacaatgcatagtaatcacatcagggtagatggagtatccatcacaccaagcatttatccttttttctttgtattacaaacattccaatcatactcctttagttattttaaaatgtacaataaatttttgttgactgtaatcaccctgttgtgctatcaaatactagatcttatcattctaactatgaatatatttttgtacccattatcctcatttgtctgcccacctcccacactgaccaccactatctttcccatttttctactctttatctccatgagttcaattgttttaatttttagctcccgcaaatgagcgagaccatatgttacggggtctttggggtgttgtttttctgtccagaaacctttgtggccggtagcttctttgcccaagttttgctcgggcccgctgggctcatttcacccactcagcctggcaggctgtgcttggctcactctactggcctgggtcccatgcctgccaagagcaagtcaggcatggaatggcaaggagagtgtgagcaaacacagggtctggctactgcacacagttgggcatgctggctgctgcagcaaggcgagcagctccagttgccagcacaggtgccagctctctgcgagtctgcagccagaccaggtgcatggcaagcagct

SEQ ID NO: 9650 - DNA, 1121 bp, Homo sapiens
tactcttgaccacagtaccctctttgtttccttcagggtgtttcagatatttaattatcttgccagatgccagtcaacactttctttttgtcccatgagtttaaaatcaggggaaaacatgtactcccaataggaagttgagatactcttttttttttaaatccgtcattgtgactgtgaccggaaaaacaaatcccactaaagaatgtcctaaacagatgtttttttttgtcatataacctggagttaggtgatttggcattggttctggagctgaaggatgttagggatgaggtctctgtagttttcttgtctcatggtcacgaaatgaagtgttattgattaagcagggatgccctacttagtattagacttcttggaagtctccttaattgccacagcccctatctttttggcttcgtttcaagggtccttctacattgttaatactctggtataaatacgttccattattccctataacatgactgaaaccaatctaaagtattaacattttaaatatgtttttgggccaagtgcagtggctcttatctgtgatcccagctactaggaaggctgaggtgggaggattgcttgagcccaggaatttcaggctgtagtgagctatgattgtgccactgtactccggcctggataactgagatcctgtctcaataaataaataaaacaattatatatatgtataatatataatattatatatacatatgtatgtatgatgcttttcatccccaccctttcccacatctcaggaacctgtcagcaacttatccagtttaaagctgctgttcctctacctcagtggtttgggagaacatggtcattatttcactcattctttacttcctgtctcttctaggattggaatgggggagggcatattaaacgaagaaagtctcagcttacgtgattaaggtaccattggtgtgttctgtgcagacaggcatttaactgttgactcctttgtgagctcttggggttctctggagctctccatgaggactggggcactaactgactttggttgcctctttttgatgcacagcccacactgcccttcagctcttcagcccctgaccctgacaatgtacccacagcct

SEQ ID NO: 9651 - DNA, 1049 bp, Homo sapiens
cctggaagtttttattgttgtcaaatctggcctctctgggaacccagaaaagggaaatccggcttcagaatgtgagaagctgggagcccctttcttggcacagccaggctgccgttcccttgggttcagaggctttagtagggtagtagttatggaaggacttagaaaggagccatcagtcttggtccaaacacttgatagcagtgcctgataattgccatatccccagtaaagtgggtagaagagattttatcttaggctctatcttctgagtgtatttggcccactgaacccatccactgtctgagataataagtaagagtaagggtaaagggatcactggtgtagcagacatggcttcagtgacagaacgaactattctggtgctaatttagctgtagctgccttagtctgatactcatctactcccaacagagctctttatctctttttctctactatggtttgttcttcacactatagccagaaagctcttatattttaaatgaaatatagtagacactcaaaacatttatgaaataaagctacaactctgcttctgctaaaaaatatacccctcttctgtcttagcatgaatatccaccctagctaggtatctaggagtcatacctaacttctagagaaaccactttccttaaaaccacatctttattttaaatagatggattgtggctgggctcctgtagcttttcctcttagaccccagaaatatatctccctttgggacttccaacagttccctacatgctttttgagcatctgctagttcccagcatcaatttaggcagaagggatacaatatccactgttcatctaatagagactagagataagaaacaacctgtaccatcaatgagctcacaataacaggccactgccactaccacagtggcctcaagggacactgcttcccctttaatgttttggtccaaataaaagtacatgaatcctaaaacatttgctaaaggctcagggataacacaaggaaagtaacagcatcaagaattttactgccgggtgcggtggct

SEQ ID NO: 9652 - DNA, 1030 bp, Homo sapiens
aagtaattttttactgagttggtaaatactttcttaaagaaaataattattctagtgtaaataaaggtaacatttttctttgctgttatggtcattaaaagcacattcttatgtaataagttaaaatactttgaaatatacccaactattgcccagtctataaaatgaccaacataaaaaatagtcatggtttgaaaaaaaattgattgttttaaaattaatagtaagtttacagtatttttcttgagacatattataaccaaatgatataaaaacaatctggatagaggttaagatgagcaactgaaaattaatcttcctacattggtggacatataagtgaatttttgatgttttattttagaaaacatccatatataatgcagtgtgtgcatttcattctcataacctttttccaatatgtattaataccatgtaaatctcttacttgccccaaccgcaaagactctttttgccataattgactgaatcaagccagatattggagtggactttgaactaagctgagccagtttaatctcttgccccacttaccaaaaaacaaaaacaaaacaaaacaaaaaaacttgtaataggaagacaagcggatggggaattgttaatgctggcagttatgttttgtttttttttttcttttgatacagcatcttgctctgttgcccaggctgaatgcagagatggagtgacacgattatagctcactgcagactcaaacttctgggctaaagcaatcctccttcctcagtctctcaaggagctaggactacagacatgagccagcatgcccagctaatttaattgtgtgtgtgtgtgtgtgtgtgtgtgtgtgtgtgtgtgtgtgtgtgtgtgtagacaggaccttgctgtgttgcacaggcttgtctcaaattcttgtctcaagtgatcttctcacctcaccctcccaaagcactgggactacaggtctaagccactgtcctcagcaagtaacagtgttcttaagatcaggaaatgctggtgctaaaattct

SEQ ID NO: 9653 - DNA, 1026 bp, Homo sapiens
tttctttatcccgtctattgttaatgggcatttaggttgattccatgtctttgctattgtgaatagtgctgaaatgaacatacacatgcttattgtctttatggtagaacagtttatattcctttgggcatatacccagtaatgggatttctgggtatggtaattctgttttaagttctttgagaaatcaccacaccgctttccacaatgactgaactaatttacattcccaccatcagcgtatttaagtattcctttttctctgctactttgtcagcatcttattattttttgaatttttaataatagccatctgactggtatgatatggtatctcactgtggttttgatttgcctttatctgatgattagtgatgttgagcattttttatatgcttgttgactgcatgtatgtcttcttttgaaaagtgtttatgtcctttgcctactttttaatggggttgttttttgcctgttaatttgtttaaattcttcatcgattctagactttggaccttcgtcagatgcatagtttgcaaatattttctcccattctgtatgttgtctgtttactctgttgatagtttcttttgctgtgcagaagctctttagtttaattaggtcccatttgtcaatttttgtttttgttgcaattgcttttggtgtcttcatcatgaaatctttgccaagtcctatgtccagaatggtatcccctaggttatcttccagggtttttacagttttaggttttcatgtaagtctttaaaccatgtcgaattgatttttgtatattgtataaggaaggggtctagtttcaatcttctgcatatggctagccagttatcctagcaccattcattgaataggagtcctttccccattgcttgtttttgtcaactttgttgaagatcagatggtggtaggtgtgaggcatttttttctgggctctatattctgttccattggtgtatgtgtctgttttcatatcagtaccctgctgttttggttactgtagctttgtagttt

SEQ ID NO: 9654 - DNA, 1026 bp, Homo sapiens
ttgccttattaattcatagctctggtaaaattcccctgtgaggcaaccaatgccccatcccatgtctgtgcacggttattctacctctgcaatttgggactcaaatctctggtcatctctgtaatttcaattcctagaaagagctcctaaactgatcattgtgttcctagtaattagaagagtaactgtgacacagaaagggttaacaaataagaattataaatgatgcttttgtgtaaactttatttattcaagtgcaatacacatgttgttatcccaatttttgtttttaagctaaatgcttaacaatctgatacactagaaaattataagattcatgattttaatggacatatttagaataacttaactagttaaatttatagtcaccatttaaatgcttaggaaaatctattatactacatttataaagcttatttttaagatattgaaatgcttaacatcatttcacctaaatgtataagattttatttgttagcattataagagttacatgattgagaacaattttgtttaacacctgcattagatgtttggagtgtttaatataatcacattttaaatttgtgattttagcttgaaatattcacagaaatgtagttaatcaattgcttaaacaatgcttaaaaatttaggagaattttactcactagatttatatcttttttctcatttaaaaatatttaagagaatttgattaaacgtaaaattggtgtttaaaagtttaggaaaatttaatctgtcaaattaataagctaatgagaatttagcaaagaacaagtgaaaaaagtgtttttatttcaaaacagaattattagatctataatcattataacagttaacattatgtagaatttggtatgtactattataagaatattagatatattattaatccttaccacaatcctctgaggcaggtacttttattcctgttctacagatgagaaaatcaaggtacagacaagttagtgactgcttcgtcaagtgtgttagtttcttagg

SEQ ID NO: 9655 - DNA, 1045 bp, Homo sapiens
tccatattgtcaactttattgttagtataaagttgttcataatatagtctaattatccatttaatatacgtaagatctgtagggtgcaccctcttctattcttgatcctggtaatttgtttcttttcctgatcaagctgcccagaggtttatcatccttgttgatcttttcagagaactgtaatttggtttctttttgtttgtttgtttcttatttcattgacttgtgtttctttctttctggtacttttggtttaatttgcctttctctagtttctcaaggtggaagcttagacccatgatctatatttttggccattattttattaatgatctgtgtctttttgtctctcttttatttccttctggctctccagttgcatatatgtttgatattgccccacaggtcatgtgagttctgttcacttttttttttcttaccatgcttagttttgaatagtttttcttgctatgtcttcaggtttattgatgtcttcttctactgtatctaacccactgttaatcttattcagtgttttttaatttcagacattatcatctctagaagtttcatttgggtcttttttatgtctcatttattcatattttactctcttaaacgtatgattcatatctgtaatagctttcttgactgttttaattgctaatttcatcatccatgccatttctgggaatgtttctgttgactaatttttctcctggtaatgggtcctaatttcccttttttttttttttttttttttgcatacctggtaggttttgattggatgatggatattacaaattttgcattgttaggtgctggattttgttttagtactttaaatagtgttggatttattaggttagcatttaggttagtagaaaatagttgaatcctttaaagctttaacattttttagtttgggtccagaacagcctttattctagggctaattatttagttatatgcttataccataatttgtccattcaccagttgaggaacatttgggttgttcctagctttgcactcttatgactca

SEQ ID NO: 9656 - DNA, 1050 bp, Homo sapiens
cagttcactttttaatatattagcaaattaatatttcacgtttggaatgacttctcattttcagacttcaaaatattggtagcagagagcaaaatggaggcagagaaatcatatcattgccaaaatcagtttttagatctagggaaagagtttaacacttctgactgttgaaacatggccatcagatacttattatacaactagaatattctgtgttctctagggaaattaaatttatacaacatggctctttcctcaagaatttatagactagaatgtatgtcaggaaaaataacctatgaaaaatttaccacccgcaagtaagagacttggcaaaagcattgcaggaaatcatgtttatctgggctgtaactgctttttggatttacttctggattttctatggaactaaatatcccagtcacactttgcatcctttttggaaatcttaaatattcacagaatcctttaataaaactgcggtgttcttcaatgagatagtaatgggaagttagacagtacaatagctttttaaaaatttgtggtctctttaacaggtttagggagttgtctctgatggttcttagattgttgcttattttttagccagttttgagcttgctcaactgcaagaaaaactgaaggagacagaagcagccatggaaaaattaatcaacagagtgggacctaatggtgagaggtaggttttcatgtaacgggactcagactatttctcatttagaaaataaattcaggctgggtgcagtggccgaggcctctaatcccagcactttgggaggccgaggtgggtggatcatctgaggtcaggagtttgagaccatcctgaccaacatgatgaaaccctgtctctactaaaaatacaaaattagccaggtgtggtggtgcacacctgcaatcccagctactcgggaggctgaggcaggagaatcgcttgaacctgggaggcggaggttgcagtgagccaagattgtgcccttgcactccagcctgggcaatgagagcgaaattctatctcaaaaaaagaaaagg

SEQ ID NO: 9657 - DNA, 1023 bp, Homo sapiens
attgtgaggactcaaacatgatcaggctctttctgacatcactgttgagagcagggggaaagaggtcaaggatggaagtggaaggggtctggattcaaacccccgcttggccacctactggctgtgtaaccttggactattacttaagttctcaggatctgtttttcaaatgtaacccagggattgataagagtgtcaacttcataggattgtggctaggttcaaaatagtgcattcacctacaagagtcatacacttgccgcaagtgcctggcttgtggcaagcactacatgagtgttagtcactactgtttttaaaaaaggagagacaggtcagacctcctggtccaaagctcattgaggctggcgttgggaggaggggatacagagggcggccctgaggccgggagagtggcttttgcagtaacccaggagagagatgaaggtgactggactgaggggtcggggtaagaggcaggggtggggagaactgggaggatttgagagaaatgtgtgaggtgaatatggttaacagtcagatgggggaggttgagggagaggtggagaaatgagatcaggccctccttgcgaggaacacgggttccagcagctgccttctcatcatcactctcccttctgccctcagggtgttcttctcaggcaggtccttccttcccctgcccggaggaccctctacaggttcaagtccacactcctctgttcgggagtcaaggcctctctcactctgaccctggccagcttcatctcttgctgttctctctctctctctctctttttttgagacaaggtctcactctgtcgctcaggctgaagtgcagtggcgcgatcttggctcactgctacctctgcctcccgggttcaagtgattctcccacctcagcctctcgagtagctgggattacaggcaccctccaccacgcctggctaccttttgtatttttagtagagatggggtgtttaacatgttggccaggctggtcttgaaatcctgatctcaaatgat

SEQ ID NO: 9658 - DNA, 1079 bp, Homo sapiens
cccccatctctattttctaaaattaaaaaaaaaagagattaaagctggcaattaattaagcttctggatccagtcttgcctgaagtcatatcacatggactgttcacttatgtaaatcttttttaactttttttttttttggtctaagctagtttgaaatcttgactaagacaaggctgaattgatctacagttgatgttcacactgatggcaattctcatctcccttgtcttattggaaaataagtcaaatcattttaaaattcatttcaactctcaactcctttaagaagtctctttttcaacaacatgattgtgatgtgatacccctactccacagcttaattcctactgtggcaattaccatttctgcaaccaaatatgatcattttgatgggaggactcctgtctaattcaactctatattctctgtacccagcacatgaccagacaccaggcagaggatagaaaatacgattccattaacataaagatgaaaaacagtcaaaactcatcaacactgtttaggaacacatacacaagtggtaaaacagtaagaacaaagcacaaaaatgagtaccctaaagatagggcgagggatgattagattctcatagaagtttgcaacctagatccctcacatgcacagtccacaatagggttcgagatcccgtgagactctaatgccgcgctgatctgacaggaggcagagctcactggcagtaatgctcactggcccaccgctcacctcctgccgtgcggcctggttcctaacagaccacagactggtactggaccatggcctaggggttggggacctctgccctaagagtcagagtggtggatacctcttcctagggaacaggaagagaatacagctggaaaggggtatacataaggtttctgagatcctggaaatgtactgagttttgttgttgttgttgttgagacagtgcctcgctctgtcacccaggctggaggtgcggtggcatgatctcggctcactgcaagctccacctcctgggttcacgccattctcctgcctcagcctcccgagtagctgggactacaggcacccgc

SEQ ID NO: 9659 - DNA, 1040 bp, Homo sapiens
cccacagagatccatccacccctgaaatctgcaataaatagcaatgatagagctttctcttgtttactccatcatggccacggcaaaggagaagccagaacaaacggtgggacagccacgaaagggcctgccttgttttgcaccccacgtgcctcatctgtcatcctgcacagataaaaaggccctttgccacctagtacccaggcatgaggatatttgggatgggaacctgtctctgccggcagggactccatgtggttaagactgggacatacatagctgtctctgatcttatttcaagatgttttttcctttagccattggtcaaaagttaatccttgaccccattctagatgggggcacctccatctgtgtgatgttgctgattgggtggtggtatttgtcacgggcatccatacgggtgatctccaaactgtcttgcttattgtgcatgtgattgctaaagtcttcggggcacatgcaccctgcattagagaacactgatccagtcaggaaccattacataattttctgagactggtgcaaaatgaaaatgtggccccaggcccagatttgggaagtcagcctccccttttcagaggcccgtcaccacaacccacagctggtatgtgacccccagggattacgacctccatgtcagagcttgctcagtacctgattctgggatgagggagaggcccccatggagctgactgtggaacacaccttagtttctcagaccagggtggatggctgccaccttgccccaccctagaagctgtgggcacacacctggtcttccctgcttctttgcacggaacactgccagggtggaaggtgaccgtggaatgggagcctttccttgccactctgacggaccctgcctggtgtggagggcggtggcaggcacagccctaggacaaggaggctgaggaggctggggcactaggtgggaggaattaagccactgagaagtcctcccttccagggaggtagtgggaagtaggactgtgctccaagcccgggcacagcctccatgt

SEQ ID NO: 9660 - DNA, 1081 bp, Homo sapiens
atggtgaaaccctgcttctactaaaaatacaaaaattagctgggtgtggtggtgtgtacctgcaatcccaactactcgggaggctgaggtaggagaatcacttgaacccgggaggcggaggttgcagtgagcctagattgtgtcattgcagtccagcttgggcgataagagcaaaactccacctcaaaaaatatatatatatttgcataaagaaaggtaagtagatttgaattgatgttaccagggagtgaaggagcaaatactgtgatttgtttcggggtagccagcgttaggctgattttggagctcaattaaaatatggatgactgtattagttttaacatgtattaaaaccaagttgaaaaataagaaaacaggcactcttgtatgctactggtaagattatacatcagtacaactgcagtggaaggcaacatgatgatatctttcaaaattacaaatccatataccatttatccgaagaatttctcttctaaaatatatatcctgtagaaaaacttacgaacgtgcaaaatgtcatgtgcaaaatgtgcttgcaaaagattggaaacaaacctgagtgttcattgtgaagagactggttaaataaattatggtacttctaaacaagagaatattgcatagccagaaaaaagaatgaggattttttctttctatgaattgacatggaatgatcttcaagataatcattagttgaaaaaagtcaaggtgtaaaagagtgtttatagttggctactatttgtataaaaagcaggaagaaagcatgtcagtagatgaatgtatttgtctgttctcatactgctaataaagacatactgggtaatttataaagaaaaagaggtttaatggactcacagttccacatggctggggaagcctcacaatcatggtggaaggcaaaggaggagcaaagatacgccttaggtggcagcaggcaagagaatgtgtgcaggggaactgccctttataaaaccatcagatttcgtgagacttattcattgtcatgagaacagcacaggaaaaacctgcccctgtgattcaattacctcccactgggtcc

SEQ ID NO: 9661 - DNA, 1047 bp, Homo sapiens
gtgaattaaagaggttgctggatgcaagatctatatataaaaattgtattgttatatattcgcagtgaacaattgggaaataaaattttaaaatactaattgccacaaaacataaaacacttagtgaaaaatctaacaaaatatatgcaaaatatttataccaaaaccatgaaatgctgttgagcaaaattgaaaaagactgaaatagttggagagatataccatgtttatggtttagaatatttggtactattaagatgtcagttctccccaaattaacttacatgtttaaaccaatcccagttgaaatctagaacacttgcttttttgttataaattgacaagatgattctaaaatttatttggagatacataaaacctggaacagacaaaataacctaaaaagaacaaagttgcaagacttatatgacttgatgtcaacatttactacatagatacagtaattaatacaatgtggtattgatgtaaggataaacaaatagattagtagaacaaaattgggagtctagaaatagacccatgtttatacagtcagttgatttttttttttttttttttttttttttgagacggagtctcgctctgtcacccagcctggagtgcggtggcgcgatctcggctcactgcaagctccgcctcccaggttcccgccattctcctgcctcagcctgcggagtagctgggactacaggcacccgccaccatgcccggctaatttttttgtatttttagtagagatggggtttcaccatgttagccaggatggtctcgatctcctgacctcgtgatccgcccacctcggcctcccaaagtgctgggattacaggcgtgagccaccgcgcccggcccagtcagttgatttttgacagagatttcaaagcaattcgaaggggtaaatgatagtctttttaataaataatgctagaacaatagtagatatatatgagggaagatgaaatttgaccccctagctaaaactgtacacaaaaattagtttgagaagggtagaactaaatctaaaagcga

SEQ ID NO: 9662 - DNA, 1053 bp, Homo sapiens
accacacctggctaatttttgtatttttagtagagacaggtttttgccgtgttggccgggctgatctaaaactcctgacttcaagtgatctgcctgccttggcctcccagtgttgagattacagacgtgagccaccatgcccagccctctttgcatttttttatccagtttcatcgccatcaaacagtttttcatggagtactgattagatatattttgtaaagaaagcagcagtttcctatttttctaaatgtgagttttaacagctttattgaagtttaatttaaataccataaaagatatttgtgcatcctttacaatgtaggatatatttttgttttacaataaaaatacaatgatttttcatacatccacagagttgtgcaaccatcaccacaatccagtttcaaaacaaatctactccaaaaagttccctcagctcgtttatactcaatcttattcctatcccagtcccaggtagccactaatctctctagatttgccttcttgtctctctaaatgtgcctctttttttttcttttctgcacatttcatataaatggaatcataaaacatgtagtcttttacatttggcttgctttcacttagaataatgcttttgaggtacgttcatgttgtagcatgtatctgtagtctgctcttctatattgttgaatagttgtccattgcgtggatataccacattttgtttatctacttacccctgatgcacatgtggatttttaccagtttatggctattatgaataatgctgctatgaatattcatgtacaggtctttgtgagggtatgtggtttcatttagaagtatttttagaattagttactaagagtgaaattgttggatcatatgttaagtttatgtttaattttttatgaaattgccaaactcttttacaaaatgatcgttaccttcccaccagcaatttgtgagggttccagtttctccatatcttcgacaactcttgatattacctatcttttaaattatacagttctagtccttaggactagtatcttaggaagtggtgtc

SEQ ID NO: 9663 - DNA, 1046 bp, Homo sapiens
ggtctgacaccctctgcctcataaatacacacaagcatgtagactttctattgaagctatcttaagtattaatagaaattgccacctgattggttgtgccatggtactgatcatccagtctgactatgctatggtttcttgtgagtctaagtgttctccaggtctacacagttgtttctaataattataacacagttataacttatataactttgaccaacttatatatttaaaattgaccaatttatatttcaagtactgctaatccaacctttccttccaaatagttcacttatcattttatgtaccagtgaactgtacagtcctgtcaatggaaaaaatatggtccagttcaaaagcttatttatgtgttagattttgcagttacttttgaaattctaaaactgcctgagattcagtgaatctgaattgcgctataggaagaaaggatgttaaccttcgcttcctgttttcatacttactgattgaacacagaattgcactaacagtgcttataagaacaaaatcagacttcaagatcttaaaaacaacaaaaatctagcagcataggttataaaggagacataaagggtaccctgtgtttgaatagaaatatgtatgaaaaagacttgctttttagttgactgtgaatcttttttgactcaatagatgacttggctgttggaatacctaaagtgatcttaatatggccccacatgaacagcaaatatggaagaggcatttcagctatgacttcttaccactcacacccaattagtcactaagtcccactgtttctttcttgttggtatttttaaatcttttcatttccctccttcttgtctcgattctatgcctcacatctaccctctagaaacaaaagtcagcatactacagtttgagagccacattgggcctgctacctgtttttttttttttttaatggcccataagctaagtttctgcatttccaaatggttgcaaaaatgtaaaagagtaatatttcatgtcatgtaaaaattctataaacctgaaattttcaagtc

SEQ ID NO: 9664 - DNA, 1022 bp, Homo sapiens
gggccaccattctccagaccctagaatagtagatccaccgacagcttgcaccatgcacctggaaaggccacagacacttaatgtcagcctgtgaaagcagccaggagggaggctgtaccttgcaaagctacagggacagagctgcccaagactatgggaacctacctcttgcatcagcgtgacctggatgtgagacatggagtcaaaggaggtcattttggagctttaagatttgactgccccactggattttggacttgcattgggcctgtagcctttttgttttggccaatttctcccatttgtaatggctatatttacccaatgcctatacccccattgtatctaggaagtaactaacttgcttttgattttacgggctcataggcagaagggacttaccttgtctcagatgtggacttttgagttaatgctgaaatgagttgagactttgggggactgttgggaaggcatgattggttttgaaatgtgaacatatgtgatttgggaagggccagagttggaatgatatggtttggctctatgtccccacccaaatttcaccttgtagctcccataattcccatgtgtcatgggagggaaccactgggagatgattgaatcagaagggtgggtcttttccatgttgttctaatgatagtgaatgggtctcacgagatctgatggttttaaaaacaggagtttctgtgtacaagccctctctttgcctgcttccatccatgtaagatgtgacatgctcctccttgccttctgacatgattgtgaagcttccccagtcatgtggaactgtaaatccaataaacctctttcttttgtaaattgcccagtctcagatatgtctttatcagcagcgtgaaaacggactaatacacatggtgaatgtgaaagtgatcacacatacagagagagagagagtggcattttgagagtggcatttctatggaaggctttgactagctgacccaaccagggcattacctagtggcattagttcagctgct

SEQ ID NO: 9665 - DNA, 1046 bp, Homo sapiens
ggacttctctacacctcagagagaaagcactatttttcccaaacagaaagcctatcatttgcagatctactccactgctctgagtcattgatggttatgggttttatatttaacctgaaatgcaaaacattttcttctaggcctgaagttaaatcattttggaaagtgatacaggtacattctgaattttctttgtcttgctacatattcttgaaaaaccaggttaagtgtttataagagatgtgtatgtgtgtgtgtgtgtgtgtgtgtgtgtgtgtgtgtgtattttgagtggcatcagttgcattcttttcttcctctgcctgtctggagggcacttttaatgtacctgtcctcatactctccattatgagttttaatcacaatagaaatttttttcccaccactttgatgaaaggtcatatttattgggcagacttatctattctatttaataatcttataatatactatatacattacctggggtaaatgtaagtacagcatttaggattttaaaatctatttacaaatgagactgacctgtaaatcccccttttggggaatactactatggtcagattttggttattttaagtgaataaaatgaaccggatggctttgcatgctctgaaaccatttatataagaatcatctgttcaataaaagtaggagaggactctgctatgaaacttcctgagtgaaatgataagtggcatgaagaaaaacaaagcaaggtaaggggggagagggcatgggcttgttgttttagatgaggtggttaggaaagcctttcaaatgagcagaagccacagtgaagcatgggagcagaccgtgtgaatgtttgagggaagagcatcccaggcagaggaagcagaagggcaaagccttgagaagggagtatacttggcatattagaggagcagcaagaggctactgtatctgagagaaaggagatatgaaagctgagaggtagtgaagagtacgtttatttgggaccgtataggcaaaattcaacaaaatttctttgtcatttctgtttctta

SEQ ID NO: 9666 - DNA, 1045 bp, Homo sapiens
tttttaataagacaaatttatgtctacatgacttttgttatctggttaaaaagtgtgctttgaaacaacgttctttgaatttgaaggcctgtgtaaaagtatataattttatcactaatacatgaaaagagaatcacttacaatttttgcagaagaggtctggaaactcatatttttagactttatattcttctgcatggactttttggaaattataaacttataacctctacttcccaaattattctggtatttgttaaatggctatgtggttggatacagtattgttcaacaaaagtagctttcagtttaattttaatcagaatcatcaatgtatttttattttaggaaataaaggaaaacaatattattttttcaaatgttacagaagacatttttaatcttcatttttaaagggacatgatgatttccttttagaagagaaaaatcccttggctccaaaagagaaatcctctctcttctcagttgcctttaaaatcttgaacctgtcagtgaaattgtataatctactaataacatgcctaaggcttattgccttttcttgggcaacagaatcaccaattgatgtgctctatcgattttaatcacactgtttttatagttccattgcaaggtttcaaaaactcaccaaataaatctgtggatacagatgcctcctttctctgaaaacctaatcatatatatactattccttctcaatcagttgttaaggtataatatagtcaaataatttttatttgatagactttggtcttggctaaattaaaatgttctctttgctattcagcatttacatatttaaattatacaattcttataaatgtggtatctgagtgccttgtagcattcagaatttagcatgacaagttgctcgtaggctattccatcaagacattcccactacagctcagctgcaaacatctagagcaagctcccgtagggttgtattttaagctagctgtgagctaattatatggcaatttgtatcttagaatccatgtagaacaatatttggagcattagg

SEQ ID NO: 9667 - DNA, 1137 bp, Homo sapiens
ccctcattaactatatgatttgcaaatattttctccaagtctgtgggttatttttcactttctggatagtgtcctttaaagcacaaatgtttcttattttaaagtccatgtatctatttttcctttggttgctcatgctttaggtgtcatatctaagaaactgttgcctaatctaacatcgcaaagatttacctctatgttttcttctagaagttttatagttttagcccttacaattaggtctttgatctattttgagttaagttttgtatatggtgtgagatatgggtctacatttattcttttgtgtgtagatatccagttatcccagcaccatttgctgaaaagactgttctttgctcactgaattgtcttggtacctacccttgtcaaaattcaattagtcacttgttttttacatgtatatagtctcatttctggactctcaattctgtcctatgatctatatgtctgttgtaggccagtaccacagtgtttggattactatagttttgaagtaagctttaaaatcattaagtatgagtgctgtaactttgttctttttcaagattgtttttgctatcgtaaatcctttcattttcatatgaactttacaattatcttgtcaatttctacaaataggtagatggaatttcaatagggattacactgaattggtagatcagtttggggagtattgattcttccaatacatgaagacaaaatgtatttccatttgtttctttaattcctttcaatgaagttttatagtttcatgtgtacaagtcttgcacttattctgttaatttattctttttatactattggattgaattgtttacttcatttcattttcagattgttcattgtgaatgtgtagaactacaactgattttttatatattgatcttctataaccttgctaaactcacttattagctggtgtgtgtgtgtgtgtgtgttggggggtgtttctgtgtatgtatgtattccttaggattttttccatacaggatcatgtcactttgcaaatagagataattttttcttctgccatcataatctggatgcagtttattttactttcttgtttaattgtgctgtagtgtaggacctccagtacaatcttaaatagaa

SEQ ID NO: 9668 - DNA, 1034 bp, Homo sapiens
aagcaggccccagtgtctattgttcccttctttgtgtccatgtgtactcagtgtttagctcccacttataagtgagaacatgccgtgtttggttttctgttcctgcattagtctgcttaggataatggcctccaatccatctatgttgctacaaaagacatgatcttattcttttttatggctgtgtagtattccatggtgtatgtgtaccacattttctttatccagtctaccgtggatggacatttaggttgattccatgtctttgctattgtaaacagtgttggtgcaatgaacatatgcatacatgtgtctttatagtagaatgatttatattcctttgggtgtatacctaataatgggattgctgggtcaaatggtagttctttgagaagtcgtcaaactgctttctgcagtggttgaactaatttacatttccaccagcagtgtataagcattcccttttctctgcaacctcaccactatctgttatttttttacttttcaaaaatagccattctgactggtatgaaatggtatctcattgtggttttgatttgcatttctctaatgattagtgatgttgagtattttttcatatgcttattggctgcatgtatgtcatattttgaaaagtgttcatgtcctttgcccactttttaatggggttgtttattttttgcttgttaatttaagttccttatagattctggatatttgacccttgtcagttgcatagtttgcaagtattttctcccattctgtggattgtctgttctgttgattagtttctttttttcctctgtgcagaagctctttagtctaattaggtcccatttgtcaatttttgtttttgttgcagttgcttttggcatctttatcatgaaatctttgccagttcctatgtatagaatggtattgcctaggtgatcttccaaagcttttatgttttgggttttacatttaagtctttaatccatcttgagttgatttttgtatatggtataaggaagggatccagttttaatcttctg

SEQ ID NO: 9669 - DNA, 1050 bp, Homo sapiens
catgcacacacgtttatagcagcataattcttaattgcaaaaatatggaaccaacctaaatgcccatcagtcaaggagtggataaagaaaatgtatgtacacagcatggaatactattcagccataaagtggaatgaaataatggcccttgtagcaacttggatggatctagaggccattattctaactgaagtaactcaggaaaggaaaaccaactatcatatgttctcacttataagtgggagctaaactatgaggatgcaaaggcataagaatgatataaaggactttggggactcaaggggaaggatggatgggggtgagggataaaagactacatattaggtacagtgtactctgctagggtggtgggtgcatcacaatctcagaaatcaccactaaggaacttattcatgtaaccagaaaccacctgtacccccaaaactattgaaataaaaaatgtactattttgtaacaaatatgatggggtcattaaaacatattcatcattagattcaggatctgctggaaaacgtttaataagttatttaaaccctacccgtattttatttgggtgtattttcatggcccaagtattatgtttgaagtgctgatttcattgggaattttgaaaagaaccatttctacacatacaaagttatagaatgggagtcgactatagtcacatggaaggttttcattaaaatgtctcttcctgtagatttaccccaaaaagataggatttaatcgttgaactcttatcctttatatgagaagtgtacttaatatagatcagactatgccatttaatgtctgaacatattgtaatgagtggctttttttttttttttttttttttgagacagagttttgctcttgttgcccaggctggagtgcaatggcacgaccttggctcaccaaaacctccgcctcctgggctcaagtgattctcctgtcccagcctcctgagtagctgggattacaggtgtgtgccaccacacacagctaattttgtatttctagtagagacggggttcctctatgttggtc

SEQ ID NO: 9670 - DNA, 1455 bp, Homo sapiens
cttccagttcagctgagtttaatctgctattatgaccatcctttgagtttctaatttttgcaattgcatttttcaggtctttaatgtccttttgttcattttttgtgttttctcatttattataattttcttgtctgtatttctttgatagttagagtctctatctgataactttaatgtttggagcctcagttggtgagtttatattcctggttttattcatgtttgcttgtctagtcatgtggctgttttaaaaaaattaaattgtttgccagacattatatttgaaacattgtttgcagagataatctgaggtccaggatggtgtcatcaacattcagagaaggattatgtttgttcctgctagcgcctgtgggtataaccagtccaggatcacgtcaactcaattttagagaatgagatgatttgatgcctattgctgtaggttggaagtccttcagagttctacctcaatgtaataaggctcctgaggtactcaaccttggtggactttagactgtatttcttatccgcatgatccctggaggctatcagtaacatcccactcagtctatctgttgtttcctcaggaattggcaagcatctccaaatagaatctataaattagttttagtttaattttttacagctcagatttttttcccccatagagtggttttattcacgatggctaagtttccaggctaacccacaaaggtttaatctgttattgtgttaaaatgaaatagaaaatttgtagaaaatgtgttaataataattatagtcatttatcaaaaaatagaagttaccataaatttggaagcaacctaagtgtctgtcaacacatgaatggataaagaaaatgtgacacatatatacaatggagtactattcagccatatagaagaatgagatcctgtcatttgcaacaacatagttagaacctgaaatcattatgttaagtgaaataagccaggcacagaaagacagacttagtatgttctcacttatttctgggagctaaaatactaagacaagtaaactcatggagatagagggtagaaggatggttaccagagctggaaagcgtagtggtgtggggtggggtggggaagtgggggtggttaattggtacaaaaaatagaatgaataagaactcgtatttgatagcactgcagggtgacagtagtcaataatcatgtaattgtacatttaaaaataactaaaagagtataattgaattgtttataacacaaaggataaatgtttgaggtgatggataccccatttatcctgatgtggttattacacattgcatgcctgcatcaaaatatctcatgtatcccataaatatatacacctactatatacccccaaaaattaaaaaaaaagttaccgtgattgaagtaatgttttaaagtcttgagtacttttgatttaaaaaagcagcctcaa

SEQ ID NO: 9671 - DNA, 1029 bp, Homo sapiens
aaatattatcttgtctttatctcagaatatttgggttcaagattactgatagatatcattgacctaagggaagaaactgaggcaaaattaatatatttgggccatggttgaaaactgaagctcaggagctatagattgaagttgccctgagtatatgcttggattagcagcagttaccagtgggaaaacaagaagttagggagcagttcctaaattgtttaccaatcatttacattggttcattaaaataacataagttgtttggctatacattgttttttgtatcacaagttccaggaatatgaggataatggtgaaggacaattgtacaacttacggtaactttttagatactttatcagctagtctggaaactataggaaaggaaagaaaaaacaaaatgcctttaaacaattacttgcaggcatgggtacagggaacctgagggaagtctcatgctcctgactctctgggcttgataccttttgcataactcgcattcctcagactgctctgagccacttttctttctcaatactaacaaagctcgtgagaaatccatgtataacactacccaatgcatattatacttacatggacctgactagtagattctctccctgtaggtaaacatcatgaaaaaacacattacaactagaaggttgtgtatggaatatgaaataagaatggggataatttatataattcaaatatttaattagataatctatagttgccttttgcatctatttctatgatagcaccatagggattaccttgtcagaggaaatgtagtagtggaagtgttttggtaaatgggctgtttcctctggaaaatactcatatagtcattgctattgtggttgcttctgtgattttactgtttcttctctatgcctcatgtctatggaaacttcttcttagatataataatttttctggttatcttgctctggtctaagagccaccatctgtttactatgtattgttttgtataaataaaccctcagaaaagcacagtattttgtt

SEQ ID NO: 9672 - DNA, 1097 bp, Homo sapiens
attattaggtttttattacttattttgcactgatactacacattcttattcgatttcaggacactgtgtgatgctctccacattctcatctttgtagatgcaaagcctctcttccatcctaaggagcaggcaggacttcatacaccttttccgccccctctcgcaccagctcatctgggccaggaagaccagcatgttcatttaaaaacatccagctctgtctgttttttgggggaatatactagttttctcttgctcacgtaactaattaccacaaacttagtggcttaaaacaatatgaatgtattatcttattgttttggaggtcagaagtctgaaatcagtttcactgggccaaaatgaaggtgtcagcatgcctgtgttcttcctcggggcttttgaagaaaatgcattgccttgcctttctcagcttctagaagccacctgcgatccatggcttatggtccctttttttcatctttaacgagtctttctcatactgtatcactctgagactcctattataacatctcctactattacctttgccctttttttccctccttatagggatccttgtgattacttagggcccaccagataatcacatcaacaacagctttttgccatgtaaggaaacatattcccagggtcagagggtgagctttttggatatcttagggggagggaggcattattatgtctaccagaggggcccataaatctctcaagaccaggcttttcctaggaaccttgaattctgaatcttgtcctatggctctttgccactagacctcagtatatcttttgacttagcagagaaaaatttgtcttacactagctttctctgtgaccccataagagcagaggttctactcacactctctaggccctacctgcctctggcccaggaagtaaaagagttagtttggagttaggagaagcatcagcaattatgttttcaggctgccatgttcctagaatctttgtctctacactgtaaatattattgatgaatagatggcctcttatactaaatagttttagactgtagcagagaaaacagtttaatggttaagaacaagacggaatcagac

SEQ ID NO: 9673 - DNA, 1124 bp, Homo sapiens
aggctggagtgcaatggctcaatctcagctccccacaagctctgcctcccagattcaagtgattctctcacctcagcctcccgagtaactgggattacaggcgctcaccaccacacccagctactttttgtgtttttagtagagatgggggttttgccatgttgcccaggctggtcttgaactcctgggctcaggcaatccactcacctcagtctcctagtgtgctaggattacaggtgggagccacagtgcccagccagtttcttaattatttttaaacgtgcaatatgctattactgactatagtcaccctgctgtgcaatagatctcaaaacattcctcttgtctaccctttgaccagcagctttccattccttccctcctattcccctcagcctctggtaatcatcattctacactctacttctatgagtttgactcttttagattctacatacaagtaagatggtgtggtatttgtcttttttttttcaaatgcccaagggaggtaaacaaggctgcccagctctcagcagtcatgatgatgattctcaagggccatcttggcctccaaccctggctgaagagaaaaaagatcccctacagccctatgagagagaggtcctctgtctttctgtgcttggctcatttcagttaacataatgtcccccaggcttatccacattgttgcaaatgacaggatttccttctaaaaaaggctgaatagtattccattgtgtatatatatcacattttttatccattcatctgttgatgggcaccaaggttgtttccacatcttggctattgtgagtagtgttgcagtgaacatggcagtgcagatctccttctgacatatggattttggttcctttgggtatgtacgcagcagtgagattgctgaatcatatagtagtgatgtttttagtttttttgaggaatctccataccgttttttataatagctgtactaatttacatccctactaacagtgtacaagtattccctttctctgcatcctcactaacacttatctttcatctttttgataacagccattctaacaggtatgaggtgatatcatctcatagtatttttaatttgcatttatctgataattagt

SEQ ID NO: 9674 - DNA, 1045 bp, Homo sapiens
gactctttcagtttttattacagcaattattttctgattttatagtaattaaaagcaaacaaaaatattttaaccggtagtgactatgttgcttttgaaaatagaatttaatattctgggaataaaattatggggtagaatagtaaaacaaatcaagtaggttcaactaatgtttgttcaacaaagatttaggaagctcctactttgcatgacgtactaaactgagcttagcttgtggaacagataatacttgataaatgctaaaaatagcggttcagacatttctcctagaggttatattttcttaattaaaaccagatgaaatgaagtctgttagtgaacactgtttttattacatgattgtcatgccaccaacctagaaactagcatgaggggcaggaaaaaatgctaaggtttgtgaacttggctatgccattttgttggctttgtgctttggttgtcataatatggctgctgaaggtgttggggatatgtgagaaggtatattagtgataatgctcatgatgacaggagaagatcctgtattcctgagcaaaaactagatttgatcaaatgctgtatttaccagtgctatttatgttttgttgctttagaggcagcaattttatgaaggaggttgtagtttcatggaggcaagtggacctctacattttctagggtttggccatgtgaattataccaatctatttagaaattgtggctgttttctattagagagtctgtgattcttcaaaatcttgtgatttcattgggctcaagacattttgaggaatgggaaatgagtgcagtatccagttggcattagctttttgaatttgaatacccgcacagccagttgtgctatattaacacttgttttgaaaacgtgaatttgctgcaatgccattgatatattaggaagcgatttgagcataagtgaatttcatgtttgtgttatccatgatttttgtcagcaagaaacaccaggtgaacacagaatacagcacatagttgaaccgagcccagcaggaacacacaaaacgga

SEQ ID NO: 9675 - DNA, 1053 bp, Homo sapiens
gacaaaataatacagaattcttaacctagcagtataaagtaacaccagattcacaaggggcaaactcttctcagcagagcaggctcagcagaattgcgtaaggccagagtgcctgctttcttccataaggctttgggattaaatttattcatctctgtttttaatccatcaatgcccaaagtcatctgtctcttctatttgctatttcatagagaaggaagccatttgatgggaatttcctaaattccctacaaccaaatctatatacttacttccacctgttagcatccatcttcttcagatagctttccagctggcctgcctgctactttacactcttgattctcttacatcctgcccctaaagtcatattttacaaataaaaatctgattatgccactccgctcctgaaaaagtgtttatttgcatgcttgtaggatagagcctcagatctttaacataccttatgaggccctatagatattgctccttgtctacctcaccatctttgactgacagcaatgtagctcttttttttccccacagttcagccatactggtcccttttaatttcctcaaatctgccaggtttcttcctggctcctctttttggaatgcattcctcactttccctggccaactgattgctgtccttcaggtcactgcttgtgttactctttctgggaaatcccaatatagtcatacctcttgtaattattaagttagtgacattattttccaggtgtttttattaccaggaaattcagttctcactcttgaggactcttccttcactttgtgtattatgtaagaactgggggttccaaagggttagtctcatgtaccatgtggagggtgaacttgaaatccgaaaagtacaatatagctgttgctgataaagactgttgctattgaagaatggtcctgcacagcccaaagggactgattatttatgatgacctgcccaagatgtagaagttatattttacattcatatacctacagacttacgttcatacacttagtcattgtttctcaaagcataattttgtg

SEQ ID NO: 9676 - DNA, 1031 bp, Homo sapiens
aacttggaaggattaaatatagttggagagtctagcatggtcctgagtataaagttattaatcagttgaccaatgatgttatttatatgtaaataatgattttggcttctgtaggttaaataaagccttttaggcagccttcaaactaactgaaacaatctgacttgacttcagatttgtcacactggaaatgaatggcaacatgcggaacaggccaggacagggagggaagttacacaggagggatgggtcggcagagtttgtaagtttggatgggtaataacttaacccaggggattgttggtggaggaacgagggagtcctgtagctagagataggcagaagcagacaggatatttgggttctaggtaagcaaggtgcatctaagacctaagaagtcttcagaggcagcagagacgaacaaatgaacgtgaaggtgagagttaatgatttctaatggtacctatcccttactgtgtacttatttatgtgccaggcactgtgctaagagctttatgtacattatctctttttctccttatcataatcttgtgaggtaggttctaatcccttttcacagacaagatgactgaggctgaatgagtttcaataacttgccttcagtcgtagaacttgtaaatggcagaactgatatttgaactcggggcttatgactccggctgtgaaactctgttatcggatgcagaaggtatttctttttttgccccagttttatgctgcctgcaatgtagagatggccataggcttatatccaatgggaaattaaccccatgggtaaaccccaattacaacaaaagcagagagttacaacttccagggagatgggggttggtatttttgttaaaaatgtgaagttttttaacctttgactataaatcatggtgaaaaacctatatcctccatgtagcgctgattagatggtggcgaatccatctcctgtactttcactactttgttatttttttttcctcttttctaaaatccactaattatcttactaggtgttctct

SEQ ID NO: 9677 - DNA, 1018 bp, Homo sapiens
atttttttaatcttttattttggatagttcctattactatgcctttactgatttttttcttcggcagtatctgatctgctgttaattctatctattgcatttttcattttaggtattgtatttttcatctgtagaggttccatttgggtcatttaaaatatatctttcaggcaccaggcatggtgactcacgcctgtaatcacagtgacttcagaggctgaggttggaggattgcttgaggccaggagttcgagaccagcctggggaacgcagtgagaccctatttctaaaaaaataaaataaaataaataaaaaatctttcatttttctcatcatgtttatgtatttctctaccctgttagacatgtagaacatatttatatgattcttgtctgctagttgtatcatttctggggcatattttcgcagattttatatgcccattaacttttaactggttgcaagacattatggatttaggtgacttctttaaatagtgttcgctttgttctggcatgcagttaagttgcttgaaatcagatgaagccttttgagacttgcttttaagcttaagtagggcaggtctggagcagtctttagtctagggataatttatctctgttgtcaagatgaaacccttctgaaaattctacttgctgccctgtgtattaagatatctttcctctctgtctggcaggaataggaattgttcccaaatcctgtatgagatctgggcgttgttctgtctttttcttgcaaggctgttttccttcctctcccacccccaacacgagccttggatagtttttttaaaattaatttttaattttaaaattaattaattaattaatttattttttaaaattaaaatttaattttaatttaaattttttaaaattaaaatttaattttaatttaaattttttaaaattaaaatttaattttaatttaaattttttaaaattaaaatttaattttaatttaaatttttttaaaattttttttttattgtggtaaa

SEQ ID NO: 9678 - DNA, 1031 bp, Homo sapiens
gatttggtattgtgaaaccgaaagtcatcatgctggaagaattccctggtgactctctcactcaggcttagcctcgaccttccagactcaagtgatcctcctgcttcagcctcctgagtagctaggaccacaggcatgcaccaccatgcctggctattttttttatatatatgggggtctcactatgttgcccaggctgataagttatctcatatgcagaaatatacatttccaaacatatatacagaaatattatgagatgtgaataggaaaattgtacaacactgtgtatatcggtttctaagaaaatgggctgagttaaggctttctgtgtgagggggattgggttaaggtttggctcaaggtgaggaatgtgagttgatgggaaggaaggaaaaggcatcccaggaggaatttagagggagggatgaatgaagaggcagatacctttgcttggctgagaagtctgagcttccaagtggagggaaatgtcagggataataggctgagggggagatagggtagatggtggtgattataatgtcttttttttaccagaccaacttgcttccagattgcttacacctggggagacaataccaccatgaagatgacagataacccacgatgaagtgctaagttgtttgctatggtagtagctggaattcagaggggagagacttatggctaccagatccaagataggttctgtgaacaacgttttctttttttacaatttgcagtttttaatttctgtgggtacatggtaggtatgtatatttataggatacatgagatactttgatataggcaagcaatgcatagtaatcacatcatggaaaatggggtatctgtgcccttaaacatttatcctttgtgttacaaataatccatttatactctttaagttatttaaaaatgtacaattaaattatttgactatagtcatcctgttgtgctatcaaatactaggtcttattcatttgttctatttctttgtacccattaaccatccccctcccccttccccc

SEQ ID NO: 9679 - DNA, 1067 bp, Homo sapiens
ggacaggctagcatgccattttacagagaccctgttatgccaggttgggttgggatttgaagtcaggtgtttttttttttttttttttccgagataggatctggctctcttgaccaggctagagtggagtggcacgatcttggctcactgtagcctttgccacctgggctcaagccatcctcccatctcagcctcctgagtagctgggagcacaagcatgcactgccacacctggctaaattttttgttttttgagatggagttttgctcttgttgcccaggctggagtacagtggcgcaatcttggttcactgcaaactccacctcccaggttcaagcgattctcctgtctcagcctcccaagtagctgggatgataggtgtgtgccaccacacctggctaattttgtatttttagtaggacgaggttttaccatgttggtcaggctggtctcgaactcctgacctcaagtgatctgcccgccttggcctcccaaagtgctgggattacaggtgtgagccactgcacctggtgctaatttttaatttttgtattttttgtagagacagggtttttgccatgttgctgaggctggtcttgaactcctgggctcaagcaatctgcctgcctcagcctcccaaagtgcttggaatacaggcgtgagccaccaagccctgcctgaggtccattttgttggataagacagaaacacaatttgtagttaattaacatctgtcttggacttgctcttcttctaacgctagcttaaaaaaatcatttttggctgggcgcggtggctcatgcctgtaatcccagcactttgggaggctgaggcgggtggatcacctgaagtcaggagttcgagaccagcctggccaacatggggaaactgcatctctactaaaaatacaaaaattagccgggtgtagtagtgggcgcctgtagtcccagctactcaggaggttgaggcaggagaattgcttgaacctgggaggcagaggttgtagtgagccgagattgcgccactgcactccagcctgggtgacagagtgagactccgtctcaaa

SEQ ID NO: 9680 - DNA, 1050 bp, Homo sapiens
cttattcccataatggcccagttttgaagtcagccaagtccttttgtccttgacaacatcatgcagtggaaatacggtgagttctagattcttatgggacagcatgcagccctagaggaaaaattgacttcttgggtatgctgagaaataagacagtaaaatggcttcagttgatgcaaggggattttagttaaaaattggttcaggatttttaaattttattttattttttggctgggcgcggtggctcacgcctgtaatcccagcactttgggaggctgaggtgggtggatcacctaaggacagcagttcgagaccagcctggccaacatagtgaaaccctgtctctactaaaaatacaaatatcagccaggtgtgatggcacatgcctgtaatcccagctacttgggaggctgaggcaggagaattgcttgaatccgggaggtggaggttgcagtgagctgagatcatgccattgcattccagcctgggcaacagaacgagactccgtctcaaaaaaaaaaaaattggttcaggatgaacttgcagagcactcttccacagaacatggttaggttagccctgcctgacttctagcaattgctaactatacaccttgcctgcctctaggacccctacctgagtggcaaccataccttccatatgctctgttccatggcagtccctgccatcccccaccagcggactctggctccctccctgtacccatttctagcaacagctccttgcctggctgctaagacggaggcgcctccttgtttgttcctgggctctgttctgctccctctctcactccatggagtcacttatagtcttcctttctgaacgccagaattgagcctttgctccttctggatcaccccttcctgggcttcttctccatccctcagtactgctaaaattgccctgctcctttagtccatttccatgacctcagccctctctctcctctccttgtcttttaactttctcctggacttcttcctctccccagcatgaacccagagcctatcacacactgatgttttt

SEQ ID NO: 9681 - DNA, 1031 bp, Homo sapiens
gaactgtcttagtgacacctgttctgcttccctcactgtggccatggctgatctaggcatggccaggacttactctttttgtaacactccccatgcaaagagtcctgggggtctgcattatacctagggggaaacagaactcagcccaggagggctagccttgacaaaatgttatagggaaaagagcatgtctgactttggagtccgatagatggaatttggtaaaccagttctctctccctgtgatcccgggtaagatacctaacctccctcaactgatttctttctctctaaatggggccaatcgcacctacttcttaggctactgggaccagtaactatagtgaaatcatttgataacttcctctgagtagtaaggattttcctggtacctgacactaatgtggatttgtgttgtgcctcatagtgaaggcaatttggaccattggagattggttctgattcgcttctcagcttcccatgccccttctccaaccaggctaggctaagtttgttcttctgtggaaggtgagggctagttgggaagtcaggaagcgacttcctgatgatcatttgggacttttttcgttcaatgtatgatgcgtgtttaatttgtaatgattagtctgtttcctatatgtgtaataaatgaaaacgaaagaaataatttttctccttttttttcacactgactgaaaggccaactgaaaaatcgttggttcttattacacacaataatgtaactctgcattttatgcagttaaactttttagaccctgcttgcgcatgtacagtgcctaggaccttgcctggtgctgaatggatgctagtttcatccttttgccccatcactgcctcctgcccatctccatagactgcatactcaggggagaactccctgggagcctcttttccatggagtgtgagctggattctcaagcactgctggaatcccagcacttggctgacatggcagaggctggacaaaaagactcctcagaggaggcaacactggtgtactgagaacaagt

SEQ ID NO: 9682 - DNA, 1052 bp, Homo sapiens
caggtctttgatctcatttaaggtttttaatgtgaatgaattatgcatgtgtcaaggctgtgtttgactctaaaaggagaacattaaattcatattaatggtctgggtgctttggtggctcatgcctgtaatcccagcactttgagaggccaaggcaggtggatcacctgaggtcaggagaagaccagcctggttaacatggcgaaaccctgtctctactaaaaatacaaaaaaaaagttgccgggtgtgttggcaggtaccagtggtggcagacaccagctactcgggaggctcaggcaggagaaccacttgaacccaggaagtggaggttgcagtgagctgagatcgcgccactgcactccagcctgggcgacaaagtgagactccatctctgtctatatgtatgacaattacctgaatcatagtatttgttgccaagttattctaattgcaatgaagaataaaaacaaaagctttggtgtcagtatatttggccatctgagtgtcattcctgatctgcctgccattactagctgtgtaatttaggcaagttacttcatctctctgcccaagaggttttttttgcctgtaaaatggggttaatggtggtagttactaactcataggactgttgtgaagatgaaatgaggacatatacataaagccttctgtactatgcctcgtttatagaaagaaggtaagaaaggtaaaaaaacaaaaagtgctgttatttagaacttgagaacatgtgaaataggggaaaaaagcctgttagatggaaacatgcttaatttggaaccagagagtcaatttctcatataatatgtataatatgtggcatcttatattcttttttttttttttttttttttttttttctgaggcggagttttgctcttgttgcccaggctggattgcaatggcgcgatcttggctcactggaacctctgcctcccgggttcaagcgattctcctctctcagcctcccgagtagctagaattacaggtgcccaccaccatgcccagctaatttttttgtatttttagtaga

SEQ ID NO: 9683 - DNA, 1067 bp, Homo sapiens
ggttggtggcagtcttcatttaaggcagatggttatcttgttttttgctatttcatcagctcattcgagggctttttcatctcatcacaatttttctgtctaacctcagggttagtacttcttctgtcctctaatactatccatttagtataacaacctttttggaacaacatggtagagttgtctgaaggaagctagagatgtccacttggggcagctctgaactgagaagcagcctcctcacctagtgcagcttgggaatgtgcatggggaggcagggtggcagcagcaaaccccggcaagatgtcactaatgatcgccttgatgagccagcccgaattctagtaagatgctcctgcaaattatcatcccagatgttttctttctccttttttggcatctgtgctccatggttcccttcatgtaggcctctccttcccttcctccaatgactgttctcttccctgtgcctgtttcttttacccaggcctttttgagcagcgagtggagcagtacttagaagaactcccagacactgagcagagtggaatgaataagtttctccgaggtttgggtaagtggccttgttactgatgagatagatgttcagcaagaaggaaggggctgggagatttgtgttcccgaatactctaaatcaatgtcaacaggtgttatactggggctgtagacagaacaggatgtagacatcccatagtgactagaaggttctcagccagaattccaagggcattttgcacagtagtggtccttcaatatctgtgggggattggttcctggatacccaaggataccaaaatccacagatgctcaagtcccttctataaaatggcatagtatttgcatataacctgtgcacatcttcccatatactttagatcatctttagattacttataatacctaatataatataaattttgttattttattttatattttatttattttattttagaggcaaggtctggctctgtcactcaggctggagtgcagtggtgcaatcctagctcaccgcagcctcaaacttctggcctcacgtgatcctc

SEQ ID NO: 9684 - DNA, 1059 bp, Homo sapiens
ggagattggggtgggaggatcacttgagcctgggaattcaagaccagcctgggcaacaacatagtgaaaccccctctctaccaaaaataaaaaagttggctgggtgtggtggtgcatgcctgtagccccagctcctctagaagctaaggcaggaggattcttgagcctgggagatggaggtagcagtgagccaagattgtactgcacttcagcttgggcatagactgaaaccctgtcttaaaaaaaaaaaaaaatcaggtctggatgtagatgagacttttggggcgcaggttcattccttgtgtgcagctccttaagtactgtttctcttgctgtgaagacctgtaacttaaagagaatgtatatctgctacccaaaagacactggtgggacaggcttagggtaaccactgaataggcttcttttcaaaaaggggaaaataagaggtacccagcagtcactggtttgatgtatttcttatattcagtgggacagctgttgctaattctttgactaggtgttgactcatttaccttgtctctagctgcaccctctgggcttttggttctgctctctgactcatcttttcttttccatagaagtagctcattattgcaggtgagtagtttctccatctgcttcatgcccataatatgttaagggcccaaagtcttttcttcattttgtactatctctgctctttttactccaagctgatacatttcctttaaaaacttcatgggttggctgggtgcggtggctgatgcctgtaatcccagcactttgggaggccgaggcgggtggatcacctgagatcaggagttcgagaccagcctgaccaacatggagaaaccccatctctactaaaaatacaaaaattagccgggcatggtggtgcacacctgtaatcccagctacttgggagcctgaggcaggagaatcccttgaacccaggaggcggaggttgtggtgagccgagatcacgccattgcactccagcctgggcaacaagagcaaaactctgtcccccaaaaaaaaaaaaaaaacttcatgggtttc

SEQ ID NO: 9685 - DNA, 1044 bp, Homo sapiens
cagtttttccatctataaaatggtcataaggccagtatgctggctcacgcctgtaatcccagcactttgagaggctgaggcaggaggattgcgtgaagccaggagttcaaaaccagcctgggcaacatagtgagaccctgtctctataaaaataaaaattaaaaaagtagccaggcgtggtggtgcatgcctgtagtcccagctacttcagaggctgaggcaggagggttgtttgagcccaggagtttgatgatgtagtgagctatgattgcaccaatgcattccagcttgggcaatggagcaagatcctgtctctaaaagaaatttaagaagaataataaataaacttgaaaaaatggtcataaaaatatctgtgcagtgtatttcaaaaggttatgaggatcaaacaaaatgatacatgtaaaaagaatgttacaaagcagaaatgtatgctgggtaggggggagaggaagggacaggatggggatggggatgggactaaacttagggggtctgccgtgtcccagggactgtgctcattttctgacaggagcaatattattaccgactgtgacagcagctcccactaagcctgcaccttagctgcagatccttagcagggcagagagacaaggctgtatttgtatcaggtttgtcgtctgggttgtgactctcgacttgcccaggattcttcctggtcctgaccgagttgtctttgctctccatttcaggaagatgagagactgcttaggcgccaccactagtaccatgagtccctgcactggttaaagccatcgccacaacctggacaggcagcaaggtaagcagagaggccagtccaggcgagctcctgggatgtgagtgcatttccgccccaactgctgcccggaaaaatcccaagtgcacaaacaagtcaaggcagcgcatcagggtccctcctacccgagctccaggacccagaggaagctgggtccccttcaagcgcttcagctagctccctcccccctggcagggattcttccaagttataaaaaatgagacact

SEQ ID NO: 9686 - DNA, 1044 bp, Homo sapiens
ttttgagacaaggtctcactctgtcacccaggctgtggcgtgcagtggcatgatcatggcccactgcagccttgacctcctgctaggctcaagtgagcttcccacctcagtgtcgaaagtagccaggcctacagctgtgtgccaccacgcctggctgttttttattttttgtagagatgggggttttgccatgttgcccaggctggtctcaaactcctgagctcaagcgatcttcctgtcttggcctctcagattgttggaattacaggcatgagccaccaagccccgcctctccttaaacttctacctgctataaaacaatactaaaagcatacaaaaaacgtaacttctttagtattgatctaatcagtgagattggtaataatgaggttagtagctggctttgttcttctatacattaagtaatataaaagtattaaaaacttaaaaaaagtttgtccatataccacttataatcatcttgtatacacaccccatcttggacactctggactactgtgaggtgttaagcatcaaatggtctaggttctgtggtgacattattaataccctttttagttggattgattagttggttggttttattagttcattcatttaaaaatttattaattgtacgtggtacacagccctaagctagaattcagagttaagacatagttctttctctaaagaatattacagctagcaggagaattaagctgaatgagctttggtgcagtcacacaaggcagtggggcatggctggcattggagtggcagcctgttctgaggagtactggggggtagggctagagaatcagtctagccggggagaatgaggggagctaggattgaggaggttggcacagtctgggctcacacttcctacagccttgcccagatcttactcttaggggtacttctttcccaggctgaaggtattttcttgggtagatcatagaaaagcagcttgagtccacattcctcttaataccctacctcttccctttccctccactttgcaccttgcctccgcaatcc

SEQ ID NO: 9687 - DNA, 1083 bp, Homo sapiens
cccagcactttcggaggctgaggtgggcagatcacaaggtcaggagttcgagaccagcctggccaacagaatgacaccccatctctactaaaaatacaaaaattagccgggcatggtggcgggcgcctgtattcccagctactcaggaggctgaggcaggagaatcacttgaacctgggaggtggaggttgtggtgagcccaggtcgtgccactgcactccagcctggacaacagagcgagactccatctcaaaaagaaaaataaagggaaacaactgagtaggtgtcctcttggtgttcctgagaggcaggcctttgaagaagaaacaaaatggtttaacttctgcctatgtaatccccatccctcctccccaaatacacttactcagacagagctacatttcttccttatccctgtacccttctgaaatgactgagatttaatcagatcttgcatagtttagacttttttttttgttccagttaaagatttgcattggcttcttccagtacagaatgagttggacaaagacaatctccaaagtattttgctgttctgtggtcctttgtcgggcagaaattctcctaaagaagtactgagggccgggcatggtggcccacgcctgtaatcccagcacttcgggaggctaagacagacagatcacttgatcccaggagttccagaccagtctgggcaacatggtgaaaccccagctctataagaaatacgaaaattagccaggtgtggtggtgtgtgcctgtagtcccatccactcgggaggctgaagtgggaggaccacctgagcccagggaggtcgagactgcagtgagctgagatcgtgccactgcactccagcctgggtgacagagtgagaccctgtctcaaaaacaacaaagtagccgggcgcggtgggtcacacctataatccagcactttgggaggctgaggcgggtggatcatgaggtcaggagtttgagaccaggctggccaacatggtgaaacttcatctcaactaaaaatacaaaaattagccgggtatggtggcgaatgcctgtaatcacagctacttgggaggctgagac

SEQ ID NO: 9688 - DNA, 1046 bp, Homo sapiens
cttaaaaaacaacaacaaaaaagaatgatgttaattcacaaaagagataatcttatatttgaacagtgccccatatcactttaaaccattttaagtagttttccttagtaactgaacaagtctaaaggtgacttgatttgttaagtagtttttcatcccatttgggattttttgtgtgcgtttttgtaactgttaacagtagcagctttgaaaatagacactactatatgtgtgactttgtggcttcttaaatggttaaaacttaccaaaatgctaatattgagagcagaaattattttactttatcttattgattatttgttttttatgctctttcattgggtaagtttagtgattattctagatttcaggaaacttttggtcagagcaagcagaagagctagctgggcttaagcagcattttatctttgttttttcagtgattgccttcatgttgtggagcccatgcctgtgcgggggcctgatgtagaagcatactgtctacgctgtgaatgcaaatatgaagaaagaagctctgtcacaatcaaggtaaaatatatatccctctatctacctgtctgtctgtctgtctacgtcttttctgcttctggatggtttctagacaagacagaaaaatttggacccctaccccaaaaggaataatgggcctgttctgcctgcctcactgacatggtttgtggattagttagggtatgttagatagatatgtgaaatggcacaaaaatgccctatgtgtaattagcatattccagaaagatatcccagcttctgtgtaggccatgtgtgccagaggctgagagagcagcatttataagccctcctctccttgcctttccagccctttgaaaaaattaaatatatagtaattattctagaactattacttctggattttaagatttcccctcttcatttcctgtaggacagtggtccccagcccccaggccacagcccagtctgtggtctgttaggaactgggccactcagcaggaggtgagcagtgggcaagtgagcaaagcttcatc

SEQ ID NO: 9689 - DNA, 1053 bp, Homo sapiens
attggcctccatcatttctttgtcttgaggtcagttttgtgtacatggctcttctgctatttaggaatcttggatttttcttcttgtagttgcctttataattataaccttctatgatgtcctttgctctccatttctttttcttttttttttttttttttttttttgagatggagtcttgctctgtcgcccaggctggagtgcagtggcacaatcttggctcactacaacctctgcctcctgggttcaggtgattctcctgcctcagcctcctgagtagctgggactacaggtgtgtgccaccacgtctggctaattttttttgtatttttagtagagacggggtttcaccatgttagccaggatgatcttgatcttctgacctcatgatctgcctgcctctgcctcccaaagtgctgggattataggcgtgagccaccgtgcccggcctactggccgtttctttaggtagtgtctatgacttcctggttacgagaataataaaacgagctcagatcctaatactttattcttgagaacctgtatctactctttcaacaaaccttttctgagtgtctgctgtgttccagacctagctgagcctggaaaatgcagaggtgaatcatagagaccacatgcccttatgaggctcgaagtccataacctgtgaaggcagtcatggactttgacggctatgactgtatgttggatgctatgattagaatttgtgcagcagactgtggggacacacaagagaagtgtccaccccaggccaggagggggtttgttaggaaagactctgggaaggtgatactacagcaagtctcaaaggatgagctgtggccaggaagaatgttcgaggtagaggggctggacaaaggcttggagttgtggagcagtttgggagggctggaaattgggtgcacttgtttgagagatggggcctcacaaggcttggatgaaagacaagaggcagattataagggctcttgatggccaggcacagtggctcatgcctgtaatcctgatactttgggaggccaaggcgggcag

SEQ ID NO: 9690 - DNA, 1034 bp, Homo sapiens
tagctgggactacaggtatgcaccaccatgtccggctaattgttgtatttttggtagagacggggttttgccatgttgcctaggctggtctcgaactcctgagctcaagcaatccgcccaccttggccttccaaagtgccagggctacaggcgtgagtcaccgtgcctggcttgccaacttcattctttttgcttaggatcattttggctattctggctcttttttggatccatatgaatttttggatttttttttctatttctttgaaaaatgacattgatattttgatagggattgcattgaatctgtagattgctttgtgcagtatggtcattttaacaatattaattcttccaatccatgagcataggatagctttccatttgtttgtatcctcttctatttctttcatcagtgttttatagttttcctgataaaggtcttactttggttcttacatttctctgatgagtgggttatgaaagaatctaggtagaaatagtgaccatgtctagggaaagaaaactcagaatttctaagaagggacgtcacagaactaagtagggtttcaggacagttatgcttgcatgtggtttcttaactggcctgctgcttctttccaaagtttaatcagccaggtaggtactgagcataaattcagtgctggcacctttgctggctgggatgtgaacagaaataaataatatcaggccctgcttcccctaggcagcctcccacacaagaccaagtggatgtcttgatcaagggcagattccatgggcatggtggaaatcataatggtgatggtgatgatgagtaacatgatagagtactaactctaagccaagcaccgttacaagtactttacaaatattactcatttgattcttacaaacattcttatcctcattttataggtggggaaaccaaggcatgggggaggtgaactaacttgccacacagctgataaatactagagctggtgaagaaggaggccgtcagggaaggcttctggggaaggtgctgcacctgt

SEQ ID NO: 9691 - DNA, 1087 bp, Homo sapiens
tttcaccatcttcaattctttgcatgcacacagtttctttgttgctttctcgcttgctctcttacttggtgatctcacccaattctcatgacttctctcacctctaagcaggagatgcccacatctgaagttctagccctgacatgtcttttaaactccactcctgcatttatttccattctgatattctatctttagctcagagagaacaaaagcaagcttcacagagtcttcaccataactactttactctcagattttttgttaatgtcaccactgtgctctctgaaaagcttacccccacttcttctccgtacctacactgaaaatttggagtcagttttgactccttgctttgctttatctcccacatacaggtttcaggttcttcacctctgtcccacctgtctccttaccatttttactgcacagacttagtttaatcctcatttccctttcacttctcacctgcactaaatttaaatttcctgaagttggtcatggctgtctctttttctagggcaaattgcagaaaccccttacttactgggcagattgcaaactccttagtttaaaattttaggaccttccttcatttgaatagccttttttttttttcatttgacacctttggtacagtagcttaacttcttagtctcattgctaactgatcacttccctgaaccctcaactccagccaaactggtttccaaacctgtctgtacaacagttgtctaaatttctgctgcccttcaggtccctcttgttctagaaggccttccaggaccactgaagcgtatggctctttaaattcccagaaacagccttttgtttgattattcattgtgagcagtcctataccatggcctttacctgatttattcacttagactgcatttgaggataggcgctttcctctccagcacctggacataacaggcctgggttgataaattatctgttgaaagtgccttgtaaacctggctaggtagaacctcacagttctgaattctgtacccgtctggccatggtgattgcagcttggacaaccaggacagttgtcttcttttgttctttgtgttgaagg

SEQ ID NO: 9692 - DNA, 1055 bp, Homo sapiens
attattgtaatcttactaaaacaaacataccacctttatattattttattatctgcatgggaacatttaccatgaatctgaaataaagttatcacttaacaagggttatgatgtactgaacgatgattagaaagagacaaagcagttgctgggtgaccagctgggctcactcattacccaggtgaattactccctcacatcaggcttgcaaatactattcaggtttgtgccttggcaaaatgacaaattgctacatatctcaaatggtttaaagtgcagttcttacctttccaaacgccaaggttctattatattgactgtagtttatttcagccatgcagttaagtaccagcctacctttctgcacatttcttcaactataccttcaatagtaaatccttgttatagtgatgacttactctccctggcctgcactaacaacttataaggtagccaaagataccacagtttcccccacttaacagagaaggaaactgacattcagagaagttcaccaaactgctttgcctagttcaccaagtagcaaaatcaggactagaacaatatttaaaggaataactttaaatattttaggaaattcaggagctaagatggaagcttataggctggatatccactcctctgtgcaaaagccatcaagctgacataaaaccagcagaccatttagaggatgataggtcatttgcttcttttttttttttttttttttttttttgagagggagcctcattctgtcacccaggctggagtgcagcggcatgatcctggctcactgcaacctctgccccccaggttcaactccctccacctcccaggttcggttcgagtgatcctcttgcctcagcctcccgagtagctgggacagcaggcgtgtgccaccactcccggctaatttttgtatttttagtaagggttttgctgtgttggctaggctggtcccgaacttctgacctcaagtgatccgcccgccttggcctcccagtgttggggttgggattacaggtgtgagacactgtgcctggcctgcttttttc

SEQ ID NO: 9693 - DNA, 1080 bp, Homo sapiens
tcctaacaccatgttctccctaggcctccattttgctggctttatcctgctgagacattcttcagttatcttccaatccagcggtcacaccctggttacctgctgtcctttatcatacacccagattgtgactaaatttgctctcagagggtgattttattatgcccttgtgggggtaccttcctaagcaaccgcccattattatctgctcagaaagtagagagaacccaaacagcatttttgctgctggcctcttaaattttgttactagccttgactgcttggatgtaaggctgcctgcagcaagtcttcataagaacctctgttatcctcaccactctctttggctttcagtgacatcttccaaggagatgggcttccacctatagtatgtttttctatcagatagaggtttggtttttcatactggttttgtaactgctgccatttagggttgacacatgaaaaggagttgttacttatctttcttgcttatgacattcttgtagaatctgatgcagtttattgtgtgtccatgtccataaatggatagtcaggctgtattgaaccttgcaatcccaatcagaccctttgcaaaagaggaaaaagagtaggccatgtctcttgaactagaaagaccaaagagcagcccagctgctgctcttccactcctgcccttgctctttctcctcacctctgtaaacattgtgagccaggggcttccttcttctggtatagtggcctgattttgcccttgtccttggctctttagtgttattgcatgtcaggctctctggtcaccagctgtacttaatgtgtgccacattcagacagttctattaatttatcttaggctgctttcctagtctgcctagatgctggggagcctactttctaatggttgtggtagatggaaggatgaatggatttctagaagttgaattactaagtcaaagaccataaatattttaagctcttatattatctgttagatacattaatagacctttttttttttttaaatggagtctcaccctgttgcccaggctggagtgcagtagtgccatcttgactcactgc

SEQ ID NO: 9694 - DNA, 1033 bp, Homo sapiens
tgggtataaatatattctgtgtccttggggctaattcatcctgtccttcccagcccaacagatgtactgtgcaggctgtcagaaccctctccggttgtatgtaatcctgctcactgtggttatttaatcctgttgactgcttccttgtagaccaagaggatgctggtggaaaagatgggccgagaagctgtggagctagggcatggggaggtgaacatcacaggggtggaagagaacaccctgattgccagcctttgtgatctcctggaaaggatctggagtcatggactacaagtgaaacaggtaatgtatgtcttgcctctcattgctgagcaaattgtcttcctgttttcagttactagctttcccacactctttttgtccagctgactggctttgaagaatggtgcacagtgccctggagtgagatttgaaataaacaattaaataaatgtgatccaaactattttccttaaagataggctttataaatctgtgtgtttgtcagacttttaaaaagaggcatctttcttcctgggggtagagctgaaggccaacctgataggtcctgtttggcagctggccctagtctagagatagaccagaaagagagaagttggagctcaggaagtaccagtcatacactaaaggttcttcactaatcatatattcacagtggaaaaaaagtctgtcattaacatttcttttgtatgcagatggtttaactaaacatttgagagaaggcctcaggaagttgagtaagtttgatttttccacttaatacccagagaatttccttatttcaaaatactctgttttcaattggtagtcaagatagataccttttatttttatgtatttttaaatttgaaaataacttgaaattttttgaaaagaagttttatcatggaaaaattagaaaatacatattagtatccattggtatttctcaagggcctactatgtcaggtactgttgtaggcactagaaatacctcagtgaacaaaacagaccaagatctcttgccttcctg

SEQ ID NO: 9695 - DNA, 1438 bp, Homo sapiens
tttatttgtgtgtgtatttatgtgtgtgtgtgtgtgtgtgtgtgtgtgtattctcatccagagaaagcaattgagctgcgtctggcaaaaattgaccatactgcaattcacccacatttacttgacatgaagattggacaagggaaatatgagccgggcttcttccctaagctgcagtctgatgtactttccactgggccagccagcaacaagtgagtcaaccccagggattcactaatccaactccctagctgtaatagggtcatctagtatctgggctagggctgttacccctagaagaccttgtacttttctaaagcagatatggagaagacccagactatctaggtggtttgcttatttgaacaagaaagtatgtgacagaatatctttcagttctgcctccactatgcagattgggatagctccatatgtctaggacctgcaaaaagctgcagatgggttaaaatcatctcatgcctggatcccattcaacagcaagctagcattgtatttaataaatggcagttgaaataatcagaacctgaactgaaaagtaggtaagttagcagaattactcattagttacttttgaagatgactgtatcaaagcccagatagagttaagtgaatatagttttagatctatatgtcaagtgtttgtagatgtttcaagagagacatgttccatgaggaggtgtctctctcatgtccagtcactcatctttaatctgctcttcctcaaggtctctgagctgtctctggtgacatctaggtcatttcctgtgtccagcattgactcgtagtcattcatgttttctcctgttagttgacattgctttttaagtgagacattattaattgcctgctttggttctgattgtgttaggtggacgaaaaggaatgcccctgcccagtggaggcggaaagatcggcagaagcagcacacagaacacctgcgtttagataatgaccagagggaggtaagataccttaagaatgataaggatgaccttgctatcatgctgtgcactccttctctttctcatttcctgttctctggtctgattcaaacgtctcagcaatgacctcaccccataaagaagggttaataataggtctagttcctgatatctaatgctgggcctgggttatcacaaatcagaatgtgggatgttttgcaaattccagctagctactaaccgattgtaatttctcatgcatgatgctccctgaggagttcaataggaacctcagaagttaagagtctgaaacttgggagaaatcctttaaaaattggtgtgagttttgtgtgtgtgtgtgtgtgtgtgtgtgtgtgtgtgcgtgtgtatataggaaaaaagttaattttttttaattctttttttgtttgagacagagtctcgcttttatcgcccaggctggagtgcagtggagc

SEQ ID NO: 9696 - DNA, 1021 bp, Homo sapiens
tttctccagagggacagagagtgtacatttcctagcccaccaaatcagaattcatcagttactgccgtctttgggcatcagaagtctgtaaaaagctttttgttcctttttgcaccaacacatgagctcagctggccctgagcaagtgaaggtactgagctgcctttgtgaggcatcctttgtcttaggcttctctttggagcttcgttgtctgagttcaggaaggaggcatttcatccacagctatattacagaattaagcaaaggatattagagtaaagaaaggggtaccatttttttctatcttggacccctttttcctacttttcccccattttctcaggacactccttcaatagctttttcccagtcatctgtgtgttgaactccttttcaatgaataacatgaggatagactggagaaacaggctggctgttttttggtattaggaattgagcattgggaaagatcattgtgaccttgagcggaagatatttgggagacttcttgggatttgggggatccatgtgatcactacctcagagcagctaagtctacccatcatccctctcaacaaggcaggaggttaacagaggaaaactgatcacttggcattcggtacctcttccaggctactctccccaaagctgttaggtaagaagtaacccctcgtcagctgaggaaggaggatatatgaggagttcctagtattttgtaagtgcttctgtgtgctagagcccctctgtatgatgggaggaaacagcatgaggctattgtatgagtctagtaattgactattgtatgagtgtagtaatttgcttttttaccactccctcctttagctcaattctttcttctcttttttttgtttgagatggagtcttgctctgttacctaggctggagtgcagtggtgccatctcagctcactgcaacctctgcttcacgggttcaagcaattttcctgcctcagtctcccgagtagctgggattacaggcacacaccgcaatgcctggctaa

SEQ ID NO: 9697 - DNA, 2047 bp, Homo sapiens
gatctctgtgtgtgaacataactgaaccattgagagttattgtgactcctaaattctcatgtgtttatttcctaagaataaaaacattctcttaaataactatcattgatcaaatttggaaaacctaacattgagacaatactatattaaagtttctctggtacccgataatgtctgttatgataatttaaaaaaattccttattcaggatctagtgccatatcatgcattgcttttagttgtgagtttctcagcttttgtctttcatgacatagacatttttgaagagtacaagcaagttattttatagactgtcccttaatttggttttgtctgatgttttcatgattagattcagattataaatttttgcctaaaataccatagaagtgatgtgcttctctcagtgcattatattaggaggcacatactgtcagttttcatgattacaggaggcaggcatatgatgtcattttgtctcatttttggtgatactaatctgcttacttggttaagatggtgtctgtggtttcttaactggaaagttataatttttcccttggtaattaacatgtaagtcatggggagatactttgaaactaattattctgttcttctttaaagttttgcctaaccattttttttttagtttttattttttgaattatatttgcagtttatggatgcctaatagtttagcatttattgatgattctattctgaatcagttatttcaagaatagtagcaaaaaggtgattttctttttcttttctttttccttttgagacagggtctcactctgctgcccaggttggagttaagtggtgccttcatggctcactgcagcctcgtcctcccatgctcaagtgatcctcccacctcagcttcccgtgtagctggaactacaggcatgcaccaccatgcttggctaattttttattttttgtagacatggggtcttgctacattgcccaggctggtctcaaactcctgggctgaacctcctgcctggtttcccaaagtgctgggattacaggcgccactgtgcccagccttaaaatttttttttttttttaaagaaatagagtcttattctatcacccaggctagagtgtagtggcacaataatggctcactgcagtcttgatatcctggactcaagtgatcttcccatctcagccgcctgagtagctgggactacaggtgcccaccaccatgcctggctaattaaaaaaaaattttttttttttgtagagctaggttcttgctttattgcccaggctggcagaatagtggttttcaaactttatctttatttattaattggcattataccataatgaagagtgtttctttctcctttgtttattattgtatggattcatagatttttattttactcaggttataattcactataattatttattttgatgctcaaatttcccagatttggtccatgggcaaaggaatggacctccacaatggcagggcttttgctttttgctcattgatggattccaagcactaaaactgtggctggtatataagggtgctcaataaatgttgttaaataaatgaataacttaggcttttaacaggatcactctggccattatattaagagtatatccccaaagggagaatggaagaaagcaaagagttccgttaagaggtaatttgtaataatccaggtgagaggtgatgtcagttagaactaaggagataacagtgaagtggtgtggaatggttgggttctggatatagtttgaaggtgaagtaatggaaactatgttgaactgaagagcacatacctcatataaagtggatagccgctaattagctccagttaattccttgtgggtatactggcctgatgttactaaatattccaataattgatgaggacccagattttttacatgaaatctctgatttttaaatattggcaataatgttctttttaaacactgcaggccaaacaaaaagcatctgctggctgaatgtagttcctgaggcttcactttgcaacttctagtttaagat

SEQ ID NO: 9698 - DNA, 1005 bp, Homo sapiens
gacatttgtctaactttggcaccccgtatagtcctttatttagaaccagactctttaacaagacttcttcccttagctaatttaaagaaggggcagatgtggagaggtggtggtggggacagaggctctaacaatcacttctccagtgattcatagcctttctctcccttttgaccacacttcagatcagctggtcatgctcacctttggctccattcttcatctcacttttaaaaagttctccccttaatcactcagctttcctatcttctcacacatgcatgtcatgtcttagggagctccttacagccattttagatgagatcaggcgcatttagggtggttatggccatagacgcctagagccattttaggaaggcgtctttcctttacagagaacggtgatagttgtcctgattcctctctctgttgtgatatttcgtggtttttactgaggggattttctggctagttaggaagaaatgaacaaactgataactgaaagtgaagaagcttaggaggaagaaacagttatcttctttcagacatgaatgcagtttaaaaatacatcccaagaatttcagactgtagacgagatcattatgtcagcggcttgctgcttaattactttgtacagtaagtgcaggcttaccatgggtgggctctgcaggtgttacagaaagctctgagcctagctctacataagctgtaggccttgttgctgcagctattaccagctgcctgctgatttttgccagtctttagtgaagattaccaaatgtattttgagggacgaaatttactcaaaaagaaagtttcagaagaatttgtttggaagaaggatcaggaaataagaggaatgaaattgtggcacttgcttttaataacagaaagaaggttgggtcctatcagaatttgaaaattgtgaataagtgagctgctgcttctgatgatggacaaaacctcagagaaaatagaggagagattgtagttataaaagcagta

SEQ ID NO: 9699 - DNA, 1050 bp, Homo sapiens
gagttcgtgccactgcactatagcctgggcgacagagcgagactccatctcaaaaaaaaaaaaaaagaacacaggattgggtttcttagactggtctaaaagaccatgaattggacagctggttgcatcacccactaaacaggaaataatgtgagttccaggtgttacctgacagatgtgtgctctgcagggcattcggctgggctaaaaggaaggcaatgtgaacaaaagtgctttcagtttgtcctagatgcagtttggaacagtcctgactggataggctctcaaacctagtctctctaaaactggtcacataagaagttcagccattttagaaatactaggtacatgagttggatcatgtgtggtgcctggaagatgttaagcaggaggcaaaacatcaataaaaataatggctgtgtatacaaacctaaaactatctgacaaagtaaatgtattgagaaagagagtgaacaaatctgccttgagaaaataggagtaacagggtttctcttaaatttacattgaaaagcctggtaagcagctttcctgggttagtgccttggaagaggacttagaagtggcctgcggggctggtgcggtgactcatgcctgtaatcccagcactttgggaggccaaggtggacaatggaccacttaaggtcaggagttcgagaccagtctggctaatgtggtaaaaccccatccctactaaaaatagaaagattagctgagggtgatggcaggcgcctgtaatcccagctagttgggaggccgaggcaggagaatcagttgaacctgggaggcacaggttgcagtgagccaagattgtgccactgcactccagcctgggtgacagagcgagactccgtctcaaaaaaacaaaacaaaacaaaaaagtcttgtgggtgggggttggggggcagtggacagttcactgcttgtattctgggtacttacttgtgaatgtctgactcctgagcatcacagtcagctggtgatgtgggccaagttacagcctgtctcttcaaggaacagttaccttctttt

SEQ ID NO: 9700 - DNA, 1026 bp, Homo sapiens
ttttttttttttgagacagagtcttgctctgtcgcccaggctggagtgcagtggcgcgatctcagctcactgcaacctccatctcctgggttcaaacaattctcctatcttagcctcctgagtagctgggattacaggtgcccgccatcgtgcccagctaatttttgtatttttagtagagacagggttttaccacattggccagctggtcccgaacttctgacctccagtgatctgcccatcttggcctcccaaagtgctgggattacaggcgtgagccaccccgcccagcctagcaggatgtttttaaggttcatccatgttgtagcatgtgtcagcaccttattccttgttatggctgaataatattgtattattgggatatttatatggtatgaataatacgtaccatattttgttccttcatctgttgatggacactggggttgtttccactttttgcctgttgtgaatagtgctgctatgaacattcatgtacaagtttctgtctgaacacctgtttatgtatatatccaagaatggaattgatgggtcatatagtaactctgaactttatagtaactttaagaaactgccaaaatgtcttcacagcagtgcatcattttacattctcactagcaatgtttcaggtttgcggatgccagctgggtcagggagaccctaacccagcggcgctagaggagtaaaagacacacacacagaaatatagaggtatggagtgggaaatcgggagtctcacagctttcagagctgagagccttgaacagagatttacccgcgcctttattaacagcaagccagtgataagcattgtttctgtaggttatagattaactagcagtattccttatgggaaataaagggatgggccgaaataaagggatgggttcggctagttatctacagcaggagcacgtccttaaggcacagatcgctcatgctattgtttgtggtttaagaatgcctttaagcggttttctgccctgggtgggccaggtgttcctt

SEQ ID NO: 9701 - DNA, 1049 bp, Homo sapiens
ataaaagtattttaccccaaaatgtatttctttgagatgttttaaaatggccctgcaaagctgtcttttgtgggggaaatttgagtctgtagagaatctccattagtacagacagggctttcccagatctagcagattatctaagagttggataccttttaaggtctgaaaagagatatttaccatctatactcttggttacctggaggcttcatccaaaatttgtaaaccaaaaccaacctgtaacatgagcatctcaggcacaagaacgtgttgagactgttccctgggccatggtcgttcatattgattcaaaataaatctctttaaatattttagagcttgtttttttttttcttcactaggtgtctctctccttgtttttcttagagtttttatttgataaaaacattttttatttttttcttgattttaaaagccataggtcagtatgaaaatggaaacattatagagctgtattataaactcctttgtctcagagttgttgtagaactaaattggagtctgcttgcccagtgcagtagaaccagttatctacactgatatttgcagtcattgaaagaaaggcttttactgcagggtgccaagcaaggaggacgaggcagctgaatgttcaaatcctggcctccccagtggcttgcaggcaagggttttttttttttttttttaagacggagtctcgctctgtcgcccaggctggagtgcagtggcacgatctcggctcactgcaagctccgcctcccgggttcacgccgttctcctgcttcagcctcccaagtagctgggactacaggcgcctgccaccatgcccagctaattttttctattttttagtagagacggggtttcaccgtgttagccagatggtctcgatctcctgacctcgtgatctgcccacctcggcctcccagagtgctgggattacaggcgtgagccaccgcgcccggccaaggcaagggtttttaaaggtatgggtaaatttcaggaaagcaggagctgcaggcaaaattgtgaatcaatacttggag

SEQ ID NO: 9702 - DNA, 1074 bp, Homo sapiens
ttagaaagaataattgggccaggtgcgatggctcgatcctgtaatctcaccactttgggaagctgaggtaggaggatccctggaactcaggagtttgaggctagcccgggcaacgtagtgcaacactgtctctacaaaaaaatttaaaaatgaggccgggcacggtggctcatgcctgtaatcccagcactttgggaagccgaggtgggtggatcacctgaggtcaggagttcgagaacagcctggctaacatggtgaaaccccatttctactaaaaatacacaaaaattagccaggcatggtggtgggcgcctgtaatcccagctacttgggaggctgaggcaggagaattgctcgaacctggaggcagaggttgcagtgagctgagattgcgccattgcactccagtttgggcaacaagagcgaaactctgtctcaaaaaaatacaataaaatacaataaaataaaaaaatataaaaatgagcccagtgtgatggcatgtgcctcagctccagaggacgagctgggaggatcgtttgagcctgggaggtccaggctgcaatgagctgtgattgagccactgcattccagcctgggcagcatagctagaccctgtctcaaaaagaaacaaaaaaagaaataatcacaggccacaattataagacagtaaatgaataaacctgatttataacaaattacatgctttttcgttacaacacgttagaattactttccaggagtgtcagaggacttggttctttttctttttttttttgagtcggagtctcgctctgtctcccaggctggagtgcggtggcactatctcagctcactgcaagctccacctcccgggttcacgccattctcctgcctcagcctcctgagtaactgggactacaggcgcccaccaccacgcccggctaatttttttgtatttgtagtagagacagggtttcaccacgttagccaggatggtctcgatctcctgacctcgtgatccgcccacctaagtgctgggattacaggtgtgagccaccgcgcccagccaggacttggttattttttcaggtgtat

SEQ ID NO: 9703 - DNA, 1034 bp, Homo sapiens
gactccttctcaaaaaaaaaaaaaaaaagaatactgtgtgtgattatcattaaggatatcttttttttttttttttttaagagacagagtctgtctctgttgcccaggctggagtgcagtggcacaatcatgactcactgcagcctcgacctcccaggcccgtagctttattgctttatctttttttataatttcatatttaaagaagcattgagggctagacatggttgctcacgcctataatcccagcactttgggaggctgaggcaggtggatcacttgagaccagcctggccaacacgatgaaaccccgtctctactaaaaatacaaaaattagccgggcgtggtggtgggtgcctataatcccagctactcaggaggctgacacaggagaatcgcttgaaatgggaggcagaggttgcagtgagccgagatggcgccactgcactccagcctgagtgacttggtctcagaaaaaagaaaaagaagcattgacatgaatagaacaaagaactccagtatatctcttaaccagattcaccgattgttaacattttgccccatttgctttatcatttatgtgtgtgtccatatataaacaattttattgagatataattcgtataccatacagttcacttatttcagtgatttttaatttatttttacaattagttttacaatcacactacaatccattttgaaatgtattaatcactctcccctgaaaacctgtacccattagcagttactcatcattttctcccaaccctctaaccctgaaccctaggcaaccactcatctactttctatctctatagatttgcctgtttttgacatttcatataaatggagtaatatgtgtggtctcttgttactggcttctttcacttagcataatgttttcaaggttcactcatgttgtagcatgtatcagtttgtcattcctgtttatgccagaaaaatatgccatggtatgaatatacaacattttatttgtttatccattagtggaaggacattggattgtttt

SEQ ID NO: 9704 - DNA, 1015 bp, Homo sapiens
tcttatctctacagaaagtacaaaaaattagctgggtgtggtggcatgcacctgtggtcccagctgctcaggaagctgaggtgagaaggtcacttgagtctcagaggcagaggttgcagtgaactgagattgtgacactgcactccagcctgagcaacagagtgagaccctgtctcaaataaacaaatacaactaaaaataaaaaataaaaaaacccaaataagcatagagcttgctgtgtttaatatagactgaggtaattggattttgtaggaatctcttcctgtcacttctttccctttcttgcagactcagcatttaggcaagtaatgtagttgttttttgtgcaaggaattgaggaatgtgtgaaaattaattttgttttctggttgaggaagctctttgggctagaaggagaagaaggtaatatgtgagcaaagcacagatttagccaccttgaggatatggtgtctgcttgttggctttttgaacttgtcagttaggtaagcaaatctggaagaattgcttctgatttatgttttccattatttttggcacatcgtaagtggggaggcagatgatagtggagttcagtttctttttctacctctgatgggcgaatgtcctggtgaatcttctttttctttgtttctgatggtcaccactaggtgaccccaggagaaggttttactgtgaaatggggttcatgagtttattttccttgtctctgcttgagaattaaggttcccaaatacttgtgacgtatttcttaccttggaatctgtaagttcctctgaactgatctgcacctagcattgagatataagtatcctaggttctttcatcttgtactccaattttcccaggctctgtgcagaagctcttgccaggaattgaagagaagtggctagggataaggatagatgggaaactggccagtgtgctgtatgaacttactagaaaattgagactacactgaaatagtctctctcttttttttttttttttttttttt

SEQ ID NO: 9705 - DNA, 1025 bp, Homo sapiens
aaagtgctttttgctgcttggtaaatgggtaatgcccttgattccttgactgtaggacatagctgatctaaagtactctgtcagttttaccttcacccatgactgttattagttgtcaaagttgaaaagtactttagctgtgagaaatccttgtatgtttttattataagaggtataatcatcctcaaagcctgtttttattacatgatgtggactgattattttttctatcacagtgttaacagatggattttattgtaaatacaaagaaaacatattgattattgtagtattcttatgtcacctggccttttgcgtgagattatttattatttctagcaaggctttcttcctttcttattgcccagagactgactgatacatcttttgttatttttacacataaattaaacatagcctttttggacaaattcactaaatattaatgtataaaatgtaattgagtaaatttttatcagaattttaaaaataaaagagcttagactcagtagaactcagtagaagcttcactatttactccagcgtgtgtaaattgtacttactctattctcagagtatatttactgtccttaccattgattctttccctttgctaatttttttttttgttaatggtagctgcgactttaggtggggtatattttcttctcctaagagaatagacagtttttccagattcatcatcattgactgtcaagaaaggacccttcagcaaggctgtaccctcaatgcagttgatggcctgtcttcacggatttacagacttggcctgatgcccatgtaaattcaagctttggcttgtggtaacaaccacaagaagacaagcatctgtggtgcggaggcaagcaggctaactaggagttgacaagctaagaaagtgaaactgttctttcttagttaactgtctttctctggagctctgttattttgagtataatatttccatgacacttagtaaatgcaagctaaaatgtaataataataaattgtattggagaaaccta

SEQ ID NO: 9706 - DNA, 1050 bp, Homo sapiens
taagttctggggtacatgtgcacagcgtgcaggtttgttacatacgtatatgtgtgccacgttggtttgctgtacccatcaacttgtcatttacattgagtatttctacatttacatatgtgtgaaactatccataatatgatgttttgttttgttttgtttttgagatggagtcttgctctgttgccaggctggcttgcagtggcgagatctcggctcactgcaatctcctgcttcctgggttcaagcgattcccctgccttggcttcccgagtagctgggactacaggtgcccaccaccacgcccggctagttttttgtattttagtagagacggtttcaccatgttggccaggatggtctcgatctcctgactttgtgatccgcctgcctcagactccctaagtgctgggattacaggcatgagccaccccacccggtccatatagtacaatcttaacccaaaaagtgtgtgtgtttgtgtgtgtgtgtgtgtgtgtgttttgtttttgacagagacatgtaggagacaggtggaaaatttgaggctgatgaaccaaagagaatttcgagtttttagtactatatgtggttgatacttgaagccatggaaattgccaaatttatcaaagaaaagggattgtgtggccaacagaatgttagagaaatttcaagagttgagggcaaagagaaaaatctagagaagaaattacctgtaatgtagaagaaaaagtacagttcactgaagccatgtttcatgcaggatgaagtctaatcctatgcagggatcactgaaaggtgactattgagaaaaagttattattggctgtgaggaagtttcaatagcatagtggaatagtaaagcaggtcacagggaacgaggagagaatctcctctgaggaagtgaagatgagcggtagctggataggataccctggttgaggttgttttttaagttatagacaactgagtagttttgtagaggaggcatcctgtgaaagagaacagagttgaaggtgaaaaaacccaggaggaaggaggaggagattg

SEQ ID NO: 9707 - DNA, 1058 bp, Homo sapiens
ggcctttaaattttacaaagtacttaatggcacatgggcaaaaaaaaagaccctataaattcatgtttctccaaattccatttcagattctcttcttataaataagtgaagttggcaagtttcactccataacggaaaaacaaaactaaaatgcttcatgcagtttagtcttttaagtctgtatactttttaacctgcaacaaaataaatacaaaattattttgaacaacaaaatccagatgatacctgagagaagcctaaaactctattcatcaccatacttagggaaatgctgacatagaattaatttattagctgaaatacctatcattcccaattctacataatataataaggctaaatttatttgaagcacacttgcctttaggtccccaaaatcttgtggccaacaataaagaaaactaatgaaaccaaaagctgttctttgagaatatcaataaaattgataaacctctagctagactgcttgagaaaaaaaagacacatattaccaatataagaaatgagaaagatgacgtcactacagattctacaaatattacaaggctgatcctgggtatggtggctgaagcctataatcccagcattttgggaggccaaggtgggttcacttgagcccaggagttcaagaccagcctgggcaacacagcaagaccccacctctaaaaaacataataaatactttttttggccaggcacggtggctcacgcctgtaatcccagcactttgggaagccgagacaggcagatcacgaggtcaggagatagagaccatcctggctaacacagtgaaaccccttctctactaaaaatacaaaaaaattagctgggcgtggtggcaggcgcctgtagtcccagctactcgggaggctgaggcaggagaatggcatgaacccgggaggtggagcttgcagtgagccgagactgcgccactgcactccagcctgggcaacagagcgagactccatctcaaaaaaataataataatttaaataaataaataaatactttttaaaaatccctgttaagcaaatgaa

SEQ ID NO: 9708 - DNA, 1047 bp, Homo sapiens
ttttcatttttattatgaatatgttttacttgcataataagaaacaaatatgtgcatatctacaaactttaatacacgtacagtctggaactccaacagtgtgttacctatcccttaccatatacatcttgggaagacttagtttacactgttggagtaatcatactgtccatgtatcattagtttctctttaaacttccaggttcatggccttataattgacttatatttggtattatgagctccatcaagttccagtctaccagtaggctcttccagttctcagaatgaacgcattcttaggctaagtaatctacctctagtaaggactagatttgccattctgggcaaaccactagcttgtactgaatggctgttcccaccaacactgacacattgctgtacaagattgactttcttgacccattggcagcctctgcagctatttggccccaaataactttgtcattatgcactgccccattggaaacatcactcttttacctatagcacttcatctgcctaattctctgaatcttcatccgcagaacttcaaggtagaatttgctttaaattgtgagtttgttcctgttgaatttcatgaaatccggcaagtgaaagccagttttaagaagctgatgagggcttgtatcccaagcaccatccctactgactcagaagtgaccttcctgaaagcgctgggagattctgagtggttcccacaggtaatgtctgaagcagcttctttctttataactcaaagaaacagaggcccaagtagatatacagaactgtatttgagaaaaaaaatactttgttcccctactccccaacattctcctccttcattgtgtgccatcagtaaaggcctttcagactaaggaaatcatctggtataggaggtgagggagtagaagtcttgatcgctgggtttttatctctgtgtatttaaaagtttggtatctataggacactaaggagaaaattatttttagatggaaatctttgatgtaaatttaatcagcatgtatttacagggctcctgct

SEQ ID NO: 9709 - DNA, 1033 bp, Homo sapiens
gagacggggtttcaccatgttgcccaggctggtttcaaactcctgggctcaagcgatctgcccaccttggcctcccaaagtgctagtattacaggcatgaggcactgtgcccattactaaacttataattctcattcttcatggatactgaaaaatataatataatcttgtttagaattacatcgttttggcatgatatacaaatattaattccaaatccagcttcagattttagtagacttatgaagtttctatttcatatctttaaatgtcatgttaaattgaccaaataagcagaagaatgttccttacttttttcatgaagccctgagaaattgcataactcagcatttgccttcctagactttattagtacctcctgccagcatgttttgttttcagtatcaatgtactgtttctgcttaagatcttagtatttacttttaaatcctgaatttacatcaaaatataaaataggattgatttgggggatttgctaggtcattctgaggctaagattgtgtgattttgaaatgctatattggataatgtttatgttacagaagtagcaaatgaccatatgacttacggtttttagattaatcagcttgctatgacctctaaaactgtagctccagagcatgcacctttttccttagttagtggcattcccacattagattatctcactccacgactttggcttttgtgaaggtgtgtgggcaagtcttcgctctagcactcgcttgatcagctctccaacatccttcattgatgttggcgcccggctggcaggcaaggatcactcggcctccttcagtaacagcagctacctacaaaaccagctcttgaaacggcaagcagccctttacatatttggtgaaaagtcgcaactaagggtaagatttcttttttctcacttagaaactttatggatacgctagggctgttgataaaacctgtatcacaaaccagctttgctagaattttttttacagcatgattcttaacctggagttaataatctcaaaaa

SEQ ID NO: 9710 - DNA, 1032 bp, Homo sapiens
ctcgatctcctgacctcgtgattcacccacctcagcctcccaaattgctgggattacaggtgtgagccactgcacccggccttaacaatctttttcaactacactatcttcttttttaacactggcctccaactcttggcttcttttatacaagggaattcccagtagtggttatattcttatgactccattctttgctaatcctaaaggcacccagaaggctgtatttaccttttcagattaaaatctcctatttaacttatgaccactatgtgcatatctgaggctataaatattatttctgacacccttctcaaatactttctgctgaaaattactgtgaatttggcttgtttccttatgacagttttttactcctaaccaggtgcttgtcattatggtatcttaagctaaaatccagaaacgcaaatctcattcttttactccatctcttaactcttcactcctaaagcctccaaaaccttgtgaagtcccagtgataaactggacaaagagatactgctgtttcctgacaccttcaacattctctgtgatctctagagctgctttctgtgtttcttctgatagtgtcattccttctcaaagtaggacgaatgaactgaggcaagcaagttaagggtctcaaaagattctctgttatgtgaacataccaggcagacacacatttagactggccagggcaagactaggtataaacatgcccatgccttgcaagtaattcatttccttgtaccgactcacagtacagagtctcttcattcttccagagttagataccactgtgagaggagcctcctatcatttaattcttcttcttctttttttttttttttaccctaacccctagttcttcttcctagcctttttctttttgctcccctattttcacaatttttttcattcttttcattgtcgtacagtcttagttccaagttttcttatgttatttccactgtgtgtctctcctggtctgatgagccagggttaaaattgaccttcacctctttttca

SEQ ID NO: 9711 - DNA, 1035 bp, Homo sapiens
aactttttgtcatttgagtaatgttaacccaaacaacatggtttttgttcttctttttggctgactttagggactgaaaggaggacttcaagaatgtccactgtgcttaagcaggtagtgccaggacatttggatgtaaacccatccaatagctttgctcaaggaggttagtaagattgattttataactgagcactgatgcaagcttaaaagcagaaagcatttttctagatagttgatattttaaatcaattaattatgattcaaattgttcttaattaccctcttctgaatgaatggtcaaatgtattactagcatgatgacagatgagcttagccttgtgggacaagaagtataataattgctgatgtcatatatattgataagtttgggagcattaagaggtaaggggagcatgtctaaatgatgagtcagccctgggagtactccctgatactccagatttgcagggcagaaagaccaatctatcacagaagtatagatagttaaggagaagtgattccagatcgaaggaactccaagtcctgttatttttgctcctgtcctctgaaatactggtttggaggataagacatcatgatatccaggtagctgctgacatgaggaaatagagaaaggctaagtattcattcttttaagctccaaaaggtcatccactttgttctctggaagtttatgtgagattcttttcactctgcagaggaaattccagaccagattcttttttttttttttttaagacagagtcttactttgttgcccaggctggagtgcagtggaactgtcatagctaactaactgcagcctccaactcctgggcttgagcaatcctcctgcctcaagctcccaaggagctaagactacaggtgtgtgccaccactcccagctaaatttttaaaatattttttgggacagagtcttactatgttgcccaggctggtcttgaactcctggcctgaagcagtcctcccacctgggcttcccaaagtgctgggattacaggcgtgagaaag

SEQ ID NO: 9712 - DNA, 1050 bp, Homo sapiens
tcagaaacaagttgggaatatagttttgagattgtggccaaataaacattttgcatgaagttctgaaaaattggcactctgagtatgcagtaatttttctggaattctccgtcattctaactaaattttctctgaagatgagtcatgttgtcggggtgtgatgtcctgctgtttggaaagtttgctatcaaaattatgccagccattgagaaaacagactcatttatcattccaatctgtcagaagtaaaataaaattttaatagatgacttattagaacactggttataaagcatttatgatggtaaaaagtaatatatatccattaagttattagcaggaaggaaatggaataataaaaaataatccaaaagaaggcaagaaaggaaaaaaaaggggacatagaacaaatggaataaataacaagtagtaagatggtagatttaaattcaaatatatccataattgcattaattattaattgactaaatgttccaattcaaagaaagagatcagggtttgctttaaaaaaaaaaaaaaaaaaaaagtggctgggctcagtggctcacgcctgtaatcccagcactttgggaggccgaggcaggcagatcacgaggtcaagagatggagaccatcctggccaacatggtgaaaccctgtgtctactaaaaatacaaaaattagctgggcatggtggcttgtgcctgtagtcccagctacttgggaggctgaggcaggagaatcacttgaaccctggtggtggaggttacagtgagccgaggtcaagctactgcactccagcctggtgacagagcaacactccgtctccaaaaaaaaagctttctgctgcttttaagggacaaatctaatatacaagtatataaaaaggtagaaagtaaaaggatagaaaaaatataccacgcaaaactacctttaaaaaaagttgttgtcactatatgaatatcaaagtagactttaaaagcagtaagaaaggatggttgataatgacaaaaggtttattttacacacagcaattcattaagatcaagt

SEQ ID NO: 9713 - DNA, 1050 bp, Homo sapiens
ggctcagggagagaagtaatggcagccaaatagaagctgggccttatgcttataaacattgagtttaaatgaggtagtataggtggcctagtgaagtcaggatattgtttatcctcagaagacaaagcaaataagtaaatctattgagggtaatggtagccaagtttttcacagatatagaagtgagtacaaatatggaaaaggagaaagctagaatgaatcatatggttttggatgaatttaagctaatgatgcttatctttttataaatactaaaataacagttggaaatgtgggtatacgtctatgtgtatatgaggggaggagttaggaatgcatacatatatttcctggctctgttctgagagagtctggcaacagagacaccctatagcaatgagcatgtctagtgtccagatcttggtttctaaatatgagtctactaaaaggaactaagaattcttgaagaaatggctagcagcaggagtagggcaaggaaaatataagaagggcttgaacatctttttatttcagaaagtacagaagtacttaaagaatcaatgaactctagttggatttttaaaaactgtggttaaatatatataacattaaacttactattttaaccatccttaagtatacagcttagtggcattacgtatatttatattgttgtgcaaatgtcaccaccatacatctccataactttttccatcttcccaaactgaaacttcctatctattaaacgataactcccgtttccccctgcccccagctcctggcaaccaccatgctaccttgtgtgtctatgaatttggctaccctaagtacttaatataaatgaaatcatacagtatttgttcttttgtgacttgctgatttaacataatattgtagcatgtgtcggaatttccttcctttttaaggctaaataatattccattgtatgtatataccatgttttgtttacccgttcatctgtcagtggacactttgggttgctgtcaccttttgcttattgtaaataatgctgctatgaacatgagtatg

SEQ ID NO: 9714 - DNA, 1048 bp, Homo sapiens
gtctcctcctctgaatttcatgatctcaggacacttttttttttttaatccctgcttacgagaagcattcctggttctccagttcataacacagtatcatctttggtccctgcaaggtcccttccttattttatttatttgtttatttttatcagcattatgctcccaatctccctcaagcatttaaatgtgcttttttaattgacagataaagttgtatatttatcatgtgcaacatgatgttttgaagtatgtatacattgtggatattttaatgtgttcaatatattattttctatgcaggtgtccttgaaaaatgtatattgtttactacatgtgtattttaatttatgtaaatggtgtattatgtatttcattgtttttgtcttttgtcagtcagcattatgtttttaataaaacgtgaatctcgagtaactctgattccaaaatcagatagatacaatataaagaaaggaaaaaaaagcccctttttcttatgaatgtaaatgcagaactcttaagaaaaatattggctaatctaatccagtagtgcattaaaaaagtaaagcgtcataatatagtggagtttaacctaggattctttcagtgtaatgcaccccattaatagattaaaggaaaagaattatgattatctcagtcagttaagaaaaggcatttaataaagtttaatgctatttatttaaaagttcttagaagctgttattagaaaagagcttccatgtttggtaaaacctacagcaacccttgtagttaatgaagaaactttatatgcattcctttaaaattagagcaagacaaagatgcttactattacactattaacaatgttattagtgtgtcagtagctgtcattatttttagatagaaaatcagatttctgatcctctacctagaaaatgtatgagaacaaactatttttactaataagatgactcagttaggttttcaaatataagattagcctataaaaatcaatagcatttattttcatcagcaaaaaacaactaaaaagtaaaattttttagaa

SEQ ID NO: 9715 - DNA, 1071 bp, Homo sapiens
taaggctgggcgcggtggctcatacctgtaatcccagcactttgggaggccgaggtcggcgtatcacctgaggtcgggagttcaagactagcctgagcaacatagagaaccgctgtctctactaaaaatacgaaattagccgggtgtggtggcgcatgcctgtaatcccagctacttgggaggctgaggcaggagaatcacttgaacctgggaggcagccgagatcgtgccattgcactccagcctgggcaataagagtgaaactctgtctcaaaaaaaaaaaaaaaaaaaaagtttaaaacattatttgacgaatataggttttgtattgatgagatgaaaggaatgctaatgagtaaaatatgatagtctttcttcttaggtatgggagaaggtgaagggattgtgcctttagaatccaaagagtagccataaaatataagtagtctttttggcttgagaaccattgatactattctcacttataaatgggagctaaataatgtgtacacatggacatcaagtgtggaataataagacgctggtgactcagaaggctgggagggtgggaagggagtgagggatgagaaattacttaatggctacaatatacatcattttggttgatggatacactaaaagcccagacttcaccactatgcagtatgtccatgtgacaaggctgcacttgtaccccttaaatttatgcaaaaaaaaactattgatactacctcatttaaacaaatggcatagtatagttctttgtgaaagtataaattttatataaatactactttcatttatatccttctaatattattttaataagttaaatttatttaggtaactagcttagtagcctaggtaatacactagaattttctaaccctatggtaaaaggtgaaaggtgctaggtttgcatgactaaaaagtgactttcctaagccagtgtaacagttcattgatcatgatcgtttctctttgtttgcactactttctttcaagtcccctctactcaaatgtgtaatatctaatattttgtggaatgtagtttttctttggtaatatctt

SEQ ID NO: 9716 - DNA, 1089 bp, Homo sapiens
tctattctgttccattggtctatgtttttataccagtaccatgctgttttggtgactatggccttatagtatagtttgaaatcaggtagtgtgatgcctctaaatttgttctttttgcttagtcttgctttggctatgcgggctcttttttagttccatatgaattttagaattgttttttctaattctgtgaagaatgatgatggtattccgatgaggattgcattgaatttgtagattgctttcagtggtatggtcattttcacaatactggttctacccatccatgagcatgggatgtgtttccatttgtttgcattgtctgtgatttttttcagcagtgttttgtagttttccatgtagcggtctttggactcctttgttaaatatattactaaggattttaacttttttgcagctattgtaaaggggttgagttcttgatttggttctctgcttggtcgctgttggtttattgaagagcttctgatttgtgtacattaatctcagatccggaaactttgctgaattcttttatcagttctaggagctttctagaggagtccttggggttttcaaggtaaatgattataaccgtcagcaaacagtgacagttttacttcctctttaccgatttagatgccctttatttctttctcttgtctgattgttctggctaggacttccagtactatgttgaaaaggagtggtgagagtgggcacttgttccagttctcagagggaatgctttcaacttttcccaattcagtattatggtgactgtgggtttgttatagatggcttttattacattaaggtatgtccctcgtatgccagttctgctgagagctttaatcataaagggatgctaaattttgtccagtgctttgtctgcatctattgaaatgatcatttgatttctgttttttattttgtttatgtggtgtatcacatttattggcttgtatgttaaattatccctgcatccctggtatgaaacccacttgatcatggtggattatctttctgatatgttgttggatttggttagctagtattttgttaaggattttagcatctgtgttcatc

SEQ ID NO: 9717 - DNA, 1055 bp, Homo sapiens
tatcagtgagaacatacaatgtttggttttccatccctgagttacatcacttagaataatagtctcctatctcatccaggttactgcaaatgctgttaattcattccttttcatggctgcacagtattccatcgtgtacgtgtgtgtgtgtatgtgtatgtatgcatatgtatatatatatatatatttggcacagtttctttatccactcattgatgggcatttgggttacttccgtgattttgcaattgtgaattgtgctgctgtaaacatgcatgtgcaagtatctttttcgaagaatgacttcttttcctctgggtgaaaccccgtagtgtgattgctggatcaaatggtaattctacttttagttctttaaggaatctccacatcattttccatagtagctgtactagtttacattcccaacagcagtgtagaagtgttccctgttaccacatccactccaacatctactgtttttttatcttttgattatggccattcttgcagaagtaagatggtatcgcgctgtggctttgatctgcatttccctgatcattagtgatgttgagcattttttcatatgtttattggctatttgtataccttcttttgagaattgtctattcgtgtccttagcccacttttggatgggattgtttttttcttactgatttgtttgagtttgttgtagattctggatagtcgtcttttgtcagatgtatatagattgtgaagattttctcccactctgtgggttgtctgtttactctgctgactgttccttttgctgtgcaaaagctcattaattaggtcccagttattcatctttgtttttattgcatttgcttttgggttcttggtcatgaaatccttgcctaagccaatgtctagaagggtttttccaatgttctagaattcttatagtttcaggtcctaggttttaagtccttaatccatattgagttgatttttgtataaggtgagagatgaggatccagtttcattctcctacatgtggctaaccaattatcccagcaccatttgttgaaaag

SEQ ID NO: 9718 - DNA, 1056 bp, Homo sapiens
cagattcatttttattcttttcaatatatgtagtatttcagaataactctctttgagagaaatatattttatgacagcatatatttatacatgaagggatttatataggctttgatctttttattgtatttctgttttgaccatttgtccgttaccaagtgataaattattatttcacattttcttttttcacagacagcattcttggggcagcgtggtttggtcgagaatgatttcctcactaaagtactcagtggaatggcatttgcaggttttgtttcagaaagaggtcctccttatagatcttgtgatctctttgatgaggtatagctcttattaaatgaaggcattatttatagacataattagactagtagttaaaagtaaaaagtaacattttccatatttatatagtcaaatataaattaggtattaaataatcccaatgttatttattatgcttatcaaatctcgatattttaatgtggattataaaaattacaaaaaattataagatgccttggaaatacatataatttttgaacaactgaattttaaataattgaacaatgtatactactcaggtgatgagtgcactaaaatctcagaattcgccactatgtaattcatccatgtaaccgaaaaccactcatactccaaaagctactcatattttaaaatattacattttaaaaaatggttgtttaaaatatttttgaaaatttaatagtgattgtataaatagaagtcttatttttaaaggccctaatacagtaattcttttgtcagtgttttagggagaaaggtctaatttgaagctaagatagctgaaattacttcaaactggagttacatttagtctatcaaaatcatagagccatagtttaagtttgtggcattctcactaatcaattatcaacatttctctacctgtcttaggagacattaaatatatggaagacaaatttttgtctctatcttcaaggaattagccatataaagggagaaatagggcagatgtgactcaaaataaggatgctgttttgcatttattgt

SEQ ID NO: 9719 - DNA, 1029 bp, Homo sapiens
ctccttttcctgagccctttcttcttccttctggtccttgatgtaaaagaccaaggcaactgttttgagaacatcaggcataggggtattggggcccagtgctagcttttggagtttcctctgaatatctggggctgcctgagttaggaaacggtcctgtaggaccagttgcccttctgatgtctctgggtctaggttagtatgtttcactagggcctcttgtagcctctctgtgaaagtgatggggttttcaagagggccttgatctattaaggccattgtattatagttcacagcctttgttctgctagcttttatcccttctaccagaggaacatgcggtttcttccccatatacctccctgggtattgtaatcccaattggagtcaaccggaggaactgtgatggctcctacagggtagccacccgggtcagtcatatgcattggatttgcaaattgttgggccacctccataatggaatcactttctcccttagacagaatttgccctagtatgactgagaaatccctccaagtgagttcaaatgttaatcccagtttacagaaccctttgatgtatttgtcagggtcctccataaagtcccatagttctgttgtaatttggctcaggccttacatagtgaatggagtctggtttctagtgggtccactggggctactgacctcttgaagggggcgtgacctaagagggtggtgtccagaggatagccctggatatggaggggctccgggcctgggagacttgaatataatgaggtagaaggggcagtggggtttgagccgtcatcttttgctcctctggggcttgaaaccagggtaaacccaataaggagtgtcccgaaccagccagagggggctgcctgactatggcagctatcatcactagatccattttacaagcccaacaaaggtcagggttgtttcatagggctatgaaggcctgtacataggggatttctatccatattccctgctggcggcaaagtaaatctagttgatagatcat

SEQ ID NO: 9720 - DNA, 1068 bp, Homo sapiens
ctggaatatcttcagggacgttacagaaattctatcctatgcttttttcccctgtttgtttataagaagtttttcctaaaacttacatgtcttattattcttgtgtactctatatctggcataatgcctcaggtacaaaaggcatcaatgtttattgaataaatgaaagaatgcactagctatgaggaagtggtaaccatattgtagatttttctgtgtactgatgaagtgtgccggaatacataataattggtcatttgaagatcaaattttattattttattttactctagtattttcagcttcattatcttttgcttgcatgttctaaattcacttttttctgggaaagaatggggaaaagataaggaagcaaagcagaaagaaagatgcagtgcagtgtgcagagttgttgtttccaaagcacatggtggtgataattctatataaaggcattctcttatcacctgtcattttgtttggactttgtcaaaggccaatattaggccattatcagagttcacgagctgggttgggggtagtggtggtagcggattttacaaagcacagacaggaagcagataagactataagatccttttgtaaccttgactagttttcctgtgaaaggtctaaatgtaatgatagcatttcctttgttcttctctctaagaattgttatgataatgaatttgtttttcacagtttaaaaggtctctgtgtttttctgaaataattatatggactctgccattccaagcttcactccctacaatttcctcttgatcgccttcatctcttgtttactgtcttgtgtttatttggtttttggtttttttgttttttttgtttttttggcagcctatgtgaactatttttgtttacctgaggattagtgttttaagtgtactaacaatgctgggatttttaatgttaataagtttgtattcacaggaactggtttttatagaccctgtgatattttaatctaatccatacccgtttaaacttgggtgtccctccctgccccaaataatcttgtaaaatgctcttgacatcttttgtcat

SEQ ID NO: 9721 - DNA, 1060 bp, Homo sapiens
cactaaaaaccactgaattgtatactttaaaatggggaatttatggtatgagaattaagaaaaaatgttactgttagaggcttgttaaaagaactcaggagccatcttgaagaggctcacaactgatctaagatgatagaatttgagcttcaaaaattacaataattgcagttggttgaaacccagcaaatattttaagatccatgaattcataatattaaaaagggattgtcacctacctcagaatatgataaagaacaatttatcttgaaaatttatcaataaagaaaaaaatgataaccaatagtagttgagggcaattatcttttttagaaagtcttctaattaataaagatgaaagaaatgatggaaatagagtatcattttgcaatcctcaatgaaccaagatctaagtatcaacagctgttaccacagaaagaaaaacaagcaagtattatgtgccgttataaccttaccaaacactacttattgttttgccaaagggattaaacctgagtctgatcacagaaaatgtagaaaatagaggaacacattaaactgcaccaagagaatgtaattaccaaaatgcaggctgttggaaactctcttagtcaaatgtcccaggttctttaacaatctagaggttcctcaacctcgagattgaaagagatttaaaagacatccaactttttaatagagtgagactaaactatagtgtctacggatgtacttttgggtgataaaaactgcctatagaaaaaaatcaggaaagtggataaatattaaataaaagcatggttactcttggcagtagagaggagattatgatgggggggtgggtacataaaaggggcttccaggggcttttacttttgctgggaaagttctctttcttgatgtgggtggtatttttaagataatttattaagccatacatttgatttgtgtggttttctatatctgtgttttataataaaaagatttttttaacttgtaaaattatttatgtcctttatgtgcataactaatatatttttaaaaccttaaaaatatgtattta

SEQ ID NO: 9722 - DNA, 1391 bp, Homo sapiens
taattttgtgggtcctgatcttacctactgttcattctttttaaaaattttaactcaggccccttttttccttaggtcagttagacttttagaaagtggatgggacgggtgtggtagctcatgcctgtaatcacagtactttgggaggccgaggcaggaggattgtttgagcccaggaatttgagatcaacctggacaacatagtgagaccccatatctacagaaaaaattttaaaacattagctgggcatgttggtgcacacctgaaatctcagctactagggaggctgaggtagatgtatcacttgagcccaaaaattcaagactgcaatgagctatgatggtgccactgtactctaacatagaaggaaagtggacatattttctttatgctaaaagatgaatagatgatatattttgcatttccatagatgaactgcttttgtggaagccttgtcagatgggactctgagtctcattcttctcatcccaccatctatctgaggactttatctccaatttttcggcaatggttaggatgaaagattgggaggattctagaaagtgtccactgtaccttggacagcttttacattatttaagaaatatataacttaaaaatgaggatatttcaaaccagggctgcccaaagattcccatttacgttacctctgacttgtcctttatatatcctgcctatgagtgtcccactctcattgctctccatctgtgtttgtcttttcctagttatgctgaaatcttcccttccctaaggtccataccctgcctcttcatggaattcttaatttcttgcacagaaattctaccctcttgcttccctcctgtctcttgttgaattttgcttgtagttttgctctgtatcttaccacccttttcatcagtgtccctatccatatacttctgctttaacttcaatcagtgaaagttagaaagccttagaggagattagtataaatataaatagagtcttctaatatctgaattaaaatgagtggtgatatcaatttcaaagtaattctttccagctacatttgcctcttctcatgccaactctaaaataatatctccctttggtcaaaagatacaaaatttcaattaggagaaataagttcaagatatctactatgcaacatggtgactacagttaataacaatgtattgtatacttgaacatcattaagagaatggattttaagtgttcttaccacaaaaaaaaagtatgtgaagtaatgcatgtattaattagttcaatttagcctatctgcaatgtgtacatatttcaaaacatcgtgttgtacactgtaaatatatagtttttgtcaattaaaaaattacatctcccttctcttctagtgcaagtttttactcac

SEQ ID NO: 9723 - DNA, 1040 bp, Homo sapiens
aataattttatcccaggagattaaacattctttggttcacatactgtcggactccaatttactaagcaattatttattaatttagccatcagagtttaaaacagagaatcactttaataaatgaagaaataatgtgaaaacagacatgtcaggttctcttatcaatgactttgaccagtgtatacaagataacagcatatcacttggttaagaacttttgaatctatttttgaccttgcagtggcctaagaacagttaaatgaacatttatttaacttaaacttttgctttgggagattaagtacagttcaactggaatagtgtttgttgcttatgcctttattgtttttatctgtatatctctttaattcttttctggattttttcagaaaaattgtctctactttattctttatactagtatttactcatgagaatcataaatggtaaatatagtccatgggaaaaacaagcggaacaggaagtactaagacaagctttgtcatataaagttttagaaaacatggtacaaactggagacttggacaaagtggcagacttagtaaaatatattaattagtaatgtaactaccatttaaatattctgagtatggaatttccaccttaaatatttgatcctataaaactgtttttttcaaacattgttctaccctgagaattgcaaaatatctactggcaggatatgaacttggaacagcagattgttctttttttagtagcctttttcctgcagatgtgactttaacagaggaagatgctgagtgttttttttttgtttgtttgtttgtttagttttgttttttttttttcttccagtacttcaggtgatcagcagaataaagacaatagttatttgctaaatgaaccttaggtaatttagagatagagggtgtataccatttaaaaatgtttgagattttctaatgttcttactaaattgcttattttctttgaaattcctctagggaaattttagaaattttaactcattcaattatgtcatctctgattttgggggg

SEQ ID NO: 9724 - DNA, 1055 bp, Homo sapiens
cgagaccacaaacccaccagaaggaagaaactccaaacacatctgaacatcagaagggacagactccagacacgccaccttaagagctgtaacactcaccgcgagggtccacggcttcattcttgaagtcagtgagaccaagaacccaccaattctggacacattaggacccctgtcgttcacgaaattacaagagttttaggagctttgtgttagaaccaggggcagaaaccaaatatatatatttggtttgttccattgaccactaggtcagtggaacagaacagcaaacccagaaatagcctatccaattacagccacctggcttttgacaaaggtacaaaaacaattcaaaggaaaagaatagtattcttcagaagtggggccagtgcaattggatatccatagacaaaaaacttagaccaaaaaaataatcttgacctaagactcacagtggtaccagagtaactcaaaatggataatagactgaagtttaaaatgtaaaactataaaacttttaggagaaaacatagaacatctttggaactaaaacttggtgaagagttcttagacatgacacaagaaacatgatctataaaaaattgctaaattggaatgtattaaaattaagaacttttgctgtgctaaataccctgtaatgagaatgaaaagactaggataaaatattggcaaaccaccacctgacaaaagacttgtatatagaatagataaagaactctcttggccgggcgtggtggctcatgcctgtaatcccagcactttgggaggccgaggtgggcagatcacttgaggtcaggagtttgagaccagcctccagcctgaccaacatggagaaatcctgtctctactaaaaatacaaaaattagccagatgtggtggtgcatacctgtagtcccagctacttgggaggctgaggcaggagaatcgcttgaacctgggaggcggaggttgcagtgagccaaggtcacagcattgcactccagcctgggcaacaagagcaaaacaagagaatatataaagaactctcaaatcac

SEQ ID NO: 9725 - DNA, 1066 bp, Homo sapiens
tgctacagaaaataatgaatcacaaaaagaactaaaaatatagtttattggctgatagctataaaagtatgtgttcctgaacgtttagtgaagatgacagtaatagttgattaatgttgactattcattggaaaatgaaattatgggtgatataggaatcatatgcatagtgacagcaatagacctatttaaatataaagaggaagatgggcaaaaattacctgcaaagctagaaatttcttctgtggtagccaaagtcccccagtccataattttatgttatactcaataatttaatttatgaaaaacagtagaaaggttattcaggaaatcatcacatttcttctaaatctaaaagtttcttattgtagtaaaagttgtacatttatgttttaagttaaaatgaacagagatgtttatcattttttctgatttcctacatttgtcaactagttggagtaatcagattaacctgctgtatactttgcgatctataaggaattatgtgaatgggagttattataaccaagaaaataagctctatgcagtagtaacatttgaataccacttttaccattttcaaagatattttgggtgtgctgtttctttgactttcaacaacatggggaggaaaggaatcctaattaaagatatcaatggatatatggaaccttgtgctcttcctccctaatcagcgaaaaaagatggatccagatggctgagcgagcaaagagatgccaagggattttctggttagcattatagaacctctttagaactagattactggatatttttagaggtataaagtattgtgtatgtatgcatagatgttttcaaatgttattgcgtccctgaaggcaagagactgtgtattttggaatataagatttgataacatatagacatgttctccaagggaaatacatgtcaacctttagcatagaaagttgggaagaaccttctacttttttaggagtcttacaagaaatgctgactggtgtttctataatgatttcatgccaattccagaaggtttaagtcatatgtgattaataatttaata

SEQ ID NO: 9726 - DNA, 1060 bp, Homo sapiens
ctgtgcttaatacgtttaagggggaagaagacttagtatgtggcagagaactagaaactaggaattacatcaaatacgagaactgaaaaagtatgataactgaaattagcaactcagaggattgacttagcaacacattgagtattgttgaagaaaattcgtgaactaaaatataggccagaagaaaataccgaaactatttcatagggattttcttaaaaaaataaaaaatacagaaaagagttgataaaatgatcctgtatgtggaatactttccagaatctccaaacactactaaaactaattaaggatttcttagaagttgcaagataaaagatcaatttacaaaaattatttttgtataggatagcaataatctattggaattcaaatttatatgtaaatgcaaaagacctacactaggcaaaacaactttgaaaagtaagagcaaagtttgaagacttccactaattaacttgaagacacattgtaatgattaaaatagtttaatactgtagacaagatagacgataaacaatattaatttaatcaatagaactaaatagagaatacaaacatagacccatacatatatggacaaccgatttttaaaaaaaatgtataaagattattcagtggagaaaggatagtcttttcaacaaatggtgcagaataactgaataagcatattaacaaatgatcttcaatccatctctcagtgtattaaaaatgatccaaataaatcatagacctaaatgtaaactctaaaattataaaacttccttctttcttttttccctgatcaatctataaattttgttgatcttttcaagaccagctttcatttatttttttctgttacttttgttaccactttcattgatttccattctcaactttattattttcctccttctgcttacttttgggttaatttgcattacattttcaagtttttaggatagaagctgaagtcattgattggagacctttattcctttctggtaaaactgtttagtgctataaattaatctttaagcgctgctttaactgcatctca

SEQ ID NO: 9727 - DNA, 1534 bp, Homo sapiens
gattccatttgtcaatttttgcttttgttgcaattgcttttggcatcttcatcatgaattctttgccagttcctatgtttagaatggtattgcctaggttgtctttcagagtttttatggtttggagttttgtatttaactctttaatccatcttgagttaatttttgtatatggtgtaaggaaggggttcagttttaataatctgcgtaaggctagccagttattccagcgccatttattgaatagggaatcctttccccagggcttgtttttgtcacgtttgttgaagatcagatagttgtaggtgtgcagtcttatttctgggttccttgttctgttccattgatccgtgtgtctgattttgtggcaatcccatgctgttttggttactgtagccccgtagtgtagtttgaagttgagtagcatgatgtctcagccttgttctttttgcttaggattgccttagctatttgggctgttttttggttccatatgaattataaaatagtttttttctagttctgtggagaatatcagtggtagtttaataggcatagcattgaatctgtaaattactttgggcagtatggccattttaacaatattgattgttcctctgataagcatggaatgtttttccagttgtttgtgtcatctctgatttctctgggcagtggtttgtagttcttcttgtagcgctcctttacctctctggttagctgtattcttaggtattttattctttttgtggccattgtgaatggaagttcattcctgatttggctctgtgtgctgattggtccatgtgtggccacaggcaggcctggaaaaagcaccatctggctggctgaacagccatcaatgaagttctcactctgagccccagacttcacccagaactgacgtgccaacttcacccaggactggatggcctggaccccaggcttcaggctatccttggcctgaaggtgggggtttcaccgaggaccggccccttcatgcctggtaacctttctgtcttccactgccatcgacatgctgtccacgatgcccaggctgttcgcgccgaggggcagctgcaagcctgcacccatctgtcttcaccccaggccaccctcccatgctcgctggttaccatggttaccaaagtccagaggtgggtgagtcagcaaagggctgtcatgtcagcaccaccctgagtgcacacacctggccaggtggcgacagcatccaggctcagccacagcttttctctgaaatcagagtgggcactgggagcgaggagaggccagggaacaggagcaggcacttccaagcctgtggggatagggggggcttcctgggcttccgagagtgcagggatgcccgggtccagagctgcagctgggcggctgcagctgtgcctggtagcacgggacttggtagggggcggggctcccacctgtcccacccccgtgggctctgtggaatgcacagccccagccacacgtccctgactgcagctggcatccccacaggggctcctccaaactg

SEQ ID NO: 9728 - DNA, 1050 bp, Homo sapiens
ccatttggtagtctttttagtcttcaaactgtctcagtgatactcagtggaaccaagatagattaaaggaagcaccgtgctcccgtaacagttatataaattaggattttggtaactgaactaagagcgccccactccaaagtgtaacttatgtgttaaaaggtcacttgattcagctactgtctttgactatcgattctattaaatatttccagtgctaaaatcttaaaggctgtgtgtttcttttgaataggaaatgtgattgatttcttttagtttaaagttttgcctatccaatttgtgtttggtatatatctggaaggaagagttaatatataggctggaataatggactgaaattaataaagtgaatttttttgaggaaatgtaaaatattttattataattatgtcctacaaaattatgatgtaagacctgcagttcatgtgaaaaagacctagatgttttattaataaggctggcatgagctattagcttatagaaaagctgatgcagtttttgactgtggaatatccaagatggtgacaatatgagtgggaatggagtatttaattgacagggtttggttggatgactaattgaatatggaatgcactgaggcaccaaaagttatctcactgattcaaatttggataactgggagagaagcactaccttgatagagtagtgagaagccagaaataatttcagctttgtccagcttgactctctaaatgaacttaaggtataacacttacaaagtaatttggtacagtggtcaatatcatggactctagaacagtcttgttgagttttagttctggcttctccacttggtaacactgtgaccttgggcaaattatttaaaggctctatacctctttttatcagtctaatggggataaacttcatatactatataccaggaaccattttaagcactctatgtatattaagtcatttgatccttatgtatctattaaatgtttccagtactaaaatcttaaaggctctgcatttcatttgaataggaaatgtgattgatttctt

SEQ ID NO: 9729 - DNA, 1098 bp, Homo sapiens
ataaagatcggagcagaaataaattgaaattaagaaaacaatacaaaagatcaacaaaacaaaaagttggtttttttgtaatgataaaattgacaaacctttagcctgagtaagaaaaaaataaagacccaaataaataaaaccagagattaaaaagaagacgttacaactgatactgcagatattcaaaggaccattagtggctactgtgaccaactatatgtcaataaattggaaaacctggaagaaatggataaattcccagagatttacaacgtaccaagattgaacaatgaagaaatccaaaacctgaacagaccaataacaagtaacaagatcaaagccgtaataaaaagtctcccagcaaaagaaagcccaggatccagtggcttgactgctgaattctattaatatcaagcttttaaagaagaactaatgcaatttcgactcaaactattccaaaaaattgaggaggagggaatacttccaaaccttattctatgagactagtattactatgatgccaaaaccaggcaaagacacagcaaaaaagaaaaccataggccaatttccctgatgaacattgatgcaaaaaatcctcaataaaatcttagcaaaccaaatttaacaaaatgtttaaaagatccttcatcatgaccaagtaggatttatcccagggatacaaggatggttcaagacacacacaccaatcaacgtgatacattttatcaacagaatgtacaaaaaccgtgtgatcattttaattgatgctgaaaaagcatctgataaaattcaacatccctttatgatacaaactgtttaaaaactgggtatagaaggaacataccttaacacaataaaagctatatacaacagattcacagctaatatcattatgaatggggggaaaactgaaagcctttcctctaatatctagaaggtgacaaggatgcccactttcaccactgttattcaacatagtactggaagttctagctagggcaaccagataagagaaggaagtctagggcatccaaattggaaaggagggagtcaaattatccttctttgcagatgatggatcttatatctggaaaa

SEQ ID NO: 9730 - DNA, 1058 bp, Homo sapiens
aaaaagtgggggaacaaagttaaagtatagagtttttatttttctttttgcttgcttttatgcaattagtgttaacttgtcattaaagtaattggttataggatattatttgcaagcctcatggtaaccttgaattgaaaaacatacaacaaatacacacaaaacaaaagggggtaaaaataaaaataaatgaaaacataccaccagagaaaattaccttcactaaaaggaagacaggaaggaaacaaggaagagaagactgcaaaacaaccagaaaacaaataacaaaatggcaggagtaagtcctgccacatgcatccaacactggagcacccagatatataaagcaaatattattagagctaaagaatagacaccagtacaataatagctggagacttcaataccccactttcagcattggacagatcgagacagaaagttcaataaagaaacatcacacttaatctgcactataaaacaaatgtacctaatagatatctatagaacatttcatccagcagctacagaatatatgttctcctcagcacatggatcattctcaaggataggccatacattaggtgacaaaaataagttttttttgtttgtttgttttgtttttgtttttttttgtttttttgtttttgttttttgtttgttttttaatttattattattatactttaagttttagggtacatgtgcacaatgtgcaggttagttacatatgtatacatgtgccatgctggtgtgctgcacccactaactcctcatctagcattagatatatctcccaatgctatccctcccgcctccccccaccatacaacagtccccagagtgtgatgttccccttcctgtgtccagctgttctcattgttcaattcccacctatgagtgagaatatgtggtgtttcgttttttgttcttgcgatagtttactgagaatgatgatttccaatttcatccatgtccctacaaaggacatgaactcatcattttttatggctgcatagtattccatggtgtatacatgccacattttcttaatccag

SEQ ID NO: 9731 - DNA, 1049 bp, Homo sapiens
ggtgaaaccctgtctctactaaaaatacaaaaattagctgggcgtggtggcgcgtgctatagtcccagctactcgggaggctgaggcgggagaatcacttgaacccaggacacggaggttgcagtgagacgagacatcgccactgcactccagcctggcgacagagcaagactccgtctcaaaaaaaaaaattaaaaaacaacaaacaaacaataacaacaacaacaacaacaacaaaaagacatagaaaaattagctggacatggtggtgcttgcctgtagttccacatacttgggaggctgaggtgggagggtcgcttgagcccaggaggcagagattgcagtgagccgagattgcaccactgcattccagcctgggtgacagagtaagaccctgtcttaaaataaacagacaaaaaaaaagtcaggtgattttgacaataagacttctttcttgaagttttgattgctgtaaatggtagccaacttgagatattaaaatcattatgtgaaagactttgtgatatgcaagaaagaatactgaactctaggattttatgtatctgtatgtttatatttatgtatatatagagaggtgtatatttaaatacataatttgcttataaaggacaacagcaatttgagagaacaccatctctctaggtcattcctgtaggtcatctctctaggtctactttcaaaggtacgtaaggaatgaatttttatattacctacccccccattttgatctcataaagctttttgtcgaattatacatctatacatccatacatcctaattactgtacgaaatatgtttacatctttttgcttgactttgaataattctttgagagtttccagttacggatattaccatgtatggtcatctccttgtaacttagcttaatttaaagtacctttaagctagccagaataacttgcaaatctgttgatttaataagatgaagtatttggtggcctctagtggtacttatgtgtctataaaaagtcaccaatgtacaaaattttagggtgagagttactaag

SEQ ID NO: 9732 - DNA, 1049 bp, Homo sapiens
aactctaaaaaaagccccaaaacaaaacaaaaatcccagaaaataacaaatgttagcaagattagggagaaactggaactcttgtgcactgttggtgggaacgtaaaatggtgcagccactatggaaaatggtatggagagtcttcaaaaaaaattgaaaataaaattaccatatgacctaacaatttcacttctgggtatatcctaaaagaactgaaagctgggattcaaacagatattcatacacatgtttatagtagcattgttcacagtagtcaaatggtggaagcaacctgaatgtccatagacagatgaatagacaagtgagatgtgatacacgtgtgcacgcacacacacacccccccccagaatattattcagccttaaaaaggaagaaaattctgacacatgttacaacatgtgccaacatttgttgtgttatgcaaggttcaacctgaaggatgaaccttggggacactatgttaagggaaataagccaatcacaaaaaaacacaaatactaggagatcgagaccatcctggctaacacggtgaaaccccgtctctactaaaaatacaaaaaattagccgggcgtggtggtgggcgcctgtagtcccagctacttgggaggttgaggtgagagaatggcatgagcccaggaggcagagcttgcagtgagcggagatcacgccattgcactccagcctgggcgacagagtgagactccgtctcaagcaacaacaacaacaataaaaaacaaaacaaaatactgtgtgatttcactaatatgagagacatagagtaatcaaattcatacaggcaggaagtagaatggtggttgccaggggctggggaaagggaggaatggcaagttgtttagtgggtatagattgtgaattttgcaagatggaaagagttttggagtttagttgcacaacagtgtgaatgtacttaacactatctgaactgtccacttaagattgttaagatgataaattttgtgttatatatattttactgtagttaactttttaaaacagtatgaaata

SEQ ID NO: 9733 - DNA, 1068 bp, Homo sapiens
acaaactaacatgtgaagaattcgaaggaaccagccatgtatgcagaaaggggagtaaaccagtttgaggggacagcctattaaaaaaactttaggtatgaaagaacttggtatgttcaaggaattgaaaggatgcttctgtggctggaatatagtgggtgacattgaggctagaattggatgaatgacgttgtggaggtaggggccagatcatacagatcttgtaagcttagtaaggagcttagattttattaaaagtgcaatgggaagcaaatgaagtaaagtgacatgatctaatttattttggctgttgtgagaattatggatggggagtggggagactaataagaagtgatggtggctggatctagtgtaaaagcaatagagattgagggaaatgtatgcattcaaaatatagttgaccatttaacaacatgagcttagacaacatgggtctacttatacatggatcttttttcaataactatattggaaaattatttggtgatgtgtgacaatttgaaaaaacttgcagacaaactgcatagcctagaaatattgggaaaattaagaaaaaggtgttgcatgaatacataaaatataagtagatactagtctatcttaccataaaatatacacaaatctattataaaaagttaaaatttatgaaaacttacgccacaaacactgtagactatacatgacaccattcagttgagaaatgtaaacaaatgtaaagatacagtattaaaactgcataaaatatactgaagtatatactgtagtattgttaataattttgtagctgcctcctgttgctattgtggtgagctcaagtcttgcgagtatctgcttaaaataccttaaaataccatatgatgccagtcatctccaagtgaacagtttatctctccagtaagttggatacgatagttaaaaattctcactcttgattatttttcatcatgtttagttgaataacactatgggactcatacacagtgccactagcgatgctggaagtgttcctgagaaacagacaaaagtcatgccattacaagaaaaagt

SEQ ID NO: 9734 - DNA, 1028 bp, Homo sapiens
acattattatgtttgttagaagtttgttcccttttttgctgaatgatattccattatgtgaatcaacaagtttgcatatccattctattgatgaatacccggactgtttccagtgtttggcaataatgaataaactgctatgaatattcttataagtgtttttgtgagtgtagtttttaatttcttttgggtaaatacctagcagttgaatttttgggttataggtgggtgtatgcttagttttataagaaacgaccacatcttttcccaaagtggtataccatcttatgtctccaccgacaatgtatgagaattgcagttggctgggcacagtggctcacgcctgtaatcccagcactttggggggccaaggtgggcagatcacctgagcctaggagtttcagaccagcttgggcaacatggcaaaacccgctctccacaaaaaatataaaaataagttgggtatggtggcatgtgcttgtagtccccactacccggtaagttgagacgggaggattgcttgagcccaggaggtggaggttgcagtgagcaaagatggtaccactgcactccagcctgggtgacagagtgagatactgtttcaaaatcaaaacaactacaacaaaaagagaatttcagttactctataatctcatcagtatttggcatcgtcagtctttttgattttagccattttgaggtatatgtactagtatctcattgtgattttaatttctagttttctctgctgattaatgatgttgatcagtttttttcttctgctctttggtgaagggtctgttcagatcatttgcctattttataattggattgccattttattacagagttgttactacttacgtagtggtgcttaaatattggctatttttttttcttttctccctctctccctccctccctccccttctttcttttcttttttgaggcagggtctctctgttgcctaagctggagtgcagtggcacaatcacagctactgcaatgtcagactcctgggctcaagc

SEQ ID NO: 9735 - DNA, 1050 bp, Homo sapiens
agaaagtaaagtgtggtttcttccagcattatgtcattataattcacacaaattaaaaaaaaacttgaatttttactatatctgatacttccagcttcataatttttctttgggggataaaaatgtgtaattattattaaaaccatataaaatatgaataatgtgcttattttcttttgtctgaaatgttgatttattgtgctgattttttttatttaaaaggataacagaagattcttgaatgatttatcaattggccttcaataggtatagaaagaaggtatctataaggaggagattttaagattctaaatgtatattgtatataattttttaaaacagggaagtagtacaatttctttaggattaaatgttgtattgaacactgataaaatatttattaattttaaagaatgtcattacttgttaatgcaagtttttttttcgtcttatatggtagtaaaattatagactccctgaggatccttttatcctcaggtaaagaatctgagacctctggtgtcatagctctttgcagaacatttagagaaagcatcaaccaattatttttgcatagatgaactattaagttgaattcagcaggtataggatatttcattaatcaaggactcaaaaaaatcaaggatacttggttaaaagtttttagctttcaatgtgtgtgtgtagtgtatgcatatacatctatgtatttacattttagttgactgacagttgtcttttggaagttacggtttataaaataaaataatttatacatacatagaaagcataataaacagatcactaaactcttttctaccctcgcatcagagagcagcccctaagaggcttatagtctattttataaggatgagatgtctgtggaaagataattatcatattgccaggtgagtgctctagacagtaagactaggttcagaaggctgagggtgacaggaaagggctcatggaagtagtttattttgagttgcactttgaaggattggatgaggctttttttcctctacaacatttgattatgaaaaattt

SEQ ID NO: 9736 - DNA, 1052 bp, Homo sapiens
tccctattctttcaggacaaatgtgacggtcacttcacagtgacatgacttgtcttttaactaaggacagccagctgaccgctgaaggtgatcttgtttcactttaatgtgttttcattgttctttttatttgtcacagaattttcgtcgtaaggaacaattgggcaaatgcattgtattttacactttaattgacggacttccacaacttaagagaattcagggttcatgcacgtttatttctgtatttgtattctcttgtattactatgtagctaagcataatgtaataacaaattgagctgggaaaccacttctattttagggcaattctagtcccacatttgcaaggaatttgagatatcagctctacagccccttcatttttcagagatgctgagattgtgttttcctgatggttacagccattggtagctcagaataccattgttctacccactcttggtccactctctctttcattattcctctcctaagaacttcctctcctttagtgggaacctttcatgttcttttctctttcaccagtcatgacctgattgaggtcaattgttaaagagaaagtttaaatgtttaaacttctggatccaaaattttatttcctagtaatttggcatagtctgatgtttcttttctatcaagattaagtgtgggaaatcagttttttaacctttagtttttagtgacattgttccgcctccccccctccccacttttaaacaattttttttttttttttttttgagacggagttttgctctgttgcccacgctggagtgcagtggtgcgatcttggctcactgcaacctctgtctcccgggttgaagcaattctctgcctcagcctccggagtagctgggatttacaggcgcccgccaacacgcccgctaatttttgtatttgtagtagagacgggatttcaccatcctggccaggctggtcttgaactcctgatctcgtgatccaccggcctcggcctcccaaagtgctgggattacaggcttgagccaccacgcccggccaacaatgttg

SEQ ID NO: 9737 - DNA, 1058 bp, Homo sapiens
tctttcttgaggcagcacggcacagactctagcagcaagttgcctgtgttcaaatcctggctccactcctgtgtgatttttttgacaaatcaaactgtttcctcagtttcctcatcttctaacagaggttgataactgtagtatatgctttataggatttttgagagaattaaaagacataagatgctcagaacagtgcttgacacataataatttgtctataagagttaactgtcattattattgttactatattctatttattgttttcaatggctgtgccctctggaattcctccaaacaaatctgttctcttttccagcctttcaaatatttgaaaacagtcatcaaattctcactgaaccttctgttctcaaggataaacacccccagttcctttggcctttgtttatgtgggtctcgtctacatactggaggctttcccagatggtcttttctctgtcagtatgtgtgcctttcagagtatgaggcatagaaccaaatattccaatctacaggtgatctaacaggaacaaacagcacaagactctccttccttctggtcactgtgctgctaagaaggtagcaaaaagttaagagaactttgtactggttccactggctatttctgtatctcccattcttttatctctctccacaatgctcttctttgtagtcctctgcttctcacttttaaagtccagccttcagaatattctttcactctgtacagattcagttatattctctgctactgagaaactcagatacattagacccatatccatctaggtttttattcagttttcccattccaattcagtgacttccctcttttccctgttactaacgtataacacttaatctattaccacataaaagatttgtcttttataatgcttcttagacctaattatctctcagatgaattgctgaaataagatcctaaccagttttcctctttctagactgtccctcatactgcactcccaatttatcttcctgaagtaccatatcagttggagttcacttccccttgattatacactgattgtagt

SEQ ID NO: 9738 - DNA, 1297 bp, Homo sapiens
gaccagtgtcccaaactggaggttgacatccctttggtgaaatcctatttagcacagtttgcagctcgtgccatcatttcagagctggtgagcatttcagaactagctcaaccactagaaagtggcacccattttcctctcttcctactttgtcttcagcagttagctaaattacaagatcgagaatggttaacagaactttttcaacaaagcaaggtcaatatgcagaaaatgctcccaggtaagagaatgctgacttgtttgttttgtttttttaatattatatctagagatttcaggtaccttgagtggatttatgtaggtcagacagtctgattgtcctgctcagataatgataaacattaccacagatctcacctataaagagagatttataatttaactactttcatttgatccgtatgttgagtttttttcatttgctgggttggttctctattctgctacatggatcttacatacttggggacatcatttgtgaagctctgctctctggacaggacaacttggtaaaatgaactattagatgatgcaggtggctttgtctcttcagaaattgatcagaataaggaccgcatgttggagattttggaaggaaagggactgagtttcttattcccactcctcaaattggagaaggaactgttgaagcaaataaagttggatccatcccctcaaaccatatataaatggattaaagataacatctctcccaaacttcatgtagataaaggatttgtgaacatcttaatgactaggtaagacgaatggttttctgcatatggtaatgtttcatgtactggaaaagaagcgtaggagactaagagttgtctcttgagcaagaaaactcactgttgggttctaacaagacctctttctgtccagcttcttacagtacatttctagtgaagtaaacccccccagcgatgaaacagattcatcctctgctccttccaaagaacagttagagcaggaaaaacaactactactatctttcaagccagtaatgcagaaatttcttcatgatcacgttgatctacaagtcagtgccctgtatgctctccaggtgcactgctataacagcaacttcccaaaaggtgagaggacttgtatcagaagaacggcgtgaggaagttcttaaacagaacactaaataatgggcttattacttttttctttttttttttttttttaaggcatgttacttcgcttttttgtgcacttctatgacatggaaattattgaagaagaagctttcttggcttggaaagaagat

SEQ ID NO: 9739 - DNA, 1141 bp, Homo sapiens
atcatgcctcccacacaatcgcagtttggagagatgggaggcaagtttatgaaaagccaggtaagtaatatttgagtgtgcatgttttctaaaccttatctgcaacatttatttcaaactgaaatgtttatccttaagattagtaaagtattagtaaaatcacatcactttatttgataggttagatttttattcttccctgtttcatcttttactttctctgggcaaattcagttaaactaactttatggcttggctcatccctttggtacttgattaccataatttgtggacccctttttatctagactttctttctccttttctgaaataggggctaagccagctctaccataaccagagtcagggactcttatcccagctgcaaggacagtcgaaggatatgccacctcggttttctaagaaaggacagcttaatgcagatgaggtacatttgcctatgttacttatataccatagtttgtccattcagaaatttattgcccgatgattataaaaagacgcgttattaagaggactttatgctggagttcttgacgtttttctctcttttctatacttctttttctttctttgaatgtccagcgtcctgtgagcgaagattatgagatatgagggcaagtctcctaaagtctgttagagcaagaaaactggttgtcaaaatattgtggtttctttctttgtaagggtgatttaactaaggataaaacagggcattttctaaactgtagttaaatttgcagttttttatttgaatattttagtcatgctaattctaagagaatgtaagatttataatagtatcttactactgtatgcatcagatctttaaattttttgccaaaaattaaacctgttaatgtggagtaccttctttagtttttcaaaaagcttaatgtttccctagattctgtcactgtataggattttagaatgttgtatttaatatgttcgccaactgcatgttgttaatttagatatattttgttttcaattccagattagcctgaggcctgctcagtcgttcctaatgaataaaaatcaagtgccaaagcttcagccccagataactatgattcctcctagtgcacaaccaccacgcactcaaacaccacctctg

SEQ ID NO: 9740 - DNA, 1443 bp, Homo sapiens
ggaacagagagccattgctaagatcaagatgttgggaaacatcaaattcattggagagcttggcaagcttgatcttattcacgaatctatccttcataagtgcatcaaaacagtaagtgtgacagggaagttaggcgaatgtagtcagtcgtttggaggaaatgagtcaattattcatctaagagggaggttgactagttaaatacagatgtgcaacaaaatttactaaacagaataatttgaaatacgtggtgtgtttgacaaagtagagttagaactgatcaaccagactggtagaaagccctatactagattctgtaggaactgtgaatgagtcagtgcaaacataaagggaaagaaagtactacgcctaaaccagagtaactaaaactttgtcaccatggccttttattcttgtagcttttggaaaagaagaagagagtccaactcaaagatatgggagaggatttggagtgcctctgtcagataatgaggacagtgggacctagattagaccatgaacgagccaaggtacgtgtgtagctgatgaaagtagtacaagtagtttgtctttaaatcaagctattgatttttgtgacatcataagggattgccatatttagccattaactgggttataattttagaagtcttaaagctgtaaattgaacacatttgctttagctcttccaatgaatgtattcttctcttatcagtccttaatggatcagtactttgcccgaatgtgctccttgatgttaagtaaggaattgccagcaaggattcgtttcctgctgcaggtaatactggtttctttaaatttgttggtaagctgagtttttggtttaggaatattaaaataaaattatttttcaattaaaggataccgtagagttgcgagaacaccattgggttcctcgcaaggcttttcttgacaatggaccaaagacgatcaatcaaattcgtcaagatgcagtaaaagtaagattgggttttgttttgtttgtcacatagactctgtgtgtgtagaatagaatgggtttcctcctcacccaccccaaacgcttgaggggtctgtctcatcttagtggtggagcttaatgtttttagtgtctcgtcttccacttttatttttttattttttgagacggagtttcgcactgtcacccaggctggagtgcagtggcgcattctcgattcactgcagcctctgcctcccaggttcaagtgattctcctgcttcagcctccccagtagctgggactataggcgtgcgccaccacaccccgctaattttttgtatttttagtagagacagggttccaccatgttggccaggcttgtcttgaactcctgacctcatgcaaaccaaggcttgggcctcccaaagtcgggggattacagatgtgagccatcatgcccagccttgtctgccatttttgg

SEQ ID NO: 9741 - DNA, 1044 bp, Homo sapiens
cattagaaagtgtttattggcagccggtacagtggctcacacctgtaatcccaacaacaactttgggaggcaaaggtgggagggtcgcttgaacccaagagtttgagatcagcctgggcaagacagcaagaccccatctcttaaaaaaaatgttaattttcaaaatgtggttccacagcgttgatactgggaatatttactagacatgcaaattcttaggccccaccccaaaccagtgaaagcagaaactgggtgggcccagcaatctgtattaacaagcccttcaggtgattctgatgcacactactgttccagaagcactaatttccagagttggctttcttggaggggaagtcgagaaagcctaaattacttttttctatgtaagagaatttatgatgtttaacatttggtgtgtgacaataagtgtttttgctgatttttattaatcagcgagttcctggggaaaaccccagggcaaaacgctcagaaatggattcctgcacgaagcactagacgagatgacaactccgcagcaaacaactccgcaaacgaaaaagaacgacatgatgcaatcttcaggaaagtaagagggtaagtttcaaggtctgttttactaaaagatgggaagtgtggattagctgtgtttggtgtgtgtgctgtattactaagaaggcaaggttcatgcccagagtatgtatgttttaatgaatcctcatggtagcaatttttaaaaatatcttgaactggccaggcactgtggctcacgcctgtaatcccagcactttgggaggccgaggtgggcagatcacttgaggtcaggagtttgagaccagcctggccaacatgttgaaaccccatctctactaaaaatacaaaaattagccggacgtagtggcaggcgcctgtagtcccagctactagagaggctgaggcaggagaatcacttgaataccccacaggtggaggttgcagtgagccgagatcacgccactgcactccagcctgggtgcagagcaagactgtgtctcaaaaaaaaaaaat

SEQ ID NO: 9742 - DNA, 1050 bp, Homo sapiens
acgcacagggttcgggggaggtaagggtgcgttttcttcccatattcccggtgagaaaacgaggtcgagggaaaaggggatgatacaactggagcatggcatatggactcagtgaacaaagggactggagcaagaagcagcagccacgccaacgcagactcaaaagggctctccggctttacgcacgcaaccctcatctcgacagcgctcggcgccccttacgccactggctcagcctcagagacttcgcgaatatggctttgcgcactgcggcggggctgcgccgcaaccgagctcagccctgtggctcctcctcgctgccctgcgcggattggtggcagacggcaaccgggccgctgattgggcggcgaaggagccattcggggagactctggtgggttcggctgccccaagagtgataagttcggcttcagacacgccttagcgccagcagtgagtcggagctctatggaggtggcagcgggtaccgagtggcggctgcagcagcgactcctctgagctgagtttgaggccgtccccgactccttcctcccccttccctcccccttttttttgttttccgttcccctttcccctcccttccctatccccgacgaccggatcctgaggaggcagctgcggtggcagctgctgagttctcggtgaaggtgagttgagccgctgccgccgccgagtggagcgctctaaaatggccgccgtccctggtcgcttcttctcgagtggtacaaaatggcggccgcaggcggagccgggtggggcgacccttttttagcatttcctctgcgcttcagatacctggaaagtcttggcttttgttctctcttcctgttgctgacggagtagaaggaaaacgtcagtgttggccaggccgccgtgcggtcatggccggatggccgacgcctgcagggacgaggccgtggcggaccgaggcacggctgtgctcggacggcgagggagcgtggctcggaccgctagcgccgtggcgggaggcacgcgggccggcagggaaggccaggccgttggcgcggg

SEQ ID NO: 9743 - DNA, 1081 bp, Homo sapiens
aaattggaattttgggcctcatctgtagaagaagaaaactttgattgttttcctacactcagtgattttttgactgaaattaattctacagttgataaagatatttgcagtgccattgtgcagcacctaaggggtttgcgcgctactctgttaaaatactttcctgtaacaaatgacaataatgcttgggttagaaatccatttacagttactgttaaaccagcttcattagtagcacgggactatgagagcctgattgatttaacatctgattctcaagtgaagcaaaattttagtgaactttcactaaatgatttttggagtagcctaattcaggaatacccaagcattgcaaggcgtgcagtgcgtgtacttcttccttttgctacaatgcacctgtgtgaaacggggttttcatattacgctgcaacaaaaacaaaatataggaaaagacttgatgctgcacctcatatgcgaatccgacttagcaatattacacctaatattaagcggatatgtgataaaaagacacaaaaacactgttctcattaaaattggaggagtttgcatgtctcatgataaccaaatgtaagatgaaaataaaagatgatttacttcatctctggtatttgggggatttaaataaaatgattccatttttttatactatttagattttaagaaggctaaagaatcaaacgttttaaacatattgtgttattattggtatttctttacattgtaattttaaagagttccatgatcataactgggaaataatgatccccaagataaagtcccagtcccttaacatatctcttcaggatctaatccctaccaatctttccgtgtctactctgcagctctccaatcccatggaacttcttgccattccctaaacatatcacactgttttatcgtttcaggtctcaaaaagcgattctgtccccatcttactttctggtaggctcctatttgcttcaacactttgacttgtaggtactttcattctctgtatcttcctattttgatgctgtttcacacttgtatttaatgtttgtgtctgtctcaactgtgaact

SEQ ID NO: 9744 - DNA, 1079 bp, Homo sapiens
ttgtgttgaagtacctggttgaggttaaagatcatgagtttgtggtggatttaatttacccagttccatgaattttctctggtggtgctagcctccagggaacaggtgtggagaaggtgaacaaggctatagaggtggggtttacagggtgtaaaaggcagaaaaagtaaggaatttaaaaattgaagctgctagcaagagtgccattattaaaaattgggcgcagcatttctagggagaggtcaggaaagagtggtaagtatagaaggaaagaaagaaaattattattccaaaggcctcaattaggttgatgagcaggcattgggaagtaagagagtgggtaatcaagattaataggtgtgtcattttgtgttgctataacctgaggctgagaaatttataatgaagagaaattcatcagctcatggctatggaagctgggaaggccaatatcaaggggccagcatccggtgagggccttcttgtggtgtcatcccatggtggaagtgtagaaagaagggctagagaggggactaaacttgtccttttacaaggaacccattcccttgatgatggcactaatccattcatgagggcagtgctccagtgatccaaacaccttccattaggccctacctcccagcaccaccacattaaggatcaagttttcaacacatgaactttgggggacacagtcaaaccacagcaaggtgattgggcaaaagtagggcaatggagtattagacttcagaggtaaagtagtttggggcactaagagctggggtctaggtgtgggtgggctaaagtggaacacagcataccaccccagaattgaggccacagtgcaacgtgaatgctgcccagtgtgatgtagaggaagctgtgagcctggtgccaaagaccttgatggatgtagctgactgcctggcacttaagtgagaagaacaacatgggcagagggcaatggtgtctgatgtctgattcttacagaggagatgttttttacactagggtggaagagtggaggtgtagaagaggcaccaggggagaggagagtgtcaactccaccttgaatcctg

SEQ ID NO: 9745 - DNA, 1025 bp, Homo sapiens
tctataattcattcccccattcaaaatggtcttgcaaaaccacacccaggagagtccaggatatgaacagcaagccagtgacagagtataagttgcaagagttccatctccctaatggcatgtataccgtgccctccccgaaggcacttcctctttcatttgaagcaggaagtggggaggttttcctatgatgtcccttgcaccaagtgtagaagtagaccttcaagaagttgggtacttgagttgctgctctttggtcccgtttcttagtagggtatcaccaactttttaggtggggcagttctttactgcgtgggactgtcctattcaatgtaggatgcttaccattctttgaccctgacaccagcagtgtccctacaagaccaaaacatccccatacacctccaaaaggcctctggaggaggtggtaccactcctggctgagaatctgagacgggagagtaaataaagaagctctgggatttgggaatggctggcggcattgagcgtgggtatctgaataatgtttatatcagggcaacttaaggaaatgcttgtctattgcaagacagttcctaaggagatgtgttcagaatatatcacgggcataaatggattcttatatttgattttcccaagtaacccaattgttaccacattgcctttgtcccagatgctttttctgaaatcggtttgttgctctgcattagccctgcccgggtagagctttggtggagtccttgaggttagcactgtcttaatatactgggaatttaagcagagctgggccctctaaatcaatcaccagaacagctttagtttttttcttgctcaaaagtgcactattaaatgcagaaacacgtatgggagtggaggttggcttgggtgaaggacactttttaaaagaaaaattttataacaattttttctgcaggaaaaaggacttgctggtcttgcttcttgtacaactgggctacggaatagatttacatctccgcagcatttttagcatccttggaatatgc

SEQ ID NO: 9746 - DNA, 1124 bp, Homo sapiens
gacattctgaaggatttttataccatgtaggctcttaagctaagaaattcctaagggctcttgcaccctggaattctatgactttttaattcattaccttgtccaaatcaaggtaacggcttgtagcagcataactccacccttcacatgacattctccatgtgtgtgtctgtgtccaaattgctccttttttatgaacagcattcatgtgccagatactgttcttggccctgggaaatggatgaaccagaaaaaaagtgactgtccttgtgaagctatattctggtgctagcaacagactattctctattttctaatcttcaaatcttcaccacagccaagatttgaacttgtttctctcttgagcattgcatatggggcaacatttgagcttcatgacttggatttcagccagcaatggccaagaatggtgaaggtgtaagaagggcaagaaggcaggactgcaggctggccccgttcatcttgctgactttgtaagacggttaagcaagtactgagtgcatttgaggaactgagtatctgtaggcattttctaagtaagacggttaagcaagtactgagtgcatttgaggaactgagtatctgtagacattttctaaagaaaaacgtcaaaataaaatggagagattaaatgcaaaagtggttcatgtcctatggggaaataaaattatagcctttcatgtgatcttttctacacagacagaaatctaggagttagcatacaacttcatagtgtctgagagagaatcaaaaggtaaatagcaaagtcaagcatgagtacattctcttggaaaattacatactcttggatgggcccgttaatgtcccaggataatattaaaaggacaggccacttcccctctttgtttttgccttatttctaggtttcaggtatttttcttactcttttcacaaagtttgttgaaggtcgagggacactccaggccactagtgactcagtgactcttatgggtcacagcctgaccatctgaccttttcccctgcagaagtttcccagggcttccgtaacaaagtaccacaagctgcgagacttaaacgacagaaaattactgtctcacaattctgaagcctagaagttcgag

SEQ ID NO: 9747 - DNA, 1049 bp, Homo sapiens
ctgctggaaatagaggttacccaggaaatgtcctattttgctcacacagtcccctgaaggctggctgggaggctctcctgtgcagcttttctccaagtagtgacttggggactctgattgcttctcttgtgggttcagcatctttgaacttcaagttcaccctggcttaaacatccagcagatggtggggtggggagtagaagtgcacctaaggagacacactggatagtcacctgccttccccgggaagtggcagaggccatgtcctctctcatctcatcgatttgcaccctcctgactgcaaggggtgcagggaaatatggaggagcacccaggtgtcagtgagcaataggggtctctgccacacctttggagaccactctactcctggctcagtttcccaacccctgtatgtcagagcctgacgtcttcctttttccaacttgtcttgagtcccatctggcctgagtttgaacaatagtaatcaggcctgttggctgatatgagatttgaggtaaccacgaataagcccttcttggtcagaaccattaaagataacttctagtctcaatgaccacacatttgcaaagcagtcctcctggaatgtccttccctgaactcctgtggcccagtcattataggcagagcactgggtccaaggaaaagccaggccccctgtatgggatgggccagtttgctgagaatgacacattactgttgcccctctaacttgaccctgggtttcctgtgggtaagcagctgtttcagcaaatcccagattcctgcaaaacagccttttaagtttttcttcatggaaagcttccagacattccagcccagcttgtctctccttggaattctgcccaatgaatcctgctgcctctgatagttatgagggatccctttcaaacagaggaactgcttcaactgtttgttagggctaacccaaatgttcagaccccttcagggacaccttccaagaaaaagcatcatttttttttccaagcagcaattccacacagaggactcttcggaagtgttgattgcaa

SEQ ID NO: 9748 - DNA, 1267 bp, Homo sapiens
ccacagtgtgaagaaaacaggtctgaaacaaggtcttacccccaagctgcttctgaacacagtgactgccagatctccaaacatcaagtccagctttgtccgccaacctgtctgacatgtcgggacccgtgccaagcagggccagagtttacacagatgttaatacacacagacctcgagaatactgggattacgagtcacatgtggtggaatggggaaatcaagatgactaccagctggttcgaaaattaggccgaggtaaatacagtgaagtatttgaagccatcaacatcacaaataatgaaaaagttgttgttaaaattctcaagccagtaaaaaagaagaaaattaagcgtgaaataaagattttggagaatttgagaggaggtcccaacatcatcacactggcagacattgtaaaagaccctgtgtcacgaacccccgccttggtttttgaacacgtaaacaacacagacttcaagcaattgtaccagacgttaacagactatgatattcgattttacatgtatgagattctgaaggccctggattattgtcacagcatgggaattatgcacagagatgtcaagccccataatgtcatgattgatcatgagcacagaaagctacgactaatagactggggtttggctgagttttatcatcctggccaagaatataatgtccgagttgcttcccgatacttcaaaggtcctgagctacttgtagactatcagatgtacgattatagtttggatatgtggagattgggttgtatgctggcaagtatgatctttcggaaggagccatttttccatggacgtgacaattatgatcagttggtgaggatagccaagtttctggggacagaagatttatatggctatattgacaaatacaacattgaattagatccacgtttcaatgatatcttgggcagacactctcgaaagcgatgggaacgctttgtccacagtgaaaatcagcaccttgtcagccctgaggccttggatttcctggacaaactgctgcgatatgaccaccagtcacggcttactgcaagagaggccatggagcacccctatttctacactgttgtgaaggaccaggctcgaatgggttcatctagcatgccagggggcagtacgcccgtcagcagcgccaatgtgatgtcagggatttcttcagtgccaactccttcaccccttggacctctggcaggctcaccagtgattgctgctgccaacccccttgggatgcctgttcc

SEQ ID NO: 9749 - DNA, 1048 bp, Homo sapiens
tcatttaattctcacagcaactatctttggaatttatcacttttatctccatttcatagacaaggaaactgagtgttggaaggtgaagtgaattgcctaaagtcaccagttcagcaaatgggaaatgtaggacttgacaccaagactgtttggccccagaggctatgctctgaaccataatgacttcctgtcttccaaaaggcaggctcttggatccatatcttactgtgcttctaaattatcctgtgaccctgaaccttagtttgctcacctgggaaatgaagggaggtcctggttaggttcccttcagttctactctattgcagtatgctgatctcttttgtaaatctgtattaaatgagagtttgctatcggtgactttcagagatgacaccagtgatgatgcccatgctgacgattcattctgatgtctatgaaaagagcaaatcctttaagagaagatgtagcataccagtgtttataatctgagtttcatttgattaagaggggaagctctttagaacaaatatcatttctgagcgagagaatgttcagcatctcagcctcatttgtatcatttgataaaagggccccactgagccaagtgtgaggatgatgcttgagccagacacatagacaccagacattcctctgatgtctgctccccaggcttggccacattgcctcccaccaaccccatctcaatgacacatccattacctgccatcagttggctctatggtgctgggaatgacagagtgtatctaccctggatttcagaaagaaccctcctggcttatcatggcaacaccctttggacactcgtttaaagagtccttctttgggccagtgttatccttttgggggcatctggtatggacggccaatttgaatctgactgggacatgctaatgagccattcatatgtgtgggatttgtttctgattcgattaagcttcagagagaggaaagaaacagccactgattagagacataaaaaaagaaatactttaagtgagtaagtggttcatcttcatataggaaagta

SEQ ID NO: 9750 - DNA, 1027 bp, Homo sapiens
aggatgatggttgaacttctgcctctggatgaaagttggatgttttgatgatcacatatacttagcagtttactcatcagcaattcttgcaccaaattctgctcttagatgcaggtctggccgatttctcctgcattgcagaactcccagttcgcagatgtccattgtctcttccatatctgggacagatgtagtgtcttgccaaatctctgaagtcctggatatatttagtatccccaccctgcctccatcatcctgttcttcacccctttggcttgtgggatgatctagtcttattgctgcagtcaggcagggagtaaatgtacaactcagtgattccattcccatcaggtcatggtagaattcccatccacagagcccttatggacctgaattctttctgctgttcatttattcatgtgttcactcagcccatcaccaggtgcattctgaatttctactctgtgctgaacttcatacccagtattagggatacctgatgagcaaagcagacacggccctaaccttgtacagcttatagtctagtggagacactgacgtttgttaaatgatcacatataaaaacatgttgcaatagcatgtacatggcatgaaagaaaagcagaatctgtgagagtctcacaggggactggactccagcccaggaagggaattggtctttctctactgggttatgtacgtgttctcagggagcaaggaaccaaacctatgcaggtgaccacaggtggttgggattttttgaaggctgatgaaggcccacaatcacacaatgagaagccacacaggcaggctctggaggaggcagcgtggttcaagacatcctggacagctccagcctgccatcctctttgccccacttctgctgtgtttctaacagtgacttcatgtccacgtctacagttcactcactgacaacgcccttcttcctattcatcatttctgctcccctgcgcctcacttatcatcttcttaggatctcctacattcaacccctccattgtccagt

SEQ ID NO: 9751 - DNA, 1050 bp, Homo sapiens
ctcatgggaatttgcagatgaattgcctagtggagtgcagggggctgtttgggtggctcagctgctctctcagtcctgagcttactcaccagctatgcacagccacccagacccatagaaacctcctgccaggattccattggagtttccctctggaagcagtttgagcaaattccattagattggaaagtcggtgctgaggaacttggagaagatgatggaagacagcatttcctatggcacatcagtcctgggatgtgtccacaaagaagggctccccagtcacatgaggttgcccagggctgtaggtacatttcactcttggaggttcccaagaaaggcctgagaagtcctgagtcaggaatcattttcccctaaccaggattaagcagtaattcccttagccatttcaccacagaaccttctatcacatagcacttaataactctgcacggaactagggttctgtagagcacgctgtgagaagtgctgatacagggatgaagggactcatctggagagtcagggaagactctggaggctgaagccagcctctcaatgtcacttctctgctctcagtgatccccagtaggaaggtgccactgcattacagaatcagatctcaaaaccagtactgggaccaggtggtgaccagagactgctcagagcctctttctaaccagacactagaagcagagtgtctgatacgttcacaacgtgcttcatggaccactgcagctcagaaggcagtgtgagagataagagaaaccactacctggaaccaattcagaccattaggccagaggaagatggacagataactgagaatgaatagatttcaccattatccaagggacagagtagaactcagaatgagatgccccaaaagaacaaataacagagactgagggtcagttattgggatatgactgaggttggggcgaggggggcgagagagagagaaagagagagagagaggaaggaaggaagaaagaaagaaataaagaaagattgaccccttcttttagtttattttgtggctaccaccca

SEQ ID NO: 9752 - DNA, 1054 bp, Homo sapiens
gtgtggctatgccagaataatagtgcatttaggttgcattatccagttctagatgtgccagacaaacctctgacaatccgcgttggagtttcattagggagacccaggcccagccctgcatgatttggagagaacacaagtcaaatgcagcacagggcttcttggttacatctgccaggacagaccttctgagcacaccttctggaccttctgggctgtctctgacgcacaagtcagagatggttccatggaagacttgcatttccttgtaactctggtcacaccattggccatttgaaaacaatagtacctgtccctataggcccctggactgggctgagtgctctatcactgagcctccattcatttcttatgtgtttaatatttatcatatttggcatgtattatatactgttattatacatgtgagacactgcatacacattacatagatatcttatttaattcctaacagccttaggaggtaaggcattttcttagtctattttgtgcactgtaacagaatacttgacactggagaatttataatgcacagagatttattggctcatagttctgaaggctgggaagtccaagatggaggggccaacatctggtaagggcctttttgctgtattatcccatggtggaaggagtgtgtgtgtgtgtgtgtgtgtgtgtgtgtgtgtgttagagagagagagagagagagagagagagagagaatgagtgaaggagaagaggccaaacttgcccttttataagaaacccactcccatgataatggacctgctcctgcaacaatgaaacttctcccatgataaaggcattaatgcattcatgaagtgaatgaccccaggatgcaaacacctatcattaggcaccatgttccaacactgtcacattggagatgaagtttccaacgcaggctttttgggggacacattcaaaccatggcagccatgttgtgaggcagtatagagtagtggtcagacccctgaggctagagccagactctaagtgtttaaatcccagctctgaccaccgttggctc

SEQ ID NO: 9753 - DNA, 1034 bp, Homo sapiens
gcttggctgtgcctttcatcactgaggctcccgaggactaaagcagccagatggttctgggcattacaagttgctgcagggtgactgcaggaaacctcaataatacataattttgtccctgaaagctgagctgagctttaaatgcttgctaacctgtactgataaggaaggccataggggaggatgacttcctttcagaggagtgaggatggatggctggcttctctgactcggagattagatcagtaaggcctgggctagaggatttactgtggaaagggtccagatgtgaaacagtgggaagaaagcatagacagaacttgaaggcatgcaaatgaaggagagagagcaggtacactggattcagggaggaagcagcaagagtttgcaggaggaagcgagtgtggtattaaatcagaatggggacttctgaatctggtgaggaggaaggcaatggaaatcttagtgagaatgctttcattgggatgtcggagactgaatccagatgatgtggcattgatgggggaggaggtggtaaggcaatggaagctgtaatatgcaacccaggatgatgccagctcctattactttgtggtgatggcctagagctctttgctgagcaggttgtttctgggtgacactggagagagtgctgtgattgattacttggatctgctgtgggcataggagtcagtgctggtatgcatgccatctgcctgccatccttcatagagattcaagaatctggtaactcacactgttatcttagtgtggtctgtcctttcctgtcttcttgtttttacttaaggttgatattcataatatctcacaaccaatccatgactaatcatagcagacactggctataaacaaccagttgcctggagtgtgtgtactacaaaatatcatgccatttactctgcctggaacatcctttccctgtgttcatctactgaactccactcattcttcaagccctcttcaaatgtcatcccctcaaggtggcattttctttaaactttgctccttttcct

SEQ ID NO: 9754 - DNA, 1028 bp, Homo sapiens
ataagtttctagaagttggagtgaaatctgaaaccacatcagtaaatgttttatattctgttacatcaaaatctgtggtctgccttgtactttgcttatatcttttatccaagcatgattttgtaatattatacattagtcatttggaaaggataagctcacagagttaggcagatcttctaaatgtggacatattttattatacagtgtgaaaaatcacttccattaatattaccatttatatcatcagaagtctttaggtgttgggaagccgtcaagctcatagtggtggaggcaagttttccataattataaattttccttaaaagcttggattttatcactggggaaaaatattatcacttattttccttggagtgacaagactttgagaaaagttcaccaaattcccaagtatgaataattatgatttgttcatcagttgttcttttaagtgaaaatagtgtttcatgaaaaaagtacgtagttcattgtccacctcgattgtataagctctttctcttgagacaaccttcatacttcagtctgcagcagaagtgctttatgtgtatgtgtgcttataagatagcactgactaataggaataatttacactgtgactcattgggtttgcttctttgctctccacactcctcaggaatctcaaggggcaaacggctctctgtgggtgtttcactgaagactcgcctctcggtccttacgtgttcagacgtgcttctctgagctctgcctccatcattcactgctgagaatatggccagttgaaatgcactggagaataggaacccatttctcttacggcatctcccatcagctttccaacagtaacctgatggctccaaggttcctgtttactttgatttacttttccaagactttaaaatacaaactgtccccttgtgtttgcaaggtgttatttatttatttttcttcttccctggacataacttccaggcctttcctggcataggtcagtgtctatcctcgagcttcctgtccccagctgc

SEQ ID NO: 9755 - DNA, 1075 bp, Homo sapiens
aggtggttttagtgaacacacagcagtgtctgccacatgaccatgctgcattggttattacatatttgaatatcacccctaggtaaagtcacaaaggtagcaagtggcagagccaggagtaggacctaggtctgtgtaacctcagatctggattctttgcagggcctctcatactcctttaatggctggctcaggttctgcacctctggatgcagtgggtgttgtgattgcctatgtggactctctttccaggcaccaacaattctataaaacatgtgactgctctccctttcccttccatggactatctgggctacaaatttgagagtaggttgttgggaatttttgtgagcagccaactcaggatcaggtctgtgaagctcctggcttatgtggtgctcagtggctctcttgggagtgaggggcgatagacaaactgtgtcactctccccaggagggctgggctgtcattagcattcagcaaggctgtgagtcttgttgtacaaatcagctgtttaaaggccttaaaaaaaaaaacccctaaaactgctgaatgcctctcgtggttgaagctcttatgagtatggagctaacagtttcccacgactgctgaacagcaaaaggggagccatggtgtagtgttttccttttgattcatatttggagtcatttttagcaatacggcaaaatgtgaagatgctcttggaatgtgggcatttgttacctttgacaaaggagattgcttgtatttttgtttgtctgttttggtttttttctttacagctcttgatcttgtttattcagagaagcaagaaggatctgttggtttcataaatgtgcttctattcttgaaaaaatgctagagttagccacttctccccccacttcctcactggtctgtggcaggagactcaagttgcaaactaacgcagccccctttccttcctggcttctccctccactcctatgggggtcatcagggggaggggcagagagctaaccagcagagtccaaacacattatctcttttgtctgggtttcagagtcagtttattttcttccatcagttgggaag

SEQ ID NO: 9756 - DNA, 1051 bp, Homo sapiens
aaaacactcaataaactaggaattgaagataatttcaacaacctgatgaagaacatctacaaaaaatcccacaactaacatcatacttaatggtcaaagactgaatgaccattaagatcattcagtatcaggaacaacagaagcatatctgctgtcatcacgcctatttaatattataccagatgttttaaagaaagtaaaactatctctgtttgcagatgacataatcatgtatcctagggaatccactaaaaatcagttagaactagtaagtgagttcagtgaggttacaggatataagatcaatataaaaaaacaaattgtatttctatcactatcagtgggcgatctgaaaacaaactataaaaaatcatgtataatggaatcaaaaagaataaaatgcttaggaagaaattaagaaaaaagtgcagaaactcatactctgaaaactacaaaacattgttgaaaaagttaaagaagacctaaataaatgggaagacatctcatgttcatggactgcaagacttaatattgttaagatggcaatacttcagatatctttatcaaaatcccagctggcttttacacagaaattgacaggcttatcttaaaattctgatggaaatttaaggtatacaggctagccaaataatcttgaaaaacaaaaacaaaatggacaactcacatttttttgatctgaaaatgtactgtgaagctacagtaattaaggcagtgtgatacaggcatgaggacagacacactgatcaacagaatagaattgacagtccagaattaagtgcttaaatttatggtcaattttattttgataaggatgctcaaacaatttaaaggggggaaagaatagtcttttaacacatggtgctggaacaactggatatctacatgttaagaataaagttgtcccccatctcactctatccacaaaaactaactcaaaatggatcatagaactaaatataagagataaaatcatagaactcttagaagaagacaaacctaaatctttgtgactttagattaggcaaaggcc

SEQ ID NO: 9757 - DNA, 1049 bp, Homo sapiens
agtcaagaggtatattgtaagcttcagaccaaccactaagaaaataactcaagaagtagagttaaagatattctaaatgttcttatcacaaaaaagataagtatgtgaggtgatgagtatgttaacttgattgaatcactttacaatgtattcatatatcaaagcatcacatcatacactgtaaatatatataatttttattggtaaattctactttagtaaagctgggaaaaaagaaatgttaaaaattattaaggaaattaaaatgtacaagaaaatattgacttagtgcacaagaaactaaggaaaggaggaacaaaaaatatatgagatatagaaaacaaaaagtaaaatttcagatataaacccaactatattaatattaacattaaatatgaatggattaaatgatccaattagaatgttgagattgtcagattggatgaaaacacaagatgcaactacacactgtctacaggagacacacttttgattcaaagatataaataatttgaaagagaaaggatgaagaaagatacacaatgcaaacagtaattgtaagaaatctggaggggctatatttaatatcagacaaaattgacgttaaaacaccaaaaagttactagagataaagagcaaaattttataatgataaaaggatcaatccataaggaggatatagaaattataaacacatatgcaccttaaccacagaccactaaaatacatgaagcaaaaaatggaaaaacttgacagagaaatatacaattcaacattaatagttggagacttccatactttctttaaataatgggtagaacaattaggcagatgtactaatgatgatatagaagacttgaacaaaagtataaaccaattagacctaatagacacttataattcactccatttaataacagcagaatacacatttttttcaagcatatatggaaaattatccagaatacaccatacactaggccataaaacaagcctgaataaatttcaaaggattgaactcatcctttaaaatgaacaaagtacattct

SEQ ID NO: 9758 - DNA, 1736 bp, Homo sapiens
tttagtaataacaagagtctgggacatttgagccataattgcccttcctcccccaattccagctcaataaaacagaagctctcctctggacagatatggacaagaagacggggtgctgctttcccacaacttccactctagggctatatttctctcccagaagggccaggccaccaggatttctcatgtctcccagctctgtgttgcagagcatggttgagtggtctggggctgcccctacttacagggtggaagctttaccctgtgttgagaatactaggccctgattgcccctatccctggctcacatgtagggtggaggtttcataacaggagagacaattcaagaagatcagtgactaccatctccacccagcaccctactcatacagcagggatgtcactctgggagaaagaattaggctgctattcctacttacaactccagagcagtggtatagatattctgcccagggataggggcaggctgtaggaacacagagatttgtagcttttgactttatttggaatggagtatgaggaggtccaagcataaaagcaatttccgagcatttaagaggaggttagtagctccataatagcaacaaaacaaacagagtaggccagctagacgacctagcacagtaagttctcctatcaacacagtaatgctgttgataggttcttagaaattgtgactttaagcaaatcaggcaggtcctcaaataacgtcatttccttcaatgttgttttgttataacattgatgagaaaaaaacaggttttgttatatgttatattttgcttaaagtcacagtttccaagaatctattgatgatgttaagtgaggacttactgtagtttaacagacataatcaaagaaagagacatttcctatggtcaaagaaagcctcaaaaactggcctcaaagaaaatccctgccaaaagaacccccaaacccaaatttaattggatcagactgtggagcaatttatgcctaaaggcaccgttgaaaataatagagcaatcaggtagcaactagtggaggctaacagctggaggtgaaaccaatcgggcagtccagccagaaatgtaacagggagataagcaatagagacagttaaaaggagctctgctaaaatcactgtcatcctagggggttcgatagggagaatcaggacactgtgcacatgcctaaggtttcaccttcaagaagtagtattagagactacacactgttgggggaaaaggacttcactgaagtagcccatccaatgcggtaaacaagtaaacaagtatatagtgcaacaacaagaagtccttgggtgggggattaatcagtattcaaagtgtctaaaatatagtatctaaaatgtctggttttcaacagaaatttaagagacatcaaagcagatcatagaaattgtctttcaggggacctggatgtgagacttaccagaaaaagacagcaaagtagctattatatatttgttcaaagaactaaaggaaactatgctgaaaaaattaaaggcatcatgaaaatgtcttaccaataggtaataccaataaaaagatataagttatgaaaatagttaagtggaaatttgggacttgaaatgtttaagaaatgaaaagaaaaaatcactggggcacttaaaaatatatttgagttggcagaagaaagtatcagcaaatttgaagatagatcaatagagattaccacatctgaaaaaaaga

SEQ ID NO: 9759 - DNA, 1024 bp, Homo sapiens
ctgctgcctctcacttctccctgttttgttgttcttttaagtagcatgtgtcactctgtatatatcctgtccatgtgttttcttttattattatttgtccacttgcctagaatgaaaactccatgggagcatggctatagtgtcttgttcactcctgcctctccagggcctgaaacagaagtaggtagacagagcctgaaacaaaagtaggcagtccataaactttgctgaaggaatgagtgaatgaatgaagaccccaaggatggacctcaggaaggtgagcctgggcaaaggttttcagtcctagtccatcatgaccacatagctggaatacacttatttcactttgtcacatgaattagagattcatttggggaaacaagcaactgttagagttgcagacatctctgaggggtaaatggctgttcaaatcttgcatcttaccctgatcctcactctatctgctttccaaaaacatggagctaagatcccagcactgagaagatgggcattcctagcagggggcatttaggtgtagacagcctcagtgactcctgggtttaggatcagtgagataatctccagtatctacagtgggcaggtggaagagtgtctgatgcaaactgtatctatttacaagctttccagacagctgggcttgtgccttggaaatacaataatatttgtttctcctccttcctcttcactccttggcctcgtgttctgcagtactggaacctgggtcagatttagctacctcattcattcatttatgaattcatttagccagtgattatggagcacaaatttgtgccggaaactgtgcctcagtgtcctcaacaggttctgacttgtgaattccaaaagcttttgtgatctactgggtaaaacattgttttctaaggaaaatgacatgctgattgctgaacagcatattctaattaccttgtggatcccaggccattcttaaattgggttttgtctttattgccttagactgttaatgaattgtttcccagtctga

SEQ ID NO: 9760 - DNA, 1860 bp, Homo sapiens
ttcagtatagactatgccgcaaggtttcattcccacatggaagtacgcatgctcgtttctcctgagactgcataaagtctgaacattccagtttcccttttaagtcacttcatagccctagcagcagtttagaaatgcaaaagtttggttgctttaaagaatagttcttgagtggattcttaattaagtacaataatattttctctttgattttaaagagctttactgcccagaatggatacacaataaaattttgaaaggaaaaagaaagttagctgtatcccagttttctaaaccctggcaagctggcagagctagaattagctttacagatggcatttggcaacatatctacatatctctaagccctcaactcctgcgttttgttatgcctgtctatcaattacaatatccaatcactgctcagagatggagaaatgggacgatcacagctcacacgatgctgttttgttagaaacgtcagtgctgcacaacccacggctgagtcagtgtctgtgagaaaataaactgaattaatatgtagagggggttgtatctctgaatatttaaagcctaaatattgcaacagcattattacacagtagagggaggaagctaaaggaagtctatggacaggtgaggtagggggagactggggaattttctgattgttcagaggaatcttgaagatgatggaaatatcagatgtgctaaagtttcctagtaatgcccaaggatgctgacctggctttcagtgcttcattgtttgaaagagcagagtccctttatactctgatttcaaaatttttttcttgtttttgtgtgtctaccttggcatatactaaaggaaggtgtgtattcatttattacatgatatctctgggttataattatttacatatatgaatttgaaagaaagattgagagggatatgtgtgacctttgtttcattatgatcatttacatgactaaagataaagatcatatgtctgattttcagtttaatggcaagttacttaaaataaatgaaatatgtttttattgttttcgtgggtttgatgctttgtgttttatttcaagtaacttgagaatgcattgtgtttggtactgttttttatgaatatcattaaaaatttatttaaggagagagtaattttgcaataatatttttgatttatttgaaaataaaattcaagataaatgaaataattgaaattttctaaagaaggaattgaatatatttttacatttgaatgaactaaggattaactgaaccatttatatatagtactttacagaactgaatgtacttaaatgataaagctctaattggttaaagtgactttctttcaagtcaaagaacccagaaactgaatagatgatctaactactgccactgaggttttggattagtgagtataaattttcaaccagacaaaatttctaaataaggataatggtttttcctgtgagattttaaatcttaacaggtgatattgctcactttattaggaaattttacaacaatttaaaacattttgactaatggtttttttccttctctctttattacccttatcctgctgatccttaatttttttggacatttgggatatacagcattttacatttactttgtttttaatgtatttatatggtttataacattctttccttgaagtgtcaggaagttcttttaatttcccccatttaatttctaaaagtttgaatggtcatcttatggttgtcatgacttatttatatagttctgttcgtggtatcttgtattgactttttttgtggtttagggtccagaaatgtttttgtcagcttattaaatagagttataaaagcagaatc

SEQ ID NO: 9761 - DNA, 1055 bp, Homo sapiens
acctcctgtaagatggttaactgcgagacattcttgtttcttacttagttttccaaattgttggagtttctcttttaaaagagaataattattagagagactggtgggattatgaaaccataatactgaaagtaactttaaaaccattaatactccaatttttggaagagaaaactaaagtgcaaatcaagccccttaactgattttgatcaaagatattggcaggcagtaagacagctgagactagaatacaaatccacaagtttcctgatttggagtagtttgttccagtgattccccctagtgggttgcatgtgcttttggggatatatgaaaaacttgttcattgtgctgtatgaagaaaacaatagaacttctatttattttttactgtatcctttttaaatttccatttcgtgtgtgtgtgtactatatacataatactggtgtgatagtatatgtgcattgtttataaatatacatatatacagctgtccgtgttacttgaactcaacatattaagaaaaggaaaaactgccatattttaaagtggtatggcatctttgatcatctttgcttccctagtgaatgatattatttaacagtagactggaacagtttttttttttttttttttttttgagatggagtctcattatgttgtccaggctgaccttgaacttctgggctcaagtgatcctctcaccccagcctcccaagtagttgggattataggcacataccgccacactcagcttgaatggctgttaattttgaaactgttttatgatgagtagtttgaaaaatttcctataaaaatagatttatttggagtaatttctttctgactgtaaaagtaatgggtattacatgcaactgggaacatttagcaaagggcaaagaagaaaatggtaccataatcccatgactcagtgataattgcttccagtcagaaatatatgtgtgtacacagatacatacatacacatatgaatattacatacaccccttattaatttatttggagtatgtaagtcattatgtggttcaaatat

SEQ ID NO: 9762 - DNA, 1031 bp, Homo sapiens
tgaggtttacgtgagataaaaagatatctgtagaatttgagtggttgtttagtattaccagccatctggtcccttaagatatgccagtcattttgtttattctgctaaaggtgtaggaagaaaacataggtaaatgatttgcttaactttgctaaaatatgaaagtaggtaaatataacaacacttgaatctgaaattaaatagcacagtatgttggcttagacagtggaatttcatgatatatctgatttcaagttccttgtcctcaactcagccctgtctagagatcaactgtctttgcttttttgtctttaccatctttctcctggcttaccttggttgttccctctttttcccctccttttagttgcttaattattaatcgttactattaatttgagaaaataacttattatacttaaaataatagatagctaagtatatcaatccagactcccatctgtcagtacttttgaccagtgtgccccctacagcctcctaggaaaaagaacccctcctcaaatagtagaggatcttaccacatgtggcgttatctgtgccttatgtgcgtctaaaagggtttagatggtgaatgtaggtgtaggtactatgagggtttctcggttttgacaggtcaattttgttcaggctttatcgttagcatatagaacagaggtatgcactaaataagtatttgttgggtggatgaatctgggtgccagtgagttaagacgttgtattaatgtgatgattctttttacataatagatgtttgtgaaaacaagttttgcttctgtaaacttcattaacttgacataactctgagcactgaaatgtagtttattctatttggaaatatgtagtactagatgagctcatacatgttattgtgaactgctgctgctacctgtgtttttgaactgagtcttactggaagcttccaaatgtagttctgtgaatttgttgcatcagatttgccctggttatttaaaacaaaacatgtctgggaagtgctaaaatctaccaaatca

SEQ ID NO: 9763 - DNA, 1030 bp, Homo sapiens
caagtagcttgggactacaggcgcctgccagcatgcccggctaattttttatatttttagtagatacggggtttcaccatgttagccaggatggtctcgatctcctgaacttgtgatccacccacctcggcctcccaaagtgctgggattacaggcatgagccacaatgcctggcccaagaaaatgatatattatcttaatgctaagatttggaaatgtccactgatgaaacttggtatagaataaattttcctgctaaatctcgttcaaatctggttataaagttagagtgaaaaaatttgttcttcatttcaaatcaatataaactgtttgaaataattaagaatatggcattgcttacattataaacctagcatagacagttcatctattttttttagatttaattttgtttttttttaagaccatttccttgaggtttctaaacctgattatatttattgatgttgcccagtggaccctgcctgtggctcttctcagttctttctagtactagaaactctatatgtcattgcatctgggaaataatggcaaagtagatgtgcattgaaggagttctcttcctatctctcgctgacttttgcctcacccctatatgcttcctgtcctgaatatagaaataggatctttctcaaaccttctcatggtggtagctccagtaaaggaataggtaggagacctaggataggtggagatctcctgtagggtaggcagtggcagattagggaagggaggagggtgtatgcccactagaaccccaaagaggctctgccattatcagcttgggtctatatgagttatttttaagttgtctatacaccagattgaggatccctagcccaaaaatctgaaatctgaaatgctccaaaatctgaaactttttgagagccaacatgattccacaagtggaaaatttcacacctgatgtcatgtgatgtcacagtgaaagctttgtttcatgcacaaaattacttaaaatattgtataaaattatctttaggctatgtgt

SEQ ID NO: 9764 - DNA, 1033 bp, Homo sapiens
cacagcgggtgaaaaataaaaaggaagtagatttggggaaattaaaattccttattttcaaatagtttttcataaaattttataagactttataagcctgcaagtgtttaaactagctttattcgcatgtaataatttcttggattacatccaaaactctaacttagttggataatttcaaagttaccactaaaggcctaagttattcggtgttaatactaaattaacttcatgtagagaatggctttcatttaaattgcagtatttggatttttttctaagtcactttaatgactgaattttctgttaattctttacattggctagctctaacacttcagtaacatttaataaaataatatttttagtatttagtttgcaggctaatttattctcacttgtttctttacccacttactgaaattttattagttaaaacaattttttggtaacattgcacattcatcttttttgtaggggaggggaacaaggtcagttgtatattaatgccggctgttcatttgtattagtccattctcatgctgctaaaaggacatacccaagactgggtaatttataaagaaaaagaggtttaatggactcacagtttcacatggctggggagacttcacagtcatggcggaaggcgaaggaggagcaaagacacgtcttacatgacggcaggcaagagagagtgtgcagggaaaccgccctttataaaaccatcagatctccgagaacaggatgggggaaaccgcggatgattcaattatgtccacctggtccctcccatgacacgtgggggttatgggaactgcagttaaaaaagatgagatttggatgggaacacagccaaacaatatcaatgttatatggctttttttaaaggtcttttgtctctaccccacatctgaaatgtattgtttaaattgtttattttgctggtatttaagtattcttgtttttatattatgttgtgtttacagattcttaggattttgttggaaaagtgtaaacatcaggaaaaattggt

SEQ ID NO: 9765 - DNA, 1750 bp, Homo sapiens
gccacagagttttgaaaaaagtatcagaagcagtgtgtatgcacacactgttttgatttcctctgtgggatggttcttggctaatccctttgaaaggaagtatcagaacctgtctgtccattgcatgcaaggctgggaaggaaagcagtagccacacaataggttacaattagaacactgaataagaaacaaggaagaattccttccatgcctaagagagatgcataaccttagggtgaccatatgtctacttgcctaggaaagtcctggtttatgcctgttgtcctgatgtaattattattagcatcctctttgagtcccagtttatcagtaacttatatggtcaccctacttaatctttcagttctttttttccttatctgtagagagagagcagtgcctggtatatagtaaatgtcatgtaagtgcttgctgtcactgttattatgattacttgacctatcagcaacccttatctttcgctccttcttaaattattttcttctcttggcctcctggctaccattttctttgttctcttcctacttttagctgctccttctcagtttccttgcctagatctttctcattttcctgacctcccaacagtgaagtaccccaggtcccagtctctgttgttttctctgtctgattcgtcttgtgacaataccatctatctcctgactcccaaatttgtcttcagccccaccttctcagtgaatcccagactcatttctgtaggtgtctaataagtgtcttaacagaacatgtacaaaaccactctgtattcttcctccattctctaccccaccagcctgttgcagcccaataaatggtaccaccattcttacagttaattaggcagaaaaacttggcatcatctttgagtcttttctgacagactctgtatctacatccagtttatctgcaaatgctgttggccctcctttggaagtaaacacggatctggccactttacacctccattccagtcacctcccttcaagctgcaattttcttttcatgatttattgtaatagcttcttaagtagtctctgatttcacccttgacctataatccagtcttctgactgcagccagtattacttttcatatgaaagtcagaacattttattcatctgcctcagaccctctagtggttttcatttcactttgaataaaatctgaagtcctcactctggcctgcaagtctccgcctgcctccctgttaattttctgaactcattaaccactctctcatgtttgttgttgtagctacactggctgtcttgctgttcttcagacatgttacagtactctcaccgcactgcctttaacttaatgttccctctgcctggaatgatactctagatcacagcatggctcactccttcagttgatccaggattcccttctccagtgtcacattgtgcgtggagccttctctggctatcttatgcagtatcatatcctcccctccaactcctgctgttgccagcccccttcatttttcttcagagttcctatcacctctgatgtattatgtttgcttatttattgatggtcaatacttcaagaaactgccagccctctaagagcctggggattagatcctcagctcctgacacaatgcttggcacattataggtgttcagttagtatttgtagattaagtggggtggtgagtgagcctagggaagattcttgtggcagttttagcagtttagtaatagaacatgtgctgtggaaa

SEQ ID NO: 9766 - DNA, 1050 bp, Homo sapiens
ttgagacagggtctcgctctgtcacccaggtcggagtgcagtggtgtgatctcactttgctgcaccatccacctcccaggctcaagcaatcctcctaccttagccttccaagctgttgggactataggcgcatgccgctatgcttggcctagtttttttgttgttgttttgtttttgtagagatgaagtctcactatgttgcccaggttgatctcaaactcctgggcttaagtgatcctctcatctcagcctcccaaagtgttggcattacaggtgtgagccactgtacccagccttctaattattcttgaatcaattttgagtttgtatttttctaggcgtatgtccattttgtctgtgcttcatatttattgcataaagttgttcatagtattctcttttaaatgtctcctctagctgtagttatgttcactatagtctgtcctttagttctccttagcagtgtttgaagagatacgctttttagtccatctattgaatttttaccattaggttatattttttatttccataagttctgtgtgtttcctcttaagatcttagtggtcattctttaactttttattttttaaattcacatttgtcttgattggattgatggtcattttttatagcctcttgctcacttgtttgtgatttcatttatttttaacatttaatccggaatcttgatgggtatggctgataaaattttaacaatggttgttatgtacttccctaataagttcaagataaattagactgtgactactttaacacatagatatagatctggattgctgtatttagccaataacatacgtattacagaggaattacttgttggatgattaaggttttcttaggtaaataatttggaaaaaatgttatttgtgggaaatataggaagaaagaaattaaacatcaaggaagagaagcaggaaatgttgctagctgtgtcttcctagatggaatgtgtttgtatagcatttgatatttctttgtgtttttttttttgagacagagtctcctcacattgtcacccaggct

SEQ ID NO: 9767 - DNA, 1027 bp, Homo sapiens
aggcacacgccaccacgcctggctagtagttagttcttttttattgtttggtagtatttcattgtatgatataccacaatttacttgtctgcttattgatagaacatttgggttgtttccaatgttcattaactgtgaataaagctgccccagacattgatgtacaagtcattgtttggacttacattttcatattgcttggataaataccaagttgtgattattgggtcgtatggtaagtggatgtttaactttgggaaacaggtggtttcttataaaatggttgtaccattttacattcccagcaactgggtatggaaattccagttactctgggtctttaccgatactgggtattttagccaatctaatggctgtgctgtggtatctcattgtggttttaaatagcttttccttgacgactaatgatattcagcatctttttatgtgcctattggccattggtatagctccttttgtgtgtctgtatgtcttttgtctcttttgaaaattggattgctttgtgttactgagttgtaaagtttcttaatatatttggaacacaaatcctttgtcagctgtgtattacagatagtttcttctagtccatatcttgccttttcatttgttccttcccttttaatacttacatcctctttctgtagtagacttgccagaacttttttttttttttttttttttttaagagttggggatctccctatgttgcctacgctggacttgaacttctgggctcaagtgatcctcccgccagtctcctgaatagctgggactatagatgtgcgccaccatgcccaggccagaaccttataacaaaatagttcaaacaaaatgaacacagtagataaccttgttttgttaactatttttttctacatcgtgtacaatggttttaaaattttttggataagttatataagtatcctattagtgttttcctttaatgttatttgcaatgtaattttaccagatgctgttttgatatctgtagaaatggatcctcttt

SEQ ID NO: 9768 - DNA, 1035 bp, Homo sapiens
ctggacaaagggatgattcattgtcctgggtgagatggtgtgagatttcatcaggctactcagaatggtaaacaatttgaaactttatttctgaaattttccatttaatatttttgaactgtggttgactgtgggtaactgaaaccaaggaaagtgaaactggggataagcaaggtactgtagttttctttgatcagcacctgaaagatactgtgccacttcttctgatccccatggtttctgatgagaaatctgctgtttttctcctgtaggtaagatgtttttcctaggctgctttcaatatttttttgtcttttgtttttagaagtttaattatgatgtgtcttggtgtagatttcattgggtttttcctctttggggtttattcaacttcttgaatgtgtaggtttatgtcttaccacatttgggaagttttcagctgttatttcatgtactttttcagctctattctccttgtcttctcattgtgatcctctgataacatggaagttagatcttttgtaacattcccaaaggctattgaggctctgttcattgctttcttttcttcagtgtgttttctgtttttcagatttggtagtttctactgttgtgcattctagtttgttgattcttctgtcccttccattttactgttaagaccatccactgagctctttattttgattattgtattttttagttttaagctcccatttgtttctttgtacttctgtgtctttactgagactttcatttctttgctgagacttttttttcatttgtttcaagctgttgaaacatttttatggagactgccttaatatgtttgccagataattctgacatctttgttatctcgatgttggtgtctgtcgattgtctttttgtcatttggtttgggatcttcctgttccttgggtttttcttttgaaatctgcacattttcatattttgttgtgtggctctgtatttttttagactgggttagctggcttttttggataccactctggcaggagaaagggaagtgct

SEQ ID NO: 9769 - DNA, 1018 bp, Homo sapiens
ctccagtaactgggagtacaggcgtgcgccaccatgcccggctgatttttgtatttttttgtaaagatgggggtttcgccttgttgcccaggctgctctcgaactcctggactcaagtgatctgcccaccttggcctcccgaagtgctgggattacaggggactactttatttttgttttattttattttattttatttatttttgagacagggtctcactctgtcacccaggctggagtgcattggcgcgatctcggctcactgctacctccttctgccgggtagaggcgatccttccacctcagccccggaagtagctgggactacaggcgtgcaccatcatgccccgctaatttttgtattttttttggtagagacggggtttcgccgtgctgcccaggctgttgtcaaactcaggctgagctcaagcgatctgcctgcgtgccttggcctcccaaagtgatgggattacaggcgtgagccaccacgcctggcctacagggaactactttaaaattatcaagtgacttaatgtgaaaaatttctgataaccactgcgaagatgttttatgacgaagcactttgattcatttgaaagttaattaagaatggagtaggaatggtgaggttgcatattagtaattcaaatttaagttttgagtctttgggttatttccttactattatgaagcctaagaggtgtgaaaatagtatggaaaactttgtcttctgtttcactattagtctgtaatttttagtttttaattttatatttagagacaattgtttattttgtctccttcctcaaatcattgcaaagtatatatttagtgtctatttctttgtagtgagagtttcagaaagaagccattggctgagctgattatccaatgaagttgtctgacatgagttactttagtttgtggttttagatgaacagtacatggtgcacagctgttgctcaaacagctttgttccagctgtcttactggcctgtcacaaaataccccacattcc

SEQ ID NO: 9770 - DNA, 1024 bp, Homo sapiens
ttatctttcttccttttgcctgctgttgaggagtctgctaataaaattaatctcgctaaaaagtgtttaacatgaaaagcaaatagtctttcagtatctgttcttgcaaattagccttaactaaaaatcatgtaagtagtttggtaatttgctgttataaattgattagagtagcagttctatagccaatctgataggtttagacattataggtaatattccatcccttctatgtatgaccaagagcttaccatttaatctagtgcccgaaaaaggctttacaaagttcatggtctgttgaggaactttgtccctttgagccttgacttttattagaaatattctatatgaggctgggcacggtagctcgtgcctgtaatcccagcactttgggaggctgaggcaggcagattgctcgtgctcaggagttctagaccagcctgagcaaaatggtgaaactccatctctacaaaaaatacaaaaattagcccggtgtggtagtcccagctactccggagactgaggtgggaggatcacttgaacatgggaggttgaggctgcagtgagctgaaatgacgcactgcactctagcctgggtgacagagtgagaccctgtctcaaaaaaaaaaagaaatattctatatgcttcatattgaatctctgtgaagttatctctattgggaagtactgataccaacctacagcttgttggattttatagatgttatttagtttcttggtgtctactctttccaacctaaacagttggaacaagtttttaatatgacatactggtgattcacagctttctcatagtaagatttatgatctccttgacttttttttcctctctacaggtgacagttaacaccaacatggttgatttaaatgactacttacagcacatattaaagtcaaccaatatgaaatgcctgactccagaaaaggtaaaatttgactaggaaattcagaaatctgatggaatggtagagtaggttcctggccttcctgtatttcctctagc

SEQ ID NO: 9771 - DNA, 1030 bp, Homo sapiens
aagggaaaacagatatataaaataaatatgtgcagtatgtaatggtaagtactgtgaaagaaaaaaataagtaaacctgtactaagtaaggtaggaatccataaagggatttggtcagttctcagagtggtgggggattgggagaaaagcttagaaaaggcttcatggaggagcaagtgctcagtagaagactacagatagacaaggatgcagttagaataaatgcaaatgatttgatacacttggagttcagaatgggttggaggatgatggcaggaaaaaaatgaagttaggaaggtttgtggaagccatattttacttgtcatgctaaggatgttagactttatctgtggagagaggaaacattgaggaattacaaatgaatgacttatagcattatatctttttgcgacagtactatagaaggttgattggaagaggcaggaagattaactagtagagaagcccaagtgagagatggcagaggacttgagccaacacagtagtggaatggagagaaggatgaatataatattaaggatatggttaatgattgaagaggaagtggctagagtaacactcagatttccagattaggtttattgggttgtttatgtcatcatcataacaggaaatacaggagagaagaacaaactttagagagacataataggttaaatcttgagcaggttcggtattaaagtgcctaaagatattcaaggacagtttgatgtgagtctgggacacaaacaagaggtctaaactagagataggccgggtgtggtggctcatacctgtaattccagcactttgggagaccgaggcgggcagattacctgagatcaggagttctcaagaccagcctggccaacatagcgaaatcctgtctctactaaaaatacaaaattaattgggcgtaatggcgcacgcctgtagtcccagctaactcgggaggctgaggcaggagaatagcttgaacccatgagacagaggttacagtgagccgagatcgcaccactgcgctccagcc

SEQ ID NO: 9772 - DNA, 1077 bp, Homo sapiens
attgagtaataaatacataatagccattcagttaatttaaaagttagttgatgaggttattatgtacaaataagtcggatttatttcattttagaaggatgagtactgttttggttaaaatttcaaggaaaggaatgaagaagaggaatacgacttaatgaccatctgctttgtgttagacactgtccaatgcatttttctattaggtaaaatgtgtagaaagaattaagatttccacttagcagattaagaaactgaggtccaaagtagtaagtggcagagtgagaattcaaaccctggaatatccatctctgaagcccctattctacctactacattatcctgggaaggaaataaattgaaagcagagttcccagttccaaaaatcccattagggtaatgccttttttagagaaacaatcaaatatttaaagataattttgcttgctgttgatactattactaaaatgatgtttccaattgacttttagatcccaattgtagagtcagaaataaagaaagaagctggtgaattaaaacctgaagaagaaataactgtagggccagttcagaaattggttactgaaatgggtacctatgcaactcagagtgcccttagcagttctagacccaccaagaaagaggaagacaggtaatttatggcacatataccctgccagctgtactacttttattattactcttgtatgtaagacagtcaaatgatttctttcctcttgcttttgcaaccaaaatgaaaatctttgccatttaaggtacttgagaagcggaggatgtttaagttcttccccctaggaattgtattgatggttttaattctctgtcccttccagtgtttttatggaaataactgttctgtttaaactcaaattatttttactcagaaaatgctaagtgggggtaactgaagatatttgagttttgttgtttattagcatctgaaaacattttgaagatttttcaatttctaaatgatggaataaaattgtgcatttttctattaagtaaattttaatggtgaagatggtgaaatctttgcctaaaattttactgaat

SEQ ID NO: 9773 - DNA, 1048 bp, Homo sapiens
agttgtagtacagtgtgctactacatacttctctgcctttgagttttggatccagaagatttttagtactataaattcttcagtatgcaatgataatggtgtgaaattttagatagttttgcgtaaaatactttatgttgcagagtttttaggctaaataacagtaaactagcattttatctttaatgtgtcatccttaattctaaataatgactactaatctagaacatttgaattacctcccagttttccagatgatatcttaagaaagattctaaagttttacagcctgcctgcagaactatgatgagattttagaaataatccactactttagttttcagcctttttgagtatgacgtttctctttctaatgttaaaaaagttacatatttatcctcccataatagtagttttaactttgttaaaatgcacacaaatagctaaaagctgttttgaattcaaaatcaattaatagtatgtatttacattttgaaaaatagctatatgtgttttgaaacacgtttacttggtatgactgtagattcatggagcctgcattaactcaattggttaggaaccagaaatctaatccagcgccttcatattatatataaagagtctgatttccagagataaatgacttgagcaaagacagattatttggtggagaaccaggtggagaaccttgtcacttgggtttgtacttttattaccattgctgatactgaagtaagaaggtacattttattttgttaattgcttttaaatttatgtgatgaattttcttttgaaataattgtgcttttttttaaaaaaatttttgattcagaaaaaggagatgtaaagtcaaagactgaagctttgaagaaagtaatcattatgattctgaatggtgaaaaacttcctggacttctgatgaccatcattcgttttgtgctacctcttcaggatcacactatcaagaaattacttctggtattttgggaaattgttcctaaaacaactccagatgggagacttttacatgagatgatccttgtatgtg

SEQ ID NO: 9774 - DNA, 1048 bp, Homo sapiens
tcgggaggctgaggcaggagaatcacttgaacctgggaggcagaggttgcagtgagccgagatcatgccactgcactccagcctggccaggtgacagagcgagactctgtctcaaaaaataaaaccaaagatattgttatgtttatcattgtggaacatgcacctgttccacaaatacaaaccactagttggcttgtattcagctaaaaaaataaatattctgtattatactttgggagcaatttaagtaattttttcaatgtgatttttagtcttatatactgactttagaacttaaagtcctccccactccagtaatactcaaccccactgtatatacagttcattgtgatgccctttcatgtttagtctgttgtactcacatattccatttagtctgttgaataattacaaacagtaaaatcctaatgatgttttataaagcctgtcactttgatacaaagatactcaattcacctggaatttattgagcatgtatgtgtgcagctctgaagaactggcatggaataaaaggcagtggctgggtgtgttggctcacgcctgtaatctcaacactttgagaggccgaggtgggaggattgcttgagttcagttcaagaccagcctgggcaatatagtgagaccccatctctacaaaaatttttaaaacttagcctggtgtggtggcacacacctgtggtcccagctactcaggaggctgaggtgggagaatcacttgagtccagagtctgaggctgcagtgagctatgatcatgccgctgtactccggcctgggtgacagagtgagactcttgtctcaaaaaaataaaaataataacgtagatgacaggattcaggtcctagttctaactcagtgtttggccattacatgatttggggcaagtccctattctctaggccttgactttttagataccacaatttctatggtccttgataaaatgacaaggtctttgctctgcatttataatttaaaggcattcaaaattatataattacatcttagagtaaaacagcccaaacaaag

SEQ ID NO: 9775 - DNA, 1030 bp, Homo sapiens
agatagatagtggggctatgggtagaaatagttttaaggctattcaggtaattatgtgagagatgatagtgattgcagcagagtgacagagttaaagatgaagagtagtggttcaattttggatatcttttgaaattacagccaaaaaagtttgctaatagatttgttatagggtgtgaggggggaatgtctccaaggttttgggcctaattaattggaatgaaagatttatgatttactgaggtgaagaagatagtgggaggaacaggttttagagtaggcgttggggaggaaggtcaggcagtcagttgcggacatgtaaaatttgaaatgcctttttgtctaattgacggtacagagtaagcagttataagcaacacgtggagttccatggagagtggtccaacctacatttcaaatttttgaagtctttatatagaaatggcatttagagtctggactggaagagattcctaaaggaattgaatagttagacaagcattgtgaggactggaccaagaacactaacctttagcaactgggagatgagttaggtgttggcaaaaaagactgagagaggtggtcaaagaagtaggaggaaaacttggaaaatgaggcatctttggaggcaaacgaataaactttcaaggaggaggggcaatgaagttgtcactgaggacctgacaaaacaggcttaatggaataataaggcaaaaacctgatagtggaatcaggagagaatgggagacgaggaattgcagatagctttttggaggatatttctgttgacggtcactctgtcactctgctccaatcgctatcatctctcacatgaattacctgaatagccttaaaactatttctacccatagccccactatctatttacccctacaatctgggttttttttttttttttgagatggagtggtgactggaagaggagagaaataaattgttttgttttttaagatggaagaaattacatcacatttgctgcatgattgtgagagtaatccaagtaaattta

SEQ ID NO: 9776 - DNA, 1034 bp, Homo sapiens
ggttgctgtttttcttttgttcagccttctcttctctgttccataagtgctctgatacaaagattttctagagctaaaaaatgtttcagtcttttttaaaaaccttatgtggctccagagtttagcacaaaaacgcacccttgcaggcatgtctttcttaccttctgtttttcttatatggatgttatccatgtaaacgcttggaagaatttgaagtgaaatcaaacaatttagattggaatagttgtctataatttgaaattactaaactttttttgtttcttttttagtaattttatgcgtcaggagtgtttggattccagatttgtattcgatagaccactgcctgtgtctcgtcttgtatctctaattggaagcagtatcctttttatgttagcatttatggatatgaactttgaagggttttgatacttgtgttaattattaggaatataataataatatgacataggtaagattgtgaaaactttaaaacaacaaattggattgctctttcattagcctttataagcaatttatatttgctagacacaaataagcccaacttcaggaaaatcatctaagcatctttttagaggggatttaaagtttcttaatggttctagatgtcccaagaaatcctagaccccttgtatccaaaacaaatcaggttttagatgggaagaaattattttgctggcactctttcttaggttcggtagaaagtcaaacattttatattaggccaaagaaatagtgtcctattgcattatttctctggtggattatgcaacaattaaagaataagccagagacctttgttaataatgtataatttgaaaataaagacagtacttcattccttgttaaaacaagctcgttaaccagtctaagagacccagataccaacacaacgatatggccggagaccatatggtgttggtctccttattgctggttatgatgtaagttcattgaatattgttatatgttaatgattttttttaattaactagaaatttttataattttta

SEQ ID NO: 9777 - DNA, 1047 bp, Homo sapiens
tctatctgtcaaacaagttacttaactactttgtactcagtcttctcatcgataaaactggtctaataataccatctcatagaattttgtgagttatgcatgtgaagtacttagaacaatgcctggcatatataagcactaaaaaaatccgtttaaaaaatccacttttaaaaaaagtgaatcttacatgttaaggctactgtaaagaaaacagtgtgatattgatggagagatagacacatagatcagtgaaatataatagagaaatatatcacacaagtatagccaaccgattttcaacaatgttgcaaaaaaaaattcaatggagaaaagatagtcttccaataaatagtgctagagcaactggatgtcaataggcaaaataatgaacttcaacctaaacttcacaccctatagaaaaactaactcaaaatggataacagatttaaaagtaaaatgtcacactataaaatgttttcacaaaaacaaaggagaaaaccttcaggacttagggcaatgtgaagagttcctcaacatgatacccagaaatgatccttaagagaaaaattgataaattagacttcatcaaacttaaaacttttgctctgtaaaatatcacattaagagaatgaagacagacacaggctgaaagaaggtgtctgcaaaccaaaaaccactgcagaaaatatagtaaaccaaacatctgacaaaggaccataaagaacactcaaaaatcaacatcaaggaaacaatctaattagaaaataggtaaaagacatgaaaatatatttctgcaaagaggatatacaaatggcaaataagcaaataaaatatgttcaatgtcattagccattaggaagatgcaaattaaaaccatgatgagatatcattatatacctattaggatggctaaaataatgacaatactaaatgcctgtggagaaaactgactctctcatatatcgctggtggtagtgtaaaatggtatagccactctgcaaaatagtttggcaatttcttaaaaatctaaacttatacttaccacat

SEQ ID NO: 9778 - DNA, 1030 bp, Homo sapiens
aaaatctgaagcattgacctagcatttgctatgagctgttgcaggggaaatacaaggttaggttcctgcaagcctctggtcacattttcatcaaccaatcaatacataacctagttttatgtgtgtttctgtttaaagacaccttatttaatatatattgttgatttattaacactgaactcacagcctacagggctataattcctacccgaaggaagcttatctaacacacgtttgttttctgtataaggcacatcacagccttcttactctcaggaacaccagacagcactgcaacgctattattaggaatcattgtaaagagcaaaatcaccaaaaaacacaaaaatgagaaaaacgtggcactaaatagactgcaaaaagattcttgtttacagtataagagatgaaacaagaaggcaaggcattgctttgttcaatctcagctgggaatattcatgttagacaactcacatttgtcacggatctgcgcatatctgtaaatgaccacaaaagttccatgagcactgatttgggctacaaataaattttggcaagtaggcaaatccattcatgaataatgaggatgaactgtactaagtttctgtgagccttagtaatgatacctccctcacactacagagtaaatgaaagaaggcatgtaaaatgccttgcatggttacagttagttcttctttataccagatatttacattttcacttcctgtaccttatctgccatgctcaaatctgagagataagtagatatcaagaaacttccagccaaatgtctcatctttatcctgggagcatagaccaaaaactactcacactagctaaaatagaaaagaaggtgttttgaacagacacaagaggcaatctcttgaggcaccaaagtgcagggttcagcatagctaggccaccctgcgttgggactgaaacaggaagatcagaagaagtcccaactctcaggtggatgcatcctctgccatctgtgcctctctgagcatctgctagctacacttttctg

SEQ ID NO: 9779 - DNA, 1069 bp, Homo sapiens
gagggaggaggaagacaataagcaagtaaataaatagaataatttcagataatgacaagtaatatgagaaaagtaaaacataatgatattataaagcacaactaggatgagaagggctgttttagataggaggattaggaaaggcatttctgaggaaggcattttatctgagacctgagatatgaggagactggaattatttatccatttattcagtcattcattcaaaaaatgtttattgagtacttactgtataccacaaattgttttaggcaccagggataaagcaagaaacaaaattctacaagaatatctgccctggccgggcacagtgactcatgcctgtaatcccagcactttgggaggcccaggcgggcggatcacaaggtcaggaggttgagaccatcctggctaacacggtgaaaccccgtctctactaaaaatacaaaaaattagcagggtgtggtggcgggcgcctgtagtcccagctacttgggacgctgaggcaggagaatggcgtgaaaccaggaggtggagcttgcagtgagcagagattgcaccactgcactccagcctggggagcaaagcgagactccatctaaaaaaaaaatatatatatatatatatagagagagagagagagagagagactgtgtcagagttgagacggggtcgatgaggctgaccccagcgggtagaagggacgaggaggagcgagcagcggaaggtcctggtgtgtccggaattggtgggttcttggtctcactgacttcaagaatgaagccgcggaccctcgcggtgagtgttacagctgttaaggtggcgcgtctggagtttgttccttctgatgttcagatgatgtgttcagagtttcttccttgtggcgggttcgtggtctcactggctcaggagtgaagctgcagaccttcgcagtgagtgttacagctcttaaggcagcatgtctggagttgttccttcctcccggtgggctcatggtctcgctgggctcaggagtgaagctgcagatcttcgcagtgagtgttacagctcataaaagcagcgtggacct

SEQ ID NO: 9780 - DNA, 1077 bp, Homo sapiens
ggtgattcctcaaggatctagaactagaattaccatttgacccagcaatcccattactgggtatatacctcaaggattgtaaataatgctactgtaaagacacatgcacacgtatgtttattgtggcactattcacaatagcaaagacttggaaccaacccaaatgtccatcaatgatagactggattaagaaaatgtggcacatatacaccatggaatactatgcagccataaaaaaggatgagttcatgtcctttgcagggacgtgaatgaagctggaaaccattctcagcaaactgtcataaggatagaaaatcaaacagtgcgtgttctcacccataggtgggaattgaacaatgagatcacttggacacagggtggggaacatcacacattggggcctgttgggggttgggggctgggggagggatagcattaggagaattacctaatgtaaatgatgagttgatgagtgcagcaaaccaacatggcacatgtatacctatgtatcaaacctgcacgttgtgaacatgtaccctagaaattaaagtataataaaaaaaagaaacgttatgcattttttcaacccataagtagacccatataagttacctttaactgtaatatgaatgataactagaagctaacattgtgctatggaaaaataattccaagtaagttaaaatgttgtattatggtcaatatatgtggtaaatctcttatttaaaacacaaggaaagacatctacaattttgattaacagaaaatcagatattctcatccccattaaatcaatattgaacacttatttactgaatattgggttaaaggagtacgaaatgtttttttgcatgggaacctacatgtcttggtctagacatgatggaaatgtaaagctgaaccccccccttccctgtgccaacaatttatcaagcttattagtatcttttactgcagagatgtagatctctctatttggacttcccactgttgtagtgctccttccaaatgctcacactctgacctgtgtgaacatatggaggggatatgaggggttctatttcctaactatatcag

SEQ ID NO: 9781 - DNA, 1199 bp, Homo sapiens
gcaacggacaacttctgcagacttaaacgtccctgtctcatagctctgaagagagcagtggttctcccagcatagcgtttgagctctgagaacggacagactgcctcctcaagtggatccctaacctccgtgtaacctaactgggagacacctcccagtagtggccaacagacacctcatataggtggctgcctctctgggacgaagcttccagaggaaggaccagacagcaatgtatgctgttctgcagcctctgctggtgacacccaggcaaatagggtctggagtggaactccagcaaactccaacagacctgcagctgagggacttgactgttaggaggaaaactaacaaacagaaaggaatagtatcaacatcaacaaaaaggtcatctacaccaaaaccccatctgtaggtcaccaacatcaaagaccaaaggtagataaaaccacaaagatggggagaaaccagagcagaaaagctgaaaattctaaaactcacagtgccttttctcctccaaaggaacacagctcctagccagcaacggaacaaagctgggcagagaatgactttgatgagtggacagaagtaggcttcagaaggtcggtaataacagacttctccgaggtaaaggaggatgttcaaacccatctcgaggaagctaaaaaccttgaaaaaagattagacaaatggctaactagaataaacagcagagagaagaccttaaatgacctgatggagctgaaaaccatggtacgagaacttcgtgatgcatgcacaagcttcaatagccaatgtgatcaagtggaagaaagggtatcagttactgaagatcaaattaatgaaataaagtgagaaaacaagattagagaaaaaagagtaaaaagaaatgaacaaagcctccaagaaatatgggactatgtgaaaagaccacatctatgtctgattggtgtacttgaaagtgacggggagaatggagccaagttggaaaacactcttcaggatattatccaggagaacttccccaacctagcaaggcaggccaacattcaaattcaggaaatacagaaaccactataaagatactcctcaagaagagcaactccaaggcacataattgtcagattcaccaaagttgaaatgaaggaaaaaatgttaagtgcagccagagagaaaggttgggttacccacaaagggaa

SEQ ID NO: 9782 - DNA, 1071 bp, Homo sapiens
aatgggaaaataaaattaagaggatttgaatatgttataaaggaaaggcactttgagtaaaacattaattggggctgccatcatgtgaagatttttaaacttttgtagaacccagaggtgttgcaaatgccgctctctgagaaagcagatagtatgcagaagtggctcttcctctgatattggaagtaaaagattaacttcttgatggctgacttctcccaactgagtttaagctcacaatttcctgactcctgaaaattggctgtgactgccaccaaactgtatccagaaacccaaccatttgtcacctcccctgctatcacattggtccaagccacaatcatgtcttctttagattattgcaacagtttcctaaatggtcttcctgctgctgcacttaccctttagagtctcttctcagcaaagcatccaggtgatcgtgttaattcaagtcagtaccttgttctgtaccctgcactggcttcctatctcatcagaatgaacactacatggtctgccctctgtatccccctgatctcatctcatcactcttcaccttgctcactgcactccagccacataggattccttgctgttttgtaaacactccaggaatactcctgcctcctgtttttgcatttgctatttcctccaccctaaaatgatcattcactacataggcacatggcttgctctttaacatcctctaggtttttattcaaaatagtctccctggctctcctagctaaaattctaatcccctctcaacatctcataactccattcttttatttttttctccttatcatgtcactaatatgttaaatatttaattatcttatttaaaaaaggtcttccccaaaagaatgcaattttgctccatgaaggcaagaatctttgtctgttttattagctgctagaatatctcctgatacatagtaggtattcagtaattatttgcagtatgaatgaatgaatgaatcctgatgagacaagcctggattatctccatccacctatcgttatgcagataactttgatatggtctttggactcaccaagtgatgtgat

SEQ ID NO: 9783 - DNA, 1052 bp, Homo sapiens
taggtgtttgtttagtctaagataaaactttgtccattgaacatgtggtcatttgtctttggtaaattaggcttatagtaaaagttggataatatagtcacctgggcctatttcaccaggttaaattacacaggactgactagcttcttgtggtggtgcaattataggccttttctgccagtccacagataaggagtagaaaaactttatctgttataatactctggctaatgagttgctgagaacaggacccaaccatgtagttatataggaggacaatttggagaaggatgactaaccatccattaaaaaaattttgttccctttcattttttagatacagagaagtaggaattatacaatattttaatattttttttcaggcttactcaattccagatatggccgaggatgggttgatcacagacgattagctgtaaacagttttcgatattttggatatggccaaaagtcttttgaatctaaaatcttggaagaaaccaaatttttcaatgatgctattgaaacatacaaaggtagaccttttgactttaaacagttaataacgaatgctgtttcaaacataaccaatctgatcatttttggagaacgattcacttatgaagacaccgattttcagcacatgattgagttatttagtgaaaatgtggaactagctgccagtgcctcagtcttcttgtataatgcctttccatggattggcatcctgccttttggaaaacatcaacagctgtttagaaatgcagctgtagtctatgattttctctccagactcattgaaaaagcttcagtcaacagaaagcctcagctacctcagcattttgttgatgcttatttagatgagatggatcaaggtaaaaatgacccatcatctactttctccaaagaaaacctaattttctcagtgggtgaactcatcattgctggaactgaaactacaaccaatgtgctacggtgggcgattcttttcatggccctttatcctaatattcaaggtgaggattctcttgatgatctcagggtctatcctt

SEQ ID NO: 9784 - DNA, 1048 bp, Homo sapiens
gtcccctatcatagttttattgctggtaccactgtttgagggaaccatggttctttacagagagagctcttgactacaaatgaaatagggccaaactgttactagctgcaatggggcagaggaaaaactgaaaggagcaaaaatgaaaaagaatgtatgcatcaaagagtagacattgtttgcctcactatgccttagatctagttgataaccaccaaacatattaactctaggctacagcggcatttgatctttatcctggtatgaaacatctctaaagatctcccattatcttagagatattttccaattctgacaaagtctcaaagttggcataaattgttaaaatactatacctttttttggaggttgaagaatattgttccctcctgtgcttccaaaaagttctggaaagttgtacctaggacttaaataaaatcttagttttccactgtcttttaaatttgagatgtatgctcacagaaaaaaaaaaaaaaacaactggactttaaaattgcttaggacagtcacttcaagtgacacccgcctttgtgttagtctgtgaattcaattctgctttgtgattcttgaaagttaaacagccagtcctcaggacttatatattcattttaaaggcaatcttaaatagaagtgtatcacactgaaaattaccatttccttggagattgattctgaatgtttaaatttctgcagtaactttaatcttagtctagatttcaagaggcattccctggctaggaaagccaatacaagtggctttatcgattattttcaggtaatggacttcaggacaataaaataattccattaaagcaagtagaattgacagcgtattaatttatttttacagcatttattgagaactttatgcacagcactgaatgagattctgtgtaaggattcaaagatgaaaaagatgaaatcactgctcctaaggagtttgtaatttagcatgcaggcagaagacaagaatatgaatgtttctggttcaagatagtgttaaataagtgccatgggagcttctaag

SEQ ID NO: 9785 - DNA, 1035 bp, Homo sapiens
aagtgcatatactgctcaacattttcatgcattttactgactacacaactgtggctgatgagttagttttttttattacttagctattatgaaatgaatttatcaataatatggaagggagcaatgttagcccttgccttggttttaacctcttcagttcgcagagtaagtatcagaatgttgtaataatctggataagattattatctggattattcaagataataaatgtgtgtgtgtatgtgtgggtataacacactattatatgctaatctattcatgtatgtatctggctttgtatatttgtttgtatgtatctggcttctccaactacagaattctctgaaactcatgtgtacagaaataatgcctcatttactatactaatttaataaagtgttggacacatagctggtttcaaataggcccttaccaattctgagtgtggtgtccagaatattccctctactattaatgtagagggaatattcattagggtacatgtagctacaatgacgtcttcccaaagaactgtgaccgaatatacttccatttatttgaaacttatttggtaatttacctatgaactcatagagaattatgcaggtacattcagccctctgtatctgtgtggattcaaccaattgtggatcaaaaatattttttaaaaaaattcgagaaaatgttacattattgctaaagtacactatgtagttaggtctacagtggttgcatctgtatggaacatctacagactttttttttcttgcgtttatttcctaaacaattcagcataacaagtgtttacataacatttatattgtattagctattataaataatgagattgtttaaagtatataggggatgtgtgtaggttatatgcaaatactataccactttataaaagggacttgagcatcctcagattttgttatctgtgggggtcctggaaccaatcccccatgatacagatgtaaaactactataaaatattaaatttggggctacttttttagcaatgataaagataga

SEQ ID NO: 9786 - DNA, 1085 bp, Homo sapiens
agtttttttttgttattaactagactgttaataactacactgttattaactagactatctgtgttaataactagactgagaagaaaaaatgttactactcattagttatggctcaaacagtataatttgtattagaaaattttaaggccatttgcaaaagtattctccccttctgcagattgtctgttcattctgttgattgattattttgctgtgcagaagctttttagtttaacgtagtctcatttgtctatttttgtttttgtttcttttgtgtttgaggttttagttatgaattctttgcctaaaccaatgcccagaagagttttcttaagtcttcttctggtattttaatagtttcagtcttacatttatgtctttaatccatcttgagttgatttttgtatatggggagagataggcattcagtctcattctcctgcatatgcaatccaattttcccagcaccatttattgaaaagaatgtccttttgccaatacatgttcttatcaattttgtcaaagatcagctggctctaggtatgtggctttatttctgagttctctattctgttccattgatctacgtgtctatttttacacaagtaccatactgttttgattactataggtttgtagtgtaatttgaagtcaggtaatatgatgcctccagctttgttctttttgcttaggattgccttgactcttggggctcttttttggttgcatatgaattttaggattgttttttctaatttgattaaaaatgacattggtatttttatagagattgaattgaatctctaaattctttgggggcagtatggtcattttaacaataccggttcttctaatccatgaccattggatgtttttccatttgtttatgtcatctacaatttttttcatcagtgttctatagttttccttgtacagatttttcacctctttgtttaaatatattcctgtttttttttttttgtagctattgtaactgggattgccttctttctttggttttcagctagatttttttaggtgtctagaaatgctactactgttcagtgaagctaacagttactgag

SEQ ID NO: 9787 - DNA, 1075 bp, Homo sapiens
aacaacaaaaatcaatttctagttaatattattaacttggagcaagtaattcatgatcacttgactagcagccttcgttgttgttgttaaaaatctctcccattaatatttattttataaaattaggtatttctatgtataacttcttaattttaaagaaactactattcatattctttgagttacaaagctattttttcatcaagtgaaataaagaaatcaaataacatgataagaatttgcaataaatattgaaagaggttggattgtcatcagaatttatcattatgggtattttttgagggggtgatatagcacttgctataaatattcatcatgttcttaaatctagagatattccgtgattaggtgattttatgcctgtttatgctggcaggaacaaaagaactttaaaaacagaaaacataaacataattgaaccactcacttaaaagagaaattggaatagatgttttccaggggagaacatgctttctgtataaaaagggctagtgtaacaagaagtcatctattcttgatttctttagacagttagagctttgtgccttgtctagtttctgtgttttaagagcttgttctgtgtagcagaaataatacaataaatgggtttaaccacatttgtctcagctagacagtctgctttgtcagagattgctggtacaacataaacaaattatgtgtttgtagtgcttttcaatgaaagcctatctaacagagctgagattgtgtttcagcagctgtagatttaatctcctacctgtcagttaaaacaggcatttcctgagccagataaggactggttgtagagcagggaagtagtcacagctggacaaagacctattgttattggctgataatttctatgtagattcaactccttattctactgtggaaactacagttgtagtgcagtattaaaggagctagcccagccttttaaaatgttaaatcaaagagaatcaaaactggattttgtgtcattcatttgggggaactgtcatgtggaactaaaaaaaagtctatagatttgatcatcacagttttagatcattgt

SEQ ID NO: 9788 - DNA, 1073 bp, Homo sapiens
caacaactggatattcattttatatggctttaaaaatcatgatattttgctttatttcaagaagctcagtttcctgaatttgtgagtacttttaccttggaacactgtatcttatcattttataaggcatataatagaaacgtattcattttatttttctatgccaaatatgtattctcttgggaaattctaacaatggaaaatacaaacaaatgtatattatatttgagggttcatcagaagactcatttgcttccgtatcaattgaaaacatttacagagactttaggtggttttcctgccatagcacatttgtattagtaatatagttgaaataacttttattgatttaggatcaggcaacatctcagaagtatctctgagtctttgtgatgatcataggatacagcataatagaaagtgtagaaaattgggtgaatttttcattcattcgttcacagacatttattgagctcttgttgcatattaagcacagtgacagtcactggcatgttgaaaaacaccctgacatttaaaattttttaaattccttctaaaaatatatataaatatatatacatatttgggatggagtttcgctcttgctgcccaggctggagtgcaatggtgcgatctcgactcactgccacctccgcctcctgggttcaagtgattctcctgtttcagcctcccgactagctgggattacaggcgtgtgccaccacgcccagctaattttttgtctttttggtagagacagggtttcttcatgttgatcaggctggtctcgaactcctgacctcagatgatccccctgccttggcctcccaaagtgttggaattacaggcatgagccactgcacctgccttaaaaatattttttacaattattctatcagtttaatattaaaacattcagttaattagcattttatttgttgtagtctagttatttgatattttaatgtcatttattttgttttttatatttaatgaaagaaaactggcaggtttgtttcatctgttgtccagttaggctcacttgactatactgcccttccaataaaacctag

SEQ ID NO: 9789 - DNA, 1015 bp, Homo sapiens
acatgaactcatccttttttatggctgcatagtattccatggtgtatatgtgccacattttctttatcgagactatcattgatgggcatttgggttggttccaagtctgctattgtgaatagtgctgcaataaacatacgtgtgtatgtgtcttcatagcagaaggatttatattcctttgggattgctgggtgtgcattagctctttaaattatttgggattagtcaaatctttaaaaaaatgtgtttgccttagcttttcaattgcatccattactgtcaccaaataatattcaccacagaaatatgcaactttagagttttagtgaattctttaggaccaggacaatttcttctcttttttttttttcttttctgtacaacacttagtgctttgaagtttcaagatctggattggtgttttggagtttggagaactgggttctaattttaactctgctactaatttgtaactaattacttgaacttgaacaaattgtttaaactctctaggcctcactttcatttcagttgtaacaatctctctggttcagtgatgcaaaaaatctgatttcaactggagagattaggtgtgatgagaagatgtcattattctgtttaataatatgtataacttttgtatgaatgcgttgggtggcaaattaattggtgtgggctagaaagtttgaaaaagctttgaagtgttagttaataatagtaaacttctgaggcttctttttttcacatgagttgttggaatttatacctatttttttatataacacctaatggcagcagtaatttttttttgttagatgttgcttcattttgaagttccattcttaaaagttgctaataggcatagtgttgcatcaagtttgactttcattttatgaatttggactgtagttgtctcctttttttaaaacagtgatagaaaatatagaaatgtcaataataacaaaaatgatcgtggagagaagtttgaagagtgagatgggaaagagagaatgtg

SEQ ID NO: 9790 - DNA, 1044 bp, Homo sapiens
ttacaacacttttaattttctcagtgttacaaagtgtttattttgataaagaatttgttgatgctctatcagcttttccatgtgcagaagtgcaactgggtgattagttaggcttgaggctagcagccaaaatgtagaaatttggtccccagttctttttctggaataagaaaaagctactgagttttcctgagccttgataccctattgcagaaattcttcactatcaaggatgtcagctcttttctctcttctcatttttcttctttctttctaaaattctttttgtctcatggtattaccatcttcatctgtgtttaattaagtaagtactaattttggaggtattgtagggtttatgttagcttagtcatatggaaattctttacatttgtatcaattttttctataattataaagctaaagaatctatttttttactgtaagtttaaagacaaggaatctaaaacttggagagattatttggcttgctcaagatcatatgtttagaaatcagggccgggacttttggcaatgccacactgccaattaattgattcctgttcatttattttttgtcttgctatattgatgaccagtgtcagtatgttatttttatcatctgtttaattatttcacaattgtcttattttgctatatctacctatctattagtagatggacacatatagaggtgatttgcttgattgctttttatgtctcatttgcaacttgatatagttgacatgtaagtggtttcatcattaaattaaatttatgattggttggatagaatacaccaataagtttatgagatttgctttttttagaaaaactatcatacttatttgtgcctgttttggcagtaagaagttattatgttgttttttttgcatttagccataattatggacttgttaaacaattggttggtagaatggatttagataaaagagtaaatatggtctttcttattacttttttttctgattaaaaaaccaaactatggttattggaaaaagtcagaaaatatgaaaaagaaat

SEQ ID NO: 9791 - DNA, 1035 bp, Homo sapiens
ggagtcttgccctgtcgcccaggctagactgcagtggcgccatctcggctcactgcaagctccacctcctgggttcacgccattctcctgcctcagcctcccgaacagctgggactacaggcacctgccaccatgcctggctaattttttctgtatttttagtagagacggggtttcaccgtgttagccgggatggtctcgatcccccgacttcgtgatccgcccacctcggcctcccaaagtgctgggattacaggcgtgagccaccgcacccggccgtaagcttcttaaactgcaatactatttagaatactataaatgaatctagagtctccacagcatagtggtcacaatgtctaagatataatccaaaattgctcaacatatgaagaaccaggaaaatttgaaaaaaaaataagacatctcagtagagagagataaattattaaaaagagccaaagggaacttaaaaaaacgatatctgaaataagaaaatcacttgagaggacaatcagcagaatagagatgacagtgaaactgaagatagatcaatagaattatacaatttaaagaacagagaggccaggcatggtggctcaagcctacaatgtcacctctcctttgggaggcttaggcaggaggactgcttgagactagtaagtttgagaccaacctgggcaatgtagcaagaccctgtctctacaaaataataaaactagctgagggtggtgacacgaacctatagtcctagctacttgagaggctgaggtaggaggatcacttgagtccaggagttcaagtctgcagtgaactaagatggtgccactgcactcttgcctggttgtcagagtgagaccctgtctcttaaaaacaaaaacaaaaaaccacaaaacaacagagaaaaaattggaaaagaaaagaagatgaatatagcattagggatatatgacaatattaaaaggtctaacatacatgagtcccagaaaataaaagagaatgatgttggggcagggaaaaaaattgaagaaataatgc

SEQ ID NO: 9792 - DNA, 1049 bp, Homo sapiens
aaactgtctttttttaagttaagaatccttttttcttcacgtgggcaactctcatcaaccaatttttgcactggctaaaacttccattttctccctttgaacatgtacatgttagccagttaaatcaaatcatggcacttgattgaatcttagggcaatgttggataaagtcaaatgtcatgtaacaaataccccaagcttttacttcttcaagtcagtctgaactctgtctttaggtagatggttttggatgagaaatgtcaccagtatcactccttatccctttcctcatctggaagtccttctgttaagaaccttaaggcttaagtatgaactgggcaaactcaggttaatctgattatttatctatactttgggatgattttgccttagtcttcccccaactaatattggtcatgttcttaaaatttccttaggagagacattttacaaacttccatttactttttcactgtatatggcttatattttcctttaaaaataatgtagtactcaggaggctgaggtgagaggatcacttgagtttaggcgttcaaggttgcaaatgagctatgatagtgccactgcactccaacttggtcaatagagtgagacccagtttcttaaaataaaataaaataaaataaaataaaaataatataaaacaataaaaatattactgctttaagttatctatggatgttaattataatcttttatacagtagcaatttatatagctacagtaatcccttatgtttatatggtatttatagtttcaaagctttttaataaacatgatcctgtttaattataaaaataaccctatgagacacacagacctggtttattatattcattttacagatgaggaactgaagcacagaaaagttaagagatttagtctagatcgtaaatctaggaagtggtagagaggccaagaaaaatctgttttctgagttctactagttcagtaatgtcttttctttgttttagtcactttaaccttctctcataatcatcttttgaatcatcatctttttgttgacc

SEQ ID NO: 9793 - DNA, 1060 bp, Homo sapiens
tagtctatctttggcagttcagtctggttcgagaggtttctatagggagagaatgattatttttaaaggccttgatatgtcattttgaatcccaaagcagaaatcatgtagccctataaaccttaaatattagaagattactggctgtacagcaagcccccacagaatgcccattgaataaatggttttaatattcgagtcatggatgtaagatgaaatgtactaggagctgaaactcatgggagaagaatagtttgttaagaattggtaggaaatgggctactactaccaatgctttctagatcagcatttctccttctatgatgtgagcacactaactggattaactaactgaataactggattttggtgtttgtttaaaaggcagattcttgatccttcaccccaactttttgaattagaatctctagatgcccaggaatcttcatttaaatgacttccacagatgattctaatcaccacaaatattgagacccactgtctagaaaaataacgtagtaaaaagctgagacttaaaaaaataagacaaatgtaaaactgggtttctgattacggcaatttgtatcattggatacatctaaaataattcgtattgaaaaataacctttttaatttattttgttttatatttaaaactcttaagagtgacagcatgtggacagctaattaatacattatttcagtatcattcataaattgcttttgaatcctttgacttaaagagagatagttacacttttgactgtaattaacttggcatatgcctttgaattaagaactggagttctgaactttcttaaagagcttttaaaatggtgctgatgtcttttcattgttcctacttcactcagtggggcgcagatatttgtcataagtgaattggtgctaattaaagacagtattgctatccatctctatcaatgaaggtaactatatttttgagttagtaggagtagaaggatgggaagtgaaagaggtgatctgagatgctgcgaaatgaatgccagttgaatatgtagagaaattataattggtagga

SEQ ID NO: 9794 - DNA, 1059 bp, Homo sapiens
caagaagccaacagtgaagtcaaactcataagcatcctatagaaaatccctcaaattacatctgtgctgttgccagctgtactgccagggaacaagaactgtacagatttctgtgcaatgactgggttacttaacacaacttgattagctctgtttctgccctgtctttggctgacagctgaccgccatactgatttggtggatgtaagactgaagtgaatacaaccacttatatgcaccttcttcttgtatgctatcactgtcttgtacagtagtcatgctgattgactccaaaaattcattttgtcactcattcaacacacagtttgaaaactattgcattaaagtaagcaaatttttttccctgttttgatcttcatattatttagtctgccattgttttcaaagaactaagtctcctccacaggaccttaattttattgcttgtttgaataaaatcattaggaagataaattttgtactctactagtagtgtataatctattaataacagtatgtatcaagtgattaactgtgccagttctgtctatctctctctctttctgtttctctctctatatatactgaagtgaatacaacagagagagagagagacaaagaaagaaagaaagaaagagagagagagaaatcgaaggagagagagaaataattttctcacttaatcctcataattaccctgtaaggtaaaaactattactgtacccatttttataattggggctcagagtggtagcacaaacttttctgatagcacagtaaatgatagagccagaattcatattcaagattggtttattcaatgactgtgctcttttcctaaatcctaataacttcctaattttagcttaaaaattacttaattttttaaagtaatttttaattttttgtgaagagttgtattgcaaagcaaataaaaacagacttttaatgatgattgttgcatatttttaataaagttgaaacttcttgataaaataattttttccctgcacagaagaaaagaaaaagaagggaagaaagggaggaagggagggtggg

SEQ ID NO: 9795 - DNA, 1049 bp, Homo sapiens
tgacttttttcaaagcacagcattagatgctgcattggaaacaaacgcaaatgtattatacaaagtccctgccctcaagaaccttagagtctagacataattattaaactctcttattccttttatttgtgtcgctagtgtctaagtgaaccaatgcatggctcaaagaaggaaaatgctaattaaattacatttgttattgcagaggagatacacagaagagaggagatggaatttcctatgcagaatgttaaatgccttaatagagttaaaaatactactctaggaggttcaaaaaatttaagatatatatccctttaagaggaagtacattaagaaatgactttttcatgttctctgagagttgggtgggattttgtcagtggaataggagatgaagaaaggagcatcctgctagtaaggggactagcacaagtgtggggaatatgggctagacgaatggaagcacatagtatgggataggaaacaataagttcaggtggatttaggtataggtatgtataggctagaaaatttagtgtgatcatatcatcgtgatccataaggctaagctaaggcattcggtagatcataggggaccatcacaaccaaatagtccaggagcatgccaagagcttcgcttttgaaaaattaattcagtgaatagttagtagagtggattagagggttaaaaaaaagagaagctacagaagcaacttgtgaggactactgcaaaatttcaggtaaaaggtaaaagatttaaacaagcgatgaataagactggtaagggtatatgttatgggaagcaaaagggaaaggagtcaaaatgactcctattgctttcttcttgttcatcacagtattgaatttttgaaaagtcagagggaaatgattgtactaaatatctcttgtcagtgtgcaaatccatttccatctcataaattagatcctctctgaaaattaacagttttttttcttcccacggaagactgggaaaaagacacagttttaaaggaatgaggatatccttgaaaatataattgccttga

SEQ ID NO: 9796 - DNA, 1046 bp, Homo sapiens
actgggtatatacccaaaggactataaatcatgctgctataaagacacatgcacacgtatgtttattgtggcactgttcacaatagcaaagacttggaaccaacccaagtgtccaacaatgatagactggattaagaaaatgtggcgcatatacaccatggaatactatgcagccataaaaaatgatgagttcatgtcctttgtagggacatggatgaaattggaaatcatcattctcagtaaactatcgcaagcacaaaaagccaaacaccgcatattctcactcataggtggcaattgaacaatgagaacacatggacacaggaagggaaacatcacactctggggactgttgtggggtggggggaggggggagggatagcattgggagatatacctaatgctagatgacgagttagtgggtgcagcgcaccagtgtggcacatgtatacctatgtaactaacctgcacaatgtgcacatgtaccctaaaacttaaagtataataataaaagaaaaaaaaaactctgacacaataaatattatatattatctattttataagtctgggaaaactgagaaaccataatattagtgacatttcagaggttacacagttagctaatagcagggaaagcaagatcatgcacttctttgggctagtggcaactattatgtaccaatgttactctgcttttaccagttttcttttgggctgacctacttttagtgaaataactgcatagatatcacagataactcctccgttgtctctaattcatttaaagaacatgtaacaatatgtacatggtggtattatttttttaaacacctttttttttttttttttgagccagggacttgcgctgttgcccaggctggagggcagtgttatgatcccggctcactgcagccttgaccatctgggctgaagcgattctctcacctcagcctcctgactagctggaactacaaaaatgtgctatcatgtttggctaatttaaaataatttttttgtagagacggaggtctcactgttgttgccca

SEQ ID NO: 9797 - DNA, 1060 bp, Homo sapiens
cccagacaaaactcaatgaatattttcttatagaaactggtgttagttataattcagtgctcagccattctatgagtgaagtggcatagttttctaactcctattggcatcattgtttctatgggaaagtacattccaaacttttgaaactaaatccatttgtgtgttgggaacttctgatatttccaaagactataaaactgcattgttttagaattggagggaacttggaagccctttatttcaagttcattttatatacaaggcaaagttctagaagaaacctaagtccaacttcgctggaaaaaaatgtgatcttatttaaaaaatgttttaaaactattaaaaaaatcagtgttatctataactttctttcttttaggttcctagtctcttggtttttaaagttttcaaggttctgtgatatgcaggcctaagaagtgctcatttgagaattttctaggtttttctatatgaagacttttgcatcaccaaccaatattgtatgatatatagattaagagatgaataagaatttgaatgaataagaatattggacttattggttctgctgtgccattctatctaatacagtgttgaaaatgtgttatggttgacaagtcattactttaaattgccagttattgattctgatttgatacatttaagaaaattcctaattatgtattaccttgaaactttatgtgcttttgagacatagactggtatgtaaggtgcacacaagacaaaaacatgtgctcaacagatgtagtgttatttgttttcaaaaactgatcatcaaaattatctttgtttggaactgtgaactttatttttatgtgaatttttacttgatatcttattggttataaataaaactgaaggaaatatatgtttattttaaaaaatgacacaaatttattgtcaccaaatgacataatatgattattcttgtgtttgggcactttcattttagtatttaggttttgtttattatctctctctctcctgttcaaacgtgcatcccaataggacaaaattaaaagttagcaatattact

SEQ ID NO: 9798 - DNA, 1066 bp, Homo sapiens
tagggaatcctttccccatttcttgtttttgttagttttgtcaaagatcagatggctgtagatgtgtggtgttattcctgtggcctctgttctgttccattgatctatatctctgttttggtaccagtaccatgctgttttggttactgtagccttgtagtatagtttgaagtcaggtagtgtgatgcttccatctttgttcttttggcttaggattgacttggcaatgcgggcccttttttggttccatatgaactttagaatagttttttccaattctgtgaagaaagtcattggtagcttgatggggatggcattgaatctataaattaccttgggcagtatggccattttcacgatattgattcttcctacccatgagcatggagtgttcttccatttgtttgtatcctcttttatttcattgagcagtggtttgtagttctccttgaagaggtccttcacatcccttgtaagttggattctttggtattttattctcactgtagcaattgtgaatgggagttcactcatgatttggctctctgattgtctgttattggtgtataggagtgcttgtgatttttgcacattgattttgtatcctgagactttgctgaagttgcttatcagcttaaggagattttggtctgagacaatggggttttctaaatatacaatcatgttatgtgcaaacggagacaatttgacttcctcttttcctaattgaataccctttatttccttctcctgcctgattgccctggccagaacttccaacactatgttgaataggagtggtgagagagggcatccctgtcttgtgccagttttcaaagggaatgcttccagtttttgcccattcagtatgatattggctgtgggtttgtcatagatagctcttattattttgaaatatgtcccatcaatacctaatttattgagagtttttagcatgaagggctgttgaatttcgtcgaaggccttttctgcatctattgagataatcatgtggtttttgttgttggttctgtttatgtcatggattatgtttattgatttgcgt

SEQ ID NO: 9799 - DNA, 1030 bp, Homo sapiens
agagtcatggaattttatgtttagattaactctcattggagattaccagcactatgttaattaagtcagaagaaactttacaaaagaaaggtaaattgataagctgggactatccggggaggacatttcagaggatggtgtatagtccagaagaaagttgaatgtgggaatgagtttactggatccatttaatgtggagtacattttctagaggggagtttagggtgtgagatagggagaagaaagagctaggaacaaattggagaagagtaagcatttcagaaatttgtaaaatgcaatacagatgccatatggaaaagttcctaaccttactttgtccatctttacacttcatgtgaacatatatgcataaactttaattatactcaagaggcttttgacatgtttgataacattttccagtatttaagtgaagttagggtggagagatgaaattttatgagaaactatagttgtatttactaattgtgatcaaagtatttaataagactaaagggaaacaccacattttgaaaataccatcagaagtcttgggcttctgaagcttggaagacatttaactgacattgaaaaaggaaacctatgtgtggcaatgaagttatggtatgtaagaataaagaaaaggtggattataaagtcagaaatttctgaagctacttaacttgatctcagaggtattatcagctaagacctatgaattgggctataaatcgttacgttattggtctacagaataaaatttgtgccttccgtattttatgaattaacttttcatgctctttattatatgcaaaagcaatagaacaaagtgcaagaacaataatgtttaaatattagcagcaatttgaatgaaagtaaatttatgattataaaatgttatttgatgaaagtgaagccatactacatggcttgatgctgggtatttcatcaatctgaaatgttaaacattttaatgaacatagaaaatgttaagggtatttttcttaaattaaaaactaatgttttaatg

SEQ ID NO: 9800 - DNA, 1024 bp, Homo sapiens
gaggagtctaacacaccgcttaattcctgtgtgccccatctagcacagcagctggccctcctcccgcctaaaggccccctgtcttccaggacggtgccaccttaccccccttttaccaacggactccactacacctttgtctaacaccttccaagtaagagcccctgtctggtgtgcttctgcctgcttcctgcacctccctagcgctgagcccctcacctccctgctgtgctgaggtgattgcagtgccacctgctgatgcctccttccactggcaaagcggccgctggcgggactgttctgactggtaggcaggtgggaaagtgatgctttttaggaactcaatcctcagtggctctaatacgatagggactgagcaatccaccctgctgcctccatgaaatctctagaaccggaactgtgcccccatcccctgctctcctcagtagggcaccctgatgcccgagaaccagtgcagaccacactgccagccttggggggctggaaaggaagagttagatcttggcctttcagggctttggccaaagaaattgaagaactgtaagattgggaaaagtccagttctacagatgaggaaactgaggcccagtgaggggctggggctcactccaggtcacaaagaattggtgtcagcgcagagactgggactgcccttttggtcactgggcactttaagagggagagaaagggaagcccagggcaatgtgaaattggccctcagccaggcagaaagctctggcaccaaccctaccaagttctccccatgtgggcatctagtgatgagaggcagtgtgggatgaggagggagccctgaaacaggaggctggcatctggtccagtctcaagtgagttcttggcctgggcctgttgcttttgagcccagcggttcacctggacaggggaaggtcagactaccagtctgggcagtccttaccctgacatcccatcccactatcattttgcagggctttcccctctccttcctttacgtatacttgtggtt

SEQ ID NO: 9801 - DNA, 1040 bp, Homo sapiens
gggtgtgttaggtgggatgcttttgtttgtaagtatctaaaacccaaagcaacatgctaagtcgaaaagggaatatactaattcgtgtagccaggggccccattcccggggctcagccacattgtcactcttctactttccgtgtgtgtcagacttcttctttcctgtggaacaagggctgcctccacacgggcagggaaggtggctgcctgcaagcccagattcacttcttccctactcagtattccatgcagtgaggagttccctaatgggacacactgggtggagaaaggaagcacaacagcagctggtacagctacagtgcggaatgattgaaggagttaggggcgattcaggagaggcatagagacagcctgtaaaactctggtatgtctccatgtgttttctgtggccctaaggaggaattaagacacgtggatggcagctacaagtagataggttgcagcttagtagaagaaagacttttctaaaagggccacctcaggtggtggtggacttcccgtcactagggtacaactgaggctcaatgaaactgagtgggatgaatggttggattaggaaaaccccaaggcttattggtccttagattctatgacatgctggacaaaatgtccctgagtcaggggtctctctggacatggttgaataggcctgtagaccattctgggcatggaaatggagataagcacagcccctctgggaccagctgcttatgagaggtcccccctggttccttggaggggggtgaggtaaggatataagcctctctggagaggagtctccctgcttggcatctgatctgctgacctctcccctccatgtgccacgttgacttggtgtcccccatgtccctgttcgagaggccaaggacttaaggatccagagcccatcttcccctgccccccaatcagctgatgctcagcttccagaatcaggggtgcttgtgggcccacgttgagaagctttaccttcctgaagtgagcgttcctgctggggtgccaagtaatcatacaacggga

SEQ ID NO: 9802 - DNA, 1110 bp, Homo sapiens
tttgatacaggcatgcaatgcataataatcacagggtaactggggtgtccatcacctcgggcatttatcatttctttgtgttataaacatttcagttatacccttttagttattttttattttttaaattaaaataaagatgtaatcttgctatgttgaccaggctggattcgaactcctggccttaagccatcttggcctcccaaagtgccgagattataggcatgacccactgcacctgaccccttttagttatttttaaatgtacaataaattattgttgactataatcatcctgttatgctatcaaatactagctcttattgattctatctaactatatttttgtacccattaagcatccctactcccccctgcccactacccttcccagcctctggtaaccattattctactctatctccatgagttcaattgttttaatttatagctctcacaaatgagtgagaacatgcaaagtttgtctttttgtgcctggcatatttcacttaacataatgtcctccagttccatctatgttgttgcaaatgacaggatttcattcttttttaaggctgaacactactccactgagtataaataccacattttgtttatccgttcatctgttgatggacacttaggttgcttccaaatcttggctattgtgaataatgctacaataaacagatctatagaattttgacttgagcaactggacggttactgagatagggaagggtaaggaaggaacaagttgggggaaatcaggatttccattttggacatgtaagtagggagttggagttctggacatgggtggagttggagttagcattcagatttggcttggttaataggtagatatggtgctgtgcagcagatacaagcataggtaagagacatgagcttggcgaggaaagtggtactttgggaatatccaggtagagatgatcaggaggctatagggaatgtgggtacagtctgtagaggaattctagagtcattgccttagagatggtaactaataccctggcagtagttgagattacccagggtggaatgcttacagccatgttccttaatcctgtctgcatgatttgatcattt

SEQ ID NO: 9803 - DNA, 1022 bp, Homo sapiens
ggaccacgggaaagctcaaggtaagacgcctgccattctctggaagggttaaagggaagtgttggtctgtggtgtccatggtgtgagcagctggtccttcatctgtgaggggcttgcaaagtgagagtctctatcaacaccttgatctggagccatagtggtgctggtggttggaaagtcagtctcatcttccttctacctttccttcctaaggaggcacagaactgagctgatgctgtggctttactcatcaacaggtttgagttgttcctgtgtttccctcgagtgacgctactgtcactccagaattgctatggattggtgatactgggatagtgctctgtgtcatgttgcgtggaatactgttgccttatatctttaaaacatgacatgggaagtactttgatacatgtgacctcatttaatgctcatggtgagggaaggatatgagagcttaagaaacttgcccaaagtcacaaagctggaagatgacagaggcagaacttggccctgaattctgttctctttcagttttcttatagggctcccactttgtattattttctcttcttccttgcttttcttccatgtcttatcttggtcacttgctgcacagacatcgcaggaggtagaaggtggtttgaattgacattaattgtatcattttagaaacttattcctgactctgaaaacattttgttcagtgcctttcagattcatcctttacagcctgaaaaatcttccttaggaaaccctcttttctagagttgagcactgcccagttgggcaaacaattgggatagtgatgttgcatatgatgttttgggaacaacatttggcatgtctttaaagtaacatatcataactatatatataatttttatcttaacacttcattggaggtgtgaaagtagattctaggcaaacatctttaatctgtcttagatttcttttcttttctcaacatttttcttggaaagactttactaagagagttccctaaatcttttgtctgagagaca

SEQ ID NO: 9804 - DNA, 1028 bp, Homo sapiens
acataaagttagggactatgtgttgttaagagggagtctcaaaatgtggagaaagagcttacttttaagataaggctagactgctactggtgctttcaaagcagttcagggggcctgagaagtgaattccatcattggagaatctgaggaggcttcttagaaggagagaagagataggcttttaagaatgggtagagctggctgggcactgtggctcacacctgtaatcccaacactttgggaggccgaggcaggtggatcacctgaggtcaggcattcgagaccagcctagctaacatggtgaaaccctgactccactaaaaatacaaaaattagccaggcatggtggcgcatgcctgtaatcccagctactcaggaggctaaggcaggagaatcgcttgaatctgggaggcagaggttgcagtgagccgagatcatgctcttgactccagcttgggcaacaagagcgaaactccgtctcaaaaaaaaaataaataaataaaaagaatgggtagagctttgcctgtgtgtgggttgtgggaggatggacattacaaggggaggaaacaacttggctgaagttctggaagcagtgggacagatgagcccagggaaactgcccagaaggttgttctgatgcatttttccattcaaagacagccgagaagaagcggtcctcgggagcatccccttgcccagctacgtgatctctcctgtggcccctgaggatcgcataagccgcaaatattcctttaaggtactgcccctgcacctctaatgcagccattctgtctaagaaactgtgttctcaaaatgtcttcataaaagcagttgcttttgtcgggagggggaagaagctagagagtttcagattccggttaacaaagttgtaagttatttaaacaagaataatatcacatgaccggtactgtcatttgactctaagctttggagtcgcccagccatgttcaagtattcagacccctccttcctgtcactgccagtcttgtggttacctgtcgaagccc

SEQ ID NO: 9805 - DNA, 1032 bp, Homo sapiens
ggcatcagtcaatgggttctgtagccttgttcccccaggggacacttcccaagccagtaggtttgtgaaaatgcctcatgggagagctaatacaagctcaggctgtattaataaaagtacaatgcatagagaaagggggagaatagttctgttacatcgtggtttttgtgaaacacttcattcattcattcaatacaaattgatggagtacaaagggcatgccaagctccaaacaccatgttctagatactaaattttaagagaggtgttgagcaattgatattcccctgaggagggggaccattatggtgagggttctagaagccctatcctgtgacctattgtgattaatctgcaggagagaagatggaggatgtggtaaaagtcttcaagaagggctagcaagtggaagtggggtacatttatcatgtggtgggcaaaggcaggtgtcagattaatgggtgaaagctataggcatacaaatttcaacccagtccataattttctaagaaagacactgtattagtctgttctcatgttgctaataaagacatacctgagactgggtaatttataaaggaaagaggtttaattaacacagttccacatggctggggaggtcccacaatcatggcggaaggcaaataaggagcaaagtcacatcttacatggctgcaggcaagagagtgtgtgcaggggaactcccctttataaagccatcagatcttgtgagacttactcactatcacaagaacagcatgggaaaaacccattgccatgattcaattaccttccactgggtccctcccatgacatgtgggagttatggcagctacaaattcaagatgaaatttgggtgggaacacagccaaactgtatcagacagtttatagcatcccttgtttcaagatctagaatttcctctttaacattaaatgaagtattttacctcctagaataagagttgggagcttttaaaataaataatattaatagtattgctagtattattattatttttatagctaacac

SEQ ID NO: 9806 - DNA, 1035 bp, Homo sapiens
ttggaattgaatgggcaaatagaatttctttgaaagatgtctctatttctgcctggaggactctgtaatttggacgttgtgagaagagcctatctttattttgaatttggaaccattgactcccctttctttatgctgtgagttatttatatgccaagaagcacagtggaggccttttcaccttctcatgactttaagaaatacaggaaaacagcattctctacaatccataatccctgagtgttggcaacaaaaaaatgaaagatattctaatgtaggcgtctgtgcaatggtgatgggttatggatggtcaatgagaaccttggctgccagtcctgggaactgatctcagccttccctgggaccctctggatgaggggatcctcattcacctaactgagcaaacatcccaaacatgctctgtttgcccatttattcattccattcattaatgtactcattgattccatttggttcacttcagctactgatcacctaatgttatatgccaggccgtgtgcatggctgtaattatagagctgtgactaagaccttccttccttcctgttcagtcagggttcagtagcagtagtgagaagttattctcgcttttctaaacagaaatggatttaatacagtgaactaggtgtttacatcatgattggaagggtgcaggagtaggctctaggctgacctttggcaatgataactaaaacaagactgtgaaaatggcccataagtaattgttttcattttccttttaattcaactcttttgagctccccttgccctttgctcccaacttctctgtcccagatcttaggctctctccttatgggaagagctgtttcaaagcatttatggattgtaaagtgtgaataagggtgttgttaataataactgtcacttgctgactgtttattgtgtgcccagctgtctgctaagtcctttacctgtgttatttcaatcctcacatctgttgggtagttaatattatctctacattgcagagaaggaacctgaagctaataaaag

SEQ ID NO: 9807 - DNA, 1050 bp, Homo sapiens
ccgccagtgccctcgggtgtattttcaggcctgggggctgtgggcagaggaagaggtgtctgtcaggtgtcacctgacttgtctctcccaggcccctcagtaggaggggagcagaaaggtccaggtgggaaatagagaaggtggagtgaggctcctccctcaggcagtttcagtttccctcctgtccttatcagagagagggtgggtctaagactgatagttgtacaaggtgtcctgtttgtgtgctggggtatttctgggtggggccctaatgagtgggagtggaagggcccagccttaaatggagggctgtggaccaggctgggctctggggaggtgggagggacgggggttggttagagacagacctgaggagattttttaccccagccagggccttagaatagttgtgaaactcagccttcctggtagcattgtgccttagagacctgggaagctatgtgctggcttaggatagagttttcagtcctgttaacggaagggtggaaggactggactgtagagtaagtgcgatgaggaagatgagcatgtcttggaagttgacattctggggagtgcaagaggcggctgagtttatgtaaggcggggaggggcaaaggcaagaagtgtggggaatagggtgggcttactgcaggcaaggagcgcaggaaggcagattttagcactgggtgtgggctgtgtatcagagaggtgcttccagacaggctgctgtgctccctccccctcctcccaattttctatcccctttctcagtgacttggtttgctgagttcgcctgcctctctgctctgctctccatgggctgggctgctccagtccctacctcactccagccttccagggagaaaatgagtgaaggaaggcttgactttaaagaggctgttgactctgaaaccctggtttgttggggaatcagtgccacctgccctgccacctgggtttgcggtgtgtacactccatggcagccctcccctaacacacagggctcttgcttgtagagtgccaccttctccaaccctgccctgagct

SEQ ID NO: 9808 - DNA, 1050 bp, Homo sapiens
ctcttttgcagaggtaggacagccatggatcagggagagatgagaaaacagacataagggcctctttggacagatagccaggctctcttctagggcctgggagccaccctatgccccacctggataaaagcccagatgtgcctagcatggcatttccacttctgcctaatcatctccacctgtgaatggaagcaagcttacactttaatacccagtggttttgcctgaactttcccactcactgggtaacgtctcagctttgtcaagtatcacttcgtcagggatcctttcttgactgccaagacttaaggctccctggtgcattcttataacacctctgtaatcccctcgcaacaatggtaattaccttgttctgtatttaatataggtctccctgactagagtagaagcactgtgagtgtaggaagattatctgttgctcctggcatatactaacccttaaatgtttgcatgtgtgaatatttggacgggtgctaatgaatgaattagaagtgtgtgtgggctgctgagaggtgctgtagttctgattgcctgcaggaccaggagagtgatcccttattgccaagggcattgagaaaagagagaaagaaaagagacatagttgaggttgcgagggcagagacaagccagagggtatggtctccttcgctgggtgcctgatagcggcctcctgggcgatgaggtcgcagtcacatccaaccaagtcttcattcctggcttgtcagaatccgttcccgcaatttaccagggattgttagaagactccttgaatcattgtggggaagagcattcaaggtcaggactcttggaggggagacgacagcaacccgggtctcctgcagcctggtcttcccagccgatgggcacttgcggcaacggatgacaggtctgctggtgtctggctagacgccagaacagcgcagttctgaggccgcaggtcctgcccctccgcccttttccctccccctcctcagcctctctacccctcccacttgcagcatcctctacgaggaaaggaatgtgctgggc

SEQ ID NO: 9809 - DNA, 1030 bp, Homo sapiens
ggctttgtgacttttcctcttggacgtttaatcaacatgtcaaactaacatgtccaaaatagagttcttgatcaattttaacacctctcctcccctttgacttgtacttctcccaggcttattcatttcaggaaacagtgctggcatccactcagttgctcaaaccaaaacgctggaagtcttgtttttctctttccttctctccagtcataaatcccatcagtgagtcctgttggcactaccactaacacacttggcaaagctgaatccctcccaggagtttcactgttgccattttggccagccactgtcctctcctgcctgtactgctgcagcagtctctttagctcatctccctgcttttccccacttcttttcagaggcattggcatggaactgtagtcagactggctttgcatactggatcctccacttactgtgataggcaagttacctgacctctttatgcctgggttttgtcatctgtaaaactgggactataatagtactcatttcaaaaagttttcatgaggattaaaggagatcatacatacagagttcttaggacaattcagagcacatagctaagcaccgagtaactattaggtttttatcgtccttaatccccgggccatcctctacatagaagatacagaaatctttttgaaaagcaaatcagattatgcctcctttcttttaaacccttccatggcttcctattgtctttggaagagaacccaaattcctactaggtattataaggctaacccgactcccctacctcatcttttcctacccttcccactggtcactgagttccagcctcacttgtccttcttccttcccaggaacaaacttagtttattcccatctattcttgtgccaggacagctcttcccctgggtcttagcttaaataccacaccttagcgaggtcttacctgatacataccctgacctgcacatatcacagtttggtttcttcatagcacatgttaatatctgaaatattttgtttgcttatttattat

SEQ ID NO: 9810 - DNA, 1037 bp, Homo sapiens
aaaaacatcgtctgagtgctgtggctcacacctgtaatcccaacactttgggaggccgaggcgggtggatcacctgaggtcgggagttcaagaccagcctgaccaacatggagaaacaccatctctactaaaaatacaaaattagccaggcatggtggtgcatgcctgtaatcccagctactcaggaggctgaggcaggagactcgcttgaacctgggaggtggaggctgcagtgagctgagatggcgccattgcaccccagcttgggcaacaaaagtgaaactccatctaaaaaaaaaaagaaaagaaaaacatcctagttaagggatagctaagtgcttcctagtttgtttctttaagttaaatttcttataaacaaggtcctcttcaactttcttctttgtcttattcactcctcattatatggctcctcagactgggccaatttctcaatttaggtggctatgatacagatggtcgtatacctctcttctgtagtgtttatcatagatgtacattctcatgtgcttagatgattattttgaaagcttgtgttctctactagactatatacctcatgagacttgggccatattgtcctcagtgcccagcacaatcttggcacatggtataccctcaataaatatttgttagaacaaatgaataaggccaaagcattcagggattttatgtgactgattcttgtagtgtcttcccaggaaatcaaggccctttcaagcgtgcaaactgtctcttgtccagagagcttggtggccatctccaagctcattttactccacggttattaacaatttggagattgttaataacaacgactccaggttattaacctgctataaatccaatcctgtaattggtacttgatacatgttgctggtagtcctcaaagatgagggagactgaggctcagggggagggaaacagcttgcccaaggtcacattgctggaaggcatgctctttcctttctgcctgctgtttctgagccagagctacaagtgtctgtgtgagttatggg

SEQ ID NO: 9811 - DNA, 1039 bp, Homo sapiens
ttatttgattaacgcaaacacctaactgaacctctactgggtgccaggcactatactaaatgctggggaataaaaaatgagtaggtcatggtcctttaagcccagttcagtgggacaaacaggtaagtaaacaaccataaggcaacaagtatcttcatgagtatttgtatagaacactttagggacacaggggcagtttattccatgggatacagaaaagggaatgctcaataggaagcaatatttgaactgggccttgaaggataagtaggaagttgccatgttgatgggtagcagaggaatactccaggaaaaaccattcattcattcagcaagtctctcctgttagcctgctgcagcctaagcatcagggttcattgggggtttcagttttcttctttgtattctctagggcgcctagcatagtgctttgcgttcaacagttgtttgggaattatttgagtaaataaaaaatccatctgataagggaattaaaaattactctgacatttgcaaaaactgtttcaaatgaaacagtatatgtgaaaataaagcatgaggccaggcatggtggctcatgcctgtaatcccagcactttgggaggctgaggcgggcggatcacgaggtcaggagtttgagaccagcctggccaacatagtgaaaccccgtctctaataaaaatacaaaaaattagccgggtgtggtggcgggtgcctgcaatcccagctactccggaggctgaagcaggagaattgcttgaacctgggaggcggaggttgcagtgagccgagattgcgccattgcactccagcctgggtgacagagcgagactctgtctcaaaaaaaaaaaaagaaaacatgagacaactgtaaagtatgtcgttaatatttaactttcttgttgttttattttgctatcttccaaagaaatttatttgaataatttctgtgacctttcaaataactaacagcatccagcatcctatcttattagtttttgtttttttttttttaaagacagagtcttgctctgttgcc

SEQ ID NO: 9812 - DNA, 1273 bp, Homo sapiens
gaagctgaggcttctagaagttgccatttgttcaagataagaaacaactttggagtgagaaagggaattgctttaatccagtgagtctgagggagtggagtaggaggtaggttcagattcatctgttttgttgtattattcaaagttctgagaaaaccccctttctgtaacctctaccaatgtcctggtctgtcctctgtccccacatagaaaaagttttcaccttttaagtgtttgaagaggctcccatgtggccctatgtgttttcctttccaggttaaatcatccttgttccctcatgaaacttggcttttagtttactcgttgtctttgacatcactctgggcatattcccctttagctgtaatcctcttaatagtgtatgtactagtaagctcttcaggttgaaagtgacagaaacccaactcaaactagcttcaagagaaaaggaaggatattggcaccagtatctgggaactcccagtgtaatcctgacctggccttggcactgttggactctggtgctcaaagggcattttgggggccctgccttctccatctttcaagtctgctaactcttttgtcaaggaagagaaatgctcactctcccaggagctatacatctcttcttaggggagattatgatcccctgcttggaacatgggcctgtcctaggggtagagcgtggtggctgaacagttgcagcatgacgatatgggaggtgtgacttctgccagtgaagggatgcatatgagcaatgcatgtccatcatattgcaatatgtagaattggtgactggccagctcagaatagcatgggatcatcatctgtcttttcctcaatatcatacttgaatcaattcaacctaaaatcaaaataggttccctattaagatgtaatcatattacatcaagcactgctgctcagcttctctctctcctcttaaactgctggtctcaaatttaggtctttaagcttatctctgttagattccatatggctgtattaggtccagagaatcagcttgttaagatcttttagctctaattctgtcatctggcttcctgcttctccctcacagctcaagcactctgcagtcaggtgatatgatgcaactgacatttgggagtggcggggatgggagatgggaaagtgagacagcaccaggcagtcagttgcatcaaaagagccagaatcttctctcacctcctcccacacaccctaaaaccccttcagtttcctttgcatggcccataagctcggccttctgggt

SEQ ID NO: 9813 - DNA, 1928 bp, Homo sapiens
gaggaaacaaggggaatagggtagactattagaaattgaataagaaaaccattttaaatagggcaaaccacagaggagcactctcccttcttctgtgggctagggagcccccatcagaatttcaaagagacattgcatggcctctgatctttgccaatttcccaaagttcatagcttactcccaggccttatttcttaaggcctaggtggtggggaccaagatgtcactcactctagaatgccaaataccctgagaaattccaggggctttctttttgagccttggggctctggccaaatagctcctggtatggttgcagcctcagatccattgatgagtacctatgcctggcaagggctgagccaaaaggggccagagggatgcagaccattcatgagtacagccccttcctgaggtgggggccggctagcccacaagcagctatgctgagcctctgaatgatgtgagtcctagaatggggacccacacacaatactttgctagctgagagaataacgtgattgtggctggaagagttacagatggcaaaattggagctttacttcaagcatttaaaaaagtcataaagttacttatattcactgttgtaaatttagacaatgcagacaagcaacaagaaaataaaaatcccttgtaatcctatcacccagagataatccctgttaacatcttgttgtctatctctgtgtatctatgtatttatatgtgtgttttaacaaaaatgggataatatatagttttgtattttctcacttaactatatagttttctctctcggcatccattggggattggttccaggagcccccacagatagcaaaatcagtggatgctcaagtttcttacagttggcctccatatccatgggttctctgacatggaacccatggatatggagagctgactgtgtatttgaaaaaatatacatgtccttaatttatgtttatctcatcagttttaatggctgcatacgatttcattatacagttgaattacgatttacttagccagtaatcgataaaattttttggagttgtcttccaaaagggagtatctttattgtggtagctgatcacaaaataaatacatgcttatgttgaatttttaaaaaagctagtctcaaaaggttgtatagtatattatttcattgataaaaaattcttgaaatgacaaaattatagtaatggagaacagatcagcggaagacttagaagagggtacatttctttgaagtggtggaactgtcctgtgtcctgattgtggtggggcacacatgaatgtatgcatgtgatgaaatctcatagaactgtacatatatacatagtatatataaaaacctggcttctttccgcgccgatagcgctcacgcaagcatggttaacgtccctaaaacccgccggactttctgtaagaagtgtggcaagcaccaaccccataaagtgacacagtacaagaagggcaaggattctctgtacgcccagggaaagcggcgttatgacaggaagcagagtggctatggtgggcaaactaagccgattttccggaaaaaggctaaaactacaaagaagattgtgctaaggcttgagtgcgttgagcccaactgcagatctaagagaatgctggctattaaaagatgcaagcattttgaactgggaggagataagaagagaaagggccaagtgatccagttctaagtgtcatcttttattatgaagacaataaaatcttgagtttatgttcaaaaaaaaaaaaaaaaaaaacctgtgaaatctctgtgaggtctgtagtttagttaatagtattaccatgtcagtttttctgtttttgacaattgcactattgtaatataacatgttatcactgagggaagctggctgatcggtacacaagaattctctgaacaaga

SEQ ID NO: 9814 - DNA, 1092 bp, Homo sapiens
aacatttaaagtaaaatttgaatgacaagaaggagacatcatgtgatgatgagttggcaaagcatttcgggaagagcgaacagccagggcaagggcttaaggcagaaaagagcttggagtttaaggagcaggaaggctggaatgtggtgcacaagggagaaagtggcatgaggagaggtcacaggtaggagaaaggtaaatgccgcaaagctttgtgagccggggtgaggaattttcatactttattctaagcccagtgaaacgtcattggagggttttaagcagggaaatggcatgatttggtgtgtgtttttagaacgatcactgtgaggagattggattgtaggtggccactgcagggggaggcaggagagcagctgaggctgttgccctcttccaggcaggagttagaagtggcttgcctgagggtggtagcacagtagacagggagtagtggtcacattcaggctgtgtttaggaaataggctcttcacaccttcatgatggactgaatagtctgtgggagaaagagaagaggcaaagatgactcctcagggcttgggcacctgagtggatagcattcatatcgttgagatgggaagagccggtttggggtggaggagaatcatgagatcttgttttgccatcttacatttgagatatgagtatgtcagatagtgtgatctgaagcttggtggggagagaggacagaagagacccattgggtataatagatgttattcaaggccatgggattagatgaaatcccctaggaagagagtacagacagaagagagatgttctgaggctttggatggtcaaagcagtgtttagaggggtgagaggtgaagccagcaaggagactgagaaggactgagaaggtaggagaaaccccaggagaatgcatggtcacagaagccttaaaggacaaaatctgactggagtaggtggaagataaaacacggggtgaagacagggagtcagttaggcaaatcttccaggtagttttgttgcaaagtggagttgagacattagccggtaattggagaggatgtgggtttgagggagggttcttttttttggtgggagatt

SEQ ID NO: 9815 - DNA, 2159 bp, Homo sapiens
ttcaagcaagcaattctcctgcctctgcctctggagtagctgagactacaggccgcaccaccacgcccggctaatttttgtatttttagtagagacgaggtttcaccatgttggccaggctggtctcagactcctgacctcagatgatccactgcctcggcctcccaaagtgctgggattacaggcgtgagccacaccacctgatcccacctcttaaaagggggaggggggtgcaaaatatctgtactcctggagcttgtagtctaattggaggtatgacacatcaaaagaaaatatgtcatagattgtaagtagtcagagctcattagaggtttaaaagaaataacgtgtaaagtttttagaagaatatctgaccagagttctcagtaaatgttagctgtggaatctcattaatccctttggtcatctgtattccagcaagctcactgtgatgatggttttccaacattcgcagtttccaccagaaaggttttccttagtgttgggtaaaccttccttggatgtctgagtgagctttatgtgcattctcacgttggtttctgtgatgtataaaagtatacccccatcttacagataggaaactatgccctgatttctgagccttgacatcatcacattctccagtttgtgtttcgtgttgaaagttaaaacgtgattcccttttcaggtgtaatcctgagagattcacatggtgttgcacaagtacgttttgtgacaggcaataaaattttaagaattcttaagtctaagggacttgctcctgatcttcctgaagatctctaccatttaattaagaaagcagttgctgttcgaaagcatcttgagaggaacagaaaggtaagctaataaataaaacctggtgctaagtaggactgcttgtactaaattttttcggtaaaatgtaatgcatctggtttgaattatccaaggcttagtacacaaaccagtgtagtgctgctttgaagttcaaattctatccaaagagattttcattatagaaagtgcatggtagctctacattctcttattaatgtttgataatgttaggtcattttgggtggttttcttgaattgcaccaaattttatttttaggataaggatgctaaattccgtctgattctaatagagagccggattcaccgtttggctcgatattataagaccaagcgagtcctccctcccaattggaaatagtaagtatcaactcttttgtcgttgttatcaagaataggagtcagccagtagtaaaagtcctagtagtaaatatgttcagccttgggggctagtagtaaatatgttcagccttgggggctattttgttaactgctctttgagctctggcctggtagtgggaaagcagccacaggcaatacataatcgaatgggtgtggctgcttgtctttaataaagacaagcagagggccatagttgcagaccccagatttagaccatgaataagccctttgactctcttttagatagtaggtagattttcctttcatacctctactcccaggagtttgaattaattttcacatgaattgctcactatgatgattggttgccagacattcgcagtttccaccagaaatgtttttccttatgttggccagttcttccttggatgtctgagtgagcatcttcattcattgtgcttgaacacaatgagttggttcaggtattcagaagtttggtgcactttatatagtttggatttattaactgtttgagaatagcaccattagtggggagattctgttaatgaatgtggagggactagtattaatcctgattttctttctttccccttttttctttttcagtgaatcatctacagcctctgccctggtcgcataaatttgtctgtgtactcaagcaataaaatgattgtttaactaaaagcatgtttcatatttattttcctagaagaaaaattatatatatcagtggttcatatgtgttgatcttgtttgatggggaagtgttttgggtgattgatgttaggattccagggagcagtaagatactgtccatcacatcccttgattggccccttaaaccagttgagcagcttataacctcataggtggttgctttaaacatggagaactggaagacactaggaaataatgccttt

SEQ ID NO: 9816 - DNA, 1046 bp, Homo sapiens
cccgtaccaaaaagtagagtggagcctctttgcactactactatcaataaattttaaatcagttggatttttaagcattttttaaaagctgacattaaagtaaatctaaaaaaagtttaacaaactggccaagacactaatttttatgtataatcacaatattttatactcacctttattgactaaaaataattatgctacatgttgtcctgcatcagaagaattatttcttcttgccagtgttttgggatttgaagataatggttcactcaaagaacctattattttctctactgaggaacccaatgtagaacttgcactgatatttttattactgcctttatatgaatctataggtatctaaatgttaaggcatgtatgatctttgatcatttcttttttcaaattaaagttgtataaaagtttcaatatcttgccttaaattagttgcctattctttctaggattcaaatattgtgacatttaaaaaagaaaacattcacttttgaaacttagacttcagatcaaaaaggactgaacccccactatcataatccatacattcatttccatgttgtttgactagcagtgcatatatgaatgaatatggtaattaatcttacctataagaaccaaatactttaattatattaagatagtgaataaagatgtataatatttttattaataccttgaatatattcagtggattgaatgtgacttcataactgtactacgattgtattaaaatatttctggaataaaagaactctgctatcatttctttccttgttgacatactaacatttttggttccagactttgcaatgagctcactcttgatgttctttgcatctcacccaggagtctattaggtttaataatcctgaatttcagaactaacctgttagttgcccctaaaaatgttcaaatagagattctgacttctgagtgttaactcttttttttttttgagacagagtcttactttgtctcccaggcctggagtgcagtggcgacatctcggctcactgcaacctccatct

SEQ ID NO: 9817 - DNA, 1030 bp, Homo sapiens
cattgttttctataaggaggcaaagcatatgtgttttcctgttatgcaccttttatagcctttaccactgtgtaatgttcacaaacaccaaagtaaaggaaaaatgcaggatgttaccgtaaaatccagctgctattcatggagctgaaaaacaaagcacaaataatagatagctaagttaagaactactaagtagtttatagaagtagggaaaaacgtaatactgctttttattcatgtctttaaagcctttttcagaataagtgccaatcactgatgttgtaaataatggtgccttaactttatatgcttccctggcacttcgtttctgatttttttcctgatttgataaataattagtacatagttttcactcacttgcagcttactaaagacaagaaattatgtacatgtactaatgtttttcccacaaaaaaatcctttacttctgatgtatgaattagttatctaaatagttaagcctaatacctgaataagactcaccaatgtgattgtacaataaattctatcattccattaaaatcctacatttattcccaggaatggtaatttcacctccctacatctatactccactccctcagtaaataagtgaaaattgttaacccatgtgcccattcctgagtagggcagactcttcacaagaggcccatgacaagaattctagggtccagattgaactttaatatagacctttgtctgtgtagaccagtttgtcttgtaaactgtcttacttatgtgtgtaaacattttacattcacatgaaaagttattttcctttatataattggattcagaatcataagggacaggactgaaattattctacagtaaccagtaagaataagattcggccgggcacggtggctcctgcctgtaatcccaacactttgggaggccaaggtgggcggatcacctgaggtcaggagtttgagaccagcctggccaacatggtgaaaccccgtctctacacaaaaattagccaggcgtggtagcgggcatctgtaat

SEQ ID NO: 9818 - DNA, 1027 bp, Homo sapiens
aatcagttgaacctaggaggcggagattgcagtgagccgagatgacccctctgcactccagcctgggtgatagagcaagactcagtctcaaaaaataaataaataaataaataaataattgaatataattcacataccataaaactgaaccttttaaagtgtacagttcagggaactgagatatgaagaggttaagtacctttccctagaatgctgcagaaaaataaaaaggcagttcattttataggtgtgtgcaaccatgcccagctaatttttgtgtttttagtagaggcggggtttccaccatgttggccaggctgatctcgaactcctgacctcaggtgttctgcccactttggcctcccaaagtgctgggattacagctttcatagtatgtaatctgttaagtcttttggagatgtacaagtttcattttgtttccttgatttcaaggttggtgaagatcttcggcaagatatgttagctttacagatgataaagattatggataagatctggcttaaagaaggactagatctgaggatggtaattttcaaatgtctctcaactggcagagatcgaggtaagtttattagctgtgtcttgatgtcttatttttttccttgaacttagcttaaagtgtacctgccgtaaacatcctgatgcagataccctggtatcacagttgtttcttattttaatccagtgttactttattgattcagttgctcataattaagtctctttgaaaaataacttagtggccgggcatagtggctcatgcctgtaatcccagcactttgggaggccaaggtgggtggatcacatgaggtcaggagtttgagtccaacctgggcaacatggtgaaaccctgtttctactaaaaatgcaaaaattagccaggtgtggtggcgtgcccctgtaatcccagctgcttaggaggctgagatgggagaatagcttgaacttgggaggcggaggctgcagtgagccgagattgcatcactgtattctaggctcggtgaca

SEQ ID NO: 9819 - DNA, 1028 bp, Homo sapiens
cacagcctcagcctcctgggctcaagtgatcttctcgcttcagcctcccaagtagctgggaccacaggtgtttgccaccatgcctgtcttttttttttttttttttttttcttgtagggacagggttttgccatgtttcccaggctggtcttgaactcctgggctcaagcagtcctcccattttggcctcccaaagtcctaggattatagatatgagccatccacccagcctatactttttttaattaccatagttttatagtaagttttgaaattggacaatgtaagtcctcctactttgttctttttcattattatttttggctattcaggggacacttgcaatttcatatgaattttaggaaccgtgtatccattgctgcaaaaaggcagttggaattttgataagaattatagattaatttggggaaatattacatacaatcttaattataaactattacctctatatacattgtttacctgttttctctttactaaacaatactgcaatgaactttggttggtgtgtacatttttatttctttgctagtatttctttcagaaaattcctacaggtgaaatagctgagtcaagagcgacatgtatttttagttataatagttgttacattgctctacaaaagaagctacacctgtgtacacctctctccctaccaataagttatgaaatcgtttcctaacacaggatgttgttttaaattttcatctgataggtgaaaaactgcattcatttttgtttggcttctatttctttgactattagtgagctttaacattttcgtatacattggttggccaaatgtacctttgcccactatatttatagcctttggccattctagttttatagtaaaaattaactctctttagtaacaacctttttttcaccgtttgacaactgggcattttataaattgtatccacagcataacttgtctgaaaaatagatcttcattttcattatgtacttacagtatcacatctctttctataggttgttctcca

SEQ ID NO: 9820 - DNA, 1008 bp, Homo sapiens
cagtctgggtgacagcaagaccctgtctcaaaacaaaacaaaacaaaaaaacgtgttttgttttctttggcttgtatttttgatctaatgattaaagtcaggaagcagttctgtaatccaaaccaccaccttgagatatatttctttgtagaaaatcttcaaagactattcttaaacttcctatttctagaagttgttttctgagtccttaccttttttgtgttctgtcctcaacaccattttccccaagataatgtcctttaattctccctctctttgttcccaccctacatttcaatacatttaccctacacctgaaaagtttcagtacaatgtggagagtgaatccttctgatatgttcttaaagatatcctttttatttagttgatctcatactaacttttcaaattcattacatgtgttgtaaattttgaattgatttttaaaatgaaaatcacattattatttttacatccgtgaaggtttttaacatgtggaactaaacttctatatctttggacttcatcacatacaaattctgttcctggaacagttaccaaaaaaggatatgtcatggaaagaatagtgctacaggtaatggtacttcttgacatgtagagaggtgtacatttaaatttcttcataaaatgtgtgtgtgtataccatgatttgggttgttaaagaaacctaactgatcttgttttagtctcaggatctatcttctattttaatatcaatatttctgagaagcagtaaaacatgcactgtacttatcccaagaaatatgtatgtgctgttgagaattaccaacaatggtaatcaattgcaacaagaagcattaatttaatattcaatgtaaatatgccccgattgctaagaaaaatctgttttcttaaagacaaagaggttaatgtggcaaatacgtagactgtaatttgatcaatttctgttaaattttaaaggttgattttccttctcctgcatttgatattatttatacaactcct

SEQ ID NO: 9821 - DNA, 1050 bp, Homo sapiens
tccctagattctacccattagatgccagttgtccccctcagtttacaaccaaaattatttccaaattaccaaatgtctgctggaaggaaaatcactcccagttgagaaccattgatgtaagcagtgatcatcagtgccgccttttttgttttttgttttaaaaccttaaaatctgtgaaaatgccttcctaaaaccattaaatagtttttctgcaacttcataattgatggcttaaactgatggcactagaactaaactgatcaatagtaacatcacagagagataacccaaagagtgtgtaccttttaatttgatagaattagaagtagtatacaataccaactgcaaaatagtaagtattcttgccaaagaactaaatctgaatcaaatcaggcctctaggtctaacttcttctctatggaaaatacaggaggacatgtgaaatgacaccagaggagtataaccagcaaaattcaggatatggaaaattctacagaacaaaaggcctggtatcatcaacaaataaatagaaaaaaagagaaggagaccaaacaagagttaacaaactttttctgtaaagggtgccagataaaagtagtttaggctttgcagaccatatagactctgtcacaaatgcaaaagcagtcgtagacagtacattaacaaatgagcatggctatgtctggtaaaagtttatttacaaagccaggtgtgaaggccagtttgtttacatgtggctataaataaactctgtaaaggcaggttggagtttgctgaccctgaattaaaagatgcttaaaaagacatccaaatgtattgtgccactgcacttcagcctgggcgacagaacaagactccgtctcaaaaaaaaaaaaaaaagacatccaaatgcaagtgttaggccttgcttggatcttgttttaagcaaaccaactgtttttaaaaaacatcatttatgggacaatcagagaaatttgaatagtgactagatattttatggtcttaagtaattattgttaattattttaggagggataatggtattgtac

SEQ ID NO: 9822 - DNA, 1032 bp, Homo sapiens
cctatttaactgggtcttatggcaatatatttactataataacaaacacttatgtagcacttactatgtgctaggtattcatctgagtgctacataggtatccttatatttctcacaactgctctatgaaataagtggtgattttatccctttttacggagtggggggaatcaaagtacagagattaagtgactttccccagggcacttagctagtatgtggtagaattgggatttgaaccaggcagtttggctacagggtctacattctgaactattaccctatattaacatactgaaacttagttgataccatgacacttttttgttgttctagaatatatcttttgaaaccttgtgtcccttgggacagtttgggaaatgctttaataatagatctatttaacttaaaacaaataccgagaatgaaaatttctgctaatctaatactttttcttcttaaatggcaaatacaccatttgatttgccagtaatcatctgttgacaataataggatgttcaaaacactgacttgacaaatttgttcttgaaatattcttttcccatgtgcttaaaaataacatttattggctgggcacagtggctcacacctgtaatcccatcattttgggaggctgaggtgggtggatcacttgaggtcaggagttcgagaccagtctggccaacatggtgaaaccccatctctactaaaaatacaaaaattagccaggtgtggtggcgcacatctgtaatcccagctacttgggatgctgaggcaagagaattgcttgaggctgggaggcagaggttgctgtgagtcaagactgcgccactggactccagcctgggtgacagagcgagactctgtctccaaaagaaaaaaaaaacacatatttattttaaaaatatttttctttattttagtcgcttcccccctatttgaggaggcagtataagattttttgttctctacattttggtggattcagattttaatacctgacataattttgaactaccaaaggctaaagaa

SEQ ID NO: 9823 - DNA, 1034 bp, Homo sapiens
cctaggaacttacattcccctttttatcccctttaccaaacctcttttctattttcatagaatttgcagtggttaaatttcagatggacttctaaaaactcaaatgaaaggtgaccagattatttcagatattagtctctttggaggaagaactgctaatgtatttgtattagttaactaatttgtattatcatgatagaaatcaagttaaactttcttttctcagttatgaaaaatactacttgatatgttcactgtctcacaatggaaaggatctttttaaacctattcaatcaaagaaggttggcacttacaagaatttcttctatcttattaaatgggatgaactgtaagtgaaatttctggctttttattctttcagtgtgtcctgttgtttactttttccaatgtatgcatcctagctttaatttttattgcaattttcattgaaattcattaacttctgacttatgtcttaagatctctcttctagatatgattttatagaacagactgaaattctcattaaaaaatattaaataccgaccgggcgcagtggctcacacctgtaatcccagcactttgggaggccaaggcgggcggatcatgaggtcaggagatcgagaccatcctggttaacacggtgaaaccccgtctctactaaaaatacaaaaaattagccgggcgtggtggcgggcgcctgtggtcccagctactcgggaggctgaggcaggagaatgtcatgaatccgggaggcagagctttcagtgagctgagattgagccaccgcactccagcctaggcaacagagcaagactccatctcaaaaaaaaaaaaaaaaaaaatgaaatacccttttaagcctttatattatgaaattacaaaaacataccattctttttagactttgtcaagttaaagatataaatttatagttatagaaaggaatgaaagttatagaaagacggtattttatagcattgcttgcttcagtatttattctgtaacactatataacaattctggctcttaga

SEQ ID NO: 9824 - DNA, 1074 bp, Homo sapiens
gttgttttagagcaactaatggaaaaatactgtacttgtcacttctagatttcaaattagtattaaccaagcagattttgttgtgtttctgtgatatttcacagtagtttttagttattctgattttcttaatactaaaaataatcttggtttgtggttttccctttctttttgcattatttatttatcgttttattaattctgtagatacttgggaggtttcccctggaaagagtttcttggacatagtatttgacattttatattatgtcataggcagttttctgactattgtgtgtgtgtgtgcatgtgtaggtgacttctttgtttggaggagaagacactagcaggagttcaactaggggtatgtgtttaaatctttaaattttagcaataatcatcgccttttcagagaatctattaactttttttttctttaatctaggctcacttaatcctgaaaatcctgttcaagtaagcataaaccaattaactgcagcaatttatgatcttctcagactccatgcaaattctggtaggagtcctacagactgtgcccaaagtagcaagagtgtcaaggaagcatggactacaacagagcagctccagtttactatttttgctgctcatggaatttcaagtaattgggtatcaaagtaagtaactgtttaagcagccaggcatggtggcttgcacctgtaatcccaaggctttgtgaggccacagtgggaggattgcttgaccccaggagttggagaccagccttggcaatgagacctcatctctactaaaaagaattttaaaaaaattagccagtcaggcacggtggctcatgcctgtaatcccagcactttgggaggctgaagcgggtggatcacctgaggtcaggagttcgagaccagcctgacaaacatggagagaacctgtctctactaaaaatacaaaattagctgggtgtggtggcacatgcctgtaatcccagctatttgggaggctgaggcaggagaatcacttggacccaggaggtggaggttgcggtgagccaagattgcaccattgcactccagccttgtc

SEQ ID NO: 9825 - DNA, 1034 bp, Homo sapiens
cctacttttgttttagagagacttaattttgctgtaaactttctagcattcaaaatactgttcaacatatttaagagatgatattataataggcaagtttagaagagcaaatatattttctgaagtttagaaaaacacatttatagaatgttctctcaatcttaaatgtgtctaacattcattataggtgaggaaactgagactcagagaagtaacctaacaaactttacttggctagtcagtaatatcagtagtagaaccaactctcttttgcttctggttaagcatgttttcttcccattatatcactatattagttgtgacttctgttacgagtgctagaaacccatcttgaacttaaaaagggtcatgtattggttcacaacccaaatagcagatagaggaaggatgggatagagttcattaacagcaagattcaggaattcattactataaatcatccccccttccttcaattctccttgtccactccatttcctttccttcaccttcctcacttttcttcctctgcctttcctccatgcaatttaatggtctcagtagcagagaagaaaaaggagtccccttagctagccagataggaaacacccataggaggaaagagtggaacaacagtccttgtggccaagaggatgagagatctgttatctaaaaaagggaagtagatcaccactgggagatttttttctgaatccagcattgtcttcagtgtggtctgctttaagcatagcaggatttggggttcccagaacatttttgagtatgtacattattttaatgttaaagaacttaatatttaatgagattttctggaccattggtgatattttattaaaactctgtcttcctttatgttaccttttaaccagcatttcttttcttcagaataccttaggaaaaaaatattatcagtagagtcactttttcttggcaaaggttactctccccagacaggccttgtattttcctgttaggccatgttaagtaactactacatttaagctttgcaagtt

SEQ ID NO: 9826 - DNA, 1056 bp, Homo sapiens
ggggaaatgtgactgctaatgagtgcagggtttctttatggggcgatgaaagtattctgaaacttggtagtagtgatggtcacacgcctgtgaatatactaaaaatatactaaaaacaactgaatatactaaaaacaaccacaatctctgcctcccaagttcaagcaattctccagcctcagtctcctgagtatctgggattacaggcctgtgctaccatgcccagctaatttttgtatttttagtagagatggggtttcaccatcttggccacgctggtcttgaactcctgacctcaggtgatccacccgcctcggcctgccatagtgctgggattacaggcgtgagctgccgtacctggcatgtataccagacagcttctataaaacaaaggagaacctgaagtttacttattttttacttaatatttacctccaaaattccatttattctgtctggccactaaattgagtaagtctaatttataagtaagatgagtctgtgctttgttgcagctgtagtttgattcagtttaccactgggtccaaatactttggggcagaattatgactttctcctcagcaggatttgggatctaagcactgacatgatttcagagatctgttttgccagctgagctgccagctttttaggtcgctgggaggttctctttgttctttaattgtgcttcttgcctttctgtgtctcaggagatctctgcagcaaaggagatctctgccttgctgctcttacccttgcctcaggagggcagctgttttacattctgtgaaggcctggaatgccgtggagagctttttctcagctcttgcctccacagcctttggtagccaaaagcttggattacctcagatggatttctgtctgccacttgccaatcctcctttggaagataactgccttgtacttcagggaggcctacatacttcagatgggatctctttcagttcttctgatctgtcttcagctttcagtgtgctacctgtgtatttagtgaagacctgtaggagagttggtagatgggtacagatgggttcc

SEQ ID NO: 9827 - DNA, 1049 bp, Homo sapiens
gtatgtgacagtatgcatggactgttgccatccggggaagctcacttgtgcttcagcatccagattttcaaattaggacttcattaaataggcatgtttgattgatggattgcccacatagttgagctcagtctctagattggattcagactgatactgggtgacccaaagtccccatcctaaatcacatggttggcctttctggttggccaaccctggccagaaggacactcctgtcaagtatgacatagattacctctcaggagcagagggcacctgtctttgggcaaggctaaattctttaataggtaggatgtaaaattaaaacttacctccatggtttctttaggaacagactctgtagacaatagatggatttgatcctaactccatgtattaataagaaccgacataatttctttcaagtagtcatttaaactacattataacctcattgggtgaatcctctagtatatttttatcctgcttgggcttcactgaacttcttggttttgtttggttgatgtctttctttgtggaaagttctggccatttccttttaaaatatttcttctgtttcattctctctactctccttcttggactccaattacacattatattagaccatttgaaattgtcccacagaacttagacatgctgttgtatacccttccccctctttttctctgtttcattttggatattttctattgatctgtcctcgggtttatcaatccttctgcttagtccatctaattaattattgattttgaatatatttttcctttccagtatttcttttctgtagttcctgttactatgctgaaatgtcccatcacttcatacatattgtctatcttttctactagatcatttaatatttttatcataattttttttttttttttgagacagagtcttgctctgtcgcccaggctggatggagtgcagtggcgcaatctcggctcactgcaacctctgcctcctgggttcaagtgattctcctgtctcagcctcctgagtagctaggattacaggtgcgcacc

SEQ ID NO: 9828 - DNA, 1044 bp, Homo sapiens
ttagcataacacttttgagattcaataacatgtctcttttttattaataaacttttttagaaagtttatagaaaaatcatgaagttaccaatttacagaaaatttgtaattgtagtacagagaaatcccttaaaccctgcacctagtttcccctatgtttaaatttatgtaaactactaatttttgctaatggtcaaacctgcaaggttctagaattaagtttgttgaaaatgggaaacaatatgaagatttcgatcaagacgatgactttctaatgccttttttttttttgaaatgcagtctcgctctgtcgcccaggctggagtgcagtggcgcgatctcagctcactgcaacttcctcctcctgggttcaagcgattctcgtgcctcatcctcctgagtagctgggattacaggcacgcaccactatgcccagctaatttttgtatttttgtattttttgtattttttaccatcccaaacaaactctgtagctgttaagcagtgactgttcattctcttctcaacccagcccctggtaaccactaatctactttttttttttttttttttgagatggaggctggaatgtagtggcacgatctcagctcactgcaacctctgcctcccaggttcaagcaattctgcctcagcctcccgagtagctgggactacaggcatgtaccaccacgcccagctaatttttgtatttttaatagagacagggtttcaccatgttggccaggatggtcttgatccacctgccttggcctcccaaagtgttgggattacaggcgtgagcccctgtgcccagcctctactttttgtctctgtgaatttacctattctagatctttcgtgtgattggaatcgtgtaatatttagccttttgtgtctgacttatgtcacttagcgtaatgttttcaaggttcatacatgttgtagaatgtatcatttttatggctgaatcatatttaatgtaccacattttgtatattaattcattgatggatactgcatttgttttcaccttttggctattat

SEQ ID NO: 9829 - DNA, 1031 bp, Homo sapiens
gaaagggtggtgtcttagaccattcaggcttctataacaaaataccatagactgggtggcttataaacaatagacatttattactcacagtctggaggctaggaagtccaagatcaaggtgccagtggattcagtgtctgctgaagggcctgtctttcccctgtaatcttacatggtggaaggtgtgagggagctctctggggccttgttacataagggtactaatcccattcatgaggattccaccctcatcacctcccaaaggccccgcttccaaataccatcaccttgggcatcaggatttaacatgtgcattttagggggacacagacatttagcctatagcaggaagtaatttgctaagatctcacagctagtaggaggcaggtccaagatttcagccaaagtctgtctaatgccacagccctgctcttccctccccctctttcccctagcacacagtcccagtgacctaagctccagcttttagtagggctgcaccttgttctaagtgtcacattcaccacagggagaaagttgtctccaaaccaagggaaagagggaaggtggaactcagcaagcccctgggcctccctgagatcccagattggaaactggcagcaggcttggctgttttgtgacagcctagattatgtccagaacacctatggagtcagaacaacctcactggcactttttctggcccacgtgcatgatgagccctccatcttcttccttcttacaggaagactgggctctttgctttacaggctcttcttccagccagtcaggtgtcaatgcagcctgattgggcacatctgccacccatctgtccccaactcatatcaatggtgtgagacatgtcctgggcctcagtcctgagcttcagagggaaggcaagccaggccaccctcttcctgtgtgctagtctagaaaaactagcccactcgcacactagaacctgcccaggcctaacgcctgtggatttggcatctccagccaatgtcaccatgagacccacccgagcccca

SEQ ID NO: 9830 - DNA, 1042 bp, Homo sapiens
agtcttgtggctcattcacgccctcacctcctttagcaattggctgcaatatctcctctcccaggcattacctgattccccttcttaaagttgcaactcactgcctctactcagtcctccctccctgacccctcccttgcttatatttgtcgaggggacaatcactgtcttgtcagagacacatcggtaattacgatgtgaatcataagctttatggccttcttttgcacaggccccttccagaatttgttgtaagttctttgtgcattttaaataaatatttcctttcacactttaatgtgaatttgtacattttgtattcttcttcttgttgaagccccccacattgcataagtcaggccccacaaaactcaatgcttccatcctggtatatatttttatacttgttattctgtctctcccactaaatatcagctccacaaggctctacagtgcctagaacagtgtctggcacatagttggcgctccacaaatatttgccaggtacgtgcactcactctgtaaccccaggaatccctttagaaatggaatggaatcttttcttctggtctctgagcctcaccacagaggtttcctactgcaccagctagatggcttctggccatagctaagtccactttgtcttccctctctgctccaggaggcaggagaactaagggctgtcctgacatggccctctgggccctggactaagactggctgagtgaccagcaagagcaaagcagtggcagtccgaggcattggtgggtgccaggtgagcgggccctgctgaagctttcccatgcaagcccaggggatacagctcactacccagcatgcactgcaggcccaatagcctgtgccagacgtggggagcaggggccctccccctcccttgcccccagagatcaggccatctagcagaagggacattgctggacatagcaatgcggctgcctgcctccagtgcagtgggcttccgagaggagtacctgggcgacagtggacactaacccgtggaggagaggcgggactaacgggg

SEQ ID NO: 9831 - DNA, 1059 bp, Homo sapiens
ctgaggcttcagacgagaccaagaggtggaggtgaggggcaggtgctgctggcaccactgggggctggcctgggggggcgggagggatgccctcagaacccagcgtgccacacacagcccctaactctggttttaaaagtggaattggagaagctcaggttttggcgaggccactagactgccttgggggtacagtgagactggaaaggccttggggggctgcatctcatctctcacaattcctgtggggccaccacatttaccttccttgcccctggcctccccctcactctcccacaaactcaccccaaccctatgcccatctaggtgcatggctgcaagcaggaaaaaaggtgaatgggaagaactctggggtgcagaggtggggacaacgcccctaaagaccgcaactcctcttggtggcggatagccggggtctcacacgccagcttttggagggagaagtgttctggtgagggatgaggctggagcctcgggggtcaggatatcaggacagcaccaacaccaccgggaagtgagtgcttgggaagggcttgggagcacagttggtgacgggggaggcaggagggatccaggcatccaagctccagagggcaagcttgtgagggccccaaatacttcctcagccacagagactgtccaagccagaactgtctgggcccctgaaacctgggaccagggcaaagtggctctcaaaagcagggctggggagagactgtggagctcaggggcaatcccacaggagtgcatgggttttacaggttttgtgtcctgggattagctggtgtgcatgtctgaacaaacacatctgcactccctggggggcagggggactccgcacaggataatactgtcattgtccaagagtacagaggaatctgggcctgcctggagagcactggggattcttgactggctggcccagggcacctgtgcttggggcaacactcctgaaagatccagtgtcggggaggatgcaggggaagggccaggtagtgccacagtgatgccactcaggctgagctcttcttgccaggc

SEQ ID NO: 9832 - DNA, 1145 bp, Homo sapiens
ataggtggtctcatgattatttgattgttagaagaatccagtaaagtagggaaaacaaatactatgcttccattttacaaaggagaaatctgagcccaagagagattaagtaatagtggagctactgacttcaaacaaatacttggcgtaaagaaggaaggcacctaacaaatatttgtgaataaatgaatgattgaatgaatgctgacttctcttctagggaagcctctagaaatcattttgtccagtggttcccaaactatggtctgggaagctgtaggattccatggagccagttgggagtagtgggaggctgagtggatagggctctgagcctttcatccctgctccagtcagaataacttcagtgctgcctgtttcatgcactgggagattgaaaacaatttagcgagtctaactcctacagcagtggttctcaaactctgttgtgcgtcacagctctgagggagattctgacagttggtataggatgggcatcaggactctgattgtttaccagcacagatggtcatcgggccactgtttgaaaaatagtgtcctacttctgagagttggagattgcaagacccagggagaagcaggaattagccttggtcatacaatcctgtaggaacataggccccactaggtgtctgatccttgggtacctcttccactgcccttcccccggtaccacaactgcaaccgtgccagaaaacaaatgacacagcagagaagaacaaaatggtttccatagcaatgcttagtggcttgtgcctgtcagaatgcctcagacaaacagtaatctgaaccctcggctagaacttgtgtcaaatgttacctacttgttccatgcaaggggtccatggagatgggaagaaggagaagggatgacacaattttgccatgtgcccctgtattggacggttttcccagattcactaatagctggcctcaagatacaccagatcgaggaaggctgagaagtagatcctgggcaggagatgtgggcaatcccaacagcagaggggaagatggggaagggaacaagtgtccagtgagcgtgtgtcacgtgatggagtctgtgctgggcactttacatattcgtttagaaaaaggcaaggaaaagacgattgttcttattt

SEQ ID NO: 9833 - DNA, 1050 bp, Homo sapiens
gagtgggactcacagcagagcactaaagcacaaagtctcaggcagtatataccctgggcctaaatcctagctgtactccttaacagctaagtgatccaattactcagtctctcagttcctcaattttcttatctgtgtgatggatataataatgtatctatctcatgggatttttgtggaatataaataaggtacatatgtatggagcccggcacactgtaggtacttagtagatattttctgtaaaatttcctacttcatttttttcttataatcaccctaaaaaggaaaatatatttgcttgttttcttgttttacagacaagcaaattgaaactcttagagattaagaaacttgcctaaatccccccaggtagtgtggctcagaggtctgagttcctctgagcctttgccctttccactgggagatgctgtttcccgtgtctcactcaatcctgattacaagtaagttcacttatgcctggggcagagcggacacccagaaaaccgtaactgtatagtgtccatgaactctaacaaagaagtgtacacgtggtcatagcaggctggctctcccaatcctcaagtctgtccgtcttagggaaagatgggatatgcatagagtggtttggaaacctcgctcatccaaagtcacctgctggaagagccttcctgatggctgagggcatccatttctggttctgtggcctttcaacccagaggacaaatgaagtcaactggcctccctgagtttaggttggagtggttataacatcatccttaccaaggagagcttgagaaagggtgcagcctttgggttgaatacttaaattgccccttattagctatgtgatcttagcagagtgctcaaacctcagtttcctcaaccaaaccagcattaataacactaaccttgcagagttgttatttggattaaatgatacagagccaggctgtctgggtttgaatcccagctctaccacttactagctttgttatattgatcaaataatttaatctttgtgtgtcttggcattcttgtctgtaaaat

SEQ ID NO: 9834 - DNA, 1052 bp, Homo sapiens
tggagcttactttgtgttctctgttggctgatggctccctccccagccataggagctgattatgatccagcggccctgatgcagtcccctggcagcatcaacctggttttgcctctggttctgatctcaaggaccctccagtttcctcttatcataatggttgcccctagagggcaggattcaataggctgagaggtttacctacatgccctggcagtacagggagccttcaagaagatggatatctgacctttctaccccctacatcccaattcagaataataaaatctcaggcttgagataaattttcggcattttaaaatccaggcatctatttaatatttgaacgagaggcggcgtggtatagaagaaagaacactggctgaattcaaatcccatcttcaccactttctagctgtgtgatccttataagcaaggaatgccttgcagggccctgctggagaataaagataatctaggtaaagtcctgacatatatgatatgcttcataagtagtaagtaccattgtcctgtaaaccagagctttcaaactttttccttcagaacacttaaattctttcacatattctctatcatatatgatgtttagattcctcacagccctggttactttatttgttattattattactattgttacttttattgtaaaatatatatgacataaatttattattttaaccattttaagcatgcagtctagtggcattaaatacattcacattgttgtgaaaccattattaccatccatctccagaacatttttattctcccatactgaaatgttgtacctattaaacagtaactcccactccccatccgtgcagcctgggcactctattttgaatagcatgctccaaattcctcagtgtctttcttcccattgcaaatggaggttaaaaagagcctcttggaagggtttgagttcttcaaactcccactggggagcccgagaattaaaagtctataccagttgcggcaaacttttgggattgcagatggttacaaaattagtgtcaatatagctgctt

SEQ ID NO: 9835 - DNA, 1072 bp, Homo sapiens
aaaataaaataatgaccaaagtattgaggaagcaaaaaacttcaggcttgtttaggaaagtaggaatacttcagtttggctaaggggaacaggcttagaaaaggttaggatcagatcatcacagagggcctcctcctcagatgttccagggtaaagcatttatatatttaattctatgggcaaaaagatgcctgcttaaaaacttaataagtttaataagtttttaagcaggtgtgagttggaaaaatcctagagttggaaaggattttggatataacctagttcagcctccatctgtattagtacgttttcatgctgctgataaagatatacccgagactgagcaatttacacaagaaggaggtttagttggacttaacagtttcatgtgactgaggaagcctcacaatcatgatggaaggcaaggaggagcacctcacatcttacgtgggtggtagacaggcaaaaaaatgagagagcttgtgcaggggaacacctctttttaaaaccatcagatcttatgggacttattcactatcatgagaacagcatgggaaagacttgcccccctgattcaattacctcccaccaggtccttgtcacaacacgtgggaattcaagatgagatttggatggggacacggagctaaaccatatcatttcaccctggcccctcccaaatctcatgtgtcctcacatttcaaaaccaatcatgccttcccaacagtcccccaaagtcttaactcattttagcattaactcagaagtccacagtccagagtctcatccgagaccaggcaagtcccttctgcctatgagtctgtaaaatctaaagcaaattagttacttcctggataccatggggttacaggcattgggtaaatacagtcattccaaatgggagaaattggccaaaacaaagggctacaggccccatgcaagtccagaatccagcggggcagtcaaatcttaaagctccaaaatgatctcctttgacactgtgtctcacatccaggtcacttgatgcaagaggtaggttcccatagtcctgagcagctccacccctgtggat

SEQ ID NO: 9836 - DNA, 1029 bp, Homo sapiens
aatgtttcctgcatcctcagtcattatagatttcttcagaacagtaagtggaaagaccacagactttggaatctaagaaaactggatttgaatctcaactctttctcttactgtgtagtgatttctcctaagtcatttaatctctttaaactacagtttccttgattgtaaaataaggagaatggcacctgttgcttgagattgttgttaggattgacttactacatgaaaatatggatgcagagtgcttgacatatagtaggaactcaagtatctcagcttcttttcttcctttacatgcccagtgatgagtgacagtaaaaggagggaggaagactcagaagaatagatcaaccccaagccaggccgcagaggatgacaatatagttcattgtcatctcctggcttcctgtgacactgaggttctcactgaggcccaggcatcttggtggatccccacttgctcaaccctgggcatatcagaattcagacttagaatctcctgactttaagtgtggcctgttctctctgtttctgtgagctacaggagatagacaagtaacaaaagaaattcaaggaactattataggttggggatccttatgcaggcttgatgtctgggcttgctgtgagaaactcaagttcatttcatatggttggttctcagggctaaaaatctgtgcgttggtttcgttagcatatcagctcctctcttcacacactctgtgttggaactgccacagcatgctgcttttcataaaagtctctctttcaaaccaagtccagctgtttcagtcctagaaggcagccagattagttctcttctgggcaaaatggtaagtgcttatcactccccacaatgcctccagcaccacagaaataacagccaccctttactgagtgcctactgtgcttcagtcctttgacatcactatgagtggttattattagctcattttatagggcagtaggttatgattaagactgtagactttcaagtttgaccaaggttcaaatcctggccccacc

SEQ ID NO: 9837 - DNA, 1977 bp, Homo sapiens
acaaaatagtgtatgtacatagtttaaaaattttctaaatactaaaaggcttagtaatggcaatttctgcctcaccttttcccactcttttgtccaatttccggagccaaccattttgaattattttggggtgtctatctctatatttctaaactaaatgtctatttaagatatcaattttaaaataaattttatctgttgctttcttataaataaaaatttaattatcttataccaccaccttcatttcccttccctccatcctcacgtgtagttaagtcattagtctattattatgagtagtgtaaatactgttctcactgctaagccaagtaatatatcatgatatggttcctatgctatacttttcttttcctggagttaaacttgcctgtttattttccccttcctttaactgactttctatataccaattactaattgttcccaaatgcctccaaaacatctataaaacacctcttacacgctttgcaacatggtcaaagacgtcaactctttcagcagtctccccacccccactttcaccacatgccactctggggttcagcctttctgttccactctgaaatggttactctaggcctgcaccgtggttacgtgatgacttctctataccatttccctgtgttaaatccctgttccctatcttccttcttctttagattagtctcattttggtggggcacaggactcagtacctttcccggaaaagaggagttgaagataaattttttggttctttgaaattctgaaaatatacttactctattttcacatttgattgacactttcactgtttgtagaaatctaggttggcaatttttttcattctgacttttgcatgcatttcccattgtcctctagcatctaatgttactattgagaagtctgctgctttttctaattcctgtttctttgtacgttgccatttttttttccttgaaattcttaggaacttctctttacttcagtgttttgaaattttatgatgacatgccttgatatgtatcttctttattcattgttctggtatttattgagccttctcagtccagaggcttaggcctgccagttctgggaaatctttcttgaaattgttttacaattttttccttatttttctttgttctgtctttcagggacttctattgaatgtatattgaatttcctgactcctaattttcttatcttttctttcctcttgggcatgtttttacttttcttaccactttgtgagaaaattttttgacttgatcttccaacttttctaatggaacttttattcagctattatttttaatttctaaggttctttcttatttttaatcctttaaaatagttttctgttcttgtttatattgccatatcatctatcatttttctatggatattaattatagagtttaaacaaatgttttcttctctgccttgactctgtttttttccaatttttaattttctatttctttgttttgggttctgtctttcacactggagactgtgctttatgttttttgtttgccctgtagatgcattatccaccttttttcacactccatatatccctagggaggatggcctctctatggcctgcatcaactggccctctggcttctggttgggttcagctaatgagaggaacggcagatctcaggactgaaaaacaacgaggtcagggtatttattctcctagcttctccctgcttacctgccatggctgcatccctctatcagggattccagtctggtgtccctctccttaacttcaccctctccaattcaccctctccaagggtaaccactcctttcccttacttcttcaggcttagaggtggtagagctctagttttatctagtagtcctggaatataaacattgtccatacctctgtaaatggttcctttattaaactctcacctgctgtccagtttgatgtggtcttctgctgagattcta

SEQ ID NO: 9838 - DNA, 1053 bp, Homo sapiens
acagcatgttactgtactgaatactgtaggcaattgtaacacaatggctgatcagttatctgaaaactatttatggagttctttggctgccttcctgggtcctgttgctaccagagcagccgtaaggcattacccaaaattgcacagctggtcagtagcagagctgggactagcactcaagtctagcttgtgctattcagaaggagatggtgcctgattctcaaggggctttctcaagtggttgcttgagctgtttgccagacagggagacagcagctaaaggcagagcaacagttttttagttctattggttaccagtgctctgtcccaggtcttgcctttctcaggcaaaatatggtacaaaagattaaagatgatacatctgtatacggcatttactatgaatggagctttcaggactggaagttgttctgggtgagtcagtgagtgagtgatgagtgaatatgaaggcccaggacattattatatactactgtagcctttataaacactatacacttaggctgtaaatactgtgcacttaggctacactgaattacacacaaaaaatctctttcttcaaacgtaaattaaccatagcttactataacatgttgctttatgaactttaaaaaacttttttactcttgtaataacacagcttaaaacacattgtacacagtacaaaaatattttttaatatattttataagctattttctatttcttaaattattattattattattttgctttttaaacttttttgtttaaaacacaaacacacacattagctcaggcctgtacggggtcagaattatcaatatcactgtctttcacctccacatcttgtctcactggaaggtcttcagaggcatgtatggagccatcatctccaatggtaacaatgccttcttctgtaatatctcctgaaggacctgccttttaggaggtatttttacagttaacttaaaaaaaagataagtagaaggaatacactccaaaataacaataaaaagtatagtatagtaaatacacaaaccagtaacatag

SEQ ID NO: 9839 - DNA, 1059 bp, Homo sapiens
tgtctgccttgaaaataatgagttcacgccagcgtctttagttataatgcagcactacagagttccttctatatctcactctttcagttgtaattcatttccctgactatgagaaacctggctcccattatcttcaatacatttacttacttgctcagttctcctgtatgaaaccgacccattgcatcacagtcctgctgactaccttccttgcacaggttgattccccaccaggccacagctgtccagccaggctctgaaccttcactgggaccctgctgccccttcttagccacttttctcatgtaggttctgatgcttggccactttcctcacttaggcttaagaaggaagctatcctgtcttttttttttttttttttttttggttgaagtgtaacttacctacagtaaaatgcacagatcttaaatattcaactcagtgacctcttatatttgtatgcacccatgtaatcacccaaattaggcacttcagtaagcttcctggatatacctatcccaaaataaccattattctaaactttcaccacagattaattttgcttaactttttattttgaaatgatttcaaactcacggaagagttgcaagaataatataaagaattccacaaatcccttcacccagacacagaatgtattaacattttgccacatttgtgtcctctctctttttaaaacaatttaacgttgatagaatactcttatctaatctacagagcttctgtatatttttccagttgtctcaatgatgtcttttatgacaatttttcactttgatctagcatccagttcagaatcatatattgcatttagttgtcatgtccccttgcctcctttattctggaatagcttttctttatctcttatgacattgacattttttaagagtacaggacagttgttttgtatataatgtccctcaattggttttatctgatttttcctcatgattggatttcacttacacacttttggcaggaatactaaataagtgatgttgtgtctgtctttagtgcatcatatgaggaggcacctga

SEQ ID NO: 9840 - DNA, 1035 bp, Homo sapiens
ttaacttttgctgccacctgaacaattgcaaataagcttctcttcccaaagctctgctctggaaatgtctgtcctggttgcagcctctacaatgtcagcttccattgcttgctgcccaggcctctcctcatttacttgtttgcatctcaggcttttatactaaatgttcattaaacattctacaatctatctagggtaaccttgtcagaacagggagggaaaaaggaaatatctatcttctttcttgtcatttctctcagatgaatgaattaaatatttttattgccttgaagattaattatcttctgtccccaggccagctttagtattctagctgtatcttcttgtgactggacctgccagttggagtttctgcccccactctcaactctgtgtttttgccaggtttttcttcatcatcatatcatgtaggcttccgcagtgagtcacagtccaggggttcagagagactagagtgtgacctgcagggtttagaataaattttgaattatctatcttagagctgagagacctcctgaaatcttctggtcctttctggcacatgagatactgttattgtacttaacaagtgaaatacctgagacctagagagtttaaatgaccaagctaaagctgcccagctaataaattatgagtcctaatggcagattttatccttccgaggaaagccaactcttaatttggaaaaggcatcaactctctggattctctttgcagataaaacagtttaggacctccttttgtaataacatgccttgttagtgtaaggaaggaaagacagcttagaagtcatttccttggggcaggtgatgtctggtagataggcagatatcccttgtcccttgtcttctagaaagctcatgagctcagcatgttggcaactctagtcctgcatgcttcttgttcagctaatccttgcaggcgctcatgtacaaaatgattttttgtttgtttgtctctgaagtggcttctcagtccttgagggccaccaggcactaattcctcgtttctgcc

SEQ ID NO: 9841 - DNA, 1032 bp, Homo sapiens
gtggtagaagaagtagtgaatgctttggctccctcataatctagctgggtgattctgcgcaagtcctttattatgcctctcacttttgtcagctataaaatgggaatatagcatctatttaataggattattcgaagattaaaatgatcattcattatgaaagtgtttagtacaatgcctggcatacattagatgatgttcagttcgttccttggtttttaaactttttaattttgaaatatagattcagagggaaattgatacagatgatcctatatacgcttcacccagcttccctcaatgatagaatcttatgtaactgtcgtatcatatcaaaatcaggaaatgggcattggtacaatacctcttgttaactaggccacaaatggtattcagattccctgtgtttttttaaagaaaaattatatcatttctgagtttgtttctggttctgaaatgtttttatacagtgtcatcattatccttgacttttctctggcatctaactttttagaagctttgttctctgttggttttcataacactgtgtatttctccttgtcatccccctgtctccttcaccatcttctcttcttctcttctatactgtatgtctcccagattcagttcttagcccctgctcttctctctgtttgttttgttttgtttctccctcttggatagggtcttacttttatctttattctggaatcagtattcccacctccacttaccaagcccctctctagttccctgtttttgactatttgctgaatataagctcaaactcatcatatccaaagctaaatttgtcatttttttaaactccaaactactacccagctacctccacttgacttccctgcttccattaatgagttgtcattcaaaaactgctcagggctgtacgaggggactttttggtgatagatatgctcatcatcttgattgtggtaaagattttactagtgtaggatgggcatggtagataatgcctataatctcagcactttgggaggctgagatgagcag

SEQ ID NO: 9842 - DNA, 1068 bp, Homo sapiens
tgatatactcatgcagtaagtctggagtggagcttgagaatttgcatttctttcttattcatttatttatttatatttccatagatttttggggaacaggtgatatttggttacatgagtaagttctttagcggtgattgtgtgatttttgagacccattacccaagcagtatacattaaacccaatttgcagtcttgtatccatcacccacttcccacccttcccccctgagtcattgaagtctattgtgtcattcttatgcctttgcatcctcatagtttagctcccacttatgagtgagaacatacaatgtttggttttccattcctgagttacttcacttagaataatagtctccaatcccattcaggttgctgcaaatgtcattaattcattcctttttatggctgagtagtatttcatcatatatatgtaccacagtttctttatccactagttgattgatgggcatttgggttggttccatagttttgcaattgcaaattgtactgctataaacatgcatgtgcaagtatcttttttgtataatgacttctttttctctgggtagatacccagtagtgggaatgctggatcaaatggtagttctacttttagttctttaaggaatctccacactgtttcctgtagtggctgtactagtttacattcccaccaacagtgtacaagtgttccctgttcactgcatccgtattcaaataatattcccagataatgctgatgctactgatttagggaccacactttgagaaccgttgtgctagggggataacagggatgaagttaataagaaaaaacagataaatgatagtgattgttccactccaggatatttgtattctctgccttttagcttgtacatgtccatagagtaactattatcagaccaggcttggaatgtcttattaattattacacagcaacaaaaaccaacacttattgagtacttattatgtgccaggtattgtgctaacacctttatatagtttcacttaattctgataataatcctgtgaaatggatactatagttttctagcttggtgt

SEQ ID NO: 9843 - DNA, 1950 bp, Homo sapiens
atgcctgctggcagcatgccagtacagaaggagctttggattcactaatgcttggttcatggttagacttccgtgcataattagtatttttaaagtcattttatctaaagacttcaaatttagagactctaagtacttgagagacattttatggattgcagctgagtttaaaaggatcttgcagcattttctcctcagcccttactactagccagctgcttctaatcacattcagtaaagtcctgtgacagactctttcttcttccagcttcttgcagaagatgtcatgccccaggtcggcctggatcttcctgagaagctgcacaacagtgtttctcaaatttcaatgtgtgtgcaatcacttggggatcttgttaaaatgtagaagattctagctctgtaggtctgagtcagtagggctactttccacttctaacaggttcccagatgatttcaattctgtgttctgagtagcaaggaaattgctaaatgtcaggcatagacggggctttataaatggatcatcacatctgagactgtgactttacaaaggaggacacagaaatccaaagaaggagagtgacttgcctgaggtcacacagcaaattagtggaagagaccaggaccaacactcaggtcatcattttccttctgtgttgtatgtgtgcttttcctctgctgatctagcaatgtaaagaagcagaaataaggtttcctacttgcattttcatgtttacagcagcctcacagaaccaaaatcgggtatgttggtagtctagacttgcctgaagcccttctttcttaggttttagtgaggcatttaccacgggatcttaagcagagcctctctatgacaccaggctttgtgttcagtagtgcttgttgaacaggacttgagtcccttccacactggacaaggggaagtgggtggtgccaaaaattgccagatggccccaaatgagtctctagtgtgggttaaccctcataatccaggagcaaaaggtgtgtctgggacactgaagcagccttcagacttcagaatttgcttagcactctttcttttaggatgtgctaagtggcaaagagggcataccgggaatagagtaggtatgtttgacccagagaccctgtcaggggcctggagttggaacaacaaagcagccaaagaacatggtgacaggcgatggttggtttatccgtcaaagaggtcctgtgagttggggaggggcataggagcagacagtctgcagtgatctagaccagtgggtaaccttttcattctataaatatttgttgtgtgcccattacatgccagatactgaactgcacagtgggagatgtggagatgaattcctagagctctggtctcaggaggccctccaggtggattctgcatcaagatagtcttttggagtaatagcaaggtaggactctggtcttggtgaaacggtttattaggtggggattcagatagaggaaacaatcaattcagggtcacacttgctgaacctctggcataaaggagggcatggtttctagaataaggcagatacccagtgatggaaaccaaggaacaagatcagggcaggaatgggcagcacactgaggctgcttctgagctgctaacctctgaaacttgaaatctttcctgatagaagacaggggtacgctggagtaaaggtcacctggtgtggacgtggagccaggcactctgatactggaaagacttagccatgcaggttttccatctgtttacctgtctctccctgcctctggccctgcttgtgagaactgtcttcttctgtggttgtggagggtaagattctggaagcttcttaggatcaggccctctagggtagcagaggtggcagaggctcctctccccatcatcatttgtactaacatgtctcagggcctcttagggctgagatgtcgttagatatctcctga

SEQ ID NO: 9844 - DNA, 1050 bp, Homo sapiens
tctacaaggtctcagcaacaacaaaaaccaaacagcccaattttaaaaaagggcaaaggacttgaatggacatttctctaaagataatatacaaatgaccaagattatgtgaaaagttgctcaacatccctaatcattagagaagtacaaatcaaaaccacaatgagataccacccaacacctattagaagggctactataccaaacagaaaataagaagtgatggccagaatgtagagaaattggaacccttgtgcactattggtgggaacgtaaaatagtgcagctgctgtggaaaacagcatgacagttcctcagagcattaaaaatagaattaccatatgatccagtaattccacttctggatatatatccaaaagagttgaaagcagaatcgtgaagatatatatgcatacccatgtacatagcaccactattcacaatacccagaaagtggaagcaacccaagtgtccatcaaaggatagacgataaacaaaatgtgatatatacatgcaatggaatatcattccgtcttaaaaaggaagggaatcctgacatatactacaacatagatgaaccttgaggaccttaagataagcaaaataagctagtcacaaaaagacagatactgtatgatcctgggatgggtacagagttttagttttgcaagatgaaaagagttctggagatggatggtggtgatggttgtagaacaatgcgaatatacttcacaccactgaactgtacacttaaaaatggttaagatggtaaattttatgttatgtatatttgccacaattttaaaaattggaggaaagactcatcagcatatgtgaaggacacttgtatctacaacttattttaaaatacatttaaaaagattggtgaatagagagagggatggctagatttgtgattaaagcaaatacagaaaaatgttaactatagaatctaggtagtaggaatatgagtgttcattgtacaattatttaagcttttctgtatgtttaagcttttctgtatgtttaagcttttctgtgtgtttaaaa

SEQ ID NO: 9845 - DNA, 1969 bp, Homo sapiens
tctgcctcccaggttcaagtgattctcccacctcagcctccccagtagctgggactacggtcgtgggccaccacactcagctaatttttgtatttttagtagagacggggtttcaccatgttggtcaggctggtctcaaactcttgacctcaggtgatcctcccaccttggcctcccaaagtgctgggattacaggcgtgagccactgtgcctggccgccttttgattttcgtatctttgctcatcccctcacgctgctcctgcaatatcctcccttggtctcccattttcttttcttatccagaagttcaccttaaatgcctcttgttccctcaagcctgccaggacaattctagttccagaccccttaggtgttctttctccatacttctcatttggcctctgtcgttttctgtggtacgttgatatcttttgcagtctatacttcttggctctgtagttatttctctgtgctaattcttacatggacatgccttataaattgtgttgcacttgctgacttcgttttgagctattttgtcatctctgtcatttatcatttacctggagacacatacctatactttttggatgacattagtgtatctattttttttaatcatagtaatatataatcctttaaggagaagatacgtttgttaaatttgtgatttgaatctccctggatttgacagcacgcatcagcttgatgcagacattcatctacagtgtattaatgagcattttttatatgtggattcattgttttttttttactccagatgacataaaatcatcatccatgtgtttatgcctttatttcagcacttacagtcctgagttctacatgggctcctgggaagaagattattctagtgaggaaagctggatggtacacagagcatatccatttaatctgggttttcgtcttcctcaaacattgtaaaaatggctatttcatcagccaagttttgtcagtttgggacagcagctgtgcaatcattggagataccactggccctggagtcagaagacacaggtttaaatcttgattcgactatttggttgttgattgaactcaaccaaatcatttaactctcatcatttaacctcatctgtaaaataagcttaatactctatatgccatagcattattgtgaggattgagccagcgtcaatgaatgtactgggtacctgggaagaggtcagtaaatgtctgtttaaaagaaaaggaaaaataaaagggtctcttctgtcctgggtgagccttctgatgcagagtttattttgaggagaaatagacaagttcagagtgtgttaaatttaggcttgagactaaagactgaacgttaagtcagcctggtttctggacttgtcttaaccagaatgtctatggcctccgcagagagtatgaggattaattagttaatctttgtaaagtgctttgaaggtgaaaagtgctctgtaagtggaatggctgaattgctattggggatataataatggtggcaccatattctgccagtcttgcctgtctttgacttcaataatcaataacaggaaagctctaagatgttttacttcatgtgaaagaaaggattcaatgcgtgatttctggtaaaattatttctgtagtcttagagataacaacttcctagtttttcccagcagaggaacggtcatttaagcagcaacagtctcatcccctggtttcttgggaatctcctgctgagcaatctggttagaaatcctagccagctcaggtagagggacaatttgccagttttggatgccctatgggtcctgggcacatgggtttttaagaggctaatcttgcagaagtgaaggaagagtgttgagtgattatgcagtgactagtgcttaataaccaatgcagagtaataccatgggctagtagaaagggatgtggcttagctgtgtgaccctgggctagtcacttctctgaacc

SEQ ID NO: 9846 - DNA, 1030 bp, Homo sapiens
aatttgatggggacacaaccattcagtctgtagcagccctttaggctttagggagggggcaacagatattttgtctctccttcctggagaaagcttctgggggagttatggtggtgaactgccagagggaggaggcctttgaagcaggaaagggcaggtatttattggagcaggttagggagtggtggctggtggtataaagcccactgagaaatggttaaatacctttcccctctgtgcctgtgttctagcagttctttcttccaggaatgctcgtctctgtgattcctgcatagctactgcctcacttccattggttcttgtccaaatgtcacctcttacactctattcccttcactgtgttatttttcattatagcagttttcattgcctgaaaccatagtgtcattatatgtttacttatttgttgtcattctctcctaaccgaatgtgagccccacaaggttagggacttggtctgctttattcatccctggatttctccaactatagacgagagactcgagtgctggtggcatgggatgggtagaacttttggatgtggaagtgatgctatttccaatggctgtgttcaggagatacagcctgtagctggccctgccctcttcctaccttcttggagaagcccaggccacagagcctcagctccctgaggctgacagtgatgcctgatgccccagcgttttaagaccagctttgctcctgcctatctgcaaggccttgccttgagaccttggcttccccatctgtccatagtgagtggggtgaccagccatgctgcaagctcaccagatggttctgggaagggtgtagaggtccctggcagagagctcagtttccattcaaagaatcttcctctttcctgatggagattgatttgttccaggagctctctaaaagtaagcatttagttactggcctgtaattttgccatcatttttaggtttttggcagatggcactctgcttgccctttctcaggggaccttgcctatcccatgggtgctctc

SEQ ID NO: 9847 - DNA, 1042 bp, Homo sapiens
ccagtgggtatccagttcctcccttccttttacagaagaaggactagagaccttagggtgagaagtgatgtgttcgtgccccacagtcaatgagggatggagaaggcattcttttctgagaataaaagtagactacgaggtgtttctgttttgttctaattaatttgaaatgactgatggtatgtaaacctagagcttgtctaattgtttgccaacttcaacttcttaaaaattcttgttggtagtaaatttgttatttcatatgtagggcacttttattatggtgttatttatatataaatgttgaatattttaattaagatgtattttaaatataagaaattaaatttcttttaaagtatacaaagaacttaagtttcatttaaagtatacaatttagtaatttttaatatattcacaaagtgaaatggtttttgatattttgaaaatgagctaaagattatggagattaatagccctgctggacactgtggctcacacctgtaatcccagcactttggaggctgaggcagatggaatacttgaggtcaggagttcaagaccagcctggccactggtctactaaaaaatggagtttttttgtagaaaccccatttctaccaaaaaattcaaaattagctgggtgtggtggcacgtgcctgtaatcccagctacttgggaggctgaggcaggagaattgcatgaacccgggtgacggaggttgcagtgagccgagatcacaccactgtactccagcctgggtgacagagcaagactccgtctcaaaaaaaaaaaagattaatagccctctctttcttcatctagttcaagctgttacacattggattttgttcaatgctctttagacactttctctggagtggttgtagattatataactatttggcattgcagcagaatttaattttacctgctgaggcaacagcataatgatcctcatctggaagacagtttgactttcaaaaagatggtttagagctactaagataagtgaagttgtttacacaggcttcatcgtcag

SEQ ID NO: 9848 - DNA, 1029 bp, Homo sapiens
ataaatgtgaagatggctaagtcatgatggccatattttgtcaaaatgctatttatatgtgaaaatgttggttttacttgacgcttattattgggtattataatttttatgtcaaagttcaggtaataaattgtgtcttactttgatttgcatttttaaattaatgagattgaaatatttggatgtcgtatgttaatttgtttcctaccttttaataatttatccattttgattatttgtatgaatttcttgggtaataatgtatcttttccatatttatcgcatgtatttttttcccattctttgctgttgtttctgttttttggagcaagggacatcgatatttcttaacttttaagtggtgggaacatcaaagaaaggtgggctgagaatacacgagtgctatgtcatgcaaattcttatgtcatatttaggggatttagacttcatcttgaaaaagctgaggaactactaaagattttttacttttaagcaccaagtgatacgatcagtttagaaagattactccaaaagcaatagagaggaaggagtagagagagttgaggctggagggcaggagatcaactaacaggctcttgtggttggtaatcttcaagaataatctgaaaaatgatggcagcctaaacaatggaagtttgaatggagaggagggatgggggtaagagagatttggtagaatagaattgagcacttgccgggaggagtcagcaggaggggagaaggaaaagtcttggctgtgttccaagtttgtagtctgtgtagcagggtggatggtggtgcccttcactaaagtaaagacgacagtggagaacatgtttgggttacataagcctccttgatgttggtgggttcaggtgggacatttgaaatgcctatgaagtcaggagggaattgaatatcctgatttgtttttattcactagttaaagcttgaaaaattttccttttttgacattaaatcttgttgttgttttaggagacggtggctcagggagtaaaggaaggccag

SEQ ID NO: 9849 - DNA, 1088 bp, Homo sapiens
ttattgaaggaaagacaccacccccaaatcctgccatcttattggggctacttttgtcagtgtctgtacccttggcatcggcatctgtgactctttatccatgacctcagtgtttcttaaccaaagttgtactcagcatttcttaaccaaagttgaattttgaaaagagtcagtccttgtttgctggaattagaatgttaatgtcctagtattattccgaactacagtattaactgcttgttgctagtggattagacagattcttttcttactgtggcttccatgttgggagcagaagcttttcatcctggtcacatgaagacagatggtattattgactggagttgaattatttttatatcttgtctggcacaatatggaaattactgaaataagacggtgtataatggaattaacacccaaaataagtagaacactgaagatttgaatttgatatttaagtaaaatgggactgggtgcagtggctcaggcctgtaatcccaaccctttggaaggtaaagacgggaggatcacttgaggccaggagttcaagaccagcctgggcaacatagtgagaatgcatctctacaaaaaataaaaaaaattagctaggcatagtacctgaggccaggaggtccaggccgcaatgagatgtgtttgtgccattgcacaccagtctgggtgacagagaaagaccctgtctcaaaaacaaattaaataaaatatcttcatatataaattaagctaattaaaaatatttttccctgtatttatttaatattttctaatctgaacccatatacagctgactaattcattcttagaaatgtgttatctgtaatctttcctaaacagagtagcccacaagaatcatgcactttttaaaattatttctaagaagccataacaaagctgtgtactaataaagactgcagcaagcacttgtgttatttaaattatgtaagtagattgtcatttgtcaggctcctgtacatttacatagcatgttatattaataataaatgtaaaatatgactaaagttttcattggaacacaatgtagacaggaggtttattatgagcatttt

SEQ ID NO: 9850 - DNA, 1033 bp, Homo sapiens
gcagttcttctgcctcagcctcccaagtagctgggattatggatgtgtgctaccatgcctgactaacatgttctaaaccttgcttcatctttttcgttctaacctctaagattagataatcacaaacagatccttgagaaatctcttctgcagttacgtaccagattatttaatacaacttttaagtgactaaaactttgatatccttacaagcaaattaagttttggcttatttgaaaattttattttgctattcaagttattttcatttacaaggtaaagaggaagagattgcatgtgtatgttatgattaaataaactttatttctttctcacattccttttaggcagctgctgcttttgtgatgtttcctgttcagacaatcacaactgttgactcctgtgttgtacagttagattatttggatggaaggctacttatatcttcacttactcgatccttcttgtgtgacactgagaggtatattgaccaaccattagtcatcagaaatgcagaattttagaactgggaggaacttagaagttatctaccccaagccccatcaatcagttatacagattttttttctttttcttttttttctttttttgagatggggtctcactctgtcactcaggctggagtgcagtggtgtgatcatggctcactgcagccttgacctccctggctcaagcgatcctcctacctcagcctctcaagtagctaggtctataggcacatgccaccatgccctgctaattttttgtattttgtttagagactgggttttgtcatgttacccaggctggtcttgaactcctgggctcaagcaatcttcctgcctcagcctcccaaagggcttggattataggcatgaaccactgcccctggctatacagatgttaaggaatcagttgtatgcaagctgatgttagagagcagagaggaggtagaggagtctaagacagtccagtgggtgactaagacaagtattccgtgagcccgttgctggtgagacatattctaagtgcc

SEQ ID NO: 9851 - DNA, 1047 bp, Homo sapiens
atctgcctatttgctaactcctatccaaaaaacataattctatcaaaggcataccctgtactaagtactgtgaagagctagaacaatgagggaaagacgattcctgctctcaagttgtttataatcaggcttctcttctagcaaattcttccccatcttagaatgaccttcccttttccccctaattttctttttttttttttttgagacagtgtctcgctctgtcactagagtgcagtgaggtgatcccagctcgttgcaacctctgcctcccgggttcaagtgattctcctgcctcagcctcctgagtagctgggattacaggtgcatgccagcatgcctggctaatttttgtatttttagttgagacgggatttcaccatgttggcctgtctgttctcgaactcctgacctcaagtgatttgcctgccttggcctcccaatgtgctgggattacaggcgtgagccaccatgcctggcttaactactaattttctatactgttctagactctaggctgaaatgtagattcagcttctccagaggcctttctctaacttagatgttctttgtgtcaatttgtagtttcctgcctgtacttactattgtatacatattttgtttattatctcacttttacatatgttaattgtaagaccttcatacacacctgttgaagtttgtaggcagtagagctatatcttttttttttttttttttgagactgagtctagctcttgttgcccaggctggagtgcaatggcaccatctcggcccactgcaacctccgcctcctgggtttaagcgattctcctgcctcagcctcgcaagtagctgggattatagtcgcctgccaccatgcccggctaattttgtatttttattagagatggggtttcaccatgttggtcaggctagtcttgaactcctgacctcaggtgatccacccaccttagcctcccaaagtgctgggattacaggcgtgagccaccgcgcctggcgagctgtatcttttttgcaggtgaacaacttaaggctctgagagag

SEQ ID NO: 9852 - DNA, 1029 bp, Homo sapiens
taatcttggttctgaaagtgtttctacccattttgtattttaatttttattaacagaatgctatctaaaaggctaaaatagagataagttttaaagtctttatttcgaatagttctacttcatgcaaatacaaagaaactgattcaatatgtttaagtattcattgaatcataattaataacaactactaagtggatactaatgttctcttaacttggtaatgtatttggtttgaagtattttgtatatttaaagctgaaaaccaagtctcccacttgcttagtcatatagaaaaacccatatgtctcccactcattatgtaaagatgactcaattgatacttgttcacatgacttcctcatttgattcctagatgtcttcaaactgtaacctgaacgttgtgttttcacttgagcatactgcaatcttgagatctcgaagtaataacatattcttgttttgtcccttttagccttagaggagaaaaggagaaaagaggaactagtgaaaaagcgaattgagctcaaacatgacaagaaagcaagagctatggccaagaggacaaaggataatttccatggttacaatgggattcctattgaggaaaagtcaaagaagaggcaggcaacagaaagccataccagccaaggaaccgaccgagagtatgaaatggaagaagagaatgaattcctcgagtacaatcacgcagagtcagagcaggagtatgaggaagagcaagaacctcccaaagttgaaagcaaaccaaaggtcccccttaaaagtgccccaccacccatgaacttcactgatttactcaggctggctgagaaaaagcagtttgaaccagtggaaatcaaggtagtgaagaaatcagaagagcgacctatgaccgcagaagaacttagggagcgagaattccttgaacgaaagcataggagaaaaaaacttgagacagatggaaaactacctccaactgtgtccaaaaaggcaccctctcagaaagaaagtgtgggcacaaaacttagcaaa

SEQ ID NO: 9853 - DNA, 1042 bp, Homo sapiens
accatttcttttttcttttgagacagggtcttactctgtcacccagaatggagtgcagtggcatgattttagctcactgcagcctcgacctccaaggcttaagtgatcctcccacctcagtctcccaagtaacttagactacaggtgtgctgccatgcccggctaattttttattttttgtggagacggggtttcaccatgttgctcagcctggtctcgaactcctgagctcaagcagtctgcctgccttggcttcccaaagtgctgagatcacaggcatttgccgtcatgcccagcccactttaaccatttcgttttagtatggcctgagcaaaacaaagacaatgagagagtcatgtgttaattcattcaacaaatttttactgagaatttatacttctaggggtggaaagaagataagtatgcaagtaaacacaaacatatcaggtagtgaatgataggaatgaagatgacatgataggaggaaggggtggaagggctactgtaggctagaagagttcaagttcaaatatgtcagattcattcggcaatttaatagttctaattattttataaaaaagggaattggcataggttaaaagattctataatgaatatagtttgttggaaatttaaaaattattattctattattgtgggttttactgaagacttgaaagagttaaaccagcagtcagaataatttgtaccatgagagaatataactaaagctaatagagcgcaggtcttcataaagcacctaaatttgccccttaaaaattctctcttcctgcagttttcaaggcacctactagtagagattttgagtgggaccaagtacttaagaaacaaaattaaaagcttgtagtatacttttagctttgtggattctgaatttcctggttcccaaggaaaagacctattaacaactagattaaacttgttttgacaatggagagaagaaaggtctgaaggaagaaaaaaggaggtccctagtttataagagcggtttttagcttttgccagtcccgctcatggtaag

SEQ ID NO: 9854 - DNA, 1064 bp, Homo sapiens
aagtggtgagtcagacatcagtgaacggtcttcccctagctctgggaaatgcacaacttctccagagcatccttgaggctgttctcactaggcttaagcggaagacagaatccacctctcccctttccaatgtgggaaaaagtgggaacaacttaacaactttgtccaaataaatgttttatttaatcctcagctcccctcatacctttccaaccacttaatagaataaagtgagaagtcaggagttcttaccacaggataataataaatacaataataataatgatgggataggagaaaactttggaaggtgattgatacagctatggccttgaagatgctactcttttcatgagtgtatactcatccccaaaatatggacagttttacatttcaatcacactttagtttaagaaaagagagttctttgtgagccctgcttacatggcccagcatttccagtttggaatgggggagtatcatctgatcttggaagctaagcagggtcaggcctggttagtacttggatgggagacctcctgggaataccgggtgctgtaggctgtctacgaccataacaccctgaatgtgcctgatcttgtctggaatgggggagtagagtgtccacctgctattctgttctacgcatgtgggcttccacccatgggacagaaagagtactattttaacatcctgctgcataaagaatatttaacttcagaaatgtctatcaaaagcctcatcttctgctgtatcttgcagaaaagcaattaatttgatctatataaatcccggtcaaatgtactccattgagataaattggaggcattatatcactcttttccatggagtctcctcacttcaggaaaatcatgagactttgaaagtgacttaaagctggctttgtctttcctaggttttccttttgcttttttaaaagtgcattatgtcatgtcctaactgctagattgggaatctgatttcgtcagaggattctgggtaaagatcaacagacaacaatagctctgggaaattttaactctgggttccgaaaagattatttg

SEQ ID NO: 9855 - DNA, 2003 bp, Homo sapiens
attatttaaactttctgatgccttatggcccttaaaatgcaaaatgagaggattataagatttcataacttcatggttaatctgaagatattttacacattagagatgtagttggttggtttccttcttcatatgtctagaaaaactcatttcatgctcttttctgagagatagtcaatggtcttcagaaaccctaaggacaaagatagccccaacatgacccagagagaggaatctgagaaaaaatttaattaatcacaaacaagtttaaatttagtttactcacccagtgttcttaaatgttcttttggtaacatctttgaggaagtcaactctagtcgatattgtcttttcagtgacaaagtgtcaagtaccttataaggtgggcattgtgtcttggatcatttttgtaacaaagttcctctttcctttgagctacatttggtgatccagagttttctactctttctccctgcttctattctttttgctagtacaaaacaatctgtagacaagacagctaacagttcctccaagtaatttcttaacaataaaaaatgaacacctcccagcgttcctgaaatcattccttatatgtctctgattcaagcacttttaccaggtatcctgtaggtactattctgtccccacccacatcaggagacactgaatatgatagcattgagtcacctaatttcagaatcagcctagtctgctcagtgtgttgatattatttctcactgtggcctttttactatttacttgaacttctggtttgagatgtttccactctgtttgcaaccagatttctagactatttagactttttaatcctttattcattggctattggacccatctctccattgtccttctttggatcttacatctagctgagaataaggtgacattaacctacttggtctatgtcctggccagtcttcaataaggagttgaggagtaagaggctgaatatagtctcagtttttttcacatccctggttggtgccgattgactagcagctagactccagtgccagttgtgaccatgttttcagtgacacttaaaagaccatcttagatgtggtatgggtatcataatccttccctccctgccaaacatgttcatgtcctaatccctggaagctgtgaatatgttgttacatggcaaagtcgattctttagatgtgctcaagttagtgaccttaaaatagattatccaggtagatccaagctaatcatgtgattgttaaaagcagaaaacctttccaacctatgagagaaagagatgtgaagaaagaagacgggtcatagagatgctacattgctgattttgaagatggaggaaggaaatcatggagcttaggaatgcaggtggcctctagaagatggaaaaggaaaggaaatggatgctcccctagactcttcaggaaggaaaacagccttggtgacactctgattttagcctattgaaaccatgttgaatgactgcagaaatgtgagataataaacatgcttattcagctaccaagtttgtggcaatttaatgcagcaatagataactactaatgcaaaagataaagaggttaatattacttttgttaagctacacttctttaatgaagttgactattatctttaatttttgttttagagacaggcagtggaattatattattaaggatataaatacgcttatggaacaaatttaggcacaggagaaaatgttgatggaaatattgtcattaactatacaaagaaactcagtgtcagtattaggtaatttaaagatcttaatctttatcactcaacattatattttaaaatatattagaattattcactgcaccaaggtgactatctcatacaacatctcagggttttttttttaatcgatttattttttttaggtttcactgactttctctcccccaaatgattatcatcacttccagcactacaaaattatgccatgcatgttatttaagaacttctcaattaac

SEQ ID NO: 9856 - DNA, 1034 bp, Homo sapiens
tacatggaaaacatttaataaataataataagcattatggaatgtgtattgtatgccagatacagtaactctgcttgcattacattacttttcacaataattttataaattaggtaaaatttgttgccccttttagggatgaagaaactagagtttagtaacatgcccagaatctcatgtcttacaaggcagaaaaatccagataaattggatctaaaaatggcaggagattcatgtaaacaatgaattctgtaggtatcattcaggagaataattaaactcttaactgctgaagaaactttgaaatatcctcaaattcttgcttgaaaataacacgagacgctttccatctaggggtattgtgaataaaggtatgataaacataacacataccttgacccccccaaaaattacatatatattgtatcagatcttcatgattccagatgtttttcaagtaaccaaatgactaccttttaagataaaacataatgcagaatttgagaatagcaggcaagcctataaacagaactcatttagttctatggaagaaactgaatttattactgtatatcctttattacacatcctttcaaaaagcctgcacatcctttcaataagcccacagaaataactgaaattattctctcactttctcttttgtacaacactcataaaatttattgtttttctattgtaaaatgtacacagcataaaatttaccattgcagccacatttaagtgtattgctcagtggcattaaatacatttacattgttgggcagctatcacataagctttattttaggtgtagctgcatcacattttcagattttgtgtgtgtttaaatacatatggaaaagtccttatggaataagcatatagcttgataattcttcttcgactgcacacagccatgtaagcaggactcacatcaaataaccatgcattaccagcaccccagatttccaccccaacatacacacactaaataaatatttgttgaacgtatcaataaataagtgggcaaaata

SEQ ID NO: 9857 - DNA, 1083 bp, Homo sapiens
agaggcgacctggctggtggatagccactttcattgagacacccaagtatatgaccctcccaggtctctggcatcctatatgtatcttcttttttctttctttttttttttttttttggcagaatagtgaatatttatttataaagagaaagtaaattataaaaactaaagaaatggaaaagctggcaattattgccaacatcacaaaatccgttcgctcttattgtgcaagctggagtgagatggtgctatctcggcttactgcaacctccacctccagattcaagtgattctcctacctcggcctctctagtagctgggattgcaggcatgcaccaccacaccaggctaattttctgtatttttagtagagatggggtttctccatgttggccaggctggtctcaaactactgacctcaggtgatctgcccaccttggcctcccaaagtgctgggattacaggcataagccactgtgcctgaccgaaaaaagaatgcttttacactgttggtgagaatgtatattacctcaaccatcgtgaaagacagcgtggcgattccttaaagatttagaacccaaaataccatttgacccagcaatctcatcactgggtatatacccaaaggagtataaatcattctgttataaagatacatacatgtgtatgttcattgcagcactattcacaatagcaaagacgtggaatcaacccgaatgctcatcaaagatagactggataaagaaaacgtggtacatatacatcatggaatactatgaagccataaaaagaaaaaagataatgtcctttgcagggacatggatgaagctggaagccattattctcagcaaactaatgcaggaacagaaaaccaaacactgcatgttctcacttataagtgggagctgaacaatgagaacacatggacacagagaggggaacaacacttactggggcctgtcatgggagtgtggggggtggagagcattagggaaaagagctaatgcatgctgggcttaatacctaggtatcttcttttttcaatggaatcatagcctagccctgtccagaattacttcagaa

SEQ ID NO: 9858 - DNA, 1093 bp, Homo sapiens
tccaatactgaattttgctgaaattgctcttgtgtgacaatcacaggcatgtcagaccaacttagcccatgttaaattcattagtcttattatttgctttatatttcgtgaaaaatataatgcctatcttggatgtctagtagaggtttcctttcttttctaccctatttcctttttcactctactttaccatgtcaatattcaccatgaagaaaacttagggtgtaataaaatctgaaaaataagacctactcttttctgattttatatgccatttgtggaaagtagacaataatcagtgtagtcatgaagtcataaatataatgccacctctataataaaacttgcctaaaactatgatctatctcacttttgaatgattttaagaatggtctctcattatcattcttaatcacaacctctgtgaaaagtgatttgatgtatctattaggcaccatacaattttgcatttttgtgagccagttttttggtctgctggaaatttataccctatgtgagagcaaatgatacctgctcaaacatatttactgtagtatttaaactagcaaaacttgtaaacaataaaattgcctacagtggagtggtttcggtggctcatgctttttcaatttgatgacattaaagagccattaaaaatggtagtcatgcaaattataatacaatgcctgtatctatgataaaatgcttaatgtttgatatagaatcaaaacagaatttattcctgttcacaactatgaaactattcatatagggaagagaatatgaaaattgaagactgctacagatggatgataggtagcttttctctcttttgtccctcttctccctttttccctcttgctccccctcccttccttccttctcttgtttttatctctagaattattaaatattatttgtgaaatacataaaattagaggaaaatggatatatcatatttctctctttaagatatgttatccaaaaaaatttctgttttgtctacatatgaatagataatagatttgctttataatatcagatagtggcaatcttttacctgaaatattgaatattaagataaacatgcaaa

SEQ ID NO: 9859 - DNA, 1043 bp, Homo sapiens
ctaaaccagtctttctttttcctagttttattttaggttcagggaatacgtgtgcaggtttgttacatgggtaaattgtgtgttactgaggctttgtgtacaaatgatactgtcaccaaggtagtggcatagaatcctataggtagccttccaacccatgacctgtcccatcttctccctcaagaaagatccagtgtccattttcgcatatatgtgtccatgtgtactcagtgtttagctaccacttataagtgagaacatgctgtatttggtttatgttctttgttagtttgtctaagataatggcctccagctgcattgatgttgctgcaaaaaacatgactgtatagttttttgcacgtcgtgtatgtgttgcatgttctttattcagtccaccattgatgggcatcttggctgattccacatctttgctattgtgactagcactttgaagaacatgtgagaacatgtgtatttttaggagaatactattttcctttctgtatatacctaatagagagactgtcaggttgaatggtagttccattttcaattttttcgagaattctctaaactgctttccacagtggctgaactaatttacattccaaccagctgtgtaaaagtgttcccttttctctgcaaccttggcagcatctggttctttttgactttttttataatagccattctgactggtgtgagacggtatttcattgaggttttgatttgcatttctctaatgattagtgatactgagcattttttcatgtatttgttggccacatgtatatcttcttttgagaagtgtctgtttatgtcctttgcttatttttaatggagctgttttttgcttgctgatttaagttccttatagattctggacattaggcctttatttcatgcaaagtttgcaaatattttctctcattctgtaggttgcctgcttactctgttgatagtttctctttccatgcagaagctctgtagtataataggtccttcttgtcaatttttgtttttgttgcaattgcttttgggga

SEQ ID NO: 9860 - DNA, 1045 bp, Homo sapiens
tgagatatttgcattctcatgttcatagcagcattattcagaacagcccaaacatggaatcaactaattgtccattgataaatgagtggattaaaaatgtggtatatatcaaacccatatctatctattatctatctatctatctatctatcatctatctatctgcctatcatctatctatatcatctgtctacacacacacacacacacacacacacctcaatattattcaaccttaaaaaagaaggtaaattctgtcatttttgataacacagatcaacctgaagggcattatgctaagtgaaataagtcaggcacagaaagacaaatgcaatatgatatcacttatacatggaatctaaaaatgccaaactcatagaagtcatgagtagaacagtgggtgccagggcctgggaggtgggagaaatggggatatgttggtcaaagcatactacttattcaggataaataaattctggagatccgatgtacaatatagtgactatagttaataatactgtcttgtgtattcgaaatttgctgaaagagtagatctcaagtgttctcacccccccaacatacaatgataactatgtaaagttatggatatattaattagtttgattgtggtaattatttcacaatgtatagataagcatcacactgaccattatgtttacaacttttatttgtcaatttacctcaataaaacaggaaaaataacaacataaagtgaaaaaagattattagttttaattgtatggacggtaagattacaatagtagtaatagtagtagaagtagcagtagtagtaaaagtaataatagtttacatttattgaatgctttctttatgccacttactgtttgaagttctttatgtataataactcattgaatcctcatttcaagccaaagaaaaaatctactgtaattaccccaaaaaacagaagtagaaagaggctaggaaatactagcatacggatgatttatcttaggttcttgtaggaataagaccatttaaaaattattcttatttattttta

SEQ ID NO: 9861 - DNA, 1050 bp, Homo sapiens
atttcaaattttactataatgctatagttaccaaaacagcatggtactatataaaagtaaacacatagaacaatggaacagaatagagaacacagaaataaagctaaatatctgcaaccaatggatctttgacaaaacatacaaaactataaattggggaaaagataccttatttaataaatggtgctggaaaaactgaatagcgacatatagaagaatgtaactgggtccctatctcataccttataaaaaatcaactcaagatggattaaagacttaaattgaagatctgaaataataaaaattctagaggataacctaggaaaaactcttctggacattggcctatgcaaagaatttatgactaacaccccaaaagcaaatgtagcaaacaaaaatacataaataaatggggacttattaaactaaaaagctctgtatagcaaaaaagaaaaaaaaattaccagagtaaacaacccacagaaagggagaaaatatttgcaaactatccatcccaacaaaggactaatatccagaatctacaaggaactcaaacaaatcagcaagaaaaaaacaaccccatcaaaacgtgggcagatgacatgaatggacatttctcaaaagaagatgtacaaatggccaacaaacatgaaaaaatgctcagcatcactagtcatcagggaaatggaaattaaaaccaccatgagatgccattttgccctcaccagaatggctattattaaaaagtcaaaaaacaacagatatttgcatggatgtggtgaaaagggaagcgttcactgtgggtaggaatgtaaattaggacaatctttatggaaaagagtatggagatttcttaaagaattaaaagtagaactactattcaatccaggaatcccactactgggtatctaccccaaaggaaaaaagtcatgtaaaaaagacacctgaaaatgtatgcttattacagcacaattcacaattgcaaagttatgggaccaatctaagtgcccatcgactaatgaatggataaagaaaatatggtatatacac

SEQ ID NO: 9862 - DNA, 1030 bp, Homo sapiens
gtgagtctcaacagctattgaacaaatattcagtaagccatgctgtaaatagacgtatggtcatccaggttttgtttttccattgatagagcacaggcagaacagattcagtataattcttaatggtcctagaattttcagaatagtaaatgatcattggtttcaacttaaagtcaatagctgtattggtccctaacaaaagggtcagtctgttttttggagtgttgaagctaggcattgacctctcttttttagctatgaaaatcctggatggcatcttttccaatattaggcattttatctacatggacaatctgctacttagtgtatccaccttcatcaatgatcttagctagatcttccagatcacttgctgcagcttctccatcacaattgctacttcaccttgcactttcatgttataaagaaaacttctttccttaaacctcatgaaccaacctctgctactgccagacttttcttctatagcttctttacctctctcaggcttcacagaattaaacagagttagggccttgctctgaattaggctttggcttaaggaaatgtggctggtttgatcttctattcagacccctcaaactttctccacatcagcagtaaggctgttttgctttcttatcatttgtgtgtttactggagtagcactttcaatttccttctgtaacttttcctttgcattcttcacaactgggctgacagtctggtgcaagaggcctagcttttggcctccctcagctttcatgcctttctcactaaacgtaataatttctagctcttgatttaaagtgagagacatgcaactcttcctttcactgaaagacttagaggtcattgtggggttattaatttgcctaacttaaatattgttgtctctcagggaacagggaggcccagagagagagagagagagagagagagagagagagagagagatgggggaatgtggctggacagtaaagtggtcagaacacatacatttattaaattatctgtcatatatgagtgc

SEQ ID NO: 9863 - DNA, 1095 bp, Homo sapiens
acatcagaattagaaactcaaaaatggactgatgtattaagaaaagaaaaaaatttaaaaactccttaaacaaagaataaattagaaggaatgcaagatcaaataaacgtaactaggagataagagggagaagaatttaaaagaaatcaatagaaacgatttgagagaaagtaacaagaggaccggcaaagaagacttaagatatacttaacaggagtcctcaaaagaagaagcccaaagcaaaggaacagaatagatactaaaaaatatgattccagaaacattttctgaaaaaaatttaaagctgttccctaaaacaaatcatatcctcccagaaaaatctgtcccagaacaatcaatatcaagacatagtctatgaaattactagactttaaacaacaacaacacaaattcaaaatccaggtaaaaacatcaaattacttttttttgttgagatggagtctcacactgttgcccgggctggagtgcagtggcatgatcactgcaacctccgcctcgtgggttcaagagattctcctgcctcggcctcccaagtagctggaattataggcacccaccatcaggctcagctatttttttgtatttttagtagagacaggttttcactatgttggccaggctagtctcaaactcctgacctcgtgatccacctgcctcagcctcccaaagtgctgggattacaggcgtgagccaccatgcctggccatcaaattatttttaaggaaaagaaaatcatattgccagtaaaactataagtgacatattaaagatgctgtgacccaataatttatatttagtcaagccaattttcaagtataaaggccttaaaactgctgtcaacatgcaagaattcagagaatactgttcctatgaggccttccttaggaatttacgagagaatggacttcagaaaaccaaaatgaatagatacattgagctaagtttggtgctgagcagtaaatttatgtttacgtgagttaaattgtaggggaggaaaaaaagatattgaaaaactgaaaagtagaagaatcaaactgcagtagtaaggatgcttgttgatgataatactctaaa

SEQ ID NO: 9864 - DNA, 1046 bp, Homo sapiens
ttctattgagttactttttaaaaatttttgtcccttcaaaataaattatataaaccacataaaacacaacacatgctggttccatttactgtgattctacagagagaggttttctgacaggatgatatagataagaagtacaggataaaattatgaaaagagagcttgttcttcttcttctcctctcttccttccacattctgtcatctttttccttttcttcctcatccttctcttccttcttcccatattagtaagaactgattatcatacagtagcctaaacacatttctctgcctattactcccaaaatagaaaatacaagagaggttaagtaatgcatttatttttaaaaaatgaaattatgaaaactgttcaaaacttttccaataaaattttgattctgattcagtccaaattcttttttaagtggttggctcaaacttagctcttcagggagtaaaatgaaatattaaaaagcaaaattcttctggtaattttaacaatactagagcctgctgtttttgtctttccattagatctaaagccaatgttcttttagtaaatgtgctcttagagacagttttattattattttttaatcaagaaattctatttttatagaagttttagttttagcaaaattgagcagaaagcgcagagagttcctgtaaatcccatgtccccacacacatgcaatctactccgctatccacatcccgcaccacaatggtacattaaatgaacctgtgttgccatatcatcacctaaagtttacattagggttctcccttggtattgtacattctataggttttgacaaatgtctactggcatgtatctactactacagtatcatatagttccctaaaaatcctctgtgttccaccaatttttcccttcttccctactaaaccctggctactactgatcttttttttttcttttctatttctatagttatcccttttccagaatgtcgtatagttggaattatacagtaggtagctcttgaaggttggcttatttcacttagtaatatgtat

SEQ ID NO: 9865 - DNA, 1059 bp, Homo sapiens
acactgcatgttctcactcataggtgggaattgaacaatgagaacacatggacacaggaaggggaacatcacacactggggcctgttgtggggtggggggaagggggaggggggagggataacattaggagatatacctaatgctaaatgacgagttaatgggtgcagcacaccaacatggcacatgtatacatatgtaacaaacctgcacattgtgcacatgtaccctaaaacttaaagtataataatgataaaattaaaaaaaagaagcaattattaccctgttcaaagcctggtactttaaaatttttgctgaatgcatgcatacttaattgggaatgcattctctctctatatattgataatttttaaggtcccaattgtgtgaagaaattgtctaagccacagaaaaacaatctttaagaaaatcttttagtaggagaacttcctcccaaaatttggttggtttaagtgggtctaagaatgattgtgcttggatgaccttcgtgaaaggaatgatagaagagttccctatttgtttatttttaaggcagggtctcactctgttgcccaggctgcagtgcaacagcgcaatcacagcttatgctgcaaccttgacctcctgggatcaagtgatcctcccacctcagtctcttgagtaaccaggactacaggcacacgccaccatatctggctaatttttaacttttttgtagagacggagtctcactatgttgctcaggttggtctcaaactcctgtgctcaagcagtcctcccacctcggcctcccaaagtgctgggattacaggcctgcgccatcgcacccagctgagctcccttttattaagcacatggtatctgtcaggtgtacgtgatgtctcatttaatcctcaagtgtgggcgttattttcattttacaggtgagtgaacttaacctttaagaggttgagcaatttactcaaatttatctagctctaaatgcaatcacgaaacttaaaaatatctgaaaaaatgaaatgtgaatatagccttggaggcacagtttgggaataacttat

SEQ ID NO: 9866 - DNA, 1189 bp, Homo sapiens
gggagggggtacataaaattgactccttagaacctgtgctactgaccccagcccaccactgagcaccttcctcacatcgattgctggctctggctactgcactaaactttgagaactgggctgctgaagccatagcagggagtagagtggaaccagactcagttgtaacactctcctctacagtcacaggacatgtggagaggtgggcctttctccttacaagtaggcagctacctcctattctttctggagtgagtgtgggtgggacctttttaaatcagcccccactgcctctatttgtgcctgcagttctaccattagtaaatacttctttccttttctttctgaagttctttaagaaattgagagctcatgggttgggtgcagtaagttcccagcattttgatgtgagcctgtttggcacactggagagagatcttaagctgaacaggcataggtaggagctaaggaactcagatagtctggggtcagtgtgctcattcctcacaatctgctcatttagtgaggcctccaaaagaataggggaggaggccaattagattcttcttcccctgaagtccttgggtaaagcctgtggttaaaagactttgtcctagtgaatgagcctagaaaattgacttagacaaagggaggtgcaggacagttctgaaagattctattctaccttacttacatcatagcccaaatcaattccagatggcattaatgtgaaaggcaaaaccttaaacattttagaagaaaatatagaagaataaccatatgacccagaggtaggaaatgatttattaaatgagactcataaagtacttgatgtaaaatagataaattcaaccacatcaaaattagaattaatttctgttctcaaaaggcacaattaaaaaaagatgaacctcaaattcctcaaattgggagaagatatttgtgatataattaattaattgtgattaatatacaaaatatttttaaaaatccagaaatctatacaaacaatgcaaacaaacatagttaaaagagaaatgggaaaattacatgaacaggcaaatcacagaagaggaaacataaatagccaacagtcatataaaagatgctcatctcattagtagtagatactatattccacccattttattccaactagattggccaatatatatatttttaaaagcta

SEQ ID NO: 9867 - DNA, 1137 bp, Homo sapiens
tacagaatgaattccaagtggtatttgttgcactaatcttgctgtgcagatgacaagcagtttttcttaaatatctgtttccagttcttccagagatatagaccatacttgttttgtttcacgtgtgtgcgttccacatccccatccccagccccagtagctaaaatcaagtatactcatgattactttggtaaaaataatgtttactaattgttcttacaatatcttacatgttgaccagaagttttattgactcttatttaaaaataaataataatataaataggaatgacattatctttctgttcaagaatttctgatagggccaacattgtgtctggtcagtggcctataatctgctagcataaatctctcattttgtagaaatggaagggtcattttttgcactgttgttttatgacatttatttacgcagatacatagcataagtttattatgaaaattaaaaaaatatccaggtgattttcttttctgggctcctgctttagacatttgaacctctcaaccatcactcctttaaacagttcaggccaggcatggtggctcacacctgtaaccaaccccagcactttgggaggctgaggcagacagatcacctgaggtcaggagttcgagaccagcctggccaaaatggcgaaacctcgtctttacaaaaacaaaaattagctaggtgcggtggtgtgtgcctgtaatcccagctactggggaggctgaggtaggagaattgcttgagcccaggaggtggaggttgcagggagctgagatggtgccacagcactccagcctgagagacagagcaagaccctgtctcaaaacaaaacaaaacaaaatatccaaaagttcaataaattttcctgaagagatctacccctcccccacattttaatccctcatattgtgaagaagttattttctgtgtacagctggaaactccccaactttcttcaaatcctgctggctttgggtaggcccctgatgtcctatttgaggctaacctagtaaggggaaagaccgttagattataagaggtcattggcttaggctctgatagtgggatgctaggtctcagctgagatgaagggaattgatggtcctgtcctggatgggattactgat

SEQ ID NO: 9868 - DNA, 1032 bp, Homo sapiens
cattgaaaggctattctctaaagaaattggatggccctagacaaatgacttccccgttgaggaacttaggggatccccctgactgatcatcctacagggaagcctgctaatcagtccaaggctcactggggtacacagagctcccaagcagtcatttattctttgtaaataatgacaattaagcttcactagacagatgaacaacacttgcaataaaaatgaatgaataatgtttccacttagtagactgctgacctgtgaaagtcttgcttagggcctatcagagttagagggaccttgggagttagggaggtcatttggctttcagctgcacagaggcctaaagctttctaagttgggcttttaacattgtctagaaatgcacacataggtttgaaagaggaagatgttcataattaaacctatatgccattactgaacaaaatgcctacagtatactgtgaattaacgtattacataaatcctaaattaatttttgaacagcgtaagtacatagcatgtatttttgaacattagaagtatacctttgttaaacacaaaaatttaacacatatcataatttcaaaaactattttggcatatatatattttgtaatttgctacaaacctcaaggaatagaagtagtctgcctgcatacctgaatcatctggaccgaagttcaaatgtaccccgaagtgtcattatacacttgcaacagcttcttagatagaatgcaggattccattaagcacaaagatctttagagttagactgaaaagacgttcacatatttttagattctattgcattcaaaagtctataacatgagatagaagagacatacaaagatcttaggaaccaaagaaaatacataatctaatcaagagattgagctgggctgcagtttcagatatatgtgaatagatggacgaatcagggtttgtgtataacttgagtcccatgatttgatcatgcctcctttgaagttataaaaccattgatataaccactaaaaatagagttcaattgtc

SEQ ID NO: 9869 - DNA, 1111 bp, Homo sapiens
ctatcaattttgtttatcttttcaaaaaccagctcctggattcattgatttcttgaagggttttttgtgtctctatctctttcagttctgctctcgtcttagttatttcttgccttctgctggtttttgaatttgtttgctcttgcttctctagttcttttaattgtgatgttagggtgtcaattttagatctttcctgctttctcttgtgggcatttagtgctataaatttccctgtacacactgctttaaatgtgtcccagagattctggtacattgtgtctttgttctcattggtttcaaagaacatctttatttctgccttcatttcattatttacccagtagtcattcaagagcaggttgttcagtttccatgtagttgtgtggttttgagtcagtttcttaatcctgagttctaatttgattgcactgtggtctgagagacagtttgttgtgatttctattttacatttgctgaggagtgctttacttccaattaagtggtcaattttagaataagtgcaatgtggtgctgagaagaatgtatattctgttgatttggggtagagagttctggtgcattaggtcctcttggtgcagagctgagttcaagtcctggatatccttgttaaccttctgtttcactgatctgtctaatattgacagtggggtattaaagtgttccattattattgtgggggagtctaagtctctttgtagatctctaaggacttactttatgaatctgggtgctcctgtattgggtgcatatatatttcggatagttagctcttcttgttgaattgatccctttatgattatgtaatggccttctttatctcttttgatctttgttggtttaaagtctgttttagcagagagtaggattgcaaattctgctcttttttgctttccatttgcttggtagatcttcttccatccctttattttgagcctatttgtgtctctgcatgtgagatgagtctgctgaatacagcacactgatgggtcttgactctttatccaacttgccagtctgtgtcttttaattggggcatttagcccatttccatttaaagttaatactgttgtgtgtgaatatgatcttg

SEQ ID NO: 9870 - DNA, 1048 bp, Homo sapiens
atgtgggggtttaatagtatctgagggatttggtggcttcatgtaatgttctcattaatgaatacttcctaatatcgttggctctactaatattttccaatttgctgggatgtcacctagcaatagcttggattatatagaaagtaaactgtggtcaatacttgcatttaattagacgaaacggggagtaattatgacacgaagtacttatgtttatttcttagtgagctggattatcttgaacctgtgctattaaatggaaatttccatacatcttccccatactattttttataaaagagcctattcaatagctcagaggttgaactctggttaaacaagataatatgttattaataaaaatagaagaagaaagaataaagcttagtcctgtgtctttaaaaattaaaaattttacttgattcccatctatgggctttagacctattactgggtggagtcttaaagttataattgttcaatatgttttttgaacagtgtgctaaatcaatagcaaacccactgccatattagttattctgaatatactaaaaaaatccagctagattgcagtttaataattaaactgtacatactgtgcatataatgaatttttatcttatgtaaattatttttagaacacaagttgggaaatgtggcttctgttcatttcgtttaattaaagctacctcctaaactatagtggctgccagtagcagactgttaaattgtggtttatatactttttgcattgtaaatagtctttgttgtacattgtcagtgtaataaaaacagaatctttgtatatcaaaatcatgtagtttgtataaaatgtgggaaggatttatttacagtgtgttgtaattttgtaaggccaactatttacaagttttaaaaattgctatcatgtatatttacacatctgataaatattaaatcataacttggtaagaaactcctaattaaaaggttttttccaaaattcaggttattgaaaacttttcattttattcatttaaaaactagaataacagatatataaaagtgt

SEQ ID NO: 9871 - DNA, 1033 bp, Homo sapiens
gcttaggaaaagaagggtatctgcagccctcctggaatgctcttgtttgcatattgattgtttgtcttctctcggggccttatcactaacctttgagaaggcaaacaatacgaagtctgtttttattttcagctttttcagaaactgagcttttcctcactgagttagcagtaccaaaggttatatcatatcatttatatgtttgaattggtatcagaatgataaagtgggaaaattcacacctgttttgaaacagatgccagctagaattactgctgtacagaacatattccaagaaatagattgttgtgaaggagaggcattcaacataaacatgaaaaaatattgctggccaagattgaagatctttgttatcttatcagcgatattgtgttactacctctaattctaaagtatagtctaagtaagtggcattctgagtgtttatttgaaagattaacatgttactcttataattgcagagatctgagtagaaacctgatacatgaaattcacagtagagcttttgccacacttgggccaataactaacctgtaagtggatgattatgcagtaatgtcatgaaagtagtaactagtgctatagaaacatctgttttaacattgtcgaatcaaaatatttttctgtttagttattcccttgtataaatgctaagctgtatttatagtaaaagtcttcttaaacggcaagatacatgctagaactataattttagcacccccacttgaacttcatcttagggatctaatatttatgatgttaatacgtgtacagatgtttttatgtgatttatatattgggcattaacttgaagtctcattcatattttagagatgtaagtttcaatgaattaacttcctttcctacggaaggcctgaatgggctaaatcaactgaaacttgtgggcaacttcaagctgaaagaagccttagcagcaaaagactttgttaacctcaggtgtgtttttgcttatttttcttttttgttgaagttatggtaggctccaaaatta

SEQ ID NO: 9872 - DNA, 1050 bp, Homo sapiens
cgatttattactgatgccactggtaagattgtacaactcatgtgaatttgaaggtactaatctgtaggagcatcttctggctgaaaattctttaaacaacttccttatatttatgtatcataataatttatatggcttttgagcctcatatatttgtaattattgtcataggtcatcctttctaacctcttatttataaagtctgtgtacttcagattctctttatggtgttggtaatgtcagatctagaatctactcttaagactatctatagattgtttatcaccatcagccctcattattttaaatggatacccacgcaactatactctgtaactacaggtttccagagcttctccggagataacatcttgtagctcaccactgcccccacacccaactttttacttcataaatgttgtaactgaatcccagaaagtatgagagaaaacatctgtaaagagggaacttctccgggtgtgtgaaattaagaaaaatttagaaataagtattactcctgaatctgaagctttgaaataaaaactcaccgtgtgttttacatatgttagtttgtaaatatggagtctcactaattgcatttacagctcacagcaaaactacctgttacgtcttgttactataaggaaaaaaatcagagctgtgcgtgtgtgtgtgcatgttttaaaaaactggaatgcagagaatagtgtggtgtaaattgtctctaattatgtgtctttttctggtgaggcaattaattggttctctccagacctttttctgatgaggaaattaatcagtttttctgttacagtgataactcacctgaattcaggtgtgccaagcttagaggaaactgtacagaatgcctcattttgtaaagcaatcaattcttgttgtccttcctctttttattagaatgactgaaaagcaccaaaactgtctgatattttacagaatcattgtttactcattttggatcattattttgctttcgatatgattaaatgttttgttgtattcttgagaatgattttattggttaaggcc

SEQ ID NO: 9873 - DNA, 1050 bp, Homo sapiens
ccagttaggtaggaagaaaacaaggaatattatagttttaacccttatctattccctgtgttgccagatggtagggttcttgatcaaattagagacaggaaagtaattttttttgtctttggcatttatttttctttgccatttaatagacattactccagaattagagcattttatatttttctctttagaacatatcccacacttgtgaaaactagcctgtttaaaaagaccaaaagaaaaacaaacaaataaacaaaaccaaaagaagctgaacttgttttaaagctagaaaatattgaattagtctaactagttttatttattttctttctttctttgtaggtgggcaccatctaatagttttattttttagttacccttttaagaatttgtaatttaagccacacataccttttgttgtgttgtgatatttacacaccagtgttttatcctcactcttttctaccttctagtgttagcttccccttgaagaacacacccttaaatgtctcctaggctgtattgcttcatcaagagtgtaaacaattacagcataaaatggtacctttggaaatgaagtcatgcgtctttcttaattgctgaactcttgtaattctgaagggggtctattttagcctgtacttactcccatacttgctaacacaagcaaatgggcctacacatacagctaggaaaagcatgaatctaagggtttcttagggttccataattatgcatggaatgtgcaggagcaggaatgtcaaagtaggagtaatcatgatagatttagaaagggccttagaggttagttggtacaaaatattttacagtgaaggaagctggaattaagcaggtctgggtttcttcttcctagcttcccctcccttcgtcccattgtaatatatggctgtcaggatgacgtttctacagcaaatttgatgtgcataaactttgctggcagctttccacacttttagaataaagttctgatttctaaaggtcacatatgaaggccttttgggatgtagtttttgcttgtcttggtag

SEQ ID NO: 9874 - DNA, 1679 bp, Homo sapiens
ccagattttcaagtagcagaggattcagttttcagggataatttaatgaaaataactgtcttctctctacggccctctcttcttcatttgtctagaatagaaccaacacagctcttgtgtataatgtgaagaacatggaatattgactctttctttgtgaatgattgtcataattcattttagagtcttctcaggtctggtgctgttttgctctgtaatcttttgaaaatcacctgtgtttttttgttgtcgttgttgttgacaacatagtggtaataacatttaactcactacccctcagatgtgtttgaagatgattataagtggtttataagccctctgtaggtatcactacattaaaatggaagaatgaggcccctaaaattgtaaaacaaaacaaaataaagttttgcggcaaggtaggtaacgtagttgtgtagctgcatgggactaagttattagttgaacaaggtgtttaatattgaggttcatcttgtggcctatcaggctctttggatggcattttcacccctacaaaagagtgagtagttctatttgtagacctcccacaaaatgtggtattggagctgggttgctagtctcttcttctctggtttgatttcccactcctcttcttaatcccaagcccttgcttgccccattctgtctaaccctcttccatggttgatatgcttttctccatctcagcctcttcactagctcttctctgaagaactgcttcccctgcagacttttggttagaggctgctcatcttcctacactgttaagagaataggattgattctcaccgctcctcattgttgcccataggtcactgggctttcatcttaactcacaatctctgttccatctgtggtccctgacctttagttctgatccttcgcaaatactgtcatctactggcttgtctgttggtcccctttaaaggaggattgggtgccaagttcatgatcttatgatttctgccatcctctcccctgccgtaagttctgtcattcacccaacatggacaatccttttgacacttttgcctctcatttcatttatctccatcacattggtgagccctgtctcaactccacttcagccttttcctcccatgaccaaatcttggaccttgtgaccacagaactgctaaatccctctgactacagcccctctctctctctttttaagaaaatttttagctcagtgtatacaaatttttcagcctcattaagccctcatgtcccttgaactttttactttctctctatcattcatttctttctctggttagattaagatctgtccattcctttagcctcagtgtccttaaccctcttaccctgttgtcttattaaaggcgattttttatgtaatgatgaaatcaatcttatttagtcacccatgccactttttttgtgtgtgaaatacctagtaagtcccaaactaagtacttatcatacatgacttaactcatcatttgaggaggtagttaactagtagaggctgactgcttagatgtaatggtttaatggagaatgagaatggaactttgacaggagaaaaggctttccattatggcactgtgtgatcttgttcacatcatttagcctctgggttctagttgcctcacctatgcattgaggatacttggctacatgatccccaatat

SEQ ID NO: 9875 - DNA, 1028 bp, Homo sapiens
aaaaaaagaacaactgaaactctggatgatttattctaatttaaacatgattctaacttactgatgattttattaaactaggtcttactagattgccacatttaagccagtgatcctgtatttaatggtaaggtctttgaaaagagcattatggaaacaaaatgattttaccacacatttgttcatgatccaaattctttaatttcatacataagtagttttgactcttacagtgctacagagagcaataactgtaatcatagaaccacaggatatagacctggaatgcatacatggtgctatgttaacatggagcattagtgagaattataaggttcattgaagtatattaaatataacatgcataaaccctattactttctattcctttagtgaaatgcgatactttggttgtacatatatttttaaaaatttaaagacttaacacactgttgacaaaatgcacattagtcaaacatattgtgaaagcatagtgtcagccatgaatacaatagacatacatttctagatgctttgtcataggatgaaccccaaaattggggttcagcctcggagaccacaggaattcttggctttgcacaggaaggaattcaataagagtgacaaagttaagtgaaaacaagtttattaagaatgtaaaggaataaattggcagagcaaccccaagggttgctggttagctatttttatggttatttctttatcatatgctaaacaaagtgtggattatttatgcgttttccaggaaaggggcagggagttccccagaactgagggttcttccccctttcagaccatatagggtaacttctggacatcgccatgacatttgtaaactgtcatggcactggtgggaggttcctttagtaagctaatatattataattagcatataatgagcagtgaggatgtccagaggacgcttacaccaccttggttttggcaggttttggccagcttctttattgcatcctgttttatcagagtggtctttaccacctgtatct

SEQ ID NO: 9876 - DNA, 1049 bp, Homo sapiens
ctgggatttaaaaggattaggtaacttgttcaaatatcccacagttagtgggtggtagtttgtgaagctcaggtgttccatatttaagtttgctcatccctgtagtttgcttagatatttgacaatttatcagaagaggaacaggtgaaatgagaaacaaaatggtgagaagctacaggttattacaggaaaaaaaaatcagaacagaaaaaaatgtgtacccaaaaagcacacatacatctatatgtctgcatacactgggagactatgacttgatttagagtcaaaaatctacacaatagattcaaaatctgttgtgtaaaatgaagttgtctgttattcatagcagaacttttaaaaagtatctctaacttggtctttttgctttttatacatacttgtttaaaagctttcacatcatttcccatgttaatagtgtttttttgtgtgtgtctggaaagtatcagtcatatgctttttgactggctttttctttcttccgtggacttcacttacatggtatatgaggatcagatctgttagcagactcacttttctgtttctaaaggagcaaatttctgaatgtgctcctttaaaccaaaactttgcagtagattaaaaagcaaaatgtgcagtatgatggtttccatatagctgccccctttcactcactggaatttcctgcctctcctgttgaagatgtttttatagggaagtcagcataaaagtgaatcacccatgagcctttttctcccccaaggcatttcatttagtcaacttggtattaatttagttggtactctttagttgactcgaacactgtgtgttgatggtgtgagctgatgtttattaagctgttaatgttttacagacttgatgggttcccatttggatctgtgtgctctttcctttagcagcagggctattattcatgattgaatctgtggccacagttttaattttgaatgtactggtgatagccagcctcatgctaaacagtcatttgcttggtgattctaaaggttgtcttcttcccctggaagcatttt

SEQ ID NO: 9877 - DNA, 1049 bp, Homo sapiens
agctaaagaaaagcttattatcttaaaagtaaatttagaactaaaatcctttctttaaagtattacatattttaaaaagtttatatgacattcttaagcacggttaaatctttctcagaaactaaaaacttctctgagttttgattcagacctgatttaaacatgaattacaaagacagaatagtagctaacgtatgcagtagccctcacaacctatttagattggctgagtgtttcaaatacagttgtgcgttttctaccctgggtctccttctttaaaaaaaaaaaaaagtttgagatgtttttcccattaccatcttgacatctgcctggttacacatgaatagcttgacccagtccctcagcagggagactaccatggccttgctttcaatagccatgtcactgacaaagaaaacatatggaatatttcattcctacccttcacacacagagtctggggctgtgagggcatgcagcagaacgcttcattcttcatggtaggttggcaaatctgtgcacaaaccacaggctctgctgttagtaatcaaactgtgttttccagagcctcattacattctgtagaaagaaaatcccttgttttggataaatcaatttctaatatcagtttgaattaacttaggatggctggcttccatgatgggttttccacctaatcatgtatttcaccaaaggacatttgtgtatgcgtgagcacaggggatttgggtattgctctgccagatttgatatgtggtgtgtgttgggatcacagatgcttgaattcccagtaggataggccttgaaaactgcctgcctttatgtttatcttcttgtcagcccacagaaagagatcaattgatcattgtcctgctagccaaacactgctgcaatgacctttaaaggtttccgttgcatatagtattagccttcttcttgggagctcggtttcaggtcagctagcattgagggctttggtctgtggcatctgaagctatagtattgaggctcatcagcaggtgtgacaggagatggtcaagaacatgaaa

SEQ ID NO: 9878 - DNA, 1080 bp, Homo sapiens
ataagacacctttgctcttttaattttttaaacttgatctcaaggttttggagtgagaaatatgttacccagcttgctatttaaccgtcccgtgcggccttcaagttgttggcaatgttaaagcttgttttcctatacataaaagaatatggatgactttttttcttttttcccccaactttgttcggtgaagtgtggttttttaaaagcttgattgaagatgataaaatgctgtaattgtaaatcctgtcagtgaagaaaaaaatctaggacatttagcaaatcagtactcttacacaatggctaatttgtctgcctctcttgacatttcttttgtgcctttcagcacctgatggtcacactgtatgctaggtgtcaactctattgtctaaaattgtgtgagttaaaaattgagtttagaaatcagtcttagcatgagacagatcgtgattttttagctcatgtacagttgataacttctcaactttccgaagactaacaagttagtattcaaacacctcttttaaattgcaagatgtaattgtgtgctagtatactctgagttcactcacacatagacaaatattcgttattaaactttgtgtatggctgagctatttttagcaagatctttaaagcatactaaaatattctgtgtcgtgtccaggcaattaaaactctgaatgattgggttggttggttttaatctctaaaacatgtttttcataccattacgtattttaattgtcagaaaagctcactagcctggtcttcccccaaccacaagatttggcgttatgcatctgggttcagcaatgcctttctaatagtccaggtccctgaaatgaatatttaaaatatatatccttcttagctttctgtcatgaaagatcttatgggtaagacattgaaccaccctcctgtggcaacatgttggttcataagaatataagcatatccttgtaaggaaatgtaaaccatagatattttgggaggcagctgggccaagattgggtatacgtttagatcccaggctggcctgctgtttgtgctagtgagaaaatgtgcagaggaagcata

SEQ ID NO: 9879 - DNA, 1077 bp, Homo sapiens
ttcaaaacaagaacgatgtatgaatatctttaagtataggtcctttattttccaaactagtgaaccatgtgttctctttaaatataagcgaggaaaaaatattctgccaggcatagggagtgctgggttccagatctgtcaataattcacaggagtgaccttgaatgagtcatattcttaacccttcaggaccttattttcctcatctgtaaatctgtaaaacaagtcaacaactcttaactgccaaaagtgttttttattgttgttctctatttaatttgattttttttttttttttgagacggactcttgcgctgttgcccaggctggagtgcagtggcacgacctcggctcactgcaacctccacctcccaggttcaagcaattctctgtctcagcctcccgagtggctgggattacaggcacccgccaccatgcctggctaatttttttgtatctttagtagagtcggggttttaccatcttggccaggctggtcttgaattcctgacctcgtggtcctcctgcctcggcctcccaaagtgctgggattacaggtacaagccatcgtgccccgccttattttgatttttatacattccttgggtcctctctattgtgttaaatgaagtataggtgtctaaactgtagaatctctcaccaacccaggagactcttccagttgtccagttcacctggaatatttccattgcatggggaactcatgcctcacaggcaaaagtgtactggatatgatctgagcaattcttaagacttgaggccaggtgtggtggctcacacctgtaatcccaacactttgggaggccaaagtgtgtagatcccttgaagtcaggaattcaagaccagcctggctaacatggtgaaaccccgtctctacttaaaataaaaaaaaattagccgggcgtggtggtgcacgcctgtagtcccagctacttgggaggctgagggaggagaatctcttgaaccccagaggtagaggttgcagtgaaccgagattgtgccactgcactccagcctgggcaacagagcgagactcctctcaagaaaaaaaaataa

SEQ ID NO: 9880 - DNA, 1033 bp, Homo sapiens
ggtggaaaatattatcttccacaaaaccattccctggtgccaaaaaggtcagggaccagtttaaagtccattcctgttctaaaagtgcaataacattaacacgcaattggtttgatgtgaactattttgtatcatgtaatgacatataagctagtttatgcacaaagggggtattttctaaaatatcagaaatattgataatcatgcatggctgcctttcataaagcatctactaagcactgcatctaatccttataaccccccaataagatgggtgttattctgtttcacagaatcaggaacaccaaatagtttattcataattacacacttacactgactcatggaccagattctaatcccaagtttattttcaaaacccataattttcccccaataccacactgcacttttagcaagattttctctctcattcattttattttatttttttaggtttcttgttggatttgttgtggttttttttttttaatctagagccctgtaagaacaacaacaaaaaaagcagagtatgaatctaactcgtatattatgtcaatattcaattggatatttttaagttggcatctcttccccagtatataggtattatttcattaaatagcattagcacattgaaaataccacctattattttctacctattgttactttgtatcacaaaattataaatgatacgtatgttgtagcaattaaaaatttttaagagatgaattctacggaaaatggcagcaatttaagtgaattatttccatagggggaaaaaaaatttaaaaaaaataggttgggtgtagtggctcacgcctgtaatcccaacagtttcagaggccgaggtgggaggattgcttgaggccaggatttggagaccagcccgggcaacatagaccccatttctacataaatttttcattaaaaaataatgaaatagcattctattaactgttaatgatggtggaaggaactaactgaagaaatgacaatgggaaaaattggaagaagaaagtgatcagct

SEQ ID NO: 9881 - DNA, 1073 bp, Homo sapiens
tggtgcatataaaaacagtaatattattgttatgcttgtattcttgcatttcagggtaagtaaaccctgaagaaatcttattttagtatagctacagctgcagtagcttttaagtatgtatcaacatttcattataaattatagcttcctggttctgtgtctcagctgtttcagaactttcagccaagttaaatcttttttggtgttgaaacttttagtaagttgagtaagctatttttttccctacggtaatccacaatctgttctttgtgtgggttgacacctatttataattcttaaaataagggtagctcaaaggagccaagtacagtagtttagcttgctactgttgagcatgaatagcagtaggttgttttcattaatgcagttttcataatgtatcccagaattttaaatcttgaccatagaaaaatacagtcattcattggcaaagatgtacagtggtggtttagtgcagtgaggaaatgatgggaatttttatcttagaaatggatgattcgtgaataaaactaggtacatagtaagtgtatgatagatgtttgatttgtaaattacaaatataaattatcacccccatttccatttattttcttgatatatcaaaatgtgttgacttagtgattctcaatcttagctacatattagcctggcagagctttaaaaaattgatacctgggtcctattccataacaactaaatcaaaatcacccttttttttttttttgtaaagctttccaggtggttctaaaggacacctagggtcaataacccattataaaatgatctgattacactggacactcttaggaagtatcaaaatagaacagttcaatttgcagctacttaatgattaattacatttcttaggttttttttttgttttttttttggtttgtttgttttttgttttaaaagagacaggatcttgctttgtctcccaggctggaacacagtggtgtgatcatagctcactgcagcctgaaactccttggcttccacctcagcctcccaaagcattaggattataggcgtgagccactgcacctggccaa

SEQ ID NO: 9882 - DNA, 1035 bp, Homo sapiens
gcatgttgttatggacattctttcagtgaaatgtctaagacttgtgagtcacacttaaagctaaacttgatatctacttcattgattttctttttagttctatgtactatattgaatttcctgacagtggggctatgaaagccttcctagcattttatagatgtggttgaattaatggctgtaagccttaaagcagaattagacagcatcaatgaatttattaagtataaataaatatataatctgcttagcaatattacacagcctctttatcttatgtgtgataaagagtcatccgaaggttgaaaatgaagaattgtcctggaagctcttacttaatcttttattatttcctaatacagtatataaaattactcattgaaagcttagcagaataagaaacaagaagttaaaaggctgaaaactacaaattttgctattattattgttattacttcccaagtctcttattgatctgttagaaatagagctacacaggaaattgtaggacagttagtatgtggtagtgttatctgctttttaattattcaagtaaggttttattccattagaggaactcaagaagttggtcatggctgataattgctatctgtcaaattccttagagcagggatccgcaacacccaggccatggattgttaccagtccctggcctgttaggaaccaggctgcacagtaggaagtgagcggcgggtgagcaaacattgccatctgagctctgtctcctttcagatcagcagcagcattagattctcatagaagcatgagccctgttgtgaactgcacatgcaagggatctaggttgtgtgctccttatgagaatccaattccttatgataatttaactgatgatctaaggtggaaccatttcatcccaaaaccatccaccctgctactcccagaccgtggaaaaattgtcttccacaaaactggttcctgctgccaaaaaggttgggaccactgccttagagtttataatttggggttagcacagcctatatttacctgagaatt

SEQ ID NO: 9883 - DNA, 1051 bp, Homo sapiens
actcactttgctctaattagtttttgtgtgcggacaagatggaaggtaatggaaatttggcttgcaaagtagttctaacatgatctacatccacaatctggttataatgctataagaatattatgtgggaatagtagttcaaatcagtatttagtatgaacataaagggacaaacaatgcaaagctaacttaagttgtttacacttggaacttatttaaattaaaaaggccagtggatggtcatatgtttggctcattcttctcaaggccttcaggaaaacatgcctatgaaataaaagatcctcaatattaaacattttactgcatttgggggacacatgaaatctggtaataaaggaagtgttggtcttcatttttctaattcagcatggaaactatcttgaggaaaactgactatggtcttagtttgtgtctcagaaatatatttagtctgaatcatggcgtcgacatctgacttccaaaattggatatctagccgtatagtacctcacctcccacacacaccaccccccattcccaggtcatgactactgtccaagcagcaaaaaaagaagtaatttcccagagtacatacatggcagtgacaaccaaccaaacaaaaaacaattataggggctggaatttaaattaatggctgtactctcaccaattcattccccattccaccccatctctctgtcttcaacttttatgaaacattatatttgtcctattcttctgtatcagcatcagcctttcctatatccaactagacttataacttcttggtgcctctcactggctgactaaggtttcagaagtacctacttacagcaaacacttgcagcagtctctttttggttacaaagtccctggacaatttctcaaggcgatattatgaagaggaagtaaacattctcctctgctaccccatttctttttagagtgctaactttattctatatctggtttaatgtcttcttaggccaattggactgattttacagacaccatagaatatctcctgagtaatgggaacaatatttctgct

SEQ ID NO: 9884 - DNA, 1035 bp, Homo sapiens
tttgtagggccagcgttgggaaacaatattctctctcttcttttttctatctccttccttctatatctaaatcaacagtcgctagtttctactatgcttcttaatgacattttattctataaatacttcctgcttagtccaaaaatgattagacaaatcaaacatgacttacctttctggctaatctcattagaactcattccaaattgagcaattaaaaaatggcacccaaattttatctcagttgtcttcttccctataacctagtatagttctgggcagaaaggagattctcaatttattcttaatatattgtaagaaattagattaactgtctctaggataaggaatgagtttaatttaagtaaattgtaattaaagtacagaaaaagaacatattagttgaagaaggatgattgtaggttcaatttggaaccacaaaataatctgtcattttggggcaaattatataaattgattttctcatctgcaaaatgggggtgttaataagtaactcacagggttgtggcaggtcttgaaagaaaaaaaaatatgggtctgggtgcagtggcctgtaatcccagcactttgggaggccgaggcgggcagatcacgaggtcaggagtttgagtccagcctagccaacatggtgaaactcatctctactaaaaatacaaaaattagctgggagtggtggcacacgcctatagtcccagctactcaggaggttgaggcaagggaatcacttgaacctgggaggcagaggttgcagtgaaccaaaatcatgccactgcactccagcctgggtggcagagtgagacttcatctcaaaaaatacacatatatatatatatattttttaaatgcctggcacataaaagctgttcattaaatataagctatctttcctcctaagccctaaaactgttttgatattgagtaagaggtgttttttcccccataataaatgttatatctagacacatttactccaaatttcaatacagctgtattcagacccagacttgtttaaaa

SEQ ID NO: 9885 - DNA, 1050 bp, Homo sapiens
taatttaagattttaaactacatgaaaagtttatttataaatatttactgcatttacatttacctactttatttttaagtattataactagattacttatgaaacctaagatattagacaaagtcaacatttcaagttattttcctcttaaccatttttataccctgtgaatatcaggtgttcacctaagtaaaaaatatatggatattttctggtaactcagaagatatacctgttcttgttaaaaaccaacaatattacattagccttagtcatcaaataattatacaatcaaagatcatttagtgttagactaaatttatagttttataacctttgtatcaaaccttgacacctaaaaagagacaaatatataattgtctgatgagtaaacccaggcaaaaatgtatgctattttgaagacatttatttttattttaccaacaatataaaaaccagctttttaaagatttactcaagtcatgtgaacaaaaagccatttgggttgatgactgtatagtttatataagcactaatgcatgtaagccaatctgaatagaatttcttaagggatttctggttgactataacagttttcaccatgcagtcatgacatacagcttaatacatgtacatgtgcataaatatacctaaacacatgtacacacccaaaaatagtattgcttttatttagaatattagtcttgacacagtaaaacatactaactcacctgtttgtaaaagacatttagatacaaattatatttctgttaacattcaattttcaagctgctgataaagacatacacaagactgggaagaaaaagaggtttaatggactctcagttccacttggctgaaaaggaaggcaaggaggagcaagtcatgtcttacatggatggtggcaggcaaaaggagagcttgtgcaggaaaactccccctatataaccatcagatctcatgagacttattcactatcatgagaacagcatggaaaggacacacccccaagattcaattaccttacaccaggtccttcccacaacatgt

SEQ ID NO: 9886 - DNA, 1021 bp, Homo sapiens
ataaagaaggggaagctctctatatatgtatttcatttattttgcataaaatggcattagagtttgaaagcactggatattccaaaacctacccaacagatttgtttaaataattgagtatattagatttttaatcttaacaatttatttaatatttctctagcacactattttactaaattgattagcctatcaaatatttaaatataatgcatacataatgttagcttttacttctcaattatattaatcagagttttggattgtttgttttgtatttgtttggttgattggttttttgtttgtccacaatcttctgagcaccccaaagcagtttcatatttgccatacacttttattttgttttgaaagatgtctaattatttcaactagaaattatttcagataaaatagtagaagaggtattatgttgagtagaaacattctacctatataagggagcaaaaggttaattcttaactttatttatagttatgggaatatgttttgtgcacaactggaagtgtctttggatttttcagtatagcctttaacataatttgaacttgcgctcatcagttttaagtctttgtagtttatgacctacaacataaatgttaaacatttcatcagtggactatttaactaaatcgtaaacatgtttgggtatattttacttttatataaatacgcaatttattagggttggatttgatttctagaaatatgagttctaatcaaatggctttattcaaaagcctaattttcaagaaagaacatgctatgagtaaaaagtagggtcctggaactagccataatgcataatcgtactatgaaataataaagacaactttgggataaatttaagaaaaaacaatgttttatcaaaagtaactaataatattgatctttatatttgaaaaaataaaatcaccaaatgatcaaaaaagaatttctgccttggacagctgatatatacaaaagtgtgtttaatatgcaaaacagaatcatagtaatttat

SEQ ID NO: 9887 - DNA, 1049 bp, Homo sapiens
ataaataactcctaactttaatatataaataggatgagtgacattgttctctgtcatagtctcaataactggcattggaagtactttctaaaaaggagaaaaataactttgacattttagaaaattattggtcaactgcagattggaaaggagttttattaaatttgatttattaaaattattttattaaaattgatttaatcttaatattctttaaaagaatctgaagaatactttgcattgtttccactcgctaaagctaagatggattatgagaattgtccctaggaggaagtttccagtttccaggcatagctcccctgcatatggggttcctgtcttagccattcaaaatgtccaaagaatttaaatttttttcattgtattgtttgaaatttttccaataaaatttctgagaatgttactagattatcaccatttatactttggtgtaatcccttcgctgatatattctgtagataaggtttagtaggtttaaggaaagacaagtaactttaggtggtagattacaggacacctggccctagacagatgaggcttaggaaaatggagcctgcaaaaaaacattttcacacttttgcctaggatggagctaatatcaagagtgggtctcaagtcttgtctctttaaaagaagaaagattcaagaagataaaggagattatgagaggatgtatataaaggatatttttcttttaaaggagaacagacgtaatatttggcaaacatgttcacactattaggatcatttaattttctaactggaaaggactgaagagatcatctgatccagctcttaaattttagtccagtaaactgatctccataaaggctgtatattcaacttaaggtagcatttgtttcaaggccttataagcccatctctaaaatcacatgactcataggccagtgctctaaccatgtcatccaaccaaaggtgatatcaaccatatgatcttttgtttcatgcaaaaacagaaatttttattgcacacaactcaagactttgtacactggggctttaacact

SEQ ID NO: 9888 - DNA, 1055 bp, Homo sapiens
gttatagtctttgatttggtcgttgtatttcttaaagccataaactctcaacctgtaattttataaaaatgactcacagctcaatttcctattttcttgcaagcagtagtattctgagatttcaagggggaaatagctttaaatacaaaaatgtagcctaacttaatttactacaatagtacacataagaaaatatactagtttactaatatcatgtacatcaaatatcataaaaattagatttactgttaaatgaatcgtgtttcaggccactggaaaacgagatcatagacttgcaatgttgaaaactcgtcgctcctacctggagaaaaggagggaggaggaattgaagcaatttgatgagaatactaattggctccatcgtgtcgaaaaagaaatgggactcttaagtcaaaacggtcatattccaaaggtacaaatatctctgtatgttcagatttaatttgtaggaactgagctcctaaaatgtgttctttttcttattgagtaaatgtctttcataagacaactattattgcctcataactctgagatttaatttacttttaaatgttatttctaagtgattgcatccttttataaggtagcttttaggttaaaataaacaattctatttcaacctgcacttgaggattcattatgtaggtaatttgtttgaaatcttgatattttatgcaaaaatagtttaaatgaggtcaacattaaatgtgttatggttaaagaaagttgatttgaaagggggtgtgtgtgtgtaactgaagatattccaccttagaatggcaaaaggttttatttttgaagtgtagtgatgggtaatgacagtatcatattagaattatgttctgctacaaggttgcagtagtctaactttagtgccttaactagtgtgggctgtcttttgttctcttaacaataagtcttggaagtatgcagttcatttctaatgcagtacctttaaaatgtcattatcgtgcttgtcgtttcatgattgtaatattactgtttcatatctagtctcaagtttacacacctaa

SEQ ID NO: 9889 - DNA, 1027 bp, Homo sapiens
tgtactttcactttcatgaacttcaaattgttgccaatattctttgataaatgtaatgacttccaaataactatctcattggattaatttatcaatttgttgttgtgaacttctttcatatggttgctgaacagaattctggaatagtaccatattatataagaattatatattttatttcaaatttttaagatgtttttcttcttttctttattttttatgtttattttattttatttttggagataaggtctcactccacaactcacacaaacctcccaagtagctcagactcccaagtagctgagactacaggtgtccaccaccatgcctggtttatttcaattattagcacttatattacatagtaatcttcagtgggtaataattcttctcagttttgtgtagattatataagtgtcaattatttgaatgtgcagttatctaagatttactttttgacaaaaggcaagaaatgcagccataggaagctgatattgacttaacatctcaactttaacgaaactcttattgaacacttgtttacatgtaaaacccttgtgcttgacacaatggaggtaaagaaagagaagtgtttgtccttcaattatttacatactagttggagcaataaaaataataaaaatgataaggcactatatgcttgtcatataaatagtaataataaaaacagctgatattgaacgctatttgccagacatttttcaaagttttttgcatggattaattaatttagtatttataacaagcctatgagatagatctaatattatcaccatttgtgaggaacagaggcactgagaactcaagtaggttgtctggagttacttacctaattaatgtggctgaaccaatattaaaccccagctgtctggcttcagagcctgcactcttaatcactctgctatattctaagtaccgtgaatgctatagctattcagaaaagtaagcagtgacttcctatttttagtaagaaggcttcctggtggaaagatgagatttgtac

SEQ ID NO: 9890 - DNA, 1050 bp, Homo sapiens
ataagaaagatactatttaatatgattttgttttaaaggtctgatatatatcacatttcaagggtatatcagtaatgttaatatatagatcaaagacctcagaaaacctagtgtattaaactgatttttatttcttttttaatttccagttttataatgagaattggttaaatagaaagtaatgaataccagattgatagttaatattttatggtacattctcatcacttattttgaacttggtttttaaagtgatcactacacagcaaacatgttaattaaattggcatgaagacaaactaaccatatttttaaaaactaaattctgttgtttagtattttatatattataaaatagggttaagtattaaagagtgttgatttttttttaaggggggtttaagttataaaatgtcatgaaatcacctaataaggtaatgtttactagatgcttctgggcatatttaaatatagtttacatataccatatgccagaagtgcttacctagaacacagtgtatttcacaacatagatatttgtaaaaatgacatcctttcaaaaaaattataatatggcaatttaagttaaaccatactcgaaagctttagcttgttaaactgttcgaaaagctcatcattagtcattagaaaaatgcaaatcaaaaccacaatgagataccatctcatgccagttagaatggcgatcattaaaaagtcaggaaacaacagatgctggagaggatgtggagaaataggaacacttttacactgttggtgggagtgtaaattagttgaaccattgtggaagacagtgtggcgattcctcaaggatctagaaccagaaataccatttgacccagccatcccattactgggtatatacgcccaaagaattataaatcattactagaaagacacatgcacacctatgtttattgcagcactattcacagtagcaaagacttgaaaccaacccaaatgcccatcaatgatagactagataaagaaaatgtggcacatatacaccatgcaatactatgcagccatgaa

SEQ ID NO: 9891 - DNA, 1049 bp, Homo sapiens
tgagagtgatagattatgtcactcctgtgctcaaaacgacttccagttgttctttgtcttactcagagtacaagccaaagttcttttaatggcctccatttctcctctcatgtcttactacactcccctttgctcactccattctggccaacataaagtagcaccctgggtccttctctctatggggaaaagcttcctacaatacctgtatgactaactccctcacctccttcaagtccttacttaaatgttgttttgggtgaatttattatttttgtctcttttattttaacttacaaatgacaaaaaaaatgtgtaagtttataggatacaatgtaatgttttgatacatgtgtacacagtggaatgagcatatcaggctaattaattaacatatccatcacctcacataccatttttttgttgtgagaacatttaaaatgtactcttagcaattaaccatggtcaccttgctgtgcaatagatcaccaaaactattcctcttgtataactgaaactttgtaccctttgaccaacatttccccttttaccacccaccccaccctcctcagcctctggtaaccattactctacttctctgtgttcatatttttagattctgcataaaagtgagatcatgtgatatttgtctttttgtacctggcttattttacttagcataatgccccctagattcattcatgtcgtcataaatgacagaattttagtcttttttaaggctgaatagtatttcattgagtgcatataccacattttttcgatctatttatctgttgataggcacttagattgtttatatatcttagttattgtgaataatgttgtagcgaacatggcagggcaaatatctcttcaacatactgattttaattcctttggatatatactcagaagtgggattgcaggatcgtcctaagtctcaccttttggtccttactcagatcttgttgttttggggtgttttattttgttttgtggtttggtttttttttgtctttttgttgttgttgttgtttgtttttttgttt

SEQ ID NO: 9892 - DNA, 1019 bp, Homo sapiens
caaaatgacttcttattatggtggagtagtcaaaggagagccggattaagagcaaggaggctaggattctaatcctggctctgccacaaacagtctttgtgattgctgtggtctgaacgtttatgttgctccaagattcatgttgaaccctgatctttattgtggtggtattaagaagttgggccttaggaggtgattagatcatgaaaatggacctcttatgtatgagattagtgctcttataaaagagacttgagggagctttccgttgtttccactgtatgaggatgcagcaaaaagtcaccagcattgaagtagggagcaggccctccctccccagacaagaaatccgctggcaccttgatcttggacctcccagcctacagactgtgagcaataaatttctgttgtttattaattacccagtctaaggtattctgtcatagcagcccaaaaggactaggacagtgatcttgggtgggccacttaatatcactgggctttaatttttccatctcaaaaattcaagaagtaaactatagaaactctagtatctccacccattctgtgattctctctatgctttttttctcccaaattacatcagaaaatgtcttcaaaaaatgacaggaaatttaagtgacaaaacacttcagaaatccaacaaaattatttttaatatctccaaagataaggaaaggtaatatttatagaaacactgggaattatattttaagatttcattccactaatattataaaatacagaatatctaagtcatctgtttgtacataaaacaatccaagcctgtgactctggtggctagcatctttattaaaaaaataagatttaaataaattagttaaacaatatgagtgtgaaactgagtgcataactaagacagttaacacgtttaaaagaaatcaactcatgaaatagttttaatatataacctgttgaaagaaagcacagatttgggagaacatggatggataaaatagaagattgatgtagacagg

SEQ ID NO: 9893 - DNA, 1021 bp, Homo sapiens
actcatagtccctgtacccagcttctagagccatcaccgaactggagattggggacccccatcagaacagtgcaaggagaaacatgtgcctagtatcaaaagctgaagattagaggcttttttccacgttcacattgttctaacattgtatgttatcatatcagttagcttggctcctggggacttgcctgggaacctagcattgtttccataccatgacactttagctccaaccaggcaacctagaaatagtttagaatgtaattcacaagttggggacctgtactttagcttcaaagtaatgctgttgatttgtgagcagataacctagaaatatatacatcaaaatgtttattttactcttcaaataagcaattttcaaaaaagaattgtgtattttatagggtggaagtatagcatcactaagttgtattcattctagggcgtatgtttttaaaaaaaaactagtgtcattactttgcacaggcatgccttgtgtaaatataggaaatctaacttctggggaatttcatttcaagaaatcagacctggctcacataaagatacctttcaaaaatgaaatatagcaaatttagtcaagcttaggctgttttgttttgaaagctataaagaagtaaactataacctgctttatttttagcagacacctctagaaaaccttgcacaatgttctatttataaaacagagtctgttttcatgcaaagttgcttagtaataagagaaaagagcaagactgagtatcggaaaaatgaaatgtttctgttttcaagattccttgaattcatcagcatctctttaagacacaacaaagcaattgacctggttttagttttgactatgagaggttacctggagattgataaattggattttttttttttttttgagacagaatcctgctctatcccccatgctggagggcagtggcgcgatctcggctccttgaaacctctgcctcctgggttcaagcaattctcatgcttcagcctcccaagtagc

SEQ ID NO: 9894 - DNA, 1447 bp, Homo sapiens
catgtgtagcaggtgtgaatgttattctatgatatgcagatgcaagaaatttcacatcaatatatttgtttgtttgtttttagagtagaagtaaatctaaatctgagtcttgtctcttggagtgggaaagaattagatcgcacttgtaatgggggttcactcgaccttggctcccagcccagggcctgggggagatccaggccatttggtgggagccctctggactgtggtccacactggccactgctgatgggtcctctgttagtatccatcaggtactgggcccttaaaatcaggcaatgtctctgttttcactgacttgggcttggggatcccttcccaagctgggagtgatggcatgatttgggacatcacacagctgtgccagctgagagcttgtcactcccccactaagcctgcccccttgccaggaattccagctgagtcctcactactccagacaatccctcccttttcattctagaggaatccccctcctgcttaatcttgactgtgtctggaagcccttcaccctcacccctgtctccaaaggcactcacctggctctcctcccatatgtgttgatctagccttgtgccctcagtgacagcaaaagccagaaagtgtgggggtggggtgtttttgcaacttctgtttaaaccatcacatacaaacacccctgaggcaaaggggcacgaggtcttcttagaataagggagagaaaatcaaacacagattaatatctctatcaacaattctgtcatgtgaaggaaaaattcgaaatttttgtatatgcataaagggtatgttataatatgacacatacatacacacacgtattcaattcagaggctcagaagtgtgttcaaataggcatatgtattaagcatggtttcccgttgttaccagagttggcatggaattatagaatctaaatgttatgcttgtataggccttaacaattatctcttccaaatgcattttatccaaaaatgcagtaggtatttggggccacaaagcactgtttcagttgaatttgcaaaagcattcaaactgggagaaaataatagaatcagcccagtttctggtctaacctttggttcatttgcatcactgccccttcagtattgatgttttaaaactcaatggctaccctgatcctttgctctttgcattcagccccattcctcattgccctgctcccctctgcatcaaagggcagattgacctctgccatctagggtccagcgatccctgaagggccctttcctcaatggatccagctggacagcccaccattggaccggatgtcagggtgctcctggcctccagctgagcagcacctcttcctttcatcactccagccccatggcagggtgcagcatctttcggttgctaaatccacattcctcttctaacacttttgaaagtaatgctccaatttaat

SEQ ID NO: 9895 - DNA, 1028 bp, Homo sapiens
gcagaaagggcagcatgcccaatgagtagaagcaagttagaatgcaggacatgtgtggtaagatgagaaggtcataagggcctcatgtgccgggtgagagagtttggatggtatcctgtggttttggtgaaccatggaaaggttttaagcaggacaattatttggctatatttatcttttggaaagaactctagcagcaatgtggactaagatgaagggaatgggaaggaagtgagaccaggaatgttataattgtccaggaacaagatgttgaggatcttactttgaagcatcatcacgtgaggtgaacaggaaagaaagacccaagacaagcggagaagacagaattgaaaggtttagaactaatgggctgagggcaagggagaagttaagattaaatttctggcttgctggctaatattaaatgattctctagtaatctgataatgaaccattaattgagtctttttccaaggagccctattgtgagaaacgtttgatgattttctcaggatatagctgggcaccctttctaggtggcacatcctgcaagcttctttcttccattatctgtggaggtatatttatggagagaatcttagaggttaaaaattggtctatgcaggatggctagaggcagaggaggtgggaaagaagcaaggaaagaagcggccattgaaactagaacatggtactaagggttaggataaagaatgtagcaacatgagtctggaagtagaaataagccaccaggcccttagctgggaagagtgggagatttgggggatatagataaaaatagctcagggcacagatgatttagataagactgtaagtgatatgaaggcagttggcttttagaaaaagttttgtagagatataattcatgtatcgtacaaatcacccatttaaagtgtataatttagtggttcttggtatgttcagagttaggcagtcattaccacggtcaattttaggatgttttcatcacataaaaaagaaacttcataactatgagtagataattt

SEQ ID NO: 9896 - DNA, 1023 bp, Homo sapiens
gcctcactggaatgtttatagtcatgcaagtttatgattacctaacagtcatatctaataaagaggtaaaggtaggagccttttttttttttttgagatttattcttgctctgtagcccaggctggagtgcagtggcacgatttcgactcactgcaacctccaccaggtagaaggctttaggaagggcagataagattaactcttcctatgatttacaaaggagaatatgccagaggtttccctagagtcaagatctctgattcttactgttgagagtttaatactcaagtagtttcttaatctttagcttgttcacaaaaacagtatctaaaatgctatacttttaagtttttgattcataatttggttttcctagcaaccatcctagagttatgatttattgaaagcttctctttctagttcaagaaatccacttagggtccttttttctatttttttttctttcccctttctcatcatcattgttgtccttgtcgtggtgtgtaattctaggatttcagtaggtgtctatgagttgcctgtatgttctatcaggtagctgtaacacagcttgttttgtctgtaatagtacaggataagagtatttgcttaatacaagtaacagttgattcatgcttattatctgtgtgtctttctttacattgaataatttttttcctatatgaattacttcatggtctaattcatataaaagtgcatctttccaataaggacaaaattaaagtgtagttcaattttgataacagaattaagtaaagtacttgggggaaaataatgaacccaaacacagcatagttgaatatgctcaaataagtaagattggattttgttccattagaaaggatcattagtgacctgaggacaagatgactaggtcttttgtgatccatgtgaacccaatcctctgtgttatgggcagccattttcttaaattacataaattattatgcctttaatttatatgacatctttcctccaaaggactcaaagtaccttttgag

SEQ ID NO: 9897 - DNA, 1026 bp, Homo sapiens
ggttggtttctggtgaggcctccctttttggcttacagacagccaccttcttgctgtgttcacacatatcctttcctttgtgtgcatgtggagagagaaagaaccctggcgtctcttctttttcttgtatataaagaaaccagtcccactggaatagggctccacccttatggctttatttaaccttaattacctccttaaaggctctatcttcgaatatagtcacagtagcggttagggcttaaccatgaatttggagtggacacagtttagtccataacactatcctaaactcaagtgcttgaaccactacttgcctgtaaataaagaaatggcatggtgaaaacaatgttttgggaagattaatgtggcctagatgtgtaaaaggacacttagagaatgtctagaaacttcgaatctcttccttttccatgctgtgtatttttgtctttacgggcttgcatgcgattctttgtcatcagttaggaatgtatcctttcacgctgtcaggctgtataaaatacctctggaggatggactgtgtgtgagaaatgaacaggcagcaggaagggtagggtttggatttcactgggggtgtctggctaatgacagtgactccaaagaagctcagagtttcagtgtttgagacttttgctggaagaatgagaaacagatcacatttcaaagtgcttctctataccttctataatgaaacccccagatggtatttgaatcccatccaatgtggactttctctcaactgctttcactgctgtggctattctggatgatttagccatgttcttcccacccactctttgaacattgctagacttactctcatctccaactgttgtcggctcatcagtcatcaatgcaccaaggcggctctctctccagggttagtggctctttctgcaggaccagcatctttctctgatttatgattgcctgtgcccctccttctatggtcctgaagcgtttgtcttctcccattcctgcagcagctctctaattctacagaat

SEQ ID NO: 9898 - DNA, 1027 bp, Homo sapiens
gaatgtacctcagaaatgaacttacataaaatgtctttatttctattagaggatgaagctactataacatgaagctaccataacaatataagggatttacagttgccagaatttgagccatgctgctgttacttatggtcttggaatgtgtctactgtttgttttctactgtttgtcttgctttttagaagtcgattcttttaatgttctgatactgtggaacatatttggtattgttttctctcatattgaaaacacagtggtcttttgttgctgaatttgggctttgatgtttttagcagaaccaatatgaaataatctgcttctccattacccatcacattcttttcagttgaattgtcttgaatgtacctaagacaataagaactgacataagaaaacaaaaagtaacataatgcaataaagatgaataagattaaaggtaaaatgaaaatcctaattttttttggattaaacttctttttgctaatgttttggattagcttagtgattcaaaaatctcgttccaaaattatctgaatagtgtgtgcaataatatcactattttcaatttctttaaagtattaatttttataatatgcgataaaaattaatattagaaaaaatacattaatgggccaggcgcggtggctcatgcctgtaatcccagcactttgggaggccgaggtgggcagatcacaaggtcaggagatcgagaccatcctggctaacacggtgaaaccctgtctctactaaaaatacaaaaaattagccaggcgtggtggcatatgcctgtagtcccagctactcgggaggctgaggcaggagaatggcatgaacccaggaagcggagcttgcagtgagccgagattgcaccactgcattccagcatgggctacagagcgagactccatctcaaaaaaaaaaaaaatacattaatgagaagtaaagtctcttcctctcaaactttattcccatttcccagagttattcactaatagcatgctttttgtatattcccaaaaat

SEQ ID NO: 9899 - DNA, 1054 bp, Homo sapiens
aatttaggatatggcttaggtacagttagtaaaacatgccaactttgcgttcatttgaaaaggaattgtggtgagagtagcaaaattggaatattcaaggttattgtgattttgagaacattcactaaaggttgggcaaaatgtaatgaagatgatcaattttcatatgtaggttttacgatagtaggaaaatattggactgcccattttaaaggtaaagaaacagatcctacgaagcctttacacatctcatgtgatagctaattagcggcaggtgctgaaatctcttgactcttctttgcagcgctcttttccatcttgccaccaccttttcttcctcctgtcctcattgccccactcctcctcctctttgtggattttggggggaaaatgccagtatattcatactaccttattttctgacaggcatctgcagtcaggtgtaaatctccgtaggaagatacaatcttccttttcaagatgtgctgaagagaaaaactgcgtctgtatcaaaatcagggaagagcaattggtctgggcattagctcccatgcagtgcctgttataatgagacaggctttccctgtgcaggcctgacatcctagaaggtgcccggagaattgccaggtgggcagtcagcggggaaagtccacaggccagagctgtattactgtcccagcagttattcggactaaatgcaaccactgaaccttactgttgcaggcacacactctctctcagtgagattgtccttctccataacagttaatttgtttttacctctcaattagctttttcacggagtgtttgatatgttcaagttgctgagattcctttcctacatatgttcccgtcccctggattaccgactgacatctatgttagtctgactcaccatgaacgttatcgagcataaattcttcatttgaacataaatgaatgcagattttctcgtaagtgaaaatggggtgatgaatttacacctacttaagattctacctagttttgattgtgttttatgatgaaaaaaatggattacttcttaaaatataaa

SEQ ID NO: 9900 - DNA, 1034 bp, Homo sapiens
cattttactaagaagacatagaaatcaaccattagcacatgaaaagatgctcagtattattaatcatcgaggaaatgcaattaaatccatggagttaccactatacacacattaaaatgactaatatttaaaagactgacaataccaagtaggtgaaaatgtggagaaatagcaaatcttatatttagctgataagaatgcaaaatgacgcagccacttggcaaaacagtttgatactttcatataaagttaagcttacacttaaatacaatcctgcaatctcatttttagatatataccaagataaataacatatgtcaacacaaaaacttctaagtgaatgttcatagttgttttatttgcaattagccaaattacagacagtaaaaaagtccatatacctgtgaatggataaaacattattatatatttatgtcaaggactatttttcaacaataaaaaggaacgagcattgtggtaaatgaatgaaaccaggtacaaaatattacatgccatgaaattgtagaacagacgaactattctctagtgaaaaaaaccagattattggtgacttagggccaggagtattgagttgtaattggaaaagaacatgaggaattttggaaggtggtgggaatattctatatattcactgtggtagttacatacggatatacattgttctacctgcatcaactgcacctacttaaaataggtacagtttatttcatgtacattataaatcaacagagtagattttaaaaacaaaaataataatatgattagaattgtaatctggttcatttaattattcttaagaaaatttcctctggttatctacttctcattcacattctaaaaataaaataccaaaacaccacagaacacaaattcacgagaaatagctgccttttcaaatcatatttatgttcattactagtgcaagcaaataactagatttggtgtacattctttcacttacctttatgagaataagacaaataacaggccagcatatttagctctaggatttt

SEQ ID NO: 9901 - DNA, 1099 bp, Homo sapiens
accatatctcatggtaaatatgaaaagagaatacacaaaaatggttagtaccttgcccaaggtcagagttacaaggattatattaaaacattttcatattctgtggctgtctaaacatctgtatgttgacctgattattcagtaccatgggcacaaacagtccaggttcctgtagggattctggtttcaaaaaaccagtatctgacaaaaaaatataacacactgtatgattacccgttacacaaaatgttaactggcaaaactaccctatgatggtgggggaaatgaggagttagtggtaactggaagaagtcataagaggctttccaggtcaggcactgtggcttatgcctgtaatcccagcactctgggaggccgaggcgggtggatcacctgaggtcaggagttcgagaccagcctgaccaatatggtgaaaccccatctctactaaaaatacaaaaattagccaggtgtggtggtgtgcgcctgcagtcctagctaatagggaggctgagacaggagaattgcttgaacccaggaggcagaggttgcagtgagtcgagatcccgccattgcactccagcctgggtgacagagcgagactccgtctcgaaaacaaaaaacaaaaacaaaaccagaggctttctggttaaatgggtgtgtttactgtgaaaatccatcaagctacacacttagatttatgcacttctctgtatggattaaaatttttaaagttttaaaggtagtgtgttgagactcttaagtggctacatttttaaatagaaataagcaaataaaaggagaaagaagaaattcaagaaagtgtatattctttgaaaggatggtaatctaacaatttctgaaaaaggctaggggtgattaacttgggaaaattggatccctggagaactgtataatgagcagacgtggtacacacaagtaaaaggtgaatctaaatgtgggcagtggggggtgaccaagatcctttgttgagaggcaggtgtccaaggatggggcaacagcaaattccctctcctcaaaccccactacaattacaaagaaggagcacaaacaaatcaatgtgtttttttttcttttt

SEQ ID NO: 9902 - DNA, 1035 bp, Homo sapiens
aatgtgttatttgatattgtggactgtttcatcagatttcacttgaatcaagaaaggtaacacctgtgtattgcctccacaaaagcctcttttgttaaatggacacccgcaggccatgaggcaattacatttgttgtttgtgctaaaaaggaggcacttaactagacctcagtaaatatagctgagaactagaggcttgattcttttgtccagccctgagattaggttttatcatagctcaggaagtaaacctagctcaggaagtaaacctctgtcgtagaaaggaaaaacaagaatgatttaaaggtccctttaatgccttaaaatttagctgtaaagttagctatatctgaggcacatggagaattcaggtttgggcaaaattaaaacagtttatggcattcatgaaaacatatattcatatattcagtcttatgcattcattcaaaatggcatagcatatttacaagagtacaaaattaatccaacttaaaagttttgattatgagacgtaatgaacaaagagatagaattaggcatttccattttgggccatttgtaaaacatttactataaatgtgtttattagagtggttttcagccttagttgtaaagttatcatagcttttaaaaaaacacattttattatctgtctctgtgagcacaaaaaaaggaaagaaaaatacatgttaatctaccattttatcctcttcatattttattattataatattgctatagaattcttttttctattatctggtttgaattttcaacttactgacaactagtaggttaatctaacagacaataactgtgtttaaagttagaaagaaaatgttctgttccttgcctcattccatatcaggaaagtcaggtgttgtgtttcagacccaaaccaaaaaatgtgttttactgtatgtttgtttaaatgtgttcttggctagagtaatattttagtcatctgtaggtttgatgacagtactgtgaaataaatgacaagtcatttacttgtactgtacaaagaagcatatc

SEQ ID NO: 9903 - DNA, 1045 bp, Homo sapiens
attcttactttttaaagatcttcagctattctctttgtatcatgcatcatcactaaaaaatgccatccgtctcgtgccactgcactccagcctgggcaatagagtgagactctgtctcaaaaaaaaaaaaaaattcatctgtcatccacctgcctaatttgcaattttgtattcacaaacctagattttattctaaataatctgctgggtttgatacattagagttgtgtttcgatgagtaaaacacaagcaggagaagtctgtcaaatatattcaacaatgcctgtttttaaaaaaatgcatcagtaacatcaagtacaaaaatacctacatatttatttttaatcatttcttttttgaagtatggcaacctttctactggtaatctatttctaataccctttcagatataaatctgtttttctggccaatctctatgtgaagcagctatgtacagcaacaacaggagattgaaaagagcaacagagattcatctgtagcaataaatccatataggatgagtttggatttgggaaagaattaagtggagtgccacgaataaaacttttggtggaaacatgttagtacatactgtgtacagtatgcatctaatttactgttcagaactgtttttctgagagcatgagaaaactcattattgtaatacttaacaccattttctactacagtctgaaataccctttgttgaattaagttgggctcatcctttggaaggaaagcaagtatatagatcaagctgtattaaaatgaaagtgcagagatagtcttagaatgagaatataaagtgctttttttaaatccaaatctcaaaatagcaggtaacattgtatttacaaagagacagaggtaaaacacagggacaatagtattgggaggcatggatagaaaggcctataaactggcttcagtcccaaccctcttctccatctcctacattctgactagttggtaaatggttctgaagaagtggatgcttgataagggcctaagcattcaatatttaataaacattgcttgatgagca

SEQ ID NO: 9904 - DNA, 1559 bp, Homo sapiens
ccaaagatatctggctatttaatttaaaggtttttggttgtctttggtaccatagatgtcagcattatacacaaaaggtgaaacattgttcaccaaatagtaatccattaccacagcagagtgatgggaggtgaataagtaatgtagttatttcttatgtttttctttgtgaattgtagagtatgttaataacatcatcattattactggcagaaatgtaagaagtagagacaattttacatttcagaaaggactgattaagtgttatcaggatgtactggtggtatagtgtattaaaatggaaatgtaacaatatggcaataataaagctgttttaccgtgtattagaaaatatttaaataaaactgatggacaacctaagaaacaatcttactaattagcattacaaaatggtcactttatatagttaacactaatagtcctttaatgtgtactgtgtatttaggttatagtttgaaaccctgaatattctaaatgctgtctttctgtttgtttaaatgtcatttcccttagctaaaagtcaaccatctggtcttctattaccacttgtattataaacagaaaaaagtacttctctgtagagagaggaatcatcagattgaaagggcttgtgtattataagctgctgatatactaaatccttatgtcatttaaatagaagaactgcctaataatgtcacttattacaactagagtatctaaacaagcgacttgttttttgcagactatagtgataaaaacctgtgctacacatccatttctcagcaacggctcctaggataatcaatcatggcatactgctaatgccttgattgcagctgatatggaggaaatatgtttactcttttgctaaagtgaagttcactgcggaggtgacgtgactttttcattctatagctaacacaattctgaagataaatttcactcattgtttacaagtctgaagtgtttttgttcagatgtcaacactaaagaataatctttgaggctcctagacttaaagtgttttctgatgtgttctctgaatattttcagaataatttgagcttagtttaacagtaatatggagtttataataatcttattttgtagtagtatattttatatgtatatgtttgaaaagatgtatatatgaagatcagcatctctgttgaaagagtagcaggttgtcctgaaatttgtatgtgttgctcacctggaaatattttaaccactcaaaagttataaagttagtgctattggtatgaatctagagaggcaggatacagttgagtaaaatgaaaatattatatgtatttttatctgcaagttatctgggacttctgtactttaaagttgcttaaaagtcatttgcaaaaattaaagaacaaaattgtaacacaggtattcagtgaaagcatctgaaccagactccaaactctgttggtagtaaggagaatatattccaagtgtgatgtggcttcctaatctaaaacaatcttttttatttatttatttttgtctttcggagacagattctcagtctgtcaacccaggtt

SEQ ID NO: 9905 - DNA, 1022 bp, Homo sapiens
tatttgtaaaagagtaattggtttggaaggagacaaaatcctcaccactagtccatcagatttctttaaaagccatagttatgtaagtaacatttcaattatgttatttttggtgtcataattgattaacattaactgagtgctgacaaaagaaaataatgtttattcatattttgaatgtaagaaaaaagggcatccagtagaatttaaatgtttatatcaagaacaattcagccgttatatttcatgtattttagttacttttaaaaccctgcataaacatcttagtaataattgttacaggcaaaatttaccagtggatgctaaaattattggacaaagtttgaggagaaatagaattttacataatctgaacttatctctcccaaaatatttattacaaagggaaaaaaccttagaggtgaaacctgtcaggcaccactttaactgagttatcttcatcatcataacactacatatcaacataaggtagcctctggattgaagcaccaagaagggcacttgcaggaaaaaaaagttacaacctcaatctactcatgagaaaacataagacaatatcaaattgagggtcattctacaatataactgatcaatactcttcaaaaatgtcaaggtcataaaaaacatggaaagattgaggccctgtcattgattggaacagacaaaggagacatgataactaaatggatttgggatcctggcttagaaagattttccactattagggggaagtctgacaaaataataacatcctatttaaattttgataatcgaaattgtgtgtattgaaattgtatacaaccaccttgcctgtacagctagaaaaagtgcaagaacagtaaaatggaagaatgaagagtagatagaatgtgttagctcctttcaccagtcacatggcttctgtaacagagcttatggggaagagatggccttttgtttactcagcatatactcttcttacttgaataattatagcttaattttctactttactgtaaatc

SEQ ID NO: 9906 - DNA, 1031 bp, Homo sapiens
aatgggatacagtgatattgtgttacatgtatacagtatataatgatcaaatcagggtaattagcgtagtcatcacctcaaacacatcatttctttatgttgtgaacattaaagatcttcttgtacctttctgaaaatatacaataaattatagttaaccgtattcatccaacagtgctgcagaaggcagtaacttattcctcctatctagctgtaattttgtgtccattaaccaacttctcattctcccctcctacctccccttcccagcctctgatacctataattctacactatacttccataggctcaatatttttttaagctcccacagatgagtgaaaacataaggtatttttcttcctgtgccagatttatttctcttaacataatgtgccccagggtcattcatgttgccttgaataacaggatttcattctccttgtggctgaatagtattccattgtgtatgtatagcatgttttctttatccattcatctgttgatggatatttcggttgattctgtgtcttagctattgtgaatagtagctacgctgcaataaacatgaggatgcaggtatccctttgatatactgatttcctttctttcggattaatacccagtagcagaattgagagaattattttttgattctctagagtttttaaagaaacctccacactgttttccatgactgtactaatttacattcccactaacagggtatatgaattttcttttctccacatccttgccagcactttctttgtcttttttgataataatcaatctaactgtggtaagatgatacctgattatagttttgacttgcatttccctgaagattagtgatgttgagcattttttaatatatttgttggccatttctatgttttcttttgaaaaatgtctattcagatcatttgcccactttttaattgggttatttgtttttttgctgttgggttccttgtatattctagatattagtccatgtcagatgcatagtttgcaaatattttctccca

SEQ ID NO: 9907 - DNA, 1025 bp, Homo sapiens
taggggtcactcttatttgtttagagatggttattttctttagaacgtctcaaataaactcatctgaagtaaattcaacataaaacataagatcttctcaatggtatacattcttttcataaaaatacaggttatttgaattttaatatctgttgataacttataagaaatttggcttatcttaagctagatactaatttgcagcacaggcaactcatgatgtcagtaagacttaagggaattatttttggagataagagagtgggatatacgatgaaatgagaagaaattttttagaaagaatgataagtcaggtataacaaaagaataggatggggctgggcatggtggcacccgtccctggtcccagacacttgggaggctgtagtgggaggattctttgagcccaggagttggaggctgatctctctaaaagccgttcatgaactgtggcacagtgagggttagcctatgataatgctaaatgatatttctttttgaattaatattcttccactgttactcatacaactgctatattttgaaatagatcatttaatagttgtattattggtgaatgaatgtggatgttttggtattttactttttggaaggtgatgctttcttatattaaaatgatcaactgcttattctttataaacataaggtgagtttcaattttggttatatgtgaaaatgtaaaattcagaaaataccagtggactaatgaaatacattgaagtattagcattataatatttacttgatgaaaatttatagaattatcccaaagttaacgttcactttaaagataatgaatgggtaaattttgtcaagtctctgaaaatattgagtatgcgtcggtggtcttaaaggacaggacaaagtcctttactggacttccttcctgggagcttattaaaactatagaatctgcagccgggttcccagagattctctttcattagctctgtgatgtaggatgagaatcataggaatcgcagggagcctgggaatttggattt

SEQ ID NO: 9908 - DNA, 1035 bp, Homo sapiens
ataaatagatctagttatagtattgatgtagatacaggacctaatgcagtaactctgtttcactttgttagcacacttattctatttagtaacatatcatgccttctataactccttcactttactgatgaagaaactaaggactagagagattgagtcacttgaacaaggccatttagcaaattggagctagaagccagactaacctatctactttggcagttacaacttaaagtaaaatgaaatcaggacattttcttgagtgttccagtcatttaagtgaaaatatgcctaaatagcttgcagaaaaaatcagatattccttcggctattaactaacaactggcttagcatagaaagttgcatgtctatcgtaaggagaggtcattacaaaaaaaaaaagggaaaaaaaagtttcacatctaaagcccccatagttattgcactttatcacagttcatcttctaaagggcaaccactgtatattctgattttaaccgagaagttttactttgagtacttcatcagaaaaacgtgtgtctttgttctcttaaacagaatacattttaagtttttttataatggctctgagttgttactgtgaacatcagtcattttacagaattaaagtgatttcctcggaattctatgctgtgttggactgttttcttctaaattatcctagcctgataagcttttttgtcctcagagctactgtgatgtgttttctcatttgttttgttttcttttacatttgttaggtaattcttgctttttgttgtcagtgccttccgtttgactcatatttaaaatcaacgcatttgcctaacattatgtattacttaggtgagagcttaagtatggttctgtcacatctgctgactataagagtagagaatgtgtgctagcattttaaaattcattttggtatcagcaactagtctagccactttgtttttacaggatattgagataacctcagaccgatttctgtctgaccgactgatttctgtctaatatatatgcaacataggt

SEQ ID NO: 9909 - DNA, 1068 bp, Homo sapiens
aattcaactcaatatggttgaaaatagccttcaactaatgtaattttgatttcctgctttaggattcctgaaattgtggatcacccacctatgctttaagacatgctttattttttttttttctggaagccctgcaacttccctaaaaattgaatgaattgtagaacagacctatggtaagtgggctttttcctcctttttcttctgtcggtttcatgttcaacttaactcttatgactgttgtaatgctgctccctgctggacacaatgtaattttgtaaagttggcacttaatagatgggcaaataactggttagttggacccactaaggaggggaatctttggctacattcacaaaaaccaatagtatgcaacaaaagcaactattataaaggtgctatatcattgccatcatgttggtacctggagcctgatgaaagtactgatagtcttgtttcaaaatttcattgtctgcttcctgttgagcagcatctaaaagttggaataactgtacacactgaaggatgcttctaggtggtgaacctttgaggattttgtaaattgtgtagggtttttttgtaatgtaagttagtttactgttaaatgttctgtaataatttccattccctgtacttttgtttttccaaagaaaatatctaaaactgccccagtataatttacattagacattgtataactatgctataatccagctatcatgttttctagtactcacagtgtggatttcatctgtagtgtctgtgacttgcctatcatggaccttcatgttgtatgcatagacaagtgctcccaaaattattttaaaatgtgtgaaagtcagaagtgtgtttcttcctaccttagggctaagctattgtattttttgaaatgcagcatgcctcaaattattacctgaatatcatttggaattaatgagcatgcattttcttgaaaagaagactgacagacagaaacaacatggagctgctaagccaagatctagcaggataactgatcttatattatttaaaggctgaaatctacttttaattaggattgtggagaat

SEQ ID NO: 9910 - DNA, 1066 bp, Homo sapiens
ccaaggcccttaggaattatactaaagctactctgcctgttctttatagacagaacaacaaagcctgggtgacagcacatgtgtttatagcatggtttactgaatattttaaaatgtgtgggtctcccatgtatgtctagaggatctctgccatcataagagaattcttcaaagatctttcctggataatctcatctctgtttctagcttctgctgaaaaggttgatttggacccattagtcacatacctaatctcttcagaaaaggtttttcagccacatccttggcccttctccagagcatgttttagcatcttttacaatttagataggttaagaaatctccaaatcataggtttttctttgcttaacaatttcttcctcaatttatctcttctctcacattttactgtaagcagcccggagaaaacagtctacgcctttaacactttgcttggaaatctcctcagctacatattcaagttaattgcttaccaagttctacgttttgccacatagtagaacccatttcagccaagttttctgccactttacaacaaggactgctatttctttactttccaataccatgttcttcatttccttcttgagagttcatcagaaacctttttaatgttcctatttctgtcaacattctgttcatgataatgtatgtattctttaaggtgatagctttctttacctcttctcttccttctgagccattagcagagttctcttaagatttctttttctaccaaaaatttcttcaaggcaacctaggctttttctgtttttctatttttaggtatcacagcaacactccagtttttggtatgaaaatctatgttagttctctaaaattaccataacaaatgaacaaaaacttggtgacttaacacacagagatcaattttctaacaattttggaggtcaaaaatacgaagtcaagttgtcagctatgtttattatgaaaactctaggggggcatccttctttgcttctgcagcttatggtgtcatgttattccttgccctgagacagtgtaactccaggctgacttcatt

SEQ ID NO: 9911 - DNA, 1064 bp, Homo sapiens
actaaattttgactcagggcttaaaataataatatcaacatttgaaatcagcgtgtaagtcctttcgccatgagtgtaagtttcccgaggccttcccagccctgcagaactgtgagtcaactaaacctcttttctttataaattatccagtctcaggcagttctttgtgcatgcctgaggctagcatgagaatggactaatacagtaaattggtactgagggagaggggcactgctataaggatacctgaaaatgtggaattgactttggaacagggtaacaggcagaggttggaacagtttggagggctcagaagaagacaggaaaatgtaggaaagtttggaacttcctagagacttggaaggctcagaagacacgaagatgtgggaaagtttggaacttcttggagacttgttgaatggctttgaccaaaatgctgatagtgatatggacaatgaagtccaggctgaggtggtctcagatggagatgagcaacttactaggaactggagcaaaggtaactctgctatgctttagcaaagagactggtggcattttgccactgccctggagatccgtggaactttgaacttgaaagaaatgatttagggtatctggtggaagaaatttctaagcagtgaagtattcaagaggaaacagagcataaaagtttggaaaatttgggctggtcgcggtggctcacgcctgtaatcccagcactttgggaggccaaggtgggcggatcacgaggtcaggagattgagaccatcctggctaacacagtgaaacctgtttctactaaaaatacaaaaaattagctgggcgtggtggcgggcacctgtagtcccagctacttgggaggcttaggcaggagaatggcgtaagtaaatccgggaggtggagcttgcagtgagcctagatcacaccactgctctccagcctgggtgacagagtgagactacttttcaaaaaaaaaaaagtttggaaaatttgcagcctgactatgtgatataaaagaaaaacccattttctggggagaaattcaagacagctacagaaatttg

SEQ ID NO: 9912 - DNA, 1041 bp, Homo sapiens
agagggggccattgggaagtttttttggtgtagggagaggagtagaagataaagggtaagcagagtgttgggttctgggggtcttgtgaagttccttaaggaaggagggagtgtggccctgcagccctcccaaactgctccagcctatgctctccggcaccaggaagttccaaggttcccttcccctggtctccaaacttcaggtattcctctcccctcacaccccttcaacctcagctcttggcctctactccttactccactgttcctcctgtttcccccttccccttttcctggttctttatatttttgcaaagtgggatccgaacttgctagattttccaattctcccaagccagaccagagcagcctcttttaaaggatggagacttctgtggcagatgccgctgaaaatgtgggtgtaatgctgggacttagagtttgatgacagtttgactgagccctagatgcatgtgtttttcctgagagtgaggctcagagagcccatggacgtatgctgttgaaccacagcttgatatacctttttctccttctgttttgtcttagggggaagactttaactaggggcgcgcagatgtgtgaggccttttattgtgagagtggacagacatccgagatttcaggcaagttctgtggtggctgctttgggctcaaaacccacaaacagtcaaaacaaactatttcagtatgcttcttcactatagttcagatagaagaaaataaatcaaaattggggcatcgcttctactgattaaagggttaactgctaaagaatgtaggggaaacagattggggatattccagtactttgtttcaagccccaaagggtagattttgtatgcactgcagggcagagctgagtgaccctcagatcgccccaagaggttgagtggatcaattcctaaagaacggagattctcctgtcctagccccaggtccacctcggttgggagttcaggcctacctgatgcagctgcccgaggattaactcctattttcttgctaacagagccccatatt

SEQ ID NO: 9913 - DNA, 1122 bp, Homo sapiens
taacagcagatctctcagcagaaactctacaagccagaagagagtgggggcaaatattcaacattcttaaagaaaagaattttcaacccagaatttcatatccagccaaactgagcttcataagtgaaggagaaataaaatcctttacaaacaagcaaatgctgagagattttgtcaccaccaggcctgccttacaagagctcctgaaggaagcactaaacatagaaaggaacaaacggtactagtccctgcaaaaacatgccaaattgtaaagaccatcaatgctatgaagaaactacatcaattaatgggcaaaataaccagctagcattataatgacagaatcaaattcacacataactgcattaaccttaaatgtaaatgggctaaatgcccaaactaaaagacacagactggcaaactggataaagagtcaagacccatcagtgtgttgtattcaagagacccacctcacgtgcagagacacacataggctcaaaataaagggatggaggaggatataccaagcaaatggaaagcaaaaaaaaaaaaaaaaccaaaacaaacaaacaaacaaaaaaacaaaaaccaggggttgcaatcctggactttaaacaaacaaagatcagaagagacaaagaaggccattacataatggtaaagggatcaattcaacaagaagagctaactatcctaaatatatatgcacccaatacaggagcacccagattcataaaccaagttcttagagacctacaaagagacttagactcccacacaataatagtgggagactttaacaccccaatgtcaatattagatcaacgaggcaaaaaattaacaaggatatccaggacttgaacacagctctgcaccaagcagacctaatagatatctacagaactctccgccccaaatcaacagaatatacattcttcttggcaccacatcgcacttattctaaaattgaccacataattggaagtaaaacaccctcagcaaatgtaaaagaacagaaatcacaacaaactgtctctcagaccacagggcaatcaaattagaactcaggattaagaaactcactcaaaactgctcaactacatggaaactgaacaacctgct

SEQ ID NO: 9914 - DNA, 1049 bp, Homo sapiens
tttcattaaattttgaattaaaagctcaaaagaaaacctattctattaggaaaaaagcaaaagtcttattaagagtatgcctaatctcaattttataataagaataacttttaaaaatatatagatgaagtctcactgtgttgcccaggctgaagtgcagtggcttgatcatagtccactgcaaccttgaattcaagaataatgtttgactttttctcccatgtacattatatctaaaataaggttaaataaaataaataaataaataaataataagttcacataaaacctctcccatggtgtatgtagtacatcttctagataattatttgtagttgattaatccatcatactaatattgacacttaaaattcaatagctaattgacatgttactatattatatacaaagtaaaaagctagagtgaaaattcaatacatacagcaaattttagaaagatttcaactacagtttgtggtgctatcaattattacatgaaaattttaatatgcaactctgactataaatatttatccattaatatttattaaatgtatgttatgtgccaagcactgcgctgaggttacagatacaaagatgaatatgatacattctctgcccacaagcatggaaagaaataactataatgaaatgtggtaagtgctgtaactataacaaagttataagcacttgtttttactatagcatttaagtaggctgcagaaacctattcatttacttcgtgcatataagttattctttgatgtagatattatctcctgttattctcctagggagtcactgtgcttattcacaaccaattctaaccagctctaggtctaatagtgtaggatatgaaaactgattacagagaacctagtttgggagacatgtaaatatgcttactccctttactacatcaagtaaaaatgacatactttcattctgacaattatggttaggactggattaagacagtctgaggctttaatctatgttaagtgtaaaaataattccaaattgtaataaagattcacattctattcatt

SEQ ID NO: 9915 - DNA, 1033 bp, Homo sapiens
gagtcgcatgaagtatgaaaaggttcacagtatatataacagacttctggcaattgaggatattgaccctaccttggtgagtaactttacaaatctttttttccacctttacagtcttatctaacaaaaaataatttaaatttatatacaataaaattcactgtttttgttgtatagttctattaatcttgacaaataacattgagtatgggatccccaccacaattaagatagaaaacacctccaccatcctccaaaaattcccccatgtgacccctttgtagatataacccttccctctgcccttacctctgacaattactgatctgttttctgctagaattttttctttttaatgcagcagtataaaatagatacagaggcactttctctaacactttctttgtgatcatggtttgaagtcactttatgccacagaattgttgcttaatagatatttctttttaaatgaggcgggagaaaccgacatcctgggaagaaattagactgaaactcactttatgctaaatcctgctctatcatagtggttttcaaagccccaagtgcaaaagtgcagtgatgctctcccattgggagaggaaggggacaggcttgtgggtgtgtctctagaacctctgcctcaagtcaattatagctacactactttttcttgttaatgatttatattgggattccactgctataattcctacatttattcatcatcttataattcattccacaaacatatctggcaaatatattgctagagtctatgcattgtgctagactccagcaacattaatgacaaactagatgaaattccttttcttgaggaactcatagtccatccatccatccatcaaaactgggtaatatagctagacattatcaatactgggcaaaccaggaccctactaattagtcatttgttcactaaacaaaactgcatactcatgatgtactggacactctgtaggtgctaggtataaaatggctcatagtttatccatgaagttctattatatgttgt

SEQ ID NO: 9916 - DNA, 1025 bp, Homo sapiens
aatgacattttttaaaagacagtggtattacatgaaataaaatgtttttatgggtgttaagagtaaatgaggattataatggaactttgatcactgaattagagttctgatacaattttttaaattgatgaattttaaatgaatttatatctgtattcttagtaattatgtgaaaagcctaacatttgtatgtttaagaatcaggtttttttagtacattcaggtaggctgatttaataattagtagaaaattattaaatgctaggatacccacaagtataaaaatttgtgcataatgtctgcatgatagataatccacatattaatagtaaagtctattctctagtcacactggcctccttgatgttccttaaatttattccagacattcctcccttagggcttttgtctacattagctcttttatctgttctaaagatatttttccagatagctgctttgctagctgctttactttcttcagatctacaaaaatgttaacttctcattgagatctactgtgaccactctgtttaaaattgccacttctatcccctgcagaactccttatcctttaccaagttctccttttcccctataatactcatcacctaatgtactgaataatttacttatagtttgtctcttttgtatgttgctatattccaggaagctacaataatgcttggcatataatggcactatgaatacttgttgaattaaaaatccacagtgggaaataattgtattttacaagttgaatttctaaaaattcaaaggtctcaaaaaaagtaaaatgagttatttcagtttataacaagatgtattttcatgaatataaaattgtgattggctgatacctttactgtgacaggttaaaaaaatgtctttatttttagaacactaaaaagaaactgttcttttgaattgtctaatacccctaaatatttaagtatttcagagtaagctgctttcacattatttagaattatgttgatgtataacataagagaaagatttatact

SEQ ID NO: 9917 - DNA, 1053 bp, Homo sapiens
ttgtagacccccccaccatctgtatatttttataggtttttatgtggatataggtaaaaaaaaaaaaaagtaggccgggcttggtggctcatgcctgtaatcccagcactttgggaggctgaggcgggcagatcactcgaggtcaggagtttaagaccagcctgcccaacctggtgacaccctgtctctactaaaaatacaaaaattagccaggtgtggtggtgtgcacctgtaaccccaactgcttgggaagctgaggcaggagaattacttgagccctggaggcggaggttgcagtgagccaagatcatgccactgcactgcagcctgggcaacagagttagactttgaaaatgtcttttttcaggttcttccatccacgttattttttcagggaagatgaggacattatcttcctaaattgcttctaaaatttattaacttttccagtatctgttgtgtaaatgcatgccagacactgcatgggaagatgggggatggtgagtcaaggaaatctggaagaacaggacttgtgaactgaggtttgaagtacatgtatgagttaagcagagaatacctggcagagactgccagtgcagaggccttaaaggaaagagagaaaacatgctttatttgatgagttgaaacaattttagcttgatgatttataattttttacattttagaaatagatgaatggcgtgtttttttaatttttaagctgaattttgcttctagtcattcccagtatattaaagcagatgacttgtggcttacatgaacgttatagaaatatgagaataatatagaaatattatagaaatatgagcttaatggtcattagctcatctagaattgtaactaagcagtgagggagaataattggagaataagcatgaacatctgaaataattgctaggttaataagttggctgtaattttgctctaggaagagcttaagttgagatatcatttataattctgggcccttattttactcaaatgcctacataaatttataagttaaatgactgtggaagcttcctgttcaat

SEQ ID NO: 9918 - DNA, 1022 bp, Homo sapiens
tactgaatttttaaactttaaattttattattaaaccggtttgctcctagcaacttggtagcagaaaacaaatagttggtttgtataatggcataataggttgaagtctgcatctagatttttttcccccacataccagaatccacaacagtttgaaaaaaaaattgtgaatatttgctttgaatacaacttcttgagaaactcagctgcttttctaagactcaggaaagcataatgtgggtaagttttaccattttgtatgctagacctccaaagaaaaattttctatttgcaagtgttaattaagcaatagttctaaagacaaattgacatcagcgataggattcaaatgtagttttgaaatagtacattgcaccgtagtaagggtcaaagataacaagatcccaaagctgtttttagtctttctgaaatgaaatctaaatacttctattcatgtgacagaacatgttcagttacaaccttttatttaaatgcaacatttcagctctagcatgtactgttgacgttttaagtcttcctttgtcctaagattcatattctgcaacttttcatactggatttgaagaaaaaagaaggttggctattttgtgatgatggtttccctggaaattttttcattcaccagactatgactactgtacattttacatatagttgaagtggacataatgttttaagtcagaaatttttagagctggaagatgaattagtttagccccctcattttatatgtgagtaaactaaatcaagacattgttatccctggagccaaagtttacaaacttcactgctttagaatcacttggaaagcttttaaagcatacaagcttcccagttagcataccagcactgctgactcaatctctagaggatggacatatggtatgtgtttctggcagctagttttgggaattgaggctttgcagggcagtaattgaatcttactgctgtcagtaaattttatagtttgcagaatatttcctatacttgcctggacaata

SEQ ID NO: 9919 - DNA, 1086 bp, Homo sapiens
tatttttaatattaattttgtgatatagattttcagcataatcaagtacactgcagcctcaacataacattttctgctgtacctgaaatttgataatatttaggtctgttttggacctattcaaagggctttggtcatcagcagtactgaatatacttcagcacaacacagtgtcatctgtgatatgtcctcagaatggacccaaccaatagcagatttaaatagaggctacagtgtactcattgtatttgtgctatagtttagattgtattacttggtggggagggaaattactggataatagcaggaacattgtgtgtgttttatttttgtgtgtgtggttgtgtatgtggtatgtatgtttgtgtgtttgtatgtatgagagagattgtgccttatgtggagtctggtagttttggcccatgaccataccttaaagtttcatcacctatcctctgggaccatttctttccttaatatatttaaatcaccaaagtagcttggcacaaaacaggtgaggcctgtctgaaatatgctgaagcccgtgctgctttgtattaactcattaaaacaaggaacctggatcacctgcacctgatctgcattctagtctggctttagaaacacattagacttaaattcaaacgcaccagaaatgaaaataattgatatataattgtttttgtatagtgaagtagaactttctgagtttttgaaatttccttgtttctcaattattcaggcattattcatgcattttattatagcgtaagttaaactgaaataggcagttagatactccattctgtaactctgaacacaatgggtttgtttctccaatttcctagctgtaagttacaaactgcatcctaaaaaaaagtttcaggaagaccagatgttattccaaggggctgaaagttgtctacataacaggctcaattcatataatgaaatgaagagctgctagcagttgcctgatttatttagttggtaatatttgcagttacttcacacacacaaacatacacacgcgcacaaataggtatatataacatgtattaagaacaaatggtaaataatatatat

SEQ ID NO: 9920 - DNA, 1053 bp, Homo sapiens
gaaacacacttctcttttataagaggatatttttatgctttgtaatgtgacattgcatctgaggactttattgttcatgaattaagttaggcatgagatttttaaaacagtaactttagttcactgttgttttttttccccaggcagctgagtatgtcccagagaaggtgaagaaagcggaaaagaaattagaagagaatccatatgaccttgatgcttggagcattctcattcgagaggcacaggtttagtgatataggattacatttccttctctatgggtccaatcacactacttggttctgcagtgaataatattttcataatcctaacattgtaaatgctgtttattggttttcaattttagaatcaacctatagacaaagcacggaagacttatgaacgccttgttgcccagttccccagttctggcagattctggaaactgtacattgaagcagaggttactattttattttattttttcttatatcagtattgcagcattcactgtagtgatagaaaacaagttaggaacatagccaattaggacaaggaggatttaaatgtgtcttacctttattttgtaaaataggtataaaggagtaattaaaatgaatttttgaaatttgggtcttttacaagctgatgattgttgcattttggagttgcaacaacattaaaacagtttcaatggtattggagtgctttagccttttatttacttgtcatgtgtcaatttattgcctcctgtgtcatttatttagaactcatttttctttttattcctacttacaaactaatatgaatgggagtatatgaaaatacagaaatgttaacttagtttttcatagagtattttgagtgtctggtgaaatgaaacattttaagagaagaattacttcacattttaattttgtgaaaatgcatggtttatcaatgtaagcacttcaataatttaacgatttttctgtaagatagtttatattatgcaagaataagctaatgtgattcaaacctatttaatcctatttaatcataattttacccaat

SEQ ID NO: 9921 - DNA, 1044 bp, Homo sapiens
aggttgagcctctgcatccggctgcattttctttttgaaccactggtggtttattgattgtactttaataaatttagtatttttgtcatgtgttggaggttttttttacgtttgtctttttttattttggtacttttctcatgcgcaaattttaacttaccatgtaagtttactctttaaaggcttttttttttttaaagacagggtctggctctgtcacccaggcccgagtgcagtggcggcaatctcagttccctgcaacttctccctcccgggctcaagcgatcccaccgcagcttcccaagtacgtgagactacaggtgtgtggcacacacctggctaatttttgtatttgggtagagacgggattctgccgtgttgcccaggctggtccagaagaacgcctgagctcaaggaatcctcccgtctcggcctcccaaaaggcttctgaagagcttttccaatgcagaaatacatttaaccgtattctgctctagttctgtcttgtgttttgtttttaacatttaaatctttgatctctcttaagtttatttgggcagaaagagtaaagtaggaattcaactttattttgataaaattgacttcacagttattctaacagatgattatatagttattctgaaaccatttattgaaaaattcaccattctgatttgaacatgccacctttattatttgctgattttccatttgctgttctttctgagcctgtagtttcatatatgggaagagccaatagtcccttataaactttacagctttagttccttgagcaagctattcataaagttcttatatgttaggaaagcatcctaattttaattttgaattacagtagtcaacatgtctttttttctaaataagtaaatgcttaccagtggtgcaagctaatttattccaaagaaaagagtttatttctcctaggtaattaaaaaaatctgaacagatactttttttaaacttttccaaactggtgttttgactgaattgttccatgaaatactaattccactaaaaaaaagg

SEQ ID NO: 9922 - DNA, 1616 bp, Homo sapiens
cagatacagaactcttcccacttactttcttacccttgtgtgtgtctccccacagggttacaagtgtataacaagtgttggaagtttgagcattgcaatttcaacgacgtcacaacccgcttgagggaaaatgagctaacgtactactgctgcaagaaggacctgtgtaactttaacgaacagcttgaaaatggtgggacatccttatcagagaaaacagttcttctgctggtgactccatttctggcagcagcctggagccttcatccctaagtcaacaccaggagagcttctcccaaactccccgttcctgcgtagtccgctttctcttgctgccacattctaaaggcttgatattttccaaatggatcctgttgggaaagaataaaattagcttgagcaacctggctaagatagaggggctctgggagactttgaagaccagtcctgtttgcagggaagccccacttgaaggaagaagtctaagagtgaagtaggtgtgacttgaactagattgcatgcttcctcctttgctcttgggaagaccagctttgcagtgacagcttgagtgggttctctgcagccctcagattatttttcctctggctccttggatgtagtcagttagcatcattagtacatctttggagggtggggcaggagtatatgagcatcctctctcacatggaacgctttcataaacttcagggatcccgtgttgccatggaggcatgccaaatgttccatatgtgggtgtcagtcagggacaacaagatccttaatgcagagctagaggacttctggcagggaagtggggaagtgttccagatagcagggcatgaaaacttagagaggtacaagtggctgaaaatcgagtttttcctctgtctttaaattttatatgggctttgttatcttccactggaaaagtgtaatagcatacatcaatggtgtgttaaagctatttccttgccttttttttattggaatggtaggatatcttggctttgccacacacagttacagagtgaacactctactacatgtgactggcagtattaagtgtgcttattttaaatgttactggtagaaaggcagttcaggtatgtgtgtatatagtatgaatgcagtggggacaccctttgtggttacagtttgagacttccaaaggtcatccttaataacaacagatctgcaggggtatgttttaccatctgcatccagcctcctgctaactcctagctgactcagcatagattgtataaaatacctttgtaacggctcttagcacactcacagatgtttgaggctttcagaagctcttctaaaaaatgatacacacctttcacaagggcaaactttttccttttccctgtgtattctagtgaatgaatctcaagattcagtagacctaatgacatttgtattttatgatcttggctgtatttaatggcataggctgacttttgcagatggaggaatttcttgattaatgttgaaaaaaaacccttgattatactctgttggacaaaccgagtgcaatgaatgatgcttttctgaaaatgaaatataacaagtgggtgaatgtggttatggccgaaaaggatatgcagtat

SEQ ID NO: 9923 - DNA, 1054 bp, Homo sapiens
cattaaattccaatccagatacccatcccctcagaggaggaggacaggacagttatgcctgcagttataaactgagaagtgttgtgttccaagctctgcatggaattgggtaaattagctacaagcctgaaataaggaagtatgcatctgcgtttttttctttccagcacagaagataagaaaccactttcagggcaaggacaaataccttcttataccccagtatctagcacacaggcactcagttatttttggagaagaaaatctaccataataccactctctcaactaatacatttttcacctaacatgctttttctgaatattaaaaaaactgtgataagatacttggagtatatacttctggcctttattttcctgtgtgcccaaggctatttttccaaaaatgggaccatgatggcgtgttttttgtagaaacttttccagtattactgaataatctaatgatttttaaaatgaagtttcaaatattttaaaaataaatcatccatgtggcaaattaaaaaaactcaatagaaacataaacgaagtgtattcttccatgatgataacactattaaattacttgggaatccttccagagaaaaataaatgcacttacctcaatgtatatgtgctttatttccacaaatgggtcacattctatacactgttctgcatctagggtttttattgagatataattcacagaccagaacgtttacattttaaagtgtataattcagtggctcttagtatatttacaaggttgtatgacttatcgcaactgtctaattccaggatctttctgtcaccttgaaaagaaacctgttagcagtcagtcctcattcctccctcctgcatgccccagcagtgactgatgtactttctgtcttcatagatttggctctcctgggcacttcatatgcaaggaatcatacagtattgtggcactttgcgactagcttttttttcactaaacataatgtttccaaggttcactcatgctgtggcatgtatcagtacttcattctgttgtggccacatagtattc

SEQ ID NO: 9924 - DNA, 1065 bp, Homo sapiens
cagtaattcaggagcaggttgttcagtttccatgtagttgtgcggttttgagtgggtttcttaatcctgagttctaatttgattgcactgtgttctgagagacagtttgttgtgatttctgttcttttacatttgctgaggagtgttttacttccaattatgtggtcaattttagaataattaccatgcggtgctaagaagaatgtatattctgttgatttgggatggagagttctgtagatgtctgttaggtccacttggtccagagctgagttcaagtcctggatatccttgttaatttcctgtcttttgatctgtctaatattgacagtggggtgttaaagtctcccactattattgtgtggaaatctaagtctctttgtaggtctctaagaacttgctttatgcgtctaggtgctcctgtgttgggtgcatatatatttaggatagttagctcttcttgttgcattgatctccttaccattatgtaatgcccttctttatctcttttgatctttgttggtttaaagtcttttatcagagactaggattgcaacccctgctttttttgctttccatttgcttggcagatcttaattcattgtgagtagccttccacgcccattacttttcctggctatgcggttccccaccatggaagtgtaccatagtatactcatttccttattgttggatgtgtgtatcactaaatttttgctattttaaagaatgtttgtatgcccttgactatttcttattcctgtgatgaaaggcctacttggagctcccattacggaaatgactttagagtcaacttacgcaccacccaggaaagcctgccgttccttcatcatgggggaagacttgttcctacatatcttctttgagggatttttcagttgtgcattctttagaatgattaaaaatcattcagaacaatagcagtattattagaacagtcgttagggacaaacccaccgttattaatgaatcctgaaatgtttggaaaggagttgagtgttgatgctttctgagtgtatcttgcatttaagtacttggtttggg

SEQ ID NO: 9925 - DNA, 1059 bp, Homo sapiens
acttctagctctgcctccctctgaagcataaagcactccccatctgccctcttttgcccagggcagacattgctaattaaatacctatcctctctttttgagccttgtccactttgtgctccaggcaaacattatcaatcgaatgtagaaagcacttgttaactctggttcaccatccctgcagggtactcccttcgctcgggtgcccagaaaacacagatgatttgtggtattttccaggttccaagcaactcccccaggcacccttccatccaccccgacagccggcactggacctcactgacattcgctgtgctgcatggacacatctctgtggtccaggtgagctcctgccaggtgaacaccatgccccccagcttaccaggtgacctgggccccaagcacagccccagcctcagctgagtgggcaggtgccctgaatcagagatcccaaaggcactgcttgaggccagctcacctgatcgatagagcagcagcccacctgagttgcctcaaggaaaggggttagtgcaaggacaaatggaattttaggaaacaagacccaggtccaggcagcactagggtcctgtcatgccctcccggcatctctctctctctcgtgtcgggcacactgggggctgtcccagtcccactcagctttctcgcctacagccgcctttccgacccttcccttttctcctccctcgtgaattctactacagggccaactctatatcatggggtctgtgcaattctgtcccctccttagttcctgagagaggtttcggattggcatggctcacccgtcgagccaagccacaggttgcccacctcagctcaggtagctgtgctggcgtggggacagtggtggttctagaagcagaagctgtgggcagagcagctccccatgccagcaggggctccagccacgtgcacttactcccaggtcctcagatcgctggcatgcgcagggtttcatggcaccccttccagggagttagcgtgacaccctcgctccccactaggttgcaagacctctgagggcagggattgtgtctg

SEQ ID NO: 9926 - DNA, 1032 bp, Homo sapiens
tctctttctctgtaaggaatcgccaggggtggggcttaagctgacctccgggggagcctccctgagttctcaggcctaagggaatatgggctggaattaacagtaacaggccctgatttgaggccaactgtgtctgacttgaatcaatctatcagttcacctggtgattttcaaacctgagtggacattagaatcactgagggaacttctacaaactagagatgcccaggtccagccacagaccaatgaaatcagggtcacagggatggaaaccaggtgtcagtaactcactgccctcagccctcttggccctagggtttgtcaggagcacccaggcagctgaactccaacggtatggatgagtagtcaggagtagggaggagtgaggaaccaggggtggtggtggaaagggacaaggaggactttcctggtggggatctcaaactccaggggtgtcatttgtccctgcctggaagccaaacaccatcaccgtggctgtcatgggagaatttagcagctaatgagctcaaatcaagcctcagcagaagttgtattttaaaaagaaatgaatgtgtaaggtgaattcttcattctccaaatatctgctgagaacctagtatgtaacagaccctgtgcagggctctgggacacaacggaacagaacaccagattcccagaagcagcatgaaggttaattgagtaaatgaatgaactggttctgccatgcatttcatggcacttcaccggccaaattaaaacctgttcatttcttccaccttaaggttagccgtgcccgcctgttgaagggctctctctaaggaatggccaggggtgaggctgaagctgaccccgaaggagctgcttttcttagagcggaggtgcctgcaggtgccagggctccttcagcccatcctttctcagcattgtggcctcacacaatgatgagccgtttcctgtctggggctggtgagatattgaaaatacttaagtagaaacacatcacaggatatggggacctaaggatcccacaga

SEQ ID NO: 9927 - DNA, 1028 bp, Homo sapiens
cagtccaaagaaaaggctgataggaagtggggagatgcgatggttcaggaagaggctcgtgcatctggcctcctcgctgtcactcctgccacggctttcccaggcatggagtcgtggggctctggccagctctggtgtgggggctcatgctgtgtcaggtgacttcctttcagctcagcctcatgaacccctggagcatgaactccgaaccaccatccgggccttgctgtgagttttgcagctttcatgaaactctcctcttccctgggattgcaagcccctgggtggaggggatgggagtggggtggggctgactttggcagcttagatccctgagtgccctaaacactgtgactcccaggatgggactgggtgaggaaagtctcctccactggctgcagatttccagtgagcacaagaggaaaacaataccaggaatgatttggatctttttctatcgttcaagctcctgtttttttagtctgcggtgaatcactcctcatgtctctgtagatagcctcacattctgctttagttgtttcctgaggaacagttgtgtcctccactccattttaactttctttactgtaattccttatatctgtgtagtgctctgacttgaagaacatactcacctttttgcattgcacctggtcccagcaaataaaaaaaagttcaggagtcttacacaaatgcacgtcagataatgagagaaagtaaagaaccctccatgtactctcttatagctcagagagtgcgcggcttcccccagcatagctgacatcctgctgggcatggcatggacaccggtcaacagttggcccaggggaaggaggaggacagggtccctttaacagagccagccaccctagcatttcactggtgcctgagacagtgtcgggagctgtgtttctggctgtatttctctgtgtggtccccctttggagatgagccccgcctcttcccctggggctgtcactcagccagagcagaatcagtgtcagcgctgtctgagcaggctccttgcc

SEQ ID NO: 9928 - DNA, 1009 bp, Homo sapiens
atatcagcactgctgtgaacttcatctgtaccaaaatatttccatacagtctcaatgacttgtttgggataattttttgaataatatcaaagtgtgacatttgaataagagaagaggcacagtgttccaagagctagaaggtgaaggtaagccttgcttccatcctgcgatgtagcttcgtgtctgtgaatagcaagcaacttcagatgaataagctatcaacatactggaactcggtggtgcagcttccttgtggggatgactcttaggaatcatctggattttctgaagaaaacaaatcatttgggttctggccttcattgccctgcccagcgggagtccccgaagggctgtgctagaatttcagagcatggttggcacagcgttggtgaaggttacaggattgtctagacaaaagggcccaggggaggcacagaggctctgttagtgggtggaagggatgatgctgtgtgtatgtattgagccacaccctggatttcagtaggagccagaataattctgaggcttgggtgtgggcagctgtgctaaacagggaactcagggtggtttcaagccagtacagagctaggacctgggatctaagattggagcagacacacatggagaagcagatagcggaatcaggatcagctgtctgagtgggaaggtcttagagaacccttgctaggtgttcaccaggaagatgcccacacctgtacactggatgggggtgcatgttcctgggccaggagggaccacgctgggtgttctgcttgctgagacagtggtttgggtggaggttcccattcctggaatgcctagaactttgctgcttggcccagtatgttctgggctcccccatttaaggcaactatgaccactttcattgccaccacctcctcctagcttgaaacaacctcccctgctttgctctatctgtgccacaattaaggagcttcccattttcttcattatattgcgggtagttatatgtgtatcttaggaaaag

SEQ ID NO: 9929 - DNA, 1050 bp, Homo sapiens
tgataggtatgctagaagcccaatccccaccattatgtgtgtaatacccatgcaacaaacatgcacatgtatccccaaatctgaaatttttttaaaaagccgttattaattttttttttttttttttgagacaggattttgctctgttgcctgggctggaatgtggtgacaacatcttggtgcactgcaacctccgcctcccaggctcaagtgatcctcccacctcatcctctcaagtagctgggactacaggcacctgactaatttttgtatttttttgtggagatggagtcttgtcatgttacctaggctggtcttgaactcctatactgaagcgatcctcctgcttcagcctcccagactgctgggattataggtgtaagacaccatgcctggcccattcttaatttcgttgaccaagtgtttctcttactgttttcgcactctcattgccagtgcccccttattgagcagtctgtgggcagagcgcaatcaagggaaaaatacaagatgcgggagaggagacaaacccccaactcccttgcccaggaagattatagtctccagggtagaaagcctgtaaacactgtactaatgattgtgatggagatctgaacagagggcagtggaatcagagggcaagattgcctaagccaggctcatcaggcatatctagaatataaacagatggcacaggtgacatgtttaacttacacaagagaggtcatgtctttgttaaacatccaaaaacctatggcatgaagtaccaagggttcttgcatgtgtctctggttggaattgttctagttctgttggttttgtagtcagttgcctatgagcagagcagaatcaaacaggctttgtgcctctaccgccctgagtacctcaggcacagtagttttgaagcagacactgatggggctggagtgtttcgtccagatctttctgttctttcccatgtgcctcccgggcttccccagtgaggtcattagtgtgtccagggtaagaactgtatcacaagcttcccacatatcttctgtgctaccactg

SEQ ID NO: 9930 - DNA, 1088 bp, Homo sapiens
aaggaaagctatttagtgaactgtcccctccagtagagttggccaatgtgctttgtaacagagccagactgttttcctatctcccaggattttactctttagttaaaacgttggcaatcccaaagccttttcaaccgcaggattgtcaggtttaggtgtctcatgtggccgctctacctccagatatatgctctcaaaaggtgtggcctgatgaaactatgggaccgtttggacctcaagatcagaggttcaagcttcctgggatcataggttttgattgtcacctcaatgggactgcttcacagaagaaaagcctgctttataaaactttgcctgatgttctagcagaaactttatcaagtgaaagacacaagtttgtgatgacacaatatgtgaatgaatttcagggtaatgatgcacctgttgaacaagaaattaacagtgcagaaacttaactttgaaagtgccagagtggagtgtgcaatacaaacgtgtccagaattgtggcgaaaagattttgaatcactgtttccagaagtagctaatagcaaattaatcattctgactgtaacacagaaaactaagaataatatgactgtttagagtgaagaagtagaaactgaaagagaagtgctcttagaaaagttcatcaatgttgctaaggaaatttgctgtactctttgtgctgagggatattgggctgactttactgacccatcatctggtttggcatttttttggaccatatacaaacaacaatctttttgaaactgatgaatgctaccgacatttaggattctctgttgatgaccttcgatgcttaaagtgattcgtcatagtctctggggtacccgtgtagttgtaggaagcatcttcactaatgcaacaccagacagccatattatgaagaaattaagtggaaattagcggaaatgtccattcatttgctgtattatttgtatgtaatatttgggttgatctataaacactgtcagactaaagtttttaaaatatacttatttctatttatttcagcatttatgaatttacaacattggtaagtgatatgggattttaaaattgcaaat

SEQ ID NO: 9931 - DNA, 1081 bp, Homo sapiens
tttgagaaccttgttatttccctaggctgagaccagcagccagtcagctgtgcccgtcctaaggctgtctgtgttgtggtctgctgttcctcctcctcaacccctgcctccttccctacacagcccctgcatgcaactcttctccccagacaggcgcagaatcggggccttcctcaacaaataagccaggttccggaagtgctgcagtttccacccaggtgcaagcccagcacaggcctcctcttagccagcactcatccgaatccactcacttgcactcaggtggttgtcctcctcagtaaactgagaagcagtagggccttgtgattgacggtgtgggtatgaagctggactgcctgcattcaaatcttggctccacttcttcttggacaaattacttcatatctcggtgcctcagtttacttgtctgtaagatagggataatcctgtttccctcatatgatagttgtggacaagattaaatgaactacacctcgtaaaatgcttggaacaggacctggtgtgtgagtctcccgtatgttagtcatgatgatggtgatgatgattaccagtttgggggttatctttggccacccttcctttggcatggggagggagcccacccatatgcaagcattaaccctgagtcttacagtagggaaataagggctttggaaacaaacccgggtctaactgcaggtaagctgcttttttttgtttgtttgtttgttttgtttttttttgagacagggcctccctctgtcacctaggctggagtgtagtggtacgatcatggctcatgacaacctcaaactcctgggctcaagtgatctttccacctgatccttccaaacagctgggactacaggcacaagtcaccacacccagataattttttaaaattttttatagagataagatctcactatgttggccaggctagtctcaaacttgtggcctcaagcaatcctcctgcctcagcctcccagaatgctgtgcctggcctggctgcttttttaatgtggtgctaggcaagtacctcaacctatttgttttttaatctataaacttggaatgatag

SEQ ID NO: 9932 - DNA, 1068 bp, Homo sapiens
ctaaccttcaattttgtcatctgcaaaatgggacatagtaagagcacctagcttatatgggtggtatgagaattaaatgagactatagattgaaagatcttagcacatagtaaatgctcaataaatagtaaattcattcaacaattattgagcactgaccctgtacccaccactgttaaaagtgctgtggactaagtgatgaacaaggggaaaagccctcctctcatgaagtttataatccagtggaggaaatgagaaaaagtaaataagcaaggattttctcttggtaatgagtgttgtttaaaatattttttttaaagggcagggtaatgggatggtgtgacggggctaatttaaatgacagtcaaggaatgcttctctgaaggtttattagtaatagccagtaatatcaatactactaaggacctttaggccaaaaatagtgactgaggacttttctgaatgattcagttattcaccagctgagagaagtctcaacatctcacttagagctgagaaagaaaagggctgcatgtagagcagggacgaaacctcttctggttgtgggatttatttagtgatgagattgtaggatgaatttctactgagagaagcaactgaagcagcaagggttgattgagcttgtcaggtggtgtttaatcagtttccacacctgggtagtctgaaggatgagggctgcttcctatctctttaaccattttattaaagccaagagagttggtaaaactgaaacagagcaagctttggaaatgaaaaatttttttttctcgcacgcctgagaaaggcaaccctagccttaagtagtaagaggaacaaggtagagttgttccacttcctcctactgaaagctctacctgactcccccagctggaagagccacccctttgtgatgtttcctcagcacccaggacatattcttaaatcatttcctgcttgtgtgtgtctctcccataaaactgtgcacttcataggcattgctgtcttccctgtacctctcatggtgtctacaatatgtgctctataaatgatgggcaaatgatagatccc

SEQ ID NO: 9933 - DNA, 1069 bp, Homo sapiens
ttaaataatttgaaaagaattcttccttctctttgataaatagaatactgatcattttatgcatataatgagatgtcgtgggatctgtgttaaataatactccatttaatattacacttctagacctattctcatgacacgaatgggatgtcttccctcctctcccgcccctaccccagccatggtaaattattagtaatatgaataatgaaatgtttgtttaaactgaaaaaaatcttgactgagatctctatcatgatggaaagattatgttcctgtattgaggcagccaaagatatcttcaacttcactttgtcttcagaaatttgaccagtgactacagtttatacttcatggtgatttaatttagtatttctggaatattttcatatttatgtaagtttttttaataaagtagatctctatatttttagaatttttcagtgtttaaggtgaaatggatagtaagtatagattaccattctagatcagtttaaataaattcatcagtccacaaaagtgtagtaattcttcataattctagaatataacggcaggaagaaacatgttctcagtgttcagggacaagctaagcatttcatttgagtttattagcattctcattcctgaaccttcactcttaatttcctaaagggcttgattctaccttgccttgtttagaggaaaacggtgccagttttactaaagtgttattaccacaatatcatattcttactgcatgtaatggaatgtgcatgtttaaactagtgcactgagaaattgatttgatttcagttaatatttattgtgtgcttaaagcattcctcaggactgtgaaacacctgtttacaaaagttaaatatttaaattaagagaagtgtacatactgaggaaagtagagccccagattgcctcttccatatctggggctgaaggagaggccttatgggtactatcagtttcatatgaatgttattgttttggtgaggaaataaaaataggtcagaagaatcagtttttctgaaaagagtttggaaaaagtaaggtagaggaacagggcataagagag

SEQ ID NO: 9934 - DNA, 1106 bp, Homo sapiens
agatatttcactttaatatttggcatgtttctattctaaaaagctctgtcatttttatatttttatccagatatctctttctttgtaggtgtaaatatatttttctaaaacatttggctaatcttttaattacccaaagttcatcaaagtctaaattaatttccattttacaaagacatttacaacataccaagtcacttgaataaacagagtacccttggttttcctactttatagatgggttttacttaccagcagaccattttgtactttatttgagtctattcccaggactgcataaatttctccccacataagaagacccacaagtccacttatctgtggaggtgagtggaccatgtaccatcctagagcttcttccatgttacacaaggacacaagatttggatcactggtattcacaaagagcccttgttaatagtatgatcccaacccattctcactggttgcagaggaatgtccctttatgttatccttatgttgcagaactcggaaacaatagccacttcatgaaagcaaatgctcgcgtgcagctaacagtgcattggatttccactcacattatcagacatttgttttctagactttatcagtggaaccttaaagaaactttgatttcaccttagatttttatcggttccaagcctacaggtttattagcaacctgaacttcagcagcttggtatataggccatcatcctcatttacactatgaaatgtttgatatttgttcaatatccctgtgtctgtgccttactagcagaaactagagcatgcaggtactggcattttcttggtttgcatatatgcagtagctcattaatactctctggcagcaactgaaactggtaagttatcaaagatatccagcgagaagagaaaaaacctgatatgtgagccaagggacgtttgtttagttgttgttgagggtggagggaatttagagaagatttgaaattaatttccaaatcaaatttgagagcaccttgtggtaaatggtagtctatagcatctcccttagtccaacatcctgtaacaaagagatcttcacatgtagccattctgatattttgaactctttgtag

SEQ ID NO: 9935 - DNA, 1021 bp, Homo sapiens
tagaccaaataaacaacttcctgtgagcctgaagcagtccacaaaataccataacctctgatacaggactttttttaatgtaagagatatgatgttaatgcaaccaacgtttattgagcaaagcactgtggtaggtatagctataccaagagcccattctctgcttagttgcagagaaaaaccaggtagggactacttctatttttttaattttaccttaactatcacagtgtcctatatatgttgacactgaacaaatattttttctttgatatttctgcagcacaagtacatccagtaccttgccctttttttttccttgacctcatcactgctgttcatctttaccgccccctcactctaacatcccattcccatggtcatatccttctctgcccaacccctacccttttaccatacacttttttgggtatattcaactatatgaattagtgtgtctacaagtattctggtgtcttactgcagctggcctctgagtagcatgtgacagtcctctggggagtttccttttacattcccctaagtagctgttccagaacctcatcatttcacctcatcctttaccccacacctgtttcaaaggtgaccttgcctccaaaatcacaaagaaactgaaagctattaggtgtgaacttcttaatgtcttcctctttccacatgcagtataatgtaaaggttaaggaccaggatctagaatcagactgcctgggttcaaattctggctctgcctcttgctatcttggtggccttggacaagttacttaatctctcttagtacaatagggttgttataaggataaagtaaagtattccatataaaggctttagaaaaatgcctggcacaaaataagcactctataaagaaatgttagcaattcttattatcagtggtattattacatatttaatattacattgttaatattattacatacttacctgcatctttacctttcctcccattcctgtttttctaatgccagcttctctatctcgacaa

SEQ ID NO: 9936 - DNA, 1032 bp, Homo sapiens
cagaaaatccttgaacctacctatcacatagaagccccgcccacccacctccttgcttccagttgtcctgccttttggaaccaaaccgatgtgcatcttacatgtattgattgatgttttatgtctccccaaaatgtataaagtgtgtaaacaaacaaagccatagcccaacccccttgggcacatgttctcaggatctcctggggttatgtcacgggccatagtcactcgtatttggctcagaataaatcttttcaaatattttacagagtttgacacttttcaccagtaaacactaaaagacttctatttgattatttttcaggagaatcaagtagttagacttaaaaaaaagttatccctctagaaattttcatgggattgatttttcatggatatacctataatatatgtggctggagtaaaccatattaaggcagcattctgtaaggatggagagtttatccataacgaatttattcatcatagatgaaatctatactaattagacacaagcatgatcttcaaaaactccacaatacttatctcactaaccaggaataaatgcctttaacattggtatattttatttcagatgcatgtacacatgtcaatacattttttatagtgggagcataacctacagatttttgcaacctacaatttttacttagcaatgtgttgtgaatgtatgttaataagtgaatctataaacttgtttaacggctgtatatagttttcattttttggaggtaccatgacttttacaaactatctcctattgttggatatttagcttgtttctaatttttcactattataaacgttttgcatgtacacctatgctgacctgtctcactatttcttagggtaggttgctagaagggaaatcactgggtcaaatggcacacatactcattattttgacacatgctgccaattagccagtgtctgaaggggcaggagattctccaatgcagttgtctttttgagtcccccttaccgctatgtctcttacttgcagttgtgata

SEQ ID NO: 9937 - DNA, 1064 bp, Homo sapiens
ctaatttttaaattttttgtagaaaccagggggtgtggtgcgggggtgggtttgctatgttgcccaggctggtctcaaactcctgacctcaagccattccccaccacggcctcccaaagctctaggattacaggcatgagccatcacacctggccgccaaatatttttagatgcattattcaattattttattcagtaaccaatgctaataaaaataagacctattcagctcatattccaacatttgaaataacccagaagcagctgtccttcaaggatttccagcaccacagttgttgaggataatggcaactgggggcaccttcaagctcctagagtttgggttttgttccctttgggtatggatgtagaatttctgtttttaaagtaaagcagcagggggcaagataaatggaagagggattagagaaaagggactaggaaatgtaaaagcaagtgggtggagcccacaatgccatgatataaacctgaacagactgcttgaaaaggccatgtatgtgtgggcccctggaggagacattacatctcgcctccttcgttcccttgccatctgtgtctttttctgttctgcagagaataatggtaatgtctgacaaatatgcatttttttcttcaaaaaccctttatgctcattgtgttttttcaactgcagtgacatcaacaatctcatccctgtgcctccatcctctcgaggctgtagggaaatgccgtggcaaggtttcttgtccgtggttgtccagcagcataaaggaggggcagattccatggatgtgggttcagagtatagcccagaagatcagaatccctttcaaggccactaagaagtcaggattattatctttcatctttagacaagtgggaaaggagaaccagtgcaaagtacagctttacatggactggagggaaggtgcctttttggtaacgcattctcctggatatagtaaaagcagcatcaccaaactgtgattttcaaaggaatatgcttatttgagaggcagagactttgctcccacctccagagattctgagggaagatgtctgga

SEQ ID NO: 9938 - DNA, 1062 bp, Homo sapiens
gagcttcagagagttgcgtgatgagccctaggttctcagctagttcctgacacaccaagaacatgaatgcactttacctgagtttcacctcagaggttttacaggacactccgtctttgcccagtgtgactcacatctgcagattctatctctatctcatgttttccacatagttacaggtgcatgttacctgtatgttacaatggctgctaaaactccaataatgaggacagaaaaaagaaaccaaggattgctaaaaagctagaatatttagacactcctttcccattccatggtgctttctctctcttttttgagacagagtcttgctccatcacccaggctggagtgcagtggtgtgatctcggctcactgcaacctccatttccctggtttaagtgattgtcatgcctcagcttcccaagtagctgggactacaagcatgtgccaccacaccctgctaatgtttgtatttttttttttggtagaaacagggtttcaccgtgttggtcaggctggtcttgaactcctggcctcaagtgacctgcctgcgttggactcttctatctctgttactagcacttatgaaagaaaggaagtggggaaggaaaatgagcaagaaaagttagggaaaagagagagagattatttttaaatacttttctctgcttacctgtttcaataagcagaagagctaaccaaagaagtcagagaaagaaagtgcaggtaatcactgattattgacttatttgctgagtgaaatttttttgggggaaaaagattatacaacaactctgagatagttaacaggaaatggtaacaagcaaaaagcttcctcctgtttttctgctcctgtgcatgataccccctctcactcagggcaaaatcaagtcagcagatcaaagcatgatgttaaactttgtcttcatctctccccattgggagggccatttagttaggggtgacaacaggtctgcatggctttttaggataagtgagagtagctggactatagaagtcttcccaccttggttttctcatttgtaaaaataggatattaat

SEQ ID NO: 9939 - DNA, 1027 bp, Homo sapiens
acatacaaataaaggaaacttttgttgcctgttagctggagtgttatagtgactatttcagagtaaactttaaaatgtgacctcacggaggtactgctaagtgcttaaatttttacttatgactgagcaattgcattatagacatgttattggtactgtgagcagcatattccatctttctagtgtattatataggtgtgacaacacagaggccagactgccaaaattcccattctttcacttcattttgtaccaatcaaaataccttattcagctaatttttctcaaaaagctggaatctatcccaccatataaaaatcccttagcttttgataggttatcagtatgctagttgtactcatttcataaaagaacagtttgtaagctctccataaaaggacagtttgttttggtgacctgcaatataatatgttaaattgtttttacttatgaaacagtaaatggagaatttatatatggtgaattaaagttgtttggattttctaatgtgagtctttaaatctaattgtgtgtattttgtttctgttagggatgcaggtcacaaatgtccagttgacaatgaaatactgctggaaaatcaactatttccagacaattttgcaaaacgtgagattctttctctgatggtgaaatgtccaaatgaaggttgtttgcacaagatggaactgagacatcttgaggtattaaagttcttttctagctgttagcacatgtataaaaggaagttcctacagaatagggactttgctgtgtccatctgtgtattgccagtacctagcatatgatgattggttaataaattcttgctgaattaatgccaaccctttaattattgaatataaatgtaagtagaaaccagaaatatactgttttatctactctggctttgcccagcagtaatttttttaaaaaatcagtattgtttcataagcttttggtaagctttatctgcagtaaacctgaggagcattttaaatacaggtgtcggccaggcacagtggctcac

SEQ ID NO: 9940 - DNA, 1020 bp, Homo sapiens
tgtttggtggtctctttacccagatgtgcatgacagtggtaattctatgtttagattttttaagaaatcgccatgctgttttccatagtggctgtactaatttccattactaccagcagtgcataaaaaaatctcccttttctctgcatcctcaccagcatttgttatgtttgtgtttttaatgacagccattttaactgaggtaagatgctatctcattgtggttttgatttgcacttccctgatgattaataacgttgaacattttttcatatacctattgtctatttgtatgtcttattgtgggaaacgtctattcatgtcttttgcccacgttttaatgtgattatttttcttcctgttgagttgcttgaatttcttgtattctagatatcagccctttgtttgatgaatagtttgcaaatattttcttccatcggataaattgactcttcactttgctgatggtttcgtttgctacaaactctttaattttcttgctgacaaatctgaatatctatcattaaaattgttacagtagcatgtatggcttaatgatatgtttaattgactaaatgggccaaattcaaaattgcagagctgtgagttatcgcttttatgtagcagctacaaatattagcccatgactccaggtgagcaagaaaagactttttctggttactgatactcatttttatatatgttgttgtattagtccattttcacactgctaataaagacatacctgagactggataattatataaaaaaaaagttttaatggactcacagttttaaatggctggggagtcctcacaatcatggtggaaggcaaaggaagagcaaaggcacatcttacatggtgacaggcaagacagcttgtgcaggggaactcccatttataaacccatcagatctcatgcgacttattcactatcaccagaacagtatgtggaaaatcacccttgtgattcaattatctccacctggccccatccatgacacatggaagttattata

SEQ ID NO: 9941 - DNA, 1038 bp, Homo sapiens
cattccccttctcttgtttggttcaaccattggtttctgactttgtttcctcctccctcagctaaagagagctccctgggtgagccagagttaccccctgactctgacactgtggggatggacagcagctacctgagtgtcaaggaggctggggtgaaggggccccaggaccgggccagctcagacctccccagcccattggagaaggccgactcagagagcaacaagggcaagaagcggcggaaccggaccaccttcaccagctaccagctggaggagctggagaaggtcttccagaagacccactacccagacgtgtatgcgcgggaacagctggccatgaggacagacctcactgaggcccgcgtgcaggtcagtgagggccacctgggagtgaggctggtaaagcagagcctgtccctgggctcttggctgcagttggggtctcctgactgcccaccaaccacaccatggctttcctttcctcagttcattgagaacctgaaagtgggggctcctagcctgcccctcatgcccctgtcccaactagagcgactctgcttttatcctctttaatattgggcttctgcactgtggtggggggttgcaaaggaaggagggcctccagcagaggggcaggaaggctgctgctggctgtttctgggctttacacagtgtaagagtcctggctctttcacacagagaagggttacttgtccctgctctagaaggcctatctcttagacaggaaacaggacaaacatgaagacaatgtccacagcatcccagtgggcagaaacagagaacagtttagctcttccttctgcctagatggctgcatccccctccatttttcaagtcccaactcatacctcctctgagaagtcttcctgaccactgtggctaaagcagtagcccccctattaccagccaacaaccaaaacacccaacccagtacaatacagtggaacccaacactcaacccaactcattgcaacccaacagaacacaacccaatagaactcaactcaacacaac

SEQ ID NO: 9942 - DNA, 1113 bp, Homo sapiens
gatcagcttcatgccagatacggctgcttcttttaagtgtcctgtaagctccatgaagtgagcggccacatctgtgttgttcctcgttgtaactgagcaccagatacatagggagcattccaggatgctgaataaaggaatgcttccccaaacgcttgagggtttgaagatgtcaaaatgtgcaaaccagagctgcctttcttaaatccagcccccaagttgttcaggtgaggacatagaggttcagagagggcaaggactcaccctttgtcacacagcaagtgggcagcacaacacgggctagatccctagtccagtgcccctgcctgggcccctgtagcctcacaggaatcaggaccccatggggcagctagccatgggtgtctaaggagtggtgcctgaggcccctgaagctctttgggcgtctgggaagaagaggtgtaggctcattatcccagtgccctaagcgtggtcagagactatctttgagctaaccactaagactggccttttccactcacattccaggagtcaggacgctgaaatccacacctcattactcacaccctgcagcccgcatggaggaactggctcagggcccttgatgggacagtatggcaccttcagtgggcaacacacattctcaaggtactcaacatacctcgacagctgacctctcacctgtaacatcaggctcatggtgtctcctgtctctgtctacagttacctcccccactggaatgccacttcttaaaggcatggggctgtgttgcttactgctgcaacttctgcttctagaacactgcctgtgcatagtaggtgctcagtaaatatctgcgaatccccaactgcacaccatgggatagtggcaaagactggaaagggtttggtttgggtggagccatactctgaacccttcccaacacggttcctatcctggcttcccccctcgccagctgtgtgatcccaggcaagctgctcaatacctctgggccactgttcttcacgtgtagattggcaatgtgctggagtattttccaatcttcacacggaacatccatattcaggagaagaaaatgaggctcaggaagtgtgaggttcttgcctgaggcc

SEQ ID NO: 9943 - DNA, 1064 bp, Homo sapiens
cttttttattataacataatacatgtccagtgacaaaaaccatgagcaaaacactaaaataaatcaaccacagttttactacccagaggtgagggttatgagcaagttcagagcttggtttatgcctttttggtatgtatttgatggggtgaacactgtgggttgcctattcagtggcagtctgtcttcacttctgctcacttcttcttggctggcaaagctcttgttttgtagaagtgttcaagctccttgttgtcatgggctcagggaaaatgaccccctgcacagcgcagctccagggaatccaatcatgattggtttaagataatgacagtgatcccatttcccttttctgtgaatagtttagacattggacatgtgatacagttctggccagtgagatgcacaagaatgactttgagggaatgttttccttgctcttagaggtccacagaagatgatggtcctctttctgttgctcagcttggctctataaggtggagattcagggaactgctgcagccatccagcaagcaaggaagaactaggctgaaaacaaaaaccaacaccaaagaaaaaatctagatcccggataacatttttgagcaacttcattagccaaccctgaaattgccctatctttggactcctgttatttgagataataatctgcccttattttagaaaggtatttcattatttgcagctaaaagcattctaactgttgcaaataggatcatattgcttgtattattttgagcatgctctttcatttcataatataccatgaacattttcaaaagtcaataacttactcctgtaataggattttgaatggctgcactgtattcaacatgttgtgagacatttaggtgttgccagtttttgccattatacataatggtgtgacaacaccctgcacaaatctttgcatatttgtttggtttcaggggtaattttctagaaacaaaatattgggtaatggttgtatatattatcaaggcttttccttaaatttccctccaaaactttgcattgatttgtaatctgccattgttaccagc

SEQ ID NO: 9944 - DNA, 1034 bp, Homo sapiens
tggtgtggggagggagcatttgatattcataatctggttcagagaaggtcccgaagccctgagtcactgtatggtttccatggaaacagacttgttcagaggactcggtgtagcggctgtggtgggggagaagggaaacatatagtaaaaccaggctccacaagtgtggcgggacttggaccaactcccttcggtggggactgtgaggggtgggcaaggctctggcctccctgtcagaggggctgtctctccccacccactggggtcctgccattggatgccgctcagctgctgctgtgactcttggcaggctgctgcttctcccacggaccttctggctaggtgcccgggctcatggctacctctccctgcctcagttttcccctctgtaaatggagaaaataacaccgacctgatagcattgttgtgaaggtcaaatgcagtaatatatgagacacacttagaatggtgccatagtaagtgttccaaagcatcattcctaggaattaagtcaggacattggaagaaactccccaagcatgctcacctagatccttaccctaggtcccagcaggtggtcctgacatcttgctgggctggcctcctgctttgaaacagcctctccccagcggccccggcacaccccccgctgggaagcagccagccatttttttctacggagcatttgtttcaggttcctgagggcctggcacagtgctaggcagccctgggttttgttcagaccctacctgtctaggagccttgtgggagtaaatccagatggacaggcagctccctgcctcagccttcccgctaaaggcaggggtcagccctggagcccctaggggttgaggcagatggagaggagcagaagaggtccaggcagagatggtggccctctgtgacagagtaaaggggttggggtggggcaggccactgtccctgatcctagagaggctggttcatctggctggagaagcatctgtcttcctcttgatcagccagagagggacagggagctcttcagaaaggta

SEQ ID NO: 9945 - DNA, 1022 bp, Homo sapiens
acttcttatacctcactggccaatcctgcttaaactaataactgacaaggaggctgggatgatcagaattcattctcatgaatcgagatttagtgccacctctcccttctccaagtcttctcagaacagaaaggaataaaactgtggctatgtcagcgaggatgaaagatcagagattggtccacagggacttctactcactcccctcactgaaatcctatggccaatgtgtgcaaggctccccctacccctgttagtctaactacgtctaaagcatatcttccgtgtgcgaagggacacatccaaagctgccctacttgaagcaggagtgaaggccaggagcccacttggctcccccagcttcctggaggcactggatcttttccagcatctttattttatttatgttgagatggaatctcactctgtcacccaggctggagtgcaatggctcaatcttggctcactgcaatctcaacacgggaaacctcacccagcctggacacggacaggattgacagattgatagctctttctcaattctgtgggtggtggtgcatggccattctttgtctggttaattccgataacaaatgagactttgaaatgctaactagtagagacggggtttcaccatgctggccagggtagtctcaaacttctgacctcaagtgatccacccgcctcagcctcccaacgtgctgggattacaggcatgagccaccacgcccagcccctccctctattttatagacatggaaacagaggcatgggggaagttaagtgattttggatacactgctaaaaaccagtgtatctcaaatgcagtggaaacatggccttgcctcacaggattaggactaaatgaagtgaaggatgtaaagaggctagctcaggcccagcacatattaggcactcaagaagggcaggtcctccctccttctggcataggggaatgaaagatgaggtgaggcagggacccaaggtactgtgacctggggaggcagcagggctggactcac

SEQ ID NO: 9946 - DNA, 1034 bp, Homo sapiens
aaagcgttatcatatgttgtctccttatcgacttgcaccttcttgactaaccctggaacagcaattaaacactatagaatgctttttatgccatgtaaggcagctttcttctgagtttccaggccttccatgtccttgagaaacatgttaaatataacctcatggaactcagccagccttcagagtctgaatttgatctactgtgaatgagttctcagaaaacagatggggtggggagatcagctcatacagttgagaggtgtgcaggtttctatcatcagtgttttgggagtggggaaaatgaacaagacatacagtcccccagcagcccttgtttgctgcttcaaatacaattccaaaagtggaaagttttctttagagcaactgttgatcagaaactgttgagcagaaactctgctctttagagcagagttgatcagaaacaggttccggaaaaactgtcaaatacttagtagcccttcacccacaaactgcaggaatgtgaactagtgctctaaatgtttaaatgaacctcaacaaagctcagaattcactcagcagatactcactgagcgctactctgctgagcaagtgctattcttgaggctggggatacagcagggaacaaaaccaactccctgtcctcaaggagctcatctaaagaggcagataataagaaagtgaatatataatgtcaggtaatgataagtgctatgaagaaaaatggggccgggcatggtggcttatgcctgtaatcccaacactttgggaggccgaggcaggcagatcatctgaagtcaggagttcaagaccagcctggccaacatggcgaaacctggtctctacaaaaacacaaaaattagccgggcatggcgtgctcctgtaatcccagttactctggaggctgaggcaggagaatccctggaacccaggaggcggaggttgcagtgagcagagattgtgccactgcactccagcctgggtgacaagagtgagactccatctctaaaaagagatcaaaaatggaatggatt

SEQ ID NO: 9947 - DNA, 1049 bp, Homo sapiens
tagcagtgaatgtcctctggttttgtttatctgggaatgtcttaatttctccatttttgaagaatagttttgcaggatatagaattcttggttgataggggtttttttgctcagcactttaaatatattaacccatttccttctggtctgcaacttagttctggctgatagtccttcacaagtttacagtcaaactagttggctagagctgcagtaattttaaggctgtgctacagcttaataatccacatctgagctcatcacatggttgttggcagacctcacttcttcactggctgttggctggaggttccgttcctcacacctgggcctctccatagtgctgctcacaacgtggcagctggcttcccccagagcaagagatccacgaaggaaagacaccctccaccaccaccaatgttttgattgttttatttgtatttttgtttttggatccttttggtattatttatataacactgagataattgtactttttcttgcatgagagagagaaatttgaaccatgggtaattttttagtggaaaggaattgatttgcccttccttaaaagcactgctgctaattgctttactcagccttagaaatggaagtaagagactccaagagacttcacacagccttggaatggaacagcacacccttatagttgaccttcttttctccctcctccatcatacttctctccttcctattcaaagagacatgaaaataagatttctgggcatccaggactttaaaatgtcactgtaaactactttcccactggtgttttgttttatggaggaaatgtgtcctttttgattaaaaagtgtgtgtgtgtgtgtgtgtgtgtgttggagagagaaagacttgagtgattctcgcttagatcatactcttcacccagaagcccaatcaactctttactatacacccgctctgcatgaagtaccataataggcacaaagggatgcaaaaacaagaggtgcataaaacaattcccactcttacatagcgtttagtataaagggggaaatacgagagaa

SEQ ID NO: 9948 - DNA, 1045 bp, Homo sapiens
ggggaacctattcaaaccccaggaagtgctttgagaaacattcagaaataaattattattattattattattattattattattattttgagatggagtttcactcttgttgcccaggctggagtgcaatggcacgatctcagctcactgcaacctccgcctcccaggttcaagtgattctccttgcctcagcctcctgagtagctgggattacaggcgtcagccaccatgcctggctaattttgtatttttagtagagacggggtttctccatgttggtcagctgatctcaaactcccaacctcaagtgacctgcctgcctcagcctcccaaagtggtgggattacaggcatgagccaccacgcccagcccagaaataaattatttacacatattttaacacagaaaatttcaaacttattgacagcagaactttggtattaaactactgagagtcagatgctcaagcttaggagtttgggtggggacctgttgttttgcactggctctcaaagaacctctgaggagcctcagtgttccacagaacctcgtttcacaacactattttaggttattaaatattatttctctttacctctttttttgataaagatatttttaggagacaaattgttttggtttcattttatttttacatttcttttctgattacaaagatagtacaagttcatttttaaaacagattcaaacattacaaaaatataaattgtagaaggtgcttttccccgtaatctaaagagagagtaaacttttatcataattttacccccaggagttaattactattaacagtttagattatattcttacagatttttttttcttttcttttttttttttttttttgacacagagttttactcttgtcacccaagctggagtgcaatggtgggatctcagctcactgcaacctccacctcccggattcaaacaattctcctgcctcagcctcccaagtagctgagattacaggtgcccgccatctcacccggctaatttttgtatttttagtagagacggagtt

SEQ ID NO: 9949 - DNA, 1049 bp, Homo sapiens
tctttagtcccatatcgcagctaatggtcattttcagcagtgaattcagaagtgctatgagtactatcatatcttgatgagagagatcctgcaactctcagtagagtatgaagaagtagtgcttagcttctgttacagctagaggtgagagaatatattttctaaataacactgtattccttggcatatagtgtagaagtgaataatttgtttgcatagcatagtgagggaaatagtgtagcagtttcttcgtgctaaatatgttggtttcttctctatagtttgctgccttcactaacaatttgactggtactattgtgttgtcttattttgcttacacctatcaagcagttaaaagggctaatgtactgtcctcagctctctagtcaatcgaaaaattagaatctcccctagatcattatttttacttatcaatgttgtttaaaaagactagagatgttgctggttgtttagtaaatgtcatgttgcagccttgcagaatattgcgactttctcttagcacagaggataagacaagccttcctgttcaccactgctatgcctcatcctcaagagaaaagttacgatgtttctatatactggaggcagtaggtgcttgaacaaaatgaaacatgatgaatttctcacccactgggatacataaattctcatgtaggtatcagtcccttatcatctctgtgctttgtcatcactaaataagtaacataatatttggtcctttcaaatctgtgtttttagatgtatttctgcatgttattgacattgttcttcctcttctaacccactaatccattaaatattcagctcctcctaaattatacattttttgtcctctatagatatatttttaaatttcccttctcaaaataagcttgcattttgaagtacatttgttagaaacaaggtagaataattctactttctagtctcaaggaacagtcttctaaatgtaaagaatagaacctggtggaagtatatactatgtgctatttcactgggtacatattagtttatctgtttagagacct

SEQ ID NO: 9950 - DNA, 1028 bp, Homo sapiens
aaggccttgccagtacttttcaaattaaaattcatgtgctctgtagtgtgctgagccatactcatacttccatctttacttctcttctacataatatatcattcttatttttaatcttctataagtactagtcatcatcctagtgagaattgtagcgttttctcactctgcccttcgtgaaaatgtcatcatcattatgggcagcagggcagctttatggtgttttaaaaatcaagttcatcagcatttttaagctatcaatttcttgttttagtgtcattagtactatgaatattgaatattttatgactctttagttttataaaatatttttttcttttagcagtgggggagaggataggtattatcctcattttgtaacagtattaacaccgaagagagtctgagtgatgactagacacatagatggtgtgaaaagaaaacttggcatttttttttttttttgaatgttagcctttaacccaagctctttcctccatacactatatgcacaaagtttttaggactttttttagtggcactctcatatacagattttcttttcaaagcaagaaataatctgagctttaaaaagattctattgaggaaattattctactcctgtttttatagtctcagaatgtctcaagataattttaaatgggtttgtgctatttgggggagaagagaaagtcacagaaacttacctgattttgcaaatccaaaacagttagaaatcatagtattcaatctttagaaaaatttctgtagcagatatttatccaattaattcattttatttgaattcatttaatttgagctgtgttttaagtaaaaaggtatcaatgatctacttaatgttaaatacattgggtgtttttttgttttgctttgttctagagactttttttttcattacaaatttcggccttggggaagaagggtcttttgaataaagataaaactagttctgtggaggggtttgagggggtgcctctaaattccctgaaatgtgtgcaaaattgttt

SEQ ID NO: 9951 - DNA, 1033 bp, Homo sapiens
gtgtacatgcttaccaatgaaagttagcttctggattagttctcaagtgaaaaaaattaagatgattcatttgacatgatacttaattttgatgtgactttatttggaactcagatcccaagctaatcaaaaagtaccattaaaagcgacattcttttcccctatcttctagaaagaattaaaaagcagtttcttcttttcctctttagagaagataaagcgaaaaaccaataactgagaaattaacagccacaaaagtttgcaaatggagtctgtgagtttcaaaggctccaaattaaaaaaaaaaaaaaattagattaggcttccagaatgagaaaggcttattttcttccccctttctttttcttgccttattttgaccaaatgagtttgtctttaaacacagttttagcttcttacatgatgtgtgtgttcttgctgcttacggtatgatacattgattttgtcataaaaagtcttgcattggattgcattactctgagatgttattttagaaattggtgatgtgcatctgtgagagcgtgtcatggtatgcagtaagcagtgccattaagtgagttatcaccatctgctcctacctacagttattcttggtacagcatcatcattttttctacaactatcaattgctatctctgttttcttgaatttaaaaaaaaaaatgtgttgtccatatcaggattttgttcatgtttaccaaattatcttttgccaagtcatgtgacatatgtacctgtatggaatctcttccatatgaaattgagtcaaataggttagtgggatttaaaaggcatttaaatggacacataaattatgcacagacggctatttcaggatagctgttttctctgaattgatgagagatgaagtctttagacaaatttctttcagttttaaggagattcttttctttttcccctatagatttttcccaactggccaaatacaccagaggctaagtgttaatactatactgtacattctcctgaaaatggtgctgagcttgagccca

SEQ ID NO: 9952 - DNA, 1044 bp, Homo sapiens
tagcactggaacacagcttttactacgtgatcgcttgtcgtacatgaatttcctgtaaaagttcactcactggtgtaggctctagctccttatggctctgcattatttgcattttaggacatttatttatttgtgagcaaatattgatagatgctactgttttaaaatcagcaatttctctggtcagtctcctccacttcccccaaaaagtagaaattgctactggaaacacacacacacacacacacacacacacacacacacacacgcacacacacgcacacacacacactatgtggtttagaagaaatgatcgtcaccttcttaaagttacaaattaaaaaaaaactgaagtaaatatagttgaatgggaacataaaatatttgaatgcaaatgtgagatttagtgaaaattggttttattatgtttatgatgcagttgtttaaaagatacaaatatgtgttttaggattaaagaatctttttgaattttgtgttcaaggtgatataaaagttaaattttagtaacattcagagaacagactaatgaaaagtagcttatttatacacttgagactgaaaaagaatactttccttgttgtctctttttggatctttttaaaatgctggtattgaaatctgatattagcccccattggttcaaagaataatctcttgatcataatattagaagacaaatgatgaaaacctgggcaaatcatttggtaagaataaaagatcgtgcaggatcgtcttgttatgaaagaagcattcttgattggagcaagagaacttatggagagaaaaaataattttatattgtcttgacacccttttaaagaaatcagaatagaaactaaaaatgtaccttggtcttattctctggataagctcttttcagaggctgggattctaaacctgcagtagcttttaatgtattagcaagatattctccagatagagtcagcagtttgctctattgtttagcgttgattctttgtccaaagaccgtaatgaataacaacctactgtattagttgtata

SEQ ID NO: 9953 - DNA, 1035 bp, Homo sapiens
tatagaaggtagtatgttaaccagaaaggattaatttgaggaaaaccttgtattgataaaggtgatgatgtgggtaaacagaagtaacctgtgtcttcagatgcatggtgtttctgaacaaattccacaattgcataaatctgttttatttttctatttggacatgataactttcgaaagaagtccttggatagaataggatcattgataggttgtcagtcttattcccacatcatttatttctgcttaattattatttaaagtgtactttacattgattgaatttcttacctctaaaggacccaaatggcatttaaacatgaatgccatctttttatcctcacaaaattaaaatttcaggtatcttttatggaaaggaggggtaggacagtaggatgagaaaggaaggagagttagagtaataataggaattctagatggagagagatctggagatcctgattaccacatgtattagttcattcaggctgctataacaaaatacctcagactggatcatttataaataacagaaattcattgcttacaactctggaggctgggatgtccacgttcaaggcatcagcagattttgtgaggacctactgtctgcttcatagatagcaccttcttgctgtgaggacatagcaagaaggtgctatctatggcagaaggggaaaaacaagctttcataggcctcttttataaggacactaatctcatttgtgaaggagggccctcgtgacctaatggcctcttaaagacctcacctcataatacagttgcactggggattagatttcaacatacgtattttgagtggacacaaacattcagatctagcaccatgtcctagtcataagacatagatgagattgagagagttcaggttgcttgtttaggagacatgctatacatttcaccaatctctttcttcggttttctaggatttataaaaaccattcagtgattttagtccagtcttataacgtgtccctggcctgtcctgtacctcagcgtagaccagctcaagtg

SEQ ID NO: 9954 - DNA, 2009 bp, Homo sapiens
ataatgcttcctaactaaaagtcatttacctttttgtctcggtttctttatccagaagaacaagccaggaatatttcctatctcttgggcatataataaggactaactaataaaaaaaaattataaaataccttaccagcctataaaaatgcttcatgataaaccatcaaggagtattgtttttccctttctttcatgttttcaactccagcagtgtataatagtaaccacttatgtcacttttcactaaggagttcaaagcactttacagacattatcaaattaatcctccctacacccctatgagttacatagggaactggtatcaaaagagctagagcaaagtaacctgcctgaagcctttatctcagactgggtccatactctaccaattgctcattaatttgtccctagtgatatttatttggtcaactacatttattttctaaaagtttgttacttgttaaacatgagaagaatgtttgaatagacttcctgaatcactttaaattagcttaaactttatcagaggtaaagctgtttattttgacctgcccatgtcatcctcaatctagactagcaaacaaacagctcagacttctgaatatacacttttgactcaaactttcatcatggggagcagtgccaactggtgtcttactgtgtggatgggagaaatccttgatcagtgtttggaaactactctcgtttgtccagacactcttcacagagtgaaggcaggcttccttctatgttgttgggttttatagtgtgtttacatgtagaaagctcatttgccatctgcattaccacctagatcttcaccgctgccatcatcatttaatattatttttgtcttgtggcataccattaccaacccttttgacagagaagatatatgagggaaatatatgcacaaaatgattagaaaggcctctgtgagattgccttagaatggcttctaataaccattaaaaaagcagagtgaagcctgacccaaacagtggaaaacattaaatcctggcttttctcttgccctgtatgacgagctctggtttcttgttgaggctgtcatggcaaggttttttggtttgggtttggtttgttttagtttttggtttctcttttgccatattgatctctcattttgcttgatggggaaatactttttttgcctccagaagtgggtttcccttgcatattagccttgttggtgtgctgccccataggaggatggccccagtgctattggcactgtcctgtgtacagttaattaaacctcctgctgtggacctggatttctgctgctgctattcactgatgtgtgtgaattgagtgaagcacatgtgcataagctcagggacactcttgaaaacaaaccctgaaaatagcaaaagatggagtcagggcagagccttcagctttcaaataagtttggtaatctggctagctgaatgccagagctcacaaagctgagaattgcatttctgaagataagacagactctttttgtgtttttatcttttcttcccaaaatgtattgagttttaatacggtactttatctctgtaagcaagaaaacagagccagttgtgaactcttgggctattgagtccaacccagtgaggagtttatcctcatttttctggtgaccacatctcaaggtaaaccatgagcagagtcttactaagacacctgcctgctgtggtctcataaaggggtcttggagcagaaaggggttaagaaactcacagaaggcaagagtagggcttccaaaaagtctagtaacctacgtgttttagagaacagatagtgatttcctttgaagttaggccccttctctttttcatttaactaaatattcagagagagaaacttgatttctaaccattctttttttgaatacattgtagtgctttgagtccttgtgattctgtttactaggacataaaatgctaattttagaagctctaaataaattttttccaattcctagcttgcttacttgg

SEQ ID NO: 9955 - DNA, 1031 bp, Homo sapiens
ctctcgaggccccagaaggagtctggacactggaaatgaaggcctagtaaactcttttgtgcccaagatggtatgagaatggaggtgggaggtaatggtaaatgctctggttttcattccggctgtcacaagaataaaaatgacctaactgtattttgggcccccaggcagcactgaaatgacatgccacctgctgacctaatccatttcatttctggtactaggatagccaaagcaatttgctcaatttgcaattgactatttactctttaaagcagcaatgattagatctagtataagaaaccacatactttatttatcaagaattaaaacttgaaaggtggaaagttatcctttttggaagaagccatttaaatgtggtgtattttacctcagagagactaactatgcttttagaaagctactttttgctgctgtttcccaggaaggagtacaatctgctgatgaaatttaagataacagaagtgtttctcagcagcagctgaatggcacagagaactcggagactgctatatttatctttaggtaaatttttgcaatttactagaaaaaaatctgtgtagcatacaagcagattaactcatgttaatccagcagctgcctctctggcaaatagtagagaggggtgtatgccatagctgtagtcctgcacacatactcagttgctggacatacttcctttgtctcgaacaatgccaagagccacataggctgatgtgttcctgtttcctcaattttaatttttaaaaatcttattaattcccattctttctcttctccatcaaattgaagtaattaaaaattgtaaattatagtttcaggatcttggactatgctcttgaacattgtgcttaatagttttatgtatagtactgcaattgatgaattaaaattatagaagtacctacttcattcccctcccagagatgcttatatcagtaagtaacatgctggcagaattaaggtgtctgcttccagttcagccctcttttatttcttgttgctttctg

SEQ ID NO: 9956 - DNA, 1022 bp, Homo sapiens
aaaaccggaggcattaaattacataaagggtattttgttactttaagataggaaacagagaagcaataactttatttaaaaaaaacaggttacatggaaaacttgtcattgagaaagtattgcttgagctataaagaagcaaaaatattttaaatttcaagactttcaataaaaggtacattaaggaacctcctggtggcagcagttctttgtcaccagtgtcctcatttgagacacctgccaaatgggaactgattctgaattagcaaaacaaaactattcaatttgccatatccttttaactccaagtaaaataatatgttgagcgtttaaaaattctgattttaggcttagatcgtattatattttcaatgaatcccctgctatgtaacttataaatgccttaaaggtaaatcagggagtctggatgtaaattgttggggcgtttatataaagagattccatgactcctgctgcctctgtgcctgacattcctttgatgatgtaatgtatagacttggtaattttgttggatctcagttcagatgacctactagtaaagggatgaattgactgctctagggaattggaaaggtcaatggaaagaaacctgtggctagcatttgtgtaacagtaaaagctctgtggagagcaaagtctcaactgactcactggtttaattgtcactcctcattctgaatgccagttctggtgggttactgtgtactctacacttttcccatcagttgtagaacagttatcaagagtgagttgtgtttgtttccaaacttgtttctgccatttgttcttgttactgtaatttaattaactattattaaaccaatgagttttaaaaaaccaagttgttttcatgaaatccataatttaatgctttggaaatgataaaaaaaattactaaaaatttgctgctttgttatatttgggtaagagatctataacagaatgggataaattattaatgtccagaaggattctacattcagattgcttcaaagtatctt

SEQ ID NO: 9957 - DNA, 2029 bp, Homo sapiens
atgaaggcattggttccgaaaacagggaattcagtatcaaagaaaatcccatttgatgaagggaaaaacttagataattgatgtacaacaggtttagaaaacagccagtttaggttggacaggaggatggaggacttaggagaaacaaagctaagaaagtggaccaatatatcatacaatgtgttttgagccattattgagagacattgtatagtttctttggaaagtatgggaaagaattaattgtaggaatatagaaaaccaagcaaatgacaaagcaagtcaattttaagttccaggaatagcaaaatgttgtacaagaagtatagttgtctcaccaattaattaatgttatttatataataatacaagccttaaatatgggtttaatcattaaaatggcaataacgtccaaagcaatttacagattcaatgctattcctattaaacgaccattgaggttcttcacagaactagagaaaactattttaagattcatatgggatcaaaacagagcctgaatagccaaggcaattctaagcaaaaagaacaaagctggtggaggcatcatgctaaccgacttcaaactatactacagggtcacagtgaccaaaacagcatggtactggtacaaaaacagcatagactaatagaacagaatacagaacccagaaataagaccacacacctacagctacctgatctttgacaaacctgacgaaaacaagcaatggggaagggattccctattcaataagtggtgctgagataactggctagccatatgcagaaaattaaaactgtagcccttccttacaccatatacaaaaatgaactctagttggattagacttaaatgtaaaacccaaaactataaaaaccctggtagataacctcagcaataccattcaggacataagcatgggcacagatttcacgatgaaggtgcaaaagcaattgagcaaaaattgacaaatgggatccaaataaactaaagagcttctgcacagcaaatgaaactatcaacagagtaaacagacagcctacagaatgggagaaaatgtttgcaaactgtgcatctgacaaaggtctaatatccagcatctatatggaacttaaacaaatttacaagaaaaaaacagtcccattacaaagtgggcaaaggacacgaacagacacttttcaaaagaagacacacatgtggccaacaatcatatgcaaaaaagctcaacatcactgatctttagagaaatgcacatcagaaccacaatgagtggttagaatttacttagaaatagtctcttttaatatcaatgaattcttaagtaaaaaatattattttatataatataacataattttatatgagtatgtgctaagattacaacttgtttcttgcctttttttctttcttagagctgtaggaggagactagaatattggcattaggagttgaagtccatcatttctttaaacatttgtttttcaaaagtttataaaagtaattcatggttggggtgtagtggcttatgcctgtaatctcagcattttggtaggctgagatgggaggattgcttgaggccaggagtttgagaccagccaggccaacgtagcaagaccccatccatgttttgaaaaagtcatgcatgtttatttggcaaattcagcaaagagagaaatcaaatttagctgtgatcctacttccatgttttagatcctttaagtctttttttctgttccataaatttatattaaaaaataaaatgggctgggtgcagtggctcacgcctgtaatcccagcgctttggaggccgaggtgggtggatcacctgaggtcaggagtttgagaccaggctggccaacatcggcgaaaccccatctgtactaaaaatcccccaaaaataaataaataaaatcagctgggcgtggtggtgggtgcctgtaatcccagctacttgggaggctgaggcaggagaattgcttgaatctgggaggcagaagttgcagtgagccgagattgagccactgc

SEQ ID NO: 9958 - DNA, 1077 bp, Homo sapiens
gtttgctgagttaaggcagagcaatcctcttgtaagtttatcctaataacgtatttttggtgctggcaaatggaatgacttttaaaattcaaattgaatttcttagcccttgtcatcaggtgttatatatgttgacactgggctactagaatctactgactggaatctactgtattttttttttccactttgctcatctattgcttagctgagagcagttgcttcaagctatgaatatcaaatcaaaggccaagtttgtggaatgtttttcaagcctgtggtatctgtcttttttcttttgcatagaacatatctgtatttcagaatgtttagggactcttccactctttggagaacgttaatttttgagtgataggcagtgtgaataacgaatgctttttaggagccaatataactgacaccacctctctactatatcatgtgctttcaaataatgtgcatatattatatatatgtatgctttcaaaaaatccattcccatttattcccttttctctaggatctgtgcttttcagacttctttatcattcagagtctgattcatctgttttattccacatatatttattgagagtttactctggtgaaaggcatgatactaggcccatggaggatgcagagaatgaaaatcttggcagtgttacttccatgtgactggttatgacctacaaggcattcaagctcattagcactgatacctttagcaactcattctcatacataccccataaattctctgctgtcacctttactccctgggctctctcaagactgtgccttcttcacacatcctcttctctacacctggaattttcttacctttttacctgattaattcctatgtatcctttgaagactcagcttaagcaaggtcttctataagcttttcttgacttctttctaccttccaagcagagttagacactcctcttctgtgtactcatggtacttggtacttgtgcctactttatttggcgctcattgtggtacttatttgcactcatcaagttgtattgtaattatttgtaagatcctcacaggcaaggactgtgtctt

SEQ ID NO: 9959 - DNA, 1023 bp, Homo sapiens
tctattacagtagcatatctgtatctgtaggattactattttttaaatatctgtcttccttattagattgttagtttcaggaagtcagggaacgtgtttgttttatttgcttttttattcctagtataatatttagtataatatttaacatagaatattaacacagaagaggcacttatattctttaaatgaattattttatccacccgatcttttgctctgcttatattgtaatttttttatagaacggtgtgtcttgctttttatgctttttaaactaacttatgaaaatcttcttagatttttgagtgttctttgagaacatgatttttaacagctttaaatattagcataattggctatatcatgattttttaaaactattcttctcttgatgatagggtgtttccagtttttttttttggctattatcaatattgctttgatagatatacccttttatatgaatgcgtgtttctctctgatggtcttaggagaaattcctagatgtgtgatgactggatgtgttggtcacctattaccctaacaattctgcatcagaaactagtgttttattgagtggctttcaacactgccagtacttatacctaactggtcaaagatttgattatctctttaagaaaaataagcttgatgaagtaacttacactttaataatgtgccatattattatagggcattttacctaagtgtttattttcacactaggtctgtaggtcatctggggttctcctaatctaggctgtacttggccaggcacctctgcttcagtttgtgggctggctgaacttgcctttcaggctgcaggtttggttaggtctactctaaatgtgtttattctgaggccttgcatgaagggacagcagctacctggggcgtattcattttgtagtttacctaagagcacaagaagcaggccaaactactaaaataattttaagactctgctggcatcaggtttgttaacatctcattagccaaaagaagccacatggccaagcc

SEQ ID NO: 9960 - DNA, 1032 bp, Homo sapiens
tctgaaggactttattcatgtgatttaacttgcatgttttaaataacaacatgtctaactcaactaccatatgtactaaagtttttacagatcatatgactcagctttatgcgttgattccaatcttaaagaaaatgtgattatcttcacagatgtttaaatttcagatttcacaattcttatattttacaaaaagctatctttatataattacataattaaaatttgttatgtaaacagagtaccactgttttatatctttctagactttagctggacatcaggcggaagacacacatacacatgcatgtatctaatccttggtactcaaaagtgataaaggatgatgcattgactacttttgaatttgtaacaattggggatatgggagcggagagaaggataagtaaaactactttctaaagatgtttgttcttaggtatagtttcctttgtttatctgagtagtctgaggtaacattaacttttgaaatcgttgggagaatatcttgggcctttggtaactactagatttgcacattgctcagaattagtgtgggtgagaacttaaaggaagcttcaaaagcacctgttcagaaatccctgctgctgctccggatctcgttaaactcttgttccgctgcagagttggccctatgcacgtgggcttctttaagtaggtaataagctgtgtacttttttttttttttaactttgcttctgttactaattgaggagagcagaaatttgttacaaaaacaagctcgtctttttctgagtgaaattagtttaacatagaggtgtgttgaatacccagtttggctgaatggcaagtgataaaaattaaattcacattttattcaaagctgacatcatcatagaatgaattttgggagtacagtaatcaatctgaaatttgtgtggatcaaggataattttatgatgttgtgtgtgatttttggagtttttcctcctctgaagaagtattgagatggcaaagttaacattctgctttagttcctcttcacaagat

SEQ ID NO: 9961 - DNA, 1034 bp, Homo sapiens
attagccgggtgtagtggcgggcacctgtagtcccagctactcaggaggctgaggcaggagaatggcatgaacctgggaggcggagcttgcagtgagctgagatcgtgccactgcactccagcctgggcgacagagcgagactctttctcaaaaaaaaaaaaagatagtagctaaaactacccagatttgttcaccatagtatgtctccctttctaaattgttaataactcccttaaatatactgccttttaaaatgttttgtttaacattatcattatacagtaaatttttcctatcctttgcaaatgtgaatttaaaggaattttgcacttttggaatttattcttttttaggtttgagtattttgatgttatataatctagtatataagccctgagagagagatttctgctgatgttttatgcctaatgagaataagcaaatatattgaaaactcatattcacaagaatatactccctagttaatgattccattataactctgttaaaccagttttcaaaggactcttagaaaacttaggttgaatatagactgtacccataggtaaataatatttagaaatatgaagatcatgaatcttattgtattggtttaaggagtagtggttcctctaacttcctgattgttccattccccaatttatatgaatgctaaaaagctgctctagctacaagctttataggtgcaaagaagaaaagaaatttgaagtaaaatttaaatttattcaggcaaaaacagacttttgctttgacagagtacctaaaatcatgtctaaggccacattcaagaaaagaaaacaacaataaaggataaattagccatcgaaataatttaaattagagcagtgatgactgagggagataggaaggtcaagctgggtgtcatattaacagatttagacttttgacattatctccacatgccattatatgtatagtcaaagagatgactggcaagcttgaaagaagatgattttcattgtaaagctggacatgtgttccattactagac

SEQ ID NO: 9962 - DNA, 1034 bp, Homo sapiens
ccttcagaagtatgtctgctggtgtttcacctcccagagaattctctgctgttttcttggttagcatgcagcccatttctggcttctagtcaattataagttcctttcattcttttggggggatggggacagagggtggggcagagggaaggagctcttttccctggttttaggaggcaagacctggttcctcgccccactatcccctcctcctgtaaagtagagtaggcggtagaggatggccccagctaagctgaggctctggtcagcgggagcagcaggcagagtgagaccgggcagctggctgcttctgcctgcctgcatccctgcatgctctgcgtataccctgtacccacagctgttccacacaccatacccctttcagaaaccagtcagggcaggggaggtgtgggtcagagggtatgggcacttgatggatgggtgtcattctccagccttgtccctcctagggcaaggagccttgctctgaggcactcacaccactattgtgctgtcagactcttcaggggagcccagggatcagggctctctttgagcccagatttccccatgcagaggcagctggcaggttttgtattgacaaaaccagagctgcaagagcatggatagtgaaaccctctggtcagggagttcagctcttctgggctgggctagaagggagatcccacctgtactcacacctgctacaggcaccaagatttatttattttgtttttattttttgagacaagatctcgctcttccatccaggctggagtacagtgacacgaacacggctcactgcagcctcgacctcctgggctcaagggatcctcccacctcagcctcctggcacacgccaccacgcctggctaattttgtttattttgtttgttgtagagacagggtttcaccatgttgcccaggctggtctcgaactcctgggctccagtgatcctcccaccttggcctcccaaagtactgggattataggcgtgagccgccacatgcagccacacagatttattaatgtg

SEQ ID NO: 9963 - DNA, 1063 bp, Homo sapiens
ttttatggggtagggggccgctggtaggcgaagattgtccgagggagagggggaggatgaagccagtgcgtggcggagacctgccagatgttgatgcctaagaagaaccggattgccatttatgaactcctttttaaggagggagtcatggtggccaagaaggatgtccacatgcctaagcacccggagctggcagacaagaatgtgcccaaccttcatgtcatgaaggccatgcagtctctcaagtcccgaggctacgtgaaggaacagtttgcctggagacatttctactggtaccttaccaatgagggtatccagtatctccgtgattaccttcatctgcccccagagattgtgcctgccatcctacgccgtagccgtccagagactggcaggcctcggcctaaaggtctggagggtgagcgacctgcgagactcacaagaggggaagctgacagagatacctacagacggagtgctgtgccacctggtgccgacaagaaagccgaggctggggctgggtcagcaaccgaattccagtttagaggcggatttggtcgtggacgtggtcagccacctcagtaaaattggagaggattcttttgcattgaataaacttatagccaaaaaaccttaaaaaaaaaagaagaagaagaagaagaagtggaaaagatcctcattgcctaatcgctgcagatcctagaggcactaggaacttgaatctcaccaggcgtagtttgcttttctctcgggtcattttattggcagaagggatgactaaggacaccttcatttgacttgggttgaggaggaagctctgggatagaatgcagttttgctcccccttctccatggaacagtattgtggtctttaagggaaagcctccaatacctaagggtcaattttattgaaagctttttctttgtggccatgtggtaaaaccgtagccaagagttgagtgagtgttacccagacaaatcaatagttcgtaggacacattgaaaagaaagtatccatctctctccctctcctcttcttcccctccccattccccttcttctt

SEQ ID NO: 9964 - DNA, 1069 bp, Homo sapiens
gcgtatgtgtttaatccacccaattcggttcagtgtaagctccttagagggatatccctcaggtccctcatttagtgctgtgcatgtagatggctgttgaatatctggaatgggaagcatttgttttaaataaaaaaactagagatagcacccattatatacaaagtgatagaaagtgggtggcctggtgtggtcctttcctctccagcctcttctccctcctgtctcctacagatatcctctgtccaactacactgagccacttttcaagcttcttgaatttgtcaaagtgccttcttgccagggtacctttacttggaatgccctcctgtcccctatctccagctacctgcaagctttttactttctgtggcatccatcttaatagaattgatcactcgttccttgtgctatcattgtacctcttacacattctcatgtcagtacttgtcacaccaaactgcagttatttgtttccatgtcactctcttctcctgggctgtgagctccttgagaatagagactgtgtctgttttatctttatgaagtccaagaacttcatgcggaacctgacacttagtagaaagtgaatgaatgaatgaaagagaatctcaaaaaaaaataaataaataaaaataaagcatcctctttatcatttctaggtggtaactagcagaaccaatgatgggtaacataacatcatgtcccaccaagcttctgaaaggaaaacaagtcattctgtcctcttgatatcacaatgacaagaaagttctgatcttgaattccatatggctggaaatatttgacattgggtgaataggagatgtcattgtgggatgttcatcaagtctattttcttatctagatatttgaggatggaagttgagttttcatttaaatattcttcttttgcttctcttaagcagaagctggtctctgcttttcaccacctggaatcccagtcccaacagctgctcttctaacccttccggcctaattgtggaataatcgtttaaatcattaagagacagaatctgatgttggtagctctgacagacctctctagctt

SEQ ID NO: 9965 - DNA, 1027 bp, Homo sapiens
tgctataaatatccatgtgtaggtgtttgtgtggacattagttgtttttttttttttttttgagacagtctcgctctgttgcccaggctggagtgcagtggcgtgatctcgactcactgcaagctccacctactgtgttcaagcgattctcctgcttcagcctcctgaatagctgggattacagatatgcgccaccacgccccgctaatttttgtatttttagtagagatgggatttcactatgttggtcaggctggtcttaaactcctgacctcatgatccacctgccttggcctcccaaagtgctgggattacaggcgtgagccactgcgcccggcctatattaagtcttgaagttgggttgtgtcaatcctccaattttgtgttttccttccatattgtgttggctattctgggtcttttgccctttcatataaactttagaatcagattgttaatattcacaaaataattcaggattttgattgggattgtgttgaatctgtagatccagctgagaagaattgacattgtaacagtactgagccttcctattcatgaacatggaatatctcgctaatttagttttatcctttgtgatgtctttcatcagttttgtagctttcctcctatagaccttgtacatattttgttagatttatacctaagtttatttttttgatgctaatgtaagtggtggtgtatttttaatttcaagttccagtcattcatttgttcattgctgcaatataggaaagcagttgaccttgtatcttgaaaccttgctataattatttaatagttactggagtttttttgttgattctttgggattagacagtgatgtcatctggcaacaaacagatttcttccaatctgtataccttttatttactttgttttgcggtggggggtggtttctgattgcattagctaggacttccaatatgatgttgaaaagtattggtaagaaggggcttccttgccttgttcctggtcttagggggaaagtatctagttcctcacc

SEQ ID NO: 9966 - DNA, 1026 bp, Homo sapiens
tgtttatggatgggaatattctaatcccatggctggacagtatctaaaatgtgaggttctggtcatggtgactcaagcttttagtcccagctactcaggtggctgaagtgggaggatcacttgaggccatgaattcaaggctgtagtgagcaatgatcatgccacagcactccagcctgggcgacagagcaagatcttgtctcttaaaaaattaaaaacttaaaaaatattatatgaaggaaaagttgatcccttctctcaaggagttcaccatctcaagaagaaggaaaaatcacacagtaccaatggaaaatcgatggctcagtgtacacagaggcaaaaacacttgaattcggaggaaactttatgtacttgtagtcaggtaacctaacagatgacaaagttttgtgttatgaaaaacagctaatagtgtgtaggcagggatttctctctaattcaggaaagcttctgggaggaggtggggttttaaacaggcttcaagactgaaaaggctcatctggatggctgtgttccaggtgcgtccttttagcagcgtctcaatatatggcttgctaatattgcttttccactgtgttcctggtgttaatgtttgaacactggattttaattagaagctatttcaaattagctatctttttatgacaagtgctgttctcctcagattccacagcatatgcctggttctggggacttctcaagtttcagagcagtttatgctgtgaaacagacccattcaccatgctctctctcacttatttttgctcctgattttccattagtgggttcctgcacttcagaacaagggtctgaaatcttttttccattttagaatctaaaggaaaacagcatggctgggccagtagggtggaatgtctttttttttttttttttgcaacggagtcttgccctgtcacgcaggctggagtgcagtggcgcaatctcgactcactgcaacctccacctccctccttggctcaagtgattttcatgcctcagccttctaag

SEQ ID NO: 9967 - DNA, 1084 bp, Homo sapiens
ctcactgtaacctccgcctcccgggttcaagtgattcttttgcctcagcctctcaactagctgggattacaggcgcctgccaccacgcctggctaacttttctgtatttttagtaaagacggggtttcaccatgttggccggactggtcttgaactcctgacctctggtgctccgcccgcctcggcctcccaaagttctgggattataggcctgagccaccgcacctggctggcaccaggtgctatttaaatgccagcaataattctctcattctaatgggagaaagacaataaaaaaataagatatctagtatgccagacagtgataagttctatggcaaaaaagagaaatgtataaaaaatgtaggggatgctgcaatttgaaataggatcatcaaaaaaggtttgataaggttacactggagcagaggagaccttaaagaagtgcgaaaacaaaccccgtcgacactaggggaaggacattttagacagaggaaagggcgaatgcaaaatctctgagatgcttggcaccgtcagccagtgcagctggagcacagcaagggatggagtgatagaagatgaagttggagaggtgacaaggatgagattatgcagggtcttctaagccatttaaaagatttttgccttttcctttgagtgacttgggaaaccatcagaagtggagtagcatgatcttatattttaaaaagataactgtggctgctggttgagaatagacctaggagctaagtagcgtaaattaaagctaggccaactctgcacacttttagattgatttgtgtcttgagactgtgttgagaaccaaaaaggaggagtgacttgttctgtcaagataagagaggccttaaatgtttgggtgaagagctgatgaacggttgaacaaatgaatgaatcaatcatctcagcaggcatattacctgcaacaaagcccctccactcttccccaacctccaaacaagaaggcgtgttatcgaactgtgaggaagggagagcttgaaaaattaatagtaaacaagagatcataaatggaaatgaaattcctgttttttgctaattacaaaac

SEQ ID NO: 9968 - DNA, 1036 bp, Homo sapiens
aacagtctgaagccctttgaggcttcgtgggccaccacacttatttgatccctcagctccagtcacttggggattctccagggaggcctcggcccaaacattgatggaggaaaataaatgggtgtctgcggggctgattgtaggtccacaaaagggggccggcaacctaaaaatgaggaaagtagcagtcttcttagcctgactactatagaaaggggtccaaatttagtagtttttctgtgccattgatctagctgagtctaaagagtttcgatatctaatctctcccagtttctttggatggggaatatacacaatttattattcaaaacccagcacagctgtcaccgtgtcccttgggaaaccttccctgactgtcccaagtaatcacttccttttctttgttgcatgtgtactagatacttctttgtgatattgcacccatgacagaaaattatttgtttacctttccgtcagtgagctccctgaaggcagtgatcatgtctgtatatatcccttgtctacctagaatactacctggccacacagtagatgctcagtaaatgttagttgaattgaataagtagaattgaaattatgttccttatggtttcatatgcaatataagtcctgtttggcctttttagtaaaaaagattaaaaaacctattactatatcccatcatttggtcttacagagagtcattggctcaataatcacttgttaaataaatgaaacggtattacttagagttgtacaaggaagtcacaccttccaaaacttgagctccggtgacctctgatgtttcactgtgtgctatgttcctaacttgtgaatgggttgtcctgaagcctgtaataagtctgttgcacctggccaatatgtgtccttcatattggctttacactgatgactcagggtctgcgccttcctcgagagcactggcatcatatgcagccttccctttttttatctttttggtaccccattcctattgaatacagcttgctcttgacaccattttgttggtctttgg

SEQ ID NO: 9969 - DNA, 1046 bp, Homo sapiens
tttaagtaatttaaataatcacatgtgactaatggctatgatattatacatctaaaatattattaatcacttaataaagtaggttatttaaaacccagaaactactgggtaggtgcagtggctcacgcctgtaatcccagcactttgagaggccgaagcaggcagattgcctgaggtcaggagttcgagaccagcctggctaacatggtaaaaccgcgtctctattaaaaatacaaaaaaaattagccaggcatggtggtgcatgcctgtagtcctagctacgtgggaggctgaggcaggagaatcacttggacccggggaggcggaggttgcagtgagccgagattgcaccactgcactcaagcctgggcgacagagcaagactccgtctaaaaaaaaacccagaaactattaaggatgtaccataattttttgtttaagtatttttttcttttctggtgccaaaaaatatatgcattgtggtttaaagttcaaccatttaaaaatgtgtattataaaaatgaagtccctggtcatctcactgtaaacaattttatatttatgctcattttcttttaaaatatacaaataactcagggttctcattgtaagatagtatattaatacagtagttacattatttatatggaatcacttttaaatgagctaggatgtcgtataccataagggctgacagctgtctcaaaaatgaggtatgttgtaaaataagtgcgtacacattaaagaaggaccaccatttgaatggctgcattctgatgtaaatcactaagacaaacaggtgctggtctgcctcttcctctgccttctaaaggggctgaaagtctctaggtgatgagccaacccttgcttctagttctccagcaggtgtcactgttgggctgctgctgctaggttaggatgactgggaagaaaaggtgtccctgctgtttgtgtacgaggttggttcttttaacaaagcctgtttttgtagatgactgttgttcctgagtgagtggagttcataaaaggtgattgtacttgaaagg

SEQ ID NO: 9970 - DNA, 1034 bp, Homo sapiens
tcacctgccatattttctttctagcctttttcagtacttgaaagtattgttaatatttaattatataaaaatcacataagcttttggggggcaagaatgttcttctttactatagtatcctcagtgcctagaacagtgccaacataatacctgcttaatcaatgcttgttggttatttatcagtgcttttacatccttccccatctttaagtgttctttatttggaaagttggggaaatggaatccagcttctactcagatttaaataactaggttcttaaatctaatgccttcttttgattggctaagaaatgtgattggcatggtagggtggcatgtcggccttttagcataagaactctgtgtttaataatttgacttcttttcttgaagcctcgagggaaattttttctttccctattttagtcagccaagaacctgacctgggctgactataagattggaaaacactgaacacagtatctactaagccaagcaaggactgggagtgtagctctggtactatctgaaggaaaagcctgaattcaaatcctgctttggctccagactcatctgtgaatctagatgaatttcttaacctcttccaggttttgtttttcttatttgtctgatgagtaatcacatctgtcctaggacttgtgaagattcctgggttaatgttctcaaagcttttttttttttctgacaatattctttccttttttttttgagatggagtctcactttgttacctaggctggagtgcaatggcatgatctcggctcactgcaacttccacctcctaggttcaagcgattctcctgcctcagccttccgagtagctgggattacaggcgcgtgacaccacgcccagctaatttttgtatttttagtagagacagggtttcaccgtgttggccaggctagtctcgaactcctgacctcaggtgatccacctgccttggcctcttaaagtgctgggattacaggtgtgagctactgcgcctggcccaacaatattcttgctgtagctc

SEQ ID NO: 9971 - DNA, 1094 bp, Homo sapiens
gatttcaccatgttggccaggctggtcttgaactcctgacctcaggtgatcccctgctttggcctcccaaagtgctgggattacaggcgtgagccaccgtgcctggcctttattatttatttattttgagacgaagtctcactctgtcacccaggctggagtgcagtggtgcgatcttggctcactgcaacctccgccttctgggttcaagtgattctcctgcctcagcctcctgagtagctgggattacctgtgcataccaacacacctggctaattttgtatttttagtagagatgggatttctctcatgaccagccatgttggctggtcatttctcaacatgactagccatgttggccaggctggtctcgaactgctgacctcaagtgatacacccaccttagcctcccaaagtgccgggattacaaatatccatgagccactatgctcaggcagaccttgcatttttgcagatctctttggaatgctatttctatagtacacagactctactctcactgaatatggctaactcagctatcctacattagcatggtaaacatctgctaggtttgccccagtcagaaagtattctgtacctgccatcttgcttggcactttatatatatatatatatatatatatttttttttttttaatctctcagtgatatagtgataataggtgaaaaaggtaggctgcagggtaatgtgtgttatatatgatcccattttggtacaggaaacaaaaactattatatgcatacatgtttgtatgaactatgagtttataaggttatctcaagagggtagggttggagggttactttttttttttttttttttgagattccctcttgtcgcccaggctagagtgtggtatatataatcccattttgattcaggaagcaaaacctattatatgcatacatgtttgtatgaagtatgagtttataaggttatctcaagaaggtagggtcggctgggcatggtggctcacaactataatcctagcactttgggaggccaaggcaggtggatcgcctgaggttaagagttcaagaccagcctggccaacatggcaaaaccctgt

SEQ ID NO: 9972 - DNA, 1029 bp, Homo sapiens
acgctgggataattttgtgtttttagtagagatgggattacaccatgttggtcaggccgatctcgaactcctgacctcaggtgatacacctgcctcagcctcccaaagtgccgggattacaggtgtgagccatcatgcctgagtggtttttggtattttgttaaagcagcccaaaaggactaagagggagttactgataccactggtacttttaatgaaggatttattaggtttgtttatgctagttgaactatgggagcatttacttgttcacttctctgctgccaagaatatcttcagatatatttattgagctttcttgaattggcaacaactattaacactgtagataaagaggaaggaaactaacttttgaatgtgaaccgtgtatagggagttttacatttattcttccatgtaatatttgtaacaaacctgtaaaggatgagagaaagtgaaacattgtttgaaaaagtgaaacattgttttttgtcaaaggttatacagctggcaaatggtagagctgagatggagaaagcagagtcttcagttttaaaccagtatttttcaaagtattctttggaggtgcccaagagttggccatgagagtaaggatgagctttagttctctcaaccttgcttaagccagagcagctcaactttgacctgctttacattttggtgttttcacataagatttcctttagaaaaaggattctgcaaactttcgcaacctactcatctgacaaagggctaatatccagaatctacaatgaactcaaacaaatttacaagaaaaaaacaaacaaccccatcaaaaagtgggcgaaggacatgaacagacacttctgaaaagaagacatttatgcagccaaaaaacacatgaaaaaatgctcatcatcactggccatcagaggaatgcaaatcaaaaccacaatgagataccatctcacaccagttagaatggcaatcattaaaaagtcaggaaacaacaggtgctggagaggatgtggagaaataggaacactt

SEQ ID NO: 9973 - DNA, 1031 bp, Homo sapiens
accacgtccggccctacctggaattttatatggtaactttcctgggaaatgcttatatggacattgtcctttttagttctcctagcattcttttatttgtttatttgagacacactttcttccaggctagactacagtggtgattgtagttcactgtagccttgaactcaagctttcctcctgctttagcctcccaagtagctggattacaggtacaaaccaccacactcagcttctagcgtttttgttttgtttcgttttgtttttgagatggagttttactcttgttgcccaggctggagtgcagtggtgctatatcggctcactgcaacctcctcctcctgggttcaagtgattctcctgcctcagcctcctgactagctgggattataggcatgcaccacgatgcccggcacattttgtacttttagtagagacagggtttctccatattggtcaggctggtctcaaactcccgacctcaggtgatctgcccgcctcggcctcccaaagtgctggcattataggcatgagccaccgcgcctggctgaattttttttcttttttcttttttttttagaataaggatttactgaactgaaattcacttcacgtaaatttagccatcttaaaatgaacaattcagtggcatttaagtacattcacaatgttctgcaacctctttagtttcaaaacattaccatctctgcaaagtaaaaccccttaccagttaagcagtttgtccttattctgcccttcctccagcccctgataaccatcaatctgcattctgtctctgtggattgatttattctggatatttcatgtaaatggcatcatacaatatgtgatcttttgtgtctggcttctttgacttagcgtaatgttttggaggtttatttatctccattggaatatttatcagtacttcataccttttcatgactgaataatattccattgtgtgtatacatcacatttgtttatccattcatccattgaagaacatttgggctgtttctgccttctgc

SEQ ID NO: 9974 - DNA, 1022 bp, Homo sapiens
gatctgcggaggttgagactgcagttagcttaaaccatgatactgcactccaggccgggtgacagagcaaggctctgtctccaaaacaacaataacaacagcaacaccccattactgtgggtacattgtggggaggggtttggaaagagaagaaatcggggaagtatggttaggaagtattgcagtggtccaggcaaaaggcgatgatggtttggattagactgtaggcagtggagatagaagtagaaagattcagtagatattttagaattaggacaggcaagacttaatggattggatgtgtgggaagaagaaggtgtcaagtatgattccagatttttggcctgagcatctgggtagatgaaggtggtgtttctgagatggaaacattggaggaggagcagatttggattagagttggggagtggaatgaagacctcagttttagtcatgctaattgtgagatgcctgtgaaaacatacaagtgcagatatcaagtaagtagtctttaggctgattcacaaaagtagcgctggagagaaatctggatggtattagtatatagatggtatttacaaccaagggaaatggatgagatctcctagagaacaagtatagagtaggaggagaagaccacactccaaggaattcaagagaaaatgtaagagcttgttattagagaaaccaacataggaacatatttcaggaagggagtaatcactgtacattgttggatttgtcagcacagagatcattgatgattatagcaagaacaatattggaggaaagtagggccagaagctaaattgaattgggtttaaggcatgggaagggacgaagtggagatggtctgtgtattttgattattgacatgtgtaggctgggcgtggtgactcacgcctgtaatcccagcactttgggaggctgaggcaggtagatcacatgaggtcaggagttcaagaccagcctggccaacatggcaaaaccctgtctctactaaaaatactaaagttagccaggcg

SEQ ID NO: 9975 - DNA, 1029 bp, Homo sapiens
aacattcatccccacctcttcccttttcctgttcaccagggactagcagagttatatgaatataagaagaaatactcagatgctgacattgaaccatttctgaaaaattcctcacagttcttccagagctatgtcgaaagaggccttcgggtgattgagatggagagggagggcaaaggtcgtatttccacttcaacaggtatggtttcctgttatagctccaggaataagctcaaaatagctcctagcacaggaacctgaagttttggttagtttaaattcatatccatgaacctcaatacttaatggtcaccaaatggccttcccattgctatatccagtggtcaattcttagccacctgaattgacccatcatcagtatttgacaatggtaaataaattgttccctgcccttgagacagcttcttcacttcgcttccagttctccatgctgtcttgttttcctccagtctcactggctattccttcttggcctttgactgattcttgctcacttgctctgacctctttttttttttttttttgagatggagtttcactcttgttgctcgggctggagtgcagtggtgcaatctcgggttcaagctattctcctgcctcagcctcccgagtagctgggattacaggcatgcgccaccacgccaggctaattttttgtatttttagtaaagacggggtttctccatgttaggctggtctggaactcctgacctcaggtgatccgcccgcctcagcctcccaaagtgctgagatgatgctcatgagccactgcgcctggcctcactctgaccttttaatgtggacatcccccagggttcagtctatggttgtcttctctctttctcttatttccttaatgagttcatctactttcaccactttaaataacatttaaatctccagcttagacctccttcctgatttccaaactgctatatcctacatgatatctccacctgggtttcaaatagattttttttttttttttttttttcttgagacggagtc

SEQ ID NO: 9976 - DNA, 1050 bp, Homo sapiens
tgctcagtaaatatttgccgaatgactgaatccctaaggactagttatttatatttaaatggggccaggtgcggtggctcacgcctgtaatcccagcactttgggaagccaaggtgggtggatcacgaggtcaagagttcgagaccagcctggccaacatggtgaaaccccgtctctacttaaaatacaaaaattggcgtggtggcaggcgcctgtaatcctagctacttaggaggctgaggcaggagaatcacttgaaaccggaaggtggaggttgcagtgagccaagatcgtgccactgcacaccagcctgggtgaaagcaaaattctctctcaaaataataaatgaataaaataaataagtaaatgggcttttttttaaggtaagactttagaagtactttgctaataaatattcttatggagaagtttcatatagtgtcttccgctattttagaagtatgaagcttggaaaatatatcttgaaatttttgttatcagatcgatgaggtcctgagacaggaagacaaagctgaagccatgtccggccatattgatcagtttctgatagccacttttatgcagctaagactcatctacaacacacacatggcagatgagaaattggagaaggacgagatcatcaagttgtatagctgtatcattggcaacatgatttcggtaagggcacctctgcagaatttcagcttcccatcaatctctcagcctacagaggttcaaaagccagagtccatgcagatgttgcagtgagtcctgtgtcacttggtagaattttacatgcattgtatatagcaagctactgatggcttccattggatgtttggctacactccatcccaccttactgttaggatataaagtaacatgcttacagactacctagcttcttccggccagtttcttcatcaggcatggtaggccatagctgcctttccacagataagtatggttctattaaaaatgctaattagcctggtttgatcagtatacattgtatacatgtgttgaaataccactctgtattccata

SEQ ID NO: 9977 - DNA, 1023 bp, Homo sapiens
tagccaagcccgaagcatgagtgggcatcctgaggcagcccagatggtccgccgagaattccagctggatctagatgagattgagaatgacaatggtacagtccgatgtgaaatgccagaacttgttcagcacaaactggatgacatttttgagccagtccttattcctgaacccaagtgagttaaactctttcatttaaatatgagcagttcatgatgatcagacggcctacgtgaaatgtgccctttgtaatgtgcagttaaaactttttagaactgattattttttgaatgatagcagttgttaactaagacctggacctagtggagaattgtataactccaactgactgggatgtcttgtaatagaggttgaagttttctctttgttctgctatctaggatccgggctgtttctccacacttcgatgacatgcacagtaatacagcatccacaatcaatttcattatctcccaagtagccagtggtgacatcaacacaagtatccaagctctgacacaggtaatgggtgtgctcccgtgacagggattccattggtggacatagaggctataaatgtgatgaattgcacactcgcagagtcatagcattaggggatgcaggcagtgtttcatactttcccgaggaaagaaatgcacaggtgccactcagtcatcacttgcctcagaggatgtgactctaatagagccttatttttttttttttttttcctcttttgagaccaggtctcactatgttgtccaggctggagtacagtggctattcacaggcactatcatagcacattgcagccccaaactcctggactcaagtaatcctcctctctcagcttcctgagtagctgggacaacaggcttgcatcactgcacctagctaagccttgcattttttataattgcattgattcaccagaggctagagataaaacagcagctaacaagtaaggaccaactctcatggaacttatttagattttagtggacagagacaagtaaacaaga

SEQ ID NO: 9978 - DNA, 1091 bp, Homo sapiens
gcccaggcaacaggtgagactctgtctcaaaaacaaacaattccaaaaatttttattcctagaagattttcagagttgttaagcttcaagaagtatgacaccttgaaatttgcattcatatttaattacaaatgaatattgttgaatttttaaatattttattgttcctgcagctgcattatataaggctctctacctcatttcagttgaacaccctgtagccccttttcaccgtttgttttttccaggtgctaaagtggaattttactaccccacgggatgaatacattgagcaactaaagactcaaatgtctagctgtgtggctaaatggttacaagatgagatgtttcactcagactttcagcatcataacaaagcccttgctgttatggttgatgtaagtctgcaatagataaatatacatgtatttcagacatgtaaaaataccgagccctatgaaataatctgaagtttgcatgacttggaagtagaatatactatgttctctatttttagagctgtcttgttatttggtagaataaatgaatgtgtgtgtatattttttaggtcttaattgaaggcttaaaaatctgtcattttctttttgggctccaataaaatttaaaagacacttgcctagtagaattaagattttgattattcttatttgtgggagttttgttttgttttattttaagcacttggagagtgaaaaagaaggagttattggttgcctggatcttatcttaaagtggcttaccctgaggttttttgacaccaatacaagcgtcctgatgaaagcactagaatatttaaaattgctcttcaccttgctaagtgaagaagaatatcatcttactgagaatgaagcatcttccttcatcccctatcttgtcgtcaaggtaatgtggtgttctctctctgggagactgcttaagttcccagctgacctcagtttctgtacttttatttcctctcccttttttactgattatatcacggtaccttccctacttatccctatttccctattctttcaaaacatagtaatgcatgggagaatcattgctacttaggaaatgcctcactt

SEQ ID NO: 9979 - DNA, 1027 bp, Homo sapiens
aaaaccactttagtgacttaaatatttaaagcatttcttgtaactttctctagaagcaagttcaaaaggtcttcagttacactgttatgataagagatacatttaaatatcaatggaaagaaacagaaaagctttcaaactaagtgtttggaaatgtgtaaatgccattcaagatgtcattaatggctgaggtgggtggatcacttgaggtcaggagctcgagaccagcctggacaacatggtgaaaccctgtctctactaaaaatacaaaaattagccaggggtggtggtgggcgcctttggtcccacctactgaggaggctgagtcaggagaatcacttgaacctaggaggtggagattgcagtgagctgagatcacgccactgcactccagcctgggcgacagagtgagactccgtctcaaaaaaaaaaaaaaaaaaaaaaagatgtcattaatatggaaagctataaatagtgttgaagatttcaagaaaacaaaaacaaaaagtttgtgacctagactaatgatcagtaatagcagtttttccaactacataacatgccagtccaagaactaaccaacagttacttaagaatattctcagaaaaatttctagagaacctgttcaaaaacatatacaagattctgtgatgcatgtttttttcatgtgaaatatcacgtagaaagatatctctgttttctacagtgcccttttactgggcagcagcatcatattcttaaggagaagtggccaagctaatcagtattccctgaaccttggttgtagagtgcacaagggaagaagatgccaagcaaaaccagcttaaaggaggatgaagacaaatccgggcctatttttattgttgttccaaatggaaaagagcaaaggatgaaagatgaaaaaggattgaaggtaaggaaggattaagaatcgtcaggagatttttgcttgtattgttattcaagaatagttttgctgtctgaattcatgttattgtttaatatctaggaattaagtgtttcttt

SEQ ID NO: 9980 - DNA, 1055 bp, Homo sapiens
tggctcatgcttgtaatcccagcactttgggaggccaaggccagtggatcattgaagtcaggagtttgagatcagcctggccaacatggagaaaccccacctctactaaaaatacaaaaattagctgggtgtggtggtgcatacctgtaatcccagctactcaggaggctgaggcaggagaattgcttgaatccgggaggcagaggttgcagtaagccaagatcacgccagtgcactccagcctgggggacagagcaagactctgtctcaaaataaataaataaaaataaataaaatttgataatatataacctgtgaccaattcatttttagacttactgcttaaacaaaacaatattcttgaatttagtggaatagaaattgttgatgctataaagttagaaattttacagcctgagcaacatggcaaaactccatctctacaaaaattacaaaaattagctagtcttggtggcgcacacctgtggtcccagctacccaggaggctgaggtgggaggatcgcttcagcccaggaggttgaggcttcaatgagccacgatcgcaccactgcactccagcctgggtgagccagaactagtctcaaaaaaaaaaaattttacctgtgtaaaactctttattaaagtacatattcagtttttattgaaatcttgctatgtagcagatactgaatatcaaagatgtctttacctttaagaaagtatcagtctgggctgggcatggtggctcacgcctgtaattccaccactttgagaggacaaggaggtcaagaccagcctgggcaacatagtgggaccctgtctctaaaaaaaaaaaaaaagttgttttaattagttgggcttggtggtgcacgcctgtagtcccagctattcaggaggctgaggtaggaggactgttttagccagggaggtcaaggctgcagtgagccctgaacgtgctattgcactctagtctgtgtgacagaaaccctgtctaaacaaacaaatgaaactacagtttaaatgttggtaaatgagatacagattttctgaattaa

SEQ ID NO: 9981 - DNA, 1032 bp, Homo sapiens
caggagttcaagaccagcctggccaacatggtgaaaccccatctctacaaaaacaaaatttagccgggtttggtggcacatgcctgtaatcccagctacttgggagggtgaggcaggagaatcgcatgaacccaggaggcagaggttgcaatcagctgagatcgtgccactgcactccagcctgggcaacaagagagaaactctgtcttaaaaatatatatatattaaacatgaatttatatgaggaaaaaaccatattacctcctgtgagtctcaatttgaaatcgtaacaagcaaaaataaaatattaagcagtgtagaagtaaaaatctgctgacctcacaggggtgaaaactgtgaccttctagaatgatacctaccttagtgtgacttcataatgtgtgtgacttctctgacaccatgtactgcctcccttacttcagtggtatttcaaaactaggagctcaatcatttgtttgacagaggatttgttcataagctttgtatgactttatcatttatgtgacctctcactttttatgtcattttgtctctctagccaacttctaaagatcaggtattggccatgctagagaaagccaaagttaacatgccagccaagcctgctccacccactaaagcaacttctaaaccaatgggagggtccgctccagccaaattccagcctgcatcaggtaactctatcttaagaaggttaaaggggaaggaaatagccctgaggaactctaaaaagacattcagccttgtcttttttaaatcacatttccttacagcgtagatccaagctctccttccttctctgcttactttcctttcacaaacacttgtcaagtagtcaagtacctattttatgccaggaactgtactaagggtacaaacgtgactaatttggtttctaattctaaaaagttttttttgtttttgttttgtttttttttttagagatggcatcttgctctgtcacccaggagggagtgtagtggcgtgatcatagctcactgcaacctcgaa

SEQ ID NO: 9982 - DNA, 1024 bp, Homo sapiens
gcctgggtgacagagtaagactctgtctccaataaaaaaaaaagaaagaaattgggtcctgatatgtcaataaatgtaagtattaagtatgttaactaatggtggagatgcagatattatttaaatattatatgacatttgcagttgaaagaactagaagaagaatgggtcaaactgccaacaagtgctcctagacctactcgatttcttcgttcccaacaagaactagaagctaaattggaacaacaacagtctgctggtggagatgctgaaggaggtaagccaattttaaacaccggtttctgcaaaaattagcaagaactggcactgccatgagaatctgtgttcattaggcatattttgtaggattgcctttaataaaatataagttgcatgtagctttaataactctggtcccttctctattaaaatttcatcagggttgtgaaaggactgataactgataagtaaaacaattctaagcatttttaaggtttgtgttgtttttctccttaaaggtggtgatgatggtgatgaggtgccacaaatagatgcttatgagcttttagaagctgtagaaatcctttccaaacttcccaaagacttttatgacaaaattgtaagtaatagttaaacttctttcatttatttcttgtaaaataattacttgaatagaattagaatactctgctgagcccttgcctgatgcacccccttccatcccatatcttccctagtagagtgagttagttgcttcttcctctttgctcccacactactttgtacatatatatattatagcacttttttaaaacatgtcttgccataaaaccagaacattcttgacttcctttttctaattttctctctggtttttaacactaaagagctccggattcctcccctttctccgtttctactgccactactttaccccaaggtttcttgaccttagcactgttgacattttttgtcagctgtcctgtgcattgtatgatgtttagcagcatctttggcttttatc

SEQ ID NO: 9983 - DNA, 1031 bp, Homo sapiens
aggcagaggttgcagtgacccaagatcatgccactgcactacagcctgggtgacaaagcaagactccctctcaaaaataaataaataaatacattttaaaaattggccttttggtggaaaagcactgaaaagaaaagtactggccttttgttggaaaactactcctcagggtatttaagcagctctttttctcttgctatcttaagtatagactttcgaagtctatactttgagatgttggctaaagataaagtttgtggactaaagctaacctttatttaggtgcctttttagtaaagtagaagcaaatgctatatgcctttaaagagacgcacagtgaaagcaaatagaaaagtaacttttgctcttatgtagtaagttcttttcaaccctagactttcttgtttggccatgaaatttttcatgaataggatctctttcaggaacaagtggatgtaatttgctatggaaatctgaattagacagatcactagtttgttcagacttggcagttcttctaatctggtatcctgtccccaagtactgtctatatcagatattttagaaagcagctgtagtaaaatcctcacggaatgaagatcatccatctcacctctcatgattttgtgtatgacctacatcttggagaaaaatgtttcctttggtgtttatcttctgtgaaagtataaaaactcttgtattttgttgaatgatctttgatttataggtctttaatattgttttttgctttgctcataatgtacttttataaaatttgacttgcttagattcttacgtgaatgaagtttccttgtttctagcctattacaatatagtaagcagatgtttttctgagtagtaaacagtatgctcattctattatcttagaaatttagtgactcatcttagttatcagaactatgcttatatcaataaatcttttgtgtccttagtgatgtctaaattttaaaaaatactgtaatctttttttttttttttttttttttttgagacaaggtctcgctctgtca

SEQ ID NO: 9984 - DNA, 1738 bp, Homo sapiens
aaaaagtgtttaaaacgacttaaaaaatttttttgcccagatgcagtggcatgtgcctgtagtcctagctactcaggaggctgaggcaggaagatcgcttgagcccaggagtttgaggtcacagtgagctataatcccaccactgcactccaactgggtgacagcacaagaccctgtctctctctctttttttttttttttctttttgatacacagtttcgtacttgttgccctggctggagtgcaatggcgcgatcttggctcaccacaacctccacctcccaggttcaagtgattctcctgcctcagcctcctgagtagctggaattacaggcatgcgccaccacacctgagtaattttgtatttttagtagagatgaggtttctccattttggtcaggctggtcttgaactcctgacctcaggtgatccacccgcctcagcctcccaaagtgctgggattacaggcatgagccaccatacccgaccaaccctgtctctttaaaaaaaaaaaaaaaaaaaaaaaattgaaagcaagcattctgtaaccctacttttgtaaagtatatttgtatgtccatatacacacacacttagagaaaggtctggaaggagggatatcaaaaagttgaaagtagttttctctgggtggtgggatttcaagggatctttaattttttgtttgaattttctacatttataaactgttactatgcctgctatgacatgtcttaaaattttatgtttaacgttaagtttttaaaatattcttgaacataaatttaaaaattaaagactcatttactgtatttctagcatttgtaaaagtactagtacaccccctttccgtgacctttttccaattcttactacttaagtgggatttttgttctttataatatgttacagaaccacaggagaagttgtgtcaggtgttgtaagtaaggtgttcaatcaacctaaagctaaagccaaggagctgggcatagagatctgtcttatgtacatagagattgagaaaggagaggctgttcaagaagagctcctgaaaggcttggacaataagaatcccaagatcatagtggcctgtatagagacactgaggaaagccttaaggtaagactttgttttagctttgttaactagagcagcagtccccaacctttttggcaccagggaccagtttcatggaagacaatttttccatggaagaattgtgtgttggggggaatgggggggtcgttttgagatgaaacagttccacctcataaggagcatgcactctagatccctcacatgtgcagttcacagtagggtttgcactcgtatgagaaccttaatgccctgctgatctggcaggaggcagagctcagggggtaattctcgcttggtagctgttcacctcctgttgtgtgcctggttcctaacaggccactgtactggccacagcccaggggttagggatccctgaactagagtatctcaattgagtttggattccgggtttaaacagaaatggaaactgcagaatttgacttggcatgccaaaacaagcaagaaagtgacctgaataaggaaagtcattccccaagtgtggcacttcatgttgactaattttagccttcaagtgtgttgtgtagttattttatctgaatccctttctaatgaagatgaatagagatttctgacctgttatcagattaagaattaggcttttcagttgggggcagtggctcat

SEQ ID NO: 9985 - DNA, 1016 bp, Homo sapiens
agtaattctaggtgaaagtatgactttttccaaaacttttttcttggccttttaaaaggccatttagctcagcaattcagttttattccagcttcgttttatatctaagaagttcttatttgggaaaataaaagcatcattttttagaaaacaaatttttggtttttttgagacagggtcttgctctgttgcccatgctggagtgtagtggcatgatcacagctcactgcaacttctgtctcttgggctcaagtagtcctcccacctcagcttcccgagtagctgggactacaggcacacacaccactacgcctggctaatttttgtgtttttagtatagatggggttccaccatgttgcccagactgcaatatatttatatttatattttttgagtgactttatttttttgagatggagtcttactctgtcgcccaggctggaatgcagtgggacaatcttggctcactgcaacctcctcctcccaggttcaagcgattctcctgtctcagacttccgagtagatgggactacaggcctgcaccaccacacccagctaatttttgtattttcaattgagacgggatttcaccatgttgaccagactggtcttgaactcctgatctcaggtgatctgcccacctcagcctcccaaagtgctgagattacaggcatgagccaccactgtgtcctgtcttttgagtgactttaaaaaaaaaattctattggccgggcgcggtggctcacgcctgtaatcccagcactttgggaggccgaggcgggtggatcacgaggtcaggatcgagactgtcctggctaacatggtgaagccctgtctctactaaaaatacaaaaaaattagccgggcgtggtggcgggtgcctgtagtcccggctactcgggaggctgaggcaggagaatggcgtcagcccaggaggtgtagcttgcagtaagcggagatcgggccactgcactccagcctgggtgacagagcgagactccgtctcaaaaaaaaa

SEQ ID NO: 9986 - DNA, 1901 bp, Homo sapiens
atcatcacactcagtggtcattcaaatgggttgctttttgatggagcagaagtttttctcaaacttctgttaaaatcattctgtgcttctgcaatagcatctccttagccagaggtgagagtccaggaatggtaatcaaattcagatctcttgtattgtgatagtgaagagcttttgtaggtcaagagcttgggaatttgccataaaaaagtcatactgccagtggtttttctctaagtagaagagaaaataatctgtacagtagctctgtaattactcttatagactatcaaaatacaggaatttaaactaaaaagacaccacacttgggcccatgggttgtagggaagagagacagactgagaagtaggagacataggttctaggcccagctctagtattactcatgacttaatctctctgtcccttttaaatggttggttaatgagaaaatgcacagattttggggtctcttttatgatgggatatagtgcatatttaataggaaatttgttatttatttgaacactaaactgaaaaatcagacaatttggaatttattctaagttctgccttcatgtataaccttgaaaacatttcttaacctctagtctaaaaataaacaattatgcctaaaccttttcagcaatagcatggactatatggtatttgagctcttaggaagacatttttagatcagtggtatatgattataatatatctgtaaaacatacttactttagctgacctacttgtctttgcctcagttttagactgggataaaatctgagagctctgaataattgaaatttctgaatatgtgtctttactagggactagatcaaataaaccacagcaagcattatgtatagttcaaattaatcttcttaatgcttctctttgttggcaattttatttgctctttaggcatcaaactctactgtgtagcaaaaacttggttcttatatctgtttataaaatccagatcagtctgctcatccctatatgatacttttaactttttgagaaacttccaaatggttttacacagcagctagaccattttgcattcacagcagctggaccatttggcattcaacttaaaaaatacagaggtataataatttttattgtattttacagacatactagtattcagttggtgggggtggtagggggaagactggtcctgagtttgaaaagcacagtttgatgaacatgtgaactgtttccagcttttgactactatgaacaacattgctatgactatccctatataggtcttctggtgtaatttgcatcagtttctaggctatacacctaggaatggagttgctgggtggtagggcatgtgtatctgataatgccatactgttttccagactgttaaactattctgtctcccatcattggtgtatttgagttcctgcagattctcctgactcctttaaattacactgctgctgtttcatggcaatcctagggattttgaagaaaaatcttaatgaaagttccacatatcctaataaacttttacaattccatctttctctgggacattttcttctttgccatgggagggaacaaaatgtaaaggaagaagcatagactatgaatcttagtttaatttcattgcttaccagttttgttgttttggcaggttacttaatatttgtgaagctagtgtgtaaaatgagaatatctttccttcacatagttgatgtcagtataaagtgaattagcgtgtttaaaaagtactttgcaccatgcctgattcagaatagatattaccagagtatatattcaataaacaaatatttattgaaaacatattttatgtcaggccagaactagggatggagaattacggaggaccgcttctatgttattaataatattga

SEQ ID NO: 9987 - DNA, 1048 bp, Homo sapiens
tttacacacaagatggggaaggttatttttctttttttcttttatagaggtatggttttggttagttgttcagggtggagtgctgtggtgcagtctggctcactgcagcctagtcctgggctcaggatcctcccacctcagcctccggagtagctgggactagtcttgtaccaccatgcccagctaattttttattttttgtagagatggggtctcactttgttgcccaggctggtatttttctatttcaccttctattaccttcctgcccatcttgtatcattgtccaggattcctccagttttgtaaagaacgaattccgtgaaaaggtgaggtggagcattgtaggatcttttccaggcctttgagttgccatttgaagaactgctcgagtccaaaggaggttaatgaagtaagcagcttacatataatgaggggctatgtatctaccttgatgctttggctgttacctgcagtaatttttttcacccttggaggagggattaggattgtgatagtgggaactggtcatctcctttgtttctggaatattacgtgtaatactaccaaaaaaagaggtccacccaactgcagtagtcttcctagttggtccatcatttgcctcttgcctgggaaagcctaggacctagaagcagcgcctgaggcctgcaaacctctgggcgaagatacactgcggcccctttaagctttcagagtgtgcggagaggggagctgagggtggggcgggcactctgacagtggcgctccgggccccgccctcggaggaggcgtttcccagcggaccgcagcaccaatgctgctgccgccgccgccgccgcctgccgggtattcctgctgatcctgctcggaccttagcttccctgacctctccctgcccggggagcgtaagtgtcaaaccacgggcaaagggcaagcatcccgcgaccgtgctgcaagtcctggtggacagtactggggactttgctggcctatcagaggctaaggcggcgaaagagcgtaaacaatgccggctccagtgagctaaagc

SEQ ID NO: 9988 - DNA, 1015 bp, Homo sapiens
atgctacaaagcatacagatgaagagaggcgtagggcttgtaggtatgggagaagggtgtggagctcttatgctctcatatgaagtgtgtttgaatataccaactctcctgtaaacttttatcttaattccatcaacactcactttcttttcctttttttttttttttaagacagagtcttgctctttcgcccaggctagagtgcagtggtgcgatctcagctgactgcaacctctgcctcctgggttcaagcgattctgccacctcagcctcccaagtagctgggacttcttgtgtgcaccacaatgcccagctaattttttgtatttttagtagagacagggtttcactatgttggccaggctggtctcgaactcctgacctcaaatgatccacccgcctcagcttcccaaagtgttgggattacaggtgtgagccaccacacctggctaaccctcacttttctaactgtagcttctattaggactttatcaacaggttttgtttttgcaatactaggtaggggaagtgttccccagccagacataatatccattcctaataaaacacatttacatataggagacacagcttccaactttcatagttctgtcaacacttacatctttgtgttctctcaattttttttttttttttttttcaatcagatctcactctttcgccctggctggagtgcagtgctgctattatgggtcactgcagcctccacctccagggctcaggtgatcctcccatctcagccttccggtagctgggactacagacgtgcatcaccatgcctggcaaatttttttagtttttgtagcgatggggttttgccttgttgcccaggctggtctcgaactcctgggctcaagggatccttttgtctcggcctcccaaaatgctgggattacaggcgtgaaccactacgcctggccttctcttaatctaactgtagccctgttcggggcttcaccaatggctcttggtactactgtacctggggcttcca

SEQ ID NO: 9989 - DNA, 1079 bp, Homo sapiens
taatttgcctaaggtgacaaagccagtgagtggctgctgcaggaccggaagccatggttttccctcctcctgtatggtaatggtaataattatcacagctgcctctccccttttaggctaggcctcatacacttgtcttaatcacatttccccatttgtttgtgggatttttgtgcgcttcactcctactcttaccccatccacttcctttttcagtttaccatgggatcctttgtagaaggccaactgactgaccatatctgcccactctccaccctagggagggcctgaccataactacaccaaggagaagatcaagatcgtagagggaatctgcctcctgtctggggatgatgctgagtgggatgacctcaagcaactgcgaagctcacgggggggcctcctccgggatcatgtatgcatgaagacagacacggtgtccatccaggccagctctggctccctggatgacacagagacggagcagctgttacaggaagagcagtctgagtgtagcagcgtccatactgcagccactccagaaagacgaggctctctgccagacacgggctggaaacatgaacgcaagctctcctcagagagccaggtctaaatgcccacattctcttccctgcctgcctgttccttctcctttatggacgtctagtccttgtgctcgcttacaccgcaggccccgcttctgtgtgcttgtcctcctcctcctcccaccccataactgttcctaagccttcaccggagctgtttaccacgtgagtccataactacctgtgcacaagaaatgatggcacatcacgagaatttagacctggattttaccatgaacctcacatcttgtactccatcctgggccccctgaaactgcttattcgtgattcctcaccagcgtagagctccacctcccctttccccagtaccctcagtgcctgcttctcagtgctgatgcagctgatgacccaggactgcgctctgccccatcacagccagcatgactgcttctctgagagaacttgcccatcaggggctgggacatgggggtgtgggtaaagacagggatgaag

SEQ ID NO: 9990 - DNA, 1050 bp, Homo sapiens
gttcaggacagagaccactggcatctggtgcacaatattaaaattacaacacgagccaggcacagtggctcacgcctataatcctggcacttttggaggccaaggcgggtggattgtctgtactcaggagtttgagaccaggctgggcaatgtggcgaaaccctgtctctactgaaaaaacacaaaaaatcagctgggtgtggtgacgtgcactgtagtcccagctgctcgggaggctgaggcacaagaatcgcttgaacctgggaggtggtggttgcagtgagccaagattgcaccactggactccagcctgggcgacagagtgagaatctgtctcaaataaataaataaaattaaattataacaggcaaaccgtcactggccagggaactcctacgtggaataaacaaagctgatgtgtaaagaattctgaggtgtgcttcacaggtcaccacacacagctagccttctgttggggtctggcccagccctgtgcttgggtaaggacagaaggctctgggtgacgctccgtgaaggagaacccagttgctgggcattgtctcttgtgcggtgatgctgatgcctatcctttggtctcatgcctggctctgctttgctgcgcagctctgtctcccactccgtgctgtctgagatgcaggtgattgagcaggaaaccccagtgagtgcaaaatcctctcgctcgcagctggacttgtttgacgatgttggtactttcgcctctggacccccaaagtaaggctgttttctagctgtaaacttggctgctgtgttcctcatcaggcttctctgagccactctactgtctccctaggtacaaggacaatcccttttccttaggggaaagctttggctcccgctgggatacagatgctgcctggggtatggacagggtagaggagaaggagccagaagtgaccatctcaagcatccggcctatttcagaaaggtagagtgggctgttttttcttttttctttcttttttttttttaaacaagctgaaggtagagaattctaaggcagcactgtct

SEQ ID NO: 9991 - DNA, 1031 bp, Homo sapiens
gcacctcacccaaagcctcactgggtcagtatgccagcgggcaggcgtggggtgtctgggagagggtggacctcaaatgttcttttcagaggtcctactgcctggccgtgtggacagaggccacaggagactgagcatctatctgattctctggagtggggactgtgattgaaatagtggatgcaacactgattttagagccaagccctttgaattgatgaatctgggtgggctggtgtataaggcctggggtctgcctctgagtgtggggctgggtctagccaaagtgttggggaggccagcatgagactggacacctatccctgggctctgaggcagggctggcttgtctggtgcatttccgggggtggagggacagctctgagctgccgaaggctggaggtgacattgttctttctcagccagtaccccagcctgtcctttaactctttcctacattttccttagtgtctttcagacttggttcagggcgaacagtccatttgctgacctcggtttgttctgttgactcttgggggttggggctggaacccagcagagtgactgtcagactgatccatgagaaggctggcatagcttggtctgaagcagggcttcatagagaccgctgggcttgggagctctgtggaggctctggggtgggcctcttgttagccacaagtctgtttctcctccagagtccgtgtatctgtcagctaaaggggcccttcctgccagaggtaactgacagctgcttggggagcccagcccctgttctcagcttcctgctttagaagcggagcctggtgctcaccatatgctccctgcctcgcagtctttgttttggttcagggaatttggacgtctctggtgcttcggacgtctctggtgcttcaggtctaggttcctgtctcactctgctgggtgccagtaaataccccagccacgtctgtctttggctttgacaccgctggttggagctggtggtggcagctttgccttcccttgcctgaagctgttcttaggagctc

SEQ ID NO: 9992 - DNA, 1204 bp, Homo sapiens
atctctgaaaaaccggtgtcagtagcgtgtatcatcctgtatagataataacttcgctgtcataaggagatgtctcctacagccaacacgtttccttcttgagaatcacccgtagcacgcgctgctctcttctttgctctccagacggctttttttcgccaacatggatgcacagccaatgatgccaacaccaaatataatagccgagctgcccagatgtaccgggagaagatccggcagctggggagtgcggccctggctaggcatggcactgatgtaagtgcctgttcttggggctggggcaggagggttaggagtattcagagccctgtgttttaggggtgtcttctcctttctagctttggatagacaacatgagtagtgccgttcctaatcactccccagagaagaaggactctgatttcttcacagaacacactcaagtgagtgcccacaaggaaccgttttcccagttgttcttgacaggcaatttaccaaggcccaggccttctgtgatcatggttgtagattccatttgctttgatgtgatgtcttggacaccacgtatgaagtccactgttcctgctgggtaggcctaggtgtttcctcctccataaatggaggtgcagtgtagccctccttagaaatcgactcctataaattgggctggcggggaagagaggcagcttcttgaagtttcaagaggtgtccggtgccccaaacaaattttcctggattcttcccctataagaaaggcactgtgggccgggcgcagtggctcacgcctgtaatcccagcactttgggaggccgaggcgggtggatcatgaggtcaggagatcgagaccatcctggctaacaaggtgaaaccccgtctctactaaaaatacaaaaaattagccgggcgcggtggcgggcgcctgtagtcccagctacttgggaggctgaggcaggagaatggcgtgaacccgggaagcggagcttgcagtgagccgagattgcgccactgcagtccgcagtccggcctgggcgacagagcgagactccgtctcaaaaaaaaaaaaaaaaaaaaaaaaaaaaaaaaaaaaaaaggcactgtgcttggggacagtgaaaggattctctcctccccgccccacccctttgaggagggtttcctctttactggccctgggtgctgaagttagactcttggcttcaattcc

SEQ ID NO: 9993 - DNA, 1070 bp, Homo sapiens
ttggaccaagcattcccacagctgctggagcgggcgcgtttcctgcgctccaggtggacatcgcttcttttctcacttaactaattattgctgattccagcgcgtggggacacacaaatcagaatcctggaagcctctgtcggtgactgaagatagacactgtcctgtcagccacaactccatgggttatacaccccggctgaagggtcacccggggctacaggagcaaggacagagaaacaggggaagtgactgaggagaagatgccttaattggaggtttgaaggagaagcagaggtgcatgagtttggaggaagcgctgtgacagcgccctgctttggggacaaagggcgcacactgtcctcctgggtctggctgtgtcccttgggcctgctcagagaggaagcgatttccttctagggtctgtgagtcagtcagtgctggggacagctgagaccctgcccagaggcaggaggggagcagccacatgccactgtgtccttgagtccctggggccatggctctggggttggaattggcttgccgtcctctgcgattctagggaacttttttttttttttttgagacagtctcactctgttgcccaggcggtggtataatctctgctcaccgcaacctcctccgcctcctaggttcaagtgattctcatgcctcagcctcctaagtagctgggactacaggttcccgccaccacgcctggctaatttttatatttttagtagagacgaggttcctccatgttggccaagctggtctggaactcctgacctcaggtgatccacccacctcagtctcccaaagtgctgagattacaggcgtgagccaccacacccagcctgggagacattcttatagttggccatcgcttctcacttccccatgctgccctggacgccaggcctttggagggcaggcccgggttgtgtgttccccacggagccttgcgggccctcagtggatgtgtggagtgagatgagtatcttccgtgactgcagggcccctcgtatttctggtgcgttgcttggtttgagtttcacaccagccctggc

SEQ ID NO: 9994 - DNA, 1102 bp, Homo sapiens
tcagcaggtggcatgccctctctcagccttacttttttttttttttttaatttttggagacagtgtctcgctctgtcgcccaggctggagtacagtggcgcgatctcggctcactgcaagctccgcctcctgggttcacgccattctcctgcctcagcctcccgagtagctgggactacaggcgcccgccaccacgcccggctaattttttgtatttttagtagagacgaggtttcaccttgttagccagaatggtcttgatttcctgaccttgtgatccgcccaccttggcctcccaaagtgctgggattataggtatgagccaccacgcccggcctcagcctcacttttcttatttgggacttggggatgatagcactgatttcacagggtcgtggtaaggattagatgtgacagtgtcaagcgcagtgctgggcacaggatgaggacagtcagtccctggagtcccagatgcagatttctagaaggccagagctcaagagaccctagaaataacctgttataacctgcattaacttcctcccttcatcccccacatcttgtactgagaagaaaacaaggcgcattgagtaagggacttgcctctgatcacagggcaacttgactttgttgcttgacggggccaggggaggatatttggcccctctgcccattccgcataagccactgagcctgtggtatctgtcctgtccccagtcctgacgtgaactacgaggagctggcccgctgcacagatgacttcaatggggcccagtgcaaggctgtgtgtgtggaggcggtgagtggtcagctggggtgggtgcgttgctttgtgccttcttgccccctccctggacaggatgggggcatttggctggtggagacggctgagggaagaggcctgagcctcagggagccagggaaggcattcaggcgttcagacctagactctgtttgtcccggctgtagggcatgatcgcactgcgcaggggtgccacggagctcacccacgaggactacatggaaggcatcctggaggtgcaggccaagaagaaagccaacctacaatactacgcctagggcacacaggccagccccagtc

SEQ ID NO: 9995 - DNA, 1135 bp, Homo sapiens
attttgctttcaattccaagaggagctctgggaaaacctgtggataaaaccaaatgccaaatgttggacgttgtttccttttccttttctctctctgattgttttaattgttctgtggtggttttaatggatttgagaccctggagcggcagctgcctttctgatttccagctgctttttgtgaataatttaaaaagaaaaaaaaaaagaaactttacattttggagacaaacctgtgtgagttttttattggtacaaacgttgtatttaacactaggggttttgtacagttttttgccttttctactagaaaacaatgtaaagtgatttcacaatgtgaagagaaaaaaaaattgccactatgaccaaacgcacagtctgttctgcagcaacaacgggattcaatcaactcagtcgtgattcagccgtagaaatgcttttcctttatcttgtttgagcttttcctttctttcctgttttgatttgcaaaagaaaatgtcttttttgtgtgaacttgtgttgtactctgtagaaaattatggattttactttaatggtttaaaaaaaggcaaggagagccctcgtcgcttttcttacctaatcacagagtttgtgtagtgaatttaaaaagaaaaaaaaattgttataagtttggagcaagggagtatgtgtttcaaaggaatctccttcctttttttgtgtgtttttccttttgtcccaatggggaacctaaatctgttttaattgcacagacacatggacaaaaagtcattttgtatctgccaagtgtggtaccttcctttgtttatttgctattaaactgtttgagaagaactgatgtcttcagagttactgattgttggggagggtgatgtgtccttggagcaggtggggttgccatgttcctgaagagggggtgtgggtgccctataaggcttcatttttatgtacctgaagatgtgcagctgaaccccccaaaagctccggaaggaaaacataatttctccccagaaaactgccttccccatctttttgtattctccaggatttctacttatgcggaaacaccttaaaacttttttgcccaccctaatttttgagcatctcctgttctccttggctgccacaaaacaga

SEQ ID NO: 9996 - DNA, 1522 bp, Homo sapiens
ccaaggtgcaatccacccacctttgataccagaccctgagggcttcatacctgctgatgggttttcttttctaaaaggaatgctcgccccagcagggtcctgggctgcttgagcagccagctggtgagaccatgcacttctctgttctctcctccccctgcccagtgagttagcacagcagtagcactgcccttgagcacagttctttccccaggccaaagatggttttgtgaagaagctgctcccctacaagtctcacgtgtgaaagggctcagctcagagtggagactcgctgtcaagtcttaagcaatccttttctgttgtgtgaaggtttcacttacaatgtgttttctgctgtagttttgtttcttacttgggttacatcatgaaattgatttgccttgaatgcagccagaccactgtctcctgggttccccttgagtggccagggcctggatggaagctaagagcttggatttctgggaacaaagggccatccccataagattgagcagaaattctggtcctcttccctgaaaaattttccccaccccagccagcatcttctgcttccccttgggttgtgaccagggagtggggagagaggctgaggctctgctcccctggagaccttctcttaggagttgggtgcttcatggaaaatccaagccttaggttcccttctgtctctggcaattagatgtgttcttggtgtcctccatgtcctttttgacttttccctgtgtccattgttagcatgtgcaaaagttccctgtcattacccaacccctgcccgcccacctcatttcagggctgtacacacagtgagtgttcctgttctctctctctttgtttggatgtattgctctgtgtaactcagtgggtctccctctttctggtttgtttttttttctagattcctgccgtttgttcatcgttgtgcctaaagcatgtcgatgtggcgtcaagtacatcgtccaaatccctgtctcttcagcttctctgatgcttgaactctcacctttgaccttgtgttgacctttgatgctgatgtgtatttttattatgtttgtttctttcttcgtttttttttctttttttctttcctttttttttccttttgtgctgccaaattggttttgctagaacgactgctgaaggggaaatatttaaacttgcatttgaatataaaaaaaatctatttttctagaacttcataagataaccacttgattttgtgattccaattctttgtaattgtcttcagagcagccctactagcacataccgcgtggtgtttgtatttctgtgaacacacagccagtccgtttctaggctttgtttctctgtgtgcttagttttaaagacaactttgaagtaaacaatgaaataaaagatgtcactaaaacctctgaggctcctgagcacattttgctgatacagtctgtggggcttgaggagaccgcatgtattgttctttcttttgtttttcttctgagttctcaactgcggagagcacctg

SEQ ID NO: 9997 - DNA, 1048 bp, Homo sapiens
gttcctctttgtcagggaccagccctctgccagtgtgtgcttgtcattgctggaatggatatgaagcacccttatctgctggctaatctcttgctttggatgttgtagggttgaatgcaatgcagttacagaatttggctgcactagctgctgcagctagtgcagctcagaacacaccaagtggtaccaatgctctcactacatccagcagtcccctcagcgtgctcactagttcaggtaagcatgaggatgacccagtgtgccattatgtgccttggacagatgctttgtgtttaaaggcagagtccagagagggaaaatagttaacacctgtttccagagaggtcagattatgagcaacaaattttcaaatgtcatcttttgtacttaagagaaatcttcctgattttcaatgtgctgtggccattatttgtctctgtcctgcaaggacagttgttagaattagtaactgaaaacctctttacaaatagcatacttggatagtgacactttttcttgtatttggcgagaatgccagtgatgggttgaattttaactccttgctttctaatagcagggtcctcacctagctctagcagcagtaattctgtcaaccccatagcctcacttggagccctgcagacattagctggagcaacggctggcctcaatgttggctctttggcaggtaaggggcagcacctggctgtcatcagactattctttgtgcaggtagcacatcttaaccctggtaggggcaccactggaatgattgcagtggcccagtgaagttaaaaataatcatgagggccaggtgtggtggctcacacctctaatcccagcactttgggaggtcaaggtgggcgaatcacgaggtcaggagatcgagaccattctggctaacacggtgaaaccccgtctcccctaaaaatacaaaaaaattagctgggcctggtggcgggcgcctgtagtcctagctacttgggaggctgaggcaggagaatggcatgaaccggggaggcagaagttgcagtgagccaagattgcg

SEQ ID NO: 9998 - DNA, 1027 bp, Homo sapiens
atttttaaactttttgtagatatgaggtctccctgtgttgcccaggctggtcttgaactcctgggctcaagctatcctgctgcctcggcacctggcctgtcttactcttttgaagtggatcttatgcctcctctgtagtctccaaaattacggtaatttaaatgtctttttatgagagttctttactactaaaattttattttagctgtaacaggtgaaattaaagtgaatatcatgataaagatttaatacataataaggatatttccatgtcccaggatttatgatccttagaaacaaggctgttgctcaaattgtctttcattgtaatacttcctgtgctttgccactgcctggtgttcaacccaacattgacacagcattcttctcagcctgctttctaatcttttaagagattggacccattcaatatcccattaaatctggaccatggaccactgcatgaaagtcacctggaacttaaaaattcagatgtttttattctagaataggacccccaagactctagaaacaagtgtccagcatgtttttttgtgcacactaaagttcgagagctagtggacttaacacaggtcattctcagagtcagtcggggaatggattgtcaacattttttccaagtacgtttgcatctgttttagtcacccatcttcaccaaaactttgcaagggtgcctgggcgtaggccattgccccgattttaaacatgagaaacccagttgagagagagattgaggacaaatagtaatcagtgttgggcctgaagtacaagtttaaaggtaaaggtctttttatttttgcccactagaccaggctgcctctagtgtcagtgaacggttagccaatgttcttgattcttcattgatcactcttaagcttccactggtgctactttgcctgcatcctaagatatggatattttcatgagttgtgtcccagacttttttcttttcattctcccattgcttaaggggacactgatgtgcttctctgcttctcagatctct

SEQ ID NO: 9999 - DNA, 1034 bp, Homo sapiens
ttacaggcgtgagccaccatgagctgttgttgctcagcctttttaaagcctggaatgtctttttagaggaattcttgcactaaaagatctaatttggttgtcgactcagttattctttggtctaggcagctttctataggaagaggcatgccatcagttccaatgtacgtaggagaaactaggacaaacatagccagtaatctaaccagccccagctagggttaccatcttctgcctgacaggcatgggcttggtaaactgtgtactgtgtgtcagttgcacagtctcctctcacttgcagtttgtttttgccgctttaatagggtggaagagagctcctgccacttctgcctctatagtagtaaatcagatgagcgagtctctggcaaaaatagaaaaagcagtaagctgctgttacagtacagttctagattttggatgatgacgtctggacatggacagaagagacagttttcaccttcctgggtcaggtgcagacagatgttagccattgttacacagattagaacttctaggcctatgccattgtgtgttgcctttcttttttttttttaacgttaactctgtgtgtttagtagttcattcgttttacttctttgcaggctgaacataacttctttttttcaaagttccctgtgttgtgaactgagcttgggtgaagtgaaatctttgaggtaaggcaactctaatgataaaaatggaaagaaagcctgtgaaatttgggagccttcagagataacattttagagtcactgcctaaatattgaaatgccgccatttgttgtttggggggatgtggagctaaattgagaacgggagcacacatctgccttgactgctaagtatatccatctctactgctcacccataatagaatttttatgtgtgcactcactagtcttggttttatcaacagtttaaaggaggaaaaagagaatgaagagacttcatttcttggtttttcccttacatgtttgagtgttgtccctggtaggccctagttctttttcatt

SEQ ID NO: 10000 - DNA, 1069 bp, Homo sapiens
caggtgcaagtaaatgcttttaggaagttctgtttttttttttaattagtttaaactttgcccttaaaattactggaactatcactactttattagcaaaattggaaactaattaaatctgcatgaaaagttaatacttgagcacctattttatgccagttaagaaatctctctgtcttcagggaggataggcagtgtcttactagttagttctgggtctggctttgtctttcagaattcttgtactttccagtttagacattgtccttggtgaatttgaatagtttattgtctgtagtgaaagccagacagaaatacagctggcaggagttgtatttggaagtttgtaggaatttgggcagttttatagaatcagtctttacttgcaagattgttcgatatgcttaaaaataaaacaaattggttttgtggttcctctgtttgcttttaccatcaattaacttccccatcttctgatttttttttttgtttcagtggttcaccgccaccctagggccaccaagatgcatttacagtggcaggaacgtggttgcttttgtagagtttcatgcccggcacctatgtattcaggaaggttgctttggggaaatagtgtggtctctccacatgaataacacgatccttaattgctaaaagaattatacagccattagcttttcttagtctccaatccaaaagcagatgttaaaaatgattgttttggtgacctagatgtactgaaattcaacctcataaattttagtcattgttttgctatttgttacgacattttagggcaagactcttttaaaccttttagtattttacttcccccatcgtttaagttgatggtgttttaaaattagccttgagatattaaatgcaacttatctttaaggcattgagtaaaaagggcgcaggaggagtacttctgtatttttatcttctgccatggtgacagaggggcttttctttggaaagaggtgatatatctggagtcatgagagacgtctaggcatggcccacttatttttctttccttggttttttagagtgaagacatagtcca

SEQ ID NO: 10001 - DNA, 1057 bp, Homo sapiens
cccttagcatttaaacagactttctgtgggttatgtgcatgagcttccttggagacaatttttaacctgaagcagccttcttagcccggatctctgtgatcttgagggagtcatttcatctctgtatcttttctcatctgcaaaatggagatagcgtacgtatgaggattaaatgtaaagcacccaaaacaggtcatagtgtatggtaaatgctcaaaaaatgttagctcgtacttattgccactttacaaatgtctagacatttctctttacttttaggtgataagggtttacaaactttaaatgccatattccatcaatttgaagatgcacatttattagcactgatggtatgttaaatacattgattctaaagatagaaaaatttattgttcaaaaaaccatttatgtcaaagccagatataatattgatgaattatctattgtttgaattatttcatctagttctcatatttcccaagaggttatcctgagggccaagagagactgacagttggggcctgcctctccctcctctatctttgacctgaacagcctgactttcatgtttaggagaaaaacagttctgcttttaagatcgtttaaaaacctctaatctggatagtagttagattatttttttgttttggtttttgagacgatcttgctctgttgcctaggctggagtgcagtggtgccatcacagctcactgcagcctcgacctctgggctcaagcaatcctcccacctcagccttccaagtagctgggactacagacacatgtcaccacacccatctaatttttttttttctttttgggtagcaacagggtttcatgatgttgcccaggctggtctcaaacttgtgggctcatgcagtcctctcacttgagcttcccagagtgttgggattataggtatgagccactgtacccagctaaattctttttcttcctggctaaattctttattagctccctgtcttatatcaaggaagtttttcaaggaattttaaggttgcttactaacagttgttagttaagagtgagttggccag

SEQ ID NO: 10002 - DNA, 1032 bp, Homo sapiens
atgactccgcaagagacatcaagattataaggtgattttaaaagtcgctctgacagggcttgagaaaaaaattagtcacattctgcctacatggtactaacatatggtgcagccctgatgagctgcacaagtgggctgaaatcaaaatgcagttggaaagaggagcagtagtgactcactagataagacagatttggcctcatggcagggcagtgaaactaagaaggaactgtggtcttagaacatgccagatttgagcaagtgatcatgaatattatggaaaggttgaatgactgagcctttgggtttgaattaggtactttgtctggtgtcacagtccttggagcgagcaccctccctcggtgggttcagagctcccactccctccacctccctcacttctgtgtattacttctgtgtatcattccctgtgcctttgaaggtagaagccaccaggcaaatacttaacactggtgtgcctggaacattgggttcaaactgcaatgataggtagaagcgttagtaattctgcccagagaaagctgtgcattagcttagctaccatatgtaaattgctactgctgcatccagcaatttgttgtccattgttgacagtactgccatggtaaagaaacaggaactatagaaagaattagattcctcctcccacctcccagctctcaccacagtaggaagctgtttggggagcagagaggaaatacgggggatttgagagttacacccagtgtgtgggcatttggggaggaaataggaaaagagattttttaaattattttattttttgaaacaaggtcttgctctgtcagccagactggagtgcagtggcacgatcatggctcactgcagcctcaaatttctggactcaagcaatcttcctacctcagcatccaaattagggctacaggcgtgcactgccatgcctgtctgattttttttttttttttttttgtagagatagggtcttgctatgttgccgaggctggtctcaaactcctgggtgctagagatgtt

SEQ ID NO: 10003 - DNA, 1024 bp, Homo sapiens
gtgttgggaatagaacttgtcagctgagtggggatgagacagttctctgcccatactatttgtaactgtagtcaatgaggagaggaaaggacgttattaaatgctggagaaacaccttgattgaggcagcttcttctgtggctgtgtggtatggatgcagagttctgtgtgactatacactgatgtattctggctctgaatcacttagggatctcttctgcaccttgtgcattgtaggttttggatgcttatttgtttagggtctaggacctggtgcttagcctctcctggatcctgtatatttactgactttccaaattcttttgagtgtggcattatatctgcttcatcttctctttcttggctattcttagtgcccttctcattttactgtcctaatgttttcccatttatactatgaatcattgtgcaccctatgtagagcctgtcattggagattaaaatcagtggcagctctttgattttacagctcagcctcagtaagtgacactctgattagcacacctatattctagctttctttttgttcttggccttttttaaaatttataacttccctggtctcattttattagtttatatttttccagtgtgtccattttgaaagcttcatgaaagaaattttttttttggtttgatggaaggaatgaataaatgtttatacataaataagtgttctcagaacaagtggtttggtaatccataatgaagatatactggactctaacaggcccagttggaggtgcaagatctgtcagcctattgctgccagaattcttacctattcacttccccctcctgctaggaaatattttggaataatctcaggtacccaattttttttttaaataaatgaagcctattttattacttcaagtttgcttttttttttttttttctggagatggagtctcgctctgttgcccaggctggagtgcagtggcacgaactcagctcactgcagcctccacctcccaggttcaagcaattctcctgcctcagc

SEQ ID NO: 10004 - DNA, 1023 bp, Homo sapiens
tttgagacccgcctgggcagcatggtgaaaccccatctctataaggggggaataaaattacataggtggtatgcactaagtacttcagtaagggctgaagaatagaatcatttgagccaatcagccatgcatttcttattgttggaaaattcactctggtcagcaattaagcttttcacatacttcacattgaagtgaatctaaatgaattgttctaagtaaaataatttttggaacacaaatatttggcttctggttatataagccatcatcctcagacatagattttaaaaattatattagagtttattttaacttgtatcaaccataaaataaaaaagagctcaaaacatacacagttggaatgagaccttcattctgaaagcagcaaggaactagtgaaagttaacattgttcactcgaatggagaataacctttttttgcatgttaaattttaggatttaaatgataaattgagcctcaccactactgctgatctgggaagaatctgacctagtaaaggttttcaaatgtcttttccatttcccgtggctgagggattcttggtgtcagtgactgaaattatttggaagttccttgactgaaatagaatatctcaaaccttatttcaagtaccagcctgtgtgtttctgttttttgtctggagcatgtgaacagaatgcatgtgtgtgagataattgggctttcactaatggccccctttcagcaaccatgtatgggtaaagctgttcagttccctgctcctccctctctgagcacggagcagaatctgttctgctgaagctgctgttccactttttagcttgctatatttgtacagcaacagcaggagcagcccactagctaggccgtgtggccaccctttggcacccgcaccggctcagacctgctcaggactcagccagggcacacagtttgtgttcttacgtgcatccatctgtctgtctgtgtgcgtctctgtggaggactgaggttttcaagtgaaagaggtgactcgtttg

SEQ ID NO: 10005 - DNA, 1039 bp, Homo sapiens
cggccaatttttgtatttttagtagaaatggggtttcaccatgttggccaggctagtcttgaattcctgacctcaagtgatccccccgcctcagcttcccaaattgctggtattacaggcgtgagtcactgcgcttggtctaatatttcttcagaaatgtatactgtatggtactatttcttgaaggtagcttgctgaaataataagatcagctttctgaattgccagatccagaacatcaaaaaaaaaaaatactgtgatagaaaaaaaaaagccttctggatccacccccaggaatcctagtgggttcccatggtaacaacctctttgcttacaacttgtcactgtgtaactgtcactggggttcagagaaaagccagtatagcaagaactgtgtggcattaacaactccttaataaaatgctgttgcacatttgcagtgagccagaaatagaaaagaaagtttaaaggttttaatttctgtgttccgttaattagaagctttaaaaagctgcctaattatggtaaggtgctgcagcagtgggaaggtggtgggtggcccaggctggcataggagggagaaaaagtaagctataggctgaaaatgctagaaacttcagagatttttttcttctttaatcctatcattttgaaaatgagggacatggaatgccttacttaaattcacatagagatagaagcaggaattttcccagcactgttctgttgtttctacccacacattggattcacctttcctctacttttcatagtgaaatcagtttctgaggttagcaaaggacctttacaaaagttatgcagagaaactttctatccatggaaggaatcccttctacagcatcctgggcaggcagcgtctgcctctttcctcaggtggaggtgacttgtttaattggcaaaagcccctgtactggagttcaaagggaagatagttttatgtggattccccattttaaagctatacattgtttttctctcatcataaaagagcaattgtacactgggcatggtggctcac

SEQ ID NO: 10006 - DNA, 1061 bp, Homo sapiens
ttttttgagatggggtttcgctcttgttgcccaggctggagtgcagtggtgcaaccttggctcactgcaacctccacctccccgggttcaagcgattctcctgcctcagcctcctgagtagctgggattacaggcatgccccaccatgcccggctaattttctatttttagtagagacggagtttctccatgttggtcaggctggtctcgaactcctgaactcaactgatccgcctgcctcggcctcccaaagtgctgggattacaggtgtgagccatctcgcccagcccaagacataatatgtttgtggagtatcttaataactattgcctacggtagttaatggtatatcttatctccatagaaccattttttttttcttttggtttgtgaatttgttgtatgaattggttctgagtttggttttcaacacatttaaatggaatttatatttaggtttcagtagttattagtgtgagggatactcttgaaatttgtgccaggtacttttctggctcaaactattatggatcaggcgtagggtagctgaagttctagattattactgtgaaatcaagtgctgtttttgttaatgttcatttgtctggtataagtttgctctggggctaagctagatctatggaaagacttaacccttttccagaaagcttccaacttagggaaaaaaatttttttttttctaattctgactgttccacttctgaaaaaaacagatccacagatcagacttgtaaatgatctgttttcttaagatatcttctaacagaatgggtctccagggaactgagtgacaacacacatttagctgggagtggcagttcatctccctaaacgtaatttaacatcacatttatctacacactacagttttggaggcatacttggagattgaacttatacttctcttggcttattttattttattttatttatttttgagatggagtctcgctctgtcgcctaggctggagtgcagtggtgcgatctctgcatactgcaagctccacctcctgggttcacaccattctcctgcctcagcc

SEQ ID NO: 10007 - DNA, 1772 bp, Homo sapiens
gaggcaagaggattgcttgaggccaggagtttgagaccagcttgggcaaatacagggactctgtctctacaaataaaattatttagccaggcatggtggtgcacacctgtagtcctagctatttgggaggctgaggcaggactcaactccttgagcccaggaggttacagaaagctatcattgtgccaatgtactccagccagcctgggtgaaaaagtgaaacacctttctttaaaaaaaaaaaaagaaaagaaaaaaaagaaaacaaaatgattatgcctttatgtgttgtgtgtatcgtactaaacccagtgctgtgcatagaggaaattttacagtctatagtgttacataagtactggggccttgcataaagtagatatctggtaattatttgttgactactccatgtctagtcaaatggcactttaattttatgttttggaacagttcagtattaaggattagtaataggaaaaagacttaacattttaattctgtgaatttaagtcattgtcttctgaagatggagtactttaaaagctccaaggagttatctggaaaaaaaatgtaagcagctttccatcaaaagacattatggttaaggtttgtactgtaggcctggtgtggtggctcacgcctgtaatcccagcacattgggagactgagtcgggtggatcacgaggtcaggagatcgagaccatcctggacaacatggtgaaaccccgtctctactaaaaataacagaaatttgttgaatgtggtggtgtgtgcctatagtctcagctactcaggaggctgaggcaggagaattgcttgaatccaggaggtggaggctgcagtgagccaagatggcgccactgcactctagcctgggcgacagagtgagactctgtcccaaaaaaaaaaaaaaaaaaaatttgtatggtaaaaaccttgtggagctctgatcttgaaacttcgtaatttttattgcctgaacagtcagaaggctcctagacaactctgattttggctcagttttcagtagctccaaagaataagaaaaggataatctgatattgctggcagtctgcactcttgcctttctgggccaagacatgcttttccaaataaaatcaaggaaatagtaaaccactagtaaaaatgaataaagcatccaagagtttgcctcctgtcatgtcctgttttctcctttttgtttctaggctgtttgatattaaactcatgtgccaaaactatactgtggacttgtccttcctacttcccctttcaagctgatgggaaataattatggaaagacattatgtttattatatattcattgtttttattgcgtgctatttctgtttaatagtctctgcatacatttacaagtgcaatttttattttttattattattttttgaaatggagtctcactctgtcacgcaggctggagtgcagtggtgtgttctcagctctgcagcccccgcttcccaggttcaagtaactgcctcagccttctgagtagctgggattacaggtgtgcaccaccacgcccaggtaatttttgtattttttttagtagtgacgggttttcgccatgttggctaggctgacctccaactccacctgacctcaggtaatctgctcaccttggcctcccaaagtgctgagattacaggcatgagccaccacacccggcctacaaatgcagttttttaaaaagctttgcaaacctctttactgagctaatttgggttatagatagcattgggaaactatctatc

SEQ ID NO: 10008 - DNA, 2023 bp, Homo sapiens
aaagtcattttatagcaggctttcaacaaggatattttactggaagctgtttatgtggtaaaagattatttatcccttaggtctgtatttcctagatggctagagcaagaggagcagacatcacatttcgtgtttaggaatgctcttcagcccctccatgctcatgattcagtatttgtcatttagtgcacagctaatctttttcatgaggcttttcctgtccattcattcctgtacctgatttagtattttattatttcagcaagattttaagctttttgaggatggaaactgccttactgcttagtgtattgcatatactttaggggagtggttcaggcatatagtccctactctaattataccttgtgatttagcccctcttgtaatatcttattgcaccagaggtggacacctggcccaagctgggcaaatcactttgtcctaggaatttgagattagaactgagattcaagtctttaagatacaaatagtcacctacattcagagaactcaggacataaaatcagatgctggtatgcagccaagttcaggctcgtacaggtggaagcagtgaaggtcattccgtagggagggagaagtaagtagatttcatctggaaagaagcatagatgagaaatgcagctctggagagagggcagccatccacatgcagagcaaaaatctggatgcctaaagactttccaggtgtgggcctgtttggagttcttggagtggtctagtaccctttcagttaactctagtttttatgtaagctttctgttattttcagccgaaataactttgagttagacttagtacagagctctgcacagcacttgtaaaatttgaaatttagaatcatcttgtcagggatcatggctctttggaagagtagctgggattacaggtgtgtgccaccattcatgcctggctgattttttgtatttttagtagaaacagggtttcaccatgttagccgtgactggtctcgaactcccgacctcaggtgttctgtccgcatcggcctcccaaagtgccgggattacaggcttgagccaccacacccagctgttgggaagagtgctttttcccccataccctccttagccccaggcaaaaggccgctggaggtcttgactccttcagtatatatatttgcatttggtgtttagaatgctttgccagatcaagattatgagtttatttttttaacaagttttttataattatttgtttttaatttttttaggaatatgagcctgttaaaaataatactgctatttcagataggaaacttaaagtgagccatcagttttagagaatttttgtttgtgaggcatatggattcagtcttttcttcatttctagttaagtggcgtttgttttagtttcctgattgtttcctcttaaaaaaatgttgatgggcttgagtggaacacaataatgtgggttgaatggctgttgagactttaaacaaagggtaatggtgaatggctgtgtgcccagttgatggagtctctctggtcccagctcagtaacttcatgaatgatctgtgagaggagcatcacagtggtgtttttctctttgagaaatgttaataagggagagggggaagctctgagaaagacagtttagcgcttctaacgtgattttgtttttttcctgtgatattttggtttgttaggttgaaagactttattccagagaaatgtaaacattccctgtaatactaatgagcaggaattaaaaagagacaagctagttttgaaatggagattttttttttttttttttttgagacggagtcttgctcttttgcccaggctggagtgcagtggcgcgatctcggctcactgcaagctctgtctcccgggttcacgccattctcctgcctcagcctcccgagtagctgggagtacaggtgcccaccaccatgcctggctaattttttgtatttttagtagagacggggtttcaccgtgttggccaggatggtcttgatctactgacctcgtgatc

SEQ ID NO: 10009 - DNA, 1371 bp, Homo sapiens
agctgggattataggcatgtgccaccatacctggctaattttgtatttttagtagagatggggtttctccatgttggtcaggctggtctcaaactcctgacctcaggtgaactgcccgcctcagcctcccaaagttgattgctattaatataatcctatagttaccagaacacgtatactagaattacagtacactgaaatggtcaaaaggcaaataaaatagaaataagaaaattttgatgaaaatctggagaattaagtctttctgtaattgagagttgattttttgattgtggaatccttgaaatggtttgaaagaatgatgtgacttgaatgggctttataaacacagcctggtaaggatagctgtgacagcttgggacagtggatttggggtaccaccagttaacatttctggccctgttttcctgtctttaaagtggagataccaactcagaatagtaatgtgaggattaattgaggtaacttatgctaggcactgaacagtgcctgatacagtattgataatgctgtttctttttccatgtgtaaaatgggcataccactagtctcttgggtcagtaatgcatttcagccaaatgaaataaataacacaggtgaactgcctaggagtgccatacatagatgagcagtagctactatgtcagtgttccttttgttcccttttatgagtgcattttgttttgcattttcttgtgtctgttgtggcttaagggataagatttgtgtgtctgaaatgctgtgctaaacaggacgttgttccttgtggaatacttgggtaatatggtttcctagatttcatattcactatttctactttgagagtctactgttaggaggcttctgtgttcaaagaaaactgaaaattataaatgaatattttggatttgtaataggggacacttgggtctcttcgtagtttcaagtgacaagttgaggcggggaggagggctctaatatttagagttgtaatgcagatttaagacttaatcagttttagctatttgctttgtaaactatattgtatcaagagtccttatttgccgaaaacagctttcttttttttttagagacggggtggggacaggggtccacgggtccgctatgtagcccaaactggtgcaaactcttgagctcaagcagtcctcctgtctcagcctcctgagtagttgggattgattacaggagggcaacatcatgactgccttgaagacagtttccttgatgagacctttgtaaaataactttggtcttgtcatagaattggcttagaatcttcttaaagtagaggtttctttatagaattctatagttattttttaacctctgctgtgctgtggaggccatgag

SEQ ID NO: 10010 - DNA, 1022 bp, Homo sapiens
ggagatcgagaccatcctggctaacacggtgaaaccccgtctctactaaaaatacaaaaaattagctgggcatggtggcaggcacctgtagtcgcagctacttgggaggctgaggcaggagaatggcgtgaacccgggaggcggagcttgcagtgagctgagatggcaccactgcactccagcctgggtgagagtgggagactccatctcaaaaaaaaaaaaatatatatatacacacacacacacacacacacacacacacacacacgcagacacacacacacacacgtatacatatgagagagaggggctgggcatggtggtgcatgcctgtaatcccagcactttggaagactgaggcgggcagattgcttgagctcaggagcttgagaccagcctgggcaacatagctagacctcatctctacaaaaaatacaaaaattattgtattttcctacaaattttgtaaaacttttctactaaaaaaagaagaaatagaaataaggtctctggcagctaggcaaactttatgctgtaagacttcagattcactccttgttattaacctcttaatgctccttgttattaacaatatgttccttattaacctcttaataacctcttaataactcttgttattaacctcttaataatgagtattggagactttatggttctgaatgaaggtcagtatttatttgttcttttgagacagagtcccgctctgtcgcccaggctagcgtacagtggttcaatctcggctcactgcaacctctgctgggaggggttcaagcaattctcgtgcctcagcctctcaagcagctgggattataggtgcccgccaccatgcccggctaatttttgtatttttagtagagatggggtttcttcatgttggtcaggctggtctcgaattcccgacctcaggtgatccgcccacctcggcttcccaaagtgctgggattacaggcatgaaccactccacccggtcttaatttttgtatttttattagagatggggt

SEQ ID NO: 10011 - DNA, 1040 bp, Homo sapiens
cggcccggtccctcacctgtgaagagttgcacaggaacctcgtctcgtactcctcgttcatggtgatcaccccgcgcacgttctcgtcctgtaccagctgccgaggcaaagaggtggctcagcaaagacggtggagaccccagcggcccgacagggacggagcggcggggacggggcaggggcccgggctccccggcccggctcacctggcgcgtcaagctccgcaacggcagcgcgcccagcagcacggtggggtcgatgcggtggtaccagtcccggtgcgcccgacccggcaccttcccgcggaacagggtgtagagcagcgtcgggtagaagagcacccgcgccaggccggcctccagcagcgcggtggccgccatcccggcccggcgcagcggcgacccgtcggcccccgcgctcgcggtccggacccgcgagaagagcaggcgggtgccggggcggggctgccagctgcactaggcctctcgcgggctcgcaccgggtgacggcggggactggcctggactctgggggactggcgggactctggaggagggcccggcggcctcggaggagggaccgaggtttcctgggcgggaaactgggaccccggcgaagggagagcgcgtcgcaggccagacacgtgtgagccctgtagcgtgggaaactgaggcccccgcctgtggccggtgacctccctcctccgagggaggggggttgtgaccccaggtgagaggggcaggaaggacccctgcgtgtggaactgtgactccggccgagggaggaggggacactccccccaaccctcgaccagaggaagggggcagtgacccaggtgcgggtgtgaccccgccaaagggaagacaagacaaggagaggctgtgtggcggggtagccctgaagaggacagtggaagggcttagagctttcaaacagaggagctacctgggtgagggcctgatcccagggtgaacaggggtcctgggttgaggtcgccttcctcctcccctcccctgtcctagggcagggctccctccttc

SEQ ID NO: 10012 - DNA, 1066 bp, Homo sapiens
tggcctaaggctgtggggaggggaggagaactgctcactccttttccctccccatacaaactcaaagtcccctgggccccaattcagagttatgttttttttggcacatactagaaaggcagtgcctcagcccttccctgaatccatggaggtgttctgtttggggctttttagactgctgctgctcagctggttgcttgaactgacagtaggccagcctgttctctgccattccctagtcatcctgtgcctcaccacagcttgcttagagcaagccttttctcagaccttaggcacagcctctcctctttacctgatcaatgttaaatgtaagcacccctgatcccaggacataaggaaagatgcccaattgtacttttgttctatagcctgtgaaatggctagttgatcatttttccacaaagaattaggtgttaagagttttccttcaggctttacttaggagaatggactaagctgaaggtgtacttcaccagcaagagtcaactctagaattcaggatgttccttctattgttttcttatccatctgtcaggaaatgtaactttggttttatttttggcttattccaaggggtaagccagaaaatagaaatgattatttctgattaatagcagaaactttttcaatctcaaatatataaggtgtctgctcttttaaaagctctaagctaagtcaagagctaggaactgttgatacaaataaaagtttttgaagggatatgtgtgtctgtgttgaattccaaaggggtgactttgaaggggtgagggtgtttcattccctcaggggaactcattacgtaccatcacatggctcagtctgcagcagtcctgactgcagcccatgctcccacttctccagataggatccctactccacagggccagtgagattcagattctgacagtggcaaagagccagaggtgagtctccttttttcaagtgctaaatgttttttgagttgtggtgctaaatattattaggcacaatattaggtacataatagatttttgttaaaatacttctttagccctattcaagaaaa

SEQ ID NO: 10013 - DNA, 1032 bp, Homo sapiens
ggagataaaaggcacagacgcgcgggatgagccctgaggagctctctgcactgggcacgccgctgcgcctgaccccggtctcagctggctgcccgtgctcacccctggtcagcgccgaggcccccaagatcccgcgccaccacagcctggctaccgccgccgccgccatgttactcagatgcagactaggcagcggacggaaagacagcaggacacggagccccaagggcacggaccggaaacggaagtgtgcagcagatcttcttccgggcggacgtggagccggaagcggaggttccgggctccgggatgaaaggagggaacgcaggtgagaaagcgagacaggcaggtagggaaatcgtgaggtgagcgtggtcctagctccttgtggcagagcctagagagaaggcgaggacgctgaagaaccaggcgggtgagaggaggggagggggcgggcgttttgggttctacgctacacacccctcccccgctctctgagccaagcttttgacgagggcgggcgggcctgagcgggaagaacggtttccctggcgaccgtttccaagacgactcaaggtggagcggggacattgcacagggtgatgggcctcccagtgccccggcctgggggcggatggactcaagttctgggacgcagccatagggagtctttcgagcgagcggggaagtgtgggggaagcagctcagaagagagcaaatgtaagacccacggatatcccaggctaggcttcatatggagcgtcttaactccatgcgctgggaaggagaggacctggccactaggccggggccaggggtcctttttgtctgattctactgcccctgagcttcactagttttatgccccagttatttggttagtaaggcttttacgatcacaggcctctcccagccctttgctttcatatattgacctaaatcccaagtcttttgttaacattatggaaaggaattattccgtgttttctcaggaaaacacccagagttggaacttttatttatatcattagc

SEQ ID NO: 10014 - DNA, 1030 bp, Homo sapiens
aaaaaaaaaaaaaaaaaaaaaaaaaaaaagcctcactgggctttatagaaaagctagtggggtcgtggctggtctaagtgcagcagtattgcaactagttgatcacaaccagttaacagatttttttttccttctccctttccactgcttcacttagcctttaaaatgtatattaaaataaaagactgggtgcggtggctcacgcctgtaatcccagaactttgggaggccgaggtgggcagatcacttgaggccaggagttcgagaccagcctggctaacatggtgaaaccccatctctactaaaattacaaaaattaggtatggaggcgcatgcctataattccagctacttaggagactgaagcaggagaatcgctgaaacccaggaggtggaggttgcagtgagccaaggttgcgccaacgtactccggcctgggcaacagagcaagactgtctcaaagaaaaaaaagaggctgaggcaggagaattgcctcaacgtgggaggcggaggttgcagtgggcaaaaatggtgccattgcactccagcctgggcaacaagcaaaactccgtctcaaaaaaaaagaaaaaagaaaaactagctggtcaagtggtagtaattgtaggtggtcattttaaggtactgtggcagataagggagcaagacaggagaacagattggttagtagtgactgccaagcctgttgtagaagttctaattgtcatgattttttggtaggataggcatcctcgttttatgtgagactctaattaagcaactcactcgaaatcatagtcaggaattttcagggctgaattcaaaccagggtctatcaaattccaaggtttttttttttccttaataattcttccaggacatgaagccagtcgaggcatttttattctttcgtggaggctataaaatgctaaaattgtagccagtaaaccacattgtgtttttgtgtttgtttgtttgtttgtttgtttttgagacaaggtctctctctgtcttgcagtggctgatctcggct

SEQ ID NO: 10015 - DNA, 1048 bp, Homo sapiens
ccagaccctagaaatgtggtttttgatgcctctcatctgtatctgtacttgggaccattcttgctttgtaatttttctcgtcttttgctctgccaaatatgaatatcagatagcttagcaaaatcatttttttaagctagtcaaagcaaaacaatatttaagtctcttctgcaaagcacctcgcaaatcttttgcctccctgcttacagttatgaatagtaaggtgagccactgagggtatagccgacctgcattttaaacataggaacaaaagtcactggagatcagcttcaagtacagctgtgttaacgagaatgaactaggtatgcgggctggattctggtgtttgattccttttttacttccctagaatgttttgtgacctctaattatttgacaaacatttgtactgaagagcctgtcatgttactgatcacattttttggttcttatttttattgtttcttcatgtaggggtcttgttcctcgccttctaggtgacatcctttctttgtggctgtgtaactcactggcctacctcgtcaatacctatgcactggacagtggggtaggttgtgaccttcgtgagatgtgctcaccttggctttaatctggcagctagattagcttttaaagtaagatgggccgggcgaggtggctcacacctgtaatcccagcactttgggaggccaatgtgggcggatcacctgagatcaagagttcgagaccagcctggccaacatggtgaaacctcgtctctactaaaaatacagaaaaaattagctgggcgtggtggtgcgtgcctatagtcccagctacttgggaggctgaggcaggggaattgcttgaacccaggaggcggaggttgcagtgagccaagatcgcgccactgcattccagcctgggtgacagaaggagactccatttcaaaaaataaataataaataaataaacaagatgacagtttgctacatgccagactgaacaattatatagctaaaaattatcagtcaaattttcaaatgctaatgaaatgagcatactgttc

SEQ ID NO: 10016 - DNA, 1021 bp, Homo sapiens
aggctgaggtacgagaatggcttaaacctgggagatggaggttgcagtgacctagatcgtgccactgcactccagcctgggcgacaagagcgaaactctgtctccaaaaaataaataactaactaaataaaaataaaaatggttacttggtagcactttcagggagctcagacaggagttatttgtttatttatttgttgttgtttttgagatggagttttgctcttgtcacccagactggcatgcaatggcacaatctcggctcactgcaacctccgcctcccaggttcaagcgactgtcctgccttagcctcttgagtagctgggattacaggtgtccgccaccacacctggctaatttttgtgtttttagtagagacagggtttcaccatgttggccaggctggtcttgaactcctgacctcaggtgatccgcccaccttggcctcccaaagtgctgggattacatgcatgagccaccacgccagcccaggagttacttaataggacagattaagagtcacaacaataatcaaaactatgtcctacagcattcattctgtcaagtatctgtagtgttaaaaatcctgggtatattgtacaaagaccatggtaatcattaactatataaaatggacttcattagctgttaatgacagcctgtgtttttttgtttgttcgtttgtttgtttgtttttgagatggagtctcgctgttgtcggcctcggctggagtgcagtgacacaatctcggctcactgcaacctctgcctcccgggttcaagtgattctcctgcctcagcctcccaagtagctgagattacaggcgcccgcccctacgcccggctaattttttagttctagtagagacagggtttcaccatgttggccagactggtctcgaactcctgacctcaggtgatccatccccctcggtctcccaaagtactgggattacaaggcatgagccactgcgcccgaccgacagcctgttcttctaacatgaagttagcttgtaattc

SEQ ID NO: 10017 - DNA, 1027 bp, Homo sapiens
agttacagactttgtttcttctccagtcctgctgcttcacttgactagccttttaaaaaaaagaaagaaaatagagaaaatcttaacttatatttacttactgtatgttgtgattagtttaatagaagggagtttaatccttaataattaagttagtcctcaacgtttattgacttagttctgatgtagtccttgtgtactattgtataatgtagactacttggccatacttgattttgtctaaaagttaatgcataaattaatattaaatatggccaaatataaaagtttaatgagtcatttgaggtcatttagccagaaaactgcatttatgttcctggtgaatttttttcaatgtccttttccaaaagtggcagtaagcagctgtcttaaaataaggagacagtgggaatgatgttgttaaagtcttttatacaatgtattgtctgtctgttccataaaaagtaaaactactctattcgtgaccagcttgggcaacatagtgagactgtctctttaaaaaaaaaaaaaaaaaaaaaattaaaaattagcaggtgtggtgatgcacacctgtagtcctagcaattcgggaagctgaggtaggaagatcgcttgagccaagtgtttgaggttagaatgagctatgatcgcaccacctacactccagcctgggcaacagagcaagacccaaatggctcatggttgctttgtttgttttaccttgttgagtgccagtgtgtattttgagcaaagcagtgtaaatggccttcttgccctagagtctttcataattgagccttatttaatctaccacttttgaccatgaaatttaacaggtgacttcttctgggtatctactccaggtgaagtgatattttttttgactgagatgtctaaagctcttggattcctggtatctcaccaggacatcttagtaaaacagcaagtatcagatgaggaatcagacttgagttctagctctggtctggccactaacattgatatgatcttgggcaagttagttcct

SEQ ID NO: 10018 - DNA, 1017 bp, Homo sapiens
aaagtaatagatctttgaaaattttaaaaagtgaaatttgtcaataacagagttaagagctgaattcttttgtctaaaacttatcgaaattgatgcttgtactctactggctccctgatgatagtagaaaagcactagtaatgtaccaaatgaaactggttgtgtaccagatgattttgttaacttcttaaatagcctagaaatcgtcagcaggtcacatacaactgcagtgataatttcagaacatagcaaaaggctgattttattctacttcacattttagaagtgcattttctcaagttacagggcatttcacttcccttttacatgaagagattttcttttgaatatttttcctctcttttggtagcagtgatagacatgactaataatatattggttctttttgtttgctttttagcagttaatgaactgaagaggcttgatcgtagttctggataggtggctccactcctgaccactgtcaacatcccttatatgttccaaagttgaaaattccactgttaccaattctgaatgttctgtgaacactttagatgagtattaagctgttttctccctttatgacacacatagttgatactgtctggtaaaaggaggctcttgagccattcctatttaattaaaacagaactagttgtagtgtaggaaaaagccactgataaaacaggttatattcttaagcctctctttattgagaacccctagaattgcaggataaacttgatcgaagtaaaatccaaatcttaaactaagttctgtgagatttaagagcaataatcaacagttctaagcctaataaagagagctcttaatcagctcagtggtggttaaaaccagctatcttttaaagaagagaaaaaacaaaacacagcaatgccctgtctcttcagaaaattgttttaaaaagttagccaggcatagttagtggcccacgcctgtagtccgagctgtttgggaggttgaggtgggaagattggttgagcccaagatttt

SEQ ID NO: 10019 - DNA, 1030 bp, Homo sapiens
tccaagaggggaagagtcacctttcacaaacttcgttgttctcttctttggaagggaaattagtgttctaggcgattgagtcccttcattaatgaaacttgaaaccctgttatgcattggcaaatcacaaaaaaagagaaaagtgttttctaagtctcatctgttggagtgagagggttcagggctgtattcacagagttgctggcagtgcaaatagctttgaattatccttggttctccattctcaattgtcaaagctctttgttgcctttgtgaatagcagtccattaagaggttcgtccctgtgaaagcagactgctgtcctgggacaggaccaaatggaagtgtctttgtaggagaacgggttttaaaacatgtgttttctttcttgtaatttagggatcatagacggtatttctatgtaaacgaacagtcgggcgagtctcagtgggagtttccagatggtgaagaggaagaagaagaaagccaagcacaagaaaatagagatgagactcttgccaaacagaccttgaaagacaaaactggcactgattcaaattcaacagaatcctctgaaacttccacaggtgagacaatttaccttgtactaattcagccaaaatgactttagaggaaaaatcttattaatttacattattaaaagattttatgtcataataatataagcttctgattgagaatagtggtgtgaactaaaacaaggaatgcatgagttattatggttggaaatcagcatactattgttatcacgtgtaaaactgtgccccaaagtgaaaagataggctaacagattttgattttaaaaaattgttttataaccattctatcatgccactgactaagctgtgggtctccaaaaataggaatgcttgtgctgaggaactagatagttgaactgtcaatatatgtggcatgctgagatttgttatacatttctatacaacacttagtctgttcatattgcaacctcatttctcacctccactaatcttacaaaaagcgtggttgg

SEQ ID NO: 10020 - DNA, 1001 bp, Homo sapiens
gtgcatcaatgtggcttaatcatagaaacaataatatttactttcggagggcaaagcggaaagatcatttgaggccaggagtcaagaccagcctggacaatatagcaagacactgtctctaaaatgttttttaaaaattagccagtgtggtggcacacggatataatcccagctactcaggatgttgagggaggaagatagcttgagcccaggagttcgaggctgcagtgagctatgattacaccactacagtccatcctgagtgacagagcaagaccctgcctcaaaagaaaaagaaaaacagactggcgcacggtggctcacgcctgtaatcccagcactttgggaggccatggtgggtggatcacctgaggtcaggagttcgagaccagcctggccaacatggtgagaccccgtctctaccaaaactgcaaaataggctgggcgtggcggctacttgggagactgaggtaggagaatctcttgaactggggaggtggaggttgtggtgagctgagatggcaccactgcactccagcctgggcaatagaatgagactccatcacacacacaaaaaaaatgtggctgggtgcagtggctcatgcctgtaatcccagcactttgggaggccgtggcaggtggatcacgaggtcaggagatcgagaccatcttggccaacatggtgaaaccccgtctctactaaaaatacaaaattatctgcacctggtggtgctcgcctgtaatcccagctacttgggagactgaggcaggaaatcacctgaacccaggaggcggaagttggagtgagccgagtttgtgccactgcacttcagcctaagcgacagagtgagactgtctcggggaaaaaaaaaacaaatacatatgtatgttgtgcttaaagatctgtccatgaggaagctaaaggaacataatgactggcaccatgagggtagaggtcatatctggtgtggctgtgatggcagagaaacctgggaagactc

SEQ ID NO: 10021 - DNA, 1063 bp, Homo sapiens
aacgtggtgaaaggcctctactaaaaatacaaaaaattagctgggcatggtggcgggcgcctgtaatcccagctacttgggaggctgagacaggagaatagcttgaacctgggaggcagaggttgcagtgagccaagattgtgccactgcactccagcctgggtgacagtgcgagactccatctcaaaaaaaaaaaaagtcgtttttaccttgagtattcagctactgaaaacagttaatatgaatgtgtgtgcaattgaatgtatgtgcaggtgagatttgtttcagaattaaatgagactaaattattttgttctttataggaagtaaatgaaggaattcaggctctctcaaatagtgaggaggagaagaaaggggtggcagcatcgctgcttgctcctttattgcctgagggaataaaagaagaagaagagagatggagaagaaaagtaatttgtaaagaggagccagtttcagaagtaaaagaaacaagtacaacagtagaagaagcaacaacaatagtaaagccacaggaaattatgttggacaatatagaagacccttctcaggaggatctttgcagtgttgtccaatctggagaaagtgaggaggaagaggaacaagatacccttgaactggagctagttttggaaaggaaaaaagtaagcttttgaaagttacttgtagaatgttttttcctcagtactactctacagggatcattgtgcttgacttacaaccattattgggattttgtttttcttatcccatcatctaggtatgttgaagcttatgcagcaaaaactttaaactacagaggtgtaggttttttggtccttgatgatacttttggtagttatcgggggaactcacccccaatatttcaacctaggttctttctattttccataagtgtcggccagctgagaaatagaaagagtataatgagaggaattttacagctgggccgccgggggtgacatcacatatcggtaggactatgatgcccacccgagcctcaaaccagcaagttttttattaagggtttcaaaaggggaggagg

SEQ ID NO: 10022 - DNA, 1057 bp, Homo sapiens
cctcggccttccaaagtgctgggattataggtgtgagccatcacacctggctgtctctccttttttttttttttcttgagatagaatctcactctgttgcccagtctcgagtgcagcggtacgatctcgcctcaccgcaacctgtctcctgggttcaagtagctgaggctacaggtatgtgcacccgagtagctggggctacaggtatgtgccaccacacccagctgatttttgtatttttggtagagacggggtttcaccatgttggccaggctggtctcaaactcctgacctcaggtgatcaacccacctcggccttccaaagtgttgggattacaagcgtgagccaccacctcccttttctttttgtaaagctttcaaagagaagaaaggcaaattagaagagactggggagcttgtataattggaagatgagggttttgatttgagaagcttagaatgagtatctagaattttttttttctccctcgagactgggtcttactgtcacccaggctgaaatgtggtggcgtgatgttggcccactgcaacctctgccacccaggttcaagtaattctcccacctcagcctcttgagtagctgggattacaggcatgtgccaccacgcccgataataattgtattcttttttttttgttttttgttttttttgagacagagtcttgctctttcacccaggttggaatgcagtagcgtgatctcggctcactgcaatccccgcctcccagattcaagcaattctagtgcctcagcctcccaagtagctgagattacaggtgcccaccaccacatccagctaatttttgtatttttagtagagacaagttttcaccatattggccaggctggttttgaacttctgacctcaggtgatccgcccgccttggccgcccagaatgctgggattacaggcgtgagccaccgtgcccagcctaattttttttatttttagtagagggagatttcaccatgttggccagcctggtctcgaattcctgacctcaagtgatccacctgtctcagcctcccaaagtg

SEQ ID NO: 10023 - DNA, 1071 bp, Homo sapiens
accagcctggccaacatgatgaaaccccgtctctagtaaaactacaaaaaatcagctgggtgtggtggcgggtggctgtaatcccagctactcaggtggctgaggcaggagaattgcttgaactcgggaggctgaggttgcagtgggctgagatcgcgccactgcactccagcctgggcaacaagagcaagactccgtctcaaaacaaccacaaccaagagtacagtatataggccaggcacagtgactcacgcctgtaatcccagcacattgggaggccaaggcagacagatcacctgaggttgggagttttgagaccagcctgaccaacatggagaaaccctgtctctactaaaaataaaaaattagctgggcgtggtggcgcattcctgtaatcctagctacttgggaggctgaggcagaaacatcacttgtacccaggagggagaggttgcagtgagccgagatcgcgccattgcactccagtctgggcaataagggcgaaactctgtctcaaaaaaaaaaaaaaaaaagtacagtatataaaatacaaaatatgtgtgaattgactgtttaggttgtcagtaaggcttctggtcagtagtaggctattagtagctaagtttttgggtaatgaaatgttatatgcagagtttcaactgctcaggagccagcatccctaaaccctgcattgttcaagggtcaactatacatgcaatttagacagtagttatattgtaacatatacagttacattgttatatactatacatagtagtaacgttatatactatatattatatataataattacattgctgtaaaaatattgtaaagttccttctttttagtttattttcagcattctaatctgctaaaggttgtctggtagcacttcgaaaatgttgtacaacagtaagagaaatgaaaatgcttaaataagaatgtggtttttttcttgaatgttgtatttaaatcagcttagttccaagctttttttttatcaagttcttttgctatttccacagaggcatgatatccttccataaagagccgaggctctagatttgg

SEQ ID NO: 10024 - DNA, 1022 bp, Homo sapiens
tcctgggttcaagcgattctcctgcctcagcctcccaaatagttgggaatacaggcgcccaccaccatgcctggctaatttttgtaatttttactacagacggggtttcactgtgttgtccagtctggtctcgaaattttgggtcaagtgatctgcctgcttcagcctcccaaagtgctgggattacaggtgtgagccactgtgcctggccctcttctttaattctgaacccacagatttaatgaaagttaagctttttattgttggtttcttttcatcatgagcttccgttacttggtgagctgtttttgattattttttgactgttaatgtttgggaagatattttgccacttgctaccgtaaaatgtaaaacgtgttgcttttacagtattgtgacctttgtatttgttattttattttacctccacctgagccgtaagagttaccattactaattgctataatttcttgtctggtccacctacccataatgtataggtgatttggggaactggtcagctctttcaagctcagcaagacctactacatcgaacagctcccctactcttatcttattacctcattaaatggggaagtgagtgcttggcaactgatgttccacttgacacactgtgagtttcattatcccaattatttaaaatgtaaattgtgagtttaattatttttccccttgtcttaaagggaaaaagttttagtgttttgtttttgtttttgtttttgttttgagacagagtctcgctctctctcacccaggccggagtgcaatggcatgatctcggctcactgcaacctccgcctcccaggttcaagtgattcttctgcctcagcctcccaagtagctgagatttcaggcacctgccatcatgcccagctaattttgtacttttgtagagatggggtttcaccatgttggccaggctggtctcaaactcctgacctcaggtgatttgcctgccttggcctcccaaagtgctgggattacaggcgtgggccaccacg

SEQ ID NO: 10025 - DNA, 1124 bp, Homo sapiens
taaaatatgctttaacaattaaccgagctaaaaattctaaaaagcaaaagtgttcttctcatgtttgttttgtgtgttgtttatgaaaaactgagaggaaatttgctatgcatagggactgtatcttatatgccagagtgattatcttcattcctttatctggttctcttgtttcataatgtatttagcttataggacatatagaacttgccttacgtattctcggtagtaataagagttttgtaattgtccttatagagaaaatgtgatggaggatatttgtagtaaactgcaagagattaggaacccaatccatgcaattggactacttatacgggaaatggattatgaaacagaagtggaaatggaaaagggattcaatccaggtaaatgacagaacaacaaatgtgcctctttgattaaaacaatgatgcattcaactccatttttcttctttttacagctcagcctttgaatattcgaatgaatcttacccagctctatggtagtaacacagcagggtatattgtgtgcagaggggtgcataaaatcgccagtactcgtttcctgatctgcagagatcttttgatcttacagcagctgttaatgaggcttggagatgctgtaagtactgcttgagggaaaacttgtaaaatctaaaacctgttataggcctacaagcacttaggagcaaaatgtcagccctactagcacagatacttttgtcttggttcactgctttattctcccaagcttggccttatgagatgctctataaatatttttgaattaagaatgaataagcattgtaatccttgtgagagtatagattaagagcatatatggaggggacggtggggagggagaacatcagaaagaatagctaatggatcctgggcctaatacttaggtgttgggttgatctgtgcagcaaaccatcatggcacacgtttacctacgtaacaaacctgcacatcctgcccatgtaccctggaacttaacagtagattttaaaaaacatacatgaagcagattgctttactcttaacctttgtatgtgtagtagtggaaaattttcccaagttggctctcccaaaatgtagtattattagtaactatgaatg

SEQ ID NO: 10026 - DNA, 1083 bp, Homo sapiens
taaaaatacaaaaattagccgggcgtggtggtatgtgcctgtaatcccagctactcaggaggctgaggcaggagaatctcttgaacccaggagacggaggttgcagtgagccaagatcatgccattcactccagcctaggcgacaaagtgagactccatctcaaaaataaataaataaatataaataaataaaataaactagccaggtgtggtggcacgatgcaccctattagactgaggcaggaggattgcttgagcctcagagttcaggcttcagtgagctatgaatgtgtagtattttatgagtataaaattataacacaatttaatgttgattgtacctaatgttagatatatttggtatctaatattttttaatgtagatgatattagtttgcaagccttaggtagttaaaaatacattttacaaaacaatttttggctggtcccatgataatggattgtcagaacttaacattagtgtcactaaagttggcatacagccctccactgctaaatttggccaaaaataaaaaacaaaccattttgaagcaaagacttgtctaacccctgaaacatctgtagaggctcccttgggacagagcttgaagaccactgaactaattgaaccctctgggtccctgataaccctagagcctaaggtagaattctgggaatgattgccctccagattgacctcaggccatacctgggaagataaaaaaagcactccttgtagatggcatttgagcaaagtagtcagaaagcacaggctgcagagttggagcagggttggaatcctagttgtgcaacttactagctgtgatataccctcagcctcactgtgtacatctgtgaaatgggagtactatatccttcaaagaattataaggcatacatgaataatgtctaaaactgcatctagcataatatctagcaaataataaatgcagaataaaagttagttattctttgtatttgatgccttagtgttaaaatgacattaaagattatgggcttgagatctgaaacaatgagtttcaattttaggaagataattattaaaacatggtaagcaaactt

SEQ ID NO: 10027 - DNA, 1050 bp, Homo sapiens
ttgttgttgttgttgagatggaatcttgctctgttgcccaggctggagtgcagtggcgtgatctcggctcactgcaacctccgcctcccaggttcaagcgattctcccgcctcagtcccccaagtagctgggattacaggctcacgccatcatgcctggctaatttttgtgtttttgtagagacggggtttcaccatgttggccaggctggtctcgaactcctgacctcaggtgatccaccagcctcagcttcccaaagtgctgggattacaggcatgagccaccacgctcggctgctctttttttttttaacttttgttttaggtttgagggtacatgtgaagctttattacataggtgaactcatgtcatggggctttgttgtacagattttctcatcacccaggaattaagcccagcacctaatagctatcttttctgctccactccctcctcccaacctccaccctcaagtagaccctaatgtttgttgtttccttcttcgtgttcataagttcccatcatttagctcccatttataagtgagaacatgtggtatttggttttctgttcctgcattattttgctgaggataatgacctccacttccatccatgtttccacaaaagacatgatctcgttcttttttgtggctgcatatattccatgatatatatgtaccatgttttattcagtctgtcattgaggggcatttaggttgattctatgtctttgctattgtgaacagtgctgtaatgaacattcatgtgcatttgtctttatggtagaatgatttgtattcctttgggttatatacccagtaatgggattgctgagtggaatggtagttctgtttttagttcttagaggaatcaccacactgctttccacaatggttgaagtaatttacagtcccaccaacattgtataaatgttcccttttctctgcaacctcaccagcatctgttattttttgactttttaatagccattctgactgctgtgcgatggtatctcattgtggttttgatttgcatttctctaatgatc

SEQ ID NO: 10028 - DNA, 1060 bp, Homo sapiens
atagaaacaggaaataaccgcaattattaaggtcagttttgtttgatgctgtagtatatatggaggccacattccactacaagcaatggccggggtatggtgttaatttttattatagtagagttaattgcataaaatattgtcctaaataaatggcctatcaagtttggaaatgtctctatgtaacagaatcacagtgaaatttggattttgttatgctgttttttataaatgtacataatgtgatttggcatgcaaaagtggtccaaatctgtttatccaaaattttcaaatttggtgagttcacttggacactgttctcatatatttcagtagaacagtcagtgagaaaagcataaacttttcaaacaaatgtctctttttcaacaggaagacctctggagatacattggagctgatggaggagtcactggacataaatctgttgaataatgccattcgcctaaaattccaaaattgcagtgttttacctggaggggtttatgtctctgagactcagaatcgtgtgataatcttgatgttaaccaatcaaacagtgcacaggttacttttaccacacccctcccggatgtataggagtgtaagttggctaagtgcaatatcttttatttcccaaattactctgggtgtcacaaatgtagtgctggagcgatgtcttttggaattgaaggaaatttggattctcgttatccctcaccaagcatactttgatagctaccgcttaaaatgatcaggcatacattttaagttgagaattagttttcattaagaagaatagctttcttaaacttgacagttttttactttaaaaacttttttagcaatagagaggaactgagcaaaattctggttattttgatttaatagatttttctttttaattactcaacaggagttggtagttgacagtcagatgcagtcaatattcactgacattggaaaagttgatttcacagatccttgcaactatcagttaattccagcagtacctggaatatctcctaattccaccgcctctacagcctggctcagcagtgat

SEQ ID NO: 10029 - DNA, 1258 bp, Homo sapiens
ggcgtgggaggcattctctttaccttctcctgtccaccaccagtaggacctgttcttccttggggctgttttttatagccagtgattatagccttgagggttatcttcttggaaatttttctcactagccctgagattaataagcttctggaaggtctgaattaggagatgggcttctgtcctggtaagctaggcactgaattgcagaggggaaggagatactatccttgcccttagggagctctcgtctcgcctgatgctatttagtcctccactttttctccaagttaagtgatctaaataatttatttgggaaaatgtatgggttctgtgggaaatagctgaaggcatttgggttcttatgtaggtgaagaagggcaaagaccccaatgcccccaagaggcccatgtctgcatacatgctgtggctcaatgccagccgagagaagatcaagtcagaccatcctggcatcagcatcacggatctttccaagaaggcaggcgagatctggaagggaatgtccaaagagaagaaagaggtgagtagcagcagaggaggggtgatgcctctcatgggctggcgagaggtgctgtcttggggtggcgagtctcatgactgataggggagcagtatgagccattggtgggactttctgtatcgattttgcctgcatcaggggagaggggagatgggagaggtcttattcttaactgtttttttctgtgtgtgagacaggagtgggatcgcaaggctgaggatgccaggagggactatgaaaaagccatgaaagaatatgaagggggccgaggcgagtcttctaagaggtgagtgtcgagaacatggcccagtcactgatttttgtggcagacttttttttttttaacaggccgaagttgagcattggaaagttaaagacagcagagatgcttctgactgcagtagggtagtgcttctcaaacctgggtaggccattgcccaagtatgggtgacacaatagggcattcaagtcactggggaaatatggcctcttttcctggaccattttatttgaaggtatgggggaacgaaaaaaatactattatggagtgcagtgcacagtttgcatgaactctaaaagataaagcaagaaatatcaagtaggttttgcacattgggctgctttaggctgtgccctctgattcttctggtgtactcatgatactctcccttggtgccctccaggctgacgcagctatttacgttcagagtgaaatgggct

SEQ ID NO: 10030 - DNA, 1034 bp, Homo sapiens
ggtctgatgggccagaaataggccaagtgcccacccttagagcctgtggttggggtaagcccttcctgagtgggggcaaggtggttcccaacagaaaattgggactctgctctcttaatccagaaggattgtaaaagaatgtcgggcagcaaaaaaaacacccaacaggagtcctctagttcagcctgccacatgcttatgaaggtttatgaaggtttaatgagcaaatacttgtgaaagtgccttgaagactgtccagcagcatacaggtgtaaggtagttgcattgtttgaggagtttcacatatatcagacaagactgtcaattacaggggtaggcactgggttggactgaagttggttttcctctttttgtagtaactgattatcttttcatcagaagactgtaggggccaatccttttgtagttcataaacataatggttgggtgttacgtgcgtgtgtgaaatgtgccaccctccagccttgttacgatgttgacacattacccatctgacatggaaaaaaaaagaagacaaaaaagactatagggtagattaaggtgattactccgagggaagtggtgaagtggatttgggccatgttccaggcatgaatgaggcagtgtttctgccagtggtgtcctggggatggactaggacctggtttggccatgcccagggagatccgctgaagctcattgatttgtttttcattcattaattccaatcaagtaaccaattgctgtggctgggtctggagagggcatggctgaagccaccacagtgaatgggagaaagcagtgttggggattggtggtggatactgtcctctggtcttcctcccttgccccttttgggtgggtatctttggatttgtcttcctcctgtcctgaggccgtggggtcctgtcttccctcctcaagtctaagcctggcttgttctctggcaggtttgacagcaacgcctctgccagctcctccagtaatgagggtgacagtgaccgggatgagaagaagcggaaacagctcaaaaa

SEQ ID NO: 10031 - DNA, 1063 bp, Homo sapiens
ccaatatcacacatacaggaggtgtgagaacccagctcagtggccctgaagttggagcatttgccctcaaggctggggaccaaagagcccatgcaaagagcccgaacgcttaagcaccaccctgcctggccagcggggaccatggtggggaggggataggagaggtgctggcctgggctggagagggccacacacccctgatactccccgtctcgtggacaggttcccatccaaccactttgggacgctgacaggcctgcagtccctcatcagtgctgtgttcgccttgcttcagcagccacttttcatggcgatggtgggacccctgaaaggagagcccttctgggtgagagcgagggttggtgtggggggagcaggagccactctcctgggggcaggggtagggccttgtatgtggtgccatccctcactcatctcagccagaggcacctcagaggtctctaatctgcaggtttccaagttgtctgccttttagaacccctcacggagtgttaaaaatacagattccccagtcccctgaatcaggatatctcagcctgactgtaggagtctgtttttgtttttaatttattgttattttatttatttatttatttttatttttattttttgagacggagtctcattctgttgcccaggctggagtgcagtggtgcgatctcggctcactgcaagctccgcctcccgggttcatgccattctcctgcctcagcctctcaagtagctgggaccacaggcgcccaccaccacgcccagctaattttttttttttttttggatttttagtagagacggggtttcaccatgctagccaggatggcctcgatctcccgacctcgtgatctgccctcctcagcctcccaaagtgctgggattacatgccttagccaccgcgcccggccctattgtttttttttttttgtagagaaggtgtcttgttctgttgcccagtctggagtgcagtggtaaaatcacagctcactgcagcctctgattcctgggctcaagcgatcctccggccccagccttctgagtagctgca

SEQ ID NO: 10032 - DNA, 1166 bp, Homo sapiens
cgggtcaccctggctgagctcccctcaccatacgtttccctacccacagagacaaatgaacagcaacaaaaggtggcagagacaggtagggctatgaaagcagggccctggctcacgcccaccccactgcaacccgcttctcagggggcgggactcctctaggcctgggcccacccaggtaacccttttgtgggatgtaagagtctgggttcagaggaaggctattttggtgctctctggcctccgctggaaggggtgatagtgtccactgagtgccagttcctgaccccactgcccttcccatcctgcccagttgggttctactcctccgtcttcggggccatgcagctgttgtgccttctcacctgccccctcattggctacatcatggactggcggatcaaggactgcgtggacgccccaactcagggcactgtcctcggagatgccaggtgacctgcctgtacagggatggtgacagcaagtggtcaggcagtgcttttcattttctctgtgcgtttacatccagcaacttgttgctttctcccaagaaccctaggagatcaggggtacctccccattttacagatgaggaaactgaggctaggaagggacctggcttgcttaataataagaatagctaatgcagagtgctgactgtgcacttggcaccttgccttgtttagtcctacaacacctctttgaggtagatgcgttaatatcttcattttgcagttgaggaaaccgaggtacagggttgcacagttaggtcattcacccaagatcacacagctttcagtggcagcctccagaacctgtgttataagggtacacgctaaagtcttgttagggctagaataggtagagttggtatattagatatttattgctgtataacaaatcaccccaaggcttggcattttaaaacaacaaacacttctcatctcatacagtttctgacagtcagaaatcagggagagactcagccggctgattctgagtcacagtctctcatgaagacatagtcaggctgtcagccagggctgcagtcatctgaagggctgactggggttggagaatctatgtcagttcaattacccccatggcctctccatagggctgctcaggacacagcacctgctttcccttgagcaagagggctaagc

SEQ ID NO: 10033 - DNA, 1055 bp, Homo sapiens
tctccacagtgcctgcttcactgcgtcctgcaccctcatggccctggcctcccgggacgtggaaggtgagttgtctgtcctcttgtggccccacaagaaaagaataggtgggatgaaggcggatgtttaccccagctcccgcccttggcttcccacagctccccaaatgccctcatctgctgctttcccctttccagctctgtctccgttgatattcctggcgctgtccctgaatggctttggtggcatctgcctaacgttcacttcactcacggtgagtgtcacaggcctggcctggcagcagagttcccccgagtggggtgagggcagagtgagtggggtgagggcagtatgaatgggctgggggaggggcctgtggacgcagatcactagatcaagtgagtgtgtgagaaactgtgcaggtggctgcaaagagcaggtgtgaggctgtgtgtgtgtggatgaggctgtgtgtcggggtgtatgttaatgtgtgtgtttgtgtgtacagagcccatgaatgtccatggagctctgttctaggtcctggactacagcacaatcaggactgaccgagtcatcctccctgctggaggttacattttgggggtgaggggcacagataacccaataaacaagtaaactaataaattatgtcagtcgtcataggtgctgggaagaaaataaaactgggtaacatgatcttgagggggagggagcagcttgagatagcgtgtgcacgcttgccatgtcgtgggagagtgggtgtgtgaccccgtccctgtgaaagccatgagttggtaggtgtgtttgtgagtgtactaggttgaaccatatgaaattgtcgacacctcgtcgtgcacatggcttgacctattacatgtggtgagtggtgtatgtgtgttgctcaaagtgtgtttatttatgtgagtgtgtaaacgcgttaaaggcttaggagtgttaaaggcttagggaggttggaggggaaggttcctggccgggctggctcggactgtttatctctgagaagggctgcctgactgggtggttttggc

SEQ ID NO: 10034 - DNA, 1027 bp, Homo sapiens
agacggagtcttgctctgtcacccaggctggagtgcagtggcgcgatctcggctcactgcaagctccgcctcccgggttcacgccattctcctgcctcagcctcccaagtagctgggactacgggcgcccaccaccacgcccggctaattttttttttgtatttttagtagagatggggtttcaccgtgttagccaggatggtctcgatctcctgactttgtgatttaccctccttggcctcccaaagtgctgggattacaggcttgagccaccgcacctggccgatcttctaactttttaaagagaagcaagacatctggatttttatgtgataactcctgattttaaactggcacccaattataatttacaacactataagggtcaacattgccagcagagcaaaacatgggtgggggcaactgctggtcaccggtgtgcagcctctggtctaaaatcatctttgtatttcttcttgctttacgcattgtcccagcacagtgctgttgtatagtaaatatccagtaagtgggtgtagaatgaataaaccaatgcagataaacctgtagagaggccgggcacagttgctcatgtctgtaatctcagcactttgggaggcccaggcaggcagatcacttgggcccaggagttcgagaccagcctgggcaacagttgaaacctcatctctacaaaaaatacaaaaagtagccaggtgtggtggcatgcacctgtagacacacctactcaggaggctgaggtgggggtatcacttgaactcgggaggtcaaggctacagtgagctgggaagtcaaaggtgcagtgagctataattgcaccactgcactccagcctgggagacagagtgagaccctgtctcaaaaaaaaaaaaaaaaaaaacctgtagagaaatgacagtgatcataaagatcactaaattatagggctagcctgatccccaaaggctgtgtggtccaacccctaagtgcttcctggaggtgtctgagcactttccccacctccttggca

SEQ ID NO: 10035 - DNA, 1049 bp, Homo sapiens
gggatttgggtcttgtcattacatgatctcactagcaggcagggaaccaaccaaaatgaaaagtgacccaagcttactaatactccacagcagacacgtaacactctgcccattatgttgagaaccaagcgcctcggtgatctcaggctccatctgaagagctgatccaggtagggctcaacagtgtattctaggtcaattttgtgtcgaaagagaatagccaactgaaaacacatggacagtcacccatgtgtttcaacaagattggttctttaggtcagaagcctgtgatcttttgagatgaacttctggcaagcaaaggtaaagcttcccttctctttacaagaacttttgacctgcttcggtccttagttaagacaataaagttatttagctgatgtgaaaacatttctaaaacagcaacaaaatgtagcctaaaccatcaaaatgtgaaaaacaaaaacaaaaaacacttttagtttttccagctggttaggtaactgaaaacatccatgagaaaacctgaattaatgtaatctgactttaaatttaacacagttaaaatctgttgccgtgaaagccaaggttgttcctgaatcagtgggtggaaaaccactcattcagctggtttaaatccaggatttcagaataagagtttgctgggtttttttttttttttttttttttttgagacagagtcttgctctgttgcccaggagtgcagtggcatgatctcggctcacggcaacctctgcctcctgggttcaagtgattcttgtacctcagcctcccaagtagctgggactacaagtgtgcgtcaccacacctggctaatttttgtatatatatatatatattttttttttttttttttttttaaattttggagaaagagtcttgctctgtcgcccatgttggagtgtagtagtgcaatctcagctcactgcaacctgcacctcctgggttcaggtgattctcccacctcagcttcccaaatagccaggattacaggcacccataaccaacgcccagctaatttttgcattttt

SEQ ID NO: 10036 - DNA, 1104 bp, Homo sapiens
tacccaagttgaaacagaggctgttactcccctgctatcccactctcgaaaccagctgtccagcagatgcctagatgagggtcatttctcagatagttggcatgtcttacagttttctcaagtaatgcctacctataggcaagctcagttttgtgtcatttgctttatgcagcatcagcatcacctggggacttgttagaaatgcaaaatcttgggccccatcccagacccattgaatcaaaaactcagggtggaagacccagcaatctgcattttatcaagttcccagatgaataatgcacactaaagtttgagaaacactattatgctacacaaaattgagacaggtggttgcaggtatttgtttttcttaaatagtaggacttacggtattcagtttcccttgaatagaccctagacatcatttgacagagtaaataaaaagtaaagtgagctcttctgtgtctcaggggtttagaggaagaacacaggacagcatataaaattactagtttagattcagatctgtaggcctcaaaattctgctaaattgtctgctttttaaagaaagcaaagttgaacaaagcaaggcatgtgaaaaagtgatgaggtaatggaaaaactgcagctatatggtttggttcccaacacctagctgcttctattgtcatgttgtgatctggctgctattatcaaagctgatttctagaaatagtgttttctagatagtctgctttacagaacactgtgcatgctttgcttacatgctgtcttagtggggaagaggtagaactctcatatttacaaaattattgggctatttgtgctcagctgatactgtcagttcccacagagatgtcaaagtcaggatgcatttaagttagaggtataacattgaagttaggctttgaagttaggcctagatttcaatctcagctcctctactgactagtcaggtgtaaattctctaagctgtctttttgcatttgttaaatgaggctaaagcctacttcagaagtttgctctgaaaaaatctcattttaatttagtactgtagacagagccttcagtggaaccagtacaatgcagatgatccataaatgg

SEQ ID NO: 10037 - DNA, 1085 bp, Homo sapiens
aaagcttttaagctaacctggtggcgtgatgggatgcacctctggtcccagctactccagaagctgagaagggcaaatcgcttgagttcaggagttcgagttggaggttacactgaactatgatagtacctttgcacgccagcctgggtgacagagagcttgtcttaaaaaaagtaaagaaggctacggtgttgtagaggaaagatcccagactttgcaattatagtaagtagcaaagctaccaattaattatcttagcaagttgctattacatgaacctatttcaccattggtaaaaagggggaaaaaatctatttcacagggccataattatagttccttacgtattgcttttttatagtaggccttttgtaaatgtttaattcaaggtgaataaatcacagtggtaaaaaaggtgaagagttaacctcagtgttactttccaaagaaattgctataaggcagtgtatctaggcagggattatgcttaattgagatgcacacagtttaacatctggtgtcaaacctggcttccttctttgtgaccaccctatagatgtttgcttttgggaccactgagtaaaccaggccctgagaatccaagcatgaatccacttctgccctacttttaaggatttacgttccatgcaggaaagcagataaccataatttctgaataaataagacaacaaaatgaaatggatgctggtcaactctgatgcaaattttaagaaggagactatgcctctgtgtctcccagcttcacagaaaaaaaaaaaagaaaaaagaaagatgctcagagtggggtacctacacttggaaaaaacgcaagtataagtctgccattcccatgaatccaagatgaatcctggcacagagtaggtcctcaaattttgcaaaattaattttgaatctttatcaccctggccaatgcactgccataatgcaaatcttactatctacctttctatgtcagtcacatttttaaaactgtgtaacctatgaaaaaaaaaaaaaagctcaccaaatcaaaagagaggaagtgctaagcaaatacaggaaccaaaaaggtttatagaggctgc

SEQ ID NO: 10038 - DNA, 1045 bp, Homo sapiens
gtattttccatcgtgaatagtatcacaatgaacatataagttcatgtgcttttttcatagaatgattcatttccctgtgggcatatatcagtagttctgtttcaagttatttgagaaatctccaaactgttttctatggtggctgaagtaatttacattcccacaaatagggtgtacatgctcccttttctatgcagtcttgccaccatcagttgttttttgactttttaataatagtcattctgactgttgtggaatggtgtctcattgtggttttgatttgcatttctctgatgattaatgatgtcgagcatttattcatatgtttattggccacttatatatcttcttttgagaagtgtctgttcatgtattttgcccattttttaattgggttcctttttgcttgttgaatttattaagttccttatagattctgggtattagacccttgtgagatgcatagtttatgaatattttctcccgtatgtaggttgtctgtttactctgttgatagtttcttttgctgtgtttatttcttagttgtcaattttttttctgttgcaatcttttttgagtacttagttataaattattctccaaggtcaaagtccagaatggtgttgcctacattgtctgttaggattattatagttttaggtttgacatttaagtctttgattcatcttgagttaatttttgtatacggtgaaagtaggggtccagtttcattcttctgcatatagctagctagctatcctagcaccattttttgaatggggagtccttgctccattgcttttgtggtcaattttgtgaaagatcagagggtgtgtggctttatttctcggttctctattttgttccattggtctatgtttatgtgtttgtatcaataccataatgttttggttactgtagccttatattataaagtcaagtaacttgatgtctctggctttattctttttgcttaagattgttttagctatttgtgctcttttttgattccatatacattttagaatgattttttctagttatg

SEQ ID NO: 10039 - DNA, 1056 bp, Homo sapiens
tagagataacattagctctagaaactcttgcacaactttcaagtcctcacctcaatgcctctggctggatttttgttggctggatgacttcacacaaggggtgctcacaccaaatattgaacccagagatagagtatttcatagaaatatttctgctattgtgggatcattctaatgtccacaatcctacctaaagctaagcctagaagatgattcaaactttgctcctctaggcaacacaaggtaagtgaagtgtgaacgttgctttgtgctgcacttggccagcctctggactctagctttattaagagaagatgacagttgccaaaaaagtaacttgttgctaaaaatttaccaaagttggttagttaagattgggttcaagtagcaatgatcaacttgagttactctgagcatgaacaaagtgttttatttatttgaatataaattaaaaatataaagatatggattctcaaatacaagaatatagattgacccccaggaaaaaggatagaccctggaaatggaaaactaccaggggctctgggaccactttttctccatgcttgttttctctggacagacaggcttaaaaagtacacacacacacacacacacacacacacacacacacacacacacacagtggtaaaatatatataacataatatttattattctaaccacggtaagtacaatgcagcggtattaaatatatccacaatattatataaccattctcattgtttcagaggcgcagactgcagagccgcccaggtcctgagcctgggagggcggttgcagctgcacctctgggagctctcgccctgccaatacgcaagaggcagggctcccgcttgtcccctgctcccctggctccctgtagcttgcagcccccgggatgcctccgaaatgggaacgggcgctgacagcggagagaagccacgcagtgggagcaggcacttccgagcctgtgggaggcagaggggtcttcctgggcccccaagaacacagagacgcgtgatcccgagagccgagagccgtggcagggcggct

SEQ ID NO: 10040 - DNA, 1050 bp, Homo sapiens
tgcttctactctcagggagctgagctcaatatattgttgagtaacacttccaaatcatagtgtccatctttacattatcctaagcatgcttgctagtccttgctaattctagtccactctttctcccattaacatcaaaagccatttaaaccctaactgtttcccataaaatcctacttctttttctcgacactttcttggcatactccctcacccacttactgctaaaaagtgattttggaaataggaaaaaattttacctcttccaggaaacagacattcaaaaataacttgccaactctctgctctttttttctaaccctgtgtactcccatataaaattagtcctcacttaacattgtcaataggttcttggaaactgcaatttcaaatgaaacaacatataacaaaattaattttaccataagctaattagtataaagaagagttaagttcctacagcatatttctggtcacaaaaacatcaccaaacttataaataaagaacccaaacacttctaatataaaacaatgaactaaatggaaactgcgtatacatttaataaatattaataaaaacaagataattatttacctaatttttggtgagtctgtgtgatggtggtcacagtagtggtgggttaaattgagaaataaatgtttgcaaagcaaaagttgtaaggagcacctcttgcctctatgaagttaaaattcaatcacaaatatggtggcctcactgagtcctttggcacagcattgtttattgtcattcatttgtatgattatcatagacttcatgaatttttgttttattatgaatgtttcattcattcattcattcattcattcatttttcaactggctttttccagttcaggggagcaagtgactgaagcctgtcctggtagctcagagcacaaggcaggaacccaccccagactggacacctttccatcacagggcgcacacacacacacacacacacacacacacacacacacacacacagagtctcactcatcctgggacaatttagacagagaaaatcca

SEQ ID NO: 10041 - DNA, 1110 bp, Homo sapiens
gaggactggatcctttttttcaatgcagagagttcccttccagcccagcaaatgtctagaaatgttgtctgggagctggggcctggaacgggggcctcacaactctatttggtgccttatcctgttgtggctgagctgatatccaagatgcaagatgaagttcgccttactgtttctttttcattcctcaagcagagggaaggagtctctttagcagctgtgagctatgcagcctggggttagggaagaggtgataccagctctcctttgactgacccagctggtgtctcagtatgtcaagtgtccccccagtccacaatttctgagcctaattcagcactaggactcacttaagagttgcagtccttatggtttacactgcctttcacgtttacttggaaacacagagaactttaggccctctgtggtgaggttttcagtcactgaagttttgactgctgggattggtgattcccctcgggttaggactggtttaaatgctccctctgcctccatgggcaggtgtcagctgagtttggtctagttttcctttgtgtctaacatgacagcaatgagttcaatgcctcataattgctgtgttctttctacccccgtgcccagagatatactgtgcaccacactactgctactgaggttgggagggatggggattggtgattcaagactgttttttactgtctcttcagtgcctctttcagggatatgaagtcaaaaccaggtactatgagtgctcacttgatttttggctctcatgaaggtatttttttctgtgtagttgttaagttggtgccttgtggggtatggggaaatgattagtggagccttctattctgccacttgctttgcttctcctccccattataaactatataaaaaaaatttaatggctcaagaaattacttaagtaatactcagtatagaaaaaaaatatgtgttctctcaactatccacagtttgctgtcaattatggaataaaacatatgtattgactagttgaaatggaccattttttaaaaaggatgattagtttactgtataactctataaactttgatatgtatttaacaaaataatcgtttacaattatga

SEQ ID NO: 10042 - DNA, 1314 bp, Homo sapiens
aaaacttctggtgattatttattgctcactaatgttcctttctttctcaatgttctgttctttctttagcatttcttgtaggaaaggtctgatattgatgaaatccctcagctcttgtctgggaaagtattcttccttcatttttgaagaatatttttgtgagataatattctagggtaaaaggtatttttccttcagcactttaagtgtgtcatgccactgtctcctaggtttccactgaaaaatctgctgtcagatgtattgtatctccattgtatgttatttatttcttttctcttgctgcttttatgtttctttctccttgacctttgggagtttgattttaaatgccttgagatagtctttgggttaaatctgcttggtgttctacaactttcctgtactcagatactgatatctttctctggtatggggaagttctctgttattatttctttaaataaactttctaccccatctccatctctaccttctctttaaggccaataattcttagatttgccctttcaaggctattttctataacctgtagatgtgttttgttgttttttaatttttttattttgtatcttttgaaagcgcatttttaaatagcctgtcttcaagctcactaattcttttttctgctttgttaattctgcgaataaaggtccctgatagattcttcagtatgacaattgcatttttcagctccagaatttctgattctttttaactatttcaatctgtctgttaaatgtatctgatagaattctgcatttcttctctgtgttatcttaagtttctttgagtttcctcaacacaggtattctgaattctctctctgaagggtcacatatctccatttctccaggattggtcccaggtgtcttattaagttgatttggtgaggtcccattcttctcaatgctgtagatgctagtagatgttcttcagtgtctgagcactgaagagttaggtgtttgctctagtcttcactgtctgggcttatttgtagccatccttgttggaaaggctttccagatatttgaaaagatgtaggtatcatgatttaagctgtctctacttcagagagcatcccaagcccagtaatactgtggtttttgaagactcataaaggtaccgcctcaatagtcttggagaagatatgggagaattctctggattaccaggcagagactgttctgttttcttcccttactttctcaaaaaaaaaaaaaaaaaaaaaaagcctctctctctgttctgagccaactaaaattgggggtggagtgacataagcactcctgtggc

SEQ ID NO: 10043 - DNA, 1034 bp, Homo sapiens
caaaacctagattgcagcaccatctatttacagcgtggtttactgaatattttaagcctacaattgagacctaatgctcacgaaaaatatattcttataaaaatattactgctcattgaaaaagcacctattcattcaagagctctgatggagatgtacaaggacattaattttttttcatgcttgctaacatacatccattctgcagctcatagatcaaggagtaatttcaactttacaagtcttattatttatcattctctaaggctatagctgcaatacattgtgatttctctgatggatcagggcaaagtaaattgaaaatctcttggaaggattttccattccatatgccatttaaaacattcatgatccatgggaggagatcaagctatcaacatcaacaggaatttggaagaaggtgattccaatccttgcagataactttgaagtgttcaagatttaaatggaggaagtaactgcagatgtggtggaaataacaagagaactaaaattagaagtagagcctgaagttctgactgaattgctacaatctcatgataaaacctgaatggataagaaattgcttcttatggatgagcaaagaaagtgacctcttaaaatagaaactactcgtggtgaagattttgtgaacattgctgaaatgataacaaaggatttctaatgttatgtaaatctatttgataaagctgtagcgagggttgaaagggttgattccaattttgaatgaagttttactgtgggtaaaatgctaccaaatagcattttgatttcagacaaatcttttctgaaaggaagagttaatcaatgcaacaagcttatttgttgtcttatttttagaaattgccttagctaccttaatcttcaggaagtcccaccctggtcagcagccatcaacactaaaataagaccttgcaccagcaaaaaagattgcaactctttgaaagctcagattatccttagcatttttagcagtaaattattttaaaattactataggtactttttaaaga

SEQ ID NO: 10044 - DNA, 1250 bp, Homo sapiens
actagtaagcaattcagtaatgtggcaagatacaaaatgaacatacataaatcagtggtgattctatacactaacagtgaaagatctgacaaagaaaatcatcctgtttgcatagatacaaaacataaatacttaggagtaaacttaaacaaggtggtaaaagacttatatagtggaaattattaaacataaatgaaggaagtgaagaaaacacaaataaatagaaaaatattccttatttacagattgggagaattaatactgtcaaaatgacaataatggcccaagtgatttacagattcaatgcaattcctatctaaataccaatgacattcttcaaaggaatataaaacaccaaaaaatgtatgtgtaatcacaaaagatccctaagaacaaaatcaatcataagcaacaagaacaaagctgcagatatcacactacctaacttcaaaatgtactatgaagcaatagtaatgaaaacaggatggtactagcataaaaacagaaacatgaagtaatggaacagaatagaacatccagaaataaatccatgcatttaaggtgattgatttttgacaaagttgccaagaacacatgaatgaggagtgaacagtctctttaataaatgctgttgaaaaaactgcatatccacatttggaaaattgaaattagaccttatctcacaccatgtataaaaatcaaccaaaaatggtttaaggacttaaaggtaggacctgagactgcaaaaccactagaaaaaaacacaggagaaaagcttcctgatattagttggggcaatgatttttggatggaattcctaaagcacagataacgaaggccaaaatagacaaatgggattacatcaaactagaatagtttctatacagcaaaggaaacaatcgacaggaagaagaggcaacctatggaatggaagaaaatctttgcaaaccatacatctgaaaagaggttaatatttaaaataataagaaacataatagcaagaaaacaaataatccaaattaaaaatgggcaaaggccctgaatagatctttctctctctctctctctgagtttttttttctttttgctagtttataataatcttaaaaactctatcacacccataaaccacacaggtgagaggatgagagagagagagaatgaatgctacaatatgtggacagagtggggaatccaggtattccctagggtagtgtggaatggaggcagggagtgtgaataggaggctg

SEQ ID NO: 10045 - DNA, 1047 bp, Homo sapiens
cagcaaaaatggaaactcaacataccaaaacttgtaagatgcttcaaaacatttacattgaaaaaaaagaaagatcttaaacaaccaaatgttacacttcacggaactataaaaagaacaaactaagcccatagttaatagaatgaaggaaaaaataaagatcagagcagttaaattaaatagaaactataaaaacattaaagaaaaaccctgaaatttgatcttttgaaaagataaagaagattgacaaacctttatccagacgaggggaaaaaaagaaaaaaagataaaaataaaatcatacataaaaaggagacattacaacttatatcacaaaggatcagaatagactattatgaccaattatatgccaacaaattggaataatctagaataaatgagtaaattcctagatgcataaaacccaccaagatgaagaaattgaaaatctaaacaaaccaataatgagtaaggacgttaaataagtaaaaaaaatattccatcaaagagaagcccaggaccttatggcttcactgctgaattccaccaaacatttaaagaagaactaatgtcaatctttctaaaacccttccaagaaatcgaacaagagggaatacttccaaagttattttacaaagttgttgttaaccctgataacaaagatagggacacttcaacaaatgaaaataataggcaatagcactgatgaacataggtgcatcaataaaatattaatactagcaaactaatctcaacagcatgtcaaaaaggtcattaatcatgatacagtgggctttaacatagggatgcaaagatagttcaacgtacagttctataaatgtgaaatcccacattaacagaataaaaaacaaaatccaatgatcacttgatagatgcagaaaaagcatttgataaagctcaccatgatttcctgattatgaactctcaacaaatgaggtatagaagaaatgtagctcatacaataaagacaatatatgataaacccacagctaacattacacttaatggtgaaaagtgaaaaacatt

SEQ ID NO: 10046 - DNA, 1026 bp, Homo sapiens
catatgcaacattaatctgccttcctgtatttcctctgtaggacttgtggagcaaggaggactgacagaaacaagtaaatcgttctgcctgttgaaggagtcataaaatcctgcctttacccaggaggcttgtgtcatctgccagcatttgtaaaactgtgccccaagtagggtaaacttttagatgcttcacagttcttggcagtcttttctggatggagaatgtctttagtcttttctcaatggaaaaccagaatgctccttttaaaagaaaagctagattttgtcattcttttgtgcaactcctgcaataactcccaatctcattcaaagaaagagatataaaagccttataagagccctctaagttctccatgacttagactccagtcacctccctgaaatccctccagtcacatccctgacctccatctctttagcctctctgcttcaagcacgtagctgtcctttttcttctgcatgcattctgttttatcattagacctatagaaaactctattaccttctttaagtcttcacctaaaagccacctgctcaatgaggtctcctttgaccatcctattaaaaattacaactgttcccctagtctctctgcaatgctcctgtgccccattgtcattctctgcctgtaatttttttttttacagggtctccctctgtcacccaggctagagtgcagtggctggatcataactcactgcagccttgacctttcaggctcaagcaatcttcccacctcagtctccggattagctgggactacaggcatgaatcactatgcccagctaattgttttattttcattttatagagatgcaggcgggggtctttgtttttcaggctggtctcaaactcctggttatagttttataaccttctgtgctaaactctggtaccttaaaatatctagcagagacaaatataaaacccagacaaaaatgtatgctgacaattctgaagacatttctatttttattttacaataattttaatgctatcttgcta

SEQ ID NO: 10047 - DNA, 1044 bp, Homo sapiens
ttcacagccgaattctaccagaagtacaaggaggagctggtaccattccttctgaaattattccaatcaataaaaaaacagagaatcctccctaactcattttatgaggccagcatcatcctgataccaaagcctggcagagacacaacaaaaaaagagaattttagaccaatatccttgatgaacattgatgcaaaaatcctcaataaaatactggcaaactgaatccagcaacagatcaaaaagcttatccaccatgatcaagtgggcttcatccctgggatgcaaggctggttcaacatactcaaatcaataaacgtaatccagtatataaacagaaccaaagacaaaaatcacatgattatctcaatagatgcagaaaaggcctttgacaaaattcaacagcccttcatgctaaaaactatcaataaaataggtattgatagaatgtatctcaaaataataagagctatctatgacaagcccacagccaatatcatactgaaaggacaaaaactggaagcattccctttgaaaactggcacaagacagggatgccctctttcaccactcctattcaacatagtgttggaagttctggccagggcattcaggcaggagaaggaaataaagggtattcaattaggaaaagaggaagtcaaattgtccctgtttgcacattacatgattgtatatttagaaaaccccatcgtctcagccccaaatctccttaatctgataaacaacttcagcaaagtctcaggatacaaaatcaatgtgcaaaaatcacaagcattcttatgcaccaataacagacaaacggagagccaaatcatgagtgaaatcacattcacaattgcttcaaagagaataaaatacctaggaatccaacttacaagggatgtgaaggacctcttcaaggagaactacaaaccactgctcaaggaaataaaagaggatacaaacgaatggaagaacattccatgctaatgggtagggacaatcaatatcgtgaaaatggccgtactgcccaaggtaatttat

SEQ ID NO: 10048 - DNA, 1022 bp, Homo sapiens
gcgccactgcactacagcctggaagacagagcaagactctgtctccaaagaaaaaaaaaaaaaaaaacaaggaaaaaaagaaattgttgtaaagtacacataacacaaaactgtttaaccgtataattcacattcacaacgtacattcacaatgctctacaagcatcacccccatccatttccagaatgtttttgtcatctcaaacagaaactgtacccattaaaacacaattactcgttccctgtatctagccactggtaacttttattttactttatgactctaggaatttgcctattctaggtacttaatataaatggaatcctataatatttatacttttgggtctgggttatttcacatatgttgtattacgtgtcagaatttcattccttaactggaataattttgctttatatatgaaacataagtttaaagtacactgaagagaaataataaatttgtgaatgacagttagtaaatatgagttgcacacagacaattgtcactgtgaagactatagaaaagcaattataatgaatgatgggtaaaaaaagcaaaatatataacgtgtatatatcttcccaaaatatgcatgcacatggacaaggacttgaagggaataaataaacatgaaaattgttttgggtagtgaaagaatgtgtgatttatttcttattttagaattttctgtagtaccattcacatgttttttatttttatgcaagattgaaaaaaaaaatggaagggactggaaccatagttaaagatgagaattatgaaaacagaataaatgctatttttctttattttttttccccagcagtcccaccagctatcaagtttccccttttataaggtagaggaaaaacctccccatgtcccatgattgtttacatgcctaatcctgtcacccacagccatcaacaaagagtgcaaggcagattattctaaagagaataacagttgacaccctgtactgcccaactcattcttagccaaaagggactttactgaggac

SEQ ID NO: 10049 - DNA, 1309 bp, Homo sapiens
tgaatcagaacctcaaagtgttttctgaccactttggaactggaaattagaatgcatgttttccagaggaatgagattacacaatgtaatacatatgaaatgcatacctggcatgaagtaagaacaatatttaacatatgttagtttttttaattgacttcataataatcaacatgtcatatatagatttaacaattaaatccaatgatgtaaaaataattaaaaatgtgaagaacttacaacaaacttagttaatgtaagagaagtaaaccatggattagatatttgaaacaatcattagcaaattagttaatacagatgtttgaaattttttatctttgaaggttaaatagttaactaatatgtcttaagtaataggcaaggtgaaacattttgtcttgtctgaggtcaaagtcctcaaagttaaactacgttctgtagctaggtgaagcaatgtttaaacaaaggcatccttttgcaagagctcagaatttcagaatgtttgaatactcaaggaaattttagtaaatagaactggatctctgacatgagtctatcccctgtttgactctgctgtttttgtagttgtaaaacaaacaaacaaacaaacaaaaaacctggtctttttttttcccacctccaacagagctttctttgctgtttctcacctgatttaactaaaattacccatacacttgtgttttactattgtcttctcctttaaagttttggtaaaaattttgtaagttttaattcaagatctaccatgctgtatcacaccccacaaaaaacttgtgttccatctgtcttgagaatattgtagccttggctgatacatgagaacaacccccacactaatcagctgccacatctttgtccaaatacctctcctatccattccctactccatccccttgcaatgaccttagttcagggcctcctcctcctcatacttaatattgctcttatgaccccatcctggcctcagcttctaacatctacccaaataaaagtgttctctacccatattcttaacatcaacatttcttttttaaattaggaagctgctaaaatcctgggtagacccctccccatactctttaagaaactgttggccgggcacggtggctcacgcctgtaatccccgcactttgggaggccgaggtgggcggatcacgaggtcaggagatcgagactatcctggctaacatggtgaaaccccgtctctactaaaaatacaaaaaattagctgggcaaggtggcgggcacctgcactcccggctacttgggaggctgaggcaggagaatg

SEQ ID NO: 10050 - DNA, 1037 bp, Homo sapiens
aaactatactacaaggctacagtaaccaaaacagcatggcaccaaaacagagatatagaccaatggaacagaacagagccttcagaaataataccacacatctacaaccatctgatctttgacaaacctaaaggaatccctatttaataaatggtattgggaaaactggctagccatatgtagaaagctgaaactggatcccttccttacactttatacaaaaattaattcaagatggatcaaatacttaaatgttggacctaaacccataaaaaccctagaagaaaacctaggcagtaccattcaggacatcggcatgggcaaggacttcatgactaaaaccccaaaagcaatggcaacaaaagccagaatagacaaatgggatcttattaaactaaagagcttctgcatggcaaaagaaactaccatcagagcgaacaggcaacctacagaatggggaaaatttttgcaatctacccatctgacagagggctaatatccagaatctacactgaactcagaaaaatttataagaaaaaaatcaaacaaccccatcaaaaagtgggcaaaggatatgaacagacacttctcaaaagaagacatttatgcagccaacagacacatgaaaaaatgcacatcatcactggtcatcagagaaatgctaatcaaaaccacaacgagataccatctcacaccagttagaatggtgatcattaaaaagtcaggaaacaacaggtgctggacaggatgtggagaaataggaacgcttttacactgttggtgggagtgtaaactagttcagccattgtggaagacagtgcggtgattcctcagggatctagaactagaaataccatttgactcagcgatcccattactgggtatatacccaaaggattataaatcatgctactataaagacacatgcacacatatgtttattgaggcactattcacaatagcaaagacttggaatcaacccaaatgtccatggactggattaagaaaatgtggcacatatacaccatggaatacta

SEQ ID NO: 10051 - DNA, 1073 bp, Homo sapiens
aaagtgctgggattacaggtagaagacaccatgcttggccctgagaggtaattttactggtagacatctgccttggtttttgtttctaagccactgttctaatatctcagacaccgaacttttcctgtaaattggcctcctttcagcccctgcaggtgacccctgccacctcaaagggcccttaatctgtgagtgtcagccttgtccttttcctccccttccccctccaccccttttcccagaagagtcctgtgctttacagaaagggtgggaacatgtggcactcatgcaaggtgccaagtactgaaggagtgttttaaaatactcacgtttcctttcaccctataaaagcagccctggtgtctgaaatggtcagttcctcaggccctttgggcctgcctggctccactagtccctgtttgtgtgcctacctgttttggtggttggataataactatctgatactcgggccaggagtccaccagcacctccatgttgaaggggttcctatgattgatgtgatacacacagccatatatatgaaggagagatggaaaggactaggagaggttgagatccctagagatggggatctggatgtgaagaggaagagaaaaacggaggtcaaaagacagtactgggactaagtcagtaatggtgagatgagcagcatctccaggaccatactgatggacgtgaagttaccagcaagcaggcagaactcacagataggtgtccttgtgataccaaagagctactgtgcactagcttggcacttgtcaatgctcttagcacttacattgtatggatttattcagtgttcacaacaattttaagaggtaggtgctaatattattcccatttcattgatgaaaagaccaaaggtaaaggcacagaaaagtaaagaaacatgcacaaagccatctgactctcccactgccccctcaccttcagggactcaggaatgctcacggccagggattcgtacagggccagcagcatctggcaattattcagcaggatcattttgtgggatgcttcattccttgagcccttcaagaagaaacctaaaa

SEQ ID NO: 10052 - DNA, 1044 bp, Homo sapiens
atgagaaaagactagaaacaaatacagaaatagatacaaaaatatataaacatgttatatgacaaaatagagatttatgtttcagtagtggaatcacttaataaatagtactaatgtaattagccagccataaggaagaaaagtataaaagaatgttaattcatgctattcaaaaatatattccaagtagaatgaatattgatatgtcaaaagtaaaaattaactcactgtaagattaaataagaaaacacttgtatgatcttggagtaggaaaaatcttcctaattattaataaaaaaaacaaaaactcagaggacatagtgaaaaagataatacatttgattacatgaaaattcaaaatttcttcatgtcaaaatctccatcaatcaagtagaaaataattctaaattgggcaacaaatttgtagcatacaccttgtgttagtatccctagtatccaaaacacttacagaattttaagaatgacacaaaaccccagtgtaaaaatggtcaaacaacataaacagttcagaagtaaaccccaaatgactgataaacatatgaaaatataatatgttgaatattaatagggaaatgcaaattaaatctacaataagatgccatctttcacccaccagtttggcataaattgaaaagggacaacattcagtgctggtgagaatgtgaggaaacaattcttccacacattgctaatggaaataaaactgtggaatcctttgagaagataatctggcagtgcctacttaggataaggtaaactctgacttggagatatcccttttggaaatcaattgtattgagaaaagtttccaggatgtaaagacatgtatacaaggatgtttattgaagcattgtttttagtggcaaagaagtatgaacaatttgaacccaacagcaagagaatgactgcctaaatagcattgcattgactctatggaatgccacagttattaaaatgaatatgttaatgctgcattgattcacccgaagggatgtccatatgtgaaaggcaaattaaaaagtg

SEQ ID NO: 10053 - DNA, 1049 bp, Homo sapiens
ctcaagaataaactatcaaaattgactttcaaaaaaacagaaaacctcaacaaactaatagaaaatattggaaattaaatgaaatatctaccctttaaaaagtggacaagtattatggcctcctgctccatccatattgctacaaagaacaatattttattcttttctattgctgcatggtattccataggaatatatgtaccaagtatttttttaatccaatctactattgatgggcacctcggttgatttcatttctttcctattgtgaacagtgcagcaatgaacatacaacaggatgtgtcattttggtagattgagtcattttcttttggctatttacctagtaatggcattgctgggttaaatggtaactctgttttaagttctctaagaaatttccagactactttccacagtgcaataatcctaagcaaattaatgctgtaacagaaaactaaatatcacatgttctcactcataactgggaactaagctttgaccatacatggacataaatgtaggaacaatagacactgtggactactagagggtggagggaaaggggctgggttagaaaactaactattgggtatatgctcactaccagggtgatgagatctgtccgtactccaagactcatcaacgtgtaatattcccatgtaacaaatctgcacatgtaacccctgtatctaaaaggaaagttgaaattaaaaaataaaaagtagccaaaatcagattattttatatttaaattctacataagccaaaaacaaacacataattttaatactagactttggtaacagatgaaaagctcctaatgccaaatctggcaaggaaataacaaaaagagaattattgcccatattcccttatgaatacagatacaaaaattctgaataaaatattcggtagtatatcaaaaggatgtgaacatgaacagtttgttttagaaaggccagaatggctttgatcggaagatcttttagtgtaataaattaaaggaggaaaaatttcatgactatataaattgccaaaaaaaaaga

SEQ ID NO: 10054 - DNA, 1027 bp, Homo sapiens
agattgttctacctctcccatcccccagagtttctgtgaatttacattcccaatgtaatgatattgctaatggtattagttgaatgctaattcaactaatgaatgaatgaatggatgctaatggtattagctgaagactcaatttgagaagcactactgctagcccatttcttcagactcctccaagggagtatctgtttccagtttatgatttcacaatttttcaaaacttcttgtgatttttgaggagctttggagaatatatgatatacatttgtgtaagaatccatgttgtcagtcatatcctgtataggatggtgaaagatcagatcattcccttgaactttttcttcacctcccactgattgcaattatcagaaaaatgaaaattcaaaagaaaattttaacagtggcctacgatggctgcagttgggcacatggataataaaacctaggcctataagctactgctgaccacttgcctgtgtaactggagtttgttaaatgtttcactgacagatactggttataaacctacttattagataaagaacaaagacaggatgaaattagtcaccctccaccaggccttaagatgcctcacctttctttctacccactcaactgcacatttaccttattttatatacagcatcaccgagcacccagcacaatcaagattgcaacaattgcttctctccctgcttctctcacctcttgggccacacatatcccctgttatatatactgtgccccacgtaacctcctgtgggacacattctgggttatactgagtctgtgttgctaggattaaatttttaaacttggctcaaagtaaatttaactgtgatttctctaatttttagtgcctactgtttcaccagacacctagaatctgtagtgtcctagagggtggagggaaaggggctgggttagaaaactacttattgggtactatgctcactaccagtgtgatgggatctgtccatccagggcttgggcaagatactttagtgaataccaacat

SEQ ID NO: 10055 - DNA, 1029 bp, Homo sapiens
gtcttcttttgtcatctgtattatctgtattagcttttgcatgttgagtgaaaaatatagctgttttcacattaccccaagttcccgagtttattttttacgtaagaattttccaccctttgaaattccaaatgacatgtttcttctctttttcagaccatgctttcatttcagtcaatgtaccaaatcagccaggtcttagtttagaaatctgatttgtccaattcatactaagatgtaacagatctaccacagccttctaagatgaattggagttttttttaaagctccatgacctacacaattccttaattgctggaactgcacactttaaaatcacatcaaatataaacattcaattttgtggaggcttactttttatggagagatgaggataggtgttggttaatactggtagactttactcccaaagccaactccattaagatttcctttgtttttttaaatctagattatcagaaagaatgaaaatgctttttttttttttttttgctatagctgcaatgttcacagtaatccaagttccaatggcagggtgacagagcagagccaaaggaagccacattttgttcgtgaagtgtaattcttttttaagatcagggattcagaattgtaatataagtatttaattagaaagttcttatgatagtgcttggcacgtgtcctttccatcatctgaattttctgctttttttatctggctcactcctactcactctccagtcctcaccttagtagtcacttctcccaggaatgcccctgaccccttaagatagcagtgctgcaaacaccaagcgctgaacttataaccatacttgcaggcaacaccttgccctgtgctgtgcttcactaatgacgaggaagtaagaaagagtaggagaaaggaggcacaacaagtgtcatttccatagcagaggccacaaggccagcccacttgattctctggagattcttttctgcataacaatgatgaaaggtagcctaggaaagccatttgtcttaggcttt

SEQ ID NO: 10056 - DNA, 1119 bp, Homo sapiens
gtttcataaatagtttttatgaagtcagggaatatgcttacaaagggattaccaaggccctataacacatgagtttgggggcacagggagatcaagatttagaataaagttaggtgagatctagggccaaaggatagcaggaggatgtgtgtgtgtgtgcatttatgtgtgtgtgtgcgtccgtgtgtgtgttggttggggcaggtgggaagcctttggagatggctgctagtggggtgctgtgatctctaggccttggtaggtccttgtgaagacacacagttctaaaaggttggcacccttataggtttttaaatatttttgttatccacaggggtgaccttggacatcattacaaaaatataaaaatttcacccctgggcatgcaggttacccttctcatggtggcatggcaaggcttgatttataagagtttcttttggactgtccccaattttttcctttaaaaatgggagctccttcagggtgaggaaggaaggaggaaatcatcccttctaacctactttctcttcttcattccaaggactctagaaaggcacagcaggtttggttttgaaatctgtggaattttagtgctgtccattctcccaagtggatgcctttactgaaggtaaaaggaaagactgtttgctgtgtcaagggaagtttcatatgcaaatcccaagactcagatgttatttcagaggagttagtgtccatagtaaagtaaaactggcccgggttcatctgcctacaagggcaactgtatgaggcaaatatgagggaactggcagaacaggaggtggaatcttccttggagaaagagtaaagagaattctaggtggagaggggatcaaggtgtggaccaaacacatatctgtcttcttaattcctatatgaaacgttggaaaagactttagaaaaaacagtaaatatgtcatagcaggaaaacaaagagcagtctgggccaaaatagaaaccgttaaaataaaaacaaaacaaaacaaacacgtttaagtttgaaaacgacagaagttaagaagtggaaagttgcctaggatatgcttttattgcagcctctctaataaacccgtccctactccatctttgtgtccttgt

SEQ ID NO: 10057 - DNA, 1137 bp, Homo sapiens
ctaaaatgtggattcatagggcatcagtcccctgagtgtaaaagaaaaaatatttgcgtatttataaggctgcagaaattatattcttctgagggtcaaataaatatatttgtggttttgaaagtcttcacatattatatcagtagcatatttacatccaggaaatattggagaaagaattttattttattttttttaagatggagtcttgcactgtcgcccaggttgaagtgcagtggcgcgatctcggctcactgcaagctccacctcccaggttcacgccattctcctgcctgagcctccggagtaactgggactacaggcatcccacaacgcccggctaattttttgtatttttagtagaggcggggtttcccagtgttagccaggatggtctcgatctcctgaccttcgtgatctgcccgcctcggtctccgaaagtgctgggattacaggcgtcagtcactgcacccggcctagagaaagaattttaactaatcaaataggaacagagatctcagataagagcagataaaaaaaaaaaaaagaggaaacaatagtgagttaaaaacaatctggccaattttatgtagaaagttaactctaaatggacaatgttaggctctccaggaagtgtaataaaagctttaaagaagggttctttaaatagaagagacacactgcaagggaaattctgaccatctggaactaaaacagccagagattggtctcagggggatgaatggtagaagaataaaaacatttgtctcacttagcacactcatctggatgtgaggaggcagcagaacagggaaatgaatctattggaagatgtcgtcttattggggtacaggagaaaatggagaataactggtactttattttatataatagtaaagaaatttgtgttcaattatgagcattagaaacaaatactagtgattgaataaaaattactaagggaatattatggataattaagttaataagagaacttgatggataagtgaattaataagactccatagtggaggcaatttcctcttttaaaaagcagtatctcttgaatatatacaggatatccttttcaaaagaaaaaaatgtatatggggaaacaattttcactcattttctagg

SEQ ID NO: 10058 - DNA, 1031 bp, Homo sapiens
tcctgctttcgcaccttccataggttttttcgcaatcgtctttctatttaatcattttctgtttcatagattaggaaacctcaactaagttgcccaaggacagcccttgaataattttatcttctgtcagacaccaaagcctaaggtctcttattttgcagaggctgctttgtcaggatttcaatgcatgcatgtcctgcgaatcactgctcctcactcactgatccatcctgctgtccacgcgttcattcactcattcatttcttaggggtcatctacaaggcatggggctagttgcaactaaaaatacaaaagaaaagggactctgctgtaaagcagaggaggtttttttaaatgatttacacagaattccggtgctccgcatggtttcgatctccccccaccccccaaaatactactgatacctattttgttccacacaattcgatggactctgaaaatacagagaggggtgaaatctatccttgcctttcaggagcttattgccgtacgcaagagtaatctctgagctttaattttacataccaaatttttaacaaattgagcatcaactatatatgtatgtgtgtgtatatatatatattctgttgtaattaacatgttaaataaatattaggcacacttaatttcttattttttagatgaagatgaatctaaatgctggttcaagtatgtcctttgttcaccctagtggaccatcttgggtgattcctggagtgctttctcagactgcaaccctaacccgctggtatgtgcttggctctgttccttctttctgcagctgtctgtcaaatgccagtcttttgtggaggcccgtcctaaccccttcctgtttcctctcctttttgtctgctcgtatctgaggcctcttttcctatttatttgttgttctttctccctccatcatcttctgtcgtcaaatcatgtgttgtttttcatatactacacctgagtttataggaaatatgtttactgtttttgtttttttaatttttggtttagtttctgcc

SEQ ID NO: 10059 - DNA, 1170 bp, Homo sapiens
actgcaatttgatatcagtgacagggtagggatgctcagggaatctgttgagccaccaaggaagcctcactttcagctaatgcttacatggggctgtggaagttgtccagcatccctgaggacagagtgtttgccctgaaaaagaacattcccttggcagaaagcatcttgttggctggattttattataaatgtgatgagaatacttttggccaagtaactggtcgttgggtcattttgtggtagtcaaacccacaaagaagaaaagccctcacatggtcgggtgaggtgggaatggatcaagcactaaggccaggtctggtgaagttagggagtaaggccagtgtttatggaaagggattccttcatgaacccctaaaagatgcttctaaactctaacagtaggctgatgtctgtatttagagttgcaaacaacatgttctgggaatacagaggaaggcaccactgcctctaccttgggagtatatcacagagaatgagatttatatttggacttgatggatgagagatgagtaggagtttgacagaagaaaagagtggaactgtctggatgtacaatggcagaagtggcaggaaggactgaggagaattggcttctggggatgtgtcagacataagggcctgggcaccacataatggagcttgcaatggggtatgtgaaagcttagatgagatggtttttttcctgtcctcctgtgggttcatagtgggctcacctcactcactcctgctaacaacctgcccctattgatagatagctgaaatggggtctctaagcctccagcaacagcttaggagccagccttgaagtactggcagctaacacttcccatatagaccccgtagtccatcctatcttaggaagacaatgcactcatggggatggtaacatccacctccagactccagaggctccaaggagcctctctctctcttcaagtaaagaaatattcactgagctgtgtgtagaggtttacatggtttgggaccaacatgtggctgggtgacttcacttccatcctcatacagtggtactcggagatgaatggggggtagagtgatcaagatttagttcaatgtctacctccagtggggcagtgcttggtagttgactcattttggtctcttttgatgttcacagtcacccat

SEQ ID NO: 10060 - DNA, 1024 bp, Homo sapiens
aaaaaaaaaaatctcagtctttctataatgagtttgtctttagctagtagtcctaaactgtgaaattgtttaactaatactgtggttctgacctagcatgctgtggcctgcttttgtctcccttcttagacctacagcttactccttgatgtggaggactatgaaagacgttatctcctaagtctggaagaagagcgacctgccctaatggatgacagaaagcacaaaatttgtagcatgtatgacaacttaagggggaaattgcctggacaagagaggtaagcatcgtgcagtttgaggaaaacattaactggactccttcctctgtcataactggatttcatacatttttgccttttaggtacacttccctaccatctctgtaagctcagaatctatccttttagcctaactcaaatgccacttcatttaaaatacgaattatcttttccagtgaggaaagaaaaaaaaagtctttatcctgaatttattcattcaacaaatacatagtatctgctggggacagtgctaggcactagagatatagtgggtaacgttattgggtttttgtgcttacagattgcacctgatttatgattactagcatgtttaaccttgtaatctttatatatttcctttattactaagatcagatgtacaaacatttatacttcctgggatttccacaaaatatttatatcctatcgaaacccttcagtcttccaatggggaatccctcacctaccccattatctgcaaaagaatcttgctgatgttaaatgttctgtaaatcctgaatacttattcgatgtattcaagagaactacaacttctaacaactccctttctttttacccgttcaagagaattacttatccttctaagccaggacatacacaaaaccaaacataagaataagcactttgttttcaacacaccgtgtctggagttaggctgacagggaactggttaaataaatggtttatccatagattggatgttatgcagccattaaaatgtatgt

SEQ ID NO: 10061 - DNA, 1049 bp, Homo sapiens
gagaattagctaaatcttcctcagttaatgctgacactttacttgatttgtgagagaaagtggcccaaggttctgtatttgaacctgtagccatagcaatttgcttagaagtagggctttgcattgagttcgtgtctctaccagtacttgaggggagggagtgtaggtggaagaaaaactgatttcattgagtgtagttgtatatatgtttgtcctgatagattctgtgtccgaagcctgtccatgttcggcccccaatgccacctcgttatcctgctccctatggtgagaggatgtctccaaaccagctctgcagtgtcccggtatgtcactttaagcctaacaaaaatgtgcagtatgtattttctgatcactatttgtaagatcactgccagtatttagatttgctgacatctcctaaattatacctattttttataatctccttacttaaattgctggatctaattgtccccaggtcagaggacagttgtttcttacatcagctcttttcttacctttaaaaatctaaactcattgtgatcatctggttcctaccatttcagtcccatgttctactgcttctttttcatgtcacatggtcatggtgtttttataatttctagcattactctttttttctattccagagcttgactctgtaatttgagagtttttatatccaagtttatactgcatttctgctgagtttccttattatgatgtaccccctgttttatagcatattcttttttttttttttttttttaccttagaactcttccctcctgggtcacccttttcctcctagtgttcctcctgttctcagccccctccagagagcacagcttcttggaggagcacaggtaagcctgtgattagccctacccataaagaactctcctactttcctaaagttcattagataatagcccctttttttgctgttaatcactacttttatttttgcctttactttttcaaacaaagttattgatggaaaaccgtattcacttttctgtagacaaaagcaaggggacttgctgatt

SEQ ID NO: 10062 - DNA, 1031 bp, Homo sapiens
aacttttttccccaaatcgtcaagtaaggatgataaagaagatgtcacatgtctggcctgaagttttgcccacccaccaaaacctggcacactgacctgtgcaggtctcagcatgaaaagtccctgcatatatgagagaaagagcattgatcaaaggattcctaggttgtaagtttctcaacaagaatgtggcagagctggagaacttagatatttttatgtacaatatagtattcttccactacccccattaacatccagagaggcagggaaatatatgtatatatttttgtgacatggtatgtagctttgctgttgaactggatggcatagaccagattataaagtgtttttagccctcgggttcctcttctataaaatggagattaaaaatactacctgcctaatatcctgtttgttgatctgggtaatagtggtgtgtgttcatgtgttcactttctggtaattcactgagctgtatatttttaatttggccctttgatatagctgtgttaaactttgacaagtttaaaatttttaaaaagagagccctgaaagaataccaaggctataaagttattttaaagattaagtgaactagtggtttccaaacaatccctgttacagtgttaagcacagagttggtgattaataagtgcatttggattcagaggataaaactttgctatctttaaagttttagaaacatttgcattagccactgtcacagccagaagattccagtgtcactaaaagcatctgcaaaaatgtaatatacctttacagttactgttcagtggtaactttaagactttcaggctggatatggtggctcgcacttgtaatcccaacactttgggaggtaaaggcaggaaaatcacttgaggccaggagtttgaaaccaacctgggcaacatagtgagaccctgtctctaccaaaaaatgaagaagaaagaaattaagactttcacctgttataaatctttctaggaaaatagatcttttgagatgtatagttttactttatcctg

SEQ ID NO: 10063 - DNA, 1038 bp, Homo sapiens
tgcctgctgtgccgttcgaggcccctggagcctgacagttgaggctggtgaatgagcctaggtgctctgcctcccgacagacctggatttgagtcttcttagcatttacaggctttgggaccacaagcaagtcttctaacctaagcctcagtgtcctcatttgtaaaatggctgtgactgcctccctttgagggcactgagactgagtgagatcacaagataatgcacctgtgtcttcattgtccttgtagttgcagctggtttgccacagcctaaaggccacagtgtctagcatcttcctcactagcctaagggccatggtggccactcctccacactctggtggggccaacaccctcctagcaccccagaggcctggtaccaaggagatgctgagtaggtataggaggctcacccctgttctgaaggccttgtgtctgaggagctctctggcctagtcctgctggctacagctgtttccccctgacttctgcctccctctgagaatccctaggcactctgttgacctctggctgactcccagagctcttacatcagagagtctaaaggcatgacacagacttgtcctccaccacttggccataagaacatatgggtttttttaaattaaaataaaaaatagaaatggggtctcgctgtgttgcccaggctagtcttgaacttccagcaattctcccacctaggcctcccaaagcgctggtatcataggcgtgagctaccacctctgtgctacttagagctttaaagccaaatacatttgaactgtgacacagtcccctgctccccaaccctcacggcagggcgggaaggggaaggagatgcccagcaaccatgcagtgtcaagcacaagatttctacaacccattggctccgtcccacagggtgaaggttaggtgctttgcccctggtcacacaggttcagagccaggcatgacagacagattccctcgggtcacccccactggcatcctgggcacctgggttggttttgcctcttgagtcagcaggtccaggagg

SEQ ID NO: 10064 - DNA, 1061 bp, Homo sapiens
ttggcttagtggcgtgtagacctatgggagctctacagtcctagcttctattcttgctctgctgtttatcacctctgcgaccttgggcaattgacttcacttctctgaggctcagtttcctcagctgtaaaataaggtcatcaacacccccctcataaagctgggatggaagtaagaagagagaatgcctttaagcctgtaacgtagaagttggcagatagcaagttcttggtgctgcttttgaaagcacaggtgtgaccagcatctaatgtacttttctccttgcaagatgatttgtctcacattgagcctgttcttccccagcttcaagacaaagccactgtgctaaccacggagcgcaagaaggtgagttctctttctgaagcctggagaaagagctggcctggtgggaggcggttgactccttaggagagagagggcggctgaatcttggattcattgctgctcttctttgggggcttttcattttctcagagagggaagactgtgcctgaggagctggtgaagccagaagagctcagcaaataccggcaggtggcatcccacgtggtgagtgtctgggtctccactgtcttggagacagccctcccgttttgtttctggggtgggcgggccagcatggggagtgctgagtgcagagctgtcccaggttcctggcgctgttcctggtgctgtttctcgcctgggctgctgagttgtcagggctcctctttctgcccagctgtgggtttcctagtgatgcagtgagggagttaccgtaccaggcagatagccaagaggtatggataaggaatagaagtaactcttgctcccctgagaacatgggtgactggagatggcagtaggggaggtctgtggctttgtggcctgctgtgatttggccgtgacagggtttggtgtgtctctctgcaaaggggttgcacagtgccagcattcctgggatcctggccctggacctctgcccgtccgacaccaacaagatcctcactggtgagagtctgggcctagcccggcaggccaaagtggggaggggcagcagg

SEQ ID NO: 10065 - DNA, 1026 bp, Homo sapiens
ctcccaggttctcaagaggaaaaaacttctgtacatttcagaaatgcaatagatctgttatcagctctacgcactgcaaaacgcaagttcctttcttatttgatctgacagtgaaaaaattcacagatgttttattggaaggttagaaaataaaaaagaaccctttctcagtccaggtagtctgccccccatcaccttggcgtgtctgcggctgtgctgggcctgggcttgtgcgtggatgaggagacaaggctcagagtggagcagggggaggctcggaggcctttgctttgcagccccacccgcaggctcagcagggtgggcccctgtgctaacactcacccccaccctgcccctcagttcttgtttccatctaccttcgtccctctcaccagtcccaacgcagagggccaggttttctttagttttcttaactacgtcttttcttctggttgggaaaaataatatttactacctcttgtacagtttggaaatacataaaatatgtagaaaaaaattaaatgtggctggacgtggtggcttgtgcctgtaatcccagcactttgggaggccaaggcaggcagttcacctggctgttggtcaggagttcgagaccagcctggtcaacataatgaaaccacgtctctactaaaaatacaaaaactagccaggtgtggtggcgggtgcctgtagtcccaactactcaggaggctgaggcaggagaatcgcttgaacccaggagatggaggttgcagtgagccgagatcacgccattgcactccagcctgggtgacagagtgagactctgtctcaagaaagaaaaaaaattaaatcagctcagaatcccacaaggcagaggtctccccagtaaccaccagctgcagaggctgtgtgcctcagttgcgtgccagctgatgacctcctcagcacaaccagttaaacctttatttatttcagcttttctctatctttataaagcttttccccccttcattgtgaagatagcatgctcattggagacaattt

SEQ ID NO: 10066 - DNA, 1031 bp, Homo sapiens
ccaccttgggggacaaatttgatataaaagtgagacatgtttgtgatcatttactgaatgtccaggacattcctcgagtgacttctgtttgtctttgatggcgggtccttccctttgcccattgctgggaggtttggaggagctgaggtcaccagccttgtttcagagatgaggagactgaagttctgagagatgaggggatgggtccaggtgcagtcagccttggcctgtggcaagaggcaggtccccaaggcaatctggagagagtcggttctggtctggtgtggagggtgggagggcatagctcaacaacttctaccccatccacaccgatgtggagcgctcacctcgatatgtgtcccagcaagccccaacacttcagcatgggttatatgttcctaattctgtaagctcttctgaggccagggccatgttgggttgaccctgtgggatgatctggaaacaaatacttattggtgttatatgtggtgatgatgatagtgatgatcatgtcaatgatgagaatgatgataatggcagtaatgatgctgatggtgatgatgaaatgatgaagatgatggtgatgatgatgtcagtaatgttgatgaagtcgatgatgatgatgatggtggtgataatagctaccatttactaagggcttacacagtgctagggactctatgtaattacattatcttagtttttttccccagagtgagtatgacaccttggccgggcgtagtggctcgtgcctgtaatcccagcactttgggaggccgaggcaggagaatcacttgagcccaggagttaaagaccagcctgggcaacacggtgaaaccctgtctctataaaaaaattaaaaaaaaattatccaggcatggtggtgtgtgcctgtagtcccagccacttgggaggcagagatgggaggattgcttgagcccaggaggttgaggctgcagtgagctgtgatcatgccactgcactccaacctgggtgacagagttaatatatacataccaccttcactgatg

SEQ ID NO: 10067 - DNA, 1034 bp, Homo sapiens
ttggggcatgttcagtaataagaatgaatacaatagacaaagggggtgtgatgagtgttaacttggttgttccagaggtaaaccaggtctcagggaagagcctggagctgctattgcttaggaagttgtacgtgccttgaaatgtccactacctgaggacgcagcatctggtgggcccggggctgctggggccaaggagggaccttgaccttctggtgcctgcccctccccggcctatgtgccatccgcgtgacgctaggtcagcgctgccggttctttaccaaatgtgcttgcttctcctaagttatttataaagagaaatcactaatggactctactggtttgagtgcttctgagctggatgaccgaccgcctgtatgtttgtgtaattaattgccataataaactttgatgagtcacatgtggtgtggtgttgctgggtttgagtgaagacgtggctgcatgtgggtgccttgaactcttctgcagccttcagatcgtgctctctggaggggcctctgtgattcacatcccaaagccccatccgtctggatgtcagccctcccttgcccgctcgccccagggctggccctgggagtatttaccttccctctcccgctcttccgctttctttcttagccgttttcctattggagcctacgtttgcctggtcctggactgagagcaatggcatgcaaggccacaggatgccacgagggggcgtctggtcctcagcctgctcgggaggtgctgcgttcctgccacctgccgggctggcgggatgtcggcgtgtgggcctgtctgtgagccatctaattctaacctgggcttgcaggatgggctcagaggaacagcaggccgctaaactggctgcggcaccaacagtcttctaggccttggcccagcctgcctccctccccagcgtcgcctctgctgctgagctgcctatcccgaggccagggagggcgtcttcagctcagcaggaagggcagcttggagggagtctgaagaccaggcttctaacagtccctcat

SEQ ID NO: 10068 - DNA, 1048 bp, Homo sapiens
cccagcactttgggaggccaaggcaggtggatcatgaggtcaggagttcaagatcagcctggccaacatggtgaaaccccatctctactcaaaaaacaaaagttaaccaggcatggtggcatgcgcctgtaatcgcagctacttgggaggctgaggcaggagaatggcttgaacctgggaggcgtaggttgtggtgagctgagattgcaccactgcactccagcctgggcaacagagagagactctgtcccaaaaaaaaaaaaaaaaaaaaaaaagccaaaaaactggtggtcacagggtcttactctattcatatcttcccacaggatgcagtttgtattacccaagtaagtctcaattagaatgaaataggccttttccccaccagctgtaggtttgtaagctgtaagctacttttaagctggcctccttcaggcattcatgcaaaaatgacatctattgtaatcattagcaggactttggggaataagaaatagaagcctcatgtagcttattcgtagggctctattagggctgcatttaccacctttccactcctgtgtggaccctggcagatgcttggagacatttgttcatctgctgtttatctagatcacttcagcatcggtgaggttggtctctcaagaacccaaagctctggtcagtgaatggaaggagcctcaggccaagaacatcagtgtggcctcctgcaatagcagccaggtggtggtggctgtaggcagggccctctactatctgcagatccatcctcaggagctccggcagatcaggtgtgtgtgtttttctgtctgctcgctttcctcctcttttctctaggacttctttgagccttggattccttcctctgccatattcttctttgttcagccacacagagatggaacatgaagtggcttgcttggacatcaccccattaggagacagcaatggactgtcccctctttgtgccattggcctctggacggacatctcggctcgtatcttgaagttgccctcttttgaactactgcacaaggagatgctgggt

SEQ ID NO: 10069 - DNA, 1044 bp, Homo sapiens
ggggtacagtggcatgatcacggcttaccatagcctcaatatcctgggttcaagagatcttctctatgtcagcctcccagtagctgggactccaaccatgcgccaccacgcctggctaattttgtttgtgtttggtagaggtagagacagggtctccctatgttgcccaggctggtctcaaactcctaggctcaagcggtcctcccgccttggccttctgaagtgctgtaatcacaggcatgagccactgagcctagcctaaagttgggacctaataaatggtgtttttgggataattgatagtcatttgggaaaagacaagtttgggttcatactgcctgccaaatgtacacttggctagaatctaaatggttgaaaaacttaatgtaaaaaaatgaagccataactatgactcaaagtacagaagccaaaaagaaagattgataaattccaactatataaaaataaaacacttcatagcaaaagcaaaacaaaacactattaggtaagtcagaagaaatgacaaaccagataaaaatattctgtagttcatcttatagacaaaaggcccagtcttcctaatttataacatatttatagaaagatcactaaattttctgtccccaaactagcaaaggacatgaatggacaggcaacagtcctgagaaatgcacattaacaccaaacagcagtactctactagatgaccaaaatccagaagtttgaccacacattatgttggtcgggctgtgagaaaataaacatgcttgtgcatcctctatagaagggaattgggcaatatcaaagacagcagttagcgatttacttagtagtcccagttctgagcctctacctgacctttatatgtataaagtgacataaaaatacaagcttatttcttgtggcattgtatgttatagcaaaatactgaataaatataatgagaagggatttgttaatctgcataatttaataattatagataaatgatttacacaattaaatactgtgttctgataagggcttcaagcatatattgttcaa

SEQ ID NO: 10070 - DNA, 1064 bp, Homo sapiens
ttcacttctccccccaaaagtataacttgtcttttacttgggtggagggattgactataaaacattgagattgatttgcacagtggcatatggaaatgagtctcattattttattgctgggcataacatttaaaactgaaaggaagccaggatctatagtcccagctactcaagaggctgaggtgggaggttcacttgagcctaggagtttgagttcagcctgggcagcataatgagaccccatctctttaaaaaaaaaaacaacaacaaaaaactgaaagggagcaatagagcttatctgatttctttacctcatagatgaagaaacagggccagagggacctgcccatgcctgtccatgattgacaaagtctgggctagaatccaggcctcttcactccttgtcctaagtctgcccctacattatgtttgtctcactcagtagggaagttttaaaactcttaagagaaaattggctcttctcagtggtagccctgataatggggggaagttaagctaaggaacaagagtggaaaccaggaaaaaaaagtaaaagcttttacttggaaaggattagaagttgagaagaaaaatgggggagaatgcatggggaagaacatggagaagactccccacccataggaatagtcgaacaccagaagagtggcagtaaaaatactaccaggattagataatggccagttaacaaattctaagagtctcgtaaaggctatcatgttccctgggctttgatgtcctttttaaaataatgatgaccttaaagtttgccttggggctaactagacctgtacttttgccagtcctggtttggcagacccagagtgctgagcattctaattttgctgtctttcctgcagtcccagagccctttgggggggccatcatcattggacaggagtcaatcacctatcacaatggtgacaaatacctggctattgcccctcctatcatcaaggtgagcgcagtcctacctttttttcctttcatcttttctttccttgtcctcaccttgctcctccctttctcttatttatcaaaaggag

SEQ ID NO: 10071 - DNA, 1566 bp, Homo sapiens
cactgatccagcagtagtttgagaattaaacatctcaacctgagtctttagctgtcactttgcattatttcttccacttataaaatggggccaggcacagtggctcatgcctgtaacttcaacactttgggaggccgagaggggcagatcgcttgagctcagggaccagcctgaggaacatggcaaaacactcgtctctaccagagatacaaaactagctgggcatggtgatgtgctcctgtagtcccagctacttgggggtgctgaggcaggaggagtcccagctacttgggggcacttaggtgggaggatcacttgagcccgggagatagaggctgcagtgagccatgtttgtgccactgcactccagcctgggcaatagagcaagaccctgtctcaaaaaaaatagtaataaaaataaaataagatgagactatttctcccattatgaggataactctcttttggtaactttgaaaatgctgtaacaatattgcctagaaaacagtcatttgacttgtgtaggcccatgacaagatgggaaaaattaactctgaggcaggttttctacttcctcacttttcctggtcacccgtttgatatagtggttattgcatctgaataatagtctgaaagaactgaatcaggcaccccaagaatgtcaatttcttacattctcaccctaaggactcttaattccatctgtagtgaccaagttatggcttaggaagtttcatgttgggaagatggtacatggtcctcatttatagcaaccttttagttagaaatgaatcatatttatattctatgatgacagctgttccctgagagtgaaaggtacattttgtccagaggcagcaatagaacagtagccttctttgtccatcttttctcggcgtaagacccagttctggggcctgaaggctaattggcccacttgaaggaatctctgatttctgcctgcattccaacattggcaccaaaatgtagccatggagatttaagaattcagtgctatggcttgcttctcttggtgtacaagttatcctctgcaacctgtgtcttcaactttttgtagttctcaactatgtcagttatctcattattttaggacattatcctacttgaaatatagtcattctcacgtcattcctgtcctcgttatccattgaaaactgagctttctcttcaatttggatcgaattcaaagattcagaagccctaatggtatgtaattgagtgcactgagggcttcagttttcccttagagaaaatgggacaaataccagcctgcgtaggtgtttagacaggccaggaaggcttaggccatatagattctgaggacccaagctgaaaatagtgtcatttcggtgtgtacaaggatcagggaggacgtagatgtctcctctaggttttataaggccactttacagaagtagttatataaaaggtaaacatttgtgcgtaggctgtgttgccagtttgggcattaggagaaattctaattcctcattttccctttggctattaattctgtttaatatgctcagactgaccataccacca

SEQ ID NO: 10072 - DNA, 1022 bp, Homo sapiens
aacactgttaaacatacacacttgtgaacagaagtagaaaatttttaatagaattgctggctcaaaaaatatgcacattgtttattttaatagatgtcaaatagcccctggacaacagtgtgtcagtttgttcatctgacaacatctgttaaattccgaactgctggaatataggtgtcatccagttttacacttgcaacatctgccttgtctcttttaccgcggttgtttgggacggctagctactcttggtttgtgtctgcctgagttctccttttggtccagttagtttaccatctctcctcacccttggcctttctccttcatcctttatcaggggattacagtgacgcaattgagacgctgctcacagccattgcggttatcaaacagtcccgggttgccaatgatgagcgttgccgtgtcctcatctcctctcttaaggactgtcttcatggcatcgaagccaagtcctacagtgtgggtgccagtgggagctcttccaggtgagttggtgattgtgtcctcacctaccagccccaagcagcactcttccagggatagggagtggggacaaatggagcccagggaatctgggaaagacctggccgaaagtctggacgttagccttcatgtctttttggggaagaaactaatcagatgctttcattaataagtgttgtaacatctggaatctggtgggtgaggcagtgggctcatgtaggaaaaaatacagacagatatttttaagaacatgggttttggagccctacaagcttggattggaatcccagttctgctgctaactatctgtatgaccttcttgtgtatggaagttagtcaactttccaagccttatttttctcattttctaaaaaagggacactgatagtatttatcttacagacctgttgtaaagattaggtcagataatccatacaaaattattagcactacacctgataaattagttctcaacagataaatttacctgttaatcatcttcccaaaaaagagtagtc

SEQ ID NO: 10073 - DNA, 1437 bp, Homo sapiens
gctttggggtccctcctcctcctcctggtatccactaccagcatctcatgcccccacctcctcgattacctcctcatcttgctgtacctccccctggggccatcccacctgcccttcacctcaatccagccttcttccccccaccaaacgctacagtggggcctccaccagatacttacatgaaggcctctgccccctataaccaccatggcaggtaaggactattgttcctttcagatttgagccagggtaaataagtgtattaagcattttattctccctgagaaagtgagcactgaatccttgttctttcccttatagacattctgttatcatagcattgactcctgggaagtagtaccatgtcctttatacccctttttaaggtgcttaattaaatgcgggagcaggtgttatgaatgctacagatgtctagcattgttctgtgttatgccaaaattaccaaagtgttgtagagtacagtaaaaataataagggatgtgagcaatcaaggatggtattttctctgtacagccgagattcgggccctccaccctctacagtgagtgaagccgaatttgaagatatcatgaagcgaaacagagcaatttccagcagtgccatttccaaagcagtatctggagccagtgcaggtaactcagtgcttacctttgctgccttctccttaacctttacttttttttcctgattttgtcatttctactggcaaaagttcaacaagataaagttggagtactgtagatatcaagagcggcatactttgaagagcaatatgtaacctgatttcttggccttggggaagctccggcagtattacttagtctgtatctaggcctgccctcatgaaaaccaacttaatgcctagaatataaataattaataccatctcgatgtggtgtttgctgtagagtgaaattcctgccttgtggaaatctccatctcagtggttgatctttagatctagtgtctgtgtagtagacccaataccagatatagaccctgggtcttctttaggaatgatgttttgactggataatgtgtttttttgtttgtttgttttgagagggagtcttgccctgtcgcccaggctggagtgcagtggtgcaatcttggctcactacagcctccacctcctggtttcaagcgattctcctgcctcagcctcccaagtagctgggattacaggcacttgccaccacgcccggctaatttttgtatttttttgtagagacagggtttcatcatattggccaggatggtcttgaactcctgaccacaagtgatccgcctgtctcggcctcccaaagtgctaggattacaggtgtgagccaccacgtccagcctagataatggtttgctatgaaatctgattacatttaggagtctaagcagagctggtaggtagcctatcctaaa

SEQ ID NO: 10074 - DNA, 1023 bp, Homo sapiens
tagagtgttttaatatttgaaattatttatatgctttaggaagtagaatccttcccccttctctatcagaacaacccaagattattctcttagtgtgcattttcttccactgtacttcagataaactgaaaaactgaaagattgtttccaaaggttcttataatacaaggactggtctaagagtaaattttttagtgagtcgtcttcagatcacttcagaattagcagttattgccgtgatattggagggagaaagttaagggagccgcctgtctttagttgccttggagaaactgtttcttcagggtactagacaagtttcccaacttaggtgcctcctttattccctttttaaaagaatagcaatatgaaactgccgtagcatccttaaaacactgaactacttgctgtctctgtcattttggcagcattatctttagcattgtttgaatgttttgtctaattcttgtaataaaaataaaatgcttgtctaatccttaaaaagatttctctgaggctaggcacggtggctcacgcctgtaatcctagcactttgggaggccgaggtgggcagatcacgagatgaagggtttgagaccagcctgaccaacatggtgaaaccccatctctactaaaaatacaaaaattagctgggcatggtggtgtgtgcctgtaatcccagctactcaggaggctgaggcaggagaatcacttgaacccaagaggcagaggttgcagtgagctgagatggcgccactgcactccagcctgggcaatggagcaagactgtgtctcaaaaaaaaaaaaaaaaaaaaagatttctctgaggtaattacattgtagaatcctgaaccctttttttttttttttttttttttttgatatggggtctcactctgttgcccaggctggctcactgcaacctcaacctcccgggctcgagtgatccttctgcctctcgagtagctgggactatagatgtgtgccaccatgcccaactaatttttgtatttattgtagaga

SEQ ID NO: 10075 - DNA, 1066 bp, Homo sapiens
agatgagtcatagctattccacgaaccaagggtctcacggccaactaagtttggggaacactgcacactctgtctccctcttggcgatactgatattcatgggcacgttaaaggctctgagaagtcctgcggtaaaggaatcagtgtttcccaaatttctttaatcaaagatccttttttccagtaccgcagtggaaaaacctgagagaccctggagctcttcagaacacagggtgggagacaagtctggcagtggtgactctgggtggattttttttctgggacctcgggctggatggccctagattctggagatctggagggagcgggaaagagaggctgctacctgctccatctttgttatacctgacgcagggaggccccatccataccctcgtgtgaggctctgctgggaagggacatctgtggtgggaagggggttttctgtcaagggattaggttcccctggggcctgtcctgcctcctccatacccaccacttactgcccctgtgagctggctctacgctttggctttgaaccctgtacacagagtcccctgtgagacatttccaaggtctactctggacagagaaatctgtctacagcagggatgcccaacgccaccatctcatctgggcctatggtggcagctcagcctctcttcatctttctcacttttgtgcctgagtctgaggttgagaaccaaggtcaaggtcaaattctaaatggaggaaaaagcaggtcccgcaagaacatgtttgcttgatcctggggggtggggtgtgcccccgctggcacccttccccacactgccccaccttggctttggggagcggcacagcctcagtcttccccaggcccaccccagcgctcttcctggggccccttccctagaaacattcccatgcctgaaacatggctgccttccagaatagtcactgtctctattccccctgtactcccagtcctgcttcttggggtcccagtagcctgatgagctggtggcgccccttgtccttggctcccagggtttccaggccatgccctccaccggccaaggcttct

SEQ ID NO: 10076 - DNA, 1743 bp, Homo sapiens
tctgccttaggctgctgggagatgccattctccagtttcagaagcaggcagggcaaaggtcaagactgtggtattggggtcttttggctctgaaggatcctggaaccactgattttggtttattccctccagggtctaaagagaacaagaggtgctagctcttaccaaaacagatggtagagagagttgctggctatttaaaaagctctttcatcttttaattcacctcttcttttcacctctttaaccactcctcaggaacagaacacttctaggactgggggtcttttagctccataagcaagtgagcagatgggacaagttagtcttttctccctagaaacaaaggggatgcccagtggtttccctttgcttcccaacctaaaatttcaagtttaataaaatagcaattagcagaagtgaccaaattgggagataattatcagtcatgaggaaagacacagatttcggtcataaagaatgtaagggctataagtagaaactttctataacctaaatgatgttatagaattatttttgagcaggagcagaaagattaaatatgatcacttcatacttctaaatcagaaataggaagattaaaaccacagaacagtttgtgatttctattgctgtagctaggtatcttactctgtccactcttgttcaagtatctaactcttctggaaaccaaataggctttagaagagattatcctatattcctatcagtataatactaaaatgtaactttttaatcatctggtttttaaaagataaacagtttagcccatctctccagagagcaaacataggaatatgactcaggagcctcctagggcttatcatcagccctcacacccgcttccccctccaacccacagcctttgcttccaggtggcaggattactactttgcctcttcagcagcatctactctaggcatattgatcattttagacactgggagaagagaacctcaaactaggaggaaaagacagagcctccacttagttttgggaggggatggcagacagtcaaggagatgagcgtcctaaggcatgttgggatagggtcagatgcaccacccatggagaggtttgtcaacacaaagacatggaaggttagaggtttgtcaacaaaaagacatggaaggttaggtttgtcaacacaaagacatggaagattagaggtttgtcaacacaaagacacaggaagaatgggctgcagaagatttagatgttttccatttgggcacattttacttagctggagaactaggtttaaaacagcctgggtaggaaaattagaagcaagctggatgcagtggctcatgcctgtaatcccaacacttttgggaggtccaggcaggaggatcacttgggcccaggaggtcaagcctgcagcgagctgagatcacaccactgcactccagcctggggtgatagaacaagaccctgtctcaaaaaaaaaaaaaacaacaaaaacttagaattgaggagttgtacctccattggcttcctcactccaaaataggtgctgatccttcctattcctattctttgccaccttttgggtgtggtgtcaccagcctgtttagccaagtagctttgggcataggctgcccaatctgagcaaacaccagtgaggctctattgagccaagaccaagtcctcaaagcacctgaaccactgtggccttctcagcctacagcagtgtggtctcttacatggccacaaagggac

SEQ ID NO: 10077 - DNA, 1049 bp, Homo sapiens
tggcacctcctggaggtgcttttttgacactcttgccccaggcaagtattccccttgcactttgtatttctctcccacacttaggtatccttcttgtcacagtcttctctgtccagggctggactgtcttactcttctttcatgtccaatatctggaacattcattcactgagtacttcttcccaccctgctgatccccagcctgatttcctgggtggtcagcgttgggtttgagatgtcgtctgaagttgtaagcagaaataatgtagctgctgaaggaataatgcctgggggtggagatctggtgagcttttagtgagcattaggcaatggaaggttctaaaaggccagcagaattctttgaaaagttcatttaaagccctttgtcccaaggctgtaggctgcagagttcttccaggtccacctcctccactttgtgacatttcagcttgcgaggaattaaattgtcgttaaaacacatttcagttctaggcatgagttcaaggtagcctggcgttcctctcgcccctggccatgagaactttgaaagggctttggcagcactggttggcctggcatgaggagctcatagcttgaggctcatgccccacctgtccataatgttcttattttcccatcatgagcatggacttgggtttgttacatgtccgataccattatggtcagtactatgcagatgacgaagcagccctgtcccccgtctgactcccatggctgcttcaagggcagtgtggttatttgctgggcagtggcatggggcttgtgcatttctactgtcactacagagggtttaaaaaaaagacatgggcaggttaagtggaagggaacagtctcacaccactacctttattgcttcttggtacttgggttttcaggaaattcctatcagcagacatcaaaaacagagaatgaagggacgcagttggcatgtgcctgtggtcccagctacttgggaggctgaggtgggagcatcgcttgagcccaggaggtgaaggctgcagtgagtatgatcacgccactgcactcca

SEQ ID NO: 10078 - DNA, 1078 bp, Homo sapiens
ggccgggaatgccgcggcggggacggcgattggtccgtatgtgtggtgccaccggccgccggctccgccccggcccccgccccacacgccgcatcacttacagggcccggggctgccggacctgccaacgtgaatcttatcgccatggaccttaccttgcacaacccaaagtagctgccttggggcagggggtggccagagtgcttagggaaatgtggagccctacccagaacaacggtggagggaaagggaagaaacgcagaagtgccccagttcggacgtagggaagtcttcctcttcgtggtttttggagaaccctagctaagagaggaaagggacttattgaaagacccgcaagaagggacggaagtctcatagccctgagaggtgaagccagctggagttgatgggtcgaatggggacctagagaacttttctgtatctagaggtttgtaaaatgcaccaatcagtgctctgtaaaaacgcaccaattggcgctctgtagctagctagaggtttgtaaaatgagccaatcagcaggacgtgggcagggacaactaagacaataaaagctggccaccccagccagctgctgcaacccgctccagttcccttacaggctgtggaagcattgttcttttgctcgtcacactaaaccttgctgctgctcattctttgggtctgcaaagagtgttattcctttaagagctataacagcgggaaggtccacggctccattcttgaagtcagtgagaccatacccgccggaaggaaccaacgcccgacacagccccacccatctctcctgtttctcacctatactgaaattcttgggcaaaagctgtctgtggacacacccaggggaaaggccagcccaggcaggtgtttcttagtggttcccctcagccaatgcttcccattccttgatgcatccttctaactagagcagatactcggtgatcttaaactgtggacacctgggagcaccctcaaaaggcagctgggcctagggagatggcctgtgcttctgtgtcaggagttggttccttcaggtgggctcgtggtctcgctgacgtca

SEQ ID NO: 10079 - DNA, 1028 bp, Homo sapiens
agagaggcctggagaagtggagtctggggagtggggatggaggccaacaacacgcacacacaaacaaagggtcccgcctccctgccgtgcattccatctgcagccccgagcctcaggtctctgggcggggacagaaccccgagctgggtaggctaggagggaggagagcaaggatgcaggccgcctggggagggagggggtcagtggccaggggagggagtcacatcctgtctcgatggctaggagaggcagcgcagccgcgtctggacctaggtgccggtctccactcgccagcaggagcggagagggagcaggaaaggagcccattctcgaggatggggctgaaacgggaagcttggggagaccgctgccttggggacccctgcgtcgtgtgaagactggaggacgcggaagggacagcgctggccggggagggcaagcggccgctggcgtacataagggattgggaatggcatacacttagcgaggacccccagagctgttctcgaatcgccggggaggccactgagccgcaggccagcgaggtcttcagctattccgcggagcggaccgctgtttacgctctggggcggtaggcccttcgcggggtcctgtcccttcttcccttggtctcactgcggggtcggcgcgcgccccagccccaggcctgctgcttccctttctagaccacagccctcagagctaaggccccggcgcctctctgctgggttggagtcctggggactcagtcctagggactcgaaagtcggggcgttcccttcaccgcgtttcccccttggcggccagaatggcgtcccctccccttgcatccccctctgatcccgtgccctgcagcgtgatgccctccactgtccctatccactaccctggcgtcccagagtgtgccgcgggtcaccaggttcccataacgtcgcagcagagcttagacgctgcggggcgaagacccgccccaccctctgacgcgaccagcctagtgggcgaggccagagcttgcgcgggtcaaccag

SEQ ID NO: 10080 - DNA, 1055 bp, Homo sapiens
ggtcctaagcttaatatcgaaggcaagtcaaagaaatctcgttttaagcttcccaaatttaatttttcgggctctaaagttcagacacctgaagtggatgtcaaaggtaaaaagccagatattgacataacaggtccaaaagttgatattaatgctcctgatgtcgaggtccaaggaaaagtgaaaggatccaagtttaaaatgcctttcctgagtatttcatctcccaaagtttctatgcctgacgtggagctaaatttgaaaagtcccaaagtcaaaggagacttagatattgcaggtcccaatttagaaggtgactttaaaggccccaaagtggatattaaggcaccagaagtcaatcttaatgcacctgatgtggatgttcatggtccagactggaatctgaaaatgcccaagatgaaaatgcccaaattcagtgtgtctggcttaaaagcagaagggccagatgtagctgtggatctaccaaaaggagacatcaacatagagggcccaagtatgaacattgagggcccagatctcaatgtggaaggtccggagggaggcttgaaaggtcccaaattcaagatgcctgacatgaatatcaaagctcccaagatctccatgcctgacattgacttaaacttgaaaggccccaaggtgaaaggtgatgtggatatttctcttcccaaacttgaaggggatctgaaagggccagaggttgatatcaaaggccctaaagtggacatcaatgccccagatgtggatgttcatggtccagactggcatctgaagatgcccaaagtgaaaatgcccaagttcagcatgcctggcttcaaaggagaaggccctgaagtcgatgttaccctccctaaagctgacattgacatttctggtcccaatgtagacgttgatgttccagacgtgaatattgaaggtccagatgcaaagctgaagggccccaagttcaagatgcctgagatgaacatcaaagcccccaagatctccatgcctgactttgacctgaacttgaagggacccaaaatgaagggtgatgt

SEQ ID NO: 10081 - DNA, 2670 bp, Homo sapiens
cccaagatctccatgcctgatgttgatttcaatttaaagggacccaaaatcaaaggagatgttgatgtttctgccccaaagctggagggagagttaaaaggtccagaattggatgtcaaaggtcccaaattagatgctgacatgccagaagtagctgtggaaggcccaaatggcaagtggaaaactcctaagttcaagatgccagatatgcactttaaagctcccaaaatctctatgccagacctcgatctacacttgaagagccccaaggcaaaaggagaggtggatgtagatgttcccaaattggaaggggaccttaaagggccacatgtggatgtcagtgggccagacattgacattgagggaccagagggcaaattgaaaggccctaagttcaagatgcctgatatgcatttcaaagcccccaatatttctatgcctgatgttgatctaaatctcaaaggacccaaaatcaagggggatgtggatgtgtctgtgcctgaggtagaaggtaaacttgaagtaccagatatgaacatcaggggccccaaagttgatgtaaatgcccccgatgtccaagctccagactggcacctgaagatgcccaagatgaaaatgcccaagttcagcatgcctggcttcaaagcagagggccctgaagtagacgtcaacttgcctaaggctgacgttgacatctcaggacccaaggtggacattgaaggccctgatgttaatattgaaggaccagagggaaagttgaaagggcctaagttaaagatgccagagatgaacatcaaagcccccaagatctccatgcctgactttgatttgcatctgaaaggtcccaaggtgaagggcgatgtggatgtttctctgcccaaagtggaaggtgacctcaagggccccgaagttgacatcaaggggcccaaagtggatattaatgccccagatgtgggtgttcaaggcccagactggcacctgaagatgcccaaggtgaaaatgccaaagttcagcatgcctggcttcaaaggagagggcccagatggggatgtgaagctgcccaaggctgacattgatgtctcaggacccaaagtggacattgaaggccctgatgttaacattgaaggaccagagggaaagttgaaagggcctaagttcaagatgccagagatgaatatcaaagcccccaagatctccatgcctgatattgacttaaacctgaaaggacccaaagtgaagggtgatgtggatgtttcccttcctaaagtggaaggtgacctcaagggcccagaagttgacatcaagggcccaaaagtggacattgacgcacctgatgttgatgttcatggcccagactggcacctaaagatgcccaagataaaaatgcccaagatcagcatgcctggcttcaaaggagaaggtccagatgtggacgtgaacctgcccaaggctgacattgatgtctcaggaccgaaagtggatgttgaatgtcccgatgtgaatatcgaaggacctgaaggaaagtggaaaagtccaaagtttaagatgccagagatgcattttaagactccaaagatatccatgccagatattgacctgaatctcacaggtccaaaaataaaaggagatgtggatgttacaggccctaaggtagagggagatctgaaaggtcctgaagttgacctcaaaggccccaaagtggacattgatgtcccagatgttaatgttcagggtccagactggcacctgaagatgcccaagatgaaaatgcccaagttcagcatgcctggcttcaaagcagagggccctgaagtggatgtgaacctgcccaaggctgacgttgatgtctcaggccccaaagtggacgttgaaggccctgatgttaacattgaaggaccagagggaaagttgaaagggcccaagttcaagatgccagagatgaatatcaaagcccccaagatccccatgcctgactttgatttgcatctgaaaggtcccaaggtgaagggcgatgtggatatttctctgcccaaagtggaaggtgacctcaagggccctgaagttgacatcaggggtccccaagtggacattgatgtcccggatgtgggcgttcaaggcccagactggcacctaaaaatgcccaaagtgaaaatgcccaaattcagcatgcctggcttcaaaggagagggcccagatgtggatgtgaacctgcccaaggctgaccttgatgtctcaggacccaaggtggacattgatgttccagatgtgaatatcgaaggcccagagggaaagttgaaaggtcccaaattcaaaatgcctgagatgaacatcaaagcccccaagatctccatgcctgacattgatcttaacctgaaaggtcccaaagtgaagggtgacatggatgtgtctctgccaaaagtggaaggtgacatgaaagttcctgacgtggatattaaaggccccaaagtggatattaatgccccagatgtggatgttcaaggcccagactggcacctgaagatgcctaaaataaaaatgcccaagatcagcatgcctggcttcaaaggagaaggtccagaagtggacgtgaacctgcccaaggctgaccttgacgtctcaggacccaaggtggacgttgatgttccagatgtgaatattgaaggtccagat

SEQ ID NO: 10082 - DNA, 1052 bp, Homo sapiens
gctcccggcctttttttttttttttgtgagacagagtctcactctgttgcccaggttgaagtgcagtggtgtgatctcggcttactgcagtctccgcctcctgggttgaagcaattctcctgcctcagcctcccgagtagctggggattgcaggtgcgtgccaccatgcctggctaatttttgtatttttagtagagatggggtttcaccatgttggtcaggctggtctcaaactcctgacctcaggcaatccgcctgccttggcctcccaaaatgctgggattacaggcgtgagccaccgcccctggctcccccaacatttttaatgtcataaaagtgatatcctaaaagaccaagactattaatgtccagattttaattctagttcttttaagacccagctaggtcaactgcagtggctcatactacttggcaggctgaggtgagagggtcacttgagtccagcaggttgaggctgcagtgagccatgatcgtgcccctgcacttgggtgactgagcaagaccctgtctcaaaacaaatagcttgaacagttcaggagggtgtgaaaaaattcccagccccagttttggtgtggttgaggttttaaggctcctcagatgaggtctcttatgcatttggaaaggaacctgggacctagggttaaaggacagatcctctgctttgctacagtgtaatcttggacaggtcattctacttggtctcatctgtaaagagaggggagggtcagggtaacagttgataactcatgggttataaggattgagtgaaattggaatactcatggcaatatttatgctatgaacaatagaaccaactaaacattcagtttaatattcaatgtttagtagatttatggcacaatcctgcattagaagattgtttggccattaaaatgtttgcaaagaattctgtttttgaggtagggtcttgctatgttgcttagtccggtgtccaactcctgatctcaggtggtccttctacctcagcctcttgagtagctgggactgctagtgcaaaaaattgttttgtt

SEQ ID NO: 10083 - DNA, 1049 bp, Homo sapiens
agatgggggacgtgggtgctcgagaggctgtcttgtcacagtcccagcacagcctgggaggacatcgcctgcgtgtccgcccacgggagcagaaggagttccagagcccggcctccaaatcccccaaaggagcggcccccgacagtcaccagctggccaaagcgctagctgaggctgcagacgtgggggcacaaatgataaagcttgtggggctgagggagttgtccgaggccgagcggcagcttcgcagcctagtggtggccctgatgcaggaggtcttcacagagttcttccctggtaagttacctcccctactatgtctgagccctccctggcctttgctctcctgtgtctgtatccccagtccttcctccgctagaggtgtttggttgctcttccatctttgtgctctgttttgttcttccccctgctcctccctaacttctcttgacctttcttctctgctcggcacccaggctgtgtggtccacccttttggctcttccataaatagcttcgatgtccatggctgtgatcttgacctcttcttggatctgggtgacttggaagagccccaggtgagtgagtgtcccagggaggcagctgggaaaagtccatgagaatggccatgtgactgtgggcaagtcctttagctctccatgtcttagttcctcatctacaatgcagataataggacctacctgaaagagtttattgtaattggagagatgtgaatatggatgagtattagataggatgaaaatgaactgacagggccaggcgcagtggctcgcgcctgtaatcccagcactttgggaggctgaggtgggtggatcacctgaggtcaggagttcaagaccagcctggccaacatatagtgaaacccccatctctactaaaaaaaaaatacaaaaattagctgggtgtgtggtgtacacctgtagtcccagctacttgggaggccgaggcaggagaatcacttgaacccgggaggcagaggttgcagtgagccgagattgtgccactacactccagcctgggtgacagagg

SEQ ID NO: 10084 - DNA, 1035 bp, Homo sapiens
catggtgaaactcttgtctctgaaaaaaaaaaaaaaaaaaaaaaaaagttagctaggcgtgatggtgcatgcctgtaatctcagctactctggaggctgaggtgggaagattgcttgatcctgggcggcggaggttgcagtgagtggagatcatgcagcctgggcgacagagagagcccatttcaaaaaaaaaaaagttgaaagtgcttggcctgatagtcatactagggtccagaaatagttataccagctgttacttacagtgtgtttactctctagcaggcactgtatttagtgatttacatttgcttttgttttaaatcaaatgtaattggttttactaataaaaccaattggggaatgtggttttggatctgtagccataagggtgttaatacatcttctgggaatcagatggctgtcccattcacgcataggaagctctagaccccacctgcgacatgcacacacaaccagccctgggacaggcaggtagatctgaaggataaagaagtacagaagaggccaagccccacgttccacattcctggtttgttccttttttttttttcttccccccgcctccccgcaacaccgagatggagtcttgctctgttgcccaggctggagtgcagtggtgtgatcttggctcactgcaacctccacctcccgggttcaagcgattctcctgcctcagcctcccgagtagctgggattacaggcgtgcaccaccacaccaggctaattttttttttttttttcccgagatggagtctcactctgtcgcccaggctggagtgcaatggcacgatctcggctcactgcaacctccacctcccggattgaagcaattctcctgcctcagccccccgagtagctggggttacaagcatgcgccaccacacccggctaattttttgtatctttagtagagatggggtttcaccatgttggccaggctggtctggaactcctgacttcgtgttccacctgcttcggcctctcaaagtgctgggattacaggtgtgagccacc

SEQ ID NO: 10085 - DNA, 1038 bp, Homo sapiens
tttagggatgcccttgcctgtaggaacgttgttgttatgctatagcccattggtatgactatggcactcttttattcctcctccaggatctccagaaagccgcctgtccttccagcatgaccctgagacctctgtgttggtcctgcgcaagcctggcatcaatgtggcatctgattggagtattcacctgcgataacccaagggatgttctgggttagggggagggaaggggagcattagtgctgagagatattctttcttctgccttggagttcggccctccccagacttcacttatgctagtctaagacccagattctgccaacatttgggcaggatgagagggctgaccctgggctccaaattcctcttgtgatctcctcacctctcccactccattgataccaactctttcccttcattcccccaacatcctgttgctctaactggagcacattcacttacgaacaccaggaaaccacagggcccttgtcgccccttctctttcccttatttaggagccctgaactcccccagagtctatccattcatgcctcttgtatgttgatgccacttcttggaagaagatgagggcaatgagttagggctccttttccccttccctcccaccagattgctctcccacctttcatttcttcctccaggctttactcccctttttatgccccaccgatacactgggaccaccccttaccccggacaggatgaatggatcaaaggagtgaggttgctaaagaacatccttttccctctcattctacccttttcctctccccgattccttgtagagctgctgcaattcttagaggggcagttctacctcctctgtccctcggcagaaagacgtttccacacctcttaggggatgcgcattaaacttcttttgcccccttcttgtcccctttgaggggcacttaagatggagaaatcagttgtggtttcagtgaatcatggtcacctgtatttattgctaggagaagcctgagggtggggggagatgatcatgtgtgctcgggg

SEQ ID NO: 10086 - DNA, 2492 bp, Homo sapiens
gttggtggaaagagggaaaacagcccagagactgagggcctagggaacttgcaccagatgacagctggcttttgctcctcactacccgtctcttctctcctcacccagcacatggcgactgctgatgggctgagacagcgctctgggggcatggaacgcccctttgtcctggccagggccttcttcgctggctcccagcgctttggtaaggtttagagaatggagctgtggcagaagggtgtgaaggccagatctcaggagccatggacctggacctgcctctctgaggaatgggagccacacactgcatctgtttcctctcagctatgcgctttgaaggaagtcagggtgtgggaggtccactccttgttcaaatgttcttgtgaactgcatcttcagcagggttctggggacccagagcggatgtgggaggtcagccatgtaaaaagctgaactcctttaccatgtgcaagctccccacttcttgtcttcctcaggagccgtgtggacaggggacaacactgccgagtgggaccatttgaagatctctattcctatgtgtctcagcttggggctggtgggactttccttctgtgggggtaagacagggaggaatttggggtcttggtttggtgggaaaggggcaaagtagagggcacaggaccaaggtgttgtaagcaaagagagttgagagtccaagttagggccttgggaagtttctcaagcagtatctctccttcaccctcttttccaacctgcttcctctctctcctctaccagcggatgtgggtggcttcttcaaaaacccagagccagagctgcttgtgcgctggtaccagatgggtgcttaccagccattcttccgggcacatgcccacttggacactgggcgacgagagccatggctgttaccatctcagcacaatgatataatccgagatgccttgggccagcgatattctttgctgcccttctggtacaccctcttatatcaggcccatcgggaaggcattcctgtcatgaggtgaggcattcacttgggctgtgaagagtgggctgaggtggctgggggtattagggactgggcttcatctctgggtctctttcttcactcactacagccttgtaaaggatggaaaatcattaaggtcaagagtgaaggggagcttaatggagatgaataatagtaaacatttaaagaaaattgacagcagtcataagctctttcagaaaaataaaacagggtaatgggattaggtggtcataaaatccctttttgaggccgggcacagtggctcacacctgtaatcccagcactttgggaggccgaggtgggcagatcacctgaggtcaggagtttgagaccagcctggccaacatggcaaaaccccatctctactaaaaatacaaaaattagctgggcatcatggcgcctgtaatcccagctactcgggaggctgaggcatgagaatcacttgaacccaggaggtagaggttgcagtgagccgagattgctctgctgcattctagcctgggtgacagagggagactccatctcaaaaaaatgaaaaaaaaaaaaaaaaaaaagttttgagaagaaggctgtgtgagatgaggcctgaatgagtgggacagaccatgttatgtaggaagaatcttccaagcagagggaattgcaagtacaaaaattctaaaggagaaattagtttgttatgtactaggaatagaaaaaaacagtatgtcttgggtaaagaagcagaaggagagctaggagatgagattaagaagaaagtgtgatctgctcctggagggccttgcaagccagggttgcaacccagggttgtaagccagggcggtgaaacatgcaaggaggctactggcaggctgctgtgcagcatggtttcagtagagggcagagaagaagcagggagatggcttaggaagttaaatgtctaagactggattgtataactgagacctgaaccccaacccgactgtctgactgcaaactcctgggtcttaacccctgtgctgttcttttcttttctttttttttttgagacaaagtctcactctcgtcccccaggctggagtgcgatggtgtgatcttggctcactgaatgcactccgcctcccgggttcaagtgattctccagcctcagcctcctgagtagctgggatcacaggtgcctgccaccatgcccggctaatttttgtatttttagtagagacggggtttcaccatgttgttcaggctgatctcgaactcctgacctcaggtgatcttcccgcctcggcctcccaaagtgttgggattacaggtgtgagccaccacacccggcctatgctgttcttttcttattgccagttcctggaggagcatttctgacttgtgccaaaattgaaaagttttcctttattgtctttcttccttcctaggcccctgtgggtgcagtaccctcaggatgtgactaccttcaatatagatgatc

SEQ ID NO: 10087 - DNA, 1854 bp, Homo sapiens
ctaggtcttttctctggccgtttccaggcaccttcaccgtccactctccttcgacaggggacgtagccttttcttgctctggaagcccagggaggttgagcagtgagagagggaagggactaacgtgctccggaagggtggaggtttctcttctaagtccttggtctaaagagcgctgtcacttttttctctcccacttttttttttctaaataaaatttgccaacttgagaaaaccagtccagtgcttctgtcatgctgagagcgtgcaaagtctgacagcgcctggctctggacgttcccgcccctggcctgaagccccgccccctgcgataatttggagtgcgcactctaccaatgagacagctgcccggcggcgctcaggtcgaaccaatcataaggccggaaggggcgggaactaggatacgtggctgagcgcgcgcgatggggcgggaggtttggggtcaaggagcaaactctgcacaagatggcggcggtagcggcagtggcggcgcgtaggaggcggtgaggagcccggaatctgggggcgcgcccgggacgcccccagatcccccaagtcccattccactccttcctgtgtgtctcttgacactctgccacccccggcctcgtgaggaacctttgttcctctggaggcggcctcagacgcctccggtctccccgtggtagatccgagcgacgctgggggccttgcctgtggggctccgggctcccgcccggcggtttagtaaagccacagctgtgcgtctttcttggtcttggccgctctcagccgccgccctcctttggctgcttgcggcggtcaacgtcgccgcccccttcctgcagtgcgcggggtcgtcggggcgggggaaaagatgcggcctggcctcggggaatgcagcctgcggccccgcggcccctcggctgagctggaagcaccgggccagcagttaagcctgtactacccttctggctctaccctgtagagctccgaatcctcctctgcccttgtcttcacgtgagcaccagctctggcttagttcagtgtccacggtcgctgggcacggcccagggtccagtaagctcacggcgtggatggtgttgctcaaacacaacatgtaatcgaatggcttggtccacgctctcgggtttatattactggggaaaaaaaaagattcgaaacatatcaccagtgccacaaatgtttactaggacctaacggatatactggggtggggtaggcgtgtactctccaaagcgatgaagaaagcgtggatcataaactcagttccctcggagcctgtgatctgaaacaataaatgcgtgcaacttgccctgcagcttattcctgactttggcctatgaacacctctcttggggtggtcaaggccgccgtgaattccttagggccctccaacaggtcatatctgaaagatgctttaggaatcctatctccattggcatctttccgaaccaattttacagactgtgcaaatagggccccagagggtatttaactcactgtacgtcttttttttttttttttgagagacagagtctcgctctgttgcccaggctggagtgcagtggcgagatctcggctcactgcaagctccgcctcctgggttcacgccattctcctgcctcagcctcccgagtagctgggactacaggcacccgccaccacgcctggctatttttttgtatttttagtagagacggggtttcactatgttggtgaggatgatctcgatctcttgacctcgtgatccacccgcctcggcctcccaaagtgctgggattacaggcgtgagccaccgcgcccggcctcaactcactgtacttctattta

SEQ ID NO: 10088 - DNA, 1036 bp, Homo sapiens
ccagcacatccactgggtgtggagatttggtgtagaggcctgtacataggctggaagtcccacagcccacatccagcactcgcagaggactggcagcctgtgcctcctgcagcaatggcagtaggagcccctggacttcgtcgtatccaaagaaccagtcgaaggtggggacagtgcccaaacgaggctgggcatgcagccgatcccagagacagcggtccgccaggcaactatcagccagtgagcctgtgggcacggttggagggtgtcacttggtctatgtcgccactgcaaaaacgtcgtatatacacactggcgtcttttttttttttgagacagggtctcactctgtgacccagggttgagtacagtagcacaatgatggctcactgaagcctccacctcagcctcctgagtagctaggactataggcgccatcgtgcccggttaattttttttgtagacagggtctcgctatgttgccctaggttggtctcgaactcctgggccaagcgatctgcccgcctcggcctggcaaagtgttagcattacagccgtgagccaccacgcacggcccaccgtagggtttgagaatcacaatttcagggactacactcctgactcacgaggaacccaccttaccctccccactctgcccccaccttgccctctccactctgcccccacctccctacccgcaaaggggcggcacgtccccatcatcaggctcggcaagtggagcattcgacgcagcgcggccatctggagattcgggtaagttcgaccagagaagcttatgtgaagcgtccaccctactccagccggagaggcctgaggtccaggggaagatctgcaaattccgcgtagcgaaaggcggcgtacagcttccccgaactctgcagtcccggaaaaaagaacgcggacacagactatggtaggaacggcctttattggctgcagcgggaagtggaggagggtatacagcgtccgcagacctgaaatcaaatgagaaagtgtgagcaccccgatggaggag

SEQ ID NO: 10089 - DNA, 1301 bp, Homo sapiens
tccacccgcccacccttcctcgggactaccagttgcttctacctttagcatttcctgcttccgccgctctcccggggtcacgataacgaggagcgcgtagcccacgccagcccctgcgcccagcattgcgactgagatcagcattttccgcaaggaatccatggccgcctgcacagccagcggagcgcccacgggagctccccgcagccgcaagctgttgccgcgcggtctcactaccccttggcgcaggctagagcgccctatagcagaaaccatagataagcggccggctagagaggacctgctcgaggaaacgtttggaatccggagcgcttggatctcaggtttagctgagggggttgaggtgtccaagaagtgctggcaccaagggctgagcgcggggaccctgtgtcctcaattccggggtgggattgctagggggagagtgcgtgtcttcatggttgccgtgggttttatgattgcccatttttctgtcttccgacgtttcccgatcagtagaggcccgagctgtgctctgtggtttcctgcagtcacccgcgcgttttcaacacagcgcatggagggcatctacacacatacacatccctctccatcccctcaactctggaacaaacactcaaagtcaagtatactggttggagaaatgggtaatagttacttatctttaacatttattttacaaacaacctattccttttctcgtcatggtacacacttggtattgtttgggtttttttttggttttgttgttgttgttagtgtgtgggcgtggttttgtttgtttttggagacaaggtctcgctctgtcgcccagggctggagtgcagtggcgcgatcatggctcactgaagcctcgacttccagggcccaagcgatcctcctgcctcaacctcccggatagctgggattacaggcgtgcaccaccacgcccggctggtattgctttttgttttgcttcgttttcttttttgctttttgagacagagtctcactctgttgcccagctggagtgcagtggcgtgatctcggctcactgcaagctctgcctcccgggttcacgccattctcctgcctcagcctcccgagtagctgggactacaggcgcccgccaccacggccggctaattttttgtatttttagtagagaaagagtttcactatgtaggtcaggctggtctcgaactcctgacctcgtgatccgcccaatccgcccacctcggcctcccaaagtgctgggattacaggtgtgagccaccgcgcccggctgttttgctttgttt

SEQ ID NO: 10090 - DNA, 1050 bp, Homo sapiens
gtcttggggcgctaccaacagaaccaagataagggagctagaatggcagaaagatgatctggagcgaggatgactgtgccagagctggctggggagactgagcactgtcagtgcttgattaataatgtaagagaggacaggctgggccctggggacagcctcaccggcccataggccagagtcacagatggcccagttggcaacatgatggttcacttttggaaaagaaacgtgacacagcctttctgggaacagggtagccagtctgattcaggagagccaacaggatacccaagaactggacgtgagaggctctagccaccagaagggggcagcaccttcttgggatgacagattgaaaggcccgttaggctacccaagagggttgtggctgagtatttgggggcgttgcgggggctaagagggaggtggaatagagacagtacattttcaacaaaaaaatttttttaaagaaatgggggctacctttggcaggtgctgatgtatggacagccgtatcgtgttaccttagagcttgagctgccagagtcccctgtgaatcaagatttgggcatgttcttggtcaccatttcctgctacaccagaggtggccgaatcatctccacttcttcgcgttcggtaagtgttggtggcctgtctgagaaggtgtggaggaagatggcaggatcagaatgggtagggggctgggtgtggtggctcaggcctataatcccagcagtttgggaggccgaggcaggcagatcgcttgagcccaggagttcaagactggcctgggcaacatggcgaaacccatctctacaaaaaaagtttaaaaattagctgggcatggtggctcacggctgtagtcccagctactctagaggctgaggtgggaggatcgcttaaacctgggaggttgagtctgcagtgagccaagattgcaccactattctccctcctgggcaacagagcaagaccgtctcaaaaaaaaaaaaaaaaaaaaaaaaaaaagaatgtctgggtagggattcctcaggagaaaacaccctt

SEQ ID NO: 10091 - DNA, 1071 bp, Homo sapiens
cgaccagcgtcggccacgctgtacttcctggggtccccttgtttagtgattcttcgttatggccgcccgtgtgccttcgactcaatcgggaggacaccgaaatccagatttcggggttgcagggcgcgggccccggcttggttagggcaggggcagccattttgagaccagaagagggcggaagggaccatattgagaacgccggttgcctgggggccgccattttaagagaagccctgtacggtaaactccgtgacgtgggggctgccatgttggtacggccatcttggaatgggagtggctgtgggcgcagccatcttaggtataaaatcggctccagtcgcggtaactgaagccaagctccgcccctaccctcctaagagttcctctgctgtacgactgcactcccgcaccctcccctaaatcccccctcttcggcctgtttaccttttaacttggcttcgttgcacgtttgtgtgtgtgtgtttgctcttcgcagcctcttgagcgtcttttgtacttaattcttacactgtggacgctctctcgcgcccgccatcccccgacccctctgatctccgatccttgacgatgtctagcctgcattgattggcccttttccctgggtatggcagatctattgcttgatgatcctctccccccaagaattctaacacaggagctgtcctgaggctctggatgactttattcttcaaatggctttaccctcccagtagctccaggtgagactgagagcaagaacctggcccatccctctccattgtctgagcaggtcaccgagggaagcgggcaggacgcgctggcagagtctgacggggccctgctgtgggtggagcaaagggtgcctcatatctctggggtgcttggggtcggccacaaaggtggtaggaaatggggtcgacagataggtgagggtgggccttgtgcttcagataacctcacatggtcaggcaagggttagggatgggatgcaaggagcctaaggggctcacaacaattactgacctaaggaagggcccaggagagggaaaagggaggagttgtgagaag

SEQ ID NO: 10092 - DNA, 1055 bp, Homo sapiens
atgacatccagtgttctgaaggagtagtagtattgatgtagatactgctctaattcctaccctctgtatgtgacacggattcagatacccgggtttacagttttgtaccctgaaggccacccttaattttggtagccatctattctttaggacatttaagttgctgttagagctaattaatcattttttaaagtggttaatcatagctcatgcctggtctctagttactgcttaaaccccattttcccacctagcgctgtagccacgcagttataatctgatgggtaggaacattgagtgtgcagaaaaattgaagagaggcgctttgttttgtttcgttttgttttgagacggagtttcgctcttgttgcccaggctggagtgcagtggcacaatctcggctcaccgcaacctctgcctcccgggttcaagtgattctcctacctcagcctcccaagtagctgggattacaggtacccgccaccacaccggctaatttttgtatttttagtagagacagttttcaccgggttggccaggctggtctcgaactcctgacctcagatgatccgcccgcctcggcctcccaaagtgctgggattacaggcatgagccaccacgcccggccggccaaaaagaggctttcttaaaaatcaaggttacatttattaaacactctaattttttttttttttatttaaccatgtctgagctgttgtggaaaatttcacttactcccctggaacttgcccaacaccgtgatacagtgggggtgagggaggcaaggtgcttggtccctgccatgccacatttgccatttaagcatgtacagtacaatctattcattgggtatttgggtgcctgatatgtgccattatcaggatacagggattaaaacggacctgacctgattgatccttcctggaattttcaccgtgccaagaaggaactgaggctcctccgcaacagaatgggggtagggtcccactccaggagggcaaacttctcccgtttcttcatctctaggatgagggaattaattagaagatctccag

SEQ ID NO: 10093 - DNA, 1049 bp, Homo sapiens
gagaaagctttgcttataatgtcaaggcaaggaggtaaaaactggagcccaaagaaattcccttagggcaagattatgttataatagaaaattgaatttcctgaggcagtggctgccaccccttttcagatgtttagtcctgcaaatagcatctttcttgtagtctgtgacatggatggggatgctagggcccttaggggcaaggggactaaactaaatcaagttgagtttttttccagcaggggttaggggaggtactcgctgttgatatttgacactagaaagtaatcttttttacaaaactgtttttctaggtgggtggaaagtgaaactgccacatccttgttggtttagtccaagagatcatttgcaacaacagtagatgtccgggttttgtttctgtctttttattatgaaaaactatgttaagggggaaaatgtggattatggtaaccagaggaatccctagccttgttttccttagaagacttgtttagtgttttatcagacgtctgttgtagttgtagacaggaaagcttgtgagaaaaacaccacatggagcctgtaaatgtttttgcacaacctgtaaagcattcttggaagtggccagtaaaaaggggttttaccatttaaaaaaaaaatgtaactgtgtcattgtttacatctgtaactttttcctcccctgttctcattacaccattctggcgaaaatgtaggcaaagtagcttccagttttagaataaataaccatttggattgaattcaccctatctcctgtggctgcactgactggggcggagggtgtcactgggttatttattcattttttaatgcctctttctcaggtcgcatgggctccaaccaaggaggactctcctcttgcatggtggctgccgttccctccctattctaccatgccttcacttgggagccagccatgcagtcagttgacatgggtgggtagttattagtctatttagtgcttgcttaggccaagagtcgagccattgaagtataggaaaataaattataactcacgacctctgtat

SEQ ID NO: 10094 - DNA, 1049 bp, Homo sapiens
aaggctgcacagaggtctctctccttcgagttgggtggtctgttgatttttcccgtccacagcttggtaaagttatttctttaagttcctcattagtgtttactaccatattgcttactctatgggaagtccggttgtaggtaactaatttgttgactgttctaggtgaagatgaattctcttacggtttcgatggacgaggactcaaggcagaaaatggacaatttgaggaatttggccagacttttggggagaatgatgttattggctgctttgctgtaagtgctcctgaaagttgtgggttataacaaggagcggatagagggcactgggaattcacttgtgcttcccatcaactgctggcttttatgcatgtgatgtgtgtggctcgcttagttactttgtgcagcagtctgtgtgaaaaaagaataaattgtaaagtttaatcaacccaaagcctcgtcagccaataagtgctcttgtcccttgtcattgtagaattttgagactgaagaagtagaactttccttctccaagaatggagaagacctaggtgtggcattctggatcagcaaggattccctggcagaccgggcccttctaccccatgtcctctgcaaaaattgtgttgtagaattaaacttcggtcagaaggaggagcccttcttcccaccaccagaagagtttgtgttcattcatgctgtgcctgttgaggagcgtgtacgcactgcagtccctcccaagaccatagaggaatgtgaggtatgccaaacagtatacgaacactgaggttgtatgctttgcagaggtgggtgcgtatgctctccagggtctcagagcgttaccaaacaggaatgggaggatgttcttaaattggttttgataaacatgaccctcatttatttttcattatatttctggttctgttttttgcaggtgattctgatggtgggactacccggatctggaaagacccagtgggcactgaaatatgcaaaagaaaaccctgagaaaagatacaatgtcctgggagctgagactgtgctcaa

SEQ ID NO: 10095 - DNA, 1587 bp, Homo sapiens
ggcgctacggtctggccgtcggctgcggcgccatcggtaagacgtgggctggcttcccactgtgacaacgtggggtggcgggacacgaccttccctatacaggcagggagagtcagggactccctatccgagagtggcgggcgggctttaccccacagaaatgtgaaacactggccgggcgcggcggctcaaatgctgggaggccggaggcgggcggatcactaggtcaggacatccagaccatcctggctaacaccgtcaaaccctgtgtctactaaaaatacaaaaaattagctgggcgtggtagcaagcgcctgtagtcccagctactcgggaggctgaggcaggagaatcaattgaacctgggaggcggaggttgcagtgagccgagatgacgccactgcactccagcctaagcgaccgagcgagactcccctctcaaaaaaaaaaattgggaaacagtgatgtctccgagcgccgtgccctgtcatagcctaggctgagggctgcccttcactctgcgaccttgagcaaggtccttaaagctctccatcttcccattaaaatggaaacggacatctattaaggttgttgggaggaataacaagattactgggtataacaggagctcagtactgcactccagcctggccggcagagtgagactcagtctcaaaaaaaaaagcgctcagtaaatactactttcatcccacaaatttcttattcagagggcactggaaaggtcggtacttagatgcccagtgaaaacccctcaccccaatctctgccctgcctgcaggagccctcgtactcggtgctggtcttctcttctctctccggtctgtgcgctcagtggtgcttcgagctggagggcagcaggtgaccctcaccactcatgccccctttggcttgggggcccatttcacagttcctttgaagcaggtatcttgcatggcccaccggggtgaagtccctgccatgctacctctgaaagtcaaaggccgacgcttctatttcctcttggacaaaactggacacttccctaacacaaaactctttgacaatactgtgggtgcctaccggagcttgtgaagaaatgacctcaagtcactcacctctccaagaggaggataaaaactgaaccttggggagccaggtgtgttggttcacacctgttgtaatcccagcactttgggagggtgaggcaggagcactgctcgagcccaggctgggcaacatagcgagaccttgtctctatttacaaaaaaaaaaacaaaaaaaaacgccaatcttagaatggagtaacaaccagggtcacacaaggaggtcaagattcattaacaacaaataaaggagcagtcatccctagggcagctgcctaacagtacctctaagtttcagtccatgtctgcttagccttcactccttcctcctatctagttgtactttaacatcaaaaactcactactaagatgaagacagtaatataatattttggtacaaaaacagctgcaggaagaggtggaggggggcctgtcattatgtttcccccccaccccccaacgaaaggaaaactaagactcccaa

SEQ ID NO: 10096 - DNA, 1032 bp, Homo sapiens
tgtaatcccaactatttggcatgctgaggcaggagaatctcttgaacctgggaggcggaagttgggtgagccgagatcacgccgttgcactccagcctgggcaacagagtgagactcttatctaaaaaaaaaaaaaggaagagtcccgggtgcggtggctcacacctgtaatcccagcactttgggaggcagaagtgggtggatcacctaaggtcgggagttcgagaccaggctgatcaacatggtgaaacccatctctgccaaaaatacaaaattagggcgtggtggtgcatgcctgtaatgctagctacttgggaggctgaggcactaaaatcacttgaacccaggaggtggaggttgcaatgagccaaggttgtgccattgcacttcatcctgagcaacaagagcgaaactccatctcaagtaaattaattaaattcttcctcttttctgagcatcgctataggctttaattataggttttaatgtattggttgtcttattattagttagggcaatgattattgtgagtgctcaagttgttccaaatatgtctggtgggagcctagagggtttaaaaggctgagagaaaataaaggtatgttagcatgccaatggaaatgatgcaacggataaatttaaaaatgataatataggagaaagatgggagaattcttgaaatgatgtccttgagaaggtgaaaggaagtgggctccggggcataaatcaaggcttggctctaagaggagctggcgataggtgggaagacagaggctattgtagcaatgctcggggtggagcggcatttatcttcagaccacttcagtcttctcagctcattaagaagaaaagccagtagaggagaggaggtgtaggaggttttaggaatccactcctgcccacttgatcttatccctttagcagggtccaaccctgattgatctttattccccacggtatctagcagagtgcttttactctacgttgttgatcatgtgaaactgagtgaacacctacatttgtataaagccg

SEQ ID NO: 10097 - DNA, 1035 bp, Homo sapiens
ccacgcccggctaattttttttgtatttttagtagagacagggtttcaccatgttagccaggatggtctcgatctcctgaccttgtgatccgcccgcctcggcctcccaaagttctgggattacaggcatgagccaccgcacccggccgattctgcccatattttaatctccgtcccagacctgtctcctaaactccatatatccatattcctgttcaacaactccacttactggcctgggagcggtggctcatgcctgtattcctaacactttgggaggttgaggcgggtggatcatttgaggttcaggagtttgagacctgcttggccaaaatggtgaaaccgcatctcaactaaaaatacaaaaaaaaaaaaaatagctgggcatggtgacacatgcctgtaatcccaactactcaggagccagaggtgggagaatcactttaaccttagaggcggaggttgcagtgagccgagatcgtgccattgcattccagcctgggcagcaagagcaaaactctgaaaaaacaaaaacaaaaacacaagctgggcgtggtgatgcacatcttggtcccagctactgttcccagtagctgaagtctgaggcaggaggatctcctgagccctgggggcggaggttgcagtgagcagagattgggccactgcactccagcctgggtgacagcaacaccctgtctcaaaaaaaaaaaagtattaaaaagttaaatgtattttaaagaaattaagaggaagacttggtaatagtgctcacatatttaccatcttcagtgttcttcattcctccttgaatagatctaagttttccactggtatctcttccctttatcctgaagaagcacttcctttggttttttttttgtagtggagatctgctgacaacaatttctttcagttttctttcatctgaaaactgaaatctttttcactaactaaatcaaaactaaacttttttcaccttcttttttttttttttttttttttttttttttttttttcagacagagtctcactctg

SEQ ID NO: 10098 - DNA, 1045 bp, Homo sapiens
ggagggatgtaggcagaggcccaacaatgggctggcctctctgttcctctggtgcctcctgctactacaagagtttttatctgctcctcctctgtggtgcttagcattcagtcagtcagttatgggaatatagcagtggacaaaagagacaaaatccttgcccttgtggaacgtgtatcctaatagggagatagatgtgaaaaagtcataataaatagtatgttaaaaaaaaaaaaggtcgtaaatgccaaaaaaaaaaaaaaagatagtcaacacaggataaactaatcaggagtgccaggtttggagggaggtaggccctattaagaaggtggcatcacacttgggagaaggtgaggaaattagctacatagaccctggcaaaggcccgcaggtgacaatatgtttgatgagttaaaggacagcagagactactgcagctgggatcaatgaggaagagagttgtacaaggtgtggtcagaggggaactgtgagacctcttgggaccattggtaggctttagcttttactctgagtgacatagggagccattgcaggggttagtttttctgtgtttgagacagagccttgctgtgtcgcccaggctggagtgcagtggcatgatcttggctcactgcaacctccacctcctaggttcaagtgattctcatgcctcagtctcccgagtacctgggaccacaggtgtgcaccgccatgcccggctactttttgtatttttagtagagacagagttttgccacattggccaggctggtcttggactcctggcctccagtaacctgtccaccttggcctcccaaagtgccgggattacaggtgtgagccatcacaactggccaaatacatttaactttatttatttatgcatgtatttatttatttatttttatttttgagatggagtctcactctgtcgctaggctggagtgcagtggcagaatctcggcccactgcaacctctgcctcctaggtccaagtgattctcctgcctcagcctcctgagtagctgggactgcaagtgcgt

SEQ ID NO: 10099 - DNA, 1025 bp, Homo sapiens
ttttctcccccaggcggtggtgctgtggttctgggggcagagtcccatgcctccaaggatgtcgccatcgacatgatggactctcggaccagccagcagctgcagctcattgacgagcaggtacccaggctctgaactaggtagaatcagcttctccattatcctctgtggttcccgagagagtgtttggagtgtgccatgggcagaatggcaagctgggagggttgtaaaaatgcaggtctgaccctgaagaagctgttggtgctcatgtgctctctccctctcctgaaggattcctacatccagagtcgggcagacaccatgcagaacattgagtcgacaattgttgagttgggctccatctttcagcagttggcacacatggttaaggaacaggaggaaaccattcagaggtgagatacactctctcgccccaaacagaggagctttctcttccccgtggattggcatcttaaagtccccagggactgcttgatgccttttggaagatagagtgaattctgcccacccatgggacccagttcacctgcttccatccacccaacaagtttttattgagcacctgttcatgtgaggcactgttccaggtgcgggagatacagtggcaagtagaacagtaaagtctgtctggagctgctttgtagcatgtgtaagtgtatggaatttgatagggcagatgaggacagctgtggaaaagaactgacaaggctggcacagtgactcacacctgtaatcccataggcagcactttgggaggccgagcaatgcagatcgcttgagttcaggaattcaagaccagtttgggcaacaaagcaagaccctgtctctacaaaaaaatacaaaaactagctgggcatggtggcatgggcctgtagtcccagctactcgagaggctgaggtgggaggatggcttgagcctgggaggcagaggttgcagtgagccaagatcgtgccactgcactccagcctgggtgacagagccagattctgtgtcaaaaaaataa

SEQ ID NO: 10100 - DNA, 1043 bp, Homo sapiens
gtagggaatctggttgatatgagtttggggcctagagaatacttttatacttttttttttctttaaacattagtcaactgtagtagtaaggaggagagaaagattagaacaaggagtttaagcacttaaaaaatcccaactctatcctttctctgcagcaccctcatcacatgtgtggattctgggattctcagagtctggcatgacaaggacaaggacacatcctctgacccagtgaggctcccctgccctgatggttgggggaggtgggctggggtaggtgcctaatgatcacgctggggaagggaggattaaggactctggaacggactcttatctcctattctttacagctcctggaactgagagtgggccctggggtgtgtaggatgcgccaagacccagcacacccccatgtggttgccacaggtgggaaagagaatgctttgaagatatgggacctgcagggctctgaggaacctgtgttcagggccaagaacgtgagtgacaagagtgtgaaggagctgttcctgaagtcgagggaggctgaggccactgacgatgcattagagactagatggacttagggggcgaaggagggctgaaaacaggggcacatcgagccccccatagccctgtcctccatctgcccaccccaccaggtgcggaatgactggctggacttgcgggttcccatctgggaccaggacatacagtttctcccaggatcacagaagcttgtcacctgcacagggtaccaccaggtaaggtgtcacctcacacctgccttctcctgggataaagcagcctcctggagaaatggcccccacggtttgacacaactgctcttctcaccattctgagttcagaggagcaagcgcttccccgtctgttccaaccctgtccctgagcccatgaccttcctctactgtattctagggtggagtttcctgaactatgcctgttttcctcccacctggaagagaggaaaggagagtggatccccttcactgtgggaattatagggtgcaggtgtcagagga

SEQ ID NO: 10101 - DNA, 1193 bp, Homo sapiens
aagtcaggaactggagagcagggagcccaacctccttttttggactccaaaacctgtgctttgacaccgcgccgcggcttctcccaagaaaggtcccggagaggggcgccgccacctgcagcactgtcccgccgccccctggaaagccgaaaaacccctaggatgggagactaacgccacaatcggggaaaaggaggccacgcgggcattgaaatcacgactggtgtgtggaccaatcccaggatcctaaaaaagcgaaaggggcgggtttatgcaaaacaaactgagcagggagcaggcggcggaagaagtagaggacgtttaaatagggctgtttccaaaatatagccactactataaagaaagaataatgaaaactgtgtttcggaattataatgtattgggagataatttaacatttagtgcctggatagttaccataactggttggaagatgggaaggataaggccgccgaggcgaccgaagtaaaggtatcgcttctcggccttttggctaagatcaagtgtagtatctgttcttatcagtttaatatctgatacgtcctctatccgaggacaatatattaaatggatttttggaaataggagatggaataggagcttgctccgtccactccacgcatcgacctggtattgcagtacttccaggaacggtgcactctcccttcggggagagaacaaccgttgtttaatggaagatttcgatcagttagggtacaagctaaatagttatgttcttgttgtttgagttggattaggtgtttttatcgctagtgtgttgaatgacgcgtgtttgagtgtcttgttgagagaaggttttgttttataactgagcacggagcgtagtatctccatgtggtcttcagcaatcttcatacttcagcctctggggtagttggaactattgagcgcttgccaccacccccggctaatgttttccatttttatttcttatttattttttttgagacgtcgtcttgctctgtcgcccaggctagagtgcaatggcatgatctcagctcactgcaacatccgcctcccgggttcatgcgattctcctgcatcagcctcccgagtggctgggactacaggcgcccgccaccacgcccagcgaatttttatacttttaatagagacggggtttcaccatgttggccagggtggtctccatc

SEQ ID NO: 10102 - DNA, 4280 bp, Homo sapiens
aatcgacacgacggcgatcgaggcttcaggaggctgtagctccatggaggcggatcctgcacacaggtttggggtgtgtgggcaaggggcagctcagaacagggttagagggtaggcagtcgtgaccgtcagtccaggatcgccgtgaggcagtgatctcaccgctcctgccacatgcactgggtgagaaaaccaagccgcaatgcggtcggtgagccagcacgctcccgtaggacgcatgcgcgcctttttcgcgccgcaagttcaggtggcgctttgtctacgccctccttccctggaactctctacccacaactccccggggtcgcatgcggtcaacgtatgcgcgtgcgctcgccgtagccccgcccccaaatcccgtgggcctctgcggcatggtatttaatcgtctccccggggagattcgttctcatttttctactgctcgtggtaagtggcttcgtggtctttatagctgttactcttttgtactttgtctttttcttttattttcttttgagcgattgtgcgaacatagcatagcacgcactatgccttctgtgttgtagctgcctggccagggcgactggcggataaggtcttgtgcgtggcctcgaggcttaaaagtagcagtggggctttgtgaaggacaaaatggcgatggcgggccgtgtaggtcccccttcctatgatgaggaccttttcacagacctgtactgagctccgtgaggataaataactctgaggagatgggccctgcaagcctcttgcttagccgtctgttcagaaaatagcgttttcgaaatgccctgagttgacctaatgtcttattgggctcctgtctgcaggatttacgcgcacgttggaaccgaagagagctctgttgttgcagtaagttcttacggccatttcttaatctctgctctttcgttgagtgtgtggaagttgctacggggatgattttacgaactgaactctctctttctgatggattagtggagaaaacagaaaattctgagtagcactgtactgtacgcaacaaatgtcagggccctattgatttgtctgaggtgttagtgaagggtgttattttttcagatgttcagcccacaagagcttactggtgaaggaatgggacaagacccatctttatgcaaagccagcgttacagtaatgttccaggtaggtgtacatggtttatgctcttacagaggagaccttgtagataaccactccatgatgaacacaaaatgacaagcatatggctgaactttcaagtgatgtcatcttactactgagaagtgagagagaggtcttaaggggtctttgaatgactatttttaggtacataaaatgctttcctctgttgtctacagcatctcataatctatcctggggaattcagctgcctcccagggtgaatacaggtaattatccaaattggtgtatgtcatctttgtaaatgttcaagaaaacaagtggccggcggaacaatgttttttggcgccttccatcttgttcctcttgaaatgattttctggggagggagatcgcaacccggtactacagttcttgtaagggtgtgctgttaccctcatccatatatcgatcacgttactgtcagatgatttgaattgataagctgatgttctgtgaggtacaaaagttaatagcatgttagagttctgatggcagttgttgtttatgaataagcttcattccatcctaataccttaaaataactaatttgctttcctttccaggtattcctgatgacagtctgcctctatcttacagtaagttgtttttcgaattctatgggcctattatctaatagataacttagccattttgatatttgttaccaaagcctgcttaacccataaagttttctggttcctcttgttctctgtagtgatgtttctagatagatgcccactgatatatgccccttttttctcagatagatgcccactgatctgcccagggtcagacgaatgcttgtcagttgtagctttccaggattctgctccaatgaggaggaaacatcctgccttacccctgttttagcctgggaaccagtaattgtgaactcaccagggttaacatgaagagggcatgagagcttattccataaggaattgtctgagacatttggttaccttttcttagtttgtccattagcaaccgtaactaaaatagttttggctgtttgggataattagctaattgaatgattttttgattcaggagcagcttgttgctatataccattgaaaagccttcagagctgagaggttagttgatattttttgttccttacagcttatgccaccaagtaggcagtttctatgatgaatcaaactagctcactatgaccgacagtgaaaatacatgaacacctgagaaactggagaacgcagggagtggggggtaaccatgtctgaggaatctttcacccacagctttgtttttctctaggtactactaaccaataacctgcttggctcaaaggtgagtaatttcacggtattcaatgcactcagtatatagggtaggaaaaagtgcctttttaggcctgtgtttgtgatgacttacatggaatctcgttcggctgatgacttgctgttgagactctgaaatctgattttctgagaatgatgggtgggaacaacataatgcgggatatgagaagcactactgacttggtcttcctcctttcagggccagcaccttctctctaaagcccaagaggagtttgaggtaaatggctttgcaatagttaccatcaatggctgctatataaaattttctgtgatttttgtgtgtgatagcactgtggtctgggtgaatgtacacagacataactggcttaacccaaagtctttgatctcctgaaccaccagtgatgaattgctgctcaccagtgatgagttgaataccgccccagtctgatcaatgtgtgactgaaaggtattttctgagctgtgagcctgccttccagtgacatgttctaaaaattgcaagttatttgaggaggctttacagccaataggaagttcttgggctaagtagtgtttcctataaaatgtgccctgaaacttctttctgccaagcaatagatacaattgagagattgtaaaatgtgacatagaatgaaagtctctcaagactacatttttctttcttgattttgcaggaaaactaggtgtctgtgttcactccaggctgaagttacaggtgagtaaacctaaatgtaaggtggactatgctaaaaattcccaatgaagaaactttcacatgtcttactctctgtcctagtcccagagcctgtaaaggtgaacccactgggactggctgggggagaagaggaagatttgttccagaaggaactgtctgagggatgataaagatttctatacagagaaagggagtaatcatcacttgttgaaaacattggttttattttttccaggtctgagcaaataaggtgtataaaaaatggtaggtatctgtttaaatatttaactgattttataatagcaaccttttgctcctaggttacatagtgttaaatattgtgttcatttgtattttccaatccaataagaacttttttttttacctctgcaggaatctgtcttggaggacatcagaaggtgaattttccaagttcttggacaacctagctgttgaaaagctttctgggtttggggggtatttcagatgtaccttaaagtgttagcagacacagattaagacactgggagccaatgaaacagcagttgagggtttgctgtgtatcacatttctgtattttatcacccccttcctgcaacattatttatctggaatctacctgcccttttgttttttagatacaagggcttggttttgttacccaggctggtttcaaggccatagctttaagagatcctctcaccacagatttccaaagtgctgggattgcaggtgtgattcatggcacccagactttgctgcctttcttacatgatccaggcccagaacccaaactcaggcactgtatagatgaccactttcgtaaactactgacctagcttgttgccaattgttgattgaacttcccataactccacttcgtgtctgttcctctgtatacagccaccttctgttcccgtcatgagcctttaggtctccatttgcatattgcaaatactatgttccatgtaggtagctcattcagggccttgctcttcacttcaaaaaaggttcccttgaggactggctgtcaatttgtg

SEQ ID NO: 10103 - DNA, 1050 bp, Homo sapiens
tttatcctctgtagttcacatccttctcttttttggtttatgcccttgttttggtagactacttcccctaatagtttactgagaaatggtacattttaaaaagatccctaggcaggcatggtgacatgcgcctgtaatcccagctactggtgaggctgaggcacgagaattgcttggacccaggaggcagaggttgcagtgagccgagatcacgccactgtactccagcctgggtgacagagtgagacttggtcagaaaaaaaaaaaaaaagacccaagaaacaaaaaacaaacaaaaaaagatcttgcatgcctgaaaatatctttattttatcctcacatttgattaatcatttggctgggtatagaattctaggttagaaataatattttttttttcagaattttgaaggcattggtttattgtcatctagcttttgttattgtggtagagaagtctgaagctgttctgattttttattgtttgtatgtgatctattttttcttttcagaactgtatagaatcttctcttcatcctcagtgttctgaaatttattaccttgcacgggtctattttcatgtattgtgccaggtacttggaaactcactttctttagttcttggaaattttccagtttgtattctctggcactcctattattaggctattggatccctagactgctttgctgattttcttatcttctctctcttgttttttatttatgtatctttttatttattaagacagagtcttgtttcgtcacccaggctagagcacagtggtgcgatgttggctcgctgtaacctctgcctcctgggttcaagtgattcttctgcctcagcctccagagtggctgggaataaaggcatgtgccaccacacctgggtaatttttgtatttttattagagatgtggtttccccatatcggccaggctggtctggaactcctgactgcaagtgatctgcctgtttctgcctcccaaagtgctaagattacaggcgtgagccactgtgcctggcccatttatgtatctttttaaattt

SEQ ID NO: 10104 - DNA, 1470 bp, Homo sapiens
cggcctctcggaggccccggctgcggactggggcttccagcgggaggctgggccgcagggctcgggagccttcccggggtgggaaggcgcgttggaccgagggcggggctacgcgcccggggcccgggctggaccagctgcgcttacctccccggcaggctcagtgagaaccgtgcgcccggcggccccactctcctcccaggccgctgccacgccctccaggaaagctcttgtaaagggattagcacttttttcctttgctcctcttgccccgagggtctctgcttacccctaaaccaagtccgtgggagcccggggcacaggcggtcccggcagtcagccttcgattcccgccccatccccatccccctttgtccgcggtggatgcggcgtccgttctcaacccgcagggcctggggccgggcctcggcctcttttccccgtggcagccgcaggccctgtgtggcagggatggggccccgcgatctcccaggcaggtccgagagggatgtgtagattcattctcctgtggagaacaggtggccccgagatcaggcccttttttgctctttgtattttattttgaaactgtatttaatgcttttatatgaaagggggaggggcggggacagagctgacccagtcacccttatgtgcaaatgtcttatttattatgcgtgtatcagagataagctgtgaggtggtggagggaggacctgaaggaaggaggagcgagggcagaggcggggacgggaggaccccaactagctgtgctgatgttaatcccgctgggagactccgggccctactgtctgctcttcacaaagccaggctgctgcaggaacagttcccgcggtcctaaagccggggcggggaggctagtgggtggaacttgagggttgggtctggaggaagagatgcctgggcagcgtggtccagcccctgcctcggggtggaaaggcagagagcaaagaggaggcccctcttattccggacccccaggccagagcccaggagtgggaaagcagagggcaaagaggaggcccctcctctcatccctgacccccaggccagagcctaaggttcaagtgcctcaggcccagtccccttgacgcttcctgtttgggagttggattttataccacggattttatagcatttttatataattgaggattgtcagaattggaaagggccctggagatcactagtactaccctcctcaccttcacagataggtaaattggagcccaggaaccgagatgatcacacagccaggtagggacagtacaagaactagaatgaaaatcctagctcctgactcagtgttctttgcacgatgccacactgcttcccaattcgctggtcagttattaaaatttgtcaggcctgccgaaggattgacatgctgggcaatgcaggccaccacggtggatctgtgactcctgaaggtggcaaagccctgcacac

SEQ ID NO: 10105 - DNA, 1013 bp, Homo sapiens
cagaatctgtggtgttagcaccagctgggtggccacattttagggttcttgttgcagaactctcaatctaaactagctcaaggtcaggtgtgatggctcacgcctgtaatcccagtagtttgggaggctgacgtgggtggatcacctgaagtcaggagttccagaccagcctggacaacaagacaaaacctcatctctattaaaaatataaaaattggctgggcgtagtggctgacacctgtaaccccagcactttgggacaccgaggtgggcagatcacaaggtcaggagtttgggaccatcctggctaacacggtgaaaccccgtctctactaaaaatacaaaaattagctgggtgtggcggcaggcgcctgtagtcccaactactcgggaggctgaggcaggagaatcgcttgaacccgggaagtggaggttgcagtgagccgagatcgtgccactgcactccagcctaggcgactgtctcaagaaataaataaataaatatactagcttgaacaaaatgggggatttattggctcatggaactgaaggaagggctgaatgcccaattgtgggaagggcagggatacaggccgactttaggaataaccggacccaggacataaatgctaccaggacgttcttttcacccccagtctctgcctctgtttgtgtacatcagccatactccctttcctgcagcctgtctttttccacatggcaggagatgggccactaattcccacagactagcttctagctctgtacatgtcaaacctgtttctcctcctctgtccacgtgtgtgttcaatgctaggcactgtttacatcctcgtatcaccaaatgactttctgccctgcacgttggtgtaataaaatgaggtgagtcagattggcgggcatagaattattcctggaagctgttcctacttttttgttaaagtatcctgtattgtctgatatttttgcttttataatcagaatttaaaatgccatttctattttttaagaaa

SEQ ID NO: 10106 - DNA, 1033 bp, Homo sapiens
tccttccagcatttaggggtgcggagcggctggcacaggcctctcacacaacctgactgatggagagatggacggggcgggtgcccctggaggaagtgggcccggagtccaaccttttaacatgggctgagatttatggagccgccgccagcacttgctgggactgtcactctgctaatgtgattggaacacagtggaggtggtggggagggggctgtggtagggacgatgctggggctggaatggagcccagcctggtccccggaggtgctctgccctcccctatacccctgctcctcccaccatcctttgagttcatccagtcctaatcgcctacctgcccaagttagaccccatctgactctgcccagacacacccatcttcccgtggggtccctggacatccctcctacaggagttcaggcctctacccgcgcccctcccatgaccagccacccattgttcgaacacgcacaagggccatcctgcctgccctggccactctgcccagaaccctgatgcactgccctgctccatgtcttcgtcccgcagccctgattccctgcttgcgttttgtgtttgttcttcattgcctgcctccccaccggaatggactcccccgagggcagggttatgggagattctgagctcctagaagagcttcctgctttgaagtaaataattaacatctgtggtgcagtgagtggcaccctctgtgtgccctgggagccagggacacagctctcagtctggcacccacatcccatcccctcaccctggggactgccagtctgccagtccctcaatggagaggggcagcaggcaacaccctggccaacaccccaatcagcatcctagccaacagcccaaccaacatgccagccaacaccccaacaacatgccagccaacaccccaaccagcatgccagccaacaccccaaacaatacaccagcaaacaccccaaccaacaccccaaccaacaccccagccaacacgccagccaacaccccaacaaataccccaaccaacatg

SEQ ID NO: 10107 - DNA, 1042 bp, Homo sapiens
gtcactccccatgaggttttaaatctgccttggtaggtgaaactgttcaccgagcaagagctgtgcacatacagggtggatgaggggtccctgcggcctgagcagagggaccccacctgctctcagtctgcagggaggaaccaccaatgggctgtcccgtcccctacgttcagcccccagccaagctggtcccagaggctgccctttctcccagccttataaacacggggctggctgtggcctaaagtggcacaggggcacccgggtccagcaagcacttagggagccgatgaacacacaggaagccctgtttcgtgagagctggtgcgacgcaggctggcctgcagggaggcctggagcctgggagcccagggcaggcttgcttaggggggtgacacgggcgcagaagctgaaaggaagggccaaggctgtacccgggctgggtggggaagctgggagcaaaggaggggctgtcctgtggcagtgtcagcccgatgggtgcagaccagctccgaccctggtaccttgggtctagggagtgtagatgagtttagaaggcagagtggaggtcatcccagggggtgggacaggccttgcaccagccagaacccttccttcagcccagggttcgcactaccccatcccacaccaaggggtccccaggatgggcctcacacccctgccgggttctctgctgtcccctatgagtgctgctggtgggcacagccccgggtggtgcctgtcccctgtgacctgtcggccatgtttctccatcacaaccagccctggctgctgccatccggactcagggctggccaccctggccgcagcctttggggcatgaggtttgggccaggcccccggctgttgcctacagatggagacccaggctccgtctctccgtccgtctgtcttctctctagtacagcctcctgttcccgcagctgctcccccttcctccccaccctcctcccctcaggcagcctggttgggctgtgggtgtaaatttccactaggagagggggcctgttcattctggcac

SEQ ID NO: 10108 - DNA, 1039 bp, Homo sapiens
atttgtttgggaaagtaactaacagaagcaagtagaagggggcaggggggtgggggtggcatggtggtggcagaggcccaggaatttgagtccagcctgggcaacatagcaagactccgtctctacaaaaaaaaaaaaaaaaaaaaaagccagcgtggtggcacacgcctgtggtcccgctacttgggaggctgaggtgggaggatggcttgaaggatggcttgagcccaggaagttgaggctgcagtgagctgtgatcgtgccattgcactccagcttgggtgacagagtgagaccctatctcaaaaaaaaaaaaaaagtctcatttactcctctaaaaattaaaattggaccttgatagtatcatatcaaaagtgccctagctgcctaacttggagccagagaggcatgcagattcggaccccatccacagataacccaatgcagcaaatggggggtggtgctcagaaccctgaatggtgaacaagaccggtgatcacagtgcagagccggggaggagctgcctggggactgcggggtcagaggcaggggacttggaaagcccacgaagctgttgggcgcaggaggcaccccaaggtcctgggaggccggcctggggtctgggcgggccaagcccattcctcttgcctagcagagggccctcacctccaggctgcgggctgggggcggaggctcagcgtgaaggaagggcagacggctgcaaagtcggcgcgcggagcatccatctgccctgacagccagcaattacaccgcgtgatcgccagattactccaaatgcatttattacaggggttagaagcgggggacttatttactggcaaatccatactcattacaagactcagcctagcctagactgaaaacagctcaactgaaacaaataattaccaaagtccttccagcgcgaggctctcaggtggttgggagtgggggggacgccaagccctttccatcaagacaagggaggaggaggccgcggttgaggatgcctgggtcggggaaggtcgacgccggcccg

SEQ ID NO: 10109 - DNA, 1032 bp, Homo sapiens
accacataagatacaaataacctgttaacatccggaaagggaattactgttggtggctcttaagacattcctctgccgtgtttatagggggtacgggctctttcagataactttcatctttggcctccctgttcacacttacctcctggctccagccagcagaatcccacaagcacctctctctctggctagcctatttcgacgccacacaccactccaccctccgtcacctctctccccacttctctcactcttggatgacaagccctgagcgctgggccgtgtggcttcctccccatggctcttggcctctccttatgagctggaaggcaccaggcagggtcctcggaaccccctggcggctcactttgggtacccaggtgggctgctggcggtgtggggtgtggaggtgcgttgtgttggggaaaaacagcctaaggctagttttggggttttgtgggggtgtcttctcacctgcgtactcagaacttttgaaaatgggactagcccgaggacaggtgggctcagaacattgcaagcctgcgttccacacaagaaaggtgagagaggcctggagccgcctggctccagggagatgaactggtggcggccccgcatccgccatggctttgattgtcggtttgtggtgcgtttgttttttcccgtctacagaggaagcccgatgagttcctccaggtgggtggctccagatgcagggattctgcgggggcagcaggcaaggcagcaggtgtcgcctgggatctggatttcttgcagcgcctctgtggggccctcccccagttctctcccccttgtcatccactcaaggcaagtcttggagaagggaaactgagttactgacacaggttggggcagccaccggatctctcagagtggctacatttctccatctggctcacagctggcaacacgtggatccaaggcagggtggagcgaggtgcttccaagaggtaaagctgctgagatgagcccctctctgtgccagctgctggcggggcaggagcaggacga

SEQ ID NO: 10110 - DNA, 1025 bp, Homo sapiens
ggcaggacaggaggtgaggatggaggaggagggtggggcagagagcacctgtggggcccacgtcaccccactcagggccaccggccactgagaattaactttgcttctttggaatataaggaaaaacccgttaactgtatccagacatgaaatcagatctcaggcagaagtaatgagttcttgttttatgttaaatttagcagagactgctattgttctcatggaaattttgttccttcctgtccccctccctttgggatgtgagagaggcagatgaggctccagagctgtgagtgtaatgggtacatctaggggatggggggcgtctggggtggtggcataagctcatgtccccaaacacccggacagtcccacttttaccccggagccacttggttgctggagcctcttccaggataacccatagctcctgctgacacatacttctccatgtagagacccctcggagtctacgttcagctctggttcagctctgggtccccttgtggtgactcaggtgtcagtagacctctggggcctgtgggtggggacagagggcccttcttcctgcagcggaatcattttggttgggatggtgccggagggaacagtctccatcctgccgggtcaccgcctccgagccagggcaccccaagaacagagctgaccctcgggggcaaggcccggggaggggtgggctgagcctcgggggcaaggtccggggagggggtgggctgagcctcgggggcaaggcccggggagggggtgggccgctgagaccacgtgtgccccggacacctggcccctggcccgatggggtgccaagccgagagtcagcagcaagagatgaccgtaaaagttaaatctttctatttatttcaagaaagaacaaggcaagtggacttggacattttctatgaaaatagacaaacagaaaataggaccaagtagttaatcacattcatctcaacattgaagtttcaaggcacctacaagaaggaggccaaagggcggttcgcagtgca

SEQ ID NO: 10111 - DNA, 1015 bp, Homo sapiens
gtcttcatccagctcctccccacgggcccgctcccgcgtcgacaggaaaatgtagcccccgatatactcgtgtacaattcggcagctggcagacacgcagctgaaggccacattgatgtgttcatcaaactcgatggccacctgaagggcagacagaggggcaaatggtgggtgggataagggagcagcccctgccccaccctggctggatccagctccggcctgcacctgtcccccatccatataccctgggtctgggcccacctgccggatgtcccagttgacattccactggcgcatgttgctgaaacgccaggtcttgaccacgtcgcccacggccaagtcgatgcggatcagtcggttgttggcgatgcccaggatctcgtctttcctgctgcccttgaacctggcccccagggagagagagtgagccagggctccaccctgcatggccagagcccgcccagacaatgtggcgccgtgctggagagccagcccttcccgactgcagctcaccagctgtgtaaccctgagcaagccatttgggttccctgggcctcaagttcctcatctggtaaatgggggttaattgataaaatccccacaacagcatttagcagcatcgggcaaacaggccaagcctttaaatggtaactttttttggtttttgttaccatcctcatcaactgctgtctccctcccttctttgcagtcttgggaaacaactaatcaaaggggcccactccccataacagcatccaccgctagccctgtcttgcggaccggcgaacccaggcccagacagtgaactgtccacagcagagctggagcaagaactggttcttctgctctcctgacctgaaatctcttttttttttttttttttttttgagacggagtgtcgctttgttgccaggctggagtacagtggctcgatctcggctcactgcaacctccgcctcccgggttcaagtgattctcctgtctcagcctcccgagtacatgggattacagg

SEQ ID NO: 10112 - DNA, 1040 bp, Homo sapiens
ccgccctcgccgcggagccgcgcggagcggagccggcgagctaacccgagccagccggcgggcgtcccggaggcggtggcgcagggaggggcccgacgctcgcacgtggccccggcggccgccatggcggacagcggcaccgcggggggcgcggcgttggcggccccggcccccgggccgggcagtggcggcccaggaccacgcgtctactttcagagcccccccggggccgcaggagagggcccgggcggggcggacgatgagggcccagtgaggcgccaagggaaggtcaccgtcaagtatgaccgcaaggagctacggaagcgcctcaacctagaggagtggatcctggagcagctcacgcgcctctacgactgccaggtgtgttcccaccccgcgccgacaccccaaaatcggtctcgcgccggtccgcctggcagctccactgtgagctcgcctgtcactggagtcaaagggcgctttgcttccccgcgcgctcccctcccctctgcactcccgcccccaatatatactctttcttgcctgacctaagtcacttctgccttctccgttgcctcggaccctgccccccatcatgccactccccaggtcaagcctagtgtcctccagacgcctcaaggggtagcctgagccttgggcaagaggcaagggggctatcctgggctggcagcggcaggaggtctcaccgcctggtgcccgctgggttagactgtggttacaaggtgctggtctggtaggacggctgcggctgggctgttctgtgggctagcctggagctccatcttggcgtgcgtgcaggctagcccgctttctgggctctgcttctccacccccatgactccctggttgttcagacggtgactcaggccccggggggcagggtggaggagtgggtttgcccggtgctgcctgcctaccctagcccagccctggaatgcagctgactacaaacaggataggggcttcctggggagggtgtggcagggtggtgggcatcccctccctcaccaaagcatggg

SEQ ID NO: 10113 - DNA, 1037 bp, Homo sapiens
agacataaataacctcgagtgagttcaggttgtaaaagtgcttcagggttcattaaacctgcatacacaacaccaaggaggggcggaggaagcagggaaacagatgagatcgtgctgcccaggtgtgatcatgctgggctggggcatgcagtgtcaccccgggacaaagcctggaaacagtggggagtgatggcatgacaaagacggaaagaagccacagaaaaggtagttggagaaagttaaaaatttcccagtaaaaatgttcctgagagcaagcgccctgggtgcaagaggggagagtagctgggaaaggatggaatgaacttggccttccctgcctgtaagatgtggatggtctatggggatcgggtcctcagtggcaggaacataaagtcttgcaggaaataggggtcaatgcaaagaaggtgtgtgtggccaaagcaggctgccacgattgggctgtgaggtgacggcatggttaacaagctactgcctgcctggcagtggactgccaagaagtctcagctctactcacagcaaccctccaagggacaagtgcgggctgtgaagaaccttggatgccaggccaagctggagtccaagctgtgcttagtggaggatggggatgaggcccaggagctgaggctggggtgcaaactgtgaaaggggaagagaccagacagctgccagcattgtttttttgtttgtttttgagacagagtctcgctgtgtcgcccaggctggtgtgcagtggcgtgatctcggctcactgcaacctctgcctcccgggctcaagtgattctcctgcctcagcctcccgagtagctaggattacaggcatgtgccaccatgcttggctaatatttgtatttttagtagagacggggtttcgccatgttgatcaggctggtctcgaactcctgacctcaggtgatccacccacctcggcctcaaagtgctaggattacaggcgtgagccaccgcgcccggccagcattgttttttaatggtttatgaaacacttcttaagagaaatt

SEQ ID NO: 10114 - DNA, 1019 bp, Homo sapiens
gagaggggagcaaatggttttgggcaagggctttggccattcatgtcaagctggttgtgggtttttcaaggtgccatagccacccccaaagatgtttgtttaaagcgtggggttttttaatctctgccacccttgtcaagggagtcttgtaaagttgccgagggtaggttcatctccaggtttcgggattcccatccgtcctggcgatcctgccagcagtgggtgggcagcctgagctccctcgggctcgcctgccagcctggagttcttcctgtgctccttgatcacctgagctgcctcagattccatttggtcctctccttcctggaaggcttccttttatgttttgttttaatcccaaatgtctgaatgttttgcagtgtgtaggggtttgagccccttgttcattctccttcctttttcctcccgcttccctctccatgaagtgattctgttgacaataatgtatactgcgcgttctcttcactggtttatctgcagaaatttctctgggcttttttcggtgttagattcaacactgcgctaaagcggggatgttccattgaataaaagagcagtgtggttttctgggtctgcttctttattttctttttaatgcctgccccgcccggtttttcttttcacataaacttcctctaccaccagcagcagcagcagcaccaaaggtgccttaactttcgttcagcaccaggtccgggggggtgagactgtgggtggttaattagggaagcccaccacctgcctcctgtgtgtggctttggtggtgggagctcagtgtgtgggtggctccacagtctcccctttggtgactagttaacatcgctgagaaccaattttgcccctccttgttcactgctcatttttctagtctctgtcctttgaaggctttttcctggggctcagacgtccacgtttgatgagctccagtggtgatttgtgcctggaagctgccacctaaggccctgggcctggggaggcatcaacactaaaggtcaagc

SEQ ID NO: 10115 - DNA, 3644 bp, Homo sapiens
attccgcatgttgaagaaagctgctctggctctgcagttcccattatcttggaaaatcagctgtgtaacatttccctggcgtcactggcaacttttgtgaaaccctcatctctctttttcatgcacagcctcattggtcaaggcccgagggccaagtacattgtccttgaacacacattccattcttctacacgcctgctccccatatgaacagtgagcctgaaaacaaattcttagcactttatggttactggtttattaagatatgtggtttgtcatttaatatttgaataaatatttcatataattgaataagagctgcaggtattgggagacccttactagtacaggtctggttgtacagaaagagtatgtacaaatttctataaggtgttgaattttgttattaaatgtcttatttaaggaattttaaatgtattaatgaaaatgatctttgctcaattggtatttttccttgtcccatgttaattgggtctcattttgggctatgtttaacatttaatgaagaaaaaactcaattcttgccctcaagtaatttgatgggagtcgggtattggtgacgtaacatggtttatggttctgggtaccaatggtaagcaagccttggtggggaggaagaggtgaaacacctcctaataattgcttggatgttagccttagtgaacagtctttattgctaacccctcttccaacaaactgtttgcttccttaagtgataaccattttgaagtgaaaaaaacctatagatgtaaaaggactcctgccgataggtggttgggggtttttgcttcaatgtgttcactgatcagtcgtccctttcaaagtctccgagttcttcatgcttgttgttgagatttgagatgtttattggtaacattgtcttttttccatccttttttttctttcctaacctggtttcttccagtgcaactgcagatagaagacctgactcgtaaactgcgcacaggagacctgggcatcccccctaaccctgaggacaggttgggaaacagttttaaccagctgacagtaacgcttttacctttttctcaatacgttttactggtggcaacatattgtgtcagttcaataaaatcatagtatgacgactgtaccctgaccactttggggattaaggtttaattagaaatatgtatggtcagtcaacagttagaaaattggaataaaacttaaaaatgttgggagaataaaaagttacaggaaaatggacaactggtttccaattggtaagcatgtagatcttaacctgatttacccacccttaggggacagtgaggtggcccgttaacctgccttttcagtacctgctttggccaaaagcccagggcatagagtttttctcacaggtacacagtgcagggactaaaaatatttttgagcatcactgaacttgagcaagccaggagctctggtcagctcattgctgcagtcttcctgctcatggttttgagatggtttcaaaatcagatgagatttctaaccaacttctttcactgccagttaactttcagccttggccattgccttgggggtgttgggaggggccagaatattctcacctattttgggaaggcatgcaaccaaccctaaattactttttttttttccttaaagggagcgtgggcctcaaacagctgtggtcatgtcatttcagtttgcagtttctctcacctcagaaaaataaattgtgtgggggagatgaacttttttaaactggaattttattagctgattgaacagctaaaattggtcatttaattagaagggcagtaagtctctccctctcactgaattttctcttagtacatacagaatagttgaaaagactttgctttaaaaagtagtgtttttggtttttgttacccagttaatagcttattaaatcaggaagatgatgtaatggctttagaagtcactcactcatgcatctttcttccgccctttgccaggaaacattaacttccttgtttctccatattgactctttaatttgacttactacatttgctatattttacctatagatagattttggttgtagggttgtgttgtgtttcgtttctttttgaagattttttttttttttaaatttacattgtaggtcatagaccacaactgtttagtgcctttttggcctttttccctttaataatatgtctacaggtcaccagtcaattcctccaaaggttgaatttttaacaaaccttctttgcttcctggataactgggattagaatttagttgatctagccgatgcctgttggaggtgaagaagtcgggccagtctaacctctagaatactagcttttgcctttcacttctgcaatttgggaggaggttaaactgttgtgaggccttcacatggccaattgggtgctggtaagacttgtttttgtaactagctaagaatgcttaattctagacagctgtggggtgggaattagaaatgtcaagcatgttagaaataaaaccagagcagggtttttcctcccttctattcagttttgaaagaggccctaatgcctgattggttttgcttttgagcccaggttggagggaaatgcatgggttttcttaattaagataatttcttaaaaaggtgttatatcacttaagccactttattgttattttgatgctgcttaacttgcacagtaaaaacatgtttaaaacttttcttgtagacttaaatgtataagatggtagtctaatgagctggggtatgtttgcttttgttcactcttaatggattgtgctaacagtttatacaaatgctagaaacggaggtgtcatttagccgtcattagccatgaacaaacctgaccttttattccatcgtgtgtgtaacgtggtgtgacatggttccctttaggctgaagacagtgggagcagccgagttcagtccttgctctccaactaggcaaggttctctcaactaaaccaagggtataggagtcttgattactttcagtatgtttttttaataacctgatccacatggtctcttcccttcttgcagctgctactaaattttcattcagaatatcaagctatggtcctttttgtaatcttaactcaaaattctaggagtgtaacctctcttttttattaccgcaaaatccagctgtggtaaactgaccattttatcattacatttttttacttgtagcaacagcattttactccttaaaaaaatgagagagagaaaatctgctttctggacttgtaaactctggtggagaatcataggttttccccttgctgtttgcaggttcagaccctagacaagtatgaccaaatctgcatttgcagcctctcgcagaagctgctttagcactttaacgtttttctctacccagactccccaacctcgaacagccagaaaacaggttgtctcctgggccttggacacagccagccaggccattgaaggaaaagcaaagacgaagcgaaccatctctctccattgtgggggccaagtagctgcagtagccttcagtcccagttgcattgggttaaagagctcatacatactatgtgttaggggtacagaagcttttcctcatagggcatgagctctccaagagttaaccttttgccta

SEQ ID NO: 10116 - DNA, 2540 bp, Homo sapiens
cttggtagggtgtaactaggtttagttgtggtccggcctctcgtacaaaagtgactggtgaggggagtggaggtgggtggagcccccagtcccatcaggactgctttacaaatctatgattcttcagtgtatttttgtctcccctggggatttcagagcactcatggttgatgtagtatctatctaacactctctgcagccatatgcattaagattaccacgtttatatatctgacagtttttctagacaaaagaaggtgaaatgttaacttgcctgaccaaggaccacatacccttgtagtggccataagctttaaatctctgatctctgaggtttgttttctgtttttttaatgtttaagttttaggttaagctctcagcttcacagtctgctgagtttctgtgtagtaccttaaatacccttagctgtctgttgataactacttgtatttacatcggatggattttgtctctgccttttagacttcccaagtaagaagcggaagaggagccgctggaaccaagacacaatggaacagaagacagtgattccaggaatgcctacagttattccccctggacttactcgagaacaagaaagagcttatataggtaaatatacgttctgcatccaaatgcactttgagattgttacgatttattctgagcaagatctgcattttttgaaagtttgagattgtagttatcttttttgagatgagatactttcacgactttggtatcatctgtcagtttttgcccagtgagttctgcatttgcagctccttgttttggtctgttcgtaactgcagtgttctccatgagtatcaggaaggtagggtttcacttaggagtaagaacagtccccagtccagcagccacccttttcagctgctgttcattgccagttgatgaggtgagtgtcatctgcctctctggacaggccccagtggagaacaccgcaggtactgtaaaccaagtacttttcacagcgtggcctttcaccataattttatatttctccccctaaaatgtggtcttttactttttataggtactttctgaaaaaaaaaaaatgacaaaaagtggttctgaaagtgtgtttacaatttacccctttttattttcttgaatttaagagtttaaccttcccttcaacatcttttctggtttggtctatggagagctgtcttaaaatgaaggctcttgtatttacttttaaagaactctgctgggaaagggatattgcatggatatggaatgaagtgctaggataaaaaggttttatttgctgggaggttttgagaattaatgactatccacagtggaattgaaattaacctcaaaattgcttttttggaaaaaaaagtttttaatgcaagttttatctttatatacctgtgcagctgtctcaaaaaagttcactttataaacatttcctactaaccaaataaacatcccctttggaggaaattcgggcaaagacctcctaaacctacgaggctgtggccttcacaaccaaaaagcttcaaggccagcatgttactacttttgagggtcttaatttcctgttttttagactgctgagaattttgaggcgttggaattgtctgtctcctttcacagtactactaatacttgttctttcccctactgttcctgtctactcccacccattccattgtgtctcatattagactagtctgggtctttacatccttgtgaaatgcccctagtggagtgatatcccaagaacacaagcatacttagaagatgggaagagcacaaattctttatatctccatttctgtttttgtggagggctagttagttcactgggccctaaggactatttatagctataatcaaaatagaatcaaaggagaggtgtagttctccacagaagagaatgaccctttttatttagatcaggccccacatctccatagtcagctaggaagactcaccttctcccctcagtgaaggtgactttcacctcgagttgttgagcttaatactcaactgcaaagtcagaactttttaggcataaaggagcttggggaaccatgtgtcttactacttttctgtctcccacggtacatactgctttgtccaggatgccctcaatatctttttttttttttttttgagagactgagtcttgctgtgtcgccaggctggagtgtagtggtgcgatctcggctcactgcaacctgcgtctcccgggttcaagtgattctcccacctcagcctcccaagtagctgggactacaggcgcacgccaccatgcccagctaattttttttgtagttttagtagagacggggtttcaccatgttggccaggatggtctcgatctcttgtcctcatgatctgcctgccttggcctcccaaagtactgggattacaggtgtgagccactgtgcccggccagtattttctttcgataataatgggttttcatttcttcagggttttagtgtgtgggtgtggtatagccctgtggatgtatttaaagttagaaggaatctttggttag

SEQ ID NO: 10117 - DNA, 1065 bp, Homo sapiens
ctgtatcacggcggtgacgacgcgctgctctctgacttctgtgccacactgctcggcgtttccggagccctgggtgcccagcaagtcttcgcctctgcggaagaagccctgcaggcggcagcccacgtgctggaagcaggcgagcacccgccggggcccctgggcacacgaggggctatgcacgaggtcgcccgcatcctgctgggcgagggcccgaccaaccagaaaggctacacgctggcagcactgggggacctggcacagaccctgggccgtgcccggaaacaggccgtggctagagaagagcgagatcatctttaccgggcccggaaaaagtgccagttcctcctggcctggaccaacgaaaatgaggcggccctcacacccctggccctagactgcgccagggctcaccaagcccatgctgtggtagccgaggaggtggccgccctcactggggagctggagcggctttggggaggccccgtgccacctgccccaagaactctcattgaggagctccctagctgaacgggttaccctggtcattaataaagctgtgactggtcagccctgttgcttgtttctgagggatagctattgtcccaccagaccccagattcctgggcccacaagccactgctcagcttctccctgatcagtgctgacccagccagtcctaggggagagaagtgcaccaagggttcccagtgtttatccaaaggaggaagagcatctccgattttggtcactggtttcatttttttccttgctctaaaccacctcttctctgaggttgttcatcctcagggctgggtggggtgcaagcccttgagtcccaagtgtgtcgaggctcctggtcctgggtgtgctggtggatgagtgggcacatgcccccacctggggtggtggagccgcttcagtagatgtagggcatgatgcggtaaggcacacgccggcagtactcctgccaggccaggccgtacttctgcaggcactgccgctcatcccgggcctcacggtgcaccagcagcgcggtgaagtagaggaggtagaagtagggca

SEQ ID NO: 10118 - DNA, 1051 bp, Homo sapiens
aaggtatcggaagctcaattgcatttgaggcctttccatttgggcttctgatacttttaggttttgtaaggttagtgggagccactgaaggtgttatgaaggacagcagctaatgtccacatgcacattcagacacatgcacagacacagcagacttcctgctgtacatactttgaaaccaaagtggaaattcaggttctgaacttgtgtgaggcccttgaggtgcagccccagggaaagaggggctgggtttccagctgcgctactcttgccccgcagacatagatgagtgcagccaggacccgagcctgtgccttccccatggggcctgcaagaaccttcagggctcctatgtgtgtgtctgcgatgagggcttcactcccacccaggaccagcacggttgtgagggtgagtgtcctcccagctcctccctcggactggacaactcccctgagctgcagctgggattcagagatgtgtcctggccccaccctcctaaatttggggaaccggaagaaatctcttttggctgggggagtctggtggggccagacgatgaagggtccagaacaccacgttgagaacagagccaactctcaggaggaggctaaggggagccagggaatgtggggggaaagacctgtggtgggtgggcagggtggacagggccaaggggggtctgtgcacaaccctgagctgccgtctgcccctcagaggtggagcagccccaccacaagaaggagtgctacctgaacttcgatgacacagtgttctgcgacagcgtattggccaccaacgtgacccagcaggagtgctgctgctctctgggggccggctggggcgaccactgcgaaatctacccctgcccagtctacagctcaggtcaggagccgggcaggccccttcccagatcttcagtttcttcatctggaagccaaatgtgggaaatggcgccccctggcagttgggaaataggcggcgggctgcagccctaagcccacgcgcgcgctcagtcctgcctcttccctccccacggccgccctgcccctgc

SEQ ID NO: 10119 - DNA, 1035 bp, Homo sapiens
aaggctgagacaagacagagccgatcctggaacccaggtctgacctacaggcccacgatcaagcggcatacagcccaggcctcggctcggggcccagagtctcatccccttgctcagacctggcctgcaagaagcctcttccctggccccatggcagcccctgtgcctttagcaggctccagggagaaaagaaagacaggaagcccacctggcatttggtacccaagggaagctggacccagatgggggaaggaatcagcctgtgtggggtggagccaaacaagtgtcagccacactgtgcttctcagagccccttctgggagcctgtaggtgaagaagagaatgagaaggccgagcaggcaggatccaggacccattctcaccacatccaggatagctcggggcctttctgttctccatgacggtaactgccctactgtgccaggcattccctccaagcattgatgaagaggggctactattaccccattttgcagataaggaaactgaggctctgagaggtgaagtaacctacctcaaacccccagctgaggatttgaacccagagaggcttcagctccaatgctctcgtagtgagctcagaagctttcacttgaagaaagggcttctcacgtatagactgcttaggaagccagagggtcaggcagaaggcagggctccagcattgcagggaggagggctcactcagctcaacactgcccagctctgagtgaggccagagagttatggcctcccttgcctgtgggtccctgtgccaacctagggaccatcctcagagcccccacacctgctgctcacagccagaatgtaggacccgcttagctgctctcagaagagtcctgttcagcaagccgtttaaactcactcctcccatcccacccagcccatcgcctcttccattccctgagctacacttgatagttgtaacaacagctaacctttgttggttctcttctatgtgccaagcagttctgtgaggggagtagtagtattggcctgcattttacaacagag

SEQ ID NO: 10120 - DNA, 1066 bp, Homo sapiens
gccatcagagcagacctcagccagggccacagaggtcccaaccgtctctgccctcttctgctgcccctgcctcatgggctcccagccacaggttccccatgggccagctttacgcctcctgatccttccgattggggcagactaggagaggaaagacgggcctgggctgggtgcggtggctcatgcctgtaatcccagcactttgagaggctgcggcgggtggatcacctgaggccaggtgtttgagatcagcctggccagcatggcgaaaccctgtgtctaataaaaatacaaaaattagccgggcgtggtggcgggcgcctgtaatcccagctacttgggaggctgaggcaggagaattacttgaacctgggaggcagaagttgcagtgagccgagatcacgccactgcactccagcctgggcgacagagcaaggctctgtctcaaaaaaagaaaaaaaagaaagggcctgggacagtggtactgttaataggtggagtcaggaggcctgtctcaaacttgagatgtggcaataacttgctttgtcacctcggcaagtcatttccaaatcaggaaggggtcagtttcaggaaacagaaacttctccagctgtttttggcagaaggggatttaagggaatcagggtacttaaagtacatgggaaggctggagaagtcgcctccaggaagctcccactggagctgggatcagaacgtactgtcctgcctgccatcccctgtaagcacccaggaagctgggcttgggccctgggacatggggtgggactgccactcctgcctcctgacacccacaaagccagaagcgtggtgctgctgcagaaggactgaacatctccaaggctgggcccgcagagcaaacttccttggccctgtgtcctccatccatatccttcaaaggacacctcattagtggactccatttctctcttccacggaactccagtggcaagggaatccagaaacgttttctttttgcctggagatgctaatccttagcctaagaataaggaaactggtccatgtaaggactgaccatcctttcacc

SEQ ID NO: 10121 - DNA, 2065 bp, Homo sapiens
gctcgggcaccccgaagcacgacgcagagtaggaagagtttaaagacctcgaggcctctgggcacttgagtttggcatgttaatttttatcagcgacttctggggcctagcaccattcccggaagaagggagttgtcgggcagggtccttaatgggggttgcaattcttgtcttggttgggaaagagcctagctgggaacaggggtcgtttgtgtagtaactgtattaagcagttctggtgggtttgttgtaactgttcggtgtccttggggtcccatctagcattgtggggtcttggctctttctgaagaggagtcttggctcaggtgtttgggtcctccatatccgaagttctaaatcaccagttttatccaaaggctgagagcaagtactgtgagtagcaaatgagtcagtagccggtggatcttttaattctgggttcacattttggtcaaggttctgcttttcacgagttttgcatttctatcctgtaaaatgagggaaggggttgttgaactaggtgatcagaggccatggctgccattctgaggttgtgtcccatctggttctttgacagtgacttgggtgggaaaactagtgacttgccttgggaagggcactagtgaccactcgggacgtggactgagatcttctgaaaaaacaaggggcagttccctagaatccttttcttgacgtatacgtggcatgtctcctaggcctccggtgtggctgtctctgatggtgtcatcaaggtgttcaacgacatgaaggtgcgtaagtcttcaacgccagaggaggtgaagaagcgcaagaaggcggtgctcttctgcctgagtgaggacaagaagaacatcatcctggaggagggcaaggagatcctggtgggcgatgtgggccagactgtcgacgacccctacgccacctttgtcaagatgctgccagataaggactgccgctatgccctctatgatgcaacctatgagaccaaggagagcaagaaggaggatctggtgtttatcttctggtgagctcattctggcacttcttcctgtcacctgccccctttctcatgatgggaacttctgtggctcctggtcaacccagatgtgtgggtttggagggggagggggttgtaacaaaagactcctcactgccagcccaagggtttctcaaagtcacctgtggctttgctgttgctgggagttgcctgacgcgtgtttctgtccagggcccccgagtctgcgccccttaagagcaaaatgatttatgccagctccaaggacgccatcaagaagaagctgacaggtaagggccagcattggtgctgagtgcccttctgctctggccttggctgcagggcagggtgaatggcacgcagagggggtctgcccccttgtcttcgctgcctgcttgttccttccatctgctttgattggctccttcccagccacagaaactacccccaccccagtgcttcctgctcacagatgctcccctttcttctttatagggatcaagcatgaattgcaagcaaactgctacgaggaggtcaaggaccgctgcaccctggcagagaagctggggggcagtgccgtcatctccctggagggcaagcctttgtgagccccttctggccccctgcctggagcatctggcagccccacacctgcccttgggggttgcaggctgcccccttcctgccagaccggaggggctggggggatcccagcagggggagggcaatcccttcaccccagttgccaaacagaccccccaccccctggattttccttctccctccatcccttgacggttctggccttcccaaactgcttttgatcttttgattcctcttgggctgaagcagaccaagttccccccaggcaccccagttgtgggggagcctgtattttttttaacaacatccccattccccacctggtcctcccccttcccatgctgccaacttctaaccgcaatagtgactctgtgcttgtctgtttagttctgtgtataaatggaatgttgtggagatgacccctccctgtgccggctggttcctctc

SEQ ID NO: 10122 - DNA, 1041 bp, Homo sapiens
aagcaaggactgtacctgaagcttcttcctctcaccatgtccccacaggggagggcgcgggtgccgacgagttcctgcctctgctgagcctcgtcttggcccactgtgaccttcctgagctgctgctggaggccgagtacatgtcggagctgctggagcccagcctgcttactggagagggtgagggacccccacccacctccctgtctgggtgggccctgaataagcagggaaggggagaggggatggggtgccccacacccagcctgagccgtgttcttccaccctgtgtcccaggtggctactacctgaccagcctctctgccagcctggccctgctgagtggcctgggtcaggcccacaccctcccactgagccccgtgcaggagctacggcgctccctcagcctctgggagcagcgccgcctgcctgccacccactgcttccaggtaacaggccctccaccgtgtcctcagagccagacgccatccccgcctttcaccttcctgtccttggtgaagagtccagactctgtagacagatcctgggttctaatcctggctctgccactgggttgtggggacttgggcgagttacttaactacttcgtgcctcagttttctcatcagtaaaatggggtaataggacctacctcctggggttgaggtgaagattaaatgagttaatgcaggagagtgcttggggcacaaattactcactatcaaatcttcatctcaggcttgtgagcgccccactgggctgtccttgcacctgcggctgtggcccacaagccgacccctggagcacatagagcttttgccgcttggttctcccactggatctccacctacccaccctgtccctgcacagcccagaaagctgatgtctcagctttggagccagatgcatgccagccggggctgagtacttgtttttgcttctcctcctgcatagcacctcctccgagtagcctatcaggatcccagcagtggctgcacctccaagaccctggccgtgcccccagaagcctcgattgccacc

SEQ ID NO: 10123 - DNA, 1056 bp, Homo sapiens
ttcaaagaagcgttgaagttccatccccaaaaggaggctgaaaatcagcacaataagatcctatatcgccagttcaaacaggagttgaaggccaagtaccccaactctccccgacgctgctgagcccttccctcccctaatctgagaagtcagcctcttggctcctcaggccaccatttaggcctgactggggtaagaaatgtcgctccactttacagaggtagctgtggtgttgaaacactggacttggatatggggtgctgggatcgattcctagctttaccactaactagctgtgtggccttgagtaaatcccgttacctctctgagcctcggttaccctgtctgtaaaaagggaggtgagaatacctacctcacggaactgttgggaggctcagatgagatgctatatgtgaaaacattctgtaagcttcgtacaaatgtgaagtattaatattatcgcagtattattgttgttattattattgttattattaacaatcttgggtgggtagtaggagagcaaaaagtatgaatgggatggagctaagaagtctgaatacttaatgaaatggactttttggaaagaaatcagatgaaggcataaaatttagttcttagctcttgaacagaagcctaaaattcctggttctctcagggcttcgccttcaagggttctggaggagggaagggtctgcaggttccatgggtgacagcctgagatctgtcccttcaacgggctgggctgggtatgtgcctaccgatgacaatgtgtaaataaatgcgtgttcacacccacagctggctccgttactctcctgagctgggggtggggggatcggggccggcttctccccttgcacgccgtggggagatggccgcggacgaagggcaccgtctgcaaagcactgaaccatcagggccttccctgcaggccgaaggcctgcgcgaatgtcggccagttactatggagaccggcccgcggtatcccagcatgcctcgggaccaaactgtccaactgtgagcatccccgacggtcgcctcctgatgacgcac

SEQ ID NO: 10124 - DNA, 1082 bp, Homo sapiens
cggggccgtggctcctcctccctcgtagggggcgagccggcgcgccgggggctgggggcggtggcgggcggcgggcggcgggcggcgggcggcgggcggggcggcgctcggggctcggctggcctcggctcgcctcggctgcgctcggcaggctgcggtaaatccgggcttgcggccgctggcgtagtctgtggccgggtggtcgttgctgcgcgccccgagccccgagagccatgcagatgtcctacgccatccggtgcgccttctaccagctgctgctggccgcgctcatgctggtggcgatgctgcagctgctctacctgtcgctgctgtccggactgcacgggcaggaggagcaagaccaatattttgagttctttcccccgtccccacggtccgtggaccaggtcaaggcgcagctccgcaccgcgctggcctctggaggcgtcctggacgctagcggcgattaccgcgtctacaggggcctgctgaagaccaccatggaccccaacgatgtgatcctggccacgcacgccagcgtggacaacctgctgcacctgtcgggtctgctggagcgctgggagggcccgctgtccgtgtcggtgttcgcggccaccaaggaggaggcgcagctggccacggtgctggcctacgcgctgagcagccactgccccgacatgcgcgccagggtcgccatgcacctcgtgtgcccctcgcgttacgaggcagccgtgcccgacccccgggagccgggggagtttgccctgctgcggtcctgccaggaggtctttgacaagctagccagggtggcccagcccgggattaattatgcgctgggcaccaatgtctcctaccccaataacctgctgaggaatctggctcgtgagggggccaactatgccctggtgatcgatgtggacatggtgcccagcgaggggctgtggagaggcctgcgggaaatgctggatcagagcaaccagtggggaggcaccgcgctggtggtgcctgccttcgaaatccgaagagcccgccgcatgcccatgaacaaaaacgagctggtgcagctctaccaggttggcgag

SEQ ID NO: 10125 - DNA, 1125 bp, Homo sapiens
acgccctgtgtgggcatcctcatgtccatcgtgtgttacctgagcctgcctcacctggtgagcctgctgttgggctcgaggccccacctcaaagcatcttggatagagtcctgagcctgaggccctgagagaggccaggggaggtggaggagacctggtctcagccctgacccccagagaagacactgaggggccccagcctccaggccaatggtatggggagggatccagacacctcaggcaagccaggcaggcccaacactttcctgtccttctgcagaagtttgcccgctactacctggccaataaatcatcccaggcccaagctcaggagctggagaccaaagctgagctcctccagtctggtaagccctgagaccctcctggggaggtgggagatgcagaggaagctagagccacctcccctgggaagctgttccatctgttcccagccagagcccacccctagtagccttgtgcaaacaggaagatcatgaagggaagttggtaggattaaagtcatccctgctgttgtttgggcctcagtttccacctctataaaatggggaggcgacagaggttccatgcatgcaaactttggatccgaagacctctgaattggaatactagtttcacaacatcccagctgtgtggcctgagacaaaccacttagccactgcacccctctgaacctcaatgtgtcatttgtaaagcaatggtaatgagataatccatctaaggtgcttcgctcatcacccgacccatgcacgcgcttcctggtagctatgcatatttccatcatgaattcccttcgcctgcagcctcagcttaggctggaggaagatcacctttttttgttttggggtgagggggttgttgttattttgagtcaggatctcactctgtcacctaggctgcactgcagtgctatcacaactcaactgcagcctcgacctcctgggctcaagtgagccacctcagtctcccgagtagctgggactataggtgcaggctgccatgcccggctaatttttttatttttgtagaaatggggattcaccatgttgcccaggctggtctcgaactcctgggctcaagcaatatgcccgcctcggccttccaaaa

SEQ ID NO: 10126 - DNA, 1051 bp, Homo sapiens
cctcaggaagcccgaggtcggcggtgtgatccgggcgatcgtgcgggcaggcctggccatgcccgggcccccactaggcccagtgctgggtcaggtgcggccgtggcgggaacccgacgtgggggttgtctaggatggtggaagctaggacgcggatggagggcgctggccctggaaccacccgggcctcggttcagagctcggctctgcttctcacacgctttatgtccttgtgctggttacaaagtgtcttccacctgggcttcctcatcccttcttcaatgtgctgtaatgaggataacgtgggaagatgcgtacgatcttctggctcacggaggggtagttgaatctgggtacagatgggaacccagagaagtgaagacgaaggagggaacggacggcgcctcctgggcgataggaagccgtcccctcctctcaccactaaccccctctgcttccctcacagagaggcgtttccatcaaccagttttgcaaggagttcaatgagaggacaaaggacatcaaggaaggcattcctctgcctaccaagattttagtgaaggtggagtctggactctgatccctggtttccttctccctctgttcttcctcggccctgggactggtcatctggggttgtttctctgctcctgacttgacttcctattactgggctccactttccccatttaggactagatcatattttttctgaaccagccccatcttgccatgttgcagttcctccctttgcccctccatctcactggggcttccagagcagaatgagggcaggaatagaggggacagggatgtttgctgcagatttatttttttctttctttttttctgagatggagttttgttcttgtcgcccaggctggagtgcagtggcacgatctccgctcactgcaatctcctcctcccgggttcaagcaattctcctgcctcagcctcccgagtagctaggattacaggcgcccgccaccacgcccggctaattttttgtatttttagtagagatggggtttcaccatgttggtcaggctgg

SEQ ID NO: 10127 - DNA, 1046 bp, Homo sapiens
ttgttgtttttaattagtgaggagctacaagaacacatttataaaaattaagaggaaacagccccactgcatttgagaaggttaccatttccttcgaagttcctgctgttgccccttcctggtgggggagacactgtcctgtttcagtcattccgttgctttgctttatagttttattaatgtgtttgtgttggctttgcatgttttcaaatatatgaatgaaatcatgcagagtttattcttttacagtttgccttttcacttgattatgttcctgagatgtatccggattattgtgtgtagctgtatggcattccttttccctgctgcctagtgatccattgaaaatacaataattgatttttctatgtggttccactggtcatttttctgcccctgtgccctttgggaatcatctcctaaactctagtctcggcccttgctcttccatgtaaccttgagaatcagcttgtcaaattccccccaaaaaccccttgagatgtagaatggaacccagctgaatctatagatcagtctggataaaatcagcacctgtgtaaaattgaattttcccattcatgagcagggtttatttctgcactcaatgttttcaataaagttgtgtaccttttcccataaagatcatgcctttttaaattggattaattcttaagtatctgatatcgtatgctattatacatgcactatcaaaatagactgtgagcctgggcaacatagtgagaccctgtctctgcaaaatacaaaattaatgggggctgggcactgtaatcccacactttgggaggctgaggcgggaggatcacttgaggcctggcgtttgagacaagcctggacaacatagtgagaccctgtgtcttaaaaaaaaaaaaaaagccttgtgtggtagtgcgtctgtagtgtgggggatgggggtgggctgaggtgggacgatggcttgagctcagcaggtcgaggctgcagtgagctgtgaccgtgcttctgcactccagcctgggtgacaagagctagactctgtctcaaaaaaa

SEQ ID NO: 10128 - DNA, 1779 bp, Homo sapiens
ttttattgcaggcagagtgtctctggcacagtttgccttggccttcgtgacggacacgtgcgtggcgggtgcgctgctgtgcggggctgggctgctcttccatgggatgctgctgctgcggggccagaccacatgggagtgggctcggggccagcactcctatgacctgggtccctgccacaacctgcaggcagccctggggccccgctgggccctcgtctggctctggcccttcctggcctccccattgcctggggatgggatcaccttccagaccacagcagatgtgggacacacagcctcctgactccaggaagagccagagctgtgcagggaggaaggggtgagaggggggcccccacacctagactcagtaaggaagtcgggttggaccttaacatctgcattggacaactccaccccttccttggccttgcccctgcccgcctacactcctacgtgtccagggcttgggccgtgacttaggcagaggagtgcagaggagggtctggcaggggctgctcaggccgcctagctgcccctttgccaggttaataaagcactgacttgtttctcagcctccctccatctttgcatagtttctggcccctcactttgttgctggggctgtttctgggaccctctgtagggcctggaaactgcaggatgcctgagggtctcaggggctggggctctacctcccctggcctgggtgagttgggggtggggcaccagcacgccaaggcagtgtcctactgatccaggctatgagaatccaaacattctttcccaggtttggcattttatagttagaagcatttctgcaacagcagtttcatggaacctctcttagctaacctggtccatggggcagcagttacgctctaagaatccatgtggtaagatcatggtgcggcaaatggaggcagggtccaacccaggtctttgtgcttttgcctttacccttgcacagctggaggaaatgagtaggaaagaaatcaaggtaaagaaatgcgctggggctgtttgggcatctgtggagggtggtgctgacagggctaggcctgcacctctctggcctcctcaagagctgcttgttaaatgtttccgtgtaaatagaatgaatagagaccgccatttccacatggcaggcctaaacacatgtgttcgtctcagttttctcttaggatctctctaagatgatagtaaagaaaatcaaaaataatacaaagggaaagaaaacaggagggaagacagtagaacacagagcctgaccacattttcttttttctctctgttgccggggctggagtgcagtggcacgatctcggttcactgtaacctccacctcccgggttcaagtgattcggcctcccgagttgctgggattacagacacccgccactatgcccggctgatttttttttttttcttttttgagacggagttttgctcttgttgctcaggcaggagtgcaatggcgtgatctcggctcactgcaacctccgcctcctgggttcaagcgattctcctgcctcagcctcccgagtagctgggattacaggtgcccgccaccattcctggctaatttttgtatttttagtagagacgggggtttcaccatgttggccaggcaggtctcaaactcgtgaccttgtgatccgcccgccttggcctcccgaagtgctggaattacaggtgtgagccattgcgcctggccatgcccagctaatttttttgtatttttagtatagacagggtttcaccatgttggccagg

SEQ ID NO: 10129 - DNA, 1052 bp, Homo sapiens
caggaagctgaggctggaggatcccttgagcccaggagtgagagactgcagttagccactgcactccagcctgggcaagagtggctcctctctctcttaaaaaaaaaaaaaaaaattaaaaagcaaagccacagcaatttgctcttttatgtgaattgagaagcaaatgttatgaacctgtaataagttgtaccctatatgcatgtcagcaagacttgagatctcttgagaccaccatgcagctagtctgtgtttatgtgtgaagcaaatgatcttaaaatttatagtttgccattaatttttacttttaatgcagctggatctagcatggggtgggacatgcttccgaagtaagctggtataaatctatcagataacctgtctcttatgtttcaaagttaaatattaaattcatatattgtggtcttcaaaaggtattgctaggacattttaaaatgaattttgactgcaagcagtggttgttcaactaacctctttttagcgatgacttttaaagaaacttaccttccaggtgtgaacctcaaatggactgaataaccctgagttggttgcagtcccaggagcctgatgttaatgaggctgccaggatgaaatactccagaactgttggggatccaaattcgggtctcaccctagcagaactgatccaagaacgtcacaacttttgaagtcgattggcacagatcaagaccaagatttggccctttgtctgtaataagtagaggaacttggtgtgagttaactttttttttcccccagccattggtgtctggagttcccatcatcaatagaaggattagagaattctaggaatgatttcttttgatttggcaagggagatttggtcaattaggggaactactggaactgtggctctcactctgtgacagtgtgacatgtaggtgtgttggaattgggtgaatgactggctgctccttgatatcctaccccttgtgaccatcatttctgaaagcttgtttactgtgaaagattaaaacaaaacacatttagaatagtgcaattcgccatat

SEQ ID NO: 10130 - DNA, 1045 bp, Homo sapiens
ccacggtgtggacagtgccgcaccctcaacataggccatgtggggagtggctgcccctgcctcagggtcattctcctgccatgcgagggcactcgccttctgccttctggttcctcacccctcagaccagccaggaacctctcagagctgaagcaggccctgggggcagaagtgccagatgacagtcagaggcgcaggagccctccctccccacccccaccctgtaactccagctgccactccatctccagctgctctcaatggcttccaggtgtgttgttcggggacagccaccgccttgagtctggccaaggaggtgattaaacagctcagcttctctcaccgcctctgggtgtctttgctttcctgaccacagcctctctgcccaagcctgtgtcctctccttccgttctggtctccttcatctcacgtttccccagcctccaagctcttgaagagccgtgtcacactgagagcttccctgacctggtctcatttccctctgacagtgacctccagtgtgctgggttgaccaatgccaagcctctttttaaaccaaagtagttcaccatgggttgggatgatgtcaacaagcagtattcatgttaaaaagcaatgagggactccttccctggtgcacaattttcttcacttgtgatctctaaactgttttcaaattggaagactgggaagcattgctacagccccagccagtctcagccactgctcagcccagtggtggaaagctgagcacacagcgggtgcttactgcccccacttgccgtctgctctccagtagatcaagggacctcagacagggatctgagaagtggcaggttccaataaactgatcaacagaatgaagtcactctgggaagccatgaggtgactttacagcccaagcatgtaaatatacacacagaggataatatatattcttttttttttttttttttgagacagagtctcactctgtcagccaagctggactgcagtggcgcaatcacagcccattgcaacctccacctcctgggttcaagcaatc

SEQ ID NO: 10131 - DNA, 1024 bp, Homo sapiens
tgagtgctgtgagagtggccccgttgaagcctggggaataaggagagaggagatatggaaattctagaagcagcaacatccagggcagtccatggaggatgagtagaatttggacaagtggagatatggaggaaaagatgtttccaggtagagaaaaccaaacagaaaaccagtggtaggcagtgcctgtttgggagcaagggggtgagtgagtccagcagcagcacagaatgtgtgcagggccccatggaagaagaggtgggagagaagccccgggaagtcctgaccaccacatgcgtgtgcttccaagtgttgattgtgctcagggttgtgaagctacccaggcagtgctagcctttgatgctctccatcctgacagccacagccacctgcaaaatggcctgaaggcagtgtctgggtttgtgttcccctagaagcagaccctgaaacagtgattctagggaggtgtccccgggaatgatcagtaggggggtggagccatgagaagggacagaagtcatgccagttacccccatgggcatcaggagcccaaccctcatggggcattctgcgggggtgtagatggaacacagaacacagcactctcacagccacggcacaaggatgctgtgtgtttatccatcagctccctgtctgtcactggttgagggctgcttctgggcttgttaactctgtggctcttccaatttgccttccacacagttcaagagagcacacttccctcaccaccccagacacagaaatcctcaagcagaaaagctggaagtggggaaaccaggtgggactcaacttgctatcactgaagtgaagagtaatgagttgagaaatacaaaatgatggcaaataactcaagtcaatgtgcagtgtggtgccagaaaccacaggcaccaaggaacccaaactaaagagagtgcaagggcttcctcgttgaaatgctgtttgagctgggtcttgaaggaggagtggggttcatcagcagtgagggaacagcagtttagaaggg

SEQ ID NO: 10132 - DNA, 1029 bp, Homo sapiens
acagtttgtagaaggaaagaatgccactttctagtcattattgcctgtggggccccatatgtgctgcctgcattaccctgggctgcacactgctgtctgaagcactgaagcccatcacccctttcttcaccccgcaaacccgtccctctctggcccgaagtcgttggagcctttcctgaccaccgcattgctctgagctgctgctgccttcctgcttcactttctgtgcttctgatgtattcccgtccccaggcttcccaggtggcttcccctcttcccctgggggctgatttccactgagcagccaaccgcagcctctggccacaaggagagcggagcacaggtagggcaagaagacagaaggccccggtggtgagtggagggcttggtggtccctggacacccctcactggccacattctccttgcaggagcaggaagccgcctaccaccatgagcagcacgctgtcacccacagactttgacagcttggaaatccagggccagtacagtgacatcaacaaccgctgggaccttcctgactcggactgggacaatgacagcagctcggcccgcctctttgagaggtctcgcattaaggctctggcaggtgaggtcagaggagggtcgaggtggggggatgctggaggaggctttgtcagctcgtcatgaagagccctttaactttatgggaagactgacttttctttctaagtgggagacccagagcactctatcaattccctggtccccacatccagcctcaagaataggctccaggccattcagaactttccccagctcttccccccaagcatagagacgcttcactggcccctggactggctgagctgactaaaacagcttccctctctggcctcagcccccgggtcatgtcccttcatccttcggcactctcgctcttgccactcctttctccgcctacctctcccttacctgtcatgcccttgttgtgtcttctttgatttccactgtcatttcccacacctgttcccagtctattattccc

SEQ ID NO: 10133 - DNA, 1122 bp, Homo sapiens
aggtatgggcagaggtagcaacaaaccagttttccttgaaggtgaagaggggcagagtgagttccaaatatgtgtcttagcttgaggtgtggggcaacctcttggcttattcagaaaggcaaaggattggccgaggagaagataggatggagtttacattcttcccttagagaaattgatgtgaccccgggttggggaagggagatagcaagggagtgaagaatctgaatatttgaataaatctgccataactggaggattctagaagagaaaataaaatttcagtccccctcttcagcccagttcctaacttcctccgagggaattgatcaggaacacagtctgagaggtgggtcggggttttgctgttccttccttctgccctgggcccatctttctcttgccttcctggaggccctgagctgatttgtgacttctttttcgttttatctctctgccagtccacccatttatacttagaagcaaataagatttgaactttgccaaagtccccatttcttctaatctattattcatctcactgtcatttgttcaactctgccttcccgtgacttctctagctctgccgttctcctcccgcatatctgcggttcgctgtgctgtttctttcattacctgtggtacctactccatcttcatcttcctctcccatcgcctgagctcctgaggggaagtgatatttgagtttagtgtggggtagggcctgagcagacctagaagctaaccctgggtcacactcacccctgaaactttgtgtcttctcaacactcatggctcctctaaccaattccagctgcttctcatctttggacaagggtggccctcaaagtgtggtccccagaccattagcttcagtgtcacccgggaacaggttagaaatgcacattcccaggtaccaccccagaagtactgaatcgtaaactgggggatgggggggtgacctgtgatttaacagtcctccaggttgttgtgattcatggaagtttgagaatccccagacctgagctgttgagctcaaccctgaaagtattccagcccaggagcaggtcttctccaatcccgtgttcattctttccttgagcttctctctagtcctaagaa

SEQ ID NO: 10134 - DNA, 1029 bp, Homo sapiens
tgtctcaaacaaggcttccaaaccccctaggtcctgagtagcttcgctctgcagatgacaaaaccgagactcagaggttaagttgcttgcccaaggtcacacagacgtactgtagacccccatcatcatctacgcagctgttaaaggacatagtcatgtaacccgtgtggcacaagcgccttctccttcctcctgcccttcgctaacgttagcttttcctgcgacctcttctccgctagccagcgcgtatctgcgtctagccgggatgcctgagccccagtgcgaactgttgtgcttgcagcttcgggagacacgtgctactcgggtgaatgaatcgaacgtccccacccccgccgacagccaataactgcgagccacagcccggccacttccgcctattgcgggcgtcggctagggtccggcggcccacgtgaggctccggagacaagggagtaggcggtggtgcgccaggggcgggctctcccagcctcgccacttatccaggcgctcgccggggacgggaggggcggggctgacgtggggcgccaaggcttaaacgtgacggacaggcgggcacagggaggagtccagagcctaggggcgaggagtgacggagaacactgcccaataacgggaggggttgggctgtctgggccaataggaagtccgtaaggcggggccgggactgcagcaagttcggttgcacggagaccgcagctgttctctgtcagtggaggcagcagcggtagaggcggcggcgaggactggcgacggcgaggaggtgagtgtccgccgcgctccgcacggtcctcttcccgcggcgggtcggagcgggtggacgtgcgccggcaccgctgcgagggacgcttatgtaagggtcgcgcgcgcaaaggcggcgcgggctccgcgagtgacggctggaggagacagcgacgggctgtgcgcggtgcgcgacgcgacgcagcggacggcgcccctccccctcgcgcgggggctcggccggctggacccgcccccggacccgccccc

SEQ ID NO: 10135 - DNA, 1010 bp, Homo sapiens
ttcctgatttggctggagaggagaggatgcaggggttaagtggtgacttcctggagggggtgggccaggaatctctttgatcagaattcaggtaggggcctgagggaggcatcccgggggctaccttagctcagctaggagggaggagcagcaagtcttatgaactgggccacatggagcccaagcccccaccttcccaggggacaggagctggaaagcacaggagcccagggacaggctgggctgggggccagccccaacttcctgtgctgaaagtgcactgggccatcctccccagcccacctgcccttccagccacctgcttcccccagcccaggcagctcctgcctcccagcagccctttccctccttggcctgggaggaggctcagaggggcggcctcagccagagaaggaagctggcagggccttggggatgcttccctgggtgggaggggtctctgagtacagctaaccgagaaggctgagtctgcagggctggcagctgtgagcactatagggttaggggctggggcctgatagaaagagaaggggcgggagagaacacattgcggggaggtgcagaagctaggagttgcagtctcaggctggagtgcacagacatggagagaggaggagttggggggaggtgccctcacctgtgagcctggagctgaggcactggctggtgacgctctggggagcccaggtcctgggagtgcgagtcggtgtctgagagtgtggccaagacaaagtggccgtccagcaaagagtccttgatggtgaagatggcgggcctgggcaggggagggggcccaagctaggtcatcccattcagctcctgccatcccagagcccttccctgtcccaaggctgggaactacctgcctggagcatcaaaatgaatgctaagattcaagtttgctgactctgcaaagctcaggagcccctgggaggaaagaggtagcaggtgaggccccgggctgggctgagctgggcagggaggacagg

SEQ ID NO: 10136 - DNA, 1071 bp, Homo sapiens
ttcatgtacgggcccctggacgtcgtcacgctcactggagagaaggtcaggacccagaggccctgtcgcctggtcccatggccccatctcctgtcctcggaacagctcctggtccctggtggttgtgcccctagacccacccatccccgacgacagccccgcctctgcccacctccacgcagggcccccatttacctcccgccccttctcccctccaggtggatgtctacatcatgacgcagccgctgtcgggcaagtggatccactttggcaccgaagtcaccaatagctcgggccgcctcaccttcccagttcccccagaacgcgcgctgggcattggtgtctaccccgtgcgcatggtggtcaggtgagcgcggctggccgggcctctgcgggagggctccgccaggcctcgccccgcgccactcacgccccgccccgtgggccgcaggggcgaccacacctatgccgaatgctgcctgactgtggtggcccgcggcacggaggctgtggtcttcagcatcgacggctccttcaccgccagcgtctccatcatgggcagcgaccccaaggtgcgagctggcgccgtggacgtggtcaggtaggagttgccactgccaccaccacccatttcaccggggtgaccggcccctcacccctggccagcggagctgaccgctgcccccgccccacaggcactggcaggactccggctacctgatcgtgtatgtcacaggccggccggatatgcagaagcaccgcgtggtggcatggctgtcgcagcacaacttcccccacggcgtcgtctccttctgcgacggcctcacccacgacccactacgccagaaggcaatgtttctgcagagcctggtgcaggaggtgcggcggctgggggaggctccgggtcctgaccccgcccccgctcccccttaccctccacccccggatcggcggaggcccatctgttcccaactggatcggcccgggccctgcctgactgcagcggcccgctacggtcctgctcccctagtttgaggggccccgtgtacttaggggcaactagggagatgc

SEQ ID NO: 10137 - DNA, 1034 bp, Homo sapiens
cttacagccacgatggggacagcctgtctcgctcccaagaccacattccactggctgccctgccactgctggccacctcatcctcccgctaccagggcgccgtggccaccgtcattgcccgcaccaaccaggcctactcagccttcctgcgctcacctgagggtgccggcttctgtgggcaggtcagcggttagggacagtccatctgctgccctccactgcagcccccactgtagtctggcctgggtgaggacaaggcctctcctgatggtgcccctgctcccacccaggtcgcactgattggagatggtgttggtggcatcctgggctttgatgcactctgccacagtgctaacgcgggcaccgggagtcggggcagcagccgccgtgggagcatggtcagtatagccaaacccggcctcctcaggagcggaaaggccctctctggctctaggtctctgccccctggaatgccacccctctgccagcaggcaggccccctgctgccctgccagttcatgtcttctctggaattctgctctgcccaacccccaagcctcgctcctcacttctaagtaagtagaattcgaatggtccccaggcctaagaatgtttctgtctcctgttccatccagaacaatgagctgctctctccggagtttggcccagtgcgggaccccctggcagatggtgtggaaggcctgggtcggggcagcccagaaccctcggccttgcctccccagcgcatccccagcgacatggccagtcctgagcccgagggctctcagaacaggtgacgtccctgccccatcacccctaccctgggcacatgatggactacagaggcagcagcactgagcacccctcctcccccacagccttcaggcagcccccgcaaccacctcctcctgggagccccggcgggcaagcacggccttctgcccacccgctgccagttccgaggcacctgacggccccagcagcactgcccgccttgacttcaaggtctctggcttcttcctcttcggctcccc

SEQ ID NO: 10138 - DNA, 1050 bp, Homo sapiens
ttcatggcatgagaccagcattacccacaatggcagtggcagcagatggaggagatggagcagaaggcagcagagggcgtcccaggtagtacgggcaagccaccttgtgcatgacttgtgtcttaggtgtgactgtgtgtcctgggatcagttctgggtggtcagaaaagtttgaagccagatgactccactgtcaaaaaacctctgtagagttttctaaaggtgaaagtatccagatgaagcagggctccttgaaggaatggctgcttctggagttggagcaggggagatacaagatgagcctggagctgcttgtagcaccagaggggaaggaggtggtcacaacccaagaggctgggacatcttacatgggcttctgagcccgagcctcagacaaaccacacgaccttggattacagcccctggagtcaaataaatatacctgagtccgtagtgacctaaataaacaattcaagagatgaatctttcttacagaattccaggaaatagatgtagatactgctgttagccaagaatacggtatccagctaagactatgcttcgtagatgaagaaataaagcctttcccagacaagcaaaggctgggggaatttatcactactagatcagtcctgcaagaaatgctcaaaggagtcttaacataaaaacaagttggtatttgccataatacacacaaaagtacaaaactcacaggccctataaaacaatcatacaaaggaggaagagaaaggtatcaaatggcaatacaacaaaattccaccaaaccacaaatggaataagaaaagaatgtataaaataactagataataactaacaatatgatagagcagcatacagcttaattacctccacctggtgagggtggggtaggcttagagacttgcttccaaataataaagaaacaaacaatagtagcttcccagggaaaccctggcagataccgtcctgacccggtagtgaaggttccactcactagccacgtgtgcatctcaggtgccccagatgtggtgtgagaggcaggctcacctc

SEQ ID NO: 10139 - DNA, 1047 bp, Homo sapiens
agcctccacattcagttctctagaaactccccaaaccctgtcctcttgggcattttatggagatgtcattggataggcatgattgaaatgtggacaaccgtgttgaaatgtgattggacaaaaaaggtgtgatctaaacctagcaagacctgaccaggttcttcgggcttctctgtacagcattccttatcccagggtatggtgcaggaccccctctggaataagagtcttatgacccacagtcagattagagtctagctttgggcaggtgaaaggacggcagaaggtcagagagagagattctgtttactgtagtaagggctatgggagttatgagccagggaccctggacaaaaacacacatatatgtcatcacagttggactttatcaaaatgagtaactctgaacgatatcatggagaaaatgaaaaggcaagccacagactgggaggaaatactacaaatgtatatttaataaaggactcatatttaggatatataaagaactcataactcagccagaaaccaaacagcctgcttcattattattattttgagatggagtttcgctcttgttgcgcaggctggagttcaatggtgcgatctcggctcaccacaacctctgccttctgggttcaaacgactctcctgcctcagcctcccaagtagctgggattacaggagcccaccaccatgcctggctaatttttttttttttttaagtagagacggggtttctttgtgttggtcaggctggtctcgaactcctgacctcaggtgatccacccgccttggcctcccaaagtgctaggattacaggcatgagccaccgcgcccggcctcagcctgctttataaatggatggaagatttggacacttaagagaaacacatggccagtaagaatcttttcatgtgttttgtataattagtcattaaagaaatgtgaatcaaagcctcattgcgataccctacacacccacagtgatggctaaaacttgaaagaactgacggtcccaaatggcgagcacatggagcaatgggaatg

SEQ ID NO: 10140 - DNA, 1061 bp, Homo sapiens
atccaaatttgaaatatatatgaaacttaccattttattgtcccctgaggctgtgtaccctgagactttgcccttttcaccgtgttcctctcaacttctagggccctgctttatagaacttgctgctagaacaccttggccctgctcagtctctgactgtagccctgtgggggccatgcctgttctttcccatcacccttccttggtttgttttgtgcattcctactgagtctccctacctcccatcttcctgtccccatatgctggtcaaattcttagatttcaaggccttgctccaagaccttgcagtcttatttctaagcagtcaggattattttccctttcttattgtcccaaggcagttttaatgttgctgtaacatttaccagtataccatgtcttagagttacatgtacatatctaaagcataggtcctgttcctctacccacccacccctgactccatgccctgcacaatgcttcatgcccagaggttctcatgaaccctaagtgttgaagtgtggctctgagccctggcaatacttctttgattggcaatgctcgtctttgtcagcctgcactctcttcctagatagatcagatattccccattttcattgagcgtaagttccttgaggactagaatcataagctgctagcttttcctgccctgctgcatgagatatcttatccatgagaggcctgggcatgtccagggctgccctgtacatctgtgcagatggagcccagcactaggatgcctggcagaggggtgctctgctgcgtctggctggggaccaggggcaggggtttctttgtctaatcccacagcccagaaacagagaggctagttgtgctctgtctccccagaagaggtatcctcttctagttgacagtggcactgtccgtctgtgctagtgttgtgctagctgccagtgctgaggatgtgtttagatgagtggatggtgccttcactgcgctggctttttcctttagtttgctccctggcacctggctatgttttagtagagacagggtttctccatgttggctaggctggt

SEQ ID NO: 10141 - DNA, 1043 bp, Homo sapiens
ggtcctgtaataaagagggatccgaacaagctcagaaagaaaatgaatttcaagtaagtaattcagtctttctgcatctgtgtgagatgtgaactagtgttagccacccttcgctactccagggcttggcagtgcctcttatctacccttggaaaatcctgatctatctttctacgaggaggggctcttggtatatctatcagaagccaccttacggagactgagtgagcggtgggtattcctcattcctcctgagagtgtagactgtggaagtttggtgtctttatggcaatcgaaacagcattcggatgttggcagatggcagccaggggagcattcgtgtgtggtacctgatgaggaggccctggctgccgctgctgtgatgcctctctcaccccctttctggtcgttcccacacttcccatcaggaagcgggtcactgcccagtggttttggtggccacccattttccatgggctaacagcaatgttttttcctatggatgatacccaagttggaaaagcttcttcctagacttagagaatgtgaccccactctctgaaacacacatgtgcagatggcttgaggccaagagcactgaccgatggagcctcagaggcaggggtctggggtgttggtctgcatgccccagcgtaagcaccttttgagcatctctgccattatgtgcaggctcacagagaagggtgcatgtgcacacatgcccaacatacgtgggtctaagatgtagatacacacatcgccacatcacttttaccaattgtatattgattattaaaatggtcaagaaataggctgaatgcggtggctcacacctgtaatcccagcattttgggaggctgaggcaggtggatcatgaggtcaggagtttgagaccagcctggccaacaaggtgaaaccccgtctctactgaaaatagaaaaattagccaggcatagtggtgggcacctgtaattccagctacttgggaggctgaggcaggagaattacttgaacctgggaggcggaggttgcagtagaccgag

SEQ ID NO: 10142 - DNA, 1855 bp, Homo sapiens
tctgctttaaaaaaattcccttatacttttgagtatggtttaattctgtgttcctaaggcagtcaaaacttccttctcagaagtaaaacatttttctagtgttgtgcgttcccatttggtctaacctaatatttctttagctgatactctcccaagatagttgccaaattactaccaatagtccttccatacctgctttggtgccttcttttgataaccaaataaaccacagactactatgtctaatttttacatattcagagtgtctttgtcttgctggtattaaatgtttgggatttatagcatgaagccaatgcggatttctggtccatggaacgatggtttgaccgcagcccacccctctttgggaaggaatgtctttatgttgggtggagtgaagggcgttgggggtaatgtaccactttagctgtatgtgcatgtgttctctgctgcaggcttgtccatgcgatcgtgcctggagcactctggtttccaggtgacagacacgattcacggtatagtatgagacctctgaagttggagcattctctacagctttaatttctttcttttagttcttggattcaagaattgcttttaaaaaagaaagttgtaatgcttgttaagtagcaccagctacagtttgtgctgtgcttaaagaggtacagtgattaagatttcagaatgttgtgtaataaatatatcacttattttttttgtccaaagcaaatcagattcctttcttctgtttcctcagtagaaaatgacaaacatttaggaattttagaaatttatgggcctcaacttgataacttaattgaagtaatcaagttcttccttcatatcacttccagcattaaggagacaccatatatattttgatattttggtcagaattagaaacaaaccttcttctttgtccttaccagtcagtatactttcatatgtcttagctgggtacctgagaccttagggagctctgcagtgctgacttgatgtagtgaaggcacacttcccgtaaaagtgttgcttgcaagtcaacctttgggatacttagagggagggtattttatttagtcttggaagtctgaggagtgttgggtcagcaggttgccctagatcagacatagattttgagaaggtcctgaaataggcctttttaaaacctgggcttccactcacctgtctttctgctggcttgtgttgcctaaagtgttttagaagttctagtttcctacggatattcatcaagtcatccaattttgaaattattaatgtccaaaaagatcaaggtgttttaggctggtccttgggataattgaagacactctagagactaccataaaatgttagaaatcacttatctgtttaaattcttgtaattcatatgtgcttattaaataatcacataagctatactttaaatcattgcattgagatctcacattttaatgtgttctgtaaaatgttttcagaaagtgctaaaagtggccgggcatagtggctcacacctgtaatcccagcactttgggaggctgaggcgagttggatcactgaggtcaggagttcgagaaagaatgctgtaagaaaccataaaagcaagaaatacgggatgatttcattttttttcatagaaatcaggaagaagtaaggttagggtccatgataactctgagaagaaaacatattgccaagaaaatatactgcaaaatgttaattgaaagagtcacataactctttcaattctatagaattgaacacattctatagagtcatggttctcatgctttttcctgccccacctctcctgagatggaacatagcttcatcatcaacagggacttggcaggccagg

SEQ ID NO: 10143 - DNA, 1031 bp, Homo sapiens
ttttcagagtattttgcatttttccttaattatatgacagatttagtttagtatgtcccttctttccatttctcttccttgtttttagcttttgaacattttacctctgtgagaatcagaggtggtaacattttacacgttctttgatcagcaaatgatttacaggtgacttggtttaaaataactagatgattctcaactttctcatttttcttcatcttggcattataagatgtctgatttcctttatttccatagtgacactgaaatgactgctctttggtacagttctctaagggttaagtgccagaaagccaaggtaaaactttctgattgggttcagctccacagcttctgtcccacaaacatctgtctcttctagcccctatttctatctaagatgagacggaaacaaacttcctgactgtatcctggagtttttgtttagtatttgtgttagttttagggtgcttatgaaaattcctgtgtttggcaaggtcaagaatgggtccttttgaaaatatgaacaagataagacacacacaactatacaatattatttgtaggaaattattaaacataaaaatattggtctgatcttaatgcatgtgagtataatttagcgtctgttttacatagactgtctttaattttaatggaaatgagattattttcattagctacatagattatgaaaaccaaactcaactgtaaaactaccctgaactaaaggaggataatttaatagaagttttgagaagtaatagttcagcctttgcattgtggaaagagatagaattgctagaagagagcgtaaatgtataaaattagctataaatgtaacttgatttttttcctttctgatactgggaaggaacatgagctctgcaacgtccagtagcagccttttcagagaagcaagtttggctgattacaaataaccagtttgcttatttatcatgaattgtggaagacacaaatgtcagtacgtattgttcattcaatgtaacctgtgccagttggcggaagtc

SEQ ID NO: 10144 - DNA, 1023 bp, Homo sapiens
aaatacaaaaattagctgggcatggtggcgcacgcctgtcatcccagctacatgggaggctgaggcaagagaatcacttgaacccgggaggcagaggttgcagtgagccaagatcacaccactgcactccagcctgggccacagagtgagactccatctcaaaaaaaaaaaaaaaaaacaactctaccccatcagttttcctacattaccagtatagcaatttcaccactagagttaacactgcttgtactcgttttgttctctgaatgcagtcatcaaagatgactttgacatgggtggttagaacatcaaggtgtgtttcgaagcctgttggaatacttagtttggggttttttctgactgtgtacataaagaatgtttttgtgtatggcatggttttgtttacatcatcatacttctgaaattcattgcctggcactcttccagcttgattttgcatgttttaaaaagattcttgtcattctaactctaaattaggtgtgctgtattctagagctttgattttgtgtctcccaaagttgacgactagtgtaagtctgaatcagacagcttttgtttgaatcgtctgctcacctcacagttaatgagataacagtgaaataaaaataattaaaataacagattgaaaaaagagaagttactgagataacagtgaaataaaaatattaaaataacagattgaaaaaagagaacttgcgtatccaggtgatcagtattacttgaatagtagtaatcaagactattgattgttgttctcttctcttagatctttgctctgataaccatggctgtttttagggtattagctctttctcaagatctgttaagatggatcagtggcgcaaggattgtggcagataacccattcattcttttgatttctttcagatttaggcctattaaaggaaggcaggaagaactaaaggaagtaattgaacgttttaagaaagatgaacacttggagaaagccttcaaatgtttgacttcaggcgaatgggcacg

SEQ ID NO: 10145 - DNA, 1040 bp, Homo sapiens
atttatataaatttaccacttcatcattttcttttttttcactctgtcacccaggctgcagtgtaatggcatggtcatggctcactgtgtccgcaatttcctgggctgcagccatcctcccacttcagcctcctgagtgtaactacaggtgcataccaccatccttggctaattttttaatttttatttttagtagcaatgaggtcttgccgtgttgcccaggctggtctcgaactcctggcctcaagcagtcctcttgccttggtctcccagagggctaggattataggcataagccaccacctggcccatttgcttgttgttaatgcagctttttataggatacaacaaaaaacctaattctaaatttatcatgccaagtttatgcatctgtaccaatgaaagcttatagccacagaacatctgtttttcagaaagtgctgtttctttggctcttgtcttaaaggaacataagtaatatgaaagaccctaggggtcaaggaaattgaagaaaactgaggaagggatataaaatggaatgtagtcacggattttagtccctttaagcttttacttttgtgagatggctcaatgatggagagctttaatgcagatgaaccttgaagcttttaaagatctaagtcttgacgaggttattgaaattcaaatcttcaatgcattgtgatagtaggctataatttttgaacacttggccgggcacaatggctcatgcctgtaatcgtagcactttgggaggccgaggtgggaggatcgcttgtggccaggagttcaagactagcctggccaacatggtgaaactctgtctctactaaaaaatacaaaaattaggcgggcatggtggtgcacacctgtaattccagctacttaggaggctgaggcatgagaatagcttgaacctgggaggtggaggttgcagtgagccaagatcgtggacactgcactccagcctgggtgagggagcgatactctgtctcaaaaaaaaaaaaaaaaaaacttggtacttgatgctctcccgaagt

SEQ ID NO: 10146 - DNA, 1047 bp, Homo sapiens
gggaggctaaggcagacgaatcacttgaacatgggaggtggaggttgcagtgaactgagattgtgccactgcactccagcccgggcaacaagagtgaaacttcatctcaaaaaaacaaaaaagaacccactccatgtgtgttcacggatttcacagtgtttctggctaaacccctcctctcttcctgccacacactgtcgtccattgtactgtagctcaacatgtgaaaaacagatgtgttggccaacagcagtcctggggcagttgggcaacgaggtggaggaaagtgaagttggttctctccatcctctcacagtgtctccctgattggaggggcagttgccccttcactgaccagggcaggcagtgtccccaaagggaagtgggtcagggtgtcctggggaggctgtcacctgctgtcagtcagcaccgtggtatggggacatccttaagatcatttaagtttgagacatgcggcctacactgacagtgattccaggaggtaaatatgtatgtgtttaaaaaaataaacaagggaggccaggcacaaaggctcattcctgtaatcccagcactttgggaggccaaggcaggtggatcacctgaggtcaggagttcgacaccagcctggccaacatggtgaaaccccatctctactgaaaatacaaaaattagccaggtgtggtggtgcatacctgtaatcccggctactcaggaggcagaggtaggaggattgcttgaacctgggaggtggaggttgcagtgagccaagatcatgccactgcactccagcttgagtgacagagtgagactccatctcaaaaaaatatgtatatgaaataaaaataaaataaatcaataaacaagggaaatgctgggataaaacctagttacttagtgtacctggacagccattctgagcatgatacctgagtcagtttcctggggctgctggaataaatgaccacaaactggatgtcttaagacaaaagaagtttcttctgccacagctctggaggccagagtccgagatcaaggtgtcagcag

SEQ ID NO: 10147 - DNA, 1041 bp, Homo sapiens
gttagttaagaaagcggccgaacatttagcagtcaggcgctgacgtttatttagctcgcgctgtgagtcagacactgagctaaacgttccaccctggttatctacttcagccctacttagtaagtggatcctattattcttcggaatttacagactaggaggcacagtcactttccagggtcacacaactattaagtggggagctatgcaccctgcttcatggggcgctgcagcccactccttgcatgtttggtgactgcaggttaagatagtggcagttccactgttgggcctcagggtcagtgctactccgggtaccagtcggagaacattttgtggtgatctgatgccatttctctctgttgccctacccatgtgatgtcaaaccctgtgtatgttgcagttttttggaagcggttgacttgggctagtgctacttgaacactcacagaactttggccccctaactctggctgcaaaccagacttatctaggagactttgaaaagtagattccgggccagatgcggtggctgacgcctgtaatcccagcactttgggaggccgaggcgggcggatcacgaggtcaggagatccagaccatcctagctaacatggtgaaaccccgtctctactaaaaatacaaaaaattagccggatgtggtggtgggcgcctgtagtctcagctacttgggaggctgaggcaggagagcgtgaacccgggaagcagagcttgcagtgagccgagatcgcaccactgcactccagcctgggcgacaaagcgagactccatctcaagaaaagaaaagtggattgcaggccaggtgcggtggccctcacttgtaatcccaacacttggagcggccaaagctggaggatcgcttgagcccaggagtttgaggctatagtgagctgtgatcataccactgcactccaggcagggcaacagagaccctgtctcaaaaaaaaaaaaaaaaaaaaggaagaaagaaaagtagattccagggccttgctccagacgtactgaatctctgggggtgag

SEQ ID NO: 10148 - DNA, 1049 bp, Homo sapiens
gtctcgaactcccgaactcaggtgatccgcgcgcctcggcctcccaaagtgctgggatgacaggcgtgagccaccgcgccagctgatgacttcccatttcttccttggttctttcggagccactttgggaaattcggttctatctgcagtggtaaaatacaggtcggctctccacgcgcgcggccaatggacgctcccagcgcggacagacaggccctttgctggagctgggcagggcgaaaggaccccagggcggggcttcagtcgaggccggccccgcccaccgctgcagccgcgcatgcgccatgtacaggctgctttgggccctcccgcgtgccgttcttacccggcctgccccgcgccgccgcttccggaagtgggtctcgtctcctcccaagcggagcatttgtgcctgaagctgccgggtctgctacggcaccgcggggctgcagaaacccgggggccaagggcgggctgcttgccgctatggctggcagtcaggacatattcgatgccatcgtgatggcggatgagaggtgggtggtgaggccgggcccgcaccccgccctgtctggtcgtctcccagcggcttcgccgccggctgcggcccagggcggctgctggagcctggcgtcccttgggcgtgcgcattggggagcgcctggtggccgtggacgcagggacaagtgtgggcctgatgctctggtcctcttctcctggcccgctccggcggggcacgtgcccagctgctcttccagacccgccttccctgtcagggctgccccaaacatctgctcagcctggtggttcccctcctccgaggccgcctcgtcctctgggaggacagacctttgccatctgggagctgcctttttttctggttccttaatcataggacatacggcagtattcatggatgtgctgatagatgtacccgaccacaccccttttccctccagagcccctggggagcccctcgtgctgcgacagtgggggagctgtgagttgcctcctggctgacttccagtgcccggcccagaggacgcgtc

SEQ ID NO: 10149 - DNA, 1035 bp, Homo sapiens
ctgaaaggctattagtgtcacacttagtataatatataattaaccacaaaactttgggcttgtttcattcaagaatgtgtatttaaaacaaagcaagcttaggaatcacagcaatgtgcataacgacgtcaggaggagagactctcccctgacgctctctgccatgctctgctctcctccccactccacccccatgacatccacagacaattaaaatgagtcagcattttcaggtttaaggaaaaggtgaaaatacatttttttccttaaaaaaagaggacacactaacctctttatgatcaattgtaacaacaaaatgatcttaatgggtacggagagcttgtgtctatatatattttaaattccccaaaaactgcactggctttcatggtccacacccctagtctggcactgcagctccgatgactcctgctgtgcctctgagccatctctaggggttgtggtgctctctactcaccaacaggagactttagcaggagtaagtcctgactgtagcagaatccaacctctgtgttcctgatacattgcctgtttcaacagccacgagaggaagcgtgcaaacacagcgtgcagttagtcttagaacatcacatgagggcacaagtagacacacatcttcacacctacagcagtgcctacggagggacctgaggggagctgcctgagtgggcgggatggagccagagagatccaagtgtcacccagtggtggctctccccagctcccaaagagccccgggagactctggaacactactccgaaataccaagcaccaaatggtacagtaacaatttcaaaatgtacatctgcataaatgacccctacttagagtgatccctttatctcttactaaactctgcattcatagaccaatggggctttctccctgccctaagtgctccatctctaacactggtatgaaggaaacaccaagcggcactgctgatgctgcccagccccactgagcgcagaggccaacgacgtcgggtacaagaccagtctaagaggagggag

SEQ ID NO: 10150 - DNA, 1032 bp, Homo sapiens
cccctaagattattttaaagcaaaccccagacatcgtgttatttcatctgtgaatactggggaatatagtcttaccatgtgcccccctgtgttataatcaaagtatcccacttgcctcaccaataaataatatagtcataataatgaaaacagagaacatggatttgatcccaacaacttgacttaacctcagctgggagactgggagaggggaagggaggtgccaggtgctcaaattctcatcagccacaagacatggcccaaaatggaggaagcaggacgccacgctgagcgcatatcatttgggagtaagaaagcaaatagaaggaatagccaaatccattccccatggtctagggagcagggagaaagagaggaagggcaagggcaagggctgctggttttattctttttttatttttatttatttttgagacggagtttcgctcttgttgcccagactggagtgcaatggtgtgatttcagctcactgcaacctctgcgtcttgggttcaagcgattctcctgcctcagcctccctagtcgctgggattacaggtgcccaccaccacgcccagctaattttttttgtatttttcgtagagatgaggtttcactacattggccaggctggtcttgacctcctgacctcaggcagtccactcgcctcaccctcccaaagtgctgggattataggcgtaagccactgcacccggcttgtttttactttaaatgatgtgcatgtatgactttgattataacaaaaaacttaaaaatgaaaatagggtgttggagaattggtgattcaactccctcaagacttacagtttctgtaatacccccattcctaaattatattgcttttgtttaatgagcacattttggtctatttgaagatgagaaccgtgtagtgttaaggcagagtcgtgctttgtcgaccgcccttcatcaggagtgaaaaattgtgctctgttggcttcttttgaggtcgattggcaagacctatttaaagtattcacgaccagtggctgg

SEQ ID NO: 10151 - DNA, 1035 bp, Homo sapiens
cagtgtaaaatttgcaaagcaagaagtatagctgtgctcaaaaataggtcgaagccgggcgccgtggctcatgcctataatcccggcactttgggaggccaaggcagacggatttcttgaggttaggaatttgagaccagcctggccagcatggtgaagccccatctctactaaaattcaaaaaataaaaacaaaaacaaaaacaaaactggtggctgggcgtggttgctcacgcctgtaatcccagcactttgggaggccgatgcaggtggatcacttgaggtcaggagtccgagactatcctgaccaacctggtgaaaccccgtctctaataaaaatacaaaaataagccaggcatggtggcaggcgcctgtaatcccagctacttgggaggctgaggcaggataatcgctcaaacccgggaggtgaaggttgcagtgagctgagatcgcgccattgcactccagcctgggagacacagcgggactctatcaaaaaaacaaaacaaaacaaaacaaaagtgatatctctgtgagccagaaatgaagagaaatgcaaagtgctgagtgggcctgcaactgcaaagctgctgggcctgggtcacccacgcttgtaaaagaagcacgcagccaggggcgcaccagtggtcccagctacttggggaggccgaggtgggaggaatcacttgagcccaggagtgcaagaccagctggagcaacatggtgtgaacctgtctcaaaaaaataaaaataaagaaaaattttaaaaacccatgcagccaaagagggatgtccagacagccttatgtccaggacctgagcaaaccagtccctgacttagagtgcagatgggacctggggcatttgcaccaccacgcagggctgtaggactcaatacaacacgtgtgacggagatgtagctgtccacccagcgcccccaccctcctcggtactaagtggacatgtgggtgtccagctctactacatttcccagcttcccttggagttgggagctgccatgtggccaggttctcgc

SEQ ID NO: 10152 - DNA, 1023 bp, Homo sapiens
gtacatctgggcagccgtggggctcaagtgccatctggacggtggactgcacaccatccttgccacataaacacagcaatacctgcaaccctttgctctcatttcagatgcacaggtgacagccttagacccctgccctaaaaacacccccaggagcccttaccatgcctgaaggggcatggtggaaggatacctcctggtctagccaaccccgccccaagcacaatgccacaatgccagcacaagcacacgtaagcgcacacacacacgcacaagcagccccaaggcgagctgcccacttggcctgcagactggcacacggctcagcgtcaggggccctcctgccctggcctcacacagctcccctgctgcagcctgtgcctggaggccccacagcagcagcgtactcacagcatccccagtgcctttctgttcttccctttcttgtcctttggctcacgacgggccatgtgactaaccactcggcatcgtggcttgtgctgtgtttcctgaacatccggttcatcatctgaatttgtgagtttgtggagatgtagcgtatcgcacgttcctaggaacttaggctttgttgctattgtgacttaaagctaaacctgttttctgcttgtaggaataacagaggaagagcggcagtttctggctcctccaatgctgaagttcaccagaagcctgtccatgccggacacctctgaggacatcccccctccaccgcagtctgtgcccccgtccccaccaccaccttccccaaccacttacaactgccccaagtccccaactccaagagtctacgggacgattaagcctgcgttcaatcagaattctgccgccaaggtgtcccccgccaccaggtccgacaccgtggccaccatgatgagggagaaggggatgtacttcaggagagagctggaccgctactccttggactctgaagacctctacagtcggaatgccggcccgcaagccaacttccgcaacaagagaggccagatgccagaaaaccca

SEQ ID NO: 10153 - DNA, 1068 bp, Homo sapiens
caaacagtccctacggttggcacgttggtgtgtgcgaggggttcggaggccccagtacatctgatcacctcgcctttttgtgagtttaggtgttcagttttaatcttgttatgcaaaggaacatgtgactctttggaagtaggaagaagaaaagaatgttacaggttgaaaaagatgatattttaaaggttcagtagactcgaatggtcctcgttgggagtgcgcatttcttggatgcacgcgctcttccatgtcaccctgagcccagcctcgtgtacatcagaactccacatgcaggtggaaggggtgggtacgtggcatccagccagccatttggtggtccctgccattgggctggacagacagacattcattctgtaaatgaggagcccacatctccacccgtggtgagagggctacccgtgatcatttctcccaatcaggcctaagctcccaagcttcttgttcatgctatgattctgctagtgatctccttagagatcctcaggactattacggggcaatggaaagtcagaagggaagagactattggagagccaggtaagatggagcaggtgcttaaacttattctgagtgcctcatgttgatctctttgatttgctggaagatgcatttaaattattattgaccaatcagaacctggtttgaatgagaaatgagcttatttgggttcttgtgtgttgaaactgtcgggtgcaccaccagaatgacagagattggagcccgctgtggctttgtgggctaactcgatttgtaaccttcatggaaatgcagagggcctgggttgaatcatcctctgtaggatgcagttgggatgtgagtccccttcgtgtgtgtgtgtctgtgtgtgtgtgtgtgtgtgtgtgtctgtgtgtgtgtgtgtgtctgtgtgtgtgtgtgtgtctgtgtgtgtgtgtgtgtgtgtgtgtgtgtgtgtgtgttgggggggcgtggccttgggcctagcagcagggctgaagtctataggtggtgtaagagtgtgtgcacgtgtgacaggcagggtggggggggtgttgaaataggtca

SEQ ID NO: 10154 - DNA, 1033 bp, Homo sapiens
atgtcaaggatgacggcagtgggccacaggagccttgaggcagtattggggcagcagcatcccccgggggagtatttcggatgcctcaggtctgggtttctgccttctctgtggtcctcgggttctcatccattcctgccacttctgcttaggtggaatggctgtgaaggaagggggcaggcgagccaccaggtagccagatcttctaagcacagcaggtttgagttcgtctgatgtgtggaaagagccctgcatctttgacaatgtgactggcacaggcacgtggttggatttttctgcagaaaccacacctgtgtgtcaccagctgtggggaagtccttgggtctctgtggggaggttgaggctggggggtgcctgcaggggaggttgaggctgggcaggggaggtgtcctgctggccccgagtgtggggaaaggcccctccacgtggggagccccagatagagggttcttcctggatgttgaagctcaacaagggccagtgtgtgaggtagaaaagagaaggaggtgcaggtgcaggccccggggatgtgagggtcctgtgcccggccctgctggctgaggagccccttctcagaagctgaccccactcatctcctgcagaggtgggagggtccggaagccctacgctgggttcttccccgacctccaggatatctgtgatgagcagcccagacccctgcactcgactcttagacctgcctgtggagggatccaacctgggttagctgattgatttgtttttgtttgtctgttttgattgaagtaaaatgtacgtaacctaaaacttaccattttaaagtgtacaataaggtggcagttagtacgtttacgatattgggcaaccatcaccactatctgcttccaaaacattttgtcaccccattagcagtcactcccactcccattgcccctcgcacccacccacctgcttctgtctgtgggctctgcctgcctcggtgctgcgcgtagatggaatcagccgctacgtgatctttcatgtctggcctctt

SEQ ID NO: 10155 - DNA, 1045 bp, Homo sapiens
tttcacaaaaaaaaatcatcatttccatggatggttccagttagagagttttgtcagagagctctcattttaggaaatcagatatcataaaaaggtatgactttagagaaatgaggaaggtacttcccagccccagctcgttgcaaaataaacaccaaagaaatttcagtactcaggaaactaatttaatatgaatcttggtaattacgcgaggtaattttcattaaaatgttcacactgatgtcaccggtgagatttcatttgagtaacttgcgtggtctacagagtaaaaatgtatttgaaaatgtcccagctcttttattccttaatcctccaagggtggcctccccatgtgaattcttcccccctctaagtccatactcttctgacagagtcttaggaatgtatataaataacaacctttgtctgtgcccattttctgacattattcaccaaaattcaccttctggggtttcaatttttataatccatgaacagcatgaaaatttcagttgggggttttggtgttaggttaattctgtatctgttctgttcttttatagactttttttttcctaatgagtttatcttagcaactgccaggactcccccaaatgccatcacttgctatgaagagtatgcatacctcccccagttacaagggtcagaaaaagagaattggctgcattgtcggggcggggaagctgggcgtgaggcagtcggctgtgggaggcagcgtttccgtgactgggggccctgtgatgtctcctccacatgggtagggagagccgtggcctctcctggggtgccccaggaagctgggggctctgcggctgctttctgctggctgtgtctgtttgagattttggctctcacaccaatacagtcttccaacacgtaatctctgtaaatgaaagataatcgctctctgagactgtgggctcatcagccctttgcaaggtcttttaatccacccgcccagccccctccaatgacaggcagttcccggatcacccggaagccctctgggccagtcgtatctttg

SEQ ID NO: 10156 - DNA, 1071 bp, Homo sapiens
gggtgtgtgagaaggcagagcctggggagcttcaggcagaggggaggcattcacataattggtggtgaggtccctgcactgacccagcggcgactgagcacccagtgcggcagtaagtgaccacagtgtcagttctcatcccatcttccaacaacaccaccatggactccccgtcgagccccctgtctgggggaggacaatcaaggagatgatggggacatgccaagatgacacggtggtcaccgagcccagggtgcccaacccaaggaagtatctgctggttatcaggtttctagcccaggacacagagcagacagagtgctgtggacggtcaggagctccatacccgagcctggcttggtggagaggccataggcagcaaggtgggacagacagcctgccatgaaccaactggtctgcacaactttgccgtgaaatatgaaagcctcctacagcacaggctgagattggaagcattaatcactctggtatgggatgtgtggagttctgttggtcccagtgggtttaataacgtgccgatcggtgcatcccaagcattctgtggcctgtggaccgatacattgtcctccctctgaaacctgctggtctggaggcctctaggacagattgtcgggatctatggtgtatgagtttgctccagctgccgtcataaagcaccacagacagggaggcttacacaagtcatttatcgtctcaccgttttggaggctggaaggctgagatcaaggggtctctggactggttcctccggagacctctctccttggcttgtagactttgccttctccctgtatcctcatggggtcatccctctgtatgtctgtgtcctgatctcttcttgtaaggacgccagttggattggatttaggacctgccccatctggcctcactttaatttagttgcctctttaaagcccatctccctatacagtcgcacacatgctgatatcctgggggtgaagcctgcgtcacatgaattttgcaggtgacacagttcagcctctagcactcagcgcccacctggatgtggcttctaactgcaggacgccc

SEQ ID NO: 10157 - DNA, 1061 bp, Homo sapiens
cctcctgccccgaggagctgggctctacagggcatcgtggggtcccttcctcttagcaatcaatgccatgttccactgtggccccagactccagcaccaagcaaagcagcccccacgacccttaggacaatgaggggtgaaaattgccacccatcagttttcaagtggtcagtgtggaggaaaacagggacccgcaggtggccagaacgtggaggagatacaccagggagccggaagtaatgtggtccagggacccatctctcattccacgtagctcacggacctgtgtgcccctgactctggtctgtggggggcccctctgtatgggggccccctattccctccatctgagggtctctcttccctccatccagccacttggtcgtttgcacccactgtgtccaccaagcgcttctagggaagggtcttgtccttttttctccccgtcccgccgagcctccacctccaagcctgcatcctacttgtctttcctcttcatgcgtgtggggtttttttcccctcctttccactgtgcaccccgtctcctctgtaaacttgaaggtagggaactctgtcttcactcatgagtaccttccaacacgagctctcaggagtaaagacagagttccctaccttcaatgtggatctgcaaaaagatctgaaaagcgaatgccttctccgtagctcgttggcagtagtacttgacctgaactgatttgaggctatttatagtttttatttatcctacttagcatgattattcatccgtgccctgaaggactcctcccgcaattggcaatgggacactgcccagacccactggcggtgtgacgtaacaggccacacacgcatcatcctactgctgcagaagcaggcagcgtgcacatgccaaggcacctctggctctggtgttcagggatgtcgtcgtggggctgtatttgttgaatgaacaagagttcttaatccaagaataatgctgggtttacctttcaagtagttcaaaggcttctttcaagacggtgttgttatggaggatgggatgcgtcttgccttaaatatta

SEQ ID NO: 10158 - DNA, 1028 bp, Homo sapiens
agctgagtagaaatggcttgggagcctgatccatggagacagtagcacagagttaccttatgaatgttctgaaatattctcatgatgacaagcctctgggctaatttttgtgtttttttgtagagatgggggtctccctatgtgacccaggctggtcttaaactcctgggctcaagcagtcctctcacctcagcctcctgaagtgtttggattacaggcgtgagccactgagcccagcctcttattttcaattttaaaatttaaggcagaattatggaatcagttctctcctggttgttgccaaatggcaattttatgaaccagctttgcttcttgtagtagctgatatttctctataaagcagaacttcctcttcccctgcctcccttttgtgaaatgagcagagctgattttttagagcagttttaggctgacagaaaattgaatagaagtactgtgagttcccatattgactgctcccccagtttcctctgttagtaatatcttgctttagtataggacatctgttacaatcagtgaaccagttgtgatcctcaagtccaagcttacatgaaggttcacgcttggagtcgtaacccagtagtgatcctcaagtacagagcttacatgagggtttacgcttggtgctgtacccaacagtgatcctcaagtccagagcttacatgagggtttatgcttggtgctgtacccagtagtgatcctcaagtccggagcttacatgagggtttacgcctggagttgtacccaacagtgatcctccagtccggagcttacatgagagttcactcttggtgttgtacgttgtcagttttgccagatgtcctgtatccaccgtcacagtatcataaagatcagcttcactgcccgagagctcctctgtgcccctcttcatccctgagcccctggcagctgctgaccctttcttttttttttttttttttttttttagactgagtctctctctgtcacccaggctggagtgcagtggcgtgatcttggctcactgc

SEQ ID NO: 10159 - DNA, 1026 bp, Homo sapiens
tcagggagggagccatgggctctgtggatgttggagcttgaattggaggggcctagaaggattcctgcaactgaagggtgagtagtgagcggccccacctggtcacacctgatacagcttgtttcttgtgccaggagtttccagagagtccttgcttagccaaggatgggggagggtgcgggtctggaaatctttctggaataaacaactgcccccacccagcctcacagccctgtggggagctttgagagccacacgtgagctcagcctttgacattggaagggagaaacaggagcttttgtgcacagggtcaggtttcctggcagggaggactctggccgcccactgaacccgacctcctgttggccgtcccaggatcattttcccagcgatgaggaacttaccctcgggctgtcttgggaagatgatagggccttttgctttcttgggcacaaacccacagaatcctcagatagagaattggtttgagtcttatattcaatcaaacctccttttgttctgaacactttgacagtgacaaagtgaattattgagcccctgctgacagctgttcagtagaatataattttaattcaacaaaaattagaagtcatggctagaagtggatttgcctggcctttgcctttcctggctcactggtgagtctcacagaggggacctgggaacatgaccaagttgttgttatttcagtcctcagaggtgctattatatgtttgaagtgttgtgattggtttgcaggccctgttgacactatttaactttgcaaaaatgaactctcatggcaactgatttgattttccatcaaatcgtttttccgtaattgctttcctgtgtcctttgggaggagaggtgatgactgcatttttaaagcttttgtgttcagagtcagcgtaggtagtatgaaaactttctcgtcagtgtggttataagacaaggcttccaccgaatctgaaatgctaaagaacgatccatgtcaaaattaagtcacattgaaatatgcgcgg

SEQ ID NO: 10160 - DNA, 1033 bp, Homo sapiens
gcacgtggctgtattttcagagtggcgcagtcatcacccaaatcaatattaacatttgtgaagagtaatctttttttatattcccccccaaaacctgtaccattagaagtcactccctcctcctgaatccctctaaccaatcacctccggccctggcgaccacaaatctccatttcatctctacggatttgcccatctgggacagttcatataaatggaatcgtataatacatgacctttgtgtccatcttctcactcagcatcatgttttcaaggcttgaccacgtttagcatgattcagtgattccttccttttaaaggctgagtgatactgcaccatatgatacagcatctttttaatccaatattatgtttatcacatgctggacatttgggttgttcccactttttggcttttacacacttggacattcttgtacaggcttttgtgtggacgcgatttcgtttctctcgggtagattcctaggagtggagctgctgggccgtgtggagtcgtgtgtccctcagtggaggagggacaaaccatgttccagagagtggctgcgccgttggacctcctctccagcgtcggatgagggctccacttgctccactcccttgcctgcttctgttcccatctctcttcttggttatcttcatcctggagggtgggggaggcgctgtctcattgtggttcgaaagatttgatttgagcatcagcaatgtgcccaaggtggtggtaggtgctgcgggagcctgactccactccttgtccctaaaaaggttgtggtctgactacagagtgggggtgccgcttctggggtgtcatgtctgggttttgctaaataatcgtgtttgcagaggtttgagctcctgagctggcacgcctgcagtgtgtgcagggagagaggtgtagatggatgtccgaggacattagcagggccctgagtgggagccactgtgccacggatggctatgtggggacacctcctcggggaacagttggggctgtggccttctgcaggtgcctgcc

SEQ ID NO: 10161 - DNA, 1649 bp, Homo sapiens
atttccccgaggtccatgggggccccaggagggccgggggtggtcagcggctgcttctgtcttgcaggccatctacgtgattgacttcttctggaacgaaacctggtacctgaagaccattgacatctgccatgaccacttcgggtggtacctgggctggggcgactgtgtctggctgccttatctttacacgctgcaggtgaggaggtgggcagagctggcccagcggggcatttggcagacacatgctaagctttctccttgcagaagcgtctgtccttgggggcaccaaagctgccccctgtttctaggaagaagggaaggcctcgtgtattagccagctcagccagcttgggccagcagccagggaggtggccttgagtatgtccctaacatctgcaaagtagggcagatgccggctcagggctggatggggcagtggaggtggaggtgggtcagtgcgggcactggcaggaggggtcctcttcattcctgcctcctaggatgtgctgggcactggggcagggctgccctgggagttccaggacagtaggggatagcaagtggccttgtcattggcatcaagccccccactcccctcccagctcaacgagagcagccctgctctgatttggggagagtgctgggctcccaggtaaggtggctgcttgaccagatgccacctgcccatttcaagagcaacgagccccctggggacagaaataactcaccccagggcacttgcttagcagaacggtggggtggcctgccccaagaggctgtgcccaagtggagagaaccaacgtggagaggctgtcacctattcaggatgtgacaggcccggcatcacctgtgacagccagtcctgtgggatggaggtgcgggtgtcctggaaaaccaggattcccacagcagagggggccagtaccaggtggagggtgcagagccccagctggccccatgctcacaccaggtccttggagccccccgcatggcccacccggccccatttctccacctggctggctgcaggtctgctggttccctggttttataaactccattttccaaggatgtgaaaacgtagcaataggtcccactatataatagctcttacttgctttagcctctgtgtgtgtctcgagatgtacattttttatactatatattaggtttctcccaagaagcagaatcaatagaggggtggagggtatacgtgtaagaaagagatgtatttttcaactcatgtgattgaagagtgacaagtccaagatcttcagggcagcctggagccccagggaagagttgatgctgtgcttaaatagaaggtcactttttttttttttttgagacggagtctcgctctgtcacacaggctagagtgcagtggtgtgatcttggctcactgcaacctccacctcctgggttcaagtgattctcctgcctcagcctcccgagtagctgggattacaggtgcatgccaccacgcccagctaatttttgtacttttagtagagatggggtttcaccatgttagtcaggctggtctcaaactcctgatctcgtgatccgcccgccttggcctcccaaagtgctgggattacaggtgtgagccactgtgcatggccagaaggccactttttagcaga

SEQ ID NO: 10162 - DNA, 1027 bp, Homo sapiens
ggaaatctgcagggtggctgttttgaactcactactagtttagtttaggggacgtctaatcacttggacgtggagtatgacgatctaaatacttacaactttcatggtgctagaaatcttaatcaggcaaatgtttttcacacttgttcttgtaacaacacttgacttggttctggcagaaaagacaggactgtggtggccagcctaaatgattgatgagaaatttaacctcctatgacaaaaaatcagcactaaggactttgaagaactttttacttagacgtcttcggcaatatcagcgtcttgacatgcaaaactttcacaactactaacaagacaatagaaactgaacagaacaatcaacataaaacaaacaaacagttgactttagggcatgtaaacagttatgacagtttcttccttttttttttttttttagacagacaaggggaggggtttctgtgatgggatcagtcagatgcctgcctggccgctccccctgagcggacttgggctcctcttagcattggcaggccggtataaacttccggctcagatcgagctatgcctgatgctgccttaagccttatgaggtcgccacggaaccgcaggtgagggcctacttgaactccgtagctttcgccgtggagctacaaagtggaggacaagcgcaagcccttgtcctcactcattcattcattattcacaaagagtttataacagtttttttttctttcttggagattcttcaagaaacttgaacaagagaaagatgagagatagaaaaagagagagagagagagtgactggtctgccagaaacctggactcagtcctccagcattctgggatgtggactgagtcaaaggaggacccctgtcagggccacttccctcctagaaagagacacagaggtgcctaacagaaaaccagggctctaccttctagcgtcctagagaaatgggcagagtcaaaagagtgacacactcgtcagggccgcttccctcttactagaactgaaatcaaat

SEQ ID NO: 10163 - DNA, 1049 bp, Homo sapiens
acaccagcatgataaaacagccgaacctgtcagctaccttgcaagtctttcctatatttgattcaatgtacttttcccgaagcaaaatgaaagttctcacagaggggccctcctctgccttgtcctcagaattggaaaatgtattgtccgtgaaggagcctcaccactgaacctaaaactcaagagaaaatgtttcctgaatatcaagtgggatgacttgaaattttgccaaacaggcacaatcttaatacgatcggccttactaaggctaaatggccttatccatggttgaaattgacacatcattatactttaaaaactccacaaatgattgattttactctgcagccagggtttatgtcaactgtgaggataatgagcaagaaattcaagcccttggcaaactggttggagaggcaaggactgtgtccaggcagacagagctcatataattatttattgtttaatctatttaattaaatatgtaatttacccacaaactgtagctgacattatatgtactcctgagccacattaagatgtactatttgtgctgtgaaattctatgggatttgacaaatgcatggtggcagatctccagccattattaaagcgtaacacagaatgcttctcttattcaagctcgtcttccctccacatagagggaatcaatcgacttttgtatactgatttttgtatttgcttctttatttccatcttctttaattaaagcacaagatatcgtactcaatttccatttgatcttccaaaaggaaagtactgaataatccacacctgaatttcagtgattcagactcaggtctaccgctaaggccaaacgtcctgtgctgccacctcatggccggcagagggcaatgaaacccatctttccggccatgcagggcgcatgagcagtctgcctccctcggcgggccgggtctccagggaggacctgatttttcttcacccatagttagggaggcgcaatcgccctggctttggggctggggcctccggggaggttccggtaggggcgttggagaggccgc

SEQ ID NO: 10164 - DNA, 1049 bp, Homo sapiens
tattaaaaagtcaagaagcaatagatgctggtgatgctctggagaaataggaatgcttttacactgttggtgggaatgtaaatcagatcaaccattgtagaagacagtgtggcgattcttcaaggatctagaaccagaaataccatttgtcccagcaatcccattactgggcatatacccaaaggaatcataagtcattctactgtaaagacacaagcacatgtatgtctattacagcactatttacaatagcaaagacatgtaaccaacacaaatgcctatcagtgatagactggtaaagaaaatgtggtaaatatacaccatggaatactatgcagccataaaaaggaatgacaccatgtcatttgcagggacatggatgaagctggaagccatcatcctcagcaaactaacacaggaacagaaaaactaacaccggaacagaaaaactaacaccacatgttctcactcataagtgggagttgaacaatgagaacacatggacacaggaaggggaataacacacaccagagccagtcaggggatggggaggaggggagggagagcattaggataaatagctcatgcatgtggagcttaaaacctaaatgaggggttggtaggagcagcaaaccaccagggcacaggtaaaccttgcaacaaacctacacgttttgcacttgtatcccagaacttaaagcaaaatgaaaaaataaaaaaaaagtagtacaagaacctacttgtactacttgatggtggtcatcaaaacaccaccatcattcttcagagttagaaaaaacaattctaaaattcatatggaaccaaaaaagagcccacatatccaaagcaagactaagcaaaaagaacaaatctggaggcatcacactacctgatttcaaactgtactataaaatcatagtcaccaaaacagtgtggtaccaggaaaatatatacatcaaaatatgtgcacttaaataacatagcatcaaatttattaaacaaaaattgagcaacctacaaggaaaaatgaaaaaattccgaactataga

SEQ ID NO: 10165 - DNA, 1029 bp, Homo sapiens
tgagtgatttttttttttttgcttacatttaatagaaaaatttgtacttaacaaggggaagataatttcatttcaggcagtaattcatttggattctaatgtctttgtgctttaacatagagattgaagagattcaatctttgaacttcaatttatgcctagaaattttataagaacacttgtttatattcaaatgtgggaaatttttcttttttagcattttaatataggaggttatttatgacttttaaagtctcttaatgtcatttaattatcaaagaatctctaatgtgctacactggataatgtagtggcacataacttaagatgacaaagaagagaagatgtaaattttcagctatgtgtaaaatgtatatggtaaaaattgtattagtgtattattctgagattagcttagaatctgatctcagagtaatatgccgttcatgagggattctgagaagatatagaaaaagtaatgactagtattgaagaaacagatccatgaagatgagattagcgttattttaatagactcctgacatctctgcatagggagataacccatcctcccctgattcattgaccataagctttgtggttaaaaaaatacaaactcttgaattttgtttgtgaggtaatttggcctcattctagatgttttccatctttgtgacactcatgccatgtcatactcctggtatcctccctgccctttaattttcttggccccaggaaatggagttatctgatggagagtttggaaagaactaaccaggcatgctgagttagcaagtcttcagctctacagctcctcctagtgagcctacttgtagaaagcaggtcttcttttctacttctctaggggcagggggcagtagaggggagacctgcttcaagtgctggaatgactggaatggtcatgcgcctaattctcaggtgcaatgttagcaaggtcacatgattagcaggctttaacccatattatctaagtaggtctctattagtaatgaaaatgatatttgttca

SEQ ID NO: 10166 - DNA, 1044 bp, Homo sapiens
gagacagggtctcactctgttgcccaggctggtgtgcagtggcatgaactaagctgaatgcagccttgacatctcaggctcaagcgatcctcctgcctaagcttcctgagcagccagaaccacaggcacgcgccactatacctgactaattttttgtattttttttttttttgtagagatggggtttcaccctgttgcccccaccgggctggtctagaactcccaagctcacccacctcaaactccccaaatgctgggattatagacatgagccactgtgcctggcctcaagtgagtttatcataggttaaatcactgcagtgaaccaccttatttatttctttagtatcaactcttcaatcttctgagcagccttcatggtacagtaaaatctgcccatgcctaatttattttcagactcttgaaagaccttgcattttcttttacttatatttttagaactttggaataaaaaagtttctgccttacttggaggaactgtggacatcaaggaaaggactccaaagacaaaaaacaagaccctcatggttgaataggtaaagcaggttagagagaatcagtagttgagatgaagaggacttctgtgtacattcagtcctctgaagaggtgagttgctgagtgattattgaacctttcaggagcaataacatttctgtgtttcaatgagattttatatcaggagacagcatgcaatcatcatgactatcagtcatttaaagtacatttatcaaaggtcaacagggtgtgtgcaaaggtagtagaaagcacagccatggcaaaggcaggagagagacttgaaatatcagcattgtcttatgcattctggaggaactgtaaaagttaaggaagcagttatagaggaaaagcattcattttatttttctgataatgggaagaaccacgtaatacaacagcatgcctatttattactattttggcaccgtgtgttagcatgcttaagcaatggaattataaacagactagtgagatacagaaaaacttttatttgattatctttctgt

SEQ ID NO: 10167 - DNA, 1084 bp, Homo sapiens
tgcagtgagccgagattgtgccactgcactccagcctgggcgacagagcaagactctgtctcaaaaaaaaaaaaaaaaagagctctgctttccgaaacctggaaattctgctttgcttggttatttagcctatggccttcagtaagtttctgaacctctcagcttcagtattgatctgttaacttggaagtaataatagtaaccacctaagaattgttatgaagattaaaggaggtcatctggtaaatgggatagagaaaaatggtatctgtaaaccacttggcacatgataacagtattcctatggcctcccatctggtgccttttctatcatgttaggatgactgggaaggtttggggttttagcgatccctcattcatgggcatcctttttcccttgggcgcagtgagattcctgattttctcctcctctcttacttaggatcccaagtatcctgtagagaacttgctaaacccagatagtccaaggagaccttggctcggctgccctcaggacaagagtgggcaattgaaagtagaactacagctggagagggcagtgcccactggctacattgatgtgggtgagttctctgtggcctaggaaccttgaggaagaacacaggaatgacagtcccctctaactactccactaacatgtctcagttcattctggctgagcagcctttatggaataagttttacctgggtgtcaaagggaaatgtggcccttgcccttggagcagatctgtgtggagaactccaagggctctattcacatagaatacaatgtgaatggcgctcctcaaattatgcaacataactaccatgctttgatcttagtggcctgggtaaaaccttaggacactgacgtaattataaatcccggccaggcacaatggctcatgcctgtaatcccaacactttgggaggcgaaggcgggaggatcccttgagcccaggagtgtgagatcagcctgggcaacatggcaaaatcctgtctctaccaaaaatacaaaaattagccaggtgtggtggcgcacacctgtagtcccagttacatgagaggctgaggtgggaggatc

SEQ ID NO: 10168 - DNA, 1029 bp, Homo sapiens
gtcttgctctgttgcccaggctagagtgcagtggcgtgatctcggctcattgcaagctccgcctcccaggttcacgccattctcctgcctcagcctcccgagtagttgggactacaggcccccgccaccacgtccggctaattttttgtactcctgacctcgtgatccgcccacctcagcctcccaaagtgctgggattacaggcgtgagccaccgcgcctggctcagagactatgtcttatttttattatttttatatctctaaaatctagcagaagaggaaagatttttgtgtgcccagtgagttcccgtagtgggaatagtgagctttaattaatctgagccctagagaggagactcaggactcatctttcattcttctgtctttgaagccttagccgcatactggctgtggcctgtgaggactgcttgatgtttagatggcattcactaagagcttgttactgctattgctgcaatctaccccattttgaatgctttatgactgtgagccctttggagcacaatttttatggtcattcgttcaacagacatttgcaaatcaggaactatattctcccttttacattgggtacacagaaatgattcagacgtgaaacctgtccgccgagagcttacaatttgtcaagggacaaagaagacatacccatataattgtaatgtgaggcactctgttaaaggctaagtgagaattgacaggttggagctgtcaccttgagctgtttaagcagaggagaggtgacatttgagcaccaaagatgcattagatttggtaaatgggaaagagaaagaacattccaagcagaggcaatggcatgagcaaaatcgtggagaaaagggaaaaaaagttttggtggggagggtaagaaaaagaccattatggccaggagtatatcaagagtcacggactcatattttcaggagccagatgggtagtaaacatgaataaaatggacagggataaatatttgaagagattccacctaaagacactcagacaactttaaa

SEQ ID NO: 10169 - DNA, 1174 bp, Homo sapiens
tggacccctgtgccctctcctcctaggccactgctgccttaggcttttcttcactctccccctggccctctccttctcaggttgcccatgcagaccagcagcttcgagacctgggcaaattccaggtggcaactgatgctttaaagagccgtgagccccaggctaagccccagctggacttgagtattgacagcctggatctgagctgcgaggaggggaccccactcagtatcaccaggtcaggaggcagccttcctccctatgtctgtttatggagtgcctgctgtttatcaggctgtatcctagtgagataaataagatgtgatctaaatttattcttagagaagaataacgaaaaacgggtattataccagatatctatttagggcacagttggaataaaaagcaagtggtcaagaaaggcttcgtggaagctatcgctcctgctgagtcttgaaagcatccataggtgtgtgtgccaggttgacgagaagagcagtgtgaacagaggctgtgaaagagcctgactaagctgagatgtgaggccaggaaggcccattggagaccgactattaagacttgatcctaaaggcattgaggaaaccttggtggctgtaattgaaaggtttaggagaaaaaaaaaggaaccttggaagaatttgaaactgaagagtacatggttaatttgcatcttaaaaagattattctaatagctagtatagaagttaagactggaaaaatgtttttattaaacacttacatttacttattttgtgctagacataaagcactcatgacaattatacctgatttgtcccccaacaaccctctgaggtaggtttattctgtctcctttaacagatgaatctggggcatagaggggcagtcacttgcccaaggttccccagtggtagagctggggtttgaccctgggcagcctggcctgagttcttggcttgtcaccactcatcttcctctgtcagtgccatgatgagtctaggtgagaggagatgaagcagaccagggaaaggacatgagcatggagtggggtgtggttaggagctgttcaggaagcttggtgattgggctcgccaagcaggacgacattggattatgcccacgttcatggcttgggggcctgagtggggggcgttcctattcactgaaatgggag

SEQ ID NO: 10170 - DNA, 1043 bp, Homo sapiens
tttgaacgtcacagttatctcggaaatgaataaagtggggcttcctcccagtatcctacctttctgggaccaagcataggtcagttgtcatcttttttttttttttttttttttttttttaagaaaaagcacattagattgtttgccccaggccaaggatagactgaagtgttgaaggtgtttatgtgccatacgtggcagttaggaactggtatcagggactcatatctctgaagcaagcactttagctacctgttcataggtaacagctcattgatagggaaagaaggtagaattaagcttatcaaaggctagaactgtgtctgattcatcttggggtcctccctacctagcttaggatgctacattgtttaggttttagtgaatgtttgttgagtgaagagatgagttggtgttctctatcagcaaggtctagcggggccaagtggcccaggacagatgggtctgctgctaaagtggtttttatttgaagtgtgtgttgatcgtgggttatcttacaggattttttaatattccatatggctctaaccaggacctgccttagtacctctgaaagaagtcactattcttattttggtccagacagtaccattttctctcccagttacccaggcaggacatttcaacatcatcttgacttctctgtctccttggcgctgatctctaattggtcatcatcctctctgctcacatccagcgtccctccctctgcctcattctggatactaggccctcatggcctagttcttctctaatctgcccttattgcagttcattcctatgcacgagttctcaagaatctttctcaaatcttgttttctttgtgacacttcagtgactcttcatcaaacctcagtgaatattcatttctaataggtagaaatctaaaatcttcagcctggtgtttaagatctttcatcagggggtcatttcctctcaccagttttgtttcctgcttttttctctccccactcgacaccacctcatttttttttaatcttatagaaatccttaaatcctgg

SEQ ID NO: 10171 - DNA, 1050 bp, Homo sapiens
atggaccaaactggtttgccccgacctcaggaaactctttggacttggaccagacggtctacccaggactccccaggaattgagaaagattgtttttctctgtatggcgtctcttggagccactggtcctcttgccttttatcttctcagaggcaggggatgtaccagcaaagtatttcctatgctgtttttatagcttattagcctagggcaaggtggcttggcccctctgggtaacctgccaggtgagatctcggtgtttgcttgcatgtgcctcctggcctatccgtcctagagttggaggaggaggagccccaagatcagggttttcactctttggatgtgagtgtctctcagatggggagtatctttctaagaaaggggtacagagcatggaattcttaggctacaggcaggcagcgtctcagggtaagtggtggtaaattttgcaagtgagcactggcgcacagatggggcagccatttcctttgtgagctgtgaggctgtaggcctttggaactatcaggtggagaagggggtggggttctgggaaggaccctttgaggtgggagcttgtgtgggctttgggccctgaaattctgggagtgggagttagcactaagagaatgagggttcagcagaagcaagggcccatgagctgagagatcggtatagtttaacaactctctgggaccaaaggtcactttggtgttatcttgaggtaggtctggtgttcccttgatgggcagtaagtggctaagaggcagtctcaaaggagctggcacccaggccaagggcggggtaaggagagcagtgctgctgcagctcagaccctctggcctttggcctatcacttgttctgtacttaaaactgaagctttttcagaacagacttcagagctcagcaacttgaccctctggtcctgcttcttgtgtctgagcaggtggtttacattagcctcagccctggtaggaaatcatggctaggctttaactctttaaggtccagagagggtacaggcagagtggctgcgtgtctctttagtgtca

SEQ ID NO: 10172 - DNA, 1026 bp, Homo sapiens
ccttaaactctgggtggaaaacagagcgaagggggagtgtccggttgatcccagtttgtcaggcaggccactgtaagatgtgttttgtgtgtttatgccacagtttgccttggctcttgctgctgttggagttcagtaattttgcctgcctgcttgtgccttcaccctcaacccgccgcccccattcgtcctgcttttcttgttcgtggaccaagcctccagccttcccctttgcagcccctcctctccagtgcaccccctccctctgggccccacccccactgagagtcccctgcttgctgtcgctcccagatcggggaagcttgctgtgcctttaaagaaagcagactcctggctgtgacgcacttctggctgtcagccaggaagatcgctcctgccaggcagactgagaagaaaaccaacaacttttcttttgtgtgtggggttactttccactggcccccccttcctcctctcctttcaagatttaaatgctaatggcggattaaaacctgtagatacgtttggctttaggagtctggtaaggcccccccgcaccgagactttttctccctcactctttctctgggtttttgttcaaacatggacgagggggtggggtggattctcccccctcacctccctttcctgcgccatccttaaaggggagggagagaagagggagagcaagtaaacatactcagaaacaggcgctgtggagcagagcttgccaacatccgggagttggcgcctttcagagcaaagggttgctttctttcccccttgcgtagatgtcagcatgtttttgttcagagaaggaaagcgtgtttgcctgcacgttgagctgtagagacagctcaggagagggcttcaccatttctgcgtgaggccgtgggtgtgtgcacggtggtgggcagtgaaaaaaggttcattttgtcagctgatagggaccagggtgtgtgaatatagtggtggggggcccaggtcagtgtgtgtgtgtgtgtgtgtgtgtgtgtgtgtgtgtgt

SEQ ID NO: 10173 - DNA, 1454 bp, Homo sapiens
ctagccaattttctttttttgatatatatctatttatttatctatctatagatagatgaataggcaaatatatatatatatatacacacacacacactatatatatatatatatatatattattattatttttttttttagacaggttctcactatgttgcccacgctggtctcaaattccttggctcaagtgatcctcccatcttggcctccaaaagtgccgggattacaagcatgagcaactgtgcctggccctgaaaaggtactttagagctgatccgaccctagcttggttctcagtaatttgcctctgtgacttgcattaagccacatagctagtaagtgacccatcacccctccaggggctttcaacaccagatctactatgttttctaccactatggaggctgtctccagtaagagtattccccctgcgtttcaggttctttcacatttcttataattagttctgtgtttgtgagcaaacattgtgctagatatgttgatatgttgcctgtagggacagagccattttactcctctgtgacagtgaaacagggtggagaggttcttagctgttttgtagaaaggccttcttgagagagaactgagtgggcctgttggatgttataatgaatcctctctgggttttgatttgccctctgcttttctctccaggaagcctcagacttaccaacactgcctcattaatcagccattatcctctggagagggacaatgaggccatggtaaataagctcaaggtcaggctcctgaaacagcagtccttccctttagcaccagcatttccttccagcctccccctctaacccttgagacactgccaacatccctcctagtacaagacttttcttggtgcttgctgtttttagaggagttttggcccttcagtgtttgtaaagctctcggatcctcagaaaaaaattctttagtgattaattttgaaattggagctgtttgattattttgattaagaagctgattttcggcctggcacggtggctcactcctgtaatcccagcactttgggaggcccaggcaggtggatcacctgaggtaaggagttcaagcccagcctggccaacatggtgaaacgccatctctactaaaaataaaaaaaattagaccggcatgttggcgagcgcctgtaatcccagctactcgggaggctgaggcaggagaatcgcttgaacctggcaggtggaggttgcagtgagctgaggtcgtgccattgtactccagcctgggcgacaaagcaaactctgtctcaaaaaataaaaaaaagttgattttcatgaggaaaagcacacggcttctttgatttgctgagaatgtgctagcttttattcattcactcaatgattgcctatttaacagctgtagacaataatataggctggctgggtgcagtggctcatgcctattatcccagc

SEQ ID NO: 10174 - DNA, 1058 bp, Homo sapiens
aaagaaagagctttgccttaaaagggataaatttcagttagtaggaaaattgcttgtgtgaaattttgtacttctcagtgatgccagatacgtaggatttattttctctgatggtgatcacgttatttattagcatctttaaaagtgtggataggacagcacggtggctcacaccgtttaattccaacactttgggaggtcaatgcaggcagatcgcttgagcccaggtgtttgagaccagcctaggcaacatagcgagacttcatcgctactaaaaattaaaaatagccaggcgtggtggcgcgtgcctgttgtagcagcagctacttgtaaggctgaggcgggaggatcacttgagcccagaagtttgaggttgcagcgagctatgattatgccactgcactccagcctgggtgacagagcaagaccctgtctcaaaaaaaaaaaaaaaaaaaaggtgggtatagatctggtgccatttagacatctgcattgtccttttcatgagctgtggcagaagcagtgtgaacaatgaatgcagaaatgctttgtatacatgaagacctatactgatgagaaagatagaggatgtagctgagatgtgctggagagagcactggatttagaagacatctctttgagttctggctctgcagccttaccagtcgaccttgaggcaggtattttctttttactgagccttacgttcctaatttataaaattggaataaaccttgcctcttagggttcttttgggaagattaattgagatgtgagacacagccttccttaaaaatcctgaagtttgttcaaatccctagcacagtatgtattttagggttttattttatcatgcccatgttagacaccattcccacttatttcacttattagtaacatattgacaagttggttcttgaggctatctgtcttcctgtttagaactcatattcatgtttgttcatttctatcagtgattaaaggcattctggtgtggaaaaaggaaaagtggacctggaaccagaaagacgggtctcagtgctgtgtaggacagggat

SEQ ID NO: 10175 - DNA, 1095 bp, Homo sapiens
ttgtttctcttgagacagagtctcactctgtcacccaggctggagtgaactggtatgatctcagctcactgcagcctccaccttccaggttcaagcaattcttgtgcctcagccttctgagtagctgggattataggcgtgcaccaccacacctggctaattgtgtgtgtgtgtgtgtgtgtgtgtgtgtgtgtatgtgtatttttagtagagatgtggttttaccatgttggtcaggctgatctcgaactcctggcctcaggtaatctgtctgcctcggcctctcaaagtgctaagattacaggtgtaagcttccgcgcccagctgaattttttttttttttgagagatgggggtcttgctttgtcacccaggctggtcttgaattcctgggctcaagtgatcctcccatctcagcctcctgagccattgggattacaagtgcaagcctcctgacctggcttgcctggtatttaataattacagtatgacatatatacagaaaagtacacaaagtttacagctcaaggactttccacaaggtgaacacacctgtgttactagcacctacatcaagaaacagaacattaccagcataccattagccccttcccagtcactatccccctattgttttatttttaaacacagtgaaactatacatagggatgatgactcttggttcataagtgagtggctcatgttatctcaggtgagtcttctggaaagagccccagattaggagccagaaaaccgtggttacatcgtggcccggttgctttttagctgtatgaccttagacaaggtaaacttaacttttctggacttcattcctctttggtaaagtgaaaataataatgccctcaccttaaacagctgttgtaaggttcatctgacattattggtaaacaggaaataccttgtaaatgggaaacactttgttagttgtaaagagccatacacaaataatagtcatttttgttgagagctgtggaatctcaagcagaagagaaaatgatgatccccaaatctattctctttatcacctttgctgtctcatttttttttgttgacattggtgtcactgtctttctgt

SEQ ID NO: 10176 - DNA, 1093 bp, Homo sapiens
gttgtacaacagacttctaacagtggtcacttctgagctggggagtgtcactggcaaatgtgggttgaggcttaatgaagagggagttttacattttactctagatacctccgtattatattatttcacagtgataatgtattccttctcctttccaattgtttggagagctcctgggcctgtctgcacttgccaggattaggagtgtgacaaggtagctagctgtgctcacatcagttgagttggaagcagctgctgagaccagaacagggagcacatgtaaggggaggagggggatagcatgtgcaagtgactgagagaggcagccaagacaggccatttccaatttaccaacagtaactatcacatgtcttgtcttgacattctccaagttactttgctctctgtcatcacactggaccctgaggatgattctctgagcaagggaggtagggatgatgatgagaccaggagtaatcaaaacatgggacaacaaggaaagtatgtgtgtagaaatagttttttttctttaacttgaaatacgtcaaggatactcattacagcattgtttgaaatggtaacactgaaaatagccattccctcaatagaaaaatatgtgaacacgttatggatatcccttatatggacttttatgtagctttttaaaagtatgagttagaattttagttattgatgcttggggagatgttgataaattgttagatgagataagttgcagagcaatgtgtaaagtttaaacctagttttctaaaaacagagaacaacaaaaccctttccaatatatttgtatttatgtttttgggggacacaaaaatatgttaccatttctcatcttgtaggaggccttggagaggaatggaaaggggctgggagattactaattttgtcttttatctaactttgtattgcttcactggttttgaagaacaaggaaaacaaacttgtataagcaagaaatgaagtttcctaaacatcgtttcatcttaattaattattattatgtttttttttgagatgtagttttgctcttgttgcccaggctgtaatgcagtggcacaatcttggctcactg

SEQ ID NO: 10177 - DNA, 1025 bp, Homo sapiens
gggctgtatcggggcaaaatcaaaacaaacaaaaagacagaaaaaaacctctcactctcccctaccctccaaaagacagtaacaacacatctgcaagcatatgggaagaatctctttaggcttttaagtagattatggtttcttcctagggaccacactgggcctgctgccttagtgagtggagtactgtgctctgggggctgaccttgaatgacgtggatgcttctgaaggagtagtcaagagggggctcctgtaccgaagtgttcatatagtcccgtttgttcatagttcaggccatcattcaaaggtgcaagcaggtgccctgggagtctgggttcagcctgggaggacagagaaagaccagtgtttcaagtacaccggctttcaggtttccccatagtcctccatccctgctttctgtcctctactactctaggcctgcctggctgtatttccattttaagatatgaaatcactcttccttgcatccttgcatgtatagagcactttctacttctcagagcaccttcacatctcttagaactcatttgagaatcgaacacccatttctttgtctggaaaatgccagatgaagaaactgaaacccaaggggtaaaaggacttgcccagagttaagccagtgagtcagttgtagactgcagtcataatctcctgaatcctactctgagaccttttctgttactctacagtagttactgtggagactgtcttgatacccaccctctgttgacatcaactgggctattctattgcttaacaaatccttgagggcctgcaccgcatctggttggtgtctcaccacccctctcagtctggcccagctggggatttgccaccttctccgcttggcttctctgccagccccattacctttccatccaaataccctactttcagccctatcctgaatgtagccatacacatataaacatacacacacacaaaaccagagtctacctctcactcacctgtcactgatggctgaaactccaccattaggcat

SEQ ID NO: 10178 - DNA, 1028 bp, Homo sapiens
gtgcaggcatatgacagatgttcctttattattatacttgggtgagtggatgggacctgcagcaagtgcagatcttctcagtgggctctggaacagaaaagtattgtttgtttgctcagcatatttttatttgtcccatgttgctgtggccaggatttgagctctgagacaatgcagcaaggtgagacccagatttcttttgttttgttttgttttttgagacagagtcttgctctgtcgcccaggctggagtgcggtggtgcaatcttggctcactgcaacctccacctccagttcaagcaggtctcatgcctcagcctcctcagtagctgggactacaggcatatgccaccatacccagctaattttttttgtatttttagtaaagacggggtttcaccatgtttgccaggctagtctcaaactcctggtctcaagtgatccacccaccttggcctcccagagtgctgagattacaagcgtcaacgactgtacccggccccaaattccttattgaggatcctagaatacatgagaccagacttggaaatgaaagtgtaacatgtttattgttcaaaaagaaaaactcaaaggtgtgtagtgattttaaaatttagggaaattcctcaatatagtgaaagaagaaaaacaagaaagaaatttaggaaagaaacacacttaaaccataaaaaatagaaaatggaccaataaagataaaagctaaacttaacaaggtaggaaaaagaaaaagaataaattaaaaaattctttgaaagcaccaataaaatagataaaacctcctgagcctgataaaaggggaaaggagccaaaaaaattaacaaaattaggcatgagaaattagacataaccatatatattgaggaattgagaagaagaatagaactctatggcaacaaatttgaaatcagaggaaatggataatttcccagcaaacactgatcctagaaatagtttgaataggccagttggttacccaagaagaaactggaaaggtggttaaaatttta

SEQ ID NO: 10179 - DNA, 1035 bp, Homo sapiens
gaaccccactaggaccagggaactgggctgggagcctcagaaacttgagcgcagtcctgcgagctagctgttattagccccaattggcaaatgagaaagctgaggctcaggctcaaaggaggtctctgagttgccctagcagtaagtgatggaggccgacctccaagctgggtccaggccgagggagtgaccacttcacctccccaccgacaggtagaacgccgtgtggtgaaccagctggcagcagcctatgagcaggacctgctgccagggggctgtactttgcgcatcacggtggaggactcagacaagcagctactcaaaagcccagaactgccctcaccccaggctgagaagcgcctccccaagctgcgtctggagatcatcgacaaggacagcaagactcgcagactggacatccgggcaccactgcaccctgagaaggtgtgcaacaccatctagcagccacctgcctgctcctatgtgccctcaccatccaataaaggccccttggctgtggcatggcaactgacttaccttcccctcatgccgctcccatctctacccagtctcaggcctgcttacctcctcacagcccatgaagaccccttctcagccccaaaacctgaaggaggaatttcgccctactctggcccctttgttgtgggcccataacctgctaacaagccttcaggagaggagctgcctttccacccccttcaaggcaaggagggatggaggtcccttatttccttcagaatgatccccatcccccatagtcgccagactttctcatgttcccaggaagctcagaagtatggcagctaagaacacagctggctggaagaagacagggaccagactgaactgccaccctctgctagtcctcatgcaactcagtccccagaatggctccactgggagtggaggaagagctcagaggcccaggtgcagatagttctgcaatttagtctgtagcctcctcgttccctaccctaaaattctaaggggaagggacccatagaggcttgcctg

SEQ ID NO: 10180 - DNA, 1046 bp, Homo sapiens
gggctgctaaggtcagtctggctaggaagcagatctggagcctggggctatggggtatggcctggcaccagggcaggcctagaggcttagtctgagggtatcagccgggagtttgggagccttccaggcactgagttttactggagtgggcctggtttcagggtccaaggcaaagtccagccctcacttccctctccttcccccatgagtgtatgtctctccatgtgtaccgcctggagttcggggaggggtgatatgggtaaggggagactgtcttcctaccctctgtaggtaatcttttctttacctctgtgctacgcccaggtgctataatctctcatttggtttacttagctcttgtgaaggtatttttgcatgtggataattgttcaaattgatgtttctgctggggagcaagtgctggagagtcctgttctgccatcttgctgatgccgtaagggctttcttgatcctgtttcttggtctgctgcacgtttctcctgtcgtaacctttatcacactttgagctgtagctttatacttaattattgtttttctcagcagactggccctagcttcttgaggtcacagacctcagcacctaaaatagggactagaacatggtaggcatttgataagtaattgttggataaacagtttgtattttataattgtggaaactgggccttagaaaggtgttaagtaacttgtcccaagcttctcagctgataagtttcagaggctgctgcctttttttttaaaaatgaagtttcactatgttgcccagactggtcttgaactcccggactcaagtaattctcccaaagtgctgggattacagtcattagtcactgcacccggctaagatctcctgtccctgtctttcctatccttgtcttttacactcccaaagttcatggtttttttcccaccgtatcactcacatgagcagagacagctccagtccccaaacatgcttccggatctgggtctgtacctcctgggcctttcttgcttttgacacttctgtctttgtgatttcttct

SEQ ID NO: 10181 - DNA, 1314 bp, Homo sapiens
ggagacgagggcagtgagggggtggtgacatgggtggggctggagatcgaggcagaggcagccatgcagggcctagcagcaatgcaagaccatcggagggctagtgaatggcagtttaagaagattgctactcgctgatgggtggggagagggaaattagagcacactttgaaggccatggtttcgtccaaggagaaggcggtaatgtgggctggggtggcagcagtggagatagacagagcagagagattcgacgtgtggattgggagagggaggaggggtttgtttctgagttgagcagcctggcgggtggtggtggtgtttccctgatgggggccacagggagggtgggatgggaggcagggggtggagatcatgggcatggttttgcacatgttgaatttgagcagctttggtcacagccaggtgtgtcaagcctgaagcttggtcatgggaagggtggtcatgatggtggtgttttgtgtcgtggcacttgcatatggttggagtggacaggggatgtgtaggtgatatgtgcccatctgccagcctttggtggtatcgggccatgtggtcccagtgacggtaggtgtgacctctccccagagcgccccctgcactttgcggagaaggtgctgcccatcctgcacgggctgggcacggacagccacctggtggtgaagaagcaccaggccatggaggccatgctgctgtacctgggtaggtggtgcctgcagggtggccaggctccgggtggtcctctcttccagagccagggtgggacctggtggtgccaggtaggaacagctcagacagagggcgccaagtgggtgggcctctatggagaggctggggcaggatggggcagcttccttcatcctgggacccagccccgggtaggggttggtgcagcctgtgcccactccagtcccaccccccagccagccgtgtcggtgacaccaagcatggcatgatgaagttccgtgaggaccgcagcctcctgggcctgggcctgccctcaggtggcttccacgatcgctacttcatcctcaacagcagctgcttgcggctctacaaggaggtccgggtaagtggccccgctgggttctgccccagggtgggcacctgtacacctgaatgtgctcagagattccccttggtctgcaagtggaaatattcccgttacaggctctcaggatggcacagcagtgggggagaactgtagactctcaagacccctcctgctgtggccctggacggccactctagtgtgccctgtagccccactaagccctggcacccggatgccatcac

SEQ ID NO: 10182 - DNA, 1034 bp, Homo sapiens
gcatgggggaggctttgtgaagcccagtgtggtgccccaggagaggaggccaggccccttgccctgaggccccccaacccctctctcaccagatgactctgactacgatgaggtcccagaggaggggccgggggccccagccagagtgatgaccaagaaggtggggccaggcatgggactgtctgcctgtcagggtgttgtgggggtgcccagctgcctgtcagaccctgaggactaccagacagagagtgggcagccatttcccgggaggcttccccttcccccacctcactctcttgccatacgggggtcaggagtcacgtgtagccacagcgctctgggccaggggtcggggctctggtgtggctcccccaggccctggctgtatgtgggtgggcatgtggcctccccccaccctgtgtgttaggaactcgtgtcctgtcccggagtgtctgtctctgtttcacttcttgtgttcccgtgtctgtctgtcttgcatccctagcccgcagtctttttctctgtccctttatctttctgtttttgtctgtgtcctaggtcggtttctgccactggctctcctgtccctgtgatctgggtctctgtgtggtctccgctggcagggggaggggagtgtgaggaaacagaactaaaagtgctgggctgtgtgggtcggggctgtgtggacagagggggcgtggcagccccgggtgggtgtgatctgtggcttgaagggaaggatgacgctgagtgggtctcgggggcaggaggagcccccaccgagccgagtcccacgggccgtgcgcgtggccagtctgctgagcgagggagaggaactgtctggggacgaccaaggggatgaggaagaggatgaccacgcctatgagggcgtccccaagtgagtgtccggccaccctccttcccactgagcccaacctcagcccgccccctccttgcctcctcagcccggccccccatcccctcatctctcgctagtggcggatggcataccagcagcctgagcttgtccttgc

SEQ ID NO: 10183 - DNA, 1050 bp, Homo sapiens
tttttattttttatttttttttctgaagtggagtctctctctgttgcccaggctggagtgcagtgatctcggctcactgtaatctccacctcctgggttcaagcaattctgccttagcctcctgagtagctgagattacaggtgcttgccaccatgcccggctaattttttgtatttttagtagagacaagggtttgccgtgttggccaagctggtctcaaactcctgacctcaggggatctgcctgcctcagcatccctaagtgctgggattataggtgtgagccaccttgcccagccatggttttttaaaatactgaagtctttgatacagctgtaatgtttcttgttgtaaagtgtgagatagggatccacattagttttttttgagagcactccacagctgtcccaacaacttaagaatcccttgtttccccacaagtttgagaggctacttttagtgtatcctaaatttgtatatgtatttgggtctacttttgaactttctgttctgtttaattgatctgtctgttcatgcactgttaccatatactgttttaatcattgtggctttataatatgttttaacatgtggtgaggttgactcctactctttaccctccccgccctccacccctgcttccagaattttcctcactcttcctgcttatttttccacatgaaatttcaaatcagcttcaaaaaaaattctgtacatatttaattggattgtgtacatttataaagtaacttagacatcattaatctctttatgttgtcttctatccagaacttactgtgctctgccatttgtccaggtcttctttttgtccctcagtaacactcccaatttttcttcctatcgctgttgtttatctcttaggaagtttattggtgttttctattttgtgatgcttttgtaaatggggtctttcatcctggtttctacctgtttgttgcttataaatgttgatttctgttatattaattttcgtttgtttcttttgtttttgtttttgtttttgttttgagacggagcctcactctgttg

SEQ ID NO: 10184 - DNA, 1066 bp, Homo sapiens
tggcaagaaattgaaaagaaagcaagccactggactctcccgctgggacctgggacaaaacaaacctttatcctctagattgcaactgcatcccaggctgctctatccactcactgcctgaagaacccagctgcagcttttggttttgtggccaatgactgcccagccctctcccagtggccttaggatgaaatccagctgctctgaatcttcgcatttattttgttcatcgtgaagttgtttttcatgacagaaatataactaaattacagaaattttaggttagaagggggaggattgtaatttatccccaaatcctgcaacttttaagtttcctcctagactcttcctgtgtttgccttgttactgcttgatctgccaagaaccaaatgaatgccaaagagcatcttgttcctagactattttccctcggtcccagaggccaaaaaacacacttttgctgtgtctgtttctgagagctctggtctgggaatattttcctgaaaaaaaaaaaaatttttttttttgagacggagtttcgctcgtcacccaggctggagtgtgatggcactatgtcagctcactgcaacctctgcctcctgggttcaagcgattctcctgcctcagcctctcaagtagctgggattacaggcatgtgccaccacacccggctaatttttttgtatttttagtagaaacggggtttcaccatgttggccaggctggtctcaaactcctgacctcaggtgatccacctgccccagcctccaaaagtgctgggattacaggcatgagccacctcgcccggcctttcctagaatgttttatgctgaaacattgacagaaatgaacccagggacagggctcacagcccttctacactgcgcatagaactcactcttcaccacttgctcctgtgaggaacagaaaagagcacagccaaaggaaatgtattccagtccccaggccacctcagattagctgtgacttgaggctcatcccttcaccttctggaccctgctttcctcatctgtaaagtaggaacaagcagatagtgcaacttcta

SEQ ID NO: 10185 - DNA, 1033 bp, Homo sapiens
tccacccaccactgtactccaaggtcataacttgcacggtaatccagtcggatactttgcaattttattttccttgacccctattagcttttgataccattcctttaccactggcttcttttggcttcattcattcagcaaatatgtattgagtgccttcttaaggacttgagtctttatcccaaatgagacaggaagccattgtaaagtggtaagctggacagtgttgtggctggtgcatttttaaagcatcgctatggcagctaagaggcggatggatggagggtggcagaaaggatatagggagcgattaggaggctggagcagcatccaagaaagaagtggtggcaagatggactggtgggtaagagtgggaagagagagcagtgggctgatgtgcttctctacatttgcctcgtttgctttcttcctctctggtcctacctttctgtggacctttgcagccttgccgccacctgtctctgctgataattctcatggttctgtcactgggctgcttctcttgaagttgttgaacgcactcttgccgaatgacctcatctacttccacagctatgataaccatttatatgccagcaagtctcagatttataactgccaatccgatctcttctcttgagcttcagatgtgtggatatctcagtttatatatcccagatccccaaaactcagcaaaaatgagttatgttcccttccagacatgttccttctcccatattgcctatcttggtaaatggaacccccatcctactggtgttctggcatcattcttaatacctcctgcccctgcctcccacagtcattcccaaatcctgccaggtataccttgcagagagctcgcaaatctttccacttctctacttcccctactgccagtaccctcgtttgggctattgtcaactctcattcagaggattacaaaagtctcctaagttgccttcttacttggactcttgcttgcctctgatcctttctccagttgttacctgagtcatcttttcgcagatctgat

SEQ ID NO: 10186 - DNA, 1029 bp, Homo sapiens
tagtagttctatttttagtcttttgagaaacctccatgctgttttccataatagctgtactaatttacattcccaccaacagtgtataacagttcccttttttctgcatcttcactagcacttgttattttttgtctttttgataaatagtgattctaactggggtaagatgatatctgattttggttttgatatctggttttgatttgcattttactgatgataagtgatgttgagtattttttcatatacctgttggccattatgtcttcttttgagaaaagtggttacacatccattgcccaatttttaataagattacatggtattttgctattgagttgtttgagttccgtgtatattccgtatattagtcccttgttgcatgaataatttgcaagtattttcttccattctgtaggtcatctgttaactcttttgtttcctttgctgcatagagtttttaatttaatgtagtcctatttgtctgttttttgttttgttgcctgtggccttaaagcctcagccataaaaatctcccttgaccaatgtccagaagcatttcccctatgttttcttgtactagttctatagtgtgggtgtttgtttgttgttgttgttgttgttttctttttttttttttcgagacagggtatcactctgtcacccaggctggagtgcagtggcacagtcacagctcactgcagccttggcctccccaggctcaggtgatcctcccacctgagtttttgtatttttagtaagatggggtttcgctatgttgcccagactggtctcgaactcctgggctcaagggatccacccgcctcagcctcccaaagtgctaagattacaggtgtgagccactgtgcccagccataatattgggtttatttttaaagtctttaatcattttgagccgacttttatatatggtgagagatagggatctagtttcattctttggcaggtggatattcagttttcccagcagcatttattgaagagggtgtcctttccccaatgtaa

SEQ ID NO: 10187 - DNA, 1034 bp, Homo sapiens
tgagaccagcctgagcaacatggcaaaaaacccggtgtctacaaaaaattcaaaaattagtcgggcatgggggcgcacacctatcttcccacctattcgggaggctaaggttggggagaattgcttgagcccgggaggtggaggttacattgaggtaagatcatgcctctgaactccagactgggtgacagagaaagaccctgtctccaaaaaaaaaaaagaaagaaagaaagaaagaaaatatatctcgaagactaaactctaagcacaaagaaattatttggagtatagtactttttttctgtttcatttattgatacctatatccgtctcattctttgccttcacatcctgcttcttaaaagaattgcctatgcttattatctatagaatctcacctcccacttactttttagcccattacatttgagctttcctgtcctttccttcccctgtctaagcttaccaaaatcgccaatgatgtctgtgttgctagcttccaagtggacactttgatttctcatttttcttaatctgtcaacaatttcatcacaattaacaattccatgtcttaaaatgttatcttctctagtcatccacgattcaacattgtcctggctttccttctgcctttctggccatacctagattttttcatgggttcctctttctccatcccacaatgaaatattcagtttctcagattcctatacttggctatcttgttttcttattctttaccctcatataggcattctcagtcacttccatggttttactttaccaccaaatcataaattaacatcttcaacattgggccttgctactactgtgtatccatataatctcttgcctgttttgacatcttcttttcactatctcacaggtgtctcaaattcagtgttccacttatgtaatgttgcttaacaaaccacctcaaacttaatgccatagaacaagagggtttttacattatctctcactaatctgagtattggatggtctcagcttagcagtttcccttggggtctctc

SEQ ID NO: 10188 - DNA, 1032 bp, Homo sapiens
atgggagttgaacaatgagaacacatggacacagggtagggaacatcacgcactgggacctgtcggggggtggggggctaggggaaggatagcattgggagaaatacctaacgtaaatgatgagttgatgggtgcagcaaaccagcatggcacatgtatacctgtgtaacaaacctgcacgttgtgcctatgtaccctagaactgaaagtataataaaaataaaaaagtataattggattttttgtaatacaaagtaaggataaatgcttgaggtggtggataccccatttaccttgatatgattattacacattgtagtcctgtatcaaaatatcttatgtaccccataaatataaatacctactatatacccacagagattaaaagttaaaactttttgaaaaaaaggagagcgggacacaggcacagggagaagatcacgtgaagataccagaagaaggtggccaactacaagccgacaataattaccgtcagaagaaattaaacctgtcaacactcgatcttggacttctacaaagtcacttttgccaaatgaagtaacattcacaggttttgggaattaggacatgaacatatcttttgagaggctaccattcagcccactacagctgtttgtaaaaagaagcaagcttcctgatggaagtaaacgttaccttcccaagaaaataaataaataaacaagacaaaaaacacccattccaatgtataggaaatactggaaacagaatactacaaggatgtaataaaaattacatgtttgtcatttcttcccagactacaggaaactctacagaacaaaaacccagtttcttcaacaattaaattgcaagagggaggaaaggagagatagatgaagaaactagtatatgaaaagaaagctaaacagcatcgtgcaattgcactgtgggggctgtatttgtatcctgatttgaaaaacttttttgtaaaaaaaagaaacaatcagggaaatttgagaacttgttgctttgtaagtacttactgtaaattgt

SEQ ID NO: 10189 - DNA, 1052 bp, Homo sapiens
tctgaaaaataaatcaagaaagtaatgtcatttacaatagctacaaatacattaaaatacataggaattaaccaaagaagtgaaaggtctcttaaaatgaaagaaattgggaggctgagacaggagaatcgcttgaattcaagagatggaggttgcagtgagccaggattgtgccagtgcactccagcctaggcaacaaaagcgaacatatgtaactaacctgcacattgtgcacatgtaccctaaaacttaaagtataataataataaaaataaaaaaggaaggaaggaataaattgaagaggacacaaacaaatggaaagatattccatgttgatggattgggagaataaatattcttaaaatgtcaatactacccaaagcagtctacagattcaatgcagtctctttcaaaataccagtgccattcttcacagagatagaaaaagcaatcctaaaattttgacagaaccacaaaagacccagaataaccaaagctatccagctatcctgaacaaaaagaactcaaggaatcatattgtgtgacttctaattatactacaaagctatagtaaccaaaacagcatggtactggcataaaaacaaataccagtggaacagaatagagaacccagaatcaaatctacctatctgcagtgaactcatttttgacaaagttgtcaagaacatacattggagaaaggacaatctcttcaataaatggtgctggagaaactggatatattcatatgcagaagaattaagacccctatctcttgccatatacaaaaatcaaatcaaaatggattaaagacttaaatctaagacctcaaactatgaaactactaaaagaaaacactgagaaactctctaagacataggactaggcaaagattgagtaataccctgcaagcacaggcaaccaaagcaaaaatggacaagtgggatcacatcaagttaaaaagtttctgcacagcaaaggaaataatcaacaaagtgaagcaacaacccacagaatgggagacaatatttgcaaaatatccatctgacaga

SEQ ID NO: 10190 - DNA, 1047 bp, Homo sapiens
ttaatcatattggccttttactattccacaccaagcacattgtcacctctggactttcacatgtgatgtttcctcaagcaagctcttaatgccagagagccacagaactcgatactccctcactccattcaagtctttgctcaaatgtgactctaacagtgaggccttccctgactacacaacataaggcggcatcttttcttcattctctatttcttttctttgtttatgtttattgtatttattacaacctgccataacatttaagagcaagagtttttgtgttttttttttcccccatgcagtgtctccagtacctggaataatgtctgacaaatagtagactcttgataaatattttgttgagtgactttttatggattcatgttcaataaattcatgtggttgaaattgatttaggtgatatattagcagtatcttttatatagctgtaaattagatgatgttttacaaggagtactagtgtcaaataagctctcaactggccttaagagagagaatttattttccaaatgtagatatttcagaaagcagaattagagattaaagattttttgaaaaagaaattgtgaaaaaggaattttgaaaaaggaattgatgggaagtatactcatcaccagcagtaggtttctggagatctaagatctggagtttacctcactaccttagtttctaatgcttgtcatgctttctcaagaccatttctcaaagaatgttcctcttctctaactataccttttctttctgatccagcactgttaggcatctcatgttttctggtgtgttttacttttcttaatatctaatactatgtttattttattttctattggagcacaataacttcataaatatctcttattctttgcactttcagtaacaaaattttttcaagtcaaagtctgccagcaccatagaggagtagttgtgtttgcttcaggattgtctgaggctttaaagcgggtgaactgctgaccttgaggaaaagcagataattctatcaagaaagcctccctccaggagtag

SEQ ID NO: 10191 - DNA, 1093 bp, Homo sapiens
cttgctccccgcccacacacttaaggagtctattttagaaatcccttcatgtcagtatgttctggtccctcattctttttaatgcctgctttagtgccatagtattgatgaactatacttttgttatccacatccctatttgtagttatttagtttattagtatttcaaataatgcagtgaataagttctgtatgaacataagtatatttttgtacactgaaagtgtatctgtagggtaaattcttagagggagaaatgctggatcaaagggtttatatatttaaaatgttgatattggagggagggtcttcaaggtggctgactaggggcacttcgtacctcctccactaagaagaaccaaactagtgagtgaataatcacatgttgactagatcatccaagagaacactggaattcaacagaaaagtgacaggaaatacctaaagttaaaaaggaaagggaaacaaggtagcctgttcaggtgggattagtcaggagccaagagagacccccattggtccacattcccactgtagacttctgtagtgctggccatggaagagcccttcaaccttcctgggccttgaaactaagatagggagctgccaggagattgtgtgatggcactacaccaagaagggagctcatgctgggtcccacacacgctctgagaactaagcaactgcagcaaggcactattttagagccctgcccccaacagactgtgcactgtcctggggtccagcatcactagggctaaaccacaagagaagtgtgagctgctgcccttggggccaagctgtgggttaacactgttaggttagcagtgtaagtgctgctggggagcgagtggtgctggggcaagtattccccacctgctagcctaggtggtgcacatgttccccacctgctagcctaggcttccagctcagaaggtagccctcccttttccagtggcagggcagcagtgcagccactactgcctcccacctgagcattctgccagtggcctagggatcagcctgcccctgcctaccatggctggcacctgcacatattgttgagagcctgagggcaagccaccccagcctg

SEQ ID NO: 10192 - DNA, 1040 bp, Homo sapiens
ggaacttgagattgaagctaatttgacagcagaccttaatagaaaggtaccatgtagagtgtagtgttgattttacttgagtaatttttgcctcaagcaggtagttgattaatagatgtgattgttcttcatttcagcattgtgttctttttagttacgtgtatagaaataagtatctcaatgttaatgatttctataaccattacattaggccctgttatagtgttaggggaccacatatattcctatccaaaagtaatacgttggccaggtttggtgactcatacttgtaatcccagaactttgggaggacaagggaggtggcttgcttgagcccaggagttgagccatgggcaacatggcgaaacactgtgtctactaaaaatacaaaaagttagctgggctcagtggcatgtgcctgtagtcccaggtacttgggaggctgagttgggaggattgtttgagcccaggaagttgaggctgcattgagccatgatcgcgccactgcactccagcctgggcattggaatgaggccttgtctcaaacaaacaaacgaacgaaaacaaacaagcaaaaaaacaaacataatacattgtataattggaatgagcagtttaaaatcaattcttaacaaaatggtcttctcaattcaaatccctgtacctctccctgacacctgttatagataaacattctgttttatccagatttgtgttgtgtagataatagtaagtgggcaaatttctttgtaaaacagtttattttgttgtttgaagtgacttgtgtcatggtatcatttaaaaagaaaagacccttaaaatctgtcttgagaattaataatatggaacagcaccaaaatttgttcattaattttacatgccagtatatatctgtctacttcaaattgaatttgtttttctctttcctggtatttgagagtttggctgccgagatttagaaagctgtgtgatcagagttctatggagatggacagctgtgttccctgtgacatgccagaggtggtttgtttttatggcta

SEQ ID NO: 10193 - DNA, 1048 bp, Homo sapiens
aacttttacactctacttcccttttaaacataagttccaattttagaccatctctttatgactggatatgactgtatgctttcagaaaaagccaggttacattttgaatgctttgctgcttagaaatttcttctgccagataccctaaatcatctctctcaagttcaaagttccagagatctctagggcaggggcaaaatgctgccagtctctctgttaaagcatagcaagagtgacctttgctctagttctcaataagttcctcttctccctctgagacctactcagcctggatttcattgcccatatcactatcagtgatcaatggttttggtcaaaaccattcaacaggtctctaggaagttccaaactttccgacatcctcctctcttcttctgagccctccaaactgttccaacctctgcctgctacccagttccaaggtcacttccacattttcaggtatttttatagaaatacgccatgtctctcggtaccaattttctgtattactccatttccacactgctataaagaactagctgagactgggtaatttatcaaggaagaggtttaattgactcacaggtctgcatggttggggagccttcaggaaacttaaaatcatggtagaaggcaaagggaaagcaaggcatgtcttacatggtcgcaggagagagagcgagcaaagggggaagtgccaaacttttaaaccattagatctcatgagaactcacttgctgtcatgagaacagcatggggaaatctgcccctgtgatccaatcacctcctagcaggtccctcctctgacacatggggattacaattcaagatgagatttgggtggggatacagagccaaaccatatcacttcccttagacagttaactctcatttgtccttctgatctttaatcatatgtagttctcaattaagtctatttgaatatacaaaccacctccccctatctttaaagttttttagagcactgtatatctgttttatatattctacattatttttatactcggtttcttttattttaaaa

SEQ ID NO: 10194 - DNA, 1050 bp, Homo sapiens
tacatgttttttaaattaaaataggaccgtgctattcatttttctgcagcttatatatttttattaaatatttgagactatatagcacattctctttaataattgtgtaacattgcagcatactgatgaccataatttagttaatagttcctcttggtggatattaattttttaaattaatccctggcagaatatacataccagaagaacattgataatacccataatgtttattgctattcccccagcatctaatacagtgccttccctatagaaagcacttaataaaacttgttaagcaatgcatatgccttttccaggcgaaaaggctgctgtgccagctcttacctgatttgtgttggttacctgtaatgtatcagttcatatcaatggtgagaaatagaataacgggagtgtggactggccttggagtcagaaggcttgggttggattcctgggtataagcagtgttggttaatatggtcctttgttggtcagattctaataggatacttactacattcagtttaagtgaagatcgaacaacataatgcatatacaaatactttgtaagtgtaacacccagtacaaatgttggcattactgtctccctccccgttcctggtaaccactgctttattctctctctgtctctctttttttttcggagacagggtcttgttctgtcacccaggctggagtgcagtagtcacaactcaatgcagcctccacctcccgccctcaagtgatcctcccacctcagcctcccgagtagctgggactacaggcacacaccaccacaccaggctaatttttataatttttgatagagacagggtttcgttatgttgcccaggctggtctcaaacttggctctagcaatccacctgcctcagcctcctaaagtgctagaattacagatgtgagccaccgtgcccggcctttattctctatttattcaagtttttttatttttttagattccatatataacagatcaaatagtagtcgtcttctttctatctggcttatttcacttaacatattctg

SEQ ID NO: 10195 - DNA, 1406 bp, Homo sapiens
tccaactcctgacctcaagtgatccgcccacctctgcttcccaaagtgctgggcttacaggtgtgagcactgcaccctgcagaaagttaggttctgttatggaggtaggtttatgaggaatcctaaaggaattgcttactcccagtgagacagtcttgaactagactcttaggaatagataggatttggaatacacggatattccagtttgaaactggttgcagataaaaataaacagtgattctgcaattattatggagacttaagtaatattagaaagaagtaaggagatacacttggaagatactaagttgatacaacttgatagaagattatgaatactaggctgggggtcattacagaagtcaagccaaaaaaatgtactggaaaaagaacactaaagtgggaggcatgtcataatttatatggatattggccttattacttggtgacagatcttttttttcaacttttattttagaatcaggggaatacatgtacaggtttgttacaaaaatatattgcatgatgccgaggtttggagtatgaatgaatctatcacccaggtagtgagcatgcctaattattttttcaacccttgcccctgcctcactccctgctcttggattccctagtgtttattattcccatgtttatgtccatttgtattcaatgtttagctcccacttagatatgagaacatgtggtatttggttttctgtttctgtgttagtttgcttaggataatcgttgccagctacattcatgttgctacaaaggacaagatttcattcttttcatggctgcatagtatccacgctgtatatgtaccacaggtgcccatcagtggtgagtgatcttgagtcactgcccatttttcttgatctgagaggattcgactggataaattataaggtccctttaagaatcaatcagtcatcagaatttcttttcctttttttttttttttcttaaagagacagggtcttactctgtcacccaggctggagtgcagtggcacaatcatagctcactgcagcttcaaactcctgggctcaagcgatcttcccatttcagcctcctgagtagttgagactagaggcatgcactaccacgcccagttaatttttaaattttttaatagagacagatctccttgttgcctaggcttggcttgaactcctggcctcaagcaatcttcccacctcgtcataagaattttttagtgatagatggttttgtttttaatatttcagctggaaaactattttagcatctagcagaagacttgtttgtggaaaaagcttgacttggtgaatcttttcatcagagtaatccctatgtttcacatatttcatataaaaataaaataagtttcccactctttagtgtgaaattggtgaggg

SEQ ID NO: 10196 - DNA, 1018 bp, Homo sapiens
tcttagagtttatggtagattgaattattgctcagcaaatattcattccccaccctttctcttgaggtgaactatacatacatccctgtcttactgattttagacttggtcatacggcttgcttggactagtagaatggagatggaattgactgtaaagccatttctaaaatgaggctttaagaggcatggcaagttatttccagctttttcgtacttccggcacttactgtaagaagaacttgccccaggtaactacttcagatggggtcccagaatgaaagatatgtgaaggatacctgaacttgaccctgcaacctgaagcagagatgctctagccaacctgcagattcatgagcagaagttagcatttattgttttaatccatttccactttttgagttgttacagagtattgattcagcaatagctggtccatacacagctaaccaagccattctgttttgcaggaattatctctgaaatgcctagtacctgtaaataacaagccagtactagactatcatgaaccttggcttaagggagatcagaggtaacttttgggtcccatatgtgtgtcggtacatggcatgagctgagggatgccgctgaagaaaggaactacagttggctaaacaggatatacagaaatatcctgctgctctagctatgcctcaaatgctttgggtcagatttttactttttgcagtttgatatgctaacattgtcaagtttttctattactttctgttctgttttcttgttcctcctgtattttttttttaacttcctgcctttttagaaataactcatgttttcacagtatgtactacttaaagaaacaatatagaataagaccattagagttctaattatggctccaccatttgttaacataatcactctacataaattacttaagccatttccccctctgcatattgggattaataaataactcacagttgttgctaagcttaaatgagataacaaagtcattagctcaccatcatttgtat

SEQ ID NO: 10197 - DNA, 1040 bp, Homo sapiens
ccatactatctttgcatttattaagtttcaattaaaaacatgtcactaaatttctttgttctgtgaattggtcttccatgtcattaaccagttcctgaattcatcagactatggtgtcattggaaattggttctttattgcagattcactgaatatttccaagcaaacatctttggtggaatttttccctgatgtcagtgtgtgtggggtgtgtgtgtgtgtgtgtgtgtgtgtgtgtgtgtgtgtgtgtgtgtgtttatataccgtgttagcatcctgaaggtctattatataaaaagcctgaaaacactaatacttatttgaaatagcagacatttgcttctgttggctttgcaattcactactatttatttcaaattttttttgttgttttgaatgtctatatggtttttgcataaatactacttaggttttgagggttttattgttgcatagccagtacatctctgcagataacccatagtggttttaaactttgctgtcagtcatacttttgtgtaaaatagtataaagtcgttggtctttatttctttgaaattactttcattgttgtttggtttactacctctgcctcattcagagacattttatctttttttgccaaggaaagcccattaaactttttctgtttgtaaattaggtgtaaaaatacctatttacttccttaatttagctaaaaatattaaattataaattataggctgattaaaatttaaatgacacaatgacagattatgaaaatatgcttacattttctcagatttaaattttttatttttttattttttagagctagagtcttactctgtcacccaatctgaagtgcaataatgcaatcttggctcaccgtagcctcaatcccctgggttcaactgattttccctcctcagcatgcaacaccactggcagcaccatgtgtgacaccacgtcctgctaatttttaaagtttggtagagacagggtctcactttgttagcccagactagtcttgaactcttggattcaagcgatcctcccac

SEQ ID NO: 10198 - DNA, 1063 bp, Homo sapiens
cccagtagctgagattacaggcacatgccaccaggcccacatgtctgtagtcctagctactctagaggccgaggtgggggggatcacttaagaccaggaggtcaaggctgcagtgagccatgattgtgccactgcacttcagcctgggtgacaaagccaagactctgtctgaaaaaaaaaattataacaggaaaaggtcctttctctctttcctccaccccctctgtttgtttcccccacctccatccctccctcccctcctgtagttggaatacttgttatgtgtctgggattctttagggtcttccagatttagtgcttcttcccctatctggatcagactatacttcgattctttttaaatccaaaatagacaggaattttaggataccaagagacagagactacattgaagggtttacatgcccatcattccctatcacaggaaatacctaaatggtatttaaatttcttttttttttctagccccctgtctgcgtgttggaatgtttaatcgttttaagggtctgggcagtcctgtctttgcttactgaatgattgggaaggaaaatagagaagtaattccagtgggttatgttcaaccatccagagcagagattggcaaacttttttttttttttctgcaaaggaccagatagtaaatattttatgctttgagggccatatggtctctgtcaaatttcccaacattgctgttgtagagtgtaagcagccatagacaattggcaaacaaatggatgtgactgtcttccagtcaaactttatttagtgaaacagacagcaggctagaatttgccaacctgtgcactcaaactatctgttgtgaggactcttccccccttttcccttaaaatttgtagatggacatttttgtaaaatacaataaaagtgaattattggatgagtaaaaaatacatggttaaaatttttagattacagacaacaagttacatttcaatctataatttaaatggtcatacatagggaaaaagaaaacaattagaagaaccataaatgttgttacttgaagatatcttctatt

SEQ ID NO: 10199 - DNA, 1093 bp, Homo sapiens
atgtcctgataaaactaacaagacgcttaacctattaatgtataatggacatctgctggtccagataagtaagacacttagggaagcaaggttgtaggtcaaagatagtaagcatttaatttgaactgagagaatgagtttagttttttttatggggtggggcttgtgatcagattttttttattgtggtaaaatatacataacataaaatttatcattttaactatttttaagggtaaaattcattggcattcacagtgttgtgcaactatcaccactatttccagaacattttcatcaacccaaatagatattctgtaatcattaagcagtaattcccctttgtctcctcccacagcccctgaatctactttctgtttctataaatttgcctagtctagatacttcatataaatggaatcacgatgtttgtccttttggacttcagtattcttaaaggatatttctgcttttctactctacagattgtctgtttaaataatggttttcaaatatcttttgatggtatgttttatctattaaaaaatttaagtgatatatatatttgtaacatacatgtactctgtactaatatattgtatacattataaaatatgcataaaatcttaatgaaataaatattattttgaaatatcagtatcttttgatgactttctgctatcattagcttgtatctcaaggtttaaaactttgtcttatttcttatcagattttattggatggtcattgtatacttctcctgataaagagctctgtatgggtagaaagtggcagctctgccatttgtttgtatttgaattattagtatttacttcagtgtttctttatcagaattttttttttttttcgagacagggtctcactctgttgcccaggctggagtccagtggggtgatcatggctaatacggtttggctgtgtccccacccaaatctcatcttgaattgtagctcccataatccccacacatgttgtaggaggcaccctgtgggaggtaattgaatcatgggggtggttttccccctgttgttctcatgatagtgagttctttcgagatctgatggtttttata

SEQ ID NO: 10200 - DNA, 1034 bp, Homo sapiens
tgtcctaggtactatgccggtcacttaaagacatgatttcatttaatctttaattgtggggtattcatttgtttactacaaaggtccttctgcattttcctaggttgtttccttatgtacttcacgatgcaaatcaattgtcaacctatggattttatttatttattttattttattttttagtttttgagtcggagtcttgctctgtcgcccaggctagagtgcagtggtgtgatctcggctcactgcaagctccgcctcctgggttcacgccattctcctgcctcagtttcccaagtagctgggactacaggcgcctgccaccatgcccggctaatttttttgtatttttagtagagatggggtttcactgtgttagccaggatggtctcaatctcctgaccctgtgatccacccaccttggcctcccaaagtgctgggattacaggcgtgagccaccgcgcccggccttgtcaatctatggattttattccctcatctgttgctgctcagtctgaatttgatggctctcatgtgctctcctgtagtaccttttgtttctgtcatatgacttattgttctgttatgctctcttctctacctattttgcatagtctctggtatgtgttaaatgcatggtgaatgtttatttaatgaatgaatgaatgaggaaatatagtttcaagttctgagaatgataataaatccttaggtgaaatttaccccatttgaaagattaaattgattcattttagcaaagttgaagagacaaatgtacctaaacagtcctttttcattgtgaacatgtatgacttttagaatctagggagacaaaaaataatttttaaaaagattacattttgggggtatgagcagtgttctttactaataccggtattccctagcagtaaaaaataactcctgtacatcaattagcaatttgtttgcatcaaagagattttaaagatggagaccatctctttactttaggcacagttgcacaggacccctaccttggctcgtaagcccagaaa

SEQ ID NO: 10201 - DNA, 1051 bp, Homo sapiens
tcccactcacaagcgagaacatgcacataatggcatatttttaaagaagaaattatttcttcatttatttggggtactgatatggtttgcctgtgcccccacccaaatctcatcttgaattgtagttcccataattcccatgtgttgtgcgagggacctggtgggagttaactgaatcatgggggcagtttcttccatactgttctcgtggtagtgaataagtctcacgagatctgatggttttataaggggaaacccctttcacttggttcttattctctcgtgtctgtcaccatgtaagacatggctttagccttctgccatgattgtgaggcctcccaagccacatggaactatcagtccattaatcctctttttctttataaattacccagtcttgagtatgtctttatcagcagtgtgaaaatggactaatgcaggtacctcataaaggtccttgtaagactgttctcaatgatttcatgtgaaatgattttgtatttcaattgctggaatattggtttaaagcctcattttgagaggtaggggtttttgttttttttcattccgctcattttctctgtgcttatccttctctgtctgatgattttgcacttgttccttttcagctcctaagtctttaatgtagaaccaggtcttataaatgcttcagggatcttgaacatgatgatattggggatatggcagacctaccactgaaccagaggggaagttcaaattgttttttattcaatttaagagcatatctattttctttctttcttttttttttattatactttaagttctgggatacatgtgcagaacgcgcagttttgttacataggtgtaatgtgccatggtggtttgttgcacccaacaacccgtcacctatgttaggtatttctcctaatgttatccaccctctagcccccaacccccaacaggccctggtgtgtgatattcccctccctatgtccatgagttctcattgttcaactcccacttatgagtgagaacatgcagtgtttcgttttctgttgtgatagtt

SEQ ID NO: 10202 - DNA, 1756 bp, Homo sapiens
aattaagtttttaaacttcattaaagaaatggtggctataattaaatgttagtactcttggggacatagatttgctagtaagtttcactttttcatggctattcggtagcacatctcgtaaaggtgttgagaggaaatcattgttgatgctgatccccattattttcctccccaaaccttctgtttctattaattaatttagtggttaggccaggataaaacagagtggagagaggggagaattcatactagatctgtgattttgaaccttttgtgtgtgaacatgcccgtttttattttggctccttttatacaggacatagtggtctgcgtatgtcttcactcatttgttgtttacctggtcccactggttgagtttgagtcccctgccctgaccgctgatcaaaaaataagattttttataggcacctctgtcttaacctctctatatcagtttatgctgtggactctttctctgtattttgggttaaagaacatatattaagatcatgtgtcaggcactgttctaagcactttacatagattaactcatttatgttttccctataacctttgagggatacagtagttactgttattcccattttataattgtggacaccaagacaagaaacctgtgtttcactctgtccatttccctcccttcaaataatctactactggacacttttttttgtctttttgttgagatggagtctcattctgtcgccaggctggagtgcagtgacatgatctcggctcactgcagcctctgcctctcaggttcaagcgattctcctgcctcagccccccgagtagttgggactacgggcacacaccaccatgcccagctaattttttttttttttttgtatttttagtagaaacagggtttcaccatgttggccaggatggtctcaatctcctgacctcgtgatctgcccgcctcgacctctcaaggtgctgggattacaggcgtgagccactgcgcccagtcctggacacattttaagagagacattggcagtctgaggtgcatccaaaagatgaccaaagttggtggtggggttggaaatcatgctttttgggaaaatggtcaaagaagctgcattattttcaacagcctccattatagatttcatgtgtatgcacgtgaattgaatttgactagtttttgtaactctgaagtgcaaaactaggaagagggagtagagagatcaggatgacagaaggtattagctagttagagcagctccagaatggaagagactgtgtcttccaaaagtgttcttgtaaaataattggtagaccatcttttagtaatattgtaggaggcatttatggaaaacatttttctccttaaaagattttgtttaatgtttccaattgcttgtggaattggacaaataaaacatgtgtaaaggcccttcccatctgaaggatgccagtttgcaacttctgctttaattgttctaggttttacttctgaatcaaactaaattcttagttttcagaccacattatttcacttccagcagactgcttttactgaggtatgcttaaacctcacttaactaaccactgaggtgttggttagttattaagtgaatggtgacgctctaaggtcaccattcacttaataacttgttcaatttcttttttttttttaatttgacatttaggccgggtatggtggctcacgcctgtaataccagcactttgggaggccaaggtgggcagatcacttgaggccagg

SEQ ID NO: 10203 - DNA, 1036 bp, Homo sapiens
catgttcatttttctgtatgaaaatgcttatctagttaaataaaaatactgtacttttggattaatggcaaagtttttctcaatctcccaggccttggcaaccactaatttactttttgtctctctggacttgcttattctagacactttgtataaatgaaattctaaaatatatggccttttgcatccgttttctttcacttagcgtaatgttattgaggttcatccatattgtagcatgtatcagtacttcattctttcttatggctgaataacattccattatataaatataccacatcttgtttatacattcatcagttgatggacatgtgggttgtttgtactgtttggatattatgaataatgctgctgtgaacattcatttaccagtttttgtgtggacatgtgttttaagttttcatggatatacacctaggaatagaattgttggatcatatgctaatgatgtgtttaaccagtttgggaattcccagattgttttccacagaacctgcaccatttacttttccactaacgctatgagagttctgatttcttcacatacttaccaatacttgttactgtctgttttattatagcatccattaatatcatttaaaagttttatgagacattgattcagaattttagcaaatgccttttcatcttacatggagattatcaggtttcttctgctgtgctctcttgatatatatatgatacattataatgaatagatttccaaatatttattatgtgaattttgagtagttgttatcccagatttgtcttttgctttaaaacaggaaattagttggtagacaagtaactttttactaacaactaaaaatgccactgagaatatttaaattagttgatatgcacatcaagggtacaaaagctattcctttttcttgtggacttcacgtgaatgtccttattttaaaatgagttatgtataaacttaaaagggtaaaaaatacataatttaaatatttccttttatcttttgtgaaatataaaaaaatccaac

SEQ ID NO: 10204 - DNA, 1049 bp, Homo sapiens
gtgagctataattgtgccactgccttccagtttaggtgacagagtgagaccccatatgtattaaaaaacaaatctgtcatcatagtaggagattttaacacacctctctgaagtggatatattaagcacataaaaattttaaagtatatagatttgaatttaatgattaatacactagttacataatacagaattctatatcccatattagagaatatgcattcttttttttttttttgaggcagagtctcgctctgttgtgcaggctggaatgcaatggcatgatcttggctcactacaacctctgcctcccagactcaaagcaatcttccctcttcagtctcccgagtagctgggactacaggcatgtgccactatgcctggctaatttttgtattttatgtagagacaggatctcatcatgttgcccaggatagccccgaactcccaagcttgagctatccatctgccttggcctcccaaagtggtaggattacagacgtgagtcaccgcgcctggcctttagagaatatgcattcttttcaaacaaaaattaattatttatttattagcccataaaaagagtctcaaataattctgtggaattgatatcatacatgttgtgtagtatgtgtctaagagagggctcaggaaccaaatgtggttttcccctagttgtatgaccttgggtaagttacttatgtgcttcaattttctcatctgtaaaacagaaatggtaatagtggtctctcagagttgtgagggctggcattcagaacaatgcattacacgtggtaagggctcagttagtgtttgccatcatcattatagtatcatcatattctctgatcacatgcaatgaaaatagaaatcagtaatgaagagataaacatcctcttccttacaccaaaaagaaaaacctccaaatataccattcagcaataaaaatgagtgaattatggatacacacatcaatgtgggtgaatctcagaaacattcttagtgaaagaattcagatacaagaatatatactgtatactatactccag

SEQ ID NO: 10205 - DNA, 1026 bp, Homo sapiens
ataccccaggctgagaacctggggaaaaaagtctttagaatttgggggagggtggggggagggagggcattgtggggaaggagagggaagaagggaggagcggtgcttgcctcatggctttggtttgaaaggtctctggccaaagcatctggccctggaccttctgatttgcacagtgatgttaactgacctggcacttcctcaaaaggtgattttgtccttagacctgccaagcggctgcagggtggtaggatcccagcatcccgaggccttggaaggccggatgccctgtgtcatccagacttcagcctctgagctgtcatggacccactctgatgaggagcttcctcctgattggagtgggaacctagggcatttctctcccttttcttttgcccttcccagtgccaggactcacctgtctgaccatagagcttgcaggcaggccaagctcttggttacctgtgccattcatggcccaagtgaaggaaccacattccaggtgggtgctggcagctctgaaggtgaggatagtgaaggaaaagcaatagcaataaacatttcatagactcatggaactgaagggaccttagcaatcatctcatccatttccctatttggcagatgaggaaactgaggcccagagaagcggaaaggacttccctagaccttacagtaaattagcattaaatgcagccttcctacctagtgggcaccttgcttacaaaaatttacctagggacggattggcttggttttgtaaaaattaagtcggcagcgcccatacctggtgagtctggaatggtctctgggctcctgtttctgctcttttcctccacggactccaaaggcgggggttgaagactgggcagaggctacatgggggcggatggcaggaacagaaattgcaaatgaagaaatagcatttggaaattctgtgaagacatctggaacttccgtcctgtacctgactccacctccaggagaaggagcaggtggactggccgaaaaggagaggccatgctt

SEQ ID NO: 10206 - DNA, 1070 bp, Homo sapiens
gtggttagaaagtcctgggtttgaatcctgattacccaactcactagttgtaaggccttgggcaagtcacctcacctctctaagattcaaatgtgactacctgcctcagggttgtggatggttttatgtaagttccatttactcaataagtattgaatgtcttccatactggaatagaaaaattaaatgatgccatctttgcctgcctgaagtagctcccatttgggagcctggcatataaactcactgcagtactaatgtgctaagtattgtaaaaaggaatacatggaaggaggagggaacaacggtctgcctgggggtgaaagtgtaggggaagcttcagagagtggagaacaacagagatttgaagaagtagaagctgttctttaagcacacaaaggaatagtgggcattccaggcagagtagagcatgggcagaggcttagagatgtgagaacatgacactgtgaggaacgtagaagtaggggagtggctaaactgtgagcagctagatgaatctgaactatagatatacaagggctgacttggagaggccttgaatgtcttgataatacccgcccattttcttgtttagcacttatcattatagaattagaaagcttcaaaagaccttagagatcgtccagttcaaccttttctcttgaaaaaggagaatcaaaaagcagtgttttgtcccaagttacccagtgagtcagcagccacatatggactagaatctttggcagatctcctgactctcgtcctatgcttttctctgccaatctagtatttattctactgtcattctctttcttggggcttacttaaaggagaaaagaatacaggttgtctgaagacctagatttgagtcctcactgtgtcatttcctagattcgcaaccttagagtcacctgacctatcagaacctcatttcccccatctctaagtaggaatcatgtcataattatacacacacaccaagaagttatcagacagcccctgttttttggacaaacaagagctattttatgtaaataggctatggtatcccctaaggtgcttacatagat

SEQ ID NO: 10207 - DNA, 1046 bp, Homo sapiens
tgtttttatttagaattataagatgattagagaccatcaaatccaaccctgttcttagatgagaaacctgaggtctaataagtgcctaaggaaagcacttaagattcacagtgggccatgtgccgtggctcatacctgtaatcccagcactttaagaggctgatgggggaggatctcttgaggccaggagtttgagaccagcctgagcaacatggcgagacctcatctctataaaaaaatgtaaaaattagctgggtgtggtggcacctgcctgtagttccagctactctggaggctgagttgggagggtcacttgagcccaggaagtcaaggcttcagtgagccatgcttgtaccattgcaccccagcctgggtgacaagagtggagaccttgtcttaaaaaaaaaagattgacaatgaattcagtatctgatttactcctgtatctctaatacccagctaggcccctgcatgccatgaatattgactagtttttcaacaaatggatggacagatagatgtcaaacctggaagtagaacccagacctctggcagccaatctagttctctttctgctcaccttatagctgctttttaatttccaacacacttagttagatttctttaaacaaggtaactctcttatcttcggtcatttcccacctctctgagtttcttctataaagtagggataatagtgtctgcttacttcaaaagtgctttgaggggctgggcacagtggctcacgcctgtaatcccagcactttggaaggccgaggtgggtggattacctgaagtcaggagttcgagaccagcctggccaacatggtgaaaccccgtctctactaaaaatacaaaaattagccaggcatggtggcacattcctgtagtcctagctactggggaggctgaggcaggagaatcgcttgaactcaggaagcagaggttgcagtgagctgagattgtgccactatactccagcctgggcaatagagtgagactttgtctcaaaaaaaaaaaaaaaaaaaaaagcattagtagccttt

SEQ ID NO: 10208 - DNA, 1051 bp, Homo sapiens
gctgctcacctcctgctatgctgcctggttcctagcaggccatggaatggactggtgctggtccatggccccaggcttgggaacccctgctttacagtttttattgccatctgatatatctttcacttgaaaaaaaatctctctttcttccccctcccaactagcatgtaagcagaaatttttgttgttcttgttctctgctgtatctcaattcctctagacagcctatgtgagagaaatggcatttgggaaagaaaggctaaggcatggtcctcaaactgggcaacaaaatctccttaggaacataaatacacagatttctgagccccatcccagatagagcatcaaggatcttgtatactctgtgaaagagtttggattttattcataaggcttttgaagaaggctggtggtattaactacaaatgtatgacaactttttggggtaatgaaaatattttatatcttgattgtggtgatgtttgtacaactgaatacgtttttcaggggctcatagaactatatacctaaaagaggtaaaattttactatatggaaattatactttaatgaacctgtcattaaaaaatttttttttacaaattatgttttttgtttttttcccattttgaggttagaggaaacagagactcagaagttaaaggactaccctgtgatcccatcatggtatgtggcagatccaggatttgaacctaaatctgcctgattgtagagtttatgatcttcctactcatttttagcctgtccctgaaactatttacagtatagattttgttataaaaggccaaccttcctttagaagctgggaatcccatctacccttgagcagctccctagaagtggctgtcatattctaaagtttgaaaccctggcagatctcatttctgtcagtcattaattgagattggaattgatggagtgctatcatggagtgctaccccaggcatgatctaccccaggcatgatctcctcctgtggcagtggccctcattttggagcagcaggagaccagtttcaaagctgatgagttt

SEQ ID NO: 10209 - DNA, 1050 bp, Homo sapiens
gtgatctgcccacttcggcctcccacagtgctgggattacaggcgtgatctaccgcgcttggcctggggaggcctatttattctcaggttgatggctgaggttcacctgatatgattcaccattgacaaactttgatgaagacaagcatgtttatgctttctttcaaataactttttatttgtggtcccaaatttcttctggtataaataggatctgaattctgtcttttatgttggggctttcctgtatatctggtgattcttggttgtctgttcgttgttaaaagtggaatactaaaaagctgattagaagttttaaatgctggccgagtgtgatggctcacacctgtaatcctaacactttgggaagctgaagtagacagattgcttgagacgagaatttgagaccagcatgggcaacacactgaaacctcatttctgcaaaaaatagaaaaattagctaggcgtggtggtgtgccacctgtagtcccagctactcagtaggctgaggtgggaggatcacctgagcccagggaggttggggctgcagtgagccatgagtgacagagtgaaaccctgtctcaaaaaaaaaaaaatgttttaagtgcaggccagatgtggtggctcacacctgcaaccctagtgccttgggaggccaaggtgggaggatcacttcagcccaggagtttgagaccagcctgaacaacatggtgatacccccatctctcaaaaaaaaaaaaaaaaaaagaagggtgaggtgcggtggctcacgcctgtaatcccaacactttgggaggccaaggcaggcagatcatgaggtcagaggatcaagaccatcctggctaacacagtgaaaccccgtctctactaaaaatacaaaaaattagccgggtgtggtggcgggcacctgtagtcccagctactcgggaggctgaggcaggagaatggcatgaacccgggaggtggagattgcagtgagctgcagattacaccactgcactccagcctgggcgacagaacaagactctgtctcaaaaaaaaaaaaaaaaa

SEQ ID NO: 10210 - DNA, 1032 bp, Homo sapiens
gccaccacacccggccatttctaaatcttaatgagaactctgataggtaggtattgtttccatgttacccatgtaaaaagttaagacacgtttagtaactaaattaagggattcagctaattagtggcagacagtttaccagattcaaagcttatcctaggctttcaattacagggtaagacattctgaagatacattcaagttgaaattaaactgttagatattacagcagttggctcaaaaataatattatatgtgaattaatacctatcatcagatgtatatatctgattgttcttcctgtcatttaatcttgttttacagcagtaacatacatggaatattttgattatctcaccaaaattaaaggacttctaggcataatcctgttttaagaattctttaaaaggctccaaagcatggcgtagtcactggaaatagcctcagacttgggtttcaaaatcttggcactgccatttattgggttatcttggataaaccttttgaccatcattggataacccttactcttgtatgagccttattttgctcatctgcaaaatagggatatgatacacactttacagggatgttagggttaatgtatgtggtggggtctagtatatgactgtaatatgttggtttcctttattgagtaatgctactgctagtagagtatcaggggataatttggtgctttcatcattggcctcaggatttattaaaagatggccaacatcggatgggcacggtggctcacacctgtaatcccagcactttgggaggctgagatgagcgggtcactggaggtcaggagtttgagactagcctggccaaaatggtgaaaccttttctctactaaaaaaaaaaaaaaaaaaaaaaaaatgccaggtgtagtggcacatcccagctacttgggaggctgaggcaggagaatcacttgaacctggaaggcagaggttgcagtgagccaagatcatgtcatcgcactccagcttgggcgacaagagggaaactccatctcagaaaaaa

SEQ ID NO: 10211 - DNA, 1023 bp, Homo sapiens
aataatatgtgtaccatagttggcatatagcagatgcccagtgacgctagcttcattccttccatttccaaaattggtagatttgtggattcgttgaactattcctgaagggatgacttttgccttctctattccgtgatgcggttcagcacaggttagctgttaggtagtgtctcaggtttcccattcaagtctgtaaatgtcatttgagctttatggtgctagcagttattgcaaaggaattttttttttttttttaaataatgggaggcacctatgctttgcttttgtactttctcatcaattctcattgctctgtctagctagagatactttgtattgtgagagccagggaaaccaggggccattttcttgtctctctgtgtttatttgggttggaggattgtctaaaagttccctagtgaataaagtagatttgctgagttcagattcttccctcctgggtgagcccaggatcgaactactgggcaagaaaagaaataggaagatgtggagaaaactggtgagttctgcttgtaaagttgtcaggatctttgagttggggggcatgtagaaaacagttgattccccatttccgtcttcatttccagagcctgtacactccaacacaaagggagctttaagatggaggtctgcattgtaatttcctagaaattactgcttctggtaaccgctcattcagttttcacctctttgctgcagtagatgaaacaatggggacaataaaaccatttatctgatggctgtagcctcaatgggatgtttgttttaataatggtataatttgcagggttcataaattgtgattttattctcatggaaataactgcccggtggtatttggattctcaggtctcctgttgtgaataatttcgctaacattctggctgacaattccctttattctacacttcgatttagattgttcatgctggttgggtaattagcccagaacagagccagtttttttcagtttggggatggcaggtggttactaggtaa

SEQ ID NO: 10212 - DNA, 1078 bp, Homo sapiens
atcatttcaaactggcctattaacagctgtaatttcccaatgagtcagttactccatgttgctctgggctgagttttttttgtttgtttgtttttgtttttgagacagagtcttgctctgtcacccaggctggagtgcagtggcgtgatctcggctcactgcatcctctgcctcctgggttcaagtaattctcctgcctcagcctcccgagtagctgggattacaggtatgcaccaccatgcccaactaatttttgtatttttagtaaagacggggtttcactcttttagccaggatggtcttgatctcctgacctcgtgatccgcctgccttggcctcccaaggtgctgggactataggcatgagccattgcacctggcctgggctgagttttaatagagtgtcttctatcattgttgttgccccttgctccctgcccgttgtgttgtctctactctactttagcccactctcatgtagctttcctttactctttgcccatagctgggtcagtggagctgtgtacacagtagacacaatgagactcagaaagaacttgatttatgacggatccctggaatctcacttggaatgaatgcagatcacattggtaaatggagaagacgggaccttatgattgcttttctgactcagtctagagttcttttttctgcttcaaagtttcctctttattaacctttggtcagttttaatttgtagataatataaaatgaatgctataaaaccaaattgtatcaaatgcttgtgtatttgatttttacaactgaaatataagacttgacttaactatttgatggtagaaagattgagactttaagaaatgtgggtttttaattaccctattaagccattagtagtttctggcaggcaattttttttttccccaggctggagtgcaatggcaccatctcgactcactgcaagctccgcctcctgggttcatgccaatctcctgcctcagcctcccgagtagctgggactacaggtgtgtgcctccacgcctggctaattttttttgtatttttagtagagatggggtttcactgtgttagccggg

SEQ ID NO: 10213 - DNA, 1059 bp, Homo sapiens
gtcgcattgtattaactacagaaacagcatctccacctattcatcagaaattcgatttaaaccttagcgatatgctcattcttagggcagaacgatgataatggaaggtacacaggagtgcaaatggagggaacatctttagagaaacagttctatggacctaattgcattaactgtgataatatgttaaacataaagtggctgttgattagagctcagactgaaaaaaaatgaggagggatgtaaagaagataaaattggcaccattgggatcgaaataattctttttatttttgttcaagcttcagaatttagctcgcaaacaaaccattttccttggctttcacgattgagcatataaaaataccatttagaatcttttttttttagctccaaaatgggcagaatgatggaacgttggacttatcctttgaattgaaagtgttttgtaatgaggaagctttctgtattataataaagatcaggtttgagcagttacctgtaattcagtgagactgtaatctaatgtgagcatttctctcataactttactctgaggtctagacgttgtttttgcagatctgcaggcttggtctagaggtgggatgtttatattaaagccctagcttttgaaagcccaaaatgaaaagtgcctgggagaaatgtgttggtggattttttttttccacagccgtggttacctgtgtagtagtaatgtgtttttgtatctttacctcatttgatcctcccgatatcttggtgagaagagagcagatggaggtattgatagacagaagcctttgtggaacgaatagcccatgagtttaggagttgagtcccagattcaaatcccagttctactacttgaaagctgagtgatttcagtcaagtcattaaaaacctttcagatggccaggcgtggtggctcacgccagtagtcccagcactttgggaggccgaggtgggtggatcacttgaggtcaggagtttgagatcagcctggccaacatggcaaaaccccatctctactacaaatacaaaaattagctggtagcacgt

SEQ ID NO: 10214 - DNA, 1071 bp, Homo sapiens
attatggagcttacattctggtatggagagttagacaattagtgaaatataatccttaaggaggttatagattctatagagaaaaatgaagtaggggccaggcacagtggctcatgcctgtaatcccagtgttttgggagactgaagcaggcagatcacttgaggccaggagttcaagatcagcctggccaacatagtgaaacccgtctctactaaaaatacgaaaatcagccgagtgtggtggtgctcacctgtaatcccagctacttagaaggctgaagcacaagaatcacttgaacctgggtggtggaggttgcagtgaggcggaggttgcagtgagccgagaccatgccactgcactccagtctgggagacagagtgagactgtttcaaaaagaaaaaaaaagaaaagaaaaacagaaaaataaagtagggtaagaaggataaagaatactggtgaagggaattatgatatattgatgtcttataaaaggagggaaagcctgtctgataaggtgatatttgagcaaagaactgaaggaattgagaaagtgagccatttatacatccagggaagagcatgccaagcttcaagtgcagtgacaaattcaaaggaacttgtcatgtttaaggaatagtaaggaaattagtaaggttacactagagtgaaggaaggggcatatgataagaaaagagctcacagagatagttatggagaacagaggccttaagaccatgtgggcagtagtgaggatttggcattttattcccagtgagagaggaagccattttcatgagagatttgacaggatctcacttaaaatttaaaagtaatcaggccaggcacgatggctcatgcccggtaatcccagcaccttgggaggccaaggtgggaggactgcttgaaccctggagttcaagactagcctgggcaacatagggagagtgtgtgtctgcaaaaaaaaaaaaattctaggcatggtggtgtgttgactgtagttccagctactccagaggctgaggtgggaggattggttgagcctgggtggatgaggctgcagtgacccatga

SEQ ID NO: 10215 - DNA, 1056 bp, Homo sapiens
tgtatataaggtatatatttatcagtactataggtaccatgtagttctacttttccatatacagagttgtttcctagctttctgctaatctaactggattcctcttccccatttcctcatttactagattataatgcacatcacataataaaagcttaaaaatgggctttcacagttactgttttctttttaaataattgtgagagagcttttacatcatttattatctaatcatgattcaagtgactaggctgtagcacccaagaaccttgccttaaaacagtttattttacccaataatactactttgccttcttacttaaaaatgtcctgtgcttaacccttttgctctttattttgatttaagcacttgaccctaaagtcctgcttctgtcttacagaagattgttgtcatttaaaaaataaaacaatcagtactagaactagcataaatagtaatatctaacatgatcatttgtattatatagcatatttaagtaaaatgtgtttcattccattcagtatttcataaaaagacagcctctgaaaaatagttttactccttagatttctcatccactaccctcctcccccccccccccccacacacacacttttttttttttttttgagacagggtcttgctctgtcacccaggctggagtatagtggtatgaacacggctcactgcagccttgaactgctgggctcaagcaatcctcctgcctcatcagccttctaagtagctaggactacaggcccccactatcatacccagctaattatttatttttcctagagatgggtcttgctatattgcccaggcctcaagtgatccaccagccttggcctcccaaagtgttggaattacaggtgtgagccatggtgcctggcccaaattctttttttctaatgcataagtattactttgtttttgaaagtggtatggtgtttaaattgctgaagaaatgataatgataaggtgattactttagccttcacctggcttttcatctgggaattagtacattcttttagtgaagcaataagtgtgtg

SEQ ID NO: 10216 - DNA, 1058 bp, Homo sapiens
acttaaggagaaaactcattggtcccctttggaagatgccagagactgactcgagcatttatcctcctttcctctccctccctccgtcactccctccctccttgttctaagtacctcaggataaccaaataattgagaaagtttctttctaaagaagtatttaatttgctataaaggacattggaataactggcagtaaaggacattattgggataattgacaagaataaaacctatagattcaatgatggtatgatgttgatgttaattcccagatttaataattgtactgtggttatataagagaatgtccttgtttttaggaaattcacactgctgaagtatttagggctaaaggtctgcagattggcggtttactctcaaacagttttttaaaagtgtttcagaaaatttatatacacagagagaatgagaagataacacaagcaaatgtaaaatcttaacagttggagtgttatgtaagagaatgttcttgtttttagggagtggagaattctagaataataatttcttgtaggcaagaagggagtgggatctaatacatagatgtaagttttgagaataaggacaactctttcatagtaataggactagaggtaggatataagggcacacttgcaagtaaatggaagcttgtggaaattctcttccattgcccattttctgtgttgtaggaagcagggtttgtcagctgatagtttaaatctagctaattagaacatttgtatatttatggaatacttatctgccagcttaagcattaggaataccaatataaatgacataatcttgcacttgagatctcacaatttgagacatagtgctaattgtaatgcatcacaaaataccctgtaaaggtaatattaaagtattaatattttgtatctagaggctttaccatacatgtctttgactcacttacttcacttacagaaatccacaaaatcggctgggcacggtggctcacgcctctaatcccagcactttggtaggctgagatgggtggatcacctgaggtcaggagtttgagaccagcc

SEQ ID NO: 10217 - DNA, 1875 bp, Homo sapiens
gatggggtttcaccatgttggccaggctggtctcgaactcctgacctcaagtgatctgcccgcctcagcttcccaaaatgctgtgattacaagcgtaagccactgcgcccagcccccccgactatttctaaccagtctcacttatacttgcacttttccaccaccatttattctccacactgtagccagtgtaatatcacactctaatcagatcttacctcactttaccactggcagggggaacactctttaagcctgtcaaaaccccaaaaaacttccatattcctaagtcaattatcaaatctcagtgcctgattgcatgtgacacagttgatctctctcctttgaacactttcttcacttatttctaaggcatcacttcttcttggttctcctccctcactggctgctcccgctctgccttgtttgctgggtctccctcatttcccctacttcttcttctatatgctgaagactcccgatggttaacttggcccagacctaactctacaactgtaactctacaactgcctacccagcatcttcacttgaatatctaatagatgtctcaaatttaacatgtccaaaattgagctccagattttattcccaaatccatttccccttcagtcttctcaatttcgattaaagggtacagctgaactctggaggggggtggtgttttttgtttgtttgtttgtttgtttgttttttgagacagggtctccctctgttgcccagactggagtgcagtggcatgatctcggctcactgcaaactcctgggctcaagtgatctcctgcctcagcctcctgagtagctgggactctagttgagttgttcagaccaaaactcttggaatcctccctgatgccagttttcaattaaacaggaaattctggcagctctatctttaaaatatacagaaatgtgcttctcaccaccctggtctcaaccatcattatttctggcctagattattgcagtaacctcctaacttgcctttctgctgcttcccttgctcctcacaacccattccccatacagcatcctgttaactttttaagacgttaaatcagtcatcaactcaatcatgtgacttctctgctcagaaccttccaataacttcccgtcattgaataggagaactagagctgggcctgaggataggcaggccagaaagtaggaagatagttttgacctcagacttgaaatttgcatcttttaacaaatgtgcaaagccacagtcctgagctaggtgcagaagacaggagcttccctcggggaactcacagttccctggggagccagccttatatctaagttcctccaactcctgccaactgcctgtcatgctgaaagagctaggaccctcatgctgtggaccctgcctttagggagctcgcagttcttggaaacgcactggactccaaaccactcatttcctcaaatgacatttgcctatattagcactgaagtaaagcaaagggaatgagtataggaaaagaaagacagagccatgtggggtggcttaagttgaattcaacaaagataaaggaaaggcttttcatgctgtggatttgaaaagaagaaaccttagaatcaacagaagttggacagcagaaggtacaagcactgtgtgctagagacatggtcagaaatgggaagagatgggcctggactgaaacaagataggaattagaagcaaaggacaagaagcagcctgtcttctgagccttggcctccctgccctgtccacatggcacttctttaccatgaggtgagccttgtcttgctctgtgccttcctgtgttaagcccacgctctgcccacatcatgaatgggcccctggattaaccacaggcatcgggccag

SEQ ID NO: 10218 - DNA, 1045 bp, Homo sapiens
tttaaggctaggctataattcactctctaaccatcttaacagagatccagctcttcctgaccctgccctgctcaagggacagggtggtaaagtgggctgtgaggtcagacagatctggaatcctatcctggctttaccacttactagttacatgtgacctgaggctaattactttagttttctgagctttagctttctaatttgtaggatgaaaataatatagtacctcaagggctgttacaaagagtaaatgagaatagaaataactcacttttatatggactttatatacattagctcactgggttttcacagcagccttaagagagaggttttattactaataatacttgtgaaatgcgtagaacagcagtttccaaactttctggtctttgtgctttatttgtaataaccaaaaactataaacaactcaggtgtccatcaacaaagaggtgaacaaataacaaaattgtcgtatatccatacaatgaaatattaatactactcaaaaacaagaagaaatgcattactgatagacaacaaaatgaatataaaaataattatgctgaggaagagaagctagacgaaaaagagtacattgggccagccatggtgactcaggcctttaatctcagtgctttaggaggctgagatgggaggatcgcttgaggccaggagttcaagatgatcctggacaacatagtgagaccccatctccacaaaaaaattaaaaatttgcctgcctgtagtcctagctactcaggaggttgaggcaggaggctcacttgagcccaggtacttaagggtgcagtgagctatgatcacaccactgcacttcagcctgagtgacagagtgagaacctgtctcttaaaataataaaaagtaccttgtatatgattccatttatataaaatcctagaaaatgcatcctaacctatagtgacagaaagcaaatcagtggttgcctagggacaaggcagggtggataaggaggaaaggaggaaggaattgcaaaagacaagaagaaacttttggagatggtag

SEQ ID NO: 10219 - DNA, 1035 bp, Homo sapiens
gcaacttgcaggtcaatagtattatcccatttaacaggtaagagaaccaggcctggaagaagctaagtgcatggccagagtcactcaggtgataatagcagagctagcattcagaggtgaatcttttaattcccagctagaattagaatctctgaccaatatttgtttcactttagcaccgtgccgctcattggtcaggaagtaggctctattcacttccccaggggtgtttggggaatgaaatcaagcctcttggttttctctagatctccatcttgcttacctggagcactggcacctggtttggaactttccaacactttgtcacttaaaactgtaatttatgtaatatataaatgtattggaggtgttcagtggattccacttcagcttctttatctggtgtgaaagttaggcattttcttattttgttgccttgcctctgcatggtgtagcattgaggtcaggcaagccagggtttaaatcctagccctactacttactgactcttaagtgacctcaagcaaaccattttacttctctgagtccaaccttatcatctgtaaaataaggataataatgtccatgttataggcttttgtgcagatgaaatgtatatgaaacacgtggtgccatgcctggcccaaggtaggcactcagtaaatgttctttttctcttcctcttcccttctctccattctctcattctaaggcataagcggaatcattacccattccagtaaaactcttaaatgcatgttgaggaacttcttttccatacttcctcctctgtcttagggaaactttgggagtggtggggaggaaatgttgtgtcaggggagcctgttttcaagtcttggcaagttacttcacctctctgagcttccatcccctcattttaactgtgaagataaaaatatatgccagaagatggctaagaagatgaaatagtgttgggaaagtgctttgcaaattacaagatattcttcaaatctaagttttatactacagaaagttcctatacatttagtttac

SEQ ID NO: 10220 - DNA, 1106 bp, Homo sapiens
caatatttggtcatctgactcttaggttcaggactctttgtagttctgtcctgtcttttgcctctcaacacagtattttccatcttcccacaaagtacagaacatgagagaagtcacttctttttggagaatatttatgaactgagccttaaaaagacagggtaatagcagaaaggtcactgaaaacatgtcatcaattgattgattgattgattgacacggtctcactctgtaccccagtctggagtgtagtggtgcaatctcagctcactgcagcctctgcctcccagactcaagagatcctcccacctcctgagtagctgggactacaggcatgtgccaccatgcttggctaattttttttttatacatgggatctcactgtattgcccaggctggtcttgaatttctgcgctcaagttgtcctcctaccttggtctcccaacgtgctgggattacaggcttgagccactacacccagcctgaaaacatttcagacacagggggatagcttgagcaaagaccccataggaagaagagggccaggaatagtcctgcttgtgcctgtataatctgaggcttcttgtgtaccctaaagtacagtcactgcactttattctatttcagggagccccttgacagagcggaaagtatcgatacccagttgttgtgtatcctttgcaacagccgatgagtcatctcctgtatacacccaagtggttgaaaacacagattcccccatctggaattttcaacagcagtcaaggtttgtgttatccgttattcgtcagccttccagaatctgctttttgttccaagacacaaagtcagagcaaggactataaccaacacaatttttgagcagacctggaaaatgcttttcttatccaagcaattatttaatcctagtgtttatgaattcacaggaagcagtggtttaaaggttttgttttagtgtttttaactcttctcagtatgctcaaaaattgttcagtgagaggacctctctgttttaggcacttggaattaaagattattaagatactccatgcaattgaggagttcatggtcttacctgggaaaaaatatcaataacaaattaccat

SEQ ID NO: 10221 - DNA, 1025 bp, Homo sapiens
tgtgagatctgatgctgaagagctaagatactcagtgtagttaatattgttcctcactaaattctccacgtagactctttcagttactgcccaagaacatcttagtgttagtgaaggtgatgtcaagacaggttggttttgggttttgtttttatgtttgttttggtttttggtgtgtttcgtttgtttgtttgtttaatttcaactttttattttagatacaggggtacatgtgcagatttgttatatgggtatgtcgcatgatgctaaggtttagggtacagatcccatcactgagacagtaaagcagttttataatcataccacttccttacattaaaacttgatgatttcccattgttgatagcagtgatctcataattttaattatgcattcctattaataaaaaaggtagcataccctttaaatatgtacatatttactcatgtataaatcatcttcatgtactgctatactcatatacaaaatatattctaagatataccatggaatagaaaaactttaatatatgagataaccaatatagtttatcctatgaacctcctaagttgtatacagccttctttagggatcattggtccatataataaggtccaacttccttagcttggcattcaagccccttcaaaataaatctgagtcttaaaagaagaatagtagttatcaagatacccaaaaggggtgaaaattattttggtgaaagagaagaacatgtgcaaaggcagggaggcatgaaacttgtgtttttggagtacctcctcagtctcagatccagccaacatcagaattcttcaatatggcattaaattaactagcatttaattggcagagaaggactcagaatttagatactcagtagatctcagagagggcagataacaagtcggaaactcagtagttgctctgtctgaggactcatgaggaaagtcagattggatgacaggcagtttgttctaaatctcccatttggtctgtgtcatatattcaaggagggagaacaaga

SEQ ID NO: 10222 - DNA, 1050 bp, Homo sapiens
cgcctgcctcggcctcccaaagtgctgggattacaggcataagccatcacgcccagccaatattttcaaggctgtgcaaccatcaccacaatctaattttagaacattttcatcccccctaaaagaaaccccatacttactagcattcgcttcgcatttccctcttcccccagccctaagcaactgctaatctttctttccctatcaatttgtccattctggatgtctcatataaatggaatcatgcaacttgtgatttttgtgactactgtctttgacttaccataatatttttaagtttcatgttatagtatatatcagtacttcattcctttctatggctgagtaatactccattgcatagatataccacatttcatttatccttttctcagttgctggacattcgtgttatttccacttcctggcaattttgcataatgctgctatgtgaacatttgtgtacgtggttttgtatggactgtgtgctttcatttcccttgggtatatatctaatggtagaattgctgggtcatatggtaactttatgttttaactttttcaagaactgccagactgttttcaacagtggctgcaccattttcccactagcagtatatgaaggttctaatttgtctacatcctcgtcaacacttgttactttccattcttttttattctggtcatcctggtggatgtgaagtgacatcacattgattttgatttgcattttcctgatggccaatcatgtcaagcatcttttcatgtgcttattggccatttatagatcttctttggagaaatgtctattcagatcctttgttcactttcaaatcaggctttttgttattgagttataagagttctttgtatatcctagatacaagccccttatcagatctatgatttgcaaatattttctcccattctgtgggttgtcctttcactctctagatggtattgtttacagcacaaaagtttttaatttttatgtactctagtttatctgtttttttttcttttgttgcttaggcttttggtgttgtcttt

SEQ ID NO: 10223 - DNA, 1925 bp, Homo sapiens
tggcaagatttcatgatgaaaacaacaaaagcaattgcaacaaaagcaaaaattgacaactgggacaattaatctaaagagcttttgcacagcaaaagaaactatcaacagaggcaacctacagaataagagaaaatatttccaagctatacatctgacaaaggtctaatatccagaatctataaggaacttaaagaaatgtacaagcaaaaaataaccccattaaaaagtgggcaaaggacatgaacagacacttttcaaaagaagacatacatgcgccaacaaacgtgaaaaaatgcccaatatcactaatcattagggaagtaaaaatcaaaaccacagtgagaatggcttacaccagtcagaatggctattattaaaaagtcaaaaaataacatatgctgacaagattgcagagaaaagcgaatgcttatacactgctggtgggagcataaatcagttcaaccgttctggaaagcagtgtggcgattcgtcaaagatctaaaaacagaactacgatttgacccagcagtcccactactgagtattgtaagaatttgccagtaaagtgatctggacctgaagatttctttttcagaaggttttacctaaaaattaaatttaaaaaataattatagctttaaataattatacttttagggtacatacccaaaggactataaattgttctatcacaaagacatatgcacatgttatgttcattgcagcactattcacaatagcaaaaacatagaatcaagctgagtgcccatcaatggtagaccgttaagaaaatgtggtacgtatacactatggaaaactatgcagccataaaaaagaatgagatcatgtcctttgcaggacatggatggaactggaggccattatccctagcaaactaacgcaggaacagaaaaccaagcaccacacgttctcacttacaagtgggagctaaataatgagaacagaagaacagaaatagaggaacaatagacactgggacctacttgaaggaggagagtgggaagagggagaggttcagaacaaaaaacctgtcgggtactgtgcttagtacctgggtaatgaaataatctgtacaccagacccccacgtcatgagtttacctatataacaaatctgcacatgtaccccgaacctaaaattaaaatttttttaaaaaagaaaaactgtacatattgtgtgccaaaaaagcttattggcactagagaagctttggggagctggcaagctctttttgatgagtgaccctctcattggtaggtgaaactgctctgagggttacagcaggccatttctgcatccaggcttgcagagaattgcattgttggagcaatctatataccctgagccctttttttcccctggcccctcaactgatttagttggatatgataagaaggacccaatttgtataatgaactttcacattctcttccacaaagaaatatgcttttttcttttgtttgttttgaaattaatgtctcttgttctctttcatgaacacaaatatttcactttccttttgattctactgtaagaaagacagcagcctatagcacccatagatattaaggaaatactgtgaacaactctacacatattaatttgacaacttagatgaaatgagccaattctttaaaaactgtaaactaccaaaactcactcaagatcaaatagataacctgaataaaatgataattatttttaaatttaatttttagcttaaaaccttctgaaaaagaaatctccaggcccagatcactttactggcaaattcttccaaacataaaggagaaaacagttattttaaggcctgcatcaccttaataccaaaaccagagggcaatataagaaaagtatagaacaatatccttaatgaacctagacttaaaatttttcaacgc

SEQ ID NO: 10224 - DNA, 1048 bp, Homo sapiens
ctgtagtcgttatttatttttttctaattttatatgttttaaaaagcttagaaatttgttttgttttttttttgtttttttttttttttttttttttgagacagggtcttgctctgtagcccagcccaggctggagtgcggtggtgtgatctaagctcactgcaacctctgcttcccaggttcaagtgattctcctgcctcagcctcccaagtagctaggattacaggcatgtaccaccacatccagctaatttttttttgtatttttttttttaagtagagacagggtttcaccttgttggccaggctggtttcaaactcctggcttgaagtgatccacctgcctcgcctctcaaagtgctaggattacaggcgtgagccaccgcacccatccacagaaacatttttcttgatatcaatttttttttttttttacaaaaggaaagtgtccattaagtacaacatagtggatgaaagcagactttcagcaagttatatcattgtgacattttagagcactgaaaacaaaaacaagattctataaacttccagagaacaggagaaacagtcacacacaaagaattaagtagagtggcttcaaacttctcaatagccacattagcgtccagaagacaattcaataatgcctccagaatgttgaatgaaaatggcctagaattctgtctctctaggcaaactatctagtgtaagagtagaatgaagtttttgtatatacaaagtctcaaaaatttgtacctctcccacactcttcctgacaaagcagctgagggactttctctgccaaaatgagggagtaaacttaaaaagaagacaaggtgggatattgcaaacaagagatacaacacaggagggagccgaagagaatcccttgatttgaggtgaagcagctgtacacaaggcatagatggcagctattccaaattggagtatatgctaaggctctgggagagatttctcaaaaaaaaaaaaaagttacaaaacacctattgtgtctgaaaatcttaagaggagaattcgataactggca

SEQ ID NO: 10225 - DNA, 1050 bp, Homo sapiens
gctgtgttgattgtttcctttgttgtgcagagctttttagtttgatgtactcccatttgtctatttttgctttgttgcttgtgcttttgaggtcttacccaaaaaatccttgcctggaccaatgtcatgaagcatttcccctatgttttcttctagtcgttttatagtcctagatcttacatttaagtctagtccacttttagcttatttttatgtatgatgagaggagtctactcttattctcctgcatgtgggtattcagttttccagcactatttattgaagatatcaacttatgttttcttcatatactgttacatgccactaacttgggatatacagagataagagatggccctttcatttaattttccagaaccctgtgtaatacatactgtgtgatagatatgcatgagatactaggaaagaacatagaatggtccctcttctgtggggggctcattgggagcactttctagaaaattctgaatattcaaaccccttagaaattccaggagggttatactttgtcaattgtattctaaaatgtatagagaaaattaaatactaaataagaaaatagtctaaaaaggataaggaaaaaacatctaacattaccaaatgtaagaatttattaatattataaaatcataagcatataattttgtcagtggaacagattccagaaatagatccatctaactgaaaaaaaacttaacatttattgtttttatcctattctcatttataatatattaaatgttaaaatagtgacactttatattgatgacttaagggtgaagtgagtctggtttagtcatgcttttctgttgatgatataaatttgcatcagcactgccagacagtttggcattatgtttcaaaagccacatgaattactgtatatcgtttacctcattattccacccctgggaatttaccttaagtaaatactatgaaaagagaaggaagctatatgcttcagtctagtattggaaatacatttttaatattgggaaaatgaaaacaatttattcaacaatattaaag

SEQ ID NO: 10226 - DNA, 1062 bp, Homo sapiens
agcctcgggcactacaatgtttatctttttctttttgaacaatattgtgaaaatgattgcattctcattgagcatgaaagtcaaaactggaattttctaaagctttggagaaaaggagagaattagtagggcaagatcaaagcatacattggaaataaacagtagaaataagcaaacaatataaagagacacgggaaatgcttctcgtgaagggcaaatgtaacaccataacagtagggaataaactgtgtcccacctgtttacttgtgtttatttgttgttatgatgagtatgcacctaccattttcctttattgtgatcactaaaatgaggccaaggtttaggaggtgagaaaaagtatcccttttacggattcagttcctgctaggatgttgtatcagaatcatgtgagaactcaggaagaggtagagcagaaataaaaaggaagaaaatgtagattagaaaataagacttctgagaaaaagttcaaggaataaagattgtttgactctggagaggagaaagctgttgagatagtttgctaagtttgctaataaagctttattgagtcttttattgaagggttcaaagtaagaaatactatgccatagtgttctccatctctagtgaagacagaaccagagggaataaggatcttttttttaaagacagcatggaaagtttaagatttaggaacttcttgagaaatcttcataatatcttctattcaaaatcttttttttatttttaagggaataaaaattttaaaaattaagagatatacagatgactttttaagggtccttctttccagcacattttttttaaaaactcaggttagaacaaaaatgtcataaagggcactaaaagtaacatttgggtttcactccatatctagaagaatttagctcacaaaacaatttttgtgtgttttgagtaactgatgcataagtgcaatgaataattttcctgcttcactgttatttttaatttaacctggcaaattaagtgagacttgaacaaaattttgttcatcttgaagaatgtatagtggcttaggtt

SEQ ID NO: 10227 - DNA, 1025 bp, Homo sapiens
aatcagaaaaaagaaatgtagcctggagttgaatctgattctcaggtgtttggtttggcctgcacattgttctaaaatggcaaattagttgctgactctcaaataggagatttcacgtataaggcagactttccttgaaaaaaaagtgaagctctggcaacagtgacttaggtttctgcatggcagcagttggtaagagctgactagttgctgcctctatgagcaggtgcactctctctctctctctctctgacacatacacacacacacacacacacacacacacacacacacaccctcctactctcttcccctcgcctccagctttcttcactcactcacatagcctgcccaacttctgtaaccatttgtgtttgcaagtcctcggtaaaatgtaggtttttccaaggtttgacatcagactgtggtgaacaatctgtgaatgacaaatgataagtgcagttgtgattagggctatccatgcctttgaggaatcgtttttatgcctgtctctctgaagagaataatcatttgatgaagaaaagactgagtcataccctagagtcagaactatattctttttccaacttttttgcatgtgtgtgcatgcatgggcacacacacacccctaaagaatttctgactcactgtaaattggtattgaagagtctcggagccaccccatagcagatagaggatggaaggttatttcttttgtgctctttttattctctaggtgttagggaaatggaacacttgggatatttgaagtctctctcccatcacaactgtccctgaaggagcctgccctccctcatcctcagtgagggaacccctcccctggatgctgggtgcccttcttcctgctttctcagggatggctctgcgggtctgcccatctctctcctgcattgtcagcctttcctcccttgctgtctccttcctctcagtctagatgtagtgaagcttttctcatcctgttaatagcatagtaatggaaaatgagcagcatgagttagccatgt

SEQ ID NO: 10228 - DNA, 1100 bp, Homo sapiens
ctaggagagctggtggaagtgtgtctgaactcggagtgctctgggagcgggctccacagcctccttgtgggctccagccccttgtcagccgcagcctctcttgagggggactccctgtctcctgaggcccagctgggccaggactccatcctttcagatgcccctgcaggcctggggctccttctgggaagtatggggcctagggcttggtccccctcttctgaggccctctcctgtatcccgacctggaagctttgatgggtcatgggccatgccataccccctgtggcaatggagtgtgtggatgctcacctgtgccatctgtcctcctgtctgtgccaggaggcacctgagttctctgctgttatcctgccccaagggcctgggccgagcctctacctgaagcaactctgctcttcctgtcagtctcaaagcacaaggaggttcagcccaggaggaagccagctgcaatgtggagacacgtcctcctccccaacccacctcatgccaccgccaaccccctgccccaggagcgggcctgagccacgtcctctaggagcagctggagatggccaaaagagtgagctcaggactactggatcccatgcccaggtgtccagcagacctcaaggcagaagggtcacctaacccaggagtccacagactgatgtgacctcaggttcccacatcagtggccacagggcagggcccacctggtagaagtgttctggatatggccagggtgggtgtgtggctaagtgggcctgaacagagggaacctagggcccttggccaatgtgattaaagctgccatcttgatgtgtgttgtctctgaattgccagcaggagggtggggacaagtgcgctgggtctaggtttcagttctgaccctataatctgaggaggaaccattctcaggaatgaatgggaaagtggcagaatggtgcctccccttccctgggtccgccatggtgccagtggctgggagccggtatcctcatatggtggatggggagacagtcttggagaggtaaagtgacctccaaaagccacacagcttagaacaggccaagccagaatcccatccagactctggcccc

SEQ ID NO: 10229 - DNA, 1032 bp, Homo sapiens
ggacataggtcctctatacagtgactcttctagcaaggacagggcctggcatatcttgtgtccccatcaccaggtgtggggctgcagacactataggtcttcagaaaagcttggccaagtggatcagaagtctgaacccggggaagctcccagtctggtgggtgaggcagccacggaagcagataattacagcgcactgaggcctgtgatcattctcaggagctctgccagatgatatgagcacaaaaaggaggaggcagtgggcttttgttggggggaatcagcccaagctttgcacagggtctgtttgttaagatggatgggatttggattgggatttggattgggatttggggagggctttcctggcagagggcccaacctgagtgaaggcatggaggtgggaaagctgggtaggtggtgtctttggagcacagtggtacaaggaggggtaggagaggacagagacaagattgctctgtacaagtctccactgtactcacgttcctcctcctcctccccctttcatttacttggtgtgccccactttcccactcccctctccctgggacttaggaagagccatcagaaaaagccaggctggcccctgcagctgaaccactgggctcctggaaggggcttgcacaagtcaaactgagggtgggggatgctgaaagtctctactacccccaaatagtagtcccggggccttcactggctctgcctgctccccagagaacctgtcagtgtcactgggggagaagggggtgggggcaggatctcttcttaggatggccttaatacagtcctggtggcttggagaaaactactcagccctccagggaggggagaggcctgtcactaggagtatgtgagtctagggaagccactgaccggtctggagaggctggagaaccaccagtaagagcagcacaggggatttctgaatggaaggggaggctggatggagtgcctccaggactttggtgctgatgttttgtgacttagcagtctgaaatccagggataattt

SEQ ID NO: 10230 - DNA, 1049 bp, Homo sapiens
aggagcatctctgggatgtcaggagtagaaactcacggatatgggaccctcccaatgtgccccgggcctcactgtggtgtacacccaggctgactgaagggaagggctttcttgtgattacttccaggagccaaagtgaccatgagcttgaaggaaacgaagacaagcttgggttacacatccatccccaggtgtgagctttggagtcaggcattcctatgccaccgagaagcaagtgtgtgccccatgtagggcagggaaggaagggctcaggaggaggtgacatcagctgaccagaaataaatctaacaatagctacttccgttaactgcccactgaatgtcaagcctttaaatcctgtgaagaatgtaaagaagatatggagtgtggccctgggtggcagcacagggtgtgggagacaggcagggattggagtcctagcctagcttgaccctaacctgcagcctgacataggatgcccctttgcagccatgcaaatgagactggactcaagagtaggattctgtcataaattttgtcttatcttatcctttaagagagacagaatggactcatgaaagaattgaagaatggcatgaaactgcctgctaaccacaaagatggccagtaaagtaaatgggccaggagctgagagatgggaaattttgggttgagtaacccaggagaggttcctggaagaggagaaccctgagctgggccttaaagaatagctagtattggggcagactgataggaggagagcaccatcaatggagaaacagtgctgcttcgctcagaaactttcagcatcttcccaggcacagcacatgcttccaaacatggcatgcaggctctgtgtcacctggccccagctcctatccagcctgggcaccttgcacagcctccaagaccccagcctgcaccctgagcagccaccctgatcagttcacctgctctctctgaacctgccatacagactcagactggtgcctgaattcccttcatccgcttttctgttgacatccttcaataaccctttccccagtcct

SEQ ID NO: 10231 - DNA, 1094 bp, Homo sapiens
atttgcccgcctcagcctcccaaattgctgggattacacatctatgaatgttttaaacactttgcctacgttctgttatttaagtctcaccatagccttttttttttttaagtagacaaggtttcactgtgtcacccagactggagtgcagcagtgtaatcatagttcactgtaacctcaaacccccgggctcaagtgatcctctcaagtagttcagactataggcatgcaccacaacacccggctaatttttttactttttggtagagacggctctcactatgttgcccagggtggtcttaaactcctggcctcaaaggatcctcctactttggcctcagagtagctgagatcatagacatgagcaacaacccccagcctcatcatagccttttgaagtagtaattatttctattttattttattttaatttattttattttatttttttgagacagagtctcgttctatcgcccaggctggagtgcagtggtgcaatctcggctcactgaaacctctgcctcctgggttcaagcaattctgcctcagcctcctgagcagctgggattacaggcatgcgccaccatgcctggctaatttttgtattttttgagtagatacagggtttcaccacgttaaccaggctggtgtcaaactcctgacctcagatgatctgcccgccttggcctcccaaagtgctgggatattacaggtgtaagccaccgcgcctggccttatcatttctttgtaacagatgaggaacatgaagcccagagaggttggataacttacctaggtcacacagctggtgtccaaggcttgtgctcttcctggggctaggccaggagtgagaacagctgggtcattgatttataatgattggtagctttatccagccattagactagggcatccttgaggaaaggatctatgtcatattcattaccaaatgagtctgggaagagttggtgcttagtaaatacttcttccacaagcagatcaagttcattcatgtccagaagcagggggaaaggcattcctggcatcaggaaaagcttgggcaaaggcatggtggcaagacagttcctttcaga

SEQ ID NO: 10232 - DNA, 1078 bp, Homo sapiens
tgtttgtttatgttctcttaaaatgcagtgtgcagaactagatgtttcatttgagatctgaccactatggagagagtgggactctttctaaactcaacacagcttaatgatttcattcttgttttatcttttaggttgtctgctttgactcccagtaagtttgcagtcaactaaaatttctgatttttttttttttttttacgtaagcttgcattaaactggaaatgtggaactttttcactatcttcattaagtcccatttttattattttagcccatcattccagcccatcaaaatttttttgcaaaatagtaatagtggttgtatataatatttgtattgtgctttactttgtaccaagcactttcatgaacagtatctcattgtgaggtagggtttttttatccatattttacagacaaggaaactgaggtttatagacgttaataacttgtccaagagtagtaagccataaaacagcaaagcagtgttttgaatttgaatattcctagcaccaatatctagcacctttctattttatcatgttcttttctccgatacctgaaaaaaaaaaaaagttaagcttcttgcccagggttcagagacatcgtaggtggaggtgaaattggactaaatcttggactctaatttctttacctcttatattgcatgaccagctacctcttcctgttactggtagatttcataagggcgccttcttgttctgcatctaaaacactagtaagcttcagtttccttaaagaagaaaagagttgaactttgacattcccaacactataaagaataaagccttcttctttgagatggctgtgtctccttaatgtgggtcctgactggctctgaagaatcctctgaaagttagtaccttatcatctctttcagaacttattatacagagaatatagctcatgcaaactactgaaggcgacaggggtattagattttggttcaggatatggaaaaatgaaagctgtcagtaagggtatggcctgtctcacaaaatggtgagttccccatcagtggatgcatctacatgataaaacgatgttattgaag

SEQ ID NO: 10233 - DNA, 1041 bp, Homo sapiens
cctttttgataaataaataagatatgctggcccacccccaaacacattctgaaattctccgcagggcccctttctccccacctgtcacccccccagttgaaaatcatagatctaatcttatcccttttatagatgaagagtttgaagccacaagaaattagagccacgtgccaagggtgatggaggagaggagagaagcaagcaggaacaggaaattaatatatattgagcatctgttatatgatatgcagttggctaagtactttacatgaactaatcaatttaaattatcttgtattctcttatgtccactttacaaatgaggaaagtgaagctcaaagaagttaaataactttcttaagatcctacctagtaggtactaggtagaagtaccaggttggaattcaggtctcctggccactagagcctacattctctgtactacctcttatagcttcttaaatgtgagaatggatgctgcagggagaggattatttttactgctcttgtttttgacactcacagattgtgtgtagaactgcatttgacaaatatcactttattgaacactgtgtttttttccctctttctccgccaccttactgttcagtgcttcaggcaccgtgtacacagcaatggatgtggccacaggacaggaggtgagtatccaccacccactgttgctcctttagttctgtttctttttatttgggattaatttttagcccttgttaggtcaacaggaacagttctaggtttttttttttttttttgggatggggtctcactctgtcatccaggctggagtgcagtggcgtgatctctgctcactgcagcctccgcctactaggttcaagcagttctccagcctcagcctcctgagtagctgggattataggaacctgccaccatgcctggctaatttttgtattttttagtagaggtgaggtttcaccatgttagccaggctgctctcgaactcctgaccttaggtgatcttcctgcctcggcctcccaaagggctaggattacaggcatgag

SEQ ID NO: 10234 - DNA, 1017 bp, Homo sapiens
aggcaggagaatggcgtgaacccgggaggcggagcttgcagtgagctgagatcgcgccactgcagtccggcctgggtgaaagagcgagactccgtctcaaaaaaaaaaaaaaaaaaaagaagaagaagagcccctctgttttcctcttacagcactttgttattttctgcgatggcatttataatgatttgtgattctgtatttatttgactcttggttatgtctagactttcaactccatggagtcaaaggtcatgtcttttggtcaccattgtacctcatcacttagtacaatgcttggaacacagtgaggcttgtaaatatttgcagaatgaataagctcttgctatcagtccaatggattatcaagccttgttagttttatctctgtagttttttttaccagtttatttttatttctctatcctttctgctctgatttagactgtaatcatctcttcccttgacttttagtaacctattaactagtgtcgtggcaaccagtctttgtgccctcttatttattcattattctgcctggagtaatttttctgatcctgtcactgttcttcccaaaagccatcagtgtgtctccattgtttataggataatatgtaaattagttattcagggaacttaataatttgacctcacctacctcttcagcatcatctcttctaaccctactctatctctctaaatagacagtttcagtttcattccatttcatatcatattaccctgttccctcagcctggaattctgttttcctctatgcttttaaaactctttattcctcaagatgcaacttggatgccagttcttccatgtaggcttccccagttttcatcctcccatttatgattttaagttcctagagggtagtactttgttttgttctttgctgtatcttcagtatcttgatcagtgcctggcatgtagtaggctcttaatacatatttgttgaaagactgaataaaataatttacttttgcactccctcgacatatattcatc

SEQ ID NO: 10235 - DNA, 1031 bp, Homo sapiens
cttcatttcctttaagctgaggaattgcatgttactgaaaaatggcattggactgagacccttgaaggcctatttgtcttctagtgggtcagctctttttagtattatcgaaggcaatgtttcaaaattcgcagttttcttttggattagtatgggtttctttaaagtgccacactattctaataaagcttaacatgaataatgtgactttgttccattaaaaataacagggctttgtttcacaaacttttgaatcaatttaaaatttagttatgatgccatcctgacaacccttttctgtttccttttttggtgtatgtaaacatacataaacatacatgtagttgtaatcataatgtagacctaagtttgttgtttgcccttttttcttgacttatacacattcccgcatgttactctttagtcttcattgtaaaatttaagatgatgttccataatttacccgaaactattgtgtcagtcaatgttctactggagaaacagaaccagtagaataattctttcttagagaaacttcagttttgctcttaaagcctttcaactgattagatgaagtccatccagattatggaggataatattctttacttaacgtcagctgattgtagatgttaaccacatctgcaaaataccttcccagcaacatctacattaatgtttaattgaataactggggactatagcctagccaagttgacacataaaactatcaggtgtaggtttttaggtttttcttttcctattataaattatactgtaattttacccaatagcactgcatatagctttctcctttcaaagattacttctttagaataaatttctataggtgggattactggatcaaagggtagaagacctaatgggctcttgacaggatttgacatttgcaaactgaaaaaaccactacagcctttcttttgatgatttcttcaggaattggcctattcaactgactcatttaccttttccacaagcctagttttctgcctgtgttttctatctctgga

SEQ ID NO: 10236 - DNA, 1050 bp, Homo sapiens
gtagctgggaccacaggtgcgtgccaccatgcccggctaattttttgtatttttagtagagacagggtttcaccgtgttagccaggatggtctcaatctcctgaccttgtgatctgcccgcttctgcctcccaaagtgctgggattacaggcgtgagccacctcgcccggccttgaagacatttttaaaaattattactgtgtaaccacagcaagtcacttaaccgtcctgagactcagttttccttagctgtcatataaatgtgttgaatttgatgccaacttctttgcttgaatatttcgacagtgattcttaaccttctcacctactccctgccctcaccctttctctgtgatacactgggatgtagtccatcagtaacagtatttcactatggaaatagttcccaatgggctacaggaacaaaatgtaaattgccagttttggggatgggtaaagagggacttggtatagttggaggggctcttggttctccaattacctgttagagaattactattaatattttatttatttatttttttgagacagggtcttgctctgtcatccaggttggagtacagtagctccatcatagctcactgcagtgctgccctcccgggctcaagcaatcgtctcactttagtctccgagtagctgggaccacaggggcatgctactaagcccagctaatttttgtattttttgtagagacagggttttgccgtgttgcccaggctggactcaagtgaactgcccgcctcagcctcccaacgtgctggaattacaggcatgagccactttgcccggccaagaattactattttataacattccctcccacttattttctcatatggaattatctcaccagtccagagtctgagatttttttggtatccaggatagattttgcttaatttaataaattacatatgtaatttgtaaagtaacttaaaaaaaaataaagaaccaggtgagcaaaatgagaaagcccattgtgatagacttgaaaagtccaagtttcctggactttctagagattatata

SEQ ID NO: 10237 - DNA, 1045 bp, Homo sapiens
gctatatagggcctgtttgactccacacaaaggtttctcttccttgtcaagctcttaaaatgctttgtttctttcactttcttattagccctaagataccatgcccagttttctcctttcctagcttccttctgggagagtggcttcaattattcatccgtttactataaaattatgagtccttctccaccatgtgccagaccctgtgctgggcaggatgttcagctatatacaagagtgcagcccaagtctttaaggagctagagataatatgacatgataagtgctgaaatgaagagatgaaatagagggatgaaaaaaggtggtatatgatcataaagggggggagaaagctgcctttctatttgtttccctcagtttaggaataatttgtcaaacaagcatcattttgacaggcagacttttaaaaaattttaagaggtcatgggctttgttggggaaaactaaaacaaaaatcaaggtggaatcagcagttgccaatttgagacattaattctgttgttgctggttttaatgaattttctgatccctctccatgttatttttctaaataataaccagaaagtgggagaaaaatatttctttttggcatagtaaagagacaagtttaaggttatcaaaagaatacatctcactacagtttattgtttatttttgaaaagcgataaacaatatgcatctaaaaacgaggcttttgactgtttatgataaagaaatgataaatgtttggagtgatgaatatgctaattatcctgatttgattattacgaattatatacatctcaaaatatcataaatatgtacaattattacatatcaactaaaaataaaaggaaaaatgcattgattcaaaattaatagtcagtatattcaaacttgaaaataaaaaatttaaaaacattctcccacaccagtgtttgctccttctgggtcattttctatgcccattattaaaaaaaaaaaaaaagtctcttcacagatgttttaatttctaaggggtaatgttgtaatttgtagtgggtga

SEQ ID NO: 10238 - DNA, 1067 bp, Homo sapiens
tccctgtctgctcgttatgaaaaaaagctttcagtaacacaactcccacctaccttcccacacagaagtcatagtcagctcttctttgcccaccttctcaaacatgtgcaagcaaaaacatttcagtaaaacaaaaaggataagttaaactaacagaaagaaacaatgctggaggaaggggagatcactcagaggaataagccaaataaataaaataaacaaatttaaaagaatcaccctccttagtattctcataaagatgatgcatccacaaaataagaacaggttgctatgaaaagggaagacctcacagtgcaagatagaggctttcccaaagttgataacaatcctaacagtttagagaacattacgaataatatcatatgtgaagcacaaagaaacttccaaattatcaattgcaaagaacaaactttggtcaaccgtagagacaaaactgaatatctttccatttgttgaactgaaaatgatattacaaaatcattgtcctaagaagagcctatcaaagagtaaacagctggccaggtgcggtgtacacacctgtacacacctgtaatctcagcactttgggagactgaggtgggggaatcatgagatcaagagattgagaccatcctggacaacatggtgaaaccccgtctctactaaaagtacaacaattagctgggcatgattgcacatgcattatattgagagtgtgttgcaagttgtttaaatagcaccctttcacaggcagtcacacgtatcaccacagaagtatgaccatgaaaacaaaatttagagaggtaatatttacattggctttagcaatgggggtatggctaagtcataagtgaatcacaaagtacacgtcttaatatccagttattagcagattataggacaaaaatgctactggtgaaaatatgtctccctacatgttctataatgcttaacaacctaaaccaaaaagggaaaggtaagctaacagttatttaaaattaaagaggaagaataacagcaattgaaaatcatgacaaactcaagacaacaccaatgatttgatgatc

SEQ ID NO: 10239 - DNA, 1051 bp, Homo sapiens
aaataataaagatcagagcagaaataaatgcatttgaaatgaagaaaacaatacaaaagatcaacaaaatgaaaagctgctttttttttttttttgagactgagtcttgcactgttgcccaggctggagtgtagtggtgcgatctcggcttattgcaacctctgcctcttgggttcaagcaattctcctacctcagcctcccgagtagctaagattacaggcacctgccaccacgcctggctaatttttctttttctttttttttgtacttttagtagacacagggtttcaccatattggtcaggctggttttgaactcctgacctcataatccacccaccttggcctcccaaagtgctgggattacaggcgtgagccactgcgcctggccgaaaagttgcatttttgaaatgataaacaaaagtgacaaacctttagccagactaagaaaaaaagaagttccaaatgaataaaatcagagatgaaaaggaagacattacaactgataccacagaaattcaaacttcgttatagactactatgaacaactgtatgccaataaattggaaaaacctagaagaaatggataaattcctagacacctacaacttaccaagatcgaaccatgaagaaatacaaatcctgactagaccagtaacaaataatgggattaaaggtgtaataaaagtctcccagcaaagtaatgctcagagcccaatggcttcgctgctgaattctaccaaacatttaaagaaaaactaataacagtccaacttaagttattccaaaaaatagaggaggcaggaatacttttccaaactcattctataagacaagtattaccctgataccaaaaccacacaaagacacatcaaaaaaagaaaactaagggccagtatctctggtgaacattgatgcaaaaatcttaacaaaatattggcaaactgaatttaacaacacattaataagatcatttatcatgaccaagtggaattcatcccagggatacaaagatggttcaacttaatcaatgtaatacatcatatcaaca

SEQ ID NO: 10240 - DNA, 1051 bp, Homo sapiens
gtgagttagtgggcgtagaccggtgcgcagggcctcctggagccttgcttttcttcacctgccaaaaaacatttctaaaaatggtggtaatatatgccagataaaattcgccactttaatcaatttaagtgtatatttcagtggcatcgattaccctcacagtgttgttcaacagtcacctcttttttccagaacttgagcggtgattcttcaaagtgtagcctagttttagcatgtgactgtctataacctttggcatgaactctttacgtataatatgaaacagttgtgtcttactgttacatgcactcttcgtgaagaggaaacaacaggtaactggagaggtctgtttccaagaactgggggtcctggcgcacctcttccatctgctttgaaagcaggaatacggctgcgtgaggtggagcgcgtccggagtcccagcacggagaggcttaggtgggaagaccgcttgaccccaggagttccaggctgcagtgagctgagatcgcgccactgcacccctgcctgggccacagagcgagacgctgtttttagaaacaaaaacaacaacaaaaaccgggcgcggctgggcgcggtggctcacgcctataatcccagcactttgggaggccgaggcgggcggatcaccggaggtcgggagttcgagactagcctgaccaacatgagaaacccccgtctctactaaaaatacaaaattagccgggcatggtggcgcatgcctgtcatcccagctactcgggaggatgatgcaggagaatcgcttgaacccgggaggcagaggttgtggtgagcctagatcgcgccattgtactccagcctgggcaacaagagcgaaactccgtctcaaaaacaacaacaacaacaacaacaacaacaacaaaccagtcaaacaaacaaaaaacaaaacatgaaagccacttagtacagttcccaatacgtagaaaatattcactaagtggtagcttacagtggaaacagcaggtttcagcagccagagtgcacggctcttgccaccgcattccagtcccaa

SEQ ID NO: 10241 - DNA, 1081 bp, Homo sapiens
catggtggctcacgcctgtaatcccagcactttgggaggctgaggcgggcacatcacctgaggctgggagttcaagaccagcctgaccaacatggagaaaccctgtctctactaaaaatacaaaattaaccaggcgtggtgctgcatgcctgtaatcccagctactcgggaggctgaggcaggagaatcgcttgaacctgggaggcagaggttgcagtgagcctagatcgtgccattgcactccagtctgggcaacaagagtgaaactccatctcaaacaaaaaaaaaataattagccaggtgtggtggcagacacctttaatcccagctactcaggaggctgaggcaggataatcatttgaacctgcgagacagagggtgcagtgagccaagattgcaccactgtgctccagcctgggcgacagagcaagactccatctcaagaaaaacccaaaaaacaacaacaaaaacaaccagtttggaaggttgtaacacaaacatcagagacaaggattaccgtggaaggaagagtagacagggaaggaaaggaaacaggcatggaggcatggaggatggcagtcaaaaggcactttagtctttgaattttttacatagagaacatatcacgtattgtgtaattaaaaatgaattattttttaaagaatcatcaggcatggaactatcaaaagatggcttcaaaaaacaagttactatttattgacatttgaaggggagatgacaatcatgcatgttgaagaagaggtataaccgggagatccagctagtccactgccaagagtcagaggacagcatggatttggtgaaattaccacagccagaggctaagtctcaaatctggcaattttaggcactaaagtttctcaatattcctaaagggaataaaattctctgtgacagaagaatactagttaaatatcacataacacccatgtagaagctggaaggtctatttattcatttagagtggaagctagctttctagtaactggaatatttgtcttccctctccagagaacccattttaatgagcacgtaagcaaagcaaaaggagtgttatcat

SEQ ID NO: 10242 - DNA, 1034 bp, Homo sapiens
aaggtggccttgaactcctggcctcaagcagttctatctcagcctcccaagtagctgggactacaggcatgtgccactgtgctttttttttttttttttttttttttttgagactcgctctgtcgcccaggctagagtgcagtagtgcgatctcggctcactgcaacctccacctcctgagttcaggtgaatctcctgcctcagcctcctgagtagctgggattacaggcacccatcatcacacccagctaatttttgtatttttagtagagttggccaggctggtctcaaactcctgacttgaggtgatccacgcacctcggcctcccaaagtgctgggattacaggcatgagccaccgcacccagcctacctggctactttttaatgttctttcaagtaatggatgaaataattccttaacacagagatcctcaacctttttagcaccagggaccggtttcctggaagacagtttttccatggactgggggcatggttttgggatggaactgttccaccttggatcatcaggcattagttagattctcataaggagtgtgtaacctagattgctcacatgctgagttcacagtaaggttcacgttcctatgagaatctaatgccaccgctgatctgacaggagacggagctttgtaagcttgattgccactcacctcctgctgtgcggcctggttactaacaggccacggactatactggtctgcagcctggggtttggggacctttgccttagcctactgttacaatagtagttggagcacgctaacaaataaatcatgttaatatatgttagtctccagacatactgggggaattttttcatataaaaactacctgtaggcctgcccaactagtgaccttgtttgttaacttcttaacttctttacattagtgacctttttaactttaaaatttaaaaacggattttttgagatggagtctcgctctgtcgcccaagctggagtgcagtggtgcgatctcagctcactgcaagctccgcctcctaggttc

SEQ ID NO: 10243 - DNA, 1035 bp, Homo sapiens
cttagcttcatgtttgcaagacgggaccattttaaagggaacaaccattattttgtgttgtatggcagaattcaggcctagtattgcaaggtctttggagtttttctaagagcagctagaactatggattttacttaatttcgactttttaaaaaaactactgtgaggccaaataaaataagtcagagactgcatttagccatttagtcacatttgtgaactctttttttttttttttttaagatggagtttcactcttgttgcccaggctggagtgcagtggcacgatctcggctcactgcaacctccgcctcccaggttcaagcgattctcctgcctcagcctcctgagtagctgggactacaggcgctcaccaacatgcctgactaatttttctacctttagtggagacagggtttcaccatcttggccaggctagtcttgaatcgctgaccttgtgatccacccacctcagcctcccaaagtgctgggattacaggcgtgagccactgtgcccggccgaactctgctttttaaaatacaaagctggctgccttgttgggtagacttggcaaaaggctgcacctgttcagtctgcaggtataaatagagtgactgtctacaagctggtcaccaagcagcacttaaattacctggcaactgcgactacaggtgcacgccaccatgcctggctaatttttatatttttagtagaggtgaggtttcaccatcttggccaggatggtctcaatctcttgacctcgtgatccgcctgtctcggcctcccaaagtgttgggattacaggcgtgagctaccgtgcccagcctttactttcaattctaactctgataatggaatttcctttgaagggatacatacttaacctttcatggcctgaacttttaataaaaattagaccgcatacaataaaagaagccttctaatatagtaaaactggaaggttctttaaacctcaaaaaatactagttaatttctaaacaagttttaacgttattataaagtatttaatgttt

SEQ ID NO: 10244 - DNA, 1059 bp, Homo sapiens
taatagatacttagaatttatctgcaggatttcagatgggttcactattacatacctgattatcatgcacatcctgttttaaaagtatagaatggatgaatccatatctgggactcatcttttgtgaccaataactgaattctaagcattgtctctcatggggatcctcacagaattgttgccatccctttatgaaggagctggaacatattttcactaacatctcactctgctcatgtttacataagtaaaatcagtatctaggggaacttcataatttcaaatgaaaaaaatggattattttggagattacatgaatcactagtacatgtaaagcacttagaacaacagtgcctagaatatagctcaatagatgatagtttttactaatagtagtaatccttttcataacagaaagcagcagctacaaatttatcaactcactgtttagaatacatctgattagcttgaagtttaaaaatccactgagcaattagacatcatgaaatctatacttatttctcaggacctcaggctttcactgcaaatctctactcttgctctacaaacaggtctgatgtacttgaatatctagtttctaggcacacaatgggtttgacaaggagaaaaaggtagttctatcagtagcagcagtaaatagctgacagaattatgaaaaaaggtaaacatatattcccacaaaatatagcagtctaagcctctaaacagtacaaatgaggacagtgtagcagtttatgttcataaaattatgaccctgcatcagcccaaattatgattgtaaatccaagtctgactaagcagatttttttttttttttttttttttgagacggaattttcctcttgttgcccaggctggagtgcagtggcgtgatcttggctcaccacaacctccgcctcccgggttcaagcaattctcctgcgtcagcctcctgagcagctgggattacaggcatgcaccaccacatcctgctaattttgtatttttagtagagacagggtttctccatgttggtcagactggtcttgaactcctgac

SEQ ID NO: 10245 - DNA, 1031 bp, Homo sapiens
tttaaggtgagtagttcattttctcccttgtcgctgatcatgaaaatcatatgaaatgattactttctactttttaaaattctttcttgagacagggtcttactctgtcacccaggctagagtgcagtggcatgatcctagctcactacagccttgaactcaagcaatccacctgcctcaccctcccaaatagctgggactataggcacatgcttaccacacccagcttattttaaaattttacgtagagacaaggtctcacatgttgcccaggctggtctctaactcctggcctcaaatgattctccctcctcggcatccgaaagtactgggattacagctgtgagccactgtatctggcctatttctttttccttctttaaaaaaatttttcttcttttaaacctcagattgttcctgacaatttatttgctactccattattctgagaaatatattgtcctttgccagcctaagtatttcaactatatgttagataataactgaaggtcatgttcatatcatacagagctagaaccagtaattgtagtagtcctttataagctgttgttaaattgttgtccctgtctccccactacaacttcctcctaccttatagcattgttttcttgaatactggctatcctccagtctttgagatgctctcgctagcctccttttattttactaaagcatatagtaatagcatggtaagatttatatgttttgacttgactctgctaccactgtcagtcatccagttaagttataagatcctttgttattccctgcaatgataaatatttcagaattccttctcttttcttctgatacagattttagttctgaacctagttctgtaatcattggcttttctccagttacaagttttaattcctttacccctgttctatttcatttcagaaaccagccttttaaagttccagttagcttccaagttactgctattgtgaaaactgtataacattgcttcttatactgaccatgaattgtgatactggacctgtgct

SEQ ID NO: 10246 - DNA, 1092 bp, Homo sapiens
aagtaaacttgaatttatttatatgcataaaggtgtccaagctgaacttttatatactttgtggtcttacatgaggatttactttctaaaaataatctacttaaaacatgtttttcagccgcctgtcttggttagatggctctggattaggattctcactggaataccccaccattagtttacatgcattatccagggaccgaagtgactgtctaggagagcatttgtatgttatggtgaatgccaaatttgaaggtatgtatggtgtaatttaatctaatgcctcctttgatagcaaattatattttaaaaaagagtctttgaggccgggcacggtggctcacgcctgtaatcccagcactctgggaggccgaggcgggcggatcacaaggtcaggagatcgagaccatcctggctaatacggtgaaaacccgtctctactaaaaaatacaaaaaattagccaggcgtggtggtgggcgcctgtagtcccagctactcaggagactgaggcaggagaatggtgtgaacctgggaggtggagcttgtagtgagccgagatcatgccactgcactccagcctgggcgacaaagtgagactccgtctaaaaaaaaaaaaagaaaaaaaagagtctttgataataatcaatgtaacattgaggccattgactcattttgggtagtagtttattaagcaaaatttcagcacagcaacttggacacttgaagttttcacaatggatgttcatgtgtgtctgtatatatttctctatatttacacttagaattcttcatttattatggatatgtatttctagcttttcctctaaagtttcactgtttattctgcctttctctttttaaaaggcacccttaggggcttggatcagtataccctgtgcttctcataatttaagatagaactgttttgttttgtttcagtagtgggtctcagtggttgtaggggggatatattttccatgggcctccaccaacctcaccattcccccacatttggcagtgacattttggttgaaagaggaagggtattattggtgtctagcagttagatgccaaggatgctattattatac

SEQ ID NO: 10247 - DNA, 1045 bp, Homo sapiens
tgcagagggaccagactcccgttttggggtcctggaaggaattgcccttttatttggccacgtggagcactttggtattttgacagtcagatagatctaccgtaaatattgtggttgtagaacagaggtccctgtttccttgacatgcagttttctttattttgaagcctgtaatgacacatcgaatctttcctgcccttcagatatgtgttgcttccccttttgctccatcacttgtctacagccagagaaaattctctacttttaagagctcatgtgattactttggaaccacctgtaaaatccaggataatctccctatgttactgtcgactggtaaccttaattacgtttgtgaagtcccttttgctgtgtaatataacatattcacccgcatgacaccagaaagtgaaggtcgtggggccaaaattctgcctactacagaatccagagcacaaaaactgtaaagaacctctgctttaaagggaaatttagacattgaacaaggtttaggcttcaggccagaaactgagataggacatatggatgggaggaaaagcaagattgaggtgagaggcagataatgagtttggtcaggacatgtgtggagtagttgtacatatgaccgtgttgggccgggcgcggtggctcacacctgtaatcccagcactttgggaggctgaggcaggcagatcgcttgagcccaggagtttgagatcagcctgggcagcatggcgaaacccagtctctacaaaaaatacaaaaattagccaggcatggtggcggcctgtagtcctagctactcaggaaactgaggtgggaggatcacctgagcccaggaggtcgaggctgcggtgagccgtgattgtgcccctgcactccagcctgcatgacagagtgagaccctgtctcaaaaaaaaaataaaaataaaaaaagaatgtgtatcttgggaaagtggtattaaagagagatgtttggaggtcgttaaagtgttagtgtatactcatggaaatggattagatatctcagaagagaagaggacca

SEQ ID NO: 10248 - DNA, 1023 bp, Homo sapiens
tatttcctaatagctataactgtgccccctaccagtagtacaagacaagctctaaaatatgaatttcttacatccatttagtcttttttgttttacttaaattatatatatatagtgtatatatatatacacacatatatacatataaatatatatatatatatatatatatatatatatatatatatttttttttttttttttttttttttttttttttggtgacagagtcttactctgtcacccaggctggagtgcagtggtgtgatcttggctcactgcaacctccgcctcccaagttcaaacgattctcctggctcagcctcccaatagctaggattttaggcatgtgccaccaagcctggctaatttttgtatttttagtagagatggggtttcaccatgttggccaagctagtctcgaactcctgacctcaggttatccgcccaccttggcctcccaaagtgctgggattacaggcgtgagccaccgcgcccggctttatggcctgttttgaagattgttttgctttcatagattaaacatgaatttaagtttgagcccaagacaaaagagaaagggaaaaaaaatgtttggatgtgggatgctaaagaagggaagtgaacatctttttcgaatgtgtacttaccttcatgtgtcacagaaacaaacataaattgcattagttaagccattaaatatgaatatttattaagctaggccctattccaagcactggaatataacagcaaacaaaatagctcttatgaaactcttattttagttgggaagaaggtgacaataaacaagatagataagtagaatatatgatatattagaaatgagtgctttggaaaaaaataaaggagaaaagggggttgggaaagtagttgaatttcagataatatactaaggaaatcctcactaagaaaacatttgagtgaagacctgaaagaaatgttgtgtgtgagtcatgcacttatctaaaagaagaatgatacaggcagatggaacaataaata

SEQ ID NO: 10249 - DNA, 1041 bp, Homo sapiens
tggataattctaactctgtcatttctgttatatttatttattgttgttctgtaaggaagaacatttcccttctcctccatatgtttgtttatttatgacagtgtaaactcgtggattcttattctgatcagtggatatactacattcccatcactatttaggctccatttgtcccaaatttggccaatgagaaccacttcaacctattggctagctattttgaaatgtttgaaatccacaaaagaataacaagcttgaatgtcgtacttcggtggaatttaacattctgaaaaacagctgtgacataatgccacagcctcactctggcttattgatcagagatgacaggaacaatgctatttagcagtgctttgcaagtttaactaggtctgtgtgctttatttagcagatttgtattctttatggagaagagtcaaaaatatatcttgagttctgtatttatgtggaacagattcatgagttttctttggttagagggcataacctctgcaatacattatgactatagtgacaggtagaacagcatattatcaggaggcggatttgtggtagccgtctaccaagaagagcagtcatggcagctgtgtacctgaccaggtagctgtaggtcgactgcagtaaggactatttctaaaaaagtataaaacatttaggctgggtgtggtggctcacacctgtaatcccagcactttgggaggccgaggcaggcggatcacttgaggccaggaattcaagaccagcctggccaacatggcgaaaccccatctctactaaaaatacaaaaattagccagatgtggtggcgggtacctgtagtcccagctactcggaaggctgaggcaggggaattgcttgaacccgggaagtggagtttgcagtgagccaagatcatgccactgcactccagcctgggcgacatagtgagactctgtctcaaaaacaaacaaactaaaaaggataaaacattttctaatcttgaggattcaccgctaagagtatatattgtgaggtttggcattaa

SEQ ID NO: 10250 - DNA, 1051 bp, Homo sapiens
ttgcaatttgtaaaaatgtgtataagtaatttcattccggcttaattaaatcacaagcttaaaaggcctgtcaagttatttccttgagtagcaacccctttcttctaaatctttcattcatgcagcatacctgttgaacatcttctgttgcaaattaaattatttatcaatggaaaaacttcatcatgactgttttaaaacaagtactggttataatctcacaaaagcgtcagaattttaatacagaaggatttcatcctttaatcaccagcattctttttaatctgtatactcagtgttgccatgtttattcacttttggaggggatcatctcaaactttttcagacctttcacatgtgctacctaaatggagattacaaaactgtttatcccaaggaactttgttctgcataaggaataacctctatgcttattatcatattttttaaggagccagacttttctgaagatcaagaagaaaagaaaaaagattcaaaaaaatccaaagcaaacttgcttgaaaggaggtcaacaagaacaaggaaatgtataagctacaggtatgaagtgtatggaaatgtctacagcaaaagaggatttattttgcaagtacacagcatgatccagaagtatatgctttttctatcatgctgattattgcagttgtatatatatttcttgccttccatctttagtcatagaattttttttttcctttttcttttttttttgagactgagtctcgctcttgttggccaggctggtctcgaatgcctgacctctggtgatttgccctcctcagcctcccaaagtgctgggattacagccatgagccaccgcgcccggcctagtcatataattttagagcagagtgatcctttccaaatgtaaatctgttcatgtcatcctcttttgctttaacatactttatcagatttccatagctcttgggttaaggattgttttgttttgttttttccaagatggagtcttgctctgtctccaggctggagtgcagtggcaccatctcggctcactgcaacctccacc

SEQ ID NO: 10251 - DNA, 1035 bp, Homo sapiens
ccattgagaacaccaaaacaaaaagtaaaaagcagaaacctaaatttttctaaattttttttaatatctagaagttgtatctcaaagtttttgtaattttcttcattgtcagattttattttttactgtcaaatatccaatgacagaggccacctcttttaaaatagaaactttaaatggaaatatacattatactaagtcttatattttatagccttgaaagtttctattcatgtaattaagctttttctgatttttagaggaacagaaagaaagtgaaaagatgaaaagtgaggagcagcctatggatttagaaaaccgttctacagccaatgttctagaagagactactgtgaaaaaagaaaaagaagatgaaaaggaacttgtgaaactgccagtcatagtgaagctagaaaaacctttgccagaaaatgaagaaaaaaagattatcaaagaagaaagtgattccttcaaggaaaatgtcaaacccattaaagttgaggtgaaggaatgtagagcagatcctaaagataccaaaagtagcatggagaagccagtggcacaggagcctgaaaggatcgaatttggtggcaatattaaatcttctcacgaaattactgagaaatctactgaagaaactgagaaacttaaaaatgaccagcaggccaagataccactaaaaaaacgagaaattaaactgagtgatgattttgacagtccagtcaagggacctttgtgtaaatcagttactccaacaaaagagtttttgaaagatgaaataaaacaagaggaagagacttgtaaaaggatctctacaatcactgctttgggtcatgaagggaaacagctggtaaatggagaagttagtgatgaaagggtagctccaaattttaagacagaaccaatagagacaaagttttatgagacaaaggaagagagctatagcccctctaaggacagaaatatcatcacggagggaaatggaacagagtccttaaattctgtcataacaagtatgaaaacaggtgagcttga

SEQ ID NO: 10252 - DNA, 1051 bp, Homo sapiens
ttaggcagctagaagttgcagggccaggttctgaaaagaagagggctatgcagaagacagaatttcagaaatctgtacatgggctaccttgagtctttgctgaagactaggtcgtatatgcaaacagtgaaaatccacaacgctaggcactgaacatccaggttattactagccaaacatttcctagaacttacactggagatgtttgaactctgaccagagtgaaatattctttgtagcactcagggcattcaatggagaacccaattgattcattgtagtaaacctgacagaaaaggccttaaaaagataagatgaatctgcaaataaatacctgccaaaacaaagcccaactgatttttacagcacattgcaaaatcttaacagcacatcttagcagcgcttagcagcatggtaacattgatattttccaacatccaagcttaatttactcaatatggctcaaattactagctgtgctgagaaactggtctaactcttaaccaggagaaaaatgaacccaaagaagcagattcagaaatgatggagatactagatctagcagacaaggacagtaaaataagtattataattagtaaaagtatttaaagaaaaatatgaacataatgaaagaaatgaaagataagaaaaataaacatatagaacttctagagattaaaaaaataatagtatcttaaataaattactgaaaggcatttcacagaagattggatgctgcagaacaaactagtgaacttgaagacatgtcagtagactttatcctaaaatgaagcagtgagaaagagaactgaaaataatcaagtgcttcactggtctgtggaatagtatcaagcagcctccataaagtgtatttgagatcctagaaggaggatggagccaagaatattggaagaataatgaatgcaaaatttcaaatttgatgaaaattataaacccacaaacccaataatctcaacaaacctaaagtacgacaaacacagacaaacatttacagacatttgtatgtttgtcctttgccagaaagcagtga

SEQ ID NO: 10253 - DNA, 1036 bp, Homo sapiens
tcaaaggccttttctgcatctattgagataatcatgtaatttttgtcattggttctgtttatgtgatgaattacgtttattgacttgtgtatgttgaaccagccttgcatcccagggatgaagttgacttgatcatggtagataagctttttgatgtgctgctggatttggtttgccaatattgtattgaggattttcacattgatgttcatcagggatattggcctgaaattttctttttttgttgtgtctctgccaggttttgctatcagggtggtgctggcctcataaaatgcgttagggaggattccctcttttcctattttttggaatactaataaaaaagaaaagagagaagaatcaaatagacacaagaagaaacgatataggggatatcactgctgatcccacagaaatacaaactaccatcagagaatgctataaacgcctctacgcaaataaactagaaattctagaagaaatggataaattcctggacacatacacctctaaaccaggaaaagtcgaatccctgaggaaaccaataacaagttctgaaattgaggcagtgattaatagcctgctaaccaaaaaaagtccaggaccagatggattcacagccgaattctaccagagctcttcttagctttaatatatttgcctaggtcagtgtcctgaagagttttccctatgttttctacaaataatgtttaagttgttaattcatcttaatttgatttttgtgtttgatgagaaatagaggtccagttttattcttctgcatatgcttttccagttatttcagcaccacttatttgagagggtgtcctttccccagtgtaggttcttgacagctttgtctaagatcagttggctggtaaatatatttatttctgagttctctattctgtttcattggtctgtgtgtctgattttataccaatactgaaatgttttggttactgtagcttgtaatatatttttaagttgggtagtgtgatgcccccagctttgttgacagctgtctctctgtttg

SEQ ID NO: 10254 - DNA, 1024 bp, Homo sapiens
ttgactgtggtcaactggtttctccttgctatctttttgcctcatggccttttcattttataccctatcttctattattacctagttgtattcaccatgataactatatctcactcctttagtgtcctattttcctgtattttggacttcccctttaaaccttaattatcttctccattcttatctttcgtagaaaaatagattacaaaaatgcaaaaataaggggctttgtagtatgcatgctttaccataattttataggttaaatgcctgtagtagtactgttgtaattatcagagcttactgttgagccagactccatgataaagtcatctaccaagattatcttatttaatccttagagccactctatttatagtgtcattattttcattttatagataaggaaactatttagaaaggtaaagtaacttgcctgaagtcacacagtgttaaagggttggagaaaattttgataaaaagatacttgtaatgctgtgggaatttaaaactgggtaagtctggcttcagagcccaactcttaaccagtgttttgtccccacaggtatgctcttaaaatgattgtagtgtgatccacagtactatggttgtggtctgaactctaagcaatgatctgaacacttaggcttctgagtcagataacgtagcatatttccccactcacctctttttactttaaaagttttaattttattagcatgaacattatttttaaaaggtataatatttgaggccgggcgcggtggctcacgcctgtaatcccagcactttgggaggccgaggtgggcggatcacgaggtcaggagatcgagaccatcccggttaacacggtgaaaccccgtctctactaaaaatacaaaaaattagccgggcgtagtggcgggcgcctgtagtcccagctactcgggaggctgaggcaggagaatggcgtgaacccgggaggcggagcttgcagtgagccgagatcccgccactgcactccagcctgggcgacagagcgaga

SEQ ID NO: 10255 - DNA, 1067 bp, Homo sapiens
cccaggctggagtgcagtggcgcgatcctggttcactacaacctctgcctcctgggttcaagtgattctcctgcctcacgctcccaagtaactgggattacaggcatgcaccaccatgcctggctcatttttatgtgtttagtagggacaggttttgccatgttggtcaggctggtcttgaactcctggcttcaggtgatccagccacctccacctctcaaagtgctgggattgcaggcatgagccactgtgcccagccacttcttatttttatcctgagtttagggatgtgttaaattgtattaattctccattatctctgtgtgtgtgtgtgtgtgtgtgtgtgtgtgtgtgtgtccttttacaaattataaatggccgctctttgaggaagtcgcggtggtaggtgctgcggctctgtgatccgcaggctcctgctccttactcactactgttcgctctcgccgaggaacaagtcggtcaggaagccgtgcagcagctatggctttgaaggttaccggaaaaacacgcgtggagctggaggtggcagttcaccgaaattgaatcactctaacgagccgcaacataaaatccctggaaaaggtgtgtgctgacttcatcagaggagcagaggcaaagaatctccaagtgaaaggaccagttcgaatacctaccaagactttgagaatcactacagaaaaagtccttgtggtgaaggttctaagacgtgggatcctttccagatgagaatccacaagcgactcattgacttgcacagtccttctgagattgttaagcagattgcttccatcagtttgagccgggagttgaggtgaaagtcaccattgcagatgcttaagtcaactattttaataaattgattaccagttgttaaaaaaaaattataaatggcagacttgatcccattcatcattagactactttcatgttttgctcagaattaagtaagttttaatattcatttaaaaatacttatcaaataaatttggtttctctcaaagtaagttgtgtaagatattctgattttagcaaattatttcataatt

SEQ ID NO: 10256 - DNA, 1027 bp, Homo sapiens
tatagttaatggtagaatatgatttccaacccaagtctgagtccaaagccacaaaattatataccttgccatagtatcatggtttccaaactgcaccaaggcaccctagagcattgttgccaactccatctgatagtttaaattttcaagtaggatacagtggtagccgaaatttgctggttgccaggtgagctactgccttgacatacttcatggtttcaaggttgtgccacatttctatagatgatatgtctttgtgaagctggttttttagcggttgctgtggtaaaattcacaaaaaagtcagtatgcagcaggaaagaggatagcagggtccactctgattccaaggtttgaaaagttgtgcagtgcccaacagtaatacacatttcacaagtaattatggttaagaatgaagtaaaaacattatttgttgaaatttagctaggttattttttcacatggctactgactacttaataagtggaagtgttattatttctggcctagggctgctgtgagaaaattactgagatactgagggtgccgtgaagctagaatgtttgagaacctttgctctagaaactatcattgaatttcggggcaagaaagaagggactattgtgtcattgcctttatttttcaggaggaaaatcaagctacagagagagatttcaagtgtatacagctaactgttggtgttagtcaaattcttatttgaaaagcccacatatatgctgaaattgtcaacaaaaaatttagatttatagttgatactagttataaaaggatgtgccaaatgaaggtggtgttttatcctcctctccctgcagtctactttagtcctcccaattctgtgctttgtgtggacttccccaggtttctcctaactggaggtagatgatggtggttatggataaagttgacgttgactttgtgagatccctgacacccaaggctcctaagtatctttcctctcctgcagagaatatttcttttcaagaggaaactatactactgtattctt

SEQ ID NO: 10257 - DNA, 1025 bp, Homo sapiens
gagactatatgcctggctaattatttttattttttgtagagacaggtctcactatgttgcccaggctagtctcaaacacctgggatcaagtgattctcctgccttgccctcccaaagtgctgggattataggcttgagccttatccagctcttaccaggatttggcttcttgaaagtgctatgccaactggggctgtggttgtggtctgccacttgggatggaatgggagagtgtggcaggaaagcagatataggtacctattttgattccaccctaagtgggagattcatctggagcctggtatcagagaacagtgttagtttcatgacagttacactcatggctgctgcatgaccctcatgttgtcatgtgagtgtgtgcttatcacatggctggtacttgatgatgaggctgcacttagatctcatgctgaaatctgaggtgcactggattgctctggccttgggctgactgcaaacctttcccttcctggaggacagcaatccagtctctactctgacccatagagagaagcttggatgtaaccaggaagaggtctggggaggcactgagaagtcctggagtctctgcccttgttaatttagatccatctagccttcattcctaccctctgaacttcttagccttgggatcatcttcaacttacactttttgctctggttgcaccaaattaaggagacatcccaagctcactccattcctggcctttgcacttgcccttacatttttctgaaattctctccctcttctttatagaagcttgtggttaatagaatgagtaactgcttcagtttatgaactgggctcaaattcttacccaggtgtgcatctggggagtctctgagaacctatctgattcttgggatttttgccaagattgtgacagtctttctttcataatgtagcaggataagaactcttggggttaactgtttggcatagaatggatattctattccaaagccttcctgcgctcctcctcagtacttcttgcaggcttggt

SEQ ID NO: 10258 - DNA, 1101 bp, Homo sapiens
atattctgtagtcagtaattctttatgaagaattatacaacaacatgacaaaatatttagggtgtaatgttatgtacccaaaagaaggggagccaatcataatcccaaaagatagtccagaacatcatagtcctaaactgtttaaattccaaaagactaaaatccctaaggtctaaaatcccaaaaaccacagcccagaaaatatcaaaatccccaaaatataattatggaagaaataatttaaaaaatttaaagatatttattttttaaaggggaatttatttgagaaacataaaaacacaacagaatactttatacatcacttaatataataaaacagacaataacaacatacatttttgcaagcataaacactcaggttactaatgacagttgggtgggtctaacagttatgagcagatgagccatatttataaagaaattggtcataaagggaaaggtataaatgcatatcactttggttgttaattgtgtatacccagctttttaactgtggtcatctgaaatactgtgcccaacaacctcaagtcttttgacgagattgatggaaactgtgctgggtcaccactgcatatgcagtcacccaaagagctgagatctcaagaaattttatctttcacaaatgcagatgtacgaaaaggatatctcatttatcgaggaagtttcaacattttgtgtacacactcaatgcttatacacaaagtcagtattgtgatgatgcactttcatggagtcagatttctgatatccaagcagcagaacccagagagtccgttttgctatattgccttttttttttttttgagacagagtctcagcttatcatccaggctgaatacagtggcgtgatctcggctcactgctgcaacctctgcctcttgggttcaagcaattctcctgtctcagtctcccaagtagctgggattacaggtgtgcaccaccacgcctggctaatttttgtatttttagtagagacagggttttgccatgttggtcaggctggtctccatctcctgacctcaggtcatccacccacctcggccttccaaagtgctaggattacaggcatgagccaccact

SEQ ID NO: 10259 - DNA, 1032 bp, Homo sapiens
gtgctgggattacaggtgtgagccactgcacccggcctgtagaggttcttaatagggtaaaaattgcaactgtttgtcaatggcagatctgtcacaagctttttcagactacagtaatgaaggctatctgtgattcataactacaaccgctgtttctattgccaaatgccattttggtttatgactatcatacaatgtgcctaaaagttttttttttttgtaattgagatataatttatatacaaatatttactcttgatggaaaagatacaaagtatgttttctgaccacagtgggatgaaattataaattagttaacaggaagaaatttagtaaacccacaaatgtggaaattaaacaacatacttctatgtaactaatgagtcaacgaagaaatcaaaagggaaattagaaaatactttgagatgaataaaatagaaaatgatgcagctaaagcagtgcttatagaagtttatagttttaagtgcccatcataaaaaaaaaacaagaataaggatctaaaatcagtaacctaaccttccaacttaagatgctggaaaaagaagcacccattaaacttaaagcatgtgaaggaagggaatactaaagattagaatagaaattaattaaacagaatagaaaaacaacagataatcaacaaaaccaaatttacttctctgaaaagatcaacaaaattgacaaacctttagttatattgaccaagaaagagagagaagactcaaattactagactcagaaatgagaagaccagaagatggacatattaggaaaaaaaaggaaaagtgaggatactgtcgagggcggtggcttatgtctgtaatcccacagttggagaggtcaaggcaggaggatcacttgagcccaggagttcaagaccagcctgggtcacataggaagaccccatatctacataaaacaaaaaaattagccgggtctggtggcttgtacctgtagtccagctacctgggaggctgagatgggaggatcgctgtgcctgggaggttgagactg

SEQ ID NO: 10260 - DNA, 1052 bp, Homo sapiens
cctggggacgttgttcaaatgtcgattctatttgataagtcaagcagaggaggtgaggcaagattctgcattcctgacatgcccccaaatttacaccagtgcattggttgcattcttagatccttagacttgtagagtggcaaggcttagagcatccagcaggatactgatccttaaacattacatggattcattcatccagcattaaaatatgttaatacaaatacaaaatatgtcaatacataatataaaatttacaattttaacaattttaagtataaagttcagtggcattaagaacattagcactgttgcacaatgtgatttcctctcttcccaacattctgttgttcccatttcccaagactgctcagccctcttccacccatcctcacatgaccagatatgccatgtgttcttgtgtttgcatatctcaaaactcttgcactggttgtctcttctcacagaatacatgccattcttccctttctttttgttctccacccagtggacttaacatttgtgcttcaagacccaaatgaaacctcagcgagagcttagtctcttcttcacctgtttctgtagcattctgtggtactaatctatttgtactttttgttcagtgctgctgtcattaccggtgtacctatcttcccaccagtcggaggtccttgatggcagagctaatgcctggctcatctccgtgtcctggagatggacaatagggcctggctcactaaagtgttattggtggttgaatgacagttgatattgcttgtcctctcccttatataatacttagggaaaaaattcctagcttttgacctaactacagcttcgataagactgaaaactgagtttgagaggactaggatagaaatggctaagaattttaagggaagagctaatttcttcacttaatttttcatcagttgttaacataaagtgattaaatgagatcttagtgcttctgttcttttttctccgctgaaaagatgaggagggagaactgatatgtgcctagcacttacatatacgtataataaagttat

SEQ ID NO: 10261 - DNA, 1030 bp, Homo sapiens
cctctacaaaaaaaaaatttgagccaggcgcagtggcttatgcctgtaatcccaacactttgagaggctgaggcaggtggatcacttgagtccaggagttcaagacgagcctgcgcaacatggtgaaaccctgtctctacaaaaaatacaaaaattaactgagggtggaggtgcatgcctgtagtcccagctacttgggaggctgaagtaggagaattgcttgagcccgggaggtggaggctgcagtgagctgagattgcactactgcactccagcctgggcgacagagcaagacttgtctcaaataataataataataataaaataaaaattagcctggcatggtggcactcgcctgtagtctcagctacccaggaacctgaggtgggaggattgcttgagcccaggaggttgaggcttcagtgagtcatgattttgccactgcattccagcctggatgacagagtgaaaccttgtctcaaaaaaataaataaaaaataaaaggacagaactaacttggacatgatcttaagcaagtcagtctgcctttgtaggcctcagtctcctatctggaaagtgcaggatcttccaagctgaaaaaacacagttcctctgaatggagggttttgaggcatgatgagccaaacaaccagctaaggaaagctatttatttgagggagtggtggggccccttctctggagtccttaagtcatgctaagaggcccagacctttcctgcttactctggaatatctctgctgttcggagaatctgctgcgaactctactgttacaaaggcaccttatgaagggctgaccagagtggaccaggagcaggggcaggtcttcccgtccagccccacccccaacttcccccctgtcacacccctcccccagttctgggaaaacacagcccttcctctagctgatgcaactagccctgggggccagcctaaggccttctaggtttgctgagaggtagagagaggggcgatgtcaacaaagcaccccctcatcagccaatctcaaat

SEQ ID NO: 10262 - DNA, 1051 bp, Homo sapiens
gtctatgcgaatgaacgactgaaaactcagaaaacgaaaactagcttttatggaatttcaattaattacgtttatcaaaactacgcatcatgcccatttgtgggtattggatgaaaagataaatctttccagaaggggcaggggagggagaggcaattctggttggggaagttgggagaaaagaaaatcagtatctcctagtcttcgcccagtttggctcgtttggggtactcctcgaccccgcgttaccaggcccgtgaatcccactcccaccagagaattagcgcgggcggacgagcaaagtgaaacttagtagcccggaacttcgcgtgccgggttcccgcagcaacacgtaccgggaagcgtttgggcgctgcaccgcgctgcgccgtgcccgtgagtccggcgcgcagaggaggaggagaaagctgaccgcttaggccggggtagtggtcgtcgtggttttccttgtagttcgtggtctgagaccaggcctcaagtggaaacggcgtcaccatgatcgcacggcggaacccagaacccttacggtttctgccggatgaggcccggagcctgcccccgcccaagctgaccgacccgcggctcctctacatcggcttcttgggctactgctccggcctgattgataacctaatccggcggaggccgatcgcgacggctggtgagtgctgcgcggccgggatcggctgggaggagaaggggtcgtagggctgcagactggcccggccgtaggcccccctgaggtgctctgcttttccgtgcctttttgcctagctggccccatctcgcctttccggggagtccgcgccccattagctctttagaatcaagcagagccagagtgtcatttggcacttgaagaaactgaggtgcagtgaagcaggaactgagtctgtgaaggacccgaaactactctcctcagttcgtgttgtgctgtgtgcgcaaatgagccatgactccatgccatgcactactcacactgtgggcattattgatagcatttcggccttaaaacacttttagggatgta

SEQ ID NO: 10263 - DNA, 1368 bp, Homo sapiens
ggcatgagccaccatgcccagccagtagaattaattttaatgagttaaatatatacatcaaggctaggtgcggtggctcaaacctgtaatcccagcactttgggaggccaaggcaggcagatcacgaggtcaggattttgagaccagcctggccaacatggtgaaaccccgtctctattaaaaatacaaaaattagctgggcgtggtggcaggcacctgtaatcccagctacttgggaggttgaggcaggaaaatcgcttgaacccaggaggtggaggttgcagtgagccgagatcgcaccactgcactccagccttggcaacaaagcgagactccgtctcaaaaaaacaaaaaattatatatatatatatatatatatatttacatataaaatatatttatttacatataaaaatatatatatacacatcaaatgccaattttttctgagttgttgcttttatgttaacttttgttagactgtgcacaaagtgatgaatgattcggtttcatgaagaattgtctaagattggctgtctttcagagatgatgcaaattgtattcacctgaactctgtttctgtaaagtctgtttcaaatgatactgaagtttatctttgcctgttgtttctagccctctattttctgtctttggtttaaaccccaagggcccagaggctttctccgatgtctaactctttgtgccttgagctcctttatgtttgggtggcatgttcatgaaaaagccatacttctagcaattctcccaatgaggtaagcagatagctcagccagtgagcattttggcatatttcacaatgatcctattttctatttgctctgtcccttcttgtcatgttcaccaggataggcaaaaacaaagatgtataggaacagatgtccactaggacaggacagggatgcttaacttgagattcttggacccatgaaggtatgcaaaaatgcatgtactatttctgtttctgcgtttttggaaagaagcactgtagtgattaagtaccatgaaagccggcttttagatctgatcattgagggacagtatgttatagaaaaaacctgggctggccgggcgcggtagctcacgcctgtaatcccagcacttagggaggccaaggcgggcagatcacgaggtcaggagatcgagactatcctggctaacatggtgaaaccccatctctactaaaaatacaaaaaattagctgggcatagtggcacatgcctgtagtcccagctactcgggaggctgaggcaggagaattgcttgaacccgggaggaagaggttgcagtgagccgagatcgcaccactgcattccattctgggtgaccgaaggagactctgtctcaaaa

SEQ ID NO: 10264 - DNA, 1053 bp, Homo sapiens
tcaaactgtctctgactgtcctattagccagagcttgttggggcttgtattgtcattctctgaattgatttatttaataaccaagtatttattgagctcctatgtactggggatagaaatgaactcatcatcattcctgccttcaaggaatacagtatagtagaggaaatgagcacataaacaagtgcagtgccttgtggtgaacactgttagagtgagctcactcagctgtgcacgttggctcaggcctgtaatcctagcactttgggaggctgagatgggcggatcacctgaagtcaggagctcgagaccagcctggccaacatggtgacaccccgtctctactaaaaatacaaaaattagccgggcatggtggcacatgcctgtaatcccagttaatggggaggctgaggcaggagaatcgctggaacctggaacctgggaggcagaggctgcagtgagctgagattgcgccactgcattccagcctctgtctctgggtgacagagtaagactccatctcaaaaaaaaaaagtgagctcacaagaaaatcagttctgcttattgatttaggagctttctcaggtgattgaattagaagttaatttggcaaagggagttgcctgggcagagggacacaggtgttgagagtggtatattgaggactcacagttacttcattgtggccaagccgcatttaacaaagtaaagatgagattgaacaggggggaaggggcgatgagatcatggaagacactggatactatgtttaggaatagagggtttctcccataggagatgaaggattcaaagttccttcatgacatgctcagactgttctagaagcttgctttcagaggtgagagcagattaccatttgtgctgcctgccagcaagtttcctataagctgcacaaattccctgttccaatgcaaagagctgctttatatattataatcttaagaccagaggcattttgggtagaatagtataggattaaattcatgaaatcttagcctttaagcagcaataagatttagtagcttacttttt

SEQ ID NO: 10265 - DNA, 1053 bp, Homo sapiens
agaatttaacagatgttcagatgttttctttcttcctcttcttccctgccctgaaatcaactaattaattttaattcttactaaaactgaaacgcgtcacatcttttgtagtttcccagctctccccttcaccctagtagacatggataagctgcagtctgtgttctgctttgtagcttgtaaattcttctgttattataatagtatggacgggtattcagagtatttttatgtatattgtcccactggacagtggacaaagtgagaccaaaagaaggttctgtgaacttacattgtggtgagcatataaccacttacttactagaacccagaccccataactttctacacactataccatagagagttccctagttctctttttgaatttgaaaaagattgatgactgtttaatcagtttcatttctcttttcaacagaatcagctgcctcaagtcttttcccgactctttcctttcaagaggggcctctgtcatgcatattgggctccaaacttctgggctttgtacaatgctttggacaaagtgctgtctgtcatcggtatggtagcgagcattttttactcagactctgaatattgaaaggacttaggcacatggagaaatggaaaaacctttgtgttttgaatgtggctgaattgtttgttctccagtcctgcatttcagctttcaggatgaacagggggagcagttcttgggactgaggctttagtgcagtaaacagactgttttccttataaaagctccttgtggtaatgaggttattgatcctttcctggggaaaaaataaaatatgtagacactctataaaggtaatttttgccttaattaaaaaactattcagcagcagcagttaaccctgctttttttccccccttctcaccattcctattcaaacccctacttatttttagagacagggtctcactgtcacccaggatggagtgcaatggtgttgagatcatagtgcactgcagccttaaattcctgggctcaaacagtcctcttgtctcagcctcctgagttgctgggac

SEQ ID NO: 10266 - DNA, 1050 bp, Homo sapiens
tcttttcccaccttctctgtcagatgaactcctcatccttatgtcttggtatatgaggcctttttcaggtaatgaattttgttagaattgtttgtgagcaagaggaagtcacttctgagcaaaggcctgagggccgcctgtaagaaaaagtttgggctaggccgggcgtggtggctcacgcctgtaatcccagcactttgggagactgaggcaggtggatcacctgaggtcaggagtttgagaccagcctggccaacatggcgaaaccccacctctactaaaaattagccaggattggtggtacatgcctgtagtctcagctgctcgggaggctgagacaggagactcgcgtgaacccggggggcggcagttgcagtgagctgagatgggtccactacactccagcctgggtgacagaaggagactccgcctcaaaaaaaaaaaaaaagaaaagaaaaagagaaagtctgggcttcttgtcagccctttaggtagttctgagacccttttcactgacttgtagattgctcaacaactttctagaagatctgacctccagataaatgaggttttacaggattatgtaatgtctatttgtgtctctataggacagtgagctgtgacagcttagggaatgtcagtccatttaaaagcataactatgggaattagaaattgataaatattgcaaaatctcattttatttatctaattgttttgagtagccattccacagattttgaagtacaccgaaactggcttgctatcactcacagtttgccaatatcacagtggtattatgaggtaagttttaattttcacctttttttttttaagattcatctataaactaggtaaatattactgatattaaaaatgttttctggctgggtgcggtggctcacgcttgtaatcccagcactttgggaggccaaggcgggcagatcatgaggtcaggggttggagaccagcctggccaacacagtgaaaccctgtctctactaaaaatacaaaaattagctgggtgtggtggtgggcacctgtaatccca

SEQ ID NO: 10267 - DNA, 1106 bp, Homo sapiens
agcctcgctcagagttctaaaaacacaatgtttctcacctctgtatctttgcacatgccattctctagctggatttaatactccggtgcaagcgtccaggttgggagcccccgcagttctctgaggtacttttatctactgtaactctagggcaacaatcctggcttctccactagtgcgtgaacgtctctagcgttaagtttttttctcacctaagtatccccaatactacacagtgatgacccagcgcaaacgaccactctttcaacgcaagcatgaactagctgataaaacttaaaagtggctacaaacgcctgcgcaggagcccttccggcccggggtgagacgcgggtctaaagaaaaggtgggcgggaggtttaaatagctgactgcagtccccggactggctgcgccgctcgccgcatgcgcgcagctagcgggcacggcttcagagggctttctccgcatgcgcgggatcccggatgtggatcaagttggtgggaagcgtgcggtgccgcagcaatggcggcgctcacaattgccacgggtactggcaattggttttcggctttggcgctcggggtgactcttctcaaatgccttctcatccccacatagtaagggactcgcacggccaggggctgggcggggaggccccgcggtcggtcagggcgggagagaaaggtgtggatatccctgggtatgaagagaaaactttaggtcgtgtttgtcgctatcctgcctttgctaagctttctgtttcgccagttgttacttgacttagccccagctggctaggttcagacctggcgctgtctgatttggaacaaatcactttaacgtttctgaacctcagggtcctcatccttaataggcagttaagaacctctgcctccaacagccattcagccagtattatcagatgcctgaggtgccaggtaccgttctaactcccgggagatgcggtggtgagcaagacattgctggtccttgccctcgaagttggtgggtggagctagacaaacaggaacttttcagattgtgataaaggaaatagagggttactaagtggctgtgcgctattcctttagaaggtgatgtttgag

SEQ ID NO: 10268 - DNA, 1046 bp, Homo sapiens
tgttgtaaaaactgacatgccttgaaaagaacataaaaagcattatgaaggttccgaggaaatagaggtccacttcagatgaatggatcagggaagttgtcactgaggccagacacttagagttgtttgtacttggttctgaattgtttggctttttaaaaacacatggggccccatgccgtggctcacgcctgtaatcccagcactttgggaggctgaggtgggtggatcaattaaggttaggagttcaataccagcctgaccaacatggtgaaaccccgtctctactaaaaatacaaaattagctgggcatagtggcacacgcctgtaatcccatttactgaagagaggcggaggcgggagaatcgcctgaacctgggaggtggaagttgcagtgaacgagatgatgccactgcacaccagcctgggtactctaaaaatatatataaataaataaaacctggaagtggagagaaggtgttgtggtggaagagggatgtgtgaatttgggactagactagacagccttgctgactctgtcataaatatatcagtattttgtaggcagccatttatcagcctacaccacttacttggaagcaaaacctgacaggctctgatattatctgtagcaaacatggttttcttgttcatgagggtgtctgtgttttttgtgcttgcacctgcataccagagatttggggacagctctttccacagagacaagactaacggggacacatcaactgaaatgccagctgaactagaaacagatctttttaaaatgcaccttggtgcccacacactatgtgtctatgtgtgaacctgcagcacacagaagtacatgcataattctgaaagcagtgaccgggttaagattttaaattactataaataaatagtacttatttttatttttctcagctccatcctatctggctatacctcaattttcatttcagtctaaggcttattgggcaccagttatgtctcctttgacctgctagataatagaaggatttcatgcaagaaaatgattcattaat

SEQ ID NO: 10269 - DNA, 1035 bp, Homo sapiens
ggtcaactgtgtgagaaaaccctttcctaaaaagaagctttaccttatctatttccctgttattttgaatttacacttactaaggaggaaaccaaggcaagaaagacagccaaggacattttaattgactcaagagatacttacttttaaccaagtcttttatgttctggaaagtgccttgagatcttttaataatcttgccaaatcagcatttcaatttggtactcaggatgagtgattagaagtcatgacaaatcagctagcttctctgtggagaatagctgaagcctctggagaaccacagtcttaaattagtctgaagaagcgtgaggtcacaacaggaagtaatgtgaacaggaggagttactgatcagatggttcagagagctggatgatcttaataacttgattccaattttccttgtatgtaacgaacacttattgattgcttctcttaaattcatctcctttctccttccttgcaacaccttaatttgtgttcagacatctgtgtgattctggggaagctggctccatctatcctaagcttcaggtttggctagttagcacattgcattccctcagccaccatgattattttggattgggcatgtgatctaagcaggtatagtctgagtgtattctagttggtatggtaagtggatataaggcctctattctgccatatgatttggttaaatataagaagtgtctatggggcacagtggctcgtggttataatcccaactacttgggagatggaggcaggaggattgcttgaggccaggagttcaagacaagcctgagcattaagactcctgtttcaaagaaacaaaacaaaagaacaaaaagaaaaaagtgactatgaatcctgtactctgatcctaggcttacaaagaagttcacaccatcacagatatgcagtcagggtgaagggagaaagagagaaccaatgccttcacatcagggttgctatgagaattgaatgggatcttgactgtaaagcaccttgcagaaaagtctgacataaaatat

SEQ ID NO: 10270 - DNA, 1150 bp, Homo sapiens
catgtacataagtcttataaatatcacgtaagtgaatgtaccacacctgtgtgcacattcccccagttaaacatttgttacttccagttattcactgttgtatacagtgcaggcctgtcatgtcatataggtggcatgtctgagagtttcacccatgttcatgagccataacatttaggtgtcattaactattaccacagttcactgcgaagattttctcgggtagacagcgtgtctttccttagtgtgcattggaagaacatgccaattggagttctgctgacttgcaagagcaggggaaagtgctaagttttacgtatagtatcatgaggattgttgaaatgagtttgttgatcttttcatataatttcctagaggaaaacattgagtataggccagggatgtgtgtgtgtgtgtgtgtgtagctattcacaggcaggaccatagcacactacagcctcaaactcctgagctcaagtgctcctctcacttagcctcctgaatagctgggactataggtgcaccactgtgcctggatttacttttttggataccaacagagactataacttattgaggctaaaacctgttagaggtccacttgaagatactgtcattaacagatagtaagtatctacagtgtacataagtatctacagtgtacatagtattcccctcaaagtttatagtcttggtggggaagcagcttgaatgtagaatgtactgccaggcagtacatactacacaaatgacaaagaccagtgccataggagtccggaagagattggtctagtgtggtcagtgaggttagtgtcataagacctatgtttagattttacttgtgggtaatctgccatttcacctctgtgccctcatttcctcatatgttcttaggactaatttcacttgccaccttgtggcagtctttcctgcaccatccacctcatcagaatgaattatgaagctccttcctctagttcacctgtgtcaccgtcaggccttagtaccactcagtaactgttggtttacgctgtgcttcccctaaaatggtagcttttccaatgcaccatgccctttgttcatgttcttgtagccttggtacctaaagcacagtaagttattggttcattagtgctttatatgcttttaa

SEQ ID NO: 10271 - DNA, 1046 bp, Homo sapiens
gcgccacccggcctggctaattttttgttttattttttgcagaggtgagggctcactatgttgcccaggctcatctcgaactcctgagctcaagtgactttcctgccttggcctcctaaagtgctgggattaaaggcatgagccactgtgcccagccctgaataatattccattgtgtatatgtaccacattttttaaatgcattcatcgattgatggacacttaggttgattctgcatgttggctactataataagcatgggagtgcagatatctcttcaatacattgatttcctttcttttggatatatagccagcagtgggattgctagatcatatggtagttctatttttagttttttgaagaactatcatactgttctctatgggggctgtactaatttacattcctaccaacaatgtgtgagggcttccctttctccacatccttcccagcgtctgttatcacttgtctttttttctgtagatacttagcatattttacaaaaaaaaagaactgaatgccagcatatatgactttgagctccttatatattctagttattaatcccttgtcagatgagtagtttacacatattttctcgcattctgtgagttgtttcttcatgttgttaattgtttcctttgctgtgtcaaagcttttaagcttgatgtgatcccttctgtccgtttttgctttggttgcttgtgcttttgaggtcttgctcaagaaatctttgcccagaccaatgtcctggagcatttcctcaatattttctactaatagttttatagtttcaggtctcatatttaagtccttaatccattttgatttcatttttaaatattgagaaagataggggtctagtttcattcttctgcatatggatatcaagttttcctagaacatttattgaagaaactgcactttttccagtgtatgttcttggcacctttgtcaaaggtgacttctgtcctactttagcatagctagataatttctgtttactatagtccatttgcaaaaaggtagccatttacaaatg

SEQ ID NO: 10272 - DNA, 1065 bp, Homo sapiens
ggaaaatctcttgaacctgggaggcagaggttgcagtgagtgagatcgcaccactacactccagcctggcaacagagtgagactccatctcaaaaaaatttaaaaaaaaaattgaaaaatttaaaaaaagaatcatagttgaaactcataaataagtatgtgtttggtcatctaactaaaagatatggatacttcgtaacaggaagttcaaaagcttgcagctcatttcccagggcaaaggtgatgtgctccagcttgcttaagatgtgctctagagtccggctatttggagagcctggcatgcaacagccaaatgggcagaaaatgggtattgacggttgctcaatttcagagtcacctttgcagtactctaaaagcacactggaattggctggaagagccattagtagacaatcaatatctgagcttttgatagtgaccatggtctatatgattatttgtggtactttatctgtatttttcttgtagcacctaatgctttatggttagctatgataaaatctaatctctgctgtagcactttttatttattcatgaaccttccccactttccctaatcaaagttaattcctcctgtctttattgtccttggctctataagccagtctcagcctcccataaaccacagacctgcctgcccataaaggcaagttgtcatcacccgcaaatgccaactttcttgtttccaacctgcctgcactcttaaccggctcccaataacttgtgaaacacacaatcaagtttttgtcattacttctccaagaaatttgtgtaattgcctgtgtgtttgtattatatctttatgtaccttttatctctaggagaacccaggagaaagaggtagtttttctagtaactagcccagttgttatcagggggagatacaaggtagaagaattctacctggaatttcaatcctaactaaagagtgtgaaaatttgagggaattgttctagtgatctttagagaatgcagtatttttgatataccagaagaaagtacactctgtgtattcaaaatgtgtctttatttgtaattgaagaa

SEQ ID NO: 10273 - DNA, 1026 bp, Homo sapiens
gtggtgccgtttactgaaatgttgtcctctctcaagtggaggaactcataagtgaacctttgtggagttctcaactgatgttttcttctggttcacttgaaatttagagctcactaaggaaggaagcaatgtggtaaaacagtcttgaccatgagggaaagggaatacatgtttgggagcaaggtaagaatttcattcctttgaagccattagtagtatctttgcaaaatgtaagacttttgcctctttcagacagcagcagtagtaaaactggctagccattatagtagccaaagtccattttcagtcattgttgcctgcagcccatctgcatctcttcaccatcacatctggaaagccctctttcctaattgtacctagtttgtttttagggccaaaatactgtgtatttcagcagttacagcaaaaaccacaaacatgtttcctatggtttgtggaacattctttttcttctgatactagtgtgtaaccttgccccattgttggtaacagcctgtgagaaactgaataaggaggcgttcaatttgtggttttcatcaatatttaaaaatactgagataggtgagaagagaggtggcagaggaagggccattaaactttttccctctttcagctttagcgtggacaaggttatgtattgtaagccttgttcctatctagcctatgttttttttttaattcagggtctgagttttattttcagtgcattgattggaatcaaagagtcagaagggagtgtcataaatagaaatcagggtttgttcagcttgaataccaacacaaactatttctagacagcatgccactgcagctgtgtgacttaagcagaatcaaaactcatattaactggaggaagatgtgtcagagagcattctgggcctacaagatgtacccaaagtggaattggttttgttaaggaatagaggaattagggaaagcttaggaaaatgatctgtagtctccattgttacctgtgtaggagagtaaaaggtcggcagagctaaa

SEQ ID NO: 10274 - DNA, 1031 bp, Homo sapiens
ttttgttgcgaattagcgaaactatagcattgtgtctatattctgtaatctcttaatgagttttgctttctttcttttcttttttttaaaagacggaatcttgctctgtcttccaggctggagtgcaatggcacgatcttggctcattgcaccctctgtctcccgggttcaagcaattctcctgcctcagcctcccgagtagctgggactacagacgcatgccaccacacccggctaattttttttttttttttttttgtagtgggtacgggatttcacagtgttgcccaggctggtctcaaactgagctcaggcagtccatccgcctcagcctcctaaagtgtttggattacaggcatgaaagtttgctttcctaaacaaaactgaacaactttaggatgggtattgaatttttttttttttttttttttttttttttaccagcacagcatctcccactcattctatactcctacttctttgtagtttccacccctatcacaccgttgaagtagctcttgttaggatcagtaatgatcttcatgttattaaatccagcagacttttaagtctttattttacttggccggtcagtgctaatcagcactattaatgacttttttattcttataaccctctactcccttgacttctgtgacatcacattatccctgtttttctcctttctcagcatttattctttcttagtctcctgtacagatttatccatttctatctattcatcaggtgttggaattcctcaaggcccagtccttggtggtctttattttcctcatgttatttcatctgtatctattgcttactgtttattctctcagaagtttttatctctaatccagacttcttctctgagctctagactcatatacattcgtccctcagtatcctcagggattggttccaggacaccctacccactagccccctctcagatagcaaaattcgaggatactaatgagtcccttatgtaaaatgacgtagtatgcgtatcacctatgcacatcctcctg

SEQ ID NO: 10275 - DNA, 1038 bp, Homo sapiens
gcagtagcaacccgctcgggtccccttccacactgtggaagttttgttctttcgctctttgcaataaatcttgctcctgctcactctttgggtccacactgcctttatgagctgtaacactcaccgcgaagatctgcagcttcactcctgaagccagcgagcccacgagcccaccgggaggaatgaagaactccagacacgccgcctaaagagctgttaacactcaccgcgaaggtctgcagcttcactcctgagccagccagaccacgaacccaccagaaggaagaaactccaaacacatccgaacatcagaaggaacaaactccggacgcgccgcctttaagaactgtaacactcaccgtgagggtccgcggcttcattgttgaagtcagtgagaccaagaacccaccaattccggacactgcacaatcaggcaaaggaaaagctggcttggcagagcaggaggaggcttagactgctttggtttggactatcaaatagaaatagtgaggggagggctatgaagggatacaggcagtctaggcagattttccctgtctcagctcttgtctgaccgtctcttctctgtctgcctgttttgtctctctcatccctttaccgtttcttgtcctgtggttttttttttttttttttttttttgaccttaactatagttgtcttttttttgagatagaatttcactcttgtcacccaggctggggtgcaatggcgtgatctcagctcactgcaacctctgcctcccaggttcaagtgattttcctgcctcagcctcccaagtagctgggattataggcgtgtgccgccacacccatcagatttttgtatttttagtagagacagggtttcaccatgttggccaggctggtctttaactcctgacctcaggtagtctgccctcctcagcctcccaaagtgcttggattacaggcgtgagccactgcacctggcctgccttttttattcttttggtttttacaaaattagctataacatggccaggtatagtggctcacgttt

SEQ ID NO: 10276 - DNA, 1044 bp, Homo sapiens
aataggtttatcaaaaagtgtccaacatcactaatcaataaaatgcaaattaaaaccgcactgagataaccactcacacctgttagaatggctgttatcaaaaagtagaatgagacacgttggctcatgcctgtagtctcagcactttgggaggctgaggtgggaggatcacttgaacccaggagttcaggaccaccctggccaacttagtgagaccctgtctctacaaaaaataaataaataaattagtcaggtgtggtgacatgtgcctgtagtgccagctactcaggagactaaggtgggaggattgcctaagcccaggaggttgagttttcagtgagctatgatcacagacgctgctgcactccagcctgggagacagagcaagaccttgtctcaaaaaaaaaaaaaaaaaaaaaaaaaaaaaagtcaaatgataacaggtgttggcaaagatgtggcgcttgggaacccttttataactgttagtggcaatgtaaattagtagagctattatggaggatagtatgggaggtttctcaaaaaaccaaaagtatatttaccatatgattcagccatcctacctctgggtacatatgcagaactgaagtcagtatgtcaaagagatatctgcacttacatgttctttgcagcactattcatagtagccaagatatggaatcaacctaagtgtccatcagtaggtgactggataaagtaaatgtgtatatatatacacagtggaatactattcaaaggaaatcttatttgtgacagcatggatcaacctggaagacttaatgctaagtgaaagaagctaggcacagaaagacaaatactgcatgattcactttgatgtgaaatgtaataaagttaacactacagaagtagtgagtagaatggtagttaccagtggccggtgaggggttcttgaagggaatggaaagaaattgtccaaggggtacaaagtttcagttagaccagaggaataagtgttcaggatttattgcataacaaagtgaccataattaattgtaatgtata

SEQ ID NO: 10277 - DNA, 1048 bp, Homo sapiens
aagctctttagtttaattagattccatttgtcaattttggcttttgttgcagttgcttttgatgttttagtcatgaagtctttgcctatgcctgtgtcctgaatggtattgcctacgtttttttctagggtttttatggttttgggttttacatttaagtctttaatccatcttgagttagtttttatataaggtgtaaggaaggggtccagtttctgttttctgcatatgaccagccagttttcccagtaccatttattagatagagaatcctttccccatttcttgtttttgtcaggtttgtcaaaaatcaaatggttgtagatgtgtggtgttatttctgaggtctctgttttgttccatgggtccacatatctgttttggtaacagtaccatgttgttttgattactgtagccttgtagtatagtttgaaatcaggtagtgtgatgtctccagctttgttctttttgcttaggattatcttggctatacaggctctcttttggttccatatgaaatttaatgtagttttttctaattctgaagaaagtcagtggtagcttgatgggaatagcattgaatctataaattactttgggcagcatggccattttcacgatattgattcttcctgtccatgagcatggaatttttttttccatttgtttgtgtcctctcttatttccttgagcagtggtttgtagttctccttgaagaggtccttcacatcccttgtaggttgtactcctaagtattttattctctttgtagcagttgtgaatgggagttgactcatgatttggctctctgcttgtctattactggtgtataggaaagcttgtgatttttgcacattgattttgtatcctgagactttgctgaagttgcttatcagcttaaggagtttttgggctgagacgatgtggttttctaaatatacaatcatgtcatctgtaaacagagacaatttgacttcctctcttcctatttgaataccctttatttatttcttttgcctgattgccctggcgagaacttccaacacta

SEQ ID NO: 10278 - DNA, 1025 bp, Homo sapiens
cctttcgccatctggtctgagctgggtacatgaaaaaggaaggatgttaatctataacaaagaattagtaactaagaggtaaggggcaccatttaatctttcacaacgttttacagggcaagaaaaataagaaagaaggttaatctgtaataggaagaaacaaaagttgtagtgacttgcccgtatgagctaggtcttacaatcaatcacattttattcaaggctcagagtaatttaaagtttcagcagctttcatttaaattattttcacattagccatttgagtcttcatttctgtatatcttctttctcatttggggagcagattattttctctttttttgttttcttggcaggagttccttatatattctgtccattaatcacttggcggttttagatgttgcaaatatttcattcataatctgtcatttgtctgttaactttgcctatatcttcctttattaaatagaaattcttaattttaacatatataaattcatcagtttttccttttatcgttggcaatttggagcttttgttaaagaaatccttccccactgataaagtcacaaagttgggtgtttaattcatatattgtattgtttctttatcactaccataagtacgtaagattacaaatttaagattacaatcctaaatcttaaatttgcaatcctaggttggtagtttttgaagctactaagattcaataattactttcaagaattgaggtgaaatttatgtcataaaattaagcattttaaaaggtacatttcagtggcatttagtacattcatagtattttacaactgccacctctgttaagttccaaacatttttaccaccccagaagaaaaccctgtgcccatttagtagttacatcccattttcccctctacacaaaccatgactctcatccatctgtctctatggatttacctattctgtatgtttcatataaatgtaatcatacatagccttttaagtctgtcttctttcacttagcatgttttcattgttca

SEQ ID NO: 10279 - DNA, 1027 bp, Homo sapiens
gcactgaaaaaaaatgagctatcaagctatgaaaatacctggagaaactttaaatgcaaattactaagtcaaagagaccaatctgaaaaggctacatattgtatgatttaaactgtgtgacattctggaaaagacaaaactatggagaaagtaaaaagatcatggtttccaggggttaggggaaagggagggataactaggtggagcacatatttttagggcagtgaaactattctgtatgatactgtagtggtggatacatgtcagtatgtatttgtccaaatcctgtgggactgttacatgttatgagtgatatgctctgacactcctgggagactccttggttgcctaaggtgcctttcagccaggaggtacagttccccttgtctttgggacttttcttgtgctcataaagtcttttataaactttggtcactcaaaaggaaattttaaatgtgccaaattgaatggagctttagatctggccagtttaagaaaatttgcctaagctgtagacattcacttcctcttttcaaagagaaactgctttctccatgataaaatttcaaatgagagaaaaggttacaaactgtagtgaataagacaagcaagactttttaatctcagagaaaagtgaaaaaatcacaaatatacacaaataatggaataagagaataacaaactaaacgcctaccttaaagtagtgcttcaattccagtctcatcagttgttgaatcaggttccataaagtctgaatctcagtcaagccagggagattcaaccttgagagtagtctgaccaagggcttctgcagtcttcagcgaggtcagttggatgcaacggtccatgctggtgctggggctccagctgttggcaaaacagcaggagtcaatgaaggcctaatttgggtcccatctggttcaccaaaatgtcaccctgaaataatcaagaggcccagaatccaattttaaaagagtttgttcaagtgcaaaatttgagactggccacccagaaaaaacaagactcc

SEQ ID NO: 10280 - DNA, 1027 bp, Homo sapiens
tatttattgctctctctcatgtagcacagtgcttagatgaatgaatgaggtgtatatacagattatcacggaaatgcagagaagggtcatttttactagtctaggcatggagttgggggctattagcagtaagaaggcctcatggataagtgatttttgaggtgaatgtattgtgctgtggtcctaaactgctgtgaggtgaacaacgtaggcagtgtgacatcagtggaccaggtagccaagactgctgctaagtgactataagattggtagcatatagagcatggataccccagacaaaggaatgattcatgtccagggcaggatggagtgggacagcctgagatttcatcatgctactcaacacagtgcagtttaaaacttaagaattctttatttctggaattttccatttaatatttccagactgcagttgactataggcgactgtaaccatgaaaagtaaaactgtggataaggggagactactatgcctacttaaggaatgttttgaataatgtgataattaagtcagacaaacatgtatgtatgtttgcatgtatgtatgtatgtacgtacgtattagggacaagatcttgctctgttgccaaggctgcagtgcagtggtgcaatcacggcttgctgccgccttgaacttctgtgctcaagcaatccttcctcagcctcctcagtagctggaactacaggcacgtgcctccatgcacagctaatttttaaattgcatttttagacatggacctctcactatgttgcccagggctggtctcaaactgctggactcgagcagttctcccaccttggcctcccaaagtgctgggattatagttgtgagccactatacctggcccctcaaattactggttttatcatctaattctgaaacttctagacacattttcaaactgttaaaatcctgtttctgagtctcatcttagcaataaagaagctagagtaaagatcaagttgtaccctacatgaatacaagccacctcttcagcttcctggt

SEQ ID NO: 10281 - DNA, 1033 bp, Homo sapiens
tcatgttttgtttattgatttatcacttgatggacattcgtattgtttctacataacctttaacctgtttcactatgaaaaatgctgctatgaacatttttgaaaagtttttgtgtggatgaatttatgatttaatttctcttgggtagaatttctgggtcatgttgtaaaccttaagttcaacatttttaaaaactgccaagctatttttcggagtggccgcagcattttgaggcttctcctttccctgcatcctagcctacatttgttattttcagtttctttgattataatcatactaatgggtgtaaagtggcatattattgtggctttgatttgcattttcctaatgactatcaaaagacaaaattacaacaaattttttaaaatttaaatttcttcatttaacaattctagaatgggctaacgcttcattctgtaaaatagaatgtattctgatgagctgacctgaggttttatagacagaaaatgactgaaggaaatataaacaaagaacaagaagtgtattggtcactttaaagttactttccttgtaaggcgcaaggtgggaacagtgaaacagaacaatagaaagtaactgattggttaacattaggtcacttcaggttacattttgttggaaggattaaaggtcgagggaactttgttatcatgctgattaaaagtggcctgcttgagaaattcagccatctccctctcctgatttctaggaatgccagataactcagtttcagtttgatggtatggaactttagtgtgagtgactccattactgcactatgcctagtgcagtagcttagcccaaaacaatgccttatttaacatgactaaggatgttggacgtcttttatgtacatattgaccatttatttctcttctttggaaaaatgtctatttaagtcttttgccttaaaagactttaattgggttgtctttttgttgttgggcctgtaggaggtattttatatattctagatacaagtcttgcccctctcctccctcccacccccta

SEQ ID NO: 10282 - DNA, 1089 bp, Homo sapiens
agagtatacatgtgaatatcattttctttttcaaagtctttaaaaaatacattttttcataagaactgatttatattttgttcatcccatgaaggctcttaaatttgtctagcaatcattttttgagttcctagtatatgccaggcattgtcagcctgcccttactgcagatattttttaagttatcagtttttcttattggaggcagtcgaaagccttgcatttaccagtttgatagctatttaaaatcattagccggttgtataataatggacagagagaatggtatgatcatgagtggtactttggtacttcttttatttgtttactgatttctttatctttaagatgtcaggattcttgtttatatatttggttgattctatcaaatgacaaaatttgtatgtaactgctttctccggttcagtgctttttgactcttaataatggtggtggtgctttatattattgaacaaagtagtctctgggagaagttgtcctgataggttgaagtcattcagaatgataatcaaatgccgtcttcattatacatgactggaagaattcttgacgttgatcagcattctgcaaaaaagcagaataaaaatgccttgttgaacatttagagtgggggtattagcatctgtgtatatgagttcaaagaaggcagcaggtgacaaaataaccatatgtaaattctggaaaacattctcttctaggtgtttattttctctttgcactttaattttctgcatagtgaagccaagaattactgtaaatacatttctaaatcccttagtctaaaccactgaatattcaataaatggctgggaaaaaaaggtataatttaaaggagtctttacaaataaaaaggaattgttaaagagacccaaatgaaacaagtaaaaaagtttttaatgtgcataaataaagatacatttggagataactgcattgctaccagggaaatcccataagcagctctgagtgattgtatatatataaaatataagagagatatatatatataatataagatatatatgatatatatacatattttatatatatatcttgacctctaaataa

SEQ ID NO: 10283 - DNA, 1060 bp, Homo sapiens
aggagttatgagctgggaactgtggatatataatcataatatcacaagtgggttgggacagaccccagggatttatgctctgactggattattgccaagagaaggtacaatttctgaggcagccaagatcttgcctgaccaaggactgcaggaccaccaattactcagacatcttgtccttcaggcctgtcttgttccctgtgattaagaattatccatccattccatactgctaaactggctgtgagtatttttctcaaaggttcatgtgggctttcttatatttgggcaactttttaaaatttgaaagtgccacattcctcagtttttaaatgtattcatcaatttaataactttttaggcagagggaaaaaagtcatactgctcaaaaggcatacgtggacacattccaatttcaaaaaaacattaaaatatgaaaagaaaaatcacttcttggaatccaggaaacatggtacctgtttttcctctttggtagctctgccaagctctttccttcttgagtaccaggctcagatgctcagttttgcagctgcctcactagagtctctgtgaaaagctctttcggtttcatcttctgtttaaactgtggaaagtaataagaagtagctgctaatgagcagcggccttgggaagtcacagcccacattaaatgggatcatctgagatgggcctctacagatgctgttccctccaagtcaccattaatggacatatgtggattcagcaaggagcagctttaaaggataaattgacacaggctttttcactgttcaaaggcagaaaaatatagattgtcagtgaataatgcatagcaagtttgaggcagattttagaatttttgcatgtgtgagagagaaagatggagagaggagggagtggggggggcctgtttgaagccattctagcagaaaatattcagtgagggtttcccatgaaaactattgcttaataactatctttagttcttgacatagcctggaacataactagtttcatccagcaaaaatttactgagcacatataatcctaacgatgatga

SEQ ID NO: 10284 - DNA, 1049 bp, Homo sapiens
aggctttcacacgaagcagtgaaaggagcctcagggtaagagtcagaagcccaagttctagttctgactctgccaccacatcacccaccgtgacccttggtttcttctccaggaaaagaaagcaagctgaagctgtgtggaatggggtggagcagtgagaagagcaggggttctgggtgggcgatttggggccctgtgcccatcatgccagttcccacctgtgtgaactggctggggtcactcttcttctctgagccttggtctctgggtctgggaaagggggctgaattttaacacctgccccacagggctgctcagtcgatctctttagacagtgtagtgactagcatgagccaagcacatactattgctcaataagcaatactattggattccttaagtaattaattaattagcaagcagtttaacttaccatgagaaaataaatgtctgtatattcttacaaccacttttactcccaaatttagtcctttgcctttcaaagagctccaagaacaataaaggttctcaaagaaagagaaaccacacgctggaattccttcttcaccaagcacctttaaccgtggtttttgaggaaaactcagtgtttcgtctgttctcacacaatagtcatcaacagaagacttctgtgaccaaatataggcagaggtggggttctccccaccatgaagcaagcaatcaactctgcagtggacaccagctgggtgtccttcaactcaattccaacactatctacctggagatggcctcaaatcccaccggttgagggctcagtccccaaaactgcccccccaaccccaccccatctatcatacttcagacaccagtcacaagtctgggcctctggaacttctatctgactggcttctagttgagattttcatgactgcttctttgggttcagttaatttactggaacagctcacaggactagagaaatacttacatttaccagttgatcataaaggacattaccaagggtatagacgaagagatgtatatgacaagatatagggtaaggggcgtgg

SEQ ID NO: 10285 - DNA, 1100 bp, Homo sapiens
ccgcatcaggcaggtcaccactagtggagagatctcactcgttgctggggcccccagtggctgtgactgtaaaaatgatgccaactgtgattgtttttctggagacgatggttatgccaaggatgcaaagttaaataccccatcttccttggctgtgtgtgctgatggggagctctacgtggccgaccttgggaacatccgaattcggtttatccggaagaacaagcctttcctcaacacccagaacatgtatgagctgtcttcaccaattgaccaggagctctatctgtttgataccaccggcaagcacctgtacacccaaagcctgcccacaggagactacctgtacaacttcacctacactggggacggcgacatcacactcatcacagacaacaatggcaacatggtaaatgtccgccgagactctactgggatgcccctctggctggtggtcccagatggccaggtgtactgggtgaccatgggcaccaacagtgcactcaagagtgtgaccacacaaggacacgagttggccatgatgacataccatggcaattccggccttctggcaaccaaaagcaatgaaaacggatggacaacattttatgagtaagtactaaaacaaggccatttgatgattttgtttcattaattcattgtaggattggaggtaaattgatcgagtattttattttaattcaggatttgggataaaaactattacttataatacattctacatgttcatattccacatgatttctcctaggaaggaaatggtctagtggagaaggcataagctttggagtcagaggagctgggcatcagttcccactctaccatggacttaatccctattggcctcagtttccacatctgtagaatggatacagtggatacctgcccagcataccacagggagatggtgtagatgaaaagtacttacctgatgaagtgctagcatcttcatatgaccactgtccacaaatgtggcaaggggagaaggaacaggcacatgtggatgaattttccacataattgaagctcttgtcttcaaattccaaaaaaaaacccttttcattttaaccattttgcat

SEQ ID NO: 10286 - DNA, 1031 bp, Homo sapiens
actgagatgcttacagttttcagccggtacggtgtgtctctgtgcttttgattatcttgttgctattttctagagggcctcactctattccttccactcctggttaactcttactcattctaggaaatatagtgcatatatcatagaggaggctagacttccaagtccatctcccttacccgatagcactcttggcataactttgtcacctcactcactactttatgttgaaactctttatttatctcttagttcatatctcccaaaagacatgaaatccctgaagaccagaattgcgttttattcttctttgtaataccaacttcttgcacaccccagtgttttgcacagaataggcatccggggaatggtggaaatgaacacagatcagaacaagctataaactccattaggacaagtctctgtttgtcttattcaccacaaaatcccctgtgcctaacacaaaacagagattgatactctttctgagaggtgtctcttcatttattgccttatgtctgtatcttccctagtcttcaaacaactcttccgattctccatttcccacccttccactctggccataatagaataactggaattggactagccatcctaccgtaagcgattgtaaaaatgaacacagtgtatgaaattactattttctgattttagataaaaggcagcacaaagctatggcttccaagaggtagaaaactacacaagttacatggtcgttccagctttcagcttagaggaactttataaaactcccaagtagtagagttcagatagaacacaaccatcctactagtttagggccattgacaaatctggaatttgtaggatagggtactagagagaaaaggctacagaaatctgcattgaggtcctcatgagcctttgattaaatgccaagcttcacatatgcaaggaaaaacttcatgtggctggtcaaagaacatctactggggaaaaaacaactgccaggaaataaaacaactaccaagcagctgcatgctgacattcac

SEQ ID NO: 10287 - DNA, 1032 bp, Homo sapiens
catagtgattatgatatggaccctgtagccatgctgcctggattcagatcccagctctgcccatttactagaaatagaaccgtgagcaagttaacctctctgtgccacctgttcctcatccataaaatggggatgatagaaagagtaacttcctcctaggattgtactgatgatgaagcaagctcatgtttgtgaaggccttagaacagttccgggcaggtgcagagtaagtgctgcatacttatttgataaataagaaagtatattctagacaattactctttggtcaaatagttattgttttcctttcactaacccatcaaaatattcatgctgttcttcatctctaatctacttacattatagctcacttggcagctgccatgaagaggtaaagttaccaacaggctgttgtagaaaaagcagaagatgcgggtcagcagatgagttcttgtcccatctctgccattgccctgcactgtgatcttggacaagttgccattcctttctgaacctcggttttcccatctgtaaagtgggagagttgagccagctgacatcaaagagcacatccaaccctaagccctgagtgttggtgacttgctcagtggcttcccttcagggacaggcaagaggaccgacgtctgtcaagcacctactatgtggcaggcactgcttagctctttcctcacatgcttcttcctgtagtcctcccagcaacacaacaggaagatagcatatctttgcattacacttggagacactgaagccctgagaggttaagcagccagctggtcactctgctggtagggggaacacaaggaccccagcctgggactgcctgtccctaagcagcctttttccactaggctgggcttcctcccagagggtattctgcaaaggtgtgatccatgaataaaagcatcattacccagctatgctggggagattcctgccctccttccctcatctaggtagctatgctctggcgctagacttgagttaggatcctgcctttgccacttcttcact

SEQ ID NO: 10288 - DNA, 1022 bp, Homo sapiens
ttgatcatcacctaacatgtcagagttttgtttgttatctgacttccaccttagactctaacattgaagtaggggctttgtctgtttattcttgatccctgaatgtagagcaatacctatgggtgctcagagaggcttcaaatatggagggggagaagaaagaaaagaaaagaagaggaaagggaaaaggaaaaggaaagaaaagaaaaaaaaagaaaaggagaggaaaggaggggaggggaagggagaggaaaggagaaagaaaagagaaaagagacccagtctggtggaggagcactaaagtaaggatgatgggtgcactaggtttgaaaaccaagggggctccaaccctttgcccctgctttaatgagaacagttcttctatctgtttatatactgaataccaatataaattttattttggaggaaaagtttccactgctttgaaaaaaaaaaggtttaaacaattcgtttaaaacaactgttctaggccacgggtcaccatgttagggcttagaacagataagtggcacggtcatgtctgcatattgtgaagtttagtctgtcaggggtatggttagtggagaaggggtgaaaccagagcagagaatctagctggacaagaggtaaaagcaatgttatcctttcaatcagaaaaccaaaggaacctgcccccaccctgaccggtctcctacaggaacctcagtaaattcccatttatttctctgttcttcagaccgatgttagatgcattctttggtctgtgctttctcttcctgaataaaatgattgtatttacatgtgctaaataccatattattatcactgactatacactatataacatatattactatatactaaatactgtattaaaaggaacatatcttctcatacacatgaatatgcatacagcttcatgttggctaattagtttcactgagtcctttggaaaaggaggcagactaaaaaatgaaggagtaaataattaggtgtcaagtaattaaaagtactattgagaa

SEQ ID NO: 10289 - DNA, 1201 bp, Homo sapiens
gaaacccaacacagttgccattttctagctgtgtgaccttgggcaggttgactatcacctgacctctgtgagctttcattttcattttatttccctgcaaggtgggagagaagaacccatctgcccacctactgtgagaatgagtgaggccaccgtgtccctggcactgtgcttcactctttggtaagtgtcagggaccctgctatgtggatggacacttgtaggatcagatgtgtcagtctgtggggagtttcctacagaagccatccagcccaactcgtcactcagcaggtgaaggacaaaaagagaccatgacttgcagcaactcagagtatgaccggccgggccacaagctttgtctcctgattctcagtccaatgcaccagacagtgccgtaggacctagggaaaagcggaatacaagagactaaagtcaaaaatgatcccaccacatgaaacccctaaaatgtaagtcatcctgatgggaggcagcatttcacatggaaagaacatcagtattccctcactgacacctgagttccggctgccctgcccacctcactacttgtgaggtcttgggcaggtcatagccgtctgaggcccaggttccaaatctgtcaaatgaggaagaggatgagtaaaattctagaacagggaccttagtgagctgctccagaaatggtacccatcattatgaagccttcttttcagtcctcaaatactgaaagaaaatggtgaggttggtgctggtgggaaagcttgctgtcctgggcatcaatcagggcctctcactgctcaggcaggggtcctgggcgctgggaggctggagaggaaggggaagaaccaagaggaacttgtgaggctccttgagctactcctgtatcttctgccacatcccctgcctacaaccttgctgggaacagagtcacaagcaagcagctttgagctgttggccagaaaaggctgtcaccacacaatccctgtagggaaaataatcatatcgtctaggttattcttgaaaactttttctaatatgctcaagatactgatacagactctgtgctgaaaatatttttttttttaattttattttttttttattgatcattcttgggtgtttctcacagagggggatttggcagggtcataggacactagtggagggaaggtcagcagacaaacaagtgaacaaaggtctctgg

SEQ ID NO: 10290 - DNA, 1048 bp, Homo sapiens
gcactgtcctttcaatgtagcaataaacaaaacagaccaatgtcatgaggcttctattctggcagaggagacaaacaataaacaagttaatgaacatacaatgtccaatgctgaagggtgctagggtggtaagcagggtggttaagaatggacaggaatgtgcagtgttggcacagagaagacagggttcaattacatttggagtggtggatcaaagaaggctcccaagaggaggattttgtgctaggctctgacttctgaggggagttttaagttagccaaggggaagaatggcatttttggcagaagaaacagcaaaagtatagacatgaaactatgaaaggatatgggcatgtttggaaaactgcaagcaaatctggtgtggaagatagaaagaaaattcaggacttgatgctggagaagtaggttgtggatagactatgagggctttttggtcttctgaaggtggaagctagcagagactgcgtagatgctgccaggatggcagaacctgtctaccaaggctgctccctgagcttttggccaggggcccagtaggagtacagtcatggcttttgcaaccaaaaaatggttaaaaacataagggacagttcatcccaatagttcacaaccccagtcttatcatgagaagaacattagacaaattccaatagtggggcatcctacaaaaacctttccaatactcacactaacagtcaaggccatcaaaaacaaagaacatctaaaaaattgtcatagccaagaggagcctgaggacacatgatgactaaatgtaatgtgtcctgcatgggattccagagcagaagacattagggaaaaacgaaagaaatctgaataaatcatggacttcatttaataataatgtttcaatattggttcattcattataacaaatgaaccatactgatgaaaggtgttaatatggggaaaactaggtgttaggtatagcaggtctgtgctatcgtggcaatttttctataatctctaactggtttaaaatttttattaaaaaacaggagactttttt

SEQ ID NO: 10291 - DNA, 1056 bp, Homo sapiens
ttttttttttgagacagagtctcactcttttgggcaggctggaatgcagtggcgtgatctcagctcactgcaacttccgcctcccagattcaagcgattctcctgcctcagcctcctgagtggctgggatcacaggcacttgccaccatgcccggctaatttttgtatttttagtagagatggggtttcaccatgttggccaggctggtctcaatctcctgacctcaggtaatctgcccaccttaacctcccaaaatgctgggattacaggcgtgagacaccgcacctggccagcatattcttcttatacactgaattccatctgtcctgttcttaattgtctcagctttagactctggggatattcaggagttccctctagaagagaagccttatcattttggttttgttttgggggtgggggggtgtttttttttttttgagaaatacaatattcatccagaaaagggcacaacacatacatgtactgtccaacaaataattgcaatgtgaacatcatgttaccactactcagggcaaaaaatagaacaccggtaatattcccaaagctttcttgggctcctcccaagaaacaaccctctccctcttccctcacctccacctcgtagtaacacactcatgtcgtggagaacctcatcattcctttcctttattgtttggcatctaagtatatgtatccagacaacccagctgttttgcctgttttcatttttcatacaaatagaatcatccaatacatatctctctgtatctgaccctctttgctcaatgtcatctttttaagagtcatccaaattgtggatagttccagtgtgttcctttgtgataccccatcatccaggtatccagaagttatcgattctactgttaagaggggtttgggttatttcccgtgtttgactgttacaaatgatggtgctatggacatttttgtacaagtcttttgagaatgctgatgtgttgggtatatacctcagaaaggaattagaggttcataggcctggtatctctagctttactagataatgccaaatt

SEQ ID NO: 10292 - DNA, 1028 bp, Homo sapiens
cctcctaaagaaaagcaaaccaaaaaaattgtagaagccatcacgtcctacaaaacccacagctctctctctctgtatattcccagcccagcctccagacccaaggaaggtgggaagagctgtccccaggggttcctggtgtggggttccatatagagccgaagatactgtgggggctcattcccaagccaagccaatctattttaggacatttccatcatccccaaaagaaaccaggatgcttcccccagcatttcatggaatcacagcaagcatttcttgaaggaattcacaggaacaggcctagcatgggaccgggaacagagtttgtgtctaatgaatgtccattccacagcccctggagcagggtttggtacaggtttgtggggtcagatctatcagctttccccacacacaagcatggaggctaccctgctagttcagctcagtttttctgcagaggtcgatctccaggtatgaaattatgtctggacccagggtcagggggtcgtacttcccagtgaactttccacacaaaaggtccagtctccatggctcaggtcagaaattacccactagacagcctccctctccaacctgccaggtcaaggcaaataggaatactgccccctgtgcctcatggcaaattgtcactcaattatggccactttagaacccaggttatcacaaattgacttggctgatctctctaaattgcctcattttcatctatttcttttgctctgtttccaagaagaaattctgagctcaggaaacatcgttttcatagcccagttgtccctttggtcaaggagttgtaagagaggggaatgaagtgggttgggggaagatttggcattatctggggttggatccccagaagaacctcaggccagtctgtgtcaggagtagggaatactgggcaggtgggagggcccttttggcagtaatgaggtacagccttggagagccttgagttggcaccggaggcgtgctgcttgaggaggaagaagggagttgaattaaag

SEQ ID NO: 10293 - DNA, 1663 bp, Homo sapiens
gggagggcttttgcttctagtgccttccccaagacctcatggaccgttgacttgtttcatcatgtggagcttcatcttatgcaagctgaagaaacagtatgccggtttcattgctgcaagataattgaccccttgtgacttcatccagaaggtagcagcaacatgtgctcttagtgaaagatcagcagctgggagacacatatgagctgggaaagagaggggcttggagtggctctggacgacctgggcaggactaggattctgatccctgactcctgccagcaccagggctcaatttgcatgaatcaaggctgtgttctaagtcctgggactgcagtgaggggtgctagtgccctcatctataaaagctagaacaggaacaagtgcttggggagactacatatgaatactcattggcagagggagaagtatgctgattaacagcatgatgacctgtcagagccttcatggacttgtctttgggtggaaccagggctttgcccttttggaggctggccctgtacactggagtaataatactgcgcctggaagctggacactgaaggcacttacttccccacttccaccccctcggcccagcaatggcttttaaatcatgctctgcagagccctgagaggttaatgaaatcctctctgggatttccataggagataggcagattttctgctgacttctaggcccccaccctgcagatcctcttctccctgtttgcagggtgggcttccttgttgctagggtggatgtttggctggcacacccccccatgaccatgctgtttggttgtagctgatctccattctcattggcagtgtgcctgtaccacagcaattattaaatgttttgaattttactcttgtttgcaaaccttctttggacagaggaaaaccgtgctgttccatgccagctgcatcctaacttaggcacatcataccagtgatcaaccttcaagccactgctacacagaactaaagcagttttttgtctttgagaagggttttctgtgcttccccgtgcatcctagggtcacagagtcacctggatgtcaccaatccacatggctatgtggggtttggctatttgtttactgcccatctgcccccaccaccatcaccactccacccagagccaccacagcaaaaaccctggttttcttgcagtggcagatctgaaagctggagtttgtcttttccatcccagcccctggcatgtctcttcaggaggcagatagcatgcttcattgcctgcctgtggacctggctcccagattcactcagctgtgcctttacaaacaaacagctctaaatgagcaggatgtgccagcttttctgggaggattccttatgagtacctactatgtactttgcattcattctcccatttaaatgtcacatctttccctgtttggtgtcattccagttgcacagatgagggaacacagaataagccactttctcaataatgagtttcccatcaataaaatggtccaaagaggaagaagacagtcatttgttgtggtggtatcagggattctagcactggatggttagatcatcttctggattacaggatgctcatcagtgcttgttccaggatctgatcaccaccgagatccctggatactgcagtggtacaaagggagcg

SEQ ID NO: 10294 - DNA, 1042 bp, Homo sapiens
gtgatttcttgctgctcttttacatcaccttttcagatgaatcatttgggacatcgaaccatcaacagtgttgctgtaaacgctttctgcagattcataaatgagatcatgctctgaggagaagcattaagcagcaatttgggaagcgtttgaggctgtttatttgcctgaaagtgtagcagccggggtggtgggggatgcatgtgttgagtctgaaggcagcacttttctcctcctgttagtgtaggaaacatctcattagttgttttggtatccaggagtcctggtgtgtccaggctggatgagataagaaggatgtcctgattaaagcccctcactgtcctcatgagtaaactgaggcacagagaggccaagggacttgtctaatgttgtacagccagcaagtggtacactaaccctgaagctaggcctccttctacttctgagatagaataattgctaggataaatgcacatctcttaccttctccaaacctcggtttcctcagctgtgaatcagggatgcttccacctttttgtcaagattgagaagaggatgctaagagaagcatttatgcagagacacctagctcagtttttagccctgtggccttggcaggttgtatagcctctctgagcctcaatttcctcatccctaaaatgaaagctatagggagaatttgaaaacctgaatttcagcagtgcctggagcactgtaatcactatgtaagtgttagctattttcattattatcattatcattatcttcattcttatcatcattatcggcacagaataagcccttagtaattattttttccccttttatgtagacagagttgcaatgtggctaaaatgcgggttctggatataagcaaacatgagtttaaaacctggctctgccatttactggcagtgtaacattggacaagcttctcaactttcctgagacttagtttaccacatccaagaagtggaatagcaatagttaccctgaggagctgctcgtgaggactagaaataactcacctgtcacatcattt

SEQ ID NO: 10295 - DNA, 1046 bp, Homo sapiens
gactaagagagatggtgttaggaaaagtgctgccaacaggctgaaactgtgaaccaggacctttgaaaagctctggggattcccaaaggataggggaaaaatatgtttttcatggaataacatggataaatctcacaaatctttctatattttctatagctgtaaagtaaagcaaatttactttagaaaaggggttattttttgaataagaatttgtaacagttagattttaatgagggtacataatttgtaattaggcattattcgctcttcaaaatcttgttctaactgggtaattaattgcatttttgattatagaagttaatccatatatactctcatcttaacaggggattacttttttgtagatgaggcacaaatagagggtttaataacctagcttctttcagtcttctatgattgaaaaatctcccgatctaaaatatgtgatctgaatgaacattattgaccatctggtggaaattacccaaaatgttgacagtgaacttagattagtggttctcaatcttggctgcacaccatgaagggaactttgaaaaaaatactgatgcttgggtgacagccccagaggttctgatttgattggtcttggcagcaatctgggcatctggattcttaaaagccctttaggtgtttataacgtggatccaaggtgaaagccactggcctagagagagttaattcactctcatggaactagcctttctttctctccaatgccactttgggctgcaaccctatgttgtgcagcccacatcattgctcggtgaccacaggctttagaatgtgcagtgatttttcatgaaagggtggctcctgaccatccattttattttattttattttattttattttattttattttaattttattttttgagacggagtcttgctctgttgcccaggctggagtgcagtggtgccatctcggctcactgcaacttctgcctcctgggtttaagagattctcctgccttagcctcccgagtagcttggattataggcacctgccactactcccagc

SEQ ID NO: 10296 - DNA, 1025 bp, Homo sapiens
agttccccaagtataagagctaggactacaggcatccagccatcatacctggctaatttttgttttgttttgttttgtagagactaggttttgccatgttgtccaggctggtctcgaactcatgagtttaagtgatcctcctatctcagccttcccaaagtgctggcattgtaggtgtgagctactgcacctggccaactttgccacaaatgaccagataattctttgttgtagggggtgttctgtgaatcacggatgttgggcagcatccctggcctctatctactagattccagtgccttccccgccaattgtgacaaccaaaaatgttgacagacattgccaaaagttcactgagcaaagaattgccaagattgtccgtccctggttggaagccactggactagcttgtatgacttttggcagacaaactaaactcttggtattagttccatcttttttaatgtatgacaacaatacctgctgtaagaatgaaatgaaatagcattaatcaagcttctaccagggagcctggcacaaagtagacagacacatctgagaaagaaccttcacacccaggttagtgggggaggcagggaagcttcaaaaagtgggaagcatttgacgtcgacttgaaggatgagaacatattttccaaaaggactagaagtattgtgattattattattcatcctccttcctctacccttgcaggcctcctctcacttgctggtcactccttcttctctcctgtaaaaatcaaccaaagagactcttctaaatcctcagctcctggaaacaggagatttggttctggcctcacatttaaccctccctgcgcctgctgctccaggagtgcatagactcgccccttgttctggagcaggccaagaatgacccgtttccccaccttgttaagtatgaattggaaatttgtacccatgcagtttccttgcaaaaaaaaaaaaaaaaaaaaaaatgcacttgtaagcattcagagctggcttgaacgagacaggagctac

SEQ ID NO: 10297 - DNA, 1048 bp, Homo sapiens
tgccatgtaattcaaactgataatttagcaaagtgtttccctttagaggtcctttttctgggcctactttgaaagtggatcgagacatgtaaaaatttgcatcattatcatgcaagcaattaaagtgcttaagagcttaaaagcaatttgttcaagttggttaaatatccaccctccccaaccttgtttgtattattaatttactcatcaaactgtgacatcaaaactattgtgaaggtaaatttcagtatcttctgttcggtaaaaaacttttaaatgtgaagggcttgtattgatgaggtccacagtgaaaggatccagttcagggtgagtcagagaaaccagctttttactaaataaacccagctctgctttgacctcaggatgagaactgatcatttaaacgttttattaatgtgcaattattctgagaaccagtcagcaatgcagctctttgcaaacattaattagctgaccctcacatcatcccacatgacagataaatagcattcacgttgcattggagaaaacaaatggacacacagagatgagggaggaagaaggcagctcttgccttgaaagaaatgtggtagaagtaggtggaattagaagaccatgtaagttttttacttcataaatatttattgagcaatgcactagataatctagagctattctatgcaatatagtagtcactagtcacattttaaactaaatttaattaaaatgaaacaaaactaatcatttatttccttggttgcactagccagatttcaagtgctcaacagccacatgtggttagtggctgccatactcgacagtgcagttatagaacatttctatcattgtaagacattcgattaaggttgggattaaaaaaaaatgcaaggatccttgccattgtgaactccaatgtaaaatttcctaaaacaatagctgacacatggcaactactgagtaattcaagttgtggttaagttctttgggctaatggttagggacccagcttctggagctagaggactgggttcatttcctgggtatgcca

SEQ ID NO: 10298 - DNA, 1044 bp, Homo sapiens
gaagtatctatccatatgataaattagatcctcagatcaaatcccccaggttacaagtttataattttaggtgttaaacatgtaataggtttcttctagcttatctgagtgttaacatgaaaaactaacaactttattttttcttctttttttcacttgcagcaatggtgaactagacccctggtcaggaggtggagtaactaaggatatcacagacactctggttgcagtcaccatctcagagggggcccaccacttagatctccgcaccaagaatgccttggatcctatgtctgtgctgttagcccgctccttggaagttagacatatgaagaattggatcagagatttctatgacagtgcgggaaagcagcactgagaaacttttgattgttttcaatttcttcttttatgttcacaccaccacattcccattcactttgattttctacatgtaattaccttcttttgtttatcattagatttgatggggccaaagttgagatagaatagagggtgatgacggtaagagcaagtgtcccatgaatgtgatttcctgggttctcactgtctttgcaccacgtctaggaagaatcttcttgatagctctcccacaccatcagtggccctcataactggagtagagttcctggttgcttttcataagagggagagttactttctttgtatctctgcaagcagagatttctctttggttttgaggttgaagtgtctttggcccatttgtaagtccccatccctaccctacacaaagtaaaagcagaagatagataaaaaatgatgtaattgcagctggtaggatgtctggtgccaatccaggaagtgagagccatttcttttgtaccggatttaatgactttgaactgtgctgtaaataaataatacagctggaccttatacctgtgtgttgcttctgaagctcacttcaactccggctgatggaaatgctgtgtgcactgggcttagctgtttttggaaagtcctttaattttttctcttccacttggcagcttttcttagttc

SEQ ID NO: 10299 - DNA, 1025 bp, Homo sapiens
cagcaaaaacatcctcacttctagaaccatagattaatttttacttgttcttaaatgttttagtaattggaattacatagcatgtcttttttgtgtctactgtcttttgcttagcactgtttgatagatacatccatttgttttactaagttgtagtttatgtattcttgttgttctatagtgttcctatttattcattttaatagtatattaaaaagggagaataattctgaatactaattatggtaaactctatgaggataggcaacttgtctgtcatgggattctccagttgctctgaaaatatcctgggagaaggggtataaaagattgagttttctaaaatactatgtgaagaataaatgatctgtaaagacatctgttgaccagtactttttagattccaacagtgtgattctattcccaggcagtggtttgcagtggcttactggagcccttcacttatgcagcccattaacttctcaggacatccaacatttgaaagactggatctctgaaacctgggtgaatctggcaatggtggactatccttatgcctctaactttttacagcctttgcctgcttggcctatcaaggtaataggaaaatgtcctgtcatcattttttaataacacactttttttttaatgtgcatactctgactttctgcctcagagaaagtcccagtgacaaaggggctccagagtttgtcaaacttgagctggaatcctgggttctgctactttctgattatgtgggcttggacatgttacctagcttttctgagcctcagtttcctcatttgaaaaatggagatagaattcattgattatagagttgtacgaattagaaataatacctaaagttgctgttaatggaataattactatgtgccaaatcctgggctgtgtactttgcatgtataatgtatttaatctttgtgatatatgtgtaacttccatctatgtaatacatggttgatgcttaataaatggcagtcattatcatagcaccatgatctagt

SEQ ID NO: 10300 - DNA, 1040 bp, Homo sapiens
ctttgttaagggtttttgcatctattttcgtcagggatattggcccgaagttttcttgtttcattgtgtccctgccaggtgttgtatcataatgatgctagcttcatagaatgagttagggaagaggccctcgtccttatttaaaaataatttcagtaggatttgtactggctctttgtacatgaagaccattttagacataatgttgatgctagggctagagtgtcaggataaaaagacgtggatgactagtggatgagcaacctgggattatttttaattgtttcactcataaagtgtgagattgatatgcaacaataagacatcaattatgtcatttatttgtggaacaaacacaaattgtgcaactttgtagagtgctctttttgttctggcttaacatctattccatatggtttgccaaaaggttcagtgactttttttcacattctgattttatcctgtgattttgtaaactcttcttaggggttcatgtgggatgtggctgaggaactgaaagctatgttggtgtttgctgaacatcgatactatggagagtctctcccctttggtgacaactcattcaaggtaaagatactttttacttaaaagttacaagctttttcttttcaatttagaatagtttctaaattatatgccccactgtgagataacttaaatttgaaatgcctaaaagctcaatagtttatatttaatagtttctttttagatacaatttgaacagactgagggttttttttaagccattttattataattcttaatgttaatcagtttttaactctgtgtgcctcagaaagttaaattttactctgtggctgcagagacagcacagggagctttttattatttcaaaaatatcagtaaacaattccgctttataaatcgtacacttaaattattgagcctgccactggaaaaaatataatgagcataacaaatttatctgataagatgtttttaataaaataaaatcaataaaataaggacaaataagctgtatgatgcattaaggccaa

SEQ ID NO: 10301 - DNA, 1089 bp, Homo sapiens
cctggccaacatggcgaaaccccatctctactaaaaatacaaaaattagccaggcatggtagcaggagcctgtaatcccagctgttcgggaggctgaggcaggagaatcacttgaacctgggaggcggaggttgcagtgagttgagatcgcgcaattgcgctccagcctgggcgacaagagcaaaactccacctcaaagaaaaaacaaaacaagacatggggcagctgaggccttttgtataccaggcatttatcgagttattcatgtgggccagtttctgtgataaatgatttgcaaataatacccaacttaatctgtattgttatttttatttttacagatgaagaaacagctcagatttgaccaagatcacacaagtaggagttgaggaattggaacccactatgactgactccaaattaatatagtgtttatagccacttacataataatggtaaaggttttatttttttcactatacaatatgtagtagataaatttactgaggaaatgagacagcacgtgacaaatccttaaaggatacacacatgacaggaaggattagaagaggaaacagaaacaggtaacagagaagcagaaaaagtaaaatctcccaaaataaaaatagaaggaattaaaaataaaagcagactccgggtgcagtggctcatgcccagcactttgggaggccgaggcaggtgaatcacttgaggtcaggagtttgagaccagcctcgccaacatgatgaaaccctgtttctactagaaataaaaaaattagccaggtgtagtggcgtgcacctgtaattctggttacttgggaagctaaggcagaagaatcacttgaacccgagaggcagaggttgcagtgagccaagatcatgccattgcactccagcctgggtgacagagcaagattataaagtcttctcaataaaatcgtctcaaaaataataaaaataaaagcagaagttaatgaaatagcaaataaaattgatgatagtaattagctggtgtttgaaaagaacaataaatagaaactcaacaaatctgaggaagaaaaggaaaaaaaatggtattggaaacaaa

SEQ ID NO: 10302 - DNA, 1049 bp, Homo sapiens
cctttttttttactcgcctcttctctttgtttgactcacaagaagcgctgtcttcctataagcaaaggaaaagagggtcaaatacaattttcatgctagcacacattttcgtctttctacattgcctgttcaaaagaaaaaaaaattaaccatgctagtattttcaactctgattaaatttcttttaggattttatgtgaataaattcccaaatgtgaagtaacagtgcattatattgtgctgaatcatatcactaggaggcaccttaagaactagagaaagaatatagaaaatttagtgggtaagaagtggctacttgtcagatatagccaattttccgtcttatctcattaagttttatctctacctaacagatccccagacactaatatttaacaacatattggtaactgcaagtgttagtatgtcatcttctggattcttttgccagtcccatagtgctgcgaatcattccctagcttccccgcttccctcttttgtttttgtactgcatccctctactgctctagtctcattttgcactttgcctggtctcctggtctcactgtttctaaatatttcttatccatcttggtattcttaagacccagcacagaaaaatcaataaataccatgggaaggagcaagcagggctagaaacacaatggatggtcactagatattaatcatctttgagtaattcttctaatcaaacatgctctgcatctagttaggcaagccagctccgaacacagaggctccaagaacagcaaaaggtgcatatccctggggagagcccatggctggagttagttctccaaggtgttcctgcccacaccttttctaatgagtccagttagtttaactcaatagtgtgtgaacacgtaagtaagctgccattatccaacaccgcctggaaaaacaaccatgcatctggtccctcccatatccctcagctgcaaacttgagagtaggataaacttctagctttctcttacagtggccaggtgtttgtgggcatagggtaatacagatggtctcttgaaaaa

SEQ ID NO: 10303 - DNA, 1166 bp, Homo sapiens
aaactgccgatttatactcttagtcattttctgggcagtcactactgatgttgaggtgccagcagggttgaagatggagcccccagccatcagctgaaccgtggatggggcacaagtaaaatagcctacctacaagcataattggaatcagaacttactctttaaatctgtgactgtgtgcctcaatttctcataccagctttctccataggttggaaacattaccacctagactcttatcattccactttcactaatcaggagagattgccctctttccttagttccaatttttaaaatcctcagaaaggagtctgaatggttcatcgtgggtcagacgccaccttttgacccagaacactgccaccaaggaataatggcaatttccatttaatctatgtagataatgtggcagattttgttcgtggcagataaataatgaaagctaatgtttacagagtgcttaaaatgtaccaggcatatgctcacctaagcattttacatatatgtagaatgtctccctagacagggtatagaggataaacagcaaacttaaaagaaattggagatggctccaattgttgttgttactgcaacaacagccatgagaaataaaagctgaaataacagcagcaagacatgagagagaaacttaaatgcagtaacgattgtatactctactgaagtagagtatacttcacctcacaataagtgttcatttggttatctaaaacttaatttatcagctgttgaatcagcagaggatgtaaccacttagatagcactatgtgactcaaataaatgacagattgagtctttcaagtgtcacagtatataataaggatcacaaattttgtgtgtgtgtttttttattaagagaaaaaaaatggctttggagtcaagtacacttagtcttaaatcccggctccactgtttgctagcgatgtaactgggtgtattacctcatctgtacaatggggataataccaccaatctcatggttaaataaagtagtgtgtgtaattgctcagcatagtagcatagtacttgacacacagcaaatagtagcaggatcaaatgggagaatatataattgcccagtggctgtaagacaagaaactcttagtgttattacttctctatatttcttagagatgcctaatccc

SEQ ID NO: 10304 - DNA, 1023 bp, Homo sapiens
ttcctttatagtgatatttggggcaaacacgactgccagcccctagaggccacatctgtgtgacttctgaattaattctcataaaatatgtcaagcagaactgaataaaagaaaatgaacaaccctccccagtaatatatgagggttagaaaaggcatgagtcagcaatgtctgttgtacacagttaaaaacttttatgtattataagaagtccaaacttcctccacattaatacattagcattagactatcctgcttcagccattagatccctgtcccatcggtaataataatagctaacatctcagtgctaaccatatgccaagtactgtcttaagcattatatgtacataatctcatttaatcctcaaaacaactctttaagttgtaccaggtactgttactatttccattttaccaatgaggagaccagagaagttaaatgacttgctggcatctcacagtaaatggcagagtttgggttcaaacctagacagcctgactccagaactcacactcttttttgggctttcttgttttatttctaaactgttatacagagtccttaataaggttatacctcatctgctttttcttttggtaaaggatagagaaattagcaagctacctgattttaagaagtttagtgctacaggttgaatatcccttatctgaaatgcttgggaccagaattgtttcagatttcaaatttttttttttttttttggaatatttgcaatacagttaccagttgagcatcccaaatctgaaatccaaaatactccaatgcacatttcctttgagtgttatgtcagcactcaaaaagttccagattttggatttcagatttttggattagggatattcaatctgtaacagttatattttctttgtaaggctgtcttaaatcatttctacaaaattgtccctccctaacgaggcaaaagcttataaatctatcaggtaagtgctacctttcacatattctttgtagtgccaaataatagggaggatacccaggaa

SEQ ID NO: 10305 - DNA, 1029 bp, Homo sapiens
ctaatggcataaaaggggagaaaacactgaagcagaaagaaggtagactttcctcacaggatgattaaacagaattataaagagcttttagaaatcattcttttcggcttcttttcataatattgagcatgtactgtctgtctagactattgtgattttgtcttccttaaagattggaatatgaataaaaataaaagcagtatttttattgcactcaggctatgtgccagaactactccaaatagtgtatatgtattatctcatttgctcctattatcaatactgttacatagtttccgttattacccccattttataaagttagcataacttttccaaggtcacaataatgatggtggtggtctgtcttacagcgtagtttagctaattaactattataatatggtgacttttgactaacattttaattagttgatttccccaaatctcttgcaggaaacacttaacaataaatcttatacatgttgttaccacacatacttattaaactctaaagcctcatttgcaggctagttaaatgatctagtttgattttgggttaatttagagggatgccacgtggacttgtttgtgtttgtgtataatgatggccacagcagtgagatcctgaactgactatggtatcccaggggtgtatgggactcaataaaggcatttagggtgagagtgtagggttttgatggacattcagggcaggacacttgacgttaggatcaccaaaggaagggaaatgaaactgagactgttgcataaaactgaaaacataaaaggattctcatttgtgaaaggactttttaaaaactttattcaccagcccagggtagcaacaaggatgcatgtttctattaggagtggaaaaagaaaaaaaaagagtaaatttaaacccaaccctattttgtggggagagtatagctccaagtcaaaaaaaaaaaaaattgatatgaaactgctcttgggctagtgaaatctctggacaactagaagagggatgtgcaaaattattctgta

SEQ ID NO: 10306 - DNA, 1026 bp, Homo sapiens
tgtgcacacaaaagtatcagatactattctgtgcttttacattgtaagttagttgttgactcatctctgaccaggcatcaatccacacagtatgtgcctataaaggtgcaagtatgtttgtgagtttataaagttcaattattccagtattttacagtaacattttatttatctggagttcaaagtcttaagcctcttcttctcaacatgagaaagatttaagtacatttctattagttttccacaaatttaattcaacttaatttaataaatatttgaggtgctgctggataatgctggatcatatttgtctggatcatgctgtttctatcttcagtgtctgaaacgcttttatctatatcttaacctagaataatgacttacacatggtagacagagaataactgtggaattataaataagctcagttctggggccatgttctctgggagcattccacgacacccttgtgcctggctgggttaggttccccactcactgtatcttcctgtgatactctgttcatagctcctgaataaagcagaacaattctacattgttctaaaattgacagttttgaagaatctgcctctctaatagattctgagctactttatagaaagaatatgtgtctttttcacatttgaatatctatggcctagcatagtttctatcacagagtaggcatgcagtacatattttttaaataaataaatggatatataaataagtgaatgaatggtaagcctatcagtcatatagctacatataatcatgtgggggagaaatgttattcaggatctcctattttctcttttttaaaatagcctacatctcccttataagatgatgagactaggggaatggcctaattgtctttgttgttagtatcctcatcctaatgttattttccatgtacaaaacaaaaaaaagtaagactgactgaataaaatgacactgctttccctccttggcactctcatatccaaaggtttatgttactataatgaaggcagaatgcaccta

SEQ ID NO: 10307 - DNA, 1033 bp, Homo sapiens
aagcccatagtgagcttttaaaatacaaagccttttttatgccactcccctgctcaaatctctctgatgccctgtttaatcctcacaacaactctatgaaattgacatgccttttcctttgtatttttagatgagtaaaataaggttaagagtcaaagtaccatgcttgatatattgctttagtgacagtgaatcagataggctgatgaagcagaaacttggaatataaaatccagcaataaagaggcacttattttcataagtatcttctcaccagtgtcaataaaatctaatcagttgccacatcccaaaggagtctgtctctttttatatcttatagtatcactgctactgcactgctattatacccatgaaggctatttaaaccctccaagttcttcgtaaagatatatttcgttttggcaaggtaatattaattagaagcaattaagaaatactggtgaaagaaaaatgaaattagggatccagaatttcttgcataattggacccctgttccccctgcctattccctaaagaccccaaactgtatgtcatgaagttgagaggcaatataatgtaatagttaagaacacaaaccagctccacctattactaactggaaagtggtgtgtaattttttaaaaaatcgtttttctcttagtttcctcatctataaaataggaataatactagttcctactttatggtactaactaggttttagttgctgtatttagaactttatacattcctcttggtgaatttctatgctaaaaggaatgatccaatcaagaatgaaaaatgaggattaaacaaatcaacataggtaaatacaacttctggcagtagtacttctatactttctgagagagaaaggccatatgtttgctgtttgcttctaaacatttatcagttacaagattgatggtgtctgtaacagagtgaggttataaaagttcacaaggcagagcagtaattgtgggatgtgttgaataaaccttatagctggaagtatctgttagttgctactca

SEQ ID NO: 10308 - DNA, 1031 bp, Homo sapiens
tctgtaaaactcagactattcaaattacagcacctaagctcatgcacttgaactttacaagtaggcatatgttttttacttttattttatgttgaaaacttggtcttttaaaatattttgttttacttttgaaatccagtttaattattttcaagcaggtgcaataataaaagattaacctaatattagtaaggacattttttttgtttattttgtcttttgttgttgtttagccctcctacaacctctctcttttaatgaagatattgtattacagtaatgaaaatttaggaaaacagaaaggaagaatcacttatagtttaactaccacaaaagcaagctattttcacttttgcatattcccatctgttggtttcttagggaagccattcctcttctctgcctaggctttgaataacttgagaataaaacaactgagtggcagatggagccaaaatattacctatattactcattaagcctaggttggaacatatagcttattatgaaagccaaatcggtctgctaactaaaccttggacataggcagactacctctccaccctccccttttctcaattgcaaccagtaatgaactaggcctgctctcaacagtgaggaagatcagacccttggagagcactggagaccagctgctccatttggcttacttgttcccaagaggaagaagggtgcaggtgggcgacacatgcctggtttatattttgccaaaaatgacagtcaaataattcatcctactttcctatttccagctctcatgaaaagcaaaatgaattaacgggcagagaaaggccagaagttatatcagtatcctgccataggaggaaaaatttttcaggtggagataacttatttcccatttacttaagcttcatctatttttaaagagaaaatgaaactcctataaacattttcatgaaaatagtagtctctgacttttaaattatttttgaagagattctgagaaatgagaatttggaatatgagtgtttgttggctccctggaaaat

SEQ ID NO: 10309 - DNA, 1023 bp, Homo sapiens
gccggactgcggactgcagtggcgcaatctcggctcactgcaagctccgcttcccgggttcacgccattctcctgcctcagcctcccgagtagctgggactacaggcgcccgccaccgcgcccggctaattttttgtatttttagtagagacggggtttcaccttgttagccaggatggtctcgatctcctgacctcatgatccacccgcctcggcctcccaaagtgctgggattacaggcgtgagccaccgcgcccggcccatgatctggtttttgcatgtctcctctagttcatggcatgacagtctttccctttggtttagccacatggttttctttcagttttggaagactcaagggcttcttgcctaagggctttggccatcactgtctcatttgcctggagcattcttcatacactgaaagactggcaccttttagtctttacattttaacttaagtgttaatcattttagagatggcttctctatccatgggattcctcctaggggctctctctctctcactgtttcactctctcatactcctaattacttattatttccctaaacccttatcacaatttgtaattgtacctttatttgcttagcttttaaattacattacaggttgtaagctctgtaatggccaggaatttgtctattctgttcactatatacctagtacctagcataatgcctgaggcatagagttcattaaatatttgtttaatgatgaattcatccaaaaatgaatcacaatgagcaaatgaatgaacagagcaataggaatgagacagcttgaccttaaaaggctattgagaaaataacatatggaaatgaacacaaagatatttaaaaaacaaaagacatatacatgtactaagctttcgtattatgttaaacttactgtattctgaactgtttcattgcttcatatttcaatttgcttttgtgctataagaaaatttatggcatttcacaatttagatttacttgccactcttgctatgattgatatgc

SEQ ID NO: 10310 - DNA, 1054 bp, Homo sapiens
acagaaaagtaaaagcaagaaattagaacatactaccagagaaaatcacttttacacaaaggaagacaggaaggaaggagggaagagaagaccacaaagtaaccagaaaacaaataacaaaatgggaggagtaagttcttacctatcaataataacgtttactataaatggactaaactttccaatgaaaaacataaagtggctaaactgataaaaaaaaaaaaaaaagacccaattatatgctgcctacaaaactcacttcacctatagagtgaaattaaagggatggaaaaagatattctgtacaaatgtaaactaagaaagagcaggaattagctatacctatatcagatagaataaattctaagataggaactaaaggaagagacaaagaaggacattatataatgataaaggagtccatttggcaagaggatataacaattataaatgtatatgcacccaacactagagcacccatatatataaaacaaatattattaaggctaaagagaaagaaagaccacaatacaatactagctggagagctcaacaacccatttttagcattgaacagatcatccagacagaaaatcaacaaagaaacatcagacttaatctacactgtcaaccaaatgggcctaatagatattatagaacattttatccaaaagctgcagaatgcacattctttctttcagcacatgggtcattctcaatgatagaccatatgttaaagtacaaaatgagtcttaaaacattcaaaacattgaaattatattaaatatcttttctgaccactatggaatagaactaaaaatcaataagaagaggaactttggaaactatacaaacacatggaaattaaacaatatgctcctgagtgacaagcaggtcaatgaagaaatcaggaaggaaattttaagattttatgaaacaaatgaaaatggaaacacaacatacataaacttatgggatatagcaaaagcaattgtaagatggaagtataccaataagcacctgcattaaaaagtagagaaatttcaaataaata

SEQ ID NO: 10311 - DNA, 1045 bp, Homo sapiens
atccagcactcatttatgattaaaactctcagcaaaattagcacagaagggacataccttaaggtaataaaaactgtgtatgacaaatcaacagcaaacattatactgaatggggaaaagttgaaagcactccccttgagaattgaaacaagacaaggatgcccatttccaccacttctagtcaacatagttttggaagtcctacttagagcaatcagacaagtgaaaaaagaaagggcatccaaattggaattaaaaagttaggtagggctcatatagaccaaaggagcagaacagagaacccagaaataaagccaaatacttaaagtcaactgatctttgacaaagcgaacaacaacataaggtggggaaaggacaccctattcaacaaatggttctgggataatcggcaagccacatgtagaagaatgaaactggatcctcatctctcatcgtatataaaaatccactcaagatggatcaaagacttcaatctaagacctgaaaccataaaaattctaggagataacattggaaaaacacttctagacattggcttaggcaaagacctcatgaccaagaacccaaaagcaaatgcaacaaaaacaaagataaatagatggaacttaattaaactaaaaagcttctgcatagcaaaagaaataatcagcagagtaaacagacaacccacagagtgggagaaaatctttgcagtctatacattcgacaaaggactaatatccaaaatctacagggaatgaaaacaaatcagcaagaagaaaacaagtaatcccatcaaaaggtgggctaaggatatgaatagataattctcaaaagaagatatggaaaagaccaacaaacatatgagaaaatgctctacatcagtaatgatcagggaaatgcaaatcaaaaccacaatgagataccaccttactactgcaagaatggccatatttaaaaagtaccagatgttgacatggatgtggtgaaaagggaacagttttacactgctggtggggatgtagactagtacaatcattatgga

SEQ ID NO: 10312 - DNA, 1057 bp, Homo sapiens
cttttgcattttctgtaagtcaaagtaaaatagacaatttactaaagtttttttttttaatttaaaattccccaattaaaaaaattagctgggcttgttggcatgtgcctatagtcccagttacttgggaggctgagactggaggattgcctgagcccaggagtttgagactgcagtgagctgtgattgtgccactgaactccagcctgggtatcccatatcttttttattttaaaagaaattccccgtagggacaattttgaccttggataagctatagactcttgatattgtaaaatattaattaatccaggaggcataaatagaatgaattccagaatgagaaatagaagaatactttttgtgtttaactactgattaggagtttgctatgaagcaacttagtgaggaagacgtagagataaaatgatctgttaattgattttattttacatatctattgggagagtacaaagcatatgctaatgacttgatactagaaaatgtgtgaacttctgggtttttggaaatctgctcaagtgtttttatttatgatagaatatttgatttctcccttaggcctattattgtttacttttgtgggtagaagaatctagtcagtgaggtatgcacaaaacattggattttacttatttatttttaaaaaacttcaactttttcttagattcagtgagtacatgtgctgatttgttacatgagtatattgtgtgatgctgaggttttggatatgaatgattctgtcacctaggtattgagcatagtactcaataggtggttttttagcccttgccccactagtcccttgcgtagtgtctattgttcctgtctttatgtccatgtatacccaattcttagttcccacttgtaagaacatgcggtattttgttttctgtttctgtgttaatttgcctgggataaacattgggtttttaaaatgttggattaaggcattctgttcattcatgcctttgtcaataagtaaatttctcactgttctgtaaaatacatttactgaactatacgaatactatacttt

SEQ ID NO: 10313 - DNA, 1028 bp, Homo sapiens
ttgtaacctttggagaattacagtatttcatcaagaaattagagtttttacataatcaagagcatattctatggaattaacatttagtggactagaattacataagcaggccatcagtgatcacaaggcatatgagtttgtatttatttcctggaacatgagagctaatttggagtacagacagacaccctgctgagtagaatataaaagttaatgtaaagttctgaactataaagagtagtccttttaaatagatgcattgatttgtatatctttgaaaaagttgattatgattaaatgtgtgggtagttaattacaatttagggtaacaaccaggatgtatggattcttgaggttttggcttcttgagctttctcttgagtacttgatactgttttctgaatattttgaggtttctaattaatggtatgctagtttctactgttttatataaaaatttatctagtgttgtataaggactttagtattgtggatgatgggagtggctttttgtggcatatggttgttttaattgaaatattttttcagtttattacaagtgtgaaaaaacactcaaaactctggattgttttatttcatttttgttggattatgttaatacattccttcacgtggtttagattgagtcattttatctcacttacttggaaatgtgcagctgatagaagagggattgggtaggagattggcttttacttcataataaatatacagttggttattgtattattcaaaacttattaaatccattcagtttcttaccattttaagtgtattcagtgcctgtgaagccaggcagcagagtattcccactggcttaaaacttaggcgctgatgctcctacagtacagctagttataattccagaaccaaaggcaccaacattatttggtgaccttaactactactttgatagaacagactgggtaattcactgataatgagtcattacctttttaatatgtgattatctagttcagcattttgaatgtgtagtttaaggtctg

SEQ ID NO: 10314 - DNA, 2159 bp, Homo sapiens
aaacagacttgtgctggtcaagaatgtatttaagatgcctcttctggttgaaatagctattaatgtgtccccttattcagacttgcgtgtacctagctcttctgtccccagtgtggacatggccttggatgacatcggttccaactgtacactgaaacctgcttatagagagacagtttggagacagtgaaacaggtgaagttgaatggaagttccgagttgtacaaggtgcaaattggaattccgattttagggcaacttttcagaggttgacagttaagtatttggggcatgcacaaatgtgatagttattttgctggaggtgacaggtatctcttaaatatcaacaatgccttttagttttcagtatgagatatagaaacagtctataatggagtaacattttaatgtctcaccattagagaagttggaaattaacatacatatgagactcctgcgttttagttaattggagaataagaatggctaatgtttctttgaggaccagcagtgattaccctatcactgagattgaataaattgttgaacatctttatttttgttgtattaaaattttaggttaaatttatatatgtatgattagatattgaaggttgtgaaatgtgaatgaaaacgtgtaaagtgaggcttcacaaagaatcttattctctgtgtttcaaaagtatttgtcctattttaaaataattttttaaattgagtggttctggccacttaaatgacacgattggtactattttcctaaggtgggatttattcccttgaatctattaaccagttgtataaattgaattatggtgtccttcagtgtaagaggcattaagaaattctttgtgaaacatcactgcttgataaagtatatacgtatttagcatccttgtttttctttgtgctaaagtggatacagctgttggggcagaagagacgggaccagctgctggccacatttcctgctttattttaaaaggtagtataagaaatgaggaaaaagaggtaatatcagggcttctgctgttttttatttttaacatgttcataattaaaaagtattttccagcagtccaaagatgtaagttatcttacacataaaatgttttattttgttatttggttatgaaaatggaatccttgttcttgcacaactgtaaatgttttgttgctagataatacgatttgagacctgaattggtctttggtttccagtgcatcacagcatattttgtaaaatcatctactactgcacttgagcatgaatgggtagtagccaaactcacaaattggagtgatgaacctgcttatacctaagggcaggagcaagcccctcacaatgcagctgcatgggtttttagtgcctactgaattatatatatatatacatatatatatatatatataaaccaaaagtagttggaaagattatttgaaatgactaatttgtgctatctttatgaaatatgttaaatgtagcttttttgaaacagaagccttgaattgaaatttaactaatacttgaacattttgtatatatttctttgtatataattttgtgcagtaccaatgacaaaaatatggtgtcataataaaaccaggtttgttgatcttttagttatgggctcaaagaatttattcatctctaacatgatattggaaaataatggatgaaaataggaaaaatgattgttaatgctgactgtgggtcttaaaaggttctggaaagcagtaagttcatttttctaaaaactataacattctgttggagtattttcttccttacgtcaatacttttcctgcattatttgaaattgtgggctggggagaaacagtagtcaaagctttctgaattgagatactttgaaattccaagtgtagatttttagaatgtcattttataaatggcagtttttggaattacttgataagaacttttgaaaatggaaggattagtatggcctatttttaaagctgctttgttaggttccttatgttttattaactgtcttttctcagtttccatttcatttttttttttctagttttggtgacttagtgattttgtcattttttacatcaacttcatggtcttgtttttacatggtaattgcatgtacttaggatctatctaataggggctttaaataaat

SEQ ID NO: 10315 - DNA, 1030 bp, Homo sapiens
cttttcattccaccctcataacaacttttcaagggaggttcaattatcgcaattttacggatgaaaaaaaagggagactaagagaggatgacttgtccaaagccaggaaggtttggagaggcaaaagtgagttttgaacctaaggccctgggtatgccgcctacacaggcccccacacctggtttaatgctcactgttgctgtcgcgaaattcttatttattttttaacaagcggccccatattttattttttgttctgggtactatcaaggaagtagctgggcctgttttctggctctaaaacccgtgctttctcccagtatacaaactattcttcttaagagccttaaaaaggcattgttttcttcctctgtgctccgtggtactttgtattccactctgtcagtcctcatatttaatctgtgacccagagcctattaaggggataagcaaccagtttatctattatggtatgttgctctattaagtgatgcttatcactggaacaaactgacaaaatgtaaatcggcctcctccaaactactgcctttgaggggaaatttaaacaacaacactgttttctaaagcagacctatatccctgctgaatttttctgcaacatcaacaaacagtagctctcaaacaaaagcagaacagagatcctaaaagcaaataatgtatgagtagtgccgtgtagctgataggtgtgactttttgttccttaaactgtgagctcttcagggtgccctaaggaacttgtctggttccaaaaaattatgaaagagagcttgaaaagaggagagctacaggagaaatgaactgactggtattttcagaatactgactctgcttcagttagagaaaatgaattcaagttagtttgtttctagtaaacaaaatattaatagaaaatctttgtcaacctgactccatatattaaataattatttaaagaaagttgtttgaaggagtacctgcccaggtgcctgctgttctactcagccctcctttccccagatacccatgaggt

SEQ ID NO: 10316 - DNA, 1917 bp, Homo sapiens
tgataatactgactttgttttataaacagggtttgtgataagcatgttgtgaacacttctgggccagttaaatggtaaagaccacaaagcatttttatttatgagaagacatcctacaatacaatgaattaacatacccactttttttttccagatacagtttatgtaacttgatggaagaaaatggaattactccaaaaagacaagtgctcaagcagcaaaatccttacttccagcaaaatccaaactgctgtctcttaaatctcttaaactctcttcttccattagaatgctacaagtaactcagtgaaggcccatgaaggaaattgggactagtttataggagaacgtatcaatacagtttataaagccaagaattgctatgatttaagactaagatctgtctttttggtgactaacccttcaattctttcaactcctgttaatacccataatcagtaacctatcaagaaaagcccttatttggaaagtgtgaaatttgtatttggaaaagctgcctggagagaagaactgtgtcctttactgtatttcaacaggactcttttgggggatcaaaattaaaattcctaattatgcattatctttcttttctccagtcctcacaaatacagaaacaataactgaaattaacttttctttttttaaaaaaaattatattcagtttgcagtagacattccttaagtatttgtatttatttatgattatcaattttacataacattaatattgtatcagacctccttatgaaaatgagtatggatgtgcacagtatgtttgatttttatccacaagaatgaatctgattcagaatgcttttctcagctgacatacagagcactaaatattttaaggcaagtccataggtctgaatctcttaagaattctcggcctctgtgggatttagggaagcattataaatgcattaatccttatagtcaattctgtgcctaggattttgccagggaacagttcactgactaggaaaagcactacattttaaattcagcattagtgcattgggaaggatctttactgctttgtgcttggcatgtcattattttccatttgacattagggcctttccaaaatgaatgtgaggaattgctttcacttcaagactttccttcttttcactaaaactctagaaggtgttacaagggggagggaaggggggcaaagtccttgaacattttctttggctcgtgccatgttatgatcatataccttttaaataaggggaaatagtatctttaaagttaatgtctagccaagagtttagtaaacgaagaattaaactgcactgttgatcggtgctttgtgtaaatacatctttaacatttgggtggagaggggccttaagaaggacagttcattgtaggaaagcaattctgtacatgagtttaagcattcttgttgcattgtctctgcagattctatttttgtttacaatattaaaatgtatgttagcaaaatgggtggattttcaaataaaatgcagcttccacaaaagttttgttatggtattctggtctgagatgcattttcatttttcctttctctttttattatcaatattgtcatttttccctaataaaatatacccaggtgattatatttgttgatctaataacatggaaggtttgttttatatgaattttcaaaaagatgtctctttacactttttgttaccttgtagactcttattgataaatgcaactacttattaaaattgttcactttttgtcttttgatcagatgcctttagtcaggtaagtttaagggaaaatacgcagtttaatgttttggtacatataattatgtctgccaaagaaacctttgattgtatcatattgcctatttagtagtgcatagggttcagagtacatgataaagga

SEQ ID NO: 10317 - DNA, 1052 bp, Homo sapiens
gcagaaaggcagagagagaacaaaagggggcgaacccactcccttgatgagaacctaaatacctcttaaaagtcctaactctcaatgctgtttacaatggcaaccaaatttaaacaagagttttgtagggaacaaacactcaatcaaaaccatagcaagtatgtaccatgactgtatgtgtatttataaaatacattcatatatttctacagcaatatatatgaggtacatttaagcatgtaaaaataggaatttttaaaaataggacagttgtaataatttctttgtacattccactttggagactgtttttatatggagcttgttttatcaccaaaaggcattttaattttgcacactttagaattcttacaatgtgtaattgactgctagttgctgaacaaaggacagataaagtgtttcctgcacctgagcagcctaaaggtgagtgtaatacagatgcacaagtgactggttgataatggaatgagaccccttataagaaagacataacagagcacggcagaggagcaagaacaacacagaggcaatgacatttgagctaggcctcttatatctgtagatgaacatttgatggtaggtagtagggaagatggaactaagaatatttgagctacttaatatatgccaggcagcatgctgagtgcttgtgttcatttaattctcaagacagccataagcggcagtacaggtattgggcctattattctaaatcccattttataagagagttaggattagattcagttccatctttctacaaaacctggcactgtcattccaggcaaagggagtacaatccatttttctcttaagaggttgattttgccaatgagacagaatgaatctctacagcattgttaagtttctacccagtcttttgggtgactgaaaaattcaaatgtaaagatgtggcaaaattggttctctaaggattttaagtacagccaaatgatatgtcacaagttttttcctaaatatccaaccatttagtctttcataagcttttaattccactagcctcactttct

SEQ ID NO: 10318 - DNA, 1022 bp, Homo sapiens
tggattaaaaaattattaagggcagagatcatccatctctttgtatggggtaaagtaaatggtagtttaaatgaaaaatgaaattccatcaaaatggaatcttttaatcaaatctaatttctacagctgttcccaaaattcttccttgctctttgaagtgtttgttttgagagctgttacttacctaaggcataacttgtagctcttggtctcttgcctgattactattatatcaagttaacatttttgagagagctctagccctctcagatacctttatcttgttgccatttagtgagacattccagtgtgttgtgtgtcttacattttatctaggttactctaagcactgcattagtgcttgtttatgaggaagcagctaacaccttccagatggctgttagctcagacttgattcaattcttcaggaaattgtcattatggctttaattcagtagactgcgctgtagctttgaacttatgaattcctatacacatacccttttctccgtgtgtgtgtgtgtgtgtgtgtgtgtgtgtgtgtgtgtgtgtgtgtgtgttgagtcatttttctgtattttttagatattttcatggaattgtttaacaacagatactattgtttttctgtttcatgcctaacattgtagctgtctttattatgttgttctacattagtgcatcttcctagatgtttaacttcatgataaattctaggtccttgtggttttccttttgtttctcttctgtgcttcctcacagtcttactatttggttacttggtacagattgctagtgtgtctggaaaggggactcctgctttctcttactggtgctttacataaattgaaatgtccattgctaagccagtagttcataaactaattctttagttgcaatatacagctattatgttattaagcatgaagacagttatagtttcaattttcttctgaaagtcattgtgatatgaaataacactttttaaatgaatgtttatatggcagtttaggtatttttga

SEQ ID NO: 10319 - DNA, 1032 bp, Homo sapiens
cttgggtacattatgtaatctctctttgtttcctcatctgtaaaacagggataataataactatgtcatagggtttatgtgaggtttaaataataccctgtttataaagcccttgcttagtgcttagtagtgtttaataaatggtagtagttactttgacaaaaaagtatgagtcctaatttattgtgaaactaccaccaaaatcaattaacaatccacccaaattttgtaaaaggtgtttggaatgtctttctgtccccaaagcttgttgatcttgtacttttcaattaatttattattgtcctcttgagatttaacctgcaggccagtggtttctaaatgataaactgtggattggtgctggttagtgagaaagttttcactgggccttggtgaaatggaagagtaagcaggacaatgtaatgatatcataaagttaaccttaactcagagctcagcgcctgctctttttagcatgtgcgcacgcgtgtatgtgtgtgtgtgtatttctgtaaactttctcttttagaatagtgatactagctgggtctttttgttttaaataacttttaaaaattaaaagttggcgagggccgggcgcggtggctcacgcctgtaatcccagcactctgggaggccgaggcgggtggatcatgaggtcaggagatcgagaccatcctggctaacaaggtgaaaccccgtctctactaaaaatacaaaaaattagccgggcgcggtggcgggcgcctgtagtcccagctactcgggaggctgaggcaggagaatggcgtgaacccaggaagtggagcttgcagtgagccgagattgcgccactgcagtccgcagtccggcctgggtgacagagcgagactccgtctcaaaaaaaaaaaaaaaaaaaaaaaaaaaaaaaaaaaattaaaagttggcagtcctgatagtttcacaaaaagtcgataatgtgcattgaaattatgatgtaaaactctaaccttgttggtgtatgtgtttcaggcatgcagtaattacttaaaa

SEQ ID NO: 10320 - DNA, 1050 bp, Homo sapiens
acttttatttatgcttttataatctattcacacaaagaggtggcgataaatggtgatattggtataatacctaaagataaagtgatgagtttatattttacgtatttacgaaatggaagatagttaaatcactgatttatactaataggaatatagctgttatctctgggccaacttttcattgtgtaaaaattatgattaaacacatttatgaggcatctaatggttcaagaccctttatagctctttgacatatggatatgatatatatttcaaaataccatttcattagatattaaacgtctgtcatatctgtttcctggttttaaactctgtaatctggaacacagtgacagagtttagttgccaggtttcttggtattgaagcctaccagactaactttaataatcttgttgtctaatttaagctacttaacatggaaatataatattgccaggtaaagtaaaacaattggcattttctgaacctcagagtggcttaaagtagttttaaaagtcagattctggtttgaatcctggctctgttagttcttaactttttttgagaaaccttgttttcagatgagactgtggttctcaactttaacatcagaagcatttggagagtttattaaactacagatatctgagtcccaatcctagagttttgattcagtaggtggggcctggggcccaagaatttttgtttttaagatgctcccaggtgactaggttttagcacagtgcattattagcacatgttaaatgttccatagagagtggtgagttttttcctttcactttgttgttgctgtttattaactcacccttaaaagctcatctgcctgcctactgactcctaatagctgagcctaatagctcagtgtaagttttactacgtgaactgcttgctgtatgcatgctcagttgctacctgctccctgaaatcttagtaggtgtttgttgaatttagttcttttttttctttcagctttatgatttgtttgctcatgtatgctaccttctttaatccccagttaagtaacattg

SEQ ID NO: 10321 - DNA, 1029 bp, Homo sapiens
gagacagggtttcaccatgttgagcaggctggtctcgaacccctgaactcaagtgatctgcacacctcagcctcccaaagtgctgggattacaggcatgaaccaccgtgccaggcctataattgcaagatactttcgtattaatttgctcaatcctcacaatagccctgtgaagtatgtagtagcaatgctgggactcaaacctagaatatctgacatcaaattgcatcatctctgcctaatgccagttcatggggttgattattgatattttatattttaatcactttattatgttttaagctaattcctcagactaagaccatttaacctagcaaattgaaagtaacagaaatcatttcatatcagtctggtaacatgatttttgtattgggttaagaaattacttgagttattctcatgttttcttatgaacctttttttaaaacagcatgaagaaagaatttgtatagtgagaaccttcctttggttctttttagactttctggttgtttcagaacttttgatctttcttttagtaataaaatttaaataatttccaaagggaaatgccgttattggattttagtactcatttttaatcctagatttgtactttgaattttctagtaagattttcgaagtagcagtcaaaacaataagtctcatttatttgagagaataacgaaaaaaagagccacgtagttcaggtgcaccaatttacctgaaatgtttatcataaaatttattggttttcttgcatttctgtcacaactatgttattcttcctttgtcttctgaattgtacctttttattggcttatttataatactaatattacataaaatttaaaaggtagtttttaccactttacgtgcttaagagtagaaactaatgatgtttggtgtgtggtaaaaggaaaattaataaagctcaaggtagttcttcaggttagaattctttaccacttgttttacttagcctagagttaacatttggaaagttaatgttgaggtttatagtgtggat

SEQ ID NO: 10322 - DNA, 1030 bp, Homo sapiens
attgctgttgggtcatgaataaaatactttaaataaaacagagctctaagactttgttaactcttggcctacagagtgtttaactgttttttgacttgaggcaaatgattattttatttgtaattttaaaaaatggtaaaactgctctttacacaccaatgattgtgaggatcagatcatttcatcttgtgaaaatacaagctatagaccttgctgtataatgtatacttttgcttttatggctcatgctttatgttcttttttagttctaaatgagtaccttgatatttgacatattgtgttgcctgtttttgttttttctgtatgatctctgcttcagttttcatgttccataatgacttaaaaatatgtgacatttcatagcaacttggttctctgttttagtagaaaaccagggggggagtttgaaatgtagatttaattgcagattcatttgtttatttctctggttttttcataacagggctgatggagttatgagaacaatgaacacagaaaaactcctaaaaactgtaccaattattcagaatcagatggatgcacttcttgattttaatgtgagttatgcttttgtaatttaagattttaaaaaattaggtcattataattcatgagaatttttaacctcaagttttcacagactctagtttttcacatcctgatatcctatatggctaaggattttttataaaatagtctcaagtcaaattactttctgatttttatgactgttttggatttatttctttagtgcttctctagctctagaattttaagatatacaagctaaagtggtgaaaggattgatctgaaaatatattttcttttgataatggcttttagatcttgaaaatgtacagggatattttttaaataaatagccaacttaatattttacttttgtctatttaatgggactcaaagcatggcaattattcagaagaagaagtttaaatagcagttataatagcttattatgtagctattgcccaagggcattgtgttcgct

SEQ ID NO: 10323 - DNA, 1065 bp, Homo sapiens
tcacgccatgcactccagcctggctacagagcaagactccatctcaaaaaaaattttttttttttggttgttgttgagacaggatctccctgtgttgcttaggctggtctcaaactcgtgacctcaagcagtcatcctacctcggccttccaaagcactgggattacaggcatgaaccacaatgcctagcctcacacatacagttttaaaaaatggaattgtactgtgtatttttctttactataacttttgacttaatatgtggtgaacattttctcctgacagcttttattttttgtgccatgcattcgttggcctcatagtatttcatagtcagactgtagtgtcatttgattaactcttcactcttggatatgtccacttaaattatgaattaggtcccttagcttcattagtattgttctaaaagccatctgattatttttgtcaatctttgtcattgtactcagcgttccatattctgtctttaagagtatttccccagttattaaagtccaattatgttggttagatttcttaaggtgtaagtcagcctgtgaagagcatagttttgagttaattctactggaagttatataaaaataaaacattgtgtttctcacagaagaccccatgaactttacagataaaattttaacagttacatcttaatttggaccatattttatgatccctttcacaaatcattggagtaagaaataagactgttcatttcatttcctggacattgacacttacgactaggcaaatttgcctgtgtttaactttgattagcctatgtctaatttcaacttgcatagttttgaaatacttaaaacaattttgctatatgaaaaaaattttgctgatacttcatataaaagttccttatcctctgtttactattttttgatgaatatgctttttgtttctactcccaccaaggaaaaattacaaagatttgataagtgaagcaaaatttgattaaccagttaatttgccttgccttccatattaattttatctccaattttctttttttttcttttttttttttttttttga

SEQ ID NO: 10324 - DNA, 1039 bp, Homo sapiens
gaatttaacaaagttaagaatgagtgttattaattaaaacaaaaatgggacatttaggttatagttgagaccatgttcttgttttttaaacgtgagatgtttttggacacagaggtgaaaaattctaatgtctctaactcccccagaagaccttagattgatttttctgagaagaaatttgtgaatgatttgcatagagattttctttgaggttaagaaattagatgagtttcccggggtgaaaaaaacagaagcagagattattgttaaaaatggtcatgggtagaggggttagagggcaaagtaggcagaatagaagcatgtttgtgttttaaggaggctaagaactagaatatagcactcataaaaggaaaatgcaaatgcactgtgaatagctgctactggtagtgtattaatttcttagctacatgtaaacttttattagtgtgcttataactaaggtgatgtgtaatatgtcatccaaacttgggtcacttttaagagtgaaagggtgtgctatctgaatgggaccctggacaacaggtgtgaaccaggactgttccagcaaaaccaggacggttggtcattcctaactaataacgtacttttctccagacttagtcccaattcctttaacctctccagaattatctataaataattatagatattataccataaatgttttttcctttatagtactctgatctgcacttgcagagcctctcagttgttggtttctttttccctgtcttgttggaaagaaaggagaatttttctgcccccactctggaccctgcttgggttcacagcattggtggaggtaagtagtattctcaatgtattgttagttgactttcattttgcttaggaaatgaggtttctgtatttttctgatccagtactagatttttttttttttttgagagtcctgatgatatttaactgggctaacgaacagttagtaagttcttagcatgtaatacaaaaaagtgtttgtaattttggcatttgttcttaaattacttgatacttaata

SEQ ID NO: 10325 - DNA, 1049 bp, Homo sapiens
gttgcccaggctggagtgcaatggcacgatctcagctcctacaacctctgcctcctgggttcaagcgattctcctgtctcagcctcccgggtagctgggattacaggcgcgagccaccaggcccagctaatttttgtatttttagtagagacggggtttcaccatgttggtcaggctggtctcaaactcctgacctcgtgatccgcctgcctctcggcctcccaaagtgctgggattgcaggcgtgagccaccgcgcctggccccacacacataattttcttttttgcaattatttattttttttcccttttagagtacacatttttttgcaattttaaaattgagacataatctacataacataaaattcagttttaaagtagagaattcagtgttatttagtatgttcacagtgttgtgtgcaaccatccccattatgtaattctagaacattttccatcacccaagaaagagatcctgtatctgttaacggtcactcctaagctctcctcggcccccctgcaaccattaatccactttctatctatgaatttttctgttctgtacatttcgtattaatggagtcatacaatatgtggccttttgtgcctggcttctttcagttataatgttttaaaggtttgtccttgtagcacatatcagtactttattcatttttataggtgagtaatactcccttgtatagttacccacatttcatttataccttcattagttggtggacatttgggttgtttagccatttgggctgtgaagaatagtactgctatgaacattcacatacaagttttcgtgtgaacatattttcagttctcttaggtatatatctaggagtaaaattactgggttatatggtaattctgtgtaactttttgaggaactaccaaactgttttccacatcagtgacactgttttacattcccatcagcaatgtatgaagattcctgtttctcctctactttcttgccaaacttgttattttcaggattttagttttatgatttttaaaaaatagtcatcctagtg

SEQ ID NO: 10326 - DNA, 1980 bp, Homo sapiens
ggaagcctgttttgatttctcatttggactttggccgtaaagtttgcactttaaaaaaaatgtacgaaatgtagattcttccaagttactgtgctcatgaatgctgttagaacaagtttttgctacacagaagcctattattctttgtgattgttcctccactgtggaaaaaagttttaaataaaaaagcattagtgcttgattctttcagatatgcatgcaggctgcttttaaactctcagtccttgcttgtcttagagaatggagaatatgtttaaatggtgacactcttatgaacagaaaactttttaaaatgcatcgtaaagccatatgtgattttttgattatctgatacgtgtagtagacgtttctgctatttacggctcttcaaatactacttggtttgccctaccaaatcttacagtttgtcctgacactgtgttaattcttttgttagttgcttttggtttttttttgttttttttttttgtatgggagtatgaagaaactagttgtgactgtgtgaactattttcctctttcctcattcaaaataagaatcgataaggcttttaaaagttttttttgtaaaggtttgtgtcttatttcaaatgtagcagtggttcttttaaagcattgtcaaaaagaggagaaaataggtagggttagaagagtgctatttgcatgttgtttcataaatgttattagctatttctcttgttatagccactactgcagatagatggtaactgggattaggtttggaggataatcttgcatttgtcgttctttttctctaccacttctgtgtttacaagctcccacgtttttggaacttgaatatacctggtagtatttgatttaaaaatatatgtgtcgttaatgtgcttctgtttcttttcaatgaggttttaaaatacagggatactattttccctacattgttgattaaaatgtcctgtaatcagttctcactaataaaatacctttatcttaggtaaagtctgaccagtgagtggtttactaaacaaataccttccttgcacacactaacatgctttgagaaaattaaaaagtcttctacggacagttcatggtgttgacatcatgaactttaggctttaatacagaaacctgtcatttcaagtaattttttgtcttttaggaatttttctttatagtgaaagcttagtttatgtgcaccttttaatgcccctagcaactgatgcttatttatatgaatctaatgaaaatgatttcattttaaaatggcagcatttaacaaaaaatatgcttaggactgttgtttttcgtataagcccttagagtgtggaggtggtttctgtcagtttctcgccaagatctttccacattaggaagtgattattaataattcatgaattatggcttaattcatactacattatatacttactgaagaaagatttttttgctttgcttatactgtaggtgttagtggataatagtgttgactagcatccctagtgtgaaagagttgtcaaacttgaaatatgtttgtaaaaataaacacgatttccgtttaatcttaggcctttagtagccataatcaaggtagaggaatagcagcccttatatttgaagaacttcagttttccaggcactttctcatcatctcatttaatcctgtctcacagctggaggtgggggcaattcatatacatagaaagtagcttctaattccatttagcagtacagaatgcttaaaagaaccataattattgcaggatagaaaaaacaaattttttttttttttgagacggagtctcgctctgtcgccaggctggagtgcagtggtgcgatcttggctcactgcaacctctgcctcccaggttcaagagattctgcctcagcctcttgagtagctgtgactacaggcgcatgccaccacacccagctaatttttgtatttttagtagagatggggtttcaccatgttggc

SEQ ID NO: 10327 - DNA, 1018 bp, Homo sapiens
catgtaagacatgcctgcttccccttctgccatgattttaagtttcctgagggctcccccagccatgaagaactgtgagtcaattaaacctctttcctttataatgacccagtctgggatagtatcttcatagcagtgtacaaataaactaatatattgtccctccttcttaatttactgtgaatctacaactaccctaaaaaatcatctttaaaaaaagttcttactgtaccatttacctcctccctggtatcatttacctaaattgtaaatttgcattgatttgtgtgattatttgattaatgtgcatcttccccactaaacagtaaattccaagatgtttgttcaccgtaagttaactagtgctcagcatatagcagggtttcagaattccttgaatgactatacataaatttacaaatatagcaaatgtttttaaattcattaagccattatcttcaatgcatctttcaggatgatttgagaggaaaagataggagtgatgcaggggaagagaaagaagcagccattcctatttgttttctgcggtcatttggttaaagcctaagcaacatctctaagttacaatggtttgataataatgagtttgcattcctgcagcacctctcttctcctgtggtttgcagacagatctcagcctcactttggggtgactcttctacaaacgatgctaaaaacagatcttgtcttgctactaaccaagcctaatgagttttctctgagaaggtgccaggtccccttccaaagtacttaccctgtagctttttatgatcatctcattttcttaatacaacggcatgatgtcaaaggcaacaaaatcaaccgtctttgcatgaactctcaaaaggagccatttagggtccctgcatctcttttctctaggtaggcaaaagggttgtgatccatcccagcgagtggtgtgggagtggctgtttttacctaacctttattgagcacttactttgtgctagtccgtttattgagcacttactttgtg

SEQ ID NO: 10328 - DNA, 1034 bp, Homo sapiens
ttctacatgaaggtgagaagccttcttaaagtctcaagggctcctttgagagtaagggagaaggaggtcaagatataagcactgatcaggaagtaattttggcagaattttgagtgagaactacttaggagtatccagtactcctggttaaacattttcctgggcttcactgaaaaagcctgaaacctgtactttgaaaatagaggaaggggacagttagctttaattagatttcatctgaccatgatgaaagtattaaaattgtacaagtaggatatttacagggcactttacattctgcccatttttttcactagtcaaaagagactgaaattcagtatgttctcaaattagctaaagaaaacccttgtcaaagacccctcaatccatctggttatcattattaaagcattatggggtatgtatgctttccattggaaaaaaatgaataatcccttcaaatatgtaatttcataggttttgaaatacgaaggcaaccgttaagggaactatcaaagcagtctgaagtacagtgtgagttgtcaagggaaaaatataaaagaatttttaataactgaaagttcaacaaattctaatgccaaagcctgggattgtgggaacacttgttggaatttctaaagactgttgtttagtgcatggaggcatctgaacccagaaggtaaattctgaaacacctggaccatattagagtgtctggggccgagaaggtatggtgaggggcccacccagaggtgccctctaacacaacttctttccccataacagcatacctgggagcttctgttcttctggctgtggcattttgtttcaagagcactgcaccctgtgccagccttgcctcttacacatcaacccatatgcagaagcatttccccttaagtagagtgtagtagaaatagtgagggcctggagtcaggcagatcttgagctagatcccagttctccacacttcccctcatgatctttgtgaccttgagccagcacagtgcctggttcataggagacactcaatc

SEQ ID NO: 10329 - DNA, 1050 bp, Homo sapiens
ctgggttatcacttttcctccagggttagatcatagatcttggaaactccttagagagcattttgctcctaccaaggatcagatactggagccccacataatagatttcatttcactctagcctacatagagctttctgttgctgtctcttgccatgcacttgtgcggtgattacacacttgacagtaccaggagacaaatgacttacagatcccccgacatgcctcttccccttggcaagctcagttgccctgatagtagcatgtttctgtttctgatgtaccttttttctcttcttctttgcatcagccaattcccagaatttccccaggcaatttgtagaggacctttttggggtcctatatgagccatgtcctcaaagcttttaaacctccttgctctcctacaatattcagtacatgaccactgtcatcctagaaggcttctgaaaagaggggcaagagccactctgcgccacaaaggttgggtccatcttctctccgaggttgtgaaagttttcaaattgtactaataggctggggccctgacttggctgtgggctttgggaggggtaagctgctttctagatctctcccagtgaggcatggaggtgtttctgaattttgtctacctcacagggatgttgtgaggcttgaaaaggtcaaaaaatgatggccccttgagctctttgtaagaaaggtagatgaaatatcggatgtaatctgaaaaaaagataaaatgtgacttcccctgctctgtgcagcagtcgggctggatgctctgtggcctttcttgggtcctcatgccaccccacagctccaggaaccttgaagccaatctgggggactttcagatgtttgacaaagaggtaccaggcaaacttcctgctacacatgccctgaatgaattgctaaatttcaaaggaaatggaccctgcttttaaggatgtacaaaagtatgtctgcatcgatgtctgtactgtaaatttctaatttatcactgtacaaagaaaaccccttgctatttaattttgtattaaaggaaaataaa

SEQ ID NO: 10330 - DNA, 1028 bp, Homo sapiens
atttttctatgcagttttattttcaatccattagaaaggaagtcttttgcacaataataagtgaaatactctcaaggtaacaaactaacaccttaacaatactgggaatctggtcgaaaactaagtcaccttcagcacatggattagaatcataaactgctccttagaaccaggcatctgagtcatttaatgcttaggtaccttgaaagagagaaactcccttagccaatttttctgtgttctataatctcacaaatgaagatgtctctccaattcctaaaataaacaacaaaaacaacaacaaaactactagctttataaattacttttcaaagtgggatttgacaataaaacaattttctgggtaattggctgaagtttggaaatctttatattgtaaagagacatttaaaatggcataattacgtggccaaagcatatatgaaaagtcattcttatggcagatgggtaatgcttggctctaggttgcccattaactcacgctgaaagatgactgatcagatcttttactcatctatttctcagtttctgcatctgcagaatgagcttctgtaagtctgcaatgtatctgagagtgcccgtgttattctgctctctttctatctctacacaaaccaaatgaaacttccagtcctcaccagtggcttgttccgaaacaagaaatcagaataagggtacaacataaaacaaagtgtccatagggattgttaattctttatttgtgtcttgtttggtttttaactgacaaagcacaggacatgaccctttttttttggttgggttgggggcaacagacatccagtaatcaactttggttaatttatggcaaaaagtaatttattggaaaactgtgggttcactcacagaattaaggaaaaaaattgaataacaaggctcagagaggatcagacctaggaaactctgggatttagacagcagaaactaatgaagaatctcctcagggctttgctcagagatgaataaattatatcaatgaccagatacta

SEQ ID NO: 10331 - DNA, 1049 bp, Homo sapiens
caatggaacagaagaacccagaagtatttccatacaaatgtacccaactgatattttgacaaaggtgcaaaagcaatttaatggaggaaagattactttttcaataaatgatgttggaacaattggacatccaataaataataaataaataaaaataaagcttggcctgtctcacaccttctacattaattcaaaatggaacttgggcttacatataaaatatgtaactatcaagcttttagaataaaaacataagaaaaaatcttgtaagtctaactaggcaaagagtttatagacttgacaccaaaagcacgatccataaaagaaaaaaattgataatttggacttcatgaatatttttaaaatttgttctacaaaagaacctactgagaagatgaaaagagaaactacagaggaaaatatatttgcaacctacaaagaactagtgtttataataaagaattctcaaaactcaacagcaaataaaacaaatagcaaacaattcaattagaacatgggcacaagacataaagagacatttcaccaagatacagatagcaaataagcacatgaacgatataaaacatcattagctattaaagtgtaaattaaaaccactctgagtgaataaaaatcaattctaagtggagtgcataatgtttcattctatttacatatcattcttcaaatgacaaaattataaaatgaagaacaggttcatggatgcagggagtaggggtggggagtgggtgtgactataaaaggacaagagagatccttatggtaatggaaatgttctaaatcttggctatatccatgtcaacatcttgattgtattgtactataagttttcaagaggttaccactggggaaaacagtaaggctacactggacctatctgcattatttcttacaacttcatgtgaatctataattaattcaaaataaaataataataaaaataataattaactgtaactggttcttattccaaaaaaggaacaaaattaatctcaggacagaataacaaactctacagaaatctgtgt

SEQ ID NO: 10332 - DNA, 1072 bp, Homo sapiens
aaatgtcagttaggtctatttggtctggtgtgtagtttaactccaatgtttcttcgttgatgtcctgtctgaatgagctgtccattgctgagaatggtgttgaagtctccagttattattgtattggtgtctaactttctctttaataataattaatttgtatatttgggtgctccagggtttagtacatagatatttacaattggtatatcctttttctgaattgactcctttatcattatatagtgtcattctttgtctcttcttatagtttatgatttgcagtctattttatttgatataagtctagctattcctgcttatatttgttttctggttgcatggaataccttttccacctctttactttcagtctatatgagtctttataagtgaaatgagtttcttgtaggcagcttataattgagtcttcttaaaaattcattcagctatcctgtgccttttaattggagaattgaatcaatttagattcactggtattattgataagtaaaacttgttactgccatttcgttgtttgttttctcattgtttttaactcttctctcccttccttcctttcttactgtcatcctttgtggtcaagtgattttctctggtagtatgttttaatttgttgctttttatttttaataaatctattataggtatttgcattatggttactatgaggcttacaaaaaggatcttacagttatagcaagttatttaaagagatgacagcttattttagatcagaaagaaaagaatatcaacaaagaaataattttaaaactctgtaactccatttccccatatttagtctttatgttgtcttcatttacatatttttatattgcctatacttaacaagctgctgtagctattgttgtttctgatacattagtcttttgggtttcacagtagagttatgggtgtatttcacatcacaggtacagtattacagtattctgggtttgtccacttattttaacattgagctttataacttcagaattttatctccttttagcacttccttttaccaatggattttcattatttaagcttt

SEQ ID NO: 10333 - DNA, 1060 bp, Homo sapiens
atacatgatattttctttatccttttatcccttgatgggcaattaggttgatttcatattttggctattctgaatggtgattcatattgtaaaataagatattgtgataaatatgggagtacagctatatcttcaatagattgaatttctttcttttggatatataaccagtagtggaactgatggatcatatggtaattttatttttagttttctgaggaacctccacacagttttccgttagttgctgtactaatttacatccccaccaacgatgtatgagggttcctttttctctacatccttgcaagcatctttatctcatctttttgataaaagccattttaactggagtgaattgtctcattgtggttttgttttacatttttctgattagtgatgttgaggattttttaatatacctgttgactatttgcaggtcttcttttgagtaatgtatattcatatcttttgccaattttaaaaattggatgatgatgatgatgatgaatttgctattgagttgtttgagctcaacaactcaatattctctatattctggttattaactccttggcagatggatagttgcaaatatcttcccccattcagtgggttatcacctctctttgttgatagtttcctgtcaacaatggatacaaagctatgcaaaagctttttcagtttgatgtaatcccatttttctatttttgccttggttgcctatgcttttgagaccttacacaaaatatatttgccaatatctatgtcctgaagtattttcccaatattttcttctggtagtttcataatttttggtctttaatctatttttatttgacttttgtatatagggaacaatacaagtctagtttcattcttctgcatatccagttttcctagcactgttcattgaagattctgtcttttccctattgcatgttcttggctcccttgttgaaatgagttaggtgtaaatgcattgacttatatctgggttctgcattctgttctatttatctaggtgtctgcatttatggcagtaccatgctgatttggt

SEQ ID NO: 10334 - DNA, 1030 bp, Homo sapiens
actttctatttcattttggaaaaaaagtggatgtttttattatcgtttgagaaaggaaatgatattttcttaaaatgctgtttcctgtgatatatcacttcatatgtaatgtgttaaaaataagaacaaactcccattaagattctagtgctgttatatttaaaaagctctatttgggatcaaaaacgataatttgctgagctttatcttaaacatactttaaagggacaatggaccatgactgaatgaactgcatttcataatgtttgaagccaaagaaatcttcgttatataaacaagtaaaactaagaaatatacctacatatgtaatattgtcttaactgtacttacatatctacatatacattacaagagaaataaataacagaataaaatgcaaaaaaattggctatgattgtgctggatgacgaaactatgagatctattttttctactttttatatttgccaaacttcttgaaaatgcatctgcatgaatgtatgctaaaaaagataaaaaatatcccctcttttgtcggagtggtaaatgaaaactcagaattttatgtatgcattggcaaaagcacttatgatttactaataactctaaaaataaatcattttcttttttgcagctatatcttgcttcttcataaagtggacagtaacatacttacagactggtgaagagaagttcagaaaattgttgctgttcagcaataatagttcatatttcttaagcacttactctagtagactatatacaataactcagtactcagaacaaccctataaggtagtaccacttttatgtccattttataggggcagaagctgaggcacagagaggttaagaatcatgctcatggtcacacaactaacaaatggcaaagcaagaatgaatccaggcactttgacttcagggccaacaggcttattatgcctgcacttaccaaatgtctactatgtgctttgcacttttgattatgcaccattgcttaatggaaaggatgatgacctcagatctagat

SEQ ID NO: 10335 - DNA, 1021 bp, Homo sapiens
ggtggaagaagcttgcttcccctacacaggcactgattctccatgcaaaatgaaggaagactgctttcgttattactcctctgagtaccactatgtaggaggtttctatggaggctgcaatgaagccctgatgaagcttgagttggtccatcatgggcccatggcagttgcttttgaagtatatgatgacttcctccactacaaaaaggggatctaccaccacactggtctaagagaccctttcaacccctttgagctgactaatcatgctgttctgcttgtgggctatggcactgactcagcctctgggatggattactggattgttaaaaacagctggggcaccggctggggtgagaatggctacttccggatccgcagaggaactgatgagtgtgcaattgagagcatagcagtggcagccacaccaattcctaaattgtagggtatgccttccagtatttcataatgatctgcatcagttgtaaaggggaattggtatattcacagactgtagactttcagcagcaatctcagaagcttacaaatagatttccatgaagatatttgtcttcagaattaaaactgcccttaattttaatatacctttcaatcggccactggccatttttttctaagtattcaattaagtgggaattttctggaagatggtcagctatgaagtaatagagtttgcttaatcatttgtaattcaaacatgctatattttttaaaatcaatgtgaaaacatagacttatttttaaattgtaccaatcacaagaaaataatggcaataattatcaaaacttttaaaatagatgctcatatttttaaaataaagttttaaaaataactgcattatggagtttatgtttacttcagggaatttttatcactgactcagtaagattcacttatgttacctatgtaagcatttatttaagaaggaaaagcatttgaagatatttcaattaaaaacaaaactatgaacctttatgacagggagatatactcagataa

SEQ ID NO: 10336 - DNA, 1055 bp, Homo sapiens
gaagttggttatgaggcaagtggacctgagaaaaaagactaaaggggaagaatagcaagtaaaacagaactccacttgctagatctctccctctgtcgcgctctttcacctgacccactcccttattccccccacaccctttccttctctccctacgttaccgcacaggaacgaagtctgggtcatgtgcggaccgcttgtggctcttaaatcctctttttgtcaccctggccgtgcaaaattttgaaacgtccctcggcaaaaaaaataaaaataaaaaaaaaaaatctgtccctggcctcttccctagttctgggtccagttgcagccaagtgaggggcagcgcgcgctcccaagtccccgtttcagagacgcgcacgcgcctggcgcccaacccccaatcccctgctgctcagtgaccccgcccacgggtttccgggccggcgtagctatttcaaggcgcgcgcctcgtggtggactcaccgctagcccgcagcgctcggcttcctggtaattcttcacctcttttctcagctccctgcagcatgggtgctgggccctccttgctgctcgccgccctcctgctgcttctctccggcgacggcgccgtgcgctgcgacacacctgccaactgcacctatcttgacctgctgggcacctgggtcttccaggtgggctccagcggttcccagcgcgatgtcaactgctcggttatgggtaagccgccggctcggcagtcctccgggtcgtcctttctgcccttgagcccctaacgcagcgccacgccaactaccgcttccccccaggcagacgcttgtgggtggccagagcatcttgactggattcggggacccttggggaccttcttccccgccaggctcgcgaagttaaagttcatctgctgagaacttctaactccacactttcttggttatcttggggactcaacactttgatcaagaacttttttattcctcccgcttaattttgtttgctttgagagagacttgggaactgcaatcgtttggttctccagtccgatctggtagcgttat

SEQ ID NO: 10337 - DNA, 1058 bp, Homo sapiens
cacagacccttgattctgttagtatcagtgataaaacatgattgataaaactaggcatgatacattcttaaggtacagaaaaatgtggaaattgtgtcaagaaaattcacaaattttaaatggttctttaggctgatagtaataaatgggatcattataattttatgtaaaaccttcaaaggcttcctactaaagaaagctgaattccagtaacagattgagcccagactactcagttcatatttgaggccaacttagactatttttgatgccttaaagattccttcaagtcccctttctctttctaccatacccccagtaaagctacttaaaatcctctgtaggaaagagctgagtaattgggggcagagatggaggacaaatttaagggaacagaaagccattgggaagacaaatgaaagccagaatctgaagataattttaaaaccttcagggaaagtaggtgtctaatcacaggacttaattcacttgagtagaaatttgtaatttagccataggaatttaggaagtgttagttacaagaggtaacttgaagctgtggacatgatgatagcttttgttgcataattagaatgtgccaaacactttgctaagtgcttatgatagcttttctcttcagaacatcaccatgattatttacagtataacctgtattttacagatggagaaatgtaggcaaaggaaaggggcataacttgcctccagggtcacatagatagcaaatgatgaaatttaattttaaaattagaaactgattccaaagtccttacactcttaaccatgaaactgaagacatctaagtcaccacgcaaaacccagaatctaaatggccatttattagtgcttattcctttatttcctaatattaattaaatgacttaattaccatgagaagataatgtgctttcagttttcgcagtagttagttcagccattgattttcttactaagaacctctaaaaggccaatgggcagttgacaaaaattagggatggattctgcagctgtaagaccaagtgaaagtaaaaggcccatgg

SEQ ID NO: 10338 - DNA, 1078 bp, Homo sapiens
ttttcctagggattcagtcaatcatgttgatcttccatcagactgatcatccttactccatgctttggctctagcttttccatgagttttctctattcagggagggatttcaaatctacatcttagatgcagtctcaatctaatttcatgcagttcacaaaaatctggcggagtaagttttagctgaaagaacagtttttctccctgatgagcatcttcagttcacacattcagagtgattgtataggttctttacagacttgctaaagcttacaaagaactatgaacagtctttgctgtaccaaaagtatttcctttcatttcattcctcaggtgttcactgagcatttactattaatatatgcttccatcatatcacatggctgcagaacatttttcagtggtgttctattgcctgtagaataaaattcaaacttctcagcctaatgttccaggccctgctacacttagtctgttacccctcctccccaatttccaccaacacacacacaagcagacagacagacacacaaacacacacacactccatatatgaatgctattccttcctttggactttgcttattctgtggcaactgcccagaatcctcctcccattcttatgtatatgaactcccaccatccttcaaagacacattttacatggactgtgtagtgtgctggtaaatatttcccaactaggtctccagaaaacaagcaagctgatttgtattatagcatttgttgattttcataaagtaaatactcccactacagtcattttcaatcaaggtgatgtaactgaacatagagttaggaagacattggccaggtgtggtggctcacacctgtaatcccagcactttgggaggctgagttgagtgaatcacgaggtcaggagatcgagaccatcctggctaatatggtgaaaccctgtctctactaaaaatacaaaaaattagctgggtgtggtggcagccgcctgtagtcccagctactcaggaggctgagacaggagaatggcatgaacctgggaggtggagcttgcagtgagccgagatcgtgccactgcactcta

SEQ ID NO: 10339 - DNA, 1033 bp, Homo sapiens
aatcctgtagtaaaagatcataaagatatttataccttcacatcagtaatcctgctcttgtgaacttagcataaagacatagttcacagaagagagatgctatgcctaaaggtgtgttacagcattatgttttaatgtgaaaaattggaaacaacctacatgttcagcaagagggggatcataaattacgataacctagaatacaatgaagattatattacaacaaacgtatactgaagactgataagttgggaaattaaaaaataagtaaattttaattgcaggtctacaaaatatgcttctgggccaagacaaggagatttgtggaaaatggaaccatagtgtcaggataaagaaatgggttttactgtttttaaatgactagtgaaaggaggaatgtgagagaaatggttttggggacaggaagtttataaagccttagtagtggtatgtgcttctggcaagcaacagaaagaacacaaaggcaaaacacacacacacacacacaccccaaattagggataggactagctgcatgtgaattgcaatgaaaagccctgtggggtacttgatggaggaaaataaagatggttggtactactttaattggtagaacaaggtactactctgttatttaaataccaatgcacaacatttcccaaagaaacctttctttatgaattctggaagaaaactttctttgggaaaggttgtgcattgttttattttaagttccagggtacatgtgcaggatatgcaggtttgttacataggtaaacgtgccatggtgatttgctgcacctgtcaacccatcacctaggtattaaacccagcatgcattagctatttttcctaatgctctccctcctcccaccccacccccaaacaggccccagtgtgtgttgttcccctccctgtgtccatatgttctcattgttcagctcccacttataagtgagaacatgcggtgtttggttttgtgtcccctttattagtttgctgaggataatggcttccagttccatccatgtcc

SEQ ID NO: 10340 - DNA, 1047 bp, Homo sapiens
tttctatagcattcactggagttgttggcttcttattaggtacatatataactgttgaagaaattatttatcctactcccaaagttgtagctggcactccacagagtccttttctaaatttgaattcaacatgcttaacatctggtttgaaatagtaaaagcagaatcatgagtcttctatttttgtcccatttctgaaaattatcaagataactagtaaaatacattgctatatacataaaaatggtaacaaactctgttttctttggcacgatattaatattttggaagtaatcataactctttaccagtagtggtaaacctatgaaaaatccttgcttttaagtgttagcaatagttcaaaaaattaagttctgaaaattgaaaaaattaaaatgtaaaaaaattaaagaataaaaatacttctattattcttttatctcagtaagaaataccttaaccaagttatctctcttttatgctactcttttgccactcacttgagaacagaataggatttcaacaataagagaataaaataagaacatgtataacaaaaagctctctccagatcatccctgtgaatgccaaagtaaactttatgtacagtgtaaaaaaaaaaaatctcagttatgtttttattagccaaattctaatgattggctcctggaagtatagaaaactcccattaacataatataagcatcagaaaattgcaaacactagaattaattttacactctaatggtagttgatcttcatagtcaagaggcactgttcaagatcatgacttagtgtttcaatgaaatttgaaaagggactttaaaacttatccagtgcaactcccttgtttttcgtcagaggaaaaggaggcctagaaaggttaagtaacttggtcgagaccactcagccttgagatcaagaaaacctaatcttctgactcccaggccaggatgttttatttctcacatcatgtccaagaaaaagaataaattatgttcagcttaattttagtgttgaatctatttgattatattttaatacttt

SEQ ID NO: 10341 - DNA, 1084 bp, Homo sapiens
caaaaagaacaaagctggaggcatcacactacccaactctaaactatacgagagggctgtagtaaccaaaacagcattgtactggaacaaaaacagacacatagaccaatggaacagaatagagagcccagaagtaaggccacacacctgcaactatttgatctttgaaaaacctgacaaaaacaagcaatggggaaaggattcgctattcaataaatggtgctaggataaccagccagccatatgggatagactgaactggaccccttccttacaccatatacaaaaaattaactcaagatggagtaaaggcttaaatgtgaaaccccagactataaaaaccctggaagaaaataccattctggacataggaatgggcaaagattttatgatgaagactccaaaagcaattgcaacaaaagtgaaaattgacaaatgggatctaattaaactaaagagcttctgcacagcacagaaaactatcaacagagtgaacaggcaacctacagaatggaagaaaatttttgcaaactatgcattgaacaaaggtctaatatccagcatttaaaggaacttcaagaaatttataagaaaagaatctcattaaaaagtgggcaaagggcttgggaggccaaggcgggcagatcacaaggttaggagtttgagaccagcctggccaatatggtgaaaccccatctctactaaaaatacaaaaattagccaggtgtggtggcaggcgcctgtagtcccagctacttgggaggttgaggcaggagaatcgcttgaactggggaggtggaggttgcagtgagctaagattgagctgctgcactccagcctgggcaacagagtgagactccaccccaaaaaaaaagaaaaaaaaaagtgggcaaaggacgtgaacagacacttctcaaaagaagacatacatgccgccaacagtcatatgaaaaaaaaatgctcaacattactgatcattagagaaatgcaaatcaaaaccacagtgtgataccatcccacacttgtcagaatggctattactaaaaagtcgaaaaataacatgctagtgagcttatggagaaaa

SEQ ID NO: 10342 - DNA, 1032 bp, Homo sapiens
tttagagagtagtataatgaactatgtaaacatcacctggcttcaaaaattattaactcaaggccagtttaaaaaaaatctatatcccacatactcaggcacatctgaagcatattttatagatgagattatctgaaggtaatcagaatagttgcagaatcactgctatataaaaagttggatgtaaattctccctatagttttatgaatataatgtttgttttgagaaacagtgttataaagctaataccaagagagactccaaagattctgaggattctaagatattaaatattgccattcaggtagctcccagtttatttaatgcctaacatttgtagacttggggaaaatagaatcttgctgtctgctttgctccatagtttatgtttcatagtctgatgatctggtatgggagcaaaaccatttgtaaacatctatttatactaaccccagacaaaatagatctaaaataaaattttataacattttacttgggtttctgctctctgtgaattctcctttagataattctcccaaattcttacaaattttcacagctacaattattgctgttgtaaacgtaactacagattttcatgtttgtctttaactcatgagcactagttaactgttgacatttccttaggatctcaaattcaacaattccaaagtctgacatgtattttctcatctaaaaccagctttactttctcattttcctttttctttctgttttatcttcagttgcttaagcttgaaacactggagtgattccttttactttgtccttggttctctatttcaatcaataattaaggcatgttgacttttcttttatatttctcaaattcattccataaaggagactatacataaaacacctataatgctgcgtgacacagaaggcctcaggaaatgttcatttctttctctttctcccttgctgcactgccaccattcttggccactgcctgtatttctgctctggattatctccatagcatccaaactgttctctgccctcttgct

SEQ ID NO: 10343 - DNA, 1157 bp, Homo sapiens
aatttattgtagagtgtatatgttgtgattttctttgtacatgtgttttatgattgtaagttgatggaagtttttcccccttctttattctcctggtaatcctatgtaggttcatgaaggattcctggagagtaaagtgtttatttcaaatagtaccaattcatcaaacccttgtgagagaagaagtgttgacctaaggatatatatgctttgctttcttccatttataattcttttggtcttcattcgtgaactaaagaatctatttgtactttcattccttgccaacgtttccatggctgtcagtcttgtgataatttaccagtatgttgtcagggtaagtataaaaagtttttaactaagttcttatctttcttatgtaagtaaaattttgtttactgtggaggtaaaagtaatgatatgcaaagacccctacttcatatgtggcacacagtgtgcaatcagtaaatgttggtttcttttagggggatgctgctgagttagaaaagtatatgacatagagattaaacaggctttgtggtcagatcttgaatcttggtaaataacgcctctgggctttgtgacagtgcttcagaagatagtaatgcctaccctattagagttatgagacttaggattgtgttcttagtacagtgccaaacatgaaaccaggtactcattaatatatatatatgcaattccataatttcctttcacttctgaacttttatttgctgccactgcttcagtccactgccactacactagtctgtaatccctttacctgaagtatatgcaataacatcaactgatttcattgtccatagtctggggattcttaacccagtttccataaaataatctattgatgggattcagggattcttcaaatcccttaaaatagtttgcaagatttagtatttctgtatgtatgtatgtgttttgctgttgagcagttgtatagctttcatcttgcaaaggtgtcaaagacacaaaaaaggttgagaatccctgttctagtcactcctgatctaattaatcttatatattatttccaaggtaattgttgtaaaatcttcattagcaatttattaaaaattcttattatggatctgtgtttcatttccctcctctttgattttcaaaagttgtagttt

SEQ ID NO: 10344 - DNA, 1081 bp, Homo sapiens
ggtggtgtgtgcctgtagtcccagctacttaagaggctgagttgggaaggtcgcttgagcccaagaagctgaagttgcagtgagctgtgatcatgtccctgcactccagcctgggtgacagtgagaccatgtctcaaggaaaaaaattgccttttcaactatttttaagtgtatagttttgtggccttaaccacatcccctgagagatttttttttggaaccccttatgtgataaatgaggacgctgagacttacagaaacaaagctacctgcccaaagtcacagagctagtcagcttcagaggcaggatttgaacccagaactgacatactcagaaaggtcccaggttcctgggatctgtggtatataacagttggagtccatgatcactcttctgcctctgcccaccatttgacagtagaaagccatttgctagtgtatgtctcttttttgaaactctaggggttggattgtgtttgccagtgaggtggtggtcagcccgatttagggtgtgtggctgacgcaggtgctgcctgtcagcggttgccaaggttggtttgtgagctctgttgtgtcttgagaaggttgaagagtgggctgctgtactgagagggttgtgtgtcggaattctgtctctagaaggtcctcagcagtgcagtggaaagggcaatggcctagagctcagatatgtggccttgtcaggtctgggttattttggagaacacacattgaacttgggaattagtctgtactttagtcctgattgtgccgtgtggtagacatacttaggcttccatttcctcatttctcagtgagtgataaaaatgcctgttccacctgcctcccaggatggtggtgatgattaaatgtcatgatgtagggaaaaagtgctgaggaaaccacagggctctcaaggaagtttctctgatgagaattttgagtgtacaatggtgcgtgagaacagtggggctgaccttggagatgtgaggaggatggatgcggatgtgaagagcagcaggtttgctttatttcatttttgtttttggcagcagcttgtttcctctaccatcgcttcactggt

SEQ ID NO: 10345 - DNA, 1065 bp, Homo sapiens
tccctccaatgagtaccttctgataagttgtaagagacaaatcaactggtttgcttgtaatagaataaaatagaaggaaagcttaaatttacctgaaagaagcattttgcttcattctcgctcttctcttctagggttaaatttgcaaaatccatttcagcaatactggtatcagtggtgcttattaaagtaagttctggttcttccattataccatggccagtttctgtttcctgtgaaccacaattaaaaggaaaaccatgtcaaaatagccttaaaagacttaaactaatcgttttgtatataatgcacattttttgcaagtgtatataaatgtgaaaatggaggaagaaaagcaatgattggcaaagaccaacagatcagatttccttaggcttccataactccagcattcagttgtagaaatactggagcctactttggggaggggatgaaatagtgtgacaatggactgaaaggtatctaccacaatgattacaaacctaaatgcttgtagtgttgggcaaaaaatataaatgcaggttggctgtgccgaattgtatcctttaaagggagcaggggtcgactgggctgctaccaaatgtgggccactgactgctaacagataatgtttcaaaagtatctaaacacaacaagaacaaaagcagccacataaaacgtggtttagttgtaattcttattttcaatctgttatgtttatttgtggaaggataaactgcacatactgctagatgaaaaccagtcaccagttgactggtgttgaaagcaagcagattataagttgcttaatatgaggagcaggtttccaatacttattccaataatggatgaattcattgcactggaatgaggctcaacactgaaagtgctgaagcacaggcagaaccaccatttttcagggaagttggagaaaggatatctgaattgggagaaaaaggatcttttgtaaaatactctcagaagacagttttcaaatttttaagtttctgcattatgctggatatttctagtgatcacaagctggatagcaatattaacaagcag

SEQ ID NO: 10346 - DNA, 6511 bp, Homo sapiens
aagtttactgcaggaaatgcaagaaggaaaataattttttagagacttgataaagaacatggggttttcagtactatttttaataagtagcattctgatacatattattgctagttaggatgtcaaatgaaaaaataagcaatgttaatttggatttttaacatctacatgtagtctctaggttatctgaagtaatccagggcattcagctatatgtaattactaaactatttgagttattgcttaatccatgattttttgtttgttttatgcagggggatagtttcatagtaagttctgaattccctgtaagactgagtgtatacttagaagaagaggatattactgaagaagctgctttgtctaaaaagagagctacaaaagccaaaaatactggacagagaggcctgaaaatgtgacaggatcatgaatgtcaaaggtgaagcatatagaaaaaacgacttcatagaaatgaataaagataaatgtggatatatgtaccagtctggtggtgaagaaattctgaaacccagaactttataacaagaaaaaaaatttttaaccctgtgaagaagtttgtgaaagaaacttgtgaagtagtaataattagaaaaaaaaccattaaaacaccagagaaaatacatagaaaaatttgagaaattgtcatttgatttctgaataagagcttacaggtgtcctgtgagtattgaaacaatgaaatgtagtgattttaattttgaaaagaaaatcttaaagtaacttgacacccaaccatcttgaagaggggatttgaaatgctgtaattttatcccagctttgttcagccatgacaagtgacctgtcagatgcttagtattgtaataacctcatttccctttccaaatttagagtatctttaatactattttttttagacagagtctcgatctgtcacccaggctgtagtgcaatggccgcagtcttggcttactgcaacctccatctcccgggttcaagcgattctgcctcagcctccttagtagctgggattacaggcgttagccagcacacccagctagtttttgtttttttagtagagacaggctttcaccatggtctcgaactcctgacctcaggcgatccgcctgccttggcctcccaaaatgctgggattataggtgtgagccatggcacctggcctaatactacttttaactaccattttcactttttattagttcaagaaaaggcatacacatttattcaacatgtatacctggggagaaccagtcattaccccgatgttcattattttgatcaccacgatagagctgactactctgctatgtagtgcattttgggactgcacttatgtatgtttttgtttaacgtggacaaagacttacagataggtgcaaaaaataaatcctcttttgcaacccagaactcattgttcagtatgagttttgatacatataagaagggatattatgatacctgagacagttgattgatgggagtattgatagccataaaggttggttccaggccaggtgcaatgggtcaagcctgcaatccccacaccaaggtgggagtattgcttgaaaccaggagttcaagaccagcctaggcaagaaagtaagaaacacatctccacaaaaatttaaaaattagctgggtactggggcatgtgcctgtagttggagttactcagaaaggggggaggctgaggcagagttggaggctgcactgagctttgatggcaccactgtactccagcctgagtaacaaagacagaccctgtctcttaagaaaaaaaggttgattccaggcctgtagaatagataaacagcatgggatatgagggaaatcctcagcagtattaattttgcattccaatttcatgttgatgatatacacaatggctttttgttttaaaggcttttatcttgagaacatggtgtctggagttaaaggtatgtctcaatttgagttttcacatcatatttgtttatgtgtaggaaacagtatgttgtcagagcaagtttcattttattcagggacatttctaccatgcttttaattcccatttatactgatttctgaaaagaagaatcctagattcacacattttatagtgatgtgtcagattcattttagttgcaagcattagagggtcctgaatttgttagtttgtagcaataatcagaactttggatttcctacttgaagcctacagcattattttgaattaatgcacaatctaaaatgaggcagaggattttatggtttaatgcaaaatatagtataataaaagatgattacacaggtcataagaattcataaatttgaatgatgtagagtttgattaaaagttatataatgccaaagtcgtaacttacaggcacattatattcctgtattttataatggatgacaattaattttgagccaagaattaaaatttgctgaaatcttcgaattgggaaaacaacatcctctgttgcaatactgaagttcataacaacagttagactttaaacttaaatcttaagtttaaatctttttcctttggttcatgtaaaggagctacttgatgttactttttatttatcattcctctggctcctaagcacaacgtgattgtgaaattattgtttttgtgattaacgtagtaggaagtttctgcagttggcaatattgtaagagcatattgcagtttctgctcataatttctttcctatggagtgttagactttgttatttatgtgtataaatactagctggacacagtggtgcctgtggtccccagctactctggaggctaaggcaggagaaacacttgagcccagcggtttgaggctacagtgagatgtgatcctgccacatctcactgtagcctcgaacccctgggctcaagtgattcagcaagaatcacacgatttttaaaagacatggcagatcctgtgtctttaaaaaaaaatcaaaaccttgtaaatagtggttgaggtctatcccgatggggcttttcctgtagcctgcacatcgttggaaacgcctcatagagtaactctgtggttttactttactcacaggactattgttagatctgtgggaaggaattacaagacagttgctaaaagtttgaaaaagacggttgctaaacgttatgaaaaaccagataatctacttttttaccttaggtattggcatactccacacatctgtaccattcttgagtgatcgcttaggtaagttttaattggtgacagtataatcttttgggaaataatgattacagttcagatgatgaatttaactgttcaactgctgaatgataacgggcatgaactaaaacttaattctgacagagctggatatggctgtataataaactggatcttaaatttatacttgggttttagttttaataactggaaatgtatcctttctaaatctttaattggtactttctataggaatgaatgtgatttgaactcattcatgttgagaggtaagtaaaatatttaacttataataatcaaggactcaaaagatgaaaaatagaaattacaccatcccagtatttcaggtataacacagaattagtaagatactggcaaaaatattacaatgtatatatttgtatagagaaggaaaatgaagagactgcatgtctatacctaccaaacgaaactacctgtgttctttgcatcattattcaactggcagttacacatatttcatcctaaagtcacgtaaacctgtgtggatatgttgaatcaatagggatatgaattacataaaaagaattttgtgtaactggcagtttgagcaacaatgagcttgacgtttgttgtctgatctgttaagttacatgtatatattccatctttaagttttatagagagactgggcaaagattaggcaaagactagagttgtagcttaaaatgtagttaatgtagcttccttattacagtgacaattaggaaaaaagctcaaattattgtacttgttaaaggaatttgagaggtttgtgaaagcatttctcagcaatattgcaaatttgggaatacgagttgtacagttcagtcataattgcactgcatggtatctgcactcagcagtttacacctgctagggtgttcaaaggtcagtgctatagaaattcagtatctggcatcgttggttttcttggctttgtgcttgttaaacctggtatttctactgatacagtatttgtgtaggtttctcagagtgttcagtttgatatactctaaaatagtaagcaatgcttttttttccagggtgtcaaattgagaaccaggtagatccccaccacctacagtaaaaaggtaagattctctgtttctattgattctgcttgtttccctctatcagtagcactgccagcataacaagaacttcgtacaaatacactactaagctttaaagacttttacaatgcctcattctagagaatgggcactgttgatcatggtgtccaaaaatagttaatgtggctaaattgagacaggttatgcttccatcacagtatgcatattgcagtggtgacaatgagacctgtaacattttgctatgtttatgagtaaaaatgtaggagaaaaatgttgacttttcaatattagaaataacatttaataaggaattttcagctcttataggaccactttttttatgtgctgtatattgactgaaacattgtaatgtggtatacattactgtgtcttggatcaggtgtcaaaatgtaactgtactttgtacaattcaacttctaggaccctaaagtaaattggttgaagaaattagatcccaaagattcttggtaagttaattcattacttaaaaggccatgcaggttattttgttgaatactagcttttctccaaatgttattttaggttatttatttatctagcaatgctattgcaacatctatcaccacttaggagtaaaaaaaaggactaggcttacgttattatgtgtttaaacttcattattaacgatgttatgatgatgggcgaaatgttcaactgctctgaaggggctgaatgaaaatggcctttctgaacatccatttacattaaatattgcattgtatttcagaagattataaaagctcaaaggtaaaagttaccagaaacatgatcatagagcaaattcggatatgaatgggcatgggatcattgatttttaaaaatacctattagtttaaatagctattttaagcatagaattttcaataccttacttggggtgccgggtttcaggatactttggaacctaagcaacctcattcttgaaagatagatttatgtacttaatagtaaatataaatttgaaatacacatttttccacaggtgaattttgaagtcttcatcagtatatccatattaaaacgagatgacagaagccaaagtaattatggcaagtaatggtttttatcttaactataagttatttgctcaagggtgtaatggtcattaccaaggcttttagaatgcagtttctcatttgctgtggacatgaccataaaaaaatttcccagtaggttttctatctgctactttgctagcaatcagcttattgggaacagttgattaactgtaatagaaatgcaatacaaataaaatgtgaaccacatgtgatttttctttaaaatcagtgagatttgaaaattctcctagatctcttgaatcatgcaaatttgctttgcctttatattgtaacccttgtgggttgctaataaccaagcagtttgtagtagagttaactcaggctcgttctagggactcattcatgttcactcactgtacactcatctctggaaatgtaaaatttacttttatactattgttatgtagggctgacaggacaactggatcagtttcattaaaaaggtatgtatgcattagaaaagacatttgtatgggtcatttcaaagagggcttatgaggctgtgaaacccagagctcttaacgctgtgaccaaagatggaagttctctataggaagccatagcactcctaatgtttggtgctatgttttcctgaggagatataaaacgtaataatccaggattgttgccatgtgagagttttaaaggttaatcaaaatttctcttcttcagggcaaacttgaagataaatcttttgactccagctctttagaggatctaaagtgaccttgatggacagtggaagaaatcacaacatggaattcctcgaataacaatttattgactttaaataattttgtctaatgctacatatacacaattaaaaaacctttacactatttctagaaagtcagcatgtatttttggctcgaagtttctctagtgttttctgtggaaggaataaaaatttgagtttcagttgtgtacttcatgcttgaaaaattaagtccttctccctcagttatactcaccttatggaattcttttgcccttgctctgttttgggcataagcttcttgttttgttttttcttccttttgttgtttcactt

SEQ ID NO: 10347 - DNA, 1062 bp, Homo sapiens
ttctaagccaattatctgaaaaatacgctaatacttaggagtagacttttttaaatatttgagagttgtatgttgaatgaattcagaattaatttatgatcccttgccagaacctgaaattttatttgggaggattaatacatgttaatctcttcagttaatctcttaagtttaaggtgattatagtaaacattagaaatcttattcctgtttttacattttaaaatgcctttagtaagtcccagacatgacaagatatgtacttcacttttccatgttaccagcttaggtaaattcataattgtaatgtgaattttaataatcagcatttgataagtccacaagtggggagtagttaagatagcaaattcagagtctttgctaagggggggcattgccctttttgaacataggcacctgctgggtcttaaaaataaaatctcgacatacttatggtgtttttaatatatagcaagctgttgcaagaggattttttaactatattgaaaaactgaagtatgaacaccacctgaaagaatcattgaagcaaatgaatgttggtgaagatttagaaaatgaagattttgacagtcgtagatacaaatttttggatgatgatggatccatttctcctattgaggagtcaacgtaagtggaatcatatgaaatactttggtaataggttataaattaaatttctatgttaattgcttcatattttgcctttaatatagttatacttaaataatgaacaaagatacagagtatgacaattgggattattacagttgagccaagcttggcacaccgttcatctagaattctccagaacacaaaattctcaaattttgtgtttcctttgactagtattgcagtttcagttatatttcagagtggaatatacaactaattaggtcatcgaagattctgtcatctcgatgataaattttaatattacagagcagaggatgaggatgcaacacatcttgaagataacgaatgtgatatcaaattggcagtaagtgacttatttttttcctattccattttgggaaggcagga

SEQ ID NO: 10348 - DNA, 1050 bp, Homo sapiens
tacaatatgacaaagttcagttgcttaaatgaatctaggaatgaagaatctaggaattataatggagaggtgattaggagtttaaaatggtttattgattggagatccttttcctggtttatatagggcacactttgctttaggaattccccctttgatcttggaaaacggcttttaattgtacattaatactgtattggtaattgtacgttaaaatatgtggctaatgataaaactacattttttacttatattgaaagatgcttttgttggaagggacggtacttttttggaatcttgttgcgttgaatacatttagagggtaacaactgaaagaacctgtgaatagaatttctggatttctttttaaagaaactgatctgaaatggataagaagcttaaccttggtaaatgatttcgcctgaaatcattggcatagtctgaccacgttcaacactgtagtagatactgtcaatatttagggaagctttgtcatatttactaaatttcataatttcagaaaactgtttaaaacaaagagcaattgatggataaatcaggaatagattctcttgaccatgtgacatctgatgctgtggaacttgcaaatcgaaggtgagtggattcaatcatgtttattgtatctgaattatgagaaactattgtatataatgagtgacagtaaagataattttcaggaattgggaaagaaggaaaactagatttcactgaccttccaagtttatctagttacatagattgatataatagcattgcaaatactttaaattcaaaatgtgaatatattatgggacacattcgtcgagaaaaaatgtattctttgggtcatattagcatctcttccagactacatcctccggttcggtaggctgtgtttgttttactcagacactcttagcagtgaaccgaaccatacagccttttggagctcatacattgtcttgaaagatacagtttttttgtaagctgagcatagtggtgcatgccattagtcctagctagctacttgggaggctgaggcaggagcat

SEQ ID NO: 10349 - DNA, 1029 bp, Homo sapiens
agttataagtcaggacttacctcttgcctttattaatttgctgtttcaattaagtttaaataaaactacatgactgaaggatactgcccttcccctttccttcaaggctgccatttgaagggcctttgctagtttttgttgatttgcttgaaagtgtttctcttaggcccatgacccctttcatttatttttttatttaaaaaattgttaattgtagcaaaagcataacataaaactaaccattattaagtgtacagttcagtagtgttaaatagatccatattaaacagatcttcagcactttttcattttgcaaaactgaaaatctatatccctgaaataacaagtctctgtttccccttcttcatcccctggtaactaccattccactttctctttctatgaattcaactactctaggtacttcatagaagtagaatcatatagtatttgcctttttgtgactggcttatttcacatagcgtaagtacctgaaggtttatctacgttgtagcctgtgacttacacctttcatttttagctttggctgctgctgccatgttccctgtatttaagctgtggtttaaaacagcttgagaggactcaactcaggctgccaagaaaaatggcagcaagagctcattctacctattaaatactaacatgttgcttccaggagggaagtgagcaattattgtttattccaaaacatctggatatatatgcggttatatgttacagttaaaaatttgtatactagttcatgttaactgcaaagacaaactattagcaaattatctattagacttcatttggatttgtctctggtttatttaagttttgtctttgatagcagcagaaaatgaatcaataaatgaaaatgaatttatatttcttaaggcatccattactcatcagagatagttaatttagctaacatttggaagtgctgataccaccaacaaagcctagcatcaaataatttcttttaatttcttttaatgtcttaaacacaaataaaaaacttat

SEQ ID NO: 10350 - DNA, 1068 bp, Homo sapiens
ctgtatttcttaatttgcatgtcaacctttctagcacgattggagaaatttttctggactgtatcctcgaatatgttttccatattgcttattctctcttctctctcaggaatgccaatgagtcataggttttgcctctttacataatctcatatttctcagaggttttttttttccattcttcttcattctttttcctttatttttctctgaccaagtagatttgaagaactggttttgaagctctgagattctttcctcagtttggtctgttatgttgttaatactttcagttgtattatgaaatccttgtagtgaaattttcaattccagaagttcagtatggttctttcttaaaatggctattttacctttgtaaaattgttttactggattcattggattgggttttaactttctcctgaatcttgatgagcttccctgccatccagattctaaattgtatgtctgtctttcagtaacttcaatctggttaagaactattgttggtgagctagcaggctcatttggaggtaaggggacattctggctttttgaattgccagaattcttgcactgattctttctcatgttagagggctattgttcctttaactgcagtgtaagtcgagtatagtcaactggccttgtttctgggtgctttcagagggccacagctctatatagatctttactgtgcctagattcttgccctgggtgtcacagagatgtatattggcagaattattttggtgttgtaattttggctgtgatccagtagctggcatttaacattagtgtccagtggataggctcttactcagctgcatagttcttttgtatttctgtgtgttcacagccgtgctctgtggtggggttggggagagagatgaccactcataagggccactcctggaccatgggtgaggtccctcctatcactggcactgtacctgcattactgttgtttggtgtcttgggttgcagggctcccttagacagaggccatggctgccagacaggccacacccttcccagaccagcactgtggaggaaggcatgtcccat

SEQ ID NO: 10351 - DNA, 1131 bp, Homo sapiens
tgtgagaggtatgtgagtttaacagcaacccaggtgaaaaagacttaggtcagtaagagttatgcaggcatacccaactgtccaaatctattgatattttaaacagcatttaatgagtcttgcagaggtgtccaagggagagaatacagtcatggattcttagtttctgtttctggttgggccagtaaagcccttttctcatccttcttttcctcatatcactagcgacagaaactaaaaaccatggcttcagctgctaaaagcctaaaacaaaagaaaacagaacgaaaacagaacaaaaacaataacaaaatgaggtgggttggacaagcttgcacagcaaggaagttctctctgtgtactaaattggccataacatgccaaggatactgtactcctctttggaattatatttcaaggagactgtcaactatatatgatcattcagaagagataccaaataatataaaaaatggttggccaggcgcagtggctcatgcctataatcctaccactttgggaggctgaggcgggcggattgcctgagctcaggagatcgaaaccagtctgggcaacaaggtgaaaccctgtcccctactgaaaatacaaaaaattatccaggcagggcggcgtgcacctgtagtcccagctacttgggaggctgaggcaggagaatacttgaaccgagaaggtggaggttgcagtgagccgagatcatgccactgaactgggtgacggagcgtctccaaaaaaaaaaaaaaaaaaaaattggttgaaggaacttaggatttaggatatctaacctgggaaacattcagatctttatgtagattatgttctatcgtgtaaaatgtggaatgaatagatttgatctgtttagtcccaaaggcaatgctttttaatctattttggcttatggattctctaaaaatctgatgaaagctatgtcttctctccttaaataagtactcacatgcaattgcacccaatttcaaagggttcagccactcccatgaggcgcattcgtgttttccagcttaagaactcctggcccaatggggatggatgggaatagctagaaacatactgatttaagtttctcatctgatagaatggacctggaagatttaa

SEQ ID NO: 10352 - DNA, 1054 bp, Homo sapiens
acccatttaattgtatgtgtgtggggatatatacaacaaaagcccctattactcaaaataatatctctttgttagcagagcatcttatagataaaatcttatcttactgagctgatattattttgggcaaaaaagaaacttaaagtgttttggttagcaatgttaaccataagtaagcaagcatgggcaaatagacaatttctattatctattctaaaatattaaaattagcttaagcaccatcatcactgtcttctcagtctcattgcaggtttgaatctacaagttagcaaccatttacttaaatttggggcctctacctggtacttgttgaatttatgattgaaatgtattttcttattttctgattgcccttagtgttttatgattgctatctagtatttaaaagttataaactatgtactgttagttttgtcttgattgctttcattcagcaaacattttatattgtccctgttatgggttagatattctgctttatattaggactgtacatataaaaaagctgaggtctgtagccacaagattttctcaatttagtagataagagacatttgtgtaaggaagatatttattgaattatttttcctaggtgcccattttataaatgaggagacagaccagactcaaggtcatggagtggcgctagaatttgaacatatttctgactccaagtgtagacttttctatcatcctgtgtcctatcaaaattttagattattataatattaattcggtgcattgcaaatggatggttttctaaaaatgaaaaacttctaaaagtgtcatgcaacacatcagaatcactgttgaaatacacatagttgcaaccactgtatcttttacaggttgttttttggaagctaaggaaaagaagctatagattagaaatggcttaacacgtttattatatttctatttatcttataaggtgcatttaaaatagaaatagtttgccaaattgcaagaataatgctaggaagaaatgattcctgattcttaaatatctagcttaaaattgattaaccctttc

SEQ ID NO: 10353 - DNA, 1048 bp, Homo sapiens
catctttagggggctcttattttgcctatgacactggttaatttcatctctattaatcatagctgccatttttggactccatatcctagccatcaggcctctacatttcacgtgtcctgtactcctcccccatttctggttttgactttgctttttctggttcctgatattagtaggcttaactacagctgttcactatattttttctctggtaacatatttggtaattttccttgctcatctataattattttgtaaggaataaaaactatttctgcatccagtgatttgtatcttacagaatgtgcagctctcactgctaacagaaagagggatgggtgaagcagtacaagaatttgtggacaaggaggagaaagatgccattgaggaattagtgaaataccagttggaaaaaacacagcgatttcttaaagaacgtcatattgatgccctcgaagacaaaatcgatgaggaggtaagtaactaatttgagtgtctaggtctatttaaatagtctgtctttaagagtagctctgagatttttttctggtaaatcactatttaacctctctgatttgtttagtttttctcatctataaaattgaaatgataaaatgaaggttaaattagaaaatgtagaaaatgcctagaacagagtcttgcatatggttggtactaaagtgttttgttccccatggatagtatcttctcttaaagatcctttgaaagggctttaaagtgaaccttgtaggatggtaatttttgttcattttaatttttttagtaagttttgattgagatcttgaatttcatttagaaaatttctgctaagcaagaagcagtggaaaaattacaggaaaagctgtctagacttgactacatagaaattataaatgtttgcatatcacattgtcaaaaaacaaaattaaaagatattgacatgaaaatatttgtatgtgggcagaaaaaagtttaatattcttaatattaatgagctcttagaaatcttaaaaataattaaacatttgatagaataatgaacaaagga

SEQ ID NO: 10354 - DNA, 1908 bp, Homo sapiens
ttaggaaatgattgttcaagaccatctttaaatctaaattagattatcttattacctgtttgatatggaagtaagactagagatcctacaagtattttttcattttatctggtcattaatattatgaatcactgattatctatggtcttttttccccaggctttaagacggttgcttaatattacaaagcatttatctcatggctaatttttatttttttgtggccaagacatcataagttttgatgagatattaaccttgcctttggcatgtgattccagttgctgtaggtgatttgtagtacaaaaatgtagcaaatacttttactattgtaattttgttttgagaagacactatcctcatctatgtttttgtaagtagaatatggagtatgcttttaacaggtgatacgatattcatgcagatacctacttttacatacacactaacattctttgaaattattttgcataggcagatgcactttgtgccttggacattttaagttgtgctggatttgtaaatcactttggacgttcaatgtctgtggagaagatagacattagtccggttttgcttcaaaaaggaagcacaaagattgcgctatatggtttaggtaagacagttttattttactgtttatgtccatgtgtgattctttaaacaattgagaaatttggagataagtttgtatctgtttggaaaaaatggggcaaaccttattctttattggtgactataaaaaatgatggatggttttggtaaaaatttttggtgaaaaaatgtcttttcgttactatttattattttgggttttttttagactcaggtgtagaatcctgaatgttagaattatagaataattagcaaaactgcactttgatatcttggaagtctttgaaaggtctaatgcttcactgtacaataccgctagcttataattttgtgcagctttcataatacctctggcaagtagaaaagcatcatggttatttatattttagagataaggaaaatgaaatctggatgttatatctgattctgcaagtgaaagagcaggaagtgaaatatacttttcttaaaaaagctattaacagttgttttaatcactgcagtgttattagggatcatatctccagaaaattgcctttcctcctccattcagactaaggacagattccattatgcctcagtcaccaccagaagcacatctctccagtcatccattttctcccaaactcttatcttatcctgttctattataccttccttaactggactctgtctccaccctgcacccctccctgtcccccagctcttcattataaactctagaactctttttataattatcagattcctcattattatcagtctcttctctgaatgttacctccactttctaaccttcagtgaagcccagctgtcccctgaggttcctgtgtcccatgcagttctcttacccctgggcttttggaaagaagcggggatcactgttctccttgctccacccactgcttccttttctgcctgcaaacacactgttccctttaagcttctgccatctggctaaaccgcattgctttttctctcagactttttacctacttacctaccttcaattttgccagtgtttttagtgtttcaacactcaagtagattaatcttctaatgccttgggctttgtgtgccttgacttttttgtctccagttacatgttctacattccacctcagccatgtattccattggccactcctgtagcattctccttgggagctaggccacttctaacttctagacttctacattgttggcttttcttctgagaccctctctaatccgtatataaagtagcagtgttgtccacccttttaattccatagtgttaattcgccatcttagcat

SEQ ID NO: 10355 - DNA, 1034 bp, Homo sapiens
cacgccagcccaggagagagttggagaataaatgtaaaaattgacttgcaaattaacaccgccagccttgacttttctggagagttctcttaagtttatctgctaggtccttagttcttcctcccaaatatatatggttcctctctactactcttttcacactaataaacttagtccaaaacgatcacatttcacatggcctgcaggaggtccccttccatctttctgcttctattcttttctgctacatctactcagcatagcagccaaagtgaacttttaaaataataaatcagatcatggcactctgttgcctaaaattttccaagtgtccttccattgaatctagtataaaattcaaactacaaggttcgacttgatcttgacccctgccatgaaacttcatctcctactactctctgcctgatttacagtgctacatccacaccggcatgttctactctgaggcccttgcacatctagttctttctgcttggagcacattgatcttggtggggccgacttctgagagttcaagtcttacctttttggagacgtcttccctgatacttccaagcactgttttatcacattactctgctttttttcatagcatatttttaatagcactatctgaaataatttattgaattatttacttgtttattgtctgttgtcttcactagaaggaaaactccatgagagtggaaatcttttgtttgttcatgctgtatcttagtgcttagaaagaatcagaaagcagtgggtatacatattttaaatttcttaattaagtgaggcaatggctggattctttcttttattttaggttcaggggtacatgtgcaggtttgttacataggtaaactcatatgacagggattgttgtacagattattttggcacccaggtattaatcctagtacccattcattatttttcctgatcctctccctcctcctatcatctgctctctggtaggtcccagtgtctgttgttcccctctttgtgtccatgtcttctcatcatttagc

SEQ ID NO: 10356 - DNA, 1026 bp, Homo sapiens
ttgttggcctataatgtggatattacagtagatgattactaaacattaactgataaaagaggaatatctacaatccccaaaaccacataaactacattaaattgattggctactatcatgtacagatgcctacactaatattagggtagtcctcggtgctgcttctttctattagacctaaaaacattaaatatttatgcaattaaaatctatatatttctattttttaactcaaaagtttcttttactggagaaataataagaatgttttaatgttctaagtaggaattgccattcttgctataagaaagcaagattatatattaaggatgacattattcttttgagtgtaattgctgcatcagatgatacacatgttgagcatctttctgtgtaactgactaagccttgcagtgcatgtagtattcttgtctcctgatacaaacattttcagacgttctgtttgcttttttttcctcaggtgggatgatgacgttgtcttcaagaactgtgcaaaaggtgtagatgaccagaagaaagacaaaagatttgtaaatgacacactgcgatctgaatttcacaaaaagttcatggagaaatatattaaatagtacagttttatgtgcttaattaaagactgtaaaacgtaaaggatcattctgactttttttatgagttttttttttcttttcccctgtctaaattgtgtgtgggcttccccagttttaaactcctatctttttctttagtgataccttacttgataatggacttgggaataggtttaacccagtttgcattctccaaatgtttccagtgatatgttttcctgggaaaagcaaatctgcctgtaataaatatttttaatctaaataaccaaatctgggtgcccaactttttgttggaatttatgctgctagtaatacattccataatatcttttgaaaagaaaaattaccattgtgtattgtgcttgtgcattaacttgtccttttccccctgtttctctcacatttaagatgagtt

SEQ ID NO: 10357 - DNA, 1033 bp, Homo sapiens
ctttaaacatcagattttcactttagtatcttttaagtaaatactaggaaaaattttttaaagcttttcacaggataagcataaactgttaaaaaaaaaaatgagggctgatttttagccatgtaaaattttataactagaaagaaatgtaatttgtaggaaaattataatttataaaaattagttttattttataacccaacagattgactttacaaaaataacaactttaataaagttatcagaattttttagattttatgggttatttttactgcttgcagagccattagacacaggtttgagtgttgcatcatgaacatggataaatatgcctaggtgtgtgtgtgtgtgtatattgcttatatacacataaaaaaacctttgtgaatgtctaataagattttccaggtgtttataatggttactaaactgataacattttcacttctaggttcatgtcaatctacttttaatggaagcacgaatgcaagctgaacttctttatgctcttcgtgccataactcggcatttgacctgaagtatcacccaaggaaaatgtcatacatgtgtaaagacctttcacataagataaacattgaagctatttgtgatatagcatcaaaaattattcagttctctagtgtcaaagtttagccgtttgtttttttttttttgttttttgcggctgtaatgtgcaatgatgtgttttattttccttgatgcttaacattactaacaattgcaaaaataatactgaggagcactactttgcattgtttgtagttggagttttggatactgatcataaatcatgaatctggcgtattaatgcttaacttcagcgcctttgggttgtgtgtatgtgtattttttctccccccaccccgcccttttttttttaagaataaggacaagtgcttacaatctgctcaagcaattgtttttcagatattggaattcagcaaagagtgacctctctggccattctaaaactttaatgttgtgtcctaaatctggtggaggaaaagca

SEQ ID NO: 10358 - DNA, 1050 bp, Homo sapiens
tagagagcttactctgtggttagagagaaagatgttttctaaataattataaagatagctaaaaatggaaaactataccttttgactttttgtagaggttaatagattattatgtatcttcacttgtgaaagcatggataatgtttcagttaatttaatacattactgtatggaaaagaagggtagttaaatattaaatacttgttcttatgtttaaggcttaggtatgtggtttcagtggactatttttaatgatttttaaaaatatatatttgaattctcaaaaatgcaaaatgtgttatagataacattatagagtatctataaccagttattttataaatgggtgttttttacttaagtggctttactttccaattttattttccatttctaataggatgggtcatttgttgaacaaaatatcgaattaatgacctactttgagccaattgatagttttctaaacccagcctattctgtaaatcttttctttagcttgtaagacaatttctaaacatgttgtctagttgtgttatactaaggaactcagtattgcataattctaataacagcagttactttttttttttgagacggagttttgctctgtcacccaggctggagtgcagtggtgtgatctcgactcactgcaacctccgcctcccgggttcaagtgattctcctgcctcagcctcctgagtagctgggactacaggcgtgcgccaccatgcccagccaatttttgtatttttttttggtagagatggggtttcaccatattggccaggctggtctcaaactcctgacctcgtggcccactcgccttggcctcccaaagtgctgggattataggcatgagccttttatagttgtatagatgatgtcacactcttaagagctttacagatatttattcatataatattctcactgcctattttaatagccttctattcacccactgctgtgggagggactgccactcttgggtcatgggggtggctgaacgtataatacctaacactggacagatgagatcaacagtgg

SEQ ID NO: 10359 - DNA, 1047 bp, Homo sapiens
atttactttcctgaatgtcattgtaattcagcagtacaccaaactagataacaatttttaggaatcaactcggtcttcattgaattaatatctttcccaaattgctatgattgactgttcctacttcccctcccccagaccgtagctatcgttttatttaaaatgtttcattttgagaaaggttgaagtattaaccagcaaagaataacaattccgtaggcaaatcagtttgtttcatgtctaggacgatggttctgcagtgtggttctagaaccagcagcatcagtatcaactgggagtttgttagattattaccccaccccccacccctagacctgctgaatcttttgaaattctggggatgggacccaaccatctgtagtgtaacaggccttccaggtgattctaatactctaagaatttagtaccaccagtctagtagtattaaccaaatgcttccacaaatgaaaattgtttacatccacttcagtttcaacatgcattatcagttgtttgagatgatattggcagcgccagtgctagaatcaggaagattccttttgcctattttacaaaatgcagatttgagaccttcagatataatatgctctcactgtaagaaaaatatgtcttattttattgttgctacattctgaactttagcttggggaaaaaggaattgggttttgaaagcttgtttacgacaaatcaagtgaaaatatctcttggacgtgcttgcttacataaaaataagcgttttggcactaacattggtagactctggtaggtctttccatcttagattatttttatttcaaggaagattgatattttaagctttcataaagaaaactttttttaatcaaagaagaaatgataacatttgtcctgatgacagatttgggattgatatgttgttttttaaaaattcttttgaatctcttggacaatattaaatacatatatatatataaattatggatgttctctttcacctatagtagcttactcttcaattaaaaatggagtgtcagaaagtctccattt

SEQ ID NO: 10360 - DNA, 1048 bp, Homo sapiens
accctaaataaatagaaaacataactactaatgtagtgatactggaagccacagatgtggttgcagttaggtctttaacagatcttttgatttcaaagcagagttttctctgtaaaatgttgataatttttacttgccttacagattgctgtatagttggagagagatagatgtgtgttaatgaactttataaaccgtgtaagaaagaaaaggacaagtccatatatttttccattttcccagactatgttagttctttccgtcttatgggaatatatttcaatacatactgagtaatttggttaatactcacttttctgtcctgtttaattattgcctgtaaatgagaggtaaagattatgcttttagtcagaatgacttttttttttttttttacttatttttgatttccatatttctgtctgtattccctgcccctttcccacccctgcacttaaatagcaaggcattgacttttgattctcgaataattaaattgcctccttgacacttcagcaaataaggggaattggtatttagtttgaaaagactaagagttaaggaaaattgtgcttaataaaagggggggtggtaaatctagggtaaagcaaaaatttttaattagtttaggagaagagatggaagtaaaagtcttttaaccttttctccccatctcttcagccttttcattttcttcctttgaaatatttggattataataacttaagtgtgtattgaccttcacagtttttagggtgctttcacattatttcagttgattctcacaaactgagaagatttaagtggcctggtctcagtcatacaactaataacaaagaaatccatttaattcttaatactgcctttgtaataagctgtttctaattgtcctctgcaatattgaggctgctagggaatatccctactcccagcttcaccatctgtggaatgcccaaagataccgaagattctccaggtaatattggttggaaacatgaaagttagccatactttaaatactattgtagattaactgaaggagtaggag

SEQ ID NO: 10361 - DNA, 1050 bp, Homo sapiens
ctatgagataccaattcttccaccatttgttttagtttcagtgatgtatcatagaagggtcgatgtcgtaaaagtcaaaagcaggctgggcgcagtggctcagccactgggattacagtgggattacagaatcccagcactttgggaggctgaggcaggtggatcacctaaggtcaggatttcgagaccagcctggccaacatggagaaaccctgtctttactaaaaaaatacaaaaattagccaggcatggtggcgcgtgcctgttgtccaggtacttgggaggctgaggtgggagaattgcttgaacccaggaggcagaggttgcagtgagctgagatcgtgccactgcactccagcctgagtgacagagcgagactccgtctcaaaaaaaaaaaaaaaaaaaaagtcaaaagcagtcttgaataattagaacccttctgtcagattatctaatgtcaacttgttttctgacattacttctgtgttgtcttcttcatcttgtggcactggtttgaaagcactcttatccatcccagtcatcttctgttaattcctctatcatggtgtctactgactctttaatttctccaaaattcgtatcttgaaatccttcacctccaaccttttttgccatatctaccatctttttcatgattggctttgtcataaatcctgtgaaatcatgcatatcacctggagagttttctccaacaggaatttattatttcagacttgatggctttcatgactttttctataaaaatgatggcatcatcttcaactgtaatccttccagaccctcataatgttctctctgaagttctcttccacagcattaagaaccctttttatagtgtatgtaatgtgccttagaagtccttatgctccctgatccagagggtgaattagacacactgtgtttagggacaagtagactacttccatgcctttggtgttgaacttccatgctcctgggtagctaggggcaatgcctagtattaaaaagactttaaaaggcagtctcttactggcaaattacttcctgact

SEQ ID NO: 10362 - DNA, 1064 bp, Homo sapiens
tagattgaaaacctaaaactgaaaataagaactttaaaattttagaagaaaatatatgacaatatcattatgacttacgatatcaggaagaatatttaaaataagactctaaggtattaacttttaaagaaaagattattattttgattgtgctaaaatttaccaactttatgtgacaaattccgtatgtgaagactgtgaaaagacaggtcacattttgggatagtagacttgcaaagaatatgtgtaactgataaaagattagtacccaaatatgcaaagaacatctacaaattaataagagaaaatgcaacccaacagaaagttgagaaagtctatgaacaagaaattcaaggaaaaatatatacataatgtttaaccaatatattttaaaatgttaaacctcactataatcagggaatcagggatatgtcatttttaaagcaactgagaaaacttatttcacattcatcagatcaaaacaattaacaagtctgataataccaaggattgtttgaaaagtggggcagtgggaattctcatacagtgctgaaacagccacagtagagagaaatatagcaatatctacaaatgctcattcttcttagcagttccagttttactaatgtagaaagtcccacatttattccaggagactggaataaagatcttaattgtacattatttgtgtacgtgataaatgtacatcatttgatcattaataaattgtggtatattctatgacagaatggtatctatctagctaagtaaatttcaataaacaaaacatactatatattgattatagacatatatgcagttgagaaaatacaagctcctcctaaaacacacgagtaatgtattgagtatcttacagtttctctcttgcttcaccacatcaccaaaggcctgtttacctcagttctttttacctagtaccttttacatgtctgacttccaagaaaaaattacaaggcacactaaaaggcaaaatttatatataagaattatagctttctattataaaaatacttataaaatataagagaaaaattctataataa

SEQ ID NO: 10363 - DNA, 1032 bp, Homo sapiens
gtcaatacagatctaatatggtggatctgaagtatcaaggacccagattgtcttacattccagggttacctcatgaaccaaaattattgttggaactccagctattatatcttcaggaggaagggaagaagaggagcatactctctctctttgaaggatacttttttggcagtcacatgtcattttttttaacttacatccagttggctaaaacatggatggtcccatggccatacgtaggtaaacaagaggctgggataggcagtctcatctgtgaggcctttgtgctgagctaaatttggaggttctgtcactgaggaataggagagaatgggtattggagtcatagcagcttttccccttgggtacagatgaatcatttaaaagaaagacattttccacctaaagtctgcaatatttcacttatgccagagacacccttagagctgcaaatgcgatgaccaaaatagaaaacacactgaaagagaggaggtaatacattgctgcagaccaaaaaagagaattgtatcttggagcactctgaactcttgagtttagctttctatttttttgtgtcttgtcttgggtcagatttttataatcctaatctggaaccataaaatgaaagtggtacatttaatattgacaagatcattaagtgatggggaaacagaaatcaaaggaagaatggattgccgtgctatattgtatttcacttgaagagctcaaggaattgcacggtaaagtagtagtggtaatgaagttgatggcctactctgcttacttccaatttgacatccatttccaagccatgtatccatgtattttatcctcttctagaatgttgcatcgggttctacttaggtattttctctcatttcagttgtaaggatgtggtttccataagggaaataaataaagctgaccattttaatttatgaatgcttttgccaatattcagtttgtttttatatctttgacctaaacattttattaaaaatgcggagacatctgtgtcttatatattctttt

SEQ ID NO: 10364 - DNA, 1096 bp, Homo sapiens
atcctgttgaattttagtcatatgtgctgagcaaacagatgccaaaaggaatacttttgatcaccttgaaaaggaaaccctgtagagagggttacataaagaatagggggagatttacagccctctcccttgcttgtatgctactgacaatgtgaatcacctctgaaggaagggagggttgggtttatctatcacatatgcatcatctcaccacggtagaagccgatgctcttaccagtgttgctaagaggatgagagacttaaaatgatggccaaagatccaattcaaacccaactattatctctcttgggtggtccctatgatctcaatgtacagaggatattgatattttagggttgtttcatgaactcaccttatattcaaaatgagagcccacttatattttcattcagcaaactttagccgcagggctgcaggtatactgctggccaaagtgtgattcctcttctttgaacactcttagtctaatgggagaggaggagactgataaatgaacagtttgtaacagtgcagtccagatggtggttaaaaacagttaattacttgtttgcagtctaactggggctagttactcaacctcttagaggctcagtttcctcatctataaaataggcataagaacagcattaccttagaaaaactcttgttgaagaatcagtgagatcgtctatgtacaatgcttcttaaggtgtctggaacattataagccctcaataaatgttagctggggtttatttgttgtttgcttctataatggttataatcagaggctataacagaatctttttaaaaaataatttatacttttggctgggcgcggtggcttatacctgtaatcccagcactttgggaggctgaggtgggcggatcatgaggtcaaaagattgagacgatcctggccaacatggtgaaacctcaactctactaaaaatacaaagaaaaaaaaaattagttgggtatggtggcaaatgcctataatcccagctacgtgggaagctgaggcaggagaatcgcttgaacccgggaggtggaggttgcagtgagccgagattgtgccattgcactccagcctgg

SEQ ID NO: 10365 - DNA, 1057 bp, Homo sapiens
tactgtgatgattttgtaacataatgtgtataaagtatttaacatgctcatcgatacatagttactactcagtccatggtggttattaatcattcacttaatcaaaaaataaaatttattgagttcttatatagtagaaccatgcattcaagctacatgccccaggcactgtgggtacagtgctaaaaaggcagagacagcccctaacttctcagaacctgcagtctagctgggaaaaccaatactgagtgagtaataaaacaaagaacaagttatgagagggagaagcataaaagagtgtgcagatgcataactctgaggttaaggaaggggcccctacagaagattgtgaaccctgaggacagagtcagcaacagaggtggagataggtgtacagcatgtcccaggccaaggagcaatgcgtgcaaggccaagaagtgagacagcaggaatgtactgggaaagaaaaatcaccaaagtgccagagaggtggacagaggggtggactgagacgggcaccaaatcataaaagactttgtatgagtataagccatactaaagagtttgttttgggttttatcctaaaatcaatgggaagccattgaaaaagctgttattaggttggggggttggcaacataatcatatttggcttcagtataatagagatgagtaagacacagtcccttgtcatcgaaacaatataatctcatggcggcagaagttgaaggggtcacagttaaagaaggctcaggaacaaaaaatgttcttaggtacaaaattctaggtgaaatttttaaaaagggagtgaccacatctctgtgatgtgacatttgaaacagatgttaaaaatggactgggcaccctttggataaggagagctgctggtgggaaggggcgctgcctcctggatatcctgtctaagaggtaaaattagcaggcatactcttaaagtgctcccagctttgttaactggattctacatttcccttccttccaccactccatatttcagaatccctttgagagaaaactctgccacccttattgtagcccct

SEQ ID NO: 10366 - DNA, 1030 bp, Homo sapiens
agacgtttctagtaaaatcattattccctttttatatatgtaagagaaatttaatagcttctctctaagttcattcactactcagaaacctgattagaactgtgaacttctgatttcaagatcaatgctggatccatttgtatcccccagtgaatctctagaattcgagtattagcaagtatgcaggtaatattgtataagaaacatgcagtgctccattaacctatatgcagtcaggacataccctgaagcaaagttttaactacacagaaatgtggccttaaccttataacaagagctttttttttggcaagtgggctatgtaagaacactgcatgttggaaataatggtagccagagaggaattagagatattctatagctacttgaaattttcagttttttaaagaataattatttcaaggctgaactaattaagtacatttctacatcctgtaaaatcttacgccccacctaactttaaaaaaaatacaatatacattttgaggatttatggtatatttggctcaacaatcaagataactgaagacggactcatctctaacaatccagcagtgcaattagagaagtctgccttaaggggtgatttttctacaaagacagccaatcttcaaaatggccagtggcaatatgttgtgttgacctgttttaatgtatccctctatgttaggtatatgcaggatggactggggaggaaaaagaaaagaaggcctttggagtaataaagatggagatgagatttggtgactggagaatttaaaaataaattccagtgcacctaaatatccatgagtcttttcagtctaccagtccatgaggttacagaacatcaagaccagattctcacaggttacaacctttctactgcaccttctcatttgagaattccaatcctgttcaaagttactcctaaccctcaactataccccaggtatttgggagtccaaaacaagagtttgacaagctctcctaaataggagcaactgctgaatactagcagctgccactc

SEQ ID NO: 10367 - DNA, 1029 bp, Homo sapiens
cttgtgttacagatgtcacctcatgcctctcctgcaccttcccctaacaagtctcagatgctgagacttggagatgggaagagtatttttgcaccatctctgcacagtgtggctcagggacctcacagcctaaaggtcaccctgtgcaaggcaaagtgctcctgcttgaataaccacagtctttgtccagtgtctatctcttccctctcagtttatttgcttctctgcctctacccctaagaatctgtataaataatgagcttctcaggtcattcaagggcaactcattaactcccttaggaaaagccagcaatgtcttttcttccaaagtggtggcttaatggccacaagcagataatgctttataaaaaggtaataataaaataataaaatgactctcatgtgatatgtaacaaaaggcccaatttaggagacaggtgtcaattaatgcggccatcactcattcttaccagtggatgacacaggaggaaacagaagccaaagaacctaggattgagaatatcttgagaaagctgcatctgagcataatacataagcagcttctttttgcaaatcatggcaggttttgcatttgattcctcgttctacatggacccttttaagtattttcctgatcggtggtccttcttccctcctctcatgccctttcacgaggtgtatgcacatccgttcatgtgcagtctctctctctctctgtctcacacacacgcacacacacgcgtgtgtttaaatagacaaaatcataatgatggtagtgatgatgatgatgataaggagaaggaggcctggtgtctacagaactttatcctttgagtgtgcattttcatggattaactcaataaatgtttaaaacaactcaatcatctttgttaggtaaagtaagtgttatggtttacatttaacagatgaggaaattggggctgacttgttaaaaaaatagtagtaaagccaggatcagactatctttctattcttcttcttaggtggttctcttaccatagcacactg

SEQ ID NO: 10368 - DNA, 1045 bp, Homo sapiens
ttttttgtatttttagtagagatggggtttcaccttgttggtcaggctggtcttgaactcctgacctcatgatctacccaccttggcctcccaaagtgctgggattacaggtgtgagccaccacacccagccactatttttaactttcccttatagatgagacaactgaaacacaggccactacctcacttgctttgggtaaaaaatttgagagaatgtcaaaaacctcagtaatcaagattaataatattttaatgtaatcctttaaaaaaccaaaattaatcctaataaattcatgatgatcaaaataccaaaatataaaagaaaggcaagattcaataggcagaatgttacaataacttgccaggatgatacagttaggaagaggcagggtaaggacttgaacccaagtgggttgaccccagggaccacatgcttaactgccatcgtgtggtcctcctaacaaataataccactacaagtcttgatgttttgataggacaaggaaaggtacaggcgtaggagcaagcgtcatttgggattaagggatgcctcattgttttggactaattgggacctcatgcaaaaaaaaaaaaaaaattctaaaaacagaagcagaaaatccagatggggcctaaattttataccttgaccatctatgaatttaagtatgaaaaaagaagatttccaaagcatcctcttaatttttcttctggctggctcctgctgggagaatcagtgggtaaaactaccctgcattctggctgtagaaatgtgataattagaatcacttaatataactgcagtgtcctccttggttcctccaccttgagagagatagatggagcatttcccttgcttgcatccaatctgtgagattctggcaggcaggctgcttgtcttgagggcttgtcattgagagctggtcacctagaatgccccgacatgtttgagctgcattgttaaactacattggtattctcccagcaaaactcctctccttcttttaccaaatcagcattctgtgaacacagtatttccttgc

SEQ ID NO: 10369 - DNA, 1046 bp, Homo sapiens
aaccaaaaattccagccatatttatcagaatatactgtgctttgtgttttagttgaatcagggctttgcccaagtgtcgctctctacaaggcactgtgggacaatattgttggaatacccaagacatggaaggcatggtctctgatatcaaagtagcaatttcaccaaagttgtcagatttaggggttagcatcccagcccttgtgacaccagcagtgcttcttctgagggacactgctgagaatggagaaggtggcaggcaagggccttccacagacgcctccctcccctaaagaatgcacaacctcctttgcccttgcttgcttcctgggttgcctttaactggacccatatcccttggcatctgccattcattatttggtttctactatcaccctgtctccagctctgatttggctcttcattactgaactttggcgtgttgtttattctctcactggagtttaactttgggtggtacctgttttctgtttcattagtcccatgactgcattgacaaccagaaggaacactgtcctttatctgacatgtatttacacatattttcactaatatattaaaaatgtatttattgaacacgaatcacatgcaagcattttactggggccctgggaatagagatgccctcattggattgcagagtggagtgggaaggtcggaaaaatgaaccaataattaaatataatatcttgaacacagaagaggagcacctacccatactggatggagtcttgaaacacgaggggaataagacagagaagaacgcgcccggtcttggggaggtataacacatatgcaataaggtgatgacatatcaccgttagataataatcgcagacaatgaagagtgtgtattcttctcagctcacatacaatctgatagcccagttcactcttccctccaatggtttttactccatcctctttctggtcccaccatcaattaccttggagacagtaggaaatgaaaaagaaaagaggtggaggtaagagagaggaaagacaagtgggaacccagggctcaa

SEQ ID NO: 10370 - DNA, 1096 bp, Homo sapiens
tcagccatggcttctcctgaccaagggatgttaaagttatctagaacattaagagtgttaatgagtatatacagagagactaattgtgagcaaaatcattaattagggtcatgtttacatttttattgtggctaatctttcatctgttcggactaaggttcttactgtgttccaaaggtgataataatataactaaattcctctgatactaaagtagtcacacttttatttcttaatttacctgagttgattcctggccaccctccccctccttatcacactagagataattttcagtaatgttttctttatgctgttaagtgattcccttcccagtggagcgagaaggtgaatgtacttaatgaaatgattgatctgcattttggcattcgtccaaattgataaaatatagagggacttttccattcattattttgttcatcatttatagaaaatgcggaaacttttgggtaggtttggctttctgccaattaatgttgtcactgttttcctctgatgcatattcacatgagtcaacagaaaccttttcgactaagcagagttagatttagcgagactgcgtacatcacggtatttattggatgtggaaacctaaaataggaggggcgtggtaaaacctcagacagaagtactgacaaagagtttccccaaacaatagaaccgccatagcccgcacacattcccaggacacattctacagaatggacaaagaaatactcatctgtgtcatcacttgctcaaaaaaaaaaaaaaaattatctgaaacatggaaggtatatcaatcagatttgcatttggctgtgagtgatagaaaatgcaaaataatagtaggttaaaatacataaattttttttctgtctcttgtaaaagaagtcccagagtaggtaaaccaggagggagacacttaacagtatcagggatccacgttccgtctcttctgcggttctgcccaccttatcatggggcttccctgtcacggacaagatggctgctagtggtccagctgggaagaaggagaaaatacctgcagcaacagcaacaaggactacccctctcttttttttttttttttttt

SEQ ID NO: 10371 - DNA, 1036 bp, Homo sapiens
ctctgcaggatctcaccaattgttttcagaagaaaattaattagaaaacactcttacgtataattgctgttctagaaaatggttacaatttacttctttaaatgtttaacaacattttaaattatgtattgttttctttttgccattcattcatctcttggtggtttggggtgtgatttgtgtttttcccctctcttgacttatctgagaaattctggcactagccaggtttgggatgtttttgttcagacattcttaagttatttggtaagaagaaaggctttgttgcatttttctgctgagaaacaactttctttttctttgtttcaaccctgaacttcctaaaagctctttatttctatagattgttctacaaagctatgcctcaggaggtgagagactagggagcattttttttttgttcaactagaagtagccacattttcagaaaacaactaataagtttaaaatatgtcaaagataactttacaagagaccgcgtgaacatagatatgtaaaggagagcctagtgctctcaatgcccatatctgcaggcctcaaaattgcttatgaagtctagaaaccatggccatctgccagccggaggcagcatcaccacaatggaattcacagtcactctgttaagactttataaatacagtgagggtccaggagccaggaccttcaggcgcatgaggcttgtctggtctggtctggccgactgagcaaggaaaccctgtccttgaatgaggacttcctcagcttcagtgactaaatgtttgttctcaaaagtaaaatgtcccaatggaaggtggacagcggccatcttcttattttatttgtttatttttagccaggcactccattagttgtggcaggaagtcatcctgagaggaaagtcaaggtgtatgtacatggttgacttggggaaagtgtttggaagttggaaaagtggaaccatttttgagtgtgacttcatttctcttctgacctagctctacacagtgtcatatcctaggaactgggtgctagcatg

SEQ ID NO: 10372 - DNA, 1083 bp, Homo sapiens
tttgaaggaagtaagagagtatgttggcccaatttgtggttctaatacttcagcaatgcggtccagcattctggcctccatatctgtgaacccacattctcctcttagaaatgccctccttggccgggcgcggtggctcacgcctctaatcctaagcactttgggaggctgagataggcggatcgcgaggtcaggagatcgagaccgtcctggctaacacggtgaaaccccgtctctactaaaaatacaaacaaaattagccgggcgtggtggcgggcgcctgtagtcccagctactcgggaggctgaggcaggagaatggcatgaaccggggaggcggagcttgcagtgagccgagatcgcaccattgcactccagcctgggcgactgagtgagattccatctcaaagaaaaaaaaaaaatgccttccttttctttccacccacccacatcctacccagacatcaagttccctcttaacaccataggcctttaggaagctctccttggataattgcccaccacagtgatccttattctctcggaatttctgtagcacttttagtttatgccaaacaatttctcacttaattatatgttctcttggatcactctctagtggtttaaagcatagtgttacgcacataatctgtgcagccgtttgaagaaaaggcacgtggctcatggaggagccaaagacgtgatgcttagggaagaccacaagtacccatagggaggaatcatcttggggggatctaaatttgcccctcagactcacaagcacagtgatgtgaatggcaggataccacatgttactacatcagccagaggcaaactcatcttcctcggattcatcagattgattctaatttattagttttcaaaataaaatatccctatctagcataactagacacctacgtcctcaggtaccttcaggtgagctctttgagtttagttagaggcatcagaactcttggtgagcatggaatcaaggcaaaagcgactagtcaggtgaatcacaggtttaaggattagaacaagaagattggtgacatattttttaacctaaggagattcctgc

SEQ ID NO: 10373 - DNA, 1076 bp, Homo sapiens
aagtataagaagatctagctcatttttataggcttactctgggtctacattgtatggagatatgttgcatagtttattgcatagttgcacaagttggaagtgatggttgcttggagctagttactagctactagcaagctagtagcagtaaaagtggggaaaagtgtggattttagatatattttaaagtcagagccaagagtagtgccaatacgttggatgtagggtgtcaaagaaagaactgaaccaaggatcactcaaaatgtgtgactcgtgcagctagaactgccatttattgagctggagggatattgttggagtgtcatttttggttactgaggaaagaagaggcgagagaactgaagtttcattttggacattttagtttgacatgcctattagacatccaagcggagaggccaagtagtcaggggaataagtaagctggaattcatgcgcaagggctggcttaaaagtgtacatttatgtatttaaggctagaaggctgaaagaaaacacctggagcagaagtatagctaaagaaaagaagaggcgtttgaacagagtgctaacactccaatatctagaggtcggaaagatgaagtggaagcagaaaggagacagaggagaagtgagggagagaacataagagaaaatagtgccccaaaaggctagtgaagaaagaacttaagaaggaggaagagtttatttgtcagataaagagtttgttgtcaaatactgccaataaattagttaagctgaagactgtaattgatcactgagtcaggtgaaagtcattggtgactttcaatcagtggtgtcctggtaaactggctctctgaaaagcagtgacaacagcaaaatcctgatttgtagtgtttactaaatttccctgtggaaatattcccatcatagtcaatttccagctacaaacagtttaacaaccagcttgcaaagttcttgaatatttaacaattagcttctgctagttgcgccacacaccaccttaacaggagccattttgtaggagtggtggagattggagtagatccataagaaatgaaatgagaattgga

SEQ ID NO: 10374 - DNA, 1104 bp, Homo sapiens
ataaagcaaaaagaggtttttaatggattatatatatacttactaggacatgccaaagtgagtggaaggaaacagaaggaaatagccttggtcccttcagtaacaaccatgttaataccttctcaggaacataacatacaatagctatttaggctgaatggagagctgaagcataaacctacaatgatgattcatgtgactttctaccatagaaatctcaccagattcacagaaccatagacactttggaaaagagctaagaggaaacctagttcaatcccttacctgatgcagtatgcccaccatgaagtcatccgtcttaatcatcttcaataacaggcaacttgaaatttctcaaaagtctgtgcatatttgattccctctagcagttccaataaaaataaccaagtcatttccatggtatatgaatgaagtggattatgatgccaacattatattgtttcataactttctgagtatgtttctcagttttagagatttattctaatccaaatatgcatttattcgagcaatttagtgtttgcttgatgtatatactgtattaatctcttctcttgctgccaataaagacatacttaagactgggtaatttataaaggaaagagttttaattgactcacagttctgcatagtgagggaggccttacagttatggcagaaggcaaatgaggagcaaagtcacatcttacatggcggcagacaacagatcgtgtgcaggggaactcccctttataaaaccatcagatctcgtgagacttattaactatcacgagaacagcatgggaaagactcacccctatgattcaattacctcccactgggtccctcccatgacagataggaattaggggaactacaattcaagatgcaatttgggtggggacacagccaaaccatatcatataccaattttccttgtaagtagggtttttgatttttcaaatgtttgttccttggaagccacataggtaggaaaaatatttacttacttttttgctttgagacagggtctccctctctcaccaggctggagtggtgtgatcataactcactgtaacctcaaactcctgggctcaagccatc

SEQ ID NO: 10375 - DNA, 1067 bp, Homo sapiens
aaatcattttaaggccaaatactggtgtttgctgacttccagaacttccttatgtttccagcctttgcaaaacaacatagccaagtatatagtatctaaatctggtgggctgcttctgagattttcttggaaggtatttaaatatatgttggtttttgtttgtttgtttcccactcataatatgtcctgttttctaaaaactttttaggttcaggcagttgaccatttatgtgaaaaatgtctgaaaaatttgaccctgataaggtggatgcctcttgtgagatcacagaagcccttaacctggaagaggcgtgtaaaccaagaggtttcaatatatgtaacaattgaaatttaagcatatttaaatgttatctactcaaatatttattgagtcctactatatgccaggcactgtagtaggcacatgttgagcaaacaaaaattcctgttctcatggggcttacattctagcagagaaaacacaacacaacacaagtacaatgcataggatgttggatggtggcacgtgttgtggtataaaataagtcagagaaaggagtcagttttaaataggaaggttatagaagcctcactgagaaggtggcatttgagcaaggacctgaaggaggtgtaggatagtaccaagcagacatcaggggaaagagcattcttaggcaggctgaagaaaaagtgcaaacattctgagacaggagtatccctggaatgctctaggaataacaaggtggcccatatggtcagagcagtaagcgaaggagagagaaatgggaattgatatcaaagaagtaatgcggtcttggaggcaggttgcatacggccttgtagaccactgaaaagatttcagcttttgttctgaattagatgggaagtgtattagtctgttttcatgctgctaataaagacatacctgaggctgggtaatttataaagaggtttatttgactcacagttgagcagggctgaggaggcctcagggaacttacaatcatggtgggaggggaagcaaacacatctttcttcacatggtggcagcaaggagaagtgcagag

SEQ ID NO: 10376 - DNA, 1072 bp, Homo sapiens
aaattaggaaaaagtatctatagcatttagtctagcagccaaatacatagtgagcattcaatagataaaaattcatttccttcccttcacagaactcttctttttatggagtctgcatattcctgctatccaaagtgttatttttaaggcctcatataatgctaaaatgttatgattctgtgataaagccaattttttactttggaccacttccatcatatgctgctgtattcaatagtaaatatgattactagaagagggaggaactaacttagctgagttctatccaaggatgacagcagtagttatgtgctacaaggtaaaatggtgtatgacaataacgtgcaggaaatcatttgttatatgcatttgctaagttatgagacaaatttagtactcaggtatttctaaagattcctaagaatagcatgattcctaatatatgattgttcaaatggagactcacatgctgcataaagatattcctgtggaacatggatctatggcagcagacagacagccaccccagagtccagccactcacattgcaggggctcctgggcaaaggtgatatacatccaggaggcaagtgattgttctctacaaccgcagacatacttataccttccaaggagaccatggttggcagagtattctatgaataaaaagatgatgtatgcatgtgtgtgcgtgcacacacatacttacacgtgcccctttgtgtgcatatacaatatcacacaaatacacaaaagagaaataaggcaagtataaattatatctccttccaaaaaggatctgaagaggcttctgtaaaataataccaatacaagagaaaatagaatctctaaaatgagaagagaagaatacactaaaagcagagtattatgtcacatgaactaagatttacctcatctggacgttacttttcctaaaactccaacaatataactaagactataactaagaagcagggaggaataaacaaaggcttatgaaggccgggcgcagtggctcatgcctgtaatcccagcactttgagaggccaaggtggggtgaatcacctgaggtc

SEQ ID NO: 10377 - DNA, 1050 bp, Homo sapiens
gacattttggttatataaagaaaatatttttagagatgcatactaagtaattaggagtgaaattatggccgggatttgctttaaaatactttggcagcaagaacaatgtagggaataaatcaagtgtgacaaaatcttgccaatttttgaatctagttgatgggtatatgggggattattttaccattctctttaatttatgtatgtttgaaattcttcatactaatcttttttgaagagaaatggtcagaaatatatctctacgtttgctgtttttttgtttttgtttttgagatggagtctcgttctgttgcccaggctccaggctatagtgcagtggcgtgatctcggctcactataacctccacctcctgggatcaagctgttctcctgcctcagcctcctgagtggctgggaatacaggcatgcaccaccacacccagctaatttttgtatttttagtagagacggggtttcaccatgttggccaagctggtctcaaactcctgacctcaagtgatccgcctgccttggtttcccaaagtgctgggattataggcataagccactatgtctggccttatgttctctgttttaattaaagtctcaaatatttaaaactttaaatggaaaacttttgaattaattaaattttaaatgcaaaattgtaaatgaagatgtctttgaaacctcactccggaattttcatttcctctgtctccccatcatcagctggggtcccagcccagctgcagcctttcccaagctgaagtggtcattgaggtcaatgatgctcttaagccaaacatggctgacagtacctatgatgtgcacaggtgggtggacaagactcattacttttagttacagaagagcctgacaaagttggctgggcaccacagtaaggattcaattcacatgataattctacaggagactaaatgactgagcaaacagagcatttgtcctcttttgcctgtgtttcttcatctgtgaagtggatatgacattgtttttccttatcattcaaggtccaattcagatatctag

SEQ ID NO: 10378 - DNA, 1049 bp, Homo sapiens
actcaaggaactgaaccagagatcccctcattctgtttttcagaaaagtcacaggcttacatattgctgaatgatggcaaggctatgtccacatgatagaaaaactgtatatcccagttgactggtgcttttggctaccttaatggcttcagtctacctgccgatctgaccattgggaaaaaattagttgtgaagttgcattatgtaaaactgaagcttgtgtagtcaagaccagggtttccctatagttcctcacagccagctcctctgtgcagggactggatgcatagcctggctcagagaggatggtaggaggctttgagccaagtatcctcagggacaactagattgctctcttctctgttgggccttctgggtaccacgcatgatgagattgagtcattctgacctgtcagagtgggtgagtgaatgctatatgaagataaaccaagaccattagaaccctttgaatccagaggcacaaaaatgtaaaaagctctatgaaaaaaacaggagtctggaaactgttaacaagatcctaggactagtttaaattttaaagtgtgaaagagatagcattggaataaataaaatgtacttctactttatacggtaagtggagataagcatataggaaaatcagcccaagaggtagtagcttgaatgaaaatataagtatgaaataaattagatacaatataaatatattttacaggaaaccaaaatggattatttagggaatgtttagagttatcatttccagcctttaaggttaacaagaggacaactatgtccttccacaaattatccattggcaccgttttgtcctcattttttcaataccattccccaccttccatctacattaggaccatgaattgggatcagacattgtcaagtatcccctggaaggcaaaatatgtctgatggagaacctcctctttaatatactctttagaactaaggaaaacagcccaggttgttgaaatcagattaggaaactcatactatctatctcagaagctttctagtgcctactgtaactaaat

SEQ ID NO: 10379 - DNA, 1027 bp, Homo sapiens
gaaaaccttttaatgtatgaaagcccacaatttggtacctgtatttcttgtgggtccagtcagccagcaagtctgaggagcgagggctacaaggtcattatgaagagaaacttgatcttgaattaaagaagtagactcttctctgccaccaagattggtctcttaactttttctccttaccattgcttatttcagaatgaatatattagatggaactttagggagagacctgaagctctttgctgagaagtgattttgaatccattcagattcaagtagggaataggttttttaagccgatgaatgttttctcattacctggagaaaatgtggggactcataatcggtgggattttgcttcaaggtgaagatgtgccttcttatttatttttgtatttccatggcctacaatagtgtcagacatctattacacaagcattccataaatgtgtgttgaactaccctgtggcaagcatgaatttttaagggacagcagttctttatatttctgtggctgaatgtattgtacaccaaatgtgaaatactgatcttcaaggcatccttttggttcaacacattaaaaaaaataacatgtattaagcgtttatcatgtttggcactcttctaagcgttttctgaatgttaacatatctttgcaattatactatgaaataggtactatcttattcccatttggcaagtgaggaaattgacaaattaggtgaaggaagatgcccaggtcatgcaaccacaagtggtggagtcagaatttgaatacagcaggatgatgccagggccaaggtttctaatcatgacttcgcacctcgtataggagcagataattacataggtattatcagactcaacttacacatggtccaggcctgaattttgaaggcaagtgcaacaagacatttgaaagccaatgacaattagaactaactgctaatctaagctgcagatgaaattcagaatgaatgtctaggggccacagattactctttgagactgttgccagtcgtctctt

SEQ ID NO: 10380 - DNA, 1048 bp, Homo sapiens
tataataatggctttataacagatgactgtcaagtgaatgagctgttgatatcctgtcagtttagtcaaaatatattgtatcttaaaaatgtatttagactaacgtctacatgtatttttacggaattcctgtccagatctgtttattcttttacagtattaaatgattttcactaatatattttttactgctatcatctaaatcagtgggccatggaagaaacctcatatatcattcagttcaatcccattgcttcagaatcagatcatagcatatctattctaagtagaggaatgcttttttccttttcttgaaagtttctctttcaaatagatttcaggcctctagagtctttcaaccctcacattcaggaataattttatgtaaattttcatgctttataatgttcttacttttttctattcaattttgtctatatattgatgattaagatgtattttatttatttttatccatagctttttccatataagtatgtatcttagggtcagaactgctgaaagagacaaactcagccaaaaacacttggaaagcatattttggtatctgcattgctttgcatatctaaattttcccataaagtaataaagtaaaatggttgcagagtgaacaaatgaaccctgtgtgttctatatttttaattcttaaaagtggtattctagtaggatctatcctttagataattttttcttaatggaagtcttggttgaacttggattcatctattatgcgactcatggcatggaccgtagtgtacgtatccataaaaagctacattaagctcatatatggaaatgagttaatattttctacaattcatttcctgaaattatccgtattattattgtaaacaaatggggtggaaaaaactcacaattgtggtaacagtactgatgctgatgtttaatgtttaatgaggagtgcatacctttttcaaacattgtgaaatggaaatttcacatatctgtatttttttttaatttgagatggagtcttgctcttgtcacccaggctggcgtgcaatgg

SEQ ID NO: 10381 - DNA, 1111 bp, Homo sapiens
agtaaaaaactgccaatacttaattttggtgtaagagtttgtttcagttttacatgttgcttatagctagaaaaatattataatccagtcatttttaacttcataaatatggacttatcatacttttcatgctttttttttttttttttttttttactttgcccatccttctgcctttcattaaagccatttctcttttttcccccgaacttggcaaactcttgtgttttcaagacttagttcaagcttgatttgcttggggacttttgttctatctggattgggctaagtgcccctcttcactagcattttggacatagcatcttggacataccatttttcatgttgttttgtaaccatttgtctttctctcaaaactgtaagctccctaataccggtaataggtattttatttatatatctctagtgcctagcccaatgtttgaaacctcacaggtgctcagtgtttgactagttgtataagtaagagaaggtaaaggaatcattgtgtaaacactggaagttaataatgcattttgattctactactaaagaaaatccaaaaaccagaaaggatatatattcgttgtcagataacaatctttatttcttgatttaggtgttcactgttggcagaatttgtgccagccgtaccagaatttatcataaactgaaacattttaaattcaaactataccaggaatgttgcaccattgcaatgacagaagaagttgaagatgaacaagttaaagaaacagtggaaagaattttcaggcggtcaaaagaaaatggctggattaaggaggtaaggtgaatatatgagaatcttatcatgtagattctgaaggctaattatgatcagcaaaaggaaacaaatgattaaaagatagtgaaatttaagagaatctctttcttctgtcgtttgtattttctcttcttccgctcattcctttcatgcttatcattgtccttctgaatagatgccctgatgttctaaggattcactcagcccatcagataaattttaataagcattaacactgtcctttattgaaggacctctgtcctttcgcttttatgtatgtattgcttacatatatattaagtcccc

SEQ ID NO: 10382 - DNA, 1010 bp, Homo sapiens
agttcatacttcacaacagggctcattttttagtaccttttatgggttttgacaagtgtgtaatgacatgtatctaccattacactatcatacagagtagtttcattgtcctcaaaatgccctgtgctttaattcattctcctttcctccctcctctgaatcactgatgtttttaccctctccatagttttgcttttgccaaactgtcatatagttggaatcacacagcatataacttttcagattgtcttctttcacttaataatatgcacttaggtttcctccatgtctaaatgtggcttaatagcgcatttctttttatcgctgaatatttttcattgtatggatgtaccacagttttgttcatccattcacctattgaaagacatcttggttgcttacaagttttggcaattgtgaataaagctgctataaacattcatgtgcaggtttttctatggacataagttttcaactcatttaggtaaatatgaggaggtttcctttaaatactgaggcttcctgttaatactgagcatctctacctcaggaagatgtatatgtttttatgcaacatattttatcttgtgtattcttaattacagcttctcattcggctctattatctactcagttctctttattttcaatgattttatccctacaaactctttttcctcaacttgtaaccaagttcatgcctttcctcctttgagttggcatgttccattagctactattttaaattttatctttttgttcccatttcccagtaactctacaaagcactgtattcaggctcttgcttgtgtcagtccagtgaaattgttcttactgaagttattgataccctcctaattgccaaaatacctttagttcttatattaaccaggtattgtcatgtactttactaccattgaccactctcactttcagaatgctcttctactttctgtggtaccctacttttcttgcatttccgtttgtaatattcctttcctctattacta

SEQ ID NO: 10383 - DNA, 1274 bp, Homo sapiens
gttcatataattatttcatgggcattcagtaaattatttgttaaattaatgttctaccatcttcactcagatatttcatgtgattttgtgtttgtggaccattaaataaagccaaataaatataatttataccataaatgcattcattgctctaatctggttatcactgttatattcctaacaactttattttatagaagcttaagtgaaaatgatacatgttagaagacatgaaacaaggagaaattctaagagtcacgtgcctgagcagaaatctcgagttgattggaggcgaactaaaagaagtagtatctcacaattacttgatagtgatgaagagcttgatagtgaagaatttgatagtgatgaagagcttgatagtgatgaaagttttgaaaatgatgaagagcttgatagtaacaagggacctgattgtaataaaacaccaggaagtgaaagagagctcaacttaagtaaaattcaaagtgaaggaaatgacagtaagtgtctcattaactctggcaacggttcaacatatgaagaagaaacgaacaaaatcaaacataggaatattgacttacaagatcaggaaaaacatttaagtcaagaggataatgatctcaacaaacaaactggacaaataatagaggatgatcaggaaaaacatttaagtcaagaggataatgatctcaacaaacaaactggacaaataatagaggatgatttagaagaagaagacatcaagcgaggaaaaagaaaaaggctatcctctgtgatgtgtgacagtgatgagagtgatgacagcgatatcctagttagaaaagtaggtgttaaacgtccccgtagagtggttgaagatgaaggttcttcagtggaaatggagcaaaagactcctgaaaaaacattagctgcacaaaagcgagaaaaacttcagaagctcaaagaactctcaaaacaaagatctcgtcagagacgcagtagtggtagagattttgaggtgtgttatattttgttggatttgttattgtttttcagtttttttcttaaagtatttaatttttataaaaaagtgctgagtccgttccatttctcaataattctagaatttattttttaatcaagtattcttgaacatgtttgattacactattgtacgtaatatactgttttatcatgagcctcagtccatccttttttaaaattgaaagactatttgttattttatatgatctttcttgtttttaacttcttataattctaatgtccattttaaa

SEQ ID NO: 10384 - DNA, 1048 bp, Homo sapiens
gggtgcctgtagtcccagctactcaggaggctgaggcaggagaatggcatgaacctaggaggtggagcttacagtgagtggagatcacaccactgcactccagcctgggtgacagagcaagactctgggaaaaaaaaaaagaagatatttagcagaaggtacagttaatctgccccttcaagttaaagataatgttcatgatagaaaaaaggaggtaacttctgtttgaaagacactgttgttttgtagatagcattttgaaaacaagtctttggggatgattccactgttatttgattttgttgtgaaggtattataagagatcaaaattttatagtttcatacataaacattttgaaataagattttctaacttgctaaaaaatcttccaaaaaaattcagttaggttctgaacacatttcataatagtggcatttattgaacacatatgtcaggaacttggctaaatgtgttatattaaacacaaagattttaaatcacttgcacagataaatagtaaataaaatggtagagctgagattggaacccacagaaccttctctcttatttgttaatattacctcttattcattatctagtgtctctttgtcctaagtatttgtaatgaaaattgattgacatcagggagagtagatacttgctagctgaatttctggggtaaaagaagcttttcataactggtatgtggaattgaaagtgaatattatgactagataatctgccctgcagacagtcccctcattctccatggcttctgggatggctgtcttccaccttctcttctcagcctgccagcactcccctgtcctcactttcagctaacagccttgcttcctaattttcggaaaaaaactttctgaaattgctaccaccatctgtatggacagaagtggcctctgaactataatcccatttttctggggttaccagagctctgcagttctcaagtccagccctctctccttgaccactagatccagattactcctgctgactcaaggacaggctctaccaatcctcccgcaa

SEQ ID NO: 10385 - DNA, 1108 bp, Homo sapiens
ctatttttggggcgtgcctccctgaaagctgtttttttgtttgttttttaactttccgaatcttccagattccgaagcagaaccaaccccgatttaaaacgtgcagcgtcacactaggtccgctgtagcccagtggggcagaaagtgcgcggcgagttgggggctttatgaaatgcttctttcttagaagaaggacgtttaccaggagtgcttgtcttggagaggagttaaggcaccgttcccccgggaggggtgggacttgagaggtggccggccagaaccgaaagcagcaccatcttagggatttgaacacttcagtggctcagttttcttaagaatctcaagattaaaattaagttcacgtgggaaatgtttaaactgtggatttaaacgcctgtcactgcattgcaccgttttcttattattgcttgctattcactacaattttttttatatacaggtttaaaaaacactactttgcatactgaagtaatggaatgtaaaaaaagaatgctctgtttggaatcttatgttgtgaataggcaaaacagtgtcagtgtattggacaatactttaaaatgacaaacatatacttgcttaagtaagcaatgattacagggttgtgttttaaaaactcaaaaccaaaacattgcaaagtaccatcgaacttttaaagccaaaccatatttgttttgacccagcatacagacaggaaggacataacatttcatttgtcaaagactaaattgtttctatataaagagttttgtagaaagatttccttttaaccgactttaactttctaggacataatattatacactaattattgttcttttatattggtgctactgatgaatggctaatcatttgcaagtatggtgaatccagttacggatagtctattaccaagtttagtttgcatgtctttcaagtgtatatatacagttctgtttttaaaatctcctttcaccctgttaatactggtttaagaaacctttagtattagatagtggtgcacttaaaaataaatggagtactttgttttgcatttcaaggccggattcagaagccagccagagcccacaatacagcttcgagtcattac

SEQ ID NO: 10386 - DNA, 1013 bp, Homo sapiens
agactggcagagggagctagggaactacgtggagaccacacacacacaggtcacttgaactcatatagaaccccaaaggcttctatgtgctggacaacttaagcaaagcgtgactctgggcaccaacccccaagactctatgtcatgccataagctgctgcagctgctgctgtctgccaggccagggaatgagcacggcccaggcactctcactcttatatgccacaaagacaggctacatctgagcatgccccatgcctgctcatccctcccaagactgcctgcctggccattcccatggcttgttggggagggaggagacagggggaacctgaccccacagtgtagccaccattgccccatctgagtgttttgttggcagcctgggggcaatttgctcctccctatcacagctgttacttgagcccaaggggccagtggacaagtctgctgacttggtacttgttccccaggactcaagcacaccatccaggagcatggagatttatgatctgatctcaagcagggtaggagcccccactgtcagaaccacaaagagcatggtgtgggttcacgcagtggcagggaagcatggtggcccgccctccataagactaaaacagaaagggtacggcctaataacaatggtttctgcccccaaggagtcacatggcctgtggctaggcaatttgaatgcagttggcttgggactagcataaccattctgttctgctgctgacagctagatactggagacctaccagctcaggggtgtgggagctgggtgggtcccactgcaatgtggtacagtgaaaaccctgggctgtcccaattcccctgaatgggctctgtagcacaggagaggcacctcccggcctctctggaagattgccccagtggcctggaagctgaccctagacccttgccagccaccttggcagcagagccgggatggggaccactgggaaccccatgggcccactcattgcccaagaattctgatacctctcctg

SEQ ID NO: 10387 - DNA, 1618 bp, Homo sapiens
atgcactgtcgatattactcagatttggggaaatgacatttttatactaaaacaaacaccaaaatattttagaataaattcttagaaagttttgagaggaatttttagagaggacatttcctccttcctgatttggatattccctcaaatccctcctcttactccatgctgaaggagaagtactctcagatgcattatgttaatggagagaaaaagcacagtattgtagagacaccaatattagctaatgtattttggagtgttttccattttacagtttatattccagcactcaaaactcagggtcaagttttaacaaaagaggtatgtagtcacagtaaatactaagatggcatttctatctcagagggccaaagtgaatcacaccagtttctgaaggtcctaaaaatagctcagatgtcctaatgaacatgcacctacatttaataggagtacaataaaactgttgtcagcttttgttttacagagaacgctagatattaagaattttgaaatggatcatttctacttgctgtgcattttaaccaataatctgatgaatatagaaaaaaatgatccaaaatatggatatgattggatgtatgtaacacatacatggagtatggaggaaattttctgaaaaatacatttagattagtttagtttgaaggagaggtgggctgatggctgagttgtatgttactaacttggccctgactggttgtgcaaccattgcttcatttctttgcaaaatgtagttaagatatactttattctaatgaaggccttttaaatttgtccactgcattcttggtatttcactacttcaagtcagtcagaacttcgtagaccgacctgaagtttctttttgaatacttgtttctttagcactttgaagatagaaaaaccactttttaagtactaagtcatcatttgccttgaaagtttcctctgcattgggtttgaagtagtttagttatgtctttttctctgtatgtaagtagtataatttgttactttcaaatacccgtactttgaatgtaggtttttttgttgttgttatctataaaaattgagggaaatggttatgcaaaaaaatattttgctttggaccatatttcttaagcataaaaaaaatgctcagttttgcttgcattccttgagaatgtatttatctgaagatcaaaacaaacaatccagatgtataagtactaggcagaagccaattttaaaatttccttgaataatccatgaaaggaataattcaaatacagataaacagagttggcagtatattatagtgataattttgtattttcacaaaaaaaaagttaaactcttcttttctttttattataatgaccagcttttggtatttcattgttaccaagttctatttttagaataaaattgttctccttctaaaagttttaagtgtgtgattttgcttcatttcattaaactcaagataaatagaaaacactcaaaagggcagattgcaagtggggttgtctgggtaaggagcagcagcaccacctgggaacgtgttagaaaatgcaaattctttggccccaaccatgttgagttggaaattctggggtagagctcagcgatctga

SEQ ID NO: 10388 - DNA, 1033 bp, Homo sapiens
tctttccaatatatgcatttttgctataaatctctctaagcataacttgagttgcatcccacaagtttttaggtcataggttccttatcaaaatatttttaaattaatttttttactttatcaataattgagaaatatgttacttattttctcatcctttgggaattagcgtgtgaagatttctgtagtttttaggtacattgaaggtatgtgaagaagtcagatttgttaacattgttgagaacctgtcatttccttatgaatttcttggggtctgttcttttgcttagagatgttgacaaaagtccaactctataaaaagtatctacttttctccatcaggtctatcgtattttgttttatatatttctcatcttgtatatgaaatatattttcctgttagattaatccatttatgagatgtcttttctttttaaaaaatttctagtgatacttttcaccttaaagacttgcatatgatattaatagagttgttatcttttttttctggccagtagttgtattgtaaaatttcttttctttactcttactttcaatactttttagcatttctatatcttatatttaagttgtattacttataaacagttaaatccagtctcataatctctgtcttttaaatggcctgttgattctgtttgcttttgtttttgaaatggagttttgcactgttgcccaggctggagtgcaatggtacgatctcggctcactgcaacctccgcctcctgggttcaagtgattctcctgcctcagcttcctgagtagctgggattacaggcatgcgccaccatgccctaattttgtatttttagtagagacagggtttcaccatgttgggtcaggctggtcttgaactcttgacctcagatgattcgcctcccttgggcctcccaaagtgctgggattacaggcatgagccaccgtgcctggcctctatttgcttttaatatacctttaatatgatgtatagactggttcttgaacatgagtagaatttcgcagagctgagaat

SEQ ID NO: 10389 - DNA, 1030 bp, Homo sapiens
atatctttttcagttagctttataaagtaattgtccagatggccatttaatttgtgatatgggataaagtaatctaggggaaaaaacacttctttaaaatgactttttttttttgggggggccgggcacactggcttacacctgtaatcccagcactttgcgaggccaagctgggtggatcacctggggtcaggagttcgagagcagcctggccaacatggcaaaaccccgtctctactaaaaaataaaaaaaaaaaaaagctgggtgtggtggcaggcacctgtaatcccagctacttgggaggctgaggcaggagaattgcttaaaccctggaggtggaggttgcagtgagctgagattgtgccactgtactccagcctgggtgacagagtgagactccatctcaaaaaaataaaataaaatgactttttttaaattgtgaagaatataggttaagattatattgcagtagtaacgtaataatatattcaggataaaaaattgaagttagatctgaaatatcaacatcctaaactaagaaaaaccttttaaattaatgtactcttgtttttttcttcttagctaatagtaaataacgatagactcacactcccaggaagggtgaggaagggacaattcagacctctctagactccatgcatggcctggttaaatcacttttttttatcagcatctcatttttccttccagcaagtttatatcctcattgaggaagagtgtcttgccagaagattattgtgataatttttataagatatgtatattcttttctgaatctcagagtaaatattctttgtcttcctaaatgaactggtagaatgtttacattttcattctatttctgtagaatttttttttttttaattgaaacagagtcttgctctgttgcccaggctggagtgcagtggcgcgatctcggctcactgcaacctctgcctcccgggttccagtgattctcctgcctcagcctccctagtagctgggactacaggtgtgtaccaccacgcc

SEQ ID NO: 10390 - DNA, 1114 bp, Homo sapiens
tagatacaatgtgagtacaggcattgggtaaatacacctgttccaaatgggataaattggccagaacaaaggagctgcaggccccatgcaagtctgaaatccagtagggcagtcattaaaccttaaagttccaaaatgatttcctatgactctgtctcatatccagatcgtgctgatgcaagaggtgggctcccatgtccttgagcagctccacccctgtggctttgcagagtacagcccccttcccagatgctgtcactagctggcgttgagtgtctgtggcttttccagacacagtgcaagctgttgatgggtctaccattctgggggctggaggacagtggccctcttctcacagctccactaggcagtgccccagtggggaccctgtgtgagggctccagccccacatttcccttctgcactgccctagcagagtttctccatgaggcctccacacctgcagcaaacttctgcctggacttccaggcatttccatacattctctgaaatccagtcagaggttcccaaacctcaattcttgacttctgtgcacccacaggctcaacactacatggaaaccaccaaggcctggggcttgcaccctctgaagcaatggcctgagctgtactttgaccccttttagccatggctggagctgaagcagctgagacgcagggcactatgtccccaggctgcatagagcagggggcccctgggcctggcccaggaaaccatttttccctcctaggcctccaggcctgtgatgggaggggctgctgtgaaggtatctgacatgccctggagacattttccccattgtcttttggtggttaacatttggctccttgttacttatgcaaattcctgcagccggcttgaatttctcctcagagaatgggttttcttttctgtcacatcatcaggctacatattttccaaactcttacgctctgctacctcttgaatgctttgctgcttagaaatttcttctgccaggtaccctaaatcgtgtctctcgagttctagttccacagatctctagggcaggggcaaaatgccaccaatctctttgctaaagcatagcaagagtgacctttactccagttctcaa

SEQ ID NO: 10391 - DNA, 1030 bp, Homo sapiens
tgtgaactatgaaagggaacatttaacattttaaacgtaaaaaaaattttttttttttttttttgagatagagtctcattctgtcacccaggctggagtacagtggctcgatctcaactcactgaaacctccgccttctgggttcaagcagtctcctgcctcagcctcccaagtagctgagattactggtgtgtgccaccgcacccagctaatttttgtattttaagggttaaagagatggggctgggctgagtaaccagcctgtcatgtaaattctgggaaaacccaggaaacactgaatttgcctgtgggatggtgggagtagggagaagtcatgatgaatgggtgttagaagagataaacagtgagggaaagtacacaaactgaaaaagcacacaaaaatcccaaaaacgaagtgcacaacagcaacaaaactaacaggaaaacaaaacttgggggcatttttaaaatatttggtttttttccttttcaagaacaggaaaaacaaaagatggtgtagaacataaaacataggccaaaaaaagtagacctaggccagaaaaatcaactaccaaactctgggttcctgttgtttttccataatgcagccatctggctcacagtgggttcagtctaaattctagtgtgaataggagaatgaattcaattggcatttaatacttgacattcttttttattgtctttcttttgcattaaatactcctttttcacagagagcaggcaggcttgctctagattcccatgacttccttctttcagactaaaattgatgacttaccccatcatgttgagtaacacaaagatttctcacgaataatttttcccagatgtatgaagttcttaggaagaaactttgagttaagcagtaagtagagttaaacaataattggtactgaacgttaactgcatggctcttcatctctttgtgtgtccgtgttttttaaatacataattttgtttacaatcttattagtgaagtaattcatgcaccagtcttcttggctttgaa

SEQ ID NO: 10392 - DNA, 1048 bp, Homo sapiens
aatattgcagaacagcaaatgttgctgcctgatccttcctctggaagctgggaggtgtctcccagttaggcttctcgggggtcagggacccactttaggaggcagtctgtccgttctcagatctcaaactctgtgctgggagaaccactgctctcttcaaagctgtcagacaagcaagttttaagtctgcagaagtttctactgccctttgttcagctatgtatgccctgctcccagaggtggaatctacagaggcaggcaggcctccttgagctgtggtgggctccacccagttcgagcttcccggccactttgtttacctactcaagcctcagcactggcggacgcccctcccccagcctcgctgcggccttgcagtttgatctcagactgctgtgctagcagtgagcaaggcttcgtgggtgtgggaccctctgagccacgtgcaggatacagtctcctggtgtgccatttgctaagaccattggaaaagcgcagtattagggtgggagtgtcccgattttctaggtactgtctgtcacggcttccctttgctaggaaaggggattccccaaccccttgtgcttcccgggtgatgcagtgccctgccctgcttcggcttacgctctgtgggctgcagccactgtccgacaagccccagtgagatgaacctggtacctcagttggaaatgcagaaatccacctatcttctgcattgctcacactggaagctgtagactggagctgttcctattcggccatcttggaacccgttgctggtaatttttaacatcatccaattttgtttaaaggaatgaaatgtaggaaaataatgcaatattatgctcacttactcagtgaacagctgttagtttggactgcccactccgttagtcactgttttaggcacaaggcatgaagtggtaaataagatgaataagttcctgctctcatgaagataatatccaggtggagagacgtagactataaggaagtaaacaactaaaaagatgattttgggttgtgattaaaaataaataaactgggc

SEQ ID NO: 10393 - DNA, 1024 bp, Homo sapiens
aatatttatggactctaatgagctagcacatcctaggttctaagaatacaaaatggaccaagccttaacttctaggagtttttgttcttttgttttttattttgtggcaaaatatacatgacataaaatacataagtaaccatttttttaaagtgtaaaggtcagtggcagtaagtaccttcatgctgctttgcaacttgctggagtttttattcctgtggggcatcccagtgtttcacttagtttatgttcttggtttactgctgttctttgtttcattatctctgcctttttgactggtgtctggtggtacgtagtcaggacatactttaattctagttttagtaattctacagaaaacgttttcattgagaggaaaaaaagtctagagggattactccaaaatgtaatagtggttatcattgggtagttgtgagagggtcttagttaaaaaatattttattacactattagatagcttttccttttgtcctttattgaatctaattctgcactactgaacttttaaccttgggtagacaaaggaggtagaagaaacataaagacagtaatattagcaatagacaccatttttgaatgcctacaacttataagatactcctcatacatttactaatttaacagtggtgaggtaggtgtcatttctggtttacacatggggaaattgaaactcaagagtggttaggaaatgcccaagatcacatgacactaagtgtcacattcaggatttgaaacccagttgtattctaaaacctatgtctctttatcacactgtctgaagtgtggtgtggccttacttttaaaacatgcttttcactgtgaatgattattaaaaatcaactgaatactttgagggcagctccagagtcagtgggatgatttcaaatgccccttctagcacagggaaattttttgagaaagaagaaaagcattgcctcaaatttttctagaaggagaacagataatacaactattaaaaatgtttttgcacaatgtgttttac

SEQ ID NO: 10394 - DNA, 1024 bp, Homo sapiens
aaaaattaaaaccctactgagaaggtgcagttaaataagaaaatcctattttatccctccattgtatgaaattaggggtgttggttgggtggtgcaagacctagagatgcctgtgagtagaatcggcctctcctgaaatggtccactccactcagaagagcagagtcctcagtggcagaaattggcccatctgtccccaattgtgtgggtaaatgaattttggcaaagctgttgcattcggtggctggtatatagtaagtactatgtaagtgtttgttatgtaagctagatgtttatcttgaaaaacctggtaatacagtcccttttactgacagcttcaagatatgtttcataacaacaggggccaaagtagaacttcctgtggaataatctaccctcctgacaccactacccctactcccgctaggcagaaaaccacatactgccagtattcttagttaaatgttctttcataacaggatatttctttatttttacagcatctgcaaacatagagaattctgggcttccacacaactccagtgctaactcaacaggtgagttttaaaagattaaaaaaacaaattttcatttgtctagggtacatgaagtaataacagccagggaagtaggcataagctggttcactgacctgttttaaccctgagttcttcacccatgaatcccaataacctgccctagtgccctatagtagacatcagtaagtgatagttcactggattaatcttcctcagtcttgtaaagatgtcaataaattctaaaacaaaaagtgtatcggaatttcatgttatgaatttttgaagcacatttttagatgtgagggttttgtagtttgcctgtagatatgaaatgtcagcacagaagtctgcaggtcctattgatgaaacaagtcactgtaaactagtcagccatggcagccttaatatacctctgctgactctaaggagaccctacttacatttcacccattaggcagactcaacccaaacacttggtgaggccc

SEQ ID NO: 10395 - DNA, 1023 bp, Homo sapiens
tcaaaggcttccttccgggcaccgcgaagccagcgtgctcagcattcagggaggcagcggcgctcgccttcatccaggacaacaaaactgccatttccgaagagaaaggaaacggctcgcggtttctggggttcccaagcgcgcgcctgcgagggaggccgcgagccgagtcgccacgcccagaaccccgagcccgcccccgcgccacccagcccggccccgccgccccggctgcgcacgcgacgccccctccaggccccgctcctgcgccctatttggtcattcggggggcaagcggcgggaggggaaacgtgcgcggccgaaggggaagcggagccggcgccggctgcgcagaggagccgctctcgccgccgccacctcggctgggagcccacgaggctgccgcatcctgccctcggaacaatgggactcggcgcgcgaggtgcttgggccgcgctgctcctggggacgctgcaggtgctagcgctgctgggggccgcccatgaaagcgcagccatggcgggtaagtggctgcgggggtcgtcagccccgttcgtgggaggcagcgcgctgccgaggcttgggttcccaagttgggctctggtacagaaagttccgcgtgtgtctggccgaacgctcggggcggacccagaggtgaccgggcggggtgggggaaactgaggtttggaccagtcacccgctggccccggggccgcctgctgaggaaattgcctggtgcttcccctctcgctttttggatgcggcggtcgcaggccgggacgggtgcgcataacctgttgagttaccgcaagttggtttttacagcctttccctgaagttaatgtttgccgaggttagagtttctaaggcttccgtttgtaaacaagattagctgagttgaaaaatatgtctacctaggcccgcggaaacgtctcccagttagtcggggagcttttcaagcgtcccccaggcatttcagcgtctaatattatgcagtattatccagatgaattacaatcttta

SEQ ID NO: 10396 - DNA, 1028 bp, Homo sapiens
cagttgttattggtgtgaccattttctttttaggatcgatgaaacattttgctgtgtatgctgtgtcatgtattagaacctcttataatatggctcatttttacatggtttctgatttaccatgtgttaaatattccttaaaatacatctagtaacactatatagtaaggttagattttaacctaagtattgaatcttgtcttataatgccaattttattggagctttgttgcatttatttttggctctatggtccataaatgggagttaatagcaaacgttttattaaaaatgtcttagctttcccccaaattatatcattttttagaagttttatccttctggggtgtttttggctttctgagctttaagatattaatgaattttttccacatacttcatgggtttggttttaagtatgaggttaaaattgtggattttaaaaagctaataaatacttgaagtgaatatatagagagagccagatttccccaaaactctgtgagctgtgtgtgttttgtgtagaatattagccataattaacttttccctttttttttttggagacagggtcttactctgtcacccaggatggagtgcagtggtgcggtctcagctcactgcagcctcgacctcctgggttcaagagattctcgtgcgtcaacctcccaagtagctgggattacagatgcctgccaccatgcccagctaagttttgtatttttttttttgtttgttttagtaaagatgggatttcaccatgttggccaggctggtctcaaactcctgccctcaagtgatcccacccacctcagactcccaaagtgctgggattacaggtgtgagccaccactcctgggaaataattaactttttcacatagaaaatagatcacagataaaagctcctcacatattttgaaggtcaaaaaaaaatttgctgttgctaacaattgcctttgaaccatgaaagaggaaaaactaactttatttgagcaacttgtcatttgagacttaaactaacttatc

SEQ ID NO: 10397 - DNA, 1050 bp, Homo sapiens
actttcccaaaatcactcaattaagtggcaagggtgggatttaaatcgaagcctatactctttcacttgtttccaaagatgccaaactcaaaatgtggctaaacagtaaatcttgagcaaagaaatgatttactaggaagcagcacaatagaacatactggatgtaggaaatgttatatatcttgatctcattggtggtaacacaagtatatacatatgaaaaagttagttttatccttactgttagtactcagtgctcttattattcctcaaaaatgaaaaaaaaagtaaaaaatagattatgttaatatgtaaatgcccatgaggaatctcttagaaacacaaataattaaaaaaatagtaaatgttttagaaaaaaccaaatcacaaaaacagttaaaacttagtttactaaattgagtaaatgatgtttgtttaaatatttaaatacaaatatttaaatcatttttgcagcaatcaaagtatcgtgttatgaacaaagatcaatggtacaatgtattagaattcagcagaacagtccatgctgatcttagtaactatgatgaagatggtgcttgtaagtataacataacatgttcctttgaaaacaaaatttccaaaaatattaaatgagagtatgcatttgtgtagtattagcatagaggttttaaactttgtaatagtaacttatttaattgtgtgagggattgtgggagaagtagagagagagcttagattcagcagtattatataaaatctatgctggtaaatgaaatgttttcagttcctcggcaaccaaacattttagctaaatttaaattataatttttgcatccagaagctaaaattcagctttgtttctgtctttcctggcatttgcctatggaagaaaagtacagtcatgattttaaaaatataacagcaaaacaatcagccacaatagaaaaagctttaacattattgtaatattatgctacccattaacaatatggcaaataatgtcagtataacttctctctgaaaactataaattgattgtgagctaactga

SEQ ID NO: 10398 - DNA, 1052 bp, Homo sapiens
gatgaataatatttttatcagcatgtttgagatttcaagtggaaataatgggtgctgaagtatggcagtggcatttgggaatggtaagtgatataattagagcatggtaaggttatcaggaagtggcaggagatgaaactagagatttgtgccaaattgtgaaaggccttgactgccttgcttcttgctaaacagtggaatttatcaacccactgagacaaagtcagttaagatttttgagccttccatatatttagctgcttatatttaatgtcttgtctttaaaaataacacgtatgacttgttgtttgcatgcttttgcatatataacttatttgaagttaggtgcttctactgattgactttgactttttgttcacaaaaatatagggatcttgatttatgactggaccacttaatgtattaatttgcactgtgttatatcctaaacttttaaaactactcatgactaatgtctttcaccaaactgttacctacgaactttctaaagaaatgtgtgacaaaggcgtgattagtttcatttgctctgccatttttagctgtatatgtgataaaacatgttttaatacatctctttttaacttcgattttatttggaatttttgaatgagctgtttgtttgtttttaagcaaagtaattggagtgaactttctttgattcccaggttttcttttttccccttttttctttttttattgcattggtagatgcagggcaagaaatttattactctaaatttgtgactcagaattttaaaactaaattaacttcataaatgcgctcacttttttcttaatgcattacgtctaacccccagtgatacttttatttgattttcttgattatgtaatttgtttgatatttcttttatttaaggtgtgactgcacagaaaagttacaaaacaaatttgactttttgcgctcacagttgaatgatatttcgtcatttaagaatatctacagatatgcctttgattttgcaagggtaggtgcaattttcttgttttgttgttttaatagcttttcatct

SEQ ID NO: 10399 - DNA, 1032 bp, Homo sapiens
ccttggattttctacatagtcatgtcatctagaaatagggacagtttatttctcttttctgatctatatatcttttatttcttttattattatacttcaagttctagggtacatgtgcacaacgtgcaggtttgttacatatgtatacatgtgccatgttggtgctgcacccgttagctcgtcgtttatgttaggtatatctcctaatgctatccctcccccctccccccaccccccgacaggccccggtgtgtgatgttccccaccctgtgtccaagtgttctcattgttcagttcccacctatgagtgagaacatgcagtgtttggttttctgtcctgtgatagtttgctcagaatgatggtttctagcttcatccctgtccctacaaaggacatgaactcatccttttttatggctggatagtattccatggtgtgtatgtgccacattttcttaatccagtctatcattgatggacatttgggatggttccaagtctttactattgtgaatagtgccacagtaaacatacgtgtgcatatgtctttatagcagcatgatttataatcctttgggtatatgcccagtaatgggatggctgggtcaaatggtatttctagttctagttctagatctagatctagatctagatctagttctagatccttgaggaatcaccacactgtcttccacaatggttgaactagtttacagtcccaccaacagtgtaaaatcattcctatttctccacatcctctcctatttcttttttttgacttattacatgagctagaacttctaccactatgtcgataagagtggaaagagtaggcatcttttccttgttccccatcttagagagaaaacgttggctttcactgttatgttacctgtaagttacttatttatgctctacgaagttgaggacactcccctctatttttttttttctgagttttatcatgaatggatgttaaatttttaaagtgctttttctgtattaaatgataaaattatgtggctttttttt

SEQ ID NO: 10400 - DNA, 1058 bp, Homo sapiens
aataagatgcagcttttgtcctttagtcatattctactaggtcagggaaaacattacaatactgtaacccagccaacctttttggcaccagggatcagtttcgtagaagacagttttaccatggatggggctggggagaagggaaggatggctttgggatgaaactgttccacctcagattatcaggcattagattctcataaggcgcatgcaacctagatccctcgcacgcacagttcacaatagggttcgcattcctgtgagaatcgaatgccgctgctgttctgacaggaggtggatatgctggctcactcgcctgccgcttgcctcctgctatacagcctggtttctaacaggccacaggctggtaattatgctcagcccagacattgggcaccttgctgtaaccataaaccaaggagaacgtgacatgtgctagagtggaaatacaagatactatgaaagcacagatgagtaaggttaatttcagctgagtaggtaggtaaatgtaggtgtggcctgtgaactagaacatgaagaatgattaggattttgtttgttgaggatacaggaaaatgtttcagaagagggaaattgtgagcaggaccttgaggaaggaaagcatatgtttgaaggaagtagtttgatttcttaaaattgtaaagtacataaaaaaattgccaggataggttttgaattctaatattttgagtgatggcttcactgtagagtgctttagctaatacgttgagagagtttaaatctatgttacagatattgggaaaccatcagagattttaaagcacaggaattttaaaagatttgggggataattttcaatgagcaattgtttttaatattttaaagtcacagtctcttttgagagtcttatgagaactatggacctcgttcccattaagaggcacatgtactgctagacacaaaaatttgatgtgctctcaggaggttatggaatttctcttccttcgtctatagatacgaggtttcaaggatacttggcgagtttttgttctggcatagtgtactagagtggaggt

SEQ ID NO: 10401 - DNA, 1065 bp, Homo sapiens
cagtccggggaaagcacattagttacagacctcgctttagacttagatctgttactatttacatcactttggcaaagtcagttaacatttacagaccttatctaagttataaggtattatatctctatgtaatctcatttgacttgcttctaaccaaattttaattagtaatcaccaagtaatcctccagtttctaggggggctatactgatatttcttttttattttttatattttttgagacagagtctcgctctgtcacctacgctggagtgcagtggcgcaatctcggctcactgcaacctctgccacctaggttaagtgattctcctgcctcagcctcctgcgtagctgggattacaggcacctgccaccacgtctggctaatttttgtagttttagtagagacagggtttcaccatcttggccaggctggtcttgaaatcctgacctcgtaatccatctgcctcggcctcccaaagtgctgagattacaggcgtgagccactgctcctagcttatgctgatgtttctagacatcctctaaagctttctctttgaatcactaatggcaactttgagagcaagtatgttttcttgatgctttagaaaaatttacaatatatttacatcgtggcttttaaaaaaaccgtttgtcttttcccttaattttttattttttatttttttttgagacagggccttgctctctcccaggctggagtacaatggcgtgatcatggctcattgcagcctcaaactcctgggctcaagcaatgctcccacctcagtctcctgagtagctgggaccacagactggcaccaccacacaaggctattttttttttccctagagatggggtctccctgtgttgtgcaggtttgtctggaactcttgggctcaagtgataatcccacctcggcctcccaaagtgccaagattacaggcatgagccaccgcgcctgggcctcttaaattttcaaatctgatttttgttttctttcaatcatatataagaatacatactcatttatgcattttaacacctttattgtatatgtatgc

SEQ ID NO: 10402 - DNA, 1020 bp, Homo sapiens
gactcagacataaaaagccctcttttttctctctgtagaggacacactgtaccaatcctcttttcacttcatttagtcccagttagtgtagaattagtggggaagactaagagtaactcatagggattttcagccacattggtatgcatagacaataataccgtcagcaccattatcttttaattcaaagagcatggcatagaattcagagcatgtacaaaacgtataaatttatagagtttcattgctctgctcagaaatgtaagtttatagtatgcataaatgccattaaatcatattttcagccttctttatatctttaccattaataattcattcatggatgtggttttatatatatatatctatgcaaagattaatttttcacctattctgtatcactatagatgtattggtaaaactagacagaacatttgtaaaaggcattgccaatagagattgaaagtagctctggccaggcgcggtggctcacgcctataatcccagcactttgggaggctgaggcaggtggataatgaggtcgggagtttgagaccagcctgaccaacatagtgaaaccccatctctactaaaaatacaaaaaattagctgagcgtggcggcaggcacctgtaattccagctacttgggaggctgaggcaggagaatcacttgaacccgggagccggaggttgcagtgagccgagatcttaccactgcactccagtccaggcaacagtgtgagactctgtctcgaaaaagaaaaagaaagaaaagaaaagaaaagaaattggcccttagtctagaattagcatatgtgttaaaaaaattcagggtaagaacctgataattttaaaagggaggtggagaggaggcttattgcattttcataagtctttcttgagtaaatactatcacctacatgttgtggtgaggtgattaagatactgtgacagactcttttttttacctgccttggtagtggagcctgaatcattcagagtagctaacatgtctactt

SEQ ID NO: 10403 - DNA, 1028 bp, Homo sapiens
aatatagttgtatttaaatctatcatcttgctagttattttctatttgtccatcagtttctttgctcctttttccttttcatcctttctttcaagttttactttatgattccattttatctccagtaataactcataagttatgccttttataatagaatttttttgttgtgttttccctagggtttataatatacttctactcatcaaatttactttaaataatattatgtcattttatgtagtgcaagaatcttaaaatagtgtaatttcaattcttcccattttttatgcaattgttatcaattttacttttacatatgtgttagacccacgcagatcctcattacatggcaggttataagatgccactcttttagactaacagcagcacatctgtctgatttcttgtttcgaacctctagaattccttttaaaaactcaccttattaggtcaggcccacctaggataatctccctttaggtaaactaaactgattaaggacctcaatatctgaaaaaaatcttttctcatacagcatatcataatcacaggtgtgatacgctctcatgttcacaaacctcattcacactcaagaagagaagaagggcttgcatcattagaggtcatctcagaattctgatgaaagcatttgttaaaagtccctgtgttatagtttcaacatctgggtctctaagtatgattctacttattgctttatttcttgacaatgagttattgttttgttggttttcttttctttttctttttctttttcttttttttctgagatggagtctcactctaccgcccaggttggagtgcagtggcgtgatctcggctcactgcaacctccgcctcctgggttcaagtgattctcctgcctcagcctcctaagtagctgggattacatggatgcgccaccaagccctgctaattttcgtatttttagtacagatggggtttcagcatgttggtcagaatggtcttgaacttctgacctcgtgatccgcccacctcggcctccc

SEQ ID NO: 10404 - DNA, 1050 bp, Homo sapiens
ggcactaaccattcactctgcctgcaagacactttctctcatgtatctgtatgatttacttctacacttctttcaagtctttgttaaaatgtcaccctctcaatgaggctgattttgaccactctatttaatatttcaaactgtccctctccccaccagtcccaatcccttttatcttgctcttctttttattccagaacattgtcaattctaatgtgtcacgtaatttacttatgtattatattaccatgtattgtctgtcttctcttgctatactataagcttcacaaaaataaggatctttaattgtgttgttcattgctttatctcaagcgctgaaaagagtgcctggcccatcatacattattaactcatttattgaataaatgagttaagtagcttccatctaacaatattttatttcacttggatctcaacatttttttaaaaaaaaactttaagaaatacatgtgtttctttttctcctccagtagttctatttgacaagacgtgttatgattgttcaatctgattctctgccttctggaactcctcagataggcagttgtttttttctctgatgattcagtgacgctctgaccttgtttctagttttatttcttctccttctcctcctcctcctcctccttcttctcctcctccttcctcttcctcttcctcttgttgtcttcttcttctccttcttcctcctcaccttcctcctcctcttccccttccttttcctcttccccttccccctcctcctcttcttctgcttctgcttctcctcctcctcctccttctccttctcctgctcctcctttttttaaagggacagggtctcattctgttgtccaggctggagtgcagtggtgtgatcttcgctcactgcagccttgacttcctgggcacaatcttccctcttcagccttcaaaatagctgggactacaggcatgcatcactacatctggctaatttttaaagttttgttatatagagacaaagtcttgctatcttgcttaggctggtcttgatctccttgtctcaag

SEQ ID NO: 10405 - DNA, 1025 bp, Homo sapiens
ctgttattttttaaaaactacctttgaaactgatacctgctgactggctaaagccatcttccttttttcattactctttttgctcacatcttgtttgttaacaactgcctcatcttcctcttcacgctggtcatcctaggaatttcccaggaaactagtgtcccagcgtagaatctgagagctttggctacttagttctgcatctttgtcatcagttccatctcttccacttcacctgtccttgtcctacagtattattctgggcccagttactactgctcctccatgaccatgaactcaaacaccagctcagtgactaaaatctatgatcctcctagtttgctgcacatgtttttcatcctcagggcttaaagttcagtgacccctccaagttctcctaccacaactatcctttctcagctcagattagatgactgcaatttcattcatacccaggcagattggtgctactctaaattcacagctccatctctctgaaaccatggtattgtggttggactgtgtccccataaagatatcttaaggccgtaaacaccaggtacttgtgaatgtgggtttatttggaaatagagtgtttgcaaatataatcaagataagagcacatttatgcaatgatgcaaagaatcagatacatgggctgaagtcgaagactcaagaaaggagataattggtcatgtgagactgaaaaggtggaagaggatgagatcaagacaatacctgaacagattctcttttaataagagtaagaactaccctaggactacattcattgtaataatacactgaacatatgattgccaatgtttaagcattttttttacttttgcttacttacaaattctataggctcaactaataacaaaatatactaactggcctttatttagcactatatactcaataaattcctttagctatcatatttaattctcacaacatcccttaaggctgcagcatcaactgttgcctaagtttccagtctgcccttgccctacagatttcag

SEQ ID NO: 10406 - DNA, 1094 bp, Homo sapiens
cttcttcatgctttgtcacctctatcctgtatataaaagcagatcataatgcttccagaatattttattttgaatagataccttttcctacctctctgtccttaacattttcgttttgaatccaaaatgatttttactgtgctctacatttgtgttaacattacactttcccaaaagtaaatttaatttataaaatatttaatttttaatttatcagggctttctagtcactatcatcagaactgaagttataatttctaaagctctcagagaactaccagcctgtttcctgtttccacctgtaacttctttttgacatgtgtagatcctttttatacatgcccggcagcattttgcatggggccttaattaaaatccagatgaggattgtctgccaaatgtatcattttgaaaatttctcccaatgcatattgaaagggatctagcttatgtatgactgggacacagctggagaagaacatatctctttttaaaaaggaaagttggatgctgaaatcacagattaatttaccactgtagatagaggcattcagactgtgctgtttgaattaagactaaaaagaaacaagaaatggcaattattataacatttgaatttttgtacattcatataactttatcaataccctttattatttaccatttgtttctttgatgtgacccattcatctttagaaaaataaactgaaatatagtcagtcaactcttaatgtcattttctttctcatttaaaatctccagttccaacatttgagctgaaatataaatttacaagcatttataatcttgtaaatttgtaagttataagcatctcaccctgtatattttcgtttccccaaatacacaatgcatgccagaatcaaattcattagctgtcttctctcatacctgtaaatcatcttctctctgcagggacaccatttgtatcaggttgcttggaaattttagatgtatctttgagtcttttgccttcattctatacaagttgttgaccaagtcatgtattttctcctgctgatgcctcagaacagcctccttcaatctcacatgtagtccttagcatggaggcatgt

SEQ ID NO: 10407 - DNA, 1060 bp, Homo sapiens
tccaagattttcaagcttatttaaaaatagtacataacaagtcattctgcttttctctttacatcgttaatacttttcttcccacctaaatataattacctaggttatatgtattacagacatcaagtaattcagtgtaaatgatattcaaaattcaaattaagtatttttccccaaacgacgcagaaagcttttaagaaatatttagacaaattgccacaaagtagaagtcaatactgaaaattgcttttctctttgctcttagtttgaaattgaggaggaggaagaaatgttgtcatccgtcataccagattccaggagagaaaatgaacttcccgatttcccccacattgatgagttttttacccttaactcaacaccatctagatctgcatatgatgagcctcatttgctcgtaaatattgagaaacagaaactagagttggaaaaacgacgactggatatcgaggccgaaaggctgcaggtagaaaaggaacgcctacaaatcgagaaagagaggctgcggcatttagacatggaacatgagcggcttcagctagagaaggagcggctgcagattgaaagagaaaagttgaggttacagatagtcaattcagagaaaccgtccttggaaaatgaacttggtcaaggagaaaaatccatgcttcaaccacaggacatagaaacagagaagttaaaacttgagcgagaacgcttgcaactggaaaaggataggctgcagtttttgaagtttgaatctgagaagctgcagattgaaaaggaacgcttacaggtagagaaagacagacttcgaattcagaaagaaggacacttgcagtgatttttccaggcttccatttagcaaatgtttgaaaactctagatttttctcatatcaggtgatataatgatggttgctggattagctgtggtttcttgtctaatgtcagtgttcagtaggaaaaagttatatgtggataactgtatgcctaagtagtatataaaagctgtgccctagcgtaaacagtatagcagaaacttactgtgctggactctttacc

SEQ ID NO: 10408 - DNA, 1060 bp, Homo sapiens
tcccaggccccaccgcagacctgaatcagagtctgcattttaatggggttcccaggtgattcatatacatgctatagtttgagagacacagctctagcaacatctaaaaaatgtttttcaattgtataatttttcttcatttcttattatttttcactgtggattccaacttcggctcttcatttgtcatttagaatcattcatatgcacgtcatttctctgttttcagtaaattctcttaaatttttttatcgcttaacattttcaacagacatagctttttaatgtatgtgatggaattagtatgtattcatgtaatacatataatttgtccataaatatttacatactattataaacgatttttctggaaagaatttcaagaaattgctaatagtagttacattggtggtagaaatttttcacttcattgtgaatttacattcttatttagattttctaactatatgtatattttgctgttttaaaaaaatgggactttaaataatgtagttctctataataaaaatttcttataagtagatttttaatataatgttgatcacctcaaagtaaaataaaataaatgtgctgtgggctaagaagcagccatatggctgagacagaaatgactgtgcacatgatccccaggttggtggtagacagagttaatgaacctgttgtagagcataggatgttctgtgtctgcgaatgttcctaagttgatctgtgaacatgtacacacacagacagatgcatttcctttgccaattttgttggcttgcatcaactatagcatctacgtggggattatgtgctaagacatccatactctaacatgacatttattgcatatattccattatgtgacttaatagtttattcatccagtccccttttgataaatatttctatttttaccatgcttttaccttaaaaatgtgatagtgatttttaaatggctcaaaaggctatgtaaatgctctgaaacattctgtgtattttggaaaccaaaatttatctttatcacatgtaggcatttgatttggtgggatgtgat

SEQ ID NO: 10409 - DNA, 1050 bp, Homo sapiens
cccagtctaactcgattcttcccaggggctctttttggacggtcccaaaggaggcagcgggagggaggtgaaagatactttgataaccgtcgacccataagtatacttgttatgcacctaccacgagttttagagaagaacatactttttggcagggaagtgaatcccctataagaatataggggaggggaaagccacactttaaagagaatttgggtagggtttgatattgtagatttgtgatgcttttcttcttgaactgcttaactaatttaccctcaaatttttttgatccggaacttgccgtctggtttttctcagacttcttaattctgacttatcatgaagtatctaggaacttcattctcaagttttagtgcttgtaaaaagttgcctggttatattatgccattggcagtacatcatcttcacaaggattacgtaagtgaactacatctcattcctgtttccaactagtgaagaacgattgtgaaatgggattttagaaaatggctgttctctgtgattgggcatagaaggtttgtaagttttagagactgcagctgttgaatcctttctgctaagagagcgatgacaggcaatagaaaagggatagtgtttgacatctaaaatgacatattttcacattttatgaggtgttatatccccagcaccaaaaatagtgcctttcacacagtaggagctcagtaagtattttttgaggaaattattggggaatgaatggatggtagaaaacccaagcttctgttacttggataccggcatataaaggagaggacaggaagacaaacatttctggaaatggcttttatccaggtaagcatatctacagaacttcaacaactcaagatgcatcaatgctggcactttcttgcacttaatcagaaaatatcaaggttttagaagaagattttcacacaattaagccaagactgggtatctaaggtgcatcccaatatcaatttcagtcaggttaaaaatgtattaaagcccatttgattaaatgaaatagttcatcagttcagaata

SEQ ID NO: 10410 - DNA, 1075 bp, Homo sapiens
cagctaatcccatattctaaaatagttttataaagtgattaatatttttagtttgtgtgtatgcatctgtgtttattgaatgtagatgtttcatgattgaaagaagtaagtttctttggaaggacttgggaatgcagagaagtaaagtttgtgtctttatttctaatatgttataaccagatcacggtttcagttaagtacctcattgccatcccatccttaagaaatgacctagttcagtggttcagctgatctgcttggaagtatctggctggcttcataagaattccgtagggagttttaggaatacagaagactagtctttaccttcagagatttggattcagtaggtctcaggtagggcctaggaatctgtgtttagaaaatcactctaagtaatgctaatatacagccagacttgggaatcattgaaaagtattcaaataatcccaattactaggaataaatacaagttgactgggatagtgatgttatttcatttgtagttattttgaaaagttaaatactctaggcctcataccattatttctttcacaaattttaattttagctttgatttccaatttgtggtcttctttctgagcatgaatcttcaaacttagagacagacgtcaacactgataagcatgagggatgaatattgctcactatagggctattaggcatactagatacagtaccattttcttagttactgccagagctgtgcagtatattacaacatttgctaatcctcaccaccgaggtaaaaactatgacctttgggacacagaagcaaatatcaaagtgacagccttacttctgaatgctttgatttttatgtcatgaaaagacatcaacttaatacttagtctcactatgtacttttcatattgaattgtacattatctgaaaactgatttccaagcaataccgtgtaacaacctttcaagcaataatttaagccatggtgatgatgccatatgaagcttgcacttctttgcatttcatagagcctttgtgaaaacagaaacatgttttatacaagcaataatatagctggtgtggacttttt

SEQ ID NO: 10411 - DNA, 1019 bp, Homo sapiens
gctgcattatgatttggttatgacataactcagttaaggaatatatttactaatttccaatgtagtctatgaggttcatttaatgtttttaaattttctatgtgtgtggctagaaggcatttgtagatatgcaaatatttgttataatcctgatcccttttataatttgagttattttcttgccctgggggtttacaaggacacgagtgcaacactctttatatggagaagacaggaaatagaccttgagctctaaacctttgcctgaccccctcttctgtgggcctgtgtttctggacaatggggaggtttacagccagtatgagcagagcagactgggagcacctcaatcctcatgcttatattagaaaatgccttagcaatgttgatgggctccttgtagcactggagcatggggagggaacaagctcactgatgtcatttatgcctattgtcttcagtaacttagaacttattatggtatattaaatcaataaaatgttggtgatgaacaatgtgttttgtaaccataaggctgaaagggacttccaggaatatccaatctatttctctcactttttataaagatttgtctaagcaactactctaaacacatatttattatctccatacttaagaatatctacgggaagcatatttgaaaagcatcattggaaatccacctcaatactagtgataggcctggagagaagtattgtatttatatatctcaatttatcagaagaatcacaaattctgtattagtttatatgattttacttagagaataagtatccatttacattgccataaatgtcacgatgaagaacgtgccagagatttcttatttatcactgacaggatgtcaactacatttttcatacattataacctaagtgtattttcacagctatagtccgagataatggtccaatttgttatcattttgctaatctattatagttgattattgtagttacaatgttgctatatatgtttatgaggtactatataaaatg

SEQ ID NO: 10412 - DNA, 1069 bp, Homo sapiens
aaatcatgctactataaagacatatgcacacgtatgtttattgtggcactgttcacaatagcaaagtcttggaaccaacccaaatgtccatcagtaatagactgcataaagaaaatgtggcacatatgcaccaaggaatactatgcagccataaaaaggatgacttcatgtcctttgcagggacatggatgaagctggaaaccatcattctcagcaaactatcacaaggacggaaaaccaacactgcatattctcactcataagtgggagttgaacaatgagaacacatgggcacagggaggggaacatcacacaccagggcctgctggggggtcggggcttgggggaaggatagcattaggagaaatacctaatgtaaataagttgatgggtgcagcacaccaacatggcacatgtatacctatgtaacaaaactgcatgttgtgcacatgtaccccagaacttaaagtataataaaactatattctattgaataaacctttttgaaccataatatggcattaaacattccagattattgccattctgtacattgctatctctttaccatattcaccaagtttaccttagccatgttgttaattggtttgttatatttatattaggttttgttacgtttatattttgtttattttcttattctatccatctttcttggccagctcaaatcctaagaagtcatctccaacactcactatctccttagtagcaattacttccttcttccttaggaaactgataactttgtcacaatttactgttggtatttaacatattgtaacttgcaaataaattgtgtgtgtaaattcctgtgttgtatgtactaggctgtgagaactttcctgtttgggactatgtcctgttcatctttgtatatcatagtgcaaggaatttattatttgtgaattaaacagatttatcaatgtagaaatatataaaattctgcagcaaaatatggaaaattatatcctgatatacgtttgttaattctttattcatttttcatacattggttttacatataaaatattatcaagacactaccatg

SEQ ID NO: 10413 - DNA, 1072 bp, Homo sapiens
aaagctttcctgtgatattagagaagagtaagatattgttcttgataacatcctgcaactcatcatttatagcataataagcccttccactctgattctgttagacaggcccatccatggcaagatattaaacaaaacaggatttattgaaaacatgtctgataatagcaatgatattgaaaaagagcaaaacagtacaatcctggtttttatgtttctgctttgaccacaggcttaaaatgtgtatttcaagcctataaatattgattgtgagacacaagaaacataatataaatattttgaaggaatagtaattaagagcagtgagtcacaggtagctaccagatgaaaataataaacccaactttgtcagggcttcagatcagagtaaggtttcaattttgatatccacggagaagagccaaattgaagatgaatatgagtaaatattgatgatccatactactgaatttgtctggtgataaatgtttcttaggtattgcacatattccgaactcataaatacatatactacataaaaacatggaaaaaacccttcagaaatgttttcctgtattatattttcagaaagtcacaagttttagagaaatcatataagcagaatggcagacagcatgggccatatttccatgtcaaaagtaaattgaaaatctaaattagtacctgaggttaaaaatacttatgtccacagattccagaatacaaaggaaaagtaatgccagccaaatctgaaacataaacaactataagttttctttgtatttgaaaatatggccttggaactctgtataagaagatgcttacttcataaacatacatgtgcaagtgtctttttcatataatgacttctttaagagtgccctccaatgatatgacaagatgctgaccgatgttatacctcatttcctgaaagtttctaagtgctctatgatggatcctatggtggtgagagtcaacaacctttgtcataataaataggagatttttctcacaattttcgaagtaatgtgacattaaaaataaggataggaaggagacaaggaaagaagaa

SEQ ID NO: 10414 - DNA, 1035 bp, Homo sapiens
aaattatcacaaacttaatgtcttaaaacatcacaaattatcttattgttctgtaggtcagaagtctgaaatgagttttacaaagccagaattaaggaattggcagagctgcattacttctggaagctccagggaaaaatccatttgcttcccctttccaacttcttcttttttttttttttttttaacttttaagttgaaaggtacacgtgcaggtttgctatataggtaaactcatatcatgggggatttgttgtacagattattttcttgaccatgtattaggcctagtacccattagttatttttccagatcctctccctcttcccaccttctaccctccagtaggccccagtgtttggtgttcccatctatgtttccatgtgttttgatcttttggctcccacttaaaagtgagaacatgcagtatttgattttctgttcctgcattagtttgttaagtataatgacctccaggtccatctgtgttcctgcaaaggacaagatctcattcttttttatggttatatggtattctatggtatatatgtaccatattttctttatccagtctaccattgatgggcatttaggttggttctatttgctactatgaatagtgaggaaatgaacatagatgttccttgtgtccttatgacagaacaatttgtattcctttgggtatacatacaatgatgagatggctaggtcgaatggttatttatgtttttaggtctttgaggaatcgccacattgttttccacaatggttgaactgatttacactcccactcacagtgtataagtgcttttattcttcataaccgtgccagcacctgttattttttgactttttaataatagccattcttatttgtgtgagatgatatttcattgtggttttgatttgcatttctttaatgatcagtaattttgagttttttttcatatattgttagctgcttgtataccttttttgaaaagtgtctgtttatgtcctttgtccactttttaatgggtttgtttgggtttttc

SEQ ID NO: 10415 - DNA, 1067 bp, Homo sapiens
tatttatgtgctgcaggattgggtggtggcaggttttgaaaaactgatgactaatatactcgatgattataatagaaatagtgcctgctgcttggtaggtacttagatttttatcaaaagaataaatttatgcatgaaatcgtaagaaggggcaacaagcagatgcatgtggaagagtgtcatggaaagacactcagaggagataagatttgagttgaacttgaaaggatagttagccatcagcaaggtagatataggggctggagtgaggaatttgaagcaaaagagatatgcctctctgtacaaaggcagagatgcagggtgaggctggagtacaggatgcatgcagaggaggaataaaagtgcgcccttagcaacccagaattattatttggactttgtcctgaaggaaatagaaagccattggaggactctaagatggactgtgataagatcaaatttagaaatatgatttctggtgactatctttttgacagtttagagattttgaagagggtaatactgtgggccttttggagtattccacgttgaaagtgtctgtcctactagacagttgaatagtcatggtcttttattttgtttttgttttatttcaaattaaacatgaacaaatttatatttcatatagtataaatatttgtatatatttatgtttataaacagttgtacagatcattgtagataacataagcacacactttgtatatgtgtatacaaatacatatacaaatatcatatacatatgtggtatccagataggatgaggtttgtgcatgagtcactgaagacccaaaataacagaagtttgtatttctttcatgagaaagaaatatgtaggcagtctagagttgttatttgtgtttcagatatctagacaccttttatcattttgttctgcttcttatagcctgtaacttttccccattgcccaggatgtctgcttgagtttcagcattatgtatgcattccaattaacaggaaggaggaaaggatggaagactttaaggacacttttactataaagacacattcaacatgacatttta

SEQ ID NO: 10416 - DNA, 1035 bp, Homo sapiens
tatgtattttgcaaatattttctcccagtctgtggcttgtcttttcattctctttatattgttttctgtggagcatagatttttaattttaatgaagtcaagttcatcaatttttttaaatacatcatgcctttgtcatcttatctgaaaagtcattgccaaactcaagttgttctatattatcttgtatgttatcttccaggaattttatagttttgcatttaacatttggtctgtgatccattttgcattttttgtgaaagatatgaggtctgtatctagattcaatttttttttttgtaattcgatgtccagttgttctagcaccatttgttgaaaaaaggtatctttttttcattgcattgcttttgctcctttgtcaaagatcagttttactatatatatatatttgtagttctatttctggggtctttattctgttctattgatcaatttgtctattcttttgcaaataccactctattttgatttctgtggttctataataagtcttgaggttgggtaatgtcagtcctccaactttatttttctccttcaatatcgtgttgtatatttcaagtattttgcctacttcatgtaaacgtaagaatcagtttgttgatattcccaaaatagtttgctgggattttaacagagatttcattgaatctatagagcaagtggggaagaactaatattgtgataatattgtatctttctatttatgaacatagactctctctccacttatgtagtttttctttaatttctttcatcagagttttgttattttcttcataatgatcttgtacatattttttaggtctataagtattttattttggggtatgctaatgtaaatgtattgtatttttaattttaaattttacttgttcagtgctgttatacagaaaagtaatgggattttgtatattaaccctatacactgaaattttgctataatcattttattagtctcaggaatttttttgttggttcttttgaattttctacatagatattcatgtgatctct

SEQ ID NO: 10417 - DNA, 1045 bp, Homo sapiens
tagatgccattaagaacattgacgattcatgggaggtggtcaaaatgtcaatattaacagaaatttggaaggcattgatttcagttctcagagataactttgagggcttcaggattttagtggaggaagttactgcagatgctggtgaaaatagcaggaagactagagttagaagtggggcctgaagatgtgactacatagatgcactctcacagtagaacttgaacatatgaggagttgattcttatggatgaacaaagaaagtggtttcttgagatggaatccacccctggtaaagatgtgtgaacgttgttgaaatgacaacaaaggatttaggatattacataatagggcagcagcagggtttgagaggattgactccaattgtgaaagaagttcctctgtgggtaaaatgctatcaaatatcattgcatgttagagagaaatctttcataaagtaagggtcaatcaatatggcaaactttattgtttcaagaaattgtcagaactacctcaaccttcagcaacaaccctctgatcagttagcagccaacaacagaggcaaaacctacaccagcagaaggattacaagttgctgaaggctcagataatcattagcatttttagcaataaagcattttaaagtcaaagtatgtttgtcgcttttttagacataatggtattgcacacttaatagactacagtatagtgtaaacataatttgtatatgcactaggaaaccaaaaaaattcatgtgactccctttattttagtattcaggaacctaacttacaatatctctgagctatgcctgtacagaaaaactggatatatagaagatagtttcagaaattattcagaaaaggaagcttatcattagaaacacacgagtcttattcagatttactgcagatattacatgcctattcaagtataaatatgtttacttcgttaaattggcccacgcaattatgtcttttagattaataattatgtttgttttgtggctgggagaggtggctcatgcctggaatcccagtacatt

SEQ ID NO: 10418 - DNA, 1117 bp, Homo sapiens
taggctttcttctagggtttttgtagttttaggtcttacgtttaagtgtttaatccatcttgagttaatttttgtataaggtgtaagcaagtgttcttttaaaagcatcttatacgtgttgctgcagttctaaagaataactagtgataaaccttgtcacagaaatctgtacatacatgcaaaacataggtcatgaaaagcatgagctgcattaaggacatgaaggaatttctcatggggttattttaggaagtttttgagatagttcttatctcagacatgtgagcatgagctgccctcctttgtgctttcctggctctaatttgtttagaccggccatgagtgattccatcctggtatctgcaacttcacagggtcttggcttatttgggcttcttttctgtcagtgataagtgcttgatcccaattctctaagtgatatggactgagttgtgttgcccccaaaagttatgtgttgaaggcgtacccttcatgtaactgtattggagataaggactttaaagaagtgattaaggttaaatgaggtcataatgttggagccctggtctgatagaactggtgccctcactagaacctgacaatgctaccatctgatcttgtaactttcaacttccagatatgtgagaaaataagtttctgttgtttaagccacccaatctatgatattattgcagctttatctgactaagacactgtctgacattagagtgattgtcatattaattaatgctctgggagatagaattatgagtcagctttctattagaaatgattttataacagtctatttttgttctagggtgtttaggcattaaataaagtaaatgatccattggttgtatctttccatgtttgccgactcttaatgaactacatgaaatggcaactaccttttctagccacctcagtgccttacattcatggttaggcattatgcatcatttcctgtcttttctgacactcaggatatgaaattattttgccatgtaattcaattaggtcactgaaacactttgtgagttagacttctgtaatgcaaaatcgtgttgcttatatatcttcattttttttcagagcaggagtcatttcaagagtc

SEQ ID NO: 10419 - DNA, 1034 bp, Homo sapiens
cacattttatttttctgaaaataatcaaaatccaagtacagtcatacactacacattgatggtttagtcagattgactgcatatatgacagtggtcccataggattgtaaagccgtattttatcataccttttcaatgtttagacacaaaaataccattgtgttccagttcttacagtattcaggatagtcacatactgtatagatttgcagcctaggagcaataagctctaccatttagcctatgtgcattgtaggctatgcctctaggtttgtgtaagtataccctgttgttcatataatggtgaaattgcccaacagtgtgcttctgagatgtatttctcttgttgttaagtgattcatgactgtatttatgtttgaatcatacaataatcttggttcgttttccgtttttcctaatgaagacatggtggttttttttttttccttggagatacaggggggtcaaaaatctgagcatattgtaggtgacaagcagtggaagttgattccaaaactcttgctttttgaaggagaggtcaagaattatatttcttgtcagcacagactcatctgtgaagttgttgttggctgatgttaaaaatgcttgtaataacatgtgtaggttcttcaaaggattgagatttcaagcttacatgtctcaaaattttgagtgaagcagtgactcttttttggccattgaacaccagcttcagaaatccttccatccactgtagaagaggtgtgagggaatctctttctctctgtgaacatatatggagaactcatactatgatttatggcagcttgcattttcatatttttctaatttagatgttactatgaataaggtaggtgtagatctaacaatagaattgccataaacaggagttagaaattcttaacatcctacagtaaaagaattttgtgctactctgatacattttttaggtaggttataaattcttatcttactatcttaatatgactaattatgacagctatttttcagtagtttaattaccattctaccct

SEQ ID NO: 10420 - DNA, 1050 bp, Homo sapiens
atttcagtgtaactttgaggtgatataaccaacagggtcccatttgttgaaggtgttgaaatataagatgtccacaaatggtctttgttaatatcgttatgctctcctaacccccagcttgcctgagttaagattcctttcaacactatcaacagccagtgagtcaaactcacttaactaaagctcctttactcaatacattctcataacaaaattctcaaatttcttagaaactcttctatttttgttttctcaaagatagtattactgccatttaaaatctgcaaaactccttagttggataaaacaaaacagaacaaaacaaaaacacttagctctgacttggagcagaagaaatggaagcacagctaggtcaggctgcttgcatggggtcacaccattagcctctggggagggcagtgtttgaactatgaggctgtgatggtagagcctgctacattacttattgacccctcaactgcttctgttaccaaacagtaattgttattattgctttttctctgagttagaaggaagattattcttcccttactatgtgagaaacatgattgtgggcctgtaatcacttcatatgtcaaactcatagcttattttgttgccatctcatggagcagatttatagtgacttgtcacatttgctttttgaaatactgtttttttttgtctttatttctttgaatcttttagctcaagtgagcataccaccttcctttctcccccaacccttttcttttgtgttagaagacttttgttaagtaaatgaattatttcccattcatgaggctgatgtttttgtccattgtgttatctctctgctttcattgttctttgatgcataactctgactcaactacaaattttaatagcattctgtttaattcttctgacagttagtgaaaatttaagtaagattagagttaaattcaaacatcctgggttctatgctagatgagttgttgttcttactagtcttgagttcggttcttcagtcaattttaagtacttttgacagcatttctattgtaattt

SEQ ID NO: 10421 - DNA, 1050 bp, Homo sapiens
aaaccatgacctgggcattggttgtactcattgctattggggtgttttgcttctacgccctctcagctgacagagcaagagaatatatgtgtgtagactaactcatatatatatgcccatctataaacatttttatatgtattcatcatatgctaaatatgagttaatactgatgtctccaactttactccattaccatatggatcattctaacctttccctcttgcttgtctatatccttctttctaacaaggagaaacctgactccctttagccatccatttactgaattcttcaattccagtgtacgtttatagttgtttcagaattgttaacagaaactcccaggggaaacaattttatcaactaaaatacagtgcctatgggcagtttgggagtatgtagttatgtataaagctttatagtgtccactcatatccagggttacttaggtaagcacctttctaccccaccacttccagtaagatttttttcatatatttgtaatacagctagattcttttattatagtcttccatcctgtgatactttgacctcctaaacacacacacacacacacacacacatttaaatttgtatacagtaagtttagctcttctgctgtaaagttctatgggtattgaaaaatgcataatgtcatataactgccattataacatcataccaaatacttgcactcttctaaaaaaaatcccgtgtttcacttgttcaaccgcatgtcacctccaaatccctggcaagtaccgatctgtttgccatgctatagttttgccttcaccagagtgtcatataaatgtaatcatatagtatatagccttttcactggctccttttgtttagaaatgtgaatttaagattaatccatgtctttggcagagagctcattcctttccccccacccccctgaaaaatattccatttaacatgtaccacagtttgcttatccattcattaattgaaggataccttggttccttacatgtttggttattatgaattaactgctataaaacattcacttgcaagttt

SEQ ID NO: 10422 - DNA, 1046 bp, Homo sapiens
cacccctaggacttttacttttttaaagtttccgaaatgaatctgaacactgatcttgtttgattactgttgagtctctcttttgagattactactgcaaatgatggtaggggggacctaagaaggagtggaaccctgaggggactgagtacgggtaccagacaggtctacaaatattcttgtggcacttgtattaatggagaatgatttttttcttttacgagacctgattgaagatgtataaatcacttattacattatttattttgaactaatttaattcttaggaacacatattgagaaacagtcatcttcctattcttgtgtattttcgtatttgatatatctttctgccactttttctttcatcattaacctagaaaacaatcctcagaatagattggctactctttgctgttcttccctgccaatatttcccaggcagcgtaattttataaactatttgatgttgcaaattgttgaaaatatttatttacaacaggagtccaatgaccccgagcgtctgtaggcttgtgtcagtacttaaagcaacatttgtgcaataaaatagttatttagtacaacagattcttatttaatgaaatgattttgctaaagataatgattagtttggggagaattgttgatataaccttggaggtttttttttttttttttttttttttttttttttttttgcctaagagaatttacagatttctaaaaagtaatgtcaatgcctctgataatgctaatttaagctaagactattttcaacaacttacatgaggagtagataaaagaaactgagaaatgcagtattttctgctagaataagaggaaggaaatagtctctgatggttacttttataagttaaatttgaatgactggctttttgctggatgaaaagaatgtatccagagaatggttttcagaataagcaatttaaaaataattgtgatgatcaaataaatgcaacagctctatatactttccatgccatagttgttttctattatgaaaagggtctgtcaggtggacgctg

SEQ ID NO: 10423 - DNA, 1085 bp, Homo sapiens
cctggctcggtggctcacgcctgtaattccagcactttgggaggctgaggcgggcagatcacgaggtcaggagatcaaggccatcctggctaacatggtgaaaccccatctctactaaaaatacaaaaaattagcctggtgtggtggtgggcgcctgtagtcctggctactcgggaggctgaggcaggagaatggcgtgaacccgggaggcagagcttgcagtgagccgagagtgcgccactgcactccagcctgggcaacagagcgagactccgtctcaaaaaaaaaaaaagaaaaaaagaaaaatttttttttcaagtttaaatagttttactgagatgtgtcttggagttaacattcaaagtttacttttccagttaactggaaatccctttcaaaatgtagattcagatcctttttatttctgataatttttcatggattataatgttaaatattctgttccattgttttttatttcttcttcaggggttccaattatatgtgagttatttatcttttgttcaactttctctttctgaccatttttccttcttttctgtatcgtatttatttgtttatttttgcatctatccagtgtctaagttttcattagtctgttttcctttggacaccttgtaatttagtcttcatttataattcccccccttccatttctttcttgaattcaataatctttaaatttactcgtggtttttttaatctatttctgttttttatattttgaatttccaattcacggtgctttttcatatccccaaatgcttatctgaggattttattcagtttgatatgttgtgttacaattttcttctgatttaatggttgctttttggtagagaattttcatcagccaatgcatgttaattattgtttgctgatttctcatactaccattatatagatttagtccatttccttccattcatttttttgaatttgaggggttataagattcctagttcagaaggactctctctgtcagcatagaaaatacaatttctttagggggtgttttttttaactttatagtagagggagggattatgtatgttccagttttt

SEQ ID NO: 10424 - DNA, 1023 bp, Homo sapiens
aatggatctaacatatatacagaacatttcatccaatagcaacagaatacacattattttcaagctcacacagagctttctgcagaatagatcatacattaagctacaaaagaaaacttaacaaatttaagcaggttaaagtcatatccagtatctttcaaccacagtggtatgaaattaggaattaataataggaaaaatgtcagaaaattcacaatatgtagaattaaaccaaattctcctgtacaaccagtgggtcaaagacaaaagtaaaagggacattaaaaattgtcttgagacaaatgaaaatggaaacaccacatgccaaaacttgcgggtagcagccaaagcagtcccaagaggaagataatagcaataaacacctatatcgaaaaagaagaaagactgtgaaccatctaactttatatcttagggaactagaaagagaagaataaattaaggccaaagttagtaggaggaaggaaataataaagatcagagcagaaataaacacaaactagaaaaacaacagaaaagaacaaaactaacagttggtttttaagataaaatcaacaaaccttgatctaaactaagaaatgagagaaggctaaaataaaattagaaaataaagcagagacattatacatgatactacagatataccaaggatcttacgagattgccatgaacttgctaacaaattggataacctagaagaaatggatgaattcctaaaaccatagaatctatatgagccgtatactttcttaacatttctgccatcctccctatcctctttggtatagcctctcttcagactgcctccttagctctcttctggatcactataacagcctaacaattgtatcaccttcagttttgctcttccttccatatgactaaataaatgaaaaatttgatcagacattaacgagtagggagagtgaattggtaataaaaggtccacttattttgtcttacagtgagagtggcttgctattatctcccattattgatgcattt

SEQ ID NO: 10425 - DNA, 1049 bp, Homo sapiens
aaaaataaaaaatcagctgggtatggtggtacttatctgtagtttcagctatgcaggaagctgaggtgggatgatcacttgagtttaggtggatgtctgaaactgtggatggtaccaaacccctatatatgctatgttttttcctattcatacatacctatgataaattttaacttataaagtataattgatagacatagtaagagattaaccacaataatcataaaatacaagtatagcaatatgccagcattgctactctcgcagtttcaggctattattaagtaaaataagggttacttgaacacaaactctcttatgctgcaacagtcagtcataactgaaatagctactgaataactaaatagacagacaggtagcatacacagcatggttgtgctggacaaagggctgattcatgtcccctgggggggatggagtagaacagcatatttcatcacactactcagaatgccatacaatctaaaacttatgaattgtttatttctgaaattttccatgtaatattttcaaaccacagttgactgcaggtaactgcagccacaggaagtaaaaccacaggtaaaggggggttactgtattgtataggattgcttatttaatattagctgatttggcaataattgcatcttcattactttccctaaacattttacatctttgatttttttaattgacgtttagataaattgacgtttagataaattattgaatgtgcagctgatacacattcagtccagacttttaaaaaaaattttgatcaatttatatattattgaatttgtagtagtgttgtattaatatcttgacaaatgtgttatttttattcaagcaaattgttttttttttgtattatttaatggaggtgttttttctaaatatgcaaagcaatgccagttcctacctatgtgcagtggggccaatggaagtacaggttgctatggaaatgctgatttcacattgggatttttagttcatcctgcctgataattacagcagagtagcaatttgttttgtatgtttaatga

SEQ ID NO: 10426 - DNA, 1049 bp, Homo sapiens
tccaatcctaattctttaatatgttagtcctaatctgcccttccataacttgtgcctgttaataatccttcaatggagtcacattatgtatacatttaatctaaaggaatttagctttgtactttataagaaaagataacgcaggaaattaagctcaacatttgtaacaaagaatgaaataatgtttgcctaatggtgtagtagctttaaagttttgtctacactgctgataaagaggagaaatgcattttggtccctttgcatgtacgtagagggggtttatggacattctctttaaagaaattgaggaattaactaagggccatagagaaacattaataaataaacagatacattcatcattttgtatataaatcaggtacttgactagttatttgaagtatttccagtagtagtttgaccatattcaattactgctttaacactgtcttttggatctgattcttgggtgcatcgttcactgtgttcacaagttcacttgtcattggtgtgattcccagaatatgtgaactgttagactgtgtctttttttttttttaatgttttagcatcccaatccctgcagttgatcccctaagcacagtacaacagaaaaaaagttacaagactataaaaaacttgcttgtggtttacttttaatatttaaacagtgaggtttgacctttactcaatgaatactttgcagttccttctttgtagaaggcctttgcactctcaattttctaggtcaaatattttaaatctaaagtaaacattattgtagctttgcatttattctgtttaccttgccatgttactgtaggcacacttttcctgaggtatggtcttgcttgacacagagtaggtatgcaaaaatattatttccttttagtcatttagctagttttttccccagccaagtaaaaaaggtcaatggatgtacctattttctatacagttcagcttgtattttttaaccctccttaaagtatctgtcatttctgtcctgtgcagttagaaataccatcttaggcattactagagggctt

SEQ ID NO: 10427 - DNA, 1048 bp, Homo sapiens
actgagccgttcctaattttagatatcttgtttaatttttctcctttgtagtcaatggaaatatttcagtcaaaattagaagatgctgaaaaagctgcatccacgaaagaagattatagacgggaacggtggaggaaacccacatattcagataaagcacaaaattgtcaagaaagtagagaatcagacttagtaaaatatggtaacagttcaagggatagatatgctacaacagatactgcaaaaaatagcaataatgaaaaatttattggtgatgaaaaagataagagacctgggtctttagaaacgtgtagaagagaatctaacccaaggcaaaatcaagagttttcttttggcaatttgagagctaaattcttgagaccctctgatgatgaagaactgtcatttcacagcaagggcagaaaatttgaaccacttagttcatcttcagcattggtagctcagggctctttgtgtagtggttttagaaaacccaccaagaacagtgaagaaagattaacatcatggagtcgctctgatgggagaggagacaagaaacattcaaatcaaaagccatcggaaaccagtactgatgaacaccaacatgttccagaagacccaagagaaaaatcacaagatgaagtcttgagagatgaccctccaaaaaaagaacatctacgggatacaaagtctacatttgctgggtattttatcattttttaacctaataagttaagatccagagagttcaaagaacagaactgtatttttagaacatcagttattagctgtgactatgatctcacatttcttaaaattgatagaaggggtaagatatgcagatttaacaggcagtattgtggtatggattgcattttatttcataggtttttttttttttaagagctgaaagcagtagctatatttgttcaaaatatgttgctgctttgcaatttaaaaaactgaatgagttaatgttttaaatgtatgtgctgcaggagatattttggtagattttgttaccaatgccattactttctaaggaaat

SEQ ID NO: 10428 - DNA, 1029 bp, Homo sapiens
tagagttaagcaaactagtgtatcatttatcttacgtagttattctccttttttttttgtggtaaaaatacctaaaatctactctcttagcaaattttcagtatataatgtgatattattaactgtagtcctcatactgtacatcgtatctccaggcttagttatcttacataatggaaacttctgactctttgacctccatcttctcatcccctctccttccagtaaccaccttcctactttctgtttctatgtatgatgcatcttttccttgaaaattgttttaaagtttgcaactacaagaacagttatttagacttgaccattgcatttgacatttggtttttagcatctgttctttttttcagagatctttgcccgaattcattgatggtgtgtcttaatcatcttgagtaatttttttccctcagaattgctagtgatatgccctctgattccctgcatttttgaaaatgattttctttggcccataccaaggaaggataatttgactgtgaattgaattctctatatagaattatagcttaattttgttttcaaaatttaatcttcattctattatttacttattattatggatgaacagctgtaagtctgtctttcctttgtggataatttgttatttatctacccctatccatatacaggctcacacttattcactccttccctgatctagtccttgtaaaggtttttttttttttccttgagttttgagattcaggtattagggtttttttctgtgtttttcttctttctcccccacccaaggctattggatgagtccttctgagaaatcggctggggaaattttcttatatatttttaaaattaatgctctattcccatcatctttgctccatctttctggaagtactaataaatgcatattagattttctagaatcaattgttcatgtatctttttttcttataacttacatttatttactaccttttcctaaaatatagagaattcccaggttaatttagttttcagcactgtctt

SEQ ID NO: 10429 - DNA, 1029 bp, Homo sapiens
ccgaattggaatttttttacatttattttgaccatttgtattttttagtgaattgactattgatattgttttccatttttcttttgggataataatttaagactttttaataaatctgttcagatttctccccctcggcttgatgttttttacttcgttgataatttgctatggataagttttaaatatttttacctatcaaaatccctcatattattttttcatgaattagtgctcttggtataatttattgacaggccttccccaccccacaatcgtaaaaatatgcagctgtacttacttgagtgcttgttcagttttattttttatgttttatctttaatttttctggaatatatatttgtgcatggtatgaaataggcatcaaactttgcataagtcttatatagttgtttgctatatattgaatgaattattttttctcactaatttgaaatgacacatttgttatacattaaattttctcatatacatgggtctgttcctttactctcggatctgtttcattgatttttctatcttttcctggaatttgtatcatacttttctaattattgtggttttcagtaaattatgcagatagcaaataataaacacctactatgtggtagtcactatgtgataaatctcttgttagtcaccaaaaaaattagctttgctttcttatgtgtttagttttcttagtaaatttagtttaagctcaatagaaataaatatttttccaaaatttgttataaatttacgactctttttggagtttttatttaaatttaactaaatgtatagataaattaaggacaactagtatctttataatatagagtcatcccatcccaaaacactatttatttatgctcttcagtatttttctctgtgcagttattatgcatatgccattgaggttatttttatttttttatattataaattgaattttaaaaatgttttctgacttggtgttggtgctggtcggccaattctttaaacttttattatcctaattttaaa

SEQ ID NO: 10430 - DNA, 1034 bp, Homo sapiens
acctcatgccttaattttcttaacaatacttaacagttgaatagttcaaaaattttgggctatagttcatctgcctcaggaagaatgtaatttgtccactgttagccacaggtgaaggaagaaaggtgaacaggaactaagtttgattgcttgttgtgtgccaggctttgggctggatgctttagatctgttatcttgtttactctttaaaacaatcctgaaaggtagggattttataccattttatagaggagagactaaagtatagagagatttagaagcttgcttcaagttatatagccatgtaggacttgtttcaggtttgattgcctccaaagtccctgctcttattaccaagtgtttattaaattctaatcagttcagattgaaatgatgagtggatgactgttgattttatgtctttttttttaacagagggatgagtggatgactgttgattttatgtctgttaaaactgtgtcatcatcatcactcaaagctgaaaaggaaactatgaggaaaatagagcaagagaaaaaccaagcgcttgaacaggtaagagaatatttgaaatgctttaactttctaatttacctttaataaacttacaagacatttatataaatgcagtttaacttgtaaaataccattttattttttatagtatttaatacaattagtgagaacaactatgaaatacatcagtttaagaaaaataaatttcctataggaagtgagtttaaaggtttactagatttataaatctagggcatatataaagttgagtgaatattgagtttaatatcattaaattgaaagtgaactcactcaatttttgtttcagtgtacatactgaattagacaccatgaaaatacttccatttcaagacatctagaaattctggtggatataatgtaaaataagcatgcttattttatactttattgttgtcactttgctagtaaggaagcaataggaaatctgtagagaccaaaaaatgaggcaaaagcatgaatccagagaagtaaggaag

SEQ ID NO: 10431 - DNA, 1029 bp, Homo sapiens
ttttttaaatggttaccctagacatgacaacatgtatctctgacattatagtctaccttaaattggcatgattaccccttcctgacaatgtaagacttcattaataacatttaaccccttctgccctttattgcattattattatatgctactgttttattgttttaagctctcaaccttcatttatatttcttcactttatttaccctttctggtattcttccttttctcctacatcttcagagtttcagaggaagtaagtttcttttgctcgaagagttctctgtgctgttttctttagtgacacattctctcagcttgtgtgtatctgaaacctctttatgttgccttcatcttacaaattatatttttagtaggtattaaattctcgattgacactgttttctgtattttcccctctttttcatctctgtgcttcaatctgggtaacttatactgacttgaactatagtttaatacttatctttgtaaatgtatctaatttgctaaaaatttaaattcatcttgttttctagaatttccgacttcttaatgtattttatcattactgaaattcttgatcttttcctctggttttttgagcatactaaccatagttattaaaaaggctttgtctggggatttatttctatggtcttttttttttctctgtttttcagtcctttggtcctcatttttaacatacttcataatttttcactgtatgctgggcattttatgttaaaagatttgggtactttttctctgaaggaagttaaatttttctaaggagaagcagataaagtataagcagatcactttcattctgcagagaactggttttatgctttattggggatgatttatatctattttatttttgttcctacttctgtaatgtagcccttctgggtctcaagtgaaagcctggaatgtactccaaggctattttataccttggcagatcttaaattccaatgtctgtctctctaacattggctgctaaaatttttgtttagcattttaact

SEQ ID NO: 10432 - DNA, 1050 bp, Homo sapiens
tggagtttttgaaggctttgccaagtggttcaatagtggctgatattggatgtggtaatggaaagtatcttggcatcaataaggagttatatatggcaagtaatgttgcttttgactttctttttgcttaatttgcagtggttatcatcatctttcttcctcatgatataatcctgtttttttagatcattgccagaaagttataaccaacagattgaaaattaatgattttttttattctttcttattcctctaggaatttatgggcacaccatcattatataattttttttctccctttagattttgctttctaccatattattttatcagtaaaactatcttatagttataaaactctttacagattagaaaggatttttatagaaatcattttttggcttggatccccctaagtatgaagaagataaagctgatattttcatccatcttttgtaaatgaagaaattggggctcacagtgatcatattaatttcctgatgtcatataattaggggacataactggaacttgaacctatatcttctactccaaactttattcatagtagaaaaaaattttctatttattggtatcttactgttgaggaaaggaagtctcaaacagattaaaaacttgaccaaggttacagtgctagacccagaatttgaacccatttctgtctgattccagaatgtctgttttcagttactatttttttctatgagccattttttttctgctgtgctaagaagtaggatattcttgttttagtgtattgttgtaagtaatcattttttaacattgctctgtgaggactggagcttccgtttctctagattaggggatttaggatgagagtaagggagtaggtaaaaagaacgagagcagctgacattcctgggttgttggagtatgtcagattacttctcatctttatttttactccatcctagatattgtgcacctacatgaagaaagttactacaattgtcccttggtatataaaattgaagctaaatcaaataataaataaaatgcatatttaat

SEQ ID NO: 10433 - DNA, 1055 bp, Homo sapiens
tgtggatgaaataccttttttttgtcattcagttgattctcatgtacagtaaagtttgagaaccactgtgctatgcttttctgcaagcattattatgttttaatctctgttagcctagaaaaatagccaaactctattaatcattcttatccttggagtatatgaaattttggattgatctttatgcttttatctttgcttcaagattgtcatggattttaagcacccagatggcattgcagtgccagttatgttgcctcgtcggagtttgctggtgatgacaggagaatctagatacctttggacccatgggtatgtattgaaatatgacaggattctttttctttatgagacttctcattcttctgtgtttgagccacggggaccatgccctgtgcctgcagattgaggcttctgggttcagaactcctaggggcatctatctagtttcgtttttgttaaacattacctttttacttggaaaaaattcttaatttatagcaaacttgcaagcatagtacagtgaactcccttcacctttcaccttcatttactaattttgaatatttgggacattttttatttctctctcacatatgttatcattattatttttactgaatcattttagagtaagttatagacatcatggcttactcttccatgcttcattgtgtatttcctaagaacaaggacattgtgtatgtcagggattggcaagctatggctagtgggccacattcagctctcaggctgtttttgtacagctcttgagctaagaatggtttttacatttttaaaggttgtaagacaaaaaaacaatgaagaatatttgacagagactatgtgtggccctcagtgcctgaaatattcactctctggccccttacagaaaaagttggccaagctctgttctataaaaccacagtgcagtgctcaaattcaggaaattcaacattgataaaatactcttattatactcttatacaatccatattcaaatattgctagttgtatgttatagtgctttaagcattctttctgatcgaggattc

SEQ ID NO: 10434 - DNA, 1038 bp, Homo sapiens
gttgtacagcctagagtgcagtggcaccatcacagctcactgcatccttgaactccgggctcaagtgatcctctcaccttagcctcccaagtagctgggactacaggagtgcaccaccacacccaaggtttttttttgttgttgtttttttttttttttgtacagacagggtttcaccatgttgcccaggctgatatcgaactcctggactcaagcagtctgcccgccacagcctcccaaagtgctaagattacaggcgtgagccaccgtgcccagctgtcatcccatttttaactatgtgtttttggcaactcatttcacctctctgtatcttcattttctcatgtataaaattggattgtaatttcagtctcatggaattgtgaggattaaatgagtgaatccaggtaaagctcttagtacagggctggcaataataaatgctcaataaatactgactcctattataaatactgactcctattatttcttaattacccatcttttagctaatgagagatatgttttaaactgttgattctctttccatgcagcttttggattgctttgggattcctgtgttgatggctctgtcatggtttattcttcatgcaagatacagagtgatccacttcatcgccgtggctgtctgtctgttgggtgtaggaaccatggttggtgcagacatactagcagggagggaagacaattcaggtgagacggtgtcacatgtttgtgcttcaatcacagcaaatttgtttatgttttcacttttatatcaacaaagaaacttgtttactggagtatttctttttaagtcactgtgtaggtgagaacactttgccacactttgtgttgaattcagttgatagtataaaatctaattgaggtctatgaattcatccaatcttcaagtgagttaaacgtctccttggattgagagagaaaattacagttgatactataaaatctaattaaggtccatgaattcacccagtctacaagtgagttaagtgtctctttggattgagagagaaa

SEQ ID NO: 10435 - DNA, 1135 bp, Homo sapiens
tctatgtgctagtaagttacaataaacagaaaagacagactaattcatcacatagttgtataaaacccaatgttgtgggggagtttttaaaaatagctcttatagtcatggtcttcagggaattcatcatctttttggagaaattttcaagaaaaacttgaatttcagccggttatggtggctcacgcctgtaatcccagcactttgggaggccgaggtgggccgatcgatcacctgaggtcaggagtttgagaccagcctcgagaacatggtgaaacctcatttctactaaaaatacaaaaaaatgagccaggcatggtggcaggtgcctgtaattacagctacttgggaggctgaggcaggagaatctcgtgaacccaggagacagaggtttcagtgagccaagatcatgccattgcacttcagcctgggcaacaagagcgagactctgtctcaaaaaaaaaaaaaaacttgaatttcttcctttataaaatcctttctaattgatctctgtctttaaaatcctttgtttatggctgggctcagtggctcatgactgtaatcccagcactttgggaggccgaggcgggcagatcacccgaggtcaggagttcaagaccagcctggccaacatggtgaaaccccgtatctactaaaaatacaaaaattggcatggtggtgggcacctgtaatcccagctgcttgggaggctgagacagaagaatctaaagctgggaggcagaggttgcagtgagccaagatcgcaccactgcacttcagcctgggtgacagagtaagactctgtctccaaaaaaaaaaaaaaaaaaaaaaatccttttttcataggggctcttgtggcatttattgcgtgctgtgttatatgtagttagtgattgatatgcctatcatattgataattttttattgtatgttcctcagagatagtgctcatggcacatttatttacatttccttatgtgttggttcccaagcttccctcttttccctttttgttacattatagacatacaataaaatttcattaaatatcaacaattagtattaaacctaatgggtctgttttacgtgctgttacaaattacataaaggagaggtcagaattaatagagaatgt

SEQ ID NO: 10436 - DNA, 1048 bp, Homo sapiens
ttataaatacatcaggtgcttaccataatcagggtactctgttaaacactgtgaaggattgtaagaaagtaaagacacaacctactgttcttggttgttcataatactgtattcgtagaaagttaagaattaagatttagctgggtgtggtggctcacgcctgtaatcccagcagtttgggaggctgaggcaggtggatcacctgagttcaggggttggagaccagccttgcccacatggcgaaaccccatctctaccaaaaattaggtaggtgtggtggcatgcacctataatcccagctacacagaaggctgaggcaagagaatcgcttgaacccgggaggcggagtttgcagtgaggcgagatcgcgccactgcactccagcgtaggcgacagagtgagactccgtttcagaactaaaaagaaaagatttaaataacagtttttaagacagtatagggaattttgtaacacagaaatcccaaaaggctcgagaagtagcaccaggacgtctgaaagtccctctgaaagctgaggctacaaacaggataataaggtgtaaaattccaggggtcatgatgcttcagcctacccagggtgtgcagggagagagctctcactcttctttgacacttagaagtcctgtgtcaatagtaccaattctatgagtggggctgtcacatatgcagactcctttctgacccccataccaaggaagatgccaaggtgacaaggggaaaaagcacactggcctggtagtgctgccctttaagaatctggctcagcctcagcctggtgaccctaaacagcaatggcagggtctgggtcagcaagacacagctctctctatgcaatgctggaatgagtgtctccagtctcttattgctgatgggaaccttgtaaaaggacctgcatatcctggacaaactgagacacaggtggcagcacaggccccaccccttgaaaagccatcacactacttgactgaccatgacagcactatggataaacttcaagctttttaggttaacttctgtctgccacagat

SEQ ID NO: 10437 - DNA, 1039 bp, Homo sapiens
ttaatgagagaattcgtttacactggtgagagaaaagctaagacgcccagcagcttacaactaaggcatctcagtggttagcaacagtaggaagccactatgctaatgagaaggataaggagagaggaagcaatcaagaggctggtttgactgcggaacgtggaagacttgtctgatgagggagtggtagtcttagaggagactctactgaggcagaaagggaatgggggaaaaatatggctgcttcctcctgccctccagcctcccaccagtgcttcctatttactgagcccagccagtagcaggccgacagaagagcttggggaacattgcctatatagagtcaagctttatgtcatacagtagagagcgacagaagggtcaagaacgtgtttgaggtcaaacaggaccaaaactgacacacccctaacaggtcaagagctgctggttctattcacctttatatcaccaaaacatagatatttaataaaacatttgcaaaagtatggctctgattatgacactcctttgtttatttaataatatatgtactcattgctgtctaaaacttttcatgatccttacccattttgtcttttctgttgtatctccaactgttacccttcataaaccttgtgctgcatccaaactggacatgttccccaaatatgattgcatatatactttctgtcagcttctttgggattcccaaccatccttcagtactcatctgcaccttcaaacatcacataatttccaagcttagtagtggtttctccagcccctcccttcccatgaagtgagtcagctctattttcttaccatttttgctttgcattacagttatttgtgtatatatcttctatctccaagtaaattgtaactttatagacagaaaccttgtccctgttatttgtggatctagtaatataagacaacataaggtacggcttcctaagaattatttgcatgcttaacgaacattaaattactaatctttctaggaaataataaaatatgtgaaggagatgttttcaca

SEQ ID NO: 10438 - DNA, 1086 bp, Homo sapiens
caaatctccctgaagctttcacactataccttttagtctgaaagttgagataattctattcttactaaaaatttcagatgggcaggagtatacaatacaaaaaagcctccccatgcctaatgctcttacttttgtcgtttatcattttacatcttaaatagatacatatcgtgtatatctttctcatatgaggtttattatttactcatgattcttttcctatcagtaccccctcgccatcttcagctcctcttgttattggtcccttcataatgttttttttctagcaaatctttgggtgcctagtatgttccaaacactgtgccaattgctgaacatagagaagttaagttttctccccttagtgttcagataattaggttttttttaaattcttaaacatacacacaaaaaaacacttttctggaccccactagacattagacacccattaaacagaacattctgtcttatgttctgtgtcaccctttcacaagtcaaatttattcaaagaacaatgaattccacttagttgctgttcttcacctaccttttatccttcaggatactgcactctgacttttgcatctcactactccacttaagtagcccttattgccttgctgggattttacaaaatgttgtgtgggccagaatacatcaaagtgtttgttgcctctgggccatcagttcagtttttatctatttattcaaggtgctctgtggaactgatcctacctacctctccaacttgatctcaacttcctaacatctgttttatgctgcagacatgccaaacgaattgaagtttctttgaaaattcttgtatgtattctacttctctttgtcttcctagtacacttctattcaaggttcaggtcatgcctgatctctgaaacttcattcagcaagtacagtcagtacttcttaaatgttgccatagcattgtacttctgttacaaccttatcatgtctcattgtagatgtgtgtttacttttttttgataaaatatactaacaaaattcaacacttaaaaatgtatagttcttaaagcccaaaacaatgagtttgttgttgttgttgtt

SEQ ID NO: 10439 - DNA, 1088 bp, Homo sapiens
taatgaatttgtgtcttaaatattgtacattgtgtttgaggcttgtcaaaactgggattatggcaagaaaggttgcctaactcatacctttctgcctcaaattccaggtgctaaaggctaatggcattttaaacatcttacatttttaaaaatttatattgcctctgccaaacaggcctaatagttaaaagcaagttgagacaaaccaggcagattcagtgtgtggaacaggaaggatgtgctttaaaaaaaggtggaatccctcaaaaaattctatagggagacagcagccttaatctacataattcttcatctcgccaattcagccgcagcctttaaagagttagtgttaatggctttctggtttgaaaacaaaaatgcatctatgtggttgaaagtttgggaggagattcaccaatatctgaggagaagatggagtgaagggaattcttactttttgctttatacctttctataatatttagatttttttttactgtaagtatggatcaaattgcaaaataaagaaaaatgccaaccttagaaaagacaataaatgcacaaaagatataaacaggaacagcaaatatttatattttttccattttgctctttttaaatctatgtttagaactttatatcttgggacttatgtatatatataccttttaaataaaataaattttctaaataaaaagttgaaaaagataccttttgttttttaagaaagaggttgtaaccacttatagccctggtatttctgtaactgcattggtctaattttgattctattatgtcttcatgagtaaatgaaccaaaatcaccactcagtccctaaagggcagaaatctataataacattagaagaaagaaaaggccagtcacggtggctcacacctcagcactttgggaggccgaggcaggaggatcacttgagcccaggagtttaagactagccctggcaacatagtgagaccctcaactttacaaaagaaaaaatttaaaaattagctggacatggtggtgaacacctgtagtcccaactacttggtagactggggtgggatgactgcttgaccccaggagtt

SEQ ID NO: 10440 - DNA, 1091 bp, Homo sapiens
agtggaggaacattacacagacctgttgccattcaaaaatgcgtgtgactataggcctaaaagaaagaatgtgtgagactgccaacttttcagatggttatcttgtttgtttgctggcttgagtattcaacaaagttaattattcaataacaagtggaaaataaatgctgagagctgctgtttgtttcaggtagggacgtctggcttggcatcccttttgtagaggcttccaaccaacacataaaattgtggattggggtttcttgctagattatgaattataactagtgcctgtgatagctaaagttaaaatgtaactttaggactggaataaaccagacctttggttttagtctgcagacacacagcaactagaaaagatggcgtgactgcggatgggagtgggtgggggagtcaacagaatgcagtgtgaactaacctttcagttccctttaaacccacgtttcagaaatatgccgagcgccagtccagcaaacccgaagtacgtgatggaatggaacttgttcctcagccagaagatagcacagccatctgccagtgccacaggaaaaagccttcaagagaagaactttgagtcagcccagaatcacactcctgtgtatcccggctacactttaaggaaagattgaatctaagctgtgaaggacagtatagaagactgcaccaagtggactagttctcccggtggctttatatatgtagatggatatagcagtactggttgagtatccctcatctgaaatgcttaggaccaggagtgtttcaggcttcagattttttaagatttgggaatatttgcatgtacataatgaggtatcttggggatgagatccaagtctaaacacaaaattcatttatattttatatataccttgttcacataccctgaaggtaattttatataatatttttaataatttgtgcatgaaacaaagtttgtatacattgaactgtcagaaagcaaaggtgtcactatcttagcgacccaagtggtggtgtcagcactcaaaaagttttggattttggggtatttcagattttagatttttgtatgaggaatgttcaacctg

SEQ ID NO: 10441 - DNA, 1050 bp, Homo sapiens
cctcattctttcatttatttatttattagtttatttatttatttatttatttatttttgagacagagtttcactctgtcgcccaggctggaatgcagtggcacgatctccactcactgcaacctctgcctcccgggttcaaggaatttcgtgcctcagcctcctgagtagctgggattacaggtacccgccaccacacccagctaatttttgtatttttagtagagatggggtttcaccatgttggccagactgatctcgaactcttgaccttaagtgatcttctagctttgggcccccaaagtactgggattacaggtgtgagccaccatgtccggcccctgtagcctcattcttaagttataattccattatgttctggctttcccatgctgttcactttcaaccccacatctgtcccacctcacacttaaccctctctttgtgggtcgcagtagtaattttcattcatttttattttttttaacctttcaggaaaatgatgaagaagccaagaagattgcaaaagaaggacagttgatggctagggacctactacagccacacaggctttactgctactattaccaagtactgcaggtcagttcagagtgtccgtccacactgctgggtcgggtgtcctcagactacccgcttggcctgtacacttcctgcctggcttcctgaaggactcacagtcaagcctatggaccactggctaagccaaggcacttgcctagggaaagatagtgctaagtcttcatttggtggcccccttttttttgttttttgtttgtttgtttgttttgagatgaagtctcactctgtcatgcaggctggagtgcagtgtctcaatctcagctcactgcagcctctgccttccaggttcaagcaattctgcctcagactcccaagtagctgggattacaggtacacgccaccatgcccagctaatttttgtatttttagtagaaacggagtttcgccatgttggccaggctggtcttgaactcctggcctcaggtgatctgccttgccttggcctcctgaa

SEQ ID NO: 10442 - DNA, 1051 bp, Homo sapiens
aaccatccaagtgatttaaatttcatcaaatttagaaaaattatggccattattgcttcaaatatgttttctgttccattccaccttaccttcaaggatactaattacccatatattgggcttgaaactatcctgtggttcatcgatacccttttcattttttaaattcttttttctctttgtttcatttcgtatagtttctattactgtctctaagttctcttttcttctgcaatgtacgatctgttgtcaatcctatacagtgtagttttcacctcttgatgctttttcatcttcttgagctcttttctggggtgcagttaaatcactgggaaatagtttaatccttccaagttttgcttttacagtttgttaggtgggactagagccatgtgtagtctagggctaattattccccgctactgaggtaatacccttctgcatactttacccaagccctgtgaattaggaggctttccaatctggctggtacccaccgataagtactgttctctctggtcattttggatgggttcttcccctgtcttccccaagaacatatgaacactcaggtggcaaatatcttagatgtccatttctcagcctgaaatctgttttcatcctttgtcattatcattctaaatatttaaatgttatacctaaataattaaactgtattatttttagaatcaatacaggggaagaacccatccaaaatgcactgatcatatgctctgctcaatatgtgaagaggaccttctatagatctctaacgttctctctgtgcagtgcttcctttttagatactctgtcctacaaagtctagagctgccttggtctccctggactgccagctctgtctcctcaactcagtgaggctgcctggctttgcctacagtccccctccctgtactacaacctcaaagctcccttaagcagtaggctgtaggaattgtagggcttaccttatttgttccccatctctcagactcactgtccttcattgcctaatacctagtgccttaaaaactattgtttaaggccaggtgcg

SEQ ID NO: 10443 - DNA, 1024 bp, Homo sapiens
tgggcaacacagcaagaccccctccaacccatcccgccccccaccatctctacaaaaaatttcaaaaattagctgggcatggtggcacactcctatagtcccagctactcatggggctgatgcaggttgaggcaggaggttcatgagcccaggaggttggagctgtaatgagctaggattctgcctctgcactcctagctggatgacagagcaagaccctgtctcaaaaaagaaaaaaaaaaaaaaaagaatgcatgaaccagacatgacagttcctggcctcaaagatcttccaaaggaaatgatttttttttaaccaccaatgctgcaggaaaaagcaacatatttaagttatccaataacacctatccaataattgtaaatcattatcatgacatggtagagttgtttatatttcttttccttttaggtgaaacaccattcaaagtcgtagtcaaatctctttcacctaaagagttggtccggatacatgtccctaaacctttggacaggaatgatggaacatttttgatgagatataggatgtatgaaactgtcgatgaaggcctgaagatagaggtcctttatggtgatgaacatgtggctcagtctccctatattttgaaaggtaagtgattattatatactccagagtcagccttgtgtgtaggtcccatgcctttcagaatggcctaaacctgatgacctcaaagtcatgtgcagtaaagtaaacattgtatacatacctcctggagctcaatttaaattttaagggaaagaaaattaagtaaagagatttaaatgataagaaaaaaatcttgtgtatttacatccatgtagttactatttgcgaaactcttcattcctttgtgtagatccatatttccatctagtaacatttgccttctgcttaaaggatttttattaatatttattttactgtgagaatgctggtgatgaattcttccagcttttgaatgtctgaaaaaactttattttgccttttgtttgtttgatttgtttt

SEQ ID NO: 10444 - DNA, 1028 bp, Homo sapiens
agatctataatcttcattctgggtatcatgtttttcggttatagaccaaactggaaaaaattaaaactcttgcaacattctgtttagcaaatgtccttcttagatatcaaaatacttgcagctctcttttaacaggaagaattgaaacatagacacaacatgcagaaataaaataaatttcatcatttaaatatatttatgtgtgtttagcagttttcagaacttgtcatcttcaaatacgttttactttcaaaacataaatgggaatatttaacatttatcttgttattattgatattgataagtatttattaattctgctggtgcagaatataattaaaggcactgggttttgctcctaagaggtttcagaagatgaaatataaaagcatgtcgtttttatttttaaatttgaatgtgacctaaatatttggatatgaatcctatatgtgggaaaagaagtgtttattaaagggggcattgtattacgacaggtgatataaatcaggtcatacattctgaagggctctataatctcaggtagaacctaactttctttggcagtgttgatctgaaatagaaaatcaatctgcaaaatggactgtgattcaggacctcctccttacctacgagcaccctgggagggactgactaatggcccagggacacacagtcatcctctgcaggcaacagtcaggcttctacttgctgaagccgtcaagggcttgactgtcacactcagtgttctggaaaacaaatcagtaaagcaatttagaggatcttttgcaaatcagagaaaaagaatcaatacaaggcgaaagaattctgatcagcactttaaaacgtgcttatcagaaacttttcttctctcttttaagctttggttctaactgagaaatgcactggataataggtaaccctccccagaagaacatggacttcatcatttcaccagattcacttgttccctttaaggcccagccaataaaagtatatggtatcttcaagctctgatttcctaatatcag

SEQ ID NO: 10445 - DNA, 1028 bp, Homo sapiens
accggagctgttcctattcggccatcttccgcattatattttttaaaagtattactttgagacagagttttgctcttgttgcccaggctagagtgtaatgacgtgatctctgctcaatgcaacctctgcctcctgggttcaaatgattcttctgcctcagcctccggagtagctgtgattacaggtggccgccactacccccaggtaatttttgtatttttatagagaaggggtttcatcatgttggccagggtggtcttgaactcctggcctcaagtgatccgcctgacagcctcccaaagtgttgggattataggcgttaacctccacacctggctatttttttaaattaataaatgattgttaaagccctagaaatcaaagaagagtctgtgctcaagaaatattcaaaatctagaggaaagttgaaattggagaagtgaagatggatgtggatagaaggctttttaagccacccaataggtgttgaataaaataattcaggaactcagtgagcaagtcttcagtgataagaactgaactcagtctggagaaaattcgaggttgaggatcaaagggaagaaggctcttggtgagttttagcatgtagaagagagccagcgaggagggtggccactgtgagagctgaaaaatgaagttatcaggcagcatttgagacaggcttatagtttgagttaacctcccgaataaatgccagaggagaacgctacattcgttttcagaactgaatgagtatttcattgaaatgtaccagtcaattctttgtgcaattctttgtcatttattagaaatttgaagagagaaagcgttagtaacatttttcagatgctctgtgtgggttatttgaatggctttgtagataaaaatagatctgggccgggcatggtggctcatgcctgtaaccccagcactttggtaggccaaggcgggagaccacctgagcccaggagtttgagaccagcctgggcaatatggtgccccgtctctattaaaaaaaaaaaaaaaat

SEQ ID NO: 10446 - DNA, 1029 bp, Homo sapiens
tttttggaatgttttcaagcattgggaagactgtgcgagtaagtatgtcttctagataactagtgagatgtatacagataggaaaatgttgtctgccacctcttatttttcaaccattatgctttagctcttaaaaattagatatttaaaatatttttggtttaatagtactattaaaggaatgctgaattaggagaaaagaaggcatgatgtttattcccttttccatgaaataagacatatatagacataatatacatttgcattcagaatcatttaatcagtgattttcagagcaattgctgtttgtgcactgttggaattatgggagatagatgaatagatgagactttgcaactctgccaagaaaattgtggttaatcggggagttgagtcctggactcaaattgaggtatagaaagtatggtagttaagtgccagaagaaaaactgagataaaatgtgcaggagatacagaaatgagaggccacttagttcaactttaggtcactttgattcagtgtttattcatgtgatatttcttgatgaagctaaggaaatgttctttgattttagagcttaggttttagatattgttcttgtgcctataaactttgatcttcgtgtgtgtgtgtgtgtgtgtgtgtgtgtgtgtgtgtgtgtgtgttttggagacagggtcttgctctgttgcccaggctggagaacagtggtgcactcttggctcactgcagcttccacctcctgggttcaagcgatccttctgcctcagccacctgaatagctgggagcacaggcatgtgccaccacacctggctaatttttgtatttttagtagagatggggtttcaccatgttggccagcctggtctcaaacttctggcctcaagtgatctgcccacctcagcctcccaaagtgctgggattacaggcatgagctaccacacccagcctgatcttagttcttaaatgattttcttgcaccacaagtattttggggggggtacagcctaggatttgtctcaaaagt

SEQ ID NO: 10447 - DNA, 1050 bp, Homo sapiens
tcattgcatttacctaattatttacttttaaattttagctattttcataaaaacagttttgagatgaaggaaacttacacaataaaaggaagatcaataagcaggaaaattagtaactgacagggaatatgaatgaatactcagtatacgtttcggtatgcttgttttctgataaattacttaattttcatttcataggccaaattttaaacaccagttaataaagttatcctaaaagagtctctaatttgaaaagtttttctaacctaggaagactcattttagacccaactgaccagtcaaatatgagtaatttataatatctgtattaaatattgagaagattaataaagttaaaagtttacagttgaatctttttttatcatggtaaaatatacataaaattgatcattttaaccattttttaagtgtacagttcagtgccattaagtacattcacattgttgtgtaaccatcaccaccatccatctccaggatgttctcatcttcccggactgaagcctgtacccattaaatggtaatgccccattccccctcctccccagtccttggtgaccactgttctactttctgtctctataaatttgatgtttctcagtacctcataaaagtgaactcatacaatatttgtcctttcgtgtctggtttatttcacttagcatgtttgcaaggttcatttattttgtggtatgtatcagaattttattcctttttaaggctaagcaatattccattgtatgcatataccatattttatccatttatctgttattgatggacgcttaaattaccgctatcatttgactactctgaatattgctgctttgaacattggtgtacaaatatcttagagtccctgctttcagttctttggggtacatacccagaaatggaattgtttggtcatatgttaattctgtgtttaatttttttttttttttttttgagatggagttttgctcttgttgcccaggctggagtgcagtgatgcgattttggctcactgcaacctgtgcctcctgggttcaa

SEQ ID NO: 10448 - DNA, 1043 bp, Homo sapiens
ggtttagacagcagtagtagctccctaggagagtttactgatgaaacagcctctgcaagattttaaaagttttgttcttttatagactgatttagaaaaacaaatgattagttaaaaaaagaaaatatacatttgttggtaactaatgttattttttaaaacctggaccttttctggaagggcagcatataaaaacatcagtcccgaggaggggacaacaatactacctcactactacatctgtgatgactggttgttcaaacacaatggagtgtgtaaggtatatgttttataattcataaccatagcctcgatcatcaagaaatactttcgaaatttcattttccttcagaatatcttaagagtgctaaatttttaactgcctttttgtcgagtcaaactgtgggattctgatttgtattaaaattgtaagctcctcactggtatactatcatcctggaggggtgttgtatggctgagcaagagagagagagaatgagagagagactgtgtgtgtgtgtgtgtgtgtgtgtgtgtgtactctgtgtgtgtatgagagagagaaatgctaaccttgtagcatgtgaagaatgtctgtaccttgatacgatagttacataatcagtatatttggtttctagatcactgtgcttattttgtttcaatctctgactaaaaatacttaaatttggtttgttaattcttattttagaaattataattttagtttatattaatttcggttatagcttactgaagaaatctttccagttagaaggaggttctaatattcacatgttctaatactttgtttattgtaaaacagctaaatttggagatacgtaaagccttgttttctctgtgtggttcagctactttccatttggtattacacagtcaaatttacatttatctattaaaattgccattttattaaacattttcatgcacagtagattcaagttgtgtctgaaaatatctcttgtgcttttttgattttgctgactttaaaaggattaatctgggcagacattatgtaaaag

SEQ ID NO: 10449 - DNA, 1053 bp, Homo sapiens
gtacaaaataccatggttgataaatgtggaaaggccatgtgtattcctcccttaccactgccaccactattactaaaacaaacttatacctaaagaaaaaggtttcacagtggaaatgatttggtatatgtatttttgcatcttaaagccattttcataaatttttttaaatctaagaaaaaaataatagttgtactttttattttttaaataggcattaagttcagaattagcccaagccagagatgaaaccaagaaaacacaaaatgatgttcttcatgctgagaatgttaaagcaggccgtgataagtacaagactctgcgacagattcgacaaggcaatacaaagcagcgtatcgatgagtttgaagcaatgtgagagctgttattttgcatatatgttcttcataagctgaaccaccaacagagaaaagcaggcctttgcagatatgatggaatgcatcccaccttgccaaagcacttacaccagtttgactgtgctagctaaaagacaaatttaaggggagctcttcaacattaaggcagtatgatatcatgcttggttttcttttttcttttggtccagggaatggagaatggtgttccattgcctcttttcacattttttttctttttcttttttttttctgttgaagattaacactaattatcacgtctgacaaatgtgtatgtgtggtttcagttctgtgtacattttaaaggataatggtgaacattttaatgggtttcccttgccctttccatatttaacctatttccacattctctctcactcacattttctcagtgtgcccttctcttatctgccatgtccatagccataattccaccatcatacagatcaggcagtgtttaaaatgatggtaggtagcacagtggacagtctttgatcatcatgtagaatatggctatgaatcaggaaagagattagaacatttaataatgtatgtacagctggtgcttagtttttttttaatctaaatttaattaccttattggatatttgatatttggttatttaatcacagtcat

SEQ ID NO: 10450 - DNA, 1077 bp, Homo sapiens
aaataaaatctattgggtgtgagattcttaggcattatatgaatatctatttctcatcaactatttgcacaacagttttagcaaacaattgataatccttgccagaattaatagttctttttttgcatgtatgcttgtttttcttttaatctgtcactttgaagctcacagagtaattctaatagggtttgcataataatgtttttgattttctcttttacctgttgacattcttttatgaaaatagaggtttcataaatagggcctattttcattaccttgaaatacagtttctattaaaaagggagtataacttgattgttttgattattaatttttgaagtaagttgctcataaacgtatttttaatgttcaggcttttgcagcccaggaagacttggaaaagaccaaagaagagttaaaaactgtgatgtctgccccccctccacctccaccaccaccagtcattcctccaacagaaaacgaacatgatgaacacgatgagaataatgctgaagctagtgctgaattatcaaatgaaggggtaatgaaccatagaagcgaggaagaacgtgtaaccgaaacacagaaaaatgagcgtgttaagaagcaacttcaggtatttaaaatttgcagttgtatgtgcatttgaaatatagtttgcattttccccatcttagacaaacttagttaaaaagaatatagaagttttaatactggctgcccttgtgattggtttgtgggtgtttggcctatagtcatgttatttcatttcttccgttgtgtgaacccattagcaaatacctgttagctttgtataatcagaccttaactagtgagttatttaattacagcttgacccattttaaaaggtagaaagtattctaatgtcatgttgaaaaacgtgaatttagtttttgatcagtaatatgtacattgagggccaggcgcagtggctcacacctgtaatcccagcactctgggaggccgaggcaggtggactgcctgaggccaggagttcaagaccagcctggccaacatggtgaaactctgcctctaccaaaaatacaaaaatta

SEQ ID NO: 10451 - DNA, 1030 bp, Homo sapiens
gcggtcactcccatttcttctcagtaccccttctctctgctgtagacaaccacgaatctttctctaaagttttgtctgttctagaccatcatatgaatggaatcatgcaaaatgtggtcttttgtgactggcttcttttgtttaacataatattctaaagtttcgttcatattgtggcatttatcagcactccactctctttttttttttttttttttttttttgagccagaatctcactctgttgccccaggttggagtgcaaatggcgtgatcttggctcactgcaaccttcgcctcccaggttcaggcaattcttctgtctcagcctcctgagtagctgggattacaggcgtccaccaccacacccagctaatttttatatttttagtagagacggggtttcgccatgttggtcaggctggtctcaaactcattttatggatatggtatattttatttatttgtttgaaatctgatgttttttattgtttccactatttgactaaggtgactaatgctgttatgaacattcattgtgtaggtttttgttgttcatatgtcctcatttcttttgggtgtaacctaaggagtggaattgctgggtcatgtggtaactgtatttaactttttgaggaactgccacattggtttctaaagtgactgtaccatattaccctgccaccagcaaatttgatttctccacatttcaccaatacttgttaatgtttgtcttttggattatagtcatcttaatgggtgtgaagtggtattttatagtttttattgcatatctctaatacctggtgacgttgagtgtctttctatgtgctttttggacatttatattgcatgtatttttttttttcctgagacaaggtcttgctcagtcacgcaggctggagtgcagtggcatgatcgcggttcactgcagcctcagtctctgagcttcaagcgattctcatacctcagccttctgagtagctgggattacagatgtgcaccaccacgctcggctaatttttatattt

SEQ ID NO: 10452 - DNA, 1069 bp, Homo sapiens
ttgtcatttcttcttagttgattcagttcttaggtttcacatgaatactatttccaattattattattttatttcagtagtttttggaatataggtggtttttgtttacatgaatgggttctatcattgtgtattctgagattttagtgcacctgtcactcgagcaatgtacactatacccaatatgtggtcttttgtccctcaccccattcccaaccattgcttctcaagtcaccaaagtcgattatattactctgtctttgcatcctcatagcttagctcccacttataagtgagaacatatggcatttgtatgttctgagttacttcacttagaatcatggcctccagcttcatccaagttgctgcaaaagacattattttgttactttttatggcagagtagtattccatcacatgaataatatttttgtgtattaatttgtaacagcaattgcaattccttttaagggcacaattagagaatgaaaagaagaaaagagaaatagcagaaaaggaaaaggaaagaatagaacgtgaaaaggaagagctaatggaacgtctaaaacaaattgaagagcagacaattaaagctcagaaaggtaaaagtttcttttttgaaaatggattaaaaattattattgctctgttgtcagatagtggtattttttttagtactcttaaaccttatttgttatataggacaattgtatatttaattggcaaattaatacttagtggaatcacatcataaacatgtttcactaaggcacattcatttatacagtgctgatgtttctcttaaacatgcagatatttttctttttttagttttttgttttaaacatgcaaatatttttcatatgtattcttaaataattgtaaatgtatatatgggctttataaacaaaaaacacatatgcaatacattatggcatttaaagaaaagtatgcaatgctttatggctgtataagtaaggcatttaagtaattaaagtaatttaagctattctgactatatgaacttttttggaactcaattcctaaaaatattttactttattctact

SEQ ID NO: 10453 - DNA, 1049 bp, Homo sapiens
attggtacaatctagccaccttattcagattacatcagttttacctgcactcatttctgtgtgtatgtaatttagttctatgcaatttcatcatgtgtattaattgtctgacaactaccacagtcaagttactgaaaggattctttacttttaaagtgtatgcttttgaatcttaaagtcattataatttttttttttttttggtcctcttagtgtattggaacaacacaaactaacaaaagaacagtgggaagaaagaatacagaactggcatgaagaacatagaggaatgttaaggtatttgggtagctattttctatgttttcttttttccttcaaagtattttcatgtcgtaacatttattattacattatttccaaaagattgtttgacttatgtaaagtactaatttttaattccaggtattttgcaactttagtttgatatgctcctacttaaatatattacatttagttttatttcaacagggaggattctatgatggaatacctgaagattgcacaagatctagaaatgtatggagtcaactattttgaaataaaaaataaaaaaggaactgaattgtggctaggtgttgatgctttgggtctgaatatttatgagcatgacgacaagtaagtaaattagttgcatagtgaactagtcattgttcagtggtctaaatgacgttaatcttatgtcctgtttttcaaagtagtttcttgtcttgattacccttactattttcaaactaaaagatgaattaatgacacatagacttgtagatattttacctccattttcttatcaccttgcagtttcagagttctacttttcagtgtatttatcaaatgagatgattgacttttatttgaattgtgctgcttttagctcttgtgagttatgtctagtaacttaattaaaatttgctccctcgataggtgagaaataattctttaaaatgctattatgcttgacaaatagattgaaattgaacatacataagaaatcaggagcaatgagagaatggatttaataaatatgtcta

SEQ ID NO: 10454 - DNA, 1052 bp, Homo sapiens
tcaagtgatccgcctccctcggcctcccaaagtgccaggattacaggcgtgagccaccgtccagcctggtctagattattgagtattgttatctgttatggactcttctcagcagttctttagtccctgttctatttcctgactgctttccttgaactcaaatgcagtgatgaactttccttgaactcaaatgcaaggatcgaaaaatgcagactttacttttgtatgtagtgtgtgtgggataagctggcaggttcaggtcaagccaggggtaaactgggtcctctaaaatgagagcacatagctacatgagtacatgtgtagtaaagccccatgtctgattatgatgttaaatcgaggccagctgctctgtgtttggggactctgagtgcttgaagtcctttggtttgcttcttgctgacttttttcttgactagccttctcctttagctgcttcttgtgggattagtgtaaagagtgttcatacccccaaagagtgtgcaagaacatctgttacggtgaaagaagtattaaaatatatttttaggctagacttggtggcccacacctgtaatcccagcactttgggaggccaaggcgggaggattacttgaggtcaggagttcaagagtgtaataccatatttttactgtaccttttcctgtccaatattgcaaaactgtctctactaaaaatgcaaacattagctgagtgtggtggtgcacacttgtaatcccagctactcaggaggctgaggtgggagaactgctgaaacccaggaggtagaggttgcggtctgcacttcagtttgggcaaaaaaataaataaattaattaaaaaaatatatatatatgtatatataatatgtatttttaaacatttttaaaaatatatgctttatagtgtattagcatgatagtatgtaacttgtaaataaatatacctatgttatagttacgtgcccaagcagattcacttctaaaagtatgtgatcagaagtttatgggagcttaaaggacagcctcactaaaatatattaattaaaaaaaaaa

SEQ ID NO: 10455 - DNA, 1032 bp, Homo sapiens
attagcctggctgagtaaagacagtaaccacagtgagaagttgttagtttgatacgtttggatcattgttattgtgcttaatattcacatagatcgttcgtgaactttctgtaccactaacctgattttgtttggaattttccagttcttgcattggcataatgaggagcaggagggaaaaggcctttactagattcttgtcacaaatttctagtcaatgtgttcttaactgggtggagaaagaatggaaaaccttcaagatctcatccaagcaaatggcaacaacttagaagaaatcatttagtgacttaattctttctaaagatgaaatgggattgttttttactcgtcttccttgttaaatcattatttaagccgttcttattgaccaattcctgacacttgattgtctcctaatgctttatccatcaccacctgggctcctgcatcctcactgtggaatcaggcaccagccacataatgttccagacaaagcctggaagggtgtggacccagacgtggagtggagtgattctcttgacgtttacatatatctctgtgtctctccatcattccaaagctaaatgtacatgtttagaataacttattttataaactcttcgggagacatgttgagatttgaccgtaatgaaagccacattttcctgaattatgatggtctgcattagtctcatgtgaaaggggaatgtggaagctcagggttaatgtagtggttgttttggtttttatttgctcaattttgtctgtactcatgtcattcagaaacctgaagtgtggctgcatcttgctgctaatgtgtgatgttgacgcctaactgaatttgaacagctcaccactgtgcctacatttaaaaatacttctctctcttttctaaaaagctttaactgtagtgcctcctaataagcagtatgtttgtttcattgtgagattgcagttctgtatttcgaatgagtctaagaaccacagggataatactgtgcagatttcctgttctttacctggctctgcttc

SEQ ID NO: 10456 - DNA, 1032 bp, Homo sapiens
atagcaacacagattggactaagacagttgctcttaagtgtgattcttctgtttatttcctttggattctgtaatccctttcccaatagcaggaatgcagtcatggatctgaatagagtcatatattttgatggcacagtgagaaggcccttaccagacaccagcaccttgattttgtttagtagatttattacgatatgatgtgatctttattgtatggtattatggaggaaatagattgtcctccaggggctagaagctaagggaagaaattcttggcacttacaaataagctggtcatagttttgaacagcgtggtgttggaagttgtccagcatcctggtgtggctggtcaccattctttccttccgcaaatactttttgactgcctgagatatgccaggtactgtaccaggcaccaggtgtattgtgcttataaagacagattcagttcttgccttcacagagcttacaaggttcagctataagaaggcttgggccttgctgcagttgctcacagagggatttgaggagatgtgatgaatcagaatttattatgtgtttggaaggaagacattctgaatgctgcttaaaagctaagtattaaattaataacatatgtcagccattgtggctgctggatagtctcagttatgaccaaattttacttagctgtgggcaaactgtctaaacagttttttcagctttaatcctcccacttgcctaggagtttacagggcagttgatttagattgatctttcacattatccccttggactcttagaggattcatgatgacagttgtttaccagaggattttcagtgacatatgagaaataagatctgtcttctgtgtggagatggtttctctgtgatgttccctgaacctcatgttggcccttgccagagatctctatttttacagctacttgcgtcattgtcatttccagctgatagatgattgaatgcaacttcacatccttcctgtcttaggacttgtggggctttggctcaggcagctggatagacag

SEQ ID NO: 10457 - DNA, 1035 bp, Homo sapiens
gccaagattttctgccagaatcaagatctaaatttggaagatacattcagtgtcacctctttagttcttgaaaaattcacatttttgttcactatttcaaggtgaatgatacacttccagctccaaatctagtatatgatttaggagctacctagtcaatggatgaaaccttggaggaaaaaacagctcttcaggagagagcttacagaaaaagacttttttctgactttaatttaatgcttaagcagacttgctggaagttttcctgttttctttcttttttaagagactggatcttgctctgtcacccaggctggagtgcagtggtgccatcatagctcactgtaacctcaaattcctgggttcaagtgatccttccacttcaagctcctgagtagctaggactacaggcatgcatcaccatgcacagttaatagttttattttttctagaaacagagtcttgctgtgttgcccagggtggtctcaagcaatcctcccatcttgccctctcaaagctctgggattatagacatgagccaccatgcctgtcctccatctgttatctttgaaaacatagattggtcattgatttttttcctaagcagtaatatagtcagttctgctacaataagatataaagttatgaaaaattaatatgtggtaaaaaccacaaagcttattgggaaaacggagttagggacacaatacttaaaaaactttgtcagttaaaaaagagattaaaaattagccatgcatgatggctcatgcctataattctagcactttgggaggctgaggcaggaggatagcttgaggctaggagtttgagacaacatagcgagattcagtctctacaataaaaaaaaaataaattagccaggtatggtggctcatgcctgtagtcctaactactcaaaggctgaggtgagaggactgcttgagcccaggagtttgaggctacagtgagctacagtcatgccactacactccagcctggacaacatagcaggaccctctctctgaaaaaataaaa

SEQ ID NO: 10458 - DNA, 1034 bp, Homo sapiens
agaaatctgtcccgtaaagagaacaaatttagcagttagaactaaaaataccaactcatggaatgtcatcatagttgtatctactgctggtgtcttatactgtcatgctactgtgaagtaattccgtattacacatcaggaaagtaaggccaggaaggtgaacttacctgctctgggcctcctcataaccaatgagtggcagaaccaagaccgaaagtctgagttttcaagctttttactcagcccattaagtgacaaccaggaaaaaataatacgtcacttgatctttcttcccacagtgaaaaaatgcacttgcgttctgccagccttctttcagtgatatgttggtttcttaagaattaacatactaaggatcacagtatagcaaagggaattaatgtggtctctgcttggtgctttaatccaaaggcagactgggaagaagtggatatgtccctgagaagcctgtttcattttggaaataattcaacttagtttcagggaaaacctaaacttcatgaacagatttagaaatgaacaagacaacatttaaatggcagttgctgccctgaatccagagtaccattagacaacatgattatttcctaattcttccccatttggtacaggattatctatgacaattgaagaaataatttgaacacaagtccatttaggcaaatatacagcaatggaactagaaaaccatttactatccaattaccatgtttaggcatatactaagtatagctataggccccatccagcagggaaatttgcaaaaactctagtcccttctaataagttgtctatggatgttatcatgaagggaaaaggtttgttcttaggcccatgtcctgattaagtaaaccggaccacacctgtggggtcaaaatatagaaggatcaaagcaccaaggctaaagacaagttagttgtgacacctgctatataaacagagagcaatacagtgttgccttgtcataccatcctacatggcattagttccaatccacctcttgatcccagcccttg

SEQ ID NO: 10459 - DNA, 1047 bp, Homo sapiens
taggctgaaacagttctaagggattaggagttctcacatccttttcttgtgccccatgtatcttctggcaccccctctgtggtaatcactgctctgcatagctaaatgagaaaatgtcctttggaaacactttttaatttttttttgagctgcatgctagctattgttgatttggggaataatggaaaggtttttgttggctaaagtattgcctcttttccaataaacagcaagatctgaaatttctctattagagaagtggtaactttgggttaagcattgccttctctctgaggtctcttaaatcaacaaatccttttgaaagaagttggagaagaagcgtgttatatctccagtcctttaggtcagtacctaaattgggctgctttcctcagagccctggatgcccagcatagtgtctggcacagaggaagagctcaatatacacatttgttgaattagtgaatgagtgtgggcaattcagagaagggaaagatcaaaaagagcaagaaggaagctaaggtactggaaggcaaagtgaagctgagttttctcctctttctaatttcgctcagggccagagaggtttcttctcttcctgggagtagttattcagcacagtgcggttccttcccgggcagggcttctcttggtctgagattttatttcccaggaatgcaggggtagctgggttgctccagagcagagaatggaccctctgcaatctagtcatctggaaagaggactaatctattcctgcctttctgaataagccaagcagagtcattgttccattctttgccaccttcactctgttcttagagcagcctatgatgagggtcagacgtctatatccacaggtggttgcagagtatttgtggtttgcaaagagggatctggtcccttttggtatcctcaggacatttttgtaggcaatagaaggagatttcttttcccagagaagagatacatgttgaaatagattctacccatctagtcagccttgcacaggatttttttgcttgtttttttgatctcccccaaccc

SEQ ID NO: 10460 - DNA, 1047 bp, Homo sapiens
agggccacctagggacctgggaacatcagcccacctcatccccactctccctctcctgattgtcccctcccctccaggtaagagttggggatcagaaggtacaatgctgtccagaggctggggcttagaataacctcattagaataaggttggagtctgtctttgactgtgtgactttgggcacattacttcttgttgcttctgtttccttctccataaaatggaaatataaatatttactgcacaaattgtttaaggataaaacaaactaatctaagaaaagatatcagcacagaacttgtgtagtagtctgtttggtttgccatgactaagtaccacagaccgggtggtttaaaccacatttattttctcaccgttctggtggctagaagtccaagatcaaggtgctgtggaattcggtttcaggagagagctcttttcctggattgtagatggctgtcttctgcctgtgtactccccgggcctttcctctgctcttgaggagagagggagctctctggtgtctcttcctcttcttataaggacactggctctattggatcagggcgtcaccctcgtgacctcatttaaccttaatcaccttcttaaaggccctgtctccaaatacagtcacattgagggttggggctttaacatatgaatttgtgtgtgtgtgtttgggggcggggacatgagtcagtccataatagcctggaaaaagcatacactcaacaactggtaattattattatcacaagatttgaaatcagaagacctggatctaagtcctggatccatcatttcctgacactgtgatcttggggaagttgcttaaactccatgccttagttctccttctgcagaatggagaggatggcagtactcattgcacagggctgctgtgacaatgaatggtagaccacgcttaaaaacacatggttaaaatagaaaactgaaatgctctaccaaaaggggtgatactgctcttgggactggtctcactctccggggagcagggaacttggcactgggtgatccagatgctgt

SEQ ID NO: 10461 - DNA, 1030 bp, Homo sapiens
catgcatcaaagatctgctgccctttccccacttctgagctggcccaattctattctattgtgtttcctctgtgcaaaaccaggacatatctactgaagatggtgataggttatattccttatgcaaaacagtgatggatgaaggaccccaagtatttgcacctttatctgaagaaagcaagaacaagaaatatcaagaagaggttccagtctatgtgccaaaatggatgccattcaaggaattgatgatgatgctacaagccagcttgcaagaaattggggatcggtatgtataacccttctatagaggcatataactctccatagctacaagagagtaatagtgcccttgatagcagggcttttccctgtttcctgatgttagtcatgcaagactttcatattgagtagcagtagctggggccttttcatgatctatcataatgcagatctcattaccactttcccatatttgatagcataaagacttctcatccatattattttggtcttgagtatgtggtttggcatgctgtacaagtgatctggcaactgtaagaattatagccttctgacatctggatggaaattgttgctcactttaaggagcagtggatgcttttttttttttgagacatggtcttactctgtcacccaggttggagtgcagtggctcaatcattcctcactgcagcctcaaactcgtgggctcaagggatcctcccacctcagcctcctgagtagctgggattacaggtgcctaccaccacacctggctaatttattttattttattattttatttattatttatttgttttgttttgttttagagacgaggtttctctgtgttgtccaggctggtctcaaactcctggcctcccaaagtgctaggattacaggcatgagccactgcagccagcctggatgcattttcagaattactttgatatattaacagagaagtgacttttacctgtctgaaatattgagcatcagactactgtttgattgacctgcagtctttctg

SEQ ID NO: 10462 - DNA, 1030 bp, Homo sapiens
taccttaatttaaaaatatattattattaaaaagtgccaacgatcatctgagccttcagtgagtcataatctttttgttggtgaagggtcttgcctcaatgttgatggctgctgactgatcaggatggtggttgctgaaggttggatggctgcgtcaatttcttaaaataagacaacaatgaagcttgcctcatcaattgacttcccttcatgaaagatttctcagtagcatgcagtgctgtttgatagcattttacccctagtagaacttttttcaaaattggagtcagtcttctcaccctgccactgctttatcaactaaatttatggactgttctaaatcctttgttgtcatataaacaatgttcacagcatcttcaccagcagtagattctgtctcaagaaaccactttctttgttcatccactagaaacaacttatcatacattcgggttttatcatgagattgcagcaatttagttatatcttcaggctctatttctgattctagctctcttgccatttctagtacattggcagttccttctttaactgaagtcttaaacccctcaaagtcatgagggttggaatcaacttcttccaaactcctgttaattttgctattttgacctcctcccatgaatcatgaatgcttttaatgacatgtagaatggtgaatcctttctagaagattttcattttattttgctcagatccatcagaggaatcactgtagcagctattttatttcttgaataataagacttgaaagtcaaaatcactccttgattcataggctacagatggatggtgttagcaggcatcaaaacatattaatctccttgtttatctccatcagagttcttgggcgtccaggtgcattgccagtaagcagtaatattttgaaagaaatctttttttctgagcagtaggtctcaacagagaccttaaaatattcagtaaaccatgctattggctgggcatggtagctcacacctgtaatccaagagctttggaaggccacggtaag

SEQ ID NO: 10463 - DNA, 1069 bp, Homo sapiens
catcacaggactactctacatcacaaggtatctgagaaggcatttatgccagtgatccagtaacatctcatgctgtactcccctagccagccctatacccttcagctggctaggtgatgccacagtcttcacagtatatttcatatacagttggtatgccaggtacaacctgatggaatgaattgtggcattagaatgtgatttctgatgaacagaagcagtatcagaaagactaactacctgtgaccttcactgtgtatatagttttgcttatttcccaggttatgggagaaactatgatagggttaataggtagactttatgaaaaccattctccaaaggtgatcttcctaaaagatgcttgtttgtagaaagttttcttaatggatagaaatatgacaaagttgggagtgcattaaattttacagaatcatctgtgggttcaaagtttacagactttatcaatagagttcttgctgaagtagccatttcttatagttattaatttctagggaaaatctgcataggcttttgtaaaaagctgtgttaacagggttgtatattaaactgtatacattctgcttgctttttatctgagtgttctagactatttatcattagatgctaagacctttgttcaattctttatcagagccttcagtagcctcttctcatggggttcgctgcttgtcgtctgagcatgctgtgattgtaaaggagcaaactgcccaggctattgcaaacacagcccgtgcctatgagaagagcggtgtagaagcggcactgagtgaggtgagaatgactgggaagcccaagttcaggagagccgggctttcagcagcgatggccagttttctcacatttctattattctgtgtctctgctgcctttaaccaacccctatttatttctcctgttttttcttactctttctccccactctgctgccacagcttaaagaagctgaacccaagaagcccatgccccaggaaacaaaccttgcagagcagtcagaacagcccccaaaggctaatgatgcagagtctactgcccagcctaattctgaggt

SEQ ID NO: 10464 - DNA, 1031 bp, Homo sapiens
tttgctagtgtggttggggattagggaatggagagaatgataaatgaacagtaagtaatcttcacaattgtatatttatgctgcgaaggaatgaatagctgcttgaatgtactagctgttgttaatatataggagccttgttattgcatgcatggtttatttttctattatagaaacaaacaagtggaaactgtcatttgcttagtgaaaaggctgattaatggcaaccagtaagtgaatgtgttaatctgctatagactttttttgtttgttttggtcacagggttagaaaatgaaattttatatgtcattgatatccttgccattaaagccaggtattattgaccatttcaccattgtatcaaattgctttctcatagtactgaattgtatgaaagttggtggtataaatgtcttgaaattcatctctaacctttttgaaatggacattcttatccgccaaatgcagtggttaaatggataaaactgtttatcttgaaatttttattggctctaatgattttctgaatttccctgaaatgattggtatatccagtgattgacagtgaccagtttccaaatctttttttttttttttttttttttgagatggagtctcactctgtctcccaggctggagcgcagtggcgcaacctcagcttactgcaacctcctcctcccaggttcaagcgattctcccacttcagccttctaagtagctgggattacaggcatgcgccaccacgcttgactaatttttgtattttttttagtagagacagggtttcaccatgttggccaggctggtcttgaactcctacctcaagtgattggcctgccttggcctcccaaagtgctgggattacaggcgtgagccactgcacccggcccactttccatatctttaactctgtgttattcattcacttagcagatgtttaatgagtgcctactaaatgtcaggcactgttatcaattgttgcccttacattgtccatacaggttgagcatcccacatgtgaatatccaaa

SEQ ID NO: 10465 - DNA, 1035 bp, Homo sapiens
agcctcagcagtgacccactgcgcccggcccaggttttttacctctttggtcaaatttattcctaagtattttattctttaggatgctattgtaaatgtaatttttttttaatttcctttttgatttcttattgctgttttataaaaacacaactgaattttgcctgtttaccttgaagctgctgaatttgtttaccagctctggtaacttttttgcagaatctttgggattttgtatatataggatcatgtcattttgtgaatactgttttacttttttatactttataatttaggtgccatttattttttattcttgcctggttgctctggcttaaacttccagtacagtgttgaatagcagtggtgaaagtgggcatctttgtcttgttcctgattttaggggtaaagctttcagcctttcaccattgaatatgatcttaactcttggtttttttataaaggccctgtatcatgttgagggaattaccttttattcctagttttctgattgtttttattatgaatgtgtgttggattttgtcagatgtttttctgtatcaatcaaggtgaccattgttttttttctccttcattctgttggtgtggtatatcacattgtttggtttccttttatgttattggcaatggcattctcttaggcatccattgcaaatgtatgactaagctttctctcttcattctttgagatgttcagagtatgtcctactttgatgttttgcctaccagcatcctgcctctctcgtcacagttcgtttactcagtagccctgtaactcaagctttcttttcctagtgtcatcccacgttgaaccagttgttcacgtgggctagattaatccacttaaatgccttttcttccttcgtatatcttccctgctgaggagcctgcagtgattatccattgttcatcagatcaaacctaaactcttcctgacatttagaaccctttgtaatccaatcccacatcacctctctgatctctgttatttatttatttgagacagagtcttgc

SEQ ID NO: 10466 - DNA, 1031 bp, Homo sapiens
atcgtaagttgatcacccaactctgtgcttaaggctttggggaaatcaagagaggtggatgatcttgtgcctgtccacagggagctttctgtctagttagagaagcaatgtgcacatgaaagggctggaggacactaaagcaagcaagtcaccaggacccagacacagatgctgtggtctactagtgagctctcactttctctagattctgagaagagtggggagttggaccaagttggaccaagactcccatggcaaaggaggctccctggggattctgggcaaagatcccagaggcagtgggggaatggctgctttctccaagtcaaggtgtgttgaggggaagttaaagctaaacataggctcctgagatggtctctccataccactggggcctgtggccaagccagtggcctcaaaaaccccagctttccctctcccaactggaaatagtgggacctcgtcaaccccaccacggacagagctctgtctcatcaggcaagtgctgtgatgaagagccacctagtgtgcatttaatactgtatataaatacactttacaatcacgaagaagactttctactcagaggagaccactggaatattttatagtgatgcagatcaagtgaaaagaaggagaataaataaaagggaagataattatccgatggagttctttcagtatatgccacagcagggcatacttacaaagaatacatattactagagagacacagcttttcaagcatcaaactaacctataaattgtcagactcgagaatgagaggaaaggaatgggagagatttgggtgcccatcacgccattagcactgggttccgtgctccaccttgcttgcaacagctctacacgccagccacagcacagtcccgcagaagggagacgccacctaataaatgtctctggaaaattacgactgtactgctacagtaaaaagatggcgccgtttatctcagcaccatctgcacaggctcatttgttgctcctgaggcagcccacacgcacccagcaag

SEQ ID NO: 10467 - DNA, 1039 bp, Homo sapiens
gtacactctgctgtttgacacctcttttttcgtttgtttgtttgtttaatttttatttcttcctaccaagtcaaacttggatacttggatttagtttcagtagattgcagaaaattctgtgccttgttttttgtttgtttgttgcgttcctttcttttccccctttgtgcacatttatttcctccctctaccccaatttcggattttttccaaaatctcccattttggaatttgcctgctgggattccttagactcttttccttcccttttctgttctagttttttacttttgtttatttttatggtaactgctttctgttccaaattcagtttcataaaaggagaaccagcacagcttagatttcatagttcagaatttagtgtatccataatgcattcttctctgttgtcgtaaagatttgggtgaacaaacaatgaaaactctttgctgctgcccatgtttcaaatacttagagcagtgaagactagaaaattagactgtgattcagaaaatgttctgtttgctgtggaactacattactgtacagggttatctgcaagtgaggtgtgtcacaatgagattgaatttcactgtctttaattctgtatctgtagacggctcagtatagataccctacgctgtccagaaaggtttggggcagaaaggactcctcctttttccatgccctaaacagacctgacaggtgaggtctgttccttttatataagtggacaaattttgagttgccacaggaggggaagtagggaggggggaaatacagttctgctctggttgtttctgttccaaatgattccatccacctttcccaatcggccttacttctcactaatttgtaggaaaaagcaagttcgtctgttgtgcgaatgactgaatgggacagagttgatttttttttttttttcctttgtgcttagttaggaaggcagtaggatgtggcctgcatgtactgtatattacagatatttgtcatgctgggatttccaactcgaatctgtgtgaaactttcattccttcag

SEQ ID NO: 10468 - DNA, 1031 bp, Homo sapiens
tgtggtttctgcatgaagtcataacgcaattatgaaggagaattagattctgtcatcgtggtctcctgcagggagcacaaagttacttctaaagaatgttttcttaattctttacttgaaaataacctctgttcaagtagcataccagatgctcttagagaaatggagtcagtgactccccagacacaccatcaatcttgctctgaactttgtagccagcctgtgtttctcctgcagtctcctaccccgttgctgctccgggttttgccatttccagctgcagtaatcgtgtgtgtgacttgaacatgtgtttgctgttaaccattttagaatgtgttttttcttctcaacatccccctttcctccccttttgggtgcagttgatggatttcccatccccagaacggggaagcaagatgcactgtggattttccttcatttattttctagtactcacctaggagcagacgcctagcttcacttggtttaatttcatcttaaagctgacatgatgttgtgatgtaggaagacagtaaattggggtcactggttaatgctgatattatttttgatgactctaacccttaggtcttactccaccccccgcccttctatcatttgtacttaagtatttacctggtgaaaataaagcttatgccgggcacggtgcctcacgcctgtaatcccagcactttgggaggccaaggcagtggatcacctgaggtctggagtttgagaccagcctgaccaacatggggaagccccgtctccactaaaaatacaaaattagccaggcgtggtggcacatgccagtaatcccagctactcgggaggctgaggcaggagaatcgcttgaatgcaggaaccagaggttgcggtgagccaagatcacgccgttgctctccagcctgggcaacaagagcgaaactccatctcaaaaaaaaaagaaaagaaaagaaagcacattagaagagctactacaaaaataatgagccagagtgttgattgcttttttgtaattttggaaagga

SEQ ID NO: 10469 - DNA, 1071 bp, Homo sapiens
caaaaatgagagaatttaaattttttacaattaagctctggttttgagtagattgtgggttatcacaccgtgcatttttttaatgtacaccttactcaaacacaccctaaaatgcaggcttgcagtctgcgcattgtaaagcaggagcaccgcagatcaattgggggaaaaaatatttaaggttgtaaatttaattttgttctaggattttcattttcatttatggcacccgttgtgtttgagaacatggaccaatttatggattagttttaaacccccagtctgtcacactcaatgaacaattctaagttggagagaatccatatgaaaggattagaatgtgccacagtggagcttacacatgactgtttcaactaaatattgcccagctgcctctcctgcagtattattttttttttttgctacttagttaaattgctagtgtctctaatttcacacattgtcagagctttttttattttgtaaatatactgccacaataaatgtatgtgatgtttcatttattcaagatggggtctgataaactgtaggactaggagactaagaagagaagtcaattttgagtagaatgtgcatctttcaaataatattgctgggcccttctttggataccttgtttgactgtactcataaaatagccagagagtgactgttaagaccgtacacacttaatgggttttcaagaagatgggattgttttttcttggccatataatataaatgtataataaatttgctctctttgtaattaaaattaagagacagtagctcagctaggccttttaaatgtctatataacccaacaccaccataagtccagctcaattttttgtgacctgtttttctcatgggctagctcaaagattttttttttttaaggcagcagcaagatgaggttttaaaaaggctttgttagggcaattagacattttcatttttcaagctgattatagcatttatcacttacattgaaatttagtatttgcattttgcctctacgcttagaatgttacccaacaatatggtcaccacacaagttgattcacaggg

SEQ ID NO: 10470 - DNA, 1034 bp, Homo sapiens
gtagtctctaaagtactgaaaggaatacaaacagtccctgatttatgatggttcatcttacaattttttgactttaggatggtccaaaagcaatacgtattcaacagaaaccgtacccatacagcctttcactttcagtacagtattcaataaattccataagatcttcaacaccttataaaataggctttgtgttagatggttttacccaactataggctaatgtaagtgtcctgtgcatgtttaagggaggctatgctaagctgtgatgtttggtaggttaggtgtctcagatggatttccagcttacaatgttttcaacttagggtgcgttgattgggacatagccccatcgaaagtcaaggagcatctgtatttgatgtcaacttgccgtatcaacttgttgtggctttaaaaccattaagccattatagtaccattaaattttttttccaactataaaacagttttagattgggagccattcagagcctcactatgatttgccacgaggttccttggagtctgttttctttcctgtgtattgatagtctgaccatatatttctgtttcaactattgctattggcaagcccctgttccttttttttattgtgtcaaattgtccgtgtggtttcattcatgaagacatatgctgtcatgtggaagcataaattgcataatttaaattgtccctggaatcctttgtgaaaaagtggagacagccagccattaccccgggtaagagtccttcacacagattcctgtcaaaaactagaatagaagaaaaccctgatgccatgctggggtggcgggaggaggtgggggagtgtgagtgagtagggagtgtttgttctgtcttgtttttaactttctttgtaattagttgactttgtgtgttaggtgtacataaacttacccatttctgtgatagtattagcccctgtcttccagttggatcaaactttttcctgtaatcatctcaggaaagcatgttgtgtttcccttcctagttagcgtggctgttgttttgtt

SEQ ID NO: 10471 - DNA, 1049 bp, Homo sapiens
tgtttacagggacttaacacaaaaacatgtgaaagtaattattctgtgagaaaaaaatatctcttgaaagagtaacttttccgctgcattttgttagctggtgagactgcaaggtatctgaaccgtgtgccctggtacccacccctgtctctggacttctttatgaacactgagtatttgactccccacccttcatggtcagctccttttaacaccctagatatcattgctgtccttttcattgacatgctagagacatttccaattttcatgggagtcagtaagatagagatgatgaaaattcagagtgttcaaagaaagaggaggcctcatcagttgatagaatatacaacagattgtctaatctcagttttcttcacttttctacccattacagtggaaaaaagaacccttaaggaagccagtgcttctcaacattggttacaaaaccatcagtgccagcacttaatttaaaatcttctgaaaatccatcagttggttttcatgtctcactctaaactcagctccaaccaggctgcttcctagattcttgtctgtgtgtgtttctgttttggctctttgttacttccttctgtaaacttaagtaaactcagtttgttgacctagtgaattgattctttccattttctatactattcaccagcatatcaaagatgcttcttcctaactctgatttccagagtaactgtgctatcagcttttcatactaagaactaggtttttaccttttcacatttcttgcctgctacccagttcgtaagccaaattagactcgtactcttgtgaagtgccctttagatactagtgtaaaatatactgcgtaattctccattgccctacatatattaaccctttaagaaaatatatcaccagtctattttatcttcgcagaacttgcccaggtatgagccagcatttattaccactcattctagaaggtgccagttaggtagctatccaggtttacattttaaggcagtcgagaccttattcacgtggtatataaacaaccacatttctcttttata

SEQ ID NO: 10472 - DNA, 1021 bp, Homo sapiens
tattgtattgtggacatcacacactttatgtcaacacttttagaataggtgcagaaataggattataggctgggcgtggtggctcacgcctgtaatctcagcactttgggaggccgaggtgggtggatcacaaggtcaggagtttgagaccagcctggccaatatggtgaaaccccgtctctactaaaaaaaaaaaaaaaatacaaaaattagctgggtgtggtggcgcatgcctgtagtcccagctactcgggaggctgaggcagaagaattgcttgaacccgggaagcggagattgcagtgagctgagatcatgccactgcactccagcctgggcgacaaagcaagactccgtctaaaaaaaaaaaaaaaaaaaaaaagaaataggattatagtatatcaggggaaatctcccaggaacaaatgttccttttcagtagtagatatagtaattgaagcaaaacagaaaaatcacattaactgaccctgtgctgggcagcaggcacctctctggatatagtttagttgtgtagtggagggagcgggacgtctttagtgctgggctcaggggtcagtgcacttggttcatttatatctatgctgacacctgcagcaggtgtgtaggtgcatccaaatgagtttccaggtcacaaaatgcttccctacctgtggcctccataaaaagtgtgaaggagcaagactgaacacatggcctgaatcaccgtatttctcattctgcctttcttttaaaaaggtagtttaaaatcactaacttaaccatttttacctcttggaggagaatgagattttttttaaacgacatccttttttggactcacgtgaggctgctttaaatgaaagtgtaaactgcttgtatccccatcttaaaggaacggagcctcccattgaacagaacagttgattcttctctgttaatttcatccaagtgtgtttgtgtgagagaagcaatttgtgaggaaaattaaaagctcagattgttgatcgatggtagatatcattt

SEQ ID NO: 10473 - DNA, 1023 bp, Homo sapiens
ccctgtatagaagcatagaacagagaaaattggaagacagcaagcttttgtgcaatttgtcatttatttcattttgtcttagtctcagtgtttaaagagaggtttagttatatggaaagctgacttttgtgaaacaccgtattccctcaagatgtttggcatctgaaatattgatttttttttttaggttttacagggagaagggtgcattgcattatcagcctaacactaggcacccttcacaccctttgaatatggtgattgctctctgaactacttatgggcttatacagaaagggaggaaacccagacgataagtcatgtttttaatgctgtagattgcaattccaaatgtctggtcctctgccctcatctgctatttaccttatatgtttcatacttgtggtttttaatttgcaattcaatataaatgtttgataaagatattttaatttgctctctgctttttagttagccttagaattaaaacaattatagctaaacctctgaaataaaaaaaaattcagcagattatggaagatcataagaaggtcctaataaaatagacagagagtgcatagatggtggtgatgctgatgaagaatatggaagagaaggtcatagttctctatttagcatttttggagcttaaatactttcataggcattacttcactcaattctcataataatccttttggagagataacatttatccattttaaaatatagaaacattcagaatttcagaggttttcctgttttcaccaccagtaagctcagaactacaacaaaaattcctgttttccaagtgcgatggtctcatttcttcttagctgccccctattagtgaaaaataagtcataggtaatgttcttctcacttatctctaatttcagtgatgattaatcagcagcccacacttagatgatactaatcaagttattgttataatggcaccagtttgtgtagttactgtgcataattgtctgacataggctttgcactggggagtcagcaggc

SEQ ID NO: 10474 - DNA, 1027 bp, Homo sapiens
ctgtgagcttactaggcatgcaaacgcctgggccccacctcgcacctgctgaatctgaaaccctgggaagggcccagcagacaggccctccaggtgatgctgatgcatgtgacaacgtttgagaatgcagatgtatgcaaaacaaccaacaaacacccttaaaagggtggcctggcatagagctaaggttcaaagcagcagcatttaactgctgcttttattactattaatattacttggtcctgtcatttatactaataatttactctgtgtacaagccctacattcttcatacttttttcattcactggtgaattagtgataaaaataaacattttctgacagataaacatttttgacatttaaaagatgtcatagaactggatacactaactcctatgctcctctggttacagtgctagagaataccagcattctaaaggttaaggttctaatgtgtgctttggacatatttagtgcttttgacatgtcaggaagcttccagtctggacagtgaatagtgctacaatttaataacataaatggagtctgtctgattctgcaaagaaatggccttccttggggcccagaatatatagttccttctgcagttacactcacagtatttttaatcatttcatgattttattatatcccaagtataaggtgctacaaagagtccctggtgctggcagtcactcaaaaattggcaaatctaaaaagtgaatagaacagcaagtagcccattagattatttttttctttattaaaaaaaaacttttttaaaaagaaaaactaccgtataaagttggaagtgttgattttggcatcttatacatgaaaagtagtcgtaataaagtgcctcaattgttggtgcttgttctgcagaaattatggctgtgcacaattgtgagggcttaactgggtttccaggaagtacgtaattcacactctaaatgtgacaagcatgactgcccataaacctaacgacttttttaagagaccaaaattcagaatgttattctct

SEQ ID NO: 10475 - DNA, 1045 bp, Homo sapiens
cctgtgattgctaacaccattatgaagattgacagtttcatcaagaaagcaaagaagaaaatctgcaggcaataaatggaggcagtgctgggccctgctctggttaccctcaatagtgcttccagagcactgagctggggtagggtcctttccctgcttcaaggacctgtggctttttttattgagcacagagcctgagaacttctgtggcccttttcctagtacaaataggtagctttaagacttaatgaggagaaatctgaagagtgcagatagagatttggttgtggtggtgaggattggttttttccttgcctgaaaaggatgacctgaaaacaagcctctagcattgtccagcaacctttccacctcacaggctgaaatgcatatcccaaagtctgcaaatactttagtacagtggccaaactgaagaagctcaagtgtaaaaaatcaagaatgttcttctaaggacacagaatatctctgaattgttagtagttatctatagctaataattctgggcactctcttaccccaagccagctgcgtcacaaatatgtgggctgttggctacaaggccagtggtgtgaatgattcaatgcaaacccatcaacactactggaaaaacaattcttcgtaaagacttactggagatgattcagtgccatcatcagcagaagcgagcagctgtgtgaaaccactgcttctctgagcctgggatgtgttaacgatatattctcagaagtaaataatccttttgctaacaagacgaaccctatttactcactttcattcccttgaggtttgaattcagcccggtgaccgtgtcataaatatcattctgacctccaagggggctgttcctgaatctgagttcttttgcacgtgtccttctcggaggttaaactgtccacccagccatgttgccttatattcgtcatattttttaaaggaaccaaaggggttaattggtttcttcagtaaagagacttttgccgaagaaagcaattttagaaaaaaaaaaaaaaaaaaaagaaagcaattt

SEQ ID NO: 10476 - DNA, 1043 bp, Homo sapiens
aataagcaattgaaatcaaaccctaaagcttatctagatgaattcacatgctcctttacctgcagaagttggctggaattatgcacaccttatgtcaatgttgaaaagcatcgggtaggaagtgtgattttcagggaggaaaatagatcttgaaacccaccaaaatgtactgtggttgggggacttttctggagagaacacaacttctatttaatgggtatgaagaccaacactctagtatgtaatgtcagtgtgtgtttactgtgacactcctttgtcatgtatcttcaaagatggcattgaatttatcatgagctatagccatctcattctttctccaggcgatgttttgataaatgttgatgagtttataactgtaaaaccaaatgacatttatagtgtgatacacactttacccattgcataattatatctaatggcttcgcatgtagaaaggcatttaccatttgcttttgtataaaatgacaatctaaaccccagggctaaatttttttttttaaacacgatgataaagacttaattaagaaccaaatacaatttatttttgtaactggcatttaaggtacctagttctttggttaaatatgtgataaaaatcatgatacttctagtaacaaagatcagtgggtttcatttatttccctctgtctgaaatattggtgaactcacttaattatcgaactgatatctggtatgacttcttgtttctcatttctagctaaaagagctattttgaaaggtagcacagaatcgaataatgtgttcagttaatgaggaacatttaagagatgtttctgaatttaatatgatggaaaaaaaataaaccaccactgtagtatagacattctttatctagacagtgatgatgtcttaggcctcttggttgtggtcaagcaaggttttatttttagccatttagacattttggaatgtttatcatcatacagtaggtcacttaatagatcaaaacagttttattcttagtcttcatgtcagaaatagctcttagtatcttgttagga

SEQ ID NO: 10477 - DNA, 1044 bp, Homo sapiens
ctctattttattaccttataagaaccctcagaagaatagccacatttaatgggcaggaagcaaaggaggaattggaggtgggtgtggtacaaaaaaatgaaaaaagccagaggaagaggaaggcccttcccaaagttaaagggagagtgctgaggtgggagtgggtcagcacagtattaaatactagaagagatggcggtagatgagaacgggctattgagtgtaatgtttaagaagaaattgtttcaagagagtagtttcagtagttcagttgcattaaaatggtaagagctgaaggaaggagggtttggtgaggaagtggaggctgtaggtgtacacacaccaccactggagaacaggctgtgtttctcagtggtgctagcagaggcctcctctggcaaatgcatgacttgagaaggcagcccaggttccttgtgaagagtctagaggggtgtggtaggggtcaccagaggctacgtctggagaggcaggctcatcctgatcatgtttcctggccagtagccatctgagcattgtcctggttattacctgcactgctgagatacttcaccccacctaatactccaaactgaacagtggtgggtatcaggaagccatcatgaatctcaatatctgattcttgcttgtgaaataacttaagatatgttgttttaatttccttatttacctctctaaatcacagaatctgaaccctgtgagttcagaccgtagagtaccttcagattctaaatcatagagtctgaagatcatttatatagaataactggccttatgcctgagaaataaaaagtttgcttcttattctgtttctgtgcttgaatttgggacttaaactacagttgttgattactaactgaagtctgctaaatccttggcttaggcagcataataacacaactaatcatagccaataataataaatattattaagcaataatgagacaaaaactactgtggttgtctcattcaataatactggctccagggcatttacagtataacattttgtatgtttgcttcaaa

SEQ ID NO: 10478 - DNA, 1035 bp, Homo sapiens
tttctttttttaggtaagaaaatgagcatttatttagaatgagaaaataaataacaacaaagtacaaactttacaaagctaacacatactataaacttcacaaaatctagaaaatataatggtttgaattgcctgatatgactccataatacctttcccactgtattttcgtaggaaaaatctggaaaactcccatcaagtttctttgatatatcagtttaaaaaatgcacttgctatttgtaggtttattataggtttggggttacaaacatgggaatctgagaaattctatttcacataatgactataagaaacatttctgtttttctgaactttaaattcaggaatacatgtgcaggtttgttacataggaagacttgtgtaaagggggtttgttgtacaaattatttcatcaccccagtattaagcctaatactcattagtcatttttcctgatacgctccctccttccacccttccccctccaataggccccggtgtgtgtggttcccctctatgtgtccgtgtgtagtaatgaacattttcaaattaggtactaggcaccgtggtaatgtgtttgtatgtgtgtgtgtgtctgcgtttactgaatgctttacctgatatcatttttacatgtacatatatattttcatttcattttcaaaattatacagtaacattttattttgtgtatgtatagttctgaagttttaagaaatatatatgttctcaagacacagaacaattctgtcacaacaaaaaacttcctcatgatctgtgataagcattttgagtgcattgctatttaattcttataatgttatggggtgtgtactgttatctcttttttactgttttatttttaatttctgttgaggaaggtgagacttagagaaattgaataagccaaagtcacacaccaaatgaacagcgaagtctggattggaacttggagctaagttctgtctaagcctagaattccagcttttatgcactgtatcatattactgctcacagaacatggcttgggggct

SEQ ID NO: 10479 - DNA, 1045 bp, Homo sapiens
tctttgcagtttttattcctgctggcagggtttgtgaatgaacgcttggtgggtgtttttgttaccatttgccttccactggtgctatgtctgtcatacaagctggctcagagaattccagttttaagagtgtctgagcacagaaattatgggcactctgtttactaccatatccatgacatccagcatagtaccttggaaagccacctaaaataaatctttcatatacaaacgaggaatgagcactttctacatagtcatactgcatagtcttagtcatagactcttgattctgagggctcacttatctactctgcttatgtttctcagaaattagtaaggctcacttgtattacttatagtgaagcatgtcctttgaagttgaagggcaggggcaattattttatgcgtgtgaactttttatattcatagaagaaataatttactggggatgagaagaaaaggcaaccatgttgatgcataatagggacccgagctcattaacttaattgtttagtggctcctgactgttcttctctcccccagtgtccccccatgtgccctttcacagtatttccccatgagctttgagtgaagaatcctgagaagggcttctactcttgcctttccctctgctaatacgagcatagtggtggcgtttgtacaggttttcctggggtactagttccccagtggactcacttgttgaccttgaagatgcatggtcactcatgactagtcagttgagaacattatccataatattgttatcaatatcttgcatctctatcagcagttctctgggattgtgttagtgaggatagagagcttcacatttacaatagcttgaatgtttggaaattttcttaccttcactcactagtctagggtgggtggtccagatctatggatgggttggcttcatctagttgttcagtgacctaagttaatggcagctctgccaccttttgcatgtcactctggaggcactctggtgttactgtttcagcttcccagaaggaggaaggagaaagtacaggaggag

SEQ ID NO: 10480 - DNA, 1039 bp, Homo sapiens
atgttatgtacgcattttgctttcaaattaaaaaaaataagtagggaaggttagctttacttttattgtgtgtgtgtgtgtgtgtgtgtgtgtgtgtgtagtgtgtaataggatgtataatgtaatttcaaagccctctgatgcaatattttgaaactaagttggtagtacaattaaaacatatctttggtcatagattacttggccttatgccattttcataggcaatgtcctacttatatagcctggattggctgagaaaaataattgctgctatgaaataattttgcaattaccactgtaattaagggcagtttgttaatgaaagtgcttggtgaataatgactgcagggcactccatcttgcagcttcagccagatgattggttcatgtggtggaggtagttagggaattagtgacacagctgtcatggttacaggatggatgtaaatatcctttgcagttgatgatgaagaacagtcattagcctcctgccccttgggaactggtcagaggaacaaaaataaacttaacacgtgatggtaaaagccattccttatgtctccttttcttcagtatgaacaattaacgttctaatagaagctgcagagagcatgtggatgaaccctctccactttacaggcgtgttagtgtgataaatgttccttcgtgtagggcattggttgttcacagtttataaccactcttattagcttataggccagttaaaaactgctctttagagacccacaggccctatttaaatttttcgtgttcatctccaggtgttgtgtattcagtttgaccctttaaagactgtccacggttggatttttgcatgctgtctgcaaggctgcaggggcaattgaagatcaattttctgtatctgggcttacttgcttgtgtaaaatatatattgttatgaagaagacctagatgcttatctgatcctcctttatagtttttaaaagtcattgaaggttgaggagccgttttttccgccttcttaaaataaatgtcctaggtgtttaagtgtgct

SEQ ID NO: 10481 - DNA, 1079 bp, Homo sapiens
tgaccagtgcatgattttaaaacatcatgagtggctaaaagatccattcaaagtgcaggattgactaatgaattttaatgtgacagagtatgagaagttctttgatgtggtttcagattccacaatccaatttaaccatgaagaagccaccacttgttgagttttggtatagtatcaaaggagaataaaaccataattatctgaaaagactattaaaatacttttccttttacaactatatatatacatgaggctattttatttcccatatacttcaacataaacaatggatcacaacagattgaatgaagaagcaaatgtgaaaagccaattgttctctattaagccaaactttagatttgcaaaattcttttctaatttttttgctgtggaaaatgtagttattttcacaaaaacatgtcctttgtgttaacacgcgatgggtttattaagtggattcataagattctttaaaaaatattatcagttttatttttaagagtttaaagtgatcctgacattatgaactttgagaaccacacccctgacgtggtaaaattaaattttcctatgaatttttatggtttaccagtgcatgagattgccatcttgtgacaaaatagggaaatgcaagtatttttgaaaagctcatctttaaggacttggagtgatttctaatgactacttgttggaaatttatcaagagaaagatataagttcagatttccaagggctatgtcttaaaatatatgtgccaaaaatattaattttcagaaggtaagcaaaaaacagttaattaaatgcatatttctaaagggctgacattggtttggggccagtcttctgttaagaacacatttagtttttatgttcagtgtgtatatttcctattacactgagcccctttgtatgtgatgttatagactactcgaatgtgtatttactgttcaaaacactgataaatgtttgtggtgatattctggtggcatatagttgtccccctttattctcaggggatgtattccaagatccccagtggatgtctgattctgaggatagtattgaaccctatacagact

SEQ ID NO: 10482 - DNA, 1039 bp, Homo sapiens
gttgaccttttggattcaaattctaactccatcttttactagttgtttgaccttggacaattaacttaatttttctaagcttagataacagtctgtaccttatagggctgctacgagaactcagtgagataatgcagataaagtacattctcaatgcttgacttcaaataaggacacaatacaagataatcattttcattattaccatcataatcttcataatgaagaataatatgataatgaacatccatgcacataaccccttgtatctcttcatgaatgtttccttagggtaagttcttagaagtgaaattgctatcttcctcttgactttctacaaggtctttaatctttacaaagttttgtatattgaaaaagacaagctcttattgaacacatagtaggtgcaatttaccagcataggcagaggaggttatataaggttgaacatttctttgtctatattgactttgtaatctagtgtgagagttaagaaatgaaactaactgtggtaaaatatgcaatgtgagatatatctttgaaaagggacaaagtactatggaaacacatcatttgaagagagaaatttcagcagagggaaatcaggaaagacttcatgcaagagatgaaaaaattagatatctatgatgcatagtgttttgatagatgaagatagtgaagcatatccttggcatagcaaggtttgtcatatggccatttctgtcactggggccttagggtttaagtgcatatactagcccttgactttggagacttagagaccggtaaggagcttatcttctctccactcactctgttcctccatgtagaatctctttatcttccttccatctccttcaggacacaggcaatgtttggatttcctagtttctctcagaaacatgatactacatcgtgtattacttaagacagattcaggccagagtacacatacaactcttgagttggtcaaattggaattcagtttctaggttctccatgattactttaatctgatttatctgaagaaaagttaatc

SEQ ID NO: 10483 - DNA, 1029 bp, Homo sapiens
tgacaataaatacatgcactgagtctagctcacggtttctcaaacttcagaggcccatgacccttcccgatgtagttaaattgcccagatgaccctcctgtcatatatttttaattgtaaagcacttgaaattaatcatgttttatttctttttaaataagcacctcaagagcagtggtgagcagttttgctcacggcacttatccactcttaaagaaaattaaagattggaaagggccttgcgtctcagtggcagcaaagccatctacatgggggaaaacatagcagacaagagctgcgtttgatactcctctacacagtctcttgcctgtgcacttagtgaaaattggcaccggtgaatataacaaagtaaaagcattttgaattattaccgcaagccttcaagtggtcataacccaagatttcaagtacctcagtgaagggtaaggttttctacaatttgtgtggtaactgagtgcctttaatttaaactacacggagctaatctttaggagaattggaatctgcctctgaactaattatgatttacagaaattgataatttgtcttctgcatgtgtctgcaggaagaaattactattaaatttgattaacaaatgacagatttcagcctagtaatttaccatctttattagcaaacttagaaaacttcttatagtaatcttttcaatcatgtcaactctattctggtagttaaggtttatgtagaagtaacccatgtgtgtggctttagtaagaacctaccttacctttaacaaagaaatcttggtgtggtttctcttttcaataggcaagcactactcaaacgctcacactgatttcccatggtacttagaacttaataataggtaattaacttccaaaaatgaataatctgttcttttgaatacattcctgcactccctcaaaatatatgaaattgtgtaaaaggaagtagagcattatatcatatgttcgccttatttttcgtgcaccactttgtcaaatgtttttctttctcttcaaacag

SEQ ID NO: 10484 - DNA, 1846 bp, Homo sapiens
ttttctcttgaagataagacagaaaacaggatgccttgttgggtttaaaaagtaaaatacaaactgtcagttttctgatatcaaggtacatttttttgagaatcaacattccaaatggccaatctggttaactctcagtggtataagatagggcaaaggaaattgactatgttttggtacttggttttattttattttatactaagtgcttcttaggcaattctgcctcatcaatattctgtagatgtaggcatcattaacctcagtgaaaagtttattacaagccactgttaggacttgtttctgaataatatttctccagtatttaaatgaaacaaactacctttacccaaactcagtcaacagagtttaagattattcagaatatggaaaaataaggtttagggcctgggtgctgtggctctcgcctgtaatcccagcactttgagaggccgaggtgggggcatcacttgagcccagaagtttgagatcagcatgggcaacagagagagacttcaactctaccaaaacaaaacaaaacaaaacaaaacaaaaactcgggtgtggtggtgcacacccatgtcccagctacttgggcaggtgagttaggaggattacttgtgcccaggaggtcgaggctgcaataaggcatgattgtgccactgcactccagcctagggtacagagtaagaccctgtctcaaaaaaaaaaataataataataaggtttgggtgtgtgatttggggcagtgtttttggcatgcacgggtgtattgtgggtgtgcatatgcctagacagacatatgcacaatctgaagacataataggcattttcctcgaaataaatttggctcttagaattgctttcttctcagtcacatgcaaaatatggtgaagaatcataagcagtcataaatactggcttgtatacaccattcagggtcaccttcaacaaaatacaagtcactcaattttatccagcagtcacagtgctggatctactgtgggactcttaaaatgtttcaagtgagagctggatagtcataggtagaatctgagttatacattctgatttcctttatgggctatagattaactgcaactctgatactacttcattataatcctactgacttctttctggtaagagaattgccaggtacccagctctgaatgtcctgaatcctgtcagtagctctagtttataaaggatgatttgctaatgagatttcacagacaagcactagatattgacggtgattcaatgttgtatgttgtctgagtggttgttttgcttcagggtacttttttattttccatttctttagcaacctctttccccaccctgctcttgcagaatttgagatcaagaagtagggcattattaattacatatagacattatagaatgttttgggggttcttaatcaaaatgtaaatgatagtttaaaacatagtttgaatactctgaatgcctagtacctatgtagtcagtaaatagtgattgccgtgaggactacaactgtatcaagacagttttatcctagtgttcagttaaaatcttaaaaaacataaaataaaattcttgctgtattttatgagtaggttttaggaacctagtaagatttttaaggcagaggaacctttagaaggggctcaaggtcacagttggcactcctgtgaaaacgtgtgaattgccttccagacacttttattttgccttaagactgcaactatgttctgtctaggggttctgctgacagcacgaccacacaagtacagtttcctttctgtgcatcagcacaatcagagattgcaatgctgcttgtggccattaggatttagtc

SEQ ID NO: 10485 - DNA, 1065 bp, Homo sapiens
ctgtcaacgacttaagtgttactactgactgacagtgacaggattcaagaagtatcatagataccaatatgctatgtcacaagtataatatgaccagagtggatgtggtccctgctaaacaagttaaacaaaaaggcttttttttttcttcctagtgctttatattttcccccactatagaaaatgcatgaagactttttaaatggtgacatttatggccatgatagatgtgtgcttctacaagaccaagtccaggtgtttccattgggaatacatggaaggaattgatttaagcaagtgattacttaaaaaggaaaattaaaagagtggaaaatggataggagagaatgttaattgggagggtttcaagtataaaggagacttaaggatgggcataaatgtaaatgttaggaacacatttgaaataacttggccttagaaaagaggtttatagaagcatataatttaagaactgtaggttttgaaactgagacacactcattgccagacagaataagaatgaacatatctgaaatttcactgagaaagatcacagatatacagtcatgtgttgcttcacgatggaggtatgttctgagaaatgcgttgttaggcaatgtcatcataatgcaaaaatgtagattttttttttttgtggatcatagagtggatttaatcaaacctaaatggtgtagcctatgacacgcctaggctatatgctacagcttattgctcctaggctacagacctgtacagcatgttactgtaatgaatatagtaagcaattgtaacacagtggtatttgtgatctaaacatatctaaacagaaaatgtccagcaaaaatatggtattataatcttacgggatcactgttgtataagctgtacattgttgaccgaaagttgttatgtggtgcatgactgtatttaaaattataagaacacacaatcccaaggtcatttgattcaggccccaataaagcactaaaatagtccaagaatcttaccttttcccattagtgaatgaaggcattcttcagacttcctagttgaactgatgcaatg

SEQ ID NO: 10486 - DNA, 1177 bp, Homo sapiens
tttagtgttgatgcaatgtatcttttttcattattttacttttaacctattagtctttatgtttaaagtgattttcttattataagtatgtagttgggtctacttaaaaaaaaaatccattagctgggcgtggtggcaggtgcctgtagacccagctactcaggaggctgaggcaggagaatgacgtgaactcgggaggcagagcttgcagtgagcccagatcgcaccattgcactccagcctgggcaacagagcaagactctgtctcaaaaaaaaaaaaaaaaaatccagtctgacaagctctgccttttaattgcgtgtttagatcatttacttttaatgttcttactcccatgattaatttttaaattatcttactatttctttttatttgtctcatctgctctttgttctccttttcttctttttctgtcttattttgtgttgagtattgtttattattccagtttatctcctctgttggtttattagctgtaattctttgttttagtggttgttgtagagcttattgtatatatctgtaacttatcaaagtcttgcaaatgatgttataccactttatttgtagtctaagaacctcatgactgtatgtttctattttcctctctcagcctttctgttacttttgtcaaacattttacttttatgcatatgctataaaccccacaatacattattattgtttattcaatttatcttttaaaaattaaaaataatttaaaatatcttttaaataacaaaaaagtcttacatatttactatatataaagtgcattttttggtgcacttttttcctccctgtcaacctatatttctattattttccctctgcctgataacttcctttagctttgcttgaaatatgggtctgttgctgatgaagtgttgctgcttttattttgcaccccatctccttttttataattgttattgttcaggcaggacagtaaatcttgtccctgttaacttcattttggtgagaaatggaagtcttcgttagttttaaatgtaggttaagttgtcggtagttaatgctgaattctttaatagctgagttgcagtaacattaggtattcactgtgggtgcctctgacttccttcagaggtcaatatatagggatcagggtggataactataaaatccaggttgtattcc

SEQ ID NO: 10487 - DNA, 1078 bp, Homo sapiens
tcccatctgcatttaatgggtcagttgtttctaacttgttcttttgaaatttttaattgaaaatctgttttttttttttttggaaagcacattttacaaataaaggctgttcagctaggtggctaggtggtaaaaactaaaatgagtatgaatgtatgttttctgtaagggttctgaaaacaataataggatctctttaagctctactgtatagggaggcgagtgatccatcaaaagcacagtcttagatttgggtcttctatttagattaggaatgttaagaaagatggatggtaaatgtcttttagctgtattgtccccaaaacatgaaatgaaatctaaagactctcaaagaaggtttcaattacactagcaaatgacttgaacaaggattgggtaaagggaggtcacgggccagtggaatgccagttgtggatttatattgtttaaaatgaaaacattatttccattaacccctttccactaacacctccaccagagttattttcagactgtacgtttgtaggtgttagtcatacttgatagaaatgccttatcacaagtgtgaattgcacagcctttccatgggtatatattttttccttgtccaatacacaatccagggtttcacttggctaatcctctagagaggtactggcatccctgtgttcttcaaacttgattttaaaatgtagcagtaagctacccagttgcaaagaagcatttgtaaatgttttaattaaaaacagaatgaatggattctgtgttgtggttttctgtgataacagccaatcgactgccaaatcacactgtgtacttgagtttagggagggaagagtctaggtttaagggtgactctcaatggatttgcccttaactgtcaatgtgggtttgagtgtggtttttgccctctcactgcaaatggagaaaagagttggtaagcagaagatgaagcatccttttaatgagtcggctatagtgtgcactcagggcagacactttaaaagagcaccattaatttgaataaaacaggagaaggtaggtactttgtacatccataaagcactgaaggggataa

SEQ ID NO: 10488 - DNA, 1034 bp, Homo sapiens
ttttgccttttctgcttgaataggaaaagctttaagaaatcattgaacttaatgaatgattcatttatttaacagacacttattgagtatctattacgtgccaggcactggagtaaatagacaaatatctccccctgcatagaacatatatttgagtggggagtaagaaataaacaattaacacaataaatgaacaaattgtatagtattttaagaatgacagcaactatggaaaaaaataagcaaggtaagaaggactaggagtactagggaaaggattacaattttaaatgggatggttaggactggctgtaatgagaatatgacatgtgaacagaaacgacttgttgtttttcttgtatagaaatatttgttctttgtggtgatattgttagtgtgggcctgatattttgtttttttaataacacagatttaattctgtgctctgtgggtgatctcctttttaggatagctaaaatgaatcaccttggtccagagccctgctgtacactgttgaaggggtctgtaagttgatcttcctgtctgcatgcatgggcgggaactctgcctttaatcaggctccaccagctgtagcaccagagcactgagtttgtggcctttgtatgtcagaatgtgcatagctgtaagagaagttttgtcagtgtgaatctgagggtggagtgagatttcttcaccacctggtgagaaataatctgtcttgcagtaagtgctagtgttgttttgttttggggaaaaaggaaaaaacatttttcatgatgcaggtgttgaaatttctggattcctctctccctcccgcatcctcctcctcttctcttttgccttttcctccttctccttttatttctacttctttttcttgcttaattttagaatttgattctgttgctggatgttatttattctctggcataaccattgcagttcgtttttggagctgtgctccacggccattcacattttagaatggaactgtgttgttttgtcattcatcactcaagtctgaaagaccattg

SEQ ID NO: 10489 - DNA, 1078 bp, Homo sapiens
catgattggcagtttttgtgttaggtacccactctgaagtgttccctatcgtttagaaggtagaagtagtcatcagtgactgaagcctaatttagattcttaaatcgaaatcattgttgaagaatactgctcctccactacagacgtcttgtgcatatcatgagtgtcttcatcagagaacaagctctcacccggtctctcataatataaaagcatttttaatccctcttaacaggtgctgccgcagtttatttataactaatgcattaaaatgaaaaatactgaaagggtcctaagtggaaggtggctattgaaatattgccatatttaaattatagaattttgtcaggctgatttgtggaaaggacgagtcaatgttggctggtaagtgatgtactcacaggtttcctgtaagttcgggtggtgctttccgcagtgtatataagtgggttgtgcaaaatctgagacctacgattcaattgattttcctttgcataatcataatcatattcatatttggtcagctttcatgctctttgatatttctgatccttatgaagcatgacaaatgttagaactcttttggccttctagacttattgcagcacaaaaactcgagatcctaattgaaagaattttgaagagtgtttcatttaacccttttcttcctcgtccaaatttgatctcacacatggggaaggtaaatgcacaccttaatattggtgcaacatgttattctgaagacacgtgctaaacatttgaaagtcttgttgatttatatttccaccatgttttctctttcctgaaaaaccttagccagcgactgaagtagttgggttgtattaatggatgtttatgttgtcctgtgacagctggttttgctaatttgtttttacagggcagtttgtagtaaatgaatggcatgctgaatattttactgagatttcagattatctaaagaatattttccggtttactaattggtagataatgctgagtacattgatgttgacatgagcaaatggatttaaaatgatttgaagtgagcttcattaaaagatgctctaatcacagccag

SEQ ID NO: 10490 - DNA, 2603 bp, Homo sapiens
ctttttctggctatgcctccagtgctgtctaatagaacttttgtgatgatggaaatagtccatatctgtgctgttcagtatagtaaccactagtcacgtgtgactatttagtacttgaaatgtggctagtgtgactaaggggctgaatttttaatcttaattaatttataggtcagtagccatgtgtgtttatcggctaccatatagggctgcatagctctagactaaaaaacatttaaaaagccaaattctcatgctcatcggtatttttaactagtgagaggaggttggaagagggttgagttatattgatattcactccaaatttagtaggtttatattgaacattggactgagctattgtgggcttgtgaatttttcttgactctcctcttgcttttcatgtctaaaagcctttggaatatcttaatagtcctttcctcatttgaagaattaccccttttggccttagatgggtgtagctcatctagtgcatagattaatagctctagctttgtccttaggaaggtaaatcttgaaggttactgttacatgactctactgccgtatgccaattcacattgttatttttgtgtgtgtgtgatgctgaaagtgagtgaaatgtgaaaaaaacattattcattttaaatagttttgactgccaggttaatgcaactcttaagcagagcttcatgaggtctggccatagtaactgcttttaacttgatttaaagttcttaaacgttctgaattgcttcacctaatctttttatactgaacgtataattttcagactcgtctttattttcaaatccataactgacagctgctcaacacctcattcaaatagttttaagagttttagagaaaagttgggacagactggatttactgacatcagttggattgagatattgtggatttaaagatgatagagaaggagagggaaaagtatgaaataattattccgtgttcactgcttgcccaatgacagtgatttaaagcctaataactaacaaaactgagagatggcagaaggacatttgaattaacttccaaatcttaatataaggaatgagtattttctttgaaaacaaaattttcatgtgtagtcctattcgttttattatatttttaaaaatattaatgcacagaaatgcatatatgccaaaacctcactacaacctttttcttggcgtatatcttccagattctgtgagattgtcagctccttaaaggagctaactctttaggggactccatgatgtctagtgcacagcaaacattttccaaacagaattaaccatcttataagagaaacacgtttataaatacctctacttccaatgacaaatgaaatcatcttgtgattcaactcaagaaggctctgggctacagtgaatatagagaagcttcaggaagtactgtttaagagttaaaattaatgtgactaaattttgtcctcatccttttgagaaaatgcatgcatgtctgtgtgtgtatgtgtttgtgtgtgtgtatcacttactatgtgctagacactgataagcactaggtttacaaagatgaattatataggctctcttccatcaaggaacttatattttagatgtttttgcaggacacagtaaaaataacaataccatgtgccaagaaccataatagatatagttcaggagtgctgtggaagcatagaagaggaatgtctaactcactatggagacttagagtcaggaaagacttctagggggtctcttgagttgagccttgaaaggtaggtaggagatagccagatagagacggtattagaggagtttttccaggtagagagataatgggcggaaagacaaaagcatgggggattctgggaactgcagatagtttgctatggctgaggggaatagcctttgaaggagcaccaaaatatgaagctggagagggtacacaattgtcaaatcatacaggaccaacttggtaataaagagaagtctgggttttattccatggagagtgtcaatgaggggagcgggagggtgcaggacgaatctggaggattagagactcaggtaggagagcagttagggagcagctgtggaaggccagctgaaattttgagggccagaacccaggtagttgctaggcagcttgggaggaagttggtttcaggatatgtttaggaaagtagaatttcataactgatcaagagagtgggaagaggaggagtctaggttaatggtcaggttctggcttggctgcctaagtaggtgatgggtgtagtaactaagacaggaaatttagaaagcagacagtgttgggattaaagaggatgtgcttgaccctgcagaagttgagctggaggcacattcaggtgaagatacctagcagcactctgtggcactcatttggagacatggccatggatgagatctcctaagaagaatgtatatggaagaggaagagaagctaaggacagaatgtcaggaacgtcaacaattaaaggtaggcagaagaagatgaactagtgagaggagtgaagaaggggctgtcaagagactttgaggaaagccaggaaagccttttgttttggcatctaagaaggtgag

SEQ ID NO: 10491 - DNA, 1029 bp, Homo sapiens
aatttaatttagtggtggtcttattatcagcttttttagggctataattcttagttgaagttgtttgttctcccataatgaatgaagagctatcaacgtgcctgacttttgtatcttgaaggaatgacttctagtgtgtttgttcatacttggttgttgggcatcattaaagagatttagtctagcagtccagataagagaatctctttccatttatttaatcacttcacagtcctgggatacctagactttgagtcattgctgaggctatatcgtcactttagagttgaagcaacaaaccaagaaacttatctctgaggtcatctgttcctcttcacctcagctttcatgagaggcttgtcttaaaactgagatatatatattcttagaagaggcatggtgaacatacggaaatttaaacctcagggtaacagttttccttgtacagtaataaagatgtatctggagtcagtggctacaggatcaaaaaatagatcacagtaatcggatcaaacctgagaaatggctttttgctgtgtttaaaaaaatgacatgggtaaggcagtctgttttgtggcgatgcttccactatttgtgtgactatacagtctgtgaaataggactggcaaagttaagcttataaagttaattgcctacaactgatctagctttaaacagaaagtaggtttccttttggtcttgtgtagaagaggggagagatttcatgtgtaggcagagagagtatgtgtttgctaacattaccttttaatttaggagaagtttggagtttgttctttcctgtgaatatagaggtggaaccactctaaccagagtttattgctgtaatattttttaaatgcgtttgtaacactgatgtatctgtgaccttgtgaaggagtttttgagaggagggggtggcaagccctttttctcactgtcataagtgatgcctactcaataactctaacttcctgacattattgggagggggaggagggcctctcataacttgtttttgtatgacttagt

SEQ ID NO: 10492 - DNA, 1331 bp, Homo sapiens
ttatggccatgattttcgtgaaaatttaaaacaatacattcatgaaaatgtattgtctccatttggtagtttgtatttgaatatggggatttcctacagcatgaaaattgtgtaattgactaaacaaattacaagctgtcaaagtaagactttcagacaaaaagtgaagtcctttagaagtaggaagactttttaagggtcacagtcagagggcctcatgtggaactgctgacttggggtgaatgagattggctcctctgaagatgatccaagagataccaccaccttagaggagtatttggtgcttgtgtctggtgcgtgtagttacctagttaccagaaaataataaataaaataaaataaatcctaaaaaatctacccagagagatggaagggaagtgctttaaaacccaggcctttattagctagtgttttcaacacgtttgactttgggagcagagctgcctggctaaatgaagttaccgccatcagtcactgccaggccagcatcgggacaggtctaggaatttagttacattttgcattttggtagataacatagagggtggattatcactggctcaagaaacaaaaaaatgaaacctttctttctcagtctacctgctaaatttgttatcgtaaggatcttttcaaagcctttatctgggagcaatatctgccagagttcttccttccttttttgcttgcctgacacccttcccttcagagttcagttcttgctagtagaaaaaggctatgcagcatgataatacagtgattttaaaagttgattatcttgaagtattttgggacagttttggggaatgggttatgtggtatatatttatttggctctttgctgaatatggctgtataaatccagcctcctggatgttacaagtcatccccttgatttcttcttttgaataaaaaaggagcattgcttcatttttcttgcagaaacccttatttaaacaatgaaaacttcaaagatagggagaaaaaaaccaagttaatttagtactaaattactgctcaaatggttttatcttttaaaaggttcaagtagagattagcttaaatacactgaatttcacttttccttgtacgtacatatcttgtgagcaaacttcattgtgaagagctctctgtcttctttagttttgttagtaatcacataattgttagttgctgtttatttccctttcctgaagcaaatctctccatctctgggccaggttggcaagtggaatacccagttaagattacaggatagtaaaacccagtgctttaatcaaactgcttactttacaagatggcaaaaataaaat

SEQ ID NO: 10493 - DNA, 1035 bp, Homo sapiens
tttcctctgtgaattcttaatttatgagttacgagataattgggttcagccgatgccggtgtggttacaacttcatttcaggtgatgcctctgactggatgggttcaataaaatgttcctgaaagagatccctcgtgctgctgcattgtaaaaagcgccagtgtcagttaaacgtgagcgtgagtaaaggctcggtaactggcgcataatagaggcaacaatagacttgtattggctgcaaaaaaaaaaaaaaaaaaaaaaaaaaaagccggggggcggtggaaagctgtggtcggggatattgctttttgactaaaaatgggagtcgtgcaatgacgcttggcagcagaagtaggattagattatgcctcccctgtcaagactgctcattgaaggcaccgggtagtagcaacggtactatatttgtaactatctcgcggtgagaagttgccttccctgcgagggatatatgctgacttaggagcggtctggaactcaaccgtgcatgtcaaagctacatgaaaattctgttgccagttaccatggaagcagcttcttgctcttgtgtacatccctgtttgtatgctggttatcagattgtgttcaaattagaaagtaattgggtatgatttgtagtgaggagatgagatgactttcttaatttttttctcttaatgcatatatatatatttcgtggtgagtttgagaggaggtcttggctcattccggggtcccataccccaggggtaaatttcaggtgggcaccaagggacttttcctcctcagttctgtttaagctttctcagaggcctccagttcccactcccagggttaaagaaacctgttggtgcatctgacttcattaggcttgtttcgtttacatccttgctgggaaagcgaattaggaccatcgtgcgtgggtcctggttctgttttctcctgtaactgaagccatccatcccccgcagaaaatctcctctcatttctcctgtgatgtttggatgaaatggatgttaatgaaatgcagtaaaaatg

SEQ ID NO: 10494 - DNA, 1034 bp, Homo sapiens
ttttactcaagaatgccctgatgtggcagtaaaaatattaattttcttaaatcttgacctttgagtacatgcctatttaatattctgtgtaataaaatgggaagtatgcaaaaacagtttatgctaaatatgttcatcttgaggaaaagcacatgtgcacttgagttgcaagctgaactagccactttcttaataaaacacccgtttacttgaaatgatgagtgatagacaatttatgactaaccagacttgagtatttggaaaatattttcttacagataaacaaagtgagactgtcacttcagggaaaatgactgacagtgtttgttgccatagataagactgaagtttttaagcatattagaatttgtgaaaatttgtattcctattgtatcagtcacgatctagtcaggagagaaaaaccacctcgcatataaatagggaaggtttaacataaagaatgaactatttgcaagaataaaagagaattctaaagaacaccgtaagactaagggagagttccaataaaggaagaaacttgagtgggggctgggagtcagaattcactggagttggtatcatggtagccccctgcatgacaggaagctactctgggccacagcccatccacagtcactaggccaggcctggcagacaggaaactgcttgtgatggtcaatggaatttgctggaagctgtcatggaggctggtgaacacgctgggaagcccagctgtggcacacacagggttcaccaagaagcccctctctgtggtcctaagaggctgcccccagggaggagctgcactgatgggtgaactttccataaagccactctccatggtgccaagggaagctggtaatgggggagatgccagctccaataaacatgacatcacttagtatcccatgcactgctggctaccatgcaccaaggagaaagctgagaagatcactggaaccaggaagaaaagccctttcctcctccagtgttcttccagtgctgtctactgacaaaaagttccaattgaccag

SEQ ID NO: 10495 - DNA, 1050 bp, Homo sapiens
actgggtgtgggggtggacagagggacagagcatttgtgggaatctgactctttgttatttgtgtttaggccacaacgaagacctaccctcaaacagacattttcgtcacgataccccggattcatctcctaggagggtccgtcatggtaccccagatccatctcctaggaaggaccgtcatgacaccccggatccatctcctaggagggcccgtcatgacaccccggatccttctcccctcagaggggctcgtcatgactcagacacatctcctcccaggaggatccgtcatgactcctcagacacttcacccccaaggagggcccgtcatgattctccagatccttctcccccaaggaggcctcagcataattcttcaggtgcatctcctaggagagtccgtcatgattcaccagatccctctcctcctaggcgagcccgtcatggttcctcagatatctcttcccccagaagggtccataacaactcccctgacacatctaggaggactcttggctcttcagacacacagcaactcagaagggcccgtcatgactcccctgatttggctcctaatgtcacttattccctgcccagaaccaaaagtggtaaagccccagaaagagcctctagcaagacttctccacattggaaggagtcaggagcctcccatttgtcattcccaaagaacagcaaatatgagtatgaccctgacatctctcctccacgaaaaaagcaagcaaaatcccattttggagacaagaagcagcttgattccaaaggtgagcatatgactgtccatgagagggatgtatgtatccctgggagctttcttttggccgtttagttgatttattaggtataagaatggaatttctttgggaaagttttgaaaagtgagaggctgggtttgggagagttgaacaattatggtggcagggaggaaggttttcatatgtctttttatgtgctcgctccaccccatataaaagtacaatttatttgttgcagaagctttggaatgtacagaagtatataaagataaaatg

SEQ ID NO: 10496 - DNA, 1029 bp, Homo sapiens
tcctctaatttttctccagaatgtcttgcattactagcaatgggcatgtcagttagctcccctccctttccatcctgcctctgcccctaagtcccagcctaaccttaatcattatagaaaaccattgaaatacagagacctgaaatcctttacccaacattcaagaagtatgctttactttcattatttaaatagatcattggaatggcacagttagcattacagctgtgtttgctattaagagcttttgttttaaacttagtcccaccaagagtcagttcatccaagataagctcagtagtttccaagaagctttaactcagaaaaccaaccaagcaaacacaacttattttcaagtcccaggcttttaaagactgaagtcaaaagtgctaccaggaggatcctgtcaacataggtgtggctttgatagtcttcttgactatccttgatcaagaagaagtactcattcctttttctctccaattctagtccatagaatggtatgctctgacaggatagtaacccatattaagagagtatttatttttattattcttttttgagatagagtctcactctgttgcccaggctggagtgcagtggcatggtcttggctcactgcaatctctgccttctgagttcaagcaattcccctgcctcagcctcctgagtagctgggactacaggtgcacaccaccacacccagctaatttttgtaattttagtagaggtggggtttcaccatgttggccaggctggtctcaaactcctgacctcaggtgatccacccgccccggcctcccaaaatgctgggattacacgcacccggcctaaagagcatttactgacatcagtgaaagagatcataatactgggtataggacaatgttctagaacactgaagattcacagacatacatgagatatagttcttgcctgcaaagaatttatagtctaatgtgaatgattaagtacataattgaacatggtaccaaggataatgttagagcaatcagagacaaagtcttt
